United States Patent Application Publication US 2007/0134655 A1 - sequence listing, part 8

SEQ ID NO: 279662 - RNA, 32 nt, Human
uuucugggcuguagaacuguucauguccaaca

SEQ ID NO: 279663 - RNA, 32 nt, Human
uuucugggcuugcguuucucuccucuaguggg

SEQ ID NO: 279664 - RNA, 32 nt, Human
uuucuggggaagcagaacugcagugacccacu

SEQ ID NO: 279665 - RNA, 32 nt, Human
uuucuggggaggcagagaggcagggacuuugg

SEQ ID NO: 279666 - RNA, 32 nt, Human
uuucuggggagggguggagaacucacauuuac

SEQ ID NO: 279667 - RNA, 32 nt, Human
uuucuggggagguguguguuugugaaaggaau

SEQ ID NO: 279668 - RNA, 32 nt, Human
uuucuggggccaggaagucagggucaacuccc

SEQ ID NO: 279669 - RNA, 32 nt, Human
uuucuggggcugggaguaauacugacaaucca

SEQ ID NO: 279670 - RNA, 32 nt, Human
uuucuggguaaaaacugguucuauaaauuaag

SEQ ID NO: 279671 - RNA, 32 nt, Human
uuucuggguaccucugguuagcacuuucuacu

SEQ ID NO: 279672 - RNA, 32 nt, Human
uuucuggguucugcaguugggaguugguuucu

SEQ ID NO: 279673 - RNA, 32 nt, Human
uuucuggguuguuuuuccuuccacucuggggu

SEQ ID NO: 279674 - RNA, 32 nt, Human
uuucuggguuuggcuggaguggagcaguuacu

SEQ ID NO: 279675 - RNA, 23 nt, Human
uuucugguagaaaguugcugcaa

SEQ ID NO: 279676 - RNA, 32 nt, Human
uuucuggucggaaaugucuguggugccagugu

SEQ ID NO: 279677 - RNA, 32 nt, Human
uuucuggugaggaaugaaagggccaaguguuc

SEQ ID NO: 279678 - RNA, 32 nt, Human
uuucuggugcccaagacagugaccugcagaug

SEQ ID NO: 279679 - RNA, 21 nt, Human
uuucugguggaguugcuguaa

SEQ ID NO: 279680 - RNA, 32 nt, Human
uuucugguguuacacauacacacucauacgug

SEQ ID NO: 279681 - RNA, 32 nt, Human
uuucugguucccuuggauuuagggauaguguc

SEQ ID NO: 279682 - RNA, 32 nt, Human
uuucugguuccuguaaugcacuguuuaacugu

SEQ ID NO: 279683 - RNA, 32 nt, Human
uuucugguugccucucuaugcuauuguguuca

SEQ ID NO: 279684 - RNA, 32 nt, Human
uuucuguaaccccuguuugugguacgagauaa

SEQ ID NO: 279685 - RNA, 32 nt, Human
uuucuguaacccuugguugccagagauaaagu

SEQ ID NO: 279686 - RNA, 32 nt, Human
uuucuguacagauauaucaaaucacaugaaau

SEQ ID NO: 279687 - RNA, 32 nt, Human
uuucuguauagugagggcggccagcaggaaga

SEQ ID NO: 279688 - RNA, 32 nt, Human
uuucuguaugacauauacauauacuuguuuau

SEQ ID NO: 279689 - RNA, 32 nt, Human
uuucuguauuuuuaguagagacaggguuucac

SEQ ID NO: 279690 - RNA, 32 nt, Human
uuucuguauuuuuaguagagaugggguuucac

SEQ ID NO: 279691 - RNA, 32 nt, Human
uuucugucacccagguuagaguagauuucagu

SEQ ID NO: 279692 - RNA, 32 nt, Human
uuucugucacugucaagcaaaacaaucaguag

SEQ ID NO: 279693 - RNA, 32 nt, Human
uuucuguccaucagaggacagcuguaugaaga

SEQ ID NO: 279694 - RNA, 32 nt, Human
uuucugucccuucuuggucucuuccagucguu

SEQ ID NO: 279695 - RNA, 32 nt, Human
uuucuguccucuuccuucuccauuuaugccug

SEQ ID NO: 279696 - RNA, 32 nt, Human
uuucuguccucuuuauggaauguagucgacgg

SEQ ID NO: 279697 - RNA, 32 nt, Human
uuucugucgcaggcugcgaggaaaggccccua

SEQ ID NO: 279698 - RNA, 32 nt, Human
uuucugucguccaggcuggagugcaguagcgc

SEQ ID NO: 279699 - RNA, 32 nt, Human
uuucugucuaacucgaagucuugaauccuagc

SEQ ID NO: 279700 - RNA, 32 nt, Human
uuucugucucccacgguguggucagugagcug

SEQ ID NO: 279701 - RNA, 32 nt, Human
uuucugucuucucgcugcucugugcccuuggu

SEQ ID NO: 279702 - RNA, 32 nt, Human
uuucugucuuuaauuaaccaagguguuaggug

SEQ ID NO: 279703 - RNA, 32 nt, Human
uuucugucuuucuccccugggcuccugucuca

SEQ ID NO: 279704 - RNA, 32 nt, Human
uuucugucuuucucccucuccuuguauugcuu

SEQ ID NO: 279705 - RNA, 32 nt, Human
uuucugucuuucuccuugugcccuuuggcucu

SEQ ID NO: 279706 - RNA, 32 nt, Human
uuucugugacaucacaaugggucugaucugca

SEQ ID NO: 279707 - RNA, 32 nt, Human
uuucugugacaucaugcugcaggacccuguuu

SEQ ID NO: 279708 - RNA, 32 nt, Human
uuucugugacugcuggccuucccuggagauca

SEQ ID NO: 279709 - RNA, 31 nt, Human
uuucugugacuucacuuucaccugcuccagg

SEQ ID NO: 279710 - RNA, 31 nt, Human
uuucugugacuuccccaagccgcaggugaga

SEQ ID NO: 279711 - RNA, 32 nt, Human
uuucugugagguaccuuacccaccucagcacc

SEQ ID NO: 279712 - RNA, 32 nt, Human
uuucugugagguggaaacagugguccugaauc

SEQ ID NO: 279713 - RNA, 32 nt, Human
uuucugugaugauucugagaaugcugaauaca

SEQ ID NO: 279714 - RNA, 32 nt, Human
uuucugugaugauuuguugagccuugcuggac

SEQ ID NO: 279715 - RNA, 32 nt, Human
uuucugugcacuguagccuuagugucaccuuu

SEQ ID NO: 279716 - RNA, 32 nt, Human
uuucugugccuuuccauuauuucuucagcuuc

SEQ ID NO: 279717 - RNA, 32 nt, Human
uuucuguggaaccucagaggccagccucgacu

SEQ ID NO: 279718 - RNA, 31 nt, Human
uuucuguggacaauguaacccuaaacacauc

SEQ ID NO: 279719 - RNA, 32 nt, Human
uuucuguggagguggggugggggagugguggg

SEQ ID NO: 279720 - RNA, 32 nt, Human
uuucugugguuuuugggcugauuccaaggggc

SEQ ID NO: 279721 - RNA, 32 nt, Human
uuucuguguaaaaacuggccacaaauaaauuc

SEQ ID NO: 279722 - RNA, 32 nt, Human
uuucuguguagaaacuggaagcuguucagggc

SEQ ID NO: 279723 - RNA, 32 nt, Human
uuucuguguaugaacugagaaauaugccuacu

SEQ ID NO: 279724 - RNA, 32 nt, Human
uuucuguguuauccuucuuaucccacuccaaa

SEQ ID NO: 279725 - RNA, 32 nt, Human
uuucuguguuuauacagaaucauggaaugcua

SEQ ID NO: 279726 - RNA, 32 nt, Human
uuucuguguuuauucauggaauuccaguuauc

SEQ ID NO: 279727 - RNA, 32 nt, Human
uuucuguuacucaugguuucaguuacucauag

SEQ ID NO: 279728 - RNA, 32 nt, Human
uuucuguuaucaaagcacaugacuaaaaugaa

SEQ ID NO: 279729 - RNA, 32 nt, Human
uuucuguuccagguuucuuccacccacgagca

SEQ ID NO: 279730 - RNA, 32 nt, Human
uuucuguugacagagauggagucagucauguc

SEQ ID NO: 279731 - RNA, 32 nt, Human
uuucuguugcuccacauccuugcuggcacuug

SEQ ID NO: 279732 - RNA, 32 nt, Human
uuucuguuguaggaagagagcgaggcaucccu

SEQ ID NO: 279733 - RNA, 32 nt, Human
uuucuguuguuguuucccagcuacaaccaacu

SEQ ID NO: 279734 - RNA, 32 nt, Human
uuucuguuucccaaggagcaggggugagcagg

SEQ ID NO: 279735 - RNA, 32 nt, Human
uuucuguuucucuuuucucuuaacgauuauca

SEQ ID NO: 279736 - RNA, 32 nt, Human
uuucuguuugcucagacccuguuuucauguug

SEQ ID NO: 279737 - RNA, 32 nt, Human
uuucuguuugugaauaaggccagcacucaaga

SEQ ID NO: 279738 - RNA, 32 nt, Human
uuucuguuuguuacggaacaugugggaauccc

SEQ ID NO: 279739 - RNA, 32 nt, Human
uuucuguuuuauuuaaaguaacugacauuuug

SEQ ID NO: 279740 - RNA, 32 nt, Human
uuucuguuuucuucucuuuucacuuuuuguuu

SEQ ID NO: 279741 - RNA, 32 nt, Human
uuucuguuuuucuguggcucuguccauggcau

SEQ ID NO: 279742 - RNA, 32 nt, Human
uuucuguuuuugucuguguccuaggucgguuu

SEQ ID NO: 279743 - RNA, 32 nt, Human
uuucuuaaacacaaauuucauuuccauuuaag

SEQ ID NO: 279744 - RNA, 32 nt, Human
uuucuuaaagaaugccuaaaguguaauaaggu

SEQ ID NO: 279745 - RNA, 32 nt, Human
uuucuuaaauccaaguuggccguuuuauuagu

SEQ ID NO: 279746 - RNA, 32 nt, Human
uuucuuaacacaaaagcaccccuucucuccua

SEQ ID NO: 279747 - RNA, 32 nt, Human
uuucuuaaccuacacauagucuauacauagau

SEQ ID NO: 279748 - RNA, 32 nt, Human
uuucuuaagccccagaaagccaaaaagaacau

SEQ ID NO: 279749 - RNA, 32 nt, Human
uuucuuaaggcugccuuccucucugaguacgu

SEQ ID NO: 279750 - RNA, 32 nt, Human
uuucuuaaguaucucaacaacaugucaaagcu

SEQ ID NO: 279751 - RNA, 32 nt, Human
uuucuuaauauacaaucuaucuuuuccacaaa

SEQ ID NO: 279752 - RNA, 32 nt, Human
uuucuuaauauaggauuucgcugugcucuuuu

SEQ ID NO: 279753 - RNA, 32 nt, Human
uuucuuaaucugaacaugaaggcuccauuagc

SEQ ID NO: 279754 - RNA, 32 nt, Human
uuucuuaauuauuggcugaaucugccuuggag

SEQ ID NO: 279755 - RNA, 32 nt, Human
uuucuuacagacugcauguaguuggguauaau

SEQ ID NO: 279756 - RNA, 32 nt, Human
uuucuuacagcuggaaugagggguggggagau

SEQ ID NO: 279757 - RNA, 32 nt, Human
uuucuuacccuuuuggacauuucuuuguugca

SEQ ID NO: 279758 - RNA, 32 nt, Human
uuucuuacucuaucauucugguguuuucauug

SEQ ID NO: 279759 - RNA, 32 nt, Human
uuucuuacugcaaccuucgccucccgaguuca

SEQ ID NO: 279760 - RNA, 32 nt, Human
uuucuuacuguuucucuggguuguuugucaga

SEQ ID NO: 279761 - RNA, 32 nt, Human
uuucuuagaaauaagcaagacagagcaggaaa

SEQ ID NO: 279762 - RNA, 32 nt, Human
uuucuuagaccaccuaagaugccacuuugaau

SEQ ID NO: 279763 - RNA, 32 nt, Human
uuucuuagcagacugcagucaauccacauuca

SEQ ID NO: 279764 - RNA, 32 nt, Human
uuucuuagccuuacuugaaucuugccuauaau

SEQ ID NO: 279765 - RNA, 21 nt, Human
uuucuuagccuuuuucuguuu

SEQ ID NO: 279766 - RNA, 32 nt, Human
uuucuuagcugcaagaauucauugcacaaugu

SEQ ID NO: 279767 - RNA, 23 nt, Human
uuucuuaggcuggagugcagugg

SEQ ID NO: 279768 - RNA, 32 nt, Human
uuucuuaggcuggccuuuaacuucugagcuca

SEQ ID NO: 279769 - RNA, 32 nt, Human
uuucuuaguacacaugagguggauauuugaua

SEQ ID NO: 279770 - RNA, 32 nt, Human
uuucuuauacucagucaaccacaacauggccu

SEQ ID NO: 279771 - RNA, 32 nt, Human
uuucuuaucaguguccuugacaagcauucaua

SEQ ID NO: 279772 - RNA, 32 nt, Human
uuucuuaucuguguuuguguuggcaugcaaga

SEQ ID NO: 279773 - RNA, 32 nt, Human
uuucuuaugaacagauauuuuuaacuuaaugg

SEQ ID NO: 279774 - RNA, 32 nt, Human
uuucuuaugcacugcacacucuggaccucacc

SEQ ID NO: 279775 - RNA, 32 nt, Human
uuucuuauggcagccccagcaaacaaaaacug

SEQ ID NO: 279776 - RNA, 32 nt, Human
uuucuuauggugcuggauuacuccuacagaac

SEQ ID NO: 279777 - RNA, 32 nt, Human
uuucuuauucuagaacacuuggagccugaacu

SEQ ID NO: 279778 - RNA, 32 nt, Human
uuucuuauuuacccuuuucucccuucccauuu

SEQ ID NO: 279779 - RNA, 32 nt, Human
uuucuuauuucaaagcuuauaaacuauuacuu

SEQ ID NO: 279780 - RNA, 32 nt, Human
uuucuuauuucaggagcuucauaggcauagac

SEQ ID NO: 279781 - RNA, 32 nt, Human
uuucuucaacugcuugcuuuucccaggcuugc

SEQ ID NO: 279782 - RNA, 32 nt, Human
uuucuucaaugagguguucgcagcagcagcca

SEQ ID NO: 279783 - RNA, 31 nt, Human
uuucuucacagcuuuuaccaugguuuauaau

SEQ ID NO: 279784 - RNA, 24 nt, Human
uuucuucagaagaauucuaugcua

SEQ ID NO: 279785 - RNA, 21 nt, Human
uuucuucagaggucacuucua

SEQ ID NO: 279786 - RNA, 32 nt, Human
uuucuucaggcagccggugcacaguggacuuu

SEQ ID NO: 279787 - RNA, 32 nt, Human
uuucuucagugaaaccuagaacaaaaguggaa

SEQ ID NO: 279788 - RNA, 32 nt, Human
uuucuucauacucugguucccuuucuacaaca

SEQ ID NO: 279789 - RNA, 21 nt, Human
uuucuucaucagugggaauaa

SEQ ID NO: 279790 - RNA, 32 nt, Human
uuucuucaucugagcagacaccagcuucagau

SEQ ID NO: 279791 - RNA, 32 nt, Human
uuucuucauggcuucugcuuuuuaaucuuagg

SEQ ID NO: 279792 - RNA, 32 nt, Human
uuucuucauguuggccaggcuggucucaaacu

SEQ ID NO: 279793 - RNA, 32 nt, Human
uuucuuccaauaggaaaccugauguuucugau

SEQ ID NO: 279794 - RNA, 32 nt, Human
uuucuuccaaucucucuuucucaaucucucug

SEQ ID NO: 279795 - RNA, 32 nt, Human
uuucuuccaucucccuugcaggcacagggcca

SEQ ID NO: 279796 - RNA, 32 nt, Human
uuucuuccaucuuuauucugacuagcuuccaa

SEQ ID NO: 279797 - RNA, 32 nt, Human
uuucuuccauuagaauacaaguuucaugagga

SEQ ID NO: 279798 - RNA, 32 nt, Human
uuucuuccauuuuaacacuuccugguugcaag

SEQ ID NO: 279799 - RNA, 32 nt, Human
uuucuucccaucucuucuugcugcuuaguguc

SEQ ID NO: 279800 - RNA, 32 nt, Human
uuucuucccauucuguucuguucuguucuccu

SEQ ID NO: 279801 - RNA, 32 nt, Human
uuucuucccucacugcugauucuuagauagaa

SEQ ID NO: 279802 - RNA, 32 nt, Human
uuucuucccuccagccaggguuucucuaaagg

SEQ ID NO: 279803 - RNA, 32 nt, Human
uuucuucccugcccagagccagccugggauug

SEQ ID NO: 279804 - RNA, 32 nt, Human
uuucuucccugcucagcuucugcucaggaguu

SEQ ID NO: 279805 - RNA, 32 nt, Human
uuucuucccuuccccuucuccccacaccugca

SEQ ID NO: 279806 - RNA, 32 nt, Human
uuucuucccuuuccuuccacggugucuguucc

SEQ ID NO: 279807 - RNA, 32 nt, Human
uuucuuccucacccugauuucuugcuuauuca

SEQ ID NO: 279808 - RNA, 32 nt, Human
uuucuuccucauucccucgucuuucccaaagg

SEQ ID NO: 279809 - RNA, 32 nt, Human
uuucuuccuccacaucuuguccuacuggaagg

SEQ ID NO: 279810 - RNA, 32 nt, Human
uuucuuccuccaccaugccugcagacuuuucc

SEQ ID NO: 279811 - RNA, 32 nt, Human
uuucuuccuccccugcucucucuccacccucc

SEQ ID NO: 279812 - RNA, 32 nt, Human
uuucuuccuccuccuccuccuccuccgggucc

SEQ ID NO: 279813 - RNA, 32 nt, Human
uuucuuccuccuucauuuuucuuccaaaauug

SEQ ID NO: 279814 - RNA, 20 nt, Human
uuucuuccugaucugcugcu

SEQ ID NO: 279815 - RNA, 32 nt, Human
uuucuuccugcuaaccuucugcucuggacugg

SEQ ID NO: 279816 - RNA, 32 nt, Human
uuucuuccuugacaggccuuggcuccaucucc

SEQ ID NO: 279817 - RNA, 32 nt, Human
uuucuuccuuuuucucucuccucuuuuccucc

SEQ ID NO: 279818 - RNA, 32 nt, Human
uuucuucggcucuguccuuugccgcucagacc

SEQ ID NO: 279819 - RNA, 32 nt, Human
uuucuucggucgucccgaauccggguucaucc

SEQ ID NO: 279820 - RNA, 32 nt, Human
uuucuucgguugucccgaauccggguucaucu

SEQ ID NO: 279821 - RNA, 32 nt, Human
uuucuucuaagggaggaggacaugguggagac

SEQ ID NO: 279822 - RNA, 32 nt, Human
uuucuucuagaaccagagaccagcaagugaaa

SEQ ID NO: 279823 - RNA, 32 nt, Human
uuucuucuagaguaacaaauguucuuuguuuu

SEQ ID NO: 279824 - RNA, 32 nt, Human
uuucuucuagauagcagcugucccaaagaaaa

SEQ ID NO: 279825 - RNA, 32 nt, Human
uuucuucuaugugaaacuugaaaugaggaaaa

SEQ ID NO: 279826 - RNA, 22 nt, Human
uuucuucuauuucaguuuuuca

SEQ ID NO: 279827 - RNA, 32 nt, Human
uuucuucucaaagugcgaguaacuuaaaaggu

SEQ ID NO: 279828 - RNA, 32 nt, Human
uuucuucuccaccucuucuuuuucucaugccc

SEQ ID NO: 279829 - RNA, 32 nt, Human
uuucuucucccuuuuugaaagaucuuuccuuu

SEQ ID NO: 279830 - RNA, 32 nt, Human
uuucuucuccuuugguagcagcucccugccuc

SEQ ID NO: 279831 - RNA, 32 nt, Human
uuucuucucucaacaggaaccugccugaggac

SEQ ID NO: 279832 - RNA, 32 nt, Human
uuucuucucucagucgaaguuugcuaagugag

SEQ ID NO: 279833 - RNA, 32 nt, Human
uuucuucucuuuccuucucucccuuucucauu

SEQ ID NO: 279834 - RNA, 32 nt, Human
uuucuucugaaggaugcuaucauuugcccucu

SEQ ID NO: 279835 - RNA, 32 nt, Human
uuucuucugaccuccuugccucuugucuugaa

SEQ ID NO: 279836 - RNA, 32 nt, Human
uuucuucugcauuuuagugguuccacaaguaa

SEQ ID NO: 279837 - RNA, 32 nt, Human
uuucuucugccucucuguguggguacugugug

SEQ ID NO: 279838 - RNA, 32 nt, Human
uuucuucugcggaaccuccaccccuccagugg

SEQ ID NO: 279839 - RNA, 32 nt, Human
uuucuucugggcuucagcaugauguucaauaa

SEQ ID NO: 279840 - RNA, 32 nt, Human
uuucuucuggguucaaccacuuuagccagaau

SEQ ID NO: 279841 - RNA, 32 nt, Human
uuucuucuguuuccuuuggaauucuucuuuuu

SEQ ID NO: 279842 - RNA, 32 nt, Human
uuucuucuuaaaaaucagcuauuuagaggugg

SEQ ID NO: 279843 - RNA, 32 nt, Human
uuucuucuucaaccuccaucccuggcuuccuc

SEQ ID NO: 279844 - RNA, 32 nt, Human
uuucuucuucuuuguuguucuucuagugugac

SEQ ID NO: 279845 - RNA, 32 nt, Human
uuucuucuucuuuuccuuuuggcaaagcagau

SEQ ID NO: 279846 - RNA, 32 nt, Human
uuucuucuucuuuuucuucuccuccuccuccu

SEQ ID NO: 279847 - RNA, 32 nt, Human
uuucuucuuggcugguucuuuguucugucccc

SEQ ID NO: 279848 - RNA, 32 nt, Human
uuucuucuuguagggcuuggugguguuuuauc

SEQ ID NO: 279849 - RNA, 32 nt, Human
uuucuucuuuugcuauaauuuuuaaccaaaaa

SEQ ID NO: 279850 - RNA, 32 nt, Human
uuucuucuuuuuauuuuuaauagaugaugccu

SEQ ID NO: 279851 - RNA, 24 nt, Human
uuucuugaaaagcuugucgguuca

SEQ ID NO: 279852 - RNA, 32 nt, Human
uuucuugaacuccuggccaacauggugaaacc

SEQ ID NO: 279853 - RNA, 32 nt, Human
uuucuugaagaagagaacaucuucucagaauc

SEQ ID NO: 279854 - RNA, 32 nt, Human
uuucuugaagaaugcuugggaucugugaggaa

SEQ ID NO: 279855 - RNA, 32 nt, Human
uuucuugaagaggcagcucaaaugucaccuuc

SEQ ID NO: 279856 - RNA, 32 nt, Human
uuucuugaaggggacugcauccuaguugaccu

SEQ ID NO: 279857 - RNA, 32 nt, Human
uuucuugaauuuaaucugggcacuuugcacug

SEQ ID NO: 279858 - RNA, 24 nt, Human
uuucuugaauuucagucugcugcu

SEQ ID NO: 279859 - RNA, 32 nt, Human
uuucuugagaaguucauuuauaccucaucacu

SEQ ID NO: 279860 - RNA, 32 nt, Human
uuucuugagccacguggaacugugggucaggu

SEQ ID NO: 279861 - RNA, 32 nt, Human
uuucuugagcccagggguuugaggcugcagug

SEQ ID NO: 279862 - RNA, 32 nt, Human
uuucuugaggcagggucucacucuguugacca

SEQ ID NO: 279863 - RNA, 32 nt, Human
uuucuugaugacccugcacaauacugugagga

SEQ ID NO: 279864 - RNA, 32 nt, Human
uuucuugauugggacucccgauuugcaaauuu

SEQ ID NO: 279865 - RNA, 32 nt, Human
uuucuugcacacaucaacuggcacacaugcac

SEQ ID NO: 279866 - RNA, 32 nt, Human
uuucuugcagcagaagaaagaagagacaggag

SEQ ID NO: 279867 - RNA, 32 nt, Human
uuucuugcagcugcucugagggagagacagug

SEQ ID NO: 279868 - RNA, 32 nt, Human
uuucuugcagucagcuucauaccauuuuuaaa

SEQ ID NO: 279869 - RNA, 32 nt, Human
uuucuugcaugaggcuagugugguguuuccug

SEQ ID NO: 279870 - RNA, 32 nt, Human
uuucuugcauuuucauaugcauuuuaaaagca

SEQ ID NO: 279871 - RNA, 32 nt, Human
uuucuugccaaaggcgguuccacccucgugau

SEQ ID NO: 279872 - RNA, 32 nt, Human
uuucuugccauuaguuuauaugacuuuaauau

SEQ ID NO: 279873 - RNA, 32 nt, Human
uuucuugccuguaacccuagcacuuugggagg

SEQ ID NO: 279874 - RNA, 32 nt, Human
uuucuugcgucuucuuuuccugacuaacucuu

SEQ ID NO: 279875 - RNA, 32 nt, Human
uuucuugcucaucagaaccucagcuaaucuac

SEQ ID NO: 279876 - RNA, 32 nt, Human
uuucuugcuccuguggauguauaggaagucaa

SEQ ID NO: 279877 - RNA, 32 nt, Human
uuucuugcuuucucuuuucccucucucuuucu

SEQ ID NO: 279878 - RNA, 32 nt, Human
uuucuugcuuuucauuugauuacccugcuuga

SEQ ID NO: 279879 - RNA, 32 nt, Human
uuucuuggaacgggggaaagaaaaugaaacuu

SEQ ID NO: 279880 - RNA, 32 nt, Human
uuucuuggagaagcgauggaugacagagauua

SEQ ID NO: 279881 - RNA, 32 nt, Human
uuugugugucugggcagucucucagccuccga

SEQ ID NO: 279882 - RNA, 32 nt, Human
uuugugugucugguuucucccuuccuuuccuc

SEQ ID NO: 279883 - RNA, 29 nt, Human
uuugugugucuguaugugugucuguguau

SEQ ID NO: 279884 - RNA, 29 nt, Human
uuugugugucugugcaugggccuggguac

SEQ ID NO: 279885 - RNA, 32 nt, Human
uuugugugugggaaguggaagcagcaugaagu

SEQ ID NO: 279886 - RNA, 32 nt, Human
uuuguguguguaugcauggcauauguacaacu

SEQ ID NO: 279887 - RNA, 32 nt, Human
uuuguguguguauguuuuuagauacguacgug

SEQ ID NO: 279888 - RNA, 32 nt, Human
uuuguguguucagccagacugggcaggugcag

SEQ ID NO: 279889 - RNA, 32 nt, Human
uuuguguguuguguaugugagccaucccacau

SEQ ID NO: 279890 - RNA, 32 nt, Human
uuuguguguuuuccaccucaguagccuugcac

SEQ ID NO: 279891 - RNA, 32 nt, Human
uuuguguuaaaauguugacaacagccacaccu

SEQ ID NO: 279892 - RNA, 32 nt, Human
uuuguguuauucaccacuguauucucaaauau

SEQ ID NO: 279893 - RNA, 32 nt, Human
uuuguguuauucaccacuguauucucaauauc

SEQ ID NO: 279894 - RNA, 32 nt, Human
uuuguguucacugauguuagggcugcuagggc

SEQ ID NO: 279895 - RNA, 32 nt, Human
uuuguguuccuuggcacccuguuggguauugg

SEQ ID NO: 279896 - RNA, 32 nt, Human
uuuguguucuucaaaaugugcauguuaaguau

SEQ ID NO: 279897 - RNA, 32 nt, Human
uuuguguugcagguguuugccaugugguaccu

SEQ ID NO: 279898 - RNA, 32 nt, Human
uuuguguugcuuaacccagcauccugaaccgu

SEQ ID NO: 279899 - RNA, 32 nt, Human
uuuguguuuacuuaaacugugcugcuaaguag

SEQ ID NO: 279900 - RNA, 32 nt, Human
uuuguguuucaguuggagggaauauaugauac

SEQ ID NO: 279901 - RNA, 32 nt, Human
uuuguguuugaaguaucugugcaugggaucgu

SEQ ID NO: 279902 - RNA, 32 nt, Human
uuuguguuugauucucucgauccuggcacauc

SEQ ID NO: 279903 - RNA, 32 nt, Human
uuuguguuugauuuuguuugauuucccucugc

SEQ ID NO: 279904 - RNA, 32 nt, Human
uuuguguuuguccugucuucucucacauuuga

SEQ ID NO: 279905 - RNA, 32 nt, Human
uuuguguuuguuuucuuguucuuaugguuguu

SEQ ID NO: 279906 - RNA, 32 nt, Human
uuuguuaaaacacagcaucauaacucagccag

SEQ ID NO: 279907 - RNA, 32 nt, Human
uuuguuaaaacuaaauguaagaaaaaucugcu

SEQ ID NO: 279908 - RNA, 32 nt, Human
uuuguuaaaccagaucuaguccgagucuuuuc

SEQ ID NO: 279909 - RNA, 32 nt, Human
uuuguuaagguucaagacagaugggcauaugu

SEQ ID NO: 279910 - RNA, 32 nt, Human
uuuguuaauuuccaugggaagccaugauggcc

SEQ ID NO: 279911 - RNA, 32 nt, Human
uuuguuacaauccugaaucuuugcuuuuugca

SEQ ID NO: 279912 - RNA, 32 nt, Human
uuuguuacacagaaauagauaacugaaacacc

SEQ ID NO: 279913 - RNA, 32 nt, Human
uuuguuacagauauacagauauacaaauauac

SEQ ID NO: 279914 - RNA, 24 nt, Human
uuuguuaccagccugggcaacaua

SEQ ID NO: 279915 - RNA, 32 nt, Human
uuuguuaccagccugggcaacauagugagacc

SEQ ID NO: 279916 - RNA, 32 nt, Human
uuuguuacccaggcuggagugcaguggcacaa

SEQ ID NO: 279917 - RNA, 32 nt, Human
uuuguuaccccaggggcuguggcaugucccag

SEQ ID NO: 279918 - RNA, 32 nt, Human
uuuguuaccuagaaggcuggacugcauaagca

SEQ ID NO: 279919 - RNA, 32 nt, Human
uuuguuacuacaaagccugccuccagcagccc

SEQ ID NO: 279920 - RNA, 32 nt, Human
uuuguuacugacugccuaaaaucacuuaaucu

SEQ ID NO: 279921 - RNA, 32 nt, Human
uuuguuacuucccucacuucaccuccauaaga

SEQ ID NO: 279922 - RNA, 32 nt, Human
uuuguuacuuuuaccaacaauguaauauaauu

SEQ ID NO: 279923 - RNA, 32 nt, Human
uuuguuagacagccacaguccugucuggguua

SEQ ID NO: 279924 - RNA, 32 nt, Human
uuuguuagccugggugcucaggguggacagcu

SEQ ID NO: 279925 - RNA, 32 nt, Human
uuuguuaggaaagagaaaggacaagaagagga

SEQ ID NO: 279926 - RNA, 32 nt, Human
uuuguuagggagagaagagggagaggcaggag

SEQ ID NO: 279927 - RNA, 32 nt, Human
uuuguuaguacuagaguuguuucccaaucacc

SEQ ID NO: 279928 - RNA, 32 nt, Human
uuuguuaguguuuagaaaacaauguuuuaaac

SEQ ID NO: 279929 - RNA, 32 nt, Human
uuuguuaguuauccgccgccaccaagacgcgg

SEQ ID NO: 279930 - RNA, 32 nt, Human
uuuguuauaacaaccucugcauauuccagguc

SEQ ID NO: 279931 - RNA, 32 nt, Human
uuuguuauaauaaccacuaguguuuuauccaa

SEQ ID NO: 279932 - RNA, 32 nt, Human
uuuguuauauccuagacuagacaugcgaaagu

SEQ ID NO: 279933 - RNA, 32 nt, Human
uuuguuaucuugcuucucuguaguuuugcauc

SEQ ID NO: 279934 - RNA, 32 nt, Human
uuuguuauguacaaauaauuuagcuuacacaa

SEQ ID NO: 279935 - RNA, 32 nt, Human
uuuguuauguuguuaaaucuugcugagacaaa

SEQ ID NO: 279936 - RNA, 32 nt, Human
uuuguucaaaccuguaauggcuuguaaacaaa

SEQ ID NO: 279937 - RNA, 32 nt, Human
uuuguucaacacaguaagcccugcucccuucc

SEQ ID NO: 279938 - RNA, 32 nt, Human
uuuguucaagcguuccucuggggaccggcagc

SEQ ID NO: 279939 - RNA, 32 nt, Human
uuuguucaccaguucuacagugauggggugcu

SEQ ID NO: 279940 - RNA, 32 nt, Human
uuuguucacugcaaccucugccuuccaagauc

SEQ ID NO: 279941 - RNA, 32 nt, Human
uuuguucagacagggucucgcuauguugccca

SEQ ID NO: 279942 - RNA, 32 nt, Human
uuuguucagagccugucuuuaaggcuggugug

SEQ ID NO: 279943 - RNA, 32 nt, Human
uuuguucagcaacauuuaguguuucagugaaa

SEQ ID NO: 279944 - RNA, 32 nt, Human
uuuguucauauuuucuccagacagaaaugcaa

SEQ ID NO: 279945 - RNA, 32 nt, Human
uuuguucauccuggagaauugaagggagguca

SEQ ID NO: 279946 - RNA, 32 nt, Human
uuuguucauugcuagaucaccaagggcuaaca

SEQ ID NO: 279947 - RNA, 32 nt, Human
uuuguucauuuuaauugcaaagcugccaaaau

SEQ ID NO: 279948 - RNA, 32 nt, Human
uuuguuccaggaauagcgcuccaggcuccugc

SEQ ID NO: 279949 - RNA, 32 nt, Human
uuuguuccccuccaggaugcugccggacugga

SEQ ID NO: 279950 - RNA, 32 nt, Human
uuuguuccccuucaccgcucucccucucauuc

SEQ ID NO: 279951 - RNA, 25 nt, Human
uuuguucccucauggaacuauaaca

SEQ ID NO: 279952 - RNA, 32 nt, Human
uuuguucccugccuuuccgccacaucacacgg

SEQ ID NO: 279953 - RNA, 20 nt, Human
uuuguucccuucccuguccc

SEQ ID NO: 279954 - RNA, 32 nt, Human
uuuguuccuccaccucuugcuccaaucagagg

SEQ ID NO: 279955 - RNA, 32 nt, Human
uuuguuccucucuccacugaagcugacuuagc

SEQ ID NO: 279956 - RNA, 32 nt, Human
uuuguuccugcagggugcagcuccugucugcu

SEQ ID NO: 279957 - RNA, 32 nt, Human
uuuguuccugguguuuguguuccaguuccacg

SEQ ID NO: 279958 - RNA, 32 nt, Human
uuuguuccuuucagauccuccacuuggcaggc

SEQ ID NO: 279959 - RNA, 32 nt, Human
uuuguucuaaagguugcauuuucaguuauagg

SEQ ID NO: 279960 - RNA, 32 nt, Human
uuuguucuaagcuggacggaugcuggcacaga

SEQ ID NO: 279961 - RNA, 32 nt, Human
uuuguucuagccacacuggcagcuguuagaug

SEQ ID NO: 279962 - RNA, 32 nt, Human
uuuguucuaucaccccucucccuaucauuaac

SEQ ID NO: 279963 - RNA, 32 nt, Human
uuuguucucaaggaauuugcauucuagaaagu

SEQ ID NO: 279964 - RNA, 31 nt, Human
uuuguucucaauaaauguuggguuugguaau

SEQ ID NO: 279965 - RNA, 21 nt, Human
uuuguucucaccucuaccugu

SEQ ID NO: 279966 - RNA, 32 nt, Human
uuuguucuccaauguggcuuguuauuuauguu

SEQ ID NO: 279967 - RNA, 32 nt, Human
uuuguucucccuuuuaaauccacugcccugac

SEQ ID NO: 279968 - RNA, 32 nt, Human
uuuguucucuuauuucugaggcccuucagucu

SEQ ID NO: 279969 - RNA, 32 nt, Human
uuuguucugaauuuuccagaccccugugcaga

SEQ ID NO: 279970 - RNA, 32 nt, Human
uuuguucugacagugcaugucuuuggaagcau

SEQ ID NO: 279971 - RNA, 32 nt, Human
uuuguucugcuuuaucuuuucauaaaggguug

SEQ ID NO: 279972 - RNA, 32 nt, Human
uuuguucuguaacucgagagccaguagcauug

SEQ ID NO: 279973 - RNA, 32 nt, Human
uuuguucugugcuaacagauaacugggacacc

SEQ ID NO: 279974 - RNA, 32 nt, Human
uuuguucuguucugucaugugccacaaaauau

SEQ ID NO: 279975 - RNA, 32 nt, Human
uuuguucuguuuuugcuuugcauuuggagaaa

SEQ ID NO: 279976 - RNA, 32 nt, Human
uuuguucuuagcagacuuggcuucauuuuggu

SEQ ID NO: 279977 - RNA, 32 nt, Human
uuuguucuuuuauucugcuuuuuaacuguaau

SEQ ID NO: 279978 - RNA, 32 nt, Human
uuuguugaaaacaaacuggaaacuuguuucuu

SEQ ID NO: 279979 - RNA, 23 nt, Human
uuuguugaaagaaaaugaaggaa

SEQ ID NO: 279980 - RNA, 32 nt, Human
uuuguugagacagggucuugcucugucaccca

SEQ ID NO: 279981 - RNA, 32 nt, Human
uuuguugagccucuuucugggucucugccugg

SEQ ID NO: 279982 - RNA, 32 nt, Human
uuuguugcaaaggaggaggaaaagggaggacu

SEQ ID NO: 279983 - RNA, 24 nt, Human
uuuguugcagcacagucccuggca

SEQ ID NO: 279984 - RNA, 23 nt, Human
uuuguugcaggaaauguauuuca

SEQ ID NO: 279985 - RNA, 32 nt, Human
uuuguugccagauuugaaagucacuggaacuu

SEQ ID NO: 279986 - RNA, 32 nt, Human
uuuguugccaggcuggagugcaguggcgcgau

SEQ ID NO: 279987 - RNA, 32 nt, Human
uuuguugcccaggcuggagugcaguggcacga

SEQ ID NO: 279988 - RNA, 32 nt, Human
uuuguugcccaggcuggagugcaguggucuga

SEQ ID NO: 279989 - RNA, 32 nt, Human
uuuguugcccaggcuggagugcgguggcguga

SEQ ID NO: 279990 - RNA, 32 nt, Human
uuuguugcccaggcuggagugcgguggugcaa

SEQ ID NO: 279991 - RNA, 32 nt, Human
uuuguugcccaggcuggaguguaguggcgcga

SEQ ID NO: 279992 - RNA, 32 nt, Human
uuuguugcccaggcuggggugcaguggcacga

SEQ ID NO: 279993 - RNA, 32 nt, Human
uuuguugccuaccucuuccuccacucauuugg

SEQ ID NO: 279994 - RNA, 32 nt, Human
uuuguugcuguagugggcagucaccuuccaac

SEQ ID NO: 279995 - RNA, 32 nt, Human
uuuguugcuguugcuguugcuguugcuguugc

SEQ ID NO: 279996 - RNA, 32 nt, Human
uuuguugcuugacuuucuggaguuuguauuau

SEQ ID NO: 279997 - RNA, 32 nt, Human
uuuguuggagagugucagacugaucuggaagu

SEQ ID NO: 279998 - RNA, 32 nt, Human
uuuguuggagugaagcauuuaaaagaguaagg

SEQ ID NO: 279999 - RNA, 32 nt, Human
uuuguuggcagacagggucucacuuugucacc

SEQ ID NO: 280000 - RNA, 32 nt, Human
uuuguuggcuuccuuuccuccugcugcacaug

SEQ ID NO: 280001 - RNA, 23 nt, Human
uuuguuggcuucuuugcuuucuc

SEQ ID NO: 280002 - RNA, 32 nt, Human
uuuguugggggaguugaggagugaagaaacac

SEQ ID NO: 280003 - RNA, 32 nt, Human
uuuguuggugcuuuguucucaguacaguaacu

SEQ ID NO: 280004 - RNA, 32 nt, Human
uuuguugguuccucucaucgaaaucagucuac

SEQ ID NO: 280005 - RNA, 32 nt, Human
uuuguuguaaagcaucuuaacuacacauauaa

SEQ ID NO: 280006 - RNA, 32 nt, Human
uuuguuguaagaaagacugugcagaggagugu

SEQ ID NO: 280007 - RNA, 22 nt, Human
uuuguugucaaagacagcacag

SEQ ID NO: 280008 - RNA, 22 nt, Human
uuuguugucucccucuuucuca

SEQ ID NO: 280009 - RNA, 32 nt, Human
uuuguugugcucaaauaaauguuuacuuaucu

SEQ ID NO: 280010 - RNA, 32 nt, Human
uuuguuguggggaggaggauggggaguaggac

SEQ ID NO: 280011 - RNA, 32 nt, Human
uuuguugugguguggggaggggagacgcugac

SEQ ID NO: 280012 - RNA, 32 nt, Human
uuuguuguguaaguccgucugugugcagcugu

SEQ ID NO: 280013 - RNA, 32 nt, Human
uuuguuguuaauguauuuaagcauuuuauagu

SEQ ID NO: 280014 - RNA, 32 nt, Human
uuuguuguuguuguuguucuggguaacuccaa

SEQ ID NO: 280015 - RNA, 32 nt, Human
uuuguuguuguuguuguuuugagauggagucu

SEQ ID NO: 280016 - RNA, 32 nt, Human
uuuguuguuguuguuuuucaaacuaagaauaa

SEQ ID NO: 280017 - RNA, 25 nt, Human
uuuguuguuguuuuuacguuuuuca

SEQ ID NO: 280018 - RNA, 32 nt, Human
uuuguuguuugaauggaaauggaaaagccagu

SEQ ID NO: 280019 - RNA, 32 nt, Human
uuuguuguuuuauuuuccuuuccagagccuuc

SEQ ID NO: 280020 - RNA, 20 nt, Human
uuuguuguuuucaguuuuuu

SEQ ID NO: 280021 - RNA, 32 nt, Human
uuuguuuaacaggucucuguaagcaagcuugc

SEQ ID NO: 280022 - RNA, 32 nt, Human
uuuguuuacaauaugaguuuuuccagaauaca

SEQ ID NO: 280023 - RNA, 32 nt, Human
uuuguuuacagucuuuguuuaacaaaccaugc

SEQ ID NO: 280024 - RNA, 32 nt, Human
uuuguuuacauugcucacgauuuucuaaaggc

SEQ ID NO: 280025 - RNA, 32 nt, Human
uuuguuuaccauucaguuccuccccuuuccuu

SEQ ID NO: 280026 - RNA, 32 nt, Human
uuuguuuacucuuuauaccaaaauucagugaa

SEQ ID NO: 280027 - RNA, 23 nt, Human
uuuguuuagaaguucaguuuuuu

SEQ ID NO: 280028 - RNA, 23 nt, Human
uuuguuuagaauuagguuuuuca

SEQ ID NO: 280029 - RNA, 32 nt, Human
uuuguuuagccaugugcaaauauugcccuaaa

SEQ ID NO: 280030 - RNA, 32 nt, Human
uuuguuuagccauguucaaauauugcccuaaa

SEQ ID NO: 280031 - RNA, 32 nt, Human
uuuguuuagguagagaagacaaguccaaagag

SEQ ID NO: 280032 - RNA, 32 nt, Human
uuuguuuaucagccugagcauauuucauuuua

SEQ ID NO: 280033 - RNA, 22 nt, Human
uuuguuuauuaaaauguguccu

SEQ ID NO: 280034 - RNA, 32 nt, Human
uuuguuuauuccugaaacauaguuacauaguu

SEQ ID NO: 280035 - RNA, 32 nt, Human
uuuguuucaagaggaacaagggaugagggaga

SEQ ID NO: 280036 - RNA, 32 nt, Human
uuuguuucaagagucauguuuccccagaugug

SEQ ID NO: 280037 - RNA, 32 nt, Human
uuuguuucacuugccucugcucgacuccgaga

SEQ ID NO: 280038 - RNA, 32 nt, Human
uuuguuucagaaucugcuacuugggcccucuu

SEQ ID NO: 280039 - RNA, 32 nt, Human
uuuguuucauuucaugccuuacuuaucaaaaa

SEQ ID NO: 280040 - RNA, 32 nt, Human
uuuguuucauuuucuucugucucaccucguua

SEQ ID NO: 280041 - RNA, 32 nt, Human
uuuguuuccaaguugaaaaccuuugggucuuu

SEQ ID NO: 280042 - RNA, 32 nt, Human
uuuguuucccaggcuggagugcaguggcacga

SEQ ID NO: 280043 - RNA, 19 nt, Human
uuuguuuccccgguggccc

SEQ ID NO: 280044 - RNA, 32 nt, Human
uuuguuuccccucagugucuguaacccuuagc

SEQ ID NO: 280045 - RNA, 32 nt, Human
uuuguuuccuccuugucacugaagauugggua

SEQ ID NO: 280046 - RNA, 32 nt, Human
uuuguuuccuuccuuccuuauuuccuuuaguu

SEQ ID NO: 280047 - RNA, 32 nt, Human
uuuguuuccuuuuuaaacuucuccccugcuuu

SEQ ID NO: 280048 - RNA, 32 nt, Human
uuuguuucuggcuuuuauggcuuaagguuuuc

SEQ ID NO: 280049 - RNA, 32 nt, Human
uuuguuucuuauuccuucacuuuuggggaaaa

SEQ ID NO: 280050 - RNA, 32 nt, Human
uuuguuucuuauuuaauaggcuuuuuacuuca

SEQ ID NO: 280051 - RNA, 32 nt, Human
uuuguuucuuuuguuaagcagcacuuauguag

SEQ ID NO: 280052 - RNA, 32 nt, Human
uuuguuugaugaagaaauaaacuucagcugaa

SEQ ID NO: 280053 - RNA, 32 nt, Human
uuuguuugauuuguucuauuccauccauuguc

SEQ ID NO: 280054 - RNA, 24 nt, Human
uuuguuugcucuuuuaguuuuuua

SEQ ID NO: 280055 - RNA, 32 nt, Human
uuuguuugcuuugggaucuuguuggaugcacu

SEQ ID NO: 280056 - RNA, 32 nt, Human
uuuguuugggaagcuauggaggaggacuuuua

SEQ ID NO: 280057 - RNA, 32 nt, Human
uuuguuuggggaggggaacaagccaauaaaga

SEQ ID NO: 280058 - RNA, 23 nt, Human
uuuguuuguaauuuuguuuuuca

SEQ ID NO: 280059 - RNA, 21 nt, Human
uuuguuuguauaaauaugccu

SEQ ID NO: 280060 - RNA, 32 nt, Human
uuuguuuguauccucuuuuauuuccuugagca

SEQ ID NO: 280061 - RNA, 22 nt, Human
uuuguuuguuauacucuuugca

SEQ ID NO: 280062 - RNA, 32 nt, Human
uuuguuuguuucucccccugggcucugcccca

SEQ ID NO: 280063 - RNA, 32 nt, Human
uuuguuuguuucuuugagauggagucuugcuc

SEQ ID NO: 280064 - RNA, 32 nt, Human
uuuguuuguuuguuuucccuuccccauuuccu

SEQ ID NO: 280065 - RNA, 23 nt, Human
uuuguuuguuuugcacuuuguca

SEQ ID NO: 280066 - RNA, 32 nt, Human
uuuguuuuaaggccacaccuuuuugaaguuuu

SEQ ID NO: 280067 - RNA, 32 nt, Human
uuuguuuuaauuacuugggcaucccaggaagc

SEQ ID NO: 280068 - RNA, 32 nt, Human
uuuguuuuagagaugggaucucaccauguugc

SEQ ID NO: 280069 - RNA, 32 nt, Human
uuuguuuuauccaccuaucccuauuaccugac

SEQ ID NO: 280070 - RNA, 32 nt, Human
uuuguuuuauuccugaaggaacaucaguaccc

SEQ ID NO: 280071 - RNA, 32 nt, Human
uuuguuuuauuucaaaaacaaaguacauuuuu

SEQ ID NO: 280072 - RNA, 32 nt, Human
uuuguuuucaguaacugaaucauagaacgagu

SEQ ID NO: 280073 - RNA, 23 nt, Human
uuuguuuucauaaaaucucuaca

SEQ ID NO: 280074 - RNA, 22 nt, Human
uuuguuuucauaauaccucaca

SEQ ID NO: 280075 - RNA, 32 nt, Human
uuuguuuuccaaaucaagguaacuugcucccu

SEQ ID NO: 280076 - RNA, 32 nt, Human
uuuguuuucccuuccccauuuccuuccuuccc

SEQ ID NO: 280077 - RNA, 32 nt, Human
uuuguuuuccucccucuccucuggcugcuaca

SEQ ID NO: 280078 - RNA, 32 nt, Human
uuuguuuuccucuccaucuacuuuucccugug

SEQ ID NO: 280079 - RNA, 32 nt, Human
uuuguuuuccuuccucuaaagaugucuuuaug

SEQ ID NO: 280080 - RNA, 32 nt, Human
uuuguuuuccuugccgcgacugugaagauaaa

SEQ ID NO: 280081 - RNA, 32 nt, Human
uuuguuuucucaaauauuugcuaugaaggguu

SEQ ID NO: 280082 - RNA, 32 nt, Human
uuuguuuucuguauguuguugggggaucaacu

SEQ ID NO: 280083 - RNA, 32 nt, Human
uuuguuuucuuuucuccucaacccagcauuuu

SEQ ID NO: 280084 - RNA, 32 nt, Human
uuuguuuugagacucucuugagauuuuucugg

SEQ ID NO: 280085 - RNA, 32 nt, Human
uuuguuuugcacuaaaguuucugugauuuaac

SEQ ID NO: 280086 - RNA, 32 nt, Human
uuuguuuugccaacaugaaaacuguuauaagg

SEQ ID NO: 280087 - RNA, 32 nt, Human
uuuguuuuggaaaucagcacuaguuuuaaaug

SEQ ID NO: 280088 - RNA, 32 nt, Human
uuuguuuuggccauuuccaccuggugaagauu

SEQ ID NO: 280089 - RNA, 32 nt, Human
uuuguuuuggggaccagguagggaggcuguug

SEQ ID NO: 280090 - RNA, 32 nt, Human
uuuguuuugguaccuuuaaauggugguguugu

SEQ ID NO: 280091 - RNA, 22 nt, Human
uuuguuuuggucaucccuaaua

SEQ ID NO: 280092 - RNA, 32 nt, Human
uuuguuuuggugugcacauccauuuuguuuuu

SEQ ID NO: 280093 - RNA, 32 nt, Human
uuuguuuuguagauggaguuucacuuuuguug

SEQ ID NO: 280094 - RNA, 32 nt, Human
uuuguuuugucuuuuaagaaaggaaagaaagg

SEQ ID NO: 280095 - RNA, 32 nt, Human
uuuguuuugugggcauuuccacacgaagccua

SEQ ID NO: 280096 - RNA, 32 nt, Human
uuuguuuuuacucaaugacaccauuuuuaguu

SEQ ID NO: 280097 - RNA, 24 nt, Human
uuuguuuuuaucuauaucuuggua

SEQ ID NO: 280098 - RNA, 32 nt, Human
uuuguuuuucauuccccucccucucuccccuc

SEQ ID NO: 280099 - RNA, 32 nt, Human
uuuguuuuucccuguaaauuuuagagucaucu

SEQ ID NO: 280100 - RNA, 32 nt, Human
uuuguuuuuccucccuugccuuaaguccuugg

SEQ ID NO: 280101 - RNA, 32 nt, Human
uuuguuuuugacacagagucucgcucugucgc

SEQ ID NO: 280102 - RNA, 32 nt, Human
uuuguuuuugagacaaguucucacucugucac

SEQ ID NO: 280103 - RNA, 32 nt, Human
uuuguuuuugagacacaguuucgcucuuauug

SEQ ID NO: 280104 - RNA, 32 nt, Human
uuuguuuuugagacagaauuuugcucuuguug

SEQ ID NO: 280105 - RNA, 32 nt, Human
uuuguuuuugagacagagucucacucugucac

SEQ ID NO: 280106 - RNA, 32 nt, Human
uuuguuuuugagacagagucucacucuguugc

SEQ ID NO: 280107 - RNA, 32 nt, Human
uuuguuuuugagacagagucucacuuugcuuc

SEQ ID NO: 280108 - RNA, 32 nt, Human
uuuguuuuugagacagagucucgcucugucac

SEQ ID NO: 280109 - RNA, 32 nt, Human
uuuguuuuugagacagagucucuuucugucgu

SEQ ID NO: 280110 - RNA, 32 nt, Human
uuuguuuuugagacagagucuugcucugucac

SEQ ID NO: 280111 - RNA, 32 nt, Human
uuuguuuuugagacagggucucgcucuauggc

SEQ ID NO: 280112 - RNA, 32 nt, Human
uuuguuuuugagaccgaaucucacucuguugc

SEQ ID NO: 280113 - RNA, 32 nt, Human
uuuguuuuugagacggagucucacucuguugc

SEQ ID NO: 280114 - RNA, 32 nt, Human
uuuguuuuugagacggagucucgcucugucgc

SEQ ID NO: 280115 - RNA, 32 nt, Human
uuuguuuuugagacggagucucgcucuguuuc

SEQ ID NO: 280116 - RNA, 32 nt, Human
uuuguuuuugagacggagucucgcuuuguuuc

SEQ ID NO: 280117 - RNA, 32 nt, Human
uuuguuuuugagacggaguuucacucuuauug

SEQ ID NO: 280118 - RNA, 32 nt, Human
uuuguuuuugagacggaguuucacucuuguug

SEQ ID NO: 280119 - RNA, 32 nt, Human
uuuguuuuugagacggaguuucccucuguugc

SEQ ID NO: 280120 - RNA, 32 nt, Human
uuuguuuuugagacugagucucacucugucac

SEQ ID NO: 280121 - RNA, 32 nt, Human
uuuguuuuugagacugagucucacuuuaucac

SEQ ID NO: 280122 - RNA, 32 nt, Human
uuuguuuuugagagaagguauugcucugucau

SEQ ID NO: 280123 - RNA, 32 nt, Human
uuuguuuuugagagggagucucacuuugugcc

SEQ ID NO: 280124 - RNA, 32 nt, Human
uuuguuuuugagauagggucuuuguugcucag

SEQ ID NO: 280125 - RNA, 32 nt, Human
uuuguuuuugagauggacucuagcucugucac

SEQ ID NO: 280126 - RNA, 32 nt, Human
uuuguuuuugagauggagucucacgcugucac

SEQ ID NO: 280127 - RNA, 32 nt, Human
uuuguuuuugagauggagucucacucuguuac

SEQ ID NO: 280128 - RNA, 32 nt, Human
uuuguuuuugagauggagucucgcucugucgc

SEQ ID NO: 280129 - RNA, 32 nt, Human
uuuguuuuugagauggagucucgcucuugucg

SEQ ID NO: 280130 - RNA, 32 nt, Human
uuuguuuuugagauggagucucuugcucuguc

SEQ ID NO: 280131 - RNA, 32 nt, Human
uuuguuuuugagauggagucuugcgcucuguu

SEQ ID NO: 280132 - RNA, 32 nt, Human
uuuguuuuugagauggagucuugcucuguugc

SEQ ID NO: 280133 - RNA, 32 nt, Human
uuuguuuuugagauggagucuuguucugucac

SEQ ID NO: 280134 - RNA, 32 nt, Human
uuuguuuuugagauguaauauugcucuguugc

SEQ ID NO: 280135 - RNA, 32 nt, Human
  misc_feature (4)..(4): n is a, c, g, or u
uuunuccagcagcaccagcagaugaugcgcug

SEQ ID NO: 280136 - RNA, 32 nt, Human
uuuuaaaaacacucuuaucagccugggcaaca

SEQ ID NO: 280137 - RNA, 32 nt, Human
uuuuaaaaaccagcuuauaauuccucguuaug

SEQ ID NO: 280138 - RNA, 32 nt, Human
uuuuaaaaacuagagcacagaaggaauaaggu

SEQ ID NO: 280139 - RNA, 32 nt, Human
uuuuaaaaacugcuccuuguggagcaggacua

SEQ ID NO: 280140 - RNA, 32 nt, Human
uuuuaaaaagagacuguauacacuugauuugc

SEQ ID NO: 280141 - RNA, 32 nt, Human
uuuuaaaaagcagacaucucacuguggucuac

SEQ ID NO: 280142 - RNA, 32 nt, Human
uuuuaaaaauaaagggcuuucacugggcauga

SEQ ID NO: 280143 - RNA, 32 nt, Human
uuuuaaaaauaacaauaaaguuuuaaauaagu

SEQ ID NO: 280144 - RNA, 32 nt, Human
uuuuaaaaauuagccaagcaugguggcaugug

SEQ ID NO: 280145 - RNA, 32 nt, Human
uuuuaaaaauuagcugggcaugguggugcaug

SEQ ID NO: 280146 - RNA, 32 nt, Human
uuuuaaaaauuagcugggugugguggugugcg

SEQ ID NO: 280147 - RNA, 32 nt, Human
uuuuaaaaauuauuucaaauggaacugaaaga

SEQ ID NO: 280148 - RNA, 32 nt, Human
uuuuaaaaauuuccuuucgcuuucauuauuuu

SEQ ID NO: 280149 - RNA, 32 nt, Human
uuuuaaaacagcccaguauuccuuuguauccu

SEQ ID NO: 280150 - RNA, 32 nt, Human
uuuuaaaacauaggaaaguagaaugguugagu

SEQ ID NO: 280151 - RNA, 32 nt, Human
uuuuaaaacaugcauauuccaaaaagaauuca

SEQ ID NO: 280152 - RNA, 32 nt, Human
uuuuaaaacauguuugacucaaagaugaauuu

SEQ ID NO: 280153 - RNA, 32 nt, Human
uuuuaaaacugguggcugggcgugguggcuca

SEQ ID NO: 280154 - RNA, 32 nt, Human
uuuuaaaacuuugccauuucaucuguuuacac

SEQ ID NO: 280155 - RNA, 32 nt, Human
uuuuaaaagaagggaugugggaucaaggagga

SEQ ID NO: 280156 - RNA, 32 nt, Human
uuuuaaaagagcguguuucuucggggcuugcc

SEQ ID NO: 280157 - RNA, 32 nt, Human
uuuuaaaaggaaacuauguggaggacgaugca

SEQ ID NO: 280158 - RNA, 32 nt, Human
uuuuaaaaggagagaggaggggugauggcagg

SEQ ID NO: 280159 - RNA, 32 nt, Human
uuuuaaaaguagugucuggaguuuguaaugag

SEQ ID NO: 280160 - RNA, 32 nt, Human
uuuuaaaagugcucugcccuaccuaccuugcc

SEQ ID NO: 280161 - RNA, 32 nt, Human
uuuuaaaaguucauggaaaauggaauuaaaag

SEQ ID NO: 280162 - RNA, 32 nt, Human
uuuuaaaaguuuaaaacagaagccugaugcug

SEQ ID NO: 280163 - RNA, 18 nt, Human
uuuuaaaaguuucucacu

SEQ ID NO: 280164 - RNA, 32 nt, Human
uuuuaaaauaagaguuuagagcaguaaacauu

SEQ ID NO: 280165 - RNA, 23 nt, Human
uuuuaaaauauuuguaauaugga

SEQ ID NO: 280166 - RNA, 32 nt, Human
uuuuaaaaucagcuugucuuguuccacaaacu

SEQ ID NO: 280167 - RNA, 32 nt, Human
uuuuaaaaucuuuacaguucucaccauuucac

SEQ ID NO: 280168 - RNA, 32 nt, Human
uuuuaaaaugaaccaggagucuggcuggccag

SEQ ID NO: 280169 - RNA, 32 nt, Human
uuuuaaaaugaguacuaauuuucacugcuaau

SEQ ID NO: 280170 - RNA, 32 nt, Human
uuuuaaaaugauuugcacuuuuucacugcaug

SEQ ID NO: 280171 - RNA, 32 nt, Human
uuuuaaaauguguaauuguuccagcauuccaa

SEQ ID NO: 280172 - RNA, 32 nt, Human
uuuuaaaauguucauggacuauuccauauuaa

SEQ ID NO: 280173 - RNA, 32 nt, Human
uuuuaaaauuauacuucagaagagaaagaaau

SEQ ID NO: 280174 - RNA, 26 nt, Human
uuuuaaacaaaguuuucuccugcagu

SEQ ID NO: 280175 - RNA, 22 nt, Human
uuuuaaacaaaucguccuguca

SEQ ID NO: 280176 - RNA, 32 nt, Human
uuuuaaacaaauucugauacaggcgacauccu

SEQ ID NO: 280177 - RNA, 32 nt, Human
uuuuaaacaaauucugaugcccagguugcacc

SEQ ID NO: 280178 - RNA, 32 nt, Human
uuuuaaacaacaauucacccaucuuccuggcu

SEQ ID NO: 280179 - RNA, 32 nt, Human
uuuuaaacacaaaugugaagaacuuguauaua

SEQ ID NO: 280180 - RNA, 23 nt, Human
uuuuaaacagguacauuuuuaca

SEQ ID NO: 280181 - RNA, 32 nt, Human
uuuuaaacaguaacauccagagugacaaauug

SEQ ID NO: 280182 - RNA, 32 nt, Human
uuuuaaacauuucucaccaacuuucuuaugug

SEQ ID NO: 280183 - RNA, 32 nt, Human
uuuuaaaccaaacuuuuaaacggacuggugaa

SEQ ID NO: 280184 - RNA, 32 nt, Human
uuuuaaaccaagggacugaaauagcauugaga

SEQ ID NO: 280185 - RNA, 32 nt, Human
uuuuaaaccaaguaaugcaaaaauuuagugua

SEQ ID NO: 280186 - RNA, 32 nt, Human
uuuuaaacccuuuccuccucccauuuugacau

SEQ ID NO: 280187 - RNA, 32 nt, Human
uuuuaaaccucuaggaccagagcauagucaga

SEQ ID NO: 280188 - RNA, 32 nt, Human
uuuuaaacgcaguauugcuguaaacuggacag

SEQ ID NO: 280189 - RNA, 32 nt, Human
uuuuaaacuacaaaugauagaaaggcaaguaa

SEQ ID NO: 280190 - RNA, 32 nt, Human
uuuuaaacucuuuuccugaaacuuuuuaugaa

SEQ ID NO: 280191 - RNA, 32 nt, Human
uuuuaaacugucuuuagcauuuucccucuucc

SEQ ID NO: 280192 - RNA, 32 nt, Human
uuuuaaacuuaccauuggugcauauguuccag

SEQ ID NO: 280193 - RNA, 32 nt, Human
uuuuaaagaaaaucgucuuuugaaggguaauu

SEQ ID NO: 280194 - RNA, 32 nt, Human
uuuuaaagaaaaucuguauuucaaagaaucuu

SEQ ID NO: 280195 - RNA, 32 nt, Human
uuuuaaagaaacaggcuucacugcaucuaaaa

SEQ ID NO: 280196 - RNA, 32 nt, Human
uuuuaaagaaauaagcuggcugcauuuauaga

SEQ ID NO: 280197 - RNA, 32 nt, Human
uuuuaaagaaggaggucguuuaugugugcaga

SEQ ID NO: 280198 - RNA, 32 nt, Human
uuuuaaagacagagucucgcucuguugcccag

SEQ ID NO: 280199 - RNA, 32 nt, Human
uuuuaaagagacaguguuagggaucuuggaag

SEQ ID NO: 280200 - RNA, 32 nt, Human
uuuuaaagauggggucuuguuauauugccuag

SEQ ID NO: 280201 - RNA, 32 nt, Human
uuuuaaagcaaaugauuuccauauuccagauu

SEQ ID NO: 280202 - RNA, 32 nt, Human
uuuuaaagcagagagacagggcauugagcuga

SEQ ID NO: 280203 - RNA, 32 nt, Human
uuuuaaagcauagaaguaguaugugggucuuu

SEQ ID NO: 280204 - RNA, 32 nt, Human
uuuuaaagccuauuugccuuugccguuaccca

SEQ ID NO: 280205 - RNA, 32 nt, Human
uuuuaaagccuuccacgauccuucccugaaca

SEQ ID NO: 280206 - RNA, 32 nt, Human
uuuuaaagcugaugucauguuauugauguagu

SEQ ID NO: 280207 - RNA, 32 nt, Human
uuuuaaagcugcagggaagugaaggaaucauc

SEQ ID NO: 280208 - RNA, 23 nt, Human
uuuuaaaggaaaaaugacuuuca

SEQ ID NO: 280209 - RNA, 22 nt, Human
uuuuaaaggcaccuacuuguua

SEQ ID NO: 280210 - RNA, 32 nt, Human
uuuuaaaggcucuguuugccuggagaagcaag

SEQ ID NO: 280211 - RNA, 27 nt, Human
uuuuaaagggacaguuuguaacuuggg

SEQ ID NO: 280212 - RNA, 32 nt, Human
uuuuaaagggucuacaacugaaugagcucacc

SEQ ID NO: 280213 - RNA, 30 nt, Human
uuuuaaaguacacaaagggcacaaucaaaa

SEQ ID NO: 280214 - RNA, 22 nt, Human
uuuuaaauaaaguguuucugua

SEQ ID NO: 280215 - RNA, 32 nt, Human
uuuuaaauaauucaguuaaacacugcugcaau

SEQ ID NO: 280216 - RNA, 32 nt, Human
uuuuaaauacuuagaacuuagcacuuguguua

SEQ ID NO: 280217 - RNA, 22 nt, Human
uuuuaaaucaaccuuauuugga

SEQ ID NO: 280218 - RNA, 32 nt, Human
uuuuaaauccugagaaaugugugcuuuuguuu

SEQ ID NO: 280219 - RNA, 32 nt, Human
uuuuaaauccugcuuaugaauuuuagcuuuuu

SEQ ID NO: 280220 - RNA, 32 nt, Human
uuuuaaaucuccaacuugcuguuuccaaaaag

SEQ ID NO: 280221 - RNA, 32 nt, Human
uuuuaaaucuggcagagccucagcuguacgaa

SEQ ID NO: 280222 - RNA, 32 nt, Human
uuuuaaaugaaaacuaauacuauucaugaugu

SEQ ID NO: 280223 - RNA, 32 nt, Human
uuuuaaaugagcaaugcaugaggggaaugcag

SEQ ID NO: 280224 - RNA, 32 nt, Human
uuuuaaaugcauaauaucaaagagaaucauag

SEQ ID NO: 280225 - RNA, 32 nt, Human
uuuuaaaugcuugacccucuugcuuggaguuc

SEQ ID NO: 280226 - RNA, 32 nt, Human
uuuuaaauggcuaaacuacuagccuuaaaacu

SEQ ID NO: 280227 - RNA, 22 nt, Human
uuuuaaauggucuguaucugga

SEQ ID NO: 280228 - RNA, 32 nt, Human
uuuuaaauguguuuuguugagcuuauacuguu

SEQ ID NO: 280229 - RNA, 32 nt, Human
uuuuaaauguuuucacucagaugaacaauuug

SEQ ID NO: 280230 - RNA, 32 nt, Human
uuuuaaauuaacauacacauuuuucucuuuaa

SEQ ID NO: 280231 - RNA, 32 nt, Human
uuuuaaauuagcugggugugguggcaccuggg

SEQ ID NO: 280232 - RNA, 32 nt, Human
uuuuaaauuauaacuuaaaauauuuuauaauu

SEQ ID NO: 280233 - RNA, 32 nt, Human
uuuuaaauuaugcaagcaaacuaggaggagaa

SEQ ID NO: 280234 - RNA, 32 nt, Human
uuuuaaauuauuuucuuuaucuuguuacaaaa

SEQ ID NO: 280235 - RNA, 32 nt, Human
uuuuaaauucauaacauaaugacuucauuguu

SEQ ID NO: 280236 - RNA, 32 nt, Human
uuuuaaauugaauguuccuuaaagguuaacau

SEQ ID NO: 280237 - RNA, 23 nt, Human
uuuuaaauuggagaaaucucugc

SEQ ID NO: 280238 - RNA, 21 nt, Human
uuuuaaauuggugaccuaggg

SEQ ID NO: 280239 - RNA, 23 nt, Human
uuuuaaauuguuuguaacuugga

SEQ ID NO: 280240 - RNA, 24 nt, Human
uuuuaaauuuaacaucuggcugga

SEQ ID NO: 280241 - RNA, 22 nt, Human
uuuuaaauuuccuuaaauugga

SEQ ID NO: 280242 - RNA, 32 nt, Human
uuuuaaauuuuaaugaaaucuaauucaucaaa

SEQ ID NO: 280243 - RNA, 32 nt, Human
uuuuaaauuuucauuguacaguuuacaaauau

SEQ ID NO: 280244 - RNA, 32 nt, Human
uuuuaacaaaaguuacauuccucuccacaaug

SEQ ID NO: 280245 - RNA, 32 nt, Human
uuuuaacaaucaguuugagcugcugcuguuau

SEQ ID NO: 280246 - RNA, 32 nt, Human
uuuuaacaccccugcaaaacccccacccuccc

SEQ ID NO: 280247 - RNA, 32 nt, Human
uuuuaacacgugaagaacaugagaucggaaga

SEQ ID NO: 280248 - RNA, 32 nt, Human
uuuuaacagagaagaaagugacaggaaugugc

SEQ ID NO: 280249 - RNA, 32 nt, Human
uuuuaacagauagugggcaaagaaaaauucca

SEQ ID NO: 280250 - RNA, 32 nt, Human
uuuuaacaguuccucuacuuggcucuccucca

SEQ ID NO: 280251 - RNA, 32 nt, Human
uuuuaacauaaauaaacaaaucguaucagugu

SEQ ID NO: 280252 - RNA, 32 nt, Human
uuuuaacauaguuucacauguucucagaacug

SEQ ID NO: 280253 - RNA, 32 nt, Human
uuuuaacauuauagcaaauuugugucuggggg

SEQ ID NO: 280254 - RNA, 32 nt, Human
uuuuaaccaaccaccaccaccaccaaaaccag

SEQ ID NO: 280255 - RNA, 32 nt, Human
uuuuaaccaucuuuuccuugcugucucccuuc

SEQ ID NO: 280256 - RNA, 32 nt, Human
uuuuaacccaaaaggcggagguugcagugagc

SEQ ID NO: 280257 - RNA, 32 nt, Human
uuuuaaccccuaugaaaauuugacuuaaacua

SEQ ID NO: 280258 - RNA, 32 nt, Human
uuuuaacgauuuuauccucucuccuuaaaugu

SEQ ID NO: 280259 - RNA, 32 nt, Human
uuuuaacuaggaccaggugcagcaugcuaguc

SEQ ID NO: 280260 - RNA, 32 nt, Human
uuuuaacucaugcacaugugcucuuuguacag

SEQ ID NO: 280261 - RNA, 32 nt, Human
uuuuaacuccacugcuuaccuacuuucuucag

SEQ ID NO: 280262 - RNA, 32 nt, Human
uuuuaacuccugccuccacacauguucuugac

SEQ ID NO: 280263 - RNA, 32 nt, Human
uuuuaacugcacucauagggugcucugagguc

SEQ ID NO: 280264 - RNA, 22 nt, Human
uuuuaacugcacuuucuuuaua

SEQ ID NO: 280265 - RNA, 25 nt, Human
uuuuaacugcugcaaacauuguaca

SEQ ID NO: 280266 - RNA, 21 nt, Human
uuuuaacugcugcuaucugca

SEQ ID NO: 280267 - RNA, 21 nt, Human
uuuuaacugcuguuuccuaca

SEQ ID NO: 280268 - RNA, 32 nt, Human
uuuuaacuggcaugucauuugcacacaaaaau

SEQ ID NO: 280269 - RNA, 32 nt, Human
uuuuaacugucaccugucuguguguguucaag

SEQ ID NO: 280270 - RNA, 32 nt, Human
uuuuaacuguuuuggggagggagggagugaua

SEQ ID NO: 280271 - RNA, 32 nt, Human
uuuuaacuucuauuccauuuuaauuguaggau

SEQ ID NO: 280272 - RNA, 32 nt, Human
uuuuaacuuuucuguagagguggagucuugcu

SEQ ID NO: 280273 - RNA, 32 nt, Human
uuuuaacuuuuucuaagcuguuucuugauggg

SEQ ID NO: 280274 - RNA, 32 nt, Human
uuuuaacuuuuugugacaugcuaacacauuuu

SEQ ID NO: 280275 - RNA, 32 nt, Human
uuuuaagaaaguaauuuaauuuguaaaacuuc

SEQ ID NO: 280276 - RNA, 32 nt, Human
uuuuaagaaauaaccucuuacaguuguaacca

SEQ ID NO: 280277 - RNA, 32 nt, Human
uuuuaagaaauccuacaccaacaguucuucuc

SEQ ID NO: 280278 - RNA, 32 nt, Human
uuuuaagaacaacagcccuucaggcggcgaaa

SEQ ID NO: 280279 - RNA, 31 nt, Human
uuuuaagaacaaugcaaauguacuuauugau

SEQ ID NO: 280280 - RNA, 32 nt, Human
uuuuaagacaagaguuucucucuguugcccag

SEQ ID NO: 280281 - RNA, 32 nt, Human
uuuuaagaccagccugaccaacauggugaaac

SEQ ID NO: 280282 - RNA, 23 nt, Human
uuuuaagacggagucucacucug

SEQ ID NO: 280283 - RNA, 23 nt, Human
uuuuaagacugaggcugcucugc

SEQ ID NO: 280284 - RNA, 32 nt, Human
uuuuaagagacagaguuucgcuuguugcccag

SEQ ID NO: 280285 - RNA, 32 nt, Human
uuuuaagagacagggucuugcucugucaccca

SEQ ID NO: 280286 - RNA, 32 nt, Human
uuuuaagagacagggucuugcucuguugucca

SEQ ID NO: 280287 - RNA, 32 nt, Human
uuuuaagagacaggucucccuacguagcccaa

SEQ ID NO: 280288 - RNA, 32 nt, Human
uuuuaagagcuucuuucgaaaguuucuuguuc

SEQ ID NO: 280289 - RNA, 32 nt, Human
uuuuaagaggcagggucucacucugugccccc

SEQ ID NO: 280290 - RNA, 32 nt, Human
uuuuaagaguuucaguuaccauuguaugcaag

SEQ ID NO: 280291 - RNA, 32 nt, Human
uuuuaagaguuucuuuaagaaacuucaucaga

SEQ ID NO: 280292 - RNA, 32 nt, Human
uuuuaagaugcugauugggagccgcuuguggc

SEQ ID NO: 280293 - RNA, 32 nt, Human
uuuuaagauggaacuccacucuuugcuugguu

SEQ ID NO: 280294 - RNA, 32 nt, Human
uuuuaagauggaaucuugcucugucgcccacg

SEQ ID NO: 280295 - RNA, 32 nt, Human
uuuuaagcaaguaaguguccuccaucaguucu

SEQ ID NO: 280296 - RNA, 32 nt, Human
uuuuaagcaaucguguugaauuaggaguauac

SEQ ID NO: 280297 - RNA, 24 nt, Human
uuuuaagcacauccugugacugga

SEQ ID NO: 280298 - RNA, 32 nt, Human
uuuuaagcagaaccaugaaaaccucugugaca

SEQ ID NO: 280299 - RNA, 20 nt, Human
uuuuaagcagacagacucug

SEQ ID NO: 280300 - RNA, 32 nt, Human
uuuuaagcagaggccucggcuccgcaacugcc

SEQ ID NO: 280301 - RNA, 32 nt, Human
uuuuaagcagugaguuauggugguggucucau

SEQ ID NO: 280302 - RNA, 32 nt, Human
uuuuaagcaguuuacauuuauuaucucauuua

SEQ ID NO: 280303 - RNA, 32 nt, Human
uuuuaagcauccugacaggaaauguuuucuuc

SEQ ID NO: 280304 - RNA, 32 nt, Human
uuuuaagcauuggaaauagcaaaaagacauuu

SEQ ID NO: 280305 - RNA, 22 nt, Human
uuuuaagccugaaauugucugc

SEQ ID NO: 280306 - RNA, 25 nt, Human
uuuuaagcuaaagccugaauuuggg

SEQ ID NO: 280307 - RNA, 32 nt, Human
uuuuaagcuacaccuuucugcaccugauguaa

SEQ ID NO: 280308 - RNA, 32 nt, Human
uuuuaagcuacccugaauuuccagaaugcagg

SEQ ID NO: 280309 - RNA, 19 nt, Human
uuuuaagcuuaaagaacuc

SEQ ID NO: 280310 - RNA, 32 nt, Human
uuuuaaggaauacaaauuuucuccuucaucac

SEQ ID NO: 280311 - RNA, 32 nt, Human
uuuuaaggacccaggagguggggcagaagaga

SEQ ID NO: 280312 - RNA, 22 nt, Human
uuuuaaggagaaagaacucuau

SEQ ID NO: 280313 - RNA, 32 nt, Human
uuuuaaggagacagaauccaacagggcuggga

SEQ ID NO: 280314 - RNA, 32 nt, Human
uuuuaaggauaccacuucacagccuuuaggau

SEQ ID NO: 280315 - RNA, 32 nt, Human
uuuuaaggcuuagaggaacuugaguuaggauc

SEQ ID NO: 280316 - RNA, 32 nt, Human
uuuuaagggaaacacucugcuccuggguguga

SEQ ID NO: 280317 - RNA, 32 nt, Human
uuuuaagggaaagaaauguuucaggagggaua

SEQ ID NO: 280318 - RNA, 32 nt, Human
uuuuaagggagauguaguaaaagggaaaaugu

SEQ ID NO: 280319 - RNA, 32 nt, Human
uuuuaagggcccuuuuucaauaacuggaacac

SEQ ID NO: 280320 - RNA, 32 nt, Human
uuuuaaggguauaugcaaaaacaggcaccauu

SEQ ID NO: 280321 - RNA, 32 nt, Human
uuuuaagguagaaauauguucccuauuguuug

SEQ ID NO: 280322 - RNA, 32 nt, Human
uuuuaagguuggcuucagaggugcaaguauau

SEQ ID NO: 280323 - RNA, 23 nt, Human
uuuuaaguaaaaccauucucagu

SEQ ID NO: 280324 - RNA, 32 nt, Human
uuuuaaguaaagcuuuuuauauguagauauuu

SEQ ID NO: 280325 - RNA, 32 nt, Human
uuuuaaguaacauugaacauuuuaucauuaau

SEQ ID NO: 280326 - RNA, 32 nt, Human
uuuuaaguacauugauguugauguuccaccag

SEQ ID NO: 280327 - RNA, 20 nt, Human
uuuuaaguaccuucuacagu

SEQ ID NO: 280328 - RNA, 32 nt, Human
uuuuaaguagagauggaguuucacucuguuuc

SEQ ID NO: 280329 - RNA, 25 nt, Human
uuuuaaguaugugaagaaaaucuac

SEQ ID NO: 280330 - RNA, 32 nt, Human
uuuuaagucaucugggggaaaaccuguuuauc

SEQ ID NO: 280331 - RNA, 32 nt, Human
uuuuaaguccuuucguauaagaauuaaugaga

SEQ ID NO: 280332 - RNA, 25 nt, Human
uuuuaagucuaugaaaaugcuuuau

SEQ ID NO: 280333 - RNA, 21 nt, Human
uuuuaagucuccaauccuggg

SEQ ID NO: 280334 - RNA, 32 nt, Human
uuuuaagugaaaagcagagaauuuuauuuaua

SEQ ID NO: 280335 - RNA, 32 nt, Human
uuuuaagugcccagugaacacaguuccauuua

SEQ ID NO: 280336 - RNA, 32 nt, Human
uuuuaaguggucauugaugacaucccacuccu

SEQ ID NO: 280337 - RNA, 32 nt, Human
uuuuaagugugacugaugacgaagggaacagg

SEQ ID NO: 280338 - RNA, 32 nt, Human
uuuuaaguuaacacccuccuuuacccccagca

SEQ ID NO: 280339 - RNA, 32 nt, Human
uuuuaaguucuuuuauucuccuuucccugaga

SEQ ID NO: 280340 - RNA, 22 nt, Human
uuuuaaguuuccuacaccugga

SEQ ID NO: 280341 - RNA, 32 nt, Human
uuuuaaguuuccuuccagcccagaaagucucu

SEQ ID NO: 280342 - RNA, 23 nt, Human
uuuuaaguuuggaaaugccucua

SEQ ID NO: 280343 - RNA, 32 nt, Human
uuuuaauaaccagcucucacugaacuaauaga

SEQ ID NO: 280344 - RNA, 32 nt, Human
uuuuaauacaauauuuuauuuuaauauaaaca

SEQ ID NO: 280345 - RNA, 32 nt, Human
uuuuaauacaccacuucuuucuuucugccuuu

SEQ ID NO: 280346 - RNA, 32 nt, Human
uuuuaauacaugugacuucuagugagacacau

SEQ ID NO: 280347 - RNA, 32 nt, Human
uuuuaauagaguuaauuguaauaaaagaugaa

SEQ ID NO: 280348 - RNA, 32 nt, Human
uuuuaauaggagauauuugagaggcauugagg

SEQ ID NO: 280349 - RNA, 32 nt, Human
uuuuaauaguacaucuagugguucuuuccaaa

SEQ ID NO: 280350 - RNA, 32 nt, Human
uuuuaauauccuaccagcugcucuucagacac

SEQ ID NO: 280351 - RNA, 22 nt, Human
uuuuaauauccuugagccuggg

SEQ ID NO: 280352 - RNA, 32 nt, Human
uuuuaauauuaaaauacaguugauuagcaaca

SEQ ID NO: 280353 - RNA, 32 nt, Human
uuuuaauauuuuuaguagagaugggguuucac

SEQ ID NO: 280354 - RNA, 31 nt, Human
uuuuaaucaauaaaguaugucuguugaagca

SEQ ID NO: 280355 - RNA, 32 nt, Human
uuuuaaucacaguaggucugauagagaauugg

SEQ ID NO: 280356 - RNA, 32 nt, Human
uuuuaaucaguaaacccagcaaauaucaugau

SEQ ID NO: 280357 - RNA, 32 nt, Human
uuuuaaucauuuauuagaaauuucucaauauu

SEQ ID NO: 280358 - RNA, 32 nt, Human
uuuuaauccacaguauguuacaugcauucuac

SEQ ID NO: 280359 - RNA, 32 nt, Human
uuuuaauccgaucucacaaagcagcagaaugg

SEQ ID NO: 280360 - RNA, 32 nt, Human
uuuuaauccuuggagacagggaaagggacaga

SEQ ID NO: 280361 - RNA, 32 nt, Human
uuuuaaucuaagguugggugugguggcuuaca

SEQ ID NO: 280362 - RNA, 32 nt, Human
uuuuaaucucagaagaaacauaugugacaugg

SEQ ID NO: 280363 - RNA, 32 nt, Human
uuuuaaucuccaacgucccaaauagcuaucug

SEQ ID NO: 280364 - RNA, 32 nt, Human
uuuuaaucuccaccagucauuuuucagaccuu

SEQ ID NO: 280365 - RNA, 32 nt, Human
uuuuaaucugcugccauauuguagcucaauac

SEQ ID NO: 280366 - RNA, 32 nt, Human
uuuuaaugaacaaacagaaauuauggccccaa

SEQ ID NO: 280367 - RNA, 32 nt, Human
uuuuaaugacuggacagcgcucggugaaggcu

SEQ ID NO: 280368 - RNA, 32 nt, Human
uuuuaaugagacagagucucucucugucaccu

SEQ ID NO: 280369 - RNA, 32 nt, Human
uuuuaaugagauacuuugcuuccucauucaac

SEQ ID NO: 280370 - RNA, 32 nt, Human
uuuuaaugagcugguaaacacaaaucauguca

SEQ ID NO: 280371 - RNA, 32 nt, Human
uuuuaaugcuguagugacuuugcucacuuaca

SEQ ID NO: 280372 - RNA, 32 nt, Human
uuuuaaugcuguguguucuguuaaguucuuuc

SEQ ID NO: 280373 - RNA, 32 nt, Human
uuuuaaugcuuuaaucucauguaguuuguuuu

SEQ ID NO: 280374 - RNA, 32 nt, Human
uuuuaauggaaagagcauguuagagcaaacaa

SEQ ID NO: 280375 - RNA, 32 nt, Human
uuuuaaugggauuucaugggguuugguugugc

SEQ ID NO: 280376 - RNA, 32 nt, Human
uuuuaauggugacuuguccuggcuuacuggga

SEQ ID NO: 280377 - RNA, 32 nt, Human
uuuuaauguagccauuugggguuaucucuagu

SEQ ID NO: 280378 - RNA, 32 nt, Human
uuuuaauguguuuuuacccuugccucacugug

SEQ ID NO: 280379 - RNA, 22 nt, Human
uuuuaauguucacauuuuuaca

SEQ ID NO: 280380 - RNA, 32 nt, Human
uuuuaauguuguagcugagcacuuuaacaagu

SEQ ID NO: 280381 - RNA, 32 nt, Human
uuuuaauguuuuugguacacugggcagacuuc

SEQ ID NO: 280382 - RNA, 32 nt, Human
uuuuaauucaaaggaaaaguuuuaugugauuu

SEQ ID NO: 280383 - RNA, 31 nt, Human
uuuuaauuuaauaaauaaaaguuggauuuga

SEQ ID NO: 280384 - RNA, 32 nt, Human
uuuuaauuucucaugugagauaccagaaugga

SEQ ID NO: 280385 - RNA, 32 nt, Human
uuuuaauuugauuuuagaaucuggacacuuuc

SEQ ID NO: 280386 - RNA, 32 nt, Human
uuuuaauuuucacaauugaugacagggugagu

SEQ ID NO: 280387 - RNA, 32 nt, Human
uuuuaauuuuugaaagaugaacugcuuccuuu

SEQ ID NO: 280388 - RNA, 32 nt, Human
uuuuacaaacacaacaaaauguaguaacuuuu

SEQ ID NO: 280389 - RNA, 32 nt, Human
uuuuacaaacuccaagcaaaucugacccaaac

SEQ ID NO: 280390 - RNA, 32 nt, Human
uuuuacaaagagaauugcacuagauaaauuaa

SEQ ID NO: 280391 - RNA, 32 nt, Human
uuuuacaaucaccucacuccagcauggugucu

SEQ ID NO: 280392 - RNA, 32 nt, Human
uuuuacaaugcacuucaccaaugaaacagcua

SEQ ID NO: 280393 - RNA, 32 nt, Human
uuuuacaauggccauggaauaaaccauuuuua

SEQ ID NO: 280394 - RNA, 32 nt, Human
uuuuacacaacaucauuguguaauuuguaaag

SEQ ID NO: 280395 - RNA, 32 nt, Human
uuuuacacaccacugcauuaacuagaacugcu

SEQ ID NO: 280396 - RNA, 32 nt, Human
uuuuacacaguguagaguggccagcagugaac

SEQ ID NO: 280397 - RNA, 32 nt, Human
uuuuacaccaaggaagcagagcaguguuaacu

SEQ ID NO: 280398 - RNA, 32 nt, Human
uuuuacagaaacucacaaauggagauugcaaa

SEQ ID NO: 280399 - RNA, 32 nt, Human
uuuuacagaugaggagacugaggcucagaggg

SEQ ID NO: 280400 - RNA, 32 nt, Human
uuuuacagccuccugggugggucgucuugacc

SEQ ID NO: 280401 - RNA, 32 nt, Human
uuuuacagcuacaagaacuuucuugaaaaucu

SEQ ID NO: 280402 - RNA, 32 nt, Human
uuuuacaggggauuaugaucaaaagugauuuu

SEQ ID NO: 280403 - RNA, 32 nt, Human
uuuuacaguaacaugaauaaagccaaaccugc

SEQ ID NO: 280404 - RNA, 32 nt, Human
uuuuacaguauuccucacaaagggcuucaggu

SEQ ID NO: 280405 - RNA, 32 nt, Human
uuuuacagugagcuuucccauguuuuuauguc

SEQ ID NO: 280406 - RNA, 32 nt, Human
uuuuacauacaaaaauacuugggguuguuuau

SEQ ID NO: 280407 - RNA, 32 nt, Human
uuuuacauacaaauacccucaagaauaauaaa

SEQ ID NO: 280408 - RNA, 32 nt, Human
uuuuacauagcuaugaucguuguguacauucu

SEQ ID NO: 280409 - RNA, 32 nt, Human
uuuuacauaugaaagaguggauuuucagagac

SEQ ID NO: 280410 - RNA, 32 nt, Human
uuuuacaucuaguuaggagaagaaaaguaagu

SEQ ID NO: 280411 - RNA, 32 nt, Human
uuuuacaugaacuugcaaucauggacagcaac

SEQ ID NO: 280412 - RNA, 32 nt, Human
uuuuaccaaaaauauccagagguuacuggagu

SEQ ID NO: 280413 - RNA, 32 nt, Human
uuuuaccaccuauccugaucuuugaagguagg

SEQ ID NO: 280414 - RNA, 32 nt, Human
uuuuaccacugcacuccagcuugggcgacgga

SEQ ID NO: 280415 - RNA, 32 nt, Human
uuuuaccagucauuguuauauuacaaacagac

SEQ ID NO: 280416 - RNA, 32 nt, Human
uuuuaccauguuggccagagugguuuugaacu

SEQ ID NO: 280417 - RNA, 32 nt, Human
uuuuaccauguuggccaggcuggucuugaacu

SEQ ID NO: 280418 - RNA, 32 nt, Human
uuuuacccaccaccccucuaccucuucagagc

SEQ ID NO: 280419 - RNA, 32 nt, Human
uuuuacccagcaccuccggacacucaccuuca

SEQ ID NO: 280420 - RNA, 32 nt, Human
uuuuacccagcaccuguccagugaaacaacuu

SEQ ID NO: 280421 - RNA, 32 nt, Human
uuuuacccaggccagugcagagagguguuacc

SEQ ID NO: 280422 - RNA, 32 nt, Human
uuuuacccauuauuccuacucccuucauccug

SEQ ID NO: 280423 - RNA, 32 nt, Human
uuuuaccccaaaacucagacaggacuuucuau

SEQ ID NO: 280424 - RNA, 32 nt, Human
uuuuaccccgaaacaggaaggaacaggggucc

SEQ ID NO: 280425 - RNA, 32 nt, Human
uuuuaccccuacucucuacuuuuucacccaaa

SEQ ID NO: 280426 - RNA, 32 nt, Human
uuuuaccccuuucccugcaaccuccuugacuc

SEQ ID NO: 280427 - RNA, 20 nt, Human
uuuuacccuccccucguucc

SEQ ID NO: 280428 - RNA, 18 nt, Human
uuuuacccuggguugcug

SEQ ID NO: 280429 - RNA, 32 nt, Human
uuuuacccuguugccauguaugauuauuccuu

SEQ ID NO: 280430 - RNA, 32 nt, Human
uuuuacccuuuaaguagcuccucuucccucgc

SEQ ID NO: 280431 - RNA, 32 nt, Human
uuuuacccuuuagacuguagccuggauauuau

SEQ ID NO: 280432 - RNA, 32 nt, Human
uuuuaccgcccaggcuggagugcagugccaug

SEQ ID NO: 280433 - RNA, 32 nt, Human
uuuuaccucacacccaaagcauuuugccuacc

SEQ ID NO: 280434 - RNA, 21 nt, Human
uuuuaccuccucucccagaca

SEQ ID NO: 280435 - RNA, 32 nt, Human
uuuuaccugcucauuaugauuccuccuuuuag

SEQ ID NO: 280436 - RNA, 32 nt, Human
uuuuaccuggugucuguguauugccuguguuu

SEQ ID NO: 280437 - RNA, 32 nt, Human
uuuuaccuguuguucacaacuaguuuucuuau

SEQ ID NO: 280438 - RNA, 32 nt, Human
uuuuaccuuccagugcaaauccugcuccuuug

SEQ ID NO: 280439 - RNA, 32 nt, Human
uuuuaccuucccuuuuucauccugucuucaaa

SEQ ID NO: 280440 - RNA, 32 nt, Human
uuuuaccuuccugguuggcuguguucuuaggg

SEQ ID NO: 280441 - RNA, 32 nt, Human
uuuuaccuugacuuaccuucugucaccauauc

SEQ ID NO: 280442 - RNA, 32 nt, Human
uuuuaccuuguccuuguuaagaauuucuugaa

SEQ ID NO: 280443 - RNA, 32 nt, Human
uuuuacgacaacuacuuugaccugccaggagc

SEQ ID NO: 280444 - RNA, 32 nt, Human
uuuuacgucuuuggaggaacagcucccuagug

SEQ ID NO: 280445 - RNA, 32 nt, Human
uuuuacuagacaggguuucaccauguuggcua

SEQ ID NO: 280446 - RNA, 32 nt, Human
uuuuacuauauaccuuuccuuggccaccaagu

SEQ ID NO: 280447 - RNA, 32 nt, Human
uuuuacuauccucaggcauccauuccaaucaa

SEQ ID NO: 280448 - RNA, 32 nt, Human
uuuuacucaaagcucuagccuuuaggauaggu

SEQ ID NO: 280449 - RNA, 32 nt, Human
uuuuacucacacccuucucuccuuucucgucc

SEQ ID NO: 280450 - RNA, 32 nt, Human
uuuuacucagcuuuauaacaaauguggcucca

SEQ ID NO: 280451 - RNA, 32 nt, Human
uuuuacucuccucuugcauugauucaguuauu

SEQ ID NO: 280452 - RNA, 32 nt, Human
uuuuacucuguccuguguccugacugaagcga

SEQ ID NO: 280453 - RNA, 32 nt, Human
uuuuacucuugccugugaaccucaugcaugaa

SEQ ID NO: 280454 - RNA, 32 nt, Human
uuuuacugaaguauaccaugcauucaaaaagu

SEQ ID NO: 280455 - RNA, 32 nt, Human
uuuuacugagugcuaaggaagcauaucaauuc

SEQ ID NO: 280456 - RNA, 32 nt, Human
uuuuacugaugcugggauuauaggugugagcc

SEQ ID NO: 280457 - RNA, 32 nt, Human
uuuuacugcaucuauugagaugaucaauguuu

SEQ ID NO: 280458 - RNA, 32 nt, Human
uuuuacugccuuugcuaggcuuuugcuuagca

SEQ ID NO: 280459 - RNA, 32 nt, Human
uuuuacuggauuucuuuuucuccugauuuucg

SEQ ID NO: 280460 - RNA, 32 nt, Human
uuuuacuggcuuugacuggagguuguuuuugc

SEQ ID NO: 280461 - RNA, 32 nt, Human
uuuuacuggggaggaggaagcggacagaggaa

SEQ ID NO: 280462 - RNA, 32 nt, Human
uuuuacuggggugagaggggcaugaagagaaa

SEQ ID NO: 280463 - RNA, 32 nt, Human
uuuuacuguuucaauaaccucugccuccccca

SEQ ID NO: 280464 - RNA, 32 nt, Human
uuuuacuuaauuaagaaauggaauuuauauac

SEQ ID NO: 280465 - RNA, 32 nt, Human
uuuuacuuagagaaaugcugccuccaaagcac

SEQ ID NO: 280466 - RNA, 32 nt, Human
uuuuacuuagguuacaguuaucagaaagccag

SEQ ID NO: 280467 - RNA, 32 nt, Human
uuuuacuucagaaauccaaacauuagagaauu

SEQ ID NO: 280468 - RNA, 32 nt, Human
uuuuacuuccaaugcuagcugugaccccugua

SEQ ID NO: 280469 - RNA, 32 nt, Human
uuuuacuucucccuugaguccccaugcuuugu

SEQ ID NO: 280470 - RNA, 32 nt, Human
uuuuacuucuguguccuaaggguaauuucuca

SEQ ID NO: 280471 - RNA, 25 nt, Human
uuuuacuucuuaccucugacuugga

SEQ ID NO: 280472 - RNA, 32 nt, Human
uuuuacuugacaggguuucaccauguuggcua

SEQ ID NO: 280473 - RNA, 32 nt, Human
uuuuacuuuaauggagugacugugaagugguu

SEQ ID NO: 280474 - RNA, 32 nt, Human
uuuuacuuuagggguuguaaagcuacuuuauu

SEQ ID NO: 280475 - RNA, 32 nt, Human
uuuuacuuuccuguaacugcuuuugcuuuuaa

SEQ ID NO: 280476 - RNA, 32 nt, Human
uuuuacuuugcuuuuaacauuuccuuggggug

SEQ ID NO: 280477 - RNA, 32 nt, Human
uuuuacuuuguaaauguggugccaaaucccug

SEQ ID NO: 280478 - RNA, 32 nt, Human
uuuuacuuuugaaacaggaaugauuucuccuu

SEQ ID NO: 280479 - RNA, 32 nt, Human
uuuuacuuuuucucuuucuuccucccuuucuc

SEQ ID NO: 280480 - RNA, 32 nt, Human
uuuuagaaaaggauuuacuauacuucacucuu

SEQ ID NO: 280481 - RNA, 32 nt, Human
uuuuagaaacccacuguuaaaauuuaaaaagg

SEQ ID NO: 280482 - RNA, 32 nt, Human
uuuuagaaacuaagagaaugauaggcuuuugu

SEQ ID NO: 280483 - RNA, 32 nt, Human
uuuuagaaagcauuugaaugcauuuuguuugg

SEQ ID NO: 280484 - RNA, 32 nt, Human
uuuuagaaagucuauaccauguucuuucguua

SEQ ID NO: 280485 - RNA, 23 nt, Human
uuuuagaaaguucuauuuuucca

SEQ ID NO: 280486 - RNA, 23 nt, Human
uuuuagaaauuccauuucuucua

SEQ ID NO: 280487 - RNA, 32 nt, Human
uuuuagaaccaaagaacaucugagaugauucu

SEQ ID NO: 280488 - RNA, 32 nt, Human
uuuuagaacuaaacacaucuguaaaacuaaau

SEQ ID NO: 280489 - RNA, 32 nt, Human
uuuuagaacuuaagacauuagauguguggcua

SEQ ID NO: 280490 - RNA, 32 nt, Human
uuuuagaaggaaaagaaagaggauuaaagaga

SEQ ID NO: 280491 - RNA, 32 nt, Human
uuuuagaauaaggaggaggagggagaagagaa

SEQ ID NO: 280492 - RNA, 32 nt, Human
uuuuagacagggucucacuguugcccaggcug

SEQ ID NO: 280493 - RNA, 32 nt, Human
uuuuagaccaaaauaugaaagacuuacaggcc

SEQ ID NO: 280494 - RNA, 32 nt, Human
uuuuagaccaaagauuggguucuagaaaaugc

SEQ ID NO: 280495 - RNA, 32 nt, Human
uuuuagaccagccuggacaacauagcaagacc

SEQ ID NO: 280496 - RNA, 32 nt, Human
uuuuagaccagccuggccaacaugacgaaacc

SEQ ID NO: 280497 - RNA, 32 nt, Human
uuuuagaccagccugggcaacacaguaagacc

SEQ ID NO: 280498 - RNA, 32 nt, Human
uuuuagacuggcuucuuucacuuagcaauaug

SEQ ID NO: 280499 - RNA, 32 nt, Human
uuuuagacuucucccuccuuuuuguccccauc

SEQ ID NO: 280500 - RNA, 32 nt, Human
uuuuagagaaaagaccuuuguagauucaacaa

SEQ ID NO: 280501 - RNA, 32 nt, Human
uuuuagagacgggguuucaccauguuggccag

SEQ ID NO: 280502 - RNA, 32 nt, Human
uuuuagagacgggguuucacucugucacccag

SEQ ID NO: 280503 - RNA, 32 nt, Human
uuuuagagagugacgacauggaaaaugaauuu

SEQ ID NO: 280504 - RNA, 32 nt, Human
uuuuagagaugaguucuugcucugucaccuag

SEQ ID NO: 280505 - RNA, 32 nt, Human
uuuuagagaugggaucucaccauguugcccag

SEQ ID NO: 280506 - RNA, 32 nt, Human
uuuuagagauggggaucucacuguguuggcca

SEQ ID NO: 280507 - RNA, 32 nt, Human
uuuuagagauggggucuggcuauguugcccag

SEQ ID NO: 280508 - RNA, 32 nt, Human
uuuuagagauggggucuugcuauauugcccag

SEQ ID NO: 280509 - RNA, 32 nt, Human
uuuuagagauggguucuucugguugauacaga

SEQ ID NO: 280510 - RNA, 23 nt, Human
uuuuagaggaaauguaacuugga

SEQ ID NO: 280511 - RNA, 32 nt, Human
uuuuagaggagagaggaggaggaggaggcuga

SEQ ID NO: 280512 - RNA, 32 nt, Human
uuuuagaggagauugugugagaaacaaaggca

SEQ ID NO: 280513 - RNA, 32 nt, Human
uuuuagagucuugcuucccaaaccagaaaaag

SEQ ID NO: 280514 - RNA, 31 nt, Human
uuuuagagugagagaaugaagggggugaggc

SEQ ID NO: 280515 - RNA, 32 nt, Human
uuuuagagugucauucuaaaccccagauucaa

SEQ ID NO: 280516 - RNA, 32 nt, Human
uuuuagaguuauguuuguaaauuaccuggcac

SEQ ID NO: 280517 - RNA, 32 nt, Human
uuuuagaucccagagaaaucaggugugauuag

SEQ ID NO: 280518 - RNA, 32 nt, Human
uuuuagauggaguuuugcaguggugcaaucau

SEQ ID NO: 280519 - RNA, 18 nt, Human
uuuuagauucucagaaua

SEQ ID NO: 280520 - RNA, 32 nt, Human
uuuuagauuucaaacaguauaggauaaaauug

SEQ ID NO: 280521 - RNA, 32 nt, Human
uuuuagcaagguaacaguugcccagggcagua

SEQ ID NO: 280522 - RNA, 32 nt, Human
uuuuagcacauccauaucuuuucuacguugaa

SEQ ID NO: 280523 - RNA, 32 nt, Human
uuuuagcacccagauggcauugcagugccagu

SEQ ID NO: 280524 - RNA, 32 nt, Human
uuuuagcaccuuguuucacuccugccuccaaa

SEQ ID NO: 280525 - RNA, 32 nt, Human
uuuuagcagacaggguuucaccauguuggcca

SEQ ID NO: 280526 - RNA, 32 nt, Human
uuuuagcagagagagaaagagaugaaauacac

SEQ ID NO: 280527 - RNA, 32 nt, Human
uuuuagcaugacgacuuuggaccaugugauug

SEQ ID NO: 280528 - RNA, 32 nt, Human
uuuuagcaugaugauggauggauggacuggag

SEQ ID NO: 280529 - RNA, 32 nt, Human
uuuuagccaaaaaccuaggguucauuuucagg

SEQ ID NO: 280530 - RNA, 31 nt, Human
uuuuagccaguguccaggcuaucagcagaga

SEQ ID NO: 280531 - RNA, 32 nt, Human
uuuuagccuuaaauuuuugucauuuuaaaauc

SEQ ID NO: 280532 - RNA, 32 nt, Human
uuuuagccuucucuguucauuuccucaaaaag

SEQ ID NO: 280533 - RNA, 32 nt, Human
uuuuagcgauggcuucugcucucaacagcaaa

SEQ ID NO: 280534 - RNA, 32 nt, Human
uuuuagcggggagggggauaggaagacgcaga

SEQ ID NO: 280535 - RNA, 32 nt, Human
uuuuagcgucacugcgaacacuccuuugcaaa

SEQ ID NO: 280536 - RNA, 32 nt, Human
uuuuagcuaggaggacggaaguugcuggcagg

SEQ ID NO: 280537 - RNA, 32 nt, Human
uuuuagcucacuacaaccuccacuuuccaggu

SEQ ID NO: 280538 - RNA, 32 nt, Human
uuuuagcucuauacucucuggcuccccucauc

SEQ ID NO: 280539 - RNA, 32 nt, Human
uuuuagcucugugccugucuccagucaggcug

SEQ ID NO: 280540 - RNA, 32 nt, Human
uuuuagcugggcacaugacugcccucaauaaa

SEQ ID NO: 280541 - RNA, 32 nt, Human
uuuuagcuggugguagaaggcugccuacacug

SEQ ID NO: 280542 - RNA, 32 nt, Human
uuuuagcugucuugugugcauccacagucugc

SEQ ID NO: 280543 - RNA, 31 nt, Human
uuuuagcuguuucagcaucaauccaacuuaa

SEQ ID NO: 280544 - RNA, 32 nt, Human
uuuuagcuucaagguuucggagucuaaacaaa

SEQ ID NO: 280545 - RNA, 32 nt, Human
uuuuagcuuggaaacagucuuccacuaaccuu

SEQ ID NO: 280546 - RNA, 32 nt, Human
uuuuagcuuuuacucucaacuugcuguucucu

SEQ ID NO: 280547 - RNA, 32 nt, Human
uuuuaggacaucuuuugauaccuuuaaaagaa

SEQ ID NO: 280548 - RNA, 24 nt, Human
uuuuaggaccugaagaaucuuuau

SEQ ID NO: 280549 - RNA, 32 nt, Human
uuuuaggaggcugaggugggaggaucgcuuaa

SEQ ID NO: 280550 - RNA, 32 nt, Human
uuuuaggauaagaggugagaacugggcaaaag

SEQ ID NO: 280551 - RNA, 32 nt, Human
uuuuaggauccagcaaaguucagggacucugg

SEQ ID NO: 280552 - RNA, 32 nt, Human
uuuuaggcacccauagggauguuuuuaggaug

SEQ ID NO: 280553 - RNA, 32 nt, Human
uuuuaggcacugacuccgaacaggauucuuuc

SEQ ID NO: 280554 - RNA, 32 nt, Human
uuuuaggccaauuucuaaaaagacugaggccu

SEQ ID NO: 280555 - RNA, 27 nt, Human
uuuuaggccacaauggaacaacuuuac

SEQ ID NO: 280556 - RNA, 22 nt, Human
uuuuaggccaggaaucuucugc

SEQ ID NO: 280557 - RNA, 26 nt, Human
uuuuaggcuuagagacagaaacuuua

SEQ ID NO: 280558 - RNA, 32 nt, Human
uuuuagggaccuaggugcaagugcaaaggaaa

SEQ ID NO: 280559 - RNA, 32 nt, Human
uuuuagggacucaggagaaucuugaaacuuac

SEQ ID NO: 280560 - RNA, 32 nt, Human
uuuuagggcaaguauagguugcacugauccug

SEQ ID NO: 280561 - RNA, 32 nt, Human
uuuuagggcagugggaaccucugccuccacuu

SEQ ID NO: 280562 - RNA, 32 nt, Human
uuuuagggccuggcccuagacccacugaauca

SEQ ID NO: 280563 - RNA, 32 nt, Human
uuuuaggggaaggagagagggaagggucaggg

SEQ ID NO: 280564 - RNA, 32 nt, Human
uuuuaggguuuuaggguuguaggguuucuuuu

SEQ ID NO: 280565 - RNA, 32 nt, Human
uuuuagguagcugggagaagaggggcuucugg

SEQ ID NO: 280566 - RNA, 23 nt, Human
uuuuaggucugacuaauuucuau

SEQ ID NO: 280567 - RNA, 32 nt, Human
uuuuaggucugucaguacugcacugcaagaau

SEQ ID NO: 280568 - RNA, 32 nt, Human
uuuuagguugacuagugguuguaguugaaaau

SEQ ID NO: 280569 - RNA, 32 nt, Human
uuuuagguuuucccaggacaggacagucccca

SEQ ID NO: 280570 - RNA, 32 nt, Human
uuuuaguaacauccuuguuuagugucuucuca

SEQ ID NO: 280571 - RNA, 32 nt, Human
uuuuaguaaucacuacuauaucaugucuuuua

SEQ ID NO: 280572 - RNA, 32 nt, Human
uuuuaguagaagagaaagaugcaggcccauag

SEQ ID NO: 280573 - RNA, 32 nt, Human
uuuuaguagagaaacccuaugucuauuaaaaa

SEQ ID NO: 280574 - RNA, 32 nt, Human
uuuuaguagagacaggguuggccaggcugguc

SEQ ID NO: 280575 - RNA, 32 nt, Human
uuuuaguagagagguuucaccauguuggccag

SEQ ID NO: 280576 - RNA, 32 nt, Human
uuuuaguagagauguuucaccauguuggccag

SEQ ID NO: 280577 - RNA, 32 nt, Human
uuuuaguagcuucucaggugauucagaugcuc

SEQ ID NO: 280578 - RNA, 32 nt, Human
uuuuaguauuaaaauacauguaaagaucagga

SEQ ID NO: 280579 - RNA, 32 nt, Human
uuuuagucaaccuaaauuuuuccuacuuucuu

SEQ ID NO: 280580 - RNA, 32 nt, Human
uuuuagucauuucuuugcugucccaaaaaucu

SEQ ID NO: 280581 - RNA, 32 nt, Human
uuuuaguccuucccgcccuccugccucucccu

SEQ ID NO: 280582 - RNA, 32 nt, Human
uuuuagugaaggucagcaguuuucuaacuugu

SEQ ID NO: 280583 - RNA, 32 nt, Human
uuuuagugacauuuuaaaagcagucagauucu

SEQ ID NO: 280584 - RNA, 32 nt, Human
uuuuagugccuaaaguccuauuguuucucugu

SEQ ID NO: 280585 - RNA, 32 nt, Human
uuuuaguggacaggguuucaccauguuggcca

SEQ ID NO: 280586 - RNA, 32 nt, Human
uuuuagugggcccugauggucauuuuucuaaa

SEQ ID NO: 280587 - RNA, 32 nt, Human
uuuuaguguaguucccaccucauucaugaaaa

SEQ ID NO: 280588 - RNA, 32 nt, Human
uuuuagugucauucugccugugcucagagcuc

SEQ ID NO: 280589 - RNA, 32 nt, Human
uuuuaguguccuauaauaacaaaaccagacau

SEQ ID NO: 280590 - RNA, 32 nt, Human
uuuuagugugccaaguagcagugcaaaaugau

SEQ ID NO: 280591 - RNA, 32 nt, Human
uuuuagugugggcucuuauugccaggugaugc

SEQ ID NO: 280592 - RNA, 32 nt, Human
uuuuaguucacugcaacuuccgcuucccaggu

SEQ ID NO: 280593 - RNA, 32 nt, Human
uuuuaguuccaacaaagaaaggugccaugucu

SEQ ID NO: 280594 - RNA, 32 nt, Human
uuuuaguucuuauuccggagccucaaacaagc

SEQ ID NO: 280595 - RNA, 32 nt, Human
uuuuaguugacucacaggcccuggagaagcag

SEQ ID NO: 280596 - RNA, 32 nt, Human
uuuuaguugggcagugcucccacccacccucc

SEQ ID NO: 280597 - RNA, 32 nt, Human
uuuuaguuugcaccugaaucaggggcugucag

SEQ ID NO: 280598 - RNA, 32 nt, Human
uuuuaguuuucucuuagaacauuguauuacag

SEQ ID NO: 280599 - RNA, 32 nt, Human
uuuuauaaaauuauuugaauauuguuuaaugu

SEQ ID NO: 280600 - RNA, 32 nt, Human
uuuuauaaacaacaucaaaauggcagaaccau

SEQ ID NO: 280601 - RNA, 32 nt, Human
uuuuauaaacccagugaacuccugcacuggca

SEQ ID NO: 280602 - RNA, 32 nt, Human
uuuuauaacauacauuuuucugcuaauucauu

SEQ ID NO: 280603 - RNA, 32 nt, Human
uuuuauaaccaccaucauuccuugucucuuca

SEQ ID NO: 280604 - RNA, 22 nt, Human
uuuuauaacugaaauacuuuac

SEQ ID NO: 280605 - RNA, 22 nt, Human
uuuuauaacuguacauuuuaca

SEQ ID NO: 280606 - RNA, 32 nt, Human
uuuuauaagggguuacucuuucaagaguaaca

SEQ ID NO: 280607 - RNA, 32 nt, Human
uuuuauaauacugaaaaguuuugcaaauacaa

SEQ ID NO: 280608 - RNA, 32 nt, Human
uuuuauaaucaauaguagguugggucuuuagc

SEQ ID NO: 280609 - RNA, 32 nt, Human
uuuuauaaucugauuuguuuuccucuuaacgu

SEQ ID NO: 280610 - RNA, 32 nt, Human
uuuuauaaugcagagugagaacuuucccuacc

SEQ ID NO: 280611 - RNA, 32 nt, Human
uuuuauaaugcagagugagaacuuucccuucc

SEQ ID NO: 280612 - RNA, 32 nt, Human
uuuuauaaugucccugcccagggaccuguuag

SEQ ID NO: 280613 - RNA, 32 nt, Human
uuuuauaauguucuuguauagcagcucgguac

SEQ ID NO: 280614 - RNA, 22 nt, Human
uuuuauaauucauacaugagaa

SEQ ID NO: 280615 - RNA, 32 nt, Human
uuuuauacagcuuuccucuuuuucaucagguu

SEQ ID NO: 280616 - RNA, 32 nt, Human
uuuuauacaggcaacugccuuguugaaaauca

SEQ ID NO: 280617 - RNA, 32 nt, Human
uuuuauaccuaucugagugaauuacagacaac

SEQ ID NO: 280618 - RNA, 32 nt, Human
uuuuauacucagaaaaggaaaaagaagcaaaa

SEQ ID NO: 280619 - RNA, 32 nt, Human
uuuuauagaaaaucauuucagucuccugaggu

SEQ ID NO: 280620 - RNA, 32 nt, Human
uuuuauagaaauccagaggagugaagaggacu

SEQ ID NO: 280621 - RNA, 32 nt, Human
uuuuauagagggcugaccaagcugaaacucua

SEQ ID NO: 280622 - RNA, 32 nt, Human
uuuuauagcaaaagaccaaauuagcuguagag

SEQ ID NO: 280623 - RNA, 32 nt, Human
uuuuauagcaacuauagcaacagccaugagag

SEQ ID NO: 280624 - RNA, 30 nt, Human
uuuuauagcuugcagauaaagauccaacaa

SEQ ID NO: 280625 - RNA, 32 nt, Human
uuuuauagcuuuugagcuaacauaacuuuugu

SEQ ID NO: 280626 - RNA, 32 nt, Human
uuuuauaggugaggaaacugagcccagugaag

SEQ ID NO: 280627 - RNA, 32 nt, Human
uuuuauaguuuugccuuucacauuugucuuua

SEQ ID NO: 280628 - RNA, 32 nt, Human
uuuuauauacaaaggggaccagugccacagaa

SEQ ID NO: 280629 - RNA, 31 nt, Human
uuuuauauaguucuaugacuguugaaacauc

SEQ ID NO: 280630 - RNA, 32 nt, Human
uuuuauaucacagcagcuccugugcugaccuu

SEQ ID NO: 280631 - RNA, 32 nt, Human
uuuuauaucuuagaauuuuauauuuauuuaaa

SEQ ID NO: 280632 - RNA, 32 nt, Human
uuuuauaugagacucaagaacaggccucauuc

SEQ ID NO: 280633 - RNA, 32 nt, Human
uuuuauauucuagaaauuuauuuuggaaguac

SEQ ID NO: 280634 - RNA, 32 nt, Human
uuuuauauucuuuagaaugugccuucugaccu

SEQ ID NO: 280635 - RNA, 32 nt, Human
uuuuaucacagaaccaguaaguggaacauaau

SEQ ID NO: 280636 - RNA, 32 nt, Human
uuuuaucacaguuagacagagaauggucucuu

SEQ ID NO: 280637 - RNA, 32 nt, Human
uuuuaucacaugcuggcacuaaaaggcagaag

SEQ ID NO: 280638 - RNA, 32 nt, Human
uuuuaucacuuugagaauaaaaaguuacuaau

SEQ ID NO: 280639 - RNA, 32 nt, Human
uuuuaucagaauugcagaacuguaguaacagu

SEQ ID NO: 280640 - RNA, 32 nt, Human
uuuuaucagaugauuuuuaaacaaaaagaaaa

SEQ ID NO: 280641 - RNA, 32 nt, Human
uuuuaucaggcagccagagccugggagguggu

SEQ ID NO: 280642 - RNA, 32 nt, Human
uuuuaucaucccaaaaugaaacccuguagcca

SEQ ID NO: 280643 - RNA, 32 nt, Human
uuuuaucaugcuguugcuggggaauaugacua

SEQ ID NO: 280644 - RNA, 32 nt, Human
uuuuaucauuagcucauguauuugaggaagag

SEQ ID NO: 280645 - RNA, 32 nt, Human
uuuuaucauuuauaauuucauuuuucacuauu

SEQ ID NO: 280646 - RNA, 32 nt, Human
uuuuauccauuuucaucuucuuuaucuuuaua

SEQ ID NO: 280647 - RNA, 32 nt, Human
uuuuauccauuuucaucuuuauauucuguaac

SEQ ID NO: 280648 - RNA, 32 nt, Human
uuuuauccauuuuccuucuagucuuugaauuu

SEQ ID NO: 280649 - RNA, 32 nt, Human
uuuuaucccaggaggcaggacaacacugagac

SEQ ID NO: 280650 - RNA, 32 nt, Human
uuuuauccccuucaugucacuucuucggcauu

SEQ ID NO: 280651 - RNA, 32 nt, Human
uuuuauccuugugcacugcaggccugguacuc

SEQ ID NO: 280652 - RNA, 32 nt, Human
uuuuaucuauuuucucuacggcuuaggcuaug

SEQ ID NO: 280653 - RNA, 32 nt, Human
uuuuaucuccccuucacaugcaucaaguuauu

SEQ ID NO: 280654 - RNA, 32 nt, Human
uuuuaucuccugccuuucauucuauacccugc

SEQ ID NO: 280655 - RNA, 32 nt, Human
uuuuaucucuguccugaaguugcaucaggauc

SEQ ID NO: 280656 - RNA, 32 nt, Human
uuuuaucugcaugaaguuguugugcuuacgcc

SEQ ID NO: 280657 - RNA, 32 nt, Human
uuuuaucugguguuuuuacuucugccugcguu

SEQ ID NO: 280658 - RNA, 32 nt, Human
uuuuaucugguucuucguucucugucacucuu

SEQ ID NO: 280659 - RNA, 32 nt, Human
uuuuaucugugcaaagaagucuuccccagugc

SEQ ID NO: 280660 - RNA, 32 nt, Human
uuuuaucugugggggagggagggagacgugaa

SEQ ID NO: 280661 - RNA, 32 nt, Human
uuuuaucuugcccaaagagcucccucucaagg

SEQ ID NO: 280662 - RNA, 32 nt, Human
uuuuaugaaauguuagccgaaagaagagagga

SEQ ID NO: 280663 - RNA, 20 nt, Human
uuuuaugaacuccacaggaa

SEQ ID NO: 280664 - RNA, 32 nt, Human
uuuuaugaaggccauggaauaaaaggguccaa

SEQ ID NO: 280665 - RNA, 32 nt, Human
uuuuaugaauaauaugcagagaugcauauuag

SEQ ID NO: 280666 - RNA, 23 nt, Human
uuuuaugaauucucuacauguuu

SEQ ID NO: 280667 - RNA, 23 nt, Human
uuuuaugaauucucugcauguuu

SEQ ID NO: 280668 - RNA, 32 nt, Human
uuuuaugaauuuagugcagcuguuauggcuca

SEQ ID NO: 280669 - RNA, 32 nt, Human
uuuuaugacuaugccuaauguaaagaaaaugu

SEQ ID NO: 280670 - RNA, 32 nt, Human
uuuuaugagacagggucuugcucuguccccca

SEQ ID NO: 280671 - RNA, 32 nt, Human
uuuuaugagccccaguuuucugggcuuaguuu

SEQ ID NO: 280672 - RNA, 29 nt, Human
uuuuaugauauaauaaaugucuuaguacc

SEQ ID NO: 280673 - RNA, 32 nt, Human
uuuuaugauugcagcccucagccugggcugcc

SEQ ID NO: 280674 - RNA, 32 nt, Human
uuuuaugcaguaggcauuacuacaguacaugg

SEQ ID NO: 280675 - RNA, 32 nt, Human
uuuuaugccaucugucucaaaucaaagaguca

SEQ ID NO: 280676 - RNA, 32 nt, Human
uuuuaugccuuaaaauagguuucugauuacau

SEQ ID NO: 280677 - RNA, 32 nt, Human
uuuuauggagaaggagguggaggcaggauggg

SEQ ID NO: 280678 - RNA, 32 nt, Human
uuuuauggaugagcaaacugaggcagagugcu

SEQ ID NO: 280679 - RNA, 32 nt, Human
uuuuauggcaccuauuucuuucuuggagugcc

SEQ ID NO: 280680 - RNA, 32 nt, Human
uuuuauggcaguucuggugaauguucaauggg

SEQ ID NO: 280681 - RNA, 32 nt, Human
uuuuauggccuaaauauuugacaucucuuugg

SEQ ID NO: 280682 - RNA, 32 nt, Human
uuuuauggccuauccucaggaggacugcuaag

SEQ ID NO: 280683 - RNA, 32 nt, Human
uuuuauggcugcauaguauuucaugguguaua

SEQ ID NO: 280684 - RNA, 29 nt, Human
uuuuaugggagagagacucuuugagagug

SEQ ID NO: 280685 - RNA, 32 nt, Human
uuuuaugguagggagaguaagucagcaucggu

SEQ ID NO: 280686 - RNA, 32 nt, Human
uuuuaugguuccuuuaaaugcccuagaauucc

SEQ ID NO: 280687 - RNA, 32 nt, Human
uuuuaugguuccuuuaaaugcucuggcuauuc

SEQ ID NO: 280688 - RNA, 20 nt, Human
uuuuaugguuucuaauaugu

SEQ ID NO: 280689 - RNA, 32 nt, Human
uuuuauguaagcuuuuucacuuaguauuuuau

SEQ ID NO: 280690 - RNA, 32 nt, Human
uuuuauguauguuuacacugucaaacaucugg

SEQ ID NO: 280691 - RNA, 32 nt, Human
uuuuauguauuauguguguauguaugggacag

SEQ ID NO: 280692 - RNA, 32 nt, Human
uuuuauguauugagcccuguguuaacauuuca

SEQ ID NO: 280693 - RNA, 32 nt, Human
uuuuauguauuuuuauaaugccagauuucuuu

SEQ ID NO: 280694 - RNA, 32 nt, Human
uuuuaugucaacugaacacuguaggguaccuu

SEQ ID NO: 280695 - RNA, 32 nt, Human
uuuuaugucauuguuccauuaccuugaauguu

SEQ ID NO: 280696 - RNA, 32 nt, Human
uuuuaugugugugguucuccaucauauuuaac

SEQ ID NO: 280697 - RNA, 32 nt, Human
uuuuauguguuaaaauaaacauuguuuuugag

SEQ ID NO: 280698 - RNA, 32 nt, Human
uuuuauguucacaccaccacauucccauucac

SEQ ID NO: 280699 - RNA, 32 nt, Human
uuuuauguugacugaaaguaccaggaagauac

SEQ ID NO: 280700 - RNA, 32 nt, Human
uuuuauguugcagauacauaguugcucuagag

SEQ ID NO: 280701 - RNA, 32 nt, Human
uuuuauguugucuuaaagauuuuguccaugaa

SEQ ID NO: 280702 - RNA, 32 nt, Human
uuuuauguuuaggcuuauuuuuaaauuaacau

SEQ ID NO: 280703 - RNA, 32 nt, Human
uuuuauuaaagaaaaggauguuacacugaauc

SEQ ID NO: 280704 - RNA, 32 nt, Human
uuuuauuaagccaccacuccuggccaacugua

SEQ ID NO: 280705 - RNA, 32 nt, Human
uuuuauuagggauuuucaaaaggggagggagu

SEQ ID NO: 280706 - RNA, 32 nt, Human
uuuuauuaggugagcauuauuuauaaacuuug

SEQ ID NO: 280707 - RNA, 32 nt, Human
uuuuauuauacuuccagggaaggaaagagcug

SEQ ID NO: 280708 - RNA, 32 nt, Human
uuuuauucaagccaccagaguaagaauuuggg

SEQ ID NO: 280709 - RNA, 32 nt, Human
uuuuauucacagagaaaguuggcuuugauguc

SEQ ID NO: 280710 - RNA, 32 nt, Human
uuuuauucagguacuuuaugugcuacuaugcu

SEQ ID NO: 280711 - RNA, 32 nt, Human
uuuuauucauucuaaaucuuauuaaccggaau

SEQ ID NO: 280712 - RNA, 32 nt, Human
uuuuauucauucuguuugcuuaauucagagua

SEQ ID NO: 280713 - RNA, 32 nt, Human
uuuuauucuccuccucccuccccgcccucacc

SEQ ID NO: 280714 - RNA, 32 nt, Human
uuuuauucuccucuuccuuuuacccuagucuc

SEQ ID NO: 280715 - RNA, 32 nt, Human
uuuuauucuccuucagagcaacaucagaauug

SEQ ID NO: 280716 - RNA, 32 nt, Human
uuuuauucucuauucuauccugguucugccuc

SEQ ID NO: 280717 - RNA, 32 nt, Human
uuuuauucugacuuccucugauuuuggcaugu

SEQ ID NO: 280718 - RNA, 32 nt, Human
uuuuauucugauucuccucauucccuagacug

SEQ ID NO: 280719 - RNA, 20 nt, Human
uuuuauucuguuauauagug

SEQ ID NO: 280720 - RNA, 32 nt, Human
uuuuauucuucugagugucuauguuaacuucc

SEQ ID NO: 280721 - RNA, 32 nt, Human
uuuuauucuuuuuguggcaguugugaauggga

SEQ ID NO: 280722 - RNA, 32 nt, Human
uuuuauugaagaagccacagaggcugaaauuc

SEQ ID NO: 280723 - RNA, 32 nt, Human
uuuuauugcccaggcagugcucugggcaggaa

SEQ ID NO: 280724 - RNA, 32 nt, Human
uuuuauugcccaggcuggaguguaguggcgca

SEQ ID NO: 280725 - RNA, 32 nt, Human
uuuuauugcuauuucuaaauuuccuuggcuug

SEQ ID NO: 280726 - RNA, 32 nt, Human
uuuuauuguacucuuguucugcccuuguuuuu

SEQ ID NO: 280727 - RNA, 32 nt, Human
uuuuauuguauaaauauaucaccauuuacaug

SEQ ID NO: 280728 - RNA, 32 nt, Human
uuuuauuguuuuuaauugacaauguuuauggg

SEQ ID NO: 280729 - RNA, 32 nt, Human
uuuuauuuaagcuaagaaugcauauguaaccc

SEQ ID NO: 280730 - RNA, 32 nt, Human
uuuuauuuauuagcugaaauguaagcaggcau

SEQ ID NO: 280731 - RNA, 32 nt, Human
uuuuauuucaagaaucagcaguuuuagaauuu

SEQ ID NO: 280732 - RNA, 32 nt, Human
uuuuauuucacucacacuccaguuuguaauaa

SEQ ID NO: 280733 - RNA, 32 nt, Human
uuuuauuuccuggacauccucuucugcuuagg

SEQ ID NO: 280734 - RNA, 32 nt, Human
uuuuauuucuaaggaaagaaugucuucauauu

SEQ ID NO: 280735 - RNA, 32 nt, Human
uuuuauuucuacugauuuuauuuuggauacua

SEQ ID NO: 280736 - RNA, 32 nt, Human
uuuuauuucuggucauagagagagaaggaccu

SEQ ID NO: 280737 - RNA, 32 nt, Human
uuuuauuugguaucauuuucucuucucacaaa

SEQ ID NO: 280738 - RNA, 32 nt, Human
uuuuauuuguuggccgggcaugguggcucacg

SEQ ID NO: 280739 - RNA, 32 nt, Human
uuuuauuuuaaauugaacuuuacccuugucca

SEQ ID NO: 280740 - RNA, 32 nt, Human
uuuuauuuucacccucuguaccccaugaccuu

SEQ ID NO: 280741 - RNA, 32 nt, Human
uuuuauuuucaguucuggcuguguucaacauc

SEQ ID NO: 280742 - RNA, 32 nt, Human
uuuuauuuugagacagagucucacucucucgc

SEQ ID NO: 280743 - RNA, 32 nt, Human
uuuuauuuugagacagagucucacucugucac

SEQ ID NO: 280744 - RNA, 32 nt, Human
uuuuauuuugagacagagucucgcucugucac

SEQ ID NO: 280745 - RNA, 32 nt, Human
uuuuauuuugagacagagucuuggucuguuac

SEQ ID NO: 280746 - RNA, 32 nt, Human
uuuuauuuugagacagagugucacucuguccc

SEQ ID NO: 280747 - RNA, 32 nt, Human
uuuuauuuugagacggagucucauucugucac

SEQ ID NO: 280748 - RNA, 32 nt, Human
uuuuauuuugagacggaguuuugcucugucgc

SEQ ID NO: 280749 - RNA, 32 nt, Human
uuuuauuuugcacggcgcccucccucuaaaua

SEQ ID NO: 280750 - RNA, 32 nt, Human
uuuuauuuuuaauagaugaugccucacuauau

SEQ ID NO: 280751 - RNA, 32 nt, Human
uuuuauuuuugagacagagacuugcuuugucg

SEQ ID NO: 280752 - RNA, 32 nt, Human
uuuucaaaaauuacacuacaaguuuauaagcc

SEQ ID NO: 280753 - RNA, 32 nt, Human
uuuucaaaaggauuuacuuuuuguaaaaagcu

SEQ ID NO: 280754 - RNA, 32 nt, Human
uuuucaaaagugaacaauccugugauaaguug

SEQ ID NO: 280755 - RNA, 32 nt, Human
uuuucaaaaugagagaaguaugagacaucacu

SEQ ID NO: 280756 - RNA, 32 nt, Human
uuuucaaacugaggcucauuagggaaggaacu

SEQ ID NO: 280757 - RNA, 32 nt, Human
uuuucaaagaagcagguucuggugacauuauu

SEQ ID NO: 280758 - RNA, 32 nt, Human
uuuucaaagaagccguuuugauuuucaaagaa

SEQ ID NO: 280759 - RNA, 32 nt, Human
uuuucaaagaauuacuuucuuccauguucaaa

SEQ ID NO: 280760 - RNA, 32 nt, Human
uuuucaaaugauuuuauauucaguugcuacuu

SEQ ID NO: 280761 - RNA, 32 nt, Human
uuuucaaauuuccagccaaaaccaaagauuuc

SEQ ID NO: 280762 - RNA, 32 nt, Human
uuuucaacaauauuuuuccucauagauuuuuc

SEQ ID NO: 280763 - RNA, 32 nt, Human
uuuucaacacaugucucauucuaaauugacgu

SEQ ID NO: 280764 - RNA, 32 nt, Human
uuuucaacauagcagaauuaauguagggagcu

SEQ ID NO: 280765 - RNA, 32 nt, Human
uuuucaacauaugcuuugcuggaacacuguga

SEQ ID NO: 280766 - RNA, 32 nt, Human
uuuucaacuggauaaacuggccuuagucccgc

SEQ ID NO: 280767 - RNA, 32 nt, Human
uuuucaacuuauacugacuuuaauaaaauugu

SEQ ID NO: 280768 - RNA, 32 nt, Human
uuuucaacuuuaaaauggaaaacagucauaua

SEQ ID NO: 280769 - RNA, 32 nt, Human
uuuucaagagguaccccagacaccggccaccc

SEQ ID NO: 280770 - RNA, 32 nt, Human
uuuucaagagucgagggguagagugggguuag

SEQ ID NO: 280771 - RNA, 32 nt, Human
uuuucaaggacacuugcuggguugugcauuaa

SEQ ID NO: 280772 - RNA, 32 nt, Human
uuuucaagguaucagggcaaacaauuuccaaa

SEQ ID NO: 280773 - RNA, 32 nt, Human
uuuucaauaagaauuguaaacauugaacugaa

SEQ ID NO: 280774 - RNA, 32 nt, Human
uuuucaauagccacuaaccuugccugguacag

SEQ ID NO: 280775 - RNA, 32 nt, Human
uuuucaauagccacuaaccuugcuugguacag

SEQ ID NO: 280776 - RNA, 32 nt, Human
uuuucaauauuuuaaaaggagaauuuaaauac

SEQ ID NO: 280777 - RNA, 32 nt, Human
uuuucaaugcuccccuuuccuucuguuuauuu

SEQ ID NO: 280778 - RNA, 32 nt, Human
uuuucaauguagcccaggagguuuuuaaaggc

SEQ ID NO: 280779 - RNA, 32 nt, Human
uuuucaauugacuggugaagaggcccuugugu

SEQ ID NO: 280780 - RNA, 32 nt, Human
uuuucaauuugcuaacaggugcauaaucccug

SEQ ID NO: 280781 - RNA, 32 nt, Human
uuuucacaauguauguagcugaucucauguuc

SEQ ID NO: 280782 - RNA, 31 nt, Human
uuuucacacaaucucuuuacagcagaaucca

SEQ ID NO: 280783 - RNA, 32 nt, Human
uuuucacacagcaaucgagaugagacgccaug

SEQ ID NO: 280784 - RNA, 32 nt, Human
uuuucacacccacuccagcccucugccccagu

SEQ ID NO: 280785 - RNA, 32 nt, Human
uuuucacaccuccaacagacucucauuaagau

SEQ ID NO: 280786 - RNA, 32 nt, Human
uuuucacaccucccucccacacccagccuacu

SEQ ID NO: 280787 - RNA, 32 nt, Human
uuuucacacugggcgaagggaggacuccugag

SEQ ID NO: 280788 - RNA, 32 nt, Human
uuuucacacuucagaagagaauccuaaggacu

SEQ ID NO: 280789 - RNA, 32 nt, Human
uuuucacagccuuuguccagccuguguuacaa

SEQ ID NO: 280790 - RNA, 31 nt, Human
uuuucacaguuucagcacucaaccucaucau

SEQ ID NO: 280791 - RNA, 31 nt, Human
uuuucacaguuucauugauugacucuaccuc

SEQ ID NO: 280792 - RNA, 32 nt, Human
uuuucacauacuuuccaaaagaccaacaaaug

SEQ ID NO: 280793 - RNA, 32 nt, Human
uuuucacaucuuaaaggcucacagacccugcg

SEQ ID NO: 280794 - RNA, 32 nt, Human
uuuucacaucuucauucacugggauucuggac

SEQ ID NO: 280795 - RNA, 32 nt, Human
uuuucacaucuuccacaaacuccauuuaggga

SEQ ID NO: 280796 - RNA, 32 nt, Human
uuuucacauggguuuuucuccaaguuaauaca

SEQ ID NO: 280797 - RNA, 32 nt, Human
uuuucacauucugagcaagcaggugugagcac

SEQ ID NO: 280798 - RNA, 32 nt, Human
uuuucacauuuuaauuccuccuccugagaugc

SEQ ID NO: 280799 - RNA, 28 nt, Human
uuuucaccaaaaugagccucaucccuuu

SEQ ID NO: 280800 - RNA, 32 nt, Human
uuuucaccaccuuuaccaauuuccuauuugau

SEQ ID NO: 280801 - RNA, 32 nt, Human
uuuucaccacugcguuuuagguggugaucuua

SEQ ID NO: 280802 - RNA, 32 nt, Human
uuuucaccacuuuguuaccaguucucaaauua

SEQ ID NO: 280803 - RNA, 32 nt, Human
uuuucaccaucuuucccucaaucuccaggagc

SEQ ID NO: 280804 - RNA, 32 nt, Human
uuuucacccagagagugaagaucauggaggag

SEQ ID NO: 280805 - RNA, 21 nt, Human
uuuucacccagcauaaugacu

SEQ ID NO: 280806 - RNA, 32 nt, Human
uuuucacccauucuguauaauuagacaaauuc

SEQ ID NO: 280807 - RNA, 32 nt, Human
uuuucaccccacccuuccccuccuucucccuu

SEQ ID NO: 280808 - RNA, 32 nt, Human
uuuucaccccagcagaaccccugcaugcaggu

SEQ ID NO: 280809 - RNA, 32 nt, Human
uuuucacccguuucucuuuuuccacucucucu

SEQ ID NO: 280810 - RNA, 22 nt, Human
uuuucacccuaguccagcagcu

SEQ ID NO: 280811 - RNA, 32 nt, Human
uuuucacccugccuuuccacaggaagcacuca

SEQ ID NO: 280812 - RNA, 32 nt, Human
uuuucacccugggucuguuaccuguuugcugu

SEQ ID NO: 280813 - RNA, 32 nt, Human
uuuucaccuaucuccuuccugucaaggcaggc

SEQ ID NO: 280814 - RNA, 32 nt, Human
uuuucaccugccagcccugccuccuccuuucu

SEQ ID NO: 280815 - RNA, 32 nt, Human
uuuucaccugcucuucuaccauuugaauuugu

SEQ ID NO: 280816 - RNA, 32 nt, Human
uuuucacggauggggaaucugaggcccagaga

SEQ ID NO: 280817 - RNA, 32 nt, Human
uuuucacggugcuacuaauccugcuguauccc

SEQ ID NO: 280818 - RNA, 32 nt, Human
uuuucacucccccagcagugugugugaguucc

SEQ ID NO: 280819 - RNA, 32 nt, Human
uuuucacucucucuuccauggcugccaaccug

SEQ ID NO: 280820 - RNA, 32 nt, Human
uuuucacugaggaggugguggaaggugucgcc

SEQ ID NO: 280821 - RNA, 32 nt, Human
uuuucacugagggcaagaaccagcuggagauu

SEQ ID NO: 280822 - RNA, 32 nt, Human
uuuucacugauaguuuuuacaaaaagcuuggu

SEQ ID NO: 280823 - RNA, 32 nt, Human
uuuucacugcuggugcccuucucuucugaccu

SEQ ID NO: 280824 - RNA, 32 nt, Human
uuuucacugcuuuguguuaaugacuuugagcg

SEQ ID NO: 280825 - RNA, 32 nt, Human
uuuucacuguucuguacaaggcugcuuguuuu

SEQ ID NO: 280826 - RNA, 32 nt, Human
uuuucacuucauaugcuuucccugcacuaucu

SEQ ID NO: 280827 - RNA, 32 nt, Human
uuuucacuucuuuuguggaucuucaguugcuu

SEQ ID NO: 280828 - RNA, 32 nt, Human
uuuucacuuuguugcuaucauccuccuuucuc

SEQ ID NO: 280829 - RNA, 32 nt, Human
uuuucagaaaacugagugacaguggagagaaa

SEQ ID NO: 280830 - RNA, 32 nt, Human
uuuucagaauauuuugaacaaagaucuuuguc

SEQ ID NO: 280831 - RNA, 32 nt, Human
uuuucagaccuggacacggaggcacagggugc

SEQ ID NO: 280832 - RNA, 32 nt, Human
uuuucagacggagccuauuuugcugcaagcag

SEQ ID NO: 280833 - RNA, 23 nt, Human
uuuucagacugaagaaaacuuug

SEQ ID NO: 280834 - RNA, 22 nt, Human
uuuucagagacucuggagugga

SEQ ID NO: 280835 - RNA, 32 nt, Human
uuuucagaggcugagacaggugggccacauga

SEQ ID NO: 280836 - RNA, 32 nt, Human
uuuucagagucauggaggcgcuaauuccuguc

SEQ ID NO: 280837 - RNA, 32 nt, Human
uuuucagauaucuauuguggaucuuuuaaagg

SEQ ID NO: 280838 - RNA, 32 nt, Human
uuuucagauauuucaauaagguggugaauuug

SEQ ID NO: 280839 - RNA, 32 nt, Human
uuuucagaugccaauaaagagcacuuuaugag

SEQ ID NO: 280840 - RNA, 24 nt, Human
uuuucagauguggcuuggucugga

SEQ ID NO: 280841 - RNA, 32 nt, Human
uuuucagauugguugcucuggaaaggaaggcu

SEQ ID NO: 280842 - RNA, 32 nt, Human
uuuucagcaaaacuuuccaacugaguggaguc

SEQ ID NO: 280843 - RNA, 32 nt, Human
uuuucagcaaaccuucagagggugaaagggga

SEQ ID NO: 280844 - RNA, 32 nt, Human
uuuucagcaacagggacaacacuguagaggaa

SEQ ID NO: 280845 - RNA, 32 nt, Human
uuuucagcaccuuuuauauguaaggaaguacc

SEQ ID NO: 280846 - RNA, 32 nt, Human
uuuucagcagcugaggcuaaggggagaggaca

SEQ ID NO: 280847 - RNA, 32 nt, Human
uuuucagcaggaacucccucucuucucgguag

SEQ ID NO: 280848 - RNA, 32 nt, Human
uuuucagcaguaacaggaaaccacuuaucaca

SEQ ID NO: 280849 - RNA, 32 nt, Human
uuuucagcauauguaguacuucagaggaagaa

SEQ ID NO: 280850 - RNA, 32 nt, Human
uuuucagccauggccacaagugaacagaguau

SEQ ID NO: 280851 - RNA, 32 nt, Human
uuuucagccuagaaaugucuguguuaaguggu

SEQ ID NO: 280852 - RNA, 32 nt, Human
uuuucagccuccagaaccaugagaaauaaauu

SEQ ID NO: 280853 - RNA, 32 nt, Human
uuuucagccuguuacuguccugugccauuuuu

SEQ ID NO: 280854 - RNA, 32 nt, Human
uuuucagcuauuucuguuccccugaacuaauu

SEQ ID NO: 280855 - RNA, 32 nt, Human
uuuucagcuggugauugcucuggugagacuga

SEQ ID NO: 280856 - RNA, 32 nt, Human
uuuucagcuucuuuauuuccuccuaauggaaa

SEQ ID NO: 280857 - RNA, 32 nt, Human
uuuucagcuuugcaccuggaacucuguaguaa

SEQ ID NO: 280858 - RNA, 32 nt, Human
uuuucaggaggaacugauaucucuggcuaaau

SEQ ID NO: 280859 - RNA, 32 nt, Human
uuuucaggaucuccugagggcugugucacgga

SEQ ID NO: 280860 - RNA, 32 nt, Human
uuuucaggcauguagaauaagcauggagucau

SEQ ID NO: 280861 - RNA, 32 nt, Human
uuuucaggccauucaccugccuccugucagua

SEQ ID NO: 280862 - RNA, 32 nt, Human
uuuucaggcugaaaaugcccgucuugcugcug

SEQ ID NO: 280863 - RNA, 31 nt, Human
uuuucagggaaacugacugugcugcuauuug

SEQ ID NO: 280864 - RNA, 32 nt, Human
uuuucaggggcuuaugauucugcucuaaaaca

SEQ ID NO: 280865 - RNA, 32 nt, Human
uuuucagguacugggagccgggggcucacugc

SEQ ID NO: 280866 - RNA, 32 nt, Human
uuuucaggucauuuacaauugggagauuucag

SEQ ID NO: 280867 - RNA, 32 nt, Human
uuuucagguccuuugcuuaccaaaggaggccc

SEQ ID NO: 280868 - RNA, 32 nt, Human
uuuucaggugcacccuccuccuccaggaggca

SEQ ID NO: 280869 - RNA, 32 nt, Human
uuuucaggugggaagagagcaaaccaguugau

SEQ ID NO: 280870 - RNA, 32 nt, Human
uuuucaguaaagugguucucugccuuuuuacu

SEQ ID NO: 280871 - RNA, 32 nt, Human
uuuucaguaauauuuugcuguuuuuaagacuu

SEQ ID NO: 280872 - RNA, 32 nt, Human
uuuucaguauaaccuccccuaugcucaugccc

SEQ ID NO: 280873 - RNA, 32 nt, Human
uuuucaguauagcacauuauuuacugagugcc

SEQ ID NO: 280874 - RNA, 32 nt, Human
uuuucagucagcugccaccugcuucucauuuu

SEQ ID NO: 280875 - RNA, 32 nt, Human
uuuucagucagggugaugaucuucugaagcuc

SEQ ID NO: 280876 - RNA, 32 nt, Human
uuuucagucccagaucuugcucugccuugggg

SEQ ID NO: 280877 - RNA, 32 nt, Human
uuuucaguccgcgucccucccugggccgggcu

SEQ ID NO: 280878 - RNA, 32 nt, Human
uuuucagucuugcugagacucugucuggauuu

SEQ ID NO: 280879 - RNA, 32 nt, Human
uuuucagugcugggccuggaugugacauaaga

SEQ ID NO: 280880 - RNA, 23 nt, Human
uuuucaguggacaaugggaauaa

SEQ ID NO: 280881 - RNA, 31 nt, Human
uuuucaguuauuuucugagugugcagacagc

SEQ ID NO: 280882 - RNA, 32 nt, Human
uuuucaguucccaauuaaagucuagaaccuga

SEQ ID NO: 280883 - RNA, 32 nt, Human
uuuucaguugcgaacauccuuuuugacagaaa

SEQ ID NO: 280884 - RNA, 32 nt, Human
uuuucaguugggaagaaaggagagggguggcg

SEQ ID NO: 280885 - RNA, 24 nt, Human
uuuucauaaaagucaccagugacu

SEQ ID NO: 280886 - RNA, 31 nt, Human
uuuucauaauaaaaaguuaggagggaaacau

SEQ ID NO: 280887 - RNA, 32 nt, Human
uuuucauaccauuuuuagcuguguucacaggg

SEQ ID NO: 280888 - RNA, 32 nt, Human
uuuucauacuccucauguuuaaggaugcugaa

SEQ ID NO: 280889 - RNA, 17 nt, Human
uuuucauacucuuccca

SEQ ID NO: 280890 - RNA, 32 nt, Human
uuuucauagccuuccaugucauggaucaggga

SEQ ID NO: 280891 - RNA, 32 nt, Human
uuuucauagcuucuccaucacauucaagcugg

SEQ ID NO: 280892 - RNA, 32 nt, Human
uuuucauaguuucauuuguucuugcccacaag

SEQ ID NO: 280893 - RNA, 32 nt, Human
uuuucauauaaaagguaagacagaguuugcaa

SEQ ID NO: 280894 - RNA, 32 nt, Human
uuuucauauacugguaccuucuuuuuggcuga

SEQ ID NO: 280895 - RNA, 19 nt, Human
uuuucauauccauacuaua

SEQ ID NO: 280896 - RNA, 32 nt, Human
uuuucauaucccucagcuuugggggccccagg

SEQ ID NO: 280897 - RNA, 32 nt, Human
uuuucauaugaucccucccucacuuucacugu

SEQ ID NO: 280898 - RNA, 32 nt, Human
uuuucauaugugaauucagugcaagaaacuug

SEQ ID NO: 280899 - RNA, 32 nt, Human
uuuucauauuugcugcgugagcauuuuguaaa

SEQ ID NO: 280900 - RNA, 32 nt, Human
uuuucauauuuuuaguagagacaggguuuugc

SEQ ID NO: 280901 - RNA, 32 nt, Human
uuuucauauuuuuaguagagaugggguuucaa

SEQ ID NO: 280902 - RNA, 32 nt, Human
uuuucauauuuuuaguagagaugggguuucac

SEQ ID NO: 280903 - RNA, 32 nt, Human
uuuucaucacgguggaaaauucuggcugcuuc

SEQ ID NO: 280904 - RNA, 32 nt, Human
uuuucaucaucagcuacaggauuagaaaggag

SEQ ID NO: 280905 - RNA, 32 nt, Human
uuuucauccccagggauaagacacaaacaccu

SEQ ID NO: 280906 - RNA, 32 nt, Human
uuuucauccuaauucaguaaguucucaggcuu

SEQ ID NO: 280907 - RNA, 32 nt, Human
uuuucauccucuucucuuuccaccaacccucc

SEQ ID NO: 280908 - RNA, 32 nt, Human
uuuucauccuuccuccucucccuccucuguga

SEQ ID NO: 280909 - RNA, 32 nt, Human
uuuucaucuaggcuggagugcaaugguuugau

SEQ ID NO: 280910 - RNA, 32 nt, Human
uuuucaucugguugaauggcuuuucuuagugu

SEQ ID NO: 280911 - RNA, 32 nt, Human
uuuucaucuuauacugagcuccagaaaggacg

SEQ ID NO: 280912 - RNA, 32 nt, Human
uuuucaucuuuguucacuugaggcuuucccca

SEQ ID NO: 280913 - RNA, 31 nt, Human
uuuucaugccucucuuacugucucuuacugu

SEQ ID NO: 280914 - RNA, 32 nt, Human
uuuucaugcucucuccugccuucccuuguccu

SEQ ID NO: 280915 - RNA, 30 nt, Human
uuuucauggaguuuguuccugguggcucaa

SEQ ID NO: 280916 - RNA, 32 nt, Human
uuuucaugggguucuauaaggaggcaugcccu

SEQ ID NO: 280917 - RNA, 32 nt, Human
uuuucauguaaaccacuggucacaaaugaacu

SEQ ID NO: 280918 - RNA, 32 nt, Human
uuuucauguaaucuuuacuggcccaacuuggg

SEQ ID NO: 280919 - RNA, 32 nt, Human
uuuucauguauuaccuggucauuucaaacaaa

SEQ ID NO: 280920 - RNA, 32 nt, Human
uuuucaugugccagagccuguacuggaggccc

SEQ ID NO: 280921 - RNA, 32 nt, Human
uuuucauguuucuuucuguggccauggguaua

SEQ ID NO: 280922 - RNA, 32 nt, Human
uuuucauuaccugaguuauuuguacagaaggg

SEQ ID NO: 280923 - RNA, 32 nt, Human
uuuucauucaacuaacacugguugagaauaga

SEQ ID NO: 280924 - RNA, 32 nt, Human
uuuucauuccccacuucucucuucacaauugu

SEQ ID NO: 280925 - RNA, 32 nt, Human
uuuucauucucucuggaaacagacucagguuu

SEQ ID NO: 280926 - RNA, 32 nt, Human
uuuucauucuucuugcaguucugggaguaaag

SEQ ID NO: 280927 - RNA, 32 nt, Human
uuuucauugcagcagcaaauccuugaauagga

SEQ ID NO: 280928 - RNA, 32 nt, Human
uuuucauugccuccucaguauuggcuuugggu

SEQ ID NO: 280929 - RNA, 32 nt, Human
uuuucauuggcugcagugaauuuaguucccua

SEQ ID NO: 280930 - RNA, 32 nt, Human
uuuucauuggcuuagggcagauuuucaugcaa

SEQ ID NO: 280931 - RNA, 32 nt, Human
uuuucauugguggccucaauagggaaaccaau

SEQ ID NO: 280932 - RNA, 32 nt, Human
uuuucauuucacaggguucacaggguuucaca

SEQ ID NO: 280933 - RNA, 32 nt, Human
uuuucauuugagacggagucucgcucugucac

SEQ ID NO: 280934 - RNA, 32 nt, Human
uuuucauuugagagggagagcugugguacugg

SEQ ID NO: 280935 - RNA, 32 nt, Human
uuuucauuuguugggcagaggcccaauaaaug

SEQ ID NO: 280936 - RNA, 32 nt, Human
uuuucauuuuaaagcacaccugagaugauucu

SEQ ID NO: 280937 - RNA, 32 nt, Human
uuuucauuuucaaccaaaggcccuuuucaggg

SEQ ID NO: 280938 - RNA, 32 nt, Human
uuuucauuuugucuuauauaguccaguuuucc

SEQ ID NO: 280939 - RNA, 32 nt, Human
uuuucauuuuuaaaaauuuuaggaugaaggaa

SEQ ID NO: 280940 - RNA, 32 nt, Human
uuuuccaaaauacaaauuggaaaaauacucac

SEQ ID NO: 280941 - RNA, 32 nt, Human
uuuuccaaaauguaaguuaggaagucuccauu

SEQ ID NO: 280942 - RNA, 32 nt, Human
uuuuccaaagagcugggauuacaggcaugagc

SEQ ID NO: 280943 - RNA, 32 nt, Human
uuuuccaaaguggugugguggaggaggauaaa

SEQ ID NO: 280944 - RNA, 32 nt, Human
uuuuccaacaugagccucaugaagccaacuaa

SEQ ID NO: 280945 - RNA, 32 nt, Human
uuuuccaaccacaaaaccacacacauagacca

SEQ ID NO: 280946 - RNA, 32 nt, Human
uuuuccaagagguucaugggaggcggagguga

SEQ ID NO: 280947 - RNA, 32 nt, Human
uuuuccaagagugugaaggaaaauggggcaau

SEQ ID NO: 280948 - RNA, 32 nt, Human
uuuuccaagauggcucaagauucaguagaucu

SEQ ID NO: 280949 - RNA, 32 nt, Human
uuuuccaagggcccacguagcaccggcaaccg

SEQ ID NO: 280950 - RNA, 32 nt, Human
uuuuccaaggggaagcagcuccucaggaggau

SEQ ID NO: 280951 - RNA, 21 nt, Human
uuuuccaaguauuuacugaau

SEQ ID NO: 280952 - RNA, 32 nt, Human
uuuuccacaauccaagugauucugauacacac

SEQ ID NO: 280953 - RNA, 32 nt, Human
uuuuccacaggcaucucugcaugaauuucuuc

SEQ ID NO: 280954 - RNA, 32 nt, Human
uuuuccacaggugguuaccugggaggcaaugc

SEQ ID NO: 280955 - RNA, 30 nt, Human
uuuuccacauggcaaggggucuccuuggaa

SEQ ID NO: 280956 - RNA, 32 nt, Human
uuuuccaccuugggaguucaagcgauuuuccc

SEQ ID NO: 280957 - RNA, 32 nt, Human
uuuuccacuuaucuugaguucacuuugauguu

SEQ ID NO: 280958 - RNA, 32 nt, Human
uuuuccagaaaccauacugggcucagaucaga

SEQ ID NO: 280959 - RNA, 22 nt, Human
uuuuccagaccccucugcccag

SEQ ID NO: 280960 - RNA, 32 nt, Human
uuuuccagagcagcagagacagagccaggagc

SEQ ID NO: 280961 - RNA, 32 nt, Human
uuuuccagagcugaaggagugaagagcccuug

SEQ ID NO: 280962 - RNA, 32 nt, Human
uuuuccagauggcgaggucacagcagagagau

SEQ ID NO: 280963 - RNA, 32 nt, Human
uuuuccagccuagccugaacccugccagucca

SEQ ID NO: 280964 - RNA, 32 nt, Human
uuuuccagccugggcaauacagugagacccug

SEQ ID NO: 280965 - RNA, 32 nt, Human
uuuuccagcuaccugccacuugcccacccacu

SEQ ID NO: 280966 - RNA, 32 nt, Human
uuuuccagcuccauuauaaucuuauagaguca

SEQ ID NO: 280967 - RNA, 32 nt, Human
uuuuccagcuccauuauaaucuuaugugauca

SEQ ID NO: 280968 - RNA, 18 nt, Human
uuuuccagcuguacagug

SEQ ID NO: 280969 - RNA, 32 nt, Human
uuuuccagcuucuggaaggccauguucagauc

SEQ ID NO: 280970 - RNA, 32 nt, Human
uuuuccagcuuugccuguuaccccuguuucug

SEQ ID NO: 280971 - RNA, 32 nt, Human
uuuuccaggauaacccucccugauucuuauug

SEQ ID NO: 280972 - RNA, 32 nt, Human
uuuuccaggccaauggcucacuccaggugcca

SEQ ID NO: 280973 - RNA, 32 nt, Human
uuuuccaggggcagggcccaggagaccauucc

SEQ ID NO: 280974 - RNA, 32 nt, Human
uuuuccaggggcuaguuuggcuuuuccaagug

SEQ ID NO: 280975 - RNA, 32 nt, Human
uuuuccagucccauagcucauggaugccacca

SEQ ID NO: 280976 - RNA, 32 nt, Human
uuuuccagugaucuugggacaugaaguugcuu

SEQ ID NO: 280977 - RNA, 32 nt, Human
uuuuccaguuugauaauugauggucagagcca

SEQ ID NO: 280978 - RNA, 32 nt, Human
uuuuccauaagaauuguaaacauugaacugaa

SEQ ID NO: 280979 - RNA, 32 nt, Human
uuuuccauaagggacaugagcauuuuacuagg

SEQ ID NO: 280980 - RNA, 32 nt, Human
uuuuccauacaaaucaguugauuuaaaggagu

SEQ ID NO: 280981 - RNA, 32 nt, Human
uuuuccauccuguauucucccacaucacuacu

SEQ ID NO: 280982 - RNA, 32 nt, Human
uuuuccauccuuucaugaaacuccuuaaagau

SEQ ID NO: 280983 - RNA, 32 nt, Human
uuuuccaucucauuucccuuccaucugaaagu

SEQ ID NO: 280984 - RNA, 32 nt, Human
uuuuccaucugcccuccccaaacaucucccuc

SEQ ID NO: 280985 - RNA, 32 nt, Human
uuuuccaucugucaguuuuauuaguugucauu

SEQ ID NO: 280986 - RNA, 32 nt, Human
uuuuccaucuucucugucuuugguucagcagu

SEQ ID NO: 280987 - RNA, 32 nt, Human
uuuuccaugccaagcauccacccggcccacag

SEQ ID NO: 280988 - RNA, 31 nt, Human
uuuuccaugcucucuggcucauugugucauu

SEQ ID NO: 280989 - RNA, 32 nt, Human
uuuuccauuguuuucuccagagagaaugugcu

SEQ ID NO: 280990 - RNA, 24 nt, Human
uuuuccauuuguuuuuccugcuuu

SEQ ID NO: 280991 - RNA, 22 nt, Human
uuuucccaauaaauacuugccu

SEQ ID NO: 280992 - RNA, 22 nt, Human
uuuucccaaugagcagugucau

SEQ ID NO: 280993 - RNA, 32 nt, Human
uuuucccacaguucuagggacaggacucugag

SEQ ID NO: 280994 - RNA, 32 nt, Human
uuuucccacccacuggaaggcucacaggcaag

SEQ ID NO: 280995 - RNA, 32 nt, Human
uuuucccacugagguuuuagaagcuaggaggc

SEQ ID NO: 280996 - RNA, 32 nt, Human
uuuucccacugcacccccuccugcugcagagg

SEQ ID NO: 280997 - RNA, 32 nt, Human
uuuucccacuuuccuucugucucuccuuccuc

SEQ ID NO: 280998 - RNA, 32 nt, Human
uuuucccagccagagcccuggccacacggacu

SEQ ID NO: 280999 - RNA, 32 nt, Human
uuuucccagcuacuccggaggcugcgguggaa

SEQ ID NO: 281000 - RNA, 32 nt, Human
uuuucccaggaauaucccaaacuucggaaaca

SEQ ID NO: 281001 - RNA, 32 nt, Human
uuuucccaggagaccauuuguauuaccauuac

SEQ ID NO: 281002 - RNA, 32 nt, Human
uuuucccaggggacaggacccacugggagaca

SEQ ID NO: 281003 - RNA, 32 nt, Human
uuuucccauauacaaucuuccuuccuuaggua

SEQ ID NO: 281004 - RNA, 32 nt, Human
uuuucccaucucuuagcacagugccuugcaca

SEQ ID NO: 281005 - RNA, 32 nt, Human
uuuucccauuuagaauggugauuuuaaaugug

SEQ ID NO: 281006 - RNA, 32 nt, Human
uuuucccauuuuaaaaucuaaacuagacaucu

SEQ ID NO: 281007 - RNA, 32 nt, Human
uuuuccccaaaccauaaaacccuauacaaguu

SEQ ID NO: 281008 - RNA, 32 nt, Human
uuuuccccaaguacaaccacacccacacucag

SEQ ID NO: 281009 - RNA, 28 nt, Human
uuuuccccaagugcuuaguugccaucua

SEQ ID NO: 281010 - RNA, 32 nt, Human
uuuuccccacauauggggcacuggcuucaaac

SEQ ID NO: 281011 - RNA, 32 nt, Human
uuuuccccagaaccuccagggagaauauggca

SEQ ID NO: 281012 - RNA, 32 nt, Human
uuuuccccaguauaguggaaagacugaggcuu

SEQ ID NO: 281013 - RNA, 32 nt, Human
uuuuccccaugaacucugaaccaccuuugucu

SEQ ID NO: 281014 - RNA, 32 nt, Human
uuuuccccaugagcauaucaucagccuuggcc

SEQ ID NO: 281015 - RNA, 32 nt, Human
uuuucccccacccuccuuaccccgcugggcua

SEQ ID NO: 281016 - RNA, 32 nt, Human
uuuucccccaccgcaaccuccaucucccgggu

SEQ ID NO: 281017 - RNA, 32 nt, Human
uuuucccccauggucucugucucuauauccuc

SEQ ID NO: 281018 - RNA, 32 nt, Human
uuuucccccuccuuaccugacccccuacgagu

SEQ ID NO: 281019 - RNA, 32 nt, Human
uuuucccccucuuuggcugguggaggauaaag

SEQ ID NO: 281020 - RNA, 32 nt, Human
uuuucccccuuagaugccuggaagugguauuu

SEQ ID NO: 281021 - RNA, 32 nt, Human
uuuucccccuuuccucuuccuuucccuuccuu

SEQ ID NO: 281022 - RNA, 32 nt, Human
uuuucccccuuugaaugaggucuuccauguuu

SEQ ID NO: 281023 - RNA, 32 nt, Human
uuuuccccucacccuccagcccuggaggcuuu

SEQ ID NO: 281024 - RNA, 32 nt, Human
uuuuccccucacccucugcccuucuaagucau

SEQ ID NO: 281025 - RNA, 32 nt, Human
uuuuccccuccagugccucccggcugcuagcc

SEQ ID NO: 281026 - RNA, 32 nt, Human
uuuuccccuccccaccccucuuugcuuuucuc

SEQ ID NO: 281027 - RNA, 32 nt, Human
uuuuccccucuccaaaugcagcagugaauccc

SEQ ID NO: 281028 - RNA, 32 nt, Human
uuuuccccugcagggugggauuugagcuguga

SEQ ID NO: 281029 - RNA, 32 nt, Human
uuuuccccugcuccccugagaccacccccaaa

SEQ ID NO: 281030 - RNA, 32 nt, Human
uuuuccccuggaguuccaggaggaaccagccc

SEQ ID NO: 281031 - RNA, 32 nt, Human
uuuuccccuucccuccccuauggaugcuuuaa

SEQ ID NO: 281032 - RNA, 32 nt, Human
uuuucccgcacugucuccagucacgauccagc

SEQ ID NO: 281033 - RNA, 32 nt, Human
uuuucccuaagugucagccaacuugagaaaua

SEQ ID NO: 281034 - RNA, 32 nt, Human
uuuucccuaccucugucauuagcaaugguuga

SEQ ID NO: 281035 - RNA, 32 nt, Human
uuuucccucacagacauuucucuuucaugccu

SEQ ID NO: 281036 - RNA, 32 nt, Human
uuuucccucauagccucuagggagggagagug

SEQ ID NO: 281037 - RNA, 32 nt, Human
uuuucccuccacuccaucccucccucccgucc

SEQ ID NO: 281038 - RNA, 32 nt, Human
uuuucccuccacugcuguuaauuaaugucacu

SEQ ID NO: 281039 - RNA, 32 nt, Human
uuuucccuccauccuucuuuccuucauccuuu

SEQ ID NO: 281040 - RNA, 32 nt, Human
uuuucccuccccucaucuucaguggcuuggua

SEQ ID NO: 281041 - RNA, 32 nt, Human
uuuucccuccgagaccgauuccaucugcagag

SEQ ID NO: 281042 - RNA, 24 nt, Human
uuuucccuccuuagcagcauucca

SEQ ID NO: 281043 - RNA, 31 nt, Human
uuuucccucgaaaacucauguugaaacuuaa

SEQ ID NO: 281044 - RNA, 32 nt, Human
uuuucccucucaagcucugcccuucccagccc

SEQ ID NO: 281045 - RNA, 32 nt, Human
uuuucccucugggcccagccucuccccacccc

SEQ ID NO: 281046 - RNA, 32 nt, Human
uuuucccugacccccgaaccacccaaccacau

SEQ ID NO: 281047 - RNA, 32 nt, Human
uuuucccugaguaacugggauaaugggucacc

SEQ ID NO: 281048 - RNA, 32 nt, Human
uuuucccugcaacaucuccaccucccaauagu

SEQ ID NO: 281049 - RNA, 32 nt, Human
uuuucccugcauucaccugguucccauccaca

SEQ ID NO: 281050 - RNA, 32 nt, Human
uuuucccugggaacaugggagcacugacacag

SEQ ID NO: 281051 - RNA, 32 nt, Human
uuuucccuggguggagcaggacucccaccuaa

SEQ ID NO: 281052 - RNA, 32 nt, Human
uuuucccuguguauuauaauaaauuuguggua

SEQ ID NO: 281053 - RNA, 32 nt, Human
uuuucccuguucuacuuuuggccaaggacagu

SEQ ID NO: 281054 - RNA, 32 nt, Human
uuuucccuuaauaccuggguguuguauuagau

SEQ ID NO: 281055 - RNA, 32 nt, Human
uuuucccuuaugcuuuggcuuucaugccuccu

SEQ ID NO: 281056 - RNA, 32 nt, Human
uuuucccuuccucuguggugacaacggaggaa

SEQ ID NO: 281057 - RNA, 32 nt, Human
uuuucccuucuuuccuccugguuccggucagu

SEQ ID NO: 281058 - RNA, 32 nt, Human
uuuucccuuuccuggugauugauuuuacaaaa

SEQ ID NO: 281059 - RNA, 32 nt, Human
uuuucccuuugcagguugcacacaguuuuguu

SEQ ID NO: 281060 - RNA, 32 nt, Human
uuuucccuuuuuaaccauuccaaucggugugu

SEQ ID NO: 281061 - RNA, 32 nt, Human
uuuuccgcaugccuccugccuccugggcuauu

SEQ ID NO: 281062 - RNA, 32 nt, Human
uuuuccgcuuucugagcccuuuuauaccuuac

SEQ ID NO: 281063 - RNA, 18 nt, Human
uuuuccggauacauuaua

SEQ ID NO: 281064 - RNA, 32 nt, Human
uuuuccgguguccuuaagguucuuggacucug

SEQ ID NO: 281065 - RNA, 22 nt, Human
uuuuccguaguucuggcugccu

SEQ ID NO: 281066 - RNA, 32 nt, Human
uuuuccguauuuugagcucucuucccaauauu

SEQ ID NO: 281067 - RNA, 32 nt, Human
uuuuccguccugggaacugucagucugggaga

SEQ ID NO: 281068 - RNA, 32 nt, Human
uuuuccgucugggaacaguaccucugccccug

SEQ ID NO: 281069 - RNA, 32 nt, Human
uuuuccgugccucuccuccaccucucccuucu

SEQ ID NO: 281070 - RNA, 32 nt, Human
uuuuccuaaacacccacccaaugggagaggcu

SEQ ID NO: 281071 - RNA, 21 nt, Human
uuuuccuaaaugcauacugua

SEQ ID NO: 281072 - RNA, 32 nt, Human
uuuuccuaacacugauacuacaagucaccaau

SEQ ID NO: 281073 - RNA, 32 nt, Human
uuuuccuaaggguauaagcuucacucugccug

SEQ ID NO: 281074 - RNA, 32 nt, Human
uuuuccuaagugauuuugcucucuuccaaucu

SEQ ID NO: 281075 - RNA, 32 nt, Human
uuuuccuacaaaggaagcagucucuggaggcc

SEQ ID NO: 281076 - RNA, 32 nt, Human
uuuuccuacaaggauaugcauuagcaauucug

SEQ ID NO: 281077 - RNA, 32 nt, Human
uuuuccuacuucagugaagugcagucauacaa

SEQ ID NO: 281078 - RNA, 32 nt, Human
uuuuccuacuucuucuguacuuuuaccuguag

SEQ ID NO: 281079 - RNA, 32 nt, Human
uuuuccuagcuagagaaggugaugccuucuuc

SEQ ID NO: 281080 - RNA, 32 nt, Human
uuuuccuaggagaguuaugaaaaguugaaggc

SEQ ID NO: 281081 - RNA, 32 nt, Human
uuuuccuaggcagaggaccccacggccuuccg

SEQ ID NO: 281082 - RNA, 32 nt, Human
uuuuccuaggcagaggacccugaggccuucug

SEQ ID NO: 281083 - RNA, 32 nt, Human
uuuuccuaguacaacgaauaucugccaacucu

SEQ ID NO: 281084 - RNA, 32 nt, Human
uuuuccuauaucccgaguggggcacagacggu

SEQ ID NO: 281085 - RNA, 32 nt, Human
uuuuccuaugugcuuccucuggcauucacugu

SEQ ID NO: 281086 - RNA, 32 nt, Human
uuuuccucacuacauuguacaugugggaauua

SEQ ID NO: 281087 - RNA, 32 nt, Human
uuuuccucagggauccaccacagucuaggcca

SEQ ID NO: 281088 - RNA, 32 nt, Human
uuuuccucaggguguccugagguccaagauuc

SEQ ID NO: 281089 - RNA, 32 nt, Human
uuuuccucauugcuacagcaagccacagggua

SEQ ID NO: 281090 - RNA, 32 nt, Human
uuuuccuccagccugaagucuucggcaaauag

SEQ ID NO: 281091 - RNA, 32 nt, Human
uuuuccuccccugucccagccuucccacuuug

SEQ ID NO: 281092 - RNA, 32 nt, Human
uuuuccuccgccccucuccuaaagccugaggg

SEQ ID NO: 281093 - RNA, 32 nt, Human
uuuuccuccgucucccugcugucccuuacccu

SEQ ID NO: 281094 - RNA, 32 nt, Human
uuuuccuccuccucacagaggagauguguucg

SEQ ID NO: 281095 - RNA, 32 nt, Human
uuuuccuccucuaagaggagaugaugucugcu

SEQ ID NO: 281096 - RNA, 32 nt, Human
uuuuccuccucuuccuccuuccuccuuccucc

SEQ ID NO: 281097 - RNA, 32 nt, Human
uuuuccuccucuuccuuccuccuccagccgcc

SEQ ID NO: 281098 - RNA, 32 nt, Human
uuuuccuccuucucucuuucuugcuccaaucc

SEQ ID NO: 281099 - RNA, 32 nt, Human
uuuuccuccuuuccuuuuucuuucccuuuccc

SEQ ID NO: 281100 - RNA, 32 nt, Human
uuuuccucucaaugccucacauuaggaagcac

SEQ ID NO: 281101 - RNA, 32 nt, Human
uuuuccucucagcaucagagaaggcagaaagc

SEQ ID NO: 281102 - RNA, 32 nt, Human
uuuuccucuccaccuuugcuucucacaauucc

SEQ ID NO: 281103 - RNA, 21 nt, Human
uuuuccucuccagaggggccg

SEQ ID NO: 281104 - RNA, 32 nt, Human
uuuuccucuccucugacucuuaagcccuuucc

SEQ ID NO: 281105 - RNA, 32 nt, Human
uuuuccucucugucugucucucccccucuguc

SEQ ID NO: 281106 - RNA, 32 nt, Human
uuuuccucuggccccucuuuccucuuccuggu

SEQ ID NO: 281107 - RNA, 32 nt, Human
uuuuccucuguggggugggagucacagccuag

SEQ ID NO: 281108 - RNA, 32 nt, Human
uuuuccucuucccuaucuccccuccuccccuu

SEQ ID NO: 281109 - RNA, 32 nt, Human
uuuuccucuuggauggaagugucaaaggcaga

SEQ ID NO: 281110 - RNA, 32 nt, Human
uuuuccucuuucccaacucuuacuacauccuc

SEQ ID NO: 281111 - RNA, 32 nt, Human
uuuuccucuuuccuuuuuguuuguuuuaaugu

SEQ ID NO: 281112 - RNA, 32 nt, Human
uuuuccugaaaugcuucagggauuccauaaac

SEQ ID NO: 281113 - RNA, 18 nt, Human
uuuuccugacagauuaug

SEQ ID NO: 281114 - RNA, 32 nt, Human
uuuuccugagaucacacacagcauugcagugg

SEQ ID NO: 281115 - RNA, 32 nt, Human
uuuuccugagggcacugcaaagaggcuccuuu

SEQ ID NO: 281116 - RNA, 18 nt, Human
uuuuccugauggacugua

SEQ ID NO: 281117 - RNA, 19 nt, Human
uuuuccugauuuauauuua

SEQ ID NO: 281118 - RNA, 32 nt, Human
uuuuccugcaacucugccuucuugaguccaaa

SEQ ID NO: 281119 - RNA, 32 nt, Human
uuuuccugccagaggcagaaaccacaaaauua

SEQ ID NO: 281120 - RNA, 32 nt, Human
uuuuccugcccccagaggccagccucucccug

SEQ ID NO: 281121 - RNA, 32 nt, Human
uuuuccugccucagcuuccugaguacugggac

SEQ ID NO: 281122 - RNA, 32 nt, Human
uuuuccugccuccuucacauuuccuccccagc

SEQ ID NO: 281123 - RNA, 32 nt, Human
uuuuccugcguuuuggaauaaacaguaaaaau

SEQ ID NO: 281124 - RNA, 32 nt, Human
uuuuccugcuguggcuggcacauucuucugau

SEQ ID NO: 281125 - RNA, 32 nt, Human
uuuuccuggaagggaacagcugggcugcugga

SEQ ID NO: 281126 - RNA, 32 nt, Human
uuuuccuggagcugguauuuuugggguggagg

SEQ ID NO: 281127 - RNA, 32 nt, Human
uuuuccuggcacgggcaggcugugggaggcag

SEQ ID NO: 281128 - RNA, 19 nt, Human
uuuuccugggaagacugua

SEQ ID NO: 281129 - RNA, 32 nt, Human
uuuuccugggagggggccuuccagcauguggg

SEQ ID NO: 281130 - RNA, 32 nt, Human
uuuuccugggccagaaguagagggggugggug

SEQ ID NO: 281131 - RNA, 32 nt, Human
uuuuccugggccagaaguagaggggugggugc

SEQ ID NO: 281132 - RNA, 20 nt, Human
uuuuccuggugaacacuaua

SEQ ID NO: 281133 - RNA, 18 nt, Human
uuuuccugguggacugua

SEQ ID NO: 281134 - RNA, 19 nt, Human
uuuuccuguaauuacugua

SEQ ID NO: 281135 - RNA, 32 nt, Human
uuuuccuguaggaacacagaccaagaaguuua

SEQ ID NO: 281136 - RNA, 32 nt, Human
uuuuccuguaggaagaggaagacagagcucuu

SEQ ID NO: 281137 - RNA, 32 nt, Human
uuuuccugucuuuugugcaugggcgacccauu

SEQ ID NO: 281138 - RNA, 19 nt, Human
uuuuccugugacacuuaua

SEQ ID NO: 281139 - RNA, 32 nt, Human
uuuuccugugauuucuccucugggccacugau

SEQ ID NO: 281140 - RNA, 32 nt, Human
uuuuccugugguuagaaaaauuaagacagaag

SEQ ID NO: 281141 - RNA, 17 nt, Human
uuuuccugugugcagug

SEQ ID NO: 281142 - RNA, 32 nt, Human
uuuuccuguguguguggccuuugcaucauuua

SEQ ID NO: 281143 - RNA, 19 nt, Human
uuuuccuguucauacacua

SEQ ID NO: 281144 - RNA, 18 nt, Human
uuuuccuguuugcacuau

SEQ ID NO: 281145 - RNA, 32 nt, Human
uuuuccuuaccacucuucaucucccucguagu

SEQ ID NO: 281146 - RNA, 32 nt, Human
uuuuccuuaucuuccucuuucaagaccccuac

SEQ ID NO: 281147 - RNA, 32 nt, Human
uuuuccuuauuuguaaaacaaaaagggcacca

SEQ ID NO: 281148 - RNA, 32 nt, Human
uuuuccuucaucaaggugauguaagugacuca

SEQ ID NO: 281149 - RNA, 32 nt, Human
uuuuccuuccccaagacugauaggaugcaagc

SEQ ID NO: 281150 - RNA, 32 nt, Human
uuuuccuuccucccuuccuuccuuccuuccuu

SEQ ID NO: 281151 - RNA, 32 nt, Human
uuuuccuuccucuccuacaucucccuuuuccc

SEQ ID NO: 281152 - RNA, 32 nt, Human
uuuuccuuccugcccuguaccucucucugcuc

SEQ ID NO: 281153 - RNA, 32 nt, Human
uuuuccuuccuuggagcgucccugacggacaa

SEQ ID NO: 281154 - RNA, 32 nt, Human
uuuuccuucuacagcuuagcuccgucuuuuca

SEQ ID NO: 281155 - RNA, 32 nt, Human
uuuuccuucuccccaauuacuccccugaauca

SEQ ID NO: 281156 - RNA, 32 nt, Human
uuuuccuucucccuucccuuuggacaguguua

SEQ ID NO: 281157 - RNA, 32 nt, Human
uuuuccuucucuaucucucuuauuuagucuuc

SEQ ID NO: 281158 - RNA, 32 nt, Human
uuuuccuucucuuccucguuuugauugcaccg

SEQ ID NO: 281159 - RNA, 32 nt, Human
uuuuccuucugauuuucccuuuucaacauucc

SEQ ID NO: 281160 - RNA, 32 nt, Human
uuuuccuucugcagccccuccccaccagcucc

SEQ ID NO: 281161 - RNA, 32 nt, Human
uuuuccuucuggcuucuucuauuacagucucu

SEQ ID NO: 281162 - RNA, 32 nt, Human
uuuuccuugaauggagaacacuuuaaaaauaa

SEQ ID NO: 281163 - RNA, 21 nt, Human
uuuuccuugauuccuaccaua

SEQ ID NO: 281164 - RNA, 32 nt, Human
uuuuccuugcugucucccuucuuucuauuuga

SEQ ID NO: 281165 - RNA, 32 nt, Human
uuuuccuuggaauuccaacuguggaccuuuua

SEQ ID NO: 281166 - RNA, 32 nt, Human
uuuuccuuguuaaucugcuccaaccaccugaa

SEQ ID NO: 281167 - RNA, 32 nt, Human
uuuuccuuuaaaauuuuuaaacuuuuuaggua

SEQ ID NO: 281168 - RNA, 32 nt, Human
uuuuccuuucagaacauuuuccagauggcgag

SEQ ID NO: 281169 - RNA, 32 nt, Human
uuuuccuuucagggauuugcggggucagggag

SEQ ID NO: 281170 - RNA, 32 nt, Human
uuuuccuuucaucagacacugugaaaacauuc

SEQ ID NO: 281171 - RNA, 32 nt, Human
uuuuccuuuccugaaagccucaucuaccuuaa

SEQ ID NO: 281172 - RNA, 32 nt, Human
uuuuccuuucgaaaaagacuguucacauuugc

SEQ ID NO: 281173 - RNA, 32 nt, Human
uuuuccuuucuuuggguagaccuacagucaga

SEQ ID NO: 281174 - RNA, 32 nt, Human
uuuuccuuugaacuuugaagcuagugcauugg

SEQ ID NO: 281175 - RNA, 32 nt, Human
uuuuccuuugauauuccaccucccaggaagga

SEQ ID NO: 281176 - RNA, 32 nt, Human
uuuuccuuugcccucaugagcguguuuauaau

SEQ ID NO: 281177 - RNA, 32 nt, Human
uuuuccuuugcuacuugaauagcaauaaaagc

SEQ ID NO: 281178 - RNA, 23 nt, Human
uuuuccuuugcuucuugagaccg

SEQ ID NO: 281179 - RNA, 32 nt, Human
uuuuccuuuuaugugcccacuguggcuacuuu

SEQ ID NO: 281180 - RNA, 32 nt, Human
uuuuccuuuucccgagcugugugaucuugagc

SEQ ID NO: 281181 - RNA, 32 nt, Human
uuuuccuuuuccucuuugacugagcaccgagg

SEQ ID NO: 281182 - RNA, 32 nt, Human
uuuuccuuuucuuuuucuuuccuuccuuccuu

SEQ ID NO: 281183 - RNA, 32 nt, Human
uuuuccuuuugccauggaaucugggugggaga

SEQ ID NO: 281184 - RNA, 21 nt, Human
uuuuccuuuuuucacaguaua

SEQ ID NO: 281185 - RNA, 32 nt, Human
uuuucgaaagaaucucauugagcuggcagagc

SEQ ID NO: 281186 - RNA, 32 nt, Human
uuuucgacacagcagccagaaggauccuuuaa

SEQ ID NO: 281187 - RNA, 24 nt, Human
uuuucgagauggagucucacucug

SEQ ID NO: 281188 - RNA, 32 nt, Human
uuuucgagugcccagcccucugguucacauuc

SEQ ID NO: 281189 - RNA, 32 nt, Human
uuuucgcaacauaaucccagcacuuuggaacg

SEQ ID NO: 281190 - RNA, 32 nt, Human
uuuucgcaagccuuccagaaguuuucugugcu

SEQ ID NO: 281191 - RNA, 32 nt, Human
uuuucgcaucuauucgggagagacuagggcag

SEQ ID NO: 281192 - RNA, 32 nt, Human
uuuucgccaaucuacacugauuuuggacuguu

SEQ ID NO: 281193 - RNA, 32 nt, Human
uuuucgcccaacuuaucccccaccuccauccc

SEQ ID NO: 281194 - RNA, 32 nt, Human
uuuucgcccaggcugaguacaguggugcaauc

SEQ ID NO: 281195 - RNA, 32 nt, Human
uuuucgcucugcuucauuacugcuuccuuuag

SEQ ID NO: 281196 - RNA, 32 nt, Human
uuuucgcucugucucccagguuggagugcagu

SEQ ID NO: 281197 - RNA, 32 nt, Human
uuuucgcuucacccucuuuacagcagccuguc

SEQ ID NO: 281198 - RNA, 32 nt, Human
uuuucggagacagugacuggugccagugucau

SEQ ID NO: 281199 - RNA, 32 nt, Human
uuuucggaggccgaggagggcagaucacuuga

SEQ ID NO: 281200 - RNA, 32 nt, Human
uuuucggcagauuuuccucacccuaaacuaag

SEQ ID NO: 281201 - RNA, 32 nt, Human
uuuucggcggggcugggagacugaggcccgcg

SEQ ID NO: 281202 - RNA, 32 nt, Human
uuuucguauauuauuuccaauauuuggaaagc

SEQ ID NO: 281203 - RNA, 32 nt, Human
uuuucguauuuuuaguagagaugggguuucac

SEQ ID NO: 281204 - RNA, 32 nt, Human
uuuucuaaaaauacaaaaauuagccagguaug

SEQ ID NO: 281205 - RNA, 32 nt, Human
uuuucuaaagccuacuccuuccucacuuugaa

SEQ ID NO: 281206 - RNA, 32 nt, Human
uuuucuaaccuacagagugccucuguguucac

SEQ ID NO: 281207 - RNA, 32 nt, Human
uuuucuaacuaaaauugugauguuacagaaag

SEQ ID NO: 281208 - RNA, 32 nt, Human
uuuucuaacuggagaaaagagugaggaacaga

SEQ ID NO: 281209 - RNA, 32 nt, Human
uuuucuaaggauggacccacaccagaaggucc

SEQ ID NO: 281210 - RNA, 32 nt, Human
uuuucuaaggauguaugaaggaaaggcaucuc

SEQ ID NO: 281211 - RNA, 32 nt, Human
uuuucuaaugaggagagaaaauauauguauuu

SEQ ID NO: 281212 - RNA, 32 nt, Human
uuuucuaaugggaacagucacuucaaguccau

SEQ ID NO: 281213 - RNA, 32 nt, Human
uuuucuaauucuuaacacucauacuugaaauc

SEQ ID NO: 281214 - RNA, 32 nt, Human
uuuucuacaacccugagcauuugcuacauacu

SEQ ID NO: 281215 - RNA, 32 nt, Human
uuuucuacaaguuugaccuuagccaugguuug

SEQ ID NO: 281216 - RNA, 32 nt, Human
uuuucuacagccaguaaggcagcucugucgug

SEQ ID NO: 281217 - RNA, 32 nt, Human
uuuucuacaguacucuuccuuauugcaccauu

SEQ ID NO: 281218 - RNA, 32 nt, Human
uuuucuacaguugaugugacaguggcuccaaa

SEQ ID NO: 281219 - RNA, 32 nt, Human
uuuucuacauuugagcaaauacugagguucau

SEQ ID NO: 281220 - RNA, 32 nt, Human
uuuucuaccaagccacacagcugcagcaacug

SEQ ID NO: 281221 - RNA, 32 nt, Human
uuuucuacccagccauucuuggcauugcaacc

SEQ ID NO: 281222 - RNA, 32 nt, Human
uuuucuacccugccaccucuuuucagcaagcu

SEQ ID NO: 281223 - RNA, 32 nt, Human
uuuucuacugggcuauugcucucuucauaaug

SEQ ID NO: 281224 - RNA, 32 nt, Human
uuuucuagagacacauuggaccagaugaggau

SEQ ID NO: 281225 - RNA, 32 nt, Human
uuuucuagcuuccauccuuucucccucguuuc

SEQ ID NO: 281226 - RNA, 32 nt, Human
uuuucuagcuuuaaaugccugcuuuauuucuu

SEQ ID NO: 281227 - RNA, 19 nt, Human
uuuucuaggacgcacuaua

SEQ ID NO: 281228 - RNA, 32 nt, Human
uuuucuaggacucugugcaacugucguauaug

SEQ ID NO: 281229 - RNA, 32 nt, Human
uuuucuaggagagaaauuuuggguucagugag

SEQ ID NO: 281230 - RNA, 32 nt, Human
uuuucuaggauguggccuuagagcaagaacag

SEQ ID NO: 281231 - RNA, 32 nt, Human
uuuucuaggccuggggacggcuuuuacuuaaa

SEQ ID NO: 281232 - RNA, 32 nt, Human
uuuucuagugcuaaagaaaagauuuaagcacc

SEQ ID NO: 281233 - RNA, 23 nt, Human
uuuucuagugcuuccuucuguuu

SEQ ID NO: 281234 - RNA, 32 nt, Human
uuuucuaucaauuuucccccaucccaucccca

SEQ ID NO: 281235 - RNA, 21 nt, Human
uuuucuaucauuuuggaauaa

SEQ ID NO: 281236 - RNA, 32 nt, Human
uuuucuaucugccucucugaguuggagugagu

SEQ ID NO: 281237 - RNA, 32 nt, Human
uuuucuaucuugaugaaaauguugcacauucu

SEQ ID NO: 281238 - RNA, 21 nt, Human
uuuucuauuaaaagugggaau

SEQ ID NO: 281239 - RNA, 22 nt, Human
uuuucuauuaaggauccaaaaa

SEQ ID NO: 281240 - RNA, 32 nt, Human
uuuucucaacaugguacucuacuggcaggaug

SEQ ID NO: 281241 - RNA, 32 nt, Human
uuuucucaacccaagucaaacaacaguuugug

SEQ ID NO: 281242 - RNA, 32 nt, Human
uuuucucaagauggcagauucccacugaggcu

SEQ ID NO: 281243 - RNA, 32 nt, Human
uuuucucaauuuaagauacagaaauacagcaa

SEQ ID NO: 281244 - RNA, 32 nt, Human
uuuucucacaagaacccaguuagcugauguuu

SEQ ID NO: 281245 - RNA, 32 nt, Human
uuuucucacagaagaagaaccagcaagccaga

SEQ ID NO: 281246 - RNA, 23 nt, Human
uuuucucacagcccucuggcuuu

SEQ ID NO: 281247 - RNA, 23 nt, Human
uuuucucacgugguuucuagcuu

SEQ ID NO: 281248 - RNA, 32 nt, Human
uuuucucagacuuuuacgaguaugaaucugag

SEQ ID NO: 281249 - RNA, 30 nt, Human
uuuucucagcacucaaugcuccugugcgga

SEQ ID NO: 281250 - RNA, 23 nt, Human
uuuucucagcauuucucuucuuu

SEQ ID NO: 281251 - RNA, 32 nt, Human
uuuucucagcccccauccccagcacugugugu

SEQ ID NO: 281252 - RNA, 32 nt, Human
uuuucucagcuaaacuguagggaaaugcuaag

SEQ ID NO: 281253 - RNA, 32 nt, Human
uuuucucaggaggggaacauggaggaggaaga

SEQ ID NO: 281254 - RNA, 32 nt, Human
uuuucucaguccacuuuuucaucacucauucc

SEQ ID NO: 281255 - RNA, 24 nt, Human
uuuucucagugcuuuuucugcuuu

SEQ ID NO: 281256 - RNA, 32 nt, Human
uuuucucaucaaagcagaaugcuaucuugcgu

SEQ ID NO: 281257 - RNA, 32 nt, Human
uuuucucauccucaucugucuaucccagccgg

SEQ ID NO: 281258 - RNA, 19 nt, Human
uuuucucaucugugcagug

SEQ ID NO: 281259 - RNA, 32 nt, Human
uuuucucaugaucucaccuauacuuuggggau

SEQ ID NO: 281260 - RNA, 32 nt, Human
uuuucucaugaugccuuuuuauauuuaaaccc

SEQ ID NO: 281261 - RNA, 24 nt, Human
uuuucucauguucuuucucccuuu

SEQ ID NO: 281262 - RNA, 19 nt, Human
uuuucucauugcuuuugcu

SEQ ID NO: 281263 - RNA, 22 nt, Human
uuuucucauuucuuucuguuuu

SEQ ID NO: 281264 - RNA, 32 nt, Human
uuuucucauuugcccuuugagcacuuuuacuu

SEQ ID NO: 281265 - RNA, 19 nt, Human
uuuucuccaaguuuuuuca

SEQ ID NO: 281266 - RNA, 32 nt, Human
uuuucuccaauuugccugaauauuucaggagg

SEQ ID NO: 281267 - RNA, 18 nt, Human
uuuucuccacauacagug

SEQ ID NO: 281268 - RNA, 32 nt, Human
uuuucuccacaucuucugaggcuuuagaaaug

SEQ ID NO: 281269 - RNA, 22 nt, Human
uuuucuccagagaaggugcagg

SEQ ID NO: 281270 - RNA, 32 nt, Human
uuuucuccagaguccccaaagccacauggcau

SEQ ID NO: 281271 - RNA, 32 nt, Human
uuuucuccagcagguggagauuauggaaccua

SEQ ID NO: 281272 - RNA, 32 nt, Human
uuuucuccaguaugcuaccugauuuguuuggc

SEQ ID NO: 281273 - RNA, 32 nt, Human
uuuucuccaguauuugcaucacagaaauaauc

SEQ ID NO: 281274 - RNA, 32 nt, Human
uuuucuccagugaggagugaacagugggcacc

SEQ ID NO: 281275 - RNA, 32 nt, Human
uuuucuccaguucuguuacccaauuuagauua

SEQ ID NO: 281276 - RNA, 32 nt, Human
uuuucuccauagcacacaccucuauccagcau

SEQ ID NO: 281277 - RNA, 32 nt, Human
uuuucuccaucuuuuaagcagccucuguaacu

SEQ ID NO: 281278 - RNA, 18 nt, Human
uuuucuccaugcacugug

SEQ ID NO: 281279 - RNA, 22 nt, Human
uuuucuccauggaaaaggacag

SEQ ID NO: 281280 - RNA, 20 nt, Human
uuuucuccauggcaggacag

SEQ ID NO: 281281 - RNA, 32 nt, Human
uuuucucccaaacuuugagaaggucaccucug

SEQ ID NO: 281282 - RNA, 32 nt, Human
uuuucucccacauucaccccugcccagagauu

SEQ ID NO: 281283 - RNA, 27 nt, Human
uuuucucccccaugugggggugguggg

SEQ ID NO: 281284 - RNA, 32 nt, Human
uuuucuccccuaucauuuuucucccauaaugu

SEQ ID NO: 281285 - RNA, 32 nt, Human
uuuucuccccucuccgucuucuccccuccuuc

SEQ ID NO: 281286 - RNA, 32 nt, Human
uuuucucccuccaccucuccucuccuucccuu

SEQ ID NO: 281287 - RNA, 32 nt, Human
uuuucucccucuguucaguauuucaaggaaaa

SEQ ID NO: 281288 - RNA, 32 nt, Human
uuuucucccuuaaguuccccuguucaaggcau

SEQ ID NO: 281289 - RNA, 32 nt, Human
uuuucucccuucugaaaugagugagggaaguu

SEQ ID NO: 281290 - RNA, 32 nt, Human
uuuucucccuuuucccuccuguggcuugcacu

SEQ ID NO: 281291 - RNA, 17 nt, Human
uuuucuccucuccagug

SEQ ID NO: 281292 - RNA, 20 nt, Human
uuuucuccugcccgccggug

SEQ ID NO: 281293 - RNA, 32 nt, Human
uuuucuccugcuccuucuccagccuuauugca

SEQ ID NO: 281294 - RNA, 32 nt, Human
uuuucuccugcucucccccaccgccguccccu

SEQ ID NO: 281295 - RNA, 19 nt, Human
uuuucuccugcugauugug

SEQ ID NO: 281296 - RNA, 18 nt, Human
uuuucuccugcugcugug

SEQ ID NO: 281297 - RNA, 32 nt, Human
uuuucuccuguggagcccuagagcagguuacu

SEQ ID NO: 281298 - RNA, 32 nt, Human
uuuucuccuuaccccuuccuuugaucauuuca

SEQ ID NO: 281299 - RNA, 32 nt, Human
uuuucuccuucucuuauuccauuuaguuuuuc

SEQ ID NO: 281300 - RNA, 32 nt, Human
uuuucuccuuugcccaaguucccagauucuca

SEQ ID NO: 281301 - RNA, 32 nt, Human
uuuucucgggcagccagcuagguagguggguu

SEQ ID NO: 281302 - RNA, 25 nt, Human
uuuucucgucccccucccugcccaa

SEQ ID NO: 281303 - RNA, 32 nt, Human
uuuucucuauucuuauuauucacugcacuaua

SEQ ID NO: 281304 - RNA, 32 nt, Human
uuuucucucagcaugucuccuccaccacggga

SEQ ID NO: 281305 - RNA, 32 nt, Human
uuuucucuccacccacucauucauucaagcug

SEQ ID NO: 281306 - RNA, 32 nt, Human
uuuucucuccacugccaaugacagccuuuccu

SEQ ID NO: 281307 - RNA, 32 nt, Human
uuuucucuccccuggccuuugcugaagcucuu

SEQ ID NO: 281308 - RNA, 32 nt, Human
uuuucucucccuguuuugcagcaacaaauugc

SEQ ID NO: 281309 - RNA, 32 nt, Human
uuuucucuccgccuccccgucuccuccucagg

SEQ ID NO: 281310 - RNA, 32 nt, Human
uuuucucuccucccaucuccuccucuucccuc

SEQ ID NO: 281311 - RNA, 32 nt, Human
uuuucucucucccccucaccauccccaaauuu

SEQ ID NO: 281312 - RNA, 32 nt, Human
uuuucucucuccccuuccacuuuuaaggauuu

SEQ ID NO: 281313 - RNA, 32 nt, Human
uuuucucucugagauauaccucaaucacacac

SEQ ID NO: 281314 - RNA, 32 nt, Human
uuuucucucugccuccuuugugucuguuuuaa

SEQ ID NO: 281315 - RNA, 32 nt, Human
uuuucucucugccuucuucucucugucucuug

SEQ ID NO: 281316 - RNA, 32 nt, Human
uuuucucugaaauaugucaaccccauguuccc

SEQ ID NO: 281317 - RNA, 32 nt, Human
uuuucucugaagcuucucagcugcuguuacau

SEQ ID NO: 281318 - RNA, 32 nt, Human
uuuucucugaauccucuucacuggccaaaggu

SEQ ID NO: 281319 - RNA, 32 nt, Human
uuuucucugaccaccugcagccuguugaagga

SEQ ID NO: 281320 - RNA, 32 nt, Human
uuuucucugagaugauaccaaaauuccuuuug

SEQ ID NO: 281321 - RNA, 32 nt, Human
uuuucucugagugccccucacuuacauguuua

SEQ ID NO: 281322 - RNA, 32 nt, Human
uuuucucugagugccuuuuucuccuuaaggag

SEQ ID NO: 281323 - RNA, 32 nt, Human
uuuucucugcaacccaagcugauguggagggc

SEQ ID NO: 281324 - RNA, 32 nt, Human
uuuucucugcagcuuauucuugccaugcuuag

SEQ ID NO: 281325 - RNA, 32 nt, Human
uuuucucugcuauacaaaguuccucuuagggg

SEQ ID NO: 281326 - RNA, 32 nt, Human
uuuucucugcuggcguuucugcugugcccagc

SEQ ID NO: 281327 - RNA, 32 nt, Human
uuuucucuggcacuccaguccagcuugggccu

SEQ ID NO: 281328 - RNA, 32 nt, Human
uuuucucugggaauguucugagcucucccgca

SEQ ID NO: 281329 - RNA, 32 nt, Human
uuuucucugggagguuaagguuaucuguccau

SEQ ID NO: 281330 - RNA, 32 nt, Human
uuuucucuggguacugcuggccagaggacuuu

SEQ ID NO: 281331 - RNA, 32 nt, Human
uuuucucuguauccucauccuuagccacacac

SEQ ID NO: 281332 - RNA, 32 nt, Human
uuuucucugugagccgcugccuccagggccau

SEQ ID NO: 281333 - RNA, 32 nt, Human
uuuucucuucuccaguaauaaacaauuaccuu

SEQ ID NO: 281334 - RNA, 32 nt, Human
uuuucucuucuuucugcucuuccuccacugcu

SEQ ID NO: 281335 - RNA, 32 nt, Human
uuuucucuugagacggagucucgcucuguugc

SEQ ID NO: 281336 - RNA, 32 nt, Human
uuuucucuugagauggagucuuacucugucgc

SEQ ID NO: 281337 - RNA, 23 nt, Human
uuuucucuuuauuuucaugcuuu

SEQ ID NO: 281338 - RNA, 32 nt, Human
uuuucucuuucuuccucccuuucuccuucucc

SEQ ID NO: 281339 - RNA, 22 nt, Human
uuuucucuuuugcuuucuguuu

SEQ ID NO: 281340 - RNA, 32 nt, Human
uuuucugaacuccauuuuggauuuugaaucaa

SEQ ID NO: 281341 - RNA, 32 nt, Human
uuuucugaagaaacccacccacugugaucaau

SEQ ID NO: 281342 - RNA, 32 nt, Human
uuuucugaagacaggugcuugaacuugucagu

SEQ ID NO: 281343 - RNA, 32 nt, Human
uuuucugaagacagucuuuuucaaguuucugu

SEQ ID NO: 281344 - RNA, 32 nt, Human
uuuucugaccaagccuuguggcaccagcaauc

SEQ ID NO: 281345 - RNA, 32 nt, Human
uuuucugacugaucacagcauacgugugaccc

SEQ ID NO: 281346 - RNA, 32 nt, Human
uuuucugacuggcccugaaguugucaguggcu

SEQ ID NO: 281347 - RNA, 32 nt, Human
uuuucugagaaacauggagcagcgcacgccca

SEQ ID NO: 281348 - RNA, 32 nt, Human
uuuucugagacaggggucucccucugucaccc

SEQ ID NO: 281349 - RNA, 32 nt, Human
uuuucugagacagggucuuacucugucgccca

SEQ ID NO: 281350 - RNA, 32 nt, Human
uuuucugagauggagucucacucugucaccca

SEQ ID NO: 281351 - RNA, 32 nt, Human
uuuucugagauggagucucacucugucuccca

SEQ ID NO: 281352 - RNA, 32 nt, Human
uuuucugagcugucagacauuuuguuauugau

SEQ ID NO: 281353 - RNA, 32 nt, Human
uuuucugaggaaccacagcaaugaauggcuuu

SEQ ID NO: 281354 - RNA, 32 nt, Human
uuuucugagguuuggucauagcuuagaaagga

SEQ ID NO: 281355 - RNA, 23 nt, Human
uuuucugaguuucuucugcccaa

SEQ ID NO: 281356 - RNA, 32 nt, Human
uuuucugcaaacccauccuccuuuccuaauuu

SEQ ID NO: 281357 - RNA, 32 nt, Human
uuuucugcacacacgagguauuuuauacuggu

SEQ ID NO: 281358 - RNA, 19 nt, Human
uuuucugcacccucuucgc

SEQ ID NO: 281359 - RNA, 32 nt, Human
uuuucugcagcugcucccagauuacuccuucc

SEQ ID NO: 281360 - RNA, 32 nt, Human
uuuucugcaugccuggaagugcacaugcucau

SEQ ID NO: 281361 - RNA, 32 nt, Human
uuuucugccaaacccccacauuucucggguuu

SEQ ID NO: 281362 - RNA, 32 nt, Human
uuuucugccacccaggcuggaguacaguggca

SEQ ID NO: 281363 - RNA, 32 nt, Human
uuuucugcccacacccucacucacacucaguc

SEQ ID NO: 281364 - RNA, 32 nt, Human
uuuucugccccagccaaaauaaucuugugcca

SEQ ID NO: 281365 - RNA, 32 nt, Human
uuuucugccugagauucuuuaaggagauagac

SEQ ID NO: 281366 - RNA, 21 nt, Human
uuuucugcgccccuccaccaa

SEQ ID NO: 281367 - RNA, 32 nt, Human
uuuucugcuaaaggagugacugugcauauaag

SEQ ID NO: 281368 - RNA, 32 nt, Human
uuuucugcuaucaccuuccucuugucagaaug

SEQ ID NO: 281369 - RNA, 32 nt, Human
uuuucugcuccugcuucucucucuucauuggg

SEQ ID NO: 281370 - RNA, 32 nt, Human
uuuucugcugacuugcucggaaacccauugga

SEQ ID NO: 281371 - RNA, 32 nt, Human
uuuucugcuguugaaagauguccgcuuauccu

SEQ ID NO: 281372 - RNA, 32 nt, Human
uuuucugcuucuguucuguucuugcaauaaca

SEQ ID NO: 281373 - RNA, 31 nt, Human
uuuucuggacaaugccagcauuuggauuuuu

SEQ ID NO: 281374 - RNA, 24 nt, Human
uuuucuggagaagacagagacaaa

SEQ ID NO: 281375 - RNA, 32 nt, Human
uuuucuggagagacagcauugauaaguggcac

SEQ ID NO: 281376 - RNA, 32 nt, Human
uuuucuggaucauagcuaugccaagccuugga

SEQ ID NO: 281377 - RNA, 32 nt, Human
uuuucuggcaaaaucucucuuguuuuaguggg

SEQ ID NO: 281378 - RNA, 32 nt, Human
uuuucuggccagcuuuuccaggauuuauaaaa

SEQ ID NO: 281379 - RNA, 32 nt, Human
uuuucuggcuguagucccuggggcauucauuu

SEQ ID NO: 281380 - RNA, 32 nt, Human
uuuucugggaaaggaaaaccagacacaguagg

SEQ ID NO: 281381 - RNA, 32 nt, Human
uuuucugggagaagaggcuacaaggacuuagu

SEQ ID NO: 281382 - RNA, 32 nt, Human
uuuucugggccaguuucccugccuuauuuuac

SEQ ID NO: 281383 - RNA, 32 nt, Human
uuuucuggggaaggcaggaggcagaaagacgg

SEQ ID NO: 281384 - RNA, 32 nt, Human
uuuucuggggauguuaacaugggauucaggcu

SEQ ID NO: 281385 - RNA, 32 nt, Human
uuuucuggucucuucucuugacaucagccccu

SEQ ID NO: 281386 - RNA, 32 nt, Human
uuuucugguggagggaggugguggaggaacau

SEQ ID NO: 281387 - RNA, 23 nt, Human
uuuucugguguuuccugugcuuu

SEQ ID NO: 281388 - RNA, 32 nt, Human
uuuucugguugacaguguuucacaagugcugu

SEQ ID NO: 281389 - RNA, 32 nt, Human
uuuucuguaccuuucuaaaccucucuucccuc

SEQ ID NO: 281390 - RNA, 32 nt, Human
uuuucuguagagguggagucuugcuguguugc

SEQ ID NO: 281391 - RNA, 32 nt, Human
uuuucuguagcucaaagguggagggaguuuau

SEQ ID NO: 281392 - RNA, 32 nt, Human
uuuucuguaggcaacagagcaggcuuuucacu

SEQ ID NO: 281393 - RNA, 32 nt, Human
uuuucuguauguccuucuguucugccuuccgc

SEQ ID NO: 281394 - RNA, 32 nt, Human
uuuucuguauguuuguuuuucucuccacccac

SEQ ID NO: 281395 - RNA, 32 nt, Human
uuuucugucaccaaccaaccacauagccuugg

SEQ ID NO: 281396 - RNA, 32 nt, Human
uuuucugucagcagacaaaaucagccuaacag

SEQ ID NO: 281397 - RNA, 32 nt, Human
uuuucugucuccucuaaccucuuuccuuacuc

SEQ ID NO: 281398 - RNA, 32 nt, Human
uuuucugucugaugucacagaucauuguugca

SEQ ID NO: 281399 - RNA, 32 nt, Human
uuuucugugaaauaugaugcuguaugugguug

SEQ ID NO: 281400 - RNA, 21 nt, Human
uuuucugugacaccucuacau

SEQ ID NO: 281401 - RNA, 32 nt, Human
uuuucugugcuccuuucuacacaugccuuaaa

SEQ ID NO: 281402 - RNA, 32 nt, Human
uuuucugugcuggcugugccucuagucgcagc

SEQ ID NO: 281403 - RNA, 32 nt, Human
uuuucuguggaggacugcagcauuuugggcau

SEQ ID NO: 281404 - RNA, 32 nt, Human
uuuucuguguguggugcuaauuuccauuguga

SEQ ID NO: 281405 - RNA, 32 nt, Human
uuuucuguguuuaugugucucagcuuucucca

SEQ ID NO: 281406 - RNA, 32 nt, Human
uuuucuguuagcaaucaugguuauuuuaaaaa

SEQ ID NO: 281407 - RNA, 32 nt, Human
uuuucuguucgguacaucuggaaaugaagugc

SEQ ID NO: 281408 - RNA, 32 nt, Human
uuuucuguucuggaugucagugcagugcacug

SEQ ID NO: 281409 - RNA, 32 nt, Human
uuuucuguuuggccuggcucuuaauuugcuuu

SEQ ID NO: 281410 - RNA, 32 nt, Human
uuuucuguuuguagcugaggccacaggagcug

SEQ ID NO: 281411 - RNA, 29 nt, Human
uuuucuuaaauaaagaagccugggacaca

SEQ ID NO: 281412 - RNA, 32 nt, Human
uuuucuuaagagaacuuaaagaacuggugauu

SEQ ID NO: 281413 - RNA, 32 nt, Human
uuuucuuaagccccagaaagccaaaaagaaca

SEQ ID NO: 281414 - RNA, 32 nt, Human
uuuucuuaaugccaguuuacaugggaaugcau

SEQ ID NO: 281415 - RNA, 32 nt, Human
uuuucuuaccagaaaggaauggagucuguuua

SEQ ID NO: 281416 - RNA, 32 nt, Human
uuuucuuacccacuccuagcugcuaaugucua

SEQ ID NO: 281417 - RNA, 32 nt, Human
uuuucuuacccuuuuggacauuucuuuguugc

SEQ ID NO: 281418 - RNA, 32 nt, Human
uuuucuuacugcaaccuucgccucccgaguuc

SEQ ID NO: 281419 - RNA, 32 nt, Human
uuuucuuagaagcagaguuggaaccacugagg

SEQ ID NO: 281420 - RNA, 32 nt, Human
uuuucuuagcauuuucuuuguaaagaacuaca

SEQ ID NO: 281421 - RNA, 32 nt, Human
uuuucuuaguguuugcccuggggguuacgacu

SEQ ID NO: 281422 - RNA, 21 nt, Human
uuuucuuaguucuucugcuuu

SEQ ID NO: 281423 - RNA, 32 nt, Human
uuuucuuauaguauuggaacuacuucuaauuu

SEQ ID NO: 281424 - RNA, 32 nt, Human
uuuucuuaucuucuccgagcucuagacuggcu

SEQ ID NO: 281425 - RNA, 32 nt, Human
uuuucuuauuaaaaauauaucuuuaguuaauc

SEQ ID NO: 281426 - RNA, 32 nt, Human
uuuucuuauucaccuugcuugugcuuaaacac

SEQ ID NO: 281427 - RNA, 32 nt, Human
uuuucuuauugcacugaauucaacuccagaca

SEQ ID NO: 281428 - RNA, 32 nt, Human
uuuucuucaaaugauuacuguguuagcaaaag

SEQ ID NO: 281429 - RNA, 27 nt, Human
uuuucuucaacauguaaccaaucagua

SEQ ID NO: 281430 - RNA, 32 nt, Human
uuuucuucaauacaaggggaaaauauucuugc

SEQ ID NO: 281431 - RNA, 32 nt, Human
uuuucuucaaugcuugaugcacuaaugaagac

SEQ ID NO: 281432 - RNA, 24 nt, Human
uuuucuucacuagaggcaucucag

SEQ ID NO: 281433 - RNA, 31 nt, Human
uuuucuucacucaaauuuuggcgaaucucaa

SEQ ID NO: 281434 - RNA, 32 nt, Human
uuuucuucagggcugaguuugggucuucauuu

SEQ ID NO: 281435 - RNA, 32 nt, Human
uuuucuucaggggauuucucucugauuucuuc

SEQ ID NO: 281436 - RNA, 32 nt, Human
uuuucuucauauuaucacaaucaugcccuucc

SEQ ID NO: 281437 - RNA, 32 nt, Human
uuuucuucaugccugcucuagucucaucucau

SEQ ID NO: 281438 - RNA, 20 nt, Human
uuuucuucaugguugagcag

SEQ ID NO: 281439 - RNA, 32 nt, Human
uuuucuuccccauuccuuccucccccucggua

SEQ ID NO: 281440 - RNA, 32 nt, Human
uuuucuuccccuucuucuuuccuuccucccuc

SEQ ID NO: 281441 - RNA, 32 nt, Human
uuuucuucccuucccuucccuucccuuuccuu

SEQ ID NO: 281442 - RNA, 21 nt, Human
uuuucuuccgccugaggcauc

SEQ ID NO: 281443 - RNA, 24 nt, Human
uuuucuuccguuggaaccacccag

SEQ ID NO: 281444 - RNA, 32 nt, Human
uuuucuuccucuucccccaaccuaacuucugc

SEQ ID NO: 281445 - RNA, 32 nt, Human
uuuucuuccucuucuccuugggccaguuaaua

SEQ ID NO: 281446 - RNA, 32 nt, Human
uuuucuuccucuugcuuuuguuaucuccucuu

SEQ ID NO: 281447 - RNA, 32 nt, Human
uuuucuuccucuuuaccucuuaaaacagcaga

SEQ ID NO: 281448 - RNA, 32 nt, Human
uuuucuuccucuuuaucuaacuauauuacacu

SEQ ID NO: 281449 - RNA, 32 nt, Human
uuuucuuccucuuuuauaaaauaacccgguga

SEQ ID NO: 281450 - RNA, 32 nt, Human
uuuucuuccuucccuaauuuuaaugguauacu

SEQ ID NO: 281451 - RNA, 32 nt, Human
uuuucuuccuuugggauguggaagcuacagaa

SEQ ID NO: 281452 - RNA, 32 nt, Human
uuuucuuccuuuugcuuuaauauacugaacac

SEQ ID NO: 281453 - RNA, 32 nt, Human
uuuucuucuacuucauguccagaagaguaaga

SEQ ID NO: 281454 - RNA, 20 nt, Human
uuuucuucuaugggugauag

SEQ ID NO: 281455 - RNA, 32 nt, Human
uuuucuucucacuagcauguggcuccaugagg

SEQ ID NO: 281456 - RNA, 32 nt, Human
uuuucuucuccuccuccuccuuccuuccuccu

SEQ ID NO: 281457 - RNA, 32 nt, Human
uuuucuucucuccuggccucuggaagcaucuu

SEQ ID NO: 281458 - RNA, 32 nt, Human
uuuucuucucugcuuucuucuuucugccccuc

SEQ ID NO: 281459 - RNA, 32 nt, Human
uuuucuucucugcuuugucuguguuuugaguc

SEQ ID NO: 281460 - RNA, 32 nt, Human
uuuucuucucuucuccuccuccucuuucuuca

SEQ ID NO: 281461 - RNA, 32 nt, Human
uuuucuucugcaagcuccauguuuucacaucu

SEQ ID NO: 281462 - RNA, 22 nt, Human
uuuucuucugccucaggcucca

SEQ ID NO: 281463 - RNA, 32 nt, Human
uuuucuucugccucucuguguggguacugugu

SEQ ID NO: 281464 - RNA, 26 nt, Human
uuuucuucugcuacuuuggggaguug

SEQ ID NO: 281465 - RNA, 32 nt, Human
uuuucuucuuaacccagucuuaggcugguauu

SEQ ID NO: 281466 - RNA, 22 nt, Human
uuuucuucuuuaagccucauca

SEQ ID NO: 281467 - RNA, 32 nt, Human
uuuucuucuuuagauugcaugcuauuguaugu

SEQ ID NO: 281468 - RNA, 23 nt, Human
uuuucuucuuuagcuugguugug

SEQ ID NO: 281469 - RNA, 32 nt, Human
uuuucuucuuuccugacuuugacauuguagcu

SEQ ID NO: 281470 - RNA, 21 nt, Human
uuuucuucuuuguauacagua

SEQ ID NO: 281471 - RNA, 32 nt, Human
uuuucuucuuuguuuggauugcagcauucugc

SEQ ID NO: 281472 - RNA, 32 nt, Human
uuuucuugagcagagggauggaacagagggug

SEQ ID NO: 281473 - RNA, 32 nt, Human
uuuucuugcccauuuucugcucgacucgcccc

SEQ ID NO: 281474 - RNA, 32 nt, Human
uuuucuugccccauacauaccuugaggcgagc

SEQ ID NO: 281475 - RNA, 32 nt, Human
uuuucuugccgucccuccccugccuccagaau

SEQ ID NO: 281476 - RNA, 31 nt, Human
uuuucuugcuggcugauacacuuguaaacac

SEQ ID NO: 281477 - RNA, 30 nt, Human
uuuucuugcuugcaauagaaaugcaaugug

SEQ ID NO: 281478 - RNA, 32 nt, Human
uuuucuuggccucaugauuucucccucaccaa

SEQ ID NO: 281479 - RNA, 32 nt, Human
uuuucuuguacuuuagccuggcugaacaugaa

SEQ ID NO: 281480 - RNA, 32 nt, Human
uuuucuuguagagacgggguuuugccauguug

SEQ ID NO: 281481 - RNA, 32 nt, Human
uuuucuugucuccauaauccucccuuucaagg

SEQ ID NO: 281482 - RNA, 32 nt, Human
uuuucuuguuuaucacacauacaaguaucuuu

SEQ ID NO: 281483 - RNA, 32 nt, Human
uuuucuuuaaggcagcaccuggaguggagaga

SEQ ID NO: 281484 - RNA, 32 nt, Human
uuuucuuuacaguggcacucaggcuggcccag

SEQ ID NO: 281485 - RNA, 32 nt, Human
uuuucuuuaccucauuuaugaugcagagacau

SEQ ID NO: 281486 - RNA, 32 nt, Human
uuuucuuuagcuucaucaguccuuccuuccua

SEQ ID NO: 281487 - RNA, 32 nt, Human
uuuucuuuaucucccuuccccuuccuaagucc

SEQ ID NO: 281488 - RNA, 22 nt, Human
uuuucuuuauguguuugacggg

SEQ ID NO: 281489 - RNA, 32 nt, Human
uuuucuuucacgugauucauccuuccucauug

SEQ ID NO: 281490 - RNA, 22 nt, Human
uuuucuuucacguuucugcuuu

SEQ ID NO: 281491 - RNA, 23 nt, Human
uuuucuuucagauauuguuuugu

SEQ ID NO: 281492 - RNA, 32 nt, Human
uuuucuuucaggaauaauaaagagcaugauuc

SEQ ID NO: 281493 - RNA, 32 nt, Human
uuuucuuucagguugaucuucuauuaaaauga

SEQ ID NO: 281494 - RNA, 24 nt, Human
uuuucuuucagucauugucuuagu

SEQ ID NO: 281495 - RNA, 32 nt, Human
uuuucuuucaugagggagucaauauguagugg

SEQ ID NO: 281496 - RNA, 32 nt, Human
uuuucuuucaugguccgagggagcugcccuuc

SEQ ID NO: 281497 - RNA, 32 nt, Human
uuuucuuuccauccccaugccauuggacaccg

SEQ ID NO: 281498 - RNA, 32 nt, Human
uuuucuuucccucaccaaaacccagccuugcc

SEQ ID NO: 281499 - RNA, 32 nt, Human
uuuucuuucccuucuuuuucccuuuccuuucc

SEQ ID NO: 281500 - RNA, 32 nt, Human
uuuucuuucccuuuccccuuuuucuuucccuu

SEQ ID NO: 281501 - RNA, 32 nt, Human
uuuucuuuccuaggacuuguuguuaaacgcca

SEQ ID NO: 281502 - RNA, 24 nt, Human
uuuucuuuccugcauuguuuuagu

SEQ ID NO: 281503 - RNA, 22 nt, Human
uuuucuuuccuggugggguagu

SEQ ID NO: 281504 - RNA, 22 nt, Human
uuuucuuuccugguuuucuggu

SEQ ID NO: 281505 - RNA, 32 nt, Human
uuuucuuuccuguaaagaaacauuuccuuuga

SEQ ID NO: 281506 - RNA, 24 nt, Human
uuuucuuuccuuuuauuuuuuagu

SEQ ID NO: 281507 - RNA, 23 nt, Human
uuuucuuuccuuuuguuguuggu

SEQ ID NO: 281508 - RNA, 24 nt, Human
uuuucuuuccuuuuuguuuuuggu

SEQ ID NO: 281509 - RNA, 23 nt, Human
uuuucuuucuaugggguugcagg

SEQ ID NO: 281510 - RNA, 32 nt, Human
uuuucuuucucuuccuccuuccucuuccuuac

SEQ ID NO: 281511 - RNA, 32 nt, Human
uuuucuuucuucuuccuucuuucuuccuuuuu

SEQ ID NO: 281512 - RNA, 32 nt, Human
uuuucuuucuucuucuucuacaacuggaacca

SEQ ID NO: 281513 - RNA, 32 nt, Human
uuuucuuucuuucagccugaauucuaagcaac

SEQ ID NO: 281514 - RNA, 32 nt, Human
uuuucuuugcaaugcuaucuaaccagaauaca

SEQ ID NO: 281515 - RNA, 32 nt, Human
uuuucuuugcagaugguacaaacucucccgag

SEQ ID NO: 281516 - RNA, 32 nt, Human
uuuucuuugcugggaggggcuggugaggcugc

SEQ ID NO: 281517 - RNA, 32 nt, Human
uuuucuuugcuguucuucauccucguuguugc

SEQ ID NO: 281518 - RNA, 32 nt, Human
uuuucuuuggacaacaggaagugaaccuuaag

SEQ ID NO: 281519 - RNA, 22 nt, Human
uuuucuuugguuaaaccaaaaa

SEQ ID NO: 281520 - RNA, 32 nt, Human
uuuucuuugguuucuucuguuuuccaacuaaa

SEQ ID NO: 281521 - RNA, 24 nt, Human
uuuucuuuguguuuggaucaaaaa

SEQ ID NO: 281522 - RNA, 32 nt, Human
uuuucuuuguuucauaggagucuuguguuaua

SEQ ID NO: 281523 - RNA, 32 nt, Human
uuuucuuuuaauagauggugucagaaguggga

SEQ ID NO: 281524 - RNA, 32 nt, Human
uuuucuuuucaugucuuugaucugguuuuauu

SEQ ID NO: 281525 - RNA, 25 nt, Human
uuuucuuuuccccagaauuacuuag

SEQ ID NO: 281526 - RNA, 32 nt, Human
uuuucuuuuccccuggggaagcuuugguugaa

SEQ ID NO: 281527 - RNA, 32 nt, Human
uuuucuuuuccugcccuuugagaguuuaauaa

SEQ ID NO: 281528 - RNA, 18 nt, Human
uuuucuuuucuguuuggu

SEQ ID NO: 281529 - RNA, 32 nt, Human
uuuucuuuucuuucuuucuucgacagagucuc

SEQ ID NO: 281530 - RNA, 32 nt, Human
uuuucuuuucuuucuuucuuucuuucuuucuu

SEQ ID NO: 281531 - RNA, 32 nt, Human
uuuucuuuucuuucuuuuuagauuucugacuu

SEQ ID NO: 281532 - RNA, 32 nt, Human
uuuucuuuugagacagagucucacucucgucg

SEQ ID NO: 281533 - RNA, 32 nt, Human
uuuucuuuugagacagaguuucgcucuuguug

SEQ ID NO: 281534 - RNA, 32 nt, Human
uuuucuuuugagacagaguuucgcuuugucgc

SEQ ID NO: 281535 - RNA, 32 nt, Human
uuuucuuuugagacagggucuugcucuugccc

SEQ ID NO: 281536 - RNA, 32 nt, Human
uuuucuuuugagacgaaaucucgcucuaucac

SEQ ID NO: 281537 - RNA, 32 nt, Human
uuuucuuuugagaugaaguuuuacucuuguug

SEQ ID NO: 281538 - RNA, 32 nt, Human
uuuucuuuugagaugggggucuugcucuguug

SEQ ID NO: 281539 - RNA, 32 nt, Human
uuuucuuuugcugggggcaccucccacggguc

SEQ ID NO: 281540 - RNA, 32 nt, Human
uuuucuuuuggggaaagggaaggaaaaauuau

SEQ ID NO: 281541 - RNA, 32 nt, Human
uuuucuuuuguugcuuaugcuuuugcugucac

SEQ ID NO: 281542 - RNA, 32 nt, Human
uuuucuuuuguuucucucucccccuuucucuc

SEQ ID NO: 281543 - RNA, 25 nt, Human
uuuucuuuuguuuuuugaaguguug

SEQ ID NO: 281544 - RNA, 21 nt, Human
uuuucuuuuguuuuuugcuuu

SEQ ID NO: 281545 - RNA, 32 nt, Human
uuuucuuuuuaaaucacuuauuucagagugca

SEQ ID NO: 281546 - RNA, 32 nt, Human
uuuucuuuuuaagagaagguguauuucacugg

SEQ ID NO: 281547 - RNA, 32 nt, Human
uuuucuuuuuacucccccucuuaagggggccu

SEQ ID NO: 281548 - RNA, 22 nt, Human
uuuucuuuuuauucuacuuggu

SEQ ID NO: 281549 - RNA, 32 nt, Human
uuuucuuuuuccugaaacuuugaaucacccua

SEQ ID NO: 281550 - RNA, 32 nt, Human
uuuucuuuuucuccuuuauaugacuuucucug

SEQ ID NO: 281551 - RNA, 22 nt, Human
uuuucuuuuucuuuuucuguuu

SEQ ID NO: 281552 - RNA, 23 nt, Human
uuuucuuuuucuuuuucuucuuu

SEQ ID NO: 281553 - RNA, 32 nt, Human
uuuucuuuuugaaaauguuuuucuuugcaguc

SEQ ID NO: 281554 - RNA, 24 nt, Human
uuuucuuuuuugagcaacuuaagu

SEQ ID NO: 281555 - RNA, 32 nt, Human
uuuugaaaaaggcuuaaugaagagaauguugu

SEQ ID NO: 281556 - RNA, 32 nt, Human
uuuugaaaagacagacuccucaaggagagaua

SEQ ID NO: 281557 - RNA, 32 nt, Human
uuuugaaaaggacaauguguguauaaauaaaa

SEQ ID NO: 281558 - RNA, 32 nt, Human
uuuugaaaaguggggagauggcuuuguguaga

SEQ ID NO: 281559 - RNA, 32 nt, Human
uuuugaaacagaaaccuuagaauaggucauug

SEQ ID NO: 281560 - RNA, 32 nt, Human
uuuugaaacugcacuaaauuuuucuuaacauu

SEQ ID NO: 281561 - RNA, 32 nt, Human
uuuugaaagcaaagcucuggcucacaggcccc

SEQ ID NO: 281562 - RNA, 32 nt, Human
uuuugaaaggaaucccugucaaaugguuuagu

SEQ ID NO: 281563 - RNA, 32 nt, Human
uuuugaaaggguuucagcugaagaauuucuuc

SEQ ID NO: 281564 - RNA, 32 nt, Human
uuuugaaaguccugcccugccuuccuccugcc

SEQ ID NO: 281565 - RNA, 32 nt, Human
uuuugaaaguccuguucacaugaguuccuaug

SEQ ID NO: 281566 - RNA, 32 nt, Human
uuuugaaaguggagaucgugguccccauggaa

SEQ ID NO: 281567 - RNA, 32 nt, Human
uuuugaaauauguaguaauaagacuuaucucu

SEQ ID NO: 281568 - RNA, 32 nt, Human
uuuugaacaagaaauguuguguccuaaugugu

SEQ ID NO: 281569 - RNA, 32 nt, Human
uuuugaacacguaaacaacacagacuucaagc

SEQ ID NO: 281570 - RNA, 28 nt, Human
uuuugaacaggauuaccuggagccugga

SEQ ID NO: 281571 - RNA, 32 nt, Human
uuuugaacccaggaggcagagguugcagcgag

SEQ ID NO: 281572 - RNA, 32 nt, Human
uuuugaacccaggaguucagggucauagcaug

SEQ ID NO: 281573 - RNA, 21 nt, Human
uuuugaacuguacaucucaca

SEQ ID NO: 281574 - RNA, 32 nt, Human
uuuugaagacucagggauagcuguaaugcuuu

SEQ ID NO: 281575 - RNA, 23 nt, Human
uuuugaagauacuuguggcugga

SEQ ID NO: 281576 - RNA, 32 nt, Human
uuuugaagcacuuucaccucuggcccaggaga

SEQ ID NO: 281577 - RNA, 32 nt, Human
uuuugaagcugccuggcccccagggcgcuuga

SEQ ID NO: 281578 - RNA, 32 nt, Human
uuuugaagcuguuggugcuugcuuuacaucgc

SEQ ID NO: 281579 - RNA, 32 nt, Human
uuuugaaggaagacuuauuaacaacaguaauu

SEQ ID NO: 281580 - RNA, 32 nt, Human
uuuugaaggaagcacaauuuccaccuuauuuu

SEQ ID NO: 281581 - RNA, 32 nt, Human
uuuugaagggagaagacacugcagugaccacu

SEQ ID NO: 281582 - RNA, 32 nt, Human
uuuugaagguagcuauacuagcacuuuugauc

SEQ ID NO: 281583 - RNA, 31 nt, Human
uuuugaagucguauuauucacuuguaaaaau

SEQ ID NO: 281584 - RNA, 32 nt, Human
uuuugaagugugcagggcagccuggacacaag

SEQ ID NO: 281585 - RNA, 32 nt, Human
uuuugaaguuuucauaauaaaaaguuaggagg

SEQ ID NO: 281586 - RNA, 32 nt, Human
uuuugaaucuucauuuugcaugaguggcaaau

SEQ ID NO: 281587 - RNA, 22 nt, Human
uuuugaaugagaaagaggcaug

SEQ ID NO: 281588 - RNA, 32 nt, Human
uuuugaauguacaaagacccacacuauugaga

SEQ ID NO: 281589 - RNA, 32 nt, Human
uuuugaauguuuucucagagcuggagguugcu

SEQ ID NO: 281590 - RNA, 32 nt, Human
uuuugaauuggcuucuuucacuuagcaaugug

SEQ ID NO: 281591 - RNA, 32 nt, Human
uuuugaauuucguauucuuucauuccacugug

SEQ ID NO: 281592 - RNA, 32 nt, Human
uuuugacaacgaagacgaaaaugaguaagugu

SEQ ID NO: 281593 - RNA, 32 nt, Human
uuuugacacaucagugcugcaucuacuuuucu

SEQ ID NO: 281594 - RNA, 32 nt, Human
uuuugacaccucaauauucacacccauaaaca

SEQ ID NO: 281595 - RNA, 32 nt, Human
uuuugacacucccaagaccauucagggaaauu

SEQ ID NO: 281596 - RNA, 32 nt, Human
uuuugacagaguggcuggaggaaaaguggcaa

SEQ ID NO: 281597 - RNA, 32 nt, Human
uuuugacagauggcgggacggaaaugcaauag

SEQ ID NO: 281598 - RNA, 30 nt, Human
uuuugacaguuguagucagaaagcagaauu

SEQ ID NO: 281599 - RNA, 32 nt, Human
uuuugacauacagcuaaaagggacuaaauuug

SEQ ID NO: 281600 - RNA, 32 nt, Human
uuuugacauccagcaguccaagguauugagac

SEQ ID NO: 281601 - RNA, 32 nt, Human
uuuugacaucugugcuuguccaacacagggcu

SEQ ID NO: 281602 - RNA, 32 nt, Human
uuuugaccaugcuucuacacuggcucuguggc

SEQ ID NO: 281603 - RNA, 32 nt, Human
uuuugaccauuuuguuaugaggaauuauacau

SEQ ID NO: 281604 - RNA, 32 nt, Human
uuuugaccugagauguuugggaagagagugag

SEQ ID NO: 281605 - RNA, 32 nt, Human
uuuugaccugcaggcagugcucucuaacagga

SEQ ID NO: 281606 - RNA, 25 nt, Human
uuuugaccuggaguggaucuauuua

SEQ ID NO: 281607 - RNA, 32 nt, Human
uuuugacgcuggaagggcagauuuccugucug

SEQ ID NO: 281608 - RNA, 32 nt, Human
uuuugacucacugcaaccuccgccuccugggu

SEQ ID NO: 281609 - RNA, 32 nt, Human
uuuugacuccuggccuuucucuaggguuggga

SEQ ID NO: 281610 - RNA, 32 nt, Human
uuuugacugcaacucaucacaugaggucaggu

SEQ ID NO: 281611 - RNA, 32 nt, Human
uuuugacuguaaccacuuuccugagugcucuu

SEQ ID NO: 281612 - RNA, 22 nt, Human
uuuugacuucagauugaacuua

SEQ ID NO: 281613 - RNA, 32 nt, Human
uuuugacuugacuugaauugcuugauacuuug

SEQ ID NO: 281614 - RNA, 32 nt, Human
uuuugacuuggcuauugauauucauucuacuu

SEQ ID NO: 281615 - RNA, 32 nt, Human
uuuugagaaacacaggcuucuaugauuucagu

SEQ ID NO: 281616 - RNA, 32 nt, Human
uuuugagaaagccaacuaguguggaagcuugc

SEQ ID NO: 281617 - RNA, 32 nt, Human
uuuugagaacacaaacuuuucccccacggacc

SEQ ID NO: 281618 - RNA, 32 nt, Human
uuuugagaaccagauuugagagagggaccugg

SEQ ID NO: 281619 - RNA, 32 nt, Human
uuuugagaagcagugguuggggcauuuuuaag

SEQ ID NO: 281620 - RNA, 32 nt, Human
uuuugagacaaagucucacugugucaugcagg

SEQ ID NO: 281621 - RNA, 32 nt, Human
uuuugagacagaauuucacucuucucacccag

SEQ ID NO: 281622 - RNA, 32 nt, Human
uuuugagacagagccacauuauaaucuauuac

SEQ ID NO: 281623 - RNA, 32 nt, Human
uuuugagacagaguuuugcucuugccguccag

SEQ ID NO: 281624 - RNA, 32 nt, Human
uuuugagacaggcucucccuaugucaccgagg

SEQ ID NO: 281625 - RNA, 23 nt, Human
uuuugagacagggccucacucug

SEQ ID NO: 281626 - RNA, 32 nt, Human
uuuugagacaguuucgcucuguugcccaggcu

SEQ ID NO: 281627 - RNA, 32 nt, Human
uuuugagaccacacagcuguuuucuugguacc

SEQ ID NO: 281628 - RNA, 32 nt, Human
uuuugagaccagccugaccaacauggugaaac

SEQ ID NO: 281629 - RNA, 32 nt, Human
uuuugagaccagccuggccaacaugguaaaau

SEQ ID NO: 281630 - RNA, 32 nt, Human
uuuugagaccagccuggccaacauggugaaac

SEQ ID NO: 281631 - RNA, 32 nt, Human
uuuugagaccagccugggaaacaucugccucu

SEQ ID NO: 281632 - RNA, 32 nt, Human
uuuugagaccagccugggcaacaucaggagau

SEQ ID NO: 281633 - RNA, 32 nt, Human
uuuugagaccuagggcuggagugcaguugagc

SEQ ID NO: 281634 - RNA, 32 nt, Human
uuuugagacggagacucacucuguugcccaga

SEQ ID NO: 281635 - RNA, 32 nt, Human
uuuugagacggaguccagccugggcaacagag

SEQ ID NO: 281636 - RNA, 32 nt, Human
uuuugagacggagucucaacucuugucgccca

SEQ ID NO: 281637 - RNA, 32 nt, Human
uuuugagacucgcucugucucccaggcugaag

SEQ ID NO: 281638 - RNA, 32 nt, Human
uuuugagagacacuguucugcuccaugcaggg

SEQ ID NO: 281639 - RNA, 32 nt, Human
uuuugagagagacagcagggaggagguagaga

SEQ ID NO: 281640 - RNA, 32 nt, Human
uuuugagagcucuucagagaucauaagaacuu

SEQ ID NO: 281641 - RNA, 31 nt, Human
uuuugagaggagagagagcugagacuguugg

SEQ ID NO: 281642 - RNA, 32 nt, Human
uuuugagaggcuaacucucccaaaaaggacca

SEQ ID NO: 281643 - RNA, 32 nt, Human
uuuugagaggcugaaguagauguuucagcuga

SEQ ID NO: 281644 - RNA, 32 nt, Human
uuuugagaggcugaggcggguggaucaccuga

SEQ ID NO: 281645 - RNA, 32 nt, Human
uuuugagaggcugaggcggguggaucacuuga

SEQ ID NO: 281646 - RNA, 32 nt, Human
uuuugagaggcugagguggguggaucacuuga

SEQ ID NO: 281647 - RNA, 32 nt, Human
uuuugagaguaugaaagaaauuuuaaugccac

SEQ ID NO: 281648 - RNA, 32 nt, Human
uuuugagauaauuucacucuuguugcccaggc

SEQ ID NO: 281649 - RNA, 32 nt, Human
uuuugagauacagaggcaaaggcgcuagggaa

SEQ ID NO: 281650 - RNA, 22 nt, Human
uuuugagauagaaaguagacau

SEQ ID NO: 281651 - RNA, 32 nt, Human
uuuugagaucagccugggcaacauggugaaac

SEQ ID NO: 281652 - RNA, 20 nt, Human
uuuugagauccacacacaau

SEQ ID NO: 281653 - RNA, 32 nt, Human
uuuugagauggaaucucacucuguugcccagg

SEQ ID NO: 281654 - RNA, 32 nt, Human
uuuugagauggaaucucucucuguugcccagg

SEQ ID NO: 281655 - RNA, 32 nt, Human
uuuugagauggagacucacucuguugcccagg

SEQ ID NO: 281656 - RNA, 32 nt, Human
uuuugagauggaguccagccugggugacagag

SEQ ID NO: 281657 - RNA, 32 nt, Human
uuuugagauggagucucuacuaaaaauacaaa

SEQ ID NO: 281658 - RNA, 32 nt, Human
uuuugagauggggacucacucuguugcccagg

SEQ ID NO: 281659 - RNA, 32 nt, Human
uuuugagauguugagaggaacaagaaggugga

SEQ ID NO: 281660 - RNA, 32 nt, Human
uuuugagcaaaccacauaaucucucuaggucc

SEQ ID NO: 281661 - RNA, 32 nt, Human
uuuugagcaacugagucaucucaaguccugag

SEQ ID NO: 281662 - RNA, 31 nt, Human
uuuugagcacuuuucccguguagacucaaca

SEQ ID NO: 281663 - RNA, 32 nt, Human
uuuugagcagaggacccuccaacuuauggcau

SEQ ID NO: 281664 - RNA, 32 nt, Human
uuuugagcagcacaguccaauucuuuaacuaa

SEQ ID NO: 281665 - RNA, 32 nt, Human
uuuugagcagccucggguuucccaccaccucc

SEQ ID NO: 281666 - RNA, 32 nt, Human
uuuugagcauuuuguuacaugucauucacaac

SEQ ID NO: 281667 - RNA, 23 nt, Human
uuuugagccagggccucacucug

SEQ ID NO: 281668 - RNA, 32 nt, Human
uuuugagcccaggaauuugaggcugcagcgag

SEQ ID NO: 281669 - RNA, 32 nt, Human
uuuugagcccaggaggucgaggcugcaguggg

SEQ ID NO: 281670 - RNA, 32 nt, Human
uuuugagccugccuaaaggccagauccuauca

SEQ ID NO: 281671 - RNA, 32 nt, Human
uuuugagccuugccucaggccuggugaguggg

SEQ ID NO: 281672 - RNA, 31 nt, Human
uuuugagcgagggaagaaaaagcuguaugca

SEQ ID NO: 281673 - RNA, 32 nt, Human
uuuugagcuggagaaggacuauggcuguuccu

SEQ ID NO: 281674 - RNA, 32 nt, Human
uuuugagcuguugcugagucuggcuuuuguga

SEQ ID NO: 281675 - RNA, 32 nt, Human
uuuugagcuucucaaaagucuagagccaccgu

SEQ ID NO: 281676 - RNA, 32 nt, Human
uuuugagcuuucuauaagcuauagcuuuguuu

SEQ ID NO: 281677 - RNA, 32 nt, Human
uuuugaggaauguuguuaaaaaugucuuuagg

SEQ ID NO: 281678 - RNA, 32 nt, Human
uuuugaggagcuuuuccuaaaaggauuguaca

SEQ ID NO: 281679 - RNA, 32 nt, Human
uuuugaggaguuucccucugucacacaagcug

SEQ ID NO: 281680 - RNA, 32 nt, Human
uuuugaggcaaugucucacuguuauccaggcu

SEQ ID NO: 281681 - RNA, 32 nt, Human
uuuugaggccaguagcaacauccagagaucau

SEQ ID NO: 281682 - RNA, 32 nt, Human
uuuugaggcugacuggggagaaagcugccugg

SEQ ID NO: 281683 - RNA, 21 nt, Human
uuuugaggcugggugcagugg

SEQ ID NO: 281684 - RNA, 32 nt, Human
uuuugagggacauacugaagccagauaaccca

SEQ ID NO: 281685 - RNA, 32 nt, Human
uuuugaggggagggaaaggugagguuaggggu

SEQ ID NO: 281686 - RNA, 32 nt, Human
uuuugaggggcaccugguccucgguuggggcu

SEQ ID NO: 281687 - RNA, 32 nt, Human
uuuugagggugaggacaaggguuguggggagg

SEQ ID NO: 281688 - RNA, 32 nt, Human
uuuugagggugagggacagcacagcagaggug

SEQ ID NO: 281689 - RNA, 32 nt, Human
uuuugaggguuauuggaaaacagagcagugac

SEQ ID NO: 281690 - RNA, 32 nt, Human
uuuugaggguuucacugucagugagagucuca

SEQ ID NO: 281691 - RNA, 32 nt, Human
uuuugaggugugcugggaugaaaggcacccug

SEQ ID NO: 281692 - RNA, 32 nt, Human
uuuugagguuucaaacuuuccuucuggagaau

SEQ ID NO: 281693 - RNA, 32 nt, Human
uuuugaguacggcuauagccuggacuuuccug

SEQ ID NO: 281694 - RNA, 32 nt, Human
uuuugagucucaaccaacuagcagaaacuuug

SEQ ID NO: 281695 - RNA, 32 nt, Human
uuuugagucuccacuuuuacucacugucucug

SEQ ID NO: 281696 - RNA, 21 nt, Human
uuuugagucugccuccuagga

SEQ ID NO: 281697 - RNA, 32 nt, Human
uuuugagugagguauauacucaucucacaagu

SEQ ID NO: 281698 - RNA, 32 nt, Human
uuuugaguucuccaaaucuaaacaagauuuug

SEQ ID NO: 281699 - RNA, 20 nt, Human
uuuugaguuuaaaaccuggg

SEQ ID NO: 281700 - RNA, 32 nt, Human
uuuugaguuugaaaucucucccagaagacaaa

SEQ ID NO: 281701 - RNA, 25 nt, Human
uuuugaguuuggggguguacuuugc

SEQ ID NO: 281702 - RNA, 32 nt, Human
uuuugauaacauguuguucuguuuuguaaagu

SEQ ID NO: 281703 - RNA, 32 nt, Human
uuuugauacaucuugacacauauauacaccca

SEQ ID NO: 281704 - RNA, 32 nt, Human
uuuugauacauggauuuuacagugcaugcagg

SEQ ID NO: 281705 - RNA, 32 nt, Human
uuuugauaggaagugaguguuuuggguuguuu

SEQ ID NO: 281706 - RNA, 32 nt, Human
uuuugauaggguggucaggacaagaggaagca

SEQ ID NO: 281707 - RNA, 32 nt, Human
uuuugauaguaaaauuaauagccauaaagucc

SEQ ID NO: 281708 - RNA, 32 nt, Human
uuuugauauuaaaaagaacagagauggggucu

SEQ ID NO: 281709 - RNA, 32 nt, Human
uuuugauauuucuagcuuaucuacuuccaaac

SEQ ID NO: 281710 - RNA, 32 nt, Human
uuuugaucaauguuuguagauuucaagguaca

SEQ ID NO: 281711 - RNA, 32 nt, Human
uuuugaucauuucccaagauacuuucccaaaa

SEQ ID NO: 281712 - RNA, 24 nt, Human
uuuugauccaagcugguccacuca

SEQ ID NO: 281713 - RNA, 32 nt, Human
uuuugaucuccucuucuuggucagaacugcuc

SEQ ID NO: 281714 - RNA, 32 nt, Human
uuuugaucuugaccuccuggagcauuuucaug

SEQ ID NO: 281715 - RNA, 32 nt, Human
uuuugaugcaaaaggaaaauaugcugaauagu

SEQ ID NO: 281716 - RNA, 32 nt, Human
uuuugaugccaggugcaaucuacuggaaaugu

SEQ ID NO: 281717 - RNA, 32 nt, Human
uuuugaugccauauuuucaguguuacacuuuu

SEQ ID NO: 281718 - RNA, 32 nt, Human
uuuugaugcccuugaauagccugaagaugaag

SEQ ID NO: 281719 - RNA, 32 nt, Human
uuuugauggaguuucacuauuuugcccaggcu

SEQ ID NO: 281720 - RNA, 32 nt, Human
uuuugauggaguuuccucucauagugauuugc

SEQ ID NO: 281721 - RNA, 32 nt, Human
uuuugauggaguuucgcuguuguugcccaggc

SEQ ID NO: 281722 - RNA, 32 nt, Human
uuuugaugggagaaagcuggagaucugaaccc

SEQ ID NO: 281723 - RNA, 32 nt, Human
uuuugaugggagggaaagaguacugaaauguu

SEQ ID NO: 281724 - RNA, 32 nt, Human
uuuugauggugucugugacauuuccuguugug

SEQ ID NO: 281725 - RNA, 32 nt, Human
uuuugauuaagccuguuuguguugguuuucug

SEQ ID NO: 281726 - RNA, 32 nt, Human
uuuugauucaacaacaggagaauucuacuguu

SEQ ID NO: 281727 - RNA, 22 nt, Human
uuuugauucugaaaaacucugc

SEQ ID NO: 281728 - RNA, 32 nt, Human
uuuugauucugggcugaguuauuacaauuaug

SEQ ID NO: 281729 - RNA, 32 nt, Human
uuuugauuggaaggcugguugcugggacugua

SEQ ID NO: 281730 - RNA, 23 nt, Human
uuuugauugucacugaccacuca

SEQ ID NO: 281731 - RNA, 32 nt, Human
uuuugauuucccaacagagauacuucuggucu

SEQ ID NO: 281732 - RNA, 32 nt, Human
uuuugauuugguggaugugaugguugguuuua

SEQ ID NO: 281733 - RNA, 32 nt, Human
uuuugauuugugaacauacugccuuauuuaaa

SEQ ID NO: 281734 - RNA, 32 nt, Human
uuuugauuuuucuauuuccuccuaaagaaagu

SEQ ID NO: 281735 - RNA, 32 nt, Human
uuuugcaaaaggacucuaauaccuguuuaaua

SEQ ID NO: 281736 - RNA, 24 nt, Human
uuuugcaaauggccccuugcccca

SEQ ID NO: 281737 - RNA, 32 nt, Human
uuuugcaaauguuggacgguuucguuuggugg

SEQ ID NO: 281738 - RNA, 32 nt, Human
uuuugcaacugcacuccagccugggcuacaga

SEQ ID NO: 281739 - RNA, 32 nt, Human
uuuugcaaggcuuuuuguccagcuggggcugg

SEQ ID NO: 281740 - RNA, 32 nt, Human
uuuugcaaguagcuuuccagaaguaaaagucc

SEQ ID NO: 281741 - RNA, 31 nt, Human
uuuugcaauggccucccuugcugcagcaaau

SEQ ID NO: 281742 - RNA, 32 nt, Human
uuuugcacaagacagguugcugaggggucggc

SEQ ID NO: 281743 - RNA, 32 nt, Human
uuuugcacauuaaaaugcccuagcaguaucua

SEQ ID NO: 281744 - RNA, 23 nt, Human
uuuugcaccaauaaaacugugua

SEQ ID NO: 281745 - RNA, 32 nt, Human
uuuugcacucagcauuaagaggaaauauugaa

SEQ ID NO: 281746 - RNA, 32 nt, Human
uuuugcacuccucugcuuucucccugccuuga

SEQ ID NO: 281747 - RNA, 32 nt, Human
uuuugcacuuaucucgaauuugaagagauugc

SEQ ID NO: 281748 - RNA, 32 nt, Human
uuuugcagaccagccaauuaagaauugggagc

SEQ ID NO: 281749 - RNA, 32 nt, Human
uuuugcagagaaacguguacccauauauaauu

SEQ ID NO: 281750 - RNA, 32 nt, Human
uuuugcagagaugcagguauugucauguugcc

SEQ ID NO: 281751 - RNA, 32 nt, Human
uuuugcagagccgccuccaugugguuucggag

SEQ ID NO: 281752 - RNA, 32 nt, Human
uuuugcagaugaaguauguauguauguuacua

SEQ ID NO: 281753 - RNA, 22 nt, Human
uuuugcagaugagaaaacagac

SEQ ID NO: 281754 - RNA, 32 nt, Human
uuuugcagcccagagcagaacagggaaaaggu

SEQ ID NO: 281755 - RNA, 32 nt, Human
uuuugcagcccaggcuggagugcaguggcacc

SEQ ID NO: 281756 - RNA, 32 nt, Human
uuuugcagccuauaugacuugagauuggagcu

SEQ ID NO: 281757 - RNA, 32 nt, Human
uuuugcagccuauuuuuguauucuuaauuugg

SEQ ID NO: 281758 - RNA, 32 nt, Human
uuuugcagcgcuucaguguacguguuagagaa

SEQ ID NO: 281759 - RNA, 32 nt, Human
uuuugcaggauccggggguggggagggacaag

SEQ ID NO: 281760 - RNA, 32 nt, Human
uuuugcaggaucuggggguggggagggacaag

SEQ ID NO: 281761 - RNA, 32 nt, Human
uuuugcaggcgggccuggggucucaguggagg

SEQ ID NO: 281762 - RNA, 32 nt, Human
uuuugcagggagcauggcugugaggauggggu

SEQ ID NO: 281763 - RNA, 32 nt, Human
uuuugcaggggguggggguuggggaagacagc

SEQ ID NO: 281764 - RNA, 32 nt, Human
uuuugcaggugaggaaacaggggcagaguaau

SEQ ID NO: 281765 - RNA, 32 nt, Human
uuuugcaguguuuugcagugaugggcauucca

SEQ ID NO: 281766 - RNA, 32 nt, Human
uuuugcauaauguguuuccauuuucuguuuaa

SEQ ID NO: 281767 - RNA, 32 nt, Human
uuuugcaucccccgccccugcuauugcugcca

SEQ ID NO: 281768 - RNA, 32 nt, Human
uuuugcaucccucucucuuccuuuuccugccg

SEQ ID NO: 281769 - RNA, 32 nt, Human
uuuugcauccuucuguauccccaaaucugaaa

SEQ ID NO: 281770 - RNA, 32 nt, Human
uuuugcaugaaauuguaucucagucuaagguc

SEQ ID NO: 281771 - RNA, 23 nt, Human
uuuugcauguuuaauaauaugua

SEQ ID NO: 281772 - RNA, 32 nt, Human
uuuugcauuacuguaugucuucugccuccaca

SEQ ID NO: 281773 - RNA, 32 nt, Human
uuuugcauuuuuaguaaugacaggguuucacc

SEQ ID NO: 281774 - RNA, 32 nt, Human
uuuugccaacacagcagcuucccugcuauaua

SEQ ID NO: 281775 - RNA, 32 nt, Human
uuuugccaacugaagccuucuucugccacuuc

SEQ ID NO: 281776 - RNA, 32 nt, Human
uuuugccaagccuccuccaucucccaucagug

SEQ ID NO: 281777 - RNA, 32 nt, Human
uuuugccaccaugggaaaccugggacaucuga

SEQ ID NO: 281778 - RNA, 32 nt, Human
uuuugccaccuagagagagguggacucuaacc

SEQ ID NO: 281779 - RNA, 32 nt, Human
uuuugccaccugcucaccccacugccuguccu

SEQ ID NO: 281780 - RNA, 32 nt, Human
uuuugccaccugcucaccccacugccuguucu

SEQ ID NO: 281781 - RNA, 32 nt, Human
uuuugccacugcacuccugccugggugacaga

SEQ ID NO: 281782 - RNA, 31 nt, Human
uuuugccagagagauauucggaggaggggug

SEQ ID NO: 281783 - RNA, 32 nt, Human
uuuugccagcacuuuuucaguugggagaauca

SEQ ID NO: 281784 - RNA, 32 nt, Human
uuuugccagccugaacuauauuuaagagacuu

SEQ ID NO: 281785 - RNA, 32 nt, Human
uuuugccaggacuccaaagagccuugcuaaag

SEQ ID NO: 281786 - RNA, 32 nt, Human
uuuugccauagauuuccauauaacugaaaaac

SEQ ID NO: 281787 - RNA, 32 nt, Human
uuuugccauuguccccugaauguaguauuauc

SEQ ID NO: 281788 - RNA, 32 nt, Human
uuuugcccacaacagguacauucuuucugugg

SEQ ID NO: 281789 - RNA, 32 nt, Human
uuuugcccaggcuggauggagugcaguggcgu

SEQ ID NO: 281790 - RNA, 32 nt, Human
uuuugcccaguuuccuuaucacuugcuguaga

SEQ ID NO: 281791 - RNA, 20 nt, Human
uuuugcccauucaucccucu

SEQ ID NO: 281792 - RNA, 32 nt, Human
uuuugcccauucaucccucuucuuuucaagga

SEQ ID NO: 281793 - RNA, 32 nt, Human
uuuugccgcugcuuccucuaccccuguauuuc

SEQ ID NO: 281794 - RNA, 32 nt, Human
uuuugccuaucacucuggacuuuuggauuguu

SEQ ID NO: 281795 - RNA, 32 nt, Human
uuuugccucauggugggagugaaagugagaac

SEQ ID NO: 281796 - RNA, 32 nt, Human
uuuugccuccuggaguucagcaggugaggcug

SEQ ID NO: 281797 - RNA, 32 nt, Human
uuuugccucuccaaaaagagcuuccuuucgug

SEQ ID NO: 281798 - RNA, 32 nt, Human
uuuugccucucucacuggucauguauuuauuc

SEQ ID NO: 281799 - RNA, 22 nt, Human
uuuugccucuuugccauuuccu

SEQ ID NO: 281800 - RNA, 32 nt, Human
uuuugccugcuagcaucucccuguaacucucc

SEQ ID NO: 281801 - RNA, 32 nt, Human
uuuugccuguaaucccaacacuuugggaggac

SEQ ID NO: 281802 - RNA, 32 nt, Human
uuuugccugugcauaggagcaauuaggaucua

SEQ ID NO: 281803 - RNA, 32 nt, Human
uuuugccuguugugugggaccugcacugcccu

SEQ ID NO: 281804 - RNA, 32 nt, Human
uuuugccuguuguuggccucuaccucacagug

SEQ ID NO: 281805 - RNA, 32 nt, Human
uuuugccuuaauaccaggugauggguugguag

SEQ ID NO: 281806 - RNA, 32 nt, Human
uuuugccuucuguccuuggaacagucauaucu

SEQ ID NO: 281807 - RNA, 32 nt, Human
uuuugcgccacagcaggcugccucuugguccu

SEQ ID NO: 281808 - RNA, 32 nt, Human
uuuugcggcaggcagagacaauggaagaaaau

SEQ ID NO: 281809 - RNA, 32 nt, Human
uuuugcggccucccccuuuccucucuguuaca

SEQ ID NO: 281810 - RNA, 32 nt, Human
uuuugcggcugcagcgggcuuguagguguccg

SEQ ID NO: 281811 - RNA, 32 nt, Human
uuuugcgguuugggagggaggcugcgaggagg

SEQ ID NO: 281812 - RNA, 32 nt, Human
uuuugcgugaguguguuauauguaugugucaa

SEQ ID NO: 281813 - RNA, 32 nt, Human
uuuugcuaaacaguaggcuacuguaaguguuc

SEQ ID NO: 281814 - RNA, 32 nt, Human
uuuugcuaaauacuuuauacauuuuucauguu

SEQ ID NO: 281815 - RNA, 32 nt, Human
uuuugcuaauguuccagcaacacugcuauuau

SEQ ID NO: 281816 - RNA, 32 nt, Human
uuuugcuaauuuaaaaucaucaggcuggaaga

SEQ ID NO: 281817 - RNA, 32 nt, Human
uuuugcuacaaagaggagguggcaaugguaga

SEQ ID NO: 281818 - RNA, 32 nt, Human
uuuugcuacaguuuagacacugugguuuacaa

SEQ ID NO: 281819 - RNA, 32 nt, Human
uuuugcuacauuuuucuuuuagguaaugauaa

SEQ ID NO: 281820 - RNA, 32 nt, Human
uuuugcuagaaagcucacaacuuuaaaaccua

SEQ ID NO: 281821 - RNA, 31 nt, Human
uuuugcucaauaaaauuguucagaagaucaa

SEQ ID NO: 281822 - RNA, 32 nt, Human
uuuugcucagccagccagaaggagggaggcca

SEQ ID NO: 281823 - RNA, 32 nt, Human
uuuugcucaggucacgccaacagggaaaccuc

SEQ ID NO: 281824 - RNA, 32 nt, Human
uuuugcucaguaggagucuugauagaagauau

SEQ ID NO: 281825 - RNA, 32 nt, Human
uuuugcuccuccugaagugucuuugguccaac

SEQ ID NO: 281826 - RNA, 32 nt, Human
uuuugcuccuguuccuccuuuucucuagcugg

SEQ ID NO: 281827 - RNA, 32 nt, Human
uuuugcucggagacauccugaccugggcaagc

SEQ ID NO: 281828 - RNA, 32 nt, Human
uuuugcucgucacccaggcuggagugcaauug

SEQ ID NO: 281829 - RNA, 32 nt, Human
uuuugcucuauucaaagaaacggaaugggaua

SEQ ID NO: 281830 - RNA, 32 nt, Human
uuuugcucucuacaaauggauagaaaaguuua

SEQ ID NO: 281831 - RNA, 32 nt, Human
uuuugcucugcuuuggaagauuuucucgaauu

SEQ ID NO: 281832 - RNA, 32 nt, Human
uuuugcucuugcacuccauccuggacaacaga

SEQ ID NO: 281833 - RNA, 32 nt, Human
uuuugcucuuuucuccccuugagacccuaaua

SEQ ID NO: 281834 - RNA, 32 nt, Human
uuuugcucuuuucuuaugaauuuccuuucuuc

SEQ ID NO: 281835 - RNA, 32 nt, Human
uuuugcucuuuugaacacccuccccacugauc

SEQ ID NO: 281836 - RNA, 32 nt, Human
uuuugcugcacuccuagaccuggccuacuggu

SEQ ID NO: 281837 - RNA, 32 nt, Human
uuuugcugccagcccccaaaaagcaggcgaua

SEQ ID NO: 281838 - RNA, 32 nt, Human
uuuugcugcgccauggagacaggugugcgcau

SEQ ID NO: 281839 - RNA, 32 nt, Human
uuuugcugcuguggccccaacccuuccucccu

SEQ ID NO: 281840 - RNA, 32 nt, Human
uuuugcugcuucucaauaucauagacacagug

SEQ ID NO: 281841 - RNA, 32 nt, Human
uuuugcuggagccgccaccaugacaaagccau

SEQ ID NO: 281842 - RNA, 32 nt, Human
uuuugcuggagcugugcuaggcugagggaauu

SEQ ID NO: 281843 - RNA, 32 nt, Human
uuuugcugguggcagugacgggaccccgacuc

SEQ ID NO: 281844 - RNA, 32 nt, Human
uuuugcuguagcccuagagcacuuuguuugug

SEQ ID NO: 281845 - RNA, 32 nt, Human
uuuugcuguaugaaguagaugagggaagaauc

SEQ ID NO: 281846 - RNA, 32 nt, Human
uuuugcugucccuccccucagcgccgacacca

SEQ ID NO: 281847 - RNA, 32 nt, Human
uuuugcugucugauuaacuucucugccaaaua

SEQ ID NO: 281848 - RNA, 32 nt, Human
uuuugcuguuuuugauggacauggaggaauuc

SEQ ID NO: 281849 - RNA, 32 nt, Human
uuuugcuucaaaggagcucacaagcuaaguaa

SEQ ID NO: 281850 - RNA, 32 nt, Human
uuuugcuucacugcaauuuguuucugaucucc

SEQ ID NO: 281851 - RNA, 32 nt, Human
uuuugcuucauagcugguuccugcuagaaaug

SEQ ID NO: 281852 - RNA, 32 nt, Human
uuuugcuuccugcacuuugaagcuccuuuacg

SEQ ID NO: 281853 - RNA, 32 nt, Human
uuuugcuugagaggaggagaggggagaguaaa

SEQ ID NO: 281854 - RNA, 32 nt, Human
uuuugcuugccugucucuugcuuccuucuuaa

SEQ ID NO: 281855 - RNA, 32 nt, Human
uuuugcuuggggaugugcuuggagaggcagau

SEQ ID NO: 281856 - RNA, 32 nt, Human
uuuugcuugucacccaggcuggagugcaaugg

SEQ ID NO: 281857 - RNA, 32 nt, Human
uuuugcuuuccccuuccuccucccucucuccc

SEQ ID NO: 281858 - RNA, 32 nt, Human
uuuugcuuucgaucuggacuguucucaggcaa

SEQ ID NO: 281859 - RNA, 32 nt, Human
uuuugcuuugcuuaugaaaagcugugcuugag

SEQ ID NO: 281860 - RNA, 32 nt, Human
uuuugcuuuguacuucauugcugguaauaaaa

SEQ ID NO: 281861 - RNA, 32 nt, Human
uuuugcuuuuaaaacguggacauaacucauuu

SEQ ID NO: 281862 - RNA, 32 nt, Human
uuuugcuuuuucuuccuuugggauguggaagc

SEQ ID NO: 281863 - RNA, 32 nt, Human
uuuugcuuuuugaaaugcucuugguugcaaaa

SEQ ID NO: 281864 - RNA, 32 nt, Human
uuuuggaaaagaaacaaugaagacugaauuaa

SEQ ID NO: 281865 - RNA, 32 nt, Human
uuuuggaaaaggagcugcauggccucagugcc

SEQ ID NO: 281866 - RNA, 32 nt, Human
uuuuggaaacuuuaggucaggggccagcgacc

SEQ ID NO: 281867 - RNA, 32 nt, Human
uuuuggaaagaaugccgagaaacugcaccucu

SEQ ID NO: 281868 - RNA, 32 nt, Human
uuuuggaaauaaucauugcuggagauucuguu

SEQ ID NO: 281869 - RNA, 22 nt, Human
uuuuggaaaugaaacaaauaug

SEQ ID NO: 281870 - RNA, 32 nt, Human
uuuuggaacauacuuacaccuuuucuaagcac

SEQ ID NO: 281871 - RNA, 32 nt, Human
uuuuggaacgucacauaacaauggaacauaau

SEQ ID NO: 281872 - RNA, 32 nt, Human
uuuuggaacuacugguuagaaggugagugucc

SEQ ID NO: 281873 - RNA, 32 nt, Human
uuuuggaacugcuacaaacaaaauuagaagaa

SEQ ID NO: 281874 - RNA, 32 nt, Human
uuuuggaagagaguuuuucaucuuagagauug

SEQ ID NO: 281875 - RNA, 32 nt, Human
uuuuggaaggcugaggcaggaggaucacuuua

SEQ ID NO: 281876 - RNA, 23 nt, Human
uuuuggaauagaggacaaagaua

SEQ ID NO: 281877 - RNA, 32 nt, Human
uuuuggaauccagcagcaucauaagauaacca

SEQ ID NO: 281878 - RNA, 32 nt, Human
uuuuggagaacuugucuacaaccagggauuga

SEQ ID NO: 281879 - RNA, 32 nt, Human
uuuuggagacagagucucacucuguugcccag

SEQ ID NO: 281880 - RNA, 32 nt, Human
uuuuggagacagggucucucucuguggcccag

SEQ ID NO: 281881 - RNA, 32 nt, Human
uuuuggagauagagucucacucuguugcccag

SEQ ID NO: 281882 - RNA, 32 nt, Human
uuuuggagauagagucucgcucugucgcccag

SEQ ID NO: 281883 - RNA, 32 nt, Human
uuuuggagauagagucuugcucugucuccagg

SEQ ID NO: 281884 - RNA, 32 nt, Human
uuuuggagccucccuucugccuuggcuuggac

SEQ ID NO: 281885 - RNA, 32 nt, Human
uuuuggagccuguggcugcaaggaacccaggg

SEQ ID NO: 281886 - RNA, 32 nt, Human
uuuuggagcuccaggaagcgcccucaccccag

SEQ ID NO: 281887 - RNA, 32 nt, Human
uuuuggaggagaugagaucagaacucugggga

SEQ ID NO: 281888 - RNA, 32 nt, Human
uuuuggaggccgagacaggcagauugcuugag

SEQ ID NO: 281889 - RNA, 32 nt, Human
uuuuggaggguggaaguuaggagcagggagag

SEQ ID NO: 281890 - RNA, 32 nt, Human
uuuuggagggugggggacagaagauggggcua

SEQ ID NO: 281891 - RNA, 32 nt, Human
uuuuggagucuuuguugcuauauuuugugggg

SEQ ID NO: 281892 - RNA, 32 nt, Human
uuuuggauaguguuuugcuaacaaaaggagag

SEQ ID NO: 281893 - RNA, 32 nt, Human
uuuuggauauguaucuagaaauaagagugcug

SEQ ID NO: 281894 - RNA, 32 nt, Human
uuuuggaucucagagauucuccucugugggaa

SEQ ID NO: 281895 - RNA, 32 nt, Human
uuuuggaugccuggccuuaggcuguggcccag

SEQ ID NO: 281896 - RNA, 32 nt, Human
uuuuggauuccagauugcuauuguaaaaucuc

SEQ ID NO: 281897 - RNA, 32 nt, Human
uuuuggauucccaagucauuugcacauuaaca

SEQ ID NO: 281898 - RNA, 32 nt, Human
uuuuggauuuucuguuucuuccuuugucauuu

SEQ ID NO: 281899 - RNA, 32 nt, Human
uuuuggcaaccagaacuauaagacagaaaugg

SEQ ID NO: 281900 - RNA, 32 nt, Human
uuuuggcacaugacauagaaauggcuauguaa

SEQ ID NO: 281901 - RNA, 32 nt, Human
uuuuggcagguguggaagugaaacuuacccaa

SEQ ID NO: 281902 - RNA, 32 nt, Human
uuuuggcaguguuccucuuuacaugauauccu

SEQ ID NO: 281903 - RNA, 32 nt, Human
uuuuggcauagccuguguuugcagugagagug

SEQ ID NO: 281904 - RNA, 32 nt, Human
uuuuggcaucaaacuuaccaagaaauaucucu

SEQ ID NO: 281905 - RNA, 32 nt, Human
uuuuggcaucuuaggagggaaaaaggacaguu

SEQ ID NO: 281906 - RNA, 32 nt, Human
uuuuggcaugagaaagcccuaaaaagaucagu

SEQ ID NO: 281907 - RNA, 32 nt, Human
uuuuggcauggcugaccuucuguuggucauau

SEQ ID NO: 281908 - RNA, 32 nt, Human
uuuuggcauuauugcaagagcuugacuccugg

SEQ ID NO: 281909 - RNA, 32 nt, Human
uuuuggcauucauagauaaacagcucaggcau

SEQ ID NO: 281910 - RNA, 32 nt, Human
uuuuggcauucuugcugacucugacagaguga

SEQ ID NO: 281911 - RNA, 32 nt, Human
uuuuggccaauugaaaucagacauaugcgauc

SEQ ID NO: 281912 - RNA, 31 nt, Human
uuuuggccaauuucucccauuuguaacaagc

SEQ ID NO: 281913 - RNA, 21 nt, Human
uuuuggccacaaacaaacaua

SEQ ID NO: 281914 - RNA, 32 nt, Human
uuuuggccacugccuggacuagugaaagaaug

SEQ ID NO: 281915 - RNA, 32 nt, Human
uuuuggccaguguuuccaggaggcucugggcu

SEQ ID NO: 281916 - RNA, 32 nt, Human
uuuuggccauuuucucuuuacacuucguaugu

SEQ ID NO: 281917 - RNA, 21 nt, Human
uuuuggcccaagguccauuca

SEQ ID NO: 281918 - RNA, 32 nt, Human
uuuuggcccugagaucacgucuccuacugugu

SEQ ID NO: 281919 - RNA, 32 nt, Human
uuuuggcccugauuuuguauguggaccacugc

SEQ ID NO: 281920 - RNA, 32 nt, Human
uuuuggccuaaagcugccccagagugagggug

SEQ ID NO: 281921 - RNA, 26 nt, Human
uuuuggccucauaagaugguccacuc

SEQ ID NO: 281922 - RNA, 32 nt, Human
uuuuggccucauuccuuuaccacucccacacc

SEQ ID NO: 281923 - RNA, 32 nt, Human
uuuuggccuguuugcagccucuccuagccaca

SEQ ID NO: 281924 - RNA, 32 nt, Human
uuuuggccuuaacuauaacaaucuaauuauaa

SEQ ID NO: 281925 - RNA, 32 nt, Human
uuuuggccuuaacuaugccaaucuaauuauaa

SEQ ID NO: 281926 - RNA, 32 nt, Human
uuuuggccuuucucggcccuggacugaggcuc

SEQ ID NO: 281927 - RNA, 32 nt, Human
uuuuggcgacugaggguuuuucugccacagga

SEQ ID NO: 281928 - RNA, 32 nt, Human
uuuuggcgcaucuuuucccucuugucccgaag

SEQ ID NO: 281929 - RNA, 32 nt, Human
uuuuggcgcugcuucucauucauuuuaaggcu

SEQ ID NO: 281930 - RNA, 32 nt, Human
uuuuggcggggguaggugaggguuuggagcau

SEQ ID NO: 281931 - RNA, 32 nt, Human
uuuuggcuagcacauuucugcucugaauaaaa

SEQ ID NO: 281932 - RNA, 32 nt, Human
uuuuggcucaaugcaaccuccaccucccaggu

SEQ ID NO: 281933 - RNA, 32 nt, Human
uuuuggcucacugcaaccuccaccucccaggu

SEQ ID NO: 281934 - RNA, 32 nt, Human
uuuuggcucacugcaaccuccgccuccggggu

SEQ ID NO: 281935 - RNA, 32 nt, Human
uuuuggcucacugcaaccuccgccuucugggu

SEQ ID NO: 281936 - RNA, 32 nt, Human
uuuuggcucacugcaagcucugccucccgggu

SEQ ID NO: 281937 - RNA, 32 nt, Human
uuuuggcucacugcagccuccgccuucugggu

SEQ ID NO: 281938 - RNA, 32 nt, Human
uuuuggcucacugcagccucugccucccaggc

SEQ ID NO: 281939 - RNA, 32 nt, Human
uuuuggcucacuguauccuucgccucccuggc

SEQ ID NO: 281940 - RNA, 32 nt, Human
uuuuggcuccacccucuuuagcuguuaauuug

SEQ ID NO: 281941 - RNA, 32 nt, Human
uuuuggcucccugcaaccuccgccuccuggau

SEQ ID NO: 281942 - RNA, 32 nt, Human
uuuuggcuccuggggcaagcuuggggaaugaa

SEQ ID NO: 281943 - RNA, 32 nt, Human
uuuuggcucucucaccagcaccauggcuguug

SEQ ID NO: 281944 - RNA, 25 nt, Human
uuuuggcucugaagaagcaaacaug

SEQ ID NO: 281945 - RNA, 32 nt, Human
uuuuggcugaauuccccaccugccuuuggaug

SEQ ID NO: 281946 - RNA, 32 nt, Human
uuuuggcugccauuuuuagcuaccucaaagga

SEQ ID NO: 281947 - RNA, 32 nt, Human
uuuuggcugccucugucggucuguucaguuac

SEQ ID NO: 281948 - RNA, 32 nt, Human
uuuuggcugcugaggcucugggauuugguuua

SEQ ID NO: 281949 - RNA, 32 nt, Human
uuuuggcuguucugauuuguauccuuuugcua

SEQ ID NO: 281950 - RNA, 32 nt, Human
uuuuggcuuucucccugucccuuccuuucucc

SEQ ID NO: 281951 - RNA, 21 nt, Human
uuuugggaaagaugcaacaug

SEQ ID NO: 281952 - RNA, 24 nt, Human
uuuugggaaaguuacacaaaugua

SEQ ID NO: 281953 - RNA, 32 nt, Human
uuuugggaagauuuuuguucaaagcaauaguc

SEQ ID NO: 281954 - RNA, 32 nt, Human
uuuugggaagcgcuucacuccagguugguagc

SEQ ID NO: 281955 - RNA, 24 nt, Human
uuuugggaauagagaaucaacaua

SEQ ID NO: 281956 - RNA, 32 nt, Human
uuuugggacaagcuuuacauggguggggaggg

SEQ ID NO: 281957 - RNA, 32 nt, Human
uuuugggacuccgaggugggcagaucacuuga

SEQ ID NO: 281958 - RNA, 32 nt, Human
uuuugggacugaggcugcagcauuggaacaaa

SEQ ID NO: 281959 - RNA, 32 nt, Human
uuuugggagagggacugaguacagugcaacac

SEQ ID NO: 281960 - RNA, 32 nt, Human
uuuugggagcaucuugucucuaaccuuuaaaa

SEQ ID NO: 281961 - RNA, 32 nt, Human
uuuugggagccagcgguauggcgucgggcugc

SEQ ID NO: 281962 - RNA, 32 nt, Human
uuuugggagcuauagguugcuaaggaggggag

SEQ ID NO: 281963 - RNA, 32 nt, Human
uuuugggaggcagagaugggaggauacuugaa

SEQ ID NO: 281964 - RNA, 32 nt, Human
uuuugggaggcagaggcaggaggauugcuuaa

SEQ ID NO: 281965 - RNA, 32 nt, Human
uuuugggaggccaagacaggaggaucacuuca

SEQ ID NO: 281966 - RNA, 32 nt, Human
uuuugggaggccaagaugggcagaucaggagg

SEQ ID NO: 281967 - RNA, 32 nt, Human
uuuugggaggccaaggagggcagaucaccuaa

SEQ ID NO: 281968 - RNA, 32 nt, Human
uuuugggaggccaaggugggcagaucaccuga

SEQ ID NO: 281969 - RNA, 32 nt, Human
uuuugggaggcccagaugggagcccaggaguu

SEQ ID NO: 281970 - RNA, 32 nt, Human
uuuugggaggccgaggagagaggaucacuuaa

SEQ ID NO: 281971 - RNA, 32 nt, Human
uuuugggaggccgggguuggaggaucauuuga

SEQ ID NO: 281972 - RNA, 32 nt, Human
uuuugggaggcugaagcaggcgggucaccuga

SEQ ID NO: 281973 - RNA, 32 nt, Human
uuuugggaggcugaagugagagguuaauuuga

SEQ ID NO: 281974 - RNA, 32 nt, Human
uuuugggaggcugaggcaggaggaucacuuga

SEQ ID NO: 281975 - RNA, 32 nt, Human
uuuugggaggcugaggcaggcggaucaccuga

SEQ ID NO: 281976 - RNA, 32 nt, Human
uuuugggaggcugaggcaggcggaucgcuuga

SEQ ID NO: 281977 - RNA, 32 nt, Human
uuuugggaggcugaggcagguggaucaccuga

SEQ ID NO: 281978 - RNA, 32 nt, Human
uuuugggaggcugaggcagguggaucacuuga

SEQ ID NO: 281979 - RNA, 32 nt, Human
uuuugggaggcugaggcggaggaccgccugag

SEQ ID NO: 281980 - RNA, 32 nt, Human
uuuugggaggcugaggcggguggaucacuuga

SEQ ID NO: 281981 - RNA, 32 nt, Human
uuuugggaggcugaggugggcagaucacuuga

SEQ ID NO: 281982 - RNA, 32 nt, Human
uuuugggaggcugagguggguggaucacaagg

SEQ ID NO: 281983 - RNA, 32 nt, Human
uuuugggaggcugagguugggaguucaagacc

SEQ ID NO: 281984 - RNA, 32 nt, Human
uuuugggaggcugggugggcggaucacgaggu

SEQ ID NO: 281985 - RNA, 32 nt, Human
uuuugggagguccaggcaggaggaucacuugg

SEQ ID NO: 281986 - RNA, 32 nt, Human
uuuugggaguaaggacaaaccuggaauagaua

SEQ ID NO: 281987 - RNA, 32 nt, Human
uuuugggaugggggucucaccauguugcccag

SEQ ID NO: 281988 - RNA, 21 nt, Human
uuuugggauuugaacaacaug

SEQ ID NO: 281989 - RNA, 32 nt, Human
uuuugggcaaugcuuugugagcaaaacaaagu

SEQ ID NO: 281990 - RNA, 27 nt, Human
uuuugggcaucugaauggaagcuuuac

SEQ ID NO: 281991 - RNA, 32 nt, Human
uuuugggccacgugcagaaccuagccaagcag

SEQ ID NO: 281992 - RNA, 32 nt, Human
uuuugggccacugcaaagauuccagccugggu

SEQ ID NO: 281993 - RNA, 21 nt, Human
uuuugggcccugaggaucuau

SEQ ID NO: 281994 - RNA, 32 nt, Human
uuuugggcccuggaaucagaucauauucuaca

SEQ ID NO: 281995 - RNA, 32 nt, Human
uuuugggcucaaaugauccucccaccuuggcc

SEQ ID NO: 281996 - RNA, 32 nt, Human
uuuugggcucaagugauccucccaccucagcc

SEQ ID NO: 281997 - RNA, 32 nt, Human
uuuuggggaagcuggcucccuauucaugguau

SEQ ID NO: 281998 - RNA, 32 nt, Human
uuuuggggaaggcagguccugaggcaggcacu

SEQ ID NO: 281999 - RNA, 32 nt, Human
uuuuggggacaguagaugaugucuggaaagca

SEQ ID NO: 282000 - RNA, 32 nt, Human
uuuuggggaggaacacaacucccaucccaguc

SEQ ID NO: 282001 - RNA, 32 nt, Human
uuuugggggaacaggcuuuuggcccucuaaua

SEQ ID NO: 282002 - RNA, 32 nt, Human
uuuugggggaauggggcaaaggggugggcgau

SEQ ID NO: 282003 - RNA, 32 nt, Human
uuuugggggagagagcagggaguggcucaggg

SEQ ID NO: 282004 - RNA, 32 nt, Human
uuuugggggcagggagguugggugggcugaug

SEQ ID NO: 282005 - RNA, 23 nt, Human
uuuuggggggcugcuuccugucu

SEQ ID NO: 282006 - RNA, 32 nt, Human
uuuugggggugagggagcuuggguagaugagg

SEQ ID NO: 282007 - RNA, 21 nt, Human
uuuuggggugagagaccagca

SEQ ID NO: 282008 - RNA, 25 nt, Human
uuuugggguggagaagguggaugug

SEQ ID NO: 282009 - RNA, 21 nt, Human
uuuugggguuauguuuugcuu

SEQ ID NO: 282010 - RNA, 26 nt, Human
uuuugggguuguuuugcuuucuguuu

SEQ ID NO: 282011 - RNA, 22 nt, Human
uuuugggguuuggaaaaacaug

SEQ ID NO: 282012 - RNA, 32 nt, Human
uuuuggguauccacccaccuugguguaccaga

SEQ ID NO: 282013 - RNA, 21 nt, Human
uuuuggguauugugaccuggg

SEQ ID NO: 282014 - RNA, 32 nt, Human
uuuugggugaaauggauuuaugugagugcuuu

SEQ ID NO: 282015 - RNA, 32 nt, Human
uuuugggugagaagaaaaauguagcuaaggua

SEQ ID NO: 282016 - RNA, 32 nt, Human
uuuugggugcccaccccaauuuuuaccuuuua

SEQ ID NO: 282017 - RNA, 21 nt, Human
uuuuggguggcaauaaauaua

SEQ ID NO: 282018 - RNA, 32 nt, Human
uuuugggugggcaauuuccuucaacgaagccg

SEQ ID NO: 282019 - RNA, 31 nt, Human
uuuugggugucccuugucccugugucacugu

SEQ ID NO: 282020 - RNA, 27 nt, Human
uuuuggguuaauaaagcaaaauuuugc

SEQ ID NO: 282021 - RNA, 32 nt, Human
uuuuggguuggggguauuggggaaggcaggaa

SEQ ID NO: 282022 - RNA, 32 nt, Human
uuuuggguuuggauggcaagaucauggauaag

SEQ ID NO: 282023 - RNA, 32 nt, Human
uuuuggguuuuauuuuauuuuaauaguaguaa

SEQ ID NO: 282024 - RNA, 25 nt, Human
uuuuggguuuucucuucuccugcuu

SEQ ID NO: 282025 - RNA, 32 nt, Human
uuuuggguuuuguuuaggagggugggugggga

SEQ ID NO: 282026 - RNA, 32 nt, Human
uuuugguaaagaugacuucccuggugggguag

SEQ ID NO: 282027 - RNA, 32 nt, Human
uuuugguaccccuuuugggaaucuaauguauu

SEQ ID NO: 282028 - RNA, 32 nt, Human
uuuugguagcaaggguccagagaugagguguu

SEQ ID NO: 282029 - RNA, 32 nt, Human
uuuugguaggccgaggagggcagaucacuugg

SEQ ID NO: 282030 - RNA, 32 nt, Human
uuuugguaggcucauugagagauacagaagaa

SEQ ID NO: 282031 - RNA, 25 nt, Human
uuuugguagugaugaaauaaacaua

SEQ ID NO: 282032 - RNA, 32 nt, Human
uuuugguauaaacuuaacauuagccagggagg

SEQ ID NO: 282033 - RNA, 32 nt, Human
uuuugguauauuaacaauuacauguauuuugu

SEQ ID NO: 282034 - RNA, 32 nt, Human
uuuugguauuuuuaguagagacaggguuucac

SEQ ID NO: 282035 - RNA, 32 nt, Human
uuuuggucauaucauuucaaaacauuugcauc

SEQ ID NO: 282036 - RNA, 32 nt, Human
uuuuggucaucuuuauuuaguuugcaugaagu

SEQ ID NO: 282037 - RNA, 32 nt, Human
uuuuggucaugggcuggucuggucgguuuccc

SEQ ID NO: 282038 - RNA, 32 nt, Human
uuuugguccugauccaguggccacaccugucu

SEQ ID NO: 282039 - RNA, 32 nt, Human
uuuugguccuugcaacaguuugcugagaauga

SEQ ID NO: 282040 - RNA, 32 nt, Human
uuuuggucuaaauuaugagguaccaagauugu

SEQ ID NO: 282041 - RNA, 32 nt, Human
uuuuggucucaagugauucucuucauguuguc

SEQ ID NO: 282042 - RNA, 32 nt, Human
uuuuggucuccucuuccagagucaccuuuccc

SEQ ID NO: 282043 - RNA, 32 nt, Human
uuuuggucugacccacugcuuuuggucugugu

SEQ ID NO: 282044 - RNA, 32 nt, Human
uuuuggugaggaacucuuacucuuugcuaauc

SEQ ID NO: 282045 - RNA, 32 nt, Human
uuuuggugcacuuuuguuucaccaucugaaaa

SEQ ID NO: 282046 - RNA, 32 nt, Human
uuuuggugccagugaagaguugggcuugcugc

SEQ ID NO: 282047 - RNA, 32 nt, Human
uuuuggugcgggagcguuuugguuggggacag

SEQ ID NO: 282048 - RNA, 32 nt, Human
uuuugguggagcugacgauuuugagggcugag

SEQ ID NO: 282049 - RNA, 32 nt, Human
uuuuggugggcagggacugccuccucccggaa

SEQ ID NO: 282050 - RNA, 25 nt, Human
uuuuggugguuuuuguuuuuuguuu

SEQ ID NO: 282051 - RNA, 32 nt, Human
uuuugguguauguauguuuauguaugugugug

SEQ ID NO: 282052 - RNA, 32 nt, Human
uuuuggugugcugcuuuuccaggcucucuucu

SEQ ID NO: 282053 - RNA, 32 nt, Human
uuuugguguggagaaagaggccaguuuaaaua

SEQ ID NO: 282054 - RNA, 32 nt, Human
uuuugguguuaccugagugugacacaggcccu

SEQ ID NO: 282055 - RNA, 32 nt, Human
uuuugguuagcuuugccaguucugccuauuau

SEQ ID NO: 282056 - RNA, 32 nt, Human
uuuugguuaucgaggcagagacuguaggaaua

SEQ ID NO: 282057 - RNA, 32 nt, Human
uuuugguucagacaccuguucacagaaaaagc

SEQ ID NO: 282058 - RNA, 32 nt, Human
uuuugguuccacaccugucuucucaggcuuga

SEQ ID NO: 282059 - RNA, 21 nt, Human
uuuugguuccauaugaacuuu

SEQ ID NO: 282060 - RNA, 32 nt, Human
uuuugguuccuccacuggaauguaggcuccuc

SEQ ID NO: 282061 - RNA, 32 nt, Human
uuuugguuccuugaguucuccugucuccagau

SEQ ID NO: 282062 - RNA, 32 nt, Human
uuuugguucucuuuagcuucugguucuugaaa

SEQ ID NO: 282063 - RNA, 32 nt, Human
uuuugguuuccaugugauuuguuuucuucaau

SEQ ID NO: 282064 - RNA, 32 nt, Human
uuuugguuuccuucuaacuugcccacggcagc

SEQ ID NO: 282065 - RNA, 32 nt, Human
uuuugguuuggaaacauauuaccacgucuuaa

SEQ ID NO: 282066 - RNA, 32 nt, Human
uuuugguuuuggugguggcuuuugggcaagga

SEQ ID NO: 282067 - RNA, 24 nt, Human
uuuuguaaaacuuauucugcccca

SEQ ID NO: 282068 - RNA, 32 nt, Human
uuuuguaaagaugguuuuacacacuacagaug

SEQ ID NO: 282069 - RNA, 32 nt, Human
uuuuguaaauauguuacaacaaaaugugauug

SEQ ID NO: 282070 - RNA, 32 nt, Human
uuuuguaaaugauaaaaaugugucuaauucac

SEQ ID NO: 282071 - RNA, 32 nt, Human
uuuuguaaaugauucugugcccaggagcagcu

SEQ ID NO: 282072 - RNA, 32 nt, Human
uuuuguaacuccugauucuuccuuuucggaua

SEQ ID NO: 282073 - RNA, 32 nt, Human
uuuuguaacuuaguaaagguauuaacuuccuu

SEQ ID NO: 282074 - RNA, 32 nt, Human
uuuuguaaggcccagggguugcacugagucug

SEQ ID NO: 282075 - RNA, 32 nt, Human
uuuuguaauauuguccugggccuguguugggg

SEQ ID NO: 282076 - RNA, 32 nt, Human
uuuuguaaucagcuacuguauguuuuauuuua

SEQ ID NO: 282077 - RNA, 32 nt, Human
uuuuguaaugaccaugagcaauguuuuuacuu

SEQ ID NO: 282078 - RNA, 32 nt, Human
uuuuguacagcaguugggccaaccuuugcugg

SEQ ID NO: 282079 - RNA, 32 nt, Human
uuuuguacauacuguaagguugguuuguaaau

SEQ ID NO: 282080 - RNA, 32 nt, Human
uuuuguacauuguuuucccuuucuacauuuug

SEQ ID NO: 282081 - RNA, 32 nt, Human
uuuuguaccaguggcugggaugguggaauugg

SEQ ID NO: 282082 - RNA, 32 nt, Human
uuuuguaccauuuauuuuaugacauuuuacaa

SEQ ID NO: 282083 - RNA, 32 nt, Human
uuuuguaccuuaaauuguucgauuacgucauc

SEQ ID NO: 282084 - RNA, 32 nt, Human
uuuuguaccuuguuauuuccauguaccaaaau

SEQ ID NO: 282085 - RNA, 32 nt, Human
uuuuguacuggugacccaccucuuaggacuuu

SEQ ID NO: 282086 - RNA, 31 nt, Human
uuuuguacuuagcuguuacaugcagagcaau

SEQ ID NO: 282087 - RNA, 32 nt, Human
uuuuguagaaacgguuuugccauguugcccag

SEQ ID NO: 282088 - RNA, 32 nt, Human
uuuuguagaccugccuuaugcaccuuacugcc

SEQ ID NO: 282089 - RNA, 32 nt, Human
uuuuguagacuuugggcccacguguuuuaugg

SEQ ID NO: 282090 - RNA, 32 nt, Human
uuuuguagagagaaucucucucuguugcacag

SEQ ID NO: 282091 - RNA, 32 nt, Human
uuuuguagccagguccuuggugcaguauuuau

SEQ ID NO: 282092 - RNA, 32 nt, Human
uuuuguagccuuccuccacauccuuucuaaac

SEQ ID NO: 282093 - RNA, 32 nt, Human
uuuuguagcuguuucauaaaacuguugacuaa

SEQ ID NO: 282094 - RNA, 31 nt, Human
uuuuguaggaaacuuucaauuguuuuacuuu

SEQ ID NO: 282095 - RNA, 32 nt, Human
uuuuguaggcggggcucgguggcucaccccug

SEQ ID NO: 282096 - RNA, 32 nt, Human
uuuuguaggguuuguauaauuucuagaguucg

SEQ ID NO: 282097 - RNA, 32 nt, Human
uuuuguaguuugaauaugaaauuuggaccaaa

SEQ ID NO: 282098 - RNA, 32 nt, Human
uuuuguaguuuuaguagacacaggguuucacc

SEQ ID NO: 282099 - RNA, 32 nt, Human
uuuuguaguuuuauuagagacaggguuucuuc

SEQ ID NO: 282100 - RNA, 22 nt, Human
uuuuguauaggagccccaggca

SEQ ID NO: 282101 - RNA, 32 nt, Human
uuuuguauaguuacaguauacgaguugaguau

SEQ ID NO: 282102 - RNA, 31 nt, Human
uuuuguauauuuuuauugcauuuaaaauugc

SEQ ID NO: 282103 - RNA, 32 nt, Human
uuuuguauccagggaaaagcacccagagguca

SEQ ID NO: 282104 - RNA, 32 nt, Human
uuuuguauccuccauuguaucuucauacaaag

SEQ ID NO: 282105 - RNA, 32 nt, Human
uuuuguaucuguggauuuggauaagggagggg

SEQ ID NO: 282106 - RNA, 32 nt, Human
uuuuguaugugaacaaaucaaauugcuuaaaa

SEQ ID NO: 282107 - RNA, 32 nt, Human
uuuuguauucuuaguagagacaggguuucgcc

SEQ ID NO: 282108 - RNA, 32 nt, Human
uuuuguauuucucuggagugcaauggugcaau

SEQ ID NO: 282109 - RNA, 32 nt, Human
uuuuguauuugugcuuuccauccaucuucugu

SEQ ID NO: 282110 - RNA, 32 nt, Human
uuuuguauuuuagcagagacgggguuucacca

SEQ ID NO: 282111 - RNA, 32 nt, Human
uuuuguauuuucaguagagacaggguuucacc

SEQ ID NO: 282112 - RNA, 32 nt, Human
uuuuguauuuucaguagagacaggguuucgcc

SEQ ID NO: 282113 - RNA, 32 nt, Human
uuuuguauuuucuguacacacaggguuucauc

SEQ ID NO: 282114 - RNA, 32 nt, Human
uuuuguauuuuuaauagagaugggguuucacc

SEQ ID NO: 282115 - RNA, 32 nt, Human
uuuuguauuuuuaauagagaugggguuuugcc

SEQ ID NO: 282116 - RNA, 32 nt, Human
uuuuguauuuuuaguagagauagggauucacc

SEQ ID NO: 282117 - RNA, 32 nt, Human
uuuuguauuuuuaguagagauagggucucacc

SEQ ID NO: 282118 - RNA, 32 nt, Human
uuuuguauuuuuaguagagauaggguuucacc

SEQ ID NO: 282119 - RNA, 32 nt, Human
uuuuguauuuuuaguggagauaggguuucaca

SEQ ID NO: 282120 - RNA, 32 nt, Human
uuuuguauuuuuauuagagacaggguuucucc

SEQ ID NO: 282121 - RNA, 32 nt, Human
uuuuguauuuuuauuggagacaggguuucacc

SEQ ID NO: 282122 - RNA, 32 nt, Human
uuuuguauuuuucauagagacaggguuucacc

SEQ ID NO: 282123 - RNA, 32 nt, Human
uuuuguauuuuugguagagauaggguuucaca

SEQ ID NO: 282124 - RNA, 32 nt, Human
uuuugucaaaguguauccagaaugucagaauu

SEQ ID NO: 282125 - RNA, 32 nt, Human
uuuugucaacacugcauugucuuuugagcucu

SEQ ID NO: 282126 - RNA, 32 nt, Human
uuuugucaaucagcuggauaugcuguuuaguu

SEQ ID NO: 282127 - RNA, 32 nt, Human
uuuugucacaguuagagaaugagguugacuaa

SEQ ID NO: 282128 - RNA, 32 nt, Human
uuuugucacaguuggucccccuugccuucaca

SEQ ID NO: 282129 - RNA, 32 nt, Human
uuuugucacccaggcuggagugcaguggggca

SEQ ID NO: 282130 - RNA, 32 nt, Human
uuuugucacccaggcuggagugcaguggugug

SEQ ID NO: 282131 - RNA, 32 nt, Human
uuuugucacccaggcuggagugccauggcacg

SEQ ID NO: 282132 - RNA, 32 nt, Human
uuuugucaccgaggcuggagugcaauggcccg

SEQ ID NO: 282133 - RNA, 32 nt, Human
uuuugucaccuugcugagcuugcuuaucaguc

SEQ ID NO: 282134 - RNA, 32 nt, Human
uuuugucaggaauuauuguuauuuaauaaaua

SEQ ID NO: 282135 - RNA, 32 nt, Human
uuuugucauauccccucuccuuauuuuucuaa

SEQ ID NO: 282136 - RNA, 32 nt, Human
uuuuguccagaaggacaagccggacaaaugag

SEQ ID NO: 282137 - RNA, 23 nt, Human
uuuuguccauucccuaguaggcc

SEQ ID NO: 282138 - RNA, 32 nt, Human
uuuuguccauuuguguuucagaaucagcacag

SEQ ID NO: 282139 - RNA, 21 nt, Human
uuuuguccccagcaguggccu

SEQ ID NO: 282140 - RNA, 32 nt, Human
uuuugucccccaagcuggaguacaaugacagg

SEQ ID NO: 282141 - RNA, 32 nt, Human
uuuugucccugcacccuucacuggcauccuca

SEQ ID NO: 282142 - RNA, 21 nt, Human
uuuugucccuguagguggccc

SEQ ID NO: 282143 - RNA, 32 nt, Human
uuuugucccuuuccuucuaucacccuacauuc

SEQ ID NO: 282144 - RNA, 32 nt, Human
uuuuguccuagagugagaguuuggaagguguc

SEQ ID NO: 282145 - RNA, 32 nt, Human
uuuuguccuauuaccuccucugagcgcaaauc

SEQ ID NO: 282146 - RNA, 32 nt, Human
uuuuguccuccuaaacaguauaccaaaguuug

SEQ ID NO: 282147 - RNA, 32 nt, Human
uuuuguccugaugucuaaauugcagugauaag

SEQ ID NO: 282148 - RNA, 32 nt, Human
uuuugucgcccaggcuggagugcaguggcaug

SEQ ID NO: 282149 - RNA, 32 nt, Human
uuuugucgccugcacccacucccuucauacaa

SEQ ID NO: 282150 - RNA, 32 nt, Human
uuuugucgugugggaccuguucuggcugcucc

SEQ ID NO: 282151 - RNA, 32 nt, Human
uuuugucuaggucauaacauaccauuuguaag

SEQ ID NO: 282152 - RNA, 32 nt, Human
uuuugucuagucucccugucucuccugauuuc

SEQ ID NO: 282153 - RNA, 32 nt, Human
uuuugucucccuucccucccucccucccuccc

SEQ ID NO: 282154 - RNA, 32 nt, Human
uuuugucucuaucaucucaggcgucaaccaca

SEQ ID NO: 282155 - RNA, 32 nt, Human
uuuugucucugccuuuccauuuguuagauggg

SEQ ID NO: 282156 - RNA, 32 nt, Human
uuuugucugcacuugaguucacuugaguuuac

SEQ ID NO: 282157 - RNA, 32 nt, Human
uuuugucugcagcuguuuguugccccauuccu

SEQ ID NO: 282158 - RNA, 32 nt, Human
uuuugucugggaagcagggauugcugacaugu

SEQ ID NO: 282159 - RNA, 32 nt, Human
uuuugucuuccauccaacuccccaccaccccc

SEQ ID NO: 282160 - RNA, 32 nt, Human
uuuugucuucucauccaaacagucugccagug

SEQ ID NO: 282161 - RNA, 32 nt, Human
uuuugucuucugugaagacaggaccuaugcaa

SEQ ID NO: 282162 - RNA, 32 nt, Human
uuuugucuucuuucugauuuuucccuaggggu

SEQ ID NO: 282163 - RNA, 32 nt, Human
uuuugucuuuauggcgcuucccccucugaaau

SEQ ID NO: 282164 - RNA, 32 nt, Human
uuuugucuuuuuccuuuauucuuuuuguaaau

SEQ ID NO: 282165 - RNA, 32 nt, Human
uuuugugaacaucacugaagcucugaagcuuu

SEQ ID NO: 282166 - RNA, 32 nt, Human
uuuugugaacgcuucugccacaucuugucuuc

SEQ ID NO: 282167 - RNA, 32 nt, Human
uuuugugaagagacgaagacugagcgguugug

SEQ ID NO: 282168 - RNA, 32 nt, Human
uuuugugacaaaggcaagacccccaggucuac

SEQ ID NO: 282169 - RNA, 32 nt, Human
uuuugugagauggucagcuuuggugcucucca

SEQ ID NO: 282170 - RNA, 32 nt, Human
uuuugugaggccaaggcuuggaugcgugugua

SEQ ID NO: 282171 - RNA, 32 nt, Human
uuuugugagugcaagcuggcuuggggagcccu

SEQ ID NO: 282172 - RNA, 32 nt, Human
uuuugugauuauucuguaucagaaaugaaaca

SEQ ID NO: 282173 - RNA, 32 nt, Human
uuuugugauuuucauuuuuggcccaauuauua

SEQ ID NO: 282174 - RNA, 32 nt, Human
uuuugugccacaucuuccaacugagucucccc

SEQ ID NO: 282175 - RNA, 32 nt, Human
uuuugugcccacugugugggccuguguugugu

SEQ ID NO: 282176 - RNA, 32 nt, Human
uuuugugccuuuccuuucucagauccucuuau

SEQ ID NO: 282177 - RNA, 32 nt, Human
uuuugugcucgacuuuuccacccuuuuucccu

SEQ ID NO: 282178 - RNA, 32 nt, Human
uuuugugcugcggcuggggucuuucuggccgu

SEQ ID NO: 282179 - RNA, 32 nt, Human
uuuugugcuuugcagcauuccucaaauuguuu

SEQ ID NO: 282180 - RNA, 32 nt, Human
uuuuguggaaacgacagcaaugcuggaucuuc

SEQ ID NO: 282181 - RNA, 32 nt, Human
uuuuguggaaagacuggcaauuagagguagaa

SEQ ID NO: 282182 - RNA, 32 nt, Human
uuuuguggaaagcuuuagaaaugauauaauua

SEQ ID NO: 282183 - RNA, 25 nt, Human
uuuuguggaugaggaaacaagaaua

SEQ ID NO: 282184 - RNA, 32 nt, Human
uuuuguggcuauuucuggaggcccaggagugu

SEQ ID NO: 282185 - RNA, 32 nt, Human
uuuugugggaggcagcauggcaccguggaaag

SEQ ID NO: 282186 - RNA, 32 nt, Human
uuuugugggccuccagcuucucucagagucuc

SEQ ID NO: 282187 - RNA, 32 nt, Human
uuuuguggggcggggauaggggagggcauuga

SEQ ID NO: 282188 - RNA, 32 nt, Human
uuuugugguaucucccccuaccacaaaccagg

SEQ ID NO: 282189 - RNA, 32 nt, Human
uuuugugguguuuuguuuaauagagaauuuuu

SEQ ID NO: 282190 - RNA, 24 nt, Human
uuuugugguuuccugcacaucuuu

SEQ ID NO: 282191 - RNA, 22 nt, Human
uuuugugguuucucugaugguu

SEQ ID NO: 282192 - RNA, 25 nt, Human
uuuugugguuucugcuuucuugccu

SEQ ID NO: 282193 - RNA, 32 nt, Human
uuuuguguaaaugcugaccuccuugccuacau

SEQ ID NO: 282194 - RNA, 32 nt, Human
uuuuguguagaucuguuuuggaagauggcaug

SEQ ID NO: 282195 - RNA, 32 nt, Human
uuuuguguaggugucugccuucacaaauguca

SEQ ID NO: 282196 - RNA, 32 nt, Human
uuuugugucacugucugucugaaucugccucc

SEQ ID NO: 282197 - RNA, 32 nt, Human
uuuugugucuccagauccuaugauuucaugga

SEQ ID NO: 282198 - RNA, 32 nt, Human
uuuugugucugauaaucuuccuuuccucaaug

SEQ ID NO: 282199 - RNA, 32 nt, Human
uuuugugucuggcuucuucugagacaguagga

SEQ ID NO: 282200 - RNA, 32 nt, Human
uuuugugucugugaggggccagauaguaauua

SEQ ID NO: 282201 - RNA, 32 nt, Human
uuuugugucuucauuuuuccuccugucugcau

SEQ ID NO: 282202 - RNA, 32 nt, Human
uuuugugugacagaagucagcaaccaaauuuc

SEQ ID NO: 282203 - RNA, 32 nt, Human
uuuugugugggauuuguuuugcaguaucuccc

SEQ ID NO: 282204 - RNA, 32 nt, Human
uuuuguguguccugugucucagaagagaacug

SEQ ID NO: 282205 - RNA, 32 nt, Human
uuuugugugucugggcagucucucagccuccg

SEQ ID NO: 282206 - RNA, 32 nt, Human
uuuugugugucugguuucucccuuccuuuccu

SEQ ID NO: 282207 - RNA, 32 nt, Human
uuuuguguguguggagacaggguuuugccaug

SEQ ID NO: 282208 - RNA, 32 nt, Human
uuuuguguguuauauuggccucauguugagca

SEQ ID NO: 282209 - RNA, 31 nt, Human
uuuuguguuauuuucugacugcuggauucug

SEQ ID NO: 282210 - RNA, 32 nt, Human
uuuuguguuccaaggcaacuguaucauaggug

SEQ ID NO: 282211 - RNA, 32 nt, Human
uuuuguguuccuuaacuauuuugucugccaug

SEQ ID NO: 282212 - RNA, 32 nt, Human
uuuuguguucucccucuccacccccacuuucu

SEQ ID NO: 282213 - RNA, 31 nt, Human
uuuuguguuggguccucagccaacacucaag

SEQ ID NO: 282214 - RNA, 32 nt, Human
uuuuguguuuauguuaggaucugaaucauguu

SEQ ID NO: 282215 - RNA, 32 nt, Human
uuuuguguuuucaguagagacaggguuucacc

SEQ ID NO: 282216 - RNA, 32 nt, Human
uuuuguuaaagcaguagguuuuaaggauucuc

SEQ ID NO: 282217 - RNA, 32 nt, Human
uuuuguuaaggugucaucagccuucaaccucc

SEQ ID NO: 282218 - RNA, 32 nt, Human
uuuuguuacauacuuguacuucuaagaauugu

SEQ ID NO: 282219 - RNA, 32 nt, Human
uuuuguuagcacaccuagacuugcuguaacug

SEQ ID NO: 282220 - RNA, 31 nt, Human
uuuuguuaguuucaguaccucagcuaucaac

SEQ ID NO: 282221 - RNA, 31 nt, Human
uuuuguuaguuucaguuguauuuuauuuuua

SEQ ID NO: 282222 - RNA, 32 nt, Human
uuuuguuauagagagaaacaaggacauggaug

SEQ ID NO: 282223 - RNA, 32 nt, Human
uuuuguuauuuuuaauuaggguauaugaauau

SEQ ID NO: 282224 - RNA, 32 nt, Human
uuuuguuauuuuuacaaggcagaauggggugu

SEQ ID NO: 282225 - RNA, 32 nt, Human
uuuuguucaaucucucaccacaacuggaagug

SEQ ID NO: 282226 - RNA, 32 nt, Human
uuuuguucacuacuguauacucagcaccuaau

SEQ ID NO: 282227 - RNA, 32 nt, Human
uuuuguucacugcaaccucugccuuccaagau

SEQ ID NO: 282228 - RNA, 32 nt, Human
uuuuguucagaagaaagugcugaacaucguuc

SEQ ID NO: 282229 - RNA, 32 nt, Human
uuuuguucagcuaagaauuggaaaaguauuug

SEQ ID NO: 282230 - RNA, 32 nt, Human
uuuuguucauucucuagacaaaauccaucagg

SEQ ID NO: 282231 - RNA, 32 nt, Human
uuuuguucauuucauccuuucacuucuuuccc

SEQ ID NO: 282232 - RNA, 32 nt, Human
uuuuguucauuuccccucccuuagcuaccuuc

SEQ ID NO: 282233 - RNA, 32 nt, Human
uuuuguucauuucguucuuacuucccugaagc

SEQ ID NO: 282234 - RNA, 32 nt, Human
uuuuguucccauccucuucuuuuagcaguaaa

SEQ ID NO: 282235 - RNA, 32 nt, Human
uuuuguuccccuccuccacucucccccacccc

SEQ ID NO: 282236 - RNA, 32 nt, Human
uuuuguuccugagggccccuuaguaggcaggg

SEQ ID NO: 282237 - RNA, 32 nt, Human
uuuuguuccuuaauguggaccagaaugucagg

SEQ ID NO: 282238 - RNA, 32 nt, Human
uuuuguucuaacagacauuuagguuaauugua

SEQ ID NO: 282239 - RNA, 32 nt, Human
uuuuguucuauguaacaguauugccacaaaac

SEQ ID NO: 282240 - RNA, 32 nt, Human
uuuuguucucaaggacuugggcuguuugacuu

SEQ ID NO: 282241 - RNA, 32 nt, Human
uuuuguucucucucuggucacugcccuuaccu

SEQ ID NO: 282242 - RNA, 32 nt, Human
uuuuguucugcgguucccauugcagugcugug

SEQ ID NO: 282243 - RNA, 32 nt, Human
uuuuguucuugagaggggucagucuagaagcu

SEQ ID NO: 282244 - RNA, 32 nt, Human
uuuuguucuuuguuaugcugucuaucucuguu

SEQ ID NO: 282245 - RNA, 32 nt, Human
uuuuguugaagaaugaaaggcaaugacaaguu

SEQ ID NO: 282246 - RNA, 22 nt, Human
uuuuguugagaagauaaaugug

SEQ ID NO: 282247 - RNA, 32 nt, Human
uuuuguugauccagcauuugagugacacuguu

SEQ ID NO: 282248 - RNA, 32 nt, Human
uuuuguugcccaggcuggagugcaacggcgcg

SEQ ID NO: 282249 - RNA, 32 nt, Human
uuuuguugcccaggcuggagugcaaugaugca

SEQ ID NO: 282250 - RNA, 32 nt, Human
uuuuguugcccaggcuggagugcaauggcgcg

SEQ ID NO: 282251 - RNA, 32 nt, Human
uuuuguugcccaggcuggagugcaauggugca

SEQ ID NO: 282252 - RNA, 32 nt, Human
uuuuguugcccaggcuggaguguaguggcgcg

SEQ ID NO: 282253 - RNA, 32 nt, Human
uuuuguugcccaggcuggaguucaguggcgug

SEQ ID NO: 282254 - RNA, 32 nt, Human
uuuuguugcccaggcuggucuccaauuucugg

SEQ ID NO: 282255 - RNA, 22 nt, Human
uuuuguugcccucuccuauccu

SEQ ID NO: 282256 - RNA, 32 nt, Human
uuuuguugccuaccucuuccuccacucauuug

SEQ ID NO: 282257 - RNA, 32 nt, Human
uuuuguugcgcaggcuggagugcaauggugca

SEQ ID NO: 282258 - RNA, 32 nt, Human
uuuuguuggggaggggaaugggaggggaaaug

SEQ ID NO: 282259 - RNA, 32 nt, Human
uuuuguugguguuggugcaagggcaauaggau

SEQ ID NO: 282260 - RNA, 32 nt, Human
uuuuguugguuuggcuguaggcuuuuauuucu

SEQ ID NO: 282261 - RNA, 32 nt, Human
uuuuguuguagaugcuaacgugucagaauccu

SEQ ID NO: 282262 - RNA, 32 nt, Human
uuuuguugucaaacauaagguaccaaauauga

SEQ ID NO: 282263 - RNA, 22 nt, Human
uuuuguuguguuuuucugcuuu

SEQ ID NO: 282264 - RNA, 32 nt, Human
uuuuguuguucuuuagucaaagauccaauucu

SEQ ID NO: 282265 - RNA, 32 nt, Human
uuuuguuuacaagaauaauuagcaauacugag

SEQ ID NO: 282266 - RNA, 32 nt, Human
uuuuguuuaccucccuccauucauucacaugc

SEQ ID NO: 282267 - RNA, 23 nt, Human
uuuuguuuacucaagaaugaagu

SEQ ID NO: 282268 - RNA, 32 nt, Human
uuuuguuuagauaccaaucuuuuaaauucuug

SEQ ID NO: 282269 - RNA, 32 nt, Human
uuuuguuuagggacuguaguggauuauggcca

SEQ ID NO: 282270 - RNA, 32 nt, Human
uuuuguuuauucacauuaaccuuuauucuauc

SEQ ID NO: 282271 - RNA, 32 nt, Human
uuuuguuuauugcuggcacauuucuuuuucuu

SEQ ID NO: 282272 - RNA, 32 nt, Human
uuuuguuucaaaauacaggaaaaacauuccua

SEQ ID NO: 282273 - RNA, 32 nt, Human
uuuuguuuccauugcuuuugguguuuuagaca

SEQ ID NO: 282274 - RNA, 32 nt, Human
uuuuguuuccauuuucuucaucucgaagguga

SEQ ID NO: 282275 - RNA, 32 nt, Human
uuuuguuucccccaccaccaucacugccaccu

SEQ ID NO: 282276 - RNA, 32 nt, Human
uuuuguuuccccucagugucuguaacccuuag

SEQ ID NO: 282277 - RNA, 32 nt, Human
uuuuguuuccuacuuaagcucaggacuugaua

SEQ ID NO: 282278 - RNA, 32 nt, Human
uuuuguuucugaagggaaugccucuaagauuu

SEQ ID NO: 282279 - RNA, 32 nt, Human
uuuuguuucugagacggagucucagucuguca

SEQ ID NO: 282280 - RNA, 32 nt, Human
uuuuguuucugugucccuaccagacacaaaga

SEQ ID NO: 282281 - RNA, 32 nt, Human
uuuuguuucuuaccuuugauguuuucaaacca

SEQ ID NO: 282282 - RNA, 32 nt, Human
uuuuguuucuuuccucccuucccuuucacucu

SEQ ID NO: 282283 - RNA, 32 nt, Human
uuuuguuucuuuccuuccuuccuuccuuccuu

SEQ ID NO: 282284 - RNA, 32 nt, Human
uuuuguuugcugaauuaaaguacucugacauu

SEQ ID NO: 282285 - RNA, 32 nt, Human
uuuuguuugcugcacaccucauuggcuugcuu

SEQ ID NO: 282286 - RNA, 32 nt, Human
uuuuguuugggaacucggaggcccucccccuc

SEQ ID NO: 282287 - RNA, 32 nt, Human
uuuuguuuguuuccuuuguucuuaccuguaug

SEQ ID NO: 282288 - RNA, 32 nt, Human
uuuuguuuguuuucugagacagagucucacuc

SEQ ID NO: 282289 - RNA, 32 nt, Human
uuuuguuuuaaucuuuuguugccagugaugau

SEQ ID NO: 282290 - RNA, 32 nt, Human
uuuuguuuucaaugcuaguguuuaauccugua

SEQ ID NO: 282291 - RNA, 32 nt, Human
uuuuguuuucagagagaaauaggaguagggcg

SEQ ID NO: 282292 - RNA, 32 nt, Human
uuuuguuuuccacugugcuauuacaaauuuuc

SEQ ID NO: 282293 - RNA, 32 nt, Human
uuuuguuuucuuuccaaagcucaccucgggga

SEQ ID NO: 282294 - RNA, 32 nt, Human
uuuuguuuucuuuugaccuguaaaauaccuca

SEQ ID NO: 282295 - RNA, 32 nt, Human
uuuuguuuugagacagagucucacucuguguc

SEQ ID NO: 282296 - RNA, 32 nt, Human
uuuuguuuugagacagagucucgcucugucuc

SEQ ID NO: 282297 - RNA, 32 nt, Human
uuuuguuuugagacagaguuucccucugucgc

SEQ ID NO: 282298 - RNA, 32 nt, Human
uuuuguuuugagacagggccucacucuguugc

SEQ ID NO: 282299 - RNA, 32 nt, Human
uuuuguuuugagacagggucucacucuguugc

SEQ ID NO: 282300 - RNA, 32 nt, Human
uuuuguuuugagacauggucuugcucuauugc

SEQ ID NO: 282301 - RNA, 32 nt, Human
uuuuguuuugagacgaagacucacucuguccg

SEQ ID NO: 282302 - RNA, 32 nt, Human
uuuuguuuugagacggagucuugcucugucac

SEQ ID NO: 282303 - RNA, 32 nt, Human
uuuuguuuugagagaagucucguucuuguccc

SEQ ID NO: 282304 - RNA, 32 nt, Human
uuuuguuuugagagggagucucgcuguguugu

SEQ ID NO: 282305 - RNA, 32 nt, Human
uuuuguuuugagauggagucuuacucugucgc

SEQ ID NO: 282306 - RNA, 32 nt, Human
uuuuguuuugagauggagucuugcucuguugc

SEQ ID NO: 282307 - RNA, 32 nt, Human
uuuuguuuugcaccugccauucauuugcuaau

SEQ ID NO: 282308 - RNA, 32 nt, Human
uuuuguuuuguuuguuuugcuuugccaugugu

SEQ ID NO: 282309 - RNA, 32 nt, Human
uuuuguuuuuaagguuggcuucagaggugcaa

SEQ ID NO: 282310 - RNA, 31 nt, Human
uuuuguuuuucaguccagguuggagaucgua

SEQ ID NO: 282311 - RNA, 32 nt, Human
uuuuguuuuuccucuucugucaauggucuacu

SEQ ID NO: 282312 - RNA, 32 nt, Human
uuuuguuuuugacagagucucagucugucacc

SEQ ID NO: 282313 - RNA, 22 nt, Human
uuuuguuuuuguuuucuuucca

SEQ ID NO: 282314 - RNA, 32 nt, Human
uuuuguuuuuguuuugagacucgcucugucuc

SEQ ID NO: 282315 - RNA, 23 nt, Human
uuuuguuuuuuguuucuggcccc

SEQ ID NO: 282316 - RNA, 32 nt, Human
uuuuuaaaaagcagauauuuugucaaggggcu

SEQ ID NO: 282317 - RNA, 32 nt, Human
uuuuuaaaaagcuuaacuaggaaucuuucuga

SEQ ID NO: 282318 - RNA, 32 nt, Human
uuuuuaaaaauacauucauugucuucagucau

SEQ ID NO: 282319 - RNA, 32 nt, Human
uuuuuaaaaaugcagcagcauaggagugaaca

SEQ ID NO: 282320 - RNA, 32 nt, Human
uuuuuaaaaauuaaagaagaagaaaaguaaaa

SEQ ID NO: 282321 - RNA, 32 nt, Human
uuuuuaaaaauuauuaucaggggagaaaaauu

SEQ ID NO: 282322 - RNA, 32 nt, Human
uuuuuaaaacagcaauaauuagccauuuuaaa

SEQ ID NO: 282323 - RNA, 32 nt, Human
uuuuuaaaagaaugauggcaaaaugugcauaa

SEQ ID NO: 282324 - RNA, 32 nt, Human
uuuuuaaaaguggggagaauguuuggggaugu

SEQ ID NO: 282325 - RNA, 32 nt, Human
uuuuuaaaauuaguauuucauuacaaaugucu

SEQ ID NO: 282326 - RNA, 32 nt, Human
uuuuuaaaauuuaaaaacaaaggacuauuuaa

SEQ ID NO: 282327 - RNA, 32 nt, Human
uuuuuaaacaaaacaugacaaccuuggcuuuu

SEQ ID NO: 282328 - RNA, 32 nt, Human
uuuuuaaacagauggaguuacugugaagaagu

SEQ ID NO: 282329 - RNA, 32 nt, Human
uuuuuaaacccgucaggcugcugguaaggcag

SEQ ID NO: 282330 - RNA, 32 nt, Human
uuuuuaaagagccugcaucauuugguucccuc

SEQ ID NO: 282331 - RNA, 32 nt, Human
uuuuuaaagcagauuagauaacaggaacagaa

SEQ ID NO: 282332 - RNA, 32 nt, Human
uuuuuaaagcuauguuaguacacagaacacuu

SEQ ID NO: 282333 - RNA, 32 nt, Human
uuuuuaaagcucugacagucacauauagauug

SEQ ID NO: 282334 - RNA, 32 nt, Human
uuuuuaaaggaaaugcagccuagucuugagaa

SEQ ID NO: 282335 - RNA, 32 nt, Human
uuuuuaaaggaaugccugccugacugaagcuu

SEQ ID NO: 282336 - RNA, 32 nt, Human
uuuuuaaaucaaaaacuuuucauuucagauuu

SEQ ID NO: 282337 - RNA, 32 nt, Human
uuuuuaaauuccaggaacggguagucugacac

SEQ ID NO: 282338 - RNA, 32 nt, Human
uuuuuaaauuucccagggaaggagaccgucag

SEQ ID NO: 282339 - RNA, 32 nt, Human
uuuuuaacaacuaaucaagagugagugaacaa

SEQ ID NO: 282340 - RNA, 28 nt, Human
uuuuuaacaagugcuggguuauucugau

SEQ ID NO: 282341 - RNA, 32 nt, Human
uuuuuaacacauuuaugauucugugauaauau

SEQ ID NO: 282342 - RNA, 32 nt, Human
uuuuuaacaggcugaggcaacauggaucagug

SEQ ID NO: 282343 - RNA, 32 nt, Human
uuuuuaaccucauugcucacauguuaugauuc

SEQ ID NO: 282344 - RNA, 32 nt, Human
uuuuuaacuacccuuaaaaucuugucaaugac

SEQ ID NO: 282345 - RNA, 32 nt, Human
uuuuuaacuccugccuccacacauguucuuga

SEQ ID NO: 282346 - RNA, 32 nt, Human
uuuuuaacugauuuuaacuugauuuauuguaa

SEQ ID NO: 282347 - RNA, 32 nt, Human
uuuuuaacuucuguuccuuuccguaaguggau

SEQ ID NO: 282348 - RNA, 32 nt, Human
uuuuuaacuuugacaacugacuucuguuuccu

SEQ ID NO: 282349 - RNA, 32 nt, Human
uuuuuaagaaacuuaucuguauguuagaaaug

SEQ ID NO: 282350 - RNA, 32 nt, Human
uuuuuaagaaaugccagcugcuguagacccca

SEQ ID NO: 282351 - RNA, 32 nt, Human
uuuuuaagaacacacauugccauggcaggauu

SEQ ID NO: 282352 - RNA, 32 nt, Human
aaaaauacagaauuagccgggcauggugcaug

SEQ ID NO: 282353 - RNA, 32 nt, Human
aaaaauacagaauuagucaggcgugguggugg

SEQ ID NO: 282354 - RNA, 32 nt, Human
aaaaauacagcagaggaaggagaacggcuagc

SEQ ID NO: 282355 - RNA, 32 nt, Human
aaaaauacaucucccucugaccacagacuccu

SEQ ID NO: 282356 - RNA, 32 nt, Human
aaaaauaccuaaaaggaagcuuagaugggcug

SEQ ID NO: 282357 - RNA, 32 nt, Human
aaaaauacugcacuuguagccagauuagcaaa

SEQ ID NO: 282358 - RNA, 32 nt, Human
aaaaauacuuagcacuuggccugagaugccug

SEQ ID NO: 282359 - RNA, 32 nt, Human
aaaaauagaaacuccccacacuguggguaaaa

SEQ ID NO: 282360 - RNA, 32 nt, Human
aaaaauagacuuguuucugcucucauuuuugu

SEQ ID NO: 282361 - RNA, 32 nt, Human
aaaaauagagcugaugcccaaagaugagaaaa

SEQ ID NO: 282362 - RNA, 20 nt, Human
aaaaauagagcugggacuga

SEQ ID NO: 282363 - RNA, 32 nt, Human
aaaaauagagguuguuuacagcacucaguuug

SEQ ID NO: 282364 - RNA, 32 nt, Human
aaaaauagauuugcaaaaagugaacagauugc

SEQ ID NO: 282365 - RNA, 18 nt, Human
aaaaauagcagcugcuga

SEQ ID NO: 282366 - RNA, 32 nt, Human
aaaaauagcuaaaauaugauuguaccacugca

SEQ ID NO: 282367 - RNA, 32 nt, Human
aaaaauaggaagugucagccgggcgcggugcc

SEQ ID NO: 282368 - RNA, 23 nt, Human
aaaaauaggucagcagagauuuc

SEQ ID NO: 282369 - RNA, 23 nt, Human
aaaaauagguuggcagagauuuc

SEQ ID NO: 282370 - RNA, 32 nt, Human
aaaaauaguaaugggcugggcuugguggcuca

SEQ ID NO: 282371 - RNA, 32 nt, Human
aaaaauaguaugagugugaguacuaggaagga

SEQ ID NO: 282372 - RNA, 32 nt, Human
aaaaauauaaaaaguagccaggcgugguggug

SEQ ID NO: 282373 - RNA, 32 nt, Human
aaaaauauacauuuacaaauugugagauuuuu

SEQ ID NO: 282374 - RNA, 32 nt, Human
aaaaauauagcaaaugcagaaccacaaacaau

SEQ ID NO: 282375 - RNA, 32 nt, Human
aaaaauaucaguuccugucacucuuccacccc

SEQ ID NO: 282376 - RNA, 32 nt, Human
aaaaauaucugucuccuuuucacuuucuucag

SEQ ID NO: 282377 - RNA, 32 nt, Human
aaaaauaugaaauuuucaccucuugggguauu

SEQ ID NO: 282378 - RNA, 32 nt, Human
aaaaauaugaccacacuccagcugggaucaca

SEQ ID NO: 282379 - RNA, 32 nt, Human
aaaaauaugguuuccagagaaaaggccaauac

SEQ ID NO: 282380 - RNA, 32 nt, Human
aaaaauaugguuuuucaccaucaaagauuuua

SEQ ID NO: 282381 - RNA, 32 nt, Human
aaaaauauguguaaaauagggaagaaaguuag

SEQ ID NO: 282382 - RNA, 21 nt, Human
aaaaauauugcagugacuuuu

SEQ ID NO: 282383 - RNA, 32 nt, Human
aaaaauauuucaaauaugcagaaaaauaauaa

SEQ ID NO: 282384 - RNA, 32 nt, Human
aaaaaucaaaccaagaaaauagugaguuaaaa

SEQ ID NO: 282385 - RNA, 32 nt, Human
aaaaaucaacagcaaacaaaaccacacaaacc

SEQ ID NO: 282386 - RNA, 32 nt, Human
aaaaaucaacccagcaccagcagcuaccaacc

SEQ ID NO: 282387 - RNA, 32 nt, Human
aaaaaucaaugaaugaagagcucacaggacaa

SEQ ID NO: 282388 - RNA, 32 nt, Human
aaaaaucaauuagaucuaaacaguuauuucug

SEQ ID NO: 282389 - RNA, 32 nt, Human
aaaaaucacacaggcugggugcaguggcucau

SEQ ID NO: 282390 - RNA, 31 nt, Human
aaaaaucacagcuguuggaaaacugaaaagc

SEQ ID NO: 282391 - RNA, 32 nt, Human
aaaaaucacccaugugacacugggugacaugg

SEQ ID NO: 282392 - RNA, 32 nt, Human
aaaaaucacuguuaacagaccuccaggugauu

SEQ ID NO: 282393 - RNA, 32 nt, Human
aaaaaucagccugucugcucuccccacauuag

SEQ ID NO: 282394 - RNA, 32 nt, Human
aaaaaucagccugucugcucucuccuugcuca

SEQ ID NO: 282395 - RNA, 32 nt, Human
aaaaaucaggaaaauguccaagggugggagcc

SEQ ID NO: 282396 - RNA, 32 nt, Human
aaaaaucaguuguagacaccacccucagagau

SEQ ID NO: 282397 - RNA, 31 nt, Human
aaaaaucaguuucauuuucauauuucauaga

SEQ ID NO: 282398 - RNA, 32 nt, Human
aaaaaucauaugaucagcucaauagaugcaaa

SEQ ID NO: 282399 - RNA, 32 nt, Human
aaaaaucaucuacucuaugcaggagauauguu

SEQ ID NO: 282400 - RNA, 32 nt, Human
aaaaaucauucuugagcuccagccuggcuauc

SEQ ID NO: 282401 - RNA, 32 nt, Human
aaaaauccaacuuuauuuuuaguuguaacugc

SEQ ID NO: 282402 - RNA, 32 nt, Human
aaaaauccacugcaccuccacuuggugacuga

SEQ ID NO: 282403 - RNA, 32 nt, Human
aaaaauccagaagagaagaaagacauggcuga

SEQ ID NO: 282404 - RNA, 32 nt, Human
aaaaauccagagagguagugaggugucagagc

SEQ ID NO: 282405 - RNA, 32 nt, Human
aaaaauccagcagaaacagaagaacugugggu

SEQ ID NO: 282406 - RNA, 32 nt, Human
aaaaaucccaggagaaaccuaagaggucuuau

SEQ ID NO: 282407 - RNA, 32 nt, Human
aaaaaucccugagggacauuuugaggcaugaa

SEQ ID NO: 282408 - RNA, 31 nt, Human
aaaaauccgcuuuucugccacagaaacaaaa

SEQ ID NO: 282409 - RNA, 32 nt, Human
aaaaauccuggugaugcuuuucuggauuaaaa

SEQ ID NO: 282410 - RNA, 32 nt, Human
aaaaauccuuaaaucacuuuuguaauccagga

SEQ ID NO: 282411 - RNA, 32 nt, Human
aaaaaucgaggcaagccucuggaacacagcca

SEQ ID NO: 282412 - RNA, 31 nt, Human
aaaaaucgguaaggaacuagcccucaaacuu

SEQ ID NO: 282413 - RNA, 31 nt, Human
aaaaaucuauaaagcauguguugaaaauccu

SEQ ID NO: 282414 - RNA, 32 nt, Human
aaaaaucuauagacuccagcugcuacauuaga

SEQ ID NO: 282415 - RNA, 32 nt, Human
aaaaaucucagcugccaggcugccuuuagggu

SEQ ID NO: 282416 - RNA, 32 nt, Human
aaaaaucucaucuucuuuuccaguagaaaaua

SEQ ID NO: 282417 - RNA, 32 nt, Human
aaaaaucucauggagagggucuguggcagcuu

SEQ ID NO: 282418 - RNA, 32 nt, Human
aaaaaucucuccccaaugcucuccuuaaccuu

SEQ ID NO: 282419 - RNA, 32 nt, Human
aaaaaucucugcugagauguguucuguccagc

SEQ ID NO: 282420 - RNA, 32 nt, Human
aaaaaucugaaauuuccaucuggggauuaacu

SEQ ID NO: 282421 - RNA, 32 nt, Human
aaaaaucugcacuaaaauccccaaacugacag

SEQ ID NO: 282422 - RNA, 32 nt, Human
aaaaaucuggaaagcuuagaggaagcuaagga

SEQ ID NO: 282423 - RNA, 31 nt, Human
aaaaaucuggauuucugaugccaaaggguua

SEQ ID NO: 282424 - RNA, 32 nt, Human
aaaaaucuggguuugacugauuccccuaccuu

SEQ ID NO: 282425 - RNA, 32 nt, Human
aaaaaucuuacuuuucuuguuacuacacaaag

SEQ ID NO: 282426 - RNA, 32 nt, Human
aaaaaucuucgauuucauaaaaggacacacac

SEQ ID NO: 282427 - RNA, 32 nt, Human
aaaaaucuuuccuguuacuuucaccucagguc

SEQ ID NO: 282428 - RNA, 32 nt, Human
aaaaaucuuuugguggaggugccuucagggaa

SEQ ID NO: 282429 - RNA, 29 nt, Human
aaaaaugaacuugccaaaauuggcaguag

SEQ ID NO: 282430 - RNA, 32 nt, Human
aaaaaugaaugagaaaaggaaaagggaagagg

SEQ ID NO: 282431 - RNA, 29 nt, Human
aaaaaugacacuccaaugggcugcagugg

SEQ ID NO: 282432 - RNA, 25 nt, Human
aaaaaugaccaaaacaugucuuucu

SEQ ID NO: 282433 - RNA, 32 nt, Human
aaaaaugacuaaaucugagugguagggaguca

SEQ ID NO: 282434 - RNA, 32 nt, Human
aaaaaugacucauuccagagcuggcgcagaga

SEQ ID NO: 282435 - RNA, 32 nt, Human
aaaaaugacugcccuggcugggcauggcugcc

SEQ ID NO: 282436 - RNA, 32 nt, Human
aaaaaugacuuguuucuguuguacuugagucu

SEQ ID NO: 282437 - RNA, 32 nt, Human
aaaaaugagacaauauauccauaaauucauag

SEQ ID NO: 282438 - RNA, 32 nt, Human
aaaaaugagaccacagggaggggccagcugug

SEQ ID NO: 282439 - RNA, 32 nt, Human
aaaaaugagagagaaaauuaaugugacaaaau

SEQ ID NO: 282440 - RNA, 32 nt, Human
aaaaaugagcugguucagaaggccgaacuggc

SEQ ID NO: 282441 - RNA, 32 nt, Human
aaaaaugaggccauuuucaauccagaggaaga

SEQ ID NO: 282442 - RNA, 32 nt, Human
aaaaaugaugcaaaaucaaaaugaguggcuaa

SEQ ID NO: 282443 - RNA, 32 nt, Human
aaaaaugauggggacuuuucaaagggagccaa

SEQ ID NO: 282444 - RNA, 32 nt, Human
aaaaaugauuuaaaacauuuuaccucagacua

SEQ ID NO: 282445 - RNA, 32 nt, Human
aaaaaugauuuguagagcuaacaugugaaauu

SEQ ID NO: 282446 - RNA, 32 nt, Human
aaaaaugcaaacacccugaggauucagagaac

SEQ ID NO: 282447 - RNA, 22 nt, Human
aaaaaugcaccacaguauuucu

SEQ ID NO: 282448 - RNA, 32 nt, Human
aaaaaugcacuguuacuuacaguuuguuuccu

SEQ ID NO: 282449 - RNA, 32 nt, Human
aaaaaugcagccaggccgggcacgguggcuca

SEQ ID NO: 282450 - RNA, 32 nt, Human
aaaaaugcagcuuuuccaggguugcuggacug

SEQ ID NO: 282451 - RNA, 32 nt, Human
aaaaaugcauaccaaaugaagacugccuauca

SEQ ID NO: 282452 - RNA, 32 nt, Human
aaaaaugcauuuccuguaucauccuuuucaau

SEQ ID NO: 282453 - RNA, 32 nt, Human
aaaaaugccccaggagaauaggcaccggcugg

SEQ ID NO: 282454 - RNA, 32 nt, Human
aaaaaugccccugacacugcaggaugacgguc

SEQ ID NO: 282455 - RNA, 32 nt, Human
aaaaaugccuguuggcuuuucagucuauauuu

SEQ ID NO: 282456 - RNA, 32 nt, Human
aaaaaugcuacaaaugugaaaaacguggcaga

SEQ ID NO: 282457 - RNA, 24 nt, Human
aaaaaugcuagcgacagucuuucu

SEQ ID NO: 282458 - RNA, 32 nt, Human
aaaaaugcuguuuuuggcugggcgcgguggcu

SEQ ID NO: 282459 - RNA, 32 nt, Human
aaaaaugcuugaaaccucuauauuucuuucgu

SEQ ID NO: 282460 - RNA, 32 nt, Human
aaaaaugcuuugcccaucuguagguagacaca

SEQ ID NO: 282461 - RNA, 32 nt, Human
aaaaauggaaaugcucugaagcauuuugggag

SEQ ID NO: 282462 - RNA, 29 nt, Human
aaaaauggagccacuucagcagcagcagc

SEQ ID NO: 282463 - RNA, 32 nt, Human
aaaaauggagugacaccccagacucagucagg

SEQ ID NO: 282464 - RNA, 32 nt, Human
aaaaauggcaaaagccuagauuuacaauuuga

SEQ ID NO: 282465 - RNA, 32 nt, Human
aaaaauggcuuccuggccgggcgugguggcuc

SEQ ID NO: 282466 - RNA, 32 nt, Human
aaaaaugggaaaauaacuugaggccaggagua

SEQ ID NO: 282467 - RNA, 32 nt, Human
aaaaaugggacuuuuugucucagucccaguga

SEQ ID NO: 282468 - RNA, 19 nt, Human
aaaaaugguaacugucaug

SEQ ID NO: 282469 - RNA, 32 nt, Human
aaaaaugguaaguucuaaguuucuccauuaau

SEQ ID NO: 282470 - RNA, 32 nt, Human
aaaaaugguagaaaguacucuuugauguuucu

SEQ ID NO: 282471 - RNA, 32 nt, Human
aaaaauggucaagguucagcauauucuauaug

SEQ ID NO: 282472 - RNA, 32 nt, Human
aaaaaugguggguuugggggaagggagguaag

SEQ ID NO: 282473 - RNA, 32 nt, Human
aaaaauguacaccaggcugggugcgguggcuc

SEQ ID NO: 282474 - RNA, 32 nt, Human
aaaaauguaccugauugcucccaauuaugaga

SEQ ID NO: 282475 - RNA, 22 nt, Human
aaaaauguauggacaguuuuuc

SEQ ID NO: 282476 - RNA, 32 nt, Human
aaaaaugucaaggaacagcaaugucaacagga

SEQ ID NO: 282477 - RNA, 32 nt, Human
aaaaaugucacucaaaacauguaguuuggaaa

SEQ ID NO: 282478 - RNA, 32 nt, Human
aaaaaugucuuauggcugggugcaguggcuca

SEQ ID NO: 282479 - RNA, 32 nt, Human
aaaaaugugaagaaggaggagaagaggaaggc

SEQ ID NO: 282480 - RNA, 32 nt, Human
aaaaaugugcauaccuggauuuccuuggcuuc

SEQ ID NO: 282481 - RNA, 32 nt, Human
aaaaaugugcuagaauccaucuguggccugaa

SEQ ID NO: 282482 - RNA, 32 nt, Human
aaaaauguguacaaaguuaauuuauugcauua

SEQ ID NO: 282483 - RNA, 32 nt, Human
aaaaauguguccguauauuucuguaccugcag

SEQ ID NO: 282484 - RNA, 32 nt, Human
aaaaauguguugaaggaucucucucaguggcu

SEQ ID NO: 282485 - RNA, 32 nt, Human
aaaaauguguuuuguacaugaaguaggaaucg

SEQ ID NO: 282486 - RNA, 32 nt, Human
aaaaauguuauuuuccuccucuuccaacauuu

SEQ ID NO: 282487 - RNA, 32 nt, Human
aaaaauguugcaaauguuaacaugugucacaa

SEQ ID NO: 282488 - RNA, 21 nt, Human
aaaaauuaacugggcauggua

SEQ ID NO: 282489 - RNA, 32 nt, Human
aaaaauuaaggggagagaggaaaacaaaacca

SEQ ID NO: 282490 - RNA, 32 nt, Human
aaaaauuaaucaaguuuucugccugacaagau

SEQ ID NO: 282491 - RNA, 32 nt, Human
aaaaauuacccaggcgugguggugggugacuc

SEQ ID NO: 282492 - RNA, 32 nt, Human
aaaaauuaccucuucaguguuuucucaugcaa

SEQ ID NO: 282493 - RNA, 32 nt, Human
aaaaauuaccugcagguauuuucuuuuuauga

SEQ ID NO: 282494 - RNA, 32 nt, Human
aaaaauuacuaaaaaugacaaguagaagacuu

SEQ ID NO: 282495 - RNA, 23 nt, Human
aaaaauuagagcauucccucuga

SEQ ID NO: 282496 - RNA, 32 nt, Human
aaaaauuagauucuuaaaguguggcaaacaua

SEQ ID NO: 282497 - RNA, 32 nt, Human
aaaaauuagcagccaggugcaguggcucacgc

SEQ ID NO: 282498 - RNA, 23 nt, Human
aaaaauuagccaggcucguggca

SEQ ID NO: 282499 - RNA, 21 nt, Human
aaaaauuagccgggcguggua

SEQ ID NO: 282500 - RNA, 32 nt, Human
aaaaauuauaaucacuaaucuugguucuuuuu

SEQ ID NO: 282501 - RNA, 32 nt, Human
aaaaauuauccccucaccugucucuauucuuu

SEQ ID NO: 282502 - RNA, 32 nt, Human
aaaaauuaucuauuucuccauuacccacugua

SEQ ID NO: 282503 - RNA, 32 nt, Human
aaaaauuauuaaacauuuaaaaauuaguuuau

SEQ ID NO: 282504 - RNA, 32 nt, Human
aaaaauuauuauacacacugucucucagcuca

SEQ ID NO: 282505 - RNA, 32 nt, Human
aaaaauuauucuaugucuuuguccucaaucua

SEQ ID NO: 282506 - RNA, 32 nt, Human
aaaaauuauuuuuguggacuuggguaucaaug

SEQ ID NO: 282507 - RNA, 32 nt, Human
aaaaauucaaccacagauuuauacaaggguua

SEQ ID NO: 282508 - RNA, 32 nt, Human
aaaaauucaagcacuucuucccuccacccuca

SEQ ID NO: 282509 - RNA, 32 nt, Human
aaaaauucaccuuugauugcauaaggcaauua

SEQ ID NO: 282510 - RNA, 32 nt, Human
aaaaauucagcaaaccauuuuuaaaguagaag

SEQ ID NO: 282511 - RNA, 32 nt, Human
aaaaauucagggauauggccauguguuccagg

SEQ ID NO: 282512 - RNA, 32 nt, Human
aaaaauucaguccaaaacuccuuggggagaug

SEQ ID NO: 282513 - RNA, 31 nt, Human
aaaaauucaguguccuccaugccaagcagaa

SEQ ID NO: 282514 - RNA, 32 nt, Human
aaaaauucaguuaaccuauuuugugucuguag

SEQ ID NO: 282515 - RNA, 32 nt, Human
aaaaauuccaucuucauuacugccuuaugaca

SEQ ID NO: 282516 - RNA, 32 nt, Human
aaaaauuccugcuugccugccugccugccaau

SEQ ID NO: 282517 - RNA, 32 nt, Human
aaaaauucuaaccacuguaacaacaguuuuug

SEQ ID NO: 282518 - RNA, 32 nt, Human
aaaaauucuaagaaauccacuagaaaacuauu

SEQ ID NO: 282519 - RNA, 32 nt, Human
aaaaauucucaccucauuuaugguuuaaaacu

SEQ ID NO: 282520 - RNA, 32 nt, Human
aaaaauucuccaggaauuucauaguuuggacc

SEQ ID NO: 282521 - RNA, 32 nt, Human
aaaaauucugcugcacucugcuugggccuuga

SEQ ID NO: 282522 - RNA, 32 nt, Human
aaaaauucuugaguaugcauuaaccuugcucu

SEQ ID NO: 282523 - RNA, 32 nt, Human
aaaaauugaacaaaacaggguaccagcacgga

SEQ ID NO: 282524 - RNA, 32 nt, Human
aaaaauugaauccauucugcugacuucuuccu

SEQ ID NO: 282525 - RNA, 32 nt, Human
aaaaauugacauccuuuguacuuucuuuaauc

SEQ ID NO: 282526 - RNA, 32 nt, Human
aaaaauugaccaaaguaagaaaaugcaaguuc

SEQ ID NO: 282527 - RNA, 32 nt, Human
aaaaauuggaagccaaaccaguucuuaaaugc

SEQ ID NO: 282528 - RNA, 32 nt, Human
aaaaauuggcaucaaaaaggaaguucuuauga

SEQ ID NO: 282529 - RNA, 32 nt, Human
aaaaauuguagaaauauagacugugaaaaaga

SEQ ID NO: 282530 - RNA, 32 nt, Human
aaaaauugucccacaucucccgaaccucucca

SEQ ID NO: 282531 - RNA, 32 nt, Human
aaaaauuguugacugcaguuucggaaguuuga

SEQ ID NO: 282532 - RNA, 32 nt, Human
aaaaauuguuuuucaaaugucaccaauaaaag

SEQ ID NO: 282533 - RNA, 32 nt, Human
aaaaauuuaaacaugaagcacacacacaaaaa

SEQ ID NO: 282534 - RNA, 32 nt, Human
aaaaauuuaaaccaaagaaaucuuaaaaucag

SEQ ID NO: 282535 - RNA, 32 nt, Human
aaaaauuuacgcaccuuuaaucuuggguguuc

SEQ ID NO: 282536 - RNA, 32 nt, Human
aaaaauuuacgucucauuauuuugccaucuca

SEQ ID NO: 282537 - RNA, 32 nt, Human
aaaaauuuagcuggguguaguggugcacaccu

SEQ ID NO: 282538 - RNA, 32 nt, Human
aaaaauuucagagagaaucaagauaccuuuuu

SEQ ID NO: 282539 - RNA, 32 nt, Human
aaaaauuucauagccuguaucuaucauuuaaa

SEQ ID NO: 282540 - RNA, 32 nt, Human
aaaaauuugaacgaggcuagugcaauguuuug

SEQ ID NO: 282541 - RNA, 32 nt, Human
aaaaauuugggucuggugcuguucauugaguc

SEQ ID NO: 282542 - RNA, 32 nt, Human
aaaaauuuuaagaaguuuuccuuguggggcug

SEQ ID NO: 282543 - RNA, 32 nt, Human
aaaaauuuuguccuaauucccaauuucagagu

SEQ ID NO: 282544 - RNA, 32 nt, Human
aaaaauuuuuaaguucacaauucagugguauu

SEQ ID NO: 282545 - RNA, 32 nt, Human
aaaaauuuuucccaguguucugauaugugacu

SEQ ID NO: 282546 - RNA, 18 nt, Human
aaaacaaaaaacaaaaca

SEQ ID NO: 282547 - RNA, 23 nt, Human
aaaacaaaaaacaaaacaaaaca

SEQ ID NO: 282548 - RNA, 23 nt, Human
aaaacaaaaacaaaaacaaaaca

SEQ ID NO: 282549 - RNA, 22 nt, Human
aaaacaaaaacaaaacaaaaca

SEQ ID NO: 282550 - RNA, 23 nt, Human
aaaacaaaaacaaaacaacaaca

SEQ ID NO: 282551 - RNA, 32 nt, Human
aaaacaaaaacacacccaaacacaccacauug

SEQ ID NO: 282552 - RNA, 19 nt, Human
aaaacaaaacaaaacaaaa

SEQ ID NO: 282553 - RNA, 20 nt, Human
aaaacaaaacaaaacaaaac

SEQ ID NO: 282554 - RNA, 21 nt, Human
aaaacaaaacaaaacaaaaca

SEQ ID NO: 282555 - RNA, 20 nt, Human
aaaacaaaacaaaacaaaca

SEQ ID NO: 282556 - RNA, 22 nt, Human
aaaacaaaacaaaacaaacaca

SEQ ID NO: 282557 - RNA, 22 nt, Human
aaaacaaaacaaaacaacaaca

SEQ ID NO: 282558 - RNA, 21 nt, Human
aaaacaaaacaaaauaaaaca

SEQ ID NO: 282559 - RNA, 20 nt, Human
aaaacaaaacaaacaaaaca

SEQ ID NO: 282560 - RNA, 19 nt, Human
aaaacaaaacaaacaaaca

SEQ ID NO: 282561 - RNA, 32 nt, Human
aaaacaaaaccagccaaccuauguuacacgug

SEQ ID NO: 282562 - RNA, 32 nt, Human
aaaacaaaacuaaaaacuacucauaaucuuac

SEQ ID NO: 282563 - RNA, 32 nt, Human
aaaacaaaagccccagcccugccgaggccugg

SEQ ID NO: 282564 - RNA, 32 nt, Human
aaaacaaaagccuucuuuggaauagauggauu

SEQ ID NO: 282565 - RNA, 32 nt, Human
aaaacaaaaugccaguugcauugguuuccccu

SEQ ID NO: 282566 - RNA, 32 nt, Human
aaaacaaaauuagcugagcaugguggugugug

SEQ ID NO: 282567 - RNA, 32 nt, Human
aaaacaaacaaaaaccuguuguguacacacac

SEQ ID NO: 282568 - RNA, 19 nt, Human
aaaacaaacuagugccaag

SEQ ID NO: 282569 - RNA, 32 nt, Human
aaaacaaacugcuugacccaggaacaaguggc

SEQ ID NO: 282570 - RNA, 32 nt, Human
aaaacaaagauccugcccuuguggaccuuaug

SEQ ID NO: 282571 - RNA, 32 nt, Human
aaaacaaagcuacaauuugcccucauacacac

SEQ ID NO: 282572 - RNA, 32 nt, Human
aaaacaaagcuguauagggauccucucucucu

SEQ ID NO: 282573 - RNA, 32 nt, Human
aaaacaaaggccagauucugccacugcauccu

SEQ ID NO: 282574 - RNA, 32 nt, Human
aaaacaaaggccugugcuccacccaggaggug

SEQ ID NO: 282575 - RNA, 32 nt, Human
aaaacaaaguucaauuuagcuggauuucugaa

SEQ ID NO: 282576 - RNA, 32 nt, Human
aaaacaaauagaagaaaaugaggguuacagua

SEQ ID NO: 282577 - RNA, 32 nt, Human
aaaacaaauggcucuuucacaugugcuuuauu

SEQ ID NO: 282578 - RNA, 32 nt, Human
aaaacaaaugugaaggggagagacaggggcca

SEQ ID NO: 282579 - RNA, 32 nt, Human
aaaacaaaugugaaggggagagacaggggccg

SEQ ID NO: 282580 - RNA, 19 nt, Human
aaaacaacaaaacaaaaca

SEQ ID NO: 282581 - RNA, 32 nt, Human
aaaacaacaaacauucauucucucacacaguc

SEQ ID NO: 282582 - RNA, 20 nt, Human
aaaacaacaacaacaaaaca

SEQ ID NO: 282583 - RNA, 32 nt, Human
aaaacaacaacaacaaaacaacacauuggucu

SEQ ID NO: 282584 - RNA, 32 nt, Human
aaaacaacaacaacaaaacaccucugucaaug

SEQ ID NO: 282585 - RNA, 32 nt, Human
aaaacaacaacaacaacaaaaacccuauuccu

SEQ ID NO: 282586 - RNA, 32 nt, Human
aaaacaacaacaacacuauccuauaaacuaga

SEQ ID NO: 282587 - RNA, 32 nt, Human
aaaacaacaacaggcugggcgcaguggcucac

SEQ ID NO: 282588 - RNA, 32 nt, Human
aaaacaacacaaaaucauuaucuuacaguucu

SEQ ID NO: 282589 - RNA, 32 nt, Human
aaaacaacagaaggaggggaucaaagauagcu

SEQ ID NO: 282590 - RNA, 18 nt, Human
aaaacaacagcaaacaaa

SEQ ID NO: 282591 - RNA, 32 nt, Human
aaaacaacaggaagcagcuuacaaacucggug

SEQ ID NO: 282592 - RNA, 19 nt, Human
aaaacaaccaagugccaag

SEQ ID NO: 282593 - RNA, 32 nt, Human
aaaacaaccagcucucgacucacuaacucaaa

SEQ ID NO: 282594 - RNA, 32 nt, Human
aaaacaaccugaucucuucccucucucccagc

SEQ ID NO: 282595 - RNA, 32 nt, Human
aaaacaacuaugaagaucugcagcuauucuuu

SEQ ID NO: 282596 - RNA, 32 nt, Human
aaaacaacuguccuuuucuccccaccaccccu

SEQ ID NO: 282597 - RNA, 32 nt, Human
aaaacaacuuuugacagaggcccaucaaaccc

SEQ ID NO: 282598 - RNA, 32 nt, Human
aaaacaagagcagcagcugucaggcccagcug

SEQ ID NO: 282599 - RNA, 32 nt, Human
aaaacaagaugaaacacagaaaaguugaaacc

SEQ ID NO: 282600 - RNA, 20 nt, Human
aaaacaagcaaaacaaaaca

SEQ ID NO: 282601 - RNA, 32 nt, Human
aaaacaagcagaagccaagggaaagugggcug

SEQ ID NO: 282602 - RNA, 32 nt, Human
aaaacaagcccgggcuuggaggccuguacuga

SEQ ID NO: 282603 - RNA, 32 nt, Human
aaaacaaguaaguaugaucuguuaucaaugca

SEQ ID NO: 282604 - RNA, 32 nt, Human
aaaacaagugccucucacugggcuuugucaac

SEQ ID NO: 282605 - RNA, 19 nt, Human
aaaacaaguugaguagaga

SEQ ID NO: 282606 - RNA, 19 nt, Human
aaaacaauaaaacaaaaca

SEQ ID NO: 282607 - RNA, 18 nt, Human
aaaacaaugcaguacagg

SEQ ID NO: 282608 - RNA, 18 nt, Human
aaaacaaugcuuaguaca

SEQ ID NO: 282609 - RNA, 32 nt, Human
aaaacaauguaaguaaaggauauuucugaauc

SEQ ID NO: 282610 - RNA, 32 nt, Human
aaaacaauucggcggccaguguuuccacccag

SEQ ID NO: 282611 - RNA, 32 nt, Human
aaaacaauucuccaauccccucuccuuugguc

SEQ ID NO: 282612 - RNA, 32 nt, Human
aaaacacaaaugaaaacucacacccacccacc

SEQ ID NO: 282613 - RNA, 32 nt, Human
aaaacacaaugagggagugaaauguuacccaa

SEQ ID NO: 282614 - RNA, 32 nt, Human
aaaacacacagaacugcauuuguagcucugua

SEQ ID NO: 282615 - RNA, 32 nt, Human
aaaacacacagcugaguucuuagaguugauuc

SEQ ID NO: 282616 - RNA, 32 nt, Human
aaaacacacaguuaccugguucacagauagcu

SEQ ID NO: 282617 - RNA, 32 nt, Human
aaaacacacuucuccagcaacacuccaucagc

SEQ ID NO: 282618 - RNA, 32 nt, Human
aaaacacagaagcaugaguggcaaguggcggg

SEQ ID NO: 282619 - RNA, 32 nt, Human
aaaacacagagguguucugaccugcaacuuga

SEQ ID NO: 282620 - RNA, 32 nt, Human
aaaacacagcaucucuucuaggccaacuccag

SEQ ID NO: 282621 - RNA, 19 nt, Human
aaaacacagccagcccaag

SEQ ID NO: 282622 - RNA, 32 nt, Human
aaaacacagugauguucagaacagaacacaag

SEQ ID NO: 282623 - RNA, 32 nt, Human
aaaacacaguguuggucaaagacaucacuggc

SEQ ID NO: 282624 - RNA, 32 nt, Human
aaaacacauaaauaaaacuacaugcaccauca

SEQ ID NO: 282625 - RNA, 32 nt, Human
aaaacacaucuucuuaacggauggugaccuau

SEQ ID NO: 282626 - RNA, 32 nt, Human
aaaacacaugcagagucacauccucauccuag

SEQ ID NO: 282627 - RNA, 32 nt, Human
aaaacaccaaagauuucucugaagcagaucuc

SEQ ID NO: 282628 - RNA, 32 nt, Human
aaaacaccaagugccuggaaucaguuguuugu

SEQ ID NO: 282629 - RNA, 32 nt, Human
aaaacaccacugcuuccuacccagguggcgac

SEQ ID NO: 282630 - RNA, 32 nt, Human
aaaacacccuugaaaauauaugacuuugaaua

SEQ ID NO: 282631 - RNA, 32 nt, Human
aaaacaccucaagcagcacugcagucucccau

SEQ ID NO: 282632 - RNA, 32 nt, Human
aaaacacgacuccugaaucauguuccauuacu

SEQ ID NO: 282633 - RNA, 32 nt, Human
aaaacacgacuggccgggcucccugccuucuc

SEQ ID NO: 282634 - RNA, 32 nt, Human
aaaacacgguaccuccagaacacuucagcucc

SEQ ID NO: 282635 - RNA, 32 nt, Human
aaaacacuauaaaugugaaaacuacaaggaag

SEQ ID NO: 282636 - RNA, 32 nt, Human
aaaacacucagcugcaaguccaaagccacaag

SEQ ID NO: 282637 - RNA, 32 nt, Human
aaaacacuccaaaauacugacuccuuuucucc

SEQ ID NO: 282638 - RNA, 32 nt, Human
aaaacacucuugguggugucuuggggauuugg

SEQ ID NO: 282639 - RNA, 32 nt, Human
aaaacacucuuuaacaucacagucacagauuu

SEQ ID NO: 282640 - RNA, 32 nt, Human
aaaacacugaaauugagucugaccucaggagu

SEQ ID NO: 282641 - RNA, 32 nt, Human
aaaacacugaggauuuuaguuuugaaaucaaa

SEQ ID NO: 282642 - RNA, 32 nt, Human
aaaacacuggaaacaagcuaaauguucauuau

SEQ ID NO: 282643 - RNA, 32 nt, Human
aaaacacuuccucuugguuauucugagaacua

SEQ ID NO: 282644 - RNA, 32 nt, Human
aaaacacuuuggggucacaaugcccaggaccg

SEQ ID NO: 282645 - RNA, 23 nt, Human
aaaacagaaacaaaaucaaaaca

SEQ ID NO: 282646 - RNA, 32 nt, Human
aaaacagaaacacauaguauuugcacuuugua

SEQ ID NO: 282647 - RNA, 32 nt, Human
aaaacagaaauggcaugcuuuacccaucuuac

SEQ ID NO: 282648 - RNA, 22 nt, Human
aaaacagaacaaaaacaaaaca

SEQ ID NO: 282649 - RNA, 21 nt, Human
aaaacagaacaaaacaaaaca

SEQ ID NO: 282650 - RNA, 32 nt, Human
aaaacagaacaacaguggacuuuuuaugauau

SEQ ID NO: 282651 - RNA, 32 nt, Human
aaaacagaagugaagaguuucagagcaucaga

SEQ ID NO: 282652 - RNA, 32 nt, Human
aaaacagaauacccugcaggaagaaugggaug

SEQ ID NO: 282653 - RNA, 19 nt, Human
aaaacagaauaucuacaga

SEQ ID NO: 282654 - RNA, 32 nt, Human
aaaacagaaugaccggauggccaucuguccug

SEQ ID NO: 282655 - RNA, 20 nt, Human
aaaacagacagaacuacaga

SEQ ID NO: 282656 - RNA, 22 nt, Human
aaaacagacaguuuaguucaga

SEQ ID NO: 282657 - RNA, 19 nt, Human
aaaacagaccaggcacaga

SEQ ID NO: 282658 - RNA, 18 nt, Human
aaaacagaccuggacaga

SEQ ID NO: 282659 - RNA, 32 nt, Human
aaaacagacgcuggagcuccagccuccuggcg

SEQ ID NO: 282660 - RNA, 20 nt, Human
aaaacagagccaaagacaga

SEQ ID NO: 282661 - RNA, 19 nt, Human
aaaacagagccaacaacag

SEQ ID NO: 282662 - RNA, 18 nt, Human
aaaacagagccuccuaga

SEQ ID NO: 282663 - RNA, 32 nt, Human
aaaacagagccugccuaaccaggcccagccag

SEQ ID NO: 282664 - RNA, 19 nt, Human
aaaacagagcucagcugca

SEQ ID NO: 282665 - RNA, 20 nt, Human
aaaacagagcugaaaacgga

SEQ ID NO: 282666 - RNA, 19 nt, Human
aaaacagagcugggcaagg

SEQ ID NO: 282667 - RNA, 32 nt, Human
aaaacagaggguggaggaacccugaaggacaa

SEQ ID NO: 282668 - RNA, 32 nt, Human
aaaacagauaaggcucuuccuggcagaguuua

SEQ ID NO: 282669 - RNA, 32 nt, Human
aaaacagaugcccccagaaggggccagugcgg

SEQ ID NO: 282670 - RNA, 18 nt, Human
aaaacagauuucuacaga

SEQ ID NO: 282671 - RNA, 32 nt, Human
aaaacagcaaggaaauggacucuccccagagc

SEQ ID NO: 282672 - RNA, 32 nt, Human
aaaacagcagaaguccaagaauacagcuguag

SEQ ID NO: 282673 - RNA, 32 nt, Human
aaaacagcagcucccuguggagcugaagggcg

SEQ ID NO: 282674 - RNA, 32 nt, Human
aaaacagcaguuuuacuuuucucacaaaaacu

SEQ ID NO: 282675 - RNA, 32 nt, Human
aaaacagcaucugcuuuccucuuggccaugag

SEQ ID NO: 282676 - RNA, 32 nt, Human
aaaacagcauuuucaguuccuucuucaauuag

SEQ ID NO: 282677 - RNA, 32 nt, Human
aaaacagccaaagaaggaagaggaggaaaagg

SEQ ID NO: 282678 - RNA, 32 nt, Human
aaaacagccagccuggccaccaguuguaccuu

SEQ ID NO: 282679 - RNA, 32 nt, Human
aaaacagcccggagccugcagcccagccccac

SEQ ID NO: 282680 - RNA, 32 nt, Human
aaaacagccuccagccucucccuccagcacaa

SEQ ID NO: 282681 - RNA, 32 nt, Human
aaaacagccuccaggaaaugcaaucccagaga

SEQ ID NO: 282682 - RNA, 32 nt, Human
aaaacagccugaaaguguaugcauguaccaua

SEQ ID NO: 282683 - RNA, 32 nt, Human
aaaacagcgaauguccaucaacaggaaucgga

SEQ ID NO: 282684 - RNA, 32 nt, Human
aaaacagcuaaguaccuagaagagcucccugc

SEQ ID NO: 282685 - RNA, 32 nt, Human
aaaacagcuccucuauauuuccaccucuuucu

SEQ ID NO: 282686 - RNA, 18 nt, Human
aaaacagcugaggacaga

SEQ ID NO: 282687 - RNA, 32 nt, Human
aaaacagcugcaaccucggauaccagcacggg

SEQ ID NO: 282688 - RNA, 32 nt, Human
aaaacagcuucugcuacuaaaauguucucauc

SEQ ID NO: 282689 - RNA, 32 nt, Human
aaaacaggaaauaugggcugggcacagugucc

SEQ ID NO: 282690 - RNA, 32 nt, Human
aaaacaggaacccaccaaaccaaccaaucaac

SEQ ID NO: 282691 - RNA, 32 nt, Human
aaaacaggacucaagauuguagggaauggaag

SEQ ID NO: 282692 - RNA, 26 nt, Human
aaaacaggagguggagguugcaguga

SEQ ID NO: 282693 - RNA, 32 nt, Human
aaaacaggagguggagguugcagugagccgag

SEQ ID NO: 282694 - RNA, 18 nt, Human
aaaacaggcagguacagg

SEQ ID NO: 282695 - RNA, 32 nt, Human
aaaacaggccaggacuugucucugugcugaaa

SEQ ID NO: 282696 - RNA, 32 nt, Human
aaaacaggccuccccucccucucucggcacca

SEQ ID NO: 282697 - RNA, 19 nt, Human
aaaacaggcuggcacuaga

SEQ ID NO: 282698 - RNA, 18 nt, Human
aaaacaggggcacacaga

SEQ ID NO: 282699 - RNA, 32 nt, Human
aaaacagggggagcggaagggagccacuggcc

SEQ ID NO: 282700 - RNA, 19 nt, Human
aaaacagguccagaacaga

SEQ ID NO: 282701 - RNA, 20 nt, Human
aaaacagguugcaguaaaga

SEQ ID NO: 282702 - RNA, 32 nt, Human
aaaacagucaucuagaauucacugaguuuugu

SEQ ID NO: 282703 - RNA, 32 nt, Human
aaaacagucccaaagcuauuauagauguuaau

SEQ ID NO: 282704 - RNA, 32 nt, Human
aaaacagucuucuccccucccucgccuuccau

SEQ ID NO: 282705 - RNA, 32 nt, Human
aaaacagugaacacacgcuuucugguucuagu

SEQ ID NO: 282706 - RNA, 32 nt, Human
aaaacagugccaaaccuccacagcucauuucu

SEQ ID NO: 282707 - RNA, 25 nt, Human
aaaacagugucauuguguguguucc

SEQ ID NO: 282708 - RNA, 31 nt, Human
aaaacaguugagagaggaagaauuugaagag

SEQ ID NO: 282709 - RNA, 18 nt, Human
aaaacaguuuggugcaga

SEQ ID NO: 282710 - RNA, 32 nt, Human
aaaacauaaaguggagaaaggaaacccuauuc

SEQ ID NO: 282711 - RNA, 32 nt, Human
aaaacauaaccagccauuggcuauuuaaacuu

SEQ ID NO: 282712 - RNA, 32 nt, Human
aaaacauaaucccaacugggugcaguggcuca

SEQ ID NO: 282713 - RNA, 32 nt, Human
aaaacauaaugaauggggucaccuguaagaaa

SEQ ID NO: 282714 - RNA, 32 nt, Human
aaaacauaccuggaucuugcuaucugucaggg

SEQ ID NO: 282715 - RNA, 32 nt, Human
aaaacauaugauccauuaaguuggaguguuua

SEQ ID NO: 282716 - RNA, 32 nt, Human
aaaacaucaacacuaagguuugaugucaugug

SEQ ID NO: 282717 - RNA, 32 nt, Human
aaaacaucacagucuuaucauuuuaggguaaa

SEQ ID NO: 282718 - RNA, 32 nt, Human
aaaacaucagcucgcaagaggcugaggcagga

SEQ ID NO: 282719 - RNA, 32 nt, Human
aaaacaucauguuucaggaaggaacugaaccc

SEQ ID NO: 282720 - RNA, 32 nt, Human
aaaacaucccagagaagggaaauccucuugcu

SEQ ID NO: 282721 - RNA, 32 nt, Human
aaaacaucuuuuccugauggcuggcaggcagu

SEQ ID NO: 282722 - RNA, 32 nt, Human
aaaacaugaaugacugugucugccugucccca

SEQ ID NO: 282723 - RNA, 32 nt, Human
aaaacaugaccuuccacaauccuuagaaucug

SEQ ID NO: 282724 - RNA, 32 nt, Human
aaaacaugcagccuuaagccucagcaaagagc

SEQ ID NO: 282725 - RNA, 32 nt, Human
aaaacaugccuguuguccuggcuuuuuaucca

SEQ ID NO: 282726 - RNA, 32 nt, Human
aaaacaugcuucagaagaacuggcaccccuug

SEQ ID NO: 282727 - RNA, 32 nt, Human
aaaacauggacugaugggucugcuccaggcca

SEQ ID NO: 282728 - RNA, 32 nt, Human
aaaacauggagugcagagacaccaccagguac

SEQ ID NO: 282729 - RNA, 32 nt, Human
aaaacauggccugcuggcuggggagugggaac

SEQ ID NO: 282730 - RNA, 32 nt, Human
aaaacaugucaaaaucaugaccucuuugaaug

SEQ ID NO: 282731 - RNA, 32 nt, Human
aaaacauguuuucuggugcucaucucacaugc

SEQ ID NO: 282732 - RNA, 32 nt, Human
aaaacauuauaggcugggcaugguggcuuacg

SEQ ID NO: 282733 - RNA, 32 nt, Human
aaaacauucaauaacauaccucacccgagagc

SEQ ID NO: 282734 - RNA, 32 nt, Human
aaaacauuccaucuuguaggcaguguuccuca

SEQ ID NO: 282735 - RNA, 32 nt, Human
aaaacauucuucuuuuccugcuggugucaccc

SEQ ID NO: 282736 - RNA, 22 nt, Human
aaaacauugaccuguguguuuu

SEQ ID NO: 282737 - RNA, 32 nt, Human
aaaacauuuaacauaaugguugugaaauguaa

SEQ ID NO: 282738 - RNA, 32 nt, Human
aaaacauuugcugccauuacagagguauuaaa

SEQ ID NO: 282739 - RNA, 32 nt, Human
aaaaccaaaaggauuggguuugauugagcuuc

SEQ ID NO: 282740 - RNA, 32 nt, Human
aaaaccaaacaugcuuauaacauuaagaaaaa

SEQ ID NO: 282741 - RNA, 32 nt, Human
aaaaccaaaccacaagacagacuugcaaaaga

SEQ ID NO: 282742 - RNA, 32 nt, Human
aaaaccaaagauuuccucugagcaacuuucaa

SEQ ID NO: 282743 - RNA, 32 nt, Human
aaaaccaaauguuacugcucaacugaaauaug

SEQ ID NO: 282744 - RNA, 32 nt, Human
aaaaccaagauggggagaagaaaacagcacaa

SEQ ID NO: 282745 - RNA, 32 nt, Human
aaaaccaagcccaggccgggggcgguggcuca

SEQ ID NO: 282746 - RNA, 32 nt, Human
aaaaccaaucaauuacuagaugaguggaugga

SEQ ID NO: 282747 - RNA, 32 nt, Human
aaaaccaauguucuacaacuuggaaaguuuuc

SEQ ID NO: 282748 - RNA, 32 nt, Human
aaaaccacaaaugacaaaaacaaaacggacuc

SEQ ID NO: 282749 - RNA, 32 nt, Human
aaaaccacaaccaccagaaaacaaauaacaaa

SEQ ID NO: 282750 - RNA, 32 nt, Human
aaaaccacauagaaggguaaucccggaaaugc

SEQ ID NO: 282751 - RNA, 32 nt, Human
aaaaccaccaaaaggccagugccucaacucuu

SEQ ID NO: 282752 - RNA, 32 nt, Human
aaaaccaccacccuccagccugggcaacguag

SEQ ID NO: 282753 - RNA, 32 nt, Human
aaaaccacucgccagagcuguggugucagaaa

SEQ ID NO: 282754 - RNA, 32 nt, Human
aaaaccacuguacauuuuuauacagugauaaa

SEQ ID NO: 282755 - RNA, 32 nt, Human
aaaaccacuuuuuccuccugggccucugggcc

SEQ ID NO: 282756 - RNA, 32 nt, Human
aaaaccagaacaagggcucugagauagggucc

SEQ ID NO: 282757 - RNA, 22 nt, Human
aaaaccagagauccaguacaga

SEQ ID NO: 282758 - RNA, 32 nt, Human
aaaaccagccaagaucuguucacacaccucug

SEQ ID NO: 282759 - RNA, 32 nt, Human
aaaaccagccaggcagagguuuuaaugucugu

SEQ ID NO: 282760 - RNA, 23 nt, Human
aaaaccagcccggcgcuggcgga

SEQ ID NO: 282761 - RNA, 32 nt, Human
aaaaccagccugaccaacguggagaaaccucg

SEQ ID NO: 282762 - RNA, 32 nt, Human
aaaaccagccugggcaacauagcaagacccca

SEQ ID NO: 282763 - RNA, 32 nt, Human
aaaaccagccugggcaauauagugagaccgua

SEQ ID NO: 282764 - RNA, 19 nt, Human
aaaaccagcucccuuugga

SEQ ID NO: 282765 - RNA, 32 nt, Human
aaaaccagcuuauuuuccuucuuacggacuca

SEQ ID NO: 282766 - RNA, 22 nt, Human
aaaaccagcuucuggaccugga

SEQ ID NO: 282767 - RNA, 32 nt, Human
aaaaccaggaagagcuuaagagcauauuaaaa

SEQ ID NO: 282768 - RNA, 32 nt, Human
aaaaccaggccuccucacagacugccaagucc

SEQ ID NO: 282769 - RNA, 32 nt, Human
aaaaccaggcugggacagcccccuguuccuga

SEQ ID NO: 282770 - RNA, 32 nt, Human
aaaaccaguuuucugcaacauucaggagccaa

SEQ ID NO: 282771 - RNA, 32 nt, Human
aaaaccauaaacaucaguucuaugggacaauu

SEQ ID NO: 282772 - RNA, 32 nt, Human
aaaaccauaugauugggcugggcauagugguu

SEQ ID NO: 282773 - RNA, 32 nt, Human
aaaaccauccaggucacggggcaccaaauuug

SEQ ID NO: 282774 - RNA, 32 nt, Human
aaaaccaucuguagucagcagcauccuggugg

SEQ ID NO: 282775 - RNA, 32 nt, Human
aaaaccaucuguccucuuugcaauaccacuga

SEQ ID NO: 282776 - RNA, 32 nt, Human
aaaaccaugaaaccacccacacuggagagccg

SEQ ID NO: 282777 - RNA, 32 nt, Human
aaaaccaugaacauuggcuaugaugaagauua

SEQ ID NO: 282778 - RNA, 32 nt, Human
aaaacccaaagaucucacagguccagccacug

SEQ ID NO: 282779 - RNA, 32 nt, Human
aaaacccaccagcccuuugcuuccugcuuccu

SEQ ID NO: 282780 - RNA, 32 nt, Human
aaaacccacuccucccagaauaugcuuagagg

SEQ ID NO: 282781 - RNA, 32 nt, Human
aaaacccagaacucaaguagggcagaaggugg

SEQ ID NO: 282782 - RNA, 32 nt, Human
aaaacccaggaggcagagcuugcagugagccg

SEQ ID NO: 282783 - RNA, 32 nt, Human
aaaacccaggccgauggcugggcacgguggcu

SEQ ID NO: 282784 - RNA, 32 nt, Human
aaaaccccaagugccuggagacccgagcccca

SEQ ID NO: 282785 - RNA, 32 nt, Human
aaaaccccaauacuguuuucugaucuauguac

SEQ ID NO: 282786 - RNA, 32 nt, Human
aaaaccccacaaaaucagcugcaaguaaaucc

SEQ ID NO: 282787 - RNA, 32 nt, Human
aaaaccccaccauucagccuagucaacaacaa

SEQ ID NO: 282788 - RNA, 32 nt, Human
aaaacccccagcucugugccccaugcuccuug

SEQ ID NO: 282789 - RNA, 32 nt, Human
aaaacccccuagucucagcccagaagcuccuu

SEQ ID NO: 282790 - RNA, 32 nt, Human
aaaaccccugcucugcuuuuggccuuggauau

SEQ ID NO: 282791 - RNA, 32 nt, Human
aaaaccccuuccagaaaacauggaugcauuug

SEQ ID NO: 282792 - RNA, 32 nt, Human
aaaacccgaagaggaggcggaccaggagaaga

SEQ ID NO: 282793 - RNA, 32 nt, Human
aaaacccgacuugccccugccugaugcaugua

SEQ ID NO: 282794 - RNA, 29 nt, Human
aaaacccgucuuuaugugccuggaauccc

SEQ ID NO: 282795 - RNA, 32 nt, Human
aaaacccuaacgagguaggagauguuucccug

SEQ ID NO: 282796 - RNA, 32 nt, Human
aaaacccuaccccucucucucccucucucaau

SEQ ID NO: 282797 - RNA, 32 nt, Human
aaaacccuccauccucaagcagucucuucuuu

SEQ ID NO: 282798 - RNA, 32 nt, Human
aaaacccucccgcugccugugucgaaguguag

SEQ ID NO: 282799 - RNA, 32 nt, Human
aaaacccucuacuguggguagugaaccuaggu

SEQ ID NO: 282800 - RNA, 32 nt, Human
aaaacccugacuuuaguuguaaaacaauaaaa

SEQ ID NO: 282801 - RNA, 32 nt, Human
aaaacccugcgcugcccccuuuacagaggcac

SEQ ID NO: 282802 - RNA, 21 nt, Human
aaaacccuucaaggauuacug

SEQ ID NO: 282803 - RNA, 22 nt, Human
aaaacccuucacugauggaugc

SEQ ID NO: 282804 - RNA, 32 nt, Human
aaaacccuuggcucugagucuuguugugaaua

SEQ ID NO: 282805 - RNA, 20 nt, Human
aaaacccuuguagaucugcu

SEQ ID NO: 282806 - RNA, 32 nt, Human
aaaacccuuuccauuggcagaaucuccuuuuu

SEQ ID NO: 282807 - RNA, 22 nt, Human
aaaacccuuugccaaaucugcu

SEQ ID NO: 282808 - RNA, 32 nt, Human
aaaaccgagcuggggcugggagaggacaguua

SEQ ID NO: 282809 - RNA, 32 nt, Human
aaaaccggaauggugaaggugacagcagucgg

SEQ ID NO: 282810 - RNA, 32 nt, Human
aaaaccguccaggaagggaggcugcagccccg

SEQ ID NO: 282811 - RNA, 32 nt, Human
aaaaccgucuccucuaaaaauaccaaaauuag

SEQ ID NO: 282812 - RNA, 32 nt, Human
aaaaccuaacagaaaaacuaaaauuagaggac

SEQ ID NO: 282813 - RNA, 32 nt, Human
aaaaccuaacuuaauaguaugcaccuguaaca

SEQ ID NO: 282814 - RNA, 32 nt, Human
aaaaccuaauccgguuuaagcacagcagguuu

SEQ ID NO: 282815 - RNA, 32 nt, Human
aaaaccuaggaaauaguccacuugcuccuaua

SEQ ID NO: 282816 - RNA, 32 nt, Human
aaaaccuaguugggagugcgaggcagagaacg

SEQ ID NO: 282817 - RNA, 32 nt, Human
aaaaccuaguuucacuccuccccuucuuccau

SEQ ID NO: 282818 - RNA, 32 nt, Human
aaaaccuaucggaagaaggcaagccuccccaa

SEQ ID NO: 282819 - RNA, 32 nt, Human
aaaaccuauguccacacaacacaugaauguga

SEQ ID NO: 282820 - RNA, 32 nt, Human
aaaaccucaaaccggcgccccuugggggccgg

SEQ ID NO: 282821 - RNA, 32 nt, Human
aaaaccucacucuuuccccucccuucuccccu

SEQ ID NO: 282822 - RNA, 32 nt, Human
aaaaccucagaagggaaaacuccaaaccaguu

SEQ ID NO: 282823 - RNA, 32 nt, Human
aaaaccuccaucuggacaccagacaccgcagc

SEQ ID NO: 282824 - RNA, 32 nt, Human
aaaaccuccaucugguaacaaacagcagcuac

SEQ ID NO: 282825 - RNA, 32 nt, Human
aaaaccuccauucugucagggcagaacagagc

SEQ ID NO: 282826 - RNA, 32 nt, Human
aaaaccuccuagaaguuagauuauuugcuacu

SEQ ID NO: 282827 - RNA, 32 nt, Human
aaaaccucgaagauggguauggcacaguucau

SEQ ID NO: 282828 - RNA, 32 nt, Human
aaaaccucucuaaccagcuccccaccucaacc

SEQ ID NO: 282829 - RNA, 32 nt, Human
aaaaccucucucugugacaggaacaguccaaa

SEQ ID NO: 282830 - RNA, 32 nt, Human
aaaaccucucuugccagggaaugggggaaggg

SEQ ID NO: 282831 - RNA, 32 nt, Human
aaaaccugaaaauuaauucagggugaaaaugu

SEQ ID NO: 282832 - RNA, 32 nt, Human
aaaaccugaagggcaggcagagcugcucccga

SEQ ID NO: 282833 - RNA, 32 nt, Human
aaaaccugagacauagucauuccugacauucu

SEQ ID NO: 282834 - RNA, 32 nt, Human
aaaaccugagaggaaggggacaaguagccacc

SEQ ID NO: 282835 - RNA, 32 nt, Human
aaaaccugagcagcaacugugucuuuagagcu

SEQ ID NO: 282836 - RNA, 32 nt, Human
aaaaccugaugcuggggacacagcaucagcuc

SEQ ID NO: 282837 - RNA, 32 nt, Human
aaaaccugcacccauuucaugggugaguuacu

SEQ ID NO: 282838 - RNA, 31 nt, Human
aaaaccugcagaagaacuggcuucgggaauu

SEQ ID NO: 282839 - RNA, 32 nt, Human
aaaaccugccugccugguugggccuucagcug

SEQ ID NO: 282840 - RNA, 31 nt, Human
aaaaccugcgagacagggccugugcacgagu

SEQ ID NO: 282841 - RNA, 32 nt, Human
aaaaccugcuccauguauggaccuggaaggcc

SEQ ID NO: 282842 - RNA, 32 nt, Human
aaaaccugcugggugggcucuuuccccgcgag

SEQ ID NO: 282843 - RNA, 20 nt, Human
aaaaccugcuucucuucuca

SEQ ID NO: 282844 - RNA, 32 nt, Human
aaaaccugcuuugcacaauccuauuugaugcc

SEQ ID NO: 282845 - RNA, 32 nt, Human
aaaaccuuaaaguugugcuguuccuaaacuag

SEQ ID NO: 282846 - RNA, 32 nt, Human
aaaaccuuccagccuugccugcuuggugucca

SEQ ID NO: 282847 - RNA, 32 nt, Human
aaaaccuuccuugagcugccaugcuuuucccc

SEQ ID NO: 282848 - RNA, 32 nt, Human
aaaaccuuucaucacagagauucaucucagca

SEQ ID NO: 282849 - RNA, 32 nt, Human
aaaaccuuugagguagaccaggauuucuaauc

SEQ ID NO: 282850 - RNA, 32 nt, Human
aaaaccuuugcaucuucugauagucuagccaa

SEQ ID NO: 282851 - RNA, 32 nt, Human
aaaaccuuugucaggcugggcgcgguggcuca

SEQ ID NO: 282852 - RNA, 24 nt, Human
aaaaccuuugucccucaguuccag

SEQ ID NO: 282853 - RNA, 32 nt, Human
aaaaccuuuuacuauaugaaacuuuacaacac

SEQ ID NO: 282854 - RNA, 32 nt, Human
aaaacgaaaagcuucuuccuccaagagcccau

SEQ ID NO: 282855 - RNA, 32 nt, Human
aaaacgaaaagcuugaaggacugggagaugug

SEQ ID NO: 282856 - RNA, 32 nt, Human
aaaacgaaccaacagaccaggcaucagcacaa

SEQ ID NO: 282857 - RNA, 32 nt, Human
aaaacgaacgaaggacaacaagaaguggauga

SEQ ID NO: 282858 - RNA, 32 nt, Human
aaaacgaccacugaaaacaaugccgguggcaa

SEQ ID NO: 282859 - RNA, 32 nt, Human
aaaacgacuguggcuugauguugauacacauu

SEQ ID NO: 282860 - RNA, 32 nt, Human
aaaacgaucccaaggaaagaugauuuguaugu

SEQ ID NO: 282861 - RNA, 32 nt, Human
aaaacgauucuagcucuggcucugucauuggc

SEQ ID NO: 282862 - RNA, 32 nt, Human
aaaacgcaaaccuaacuugcucugcuuguuuu

SEQ ID NO: 282863 - RNA, 32 nt, Human
aaaacgcaagggaaguuucauuccauuuauac

SEQ ID NO: 282864 - RNA, 32 nt, Human
aaaacgcacaugcucugccauccacaccgccu

SEQ ID NO: 282865 - RNA, 32 nt, Human
aaaacgcagucacugguguuucuugaauugcu

SEQ ID NO: 282866 - RNA, 32 nt, Human
aaaacgcucagaauuucacacugugaauccac

SEQ ID NO: 282867 - RNA, 32 nt, Human
aaaacgcugcuggcuggagccaccucccuccc

SEQ ID NO: 282868 - RNA, 32 nt, Human
aaaacgcuuccaucuuuauccagagguaauca

SEQ ID NO: 282869 - RNA, 32 nt, Human
aaaacgcuuccucuugcagugcagaugggaug

SEQ ID NO: 282870 - RNA, 32 nt, Human
aaaacggaaagugccucccggacccccagagg

SEQ ID NO: 282871 - RNA, 32 nt, Human
aaaacggcggguggguggaggaugcggugcgc

SEQ ID NO: 282872 - RNA, 32 nt, Human
aaaacgggagcuauuucacagagcugagcuuc

SEQ ID NO: 282873 - RNA, 32 nt, Human
aaaacggggcacccacucccaccuccaucugu

SEQ ID NO: 282874 - RNA, 32 nt, Human
aaaacggggugagcugaguagcuggguuucug

SEQ ID NO: 282875 - RNA, 32 nt, Human
aaaacggucaugcugucccaggagaggauccu

SEQ ID NO: 282876 - RNA, 32 nt, Human
aaaacguacuuucuccccacuaguuuacacca

SEQ ID NO: 282877 - RNA, 32 nt, Human
aaaacguccugauauuuaaagaacaaagcauc

SEQ ID NO: 282878 - RNA, 32 nt, Human
aaaacgugaagagcgagagaucaaagaaagaa

SEQ ID NO: 282879 - RNA, 32 nt, Human
aaaacguuucuucaccuuuuauuuaccauuca

SEQ ID NO: 282880 - RNA, 32 nt, Human
aaaacuaaaaaccaaacacaccaccuuccuug

SEQ ID NO: 282881 - RNA, 32 nt, Human
aaaacuaaaaauaggcugggcgugguggcuca

SEQ ID NO: 282882 - RNA, 32 nt, Human
aaaacuaacaaccaaccaaccaaccaaccaac

SEQ ID NO: 282883 - RNA, 32 nt, Human
aaaacuaagaaauaacugaaugcugaaaaaua

SEQ ID NO: 282884 - RNA, 32 nt, Human
aaaacuaauuuccaaaauauaagcuguuuuca

SEQ ID NO: 282885 - RNA, 32 nt, Human
aaaacuaauuuuucugccuuuuaccaaaaaua

SEQ ID NO: 282886 - RNA, 32 nt, Human
aaaacuacaauucccagcauuccuguggugcc

SEQ ID NO: 282887 - RNA, 32 nt, Human
aaaacuacacgggcuucagagcaggguucaag

SEQ ID NO: 282888 - RNA, 32 nt, Human
aaaacuacauacuuggacaucuguaaaucuuu

SEQ ID NO: 282889 - RNA, 32 nt, Human
aaaacuaccagaccugaauuugcucaugugua

SEQ ID NO: 282890 - RNA, 32 nt, Human
aaaacuagagccuuugccagugcuaaaagucu

SEQ ID NO: 282891 - RNA, 32 nt, Human
aaaacuaggguuuuaaaaguaucuucuaaaaa

SEQ ID NO: 282892 - RNA, 23 nt, Human
aaaacuaguuuccaagugccaag

SEQ ID NO: 282893 - RNA, 32 nt, Human
aaaacuauacauuuagaauggagcaguuuaau

SEQ ID NO: 282894 - RNA, 32 nt, Human
aaaacuauagggaugaagaacagaucaguugu

SEQ ID NO: 282895 - RNA, 32 nt, Human
aaaacuauaguccuauacaaaaauuagcuggg

SEQ ID NO: 282896 - RNA, 32 nt, Human
aaaacuaugaugucacucaccauucugauaau

SEQ ID NO: 282897 - RNA, 32 nt, Human
aaaacuauggagaugguaaaaagagaaaagga

SEQ ID NO: 282898 - RNA, 32 nt, Human
aaaacuauuaguaauagcuauuugggaccaga

SEQ ID NO: 282899 - RNA, 32 nt, Human
aaaacuauugcagaaaauaguggauuuuggau

SEQ ID NO: 282900 - RNA, 32 nt, Human
aaaacuauugguuuguuauucuguguuuuccu

SEQ ID NO: 282901 - RNA, 32 nt, Human
aaaacuauuuuggaucccagcacuuugggaag

SEQ ID NO: 282902 - RNA, 32 nt, Human
aaaacucaacaucaaaugcucugaugugcuau

SEQ ID NO: 282903 - RNA, 32 nt, Human
aaaacucaagcuuggcucuaaguguuuccuug

SEQ ID NO: 282904 - RNA, 32 nt, Human
aaaacucaaguuagaagcauaccauuuuccuu

SEQ ID NO: 282905 - RNA, 32 nt, Human
aaaacucacagaacuauguacuuuaaaaagau

SEQ ID NO: 282906 - RNA, 32 nt, Human
aaaacucaccuuaaaauuugagcaggucguug

SEQ ID NO: 282907 - RNA, 32 nt, Human
aaaacucacgccccaaacaaaacgcaaggaga

SEQ ID NO: 282908 - RNA, 32 nt, Human
aaaacucacuauggcaugcuucccuccuggug

SEQ ID NO: 282909 - RNA, 32 nt, Human
aaaacucaggaguucaagaccagccuaggcaa

SEQ ID NO: 282910 - RNA, 32 nt, Human
aaaacuccaugggggcugggcgugguggcuca

SEQ ID NO: 282911 - RNA, 32 nt, Human
aaaacuccucaaguagcuuccuuaaaauguca

SEQ ID NO: 282912 - RNA, 32 nt, Human
aaaacuccucuuuugggggcucaggggcagga

SEQ ID NO: 282913 - RNA, 32 nt, Human
aaaacuccugaaguuuugcuuccccuucuaua

SEQ ID NO: 282914 - RNA, 32 nt, Human
aaaacuccuguaucuaaagaaauacgguuggg

SEQ ID NO: 282915 - RNA, 32 nt, Human
aaaacuccuugcaaguguucgagcuuuggauc

SEQ ID NO: 282916 - RNA, 32 nt, Human
aaaacucgcugcugccccaaccuggcuugaca

SEQ ID NO: 282917 - RNA, 32 nt, Human
aaaacucguagaugccagagacaggagucgaa

SEQ ID NO: 282918 - RNA, 32 nt, Human
aaaacucuaggaacagauggcuucacugaagu

SEQ ID NO: 282919 - RNA, 32 nt, Human
aaaacucucaguuguuuauuauccugaucaag

SEQ ID NO: 282920 - RNA, 32 nt, Human
aaaacucuccacucuccuccccuagaugccau

SEQ ID NO: 282921 - RNA, 32 nt, Human
aaaacucugaggaaggagauucugcuaguaaa

SEQ ID NO: 282922 - RNA, 32 nt, Human
aaaacucugcagcauuaaacaacguguaugca

SEQ ID NO: 282923 - RNA, 32 nt, Human
aaaacucuucccuuggagagucacuguucacc

SEQ ID NO: 282924 - RNA, 32 nt, Human
aaaacucuuggcuaauugacccacguugcuua

SEQ ID NO: 282925 - RNA, 32 nt, Human
aaaacucuuucauuuaauucaaaugcuauuuu

SEQ ID NO: 282926 - RNA, 32 nt, Human
aaaacugaaagccacuggauccuggucuagcu

SEQ ID NO: 282927 - RNA, 32 nt, Human
aaaacugaaauucccuguucuaguuccuaaca

SEQ ID NO: 282928 - RNA, 32 nt, Human
aaaacugaagacauagaggacucagaucaaag

SEQ ID NO: 282929 - RNA, 32 nt, Human
aaaacugaagauggaaguuuuggccggugcuc

SEQ ID NO: 282930 - RNA, 32 nt, Human
aaaacugaauuugcuuaacacugcuacauaau

SEQ ID NO: 282931 - RNA, 32 nt, Human
aaaacugacagagaaguaauaaaccuauugau

SEQ ID NO: 282932 - RNA, 32 nt, Human
aaaacugacauagagaaaaggcuggagagaga

SEQ ID NO: 282933 - RNA, 32 nt, Human
aaaacugacguccacaugaaaccugcaggcca

SEQ ID NO: 282934 - RNA, 32 nt, Human
aaaacugagacucagacaggaaagggaaggcc

SEQ ID NO: 282935 - RNA, 32 nt, Human
aaaacugagacucucacuuugugaauucacug

SEQ ID NO: 282936 - RNA, 32 nt, Human
aaaacugaggccaccugguucaacaucaccuu

SEQ ID NO: 282937 - RNA, 32 nt, Human
aaaacugagguggucagguucaucucuucaaa

SEQ ID NO: 282938 - RNA, 32 nt, Human
aaaacugauggugacagaggaauauauugacu

SEQ ID NO: 282939 - RNA, 32 nt, Human
aaaacugcaacuuguaaaugugguaaagaguu

SEQ ID NO: 282940 - RNA, 32 nt, Human
aaaacugcaaugcugggaaaagaaggaaacau

SEQ ID NO: 282941 - RNA, 32 nt, Human
aaaacugcagugagccaugguugcaccacugc

SEQ ID NO: 282942 - RNA, 32 nt, Human
aaaacugcccugcuggagugguucugaaccug

SEQ ID NO: 282943 - RNA, 32 nt, Human
aaaacugccucaccugagacaagugccugcug

SEQ ID NO: 282944 - RNA, 32 nt, Human
aaaacugccuuaaaauauucauaguuaauaca

SEQ ID NO: 282945 - RNA, 32 nt, Human
aaaacugcuagugccaguuuucuuguuugccu

SEQ ID NO: 282946 - RNA, 32 nt, Human
aaaacugcuaguggagucacagacacacucug

SEQ ID NO: 282947 - RNA, 32 nt, Human
aaaacugcuaucucuaauacgguaccaauccu

SEQ ID NO: 282948 - RNA, 32 nt, Human
aaaacugcugacuguuuucucuugagagggug

SEQ ID NO: 282949 - RNA, 32 nt, Human
aaaacugcugcggccuuccaacuccugguauc

SEQ ID NO: 282950 - RNA, 32 nt, Human
aaaacugcuggguuuuguauuaauuaaauuau

SEQ ID NO: 282951 - RNA, 32 nt, Human
aaaacugcuugccugugguagacaccugcaug

SEQ ID NO: 282952 - RNA, 32 nt, Human
aaaacuggaaacaucugauuucugaacuauca

SEQ ID NO: 282953 - RNA, 32 nt, Human
aaaacuggaacggugaaggugacagcagucgg

SEQ ID NO: 282954 - RNA, 32 nt, Human
aaaacuggaagagaccagauagguacagaacu

SEQ ID NO: 282955 - RNA, 32 nt, Human
aaaacuggacaggccaggcaugguggcucaug

SEQ ID NO: 282956 - RNA, 32 nt, Human
aaaacuggaccuguaauuuggccaugggaaga

SEQ ID NO: 282957 - RNA, 32 nt, Human
aaaacuggagaaacaaauauccugccaccucu

SEQ ID NO: 282958 - RNA, 32 nt, Human
aaaacugggggugggaguagggagcuaguuug

SEQ ID NO: 282959 - RNA, 32 nt, Human
aaaacugguaacaggcugggugcaauggcuca

SEQ ID NO: 282960 - RNA, 32 nt, Human
aaaacuggucauuuuucucaaacuacagagug

SEQ ID NO: 282961 - RNA, 32 nt, Human
aaaacugguguuuucuaaagaaacaggauagg

SEQ ID NO: 282962 - RNA, 32 nt, Human
aaaacuguagaggcacgaaacagauucauggu

SEQ ID NO: 282963 - RNA, 24 nt, Human
aaaacuguccugcucagugccaag

SEQ ID NO: 282964 - RNA, 32 nt, Human
aaaacugugauccaguugagccacuuuguccc

SEQ ID NO: 282965 - RNA, 32 nt, Human
aaaacuguggcaagaaaaauguaaugagcaau

SEQ ID NO: 282966 - RNA, 32 nt, Human
aaaacuguuacccguggugugcagagcguccu

SEQ ID NO: 282967 - RNA, 32 nt, Human
aaaacuguugcugcacacaucuguacucguca

SEQ ID NO: 282968 - RNA, 32 nt, Human
aaaacuguuucuucuauuccugguucauagga

SEQ ID NO: 282969 - RNA, 32 nt, Human
aaaacuguuuuuaucuaagauauuugacuuaa

SEQ ID NO: 282970 - RNA, 32 nt, Human
aaaacuuaaagaaaggaaggcugggcauuguu

SEQ ID NO: 282971 - RNA, 32 nt, Human
aaaacuuaacauauuuacuaagccacaagaaa

SEQ ID NO: 282972 - RNA, 32 nt, Human
aaaacuuacaagucaagccuagccugauaauc

SEQ ID NO: 282973 - RNA, 32 nt, Human
aaaacuuaccucuugcacuaucaugccuugaa

SEQ ID NO: 282974 - RNA, 32 nt, Human
aaaacuuaggacaggauguccccaaauuaaga

SEQ ID NO: 282975 - RNA, 32 nt, Human
aaaacuuaguccuaaucccagcacuuugggag

SEQ ID NO: 282976 - RNA, 32 nt, Human
aaaacuuaguccucucaguuccccagaaucau

SEQ ID NO: 282977 - RNA, 32 nt, Human
aaaacuuaguguggcaucagcaccaacagcac

SEQ ID NO: 282978 - RNA, 32 nt, Human
aaaacuuauuccagguauuaaagguuaaauug

SEQ ID NO: 282979 - RNA, 32 nt, Human
aaaacuucacacuuguuaccauuuagaaguuu

SEQ ID NO: 282980 - RNA, 32 nt, Human
aaaacuucacuugcuuggauuaggcaaggcuc

SEQ ID NO: 282981 - RNA, 32 nt, Human
aaaacuucagcacagaaauagauguggacuuu

SEQ ID NO: 282982 - RNA, 32 nt, Human
aaaacuucaguuauagaaguguuucaaggcua

SEQ ID NO: 282983 - RNA, 32 nt, Human
aaaacuuccccugacagaggguggcagcccca

SEQ ID NO: 282984 - RNA, 32 nt, Human
aaaacuuccuuucugagaaguuaguguuaagg

SEQ ID NO: 282985 - RNA, 32 nt, Human
aaaacuucucucuguuugccugccuccaacag

SEQ ID NO: 282986 - RNA, 31 nt, Human
aaaacuugacauaccuaacauuuaaaauugu

SEQ ID NO: 282987 - RNA, 32 nt, Human
aaaacuugacccugccugcaccaaaggauucu

SEQ ID NO: 282988 - RNA, 32 nt, Human
aaaacuugauguaaauuguaccaaugaauacg

SEQ ID NO: 282989 - RNA, 32 nt, Human
aaaacuuggauggccucaaaagguucuugaac

SEQ ID NO: 282990 - RNA, 32 nt, Human
aaaacuuggucaucuucacuguguuaucuuua

SEQ ID NO: 282991 - RNA, 32 nt, Human
aaaacuuguaacagcagcaucuugccugcaaa

SEQ ID NO: 282992 - RNA, 22 nt, Human
aaaacuuguguuuguguguuuu

SEQ ID NO: 282993 - RNA, 24 nt, Human
aaaacuuuaauacuaaaagcacuu

SEQ ID NO: 282994 - RNA, 32 nt, Human
aaaacuuuagaugauaaaauuagccgggcgug

SEQ ID NO: 282995 - RNA, 32 nt, Human
aaaacuuuaguaaacccuaaguaaagucaaaa

SEQ ID NO: 282996 - RNA, 31 nt, Human
aaaacuuuaguacuuuuccaugcagauuugu

SEQ ID NO: 282997 - RNA, 32 nt, Human
aaaacuuuccuacugcuucaguugaaggaaaa

SEQ ID NO: 282998 - RNA, 32 nt, Human
aaaacuuucuauaaugccuuauuugaauguua

SEQ ID NO: 282999 - RNA, 19 nt, Human
aaaacuuugggagucccag

SEQ ID NO: 283000 - RNA, 32 nt, Human
aaaacuuuuugaagaagcaccccucuuucaug

SEQ ID NO: 283001 - RNA, 32 nt, Human
aaaagaaaaagaaagaaagaaagaaaaagaaa

SEQ ID NO: 283002 - RNA, 32 nt, Human
aaaagaaaaaucaagacacaucauaggacuaa

SEQ ID NO: 283003 - RNA, 32 nt, Human
aaaagaaaaauguaggcaucauagccauucag

SEQ ID NO: 283004 - RNA, 32 nt, Human
aaaagaaaacucaggaaacagaucuuggggga

SEQ ID NO: 283005 - RNA, 32 nt, Human
aaaagaaaagaaaagaaagagaaaagaaaaga

SEQ ID NO: 283006 - RNA, 32 nt, Human
aaaagaaaauagaauguggccacuucacuauc

SEQ ID NO: 283007 - RNA, 32 nt, Human
aaaagaaacugaaagugucugccugggauaaa

SEQ ID NO: 283008 - RNA, 32 nt, Human
aaaagaaacugacaugguaauuuggauagggu

SEQ ID NO: 283009 - RNA, 32 nt, Human
aaaagaaacuuaggaauacagaguaagcauuu

SEQ ID NO: 283010 - RNA, 32 nt, Human
aaaagaaagaagccagaaaauauuaucaaccc

SEQ ID NO: 283011 - RNA, 32 nt, Human
aaaagaaagauaaaacacaggucaccaauuuu

SEQ ID NO: 283012 - RNA, 32 nt, Human
aaaagaaagcagcuuguuuugaaagaagaaac

SEQ ID NO: 283013 - RNA, 32 nt, Human
aaaagaaagcaggaagguggguaaauaaaaau

SEQ ID NO: 283014 - RNA, 32 nt, Human
aaaagaaagccaaaccacuguacuuauauuug

SEQ ID NO: 283015 - RNA, 32 nt, Human
aaaagaaaggaaagcugccuuggcagaaggau

SEQ ID NO: 283016 - RNA, 32 nt, Human
aaaagaaaugaaguacucacacaugccacaac

SEQ ID NO: 283017 - RNA, 32 nt, Human
aaaagaaaugaguaugcuacuauagggagagu

SEQ ID NO: 283018 - RNA, 32 nt, Human
aaaagaaauucacugucuuuuaauagugauuu

SEQ ID NO: 283019 - RNA, 32 nt, Human
aaaagaacaaagauaaaccagccucaaucccg

SEQ ID NO: 283020 - RNA, 32 nt, Human
aaaagaacagaacuuugcccacugcacacuug

SEQ ID NO: 283021 - RNA, 32 nt, Human
aaaagaacagcaggugcagccagcucuagaca

SEQ ID NO: 283022 - RNA, 32 nt, Human
aaaagaacaggcugggauuacaggcgugagcc

SEQ ID NO: 283023 - RNA, 32 nt, Human
aaaagaacauuagaguauagaucaugugaaau

SEQ ID NO: 283024 - RNA, 32 nt, Human
aaaagaaccagcugccuccaggcagccagccc

SEQ ID NO: 283025 - RNA, 32 nt, Human
aaaagaaccaucaacacaagugacaugucaua

SEQ ID NO: 283026 - RNA, 32 nt, Human
aaaagaacugcaaucacuacuccaaacuuuaa

SEQ ID NO: 283027 - RNA, 32 nt, Human
aaaagaagaaagacacaaagaaaauaaucuaa

SEQ ID NO: 283028 - RNA, 32 nt, Human
aaaagaagaaguagaugaugaggcagauagca

SEQ ID NO: 283029 - RNA, 32 nt, Human
aaaagaagaccagcauggcugaagcgagcccu

SEQ ID NO: 283030 - RNA, 32 nt, Human
aaaagaagacccagagagugucacuccucuuu

SEQ ID NO: 283031 - RNA, 32 nt, Human
aaaagaagagacauuaagaguuccugaaauuu

SEQ ID NO: 283032 - RNA, 32 nt, Human
aaaagaagagagggaggaagaaagggagagag

SEQ ID NO: 283033 - RNA, 32 nt, Human
aaaagaagagcaagagaaagagaaacaaaaau

SEQ ID NO: 283034 - RNA, 32 nt, Human
aaaagaagagccucuuucugcagccgacuuag

SEQ ID NO: 283035 - RNA, 32 nt, Human
aaaagaagaggaggaggagagcgacgggacgg

SEQ ID NO: 283036 - RNA, 32 nt, Human
aaaagaagagggcucaggacaaggcccugagg

SEQ ID NO: 283037 - RNA, 32 nt, Human
aaaagaagauucaggcccugagaggucucagc

SEQ ID NO: 283038 - RNA, 32 nt, Human
aaaagaagccugggcggagagcagagcccgac

SEQ ID NO: 283039 - RNA, 32 nt, Human
aaaagaagcugguuuucaucugcuguaugugc

SEQ ID NO: 283040 - RNA, 32 nt, Human
aaaagaaggaaaaugaguuucccuugaggcaa

SEQ ID NO: 283041 - RNA, 31 nt, Human
aaaagaaggaagagagaaggaagaauggcaa

SEQ ID NO: 283042 - RNA, 32 nt, Human
aaaagaaggaagagagaaggaagaauggcaaa

SEQ ID NO: 283043 - RNA, 32 nt, Human
aaaagaaggagggagagagggaggaaggaaga

SEQ ID NO: 283044 - RNA, 32 nt, Human
aaaagaagguaccagaucugugcacuggggcg

SEQ ID NO: 283045 - RNA, 32 nt, Human
aaaagaaguauguaacccacugugcugucaag

SEQ ID NO: 283046 - RNA, 32 nt, Human
aaaagaaguucagacacuucuggaaaugaagc

SEQ ID NO: 283047 - RNA, 32 nt, Human
aaaagaaguuuggaaucggauucacaggaucu

SEQ ID NO: 283048 - RNA, 32 nt, Human
aaaagaaguuuucaguucugaagaagucauuu

SEQ ID NO: 283049 - RNA, 32 nt, Human
aaaagaauaaagacauuccuggaaucacuccu

SEQ ID NO: 283050 - RNA, 32 nt, Human
aaaagaauaucugaccaucacagagauccaga

SEQ ID NO: 283051 - RNA, 32 nt, Human
aaaagaauauugaggcugggugcaaugcauca

SEQ ID NO: 283052 - RNA, 32 nt, Human
aaaagaaucugcauccuggaaaccagaagaaa

SEQ ID NO: 283053 - RNA, 32 nt, Human
aaaagaaugaaggauauauacacaucaaaugu

SEQ ID NO: 283054 - RNA, 32 nt, Human
aaaagaaugauggcaaaaugugcauaacauua

SEQ ID NO: 283055 - RNA, 32 nt, Human
aaaagaauggugacucauuuggacucuuaucu

SEQ ID NO: 283056 - RNA, 32 nt, Human
aaaagaauugaaugaaaagucaggagaucaga

SEQ ID NO: 283057 - RNA, 32 nt, Human
aaaagacacauuccagaagcucaccaggcuac

SEQ ID NO: 283058 - RNA, 32 nt, Human
aaaagacaccaucuaugaaccaggaagcaggg

SEQ ID NO: 283059 - RNA, 32 nt, Human
aaaagacagaggagagaagcaagagacaaccc

SEQ ID NO: 283060 - RNA, 32 nt, Human
aaaagacagcgugggcugggcgugguggcuca

SEQ ID NO: 283061 - RNA, 32 nt, Human
aaaagacagggugggagggaggagggagugcu

SEQ ID NO: 283062 - RNA, 24 nt, Human
aaaagacaguugugaaucuaauca

SEQ ID NO: 283063 - RNA, 32 nt, Human
aaaagacaguuuaaaaggcauggauuuuggua

SEQ ID NO: 283064 - RNA, 32 nt, Human
aaaagacaucggucaguaacgagcacgaugug

SEQ ID NO: 283065 - RNA, 32 nt, Human
aaaagacaucggucaguacgagcacgaugugg

SEQ ID NO: 283066 - RNA, 32 nt, Human
aaaagaccaacuuuauuuuaacaaugucauau

SEQ ID NO: 283067 - RNA, 32 nt, Human
aaaagaccaagggccagcauugcuacuuuugu

SEQ ID NO: 283068 - RNA, 32 nt, Human
aaaagaccacauacccagcacccaugaaauaa

SEQ ID NO: 283069 - RNA, 32 nt, Human
aaaagaccaccuuucuccccugagaggagcuu

SEQ ID NO: 283070 - RNA, 32 nt, Human
aaaagaccagcuggucccagauucgcugcugg

SEQ ID NO: 283071 - RNA, 32 nt, Human
aaaagacccuuuccucucagguuucuuuuaaa

SEQ ID NO: 283072 - RNA, 32 nt, Human
aaaagaccucagggaaccucucccuggaaaga

SEQ ID NO: 283073 - RNA, 32 nt, Human
aaaagaccuuaguaguuugcaggcuggaccuu

SEQ ID NO: 283074 - RNA, 32 nt, Human
aaaagaccuuuggagcaaagcugaugacaacu

SEQ ID NO: 283075 - RNA, 29 nt, Human
aaaagacgcuuuccucuccuccuuuagag

SEQ ID NO: 283076 - RNA, 32 nt, Human
aaaagacgugccuuaaggaacccgccgcgugc

SEQ ID NO: 283077 - RNA, 32 nt, Human
aaaagacuagacaauuacuauguggucauucu

SEQ ID NO: 283078 - RNA, 32 nt, Human
aaaagacucaaagggacagagcacagacuggc

SEQ ID NO: 283079 - RNA, 32 nt, Human
aaaagacucaccaaguaaaaucgcguuucuga

SEQ ID NO: 283080 - RNA, 32 nt, Human
aaaagacucagaaaauuccccucgcaugacau

SEQ ID NO: 283081 - RNA, 32 nt, Human
aaaagacucagaggagagagauaaggaaggaa

SEQ ID NO: 283082 - RNA, 32 nt, Human
aaaagacucagcccugccuccgggaacucaca

SEQ ID NO: 283083 - RNA, 24 nt, Human
aaaagacucaguuccacccagcca

SEQ ID NO: 283084 - RNA, 22 nt, Human
aaaagacuccaggaccccgcca

SEQ ID NO: 283085 - RNA, 32 nt, Human
aaaagacucccugugguguucagaaucacucc

SEQ ID NO: 283086 - RNA, 32 nt, Human
aaaagacuccuacgaagaacuguuuuuguuuu

SEQ ID NO: 283087 - RNA, 32 nt, Human
aaaagacuccugguuccccuguugauuuguga

SEQ ID NO: 283088 - RNA, 32 nt, Human
aaaagacucuuauuucggcuuuaaucacagaa

SEQ ID NO: 283089 - RNA, 32 nt, Human
aaaagacugcagcugcugaaguucugagccgg

SEQ ID NO: 283090 - RNA, 32 nt, Human
aaaagacuggaaggggaaaggaagggaaggga

SEQ ID NO: 283091 - RNA, 32 nt, Human
aaaagacugugcaaccugaaacccaggaaagc

SEQ ID NO: 283092 - RNA, 32 nt, Human
aaaagacuuggccuuggcugggcaugguggcu

SEQ ID NO: 283093 - RNA, 32 nt, Human
aaaagagaaaacaggcugggcccgguggcuca

SEQ ID NO: 283094 - RNA, 32 nt, Human
aaaagagaaagaggagaagaagaaugaugagc

SEQ ID NO: 283095 - RNA, 32 nt, Human
aaaagagaaagcccacagaagaggugcuccac

SEQ ID NO: 283096 - RNA, 32 nt, Human
aaaagagaaaugcaggaagcucagggggcagu

SEQ ID NO: 283097 - RNA, 32 nt, Human
aaaagagaagagucacaggaagcucaucuccu

SEQ ID NO: 283098 - RNA, 32 nt, Human
aaaagagaagauguuugacuugcucaaaguca

SEQ ID NO: 283099 - RNA, 32 nt, Human
aaaagagaaggggagagcgaggggacgagagc

SEQ ID NO: 283100 - RNA, 32 nt, Human
aaaagagaagugaagcagugucucacaggguc

SEQ ID NO: 283101 - RNA, 32 nt, Human
aaaagagaaucucauuggcccaccucaucgcu

SEQ ID NO: 283102 - RNA, 32 nt, Human
aaaagagaaugagccaguggcaugagaucagu

SEQ ID NO: 283103 - RNA, 32 nt, Human
aaaagagacaaaugaagccacagggaaaguga

SEQ ID NO: 283104 - RNA, 32 nt, Human
aaaagagacuagaggagcaggagaaggagcag

SEQ ID NO: 283105 - RNA, 32 nt, Human
aaaagagagaaaaggaacagcaggaagagaag

SEQ ID NO: 283106 - RNA, 32 nt, Human
aaaagagagaaagagaaaggaaugcugguuua

SEQ ID NO: 283107 - RNA, 32 nt, Human
aaaagagagagggagaggaagggcugaaagcc

SEQ ID NO: 283108 - RNA, 32 nt, Human
aaaagagagaugggaucccacuauauugcaca

SEQ ID NO: 283109 - RNA, 32 nt, Human
aaaagagagcacgccuuccgaagaacccucau

SEQ ID NO: 283110 - RNA, 32 nt, Human
aaaagagagcauugucguucucagccaugugc

SEQ ID NO: 283111 - RNA, 32 nt, Human
aaaagagaggaagugagaaaaggggugaggaa

SEQ ID NO: 283112 - RNA, 32 nt, Human
aaaagagaggggaacaggaguccccaggugag

SEQ ID NO: 283113 - RNA, 32 nt, Human
aaaagagaugggaacgaggcagaggaaauaga

SEQ ID NO: 283114 - RNA, 32 nt, Human
aaaagagcaaacacuggggaucaaauuauuuu

SEQ ID NO: 283115 - RNA, 23 nt, Human
aaaagagcacuucccugcugggg

SEQ ID NO: 283116 - RNA, 32 nt, Human
aaaagagcaguuuuaauaacuuuaaaaguacu

SEQ ID NO: 283117 - RNA, 32 nt, Human
aaaagagccacaacuuccccagcuucuccagc

SEQ ID NO: 283118 - RNA, 32 nt, Human
aaaagagccagccucuucccccugggcuucgg

SEQ ID NO: 283119 - RNA, 32 nt, Human
aaaagagcccaugaagaugacaucaccgggga

SEQ ID NO: 283120 - RNA, 32 nt, Human
aaaagagccugggaccuuucucccguuucccu

SEQ ID NO: 283121 - RNA, 32 nt, Human
aaaagagcuacuuaugaguaucaaguauggaa

SEQ ID NO: 283122 - RNA, 32 nt, Human
aaaagagcugccaucauggcccagggaggcgg

SEQ ID NO: 283123 - RNA, 32 nt, Human
aaaagaggaaaucuuucaaacauggcugaagc

SEQ ID NO: 283124 - RNA, 32 nt, Human
aaaagaggagcagacaggguucccugggccca

SEQ ID NO: 283125 - RNA, 32 nt, Human
aaaagaggaggaggaggaggaagaaagaaaac

SEQ ID NO: 283126 - RNA, 32 nt, Human
aaaagaggaguccaugauggaggcagagguaa

SEQ ID NO: 283127 - RNA, 32 nt, Human
aaaagaggauugugauguaucacuggacccag

SEQ ID NO: 283128 - RNA, 32 nt, Human
aaaagaggcaccguguaaagaaaauggcaaaa

SEQ ID NO: 283129 - RNA, 32 nt, Human
aaaagaggcgauuccccagacacccagugaga

SEQ ID NO: 283130 - RNA, 32 nt, Human
aaaagaggcugcuagugguggagaugaagugu

SEQ ID NO: 283131 - RNA, 32 nt, Human
aaaagaggcuuuuauucuuuuccauaguuuag

SEQ ID NO: 283132 - RNA, 32 nt, Human
aaaagagggagcugccuucaauguauaaagua

SEQ ID NO: 283133 - RNA, 31 nt, Human
aaaagagggguaccuguuuucauuugaaaac

SEQ ID NO: 283134 - RNA, 32 nt, Human
aaaagaggugugaggcagcuguucagcccuuc

SEQ ID NO: 283135 - RNA, 20 nt, Human
aaaagagguguuuuguacuu

SEQ ID NO: 283136 - RNA, 32 nt, Human
aaaagagguuuccaggaugcagauuaggucau

SEQ ID NO: 283137 - RNA, 32 nt, Human
aaaagagguuuuggucauuugcuuuauuuuau

SEQ ID NO: 283138 - RNA, 32 nt, Human
aaaagaguaggaaaagacaaaggguggaaagc

SEQ ID NO: 283139 - RNA, 32 nt, Human
aaaagagucaucuguauuuuaaugccacuggu

SEQ ID NO: 283140 - RNA, 32 nt, Human
aaaagaguccaggacauugucugucugccuuc

SEQ ID NO: 283141 - RNA, 32 nt, Human
aaaagaguccuuaccaauagcaggggcugcag

SEQ ID NO: 283142 - RNA, 32 nt, Human
aaaagagugccuuugguuaaugguuagcaagc

SEQ ID NO: 283143 - RNA, 32 nt, Human
aaaagaguggguggaugaaaagggcccuuuuu

SEQ ID NO: 283144 - RNA, 32 nt, Human
aaaagagugggugggaagacuagugaaaccca

SEQ ID NO: 283145 - RNA, 32 nt, Human
aaaagauaaacaguuuagcccaucucuccaga

SEQ ID NO: 283146 - RNA, 32 nt, Human
aaaagauaaguucugcaaucuucuuucucuua

SEQ ID NO: 283147 - RNA, 32 nt, Human
aaaagauaaucuaucuugaauauuucauaugu

SEQ ID NO: 283148 - RNA, 32 nt, Human
aaaagauacagauuuggugaauuuguuacugu

SEQ ID NO: 283149 - RNA, 32 nt, Human
aaaagauaccauugaucauacauuuucucaac

SEQ ID NO: 283150 - RNA, 32 nt, Human
aaaagauacgugccggggccaggugugguggc

SEQ ID NO: 283151 - RNA, 32 nt, Human
aaaagauacugaugcauugaccucauuucaaa

SEQ ID NO: 283152 - RNA, 32 nt, Human
aaaagaucagccaugucacugaagagcuggag

SEQ ID NO: 283153 - RNA, 32 nt, Human
aaaagaucagggguggaggggcuuccaggcug

SEQ ID NO: 283154 - RNA, 32 nt, Human
aaaagauccuuccagcccuggccaucuuggac

SEQ ID NO: 283155 - RNA, 32 nt, Human
aaaagaucuggaagucacccuccucuggccca

SEQ ID NO: 283156 - RNA, 32 nt, Human
aaaagaucuuuguugguaugcauauguuuugu

SEQ ID NO: 283157 - RNA, 32 nt, Human
aaaagaugaaguuucuaucauccaaaguaugg

SEQ ID NO: 283158 - RNA, 32 nt, Human
aaaagaugcagaaaagguagacuggggccacu

SEQ ID NO: 283159 - RNA, 32 nt, Human
aaaagaugccagcaaggccacaggggguguga

SEQ ID NO: 283160 - RNA, 32 nt, Human
aaaagaugcuuauguacuaauaguugaaaucu

SEQ ID NO: 283161 - RNA, 32 nt, Human
aaaagauggaaagaggcagaucaggcuggugc

SEQ ID NO: 283162 - RNA, 30 nt, Human
aaaagauggaacugagaaagaaaaggauau

SEQ ID NO: 283163 - RNA, 32 nt, Human
aaaagauggcaggguggggauuugaacccagg

SEQ ID NO: 283164 - RNA, 32 nt, Human
aaaagauguaacacuuauuugcugucaaauuc

SEQ ID NO: 283165 - RNA, 30 nt, Human
aaaagauguggagugggcugcuaccuccug

SEQ ID NO: 283166 - RNA, 32 nt, Human
aaaagauuaaggcuguuauuaccaggaggaag

SEQ ID NO: 283167 - RNA, 32 nt, Human
aaaagauuagacacaaaauguguaaaagacgu

SEQ ID NO: 283168 - RNA, 32 nt, Human
aaaagauucccuuauuuauccagcacauagau

SEQ ID NO: 283169 - RNA, 32 nt, Human
aaaagauuggaggugauuuacagugaaagaca

SEQ ID NO: 283170 - RNA, 32 nt, Human
aaaagauuucccuugacuuugagaaacgauau

SEQ ID NO: 283171 - RNA, 32 nt, Human
aaaagauuuggacagaaacagaaagauuggag

SEQ ID NO: 283172 - RNA, 32 nt, Human
aaaagcaaaaagaauaucuucuaaagauuucu

SEQ ID NO: 283173 - RNA, 32 nt, Human
aaaagcaaaaccauuguuaugugugacucuug

SEQ ID NO: 283174 - RNA, 32 nt, Human
aaaagcaaaaggaaaauucuuaacuuacuaaa

SEQ ID NO: 283175 - RNA, 32 nt, Human
aaaagcaaaaggcauuucccacccugaacaac

SEQ ID NO: 283176 - RNA, 32 nt, Human
aaaagcaaacccaggaaacccaccucacaugg

SEQ ID NO: 283177 - RNA, 32 nt, Human
aaaagcaaagccagcuaacaccuucauucauc

SEQ ID NO: 283178 - RNA, 32 nt, Human
aaaagcaaaguguucaccacuaaagcuaacca

SEQ ID NO: 283179 - RNA, 32 nt, Human
aaaagcaacauucaaaaugcaggagauuuugu

SEQ ID NO: 283180 - RNA, 32 nt, Human
aaaagcaaccuugaguguaacuuuaaaaauuu

SEQ ID NO: 283181 - RNA, 32 nt, Human
aaaagcaagaauucuguuuccuaggcaaacau

SEQ ID NO: 283182 - RNA, 21 nt, Human
aaaagcaagcaagcaaacaaa

SEQ ID NO: 283183 - RNA, 32 nt, Human
aaaagcaaguagugguuugguuucuaucauau

SEQ ID NO: 283184 - RNA, 32 nt, Human
aaaagcaagugagacuuucuguuucccauugu

SEQ ID NO: 283185 - RNA, 32 nt, Human
aaaagcaaguguccuacagcauuucccaaaug

SEQ ID NO: 283186 - RNA, 24 nt, Human
aaaagcaaguuugaagagaccaca

SEQ ID NO: 283187 - RNA, 32 nt, Human
aaaagcaauagaagaccgugugugggccauga

SEQ ID NO: 283188 - RNA, 32 nt, Human
aaaagcaauaguugcuugaauuaugaucaucu

SEQ ID NO: 283189 - RNA, 32 nt, Human
aaaagcaauuuccaaaaaugaaacccauucau

SEQ ID NO: 283190 - RNA, 32 nt, Human
aaaagcacaaauaggcuggacaugguggcuca

SEQ ID NO: 283191 - RNA, 32 nt, Human
aaaagcacaggcaugcacacacacagaacccc

SEQ ID NO: 283192 - RNA, 32 nt, Human
aaaagcaccagacaccaugcagcugggcccca

SEQ ID NO: 283193 - RNA, 32 nt, Human
aaaagcaccagagaaaaucaaaugcuuccuac

SEQ ID NO: 283194 - RNA, 32 nt, Human
aaaagcaccguugagguugcagugagccgaga

SEQ ID NO: 283195 - RNA, 32 nt, Human
aaaagcacuaugucuguguauguauguauaua

SEQ ID NO: 283196 - RNA, 20 nt, Human
aaaagcacucuccacccagc

SEQ ID NO: 283197 - RNA, 32 nt, Human
aaaagcacugguuacugguuuccugcuggguc

SEQ ID NO: 283198 - RNA, 32 nt, Human
aaaagcagaagagagugaaguggugcgagagg

SEQ ID NO: 283199 - RNA, 32 nt, Human
aaaagcagaccagcaaccagccucgccauaaa

SEQ ID NO: 283200 - RNA, 32 nt, Human
aaaagcagauacaagauuccagcuuucgucug

SEQ ID NO: 283201 - RNA, 32 nt, Human
aaaagcagauggagagugcuagugaggcggcc

SEQ ID NO: 283202 - RNA, 32 nt, Human
aaaagcagcauggaucugccuguggaugaaug

SEQ ID NO: 283203 - RNA, 22 nt, Human
aaaagcagccauagacaacaca

SEQ ID NO: 283204 - RNA, 32 nt, Human
aaaagcagccucccuucuccucucccuccacu

SEQ ID NO: 283205 - RNA, 32 nt, Human
aaaagcagccugauucggaggaacggguugcu

SEQ ID NO: 283206 - RNA, 32 nt, Human
aaaagcagcugcugccucucuccugggaccgu

SEQ ID NO: 283207 - RNA, 32 nt, Human
aaaagcaggaaggaagaggguugugccaaggu

SEQ ID NO: 283208 - RNA, 32 nt, Human
aaaagcaggcuggacacaguggcucaugccug

SEQ ID NO: 283209 - RNA, 32 nt, Human
aaaagcaguaguucagauucaucagacagcga

SEQ ID NO: 283210 - RNA, 32 nt, Human
aaaagcaguauagacuccaccuuccaggaugu

SEQ ID NO: 283211 - RNA, 32 nt, Human
aaaagcagucagauggaauggaagaauacaaa

SEQ ID NO: 283212 - RNA, 32 nt, Human
aaaagcagucauccuguggcucuggcuccaga

SEQ ID NO: 283213 - RNA, 32 nt, Human
aaaagcaguuugcaggaaggucauguggugug

SEQ ID NO: 283214 - RNA, 32 nt, Human
aaaagcauaaaugcaaacacacaaagguauaa

SEQ ID NO: 283215 - RNA, 19 nt, Human
aaaagcauaacgauucaag

SEQ ID NO: 283216 - RNA, 32 nt, Human
aaaagcauagucuuauuaaccaugucuguugg

SEQ ID NO: 283217 - RNA, 32 nt, Human
aaaagcaucuuggacuuuguuuucccuuccaa

SEQ ID NO: 283218 - RNA, 32 nt, Human
aaaagcauggugccguagggcugcuaugguuu

SEQ ID NO: 283219 - RNA, 32 nt, Human
aaaagcauucuagccaugugcaaccaaacacc

SEQ ID NO: 283220 - RNA, 32 nt, Human
aaaagcauuugauauuguaacuucuuuguuuu

SEQ ID NO: 283221 - RNA, 32 nt, Human
aaaagcauuuuaaaaguuugaggaaucuuuug

SEQ ID NO: 283222 - RNA, 32 nt, Human
aaaagccaaaacuggaaugugcagaaaguagg

SEQ ID NO: 283223 - RNA, 32 nt, Human
aaaagccaagucagaagaaucauuuguauuaa

SEQ ID NO: 283224 - RNA, 32 nt, Human
aaaagccacauauccacaucucuuucauuuuc

SEQ ID NO: 283225 - RNA, 32 nt, Human
aaaagccacuaugagccuacugcuggcucagg

SEQ ID NO: 283226 - RNA, 32 nt, Human
aaaagccacucaugcuuuggcuuaaacuguaa

SEQ ID NO: 283227 - RNA, 32 nt, Human
aaaagccacugcagugugcagugagaaacucc

SEQ ID NO: 283228 - RNA, 32 nt, Human
aaaagccacuggcucccaggaugcaccucuaa

SEQ ID NO: 283229 - RNA, 32 nt, Human
aaaagccacuucucuucuuccugagcagaugg

SEQ ID NO: 283230 - RNA, 31 nt, Human
aaaagccagagaggcuggugagggagcagga

SEQ ID NO: 283231 - RNA, 32 nt, Human
aaaagccagagguaucacauugccagacuuca

SEQ ID NO: 283232 - RNA, 32 nt, Human
aaaagccagccaagugcuucugaauaaagauc

SEQ ID NO: 283233 - RNA, 32 nt, Human
aaaagccaggaagaaagcucaggcccauuagu

SEQ ID NO: 283234 - RNA, 32 nt, Human
aaaagccaggccaguacugacugugugguggu

SEQ ID NO: 283235 - RNA, 32 nt, Human
aaaagccagguuuuggggaugugucuuacugu

SEQ ID NO: 283236 - RNA, 32 nt, Human
aaaagccaucagaucugacuuucauggaagug

SEQ ID NO: 283237 - RNA, 32 nt, Human
aaaagccauccaugcucaggaaacauugggcu

SEQ ID NO: 283238 - RNA, 32 nt, Human
aaaagcccaaacuccuuccacccuccagguuc

SEQ ID NO: 283239 - RNA, 32 nt, Human
aaaagcccaaauggaagauggccaggcuguug

SEQ ID NO: 283240 - RNA, 32 nt, Human
aaaagcccaauuagaggaaggagugaugggau

SEQ ID NO: 283241 - RNA, 31 nt, Human
aaaagcccacuuuucugugaccagcagaccu

SEQ ID NO: 283242 - RNA, 32 nt, Human
aaaagcccauagggaagagagagaggauauag

SEQ ID NO: 283243 - RNA, 32 nt, Human
aaaagcccaucucgucauguacagggacucau

SEQ ID NO: 283244 - RNA, 32 nt, Human
aaaagccccaacacaugacgccaucugaagac

SEQ ID NO: 283245 - RNA, 32 nt, Human
aaaagccccuugccccuccccuagggcuacca

SEQ ID NO: 283246 - RNA, 32 nt, Human
aaaagcccgcggcgucuucuccacccaccugc

SEQ ID NO: 283247 - RNA, 32 nt, Human
aaaagcccuccugaguucaugggcuguaccua

SEQ ID NO: 283248 - RNA, 32 nt, Human
aaaagcccugaccccagggaaggaggcugcuc

SEQ ID NO: 283249 - RNA, 32 nt, Human
aaaagcccugcugagcaucacaugcuggacuc

SEQ ID NO: 283250 - RNA, 32 nt, Human
aaaagcccuuugacuuuuucccccucucccuc

SEQ ID NO: 283251 - RNA, 32 nt, Human
aaaagccgagaccaggaggcuggggcacaucg

SEQ ID NO: 283252 - RNA, 32 nt, Human
aaaagccgaguccucugauggcucccuuaggu

SEQ ID NO: 283253 - RNA, 32 nt, Human
aaaagccgcgaguguggccccagauccuggcg

SEQ ID NO: 283254 - RNA, 22 nt, Human
aaaagccguggguggaaccagg

SEQ ID NO: 283255 - RNA, 32 nt, Human
aaaagccuauauucuccuccauuuuuguacca

SEQ ID NO: 283256 - RNA, 32 nt, Human
aaaagccuccaggaaaucuugagagccugucu

SEQ ID NO: 283257 - RNA, 22 nt, Human
aaaagccucuccugcugauggg

SEQ ID NO: 283258 - RNA, 32 nt, Human
aaaagccucugaauccuggcagaaggaacacc

SEQ ID NO: 283259 - RNA, 32 nt, Human
aaaagccucugggagcacauucugcugucauc

SEQ ID NO: 283260 - RNA, 32 nt, Human
aaaagccugaguguauugcaucucuugauuua

SEQ ID NO: 283261 - RNA, 32 nt, Human
aaaagccugcuguuguuccacaucucguugcu

SEQ ID NO: 283262 - RNA, 32 nt, Human
aaaagccuuagcuaaacuuugaugaguaaagc

SEQ ID NO: 283263 - RNA, 32 nt, Human
aaaagccuuggcuauucaucagacauuuguua

SEQ ID NO: 283264 - RNA, 32 nt, Human
aaaagcgaaugagacagagaucagaauacauu

SEQ ID NO: 283265 - RNA, 32 nt, Human
aaaagcgacacugccaucaucaucccaaggca

SEQ ID NO: 283266 - RNA, 32 nt, Human
aaaagcgagagggagagcgagcaaaaggcgcg

SEQ ID NO: 283267 - RNA, 32 nt, Human
aaaagcggagagaacacagaguggaaucagcc

SEQ ID NO: 283268 - RNA, 32 nt, Human
aaaagcggcggccguuggagguggcugcggca

SEQ ID NO: 283269 - RNA, 32 nt, Human
aaaagcuagaucuggcaacagcgggcuuucau

SEQ ID NO: 283270 - RNA, 32 nt, Human
aaaagcuaggcuccuccuagaagccuguggac

SEQ ID NO: 283271 - RNA, 32 nt, Human
aaaagcuaucccagauacucccccuugaggag

SEQ ID NO: 283272 - RNA, 32 nt, Human
aaaagcuaugggaaaauugugaagauaaauga

SEQ ID NO: 283273 - RNA, 32 nt, Human
aaaagcucagggcggucgagugcaguggcucg

SEQ ID NO: 283274 - RNA, 32 nt, Human
aaaagcucaguucuagagacauacuauuacuu

SEQ ID NO: 283275 - RNA, 32 nt, Human
aaaagcuccuuauagagaagcuuggaacuuuc

SEQ ID NO: 283276 - RNA, 32 nt, Human
aaaagcucgcccagggcugggugcaguggcuc

SEQ ID NO: 283277 - RNA, 32 nt, Human
aaaagcucucaggaagccgaggcgugguuguu

SEQ ID NO: 283278 - RNA, 32 nt, Human
aaaagcucuggcccaagcuucuacacagcaaa

SEQ ID NO: 283279 - RNA, 23 nt, Human
aaaagcucugucucccuaacuca

SEQ ID NO: 283280 - RNA, 21 nt, Human
aaaagcucuguguaaaucuaa

SEQ ID NO: 283281 - RNA, 32 nt, Human
aaaagcucuuaauuuucuacuagcaguauaua

SEQ ID NO: 283282 - RNA, 21 nt, Human
aaaagcucuuggacauaauca

SEQ ID NO: 283283 - RNA, 32 nt, Human
aaaagcucuuggauucaucucaucucauggaa

SEQ ID NO: 283284 - RNA, 32 nt, Human
aaaagcugacccuucccugaguaagagagaau

SEQ ID NO: 283285 - RNA, 32 nt, Human
aaaagcugagcuggcugaagaucagggccagc

SEQ ID NO: 283286 - RNA, 32 nt, Human
aaaagcugagucuggguccauuauuuuggcag

SEQ ID NO: 283287 - RNA, 32 nt, Human
aaaagcugcaccuaaugugcuauccauucaga

SEQ ID NO: 283288 - RNA, 32 nt, Human
aaaagcugcagccccacccaggagcagggugg

SEQ ID NO: 283289 - RNA, 32 nt, Human
aaaagcugcaggcagaggcguugaggacaucu

SEQ ID NO: 283290 - RNA, 32 nt, Human
aaaagcugccuuggcccugcuuggcugaguca

SEQ ID NO: 283291 - RNA, 32 nt, Human
aaaagcuggaacccugccccuuuggaggggga

SEQ ID NO: 283292 - RNA, 24 nt, Human
aaaagcuggaagcauuccccuuga

SEQ ID NO: 283293 - RNA, 32 nt, Human
aaaagcuggagagagagugaagugaaugcaag

SEQ ID NO: 283294 - RNA, 32 nt, Human
aaaagcugggaugcuugaggguauccaaguug

SEQ ID NO: 283295 - RNA, 32 nt, Human
aaaagcugggauuacaggcgugagccaccgcg

SEQ ID NO: 283296 - RNA, 32 nt, Human
aaaagcugggauuacagggcccugccaccaag

SEQ ID NO: 283297 - RNA, 32 nt, Human
aaaagcuggggccagccagggcaggagaggug

SEQ ID NO: 283298 - RNA, 32 nt, Human
aaaagcuggguccucuggaggaggggcgagcu

SEQ ID NO: 283299 - RNA, 32 nt, Human
aaaagcugugcaugaagaacugccuucuucua

SEQ ID NO: 283300 - RNA, 32 nt, Human
aaaagcuguguuuucuuuggucagaggucaaa

SEQ ID NO: 283301 - RNA, 32 nt, Human
aaaagcuuaaaacuuugaaguuagcuuuaacu

SEQ ID NO: 283302 - RNA, 32 nt, Human
aaaagcuugaaggacugggagauguggagcga

SEQ ID NO: 283303 - RNA, 32 nt, Human
aaaagcuuguuucuacaguuugcaguggaucu

SEQ ID NO: 283304 - RNA, 32 nt, Human
aaaagcuuuacaugaauguuucuguauguaau

SEQ ID NO: 283305 - RNA, 32 nt, Human
aaaagcuuucagauggacauuuucuaguucag

SEQ ID NO: 283306 - RNA, 32 nt, Human
aaaagcuuucuacugcuuugcggugaaggcaa

SEQ ID NO: 283307 - RNA, 32 nt, Human
aaaaggaaaaacagacaaaaauuuaauuuuag

SEQ ID NO: 283308 - RNA, 32 nt, Human
aaaaggaaaaccagaagcccugcugucugucu

SEQ ID NO: 283309 - RNA, 32 nt, Human
aaaaggaaagaaugauucaaagcagaggaauu

SEQ ID NO: 283310 - RNA, 32 nt, Human
aaaaggaaagcaacuaagacacuggacuaucc

SEQ ID NO: 283311 - RNA, 32 nt, Human
aaaaggaaagcagaagugaucaaggagagcgc

SEQ ID NO: 283312 - RNA, 32 nt, Human
aaaaggaaauaacaagagcacuuacuuuauaa

SEQ ID NO: 283313 - RNA, 32 nt, Human
aaaaggaaauuuucugggaaaugguucauauu

SEQ ID NO: 283314 - RNA, 32 nt, Human
aaaaggaaccaaguuacugagauacugcugcu

SEQ ID NO: 283315 - RNA, 32 nt, Human
aaaaggaacugggaucgcgccgcggcgguucc

SEQ ID NO: 283316 - RNA, 32 nt, Human
aaaaggaagacagauugugguacaggauugua

SEQ ID NO: 283317 - RNA, 32 nt, Human
aaaaggaagacaucguggaagugaagaagauc

SEQ ID NO: 283318 - RNA, 32 nt, Human
aaaaggaagaugaguugaaaagcaaggggaga

SEQ ID NO: 283319 - RNA, 32 nt, Human
aaaaggaagcuggaucauuuugcuuaacacug

SEQ ID NO: 283320 - RNA, 32 nt, Human
aaaaggaagguauuggcugaacugaauagagg

SEQ ID NO: 283321 - RNA, 32 nt, Human
aaaaggaaguauuagaaaugagcugaagacca

SEQ ID NO: 283322 - RNA, 32 nt, Human
aaaaggaauacuccuuuuccuuuuggaucaua

SEQ ID NO: 283323 - RNA, 32 nt, Human
aaaaggaauacuuauaaugugaagguuuguaa

SEQ ID NO: 283324 - RNA, 32 nt, Human
aaaaggaauccuauucagcugugaugauuagc

SEQ ID NO: 283325 - RNA, 32 nt, Human
aaaaggaaugugccagaaugcugaaccuucuu

SEQ ID NO: 283326 - RNA, 32 nt, Human
aaaaggaauuguuuccuucacagcuaugaaua

SEQ ID NO: 283327 - RNA, 32 nt, Human
aaaaggacagagcucuaauugauaacucugua

SEQ ID NO: 283328 - RNA, 32 nt, Human
aaaaggaccagccugaccagcguggagaaacu

SEQ ID NO: 283329 - RNA, 32 nt, Human
aaaaggacccugagaaggagguugcggcuaaa

SEQ ID NO: 283330 - RNA, 32 nt, Human
aaaaggacuuuucuaaggacugaagauuggca

SEQ ID NO: 283331 - RNA, 20 nt, Human
aaaaggagacgauugcuccu

SEQ ID NO: 283332 - RNA, 32 nt, Human
aaaaggagagacacuugugaacauucaaguga

SEQ ID NO: 283333 - RNA, 32 nt, Human
aaaaggagagacuggccuagccucccagccua

SEQ ID NO: 283334 - RNA, 32 nt, Human
aaaaggagagauuggccuagccucccagccua

SEQ ID NO: 283335 - RNA, 32 nt, Human
aaaaggagaggguaacagaaaaagaggaaaga

SEQ ID NO: 283336 - RNA, 32 nt, Human
aaaaggagaugggguuuugccauguugcgcaa

SEQ ID NO: 283337 - RNA, 32 nt, Human
aaaaggagaugugagagaggguauugagucug

SEQ ID NO: 283338 - RNA, 32 nt, Human
aaaaggagcacauagagauagaggaggaggcc

SEQ ID NO: 283339 - RNA, 32 nt, Human
aaaaggagcagcuucaauuucauugaggugaa

SEQ ID NO: 283340 - RNA, 21 nt, Human
aaaaggagccacuguacuuua

SEQ ID NO: 283341 - RNA, 32 nt, Human
aaaaggagcugcaugcuucacuggaguugagg

SEQ ID NO: 283342 - RNA, 21 nt, Human
aaaaggagcugcauggccuca

SEQ ID NO: 283343 - RNA, 32 nt, Human
aaaaggagcuuuucagcagccacccugcagca

SEQ ID NO: 283344 - RNA, 32 nt, Human
aaaaggaggaggaagggcuggggagaagagcg

SEQ ID NO: 283345 - RNA, 32 nt, Human
aaaaggaggaguugcuaaucuaauuucagaca

SEQ ID NO: 283346 - RNA, 32 nt, Human
aaaaggaggcuggaaaucaauacugcacacug

SEQ ID NO: 283347 - RNA, 22 nt, Human
aaaaggaggcuuugaccaggga

SEQ ID NO: 283348 - RNA, 32 nt, Human
aaaaggagggaauaggaggagggcagggugag

SEQ ID NO: 283349 - RNA, 32 nt, Human
aaaaggagggacaaccugcacuccagggagcc

SEQ ID NO: 283350 - RNA, 32 nt, Human
aaaaggagucugcucuccugccacuuugcucu

SEQ ID NO: 283351 - RNA, 32 nt, Human
aaaaggagugaugguaccacacaaaauaguaa

SEQ ID NO: 283352 - RNA, 32 nt, Human
aaaaggagugcaaaucauaaauaugcaucuug

SEQ ID NO: 283353 - RNA, 32 nt, Human
aaaaggaguuaggagaaagaagagcagcugaa

SEQ ID NO: 283354 - RNA, 32 nt, Human
aaaaggauauuugccaagauguuaacagauua

SEQ ID NO: 283355 - RNA, 32 nt, Human
aaaaggaucgagguauuuccaauccccgucga

SEQ ID NO: 283356 - RNA, 31 nt, Human
aaaaggaugagugagagggucgagcggaacu

SEQ ID NO: 283357 - RNA, 32 nt, Human
aaaaggauggacccagcacuccagggagaaaa

SEQ ID NO: 283358 - RNA, 32 nt, Human
aaaaggauuucugcuuucaaauccgcuguuuc

SEQ ID NO: 283359 - RNA, 32 nt, Human
aaaaggcaaaacugaccagggcugggaugggu

SEQ ID NO: 283360 - RNA, 32 nt, Human
aaaaggcaaaaguuugcagcacccucuagcaa

SEQ ID NO: 283361 - RNA, 23 nt, Human
aaaaggcaaauagcuauuaggga

SEQ ID NO: 283362 - RNA, 20 nt, Human
aaaaggcaaauuucaaggga

SEQ ID NO: 283363 - RNA, 32 nt, Human
aaaaggcaauagaacccaggggucugagcaug

SEQ ID NO: 283364 - RNA, 32 nt, Human
aaaaggcagaaggagggagaccccaaaaagag

SEQ ID NO: 283365 - RNA, 32 nt, Human
aaaaggcagcagcuccgaauugaaugaauuga

SEQ ID NO: 283366 - RNA, 32 nt, Human
aaaaggcagccaccuccucucccuggcugaac

SEQ ID NO: 283367 - RNA, 32 nt, Human
aaaaggcagcugcauguuauaaacaauauuac

SEQ ID NO: 283368 - RNA, 32 nt, Human
aaaaggcagugacuucagucacacagcaagca

SEQ ID NO: 283369 - RNA, 32 nt, Human
aaaaggcaguuugucuacuacagcagaaggcu

SEQ ID NO: 283370 - RNA, 32 nt, Human
aaaaggcauaugcaauauuuacauuuuuaauu

SEQ ID NO: 283371 - RNA, 32 nt, Human
aaaaggccacaggauggggaggcugcgggguc

SEQ ID NO: 283372 - RNA, 32 nt, Human
aaaaggccaccugugcuucaccaugcuccauc

SEQ ID NO: 283373 - RNA, 32 nt, Human
aaaaggccauggucauauagcccaaggaaauu

SEQ ID NO: 283374 - RNA, 32 nt, Human
aaaaggcccagccugucaaagugucugagaug

SEQ ID NO: 283375 - RNA, 32 nt, Human
aaaaggcccuggauauuuuaaguggccauuuu

SEQ ID NO: 283376 - RNA, 32 nt, Human
aaaaggccuauaaauaaacagggcuggcuguu

SEQ ID NO: 283377 - RNA, 32 nt, Human
aaaaggccucaaggaguacguguucaguaugc

SEQ ID NO: 283378 - RNA, 32 nt, Human
aaaaggccuccaccagccucucaccagaagag

SEQ ID NO: 283379 - RNA, 32 nt, Human
aaaaggccugccaccaaagcaggaagcugcac

SEQ ID NO: 283380 - RNA, 32 nt, Human
aaaaggccuggccugcugccucuucucuugca

SEQ ID NO: 283381 - RNA, 32 nt, Human
aaaaggccuggggaggugaaggaagagagacu

SEQ ID NO: 283382 - RNA, 32 nt, Human
aaaaggcggauucauucauagagcagaaagaa

SEQ ID NO: 283383 - RNA, 32 nt, Human
aaaaggcggcugagauuggcagagugaaauau

SEQ ID NO: 283384 - RNA, 32 nt, Human
aaaaggcgugagccaccgcgccuggccugaug

SEQ ID NO: 283385 - RNA, 32 nt, Human
aaaaggcuaaagauuugcaguuugacagccca

SEQ ID NO: 283386 - RNA, 32 nt, Human
aaaaggcuccaggcaggagaccuguguuccug

SEQ ID NO: 283387 - RNA, 32 nt, Human
aaaaggcuccuguaacccuccuccaggaugaa

SEQ ID NO: 283388 - RNA, 32 nt, Human
aaaaggcugaaccagcucuauuauuauccuau

SEQ ID NO: 283389 - RNA, 32 nt, Human
aaaaggcugacuuuggaaucuuuuuccuuuuu

SEQ ID NO: 283390 - RNA, 32 nt, Human
aaaaggcugcuugugaauuuucugagacggau

SEQ ID NO: 283391 - RNA, 32 nt, Human
aaaaggcugggaaacgggagcagaggaagcac

SEQ ID NO: 283392 - RNA, 32 nt, Human
aaaaggcugguaauacuagcacuugguaugcc

SEQ ID NO: 283393 - RNA, 32 nt, Human
aaaaggcuuaccaggcugcuauggucaacucu

SEQ ID NO: 283394 - RNA, 32 nt, Human
aaaaggcuucuccagagccuccagauaagagg

SEQ ID NO: 283395 - RNA, 32 nt, Human
aaaagggaaagccacggaaugugugugaagcc

SEQ ID NO: 283396 - RNA, 32 nt, Human
aaaagggaagaauguguaggcacgggaagggc

SEQ ID NO: 283397 - RNA, 32 nt, Human
aaaagggaagcagaaacaaaugaaguugcagc

SEQ ID NO: 283398 - RNA, 32 nt, Human
aaaagggaaugaccccucagaaacccacauua

SEQ ID NO: 283399 - RNA, 32 nt, Human
aaaagggacaaucgcuugcaguugguagaucu

SEQ ID NO: 283400 - RNA, 32 nt, Human
aaaagggacuguaacuccugucucaggaaugg

SEQ ID NO: 283401 - RNA, 32 nt, Human
aaaagggagaggugggcucuucugccaguucu

SEQ ID NO: 283402 - RNA, 32 nt, Human
aaaagggagcagccuuaggaggcacaucagau

SEQ ID NO: 283403 - RNA, 32 nt, Human
aaaagggagcccagaaauggaggacauuucau

SEQ ID NO: 283404 - RNA, 32 nt, Human
aaaagggaggcagaggaggcagaggcagaggc

SEQ ID NO: 283405 - RNA, 32 nt, Human
aaaagggaugcaaagaggucccagggaccugc

SEQ ID NO: 283406 - RNA, 32 nt, Human
aaaagggcaaagcucaccagcucucaacuuuu

SEQ ID NO: 283407 - RNA, 32 nt, Human
aaaagggcaggcaggggcaggcugaggaguug

SEQ ID NO: 283408 - RNA, 32 nt, Human
aaaagggcagggggcacuugagcugggcuggg

SEQ ID NO: 283409 - RNA, 32 nt, Human
aaaagggccacccuggccaaaagcggucaaaa

SEQ ID NO: 283410 - RNA, 32 nt, Human
aaaagggccagaaaaauuuggcaccaggcaaa

SEQ ID NO: 283411 - RNA, 32 nt, Human
aaaagggccaggagcaucuacugggauggauu

SEQ ID NO: 283412 - RNA, 32 nt, Human
aaaagggccagugccaaggggcaccaagaacc

SEQ ID NO: 283413 - RNA, 32 nt, Human
aaaagggccccuuuuuacuuuaauaguuuagu

SEQ ID NO: 283414 - RNA, 32 nt, Human
aaaagggccucugcuaaugguggagagaucaa

SEQ ID NO: 283415 - RNA, 32 nt, Human
aaaagggcucagagcugcugagcaggaaccgg

SEQ ID NO: 283416 - RNA, 32 nt, Human
aaaagggcucuuuagccaguuguugccaaccu

SEQ ID NO: 283417 - RNA, 32 nt, Human
aaaagggcuugggcccccagccccagaagaug

SEQ ID NO: 283418 - RNA, 32 nt, Human
aaaaggggaacagaaucaggagagugggcaaa

SEQ ID NO: 283419 - RNA, 32 nt, Human
aaaaggggaccugccaagaggccacugaggug

SEQ ID NO: 283420 - RNA, 32 nt, Human
aaaaggggaggaaaggcuccucucuuuaguca

SEQ ID NO: 283421 - RNA, 22 nt, Human
aaaaggggcagaaaucaucacu

SEQ ID NO: 283422 - RNA, 32 nt, Human
aaaaggggcuacacaccuggcuuccgggagcu

SEQ ID NO: 283423 - RNA, 32 nt, Human
aaaaggggcuggaggaagauccggagggcagg

SEQ ID NO: 283424 - RNA, 32 nt, Human
aaaaggggcugggaagaagggggaccaguuug

SEQ ID NO: 283425 - RNA, 32 nt, Human
aaaagggggagggaagggggaggaaggagucg

SEQ ID NO: 283426 - RNA, 32 nt, Human
aaaagggggugguggggaggcuuggggagauu

SEQ ID NO: 283427 - RNA, 32 nt, Human
aaaaggguaaaacaugacuacacagaaauuua

SEQ ID NO: 283428 - RNA, 21 nt, Human
aaaaggguaagagcacccuua

SEQ ID NO: 283429 - RNA, 32 nt, Human
aaaaggguaagcuagagagaaaaagaaagaac

SEQ ID NO: 283430 - RNA, 32 nt, Human
aaaaggguauuucuuuucucucuucagccccc

SEQ ID NO: 283431 - RNA, 32 nt, Human
aaaagggugaaaauagaugacacagaaugugc

SEQ ID NO: 283432 - RNA, 20 nt, Human
aaaagggugaagccaccucu

SEQ ID NO: 283433 - RNA, 32 nt, Human
aaaagggugggggugggaggggcagaggccaa

SEQ ID NO: 283434 - RNA, 31 nt, Human
aaaaggguguuaaaagagucaguguaagcau

SEQ ID NO: 283435 - RNA, 32 nt, Human
aaaaggguuauagaaaucuggaaauaagaaag

SEQ ID NO: 283436 - RNA, 32 nt, Human
aaaaggguuugauuugauucucagccugguag

SEQ ID NO: 283437 - RNA, 32 nt, Human
aaaagguaauuuuucccuucuucuacuugauu

SEQ ID NO: 283438 - RNA, 32 nt, Human
aaaagguacagucaggggaaaauagaucuagg

SEQ ID NO: 283439 - RNA, 32 nt, Human
aaaagguacagugauucagccauuuccauuug

SEQ ID NO: 283440 - RNA, 32 nt, Human
aaaagguacuggugagggcaagaggugccugg

SEQ ID NO: 283441 - RNA, 32 nt, Human
aaaaggucaagaaguaaaagauguuagaaagc

SEQ ID NO: 283442 - RNA, 32 nt, Human
aaaaggugacccuucugucuguaagauuuuau

SEQ ID NO: 283443 - RNA, 32 nt, Human
aaaagguggccaaaaaccugccugccugguug

SEQ ID NO: 283444 - RNA, 24 nt, Human
aaaagguggcguuuuuguacuuua

SEQ ID NO: 283445 - RNA, 32 nt, Human
aaaaggugggcugguuuuaguacucugaagga

SEQ ID NO: 283446 - RNA, 31 nt, Human
aaaaggugggugguagguguggggagagcug

SEQ ID NO: 283447 - RNA, 32 nt, Human
aaaagguuaguguuugggggccgggggaggac

SEQ ID NO: 283448 - RNA, 32 nt, Human
aaaagguuaucugcucuuggccaucugguggu

SEQ ID NO: 283449 - RNA, 32 nt, Human
aaaagguuccauccuaucucccuuagagagaa

SEQ ID NO: 283450 - RNA, 32 nt, Human
aaaagguugaggccgggugcauugguucaugc

SEQ ID NO: 283451 - RNA, 32 nt, Human
aaaagguuggccuuaguagucaaaaacaaagc

SEQ ID NO: 283452 - RNA, 32 nt, Human
aaaagguuugccaagcucagugguguuguauu

SEQ ID NO: 283453 - RNA, 32 nt, Human
aaaaguaaaguuauaaaaggaaaagaaaacag

SEQ ID NO: 283454 - RNA, 32 nt, Human
aaaaguaacuaaagacagauguagguguaaau

SEQ ID NO: 283455 - RNA, 32 nt, Human
aaaaguaacugaagaggccaggcgugguggcu

SEQ ID NO: 283456 - RNA, 32 nt, Human
aaaaguaagacccacaaggauauuccuuugcc

SEQ ID NO: 283457 - RNA, 30 nt, Human
aaaaguaagccauggauauuacuguucuga

SEQ ID NO: 283458 - RNA, 32 nt, Human
aaaaguaagcuguguggucaaaaucaauauga

SEQ ID NO: 283459 - RNA, 32 nt, Human
aaaaguaauggaagacaggaagaaaagaagag

SEQ ID NO: 283460 - RNA, 32 nt, Human
aaaaguaauuaauaguguuggaagauguaggu

SEQ ID NO: 283461 - RNA, 32 nt, Human
aaaaguacagugaugagcaugccuaaauccau

SEQ ID NO: 283462 - RNA, 32 nt, Human
aaaaguacagugguguacacaaaaagaagcag

SEQ ID NO: 283463 - RNA, 32 nt, Human
aaaaguacauagugaauuuuaaaauguagaag

SEQ ID NO: 283464 - RNA, 32 nt, Human
aaaaguacaugaaaggauucacucuggagaga

SEQ ID NO: 283465 - RNA, 32 nt, Human
aaaaguaccacauuccaugacgcaggagcugu

SEQ ID NO: 283466 - RNA, 32 nt, Human
aaaaguacuaccuguuaacaauugggaaaagg

SEQ ID NO: 283467 - RNA, 32 nt, Human
aaaaguacuagaugguguauaacucuagaguu

SEQ ID NO: 283468 - RNA, 32 nt, Human
aaaaguacuucaggcugggcacaguggcucau

SEQ ID NO: 283469 - RNA, 32 nt, Human
aaaaguagaaaugcaacaauucccaguuuuug

SEQ ID NO: 283470 - RNA, 22 nt, Human
aaaaguagaaucauaaggacug

SEQ ID NO: 283471 - RNA, 32 nt, Human
aaaaguagacaugggcugggugcaguggcuca

SEQ ID NO: 283472 - RNA, 32 nt, Human
aaaaguagagagaagugaaaguagagucuggg

SEQ ID NO: 283473 - RNA, 23 nt, Human
aaaaguagauuagcacaaugcac

SEQ ID NO: 283474 - RNA, 32 nt, Human
aaaaguagcaagaaauggccaugcugccuucu

SEQ ID NO: 283475 - RNA, 32 nt, Human
aaaaguaggagugauagagaacaaaaauacuc

SEQ ID NO: 283476 - RNA, 32 nt, Human
aaaaguauacagaucaaagcaaaaagaagcca

SEQ ID NO: 283477 - RNA, 32 nt, Human
aaaaguauaucuauccaauaaguuguggaaag

SEQ ID NO: 283478 - RNA, 32 nt, Human
aaaaguauccacugguccccaggguuucaguc

SEQ ID NO: 283479 - RNA, 32 nt, Human
aaaaguaucucuuaaagcaaaacaucucagaa

SEQ ID NO: 283480 - RNA, 32 nt, Human
aaaaguaugaaugagugugaaguguaugugag

SEQ ID NO: 283481 - RNA, 23 nt, Human
aaaaguauguguaauaugaagua

SEQ ID NO: 283482 - RNA, 32 nt, Human
aaaaguauuaauucucuuuccauccuccuccu

SEQ ID NO: 283483 - RNA, 32 nt, Human
aaaaguauuuaucuugggcuuaucugaaugau

SEQ ID NO: 283484 - RNA, 32 nt, Human
aaaaguauuuuguaacugaggaauuuugauaa

SEQ ID NO: 283485 - RNA, 32 nt, Human
aaaagucaaauacaauacugguccuuaccaca

SEQ ID NO: 283486 - RNA, 32 nt, Human
aaaagucaacaaauacauacuuagugguaacu

SEQ ID NO: 283487 - RNA, 32 nt, Human
aaaagucaccugccuacaaauguacaaaaggc

SEQ ID NO: 283488 - RNA, 32 nt, Human
aaaagucagaugcuucuauccauugcuuucug

SEQ ID NO: 283489 - RNA, 32 nt, Human
aaaagucagggaaaggggcacugaccuguagu

SEQ ID NO: 283490 - RNA, 32 nt, Human
aaaagucaguuuaggcugggcgcaguggcuca

SEQ ID NO: 283491 - RNA, 32 nt, Human
aaaagucaguuuaggcugggcgcgguggcuca

SEQ ID NO: 283492 - RNA, 32 nt, Human
aaaagucauagaauaucuaugauacauugaaa

SEQ ID NO: 283493 - RNA, 32 nt, Human
aaaagucaucaccauucucucgucucaauaaa

SEQ ID NO: 283494 - RNA, 32 nt, Human
aaaaguccagacacacuguauugugaaaacug

SEQ ID NO: 283495 - RNA, 32 nt, Human
aaaaguccaugaaaggauucacucuggagaga

SEQ ID NO: 283496 - RNA, 32 nt, Human
aaaaguccauuucucccuucugcaaugcaccc

SEQ ID NO: 283497 - RNA, 32 nt, Human
aaaagucccaccaacuaccagaccagaacacg

SEQ ID NO: 283498 - RNA, 32 nt, Human
aaaagucggcagcagagggaacagggaagaaa

SEQ ID NO: 283499 - RNA, 32 nt, Human
aaaagucuaagccaaagguucucaggggagaa

SEQ ID NO: 283500 - RNA, 32 nt, Human
aaaagucuaggcagaagauaaugcaaccaaca

SEQ ID NO: 283501 - RNA, 32 nt, Human
aaaagucucaaaauaccuguaaucccagcacu

SEQ ID NO: 283502 - RNA, 32 nt, Human
aaaagucucaacaagaagucuguggaguugag

SEQ ID NO: 283503 - RNA, 32 nt, Human
aaaagucucacaugguggcuguacaugcacaa

SEQ ID NO: 283504 - RNA, 32 nt, Human
aaaagucucuuauguagggauccuccuugugu

SEQ ID NO: 283505 - RNA, 32 nt, Human
aaaagucugacuguugagaaacugacgaucca

SEQ ID NO: 283506 - RNA, 32 nt, Human
aaaagucugucugauuccaggguguuuuuccu

SEQ ID NO: 283507 - RNA, 32 nt, Human
aaaagucuguucuggugucggugucagagguc

SEQ ID NO: 283508 - RNA, 32 nt, Human
aaaagucuguugcuuugguucucaguccuggg

SEQ ID NO: 283509 - RNA, 32 nt, Human
aaaagucuuagcaacaguccucuggucccaca

SEQ ID NO: 283510 - RNA, 32 nt, Human
aaaagugaaaggcaauggaaggguuccauaga

SEQ ID NO: 283511 - RNA, 32 nt, Human
aaaagugaaggccagacagacaaggacaagga

SEQ ID NO: 283512 - RNA, 32 nt, Human
aaaagugacacagcagcuucaccagagcauuu

SEQ ID NO: 283513 - RNA, 21 nt, Human
aaaagugacuuacuggucuca

SEQ ID NO: 283514 - RNA, 32 nt, Human
aaaagugagaggaggcggaggagagagccugc

SEQ ID NO: 283515 - RNA, 32 nt, Human
aaaagugagccucuucaucugcaccuguaaua

SEQ ID NO: 283516 - RNA, 32 nt, Human
aaaagugaggggacggaggcgcccaagcaacg

SEQ ID NO: 283517 - RNA, 32 nt, Human
aaaagugagugugagaucacccagggaagcag

SEQ ID NO: 283518 - RNA, 32 nt, Human
aaaagugccaagcagaacauaaaacauccuua

SEQ ID NO: 283519 - RNA, 21 nt, Human
aaaagugccacccuggcuuca

SEQ ID NO: 283520 - RNA, 32 nt, Human
aaaagugccugccugugcucucucccucuccu

SEQ ID NO: 283521 - RNA, 32 nt, Human
aaaagugccugggauauuuuccuccuuggccc

SEQ ID NO: 283522 - RNA, 32 nt, Human
aaaagugcuacuugagagugggggagaauggc

SEQ ID NO: 283523 - RNA, 32 nt, Human
aaaagugcuagaagaaaaaggaugcccaguug

SEQ ID NO: 283524 - RNA, 23 nt, Human
aaaagugcucacgugcagcucca

SEQ ID NO: 283525 - RNA, 32 nt, Human
aaaagugcucacugcagcucagaucaguccuc

SEQ ID NO: 283526 - RNA, 32 nt, Human
aaaagugcugaggaugcuggccagcagacccu

SEQ ID NO: 283527 - RNA, 20 nt, Human
aaaagugcuucaugagccca

SEQ ID NO: 283528 - RNA, 32 nt, Human
aaaaguggacaaguccgcuuugugagaugaau

SEQ ID NO: 283529 - RNA, 32 nt, Human
aaaaguggacugcaucuauccaucuuuacugu

SEQ ID NO: 283530 - RNA, 32 nt, Human
aaaaguggacugcuuuucaaagugccacuguu

SEQ ID NO: 283531 - RNA, 32 nt, Human
aaaaguggagaaugaggccaggcgugguggcu

SEQ ID NO: 283532 - RNA, 32 nt, Human
aaaaguggauccugccacguucggagcucccu

SEQ ID NO: 283533 - RNA, 32 nt, Human
aaaaguggcaaagcuuugcuuaucucagcaaa

SEQ ID NO: 283534 - RNA, 32 nt, Human
aaaaguggccagacuguuaccuggguucccau

SEQ ID NO: 283535 - RNA, 32 nt, Human
aaaaguggcgagagccaccucggcgcuugggc

SEQ ID NO: 283536 - RNA, 32 nt, Human
aaaaguggcuguccuaaauuucaucacucaau

SEQ ID NO: 283537 - RNA, 32 nt, Human
aaaaguggcuugaugguuaagacagguuuauu

SEQ ID NO: 283538 - RNA, 31 nt, Human
aaaagugggcauuuuguaacauuccuucagg

SEQ ID NO: 283539 - RNA, 32 nt, Human
aaaaguggguucuaaaugccuggcugcaucug

SEQ ID NO: 283540 - RNA, 32 nt, Human
aaaagugguagggaaauuguucccucuccacu

SEQ ID NO: 283541 - RNA, 32 nt, Human
aaaaguggucuaauuuuuacaacaguagaacu

SEQ ID NO: 283542 - RNA, 32 nt, Human
aaaaguggucucaaccuaacaucagaaguguu

SEQ ID NO: 283543 - RNA, 29 nt, Human
aaaaguguaugagaugugccuggauguuc

SEQ ID NO: 283544 - RNA, 32 nt, Human
aaaagugucaccuuuucuugccugaucaacaa

SEQ ID NO: 283545 - RNA, 24 nt, Human
aaaagugucuaccuugguacgcag

SEQ ID NO: 283546 - RNA, 20 nt, Human
aaaagugucuuucagcacca

SEQ ID NO: 283547 - RNA, 32 nt, Human
aaaaguguggccuuugggcucugccaucuggg

SEQ ID NO: 283548 - RNA, 32 nt, Human
aaaagugugguuuuacuauuuuugccuuauca

SEQ ID NO: 283549 - RNA, 23 nt, Human
aaaaguguguauaauguaaagua

SEQ ID NO: 283550 - RNA, 32 nt, Human
aaaaguguugcaaauguaaaacauugccaucu

SEQ ID NO: 283551 - RNA, 24 nt, Human
aaaaguguuuaucuucagcaccaa

SEQ ID NO: 283552 - RNA, 32 nt, Human
aaaaguuaaacuuuuguuaugacuguguuuuu

SEQ ID NO: 283553 - RNA, 32 nt, Human
aaaaguuaaauggugaaugcuagcaugaaucu

SEQ ID NO: 283554 - RNA, 32 nt, Human
aaaaguuaauuuuaaucucacagucuacauug

SEQ ID NO: 283555 - RNA, 32 nt, Human
aaaaguuaauuuugggcugagugcaguggcuu

SEQ ID NO: 283556 - RNA, 32 nt, Human
aaaaguuaccucauucuucuagcuagcugauu

SEQ ID NO: 283557 - RNA, 32 nt, Human
aaaaguuaucucccucucccugugaugccuug

SEQ ID NO: 283558 - RNA, 32 nt, Human
aaaaguucagaaucuccagagcagagcccagg

SEQ ID NO: 283559 - RNA, 32 nt, Human
aaaaguucaugucuucucaaaauaugaaauau

SEQ ID NO: 283560 - RNA, 32 nt, Human
aaaaguuccaagcuguuacuuaccuuaacaug

SEQ ID NO: 283561 - RNA, 32 nt, Human
aaaaguucccaccuugcaguucaucagagaau

SEQ ID NO: 283562 - RNA, 32 nt, Human
aaaaguucuagguucaguugaaguucugauga

SEQ ID NO: 283563 - RNA, 32 nt, Human
aaaaguucucucugaugcaugaaaacucagag

SEQ ID NO: 283564 - RNA, 32 nt, Human
aaaaguucugaccuucuguuauagucaaggag

SEQ ID NO: 283565 - RNA, 32 nt, Human
aaaaguugaaggaggcagaagggagagugaug

SEQ ID NO: 283566 - RNA, 32 nt, Human
aaaaguugaucuguauagucaacaucuugaac

SEQ ID NO: 283567 - RNA, 32 nt, Human
aaaaguugcugcugacacacugggugaagaau

SEQ ID NO: 283568 - RNA, 32 nt, Human
aaaaguuggccucccaaaauuucuguauuugg

SEQ ID NO: 283569 - RNA, 32 nt, Human
aaaaguugugaugugacaugauauaaaggauc

SEQ ID NO: 283570 - RNA, 32 nt, Human
aaaaguuguggguaggaaaaugaaucauuugg

SEQ ID NO: 283571 - RNA, 32 nt, Human
aaaaguuuagcguuaagcaccuuuaucuucau

SEQ ID NO: 283572 - RNA, 32 nt, Human
aaaaguuuaucagccaaaaguguaaauaaguu

SEQ ID NO: 283573 - RNA, 32 nt, Human
aaaaguuucaagaagcaggaagaaaagacuca

SEQ ID NO: 283574 - RNA, 32 nt, Human
aaaaguuucagaaugaguuuaggauaauuaua

SEQ ID NO: 283575 - RNA, 32 nt, Human
aaaaguuucuccccaguucucucugauaguua

SEQ ID NO: 283576 - RNA, 32 nt, Human
aaaaguuugagaccagccugggcaacauagca

SEQ ID NO: 283577 - RNA, 32 nt, Human
aaaaguuugccucgucuccacaagucugucuc

SEQ ID NO: 283578 - RNA, 32 nt, Human
aaaaguuugguucuuccaugugccuugguucc

SEQ ID NO: 283579 - RNA, 32 nt, Human
aaaaguuuuauucuguguuguuuacugguaag

SEQ ID NO: 283580 - RNA, 31 nt, Human
aaaaguuuuuaauaaauguguugaaaaucaa

SEQ ID NO: 283581 - RNA, 32 nt, Human
aaaaguuuuucuuccucucuucagagccaaaa

SEQ ID NO: 283582 - RNA, 32 nt, Human
aaaauaaaaacacagacaucugcacucaauaa

SEQ ID NO: 283583 - RNA, 32 nt, Human
aaaauaaaaagaaacacagacgcccagguguc

SEQ ID NO: 283584 - RNA, 32 nt, Human
aaaauaaaaagcuguucuacagaacaaccacu

SEQ ID NO: 283585 - RNA, 26 nt, Human
aaaauaaaaagcuuucuggaagaccc

SEQ ID NO: 283586 - RNA, 32 nt, Human
aaaauaaaaaggauuuauugguucauguaacu

SEQ ID NO: 283587 - RNA, 32 nt, Human
aaaauaaaacaaggaauuagugucuuuuaagu

SEQ ID NO: 283588 - RNA, 32 nt, Human
aaaauaaaacaccuccuguuguggauggugag

SEQ ID NO: 283589 - RNA, 32 nt, Human
aaaauaaaagagaaucuuuucuucccuacccc

SEQ ID NO: 283590 - RNA, 32 nt, Human
aaaauaaaaguacaggguuugaaggaacaaga

SEQ ID NO: 283591 - RNA, 32 nt, Human
aaaauaaaauuagcugggcaugguggcgcuug

SEQ ID NO: 283592 - RNA, 32 nt, Human
aaaauaaaccaaucccuaacacgugguauggg

SEQ ID NO: 283593 - RNA, 32 nt, Human
aaaauaaaggcuguaucuaaaauaucaaaggu

SEQ ID NO: 283594 - RNA, 32 nt, Human
aaaauaaauacugaugaggcaugcagcuuuca

SEQ ID NO: 283595 - RNA, 32 nt, Human
aaaauaaauagcugggauuacaggugccugcc

SEQ ID NO: 283596 - RNA, 32 nt, Human
aaaauaaaugaauuuucacuguuggcacauau

SEQ ID NO: 283597 - RNA, 32 nt, Human
aaaauaaaugauuuuuaaguuaugucuauuaa

SEQ ID NO: 283598 - RNA, 32 nt, Human
aaaauaaauguuccugcagccugagauuucag

SEQ ID NO: 283599 - RNA, 32 nt, Human
aaaauaaauguuucaggcuuugugguccugau

SEQ ID NO: 283600 - RNA, 22 nt, Human
aaaauaacauuucagaagagca

SEQ ID NO: 283601 - RNA, 32 nt, Human
aaaauaaccaugagcuguaucaugcuacuuag

SEQ ID NO: 283602 - RNA, 32 nt, Human
aaaauaaccgaagaaagagaggaccaaccaga

SEQ ID NO: 283603 - RNA, 32 nt, Human
aaaauaaccuauacgguaguugcuuuaggggg

SEQ ID NO: 283604 - RNA, 18 nt, Human
aaaauaaccugaaaccau

SEQ ID NO: 283605 - RNA, 32 nt, Human
aaaauaaccugaccaguaaucacccacugauu

SEQ ID NO: 283606 - RNA, 32 nt, Human
aaaauaaccuugagagaguccauccaucuaac

SEQ ID NO: 283607 - RNA, 19 nt, Human
aaaauaacugacaaaccau

SEQ ID NO: 283608 - RNA, 32 nt, Human
aaaauaacuuauuuugaugaucagaggucuug

SEQ ID NO: 283609 - RNA, 32 nt, Human
aaaauaacuucguugagauacaauucacagaa

SEQ ID NO: 283610 - RNA, 32 nt, Human
aaaauaagaaaagguuuucuucauucauggcu

SEQ ID NO: 283611 - RNA, 32 nt, Human
aaaauaagaaaauguuggguucucagcacuuc

SEQ ID NO: 283612 - RNA, 32 nt, Human
aaaauaagacaggccacaggagggcagagugg

SEQ ID NO: 283613 - RNA, 32 nt, Human
aaaauaagacauuaacuuuaucuuaaguuaca

SEQ ID NO: 283614 - RNA, 32 nt, Human
aaaauaagagacuagagauucacuggacgcuu

SEQ ID NO: 283615 - RNA, 32 nt, Human
aaaauaaggcccagaggugcaguccaggagua

SEQ ID NO: 283616 - RNA, 32 nt, Human
aaaauaaggcuuuaacugcaccagaggaacac

SEQ ID NO: 283617 - RNA, 32 nt, Human
aaaauaaggucuaaaggaaaguagcacauuag

SEQ ID NO: 283618 - RNA, 32 nt, Human
aaaauaauaacaggcugggugcaauggcucac

SEQ ID NO: 283619 - RNA, 32 nt, Human
aaaauaauacuucuuuuccacccgucuuuggu

SEQ ID NO: 283620 - RNA, 32 nt, Human
aaaauaaucaguaggcaagaggaacauuuuuc

SEQ ID NO: 283621 - RNA, 32 nt, Human
aaaauaaugcuguccuuuaguagcaaguaaaa

SEQ ID NO: 283622 - RNA, 32 nt, Human
aaaauaauguauauaagcagacuugcacaauu

SEQ ID NO: 283623 - RNA, 32 nt, Human
aaaauaauuacugcuauuuuaaaauuucuuga

SEQ ID NO: 283624 - RNA, 32 nt, Human
aaaauaauuccuuggacugccuggugguuaaa

SEQ ID NO: 283625 - RNA, 32 nt, Human
aaaauaauugauuucauuuacucccauauucu

SEQ ID NO: 283626 - RNA, 32 nt, Human
aaaauaauuggcagagugagaagaaacauaaa

SEQ ID NO: 283627 - RNA, 22 nt, Human
aaaauaauuuuuuagaaaagca

SEQ ID NO: 283628 - RNA, 32 nt, Human
aaaauacaaaaacaaaaauuagccaggggugg

SEQ ID NO: 283629 - RNA, 32 nt, Human
aaaauacaaaaauauaugaaaucucacauaga

SEQ ID NO: 283630 - RNA, 22 nt, Human
aaaauacaaaaauuacccaggc

SEQ ID NO: 283631 - RNA, 23 nt, Human
aaaauacaaaaauuacccaggca

SEQ ID NO: 283632 - RNA, 23 nt, Human
aaaauacaaaaauugcccaggca

SEQ ID NO: 283633 - RNA, 32 nt, Human
aaaauacaaacaaaauuagcugggcauggugg

SEQ ID NO: 283634 - RNA, 32 nt, Human
aaaauacaaacuuggcugggcuuaguggugca

SEQ ID NO: 283635 - RNA, 32 nt, Human
aaaauacaacaacaacaaaauuagcugggcau

SEQ ID NO: 283636 - RNA, 32 nt, Human
aaaauacaacccaguaucuaaaaaguguuaac

SEQ ID NO: 283637 - RNA, 32 nt, Human
aaaauacacauacauacauacauauguauaca

SEQ ID NO: 283638 - RNA, 32 nt, Human
aaaauacacaucugucuucugggaaagaggag

SEQ ID NO: 283639 - RNA, 32 nt, Human
aaaauacacuaguggaaaacacucugauguaa

SEQ ID NO: 283640 - RNA, 32 nt, Human
aaaauacagacacuugacccuugguguagcuu

SEQ ID NO: 283641 - RNA, 31 nt, Human
aaaauacagagagugaguguguggaagagag

SEQ ID NO: 283642 - RNA, 32 nt, Human
aaaauacagagugcucuaagagagaauaacaa

SEQ ID NO: 283643 - RNA, 32 nt, Human
aaaauacaggagaaacagucucaguggaaugu

SEQ ID NO: 283644 - RNA, 32 nt, Human
aaaauacaggccaggggcugggcacgguaccu

SEQ ID NO: 283645 - RNA, 32 nt, Human
aaaauacagugaugaagagacaaaggaugcca

SEQ ID NO: 283646 - RNA, 32 nt, Human
aaaauacaguugaggcacucucugcccagacu

SEQ ID NO: 283647 - RNA, 32 nt, Human
aaaauacauaaauaacauuguaucacacuuuu

SEQ ID NO: 283648 - RNA, 32 nt, Human
aaaauacauacucugaaagauaaggcaauuuu

SEQ ID NO: 283649 - RNA, 31 nt, Human
aaaauacauacuucuucauucggagagacaa

SEQ ID NO: 283650 - RNA, 32 nt, Human
aaaauacauauauacaaaaauuagcugggcau

SEQ ID NO: 283651 - RNA, 32 nt, Human
aaaauacauauguaucuauauaagcauaugug

SEQ ID NO: 283652 - RNA, 32 nt, Human
aaaauacaugcugacuuucuaaaauaguguaa

SEQ ID NO: 283653 - RNA, 32 nt, Human
aaaauacauucucugaccacagucuccuccuu

SEQ ID NO: 283654 - RNA, 32 nt, Human
aaaauaccaaacaugucuuuguaucaaggaac

SEQ ID NO: 283655 - RNA, 32 nt, Human
aaaauaccauaaaaauacauaaaaucugauga

SEQ ID NO: 283656 - RNA, 32 nt, Human
aaaauacccagggguuaagaccacagaaggcu

SEQ ID NO: 283657 - RNA, 32 nt, Human
aaaauaccguguuacacacauuugcucuuaug

SEQ ID NO: 283658 - RNA, 32 nt, Human
aaaauaccuguaaucccagcacuuugggaggc

SEQ ID NO: 283659 - RNA, 32 nt, Human
aaaauaccuuguuuggucaaugacuuuacugg

SEQ ID NO: 283660 - RNA, 23 nt, Human
aaaauacgaaaauuaaccaggca

SEQ ID NO: 283661 - RNA, 32 nt, Human
aaaauacgcucaggugguugugguguagacug

SEQ ID NO: 283662 - RNA, 32 nt, Human
aaaauacggaacucuaacuccuugccacucaa

SEQ ID NO: 283663 - RNA, 32 nt, Human
aaaauacgugcucuccucucuccuugucagcu

SEQ ID NO: 283664 - RNA, 32 nt, Human
aaaauacuaaggauuuuucuagaaacucuuaa

SEQ ID NO: 283665 - RNA, 32 nt, Human
aaaauacuagaacguuugcugcgauaaaucuu

SEQ ID NO: 283666 - RNA, 32 nt, Human
aaaauacucaacuaaauucauuucuacuccag

SEQ ID NO: 283667 - RNA, 32 nt, Human
aaaauacuccauccuuauggguuuacaugcau

SEQ ID NO: 283668 - RNA, 21 nt, Human
aaaauacucuacaccuuuggg

SEQ ID NO: 283669 - RNA, 32 nt, Human
aaaauacucuggcuggucucaguggcucaugu

SEQ ID NO: 283670 - RNA, 32 nt, Human
aaaauacugcucaagugggggcuuccucacag

SEQ ID NO: 283671 - RNA, 32 nt, Human
aaaauacuggcacaccuguguucacaggggcu

SEQ ID NO: 283672 - RNA, 32 nt, Human
aaaauacuguaaucucagcauuuugggagacc

SEQ ID NO: 283673 - RNA, 32 nt, Human
aaaauacugugagccgggcaugguggcuuaca

SEQ ID NO: 283674 - RNA, 32 nt, Human
aaaauacuguggaauaagcccaggaagguuag

SEQ ID NO: 283675 - RNA, 20 nt, Human
aaaauacuguuacacugggu

SEQ ID NO: 283676 - RNA, 32 nt, Human
aaaauacuucugaaguguucugcuccaaucag

SEQ ID NO: 283677 - RNA, 32 nt, Human
aaaauacuugcaaaucauauaucugauaaagg

SEQ ID NO: 283678 - RNA, 32 nt, Human
aaaauacuuuucuucuucuuacuaauucuuuu

SEQ ID NO: 283679 - RNA, 32 nt, Human
aaaauagaaaaaucgcgcacuugcgcgucccc

SEQ ID NO: 283680 - RNA, 32 nt, Human
aaaauagaaauauagcauauuauucaagggca

SEQ ID NO: 283681 - RNA, 32 nt, Human
aaaauagaaauccugacaucucauuucuauuu

SEQ ID NO: 283682 - RNA, 32 nt, Human
aaaauagaaaugucaguagaacucauugaggg

SEQ ID NO: 283683 - RNA, 32 nt, Human
aaaauagaagaaaaauaaaagugaaggucaag

SEQ ID NO: 283684 - RNA, 32 nt, Human
aaaauagaagaaugugauuugguagaguaggg

SEQ ID NO: 283685 - RNA, 21 nt, Human
aaaauagaaucucacugauag

SEQ ID NO: 283686 - RNA, 32 nt, Human
aaaauagacagaaaugggcugcacaccagaau

SEQ ID NO: 283687 - RNA, 32 nt, Human
aaaauagagaagaaaggaaccaugaagaaaca

SEQ ID NO: 283688 - RNA, 32 nt, Human
aaaauagagagagggaaaaauccuuguuuucu

SEQ ID NO: 283689 - RNA, 32 nt, Human
aaaauagagcaucucagagaaggaggugaguu

SEQ ID NO: 283690 - RNA, 32 nt, Human
aaaauagagccaagaccucuggucucaaauau

SEQ ID NO: 283691 - RNA, 32 nt, Human
aaaauagaggagagaaagagagcaugagaggg

SEQ ID NO: 283692 - RNA, 32 nt, Human
aaaauagagucccuuccccaaacaucugacau

SEQ ID NO: 283693 - RNA, 32 nt, Human
aaaauagaucaguguuaaacuagauuguauuc

SEQ ID NO: 283694 - RNA, 32 nt, Human
aaaauagaugugguauugcucugaggaccagg

SEQ ID NO: 283695 - RNA, 32 nt, Human
aaaauagcaaaguggcugggcaugguggcuca

SEQ ID NO: 283696 - RNA, 32 nt, Human
aaaauagcacaauuguaccuccccuuuguugg

SEQ ID NO: 283697 - RNA, 32 nt, Human
aaaauagcacuuccuugauggaacauacauuu

SEQ ID NO: 283698 - RNA, 32 nt, Human
aaaauagcagagccaggggaacagacgcaugu

SEQ ID NO: 283699 - RNA, 32 nt, Human
aaaauagccagguguagcgacacacaccugua

SEQ ID NO: 283700 - RNA, 32 nt, Human
aaaauagccagguguagcgacacacaccugug

SEQ ID NO: 283701 - RNA, 32 nt, Human
aaaauagccccaaacugcaauuccauaugacu

SEQ ID NO: 283702 - RNA, 32 nt, Human
aaaauagccccuccugaagauaaaaucauuca

SEQ ID NO: 283703 - RNA, 32 nt, Human
aaaauagccugccuugggacagguguguaaug

SEQ ID NO: 283704 - RNA, 32 nt, Human
aaaauagcguggccagauuggagagagaaguu

SEQ ID NO: 283705 - RNA, 32 nt, Human
aaaauagcuccugcccaguggcucuugguucc

SEQ ID NO: 283706 - RNA, 32 nt, Human
aaaauaggacugaccaagaagcagaaaagcaa

SEQ ID NO: 283707 - RNA, 32 nt, Human
aaaauaggcacuuugggccaaaagcucuaaug

SEQ ID NO: 283708 - RNA, 32 nt, Human
aaaauaggcaggaggaagaugcggaggagggu

SEQ ID NO: 283709 - RNA, 32 nt, Human
aaaauagggauaguuauaccuaccacacaacc

SEQ ID NO: 283710 - RNA, 32 nt, Human
aaaauagggcuggaucuuaucacugcccuguc

SEQ ID NO: 283711 - RNA, 32 nt, Human
aaaauagguaucaaauuuuggaaaagagauuu

SEQ ID NO: 283712 - RNA, 32 nt, Human
aaaauagguguccaaguagucacacugagacu

SEQ ID NO: 283713 - RNA, 32 nt, Human
aaaauaguaaaggucuugaagaaugccagcga

SEQ ID NO: 283714 - RNA, 32 nt, Human
aaaauaguaggccacuuggcucacacagaaga

SEQ ID NO: 283715 - RNA, 21 nt, Human
aaaauaguauagaaaaaagua

SEQ ID NO: 283716 - RNA, 32 nt, Human
aaaauaguccugccugagguugcagugagccg

SEQ ID NO: 283717 - RNA, 32 nt, Human
aaaauaguccugcuuaaauucacauggugugg

SEQ ID NO: 283718 - RNA, 32 nt, Human
aaaauagucuagaccagcuagugcuuccacag

SEQ ID NO: 283719 - RNA, 32 nt, Human
aaaauagucugagucacuuucacuuucagccu

SEQ ID NO: 283720 - RNA, 32 nt, Human
aaaauagucugcaguuuaaucucuccaaagcu

SEQ ID NO: 283721 - RNA, 32 nt, Human
aaaauaguggugagcuggaggcuacuuccgcc

SEQ ID NO: 283722 - RNA, 32 nt, Human
aaaauaguggugcuucuuucugaucucuagug

SEQ ID NO: 283723 - RNA, 32 nt, Human
aaaauauaacaaagggcaucauuaaguagacc

SEQ ID NO: 283724 - RNA, 32 nt, Human
aaaauauaacaauacuaaauaucacacuguga

SEQ ID NO: 283725 - RNA, 21 nt, Human
aaaauauaacuucuugauuua

SEQ ID NO: 283726 - RNA, 32 nt, Human
aaaauauaagagaacauagggccaggcacugu

SEQ ID NO: 283727 - RNA, 32 nt, Human
aaaauauaaggaaaaagaauauagacaagcau

SEQ ID NO: 283728 - RNA, 32 nt, Human
aaaauauacauacuaguaccauuaucuucuuu

SEQ ID NO: 283729 - RNA, 32 nt, Human
aaaauauacaugucaccgaagcaaguguaccc

SEQ ID NO: 283730 - RNA, 32 nt, Human
aaaauauagcauuaaaccacuaaagcuaagga

SEQ ID NO: 283731 - RNA, 32 nt, Human
aaaauauaguccugaaaauuuuccuuaucgcc

SEQ ID NO: 283732 - RNA, 32 nt, Human
aaaauauauccaggugcuaaauaggcagcaga

SEQ ID NO: 283733 - RNA, 32 nt, Human
aaaauauauuccccaaacacccauaagaauuc

SEQ ID NO: 283734 - RNA, 32 nt, Human
aaaauauauuuuuaugagcugguacugacagu

SEQ ID NO: 283735 - RNA, 32 nt, Human
aaaauaucaauggugcugagguugagaaaacc

SEQ ID NO: 283736 - RNA, 32 nt, Human
aaaauaucagcuuuaaaauaugaaagugcuag

SEQ ID NO: 283737 - RNA, 32 nt, Human
aaaauaucauuaguccugagguugagaaaccc

SEQ ID NO: 283738 - RNA, 32 nt, Human
aaaauaucauucuucuuuuuauuuguuuucac

SEQ ID NO: 283739 - RNA, 32 nt, Human
aaaauaucucuaacaaaguuuuacucuucuau

SEQ ID NO: 283740 - RNA, 32 nt, Human
aaaauaucuugcaagcuccaccuucacuuugc

SEQ ID NO: 283741 - RNA, 32 nt, Human
aaaauaucuuuguuuugcuuucauucacaaag

SEQ ID NO: 283742 - RNA, 32 nt, Human
aaaauaugaccacacuccagcugggaucacau

SEQ ID NO: 283743 - RNA, 32 nt, Human
aaaauaugaguauuuugauaccuuuucuuuac

SEQ ID NO: 283744 - RNA, 32 nt, Human
aaaauaugcuauuguuuagacuuuccauccuu

SEQ ID NO: 283745 - RNA, 32 nt, Human
aaaauauguaugaagaaaagguguacaaaaau

SEQ ID NO: 283746 - RNA, 32 nt, Human
aaaauaugugcacauauggauguauguugaaa

SEQ ID NO: 283747 - RNA, 32 nt, Human
aaaauauguguaucuucuuaauguguucaugu

SEQ ID NO: 283748 - RNA, 32 nt, Human
aaaauauguucauuuccaccuuccucagaugg

SEQ ID NO: 283749 - RNA, 32 nt, Human
aaaauauuaaauuggugcaaaaguaauugccg

SEQ ID NO: 283750 - RNA, 32 nt, Human
aaaauauuacaaaucccaagucccagauugua

SEQ ID NO: 283751 - RNA, 32 nt, Human
aaaauauuagccauuugagaugagaugagacu

SEQ ID NO: 283752 - RNA, 32 nt, Human
aaaauauuauuaaaauacaggaguuuaccuua

SEQ ID NO: 283753 - RNA, 32 nt, Human
aaaauauucaaaagccauucagugcugguuuu

SEQ ID NO: 283754 - RNA, 32 nt, Human
aaaauauugaaaugcuucucuagauuaugcuu

SEQ ID NO: 283755 - RNA, 32 nt, Human
aaaauauugacauugaauggaucaauacacac

SEQ ID NO: 283756 - RNA, 32 nt, Human
aaaauauugaugaucaggcagauuugaaaaca

SEQ ID NO: 283757 - RNA, 32 nt, Human
aaaauauugguaacagugggccccaguaugga

SEQ ID NO: 283758 - RNA, 32 nt, Human
aaaauauuugagaaaaauaaaguacaaguuuu

SEQ ID NO: 283759 - RNA, 32 nt, Human
aaaauauuuuaaaagauauuguauuuauguug

SEQ ID NO: 283760 - RNA, 32 nt, Human
aaaauauuuuaagagauuuauucugagccaaa

SEQ ID NO: 283761 - RNA, 32 nt, Human
aaaauauuuucaucuuucccccaaaccuccuu

SEQ ID NO: 283762 - RNA, 23 nt, Human
aaaauauuuugagcuccuucagc

SEQ ID NO: 283763 - RNA, 32 nt, Human
aaaauauuuugugaaaagcuguauuuauuaua

SEQ ID NO: 283764 - RNA, 32 nt, Human
aaaaucaaaaacaaauguccccggaucuuucg

SEQ ID NO: 283765 - RNA, 32 nt, Human
aaaaucaaaauggauuuagagaaaaauuaucc

SEQ ID NO: 283766 - RNA, 32 nt, Human
aaaaucaacacuaaugauaaaugaaguauaua

SEQ ID NO: 283767 - RNA, 32 nt, Human
aaaaucaacccagcaccagcagcuaccaacca

SEQ ID NO: 283768 - RNA, 32 nt, Human
aaaaucaacccauaucccagacugcuuugccu

SEQ ID NO: 283769 - RNA, 32 nt, Human
aaaaucaacuuccagcccuaucuacugucugg

SEQ ID NO: 283770 - RNA, 32 nt, Human
aaaaucaagaaggcaugacugugcacaguucu

SEQ ID NO: 283771 - RNA, 32 nt, Human
aaaaucaagacaccuuccagcccuaccaucag

SEQ ID NO: 283772 - RNA, 32 nt, Human
aaaaucaagguacaggaaaacuccuuguuauc

SEQ ID NO: 283773 - RNA, 32 nt, Human
aaaaucaagguuuggcuucaguuuaaaucacu

SEQ ID NO: 283774 - RNA, 32 nt, Human
aaaaucaagucaccacacuccagccuggguga

SEQ ID NO: 283775 - RNA, 32 nt, Human
aaaaucacaaaccuugaaaaauuuuacaucag

SEQ ID NO: 283776 - RNA, 32 nt, Human
aaaaucaccaaggagacuuugcauuaaguuca

SEQ ID NO: 283777 - RNA, 32 nt, Human
aaaaucacccagccgauuggggguuucccauc

SEQ ID NO: 283778 - RNA, 32 nt, Human
aaaaucacgccacugcacuccagccugggcaa

SEQ ID NO: 283779 - RNA, 32 nt, Human
aaaaucagaggaaaggaggcugccauucccuu

SEQ ID NO: 283780 - RNA, 32 nt, Human
aaaaucagagggcugaaagagacacuucuaua

SEQ ID NO: 283781 - RNA, 32 nt, Human
aaaaucagagguggaggucaggggguuagguc

SEQ ID NO: 283782 - RNA, 32 nt, Human
aaaaucagcacugccugaguaguuuugaucag

SEQ ID NO: 283783 - RNA, 32 nt, Human
aaaaucagccaaggacuaagcuuccauagaaa

SEQ ID NO: 283784 - RNA, 32 nt, Human
aaaaucagccugggguauauagcgagacgcca

SEQ ID NO: 283785 - RNA, 32 nt, Human
aaaaucagccugucugcucucuccuugcucaa

SEQ ID NO: 283786 - RNA, 32 nt, Human
aaaaucagcucucauaacuaaguuaauuuagu

SEQ ID NO: 283787 - RNA, 32 nt, Human
aaaaucagcugguucugcugcuugguuucaac

SEQ ID NO: 283788 - RNA, 32 nt, Human
aaaaucagcuuuguaacuguuuucaaggaggu

SEQ ID NO: 283789 - RNA, 32 nt, Human
aaaaucaggaagguaaagcaaaucucuggagg

SEQ ID NO: 283790 - RNA, 32 nt, Human
aaaaucaggccagaggacaacaggcuggcguu

SEQ ID NO: 283791 - RNA, 32 nt, Human
aaaaucaggcuacagcacuccagccugggcaa

SEQ ID NO: 283792 - RNA, 32 nt, Human
aaaaucaggcuggacguggugguucaugccua

SEQ ID NO: 283793 - RNA, 32 nt, Human
aaaaucaggcuugagugcaguggcgcaaucgu

SEQ ID NO: 283794 - RNA, 32 nt, Human
aaaaucagguauaaaguucagaugagauuccc

SEQ ID NO: 283795 - RNA, 32 nt, Human
aaaaucagguggaccuuccuggacauauccug

SEQ ID NO: 283796 - RNA, 32 nt, Human
aaaaucaggugggugggaaucucuuggagaac

SEQ ID NO: 283797 - RNA, 32 nt, Human
aaaaucagugacaucugauuggcagaugagcu

SEQ ID NO: 283798 - RNA, 32 nt, Human
aaaaucagugauguauaaacuaguucaugagu

SEQ ID NO: 283799 - RNA, 32 nt, Human
aaaaucaguucuguaggaaucccuuuccccuc

SEQ ID NO: 283800 - RNA, 32 nt, Human
aaaaucauaggcuuuuucugugcauugaacuu

SEQ ID NO: 283801 - RNA, 32 nt, Human
aaaaucauaggcuuuuucugugcauugaauuu

SEQ ID NO: 283802 - RNA, 32 nt, Human
aaaaucaucuaagaaaucguucacucuugcua

SEQ ID NO: 283803 - RNA, 32 nt, Human
aaaaucaugauauuuaaaaauggucaaauauu

SEQ ID NO: 283804 - RNA, 32 nt, Human
aaaaucaugccacugcacuccagccugggcaa

SEQ ID NO: 283805 - RNA, 32 nt, Human
aaaaucaugccauugcacuccagccuggguga

SEQ ID NO: 283806 - RNA, 32 nt, Human
aaaaucaugggacuugccauuuaggaggauaa

SEQ ID NO: 283807 - RNA, 32 nt, Human
aaaaucauggugguaggcaaaugaggagcagu

SEQ ID NO: 283808 - RNA, 32 nt, Human
aaaaucauuaccuguggaaugacuaggaauau

SEQ ID NO: 283809 - RNA, 32 nt, Human
aaaaucauuaccuguggaauggcuaggaauau

SEQ ID NO: 283810 - RNA, 31 nt, Human
aaaaucauugucgcuggaccugugucugcac

SEQ ID NO: 283811 - RNA, 32 nt, Human
aaaaucauuucagucuccugaggucucaugcu

SEQ ID NO: 283812 - RNA, 32 nt, Human
aaaauccaaauggacaucaacagcuuucauca

SEQ ID NO: 283813 - RNA, 32 nt, Human
aaaauccacaauauuccaaguacaacucuuca

SEQ ID NO: 283814 - RNA, 32 nt, Human
aaaauccacagcuauauccugaugcuggaugg

SEQ ID NO: 283815 - RNA, 32 nt, Human
aaaauccaccugucucccaucuggggcucuuu

SEQ ID NO: 283816 - RNA, 32 nt, Human
aaaauccacugcaccuccacuuggugacugac

SEQ ID NO: 283817 - RNA, 32 nt, Human
aaaauccagaacuuggacuccaucguuaaaau

SEQ ID NO: 283818 - RNA, 32 nt, Human
aaaauccagaagcaagauuccguaagcugaga

SEQ ID NO: 283819 - RNA, 32 nt, Human
aaaauccagcagguggagguugcagugagcca

SEQ ID NO: 283820 - RNA, 32 nt, Human
aaaauccagccugggagccccuggaguggcag

SEQ ID NO: 283821 - RNA, 32 nt, Human
aaaauccaggucaugcaguuccuggcccauca

SEQ ID NO: 283822 - RNA, 32 nt, Human
aaaauccagucuuucaggaagaacaaacugac

SEQ ID NO: 283823 - RNA, 32 nt, Human
aaaauccagugcacucccuaggaaauccggga

SEQ ID NO: 283824 - RNA, 32 nt, Human
aaaauccaguugaccuggacaguauuauaugu

SEQ ID NO: 283825 - RNA, 32 nt, Human
aaaaucccaaagugccuucugagcugucuaaa

SEQ ID NO: 283826 - RNA, 32 nt, Human
aaaaucccaagaagauggagaagugcaucccu

SEQ ID NO: 283827 - RNA, 32 nt, Human
aaaaucccaagugacccacagaagcuguccua

SEQ ID NO: 283828 - RNA, 32 nt, Human
aaaaucccaccacugcacuccagccuggguga

SEQ ID NO: 283829 - RNA, 32 nt, Human
aaaaucccacccauguuguaccaccuugguga

SEQ ID NO: 283830 - RNA, 32 nt, Human
aaaaucccacugaugcccaucaugcccucaga

SEQ ID NO: 283831 - RNA, 32 nt, Human
aaaauccccaacaaaagccuguuucucuagac

SEQ ID NO: 283832 - RNA, 32 nt, Human
aaaauccccagcagcugggacugaagggaagc

SEQ ID NO: 283833 - RNA, 32 nt, Human
aaaaucccucaaaucacaaauagcugaagcca

SEQ ID NO: 283834 - RNA, 32 nt, Human
aaaauccucacugcacuccagcagaggcuaga

SEQ ID NO: 283835 - RNA, 32 nt, Human
aaaauccucugaacagaacuuggccuuuuguu

SEQ ID NO: 283836 - RNA, 32 nt, Human
aaaauccugcagcguucaaguuugaugcugcc

SEQ ID NO: 283837 - RNA, 32 nt, Human
aaaauccuguucuagugaaugucaugcagaua

SEQ ID NO: 283838 - RNA, 32 nt, Human
aaaauccuuaagagacugcuuucuugauucag

SEQ ID NO: 283839 - RNA, 32 nt, Human
aaaauccuucaccaauuuuuccacauacuuuc

SEQ ID NO: 283840 - RNA, 32 nt, Human
aaaauccuuggaaauacaaugagacucaucag

SEQ ID NO: 283841 - RNA, 32 nt, Human
aaaauccuuggcuguucagucacugcggucuu

SEQ ID NO: 283842 - RNA, 32 nt, Human
aaaaucgcacagacacugcgugcaauguuguu

SEQ ID NO: 283843 - RNA, 32 nt, Human
aaaaucgcauuuuccuuauuucugcuuuuaua

SEQ ID NO: 283844 - RNA, 32 nt, Human
aaaaucgccacacuuggaaaaguuucaucagu

SEQ ID NO: 283845 - RNA, 32 nt, Human
aaaaucgcgucacugcacuccagccugaguga

SEQ ID NO: 283846 - RNA, 32 nt, Human
aaaaucgcugggaucuggagaggaagacucag

SEQ ID NO: 283847 - RNA, 32 nt, Human
aaaaucgcuugaaccugggagguggaaguugc

SEQ ID NO: 283848 - RNA, 32 nt, Human
aaaaucgugguugaguuucacugcagcaggcu

SEQ ID NO: 283849 - RNA, 32 nt, Human
aaaaucuaaaaauucuugcaaugaguaguaua

SEQ ID NO: 283850 - RNA, 32 nt, Human
aaaaucuaaguugccauggaagaaauaccagu

SEQ ID NO: 283851 - RNA, 32 nt, Human
aaaaucuacuaaaaugaggauuaguaauauaa

SEQ ID NO: 283852 - RNA, 32 nt, Human
aaaaucuagaggaaaagaaagaaguuauuuuc

SEQ ID NO: 283853 - RNA, 32 nt, Human
aaaaucuaggccgggugcaguggcucaugccu

SEQ ID NO: 283854 - RNA, 32 nt, Human
aaaaucuaguuucuuccugaaggaggaucccu

SEQ ID NO: 283855 - RNA, 32 nt, Human
aaaaucuaucuucccaucuccuaaaacucaga

SEQ ID NO: 283856 - RNA, 32 nt, Human
aaaaucuauucucucccccuuucucccuggau

SEQ ID NO: 283857 - RNA, 32 nt, Human
aaaaucucaagaaaacagaaauggcaugcuuu

SEQ ID NO: 283858 - RNA, 32 nt, Human
aaaaucucagaagaaugauuaggggcacccaa

SEQ ID NO: 283859 - RNA, 32 nt, Human
aaaaucucagaggaagcuacuuaggacaucau

SEQ ID NO: 283860 - RNA, 32 nt, Human
aaaaucuccaucagagcaaggcagccagagaa

SEQ ID NO: 283861 - RNA, 32 nt, Human
aaaaucuccaucucaaaaauaaugcauaaacu

SEQ ID NO: 283862 - RNA, 32 nt, Human
aaaaucucguuuucucuucuuccuucuuuuaa

SEQ ID NO: 283863 - RNA, 32 nt, Human
aaaaucucugcagucaauuuuuaucuccucug

SEQ ID NO: 283864 - RNA, 32 nt, Human
aaaaucucuguaaccauuucuuuuauguacau

SEQ ID NO: 283865 - RNA, 32 nt, Human
aaaaucucuucucccuucucccuccaucaucg

SEQ ID NO: 283866 - RNA, 32 nt, Human
aaaaucugaacagggccaggugcaguggcuca

SEQ ID NO: 283867 - RNA, 32 nt, Human
aaaaucugaagaguccauaaacuuuugaaaau

SEQ ID NO: 283868 - RNA, 32 nt, Human
aaaaucugacacucaagaaggucgauugacac

SEQ ID NO: 283869 - RNA, 32 nt, Human
aaaaucugcaaagucuuuccagccugguccag

SEQ ID NO: 283870 - RNA, 32 nt, Human
aaaaucugcacuggggucgggcacaguggcuc

SEQ ID NO: 283871 - RNA, 32 nt, Human
aaaaucugcagcagccucugauagcaggaaga

SEQ ID NO: 283872 - RNA, 32 nt, Human
aaaaucugcauugccauugaugcauaugcacc

SEQ ID NO: 283873 - RNA, 32 nt, Human
aaaaucugcucacaguuuguucuggaggucac

SEQ ID NO: 283874 - RNA, 32 nt, Human
aaaaucugcuuuucacacugggugauaauaac

SEQ ID NO: 283875 - RNA, 32 nt, Human
aaaaucuggaaccuuacuucucugggaaucuu

SEQ ID NO: 283876 - RNA, 32 nt, Human
aaaaucugggaaauacagucucugcuugggcg

SEQ ID NO: 283877 - RNA, 32 nt, Human
aaaaucugggcuguggggagagagaauugugu

SEQ ID NO: 283878 - RNA, 32 nt, Human
aaaaucugguucacaucauaaagaacuugauu

SEQ ID NO: 283879 - RNA, 32 nt, Human
aaaaucuguauauucagcuauuuggagaacuc

SEQ ID NO: 283880 - RNA, 32 nt, Human
aaaaucugucucaggcugguaguuagcaguug

SEQ ID NO: 283881 - RNA, 32 nt, Human
aaaaucugugaagaaagagguuaggaguagau

SEQ ID NO: 283882 - RNA, 32 nt, Human
aaaaucugugucucaaaaacaaaacaaaacaa

SEQ ID NO: 283883 - RNA, 32 nt, Human
aaaaucuguucagguugguguaccguguaaag

SEQ ID NO: 283884 - RNA, 32 nt, Human
aaaaucuuacuuccucuauucucugagccgcu

SEQ ID NO: 283885 - RNA, 32 nt, Human
aaaaucuuaggccagugcaguggcucacaccu

SEQ ID NO: 283886 - RNA, 32 nt, Human
aaaaucuuauuccuccucuucuccccucacuu

SEQ ID NO: 283887 - RNA, 32 nt, Human
aaaaucuucacaaggauucaugacauucgugc

SEQ ID NO: 283888 - RNA, 32 nt, Human
aaaaucuucccugaguucugaacccagcacca

SEQ ID NO: 283889 - RNA, 32 nt, Human
aaaaucuucccuuuguugacuggccuucacag

SEQ ID NO: 283890 - RNA, 32 nt, Human
aaaaucuugccuuucgagaauccgaguccuga

SEQ ID NO: 283891 - RNA, 32 nt, Human
aaaaucuuugucgucugcaucuggaaccaaaa

SEQ ID NO: 283892 - RNA, 32 nt, Human
aaaaugaaaaguccccagagaaaccccacagu

SEQ ID NO: 283893 - RNA, 32 nt, Human
aaaaugaaaauguauagauuacacagccagga

SEQ ID NO: 283894 - RNA, 25 nt, Human
aaaaugaaacucuuuguuuucuucu

SEQ ID NO: 283895 - RNA, 32 nt, Human
aaaaugaaagccucagaagcaaaagugaccuu

SEQ ID NO: 283896 - RNA, 31 nt, Human
aaaaugaaaguauuuggacaugcagacagaa

SEQ ID NO: 283897 - RNA, 32 nt, Human
aaaaugaaauauuuuaacauuuuaugggucag

SEQ ID NO: 283898 - RNA, 27 nt, Human
aaaaugaacaccagauuauuaucuucu

SEQ ID NO: 283899 - RNA, 32 nt, Human
aaaaugaacagcuucaacuucuugccgaugag

SEQ ID NO: 283900 - RNA, 32 nt, Human
aaaaugaacuaggcaggugaggugguguuugc

SEQ ID NO: 283901 - RNA, 32 nt, Human
aaaaugaagagagaggguuuuaccauccugag

SEQ ID NO: 283902 - RNA, 32 nt, Human
aaaaugaagaggagcaaggagugaaggagugg

SEQ ID NO: 283903 - RNA, 21 nt, Human
aaaaugaagcaaaacaaaaca

SEQ ID NO: 283904 - RNA, 32 nt, Human
aaaaugaagcccagagagguuaagugacuugc

SEQ ID NO: 283905 - RNA, 19 nt, Human
aaaaugaaguggcuuuuca

SEQ ID NO: 283906 - RNA, 32 nt, Human
aaaaugaauaccucuaguuguuuugaggauua

SEQ ID NO: 283907 - RNA, 28 nt, Human
aaaaugaaucuuauugugaaacuucgga

SEQ ID NO: 283908 - RNA, 28 nt, Human
aaaaugacaaagcauccaccuaacagac

SEQ ID NO: 283909 - RNA, 32 nt, Human
aaaaugacacuaugaguuggccagucuaggau

SEQ ID NO: 283910 - RNA, 28 nt, Human
aaaaugacagaucucguagcuguuuggg

SEQ ID NO: 283911 - RNA, 32 nt, Human
aaaaugacauggacaaaagcaucucuaaucac

SEQ ID NO: 283912 - RNA, 28 nt, Human
aaaaugaccacauucaaggagggacuga

SEQ ID NO: 283913 - RNA, 31 nt, Human
aaaaugaccucaccauuuuuguucuagggau

SEQ ID NO: 283914 - RNA, 32 nt, Human
aaaaugacuauugguggggagguguaaauaag

SEQ ID NO: 283915 - RNA, 32 nt, Human
aaaaugacuccuaguuguguuuggaaagggag

SEQ ID NO: 283916 - RNA, 32 nt, Human
aaaaugacugccucauguuacaugugucaaac

SEQ ID NO: 283917 - RNA, 32 nt, Human
aaaaugacuucauuccagaggcuucucagagu

SEQ ID NO: 283918 - RNA, 24 nt, Human
aaaaugacuugguucuuuucuucu

SEQ ID NO: 283919 - RNA, 32 nt, Human
aaaaugacuuuuaggcugggugcaguggcuca

SEQ ID NO: 283920 - RNA, 21 nt, Human
aaaaugagaaaaagcuuuccu

SEQ ID NO: 283921 - RNA, 23 nt, Human
aaaaugagaaagaauacaagaaa

SEQ ID NO: 283922 - RNA, 32 nt, Human
aaaaugagaaauuaaaccugcaagugaaacau

SEQ ID NO: 283923 - RNA, 32 nt, Human
aaaaugagaacauguuaguauuuaucuauugu

SEQ ID NO: 283924 - RNA, 32 nt, Human
aaaaugagaacauguugguauuuaucuauugu

SEQ ID NO: 283925 - RNA, 32 nt, Human
aaaaugagagacagaagccacaggggaagcaa

SEQ ID NO: 283926 - RNA, 32 nt, Human
aaaaugagagagaaaauuaaugugacaaaaug

SEQ ID NO: 283927 - RNA, 28 nt, Human
aaaaugagaucgaggcaccaguggaagg

SEQ ID NO: 283928 - RNA, 32 nt, Human
aaaaugagauggaggaaggaaaaagggagaag

SEQ ID NO: 283929 - RNA, 32 nt, Human
aaaaugagauuugaagaggagcaacaguccaa

SEQ ID NO: 283930 - RNA, 32 nt, Human
aaaaugagcacacccuucacacuguuaucacc

SEQ ID NO: 283931 - RNA, 32 nt, Human
aaaaugagcauacaucuuaaaucuuuucaauu

SEQ ID NO: 283932 - RNA, 32 nt, Human
aaaaugagccaggcauguggugguguaugccu

SEQ ID NO: 283933 - RNA, 32 nt, Human
aaaaugagcccccauuccacagacacuggagu

SEQ ID NO: 283934 - RNA, 21 nt, Human
aaaaugagcguguuuucucuc

SEQ ID NO: 283935 - RNA, 32 nt, Human
aaaaugaggaaccaagugaaacuacggauaua

SEQ ID NO: 283936 - RNA, 32 nt, Human
aaaaugaggcacaggcuuguuugccgagugga

SEQ ID NO: 283937 - RNA, 32 nt, Human
aaaaugagggccugaagcaaugcuuacaauag

SEQ ID NO: 283938 - RNA, 32 nt, Human
aaaaugagguuuugcuuucaggauuuggcgua

SEQ ID NO: 283939 - RNA, 32 nt, Human
aaaaugaguaaaccagcgaggugucacgccug

SEQ ID NO: 283940 - RNA, 32 nt, Human
aaaaugaguccaggccaagcaaauggagcaga

SEQ ID NO: 283941 - RNA, 32 nt, Human
aaaaugaucacaccaacucugccuacacacuu

SEQ ID NO: 283942 - RNA, 32 nt, Human
aaaaugaucagccaugugaagauucgaaacuu

SEQ ID NO: 283943 - RNA, 32 nt, Human
aaaaugauccagaaaaaugcaagcaaguccac

SEQ ID NO: 283944 - RNA, 32 nt, Human
aaaaugaucuguccauacccacugccuggaga

SEQ ID NO: 283945 - RNA, 32 nt, Human
aaaaugaucuuucuguccuuuuccuagauaca

SEQ ID NO: 283946 - RNA, 32 nt, Human
aaaaugaugcuggucaucccagcuucagcauc

SEQ ID NO: 283947 - RNA, 32 nt, Human
aaaaugaugcuggucaucgcagcuucagcauc

SEQ ID NO: 283948 - RNA, 32 nt, Human
aaaaugauggaagaggcggagguggaggcgac

SEQ ID NO: 283949 - RNA, 32 nt, Human
aaaaugauggccugggcuuucugaggccuuau

SEQ ID NO: 283950 - RNA, 32 nt, Human
aaaaugaugucuacccgccuugcugaugagua

SEQ ID NO: 283951 - RNA, 32 nt, Human
aaaaugaugucuaccugccuugcugaugagua

SEQ ID NO: 283952 - RNA, 32 nt, Human
aaaaugauuuauagauccagcugugcuuaaga

SEQ ID NO: 283953 - RNA, 32 nt, Human
aaaaugauuuccaaagcagaacauggaacuuc

SEQ ID NO: 283954 - RNA, 32 nt, Human
aaaaugcaaaagaccauagaauuuguauuucu

SEQ ID NO: 283955 - RNA, 32 nt, Human
aaaaugcaaaauauagcaccccugccacuuug

SEQ ID NO: 283956 - RNA, 32 nt, Human
aaaaugcaaagucaaauaaaaggugucuuggu

SEQ ID NO: 283957 - RNA, 32 nt, Human
aaaaugcaaauagcugaaggggaaggaaaagu

SEQ ID NO: 283958 - RNA, 32 nt, Human
aaaaugcaacaacauguauaauauuuuuaauu

SEQ ID NO: 283959 - RNA, 28 nt, Human
aaaaugcacaugacaguacuuauuccuc

SEQ ID NO: 283960 - RNA, 32 nt, Human
aaaaugcaccacugcacuccagcaugggcaac

SEQ ID NO: 283961 - RNA, 19 nt, Human
aaaaugcaccuuucugaca

SEQ ID NO: 283962 - RNA, 32 nt, Human
aaaaugcagaacuuaaucuggacacacuguua

SEQ ID NO: 283963 - RNA, 32 nt, Human
aaaaugcagauagagaaaaagaagaaaauaaa

SEQ ID NO: 283964 - RNA, 32 nt, Human
aaaaugcagcagcauaggagugaacaacagca

SEQ ID NO: 283965 - RNA, 32 nt, Human
aaaaugcagccaucggcccucagguggccucu

SEQ ID NO: 283966 - RNA, 32 nt, Human
aaaaugcagggugacugaguucccugcccagc

SEQ ID NO: 283967 - RNA, 28 nt, Human
aaaaugcaguauucgcaccacugugagc

SEQ ID NO: 283968 - RNA, 32 nt, Human
aaaaugcagucuuuauggcaaaaagcuuguga

SEQ ID NO: 283969 - RNA, 32 nt, Human
aaaaugcauaugcacgugcaauuugcacggca

SEQ ID NO: 283970 - RNA, 32 nt, Human
aaaaugcauauuaauuucuucccccaaagccg

SEQ ID NO: 283971 - RNA, 32 nt, Human
aaaaugcauggagaaaaggaauuuguuuaaau

SEQ ID NO: 283972 - RNA, 32 nt, Human
aaaaugcauuaucuccccagaccagagacagu

SEQ ID NO: 283973 - RNA, 32 nt, Human
aaaaugccaaauuuauuaaggugguggagcca

SEQ ID NO: 283974 - RNA, 32 nt, Human
aaaaugccacagcccagaauucugggcaaguc

SEQ ID NO: 283975 - RNA, 31 nt, Human
aaaaugccacuuuucuguuccugaagaggcc

SEQ ID NO: 283976 - RNA, 31 nt, Human
aaaaugccacuuuucuguuccugaagaggcu

SEQ ID NO: 283977 - RNA, 32 nt, Human
aaaaugccaugcagacuuuaaagagaauggcc

SEQ ID NO: 283978 - RNA, 32 nt, Human
aaaaugccccagacuuuuucccaaaccucaaa

SEQ ID NO: 283979 - RNA, 32 nt, Human
aaaaugccugucccagccuccuggccccaucc

SEQ ID NO: 283980 - RNA, 32 nt, Human
aaaaugccuuauugaaaaacuaaagcaaauuc

SEQ ID NO: 283981 - RNA, 32 nt, Human
aaaaugccuuucuccucccugaauggagggcu

SEQ ID NO: 283982 - RNA, 32 nt, Human
aaaaugcuagggaccagaaagguuucagauuu

SEQ ID NO: 283983 - RNA, 32 nt, Human
aaaaugcucaaggaauuagcucugggaauaug

SEQ ID NO: 283984 - RNA, 32 nt, Human
aaaaugcucagaauuucacacugugaauccac

SEQ ID NO: 283985 - RNA, 32 nt, Human
aaaaugcucuuauuucaucauucacuucacug

SEQ ID NO: 283986 - RNA, 24 nt, Human
aaaaugcugacagucugacaccaa

SEQ ID NO: 283987 - RNA, 21 nt, Human
aaaaugcugacauaacaccaa

SEQ ID NO: 283988 - RNA, 32 nt, Human
aaaaugcugaggaaaaugugacggcaggugcc

SEQ ID NO: 283989 - RNA, 32 nt, Human
aaaaugcugagugaguggaggucugggaauga

SEQ ID NO: 283990 - RNA, 32 nt, Human
aaaaugcugauaagcacaguuaauucuaaaau

SEQ ID NO: 283991 - RNA, 32 nt, Human
aaaaugcuggcugaagaccccugcugaaaaca

SEQ ID NO: 283992 - RNA, 32 nt, Human
aaaaugcugguaacugcauuacugcaguuuuu

SEQ ID NO: 283993 - RNA, 32 nt, Human
aaaaugcugucaguucugaccuccgggcaggg

SEQ ID NO: 283994 - RNA, 32 nt, Human
aaaaugcugucuccagcucacacagcaccaca

SEQ ID NO: 283995 - RNA, 32 nt, Human
aaaaugcuguuuaggcugggcuugguggcuca

SEQ ID NO: 283996 - RNA, 32 nt, Human
aaaauggaaaccagacugucuucaaauucuuc

SEQ ID NO: 283997 - RNA, 32 nt, Human
aaaauggaagcgguuggacugauggugucuga

SEQ ID NO: 283998 - RNA, 28 nt, Human
aaaauggaagugagcaaggguccuauga

SEQ ID NO: 283999 - RNA, 32 nt, Human
aaaauggaauagggacucagggugggucaggu

SEQ ID NO: 284000 - RNA, 32 nt, Human
aaaauggaaugacugcuuaguccuuucucaga

SEQ ID NO: 284001 - RNA, 32 nt, Human
aaaauggacacacaauccuccuccagggacug

SEQ ID NO: 284002 - RNA, 32 nt, Human
aaaauggaccaaucagugcucuguaaaaugga

SEQ ID NO: 284003 - RNA, 32 nt, Human
aaaauggaccauaucgggucucagggccauuu

SEQ ID NO: 284004 - RNA, 20 nt, Human
aaaauggacucaugcacaga

SEQ ID NO: 284005 - RNA, 32 nt, Human
aaaauggacuccuucuuccuaucagcucuaga

SEQ ID NO: 284006 - RNA, 31 nt, Human
aaaauggacuguuucugaccagagacacuua

SEQ ID NO: 284007 - RNA, 32 nt, Human
aaaauggagauggcaucaaacuaguggucaag

SEQ ID NO: 284008 - RNA, 32 nt, Human
aaaauggaggcagcgggggcggcggcgugaag

SEQ ID NO: 284009 - RNA, 32 nt, Human
aaaauggauccaguaagaagagucaaggcuuu

SEQ ID NO: 284010 - RNA, 32 nt, Human
aaaauggauggacugaaccaauuagaauugau

SEQ ID NO: 284011 - RNA, 32 nt, Human
aaaauggauucuguggccauccaagggaugua

SEQ ID NO: 284012 - RNA, 32 nt, Human
aaaauggcaaaaacauuugcauuuacaaacaa

SEQ ID NO: 284013 - RNA, 32 nt, Human
aaaauggcaauccaguguugacuguucccuaa

SEQ ID NO: 284014 - RNA, 32 nt, Human
aaaauggcaauuuuugagugccaagucagaaa

SEQ ID NO: 284015 - RNA, 31 nt, Human
aaaauggcacccuucugacauucugaggcag

SEQ ID NO: 284016 - RNA, 31 nt, Human
aaaauggcacuuuugauaugagacaauguag

SEQ ID NO: 284017 - RNA, 32 nt, Human
aaaauggcagggccaggcgagaaccugggaca

SEQ ID NO: 284018 - RNA, 32 nt, Human
aaaauggcagucucaauccuacugucauucuu

SEQ ID NO: 284019 - RNA, 32 nt, Human
aaaauggcaugcaaaugaggccuggugccuuu

SEQ ID NO: 284020 - RNA, 28 nt, Human
aaaauggcgcgggugcugaaggcugcag

SEQ ID NO: 284021 - RNA, 28 nt, Human
aaaauggcuaaacuauacaugguuucag

SEQ ID NO: 284022 - RNA, 32 nt, Human
aaaauggcuuucccaguccuugcuggcuuucc

SEQ ID NO: 284023 - RNA, 32 nt, Human
aaaaugggacuuuuugucucagucccagugaa

SEQ ID NO: 284024 - RNA, 30 nt, Human
aaaaugggaggaaacaccuuuucuagcuag

SEQ ID NO: 284025 - RNA, 32 nt, Human
aaaaugggcagagagagaugaccucggaagca

SEQ ID NO: 284026 - RNA, 32 nt, Human
aaaaugggcaguaggggaaauggaguugcuuc

SEQ ID NO: 284027 - RNA, 32 nt, Human
aaaaugggcauccuggccaggcgcgguggcuc

SEQ ID NO: 284028 - RNA, 18 nt, Human
aaaaugggcucaaccaga

SEQ ID NO: 284029 - RNA, 32 nt, Human
aaaauggggaguuccauuuucuuaauuuuuca

SEQ ID NO: 284030 - RNA, 32 nt, Human
aaaauggggaucuccuccaaagagcagauuuc

SEQ ID NO: 284031 - RNA, 32 nt, Human
aaaauggggcagaagagaaaggacucagugug

SEQ ID NO: 284032 - RNA, 32 nt, Human
aaaauggggccaaugacaccuaccucacuggg

SEQ ID NO: 284033 - RNA, 32 nt, Human
aaaaugggggaugauagucaacaacauauuug

SEQ ID NO: 284034 - RNA, 32 nt, Human
aaaaugggguuacuacuggcccuaccucauau

SEQ ID NO: 284035 - RNA, 32 nt, Human
aaaauggguaagcauagccacuggugggauau

SEQ ID NO: 284036 - RNA, 32 nt, Human
aaaaugggucucuuggugcuaguguuuuacau

SEQ ID NO: 284037 - RNA, 28 nt, Human
aaaaugggugaugucaaagagaacuauc

SEQ ID NO: 284038 - RNA, 32 nt, Human
aaaaugggugauuucuuucuguucauuucaua

SEQ ID NO: 284039 - RNA, 32 nt, Human
aaaaugggugcaaaugaaaacacucucuugcu

SEQ ID NO: 284040 - RNA, 32 nt, Human
aaaauggugcccuauaugggguauuggacaua

SEQ ID NO: 284041 - RNA, 32 nt, Human
aaaauggugguuuuccacacucuaccuuuagu

SEQ ID NO: 284042 - RNA, 32 nt, Human
aaaaugguguaggccgggcaugguggcucacg

SEQ ID NO: 284043 - RNA, 32 nt, Human
aaaaugguuagaagaaagauuuggaauguucc

SEQ ID NO: 284044 - RNA, 20 nt, Human
aaaaugguuuccauaaaaaa

SEQ ID NO: 284045 - RNA, 32 nt, Human
aaaauguaacaucauaauuacauuccuaacua

SEQ ID NO: 284046 - RNA, 32 nt, Human
aaaauguaagugaagauggaaggcuggagaga

SEQ ID NO: 284047 - RNA, 32 nt, Human
aaaauguacaccaggcugggugcgguggcuca

SEQ ID NO: 284048 - RNA, 32 nt, Human
aaaauguagccccagguuggagcugggaacac

SEQ ID NO: 284049 - RNA, 32 nt, Human
aaaauguagcuucucaggggaggcaggaagaa

SEQ ID NO: 284050 - RNA, 32 nt, Human
aaaauguaguuucaguuucuuaaauuauaagc

SEQ ID NO: 284051 - RNA, 32 nt, Human
aaaauguauaucugacuagugggaaacuucau

SEQ ID NO: 284052 - RNA, 32 nt, Human
aaaauguauguucagaaaagcauuuuaucaac

SEQ ID NO: 284053 - RNA, 32 nt, Human
aaaauguauuagacauuaccccugugauuuca

SEQ ID NO: 284054 - RNA, 32 nt, Human
aaaauguauuuauggcugggcgugguggcuca

SEQ ID NO: 284055 - RNA, 32 nt, Human
aaaauguauuuuuagcaagauaacuuggguaa

SEQ ID NO: 284056 - RNA, 32 nt, Human
aaaaugucaaauaccaaugcuuuauaucgacg

SEQ ID NO: 284057 - RNA, 32 nt, Human
aaaaugucacacuugccugugacccccaccug

SEQ ID NO: 284058 - RNA, 32 nt, Human
aaaaugucacauuuuuagcaaagauuacauga

SEQ ID NO: 284059 - RNA, 32 nt, Human
aaaaugucagacugguuuauuguuaaguugca

SEQ ID NO: 284060 - RNA, 32 nt, Human
aaaaugucauuagugcugagguugagaaauac

SEQ ID NO: 284061 - RNA, 32 nt, Human
aaaauguccagaaagccauguuccuguuuccu

SEQ ID NO: 284062 - RNA, 32 nt, Human
aaaauguccuguggugacaggcccaguggaac

SEQ ID NO: 284063 - RNA, 32 nt, Human
aaaaugucucaaaucuccaggaguaucuggaa

SEQ ID NO: 284064 - RNA, 28 nt, Human
aaaaugucucagagcaaccgggagcugg

SEQ ID NO: 284065 - RNA, 32 nt, Human
aaaaugugaagagugagagaucaaagaaagaa

SEQ ID NO: 284066 - RNA, 32 nt, Human
aaaaugugaagugaaugaaacacucaguuguu

SEQ ID NO: 284067 - RNA, 32 nt, Human
aaaaugugaaucuuaccagcaguuccagccaa

SEQ ID NO: 284068 - RNA, 32 nt, Human
aaaaugugagaaaccuuugugagacagagaac

SEQ ID NO: 284069 - RNA, 32 nt, Human
aaaaugugagaguauucugguacucuguguuc

SEQ ID NO: 284070 - RNA, 32 nt, Human
aaaaugugcccacucauucauucuuuguccau

SEQ ID NO: 284071 - RNA, 32 nt, Human
aaaauguggcuccucuggagcuuggcagacca

SEQ ID NO: 284072 - RNA, 32 nt, Human
aaaaugugggcauguggagagggguauuugcc

SEQ ID NO: 284073 - RNA, 32 nt, Human
aaaaugugguuggggccaggugcaguggcuca

SEQ ID NO: 284074 - RNA, 32 nt, Human
aaaauguguaaauauauuaguaaauguuaaua

SEQ ID NO: 284075 - RNA, 32 nt, Human
aaaauguguaauucaaaagauuaauguguauu

SEQ ID NO: 284076 - RNA, 32 nt, Human
aaaauguguaucuucagaaggagagaagauug

SEQ ID NO: 284077 - RNA, 32 nt, Human
aaaaugugucugcugggcaaugcugagcaaaa

SEQ ID NO: 284078 - RNA, 32 nt, Human
aaaauguuagugggauggcaaacacugugaac

SEQ ID NO: 284079 - RNA, 32 nt, Human
aaaauguuaugauuucagaaauguuauauaaa

SEQ ID NO: 284080 - RNA, 28 nt, Human
aaaauguucacccuccuggacgugguga

SEQ ID NO: 284081 - RNA, 32 nt, Human
aaaauguuggccuggguauuucaaaggguaua

SEQ ID NO: 284082 - RNA, 32 nt, Human
aaaauguuuaucaugccuaagggagacauuua

SEQ ID NO: 284083 - RNA, 32 nt, Human
aaaauguuuccaagguuguguguuuauacugu

SEQ ID NO: 284084 - RNA, 32 nt, Human
aaaauguuucucucauuuacuccuuaaacaaa

SEQ ID NO: 284085 - RNA, 32 nt, Human
aaaauguuugcuacuuguuaagggagucagau

SEQ ID NO: 284086 - RNA, 32 nt, Human
aaaauguuuuauccucccuuugguaccuuaau

SEQ ID NO: 284087 - RNA, 32 nt, Human
aaaauguuuucaaggcugcaaaaaguguacag

SEQ ID NO: 284088 - RNA, 32 nt, Human
aaaauguuuuccccuaauuuuccagagaagcc

SEQ ID NO: 284089 - RNA, 32 nt, Human
aaaauguuuucccugauuucacaaacaaggau

SEQ ID NO: 284090 - RNA, 32 nt, Human
aaaauguuuucuuuccccuuggugaucuuugu

SEQ ID NO: 284091 - RNA, 32 nt, Human
aaaauuaaauuagcuggggugguggcacacgu

SEQ ID NO: 284092 - RNA, 32 nt, Human
aaaauuaagacagaaguaagcuauuaacggua

SEQ ID NO: 284093 - RNA, 32 nt, Human
aaaauuaagguguuugaaaauaguuuauuuua

SEQ ID NO: 284094 - RNA, 32 nt, Human
aaaauuaaucuuucccuguuaggcugauuuca

SEQ ID NO: 284095 - RNA, 32 nt, Human
aaaauuaaugugcucaccucggcagcacauau

SEQ ID NO: 284096 - RNA, 32 nt, Human
aaaauuaauugggaagguacugguuuuaagug

SEQ ID NO: 284097 - RNA, 32 nt, Human
aaaauuacacaaaaugaaaagucacuauauua

SEQ ID NO: 284098 - RNA, 32 nt, Human
aaaauuacagaagaagcuccugaaucccuuuc

SEQ ID NO: 284099 - RNA, 32 nt, Human
aaaauuacauagguggcuugucaaauucaauu

SEQ ID NO: 284100 - RNA, 32 nt, Human
aaaauuacccaggagugguggugugcaccugu

SEQ ID NO: 284101 - RNA, 32 nt, Human
aaaauuacgccacugcacuccagccugggcaa

SEQ ID NO: 284102 - RNA, 32 nt, Human
aaaauuacuaaaaaugacaaguagaagacuug

SEQ ID NO: 284103 - RNA, 32 nt, Human
aaaauuacuauuaccccaccuacuucugaaaa

SEQ ID NO: 284104 - RNA, 32 nt, Human
aaaauuagaauuaugcugccuaccucacagag

SEQ ID NO: 284105 - RNA, 32 nt, Human
aaaauuagacacacuuuaaaccuucaaacagg

SEQ ID NO: 284106 - RNA, 32 nt, Human
aaaauuagccaaaugaaucauuucuuauaucu

SEQ ID NO: 284107 - RNA, 32 nt, Human
aaaauuagccacaccacaggaaacccacauuu

SEQ ID NO: 284108 - RNA, 32 nt, Human
aaaauuagccaggcacguuccaggcaccugug

SEQ ID NO: 284109 - RNA, 32 nt, Human
aaaauuagggggaagcagggggcaguuucugu

SEQ ID NO: 284110 - RNA, 32 nt, Human
aaaauuaguuucagugagucccagggacuaau

SEQ ID NO: 284111 - RNA, 32 nt, Human
aaaauuauacacuaaacuuucucuccaaaaua

SEQ ID NO: 284112 - RNA, 32 nt, Human
aaaauuaucuuucaacuucugugaaagccaac

SEQ ID NO: 284113 - RNA, 21 nt, Human
aaaauuauggaugauuuucca

SEQ ID NO: 284114 - RNA, 22 nt, Human
aaaauuauguaacucuuaucca

SEQ ID NO: 284115 - RNA, 32 nt, Human
aaaauuauucuuccucucaaacauagggguga

SEQ ID NO: 284116 - RNA, 32 nt, Human
aaaauuauuuaaaagaagucaaugagccaaaa

SEQ ID NO: 284117 - RNA, 32 nt, Human
aaaauucaacaucacuucaaguuaaagacacu

SEQ ID NO: 284118 - RNA, 32 nt, Human
aaaauucaagaguuccagccagaagcuacagc

SEQ ID NO: 284119 - RNA, 32 nt, Human
aaaauucaagcauuuaggaaugugaccuuuaa

SEQ ID NO: 284120 - RNA, 32 nt, Human
aaaauucaauuacugucaucuaaugccagcug

SEQ ID NO: 284121 - RNA, 32 nt, Human
aaaauucacaguaggaaugauuguuaagagag

SEQ ID NO: 284122 - RNA, 32 nt, Human
aaaauucacaugccccuaacccucagauaaug

SEQ ID NO: 284123 - RNA, 32 nt, Human
aaaauucacuuacaccuccugccuuuguaguu

SEQ ID NO: 284124 - RNA, 32 nt, Human
aaaauucagcaacagacaccugcccacaaauc

SEQ ID NO: 284125 - RNA, 32 nt, Human
aaaauucagcaacucgcuugaaaggaagacug

SEQ ID NO: 284126 - RNA, 32 nt, Human
aaaauucagcuuuuauacagucaacauucuuu

SEQ ID NO: 284127 - RNA, 32 nt, Human
aaaauucaugcugaaaaacugagugaauauga

SEQ ID NO: 284128 - RNA, 32 nt, Human
aaaauucauuaaauuuggcugccuuauccuuu

SEQ ID NO: 284129 - RNA, 32 nt, Human
aaaauucauuccgcuguaauguuuucacaaua

SEQ ID NO: 284130 - RNA, 32 nt, Human
aaaauucauucuaugugccguuuuguuguuau

SEQ ID NO: 284131 - RNA, 32 nt, Human
aaaauuccaaaagaaagacuagaacaaauugg

SEQ ID NO: 284132 - RNA, 32 nt, Human
aaaauuccaccaggauuaaucucuaaaauucu

SEQ ID NO: 284133 - RNA, 32 nt, Human
aaaauuccagugaauugugcagaaaugcuggu

SEQ ID NO: 284134 - RNA, 32 nt, Human
aaaauuccauaauggccagagaggagaguucg

SEQ ID NO: 284135 - RNA, 32 nt, Human
aaaauuccaucaaguaguucugacuuccugcu

SEQ ID NO: 284136 - RNA, 32 nt, Human
aaaauuccauuacaggggcagugccuuuguag

SEQ ID NO: 284137 - RNA, 32 nt, Human
aaaauuccuaugggccugucuccugggggccu

SEQ ID NO: 284138 - RNA, 32 nt, Human
aaaauuccucuuccuuggucuacauaaagaag

SEQ ID NO: 284139 - RNA, 32 nt, Human
aaaauuccugaacaauauagauuuuaucguua

SEQ ID NO: 284140 - RNA, 32 nt, Human
aaaauuccugcacuuuaacccuuuggaaacua

SEQ ID NO: 284141 - RNA, 32 nt, Human
aaaauuccuuagcuuagaccucagccugugcu

SEQ ID NO: 284142 - RNA, 32 nt, Human
aaaauuccuucugcacaugaggccaguauagg

SEQ ID NO: 284143 - RNA, 32 nt, Human
aaaauuccuuuucaaagaaacaaaaagaagaa

SEQ ID NO: 284144 - RNA, 32 nt, Human
aaaauucgugauauaaucauacaaucggauac

SEQ ID NO: 284145 - RNA, 32 nt, Human
aaaauucuaaaggugccugucaucucagagag

SEQ ID NO: 284146 - RNA, 32 nt, Human
aaaauucuaacccagguauccaaaaaugugua

SEQ ID NO: 284147 - RNA, 32 nt, Human
aaaauucucacccucagcuauuuugugggcag

SEQ ID NO: 284148 - RNA, 32 nt, Human
aaaauucuccacaauccuccaccuccgcucuu

SEQ ID NO: 284149 - RNA, 32 nt, Human
aaaauucuccaggaauuucauaguuuggaccu

SEQ ID NO: 284150 - RNA, 32 nt, Human
aaaauucuccaucaggaggccugugguggugg

SEQ ID NO: 284151 - RNA, 32 nt, Human
aaaauucucuuucuaaacacagaguguugggc

SEQ ID NO: 284152 - RNA, 32 nt, Human
aaaauucugcagcaucuuacuacauaauccca

SEQ ID NO: 284153 - RNA, 32 nt, Human
aaaauucugcugcucaccaggacccagcucug

SEQ ID NO: 284154 - RNA, 32 nt, Human
aaaauucugggaguugcauaccggccagucuu

SEQ ID NO: 284155 - RNA, 32 nt, Human
aaaauucuguguuuuaaaugcuuacuggagag

SEQ ID NO: 284156 - RNA, 32 nt, Human
aaaauugaaacuaagaaaggcuguaaucagca

SEQ ID NO: 284157 - RNA, 32 nt, Human
aaaauugaaauaaauaugaaaauaucaaguuc

SEQ ID NO: 284158 - RNA, 32 nt, Human
aaaauugaacauccuagauucacacucccaag

SEQ ID NO: 284159 - RNA, 32 nt, Human
aaaauugagccagggucuugcuauguggcuca

SEQ ID NO: 284160 - RNA, 32 nt, Human
aaaauugcaacaacacuuuacuaccuaacgga

SEQ ID NO: 284161 - RNA, 32 nt, Human
aaaauugcaagacggaaaaguguauaaguggg

SEQ ID NO: 284162 - RNA, 32 nt, Human
aaaauugcaccacugcacacugcacuccaucc

SEQ ID NO: 284163 - RNA, 32 nt, Human
aaaauugcaccacugcacuccagccugggaaa

SEQ ID NO: 284164 - RNA, 32 nt, Human
aaaauugcaccacugcacuccagccugggaga

SEQ ID NO: 284165 - RNA, 32 nt, Human
aaaauugcaccacugcacuccauccugggcaa

SEQ ID NO: 284166 - RNA, 32 nt, Human
aaaauugcaccacugcacugcagccugggaaa

SEQ ID NO: 284167 - RNA, 31 nt, Human
aaaauugcacuuucugggcaagacuccuaua

SEQ ID NO: 284168 - RNA, 32 nt, Human
aaaauugcagagcuaauaaaaggcagcuaaca

SEQ ID NO: 284169 - RNA, 32 nt, Human
aaaauugccuaaagaggaaggaccaaggagau

SEQ ID NO: 284170 - RNA, 32 nt, Human
aaaauugccugcggaaugugugcaguaucuag

SEQ ID NO: 284171 - RNA, 32 nt, Human
aaaauugcgaaggcuuuugccucccaguaaau

SEQ ID NO: 284172 - RNA, 32 nt, Human
aaaauugcuugaaccugggaggcggagguugc

SEQ ID NO: 284173 - RNA, 32 nt, Human
aaaauugcuugcuauauuuacaccuucuuucc

SEQ ID NO: 284174 - RNA, 32 nt, Human
aaaauuggaagagaacgcgcuugauggauaga

SEQ ID NO: 284175 - RNA, 32 nt, Human
aaaauuggaagagacuucaaagacugucaagu

SEQ ID NO: 284176 - RNA, 32 nt, Human
aaaauuggcaagguugaaggucaccagcacau

SEQ ID NO: 284177 - RNA, 32 nt, Human
aaaauuggccgggcaugguggaaugugccugu

SEQ ID NO: 284178 - RNA, 32 nt, Human
aaaauuggccugccaccuucuuuaagcucagu

SEQ ID NO: 284179 - RNA, 32 nt, Human
aaaauugggaaaggaguagaaaaagcaguaac

SEQ ID NO: 284180 - RNA, 32 nt, Human
aaaauugggcugggaucacguccuguuuugua

SEQ ID NO: 284181 - RNA, 32 nt, Human
aaaauuggugccaagacugggugagaaaugua

SEQ ID NO: 284182 - RNA, 32 nt, Human
aaaauuggugcuuucugcuguggccuuaguuu

SEQ ID NO: 284183 - RNA, 32 nt, Human
aaaauugguguuugggugaucagaagcaggua

SEQ ID NO: 284184 - RNA, 22 nt, Human
aaaauuguaccaugaaaaagca

SEQ ID NO: 284185 - RNA, 31 nt, Human
aaaauuguagagaccagcucacuggaauguu

SEQ ID NO: 284186 - RNA, 32 nt, Human
aaaauuguccucaagucagccucuccagggcc

SEQ ID NO: 284187 - RNA, 32 nt, Human
aaaauugugaaaggaagguggggacagagcuu

SEQ ID NO: 284188 - RNA, 32 nt, Human
aaaauuguuacagauaccuagcucuucacaga

SEQ ID NO: 284189 - RNA, 32 nt, Human
aaaauuguuuagaaaucagcuugacugagaac

SEQ ID NO: 284190 - RNA, 32 nt, Human
aaaauuguuugcaaauggaagagagggaccua

SEQ ID NO: 284191 - RNA, 32 nt, Human
aaaauuguuugcuuacauuuuuacuuauaauu

SEQ ID NO: 284192 - RNA, 32 nt, Human
aaaauuuaacagcaaucagcuaacaggcaaau

SEQ ID NO: 284193 - RNA, 32 nt, Human
aaaauuuaagaggaacuuuuccucacuggaac

SEQ ID NO: 284194 - RNA, 32 nt, Human
aaaauuuaauuuucuagcuggcuccaauucaa

SEQ ID NO: 284195 - RNA, 32 nt, Human
aaaauuuagaaaauauaucauuuccuggccca

SEQ ID NO: 284196 - RNA, 32 nt, Human
aaaauuuagagaaaaagaaagauacauagaag

SEQ ID NO: 284197 - RNA, 32 nt, Human
aaaauuuagucugggccuagugcaguggcuca

SEQ ID NO: 284198 - RNA, 32 nt, Human
aaaauuuauagcgcucacagaaacccuggagg

SEQ ID NO: 284199 - RNA, 32 nt, Human
aaaauuuaucccaccagccuucacaaauguca

SEQ ID NO: 284200 - RNA, 32 nt, Human
aaaauuuaucucaccuuuaauacugugaauac

SEQ ID NO: 284201 - RNA, 32 nt, Human
aaaauuuaugucugucucauguguaaaagaca

SEQ ID NO: 284202 - RNA, 32 nt, Human
aaaauuuauuaucuuaaccauuuuugagugaa

SEQ ID NO: 284203 - RNA, 32 nt, Human
aaaauuucaaaaggaaguagauacacuaggga

SEQ ID NO: 284204 - RNA, 32 nt, Human
aaaauuucacacauuugucaagcacaguugua

SEQ ID NO: 284205 - RNA, 32 nt, Human
aaaauuucacuacaagguaauuuuugcuuagu

SEQ ID NO: 284206 - RNA, 32 nt, Human
aaaauuucaggcuuuuucuccacacuuguaug

SEQ ID NO: 284207 - RNA, 32 nt, Human
aaaauuucaguagacaguucaacagaaugaga

SEQ ID NO: 284208 - RNA, 32 nt, Human
aaaauuucaucuaggcuaggugcaguggcuug

SEQ ID NO: 284209 - RNA, 32 nt, Human
aaaauuuccaauucuccuacacucugucagaa

SEQ ID NO: 284210 - RNA, 32 nt, Human
aaaauuucuaguaucuuacagaacagcggugg

SEQ ID NO: 284211 - RNA, 32 nt, Human
aaaauuucuccuccuccugugcccucuucgcc

SEQ ID NO: 284212 - RNA, 32 nt, Human
aaaauuucuggaagccuccugaucucaccaug

SEQ ID NO: 284213 - RNA, 32 nt, Human
aaaauuugaagaggagaggcugagggaacagc

SEQ ID NO: 284214 - RNA, 32 nt, Human
aaaauuugaaggucugacagaaacuuuaaaug

SEQ ID NO: 284215 - RNA, 32 nt, Human
aaaauuugcauuucuaacacauucucagcuga

SEQ ID NO: 284216 - RNA, 32 nt, Human
aaaauuugccuuugccccggcuugccuguaau

SEQ ID NO: 284217 - RNA, 32 nt, Human
aaaauuugguagggauuuuaaaaaggucaccc

SEQ ID NO: 284218 - RNA, 32 nt, Human
aaaauuugugugcuguguacacaaaaacauaa

SEQ ID NO: 284219 - RNA, 32 nt, Human
aaaauuuuaaaaccaaaccucguuuaggauuu

SEQ ID NO: 284220 - RNA, 32 nt, Human
aaaauuuuaagcuuuuaaaaauguagauuuuu

SEQ ID NO: 284221 - RNA, 32 nt, Human
aaaauuuuaauuggcuagcucuugcccuuaua

SEQ ID NO: 284222 - RNA, 32 nt, Human
aaaauuuuagaaacagucuuuguggguggaug

SEQ ID NO: 284223 - RNA, 32 nt, Human
aaaauuuuaguguggcaugguggugggugccu

SEQ ID NO: 284224 - RNA, 27 nt, Human
aaaauuuucaaacuuuguacuguuaaa

SEQ ID NO: 284225 - RNA, 32 nt, Human
aaaauuuucuaauauuugagaauuucacaggg

SEQ ID NO: 284226 - RNA, 32 nt, Human
aaaauuuucuaucaaauggagccacauucggg

SEQ ID NO: 284227 - RNA, 32 nt, Human
aaaauuuucuuuuuacaaagagauuuacaagu

SEQ ID NO: 284228 - RNA, 32 nt, Human
aaaauuuugaugggguggaggaaugaauugcc

SEQ ID NO: 284229 - RNA, 32 nt, Human
aaaauuuuggaccugagacacuguggcugucu

SEQ ID NO: 284230 - RNA, 32 nt, Human
aaaauuuuggcuggaugcaauggcucacgccu

SEQ ID NO: 284231 - RNA, 24 nt, Human
aaaauuuuucccaguguucugaua

SEQ ID NO: 284232 - RNA, 32 nt, Human
aaaauuuuuggcaauucuuucagccauguaau

SEQ ID NO: 284233 - RNA, 32 nt, Human
aaacaaaaacaaaaacaucaaugaguaggcau

SEQ ID NO: 284234 - RNA, 32 nt, Human
aaacaaaaacagaaaggaucugagggaagaag

SEQ ID NO: 284235 - RNA, 32 nt, Human
aaacaaaaaccaaccaaccaaccaaccaacca

SEQ ID NO: 284236 - RNA, 32 nt, Human
aaacaaaaacuaggcgguugaaugagagguuc

SEQ ID NO: 284237 - RNA, 20 nt, Human
aaacaaaaagaaacaacccu

SEQ ID NO: 284238 - RNA, 17 nt, Human
aaacaaaaagcaagccu

SEQ ID NO: 284239 - RNA, 32 nt, Human
aaacaaaaagggcaaaccuaggaagcuaacgg

SEQ ID NO: 284240 - RNA, 32 nt, Human
aaacaaaaauuagccaggcaugguggcaccug

SEQ ID NO: 284241 - RNA, 32 nt, Human
aaacaaaaauuagguauuuuguccuaaaacac

SEQ ID NO: 284242 - RNA, 19 nt, Human
aaacaaaacaaaacaaaac

SEQ ID NO: 284243 - RNA, 20 nt, Human
aaacaaaacaaaacaaaaca

SEQ ID NO: 284244 - RNA, 19 nt, Human
aaacaaaacaccagggaca

SEQ ID NO: 284245 - RNA, 32 nt, Human
aaacaaaacauaccuguauacacacacauuca

SEQ ID NO: 284246 - RNA, 32 nt, Human
aaacaaaaccagccagaauaacagacucucug

SEQ ID NO: 284247 - RNA, 32 nt, Human
aaacaaaacccaauuuaacugauaacuaacca

SEQ ID NO: 284248 - RNA, 32 nt, Human
aaacaaaacuggcuagccugagcugcugguuc

SEQ ID NO: 284249 - RNA, 32 nt, Human
aaacaaaacuucaggagaugcaaauggagaga

SEQ ID NO: 284250 - RNA, 32 nt, Human
aaacaaaagcauuuugcuaaggagaagcuaau

SEQ ID NO: 284251 - RNA, 32 nt, Human
aaacaaaagguuaagaaauguggauaaagcuu

SEQ ID NO: 284252 - RNA, 32 nt, Human
aaacaaaauauaaaucacagauuuccaaaagu

SEQ ID NO: 284253 - RNA, 32 nt, Human
aaacaaaauccuucauauacaaaaagaacuuu

SEQ ID NO: 284254 - RNA, 32 nt, Human
aaacaaaaugcacagccugaauggacguagca

SEQ ID NO: 284255 - RNA, 32 nt, Human
aaacaaaaugccaggccucugcucugaagagc

SEQ ID NO: 284256 - RNA, 19 nt, Human
aaacaaacaaaacaaaaca

SEQ ID NO: 284257 - RNA, 32 nt, Human
aaacaaacaaaaccagccagaauaacagacuc

SEQ ID NO: 284258 - RNA, 32 nt, Human
aaacaaacaacaaaagcagcuugccuuauauc

SEQ ID NO: 284259 - RNA, 17 nt, Human
aaacaaacaacaucaag

SEQ ID NO: 284260 - RNA, 32 nt, Human
aaacaaacaacugcuucaaacugugaauucug

SEQ ID NO: 284261 - RNA, 32 nt, Human
aaacaaacacaaagccuuaagcucuuugagua

SEQ ID NO: 284262 - RNA, 32 nt, Human
aaacaaacagccuuguuucucuagucacauca

SEQ ID NO: 284263 - RNA, 32 nt, Human
aaacaaacaggagaugcuaucaccugaugacc

SEQ ID NO: 284264 - RNA, 32 nt, Human
aaacaaacagugccuucugcccucugcccaga

SEQ ID NO: 284265 - RNA, 32 nt, Human
aaacaaaccacccucuggggguaguuuacaga

SEQ ID NO: 284266 - RNA, 32 nt, Human
aaacaaaccagcucgucucagaggccagcaag

SEQ ID NO: 284267 - RNA, 32 nt, Human
aaacaaacccaauaugaugcauuuuaaggugg

SEQ ID NO: 284268 - RNA, 32 nt, Human
aaacaaacccuugaagacauuucagggccaug

SEQ ID NO: 284269 - RNA, 32 nt, Human
aaacaaacucggcgucugcacuggcuucccgu

SEQ ID NO: 284270 - RNA, 32 nt, Human
aaacaaagaaauguggucacuaaaaauaaaag

SEQ ID NO: 284271 - RNA, 32 nt, Human
aaacaaagauagguuccucaggugaccaaaac

SEQ ID NO: 284272 - RNA, 32 nt, Human
aaacaaagauucugccaacuguggaaacuuca

SEQ ID NO: 284273 - RNA, 20 nt, Human
aaacaaagcaggacuggaga

SEQ ID NO: 284274 - RNA, 32 nt, Human
aaacaaagcaggcucuaaggcacacaacauug

SEQ ID NO: 284275 - RNA, 19 nt, Human
aaacaaagccaaacagccu

SEQ ID NO: 284276 - RNA, 32 nt, Human
aaacaaagcuguuugcugcuuuaugcaggugc

SEQ ID NO: 284277 - RNA, 32 nt, Human
aaacaaaggaagagcuuaccgagcauauuaaa

SEQ ID NO: 284278 - RNA, 32 nt, Human
aaacaaaggaggaggagucauagggaagagaa

SEQ ID NO: 284279 - RNA, 32 nt, Human
aaacaaaggagguuugagagaggcgggaucug

SEQ ID NO: 284280 - RNA, 32 nt, Human
aaacaaaggccaaagguguauagauugcuuga

SEQ ID NO: 284281 - RNA, 31 nt, Human
aaacaaagugagauugaagagaaugaaaaca

SEQ ID NO: 284282 - RNA, 32 nt, Human
aaacaaauagguccuuugcugaaaagagggua

SEQ ID NO: 284283 - RNA, 32 nt, Human
aaacaaauauacauuuguuucauuucuugacu

SEQ ID NO: 284284 - RNA, 32 nt, Human
aaacaaaucaaggagcacuagagcuuuagugu

SEQ ID NO: 284285 - RNA, 32 nt, Human
aaacaaauccuggcccuggacucgguuuccca

SEQ ID NO: 284286 - RNA, 32 nt, Human
aaacaaaucucuaggagauucugccaaaggau

SEQ ID NO: 284287 - RNA, 32 nt, Human
aaacaaaugccacacaucacccuuaccaugug

SEQ ID NO: 284288 - RNA, 32 nt, Human
aaacaaaugcggaggcugggcacgguggcuca

SEQ ID NO: 284289 - RNA, 32 nt, Human
aaacaaaugggauacgcaguauucuggauggu

SEQ ID NO: 284290 - RNA, 32 nt, Human
aaacaaaugucaacauaauaaaaucucaguua

SEQ ID NO: 284291 - RNA, 32 nt, Human
aaacaacaaauuacagcccaaguuuauaucaa

SEQ ID NO: 284292 - RNA, 32 nt, Human
aaacaacaacaacaacuuauuuaguuugggga

SEQ ID NO: 284293 - RNA, 32 nt, Human
aaacaacaacacaaaccacacacacucgcaca

SEQ ID NO: 284294 - RNA, 32 nt, Human
aaacaacaagcaggccaggcacgguggcucac

SEQ ID NO: 284295 - RNA, 32 nt, Human
aaacaacacaggcugggcgcgguggcucacac

SEQ ID NO: 284296 - RNA, 32 nt, Human
aaacaacacaugcuauucuaaaaagccgcauu

SEQ ID NO: 284297 - RNA, 32 nt, Human
aaacaacacaugcuuauuaucucauagauucu

SEQ ID NO: 284298 - RNA, 32 nt, Human
aaacaacacugacccgaugcugggugaggacc

SEQ ID NO: 284299 - RNA, 32 nt, Human
aaacaacacugcaauuugucuccuugcaccgu

SEQ ID NO: 284300 - RNA, 32 nt, Human
aaacaacacuggagagcagaggcuguggcuug

SEQ ID NO: 284301 - RNA, 32 nt, Human
aaacaacagcuccccuguauucccccaucuag

SEQ ID NO: 284302 - RNA, 32 nt, Human
aaacaacaguagugccugugguuuagcccacc

SEQ ID NO: 284303 - RNA, 32 nt, Human
aaacaacauagugaaacccugucucuauuaaa

SEQ ID NO: 284304 - RNA, 32 nt, Human
aaacaaccggaaccggcggcaccagcucggag

SEQ ID NO: 284305 - RNA, 32 nt, Human
aaacaacgagcaggccaggcacgguggcucac

SEQ ID NO: 284306 - RNA, 32 nt, Human
aaacaacucagcugccaucuggccucucugag

SEQ ID NO: 284307 - RNA, 32 nt, Human
aaacaacuccccaggcuggccgggcaguacac

SEQ ID NO: 284308 - RNA, 32 nt, Human
aaacaacuguaauccgagcuacuagggaggcu

SEQ ID NO: 284309 - RNA, 32 nt, Human
aaacaacugugaaagaaauacuugaggcaugu

SEQ ID NO: 284310 - RNA, 32 nt, Human
aaacaacuguuuccacacuugcaccugaucaa

SEQ ID NO: 284311 - RNA, 32 nt, Human
aaacaacuuagcaaaugugccauuuucacaca

SEQ ID NO: 284312 - RNA, 32 nt, Human
aaacaagaaaacaaaccacauacuuuugaagc

SEQ ID NO: 284313 - RNA, 32 nt, Human
aaacaagaaaacaaaccacauacuuuugaagu

SEQ ID NO: 284314 - RNA, 32 nt, Human
aaacaagaaauguaaugcaaaggacucauuuu

SEQ ID NO: 284315 - RNA, 31 nt, Human
aaacaagaacaauuacucuuuuggcagaaag

SEQ ID NO: 284316 - RNA, 32 nt, Human
aaacaagaacagcagucagauccauuacaaag

SEQ ID NO: 284317 - RNA, 32 nt, Human
aaacaagacaacauucaauuugauagaaaucu

SEQ ID NO: 284318 - RNA, 32 nt, Human
aaacaagacuuuacuuucuucugcccccuaag

SEQ ID NO: 284319 - RNA, 32 nt, Human
aaacaagagaagcaggcaagaagcggaggcag

SEQ ID NO: 284320 - RNA, 32 nt, Human
aaacaagaggacuuggaggaaaagagcuacua

SEQ ID NO: 284321 - RNA, 32 nt, Human
aaacaagauaucuucuguccgccuuacauaua

SEQ ID NO: 284322 - RNA, 32 nt, Human
aaacaagccaagguuuuccauuaccuuacaau

SEQ ID NO: 284323 - RNA, 32 nt, Human
aaacaagccauggcuuuagggaggggugcagg

SEQ ID NO: 284324 - RNA, 32 nt, Human
aaacaagcgcuggccucacaguauuaaaacaa

SEQ ID NO: 284325 - RNA, 32 nt, Human
aaacaagcuaggugugguggcucaugccugua

SEQ ID NO: 284326 - RNA, 32 nt, Human
aaacaagcucacuguguuucuuuucuuuucuu

SEQ ID NO: 284327 - RNA, 32 nt, Human
aaacaagcucugggugcugcuuuguucucagg

SEQ ID NO: 284328 - RNA, 32 nt, Human
aaacaagcuuaggcuucucccaacuuaacaaa

SEQ ID NO: 284329 - RNA, 32 nt, Human
aaacaagcuucccauccucguuuuacuuuuug

SEQ ID NO: 284330 - RNA, 32 nt, Human
aaacaaggaaaucacacauaugcacacauaca

SEQ ID NO: 284331 - RNA, 32 nt, Human
aaacaaggacaguugggugugacagugacaau

SEQ ID NO: 284332 - RNA, 32 nt, Human
aaacaaggagaaggugcaagacuguccgugug

SEQ ID NO: 284333 - RNA, 32 nt, Human
aaacaaggaggaaggcaaccagcuguuagggg

SEQ ID NO: 284334 - RNA, 32 nt, Human
aaacaaggaggcacuuccuguaggagcacuga

SEQ ID NO: 284335 - RNA, 32 nt, Human
aaacaaggcccaggcuggggccagggccagag

SEQ ID NO: 284336 - RNA, 32 nt, Human
aaacaaggccuuucucuaucuuccuacugcca

SEQ ID NO: 284337 - RNA, 32 nt, Human
aaacaaggcuguauccacaugguacaagccuu

SEQ ID NO: 284338 - RNA, 24 nt, Human
aaacaaggugucagagguuuugaa

SEQ ID NO: 284339 - RNA, 32 nt, Human
aaacaagguuaccuaccucaggaggcugcuug

SEQ ID NO: 284340 - RNA, 32 nt, Human
aaacaaguacaucuguacaugacuguauaauu

SEQ ID NO: 284341 - RNA, 32 nt, Human
aaacaaguccucacgaccacuucucaguuuuc

SEQ ID NO: 284342 - RNA, 32 nt, Human
aaacaagugggagagccaggagccaaacuauc

SEQ ID NO: 284343 - RNA, 32 nt, Human
aaacaaguguccaucacuaggacacuaguuaa

SEQ ID NO: 284344 - RNA, 32 nt, Human
aaacaauacaaagcccagaaauucuuuucggg

SEQ ID NO: 284345 - RNA, 32 nt, Human
aaacaauaccugcucauuuacacugaggauuc

SEQ ID NO: 284346 - RNA, 32 nt, Human
aaacaauaggacagcugcucuuccauaaacag

SEQ ID NO: 284347 - RNA, 32 nt, Human
aaacaauauaaaguuguccagaauguauguca

SEQ ID NO: 284348 - RNA, 32 nt, Human
aaacaauaugaacuccuuuuucguauugccau

SEQ ID NO: 284349 - RNA, 32 nt, Human
aaacaaucacuacaguuuggcuuucaggaagc

SEQ ID NO: 284350 - RNA, 32 nt, Human
aaacaaucagauaacaccuguuuccuccagga

SEQ ID NO: 284351 - RNA, 32 nt, Human
aaacaaucagcauguuucuucuguaaauauga

SEQ ID NO: 284352 - RNA, 32 nt, Human
aaacaaucagguuucuucaggcugaggaggac

SEQ ID NO: 284353 - RNA, 32 nt, Human
aaacaauccuuacuaaguaggugaugaguuug

SEQ ID NO: 284354 - RNA, 32 nt, Human
aaacaaucuccugguccaaggugcuugagugg

SEQ ID NO: 284355 - RNA, 32 nt, Human
aaacaaucuucacacgaaaccaaaaauagcau

SEQ ID NO: 284356 - RNA, 32 nt, Human
aaacaaugaaaguggggugagugccucuuauu

SEQ ID NO: 284357 - RNA, 32 nt, Human
aaacaaugaauucuucaacagggaaaacagcu

SEQ ID NO: 284358 - RNA, 32 nt, Human
aaacaaugagcugggcauggaacucacaccuc

SEQ ID NO: 284359 - RNA, 32 nt, Human
aaacaaugcugauuuuugaauucaugauuagu

SEQ ID NO: 284360 - RNA, 32 nt, Human
aaacaaugcuuaucacuggcuugcugucaaua

SEQ ID NO: 284361 - RNA, 32 nt, Human
aaacaaugguccccaucuccccagaagccuuu

SEQ ID NO: 284362 - RNA, 32 nt, Human
aaacaaugguuccuuaguuuugcacugggaag

SEQ ID NO: 284363 - RNA, 32 nt, Human
aaacaaugugaaaaacagaacuuguucuguug

SEQ ID NO: 284364 - RNA, 32 nt, Human
aaacaauguguauugaaguaccuagauuuguu

SEQ ID NO: 284365 - RNA, 32 nt, Human
aaacaauguuggccugugggccgcccacaaca

SEQ ID NO: 284366 - RNA, 32 nt, Human
aaacaauuauucaccauggauugcccaacuuu

SEQ ID NO: 284367 - RNA, 32 nt, Human
aaacaauugaaggauggauaccauggcauaug

SEQ ID NO: 284368 - RNA, 32 nt, Human
aaacaauugccuggaagcuggaagauaauaug

SEQ ID NO: 284369 - RNA, 32 nt, Human
aaacaauuuauuggaguguuuuuguuucuguu

SEQ ID NO: 284370 - RNA, 32 nt, Human
aaacaauuucagaaaguguuagaagaauucua

SEQ ID NO: 284371 - RNA, 32 nt, Human
aaacaauuuucccacuuuaguucuuuagugac

SEQ ID NO: 284372 - RNA, 32 nt, Human
aaacaauuuucuugaagaauccgauuuugugc

SEQ ID NO: 284373 - RNA, 32 nt, Human
aaacacaaagucuugcucugucgcccaggcug

SEQ ID NO: 284374 - RNA, 32 nt, Human
aaacacaaauacucucacggggcauggagguu

SEQ ID NO: 284375 - RNA, 32 nt, Human
aaacacaacaaaaccacaugucauagcccuug

SEQ ID NO: 284376 - RNA, 32 nt, Human
aaacacaacaguauuuauaaaugaguaaauaa

SEQ ID NO: 284377 - RNA, 32 nt, Human
aaacacaaccacagaaacaaacaaauaaugga

SEQ ID NO: 284378 - RNA, 32 nt, Human
aaacacaacccccucuguucccucucuucgcg

SEQ ID NO: 284379 - RNA, 32 nt, Human
aaacacaagguacuuuucuguccucuuaaaau

SEQ ID NO: 284380 - RNA, 32 nt, Human
aaacacacaacaaaacaucugcuguccugggu

SEQ ID NO: 284381 - RNA, 32 nt, Human
aaacacacaugcugucugcagccacuguuugg

SEQ ID NO: 284382 - RNA, 32 nt, Human
aaacacacauuacacacacaucacaaugacaa

SEQ ID NO: 284383 - RNA, 32 nt, Human
aaacacaccacugugggaguuguuugcuugga

SEQ ID NO: 284384 - RNA, 32 nt, Human
aaacacaccucuccuuuacauaguugggaacc

SEQ ID NO: 284385 - RNA, 32 nt, Human
aaacacacucagaaagcagagaaaaaggacaa

SEQ ID NO: 284386 - RNA, 32 nt, Human
aaacacacugacugugggacugugccaggaug

SEQ ID NO: 284387 - RNA, 32 nt, Human
aaacacacugccucgugucuuuguagcugauu

SEQ ID NO: 284388 - RNA, 32 nt, Human
aaacacacuuccugcugcgaaagacccacaug

SEQ ID NO: 284389 - RNA, 32 nt, Human
aaacacacuugcccucaugccucccagaauau

SEQ ID NO: 284390 - RNA, 32 nt, Human
aaacacagaaccacacagccagucccaggagc

SEQ ID NO: 284391 - RNA, 32 nt, Human
aaacacagagagagguguccuccugaccaccc

SEQ ID NO: 284392 - RNA, 32 nt, Human
aaacacagagcaggaguccacaggggaaccug

SEQ ID NO: 284393 - RNA, 32 nt, Human
aaacacagaggcuggaguuaaucugagagcac

SEQ ID NO: 284394 - RNA, 32 nt, Human
aaacacagaugggaccaugaacuccggacaca

SEQ ID NO: 284395 - RNA, 32 nt, Human
aaacacagcagccuccucucuuccugccugag

SEQ ID NO: 284396 - RNA, 32 nt, Human
aaacacagccagagaacugugacccugguguu

SEQ ID NO: 284397 - RNA, 32 nt, Human
aaacacaggagaguucauacuggagaaaggac

SEQ ID NO: 284398 - RNA, 32 nt, Human
aaacacagggagcugguggguugggugggggc

SEQ ID NO: 284399 - RNA, 31 nt, Human
aaacacagugagaggucugaaggcuggcuuc

SEQ ID NO: 284400 - RNA, 32 nt, Human
aaacacagugauggggcgaauauuuauguucu

SEQ ID NO: 284401 - RNA, 32 nt, Human
aaacacagugccuucuacauugcaggcgcuga

SEQ ID NO: 284402 - RNA, 32 nt, Human
aaacacaguuuauguacagggaaaaggauuuu

SEQ ID NO: 284403 - RNA, 32 nt, Human
aaacacauaaaacuguagcuccugccucugua

SEQ ID NO: 284404 - RNA, 32 nt, Human
aaacacauaaacuguuuucuuuuucuuucuua

SEQ ID NO: 284405 - RNA, 32 nt, Human
aaacacauauuuuuaaaauucccucuccucuu

SEQ ID NO: 284406 - RNA, 32 nt, Human
aaacacauccugcuucugcaauuccagagagu

SEQ ID NO: 284407 - RNA, 32 nt, Human
aaacacaucuucagccuccuccugggccagcu

SEQ ID NO: 284408 - RNA, 32 nt, Human
aaacacaugguacgcuccauacccacacagca

SEQ ID NO: 284409 - RNA, 32 nt, Human
aaacacauguaaacuuugucagagauaauugg

SEQ ID NO: 284410 - RNA, 32 nt, Human
aaacacaugugucacaugggcauuucagauga

SEQ ID NO: 284411 - RNA, 19 nt, Human
aaacacauuuagccuuaua

SEQ ID NO: 284412 - RNA, 32 nt, Human
aaacaccaaaccugccuaugugccaucucaca

SEQ ID NO: 284413 - RNA, 32 nt, Human
aaacaccaacuguaucuugcagucuccccagg

SEQ ID NO: 284414 - RNA, 32 nt, Human
aaacaccaaggaguggaggucagagugucacu

SEQ ID NO: 284415 - RNA, 32 nt, Human
aaacaccaagguaaaagggcccccaagguggu

SEQ ID NO: 284416 - RNA, 32 nt, Human
aaacaccacagcuggagaguccuggcugagcc

SEQ ID NO: 284417 - RNA, 32 nt, Human
aaacaccaccaaguuccuccagcaggguaugg

SEQ ID NO: 284418 - RNA, 32 nt, Human
aaacaccacugccugcaggagccugggcugac

SEQ ID NO: 284419 - RNA, 32 nt, Human
aaacaccagccuguugcuguacuuuucugcuu

SEQ ID NO: 284420 - RNA, 32 nt, Human
aaacaccaggaugcaugcuccuuguccccucc

SEQ ID NO: 284421 - RNA, 32 nt, Human
aaacaccauuuagggcuaccaucccccaaaaa

SEQ ID NO: 284422 - RNA, 32 nt, Human
aaacacccaaguggcccccacccucagcccgc

SEQ ID NO: 284423 - RNA, 32 nt, Human
aaacacccagcugggugcaguggcucgcaccu

SEQ ID NO: 284424 - RNA, 32 nt, Human
aaacacccaucccucaaaaaggccaagguccc

SEQ ID NO: 284425 - RNA, 32 nt, Human
aaacacccaucucugaugccuaaggaaccaca

SEQ ID NO: 284426 - RNA, 32 nt, Human
aaacacccaucuugucugucuccacucucauu

SEQ ID NO: 284427 - RNA, 32 nt, Human
aaacacccugguggaaaccuguugacagaccu

SEQ ID NO: 284428 - RNA, 32 nt, Human
aaacacccuucccuccuucugccauuacuaug

SEQ ID NO: 284429 - RNA, 32 nt, Human
aaacaccgaaauucagauagcucagggacugc

SEQ ID NO: 284430 - RNA, 21 nt, Human
aaacaccuauauuaugaguca

SEQ ID NO: 284431 - RNA, 19 nt, Human
aaacaccucaccccugccu

SEQ ID NO: 284432 - RNA, 32 nt, Human
aaacaccuccacuaccucacugacuucauaau

SEQ ID NO: 284433 - RNA, 32 nt, Human
aaacaccugaaugccaggaaacaggaagauua

SEQ ID NO: 284434 - RNA, 32 nt, Human
aaacaccugagaugaauuggugugaacgaauu

SEQ ID NO: 284435 - RNA, 32 nt, Human
aaacaccugcaagaaagagcacaguacuucac

SEQ ID NO: 284436 - RNA, 20 nt, Human
aaacaccugccagugucaag

SEQ ID NO: 284437 - RNA, 32 nt, Human
aaacaccuguagcauugaggugacugaaugcc

SEQ ID NO: 284438 - RNA, 32 nt, Human
aaacaccuuugggaacaaacucuuccuuugau

SEQ ID NO: 284439 - RNA, 32 nt, Human
aaacacgaacccaggagugugggccagugcug

SEQ ID NO: 284440 - RNA, 32 nt, Human
aaacacgacuccugaaucauguuccauuacuu

SEQ ID NO: 284441 - RNA, 32 nt, Human
aaacacgcacacacaaauggauaaaacagcac

SEQ ID NO: 284442 - RNA, 19 nt, Human
aaacacgcacacccugccc

SEQ ID NO: 284443 - RNA, 32 nt, Human
aaacacgccuuguuccugcucuucccaguuca

SEQ ID NO: 284444 - RNA, 32 nt, Human
aaacacggaagaggaagaggaaagcaaaggag

SEQ ID NO: 284445 - RNA, 22 nt, Human
aaacacguaagacucugucccc

SEQ ID NO: 284446 - RNA, 32 nt, Human
aaacacgugugugguuguguaaaccagacccc

SEQ ID NO: 284447 - RNA, 32 nt, Human
aaacacuaccacccuuuccugucccucucucc

SEQ ID NO: 284448 - RNA, 20 nt, Human
aaacacuacucaaguacaga

SEQ ID NO: 284449 - RNA, 32 nt, Human
aaacacuacucagcucucuugcacugaggaaa

SEQ ID NO: 284450 - RNA, 32 nt, Human
aaacacuagaccuggucgauucuaucaagaac

SEQ ID NO: 284451 - RNA, 32 nt, Human
aaacacuaggauucaggaagguaggcaggacg

SEQ ID NO: 284452 - RNA, 18 nt, Human
aaacacuaugucuguaca

SEQ ID NO: 284453 - RNA, 32 nt, Human
aaacacucacacuuggucaauuuguggcaggu

SEQ ID NO: 284454 - RNA, 32 nt, Human
aaacacucacuggauuuguuauaauccguguu

SEQ ID NO: 284455 - RNA, 21 nt, Human
aaacacucagacuuccuuacc

SEQ ID NO: 284456 - RNA, 32 nt, Human
aaacacucaucagaaauuaagugcagucuagu

SEQ ID NO: 284457 - RNA, 32 nt, Human
aaacacuccaaagggggugcugaucuggagac

SEQ ID NO: 284458 - RNA, 32 nt, Human
aaacacucucacuaugcugcuauggacgaccu

SEQ ID NO: 284459 - RNA, 32 nt, Human
aaacacucucccugauuccuggacuucgggua

SEQ ID NO: 284460 - RNA, 32 nt, Human
aaacacucugaacccugccaucuugcuccugg

SEQ ID NO: 284461 - RNA, 32 nt, Human
aaacacucugauguaauuucugcccagucagc

SEQ ID NO: 284462 - RNA, 32 nt, Human
aaacacugagacagggguauggggaagagcug

SEQ ID NO: 284463 - RNA, 21 nt, Human
aaacacugauuuucuccugua

SEQ ID NO: 284464 - RNA, 32 nt, Human
aaacacugcuaucucccaccucuaacacugga

SEQ ID NO: 284465 - RNA, 21 nt, Human
aaacacugcucuuccucaccu

SEQ ID NO: 284466 - RNA, 32 nt, Human
aaacacugcuuugaauuauaggaggagaacaa

SEQ ID NO: 284467 - RNA, 32 nt, Human
aaacacuggagacagugucaggccaggcaugg

SEQ ID NO: 284468 - RNA, 32 nt, Human
aaacacuggaggacuuguccagccuugaaaga

SEQ ID NO: 284469 - RNA, 29 nt, Human
aaacacuggcugcuggcauuccaccaagu

SEQ ID NO: 284470 - RNA, 32 nt, Human
aaacacugggcuguuugcacagcuccaacugu

SEQ ID NO: 284471 - RNA, 22 nt, Human
aaacacugguauguuccuuccu

SEQ ID NO: 284472 - RNA, 24 nt, Human
aaacacuggugggacuuccuuccu

SEQ ID NO: 284473 - RNA, 32 nt, Human
aaacacugguuuccuagcuauccucugaaaac

SEQ ID NO: 284474 - RNA, 32 nt, Human
aaacacugugauuagaccacagaacaauaaau

SEQ ID NO: 284475 - RNA, 32 nt, Human
aaacacugugcugcugaguucaucucaaacau

SEQ ID NO: 284476 - RNA, 32 nt, Human
aaacacuguuccugaaagcuucugucacucaa

SEQ ID NO: 284477 - RNA, 32 nt, Human
aaacacuuacuugauguuuuauuugaacuuuu

SEQ ID NO: 284478 - RNA, 32 nt, Human
aaacacuuauuuaggaaaauguuucucaacaa

SEQ ID NO: 284479 - RNA, 32 nt, Human
aaacacuuccaaugccaguuugauucugaggg

SEQ ID NO: 284480 - RNA, 32 nt, Human
aaacacuuuacaaccugcucucucucugaagu

SEQ ID NO: 284481 - RNA, 25 nt, Human
aaacacuuucaggaccuuccuuccu

SEQ ID NO: 284482 - RNA, 32 nt, Human
aaacacuuuucuuccucccuguaacuuaaccu

SEQ ID NO: 284483 - RNA, 32 nt, Human
aaacagaaacaaugugcuagcagaaugugcua

SEQ ID NO: 284484 - RNA, 32 nt, Human
aaacagaaagcaguggagguggggguugcugu

SEQ ID NO: 284485 - RNA, 32 nt, Human
aaacagaaaggaguuauuaaaguaauuuacaa

SEQ ID NO: 284486 - RNA, 32 nt, Human
aaacagaaauagcaggaccuggaguugcauag

SEQ ID NO: 284487 - RNA, 32 nt, Human
aaacagaacagcuuucaccaaaguggguagua

SEQ ID NO: 284488 - RNA, 32 nt, Human
aaacagaacaucaguguuuugagaaccuugga

SEQ ID NO: 284489 - RNA, 32 nt, Human
aaacagaaccuccucaggggccagaccuugcc

SEQ ID NO: 284490 - RNA, 32 nt, Human
aaacagaacggugggagcugauggcuccgagu

SEQ ID NO: 284491 - RNA, 32 nt, Human
aaacagaagaagaagaggcaccucugguacug

SEQ ID NO: 284492 - RNA, 32 nt, Human
aaacagaagaugauaguaaaagugauccuaag

SEQ ID NO: 284493 - RNA, 32 nt, Human
aaacagaaucuuggaacugguuuaguacaauc

SEQ ID NO: 284494 - RNA, 32 nt, Human
aaacagaaugagauuccuugugugaaaauagc

SEQ ID NO: 284495 - RNA, 32 nt, Human
aaacagaauucauaacacuuggcacuuguucu

SEQ ID NO: 284496 - RNA, 32 nt, Human
aaacagacaaaagguaugcuugcuuuggaaug

SEQ ID NO: 284497 - RNA, 32 nt, Human
aaacagacccugaagauucaagauacugugau

SEQ ID NO: 284498 - RNA, 32 nt, Human
aaacagacucacaaggggcuucuuggccugca

SEQ ID NO: 284499 - RNA, 32 nt, Human
aaacagacugauuugaucugauuaaugugaag

SEQ ID NO: 284500 - RNA, 32 nt, Human
aaacagacuucucaagaaauggauagaauugu

SEQ ID NO: 284501 - RNA, 24 nt, Human
aaacagagaacgggaugcuuugaa

SEQ ID NO: 284502 - RNA, 32 nt, Human
aaacagagacaggcccaagagaugaagaguga

SEQ ID NO: 284503 - RNA, 31 nt, Human
aaacagagacuucucucugccauggcccuuc

SEQ ID NO: 284504 - RNA, 32 nt, Human
aaacagagagaaacgacgaggagcaguucgaa

SEQ ID NO: 284505 - RNA, 32 nt, Human
aaacagagagaaacgaugaggagcaguucgaa

SEQ ID NO: 284506 - RNA, 32 nt, Human
aaacagagagaagguaaagcuaccugaggcag

SEQ ID NO: 284507 - RNA, 32 nt, Human
aaacagagauagagucuugcuauguuguccag

SEQ ID NO: 284508 - RNA, 32 nt, Human
aaacagagauggggucuuacuauguugcccag

SEQ ID NO: 284509 - RNA, 32 nt, Human
aaacagagcccuccuuccccaguagcucagug

SEQ ID NO: 284510 - RNA, 32 nt, Human
aaacagagccugggcaacaagagcgaaacucc

SEQ ID NO: 284511 - RNA, 31 nt, Human
aaacagagccuuuucuguccuguagauaauc

SEQ ID NO: 284512 - RNA, 22 nt, Human
aaacagagcugguagacuugaa

SEQ ID NO: 284513 - RNA, 32 nt, Human
aaacagagcuucuuccuaauaacggcggcggu

SEQ ID NO: 284514 - RNA, 32 nt, Human
aaacagaggacugucuuauuccacucuucggu

SEQ ID NO: 284515 - RNA, 32 nt, Human
aaacagaggagaaagggaaagaguacaaagcc

SEQ ID NO: 284516 - RNA, 32 nt, Human
aaacagaggaggaggagggaggggagugcgug

SEQ ID NO: 284517 - RNA, 32 nt, Human
aaacagaggccuugccaugccguggcugcgug

SEQ ID NO: 284518 - RNA, 32 nt, Human
aaacagaggcucagagagguucagcaacuucu

SEQ ID NO: 284519 - RNA, 32 nt, Human
aaacagagggauuuaaaagaagauagaauggu

SEQ ID NO: 284520 - RNA, 32 nt, Human
aaacagagggcaggacacagggacagguggug

SEQ ID NO: 284521 - RNA, 32 nt, Human
aaacagagggccugaggcuugcauggcuuaac

SEQ ID NO: 284522 - RNA, 25 nt, Human
aaacagaggguggaggaacccugaa

SEQ ID NO: 284523 - RNA, 32 nt, Human
aaacagagguccaguuuauucuaacaucuugc

SEQ ID NO: 284524 - RNA, 32 nt, Human
aaacagagugauugguugcauccaggccuuuu

SEQ ID NO: 284525 - RNA, 32 nt, Human
aaacagauauuuuuaugagucuuccuauucau

SEQ ID NO: 284526 - RNA, 32 nt, Human
aaacagaugauggaauuagagaggugggcuca

SEQ ID NO: 284527 - RNA, 32 nt, Human
aaacagaugcagaagaacccagaaaggagcag

SEQ ID NO: 284528 - RNA, 32 nt, Human
aaacagauggagcucuugggcccagccagcug

SEQ ID NO: 284529 - RNA, 32 nt, Human
aaacagauucaugcuuguaucuugcauucaga

SEQ ID NO: 284530 - RNA, 22 nt, Human
aaacagcaaauggaggcuugaa

SEQ ID NO: 284531 - RNA, 32 nt, Human
aaacagcaacacaaagacauguuaagcauguu

SEQ ID NO: 284532 - RNA, 21 nt, Human
aaacagcaagcauuaugguca

SEQ ID NO: 284533 - RNA, 32 nt, Human
aaacagcaaggaaauggacucuccccagagcc

SEQ ID NO: 284534 - RNA, 32 nt, Human
aaacagcacacagcaagcaaccacaaaaccag

SEQ ID NO: 284535 - RNA, 32 nt, Human
aaacagcaccuuccaggccucugugagcacac

SEQ ID NO: 284536 - RNA, 32 nt, Human
aaacagcacuauauuucugaucugucacuguu

SEQ ID NO: 284537 - RNA, 32 nt, Human
aaacagcagacaccuccacgcuuuguuuucca

SEQ ID NO: 284538 - RNA, 32 nt, Human
aaacagcagcagcaaacaaauaaaaugaaaua

SEQ ID NO: 284539 - RNA, 32 nt, Human
aaacagcagcagucacguuccucggccgccac

SEQ ID NO: 284540 - RNA, 32 nt, Human
aaacagcagccuguuugauaauaacugcuuua

SEQ ID NO: 284541 - RNA, 32 nt, Human
aaacagccaacagagacaaaggaaaaguguuu

SEQ ID NO: 284542 - RNA, 32 nt, Human
aaacagccaccaggaaagcagccggagagccg

SEQ ID NO: 284543 - RNA, 32 nt, Human
aaacagccauaggcccuuucaguggccgggcu

SEQ ID NO: 284544 - RNA, 32 nt, Human
aaacagccauguccaaguucuucaccucuauc

SEQ ID NO: 284545 - RNA, 32 nt, Human
aaacagcccugaucaguagugaagagcaacau

SEQ ID NO: 284546 - RNA, 32 nt, Human
aaacagccuccaagcaucagcagagcccagau

SEQ ID NO: 284547 - RNA, 32 nt, Human
aaacagccuccaccaccgccauaaauuuacau

SEQ ID NO: 284548 - RNA, 32 nt, Human
aaacagccucucuguuucccuccuucuuggaa

SEQ ID NO: 284549 - RNA, 18 nt, Human
aaacagccucuguacaga

SEQ ID NO: 284550 - RNA, 32 nt, Human
aaacagccugagcaaaaagaccagccuuccca

SEQ ID NO: 284551 - RNA, 32 nt, Human
aaacagccugggagccacugugccugugcuuc

SEQ ID NO: 284552 - RNA, 32 nt, Human
aaacagccuggguugacuggccugguaacugc

SEQ ID NO: 284553 - RNA, 32 nt, Human
aaacagccuuuccuccauuuucuguguauugg

SEQ ID NO: 284554 - RNA, 31 nt, Human
aaacagcgaauguccaucaacaggaaucgga

SEQ ID NO: 284555 - RNA, 32 nt, Human
aaacagcgauaacagugauaguuuuuaacucu

SEQ ID NO: 284556 - RNA, 32 nt, Human
aaacagcgauggagaugaaaacuguugauuug

SEQ ID NO: 284557 - RNA, 32 nt, Human
aaacagcgucagguggccucagccuggcccag

SEQ ID NO: 284558 - RNA, 21 nt, Human
aaacagcuaauaaugaaguua

SEQ ID NO: 284559 - RNA, 32 nt, Human
aaacagcucacuguccucuggaucugcugcgu

SEQ ID NO: 284560 - RNA, 32 nt, Human
aaacagcucagauuugaccaagaucacacaag

SEQ ID NO: 284561 - RNA, 32 nt, Human
aaacagcuccucuauauuuccaccucuuucua

SEQ ID NO: 284562 - RNA, 32 nt, Human
aaacagcucuaguaugaagcaagaguaaagac

SEQ ID NO: 284563 - RNA, 32 nt, Human
aaacagcugcaaccucggauaccagcacggga

SEQ ID NO: 284564 - RNA, 24 nt, Human
aaacagcugccuuagcuucaggaa

SEQ ID NO: 284565 - RNA, 32 nt, Human
aaacagcuucaucucugccucucuccacccca

SEQ ID NO: 284566 - RNA, 32 nt, Human
aaacagcuuguuauuuaaauauuggacaaaau

SEQ ID NO: 284567 - RNA, 32 nt, Human
aaacagcuuuaaccuggauguggaggaggaug

SEQ ID NO: 284568 - RNA, 32 nt, Human
aaacagcuuucaggcguaaauccagagaagug

SEQ ID NO: 284569 - RNA, 32 nt, Human
aaacaggaagugagcaaggggccacuuccuac

SEQ ID NO: 284570 - RNA, 32 nt, Human
aaacaggacaauauaagaagaaaccucuaugu

SEQ ID NO: 284571 - RNA, 32 nt, Human
aaacaggacucugcugggagcuacugugccuu

SEQ ID NO: 284572 - RNA, 32 nt, Human
aaacaggagaggagaggccaggagaucagcag

SEQ ID NO: 284573 - RNA, 32 nt, Human
aaacaggagcaggaaauguacacacagauucc

SEQ ID NO: 284574 - RNA, 32 nt, Human
aaacaggagcccauuucucuucugcuggaguu

SEQ ID NO: 284575 - RNA, 32 nt, Human
aaacaggagguggagguugcagugagccgaga

SEQ ID NO: 284576 - RNA, 32 nt, Human
aaacaggcaaaccagaaucacugugaaucaag

SEQ ID NO: 284577 - RNA, 32 nt, Human
aaacaggcacacaccaucacucgcagcuaagu

SEQ ID NO: 284578 - RNA, 32 nt, Human
aaacaggcacauggaggagcugccuuggagac

SEQ ID NO: 284579 - RNA, 32 nt, Human
aaacaggcacugggacaucacaggcuucagua

SEQ ID NO: 284580 - RNA, 32 nt, Human
aaacaggcagaagaaaaggcagcuguggugug

SEQ ID NO: 284581 - RNA, 32 nt, Human
aaacaggcagcagaggaacccaaaggcaguaa

SEQ ID NO: 284582 - RNA, 32 nt, Human
aaacaggcaggcaguggagcuaacagcuuagu

SEQ ID NO: 284583 - RNA, 32 nt, Human
aaacaggcaguggaucuaaaucuucccaaugu

SEQ ID NO: 284584 - RNA, 32 nt, Human
aaacaggcaguuggccagagagccuggugcug

SEQ ID NO: 284585 - RNA, 32 nt, Human
aaacaggcaugcuguugugacccuaagauggc

SEQ ID NO: 284586 - RNA, 19 nt, Human
aaacaggccaaggcucccu

SEQ ID NO: 284587 - RNA, 32 nt, Human
aaacaggccagccugcuugggcgcucggucuc

SEQ ID NO: 284588 - RNA, 32 nt, Human
aaacaggccaggacaguggugcaugccaguca

SEQ ID NO: 284589 - RNA, 32 nt, Human
aaacaggcggcaggcugggguugguggggcuu

SEQ ID NO: 284590 - RNA, 32 nt, Human
aaacaggcuguuccuuguccagcacuagucau

SEQ ID NO: 284591 - RNA, 32 nt, Human
aaacaggcuucaggaggcaauggugccucuug

SEQ ID NO: 284592 - RNA, 32 nt, Human
aaacagggagcuaugagagauguguccaugug

SEQ ID NO: 284593 - RNA, 32 nt, Human
aaacagggagggcugauaccuccuugcucuuc

SEQ ID NO: 284594 - RNA, 18 nt, Human
aaacagggccagcacaga

SEQ ID NO: 284595 - RNA, 32 nt, Human
aaacaggggaaaggacaaaggaaaccuuaagu

SEQ ID NO: 284596 - RNA, 32 nt, Human
aaacaggguuuuccuuaugaacaaaccuuaca

SEQ ID NO: 284597 - RNA, 32 nt, Human
aaacagguaaggaugggaauauuuuguuauac

SEQ ID NO: 284598 - RNA, 32 nt, Human
aaacagguauaugaaaaggugcucaacaucau

SEQ ID NO: 284599 - RNA, 32 nt, Human
aaacaggucagcauggcagacagcgaggcgaa

SEQ ID NO: 284600 - RNA, 32 nt, Human
aaacaggugaagccugcaguccaaggugccug

SEQ ID NO: 284601 - RNA, 23 nt, Human
aaacagguguccuaacacuguga

SEQ ID NO: 284602 - RNA, 32 nt, Human
aaacaggugugaugaguuaacaagaaauaaca

SEQ ID NO: 284603 - RNA, 32 nt, Human
aaacaguaaaaauacuaauagauuagcugggu

SEQ ID NO: 284604 - RNA, 32 nt, Human
aaacaguaacaaccacuucagagugucaccgc

SEQ ID NO: 284605 - RNA, 32 nt, Human
aaacaguacuguucacaccuuucuucacugag

SEQ ID NO: 284606 - RNA, 32 nt, Human
aaacaguagccaaagauauuugaagaucaugu

SEQ ID NO: 284607 - RNA, 32 nt, Human
aaacaguaguuaggauggcugaaggggauacu

SEQ ID NO: 284608 - RNA, 23 nt, Human
aaacagucaccaccaacaucaaa

SEQ ID NO: 284609 - RNA, 32 nt, Human
aaacagucaguggaguggaggcuccagucaga

SEQ ID NO: 284610 - RNA, 32 nt, Human
aaacagucugaaacucuucuaaaaagcaaaac

SEQ ID NO: 284611 - RNA, 32 nt, Human
aaacagugcaacugaaacuuuugcauuacuau

SEQ ID NO: 284612 - RNA, 32 nt, Human
aaacagugcccaccccucccacaccgucagcc

SEQ ID NO: 284613 - RNA, 32 nt, Human
aaacagugcuccauuuuauuuuguugguguuu

SEQ ID NO: 284614 - RNA, 32 nt, Human
aaacagugcuuggaaggacauuacacaagaaa

SEQ ID NO: 284615 - RNA, 24 nt, Human
aaacagugcuuuggaggcucugga

SEQ ID NO: 284616 - RNA, 32 nt, Human
aaacagugugcauauucugcugagcuuccccc

SEQ ID NO: 284617 - RNA, 32 nt, Human
aaacaguguuccugcauuuaccauaauuuaau

SEQ ID NO: 284618 - RNA, 32 nt, Human
aaacaguugccuuuuccucucacagaaggaag

SEQ ID NO: 284619 - RNA, 21 nt, Human
aaacauaaaugauuguucucc

SEQ ID NO: 284620 - RNA, 32 nt, Human
aaacauaagacauacaucacauuauacacaaa

SEQ ID NO: 284621 - RNA, 32 nt, Human
aaacauaagguaauucauacuggagaaaagcc

SEQ ID NO: 284622 - RNA, 32 nt, Human
aaacauaagguaauucauacuggagagaaacc

SEQ ID NO: 284623 - RNA, 32 nt, Human
aaacauaauagaacuacaacaccgaaggaaau

SEQ ID NO: 284624 - RNA, 32 nt, Human
aaacauaauucuuguccucugagagcauaaaa

SEQ ID NO: 284625 - RNA, 32 nt, Human
aaacauacaaauucugauauagagccucugug

SEQ ID NO: 284626 - RNA, 32 nt, Human
aaacauacaguguucaugguucuugaguucau

SEQ ID NO: 284627 - RNA, 32 nt, Human
aaacauaccauggagaaugaccucagccuucu

SEQ ID NO: 284628 - RNA, 20 nt, Human
aaacauacccaccucugccc

SEQ ID NO: 284629 - RNA, 32 nt, Human
aaacauaccccugcgugucuguccuuaacacc

SEQ ID NO: 284630 - RNA, 32 nt, Human
aaacauacccuaguccuucagccuggggcucu

SEQ ID NO: 284631 - RNA, 32 nt, Human
aaacauacccugggaugcuuucccucuguggu

SEQ ID NO: 284632 - RNA, 32 nt, Human
aaacauacuaugaagccucugauacuuaaaca

SEQ ID NO: 284633 - RNA, 32 nt, Human
aaacauagucugcagagcaauacugauaugaa

SEQ ID NO: 284634 - RNA, 32 nt, Human
aaacauauauacugcuguaucaugccaggauu

SEQ ID NO: 284635 - RNA, 32 nt, Human
aaacauauuccucaauucugugguguucuugg

SEQ ID NO: 284636 - RNA, 32 nt, Human
aaacaucaaaugaguccuccaagcagaaggaa

SEQ ID NO: 284637 - RNA, 32 nt, Human
aaacaucaaauuagguuuggagggaaacuuga

SEQ ID NO: 284638 - RNA, 32 nt, Human
aaacaucaagccuugggauucuuggagcaagc

SEQ ID NO: 284639 - RNA, 32 nt, Human
aaacaucaagcuaaaagacaagaaaugaggcg

SEQ ID NO: 284640 - RNA, 32 nt, Human
aaacaucacauacauucuuggaacuucccagu

SEQ ID NO: 284641 - RNA, 32 nt, Human
aaacaucacguugggagaacagccucgguuuu

SEQ ID NO: 284642 - RNA, 32 nt, Human
aaacaucacuuacguucucccacccauagaca

SEQ ID NO: 284643 - RNA, 32 nt, Human
aaacaucagaugcagaaaaagcccuggacuug

SEQ ID NO: 284644 - RNA, 32 nt, Human
aaacaucaguaguggccagauacuucugaguc

SEQ ID NO: 284645 - RNA, 32 nt, Human
aaacaucaguuuccuguaccaaagucaaaaug

SEQ ID NO: 284646 - RNA, 32 nt, Human
aaacaucaucucccuucucuuucucgcauaac

SEQ ID NO: 284647 - RNA, 32 nt, Human
aaacauccaagcacuuuaauuccaauguacca

SEQ ID NO: 284648 - RNA, 32 nt, Human
aaacauccacuguaauguuacaugcaccuuuu

SEQ ID NO: 284649 - RNA, 32 nt, Human
aaacauccaucuuucuccacuucccccagguc

SEQ ID NO: 284650 - RNA, 32 nt, Human
aaacaucccucagccccacaggcacgaucugu

SEQ ID NO: 284651 - RNA, 32 nt, Human
aaacaucccucccgaguugacccccugggguu

SEQ ID NO: 284652 - RNA, 32 nt, Human
aaacauccuaacuauccuaacucucucacgag

SEQ ID NO: 284653 - RNA, 32 nt, Human
aaacauccucugcaaaugcaacuauuuuaaug

SEQ ID NO: 284654 - RNA, 32 nt, Human
aaacaucguauaacagagaagacuucauuuuu

SEQ ID NO: 284655 - RNA, 32 nt, Human
aaacaucuacuuucuccacauaccuuugagag

SEQ ID NO: 284656 - RNA, 32 nt, Human
aaacaucuaugcaaauguauugcuuuguaauu

SEQ ID NO: 284657 - RNA, 31 nt, Human
aaacaucucaauaaaaccauuuuaguugaaa

SEQ ID NO: 284658 - RNA, 32 nt, Human
aaacaucucccagcaaaagugccgguuaguca

SEQ ID NO: 284659 - RNA, 32 nt, Human
aaacaucugaauaacaacgaugaaugggaaac

SEQ ID NO: 284660 - RNA, 32 nt, Human
aaacaucugggaauuugaaucacuccugaaua

SEQ ID NO: 284661 - RNA, 32 nt, Human
aaacaucuuuauuuucuuuaugucgaccuuuc

SEQ ID NO: 284662 - RNA, 32 nt, Human
aaacaugaaaacagcaaucuucuuaugcuucu

SEQ ID NO: 284663 - RNA, 32 nt, Human
aaacaugaaaucugcuucuuagagaggcuaua

SEQ ID NO: 284664 - RNA, 32 nt, Human
aaacaugaacuuauugcauaaaacuuuucuag

SEQ ID NO: 284665 - RNA, 32 nt, Human
aaacaugaagagaaaaugcucuuuaccaguua

SEQ ID NO: 284666 - RNA, 32 nt, Human
aaacaugaaguaagauuacagcagagcagaag

SEQ ID NO: 284667 - RNA, 32 nt, Human
aaacaugaagugacugcccagagguagaguua

SEQ ID NO: 284668 - RNA, 19 nt, Human
aaacaugacauaaacaaua

SEQ ID NO: 284669 - RNA, 32 nt, Human
aaacaugaccagaaaucaaagaugucagagcc

SEQ ID NO: 284670 - RNA, 32 nt, Human
aaacaugagcaucuaaccccuccuuucuuagg

SEQ ID NO: 284671 - RNA, 32 nt, Human
aaacaugagcuucaacuccaccuccagcucug

SEQ ID NO: 284672 - RNA, 32 nt, Human
aaacaugagugggaggggaggaagcacacaga

SEQ ID NO: 284673 - RNA, 32 nt, Human
aaacaugaugcacacuauucuguaacagaaag

SEQ ID NO: 284674 - RNA, 32 nt, Human
aaacaugcacacacgcaugcacacacacaaag

SEQ ID NO: 284675 - RNA, 32 nt, Human
aaacaugcacuaauauuaccucccucuuccaa

SEQ ID NO: 284676 - RNA, 32 nt, Human
aaacaugcagucucagugugcucucgcaugua

SEQ ID NO: 284677 - RNA, 32 nt, Human
aaacaugccuauuugaccauuuccuuuaaagc

SEQ ID NO: 284678 - RNA, 32 nt, Human
aaacaugccuccaggguuaaugugugaaauaa

SEQ ID NO: 284679 - RNA, 32 nt, Human
aaacaugccuccaggguuggugugugaaauaa

SEQ ID NO: 284680 - RNA, 32 nt, Human
aaacaugcguuugccuuggaucguuugaaauu

SEQ ID NO: 284681 - RNA, 32 nt, Human
aaacaugcuaaaggagguaucuuggcuuaaua

SEQ ID NO: 284682 - RNA, 20 nt, Human
aaacaugcucacucccaccc

SEQ ID NO: 284683 - RNA, 32 nt, Human
aaacauggaacugugcccacugccuuuuccuu

SEQ ID NO: 284684 - RNA, 32 nt, Human
aaacauggaccugccggcugggcgcaguggcu

SEQ ID NO: 284685 - RNA, 32 nt, Human
aaacauggacugaugggucugcuccaggccac

SEQ ID NO: 284686 - RNA, 32 nt, Human
aaacauggaucagacacaaaauaagccuacuc

SEQ ID NO: 284687 - RNA, 32 nt, Human
aaacauggcaaaccaggcugucucauuccacu

SEQ ID NO: 284688 - RNA, 32 nt, Human
aaacauggcaagcagauuacaucugagccguu

SEQ ID NO: 284689 - RNA, 32 nt, Human
aaacauggcuaacauggugaaaccccaucucu

SEQ ID NO: 284690 - RNA, 29 nt, Human
aaacauggcugaagcaaagacccacuggc

SEQ ID NO: 284691 - RNA, 32 nt, Human
aaacaugggaggcggagguugcagugagccga

SEQ ID NO: 284692 - RNA, 32 nt, Human
aaacauggguggcugccugccugccugccugc

SEQ ID NO: 284693 - RNA, 32 nt, Human
aaacaugguaggcuuccccaaggcaucugcag

SEQ ID NO: 284694 - RNA, 32 nt, Human
aaacauguagcugucuuuguucuauagaaaug

SEQ ID NO: 284695 - RNA, 29 nt, Human
aaacauguauggaaauuauucucacuuca

SEQ ID NO: 284696 - RNA, 32 nt, Human
aaacaugucccugaguguucuuuaagaacauu

SEQ ID NO: 284697 - RNA, 29 nt, Human
aaacaugucucgaagauaugacuccagga

SEQ ID NO: 284698 - RNA, 24 nt, Human
aaacaugucucggccccugucccc

SEQ ID NO: 284699 - RNA, 32 nt, Human
aaacauguguuuauuuccacauagauguuaau

SEQ ID NO: 284700 - RNA, 32 nt, Human
aaacauguuuuauuucaagguucugcaaaauu

SEQ ID NO: 284701 - RNA, 32 nt, Human
aaacauguuuugagucuuacucugugccugac

SEQ ID NO: 284702 - RNA, 32 nt, Human
aaacauuaacaaacaugaacagggcauuggcc

SEQ ID NO: 284703 - RNA, 32 nt, Human
aaacauuaacuuaagcagaccaaaaauucuga

SEQ ID NO: 284704 - RNA, 17 nt, Human
aaacauuaauacuuuca

SEQ ID NO: 284705 - RNA, 32 nt, Human
aaacauuacagccuggcauccccagucuuugc

SEQ ID NO: 284706 - RNA, 32 nt, Human
aaacauuagcaguccgggcaugguggcugaag

SEQ ID NO: 284707 - RNA, 32 nt, Human
aaacauuauauguauacaucaguauaguguuu

SEQ ID NO: 284708 - RNA, 32 nt, Human
aaacauucauucucucacacagucucugcagg

SEQ ID NO: 284709 - RNA, 32 nt, Human
aaacauucauucucugcaaaaccuacucuaau

SEQ ID NO: 284710 - RNA, 32 nt, Human
aaacauucauuucaccugcuugcuaaugugua

SEQ ID NO: 284711 - RNA, 32 nt, Human
aaacauuccuauuaccuuucugaggcuggcuu

SEQ ID NO: 284712 - RNA, 32 nt, Human
aaacauucucaaaacaucacaucacauuagca

SEQ ID NO: 284713 - RNA, 22 nt, Human
aaacauucuggaccuucuuccu

SEQ ID NO: 284714 - RNA, 32 nt, Human
aaacauugcugccuaaagaaacucagcagccu

SEQ ID NO: 284715 - RNA, 32 nt, Human
aaacauuggaauugacugaucucugugguuug

SEQ ID NO: 284716 - RNA, 32 nt, Human
aaacauuguagccucuuuauggucucugagaa

SEQ ID NO: 284717 - RNA, 32 nt, Human
aaacauuguccucagaggaguaggaaagugga

SEQ ID NO: 284718 - RNA, 32 nt, Human
aaacauugugcagcuuugcuagggaagaaagu

SEQ ID NO: 284719 - RNA, 22 nt, Human
aaacauuguggcuguuccugua

SEQ ID NO: 284720 - RNA, 32 nt, Human
aaacauuguguaucuauacauauggcucuuga

SEQ ID NO: 284721 - RNA, 32 nt, Human
aaacauuguucagauccugcauuaagaaauuc

SEQ ID NO: 284722 - RNA, 32 nt, Human
aaacauuuaccugaauguugucugaggacuga

SEQ ID NO: 284723 - RNA, 32 nt, Human
aaacauuucacucugcugugccgucucuucau

SEQ ID NO: 284724 - RNA, 32 nt, Human
aaacauuugugaaaccagugagagaaggcuug

SEQ ID NO: 284725 - RNA, 32 nt, Human
aaacauuuucauucuuaaaauuauacucaugg

SEQ ID NO: 284726 - RNA, 32 nt, Human
aaacauuuuccucuuuuccacagagggcuuaa

SEQ ID NO: 284727 - RNA, 32 nt, Human
aaacauuuucucuuucacccuaacuccuaaac

SEQ ID NO: 284728 - RNA, 32 nt, Human
aaacauuuuugaagauuuauucuuuuuguguu

SEQ ID NO: 284729 - RNA, 32 nt, Human
aaaccaaaaagcuggguccucuggaggagggg

SEQ ID NO: 284730 - RNA, 32 nt, Human
aaaccaaacauguuauccaguaauggagccuc

SEQ ID NO: 284731 - RNA, 32 nt, Human
aaaccaaacuaggagaugaaacugguuccuac

SEQ ID NO: 284732 - RNA, 32 nt, Human
aaaccaaacucauaugaucccgaugaaagagg

SEQ ID NO: 284733 - RNA, 32 nt, Human
aaaccaaagaagcacaaaucacugccugucac

SEQ ID NO: 284734 - RNA, 32 nt, Human
aaaccaaagacuugccccagcacugcugugga

SEQ ID NO: 284735 - RNA, 31 nt, Human
aaaccaaagagaccguucguggagucuaaug

SEQ ID NO: 284736 - RNA, 32 nt, Human
aaaccaaaggaaaaguguugcuagagaaaauu

SEQ ID NO: 284737 - RNA, 32 nt, Human
aaaccaaauauacauacuuauuuucuauggac

SEQ ID NO: 284738 - RNA, 32 nt, Human
aaaccaaaugguuacauugugcugcuagaaau

SEQ ID NO: 284739 - RNA, 32 nt, Human
aaaccaacaaagcccacaaguccugauuuccc

SEQ ID NO: 284740 - RNA, 32 nt, Human
aaaccaacaacaauuagccauaguucugaaug

SEQ ID NO: 284741 - RNA, 31 nt, Human
aaaccaacaacauauacacauuuaaaaauag

SEQ ID NO: 284742 - RNA, 32 nt, Human
aaaccaacagucugucaguguacagcagcagu

SEQ ID NO: 284743 - RNA, 32 nt, Human
aaaccaaccaacaaauacaacacaaagcaauu

SEQ ID NO: 284744 - RNA, 32 nt, Human
aaaccaaccaaccaaccaaccaaccaacaaac

SEQ ID NO: 284745 - RNA, 32 nt, Human
aaaccaaccagcguucaaaggaaccucccauc

SEQ ID NO: 284746 - RNA, 32 nt, Human
aaaccaacccuugaagacauuucagggccaug

SEQ ID NO: 284747 - RNA, 32 nt, Human
aaaccaaccuacucugaaagccuucagacauu

SEQ ID NO: 284748 - RNA, 32 nt, Human
aaaccaaccucaggcugaccuaggccgguaau

SEQ ID NO: 284749 - RNA, 32 nt, Human
aaaccaaccuugagcugggagguacgugcucu

SEQ ID NO: 284750 - RNA, 32 nt, Human
aaaccaacucgcacccucaaagcuccggaagc

SEQ ID NO: 284751 - RNA, 32 nt, Human
aaaccaacugaauuuuaauaaaggaagcuuua

SEQ ID NO: 284752 - RNA, 32 nt, Human
aaaccaagaagugagaagcauuucaggggaug

SEQ ID NO: 284753 - RNA, 32 nt, Human
aaaccaagauagagcuacaaacucagcuguac

SEQ ID NO: 284754 - RNA, 32 nt, Human
aaaccaagaucacgccacuacacuccagccug

SEQ ID NO: 284755 - RNA, 32 nt, Human
aaaccaagcaaaucagauggcccagggccaca

SEQ ID NO: 284756 - RNA, 32 nt, Human
aaaccaagccauagcaugaaacagcgagcuug

SEQ ID NO: 284757 - RNA, 21 nt, Human
aaaccaagcccaggccggggg

SEQ ID NO: 284758 - RNA, 32 nt, Human
aaaccaagcccaggccgggggcgguggcucac

SEQ ID NO: 284759 - RNA, 21 nt, Human
aaaccaagcuacaauuagaga

SEQ ID NO: 284760 - RNA, 32 nt, Human
aaaccaagcuguugcaaccucaccagaacagc

SEQ ID NO: 284761 - RNA, 32 nt, Human
aaaccaagcuuuacacgagcaggauggggaug

SEQ ID NO: 284762 - RNA, 32 nt, Human
aaaccaaggaagaggaaugggagccacgcgcg

SEQ ID NO: 284763 - RNA, 24 nt, Human
aaaccaaggauccuguccuagaga

SEQ ID NO: 284764 - RNA, 32 nt, Human
aaaccaaggcacuccagccugggugacagagu

SEQ ID NO: 284765 - RNA, 32 nt, Human
aaaccaagggagcuggaggcagaggaagagaa

SEQ ID NO: 284766 - RNA, 32 nt, Human
aaaccaaggucugaccuaggguucccucccag

SEQ ID NO: 284767 - RNA, 32 nt, Human
aaaccaaggugaggccuugagcucuuuguuuu

SEQ ID NO: 284768 - RNA, 23 nt, Human
aaaccaaguaugccuccgggagg

SEQ ID NO: 284769 - RNA, 32 nt, Human
aaaccaaucugugguuuuaaaagaaguaaggu

SEQ ID NO: 284770 - RNA, 32 nt, Human
aaaccaaugaaaacaagagggaaagugagaaa

SEQ ID NO: 284771 - RNA, 32 nt, Human
aaaccaauuucuuccuuccacaguuaucuuag

SEQ ID NO: 284772 - RNA, 32 nt, Human
aaaccacaacagcagcaacuuauugccaaagc

SEQ ID NO: 284773 - RNA, 32 nt, Human
aaaccacacaaaccaaaccgucaacagcauaa

SEQ ID NO: 284774 - RNA, 32 nt, Human
aaaccacaccucagucacuaaaggucuguuua

SEQ ID NO: 284775 - RNA, 32 nt, Human
aaaccacacuccuuuagauugggggccgagag

SEQ ID NO: 284776 - RNA, 32 nt, Human
aaaccacacuggcuccaacuuccuccucaugg

SEQ ID NO: 284777 - RNA, 32 nt, Human
aaaccacagaugccauacagaccuccugugcu

SEQ ID NO: 284778 - RNA, 32 nt, Human
aaaccacagcuagaauuccuccaccuaggauu

SEQ ID NO: 284779 - RNA, 32 nt, Human
aaaccacagcuguuggcaggguccccagcuca

SEQ ID NO: 284780 - RNA, 32 nt, Human
aaaccacaggagaaacucaaauuguuccuggg

SEQ ID NO: 284781 - RNA, 31 nt, Human
aaaccacaguuucauuauucucauaauccuu

SEQ ID NO: 284782 - RNA, 32 nt, Human
aaaccacauacagaucaccuggaguugauuau

SEQ ID NO: 284783 - RNA, 23 nt, Human
aaaccacaugggaaaacucagca

SEQ ID NO: 284784 - RNA, 32 nt, Human
aaaccacauuacuucugucacuucagggcauc

SEQ ID NO: 284785 - RNA, 32 nt, Human
aaaccaccaaaccaucaccagcuccuagaagc

SEQ ID NO: 284786 - RNA, 21 nt, Human
aaaccaccagcugcccggaga

SEQ ID NO: 284787 - RNA, 32 nt, Human
aaaccaccauggcucuaaacccugccacacug

SEQ ID NO: 284788 - RNA, 32 nt, Human
aaaccacccuaucaucaguuaggauuagguuu

SEQ ID NO: 284789 - RNA, 32 nt, Human
aaaccaccuaggaaccugcuguugcucuaagg

SEQ ID NO: 284790 - RNA, 32 nt, Human
aaaccaccucacccucuccaacuuccugccug

SEQ ID NO: 284791 - RNA, 32 nt, Human
aaaccaccuucccucaucuuucaucaaucauu

SEQ ID NO: 284792 - RNA, 32 nt, Human
aaaccaccuuccuauguuuguaaaauauuuaa

SEQ ID NO: 284793 - RNA, 32 nt, Human
aaaccaccuuuaauuauccagaaugaauagau

SEQ ID NO: 284794 - RNA, 32 nt, Human
aaaccacggaguucugcucuuguugcccaggu

SEQ ID NO: 284795 - RNA, 32 nt, Human
aaaccacguggacgcgucugggcugcuggagg

SEQ ID NO: 284796 - RNA, 32 nt, Human
aaaccacuaaaauacauagacugauugauuau

SEQ ID NO: 284797 - RNA, 32 nt, Human
aaaccacucacuggguaccccaccuccucucu

SEQ ID NO: 284798 - RNA, 32 nt, Human
aaaccacucccaguuccucauuaauagcacca

SEQ ID NO: 284799 - RNA, 32 nt, Human
aaaccacucccuugagagucuggaccugacuc

SEQ ID NO: 284800 - RNA, 32 nt, Human
aaaccacugaacauuugcuuuguuuucuaaag

SEQ ID NO: 284801 - RNA, 32 nt, Human
aaaccacugcaauccagccugggcaacgagca

SEQ ID NO: 284802 - RNA, 32 nt, Human
aaaccacugcagcucucucccaccccugcugu

SEQ ID NO: 284803 - RNA, 32 nt, Human
aaaccacugccuuggccccaggaaggggccau

SEQ ID NO: 284804 - RNA, 32 nt, Human
aaaccacuggagccuugggagcucuuuggccu

SEQ ID NO: 284805 - RNA, 32 nt, Human
aaaccacuguaguccagccugagugacagagu

SEQ ID NO: 284806 - RNA, 31 nt, Human
aaaccacuucaaagauuuuguugaaaguuuu

SEQ ID NO: 284807 - RNA, 32 nt, Human
aaaccacuuccagagucuaaagcagcucagau

SEQ ID NO: 284808 - RNA, 32 nt, Human
aaaccacuugacuuugcuaauggcuauucucc

SEQ ID NO: 284809 - RNA, 32 nt, Human
aaaccacuuuaaucauauccaggaguuugcaa

SEQ ID NO: 284810 - RNA, 32 nt, Human
aaaccacuuucuucucccuuggcuuauaucuc

SEQ ID NO: 284811 - RNA, 32 nt, Human
aaaccacuuuuugcagcuuucucuaguucaag

SEQ ID NO: 284812 - RNA, 32 nt, Human
aaaccagaaaguaccuuuuacuguugauacaa

SEQ ID NO: 284813 - RNA, 32 nt, Human
aaaccagaacuagggccucugcuccaaacuga

SEQ ID NO: 284814 - RNA, 32 nt, Human
aaaccagaagaauuccucugaccacuuacaau

SEQ ID NO: 284815 - RNA, 32 nt, Human
aaaccagaagguggagguggcagugagccgag

SEQ ID NO: 284816 - RNA, 32 nt, Human
aaaccagaauauguucagcuguguuacuaauu

SEQ ID NO: 284817 - RNA, 32 nt, Human
aaaccagaaugggaguuugaaagagagaucau

SEQ ID NO: 284818 - RNA, 32 nt, Human
aaaggguaacacagcccuggauucucccagau

SEQ ID NO: 284819 - RNA, 32 nt, Human
aaaggguagauccagaauagcuggcuucuuuc

SEQ ID NO: 284820 - RNA, 32 nt, Human
aaaggguaguugugguuggcucugccuuugcu

SEQ ID NO: 284821 - RNA, 32 nt, Human
aaaggguauuucuuuucucucuucagccccca

SEQ ID NO: 284822 - RNA, 32 nt, Human
aaaggguccauacauggagaacccuauugcug

SEQ ID NO: 284823 - RNA, 32 nt, Human
aaagggucucacuauguugcccaggcuggucu

SEQ ID NO: 284824 - RNA, 32 nt, Human
aaagggucuuuaagaaccuacuuccuaaucuc

SEQ ID NO: 284825 - RNA, 32 nt, Human
aaagggugaagggcacguucccacaggauuca

SEQ ID NO: 284826 - RNA, 32 nt, Human
aaaggguggauguucaacaugugccuucaaau

SEQ ID NO: 284827 - RNA, 32 nt, Human
aaagggugggagggaggaagaacggaagggag

SEQ ID NO: 284828 - RNA, 32 nt, Human
aaaggguggggaugauaagaaaugcuaauaua

SEQ ID NO: 284829 - RNA, 32 nt, Human
aaagggugguccuucuugaauucauguacaug

SEQ ID NO: 284830 - RNA, 32 nt, Human
aaaggguggugguggugguggaggugcagaag

SEQ ID NO: 284831 - RNA, 32 nt, Human
aaaggguguggaggaagggagggccuugccua

SEQ ID NO: 284832 - RNA, 32 nt, Human
aaaggguugccucaucaagcagcucaguguaa

SEQ ID NO: 284833 - RNA, 32 nt, Human
aaaggguuucacugucaccaaggcuuagugca

SEQ ID NO: 284834 - RNA, 32 nt, Human
aaagguaaaauaaucaggaauauuucuauagu

SEQ ID NO: 284835 - RNA, 32 nt, Human
aaagguaaagcccaucacuucuagagggagaa

SEQ ID NO: 284836 - RNA, 32 nt, Human
aaagguaacuuauuucucuucugcacagagca

SEQ ID NO: 284837 - RNA, 32 nt, Human
aaagguaauaaauauucaaagcauaucacuuc

SEQ ID NO: 284838 - RNA, 32 nt, Human
aaagguacaaaaacaaacuaaccacaguugaa

SEQ ID NO: 284839 - RNA, 32 nt, Human
aaagguacaccacuacacuccagccugggcaa

SEQ ID NO: 284840 - RNA, 32 nt, Human
aaagguacauaguguuucaagugcaugguagu

SEQ ID NO: 284841 - RNA, 32 nt, Human
aaagguacauguuuacaaagagguuuuaugaa

SEQ ID NO: 284842 - RNA, 32 nt, Human
aaagguacuuccugaaacuuuugauucaauaa

SEQ ID NO: 284843 - RNA, 32 nt, Human
aaagguagaugagucugaauuuugaaguaacg

SEQ ID NO: 284844 - RNA, 32 nt, Human
aaagguagauuauccaggugugccugauuuga

SEQ ID NO: 284845 - RNA, 32 nt, Human
aaagguagccauggaagagaauauggaagagg

SEQ ID NO: 284846 - RNA, 32 nt, Human
aaagguagcucaguaucucugccuucucucca

SEQ ID NO: 284847 - RNA, 32 nt, Human
aaagguagucugccccuuccuuccucucucuu

SEQ ID NO: 284848 - RNA, 32 nt, Human
aaagguaucugugguauuggcaggauagggaa

SEQ ID NO: 284849 - RNA, 32 nt, Human
aaagguauugaauaucuguuaugaaagguucu

SEQ ID NO: 284850 - RNA, 32 nt, Human
aaagguauuuggaacuuuuuacaggaauuaaa

SEQ ID NO: 284851 - RNA, 31 nt, Human
aaaggucacagcugagugagagaguugguaa

SEQ ID NO: 284852 - RNA, 32 nt, Human
aaaggucacaggaaucgugaaggagcugagaa

SEQ ID NO: 284853 - RNA, 21 nt, Human
aaaggucacaguauucaugac

SEQ ID NO: 284854 - RNA, 32 nt, Human
aaaggucagaacaguuaaacacugccuuuccu

SEQ ID NO: 284855 - RNA, 32 nt, Human
aaaggucagaucuauuggaaaugacagcccga

SEQ ID NO: 284856 - RNA, 32 nt, Human
aaaggucagcaaaugaguucucuggcauuugg

SEQ ID NO: 284857 - RNA, 32 nt, Human
aaaggucaggaguucaagacaagaccagccug

SEQ ID NO: 284858 - RNA, 32 nt, Human
aaaggucaggguggcugugguuggaaccucca

SEQ ID NO: 284859 - RNA, 32 nt, Human
aaaggucagggugggcgggggccugggaauac

SEQ ID NO: 284860 - RNA, 32 nt, Human
aaaggucaguacacaaacaugcgugccauuaa

SEQ ID NO: 284861 - RNA, 32 nt, Human
aaaggucauccucugcucuauuuguuaccuug

SEQ ID NO: 284862 - RNA, 32 nt, Human
aaaggucauguagagguuguaguagaauggcu

SEQ ID NO: 284863 - RNA, 32 nt, Human
aaaggucauuguggcuaucugcauuuauaaau

SEQ ID NO: 284864 - RNA, 32 nt, Human
aaagguccaacaaugaaacagaacagauauau

SEQ ID NO: 284865 - RNA, 32 nt, Human
aaagguccacgaugggcuuucccaacagcucc

SEQ ID NO: 284866 - RNA, 32 nt, Human
aaagguccaguucucaguaccaugugaguuaa

SEQ ID NO: 284867 - RNA, 32 nt, Human
aaagguccaucaucaaaacaccaaagacucaa

SEQ ID NO: 284868 - RNA, 19 nt, Human
aaaggucguucccagcaga

SEQ ID NO: 284869 - RNA, 32 nt, Human
aaaggucuaauauccagcaucuauaaagaacu

SEQ ID NO: 284870 - RNA, 32 nt, Human
aaaggucuacagcuucacucccgaagccagcg

SEQ ID NO: 284871 - RNA, 32 nt, Human
aaaggucuacagcuucauuccugaagcccgcg

SEQ ID NO: 284872 - RNA, 32 nt, Human
aaaggucucagccuguagcuuaaacuuauaga

SEQ ID NO: 284873 - RNA, 32 nt, Human
aaaggucuccaaugcguaugaccucaucuucc

SEQ ID NO: 284874 - RNA, 32 nt, Human
aaaggucucgcaaaguucaugcggcggcugcg

SEQ ID NO: 284875 - RNA, 32 nt, Human
aaaggucucuugcuaaauauugcuggaugaag

SEQ ID NO: 284876 - RNA, 32 nt, Human
aaaggucugaaauccagcaucuauacguaauu

SEQ ID NO: 284877 - RNA, 32 nt, Human
aaaggucugcaacuucacuucugaggccagcc

SEQ ID NO: 284878 - RNA, 32 nt, Human
aaaggucugccucacacaggccuucccugcag

SEQ ID NO: 284879 - RNA, 32 nt, Human
aaaggucugugggccaaagaacagguguauau

SEQ ID NO: 284880 - RNA, 32 nt, Human
aaaggucuguuaaugucauggccuugaaacag

SEQ ID NO: 284881 - RNA, 32 nt, Human
aaaggucuuaucucccagcucgcccaggccca

SEQ ID NO: 284882 - RNA, 32 nt, Human
aaaggucuucaaggaguugguccagguagcaa

SEQ ID NO: 284883 - RNA, 32 nt, Human
aaaggucuugaccugaaugauggccggggaag

SEQ ID NO: 284884 - RNA, 20 nt, Human
aaaggucuuggggaauucug

SEQ ID NO: 284885 - RNA, 31 nt, Human
aaaggucuuuaguagaucacagcagaguuac

SEQ ID NO: 284886 - RNA, 32 nt, Human
aaaggugaagcagcggcguuuucggcgacuuu

SEQ ID NO: 284887 - RNA, 21 nt, Human
aaaggugaagcugccuugagg

SEQ ID NO: 284888 - RNA, 32 nt, Human
aaaggugaaggaggucagaaagagauagaauu

SEQ ID NO: 284889 - RNA, 32 nt, Human
aaaggugacaagccuggguuucucccaggaua

SEQ ID NO: 284890 - RNA, 32 nt, Human
aaaggugacagcagaagcagauagcaguaguc

SEQ ID NO: 284891 - RNA, 32 nt, Human
aaaggugacaggcacaagccuaggcaaauaga

SEQ ID NO: 284892 - RNA, 32 nt, Human
aaaggugacucugucccuggacacugccuccg

SEQ ID NO: 284893 - RNA, 32 nt, Human
aaaggugagacccucucccaagaggagcagag

SEQ ID NO: 284894 - RNA, 32 nt, Human
aaaggugagaggaggagaguggcauuaucccu

SEQ ID NO: 284895 - RNA, 20 nt, Human
aaaggugcacugcuuuggga

SEQ ID NO: 284896 - RNA, 32 nt, Human
aaaggugcagagaugaaaagauuuugaaggac

SEQ ID NO: 284897 - RNA, 32 nt, Human
aaaggugcccaccacuauacccggcuaauuuu

SEQ ID NO: 284898 - RNA, 32 nt, Human
aaaggugcccaucuucucucuccuagagccca

SEQ ID NO: 284899 - RNA, 32 nt, Human
aaaggugccugagaugaaacuuccugagauga

SEQ ID NO: 284900 - RNA, 32 nt, Human
aaaggugcuaccccaauuuggugaaauugaca

SEQ ID NO: 284901 - RNA, 19 nt, Human
aaaggugcugaccuuggga

SEQ ID NO: 284902 - RNA, 32 nt, Human
aaaggugcuuuaagguugcccucugccgauac

SEQ ID NO: 284903 - RNA, 32 nt, Human
aaagguggaaggacagagugcuggggacaaga

SEQ ID NO: 284904 - RNA, 32 nt, Human
aaagguggacuugucucccagucgaggcuggu

SEQ ID NO: 284905 - RNA, 32 nt, Human
aaagguggauaccuccuucacaugguguuugc

SEQ ID NO: 284906 - RNA, 32 nt, Human
aaagguggcagcaguugaaggaagagauugag

SEQ ID NO: 284907 - RNA, 32 nt, Human
aaagguggcccgaggcagccgggaugacagcu

SEQ ID NO: 284908 - RNA, 32 nt, Human
aaagguggccgcgcugucaguaccaaguagcu

SEQ ID NO: 284909 - RNA, 32 nt, Human
aaaggugggaggaucauuugagcucaggaguu

SEQ ID NO: 284910 - RNA, 32 nt, Human
aaaggugggauuuuagugugcacugugugaug

SEQ ID NO: 284911 - RNA, 32 nt, Human
aaaggugggcugccuuuuccccuuguccuuau

SEQ ID NO: 284912 - RNA, 32 nt, Human
aaaggugggugagggaagcagagagaaaucau

SEQ ID NO: 284913 - RNA, 32 nt, Human
aaagguggucuggagccccuucccucucccug

SEQ ID NO: 284914 - RNA, 32 nt, Human
aaaggugguggauuuauuuugccugcaguaaa

SEQ ID NO: 284915 - RNA, 32 nt, Human
aaaggugucagucccuguggccuuccuugggg

SEQ ID NO: 284916 - RNA, 32 nt, Human
aaagguguccaagucacacagagccacggaau

SEQ ID NO: 284917 - RNA, 32 nt, Human
aaaggugucccaaggcuccugaccagugaaca

SEQ ID NO: 284918 - RNA, 32 nt, Human
aaaggugugucccaguuaaguacugucaaauc

SEQ ID NO: 284919 - RNA, 32 nt, Human
aaagguguguuccagagaacaagccuucagac

SEQ ID NO: 284920 - RNA, 32 nt, Human
aaagguguuuucaaaagcacacacugacugug

SEQ ID NO: 284921 - RNA, 32 nt, Human
aaagguguuuuuaaugagauaaucuuuuugau

SEQ ID NO: 284922 - RNA, 32 nt, Human
aaagguuaagaugauucucccuccugcagccu

SEQ ID NO: 284923 - RNA, 32 nt, Human
aaagguuacaaacccacaccaauacuauuuua

SEQ ID NO: 284924 - RNA, 32 nt, Human
aaagguuacacaugaucauggcacagaagaua

SEQ ID NO: 284925 - RNA, 19 nt, Human
aaagguuagacuuuugaga

SEQ ID NO: 284926 - RNA, 32 nt, Human
aaagguuauggaagaaugguuuaugaacuucc

SEQ ID NO: 284927 - RNA, 32 nt, Human
aaagguucaaucaauaaaaauauuuuauucaa

SEQ ID NO: 284928 - RNA, 32 nt, Human
aaagguuccucgaacucugcaccuuccuccac

SEQ ID NO: 284929 - RNA, 32 nt, Human
aaagguuccuguggagccucaggccggugugc

SEQ ID NO: 284930 - RNA, 32 nt, Human
aaagguucgcccuggugcugagcuccaugaac

SEQ ID NO: 284931 - RNA, 32 nt, Human
aaagguucuugcaaaaccaugaaucuugcuuu

SEQ ID NO: 284932 - RNA, 32 nt, Human
aaagguuuccacauaggguuaccccuuaauag

SEQ ID NO: 284933 - RNA, 19 nt, Human
aaagguuugcacuuugaga

SEQ ID NO: 284934 - RNA, 32 nt, Human
aaagguuuguguauauuucugaugcaaauguc

SEQ ID NO: 284935 - RNA, 24 nt, Human
aaagguuuuaaccgcacaugcaca

SEQ ID NO: 284936 - RNA, 22 nt, Human
aaagguuuucuucauucauggc

SEQ ID NO: 284937 - RNA, 32 nt, Human
aaagguuuugacuguguugggguggggguugg

SEQ ID NO: 284938 - RNA, 32 nt, Human
aaagguuuuggaaggaaaaaugaccugaaauc

SEQ ID NO: 284939 - RNA, 21 nt, Human
aaagguuuuguccuguaggac

SEQ ID NO: 284940 - RNA, 32 nt, Human
aaagguuuuguuuugcuuugcuuguugugaau

SEQ ID NO: 284941 - RNA, 32 nt, Human
aaaguaaaacaauuucccaaucccaggccuug

SEQ ID NO: 284942 - RNA, 32 nt, Human
aaaguaaaaccagcucagaaucuugccagagu

SEQ ID NO: 284943 - RNA, 32 nt, Human
aaaguaaacaguucauccaugaucucacuuaa

SEQ ID NO: 284944 - RNA, 32 nt, Human
aaaguaaaucuuuggggacaguguagcccauc

SEQ ID NO: 284945 - RNA, 32 nt, Human
aaaguaacaagcuguuccuuguuucugauaca

SEQ ID NO: 284946 - RNA, 32 nt, Human
aaaguaaccccgaggaaagguaugaaacacca

SEQ ID NO: 284947 - RNA, 32 nt, Human
aaaguaacuaaaacaaagaaagcugagccagc

SEQ ID NO: 284948 - RNA, 32 nt, Human
aaaguaacuauuucucagacuuuuggggagaa

SEQ ID NO: 284949 - RNA, 32 nt, Human
aaaguaacugaauuauuucaggaaggucuuca

SEQ ID NO: 284950 - RNA, 32 nt, Human
aaaguaacuguuuucuucuuggugcuaugaca

SEQ ID NO: 284951 - RNA, 32 nt, Human
aaaguaagaccuagaccuggaucuucuaacuc

SEQ ID NO: 284952 - RNA, 32 nt, Human
aaaguaagagggaaaggaaaagagguaucaag

SEQ ID NO: 284953 - RNA, 32 nt, Human
aaaguaagcucccuccuggaaugcuucauuca

SEQ ID NO: 284954 - RNA, 32 nt, Human
aaaguaaggaagcaacagcugcugcagcugag

SEQ ID NO: 284955 - RNA, 32 nt, Human
aaaguaaguaucaucuggaauguaauauguaa

SEQ ID NO: 284956 - RNA, 32 nt, Human
aaaguaauaauauaaggaaaaagggaaaguaa

SEQ ID NO: 284957 - RNA, 32 nt, Human
aaaguaaugaauucuggccagguacaguggcu

SEQ ID NO: 284958 - RNA, 32 nt, Human
aaaguaauguuauuuccaagaaaauguuacuc

SEQ ID NO: 284959 - RNA, 18 nt, Human
aaaguaauugccugugua

SEQ ID NO: 284960 - RNA, 32 nt, Human
aaaguacaaagaagaaaaguaaaaguacccau

SEQ ID NO: 284961 - RNA, 32 nt, Human
aaaguacaaggccggccgggugcaguggcuca

SEQ ID NO: 284962 - RNA, 32 nt, Human
aaaguacaagggcugagauucuucguguauag

SEQ ID NO: 284963 - RNA, 32 nt, Human
aaaguacaccuacacuaauagucugucucaac

SEQ ID NO: 284964 - RNA, 32 nt, Human
aaaguacagugaccccagcaaggggaaaaggu

SEQ ID NO: 284965 - RNA, 32 nt, Human
aaaguacauccuuggaaucuuuguccacacag

SEQ ID NO: 284966 - RNA, 32 nt, Human
aaaguacaugacacaguaguugcuugauaaua

SEQ ID NO: 284967 - RNA, 32 nt, Human
aaaguaccaccugcuacucagaaagcuaaauc

SEQ ID NO: 284968 - RNA, 32 nt, Human
aaaguacgcuuuguuggcugggcacggcgacu

SEQ ID NO: 284969 - RNA, 32 nt, Human
aaaguacuggacugccugguucagggcugaac

SEQ ID NO: 284970 - RNA, 32 nt, Human
aaaguacuucacuuauucuuuuuaacuacuga

SEQ ID NO: 284971 - RNA, 32 nt, Human
aaaguacuucagaaugaaacuggauacaguau

SEQ ID NO: 284972 - RNA, 32 nt, Human
aaaguacuuggccuccccacucccuccccacu

SEQ ID NO: 284973 - RNA, 32 nt, Human
aaaguagaauacaguggugugacgcuacccac

SEQ ID NO: 284974 - RNA, 32 nt, Human
aaaguagaauuuaaaacagaggauacaguuaa

SEQ ID NO: 284975 - RNA, 32 nt, Human
aaaguagagacaggauuucacuguguuagcca

SEQ ID NO: 284976 - RNA, 32 nt, Human
aaaguagagcucaugaacucugugcugucuuc

SEQ ID NO: 284977 - RNA, 32 nt, Human
aaaguagaugaaaaaguccuccccuauucuaa

SEQ ID NO: 284978 - RNA, 32 nt, Human
aaaguagauguggacucaaguggaaagaaaug

SEQ ID NO: 284979 - RNA, 32 nt, Human
aaaguagcaaaaggugucugcauucugagccu

SEQ ID NO: 284980 - RNA, 32 nt, Human
aaaguagcaagugaccagaaucugccauggca

SEQ ID NO: 284981 - RNA, 32 nt, Human
aaaguagcccagcaaaugaugaggcuugaacc

SEQ ID NO: 284982 - RNA, 32 nt, Human
aaaguagccgggaggugcagggcagcaggggg

SEQ ID NO: 284983 - RNA, 32 nt, Human
aaaguagccuggugccuguaaucccagcuacu

SEQ ID NO: 284984 - RNA, 32 nt, Human
aaaguaggaucccagugcauuaggcagccagu

SEQ ID NO: 284985 - RNA, 32 nt, Human
aaaguaggccagagccgaacucucuuccugcc

SEQ ID NO: 284986 - RNA, 32 nt, Human
aaaguagggaaagaaggagagaggaagcaagg

SEQ ID NO: 284987 - RNA, 32 nt, Human
aaaguagggagggcauccaacauauuauagau

SEQ ID NO: 284988 - RNA, 32 nt, Human
aaaguagggugcgguggccaggagggccccug

SEQ ID NO: 284989 - RNA, 32 nt, Human
aaaguaguucucugucauguguguucccugcc

SEQ ID NO: 284990 - RNA, 32 nt, Human
aaaguauaaccagucacaccaaagagaggcag

SEQ ID NO: 284991 - RNA, 32 nt, Human
aaaguauaggagaaacugaagaauguacacuu

SEQ ID NO: 284992 - RNA, 32 nt, Human
aaaguauauaaauggcucuuaugcuuuugagg

SEQ ID NO: 284993 - RNA, 32 nt, Human
aaaguaucagucuucugaauucugaguuuuga

SEQ ID NO: 284994 - RNA, 29 nt, Human
aaaguauccuuaauauuuuaugacauucu

SEQ ID NO: 284995 - RNA, 32 nt, Human
aaaguaucuccuccaaccaaaacaucucaaua

SEQ ID NO: 284996 - RNA, 32 nt, Human
aaaguaugaacccaaacaggaaagggcugagg

SEQ ID NO: 284997 - RNA, 32 nt, Human
aaaguauuacuuuuacgacaacuacuuugacc

SEQ ID NO: 284998 - RNA, 32 nt, Human
aaaguauuauauccucaccccacccgugccug

SEQ ID NO: 284999 - RNA, 32 nt, Human
aaaguauuccugaacuuuccuuagcuccuugg

SEQ ID NO: 285000 - RNA, 32 nt, Human
aaaguauucuaaaagaguaggaagagagaaau

SEQ ID NO: 285001 - RNA, 32 nt, Human
aaaguauugggguggagguugcagugagcaga

SEQ ID NO: 285002 - RNA, 32 nt, Human
aaaguauugggguggagguugcagugagcgga

SEQ ID NO: 285003 - RNA, 32 nt, Human
aaaguauuggugcuugcuaccuugugaauucu

SEQ ID NO: 285004 - RNA, 23 nt, Human
aaaguauuuguguuugguuucag

SEQ ID NO: 285005 - RNA, 32 nt, Human
aaaguauuuuuaagucucaccaaaaaggugga

SEQ ID NO: 285006 - RNA, 32 nt, Human
aaagucaaacuucugcauccucuugugaugag

SEQ ID NO: 285007 - RNA, 32 nt, Human
aaagucaacgacaccauuaucuugucaagauc

SEQ ID NO: 285008 - RNA, 32 nt, Human
aaagucaagagcuaaggagggagggagagggu

SEQ ID NO: 285009 - RNA, 32 nt, Human
aaagucaagcccuuucuuuguucauugcucag

SEQ ID NO: 285010 - RNA, 32 nt, Human
aaagucacaagggggccugagugcaguggcuc

SEQ ID NO: 285011 - RNA, 32 nt, Human
aaagucacaggcaucuggaaguguggcccaag

SEQ ID NO: 285012 - RNA, 32 nt, Human
aaagucacagucagguuccagacuguuaagag

SEQ ID NO: 285013 - RNA, 32 nt, Human
aaagucacugguccuuucucagccucucucgu

SEQ ID NO: 285014 - RNA, 32 nt, Human
aaagucacuuuccuauuagacuucuugaaaaa

SEQ ID NO: 285015 - RNA, 32 nt, Human
aaagucagaaaccacauuuucuccucagaagu

SEQ ID NO: 285016 - RNA, 32 nt, Human
aaagucagaaaugcuacugcuuuuuccaagaa

SEQ ID NO: 285017 - RNA, 32 nt, Human
aaagucagaacaggccaggcccgguggcucac

SEQ ID NO: 285018 - RNA, 32 nt, Human
aaagucagaugccaccuaccagggucuacagu

SEQ ID NO: 285019 - RNA, 32 nt, Human
aaagucagaugugccacugaacuugacagaca

SEQ ID NO: 285020 - RNA, 32 nt, Human
aaagucagcauuuuccuugagcuaaauaccua

SEQ ID NO: 285021 - RNA, 32 nt, Human
aaagucagcucucauaacuaaguuaauuuagu

SEQ ID NO: 285022 - RNA, 32 nt, Human
aaagucagcuucuuggauacagacacacccag

SEQ ID NO: 285023 - RNA, 32 nt, Human
aaagucagcuuggagaggagaucaugaucuuu

SEQ ID NO: 285024 - RNA, 32 nt, Human
aaagucaggauggggagacagaagacuucugu

SEQ ID NO: 285025 - RNA, 31 nt, Human
aaagucaggcucggaguuggcauucaucauu

SEQ ID NO: 285026 - RNA, 32 nt, Human
aaagucagggaaaggggagaagaaagaaaaac

SEQ ID NO: 285027 - RNA, 32 nt, Human
aaagucagggagcugggggagcuguucacuuu

SEQ ID NO: 285028 - RNA, 32 nt, Human
aaagucagucagggugaaagagaauugguugc

SEQ ID NO: 285029 - RNA, 32 nt, Human
aaagucagugugaagggcagcugugugcgggc

SEQ ID NO: 285030 - RNA, 32 nt, Human
aaagucaguucugguggcccuggacuuuggag

SEQ ID NO: 285031 - RNA, 32 nt, Human
aaagucaguuuaggcugggcgcaguggcucac

SEQ ID NO: 285032 - RNA, 32 nt, Human
aaagucaguuuaggcugggcgcgguggcucac

SEQ ID NO: 285033 - RNA, 32 nt, Human
aaagucauaagaaucuaucacuaaguaaugua

SEQ ID NO: 285034 - RNA, 32 nt, Human
aaagucaucaagggcugggaggauggaaugcu

SEQ ID NO: 285035 - RNA, 32 nt, Human
aaagucaugcaaaggcugggaccacgugagau

SEQ ID NO: 285036 - RNA, 32 nt, Human
aaagucauggggcaaugaaggacuuggccaag

SEQ ID NO: 285037 - RNA, 32 nt, Human
aaagucauggugccugcaucccugccaagccc

SEQ ID NO: 285038 - RNA, 32 nt, Human
aaagucauuuggguccugggaagcacugggaa

SEQ ID NO: 285039 - RNA, 32 nt, Human
aaaguccacgaaagaccuacucuuucagaagc

SEQ ID NO: 285040 - RNA, 32 nt, Human
aaaguccacugcagccuaggaggguguuuccc

SEQ ID NO: 285041 - RNA, 32 nt, Human
aaaguccagaaacuguucccaccugcuggagu

SEQ ID NO: 285042 - RNA, 32 nt, Human
aaaguccagaucuccaucuccaaaaagaaguc

SEQ ID NO: 285043 - RNA, 32 nt, Human
aaaguccagcucccaaguuuuccuucuccuac

SEQ ID NO: 285044 - RNA, 32 nt, Human
aaaguccaggccuuugggggaggcugggagag

SEQ ID NO: 285045 - RNA, 32 nt, Human
aaaguccaggguaaagcuaaaaguugauaagu

SEQ ID NO: 285046 - RNA, 32 nt, Human
aaagucccaccaacuaccagaccagaacacga

SEQ ID NO: 285047 - RNA, 32 nt, Human
aaagucccagagccagcagagcaggcugacga

SEQ ID NO: 285048 - RNA, 32 nt, Human
aaagucccaggcugcccaacccucucugggac

SEQ ID NO: 285049 - RNA, 32 nt, Human
aaaguccccugcucccuggacuucuccugggu

SEQ ID NO: 285050 - RNA, 32 nt, Human
aaagucccugccuuccacaccucucucuaguc

SEQ ID NO: 285051 - RNA, 32 nt, Human
aaaguccuagaagaaagagcagagagggagac

SEQ ID NO: 285052 - RNA, 32 nt, Human
aaaguccuccagggccucugaggaugggggca

SEQ ID NO: 285053 - RNA, 32 nt, Human
aaaguccucuuccuggcucauccuggcucaaa

SEQ ID NO: 285054 - RNA, 32 nt, Human
aaaguccuggccaccuguuaugugccacauug

SEQ ID NO: 285055 - RNA, 32 nt, Human
aaaguccugugcugauucauugcaaugaugac

SEQ ID NO: 285056 - RNA, 32 nt, Human
aaaguccuugcuccuggugaauucgguaacca

SEQ ID NO: 285057 - RNA, 32 nt, Human
aaaguccuuugagcuccugggaacagguggug

SEQ ID NO: 285058 - RNA, 31 nt, Human
aaaguccuuugguaaaugcuguugaauugga

SEQ ID NO: 285059 - RNA, 32 nt, Human
aaagucgagguuucccuguguugcccaggcug

SEQ ID NO: 285060 - RNA, 32 nt, Human
aaagucgccugacaguuaaagcagaggacuac

SEQ ID NO: 285061 - RNA, 32 nt, Human
aaagucggcaccagaugaagaaaaugaaucac

SEQ ID NO: 285062 - RNA, 32 nt, Human
aaagucggcugccacaccaugcccucggcagu

SEQ ID NO: 285063 - RNA, 32 nt, Human
aaagucggcugugaccuccuguccccagagcu

SEQ ID NO: 285064 - RNA, 32 nt, Human
aaagucuacaguuccaaagaacaaaagauucc

SEQ ID NO: 285065 - RNA, 32 nt, Human
aaagucuagccuugcccgagcuuuccuuacaa

SEQ ID NO: 285066 - RNA, 32 nt, Human
aaagucucaagcacagcuucaagugaaguuaa

SEQ ID NO: 285067 - RNA, 32 nt, Human
aaagucucagcaggccccugagggagggagcu

SEQ ID NO: 285068 - RNA, 32 nt, Human
aaagucucagcccaguucaauucaguugaucu

SEQ ID NO: 285069 - RNA, 32 nt, Human
aaagucucauaguguuaacacugguucugcaa

SEQ ID NO: 285070 - RNA, 32 nt, Human
aaagucuccagaagucuaaccccagauaaaua

SEQ ID NO: 285071 - RNA, 32 nt, Human
aaagucucuccacugaucugucuuccaguccu

SEQ ID NO: 285072 - RNA, 32 nt, Human
aaagucucuccccaagggcagccuuuguuacu

SEQ ID NO: 285073 - RNA, 32 nt, Human
aaagucucugaacaauucucucuaauacauau

SEQ ID NO: 285074 - RNA, 32 nt, Human
aaagucucugcucucucuuccuaugaucacag

SEQ ID NO: 285075 - RNA, 32 nt, Human
aaagucucugugcaguggaagcaaaacugagu

SEQ ID NO: 285076 - RNA, 32 nt, Human
aaagucucuucugccacugacgcccccaucag

SEQ ID NO: 285077 - RNA, 22 nt, Human
aaagucugaacugaacagaaca

SEQ ID NO: 285078 - RNA, 32 nt, Human
aaagucugagccaccagccacaccugacaggg

SEQ ID NO: 285079 - RNA, 19 nt, Human
aaagucugagcccggaaca

SEQ ID NO: 285080 - RNA, 23 nt, Human
aaagucugaguucuguggacaua

SEQ ID NO: 285081 - RNA, 32 nt, Human
aaagucugauucagaccagggacucuauuuua

SEQ ID NO: 285082 - RNA, 32 nt, Human
aaagucugcugugggugaggagguagguaggu

SEQ ID NO: 285083 - RNA, 32 nt, Human
aaagucugcuguucuucccccugggcccccuu

SEQ ID NO: 285084 - RNA, 32 nt, Human
aaagucuggggagccacaggagagggaccuug

SEQ ID NO: 285085 - RNA, 32 nt, Human
aaagucuguaugacacaagaagagucaccuaa

SEQ ID NO: 285086 - RNA, 32 nt, Human
aaagucugucauggggaagcuauauuuuugag

SEQ ID NO: 285087 - RNA, 32 nt, Human
aaagucuucaagaagugcaauggcuacuucua

SEQ ID NO: 285088 - RNA, 32 nt, Human
aaagucuucagaccaggcaugguggcucaugc

SEQ ID NO: 285089 - RNA, 32 nt, Human
aaagucuuccucuggaaauacauaucacugca

SEQ ID NO: 285090 - RNA, 32 nt, Human
aaagucuucugacuuccagucuuucaccagau

SEQ ID NO: 285091 - RNA, 32 nt, Human
aaagucuugaccuucauggggucugggacaau

SEQ ID NO: 285092 - RNA, 32 nt, Human
aaagucuuguguuuaaggagcaagacaggaag

SEQ ID NO: 285093 - RNA, 32 nt, Human
aaagucuuucaucaccagauuucacagguguu

SEQ ID NO: 285094 - RNA, 32 nt, Human
aaagucuuugcugcugugcugggcaccaccca

SEQ ID NO: 285095 - RNA, 31 nt, Human
aaagugaaagcaauggaaaaagagaugaaau

SEQ ID NO: 285096 - RNA, 32 nt, Human
aaagugaacacccugaacugggauuaucugca

SEQ ID NO: 285097 - RNA, 21 nt, Human
aaagugaacggaucacugggg

SEQ ID NO: 285098 - RNA, 32 nt, Human
aaagugaagagagguucguacuucucauaauu

SEQ ID NO: 285099 - RNA, 32 nt, Human
aaagugaaggcagagugagcagguaagagagg

SEQ ID NO: 285100 - RNA, 32 nt, Human
aaagugaaggggagcuccggaagaaccuggag

SEQ ID NO: 285101 - RNA, 20 nt, Human
aaagugaagggguuaauucc

SEQ ID NO: 285102 - RNA, 24 nt, Human
aaagugaagguguagauaauaccu

SEQ ID NO: 285103 - RNA, 32 nt, Human
aaagugaaucagagaagagcagagggagugcu

SEQ ID NO: 285104 - RNA, 32 nt, Human
aaagugaccagaagauuguacuuccuagagau

SEQ ID NO: 285105 - RNA, 32 nt, Human
aaagugaccuggacaaggcugaccucagugcc

SEQ ID NO: 285106 - RNA, 31 nt, Human
aaagugacugagagagggcugauaaacuagg

SEQ ID NO: 285107 - RNA, 32 nt, Human
aaagugagaagccacagaaauggagaguggaa

SEQ ID NO: 285108 - RNA, 32 nt, Human
aaagugagagaagagagagaugucccagagac

SEQ ID NO: 285109 - RNA, 31 nt, Human
aaagugagagugaaccuaaaggguaucugga

SEQ ID NO: 285110 - RNA, 32 nt, Human
aaagugagaugggggaugggagagggguccca

SEQ ID NO: 285111 - RNA, 32 nt, Human
aaagugagcuggaucuuugaagcacaaaugca

SEQ ID NO: 285112 - RNA, 32 nt, Human
aaagugaggagaagcugcaagggaaaagggag

SEQ ID NO: 285113 - RNA, 32 nt, Human
aaagugaggccaacacacagggcaaguggugu

SEQ ID NO: 285114 - RNA, 17 nt, Human
aaagugauccaguucaa

SEQ ID NO: 285115 - RNA, 32 nt, Human
aaagugaucuccuagcuuguaagcaaacugag

SEQ ID NO: 285116 - RNA, 19 nt, Human
aaagugaucucuuaaugua

SEQ ID NO: 285117 - RNA, 32 nt, Human
aaagugaugacauagcaguuacagagggugau

SEQ ID NO: 285118 - RNA, 32 nt, Human
aaagugaugaggaggaagaagagggcuguggu

SEQ ID NO: 285119 - RNA, 32 nt, Human
aaagugaugcagcucacuuccacccacauucg

SEQ ID NO: 285120 - RNA, 32 nt, Human
aaagugauuacaaauauuaccuccaggguuca

SEQ ID NO: 285121 - RNA, 32 nt, Human
aaagugcaauauuugaguaucacugcgagaug

SEQ ID NO: 285122 - RNA, 32 nt, Human
aaagugcacugaggaagguggccccaagagaa

SEQ ID NO: 285123 - RNA, 32 nt, Human
aaagugcagcauggaggaaaaucugaacucua

SEQ ID NO: 285124 - RNA, 32 nt, Human
aaagugcagguguguaaggaaauagaacaguc

SEQ ID NO: 285125 - RNA, 32 nt, Human
aaagugcagguguguaggaaauagaacagucu

SEQ ID NO: 285126 - RNA, 32 nt, Human
aaagugcauacauuuauauaaucuaaucuugg

SEQ ID NO: 285127 - RNA, 32 nt, Human
aaagugcaucagugaagagaugcaagacuuuc

SEQ ID NO: 285128 - RNA, 32 nt, Human
aaagugcaugagccaccaugccuggccuguuu

SEQ ID NO: 285129 - RNA, 32 nt, Human
aaagugcauguauuuuccuuguaaacaccaug

SEQ ID NO: 285130 - RNA, 32 nt, Human
aaagugccaucuuuugaacaguguccccgggg

SEQ ID NO: 285131 - RNA, 32 nt, Human
aaagugccugccugugcucucucccucuccuc

SEQ ID NO: 285132 - RNA, 32 nt, Human
aaagugccuuagcccagguuccugggcuucug

SEQ ID NO: 285133 - RNA, 32 nt, Human
aaagugccuuaggauagcuugggaugagaugu

SEQ ID NO: 285134 - RNA, 32 nt, Human
aaagugcuagauuacaggcgugggccaugacc

SEQ ID NO: 285135 - RNA, 32 nt, Human
aaagugcucaagacaaucaaucaggucucgag

SEQ ID NO: 285136 - RNA, 32 nt, Human
aaagugcucacugcagcucagaucaguccuca

SEQ ID NO: 285137 - RNA, 22 nt, Human
aaagugcuggaauuacaggcgu

SEQ ID NO: 285138 - RNA, 32 nt, Human
aaagugcuggauuacaggcgugagccaccaca

SEQ ID NO: 285139 - RNA, 32 nt, Human
aaagugcuggauuacaggcgugagccaccgug

SEQ ID NO: 285140 - RNA, 32 nt, Human
aaagugcuggauuacaggcgugagccacugag

SEQ ID NO: 285141 - RNA, 21 nt, Human
aaagugcuggauuacagggau

SEQ ID NO: 285142 - RNA, 32 nt, Human
aaagugcuggauuacagggaugagccaccaua

SEQ ID NO: 285143 - RNA, 32 nt, Human
aaagugcuggauuacaggugugagccaccacg

SEQ ID NO: 285144 - RNA, 32 nt, Human
aaagugcuggauuacaggugugagccacccug

SEQ ID NO: 285145 - RNA, 32 nt, Human
aaagugcugggaucacaggugggagccacugu

SEQ ID NO: 285146 - RNA, 22 nt, Human
aaagugcugggauuacaggcau

SEQ ID NO: 285147 - RNA, 22 nt, Human
aaagugcugggauuacaggcgu

SEQ ID NO: 285148 - RNA, 32 nt, Human
aaagugcugggauuacaggugggagccacaac

SEQ ID NO: 285149 - RNA, 32 nt, Human
aaagugcugggauuacaggugggagccaccgc

SEQ ID NO: 285150 - RNA, 32 nt, Human
aaagugcugggauuacaggugggagccacuac

SEQ ID NO: 285151 - RNA, 22 nt, Human
aaagugcugggauuacaggugu

SEQ ID NO: 285152 - RNA, 21 nt, Human
aaagugcugggauuacuagca

SEQ ID NO: 285153 - RNA, 32 nt, Human
aaagugcugggauuacuuuacaggcgugagcc

SEQ ID NO: 285154 - RNA, 32 nt, Human
aaagugcugggauuaggugugagccaccgcac

SEQ ID NO: 285155 - RNA, 32 nt, Human
aaagugcugggauuccaggugggagccacugc

SEQ ID NO: 285156 - RNA, 32 nt, Human
aaagugcugggauugcaggugugaacugccac

SEQ ID NO: 285157 - RNA, 22 nt, Human
aaagugcuggguuuacaggcau

SEQ ID NO: 285158 - RNA, 32 nt, Human
aaagugcugucucuucaagucaucuuuugcag

SEQ ID NO: 285159 - RNA, 32 nt, Human
aaagugcuuguuuuaucauacuuccugccucu

SEQ ID NO: 285160 - RNA, 32 nt, Human
aaagugcuuucccagaauacaggauuuaauac

SEQ ID NO: 285161 - RNA, 32 nt, Human
aaagugcuuugacuucuugcuucagucaucag

SEQ ID NO: 285162 - RNA, 32 nt, Human
aaagugcuuuugcccuacuuguguucuaguuu

SEQ ID NO: 285163 - RNA, 32 nt, Human
aaaguggaaccagcugucccuccagcaaaaac

SEQ ID NO: 285164 - RNA, 32 nt, Human
aaaguggaacugcuuuuuacaguuaaagggcu

SEQ ID NO: 285165 - RNA, 32 nt, Human
aaaguggaagauguggccaagaugcauguuuu

SEQ ID NO: 285166 - RNA, 32 nt, Human
aaaguggaccaauagggcugagcucucugugg

SEQ ID NO: 285167 - RNA, 32 nt, Human
aaaguggagauuuggacacagaaagacacaaa

SEQ ID NO: 285168 - RNA, 32 nt, Human
aaaguggauccagugucagcuccagccuauuc

SEQ ID NO: 285169 - RNA, 32 nt, Human
aaaguggaugaucagcucacuaccacaucaaa

SEQ ID NO: 285170 - RNA, 32 nt, Human
aaaguggaugccugcugcaucuucccacagug

SEQ ID NO: 285171 - RNA, 21 nt, Human
aaaguggauggguucuggggu

SEQ ID NO: 285172 - RNA, 32 nt, Human
aaaguggcaaaagcuaaaaguaaggauuuauc

SEQ ID NO: 285173 - RNA, 32 nt, Human
aaaguggccauccugaaaccuaguguugcugu

SEQ ID NO: 285174 - RNA, 32 nt, Human
aaaguggcgaugauaguaccuaccucacucug

SEQ ID NO: 285175 - RNA, 32 nt, Human
aaaguggcgcaaccucugccucccaggucaaa

SEQ ID NO: 285176 - RNA, 32 nt, Human
aaaguggcuaugggcaggucucuccuucccua

SEQ ID NO: 285177 - RNA, 32 nt, Human
aaaguggcuugguuccccaucuccucgccagc

SEQ ID NO: 285178 - RNA, 32 nt, Human
aaagugggaaauaugagauaguauuuagaauu

SEQ ID NO: 285179 - RNA, 32 nt, Human
aaagugggagagauaggaggagggaaugacag

SEQ ID NO: 285180 - RNA, 32 nt, Human
aaagugggccucugcacaaggcugcuuggaug

SEQ ID NO: 285181 - RNA, 32 nt, Human
aaagugggccugggcagucaggcuccagggcc

SEQ ID NO: 285182 - RNA, 23 nt, Human
aaagugggcggaucaccugaggc

SEQ ID NO: 285183 - RNA, 23 nt, Human
aaagugggcggaucaccugaggu

SEQ ID NO: 285184 - RNA, 32 nt, Human
aaagugggggccggggaucugcaucuagccug

SEQ ID NO: 285185 - RNA, 32 nt, Human
aaagugggggcugcuaccucacuacuuugaug

SEQ ID NO: 285186 - RNA, 32 nt, Human
aaaguggggugagggcuucgccgcuaggaaca

SEQ ID NO: 285187 - RNA, 32 nt, Human
aaaguggguacuuggaagggcaaaaaucaucc

SEQ ID NO: 285188 - RNA, 32 nt, Human
aaagugggucagcgggcacagaauggcccaau

SEQ ID NO: 285189 - RNA, 23 nt, Human
aaaguggguggaucaccugaggu

SEQ ID NO: 285190 - RNA, 32 nt, Human
aaagugguccaugucugugcuggcuggaagag

SEQ ID NO: 285191 - RNA, 32 nt, Human
aaaguggucugcauuucuacuguaaaaugcaa

SEQ ID NO: 285192 - RNA, 32 nt, Human
aaaguggucuucuccagcuagcccuuaugaau

SEQ ID NO: 285193 - RNA, 32 nt, Human
aaaguggugaugucucgggaacccaccccacc

SEQ ID NO: 285194 - RNA, 32 nt, Human
aaagugguuagguuuggaaaagagaugaugau

SEQ ID NO: 285195 - RNA, 32 nt, Human
aaagugguucccugcccugccugcuccuggcc

SEQ ID NO: 285196 - RNA, 32 nt, Human
aaaguguagcagccuccugccugcuccaagaa

SEQ ID NO: 285197 - RNA, 32 nt, Human
aaaguguaucugcugcuccuagggccaugcuu

SEQ ID NO: 285198 - RNA, 32 nt, Human
aaagugucaccuaugacaagagcagugaaggu

SEQ ID NO: 285199 - RNA, 32 nt, Human
aaagugucauauucucagacuugugaggcggu

SEQ ID NO: 285200 - RNA, 22 nt, Human
aaagugucauguucagcaccaa

SEQ ID NO: 285201 - RNA, 32 nt, Human
aaagugucuaacuucauggcuauggccuuuug

SEQ ID NO: 285202 - RNA, 32 nt, Human
aaagugucugggauguucucuccucuguacug

SEQ ID NO: 285203 - RNA, 32 nt, Human
aaagugucuucccaucagucccugcacuggga

SEQ ID NO: 285204 - RNA, 32 nt, Human
aaagugugcagagggcucagcagagaacagua

SEQ ID NO: 285205 - RNA, 32 nt, Human
aaaguguggaauuggggugaggggagcaaggg

SEQ ID NO: 285206 - RNA, 32 nt, Human
aaaguguggacagaaggagcuacugaaggcaa

SEQ ID NO: 285207 - RNA, 32 nt, Human
aaaguguggccuuugggcucugccaucugggg

SEQ ID NO: 285208 - RNA, 32 nt, Human
aaagugugggauuauagugugagccaccgcgu

SEQ ID NO: 285209 - RNA, 32 nt, Human
aaaguguguacagggccgggugcaguggcuca

SEQ ID NO: 285210 - RNA, 32 nt, Human
aaagugugucuuuccagcucugauuuauucaa

SEQ ID NO: 285211 - RNA, 32 nt, Human
aaaguguguuuaauaaauuacuuccugcuggu

SEQ ID NO: 285212 - RNA, 32 nt, Human
aaaguguuaaagauuaggauugaagucacuga

SEQ ID NO: 285213 - RNA, 32 nt, Human
aaaguguuaccaguuuacaaaaauaagucuuu

SEQ ID NO: 285214 - RNA, 32 nt, Human
aaaguguuccagcauaguccuguggauaaccc

SEQ ID NO: 285215 - RNA, 32 nt, Human
aaaguguucugaggcacauagcagaggagcug

SEQ ID NO: 285216 - RNA, 32 nt, Human
aaaguguuggauuacaggugugagccaccaca

SEQ ID NO: 285217 - RNA, 32 nt, Human
aaaguguuuagcacagugucuuucauaaaaau

SEQ ID NO: 285218 - RNA, 32 nt, Human
aaaguguuugccaaagcucaggagagacacag

SEQ ID NO: 285219 - RNA, 32 nt, Human
aaaguuaaaaacaaacauaggaaaugugaaaa

SEQ ID NO: 285220 - RNA, 32 nt, Human
aaaguuaaacagcauucuucacugcaggacau

SEQ ID NO: 285221 - RNA, 32 nt, Human
aaaguuaaaugagaucauuacugugaacccug

SEQ ID NO: 285222 - RNA, 32 nt, Human
aaaguuaaccaccaccaucucucuccucuuca

SEQ ID NO: 285223 - RNA, 32 nt, Human
aaaguuaacuguuuggaaaaacauuucucuuu

SEQ ID NO: 285224 - RNA, 24 nt, Human
aaaguuaagacagauuuuugcuaa

SEQ ID NO: 285225 - RNA, 32 nt, Human
aaaguuaagagguucaccagggccaagccacg

SEQ ID NO: 285226 - RNA, 32 nt, Human
aaaguuaagcauuaaucagauauuucauuuuu

SEQ ID NO: 285227 - RNA, 32 nt, Human
aaaguuaaggaacuagggaaaagagauggaaa

SEQ ID NO: 285228 - RNA, 32 nt, Human
aaaguuaaggaagggggugaggauguggguug

SEQ ID NO: 285229 - RNA, 32 nt, Human
aaaguuaaguacuguaaguguucuuaaaaccu

SEQ ID NO: 285230 - RNA, 32 nt, Human
aaaguuacaaguguccaagccagaaccugaug

SEQ ID NO: 285231 - RNA, 32 nt, Human
aaaguuacacagaacuccuggcugaucucuuu

SEQ ID NO: 285232 - RNA, 32 nt, Human
aaaguuaccugacacacauauaaacacaagga

SEQ ID NO: 285233 - RNA, 32 nt, Human
aaaguuacgcuccuaugcaacaucugauuggu

SEQ ID NO: 285234 - RNA, 32 nt, Human
aaaguuagaagaaaggauugauucaagaaaga

SEQ ID NO: 285235 - RNA, 22 nt, Human
aaaguuagaagacauuugcuaa

SEQ ID NO: 285236 - RNA, 32 nt, Human
aaaguuagccuauauuuugccugagggaugug

SEQ ID NO: 285237 - RNA, 19 nt, Human
aaaguuauacuccugugua

SEQ ID NO: 285238 - RNA, 32 nt, Human
aaaguuaucucuucccaggagaggcuagaagu

SEQ ID NO: 285239 - RNA, 32 nt, Human
aaaguuaugaagcucaucacagcgaaccaggu

SEQ ID NO: 285240 - RNA, 32 nt, Human
aaaguuaugcuaacaugcuaacuuuccacaca

SEQ ID NO: 285241 - RNA, 32 nt, Human
aaaguuauggagcaugaaaagacugaagggcc

SEQ ID NO: 285242 - RNA, 32 nt, Human
aaaguuauggugcugaugguacucucugcugg

SEQ ID NO: 285243 - RNA, 32 nt, Human
aaaguuauucagaugguuuucccaggcuaaag

SEQ ID NO: 285244 - RNA, 32 nt, Human
aaaguuauuugcucacuauccccagccucaag

SEQ ID NO: 285245 - RNA, 32 nt, Human
aaaguucaauugagugguuacagucuagggca

SEQ ID NO: 285246 - RNA, 32 nt, Human
aaaguucagaggaggccugagaagaagguccu

SEQ ID NO: 285247 - RNA, 32 nt, Human
aaaguucagccuggauccccagccucugccaa

SEQ ID NO: 285248 - RNA, 32 nt, Human
aaaguucagcuaaccuuugacacugcuagugc

SEQ ID NO: 285249 - RNA, 32 nt, Human
aaaguucagcuuccuuccccaggucucugugc

SEQ ID NO: 285250 - RNA, 32 nt, Human
aaaguucauaucuggagccugaugucuuaacg

SEQ ID NO: 285251 - RNA, 32 nt, Human
aaaguucauuguuguaauuuccuggccuaauu

SEQ ID NO: 285252 - RNA, 32 nt, Human
aaaguuccaagaaacacaagcgacgcagguau

SEQ ID NO: 285253 - RNA, 32 nt, Human
aaaguuccaagugcaaaauuacaguguguuag

SEQ ID NO: 285254 - RNA, 32 nt, Human
aaaguucccagugcuuugaggcuucuucaaaa

SEQ ID NO: 285255 - RNA, 32 nt, Human
aaaguuccuugccuccugccccucucugcuuu

SEQ ID NO: 285256 - RNA, 32 nt, Human
aaaguucgguguugggaggagccccggugaca

SEQ ID NO: 285257 - RNA, 32 nt, Human
aaaguucucaacugcaaaguuugcuguccggc

SEQ ID NO: 285258 - RNA, 32 nt, Human
aaaguucucccuucccuuugcaggagccugaa

SEQ ID NO: 285259 - RNA, 32 nt, Human
aaaguucuccggcagcccugagaucucaagag

SEQ ID NO: 285260 - RNA, 32 nt, Human
aaaguucuccugggacaucuucugcucuucug

SEQ ID NO: 285261 - RNA, 32 nt, Human
aaaguucucuauccucccuccuggcuggaguu

SEQ ID NO: 285262 - RNA, 32 nt, Human
aaaguucugaagugccuugagaacaugugggu

SEQ ID NO: 285263 - RNA, 32 nt, Human
aaaguugaaagaauaaaucuagaaauaaaaau

SEQ ID NO: 285264 - RNA, 32 nt, Human
aaaguugaagauuauaaauaccucuggagagc

SEQ ID NO: 285265 - RNA, 32 nt, Human
aaaguugagaacugcuuucucuaccuuuugca

SEQ ID NO: 285266 - RNA, 31 nt, Human
aaaguugcacuuuucaagaugugagaaggua

SEQ ID NO: 285267 - RNA, 32 nt, Human
aaaguugccuucagaaggugggaagaucauug

SEQ ID NO: 285268 - RNA, 24 nt, Human
aaaguugccuucugaaagggcaca

SEQ ID NO: 285269 - RNA, 22 nt, Human
aaaguugcugcaaggcugcagg

SEQ ID NO: 285270 - RNA, 32 nt, Human
aaaguuggaaacacagaucugugcaguucuac

SEQ ID NO: 285271 - RNA, 32 nt, Human
aaaguuggauacugacagucucuaauaguuua

SEQ ID NO: 285272 - RNA, 32 nt, Human
aaaguuggccaagauaccaagaagguggcuug

SEQ ID NO: 285273 - RNA, 32 nt, Human
aaaguuggcgguuaucaccagacugugaguuu

SEQ ID NO: 285274 - RNA, 32 nt, Human
aaaguugggagcauggcagacagggaagggaa

SEQ ID NO: 285275 - RNA, 32 nt, Human
aaaguugguagaaacuuauuuuugcuuuguau

SEQ ID NO: 285276 - RNA, 32 nt, Human
aaaguugguccucuuuccccagacccuguggg

SEQ ID NO: 285277 - RNA, 32 nt, Human
aaaguugguguuuuugguugaugagaauuuac

SEQ ID NO: 285278 - RNA, 31 nt, Human
aaaguuguaacauacauacauuuaaaaugga

SEQ ID NO: 285279 - RNA, 32 nt, Human
aaaguugucaucucucuguaauagauaauggc

SEQ ID NO: 285280 - RNA, 32 nt, Human
aaaguugucuucuguccacgagcaccacaguc

SEQ ID NO: 285281 - RNA, 32 nt, Human
aaaguuguuaucuuuaaauacauguacaaauc

SEQ ID NO: 285282 - RNA, 32 nt, Human
aaaguuguugaauauaauccuuagugaagaca

SEQ ID NO: 285283 - RNA, 21 nt, Human
aaaguuuaaagauuuuugcua

SEQ ID NO: 285284 - RNA, 32 nt, Human
aaaguuuaaugaagaggcuagaggaggagaua

SEQ ID NO: 285285 - RNA, 32 nt, Human
aaaguuuacagaaccauaaacauucucaauuu

SEQ ID NO: 285286 - RNA, 32 nt, Human
aaaguuuacugauuccuggugaguauauuaaa

SEQ ID NO: 285287 - RNA, 32 nt, Human
aaaguuuaucuugggaguugaguugucaagag

SEQ ID NO: 285288 - RNA, 32 nt, Human
aaaguuucacauuuaguuagaagaacuuuaaa

SEQ ID NO: 285289 - RNA, 32 nt, Human
aaaguuucagcuuuuugcuucugugaugaacu

SEQ ID NO: 285290 - RNA, 32 nt, Human
aaaguuucauucacggauguuuguugaaugcu

SEQ ID NO: 285291 - RNA, 32 nt, Human
aaaguuuccagccugggccccucuugggccuu

SEQ ID NO: 285292 - RNA, 32 nt, Human
aaaguuucuugcuucuccuuuuuaauuucuaa

SEQ ID NO: 285293 - RNA, 32 nt, Human
aaaguuuggaauauuuguguuauacuuaccag

SEQ ID NO: 285294 - RNA, 32 nt, Human
aaaguuuggacaguauuuaaauauugcaaaua

SEQ ID NO: 285295 - RNA, 32 nt, Human
aaaguuuggaggagggaggcaggaggugaggu

SEQ ID NO: 285296 - RNA, 32 nt, Human
aaaguuugggcagagggaaccaggcacguuaa

SEQ ID NO: 285297 - RNA, 32 nt, Human
aaaguuugucauucaccucaguggagugacuu

SEQ ID NO: 285298 - RNA, 32 nt, Human
aaaguuuuccaaauucaugcauuucaguuauc

SEQ ID NO: 285299 - RNA, 32 nt, Human
aaaguuuuccaaguaauacuggagguccguca

SEQ ID NO: 285300 - RNA, 32 nt, Human
aaaguuuuccuuucaucuuugacuguaagaug

SEQ ID NO: 285301 - RNA, 32 nt, Human
aaaguuuucuuggcugggaaugguggcucaua

SEQ ID NO: 285302 - RNA, 32 nt, Human
aaaguuuuuagaauguugaaaaguaauugaaa

SEQ ID NO: 285303 - RNA, 32 nt, Human
aaauaaaaacaguaucucgcuucuggcucauu

SEQ ID NO: 285304 - RNA, 32 nt, Human
aaauaaaaacuaaauuguaaacuccugaaaaa

SEQ ID NO: 285305 - RNA, 32 nt, Human
aaauaaaaagacgaggaggagaagaaacuuug

SEQ ID NO: 285306 - RNA, 32 nt, Human
aaauaaaaagcccaucuucugauaacugcgug

SEQ ID NO: 285307 - RNA, 32 nt, Human
aaauaaaaaugacuucaccauuuucaccacac

SEQ ID NO: 285308 - RNA, 32 nt, Human
aaauaaaaauuagccaggcaugguggcacacg

SEQ ID NO: 285309 - RNA, 32 nt, Human
aaauaaaaauuagcugggcaauuggcgggcau

SEQ ID NO: 285310 - RNA, 32 nt, Human
aaauaaaaauuagcugggcaugguggcacgug

SEQ ID NO: 285311 - RNA, 20 nt, Human
aaauaaaacaaaacaaaaca

SEQ ID NO: 285312 - RNA, 32 nt, Human
aaauaaaacaacaacaaaaugcaucagagagc

SEQ ID NO: 285313 - RNA, 32 nt, Human
aaauaaaacaaggucauuguguuugcaauuga

SEQ ID NO: 285314 - RNA, 32 nt, Human
aaauaaaaccaaaaauagacaacuuuuucuuc

SEQ ID NO: 285315 - RNA, 28 nt, Human
aaauaaaacuauuuaaaauuggcaccau

SEQ ID NO: 285316 - RNA, 32 nt, Human
aaauaaaacuauuuaaaauuggcaccauaaaa

SEQ ID NO: 285317 - RNA, 32 nt, Human
aaauaaaaggauuguugggagguggagggaaa

SEQ ID NO: 285318 - RNA, 32 nt, Human
aaauaaaagguguccuugaauuacugaccacc

SEQ ID NO: 285319 - RNA, 32 nt, Human
aaauaaaagugcagaaaacaaacccaggcgau

SEQ ID NO: 285320 - RNA, 32 nt, Human
aaauaaaaguuuacccuguggcauuuucaaaa

SEQ ID NO: 285321 - RNA, 32 nt, Human
aaauaaaauaaaaauggcuuucccaguccuug

SEQ ID NO: 285322 - RNA, 32 nt, Human
aaauaaaauaaaauguuaaagcaaauucagga

SEQ ID NO: 285323 - RNA, 32 nt, Human
aaauaaaaugcacauaaauuuggaaggaggaa

SEQ ID NO: 285324 - RNA, 32 nt, Human
aaauaaaauguuuuucaggaaacuucguaucu

SEQ ID NO: 285325 - RNA, 32 nt, Human
aaauaaaauuccauuucauugugaccuacucc

SEQ ID NO: 285326 - RNA, 32 nt, Human
aaauaaacaaauacaaagagaaacccacguua

SEQ ID NO: 285327 - RNA, 32 nt, Human
aaauaaacacacacauuaaggagagauuaaac

SEQ ID NO: 285328 - RNA, 32 nt, Human
aaauaaaccuaaacaaugucugacucugaaag

SEQ ID NO: 285329 - RNA, 32 nt, Human
aaauaaaccugacuguaugaagucaauuuaag

SEQ ID NO: 285330 - RNA, 32 nt, Human
aaauaaaccuuaauauuucuucaaauaucucu

SEQ ID NO: 285331 - RNA, 32 nt, Human
aaauaaacugcaaaaaggauucccaggaaacc

SEQ ID NO: 285332 - RNA, 32 nt, Human
aaauaaagaaaagaggaggaggaggaggaaga

SEQ ID NO: 285333 - RNA, 32 nt, Human
aaauaaagaaggauuuggcucuaggaaggcuu

SEQ ID NO: 285334 - RNA, 32 nt, Human
aaauaaagacauucagcacacugugaaaaugu

SEQ ID NO: 285335 - RNA, 32 nt, Human
aaauaaagagcagacugcgauauaguccauuu

SEQ ID NO: 285336 - RNA, 22 nt, Human
aaauaaagcuauuagugucauu

SEQ ID NO: 285337 - RNA, 31 nt, Human
aaauaaaggaaaggaaccggcauuucuggau

SEQ ID NO: 285338 - RNA, 32 nt, Human
aaauaaaggaaaucaguauaucaaagagauau

SEQ ID NO: 285339 - RNA, 32 nt, Human
aaauaaaggauagggauaaaagaggcacccca

SEQ ID NO: 285340 - RNA, 32 nt, Human
aaauaaaggcaaaaucacgacucucgugcaau

SEQ ID NO: 285341 - RNA, 32 nt, Human
aaauaaauaaauaaauacauagccaggcgugg

SEQ ID NO: 285342 - RNA, 32 nt, Human
aaauaaauaacuuaugguaaucuggaauugua

SEQ ID NO: 285343 - RNA, 32 nt, Human
aaauaaauaauacaaaaauuagccgggcaugg

SEQ ID NO: 285344 - RNA, 32 nt, Human
aaauaaauaggcagagcuaaacuaaccccagu

SEQ ID NO: 285345 - RNA, 32 nt, Human
aaauaaaucaaacccaaagaaaguuuauucaa

SEQ ID NO: 285346 - RNA, 32 nt, Human
aaauaaaucacugccaggcuucauucuuccau

SEQ ID NO: 285347 - RNA, 32 nt, Human
aaauaaaugaguauucagcgaggcagauaaca

SEQ ID NO: 285348 - RNA, 32 nt, Human
aaauaaauguacaauuguuuacauaacagaaa

SEQ ID NO: 285349 - RNA, 32 nt, Human
aaauaaauguucuuaaggaaacaacuuaugua

SEQ ID NO: 285350 - RNA, 24 nt, Human
aaauaaauguucuuccucuuuuca

SEQ ID NO: 285351 - RNA, 32 nt, Human
aaauaaauuagccuggcgugguggugugccug

SEQ ID NO: 285352 - RNA, 28 nt, Human
aaauaaauucugauucuucuaaauuaaa

SEQ ID NO: 285353 - RNA, 32 nt, Human
aaauaaauugccucccuuccuccgcuccccuu

SEQ ID NO: 285354 - RNA, 25 nt, Human
aaauaacacacauauaaacaucaca

SEQ ID NO: 285355 - RNA, 32 nt, Human
aaauaacacagcagaggaauagcucagccuga

SEQ ID NO: 285356 - RNA, 32 nt, Human
aaauaacagaugcuggugagguuguggagaaa

SEQ ID NO: 285357 - RNA, 32 nt, Human
aaauaacagcagcagagggaggugggggagag

SEQ ID NO: 285358 - RNA, 32 nt, Human
aaauaacagcagcgucaaggauacaguggcca

SEQ ID NO: 285359 - RNA, 32 nt, Human
aaauaacaggaagauuccaaagacguuuacca

SEQ ID NO: 285360 - RNA, 32 nt, Human
aaauaacaggaguucguucagagaccauuucu

SEQ ID NO: 285361 - RNA, 32 nt, Human
aaauaacagugaaugugcuccugguguauaug

SEQ ID NO: 285362 - RNA, 32 nt, Human
aaauaacaugacgcucguccaaggccacuucc

SEQ ID NO: 285363 - RNA, 32 nt, Human
aaauaacaugaguuuccucuucccucuuugaa

SEQ ID NO: 285364 - RNA, 32 nt, Human
aaauaacauuucagaagagcacaauaugcaua

SEQ ID NO: 285365 - RNA, 32 nt, Human
aaauaacauuuggauuuagguuccuucacuga

SEQ ID NO: 285366 - RNA, 32 nt, Human
aaauaaccaacaaccucuuccaguuugaauuc

SEQ ID NO: 285367 - RNA, 32 nt, Human
aaauaaccaaucuacaaucucccuucacaagu

SEQ ID NO: 285368 - RNA, 32 nt, Human
aaauaaccaccccugaauucccagagaaaagu

SEQ ID NO: 285369 - RNA, 32 nt, Human
aaauaacccauucauagcauagcuagagauug

SEQ ID NO: 285370 - RNA, 32 nt, Human
aaauaaccggaggcaggcugggugcaguggcu

SEQ ID NO: 285371 - RNA, 32 nt, Human
aaauaacuccuccauugaaauaacuccucccc

SEQ ID NO: 285372 - RNA, 32 nt, Human
aaauaacugucugccaaaaugucauuacacag

SEQ ID NO: 285373 - RNA, 32 nt, Human
aaauaacuuauugaugaaauauacaaauauuu

SEQ ID NO: 285374 - RNA, 32 nt, Human
aaauaacuucuuuccauuccuguucauugaua

SEQ ID NO: 285375 - RNA, 32 nt, Human
aaauaacuugcuggcuauauaggaaaaugcug

SEQ ID NO: 285376 - RNA, 32 nt, Human
aaauaacuuggcagccugaggcucuggagugc

SEQ ID NO: 285377 - RNA, 32 nt, Human
aaauaagaaaugcucagucaauaguggcucuc

SEQ ID NO: 285378 - RNA, 32 nt, Human
aaauaagaacacuugggcugggcaugguggcu

SEQ ID NO: 285379 - RNA, 32 nt, Human
aaauaagaaccagcucaaguacaugguuucau

SEQ ID NO: 285380 - RNA, 32 nt, Human
aaauaagaaggagaauaaaacuuagagaaaaa

SEQ ID NO: 285381 - RNA, 21 nt, Human
aaauaagaauauacaugcaca

SEQ ID NO: 285382 - RNA, 32 nt, Human
aaauaagaccuaauauuugauagcacaacagu

SEQ ID NO: 285383 - RNA, 32 nt, Human
aaauaagaccuaguauuugauagcacaaccgg

SEQ ID NO: 285384 - RNA, 32 nt, Human
aaauaagagacacaucgcuccaaaacauuuuu

SEQ ID NO: 285385 - RNA, 31 nt, Human
aaauaagagacuagagauucacuggacgcuu

SEQ ID NO: 285386 - RNA, 32 nt, Human
aaauaagagcuuuuucauuucauuccaucuuu

SEQ ID NO: 285387 - RNA, 32 nt, Human
aaauaagaugacgcuacuccucauagcaccac

SEQ ID NO: 285388 - RNA, 32 nt, Human
aaauaagcaacuugaaagugccuggaaaauug

SEQ ID NO: 285389 - RNA, 32 nt, Human
aaauaagcacugaggaagauucagagacgugu

SEQ ID NO: 285390 - RNA, 32 nt, Human
aaauaagcacugggagauuggaagcacugcua

SEQ ID NO: 285391 - RNA, 32 nt, Human
aaauaagccaggagaggaaggagcggcgggca

SEQ ID NO: 285392 - RNA, 32 nt, Human
aaauaagccugaugaacagaccugccauaaca

SEQ ID NO: 285393 - RNA, 32 nt, Human
aaauaagcugacuguucucucuugagaaccug

SEQ ID NO: 285394 - RNA, 32 nt, Human
aaauaaggagaaaggaaacgcagggagacugu

SEQ ID NO: 285395 - RNA, 32 nt, Human
aaauaaggagccagaggaguuaccuguguccu

SEQ ID NO: 285396 - RNA, 32 nt, Human
aaauaaggagggacaugauggggaaggaguac

SEQ ID NO: 285397 - RNA, 32 nt, Human
aaauaaggaguaaaaaugcauuaccauuuguu

SEQ ID NO: 285398 - RNA, 32 nt, Human
aaauaaggcaucuucuugcugugccuucacuu

SEQ ID NO: 285399 - RNA, 32 nt, Human
aaauaaggccuuguucauggguacugggguua

SEQ ID NO: 285400 - RNA, 32 nt, Human
aaauaaggcuguccccuacaaccuucuuaguc

SEQ ID NO: 285401 - RNA, 32 nt, Human
aaauaagggacugauguucuguuucuuguaau

SEQ ID NO: 285402 - RNA, 32 nt, Human
aaauaagggcaccaacacuccccagccuugcu

SEQ ID NO: 285403 - RNA, 32 nt, Human
aaauaagggcugguauuucuccucuguccuug

SEQ ID NO: 285404 - RNA, 32 nt, Human
aaauaaguaccucaaaugcaugcauuugcacu

SEQ ID NO: 285405 - RNA, 32 nt, Human
aaauaaguagaaaauauaaauuucaucacuaa

SEQ ID NO: 285406 - RNA, 32 nt, Human
aaauaagucaucugaugagaacaagcuauuug

SEQ ID NO: 285407 - RNA, 32 nt, Human
aaauaagucucacauccagccauuccccugag

SEQ ID NO: 285408 - RNA, 22 nt, Human
aaauaagucucauuucuuuuca

SEQ ID NO: 285409 - RNA, 22 nt, Human
aaauaagugaaacuucuuuuua

SEQ ID NO: 285410 - RNA, 32 nt, Human
aaauaagugauuaaaggccucugccucacaac

SEQ ID NO: 285411 - RNA, 32 nt, Human
aaauaagugcaaggaagcagucucuuugguca

SEQ ID NO: 285412 - RNA, 32 nt, Human
aaauaagugcauuccagaagagccgcagcccc

SEQ ID NO: 285413 - RNA, 32 nt, Human
aaauaaguguagacugcugucaaggaggcuuc

SEQ ID NO: 285414 - RNA, 32 nt, Human
aaauaaguuacaccuuaguaucagauauuaau

SEQ ID NO: 285415 - RNA, 32 nt, Human
aaauaaguuucgaacucuggcaccuuucaauu

SEQ ID NO: 285416 - RNA, 32 nt, Human
aaauaauaaaacacaaagagccaggcuuugag

SEQ ID NO: 285417 - RNA, 32 nt, Human
aaauaauaaagugacugaaucagggaggaaaa

SEQ ID NO: 285418 - RNA, 32 nt, Human
aaauaauaacaggcugggugcaauggcucaca

SEQ ID NO: 285419 - RNA, 32 nt, Human
aaauaauaagccaucuaaguguaaaaguggcu

SEQ ID NO: 285420 - RNA, 32 nt, Human
aaauaauagggagguuggggaaguggguuggg

SEQ ID NO: 285421 - RNA, 32 nt, Human
aaauaauaguacacuucugaauuuuuauauaa

SEQ ID NO: 285422 - RNA, 32 nt, Human
aaauaauagugcccuucccauggggucaugug

SEQ ID NO: 285423 - RNA, 32 nt, Human
aaauaaucaucuuuagcucuccucucaguuga

SEQ ID NO: 285424 - RNA, 32 nt, Human
aaauaauccaagacuucucacuggggaauaag

SEQ ID NO: 285425 - RNA, 32 nt, Human
aaauaauccaauggacagaagccccaggaagg

SEQ ID NO: 285426 - RNA, 32 nt, Human
aaauaaucuccccguccaaggagcuuguggaa

SEQ ID NO: 285427 - RNA, 32 nt, Human
aaauaaucugcacuuccagagcucggggccuu

SEQ ID NO: 285428 - RNA, 32 nt, Human
aaauaaucuguagaaucaauugaaguuuaaag

SEQ ID NO: 285429 - RNA, 32 nt, Human
aaauaaucuguguaacaaacccccaugacaca

SEQ ID NO: 285430 - RNA, 32 nt, Human
aaauaaugaaauccaccccugccugcuagaua

SEQ ID NO: 285431 - RNA, 32 nt, Human
aaauaaugaacaaaugaaaguguucauccaga

SEQ ID NO: 285432 - RNA, 32 nt, Human
aaauaaugaacuguuuuccuggcaucuuucaa

SEQ ID NO: 285433 - RNA, 32 nt, Human
aaauaaugaagcagcaugaggggaagguauuu

SEQ ID NO: 285434 - RNA, 32 nt, Human
aaauaaugaauuugaacaccagguuggguuaa

SEQ ID NO: 285435 - RNA, 32 nt, Human
aaauaaugacaccccacugucuccuugcccuc

SEQ ID NO: 285436 - RNA, 32 nt, Human
aaauaaugacaugcucaaccuuccucaucaug

SEQ ID NO: 285437 - RNA, 32 nt, Human
aaauaaugcuuaucacuggcuugcugucaaua

SEQ ID NO: 285438 - RNA, 32 nt, Human
aaauaaugugucacagugcaugguggcccccg

SEQ ID NO: 285439 - RNA, 32 nt, Human
aaauaaugugucacagugcaugguggccucug

SEQ ID NO: 285440 - RNA, 32 nt, Human
aaauaauuauggaacagcucucuggccagcuu

SEQ ID NO: 285441 - RNA, 32 nt, Human
aaauaauuccaacucuuacacacacauuuaau

SEQ ID NO: 285442 - RNA, 32 nt, Human
aaauaauuguucugcugaucuguagugguugc

SEQ ID NO: 285443 - RNA, 32 nt, Human
aaauaauuuauuuuacaaaugagauuauauuu

SEQ ID NO: 285444 - RNA, 32 nt, Human
aaauaauuugcuucuagaccagccucugucua

SEQ ID NO: 285445 - RNA, 32 nt, Human
aaauaauuuuacgaagaaaaacucagcuucug

SEQ ID NO: 285446 - RNA, 32 nt, Human
aaauaauuuuacucaacuauguuuucaacaag

SEQ ID NO: 285447 - RNA, 32 nt, Human
aaauacaaaaauuggcugggcgcgguggugca

SEQ ID NO: 285448 - RNA, 32 nt, Human
aaauacaaaacaauuagcugggugugguggca

SEQ ID NO: 285449 - RNA, 32 nt, Human
aaauacaaaauaaagaucacacaucaagacua

SEQ ID NO: 285450 - RNA, 32 nt, Human
aaauacaaacacaacauggaagugggugugaa

SEQ ID NO: 285451 - RNA, 32 nt, Human
aaauacaaagagaacuuauuuacacagggaag

SEQ ID NO: 285452 - RNA, 32 nt, Human
aaauacaaauccucaggccccaccucagaccu

SEQ ID NO: 285453 - RNA, 32 nt, Human
aaauacaaauguuaauaugugagaaccuagga

SEQ ID NO: 285454 - RNA, 32 nt, Human
aaauacaacgacuucaucgaggccaacugcau

SEQ ID NO: 285455 - RNA, 32 nt, Human
aaauacaagaagcagcugaggaaagggagaca

SEQ ID NO: 285456 - RNA, 32 nt, Human
aaauacaagcuauguuaggaccaaaugcucuu

SEQ ID NO: 285457 - RNA, 32 nt, Human
aaauacaaugacuucaucgaggccaacugcau

SEQ ID NO: 285458 - RNA, 32 nt, Human
aaauacacaaaugaaaaugacaaauuugcuuc

SEQ ID NO: 285459 - RNA, 32 nt, Human
aaauacacaaauuagcuaggcaugguggacuc

SEQ ID NO: 285460 - RNA, 32 nt, Human
aaauacacaauacccauaaugugcacagaaau

SEQ ID NO: 285461 - RNA, 32 nt, Human
aaauacacagcaaugaauggcacacaaguaau

SEQ ID NO: 285462 - RNA, 32 nt, Human
aaauacacagcaugcagacugggaguugcuag

SEQ ID NO: 285463 - RNA, 32 nt, Human
aaauacacaugaaagccagccucggcgggcag

SEQ ID NO: 285464 - RNA, 32 nt, Human
aaauacacgcggguaaacgcugggugacuccg

SEQ ID NO: 285465 - RNA, 32 nt, Human
aaauacacuguggugaaaugcuuccaccucuu

SEQ ID NO: 285466 - RNA, 32 nt, Human
aaauacagagaaggacaagaagcccucaugca

SEQ ID NO: 285467 - RNA, 32 nt, Human
aaauacagagagaaccucuuccacuuuuacuu

SEQ ID NO: 285468 - RNA, 21 nt, Human
aaauacagagugugugucauu

SEQ ID NO: 285469 - RNA, 32 nt, Human
aaauacagauuuggaagaaaugagcugaguag

SEQ ID NO: 285470 - RNA, 32 nt, Human
aaauacagcagaaaaucuacucuuuagcaaua

SEQ ID NO: 285471 - RNA, 32 nt, Human
aaauacagccugucacugugugacacagauug

SEQ ID NO: 285472 - RNA, 32 nt, Human
aaauacagccuuucuggcagguccuccccucu

SEQ ID NO: 285473 - RNA, 32 nt, Human
aaauacaggaaacaguugcauguaguaacacu

SEQ ID NO: 285474 - RNA, 32 nt, Human
aaauacaggagagacacucaagacagaaauaa

SEQ ID NO: 285475 - RNA, 32 nt, Human
aaauacaggcaugauuucuuugccaaguuaau

SEQ ID NO: 285476 - RNA, 32 nt, Human
aaauacaguaacacuaaugauagcuguugaac

SEQ ID NO: 285477 - RNA, 32 nt, Human
aaauacaguagagacagaaacgaagcccagaa

SEQ ID NO: 285478 - RNA, 32 nt, Human
aaauacaguauuuucauuuaaauucucugaug

SEQ ID NO: 285479 - RNA, 32 nt, Human
aaauacaguucugcucugguuguuucuguucc

SEQ ID NO: 285480 - RNA, 32 nt, Human
aaauacaguugcaaucugcaaucugcuguuga

SEQ ID NO: 285481 - RNA, 32 nt, Human
aaauacaguuuuauuucaugaagagaaaugaa

SEQ ID NO: 285482 - RNA, 32 nt, Human
aaauacauacugauaauacauaccucaugaaa

SEQ ID NO: 285483 - RNA, 32 nt, Human
aaauacauccauuccaaaugggagaaauuggc

SEQ ID NO: 285484 - RNA, 32 nt, Human
aaauacaucggagacacaacaaauguggccau

SEQ ID NO: 285485 - RNA, 25 nt, Human
aaauacaugaagcaaaaacugaaag

SEQ ID NO: 285486 - RNA, 32 nt, Human
aaauacauguauaauuguuuacauacuuaaaa

SEQ ID NO: 285487 - RNA, 32 nt, Human
aaauacauguguacagaugagaaacugcaaca

SEQ ID NO: 285488 - RNA, 32 nt, Human
aaauacauucuuccugggguccagagucccca

SEQ ID NO: 285489 - RNA, 32 nt, Human
aaauacauuuccuggguaacuuaggaaauuaa

SEQ ID NO: 285490 - RNA, 32 nt, Human
aaauacauuugaucagacuaggaacaaguuga

SEQ ID NO: 285491 - RNA, 32 nt, Human
aaauacauuuuuccagguugugagugaaaaua

SEQ ID NO: 285492 - RNA, 32 nt, Human
aaauaccaaaaauuucaggcauagcugcugga

SEQ ID NO: 285493 - RNA, 32 nt, Human
aaauaccaaagcaaugaagugcauuggucuua

SEQ ID NO: 285494 - RNA, 32 nt, Human
aaauaccacauggcuucucccgcauaucguca

SEQ ID NO: 285495 - RNA, 32 nt, Human
aaauaccacguucuauuugugcaugggagcua

SEQ ID NO: 285496 - RNA, 32 nt, Human
aaauaccagaaacauacccuaaguccccagaa

SEQ ID NO: 285497 - RNA, 32 nt, Human
aaauaccaggagcagaggugccccagagugcu

SEQ ID NO: 285498 - RNA, 32 nt, Human
aaauaccaguuuuccaaguaaggaguugaugu

SEQ ID NO: 285499 - RNA, 32 nt, Human
aaauaccaucauccucaucauucucuguagcc

SEQ ID NO: 285500 - RNA, 32 nt, Human
aaauaccauguucauuccucuggcucaguuug

SEQ ID NO: 285501 - RNA, 32 nt, Human
aaauaccauuucaggaaugaaaaagaaggaau

SEQ ID NO: 285502 - RNA, 32 nt, Human
aaauaccccacacauuccccagccucucugcc

SEQ ID NO: 285503 - RNA, 32 nt, Human
aaauaccccaggaagguggccuuuguuucaga

SEQ ID NO: 285504 - RNA, 32 nt, Human
aaauacccccucaugccacccaccccagacag

SEQ ID NO: 285505 - RNA, 32 nt, Human
aaauacccuaaccuuuaacugucuugaauuau

SEQ ID NO: 285506 - RNA, 32 nt, Human
aaauacccuuaaggagguucaagcagagugag

SEQ ID NO: 285507 - RNA, 32 nt, Human
aaauacccuuccaccuggaggcucccuugucu

SEQ ID NO: 285508 - RNA, 32 nt, Human
aaauacccuuuauuuucccuuaacuauugaau

SEQ ID NO: 285509 - RNA, 32 nt, Human
aaauaccguguguauauguauguauguguguu

SEQ ID NO: 285510 - RNA, 32 nt, Human
aaauaccucacagauuagaugaaaagaugguu

SEQ ID NO: 285511 - RNA, 32 nt, Human
aaauaccuguaaucccagcacuuugggaggcc

SEQ ID NO: 285512 - RNA, 32 nt, Human
aaauaccuguaccauucccacuugcucuuuga

SEQ ID NO: 285513 - RNA, 32 nt, Human
aaauaccugugugacacagacccacuucagug

SEQ ID NO: 285514 - RNA, 32 nt, Human
aaauaccuuaagaguggauuacaggcaugagc

SEQ ID NO: 285515 - RNA, 32 nt, Human
aaauacgagguuuggccgggugcaguggcuca

SEQ ID NO: 285516 - RNA, 32 nt, Human
aaauacgauuccucaggccgggcacaguggcu

SEQ ID NO: 285517 - RNA, 32 nt, Human
aaauacgccuucuuugcugugugggcuuccag

SEQ ID NO: 285518 - RNA, 32 nt, Human
aaauacgggacccggucucugccuccuggcug

SEQ ID NO: 285519 - RNA, 32 nt, Human
aaauacguacccuuugaaauaccaccuagagg

SEQ ID NO: 285520 - RNA, 32 nt, Human
aaauacguuuuuggcugcgggugcaaagggga

SEQ ID NO: 285521 - RNA, 32 nt, Human
aaauacuaauuauuucuuuguaguguguaaag

SEQ ID NO: 285522 - RNA, 32 nt, Human
aaauacucaaauauauguuuucauuauauaca

SEQ ID NO: 285523 - RNA, 32 nt, Human
aaauacucaccaggacgaggaagaggacuuug

SEQ ID NO: 285524 - RNA, 32 nt, Human
aaauacucauuucuacuuucugcccucaaauu

SEQ ID NO: 285525 - RNA, 32 nt, Human
aaauacucucucuaccuaauaauaacaucaac

SEQ ID NO: 285526 - RNA, 32 nt, Human
aaauacugaaugaggccgggugcaauggcuua

SEQ ID NO: 285527 - RNA, 32 nt, Human
aaauacugagauuacaggugugagccaccaca

SEQ ID NO: 285528 - RNA, 32 nt, Human
aaauacugagccaguccaugugcauuauuuca

SEQ ID NO: 285529 - RNA, 32 nt, Human
aaauacugagucuccacaaccuucuuuggaaa

SEQ ID NO: 285530 - RNA, 32 nt, Human
aaauacugauauuuuaaaugguugacaucauc

SEQ ID NO: 285531 - RNA, 32 nt, Human
aaauacugcaacauguccaguuggccagauca

SEQ ID NO: 285532 - RNA, 32 nt, Human
aaauacugcuggauaaauacugcuggauuuau

SEQ ID NO: 285533 - RNA, 32 nt, Human
aaauacuggccuggccugugccgccccugccc

SEQ ID NO: 285534 - RNA, 32 nt, Human
aaauacugggaguuugcaguuuaucuggaaga

SEQ ID NO: 285535 - RNA, 32 nt, Human
aaauacugggauuacaggcuugagccuccaug

SEQ ID NO: 285536 - RNA, 32 nt, Human
aaauacugggauuacaggggugagucaccaca

SEQ ID NO: 285537 - RNA, 32 nt, Human
aaauacuggggucaucgggaaaggcaaagaaa

SEQ ID NO: 285538 - RNA, 32 nt, Human
aaauacuucagaucacaugaaaaugcugauuu

SEQ ID NO: 285539 - RNA, 32 nt, Human
aaauacuucauuccuuaacucucccucauuug

SEQ ID NO: 285540 - RNA, 31 nt, Human
aaauacuucuuauuuauacauuuaggaaagc

SEQ ID NO: 285541 - RNA, 32 nt, Human
aaauacuugcaaagcauggcacuguggcucug

SEQ ID NO: 285542 - RNA, 32 nt, Human
aaauacuuucacucccuucacuuuacagcaag

SEQ ID NO: 285543 - RNA, 32 nt, Human
aaauacuuuguagcgccagaagccaggagcgg

SEQ ID NO: 285544 - RNA, 32 nt, Human
aaauacuuuuauuuugaauuuaagucuuugca

SEQ ID NO: 285545 - RNA, 32 nt, Human
aaauacuuuucaucaccaauugcccaauucau

SEQ ID NO: 285546 - RNA, 32 nt, Human
aaauagaaaauguaauaacuuucuuaccauua

SEQ ID NO: 285547 - RNA, 32 nt, Human
aaauagaaaaugugaagagugacuauuuacau

SEQ ID NO: 285548 - RNA, 32 nt, Human
aaauagaacuggcggaagcacaagcacaccgu

SEQ ID NO: 285549 - RNA, 32 nt, Human
aaauagacaaagugcuuggagagcauugagaa

SEQ ID NO: 285550 - RNA, 32 nt, Human
aaauagacaucuugccuccucaaguagcuuca

SEQ ID NO: 285551 - RNA, 32 nt, Human
aaauagacggcuagggacugggcacaguggcu

SEQ ID NO: 285552 - RNA, 32 nt, Human
aaauagacucuuccucccuccucuuucacaua

SEQ ID NO: 285553 - RNA, 32 nt, Human
aaauagagaagagcaagagcaacaacaggcac

SEQ ID NO: 285554 - RNA, 32 nt, Human
aaauagagacgggguuucacuguguuggccag

SEQ ID NO: 285555 - RNA, 32 nt, Human
aaauagagauggggucucaccauguuacccag

SEQ ID NO: 285556 - RNA, 32 nt, Human
aaauagagaugggguuucacuauguugccuag

SEQ ID NO: 285557 - RNA, 32 nt, Human
aaauagagcccugggggcagagcuccuggcca

SEQ ID NO: 285558 - RNA, 32 nt, Human
aaauagaggaagaguaagcaaagcaugucaag

SEQ ID NO: 285559 - RNA, 32 nt, Human
aaauagaggagagaaagagagcaugagaggga

SEQ ID NO: 285560 - RNA, 30 nt, Human
aaauagaggcucuccuugcuccuggccuug

SEQ ID NO: 285561 - RNA, 32 nt, Human
aaauagaguauuagucuuuaugucaucauugu

SEQ ID NO: 285562 - RNA, 32 nt, Human
aaauagagucucaacucacucuagccugggug

SEQ ID NO: 285563 - RNA, 32 nt, Human
aaauagauaaaacagaccagaggcucuccuua

SEQ ID NO: 285564 - RNA, 32 nt, Human
aaauagauacaagccuaggagccccagccccc

SEQ ID NO: 285565 - RNA, 32 nt, Human
aaauagauuccaggagcuccaucuauaagcau

SEQ ID NO: 285566 - RNA, 32 nt, Human
aaauagcaaugccucccuaucccucacacauc

SEQ ID NO: 285567 - RNA, 32 nt, Human
aaauagcaauuucgccguugaagaggaagggc

SEQ ID NO: 285568 - RNA, 32 nt, Human
aaauagcacaugggcaauuggcaccaucuuua

SEQ ID NO: 285569 - RNA, 32 nt, Human
aaauagcaccucaagugggguuuaguuuuauu

SEQ ID NO: 285570 - RNA, 32 nt, Human
aaauagcagcaacccaucuuugcaaagaagcu

SEQ ID NO: 285571 - RNA, 32 nt, Human
aaauagcagcagcagaagaaagggacaauggc

SEQ ID NO: 285572 - RNA, 22 nt, Human
aaauagcagcuuuugugucauu

SEQ ID NO: 285573 - RNA, 32 nt, Human
aaauagcaggguggguugggcagcacgugggg

SEQ ID NO: 285574 - RNA, 32 nt, Human
aaauagcagguguuagacgaaagaacagaugu

SEQ ID NO: 285575 - RNA, 32 nt, Human
aaauagcagucauuauucuguccccuucuccc

SEQ ID NO: 285576 - RNA, 32 nt, Human
aaauagcaguuucugcaauucuguugaauaug

SEQ ID NO: 285577 - RNA, 32 nt, Human
aaauagcauaagagcauuuuggaacacaucca

SEQ ID NO: 285578 - RNA, 32 nt, Human
aaauagcauagaaaucacagugugcaaauauc

SEQ ID NO: 285579 - RNA, 32 nt, Human
aaauagcauuauucaagacacagaaagaaagc

SEQ ID NO: 285580 - RNA, 32 nt, Human
aaauagccacauuuaacuccagccuuggguuu

SEQ ID NO: 285581 - RNA, 32 nt, Human
aaauagcccuaauuuacuuauucuuuaaugau

SEQ ID NO: 285582 - RNA, 32 nt, Human
aaauagccuagucuggggagucuuccauaaag

SEQ ID NO: 285583 - RNA, 32 nt, Human
aaauagccucuauuuuguuaagcuacugcugu

SEQ ID NO: 285584 - RNA, 32 nt, Human
aaauagccuggggugucugggcucaggguugg

SEQ ID NO: 285585 - RNA, 32 nt, Human
aaauagccuuucuccugcaaauuuuccuaguc

SEQ ID NO: 285586 - RNA, 32 nt, Human
aaauagcuauugcacuccagccuuggcaacau

SEQ ID NO: 285587 - RNA, 32 nt, Human
aaauagcucagauuugaacagauggauggaaa

SEQ ID NO: 285588 - RNA, 32 nt, Human
aaauagcucucauagucugcuccaucuugaua

SEQ ID NO: 285589 - RNA, 20 nt, Human
aaauagcucugugugucauu

SEQ ID NO: 285590 - RNA, 32 nt, Human
aaauagcugaggggcggccgggccagaacggc

SEQ ID NO: 285591 - RNA, 32 nt, Human
aaauagcuguuuaggaaggugaaauacauuca

SEQ ID NO: 285592 - RNA, 32 nt, Human
aaauagcuuccaggagcuccagcuauaagcuu

SEQ ID NO: 285593 - RNA, 32 nt, Human
aaauagcuucuugucaccuuaaacuaaagcag

SEQ ID NO: 285594 - RNA, 32 nt, Human
aaauaggaagacagaaugucuugucaaggguc

SEQ ID NO: 285595 - RNA, 19 nt, Human
aaauaggaagcugugucau

SEQ ID NO: 285596 - RNA, 32 nt, Human
aaauaggacugaccaagaagcagaaaagcaag

SEQ ID NO: 285597 - RNA, 32 nt, Human
aaauaggagcugcaaaagcaaaaagaauaucu

SEQ ID NO: 285598 - RNA, 32 nt, Human
aaauaggauaagacaaugccagaggaaggaua

SEQ ID NO: 285599 - RNA, 32 nt, Human
aaauaggauaggcuucccuugugcagagggag

SEQ ID NO: 285600 - RNA, 32 nt, Human
aaauaggaugaaacucaaucuuuuucuauugu

SEQ ID NO: 285601 - RNA, 32 nt, Human
aaauaggaugauguuugugagcaccagacuca

SEQ ID NO: 285602 - RNA, 32 nt, Human
aaauaggcagaagucccuugagccacagcaug

SEQ ID NO: 285603 - RNA, 32 nt, Human
aaauaggcaugaugauaagcuaugcagauuau

SEQ ID NO: 285604 - RNA, 32 nt, Human
aaauaggcccacaggccaggugcagacguuua

SEQ ID NO: 285605 - RNA, 32 nt, Human
aaauaggcuauauuucacaauagcccuguuaa

SEQ ID NO: 285606 - RNA, 32 nt, Human
aaauagggaagauggagacaccucuggggguc

SEQ ID NO: 285607 - RNA, 32 nt, Human
aaauagggcugugccaaaggcaagugacaacc

SEQ ID NO: 285608 - RNA, 32 nt, Human
aaauagggcuuuuaaauaaauagauguucugu

SEQ ID NO: 285609 - RNA, 32 nt, Human
aaauaggggcgggcgaagcaucagggcgaauc

SEQ ID NO: 285610 - RNA, 32 nt, Human
aaauaggggugauggagggggagaagcccagg

SEQ ID NO: 285611 - RNA, 19 nt, Human
aaauagggucuuugcagau

SEQ ID NO: 285612 - RNA, 32 nt, Human
aaauagggugggcuccuuuccucagguagagu

SEQ ID NO: 285613 - RNA, 22 nt, Human
aaauaggguuaugugugucauu

SEQ ID NO: 285614 - RNA, 32 nt, Human
aaauagguacgguuuuaaaauauuuuauauag

SEQ ID NO: 285615 - RNA, 32 nt, Human
aaauagguagcucuugggcucauguccugggu

SEQ ID NO: 285616 - RNA, 16 nt, Human
aaauagguggcagcuu

SEQ ID NO: 285617 - RNA, 32 nt, Human
aaauaguaauaauacaaaaauuagcugggcgu

SEQ ID NO: 285618 - RNA, 32 nt, Human
aaauaguacuuuuagcauaagcacuuucugug

SEQ ID NO: 285619 - RNA, 32 nt, Human
aaauaguagaggaggggagagaggcaccuggc

SEQ ID NO: 285620 - RNA, 32 nt, Human
aaauaguccugccugagguugcagugagccga

SEQ ID NO: 285621 - RNA, 32 nt, Human
aaauagugaaggaggccaaggugggcggauca

SEQ ID NO: 285622 - RNA, 32 nt, Human
aaauagugacaacuucucaacuguagaauaga

SEQ ID NO: 285623 - RNA, 32 nt, Human
aaauaguggaacaaaauugaaggguggucagu

SEQ ID NO: 285624 - RNA, 32 nt, Human
aaauagugucauucccauuugagagacagaca

SEQ ID NO: 285625 - RNA, 22 nt, Human
aaauaguuauaugugugucauu

SEQ ID NO: 285626 - RNA, 32 nt, Human
aaauaguucacguuuggagaauucuuuuguac

SEQ ID NO: 285627 - RNA, 32 nt, Human
aaauaguucccaggaagccacauucagacugc

SEQ ID NO: 285628 - RNA, 32 nt, Human
aaauaguucuuuaaaaauauuucucuacuuuu

SEQ ID NO: 285629 - RNA, 32 nt, Human
aaauaguugaaggcaacugagaaaaggugaag

SEQ ID NO: 285630 - RNA, 32 nt, Human
aaauaguugguugaagaagaugaggcacuugu

SEQ ID NO: 285631 - RNA, 32 nt, Human
aaauauaaacaugccauaguuaacaaaugaua

SEQ ID NO: 285632 - RNA, 32 nt, Human
aaauauaaagaaaugugacaaagcuuuuuaag

SEQ ID NO: 285633 - RNA, 32 nt, Human
aaauauaaagagaggcauccucuggaguaccu

SEQ ID NO: 285634 - RNA, 32 nt, Human
aaauauaacaucacuauuuggcuuuuguuuug

SEQ ID NO: 285635 - RNA, 21 nt, Human
aaauauaagagcaccauuggc

SEQ ID NO: 285636 - RNA, 32 nt, Human
aaauauaagccaaggguaauuucagcggaugc

SEQ ID NO: 285637 - RNA, 32 nt, Human
aaauauaagccuuuuauacugauuauucuuuu

SEQ ID NO: 285638 - RNA, 31 nt, Human
aaauauaauggcuagaauacaaagcuaauac

SEQ ID NO: 285639 - RNA, 32 nt, Human
aaauauacaaauuuagucacaagacacuuuac

SEQ ID NO: 285640 - RNA, 32 nt, Human
aaauauacaguaucugcuauuauaggaaacau

SEQ ID NO: 285641 - RNA, 32 nt, Human
aaauauacauauauuuguuuuuccauuguaug

SEQ ID NO: 285642 - RNA, 32 nt, Human
aaauauacauucuuuucucaucauguuggaca

SEQ ID NO: 285643 - RNA, 32 nt, Human
aaauauaccugacagagcagagguuauaacuu

SEQ ID NO: 285644 - RNA, 32 nt, Human
aaauauacucuuuugucuuucucuuuauuccc

SEQ ID NO: 285645 - RNA, 32 nt, Human
aaauauacugauuuugaaaaguaucaggaaua

SEQ ID NO: 285646 - RNA, 32 nt, Human
aaauauacugcagcaugcuauaugaggcuccu

SEQ ID NO: 285647 - RNA, 32 nt, Human
aaauauagaagcccucuuuaccaaaaucauca

SEQ ID NO: 285648 - RNA, 32 nt, Human
aaauauagaggcagugacaacacacacucggc

SEQ ID NO: 285649 - RNA, 32 nt, Human
aaauauagauucuaaauaaauaggggcuuaua

SEQ ID NO: 285650 - RNA, 32 nt, Human
aaauauagcucucauggucugcuccaacugcc

SEQ ID NO: 285651 - RNA, 32 nt, Human
aaauauaggugaggauucaggagaaggcaaaa

SEQ ID NO: 285652 - RNA, 32 nt, Human
aaauauauacugauacuauaacuuucuuaugg

SEQ ID NO: 285653 - RNA, 32 nt, Human
aaauauaucaaaacauguaaacgcccaccuua

SEQ ID NO: 285654 - RNA, 32 nt, Human
aaauauaucuuccuccugagucuggguaauua

SEQ ID NO: 285655 - RNA, 22 nt, Human
aaauauaugaaauuacuauaca

SEQ ID NO: 285656 - RNA, 32 nt, Human
aaauauaugauggcuaacuguucaaaugcuaa

SEQ ID NO: 285657 - RNA, 32 nt, Human
aaauauauguacaaagaacuaugcugucuuau

SEQ ID NO: 285658 - RNA, 32 nt, Human
aaauauaugucgcaauacuuacugcaaagaaa

SEQ ID NO: 285659 - RNA, 32 nt, Human
aaauauauucaggaguuggaauguuguaguua

SEQ ID NO: 285660 - RNA, 32 nt, Human
aaauauauuccaugcuaucagcuuuuuagaau

SEQ ID NO: 285661 - RNA, 32 nt, Human
aaauauauuucaccugaguagggaagaaaaac

SEQ ID NO: 285662 - RNA, 32 nt, Human
aaauaucaaggaugagaauggcacuggcuguc

SEQ ID NO: 285663 - RNA, 32 nt, Human
aaauaucagugcagccuggcauuuggggccac

SEQ ID NO: 285664 - RNA, 32 nt, Human
aaauaucauauaguaaaugcaaacaugccaag

SEQ ID NO: 285665 - RNA, 32 nt, Human
aaauauccaaagaugccuuuugaauuucaaag

SEQ ID NO: 285666 - RNA, 32 nt, Human
aaauauccugguuuuccagcauguuuacccac

SEQ ID NO: 285667 - RNA, 32 nt, Human
aaauauccuguguaacacuuggcucuugguac

SEQ ID NO: 285668 - RNA, 32 nt, Human
aaauauccuucugucuccuccccaccuugcaa

SEQ ID NO: 285669 - RNA, 29 nt, Human
aaauaucggcugcagccaucccccucauu

SEQ ID NO: 285670 - RNA, 20 nt, Human
aaauaucuaauaaagcuuuu

SEQ ID NO: 285671 - RNA, 32 nt, Human
aaauaucucaugaagaccaaaaagcagaaauc

SEQ ID NO: 285672 - RNA, 32 nt, Human
aaauaucugaaaucucaguacgacaugaaaga

SEQ ID NO: 285673 - RNA, 32 nt, Human
aaauaucugacaucuauugucauuccauugcu

SEQ ID NO: 285674 - RNA, 32 nt, Human
aaauaucuuuguucuuguuugcugcuauuuuc

SEQ ID NO: 285675 - RNA, 32 nt, Human
aaauaugagauguugucaaaaugaugcaguaa

SEQ ID NO: 285676 - RNA, 32 nt, Human
aaauaugaggaaagcuuuucaguuuuuaaaau

SEQ ID NO: 285677 - RNA, 32 nt, Human
aaauaugaucacuucauacuucuaaaucagaa

SEQ ID NO: 285678 - RNA, 32 nt, Human
aaauaugauuguaccacugcacuccagccugg

SEQ ID NO: 285679 - RNA, 32 nt, Human
aaauaugcaagacacagaaguguauaugguug

SEQ ID NO: 285680 - RNA, 31 nt, Human
aaauaugcacuuuuccuaggcagagcuaucc

SEQ ID NO: 285681 - RNA, 32 nt, Human
aaauaugcaucucuauccccagccucuauuuu

SEQ ID NO: 285682 - RNA, 32 nt, Human
aaauaugccccuuaguccacucagccugcaac

SEQ ID NO: 285683 - RNA, 29 nt, Human
aaauaugcucugcugucucccugcugcug

SEQ ID NO: 285684 - RNA, 32 nt, Human
aaauaugcugauuuuaaagaguguuagaaagc

SEQ ID NO: 285685 - RNA, 32 nt, Human
aaauaugcuucaaaccaugaguacacuauuag

SEQ ID NO: 285686 - RNA, 32 nt, Human
aaauauggaagcacagaaaugggaguggaugc

SEQ ID NO: 285687 - RNA, 32 nt, Human
aaauauggagucucgcuguauugcccaggcug

SEQ ID NO: 285688 - RNA, 32 nt, Human
aaauauggcaauacuugcuucuucccaauugc

SEQ ID NO: 285689 - RNA, 32 nt, Human
aaauauggccuccagcugccugccuucagcaa

SEQ ID NO: 285690 - RNA, 32 nt, Human
aaauaugggacuguuuacaaaugagugauucc

SEQ ID NO: 285691 - RNA, 32 nt, Human
aaauaugggauggauucuagaaaugggguauc

SEQ ID NO: 285692 - RNA, 32 nt, Human
aaauaugggcugggcacagugucccacacucu

SEQ ID NO: 285693 - RNA, 32 nt, Human
aaauauggggauguagaaaagcagauaguuca

SEQ ID NO: 285694 - RNA, 32 nt, Human
aaauauguacuuguagccuggauagcagacug

SEQ ID NO: 285695 - RNA, 32 nt, Human
aaauauguauaugauacauguaaauguacaaa

SEQ ID NO: 285696 - RNA, 32 nt, Human
aaauaugucucgcuagugauguuuuuaugaua

SEQ ID NO: 285697 - RNA, 32 nt, Human
aaauaugucuucauaaauuacgcacaguaaaa

SEQ ID NO: 285698 - RNA, 32 nt, Human
aaauauguguaacacaggcuuguaggagcaca

SEQ ID NO: 285699 - RNA, 32 nt, Human
aaauauguuacaucaggacaacuuugagaaaa

SEQ ID NO: 285700 - RNA, 31 nt, Human
aaauauguuguucaaauuaugaguacuauuu

SEQ ID NO: 285701 - RNA, 32 nt, Human
aaauauguuuaaucucauuucucccucauuaa

SEQ ID NO: 285702 - RNA, 32 nt, Human
aaauauguuugaugcuauuuuguauuuuuaca

SEQ ID NO: 285703 - RNA, 32 nt, Human
aaauauuaaagccaaacuugaaugaagagaca

SEQ ID NO: 285704 - RNA, 32 nt, Human
aaauauuaagcaugacagaaaauauguauuaa

SEQ ID NO: 285705 - RNA, 32 nt, Human
aaauauuaagcuauucugagggagaggccaca

SEQ ID NO: 285706 - RNA, 32 nt, Human
aaauauuacaaacccuaagauagcuaauaaau

SEQ ID NO: 285707 - RNA, 32 nt, Human
aaauauuacagagaaaaucacauaucacaugg

SEQ ID NO: 285708 - RNA, 32 nt, Human
aaauauuaggagacacagggaaguggggagag

SEQ ID NO: 285709 - RNA, 32 nt, Human
aaauauuauuaaaauacaggaguuuaccuuaa

SEQ ID NO: 285710 - RNA, 21 nt, Human
aaauauucacaaacgugcaca

SEQ ID NO: 285711 - RNA, 32 nt, Human
aaauauucaguuaugguacuauguuugcaacu

SEQ ID NO: 285712 - RNA, 32 nt, Human
aaauauucauaaguagaaucacugacaguggc

SEQ ID NO: 285713 - RNA, 32 nt, Human
aaauauuccauucagcauuacaaagauggaug

SEQ ID NO: 285714 - RNA, 32 nt, Human
aaauauucccaaaaggcaggugcaaugaugca

SEQ ID NO: 285715 - RNA, 32 nt, Human
aaauauuccuuuuucuccuagaggaaaucccu

SEQ ID NO: 285716 - RNA, 32 nt, Human
aaauauucucucuuuggcuggaaugacaaaaa

SEQ ID NO: 285717 - RNA, 32 nt, Human
aaauauucugacaacauuaaaagacucuaccc

SEQ ID NO: 285718 - RNA, 32 nt, Human
aaauauucuuucuguaaagucaaacaggauuc

SEQ ID NO: 285719 - RNA, 32 nt, Human
aaauauugacacuugagggucacugguggacc

SEQ ID NO: 285720 - RNA, 32 nt, Human
aaauauugauccuucccuuggaccaccuucau

SEQ ID NO: 285721 - RNA, 32 nt, Human
aaauauugauuucugccuuccuugcuaaugca

SEQ ID NO: 285722 - RNA, 32 nt, Human
aaauauugauuuuagagacuguauuuuuauuu

SEQ ID NO: 285723 - RNA, 32 nt, Human
aaauauugcaaacccacagaguuuaggcuggu

SEQ ID NO: 285724 - RNA, 32 nt, Human
aaauauugcucaggcugguugcaaacuccuug

SEQ ID NO: 285725 - RNA, 32 nt, Human
aaauauuggccaaaucagaauucuuguuucua

SEQ ID NO: 285726 - RNA, 32 nt, Human
aaauauuggcuacugguguauguagcaguucu

SEQ ID NO: 285727 - RNA, 32 nt, Human
aaauauugggauuacagacaugagccaugaga

SEQ ID NO: 285728 - RNA, 31 nt, Human
aaauauuguacuuaccaacauuuaaagcuua

SEQ ID NO: 285729 - RNA, 32 nt, Human
aaauauuguuauguaucauaucaaagagaaac

SEQ ID NO: 285730 - RNA, 32 nt, Human
aaauauuuaaagcucaagaagaacacagaagc

SEQ ID NO: 285731 - RNA, 21 nt, Human
aaauauuuaacauauuugggu

SEQ ID NO: 285732 - RNA, 32 nt, Human
aaauauuuacauaugaaauuuaauauagcuau

SEQ ID NO: 285733 - RNA, 32 nt, Human
aaauauuuacuuuugcacuuggagcugcuuuu

SEQ ID NO: 285734 - RNA, 19 nt, Human
aaauauuuauucucucagc

SEQ ID NO: 285735 - RNA, 32 nt, Human
aaauauuucaggcugggcgugguggcucacgc

SEQ ID NO: 285736 - RNA, 32 nt, Human
aaauauuucauauuuuucugaguaaauaugau

SEQ ID NO: 285737 - RNA, 32 nt, Human
aaauauuucauuuugugcgugugaaagggaaa

SEQ ID NO: 285738 - RNA, 32 nt, Human
aaauauuuccaaguaggcaauguaguacuuuu

SEQ ID NO: 285739 - RNA, 32 nt, Human
aaauauuuccucaagccuauuucaugagaucu

SEQ ID NO: 285740 - RNA, 32 nt, Human
aaauauuucuauaauaguuucacauuuauauu

SEQ ID NO: 285741 - RNA, 32 nt, Human
aaauauuucuguaucuuuuggguuuugacagu

SEQ ID NO: 285742 - RNA, 32 nt, Human
aaauauuucuuuguuuuuccuuuuggaaacuu

SEQ ID NO: 285743 - RNA, 32 nt, Human
aaauauuugaaacuuguggucucugaagcucg

SEQ ID NO: 285744 - RNA, 32 nt, Human
aaauauuugcagaaugaguaggcucauaagug

SEQ ID NO: 285745 - RNA, 32 nt, Human
aaauauuugcuuguaaaugaaaacuuagcuag

SEQ ID NO: 285746 - RNA, 32 nt, Human
aaauauuugggaccaagcugaagcacuaaucc

SEQ ID NO: 285747 - RNA, 32 nt, Human
aaauauuuuccugccacuguguaacauagcug

SEQ ID NO: 285748 - RNA, 32 nt, Human
aaauauuuugguuuguucugugccuucaguuu

SEQ ID NO: 285749 - RNA, 32 nt, Human
aaauauuuuuagauccauuuaaggaguuuuga

SEQ ID NO: 285750 - RNA, 32 nt, Human
aaauauuuuuauuuucuuccuugucucauaac

SEQ ID NO: 285751 - RNA, 32 nt, Human
aaaucaaacaacaaccauuuccuggguguccu

SEQ ID NO: 285752 - RNA, 32 nt, Human
aaaucaaagaugaucucuaucacuuugccacc

SEQ ID NO: 285753 - RNA, 32 nt, Human
aaaucaaagugaaacccaggaggagagccucc

SEQ ID NO: 285754 - RNA, 32 nt, Human
aaaucaaauguuccuucaguacagguaacuuc

SEQ ID NO: 285755 - RNA, 23 nt, Human
aaaucaacaacuacagaaagauu

SEQ ID NO: 285756 - RNA, 32 nt, Human
aaaucaacagaauauacauucuucucagcacc

SEQ ID NO: 285757 - RNA, 32 nt, Human
aaaucaacauaguugcugcaggcggaacugag

SEQ ID NO: 285758 - RNA, 32 nt, Human
aaaucaacaucuguauacccccuucccagggg

SEQ ID NO: 285759 - RNA, 32 nt, Human
aaaucaacuaaaauucagacuuuuagcaggac

SEQ ID NO: 285760 - RNA, 32 nt, Human
aaaucaacucaauauaucauacauuuacacuu

SEQ ID NO: 285761 - RNA, 32 nt, Human
aaaucaacucacugcauaugcacaucaacuca

SEQ ID NO: 285762 - RNA, 24 nt, Human
aaaucaacugacaaauggcagauu

SEQ ID NO: 285763 - RNA, 32 nt, Human
aaaucaagaaggacacaagcgaagaaauggca

SEQ ID NO: 285764 - RNA, 32 nt, Human
aaaucaagggauuagugcaaccaguagaaggc

SEQ ID NO: 285765 - RNA, 21 nt, Human
aaaucaagggccagcuggagg

SEQ ID NO: 285766 - RNA, 32 nt, Human
aaaucaagggccugaauuuuauggcuuaguau

SEQ ID NO: 285767 - RNA, 22 nt, Human
aaaucaaggucucccagaauca

SEQ ID NO: 285768 - RNA, 32 nt, Human
aaaucaagucaccacacuccagccugggugac

SEQ ID NO: 285769 - RNA, 32 nt, Human
aaaucaagucagcuuggaucauucaccuuaac

SEQ ID NO: 285770 - RNA, 29 nt, Human
aaaucaagucuauguaagcuuacuugaaa

SEQ ID NO: 285771 - RNA, 32 nt, Human
aaaucaaguggcuaagucagauuuaggaagug

SEQ ID NO: 285772 - RNA, 32 nt, Human
aaaucaauaaucacaaaccccaaaacgggaga

SEQ ID NO: 285773 - RNA, 32 nt, Human
aaaucaauaauguugugaaguaaaacaaucag

SEQ ID NO: 285774 - RNA, 32 nt, Human
aaaucaauaguuuuaaccauuguuaaaaugca

SEQ ID NO: 285775 - RNA, 32 nt, Human
aaaucaauccuguuaagagauaauucuuaaaa

SEQ ID NO: 285776 - RNA, 32 nt, Human
aaaucaaucuuggcugggcacgguggcuccug

SEQ ID NO: 285777 - RNA, 32 nt, Human
aaaucacaaguccuaccacuccugccuuccaa

SEQ ID NO: 285778 - RNA, 32 nt, Human
aaaucacaaucagugaguaaauagacagccuu

SEQ ID NO: 285779 - RNA, 32 nt, Human
aaaucacacaggcugggugcaguggcucaugc

SEQ ID NO: 285780 - RNA, 32 nt, Human
aaaucacacauaugcacacauacauauuuaug

SEQ ID NO: 285781 - RNA, 32 nt, Human
aaaucacaccacuacacuccagccaaagcaac

SEQ ID NO: 285782 - RNA, 32 nt, Human
aaaucacaccacugcacucuagccugggcaac

SEQ ID NO: 285783 - RNA, 32 nt, Human
aaaucacaccacuguacuccagccuggugaca

SEQ ID NO: 285784 - RNA, 32 nt, Human
aaaucacaccauugcacuccagcuugggcaac

SEQ ID NO: 285785 - RNA, 32 nt, Human
aaaucacagaccaaggagccacccugauugca

SEQ ID NO: 285786 - RNA, 32 nt, Human
aaaucacagacuauugaaccuggaacuggcuu

SEQ ID NO: 285787 - RNA, 32 nt, Human
aaaucacagaugcuggugagguuguggagaaa

SEQ ID NO: 285788 - RNA, 32 nt, Human
aaaucacaggcuucugagcacagcugcauuaa

SEQ ID NO: 285789 - RNA, 32 nt, Human
aaaucacaguguugugcaccaggaacacaaag

SEQ ID NO: 285790 - RNA, 32 nt, Human
aaaucacauaaauguacugugugugacagagg

SEQ ID NO: 285791 - RNA, 32 nt, Human
aaaucaccaccaccaguguuaagugcuucugg

SEQ ID NO: 285792 - RNA, 32 nt, Human
aaaucaccaucccgcggaugcugugaccuccc

SEQ ID NO: 285793 - RNA, 32 nt, Human
aaaucacccucuacuuguucuccugugacccu

SEQ ID NO: 285794 - RNA, 32 nt, Human
aaaucaccuuucccuuguuaaaguguucuuuu

SEQ ID NO: 285795 - RNA, 32 nt, Human
aaaucacgccacuacacuccagccugggcaac

SEQ ID NO: 285796 - RNA, 32 nt, Human
aaaucacgccacugcacuccagccugggcaac

SEQ ID NO: 285797 - RNA, 32 nt, Human
aaaucacgugccugaaacugugcuuaaguuuu

SEQ ID NO: 285798 - RNA, 32 nt, Human
aaaucacucccaagagcuuacuguuuaaucac

SEQ ID NO: 285799 - RNA, 32 nt, Human
aaaucacugaaccaugucuccgcacauuuccc

SEQ ID NO: 285800 - RNA, 32 nt, Human
aaaucacugaaccucucaggaucaaugacccc

SEQ ID NO: 285801 - RNA, 32 nt, Human
aaaucacugugaucauuaaggauagaaaucaa

SEQ ID NO: 285802 - RNA, 32 nt, Human
aaaucacuugagcucaggaguuugagaccagc

SEQ ID NO: 285803 - RNA, 32 nt, Human
aaaucacuuguuuuauugacugucuuuccuau

SEQ ID NO: 285804 - RNA, 32 nt, Human
aaaucacuuugccaucuguaccucucaauuau

SEQ ID NO: 285805 - RNA, 32 nt, Human
aaaucagaacaauugagcucauggacacagag

SEQ ID NO: 285806 - RNA, 21 nt, Human
aaaucagaaguauaccucuga

SEQ ID NO: 285807 - RNA, 32 nt, Human
aaaucagagaacacugggugguuugaagggug

SEQ ID NO: 285808 - RNA, 32 nt, Human
aaaucagagaaggaaaguugacuuguagagug

SEQ ID NO: 285809 - RNA, 32 nt, Human
aaaucagagcauuagcugcucuccccaugauu

SEQ ID NO: 285810 - RNA, 32 nt, Human
aaaucagagcugaguggggaggugcuucagca

SEQ ID NO: 285811 - RNA, 32 nt, Human
aaaucagagggaagaaugugacuguggcuccc

SEQ ID NO: 285812 - RNA, 32 nt, Human
aaaucagagucaccuccucugcccagagcugu

SEQ ID NO: 285813 - RNA, 32 nt, Human
aaaucagagugguccucacaccuagaggacgg

SEQ ID NO: 285814 - RNA, 32 nt, Human
aaaucagaguugcccgggcaugguggcucacg

SEQ ID NO: 285815 - RNA, 32 nt, Human
aaaucagauauaccuucucuugucugcaugac

SEQ ID NO: 285816 - RNA, 32 nt, Human
aaaucagauuuacaaucuccauuuucauuaac

SEQ ID NO: 285817 - RNA, 32 nt, Human
aaaucagcaagccugcuuaccuccagagacac

SEQ ID NO: 285818 - RNA, 19 nt, Human
aaaucagcacacaaaucca

SEQ ID NO: 285819 - RNA, 18 nt, Human
aaaucagcacauuccucc

SEQ ID NO: 285820 - RNA, 32 nt, Human
aaaucagcaucaaaacauuccuaguguucaaa

SEQ ID NO: 285821 - RNA, 26 nt, Human
aaaucagccggcugcaccuguucucu

SEQ ID NO: 285822 - RNA, 32 nt, Human
aaaucagccuggcuugggaaauucauguuguu

SEQ ID NO: 285823 - RNA, 32 nt, Human
aaaucagccugggaagcaucuuuucgcucagc

SEQ ID NO: 285824 - RNA, 32 nt, Human
aaaucagcuguccgcccugccugccugccugu

SEQ ID NO: 285825 - RNA, 32 nt, Human
aaaucagcuugguaccaccagacugggcugca

SEQ ID NO: 285826 - RNA, 32 nt, Human
aaaucaggaaugaccugaaucucaacccaaau

SEQ ID NO: 285827 - RNA, 32 nt, Human
aaaucaggacaguggcaguucggauuguggca

SEQ ID NO: 285828 - RNA, 32 nt, Human
aaaucaggauuuuagugcuugccaccaccaga

SEQ ID NO: 285829 - RNA, 32 nt, Human
aaaucaggcagccacugacucccuucauuaug

SEQ ID NO: 285830 - RNA, 22 nt, Human
aaaucaggcaggucucaagggg

SEQ ID NO: 285831 - RNA, 32 nt, Human
aaaucaggccagaggacaacaggcuggcguuu

SEQ ID NO: 285832 - RNA, 21 nt, Human
aaaucaggcgaucuccggaga

SEQ ID NO: 285833 - RNA, 23 nt, Human
aaaucaggcggucaaacuuagag

SEQ ID NO: 285834 - RNA, 32 nt, Human
aaaucaggcuacagcacuccagccugggcaac

SEQ ID NO: 285835 - RNA, 32 nt, Human
aaaucaggcugcaguacuuugcacggggccug

SEQ ID NO: 285836 - RNA, 32 nt, Human
aaaucagggaugguuggcauccuaacuggcag

SEQ ID NO: 285837 - RNA, 32 nt, Human
aaaucagggcuucucucauccaugcuggaauu

SEQ ID NO: 285838 - RNA, 32 nt, Human
aaaucagguccagcaaaagucaguagggacau

SEQ ID NO: 285839 - RNA, 32 nt, Human
aaaucaguaucaauuccucccauuucaauuca

SEQ ID NO: 285840 - RNA, 32 nt, Human
aaaucaguccauaacauuaagaugagcccuaa

SEQ ID NO: 285841 - RNA, 32 nt, Human
aaaucagucuccccaaguggauugcaguuuuu

SEQ ID NO: 285842 - RNA, 32 nt, Human
aaaucagucucccugagcauuugggguaagag

SEQ ID NO: 285843 - RNA, 32 nt, Human
aaaucagucugcugggggaaccuuucagaugu

SEQ ID NO: 285844 - RNA, 21 nt, Human
aaaucagucuuccuuguggaa

SEQ ID NO: 285845 - RNA, 32 nt, Human
aaaucagucuuguuacuugauagccaugcccc

SEQ ID NO: 285846 - RNA, 32 nt, Human
aaaucagugggccauggaagaaaccucauaua

SEQ ID NO: 285847 - RNA, 32 nt, Human
aaaucagugugagaugggcaugguagcuuacg

SEQ ID NO: 285848 - RNA, 32 nt, Human
aaaucaguuuuuaaaagauauacuuucucuuu

SEQ ID NO: 285849 - RNA, 32 nt, Human
aaaucauaacacugcacuccaggcuggacaac

SEQ ID NO: 285850 - RNA, 32 nt, Human
aaaucauaacuugguaagaaacuccuaauuaa

SEQ ID NO: 285851 - RNA, 32 nt, Human
aaaucauagccugggugcaguggcucacgccu

SEQ ID NO: 285852 - RNA, 32 nt, Human
aaaucauagcugguucacacugaccaagauac

SEQ ID NO: 285853 - RNA, 32 nt, Human
aaaucauaguuucuuaauggcuaccaauaagg

SEQ ID NO: 285854 - RNA, 22 nt, Human
aaaucauauuucaaaauccagu

SEQ ID NO: 285855 - RNA, 32 nt, Human
aaaucauauuuuauacauauuuagcauuauaa

SEQ ID NO: 285856 - RNA, 32 nt, Human
aaaucaucagcccuguuuggugcagucucaug

SEQ ID NO: 285857 - RNA, 32 nt, Human
aaaucaucauaauugugcuuucacuucccagg

SEQ ID NO: 285858 - RNA, 32 nt, Human
aaaucaucauucucaguaaacuaucgcaagga

SEQ ID NO: 285859 - RNA, 32 nt, Human
aaaucauccagaaaacccccuacccccacccc

SEQ ID NO: 285860 - RNA, 32 nt, Human
aaaucauccucccacaccuucuccccgacuuu

SEQ ID NO: 285861 - RNA, 32 nt, Human
aaaucaucgauauuugaaacugggauacgcuu

SEQ ID NO: 285862 - RNA, 19 nt, Human
aaaucaucggagucagcca

SEQ ID NO: 285863 - RNA, 32 nt, Human
aaaucaucuccauauucucaggcacagagaaa

SEQ ID NO: 285864 - RNA, 31 nt, Human
aaaucaugaauacauuuacauuuaaauaaaa

SEQ ID NO: 285865 - RNA, 32 nt, Human
aaaucaugacaccuucaauuugccaucaugac

SEQ ID NO: 285866 - RNA, 32 nt, Human
aaaucaugagacaacucacacuggagagaagc

SEQ ID NO: 285867 - RNA, 32 nt, Human
aaaucaugauuucccuguagaaagugaggcuc

SEQ ID NO: 285868 - RNA, 32 nt, Human
aaaucaugccacugcacccuagcuuggguggc

SEQ ID NO: 285869 - RNA, 32 nt, Human
aaaucaugccacugcacuccagccugggcaac

SEQ ID NO: 285870 - RNA, 32 nt, Human
aaaucaugccauugcacuccagccugggugac

SEQ ID NO: 285871 - RNA, 32 nt, Human
aaaucaugcucaauaggauuacgcugaggccc

SEQ ID NO: 285872 - RNA, 32 nt, Human
aaaucaugcuccugaaccuucugaacgcauuu

SEQ ID NO: 285873 - RNA, 32 nt, Human
aaaucauggaaagacucuuaaugcagacucuu

SEQ ID NO: 285874 - RNA, 32 nt, Human
aaaucaugggcaaggcuggcccccaggcccug

SEQ ID NO: 285875 - RNA, 32 nt, Human
aaaucauggucugccuggaccuagccaggcuc

SEQ ID NO: 285876 - RNA, 32 nt, Human
aaaucauguaauccaggcuggggaagauggcg

SEQ ID NO: 285877 - RNA, 32 nt, Human
aaaucauguacauuugaaaauauuugcacaca

SEQ ID NO: 285878 - RNA, 32 nt, Human
aaaucaugucaccaagcuucaagccauggagg

SEQ ID NO: 285879 - RNA, 32 nt, Human
aaaucauuacucuguaaaauaaauaagcagau

SEQ ID NO: 285880 - RNA, 32 nt, Human
aaaucauucaaguuucacugugccuacaguga

SEQ ID NO: 285881 - RNA, 32 nt, Human
aaaucauucccaccaucacuuaacgccgggau

SEQ ID NO: 285882 - RNA, 32 nt, Human
aaaucauugagucccccgccuucagaagaggg

SEQ ID NO: 285883 - RNA, 32 nt, Human
aaaucauuguagccuugaacucccgggcucaa

SEQ ID NO: 285884 - RNA, 32 nt, Human
aaaucauuucggaauagaguuuugccaguuaa

SEQ ID NO: 285885 - RNA, 32 nt, Human
aaaucauuuucauuaagaagcucucucagcau

SEQ ID NO: 285886 - RNA, 32 nt, Human
aaaucauuuucuuugucugagucucugguucu

SEQ ID NO: 285887 - RNA, 32 nt, Human
aaauccaaaggcuauuguugcauuguacagca

SEQ ID NO: 285888 - RNA, 32 nt, Human
aaauccaacaauuucugaagcuuaguguaauu

SEQ ID NO: 285889 - RNA, 32 nt, Human
aaauccaacuccaggagcuauggcaguguuaa

SEQ ID NO: 285890 - RNA, 32 nt, Human
aaauccaacucugcuuuuggucuugcuucuau

SEQ ID NO: 285891 - RNA, 32 nt, Human
aaauccaagaagauacaggaauucuguguaug

SEQ ID NO: 285892 - RNA, 32 nt, Human
aaauccaaggggaugcuucccucugcccucuu

SEQ ID NO: 285893 - RNA, 32 nt, Human
aaauccacaaaucugagccuccuucacuccag

SEQ ID NO: 285894 - RNA, 32 nt, Human
aaauccacccaccaaucuuaggcaucauaaug

SEQ ID NO: 285895 - RNA, 32 nt, Human
aaauccaccuguccuucaauaaaguacuaaau

SEQ ID NO: 285896 - RNA, 32 nt, Human
aaauccacugcaccuccacuuggugacugacg

SEQ ID NO: 285897 - RNA, 21 nt, Human
aaauccagaagucagagccaa

SEQ ID NO: 285898 - RNA, 32 nt, Human
aaauccagacauucucacccccagcggaugca

SEQ ID NO: 285899 - RNA, 32 nt, Human
aaauccagagcuguagaaugagaaaaauguaa

SEQ ID NO: 285900 - RNA, 32 nt, Human
aaauccagaggaagcaaggaggagggaggugg

SEQ ID NO: 285901 - RNA, 32 nt, Human
aaauccagcagguggagguugcagugagccaa

SEQ ID NO: 285902 - RNA, 32 nt, Human
aaauccagcaguagaggaagggaccacccaag

SEQ ID NO: 285903 - RNA, 32 nt, Human
aaauccagccuuuuaccagaagccucuccgag

SEQ ID NO: 285904 - RNA, 32 nt, Human
aaauccagcuccuuguccuagcagguucucag

SEQ ID NO: 285905 - RNA, 32 nt, Human
aaauccaggaaaugcagaagaggaaugugcaa

SEQ ID NO: 285906 - RNA, 32 nt, Human
aaauccaggagcaacgccaguggcaacguagu

SEQ ID NO: 285907 - RNA, 30 nt, Human
aaauccaggagccacaggaagcagugagcu

SEQ ID NO: 285908 - RNA, 32 nt, Human
aaauccaggaggcaaagguugcagugagccaa

SEQ ID NO: 285909 - RNA, 32 nt, Human
aaauccaggaggcggagguugcagugagccaa

SEQ ID NO: 285910 - RNA, 31 nt, Human
aaauccaggcacuuccugcuucuucaggccu

SEQ ID NO: 285911 - RNA, 32 nt, Human
aaauccaggcggggccuguugggcccaggucu

SEQ ID NO: 285912 - RNA, 32 nt, Human
aaauccagucaacucauaucuuccugucuuuc

SEQ ID NO: 285913 - RNA, 32 nt, Human
aaauccagugucacaugggccugagauuuuau

SEQ ID NO: 285914 - RNA, 32 nt, Human
aaauccaguguucaguguaguggugcaaaccu

SEQ ID NO: 285915 - RNA, 32 nt, Human
aaauccaguuucucuugaugaagaagaagaug

SEQ ID NO: 285916 - RNA, 16 nt, Human
aaauccauaaucugcu

SEQ ID NO: 285917 - RNA, 32 nt, Human
aaauccaugaacacuaaaggacuucauugauu

SEQ ID NO: 285918 - RNA, 32 nt, Human
aaauccaugccaagaugccugccuuccuuggu

SEQ ID NO: 285919 - RNA, 16 nt, Human
aaauccaugccugugu

SEQ ID NO: 285920 - RNA, 32 nt, Human
aaauccaugcuccugacaucaacugaaggggc

SEQ ID NO: 285921 - RNA, 32 nt, Human
aaauccaugcugcaauacaauucuggaauaag

SEQ ID NO: 285922 - RNA, 32 nt, Human
aaauccauggcuuagaaguuccagcccuccau

SEQ ID NO: 285923 - RNA, 32 nt, Human
aaauccauucacugcaaaccucguuccccauu

SEQ ID NO: 285924 - RNA, 32 nt, Human
aaauccauuucccacguuuucccuucagugca

SEQ ID NO: 285925 - RNA, 32 nt, Human
aaaucccaccacugcacuccagccugggugac

SEQ ID NO: 285926 - RNA, 32 nt, Human
aaaucccacuacuuugggaggcugaggcugga

SEQ ID NO: 285927 - RNA, 32 nt, Human
aaaucccagcacuuugggaaggccgaguuggu

SEQ ID NO: 285928 - RNA, 32 nt, Human
aaaucccagcacuuugggaggccgaggcagga

SEQ ID NO: 285929 - RNA, 32 nt, Human
aaaucccagcacuuugggaggccgaggcaggc

SEQ ID NO: 285930 - RNA, 32 nt, Human
aaaucccagcacuuugggaggccgaggcaggu

SEQ ID NO: 285931 - RNA, 32 nt, Human
aaaucccagcuacucaagaggcugaggcagga

SEQ ID NO: 285932 - RNA, 32 nt, Human
aaaucccagcuacugaagaggcugagguggga

SEQ ID NO: 285933 - RNA, 32 nt, Human
aaaucccagcuacuugggaggcugaggcagga

SEQ ID NO: 285934 - RNA, 32 nt, Human
aaaucccagcuaucaggaggcugaggcagaga

SEQ ID NO: 285935 - RNA, 32 nt, Human
aaaucccagcuauuugggaggcugaggcagga

SEQ ID NO: 285936 - RNA, 32 nt, Human
aaaucccagcugggcuggacuguugccaacau

SEQ ID NO: 285937 - RNA, 32 nt, Human
aaaucccaggacccacccauguuuucacuauc

SEQ ID NO: 285938 - RNA, 32 nt, Human
aaaucccaggagaaaccuaagaggucuuaugg

SEQ ID NO: 285939 - RNA, 32 nt, Human
aaaucccagguacucaggaggcugaggcagga

SEQ ID NO: 285940 - RNA, 32 nt, Human
aaaucccaguggaggguggaaggaaccguuug

SEQ ID NO: 285941 - RNA, 32 nt, Human
aaaucccaguuggcacagccugggcaagcgcc

SEQ ID NO: 285942 - RNA, 32 nt, Human
aaaucccaucucuacaacaaaaauacaaaaau

SEQ ID NO: 285943 - RNA, 32 nt, Human
aaauccccaagggcacugccacugugcucgga

SEQ ID NO: 285944 - RNA, 32 nt, Human
aaauccccaagugcuagagaaaagaaugugga

SEQ ID NO: 285945 - RNA, 32 nt, Human
aaauccccagaaacaggaaggucuccaagugu

SEQ ID NO: 285946 - RNA, 32 nt, Human
aaauccccagccugugagucucagccucuuuc

SEQ ID NO: 285947 - RNA, 32 nt, Human
aaauccccauuccauucaacaggcacauguuu

SEQ ID NO: 285948 - RNA, 32 nt, Human
aaaucccccaccccuggcugggcucaguggcu

SEQ ID NO: 285949 - RNA, 26 nt, Human
aaauccccgcuggccuccgccucccc

SEQ ID NO: 285950 - RNA, 21 nt, Human
aaauccccggcuccagcuccc

SEQ ID NO: 285951 - RNA, 32 nt, Human
aaauccccguuccauucaacaggcacauguuu

SEQ ID NO: 285952 - RNA, 19 nt, Human
aaauccccucccccugccc

SEQ ID NO: 285953 - RNA, 32 nt, Human
aaauccccugcaccucacucugggcagcucua

SEQ ID NO: 285954 - RNA, 32 nt, Human
aaauccccugcucuuugccgaccuucccuuau

SEQ ID NO: 285955 - RNA, 32 nt, Human
aaauccccuugaggcuggggagcuccacuccu

SEQ ID NO: 285956 - RNA, 32 nt, Human
aaaucccggccccacuccugaccucagacuca

SEQ ID NO: 285957 - RNA, 32 nt, Human
aaaucccggggccugggcuucucuauucuugg

SEQ ID NO: 285958 - RNA, 32 nt, Human
aaaucccuaaaacuuccagccucacauagcac

SEQ ID NO: 285959 - RNA, 32 nt, Human
aaaucccuaggccagaccucacagcagugccc

SEQ ID NO: 285960 - RNA, 32 nt, Human
aaaucccucaucagacugugacuuuaacauua

SEQ ID NO: 285961 - RNA, 18 nt, Human
aaaucccugcccuuaugg

SEQ ID NO: 285962 - RNA, 32 nt, Human
aaaucccugcuucuuuugggugcaguggcuca

SEQ ID NO: 285963 - RNA, 32 nt, Human
aaaucccuguuuaguguuacaugggaauaagg

SEQ ID NO: 285964 - RNA, 32 nt, Human
aaaucccuuccuguucccuccugguccuggac

SEQ ID NO: 285965 - RNA, 32 nt, Human
aaaucccuuucccuagaaauuggcucaccuug

SEQ ID NO: 285966 - RNA, 32 nt, Human
aaaucccuuugcauucuuucuggaccuuaaau

SEQ ID NO: 285967 - RNA, 32 nt, Human
aaauccuaaucaggaaaaagacucaucuagua

SEQ ID NO: 285968 - RNA, 32 nt, Human
aaauccuaguuauuaguggcccaggagaggag

SEQ ID NO: 285969 - RNA, 32 nt, Human
aaauccuauuaaaauaugcaaaaauaagucag

SEQ ID NO: 285970 - RNA, 32 nt, Human
aaauccucaaagcuuucagaagcauccagaau

SEQ ID NO: 285971 - RNA, 32 nt, Human
aaauccucagccacucaucuuauccuuaacaa

SEQ ID NO: 285972 - RNA, 32 nt, Human
aaauccucgcacacacuggcugguggagaacu

SEQ ID NO: 285973 - RNA, 32 nt, Human
aaauccucucguaucucaccccaaaccccaaa

SEQ ID NO: 285974 - RNA, 32 nt, Human
aaauccucucugcuguucacauuauccuuugu

SEQ ID NO: 285975 - RNA, 32 nt, Human
aaauccugaccucaagucaucugcuggccuug

SEQ ID NO: 285976 - RNA, 32 nt, Human
aaauccugcacucaggccugguggugaagaag

SEQ ID NO: 285977 - RNA, 32 nt, Human
aaauccugcagcguucaaguuugaugcugcca

SEQ ID NO: 285978 - RNA, 32 nt, Human
aaauccugccacccucacuucuccccuuccca

SEQ ID NO: 285979 - RNA, 32 nt, Human
aaauccugccacugcacaccagccugggugac

SEQ ID NO: 285980 - RNA, 32 nt, Human
aaauccugggguccuugagacagaggcaggac

SEQ ID NO: 285981 - RNA, 32 nt, Human
aaauccugucuggagcgacacgggcacagcca

SEQ ID NO: 285982 - RNA, 32 nt, Human
aaauccugugcugcuguuccucgugguaauag

SEQ ID NO: 285983 - RNA, 32 nt, Human
aaauccuguguuagaagcagcugugggggucc

SEQ ID NO: 285984 - RNA, 20 nt, Human
aaauccuguuuaggaucuga

SEQ ID NO: 285985 - RNA, 32 nt, Human
aaauccuuagcagucagaacacuugcuucacu

SEQ ID NO: 285986 - RNA, 32 nt, Human
aaauccuucagcugauucucagucuaguaaac

SEQ ID NO: 285987 - RNA, 32 nt, Human
aaauccuuccugggauucccccaaacccacac

SEQ ID NO: 285988 - RNA, 32 nt, Human
aaauccuugaagcccaggcugaugcuugaagu

SEQ ID NO: 285989 - RNA, 32 nt, Human
aaauccuugacuuuaaaauaaauuuaaagugu

SEQ ID NO: 285990 - RNA, 32 nt, Human
aaauccuugcaccaugggauuaauauccaauu

SEQ ID NO: 285991 - RNA, 32 nt, Human
aaauccuugcaguggugaaaacugacauggca

SEQ ID NO: 285992 - RNA, 32 nt, Human
aaauccuuguuuucucuuuucgguuuugagag

SEQ ID NO: 285993 - RNA, 32 nt, Human
aaauccuuuaagagauauuagagcaaguauuu

SEQ ID NO: 285994 - RNA, 32 nt, Human
aaauccuuugccaaaauaagggauggucaaau

SEQ ID NO: 285995 - RNA, 32 nt, Human
aaaucgacaagaaaaccuugacuuuacagagc

SEQ ID NO: 285996 - RNA, 32 nt, Human
aaaucgacgucucucucaccaggauuuggugu

SEQ ID NO: 285997 - RNA, 32 nt, Human
aaaucgacuucaaauacuugaaggcucccacc

SEQ ID NO: 285998 - RNA, 32 nt, Human
aaaucgagcagugagccaaggagcagcauaua

SEQ ID NO: 285999 - RNA, 32 nt, Human
aaaucgagccccggagagaugaaaggcauauu

SEQ ID NO: 286000 - RNA, 32 nt, Human
aaaucgagccccggagcgaugaaaggcauauu

SEQ ID NO: 286001 - RNA, 32 nt, Human
aaaucgaggaagcaccucucagccccucagag

SEQ ID NO: 286002 - RNA, 31 nt, Human
aaaucgauggcagaagcagcggcugccagau

SEQ ID NO: 286003 - RNA, 32 nt, Human
aaaucgcaccacugcacuccagccugggcgac

SEQ ID NO: 286004 - RNA, 32 nt, Human
aaaucgcaccgcugcacuccagccuggcaaca

SEQ ID NO: 286005 - RNA, 32 nt, Human
aaaucgcagaacuugaauccaggcugcugcuc

SEQ ID NO: 286006 - RNA, 32 nt, Human
aaaucgcagcagaggagauggagcagcuucgu

SEQ ID NO: 286007 - RNA, 32 nt, Human
aaaucgcaguuugacauaagggucccacaggc

SEQ ID NO: 286008 - RNA, 32 nt, Human
aaaucgcauucauaaaacaauuggaagugaaa

SEQ ID NO: 286009 - RNA, 32 nt, Human
aaaucgccacacuuggaaaaguuucaucaguu

SEQ ID NO: 286010 - RNA, 19 nt, Human
aaaucgcccaaauuuggaa

SEQ ID NO: 286011 - RNA, 32 nt, Human
aaaucgcgccacugcacuccagccugggugac

SEQ ID NO: 286012 - RNA, 32 nt, Human
aaaucgcguaccacacuccagccugggugaca

SEQ ID NO: 286013 - RNA, 32 nt, Human
aaaucgcgucacugcacuccagccugagugac

SEQ ID NO: 286014 - RNA, 32 nt, Human
aaaucgcucauuuugagguugcuuuauuuuuc

SEQ ID NO: 286015 - RNA, 32 nt, Human
aaaucgcugucucucugucucuuugcuuugua

SEQ ID NO: 286016 - RNA, 32 nt, Human
aaaucgcuguguuggggagcagcaggcucucc

SEQ ID NO: 286017 - RNA, 32 nt, Human
aaaucggccucaagugugagacgcauguugaa

SEQ ID NO: 286018 - RNA, 32 nt, Human
aaaucgggaaagucagcuggcuuuuuaucacu

SEQ ID NO: 286019 - RNA, 32 nt, Human
aaaucgggccaggccaaguacucagcugucuu

SEQ ID NO: 286020 - RNA, 32 nt, Human
aaaucggggacccccggcgcgccgacgggcag

SEQ ID NO: 286021 - RNA, 32 nt, Human
aaaucggggcuggaggugcagacggugucuga

SEQ ID NO: 286022 - RNA, 32 nt, Human
aaaucgguugugauuggcauguuccuuaagcg

SEQ ID NO: 286023 - RNA, 32 nt, Human
aaaucgucuccaagaccuacacagucagcuaa

SEQ ID NO: 286024 - RNA, 32 nt, Human
aaaucgugguugaguuucacugcagcaggcug

SEQ ID NO: 286025 - RNA, 32 nt, Human
aaaucguugggacucucagaugaaacaggaug

SEQ ID NO: 286026 - RNA, 32 nt, Human
aaaucguuguggaaggugauuaaaaaucaaaa

SEQ ID NO: 286027 - RNA, 32 nt, Human
aaaucuaaaauguaaaauuuugaacacaacac

SEQ ID NO: 286028 - RNA, 32 nt, Human
aaaucuacaagaacagagaauucuuccaaauc

SEQ ID NO: 286029 - RNA, 32 nt, Human
aaaucuacaggccucagggugggagaugaagg

SEQ ID NO: 286030 - RNA, 32 nt, Human
aaaucuacauuuaaaaggcaaagcuuuaaaag

SEQ ID NO: 286031 - RNA, 32 nt, Human
aaaucuaccacuuuccacaguagccccagauc

SEQ ID NO: 286032 - RNA, 32 nt, Human
aaaucuaccaggccaucuccccaguuucccag

SEQ ID NO: 286033 - RNA, 32 nt, Human
aaaucuagaaaaucagucuugacagaaaaugu

SEQ ID NO: 286034 - RNA, 32 nt, Human
aaaucuagaugagagaaaguauuugaaaauga

SEQ ID NO: 286035 - RNA, 32 nt, Human
aaaucuagcaccuugcaugcuggaucugggcu

SEQ ID NO: 286036 - RNA, 32 nt, Human
aaaucuauacugccacaauaugcagcuuacuc

SEQ ID NO: 286037 - RNA, 32 nt, Human
aaaucuauacuggacaguuacaagaaauuacc

SEQ ID NO: 286038 - RNA, 32 nt, Human
aaaucuauagccacagccugaagcuuugacca

SEQ ID NO: 286039 - RNA, 32 nt, Human
aaaucuauauuggacaguuacaagaaauuacu

SEQ ID NO: 286040 - RNA, 32 nt, Human
aaaucuaucauuauacagcacagaguggagcc

SEQ ID NO: 286041 - RNA, 32 nt, Human
aaaucuaucucuaauuuagagugcgguacaua

SEQ ID NO: 286042 - RNA, 32 nt, Human
aaaucuaucuucccaucuccuaaaacucagaa

SEQ ID NO: 286043 - RNA, 18 nt, Human
aaaucuaugcacuuaacc

SEQ ID NO: 286044 - RNA, 32 nt, Human
aaaucucaaaaacacaauaagugaagaaagua

SEQ ID NO: 286045 - RNA, 32 nt, Human
aaaucucaagucaaacacuggaaaagauguca

SEQ ID NO: 286046 - RNA, 32 nt, Human
aaaucucaauugcuagugaggaauucuuuucc

SEQ ID NO: 286047 - RNA, 32 nt, Human
aaaucucaccuucccuuccucaguuaaggaca

SEQ ID NO: 286048 - RNA, 32 nt, Human
aaaucucagcuaaucaggaggcugaggcagag

SEQ ID NO: 286049 - RNA, 32 nt, Human
aaaucuccacguccucccucuucccagccugg

SEQ ID NO: 286050 - RNA, 32 nt, Human
aaaucuccaggcugcugggcagcugggcagag

SEQ ID NO: 286051 - RNA, 32 nt, Human
aaaucucccuucaggcggagguugcagugagc

SEQ ID NO: 286052 - RNA, 32 nt, Human
aaaucucccuuucucuucaguuccuuccuugu

SEQ ID NO: 286053 - RNA, 32 nt, Human
aaaucucuacccuuccccaacccuccauaaaa

SEQ ID NO: 286054 - RNA, 32 nt, Human
aaaucucuacuuucuccacaugucacuugacu

SEQ ID NO: 286055 - RNA, 32 nt, Human
aaaucucuccacccuuauauaaucauugucaa

SEQ ID NO: 286056 - RNA, 32 nt, Human
aaaucucucucccuaaacuuucuguugcagau

SEQ ID NO: 286057 - RNA, 32 nt, Human
aaaucucugagaaccuucaagagcccaaaaac

SEQ ID NO: 286058 - RNA, 32 nt, Human
aaaucucugucuccacugcuuuccuuuuccug

SEQ ID NO: 286059 - RNA, 32 nt, Human
aaaucucuucuaaacgauggcauucuauguaa

SEQ ID NO: 286060 - RNA, 32 nt, Human
aaaucucuuugcaguggccucucuccaaauuu

SEQ ID NO: 286061 - RNA, 32 nt, Human
aaaucugaucauaucuacauguaugaacuuaa

SEQ ID NO: 286062 - RNA, 32 nt, Human
aaaucugauucugcuuuaacccggcuacagga

SEQ ID NO: 286063 - RNA, 32 nt, Human
aaaucugcaaaaagagcugacauuccagcugc

SEQ ID NO: 286064 - RNA, 31 nt, Human
aaaucugcaaugucucaguuaagaaagaaag

SEQ ID NO: 286065 - RNA, 32 nt, Human
aaaucugcagcaaccaucagcucucuuuucuu

SEQ ID NO: 286066 - RNA, 32 nt, Human
aaaucugcauaaggaagcccacuuuaucuaaa

SEQ ID NO: 286067 - RNA, 32 nt, Human
aaaucugccaaagaaguaagagauaaauuguu

SEQ ID NO: 286068 - RNA, 32 nt, Human
aaaucugccagccuaggcaacauagcaagguc

SEQ ID NO: 286069 - RNA, 32 nt, Human
aaaucugccuuuuucucauucaagaaggcaua

SEQ ID NO: 286070 - RNA, 32 nt, Human
aaaucugcucauauuagaacacaguauaauuc

SEQ ID NO: 286071 - RNA, 32 nt, Human
aaaucugcugggggugcugugauucauguuug

SEQ ID NO: 286072 - RNA, 32 nt, Human
aaaucugcugugcauccagagagcaaaguggg

SEQ ID NO: 286073 - RNA, 32 nt, Human
aaaucuggaaacaguugcagguguugggagga

SEQ ID NO: 286074 - RNA, 23 nt, Human
aaaucuggcuccuuuacaaaaga

SEQ ID NO: 286075 - RNA, 32 nt, Human
aaaucuggcuucucccuuccucccgacaucug

SEQ ID NO: 286076 - RNA, 32 nt, Human
aaaucuggcuucuccgccuuguggaacuugca

SEQ ID NO: 286077 - RNA, 32 nt, Human
aaaucugggguuuuauauuuugauuagccuaa

SEQ ID NO: 286078 - RNA, 32 nt, Human
aaaucuggguucaaccagccccugccauuucu

SEQ ID NO: 286079 - RNA, 32 nt, Human
aaaucugguagauccuauuacacuucuguuua

SEQ ID NO: 286080 - RNA, 32 nt, Human
aaaucuguaaagggacagaugcaccaucuuua

SEQ ID NO: 286081 - RNA, 32 nt, Human
aaaucugucacuguguauccucagccagaacu

SEQ ID NO: 286082 - RNA, 32 nt, Human
aaaucuguccccagaacuggagaguaagaaug

SEQ ID NO: 286083 - RNA, 32 nt, Human
aaaucuguccucuguguaacugaggccagcaa

SEQ ID NO: 286084 - RNA, 32 nt, Human
aaaucugucucaggcugguaguuagcaguugu

SEQ ID NO: 286085 - RNA, 32 nt, Human
aaaucugucuccaggcuggagaggcaggagcc

SEQ ID NO: 286086 - RNA, 31 nt, Human
aaaucugucuuugcggggccugucucaguga

SEQ ID NO: 286087 - RNA, 32 nt, Human
aaaucugugaacuuuggagaggggacaguugu

SEQ ID NO: 286088 - RNA, 32 nt, Human
aaaucugugagggucugacuugcucaaaccag

SEQ ID NO: 286089 - RNA, 32 nt, Human
aaaucugugucucaaaaacaaaacaaaacaaa

SEQ ID NO: 286090 - RNA, 32 nt, Human
aaaucugugugacuugcuuuauugcagcauuu

SEQ ID NO: 286091 - RNA, 32 nt, Human
aaaucuguguuugcuuucugcuugcuacauuu

SEQ ID NO: 286092 - RNA, 32 nt, Human
aaaucuguuacucaggcugguagcauuaaauu

SEQ ID NO: 286093 - RNA, 32 nt, Human
aaaucuguuuuuaaaaugucuuauaugaacau

SEQ ID NO: 286094 - RNA, 32 nt, Human
aaaucuuaaagccaaaauuagaaaaauaacuc

SEQ ID NO: 286095 - RNA, 32 nt, Human
aaaucuuagcacuucgggaggcugaggcaggu

SEQ ID NO: 286096 - RNA, 32 nt, Human
aaaucuuaugaaucauacauacacucaacaaa

SEQ ID NO: 286097 - RNA, 32 nt, Human
aaaucuucaaaacaaauuuaccuucauauagc

SEQ ID NO: 286098 - RNA, 32 nt, Human
aaaucuucaagguggcuaucccuucuccccuc

SEQ ID NO: 286099 - RNA, 32 nt, Human
aaaucuucaccuaugauccaggcacagaugug

SEQ ID NO: 286100 - RNA, 32 nt, Human
aaaucuucccaaauguuguggaaaacuggaau

SEQ ID NO: 286101 - RNA, 25 nt, Human
aaaucuuccuaacucuaggaucuga

SEQ ID NO: 286102 - RNA, 32 nt, Human
aaaucuuccuguacaaaacaucuuuaaaaaua

SEQ ID NO: 286103 - RNA, 32 nt, Human
aaaucuucucaccaaguggcugcaaucaguaa

SEQ ID NO: 286104 - RNA, 32 nt, Human
aaaucuucucucccucuccuacagccacuuuc

SEQ ID NO: 286105 - RNA, 19 nt, Human
aaaucuugaaaaggacuga

SEQ ID NO: 286106 - RNA, 32 nt, Human
aaaucuugaucucucuccuauuuccuuucuac

SEQ ID NO: 286107 - RNA, 32 nt, Human
aaaucuugcacuguuuugaaugcaucugcuau

SEQ ID NO: 286108 - RNA, 32 nt, Human
aaaucuugcaguugggauuuugcaguuggaua

SEQ ID NO: 286109 - RNA, 21 nt, Human
aaaucuugccuuggguccuga

SEQ ID NO: 286110 - RNA, 22 nt, Human
aaaucuugcucaguggcucuga

SEQ ID NO: 286111 - RNA, 21 nt, Human
aaaucuugggucuuggggacu

SEQ ID NO: 286112 - RNA, 32 nt, Human
aaaucuuguucuaacugugccuggugagagac

SEQ ID NO: 286113 - RNA, 32 nt, Human
aaaucuuguuuuaaaaauacauauuucuaccu

SEQ ID NO: 286114 - RNA, 32 nt, Human
aaaucuuucagccugcuucuuccccaggguuc

SEQ ID NO: 286115 - RNA, 22 nt, Human
aaaucuuuccaauaaauccaag

SEQ ID NO: 286116 - RNA, 21 nt, Human
aaaucuuucccuaaaucuaag

SEQ ID NO: 286117 - RNA, 32 nt, Human
aaaucuuuccgaguuuccccagaagagaauau

SEQ ID NO: 286118 - RNA, 32 nt, Human
aaaucuuucuggacagccaugacuguagcaag

SEQ ID NO: 286119 - RNA, 32 nt, Human
aaaucuuugguuguguggaugccuguguucag

SEQ ID NO: 286120 - RNA, 32 nt, Human
aaaucuuugugugaaggauuggaaaaggcuau

SEQ ID NO: 286121 - RNA, 32 nt, Human
aaaucuuuguguuugccuaucuguaaagguaa

SEQ ID NO: 286122 - RNA, 32 nt, Human
aaaucuuuuccauuccucuuucauacauucca

SEQ ID NO: 286123 - RNA, 32 nt, Human
aaaucuuuuucaaaacacuaguagaagaguaa

SEQ ID NO: 286124 - RNA, 32 nt, Human
aaaugaaaaagcagggacaacaggaggaaaug

SEQ ID NO: 286125 - RNA, 32 nt, Human
aaaugaaaaagguauuucuaacaacaaccaca

SEQ ID NO: 286126 - RNA, 32 nt, Human
aaaugaaaaaucucaauugaaagcuuuuaaaa

SEQ ID NO: 286127 - RNA, 32 nt, Human
aaaugaaaaaugaaaacauuucaaccaucuaa

SEQ ID NO: 286128 - RNA, 32 nt, Human
aaaugaaaaauggacccuuuaaaaauuauuuu

SEQ ID NO: 286129 - RNA, 32 nt, Human
aaaugaaacaaugcaacauuucacuuugauuu

SEQ ID NO: 286130 - RNA, 32 nt, Human
aaaugaaacaggcuucucagggacauauccac

SEQ ID NO: 286131 - RNA, 32 nt, Human
aaaugaaaccgcauuuugggugccauuaaaua

SEQ ID NO: 286132 - RNA, 29 nt, Human
aaaugaaagaaaaagaaagagaggaaagg

SEQ ID NO: 286133 - RNA, 32 nt, Human
aaaugaaagccaucugacaguuggcucacauu

SEQ ID NO: 286134 - RNA, 32 nt, Human
aaaugaaagccuuuuugcauguacuugauacu

SEQ ID NO: 286135 - RNA, 32 nt, Human
aaaugaaagguuuuuaccuagauacuguaagu

SEQ ID NO: 286136 - RNA, 32 nt, Human
aaaugaaaguaaacaugguuacauuugaaucu

SEQ ID NO: 286137 - RNA, 32 nt, Human
aaaugaaaucacacuuggauauauuguuaaac

SEQ ID NO: 286138 - RNA, 32 nt, Human
aaaugaaaucauucacaaacuuuugguauaug

SEQ ID NO: 286139 - RNA, 32 nt, Human
aaaugaaauguuugaaagugaguggucaaaag

SEQ ID NO: 286140 - RNA, 32 nt, Human
aaaugaaauuucuccacaagaaauacucucag

SEQ ID NO: 286141 - RNA, 32 nt, Human
aaaugaacaaagcaaaggauacagagguaugu

SEQ ID NO: 286142 - RNA, 27 nt, Human
aaaugaacacagaagcggagcaacagc

SEQ ID NO: 286143 - RNA, 32 nt, Human
aaaugaaccacucaagugguagugacuccagc

SEQ ID NO: 286144 - RNA, 27 nt, Human
aaaugaacgagacuauauuuugcuugg

SEQ ID NO: 286145 - RNA, 32 nt, Human
aaaugaacuaggcaggugaggugguguuugcc

SEQ ID NO: 286146 - RNA, 32 nt, Human
aaaugaacuauucuccuuguaaagcuaaauuc

SEQ ID NO: 286147 - RNA, 32 nt, Human
aaaugaacucacugcauuucugugcucccucc

SEQ ID NO: 286148 - RNA, 32 nt, Human
aaaugaacugaaguuucacaugagcuauuucc

SEQ ID NO: 286149 - RNA, 32 nt, Human
aaaugaagaauagggcugggcacaguggcuca

SEQ ID NO: 286150 - RNA, 32 nt, Human
aaaugaagacacgcccgacucucuccaucaga

SEQ ID NO: 286151 - RNA, 32 nt, Human
aaaugaagacugccugccccagccccucccgc

SEQ ID NO: 286152 - RNA, 32 nt, Human
aaaugaagagaggcacgccaaccacuccaaaa

SEQ ID NO: 286153 - RNA, 32 nt, Human
aaaugaagaggaacucccucuuucuacagcuc

SEQ ID NO: 286154 - RNA, 32 nt, Human
aaaugaagauacacauuacagccagguguggu

SEQ ID NO: 286155 - RNA, 32 nt, Human
aaaugaagaugaugcacauggcccacugcgug

SEQ ID NO: 286156 - RNA, 32 nt, Human
aaaugaagcagaaaccaagaaaagcaaauaug

SEQ ID NO: 286157 - RNA, 32 nt, Human
aaaugaagcccccuccuguggggacagcucag

SEQ ID NO: 286158 - RNA, 32 nt, Human
aaaugaaggaguaaguuaucaggccuuauuua

SEQ ID NO: 286159 - RNA, 32 nt, Human
aaaugaaggcaugagaggaaguaaguagcaag

SEQ ID NO: 286160 - RNA, 32 nt, Human
aaaugaaggcccggagaagggaagggacuuga

SEQ ID NO: 286161 - RNA, 32 nt, Human
aaaugaagggucuauaugacagcaaccauugu

SEQ ID NO: 286162 - RNA, 27 nt, Human
aaaugaaguacagagagcaaggcuccg

SEQ ID NO: 286163 - RNA, 32 nt, Human
aaaugaaguuuauauuaucaaggggacuaaag

SEQ ID NO: 286164 - RNA, 32 nt, Human
aaaugaauaugcugggcugugccagagaauaa

SEQ ID NO: 286165 - RNA, 32 nt, Human
aaaugaaucaagcucauuaugaaaccaguaaa

SEQ ID NO: 286166 - RNA, 32 nt, Human
aaaugaaucacaaacagagcaccaagaaaaag

SEQ ID NO: 286167 - RNA, 32 nt, Human
aaaugaaucuucuacccuucucccacaaugua

SEQ ID NO: 286168 - RNA, 32 nt, Human
aaaugaaugaacauguggugguuacaggcaaa

SEQ ID NO: 286169 - RNA, 32 nt, Human
aaaugaaugcagauugcgaaggucccugcaaa

SEQ ID NO: 286170 - RNA, 32 nt, Human
aaaugaauguaccauugacaaugguggcuguc

SEQ ID NO: 286171 - RNA, 32 nt, Human
aaaugaaugucuuguuccugugcauugguggc

SEQ ID NO: 286172 - RNA, 32 nt, Human
aaaugaauguguuuguugagauauuacaguaa

SEQ ID NO: 286173 - RNA, 32 nt, Human
aaaugaauugcaaguugccacaaccuauggug

SEQ ID NO: 286174 - RNA, 32 nt, Human
aaaugaauuuccuauaaauuaucauuggucag

SEQ ID NO: 286175 - RNA, 32 nt, Human
aaaugaauuugcauccugaggaagucucuucu

SEQ ID NO: 286176 - RNA, 32 nt, Human
aaaugacacaccuacucccaggaacagcagag

SEQ ID NO: 286177 - RNA, 32 nt, Human
aaaugacacagaacuauauacacacauuguac

SEQ ID NO: 286178 - RNA, 32 nt, Human
aaaugacacagaacuguauacacacauuguac

SEQ ID NO: 286179 - RNA, 32 nt, Human
aaaugacacagaacuuuguacuuuucagcucu

SEQ ID NO: 286180 - RNA, 32 nt, Human
aaaugacaccauaucaggguucugguucccua

SEQ ID NO: 286181 - RNA, 32 nt, Human
aaaugacaccccaguaaucuagaacauucuca

SEQ ID NO: 286182 - RNA, 31 nt, Human
aaaugacagugaauugacccauguucccuuu

SEQ ID NO: 286183 - RNA, 20 nt, Human
aaaugacagugugacagcuu

SEQ ID NO: 286184 - RNA, 32 nt, Human
aaaugacaguuugcuaaugauggucacuuccu

SEQ ID NO: 286185 - RNA, 32 nt, Human
aaaugacaucucucagcccucucagcugcacc

SEQ ID NO: 286186 - RNA, 32 nt, Human
aaaugacauguuuguauguaacuuacccacau

SEQ ID NO: 286187 - RNA, 27 nt, Human
aaaugaccaagucccuggaaucagugu

SEQ ID NO: 286188 - RNA, 32 nt, Human
aaaugaccaauacuuuuugaaauugauguacu

SEQ ID NO: 286189 - RNA, 32 nt, Human
aaaugaccaguggugugaucauagcucauagc

SEQ ID NO: 286190 - RNA, 32 nt, Human
aaaugaccaugaggaggaggaggggaaagcgc

SEQ ID NO: 286191 - RNA, 32 nt, Human
aaaugacccauucccugcccaccagaaacuca

SEQ ID NO: 286192 - RNA, 23 nt, Human
aaaugacccuuagggccaggaaa

SEQ ID NO: 286193 - RNA, 32 nt, Human
aaaugaccuaugcccaaagaacaaauacuuaa

SEQ ID NO: 286194 - RNA, 32 nt, Human
aaaugaccuguuugagaaaacucuuucugagu

SEQ ID NO: 286195 - RNA, 32 nt, Human
aaaugacgccauugcacuccagccuaggcaau

SEQ ID NO: 286196 - RNA, 32 nt, Human
aaaugacgggaguguacucagcuuugagccua

SEQ ID NO: 286197 - RNA, 32 nt, Human
aaaugacucagagugugcuuguccuucccuaa

SEQ ID NO: 286198 - RNA, 32 nt, Human
aaaugacugcaauaacaaugauucauucauua

SEQ ID NO: 286199 - RNA, 32 nt, Human
aaaugacuggcuuagaggcagcagcacuuggu

SEQ ID NO: 286200 - RNA, 32 nt, Human
aaaugacuggugcccaggaagcucugggcaua

SEQ ID NO: 286201 - RNA, 32 nt, Human
aaaugacuuccaggaaaggaagcaugguauau

SEQ ID NO: 286202 - RNA, 32 nt, Human
aaaugacuuccccacauugacauuugugcgcc

SEQ ID NO: 286203 - RNA, 32 nt, Human
aaaugacuuuggguuuugaacucuccaucuag

SEQ ID NO: 286204 - RNA, 32 nt, Human
aaaugacuuuuaggcugggugcaguggcucac

SEQ ID NO: 286205 - RNA, 32 nt, Human
aaaugacuuuugugccuuucugcuccagucuc

SEQ ID NO: 286206 - RNA, 25 nt, Human
aaaugacuuuuugucaguuguuuug

SEQ ID NO: 286207 - RNA, 32 nt, Human
aaaugagaaaaaugcccauuugugcacaagaa

SEQ ID NO: 286208 - RNA, 32 nt, Human
aaaugagaaggcagccaccagcgaaugcuagg

SEQ ID NO: 286209 - RNA, 32 nt, Human
aaaugagaaguaaaggcagaugaaaagaaaaa

SEQ ID NO: 286210 - RNA, 32 nt, Human
aaaugagagacaacaguccugugcaucuucag

SEQ ID NO: 286211 - RNA, 32 nt, Human
aaaugagagaugcagaauucuaaggcuaaaua

SEQ ID NO: 286212 - RNA, 23 nt, Human
aaaugagaggaggaaagacaucc

SEQ ID NO: 286213 - RNA, 32 nt, Human
aaaugagaggccucaauaaagacaucuggggc

SEQ ID NO: 286214 - RNA, 32 nt, Human
aaaugagaggugagcucauucuucugaaaugg

SEQ ID NO: 286215 - RNA, 32 nt, Human
aaaugagaguaaucaugcccacccucauuguc

SEQ ID NO: 286216 - RNA, 32 nt, Human
aaaugagauagaagaaaaguaagaaccaagau

SEQ ID NO: 286217 - RNA, 32 nt, Human
aaaugagaucaggcucugccucaccuuggggc

SEQ ID NO: 286218 - RNA, 32 nt, Human
aaaugagauccaggcuggagcggcugugccag

SEQ ID NO: 286219 - RNA, 32 nt, Human
aaaugagauggcacuuuaaucuuuauugauua

SEQ ID NO: 286220 - RNA, 32 nt, Human
aaaugagcaaaagaugaguccuugcuucccuc

SEQ ID NO: 286221 - RNA, 32 nt, Human
aaaugagcacacugcuggcccaugcgccucgg

SEQ ID NO: 286222 - RNA, 32 nt, Human
aaaugagcacugaccugaguuugaguugacuu

SEQ ID NO: 286223 - RNA, 32 nt, Human
aaaugagccaguuaucaaagaagaacuaguuc

SEQ ID NO: 286224 - RNA, 32 nt, Human
aaaugagccaguuaucaaagaagaacuaguuu

SEQ ID NO: 286225 - RNA, 32 nt, Human
aaaugagcucgggugacugcagauuaugaugg

SEQ ID NO: 286226 - RNA, 32 nt, Human
aaaugagcucucugccaagguuuuaagauaau

SEQ ID NO: 286227 - RNA, 32 nt, Human
aaaugagcugcuugccuuuccaccuccagggc

SEQ ID NO: 286228 - RNA, 32 nt, Human
aaaugaggaaacugaggcuuggugaaguuacg

SEQ ID NO: 286229 - RNA, 32 nt, Human
aaaugaggaaaucaaauuaaugaguugacaaa

SEQ ID NO: 286230 - RNA, 32 nt, Human
aaaugaggaagugacgcccagcaagguucaga

SEQ ID NO: 286231 - RNA, 32 nt, Human
aaaugaggagcuuggaagauccggaaaaugag

SEQ ID NO: 286232 - RNA, 32 nt, Human
aaaugaggaggcuguuuuccucugauucuccu

SEQ ID NO: 286233 - RNA, 27 nt, Human
aaaugaggcaacaugaugugcaggaac

SEQ ID NO: 286234 - RNA, 32 nt, Human
aaaugaggcaugaguuacugugcauugggauu

SEQ ID NO: 286235 - RNA, 32 nt, Human
aaaugaggcuaacagaccagacugcagcaagu

SEQ ID NO: 286236 - RNA, 32 nt, Human
aaaugaggcuuucugggucugccuguaugucu

SEQ ID NO: 286237 - RNA, 32 nt, Human
aaaugagggagagagaaaggguggccacuuuc

SEQ ID NO: 286238 - RNA, 32 nt, Human
aaaugagguaacugaggcucagggaggcacug

SEQ ID NO: 286239 - RNA, 20 nt, Human
aaaugaggugauaauagcuu

SEQ ID NO: 286240 - RNA, 32 nt, Human
aaaugaguaaauucagcacugguaccuuauua

SEQ ID NO: 286241 - RNA, 32 nt, Human
aaaugaguauucacauauaagagaugaacauc

SEQ ID NO: 286242 - RNA, 32 nt, Human
aaaugagucaguuagguagucuggaagagaga

SEQ ID NO: 286243 - RNA, 32 nt, Human
aaaugagucauuuuggaaaugauucuuauguu

SEQ ID NO: 286244 - RNA, 32 nt, Human
aaaugagucucaugccuguaaucccagcacuu

SEQ ID NO: 286245 - RNA, 32 nt, Human
aaaugagugagcugggaaguguuuccaaauac

SEQ ID NO: 286246 - RNA, 32 nt, Human
aaaugagugagggaaguucauaagguaaaucc

SEQ ID NO: 286247 - RNA, 32 nt, Human
aaaugagugauugauuuuaaugaggauugcua

SEQ ID NO: 286248 - RNA, 32 nt, Human
aaaugagugcagguugaaagaaaacaggugaa

SEQ ID NO: 286249 - RNA, 21 nt, Human
aaaugaguggccagcgccagg

SEQ ID NO: 286250 - RNA, 32 nt, Human
aaaugagugggcuaggaggacaaggaccgucu

SEQ ID NO: 286251 - RNA, 32 nt, Human
aaaugaguggggcggugaggggaaggaggagg

SEQ ID NO: 286252 - RNA, 32 nt, Human
aaaugagugugaagggggaacaagucaaaaua

SEQ ID NO: 286253 - RNA, 32 nt, Human
aaaugaguguucccuggaacaaggaggugggg

SEQ ID NO: 286254 - RNA, 32 nt, Human
aaaugaguuuacugcauuuuucaauccagauu

SEQ ID NO: 286255 - RNA, 32 nt, Human
aaaugaguuugggcugggcaugguggcucaca

SEQ ID NO: 286256 - RNA, 32 nt, Human
aaaugaguuuuuaauuaauaaauccuacagua

SEQ ID NO: 286257 - RNA, 32 nt, Human
aaaugauaaaaauuaagaaagagauuuugaag

SEQ ID NO: 286258 - RNA, 32 nt, Human
aaaugauaagcaaaauccucuuauuuucuaua

SEQ ID NO: 286259 - RNA, 32 nt, Human
aaaugauacaggguugguucucauuucgugcc

SEQ ID NO: 286260 - RNA, 32 nt, Human
aaaugauagcagccccgcacuugcuguaggaa

SEQ ID NO: 286261 - RNA, 32 nt, Human
aaaugaucagccaugccacugaagagcuggag

SEQ ID NO: 286262 - RNA, 32 nt, Human
aaaugaucagucucugucuccugggcccugcu

SEQ ID NO: 286263 - RNA, 32 nt, Human
aaaugauccuaccagugauuaguggcuauuga

SEQ ID NO: 286264 - RNA, 32 nt, Human
aaaugaucguucucacacucauauuagcucau

SEQ ID NO: 286265 - RNA, 32 nt, Human
aaaugaucucugaaagcauugccagcagccag

SEQ ID NO: 286266 - RNA, 32 nt, Human
aaaugaucugugcugaucuguucucuagugug

SEQ ID NO: 286267 - RNA, 32 nt, Human
aaaugaucuugaaugagugaaaaaucaguuug

SEQ ID NO: 286268 - RNA, 32 nt, Human
aaaugaucuuucaaguuucauaccuuuuggac

SEQ ID NO: 286269 - RNA, 32 nt, Human
aaaugaugaaauuuccagacagaaagagcccu

SEQ ID NO: 286270 - RNA, 32 nt, Human
aaaugaugaauaaccaguaccaguuccaguuc

SEQ ID NO: 286271 - RNA, 32 nt, Human
aaaugaugacacagcaguugccaucuugaaaa

SEQ ID NO: 286272 - RNA, 32 nt, Human
aaaugaugaccagcuaauuaaagaagauauuu

SEQ ID NO: 286273 - RNA, 32 nt, Human
aaaugaugaguuuuuaugguuccaaugaaaua

SEQ ID NO: 286274 - RNA, 27 nt, Human
aaaugauggcaagacugcuaagaacau

SEQ ID NO: 286275 - RNA, 32 nt, Human
aaaugaugugccagcuaaaauugugugccauu

SEQ ID NO: 286276 - RNA, 32 nt, Human
aaaugauguggaccuugcuggaaacaaaggcu

SEQ ID NO: 286277 - RNA, 32 nt, Human
aaaugauguuggcgggcuacaccccauucaca

SEQ ID NO: 286278 - RNA, 32 nt, Human
aaaugauuacuacccaugagauauauuuuuaa

SEQ ID NO: 286279 - RNA, 32 nt, Human
aaaugauuacuuucauccauccauuauaacaa

SEQ ID NO: 286280 - RNA, 32 nt, Human
aaaugauuagaaguaccuaauaguuugaacag

SEQ ID NO: 286281 - RNA, 32 nt, Human
aaaugauucacccaucccaagacuuucucacc

SEQ ID NO: 286282 - RNA, 32 nt, Human
aaaugauucauacaggcuguuuaaguacugca

SEQ ID NO: 286283 - RNA, 31 nt, Human
aaaugauugauucucccuggacaaagcagga

SEQ ID NO: 286284 - RNA, 32 nt, Human
aaaugauugcauucucauugagcaugaaaguc

SEQ ID NO: 286285 - RNA, 32 nt, Human
aaaugauuucuucagaucucaaaggagucuga

SEQ ID NO: 286286 - RNA, 32 nt, Human
aaaugauuugguagugaagccaggacaucuac

SEQ ID NO: 286287 - RNA, 32 nt, Human
aaaugcaaacacacaaagguauaauuuuauga

SEQ ID NO: 286288 - RNA, 32 nt, Human
aaaugcaaagaauaaagaacugagggaguuac

SEQ ID NO: 286289 - RNA, 32 nt, Human
aaaugcaaaugagacuccuggaaacugggugg

SEQ ID NO: 286290 - RNA, 32 nt, Human
aaaugcaaccaacugcugcugugcacauuuau

SEQ ID NO: 286291 - RNA, 32 nt, Human
aaaugcaacuguugauuuccucaacauggcuc

SEQ ID NO: 286292 - RNA, 32 nt, Human
aaaugcaagagggagaggggaaggagcuggua

SEQ ID NO: 286293 - RNA, 32 nt, Human
aaaugcaagaucaaggcuuggcccagaaacga

SEQ ID NO: 286294 - RNA, 32 nt, Human
aaaugcaaugacuggcugggugcaguggcuca

SEQ ID NO: 286295 - RNA, 25 nt, Human
aaaugcacacacaugcacacacaca

SEQ ID NO: 286296 - RNA, 32 nt, Human
aaaugcacacacaugcacacacacauuucagg

SEQ ID NO: 286297 - RNA, 32 nt, Human
aaaugcacagggcauaucuuuguuaaaguaga

SEQ ID NO: 286298 - RNA, 32 nt, Human
aaaugcaccacugcacuccagcaugggcaaca

SEQ ID NO: 286299 - RNA, 32 nt, Human
aaaugcacgaugaggagugcacugccucggga

SEQ ID NO: 286300 - RNA, 32 nt, Human
aaaugcacgcaagccauuaucucuccauggga

SEQ ID NO: 286301 - RNA, 32 nt, Human
aaaugcacuguucucagcccagcuggguucca

SEQ ID NO: 286302 - RNA, 31 nt, Human
aaaugcacuucucccucaaggagugggcuug

SEQ ID NO: 286303 - RNA, 32 nt, Human
aaaugcagaauuaaagagucauggcagggugu

SEQ ID NO: 286304 - RNA, 32 nt, Human
aaaugcagacgaagcauguaagaaauauuuag

SEQ ID NO: 286305 - RNA, 32 nt, Human
aaaugcagacuggccaggcacaguggcucaca

SEQ ID NO: 286306 - RNA, 32 nt, Human
aaaugcagagguaucaucuuucuuggaaacca

SEQ ID NO: 286307 - RNA, 32 nt, Human
aaaugcagccaagaagaggagaccgucggcaa

SEQ ID NO: 286308 - RNA, 32 nt, Human
aaaugcagcccaggcagaggacggugcagcca

SEQ ID NO: 286309 - RNA, 31 nt, Human
aaaugcagccucucucggggccucaucucag

SEQ ID NO: 286310 - RNA, 32 nt, Human
aaaugcagcuagauucaaaugggcugauaacc

SEQ ID NO: 286311 - RNA, 32 nt, Human
aaaugcagcucccuguccaagugccuuggaga

SEQ ID NO: 286312 - RNA, 32 nt, Human
aaaugcagcuuuuccaggguugcuggacuggg

SEQ ID NO: 286313 - RNA, 32 nt, Human
aaaugcaggaaggcugucucgccauccucaag

SEQ ID NO: 286314 - RNA, 32 nt, Human
aaaugcaggaggggugcuugccuccaaauagu

SEQ ID NO: 286315 - RNA, 32 nt, Human
aaaugcaggcugggcgcgguggcucacgccug

SEQ ID NO: 286316 - RNA, 32 nt, Human
aaaugcagggaggggaggcagauggagcccau

SEQ ID NO: 286317 - RNA, 32 nt, Human
aaaugcagguccaccagggagggagacacaca

SEQ ID NO: 286318 - RNA, 32 nt, Human
aaaugcaggugagaugcaagguuuucuaagug

SEQ ID NO: 286319 - RNA, 32 nt, Human
aaaugcaguacauuugaaaauuuuuagauuau

SEQ ID NO: 286320 - RNA, 32 nt, Human
aaaugcagugccuagagagagaguauugucuc

SEQ ID NO: 286321 - RNA, 32 nt, Human
aaaugcagugucugccuguuacagcaaaagaa

SEQ ID NO: 286322 - RNA, 32 nt, Human
aaaugcaguuauggauuucgcaguucaacucu

SEQ ID NO: 286323 - RNA, 32 nt, Human
aaaugcauaagguuaguacaagaucaguagag

SEQ ID NO: 286324 - RNA, 25 nt, Human
aaaugcauacacauacaugcacaca

SEQ ID NO: 286325 - RNA, 32 nt, Human
aaaugcauaugagauuauuaccaaugacaccg

SEQ ID NO: 286326 - RNA, 32 nt, Human
aaaugcaucaccuuugaaaauauuucacauau

SEQ ID NO: 286327 - RNA, 32 nt, Human
aaaugcaucacugugggugugaccucggcgug

SEQ ID NO: 286328 - RNA, 32 nt, Human
aaaugcaucauugcacuccagccugggugaca

SEQ ID NO: 286329 - RNA, 32 nt, Human
aaaugcaucccuuucuauuucucuccggauau

SEQ ID NO: 286330 - RNA, 27 nt, Human
aaaugcaucuuccuucuguucucucca

SEQ ID NO: 286331 - RNA, 32 nt, Human
aaaugcaucuuugccagcugaacuugucaugc

SEQ ID NO: 286332 - RNA, 32 nt, Human
aaaugcaucuuuucauguguccuuccugagca

SEQ ID NO: 286333 - RNA, 32 nt, Human
aaaugcaugacuucccuccaccccuacucuau

SEQ ID NO: 286334 - RNA, 32 nt, Human
aaaugcauggggugggacagguaggaguggcu

SEQ ID NO: 286335 - RNA, 32 nt, Human
aaaugcauguauuuuaaauacugguuaaaucu

SEQ ID NO: 286336 - RNA, 32 nt, Human
aaaugcauuuauguaagaucugugaguacuua

SEQ ID NO: 286337 - RNA, 32 nt, Human
aaaugccaaaaacauggaaugcuggaagccaa

SEQ ID NO: 286338 - RNA, 28 nt, Human
aaaugccaaaaaugugccucauuaagag

SEQ ID NO: 286339 - RNA, 32 nt, Human
aaaugccaaaguagcugauguauuggacguuc

SEQ ID NO: 286340 - RNA, 32 nt, Human
aaaugccaaauuugaaaggccuguacugcaau

SEQ ID NO: 286341 - RNA, 30 nt, Human
aaaugccaacuaaacaugaaacuauugauc

SEQ ID NO: 286342 - RNA, 32 nt, Human
aaaugccaaucaggagacaaacacuuguuuau

SEQ ID NO: 286343 - RNA, 32 nt, Human
aaaugccacuagagagagagugaugcaagcug

SEQ ID NO: 286344 - RNA, 32 nt, Human
aaaugccacuagcaccuggugugguacaggag

SEQ ID NO: 286345 - RNA, 32 nt, Human
aaaugccacuucugaggaauggaccuggugua

SEQ ID NO: 286346 - RNA, 32 nt, Human
aaaugccauuggauagaaggggacuguucuuc

SEQ ID NO: 286347 - RNA, 32 nt, Human
aaaugcccaagccaugguuaaaguucaauaaa

SEQ ID NO: 286348 - RNA, 32 nt, Human
aaaugcccagauguagaaauucaucagugccu

SEQ ID NO: 286349 - RNA, 32 nt, Human
aaaugcccagccugccccaaaugccucuaagc

SEQ ID NO: 286350 - RNA, 27 nt, Human
aaaugcccaggaggaagcaggagcagc

SEQ ID NO: 286351 - RNA, 32 nt, Human
aaaugcccaguaacuuuacagagcaaaauuuu

SEQ ID NO: 286352 - RNA, 32 nt, Human
aaaugcccauuuguaaaugagaaaaaugccca

SEQ ID NO: 286353 - RNA, 32 nt, Human
aaaugccccuacugaagacugggcucaaagga

SEQ ID NO: 286354 - RNA, 32 nt, Human
aaaugcccuggguucuuuagucuuccaaggga

SEQ ID NO: 286355 - RNA, 32 nt, Human
aaaugcccuuaaauuucaccauuugucuuuca

SEQ ID NO: 286356 - RNA, 32 nt, Human
aaaugccgcuucacugcugaagacaccaucug

SEQ ID NO: 286357 - RNA, 32 nt, Human
aaaugccgggauuacaggcaugagccaccgcu

SEQ ID NO: 286358 - RNA, 32 nt, Human
aaaugccguucccggcucggcucuggcagccc

SEQ ID NO: 286359 - RNA, 32 nt, Human
aaaugccuauaaucccagcuacucgggaggcu

SEQ ID NO: 286360 - RNA, 32 nt, Human
aaaugccuauguuucaggcaugauacuaggca

SEQ ID NO: 286361 - RNA, 32 nt, Human
aaaugccucacucuccugagaaacccagaaag

SEQ ID NO: 286362 - RNA, 32 nt, Human
aaaugccucuacuacucagccccuuucugcac

SEQ ID NO: 286363 - RNA, 32 nt, Human
aaaugccucucccauccucucucaggaagcuu

SEQ ID NO: 286364 - RNA, 32 nt, Human
aaaugccucuuaucccugaauucagagugaua

SEQ ID NO: 286365 - RNA, 32 nt, Human
aaaugccugcaacccagggcagggggcugaga

SEQ ID NO: 286366 - RNA, 32 nt, Human
aaaugccugcagcuuccagcuccuucgucccu

SEQ ID NO: 286367 - RNA, 32 nt, Human
aaaugccugcccaccugccccucuuccaucca

SEQ ID NO: 286368 - RNA, 32 nt, Human
aaaugccugccucuggccuuggcuguaggcca

SEQ ID NO: 286369 - RNA, 32 nt, Human
aaaugccuggagagccgaguugcagugcugga

SEQ ID NO: 286370 - RNA, 32 nt, Human
aaaugccuguaauaccagcuacucaggagcug

SEQ ID NO: 286371 - RNA, 32 nt, Human
aaaugccuguaaucccagcacuuugggaggcc

SEQ ID NO: 286372 - RNA, 32 nt, Human
aaaugccuguaaucccaguacuuugggaggcu

SEQ ID NO: 286373 - RNA, 32 nt, Human
aaaugccuguauuugaagucucuccccuuccu

SEQ ID NO: 286374 - RNA, 32 nt, Human
aaaugccuguccugccauccucccagguaguc

SEQ ID NO: 286375 - RNA, 27 nt, Human
aaaugccugucuggggagguggaaaca

SEQ ID NO: 286376 - RNA, 32 nt, Human
aaaugccuguguacaacaaugcuuugauaaaa

SEQ ID NO: 286377 - RNA, 32 nt, Human
aaaugccuguuucauaggaccuucugaaauga

SEQ ID NO: 286378 - RNA, 32 nt, Human
aaaugccuucuaagcugggggaggcgguaccu

SEQ ID NO: 286379 - RNA, 32 nt, Human
aaaugccuugacuuugugacugauugugcaag

SEQ ID NO: 286380 - RNA, 32 nt, Human
aaaugccuuucuguguuucugaaucagaagca

SEQ ID NO: 286381 - RNA, 32 nt, Human
aaaugccuuuggaugacccagcacuuuaaucu

SEQ ID NO: 286382 - RNA, 32 nt, Human
aaaugccuuuuugggcugggcacaguggcuua

SEQ ID NO: 286383 - RNA, 32 nt, Human
aaaugcgcaugaguccccaaccccuuguuucu

SEQ ID NO: 286384 - RNA, 32 nt, Human
aaaugcggaagaguuagccaggcgugguggca

SEQ ID NO: 286385 - RNA, 32 nt, Human
aaaugcggagugaaagagcaggagccagacac

SEQ ID NO: 286386 - RNA, 32 nt, Human
aaaugcgggcugggccuacccccugguggcca

SEQ ID NO: 286387 - RNA, 32 nt, Human
aaaugcuaaaggaaggucuucaaucagaaaca

SEQ ID NO: 286388 - RNA, 32 nt, Human
aaaugcuacagcugugagagcuuguuucugau

SEQ ID NO: 286389 - RNA, 32 nt, Human
aaaugcuacgccauuauaagccaguggaguaa

SEQ ID NO: 286390 - RNA, 32 nt, Human
aaaugcuagccuuugugcugggcagcaaagca

SEQ ID NO: 286391 - RNA, 32 nt, Human
aaaugcucaacuuguaucagguaauguuagca

SEQ ID NO: 286392 - RNA, 31 nt, Human
aaaugcucaaugucugaugcuaagugggaga

SEQ ID NO: 286393 - RNA, 32 nt, Human
aaaugcucaguuacaauuuccugcagaugaac

SEQ ID NO: 286394 - RNA, 32 nt, Human
aaaugcucccagagagcugcaugugacucccu

SEQ ID NO: 286395 - RNA, 32 nt, Human
aaaugcucucacugcccuacgcauuacaugcu

SEQ ID NO: 286396 - RNA, 32 nt, Human
aaaugcucucauaagaauuauugcauaccauc

SEQ ID NO: 286397 - RNA, 32 nt, Human
aaaugcucuguuacugauuagucuuaucaucc

SEQ ID NO: 286398 - RNA, 32 nt, Human
aaaugcucuuccuugagccuguuuccacaccu

SEQ ID NO: 286399 - RNA, 32 nt, Human
aaaugcugagaucugaggggacaaggcucuac

SEQ ID NO: 286400 - RNA, 32 nt, Human
aaaugcugagauuacaggugugagccaccaug

SEQ ID NO: 286401 - RNA, 32 nt, Human
aaaugcugagauuacaggugugagccacugca

SEQ ID NO: 286402 - RNA, 32 nt, Human
aaaugcugagauuacaggugugagugcccaug

SEQ ID NO: 286403 - RNA, 32 nt, Human
aaaugcugcucauugagccaaagagaagaaau

SEQ ID NO: 286404 - RNA, 32 nt, Human
aaaugcuggaagguggggcuuagugaugaaac

SEQ ID NO: 286405 - RNA, 21 nt, Human
aaaugcugggauuacagacau

SEQ ID NO: 286406 - RNA, 32 nt, Human
aaaugcugggauuacagacaugaaccaccacg

SEQ ID NO: 286407 - RNA, 32 nt, Human
aaaugcugggauuacagaugugagccaccaca

SEQ ID NO: 286408 - RNA, 32 nt, Human
aaaugcugggauuacaggagugagccaccaug

SEQ ID NO: 286409 - RNA, 32 nt, Human
aaaugcugggauuacaggcauaagccaccgug

SEQ ID NO: 286410 - RNA, 32 nt, Human
aaaugcugggauuacaggcaugagccaccaca

SEQ ID NO: 286411 - RNA, 32 nt, Human
aaaugcugggauuacaggcaugagccaccgcg

SEQ ID NO: 286412 - RNA, 32 nt, Human
aaaugcugggauuacaggcaugagccaccgug

SEQ ID NO: 286413 - RNA, 32 nt, Human
aaaugcugggauuacaggcaugagccaccugc

SEQ ID NO: 286414 - RNA, 32 nt, Human
aaaugcugggauuacaggcaugagccacugcg

SEQ ID NO: 286415 - RNA, 32 nt, Human
aaaugcugggauuacaggcaugagccacugua

SEQ ID NO: 286416 - RNA, 32 nt, Human
aaaugcugggauuacaggccugagccacugcg

SEQ ID NO: 286417 - RNA, 32 nt, Human
aaaugcugggauuacaggcguaagccacuauc

SEQ ID NO: 286418 - RNA, 32 nt, Human
aaaugcugggauuacaggcguaagccacugca

SEQ ID NO: 286419 - RNA, 32 nt, Human
aaaugcugggauuacaggcgugagccaccacg

SEQ ID NO: 286420 - RNA, 32 nt, Human
aaaugcugggauuacaggcgugagccaccaug

SEQ ID NO: 286421 - RNA, 32 nt, Human
aaaugcugggauuacaggcgugagccaccgag

SEQ ID NO: 286422 - RNA, 32 nt, Human
aaaugcugggauuacaggcgugagccaccgcg

SEQ ID NO: 286423 - RNA, 32 nt, Human
aaaugcugggauuacaggcgugagccacggca

SEQ ID NO: 286424 - RNA, 32 nt, Human
aaaugcugggauuacaggcgugagccacugca

SEQ ID NO: 286425 - RNA, 32 nt, Human
aaaugcugggauuacaggcgugagccacuggc

SEQ ID NO: 286426 - RNA, 32 nt, Human
aaaugcugggauuacaggcuugagccacugcu

SEQ ID NO: 286427 - RNA, 32 nt, Human
aaaugcugggauuacagggguaagccacugug

SEQ ID NO: 286428 - RNA, 32 nt, Human
aaaugcugggauuacaggggugagccaccgug

SEQ ID NO: 286429 - RNA, 32 nt, Human
aaaugcugggauuacaggugugagccacaguu

SEQ ID NO: 286430 - RNA, 32 nt, Human
aaaugcugggauuacaggugugagccaccgcg

SEQ ID NO: 286431 - RNA, 32 nt, Human
aaaugcugggauuacaggugugagccaccgug

SEQ ID NO: 286432 - RNA, 32 nt, Human
aaaugcugggauuacaggugugagccacugcg

SEQ ID NO: 286433 - RNA, 32 nt, Human
aaaugcugggauuacaggugugagccacugug

SEQ ID NO: 286434 - RNA, 32 nt, Human
aaaugcugucacagacccaucccuguggcauc

SEQ ID NO: 286435 - RNA, 32 nt, Human
aaaugcuuacagggaaaggggaaaguggauca

SEQ ID NO: 286436 - RNA, 32 nt, Human
aaaugcuuccuucacauccucugugaugauca

SEQ ID NO: 286437 - RNA, 32 nt, Human
aaaugcuucucaacuuugaugauggcuccagu

SEQ ID NO: 286438 - RNA, 32 nt, Human
aaaugcuugcuuuuuguucccuaguuggucua

SEQ ID NO: 286439 - RNA, 32 nt, Human
aaaugcuuuaccccacgccuguuuguauuggg

SEQ ID NO: 286440 - RNA, 32 nt, Human
aaaugcuuuauaacaagaaucuucuucaucuu

SEQ ID NO: 286441 - RNA, 32 nt, Human
aaaugcuuucaucuauguuuaucacauuuuaa

SEQ ID NO: 286442 - RNA, 32 nt, Human
aaaugcuuuguuggcaccucagauuaaucaua

SEQ ID NO: 286443 - RNA, 32 nt, Human
aaauggaaaagaaacuuggauuaaaugagugu

SEQ ID NO: 286444 - RNA, 32 nt, Human
aaauggaaaaggagaggcuacuucaaguggug

SEQ ID NO: 286445 - RNA, 32 nt, Human
aaauggaacagcucuuagcagcugugguuuuu

SEQ ID NO: 286446 - RNA, 32 nt, Human
aaauggaacggcuucucaucuuucugccguuu

SEQ ID NO: 286447 - RNA, 32 nt, Human
aaauggaagagcaggucacugaagaagauccu

SEQ ID NO: 286448 - RNA, 32 nt, Human
aaauggaagauggagucagcuauugaaguggu

SEQ ID NO: 286449 - RNA, 32 nt, Human
aaauggaagcacauggcacugggaaauaggag

SEQ ID NO: 286450 - RNA, 32 nt, Human
aaauggaaggaaugugcuugccugucaggugc

SEQ ID NO: 286451 - RNA, 32 nt, Human
aaauggaaggaucgcuugaggcccagagucug

SEQ ID NO: 286452 - RNA, 32 nt, Human
aaauggaagguaaacugcauagcccagagaaa

SEQ ID NO: 286453 - RNA, 32 nt, Human
aaauggaaguaccagcagaagguuagagaaaa

SEQ ID NO: 286454 - RNA, 20 nt, Human
aaauggaaugauaauagcuu

SEQ ID NO: 286455 - RNA, 32 nt, Human
aaauggaauguucacccuacuaccaaugggga

SEQ ID NO: 286456 - RNA, 32 nt, Human
aaauggacaacuugguuguccagacagguuga

SEQ ID NO: 286457 - RNA, 32 nt, Human
aaauggacagacaacauggaauauaauaacau

SEQ ID NO: 286458 - RNA, 27 nt, Human
aaauggaccagccagguuugcauagca

SEQ ID NO: 286459 - RNA, 32 nt, Human
aaauggacccuuuaaaaauuauuuuuaccuga

SEQ ID NO: 286460 - RNA, 32 nt, Human
aaauggaccugacagcccaaacugucagagag

SEQ ID NO: 286461 - RNA, 27 nt, Human
aaauggacucacugucaucuuccuuca

SEQ ID NO: 286462 - RNA, 32 nt, Human
aaauggacuuuuauuuucucucuguuuggugc

SEQ ID NO: 286463 - RNA, 32 nt, Human
aaauggagagaaggaaacaucuccagauuuug

SEQ ID NO: 286464 - RNA, 32 nt, Human
aaauggagagcguuuucgcaccccagggacug

SEQ ID NO: 286465 - RNA, 32 nt, Human
aaauggagagugaggaaugggagaggcccaga

SEQ ID NO: 286466 - RNA, 32 nt, Human
aaauggagauaaugguuacaaaugucucuucc

SEQ ID NO: 286467 - RNA, 32 nt, Human
aaauggagauggcaaaugaagcacagaaaucu

SEQ ID NO: 286468 - RNA, 32 nt, Human
aaauggagaugggaucacuauguugcccaugc

SEQ ID NO: 286469 - RNA, 32 nt, Human
aaauggagccccuccaugcagagauccugagg

SEQ ID NO: 286470 - RNA, 32 nt, Human
aaauggagcuguagaagaggcauguuuaacug

SEQ ID NO: 286471 - RNA, 32 nt, Human
aaauggaggaagaaaacaaagaaucuaguagc

SEQ ID NO: 286472 - RNA, 32 nt, Human
aaauggaggacagaggugacaaacuucaguuu

SEQ ID NO: 286473 - RNA, 32 nt, Human
aaauggaggcaacaggagcacaaggacccagc

SEQ ID NO: 286474 - RNA, 32 nt, Human
aaauggaggcucagagagguuaagugaauuga

SEQ ID NO: 286475 - RNA, 32 nt, Human
aaauggagggggaagagaggaggggagaggag

SEQ ID NO: 286476 - RNA, 32 nt, Human
aaauggagguccuggagguuacaugacuagcc

SEQ ID NO: 286477 - RNA, 32 nt, Human
aaauggaggugguccagagagggucugggauu

SEQ ID NO: 286478 - RNA, 30 nt, Human
aaauggagguugcaaucagccgagauggug

SEQ ID NO: 286479 - RNA, 32 nt, Human
aaauggauaaugaagccucuugggaggcccua

SEQ ID NO: 286480 - RNA, 32 nt, Human
aaauggauacuacaucuuuaaacaguauuuca

SEQ ID NO: 286481 - RNA, 32 nt, Human
aaauggaucaggcaggccagaggggcaguuca

SEQ ID NO: 286482 - RNA, 32 nt, Human
aaauggaugaaugagagagggagggaacagug

SEQ ID NO: 286483 - RNA, 32 nt, Human
aaauggaugcagacuccagcagccuggucucc

SEQ ID NO: 286484 - RNA, 23 nt, Human
aaauggauucuuaggagcauuuu

SEQ ID NO: 286485 - RNA, 32 nt, Human
aaauggcaaaagaaaugcagauuucccaguua

SEQ ID NO: 286486 - RNA, 32 nt, Human
aaauggcaaaaucuuaacgugggugaaagagc

SEQ ID NO: 286487 - RNA, 32 nt, Human
aaauggcaaacuacuacuacuacuguucaguu

SEQ ID NO: 286488 - RNA, 32 nt, Human
aaauggcaaaggaagguggauggccccagcac

SEQ ID NO: 286489 - RNA, 32 nt, Human
aaauggcaacacagaugguagcugcacagcuu

SEQ ID NO: 286490 - RNA, 32 nt, Human
aaauggcaaucagucgagccucugacuggcug

SEQ ID NO: 286491 - RNA, 32 nt, Human
aaauggcacagcaaggguguuugcaccagaag

SEQ ID NO: 286492 - RNA, 32 nt, Human
aaauggcagagccaggaguuggaccuagguuu

SEQ ID NO: 286493 - RNA, 27 nt, Human
aaauggcagagguggaggagacacuga

SEQ ID NO: 286494 - RNA, 32 nt, Human
aaauggcagcacuuaaagacuuuuggugaaaa

SEQ ID NO: 286495 - RNA, 32 nt, Human
aaauggcaguacugcuccacuucaccuuccua

SEQ ID NO: 286496 - RNA, 32 nt, Human
aaauggcauuuagccaaaggccuuuucagcca

SEQ ID NO: 286497 - RNA, 32 nt, Human
aaauggccagcuccuucugggguggccggauu

SEQ ID NO: 286498 - RNA, 32 nt, Human
aaauggccaucaucuaguaauaccuguguuug

SEQ ID NO: 286499 - RNA, 32 nt, Human
aaauggccaugcugccuucugggcaggacacg

SEQ ID NO: 286500 - RNA, 32 nt, Human
aaauggccauugagcuguuuccucacaauugg

SEQ ID NO: 286501 - RNA, 32 nt, Human
aaauggcccacaacacugaguuaguggacacc

SEQ ID NO: 286502 - RNA, 32 nt, Human
aaauggccuuagcuguuucuccagacucccuu

SEQ ID NO: 286503 - RNA, 32 nt, Human
aaauggccuugcagcaguuccaaaaggguggg

SEQ ID NO: 286504 - RNA, 32 nt, Human
aaauggcgacacugcacugcaggcugggcuac

SEQ ID NO: 286505 - RNA, 32 nt, Human
aaauggcgaugguggaggugauagggacuuca

SEQ ID NO: 286506 - RNA, 32 nt, Human
aaauggcgccacugcacuccagccuggguaac

SEQ ID NO: 286507 - RNA, 32 nt, Human
aaauggcgccgggcagcuucauccccuccccc

SEQ ID NO: 286508 - RNA, 32 nt, Human
aaauggcggcgccggcggcgugaccgggcccu

SEQ ID NO: 286509 - RNA, 32 nt, Human
aaauggcgucuggaaguccaauguggcaagga

SEQ ID NO: 286510 - RNA, 32 nt, Human
aaauggcuaaaaagaucccaggcuuacucuga

SEQ ID NO: 286511 - RNA, 32 nt, Human
aaauggcuaaggucaaguaaagcacaacauua

SEQ ID NO: 286512 - RNA, 32 nt, Human
aaauggcuccaauguauagucuguguaugcgu

SEQ ID NO: 286513 - RNA, 27 nt, Human
aaauggcucggaggcaggaagagcaga

SEQ ID NO: 286514 - RNA, 27 nt, Human
aaauggcugauaguggcuuagauaaaa

SEQ ID NO: 286515 - RNA, 27 nt, Human
aaauggcugcagcuccucaagcaccgg

SEQ ID NO: 286516 - RNA, 32 nt, Human
aaauggcugcucccuccugccugcuauccaag

SEQ ID NO: 286517 - RNA, 32 nt, Human
aaauggcuggaggaaggagggaagaaauuagg

SEQ ID NO: 286518 - RNA, 22 nt, Human
aaauggcuggugagauugcaga

SEQ ID NO: 286519 - RNA, 32 nt, Human
aaauggcuguccuggauuguguuaacaugggu

SEQ ID NO: 286520 - RNA, 32 nt, Human
aaauggcuucuucccagcccugccuacaaguu

SEQ ID NO: 286521 - RNA, 32 nt, Human
aaaugggaaaggauucuuuuaauuguggauua

SEQ ID NO: 286522 - RNA, 15 nt, Human
aaaugggaacaguuu

SEQ ID NO: 286523 - RNA, 24 nt, Human
aaaugggaagggaagaaaacacca

SEQ ID NO: 286524 - RNA, 32 nt, Human
aaaugggaagggagaauggacagguaggaagg

SEQ ID NO: 286525 - RNA, 32 nt, Human
aaaugggaaugggagagggcagcucuacaaag

SEQ ID NO: 286526 - RNA, 32 nt, Human
aaaugggacaacaucugccagcaacgcgagag

SEQ ID NO: 286527 - RNA, 32 nt, Human
aaaugggacagaguccugagccccagauucca

SEQ ID NO: 286528 - RNA, 32 nt, Human
aaaugggagcaguauuugcugcauaggguggu

SEQ ID NO: 286529 - RNA, 32 nt, Human
aaaugggagcaguccauggugcagcccucaug

SEQ ID NO: 286530 - RNA, 32 nt, Human
aaaugggaggaaagacaagaagaaauagaagc

SEQ ID NO: 286531 - RNA, 32 nt, Human
aaaugggaggcaucauaauuguauauuauuca

SEQ ID NO: 286532 - RNA, 32 nt, Human
aaaugggaggcgggaaagugaggccggagacu

SEQ ID NO: 286533 - RNA, 32 nt, Human
aaaugggagguggaggguuguacugugaccau

SEQ ID NO: 286534 - RNA, 32 nt, Human
aaaugggauggacugacggacaguuccagaag

SEQ ID NO: 286535 - RNA, 32 nt, Human
aaaugggauuccagguuuaagauagcuccuuu

SEQ ID NO: 286536 - RNA, 32 nt, Human
aaaugggauugugaggaugaaagggaagaguu

SEQ ID NO: 286537 - RNA, 32 nt, Human
aaaugggcaaggacgcccugcccucacugggc

SEQ ID NO: 286538 - RNA, 32 nt, Human
aaaugggcaaggcagaguaagcaggggagaca

SEQ ID NO: 286539 - RNA, 32 nt, Human
aaaugggcaagggagagcggguggagggcccu

SEQ ID NO: 286540 - RNA, 32 nt, Human
aaaugggcacaucugcuauauucacuuucauu

SEQ ID NO: 286541 - RNA, 18 nt, Human
aaaugggcauaauaguuu

SEQ ID NO: 286542 - RNA, 32 nt, Human
aaaugggcauacugcccaaagcaauuuauaga

SEQ ID NO: 286543 - RNA, 32 nt, Human
aaaugggcugugucugugccucucucucuuuc

SEQ ID NO: 286544 - RNA, 32 nt, Human
aaaugggcuuccugccugguuuuucucuucuc

SEQ ID NO: 286545 - RNA, 19 nt, Human
aaauggggaaauugcagau

SEQ ID NO: 286546 - RNA, 32 nt, Human
aaauggggaagggggccuggagaggggaggca

SEQ ID NO: 286547 - RNA, 32 nt, Human
aaauggggaauauuugaaacaugcauuuuuaa

SEQ ID NO: 286548 - RNA, 32 nt, Human
aaauggggaggaacccucaguuccaggaauug

SEQ ID NO: 286549 - RNA, 32 nt, Human
aaauggggaggcuaggcucuccccagcccuau

SEQ ID NO: 286550 - RNA, 32 nt, Human
aaauggggauggcuggggcucucuccauccuc

SEQ ID NO: 286551 - RNA, 32 nt, Human
aaauggggauggugaucccugcccuuucuacc

SEQ ID NO: 286552 - RNA, 32 nt, Human
aaauggggccaguccccaugcccugcuguccu

SEQ ID NO: 286553 - RNA, 32 nt, Human
aaauggggcccagagagaugggcugaggucac

SEQ ID NO: 286554 - RNA, 23 nt, Human
aaauggggcccagauugcagaug

SEQ ID NO: 286555 - RNA, 19 nt, Human
aaauggggccuuuguguca

SEQ ID NO: 286556 - RNA, 17 nt, Human
aaauggggcuccacaga

SEQ ID NO: 286557 - RNA, 20 nt, Human
aaauggggcugugucagaug

SEQ ID NO: 286558 - RNA, 32 nt, Human
aaaugggggaagggggcugaggcguggaggaa

SEQ ID NO: 286559 - RNA, 32 nt, Human
aaauggggguacccagggaugggcaggcuuug

SEQ ID NO: 286560 - RNA, 32 nt, Human
aaaugggguuguggggcagagcaggguuagga

SEQ ID NO: 286561 - RNA, 18 nt, Human
aaauggguaguacuguuu

SEQ ID NO: 286562 - RNA, 32 nt, Human
aaauggguaugcuucacuacuauccacagugu

SEQ ID NO: 286563 - RNA, 32 nt, Human
aaaugggucccaaaggauauguuuggauauuu

SEQ ID NO: 286564 - RNA, 32 nt, Human
aaaugggucuuuucagugcaaugugguuauga

SEQ ID NO: 286565 - RNA, 22 nt, Human
aaaugggugcuuuuggcaguuu

SEQ ID NO: 286566 - RNA, 17 nt, Human
aaauggguggauaucuu

SEQ ID NO: 286567 - RNA, 18 nt, Human
aaauggguguaauucagc

SEQ ID NO: 286568 - RNA, 32 nt, Human
aaauggguuuuuaacaaaugccucauuaguac

SEQ ID NO: 286569 - RNA, 32 nt, Human
aaaugguacagcaggugcacuguuaacagugu

SEQ ID NO: 286570 - RNA, 32 nt, Human
aaaugguagggagcgcuguggagacagcaucc

SEQ ID NO: 286571 - RNA, 32 nt, Human
aaauggucaaaggggcugggcaugguggcuca

SEQ ID NO: 286572 - RNA, 32 nt, Human
aaauggucaaggaauucauuuggcuccuugau

SEQ ID NO: 286573 - RNA, 32 nt, Human
aaauggucauuucccuguucacuuacugacau

SEQ ID NO: 286574 - RNA, 32 nt, Human
aaauggucauuuuucugaagagaauauuuugc

SEQ ID NO: 286575 - RNA, 32 nt, Human
aaaugguccaggaaugaacguggagaaaagaa

SEQ ID NO: 286576 - RNA, 32 nt, Human
aaauggugauauagaccucagagcuguuaucu

SEQ ID NO: 286577 - RNA, 32 nt, Human
aaauggugccacugcacuccagucugggcaac

SEQ ID NO: 286578 - RNA, 32 nt, Human
aaauggugccauugaagccacaaagccgguaa

SEQ ID NO: 286579 - RNA, 32 nt, Human
aaauggugccuguaaagcucucagcauuggcu

SEQ ID NO: 286580 - RNA, 32 nt, Human
aaauggugggauuacaggugugugggccaccg

SEQ ID NO: 286581 - RNA, 32 nt, Human
aaauggugucauuuaugaacaauguuuaauua

SEQ ID NO: 286582 - RNA, 32 nt, Human
aaaugguuaggauauaacucaugguguggcua

SEQ ID NO: 286583 - RNA, 32 nt, Human
aaaugguuccaucagcucaggccaaguggaaa

SEQ ID NO: 286584 - RNA, 32 nt, Human
aaaugguucuacugcauccuuuggcugggccu

SEQ ID NO: 286585 - RNA, 32 nt, Human
aaaugguucugagagaaugagcuaauagagca

SEQ ID NO: 286586 - RNA, 32 nt, Human
aaaugguuguaagacuuugggcucagauaagu

SEQ ID NO: 286587 - RNA, 31 nt, Human
aaaugguuucucaaggagauuggggacgcca

SEQ ID NO: 286588 - RNA, 32 nt, Human
aaaugguuuuaaguuuauggagaguuuagucc

SEQ ID NO: 286589 - RNA, 32 nt, Human
aaauguaaaugucuguugaauuucugaaguug

SEQ ID NO: 286590 - RNA, 32 nt, Human
aaauguaaccaccucccugccuagaauacaca

SEQ ID NO: 286591 - RNA, 32 nt, Human
aaauguaaccucuauguaaggagguguuuuuc

SEQ ID NO: 286592 - RNA, 32 nt, Human
aaauguaagaaaagauuuuucacuggagcagc

SEQ ID NO: 286593 - RNA, 32 nt, Human
aaauguaaggagccuacuuagagcagaagaaa

SEQ ID NO: 286594 - RNA, 32 nt, Human
aaauguaaugauuucuucuuuuccuauugacc

SEQ ID NO: 286595 - RNA, 32 nt, Human
aaauguaauguuauauaagaugaucaugugau

SEQ ID NO: 286596 - RNA, 32 nt, Human
aaauguaauugggggcggcgggggaggagagg

SEQ ID NO: 286597 - RNA, 32 nt, Human
aaauguacaauaaauguguaaugaguaaccag

SEQ ID NO: 286598 - RNA, 32 nt, Human
aaauguacaccaggcugggugcgguggcucac

SEQ ID NO: 286599 - RNA, 32 nt, Human
aaauguacagaagaaagcauagcaggaaauca

SEQ ID NO: 286600 - RNA, 32 nt, Human
aaauguacauucucaggcuccacagcaggccg

SEQ ID NO: 286601 - RNA, 32 nt, Human
aaauguacucaucaucuguaauaaaagaaaaa

SEQ ID NO: 286602 - RNA, 32 nt, Human
aaauguacuugcucagcucaacugcauuucag

SEQ ID NO: 286603 - RNA, 32 nt, Human
aaauguacuuuagacaugaaugcaacuauuua

SEQ ID NO: 286604 - RNA, 32 nt, Human
aaauguagaaaaucauugaguucucucagguc

SEQ ID NO: 286605 - RNA, 32 nt, Human
aaauguagacuguccuuagacuccugagguuu

SEQ ID NO: 286606 - RNA, 32 nt, Human
aaauguagagcaccauuuuucucaaugaguuu

SEQ ID NO: 286607 - RNA, 32 nt, Human
aaauguagauuguaacagccuccuuggacaac

SEQ ID NO: 286608 - RNA, 32 nt, Human
aaauguagcauuagcucucacaaaagaggacc

SEQ ID NO: 286609 - RNA, 32 nt, Human
aaauguagccucauaacugugcaccugaggag

SEQ ID NO: 286610 - RNA, 32 nt, Human
aaauguagcuggugggagacuuuguagauguu

SEQ ID NO: 286611 - RNA, 32 nt, Human
aaauguaguuugaauauuuuccacaagaugcu

SEQ ID NO: 286612 - RNA, 32 nt, Human
aaauguaucccucguuuaucauccccuuuguu

SEQ ID NO: 286613 - RNA, 17 nt, Human
aaauguaugagcagcuu

SEQ ID NO: 286614 - RNA, 32 nt, Human
aaauguauuauugccaaccaagucgucaaauc

SEQ ID NO: 286615 - RNA, 32 nt, Human
aaauguauucuacuuguucuaaaacaaucugu

SEQ ID NO: 286616 - RNA, 21 nt, Human
aaauguauucuguaccauuua

SEQ ID NO: 286617 - RNA, 32 nt, Human
aaauguauuuccaaauaccaccaccuuaaggg

SEQ ID NO: 286618 - RNA, 32 nt, Human
aaauguauuuggaauuuuauuugaaauggaga

SEQ ID NO: 286619 - RNA, 32 nt, Human
aaauguauuuguccuucucaaagcaaaccaga

SEQ ID NO: 286620 - RNA, 32 nt, Human
aaaugucagcccacagagcuaauaauaccuca

SEQ ID NO: 286621 - RNA, 32 nt, Human
aaaugucaggcaggauaggucugauugauggu

SEQ ID NO: 286622 - RNA, 32 nt, Human
aaaugucaucuucuccccagacgcuggcuugc

SEQ ID NO: 286623 - RNA, 32 nt, Human
aaaugucaugguauaaacuagacaucuuauau

SEQ ID NO: 286624 - RNA, 32 nt, Human
aaauguccacugcuucuugaaaaaucucuuag

SEQ ID NO: 286625 - RNA, 32 nt, Human
aaauguccagaugccagccucauaguugaacu

SEQ ID NO: 286626 - RNA, 32 nt, Human
aaauguccaucuuucucagacggggcucuguc

SEQ ID NO: 286627 - RNA, 32 nt, Human
aaaugucccuuucuucucccccauccuacgag

SEQ ID NO: 286628 - RNA, 32 nt, Human
aaaugucucuuauuccagaaaugugcauuuug

SEQ ID NO: 286629 - RNA, 32 nt, Human
aaaugucugccucuccagacauuucuuaauga

SEQ ID NO: 286630 - RNA, 32 nt, Human
aaaugucuggaaaguauguggauuggacacau

SEQ ID NO: 286631 - RNA, 32 nt, Human
aaaugucugggcaccccaugcccagucaaguu

SEQ ID NO: 286632 - RNA, 32 nt, Human
aaaugucugucucucucuuuuuguuuuguuug

SEQ ID NO: 286633 - RNA, 32 nt, Human
aaaugucugugaauauuucuugagugcagaug

SEQ ID NO: 286634 - RNA, 32 nt, Human
aaaugucugugccaaaauuuuguauuuuauuu

SEQ ID NO: 286635 - RNA, 32 nt, Human
aaaugugaaaggagguuucuuacuggacagca

SEQ ID NO: 286636 - RNA, 32 nt, Human
aaaugugaagaaacuccuuucaucucagcagg

SEQ ID NO: 286637 - RNA, 32 nt, Human
aaaugugaccauaaaauuagggcugcugcuuu

SEQ ID NO: 286638 - RNA, 32 nt, Human
aaaugugaccuucccuacuggccaggugagca

SEQ ID NO: 286639 - RNA, 32 nt, Human
aaaugugagagcccagaacaugcauauaaagc

SEQ ID NO: 286640 - RNA, 32 nt, Human
aaaugugagagcccagaacaugcauauaaagg

SEQ ID NO: 286641 - RNA, 32 nt, Human
aaaugugagaguguuuaacuggacagcccaga

SEQ ID NO: 286642 - RNA, 32 nt, Human
aaaugugagcauuaagcacuccaggcuuucau

SEQ ID NO: 286643 - RNA, 32 nt, Human
aaaugugagccccaggcugcagaaggaagagu

SEQ ID NO: 286644 - RNA, 32 nt, Human
aaaugugagccuugcuuuuuaugaaaagcugu

SEQ ID NO: 286645 - RNA, 32 nt, Human
aaaugugaucacugagacagccacuugguuuu

SEQ ID NO: 286646 - RNA, 32 nt, Human
aaaugugaucauugauuucaguguucaagaca

SEQ ID NO: 286647 - RNA, 32 nt, Human
aaaugugcaaaacuggagaaucuggugcugau

SEQ ID NO: 286648 - RNA, 32 nt, Human
aaaugugcaaaccucuguggauaccauuucau

SEQ ID NO: 286649 - RNA, 32 nt, Human
aaaugugcaaaccuguucaucuugccaagaaa

SEQ ID NO: 286650 - RNA, 32 nt, Human
aaaugugcagaacuguagaaacuuuagaggca

SEQ ID NO: 286651 - RNA, 32 nt, Human
aaaugugcaucaagaaagacuacugaaaagua

SEQ ID NO: 286652 - RNA, 18 nt, Human
aaaugugccccccuaccc

SEQ ID NO: 286653 - RNA, 20 nt, Human
aaaugugcccuuuuggccgg

SEQ ID NO: 286654 - RNA, 32 nt, Human
aaaugugcuuucuaauagccauugccuuccau

SEQ ID NO: 286655 - RNA, 32 nt, Human
aaaugugcuuugauguuuaaagccacuguacc

SEQ ID NO: 286656 - RNA, 32 nt, Human
aaauguggcaaagagaagaaaggcccaagagc

SEQ ID NO: 286657 - RNA, 32 nt, Human
aaauguggcuccaagcucaggugccuuugagu

SEQ ID NO: 286658 - RNA, 32 nt, Human
aaauguggcuuuugaaguaccuaguuaccuug

SEQ ID NO: 286659 - RNA, 27 nt, Human
aaaugugggaagagagaagcaaauuaa

SEQ ID NO: 286660 - RNA, 32 nt, Human
aaaugugggaauuaagcaaaaucaagcaagcc

SEQ ID NO: 286661 - RNA, 31 nt, Human
aaauguggugagagaggaauugaauugaaau

SEQ ID NO: 286662 - RNA, 32 nt, Human
aaaugugguguuugcuguaaauuggauugaau

SEQ ID NO: 286663 - RNA, 32 nt, Human
aaauguguaauaccuucuuuuucuauuauguu

SEQ ID NO: 286664 - RNA, 32 nt, Human
aaauguguacuauguaccuaugaugugucaua

SEQ ID NO: 286665 - RNA, 32 nt, Human
aaaugugucaacugccugucagccuggauuca

SEQ ID NO: 286666 - RNA, 32 nt, Human
aaaugugugucuucagugcuuucucuaaaaac

SEQ ID NO: 286667 - RNA, 32 nt, Human
aaauguguucacaggcaaugggggugguccug

SEQ ID NO: 286668 - RNA, 32 nt, Human
aaauguguucaucaaaucuggucaagggacua

SEQ ID NO: 286669 - RNA, 32 nt, Human
aaauguguucuacuuguucuaaaacaaucugu

SEQ ID NO: 286670 - RNA, 32 nt, Human
aaauguguucuccuauuccucauaaagcuugu

SEQ ID NO: 286671 - RNA, 32 nt, Human
aaauguguucucucuggacucuugccuagcuc

SEQ ID NO: 286672 - RNA, 32 nt, Human
aaauguguuguugcuguguccuggaggagaca

SEQ ID NO: 286673 - RNA, 32 nt, Human
aaauguuacaaauucccgaaagaagggaauuu

SEQ ID NO: 286674 - RNA, 32 nt, Human
aaauguuagcuccaugaggguaggggugugua

SEQ ID NO: 286675 - RNA, 32 nt, Human
aaauguuaugaucacuuucacccaugauauaa

SEQ ID NO: 286676 - RNA, 32 nt, Human
aaauguuauucuauguaaauacagaugcacaa

SEQ ID NO: 286677 - RNA, 32 nt, Human
aaauguucaaucuuuccucuagcuucuugaau

SEQ ID NO: 286678 - RNA, 32 nt, Human
aaauguucacagaaccugcagugcugacuuca

SEQ ID NO: 286679 - RNA, 32 nt, Human
aaauguucagcccuccuaguuauguuccugau

SEQ ID NO: 286680 - RNA, 32 nt, Human
aaauguucaugaaaauccacuucucuacuagu

SEQ ID NO: 286681 - RNA, 32 nt, Human
aaauguucauucuucaucagcuuugcuaauuc

SEQ ID NO: 286682 - RNA, 32 nt, Human
aaauguucauucuuucaggaauacaaguuugu

SEQ ID NO: 286683 - RNA, 32 nt, Human
aaauguuccaagcuguuacuuaccuuaacaug

SEQ ID NO: 286684 - RNA, 32 nt, Human
aaauguuccugauugcuggaagcugcggcuca

SEQ ID NO: 286685 - RNA, 32 nt, Human
aaauguucucuuacaauauauuuuggagguuu

SEQ ID NO: 286686 - RNA, 32 nt, Human
aaauguucuggguggggguagaaugagguggg

SEQ ID NO: 286687 - RNA, 32 nt, Human
aaauguucuuccaguuacuuuccaauucuccu

SEQ ID NO: 286688 - RNA, 32 nt, Human
aaauguugaaaaggaagguggaaaaccaagaa

SEQ ID NO: 286689 - RNA, 32 nt, Human
aaauguugaaccuggguguugcuuccgggcca

SEQ ID NO: 286690 - RNA, 32 nt, Human
aaauguugacaccuuaaucggucccagguaug

SEQ ID NO: 286691 - RNA, 32 nt, Human
aaauguugcaauuacaggcaugagcacugugc

SEQ ID NO: 286692 - RNA, 32 nt, Human
aaauguugccaagucugugguccaugggcuuu

SEQ ID NO: 286693 - RNA, 27 nt, Human
aaauguugcccaggaaggacaggugug

SEQ ID NO: 286694 - RNA, 32 nt, Human
aaauguugcccaguaugugcgcauugccagug

SEQ ID NO: 286695 - RNA, 23 nt, Human
aaauguugccuuuuagcauucca

SEQ ID NO: 286696 - RNA, 31 nt, Human
aaauguuggaaacugccuauccuggugacuc

SEQ ID NO: 286697 - RNA, 32 nt, Human
aaauguuggaaccauuucucucuuggucucug

SEQ ID NO: 286698 - RNA, 32 nt, Human
aaauguuggacaagcagacacacucacacucg

SEQ ID NO: 286699 - RNA, 32 nt, Human
aaauguugggauuacaggcaugagccacugca

SEQ ID NO: 286700 - RNA, 32 nt, Human
aaauguugggauuacaggcgugagccaccgug

SEQ ID NO: 286701 - RNA, 21 nt, Human
aaauguugggcuucugugccu

SEQ ID NO: 286702 - RNA, 32 nt, Human
aaauguuguccacuucccuuuuccacaggccu

SEQ ID NO: 286703 - RNA, 32 nt, Human
aaauguuguccuguacuuacuaggcaaaacgu

SEQ ID NO: 286704 - RNA, 32 nt, Human
aaauguuguuacuaugcauguauauggaugga

SEQ ID NO: 286705 - RNA, 32 nt, Human
aaauguuuaaauuggcugggcacagugucuca

SEQ ID NO: 286706 - RNA, 32 nt, Human
aaauguuuacagacaaauaauuuugggagcug

SEQ ID NO: 286707 - RNA, 32 nt, Human
aaauguuuagacaggauauuuucuugaugaag

SEQ ID NO: 286708 - RNA, 32 nt, Human
aaauguuuauucaugucuuuugcccacuuuuu

SEQ ID NO: 286709 - RNA, 32 nt, Human
aaauguuuccagagaaauauccaggacuuuua

SEQ ID NO: 286710 - RNA, 32 nt, Human
aaauguuugaaagccacugagauagaaggacc

SEQ ID NO: 286711 - RNA, 32 nt, Human
aaauguuugccugucugaacugugaagacacu

SEQ ID NO: 286712 - RNA, 32 nt, Human
aaauguuugccuuggucguuguggaccuccuu

SEQ ID NO: 286713 - RNA, 32 nt, Human
aaauguuuguaaucucauaagcacuuuauaaa

SEQ ID NO: 286714 - RNA, 32 nt, Human
aaauguuuguucugcauguguuccaugccagu

SEQ ID NO: 286715 - RNA, 32 nt, Human
aaauguuuuaaucacucuugccauuaccuaca

SEQ ID NO: 286716 - RNA, 32 nt, Human
aaauguuuuaaugccagggccugcugaguugc

SEQ ID NO: 286717 - RNA, 32 nt, Human
aaauguuuuaauucacaaauggagauuuguau

SEQ ID NO: 286718 - RNA, 32 nt, Human
aaauguuuuacugucuaucaccaccaucuaua

SEQ ID NO: 286719 - RNA, 32 nt, Human
aaauguuuucuaacucaacuggccggcuuccu

SEQ ID NO: 286720 - RNA, 32 nt, Human
aaauguuuucuuugguucauccuucuuuaaca

SEQ ID NO: 286721 - RNA, 32 nt, Human
aaauguuuugagacagggucucauucugaugc

SEQ ID NO: 286722 - RNA, 32 nt, Human
aaauguuuuguaacucaacuggccugcuuccu

SEQ ID NO: 286723 - RNA, 32 nt, Human
aaauguuuuuaaaaauugaaagccugaaugug

SEQ ID NO: 286724 - RNA, 32 nt, Human
aaauguuuuucaaauaugugaaaugugaaacu

SEQ ID NO: 286725 - RNA, 32 nt, Human
aaauguuuuucuuccucuuuaucuaacuauau

SEQ ID NO: 286726 - RNA, 22 nt, Human
aaauguuuuuguuuuuguuuua

SEQ ID NO: 286727 - RNA, 32 nt, Human
aaauuaaaagccuuaggaggcuuguucugugu

SEQ ID NO: 286728 - RNA, 32 nt, Human
aaauuaaaauauuucuacauuuuauugaaaaa

SEQ ID NO: 286729 - RNA, 32 nt, Human
aaauuaaaauuaaaaacuaauucacucugggc

SEQ ID NO: 286730 - RNA, 32 nt, Human
aaauuaaaccaccauugccagacuacaagccc

SEQ ID NO: 286731 - RNA, 31 nt, Human
aaauuaaagaaaagugguuguaggggauguu

SEQ ID NO: 286732 - RNA, 32 nt, Human
aaauuaaaucauagccugggugcaguggcuca

SEQ ID NO: 286733 - RNA, 32 nt, Human
aaauuaaaucuaguucaccuugcucacccugc

SEQ ID NO: 286734 - RNA, 32 nt, Human
aaauuaaauuaguucagccauuguggaagaca

SEQ ID NO: 286735 - RNA, 20 nt, Human
aaauuaaauucugaguguga

SEQ ID NO: 286736 - RNA, 22 nt, Human
aaauuaaauucuugaugcugac

SEQ ID NO: 286737 - RNA, 32 nt, Human
aaauuaacagaaaaacagaacaaguuuauucu

SEQ ID NO: 286738 - RNA, 32 nt, Human
aaauuaacagcaguucacuuuauugugagucu

SEQ ID NO: 286739 - RNA, 32 nt, Human
aaauuaaccuaccuggccaggcacaguggcuc

SEQ ID NO: 286740 - RNA, 32 nt, Human
aaauuaacgugacuuggcugggcgcaguggcu

SEQ ID NO: 286741 - RNA, 32 nt, Human
aaauuaacuguacagguuuguuaucacaaugu

SEQ ID NO: 286742 - RNA, 32 nt, Human
aaauuaagaacugcacuuuauugacuucgaua

SEQ ID NO: 286743 - RNA, 32 nt, Human
aaauuaagaacuuacaucacaaaccaacccca

SEQ ID NO: 286744 - RNA, 32 nt, Human
aaauuaagaagaaccccuccagugugaaguuu

SEQ ID NO: 286745 - RNA, 32 nt, Human
aaauuaagagaagagagggagugaaggguggc

SEQ ID NO: 286746 - RNA, 32 nt, Human
aaauuaagcuaacagaacaggagcucagcugg

SEQ ID NO: 286747 - RNA, 32 nt, Human
aaauuaaggagagccaauaaaugaguauagga

SEQ ID NO: 286748 - RNA, 32 nt, Human
aaauuaaggcuuaaagaaugagcauggccaca

SEQ ID NO: 286749 - RNA, 32 nt, Human
aaauuaagggaacagugucuguuugcauguaa

SEQ ID NO: 286750 - RNA, 32 nt, Human
aaauuaagggucucgcucugucacccaagcug

SEQ ID NO: 286751 - RNA, 27 nt, Human
aaauuaaguaucauggaacuuuagaga

SEQ ID NO: 286752 - RNA, 32 nt, Human
aaauuaagucaacagcaggagucaguuugucc

SEQ ID NO: 286753 - RNA, 32 nt, Human
aaauuaaucaacuagagaggugcaaaacguuc

SEQ ID NO: 286754 - RNA, 32 nt, Human
aaauuaaugaugguuauuucuguuuuaguggu

SEQ ID NO: 286755 - RNA, 32 nt, Human
aaauuaauuaauauaucuuuaaagauaucaua

SEQ ID NO: 286756 - RNA, 32 nt, Human
aaauuaauuagcuuuccucugcuuuaugacca

SEQ ID NO: 286757 - RNA, 23 nt, Human
aaauuaauucagccauuguggaa

SEQ ID NO: 286758 - RNA, 32 nt, Human
aaauuaauuccuguggacaaugcccagucucu

SEQ ID NO: 286759 - RNA, 32 nt, Human
aaauuaauuuagaucucgcugggaaacguagc

SEQ ID NO: 286760 - RNA, 32 nt, Human
aaauuacaaaaaugaacccaagucuguuuuaa

SEQ ID NO: 286761 - RNA, 32 nt, Human
aaauuacaagccacagucuaauaugucuuauu

SEQ ID NO: 286762 - RNA, 32 nt, Human
aaauuacacuucagaaaagacaucaaaggcaa

SEQ ID NO: 286763 - RNA, 32 nt, Human
aaauuacagacgugugccaccaugcuuggcua

SEQ ID NO: 286764 - RNA, 32 nt, Human
aaauuacaggguuagcaaaaagagccugggcu

SEQ ID NO: 286765 - RNA, 32 nt, Human
aaauuacauggugugaacggcaugucugugga

SEQ ID NO: 286766 - RNA, 32 nt, Human
aaauuaccauugcuuccuccagcuugucagaa

SEQ ID NO: 286767 - RNA, 32 nt, Human
aaauuacccaggagugguggugugcaccugua

SEQ ID NO: 286768 - RNA, 32 nt, Human
aaauuaccuaauucugguaauaggcuucagca

SEQ ID NO: 286769 - RNA, 32 nt, Human
aaauuaccuaggguaaaggauagcugcaacaa

SEQ ID NO: 286770 - RNA, 32 nt, Human
aaauuaccugacacauaccacgcuuaaaccaa

SEQ ID NO: 286771 - RNA, 32 nt, Human
aaauuaccugagacccagaggguguaggaaug

SEQ ID NO: 286772 - RNA, 32 nt, Human
aaauuaccuggagugaggauuacuuguaauua

SEQ ID NO: 286773 - RNA, 32 nt, Human
aaauuacgccacugcacuccagccugggcaac

SEQ ID NO: 286774 - RNA, 32 nt, Human
aaauuacgggaguguacucagcuuugagccua

SEQ ID NO: 286775 - RNA, 32 nt, Human
aaauuacucuucgggucccaagguuuggcuuu

SEQ ID NO: 286776 - RNA, 32 nt, Human
aaauuacugaaacuauuuuacugugaaacagu

SEQ ID NO: 286777 - RNA, 32 nt, Human
aaauuacugaagauaggccacagggaguaggg

SEQ ID NO: 286778 - RNA, 32 nt, Human
aaauuacugccccucacugggucucugucuac

SEQ ID NO: 286779 - RNA, 32 nt, Human
aaauuacugcccuauguugucuauaagaccaa

SEQ ID NO: 286780 - RNA, 32 nt, Human
aaauuacuuaguccuuaggccaaccaauuuaa

SEQ ID NO: 286781 - RNA, 32 nt, Human
aaauuacuucagcuuuggaaauacucaggcug

SEQ ID NO: 286782 - RNA, 32 nt, Human
aaauuacuugaacccagcaguucgagacuugc

SEQ ID NO: 286783 - RNA, 32 nt, Human
aaauuacuuuucaccagcaucuuuacuauaau

SEQ ID NO: 286784 - RNA, 32 nt, Human
aaauuacuuuuguaauuauuugcaauuaauug

SEQ ID NO: 286785 - RNA, 32 nt, Human
aaauuagaaacucagaaauggaaagggaacaa

SEQ ID NO: 286786 - RNA, 32 nt, Human
aaauuagaaaugucaauaagaacccauggaca

SEQ ID NO: 286787 - RNA, 32 nt, Human
aaauuagaaugacaguguuggaauuuggaggc

SEQ ID NO: 286788 - RNA, 31 nt, Human
aaauuagaauuaugcugccuaccucacagag

SEQ ID NO: 286789 - RNA, 32 nt, Human
aaauuagacaguguuuaauuuucgaaaacuuc

SEQ ID NO: 286790 - RNA, 32 nt, Human
aaauuagacgauuucaagaauuggagcugaau

SEQ ID NO: 286791 - RNA, 32 nt, Human
aaauuagagaacacugggugguuugaagggug

SEQ ID NO: 286792 - RNA, 32 nt, Human
aaauuagaguucuucagaaaaccaaugggaug

SEQ ID NO: 286793 - RNA, 32 nt, Human
aaauuagauacccaacuuaaaccaaaggcaug

SEQ ID NO: 286794 - RNA, 32 nt, Human
aaauuagauuuucuuuaauaaaaugccauuug

SEQ ID NO: 286795 - RNA, 31 nt, Human
aaauuagcacuuuuggggccaauggagaaau

SEQ ID NO: 286796 - RNA, 32 nt, Human
aaauuagcagcccucugcauaauguagcugcc

SEQ ID NO: 286797 - RNA, 32 nt, Human
aaauuagccagccacggggccugcacuuccag

SEQ ID NO: 286798 - RNA, 32 nt, Human
aaauuagccaggugugguggcuugugcuuguu

SEQ ID NO: 286799 - RNA, 32 nt, Human
aaauuagcccagcuaauuuuuguauuuuuagu

SEQ ID NO: 286800 - RNA, 32 nt, Human
aaauuagccgggcauugugguggugcaugccu

SEQ ID NO: 286801 - RNA, 32 nt, Human
aaauuagcuccccauccucccuccucacuccc

SEQ ID NO: 286802 - RNA, 32 nt, Human
aaauuagcucugauuagcuuucacuuccugua

SEQ ID NO: 286803 - RNA, 19 nt, Human
aaauuagcugggcuuggug

SEQ ID NO: 286804 - RNA, 32 nt, Human
aaauuagcuggguuugguggcgcaugcuugua

SEQ ID NO: 286805 - RNA, 32 nt, Human
aaauuagcuucaaacacauuguauagcuguac

SEQ ID NO: 286806 - RNA, 32 nt, Human
aaauuagcuuggugugguggugcauugccugu

SEQ ID NO: 286807 - RNA, 32 nt, Human
aaauuaggaaaugcugauagcucauauuauaa

SEQ ID NO: 286808 - RNA, 32 nt, Human
aaauuaggaugcaggcuggguaugguggcuca

SEQ ID NO: 286809 - RNA, 21 nt, Human
aaauuaggcugaauguacuuc

SEQ ID NO: 286810 - RNA, 32 nt, Human
aaauuagggcugggcccauuagcucacaccug

SEQ ID NO: 286811 - RNA, 32 nt, Human
aaauuagguuuacuucuugucucuccaagugg

SEQ ID NO: 286812 - RNA, 32 nt, Human
aaauuaguaacugguggggucgugggguguga

SEQ ID NO: 286813 - RNA, 32 nt, Human
aaauuaguaagaaccugcauccaaagcaaugu

SEQ ID NO: 286814 - RNA, 32 nt, Human
aaauuaguaguuaccuguaaauggcagaucuu

SEQ ID NO: 286815 - RNA, 23 nt, Human
aaauuaguauuuucccuuuggaa

SEQ ID NO: 286816 - RNA, 32 nt, Human
aaauuagucaccugaguaacuuggccacuaau

SEQ ID NO: 286817 - RNA, 32 nt, Human
aaauuagucacggcacugcagccugggcaaca

SEQ ID NO: 286818 - RNA, 32 nt, Human
aaauuagugucaggcaguucccagaaagagac

SEQ ID NO: 286819 - RNA, 22 nt, Human
aaauuaguucaaccacugcgga

SEQ ID NO: 286820 - RNA, 24 nt, Human
aaauuaguucaaccacugcggaag

SEQ ID NO: 286821 - RNA, 22 nt, Human
aaauuaguucaaccauugugga

SEQ ID NO: 286822 - RNA, 24 nt, Human
aaauuaguucaaccauuguggaag

SEQ ID NO: 286823 - RNA, 22 nt, Human
aaauuaguucagccauugugga

SEQ ID NO: 286824 - RNA, 24 nt, Human
aaauuaguucagccauuguggaag

SEQ ID NO: 286825 - RNA, 32 nt, Human
aaauuaguucuuccuccucaacucauaggagu

SEQ ID NO: 286826 - RNA, 32 nt, Human
aaauuauaaaaauugaggcaaagagagcccca

SEQ ID NO: 286827 - RNA, 32 nt, Human
aaauuauaaaacaugaaaaucgcuuugaggug

SEQ ID NO: 286828 - RNA, 32 nt, Human
aaauuauaccucaauguccccaacaagauugc

SEQ ID NO: 286829 - RNA, 32 nt, Human
aaauuauaucgcugauuuuaagcccuuuugca

SEQ ID NO: 286830 - RNA, 32 nt, Human
aaauuauauuuuaagcuuauuucuucaaaauu

SEQ ID NO: 286831 - RNA, 32 nt, Human
aaauuaucaaagaacauuaacuggaaggucag

SEQ ID NO: 286832 - RNA, 32 nt, Human
aaauuaucuguugucuacaugguacaaggccc

SEQ ID NO: 286833 - RNA, 32 nt, Human
aaauuaucuucaaugacuugucuuguucauau

SEQ ID NO: 286834 - RNA, 32 nt, Human
aaauuaugccacugcacuccagccugggcaac

SEQ ID NO: 286835 - RNA, 32 nt, Human
aaauuaugucaaaaugaaaacuguuuguuuca

SEQ ID NO: 286836 - RNA, 32 nt, Human
aaauuaugugaauagagaccauuuuucaaaac

SEQ ID NO: 286837 - RNA, 32 nt, Human
aaauuaugugccagcgccugcuggaccccaaa

SEQ ID NO: 286838 - RNA, 32 nt, Human
aaauuauguuaauaaauauucccacauaauac

SEQ ID NO: 286839 - RNA, 32 nt, Human
aaauuauguuguuacacaacaaauuguggggc

SEQ ID NO: 286840 - RNA, 32 nt, Human
aaauuauguuugcaguucauguagcaggcaug

SEQ ID NO: 286841 - RNA, 32 nt, Human
aaauuauucagauguacacccacccacauauc

SEQ ID NO: 286842 - RNA, 32 nt, Human
aaauuauucccugaauuguuugauauugucac

SEQ ID NO: 286843 - RNA, 32 nt, Human
aaauuauuccuugcuuucaucacuaccuuuau

SEQ ID NO: 286844 - RNA, 32 nt, Human
aaauuauucuccuguugagguccguggauggc

SEQ ID NO: 286845 - RNA, 32 nt, Human
aaauuauucucuuuugaaccuuccuuaccaaa

SEQ ID NO: 286846 - RNA, 32 nt, Human
aaauuauucuggucagaaaaccuguguguuuc

SEQ ID NO: 286847 - RNA, 32 nt, Human
aaauuauucuuagaaacugauuuggacuguua

SEQ ID NO: 286848 - RNA, 32 nt, Human
aaauuauucuuguaacacuucugguuuuguug

SEQ ID NO: 286849 - RNA, 32 nt, Human
aaauuauuucagucuuccauuaguucauuuca

SEQ ID NO: 286850 - RNA, 32 nt, Human
aaauuauuugcuuaagaagaauggucuuaacc

SEQ ID NO: 286851 - RNA, 32 nt, Human
aaauuauuuuccgaaggagguggguugggaga

SEQ ID NO: 286852 - RNA, 32 nt, Human
aaauuauuuuuacaguguguuugaggcuacaa

SEQ ID NO: 286853 - RNA, 32 nt, Human
aaauuauuuuuauggucccuuuaacgaggacc

SEQ ID NO: 286854 - RNA, 32 nt, Human
aaauucaaaguugcacuuuucaagaugugaga

SEQ ID NO: 286855 - RNA, 32 nt, Human
aaauucaaccucuguuccucaugggagucuga

SEQ ID NO: 286856 - RNA, 32 nt, Human
aaauucaaggagaaggaaugaggaguuaggga

SEQ ID NO: 286857 - RNA, 32 nt, Human
aaauucaauuaauuuuuggugcugcuauugca

SEQ ID NO: 286858 - RNA, 32 nt, Human
aaauucacaaauaacccuccauuuuucaauau

SEQ ID NO: 286859 - RNA, 32 nt, Human
aaauucaccucucucacugacuauuacaguug

SEQ ID NO: 286860 - RNA, 32 nt, Human
aaauucacucccuuggccauuaggcagggcuu

SEQ ID NO: 286861 - RNA, 32 nt, Human
aaauucagaauagauuaccauuaccuuccugc

SEQ ID NO: 286862 - RNA, 32 nt, Human
aaauucagcaacagacaccugcccacaaauca

SEQ ID NO: 286863 - RNA, 32 nt, Human
aaauucaggacaggagugaacucaaggccaug

SEQ ID NO: 286864 - RNA, 32 nt, Human
aaauucaggcugggugcaguggcucacacuug

SEQ ID NO: 286865 - RNA, 32 nt, Human
aaauucaggugccacugaaagccagauuuaua

SEQ ID NO: 286866 - RNA, 32 nt, Human
aaauucaggugugauccaagaggcucaugaaa

SEQ ID NO: 286867 - RNA, 32 nt, Human
aaauucagucaccacuguuauauuaccuucuc

SEQ ID NO: 286868 - RNA, 32 nt, Human
aaauucaguuuauuuggugaaaagaggaaaac

SEQ ID NO: 286869 - RNA, 32 nt, Human
aaauucauagagaggcacuguaugacaauuac

SEQ ID NO: 286870 - RNA, 32 nt, Human
aaauucauggccaccagcucaaguggacacuu

SEQ ID NO: 286871 - RNA, 32 nt, Human
aaauuccaaacagaaccagugacuuugcugcu

SEQ ID NO: 286872 - RNA, 32 nt, Human
aaauuccaaacaggccaacaagcagguaaauu

SEQ ID NO: 286873 - RNA, 32 nt, Human
aaauuccaaagagucaucagaagaggaaaaau

SEQ ID NO: 286874 - RNA, 32 nt, Human
aaauuccaagagccccagcccuaagggaaccc

SEQ ID NO: 286875 - RNA, 32 nt, Human
aaauuccaagaguuacaaucuggacuugguac

SEQ ID NO: 286876 - RNA, 32 nt, Human
aaauuccaaugcccacauguggcacagccuuc

SEQ ID NO: 286877 - RNA, 32 nt, Human
aaauuccacaacugccuuuagccuucuggaua

SEQ ID NO: 286878 - RNA, 32 nt, Human
aaauuccacacagauaagaggcaggauauaua

SEQ ID NO: 286879 - RNA, 32 nt, Human
aaauuccagaugagucagucucuugggaagug

SEQ ID NO: 286880 - RNA, 32 nt, Human
aaauuccagccaaccucaccuccucgggccca

SEQ ID NO: 286881 - RNA, 32 nt, Human
aaauuccagccagaugguagaagcgaugaauc

SEQ ID NO: 286882 - RNA, 32 nt, Human
aaauucccaguaaagaaugugaaagcaagcau

SEQ ID NO: 286883 - RNA, 32 nt, Human
aaauuccccuaccccuguuuaaagcugaaaaa

SEQ ID NO: 286884 - RNA, 32 nt, Human
aaauuccuaaacucccuucccucucucccauu

SEQ ID NO: 286885 - RNA, 32 nt, Human
aaauuccuaucaccuggugacaucaucacaug

SEQ ID NO: 286886 - RNA, 32 nt, Human
aaauuccucaacugcuauuuauuuauuccagc

SEQ ID NO: 286887 - RNA, 32 nt, Human
aaauuccuccucuaauuucagaauaaucacug

SEQ ID NO: 286888 - RNA, 32 nt, Human
aaauuccugcucaguuucacugcagcccuaau

SEQ ID NO: 286889 - RNA, 32 nt, Human
aaauuccugcuuguaauuuauauccauguuua

SEQ ID NO: 286890 - RNA, 32 nt, Human
aaauucgagacccagucucagagccaucggug

SEQ ID NO: 286891 - RNA, 32 nt, Human
aaauucgaggaaauguuuaaugagaauugcuu

SEQ ID NO: 286892 - RNA, 32 nt, Human
aaauucgaugaauacauuuucuucauaaccca

SEQ ID NO: 286893 - RNA, 32 nt, Human
aaauucgcccuuuaacagcuugcucuggcaac

SEQ ID NO: 286894 - RNA, 32 nt, Human
aaauucggacaauggauuauugguuacacaug

SEQ ID NO: 286895 - RNA, 32 nt, Human
aaauucggacuuguaggcgaucagggcugaag

SEQ ID NO: 286896 - RNA, 32 nt, Human
aaauucguugccaaagauuggacagagacacc

SEQ ID NO: 286897 - RNA, 32 nt, Human
aaauucuaaaggauuucugugcuauuauaauu

SEQ ID NO: 286898 - RNA, 32 nt, Human
aaauucuaguaaaaauaucucuaaguaaacuu

SEQ ID NO: 286899 - RNA, 32 nt, Human
aaauucucacucagguacacagugccaacaag

SEQ ID NO: 286900 - RNA, 32 nt, Human
aaauucucagccacccagacuuccugcaucag

SEQ ID NO: 286901 - RNA, 32 nt, Human
aaauucucaugauaugcuaaaauaucauuagc

SEQ ID NO: 286902 - RNA, 32 nt, Human
aaauucucuugugucucuuuccagucaauuuc

SEQ ID NO: 286903 - RNA, 32 nt, Human
aaauucucuuucucccucucuucuccaaucaa

SEQ ID NO: 286904 - RNA, 32 nt, Human
aaauucugaauagaauugcacucagaacuuau

SEQ ID NO: 286905 - RNA, 32 nt, Human
aaauucugacaugcugcaauauggaugaagcu

SEQ ID NO: 286906 - RNA, 32 nt, Human
aaauucugagccuuccucuggacccaggcagg

SEQ ID NO: 286907 - RNA, 19 nt, Human
aaauucugaguaucuacug

SEQ ID NO: 286908 - RNA, 32 nt, Human
aaauucugcagcugucugcugcucuaaagagu

SEQ ID NO: 286909 - RNA, 32 nt, Human
aaauucugccacuccagcuccuggguuagggg

SEQ ID NO: 286910 - RNA, 31 nt, Human
aaauucugccucucuggaucugcuuccugau

SEQ ID NO: 286911 - RNA, 32 nt, Human
aaauucugcugaccccagcuuuaggaaagauc

SEQ ID NO: 286912 - RNA, 32 nt, Human
aaauucuggaaggaauggaggagucucaacau

SEQ ID NO: 286913 - RNA, 29 nt, Human
aaauucuggcugcuucaucuccaucucua

SEQ ID NO: 286914 - RNA, 32 nt, Human
aaauucuggcugcuucaucuccaucucuagag

SEQ ID NO: 286915 - RNA, 32 nt, Human
aaauucugggagaaggggaugccagaccccuc

SEQ ID NO: 286916 - RNA, 32 nt, Human
aaauucugggauuacaggcauaagccaaugug

SEQ ID NO: 286917 - RNA, 32 nt, Human
aaauucugggauuacaggcaugagccaccaug

SEQ ID NO: 286918 - RNA, 32 nt, Human
aaauucugggcugucauauguaggauagccac

SEQ ID NO: 286919 - RNA, 32 nt, Human
aaauucuguccucaguggagagggagaaccgc

SEQ ID NO: 286920 - RNA, 32 nt, Human
aaauucuguuagcugcucacuuaaacaauguc

SEQ ID NO: 286921 - RNA, 32 nt, Human
aaauucuuaucaauuuggcaagcuacuuauca

SEQ ID NO: 286922 - RNA, 32 nt, Human
aaauucuuaugagccacucacagcaggcagca

SEQ ID NO: 286923 - RNA, 32 nt, Human
aaauucuucaugaacauaacucugcugaaugu

SEQ ID NO: 286924 - RNA, 32 nt, Human
aaauucuugccuggaaacuuuggagcaauuaa

SEQ ID NO: 286925 - RNA, 32 nt, Human
aaauucuuguaagcucugcgucgggugaaacc

SEQ ID NO: 286926 - RNA, 32 nt, Human
aaauucuuucaugagcuugccuaaaauucgga

SEQ ID NO: 286927 - RNA, 32 nt, Human
aaauugaaaacacacucaaaagacaaacaugc

SEQ ID NO: 286928 - RNA, 32 nt, Human
aaauugaaaaugugcauguuuuggugcacaaa

SEQ ID NO: 286929 - RNA, 32 nt, Human
aaauugaaaugagaaucuguggauaaguguuu

SEQ ID NO: 286930 - RNA, 32 nt, Human
aaauugaaccagccuggagucuuauucuccac

SEQ ID NO: 286931 - RNA, 32 nt, Human
aaauugaagcccagggaagggaagggaccggu

SEQ ID NO: 286932 - RNA, 32 nt, Human
aaauugaaggagaaaauuuaagugagucuuua

SEQ ID NO: 286933 - RNA, 32 nt, Human
aaauugaagucaggauaaggaggacgacucag

SEQ ID NO: 286934 - RNA, 32 nt, Human
aaauugaaguugagcaagcuuuccacucgaug

SEQ ID NO: 286935 - RNA, 32 nt, Human
aaauugacauauuuuuauguaaaguuuuucua

SEQ ID NO: 286936 - RNA, 32 nt, Human
aaauugaccacugucuaaggagccuaguaauc

SEQ ID NO: 286937 - RNA, 32 nt, Human
aaauugacuaccuggaggaaugauuaggaauc

SEQ ID NO: 286938 - RNA, 32 nt, Human
aaauugacugccaggcugggugcaguggcuca

SEQ ID NO: 286939 - RNA, 32 nt, Human
aaauugacuguacuguuuaacugucaauucuc

SEQ ID NO: 286940 - RNA, 32 nt, Human
aaauugagaaggcugcccgcaccagcugggaa

SEQ ID NO: 286941 - RNA, 32 nt, Human
aaauugagcagcuucagaaaauccugcgaagu

SEQ ID NO: 286942 - RNA, 32 nt, Human
aaauugaggaaaucacuauuucucacuucugu

SEQ ID NO: 286943 - RNA, 32 nt, Human
aaauugagguccagagaggucacagucacgaa

SEQ ID NO: 286944 - RNA, 32 nt, Human
aaauugaggucucaaggggaaaagccaccugc

SEQ ID NO: 286945 - RNA, 32 nt, Human
aaauugagguggauaaauacaaaaagguagug

SEQ ID NO: 286946 - RNA, 31 nt, Human
aaauugaguauuuucugacauaagaauauau

SEQ ID NO: 286947 - RNA, 32 nt, Human
aaauugauaccuguuagcauucacugccacca

SEQ ID NO: 286948 - RNA, 32 nt, Human
aaauugauauuagcugggcaugguagcucaug

SEQ ID NO: 286949 - RNA, 32 nt, Human
aaauugauauucucaugggcuuugcugagagu

SEQ ID NO: 286950 - RNA, 32 nt, Human
aaauugaucuuaauaacucucccuucauaucu

SEQ ID NO: 286951 - RNA, 32 nt, Human
aaauugauuaccugaagcauaguacuagaaag

SEQ ID NO: 286952 - RNA, 32 nt, Human
aaauugcaaaacuggcuugauuuggaauguuu

SEQ ID NO: 286953 - RNA, 32 nt, Human
aaauugcaaaguacaauuaacauuugagucug

SEQ ID NO: 286954 - RNA, 32 nt, Human
aaauugcaaccauuucacaccauuguaaaguc

SEQ ID NO: 286955 - RNA, 32 nt, Human
aaauugcaagccacacuucuagagauuuuguu

SEQ ID NO: 286956 - RNA, 32 nt, Human
aaauugcaccacugcacacugcacuccauccu

SEQ ID NO: 286957 - RNA, 32 nt, Human
aaauugcaccacugcacuccagccugggaaac

SEQ ID NO: 286958 - RNA, 32 nt, Human
aaauugcaccacugcacuccagccugggagac

SEQ ID NO: 286959 - RNA, 32 nt, Human
aaauugcaccacugcacuccauccugggcaac

SEQ ID NO: 286960 - RNA, 32 nt, Human
aaauugcaccacugcacugcagccugggaaac

SEQ ID NO: 286961 - RNA, 32 nt, Human
aaauugcaccauugcacuccagccugggcaau

SEQ ID NO: 286962 - RNA, 32 nt, Human
aaauugcagaagcaggaaggugacucugaccu

SEQ ID NO: 286963 - RNA, 32 nt, Human
aaauugcagggaggggagggagcgagggccaa

SEQ ID NO: 286964 - RNA, 32 nt, Human
aaauugcaggggagguggaggccagaggacag

SEQ ID NO: 286965 - RNA, 32 nt, Human
aaauugcaguguccauaaguaaaguuuuauug

SEQ ID NO: 286966 - RNA, 32 nt, Human
aaauugcagugucuauccugcugccaucagcc

SEQ ID NO: 286967 - RNA, 32 nt, Human
aaauugcaguguucugucaccuaggcaucauc

SEQ ID NO: 286968 - RNA, 32 nt, Human
aaauugcauguucuaauuccacguauuuucca

SEQ ID NO: 286969 - RNA, 32 nt, Human
aaauugcauuuauaaaugaucuguauuagaau

SEQ ID NO: 286970 - RNA, 32 nt, Human
aaauugcauuuauaaaugaucuguauuauaau

SEQ ID NO: 286971 - RNA, 32 nt, Human
aaauugcauuuuguuuacauguggugaacaug

SEQ ID NO: 286972 - RNA, 32 nt, Human
aaauugccaagugccuaugcaaaccagcuuua

SEQ ID NO: 286973 - RNA, 32 nt, Human
aaauugcccagccucagguauucuuuauagca

SEQ ID NO: 286974 - RNA, 32 nt, Human
aaauugccccaguaacuucacacacauuuaau

SEQ ID NO: 286975 - RNA, 32 nt, Human
aaauugccccauccagaccuggcuccacucuu

SEQ ID NO: 286976 - RNA, 32 nt, Human
aaauugcccugcaggcuggagugcagcggcau

SEQ ID NO: 286977 - RNA, 32 nt, Human
aaauugccuguuuuucucgcaggcucuauucc

SEQ ID NO: 286978 - RNA, 32 nt, Human
aaauugccuuucucuauuuguuaagaauuuuu

SEQ ID NO: 286979 - RNA, 32 nt, Human
aaauugcugacuugcagaaucaugagaaaaac

SEQ ID NO: 286980 - RNA, 32 nt, Human
aaauugcugccguggagaagacuggaggaaac

SEQ ID NO: 286981 - RNA, 32 nt, Human
aaauugcugccugggugaaugcugcuuguucu

SEQ ID NO: 286982 - RNA, 32 nt, Human
aaauugcuggaaggcugcgucucugcuguggu

SEQ ID NO: 286983 - RNA, 32 nt, Human
aaauugcuggcugggugcaguggcuuaugccc

SEQ ID NO: 286984 - RNA, 32 nt, Human
aaauugcuuacuuuggaauacauuucuccuuu

SEQ ID NO: 286985 - RNA, 32 nt, Human
aaauugcuuaggaugaucucagacagugacug

SEQ ID NO: 286986 - RNA, 32 nt, Human
aaauugcuuaucucuagguaguuuaaagaaaa

SEQ ID NO: 286987 - RNA, 32 nt, Human
aaauugcuuccucuggggaggcgaauacggcu

SEQ ID NO: 286988 - RNA, 32 nt, Human
aaauugcuuguuucuuuuucuuggacuacuuu

SEQ ID NO: 286989 - RNA, 32 nt, Human
aaauuggaaagcagagguugcagugagcugag

SEQ ID NO: 286990 - RNA, 32 nt, Human
aaauuggaaauguuggcuucaccagaaccuaa

SEQ ID NO: 286991 - RNA, 32 nt, Human
aaauuggaccuacaggcugacguuccgggcaa

SEQ ID NO: 286992 - RNA, 32 nt, Human
aaauuggaccucaaaggguuuccuuguguuuu

SEQ ID NO: 286993 - RNA, 32 nt, Human
aaauuggagaccgucagccagaaaaccacccu

SEQ ID NO: 286994 - RNA, 32 nt, Human
aaauuggagacugauagguugaucagaaacuc

SEQ ID NO: 286995 - RNA, 32 nt, Human
aaauuggagcugcuuaaucauauugauaucua

SEQ ID NO: 286996 - RNA, 32 nt, Human
aaauuggagggguaguuaaggggguuugauuc

SEQ ID NO: 286997 - RNA, 32 nt, Human
aaauuggauugaauuauuuuucucagagccuu

SEQ ID NO: 286998 - RNA, 32 nt, Human
aaauuggcaaauggguugggugcaauggcuca

SEQ ID NO: 286999 - RNA, 32 nt, Human
aaauuggccaaaacaaagggguuacagggucc

SEQ ID NO: 287000 - RNA, 32 nt, Human
aaauuggccaaaacaaauucugauggaucuuc

SEQ ID NO: 287001 - RNA, 32 nt, Human
aaauuggccaagcucuggaaugagggucuggg

SEQ ID NO: 287002 - RNA, 32 nt, Human
aaauuggccacugguaaaacucugcagcuuca

SEQ ID NO: 287003 - RNA, 32 nt, Human
aaauuggccauggaggcacaccaaagcuucaa

SEQ ID NO: 287004 - RNA, 32 nt, Human
aaauuggccugagcauaagaagaaaaaguauc

SEQ ID NO: 287005 - RNA, 31 nt, Human
aaauuggccuguauuuuuacauucuuguaau

SEQ ID NO: 287006 - RNA, 32 nt, Human
aaauuggcuuuucccguuggggccgaagguac

SEQ ID NO: 287007 - RNA, 32 nt, Human
aaauugggcuuggaacccgggagccagaucuu

SEQ ID NO: 287008 - RNA, 32 nt, Human
aaauuggggaaagugguaaaaugaguaauuca

SEQ ID NO: 287009 - RNA, 32 nt, Human
aaauuggggaggggaugcugggugggaaacag

SEQ ID NO: 287010 - RNA, 27 nt, Human
aaauugggguucaggcccacccagggg

SEQ ID NO: 287011 - RNA, 32 nt, Human
aaauuggguccagaaagggaagugaggagaau

SEQ ID NO: 287012 - RNA, 23 nt, Human
aaauugguccaaccacuguggaa

SEQ ID NO: 287013 - RNA, 32 nt, Human
aaauugguccaauaaugcacgugcuuugcccu

SEQ ID NO: 287014 - RNA, 32 nt, Human
aaauuggugaccaccagucaugccuaggaccu

SEQ ID NO: 287015 - RNA, 32 nt, Human
aaauugguugucuuguaaauaucuuauaaaga

SEQ ID NO: 287016 - RNA, 32 nt, Human
aaauuguaagaucagucugguacugaauaaaa

SEQ ID NO: 287017 - RNA, 32 nt, Human
aaauuguaaugcguuugucuguuguugacaug

SEQ ID NO: 287018 - RNA, 32 nt, Human
aaauuguaaugugguugcugcugaaggaggag

SEQ ID NO: 287019 - RNA, 32 nt, Human
aaauuguacucagaagaauucugcaaggcuug

SEQ ID NO: 287020 - RNA, 32 nt, Human
aaauuguacuuggucacuuuugugcuugagga

SEQ ID NO: 287021 - RNA, 32 nt, Human
aaauuguagaaaacugaaagaaaacaagacaa

SEQ ID NO: 287022 - RNA, 32 nt, Human
aaauuguagggagaggaauaugguaaagccaa

SEQ ID NO: 287023 - RNA, 32 nt, Human
aaauuguagggaggcagaugagaguugcaauu

SEQ ID NO: 287024 - RNA, 32 nt, Human
aaauuguauaaauauucaaaauuuuauuagga

SEQ ID NO: 287025 - RNA, 32 nt, Human
aaauuguauacuuuaccaguaaguuuucagag

SEQ ID NO: 287026 - RNA, 32 nt, Human
aaauuguauaggacuugaaaaggaagcccuac

SEQ ID NO: 287027 - RNA, 32 nt, Human
aaauugucagcagccucauggggaggaaaaag

SEQ ID NO: 287028 - RNA, 32 nt, Human
aaauugucaguaccuuugcucaugccaugccc

SEQ ID NO: 287029 - RNA, 32 nt, Human
aaauugucagugcuugaagcuguuuccuuuac

SEQ ID NO: 287030 - RNA, 32 nt, Human
aaauugucauauucaaaacaaauguggauaca

SEQ ID NO: 287031 - RNA, 32 nt, Human
aaauugucaugagauucugaacacuaguauug

SEQ ID NO: 287032 - RNA, 32 nt, Human
aaauuguccagcugccuggcucuuuugcaaua

SEQ ID NO: 287033 - RNA, 32 nt, Human
aaauuguccaguugucaggagcagcgaaacag

SEQ ID NO: 287034 - RNA, 32 nt, Human
aaauuguccuuccauucacccuucucauaaag

SEQ ID NO: 287035 - RNA, 32 nt, Human
aaauugucugguaucaugaauuuggaacacca

SEQ ID NO: 287036 - RNA, 32 nt, Human
aaauugucuuugaagucgugugcauugcacgu

SEQ ID NO: 287037 - RNA, 32 nt, Human
aaauugugaacucauugcucccuaagacugug

SEQ ID NO: 287038 - RNA, 32 nt, Human
aaauugugagguggaugggggagugaaaucuc

SEQ ID NO: 287039 - RNA, 32 nt, Human
aaauugugcauuccuuccggggccaucgucuu

SEQ ID NO: 287040 - RNA, 32 nt, Human
aaauugugccacuaguacuccagccuggguga

SEQ ID NO: 287041 - RNA, 32 nt, Human
aaauugugccacugcacuccagacugggugac

SEQ ID NO: 287042 - RNA, 32 nt, Human
aaauugugccacugcacuuuucagccugggug

SEQ ID NO: 287043 - RNA, 32 nt, Human
aaauugugcuauugcacuccagccugggugac

SEQ ID NO: 287044 - RNA, 32 nt, Human
aaauugugcuuccgaugggguggggacugaga

SEQ ID NO: 287045 - RNA, 32 nt, Human
aaauuguguaugaauuucccaguuuuugcacc

SEQ ID NO: 287046 - RNA, 32 nt, Human
aaauugugugaaggcugaaaaggggcuuggag

SEQ ID NO: 287047 - RNA, 32 nt, Human
aaauuguguuaugccacuacucauguugucuu

SEQ ID NO: 287048 - RNA, 32 nt, Human
aaauuguguuugcuuugguuauaguuacuccu

SEQ ID NO: 287049 - RNA, 32 nt, Human
aaauuguucacccaaaugauucucuuauaaac

SEQ ID NO: 287050 - RNA, 32 nt, Human
aaauuguucccaaaugaaaacuuguuuuaagu

SEQ ID NO: 287051 - RNA, 32 nt, Human
aaauuguuccuauccagguucagggccuucag

SEQ ID NO: 287052 - RNA, 32 nt, Human
aaauuguuuagacacagauauuuggaauuagc

SEQ ID NO: 287053 - RNA, 32 nt, Human
aaauuguuuucagcucuuggauauagcagcaa

SEQ ID NO: 287054 - RNA, 32 nt, Human
aaauuuaaacuaauaugcuguguccuuuaauc

SEQ ID NO: 287055 - RNA, 32 nt, Human
aaauuuaaaucccacauuguaaaguuuguaca

SEQ ID NO: 287056 - RNA, 32 nt, Human
aaauuuaaugcaauugaaaaaguuuucaaauu

SEQ ID NO: 287057 - RNA, 32 nt, Human
aaauuuaauucaaaaugguggcuauaaucacu

SEQ ID NO: 287058 - RNA, 32 nt, Human
aaauuuacacccaagagggacaacccugagca

SEQ ID NO: 287059 - RNA, 32 nt, Human
aaauuuacaccccucacguuucccucucccuu

SEQ ID NO: 287060 - RNA, 32 nt, Human
aaauuuacagcuaaugauccaagcagauagaa

SEQ ID NO: 287061 - RNA, 32 nt, Human
aaauuuacaucacucauaggugcucaaaaguc

SEQ ID NO: 287062 - RNA, 32 nt, Human
aaauuuaccagaacaguuuagccuggggguua

SEQ ID NO: 287063 - RNA, 24 nt, Human
aaauuuaccucacuccuuacuuug

SEQ ID NO: 287064 - RNA, 22 nt, Human
aaauuuaccuuuuguuacuuua

SEQ ID NO: 287065 - RNA, 19 nt, Human
aaauuuacgcuucuuaacc

SEQ ID NO: 287066 - RNA, 32 nt, Human
aaauuuacggcugggugcaguggcucacaccu

SEQ ID NO: 287067 - RNA, 32 nt, Human
aaauuuacguuucucucugaguccuguaacug

SEQ ID NO: 287068 - RNA, 32 nt, Human
aaauuuacuaagcuuaacuacaugucacacau

SEQ ID NO: 287069 - RNA, 32 nt, Human
aaauuuagaaaauccaauuuuucuuaagcauu

SEQ ID NO: 287070 - RNA, 32 nt, Human
aaauuuagaaauggcaugcaucacacauuuau

SEQ ID NO: 287071 - RNA, 32 nt, Human
aaauuuagacuauguaguaugugacagaauuu

SEQ ID NO: 287072 - RNA, 21 nt, Human
aaauuuagauuccuuauacuu

SEQ ID NO: 287073 - RNA, 32 nt, Human
aaauuuaggaaucauugccccaaaaaguggcc

SEQ ID NO: 287074 - RNA, 32 nt, Human
aaauuuagggugacuguguggcugacuauucu

SEQ ID NO: 287075 - RNA, 32 nt, Human
aaauuuaguuuucaucccaagaugucuuuucu

SEQ ID NO: 287076 - RNA, 32 nt, Human
aaauuuaucucagcuucuguuagcuuauccuc

SEQ ID NO: 287077 - RNA, 32 nt, Human
aaauuuaugaaagaaaauugggaguaggaaug

SEQ ID NO: 287078 - RNA, 32 nt, Human
aaauuuaugugugguuuuaaagucauuccagu

SEQ ID NO: 287079 - RNA, 32 nt, Human
aaauuuauugagguauuugguuaucaaagaua

SEQ ID NO: 287080 - RNA, 24 nt, Human
aaauuuauuuauuuuuuccuuccu

SEQ ID NO: 287081 - RNA, 32 nt, Human
aaauuuauuuucuuccuaguucuggaggcugg

SEQ ID NO: 287082 - RNA, 32 nt, Human
aaauuucaaagcagacuucuugaauuguuuac

SEQ ID NO: 287083 - RNA, 32 nt, Human
aaauuucaacaucuagaucaucauggaguggg

SEQ ID NO: 287084 - RNA, 32 nt, Human
aaauuucaaccagcucauuccccgagcacucc

SEQ ID NO: 287085 - RNA, 32 nt, Human
aaauuucaauaugucaguauagaggcucuacu

SEQ ID NO: 287086 - RNA, 32 nt, Human
aaauuucacuaaauccagugugagggauguuc

SEQ ID NO: 287087 - RNA, 32 nt, Human
aaauuucacuaagacuuuuggaauucuugugu

SEQ ID NO: 287088 - RNA, 32 nt, Human
aaauuucagaacuuucaggagggcaagagaau

SEQ ID NO: 287089 - RNA, 32 nt, Human
aaauuucagcacaucacaaucucucugaagau

SEQ ID NO: 287090 - RNA, 32 nt, Human
aaauuucagcagcgggagaagauggacaagag

SEQ ID NO: 287091 - RNA, 24 nt, Human
aaauuucagccuccaaagguagga

SEQ ID NO: 287092 - RNA, 31 nt, Human
aaauuucaggccuucuuuaugucaccuaaaa

SEQ ID NO: 287093 - RNA, 32 nt, Human
aaauuucauaaagggacaugcauuuuacuggg

SEQ ID NO: 287094 - RNA, 32 nt, Human
aaauuucaugcucuccccaaauucugucugau

SEQ ID NO: 287095 - RNA, 32 nt, Human
aaauuucauuccucaaaccuuucaggaggggu

SEQ ID NO: 287096 - RNA, 32 nt, Human
aaauuuccaaaccucuuuucuuauuggaaauu

SEQ ID NO: 287097 - RNA, 32 nt, Human
aaauuuccagaacaggccaaucugaagagaug

SEQ ID NO: 287098 - RNA, 32 nt, Human
aaauuuccagugagcuuaucaugcugucuuua

SEQ ID NO: 287099 - RNA, 32 nt, Human
aaauuuccauuuuaugaagaaaggaaccaaau

SEQ ID NO: 287100 - RNA, 32 nt, Human
aaauuucccagggaaggagaccgucaggccgc

SEQ ID NO: 287101 - RNA, 32 nt, Human
aaauuucccauuucucaagaaauguucauauu

SEQ ID NO: 287102 - RNA, 32 nt, Human
aaauuuccuaacucccugugcugcaguuucuu

SEQ ID NO: 287103 - RNA, 32 nt, Human
aaauuuccucucucccccuucuuacccugucu

SEQ ID NO: 287104 - RNA, 32 nt, Human
aaauuucguaacuggucacagcucauucauaa

SEQ ID NO: 287105 - RNA, 19 nt, Human
aaauuucuagcucccaacc

SEQ ID NO: 287106 - RNA, 32 nt, Human
aaauuucuauauagauuuuauaccucaguggg

SEQ ID NO: 287107 - RNA, 32 nt, Human
aaauuucucauauauccccugcccucacacau

SEQ ID NO: 287108 - RNA, 32 nt, Human
aaauuucucuccagcagaaugcagccccucaa

SEQ ID NO: 287109 - RNA, 32 nt, Human
aaauuucucuucuuccuguuauugguaguucu

SEQ ID NO: 287110 - RNA, 32 nt, Human
aaauuucugggagucugaggaguacugacaua

SEQ ID NO: 287111 - RNA, 32 nt, Human
aaauuucuguaucugcugaauuauuaaugcca

SEQ ID NO: 287112 - RNA, 32 nt, Human
aaauuucugucugcuuuccuucccaagguagg

SEQ ID NO: 287113 - RNA, 32 nt, Human
aaauuucugugguuuguggcuuuuucuuccau

SEQ ID NO: 287114 - RNA, 32 nt, Human
aaauuucuuuaaaagacauaugggugggauga

SEQ ID NO: 287115 - RNA, 32 nt, Human
aaauuucuuucacaaaugagagcuagggaaag

SEQ ID NO: 287116 - RNA, 32 nt, Human
aaauuucuuuuguuccagagauuguuuaaaaa

SEQ ID NO: 287117 - RNA, 32 nt, Human
aaauuugaaaccugcauuucucccacagcaau

SEQ ID NO: 287118 - RNA, 32 nt, Human
aaauuugaaagaaaagccuauaaaagugcaca

SEQ ID NO: 287119 - RNA, 32 nt, Human
aaauuugaaaugcagggcaugaaggcuuaaag

SEQ ID NO: 287120 - RNA, 32 nt, Human
aaauuugaacauuugaugauuuuugcaggaga

SEQ ID NO: 287121 - RNA, 32 nt, Human
aaauuugaagugaauagugaaccaacaucucu

SEQ ID NO: 287122 - RNA, 32 nt, Human
aaauuugagaugguugaaugagggccggaggc

SEQ ID NO: 287123 - RNA, 32 nt, Human
aaauuugagucucccugccucucccaaauaua

SEQ ID NO: 287124 - RNA, 32 nt, Human
aaauuugcacacaaaacaucuuaggcacuuuu

SEQ ID NO: 287125 - RNA, 32 nt, Human
aaauuugcacacaauguucauagcagcauuau

SEQ ID NO: 287126 - RNA, 32 nt, Human
aaauuugcccagcugucgucuaagcccucuug

SEQ ID NO: 287127 - RNA, 32 nt, Human
aaauuugccugacuucuuaagaacaaaacccc

SEQ ID NO: 287128 - RNA, 32 nt, Human
aaauuugcgccacugcauucuagccugaguga

SEQ ID NO: 287129 - RNA, 24 nt, Human
aaauuugcuagaagaaauagcaaa

SEQ ID NO: 287130 - RNA, 32 nt, Human
aaauuugcuaucuaccuauuuacuaacauaaa

SEQ ID NO: 287131 - RNA, 32 nt, Human
aaauuuggaaacagaguaaugaagaaauaaua

SEQ ID NO: 287132 - RNA, 32 nt, Human
aaauuuggaauuucugauaccuccagugggcc

SEQ ID NO: 287133 - RNA, 32 nt, Human
aaauuuggacuggccauuuccucgcugaguga

SEQ ID NO: 287134 - RNA, 32 nt, Human
aaauuuggacuguuguucugcuuuuccuggca

SEQ ID NO: 287135 - RNA, 32 nt, Human
aaauuuggcuguucucuggagcuaaaccauua

SEQ ID NO: 287136 - RNA, 32 nt, Human
aaauuugggaagagaaucugugcuaugcaaug

SEQ ID NO: 287137 - RNA, 31 nt, Human
aaauuugggaggccaagaugggaggaucacu

SEQ ID NO: 287138 - RNA, 32 nt, Human
aaauuuggguauagacaauaaagaacugaagu

SEQ ID NO: 287139 - RNA, 32 nt, Human
aaauuugguguuagguccuuggcacuuuccuu

SEQ ID NO: 287140 - RNA, 22 nt, Human
aaauuugguucugggaaacuga

SEQ ID NO: 287141 - RNA, 32 nt, Human
aaauuuguagugaauuuguucuugccauuauu

SEQ ID NO: 287142 - RNA, 32 nt, Human
aaauuuguaucuuuacuagaacaugagaaucu

SEQ ID NO: 287143 - RNA, 32 nt, Human
aaauuugucaggcugggugcaguggcucaugc

SEQ ID NO: 287144 - RNA, 32 nt, Human
aaauuugugcauuauaaaugcaauaucacugu

SEQ ID NO: 287145 - RNA, 32 nt, Human
aaauuuuaaacugcucucaacguaggaaucuu

SEQ ID NO: 287146 - RNA, 32 nt, Human
aaauuuuaaagaaaauaugaggaaguggcuau

SEQ ID NO: 287147 - RNA, 32 nt, Human
aaauuuuaaccagcauuaacaugguagagugg

SEQ ID NO: 287148 - RNA, 32 nt, Human
aaauuuuaaggauugugacacacuccuacuau

SEQ ID NO: 287149 - RNA, 32 nt, Human
aaauuuuaaucacacacacauucuuuuggggg

SEQ ID NO: 287150 - RNA, 32 nt, Human
aaauuuuaauuagcugggugugguggcucaag

SEQ ID NO: 287151 - RNA, 32 nt, Human
aaauuuuacaguuuauacuucugugauguugu

SEQ ID NO: 287152 - RNA, 32 nt, Human
aaauuuuagaaaauauguuuugucacccuguu

SEQ ID NO: 287153 - RNA, 32 nt, Human
aaauuuuauucagcaauuaauagugauuucag

SEQ ID NO: 287154 - RNA, 32 nt, Human
aaauuuuauuuuacagaauuuaccuucucugu

SEQ ID NO: 287155 - RNA, 32 nt, Human
aaauuuucaaaugaguaagcagugccaccaac

SEQ ID NO: 287156 - RNA, 32 nt, Human
aaauuuucacauaucacauccauucucaaggu

SEQ ID NO: 287157 - RNA, 32 nt, Human
aaauuuucauucuuaccaaaacaguuaacucu

SEQ ID NO: 287158 - RNA, 32 nt, Human
aaauuuuccagccccuugccucccagaacccc

SEQ ID NO: 287159 - RNA, 32 nt, Human
aaauuuucucaaauggccaagcucugaugguc

SEQ ID NO: 287160 - RNA, 32 nt, Human
aaauuuucugcaagaaagaaugaauuucagga

SEQ ID NO: 287161 - RNA, 32 nt, Human
aaauuuucuguuuuauuucuuuacagauucca

SEQ ID NO: 287162 - RNA, 32 nt, Human
aaauuuucuuuuccaagaagcuuuugaauaag

SEQ ID NO: 287163 - RNA, 32 nt, Human
aaauuuugaaucugaaagccaccaaauguauc

SEQ ID NO: 287164 - RNA, 32 nt, Human
aaauuuugacuugcacuucagauuuccuuuuu

SEQ ID NO: 287165 - RNA, 32 nt, Human
aaauuuugacuuguaacaccauuucaauauaa

SEQ ID NO: 287166 - RNA, 32 nt, Human
aaauuuugagaggguauagaaaaugacuuuag

SEQ ID NO: 287167 - RNA, 32 nt, Human
aaauuuugcccagguggauaaauguguacaug

SEQ ID NO: 287168 - RNA, 32 nt, Human
aaauuuugcuaccaaagaaugcauguucugug

SEQ ID NO: 287169 - RNA, 32 nt, Human
aaauuuugcuucugaaauaugguagcuuucca

SEQ ID NO: 287170 - RNA, 32 nt, Human
aaauuuuggacgggagagaggggcuauuccau

SEQ ID NO: 287171 - RNA, 32 nt, Human
aaauuuugguacaguguacauugaaaaccaug

SEQ ID NO: 287172 - RNA, 32 nt, Human
aaauuuugugguggugccaugcaauccccuuu

SEQ ID NO: 287173 - RNA, 32 nt, Human
aaauuuuguuaccucuauccuggcuugccuga

SEQ ID NO: 287174 - RNA, 32 nt, Human
aaauuuuuaaacuucacaaaaguuucugaaaa

SEQ ID NO: 287175 - RNA, 32 nt, Human
aaauuuuuaaagaaauuauauugcauggaugu

SEQ ID NO: 287176 - RNA, 32 nt, Human
aaauuuuuaauuucuuucuucccuuucuugcu

SEQ ID NO: 287177 - RNA, 32 nt, Human
aaauuuuuacaucucucucacccuucuacuuc

SEQ ID NO: 287178 - RNA, 32 nt, Human
aaauuuuuagaucaaaaaggcaaaugauuuua

SEQ ID NO: 287179 - RNA, 32 nt, Human
aaauuuuucugcuacauugucugcucagcucg

SEQ ID NO: 287180 - RNA, 32 nt, Human
aaauuuuugugucugugaggggccagauagua

SEQ ID NO: 287181 - RNA, 32 nt, Human
aacaaaaacaaauggcaaguuucacuuaaggg

SEQ ID NO: 287182 - RNA, 32 nt, Human
aacaaaaacagcuucaacuguucgaauuuuau

SEQ ID NO: 287183 - RNA, 22 nt, Human
aacaaaaaccacaaaaauuccc

SEQ ID NO: 287184 - RNA, 32 nt, Human
aacaaaaaccacgaaagcacacacaaaauaaa

SEQ ID NO: 287185 - RNA, 32 nt, Human
aacaaaaagaaccaaguagagagaguggagcu

SEQ ID NO: 287186 - RNA, 32 nt, Human
aacaaaaagaauugcccacgcuguggaagaua

SEQ ID NO: 287187 - RNA, 32 nt, Human
aacaaaaagaugaccuuugucucaccucauag

SEQ ID NO: 287188 - RNA, 32 nt, Human
aacaaaaagccacagaggcagagcaagcauuc

SEQ ID NO: 287189 - RNA, 32 nt, Human
aacaaaaaggaaaugaggagagaaaguuacug

SEQ ID NO: 287190 - RNA, 32 nt, Human
aacaaaaaggcugggugcaguggcucacaccu

SEQ ID NO: 287191 - RNA, 32 nt, Human
aacaaaaaguccauauguguugugcuaaucca

SEQ ID NO: 287192 - RNA, 32 nt, Human
aacaaaaaguuuggcaccagccaccugggacc

SEQ ID NO: 287193 - RNA, 32 nt, Human
aacaaaacaaaaggcucauaacaacaagaacg

SEQ ID NO: 287194 - RNA, 32 nt, Human
aacaaaacaaacaacaaaagcagcuugccuua

SEQ ID NO: 287195 - RNA, 32 nt, Human
aacaaaacaacaaaaggaacagauccuugacc

SEQ ID NO: 287196 - RNA, 32 nt, Human
aacaaaacaccacaaaacagacuucacuaaca

SEQ ID NO: 287197 - RNA, 19 nt, Human
aacaaaacagaacaaaaca

SEQ ID NO: 287198 - RNA, 32 nt, Human
aacaaaacauaaaaagccauuuuggagacagu

SEQ ID NO: 287199 - RNA, 32 nt, Human
aacaaaacauaccuguauacacacacauucac

SEQ ID NO: 287200 - RNA, 19 nt, Human
aacaaaacaucucaggaca

SEQ ID NO: 287201 - RNA, 32 nt, Human
aacaaaaccaagcucccuucccuuccuccccc

SEQ ID NO: 287202 - RNA, 32 nt, Human
aacaaaacccagcuccugagucuccagauguu

SEQ ID NO: 287203 - RNA, 32 nt, Human
aacaaaacccaguguuugcacacacacaaaau

SEQ ID NO: 287204 - RNA, 32 nt, Human
aacaaaacccucccaguguguguccgucucuc

SEQ ID NO: 287205 - RNA, 32 nt, Human
aacaaaacccuuggccacauguugacuugauu

SEQ ID NO: 287206 - RNA, 32 nt, Human
aacaaaaccucagagcccgggucaucuucugc

SEQ ID NO: 287207 - RNA, 32 nt, Human
aacaaaacuaaguugugaaggaagggagggaa

SEQ ID NO: 287208 - RNA, 32 nt, Human
aacaaaacuacagcaagacacagaaaggugug

SEQ ID NO: 287209 - RNA, 32 nt, Human
aacaaaacuauacaaucauauuuucucuucua

SEQ ID NO: 287210 - RNA, 32 nt, Human
aacaaaacuauacuugaacaaaagggucagag

SEQ ID NO: 287211 - RNA, 32 nt, Human
aacaaaacugugccaacuacuacuggugaugc

SEQ ID NO: 287212 - RNA, 32 nt, Human
aacaaaacuucuauuauccagagucaugggag

SEQ ID NO: 287213 - RNA, 32 nt, Human
aacaaaagaacuaguccucuuagaauuucuug

SEQ ID NO: 287214 - RNA, 32 nt, Human
aacaaaagaagaagaaaaagaaaaacaaccac

SEQ ID NO: 287215 - RNA, 32 nt, Human
aacaaaagaccagaaaagcacucuccacccag

SEQ ID NO: 287216 - RNA, 32 nt, Human
aacaaaagagccucugacauuacugucucuca

SEQ ID NO: 287217 - RNA, 32 nt, Human
aacaaaagagucaguaagagaaaauuuauccc

SEQ ID NO: 287218 - RNA, 32 nt, Human
aacaaaagcagguugagauggggaagaugaca

SEQ ID NO: 287219 - RNA, 32 nt, Human
aacaaaaggaaguaguuaaaugcuuugguuca

SEQ ID NO: 287220 - RNA, 32 nt, Human
aacaaaagggagagccccacaaaacuuugggg

SEQ ID NO: 287221 - RNA, 32 nt, Human
aacaaaaguacuguacucacacacauaaggua

SEQ ID NO: 287222 - RNA, 32 nt, Human
aacaaaagugcuaaacauuuccuugaauauau

SEQ ID NO: 287223 - RNA, 32 nt, Human
aacaaaauacaaaaacccuuaggacuucucau

SEQ ID NO: 287224 - RNA, 32 nt, Human
aacaaaauacccuuuuucuuuuaguaugguuu

SEQ ID NO: 287225 - RNA, 32 nt, Human
aacaaaauaguguuugucaucagguugguacu

SEQ ID NO: 287226 - RNA, 31 nt, Human
aacaaaaugaacaagguagaucagaaguucc

SEQ ID NO: 287227 - RNA, 32 nt, Human
aacaaaaugaggacaaaaauauggacugaugu

SEQ ID NO: 287228 - RNA, 32 nt, Human
aacaaaaugauucucucccaaagaaagacaca

SEQ ID NO: 287229 - RNA, 32 nt, Human
aacaaaauucuuaucuuccauggaugcuuuaa

SEQ ID NO: 287230 - RNA, 22 nt, Human
aacaaacaaacaaaaaacaaga

SEQ ID NO: 287231 - RNA, 22 nt, Human
aacaaacaaacaaaaaaccaga

SEQ ID NO: 287232 - RNA, 20 nt, Human
aacaaacaaacaaaaacaga

SEQ ID NO: 287233 - RNA, 24 nt, Human
aacaaacaaacaaaaagcggcagg

SEQ ID NO: 287234 - RNA, 20 nt, Human
aacaaacaaacaaaaauugc

SEQ ID NO: 287235 - RNA, 21 nt, Human
aacaaacaaacaaaacaaaga

SEQ ID NO: 287236 - RNA, 25 nt, Human
aacaaacaaacaaaacuaagcaaga

SEQ ID NO: 287237 - RNA, 22 nt, Human
aacaaacaaacaaacuguugca

SEQ ID NO: 287238 - RNA, 21 nt, Human
aacaaacaaacaaagcuugca

SEQ ID NO: 287239 - RNA, 32 nt, Human
aacaaacaaacagugaccuucuccauggguca

SEQ ID NO: 287240 - RNA, 32 nt, Human
aacaaacaaagcaaaccaaagccccggcccuc

SEQ ID NO: 287241 - RNA, 32 nt, Human
aacaaacaacuccgggcacaccaccuuuaaga

SEQ ID NO: 287242 - RNA, 32 nt, Human
aacaaacaaugccaucacuggaauuucccacc

SEQ ID NO: 287243 - RNA, 32 nt, Human
aacaaacacaaagccuuaagcucuuugaguac

SEQ ID NO: 287244 - RNA, 32 nt, Human
aacaaacacagugaaaccccgucucuacuaaa

SEQ ID NO: 287245 - RNA, 26 nt, Human
aacaaacaccaaaaaccagagugcau

SEQ ID NO: 287246 - RNA, 24 nt, Human
aacaaacacuugagggccuguaug

SEQ ID NO: 287247 - RNA, 22 nt, Human
aacaaacaggccugcugcuaga

SEQ ID NO: 287248 - RNA, 32 nt, Human
aacaaacauuacaaggcaguuaucucauugcu

SEQ ID NO: 287249 - RNA, 32 nt, Human
aacaaaccaaaccaaccagcucuuggauguga

SEQ ID NO: 287250 - RNA, 32 nt, Human
aacaaaccacagaacuuagagugugcugguua

SEQ ID NO: 287251 - RNA, 20 nt, Human
aacaaacccaacuaaagugc

SEQ ID NO: 287252 - RNA, 32 nt, Human
aacaaacccaggaaagcgaaacugcagaacag

SEQ ID NO: 287253 - RNA, 32 nt, Human
aacaaaccccaaccuucucuccuugccaccca

SEQ ID NO: 287254 - RNA, 32 nt, Human
aacaaacccuuuccuuucauuuuagacuaccu

SEQ ID NO: 287255 - RNA, 32 nt, Human
aacaaaccgaaggccuuaaacgauggggaugg

SEQ ID NO: 287256 - RNA, 32 nt, Human
aacaaaccguggggcucucuggggucuggggg

SEQ ID NO: 287257 - RNA, 32 nt, Human
aacaaaccugcacuuguaccccugaacuuaaa

SEQ ID NO: 287258 - RNA, 32 nt, Human
aacaaaccugcacuuguaucccagaauuuaaa

SEQ ID NO: 287259 - RNA, 32 nt, Human
aacaaacugaacacuuccaaaggaggcagucc

SEQ ID NO: 287260 - RNA, 24 nt, Human
aacaaacuguucggcuacuggaca

SEQ ID NO: 287261 - RNA, 32 nt, Human
aacaaacuuccucucuggccucucaggaauca

SEQ ID NO: 287262 - RNA, 32 nt, Human
aacaaacuucucucagcuucuugaaguuguuc

SEQ ID NO: 287263 - RNA, 32 nt, Human
aacaaagaacuggguguugaguauucaucaac

SEQ ID NO: 287264 - RNA, 24 nt, Human
aacaaagacccacacuacuggaca

SEQ ID NO: 287265 - RNA, 32 nt, Human
aacaaagaccgagcaaaagacgagugaugcca

SEQ ID NO: 287266 - RNA, 32 nt, Human
aacaaagaguuuuugcuuaaaguguuuuggug

SEQ ID NO: 287267 - RNA, 32 nt, Human
aacaaagauagaauuugauggggguggacgag

SEQ ID NO: 287268 - RNA, 32 nt, Human
aacaaagcaaagcauaucuuuagacaacagug

SEQ ID NO: 287269 - RNA, 32 nt, Human
aacaaagcagaucccagaucugaaaagcaggc

SEQ ID NO: 287270 - RNA, 32 nt, Human
aacaaagcagguuuuacugcuuuuccagacac

SEQ ID NO: 287271 - RNA, 22 nt, Human
aacaaaggaaacagccaagaga

SEQ ID NO: 287272 - RNA, 32 nt, Human
aacaaaggaagcacuugggcugugcugggggc

SEQ ID NO: 287273 - RNA, 32 nt, Human
aacaaaggacagaguaugaacaccugggcuua

SEQ ID NO: 287274 - RNA, 32 nt, Human
aacaaaggacuugccaugguucacagcaaugu

SEQ ID NO: 287275 - RNA, 32 nt, Human
aacaaaggagaaaaggaagugauuggagaauu

SEQ ID NO: 287276 - RNA, 32 nt, Human
aacccggcgggcagagguugcaguaagcagag

SEQ ID NO: 287277 - RNA, 32 nt, Human
aacccgggaagcagagguugcagugacagaga

SEQ ID NO: 287278 - RNA, 32 nt, Human
aacccgggaagcagagguugcagugagcugag

SEQ ID NO: 287279 - RNA, 32 nt, Human
aacccgggaagcagagguugcggugagccgag

SEQ ID NO: 287280 - RNA, 32 nt, Human
aacccgggaagcagagguugcggugagcugag

SEQ ID NO: 287281 - RNA, 32 nt, Human
aacccgggaagcagagucugcagugagccaag

SEQ ID NO: 287282 - RNA, 32 nt, Human
aacccgggaagcggagcuugcagugagccgag

SEQ ID NO: 287283 - RNA, 32 nt, Human
aacccgggaagcggagguugcagggagccgag

SEQ ID NO: 287284 - RNA, 32 nt, Human
aacccgggaagcggagguugcagugagccaag

SEQ ID NO: 287285 - RNA, 32 nt, Human
aacccgggaagcggagguugcagugagccgag

SEQ ID NO: 287286 - RNA, 32 nt, Human
aacccgggaaggcggaaguugcagugagccga

SEQ ID NO: 287287 - RNA, 23 nt, Human
aacccgggaaguggagguugcag

SEQ ID NO: 287288 - RNA, 32 nt, Human
aacccgggaaguggagguugcagugagccaag

SEQ ID NO: 287289 - RNA, 32 nt, Human
aacccgggaaguggagguugccgugagucgag

SEQ ID NO: 287290 - RNA, 32 nt, Human
aacccgggacgcagagguuacagugaaccgag

SEQ ID NO: 287291 - RNA, 32 nt, Human
aacccgggacgcagggguugcagugagcggag

SEQ ID NO: 287292 - RNA, 23 nt, Human
aacccgggagacggagguugcag

SEQ ID NO: 287293 - RNA, 32 nt, Human
aacccgggagacggagguugcagugagcugag

SEQ ID NO: 287294 - RNA, 32 nt, Human
aacccgggagacggcgcuugcagugagccgag

SEQ ID NO: 287295 - RNA, 32 nt, Human
aacccgggagacgggagguuguggugagcuga

SEQ ID NO: 287296 - RNA, 32 nt, Human
aacccgggagaugaagguugcagugagcugag

SEQ ID NO: 287297 - RNA, 32 nt, Human
aacccgggagauggcgcuugcagugagcugag

SEQ ID NO: 287298 - RNA, 32 nt, Human
aacccgggagcagagacugcagugagcugaga

SEQ ID NO: 287299 - RNA, 32 nt, Human
aacccgggagcggagguugcagugagcugaga

SEQ ID NO: 287300 - RNA, 32 nt, Human
aacccgggaggaagagcuugcagugagccgag

SEQ ID NO: 287301 - RNA, 32 nt, Human
aacccgggaggacuucagggagaaccuguccg

SEQ ID NO: 287302 - RNA, 32 nt, Human
aacccgggaggaggagcuugcagugagccgag

SEQ ID NO: 287303 - RNA, 32 nt, Human
aacccgggaggaggagguugcacugagccgag

SEQ ID NO: 287304 - RNA, 32 nt, Human
aacccgggaggcaaagguugcagugagcugag

SEQ ID NO: 287305 - RNA, 32 nt, Human
aacccgggaggcaaagguugcgguaagcugcg

SEQ ID NO: 287306 - RNA, 32 nt, Human
aacccgggaggcaaagguuuuagugagccgag

SEQ ID NO: 287307 - RNA, 32 nt, Human
aacccgggaggcacagguuccagugggccaag

SEQ ID NO: 287308 - RNA, 32 nt, Human
aacccgggaggcagaaguugcagugaacugaa

SEQ ID NO: 287309 - RNA, 32 nt, Human
aacccgggaggcagaccuugcagugagccaag

SEQ ID NO: 287310 - RNA, 32 nt, Human
aacccgggaggcagacuuugcagugagcugag

SEQ ID NO: 287311 - RNA, 32 nt, Human
aacccgggaggcagagauagcagugaacugag

SEQ ID NO: 287312 - RNA, 32 nt, Human
aacccgggaggcagagauugcaguaagcugag

SEQ ID NO: 287313 - RNA, 32 nt, Human
aacccgggaggcagagcuugcaguaagccgag

SEQ ID NO: 287314 - RNA, 32 nt, Human
aacccgggaggcagagcuugcagugagcagag

SEQ ID NO: 287315 - RNA, 32 nt, Human
aacccgggaggcagagcuugcagugagccaag

SEQ ID NO: 287316 - RNA, 32 nt, Human
aacccgggaggcagagcuugcagugagccgag

SEQ ID NO: 287317 - RNA, 32 nt, Human
aacccgggaggcagagcuugcagugagcugag

SEQ ID NO: 287318 - RNA, 32 nt, Human
aacccgggaggcagagcuugcagugagucgag

SEQ ID NO: 287319 - RNA, 32 nt, Human
aacccgggaggcagagcuugcggugagccgag

SEQ ID NO: 287320 - RNA, 32 nt, Human
aacccgggaggcagagcuuguggugagccgag

SEQ ID NO: 287321 - RNA, 32 nt, Human
aacccgggaggcagaggcugcagagagccaag

SEQ ID NO: 287322 - RNA, 32 nt, Human
aacccgggaggcagaggcugcagugagccgag

SEQ ID NO: 287323 - RNA, 32 nt, Human
aacccgggaggcagaggcugcagugagcugag

SEQ ID NO: 287324 - RNA, 32 nt, Human
aacccgggaggcagaggcuguagugagccaag

SEQ ID NO: 287325 - RNA, 32 nt, Human
aacccgggaggcagagggugcaguaagccgag

SEQ ID NO: 287326 - RNA, 32 nt, Human
aacccgggaggcagagguaguagugagcugaa

SEQ ID NO: 287327 - RNA, 32 nt, Human
aacccgggaggcagagguggcugugagccgag

SEQ ID NO: 287328 - RNA, 32 nt, Human
aacccgggaggcagagguuacagugagccaag

SEQ ID NO: 287329 - RNA, 32 nt, Human
aacccgggaggcagagguuaucgugagcugac

SEQ ID NO: 287330 - RNA, 32 nt, Human
aacccgggaggcagagguugaagugagcugag

SEQ ID NO: 287331 - RNA, 32 nt, Human
aacccgggaggcagagguugcacugagcugag

SEQ ID NO: 287332 - RNA, 23 nt, Human
aacccgggaggcagagguugcag

SEQ ID NO: 287333 - RNA, 32 nt, Human
aacccgggaggcagagguugcagccggcugag

SEQ ID NO: 287334 - RNA, 32 nt, Human
aacccgggaggcagagguugcaguaagcagag

SEQ ID NO: 287335 - RNA, 32 nt, Human
aacccgggaggcagagguugcagugaacccag

SEQ ID NO: 287336 - RNA, 32 nt, Human
aacccgggaggcagagguugcagugacccaag

SEQ ID NO: 287337 - RNA, 32 nt, Human
aacccgggaggcagagguugcagugagccaag

SEQ ID NO: 287338 - RNA, 32 nt, Human
aacccgggaggcagagguugcagugagccgac

SEQ ID NO: 287339 - RNA, 32 nt, Human
aacccgggaggcagagguugcagugagccgag

SEQ ID NO: 287340 - RNA, 32 nt, Human
aacccgggaggcagagguugcagugagcugag

SEQ ID NO: 287341 - RNA, 32 nt, Human
aacccgggaggcagagguugcagugaggugag

SEQ ID NO: 287342 - RNA, 32 nt, Human
aacccgggaggcagagguugcagugagucgag

SEQ ID NO: 287343 - RNA, 32 nt, Human
aacccgggaggcagagguugcagugaguggag

SEQ ID NO: 287344 - RNA, 32 nt, Human
aacccgggaggcagagguugcaguguggugag

SEQ ID NO: 287345 - RNA, 32 nt, Human
aacccgggaggcagagguugcauugagccgag

SEQ ID NO: 287346 - RNA, 32 nt, Human
aacccgggaggcagagguugcggugagccaag

SEQ ID NO: 287347 - RNA, 32 nt, Human
aacccgggaggcagagguugcggugagccgag

SEQ ID NO: 287348 - RNA, 32 nt, Human
aacccgggaggcagagguugcuguaagcugag

SEQ ID NO: 287349 - RNA, 32 nt, Human
aacccgggaggcagagguuguagugagcccag

SEQ ID NO: 287350 - RNA, 32 nt, Human
aacccgggaggcagagguugugagcugagauc

SEQ ID NO: 287351 - RNA, 32 nt, Human
aacccgggaggcagagguuguguugagccaag

SEQ ID NO: 287352 - RNA, 32 nt, Human
aacccgggaggcagcaguugcagugagcugag

SEQ ID NO: 287353 - RNA, 32 nt, Human
aacccgggaggcauagcuugcagugagccgag

SEQ ID NO: 287354 - RNA, 32 nt, Human
aacccgggaggcgagcuugcagugagccgaga

SEQ ID NO: 287355 - RNA, 32 nt, Human
aacccgggaggcggaacuugcagugagccaag

SEQ ID NO: 287356 - RNA, 32 nt, Human
aacccgggaggcggaacuugcggugagccgag

SEQ ID NO: 287357 - RNA, 32 nt, Human
aacccgggaggcggaaguuucagcgagccgag

SEQ ID NO: 287358 - RNA, 32 nt, Human
aacccgggaggcggagauugcagugagccaag

SEQ ID NO: 287359 - RNA, 32 nt, Human
aacccgggaggcggagauugcagugagcugag

SEQ ID NO: 287360 - RNA, 32 nt, Human
aacccgggaggcggagauugcggugagccgag

SEQ ID NO: 287361 - RNA, 32 nt, Human
aacccgggaggcggagcuuacagugagcugag

SEQ ID NO: 287362 - RNA, 23 nt, Human
aacccgggaggcggagcuugcag

SEQ ID NO: 287363 - RNA, 32 nt, Human
aacccgggaggcggagcuugcagugaaccgag

SEQ ID NO: 287364 - RNA, 32 nt, Human
aacccgggaggcggagcuugcagugagccaag

SEQ ID NO: 287365 - RNA, 32 nt, Human
aacccgggaggcggagcuugcagugagcccag

SEQ ID NO: 287366 - RNA, 32 nt, Human
aacccgggaggcggagcuugcagugagccgaa

SEQ ID NO: 287367 - RNA, 32 nt, Human
aacccgggaggcggagcuugcagugagccgag

SEQ ID NO: 287368 - RNA, 32 nt, Human
aacccgggaggcggagcuugcagugagccuug

SEQ ID NO: 287369 - RNA, 32 nt, Human
aacccgggaggcggagcuugcagugagcggag

SEQ ID NO: 287370 - RNA, 32 nt, Human
aacccgggaggcggagcuugcagugagcugag

SEQ ID NO: 287371 - RNA, 32 nt, Human
aacccgggaggcggagcuuguagugagccgag

SEQ ID NO: 287372 - RNA, 32 nt, Human
aacccgggaggcggaggcugcagugagccgag

SEQ ID NO: 287373 - RNA, 32 nt, Human
aacccgggaggcggaggcugcagugagucgag

SEQ ID NO: 287374 - RNA, 32 nt, Human
aacccgggaggcggaggcugcagugggccggg

SEQ ID NO: 287375 - RNA, 32 nt, Human
aacccgggaggcggagguuacagugagccgag

SEQ ID NO: 287376 - RNA, 32 nt, Human
aacccgggaggcggagguuacagugagccuuu

SEQ ID NO: 287377 - RNA, 32 nt, Human
aacccgggaggcggagguuacagugagcugag

SEQ ID NO: 287378 - RNA, 32 nt, Human
aacccgggaggcggagguuauggagagccaag

SEQ ID NO: 287379 - RNA, 32 nt, Human
aacccgggaggcggagguuccagugagccgag

SEQ ID NO: 287380 - RNA, 23 nt, Human
aacccgggaggcggagguugcag

SEQ ID NO: 287381 - RNA, 32 nt, Human
aacccgggaggcggagguugcaguaagccgag

SEQ ID NO: 287382 - RNA, 32 nt, Human
aacccgggaggcggagguugcagucagccgag

SEQ ID NO: 287383 - RNA, 26 nt, Human
aacccgggaggcggagguugcaguga

SEQ ID NO: 287384 - RNA, 32 nt, Human
aacccgggaggcggagguugcagugagccaag

SEQ ID NO: 287385 - RNA, 32 nt, Human
aacccgggaggcggagguugcagugagccgaa

SEQ ID NO: 287386 - RNA, 32 nt, Human
aacccgggaggcggagguugcagugagccgag

SEQ ID NO: 287387 - RNA, 32 nt, Human
aacccgggaggcggagguugcagugagccugg

SEQ ID NO: 287388 - RNA, 32 nt, Human
aacccgggaggcggagguugcagugagcuaag

SEQ ID NO: 287389 - RNA, 32 nt, Human
aacccgggaggcggagguugcagugagcugag

SEQ ID NO: 287390 - RNA, 32 nt, Human
aacccgggaggcggagguugcagugagguaag

SEQ ID NO: 287391 - RNA, 32 nt, Human
aacccgggaggcggagguugcagugagucaag

SEQ ID NO: 287392 - RNA, 32 nt, Human
aacccgggaggcggagguugcaguuagccaag

SEQ ID NO: 287393 - RNA, 32 nt, Human
aacccgggaggcggagguugcaugagcugaga

SEQ ID NO: 287394 - RNA, 32 nt, Human
aacccgggaggcggagguugccgugagucgag

SEQ ID NO: 287395 - RNA, 26 nt, Human
aacccgggaggcggagguugcgguga

SEQ ID NO: 287396 - RNA, 32 nt, Human
aacccgggaggcggagguugcggugagccaag

SEQ ID NO: 287397 - RNA, 32 nt, Human
aacccgggaggcggagguugcggugagccgag

SEQ ID NO: 287398 - RNA, 26 nt, Human
aacccgggaggcggagguuguaguga

SEQ ID NO: 287399 - RNA, 32 nt, Human
aacccgggaggcggagguuguagugagccgag

SEQ ID NO: 287400 - RNA, 26 nt, Human
aacccgggaggcggagguugugguga

SEQ ID NO: 287401 - RNA, 32 nt, Human
aacccgggaggcggagguuguggugagccaag

SEQ ID NO: 287402 - RNA, 32 nt, Human
aacccgggaggcggagguuguggugagccgag

SEQ ID NO: 287403 - RNA, 32 nt, Human
aacccgggaggcggagguuguggugagcugaa

SEQ ID NO: 287404 - RNA, 32 nt, Human
aacccgggaggcggagguuguggugagcugag

SEQ ID NO: 287405 - RNA, 32 nt, Human
aacccgggaggcggagguuucagugagccgag

SEQ ID NO: 287406 - RNA, 32 nt, Human
aacccgggaggcggaguugcggugagccgaga

SEQ ID NO: 287407 - RNA, 32 nt, Human
aacccgggaggcggaguuugcagugagccaag

SEQ ID NO: 287408 - RNA, 32 nt, Human
aacccgggaggcggaucuugcagugagcggag

SEQ ID NO: 287409 - RNA, 32 nt, Human
aacccgggaggcggaucuugcauugagccaag

SEQ ID NO: 287410 - RNA, 32 nt, Human
aacccgggaggcggauguugcggugagccgaa

SEQ ID NO: 287411 - RNA, 32 nt, Human
aacccgggaggcuaagguugcagugagccgag

SEQ ID NO: 287412 - RNA, 32 nt, Human
aacccgggaggcugagguugcagugaguggag

SEQ ID NO: 287413 - RNA, 32 nt, Human
aacccgggagggagagguugcagugagccaag

SEQ ID NO: 287414 - RNA, 32 nt, Human
aacccgggagguagagcuugcagugaaccgag

SEQ ID NO: 287415 - RNA, 32 nt, Human
aacccgggagguagaggcugcagugagccgag

SEQ ID NO: 287416 - RNA, 32 nt, Human
aacccgggagguagagguugcagugagccgag

SEQ ID NO: 287417 - RNA, 32 nt, Human
aacccgggaggugaaggaugcagugagccaag

SEQ ID NO: 287418 - RNA, 32 nt, Human
aacccgggaggugcagguugcagugagccaag

SEQ ID NO: 287419 - RNA, 32 nt, Human
aacccgggagguggaacuugcagugagccgag

SEQ ID NO: 287420 - RNA, 32 nt, Human
aacccgggagguggagauugcagugagcccag

SEQ ID NO: 287421 - RNA, 32 nt, Human
aacccgggagguggagauugcagugagcugag

SEQ ID NO: 287422 - RNA, 32 nt, Human
aacccgggagguggagccuacagugagucaac

SEQ ID NO: 287423 - RNA, 32 nt, Human
aacccgggagguggagcuuccagugagccgag

SEQ ID NO: 287424 - RNA, 23 nt, Human
aacccgggagguggagcuugcag

SEQ ID NO: 287425 - RNA, 32 nt, Human
aacccgggagguggagcuugcagugagccaag

SEQ ID NO: 287426 - RNA, 32 nt, Human
aacccgggagguggagcuugcagugagccgag

SEQ ID NO: 287427 - RNA, 32 nt, Human
aacccgggagguggagcuugcagugagcggag

SEQ ID NO: 287428 - RNA, 32 nt, Human
aacccgggagguggagcuugcagugagcugag

SEQ ID NO: 287429 - RNA, 32 nt, Human
aacccgggagguggagcuugcagugagcuggg

SEQ ID NO: 287430 - RNA, 32 nt, Human
aacccgggagguggagcuugcaguggguggag

SEQ ID NO: 287431 - RNA, 32 nt, Human
aacccgggagguggagcuugcggugagcugag

SEQ ID NO: 287432 - RNA, 32 nt, Human
aacccgggagguggagcuuguagugaggcgag

SEQ ID NO: 287433 - RNA, 32 nt, Human
aacccgggagguggaggcugcaaugagcugag

SEQ ID NO: 287434 - RNA, 32 nt, Human
aacccgggagguggaggcugcagcgagccaag

SEQ ID NO: 287435 - RNA, 32 nt, Human
aacccgggagguggaggcugcagugagccgag

SEQ ID NO: 287436 - RNA, 32 nt, Human
aacccgggagguggaggcugcagugaguuaag

SEQ ID NO: 287437 - RNA, 32 nt, Human
aacccgggagguggaggcugcggugagccaag

SEQ ID NO: 287438 - RNA, 32 nt, Human
aacccgggagguggaggucgcggugagccgag

SEQ ID NO: 287439 - RNA, 32 nt, Human
aacccgggagguggagguggcagugagccgag

SEQ ID NO: 287440 - RNA, 32 nt, Human
aacccgggagguggagguuacagugagccgag

SEQ ID NO: 287441 - RNA, 32 nt, Human
aacccgggagguggagguuacagugagcugag

SEQ ID NO: 287442 - RNA, 32 nt, Human
aacccgggagguggagguucuagugagccgag

SEQ ID NO: 287443 - RNA, 32 nt, Human
aacccgggagguggagguugcaaugagccaag

SEQ ID NO: 287444 - RNA, 32 nt, Human
aacccgggagguggagguugcagcaagccgag

SEQ ID NO: 287445 - RNA, 32 nt, Human
aacccgggagguggagguugcagggagccgag

SEQ ID NO: 287446 - RNA, 32 nt, Human
aacccgggagguggagguugcaguaagccgag

SEQ ID NO: 287447 - RNA, 26 nt, Human
aacccgggagguggagguugcaguga

SEQ ID NO: 287448 - RNA, 32 nt, Human
aacccgggagguggagguugcagugaaccaag

SEQ ID NO: 287449 - RNA, 32 nt, Human
aacccgggagguggagguugcagugagccaag

SEQ ID NO: 287450 - RNA, 32 nt, Human
aacccgggagguggagguugcagugagccgag

SEQ ID NO: 287451 - RNA, 32 nt, Human
aacccgggagguggagguugcagugagcuaag

SEQ ID NO: 287452 - RNA, 32 nt, Human
aacccgggagguggagguugcagugagcugag

SEQ ID NO: 287453 - RNA, 32 nt, Human
aacccgggagguggagguugcagugaggugag

SEQ ID NO: 287454 - RNA, 32 nt, Human
aacccgggagguggagguugccgugagccaag

SEQ ID NO: 287455 - RNA, 32 nt, Human
aacccgggagguggagguugccgugagcugag

SEQ ID NO: 287456 - RNA, 32 nt, Human
aacccgggagguggagguugccgugaguugag

SEQ ID NO: 287457 - RNA, 32 nt, Human
aacccgggagguggagguugcgaugagcugag

SEQ ID NO: 287458 - RNA, 26 nt, Human
aacccgggagguggagguugcgguga

SEQ ID NO: 287459 - RNA, 32 nt, Human
aacccgggagguggagguugcggugagccaag

SEQ ID NO: 287460 - RNA, 32 nt, Human
aacccgggagguggagguugcggugagcugag

SEQ ID NO: 287461 - RNA, 32 nt, Human
aacccgggagguggagguuguagcgagcugag

SEQ ID NO: 287462 - RNA, 26 nt, Human
aacccgggagguggagguuguaguga

SEQ ID NO: 287463 - RNA, 32 nt, Human
aacccgggagguggagguuguagugagcugag

SEQ ID NO: 287464 - RNA, 32 nt, Human
aacccgggagguggagguuguggugagcugag

SEQ ID NO: 287465 - RNA, 32 nt, Human
aacccgggagguguagguugcagugagccgag

SEQ ID NO: 287466 - RNA, 23 nt, Human
aacccgggagucagaggcugcag

SEQ ID NO: 287467 - RNA, 32 nt, Human
aacccgggaguuaaagguugcagugagccgag

SEQ ID NO: 287468 - RNA, 32 nt, Human
aacccgggaguuggagguugcagugagccaag

SEQ ID NO: 287469 - RNA, 32 nt, Human
aacccgggaugcagagguugcagugagcugag

SEQ ID NO: 287470 - RNA, 32 nt, Human
aacccgggcagcggagguugcagugagccgag

SEQ ID NO: 287471 - RNA, 32 nt, Human
aacccgggcccgguggaggcugcagugagacg

SEQ ID NO: 287472 - RNA, 32 nt, Human
aacccgggcggcggaaguugcagugagccgag

SEQ ID NO: 287473 - RNA, 32 nt, Human
aacccgggcggcggagauugcagugagccgag

SEQ ID NO: 287474 - RNA, 32 nt, Human
aacccgggcgguggagcuugcagugagccgag

SEQ ID NO: 287475 - RNA, 26 nt, Human
aacccgggcgguggagguuguaguga

SEQ ID NO: 287476 - RNA, 32 nt, Human
aacccgggcgguggagguuguagugagccaag

SEQ ID NO: 287477 - RNA, 25 nt, Human
aacccggggacggagguugcaguga

SEQ ID NO: 287478 - RNA, 32 nt, Human
aacccggggacggagguugcagugaaccgaga

SEQ ID NO: 287479 - RNA, 32 nt, Human
aacccgggggcagaggcugcagugagccgaga

SEQ ID NO: 287480 - RNA, 26 nt, Human
aacccggggggcggagguugcaguga

SEQ ID NO: 287481 - RNA, 32 nt, Human
aacccgggugcuggggucaugcugccuccgug

SEQ ID NO: 287482 - RNA, 32 nt, Human
aacccggguggcagagguugcagugagccgaa

SEQ ID NO: 287483 - RNA, 32 nt, Human
aacccggguggcagagguugcagugagcugag

SEQ ID NO: 287484 - RNA, 32 nt, Human
aacccggguggcggcgcuugcagugagcugag

SEQ ID NO: 287485 - RNA, 32 nt, Human
aacccgguagaggcggagguugcagugagccg

SEQ ID NO: 287486 - RNA, 32 nt, Human
aacccgguaggcagagguugcagugagccgag

SEQ ID NO: 287487 - RNA, 32 nt, Human
aacccgguaggcggagcuugcagugagcugag

SEQ ID NO: 287488 - RNA, 32 nt, Human
aacccgguaggggagcuugcagugagcccaga

SEQ ID NO: 287489 - RNA, 32 nt, Human
aacccgguagguggagguugcagugagccgag

SEQ ID NO: 287490 - RNA, 32 nt, Human
aacccggugaagaaaucuuauugaugaauaaa

SEQ ID NO: 287491 - RNA, 32 nt, Human
aacccgguuguagaggaugauggcgccuuugg

SEQ ID NO: 287492 - RNA, 32 nt, Human
aacccgucacccuuggguuaggaugcgauuuc

SEQ ID NO: 287493 - RNA, 32 nt, Human
aacccgucagagaccugggagcaggggcaaug

SEQ ID NO: 287494 - RNA, 32 nt, Human
aacccgugacuguauucucucccuuggauacc

SEQ ID NO: 287495 - RNA, 32 nt, Human
aacccgugaggcagagguugcagugaaccgag

SEQ ID NO: 287496 - RNA, 32 nt, Human
aacccgugaggcagagguugcagugagccgag

SEQ ID NO: 287497 - RNA, 32 nt, Human
aacccgugaggcggagguuguagugagccaag

SEQ ID NO: 287498 - RNA, 32 nt, Human
aacccguguggcagagguugcggugaguguag

SEQ ID NO: 287499 - RNA, 32 nt, Human
aacccguugcccgggcaaccagcuuugcucuu

SEQ ID NO: 287500 - RNA, 32 nt, Human
aacccuaaaagaaccaaaaaucugccacagcc

SEQ ID NO: 287501 - RNA, 32 nt, Human
aacccuaaaggcagagguugcagugagccgag

SEQ ID NO: 287502 - RNA, 32 nt, Human
aacccuaagcccaggcuuuucucuccacugac

SEQ ID NO: 287503 - RNA, 32 nt, Human
aacccuacaaaugcaaugaaugugguaaagcc

SEQ ID NO: 287504 - RNA, 32 nt, Human
aacccuaccuucggcccggccugggugccccu

SEQ ID NO: 287505 - RNA, 25 nt, Human
aacccuacugggaucaaacuggaau

SEQ ID NO: 287506 - RNA, 32 nt, Human
aacccuagaaauauauccuguguaccucacug

SEQ ID NO: 287507 - RNA, 32 nt, Human
aacccuagaggcggaguuugcagugagccgag

SEQ ID NO: 287508 - RNA, 32 nt, Human
aacccuaggccugccaucugucagccggguga

SEQ ID NO: 287509 - RNA, 32 nt, Human
aacccuagucuuccauuuccucccgccagucu

SEQ ID NO: 287510 - RNA, 32 nt, Human
aacccuauccacccucuggaucccaauauuga

SEQ ID NO: 287511 - RNA, 32 nt, Human
aacccuaugaauguaaugaauguagaaaaacc

SEQ ID NO: 287512 - RNA, 32 nt, Human
aacccuaugaauguaaugaaugugaaaaaucc

SEQ ID NO: 287513 - RNA, 32 nt, Human
aacccuaugaauguaaugaaugugggagaucu

SEQ ID NO: 287514 - RNA, 32 nt, Human
aacccuauuuucuuuucuccaagaccaugguu

SEQ ID NO: 287515 - RNA, 32 nt, Human
aacccucagccguuccuccaccucucagccau

SEQ ID NO: 287516 - RNA, 32 nt, Human
aacccucccaccucggccugaaaaagugcuag

SEQ ID NO: 287517 - RNA, 19 nt, Human
aacccuccccagaccccca

SEQ ID NO: 287518 - RNA, 19 nt, Human
aacccucccccugcccgca

SEQ ID NO: 287519 - RNA, 32 nt, Human
aacccucccuccucuucuugcuggaggaccug

SEQ ID NO: 287520 - RNA, 32 nt, Human
aacccuccucugaauccuccuaauuccuuaag

SEQ ID NO: 287521 - RNA, 32 nt, Human
aacccuccuggacuaggcugcucuuguuaauc

SEQ ID NO: 287522 - RNA, 32 nt, Human
aacccuccuugcuagcguugcaaagaagggcc

SEQ ID NO: 287523 - RNA, 32 nt, Human
aacccucggaagaugggauugccagucagccc

SEQ ID NO: 287524 - RNA, 32 nt, Human
aacccucggucauggacuggauccugcggaca

SEQ ID NO: 287525 - RNA, 32 nt, Human
aacccucuaucucuccggcauccuggcaauca

SEQ ID NO: 287526 - RNA, 32 nt, Human
aacccucugccuccuuccuucuuucucuucaa

SEQ ID NO: 287527 - RNA, 32 nt, Human
aacccucugcuccccuguggcucucucuauuu

SEQ ID NO: 287528 - RNA, 32 nt, Human
aacccucugcucccguuucucccucugguuca

SEQ ID NO: 287529 - RNA, 23 nt, Human
aacccucugcuuaccuaccagcu

SEQ ID NO: 287530 - RNA, 32 nt, Human
aacccucuggagagcaaguggagccagucccc

SEQ ID NO: 287531 - RNA, 32 nt, Human
aacccucugggaccccucaccccacugcuuca

SEQ ID NO: 287532 - RNA, 32 nt, Human
aacccugaaauacaaaaauuagucaggcaugg

SEQ ID NO: 287533 - RNA, 32 nt, Human
aacccugacaccaguacugagaucggacgugc

SEQ ID NO: 287534 - RNA, 32 nt, Human
aacccugaccuuccugucccugccuucgaccu

SEQ ID NO: 287535 - RNA, 32 nt, Human
aacccugagcaguuccuggaggcugcggccac

SEQ ID NO: 287536 - RNA, 32 nt, Human
aacccugagcccagagagcuugggucacuguc

SEQ ID NO: 287537 - RNA, 32 nt, Human
aacccugagcgggcugccggccuccaaguucc

SEQ ID NO: 287538 - RNA, 32 nt, Human
aacccugaggucuuugaggccaauauuaaaca

SEQ ID NO: 287539 - RNA, 32 nt, Human
aacccugaguggacacagcacauguuucagag

SEQ ID NO: 287540 - RNA, 32 nt, Human
aacccugaguucuacuuuaauucuugggcauu

SEQ ID NO: 287541 - RNA, 32 nt, Human
aacccugcacucuccccugagcacccacagag

SEQ ID NO: 287542 - RNA, 32 nt, Human
aacccugcaggaaggggaagccagcaggggag

SEQ ID NO: 287543 - RNA, 32 nt, Human
aacccugccagcugagcccugugcaucuacua

SEQ ID NO: 287544 - RNA, 32 nt, Human
aacccugccccaggaagcccacagccucaccu

SEQ ID NO: 287545 - RNA, 32 nt, Human
aacccugcccucuccccuccugcugcuguaga

SEQ ID NO: 287546 - RNA, 32 nt, Human
aacccugcucccaggcugaagccuggagucug

SEQ ID NO: 287547 - RNA, 32 nt, Human
aacccugcucuaugcugacccuugucacugaa

SEQ ID NO: 287548 - RNA, 32 nt, Human
aacccuggaagcaggaaggauugccagauagu

SEQ ID NO: 287549 - RNA, 32 nt, Human
aacccuggaaguggagguugcagugagccugu

SEQ ID NO: 287550 - RNA, 31 nt, Human
aacccuggacaguuggcucuaccucaguaac

SEQ ID NO: 287551 - RNA, 32 nt, Human
aacccuggagcaggcuuccaugcugcuguggg

SEQ ID NO: 287552 - RNA, 32 nt, Human
aacccuggaggcagaggugguagugagccgag

SEQ ID NO: 287553 - RNA, 32 nt, Human
aacccuggaggcagagguugcaaugagccgag

SEQ ID NO: 287554 - RNA, 26 nt, Human
aacccuggaggcagagguugcaguga

SEQ ID NO: 287555 - RNA, 32 nt, Human
aacccuggaggcagagguugcagugagccaag

SEQ ID NO: 287556 - RNA, 32 nt, Human
aacccuggaggcagagguuguagugagucgug

SEQ ID NO: 287557 - RNA, 26 nt, Human
aacccuggaggcagagguugugguga

SEQ ID NO: 287558 - RNA, 32 nt, Human
aacccuggaggcagagguuguggugagcugag

SEQ ID NO: 287559 - RNA, 32 nt, Human
aacccuggaggcagagguuguggugagucgag

SEQ ID NO: 287560 - RNA, 26 nt, Human
aacccuggaggcggaaguugcaguga

SEQ ID NO: 287561 - RNA, 32 nt, Human
aacccuggaggcggaaguugcagugagccgag

SEQ ID NO: 287562 - RNA, 32 nt, Human
aacccuggaggcggagauugaagugagcugag

SEQ ID NO: 287563 - RNA, 32 nt, Human
aacccuggaggcggagguuacaguuauccgag

SEQ ID NO: 287564 - RNA, 32 nt, Human
aacccuggaggcggagguuccagugagcugag

SEQ ID NO: 287565 - RNA, 26 nt, Human
aacccuggaggcggagguugcaguga

SEQ ID NO: 287566 - RNA, 32 nt, Human
aacccuggaggcggagguugcagugagccgag

SEQ ID NO: 287567 - RNA, 32 nt, Human
aacccuggaggcggagguugcagugaguggag

SEQ ID NO: 287568 - RNA, 26 nt, Human
aacccuggaggcggagguugccguga

SEQ ID NO: 287569 - RNA, 32 nt, Human
aacccuggaggcggagguugccgugagccaag

SEQ ID NO: 287570 - RNA, 32 nt, Human
aacccuggagggugguccccaccagcucuuug

SEQ ID NO: 287571 - RNA, 32 nt, Human
aacccuggagguagaaguugcagugagccaag

SEQ ID NO: 287572 - RNA, 26 nt, Human
aacccuggagguggagguugcaguga

SEQ ID NO: 287573 - RNA, 32 nt, Human
aacccuggagguggagguugcagugagccgag

SEQ ID NO: 287574 - RNA, 32 nt, Human
aacccuggagguggagguugcagugagcugag

SEQ ID NO: 287575 - RNA, 26 nt, Human
aacccuggagguggcgguugcaguga

SEQ ID NO: 287576 - RNA, 32 nt, Human
aacccuggagguggcgguugcagugagcacag

SEQ ID NO: 287577 - RNA, 32 nt, Human
aacccuggagguugagguugcagugagcugag

SEQ ID NO: 287578 - RNA, 32 nt, Human
aacccuggccucggcccugcccugucccugcc

SEQ ID NO: 287579 - RNA, 32 nt, Human
aacccuggcucugccauuagcuaggaccuaag

SEQ ID NO: 287580 - RNA, 32 nt, Human
aacccugggaaaagugaaguauggcuguaagu

SEQ ID NO: 287581 - RNA, 32 nt, Human
aacccugggacucuggucugcccagcccaccc

SEQ ID NO: 287582 - RNA, 32 nt, Human
aacccugggagcggagauugcagugagcugag

SEQ ID NO: 287583 - RNA, 32 nt, Human
aacccugggaggcagagguugcagugagucga

SEQ ID NO: 287584 - RNA, 32 nt, Human
aacccugggaugaaguaucugugaacuauuuu

SEQ ID NO: 287585 - RNA, 32 nt, Human
aacccugggccucuuaaccacugaucuuugaa

SEQ ID NO: 287586 - RNA, 32 nt, Human
aacccuggggcuggcuuaggaggcaagaaaac

SEQ ID NO: 287587 - RNA, 32 nt, Human
aacccugguggacugcagccuucaucuuuauu

SEQ ID NO: 287588 - RNA, 32 nt, Human
aacccuguacacaccugguucauaauccucau

SEQ ID NO: 287589 - RNA, 32 nt, Human
aacccuguacugauaguacuucccaguaugau

SEQ ID NO: 287590 - RNA, 32 nt, Human
aacccuguaggggacugguuacagaggaccuc

SEQ ID NO: 287591 - RNA, 32 nt, Human
aacccuguauuccgucgcgcugggcucuccga

SEQ ID NO: 287592 - RNA, 32 nt, Human
aacccugucccugggccagcugcaucacugcc

SEQ ID NO: 287593 - RNA, 32 nt, Human
aacccugucuaguuguucagagacauaggcca

SEQ ID NO: 287594 - RNA, 32 nt, Human
aacccuguggcucaggccgcugagcuuccuug

SEQ ID NO: 287595 - RNA, 32 nt, Human
aacccuguggcugcccuucacacuuacaggcc

SEQ ID NO: 287596 - RNA, 32 nt, Human
aacccuguggugagcaagacgaucagguccau

SEQ ID NO: 287597 - RNA, 32 nt, Human
aacccuguucuccaaaacccugccccaggcua

SEQ ID NO: 287598 - RNA, 32 nt, Human
aacccuuaaaugccaucguagacuucauaccg

SEQ ID NO: 287599 - RNA, 23 nt, Human
aacccuuaccccuuagccucccu

SEQ ID NO: 287600 - RNA, 32 nt, Human
aacccuucaaagaagcaggcugugaacauugg

SEQ ID NO: 287601 - RNA, 32 nt, Human
aacccuucaccccuccuggaaagcaggccuga

SEQ ID NO: 287602 - RNA, 32 nt, Human
aacccuucugaccauccaaaggcaagcacaau

SEQ ID NO: 287603 - RNA, 32 nt, Human
aacccuucuggcccucgcaccacugugacucu

SEQ ID NO: 287604 - RNA, 32 nt, Human
aacccuucuuuggcuuuccuugcccauugcaa

SEQ ID NO: 287605 - RNA, 32 nt, Human
aacccuugauaggcaagccucaguuucuccac

SEQ ID NO: 287606 - RNA, 32 nt, Human
aacccuugcccaguuuggaucccuucaagacu

SEQ ID NO: 287607 - RNA, 21 nt, Human
aacccuugccccaguccugcc

SEQ ID NO: 287608 - RNA, 32 nt, Human
aacccuugcccuuucaagccaucagcuccugc

SEQ ID NO: 287609 - RNA, 31 nt, Human
aacccuugcuuuccugggccuuugcaagaug

SEQ ID NO: 287610 - RNA, 32 nt, Human
aacccuuggagccaauggagacugucucaaga

SEQ ID NO: 287611 - RNA, 32 nt, Human
aacccuuggcagggcaucgacugugugcgagg

SEQ ID NO: 287612 - RNA, 32 nt, Human
aacccuugucguccuugggaaaugggggaggg

SEQ ID NO: 287613 - RNA, 32 nt, Human
aacccuuucauuccucccugggaaucagggua

SEQ ID NO: 287614 - RNA, 32 nt, Human
aacccuuucauucugguacaagagucgggggu

SEQ ID NO: 287615 - RNA, 32 nt, Human
aacccuuuccagaacugcuguuugguucuucu

SEQ ID NO: 287616 - RNA, 32 nt, Human
aacccuuuccuucucuaugccugggccuggga

SEQ ID NO: 287617 - RNA, 32 nt, Human
aacccuuucucauccagcagaccaacaggcag

SEQ ID NO: 287618 - RNA, 18 nt, Human
aacccuuucugggucuga

SEQ ID NO: 287619 - RNA, 32 nt, Human
aacccuuuggaagagccuggagauuggacugg

SEQ ID NO: 287620 - RNA, 32 nt, Human
aacccuuuucacucugggcuucucccaaaacc

SEQ ID NO: 287621 - RNA, 32 nt, Human
aaccgaaaucuaccacagcagagaugccgccg

SEQ ID NO: 287622 - RNA, 32 nt, Human
aaccgaaggcucggucuuaauucccccaccug

SEQ ID NO: 287623 - RNA, 32 nt, Human
aaccgacccuggcucaggagguugaugccaug

SEQ ID NO: 287624 - RNA, 32 nt, Human
aaccgacucccagaacuccggacgugugcggc

SEQ ID NO: 287625 - RNA, 32 nt, Human
aaccgagacagcugucuuauaucugcaugccu

SEQ ID NO: 287626 - RNA, 32 nt, Human
aaccgagagggcccugagguacaggaaccgga

SEQ ID NO: 287627 - RNA, 32 nt, Human
aaccgagcagugacgccagcccugccagggaa

SEQ ID NO: 287628 - RNA, 23 nt, Human
aaccgagcgggccugcggccuca

SEQ ID NO: 287629 - RNA, 25 nt, Human
aaccgaggacccaugaaacagcagc

SEQ ID NO: 287630 - RNA, 32 nt, Human
aaccgaggaggcagagcuugcagugagccaag

SEQ ID NO: 287631 - RNA, 32 nt, Human
aaccgaggaggcgaagguugcagugagccgag

SEQ ID NO: 287632 - RNA, 32 nt, Human
aaccgaguggcugucaucagccuguguaggca

SEQ ID NO: 287633 - RNA, 32 nt, Human
aaccgaguggcugucaucggccuguguaggca

SEQ ID NO: 287634 - RNA, 32 nt, Human
aaccgaguucuaguucccugaggucuuuaaaa

SEQ ID NO: 287635 - RNA, 32 nt, Human
aaccgaucucagaaugaacucuggaguaugaa

SEQ ID NO: 287636 - RNA, 32 nt, Human
aaccgaucuuccccugacuccccaccgaggag

SEQ ID NO: 287637 - RNA, 32 nt, Human
aaccgauucaucucucagaagggaggcugggg

SEQ ID NO: 287638 - RNA, 32 nt, Human
aaccgcacaagcuaccaaauauauaaaaggca

SEQ ID NO: 287639 - RNA, 32 nt, Human
aaccgcacugaagaacucuuguccucacuggc

SEQ ID NO: 287640 - RNA, 32 nt, Human
aaccgcagacacauccccgcgccccagagccc

SEQ ID NO: 287641 - RNA, 32 nt, Human
aaccgcauucacccucucucuucauagcucag

SEQ ID NO: 287642 - RNA, 32 nt, Human
aaccgccaccgggcugacuuccaccucccagu

SEQ ID NO: 287643 - RNA, 32 nt, Human
aaccgccauuguauuuucuguccuucugaauu

SEQ ID NO: 287644 - RNA, 32 nt, Human
aaccgcccagagaagaauuaauggaggacaca

SEQ ID NO: 287645 - RNA, 32 nt, Human
aaccgccccucagcagggcagggccaguccug

SEQ ID NO: 287646 - RNA, 32 nt, Human
aaccgcccuccugauuaaggcguggcuucugc

SEQ ID NO: 287647 - RNA, 32 nt, Human
aaccgcccugcagcaucccucagccuguaccg

SEQ ID NO: 287648 - RNA, 32 nt, Human
aaccgccucaucugagggcccaacugauauga

SEQ ID NO: 287649 - RNA, 32 nt, Human
aaccgccugcggcugcucacagagcacguguu

SEQ ID NO: 287650 - RNA, 26 nt, Human
aaccgcgagggcgaggggagaaaguc

SEQ ID NO: 287651 - RNA, 32 nt, Human
aaccgcgggggugagagggcgcgguggcugug

SEQ ID NO: 287652 - RNA, 32 nt, Human
aaccgcgguccccacaggaguuuguaggauuu

SEQ ID NO: 287653 - RNA, 32 nt, Human
aaccgcuaccggcgaugcuacugcugugggug

SEQ ID NO: 287654 - RNA, 29 nt, Human
aaccgcuggcugcuguugugccucaucuc

SEQ ID NO: 287655 - RNA, 32 nt, Human
aaccgcuguaugcccuuuuuccuucuaaguca

SEQ ID NO: 287656 - RNA, 32 nt, Human
aaccggaaagauggcggccugccccaucuauu

SEQ ID NO: 287657 - RNA, 32 nt, Human
aaccggaaggagaaaggccucaaggagaguuu

SEQ ID NO: 287658 - RNA, 32 nt, Human
aaccggaaggcagagguugcagugagccaaga

SEQ ID NO: 287659 - RNA, 32 nt, Human
aaccggacaagugucauguuaaaagacagaug

SEQ ID NO: 287660 - RNA, 32 nt, Human
aaccggacccucuccaugcugcaccugcagaa

SEQ ID NO: 287661 - RNA, 32 nt, Human
aaccggaccuucuguggaacucccgugucccu

SEQ ID NO: 287662 - RNA, 32 nt, Human
aaccggcaccugccagacagagcugguucuaa

SEQ ID NO: 287663 - RNA, 31 nt, Human
aaccggcagaggaucuacucacuggagcagc

SEQ ID NO: 287664 - RNA, 32 nt, Human
aaccggcgccgcuuccuggccuugggaggugg

SEQ ID NO: 287665 - RNA, 32 nt, Human
aaccggcuagaugaccaucacacagcaaagga

SEQ ID NO: 287666 - RNA, 32 nt, Human
aaccggcuccaucacauccucaggucucggga

SEQ ID NO: 287667 - RNA, 32 nt, Human
aaccggcuccuugguccaguucugcaccgggg

SEQ ID NO: 287668 - RNA, 22 nt, Human
aaccgggacauuuuacagaaaa

SEQ ID NO: 287669 - RNA, 32 nt, Human
aaccgggaggcagaaguugcagugagccgaga

SEQ ID NO: 287670 - RNA, 25 nt, Human
aaccgggaggcggaaguugcaguga

SEQ ID NO: 287671 - RNA, 32 nt, Human
aaccgggaggcggaaguugcagugagccaaga

SEQ ID NO: 287672 - RNA, 25 nt, Human
aaccgggaggcggagguugagguga

SEQ ID NO: 287673 - RNA, 32 nt, Human
aaccgggaggcggagguugaggugagccgaaa

SEQ ID NO: 287674 - RNA, 25 nt, Human
aaccgggaggcggagguugcaguga

SEQ ID NO: 287675 - RNA, 32 nt, Human
aaccgggaggcggagguugcagugagccgaga

SEQ ID NO: 287676 - RNA, 32 nt, Human
aaccgggcacagugacacagucacguguccca

SEQ ID NO: 287677 - RNA, 32 nt, Human
aaccgggcacucaagaaggaaaaagaggaucc

SEQ ID NO: 287678 - RNA, 32 nt, Human
aaccgggcacucaugaaggaaaaagaggaucc

SEQ ID NO: 287679 - RNA, 32 nt, Human
aaccgggcacucaugaaggaaaaaggggaucc

SEQ ID NO: 287680 - RNA, 32 nt, Human
aaccgggcagcuggacgugguggugcaggucu

SEQ ID NO: 287681 - RNA, 26 nt, Human
aaccggggagacggagguugcaguga

SEQ ID NO: 287682 - RNA, 32 nt, Human
aaccggggagacggagguugcagugagccgag

SEQ ID NO: 287683 - RNA, 32 nt, Human
aaccggggagcagcaaagaggcaguagggggc

SEQ ID NO: 287684 - RNA, 32 nt, Human
aaccggggaggcagagguugcagugagcugag

SEQ ID NO: 287685 - RNA, 32 nt, Human
aaccggggaggcagagguugcaguuaagccga

SEQ ID NO: 287686 - RNA, 32 nt, Human
aaccggggaggcggagcuugcagugagccaag

SEQ ID NO: 287687 - RNA, 32 nt, Human
aaccggggaggcggaggguguggugagccggg

SEQ ID NO: 287688 - RNA, 26 nt, Human
aaccggggaggcggagguuacaguga

SEQ ID NO: 287689 - RNA, 32 nt, Human
aaccggggaggcggagguuacagugagccgag

SEQ ID NO: 287690 - RNA, 26 nt, Human
aaccggggaggcggggguugcaauga

SEQ ID NO: 287691 - RNA, 32 nt, Human
aaccggggaggcggggguugcaaugagcuaag

SEQ ID NO: 287692 - RNA, 26 nt, Human
aaccggggagguggaggcugcaguga

SEQ ID NO: 287693 - RNA, 32 nt, Human
aaccggggagguggaggcugcagugagccgag

SEQ ID NO: 287694 - RNA, 26 nt, Human
aaccggggagguggagguugcaguga

SEQ ID NO: 287695 - RNA, 32 nt, Human
aaccggggagguggagguugcagugagcugag

SEQ ID NO: 287696 - RNA, 26 nt, Human
aaccggggaguuggagguugcaguga

SEQ ID NO: 287697 - RNA, 32 nt, Human
aaccggggaguuggagguugcagugagccgag

SEQ ID NO: 287698 - RNA, 32 nt, Human
aaccgguggaaucugaucuugaaaaucugagu

SEQ ID NO: 287699 - RNA, 32 nt, Human
aaccgguuaaagcucauagcugucagcucuga

SEQ ID NO: 287700 - RNA, 32 nt, Human
aaccguaaaagauggacuuuccaguuuaaaag

SEQ ID NO: 287701 - RNA, 32 nt, Human
aaccguagcaccagagcccauucuuccuuguc

SEQ ID NO: 287702 - RNA, 32 nt, Human
aaccguagugggguggaggcugcuggaggugg

SEQ ID NO: 287703 - RNA, 32 nt, Human
aaccguaugaaugugaugaaugugggaaagcc

SEQ ID NO: 287704 - RNA, 32 nt, Human
aaccgucaacagcauaauaaaaucccaacaac

SEQ ID NO: 287705 - RNA, 32 nt, Human
aaccgucaacaucaguguuguaaauuugcuaa

SEQ ID NO: 287706 - RNA, 32 nt, Human
aaccguccuagcagcuccuuccucgcuaacgu

SEQ ID NO: 287707 - RNA, 32 nt, Human
aaccgucucuccccagcccuauccggcgagga

SEQ ID NO: 287708 - RNA, 32 nt, Human
aaccgucuuuucucucagaggguggggaggga

SEQ ID NO: 287709 - RNA, 23 nt, Human
aaccgugagaaguaaauuucugu

SEQ ID NO: 287710 - RNA, 32 nt, Human
aaccguggagaugcggaaggaaaccccacccc

SEQ ID NO: 287711 - RNA, 32 nt, Human
aaccguggccacuuugcuauagggguuacaua

SEQ ID NO: 287712 - RNA, 19 nt, Human
aaccguguuaagacccagc

SEQ ID NO: 287713 - RNA, 32 nt, Human
aaccguuguuuaaggaugcuauucugaaaaga

SEQ ID NO: 287714 - RNA, 32 nt, Human
aaccguuuauaaucagugcuuucccaacucuu

SEQ ID NO: 287715 - RNA, 32 nt, Human
aaccuaaaacucaucagaucacuguauccaga

SEQ ID NO: 287716 - RNA, 32 nt, Human
aaccuaacgaaauuuccaugaagaaccaaguc

SEQ ID NO: 287717 - RNA, 32 nt, Human
aaccuaagcaugccuucuuuauuccagcuccu

SEQ ID NO: 287718 - RNA, 32 nt, Human
aaccuaaggaacaacaugaggaacgugcagau

SEQ ID NO: 287719 - RNA, 32 nt, Human
aaccuaaggacagcuacaaaggaaagacaacu

SEQ ID NO: 287720 - RNA, 32 nt, Human
aaccuaaguggcagagguugcagugagcugag

SEQ ID NO: 287721 - RNA, 32 nt, Human
aaccuacaaaccuguauggcauauuacuguac

SEQ ID NO: 287722 - RNA, 32 nt, Human
aaccuacaaaugggauaguauugcaagguucu

SEQ ID NO: 287723 - RNA, 32 nt, Human
aaccuacaagcaguuggacaguucuggaggcu

SEQ ID NO: 287724 - RNA, 32 nt, Human
aaccuacacugucuaugacagcucuaguugua

SEQ ID NO: 287725 - RNA, 32 nt, Human
aaccuacagcacagauuaugcccugcccacuu

SEQ ID NO: 287726 - RNA, 32 nt, Human
aaccuacaggaaaguuguaaggccagaacaau

SEQ ID NO: 287727 - RNA, 32 nt, Human
aaccuacauuuugccuucuuaauaucgacuuu

SEQ ID NO: 287728 - RNA, 32 nt, Human
aaccuaccuccacccucccccuagccagccag

SEQ ID NO: 287729 - RNA, 32 nt, Human
aaccuaccuucuuuccagaggaugucuuucuc

SEQ ID NO: 287730 - RNA, 32 nt, Human
aaccuacuaagcugcaagcacaggccauuucu

SEQ ID NO: 287731 - RNA, 32 nt, Human
aaccuacuaaguagcuggaacuauaggggcau

SEQ ID NO: 287732 - RNA, 32 nt, Human
aaccuacucaacacagcacucuaggcagccac

SEQ ID NO: 287733 - RNA, 32 nt, Human
aaccuacucaugucccugauaaagcuaaauuu

SEQ ID NO: 287734 - RNA, 32 nt, Human
aaccuacuccaaugcuaaaacuaaucguccca

SEQ ID NO: 287735 - RNA, 32 nt, Human
aaccuacuccaaugcuaaacuaaucgucccaa

SEQ ID NO: 287736 - RNA, 32 nt, Human
aaccuacuugcuuacucaaugccuuuaagcca

SEQ ID NO: 287737 - RNA, 32 nt, Human
aaccuagaaacacacauuucuuugaauuuagg

SEQ ID NO: 287738 - RNA, 32 nt, Human
aaccuagaagagaggggauaccagguucccca

SEQ ID NO: 287739 - RNA, 26 nt, Human
aaccuagaagguggagguugcaguga

SEQ ID NO: 287740 - RNA, 32 nt, Human
aaccuagaagguggagguugcagugagcggag

SEQ ID NO: 287741 - RNA, 32 nt, Human
aaccuagacuucagagagaaugagcagagagc

SEQ ID NO: 287742 - RNA, 32 nt, Human
aaccuagagcagcaaggagcagggcuuggagc

SEQ ID NO: 287743 - RNA, 32 nt, Human
aaccuagaucccucgcaugcgcaguucacaau

SEQ ID NO: 287744 - RNA, 32 nt, Human
aaccuagcauuuccucuccugaagaauaaaug

SEQ ID NO: 287745 - RNA, 32 nt, Human
aaccuagccauccuccugccucagccuccuga

SEQ ID NO: 287746 - RNA, 32 nt, Human
aaccuagcuagcaacauuuguuuuagucugaa

SEQ ID NO: 287747 - RNA, 32 nt, Human
aaccuagcucaaggauuugcaaaguuaggaag

SEQ ID NO: 287748 - RNA, 32 nt, Human
aaccuaggaggcagaaguugcagugagcagag

SEQ ID NO: 287749 - RNA, 26 nt, Human
aaccuaggaggcagagguugcaguga

SEQ ID NO: 287750 - RNA, 32 nt, Human
aaccuaggaggcagagguugcagugaaccgag

SEQ ID NO: 287751 - RNA, 32 nt, Human
aaccuaggaggcagagguugcagugagccaag

SEQ ID NO: 287752 - RNA, 32 nt, Human
aaccuaggaggcagaguuugcagugagcugag

SEQ ID NO: 287753 - RNA, 26 nt, Human
aaccuaggaggcggacguugcaguga

SEQ ID NO: 287754 - RNA, 26 nt, Human
aaccuaggaggcggagguugcaguga

SEQ ID NO: 287755 - RNA, 32 nt, Human
aaccuaggaggcggagguugcagugagccaag

SEQ ID NO: 287756 - RNA, 32 nt, Human
aaccuaggaggcggagguugcagugagucaag

SEQ ID NO: 287757 - RNA, 32 nt, Human
aaccuaggaggcugagauugcagugagccgaa

SEQ ID NO: 287758 - RNA, 32 nt, Human
aaccuaggaggggaagguugcagugagccgag

SEQ ID NO: 287759 - RNA, 32 nt, Human
aaccuaggaggucgaggcugcagugagccaag

SEQ ID NO: 287760 - RNA, 32 nt, Human
aaccuaggagguggaggcugcagcgagcugag

SEQ ID NO: 287761 - RNA, 32 nt, Human
aaccuaggagguggagguugcagugagccgag

SEQ ID NO: 287762 - RNA, 32 nt, Human
aaccuaggagguggagguugcagugagcugag

SEQ ID NO: 287763 - RNA, 32 nt, Human
aaccuagggaggcagagguuguagugagccaa

SEQ ID NO: 287764 - RNA, 32 nt, Human
aaccuaucugcuuucaagcuggucaucaugau

SEQ ID NO: 287765 - RNA, 32 nt, Human
aaccuaugagccuucaauggggaagaccagaa

SEQ ID NO: 287766 - RNA, 32 nt, Human
aaccuauguuauaugauacaagcacaacuuga

SEQ ID NO: 287767 - RNA, 32 nt, Human
aaccuauuacagccugcagcugugagcugagc

SEQ ID NO: 287768 - RNA, 32 nt, Human
aaccuauucaaccagaaaugaauggagcucga

SEQ ID NO: 287769 - RNA, 32 nt, Human
aaccuauuuauuuuguauuuauuugaacagag

SEQ ID NO: 287770 - RNA, 32 nt, Human
aaccuauuugauuucuugacaagaccacaauc

SEQ ID NO: 287771 - RNA, 32 nt, Human
aaccuauuuucacaucauaaaacaucuauuac

SEQ ID NO: 287772 - RNA, 23 nt, Human
aaccucaaacucccaggcucaag

SEQ ID NO: 287773 - RNA, 31 nt, Human
aaccucaagccuaaauaccuguuaggauugg

SEQ ID NO: 287774 - RNA, 32 nt, Human
aaccucaauauuaggucagcaugugaaauguu

SEQ ID NO: 287775 - RNA, 32 nt, Human
aaccucaccccaaauuggagauaggcacuccu

SEQ ID NO: 287776 - RNA, 32 nt, Human
aaccucacgaggagcugggauugcaggcgccc

SEQ ID NO: 287777 - RNA, 32 nt, Human
aaccucacugccccgucacucccuucaaaggc

SEQ ID NO: 287778 - RNA, 32 nt, Human
aaccucacuucgccuuacaggucuccauuuug

SEQ ID NO: 287779 - RNA, 32 nt, Human
aaccucacuuuguaggcucugccuauguaccu

SEQ ID NO: 287780 - RNA, 32 nt, Human
aaccucagagagcacuuuuccccaaguucuug

SEQ ID NO: 287781 - RNA, 22 nt, Human
aaccucagaggcagagguugca

SEQ ID NO: 287782 - RNA, 32 nt, Human
aaccucagaggcagagguugcaaugaagcgga

SEQ ID NO: 287783 - RNA, 32 nt, Human
aaccucagaggcagcuucaagugccuuuugcu

SEQ ID NO: 287784 - RNA, 32 nt, Human
aaccucagagggcccuugaaaacccaccgagg

SEQ ID NO: 287785 - RNA, 32 nt, Human
aaccucagagggcgaaaaccucucuucacugc

SEQ ID NO: 287786 - RNA, 32 nt, Human
aaccucagcaacuucagaaacugccccugaua

SEQ ID NO: 287787 - RNA, 32 nt, Human
aaccucagcccagcccagcccagcuccagcuc

SEQ ID NO: 287788 - RNA, 32 nt, Human
aaccucagccucccagguucaagagauucucc

SEQ ID NO: 287789 - RNA, 32 nt, Human
aaccucagccuccugaguagcuaggacuauag

SEQ ID NO: 287790 - RNA, 32 nt, Human
aaccucagcgacuccggcugcucugcggacug

SEQ ID NO: 287791 - RNA, 32 nt, Human
aaccucagcggcggagguugcagugagucgag

SEQ ID NO: 287792 - RNA, 32 nt, Human
aaccucagcuacuugggaggcugaggcaggag

SEQ ID NO: 287793 - RNA, 32 nt, Human
aaccucaggagguuguacuuaauuuuguuugu

SEQ ID NO: 287794 - RNA, 24 nt, Human
aaccucaguuuccuugucugugaa

SEQ ID NO: 287795 - RNA, 32 nt, Human
aaccucaucacucgaacuccagcuucaagaau

SEQ ID NO: 287796 - RNA, 32 nt, Human
aaccucauccauucaaggaagcagaaaugguc

SEQ ID NO: 287797 - RNA, 22 nt, Human
aaccucaucucuucccuguaga

SEQ ID NO: 287798 - RNA, 24 nt, Human
aaccucaugcaugaaagcagcaca

SEQ ID NO: 287799 - RNA, 32 nt, Human
aaccucauuacacugaacaagaucccaaacgu

SEQ ID NO: 287800 - RNA, 32 nt, Human
aaccucauucaucauaggcucagucugacagg

SEQ ID NO: 287801 - RNA, 32 nt, Human
aaccuccaacagcuuucccugccacugugggu

SEQ ID NO: 287802 - RNA, 32 nt, Human
aaccuccaacaggaagguuauucuucccacgg

SEQ ID NO: 287803 - RNA, 32 nt, Human
aaccuccaaccugcaccccucccuucuccauc

SEQ ID NO: 287804 - RNA, 32 nt, Human
aaccuccaccagcaaccuggacugccucagca

SEQ ID NO: 287805 - RNA, 32 nt, Human
aaccuccaccuccagguucaagcgauucuccu

SEQ ID NO: 287806 - RNA, 32 nt, Human
aaccuccaccucccgggucaagcaauucuccu

SEQ ID NO: 287807 - RNA, 32 nt, Human
aaccuccaccuccggguucaagcgauucuugu

SEQ ID NO: 287808 - RNA, 32 nt, Human
aaccuccaccuccugguucaagcgauucucag

SEQ ID NO: 287809 - RNA, 32 nt, Human
aaccuccaccugccgggucccagugauucucc

SEQ ID NO: 287810 - RNA, 32 nt, Human
aaccuccacuacugcuugacccugccgggauu

SEQ ID NO: 287811 - RNA, 32 nt, Human
aaccuccagacacaagaaaacuucuagcaaau

SEQ ID NO: 287812 - RNA, 32 nt, Human
aaccuccagcacuagcggcuguuucugugucu

SEQ ID NO: 287813 - RNA, 31 nt, Human
aaccuccagucucagcaccaugaaucaaacu

SEQ ID NO: 287814 - RNA, 32 nt, Human
aaccuccagugaccccagagacuuugcuguaa

SEQ ID NO: 287815 - RNA, 32 nt, Human
aaccuccaucuucucccacacugauggcgagc

SEQ ID NO: 287816 - RNA, 32 nt, Human
aaccucccaaagcacuaggauuacaggcauga

SEQ ID NO: 287817 - RNA, 32 nt, Human
aaccucccaaagcgcugggauuacaggcguga

SEQ ID NO: 287818 - RNA, 32 nt, Human
aaccucccaaagugcugagauuacaggcguga

SEQ ID NO: 287819 - RNA, 32 nt, Human
aaccucccaaagugcugggauuacaggcauga

SEQ ID NO: 287820 - RNA, 32 nt, Human
aaccucccaaagugcugggauuacaggcguga

SEQ ID NO: 287821 - RNA, 32 nt, Human
aaccucccaaagugcugggauuacagguguga

SEQ ID NO: 287822 - RNA, 32 nt, Human
aaccucccaaagugcugggauugcaggcguga

SEQ ID NO: 287823 - RNA, 32 nt, Human
aaccucccaaauaguugggauuacaggcacau

SEQ ID NO: 287824 - RNA, 32 nt, Human
aaccucccaacauuuuucuuauggcuguugaa

SEQ ID NO: 287825 - RNA, 22 nt, Human
aaccucccaagaacuaggaccc

SEQ ID NO: 287826 - RNA, 32 nt, Human
aaccucccaaguaacugggacaacauguccau

SEQ ID NO: 287827 - RNA, 32 nt, Human
aaccucccaaguagcgggacugcagggugaag

SEQ ID NO: 287828 - RNA, 32 nt, Human
aaccucccaaguagcuagaccuauaggcgccu

SEQ ID NO: 287829 - RNA, 32 nt, Human
aaccucccaaguagcugagauuacaggcgcac

SEQ ID NO: 287830 - RNA, 32 nt, Human
aaccucccaaguagcugggacuacaggcauau

SEQ ID NO: 287831 - RNA, 32 nt, Human
aaccucccaaguagcugggauuacagaaagcc

SEQ ID NO: 287832 - RNA, 32 nt, Human
aaccucccaaguaguugggauugcaggcacgc

SEQ ID NO: 287833 - RNA, 18 nt, Human
aaccucccaccccugucc

SEQ ID NO: 287834 - RNA, 32 nt, Human
aaccucccacugcuggagugcgagugggaauc

SEQ ID NO: 287835 - RNA, 32 nt, Human
aaccucccagacaaggaagaauaaccaacaua

SEQ ID NO: 287836 - RNA, 18 nt, Human
aaccucccaucccugccc

SEQ ID NO: 287837 - RNA, 21 nt, Human
aaccucccccuccuguccccu

SEQ ID NO: 287838 - RNA, 32 nt, Human
aaccucccgaguaacugggauuacaggugugu

SEQ ID NO: 287839 - RNA, 32 nt, Human
aaccucccgaguagcugggacuacagguaccc

SEQ ID NO: 287840 - RNA, 32 nt, Human
aaccucccgaguaguuaaaauuacaggagucu

SEQ ID NO: 287841 - RNA, 32 nt, Human
aaccucccggauagcugggauuacaggcgugc

SEQ ID NO: 287842 - RNA, 32 nt, Human
aaccucccgucuguaaccugcaccugcaguuc

SEQ ID NO: 287843 - RNA, 24 nt, Human
aaccucccguugcgucaagucuaa

SEQ ID NO: 287844 - RNA, 32 nt, Human
aaccucccuaguagcugggauuacaggugcac

SEQ ID NO: 287845 - RNA, 32 nt, Human
aaccucccuuccgaccuccacccggaccccga

SEQ ID NO: 287846 - RNA, 32 nt, Human
aaccuccgccuccuggguucaagagauucucc

SEQ ID NO: 287847 - RNA, 32 nt, Human
aaccuccuacagccugaugcuuaacccuuucc

SEQ ID NO: 287848 - RNA, 32 nt, Human
aaccuccugaguagcugggacuacaggcaccu

SEQ ID NO: 287849 - RNA, 32 nt, Human
aaccuccugaguagcugggacugcaggcacgc

SEQ ID NO: 287850 - RNA, 32 nt, Human
aaccuccugaguagcugggauuacaggagugu

SEQ ID NO: 287851 - RNA, 32 nt, Human
aaccuccugcccuaggccuggagcacaacaug

SEQ ID NO: 287852 - RNA, 32 nt, Human
aaccuccugccuaggauuuguacagcauuugg

SEQ ID NO: 287853 - RNA, 32 nt, Human
aaccuccugccugggcccucugcuucucacag

SEQ ID NO: 287854 - RNA, 18 nt, Human
aaccuccuuagagaugaa

SEQ ID NO: 287855 - RNA, 32 nt, Human
aaccuccuuaguagcugggauuacaggcaugu

SEQ ID NO: 287856 - RNA, 32 nt, Human
aaccuccuuccacagccgcaucuucucaugac

SEQ ID NO: 287857 - RNA, 32 nt, Human
aaccuccuuccucugguuuugaaaagcaguuc

SEQ ID NO: 287858 - RNA, 32 nt, Human
aaccuccuuggggcugaggccagcacagcgca

SEQ ID NO: 287859 - RNA, 32 nt, Human
aaccuccuugucccucuccagucaccucccuc

SEQ ID NO: 287860 - RNA, 24 nt, Human
aaccuccuuguuuuagacacacua

SEQ ID NO: 287861 - RNA, 32 nt, Human
aaccucgacuucucagccuccugggguuccgc

SEQ ID NO: 287862 - RNA, 32 nt, Human
aaccucgaugccucugagccucgggaccgcuc

SEQ ID NO: 287863 - RNA, 32 nt, Human
aaccucgcaaguagcuugggacuacaggcgug

SEQ ID NO: 287864 - RNA, 32 nt, Human
aaccucgccucccugguucaagcaauucuccu

SEQ ID NO: 287865 - RNA, 32 nt, Human
aaccucgccuggcuaguuuuuguauuuuuagc

SEQ ID NO: 287866 - RNA, 32 nt, Human
aaccucggaggcggagguugcagugagccaag

SEQ ID NO: 287867 - RNA, 32 nt, Human
aaccucggaggcugaaguugcagugagccaag

SEQ ID NO: 287868 - RNA, 32 nt, Human
aaccucggcucacugcaaccuccgccucccag

SEQ ID NO: 287869 - RNA, 32 nt, Human
aaccucggggugggggugggcagugagugcag

SEQ ID NO: 287870 - RNA, 32 nt, Human
aaccucgucaucauccccacuuuaaaccccag

SEQ ID NO: 287871 - RNA, 31 nt, Human
aaccucguccacucggaaaccaaagcagaac

SEQ ID NO: 287872 - RNA, 32 nt, Human
aaccucgucuggaguugaagagaggaugcucc

SEQ ID NO: 287873 - RNA, 22 nt, Human
aaccucgugauccacccaccuc

SEQ ID NO: 287874 - RNA, 32 nt, Human
aaccucuaccagcacauuaaaagugauuguuu

SEQ ID NO: 287875 - RNA, 32 nt, Human
aaccucuacuaaaaauacaaaaauuagccagg

SEQ ID NO: 287876 - RNA, 32 nt, Human
aaccucuagaauagcugggacugcaggugcau

SEQ ID NO: 287877 - RNA, 32 nt, Human
aaccucuagaguagcugggauuacaggcgcau

SEQ ID NO: 287878 - RNA, 32 nt, Human
aaccucucaccaucugaagagcauuaaaagca

SEQ ID NO: 287879 - RNA, 32 nt, Human
aaccucucagagugcugggauuauaggugugc

SEQ ID NO: 287880 - RNA, 32 nt, Human
aaccucucagucuaccuccucuuuucugccuc

SEQ ID NO: 287881 - RNA, 32 nt, Human
aaccucuccacauacauuuguauuaagcucau

SEQ ID NO: 287882 - RNA, 31 nt, Human
aaccucuccagcuagaugucccacaggcaac

SEQ ID NO: 287883 - RNA, 32 nt, Human
aaccucuccaggcaaguggcccccgcggcggc

SEQ ID NO: 287884 - RNA, 32 nt, Human
aaccucucccucuucuuccucuaauugugacc

SEQ ID NO: 287885 - RNA, 22 nt, Human
aaccucuccucaugucuccuca

SEQ ID NO: 287886 - RNA, 32 nt, Human
aaccucuccugugccucuaccuagcucccauc

SEQ ID NO: 287887 - RNA, 32 nt, Human
aaccucucucccacucagcuaugcuagggcuu

SEQ ID NO: 287888 - RNA, 32 nt, Human
aaccucucuccucagccuuccaccuccaagag

SEQ ID NO: 287889 - RNA, 32 nt, Human
aaccucucuccucucucuuuucugugucaguu

SEQ ID NO: 287890 - RNA, 32 nt, Human
aaccucucucucuuccucugucucucccucuc

SEQ ID NO: 287891 - RNA, 32 nt, Human
aaccucucugcucucugcuggccuacagcuug

SEQ ID NO: 287892 - RNA, 32 nt, Human
aaccucugccucccggguucaaguguucuacu

SEQ ID NO: 287893 - RNA, 32 nt, Human
aaccucugccuccggguucaagcaauucuccu

SEQ ID NO: 287894 - RNA, 32 nt, Human
aaccucugccuccugggcucaagccuuccucc

SEQ ID NO: 287895 - RNA, 32 nt, Human
aaccucugccuccuggguucaagaaauucucc

SEQ ID NO: 287896 - RNA, 32 nt, Human
aaccucugccuccugguucaagcgauuauugu

SEQ ID NO: 287897 - RNA, 32 nt, Human
aaccucugcugccagcccuuccucacuuuugg

SEQ ID NO: 287898 - RNA, 32 nt, Human
aaccucuggggaccccaaccucagaggcagcu

SEQ ID NO: 287899 - RNA, 32 nt, Human
aaccucugguauacuguuauguucuggagaaa

SEQ ID NO: 287900 - RNA, 32 nt, Human
aaccucuggugccguccaaggacucugacccc

SEQ ID NO: 287901 - RNA, 32 nt, Human
aaccucuguaugaagagaagauuucucccagg

SEQ ID NO: 287902 - RNA, 24 nt, Human
aaccucuuacggagcuucuccuca

SEQ ID NO: 287903 - RNA, 32 nt, Human
aaccucuuccccacaagccagauuguuucuga

SEQ ID NO: 287904 - RNA, 32 nt, Human
aaccucuuccuccugguucaagcgauucucau

SEQ ID NO: 287905 - RNA, 32 nt, Human
aaccucuucuguccucaaagaggccaaacgca

SEQ ID NO: 287906 - RNA, 32 nt, Human
aaccucuucuugcccuuaagggucuuuuaccu

SEQ ID NO: 287907 - RNA, 32 nt, Human
aaccucuugauaagcucucugccuccuccucc

SEQ ID NO: 287908 - RNA, 32 nt, Human
aaccucuuggugcuucaguuuccucaucugug

SEQ ID NO: 287909 - RNA, 32 nt, Human
aaccucuuuaaugccugaaaucauaagaauaa

SEQ ID NO: 287910 - RNA, 32 nt, Human
aaccucuuugagcaguuccaggaaguugccaa

SEQ ID NO: 287911 - RNA, 32 nt, Human
aaccucuuuuccaccaauaccaugaagcucug

SEQ ID NO: 287912 - RNA, 32 nt, Human
aaccugaacuucugugugguggcaguacugug

SEQ ID NO: 287913 - RNA, 32 nt, Human
aaccugaagaugagggagaagaugaugacuaa

SEQ ID NO: 287914 - RNA, 32 nt, Human
aaccugaaggccauccucuuucugcugugugu

SEQ ID NO: 287915 - RNA, 32 nt, Human
aaccugaauccaucccccuccugaccugugac

SEQ ID NO: 287916 - RNA, 31 nt, Human
aaccugaauggaacaaccuguugagagagca

SEQ ID NO: 287917 - RNA, 32 nt, Human
aaccugaauuuugcucuccucuucuaugcauu

SEQ ID NO: 287918 - RNA, 31 nt, Human
aaccugacucuuuucugaaacauucagagca

SEQ ID NO: 287919 - RNA, 22 nt, Human
aaccugacuuccuaccaacuca

SEQ ID NO: 287920 - RNA, 32 nt, Human
aaccugagaaaagccuuagaccugcagggaau

SEQ ID NO: 287921 - RNA, 32 nt, Human
aaccugagaaguggagguuguggugagcugag

SEQ ID NO: 287922 - RNA, 32 nt, Human
aaccugagagacggagguugcagggagccgag

SEQ ID NO: 287923 - RNA, 32 nt, Human
aaccugagagauggagguugaugugagcugag

SEQ ID NO: 287924 - RNA, 32 nt, Human
aaccugagaggauggcuucagauggagcaucu

SEQ ID NO: 287925 - RNA, 23 nt, Human
aaccugagaggcagagguuacag

SEQ ID NO: 287926 - RNA, 32 nt, Human
aaccugagaggcagagguuacagugagccaag

SEQ ID NO: 287927 - RNA, 32 nt, Human
aaccugagaggcagagguuacagugagcugag

SEQ ID NO: 287928 - RNA, 32 nt, Human
aaccugagaggcagagguugcagugagccaag

SEQ ID NO: 287929 - RNA, 32 nt, Human
aaccugagaggcagagguugcagugagccgag

SEQ ID NO: 287930 - RNA, 26 nt, Human
aaccugagaggcggagguugcaguga

SEQ ID NO: 287931 - RNA, 32 nt, Human
aaccugagaggcggagguugcagugagccaaa

SEQ ID NO: 287932 - RNA, 32 nt, Human
aaccugagaggcggagguugcagugagccaag

SEQ ID NO: 287933 - RNA, 32 nt, Human
aaccugagaggcggagguugcagugagccgag

SEQ ID NO: 287934 - RNA, 32 nt, Human
aaccugagaggugagguugcagugagccgaga

SEQ ID NO: 287935 - RNA, 23 nt, Human
aaccugagagguggagguuacag

SEQ ID NO: 287936 - RNA, 32 nt, Human
aaccugagagguggagguuacagugaguugag

SEQ ID NO: 287937 - RNA, 23 nt, Human
aaccugagagguggagguugcag

SEQ ID NO: 287938 - RNA, 26 nt, Human
aaccugagagguggagguugcaguga

SEQ ID NO: 287939 - RNA, 32 nt, Human
aaccugagagguggagguugcagugagccgag

SEQ ID NO: 287940 - RNA, 32 nt, Human
aaccugagagguggagguugcaguugagccaa

SEQ ID NO: 287941 - RNA, 32 nt, Human
aaccugagagguggagguuucagugagccgag

SEQ ID NO: 287942 - RNA, 32 nt, Human
aaccugagccuccugugugguauuagaaagua

SEQ ID NO: 287943 - RNA, 32 nt, Human
aaccugagcugcuggaaccucuucccuaugaa

SEQ ID NO: 287944 - RNA, 32 nt, Human
aaccugagcuuccaagaagucagguugccaaa

SEQ ID NO: 287945 - RNA, 32 nt, Human
aaccugaggcacugugcucggaaguuagaccc

SEQ ID NO: 287946 - RNA, 32 nt, Human
aaccugagggagacaacggcagagggagugag

SEQ ID NO: 287947 - RNA, 32 nt, Human
aaccugagggagcauuugcugagggaauaguc

SEQ ID NO: 287948 - RNA, 32 nt, Human
aaccugagucuagccaugaggggcuuaugcuc

SEQ ID NO: 287949 - RNA, 32 nt, Human
aaccugagugcgcugggcuuggggaagucgga

SEQ ID NO: 287950 - RNA, 32 nt, Human
aaccugagugucucccagccugccucgguucu

SEQ ID NO: 287951 - RNA, 32 nt, Human
aaccugaguuugaagugacaacgugcugugga

SEQ ID NO: 287952 - RNA, 32 nt, Human
aaccugauaaaauaauucaggccaggcgaggu

SEQ ID NO: 287953 - RNA, 32 nt, Human
aaccugaucaucaauccucuaauucaucccga

SEQ ID NO: 287954 - RNA, 32 nt, Human
aaccugauccccaacagcuuuugagguuguuu

SEQ ID NO: 287955 - RNA, 32 nt, Human
aaccugaucucacucucaacaggcgauggugc

SEQ ID NO: 287956 - RNA, 32 nt, Human
aaccugaucucucaucagagcuggcagcaacu

SEQ ID NO: 287957 - RNA, 31 nt, Human
aaccugaugaccacagcagaaacccccugca

SEQ ID NO: 287958 - RNA, 32 nt, Human
aaccugauuuagaagaacagaaaacaaaacua

SEQ ID NO: 287959 - RNA, 32 nt, Human
aaccugcaaagcaacaggggcggagcugccca

SEQ ID NO: 287960 - RNA, 32 nt, Human
aaccugcaaccguuuccgccuccugcuagagc

SEQ ID NO: 287961 - RNA, 32 nt, Human
aaccugcaccuugcacuuuuggguucuggccu

SEQ ID NO: 287962 - RNA, 32 nt, Human
aaccugcacuucugccaaggccagggccagca

SEQ ID NO: 287963 - RNA, 32 nt, Human
aaccugcagaagaaagcuagaaaaucagaaga

SEQ ID NO: 287964 - RNA, 32 nt, Human
aaccugcagcuuuaucggagugauggcaaugc

SEQ ID NO: 287965 - RNA, 32 nt, Human
aaccugcaggcagaaccugaaagggcauuuug

SEQ ID NO: 287966 - RNA, 32 nt, Human
aaccugcaugaucuguuucuacuauggauugg

SEQ ID NO: 287967 - RNA, 32 nt, Human
aaccugccaacaccuacugacacucacucauc

SEQ ID NO: 287968 - RNA, 32 nt, Human
aaccugccaggcaugguggcacaugccuguga

SEQ ID NO: 287969 - RNA, 32 nt, Human
aaccugcccacagcaaccccacagagccacau

SEQ ID NO: 287970 - RNA, 32 nt, Human
aaccugcccagccggugcccggccacugcgca

SEQ ID NO: 287971 - RNA, 32 nt, Human
aaccugcccccaggcuuccuccagcaaaaggc

SEQ ID NO: 287972 - RNA, 32 nt, Human
aaccugcccugccucaguaaaaauacaguguu

SEQ ID NO: 287973 - RNA, 32 nt, Human
aaccugccucauucggccugaccgguagaggc

SEQ ID NO: 287974 - RNA, 32 nt, Human
aaccugccucccacuacugagcacuuaccgaa

SEQ ID NO: 287975 - RNA, 31 nt, Human
aaccugccucuugcugggccuuuguuccuug

SEQ ID NO: 287976 - RNA, 32 nt, Human
aaccugccuuuauugcccuccugccacacugc

SEQ ID NO: 287977 - RNA, 32 nt, Human
aaccugcgaggcagagauugcagugagccaag

SEQ ID NO: 287978 - RNA, 32 nt, Human
aaccugcucacccuguggcucuucuccaacaa

SEQ ID NO: 287979 - RNA, 32 nt, Human
aaccugcucacuguucuaucuccaaaugagac

SEQ ID NO: 287980 - RNA, 32 nt, Human
aaccugcucugcugaguccccugggccauccc

SEQ ID NO: 287981 - RNA, 32 nt, Human
aaccugcugcagcucucuuuuacuacagacuu

SEQ ID NO: 287982 - RNA, 32 nt, Human
aaccugcuguuuucagggugggugauguaaau

SEQ ID NO: 287983 - RNA, 32 nt, Human
aaccugcuuagaaccaggugugaacugguggc

SEQ ID NO: 287984 - RNA, 32 nt, Human
aaccugcuuccucucccuuccaaagacaguga

SEQ ID NO: 287985 - RNA, 32 nt, Human
aaccuggaaaucggcugggcauggaagcacau

SEQ ID NO: 287986 - RNA, 32 nt, Human
aaccuggaacgcggagguugcaaugagccgag

SEQ ID NO: 287987 - RNA, 32 nt, Human
aaccuggaacuggaguuggcaauaccuaguuc

SEQ ID NO: 287988 - RNA, 32 nt, Human
aaccuggaagcugguguucaccagagaggacu

SEQ ID NO: 287989 - RNA, 32 nt, Human
aaccuggaaggaagagguugcagugagccaag

SEQ ID NO: 287990 - RNA, 32 nt, Human
aaccuggaaggcagaaguugcagugagcugag

SEQ ID NO: 287991 - RNA, 32 nt, Human
aaccuggaaggcagagauugcagugagcugag

SEQ ID NO: 287992 - RNA, 32 nt, Human
aaccuggaaggcagggguugcagugaccugag

SEQ ID NO: 287993 - RNA, 32 nt, Human
aaccuggaaggcggagcuugcagugagcugag

SEQ ID NO: 287994 - RNA, 26 nt, Human
aaccuggaaggcggagguugcaguga

SEQ ID NO: 287995 - RNA, 32 nt, Human
aaccuggaaggcggagguugcagugagcagag

SEQ ID NO: 287996 - RNA, 32 nt, Human
aaccuggaaggcggagguugcagugagccaag

SEQ ID NO: 287997 - RNA, 32 nt, Human
aaccuggaaggcggagguugcagugagccgag

SEQ ID NO: 287998 - RNA, 32 nt, Human
aaccuggaagguggagcuugcagugagcugag

SEQ ID NO: 287999 - RNA, 32 nt, Human
aaccuggaauacagagguuucagugagcugag

SEQ ID NO: 288000 - RNA, 32 nt, Human
aaccuggacauugccaagacagcuuccucagg

SEQ ID NO: 288001 - RNA, 32 nt, Human
aaccuggacuaggccagcuggaaagaggacau

SEQ ID NO: 288002 - RNA, 32 nt, Human
aaccuggagacagagguugcagugagcugaga

SEQ ID NO: 288003 - RNA, 32 nt, Human
aaccuggaggcagagauugcagugagccgaga

SEQ ID NO: 288004 - RNA, 32 nt, Human
aaccuggaggcagagguugcagugagucgagg

SEQ ID NO: 288005 - RNA, 32 nt, Human
aaccuggaggcuaaacccccagcuuucuaugc

SEQ ID NO: 288006 - RNA, 25 nt, Human
aaccuggagguggagguugcaguga

SEQ ID NO: 288007 - RNA, 32 nt, Human
aaccuggagguggagguugcagugagccgagg

SEQ ID NO: 288008 - RNA, 32 nt, Human
aaccuggaguccauuuacucugaccucucuuu

SEQ ID NO: 288009 - RNA, 32 nt, Human
aaccuggauacagaguuuccacccucaguucc

SEQ ID NO: 288010 - RNA, 32 nt, Human
aaccuggaucccuuccuuacaccuuauacaaa

SEQ ID NO: 288011 - RNA, 32 nt, Human
aaccuggcaaguguagguugcagugagcugag

SEQ ID NO: 288012 - RNA, 32 nt, Human
aaccuggcaggcagagguugcagugagccaag

SEQ ID NO: 288013 - RNA, 32 nt, Human
aaccuggcaggcagaguuugcagugaaccaag

SEQ ID NO: 288014 - RNA, 26 nt, Human
aaccuggcaggcggagguugcaguga

SEQ ID NO: 288015 - RNA, 32 nt, Human
aaccuggcaggcggagguugcagugagccgag

SEQ ID NO: 288016 - RNA, 32 nt, Human
aaccuggcaggggcgguucaaguggccgggga

SEQ ID NO: 288017 - RNA, 32 nt, Human
aaccuggcagguggagguuacagugagccaag

SEQ ID NO: 288018 - RNA, 32 nt, Human
aaccuggcagguggagguugcagugaguggag

SEQ ID NO: 288019 - RNA, 32 nt, Human
aaccuggcaguuuuagugccucugguuuucuu

SEQ ID NO: 288020 - RNA, 32 nt, Human
aaccuggccugacagacaagcagaugaccuca

SEQ ID NO: 288021 - RNA, 32 nt, Human
aaccuggccuggagaccucaaagugguccaua

SEQ ID NO: 288022 - RNA, 32 nt, Human
aaccuggcuaaguuuagccaguaggacuguua

SEQ ID NO: 288023 - RNA, 32 nt, Human
aaccuggcucccggcaaccucaggugccuucc

SEQ ID NO: 288024 - RNA, 32 nt, Human
aaccuggcuguggcugcucagguuccccuccu

SEQ ID NO: 288025 - RNA, 32 nt, Human
aaccuggcuuuucccaucuccccagcauaacc

SEQ ID NO: 288026 - RNA, 32 nt, Human
aaccugggaagcagagguugcagugagccgag

SEQ ID NO: 288027 - RNA, 32 nt, Human
aaccugggaagcagaguuugcagugagccaag

SEQ ID NO: 288028 - RNA, 32 nt, Human
aaccugggaagccgaaguagcagugagccgag

SEQ ID NO: 288029 - RNA, 32 nt, Human
aaccugggaagcggagcucgcagugagccgag

SEQ ID NO: 288030 - RNA, 32 nt, Human
aaccugggaagugcagguugcagugagccaag

SEQ ID NO: 288031 - RNA, 32 nt, Human
aaccugggaaguggaagcugcagugagccgag

SEQ ID NO: 288032 - RNA, 32 nt, Human
aaccugggaaguggaggcugcagugagcccag

SEQ ID NO: 288033 - RNA, 32 nt, Human
aaccugggaaguggaggcugcagugagccgag

SEQ ID NO: 288034 - RNA, 32 nt, Human
aaccugggaccaagcaggggaaagcagcugca

SEQ ID NO: 288035 - RNA, 32 nt, Human
aaccugggacugaccguucccuggggauccga

SEQ ID NO: 288036 - RNA, 32 nt, Human
aaccugggagacagaaguuugcagugauccga

SEQ ID NO: 288037 - RNA, 32 nt, Human
aaccugggagacagagguugcaaugaaccgag

SEQ ID NO: 288038 - RNA, 32 nt, Human
aaccugggagacagagguugcagugagccaag

SEQ ID NO: 288039 - RNA, 32 nt, Human
aaccugggagacggagcuugcagugagcugag

SEQ ID NO: 288040 - RNA, 23 nt, Human
aaccugggagacggagguugcag

SEQ ID NO: 288041 - RNA, 32 nt, Human
aaccugggagacggagguugcagugagccaag

SEQ ID NO: 288042 - RNA, 32 nt, Human
aaccugggagacggagguugcagugagccaug

SEQ ID NO: 288043 - RNA, 32 nt, Human
aaccugggagauggaaguugcagugaaccaag

SEQ ID NO: 288044 - RNA, 32 nt, Human
aaccugggagauggagauugcagugagcagag

SEQ ID NO: 288045 - RNA, 32 nt, Human
aaccugggagauggagguugcagagagccaag

SEQ ID NO: 288046 - RNA, 32 nt, Human
aaccugggagauggagguugcagugagccgag

SEQ ID NO: 288047 - RNA, 32 nt, Human
aaccugggagcaggagguugcagugagccgag

SEQ ID NO: 288048 - RNA, 32 nt, Human
aaccugggagccggaggcugcagugagccaag

SEQ ID NO: 288049 - RNA, 32 nt, Human
aaccugggagccugagguugcagugagccaag

SEQ ID NO: 288050 - RNA, 32 nt, Human
aaccugggagcuggugaucaccagagaggacu

SEQ ID NO: 288051 - RNA, 32 nt, Human
aaccugggaggagaagguugcagugagcugag

SEQ ID NO: 288052 - RNA, 32 nt, Human
aaccugggaggaggagguugcagugagcugag

SEQ ID NO: 288053 - RNA, 32 nt, Human
aaccugggaggcaaagguugcagugagcugag

SEQ ID NO: 288054 - RNA, 32 nt, Human
aaccugggaggcaaagguugcggugaacugag

SEQ ID NO: 288055 - RNA, 32 nt, Human
aaccugggaggcaagaccaagcccagaaaacc

SEQ ID NO: 288056 - RNA, 32 nt, Human
aaccugggaggcaagaccaagcccagacaacc

SEQ ID NO: 288057 - RNA, 32 nt, Human
aaccugggaggcaagaccaagcccagauaacc

SEQ ID NO: 288058 - RNA, 32 nt, Human
aaccugggaggcagaaguugcagugaaacaag

SEQ ID NO: 288059 - RNA, 32 nt, Human
aaccugggaggcagaaguugcagugagccgag

SEQ ID NO: 288060 - RNA, 32 nt, Human
aaccugggaggcagaaguugcagugagcugag

SEQ ID NO: 288061 - RNA, 32 nt, Human
aaccugggaggcagaaguuguggugagccgag

SEQ ID NO: 288062 - RNA, 32 nt, Human
aaccugggaggcagagauugcagugagccaag

SEQ ID NO: 288063 - RNA, 32 nt, Human
aaccugggaggcagagauugcagugagccgag

SEQ ID NO: 288064 - RNA, 32 nt, Human
aaccugggaggcagagauugcagugagcugag

SEQ ID NO: 288065 - RNA, 32 nt, Human
aaccugggaggcagagcuugcaguaagccgag

SEQ ID NO: 288066 - RNA, 32 nt, Human
aaccugggaggcagagcuugcagugagccaag

SEQ ID NO: 288067 - RNA, 32 nt, Human
aaccugggaggcagagcuugcagugagccgag

SEQ ID NO: 288068 - RNA, 32 nt, Human
aaccugggaggcagagcuugcagugagccuag

SEQ ID NO: 288069 - RNA, 32 nt, Human
aaccugggaggcagagcuugcagugagcugag

SEQ ID NO: 288070 - RNA, 32 nt, Human
aaccugggaggcagagcuugcagugaguggag

SEQ ID NO: 288071 - RNA, 32 nt, Human
aaccugggaggcagagcuugcagugauuggag

SEQ ID NO: 288072 - RNA, 32 nt, Human
aaccugggaggcagagggugcaguaagcugag

SEQ ID NO: 288073 - RNA, 32 nt, Human
aaccugggaggcagaggugagcugagaucgcg

SEQ ID NO: 288074 - RNA, 32 nt, Human
aaccugggaggcagagguuacaaugagccgag

SEQ ID NO: 288075 - RNA, 32 nt, Human
aaccugggaggcagagguuacagugagccgag

SEQ ID NO: 288076 - RNA, 32 nt, Human
aaccugggaggcagagguugcaaugagccaag

SEQ ID NO: 288077 - RNA, 32 nt, Human
aaccugggaggcagagguugcaaugagcugag

SEQ ID NO: 288078 - RNA, 32 nt, Human
aaccugggaggcagagguugcagggaaccuag

SEQ ID NO: 288079 - RNA, 32 nt, Human
aaccugggaggcagagguugcaguaagccaag

SEQ ID NO: 288080 - RNA, 32 nt, Human
aaccugggaggcagagguugcaguaagcuaag

SEQ ID NO: 288081 - RNA, 32 nt, Human
aaccugggaggcagagguugcaguaagcugag

SEQ ID NO: 288082 - RNA, 32 nt, Human
aaccugggaggcagagguugcagugaacagag

SEQ ID NO: 288083 - RNA, 32 nt, Human
aaccugggaggcagagguugcagugaaccaag

SEQ ID NO: 288084 - RNA, 32 nt, Human
aaccugggaggcagagguugcagugaaccuag

SEQ ID NO: 288085 - RNA, 32 nt, Human
aaccugggaggcagagguugcagugaacugau

SEQ ID NO: 288086 - RNA, 32 nt, Human
aaccugggaggcagagguugcagugagccaag

SEQ ID NO: 288087 - RNA, 32 nt, Human
aaccugggaggcagagguugcagugagccaau

SEQ ID NO: 288088 - RNA, 32 nt, Human
aaccugggaggcagagguugcagugagccgag

SEQ ID NO: 288089 - RNA, 32 nt, Human
aaccugggaggcagagguugcagugagccgau

SEQ ID NO: 288090 - RNA, 32 nt, Human
aaccugggaggcagagguugcagugagcuaag

SEQ ID NO: 288091 - RNA, 32 nt, Human
aaccugggaggcagagguugcagugagcucag

SEQ ID NO: 288092 - RNA, 32 nt, Human
aaccugggaggcagagguugcagugagcugag

SEQ ID NO: 288093 - RNA, 32 nt, Human
aaccugggaggcagagguugcagugaggugac

SEQ ID NO: 288094 - RNA, 32 nt, Human
aaccugggaggcagagguugcagugauccaag

SEQ ID NO: 288095 - RNA, 32 nt, Human
aaccugggaggcagagguugcagugauccgag

SEQ ID NO: 288096 - RNA, 32 nt, Human
aaccugggaggcagagguugccgugagcugag

SEQ ID NO: 288097 - RNA, 32 nt, Human
aaccugggaggcagagguugcgguaagccgag

SEQ ID NO: 288098 - RNA, 32 nt, Human
aaccugggaggcagagguuguagcgagccaag

SEQ ID NO: 288099 - RNA, 32 nt, Human
aaccugggaggcagagguuguagugagcugag

SEQ ID NO: 288100 - RNA, 32 nt, Human
aaccugggaggcagagguuguggugagccaac

SEQ ID NO: 288101 - RNA, 32 nt, Human
aaccugggaggcagagguuguggugagcuaag

SEQ ID NO: 288102 - RNA, 32 nt, Human
aaccugggaggcagagguuguggugagcugag

SEQ ID NO: 288103 - RNA, 32 nt, Human
aaccugggaggcagagguuucagugagccaag

SEQ ID NO: 288104 - RNA, 32 nt, Human
aaccugggaggcagagucugcagugagccgag

SEQ ID NO: 288105 - RNA, 32 nt, Human
aaccugggaggcagaguuuacagugagccgag

SEQ ID NO: 288106 - RNA, 32 nt, Human
aaccugggaggcagaguuugcagugagccgag

SEQ ID NO: 288107 - RNA, 32 nt, Human
aaccugggaggcagaguuugcagugagcggag

SEQ ID NO: 288108 - RNA, 32 nt, Human
aaccugggaggcagauguugcagugagccgag

SEQ ID NO: 288109 - RNA, 32 nt, Human
aaccugggaggcagauguuguggugagccgag

SEQ ID NO: 288110 - RNA, 32 nt, Human
aaccugggaggcagcgguugcaguaagccaag

SEQ ID NO: 288111 - RNA, 32 nt, Human
aaccugggaggcagggguugcagugagcugag

SEQ ID NO: 288112 - RNA, 32 nt, Human
aaccugggaggcaguuugcagugagcugagau

SEQ ID NO: 288113 - RNA, 32 nt, Human
aaccugggaggccaagguugcagugagccgag

SEQ ID NO: 288114 - RNA, 23 nt, Human
aaccugggaggcgaagauugcag

SEQ ID NO: 288115 - RNA, 32 nt, Human
aaccugggaggcgaagauugcagugagcugaa

SEQ ID NO: 288116 - RNA, 32 nt, Human
aaccugggaggcgaagguugcagugagccaag

SEQ ID NO: 288117 - RNA, 32 nt, Human
aaccugggaggcgaagguugcagugagcugag

SEQ ID NO: 288118 - RNA, 32 nt, Human
aaccugggaggcgcagguugcagggaggcgga

SEQ ID NO: 288119 - RNA, 32 nt, Human
aaccugggaggcggaaguugcagugagccaag

SEQ ID NO: 288120 - RNA, 32 nt, Human
aaccugggaggcggaaguugcagugagccgag

SEQ ID NO: 288121 - RNA, 32 nt, Human
aaccugggaggcggaaguugcagugagcugag

SEQ ID NO: 288122 - RNA, 32 nt, Human
aaccugggaggcggagaguacagugagccaag

SEQ ID NO: 288123 - RNA, 32 nt, Human
aaccugggaggcggagauugcagugaaccaag

SEQ ID NO: 288124 - RNA, 32 nt, Human
aaccugggaggcggagcuuacagugaaccgag

SEQ ID NO: 288125 - RNA, 32 nt, Human
aaccugggaggcggagcuugcaaugaacugag

SEQ ID NO: 288126 - RNA, 32 nt, Human
aaccugggaggcggagcuugcaguaagccgag

SEQ ID NO: 288127 - RNA, 32 nt, Human
aaccugggaggcggagcuugcagugagccaag

SEQ ID NO: 288128 - RNA, 32 nt, Human
aaccugggaggcggagcuugcagugagcccag

SEQ ID NO: 288129 - RNA, 32 nt, Human
aaccugggaggcggagcuugcagugagccgag

SEQ ID NO: 288130 - RNA, 32 nt, Human
aaccugggaggcggagcuugcagugagcugag

SEQ ID NO: 288131 - RNA, 32 nt, Human
aaccugggaggcggaggagguugcagugaacu

SEQ ID NO: 288132 - RNA, 32 nt, Human
aaccugggaggcggaggcugcagugagccgag

SEQ ID NO: 288133 - RNA, 32 nt, Human
aaccugggaggcggaggcugcagugagcuggg

SEQ ID NO: 288134 - RNA, 32 nt, Human
aaccugggaggcggagguuccagagagccaag

SEQ ID NO: 288135 - RNA, 32 nt, Human
aaccugggaggcggagguugcaaugagccgag

SEQ ID NO: 288136 - RNA, 32 nt, Human
aaccugggaggcggagguugcagggagcugag

SEQ ID NO: 288137 - RNA, 32 nt, Human
aaccugggaggcggagguugcaguaagcccag

SEQ ID NO: 288138 - RNA, 32 nt, Human
aaccugggaggcggagguugcagucagccaag

SEQ ID NO: 288139 - RNA, 26 nt, Human
aaccugggaggcggagguugcaguga

SEQ ID NO: 288140 - RNA, 32 nt, Human
aaccugggaggcggagguugcagugaaccaag

SEQ ID NO: 288141 - RNA, 32 nt, Human
aaccugggaggcggagguugcagugagccaaa

SEQ ID NO: 288142 - RNA, 32 nt, Human
aaccugggaggcggagguugcagugagccaag

SEQ ID NO: 288143 - RNA, 32 nt, Human
aaccugggaggcggagguugcagugagccacu

SEQ ID NO: 288144 - RNA, 32 nt, Human
aaccugggaggcggagguugcagugagccgag

SEQ ID NO: 288145 - RNA, 32 nt, Human
aaccugggaggcggagguugcagugagccgcg

SEQ ID NO: 288146 - RNA, 32 nt, Human
aaccugggaggcggagguugcagugagcgaga

SEQ ID NO: 288147 - RNA, 32 nt, Human
aaccugggaggcggagguugcagugagcggag

SEQ ID NO: 288148 - RNA, 32 nt, Human
aaccugggaggcggagguugcagugagcuaag

SEQ ID NO: 288149 - RNA, 32 nt, Human
aaccugggaggcggagguugcagugagcugaa

SEQ ID NO: 288150 - RNA, 32 nt, Human
aaccugggaggcggagguugcagugagcugag

SEQ ID NO: 288151 - RNA, 32 nt, Human
aaccugggaggcggagguugcagugagcuuag

SEQ ID NO: 288152 - RNA, 32 nt, Human
aaccugggaggcggagguugcagugagucgag

SEQ ID NO: 288153 - RNA, 32 nt, Human
aaccugggaggcggagguugcagugaguugag

SEQ ID NO: 288154 - RNA, 32 nt, Human
aaccugggaggcggagguugcaguggccgaga

SEQ ID NO: 288155 - RNA, 32 nt, Human
aaccugggaggcggagguugccgugagccgag

SEQ ID NO: 288156 - RNA, 32 nt, Human
aaccugggaggcggagguugcggucagcugag

SEQ ID NO: 288157 - RNA, 26 nt, Human
aaccugggaggcggagguugcgguga

SEQ ID NO: 288158 - RNA, 32 nt, Human
aaccugggaggcggagguugcggugagcugag

SEQ ID NO: 288159 - RNA, 32 nt, Human
aaccugggaggcggagguugcugugagcugag

SEQ ID NO: 288160 - RNA, 26 nt, Human
aaccugggaggcggagguuguaguga

SEQ ID NO: 288161 - RNA, 32 nt, Human
aaccugggaggcggagguuguagugagccaag

SEQ ID NO: 288162 - RNA, 32 nt, Human
aaccugggaggcggagguuguagugagccgag

SEQ ID NO: 288163 - RNA, 32 nt, Human
aaccugggaggcggagguugugaugagccaag

SEQ ID NO: 288164 - RNA, 26 nt, Human
aaccugggaggcggagguugugguga

SEQ ID NO: 288165 - RNA, 32 nt, Human
aaccugggaggcggagguuguggugagccaag

SEQ ID NO: 288166 - RNA, 32 nt, Human
aaccugggaggcggagguuguggugagccgag

SEQ ID NO: 288167 - RNA, 32 nt, Human
aaccugggaggcggauguugaagugagcugag

SEQ ID NO: 288168 - RNA, 32 nt, Human
aaccugggaggcggggguuguggugagccgug

SEQ ID NO: 288169 - RNA, 32 nt, Human
aaccugggaggcugaaguugcagugagccgag

SEQ ID NO: 288170 - RNA, 32 nt, Human
aaccugggaggcugagcuugcagugagcugag

SEQ ID NO: 288171 - RNA, 32 nt, Human
aaccugggagggcggagguugcagugagccag

SEQ ID NO: 288172 - RNA, 32 nt, Human
aaccugggagggggagguugccgugagcugag

SEQ ID NO: 288173 - RNA, 32 nt, Human
aaccugggagguacagguugcagugagcccag

SEQ ID NO: 288174 - RNA, 32 nt, Human
aaccugggagguagaaguugcagugagccaaa

SEQ ID NO: 288175 - RNA, 32 nt, Human
aaccugggagguagagguugcacugagccgag

SEQ ID NO: 288176 - RNA, 32 nt, Human
aaccugggagguagagguugcagugagccaau

SEQ ID NO: 288177 - RNA, 32 nt, Human
aaccugggagguagagguugcagugagccgag

SEQ ID NO: 288178 - RNA, 32 nt, Human
aaccugggaggucaaagcggcagugagcuaaa

SEQ ID NO: 288179 - RNA, 32 nt, Human
aaccugggaggucaagauugcagugagcuaug

SEQ ID NO: 288180 - RNA, 32 nt, Human
aaccugggagguggaagcugcagugagccaag

SEQ ID NO: 288181 - RNA, 32 nt, Human
aaccugggagguggaaguugcagugagccaag

SEQ ID NO: 288182 - RNA, 32 nt, Human
aaccugggagguggaaguugcagugagccgag

SEQ ID NO: 288183 - RNA, 32 nt, Human
aaccugggagguggaaguugcagugagcugag

SEQ ID NO: 288184 - RNA, 32 nt, Human
aaccugggagguggagacugcagugagccgag

SEQ ID NO: 288185 - RNA, 32 nt, Human
aaccugggagguggagauugcagugagcccag

SEQ ID NO: 288186 - RNA, 32 nt, Human
aaccugggagguggagauugcagugagucaag

SEQ ID NO: 288187 - RNA, 32 nt, Human
aaccugggagguggagcuugcagugaaccgag

SEQ ID NO: 288188 - RNA, 32 nt, Human
aaccugggagguggagcuugcagugagccgag

SEQ ID NO: 288189 - RNA, 32 nt, Human
aaccugggagguggagcuugcagugagcggac

SEQ ID NO: 288190 - RNA, 32 nt, Human
aaccugggagguggagcuugcagugagcugag

SEQ ID NO: 288191 - RNA, 32 nt, Human
  misc_feature (23)..(23): n is a, c, g, or u
aaccugggagguggagcuugcanugagccaag

SEQ ID NO: 288192 - RNA, 32 nt, Human
aaccugggagguggaggcagugagcugagauc

SEQ ID NO: 288193 - RNA, 32 nt, Human
aaccugggagguggaggcuacagugagcugag

SEQ ID NO: 288194 - RNA, 32 nt, Human
aaccugggagguggaggcugcagugaaccgag

SEQ ID NO: 288195 - RNA, 32 nt, Human
aaccugggagguggagguuacagugagccgag

SEQ ID NO: 288196 - RNA, 32 nt, Human
aaccugggagguggagguuauagugagccuag

SEQ ID NO: 288197 - RNA, 32 nt, Human
aaccugggagguggagguugaggugagcucag

SEQ ID NO: 288198 - RNA, 32 nt, Human
aaccugggagguggagguugcagcgagccaag

SEQ ID NO: 288199 - RNA, 32 nt, Human
aaccugggagguggagguugcaguaagccaag

SEQ ID NO: 288200 - RNA, 32 nt, Human
aaccugggagguggagguugcaguaagcugag

SEQ ID NO: 288201 - RNA, 26 nt, Human
aaccugggagguggagguugcaguga

SEQ ID NO: 288202 - RNA, 32 nt, Human
aaccugggagguggagguugcagugacccgag

SEQ ID NO: 288203 - RNA, 32 nt, Human
aaccugggagguggagguugcagugagcagag

SEQ ID NO: 288204 - RNA, 32 nt, Human
aaccugggagguggagguugcagugagccaag

SEQ ID NO: 288205 - RNA, 32 nt, Human
aaccugggagguggagguugcagugagccgag

SEQ ID NO: 288206 - RNA, 32 nt, Human
aaccugggagguggagguugcagugagcugag

SEQ ID NO: 288207 - RNA, 32 nt, Human
aaccugggagguggagguugcagugagcugug

SEQ ID NO: 288208 - RNA, 32 nt, Human
aaccugggagguggagguugcagugagucgag

SEQ ID NO: 288209 - RNA, 32 nt, Human
aaccugggagguggagguugcagugaguugag

SEQ ID NO: 288210 - RNA, 26 nt, Human
aaccugggagguggagguugcagugg

SEQ ID NO: 288211 - RNA, 32 nt, Human
aaccugggagguggagguugcagugggccaag

SEQ ID NO: 288212 - RNA, 32 nt, Human
aaccugggagguggagguugcagugggcuaag

SEQ ID NO: 288213 - RNA, 32 nt, Human
aaccugggagguggagguugcagugggcugag

SEQ ID NO: 288214 - RNA, 32 nt, Human
aaccugggagguggagguugcauugagccaag

SEQ ID NO: 288215 - RNA, 32 nt, Human
aaccugggagguggagguugcauugagcugag

SEQ ID NO: 288216 - RNA, 32 nt, Human
aaccugggagguggagguugcgagaucacacc

SEQ ID NO: 288217 - RNA, 26 nt, Human
aaccugggagguggagguugcgguga

SEQ ID NO: 288218 - RNA, 32 nt, Human
aaccugggagguggagguugcggugagccaag

SEQ ID NO: 288219 - RNA, 32 nt, Human
aaccugggagguggagguugcggugagccgag

SEQ ID NO: 288220 - RNA, 32 nt, Human
aaccugggagguggagguugcggugagcugag

SEQ ID NO: 288221 - RNA, 32 nt, Human
aaccugggagguggagguugcugugagcugac

SEQ ID NO: 288222 - RNA, 32 nt, Human
aaccugggagguggagguugcugugagcugag

SEQ ID NO: 288223 - RNA, 26 nt, Human
aaccugggagguggagguugugguga

SEQ ID NO: 288224 - RNA, 32 nt, Human
aaccugggagguggagguuguggugagccaau

SEQ ID NO: 288225 - RNA, 32 nt, Human
aaccugggagguggagguuguggugaggcgag

SEQ ID NO: 288226 - RNA, 32 nt, Human
aaccugggagguggagguuucagugagccaag

SEQ ID NO: 288227 - RNA, 32 nt, Human
aaccugggagguggaguugcagugagccgaga

SEQ ID NO: 288228 - RNA, 32 nt, Human
aaccugggagguggauguugcagugagcugag

SEQ ID NO: 288229 - RNA, 32 nt, Human
aaccugggagguggugguugcagugagcugag

SEQ ID NO: 288230 - RNA, 32 nt, Human
aaccugggagguugaggcugcagugagcugug

SEQ ID NO: 288231 - RNA, 32 nt, Human
aaccugggaguuagagguugcagugagcugag

SEQ ID NO: 288232 - RNA, 32 nt, Human
aaccugggaguuggagguugcagugaaacgag

SEQ ID NO: 288233 - RNA, 32 nt, Human
aaccugggaguuugaagcugcagugagccaug

SEQ ID NO: 288234 - RNA, 23 nt, Human
aaccugggauguggagguugcag

SEQ ID NO: 288235 - RNA, 32 nt, Human
aaccugggauguggagguugcagugaacugag

SEQ ID NO: 288236 - RNA, 32 nt, Human
aaccugggauguggagguugcagugagccaag

SEQ ID NO: 288237 - RNA, 32 nt, Human
aaccugggcagcagagcaagacucugucucaa

SEQ ID NO: 288238 - RNA, 32 nt, Human
aaccugggcaggcgagaguaguacuggagggc

SEQ ID NO: 288239 - RNA, 32 nt, Human
aaccugggcggcagagguugcagugagucaag

SEQ ID NO: 288240 - RNA, 32 nt, Human
aaccugggggaggaugcaggaggcugaaggga

SEQ ID NO: 288241 - RNA, 32 nt, Human
aaccugggggauggucagagcccagucgagac

SEQ ID NO: 288242 - RNA, 32 nt, Human
aaccugggggccugaggugccaggguucacag

SEQ ID NO: 288243 - RNA, 32 nt, Human
aaccugggggcgauggaauccgggagcggugg

SEQ ID NO: 288244 - RNA, 32 nt, Human
aaccuggguagguggguaggggccacaguugc

SEQ ID NO: 288245 - RNA, 32 nt, Human
aaccugggucagcaucccuagguugagaaggg

SEQ ID NO: 288246 - RNA, 32 nt, Human
aaccuggguccccaggccauaaggugggcaca

SEQ ID NO: 288247 - RNA, 32 nt, Human
aaccugggugacagagugagacuccaucucaa

SEQ ID NO: 288248 - RNA, 32 nt, Human
aaccugggugauagagcaagucucugucuuua

SEQ ID NO: 288249 - RNA, 32 nt, Human
aaccuggguggucgaggcugcagugagccgag

SEQ ID NO: 288250 - RNA, 32 nt, Human
aaccugguaggcagagguugcagugagccgag

SEQ ID NO: 288251 - RNA, 32 nt, Human
aaccugguaggcagagguuguagugagccgag

SEQ ID NO: 288252 - RNA, 32 nt, Human
aaccugguagguggagguuucauugagccacg

SEQ ID NO: 288253 - RNA, 22 nt, Human
aaccugguaugggagccaggag

SEQ ID NO: 288254 - RNA, 32 nt, Human
aaccuggucccacugggaacagacucagaguu

SEQ ID NO: 288255 - RNA, 32 nt, Human
aaccuggugcccagguggaggugcaguggggg

SEQ ID NO: 288256 - RNA, 32 nt, Human
aaccugguggugcccucugccuguagggaaca

SEQ ID NO: 288257 - RNA, 32 nt, Human
aaccugguggugcuggccagggaggaugcugg

SEQ ID NO: 288258 - RNA, 32 nt, Human
aaccugguuuauacaacaucugccuucuccaa

SEQ ID NO: 288259 - RNA, 32 nt, Human
aaccuguaaggcggagguugcagugagccgag

SEQ ID NO: 288260 - RNA, 32 nt, Human
aaccuguagaaaacaagugcuuuuuaucuuga

SEQ ID NO: 288261 - RNA, 32 nt, Human
aaccuguagacagaggccaccagcucaaaacc

SEQ ID NO: 288262 - RNA, 32 nt, Human
aaccuguauagcauguuacuauccugaaguca

SEQ ID NO: 288263 - RNA, 32 nt, Human
aaccugucaaugauacagucccuaaagaaaaa

SEQ ID NO: 288264 - RNA, 32 nt, Human
aaccuguccucccuuucuccccaacuaugcau

SEQ ID NO: 288265 - RNA, 32 nt, Human
aaccuguccugucugacacgucucacagccuu

SEQ ID NO: 288266 - RNA, 32 nt, Human
aaccugucuaacuggaugcucauugccugggc

SEQ ID NO: 288267 - RNA, 32 nt, Human
aaccugucuccaccccuguauuucaagaucau

SEQ ID NO: 288268 - RNA, 32 nt, Human
aaccugucugccucuguggauccacagccugg

SEQ ID NO: 288269 - RNA, 32 nt, Human
aaccugucuggcaagggacaggaagcugauag

SEQ ID NO: 288270 - RNA, 32 nt, Human
aaccugugacccuuuucuacuggaauagaaau

SEQ ID NO: 288271 - RNA, 32 nt, Human
aaccugugaggaagagguugcagugagcugag

SEQ ID NO: 288272 - RNA, 32 nt, Human
aaccugugaggcagagguugcagugagccaag

SEQ ID NO: 288273 - RNA, 32 nt, Human
aaccugugaggcggagcuugcagggagucgag

SEQ ID NO: 288274 - RNA, 32 nt, Human
aaccugugagguggagcuugcagugagccaag

SEQ ID NO: 288275 - RNA, 32 nt, Human
aaccugugcugcagguuggaguggcaggaacg

SEQ ID NO: 288276 - RNA, 32 nt, Human
aaccugugggcaagucuuuacccuucaguagu

SEQ ID NO: 288277 - RNA, 31 nt, Human
aaccugugggugggguugggguggagaagua

SEQ ID NO: 288278 - RNA, 32 nt, Human
aaccugugugccagacauuugugcauuguugc

SEQ ID NO: 288279 - RNA, 32 nt, Human
aaccuguuauaauugccagcugucuacacaaa

SEQ ID NO: 288280 - RNA, 20 nt, Human
aaccuguuauauacucagug

SEQ ID NO: 288281 - RNA, 32 nt, Human
aaccuguucaaaacaaagaaggcauagaauau

SEQ ID NO: 288282 - RNA, 32 nt, Human
aaccuguucucagcucugccuccccuggccag

SEQ ID NO: 288283 - RNA, 32 nt, Human
aaccuguucucuuucccuucuugucuuuaaaa

SEQ ID NO: 288284 - RNA, 32 nt, Human
aaccuguugggccaaugagaaaagaaccacac

SEQ ID NO: 288285 - RNA, 32 nt, Human
aaccuguuuaaaucacacacccgcacagaacu

SEQ ID NO: 288286 - RNA, 32 nt, Human
aaccuguuuaacugcuuagugugaacucuagu

SEQ ID NO: 288287 - RNA, 32 nt, Human
aaccuguuugacuugauagaugccauugcccu

SEQ ID NO: 288288 - RNA, 32 nt, Human
aaccuuaaaguucuguugguaucacagaagac

SEQ ID NO: 288289 - RNA, 32 nt, Human
aaccuuaauggccugaggugggcagaggggug

SEQ ID NO: 288290 - RNA, 32 nt, Human
aaccuuaaugugacaccugagaccuuuagaca

SEQ ID NO: 288291 - RNA, 32 nt, Human
aaccuuacaaaugcaaugaaugugguaaagcc

SEQ ID NO: 288292 - RNA, 32 nt, Human
aaccuuacaaguguaaugaaugcagcaggacc

SEQ ID NO: 288293 - RNA, 32 nt, Human
aaccuuagccccaaacauaagauagcuauguc

SEQ ID NO: 288294 - RNA, 32 nt, Human
aaccuuaggccuggcccuggucuccgagcgcg

SEQ ID NO: 288295 - RNA, 32 nt, Human
aaccuuagguucuauguaucagcugugucuua

SEQ ID NO: 288296 - RNA, 32 nt, Human
aaccuuagugagguggacaggaggggaccucg

SEQ ID NO: 288297 - RNA, 32 nt, Human
aaccuuaucuaagguuuuccaggauuuaaaca

SEQ ID NO: 288298 - RNA, 32 nt, Human
aaccuuaugaauguaaugaaugugggaaguca

SEQ ID NO: 288299 - RNA, 32 nt, Human
aaccuucaaaaacaaguggaggaaaggcauca

SEQ ID NO: 288300 - RNA, 32 nt, Human
aaccuucaaacuggcgaugucaaggguuccaa

SEQ ID NO: 288301 - RNA, 31 nt, Human
aaccuucacagcuggagggauagaccauggc

SEQ ID NO: 288302 - RNA, 32 nt, Human
aaccuucacagcuggagggauagaccauggcc

SEQ ID NO: 288303 - RNA, 32 nt, Human
aaccuucacaugcggauccacacuggagaaaa

SEQ ID NO: 288304 - RNA, 32 nt, Human
aaccuucaccuccagguucaagugauucuccu

SEQ ID NO: 288305 - RNA, 32 nt, Human
aaccuucacugcauccuugccccauucagccc

SEQ ID NO: 288306 - RNA, 32 nt, Human
aaccuucagagggugaaaggggaaguuuucuu

SEQ ID NO: 288307 - RNA, 32 nt, Human
aaccuucagaguguaucaaagaauucagacag

SEQ ID NO: 288308 - RNA, 32 nt, Human
aaccuucagaucucaugagaccggcucacuau

SEQ ID NO: 288309 - RNA, 32 nt, Human
aaccuucagccaaguucugccugcuguguauc

SEQ ID NO: 288310 - RNA, 32 nt, Human
aaccuucagccugucuggcugcuggaccugga

SEQ ID NO: 288311 - RNA, 32 nt, Human
aaccuucagguccagcccuggagcuggaggag

SEQ ID NO: 288312 - RNA, 32 nt, Human
aaccuucagugacucaccuuuaccucaggaac

SEQ ID NO: 288313 - RNA, 32 nt, Human
aaccuucauccagcauccacuuccaggggaca

SEQ ID NO: 288314 - RNA, 32 nt, Human
aaccuucauuugggccuuccuuccucaugucu

SEQ ID NO: 288315 - RNA, 32 nt, Human
aaccuuccaaugcuucuguugaucucaguauu

SEQ ID NO: 288316 - RNA, 32 nt, Human
aaccuuccacugagaagccacuucaagaggcu

SEQ ID NO: 288317 - RNA, 32 nt, Human
aaccuucccaaaaugccccuugcucagaagaa

SEQ ID NO: 288318 - RNA, 32 nt, Human
aaccuucccacacucccugcuccaggagggaa

SEQ ID NO: 288319 - RNA, 32 nt, Human
aaccuuccgaauagcugggacuacaggcgcac

SEQ ID NO: 288320 - RNA, 32 nt, Human
aaccuuccucauaugaauaaccauuuauaugu

SEQ ID NO: 288321 - RNA, 32 nt, Human
aaccuuccuucuuccucauuguggacuuggau

SEQ ID NO: 288322 - RNA, 32 nt, Human
aaccuucgaccuuggacuucucagccuccaga

SEQ ID NO: 288323 - RNA, 32 nt, Human
aaccuucgccucuggguucaagugauucuccu

SEQ ID NO: 288324 - RNA, 32 nt, Human
aaccuucggaguagcugggaucacagcugcag

SEQ ID NO: 288325 - RNA, 32 nt, Human
aaccuucgucuuuuuaaaugugucauuucaca

SEQ ID NO: 288326 - RNA, 32 nt, Human
aaccuucucccagguaggggcaggaggagcca

SEQ ID NO: 288327 - RNA, 32 nt, Human
aaccuucugcaaagauggugugguguacgugg

SEQ ID NO: 288328 - RNA, 32 nt, Human
aaccuucuggaaggcugcuggcaguuuuuccu

SEQ ID NO: 288329 - RNA, 32 nt, Human
aaccuugaaucacuugagcauguaauaacuaa

SEQ ID NO: 288330 - RNA, 32 nt, Human
aaccuugacaccuguaaggacaggaucugccc

SEQ ID NO: 288331 - RNA, 32 nt, Human
aaccuugagauaggcugggugcgguggcucac

SEQ ID NO: 288332 - RNA, 31 nt, Human
aaccuugauucucucccuugaaaaacaggga

SEQ ID NO: 288333 - RNA, 32 nt, Human
aaccuugcagguuguaacaacagcugcacucu

SEQ ID NO: 288334 - RNA, 31 nt, Human
aaccuugccacaccugcaccuguguccuccc

SEQ ID NO: 288335 - RNA, 32 nt, Human
aaccuugccugguacaguaugggggcuguaaa

SEQ ID NO: 288336 - RNA, 32 nt, Human
aaccuugccugguacaguauggggguuguaaa

SEQ ID NO: 288337 - RNA, 32 nt, Human
aaccuugcucuccucaucuccaaggcagggac

SEQ ID NO: 288338 - RNA, 32 nt, Human
aaccuugcuuccuagcuuauuuauuucccaaa

SEQ ID NO: 288339 - RNA, 32 nt, Human
aaccuugcuuugccuuggcuucaaacuaguuc

SEQ ID NO: 288340 - RNA, 32 nt, Human
aaccuuggaggcagagguugcagugagcugag

SEQ ID NO: 288341 - RNA, 26 nt, Human
aaccuuggaggcggagguugcauuga

SEQ ID NO: 288342 - RNA, 32 nt, Human
aaccuuggaggcggagguugcauugagcugag

SEQ ID NO: 288343 - RNA, 26 nt, Human
aaccuuggagguggagguugugguga

SEQ ID NO: 288344 - RNA, 32 nt, Human
aaccuuggagguggagguuguggugagccaug

SEQ ID NO: 288345 - RNA, 32 nt, Human
aaccuuggagugaauucgucggcgggugccaa

SEQ ID NO: 288346 - RNA, 32 nt, Human
aaccuuggagugagagcccagggacagguccc

SEQ ID NO: 288347 - RNA, 32 nt, Human
aaccuuggcauuuucaccagacaugcagauuu

SEQ ID NO: 288348 - RNA, 32 nt, Human
aaccuugggcugggucuauguacguucuuccg

SEQ ID NO: 288349 - RNA, 32 nt, Human
aaccuuggggagaccuggaggaacagugcagu

SEQ ID NO: 288350 - RNA, 32 nt, Human
aaccuugguggcacagugagaaccugacucuu

SEQ ID NO: 288351 - RNA, 25 nt, Human
aaccuugguuucuccauccuuguga

SEQ ID NO: 288352 - RNA, 32 nt, Human
aaccuuguaaauccaaaccccauaaaagagag

SEQ ID NO: 288353 - RNA, 32 nt, Human
aaccuuguaugcgggcaggcccagggagcagg

SEQ ID NO: 288354 - RNA, 32 nt, Human
aaccuugucuccuccagcaccacagggaagac

SEQ ID NO: 288355 - RNA, 32 nt, Human
aaccuugugccuuggaaaugcaaacucaccgc

SEQ ID NO: 288356 - RNA, 32 nt, Human
aaccuuguggauggcuucuaggaacagagcug

SEQ ID NO: 288357 - RNA, 32 nt, Human
aaccuuguggcagaaggcaagagcggcaagau

SEQ ID NO: 288358 - RNA, 32 nt, Human
aaccuuguuauuucucagacuuuggaaaaugc

SEQ ID NO: 288359 - RNA, 32 nt, Human
aaccuuuagggaggauaguggagaagccgcag

SEQ ID NO: 288360 - RNA, 28 nt, Human
aaccuuucaagugcuacguccauuugug

SEQ ID NO: 288361 - RNA, 32 nt, Human
aaccuuucaccuuuguguauuuuucaauaaua

SEQ ID NO: 288362 - RNA, 32 nt, Human
aaccuuucagccugugagccucugcacaaagc

SEQ ID NO: 288363 - RNA, 32 nt, Human
aaccuuucauuuccuacuucauuccagcagga

SEQ ID NO: 288364 - RNA, 32 nt, Human
aaccuuuccaauaaucccuuaaucagaucaca

SEQ ID NO: 288365 - RNA, 32 nt, Human
aaccuuuccagguucucuuagagccauaugcc

SEQ ID NO: 288366 - RNA, 32 nt, Human
aaccuuucucauauuuucucaugaccauugcc

SEQ ID NO: 288367 - RNA, 32 nt, Human
aaccuuucuuugucuuucuuauggggguuacc

SEQ ID NO: 288368 - RNA, 32 nt, Human
aaccuuucuuuuucucuacuuuaauuuuucua

SEQ ID NO: 288369 - RNA, 32 nt, Human
aaccuuugaggaaaggaggaaggaagaaaugc

SEQ ID NO: 288370 - RNA, 32 nt, Human
aaccuuugcucugaaauuccauuuuucccucu

SEQ ID NO: 288371 - RNA, 32 nt, Human
aaccuuuggugccuuuucucucuucuuuaccu

SEQ ID NO: 288372 - RNA, 32 nt, Human
aaccuuuggugugccaagaggagguggguaga

SEQ ID NO: 288373 - RNA, 32 nt, Human
aaccuuuucacucacgucagaagagguugggg

SEQ ID NO: 288374 - RNA, 32 nt, Human
aaccuuuuggagccuuagucucccagacugaa

SEQ ID NO: 288375 - RNA, 32 nt, Human
aaccuuuuuaucuguucucuccaccuucaguu

SEQ ID NO: 288376 - RNA, 32 nt, Human
aaccuuuuucuuccuuucccucuuuucuaugu

SEQ ID NO: 288377 - RNA, 32 nt, Human
aacgaaaauugaaccugucugccugugcugug

SEQ ID NO: 288378 - RNA, 32 nt, Human
aacgaaacaaaggagcauucguucucuguugu

SEQ ID NO: 288379 - RNA, 32 nt, Human
aacgaaaccaacagcaguccaagcucagucag

SEQ ID NO: 288380 - RNA, 32 nt, Human
aacgaaagugcuucucaucaaugauauguaag

SEQ ID NO: 288381 - RNA, 31 nt, Human
aacgaaaugggaagaagauggguggagcuau

SEQ ID NO: 288382 - RNA, 32 nt, Human
aacgaaauuuccauucccaaaauaacugagaa

SEQ ID NO: 288383 - RNA, 32 nt, Human
aacgaacacucgccuggccugggaaacugcau

SEQ ID NO: 288384 - RNA, 32 nt, Human
aacgaacccaacaaugaagauacaguucuguc

SEQ ID NO: 288385 - RNA, 32 nt, Human
aacgaagaauaaagucuguguugcaguccugu

SEQ ID NO: 288386 - RNA, 32 nt, Human
aacgaagacuaaccucaccagccagucaucua

SEQ ID NO: 288387 - RNA, 32 nt, Human
aacgaagcagcucccuucccaccccaacugca

SEQ ID NO: 288388 - RNA, 32 nt, Human
aacgaagccagccuggaccauacacugccugg

SEQ ID NO: 288389 - RNA, 32 nt, Human
aacgaagcuacagaagaauggaagaagacagc

SEQ ID NO: 288390 - RNA, 32 nt, Human
aacgaagcugucuuagagugggaccaacuucc

SEQ ID NO: 288391 - RNA, 32 nt, Human
aacgaaggggaugagaagagaggcagagcugg

SEQ ID NO: 288392 - RNA, 32 nt, Human
aacgaaguaagcacccaucccucccagcucac

SEQ ID NO: 288393 - RNA, 32 nt, Human
aacgaauaugcccaugcugcuaccacauccuc

SEQ ID NO: 288394 - RNA, 32 nt, Human
aacgaauccauagcugacaaauucacucagug

SEQ ID NO: 288395 - RNA, 32 nt, Human
aacgaauguguauugaccaucuccucuugcca

SEQ ID NO: 288396 - RNA, 32 nt, Human
aacgaauuguauuuucucucuccuggacaacu

SEQ ID NO: 288397 - RNA, 32 nt, Human
aacgacaaagggaugaauuccuuacuuuaauc

SEQ ID NO: 288398 - RNA, 32 nt, Human
aacgacacaccagcuccugggaucagacuuuc

SEQ ID NO: 288399 - RNA, 32 nt, Human
aacgacacgagagcuaaugcugcaugcccguu

SEQ ID NO: 288400 - RNA, 32 nt, Human
aacgacagccguugugccccaggcucuccaug

SEQ ID NO: 288401 - RNA, 32 nt, Human
aacgacaggcgaggccgcggccccagaguccc

SEQ ID NO: 288402 - RNA, 21 nt, Human
aacgaccccacaggucaggug

SEQ ID NO: 288403 - RNA, 32 nt, Human
aacgacccuggccuugaacgucagagccgggg

SEQ ID NO: 288404 - RNA, 32 nt, Human
aacgaccucuuugaauacaaguuugcaacugg

SEQ ID NO: 288405 - RNA, 32 nt, Human
aacgacggaggaaggggcggagagggaccucu

SEQ ID NO: 288406 - RNA, 32 nt, Human
aacgacucagguaagccauuccuggauaccug

SEQ ID NO: 288407 - RNA, 32 nt, Human
aacgacugcacuccagccuggaugacagaaca

SEQ ID NO: 288408 - RNA, 32 nt, Human
aacgacugggaaaguuugggaaagucagcaaa

SEQ ID NO: 288409 - RNA, 32 nt, Human
aacgacuguguggaguccagacaggaagccac

SEQ ID NO: 288410 - RNA, 32 nt, Human
aacgacuuccacugcugaagccuguaggcucu

SEQ ID NO: 288411 - RNA, 32 nt, Human
aacgagaaaccaggucuucucagcuccuguca

SEQ ID NO: 288412 - RNA, 32 nt, Human
aacgagacacauugccuucuggagcuaggaga

SEQ ID NO: 288413 - RNA, 32 nt, Human
aacgagagcaagaaaaagaugauguagauguu

SEQ ID NO: 288414 - RNA, 32 nt, Human
aacgagagcacacauuaaagagagaguaaauu

SEQ ID NO: 288415 - RNA, 32 nt, Human
aacgagagccagcaagcugagcacagaccagc

SEQ ID NO: 288416 - RNA, 32 nt, Human
aacgagaggaacgccuuagaaaagaauuugag

SEQ ID NO: 288417 - RNA, 32 nt, Human
aacgagaggggugggagauccacaggaccaaa

SEQ ID NO: 288418 - RNA, 32 nt, Human
aacgagaucuccacaaauaaaaggacaagugu

SEQ ID NO: 288419 - RNA, 32 nt, Human
aacgagcaaucaaguucuccacuguguacaga

SEQ ID NO: 288420 - RNA, 31 nt, Human
aacgagcacagcuaagaacagagugagagag

SEQ ID NO: 288421 - RNA, 32 nt, Human
aacgagcagccugcccuguguccccucauacu

SEQ ID NO: 288422 - RNA, 32 nt, Human
aacgagcccucgggggccgaagcccaugcccg

SEQ ID NO: 288423 - RNA, 32 nt, Human
aacgagcccuggcagugcgcaccucuggugcc

SEQ ID NO: 288424 - RNA, 32 nt, Human
aacgagcucccagguguuucguagaugcauua

SEQ ID NO: 288425 - RNA, 32 nt, Human
aacgagcugaagcuuuacaggcugccaggagc

SEQ ID NO: 288426 - RNA, 32 nt, Human
aacgagcuuugcccugaucagcauuuuguaug

SEQ ID NO: 288427 - RNA, 32 nt, Human
aacgagcuuugcucggggcucuugauuggagc

SEQ ID NO: 288428 - RNA, 32 nt, Human
aacgaggacuccaagccaugaauugcccugcu

SEQ ID NO: 288429 - RNA, 32 nt, Human
aacgaggcauuccaaguuugacagcauggaac

SEQ ID NO: 288430 - RNA, 32 nt, Human
aacgagggccugcuggcugagauauggggcug

SEQ ID NO: 288431 - RNA, 32 nt, Human
aacgaggggacuguuucucuuccacuccuauc

SEQ ID NO: 288432 - RNA, 32 nt, Human
aacgaguccucccucugggagugcagccuugg

SEQ ID NO: 288433 - RNA, 32 nt, Human
aacgagucgaccaggaaagaacagugaguucu

SEQ ID NO: 288434 - RNA, 32 nt, Human
aacgauaggacgcucagcaucucaggugggcc

SEQ ID NO: 288435 - RNA, 32 nt, Human
aacgauaguucugcagucugcgccuuuccacg

SEQ ID NO: 288436 - RNA, 29 nt, Human
aacgauaguuuguggaugccuggagcuac

SEQ ID NO: 288437 - RNA, 32 nt, Human
aacgaucagguuggagacuugggaaacccagg

SEQ ID NO: 288438 - RNA, 32 nt, Human
aacgaucccucuccuauacuugaugaaacuug

SEQ ID NO: 288439 - RNA, 32 nt, Human
aacgaucuaaagguaggcagacccuggaccca

SEQ ID NO: 288440 - RNA, 32 nt, Human
aacgaucuuuuaagggucccuuuugcugcauu

SEQ ID NO: 288441 - RNA, 32 nt, Human
aacgauggagucucgcucugucacccaggcug

SEQ ID NO: 288442 - RNA, 29 nt, Human
aacgauggguggaagagagcaacgccaga

SEQ ID NO: 288443 - RNA, 32 nt, Human
aacgauugcaggagaaauaaugaggauguaau

SEQ ID NO: 288444 - RNA, 32 nt, Human
aacgcaagcagcagagaacaggaaaaggaaau

SEQ ID NO: 288445 - RNA, 32 nt, Human
aacgcacacacugaagguggcucauguuugcu

SEQ ID NO: 288446 - RNA, 32 nt, Human
aacgcacacgugugggacagauagaugaauau

SEQ ID NO: 288447 - RNA, 32 nt, Human
aacgcacagcccaucugcuguauuacugccga

SEQ ID NO: 288448 - RNA, 32 nt, Human
aacgcacccccaccuucucuccucgcuucuuc

SEQ ID NO: 288449 - RNA, 32 nt, Human
aacgcaccugcuccuggucagacaggaggggc

SEQ ID NO: 288450 - RNA, 32 nt, Human
aacgcaccuggccucugcuccaccucaacagc

SEQ ID NO: 288451 - RNA, 32 nt, Human
aacgcacugcagccucuaccuccugggcucaa

SEQ ID NO: 288452 - RNA, 24 nt, Human
aacgcagacucccagaggaggcag

SEQ ID NO: 288453 - RNA, 32 nt, Human
aacgcagcacuagcaagcagguucaggacagc

SEQ ID NO: 288454 - RNA, 32 nt, Human
aacgcagcccgcugccccuuugcucgcuuccc

SEQ ID NO: 288455 - RNA, 32 nt, Human
aacgcagcccugcuuugggcugcccuggugcu

SEQ ID NO: 288456 - RNA, 32 nt, Human
aacgcagccucccggcucagccugggaagaug

SEQ ID NO: 288457 - RNA, 32 nt, Human
aacgcagcgccagcagcaucucaucuacccuc

SEQ ID NO: 288458 - RNA, 32 nt, Human
aacgcaggaggcugaggcugcagugaguugug

SEQ ID NO: 288459 - RNA, 32 nt, Human
aacgcaggaucccaugagguuggggcagggca

SEQ ID NO: 288460 - RNA, 24 nt, Human
aacgcagggaacagagucuuaaag

SEQ ID NO: 288461 - RNA, 32 nt, Human
aacgcagggcuggagaguauuuggugccagau

SEQ ID NO: 288462 - RNA, 32 nt, Human
aacgcaugcccuuuuggaucuacuguuucuac

SEQ ID NO: 288463 - RNA, 32 nt, Human
aacgcauggggcgagcuucagugucgccagca

SEQ ID NO: 288464 - RNA, 32 nt, Human
aacgccacgccuggcccggucagugcugcaug

SEQ ID NO: 288465 - RNA, 32 nt, Human
aacgccacugcacuccaguguaggcaacagag

SEQ ID NO: 288466 - RNA, 32 nt, Human
aacgccacuuucucagaccuguccccuuugug

SEQ ID NO: 288467 - RNA, 32 nt, Human
aacgccagagggagggagggaggcaagaaggg

SEQ ID NO: 288468 - RNA, 32 nt, Human
aacgccagccuggagugagggagcaggaucug

SEQ ID NO: 288469 - RNA, 32 nt, Human
aacgccagcgccgccucucgcucgccgagcuc

SEQ ID NO: 288470 - RNA, 29 nt, Human
aacgccaggcugcuauuuaucucccuauc

SEQ ID NO: 288471 - RNA, 32 nt, Human
aacgccaguuuucucaagcucucauuuaacgu

SEQ ID NO: 288472 - RNA, 32 nt, Human
aacgccauccaggcugggaggggaagagugcu

SEQ ID NO: 288473 - RNA, 32 nt, Human
aacgccauugccugguuacuuguuuuaugcug

SEQ ID NO: 288474 - RNA, 32 nt, Human
aacgcccaagcccagcccuaggaggggguggg

SEQ ID NO: 288475 - RNA, 24 nt, Human
aacgcccacauuuccaccaacuca

SEQ ID NO: 288476 - RNA, 32 nt, Human
aacgcccaucugcucacccaugcccacccagc

SEQ ID NO: 288477 - RNA, 25 nt, Human
aacgccccuccccccaccaagcuca

SEQ ID NO: 288478 - RNA, 32 nt, Human
aacgcccuccacccucagcucccugcacaauu

SEQ ID NO: 288479 - RNA, 32 nt, Human
aacgccgggggcugcggagugcaucagcgcgg

SEQ ID NO: 288480 - RNA, 32 nt, Human
aacgccgggugaggcgggauggaggaguuuac

SEQ ID NO: 288481 - RNA, 32 nt, Human
aacgccgugcagcugcccaucgaccagcccaa

SEQ ID NO: 288482 - RNA, 32 nt, Human
aacgccuccuggacuccagcgccuggaggagg

SEQ ID NO: 288483 - RNA, 32 nt, Human
aacgccucuccucaaugcugggcccucuuauc

SEQ ID NO: 288484 - RNA, 32 nt, Human
aacgccucugcagcugcagcccucguucucuu

SEQ ID NO: 288485 - RNA, 23 nt, Human
aacgccugaccucaaguaaucca

SEQ ID NO: 288486 - RNA, 32 nt, Human
aacgccugggagaagagggcuggaguucuagg

SEQ ID NO: 288487 - RNA, 32 nt, Human
aacgcgagaggaagcgaugcagagggguggaa

SEQ ID NO: 288488 - RNA, 32 nt, Human
aacgcgaugagugcccuuacacaaaagccugg

SEQ ID NO: 288489 - RNA, 32 nt, Human
aacgcgcagugaccugggaugcagcccucagg

SEQ ID NO: 288490 - RNA, 32 nt, Human
aacgcgccccaucccuuccgccgccuccuuuc

SEQ ID NO: 288491 - RNA, 32 nt, Human
aacgcgcugcugcugcugcucuaucggccgcc

SEQ ID NO: 288492 - RNA, 32 nt, Human
aacgcggaaccacccuccuuccugaggcaaau

SEQ ID NO: 288493 - RNA, 32 nt, Human
aacgcggcagcggggcugggccugugcggcgg

SEQ ID NO: 288494 - RNA, 32 nt, Human
aacgcggccgcuuuguucuucgcuucucggcu

SEQ ID NO: 288495 - RNA, 32 nt, Human
aacgcggcuggcugcaccccuuccuaccaccc

SEQ ID NO: 288496 - RNA, 32 nt, Human
aacgcgggaggcagagacugcagugagccgag

SEQ ID NO: 288497 - RNA, 32 nt, Human
aacgcgggagguggaggauacaaugaacccga

SEQ ID NO: 288498 - RNA, 32 nt, Human
aacgcgggaucgaacucuugcugcaggguuuc

SEQ ID NO: 288499 - RNA, 32 nt, Human
aacgcggguuccugccggagcagcccucccaa

SEQ ID NO: 288500 - RNA, 32 nt, Human
aacgcgucuuccugaguggugccaaacaaaaa

SEQ ID NO: 288501 - RNA, 32 nt, Human
aacgcgugaugaagacagaaggcuccggggug

SEQ ID NO: 288502 - RNA, 32 nt, Human
aacgcuaacuuuuguacagaucgauuugauaa

SEQ ID NO: 288503 - RNA, 32 nt, Human
aacgcuaguauuaagugcacuggccuuuaguc

SEQ ID NO: 288504 - RNA, 32 nt, Human
aacgcuaucaaacccaaaggcucuuuucagag

SEQ ID NO: 288505 - RNA, 32 nt, Human
aacgcucauggacaccugcacacuccacagaa

SEQ ID NO: 288506 - RNA, 32 nt, Human
aacgcucauucuacccccaacccuugucucca

SEQ ID NO: 288507 - RNA, 32 nt, Human
aacgcuccucuucuccccuccuccuccugccg

SEQ ID NO: 288508 - RNA, 32 nt, Human
aacgcucuuagcuuucucagggggucagcaga

SEQ ID NO: 288509 - RNA, 32 nt, Human
aacgcugagaugggaaggucacuugagcccag

SEQ ID NO: 288510 - RNA, 32 nt, Human
aacgcugagcucugggagccacugccugaggg

SEQ ID NO: 288511 - RNA, 32 nt, Human
aacgcugcagagcccagggagccuggcgcuag

SEQ ID NO: 288512 - RNA, 32 nt, Human
aacgcugcagugagcuaugauugcaccacugc

SEQ ID NO: 288513 - RNA, 32 nt, Human
aacgcugccugcacuacaacagaggcaagaag

SEQ ID NO: 288514 - RNA, 32 nt, Human
aacgcugccugccucugccgcuccuccacauc

SEQ ID NO: 288515 - RNA, 32 nt, Human
aacgcuggaaaggccgagaaccucuuuuaugc

SEQ ID NO: 288516 - RNA, 32 nt, Human
aacgcuggagccagacaacuccagaaaucucu

SEQ ID NO: 288517 - RNA, 32 nt, Human
aacgcuggagccagagagguagaggcugcagu

SEQ ID NO: 288518 - RNA, 32 nt, Human
aacgcuggaucgcagugcgcccagggaaggcc

SEQ ID NO: 288519 - RNA, 32 nt, Human
aacgcugggauuacagucaugagccaccgugc

SEQ ID NO: 288520 - RNA, 32 nt, Human
aacgcugggauuccggggaaguggaggcagag

SEQ ID NO: 288521 - RNA, 32 nt, Human
aacgcugggcaacauggugaaaccccgucucu

SEQ ID NO: 288522 - RNA, 32 nt, Human
aacgcuguagccaggcaggaccagccucuucu

SEQ ID NO: 288523 - RNA, 32 nt, Human
aacgcuucauuuccuuggggcugcaguuuugu

SEQ ID NO: 288524 - RNA, 32 nt, Human
aacgcuugaaccugggaggcugagcuugcagu

SEQ ID NO: 288525 - RNA, 32 nt, Human
aacgcuuuucaaaucaaaagcgccugacgcuu

SEQ ID NO: 288526 - RNA, 32 nt, Human
aacggaaaagccucuuaggcuguugucagugg

SEQ ID NO: 288527 - RNA, 32 nt, Human
aacggaagccauuauccaauggcuccacagcc

SEQ ID NO: 288528 - RNA, 32 nt, Human
aacggaauggaagugacucugccccuuauugg

SEQ ID NO: 288529 - RNA, 32 nt, Human
aacggaauugcaaacaugguacccacaacuuu

SEQ ID NO: 288530 - RNA, 32 nt, Human
aacggacacaccuugcuccuuucugagcccgu

SEQ ID NO: 288531 - RNA, 32 nt, Human
aacggacacccaccccagaugcaugggccaga

SEQ ID NO: 288532 - RNA, 32 nt, Human
aacggacagaggcgaguggcaaacuucagacg

SEQ ID NO: 288533 - RNA, 32 nt, Human
aacggacugcuuccggccagaggucccgggcg

SEQ ID NO: 288534 - RNA, 32 nt, Human
aacggagacgcuggucaggacguucccaccuc

SEQ ID NO: 288535 - RNA, 32 nt, Human
aacggagcggcggggcaggagcuguucugggc

SEQ ID NO: 288536 - RNA, 32 nt, Human
aacggagcugggacugagcagauuaagggagu

SEQ ID NO: 288537 - RNA, 32 nt, Human
aacggaggaggaggaggguuugcuugagguug

SEQ ID NO: 288538 - RNA, 32 nt, Human
aacggaggcccagggaggcugugcagcgcgcc

SEQ ID NO: 288539 - RNA, 32 nt, Human
aacggaggcuaagaaaggagaauaaacuuguc

SEQ ID NO: 288540 - RNA, 32 nt, Human
aacggauaccugcugcuagaccugauggaaug

SEQ ID NO: 288541 - RNA, 32 nt, Human
aacggaucauaacaaagaggagaucaaauuua

SEQ ID NO: 288542 - RNA, 32 nt, Human
aacggaucuggguggcgaggugggaaagcuca

SEQ ID NO: 288543 - RNA, 32 nt, Human
aacggaugaagaagcugggaaaguggcacauu

SEQ ID NO: 288544 - RNA, 32 nt, Human
aacggaugccugugauucccugguauuuauag

SEQ ID NO: 288545 - RNA, 32 nt, Human
aacggauguuguguggaguccuggcuggaggu

SEQ ID NO: 288546 - RNA, 32 nt, Human
aacggcaaaggcagccuuuuucuggccuugac

SEQ ID NO: 288547 - RNA, 19 nt, Human
aacggcaccugcaggacag

SEQ ID NO: 288548 - RNA, 32 nt, Human
aacggcagacacacuucuuaagaccucggcca

SEQ ID NO: 288549 - RNA, 32 nt, Human
aacggcagagagacugggguugcagacacaua

SEQ ID NO: 288550 - RNA, 32 nt, Human
aacggccacuguguguggcugcucugagugag

SEQ ID NO: 288551 - RNA, 32 nt, Human
aacggccagaaccaccaccgcgccgcgcucca

SEQ ID NO: 288552 - RNA, 32 nt, Human
aacggccaguucagcaagaaguguugagugug

SEQ ID NO: 288553 - RNA, 32 nt, Human
aacggccccaggagauaaguacuaacuuucuu

SEQ ID NO: 288554 - RNA, 32 nt, Human
aacggcccuccccugcaacauccgucuuggag

SEQ ID NO: 288555 - RNA, 32 nt, Human
aacggcccuggccucugcacugugauagcucc

SEQ ID NO: 288556 - RNA, 32 nt, Human
aacggccugcaucauucuuucugcuauauuag

SEQ ID NO: 288557 - RNA, 20 nt, Human
aacggcgacagcagccucuu

SEQ ID NO: 288558 - RNA, 32 nt, Human
aacggcggguggguggaggaugcggugcgcgg

SEQ ID NO: 288559 - RNA, 32 nt, Human
aacggcgucacuucucagacacugaagaacuc

SEQ ID NO: 288560 - RNA, 32 nt, Human
aacggcuaugcuucaaccagccuaagucuacu

SEQ ID NO: 288561 - RNA, 32 nt, Human
aacggcuccagggaucaccauggagaucacca

SEQ ID NO: 288562 - RNA, 32 nt, Human
aacggcuucacaccuuccccugcugcaugugg

SEQ ID NO: 288563 - RNA, 32 nt, Human
aacggcuucuacuccggcccccagugugacua

SEQ ID NO: 288564 - RNA, 32 nt, Human
aacgggaaagagaaagagacauucacuuggag

SEQ ID NO: 288565 - RNA, 32 nt, Human
aacgggaacagcccuggcugagggagcugcag

SEQ ID NO: 288566 - RNA, 32 nt, Human
aacgggagcuguagacggauguggcuucccag

SEQ ID NO: 288567 - RNA, 32 nt, Human
aacgggaggcggagguugcagugagccgaaau

SEQ ID NO: 288568 - RNA, 32 nt, Human
aacgggaggcucuuugcaaaccccagagacuc

SEQ ID NO: 288569 - RNA, 32 nt, Human
aacgggaugccaagcccugccugauguggcuc

SEQ ID NO: 288570 - RNA, 32 nt, Human
aacgggcccauaccacacagacugcucuccaa

SEQ ID NO: 288571 - RNA, 32 nt, Human
aacgggcuguuuugcuccagccacuuuucuug

SEQ ID NO: 288572 - RNA, 32 nt, Human
aacggggcaggcaaggucacugcucagucacg

SEQ ID NO: 288573 - RNA, 32 nt, Human
aacggggcaggcccuagguggggugggcugcc

SEQ ID NO: 288574 - RNA, 32 nt, Human
aacggggccauggagaagcugcggcgaguccu

SEQ ID NO: 288575 - RNA, 32 nt, Human
aacggggccucuuccaccuccuggugcagaaa

SEQ ID NO: 288576 - RNA, 32 nt, Human
aacggggcucuucucauuucaccccucccuuu

SEQ ID NO: 288577 - RNA, 32 nt, Human
aacggggcugccacugcgccuaagccuuuccc

SEQ ID NO: 288578 - RNA, 32 nt, Human
aacggggcuguggcaaaagaacugaguggacu

SEQ ID NO: 288579 - RNA, 32 nt, Human
aacgggggaagugagaggaaagaggcgggggc

SEQ ID NO: 288580 - RNA, 32 nt, Human
aacgggggauagagagaaggaguggcaggccu

SEQ ID NO: 288581 - RNA, 32 nt, Human
aacggggguggggagugagcaggaccccagac

SEQ ID NO: 288582 - RNA, 32 nt, Human
aacgggguccccggacuggagaagacgcgggu

SEQ ID NO: 288583 - RNA, 32 nt, Human
aacggguaggugagguguugggcaguuguggg

SEQ ID NO: 288584 - RNA, 32 nt, Human
aacgggugcauuuucauucauaugaaagacuu

SEQ ID NO: 288585 - RNA, 32 nt, Human
aacgggugcccaugggacaccagccugcgaga

SEQ ID NO: 288586 - RNA, 32 nt, Human
aacgggugugagccacggcgcccagcccagga

SEQ ID NO: 288587 - RNA, 32 nt, Human
aacgguaagaccugcaauggccagcgugggaa

SEQ ID NO: 288588 - RNA, 32 nt, Human
aacgguagagugcuuggcugggcgcaguggcu

SEQ ID NO: 288589 - RNA, 32 nt, Human
aacggucuguuuagggacuggugcaaaggaug

SEQ ID NO: 288590 - RNA, 32 nt, Human
aacggugcccccggaagagaaacaaagcagca

SEQ ID NO: 288591 - RNA, 32 nt, Human
aacggugccucccaggcauucucagugccagg

SEQ ID NO: 288592 - RNA, 32 nt, Human
aacggugcugucaccucugccugggccucacu

SEQ ID NO: 288593 - RNA, 32 nt, Human
aacgguggaggcagaggugacaguucccagag

SEQ ID NO: 288594 - RNA, 32 nt, Human
aacgguggcuccugccuguaaucgcagcacuu

SEQ ID NO: 288595 - RNA, 32 nt, Human
aacggugggaagucuguauaagcaaugccauc

SEQ ID NO: 288596 - RNA, 32 nt, Human
aacggugggacccagccuucucccggcgucuc

SEQ ID NO: 288597 - RNA, 32 nt, Human
aacggugggcagagagccuacuaggaaaugug

SEQ ID NO: 288598 - RNA, 29 nt, Human
aacgguucuuuucauccccuagaugugcu

SEQ ID NO: 288599 - RNA, 32 nt, Human
aacgguuucccucuccccuugccccgaccccc

SEQ ID NO: 288600 - RNA, 32 nt, Human
aacgguuuuuggaucuggcauugaaaugccuc

SEQ ID NO: 288601 - RNA, 32 nt, Human
aacguaaaaccaaaaacuauaaaaacccuaga

SEQ ID NO: 288602 - RNA, 32 nt, Human
aacguaaaagugggcacagauccagagaggua

SEQ ID NO: 288603 - RNA, 32 nt, Human
aacguacaaucagccaauuagaauuugccuga

SEQ ID NO: 288604 - RNA, 32 nt, Human
aacguaccaacacuuucugauuucuucuacag

SEQ ID NO: 288605 - RNA, 32 nt, Human
aacguacuuuguuggucagcacugggcugaca

SEQ ID NO: 288606 - RNA, 32 nt, Human
aacguaggccuaaucacagcacuuugggaggc

SEQ ID NO: 288607 - RNA, 32 nt, Human
aacguaucacccaaagcauguaugugaucuuu

SEQ ID NO: 288608 - RNA, 30 nt, Human
aacguaugaacacaucagguugcucagcaa

SEQ ID NO: 288609 - RNA, 32 nt, Human
aacgucagccugagaacugaguagcuguacug

SEQ ID NO: 288610 - RNA, 32 nt, Human
aacgucagguaagaggggaacagcugcuguac

SEQ ID NO: 288611 - RNA, 32 nt, Human
aacgucagugggccaccaugugccaugauggc

SEQ ID NO: 288612 - RNA, 32 nt, Human
aacgucaucggcuacagaaacagccuaaguuu

SEQ ID NO: 288613 - RNA, 32 nt, Human
aacgucaugugacagaucuaacagggcaagug

SEQ ID NO: 288614 - RNA, 32 nt, Human
aacguccaaugucuuucugacggauaccaucc

SEQ ID NO: 288615 - RNA, 32 nt, Human
aacguccaccaaccaggaaacaccugccucca

SEQ ID NO: 288616 - RNA, 32 nt, Human
aacguccagcuguauuuacuucuggcugugcc

SEQ ID NO: 288617 - RNA, 32 nt, Human
aacgucccagaggcggggccggagucggcggu

SEQ ID NO: 288618 - RNA, 32 nt, Human
aacgucccgcagucuucgccagccagccgucc

SEQ ID NO: 288619 - RNA, 32 nt, Human
aacgucccuguggagccagccagccagccacc

SEQ ID NO: 288620 - RNA, 32 nt, Human
aacguccugaggacaguucugugaacugaaug

SEQ ID NO: 288621 - RNA, 26 nt, Human
aacguccugcagcuucggggcaagug

SEQ ID NO: 288622 - RNA, 32 nt, Human
aacguccuugacuuuauaaaagccccgaauuc

SEQ ID NO: 288623 - RNA, 32 nt, Human
aacgucgaaucagcuauuuacugccaaaggga

SEQ ID NO: 288624 - RNA, 32 nt, Human
aacgucgagagggagccgcugccgcguuaguu

SEQ ID NO: 288625 - RNA, 32 nt, Human
aacgucgcacagguauacacaugugggaugag

SEQ ID NO: 288626 - RNA, 32 nt, Human
aacgucggagagaaggaauuggggagaaaggu

SEQ ID NO: 288627 - RNA, 32 nt, Human
aacgucgucccccagcugucggguccaguuca

SEQ ID NO: 288628 - RNA, 32 nt, Human
aacgucucagcccuucaguuuggucugcuccg

SEQ ID NO: 288629 - RNA, 32 nt, Human
aacgucuucccaccuuuuucuccccucuccgu

SEQ ID NO: 288630 - RNA, 32 nt, Human
aacgucuugcauucuagugaaaugagacccau

SEQ ID NO: 288631 - RNA, 32 nt, Human
aacgucuugccugugcaucuagaaagguaccu

SEQ ID NO: 288632 - RNA, 32 nt, Human
aacgucuugggaaaggggagagcuugaccucc

SEQ ID NO: 288633 - RNA, 32 nt, Human
aacgugaaaggcuguggcaucaggguagggga

SEQ ID NO: 288634 - RNA, 32 nt, Human
aacgugaagacuguuggcaguguuaguaugcu

SEQ ID NO: 288635 - RNA, 32 nt, Human
aacgugaauaaauuaugaagcauacuaaugag

SEQ ID NO: 288636 - RNA, 32 nt, Human
aacgugagccacugugcuuggccacacacaua

SEQ ID NO: 288637 - RNA, 32 nt, Human
aacgugaucuuggcugucugucauguguugaa

SEQ ID NO: 288638 - RNA, 32 nt, Human
aacgugaugucagacaccaucuguagugagca

SEQ ID NO: 288639 - RNA, 32 nt, Human
aacgugcacauccaggaguccuuuggacagug

SEQ ID NO: 288640 - RNA, 32 nt, Human
aacgugcagagugagagugguaugaauuuucc

SEQ ID NO: 288641 - RNA, 32 nt, Human
aacgugcagguuuguuacauagguauacacgu

SEQ ID NO: 288642 - RNA, 32 nt, Human
aacgugcagguuuguuacauagguauacaugu

SEQ ID NO: 288643 - RNA, 32 nt, Human
aacgugcagguuuguuacauagguauauacau

SEQ ID NO: 288644 - RNA, 32 nt, Human
aacgugcauuuuuacucaacuaccucagguau

SEQ ID NO: 288645 - RNA, 32 nt, Human
aacgugccaagccagcauaggggagcuagaag

SEQ ID NO: 288646 - RNA, 32 nt, Human
aacgugccagcgagggagagaccuuuccacug

SEQ ID NO: 288647 - RNA, 20 nt, Human
aacgugccaggcaggaggcc

SEQ ID NO: 288648 - RNA, 32 nt, Human
aacgugccggagugcuugggugccaucagcua

SEQ ID NO: 288649 - RNA, 32 nt, Human
aacgugccucuccuggcccuagaguucuugga

SEQ ID NO: 288650 - RNA, 32 nt, Human
aacguggaagacaaggcagaagaggcuggcca

SEQ ID NO: 288651 - RNA, 32 nt, Human
aacguggagaaaugccaucucuacuaaagaug

SEQ ID NO: 288652 - RNA, 32 nt, Human
aacguggagauggaggucaggcugcagugcga

SEQ ID NO: 288653 - RNA, 32 nt, Human
aacguggaggcagagguugcagugagccgaga

SEQ ID NO: 288654 - RNA, 32 nt, Human
aacguggauacagagccacgaguuuggauguu

SEQ ID NO: 288655 - RNA, 32 nt, Human
aacguggaucucccccucauccaacuccgaaa

SEQ ID NO: 288656 - RNA, 32 nt, Human
aacguggcaacugccgaauaaacacaccaacc

SEQ ID NO: 288657 - RNA, 32 nt, Human
aacguggcaugaucucagcucacugcaaccuc

SEQ ID NO: 288658 - RNA, 32 nt, Human
aacguggcccugcuucaggugauccgcgggag

SEQ ID NO: 288659 - RNA, 32 nt, Human
aacguggccuuugaguucaguuguuauaaacc

SEQ ID NO: 288660 - RNA, 32 nt, Human
aacguggcucaagugcuggcucaccuucuagc

SEQ ID NO: 288661 - RNA, 32 nt, Human
aacgugggaggcagaaguugcagugagccaag

SEQ ID NO: 288662 - RNA, 26 nt, Human
aacgugggaggcagagguugcaguga

SEQ ID NO: 288663 - RNA, 32 nt, Human
aacgugggaggcagagguugcagugagccgag

SEQ ID NO: 288664 - RNA, 32 nt, Human
aacgugggaggcagagguugcagugaguggag

SEQ ID NO: 288665 - RNA, 26 nt, Human
aacgugggaggcggagguugcagcga

SEQ ID NO: 288666 - RNA, 32 nt, Human
aacgugggaggcggagguugcagcgagcugag

SEQ ID NO: 288667 - RNA, 32 nt, Human
aacgugggaggcggagguugcagugagcugag

SEQ ID NO: 288668 - RNA, 32 nt, Human
aacgugggaggcggagguuguagugagccagg

SEQ ID NO: 288669 - RNA, 32 nt, Human
aacgugggccugauccaacagcagaaaacuuu

SEQ ID NO: 288670 - RNA, 32 nt, Human
aacguggggcagccccucccacgacccccacc

SEQ ID NO: 288671 - RNA, 32 nt, Human
aacguggggugagggaucacugccaaaauggu

SEQ ID NO: 288672 - RNA, 32 nt, Human
aacgugggugcaaaagugaugagaccccacac

SEQ ID NO: 288673 - RNA, 32 nt, Human
aacguguaagcacaugcuuuccuucuaucaac

SEQ ID NO: 288674 - RNA, 32 nt, Human
aacguguacagauggaaacuucauuuaaaaau

SEQ ID NO: 288675 - RNA, 32 nt, Human
aacguguagcuguugagagguggacucuguua

SEQ ID NO: 288676 - RNA, 32 nt, Human
aacguguauuccugaaacuuuuugacuuacuu

SEQ ID NO: 288677 - RNA, 31 nt, Human
aacgugucacuucuccucccagaggcaguac

SEQ ID NO: 288678 - RNA, 32 nt, Human
aacgugucagagacaguggacagggaagcguu

SEQ ID NO: 288679 - RNA, 32 nt, Human
aacgugucauguaaccucguguuagucacuca

SEQ ID NO: 288680 - RNA, 32 nt, Human
aacgugugcccuuuuauauuauuuaugccuua

SEQ ID NO: 288681 - RNA, 32 nt, Human
aacguguuagccaggauggucucagucuccag

SEQ ID NO: 288682 - RNA, 32 nt, Human
aacguguugagcaaacacaguacuuucuguga

SEQ ID NO: 288683 - RNA, 22 nt, Human
aacguuaacuugcaggccacgu

SEQ ID NO: 288684 - RNA, 32 nt, Human
aacguuaagaccucuuucacagccucuccuuc

SEQ ID NO: 288685 - RNA, 32 nt, Human
aacguucaaaggacggggaagggagagugagc

SEQ ID NO: 288686 - RNA, 32 nt, Human
aacguuccccuccugguuuugccuuuucaggg

SEQ ID NO: 288687 - RNA, 19 nt, Human
aacguucggggguugcuca

SEQ ID NO: 288688 - RNA, 32 nt, Human
aacguugagacaaucuaaauguuuaucagugg

SEQ ID NO: 288689 - RNA, 32 nt, Human
aacguugcaaugcacccagcagcuccuggcuc

SEQ ID NO: 288690 - RNA, 32 nt, Human
aacguuggcugcagcggagauggcugcucccc

SEQ ID NO: 288691 - RNA, 32 nt, Human
aacguugugggguccaagccacaaguuaacuu

SEQ ID NO: 288692 - RNA, 32 nt, Human
aacguuuagggugaagugccuuggcacgggau

SEQ ID NO: 288693 - RNA, 32 nt, Human
aacguuuaguuucagcucagugaucagcuacc

SEQ ID NO: 288694 - RNA, 32 nt, Human
aacguuucaguuccuuucauucauuccugggu

SEQ ID NO: 288695 - RNA, 32 nt, Human
aacguuucuucacuuuugcaagguuccacaga

SEQ ID NO: 288696 - RNA, 32 nt, Human
aacguuuuggagauugugcuuguugcuuugcu

SEQ ID NO: 288697 - RNA, 32 nt, Human
aacuaaaaagagacugugccauggugagaaaa

SEQ ID NO: 288698 - RNA, 32 nt, Human
aacuaaaacaggauaguagcugcuggaaauga

SEQ ID NO: 288699 - RNA, 32 nt, Human
aacuaaaauuucaggaaaccuguuuaauuucu

SEQ ID NO: 288700 - RNA, 32 nt, Human
aacuaaacaggcaaggaggcuuugagucacau

SEQ ID NO: 288701 - RNA, 32 nt, Human
aacuaaaccacagucuguaaucccaggagaau

SEQ ID NO: 288702 - RNA, 32 nt, Human
aacuaaagagaugggaguucaccugagggcaa

SEQ ID NO: 288703 - RNA, 32 nt, Human
aacuaaagccucaagaggaagagacucauggu

SEQ ID NO: 288704 - RNA, 32 nt, Human
aacuaaaggcagacuuucaguaccaagaguca

SEQ ID NO: 288705 - RNA, 32 nt, Human
aacuaaagggaaagcuuugccugagaccaucg

SEQ ID NO: 288706 - RNA, 32 nt, Human
aacuaaaugaacaggccacaggucagaagugg

SEQ ID NO: 288707 - RNA, 32 nt, Human
aacuaaaugcugaacuaagccugguugagaug

SEQ ID NO: 288708 - RNA, 32 nt, Human
aacuaaauguaaagugguuggagcgaggugag

SEQ ID NO: 288709 - RNA, 32 nt, Human
aacuaacaaaggauuugcuuuagagauaauua

SEQ ID NO: 288710 - RNA, 32 nt, Human
aacuaacaaccaaccaaccaaccaaccaacca

SEQ ID NO: 288711 - RNA, 32 nt, Human
aacuaacaacuccagacgcaccaccuuuauga

SEQ ID NO: 288712 - RNA, 32 nt, Human
aacuaacaugaaauauguguuguuuucauuug

SEQ ID NO: 288713 - RNA, 32 nt, Human
aacuaaccuaccccaacucugcccuucuccca

SEQ ID NO: 288714 - RNA, 32 nt, Human
aacuaaccuaguucaggguucucaggcaggca

SEQ ID NO: 288715 - RNA, 32 nt, Human
aacuaacucauggagauauuuugaacuauuau

SEQ ID NO: 288716 - RNA, 32 nt, Human
aacuaacuccaaagcuugaaggacuuuuucuc

SEQ ID NO: 288717 - RNA, 32 nt, Human
aacuaacucucggggguguucugcucaccaca

SEQ ID NO: 288718 - RNA, 32 nt, Human
aacuaagaagaaggaggaagaaagaaggagaa

SEQ ID NO: 288719 - RNA, 32 nt, Human
aacuaagaaguguuaucuuuguuaucagggga

SEQ ID NO: 288720 - RNA, 32 nt, Human
aacuaagaauuuuccccacagaggugaacagg

SEQ ID NO: 288721 - RNA, 31 nt, Human
aacuaagacacaaaggaggugggagacugcc

SEQ ID NO: 288722 - RNA, 31 nt, Human
aacuaagacacaaaggaggugggagacugcg

SEQ ID NO: 288723 - RNA, 32 nt, Human
aacuaagauaacuuuuagcacaugcuuaaaua

SEQ ID NO: 288724 - RNA, 32 nt, Human
aacuaagcaagguauggaacacugaagugccu

SEQ ID NO: 288725 - RNA, 32 nt, Human
aacuaagcagaggcucuccucaccacgcagag

SEQ ID NO: 288726 - RNA, 32 nt, Human
aacuaagcauugacagaauaucuuaaaauggu

SEQ ID NO: 288727 - RNA, 32 nt, Human
aacuaagccuugcucugucucccaggcuggag

SEQ ID NO: 288728 - RNA, 32 nt, Human
aacuaagcgcaaagccgcccgaauccaucucc

SEQ ID NO: 288729 - RNA, 32 nt, Human
aacuaagcucacaaccaaaacugcacuucagc

SEQ ID NO: 288730 - RNA, 32 nt, Human
aacuaagcucacugcugucucacccucaccag

SEQ ID NO: 288731 - RNA, 32 nt, Human
aacuaagcuguccucagauuuuaacuugacuc

SEQ ID NO: 288732 - RNA, 32 nt, Human
aacuaaggagcagcauuugaguagauuucuga

SEQ ID NO: 288733 - RNA, 32 nt, Human
aacuaaggggagguaaaggcagucuccuguuu

SEQ ID NO: 288734 - RNA, 32 nt, Human
aacuaaguacugcaaucuccuccuauaagugc

SEQ ID NO: 288735 - RNA, 32 nt, Human
aacuaagugggacuacaggcacgugccaccau

SEQ ID NO: 288736 - RNA, 32 nt, Human
aacuaauaauaauacaaaaauuagcugggcgu

SEQ ID NO: 288737 - RNA, 32 nt, Human
aacuaauacagcugcuaaaaugaucccugucu

SEQ ID NO: 288738 - RNA, 32 nt, Human
aacuaauagaaguugaggauuguugaaucuau

SEQ ID NO: 288739 - RNA, 32 nt, Human
aacuaaucaauaccgauugcaccaccaaacuc

SEQ ID NO: 288740 - RNA, 32 nt, Human
aacuaaucucagaaaaauuuuuggugcccaug

SEQ ID NO: 288741 - RNA, 32 nt, Human
aacuaaucugaaccagauaaugccauaaguag

SEQ ID NO: 288742 - RNA, 32 nt, Human
aacuaaugacucugcugccuucuccuuugucu

SEQ ID NO: 288743 - RNA, 32 nt, Human
aacuaauggaguuucauuguaacuguccuuug

SEQ ID NO: 288744 - RNA, 16 nt, Human
aacuaaugucagcaca

SEQ ID NO: 288745 - RNA, 32 nt, Human
aacuaaugucccuccccucucccugccaaaag

SEQ ID NO: 288746 - RNA, 32 nt, Human
aacuaauugccucacauugucacugcaaaucg

SEQ ID NO: 288747 - RNA, 32 nt, Human
aacuaauuguauagcuuuuagaacaaaauaca

SEQ ID NO: 288748 - RNA, 32 nt, Human
aacuacaaaaccagguggcagguugcugcucu

SEQ ID NO: 288749 - RNA, 32 nt, Human
aacuacaaaugccaccauuaccacuuaaaacu

SEQ ID NO: 288750 - RNA, 32 nt, Human
aacuacacacaaaaagcauacuugcauuauuu

SEQ ID NO: 288751 - RNA, 32 nt, Human
aacuacacacccccaagccacagggaagcaug

SEQ ID NO: 288752 - RNA, 20 nt, Human
aacuacacagaccaguggga

SEQ ID NO: 288753 - RNA, 32 nt, Human
aacuacacuguugccuugcuaggauccacccu

SEQ ID NO: 288754 - RNA, 32 nt, Human
aacuacagacacaugccccaauacucagcuaa

SEQ ID NO: 288755 - RNA, 32 nt, Human
aacuacagcugcagaccaguacacaucaagca

SEQ ID NO: 288756 - RNA, 32 nt, Human
aacuacaggaauagcuacagauuggaaacaac

SEQ ID NO: 288757 - RNA, 32 nt, Human
aacuacaguuuucaccauuuguccucagucuc

SEQ ID NO: 288758 - RNA, 32 nt, Human
aacuacaugagcuuuggcauggggauagagag

SEQ ID NO: 288759 - RNA, 21 nt, Human
aacuaccagaaucugggccac

SEQ ID NO: 288760 - RNA, 32 nt, Human
aacuaccaguccaagaaucuguuuaaauucag

SEQ ID NO: 288761 - RNA, 32 nt, Human
aacuaccaugaccugcacaaaaccccugccuc

SEQ ID NO: 288762 - RNA, 32 nt, Human
aacuaccccagcccaggcucucaccaucucca

SEQ ID NO: 288763 - RNA, 32 nt, Human
aacuaccccuaaaagcaacaaugggaauggaa

SEQ ID NO: 288764 - RNA, 32 nt, Human
aacuaccccuaaaagccaaaaugggaaaggaa

SEQ ID NO: 288765 - RNA, 32 nt, Human
aacuacccugagccaccacccucagccuuggu

SEQ ID NO: 288766 - RNA, 32 nt, Human
aacuaccuaccaugccuguugugcucaggugu

SEQ ID NO: 288767 - RNA, 32 nt, Human
aacuaccucauggggguucacccccauggccu

SEQ ID NO: 288768 - RNA, 32 nt, Human
aacuaccucccaggguuauugcaaggauucau

SEQ ID NO: 288769 - RNA, 32 nt, Human
aacuaccugaugccaggagcuuagggcuuugc

SEQ ID NO: 288770 - RNA, 32 nt, Human
aacuacgccuccaaaaguuucagucuauugca

SEQ ID NO: 288771 - RNA, 32 nt, Human
aacuacgccuuccugugggauguggccguggu

SEQ ID NO: 288772 - RNA, 32 nt, Human
aacuacguauucccucuugacacucacaaucu

SEQ ID NO: 288773 - RNA, 32 nt, Human
aacuacuagaugugaacuugaagaagguuguc

SEQ ID NO: 288774 - RNA, 32 nt, Human
aacuacuagccaaggagacauucagcaauuaa

SEQ ID NO: 288775 - RNA, 32 nt, Human
aacuacuagggaggcugaggcaggagaaucac

SEQ ID NO: 288776 - RNA, 32 nt, Human
aacuacuagggaggcugaggugggaggaucac

SEQ ID NO: 288777 - RNA, 32 nt, Human
aacuacucacccugccacuccagcucauaccc

SEQ ID NO: 288778 - RNA, 32 nt, Human
aacuacucagcuuuuccaaugaggcuugaauc

SEQ ID NO: 288779 - RNA, 32 nt, Human
aacuacucccuaauccuugaaaauccccaguc

SEQ ID NO: 288780 - RNA, 32 nt, Human
aacuacucuggcccauaccuuuccugguugug

SEQ ID NO: 288781 - RNA, 32 nt, Human
aacuacucuuuggagcucugagaugacaucuu

SEQ ID NO: 288782 - RNA, 32 nt, Human
aacuacuggaugguuaggccugguuuaacuau

SEQ ID NO: 288783 - RNA, 32 nt, Human
aacuacuggggcaaugaaugcuuuuaggcagu

SEQ ID NO: 288784 - RNA, 32 nt, Human
aacuacuguaugaaucguaaauguucugaaga

SEQ ID NO: 288785 - RNA, 21 nt, Human
aacuacugugaaugcuaugag

SEQ ID NO: 288786 - RNA, 32 nt, Human
aacuacuucagacucagcccuccuggaggcug

SEQ ID NO: 288787 - RNA, 32 nt, Human
aacuacuucucccuccuuguccagcacuuuuc

SEQ ID NO: 288788 - RNA, 32 nt, Human
aacuacuuucaugagcaguuguagcaggccug

SEQ ID NO: 288789 - RNA, 32 nt, Human
aacuagaaaaugugacaaucacauuuccucuu

SEQ ID NO: 288790 - RNA, 32 nt, Human
aacuagaagguagguuuaagccaucaccaggc

SEQ ID NO: 288791 - RNA, 21 nt, Human
aacuagaaggugcuucagaug

SEQ ID NO: 288792 - RNA, 32 nt, Human
aacuagaaugguguauaccacuuuaagaugua

SEQ ID NO: 288793 - RNA, 32 nt, Human
aacuagacaacuaaugugggaccauggcacug

SEQ ID NO: 288794 - RNA, 32 nt, Human
aacuagacagacacaucaccuaugcugcucuu

SEQ ID NO: 288795 - RNA, 32 nt, Human
aacuagacauaugagaaacauaccucagaaua

SEQ ID NO: 288796 - RNA, 32 nt, Human
aacuagaccaauauaaagauuuuggauuucac

SEQ ID NO: 288797 - RNA, 32 nt, Human
aacuagacucccccucuccccugucuaaacca

SEQ ID NO: 288798 - RNA, 32 nt, Human
aacuagaggaagcaaggaggcagagaccaaga

SEQ ID NO: 288799 - RNA, 32 nt, Human
aacuagaggauucuggacaaagacgaggacag

SEQ ID NO: 288800 - RNA, 32 nt, Human
aacuagagugugaagggacuggauuccugccc

SEQ ID NO: 288801 - RNA, 32 nt, Human
aacuagauaauuugcaaaguacccuugagauu

SEQ ID NO: 288802 - RNA, 32 nt, Human
aacuagcaauggcugcuguuaucucgcagagc

SEQ ID NO: 288803 - RNA, 32 nt, Human
aacuagcagggcugaaagagguguaacauaaa

SEQ ID NO: 288804 - RNA, 32 nt, Human
aacuagcaggguauuugaauaccauuuacaac

SEQ ID NO: 288805 - RNA, 32 nt, Human
aacuagccccuggggguacagggagaacagca

SEQ ID NO: 288806 - RNA, 32 nt, Human
aacuagcuauuuuugaccuccugaucaggaac

SEQ ID NO: 288807 - RNA, 32 nt, Human
aacuagcuccacccucuaacccccacuccagc

SEQ ID NO: 288808 - RNA, 32 nt, Human
aacuagcuccggcugaucggggguagaaaacg

SEQ ID NO: 288809 - RNA, 32 nt, Human
aacuagcucugcccuuagcccccuguaugacc

SEQ ID NO: 288810 - RNA, 32 nt, Human
aacuagcugggcauuguggcacaugccugcaa

SEQ ID NO: 288811 - RNA, 32 nt, Human
aacuagcuggggagagaaaagguggcaaugug

SEQ ID NO: 288812 - RNA, 22 nt, Human
aacuagcuuauaguuuaacuua

SEQ ID NO: 288813 - RNA, 32 nt, Human
aacuaggacuacaggcaugugccaccacgccu

SEQ ID NO: 288814 - RNA, 32 nt, Human
aacuaggagagaaagggcagcucccucuuccu

SEQ ID NO: 288815 - RNA, 32 nt, Human
aacuaggaggcagagguugcagugagccgaga

SEQ ID NO: 288816 - RNA, 32 nt, Human
aacuaggauacuuucuacuuuuucuagcuaca

SEQ ID NO: 288817 - RNA, 21 nt, Human
aacuaggaucuuccucagaug

SEQ ID NO: 288818 - RNA, 32 nt, Human
aacuaggauuguagucccaaagaggcuacugu

SEQ ID NO: 288819 - RNA, 26 nt, Human
aacuagggaagcggagguugcaguga

SEQ ID NO: 288820 - RNA, 32 nt, Human
aacuagggcaagucagaaauagccaggcucgc

SEQ ID NO: 288821 - RNA, 32 nt, Human
aacuagggcagccuggaaacauauggacuaua

SEQ ID NO: 288822 - RNA, 32 nt, Human
aacuagggcguugggaccuguugcccacacag

SEQ ID NO: 288823 - RNA, 32 nt, Human
aacuaggggaccccacacacauguggcuacca

SEQ ID NO: 288824 - RNA, 32 nt, Human
aacuagggggauaagagagaagaaaagaagaa

SEQ ID NO: 288825 - RNA, 32 nt, Human
aacuagguugaguuuucuccucugcuaagagg

SEQ ID NO: 288826 - RNA, 32 nt, Human
aacuagguuuugagccacgggucagggugcca

SEQ ID NO: 288827 - RNA, 32 nt, Human
aacuaguaaugucuuuuccugaaaagggcaaa

SEQ ID NO: 288828 - RNA, 32 nt, Human
aacuaguagaucuuuccuugguaaaguuugac

SEQ ID NO: 288829 - RNA, 32 nt, Human
aacuaguaucucuggccuccuggggcccauuc

SEQ ID NO: 288830 - RNA, 24 nt, Human
aacuaguauucaacaaaccuugua

SEQ ID NO: 288831 - RNA, 31 nt, Human
aacuagugacgagaaccuugccauagccauu

SEQ ID NO: 288832 - RNA, 32 nt, Human
aacuagugcucagaccaaagaguucacaccca

SEQ ID NO: 288833 - RNA, 21 nt, Human
aacuaguuggaggucuagaug

SEQ ID NO: 288834 - RNA, 32 nt, Human
aacuaguuggugcauaagaaggccccacuugg

SEQ ID NO: 288835 - RNA, 32 nt, Human
aacuaguuuuaaacuacuuuguguacaaauaa

SEQ ID NO: 288836 - RNA, 32 nt, Human
aacuauaaaauuacagaaaauauuuaaaugca

SEQ ID NO: 288837 - RNA, 31 nt, Human
aacuauaauuacuuggcuguuggagauuugu

SEQ ID NO: 288838 - RNA, 32 nt, Human
aacuauagcugaugcagaaaguccagccaguu

SEQ ID NO: 288839 - RNA, 32 nt, Human
aacuauauggaggagggugcagaggagggaau

SEQ ID NO: 288840 - RNA, 32 nt, Human
aacuaucaccugggcuggagugcgauggcaug

SEQ ID NO: 288841 - RNA, 32 nt, Human
aacuaucacuucaguaaagaaguuaaacagua

SEQ ID NO: 288842 - RNA, 32 nt, Human
aacuauccauugcuugcuguucuuuuucauaa

SEQ ID NO: 288843 - RNA, 32 nt, Human
aacuaucccuuuccugagcucuuuaccucuua

SEQ ID NO: 288844 - RNA, 19 nt, Human
aacuauccucacccugccc

SEQ ID NO: 288845 - RNA, 32 nt, Human
aacuauccugcggguuuuaauuuauuucaucc

SEQ ID NO: 288846 - RNA, 32 nt, Human
aacuaucuccaaaauagaaauguuuucauaua

SEQ ID NO: 288847 - RNA, 32 nt, Human
aacuaucuccccucuugcugaaguucuuugua

SEQ ID NO: 288848 - RNA, 32 nt, Human
aacuaucuguucccuuccucugugccacgcuc

SEQ ID NO: 288849 - RNA, 32 nt, Human
aacuaucuucaccacacucacuauuucaaagu

SEQ ID NO: 288850 - RNA, 32 nt, Human
aacuaugaaagauuuagucaacagaaacuauu

SEQ ID NO: 288851 - RNA, 32 nt, Human
aacuaugaaguaagcaacaaggaugacaagaa

SEQ ID NO: 288852 - RNA, 23 nt, Human
aacuaugagaaauaaaauucugu

SEQ ID NO: 288853 - RNA, 21 nt, Human
aacuaugagaaauaaauuucu

SEQ ID NO: 288854 - RNA, 32 nt, Human
aacuaugaggcaggcauugucucauuuuucaa

SEQ ID NO: 288855 - RNA, 32 nt, Human
aacuaugauaguaccacugcacuccagccugg

SEQ ID NO: 288856 - RNA, 32 nt, Human
aacuaugaucaaaagguugagaugucucugca

SEQ ID NO: 288857 - RNA, 32 nt, Human
aacuaugauugcaucacugcacugcagccugg

SEQ ID NO: 288858 - RNA, 32 nt, Human
aacuaugauuuuaccacugcacuccagcuugg

SEQ ID NO: 288859 - RNA, 32 nt, Human
aacuaugcaggucagagucacacugcucugga

SEQ ID NO: 288860 - RNA, 32 nt, Human
aacuaugccaagcauuaagauaaacaaauaug

SEQ ID NO: 288861 - RNA, 32 nt, Human
aacuaugcccccgaugaggaccaagggcaccu

SEQ ID NO: 288862 - RNA, 32 nt, Human
aacuaugccugguacaagcuggcagaggaggu

SEQ ID NO: 288863 - RNA, 32 nt, Human
aacuaugcuuugagaaccacugccuugaaaaa

SEQ ID NO: 288864 - RNA, 32 nt, Human
aacuauggaaagaggcagaguuugcuugccca

SEQ ID NO: 288865 - RNA, 29 nt, Human
aacuauggaagauuauaccaaaauagaga

SEQ ID NO: 288866 - RNA, 32 nt, Human
aacuauggaguuaccaauauugccaaguagac

SEQ ID NO: 288867 - RNA, 32 nt, Human
aacuauggcaaugaagucaguagauaggaaac

SEQ ID NO: 288868 - RNA, 21 nt, Human
aacuaugggaaaauaaauuuc

SEQ ID NO: 288869 - RNA, 32 nt, Human
aacuaugggaaccuggccucacuaggugaggg

SEQ ID NO: 288870 - RNA, 32 nt, Human
aacuaugggaugggagaacuugagggugaucg

SEQ ID NO: 288871 - RNA, 32 nt, Human
aacuaugucucugacaugcacauacacugcuu

SEQ ID NO: 288872 - RNA, 32 nt, Human
aacuaugugcaucugccucucucugccugaga

SEQ ID NO: 288873 - RNA, 32 nt, Human
aacuauuauugaguagaggccuaaagaggacu

SEQ ID NO: 288874 - RNA, 32 nt, Human
aacuauucagggacauuuuuccauuuccaaaa

SEQ ID NO: 288875 - RNA, 32 nt, Human
aacuauugaaaauauauuuucucucuccagaa

SEQ ID NO: 288876 - RNA, 32 nt, Human
aacuauuggccacuuuuguauguugccagcau

SEQ ID NO: 288877 - RNA, 32 nt, Human
aacuauuggugcgcuccagccgggcagguuuu

SEQ ID NO: 288878 - RNA, 32 nt, Human
aacuauuuaugcugguaaaacaaaugcuguua

SEQ ID NO: 288879 - RNA, 32 nt, Human
aacuauuuauuuccuccuccccuaccccuagu

SEQ ID NO: 288880 - RNA, 32 nt, Human
aacuauuucccuccaggccagaaaguuuucuu

SEQ ID NO: 288881 - RNA, 24 nt, Human
aacuauuucuaucaauugggccac

SEQ ID NO: 288882 - RNA, 32 nt, Human
aacuauuugcauagauagcucaguuaaacuua

SEQ ID NO: 288883 - RNA, 32 nt, Human
aacuauuuucuuucuguuuucuuuuacucugc

SEQ ID NO: 288884 - RNA, 32 nt, Human
aacucaaaaggucaggacagacuuccaagcac

SEQ ID NO: 288885 - RNA, 32 nt, Human
aacucaaacuuuuuguggacauucuuuucaaa

SEQ ID NO: 288886 - RNA, 32 nt, Human
aacucaaagagaccaccaccacuacuacauuu

SEQ ID NO: 288887 - RNA, 32 nt, Human
aacucaaagcaagcucuucuccucagcuuggg

SEQ ID NO: 288888 - RNA, 32 nt, Human
aacucaaagccguccguggagccccagacgag

SEQ ID NO: 288889 - RNA, 32 nt, Human
aacucaaaguacaguguuuucaaucuaaaaag

SEQ ID NO: 288890 - RNA, 32 nt, Human
aacucaaaugcuuggcuucucauacguccacc

SEQ ID NO: 288891 - RNA, 20 nt, Human
aacucaaauuacuucguguu

SEQ ID NO: 288892 - RNA, 32 nt, Human
aacucaacagccgcccaagccgccuuccggcu

SEQ ID NO: 288893 - RNA, 32 nt, Human
aacucaacauggcaugccuuucucuccguaaa

SEQ ID NO: 288894 - RNA, 32 nt, Human
aacucaacccuuggggugacuggccaugguga

SEQ ID NO: 288895 - RNA, 32 nt, Human
aacucaacuucccacaccaccaugucucucac

SEQ ID NO: 288896 - RNA, 32 nt, Human
aacucaagccaggguggaaagacacugcauac

SEQ ID NO: 288897 - RNA, 23 nt, Human
aacucaagcccauccaugagaca

SEQ ID NO: 288898 - RNA, 32 nt, Human
aacucaagcucagcuucugccuccugucuccu

SEQ ID NO: 288899 - RNA, 32 nt, Human
aacucaagcuccugaacucaagcaauucuccu

SEQ ID NO: 288900 - RNA, 32 nt, Human
aacucaagggccugaagcucccagaagcuucc

SEQ ID NO: 288901 - RNA, 32 nt, Human
aacucaaggugguggcuggagauggcugcugc

SEQ ID NO: 288902 - RNA, 32 nt, Human
aacucaaguaauccaccuuggccucccaaagu

SEQ ID NO: 288903 - RNA, 32 nt, Human
aacucaagugacuaggugggcccagcuggcuu

SEQ ID NO: 288904 - RNA, 19 nt, Human
aacucaauaacuguuugaa

SEQ ID NO: 288905 - RNA, 19 nt, Human
aacucaauaucugugugaa

SEQ ID NO: 288906 - RNA, 32 nt, Human
aacucaauccagcauuuguagcagguuuugaa

SEQ ID NO: 288907 - RNA, 19 nt, Human
aacucaaucuucuguugga

SEQ ID NO: 288908 - RNA, 32 nt, Human
aacucaaugugguccuuucaagaauuagccau

SEQ ID NO: 288909 - RNA, 32 nt, Human
aacucaauuauguuggagcuguguggcauuuu

SEQ ID NO: 288910 - RNA, 32 nt, Human
aacucacaacagcauggauaaaucuuacagac

SEQ ID NO: 288911 - RNA, 32 nt, Human
aacucacagcacaaacccugcaaacccaaaga

SEQ ID NO: 288912 - RNA, 32 nt, Human
aacucacagcguucuucucucccuuuuucccc

SEQ ID NO: 288913 - RNA, 32 nt, Human
aacucacagucucaaagccuguccuccuccag

SEQ ID NO: 288914 - RNA, 31 nt, Human
aacucacaguuucaacaaugacccacaaaaa

SEQ ID NO: 288915 - RNA, 15 nt, Human
aacucaccaagcaca

SEQ ID NO: 288916 - RNA, 32 nt, Human
aacucaccacccaggcuuuaucagcccagaac

SEQ ID NO: 288917 - RNA, 32 nt, Human
aacucaccaggguuuaguuugcauuuaagaau

SEQ ID NO: 288918 - RNA, 32 nt, Human
aacucaccauugcacuccagccuggaugacag

SEQ ID NO: 288919 - RNA, 32 nt, Human
aacucacccaggaagugcaagggguuugggga

SEQ ID NO: 288920 - RNA, 32 nt, Human
aacucaccgcaaccuccgccucccggguucaa

SEQ ID NO: 288921 - RNA, 32 nt, Human
aacucaccgcaaccuccuccucuuggguucaa

SEQ ID NO: 288922 - RNA, 32 nt, Human
aacucaccugcauuuuuaaaugugguagagac

SEQ ID NO: 288923 - RNA, 32 nt, Human
aacucaccuugucucaugacuuuugguuaagg

SEQ ID NO: 288924 - RNA, 32 nt, Human
aacucacgaagcagaggcugggcgugguggcu

SEQ ID NO: 288925 - RNA, 32 nt, Human
aacucacgaccugauaguugaccugggagauc

SEQ ID NO: 288926 - RNA, 32 nt, Human
aacucacgccuguaaucccagcacuuaggaag

SEQ ID NO: 288927 - RNA, 32 nt, Human
aacucacuaaauauuuauauaacuuugauaua

SEQ ID NO: 288928 - RNA, 32 nt, Human
aacucacuacagccucgaacuccuaggcucaa

SEQ ID NO: 288929 - RNA, 32 nt, Human
aacucacucacacugaggccuuggggacugag

SEQ ID NO: 288930 - RNA, 32 nt, Human
aacucacucucagccacagggagcugcaugca

SEQ ID NO: 288931 - RNA, 32 nt, Human
aacucacugcaaccccugcucucagguucaag

SEQ ID NO: 288932 - RNA, 32 nt, Human
aacucacugcaaccuccacccgccgggucccu

SEQ ID NO: 288933 - RNA, 32 nt, Human
aacucacugcaaccuccgcucccgguuugagu

SEQ ID NO: 288934 - RNA, 32 nt, Human
aacucacugcaaccuccgcuucccagguaaua

SEQ ID NO: 288935 - RNA, 32 nt, Human
aacucacugcaaccucugcccuucagguucaa

SEQ ID NO: 288936 - RNA, 32 nt, Human
aacucacugcaagcuccgccuccuggguucac

SEQ ID NO: 288937 - RNA, 32 nt, Human
aacucacugccuuauaaaggcuuucaugaugu

SEQ ID NO: 288938 - RNA, 32 nt, Human
aacucacugcucagacuuaguuuccccagaag

SEQ ID NO: 288939 - RNA, 32 nt, Human
aacucacuguaaccuccgccucccggauacuc

SEQ ID NO: 288940 - RNA, 32 nt, Human
aacucacuguucucuugcuuccuuccacccug

SEQ ID NO: 288941 - RNA, 32 nt, Human
aacucacuuccaccccagaggagucuucuguc

SEQ ID NO: 288942 - RNA, 32 nt, Human
aacucagaagacagagcugaaaaagaaaacug

SEQ ID NO: 288943 - RNA, 32 nt, Human
aacucagaaggcggaggcugcagugagccgag

SEQ ID NO: 288944 - RNA, 32 nt, Human
aacucagaaggcggagguuccagugagccauc

SEQ ID NO: 288945 - RNA, 32 nt, Human
aacucagaaggugcauuuaagagagagaccug

SEQ ID NO: 288946 - RNA, 26 nt, Human
aacucagaagguggagguugcaguga

SEQ ID NO: 288947 - RNA, 32 nt, Human
aacucagaagguggagguugcagugaggcgag

SEQ ID NO: 288948 - RNA, 32 nt, Human
aacucagacugucuggagcuugcugaguacaa

SEQ ID NO: 288949 - RNA, 32 nt, Human
aacucagagaaggcagagggagagggagagag

SEQ ID NO: 288950 - RNA, 32 nt, Human
aacucagagccagcuuguggcaagcaguuggg

SEQ ID NO: 288951 - RNA, 32 nt, Human
aacucagaggaaauuugcacagaugcugcuuu

SEQ ID NO: 288952 - RNA, 32 nt, Human
aacucagaggaagaggaaagaaagaagaggag

SEQ ID NO: 288953 - RNA, 32 nt, Human
aacucagaggagaaagccugagugaguaacac

SEQ ID NO: 288954 - RNA, 32 nt, Human
aacucagauccagaccuccugagcccacuuuc

SEQ ID NO: 288955 - RNA, 32 nt, Human
aacucagauccagggacagaggcccagccucc

SEQ ID NO: 288956 - RNA, 32 nt, Human
aacucagcaaugacacaagaagagagugacac

SEQ ID NO: 288957 - RNA, 32 nt, Human
aacucagcagcaacaccaaauccuggaccagg

SEQ ID NO: 288958 - RNA, 18 nt, Human
aacucagcaucaagcaca

SEQ ID NO: 288959 - RNA, 16 nt, Human
aacucagccaagcaca

SEQ ID NO: 288960 - RNA, 32 nt, Human
aacucagccagccuugccagaccugcuuaaug

SEQ ID NO: 288961 - RNA, 32 nt, Human
aacucagcccuucugaacuccugggcucaagc

SEQ ID NO: 288962 - RNA, 32 nt, Human
aacucagcccuucuuggaauacagccuuucaa

SEQ ID NO: 288963 - RNA, 32 nt, Human
aacucagcucacugcaaccucugccuccugga

SEQ ID NO: 288964 - RNA, 32 nt, Human
aacucagcugugcacugauugccaaguuggaa

SEQ ID NO: 288965 - RNA, 32 nt, Human
aacucaggacacugucaucugcauuuaaucaa

SEQ ID NO: 288966 - RNA, 32 nt, Human
aacucaggagacggagguuacagugagucgag

SEQ ID NO: 288967 - RNA, 32 nt, Human
aacucaggagauggagguuucagugagccaag

SEQ ID NO: 288968 - RNA, 32 nt, Human
aacucaggaggcagaaguugcgguuagccgag

SEQ ID NO: 288969 - RNA, 32 nt, Human
aacucaggaggcagagguugcaaugagccaag

SEQ ID NO: 288970 - RNA, 32 nt, Human
aacucaggaggcagagguugcagugagccaag

SEQ ID NO: 288971 - RNA, 26 nt, Human
aacucaggaggcggaaguugcgguga

SEQ ID NO: 288972 - RNA, 32 nt, Human
aacucaggaggcggaaguugcggugagccaag

SEQ ID NO: 288973 - RNA, 32 nt, Human
aacucaggaggcggagcuugcagugagccgag

SEQ ID NO: 288974 - RNA, 32 nt, Human
aacucaggaggcggagguugcggugagccgag

SEQ ID NO: 288975 - RNA, 32 nt, Human
aacucaggaggcggagguugcggugagcugag

SEQ ID NO: 288976 - RNA, 26 nt, Human
aacucaggagguggagguugcaguga

SEQ ID NO: 288977 - RNA, 32 nt, Human
aacucaggagguggagguugcagugagcugag

SEQ ID NO: 288978 - RNA, 32 nt, Human
aacucaggagguggagguugcggugagccaag

SEQ ID NO: 288979 - RNA, 32 nt, Human
aacucaggcccagaauugcaguucagaauggc

SEQ ID NO: 288980 - RNA, 32 nt, Human
aacucagggacccccucgauccacggcgugag

SEQ ID NO: 288981 - RNA, 32 nt, Human
aacucagggaugacauuucccauagccuugac

SEQ ID NO: 288982 - RNA, 32 nt, Human
aacucaggggaggcagcagggugcgggccuug

SEQ ID NO: 288983 - RNA, 26 nt, Human
aacucaggggguggagguugcaguga

SEQ ID NO: 288984 - RNA, 32 nt, Human
aacucaggggguggagguugcagugaguugag

SEQ ID NO: 288985 - RNA, 32 nt, Human
aacucaggguaaccucauuacuacucagugug

SEQ ID NO: 288986 - RNA, 32 nt, Human
aacucaggguccuccugccugcccugagccac

SEQ ID NO: 288987 - RNA, 32 nt, Human
aacucagguggcagagguugcagugagccgag

SEQ ID NO: 288988 - RNA, 32 nt, Human
aacucaguauuuaaaccacuaaccagaaacau

SEQ ID NO: 288989 - RNA, 32 nt, Human
aacucagucuaggacagccauggaugcagugu

SEQ ID NO: 288990 - RNA, 32 nt, Human
aacucagugaagaagacagaacgaggcugaug

SEQ ID NO: 288991 - RNA, 32 nt, Human
aacucagugugacaccgccagguccagcaccc

SEQ ID NO: 288992 - RNA, 32 nt, Human
aacucaguguuaggaacuuuggcaucuguagc

SEQ ID NO: 288993 - RNA, 32 nt, Human
aacucaguuaaggccuucuacggucccaggcu

SEQ ID NO: 288994 - RNA, 32 nt, Human
aacucauaagccaucuuuaagaauuucuuaca

SEQ ID NO: 288995 - RNA, 32 nt, Human
aacucauacaaaccaauagaauuucaacaugu

SEQ ID NO: 288996 - RNA, 32 nt, Human
aacucauaugcuguuaucacugugauuuuacu

SEQ ID NO: 288997 - RNA, 32 nt, Human
aacucaucaccaggacaguuggaggggguagg

SEQ ID NO: 288998 - RNA, 32 nt, Human
aacucaucacugggaaagaacucccccugcaa

SEQ ID NO: 288999 - RNA, 32 nt, Human
aacucauccaggagaaaaaggcaggagcagca

SEQ ID NO: 289000 - RNA, 32 nt, Human
aacucaucccgcaguuagaauuuuguuuggag

SEQ ID NO: 289001 - RNA, 32 nt, Human
aacucauccuguucaagaaacaaccuuucaug

SEQ ID NO: 289002 - RNA, 32 nt, Human
aacucaugccugacaucucagcacuucaggag

SEQ ID NO: 289003 - RNA, 32 nt, Human
aacucaugcucacggcuaguucugggguuggc

SEQ ID NO: 289004 - RNA, 32 nt, Human
aacucaugcugugccaucaugugugcagccug

SEQ ID NO: 289005 - RNA, 32 nt, Human
aacucauguucauucccaacagacucaucccu

SEQ ID NO: 289006 - RNA, 19 nt, Human
aacucauguuuguguagaa

SEQ ID NO: 289007 - RNA, 32 nt, Human
aacucauuacuuuuccauucccaaucuagugc

SEQ ID NO: 289008 - RNA, 32 nt, Human
aacucauuagcagauauguagugcagugauuu

SEQ ID NO: 289009 - RNA, 32 nt, Human
aacucauucuagaccagcucaaagauuccaug

SEQ ID NO: 289010 - RNA, 20 nt, Human
aacucauucuguguguugaa

SEQ ID NO: 289011 - RNA, 32 nt, Human
aacucauugcaaccuccaccugccggguccca

SEQ ID NO: 289012 - RNA, 32 nt, Human
aacucauugcagccucgaacuccugggcuuaa

SEQ ID NO: 289013 - RNA, 32 nt, Human
aacucauugccuguaaucccagcacuuuggga

SEQ ID NO: 289014 - RNA, 32 nt, Human
aacucauuuucucuucccaaaaaguguuaucu

SEQ ID NO: 289015 - RNA, 32 nt, Human
aacuccaaaccugagaaaagccuuagaccugc

SEQ ID NO: 289016 - RNA, 22 nt, Human
aacuccaaagguuugguuucag

SEQ ID NO: 289017 - RNA, 32 nt, Human
aacuccaaauggagaaguagucacuguagacu

SEQ ID NO: 289018 - RNA, 32 nt, Human
aacuccaaccugcacuccagccugggcaacag

SEQ ID NO: 289019 - RNA, 32 nt, Human
aacuccaaccuguaucagaugcagcccccaag

SEQ ID NO: 289020 - RNA, 32 nt, Human
aacuccaaggugccauggcagagaaggugcug

SEQ ID NO: 289021 - RNA, 32 nt, Human
aacuccaagugggaggaggggugccaguccuc

SEQ ID NO: 289022 - RNA, 32 nt, Human
aacuccacaucggcaacuucagccuggauugg

SEQ ID NO: 289023 - RNA, 32 nt, Human
aacuccaccucccagguucaaggaauuccugu

SEQ ID NO: 289024 - RNA, 32 nt, Human
aacuccacgccaccugguuugcucaacagcaa

SEQ ID NO: 289025 - RNA, 32 nt, Human
aacuccacuguacacuuauagaaugaagaagg

SEQ ID NO: 289026 - RNA, 32 nt, Human
aacuccagaacuaacaaugaacuccuauguug

SEQ ID NO: 289027 - RNA, 32 nt, Human
aacuccagaaugaguguugaccacugaagcau

SEQ ID NO: 289028 - RNA, 32 nt, Human
aacuccagagagaagcauccccuggcccggug

SEQ ID NO: 289029 - RNA, 22 nt, Human
aacuccagaggugaagagggca

SEQ ID NO: 289030 - RNA, 32 nt, Human
aacuccagccugggcaacagagugagacccua

SEQ ID NO: 289031 - RNA, 32 nt, Human
aacuccagccugggcaacagagugagauucug

SEQ ID NO: 289032 - RNA, 32 nt, Human
aacuccagccugggcaacaggugagauucugu

SEQ ID NO: 289033 - RNA, 32 nt, Human
aacuccagccugggccacauagcaagacccug

SEQ ID NO: 289034 - RNA, 32 nt, Human
aacuccagccugggcgacaagagggagacuuc

SEQ ID NO: 289035 - RNA, 32 nt, Human
aacuccagccugggcgacagagggagacucug

SEQ ID NO: 289036 - RNA, 32 nt, Human
aacuccagccugggugacagagcaagagucug

SEQ ID NO: 289037 - RNA, 32 nt, Human
aacuccagccugggugacagagugagacucuu

SEQ ID NO: 289038 - RNA, 32 nt, Human
aacuccagccuggguuacagagcgagacccug

SEQ ID NO: 289039 - RNA, 32 nt, Human
aacuccagccugguggcuuugccagaagggag

SEQ ID NO: 289040 - RNA, 32 nt, Human
aacuccagcuacuugggaggcugaggcaggag

SEQ ID NO: 289041 - RNA, 32 nt, Human
aacuccagcuggugcccccagacagcugcuca

SEQ ID NO: 289042 - RNA, 32 nt, Human
aacuccagcuugggugacagagugagaccguc

SEQ ID NO: 289043 - RNA, 32 nt, Human
aacuccaggaggcggaggaggcuaguggcagu

SEQ ID NO: 289044 - RNA, 32 nt, Human
aacuccaggcuuggaugguguuacagguuuaa

SEQ ID NO: 289045 - RNA, 32 nt, Human
aacuccaguaacucaaauggccucugugucau

SEQ ID NO: 289046 - RNA, 32 nt, Human
aacuccagugggcugaaacuaguagcucuuug

SEQ ID NO: 289047 - RNA, 32 nt, Human
aacuccaguguggaugacagagcgagacccug

SEQ ID NO: 289048 - RNA, 32 nt, Human
aacuccaguuccuuuccucucuugccucuucc

SEQ ID NO: 289049 - RNA, 32 nt, Human
aacuccaguucugaggggucuugaaggcccug

SEQ ID NO: 289050 - RNA, 32 nt, Human
aacuccauccucacacacucagccucugccuc

SEQ ID NO: 289051 - RNA, 32 nt, Human
aacuccauccuuggaggauuccccaccacaag

SEQ ID NO: 289052 - RNA, 32 nt, Human
aacuccaucuuggugagagaugaauuuggaua

SEQ ID NO: 289053 - RNA, 32 nt, Human
aacuccaugcaacuauccgucucgaauaccag

SEQ ID NO: 289054 - RNA, 32 nt, Human
aacuccauggucuuucugggccuuacugugcu

SEQ ID NO: 289055 - RNA, 32 nt, Human
aacuccauguaacagaacagacccaggacagg

SEQ ID NO: 289056 - RNA, 32 nt, Human
aacuccauguagauaagagcaaguguaggcaa

SEQ ID NO: 289057 - RNA, 32 nt, Human
aacuccauugcaaauucagcugugaggagauu

SEQ ID NO: 289058 - RNA, 21 nt, Human
aacuccauugcuuaagaaaca

SEQ ID NO: 289059 - RNA, 32 nt, Human
aacuccauuguuuccagguguugugacccugg

SEQ ID NO: 289060 - RNA, 32 nt, Human
aacuccauuucauuggacuaaauaacaaaagg

SEQ ID NO: 289061 - RNA, 32 nt, Human
aacuccauuuguaauaaagcccuagcacucug

SEQ ID NO: 289062 - RNA, 22 nt, Human
aacucccaaccucaagugaucc

SEQ ID NO: 289063 - RNA, 23 nt, Human
aacucccaaccucaagugaucca

SEQ ID NO: 289064 - RNA, 23 nt, Human
aacucccaaccucaggugaucca

SEQ ID NO: 289065 - RNA, 22 nt, Human
aacucccaaccucaggugaucu

SEQ ID NO: 289066 - RNA, 22 nt, Human
aacucccaacuucaggugaucc

SEQ ID NO: 289067 - RNA, 32 nt, Human
aacucccaccuaaaggaacaccagagaguuca

SEQ ID NO: 289068 - RNA, 32 nt, Human
aacucccagcggagagcaagguuuucuucugu

SEQ ID NO: 289069 - RNA, 32 nt, Human
aacucccagcuuucggacaucuggcacacggg

SEQ ID NO: 289070 - RNA, 32 nt, Human
aacucccagggcccuucacagaaccuuggagg

SEQ ID NO: 289071 - RNA, 32 nt, Human
aacucccaguacagugucugccgauuccacau

SEQ ID NO: 289072 - RNA, 32 nt, Human
aacucccaucaccucuaacacgcacagcugaa

SEQ ID NO: 289073 - RNA, 32 nt, Human
aacucccauccuuagggauucaccauccagua

SEQ ID NO: 289074 - RNA, 32 nt, Human
aacuccccagaacucucggggaaaggcccgag

SEQ ID NO: 289075 - RNA, 32 nt, Human
aacuccccagaggaggagguagugcgaggcgc

SEQ ID NO: 289076 - RNA, 32 nt, Human
aacuccccaucuggcccugcuguugcuaguac

SEQ ID NO: 289077 - RNA, 32 nt, Human
aacuccccgcgccgggcgcccagccugagcgu

SEQ ID NO: 289078 - RNA, 32 nt, Human
aacuccccuccccguuccccuuccccucucgg

SEQ ID NO: 289079 - RNA, 32 nt, Human
aacuccccuucccagccccagccaaacugagc

SEQ ID NO: 289080 - RNA, 22 nt, Human
aacucccgaccucaagugaucu

SEQ ID NO: 289081 - RNA, 22 nt, Human
aacucccgaccucaggugaucc

SEQ ID NO: 289082 - RNA, 23 nt, Human
aacucccgaccucaggugaucca

SEQ ID NO: 289083 - RNA, 22 nt, Human
aacucccgaccucaggugaucu

SEQ ID NO: 289084 - RNA, 23 nt, Human
aacucccgaccucaggugaucua

SEQ ID NO: 289085 - RNA, 23 nt, Human
aacucccgaccuuaggugaugca

SEQ ID NO: 289086 - RNA, 22 nt, Human
aacucccgacuucaggugaucc

SEQ ID NO: 289087 - RNA, 32 nt, Human
aacucccuccacuaccgcuauuucuccuugga

SEQ ID NO: 289088 - RNA, 32 nt, Human
aacucccuccauccugacucacguggacuuag

SEQ ID NO: 289089 - RNA, 32 nt, Human
aacucccucccuacugcuuccuaggagcuucc

SEQ ID NO: 289090 - RNA, 32 nt, Human
aacucccucccucccugcaauccuuccuucuu

SEQ ID NO: 289091 - RNA, 32 nt, Human
aacucccuccugucuuccacagucuccuacaa

SEQ ID NO: 289092 - RNA, 32 nt, Human
aacucccugaggccuccccucccuucagggca

SEQ ID NO: 289093 - RNA, 32 nt, Human
aacuccgaggcugagacuaggguuuuagcgga

SEQ ID NO: 289094 - RNA, 32 nt, Human
aacuccgaugcugcuucaacacuuucuugaug

SEQ ID NO: 289095 - RNA, 32 nt, Human
aacuccgcaagcaaaugaaaaacauccuggaa

SEQ ID NO: 289096 - RNA, 32 nt, Human
aacuccgcagcccagcccagaggagugucacc

SEQ ID NO: 289097 - RNA, 32 nt, Human
aacuccgccucccagguucacgccauucuccu

SEQ ID NO: 289098 - RNA, 32 nt, Human
aacuccgccucccggguucaagcgauucucgu

SEQ ID NO: 289099 - RNA, 32 nt, Human
aacuccgccuccuggguucaagugauucuucu

SEQ ID NO: 289100 - RNA, 32 nt, Human
aacuccgcucccaccgugucuucaagaagaac

SEQ ID NO: 289101 - RNA, 32 nt, Human
aacuccgcugccgacccugccugagcgcggga

SEQ ID NO: 289102 - RNA, 32 nt, Human
aacuccggccugggugacagaaggaggcucug

SEQ ID NO: 289103 - RNA, 32 nt, Human
aacuccggucgggcucucuccugggcucagca

SEQ ID NO: 289104 - RNA, 32 nt, Human
aacuccgugccuggccugucagcucccugcua

SEQ ID NO: 289105 - RNA, 23 nt, Human
aacuccuaaccucaagugaucca

SEQ ID NO: 289106 - RNA, 24 nt, Human
aacuccuaaccucaagugauccuc

SEQ ID NO: 289107 - RNA, 23 nt, Human
aacuccuaaccucaggugaucca

SEQ ID NO: 289108 - RNA, 23 nt, Human
aacuccuaaccuccagugaucca

SEQ ID NO: 289109 - RNA, 23 nt, Human
aacuccuaaccucgggugaucca

SEQ ID NO: 289110 - RNA, 20 nt, Human
aacuccuaaccuugugaucc

SEQ ID NO: 289111 - RNA, 24 nt, Human
aacuccuagacucaagugauccuc

SEQ ID NO: 289112 - RNA, 24 nt, Human
aacuccuagccucaagugauccuc

SEQ ID NO: 289113 - RNA, 20 nt, Human
aacuccuaggcucaagugau

SEQ ID NO: 289114 - RNA, 24 nt, Human
aacuccuaggcucaagugauccuc

SEQ ID NO: 289115 - RNA, 32 nt, Human
aacuccucaacagcaacaucucaucagagaag

SEQ ID NO: 289116 - RNA, 32 nt, Human
aacuccucaagcaaaauuucuguucauuuuac

SEQ ID NO: 289117 - RNA, 32 nt, Human
aacuccucagccaggugagacaaugggcuggu

SEQ ID NO: 289118 - RNA, 32 nt, Human
aacuccucaugauaacugcacacaaucugaaa

SEQ ID NO: 289119 - RNA, 32 nt, Human
aacuccuccaaaccccaaaccccaaacggaaa

SEQ ID NO: 289120 - RNA, 23 nt, Human
aacuccuccacucaggugaucca

SEQ ID NO: 289121 - RNA, 32 nt, Human
aacuccucccuuuucccucuccugggcccuuc

SEQ ID NO: 289122 - RNA, 32 nt, Human
aacuccucgcuucacuucaccugugccucccu

SEQ ID NO: 289123 - RNA, 32 nt, Human
aacuccucucucucuuucucugccucagaugg

SEQ ID NO: 289124 - RNA, 22 nt, Human
aacuccugaacgcaagugaucc

SEQ ID NO: 289125 - RNA, 22 nt, Human
aacuccugaacucaagugaucc

SEQ ID NO: 289126 - RNA, 22 nt, Human
aacuccugaacucaggugaucc

SEQ ID NO: 289127 - RNA, 24 nt, Human
aacuccugaacucaggugauccuc

SEQ ID NO: 289128 - RNA, 24 nt, Human
aacuccugaacuuaggugauucuc

SEQ ID NO: 289129 - RNA, 22 nt, Human
aacuccugacagcaucauccuc

SEQ ID NO: 289130 - RNA, 24 nt, Human
aacuccugacaucaagugaucuuc

SEQ ID NO: 289131 - RNA, 20 nt, Human
aacuccugaccaagugaucc

SEQ ID NO: 289132 - RNA, 23 nt, Human
aacuccugaccccaaguuaucca

SEQ ID NO: 289133 - RNA, 20 nt, Human
aacuccugacccugugaucc

SEQ ID NO: 289134 - RNA, 22 nt, Human
aacuccugaccgcaagugaucc

SEQ ID NO: 289135 - RNA, 23 nt, Human
aacuccugaccgcaagugaucca

SEQ ID NO: 289136 - RNA, 23 nt, Human
aacuccugaccgcagguaaucca

SEQ ID NO: 289137 - RNA, 23 nt, Human
aacuccugaccgcaggugaucca

SEQ ID NO: 289138 - RNA, 20 nt, Human
aacuccugaccuagugaucc

SEQ ID NO: 289139 - RNA, 21 nt, Human
aacuccugaccuagugaucca

SEQ ID NO: 289140 - RNA, 21 nt, Human
aacuccugaccuagugaugca

SEQ ID NO: 289141 - RNA, 24 nt, Human
aacuccugaccucaaaugagccuc

SEQ ID NO: 289142 - RNA, 22 nt, Human
aacuccugaccucaaaugaucc

SEQ ID NO: 289143 - RNA, 23 nt, Human
aacuccugaccucaaaugaucca

SEQ ID NO: 289144 - RNA, 23 nt, Human
aacuccugaccucaagcgaucca

SEQ ID NO: 289145 - RNA, 21 nt, Human
aacuccugaccucaaggaucu

SEQ ID NO: 289146 - RNA, 23 nt, Human
aacuccugaccucaaguaaucca

SEQ ID NO: 289147 - RNA, 23 nt, Human
aacuccugaccucaagugaccca

SEQ ID NO: 289148 - RNA, 22 nt, Human
aacuccugaccucaagugagcu

SEQ ID NO: 289149 - RNA, 20 nt, Human
aacuccugaccucaagugau

SEQ ID NO: 289150 - RNA, 22 nt, Human
aacuccugaccucaagugaucc

SEQ ID NO: 289151 - RNA, 23 nt, Human
aacuccugaccucaagugaucca

SEQ ID NO: 289152 - RNA, 24 nt, Human
aacuccugaccucaagugauccuc

SEQ ID NO: 289153 - RNA, 22 nt, Human
aacuccugaccucaagugaucu

SEQ ID NO: 289154 - RNA, 23 nt, Human
aacuccugaccucaagugaucua

SEQ ID NO: 289155 - RNA, 24 nt, Human
aacuccugaccucaagugaucuuc

SEQ ID NO: 289156 - RNA, 23 nt, Human
aacuccugaccucagauaaucca

SEQ ID NO: 289157 - RNA, 23 nt, Human
aacuccugaccucagaugaccca

SEQ ID NO: 289158 - RNA, 22 nt, Human
aacuccugaccucagaugaucc

SEQ ID NO: 289159 - RNA, 23 nt, Human
aacuccugaccucagaugaucca

SEQ ID NO: 289160 - RNA, 23 nt, Human
aacuccugaccucagaugaucua

SEQ ID NO: 289161 - RNA, 23 nt, Human
aacuccugaccucagaugauuca

SEQ ID NO: 289162 - RNA, 23 nt, Human
aacuccugaccucagauggucca

SEQ ID NO: 289163 - RNA, 22 nt, Human
aacuccugaccucaggcaaucu

SEQ ID NO: 289164 - RNA, 22 nt, Human
aacuccugaccucaggcgaucc

SEQ ID NO: 289165 - RNA, 23 nt, Human
aacuccugaccucaggcgaucca

SEQ ID NO: 289166 - RNA, 23 nt, Human
aacuccugaccucaggcgaucua

SEQ ID NO: 289167 - RNA, 23 nt, Human
aacuccugaccucaggggaucca

SEQ ID NO: 289168 - RNA, 21 nt, Human
aacuccugaccucagguaauc

SEQ ID NO: 289169 - RNA, 22 nt, Human
aacuccugaccucagguaaucc

SEQ ID NO: 289170 - RNA, 23 nt, Human
aacuccugaccucagguaaucca

SEQ ID NO: 289171 - RNA, 24 nt, Human
aacuccugaccucagguaauccuc

SEQ ID NO: 289172 - RNA, 18 nt, Human
aacuccugaccucaggug

SEQ ID NO: 289173 - RNA, 23 nt, Human
aacuccugaccucaggugagcca

SEQ ID NO: 289174 - RNA, 21 nt, Human
aacuccugaccucaggugauc

SEQ ID NO: 289175 - RNA, 22 nt, Human
aacuccugaccucaggugaucc

SEQ ID NO: 289176 - RNA, 23 nt, Human
aacuccugaccucaggugaucca

SEQ ID NO: 289177 - RNA, 24 nt, Human
aacuccugaccucaggugauccuc

SEQ ID NO: 289178 - RNA, 22 nt, Human
aacuccugaccucaggugaucu

SEQ ID NO: 289179 - RNA, 23 nt, Human
aacuccugaccucaggugaucua

SEQ ID NO: 289180 - RNA, 23 nt, Human
aacuccugaccucaggugaugca

SEQ ID NO: 289181 - RNA, 23 nt, Human
aacuccugaccucaggugcucca

SEQ ID NO: 289182 - RNA, 23 nt, Human
aacuccugaccucaguugaucca

SEQ ID NO: 289183 - RNA, 21 nt, Human
aacuccugaccucaugaucca

SEQ ID NO: 289184 - RNA, 23 nt, Human
aacuccugaccucauguaaucca

SEQ ID NO: 289185 - RNA, 23 nt, Human
aacuccugaccuccagugaucca

SEQ ID NO: 289186 - RNA, 21 nt, Human
aacuccugaccucguaaucca

SEQ ID NO: 289187 - RNA, 32 nt, Human
aacuccugaccucgugauacucagccucccaa

SEQ ID NO: 289188 - RNA, 20 nt, Human
aacuccugaccucgugaucc

SEQ ID NO: 289189 - RNA, 21 nt, Human
aacuccugaccucgugaucca

SEQ ID NO: 289190 - RNA, 21 nt, Human
aacuccugaccucgugaugca

SEQ ID NO: 289191 - RNA, 20 nt, Human
aacuccugaccucuugaucc

SEQ ID NO: 289192 - RNA, 24 nt, Human
aacuccugaccugaagcgauccuc

SEQ ID NO: 289193 - RNA, 22 nt, Human
aacuccugaccugaagugaucc

SEQ ID NO: 289194 - RNA, 22 nt, Human
aacuccugaccuggugauccuc

SEQ ID NO: 289195 - RNA, 32 nt, Human
aacuccugaccuuaaaugauuugccugccucg

SEQ ID NO: 289196 - RNA, 22 nt, Human
aacuccugaccuuaagugaucc

SEQ ID NO: 289197 - RNA, 23 nt, Human
aacuccugaccuuaagugaucca

SEQ ID NO: 289198 - RNA, 23 nt, Human
aacuccugaccuuaggugaucca

SEQ ID NO: 289199 - RNA, 20 nt, Human
aacuccugaccuuauaaucc

SEQ ID NO: 289200 - RNA, 24 nt, Human
aacuccugaccuucaggugaucca

SEQ ID NO: 289201 - RNA, 23 nt, Human
aacuccugaccuuggguaaucca

SEQ ID NO: 289202 - RNA, 22 nt, Human
aacuccugaccuuggugaucca

SEQ ID NO: 289203 - RNA, 20 nt, Human
aacuccugaccuugugaucc

SEQ ID NO: 289204 - RNA, 21 nt, Human
aacuccugaccuugugaucca

SEQ ID NO: 289205 - RNA, 32 nt, Human
aacuccugaccuugugaucugccugccucggc

SEQ ID NO: 289206 - RNA, 22 nt, Human
aacuccugaccuugugaugcuc

SEQ ID NO: 289207 - RNA, 32 nt, Human
aacuccugaccuugugauuugcccgccucagc

SEQ ID NO: 289208 - RNA, 21 nt, Human
aacuccugaccuuguggucca

SEQ ID NO: 289209 - RNA, 20 nt, Human
aacuccugacgucgugaucc

SEQ ID NO: 289210 - RNA, 22 nt, Human
aacuccugacucgaagugaucc

SEQ ID NO: 289211 - RNA, 22 nt, Human
aacuccugacuucaaaugaucc

SEQ ID NO: 289212 - RNA, 23 nt, Human
aacuccugacuucaaaugaucca

SEQ ID NO: 289213 - RNA, 22 nt, Human
aacuccugacuucaagugaucc

SEQ ID NO: 289214 - RNA, 22 nt, Human
aacuccugacuucaggugaucc

SEQ ID NO: 289215 - RNA, 21 nt, Human
aacuccugacuuugugaucca

SEQ ID NO: 289216 - RNA, 22 nt, Human
aacuccugagcccaggugaucc

SEQ ID NO: 289217 - RNA, 24 nt, Human
aacuccugagcccaggugauccuc

SEQ ID NO: 289218 - RNA, 24 nt, Human
aacuccugagcucaagcaauccuc

SEQ ID NO: 289219 - RNA, 22 nt, Human
aacuccugagcucaagcgaucc

SEQ ID NO: 289220 - RNA, 24 nt, Human
aacuccugagcucaagcgauccuc

SEQ ID NO: 289221 - RNA, 24 nt, Human
aacuccugagcucaaguaaucuuc

SEQ ID NO: 289222 - RNA, 22 nt, Human
aacuccugagcucaagugaucc

SEQ ID NO: 289223 - RNA, 23 nt, Human
aacuccugagcucaagugaucca

SEQ ID NO: 289224 - RNA, 24 nt, Human
aacuccugagcucaagugauccuc

SEQ ID NO: 289225 - RNA, 24 nt, Human
aacuccugagcucaagugaucuuc

SEQ ID NO: 289226 - RNA, 20 nt, Human
aacuccugagcucaggugau

SEQ ID NO: 289227 - RNA, 22 nt, Human
aacuccugagcucaggugaucc

SEQ ID NO: 289228 - RNA, 23 nt, Human
aacuccugagcucaggugaucca

SEQ ID NO: 289229 - RNA, 23 nt, Human
aacuccugagucaagugauccuc

SEQ ID NO: 289230 - RNA, 23 nt, Human
aacuccugaucucaggcaaucca

SEQ ID NO: 289231 - RNA, 20 nt, Human
aacuccugcaacaagugucc

SEQ ID NO: 289232 - RNA, 32 nt, Human
aacuccugcauuccaaccagccugggugacag

SEQ ID NO: 289233 - RNA, 22 nt, Human
aacuccugcccucaagugaucc

SEQ ID NO: 289234 - RNA, 23 nt, Human
aacuccugcccucaagugaucca

SEQ ID NO: 289235 - RNA, 32 nt, Human
aacuccugccugcccuccagacugucugccca

SEQ ID NO: 289236 - RNA, 32 nt, Human
aacuccugcuccugaaucuucugaugggcccc

SEQ ID NO: 289237 - RNA, 22 nt, Human
aacuccugcucucaagugaucc

SEQ ID NO: 289238 - RNA, 24 nt, Human
aacuccugcucucaagugauccuc

SEQ ID NO: 289239 - RNA, 32 nt, Human
aacuccugcuuauaguauacuacacaguucaa

SEQ ID NO: 289240 - RNA, 32 nt, Human
aacuccuggacaacauacuaugcuauuugaau

SEQ ID NO: 289241 - RNA, 24 nt, Human
aacuccuggacccaagccauccuc

SEQ ID NO: 289242 - RNA, 24 nt, Human
aacuccuggacccaagcgauccuc

SEQ ID NO: 289243 - RNA, 24 nt, Human
aacuccuggacucaagcaauccuc

SEQ ID NO: 289244 - RNA, 24 nt, Human
aacuccuggacucaagcaguccuc

SEQ ID NO: 289245 - RNA, 24 nt, Human
aacuccuggacucaagcgaucuuc

SEQ ID NO: 289246 - RNA, 20 nt, Human
aacuccuggacucaagugau

SEQ ID NO: 289247 - RNA, 21 nt, Human
aacuccuggacucaagugauc

SEQ ID NO: 289248 - RNA, 24 nt, Human
aacuccuggacucaagugauccuc

SEQ ID NO: 289249 - RNA, 24 nt, Human
aacuccuggacucaugggauccuc

SEQ ID NO: 289250 - RNA, 24 nt, Human
aacuccuggacugaagcgguccuc

SEQ ID NO: 289251 - RNA, 24 nt, Human
aacuccuggacuuagacgauccuc

SEQ ID NO: 289252 - RNA, 24 nt, Human
aacuccuggcaucaagcgauccuc

SEQ ID NO: 289253 - RNA, 24 nt, Human
aacuccuggccucaaaugaucuuc

SEQ ID NO: 289254 - RNA, 24 nt, Human
aacuccuggccucaagcaauccuc

SEQ ID NO: 289255 - RNA, 24 nt, Human
aacuccuggccucaagcaauccuu

SEQ ID NO: 289256 - RNA, 24 nt, Human
aacuccuggccucaagcaguccuc

SEQ ID NO: 289257 - RNA, 24 nt, Human
aacuccuggccucaagccauccuc

SEQ ID NO: 289258 - RNA, 24 nt, Human
aacuccuggccucaagcgauccuc

SEQ ID NO: 289259 - RNA, 24 nt, Human
aacuccuggccucaagggauccuc

SEQ ID NO: 289260 - RNA, 22 nt, Human
aacuccuggccucaagugaucc

SEQ ID NO: 289261 - RNA, 24 nt, Human
aacuccuggccucaagugauccuc

SEQ ID NO: 289262 - RNA, 24 nt, Human
aacuccuggccucaagugauccuu

SEQ ID NO: 289263 - RNA, 24 nt, Human
aacuccuggccucaagugaucguc

SEQ ID NO: 289264 - RNA, 21 nt, Human
aacuccuggccucaagugauu

SEQ ID NO: 289265 - RNA, 24 nt, Human
aacuccuggccucaagugauucuc

SEQ ID NO: 289266 - RNA, 24 nt, Human
aacuccuggccucaagugguccuc

SEQ ID NO: 289267 - RNA, 23 nt, Human
aacuccuggccucaggcgaucca

SEQ ID NO: 289268 - RNA, 22 nt, Human
aacuccuggccucaggugaccc

SEQ ID NO: 289269 - RNA, 24 nt, Human
aacuccuggccuccagugauccuc

SEQ ID NO: 289270 - RNA, 24 nt, Human
aacuccuggccuuaagugauccuc

SEQ ID NO: 289271 - RNA, 22 nt, Human
aacuccuggcuacaagugaucc

SEQ ID NO: 289272 - RNA, 23 nt, Human
aacuccuggcucaagugaucucc

SEQ ID NO: 289273 - RNA, 23 nt, Human
aacuccuggcucaaucgauccuc

SEQ ID NO: 289274 - RNA, 24 nt, Human
aacuccuggcuucaagcaauccuu

SEQ ID NO: 289275 - RNA, 24 nt, Human
aacuccuggcuucaagcaguccuc

SEQ ID NO: 289276 - RNA, 24 nt, Human
aacuccuggcuucaagcgauccuc

SEQ ID NO: 289277 - RNA, 24 nt, Human
aacuccuggcuucaagcgauucuc

SEQ ID NO: 289278 - RNA, 24 nt, Human
aacuccuggcuucaagcuauccuc

SEQ ID NO: 289279 - RNA, 22 nt, Human
aacuccuggcuucaagugaucc

SEQ ID NO: 289280 - RNA, 24 nt, Human
aacuccuggcuucaagugauccuc

SEQ ID NO: 289281 - RNA, 32 nt, Human
aacuccuggcuuccgguaucaggcuggguuga

SEQ ID NO: 289282 - RNA, 22 nt, Human
aacuccuggcuucgggugaucc

SEQ ID NO: 289283 - RNA, 24 nt, Human
aacuccugggaucaaaugguccuc

SEQ ID NO: 289284 - RNA, 24 nt, Human
aacuccugggaucaagugauccuc

SEQ ID NO: 289285 - RNA, 22 nt, Human
aacuccugggcacaagcaaucc

SEQ ID NO: 289286 - RNA, 24 nt, Human
aacuccugggcacaagugauccuc

SEQ ID NO: 289287 - RNA, 23 nt, Human
aacuccugggcccaagcaauccu

SEQ ID NO: 289288 - RNA, 24 nt, Human
aacuccugggcccaagcaauccuc

SEQ ID NO: 289289 - RNA, 24 nt, Human
aacuccugggcccaagcaaucuuc

SEQ ID NO: 289290 - RNA, 24 nt, Human
aacuccugggcccaagugauccuc

SEQ ID NO: 289291 - RNA, 23 nt, Human
aacuccugggcccaucaguccuc

SEQ ID NO: 289292 - RNA, 22 nt, Human
aacuccugggcuaaggauccuc

SEQ ID NO: 289293 - RNA, 24 nt, Human
aacuccugggcuacaguuacccuc

SEQ ID NO: 289294 - RNA, 23 nt, Human
aacuccugggcucaaagauccuc

SEQ ID NO: 289295 - RNA, 24 nt, Human
aacuccugggcucaagagauccuc

SEQ ID NO: 289296 - RNA, 32 nt, Human
aacuccugggcucaagagggaggaucacauuu

SEQ ID NO: 289297 - RNA, 24 nt, Human
aacuccugggcucaagcaauccuc

SEQ ID NO: 289298 - RNA, 24 nt, Human
aacuccugggcucaagcaaugcuc

SEQ ID NO: 289299 - RNA, 24 nt, Human
aacuccugggcucaagcaguccuc

SEQ ID NO: 289300 - RNA, 24 nt, Human
aacuccugggcucaagccauccuc

SEQ ID NO: 289301 - RNA, 24 nt, Human
aacuccugggcucaagcgagccuc

SEQ ID NO: 289302 - RNA, 24 nt, Human
aacuccugggcucaagcgauacuc

SEQ ID NO: 289303 - RNA, 22 nt, Human
aacuccugggcucaagcgaucc

SEQ ID NO: 289304 - RNA, 23 nt, Human
aacuccugggcucaagcgauccu

SEQ ID NO: 289305 - RNA, 24 nt, Human
aacuccugggcucaagcgauccuc

SEQ ID NO: 289306 - RNA, 24 nt, Human
aacuccugggcucaagcgauccuu

SEQ ID NO: 289307 - RNA, 24 nt, Human
aacuccugggcucaagcgaucuuc

SEQ ID NO: 289308 - RNA, 24 nt, Human
aacuccugggcucaagcuauccuc

SEQ ID NO: 289309 - RNA, 24 nt, Human
aacuccugggcucaaggcauccuc

SEQ ID NO: 289310 - RNA, 24 nt, Human
aacuccugggcucaaguaauccuc

SEQ ID NO: 289311 - RNA, 24 nt, Human
aacuccugggcucaagugaaccuc

SEQ ID NO: 289312 - RNA, 22 nt, Human
aacuccugggcucaagugaucc

SEQ ID NO: 289313 - RNA, 24 nt, Human
aacuccugggcucaagugauccuc

SEQ ID NO: 289314 - RNA, 24 nt, Human
aacuccugggcucaagugauccuu

SEQ ID NO: 289315 - RNA, 24 nt, Human
aacuccugggcucaagugaucuuc

SEQ ID NO: 289316 - RNA, 24 nt, Human
aacuccugggcucaagugaugcuc

SEQ ID NO: 289317 - RNA, 21 nt, Human
aacuccugggcucaagugauu

SEQ ID NO: 289318 - RNA, 24 nt, Human
aacuccugggcucaagugauucuc

SEQ ID NO: 289319 - RNA, 23 nt, Human
aacuccugggcucaaugauccuc

SEQ ID NO: 289320 - RNA, 22 nt, Human
aacuccugggcucagaugaucc

SEQ ID NO: 289321 - RNA, 23 nt, Human
aacuccugggcucagaugaucca

SEQ ID NO: 289322 - RNA, 24 nt, Human
aacuccugggcucagaugauccuc

SEQ ID NO: 289323 - RNA, 24 nt, Human
aacuccugggcucaggccauccuc

SEQ ID NO: 289324 - RNA, 22 nt, Human
aacuccugggcucaggcgaucc

SEQ ID NO: 289325 - RNA, 23 nt, Human
aacuccugggcucaggcgaucca

SEQ ID NO: 289326 - RNA, 23 nt, Human
aacuccugggcucagugauccuc

SEQ ID NO: 289327 - RNA, 24 nt, Human
aacuccugggcucaugcaauccuc

SEQ ID NO: 289328 - RNA, 24 nt, Human
aacuccugggcuccagugacccuc

SEQ ID NO: 289329 - RNA, 24 nt, Human
aacuccugggcuccagugauccuc

SEQ ID NO: 289330 - RNA, 24 nt, Human
aacuccugggcucgaaugauccuc

SEQ ID NO: 289331 - RNA, 24 nt, Human
aacuccugggcucgggugauccuc

SEQ ID NO: 289332 - RNA, 24 nt, Human
aacuccugggcugaaacaauccuc

SEQ ID NO: 289333 - RNA, 24 nt, Human
aacuccugggcugaagcaguccuc

SEQ ID NO: 289334 - RNA, 24 nt, Human
aacuccugggcuuaagugacccuc

SEQ ID NO: 289335 - RNA, 24 nt, Human
aacuccuggggucaagcaacccuc

SEQ ID NO: 289336 - RNA, 23 nt, Human
aacuccuggguucaagagaucca

SEQ ID NO: 289337 - RNA, 24 nt, Human
aacuccuggguucaagcaguccuc

SEQ ID NO: 289338 - RNA, 24 nt, Human
aacuccuggucacaaguaauccuc

SEQ ID NO: 289339 - RNA, 22 nt, Human
aacuccuggucucaagugaucc

SEQ ID NO: 289340 - RNA, 24 nt, Human
aacuccuggucucaagugauccuc

SEQ ID NO: 289341 - RNA, 24 nt, Human
aacuccuggucuccagugauccuc

SEQ ID NO: 289342 - RNA, 32 nt, Human
aacuccugguuguuugcuggggugggggagca

SEQ ID NO: 289343 - RNA, 24 nt, Human
aacuccugguuucaagcgauccuc

SEQ ID NO: 289344 - RNA, 32 nt, Human
aacuccugguuugaggguuuuaauaccuguag

SEQ ID NO: 289345 - RNA, 29 nt, Human
aacuccugucugcuaucgagcccuggugc

SEQ ID NO: 289346 - RNA, 24 nt, Human
aacuccugugcucaagugacccuc

SEQ ID NO: 289347 - RNA, 22 nt, Human
aacuccugugcucaagugaucc

SEQ ID NO: 289348 - RNA, 32 nt, Human
aacuccuguuuaccuuucagacaaacccuaaa

SEQ ID NO: 289349 - RNA, 32 nt, Human
aacuccuucagcagguguucuucaccauucgu

SEQ ID NO: 289350 - RNA, 32 nt, Human
aacuccuucccaacccuccccuccagggacga

SEQ ID NO: 289351 - RNA, 32 nt, Human
aacuccuuccccaacaccuccuucccaaacau

SEQ ID NO: 289352 - RNA, 32 nt, Human
aacuccuugaggggaaggugggugaagaacaa

SEQ ID NO: 289353 - RNA, 32 nt, Human
aacuccuuggggugcugaucucgaguguuauu

SEQ ID NO: 289354 - RNA, 32 nt, Human
aacuccuuuauggugugacugugucuuauucc

SEQ ID NO: 289355 - RNA, 32 nt, Human
aacuccuuucagccacaugccccaggcucucg

SEQ ID NO: 289356 - RNA, 32 nt, Human
aacuccuuugcucugcugucauccuguguacc

SEQ ID NO: 289357 - RNA, 32 nt, Human
aacucgaggagaacccagaccaggacagggag

SEQ ID NO: 289358 - RNA, 32 nt, Human
aacucgagguggggcaggauggguagggagug

SEQ ID NO: 289359 - RNA, 32 nt, Human
aacucgauagagcaaggaaaccagaaaggugu

SEQ ID NO: 289360 - RNA, 32 nt, Human
aacucgcacaucucuccugucuguuaguaaua

SEQ ID NO: 289361 - RNA, 32 nt, Human
aacucgcagacccucuggggguaggggcuguu

SEQ ID NO: 289362 - RNA, 32 nt, Human
aacucgcagccuguggcugugguccucuuaua

SEQ ID NO: 289363 - RNA, 32 nt, Human
aacucgcaguccucuagaacagcuucagauua

SEQ ID NO: 289364 - RNA, 32 nt, Human
aacucgccgcucccugggucccuucccagugg

SEQ ID NO: 289365 - RNA, 32 nt, Human
aacucgcgagccccagagcucgcucagccgcc

SEQ ID NO: 289366 - RNA, 32 nt, Human
aacucgcuagguuaaaucugcaucaaaaucua

SEQ ID NO: 289367 - RNA, 32 nt, Human
aacucggaagaaaagagaggaggaaaaggacu

SEQ ID NO: 289368 - RNA, 32 nt, Human
aacucggacaucacccuccugaggcccucagc

SEQ ID NO: 289369 - RNA, 32 nt, Human
aacucggauucccagccucacucccucugugu

SEQ ID NO: 289370 - RNA, 32 nt, Human
aacucggcccucaaacccucucccucucugcc

SEQ ID NO: 289371 - RNA, 32 nt, Human
aacucggcucaagugaucuaccugccucugcc

SEQ ID NO: 289372 - RNA, 32 nt, Human
aacucgggagacuguaggugccgugagccgag

SEQ ID NO: 289373 - RNA, 32 nt, Human
aacucgggaggaagagguugcagugagcugag

SEQ ID NO: 289374 - RNA, 32 nt, Human
aacucgggaggcagagguugcagugagcugag

SEQ ID NO: 289375 - RNA, 32 nt, Human
aacucgggaggcagagguugucaugagcugag

SEQ ID NO: 289376 - RNA, 32 nt, Human
aacucgggaggcagagguuucagggagccaag

SEQ ID NO: 289377 - RNA, 32 nt, Human
aacucgggaggcgaagguugcagugagccgag

SEQ ID NO: 289378 - RNA, 32 nt, Human
aacucgggaggcggagguugcagugagccgag

SEQ ID NO: 289379 - RNA, 32 nt, Human
aacucgggaggcggauguugcagugagccaau

SEQ ID NO: 289380 - RNA, 23 nt, Human
aacucgggagguagagguugcag

SEQ ID NO: 289381 - RNA, 32 nt, Human
aacucgggagguagagguugcagugagccaag

SEQ ID NO: 289382 - RNA, 32 nt, Human
aacucgggaggugaaaguugcagugagccgag

SEQ ID NO: 289383 - RNA, 32 nt, Human
aacucgggagguggagguggcagugagccgag

SEQ ID NO: 289384 - RNA, 32 nt, Human
aacucgggagguggagguugcagucagccaag

SEQ ID NO: 289385 - RNA, 26 nt, Human
aacucgggagguggagguugcaguga

SEQ ID NO: 289386 - RNA, 32 nt, Human
aacucgggagguggagguugcagugagcugag

SEQ ID NO: 289387 - RNA, 32 nt, Human
aacucgggcugccggggcaagugucuucauga

SEQ ID NO: 289388 - RNA, 32 nt, Human
aacucggggccaccuccacuccaugugcccag

SEQ ID NO: 289389 - RNA, 32 nt, Human
aacucgggugggggagguugcaaugagccgag

SEQ ID NO: 289390 - RNA, 32 nt, Human
aacucguagagauguucucagcaggaagacag

SEQ ID NO: 289391 - RNA, 32 nt, Human
aacucgucauuuacauuagauauuucuccuaa

SEQ ID NO: 289392 - RNA, 32 nt, Human
aacucgugguugcuuuggacaggugugauuug

SEQ ID NO: 289393 - RNA, 24 nt, Human
aacucguguccuuauaaaaagcag

SEQ ID NO: 289394 - RNA, 32 nt, Human
aacucuaauagcuguuucccuuucuauucuga

SEQ ID NO: 289395 - RNA, 32 nt, Human
aacucuaauccauccagcaccauggagcagcc

SEQ ID NO: 289396 - RNA, 32 nt, Human
aacucuaaugggaaacugggccugucuaccuu

SEQ ID NO: 289397 - RNA, 22 nt, Human
aacucuaccaccugggcuggaa

SEQ ID NO: 289398 - RNA, 32 nt, Human
aacucuaccucccucacucagcuccuuucccc

SEQ ID NO: 289399 - RNA, 32 nt, Human
aacucuacuguaacuguuuucuugaaaugaag

SEQ ID NO: 289400 - RNA, 32 nt, Human
aacucuagccuggguaacagagugagacucca

SEQ ID NO: 289401 - RNA, 32 nt, Human
aacucuagcuguaucauccucucaccugucau

SEQ ID NO: 289402 - RNA, 32 nt, Human
aacucuaggaaggggaaauaucugugucuuga

SEQ ID NO: 289403 - RNA, 32 nt, Human
aacucuauguaguuauagaaagugaauaugca

SEQ ID NO: 289404 - RNA, 32 nt, Human
aacucucaagcagacgugagugugacuuuuug

SEQ ID NO: 289405 - RNA, 32 nt, Human
aacucucaccaggucaguugugcaucaaggcu

SEQ ID NO: 289406 - RNA, 32 nt, Human
aacucucaccggcuccccaagcccuccccacc

SEQ ID NO: 289407 - RNA, 32 nt, Human
aacucucagaagcagaggaggcaggugggugg

SEQ ID NO: 289408 - RNA, 32 nt, Human
aacucucagcauauggacggccagcuguggcc

SEQ ID NO: 289409 - RNA, 32 nt, Human
aacucuccaccuuccagcaccauuaucagagg

SEQ ID NO: 289410 - RNA, 32 nt, Human
aacucuccagaagaaggguuuugaucauucca

SEQ ID NO: 289411 - RNA, 32 nt, Human
aacucuccauucucuuauccccucaagcccug

SEQ ID NO: 289412 - RNA, 32 nt, Human
aacucucccacuccaaacuguguauagucaac

SEQ ID NO: 289413 - RNA, 32 nt, Human
aacucuccccacugcucuuggcuuugacagua

SEQ ID NO: 289414 - RNA, 32 nt, Human
aacucucccugcagccacauguuucccaugac

SEQ ID NO: 289415 - RNA, 32 nt, Human
aacucucccuuucccuaccuaccuuccuuuua

SEQ ID NO: 289416 - RNA, 32 nt, Human
aacucuccgaggaggaggaggaggagggagga

SEQ ID NO: 289417 - RNA, 32 nt, Human
aacucuccgaucagaaucaucugggaagcauu

SEQ ID NO: 289418 - RNA, 32 nt, Human
aacucuccuggccuggccaucucccuccccag

SEQ ID NO: 289419 - RNA, 32 nt, Human
aacucuccuugcaaaauacugcacucugcugu

SEQ ID NO: 289420 - RNA, 19 nt, Human
aacucucgucuugguugaa

SEQ ID NO: 289421 - RNA, 32 nt, Human
aacucucuaaugcaccugccucagagauuccc

SEQ ID NO: 289422 - RNA, 32 nt, Human
aacucucucacucagugaccucagucaccaac

SEQ ID NO: 289423 - RNA, 32 nt, Human
aacucucucccaggaccucggaugaccauacu

SEQ ID NO: 289424 - RNA, 32 nt, Human
aacucucuccuggucgcuuugccaucaagaaa

SEQ ID NO: 289425 - RNA, 32 nt, Human
aacucucuuccagcccuuuccucugcccccac

SEQ ID NO: 289426 - RNA, 32 nt, Human
aacucugaaaaaugaagaaaagaaggaaacug

SEQ ID NO: 289427 - RNA, 32 nt, Human
aacucugaacaacccacggcagcuucuagccc

SEQ ID NO: 289428 - RNA, 32 nt, Human
aacucugaaugauggcuggagauugucuauca

SEQ ID NO: 289429 - RNA, 32 nt, Human
aacucugagcccccggcuccgagcucccucga

SEQ ID NO: 289430 - RNA, 32 nt, Human
aacucugaguuaagcacgaacuccuuucuuuu

SEQ ID NO: 289431 - RNA, 19 nt, Human
aacucugcaaccacacuca

SEQ ID NO: 289432 - RNA, 32 nt, Human
aacucugcaccuuccuccaccaggagccuggg

SEQ ID NO: 289433 - RNA, 32 nt, Human
aacucugcagagugccuucucccgcagcccua

SEQ ID NO: 289434 - RNA, 32 nt, Human
aacucugcagcaggcuggugcuguguaguggc

SEQ ID NO: 289435 - RNA, 32 nt, Human
aacucugcaggagaaaggcagcaugguacaug

SEQ ID NO: 289436 - RNA, 32 nt, Human
aacucugccaucuucccucccacaauuagagu

SEQ ID NO: 289437 - RNA, 32 nt, Human
aacucugcccuggcuucucugguucuucccug

SEQ ID NO: 289438 - RNA, 32 nt, Human
aacucugccuaccagguucaagcgauucuccu

SEQ ID NO: 289439 - RNA, 32 nt, Human
aacucugccucccagguucacgccauccuccu

SEQ ID NO: 289440 - RNA, 32 nt, Human
aacucugccucccggguucaagcaauucuccu

SEQ ID NO: 289441 - RNA, 32 nt, Human
aacucugcucacugcaaccuccgccucccagg

SEQ ID NO: 289442 - RNA, 32 nt, Human
aacucugcucuuccugucagucucaaagcaca

SEQ ID NO: 289443 - RNA, 32 nt, Human
aacucugcugcauggcagaugccuagguggaa

SEQ ID NO: 289444 - RNA, 32 nt, Human
aacucugcuugauuuuugccucuuccagucuu

SEQ ID NO: 289445 - RNA, 32 nt, Human
aacucuggaguccgagguaacagaacaccugu

SEQ ID NO: 289446 - RNA, 32 nt, Human
aacucuggagugagaggaugccagaggaucaa

SEQ ID NO: 289447 - RNA, 32 nt, Human
aacucuggcucugccaccugcugcuccuguga

SEQ ID NO: 289448 - RNA, 32 nt, Human
aacucugggaccccucugaugucuuggagcac

SEQ ID NO: 289449 - RNA, 32 nt, Human
aacucuggggucagggagagacccuaccccca

SEQ ID NO: 289450 - RNA, 32 nt, Human
aacucuggucucacugccuuaucucacaccaa

SEQ ID NO: 289451 - RNA, 32 nt, Human
aacucuggugaaugaaaaaugcuauuaauaua

SEQ ID NO: 289452 - RNA, 32 nt, Human
aacucuggugaccugggcugcccucucagaaa

SEQ ID NO: 289453 - RNA, 18 nt, Human
aacucuguacccauugaa

SEQ ID NO: 289454 - RNA, 32 nt, Human
aacucuguauucucccuugucauuccaaccaa

SEQ ID NO: 289455 - RNA, 32 nt, Human
aacucugucacccagacuggagugcaguggca

SEQ ID NO: 289456 - RNA, 32 nt, Human
aacucugucugcuuccugaagaugcucauaga

SEQ ID NO: 289457 - RNA, 32 nt, Human
aacucugugaggugaaugcacacaucacaaag

SEQ ID NO: 289458 - RNA, 32 nt, Human
aacucugugcaggggugggggcgggucuaacu

SEQ ID NO: 289459 - RNA, 32 nt, Human
aacucugugcugcuggguggaagcuuuauagu

SEQ ID NO: 289460 - RNA, 32 nt, Human
aacucuguggaagggaagggguugccucaaaa

SEQ ID NO: 289461 - RNA, 32 nt, Human
aacucugugguuucaucauuccuucuuaguug

SEQ ID NO: 289462 - RNA, 32 nt, Human
aacucuguuacccaggcuggagugcaguggug

SEQ ID NO: 289463 - RNA, 32 nt, Human
aacucuguucucccccuuccccuagacuuuuc

SEQ ID NO: 289464 - RNA, 32 nt, Human
aacucuguucugaucagugggugggugaggua

SEQ ID NO: 289465 - RNA, 32 nt, Human
aacucuuaagguuaaugccaaaauggaucaag

SEQ ID NO: 289466 - RNA, 32 nt, Human
aacucuuaccccaacagaaauguacccgaaga

SEQ ID NO: 289467 - RNA, 32 nt, Human
aacucuuacucugugauucugaugcaaacaua

SEQ ID NO: 289468 - RNA, 32 nt, Human
aacucuuagauacuuugcguccuuccuauuug

SEQ ID NO: 289469 - RNA, 32 nt, Human
aacucuucacucugcugaagcuccuaauggaa

SEQ ID NO: 289470 - RNA, 32 nt, Human
aacucuucagcccuguguucugcuggggccau

SEQ ID NO: 289471 - RNA, 32 nt, Human
aacucuucagguaccagcaccaggaagacuga

SEQ ID NO: 289472 - RNA, 32 nt, Human
aacucuuccacuuuuacauguugacuguguca

SEQ ID NO: 289473 - RNA, 32 nt, Human
aacucuuccugagaccaaacacucgucaucca

SEQ ID NO: 289474 - RNA, 32 nt, Human
aacucuucuaugccuggaugugguguucagga

SEQ ID NO: 289475 - RNA, 22 nt, Human
aacucuucucccccuugucaaa

SEQ ID NO: 289476 - RNA, 32 nt, Human
aacucuucucuuccgcuccugccuccugucgg

SEQ ID NO: 289477 - RNA, 23 nt, Human
aacucuugaccucaaaugaucca

SEQ ID NO: 289478 - RNA, 23 nt, Human
aacucuugacuucaagugaucca

SEQ ID NO: 289479 - RNA, 32 nt, Human
aacucuugauaaagggcuguuuugccauggaa

SEQ ID NO: 289480 - RNA, 32 nt, Human
aacucuugauucuaucacaaaacacugcaccc

SEQ ID NO: 289481 - RNA, 32 nt, Human
aacucuugcacgccaucauagacuucauacug

SEQ ID NO: 289482 - RNA, 32 nt, Human
aacucuugcagaggaaggauuuggaauauuuc

SEQ ID NO: 289483 - RNA, 32 nt, Human
aacucuugccccuccuccucugggcacagggu

SEQ ID NO: 289484 - RNA, 32 nt, Human
aacucuugcuccccaagaaagcuguaucccca

SEQ ID NO: 289485 - RNA, 21 nt, Human
aacucuugcuucauccaggca

SEQ ID NO: 289486 - RNA, 32 nt, Human
aacucuugcuuuaugccggccuucccacacca

SEQ ID NO: 289487 - RNA, 32 nt, Human
aacucuugggcaucccccucaccagcugacug

SEQ ID NO: 289488 - RNA, 32 nt, Human
aacucuugguaucuuuacugcaucauagucaa

SEQ ID NO: 289489 - RNA, 32 nt, Human
aacucuuguccaggcuggaggagugcagucgu

SEQ ID NO: 289490 - RNA, 32 nt, Human
aacucuugugaugaugucauugccauguagug

SEQ ID NO: 289491 - RNA, 32 nt, Human
aacucuuucaugccaggagaagccuccuuaaa

SEQ ID NO: 289492 - RNA, 32 nt, Human
aacucuuucuagaaagcucuuugaggccacug

SEQ ID NO: 289493 - RNA, 32 nt, Human
aacucuuugagaaacaacaauuucuacuuuga

SEQ ID NO: 289494 - RNA, 32 nt, Human
aacucuuugcugcugcccauguuucaaauacu

SEQ ID NO: 289495 - RNA, 32 nt, Human
aacucuuuguuauuugaaaacauguuuauuuu

SEQ ID NO: 289496 - RNA, 32 nt, Human
aacugaaaaaggacuuuucuaccagguaugac

SEQ ID NO: 289497 - RNA, 32 nt, Human
aacugaaaacaaccuggaaguccagugauggg

SEQ ID NO: 289498 - RNA, 32 nt, Human
aacugaaaacuuuuuggcugggcacggugccu

SEQ ID NO: 289499 - RNA, 32 nt, Human
aacugaaaagacuauguagugaaauguauuuu

SEQ ID NO: 289500 - RNA, 28 nt, Human
aacugaaaucggcuagcagcacugugag

SEQ ID NO: 289501 - RNA, 28 nt, Human
aacugaaaucugcuagcagcacugugag

SEQ ID NO: 289502 - RNA, 32 nt, Human
aacugaaauucauguaagcucucagauguuuu

SEQ ID NO: 289503 - RNA, 32 nt, Human
aacugaaauuccaggguagacccuaaggccgg

SEQ ID NO: 289504 - RNA, 32 nt, Human
aacugaacaaagccuuaauuuucucccaagcu

SEQ ID NO: 289505 - RNA, 32 nt, Human
aacugaacaggaacagaagagauuacacuaca

SEQ ID NO: 289506 - RNA, 32 nt, Human
aacugaacauggccacacaggccucacagcug

SEQ ID NO: 289507 - RNA, 32 nt, Human
aacugaaccagcucucagaauauuuccuuacc

SEQ ID NO: 289508 - RNA, 32 nt, Human
aacugaacccgggaggcggaggcugcaguggg

SEQ ID NO: 289509 - RNA, 32 nt, Human
aacugaacucaagacauggcugcccagugugu

SEQ ID NO: 289510 - RNA, 32 nt, Human
aacugaacuguagaagcagagcagcagcaguu

SEQ ID NO: 289511 - RNA, 32 nt, Human
aacugaagaaaauaucuugcuaauuuuaccua

SEQ ID NO: 289512 - RNA, 32 nt, Human
aacugaagaagaugccucaagggucaucccua

SEQ ID NO: 289513 - RNA, 32 nt, Human
aacugaagaguguuugaguuucauucacacaa

SEQ ID NO: 289514 - RNA, 32 nt, Human
aacugaagcaggugggagaagugaggcuguga

SEQ ID NO: 289515 - RNA, 32 nt, Human
aacugaagccaaaaugaccuucaagggauuuc

SEQ ID NO: 289516 - RNA, 32 nt, Human
aacugaagcgcccugaaccccagccuguccgu

SEQ ID NO: 289517 - RNA, 32 nt, Human
aacugaaggaacuagguaggagaggaaggauu

SEQ ID NO: 289518 - RNA, 32 nt, Human
aacugaaggaaugagacauaggacagauaagu

SEQ ID NO: 289519 - RNA, 32 nt, Human
aacugaaggagaaaggaauaagcucucuguga

SEQ ID NO: 289520 - RNA, 32 nt, Human
aacugaaggcaauaauguuggcuuuuggaagg

SEQ ID NO: 289521 - RNA, 32 nt, Human
aacugaaucccuccucccuccacuccuuggga

SEQ ID NO: 289522 - RNA, 32 nt, Human
aacugaaucuaaaagaaaacuauuuugaagau

SEQ ID NO: 289523 - RNA, 32 nt, Human
aacugaaugcuuugaucagcauugaggugaug

SEQ ID NO: 289524 - RNA, 32 nt, Human
aacugaaugucuccguauaaagcccgauugua

SEQ ID NO: 289525 - RNA, 32 nt, Human
aacugaauucuuaugcagaauuuccuagccca

SEQ ID NO: 289526 - RNA, 32 nt, Human
aacugaauugguagagguaaaaggggaacgga

SEQ ID NO: 289527 - RNA, 32 nt, Human
aacugaauuuuguauaauacuaguuuuauaug

SEQ ID NO: 289528 - RNA, 32 nt, Human
aacugacaacucugaaugcaagccgugguaac

SEQ ID NO: 289529 - RNA, 32 nt, Human
aacugacaccacucaacugccuggcacugaaa

SEQ ID NO: 289530 - RNA, 32 nt, Human
aacugacagaacuaaucuaucauauuagaaau

SEQ ID NO: 289531 - RNA, 32 nt, Human
aacugacagcugucuuccacagccucugaugu

SEQ ID NO: 289532 - RNA, 32 nt, Human
aacugacaguggcugccuucucugggccaugg

SEQ ID NO: 289533 - RNA, 32 nt, Human
aacugacauagagaaaaggcuggagagagauu

SEQ ID NO: 289534 - RNA, 28 nt, Human
aacugaccaaaugcugccuuguuuggcc

SEQ ID NO: 289535 - RNA, 32 nt, Human
aacugaccaaguaacacagaaguugggguaug

SEQ ID NO: 289536 - RNA, 32 nt, Human
aacugaccaguucuguccuuggcuggggaccc

SEQ ID NO: 289537 - RNA, 32 nt, Human
aacugacccagccaugggcacagggcucagcc

SEQ ID NO: 289538 - RNA, 32 nt, Human
aacugacccaggcuggacuugcggggaggaaa

SEQ ID NO: 289539 - RNA, 32 nt, Human
aacugacccuuguguaucagcagcauuucuga

SEQ ID NO: 289540 - RNA, 32 nt, Human
aacugaccgaguaccugcuccaucaugcuuga

SEQ ID NO: 289541 - RNA, 32 nt, Human
aacugaccucaagugaucugccugccucagcu

SEQ ID NO: 289542 - RNA, 32 nt, Human
aacugaccucaggccucugagucacugaaugu

SEQ ID NO: 289543 - RNA, 24 nt, Human
aacugaccuggaucucagaugcua

SEQ ID NO: 289544 - RNA, 22 nt, Human
aacugaccuuuccccguacuaa

SEQ ID NO: 289545 - RNA, 32 nt, Human
aacugacgggcuuucauuuccauuucacacac

SEQ ID NO: 289546 - RNA, 32 nt, Human
aacugacucauaccuguuuccggcugcaucac

SEQ ID NO: 289547 - RNA, 32 nt, Human
aacugacucaucugcaacauucacaccauugc

SEQ ID NO: 289548 - RNA, 32 nt, Human
aacugacuccgaggguugggagagcgcguugg

SEQ ID NO: 289549 - RNA, 32 nt, Human
aacugacucugacuuccaucuucugcaggguu

SEQ ID NO: 289550 - RNA, 32 nt, Human
aacugacucuguuauugaucccuucuccugcc

SEQ ID NO: 289551 - RNA, 32 nt, Human
aacugacucuuuucuacccccuucccucuguu

SEQ ID NO: 289552 - RNA, 32 nt, Human
aacugacugaacuagagcuugcagugaagugu

SEQ ID NO: 289553 - RNA, 32 nt, Human
aacugacugacggccucucacucucaucuccu

SEQ ID NO: 289554 - RNA, 32 nt, Human
aacugacugccccuccccuccucacggcuucu

SEQ ID NO: 289555 - RNA, 32 nt, Human
aacugacuucagcagcuaccccaaaccaauca

SEQ ID NO: 289556 - RNA, 32 nt, Human
aacugacuugucagaagucagagcaagguauu

SEQ ID NO: 289557 - RNA, 32 nt, Human
aacugacuuucugcuuucaccuuugcuuguca

SEQ ID NO: 289558 - RNA, 32 nt, Human
aacugacuuuggacugcuucagucucugccau

SEQ ID NO: 289559 - RNA, 32 nt, Human
aacugagaaauaccucuacagagaugugaugc

SEQ ID NO: 289560 - RNA, 32 nt, Human
aacugagaaauguucagaauguacggaaagau

SEQ ID NO: 289561 - RNA, 32 nt, Human
aacugagagaaaagggauggagaagagaauac

SEQ ID NO: 289562 - RNA, 32 nt, Human
aacugagagcaauuucaaaaggcugcugaugu

SEQ ID NO: 289563 - RNA, 32 nt, Human
aacugagaggaaaaggagguaguauagauagu

SEQ ID NO: 289564 - RNA, 32 nt, Human
aacugagaguggugagaucaagucgguagauc

SEQ ID NO: 289565 - RNA, 32 nt, Human
aacugagauaaaugcuauuuaaauaaagugua

SEQ ID NO: 289566 - RNA, 32 nt, Human
aacugagaucacgucacugaacuccagucuga

SEQ ID NO: 289567 - RNA, 32 nt, Human
aacugagaucagugaaauacuuguugcuaauc

SEQ ID NO: 289568 - RNA, 32 nt, Human
aacugagaucauaccacuucauuccagccugg

SEQ ID NO: 289569 - RNA, 32 nt, Human
aacugagauccuuccuuuugagggagcaaguc

SEQ ID NO: 289570 - RNA, 32 nt, Human
aacugagaucguacccagccugggcaacagug

SEQ ID NO: 289571 - RNA, 32 nt, Human
aacugagauuacaggcacccaccaccaugccc

SEQ ID NO: 289572 - RNA, 31 nt, Human
aacugagcacauuucugaccauuuccagaaa

SEQ ID NO: 289573 - RNA, 32 nt, Human
aacugagcaguagggauagaaggugugaaccu

SEQ ID NO: 289574 - RNA, 32 nt, Human
aacugagcaugcuggggaggugaaugccacau

SEQ ID NO: 289575 - RNA, 32 nt, Human
aacugagcauuuucucaacucgacucucauuu

SEQ ID NO: 289576 - RNA, 32 nt, Human
aacugagccagccagcaccccaccuucgucuu

SEQ ID NO: 289577 - RNA, 32 nt, Human
aacugagccauucacaggacuugaccccgagg

SEQ ID NO: 289578 - RNA, 32 nt, Human
aacugaggaagcuacaacacagugaagaccca

SEQ ID NO: 289579 - RNA, 32 nt, Human
aacugaggagaugaagguuacagugagccaag

SEQ ID NO: 289580 - RNA, 32 nt, Human
aacugaggagguggagguugcagugagccgag

SEQ ID NO: 289581 - RNA, 32 nt, Human
aacugaggccagaccacccaggaagagcccca

SEQ ID NO: 289582 - RNA, 32 nt, Human
aacugaggcccagagagcugaaguacugcacc

SEQ ID NO: 289583 - RNA, 21 nt, Human
aacugaggcccagaggggcag

SEQ ID NO: 289584 - RNA, 32 nt, Human
aacugaggccuggagaguuuaaguaauguguc

SEQ ID NO: 289585 - RNA, 32 nt, Human
aacugaggcucaaggagguuaaguaacauuuc

SEQ ID NO: 289586 - RNA, 32 nt, Human
aacugaggcucagagacaaaguaacuuuguca

SEQ ID NO: 289587 - RNA, 23 nt, Human
aacugaggggaguaugugacuaa

SEQ ID NO: 289588 - RNA, 32 nt, Human
aacugaggucugauuauccagagcuaacaggc

SEQ ID NO: 289589 - RNA, 32 nt, Human
aacugaggugugacuguuuggacccaggccuc

SEQ ID NO: 289590 - RNA, 32 nt, Human
aacugaguaguagcugggucugauggcagcag

SEQ ID NO: 289591 - RNA, 32 nt, Human
aacugagucgcccuccugccuccagcucucug

SEQ ID NO: 289592 - RNA, 32 nt, Human
aacugauaguacauugccaucuccaggaagac

SEQ ID NO: 289593 - RNA, 32 nt, Human
aacugauauuacucaauuucagucuggacacu

SEQ ID NO: 289594 - RNA, 32 nt, Human
aacugaucaaaccaaaggaaaaguguugcuag

SEQ ID NO: 289595 - RNA, 32 nt, Human
aacugauccagcaguuccacuccuggguaugu

SEQ ID NO: 289596 - RNA, 32 nt, Human
aacugauccauagccucuucagauuccuuaua

SEQ ID NO: 289597 - RNA, 32 nt, Human
aacugaucgaauauaucaguaauuucagaauc

SEQ ID NO: 289598 - RNA, 32 nt, Human
aacugaucuccugccccacuaaccuuaacgac

SEQ ID NO: 289599 - RNA, 32 nt, Human
aacugaugaaaggaggaagaagaaagggacuu

SEQ ID NO: 289600 - RNA, 32 nt, Human
aacugaugcaggagggugcagcuuuggaguca

SEQ ID NO: 289601 - RNA, 32 nt, Human
aacugaugcucacacugggacuccucacuguc

SEQ ID NO: 289602 - RNA, 32 nt, Human
aacugauggcaaaggaagggcuggguuuucag

SEQ ID NO: 289603 - RNA, 30 nt, Human
aacugauggguuuaguaaucuggucauuuc

SEQ ID NO: 289604 - RNA, 32 nt, Human
aacugauucaugcaaacaacaaaaaugaaccc

SEQ ID NO: 289605 - RNA, 32 nt, Human
aacugauugauugugcaaacuacuuuuuauga

SEQ ID NO: 289606 - RNA, 32 nt, Human
aacugauuggcaccaagcaagaagaacagcac

SEQ ID NO: 289607 - RNA, 19 nt, Human
aacugauugucccaacuca

SEQ ID NO: 289608 - RNA, 32 nt, Human
aacugauuucacuccagacugguguggccacc

SEQ ID NO: 289609 - RNA, 32 nt, Human
aacugauuuuaaaggguuuagauuuuaagaau

SEQ ID NO: 289610 - RNA, 32 nt, Human
aacugcaaacuaaaacgacagugagauaccau

SEQ ID NO: 289611 - RNA, 32 nt, Human
aacugcaaagcaguuugaugacacuguuuuaa

SEQ ID NO: 289612 - RNA, 32 nt, Human
aacugcaaaggauuuacgguuugugaaaaaug

SEQ ID NO: 289613 - RNA, 32 nt, Human
aacugcaaauugguaagcagcaccuuaauacc

SEQ ID NO: 289614 - RNA, 32 nt, Human
aacugcaacagaacaggagauggaauuccagg

SEQ ID NO: 289615 - RNA, 32 nt, Human
aacugcaacuuccaccuccuggguucaagcaa

SEQ ID NO: 289616 - RNA, 32 nt, Human
aacugcaaggacucaguacaucccuggcacag

SEQ ID NO: 289617 - RNA, 32 nt, Human
aacugcaaguuccuaggcagaggggaagcccc

SEQ ID NO: 289618 - RNA, 32 nt, Human
aacugcacacuauuucccucuacugaguaaac

SEQ ID NO: 289619 - RNA, 32 nt, Human
aacugcacagccgccucugaaagguacgucca

SEQ ID NO: 289620 - RNA, 32 nt, Human
aacugcacgugccuucugucauugggaaugaa

SEQ ID NO: 289621 - RNA, 32 nt, Human
aacugcacuggguggcgggcagaugguggaag

SEQ ID NO: 289622 - RNA, 32 nt, Human
aacugcacuugucucucucauuuccuucaaau

SEQ ID NO: 289623 - RNA, 32 nt, Human
aacugcagacacagcuguucucucccucucuc

SEQ ID NO: 289624 - RNA, 32 nt, Human
aacugcagaggggagccuucuggagaagcugc

SEQ ID NO: 289625 - RNA, 19 nt, Human
aacugcagauguuauugaa

SEQ ID NO: 289626 - RNA, 32 nt, Human
aacugcagauugugaauuucacugccuuauau

SEQ ID NO: 289627 - RNA, 32 nt, Human
aacugcagcauuccagucugggcuguguccca

SEQ ID NO: 289628 - RNA, 32 nt, Human
aacugcaggaagcugccaccucuggggucaga

SEQ ID NO: 289629 - RNA, 32 nt, Human
aacugcaggaaggucugugcucuggagccagg

SEQ ID NO: 289630 - RNA, 32 nt, Human
aacugcaggaaguggcagcauucugggccaag

SEQ ID NO: 289631 - RNA, 32 nt, Human
aacugcaggcuggaucaguaguucaacagcua

SEQ ID NO: 289632 - RNA, 32 nt, Human
aacugcagggucuaggguguuguuggaguggc

SEQ ID NO: 289633 - RNA, 32 nt, Human
aacugcaguacccucugaucucuggcuuucuu

SEQ ID NO: 289634 - RNA, 32 nt, Human
aacugcagucacugaaugaccaagagcagcac

SEQ ID NO: 289635 - RNA, 32 nt, Human
aacugcagugaucuaggcacuuccuccagccu

SEQ ID NO: 289636 - RNA, 32 nt, Human
aacugcagugcuggguggaguguccuguggcc

SEQ ID NO: 289637 - RNA, 32 nt, Human
aacugcauaaacacugcacacuaggcuacaau

SEQ ID NO: 289638 - RNA, 32 nt, Human
aacugcauccaaucacugucucuuguaccaau

SEQ ID NO: 289639 - RNA, 32 nt, Human
aacugcaucuucuccccuugccaccccauggc

SEQ ID NO: 289640 - RNA, 32 nt, Human
aacugcauuaaccagucacaggcucagacugu

SEQ ID NO: 289641 - RNA, 32 nt, Human
aacugcauuggcuuuggguugcaggaccucag

SEQ ID NO: 289642 - RNA, 32 nt, Human
aacugcauuugcuuuugacuccuggccuuucu

SEQ ID NO: 289643 - RNA, 32 nt, Human
aacugccaaaccuccugucagugaggacucuu

SEQ ID NO: 289644 - RNA, 22 nt, Human
aacugccaaccacaggaaacag

SEQ ID NO: 289645 - RNA, 32 nt, Human
aacugccaaccacaggaaacagccuggcaaag

SEQ ID NO: 289646 - RNA, 22 nt, Human
aacugccaaccaguaggaagca

SEQ ID NO: 289647 - RNA, 21 nt, Human
aacugccaacggaggaaacag

SEQ ID NO: 289648 - RNA, 22 nt, Human
aacugccaaggcagccuccaga

SEQ ID NO: 289649 - RNA, 21 nt, Human
aacugccacucauugggccac

SEQ ID NO: 289650 - RNA, 32 nt, Human
aacugccacugcaacucugcacguccaggagg

SEQ ID NO: 289651 - RNA, 32 nt, Human
aacugccagacaccugagccgacugguaguag

SEQ ID NO: 289652 - RNA, 24 nt, Human
aacugccagccucagaggaggcag

SEQ ID NO: 289653 - RNA, 32 nt, Human
aacugccaggaaaauagcaaaggaaaucacug

SEQ ID NO: 289654 - RNA, 32 nt, Human
aacugccaggcagagcaugagaacaaacauuc

SEQ ID NO: 289655 - RNA, 31 nt, Human
aacugccagucccagcaccuccugaaagccc

SEQ ID NO: 289656 - RNA, 32 nt, Human
aacugccagugaggcuggaggcuggaggugga

SEQ ID NO: 289657 - RNA, 32 nt, Human
aacugccauacauggguacaagcuauaacaca

SEQ ID NO: 289658 - RNA, 32 nt, Human
aacugccauauccuagggggcuuggaguaccc

SEQ ID NO: 289659 - RNA, 32 nt, Human
aacugccaugcucagagaauccuagagauacu

SEQ ID NO: 289660 - RNA, 32 nt, Human
aacugccauugcacagaugaggaaauugaaac

SEQ ID NO: 289661 - RNA, 32 nt, Human
aacugccauugcacagaugaggaaauugaaag

SEQ ID NO: 289662 - RNA, 32 nt, Human
aacugcccaaguuugacuaauugcuuggccug

SEQ ID NO: 289663 - RNA, 32 nt, Human
aacugcccacucugauaugccugggugagccu

SEQ ID NO: 289664 - RNA, 32 nt, Human
aacugcccagcugacccacugacuugugagug

SEQ ID NO: 289665 - RNA, 32 nt, Human
aacugcccaucuuuacugaaucuucuugacug

SEQ ID NO: 289666 - RNA, 32 nt, Human
aacugcccauuuucuggaucuucccucucaau

SEQ ID NO: 289667 - RNA, 32 nt, Human
aacugcccccuccagcccauuuucugccguga

SEQ ID NO: 289668 - RNA, 32 nt, Human
aacugccccggaagauccucagcuggugcagg

SEQ ID NO: 289669 - RNA, 23 nt, Human
aacugcccgcagccugcucugag

SEQ ID NO: 289670 - RNA, 32 nt, Human
aacugcccgcuggaccccagacucagucuguc

SEQ ID NO: 289671 - RNA, 24 nt, Human
aacugcccguccaacagcuguggg

SEQ ID NO: 289672 - RNA, 32 nt, Human
aacugcccugcucuccucauacucaccgguuu

SEQ ID NO: 289673 - RNA, 32 nt, Human
aacugccggaaggugaaaguguucugugaugu

SEQ ID NO: 289674 - RNA, 32 nt, Human
aacugccggcuaaugcuugcucucccaagauc

SEQ ID NO: 289675 - RNA, 32 nt, Human
aacugccuacaggacaucuccaccuggauguc

SEQ ID NO: 289676 - RNA, 22 nt, Human
aacugccucagagaguugugag

SEQ ID NO: 289677 - RNA, 32 nt, Human
aacugccucaguaaauucuuagggauggaagu

SEQ ID NO: 289678 - RNA, 32 nt, Human
aacugccuccuugccagccccacccccagguu

SEQ ID NO: 289679 - RNA, 32 nt, Human
aacugccucuggucuugauagcauuaagcccu

SEQ ID NO: 289680 - RNA, 19 nt, Human
aacugccugacuuaggcca

SEQ ID NO: 289681 - RNA, 32 nt, Human
aacugccugaguagcugggacuacaggcaugc

SEQ ID NO: 289682 - RNA, 32 nt, Human
aacugccugccugggcacguugcuguugcugc

SEQ ID NO: 289683 - RNA, 19 nt, Human
aacugccugccuuagggua

SEQ ID NO: 289684 - RNA, 21 nt, Human
aacugccugcugcccugugag

SEQ ID NO: 289685 - RNA, 27 nt, Human
aacugccugggaacuaggaugcuagag

SEQ ID NO: 289686 - RNA, 32 nt, Human
aacugccuguagucccagcuauuccagggggc

SEQ ID NO: 289687 - RNA, 32 nt, Human
aacugccugucgggggcccagagcagccccag

SEQ ID NO: 289688 - RNA, 23 nt, Human
aacugccugucuggccgggccgc

SEQ ID NO: 289689 - RNA, 20 nt, Human
aacugccuucgggcuccaga

SEQ ID NO: 289690 - RNA, 25 nt, Human
aacugccuugcaggaaggcugugag

SEQ ID NO: 289691 - RNA, 32 nt, Human
aacugccuuuuuggugugcacacacauuucau

SEQ ID NO: 289692 - RNA, 32 nt, Human
aacugcggcaggccgggugcagugucucaagc

SEQ ID NO: 289693 - RNA, 32 nt, Human
aacugcggucacccugcuaaagucggggcggg

SEQ ID NO: 289694 - RNA, 32 nt, Human
aacugcgucuucucucagcccuccacacacac

SEQ ID NO: 289695 - RNA, 32 nt, Human
aacugcgucuucucucagcccuccacacacgc

SEQ ID NO: 289696 - RNA, 32 nt, Human
aacugcuaauuauccaacagaaaccccuaggu

SEQ ID NO: 289697 - RNA, 32 nt, Human
aacugcuacuuggagcucagaagccacuuuau

SEQ ID NO: 289698 - RNA, 32 nt, Human
aacugcuaugcaaggcugggugcuguggcuca

SEQ ID NO: 289699 - RNA, 23 nt, Human
aacugcuauuucagaagaggcag

SEQ ID NO: 289700 - RNA, 32 nt, Human
aacugcucagaggcaaaagcuacaagaggcac

SEQ ID NO: 289701 - RNA, 22 nt, Human
aacugcucagcaguugggccac

SEQ ID NO: 289702 - RNA, 32 nt, Human
aacugcucaguauuuugaucacuuugggcuua

SEQ ID NO: 289703 - RNA, 20 nt, Human
aacugcuccagacuauugaa

SEQ ID NO: 289704 - RNA, 23 nt, Human
aacugcucgcagggugcugcgag

SEQ ID NO: 289705 - RNA, 23 nt, Human
aacugcucgccggccuacauggg

SEQ ID NO: 289706 - RNA, 32 nt, Human
aacugcucucagagaaaguagcuuugugacau

SEQ ID NO: 289707 - RNA, 32 nt, Human
aacugcucucccucagcugggcuggggucucc

SEQ ID NO: 289708 - RNA, 32 nt, Human
aacugcucuuucuuggugcccuuacugcuccu

SEQ ID NO: 289709 - RNA, 32 nt, Human
aacugcugaaaaagcugggugcagugaaauga

SEQ ID NO: 289710 - RNA, 21 nt, Human
aacugcugaacuaguuccuca

SEQ ID NO: 289711 - RNA, 23 nt, Human
aacugcugacuucaggugaucca

SEQ ID NO: 289712 - RNA, 32 nt, Human
aacugcugcacucuaggaccacccgcaaugga

SEQ ID NO: 289713 - RNA, 18 nt, Human
aacugcugcaggaugccu

SEQ ID NO: 289714 - RNA, 18 nt, Human
aacugcugcccccagaga

SEQ ID NO: 289715 - RNA, 32 nt, Human
aacugcugcccccucccuaccucuacucccca

SEQ ID NO: 289716 - RNA, 32 nt, Human
aacugcugcccucccuuccuucuacuuaacuc

SEQ ID NO: 289717 - RNA, 32 nt, Human
aacugcugcccuuccaagacuugcucccgaga

SEQ ID NO: 289718 - RNA, 32 nt, Human
aacugcugcugaggcuccuguuaaauuuucug

SEQ ID NO: 289719 - RNA, 32 nt, Human
aacugcugcuguugcuuucuacauacaccuua

SEQ ID NO: 289720 - RNA, 32 nt, Human
aacugcuggaacccaacucuuuuuauuaauau

SEQ ID NO: 289721 - RNA, 32 nt, Human
aacugcuggagggugaggagauccggcugugu

SEQ ID NO: 289722 - RNA, 32 nt, Human
aacugcuggagugcaguggcaugaugucggcu

SEQ ID NO: 289723 - RNA, 32 nt, Human
aacugcuggcuggccaagcacgcgcuggaaaa

SEQ ID NO: 289724 - RNA, 32 nt, Human
aacugcugggauuacaggcacgcgccaccacg

SEQ ID NO: 289725 - RNA, 32 nt, Human
aacugcugggauuacaggcgugaaccacugca

SEQ ID NO: 289726 - RNA, 32 nt, Human
aacugcugggauuacaggcgugagccaccaca

SEQ ID NO: 289727 - RNA, 32 nt, Human
aacugcugggauuacaggcgugagccaccgca

SEQ ID NO: 289728 - RNA, 32 nt, Human
aacugcugggauuacaggcgugagccaccgcg

SEQ ID NO: 289729 - RNA, 32 nt, Human
aacugcugggauuacaggcgugagccacucug

SEQ ID NO: 289730 - RNA, 32 nt, Human
aacugcugggauuacaggcgugugccaccaug

SEQ ID NO: 289731 - RNA, 32 nt, Human
aacugcugggauuacaggugugagccaccaug

SEQ ID NO: 289732 - RNA, 32 nt, Human
aacugcugggauuacaggugugagccaccgug

SEQ ID NO: 289733 - RNA, 32 nt, Human
aacugcugguggacugaugugguucugggggu

SEQ ID NO: 289734 - RNA, 32 nt, Human
aacugcugguucugcuggugccucugccccug

SEQ ID NO: 289735 - RNA, 32 nt, Human
aacugcuguaggggcaggauggaaaggaugau

SEQ ID NO: 289736 - RNA, 32 nt, Human
aacugcuguauuuaacaucugccugcaaaugg

SEQ ID NO: 289737 - RNA, 32 nt, Human
aacugcugucauggacuauugauuguauugag

SEQ ID NO: 289738 - RNA, 24 nt, Human
aacugcugucgaagaaaaucaggc

SEQ ID NO: 289739 - RNA, 32 nt, Human
aacugcuguucccccaccuccacauaucugca

SEQ ID NO: 289740 - RNA, 32 nt, Human
aacugcuuaucagcuauucagacaucuccaug

SEQ ID NO: 289741 - RNA, 32 nt, Human
aacugcuucauggguaccauaaguacagagaa

SEQ ID NO: 289742 - RNA, 32 nt, Human
aacugcuuccuauccuccuccuggagagccca

SEQ ID NO: 289743 - RNA, 32 nt, Human
aacugcuugcaggggcugggcgugguggcuca

SEQ ID NO: 289744 - RNA, 32 nt, Human
aacugcuugcccagggugcagugugaguguga

SEQ ID NO: 289745 - RNA, 32 nt, Human
aacugcuuuaccuccccuccuacugagucagg

SEQ ID NO: 289746 - RNA, 32 nt, Human
aacugcuuuguauccaugaggguuucauugug

SEQ ID NO: 289747 - RNA, 32 nt, Human
aacugcuuuucaagcaucaugcugcuauuccu

SEQ ID NO: 289748 - RNA, 32 nt, Human
aacugcuuuucugccgugccucucuucccuac

SEQ ID NO: 289749 - RNA, 32 nt, Human
aacuggaacauaguucuccuucaaguguuggc

SEQ ID NO: 289750 - RNA, 32 nt, Human
aacuggaacugugccuuuucucuugucaaggu

SEQ ID NO: 289751 - RNA, 32 nt, Human
aacuggaagaaagagacagagaaggaguguca

SEQ ID NO: 289752 - RNA, 32 nt, Human
aacuggaagacagcucgagauccagaagggaa

SEQ ID NO: 289753 - RNA, 32 nt, Human
aacuggaagcccccucugccucccagcugggg

SEQ ID NO: 289754 - RNA, 32 nt, Human
aacuggaaggagagcuuccagaugggaagcaa

SEQ ID NO: 289755 - RNA, 32 nt, Human
aacuggaaggcagagguugcagugagccaaga

SEQ ID NO: 289756 - RNA, 32 nt, Human
aacuggaaggcagagguugcagugagccgaga

SEQ ID NO: 289757 - RNA, 32 nt, Human
aacuggaaucccagauaugguugcacaaaacc

SEQ ID NO: 289758 - RNA, 32 nt, Human
aacuggaaugagcagcuuuagcaaagaacucu

SEQ ID NO: 289759 - RNA, 32 nt, Human
aacuggaauugcaggucagagcagagcauggc

SEQ ID NO: 289760 - RNA, 32 nt, Human
aacuggacacuggaccggcagcgccaugagac

SEQ ID NO: 289761 - RNA, 32 nt, Human
aacuggacccacccaccacagcccaucacccu

SEQ ID NO: 289762 - RNA, 32 nt, Human
aacuggacuauccaauagguugccaccagcca

SEQ ID NO: 289763 - RNA, 32 nt, Human
aacuggagaaagggaaccacagagccaggagg

SEQ ID NO: 289764 - RNA, 32 nt, Human
aacuggagagucagugcaguccagagaauugu

SEQ ID NO: 289765 - RNA, 32 nt, Human
aacuggagagugaaggcauggagugaagacac

SEQ ID NO: 289766 - RNA, 32 nt, Human
aacuggagcaagaaggaaggaggcagacugau

SEQ ID NO: 289767 - RNA, 32 nt, Human
aacuggagcuccaucuuugcugcuaagaaggc

SEQ ID NO: 289768 - RNA, 32 nt, Human
aacuggagcuccaucuuugcugcuaggaaggc

SEQ ID NO: 289769 - RNA, 32 nt, Human
aacuggaggaagaaauaugaagccuuagcggc

SEQ ID NO: 289770 - RNA, 32 nt, Human
aacuggaggagugggcugcaagacugagccua

SEQ ID NO: 289771 - RNA, 32 nt, Human
aacuggaggauaagcaggaccagaugauacca

SEQ ID NO: 289772 - RNA, 32 nt, Human
aacuggaggcaagucaagucaccuguggccug

SEQ ID NO: 289773 - RNA, 32 nt, Human
aagaucacaccacugcacuccagccagggcaa

SEQ ID NO: 289774 - RNA, 32 nt, Human
aagaucacaccacugcacuccagccuaggcaa

SEQ ID NO: 289775 - RNA, 32 nt, Human
aagaucacaccacugcacuccagccuggcaac

SEQ ID NO: 289776 - RNA, 32 nt, Human
aagaucacaccacugcacuccagccugggcaa

SEQ ID NO: 289777 - RNA, 32 nt, Human
aagaucacaccacugcacuccagccugggcga

SEQ ID NO: 289778 - RNA, 32 nt, Human
aagaucacaccacugcacuccagccuggguga

SEQ ID NO: 289779 - RNA, 32 nt, Human
aagaucacaccacugcacuccagccuuggcga

SEQ ID NO: 289780 - RNA, 32 nt, Human
aagaucacaccacugcgcucuagccugggcaa

SEQ ID NO: 289781 - RNA, 32 nt, Human
aagaucacaccacuggcacuccagccugggca

SEQ ID NO: 289782 - RNA, 32 nt, Human
aagaucacaccacuguaccacagccugagcaa

SEQ ID NO: 289783 - RNA, 32 nt, Human
aagaucacaccagugcacuccagccugggcga

SEQ ID NO: 289784 - RNA, 32 nt, Human
aagaucacaccauugcacuccagccuagauaa

SEQ ID NO: 289785 - RNA, 32 nt, Human
aagaucacaccauugcacuccagccuaggcau

SEQ ID NO: 289786 - RNA, 32 nt, Human
aagaucacaccauugcacuccagccugagcaa

SEQ ID NO: 289787 - RNA, 32 nt, Human
aagaucacaccauugcacuccagccugggaaa

SEQ ID NO: 289788 - RNA, 32 nt, Human
aagaucacaccauugcacuccagccugggcaa

SEQ ID NO: 289789 - RNA, 32 nt, Human
aagaucacaccauugcacuccagccugggcga

SEQ ID NO: 289790 - RNA, 32 nt, Human
aagaucacaccgcugcacucaagccuggguga

SEQ ID NO: 289791 - RNA, 32 nt, Human
aagaucacacuacugcacuccagccugggcaa

SEQ ID NO: 289792 - RNA, 32 nt, Human
aagaucacacuauugcacuccagccugggcga

SEQ ID NO: 289793 - RNA, 32 nt, Human
aagaucacagcacugcacugcugccugggcga

SEQ ID NO: 289794 - RNA, 32 nt, Human
aagaucacaucacugcacuccagccuggguaa

SEQ ID NO: 289795 - RNA, 32 nt, Human
aagaucaccacacauaccuugguucugauggc

SEQ ID NO: 289796 - RNA, 32 nt, Human
aagaucaccccauacuccagccucuuuccucc

SEQ ID NO: 289797 - RNA, 32 nt, Human
aagaucacgacacugcacuccagccugggcaa

SEQ ID NO: 289798 - RNA, 32 nt, Human
aagaucacgccacuacacuccagccugggcga

SEQ ID NO: 289799 - RNA, 32 nt, Human
aagaucacgccacugaacuccagccugggaga

SEQ ID NO: 289800 - RNA, 32 nt, Human
aagaucacgccacugcacuacagccuggacga

SEQ ID NO: 289801 - RNA, 32 nt, Human
aagaucacgccacugcacuccagcacccuggg

SEQ ID NO: 289802 - RNA, 32 nt, Human
aagaucacgccacugcacuccagccucgguga

SEQ ID NO: 289803 - RNA, 32 nt, Human
aagaucacgccacugcacuccagccugaguga

SEQ ID NO: 289804 - RNA, 32 nt, Human
aagaucacgccacugcacuccagccugcggac

SEQ ID NO: 289805 - RNA, 32 nt, Human
aagaucacgccacugcacuccagccuggacaa

SEQ ID NO: 289806 - RNA, 32 nt, Human
aagaucacgccacugcacuccagccugggcaa

SEQ ID NO: 289807 - RNA, 32 nt, Human
aagaucacgccacugcacuccagccugggcca

SEQ ID NO: 289808 - RNA, 32 nt, Human
aagaucacgccacugcacuccagccugggcga

SEQ ID NO: 289809 - RNA, 32 nt, Human
aagaucacgccacugcacuccagccuggguga

SEQ ID NO: 289810 - RNA, 32 nt, Human
aagaucacgccacugcacuccagccuggugac

SEQ ID NO: 289811 - RNA, 32 nt, Human
aagaucacgccacugcacucuagccugggcaa

SEQ ID NO: 289812 - RNA, 32 nt, Human
aagaucacgccacugcauuacagccuggugca

SEQ ID NO: 289813 - RNA, 32 nt, Human
aagaucacgccacugcauuccagccuggugac

SEQ ID NO: 289814 - RNA, 32 nt, Human
aagaucacgccacuguacuccagccuggauga

SEQ ID NO: 289815 - RNA, 32 nt, Human
aagaucacgccauuacacuccagccuggcuga

SEQ ID NO: 289816 - RNA, 32 nt, Human
aagaucacgccauugcacuccagccuaggcaa

SEQ ID NO: 289817 - RNA, 32 nt, Human
aagaucacgccauugcacuccagccugggcaa

SEQ ID NO: 289818 - RNA, 32 nt, Human
aagaucacgccauugcacuccagccuggggga

SEQ ID NO: 289819 - RNA, 32 nt, Human
aagaucacgccauugcacuccagccuggguga

SEQ ID NO: 289820 - RNA, 32 nt, Human
aagaucacgccauuguacuccagccuggcaac

SEQ ID NO: 289821 - RNA, 32 nt, Human
aagaucacgucacuguacuccagccuggguga

SEQ ID NO: 289822 - RNA, 32 nt, Human
aagaucacgucauugcacuccagccuggucaa

SEQ ID NO: 289823 - RNA, 32 nt, Human
aagaucacguucagaagaauggaaggaaagcu

SEQ ID NO: 289824 - RNA, 32 nt, Human
aagaucacuccacugcacuccagccugggcga

SEQ ID NO: 289825 - RNA, 32 nt, Human
aagaucacucccaauuuuucuacuuuccucau

SEQ ID NO: 289826 - RNA, 32 nt, Human
aagaucacuggagccugggaggcagagguugc

SEQ ID NO: 289827 - RNA, 32 nt, Human
aagaucacuuuccuucacugugcugagaauuu

SEQ ID NO: 289828 - RNA, 32 nt, Human
aagaucagaacaguuguccucacuuuuguucu

SEQ ID NO: 289829 - RNA, 32 nt, Human
aagaucagaccacugcccuccagccugggcaa

SEQ ID NO: 289830 - RNA, 32 nt, Human
aagaucagcacauuugguggcugaugcuguuc

SEQ ID NO: 289831 - RNA, 32 nt, Human
aagaucagccuggccaacauaaggagaccuaa

SEQ ID NO: 289832 - RNA, 32 nt, Human
aagaucagccugggaaacauagugagaccccg

SEQ ID NO: 289833 - RNA, 32 nt, Human
aagaucagccugggcaacauagugagaccucc

SEQ ID NO: 289834 - RNA, 32 nt, Human
aagaucagccugggcaguauagcaagacccca

SEQ ID NO: 289835 - RNA, 32 nt, Human
aagaucaggaggaggaggaagaagaggaaaaa

SEQ ID NO: 289836 - RNA, 18 nt, Human
aagaucaggcaacuuggc

SEQ ID NO: 289837 - RNA, 32 nt, Human
aagaucagggcugaggguaaggaaaagaagag

SEQ ID NO: 289838 - RNA, 32 nt, Human
aagaucagguacugugucagcauugauuucuu

SEQ ID NO: 289839 - RNA, 32 nt, Human
aagaucauaccacggcacuccagccuggguga

SEQ ID NO: 289840 - RNA, 32 nt, Human
aagaucauaccacugcacugcagccugaguga

SEQ ID NO: 289841 - RNA, 32 nt, Human
aagaucauaccauugcacuccagccugggcaa

SEQ ID NO: 289842 - RNA, 32 nt, Human
aagaucauacuacugcacuccagccugggcga

SEQ ID NO: 289843 - RNA, 32 nt, Human
aagaucauaggcuaggaaguggcagagccagg

SEQ ID NO: 289844 - RNA, 32 nt, Human
aagaucauaucacugcacuccagccuggcuga

SEQ ID NO: 289845 - RNA, 32 nt, Human
aagaucauauguccuagcacuuuugggggccg

SEQ ID NO: 289846 - RNA, 32 nt, Human
aagaucauauucuuccuccuguacaugaugua

SEQ ID NO: 289847 - RNA, 32 nt, Human
aagaucaugcagcugcuguuccugccucuaaa

SEQ ID NO: 289848 - RNA, 32 nt, Human
aagaucaugccacaucacuccagccugggcaa

SEQ ID NO: 289849 - RNA, 32 nt, Human
aagaucaugccacuccacuccagucugggcga

SEQ ID NO: 289850 - RNA, 32 nt, Human
aagaucaugccacugaacuccagccuggguga

SEQ ID NO: 289851 - RNA, 32 nt, Human
aagaucaugccacugcaccccagccugggcaa

SEQ ID NO: 289852 - RNA, 32 nt, Human
aagaucaugccacugcacuccagccugggcaa

SEQ ID NO: 289853 - RNA, 32 nt, Human
aagaucaugccacugcacuccagccugggcga

SEQ ID NO: 289854 - RNA, 32 nt, Human
aagaucaugccacugcacuccagccugggcgg

SEQ ID NO: 289855 - RNA, 32 nt, Human
aagaucaugccacugcacuccagccuggguga

SEQ ID NO: 289856 - RNA, 32 nt, Human
aagaucaugccacuggacuccagccuggguga

SEQ ID NO: 289857 - RNA, 32 nt, Human
aagaucaugccauuauacuccagccuggguga

SEQ ID NO: 289858 - RNA, 32 nt, Human
aagaucaugccauugcacuccagccugggcaa

SEQ ID NO: 289859 - RNA, 32 nt, Human
aagaucaugccauugcacuccagccugggcga

SEQ ID NO: 289860 - RNA, 32 nt, Human
aagaucaugccauugcacuccagccuggguga

SEQ ID NO: 289861 - RNA, 32 nt, Human
aagaucaugccuacugcacuccagccugggca

SEQ ID NO: 289862 - RNA, 32 nt, Human
aagaucaugcuacugcacuccagccuggguga

SEQ ID NO: 289863 - RNA, 32 nt, Human
aagaucauugagcucaggaguuugaaaccagu

SEQ ID NO: 289864 - RNA, 32 nt, Human
aagaucauuugagcccaggaggcugaggcugc

SEQ ID NO: 289865 - RNA, 32 nt, Human
aagauccacacacauccucaccccacagaaac

SEQ ID NO: 289866 - RNA, 32 nt, Human
aagauccacagcuuuuccuccaugucuguuac

SEQ ID NO: 289867 - RNA, 32 nt, Human
aagauccacuggcuuggaauucucccugccag

SEQ ID NO: 289868 - RNA, 31 nt, Human
aagauccagagagugggggugaggggugggc

SEQ ID NO: 289869 - RNA, 32 nt, Human
aagauccaggggcuggagcccaaugccaagcc

SEQ ID NO: 289870 - RNA, 32 nt, Human
aagaucccacacccgacaugacauaaauaaaa

SEQ ID NO: 289871 - RNA, 32 nt, Human
aagaucccagggucaggagagaccccucugua

SEQ ID NO: 289872 - RNA, 32 nt, Human
aagaucccagugcuugcccugccugccaggaa

SEQ ID NO: 289873 - RNA, 32 nt, Human
aagauccccaggggacugggugcaguggcuca

SEQ ID NO: 289874 - RNA, 32 nt, Human
aagaucccgaaaggaggaagagguggcgaaaa

SEQ ID NO: 289875 - RNA, 32 nt, Human
aagauccucacagcacgggagcagggagaggc

SEQ ID NO: 289876 - RNA, 32 nt, Human
aagauccuccacugcugcucugcugccugccc

SEQ ID NO: 289877 - RNA, 32 nt, Human
aagauccugaaggaauggguauucuugaaggc

SEQ ID NO: 289878 - RNA, 18 nt, Human
aagauccugagaacuugg

SEQ ID NO: 289879 - RNA, 32 nt, Human
aagauccugccacugcacuccagccugggcaa

SEQ ID NO: 289880 - RNA, 32 nt, Human
aagauccugccucugcugaguguaccugacag

SEQ ID NO: 289881 - RNA, 32 nt, Human
aagauccugggacagcuggaacaggcauggcc

SEQ ID NO: 289882 - RNA, 32 nt, Human
aagauccuugguguguaguucagucuugcagu

SEQ ID NO: 289883 - RNA, 32 nt, Human
aagaucgagccacugcacuccagccugggcag

SEQ ID NO: 289884 - RNA, 32 nt, Human
aagaucgagccauugcacuccagccugggcaa

SEQ ID NO: 289885 - RNA, 32 nt, Human
aagaucgcaacacugcccuccagccugggcaa

SEQ ID NO: 289886 - RNA, 32 nt, Human
aagaucgcaacauugcacuccaggcugggcag

SEQ ID NO: 289887 - RNA, 32 nt, Human
aagaucgcaccacugaacuccagccugggcga

SEQ ID NO: 289888 - RNA, 32 nt, Human
aagaucgcaccacugcaccccagccugggcaa

SEQ ID NO: 289889 - RNA, 32 nt, Human
aagaucgcaccacugcaccccagcgugggcaa

SEQ ID NO: 289890 - RNA, 32 nt, Human
aagaucgcaccacugcacgcacuccagccugg

SEQ ID NO: 289891 - RNA, 32 nt, Human
aagaucgcaccacugcacuacagccugggcga

SEQ ID NO: 289892 - RNA, 32 nt, Human
aagaucgcaccacugcacucaagccugggcga

SEQ ID NO: 289893 - RNA, 32 nt, Human
aagaucgcaccacugcacuccaaccugggcaa

SEQ ID NO: 289894 - RNA, 32 nt, Human
aagaucgcaccacugcacuccagccuggaaga

SEQ ID NO: 289895 - RNA, 32 nt, Human
aagaucgcaccacugcacuccagccugggaga

SEQ ID NO: 289896 - RNA, 32 nt, Human
aagaucgcaccacugcacuccagccugggcaa

SEQ ID NO: 289897 - RNA, 32 nt, Human
aagaucgcaccacugcacuccagccugggcga

SEQ ID NO: 289898 - RNA, 32 nt, Human
aagaucgcaccacugcacuccagccuggguga

SEQ ID NO: 289899 - RNA, 32 nt, Human
aagaucgcaccacugcacuccagccuggucga

SEQ ID NO: 289900 - RNA, 32 nt, Human
aagaucgcaccacugcauuccagccuaagcaa

SEQ ID NO: 289901 - RNA, 32 nt, Human
aagaucgcaccacugcucuccagccuggcgac

SEQ ID NO: 289902 - RNA, 32 nt, Human
aagaucgcaccacuguacuccagccugggcaa

SEQ ID NO: 289903 - RNA, 32 nt, Human
aagaucgcaccacuugcacugcagccugagag

SEQ ID NO: 289904 - RNA, 32 nt, Human
aagaucgcaccauugcacuccagccuaggcaa

SEQ ID NO: 289905 - RNA, 32 nt, Human
aagaucgcaccauugcacuccagccuggauga

SEQ ID NO: 289906 - RNA, 32 nt, Human
aagaucgcaccauugcacuccagccugggcaa

SEQ ID NO: 289907 - RNA, 32 nt, Human
aagaucgcaccauugcacuccagccugugcaa

SEQ ID NO: 289908 - RNA, 32 nt, Human
aagaucgcaccauugcacuccagcugggagac

SEQ ID NO: 289909 - RNA, 32 nt, Human
aagaucgcaccauuguacuccagccugggcaa

SEQ ID NO: 289910 - RNA, 32 nt, Human
aagaucgcaccgcugcacuccagccuggguga

SEQ ID NO: 289911 - RNA, 32 nt, Human
aagaucgcacuacugcacuccagccuggguga

SEQ ID NO: 289912 - RNA, 32 nt, Human
aagaucgcagaucauaaagcaagcucugcuuu

SEQ ID NO: 289913 - RNA, 32 nt, Human
aagaucgcaguggacugugugauugaccugac

SEQ ID NO: 289914 - RNA, 32 nt, Human
aagaucgcccacugcacuccagguugggcuac

SEQ ID NO: 289915 - RNA, 32 nt, Human
aagaucgccccacugcacuccagccuggcaau

SEQ ID NO: 289916 - RNA, 32 nt, Human
aagaucgccccacugcacuccagccugggcga

SEQ ID NO: 289917 - RNA, 32 nt, Human
aagaucgcccugcugcacuccagccugggcaa

SEQ ID NO: 289918 - RNA, 32 nt, Human
aagaucgcgccacugcacuccacccuggguaa

SEQ ID NO: 289919 - RNA, 32 nt, Human
aagaucgcgccacugcacuccagccucagcaa

SEQ ID NO: 289920 - RNA, 32 nt, Human
aagaucgcgccacugcacuccagccucggcaa

SEQ ID NO: 289921 - RNA, 32 nt, Human
aagaucgcgccacugcacuccagccuggcgac

SEQ ID NO: 289922 - RNA, 32 nt, Human
aagaucgcgccacugcacuccagccugggcaa

SEQ ID NO: 289923 - RNA, 32 nt, Human
aagaucgcgccacugcacuccagccugggcga

SEQ ID NO: 289924 - RNA, 32 nt, Human
aagaucgcgccacugcacuccagccuggguga

SEQ ID NO: 289925 - RNA, 32 nt, Human
aagaucgcgccacugcacuccagccuggugac

SEQ ID NO: 289926 - RNA, 32 nt, Human
aagaucgcgccacugcacuccagucugggcaa

SEQ ID NO: 289927 - RNA, 32 nt, Human
aagaucgcgccacugcacuccggccugaugac

SEQ ID NO: 289928 - RNA, 32 nt, Human
aagaucgcgccacugcaguccagccugggcaa

SEQ ID NO: 289929 - RNA, 32 nt, Human
aagaucgcgccacuguacuccagccuggacaa

SEQ ID NO: 289930 - RNA, 32 nt, Human
aagaucgcgccacuguacuccagccugggcaa

SEQ ID NO: 289931 - RNA, 32 nt, Human
aagaucgcgccaucgcacuccagccugggcaa

SEQ ID NO: 289932 - RNA, 32 nt, Human
aagaucgcgccauucuacuccagccugggcca

SEQ ID NO: 289933 - RNA, 32 nt, Human
aagaucgcgccauugcacuccaaccuggacga

SEQ ID NO: 289934 - RNA, 32 nt, Human
aagaucgcgccauugcacuccagccuggacaa

SEQ ID NO: 289935 - RNA, 32 nt, Human
aagaucgcgccauugcacuccagccugggcaa

SEQ ID NO: 289936 - RNA, 32 nt, Human
aagaucgcgccauugcacuccagccugggcgg

SEQ ID NO: 289937 - RNA, 32 nt, Human
aagaucgcgccauugcacuccagccuggggga

SEQ ID NO: 289938 - RNA, 32 nt, Human
aagaucgcgccccugcacuccagccuggguga

SEQ ID NO: 289939 - RNA, 32 nt, Human
aagaucgcgccguugcacuccagccugggcaa

SEQ ID NO: 289940 - RNA, 32 nt, Human
aagaucgcgcuacugcacuccagccugggcga

SEQ ID NO: 289941 - RNA, 32 nt, Human
aagaucgcgcuauugcacuccagccuggguga

SEQ ID NO: 289942 - RNA, 32 nt, Human
aagaucgcggcgcugcacucuagccuggguga

SEQ ID NO: 289943 - RNA, 32 nt, Human
aagaucgcuccauugcacuccagccuggguga

SEQ ID NO: 289944 - RNA, 32 nt, Human
aagaucgcucccacugcacuccagccugggcg

SEQ ID NO: 289945 - RNA, 32 nt, Human
aagaucgcuugagcccaggaggcugaggcugc

SEQ ID NO: 289946 - RNA, 32 nt, Human
aagaucgggccacugcacuccagcuuggguga

SEQ ID NO: 289947 - RNA, 32 nt, Human
aagaucgggccgcugcacuccagccuggggga

SEQ ID NO: 289948 - RNA, 32 nt, Human
aagaucguaccacugcacuccagccugggcga

SEQ ID NO: 289949 - RNA, 32 nt, Human
aagaucguaccacugcacuccagccuggguga

SEQ ID NO: 289950 - RNA, 32 nt, Human
aagaucguaccacugcacuccagucugggcga

SEQ ID NO: 289951 - RNA, 32 nt, Human
aagaucguaccacugcacucuggccugggcaa

SEQ ID NO: 289952 - RNA, 32 nt, Human
aagaucguaccgcugcacuccagccuggguga

SEQ ID NO: 289953 - RNA, 32 nt, Human
aagaucguauuuucaccugucuucauuacuuu

SEQ ID NO: 289954 - RNA, 32 nt, Human
aagaucgugacacugcacuccagccugggcga

SEQ ID NO: 289955 - RNA, 32 nt, Human
aagaucgugcaacugcacuccagccugggcaa

SEQ ID NO: 289956 - RNA, 32 nt, Human
aagaucgugccaaugcacuccauccugggcaa

SEQ ID NO: 289957 - RNA, 32 nt, Human
aagaucgugccacuacacuccagccugggcaa

SEQ ID NO: 289958 - RNA, 32 nt, Human
aagaucgugccacuacacuccagccuggggga

SEQ ID NO: 289959 - RNA, 32 nt, Human
aagaucgugccacugcacaccauccuggauga

SEQ ID NO: 289960 - RNA, 32 nt, Human
aagaucgugccacugcaccguagccuggguga

SEQ ID NO: 289961 - RNA, 32 nt, Human
aagaucgugccacugcacuccagacuggggga

SEQ ID NO: 289962 - RNA, 32 nt, Human
aagaucgugccacugcacuccagcccaggcaa

SEQ ID NO: 289963 - RNA, 32 nt, Human
aagaucgugccacugcacuccagccuggacaa

SEQ ID NO: 289964 - RNA, 32 nt, Human
aagaucgugccacugcacuccagccuggcgac

SEQ ID NO: 289965 - RNA, 32 nt, Human
aagaucgugccacugcacuccagccugggaga

SEQ ID NO: 289966 - RNA, 32 nt, Human
aagaucgugccacugcacuccagccugggcga

SEQ ID NO: 289967 - RNA, 32 nt, Human
aagaucgugccacugcacuccagccugggcua

SEQ ID NO: 289968 - RNA, 32 nt, Human
aagaucgugccacugcacuccagccuggggaa

SEQ ID NO: 289969 - RNA, 32 nt, Human
aagaucgugccacugcacuccagccuggguga

SEQ ID NO: 289970 - RNA, 32 nt, Human
aagaucgugccacugcacuccagccugguuga

SEQ ID NO: 289971 - RNA, 32 nt, Human
aagaucgugccacugcacuccagccuugagac

SEQ ID NO: 289972 - RNA, 32 nt, Human
aagaucgugccacugcacuccagccuugguga

SEQ ID NO: 289973 - RNA, 32 nt, Human
aagaucgugccacugcacuccagucuggguga

SEQ ID NO: 289974 - RNA, 32 nt, Human
aagaucgugccacugcacuccggccuggguga

SEQ ID NO: 289975 - RNA, 32 nt, Human
aagaucgugccacugcacucuagccugggcga

SEQ ID NO: 289976 - RNA, 32 nt, Human
aagaucgugccacugcacucuagccuggguga

SEQ ID NO: 289977 - RNA, 32 nt, Human
aagaucgugccacugcacucuauccuggguaa

SEQ ID NO: 289978 - RNA, 32 nt, Human
aagaucgugccacugcacuucagccuggguga

SEQ ID NO: 289979 - RNA, 32 nt, Human
aagaucgugccacugcauuccagccugggcga

SEQ ID NO: 289980 - RNA, 32 nt, Human
aagaucgugccacugcauuccagccugguuga

SEQ ID NO: 289981 - RNA, 32 nt, Human
aagaucgugccacuucacuccagccugggcaa

SEQ ID NO: 289982 - RNA, 32 nt, Human
aagaucgugccagugcacuccagccuggguga

SEQ ID NO: 289983 - RNA, 32 nt, Human
aagaucgugccauuccacuccagccugagcaa

SEQ ID NO: 289984 - RNA, 32 nt, Human
aagaucgugccauuccacuccagccugggcaa

SEQ ID NO: 289985 - RNA, 32 nt, Human
aagaucgugccauugcacuccagccuaggcaa

SEQ ID NO: 289986 - RNA, 32 nt, Human
aagaucgugccauugcacuccagccuggcgac

SEQ ID NO: 289987 - RNA, 32 nt, Human
aagaucgugccauugcacuccagccugggcaa

SEQ ID NO: 289988 - RNA, 32 nt, Human
aagaucgugccauugcacuccagccuggguga

SEQ ID NO: 289989 - RNA, 32 nt, Human
aagaucgugccguugcacuccagccugggcaa

SEQ ID NO: 289990 - RNA, 32 nt, Human
aagaucgugccucugcacuccaaccuggguga

SEQ ID NO: 289991 - RNA, 32 nt, Human
aagaucgugucacugcacuccagccuggugac

SEQ ID NO: 289992 - RNA, 32 nt, Human
aagaucuaagaacuagagucacccuaaauccu

SEQ ID NO: 289993 - RNA, 32 nt, Human
aagaucuaauuuccccacccuacuuuugacuc

SEQ ID NO: 289994 - RNA, 32 nt, Human
aagaucuagccccauugacucuucuagaaaug

SEQ ID NO: 289995 - RNA, 32 nt, Human
aagaucuauguuuauaaaccagcacuuggcca

SEQ ID NO: 289996 - RNA, 32 nt, Human
aagaucucaaagcuaaagugccaauuuuuacu

SEQ ID NO: 289997 - RNA, 32 nt, Human
aagaucucaccacugaacuccagccugggcga

SEQ ID NO: 289998 - RNA, 32 nt, Human
aagaucucacucuauugcucaggcuggagugu

SEQ ID NO: 289999 - RNA, 32 nt, Human
aagaucucagucuucuuuccaccaaugacccc

SEQ ID NO: 290000 - RNA, 32 nt, Human
aagaucucauagggcaggugcaaaauaggaau

SEQ ID NO: 290001 - RNA, 32 nt, Human
aagaucuccguggagaaugaaaggcacagucg

SEQ ID NO: 290002 - RNA, 32 nt, Human
aagaucucgccacugcacuccaggcugggcga

SEQ ID NO: 290003 - RNA, 32 nt, Human
aagaucucuaaaucugaauuuacgcucuguag

SEQ ID NO: 290004 - RNA, 32 nt, Human
aagaucucuaaggucacaugcuuuuaaaauag

SEQ ID NO: 290005 - RNA, 32 nt, Human
aagaucucugcucaauguccauacaaggagga

SEQ ID NO: 290006 - RNA, 22 nt, Human
aagaucugaaagaaauggcaua

SEQ ID NO: 290007 - RNA, 32 nt, Human
aagaucugaauagacauuucucaaaagaagac

SEQ ID NO: 290008 - RNA, 32 nt, Human
aagaucugaaucuaagaaggaauuaccuuuga

SEQ ID NO: 290009 - RNA, 32 nt, Human
aagaucugaggcucuggugcucagggggaugg

SEQ ID NO: 290010 - RNA, 32 nt, Human
aagaucugcagccucagagccucugggagguc

SEQ ID NO: 290011 - RNA, 32 nt, Human
aagaucugccuccccaccgccuuuucucacuc

SEQ ID NO: 290012 - RNA, 32 nt, Human
aagaucuggccucuguccugugcccacuuuag

SEQ ID NO: 290013 - RNA, 32 nt, Human
aagaucugggcucuagugggaaaccucaggua

SEQ ID NO: 290014 - RNA, 32 nt, Human
aagaucuguccucaguguuggcaggagccguc

SEQ ID NO: 290015 - RNA, 32 nt, Human
aagaucugugacucugaaauauccuccaaaag

SEQ ID NO: 290016 - RNA, 32 nt, Human
aagaucugugcagccccgccuccaggccacau

SEQ ID NO: 290017 - RNA, 32 nt, Human
aagaucuuaccuuuuucuaucuuguuacucug

SEQ ID NO: 290018 - RNA, 32 nt, Human
aagaucuucccauccagcugucuuguagcugc

SEQ ID NO: 290019 - RNA, 32 nt, Human
aagaucuucuguacuucugucuuccauaggac

SEQ ID NO: 290020 - RNA, 32 nt, Human
aagaucuugaaccugacaaagaggaggagcug

SEQ ID NO: 290021 - RNA, 32 nt, Human
aagaucuugagagcugcugagggaccuuggag

SEQ ID NO: 290022 - RNA, 32 nt, Human
aagaucuugccacuguacuccagccugaagag

SEQ ID NO: 290023 - RNA, 32 nt, Human
aagaucuuugacauagguucuucuauagugau

SEQ ID NO: 290024 - RNA, 17 nt, Human
aagaugaaaaacauggc

SEQ ID NO: 290025 - RNA, 32 nt, Human
aagaugaaaucagcuauuacaccugcuguaca

SEQ ID NO: 290026 - RNA, 18 nt, Human
aagaugaaccaacuuagu

SEQ ID NO: 290027 - RNA, 19 nt, Human
aagaugaacuguauuuugc

SEQ ID NO: 290028 - RNA, 17 nt, Human
aagaugaagaagcuggc

SEQ ID NO: 290029 - RNA, 21 nt, Human
aagaugaagacaaaauuuggc

SEQ ID NO: 290030 - RNA, 32 nt, Human
aagaugaagaggaggaagagggagaagggaga

SEQ ID NO: 290031 - RNA, 32 nt, Human
aagaugaagauauucaaacagaaagaauaaga

SEQ ID NO: 290032 - RNA, 32 nt, Human
aagaugaagaugugggagaggagcagccccca

SEQ ID NO: 290033 - RNA, 32 nt, Human
aagaugaagcuauuccagguugagggauuuuu

SEQ ID NO: 290034 - RNA, 19 nt, Human
aagaugaaguggagcuggc

SEQ ID NO: 290035 - RNA, 32 nt, Human
aagaugaaguuaaacuccucuacuuaugugcc

SEQ ID NO: 290036 - RNA, 19 nt, Human
aagaugaauaaaacuuagc

SEQ ID NO: 290037 - RNA, 32 nt, Human
aagaugaaucaugcuaagaacacuucugcuuu

SEQ ID NO: 290038 - RNA, 32 nt, Human
aagaugaaugggagggagagauuugaguccaa

SEQ ID NO: 290039 - RNA, 17 nt, Human
aagaugaauggucuggc

SEQ ID NO: 290040 - RNA, 18 nt, Human
aagaugaauuccuauggc

SEQ ID NO: 290041 - RNA, 32 nt, Human
aagaugaauuugagaaaaauugaaagaaauua

SEQ ID NO: 290042 - RNA, 32 nt, Human
aagaugacacaacugcacuccagcuugggcaa

SEQ ID NO: 290043 - RNA, 32 nt, Human
aagaugacacaguugccuucucuccgaggaac

SEQ ID NO: 290044 - RNA, 23 nt, Human
aagaugacacugugggcgaucca

SEQ ID NO: 290045 - RNA, 32 nt, Human
aagaugacaggagauggagaagcaccagcuga

SEQ ID NO: 290046 - RNA, 32 nt, Human
aagaugacccaacuugaaauaaaaccugaaga

SEQ ID NO: 290047 - RNA, 28 nt, Human
aagaugacuauggagaagcagaaggaca

SEQ ID NO: 290048 - RNA, 32 nt, Human
aagaugacucacuaccaccauguccaaccucc

SEQ ID NO: 290049 - RNA, 32 nt, Human
aagaugacugaggauggagacaagugaguugg

SEQ ID NO: 290050 - RNA, 32 nt, Human
aagaugacuuuggugaaaccccgucucuacua

SEQ ID NO: 290051 - RNA, 18 nt, Human
aagaugagauaaacuggc

SEQ ID NO: 290052 - RNA, 32 nt, Human
aagaugagauuugguugggaacacagccaaac

SEQ ID NO: 290053 - RNA, 32 nt, Human
aagaugagccugggcucauagugagaacccgu

SEQ ID NO: 290054 - RNA, 18 nt, Human
aagaugagcucaccaggc

SEQ ID NO: 290055 - RNA, 32 nt, Human
aagaugagcuggcacucugcaaacuucuuuaa

SEQ ID NO: 290056 - RNA, 32 nt, Human
aagaugagcugggaacaagggaagagagagca

SEQ ID NO: 290057 - RNA, 32 nt, Human
aagaugaggaagagauauuuuuaguauaugaa

SEQ ID NO: 290058 - RNA, 32 nt, Human
aagaugaggacuuugacuggaaccugaaagcu

SEQ ID NO: 290059 - RNA, 32 nt, Human
aagaugaggaugaaugugauguuuauauucug

SEQ ID NO: 290060 - RNA, 28 nt, Human
aagaugaggcuguccccggcgccccuga

SEQ ID NO: 290061 - RNA, 32 nt, Human
aagaugaggcuucugcugcuucuccuaguggc

SEQ ID NO: 290062 - RNA, 32 nt, Human
aagaugagguggggagucuguacugagaugga

SEQ ID NO: 290063 - RNA, 28 nt, Human
aagaugaguaaaagcaaagaugaugcuc

SEQ ID NO: 290064 - RNA, 32 nt, Human
aagaugagucuaauccgcagcacuucgaucac

SEQ ID NO: 290065 - RNA, 20 nt, Human
aagaugagucugacuauggc

SEQ ID NO: 290066 - RNA, 17 nt, Human
aagaugagugagcuggc

SEQ ID NO: 290067 - RNA, 32 nt, Human
aagaugaguuauucuaggggacucauuccagu

SEQ ID NO: 290068 - RNA, 32 nt, Human
aagaugaguucucuguaagacugugguggagu

SEQ ID NO: 290069 - RNA, 31 nt, Human
aagaugauaacagcccuuugccaaagcagac

SEQ ID NO: 290070 - RNA, 32 nt, Human
aagaugauaccugaagcugucaccucuugauu

SEQ ID NO: 290071 - RNA, 32 nt, Human
aagaugauccugcugcugaugauaccagugcu

SEQ ID NO: 290072 - RNA, 32 nt, Human
aagaugaugaacaccaguaugucagacaauga

SEQ ID NO: 290073 - RNA, 17 nt, Human
aagaugaugaacuuagg

SEQ ID NO: 290074 - RNA, 32 nt, Human
aagaugaugacugcacugccaucgugggcaga

SEQ ID NO: 290075 - RNA, 32 nt, Human
aagaugaugaggauaccagagaggcauugguc

SEQ ID NO: 290076 - RNA, 32 nt, Human
aagaugaugaugaugaugaagaggaggaagga

SEQ ID NO: 290077 - RNA, 32 nt, Human
aagaugaugccacugcacuccagccugggcua

SEQ ID NO: 290078 - RNA, 32 nt, Human
aagaugaugccauugcacuccagccugggcaa

SEQ ID NO: 290079 - RNA, 32 nt, Human
aagaugauguuaucuacugaacuccggguuau

SEQ ID NO: 290080 - RNA, 32 nt, Human
aagaugauguuuccagauuacacuccagccug

SEQ ID NO: 290081 - RNA, 32 nt, Human
aagaugauuucccauucacugcagucaucuga

SEQ ID NO: 290082 - RNA, 32 nt, Human
aagaugcaagaacaggaggagaagaugcggag

SEQ ID NO: 290083 - RNA, 32 nt, Human
aagaugcacaacacuccuccagucuugugggg

SEQ ID NO: 290084 - RNA, 32 nt, Human
aagaugcaccacugcaccccagccugggcgac

SEQ ID NO: 290085 - RNA, 32 nt, Human
aagaugcacugcaccccagccugggcgacaga

SEQ ID NO: 290086 - RNA, 23 nt, Human
aagaugcagauuacaggugugag

SEQ ID NO: 290087 - RNA, 32 nt, Human
aagaugcagcauuggccgagugcaguggcuca

SEQ ID NO: 290088 - RNA, 32 nt, Human
aagaugcaggaacaccaggagcaccuggaagc

SEQ ID NO: 290089 - RNA, 27 nt, Human
aagaugcaggagagaggaagccuugca

SEQ ID NO: 290090 - RNA, 28 nt, Human
aagaugcaggccugcauggugccggggc

SEQ ID NO: 290091 - RNA, 32 nt, Human
aagaugcaggggugugguaucccuggguccag

SEQ ID NO: 290092 - RNA, 32 nt, Human
aagaugcagggugguuggggccaggaguuugg

SEQ ID NO: 290093 - RNA, 32 nt, Human
aagaugcaguuccaccucccagauucccuagu

SEQ ID NO: 290094 - RNA, 32 nt, Human
aagaugcauccauguuuccugaugcuuguuuu

SEQ ID NO: 290095 - RNA, 32 nt, Human
aagaugccaauagcucuucacauuauaaacaa

SEQ ID NO: 290096 - RNA, 32 nt, Human
aagaugccaccaccccagaggaugugagccca

SEQ ID NO: 290097 - RNA, 32 nt, Human
aagaugccaggauauuggggcugaggggaguu

SEQ ID NO: 290098 - RNA, 32 nt, Human
aagaugccauugcacuccagccugggcaacag

SEQ ID NO: 290099 - RNA, 32 nt, Human
aagaugccauuuugaccccaguggcagcuucc

SEQ ID NO: 290100 - RNA, 28 nt, Human
aagaugcccaacaacagcacugcucugu

SEQ ID NO: 290101 - RNA, 32 nt, Human
aagaugcccccuucauucaucaguuacuugua

SEQ ID NO: 290102 - RNA, 28 nt, Human
aagaugcccuggcagagcucagaucugg

SEQ ID NO: 290103 - RNA, 32 nt, Human
aagaugccgcacacaaacaaugcaaacggggc

SEQ ID NO: 290104 - RNA, 32 nt, Human
aagaugccugagcauuugaaaaccugaauaua

SEQ ID NO: 290105 - RNA, 32 nt, Human
aagaugccuggaaagguugcaaagggagcaua

SEQ ID NO: 290106 - RNA, 32 nt, Human
aagaugccuuaaauucuaagauuccuuccagc

SEQ ID NO: 290107 - RNA, 32 nt, Human
aagaugccuuucuuccuguuugguucauugua

SEQ ID NO: 290108 - RNA, 32 nt, Human
aagaugcgaugggcaaucaagaggccugaauc

SEQ ID NO: 290109 - RNA, 32 nt, Human
aagaugcggagcugugugcgucucccuagguc

SEQ ID NO: 290110 - RNA, 32 nt, Human
aagaugcuaaaucuugcuuugcuuucaauaaa

SEQ ID NO: 290111 - RNA, 32 nt, Human
aagaugcuggcagauucaacuccuggggaagg

SEQ ID NO: 290112 - RNA, 32 nt, Human
aagaugcuggugaagcaggugcagugaggauc

SEQ ID NO: 290113 - RNA, 32 nt, Human
aagaugcugguuugugugugaacggacacuga

SEQ ID NO: 290114 - RNA, 32 nt, Human
aagaugcugugagccgagauugcgccauugca

SEQ ID NO: 290115 - RNA, 31 nt, Human
aagaugcuuaguaaaagcuguugaaaggaua

SEQ ID NO: 290116 - RNA, 32 nt, Human
aagaugcuugccauacaguagggacucaacca

SEQ ID NO: 290117 - RNA, 32 nt, Human
aagauggaaagccacaggaaggaagcggcacc

SEQ ID NO: 290118 - RNA, 32 nt, Human
aagauggaaggaaggaaggaaaaagaaagaga

SEQ ID NO: 290119 - RNA, 32 nt, Human
aagauggacagagagacaggagaugguccuuu

SEQ ID NO: 290120 - RNA, 32 nt, Human
aagauggacucggccccacauacacauuuuug

SEQ ID NO: 290121 - RNA, 32 nt, Human
aagauggagaagagguacaugaaggggauauu

SEQ ID NO: 290122 - RNA, 32 nt, Human
aagauggagagaagacugcagugagcggagug

SEQ ID NO: 290123 - RNA, 32 nt, Human
aagauggagaggaagaaacgcuaauucagcau

SEQ ID NO: 290124 - RNA, 32 nt, Human
aagauggagaugaaccucuaacacaguggaaa

SEQ ID NO: 290125 - RNA, 32 nt, Human
aagauggagaugccagcuccagugaaggcgag

SEQ ID NO: 290126 - RNA, 32 nt, Human
aagauggagccagcacagcacucauugcaguu

SEQ ID NO: 290127 - RNA, 32 nt, Human
aagauggaggcugaaauuaaagagaaagaucc

SEQ ID NO: 290128 - RNA, 32 nt, Human
aagauggaggggcugguuuccuuccacucucc

SEQ ID NO: 290129 - RNA, 19 nt, Human
aagauggaguuaacuuggc

SEQ ID NO: 290130 - RNA, 32 nt, Human
aagauggauaaucagugaaacuacuuaacaca

SEQ ID NO: 290131 - RNA, 32 nt, Human
aagauggaugcuacagagagagagggggacuu

SEQ ID NO: 290132 - RNA, 32 nt, Human
aagauggaugugaaucuuacauuccuuuucau

SEQ ID NO: 290133 - RNA, 32 nt, Human
aagauggauucucagccccaccagccugaucu

SEQ ID NO: 290134 - RNA, 32 nt, Human
aagauggcaacuuugagagccuuguguugaag

SEQ ID NO: 290135 - RNA, 28 nt, Human
aagauggcaauguugccucccccaggac

SEQ ID NO: 290136 - RNA, 32 nt, Human
aagauggcaccacuacacuccagcccgggcga

SEQ ID NO: 290137 - RNA, 32 nt, Human
aagauggcaccacuacauuucagccugggcga

SEQ ID NO: 290138 - RNA, 32 nt, Human
aagauggcaccacugcacuccagccuagguga

SEQ ID NO: 290139 - RNA, 32 nt, Human
aagauggcaccacugcacuccagccuggguga

SEQ ID NO: 290140 - RNA, 32 nt, Human
aagauggcaccacugcacuccauccuggguga

SEQ ID NO: 290141 - RNA, 32 nt, Human
aagauggcaccauuacacuccagccugggcaa

SEQ ID NO: 290142 - RNA, 28 nt, Human
aagauggcagaagaaguggugguaguag

SEQ ID NO: 290143 - RNA, 28 nt, Human
aagauggcagaggagagcagcuguacca

SEQ ID NO: 290144 - RNA, 28 nt, Human
aagauggcagaggcaccggcuuccccgg

SEQ ID NO: 290145 - RNA, 32 nt, Human
aagauggcaggcaaggguacccuuggccagga

SEQ ID NO: 290146 - RNA, 32 nt, Human
aagauggcauggcuggcguggccacacugcug

SEQ ID NO: 290147 - RNA, 32 nt, Human
aagauggccagccugaaacuguuggccagggc

SEQ ID NO: 290148 - RNA, 28 nt, Human
aagauggcccaggaauuugaggcuacag

SEQ ID NO: 290149 - RNA, 32 nt, Human
aagauggcccugcuccuuuucugcugaacauu

SEQ ID NO: 290150 - RNA, 32 nt, Human
aagauggccuguaaucccagcacuuugggagg

SEQ ID NO: 290151 - RNA, 32 nt, Human
aagauggccuucucccccgacccgaccuccuu

SEQ ID NO: 290152 - RNA, 32 nt, Human
aagauggcgccacuacacuccagccugggcaa

SEQ ID NO: 290153 - RNA, 32 nt, Human
aagauggcgccacuacacuccagccugggcga

SEQ ID NO: 290154 - RNA, 32 nt, Human
aagauggcgccacugcacuccagccuggguga

SEQ ID NO: 290155 - RNA, 32 nt, Human
aagauggcgccacugcacuccagucugggcga

SEQ ID NO: 290156 - RNA, 32 nt, Human
aagauggcgccacugcauuccagccugggcaa

SEQ ID NO: 290157 - RNA, 32 nt, Human
aagauggcgccauugcacuccagccuggguga

SEQ ID NO: 290158 - RNA, 32 nt, Human
aagauggcgggcgggcugcucugaagagaccc

SEQ ID NO: 290159 - RNA, 32 nt, Human
aagauggcgugcacaggacacagcgugggcgg

SEQ ID NO: 290160 - RNA, 32 nt, Human
aagauggcucagcagacaggccagcccagcuc

SEQ ID NO: 290161 - RNA, 32 nt, Human
aagauggcugcugccugcucauggcccucgga

SEQ ID NO: 290162 - RNA, 32 nt, Human
aagauggcugggaagagaggaggaguggcaga

SEQ ID NO: 290163 - RNA, 32 nt, Human
aagauggcuguggagcugggcgugcugcucgu

SEQ ID NO: 290164 - RNA, 32 nt, Human
aagaugggaagaucacuugagcucaggaguau

SEQ ID NO: 290165 - RNA, 32 nt, Human
aagaugggacagcaacaaaaucauggcuuagg

SEQ ID NO: 290166 - RNA, 28 nt, Human
aagaugggaggcaagcucagcaagaaga

SEQ ID NO: 290167 - RNA, 32 nt, Human
aagaugggagucucccuauguugcccaggcug

SEQ ID NO: 290168 - RNA, 32 nt, Human
aagaugggcacccacccccaccaagggaagac

SEQ ID NO: 290169 - RNA, 23 nt, Human
aagaugggcggaucaccugaggu

SEQ ID NO: 290170 - RNA, 32 nt, Human
aagaugggcguucacuccccacggccaccaag

SEQ ID NO: 290171 - RNA, 20 nt, Human
aagauggggagcguuggaga

SEQ ID NO: 290172 - RNA, 32 nt, Human
aagauggggauaauguggaaauggcaguuguc

SEQ ID NO: 290173 - RNA, 32 nt, Human
aagaugggggcuaugacagugauguuacaagg

SEQ ID NO: 290174 - RNA, 32 nt, Human
aagaugggguacuaacaccacccccaccgccc

SEQ ID NO: 290175 - RNA, 32 nt, Human
aagaugggucucaaccccuccccaccacguca

SEQ ID NO: 290176 - RNA, 23 nt, Human
aagauggguggaucaccugaggu

SEQ ID NO: 290177 - RNA, 32 nt, Human
aagauggguucugcauggagccacuccaggga

SEQ ID NO: 290178 - RNA, 32 nt, Human
aagauggguuuauucacugaacucuagugcgg

SEQ ID NO: 290179 - RNA, 32 nt, Human
aagaugguaacguagagaagaauugguucuca

SEQ ID NO: 290180 - RNA, 32 nt, Human
aagaugguacaguucuacaucugcaccugccc

SEQ ID NO: 290181 - RNA, 28 nt, Human
aagauggucgccaagcaaaggauccgua

SEQ ID NO: 290182 - RNA, 32 nt, Human
aagauggucucaagcuccugaccucgugaucc

SEQ ID NO: 290183 - RNA, 32 nt, Human
aagauggucucgaucuccugaccucgugaucc

SEQ ID NO: 290184 - RNA, 32 nt, Human
aagauggucucgaucuccugaccucgugaucu

SEQ ID NO: 290185 - RNA, 32 nt, Human
aagauggucucgaucuccugaccucgugauuc

SEQ ID NO: 290186 - RNA, 32 nt, Human
aagauggugaugguagagaagcugcccggaau

SEQ ID NO: 290187 - RNA, 32 nt, Human
aagaugguggccugaggccaggaggcugcagc

SEQ ID NO: 290188 - RNA, 32 nt, Human
aagaugguggugagcugcaaaauagcuggaug

SEQ ID NO: 290189 - RNA, 32 nt, Human
aagaugguguaugacagagcauuggccuugac

SEQ ID NO: 290190 - RNA, 32 nt, Human
aagaugguuacuggagcucuagcugccuauuu

SEQ ID NO: 290191 - RNA, 21 nt, Human
aagauguaaacagcccagagg

SEQ ID NO: 290192 - RNA, 32 nt, Human
aagauguaacacagcagaaaagucuugucgga

SEQ ID NO: 290193 - RNA, 32 nt, Human
aagaugucaaauugaauaaaaaucacagcaau

SEQ ID NO: 290194 - RNA, 32 nt, Human
aagaugucauuuccaccagcaguucccuuagg

SEQ ID NO: 290195 - RNA, 32 nt, Human
aagauguccacucaugcccacccaugagaggg

SEQ ID NO: 290196 - RNA, 32 nt, Human
aagauguccaggagcccacugccuuagaaagc

SEQ ID NO: 290197 - RNA, 32 nt, Human
aagaugucugaccuccuucauaugcaaaaaua

SEQ ID NO: 290198 - RNA, 32 nt, Human
aagaugucuguacuaacaggugcuguaacacu

SEQ ID NO: 290199 - RNA, 32 nt, Human
aagaugucuuccucucggacccucugcugccc

SEQ ID NO: 290200 - RNA, 32 nt, Human
aagaugugaacuguuucucuucugcagaaaaa

SEQ ID NO: 290201 - RNA, 32 nt, Human
aagaugugaauggcagaacaauuacacacagu

SEQ ID NO: 290202 - RNA, 32 nt, Human
aagaugugcccaggagguggcgguggcgcaca

SEQ ID NO: 290203 - RNA, 32 nt, Human
aagauguggaccaaggccuguggguacuccag

SEQ ID NO: 290204 - RNA, 32 nt, Human
aagauguggagguggaagacagugauauugug

SEQ ID NO: 290205 - RNA, 32 nt, Human
aagauguggauuauuguuagaaucugugacuu

SEQ ID NO: 290206 - RNA, 32 nt, Human
aagauguggccaaagggcuagagccaggaauu

SEQ ID NO: 290207 - RNA, 32 nt, Human
aagaugugggagcaggaagugaggcugcggca

SEQ ID NO: 290208 - RNA, 32 nt, Human
aagaugugguuacugagauuugggaagaagca

SEQ ID NO: 290209 - RNA, 32 nt, Human
aagaugugugugugagaguauguaugugugug

SEQ ID NO: 290210 - RNA, 32 nt, Human
aagauguuagccaguuucagagcuguguacuc

SEQ ID NO: 290211 - RNA, 32 nt, Human
aagauguuccagucaggauucaauccuugaua

SEQ ID NO: 290212 - RNA, 32 nt, Human
aagauguugagugguggggcuggagggcuggg

SEQ ID NO: 290213 - RNA, 32 nt, Human
aagauguugcccuuucuaaugcuaguuaacag

SEQ ID NO: 290214 - RNA, 32 nt, Human
aagauguuugaguccgaguccuagccacucgc

SEQ ID NO: 290215 - RNA, 30 nt, Human
aagauuaaaaacaaaugcuuacugaauuug

SEQ ID NO: 290216 - RNA, 32 nt, Human
aagauuaaaaacaaaugcuuacugaauuugaa

SEQ ID NO: 290217 - RNA, 20 nt, Human
aagauuaaaaauaacuuggc

SEQ ID NO: 290218 - RNA, 32 nt, Human
aagauuaaaaggauuuuguugguaccugguuu

SEQ ID NO: 290219 - RNA, 32 nt, Human
aagauuaacaagucagagucugugguguaugu

SEQ ID NO: 290220 - RNA, 32 nt, Human
aagauuaacagcuaucucucucauuuccuacu

SEQ ID NO: 290221 - RNA, 32 nt, Human
aagauuaaugguagaacaaccugaaggauuua

SEQ ID NO: 290222 - RNA, 22 nt, Human
aagauuaauuuuguggcaguuu

SEQ ID NO: 290223 - RNA, 32 nt, Human
aagauuacaaguggacaccugagucagcagga

SEQ ID NO: 290224 - RNA, 32 nt, Human
aagauuacagaagugcugaagcagaccauucu

SEQ ID NO: 290225 - RNA, 32 nt, Human
aagauuacaggaagggcauuacaaaucugguc

SEQ ID NO: 290226 - RNA, 32 nt, Human
aagauuaccauggucaauacagucuuucucca

SEQ ID NO: 290227 - RNA, 32 nt, Human
aagauuacgccacugcacuaaugucuggugac

SEQ ID NO: 290228 - RNA, 32 nt, Human
aagauuacgccacugcacuccagccuggguga

SEQ ID NO: 290229 - RNA, 32 nt, Human
aagauuacgucacugcauuccagccuggguga

SEQ ID NO: 290230 - RNA, 32 nt, Human
aagauuagccaggcauaguagcacuugccugu

SEQ ID NO: 290231 - RNA, 32 nt, Human
aagauuagcuaggagacuggaaaaagaccagg

SEQ ID NO: 290232 - RNA, 32 nt, Human
aagauuaggacuccugaguugcccaugauuuc

SEQ ID NO: 290233 - RNA, 32 nt, Human
aagauuaugccacugcacuccagccuggguga

SEQ ID NO: 290234 - RNA, 32 nt, Human
aagauuaugccacugcacuucagccuggguga

SEQ ID NO: 290235 - RNA, 32 nt, Human
aagauuaugccauugcacuccagccuggguga

SEQ ID NO: 290236 - RNA, 32 nt, Human
aagauuauguacugagagaauccugaagaaug

SEQ ID NO: 290237 - RNA, 32 nt, Human
aagauuaugucacugcacuccauccuggguga

SEQ ID NO: 290238 - RNA, 32 nt, Human
aagauuauuuaaauuauguuucccucugauuu

SEQ ID NO: 290239 - RNA, 32 nt, Human
aagauucaagacccuucucuugcuugucaccc

SEQ ID NO: 290240 - RNA, 32 nt, Human
aagauucaagucagaaaucacagggaaaauuc

SEQ ID NO: 290241 - RNA, 32 nt, Human
aagauucacgcuucugcauccaccucugcccu

SEQ ID NO: 290242 - RNA, 32 nt, Human
aagauucaggagucauuagcagugaugauuuu

SEQ ID NO: 290243 - RNA, 32 nt, Human
aagauucagggaaagacuaacugugaaaagga

SEQ ID NO: 290244 - RNA, 32 nt, Human
aagauucauacuccugaugcuacugacaacgu

SEQ ID NO: 290245 - RNA, 32 nt, Human
aagauucaugccaucaggggcaccuugucacu

SEQ ID NO: 290246 - RNA, 32 nt, Human
aagauucauuaaguucuugucauuucaaauuu

SEQ ID NO: 290247 - RNA, 32 nt, Human
aagauuccaauuaaauuuaugccuuauaaaau

SEQ ID NO: 290248 - RNA, 32 nt, Human
aagauuccauugugcagaacuggagucuuuac

SEQ ID NO: 290249 - RNA, 32 nt, Human
aagauuccccuccagaaaaauacguauguuua

SEQ ID NO: 290250 - RNA, 32 nt, Human
aagauuccucugcuuuuccuccuuuuuaccau

SEQ ID NO: 290251 - RNA, 32 nt, Human
aagauuccuuucccugccuucucccauacauu

SEQ ID NO: 290252 - RNA, 32 nt, Human
aagauuccuuuccuauccauccuuccauccag

SEQ ID NO: 290253 - RNA, 23 nt, Human
aagauuccuuuugugaaaaguuu

SEQ ID NO: 290254 - RNA, 32 nt, Human
aagauucuagaguuggccggaggcagaacaug

SEQ ID NO: 290255 - RNA, 32 nt, Human
aagauucuauucugcuggccaguggaacagag

SEQ ID NO: 290256 - RNA, 18 nt, Human
aagauucugaagcuuggc

SEQ ID NO: 290257 - RNA, 32 nt, Human
aagauucuggggaaggggaaaggcaggcccac

SEQ ID NO: 290258 - RNA, 32 nt, Human
aagauucuucaucgguuucuccaucucugaag

SEQ ID NO: 290259 - RNA, 32 nt, Human
aagauucuugggguaacagauucuucuggggc

SEQ ID NO: 290260 - RNA, 32 nt, Human
aagauugaaaggagauauuuuaucaaguggca

SEQ ID NO: 290261 - RNA, 32 nt, Human
aagauugaagaaaaauaagaagaagaagacag

SEQ ID NO: 290262 - RNA, 32 nt, Human
aagauugacucaugggaccugaagggugacau

SEQ ID NO: 290263 - RNA, 19 nt, Human
aagauugagccacugcacu

SEQ ID NO: 290264 - RNA, 32 nt, Human
aagauugagccacugcacuccagccuggguga

SEQ ID NO: 290265 - RNA, 32 nt, Human
aagauugagccauugcucuccagccuggguga

SEQ ID NO: 290266 - RNA, 32 nt, Human
aagauugagcugucuuuuauuuggaggauaaa

SEQ ID NO: 290267 - RNA, 32 nt, Human
aagauugagcuuguuuucucucaguguguucu

SEQ ID NO: 290268 - RNA, 32 nt, Human
aagauugcaauuauuuguuuuucuacuuugaa

SEQ ID NO: 290269 - RNA, 32 nt, Human
aagauugcacacugcacuccagccugggugac

SEQ ID NO: 290270 - RNA, 32 nt, Human
aagauugcaccaccacacuccagccuggguga

SEQ ID NO: 290271 - RNA, 32 nt, Human
aagauugcaccacugcacuacagcuuggguga

SEQ ID NO: 290272 - RNA, 32 nt, Human
aagauugcaccacugcacuccaaccuggguga

SEQ ID NO: 290273 - RNA, 32 nt, Human
aagauugcaccacugcacuccagccgggguga

SEQ ID NO: 290274 - RNA, 32 nt, Human
aagauugcaccacugcacuccagccugggcaa

SEQ ID NO: 290275 - RNA, 32 nt, Human
aagauugcaccacugcacuccagccugggcga

SEQ ID NO: 290276 - RNA, 32 nt, Human
aagauugcaccacugcauuccagcauggccac

SEQ ID NO: 290277 - RNA, 32 nt, Human
aagauugcaccacugcucuccagccuggggaa

SEQ ID NO: 290278 - RNA, 32 nt, Human
aagauugcaccacuguacuccagccugggcaa

SEQ ID NO: 290279 - RNA, 32 nt, Human
aagauugcaccacuguacuccagccuggguga

SEQ ID NO: 290280 - RNA, 32 nt, Human
aagauugcaccauugaacuccagccugggcaa

SEQ ID NO: 290281 - RNA, 32 nt, Human
aagauugcaccauugcacuccagccuggcgac

SEQ ID NO: 290282 - RNA, 32 nt, Human
aagauugcaccauugcacuccagccuggguga

SEQ ID NO: 290283 - RNA, 32 nt, Human
aagauugcaccauugcauuccagccuggguga

SEQ ID NO: 290284 - RNA, 32 nt, Human
aagauugcacccugcacucuagccugggcaac

SEQ ID NO: 290285 - RNA, 32 nt, Human
aagauugcacuacuacacuccagccuggugac

SEQ ID NO: 290286 - RNA, 32 nt, Human
aagauugcacuacugcacuccagccuggguga

SEQ ID NO: 290287 - RNA, 32 nt, Human
aagauugcagcccaguuuucuucagaaaccau

SEQ ID NO: 290288 - RNA, 32 nt, Human
aagauugcagugagccaagaucacgccauugc

SEQ ID NO: 290289 - RNA, 32 nt, Human
aagauugcagugagcuaugaacaccacugcac

SEQ ID NO: 290290 - RNA, 32 nt, Human
aagauugcagugagcuaugaucaugccacugc

SEQ ID NO: 290291 - RNA, 32 nt, Human
aagauugcagugagcugaaaucacaccacuac

SEQ ID NO: 290292 - RNA, 32 nt, Human
aagauugcagugagcugauaucgcaccauugu

SEQ ID NO: 290293 - RNA, 32 nt, Human
aagauugcaucacugcacuccagcuuggguga

SEQ ID NO: 290294 - RNA, 32 nt, Human
aagauugccccacugcacuccacccugggcaa

SEQ ID NO: 290295 - RNA, 32 nt, Human
aagauugcgccacugcacuccacccuggguga

SEQ ID NO: 290296 - RNA, 32 nt, Human
aagauugcgccacugcacuccagccagggcga

SEQ ID NO: 290297 - RNA, 32 nt, Human
aagauugcgccacugcacuccagccugacgac

SEQ ID NO: 290298 - RNA, 32 nt, Human
aagauugcgccacugcacuccagccugggcaa

SEQ ID NO: 290299 - RNA, 32 nt, Human
aagauugcgccacugcacuccagccuggguga

SEQ ID NO: 290300 - RNA, 32 nt, Human
aagauugcgccacuguacuccagcuugggcaa

SEQ ID NO: 290301 - RNA, 32 nt, Human
aagauugcgccauugcacuccagccugggcaa

SEQ ID NO: 290302 - RNA, 32 nt, Human
aagauugcgccauugcauuccagccugggcaa

SEQ ID NO: 290303 - RNA, 32 nt, Human
aagauugcgcccccugcacuccagccugggcu

SEQ ID NO: 290304 - RNA, 32 nt, Human
aagauugcgccgcuacauuccagccugggcaa

SEQ ID NO: 290305 - RNA, 32 nt, Human
aagauugcgccguuguacuccagccugggcaa

SEQ ID NO: 290306 - RNA, 32 nt, Human
aagauugcgucacugcacugcagccuggguga

SEQ ID NO: 290307 - RNA, 32 nt, Human
aagauuggaaacacuuucugaaaaagaaagca

SEQ ID NO: 290308 - RNA, 32 nt, Human
aagauuggccgggaauuugaggcugcaaggau

SEQ ID NO: 290309 - RNA, 32 nt, Human
aagauuggcucccaugguacuacagguugagu

SEQ ID NO: 290310 - RNA, 32 nt, Human
aagauuggcuuacaaucuuacucuugucauuc

SEQ ID NO: 290311 - RNA, 32 nt, Human
aagauuggcuucaagaauggaggggaaaugca

SEQ ID NO: 290312 - RNA, 32 nt, Human
aagauugggaaaaagacaggaaugagagggga

SEQ ID NO: 290313 - RNA, 32 nt, Human
aagauugggcuccuaagcuccugcucugcugg

SEQ ID NO: 290314 - RNA, 32 nt, Human
aagauuguaccacugcacuccaaccuggguua

SEQ ID NO: 290315 - RNA, 32 nt, Human
aagauuguaccacugcacuccagccugggcaa

SEQ ID NO: 290316 - RNA, 32 nt, Human
aagauuguaccacugcacuccaguuuggcaac

SEQ ID NO: 290317 - RNA, 32 nt, Human
aagauuguaccacuguacuccagccugggcug

SEQ ID NO: 290318 - RNA, 32 nt, Human
aagauugucuguccuucaggacuuccaaggcu

SEQ ID NO: 290319 - RNA, 32 nt, Human
aagauugugacacugcacuccagccugggcaa

SEQ ID NO: 290320 - RNA, 32 nt, Human
aagauugugcacugcacucuagccugggggaa

SEQ ID NO: 290321 - RNA, 32 nt, Human
aagauugugccaccacacuccagccugggcga

SEQ ID NO: 290322 - RNA, 32 nt, Human
aagauugugccacggcacuccagccugggcag

SEQ ID NO: 290323 - RNA, 32 nt, Human
aagauugugccacuacacuccagccugggaga

SEQ ID NO: 290324 - RNA, 19 nt, Human
aagauugugccacugcacu

SEQ ID NO: 290325 - RNA, 32 nt, Human
aagauugugccacugcacuccacccugggcaa

SEQ ID NO: 290326 - RNA, 32 nt, Human
aagauugugccacugcacuccagccugagcaa

SEQ ID NO: 290327 - RNA, 32 nt, Human
aagauugugccacugcacuccagccugggcaa

SEQ ID NO: 290328 - RNA, 32 nt, Human
aagauugugccacugcacuccagccugggcga

SEQ ID NO: 290329 - RNA, 32 nt, Human
aagauugugccacugcacuccagccuggguaa

SEQ ID NO: 290330 - RNA, 32 nt, Human
aagauugugccacugcacuccagccuggguga

SEQ ID NO: 290331 - RNA, 32 nt, Human
aagauugugccacugcacuccagcgugggcaa

SEQ ID NO: 290332 - RNA, 32 nt, Human
aagauugugccacugcacucuagccuaggugg

SEQ ID NO: 290333 - RNA, 32 nt, Human
aagauugugccacugcacucuagccugggcaa

SEQ ID NO: 290334 - RNA, 32 nt, Human
aagauugugccacugcacugcaggcuggguga

SEQ ID NO: 290335 - RNA, 32 nt, Human
aagauugugccacuguacuccagccuggguga

SEQ ID NO: 290336 - RNA, 32 nt, Human
aagauugugccauugcacuccagccugggcaa

SEQ ID NO: 290337 - RNA, 32 nt, Human
aagauugugccauugcacuccagccuggguga

SEQ ID NO: 290338 - RNA, 32 nt, Human
aagauuguucaagagcagucugggcaacaugg

SEQ ID NO: 290339 - RNA, 32 nt, Human
aagauuguuucagacuuuuguuugugugcuug

SEQ ID NO: 290340 - RNA, 22 nt, Human
aagauuuacaucuauaacuaga

SEQ ID NO: 290341 - RNA, 24 nt, Human
aagauuuaugccagagccuugcag

SEQ ID NO: 290342 - RNA, 32 nt, Human
aagauuuaugccagagccuugcaggauggagc

SEQ ID NO: 290343 - RNA, 32 nt, Human
aagauuuauguuaauguaugugcuccaaaacc

SEQ ID NO: 290344 - RNA, 32 nt, Human
aagauuucaagcuaaagaugguggugaugaac

SEQ ID NO: 290345 - RNA, 32 nt, Human
aagauuuccccagcuuucuagguaacugugcu

SEQ ID NO: 290346 - RNA, 32 nt, Human
aagauuucuacacugaaaauguuaauauuauu

SEQ ID NO: 290347 - RNA, 32 nt, Human
aagauuucucaucuucucaucccuaggacaag

SEQ ID NO: 290348 - RNA, 32 nt, Human
aagauuucugacuuugccacuguaaaugccuu

SEQ ID NO: 290349 - RNA, 32 nt, Human
aagauuucuggcucagcucucugaauuugcca

SEQ ID NO: 290350 - RNA, 32 nt, Human
aagauuugaaguuuagacuaaagagcugggaa

SEQ ID NO: 290351 - RNA, 32 nt, Human
aagauuugaaucugauaucuccaccaaagccu

SEQ ID NO: 290352 - RNA, 32 nt, Human
aagauuuggaaggagaucaucacagcuaaugu

SEQ ID NO: 290353 - RNA, 32 nt, Human
aagauuuggagaccugggcuugaguuccagcu

SEQ ID NO: 290354 - RNA, 32 nt, Human
aagauuuggccaggggcagcugugcuggcuua

SEQ ID NO: 290355 - RNA, 32 nt, Human
aagauuuggggaggggaggguagccacagaaa

SEQ ID NO: 290356 - RNA, 32 nt, Human
aagauuuggugccugcagccucuugucugguu

SEQ ID NO: 290357 - RNA, 32 nt, Human
aagauuuguauuugaaucaucuguaaagucgc

SEQ ID NO: 290358 - RNA, 32 nt, Human
aagauuuguuuuggugucaaaauaacaugaaa

SEQ ID NO: 290359 - RNA, 32 nt, Human
aagauuuuaggugguucaguccuucaccuggu

SEQ ID NO: 290360 - RNA, 32 nt, Human
aagauuuucccaagguugaucuggaggugacg

SEQ ID NO: 290361 - RNA, 32 nt, Human
aagauuuucucaaacuccuuuuuaagccaauu

SEQ ID NO: 290362 - RNA, 32 nt, Human
aagauuuucuugggcaucucccggaaagugcg

SEQ ID NO: 290363 - RNA, 24 nt, Human
aagauuuugcugcuuuugccugaa

SEQ ID NO: 290364 - RNA, 32 nt, Human
aagauuuugucccauuuucccaugaagcuaca

SEQ ID NO: 290365 - RNA, 20 nt, Human
aagcaaaaaagggucccaga

SEQ ID NO: 290366 - RNA, 26 nt, Human
aagcaaaaacaaaaaagcuauccaga

SEQ ID NO: 290367 - RNA, 32 nt, Human
aagcaaaaacuaguaaagacauaggaacaugu

SEQ ID NO: 290368 - RNA, 32 nt, Human
aagcaaaaaggucaagaguaccaccugaccca

SEQ ID NO: 290369 - RNA, 32 nt, Human
aagcaaaaaugagauccaggcuggagcggcug

SEQ ID NO: 290370 - RNA, 32 nt, Human
aagcaaaaccacaugggaaaacucagcacugg

SEQ ID NO: 290371 - RNA, 32 nt, Human
aagcaaaagaagagaugagaagaggcacaaga

SEQ ID NO: 290372 - RNA, 32 nt, Human
aagcaaaagaccuacaauaggugguggaauua

SEQ ID NO: 290373 - RNA, 32 nt, Human
aagcaaaauagaagaaagcuauaccauuacca

SEQ ID NO: 290374 - RNA, 32 nt, Human
aagcaaaauguccuacauuagagaucaccaag

SEQ ID NO: 290375 - RNA, 32 nt, Human
aagcaaaauuggucucuuuagagaccaauuug

SEQ ID NO: 290376 - RNA, 32 nt, Human
aagcaaacauccauaguaaaacaaauaaucuu

SEQ ID NO: 290377 - RNA, 32 nt, Human
aagcaaaccuaccccggaucucuggcuucagc

SEQ ID NO: 290378 - RNA, 32 nt, Human
aagcaaacgagcugcccacaguucucugcccu

SEQ ID NO: 290379 - RNA, 32 nt, Human
aagcaaacuaaccuggaaucccuucaccuaga

SEQ ID NO: 290380 - RNA, 32 nt, Human
aagcaaacucaccuuaaauaaucuggauuuuc

SEQ ID NO: 290381 - RNA, 32 nt, Human
aagcaaacuggagauuccucagccucucgugg

SEQ ID NO: 290382 - RNA, 32 nt, Human
aagcaaagaaucacaaggaaccucuggcuagg

SEQ ID NO: 290383 - RNA, 32 nt, Human
aagcaaagacuagggacaggcaaagauaauuu

SEQ ID NO: 290384 - RNA, 32 nt, Human
aagcaaagaggaaggaagggaggucugugguc

SEQ ID NO: 290385 - RNA, 32 nt, Human
aagcaaagagucacugcaucaaugaaaguuca

SEQ ID NO: 290386 - RNA, 32 nt, Human
aagcaaagagugagaaagaauaggggcugaag

SEQ ID NO: 290387 - RNA, 32 nt, Human
aagcaaagauaagcaugaaaacuugacaauga

SEQ ID NO: 290388 - RNA, 26 nt, Human
aagcaaagcagcccccaaagcauauu

SEQ ID NO: 290389 - RNA, 23 nt, Human
aagcaaagcaggagcaggcacau

SEQ ID NO: 290390 - RNA, 32 nt, Human
aagcaaagccgccaccacagagcccgaaacaa

SEQ ID NO: 290391 - RNA, 32 nt, Human
aagcaaaggaaaaggggauggcaaacagaaau

SEQ ID NO: 290392 - RNA, 32 nt, Human
aagcaaaggagagcuuggggguggggagaaaa

SEQ ID NO: 290393 - RNA, 31 nt, Human
aagcaaaggcacuucugagcacgucuucucc

SEQ ID NO: 290394 - RNA, 32 nt, Human
aagcaaaggcagaaacggcaucaggagagaca

SEQ ID NO: 290395 - RNA, 32 nt, Human
aagcaaaggcauagaagggauauuuuugugua

SEQ ID NO: 290396 - RNA, 32 nt, Human
aagcaaaggcuucccacccaagucccccaucu

SEQ ID NO: 290397 - RNA, 32 nt, Human
aagcaaaguacugaugaauucaguaaacaaga

SEQ ID NO: 290398 - RNA, 32 nt, Human
aagcaaaguguucaccacuaaagcuaaccauu

SEQ ID NO: 290399 - RNA, 32 nt, Human
aagcaaauaagaaucucagagacucgcagcau

SEQ ID NO: 290400 - RNA, 32 nt, Human
aagcaaaugauuugggucucaacugaagauga

SEQ ID NO: 290401 - RNA, 25 nt, Human
aagcaaauuaaaguaaacugagaua

SEQ ID NO: 290402 - RNA, 32 nt, Human
aagcaaauugaaaacaggacucugcugggagc

SEQ ID NO: 290403 - RNA, 32 nt, Human
aagcaaauugcaggguuugcugccuggcagag

SEQ ID NO: 290404 - RNA, 32 nt, Human
aagcaaauuguacaaaguauguaggauguuuu

SEQ ID NO: 290405 - RNA, 32 nt, Human
aagcaacaacagcaaucaacaccaagaucuuc

SEQ ID NO: 290406 - RNA, 22 nt, Human
aagcaacaagguucugcuccau

SEQ ID NO: 290407 - RNA, 31 nt, Human
aagcaacaagugugggguuaagcagggagaa

SEQ ID NO: 290408 - RNA, 32 nt, Human
aagcaacacagaaaaaguuccuaagugguccc

SEQ ID NO: 290409 - RNA, 32 nt, Human
aagcaacaccccucuggagccagcacagugcu

SEQ ID NO: 290410 - RNA, 32 nt, Human
aagcaacagaagcaacuuuucccaucuggaau

SEQ ID NO: 290411 - RNA, 32 nt, Human
aagcaacagcagggguaauggaggaagugugg

SEQ ID NO: 290412 - RNA, 32 nt, Human
aagcaacagcagggguaguggaggaagugugg

SEQ ID NO: 290413 - RNA, 32 nt, Human
aagcaacauagugaaaccccaucuccaaaaau

SEQ ID NO: 290414 - RNA, 32 nt, Human
aagcaacauccuguucagcuguaugggcacua

SEQ ID NO: 290415 - RNA, 32 nt, Human
aagcaacauggcauuaggcugcauggguagaa

SEQ ID NO: 290416 - RNA, 32 nt, Human
aagcaaccucuccugccacccagaucccaucu

SEQ ID NO: 290417 - RNA, 32 nt, Human
aagcaacgggagguggaggauccuggaggugu

SEQ ID NO: 290418 - RNA, 32 nt, Human
aagcaacuagugccauugcagguggcuuucuc

SEQ ID NO: 290419 - RNA, 32 nt, Human
aagcaacuccugccucccuuccucacccuguc

SEQ ID NO: 290420 - RNA, 32 nt, Human
aagcaacuggauuuacagauuuauugugagac

SEQ ID NO: 290421 - RNA, 32 nt, Human
aagcaacuguuaaggccagcccuugccccuca

SEQ ID NO: 290422 - RNA, 32 nt, Human
aagcaacuuagcaaggcuucuuuucauuauuu

SEQ ID NO: 290423 - RNA, 32 nt, Human
aagcaacuugacuucagagggauggcucaaug

SEQ ID NO: 290424 - RNA, 32 nt, Human
aagcaagaaaggaucugcaugauaacuuugca

SEQ ID NO: 290425 - RNA, 32 nt, Human
aagcaagaaggaugagaauuuuagaucuggaa

SEQ ID NO: 290426 - RNA, 32 nt, Human
aagcaagaaguggucuucuggccuggcaaccc

SEQ ID NO: 290427 - RNA, 32 nt, Human
aagcaagaaguuaaagagugaacaugguggaa

SEQ ID NO: 290428 - RNA, 32 nt, Human
aagcaagacccugugugaaauuaaaaggaggu

SEQ ID NO: 290429 - RNA, 32 nt, Human
aagcaagacguggagguuuuaccagggguuag

SEQ ID NO: 290430 - RNA, 32 nt, Human
aagcaagacucaaccaggucuucugcugucaa

SEQ ID NO: 290431 - RNA, 32 nt, Human
aagcaagagaugguccaugcuuuucugacguu

SEQ ID NO: 290432 - RNA, 32 nt, Human
aagcaagaugcaaauauaauguucucauuagu

SEQ ID NO: 290433 - RNA, 32 nt, Human
aagcaagauggguaacaucacaguagauucgu

SEQ ID NO: 290434 - RNA, 32 nt, Human
aagcaagcagagaccauaaaagaggcacuaau

SEQ ID NO: 290435 - RNA, 32 nt, Human
aagcaagcaucuggcuucuguggaguuguugg

SEQ ID NO: 290436 - RNA, 32 nt, Human
aagcaagcauucagaagaaaaagaagcaaccu

SEQ ID NO: 290437 - RNA, 32 nt, Human
aagcaagccggcagaaauagcuauggaagguc

SEQ ID NO: 290438 - RNA, 32 nt, Human
aagcaagccuggaggccaggagccuaggaggg

SEQ ID NO: 290439 - RNA, 32 nt, Human
aagcaagcggccacaagggacugaggcaagca

SEQ ID NO: 290440 - RNA, 32 nt, Human
aagcaagcucugcacguggccuagaguaugac

SEQ ID NO: 290441 - RNA, 32 nt, Human
aagcaagcuguucuccuggcaagccaggcgaa

SEQ ID NO: 290442 - RNA, 32 nt, Human
aagcaaggaaagugccugguaggacugacggc

SEQ ID NO: 290443 - RNA, 32 nt, Human
aagcaaggaggagggaggugggguagggagga

SEQ ID NO: 290444 - RNA, 32 nt, Human
aagcaaggagggagcgugaggagcagccaggu

SEQ ID NO: 290445 - RNA, 32 nt, Human
aagcaaggaguauguuaaaaugaccagacacc

SEQ ID NO: 290446 - RNA, 32 nt, Human
aagcaaggaugcuuuggacacugugcguggcg

SEQ ID NO: 290447 - RNA, 32 nt, Human
aagcaaggcaugaccucagcuccacuuuugag

SEQ ID NO: 290448 - RNA, 32 nt, Human
aagcaaggcccaggcuggcccagaugggacac

SEQ ID NO: 290449 - RNA, 22 nt, Human
aagcaaggcucuuaguuuguaa

SEQ ID NO: 290450 - RNA, 32 nt, Human
aagcaagggaaagaggaaguggagucauuuug

SEQ ID NO: 290451 - RNA, 32 nt, Human
aagcaagggaaagaggaggagaucaaucuaga

SEQ ID NO: 290452 - RNA, 32 nt, Human
aagcaagggaaugaaguauaccaacuucuuug

SEQ ID NO: 290453 - RNA, 21 nt, Human
aagcaaguaaccagcuucuca

SEQ ID NO: 290454 - RNA, 32 nt, Human
aagcaaguauauacucaguucucuccacacuu

SEQ ID NO: 290455 - RNA, 32 nt, Human
aagcaagucaccaagggaccucaaacuuccuu

SEQ ID NO: 290456 - RNA, 32 nt, Human
aagcaaguccacauggagauuuggaggacacu

SEQ ID NO: 290457 - RNA, 32 nt, Human
aagcaagucuuuacguagccccaaaccuacuc

SEQ ID NO: 290458 - RNA, 32 nt, Human
aagcaagugaaaacaauuagggccagugguau

SEQ ID NO: 290459 - RNA, 32 nt, Human
aagcaagugaacacaaacacauuuaaguguau

SEQ ID NO: 290460 - RNA, 32 nt, Human
aagcaaguggcugcagaagaugguaacguaga

SEQ ID NO: 290461 - RNA, 32 nt, Human
aagcaagugucuuuuagcauucaugccagcuu

SEQ ID NO: 290462 - RNA, 32 nt, Human
aagcaaguucuuuagaagauaaauccucucga

SEQ ID NO: 290463 - RNA, 32 nt, Human
aagcaauaauaucucuguuuucauuucagaac

SEQ ID NO: 290464 - RNA, 22 nt, Human
aagcaauaauuucuccacaaca

SEQ ID NO: 290465 - RNA, 32 nt, Human
aagcaauagauuuugcuuggguuuucuuucuu

SEQ ID NO: 290466 - RNA, 32 nt, Human
aagcaaucauuuccccucccgucuuccuccuc

SEQ ID NO: 290467 - RNA, 32 nt, Human
aagcaauccuaaaugaaaguguguaaauuaua

SEQ ID NO: 290468 - RNA, 19 nt, Human
aagcaauccucccaccuca

SEQ ID NO: 290469 - RNA, 32 nt, Human
aagcaauccugccucaggcccccuaguagcug

SEQ ID NO: 290470 - RNA, 32 nt, Human
aagcaaucugugcuucagaagacagaggcucu

SEQ ID NO: 290471 - RNA, 32 nt, Human
aagcaaucuuuguuucugaguguuauuuuuau

SEQ ID NO: 290472 - RNA, 30 nt, Human
aagcaaugauuggccaaggaccuagcauaa

SEQ ID NO: 290473 - RNA, 30 nt, Human
aagcaaugggcauccugaagcugcaaguau

SEQ ID NO: 290474 - RNA, 32 nt, Human
aagcaaugguuauggggcaggcaaugugugcg

SEQ ID NO: 290475 - RNA, 23 nt, Human
aagcaauguaaaccucuccugga

SEQ ID NO: 290476 - RNA, 32 nt, Human
aagcaauuaaugaucagacauaggagaaaccc

SEQ ID NO: 290477 - RNA, 32 nt, Human
aagcaauuauuccuacauuccuaaguguucac

SEQ ID NO: 290478 - RNA, 26 nt, Human
aagcaauucacacagacaacacaacu

SEQ ID NO: 290479 - RNA, 32 nt, Human
aagcaauuccuuggaucuuaugcacagaacuu

SEQ ID NO: 290480 - RNA, 32 nt, Human
aagcaauucuaagaucuuccacaaaacaucua

SEQ ID NO: 290481 - RNA, 32 nt, Human
aagcaauucuccugccucagcuacucaagagg

SEQ ID NO: 290482 - RNA, 32 nt, Human
aagcaauuguccugccuccucaacuuccugac

SEQ ID NO: 290483 - RNA, 32 nt, Human
aagcaauuuauagauucagugcuauucccauu

SEQ ID NO: 290484 - RNA, 32 nt, Human
aagcaauuucaguaucucugugcaaggccugc

SEQ ID NO: 290485 - RNA, 32 nt, Human
aagcaauuuguaggacaguuugaauaauuuag

SEQ ID NO: 290486 - RNA, 32 nt, Human
aagcacaaagagauucaauuucccuggaggau

SEQ ID NO: 290487 - RNA, 32 nt, Human
aagcacaaagugcugggauuacaggcaugacc

SEQ ID NO: 290488 - RNA, 21 nt, Human
aagcacaaccagaccuucuca

SEQ ID NO: 290489 - RNA, 32 nt, Human
aagcacaagaagcagcugcagcugauggggag

SEQ ID NO: 290490 - RNA, 32 nt, Human
aagcacaagacugcguuuguggaacaccugaa

SEQ ID NO: 290491 - RNA, 32 nt, Human
aagcacaaguacaaaggcaucuuccggagcca

SEQ ID NO: 290492 - RNA, 32 nt, Human
aagcacaauaccuagguuaccacacaccacuu

SEQ ID NO: 290493 - RNA, 32 nt, Human
aagcacacacaaauagugccaggagucgaguu

SEQ ID NO: 290494 - RNA, 32 nt, Human
aagcacacagccgaccuacaaaccuccuguga

SEQ ID NO: 290495 - RNA, 32 nt, Human
aagcacacagggucugcuauuccugaggcugg

SEQ ID NO: 290496 - RNA, 32 nt, Human
aagcacaccagcuauuggcacagcgugggcag

SEQ ID NO: 290497 - RNA, 32 nt, Human
aagcacacgggaccaggcugggcgaagaacac

SEQ ID NO: 290498 - RNA, 32 nt, Human
aagcacacugaccuucuucaggcaaauacgca

SEQ ID NO: 290499 - RNA, 32 nt, Human
aagcacacugugggguggaggugcagagcuuu

SEQ ID NO: 290500 - RNA, 31 nt, Human
aagcacagaaccuggcauucacuggacugaa

SEQ ID NO: 290501 - RNA, 32 nt, Human
aagcacagaauuacucagucuuccauauugua

SEQ ID NO: 290502 - RNA, 32 nt, Human
aagcacagacagcagagagggccaggcagugc

SEQ ID NO: 290503 - RNA, 32 nt, Human
aagcacagcagagauaucuaagccauauuugu

SEQ ID NO: 290504 - RNA, 32 nt, Human
aagcacagcagcacaucgagacuugcuggaag

SEQ ID NO: 290505 - RNA, 32 nt, Human
aagcacagccaagcaugguggcucauguuugu

SEQ ID NO: 290506 - RNA, 32 nt, Human
aagcacagccucugcuccuccuggagccgguc

SEQ ID NO: 290507 - RNA, 32 nt, Human
aagcacagcugauccuggcccccaggucuggg

SEQ ID NO: 290508 - RNA, 32 nt, Human
aagcacaggcuaagcaguugaagguuccccac

SEQ ID NO: 290509 - RNA, 32 nt, Human
aagcacagugccugacacaaaacaggcaccca

SEQ ID NO: 290510 - RNA, 32 nt, Human
aagcacaucauugagcuugcuguucagaagga

SEQ ID NO: 290511 - RNA, 32 nt, Human
aagcacaucuccaucucuuccaccucaggcag

SEQ ID NO: 290512 - RNA, 32 nt, Human
aagcacaucuuucucacacuuugcucuuugga

SEQ ID NO: 290513 - RNA, 32 nt, Human
aagcacaugcaucugcuauuguguuggguugg

SEQ ID NO: 290514 - RNA, 32 nt, Human
aagcacaugccuauaaucccagcacuuuggga

SEQ ID NO: 290515 - RNA, 32 nt, Human
aagcacaugcugugccuuggaccugccuucug

SEQ ID NO: 290516 - RNA, 32 nt, Human
aagcacaugguacaguuuuccaaagaaauuag

SEQ ID NO: 290517 - RNA, 32 nt, Human
aagcacauguacauacauggaccucauucaga

SEQ ID NO: 290518 - RNA, 32 nt, Human
aagcacauuccucagcaggaucaagccaaaca

SEQ ID NO: 290519 - RNA, 32 nt, Human
aagcacauuguguacacaauaaaauuguagcc

SEQ ID NO: 290520 - RNA, 32 nt, Human
aagcaccaaauaaggaaaagcacuccggaaga

SEQ ID NO: 290521 - RNA, 32 nt, Human
aagcaccaauuacugcccucugccucagcagu

SEQ ID NO: 290522 - RNA, 32 nt, Human
aagcaccaccagaccagcaucacccaggacgu

SEQ ID NO: 290523 - RNA, 32 nt, Human
aagcaccaccuacuggugggccaucuguucuu

SEQ ID NO: 290524 - RNA, 32 nt, Human
aagcaccacuugcuguuuugaaugacucuacu

SEQ ID NO: 290525 - RNA, 32 nt, Human
aagcaccagagaauacauacaugaagggacaa

SEQ ID NO: 290526 - RNA, 32 nt, Human
aagcaccagcaacaccagagggguggagacuc

SEQ ID NO: 290527 - RNA, 32 nt, Human
aagcaccagccccucaacacugccauccaccu

SEQ ID NO: 290528 - RNA, 32 nt, Human
aagcaccagcuauguaaucacaugguuguucu

SEQ ID NO: 290529 - RNA, 32 nt, Human
aagcaccaggaggaagccgguucccgugagau

SEQ ID NO: 290530 - RNA, 32 nt, Human
aagcaccaggaggcccucgagguugcucugga

SEQ ID NO: 290531 - RNA, 32 nt, Human
aagcaccauuagcccauuucccccaaauuaaa

SEQ ID NO: 290532 - RNA, 32 nt, Human
aagcacccaaccacgcccagcuaauuuuugua

SEQ ID NO: 290533 - RNA, 32 nt, Human
aagcacccaccucccuuuucucagccuaacuc

SEQ ID NO: 290534 - RNA, 18 nt, Human
aagcacccagcccugccc

SEQ ID NO: 290535 - RNA, 32 nt, Human
aagcacccagccuggucaaggacagcagcaag

SEQ ID NO: 290536 - RNA, 32 nt, Human
aagcacccaucuucacuuggugcugccaucaa

SEQ ID NO: 290537 - RNA, 32 nt, Human
aagcaccccacaccaaggacaggcuggacggc

SEQ ID NO: 290538 - RNA, 32 nt, Human
aagcaccccuggagaggaagggagggucccca

SEQ ID NO: 290539 - RNA, 32 nt, Human
aagcaccccugguacucagcacacacaugcuu

SEQ ID NO: 290540 - RNA, 32 nt, Human
aagcacccucccucuagguccagggacuauca

SEQ ID NO: 290541 - RNA, 32 nt, Human
aagcacccugggaggccgaggcaggcagauua

SEQ ID NO: 290542 - RNA, 32 nt, Human
aagcaccgacacaaacuggagaauggucuggc

SEQ ID NO: 290543 - RNA, 32 nt, Human
aagcaccgucauaacaauugauugccauagca

SEQ ID NO: 290544 - RNA, 32 nt, Human
aagcaccgugcagcuuuggccugggcacagac

SEQ ID NO: 290545 - RNA, 32 nt, Human
aagcaccuacugggugcuggguucacuguguc

SEQ ID NO: 290546 - RNA, 32 nt, Human
aagcaccuccaccccuacccuagugauguccc

SEQ ID NO: 290547 - RNA, 32 nt, Human
aagcaccuccaggagguccccucuggaugucc

SEQ ID NO: 290548 - RNA, 32 nt, Human
aagcaccucucaucacagucgaguuccaagga

SEQ ID NO: 290549 - RNA, 32 nt, Human
aagcaccucucaucacagucuaguuccaagga

SEQ ID NO: 290550 - RNA, 32 nt, Human
aagcaccucugugucagggcucaccugggcau

SEQ ID NO: 290551 - RNA, 32 nt, Human
aagcaccugaaaucuggccggaugcgguggcu

SEQ ID NO: 290552 - RNA, 32 nt, Human
aagcaccugaggccuugguucaugcaguguuc

SEQ ID NO: 290553 - RNA, 32 nt, Human
aagcaccugccugccugcaucacugcacugaa

SEQ ID NO: 290554 - RNA, 32 nt, Human
aagcaccugcuccuuaagucuuccugcaacaa

SEQ ID NO: 290555 - RNA, 32 nt, Human
aagcaccugggcuaagggagaagcggaaggag

SEQ ID NO: 290556 - RNA, 32 nt, Human
aagcaccuuaaucccagcuacuugggaggcag

SEQ ID NO: 290557 - RNA, 32 nt, Human
aagcaccuucugcacacagucugcacacacug

SEQ ID NO: 290558 - RNA, 32 nt, Human
aagcaccuucuuuccugucucuugauuguuuu

SEQ ID NO: 290559 - RNA, 32 nt, Human
aagcaccuugggaauacccugaugucucagca

SEQ ID NO: 290560 - RNA, 32 nt, Human
aagcacgagauaaacaccagcugacuccacgg

SEQ ID NO: 290561 - RNA, 32 nt, Human
aagcacgagcggcagcgccgagcccagauacg

SEQ ID NO: 290562 - RNA, 32 nt, Human
aagcacgccagcagcgaacccagggggaccag

SEQ ID NO: 290563 - RNA, 32 nt, Human
aagcacggccuacugagcagguucugaaagca

SEQ ID NO: 290564 - RNA, 32 nt, Human
aagcacgggcugggccaagcuaagcugcucug

SEQ ID NO: 290565 - RNA, 18 nt, Human
aagcacguaugcuucagg

SEQ ID NO: 290566 - RNA, 32 nt, Human
aagcacguggugagaggagcaggccuacuugu

SEQ ID NO: 290567 - RNA, 32 nt, Human
aagcacuaauaacucggcaucuugacgauagu

SEQ ID NO: 290568 - RNA, 32 nt, Human
aagcacuacugcacuuaguagcuaugugauuu

SEQ ID NO: 290569 - RNA, 32 nt, Human
aagcacuaggauuacaggugugagccaccaug

SEQ ID NO: 290570 - RNA, 32 nt, Human
aagcacuauggaauuagguaacaggaagaguu

SEQ ID NO: 290571 - RNA, 32 nt, Human
aagcacuauuccaaggcuauggaguagcucua

SEQ ID NO: 290572 - RNA, 32 nt, Human
aagcacuauuucuuccuuuuccacuuaggccc

SEQ ID NO: 290573 - RNA, 31 nt, Human
aagcacucaauaaauguuuguuuaaugaaaa

SEQ ID NO: 290574 - RNA, 32 nt, Human
aagcacucacacacaugcaaugguauaugugc

SEQ ID NO: 290575 - RNA, 32 nt, Human
aagcacuccuuggcuguguccucucgcuuuuu

SEQ ID NO: 290576 - RNA, 32 nt, Human
aagcacucucuccagcacucaggaagcccggc

SEQ ID NO: 290577 - RNA, 32 nt, Human
aagcacucuuugucucccugagccccuuggca

SEQ ID NO: 290578 - RNA, 23 nt, Human
aagcacugagaaauucuuucuca

SEQ ID NO: 290579 - RNA, 32 nt, Human
aagcacugaggagguggauggaagggagcauc

SEQ ID NO: 290580 - RNA, 32 nt, Human
aagcacugcaggucaaggaagcaacacaauag

SEQ ID NO: 290581 - RNA, 32 nt, Human
aagcacugcccagccccugccuggcugcccuu

SEQ ID NO: 290582 - RNA, 31 nt, Human
aagcacugccucuacugggcgugcugccaag

SEQ ID NO: 290583 - RNA, 32 nt, Human
aagcacuggccuugccuccaggaccuugcuuc

SEQ ID NO: 290584 - RNA, 21 nt, Human
aagcacuggcuucgccccuca

SEQ ID NO: 290585 - RNA, 24 nt, Human
aagcacugggaucacaggugucag

SEQ ID NO: 290586 - RNA, 24 nt, Human
aagcacugggauuacaagcaugag

SEQ ID NO: 290587 - RNA, 24 nt, Human
aagcacugggauuacaggcaugag

SEQ ID NO: 290588 - RNA, 32 nt, Human
aagcacugggauuacaggcaugagccaccaug

SEQ ID NO: 290589 - RNA, 32 nt, Human
aagcacugggauuacaggcaugagccaccgcg

SEQ ID NO: 290590 - RNA, 24 nt, Human
aagcacugggauuacaggcgugag

SEQ ID NO: 290591 - RNA, 32 nt, Human
aagcacugggauuacaggcgugagccaccaca

SEQ ID NO: 290592 - RNA, 32 nt, Human
aagcacugggauuacaggcgugagccacccgg

SEQ ID NO: 290593 - RNA, 32 nt, Human
aagcacugggauuacaggcgugagccaccgcg

SEQ ID NO: 290594 - RNA, 24 nt, Human
aagcacugggauuacaggcuugag

SEQ ID NO: 290595 - RNA, 32 nt, Human
aagcacugggauuacaggcuugaggcacugca

SEQ ID NO: 290596 - RNA, 32 nt, Human
aagcacugggauuacaggugugaaccaccgua

SEQ ID NO: 290597 - RNA, 32 nt, Human
aagcacugggauuacaggugugagccaccgcg

SEQ ID NO: 290598 - RNA, 23 nt, Human
aagcacuggggugccuccucuca

SEQ ID NO: 290599 - RNA, 23 nt, Human
aagcacuggguucugcccuuuca

SEQ ID NO: 290600 - RNA, 32 nt, Human
aagcacuguggcugggaaacuucgaagcggac

SEQ ID NO: 290601 - RNA, 32 nt, Human
aagcacuguguggcugauaagcgguguucaug

SEQ ID NO: 290602 - RNA, 32 nt, Human
aagcacuguuaccaauuuagcauauguccuug

SEQ ID NO: 290603 - RNA, 32 nt, Human
aagcacuguuugucacuuuucagcuuugacgu

SEQ ID NO: 290604 - RNA, 32 nt, Human
aagcacuucuucuuguauuguuuuuaagguga

SEQ ID NO: 290605 - RNA, 22 nt, Human
aagcacuugaagcaacacaacu

SEQ ID NO: 290606 - RNA, 24 nt, Human
aagcacuuggauuacagaugugag

SEQ ID NO: 290607 - RNA, 32 nt, Human
aagcacuuguauuuuccagccuaggcuuugug

SEQ ID NO: 290608 - RNA, 32 nt, Human
aagcacuugugucugaaagaugcagauaauau

SEQ ID NO: 290609 - RNA, 32 nt, Human
aagcacuuuaauuccaauguaccaggugaacu

SEQ ID NO: 290610 - RNA, 32 nt, Human
aagcacuuucucucccugcuuccagcccuucu

SEQ ID NO: 290611 - RNA, 32 nt, Human
aagcacuuugggaggcagagaugggcggauca

SEQ ID NO: 290612 - RNA, 32 nt, Human
aagcacuuugggaggccgagauggaaggauca

SEQ ID NO: 290613 - RNA, 32 nt, Human
aagcacuuugggaggccgaggcagguagauca

SEQ ID NO: 290614 - RNA, 32 nt, Human
aagcacuuuuaauuuugagaauuucacauuua

SEQ ID NO: 290615 - RNA, 18 nt, Human
aagcacuuuugcacauuu

SEQ ID NO: 290616 - RNA, 32 nt, Human
aagcacuuuuucauacuuuugugaaaguauac

SEQ ID NO: 290617 - RNA, 32 nt, Human
aagcagaaaaacugagcuccaagugagcacau

SEQ ID NO: 290618 - RNA, 32 nt, Human
aagcagaaaaagaaaacuaagaccuucaaucc

SEQ ID NO: 290619 - RNA, 32 nt, Human
aagcagaaaaccagaagugcaugcugugaugc

SEQ ID NO: 290620 - RNA, 32 nt, Human
aagcagaaagagaaagaauuugcaaccaugag

SEQ ID NO: 290621 - RNA, 32 nt, Human
aagcagaaagagaaaugagacacucuaguugc

SEQ ID NO: 290622 - RNA, 32 nt, Human
aagcagaacuagccacgagcugccuuccuccc

SEQ ID NO: 290623 - RNA, 31 nt, Human
aagcagaagugaagagaaaagaggaggacug

SEQ ID NO: 290624 - RNA, 32 nt, Human
aagcagaauaaggcaaaagggaaaguguucua

SEQ ID NO: 290625 - RNA, 32 nt, Human
aagcagaauaaugacacuacguuucucucuca

SEQ ID NO: 290626 - RNA, 32 nt, Human
aagcagaauacuugagaugaaaguuggcauac

SEQ ID NO: 290627 - RNA, 32 nt, Human
aagcagaaugcaggguuuccugccugacaacc

SEQ ID NO: 290628 - RNA, 21 nt, Human
aagcagaauuuagaaaccaca

SEQ ID NO: 290629 - RNA, 32 nt, Human
aagcagacaauaacuucuuaaaggaauucuac

SEQ ID NO: 290630 - RNA, 32 nt, Human
aagcagaccagccugggggcuggcggcaggac

SEQ ID NO: 290631 - RNA, 32 nt, Human
aagcagacccccucccugucaucacccucucc

SEQ ID NO: 290632 - RNA, 32 nt, Human
aagcagaccugacacugauccagauuugcagu

SEQ ID NO: 290633 - RNA, 32 nt, Human
aagcagacgacugucuguccuguuuaugacaa

SEQ ID NO: 290634 - RNA, 32 nt, Human
aagcagacugaggagggaggagacgagguucu

SEQ ID NO: 290635 - RNA, 32 nt, Human
aagcagacuugggaaccuggaagcacucugga

SEQ ID NO: 290636 - RNA, 32 nt, Human
aagcagagaagaagaaaggagcugaggaggag

SEQ ID NO: 290637 - RNA, 32 nt, Human
aagcagagaauuuuauuuauagcuaauuuuag

SEQ ID NO: 290638 - RNA, 32 nt, Human
aagcagagacaacugccacccagccugggccu

SEQ ID NO: 290639 - RNA, 32 nt, Human
aagcagagaccaugagaaggagaguucagggg

SEQ ID NO: 290640 - RNA, 32 nt, Human
aagcagagagcugaagugaaggcuugagggga

SEQ ID NO: 290641 - RNA, 32 nt, Human
aagcagagagcugaggcauccaagaaauguuc

SEQ ID NO: 290642 - RNA, 32 nt, Human
aagcagagaugggggcucccuauguugcccag

SEQ ID NO: 290643 - RNA, 32 nt, Human
aagcagagcaagaagagaggaagcgggguagu

SEQ ID NO: 290644 - RNA, 32 nt, Human
aagcagagcagcgugaggaagauggugcucac

SEQ ID NO: 290645 - RNA, 32 nt, Human
aagcagagccacucgggaguggugaggcccgg

SEQ ID NO: 290646 - RNA, 19 nt, Human
aagcagagccuccugggaa

SEQ ID NO: 290647 - RNA, 31 nt, Human
aagcagagcgagagagaggaggcugcuggaa

SEQ ID NO: 290648 - RNA, 32 nt, Human
aagcagaggaagagauaacauggcaaugaaga

SEQ ID NO: 290649 - RNA, 32 nt, Human
aagcagaggaggaagaggaagaguggggaugg

SEQ ID NO: 290650 - RNA, 32 nt, Human
aagcagaggaggaggaagggccggccagaaga

SEQ ID NO: 290651 - RNA, 32 nt, Human
aagcagaggcaguucugaggcagcaggcagug

SEQ ID NO: 290652 - RNA, 32 nt, Human
aagcagagggaaaugggaggucuaaggaugag

SEQ ID NO: 290653 - RNA, 32 nt, Human
aagcagagggaaugugaaagaaaauaagagaa

SEQ ID NO: 290654 - RNA, 32 nt, Human
aagcagagggaccucagaagaaacugagccag

SEQ ID NO: 290655 - RNA, 21 nt, Human
aagcagagggcagccauugaa

SEQ ID NO: 290656 - RNA, 21 nt, Human
aagcagagggggcccauugga

SEQ ID NO: 290657 - RNA, 32 nt, Human
aagcagagucagcuugauuucaaggacucuau

SEQ ID NO: 290658 - RNA, 32 nt, Human
aagcagagugccaggcagcacauccuucuuca

SEQ ID NO: 290659 - RNA, 32 nt, Human
aagcagagugugaauagccuguggacuguaug

SEQ ID NO: 290660 - RNA, 32 nt, Human
aagcagaguugggggaggagggggagcccugg

SEQ ID NO: 290661 - RNA, 32 nt, Human
aagcagauacauaugaguguggaagccggagg

SEQ ID NO: 290662 - RNA, 32 nt, Human
aagcagauagaugguccagcaggcuugaagca

SEQ ID NO: 290663 - RNA, 20 nt, Human
aagcagauauccaaagggug

SEQ ID NO: 290664 - RNA, 18 nt, Human
aagcagaucguccagugc

SEQ ID NO: 290665 - RNA, 21 nt, Human
aagcagaugcccaguugcuca

SEQ ID NO: 290666 - RNA, 18 nt, Human
aagcagaugguauccaga

SEQ ID NO: 290667 - RNA, 22 nt, Human
aagcagauguucaccaauguca

SEQ ID NO: 290668 - RNA, 32 nt, Human
aagcagauguuuuugcccuuucugcuucacug

SEQ ID NO: 290669 - RNA, 32 nt, Human
aagcagauuacaucugagccguuugaauugug

SEQ ID NO: 290670 - RNA, 32 nt, Human
aagcagauucucugaucaggaauuugaaguga

SEQ ID NO: 290671 - RNA, 32 nt, Human
aagcagcaaaacgcuccuccaugucuggaugg

SEQ ID NO: 290672 - RNA, 32 nt, Human
aagcagcaacuucuuccuccuuauauucuuau

SEQ ID NO: 290673 - RNA, 32 nt, Human
aagcagcaacuugcaagggcggccuuucccac

SEQ ID NO: 290674 - RNA, 32 nt, Human
aagcagcaagccccgggcugugcucaagccac

SEQ ID NO: 290675 - RNA, 32 nt, Human
aagcagcacagaauguuauccuuacguccuga

SEQ ID NO: 290676 - RNA, 32 nt, Human
aagcagcacagcugagacugggcaccaggcca

SEQ ID NO: 290677 - RNA, 32 nt, Human
aagcagcacauagcacugggaacucuggcucc

SEQ ID NO: 290678 - RNA, 32 nt, Human
aagcagcacucaaaccuggagcugaggaaucu

SEQ ID NO: 290679 - RNA, 32 nt, Human
aagcagcagagcucuggggaccucaguggggg

SEQ ID NO: 290680 - RNA, 32 nt, Human
aagcagcagccccugcgcugccucaucuacau

SEQ ID NO: 290681 - RNA, 32 nt, Human
aagcagcagccccuguaagcacacgagacaau

SEQ ID NO: 290682 - RNA, 32 nt, Human
aagcagcagccgcggcggcggcggcggcugga

SEQ ID NO: 290683 - RNA, 32 nt, Human
aagcagcaggcagagacgauagacgccuggcu

SEQ ID NO: 290684 - RNA, 32 nt, Human
aagcagcagguucgagucuccacgccgucagc

SEQ ID NO: 290685 - RNA, 32 nt, Human
aagcagcagugaggaggaagguaaaggagaag

SEQ ID NO: 290686 - RNA, 32 nt, Human
aagcagcagugcgcuuccaccucggggccuug

SEQ ID NO: 290687 - RNA, 22 nt, Human
aagcagcaguguaccaguguca

SEQ ID NO: 290688 - RNA, 32 nt, Human
aagcagcaguuccacagcacagccuggucagu

SEQ ID NO: 290689 - RNA, 32 nt, Human
aagcagcauccugaccacagcuggcagucaag

SEQ ID NO: 290690 - RNA, 32 nt, Human
aagcagcaugaagugcucacuguggcuuuauu

SEQ ID NO: 290691 - RNA, 32 nt, Human
aagcagcauggcugagcuccuggagacgaggg

SEQ ID NO: 290692 - RNA, 32 nt, Human
aagcagcauuacagucccagaccugcggguuu

SEQ ID NO: 290693 - RNA, 32 nt, Human
aagcagcauuggaagaaaucacuccugaccaa

SEQ ID NO: 290694 - RNA, 32 nt, Human
aagcagcauuguccucugggcauguggcucag

SEQ ID NO: 290695 - RNA, 32 nt, Human
aagcagccaaccuaaccauccagaccccaccc

SEQ ID NO: 290696 - RNA, 32 nt, Human
aagcagccaccugagccaccaccgagccaugg

SEQ ID NO: 290697 - RNA, 32 nt, Human
aagcagccagcaaugagugcucuguuuugauc

SEQ ID NO: 290698 - RNA, 22 nt, Human
aagcagccagcgccugccugaa

SEQ ID NO: 290699 - RNA, 32 nt, Human
aagcagccagcuccccacaccuuccagggccc

SEQ ID NO: 290700 - RNA, 32 nt, Human
aagcagccaugaaaaagacuaugugcagcaag

SEQ ID NO: 290701 - RNA, 32 nt, Human
aagcagccaugaaccaggcuguccaggaaugg

SEQ ID NO: 290702 - RNA, 32 nt, Human
aagcagcccagggaauccucuggaccaucaga

SEQ ID NO: 290703 - RNA, 32 nt, Human
aagcagcccugaggaggaagaggaggcgaggg

SEQ ID NO: 290704 - RNA, 32 nt, Human
aagcagcccugccugcugauuuaacacacuuu

SEQ ID NO: 290705 - RNA, 32 nt, Human
aagcagccggaagugccuuaacuuguggaacc

SEQ ID NO: 290706 - RNA, 20 nt, Human
aagcagccguccccucugca

SEQ ID NO: 290707 - RNA, 32 nt, Human
aagcagcgacagcucaucagcagucuaacaac

SEQ ID NO: 290708 - RNA, 32 nt, Human
aagcagcgugucuccaucccccucucuagggg

SEQ ID NO: 290709 - RNA, 32 nt, Human
aagcagcguucagggauccucucagucccaga

SEQ ID NO: 290710 - RNA, 32 nt, Human
aagcagcuaggaguacaguugggagccacugu

SEQ ID NO: 290711 - RNA, 32 nt, Human
aagcagcuauacguggcauacauguauuuaaa

SEQ ID NO: 290712 - RNA, 31 nt, Human
aagcagcuaugauauauccuguugaaucaaa

SEQ ID NO: 290713 - RNA, 32 nt, Human
aagcagcucagguuguagugggccauuaggaa

SEQ ID NO: 290714 - RNA, 32 nt, Human
aagcagcucauuugugacaacauuucauauca

SEQ ID NO: 290715 - RNA, 32 nt, Human
aagcagcuccagcugcuccacucugacaccga

SEQ ID NO: 290716 - RNA, 32 nt, Human
aagcagcuccaggaguuagcugagacaccccc

SEQ ID NO: 290717 - RNA, 32 nt, Human
aagcagcuccugcugggagcauggccucagcc

SEQ ID NO: 290718 - RNA, 32 nt, Human
aagcagcugcugugacaggccaaucccaggcu

SEQ ID NO: 290719 - RNA, 32 nt, Human
aagcagcuggaggguuuuuggaucccuguccc

SEQ ID NO: 290720 - RNA, 32 nt, Human
aagcagcugggaaaagaugggaaaacuagaaa

SEQ ID NO: 290721 - RNA, 32 nt, Human
aagcagcugggagcuuggaaaccuggucucuu

SEQ ID NO: 290722 - RNA, 32 nt, Human
aagcagcuuggagccucuagguugagaagaga

SEQ ID NO: 290723 - RNA, 32 nt, Human
aagcagcuuuggaaacugugaaugaucuuuag

SEQ ID NO: 290724 - RNA, 32 nt, Human
aagcaggaaaaucgcuugaacugagagucaag

SEQ ID NO: 290725 - RNA, 32 nt, Human
aagcaggaaaccuucugcugggcauagcuugu

SEQ ID NO: 290726 - RNA, 32 nt, Human
aagcaggaaagggagacaaagacuggcuucug

SEQ ID NO: 290727 - RNA, 32 nt, Human
aagcaggaaauaggagaaaaguaaacaacuuu

SEQ ID NO: 290728 - RNA, 32 nt, Human
aagcaggaagauaugauaguucccugggcagc

SEQ ID NO: 290729 - RNA, 32 nt, Human
aagcaggaaggagccuguuacagucaagguga

SEQ ID NO: 290730 - RNA, 32 nt, Human
aagcaggaaguuaagagcaggaggaagcguug

SEQ ID NO: 290731 - RNA, 32 nt, Human
aagcaggaaucagagaccuuccagaaauacua

SEQ ID NO: 290732 - RNA, 32 nt, Human
aagcaggagaaggaggggaaaauuaccggccu

SEQ ID NO: 290733 - RNA, 32 nt, Human
aagcaggagagacaggggagacuggggaggcc

SEQ ID NO: 290734 - RNA, 32 nt, Human
aagcaggagagggggaggaaaaggagagggaa

SEQ ID NO: 290735 - RNA, 32 nt, Human
aagcaggagccgagaccccggagcagccacaa

SEQ ID NO: 290736 - RNA, 31 nt, Human
aagcaggagcuuucauuuacauugucuuguc

SEQ ID NO: 290737 - RNA, 32 nt, Human
aagcaggaggacugcuugaggccaggaauucg

SEQ ID NO: 290738 - RNA, 32 nt, Human
aagcaggaggagguggguggggugaaggagga

SEQ ID NO: 290739 - RNA, 32 nt, Human
aagcaggagggcuauguuccugggacucgggc

SEQ ID NO: 290740 - RNA, 32 nt, Human
aagcaggagguggagaagacccagugaagugc

SEQ ID NO: 290741 - RNA, 32 nt, Human
aagcaggauaccucuauaugucagccuugccu

SEQ ID NO: 290742 - RNA, 32 nt, Human
aagcaggauggagcuggagugagguggagggg

SEQ ID NO: 290743 - RNA, 32 nt, Human
aagcaggauguggcaguugcagugagaaagga

SEQ ID NO: 290744 - RNA, 18 nt, Human
aagcaggauugcuuucau

SEQ ID NO: 290745 - RNA, 32 nt, Human
aagcaggcaagaagcggaggcagugaguacag

SEQ ID NO: 290746 - RNA, 32 nt, Human
aagcaggcacauuaucauucucaggccacugc

SEQ ID NO: 290747 - RNA, 32 nt, Human
aagcaggcagaagaaaaggcagcuguggugug

SEQ ID NO: 290748 - RNA, 32 nt, Human
aagcaggcagagaagccaggggugugaggaag

SEQ ID NO: 290749 - RNA, 32 nt, Human
aagcaggcagauaaguuggagcagggguuggu

SEQ ID NO: 290750 - RNA, 32 nt, Human
aagcaggcaggaaaggcucaagugauccuccu

SEQ ID NO: 290751 - RNA, 32 nt, Human
aagcaggcagggcaaaggucaagacuguggua

SEQ ID NO: 290752 - RNA, 32 nt, Human
aagcaggcauguugaagaguugagugaucacg

SEQ ID NO: 290753 - RNA, 32 nt, Human
aagcaggccaggggucuccacagggagcugcu

SEQ ID NO: 290754 - RNA, 32 nt, Human
aagcaggccuguaaaguacucuaaaguacuuc

SEQ ID NO: 290755 - RNA, 32 nt, Human
aagcaggcugcugaucucagcaguugauaugg

SEQ ID NO: 290756 - RNA, 32 nt, Human
aagcaggcuuucuaaugggaggcuuuaaguau

SEQ ID NO: 290757 - RNA, 32 nt, Human
aagcagggacuggggcaggcgagcccggacag

SEQ ID NO: 290758 - RNA, 32 nt, Human
aagcagggagagacuggguaggguagggcggu

SEQ ID NO: 290759 - RNA, 32 nt, Human
aagcagggagagaugauuugcugguggggcug

SEQ ID NO: 290760 - RNA, 32 nt, Human
aagcagggagcacuucuggcugugcauaagag

SEQ ID NO: 290761 - RNA, 32 nt, Human
aagcagggaggauuugggagggcagagaugag

SEQ ID NO: 290762 - RNA, 32 nt, Human
aagcagggaguggggaaaaguauuuugagggg

SEQ ID NO: 290763 - RNA, 32 nt, Human
aagcagggauggccuguuccacugugaucuua

SEQ ID NO: 290764 - RNA, 32 nt, Human
aagcagggcaguugggcccaccccagagcagc

SEQ ID NO: 290765 - RNA, 20 nt, Human
aagcagggccgggccuuccu

SEQ ID NO: 290766 - RNA, 32 nt, Human
aagcaggggagacagguuuaaggguagcuggc

SEQ ID NO: 290767 - RNA, 32 nt, Human
aagcaggggccaggccaggccagugccuucgc

SEQ ID NO: 290768 - RNA, 18 nt, Human
aagcaggggccagggagg

SEQ ID NO: 290769 - RNA, 32 nt, Human
aagcaggggcggcagaggcucaacgggaugcu

SEQ ID NO: 290770 - RNA, 32 nt, Human
aagcagggggcuacuucucccuucccucgguu

SEQ ID NO: 290771 - RNA, 32 nt, Human
aagcagggggucuuuauauucccugcagaaac

SEQ ID NO: 290772 - RNA, 32 nt, Human
aagcaggguaagcaggcuggcccaggguaagg

SEQ ID NO: 290773 - RNA, 31 nt, Human
aagcagggucauaauuugugaucuguggugg

SEQ ID NO: 290774 - RNA, 31 nt, Human
aagcagggugagagauucuaacgacuggaug

SEQ ID NO: 290775 - RNA, 32 nt, Human
aagcaggguggaggggaagggugggucucagu

SEQ ID NO: 290776 - RNA, 32 nt, Human
aagcagggugggcagugagagcugcuauggaa

SEQ ID NO: 290777 - RNA, 32 nt, Human
aagcaggguuuugagccacugcugcugcugcc

SEQ ID NO: 290778 - RNA, 32 nt, Human
aagcaggucuaggacuccccugcaccuuugcc

SEQ ID NO: 290779 - RNA, 32 nt, Human
aagcaggucuccaacuccuggacucaagcgau

SEQ ID NO: 290780 - RNA, 32 nt, Human
aagcaggugacaccagaagacaaggacacugg

SEQ ID NO: 290781 - RNA, 32 nt, Human
aagcaggugcuggacgucagucaggagcugcu

SEQ ID NO: 290782 - RNA, 32 nt, Human
aagcagguggcagaagaaggaaacaaggucag

SEQ ID NO: 290783 - RNA, 32 nt, Human
aagcagguuucaaggaaguagaaacaaaauac

SEQ ID NO: 290784 - RNA, 32 nt, Human
aagcagguuucuguacuuaagagucccccaga

SEQ ID NO: 290785 - RNA, 32 nt, Human
aagcaguaaggguuuccaggguucucucuagc

SEQ ID NO: 290786 - RNA, 32 nt, Human
aagcaguagcacaaccaaagaaaaaguuggga

SEQ ID NO: 290787 - RNA, 32 nt, Human
aagcaguaugcugcugugguuagaagcagauu

SEQ ID NO: 290788 - RNA, 32 nt, Human
aagcagucauucuuucuacuaaauccauuuca

SEQ ID NO: 290789 - RNA, 32 nt, Human
aagcagucggaccuagucaagccggagcagcc

SEQ ID NO: 290790 - RNA, 32 nt, Human
aagcagucuaaauauaaucaacguacagugag

SEQ ID NO: 290791 - RNA, 21 nt, Human
aagcagucuuagagagugcuu

SEQ ID NO: 290792 - RNA, 32 nt, Human
aagcagugaaaacaggcuucuacucaagugaa

SEQ ID NO: 290793 - RNA, 32 nt, Human
aagcagugaaucugaaacaauuuucacacccu

SEQ ID NO: 290794 - RNA, 31 nt, Human
aagcagugacuucugccaacagagugugggg

SEQ ID NO: 290795 - RNA, 32 nt, Human
aagcagugagggcaguacauguucuuuuugca

SEQ ID NO: 290796 - RNA, 32 nt, Human
aagcagugagguccuaaaguguuacaagagua

SEQ ID NO: 290797 - RNA, 29 nt, Human
aagcagugcaaauaaauuacauuuuuccc

SEQ ID NO: 290798 - RNA, 32 nt, Human
aagcagugcuggauuccaggagucuuggcauc

SEQ ID NO: 290799 - RNA, 19 nt, Human
aagcaguggaccccaggag

SEQ ID NO: 290800 - RNA, 19 nt, Human
aagcaguggagcccaggag

SEQ ID NO: 290801 - RNA, 32 nt, Human
aagcaguggaggcucagccacugugaggaggu

SEQ ID NO: 290802 - RNA, 32 nt, Human
aagcaguggagguggggguugcuguugauuga

SEQ ID NO: 290803 - RNA, 32 nt, Human
aagcaguguaaugcauuuggcacuuuguuugg

SEQ ID NO: 290804 - RNA, 32 nt, Human
aagcagugucugcaaggacacaagcugagcuu

SEQ ID NO: 290805 - RNA, 32 nt, Human
aagcaguguguaauuuuggauugccugcccuu

SEQ ID NO: 290806 - RNA, 32 nt, Human
aagcaguuaccugaugccugcugcugaagagc

SEQ ID NO: 290807 - RNA, 32 nt, Human
aagcaguuagaggagaaaaaggaauggagcag

SEQ ID NO: 290808 - RNA, 32 nt, Human
aagcaguuaggucauuuuaacugacuugauua

SEQ ID NO: 290809 - RNA, 23 nt, Human
aagcaguucaacuucucaaguua

SEQ ID NO: 290810 - RNA, 31 nt, Human
aagcaguucaaguugacaacagcagaaacag

SEQ ID NO: 290811 - RNA, 32 nt, Human
aagcaguucccagaaaggccuguggagugaga

SEQ ID NO: 290812 - RNA, 32 nt, Human
aagcaguucucuuuccucagccuccugaguag

SEQ ID NO: 290813 - RNA, 32 nt, Human
aagcaguucugccucagccucccaaguagcug

SEQ ID NO: 290814 - RNA, 21 nt, Human
aagcaguugcucaaauguugu

SEQ ID NO: 290815 - RNA, 32 nt, Human
aagcaguuggaagugaaaucuaugaugugaaa

SEQ ID NO: 290816 - RNA, 32 nt, Human
aagcaguuggacucgggaagcugaggcaggag

SEQ ID NO: 290817 - RNA, 32 nt, Human
aagcaguuuagagacugggggaggccggaucu

SEQ ID NO: 290818 - RNA, 32 nt, Human
aagcauaaaucccuguuuaguguuacauggga

SEQ ID NO: 290819 - RNA, 32 nt, Human
aagcauaacauggguacagaggggacaacaau

SEQ ID NO: 290820 - RNA, 22 nt, Human
aagcauaaguaaaaacacaacu

SEQ ID NO: 290821 - RNA, 32 nt, Human
aagcauaaguguaacucccauccaccagggaa

SEQ ID NO: 290822 - RNA, 32 nt, Human
aagcauaauauaaaauuaguuagauuuugcaa

SEQ ID NO: 290823 - RNA, 32 nt, Human
aagcauacaagugcagguuucuuuuugauaua

SEQ ID NO: 290824 - RNA, 32 nt, Human
aagcauagaggcagaaagcagacuagugcugu

SEQ ID NO: 290825 - RNA, 32 nt, Human
aagcauagcuuucugcaaacuugucuuuaaug

SEQ ID NO: 290826 - RNA, 32 nt, Human
aagcauagugccugcaugcuucaugaucagua

SEQ ID NO: 290827 - RNA, 32 nt, Human
aagcauauauacuaccuauauguaugugcugu

SEQ ID NO: 290828 - RNA, 32 nt, Human
aagcauaucaucaaaaauaguaauagccuaca

SEQ ID NO: 290829 - RNA, 32 nt, Human
aagcauauccuugaagacaagaaugcacccuu

SEQ ID NO: 290830 - RNA, 32 nt, Human
aagcauaugcugagaauaaacauguuacacau

SEQ ID NO: 290831 - RNA, 32 nt, Human
aagcauauguggggaggcuggcugguugaguu

SEQ ID NO: 290832 - RNA, 32 nt, Human
aagcauauguuugaccacuuugcugacuguau

SEQ ID NO: 290833 - RNA, 32 nt, Human
aagcauauuaccaaaaugaaugaauaaaugaa

SEQ ID NO: 290834 - RNA, 32 nt, Human
aagcaucacaugaacuuguaaaggaauuuaaa

SEQ ID NO: 290835 - RNA, 32 nt, Human
aagcaucacccaggcuggcagaucaugguagc

SEQ ID NO: 290836 - RNA, 32 nt, Human
aagcaucaccucaggccaggugcaguggcuca

SEQ ID NO: 290837 - RNA, 32 nt, Human
aagcaucacuuacaggaccagagcaagcucag

SEQ ID NO: 290838 - RNA, 32 nt, Human
aagcaucagaucuuuguauaugcuaagauuua

SEQ ID NO: 290839 - RNA, 32 nt, Human
aagcaucagcuaggcuggagugauuuguuaca

SEQ ID NO: 290840 - RNA, 32 nt, Human
aagcaucagggaugcuaagugcagugaugagg

SEQ ID NO: 290841 - RNA, 32 nt, Human
aagcaucagguguggaauggaaaacgcagaag

SEQ ID NO: 290842 - RNA, 32 nt, Human
aagcaucaugauaagauaugugugaagcccac

SEQ ID NO: 290843 - RNA, 32 nt, Human
aagcauccaagauuuuggauccugggccucag

SEQ ID NO: 290844 - RNA, 32 nt, Human
aagcauccauuuucuauccuuuuagagucuua

SEQ ID NO: 290845 - RNA, 32 nt, Human
aagcaucccauaaccaaccuucagccccaccg

SEQ ID NO: 290846 - RNA, 32 nt, Human
aagcaucccccaucccuugcaggcugggggcu

SEQ ID NO: 290847 - RNA, 32 nt, Human
aagcauccccgguggucugcacacggcucagg

SEQ ID NO: 290848 - RNA, 32 nt, Human
aagcaucccuggagggcaaccuggcggagaca

SEQ ID NO: 290849 - RNA, 32 nt, Human
aagcauccucuaagacccacagaaggaaucaa

SEQ ID NO: 290850 - RNA, 32 nt, Human
aagcauccuuugcucucuuuccagaaaggaag

SEQ ID NO: 290851 - RNA, 32 nt, Human
aagcaucgcuggagggcagccugguggagacg

SEQ ID NO: 290852 - RNA, 32 nt, Human
aagcaucgcuggagggcagccugguggagaug

SEQ ID NO: 290853 - RNA, 32 nt, Human
aagcaucuaggcugccucuucacuuucuuuua

SEQ ID NO: 290854 - RNA, 32 nt, Human
aagcaucuaucuauucugaaucauguuuggaa

SEQ ID NO: 290855 - RNA, 32 nt, Human
aagcaucuccugcccucucuccuuccucccca

SEQ ID NO: 290856 - RNA, 32 nt, Human
aagcaucugggccuuucucuuccucuuggucc

SEQ ID NO: 290857 - RNA, 32 nt, Human
aagcaucugggcuggauggaauuuagcaucaa

SEQ ID NO: 290858 - RNA, 32 nt, Human
aagcaucugugccauuguggggacucccuggg

SEQ ID NO: 290859 - RNA, 32 nt, Human
aagcaucuucauuuugcuagcuuugcagaauc

SEQ ID NO: 290860 - RNA, 22 nt, Human
aagcaugaagauaaacacagcu

SEQ ID NO: 290861 - RNA, 32 nt, Human
aagcaugaaggagagaaaaaugggggucgugg

SEQ ID NO: 290862 - RNA, 32 nt, Human
aagcaugaaguuaaagagugaagggguuaugu

SEQ ID NO: 290863 - RNA, 32 nt, Human
aagcaugacagaaaauauguauuaacacuacu

SEQ ID NO: 290864 - RNA, 32 nt, Human
aagcaugaccgaugcaccauuuucuaguuuua

SEQ ID NO: 290865 - RNA, 32 nt, Human
aagcaugacucauccagguuccagagccaaag

SEQ ID NO: 290866 - RNA, 29 nt, Human
aagcaugagccaagcucccuacuguguca

SEQ ID NO: 290867 - RNA, 32 nt, Human
aagcaugauaagaggaggaagacauaaaguug

SEQ ID NO: 290868 - RNA, 32 nt, Human
aagcaugccacuauacuccagccugggcaaca

SEQ ID NO: 290869 - RNA, 31 nt, Human
aagcaugccguucugcaccuacccaguugcc

SEQ ID NO: 290870 - RNA, 32 nt, Human
aagcaugccuuaaacccagugaagcaacugag

SEQ ID NO: 290871 - RNA, 32 nt, Human
aagcaugcugccccuggccuuccaaaucucau

SEQ ID NO: 290872 - RNA, 32 nt, Human
aagcaugcuuugacgaagcuaucgguaacaca

SEQ ID NO: 290873 - RNA, 32 nt, Human
aagcauggaacagcagcugugcgagcucugcu

SEQ ID NO: 290874 - RNA, 32 nt, Human
aagcauggccccgugaggguuuugaaagagaa

SEQ ID NO: 290875 - RNA, 32 nt, Human
aagcauggccuccccagagcagccugcggccu

SEQ ID NO: 290876 - RNA, 32 nt, Human
aagcauggccugggagcuuggaagggaggggu

SEQ ID NO: 290877 - RNA, 32 nt, Human
aagcauggcugagagcaacugagggaaaggga

SEQ ID NO: 290878 - RNA, 29 nt, Human
aagcaugggaggaaggaagauggcgacag

SEQ ID NO: 290879 - RNA, 32 nt, Human
aagcaugggggagggggagagaggucaggcca

SEQ ID NO: 290880 - RNA, 32 nt, Human
aagcauggguagcugccaucugcaggcaaguu

SEQ ID NO: 290881 - RNA, 32 nt, Human
aagcauggugcugcugcuucugcugcuucucc

SEQ ID NO: 290882 - RNA, 32 nt, Human
aagcaugguucaucuucccauuuauuuacguc

SEQ ID NO: 290883 - RNA, 32 nt, Human
aagcaugguuccuuucuuaaagaaaucuucca

SEQ ID NO: 290884 - RNA, 32 nt, Human
aagcauguagcucagugguuuccaaauuuggc

SEQ ID NO: 290885 - RNA, 32 nt, Human
aagcauguagggucuucaugucuuuucucuga

SEQ ID NO: 290886 - RNA, 32 nt, Human
aagcaugucuagugucuccaaacugggaaagu

SEQ ID NO: 290887 - RNA, 32 nt, Human
aagcaugugaaagagacacacaaugaggaaau

SEQ ID NO: 290888 - RNA, 32 nt, Human
aagcaugugagccggggagcagcuguccucag

SEQ ID NO: 290889 - RNA, 32 nt, Human
aagcaugugagguucccaacacugucagcaaa

SEQ ID NO: 290890 - RNA, 17 nt, Human
aagcaugugccugugug

SEQ ID NO: 290891 - RNA, 32 nt, Human
aagcaugugggugcccccuuucugccagcagu

SEQ ID NO: 290892 - RNA, 32 nt, Human
aagcaugugggugcucccuuucugccagcagu

SEQ ID NO: 290893 - RNA, 32 nt, Human
aagcauuagucuuuguacuuugcuuacauucc

SEQ ID NO: 290894 - RNA, 32 nt, Human
aagcauucaaaaccaaaccaaacagcaguuca

SEQ ID NO: 290895 - RNA, 32 nt, Human
aagcauucaagcaacucuguauuuuccucaua

SEQ ID NO: 290896 - RNA, 32 nt, Human
aagcauucagaagaaaaagaagcaaccucagu

SEQ ID NO: 290897 - RNA, 32 nt, Human
aagcauucagaaugauguuucgguucuuugag

SEQ ID NO: 290898 - RNA, 32 nt, Human
aagcauuccaaagccucugauuguuguuuccu

SEQ ID NO: 290899 - RNA, 32 nt, Human
aagcauuccaguagcuaugaccugccgcccug

SEQ ID NO: 290900 - RNA, 32 nt, Human
aagcauuccucaggaagcgucucacucuggga

SEQ ID NO: 290901 - RNA, 32 nt, Human
aagcauucuggcaucccagugaagagcucagg

SEQ ID NO: 290902 - RNA, 32 nt, Human
aagcauugaaggggaccagccgcugaagggau

SEQ ID NO: 290903 - RNA, 32 nt, Human
aagcauugcacuguaccucucguaacacagca

SEQ ID NO: 290904 - RNA, 32 nt, Human
aagcauugccuggccuuccugucuagucucuc

SEQ ID NO: 290905 - RNA, 21 nt, Human
aagcauugccuuucuuguuug

SEQ ID NO: 290906 - RNA, 23 nt, Human
aagcauugcuaccaaccgccuca

SEQ ID NO: 290907 - RNA, 32 nt, Human
aagcauugcuacccauuuucagcuucucugcc

SEQ ID NO: 290908 - RNA, 32 nt, Human
aagcauugcuggagggcagccugguggagacg

SEQ ID NO: 290909 - RNA, 32 nt, Human
aagcauuggcaggcugggugaaaaugagaaag

SEQ ID NO: 290910 - RNA, 32 nt, Human
aagcauuggcauggucaugaaugguggcccag

SEQ ID NO: 290911 - RNA, 32 nt, Human
aagcauugggauuacaggcaucagccaccaca

SEQ ID NO: 290912 - RNA, 32 nt, Human
aagcauuggguguuuugcaauggcuacacaaa

SEQ ID NO: 290913 - RNA, 24 nt, Human
aagcauuuaccugccugucuguaa

SEQ ID NO: 290914 - RNA, 24 nt, Human
aagcauuuauccaaauucugcuca

SEQ ID NO: 290915 - RNA, 32 nt, Human
aagcauuuauucuuguguucuggauuuagagc

SEQ ID NO: 290916 - RNA, 32 nt, Human
aagcauuuccacagauggugucaggguuucaa

SEQ ID NO: 290917 - RNA, 32 nt, Human
aagcauuuccuugagcucuucugagaaaaacc

SEQ ID NO: 290918 - RNA, 32 nt, Human
aagcauuucuacugcggggaaggagagguaaa

SEQ ID NO: 290919 - RNA, 32 nt, Human
aagcauuugcuucuguuuucccuaccuagaau

SEQ ID NO: 290920 - RNA, 32 nt, Human
aagcauuuguguguuuuccuugaacugucugu

SEQ ID NO: 290921 - RNA, 32 nt, Human
aagcauuuuacucacacccacagcagcaagaa

SEQ ID NO: 290922 - RNA, 32 nt, Human
aagcauuuuccucuucccuuuucagggugaag

SEQ ID NO: 290923 - RNA, 32 nt, Human
aagccaaaaaccaaagcaagacuuacuaacgc

SEQ ID NO: 290924 - RNA, 32 nt, Human
aagccaaaacacacaagucgguggugaugaca

SEQ ID NO: 290925 - RNA, 32 nt, Human
aagccaaaacucaaggagaaggugcggccaga

SEQ ID NO: 290926 - RNA, 32 nt, Human
aagccaaaagcugggaauggccaucugagaaa

SEQ ID NO: 290927 - RNA, 32 nt, Human
aagccaaaagugggauccuggaggccgcuggc

SEQ ID NO: 290928 - RNA, 32 nt, Human
aagccaaaaugucuucuggaggaggauauugc

SEQ ID NO: 290929 - RNA, 32 nt, Human
aagccaaaauuagaaaaauaacucccuacuuu

SEQ ID NO: 290930 - RNA, 32 nt, Human
aagccaaagaggaggaggcaggagaagcaggc

SEQ ID NO: 290931 - RNA, 32 nt, Human
aagccaaaguucaacagaugagaggaggguag

SEQ ID NO: 290932 - RNA, 23 nt, Human
aagccaaauacugccauccgaga

SEQ ID NO: 290933 - RNA, 23 nt, Human
aagccaaaugcugccauccgaga

SEQ ID NO: 290934 - RNA, 32 nt, Human
aagccaaauggcugcacuggccgauucugguc

SEQ ID NO: 290935 - RNA, 32 nt, Human
aagccaaauuaaaaaucaaggauucagucaaa

SEQ ID NO: 290936 - RNA, 32 nt, Human
aagccaacaaccacagugccaccaagcucaca

SEQ ID NO: 290937 - RNA, 32 nt, Human
aagccaacacaaaaauaaagaacuucaaauag

SEQ ID NO: 290938 - RNA, 19 nt, Human
aagccaaccaacaaacaca

SEQ ID NO: 290939 - RNA, 32 nt, Human
aagccaaccagccuuuggguccugggcaggug

SEQ ID NO: 290940 - RNA, 32 nt, Human
aagccaaccuauacuaaaaauuaguuccauaa

SEQ ID NO: 290941 - RNA, 32 nt, Human
aagccaaccucuaaccuccugaccucaugcua

SEQ ID NO: 290942 - RNA, 32 nt, Human
aagccaaccugagcaaacacagcagcccgagu

SEQ ID NO: 290943 - RNA, 32 nt, Human
aagccaacugaaagaaucuggaagaggagcuc

SEQ ID NO: 290944 - RNA, 32 nt, Human
aagccaacuggaacugugccuuuucucuuguc

SEQ ID NO: 290945 - RNA, 32 nt, Human
aagccaacuguggagcucggcggagaccucuc

SEQ ID NO: 290946 - RNA, 32 nt, Human
aagccaagaagaggaaacaagauaauaaaugu

SEQ ID NO: 290947 - RNA, 24 nt, Human
aagccaagagaagccacauggaga

SEQ ID NO: 290948 - RNA, 32 nt, Human
aagccaagaugccacccaaauccacucugcag

SEQ ID NO: 290949 - RNA, 32 nt, Human
aagccaagauuguaccacugcacuccagccug

SEQ ID NO: 290950 - RNA, 22 nt, Human
aagccaagccacaugccagaga

SEQ ID NO: 290951 - RNA, 32 nt, Human
aagccaagccagcuaccaccaggccugagggg

SEQ ID NO: 290952 - RNA, 23 nt, Human
aagccaagcccuccgccuagagg

SEQ ID NO: 290953 - RNA, 32 nt, Human
aagccaagccuccugugguccugagcaugaag

SEQ ID NO: 290954 - RNA, 32 nt, Human
aagccaaggagaccauuggccauccaggaaau

SEQ ID NO: 290955 - RNA, 32 nt, Human
aagccaaggagugcugagggcuggagugggug

SEQ ID NO: 290956 - RNA, 32 nt, Human
aagccaaggcaagguagcccugggcagccuuu

SEQ ID NO: 290957 - RNA, 21 nt, Human
aagccaaguaaagcccagaga

SEQ ID NO: 290958 - RNA, 31 nt, Human
aagccaagugucugggagcacagugagacca

SEQ ID NO: 290959 - RNA, 32 nt, Human
aagccaaugcaugcugagcugaaggaauuugu

SEQ ID NO: 290960 - RNA, 21 nt, Human
aagccaaugucaccucagagg

SEQ ID NO: 290961 - RNA, 32 nt, Human
aagccaauguuaggaauguuuaaaggcagcug

SEQ ID NO: 290962 - RNA, 32 nt, Human
aagccaauuauaaacucauuacuccaaagaca

SEQ ID NO: 290963 - RNA, 32 nt, Human
aagccaauucuccguaguuuaacccuguguau

SEQ ID NO: 290964 - RNA, 22 nt, Human
aagccaauuggauuucaaguua

SEQ ID NO: 290965 - RNA, 32 nt, Human
aagccaauuuggaaacuuagguuagugacaaa

SEQ ID NO: 290966 - RNA, 32 nt, Human
aagccacaaaggcauucgaagagaaugaagug

SEQ ID NO: 290967 - RNA, 32 nt, Human
aagccacacaugcauguucgugcaucccccac

SEQ ID NO: 290968 - RNA, 32 nt, Human
aagccacacccacugcuggguggacacuuagg

SEQ ID NO: 290969 - RNA, 32 nt, Human
aagccacaccuggucuguuuucugugcacugu

SEQ ID NO: 290970 - RNA, 32 nt, Human
aagccacacuccucaagugccugaaauacccc

SEQ ID NO: 290971 - RNA, 32 nt, Human
aagccacagaagagacagagggaaaaagacag

SEQ ID NO: 290972 - RNA, 32 nt, Human
aagccacagccccugccugggucuccacaucc

SEQ ID NO: 290973 - RNA, 32 nt, Human
aagccacaggccccuuccccagccucaguuca

SEQ ID NO: 290974 - RNA, 31 nt, Human
aagccacagggucagcaccuucuggucacuc

SEQ ID NO: 290975 - RNA, 32 nt, Human
aagccacaggguggggcagccaaggcaggggc

SEQ ID NO: 290976 - RNA, 32 nt, Human
aagccacaguuucucugugcuguguuuucuaa

SEQ ID NO: 290977 - RNA, 32 nt, Human
aagccacaugccacuaaccacaagcaagcugg

SEQ ID NO: 290978 - RNA, 32 nt, Human
aagccacaugcuggauggcuacaaggggcuca

SEQ ID NO: 290979 - RNA, 32 nt, Human
aagccaccacuccuggccaacuguaguugaac

SEQ ID NO: 290980 - RNA, 32 nt, Human
aagccaccaugauuguguucucugccucuggu

SEQ ID NO: 290981 - RNA, 32 nt, Human
aagccaccaugccuggcuaaaauucuuuugua

SEQ ID NO: 290982 - RNA, 32 nt, Human
aagccaccccucuuuaaacaaauuuaaagauc

SEQ ID NO: 290983 - RNA, 32 nt, Human
aagccacccuucaccuggacaggaugagagug

SEQ ID NO: 290984 - RNA, 32 nt, Human
aagccaccgcacuccagccugggcgacagagc

SEQ ID NO: 290985 - RNA, 32 nt, Human
aagccaccgcagcugcugccacucugcugccu

SEQ ID NO: 290986 - RNA, 32 nt, Human
aagccaccucaaacuacaauuuucagaaucug

SEQ ID NO: 290987 - RNA, 32 nt, Human
aagccaccuccaccucuguccuggcugccuca

SEQ ID NO: 290988 - RNA, 32 nt, Human
aagccaccuccagggcagucccagggacugaa

SEQ ID NO: 290989 - RNA, 32 nt, Human
aagccaccucugcccuaacccuugccagagcu

SEQ ID NO: 290990 - RNA, 32 nt, Human
aagccaccugauuuuaaggcugacauuagguu

SEQ ID NO: 290991 - RNA, 32 nt, Human
aagccaccugcuaacucccugccugugugguc

SEQ ID NO: 290992 - RNA, 32 nt, Human
aagccaccuugcccgcagcccaggcuccuggg

SEQ ID NO: 290993 - RNA, 32 nt, Human
aagccacuaucacugcuccccugggcaacugc

SEQ ID NO: 290994 - RNA, 32 nt, Human
aagccacucaagaugugaaggaagagaaucau

SEQ ID NO: 290995 - RNA, 32 nt, Human
aagccacugaagauggaaaacgagacagucag

SEQ ID NO: 290996 - RNA, 32 nt, Human
aagccacugcacucaaacguggggaacaagag

SEQ ID NO: 290997 - RNA, 32 nt, Human
aagccacugcacuccagccugggcgacagagc

SEQ ID NO: 290998 - RNA, 32 nt, Human
aagccacugccuccccuggcugugccacagcg

SEQ ID NO: 290999 - RNA, 32 nt, Human
aagccacuguuuugaacacauuuccuugaaaa

SEQ ID NO: 291000 - RNA, 32 nt, Human
aagccacuuaagcagaacacuuucuucaucuc

SEQ ID NO: 291001 - RNA, 32 nt, Human
aagccacuuagcccucuccuguccugcaccau

SEQ ID NO: 291002 - RNA, 32 nt, Human
aagccacuuccugagcccuccugcugcuuugg

SEQ ID NO: 291003 - RNA, 32 nt, Human
aagccacuuuauuuuaaaauaucaugugacag

SEQ ID NO: 291004 - RNA, 32 nt, Human
aagccacuuugacaacguuucugagccagggg

SEQ ID NO: 291005 - RNA, 32 nt, Human
aagccacuuuucuauuacuuaaguaagaagga

SEQ ID NO: 291006 - RNA, 32 nt, Human
aagccagaaagagaugaagggcaggcucuggg

SEQ ID NO: 291007 - RNA, 32 nt, Human
aagccagaacuccaccccggcgcccgcgccau

SEQ ID NO: 291008 - RNA, 32 nt, Human
aagccagaagccaggggguggggaagagagac

SEQ ID NO: 291009 - RNA, 32 nt, Human
aagccagaagcccucuggguggcccucaggug

SEQ ID NO: 291010 - RNA, 32 nt, Human
aagccagaaggagagcccucaccagaaaccaa

SEQ ID NO: 291011 - RNA, 32 nt, Human
aagccagaaguggccccucugccccuccagac

SEQ ID NO: 291012 - RNA, 22 nt, Human
aagccagaccaccacuuagaga

SEQ ID NO: 291013 - RNA, 32 nt, Human
aagccagacuaauuuucaugccuccugacucc

SEQ ID NO: 291014 - RNA, 32 nt, Human
aagccagagccagccugcuggccucagcuccg

SEQ ID NO: 291015 - RNA, 32 nt, Human
aagccagaggagggucccccagcugggugggc

SEQ ID NO: 291016 - RNA, 21 nt, Human
aagccagaggauacccaggga

SEQ ID NO: 291017 - RNA, 32 nt, Human
aagccagaggcagagguugcaaugagccggga

SEQ ID NO: 291018 - RNA, 32 nt, Human
aagccagaggcagcuccagccugggggacagg

SEQ ID NO: 291019 - RNA, 32 nt, Human
aagccagaggccccaggcucugugcugaugaa

SEQ ID NO: 291020 - RNA, 32 nt, Human
aagccagagucuuaaagagguuagagaggugg

SEQ ID NO: 291021 - RNA, 32 nt, Human
aagccagagugcagcuuggagcaaagaagaug

SEQ ID NO: 291022 - RNA, 32 nt, Human
aagccagagugcagcuuggagcaaagaaguuu

SEQ ID NO: 291023 - RNA, 32 nt, Human
aagccagaguggaaaugugcagagcuuacugu

SEQ ID NO: 291024 - RNA, 32 nt, Human
aagccagaugaagcuacacaaaugugguauuu

SEQ ID NO: 291025 - RNA, 32 nt, Human
aagccagauggugaccagagcuugccucugaa

SEQ ID NO: 291026 - RNA, 32 nt, Human
aagccagauguccguguggaggggacauagac

SEQ ID NO: 291027 - RNA, 32 nt, Human
aagccagcaaagugugucagaccauggcgugg

SEQ ID NO: 291028 - RNA, 21 nt, Human
aagccagcaggagcucugacu

SEQ ID NO: 291029 - RNA, 32 nt, Human
aagccagcaguauuucaguaucacaguguuuc

SEQ ID NO: 291030 - RNA, 32 nt, Human
aagccagcaugggugcccaguucuccaagacc

SEQ ID NO: 291031 - RNA, 32 nt, Human
aagccagccagcccuuccuccuucccucacca

SEQ ID NO: 291032 - RNA, 32 nt, Human
aagccagccagcgugguggacaggagcggagc

SEQ ID NO: 291033 - RNA, 32 nt, Human
aagccagccaucacccuccggccagagcucaa

SEQ ID NO: 291034 - RNA, 32 nt, Human
aagccagcccaggaccugggcuucacacacca

SEQ ID NO: 291035 - RNA, 21 nt, Human
aagccagccccacuacuuccu

SEQ ID NO: 291036 - RNA, 32 nt, Human
aagccagcccccaagacccuggggguggacac

SEQ ID NO: 291037 - RNA, 32 nt, Human
aagccagcccggcgcccuagcagaugcacgug

SEQ ID NO: 291038 - RNA, 32 nt, Human
aagccagccugaccaacauggugaaaccccau

SEQ ID NO: 291039 - RNA, 32 nt, Human
aagccagccugggcaacaaagugagaccgagu

SEQ ID NO: 291040 - RNA, 31 nt, Human
aagccagccuuucagcaccccuuacccucca

SEQ ID NO: 291041 - RNA, 32 nt, Human
aagccagcgaccguucugccucccguggggga

SEQ ID NO: 291042 - RNA, 32 nt, Human
aagccagcgccucuacaccccagaucccuacc

SEQ ID NO: 291043 - RNA, 20 nt, Human
aagccagcgguuccugggaa

SEQ ID NO: 291044 - RNA, 23 nt, Human
aagccagcucuggccacuagggg

SEQ ID NO: 291045 - RNA, 32 nt, Human
aagccagcugcagcugggcugugugguugacu

SEQ ID NO: 291046 - RNA, 32 nt, Human
aagccagcugccaugcugucagcuggggagag

SEQ ID NO: 291047 - RNA, 32 nt, Human
aagccagcuuugaaaggcauuuggggucucag

SEQ ID NO: 291048 - RNA, 31 nt, Human
aagccaggaaaggaaagauggggaagcccag

SEQ ID NO: 291049 - RNA, 17 nt, Human
aagccaggaacagagaa

SEQ ID NO: 291050 - RNA, 32 nt, Human
aagccaggaagagggucuucaccagaacuuga

SEQ ID NO: 291051 - RNA, 32 nt, Human
aagccaggaaggcaggagaggccagggaagca

SEQ ID NO: 291052 - RNA, 32 nt, Human
aagccaggacacaccauccugccccaggccca

SEQ ID NO: 291053 - RNA, 22 nt, Human
aagccaggacagaggccaggag

SEQ ID NO: 291054 - RNA, 32 nt, Human
aagccaggaccaugaggaagggguaggggucu

SEQ ID NO: 291055 - RNA, 32 nt, Human
aagccaggacugacugugcaccagagaaucug

SEQ ID NO: 291056 - RNA, 32 nt, Human
aagccaggagaucaacuugucucagucaacaa

SEQ ID NO: 291057 - RNA, 32 nt, Human
aagccaggaggcagagguugcagugagccaag

SEQ ID NO: 291058 - RNA, 32 nt, Human
aagccaggaggcagagguugcaguuagcccag

SEQ ID NO: 291059 - RNA, 32 nt, Human
aagccaggaggcggagguugcagugagccgag

SEQ ID NO: 291060 - RNA, 21 nt, Human
aagccaggcagagcccacaga

SEQ ID NO: 291061 - RNA, 21 nt, Human
aagccaggcagagcccggggg

SEQ ID NO: 291062 - RNA, 32 nt, Human
aagccaggcagcgagccccgaggcucuucggg

SEQ ID NO: 291063 - RNA, 23 nt, Human
aagccaggcaggcugcccugaga

SEQ ID NO: 291064 - RNA, 22 nt, Human
aagccaggcagguagccagggg

SEQ ID NO: 291065 - RNA, 32 nt, Human
aagccaggccauagacaucaaugaaccaauag

SEQ ID NO: 291066 - RNA, 32 nt, Human
aagccaggcccaggugggcuguggcggcaucc

SEQ ID NO: 291067 - RNA, 32 nt, Human
aagccaggccucccaccucuugacucuuguga

SEQ ID NO: 291068 - RNA, 31 nt, Human
aagccaggcgcgcaaggaguuggagacccug

SEQ ID NO: 291069 - RNA, 32 nt, Human
aagccaggcgcgccucaggauccaggcucauu

SEQ ID NO: 291070 - RNA, 32 nt, Human
aagccaggcgucgcccccuccgggagcccugg

SEQ ID NO: 291071 - RNA, 25 nt, Human
aagccaggcgucgcccccucgggga

SEQ ID NO: 291072 - RNA, 21 nt, Human
aagccaggcuaaacccagaga

SEQ ID NO: 291073 - RNA, 32 nt, Human
aagccaggcucaacuucugggcucccagugcc

SEQ ID NO: 291074 - RNA, 22 nt, Human
aagccaggcugguucucugcau

SEQ ID NO: 291075 - RNA, 32 nt, Human
aagccaggcuuucuuagccauucuuugcagca

SEQ ID NO: 291076 - RNA, 32 nt, Human
aagccagggagggagacaggagggcaggagga

SEQ ID NO: 291077 - RNA, 32 nt, Human
aagccagggcuccuccuccugucgugggcuca

SEQ ID NO: 291078 - RNA, 32 nt, Human
aagccagggcuggaagcuacaggccugaccuu

SEQ ID NO: 291079 - RNA, 32 nt, Human
aagccagggcuggagggcaaaggucauaaccu

SEQ ID NO: 291080 - RNA, 32 nt, Human
aagccagggcugggacaauggcagugccuagu

SEQ ID NO: 291081 - RNA, 32 nt, Human
aagccaggggcagcugucaggccugaggaaga

SEQ ID NO: 291082 - RNA, 32 nt, Human
aagccaggggcagggugggauggggaagacca

SEQ ID NO: 291083 - RNA, 32 nt, Human
aagccaggguagcugcaugcacuggcauuuga

SEQ ID NO: 291084 - RNA, 32 nt, Human
aagccagggugcauccucagaaaccuacucaa

SEQ ID NO: 291085 - RNA, 21 nt, Human
aagccagggugugccaggaga

SEQ ID NO: 291086 - RNA, 22 nt, Human
aagccagguacaacaccagagg

SEQ ID NO: 291087 - RNA, 32 nt, Human
aagccagguccacggucuguucuugaagcagu

SEQ ID NO: 291088 - RNA, 32 nt, Human
aagccaguaacugagggcccacugccugcccg

SEQ ID NO: 291089 - RNA, 18 nt, Human
aagccaguagcuguuuga

SEQ ID NO: 291090 - RNA, 32 nt, Human
aagccagucaccagcccucugccugcagccau

SEQ ID NO: 291091 - RNA, 22 nt, Human
aagccagucaggugcccagagg

SEQ ID NO: 291092 - RNA, 32 nt, Human
aagccagugagcugggcuucaguuuuucccag

SEQ ID NO: 291093 - RNA, 32 nt, Human
aagccaguggagaccaacgguccugugccaau

SEQ ID NO: 291094 - RNA, 32 nt, Human
aagccaguguccuacugggagcucagucugua

SEQ ID NO: 291095 - RNA, 32 nt, Human
aagccaguguccuucgaggaacccacccggcu

SEQ ID NO: 291096 - RNA, 32 nt, Human
aagccaguucaucucagaguccaggccugacc

SEQ ID NO: 291097 - RNA, 32 nt, Human
aagccaguucuucucuuccagaagaauucaga

SEQ ID NO: 291098 - RNA, 32 nt, Human
aagccaguuucugccaccccacucuccaggcc

SEQ ID NO: 291099 - RNA, 32 nt, Human
aagccaguuugcuguucaggaagagaaaagua

SEQ ID NO: 291100 - RNA, 32 nt, Human
aagccaguuuucucagaaagccuuucugacug

SEQ ID NO: 291101 - RNA, 32 nt, Human
aagccauacacugaggcggaagaucgcaaguc

SEQ ID NO: 291102 - RNA, 32 nt, Human
aagccauagacccugaggcccugggcugggug

SEQ ID NO: 291103 - RNA, 32 nt, Human
aagccauaucucuuccuucuuuaugcacuuac

SEQ ID NO: 291104 - RNA, 32 nt, Human
aagccaucagaauuaucaguggagaagcaccu

SEQ ID NO: 291105 - RNA, 22 nt, Human
aagccaucaucuaacaccucug

SEQ ID NO: 291106 - RNA, 32 nt, Human
aagccauccagcccuucucccuguacccagua

SEQ ID NO: 291107 - RNA, 32 nt, Human
aagccauccagccucccugacccuccacacgg

SEQ ID NO: 291108 - RNA, 32 nt, Human
aagccauccuucagacagagagggagcggcug

SEQ ID NO: 291109 - RNA, 32 nt, Human
aagccauccuugcccaggguauccaggaaaau

SEQ ID NO: 291110 - RNA, 32 nt, Human
aagccaucgcuggcccccaccuccuguggacu

SEQ ID NO: 291111 - RNA, 32 nt, Human
aagccaucucuccccugugaggcacagguggc

SEQ ID NO: 291112 - RNA, 32 nt, Human
aagccaucugacagcaggccacuagugacagu

SEQ ID NO: 291113 - RNA, 32 nt, Human
aagccaucugccugccuccaccucccaaaaug

SEQ ID NO: 291114 - RNA, 32 nt, Human
aagccaucuguggagucaagcagucauggcuc

SEQ ID NO: 291115 - RNA, 32 nt, Human
aagccaucuuucuucuuacugccaauaaaaac

SEQ ID NO: 291116 - RNA, 32 nt, Human
aagccaugaauguucagacggucugggcaguc

SEQ ID NO: 291117 - RNA, 32 nt, Human
aagccaugcagcuguacaacaagguggacccu

SEQ ID NO: 291118 - RNA, 32 nt, Human
aagccaugccaauaaagugaccuguguucaaa

SEQ ID NO: 291119 - RNA, 32 nt, Human
aagccaugcucuuuugacucuggcuuccguca

SEQ ID NO: 291120 - RNA, 32 nt, Human
aagccauggaaauacaagucaaagggguaaaa

SEQ ID NO: 291121 - RNA, 32 nt, Human
aagccauggagacagguagcauuuguaagaug

SEQ ID NO: 291122 - RNA, 32 nt, Human
aagccaugggaggccaagaagcugcuguggcu

SEQ ID NO: 291123 - RNA, 32 nt, Human
aagccauguaucucccccacaccagggcccac

SEQ ID NO: 291124 - RNA, 32 nt, Human
aagccaugucagcaccacacacugcagcucuc

SEQ ID NO: 291125 - RNA, 32 nt, Human
aagccauguccagaggagcaggcugcaucuag

SEQ ID NO: 291126 - RNA, 32 nt, Human
aagccauucccuggaagagacaaguggaucug

SEQ ID NO: 291127 - RNA, 32 nt, Human
aagccauuccgagucugggaccugccccugug

SEQ ID NO: 291128 - RNA, 32 nt, Human
aagccauucucccaccucuguccuucagguag

SEQ ID NO: 291129 - RNA, 32 nt, Human
aagccauucucugccucagccuucccauuagc

SEQ ID NO: 291130 - RNA, 21 nt, Human
aagccauugaauuuguaccuc

SEQ ID NO: 291131 - RNA, 32 nt, Human
aagccauugcacuccagccugggcaacaagag

SEQ ID NO: 291132 - RNA, 32 nt, Human
aagccauugcagcaaccuuccuucucagccag

SEQ ID NO: 291133 - RNA, 32 nt, Human
aagccauuguacuccagccuggacaacaagag

SEQ ID NO: 291134 - RNA, 32 nt, Human
aagcccaaaaaggacaaaaaugggcuggccug

SEQ ID NO: 291135 - RNA, 32 nt, Human
aagcccaaagugguauagaaaugcugguuuuu

SEQ ID NO: 291136 - RNA, 19 nt, Human
aagcccaacagcaagggug

SEQ ID NO: 291137 - RNA, 19 nt, Human
aagcccaacauuaaagggu

SEQ ID NO: 291138 - RNA, 21 nt, Human
aagcccaacccaaauguguca

SEQ ID NO: 291139 - RNA, 23 nt, Human
aagcccaaccuccugaccuguca

SEQ ID NO: 291140 - RNA, 17 nt, Human
aagcccaagaacaaagg

SEQ ID NO: 291141 - RNA, 19 nt, Human
aagcccaagauacaaaugg

SEQ ID NO: 291142 - RNA, 21 nt, Human
aagcccaagaucaaagaugug

SEQ ID NO: 291143 - RNA, 18 nt, Human
aagcccaagauccgcagg

SEQ ID NO: 291144 - RNA, 18 nt, Human
aagcccaagauuccgaag

SEQ ID NO: 291145 - RNA, 32 nt, Human
aagcccaaggccugugcaggacacggggagaa

SEQ ID NO: 291146 - RNA, 19 nt, Human
aagcccaaggucaaagugu

SEQ ID NO: 291147 - RNA, 20 nt, Human
aagcccaagguugaaggggg

SEQ ID NO: 291148 - RNA, 20 nt, Human
aagcccaagucucaagaggu

SEQ ID NO: 291149 - RNA, 32 nt, Human
aagcccacagccccuaccgagaaaggagccau

SEQ ID NO: 291150 - RNA, 32 nt, Human
aagcccacagccccuacugagaaaggagccac

SEQ ID NO: 291151 - RNA, 32 nt, Human
aagcccacauaugguagcacaggcuggccugu

SEQ ID NO: 291152 - RNA, 32 nt, Human
aagcccacccuacuccaaaaguaaugugucac

SEQ ID NO: 291153 - RNA, 32 nt, Human
aagcccaccgcggccaggaccuaaggaugcag

SEQ ID NO: 291154 - RNA, 32 nt, Human
aagcccaccucuccuccccagcagcgugcagg

SEQ ID NO: 291155 - RNA, 32 nt, Human
aagcccaccugccucucuccugcugcuccucc

SEQ ID NO: 291156 - RNA, 32 nt, Human
aagcccaccugcugcagcccacugccuggcca

SEQ ID NO: 291157 - RNA, 32 nt, Human
aagcccacgugaggcuggagugauguggccac

SEQ ID NO: 291158 - RNA, 19 nt, Human
aagcccagaagacuucugu

SEQ ID NO: 291159 - RNA, 32 nt, Human
aagcccagaaggcagagguuguagugagcuga

SEQ ID NO: 291160 - RNA, 32 nt, Human
aagcccagaaggucgaggcugcagugagcuga

SEQ ID NO: 291161 - RNA, 32 nt, Human
aagcccagaagguugagacugcagugagccac

SEQ ID NO: 291162 - RNA, 20 nt, Human
aagcccagaauucccaaagg

SEQ ID NO: 291163 - RNA, 32 nt, Human
aagcccagacaacccuugcagagcgacccuga

SEQ ID NO: 291164 - RNA, 32 nt, Human
aagcccagacgaggaggacggggaaccggauu

SEQ ID NO: 291165 - RNA, 32 nt, Human
aagcccagagcaggaagccacagcugucucug

SEQ ID NO: 291166 - RNA, 32 nt, Human
aagcccagauugugccacugcacuccagccug

SEQ ID NO: 291167 - RNA, 32 nt, Human
aagcccagccuauuugucuugccugcuguauc

SEQ ID NO: 291168 - RNA, 32 nt, Human
aagcccagcuccccuugggucucagugccagu

SEQ ID NO: 291169 - RNA, 32 nt, Human
aagcccaggaaaggcuccaggagcagccacau

SEQ ID NO: 291170 - RNA, 32 nt, Human
aagcccaggagaagaaggaaugaaacccugca

SEQ ID NO: 291171 - RNA, 32 nt, Human
aagcccaggagacagagguugcagugagccaa

SEQ ID NO: 291172 - RNA, 32 nt, Human
aagcccaggagcuuaagaccagccugggcaac

SEQ ID NO: 291173 - RNA, 32 nt, Human
aagcccaggaggaggaagaggaggcugguugg

SEQ ID NO: 291174 - RNA, 32 nt, Human
aagcccaggaggccaagucugcagugagcuau

SEQ ID NO: 291175 - RNA, 32 nt, Human
aagcccaggaggcugaaaacgagggcccagga

SEQ ID NO: 291176 - RNA, 32 nt, Human
aagcccaggagucugagaccagccugggcaac

SEQ ID NO: 291177 - RNA, 32 nt, Human
aagcccaggaguucaagaccagccugggcaac

SEQ ID NO: 291178 - RNA, 32 nt, Human
aagcccaggaguucgagaucagccuggacaau

SEQ ID NO: 291179 - RNA, 32 nt, Human
aagcccaggaguuugaaguugcaaugagcuau

SEQ ID NO: 291180 - RNA, 32 nt, Human
aagcccaggaguuugaggcugcagugaguuau

SEQ ID NO: 291181 - RNA, 32 nt, Human
aagcccagggaugcaaagguugcagugaguug

SEQ ID NO: 291182 - RNA, 18 nt, Human
aagcccaguaccacuuua

SEQ ID NO: 291183 - RNA, 32 nt, Human
aagcccaguggaaauuguggauuucaccaaag

SEQ ID NO: 291184 - RNA, 32 nt, Human
aagcccaguggaggcaggaugggagagccccc

SEQ ID NO: 291185 - RNA, 32 nt, Human
aagcccaguguauuccgcugcaucgcucuucg

SEQ ID NO: 291186 - RNA, 32 nt, Human
aagcccauaagcugggucucaggcugggcuca

SEQ ID NO: 291187 - RNA, 32 nt, Human
aagcccauagggaagagagagaggauauaggg

SEQ ID NO: 291188 - RNA, 32 nt, Human
aagcccaucagaaggagaaggaaggagacuca

SEQ ID NO: 291189 - RNA, 32 nt, Human
aagcccaucauggagaagaccuucaauuacag

SEQ ID NO: 291190 - RNA, 32 nt, Human
aagcccaucccucgcccccagccugaggugau

SEQ ID NO: 291191 - RNA, 32 nt, Human
aagcccaucuaacaggaggacauugguuuggg

SEQ ID NO: 291192 - RNA, 21 nt, Human
aagcccaucuaauccaagggu

SEQ ID NO: 291193 - RNA, 32 nt, Human
aagcccaucucccacacguguguggagucaga

SEQ ID NO: 291194 - RNA, 32 nt, Human
aagcccaucuucagacgucacagucuggaagu

SEQ ID NO: 291195 - RNA, 25 nt, Human
aagcccaugaacuucccagagagug

SEQ ID NO: 291196 - RNA, 32 nt, Human
aagcccaugaggaccauuguguggauccaugg

SEQ ID NO: 291197 - RNA, 32 nt, Human
aagcccaugucacugcuuaguggagaggauug

SEQ ID NO: 291198 - RNA, 32 nt, Human
aagcccauuuucaugccccagcugugcugugg

SEQ ID NO: 291199 - RNA, 32 nt, Human
aagccccaaacaggucaugcuccaauaaaaau

SEQ ID NO: 291200 - RNA, 32 nt, Human
aagccccaacagggcacagcagucuucuggua

SEQ ID NO: 291201 - RNA, 32 nt, Human
aagccccaagccuugacagcuuccauguggug

SEQ ID NO: 291202 - RNA, 32 nt, Human
aagccccaauagcuggacagaccucagccucc

SEQ ID NO: 291203 - RNA, 21 nt, Human
aagccccaaucccugcuucau

SEQ ID NO: 291204 - RNA, 21 nt, Human
aagccccacccaccccugccc

SEQ ID NO: 291205 - RNA, 32 nt, Human
aagccccacugcaugaaggccugagugcaagc

SEQ ID NO: 291206 - RNA, 32 nt, Human
aagccccagaagcacaagggccagaggaggug

SEQ ID NO: 291207 - RNA, 32 nt, Human
aagccccagcagagaaggccggagggagggcu

SEQ ID NO: 291208 - RNA, 32 nt, Human
aagccccaggaggucgaggcugcagugagcca

SEQ ID NO: 291209 - RNA, 32 nt, Human
aagccccaggcaggcugugcgcugacaaccac

SEQ ID NO: 291210 - RNA, 32 nt, Human
aagccccaggugagaagaccugaguucaccug

SEQ ID NO: 291211 - RNA, 32 nt, Human
aagccccauauguauauaguauguuguacacu

SEQ ID NO: 291212 - RNA, 32 nt, Human
aagccccauuccauuccuacagaucucucagc

SEQ ID NO: 291213 - RNA, 19 nt, Human
aagcccccaagcucucagg

SEQ ID NO: 291214 - RNA, 32 nt, Human
aagcccccugaaauacggagaauaagaaucuu

SEQ ID NO: 291215 - RNA, 32 nt, Human
aagcccccugcucucccacccaagugccccca

SEQ ID NO: 291216 - RNA, 32 nt, Human
aagcccccugcucucuucugagccccuucccc

SEQ ID NO: 291217 - RNA, 32 nt, Human
aagccccggguggcaguggauugauguccagu

SEQ ID NO: 291218 - RNA, 20 nt, Human
aagccccgucccaagaagug

SEQ ID NO: 291219 - RNA, 32 nt, Human
aagccccuacucagcagggcucugggaaugug

SEQ ID NO: 291220 - RNA, 19 nt, Human
aagccccucagaacucaag

SEQ ID NO: 291221 - RNA, 32 nt, Human
aagccccucagccuguagaaacagcccucggc

SEQ ID NO: 291222 - RNA, 32 nt, Human
aagccccuccaaaagagggaacuuuuucucug

SEQ ID NO: 291223 - RNA, 32 nt, Human
aagccccucgaauucugugaaaaugaggguuu

SEQ ID NO: 291224 - RNA, 32 nt, Human
aagccccucguggaggaggacaaggcaagaag

SEQ ID NO: 291225 - RNA, 32 nt, Human
aagccccucugccugcaccucagcuucuucau

SEQ ID NO: 291226 - RNA, 32 nt, Human
aagccccugaagcccccgacuccucagaguuu

SEQ ID NO: 291227 - RNA, 32 nt, Human
aagccccugcagcucugcugcaccgcagcuuc

SEQ ID NO: 291228 - RNA, 32 nt, Human
aagccccugcucggcauaaugaccuuauuaag

SEQ ID NO: 291229 - RNA, 32 nt, Human
aagccccuggagcuccccuuuuucgggccccg

SEQ ID NO: 291230 - RNA, 32 nt, Human
aagccccugugccuccccugugccccugggga

SEQ ID NO: 291231 - RNA, 32 nt, Human
aagccccuguguagugucuguguuguuuuccc

SEQ ID NO: 291232 - RNA, 32 nt, Human
aagccccuuccucuuuggccucuuccagguca

SEQ ID NO: 291233 - RNA, 32 nt, Human
aagccccuugcucuccccugcccugcugccgc

SEQ ID NO: 291234 - RNA, 32 nt, Human
aagcccgacauggugcuaguuuccucucuugg

SEQ ID NO: 291235 - RNA, 32 nt, Human
aagcccgacaugucguguggcagcagcgaggu

SEQ ID NO: 291236 - RNA, 32 nt, Human
aagcccgagggaggaagagagggagggaggaa

SEQ ID NO: 291237 - RNA, 32 nt, Human
aagcccggcccagaaagcuuuggagucugguu

SEQ ID NO: 291238 - RNA, 32 nt, Human
aagcccggcuguucuagcagaggcucuauaaa

SEQ ID NO: 291239 - RNA, 32 nt, Human
aagcccgggaggcagaaccugcagugagccaa

SEQ ID NO: 291240 - RNA, 32 nt, Human
aagcccgggaggucgaggcugcugugagccgu

SEQ ID NO: 291241 - RNA, 32 nt, Human
aagcccgggagguggagguugcagugagccca

SEQ ID NO: 291242 - RNA, 32 nt, Human
aagcccgggcaggagagcacagagccggcgac

SEQ ID NO: 291243 - RNA, 32 nt, Human
aagcccggggaguuccucugaggcccaguccu

SEQ ID NO: 291244 - RNA, 32 nt, Human
aagcccggucggaaagcgaaaguggccucgcc

SEQ ID NO: 291245 - RNA, 32 nt, Human
aagcccgucaccccacacaggcugcggcauca

SEQ ID NO: 291246 - RNA, 32 nt, Human
aagcccuaauccccacugugcugguauuagga

SEQ ID NO: 291247 - RNA, 32 nt, Human
aagcccuacaucuaugcagguuucccaucccu

SEQ ID NO: 291248 - RNA, 32 nt, Human
aagcccuacaugaucacugcaggaugauccuc

SEQ ID NO: 291249 - RNA, 32 nt, Human
aagcccuacccuccagcacuccaaggcaggac

SEQ ID NO: 291250 - RNA, 31 nt, Human
aagcccucaauaaacauguaugaaggcuggg

SEQ ID NO: 291251 - RNA, 32 nt, Human
aagcccucacugcucucucagucuucuugauu

SEQ ID NO: 291252 - RNA, 32 nt, Human
aagcccucagcaggugcugacggguacaacuu

SEQ ID NO: 291253 - RNA, 32 nt, Human
aagcccucaguaaacucccgagggauugcaag

SEQ ID NO: 291254 - RNA, 32 nt, Human
aagcccucaucuucucuuucucuccucaguuu

SEQ ID NO: 291255 - RNA, 32 nt, Human
aagcccuccccaggcugagggccaggucauac

SEQ ID NO: 291256 - RNA, 32 nt, Human
aagcccucccugccucggcagcgcggcgcagu

SEQ ID NO: 291257 - RNA, 32 nt, Human
aagcccucggagugaccgugggugacagcggc

SEQ ID NO: 291258 - RNA, 32 nt, Human
aagcccucuccaccugugggucucaccuguca

SEQ ID NO: 291259 - RNA, 32 nt, Human
aagcccucucugcaaucucgcuucucgugucc

SEQ ID NO: 291260 - RNA, 21 nt, Human
aagcccucugguacccaggga

SEQ ID NO: 291261 - RNA, 32 nt, Human
aagcccugaagcauggggccagcugggacuug

SEQ ID NO: 291262 - RNA, 20 nt, Human
aagcccugacaacaacuauc

SEQ ID NO: 291263 - RNA, 32 nt, Human
aagcccugaccucuguggccucccugcccugg

SEQ ID NO: 291264 - RNA, 32 nt, Human
aagcccugaccuuugcagccucccugccuuag

SEQ ID NO: 291265 - RNA, 32 nt, Human
aagcccugagaugaacagguauuuacugagca

SEQ ID NO: 291266 - RNA, 32 nt, Human
aagcccugagcuaccuuggggucugggguggg

SEQ ID NO: 291267 - RNA, 32 nt, Human
aagcccugagggcagcuguucccacuggcucu

SEQ ID NO: 291268 - RNA, 32 nt, Human
aagcccugcacuccaaggcuccuggcaucgua

SEQ ID NO: 291269 - RNA, 32 nt, Human
aagcccugcagccuccgacuccugcuggcucc

SEQ ID NO: 291270 - RNA, 32 nt, Human
aagcccugcccuugccccugugcucaagcugu

SEQ ID NO: 291271 - RNA, 32 nt, Human
aagcccugcucgaugcucacagggcccccagc

SEQ ID NO: 291272 - RNA, 32 nt, Human
aagcccugcuggggcccugcuuguuggccuga

SEQ ID NO: 291273 - RNA, 32 nt, Human
aagcccuggaaguugaggccaagccugcugag

SEQ ID NO: 291274 - RNA, 32 nt, Human
aagcccuggagcuugccagagcagagcgagaa

SEQ ID NO: 291275 - RNA, 31 nt, Human
aagcccuggauacugccucagauucugaaug

SEQ ID NO: 291276 - RNA, 32 nt, Human
aagcccuggcccgucugugcacucuuggcucc

SEQ ID NO: 291277 - RNA, 29 nt, Human
aagcccuggcugcaggcagccuuccaggc

SEQ ID NO: 291278 - RNA, 32 nt, Human
aagcccugggaacccucauccaugagagcucg

SEQ ID NO: 291279 - RNA, 32 nt, Human
aagcccugggaggucaaggcugcagugagcug

SEQ ID NO: 291280 - RNA, 32 nt, Human
aagcccugggcacagcagaugagacccuuccu

SEQ ID NO: 291281 - RNA, 32 nt, Human
aagcccugggcacaucugccacccugacauca

SEQ ID NO: 291282 - RNA, 32 nt, Human
aagcccugggugagcgagaggcuggagaacac

SEQ ID NO: 291283 - RNA, 32 nt, Human
aagcccuguggcucuggggacuugggauccag

SEQ ID NO: 291284 - RNA, 32 nt, Human
aagcccuguucuucagaaggugaguggguuga

SEQ ID NO: 291285 - RNA, 32 nt, Human
aagcccuucaggcuggaguauaguggcaugau

SEQ ID NO: 291286 - RNA, 32 nt, Human
aagcccuuggggagggggaugccuucaugggg

SEQ ID NO: 291287 - RNA, 32 nt, Human
aagcccuugguaucgccucucccuucccacug

SEQ ID NO: 291288 - RNA, 32 nt, Human
aagcccuuuagcccgcuacucuugccuuccac

SEQ ID NO: 291289 - RNA, 32 nt, Human
aagcccuuucucugugccucacaacagucuug

SEQ ID NO: 291290 - RNA, 32 nt, Human
aagccgaaggcugcuggcugggcugccuagcc

SEQ ID NO: 291291 - RNA, 32 nt, Human
aagccgacacuggccauaaucauaacuauuuc

SEQ ID NO: 291292 - RNA, 32 nt, Human
aagccgacuccccuccccaucucccucucaac

SEQ ID NO: 291293 - RNA, 32 nt, Human
aagccgagaacccagggccagcaguggaagcc

SEQ ID NO: 291294 - RNA, 32 nt, Human
aagccgagaucaccuccagccuggacacucug

SEQ ID NO: 291295 - RNA, 32 nt, Human
aagccgagcagcuuuggccaaguaauuuuugc

SEQ ID NO: 291296 - RNA, 32 nt, Human
aagccgagccuugagaggagcagguggaggcg

SEQ ID NO: 291297 - RNA, 21 nt, Human
aagccgagcgagcuccggagg

SEQ ID NO: 291298 - RNA, 32 nt, Human
aagccgcaagcucucagcaagugcccagugga

SEQ ID NO: 291299 - RNA, 32 nt, Human
aagccgcaagggacccucggcgccucggccug

SEQ ID NO: 291300 - RNA, 32 nt, Human
aagccgcacuacuucaccuggccacccaaccu

SEQ ID NO: 291301 - RNA, 32 nt, Human
aagccgcagagggagagcgggagcggucguga

SEQ ID NO: 291302 - RNA, 32 nt, Human
aagccgcagggggcaccguggggaagcuaacc

SEQ ID NO: 291303 - RNA, 32 nt, Human
aagccgccacaucuuuucauuucuccaagagg

SEQ ID NO: 291304 - RNA, 32 nt, Human
aagccgcccaggaguccccacgucugcccugg

SEQ ID NO: 291305 - RNA, 32 nt, Human
aagccgcccagugcccugagcgucuccauggc

SEQ ID NO: 291306 - RNA, 32 nt, Human
aagccgcccucggggcgcucauggcgggacgc

SEQ ID NO: 291307 - RNA, 32 nt, Human
aagccgccgguauuucuccaucuggcucuccu

SEQ ID NO: 291308 - RNA, 32 nt, Human
aagccgccuccagguacagccacagccaggag

SEQ ID NO: 291309 - RNA, 21 nt, Human
aagccgcgaggcccucaggga

SEQ ID NO: 291310 - RNA, 32 nt, Human
aagccgcgccugccaaggaggccaccagaggg

SEQ ID NO: 291311 - RNA, 32 nt, Human
aagccgcguugaccuggagacuguggccuugg

SEQ ID NO: 291312 - RNA, 21 nt, Human
aagccgcugccaucccggagg

SEQ ID NO: 291313 - RNA, 32 nt, Human
aagccgcugccccuugcaccuccucgggccuc

SEQ ID NO: 291314 - RNA, 32 nt, Human
aagccgcugggccuuuuuaauugccaaacugc

SEQ ID NO: 291315 - RNA, 32 nt, Human
aagccggaccaggaggccgagccccaggaggc

SEQ ID NO: 291316 - RNA, 32 nt, Human
aagccggacuccaaguccaccucccuucagag

SEQ ID NO: 291317 - RNA, 32 nt, Human
aagccggacugccccagucuuugacugguuac

SEQ ID NO: 291318 - RNA, 32 nt, Human
aagccggagagcaagcccuggagguucacucu

SEQ ID NO: 291319 - RNA, 32 nt, Human
aagccggaggguguuuauguaagagcaccuuc

SEQ ID NO: 291320 - RNA, 32 nt, Human
aagccggcccaacccaaccacucggggccccc

SEQ ID NO: 291321 - RNA, 32 nt, Human
aagccggcgagggggagccagcagcggcgguc

SEQ ID NO: 291322 - RNA, 32 nt, Human
aagccggcuggucuucacccucccagacaagu

SEQ ID NO: 291323 - RNA, 32 nt, Human
aagccgggaggcaaguaggacagagagaugac

SEQ ID NO: 291324 - RNA, 26 nt, Human
aagccgggaggcggaaguugugguga

SEQ ID NO: 291325 - RNA, 32 nt, Human
aagccgggaggcggaaguuguggugagccgag

SEQ ID NO: 291326 - RNA, 32 nt, Human
aagccgggagguggggguugcagugagccgag

SEQ ID NO: 291327 - RNA, 24 nt, Human
aagccgggccuggccacccaaagg

SEQ ID NO: 291328 - RNA, 32 nt, Human
aagccggggcagcuccaccuccccagcccgcg

SEQ ID NO: 291329 - RNA, 32 nt, Human
aagccggggcucccccugccugccucucucuc

SEQ ID NO: 291330 - RNA, 32 nt, Human
aagccgggguaggaggaucaccagaggccagc

SEQ ID NO: 291331 - RNA, 32 nt, Human
aagccggguggcugagccaggcugugcacgga

SEQ ID NO: 291332 - RNA, 32 nt, Human
aagccggucucaaacuccugagcucaagugau

SEQ ID NO: 291333 - RNA, 32 nt, Human
aagccggucugcgcuguuccucgguggcgacc

SEQ ID NO: 291334 - RNA, 24 nt, Human
aagccggugccgggcgcccagggg

SEQ ID NO: 291335 - RNA, 32 nt, Human
aagccgguuacaucaugccacuuccuggaggu

SEQ ID NO: 291336 - RNA, 32 nt, Human
aagccguccaguuuugaagccacccagucugu

SEQ ID NO: 291337 - RNA, 32 nt, Human
aagccgucccugaccaggcuuaguugcuuccc

SEQ ID NO: 291338 - RNA, 32 nt, Human
aagccgugaggaugaggacaacuccacccucc

SEQ ID NO: 291339 - RNA, 32 nt, Human
aagccgugcucuccagccuggcugccagggag

SEQ ID NO: 291340 - RNA, 32 nt, Human
aagccgugcugcugauuccgucucacaguuua

SEQ ID NO: 291341 - RNA, 32 nt, Human
aagccguggaguaccugcuguugcucucaugc

SEQ ID NO: 291342 - RNA, 32 nt, Human
aagccguggcugccuuucaucugcugcguuuu

SEQ ID NO: 291343 - RNA, 32 nt, Human
aagccguguagccuguggcacuugguuauagc

SEQ ID NO: 291344 - RNA, 32 nt, Human
aagccguugcagccuccacuuggggaagcuga

SEQ ID NO: 291345 - RNA, 32 nt, Human
aagccuaacacaguuccuggcacacaacaggu

SEQ ID NO: 291346 - RNA, 32 nt, Human
aagccuaaguccucaauucauaaguuaucauu

SEQ ID NO: 291347 - RNA, 32 nt, Human
aagccuacagugagccaugaucucaccaugca

SEQ ID NO: 291348 - RNA, 32 nt, Human
aagccuacauguccuacuccagccuuauaaac

SEQ ID NO: 291349 - RNA, 32 nt, Human
aagccuacuuauuggguguuugcucacuaccc

SEQ ID NO: 291350 - RNA, 32 nt, Human
aagccuagagccaccagcccagcuuccuucuc

SEQ ID NO: 291351 - RNA, 31 nt, Human
aagccuaggaaacccucaggucugagauagg

SEQ ID NO: 291352 - RNA, 32 nt, Human
aagccuauaaugaagaaaaagaucuagaaacu

SEQ ID NO: 291353 - RNA, 32 nt, Human
aagccuauaguuaacaaccaccuggcuuuuau

SEQ ID NO: 291354 - RNA, 32 nt, Human
aagccuaucuggucuugggucuuugggaggau

SEQ ID NO: 291355 - RNA, 32 nt, Human
aagccuauguguccuuguguccugcagguauc

SEQ ID NO: 291356 - RNA, 21 nt, Human
aagccuauuucuuuauaggua

SEQ ID NO: 291357 - RNA, 32 nt, Human
aagccucaaauacaauacuuauuuuauuuauu

SEQ ID NO: 291358 - RNA, 32 nt, Human
aagccucaagccuuauguuucuccaauguuac

SEQ ID NO: 291359 - RNA, 32 nt, Human
aagccucacugcaagcacugcaugggcaagcu

SEQ ID NO: 291360 - RNA, 32 nt, Human
aagccucagagucugaaugccuccagucugcg

SEQ ID NO: 291361 - RNA, 32 nt, Human
aagccucagccaaagccuccagccuuucuccu

SEQ ID NO: 291362 - RNA, 32 nt, Human
aagccucaggagaaggaaggagaucccuuuuc

SEQ ID NO: 291363 - RNA, 32 nt, Human
aagccuccacugccauggagacugccuggcug

SEQ ID NO: 291364 - RNA, 32 nt, Human
aagccuccagaacugugagaauucuuuuguuu

SEQ ID NO: 291365 - RNA, 32 nt, Human
aagccuccagcaugggcacugcagugccgucc

SEQ ID NO: 291366 - RNA, 32 nt, Human
aagccuccaguggagaacugggcuugcucaga

SEQ ID NO: 291367 - RNA, 32 nt, Human
aagccucccacacaccuccccguggccuggga

SEQ ID NO: 291368 - RNA, 32 nt, Human
aagccucccacucugaacaucaccuccuguac

SEQ ID NO: 291369 - RNA, 32 nt, Human
aagccuccgccuggccugccccucugcagucc

SEQ ID NO: 291370 - RNA, 32 nt, Human
aagccuccucaacuaugaccucaaccggccag

SEQ ID NO: 291371 - RNA, 32 nt, Human
aagccuccucaccccuaucuucaucuccugug

SEQ ID NO: 291372 - RNA, 32 nt, Human
aagccuccuccaccuccaaacacccccaccuu

SEQ ID NO: 291373 - RNA, 32 nt, Human
aagccuccucuaacaagcccagaaggaguucu

SEQ ID NO: 291374 - RNA, 32 nt, Human
aagccuccucucucccccacuggucaagauuc

SEQ ID NO: 291375 - RNA, 32 nt, Human
aagccuccuuaaggagccacaggaugguaccu

SEQ ID NO: 291376 - RNA, 32 nt, Human
aagccuccuuccucguccccugccucaagaaa

SEQ ID NO: 291377 - RNA, 19 nt, Human
aagccuccuucugguucca

SEQ ID NO: 291378 - RNA, 32 nt, Human
aagccucgugccacacuggcuuugagguagca

SEQ ID NO: 291379 - RNA, 32 nt, Human
aagccucuauucaccccuucucaauccucaca

SEQ ID NO: 291380 - RNA, 32 nt, Human
aagccucucaacucaaaagcacaagauccuug

SEQ ID NO: 291381 - RNA, 32 nt, Human
aagccucucaucuggcucagggaugaccuugc

SEQ ID NO: 291382 - RNA, 32 nt, Human
aagccucuccacccuagagaaaugccucugua

SEQ ID NO: 291383 - RNA, 32 nt, Human
aagccucuccaccugucccaaccauaaaaagg

SEQ ID NO: 291384 - RNA, 32 nt, Human
aagccucuccagagaaguuugguuucuuugcu

SEQ ID NO: 291385 - RNA, 32 nt, Human
aagccucucucuccagccuuuccccaggcagg

SEQ ID NO: 291386 - RNA, 32 nt, Human
aagccucucuuucuguccgcagauccugacuu

SEQ ID NO: 291387 - RNA, 32 nt, Human
aagccucugcauaaggugugggaaacugagag

SEQ ID NO: 291388 - RNA, 32 nt, Human
aagccucugccuggagccgcuagccugugcug

SEQ ID NO: 291389 - RNA, 32 nt, Human
aagccucuucuccaugugugcacacaggguag

SEQ ID NO: 291390 - RNA, 32 nt, Human
aagccucuugagaaggcaccagacagugaacu

SEQ ID NO: 291391 - RNA, 32 nt, Human
aagccugaaaugccuuaauugugaacugauac

SEQ ID NO: 291392 - RNA, 32 nt, Human
aagccugaaaugccuuaauugugaacugauau

SEQ ID NO: 291393 - RNA, 32 nt, Human
aagccugaagacacugguagcuuuuaauaauu

SEQ ID NO: 291394 - RNA, 32 nt, Human
aagccugaaggauccuugcagagagauguucu

SEQ ID NO: 291395 - RNA, 32 nt, Human
aagccugaauccccagcaccuggcgaggccga

SEQ ID NO: 291396 - RNA, 32 nt, Human
aagccugaccaauauggagaaacccugucucu

SEQ ID NO: 291397 - RNA, 32 nt, Human
aagccugaccuagccagaagugccuguccgcu

SEQ ID NO: 291398 - RNA, 24 nt, Human
aagccugaccuuucaaauccauga

SEQ ID NO: 291399 - RNA, 32 nt, Human
aagccugacucugcucucgagagcuccagcag

SEQ ID NO: 291400 - RNA, 32 nt, Human
aagccugacuuaacgggggaagauggugagaa

SEQ ID NO: 291401 - RNA, 32 nt, Human
aagccugagagggagaggaaacaaaagcugug

SEQ ID NO: 291402 - RNA, 32 nt, Human
aagccugagcaacauaucaaaaccccaucucu

SEQ ID NO: 291403 - RNA, 32 nt, Human
aagccugagccaaaaccacuaguccaagaaaa

SEQ ID NO: 291404 - RNA, 32 nt, Human
aagccugagcggagcgguggagagggagaggc

SEQ ID NO: 291405 - RNA, 32 nt, Human
aagccugagcucgguggacagcucccucuccc

SEQ ID NO: 291406 - RNA, 32 nt, Human
aagccugaggggacagugagucuccaggucug

SEQ ID NO: 291407 - RNA, 32 nt, Human
aagccugagugcaaaugucauuucccucuacu

SEQ ID NO: 291408 - RNA, 32 nt, Human
aagccugaguuauuugcaaaagcaaacacaac

SEQ ID NO: 291409 - RNA, 32 nt, Human
aagccugaucccaggaggcccugcaguucccc

SEQ ID NO: 291410 - RNA, 32 nt, Human
aagccugaucuuccaggguggggaggagaaaa

SEQ ID NO: 291411 - RNA, 32 nt, Human
aagccugauuucccagccuccuggcuguaggc

SEQ ID NO: 291412 - RNA, 32 nt, Human
aagccugcagacugaauagcgcuguacugggc

SEQ ID NO: 291413 - RNA, 32 nt, Human
aagccugcagggaaagccacuggagaguuuua

SEQ ID NO: 291414 - RNA, 32 nt, Human
aagccugcagugagccaugacuguugcugcac

SEQ ID NO: 291415 - RNA, 32 nt, Human
aagccugcaguugggggccugcccugagucug

SEQ ID NO: 291416 - RNA, 32 nt, Human
aagccugcccugcugccuggacugggacuguu

SEQ ID NO: 291417 - RNA, 32 nt, Human
aagccugcgucucuugguuuucucaaguggcg

SEQ ID NO: 291418 - RNA, 32 nt, Human
aagccugcuaaguuaucccaggccugugcgug

SEQ ID NO: 291419 - RNA, 32 nt, Human
aagccugcuccuuccccucucagccgucucag

SEQ ID NO: 291420 - RNA, 32 nt, Human
aagccugcugcucucuccucuggcaccagcug

SEQ ID NO: 291421 - RNA, 32 nt, Human
aagccugcuucagggcugggcgcgguggcuaa

SEQ ID NO: 291422 - RNA, 32 nt, Human
aagccuggaaggaggcaauaagugggaaaggu

SEQ ID NO: 291423 - RNA, 32 nt, Human
aagccuggaaggucaagacugcagugagcugu

SEQ ID NO: 291424 - RNA, 32 nt, Human
aagccuggaagguggaaguugcagugagucga

SEQ ID NO: 291425 - RNA, 32 nt, Human
aagccuggagccaaagaugacacaaggggaag

SEQ ID NO: 291426 - RNA, 32 nt, Human
aagccuggagccaccacacagcagagaggagu

SEQ ID NO: 291427 - RNA, 32 nt, Human
aagccuggaggcggaggcugcacugagcugag

SEQ ID NO: 291428 - RNA, 32 nt, Human
aagccuggcacucacuggcacugucgauuccc

SEQ ID NO: 291429 - RNA, 32 nt, Human
aagccuggccaacauggugaaaccccaucucu

SEQ ID NO: 291430 - RNA, 32 nt, Human
aagccuggccaacauggugaaaccccgucucu

SEQ ID NO: 291431 - RNA, 32 nt, Human
aagccuggccacuguuggcugcagcaggacau

SEQ ID NO: 291432 - RNA, 32 nt, Human
aagccuggcccuggcccgcagcacacuggcca

SEQ ID NO: 291433 - RNA, 32 nt, Human
aagccuggcguugccuggaccugcugcugccu

SEQ ID NO: 291434 - RNA, 32 nt, Human
aagccuggcuccagcccugccugcugcuccuu

SEQ ID NO: 291435 - RNA, 32 nt, Human
aagccuggcuccucaugcucagugccaggggc

SEQ ID NO: 291436 - RNA, 32 nt, Human
aagccugggaagucaagccugcagugaaccau

SEQ ID NO: 291437 - RNA, 32 nt, Human
aagccugggaggacgguggcuugccggucugu

SEQ ID NO: 291438 - RNA, 32 nt, Human
aagccugggaggcagagguugcagugagccga

SEQ ID NO: 291439 - RNA, 32 nt, Human
aagccugggggcggugggugacccuggcucug

SEQ ID NO: 291440 - RNA, 32 nt, Human
aagccugggguaccuagucaccaggaucucca

SEQ ID NO: 291441 - RNA, 32 nt, Human
aagccugggguguccugaacucugccugcuuc

SEQ ID NO: 291442 - RNA, 32 nt, Human
aagccugggugaggaugggccaggucccaauu

SEQ ID NO: 291443 - RNA, 18 nt, Human
aagccuggucuccuccca

SEQ ID NO: 291444 - RNA, 32 nt, Human
aagccuguaggaugaaguuggaaguuccagag

SEQ ID NO: 291445 - RNA, 32 nt, Human
aagccugucacacuagagugugugugacaugu

SEQ ID NO: 291446 - RNA, 32 nt, Human
aagccuguccccaagaacaggagagccauggc

SEQ ID NO: 291447 - RNA, 32 nt, Human
aagccugugaggucaugguugcaaugagucau

SEQ ID NO: 291448 - RNA, 32 nt, Human
aagccugugauggcacugggcauagugccuau

SEQ ID NO: 291449 - RNA, 32 nt, Human
aagccugugauuaucaggcuugaaauacugca

SEQ ID NO: 291450 - RNA, 32 nt, Human
aagccugugcagaugcagucaccuggaaagaa

SEQ ID NO: 291451 - RNA, 32 nt, Human
aagccugugggcagcaugcccagauucccaga

SEQ ID NO: 291452 - RNA, 32 nt, Human
aagccuguggugugcggagucuccucucuugg

SEQ ID NO: 291453 - RNA, 32 nt, Human
aagccuguuguggcgucuucugggaaagccug

SEQ ID NO: 291454 - RNA, 32 nt, Human
aagccuuaaucuuugcgacaccugccagugag

SEQ ID NO: 291455 - RNA, 32 nt, Human
aagccuuaccuccauguaaagaacagcacguc

SEQ ID NO: 291456 - RNA, 32 nt, Human
aagccuuacuaguggaugcaaagugguaucuc

SEQ ID NO: 291457 - RNA, 32 nt, Human
aagccuuauccuacguccuucucuccaucuau

SEQ ID NO: 291458 - RNA, 32 nt, Human
aagccuuauuaaaauauaaauauuagaaaauu

SEQ ID NO: 291459 - RNA, 32 nt, Human
aagccuucaaagcuuuuugcuaccaaagccca

SEQ ID NO: 291460 - RNA, 32 nt, Human
aagccuucaauggauccagcuguggcucuggu

SEQ ID NO: 291461 - RNA, 32 nt, Human
aagccuucaaugugggcaccauguccacagaa

SEQ ID NO: 291462 - RNA, 32 nt, Human
aagccuucagcccucucucauugguuaccaca

SEQ ID NO: 291463 - RNA, 32 nt, Human
aagccuucagcucuccccugaacuccaucuua

SEQ ID NO: 291464 - RNA, 32 nt, Human
aagccuucaguagguaguaaagacuuaaugug

SEQ ID NO: 291465 - RNA, 32 nt, Human
aagccuucauuucuuccacugccauucguaga

SEQ ID NO: 291466 - RNA, 32 nt, Human
aagccuucauuucuuccgguagccuucgauau

SEQ ID NO: 291467 - RNA, 32 nt, Human
aagccuucauuuuugaccuccccuuacugaau

SEQ ID NO: 291468 - RNA, 32 nt, Human
aagccuuccagccugcggugcugucugcuggg

SEQ ID NO: 291469 - RNA, 32 nt, Human
aagccuuccaugucugacccugccucaugucu

SEQ ID NO: 291470 - RNA, 32 nt, Human
aagccuucccuaauuccaccccaaacccccac

SEQ ID NO: 291471 - RNA, 32 nt, Human
aagccuuccugcgugguggaggccagugcaga

SEQ ID NO: 291472 - RNA, 32 nt, Human
aagccuucucuuccuccugccuguaguguccc

SEQ ID NO: 291473 - RNA, 22 nt, Human
aagccuucuggccacccagaga

SEQ ID NO: 291474 - RNA, 32 nt, Human
aagccuucugugucucggcccugggcccaguc

SEQ ID NO: 291475 - RNA, 23 nt, Human
aagccuucuuagaacucugcuua

SEQ ID NO: 291476 - RNA, 32 nt, Human
aagccuucuuugccuuucuucuuugucuuauu

SEQ ID NO: 291477 - RNA, 32 nt, Human
aagccuugacagcuuccaugugguguugagac

SEQ ID NO: 291478 - RNA, 32 nt, Human
aagccuugacgcugugggcacugccucagccg

SEQ ID NO: 291479 - RNA, 32 nt, Human
aagccuugcaaucccaggcuggggucagccua

SEQ ID NO: 291480 - RNA, 32 nt, Human
aagccuugcacacucaccuccaccuucacagg

SEQ ID NO: 291481 - RNA, 21 nt, Human
aagccuugcacuagguugcag

SEQ ID NO: 291482 - RNA, 32 nt, Human
aagccuuggguagaaugggaauucuuuacccu

SEQ ID NO: 291483 - RNA, 32 nt, Human
aagccuugguaaaauaaucaguguuuccaauc

SEQ ID NO: 291484 - RNA, 32 nt, Human
aagccuugugcaagaaagaugcuuucaguaaa

SEQ ID NO: 291485 - RNA, 32 nt, Human
aagccuuguugacucugaugaugaggaucaga

SEQ ID NO: 291486 - RNA, 32 nt, Human
aagccuuuaacaagucuucaacuuuuucugca

SEQ ID NO: 291487 - RNA, 28 nt, Human
aagccuuuaagugcugcuucugucaguc

SEQ ID NO: 291488 - RNA, 32 nt, Human
aagccuuuacuucacauucucaccucauuaga

SEQ ID NO: 291489 - RNA, 24 nt, Human
aagccuuuauuagucgccaucagc

SEQ ID NO: 291490 - RNA, 32 nt, Human
aagccuuuccaaaauuaggugcuugguaauca

SEQ ID NO: 291491 - RNA, 32 nt, Human
aagccuuucccucccuaccugaucacugcuua

SEQ ID NO: 291492 - RNA, 32 nt, Human
aagccuuuccuaaacccugcugccuucccaaa

SEQ ID NO: 291493 - RNA, 32 nt, Human
aagccuuucgugggcagucagcacuuauuuac

SEQ ID NO: 291494 - RNA, 32 nt, Human
aagccuuucuccuagagaucugugccuccugg

SEQ ID NO: 291495 - RNA, 32 nt, Human
aagccuuucuccuuuucugucacuugcaaauu

SEQ ID NO: 291496 - RNA, 32 nt, Human
aagccuuucugauccaguuucauauaauuaug

SEQ ID NO: 291497 - RNA, 32 nt, Human
aagccuuucuucugccaaggucaccagcaccc

SEQ ID NO: 291498 - RNA, 32 nt, Human
aagccuuucuugcugugaacagcuucauucuc

SEQ ID NO: 291499 - RNA, 32 nt, Human
aagccuuugagaccgcagaagggaccuuguug

SEQ ID NO: 291500 - RNA, 32 nt, Human
aagccuuuggccuuucuccucccaggccucca

SEQ ID NO: 291501 - RNA, 32 nt, Human
aagccuuuguaaaacagugcauuuuucagauu

SEQ ID NO: 291502 - RNA, 32 nt, Human
aagccuuuuccccugggcuuuugauugugucu

SEQ ID NO: 291503 - RNA, 32 nt, Human
aagccuuuucucagaccuuaggcacagccucu

SEQ ID NO: 291504 - RNA, 23 nt, Human
aagccuuuuuagagaaccagggg

SEQ ID NO: 291505 - RNA, 32 nt, Human
aagcgaaacccuugccuuugagaguuuauggu

SEQ ID NO: 291506 - RNA, 32 nt, Human
aagcgaaccagaaaauccaggcccgugaccag

SEQ ID NO: 291507 - RNA, 32 nt, Human
aagcgaaccuccugccucagcaucccaaguag

SEQ ID NO: 291508 - RNA, 32 nt, Human
aagcgaagaagagaagagggauguguuccgca

SEQ ID NO: 291509 - RNA, 32 nt, Human
aagcgaagccagaucucaagggcugauaccug

SEQ ID NO: 291510 - RNA, 32 nt, Human
aagcgaaggaagcuacagaaacccagagaggc

SEQ ID NO: 291511 - RNA, 32 nt, Human
aagcgaaggaaggggaagaggaagggaaaagc

SEQ ID NO: 291512 - RNA, 32 nt, Human
aagcgaaggcaaaauuagaauuacugaugagg

SEQ ID NO: 291513 - RNA, 32 nt, Human
aagcgaaggcuuccccgguguaauuuccuggg

SEQ ID NO: 291514 - RNA, 32 nt, Human
aagcgaagucgaagcagagaggcgacggagcc

SEQ ID NO: 291515 - RNA, 32 nt, Human
aagcgaauggugaaagcuacugaaauaagcug

SEQ ID NO: 291516 - RNA, 31 nt, Human
aagcgacaaguguacccagaguagaaggccu

SEQ ID NO: 291517 - RNA, 32 nt, Human
aagcgacgcugcgcucgcugggcagucggagg

SEQ ID NO: 291518 - RNA, 32 nt, Human
aagcgagaaccccauucugccaccccaccagg

SEQ ID NO: 291519 - RNA, 32 nt, Human
aagcgagauggguaacaucacaguagauucgu

SEQ ID NO: 291520 - RNA, 32 nt, Human
aagcgagcgccaccuccucacacucaccacgg

SEQ ID NO: 291521 - RNA, 32 nt, Human
aagcgagcucagccucaauccccguccccacc

SEQ ID NO: 291522 - RNA, 32 nt, Human
aagcgaggguccaauccugcccugcgcuaguc

SEQ ID NO: 291523 - RNA, 32 nt, Human
aagcgagucuuuggaugggaggaggacgagga

SEQ ID NO: 291524 - RNA, 32 nt, Human
aagcgagugcgugugaccuauaaggaaagucu

SEQ ID NO: 291525 - RNA, 21 nt, Human
aagcgaguggcgcuuucaccu

SEQ ID NO: 291526 - RNA, 31 nt, Human
aagcgaucacucaagaaugguacagaugugu

SEQ ID NO: 291527 - RNA, 32 nt, Human
aagcgauccuacugcccuggucuuccaaaaua

SEQ ID NO: 291528 - RNA, 19 nt, Human
aagcgauccucccaccuca

SEQ ID NO: 291529 - RNA, 32 nt, Human
aagcgauccucccaccuuggccuaccaaagug

SEQ ID NO: 291530 - RNA, 32 nt, Human
aagcgauccuccugccucaaccuacuaaguag

SEQ ID NO: 291531 - RNA, 32 nt, Human
aagcgauccuccugccucagacaccagaguag

SEQ ID NO: 291532 - RNA, 32 nt, Human
aagcgaugcucccaccuccaccucccaaagug

SEQ ID NO: 291533 - RNA, 32 nt, Human
aagcgauuaaauuacuuccuccaaagucacac

SEQ ID NO: 291534 - RNA, 32 nt, Human
aagcgauuccucugccucagcacuuugggagg

SEQ ID NO: 291535 - RNA, 32 nt, Human
aagcgauucucccaccccagccucccaaguag

SEQ ID NO: 291536 - RNA, 32 nt, Human
aagcgauucuccugccucaggcucccaaggug

SEQ ID NO: 291537 - RNA, 32 nt, Human
aagcgauucuccugccucaggcucccaaguag

SEQ ID NO: 291538 - RNA, 32 nt, Human
aagcgauuugacuucacagcgugaccuuuuua

SEQ ID NO: 291539 - RNA, 32 nt, Human
aagcgcaagauccagguucugcagcagcaggc

SEQ ID NO: 291540 - RNA, 32 nt, Human
aagcgcacagcccgaggacugcgaggacgggg

SEQ ID NO: 291541 - RNA, 32 nt, Human
aagcgcacccugucguucagugacgucauucu

SEQ ID NO: 291542 - RNA, 32 nt, Human
aagcgcaggacggcaccgaggugguggugaaa

SEQ ID NO: 291543 - RNA, 32 nt, Human
aagcgcagucaacugcuggacccggccggugu

SEQ ID NO: 291544 - RNA, 32 nt, Human
aagcgcaguggcugucugauaagaacuggauu

SEQ ID NO: 291545 - RNA, 32 nt, Human
aagcgcaucuucuccacaugggcuucacgugg

SEQ ID NO: 291546 - RNA, 32 nt, Human
aagcgcauggcucucucaagccaugccacacu

SEQ ID NO: 291547 - RNA, 22 nt, Human
aagcgcauucuagguagaggag

SEQ ID NO: 291548 - RNA, 32 nt, Human
aagcgccacgauccuugacgggcacagccaga

SEQ ID NO: 291549 - RNA, 21 nt, Human
aagcgccagacaagcuggaga

SEQ ID NO: 291550 - RNA, 32 nt, Human
aagcgccauugcacuccagucugggugacaga

SEQ ID NO: 291551 - RNA, 32 nt, Human
aagcgcccuuccaacuuggggacgccuuaacc

SEQ ID NO: 291552 - RNA, 32 nt, Human
aagcgcccuuggguccagcuacucaggaggcc

SEQ ID NO: 291553 - RNA, 32 nt, Human
aagcgccgaucugggcacccgccaccagcaug

SEQ ID NO: 291554 - RNA, 32 nt, Human
aagcgccucacgcugcacacugcccaggcccu

SEQ ID NO: 291555 - RNA, 32 nt, Human
aagcgccugccucuccccuuccggugcucaca

SEQ ID NO: 291556 - RNA, 32 nt, Human
aagcgccuguagucccagcuacucuggaggcu

SEQ ID NO: 291557 - RNA, 32 nt, Human
aagcgcgagucugaguggaacccuggacgacu

SEQ ID NO: 291558 - RNA, 32 nt, Human
aagcgcgccgccuccccgcccucucucacucc

SEQ ID NO: 291559 - RNA, 32 nt, Human
aagcgcggagccgcagaucugguccgucgcuc

SEQ ID NO: 291560 - RNA, 32 nt, Human
aagcgcggcggcagcaagacgacuucuccgga

SEQ ID NO: 291561 - RNA, 32 nt, Human
aagcgcgggacaggcagaugcagugagugagg

SEQ ID NO: 291562 - RNA, 32 nt, Human
aagcgcgugccauuucacuccagccuggacaa

SEQ ID NO: 291563 - RNA, 24 nt, Human
aagcgcuaggauuacaagcaugag

SEQ ID NO: 291564 - RNA, 32 nt, Human
aagcgcuaggauuacagaugugagccaccgcg

SEQ ID NO: 291565 - RNA, 32 nt, Human
aagcgcuaggauuacaggugugagccacugcg

SEQ ID NO: 291566 - RNA, 24 nt, Human
aagcgcuaggauuagaggugugag

SEQ ID NO: 291567 - RNA, 24 nt, Human
aagcgcuaggauuccaggugugag

SEQ ID NO: 291568 - RNA, 32 nt, Human
aagcgcucgccugccccacagccugggccuug

SEQ ID NO: 291569 - RNA, 24 nt, Human
aagcgcugagauuacaggugugag

SEQ ID NO: 291570 - RNA, 32 nt, Human
aagcgcugagauuacaggugugagccaccgug

SEQ ID NO: 291571 - RNA, 32 nt, Human
aagcgcugagauuguaggcauaagccaccagg

SEQ ID NO: 291572 - RNA, 32 nt, Human
aagcgcugaucuucuauuuaauuccccaccca

SEQ ID NO: 291573 - RNA, 32 nt, Human
aagcgcugauggccuucucuccccucagaacu

SEQ ID NO: 291574 - RNA, 32 nt, Human
aagcgcugcccagguccuggggugguggcagc

SEQ ID NO: 291575 - RNA, 23 nt, Human
aagcgcuggauuacaggcaugag

SEQ ID NO: 291576 - RNA, 32 nt, Human
aagcgcuggauuacaggcaugagccacuacac

SEQ ID NO: 291577 - RNA, 32 nt, Human
aagcgcugggauuacaggcaggagccacugag

SEQ ID NO: 291578 - RNA, 32 nt, Human
aagcgcugggauuacaggcaugagccaccaug

SEQ ID NO: 291579 - RNA, 32 nt, Human
aagcgcugggauuacaggcaugagccaccgug

SEQ ID NO: 291580 - RNA, 24 nt, Human
aagcgcugggauuacaggcgugag

SEQ ID NO: 291581 - RNA, 32 nt, Human
aagcgcugggauuacaggcgugagccaccaca

SEQ ID NO: 291582 - RNA, 32 nt, Human
aagcgcugggauuacaggcgugagccaccgcg

SEQ ID NO: 291583 - RNA, 32 nt, Human
aagcgcugggauuacaggcgugagccaccucg

SEQ ID NO: 291584 - RNA, 24 nt, Human
aagcgcugggauuacaggugugag

SEQ ID NO: 291585 - RNA, 32 nt, Human
aagcgcugggauuacaggugugagccacugag

SEQ ID NO: 291586 - RNA, 32 nt, Human
aagcgcugggauuacaggugugagccacugug

SEQ ID NO: 291587 - RNA, 32 nt, Human
aagcgcuggggcccagcacggccaggcucuca

SEQ ID NO: 291588 - RNA, 32 nt, Human
aagcgcugguaggagaggcuuuaaggugguaa

SEQ ID NO: 291589 - RNA, 32 nt, Human
aagcgcuguaaacccugacggugggccuggca

SEQ ID NO: 291590 - RNA, 32 nt, Human
aagcgcuuccagcauccucuguucauccgggg

SEQ ID NO: 291591 - RNA, 32 nt, Human
aagcgcuucuacuggcccuccugcugccacca

SEQ ID NO: 291592 - RNA, 32 nt, Human
aagcggaagcaugagacccgcccacacuagcc

SEQ ID NO: 291593 - RNA, 32 nt, Human
aagcggacugagugcugggauccaaggcauuc

SEQ ID NO: 291594 - RNA, 32 nt, Human
aagcggagagucacagcggggccaggcccugg

SEQ ID NO: 291595 - RNA, 19 nt, Human
aagcggagcaagugccaag

SEQ ID NO: 291596 - RNA, 30 nt, Human
aagcggagccucuccgucucuuggcuccaa

SEQ ID NO: 291597 - RNA, 32 nt, Human
aagcggaggagggagagagccagcgaggcggc

SEQ ID NO: 291598 - RNA, 30 nt, Human
aagcggagguugcaaucagcugagaucaca

SEQ ID NO: 291599 - RNA, 32 nt, Human
aagcggcagcagaggcagcagcggcagaggca

SEQ ID NO: 291600 - RNA, 32 nt, Human
aagcggccacuucucccucccugagacccgag

SEQ ID NO: 291601 - RNA, 32 nt, Human
aagcggccugcucuagccguuugaaaccgcuu

SEQ ID NO: 291602 - RNA, 32 nt, Human
aagcggccuuugcucuucuuccuucuuccugc

SEQ ID NO: 291603 - RNA, 32 nt, Human
aagcggcucaggagaaccggggcuggaggagc

SEQ ID NO: 291604 - RNA, 32 nt, Human
aagcggcuucugguuccugcaaagggagagcc

SEQ ID NO: 291605 - RNA, 32 nt, Human
aagcggcuuggucggggguggucucguggggu

SEQ ID NO: 291606 - RNA, 32 nt, Human
aagcgggaagaaaaucagagggaagguuaagg

SEQ ID NO: 291607 - RNA, 32 nt, Human
aagcgggaggcugagcugcugaagcugcggcg

SEQ ID NO: 291608 - RNA, 32 nt, Human
aagcgggaggggccaugacuacgaggcccugg

SEQ ID NO: 291609 - RNA, 32 nt, Human
aagcgggccaaugccgguccacacaaccagua

SEQ ID NO: 291610 - RNA, 32 nt, Human
aagcggggaaggaaaggaaugagggaggaaau

SEQ ID NO: 291611 - RNA, 32 nt, Human
aagcggggagagagagggauagaaaacaagcg

SEQ ID NO: 291612 - RNA, 32 nt, Human
aagcggggagcuagcuuuguuuuuaaagacua

SEQ ID NO: 291613 - RNA, 32 nt, Human
aagcggggagcuagcuuuguuuuuaaagacuc

SEQ ID NO: 291614 - RNA, 32 nt, Human
aagcggggcaaaguucccugcccaccgacgcc

SEQ ID NO: 291615 - RNA, 32 nt, Human
aagcggggcuagugucagagaggugugccagg

SEQ ID NO: 291616 - RNA, 31 nt, Human
aagcgggucuguuucuuuacuuccuccacgg

SEQ ID NO: 291617 - RNA, 32 nt, Human
aagcgggucuuuggaugggaggaggacgagga

SEQ ID NO: 291618 - RNA, 32 nt, Human
aagcgggugcccauccagcccaggucccagga

SEQ ID NO: 291619 - RNA, 32 nt, Human
aagcgguaaggucacuguggaagaggaagcgu

SEQ ID NO: 291620 - RNA, 32 nt, Human
aagcgguauccgaaguggagcuucuagcgacc

SEQ ID NO: 291621 - RNA, 32 nt, Human
aagcgguauuagccucacuuaacagaugagga

SEQ ID NO: 291622 - RNA, 32 nt, Human
aagcggugcccaggccgguggugacaacuggg

SEQ ID NO: 291623 - RNA, 32 nt, Human
aagcgguucauugcuauuauugcagugucaug

SEQ ID NO: 291624 - RNA, 32 nt, Human
aagcguaaaggcaguggaggugaggagagaau

SEQ ID NO: 291625 - RNA, 32 nt, Human
aagcguagacauauauuuaugaaugugcauuu

SEQ ID NO: 291626 - RNA, 32 nt, Human
aagcgucaacucccagguaggggguaagggug

SEQ ID NO: 291627 - RNA, 32 nt, Human
aagcgucaggaaauagcaguugcugugauugg

SEQ ID NO: 291628 - RNA, 32 nt, Human
aagcgucaguggauauauuugaaagugguaau

SEQ ID NO: 291629 - RNA, 32 nt, Human
aagcguccagggcagauggcagaggaucugcc

SEQ ID NO: 291630 - RNA, 32 nt, Human
aagcguccuuucaacucuaagagaccagcaga

SEQ ID NO: 291631 - RNA, 32 nt, Human
aagcgucugaucuaaucccagcacuucuguaa

SEQ ID NO: 291632 - RNA, 32 nt, Human
aagcgugagacgccaccauuccuggaaaccac

SEQ ID NO: 291633 - RNA, 32 nt, Human
aagcgugagccacugcacccagccuguaaaau

SEQ ID NO: 291634 - RNA, 32 nt, Human
aagcgugcugccucucuucugugucguuuugu

SEQ ID NO: 291635 - RNA, 32 nt, Human
aagcguggcggccacagacuguggguaccggg

SEQ ID NO: 291636 - RNA, 32 nt, Human
aagcgugggcaagaugugcguggugcagcgcu

SEQ ID NO: 291637 - RNA, 32 nt, Human
aagcgugggcuguucuacccaccagaagucca

SEQ ID NO: 291638 - RNA, 32 nt, Human
aagcgugugggugcccccuuucugccagcagu

SEQ ID NO: 291639 - RNA, 32 nt, Human
aagcgugugggugcucccuuucugccagcagu

SEQ ID NO: 291640 - RNA, 32 nt, Human
aagcgugugugagauucagugguccaugcgug

SEQ ID NO: 291641 - RNA, 32 nt, Human
aagcguguuaucugcaaaauaccugugcagaa

SEQ ID NO: 291642 - RNA, 32 nt, Human
aagcguuccagguauuuuuguaaugcaaugga

SEQ ID NO: 291643 - RNA, 32 nt, Human
aagcguuccucuggggaccggcagcagaggca

SEQ ID NO: 291644 - RNA, 32 nt, Human
aagcguugagauuacaagcgugagccaccauu

SEQ ID NO: 291645 - RNA, 32 nt, Human
aagcguugggauuacaggcaugagccaccuca

SEQ ID NO: 291646 - RNA, 24 nt, Human
aagcguugggauuauaggcaugag

SEQ ID NO: 291647 - RNA, 32 nt, Human
aagcguuuacuucacauucacaccucaauaga

SEQ ID NO: 291648 - RNA, 32 nt, Human
aagcguuugcauuugcagugcaucagauaaau

SEQ ID NO: 291649 - RNA, 32 nt, Human
aagcuaaacaaccggauguggaagagauuuug

SEQ ID NO: 291650 - RNA, 32 nt, Human
aagcuaaagcaguggcuggggcuuuguuuuua

SEQ ID NO: 291651 - RNA, 32 nt, Human
aagcuaaaugaggggccaggugcaguggcuca

SEQ ID NO: 291652 - RNA, 32 nt, Human
aagcuaaccaaagaaaauggcuucaguaaguu

SEQ ID NO: 291653 - RNA, 32 nt, Human
aagcuaaccugcccaccucaccccugugauac

SEQ ID NO: 291654 - RNA, 32 nt, Human
aagcuaagcacauugcagaugaggcagauggg

SEQ ID NO: 291655 - RNA, 32 nt, Human
aagcuaagccagggcccagcugcguccaaccc

SEQ ID NO: 291656 - RNA, 32 nt, Human
aagcuaaggaaagagaaggcugcagauccaaa

SEQ ID NO: 291657 - RNA, 32 nt, Human
aagcuaagugagagagccagagggccuccuug

SEQ ID NO: 291658 - RNA, 32 nt, Human
aagcuaaucacuggcaggagccuggauggcug

SEQ ID NO: 291659 - RNA, 32 nt, Human
aagcuaaugcagcugccaugugugcuaaggcu

SEQ ID NO: 291660 - RNA, 32 nt, Human
aagcuaaugggugaaugggcagagggauuugg

SEQ ID NO: 291661 - RNA, 32 nt, Human
aagcuaaugucagagaaagaagcugagucuau

SEQ ID NO: 291662 - RNA, 32 nt, Human
aagcuaauucuuugaccuguugggagugagga

SEQ ID NO: 291663 - RNA, 32 nt, Human
aagcuaauuggaucccagcucagcuuuguggc

SEQ ID NO: 291664 - RNA, 32 nt, Human
aagcuacaaaccuaaaaugcugcugccccaaa

SEQ ID NO: 291665 - RNA, 32 nt, Human
aagcuacaaauagguuuucuuaaaccagagau

SEQ ID NO: 291666 - RNA, 32 nt, Human
aagcuacaacaagcccaaggucaaaguguauu

SEQ ID NO: 291667 - RNA, 25 nt, Human
aagcuacaagaggcacguucuggca

SEQ ID NO: 291668 - RNA, 32 nt, Human
aagcuacaagaggcacguucuggcaugaauga

SEQ ID NO: 291669 - RNA, 32 nt, Human
aagcuacacagcaacacguauaggagacucuc

SEQ ID NO: 291670 - RNA, 32 nt, Human
aagcuacaccugcagaauagcaugguuuuggc

SEQ ID NO: 291671 - RNA, 32 nt, Human
aagcuacacucugucagccucucuucgacagg

SEQ ID NO: 291672 - RNA, 32 nt, Human
aagcuacagucggcugcaggugcagugacuuu

SEQ ID NO: 291673 - RNA, 32 nt, Human
aagcuacagugaagucacagggucgaauacua

SEQ ID NO: 291674 - RNA, 32 nt, Human
aagcuaccagcaccuggggcccugccagccug

SEQ ID NO: 291675 - RNA, 32 nt, Human
aagcuaccaggaaggaaagggaagaagagauc

SEQ ID NO: 291676 - RNA, 32 nt, Human
aagcuacccaggagggcaccacgucgugugca

SEQ ID NO: 291677 - RNA, 32 nt, Human
aagcuaccccaccccuucccccaaacuaccuu

SEQ ID NO: 291678 - RNA, 32 nt, Human
aagcuacccugagauauagucagcugcccacc

SEQ ID NO: 291679 - RNA, 32 nt, Human
aagcuacccugccucgcugcuccgcuugccgc

SEQ ID NO: 291680 - RNA, 32 nt, Human
aagcuaccgucucugccgccuccuccuccucc

SEQ ID NO: 291681 - RNA, 32 nt, Human
aagcuaccuggaauggauuugugugcugauuu

SEQ ID NO: 291682 - RNA, 32 nt, Human
aagcuaccuuuuguaagugccauguuuauuau

SEQ ID NO: 291683 - RNA, 32 nt, Human
aagcuacgcaauugcagccacccggccgccaa

SEQ ID NO: 291684 - RNA, 32 nt, Human
aagcuacucgugccauccaggucuccgagccc

SEQ ID NO: 291685 - RNA, 32 nt, Human
aagcuacucuugaauuguugugcucaagugau

SEQ ID NO: 291686 - RNA, 32 nt, Human
aagcuacugagaugccuguucaucugcugacu

SEQ ID NO: 291687 - RNA, 32 nt, Human
aagcuacugaguuggagaauuaggggaugacu

SEQ ID NO: 291688 - RNA, 32 nt, Human
aagcuacugcuguuuucuuucuguuauuugca

SEQ ID NO: 291689 - RNA, 32 nt, Human
aagcuacugcuuauguccacagaccaggagga

SEQ ID NO: 291690 - RNA, 32 nt, Human
aagcuacuggacuaugcugaugggccagcagg

SEQ ID NO: 291691 - RNA, 32 nt, Human
aagcuacuucacuggcuaacagugaucauguu

SEQ ID NO: 291692 - RNA, 32 nt, Human
aagcuacuugggacauuauuagcaauaaaaau

SEQ ID NO: 291693 - RNA, 32 nt, Human
aagcuagaaagaaauaggaauuuaaguccaua

SEQ ID NO: 291694 - RNA, 32 nt, Human
aagcuagaagaaagcggugaggugagagagau

SEQ ID NO: 291695 - RNA, 32 nt, Human
aagcuagaagccaagaaaauggccagcuagaa

SEQ ID NO: 291696 - RNA, 32 nt, Human
aagcuagaagcgccccagcccggcaagcuggc

SEQ ID NO: 291697 - RNA, 20 nt, Human
aagcuagaaguguugggggg

SEQ ID NO: 291698 - RNA, 32 nt, Human
aagcuagacacaugaagguaaauaaaaagaaa

SEQ ID NO: 291699 - RNA, 32 nt, Human
aagcuagcuccccuccucuccccuccacuguc

SEQ ID NO: 291700 - RNA, 32 nt, Human
aagcuaggaaguccccucaccgcucagccagg

SEQ ID NO: 291701 - RNA, 32 nt, Human
aagcuaggacagagcaccugaccucaguuguc

SEQ ID NO: 291702 - RNA, 25 nt, Human
aagcuaggcagaugagcccagaaga

SEQ ID NO: 291703 - RNA, 32 nt, Human
aagcuaggggaauuaggccacaacacccccug

SEQ ID NO: 291704 - RNA, 32 nt, Human
aagcuaggguggcccuugcaguucagcaccac

SEQ ID NO: 291705 - RNA, 32 nt, Human
aagcuagucuugaauuccugaccucaggugau

SEQ ID NO: 291706 - RNA, 32 nt, Human
aagcuagugugcagcaggaguaucuggugcac

SEQ ID NO: 291707 - RNA, 32 nt, Human
aagcuaguuucuguucuguaaagugauaucuu

SEQ ID NO: 291708 - RNA, 32 nt, Human
aagcuauagguggagcaucagcagugagugag

SEQ ID NO: 291709 - RNA, 32 nt, Human
aagcuauauagagaaaaggaaaccacugaauc

SEQ ID NO: 291710 - RNA, 32 nt, Human
aagcuauaucauaaauacaagaguuucaaaac

SEQ ID NO: 291711 - RNA, 32 nt, Human
aagcuaucuaauaccuuggagguaggucaucc

SEQ ID NO: 291712 - RNA, 20 nt, Human
aagcuaucuugguaaauuuc

SEQ ID NO: 291713 - RNA, 32 nt, Human
aagcuaugagcauuuaaaaacuguuuacagcc

SEQ ID NO: 291714 - RNA, 22 nt, Human
aagcuaugcaagcucccagagg

SEQ ID NO: 291715 - RNA, 32 nt, Human
aagcuauguguuugaaggaaugaaucagugca

SEQ ID NO: 291716 - RNA, 32 nt, Human
aagcuauuccaaaaauauuguacuuaccaaca

SEQ ID NO: 291717 - RNA, 32 nt, Human
aagcuauucuacugccucagccucccaaguag

SEQ ID NO: 291718 - RNA, 32 nt, Human
aagcuauugcagcacuuucugaggcuuucacu

SEQ ID NO: 291719 - RNA, 32 nt, Human
aagcucaacaaauguuuggcuccuucacaauc

SEQ ID NO: 291720 - RNA, 32 nt, Human
aagcucaagauggaauggcuggagcuuggcug

SEQ ID NO: 291721 - RNA, 32 nt, Human
aagcucaagccuuugcgaagcuaaugaccugc

SEQ ID NO: 291722 - RNA, 32 nt, Human
aagcucaagugaggagggggaggcuggguuuu

SEQ ID NO: 291723 - RNA, 32 nt, Human
aagcucaaguggacgucccccuucaccugcca

SEQ ID NO: 291724 - RNA, 22 nt, Human
aagcucaaucuguuaucugcua

SEQ ID NO: 291725 - RNA, 32 nt, Human
aagcucaauuccucguugaauucgagucucaa

SEQ ID NO: 291726 - RNA, 32 nt, Human
aagcucacauuucuuucugucaccacagagau

SEQ ID NO: 291727 - RNA, 32 nt, Human
aagcucacccuccgaucucgguguguuguugu

SEQ ID NO: 291728 - RNA, 32 nt, Human
aagcucaccucccaccauggaggaggagcccu

SEQ ID NO: 291729 - RNA, 32 nt, Human
aagcucaccugccuuuucuguuggaagagauc

SEQ ID NO: 291730 - RNA, 32 nt, Human
aagcucacuauccugaaugaucgcggucaggg

SEQ ID NO: 291731 - RNA, 32 nt, Human
aagcucacuccugcuucucucugcacgucucc

SEQ ID NO: 291732 - RNA, 32 nt, Human
aagcucacugcaaccucugugcagguucaagu

SEQ ID NO: 291733 - RNA, 32 nt, Human
aagcucacuucacccucuccccaugccauccc

SEQ ID NO: 291734 - RNA, 32 nt, Human
aagcucacuucacugcacuccagucuggguga

SEQ ID NO: 291735 - RNA, 32 nt, Human
aagcucacuuccggcguagggaggcuuucuga

SEQ ID NO: 291736 - RNA, 32 nt, Human
aagcucagaaagcucauuaaaaacaacuaaaa

SEQ ID NO: 291737 - RNA, 20 nt, Human
aagcucagccucaggcccag

SEQ ID NO: 291738 - RNA, 32 nt, Human
aagcucagccugagcaggugggugcaaggcuc

SEQ ID NO: 291739 - RNA, 32 nt, Human
aagcucagccugggcggcacagccagaugcga

SEQ ID NO: 291740 - RNA, 32 nt, Human
aagcucagcuacuggguggaccggaggcgcaa

SEQ ID NO: 291741 - RNA, 32 nt, Human
aagcucagcucuucuuggucuuggcuagacug

SEQ ID NO: 291742 - RNA, 32 nt, Human
aagcucagcugaggccacccgagccccaggga

SEQ ID NO: 291743 - RNA, 32 nt, Human
aagcucagcugaugcaggccgguuggagugga

SEQ ID NO: 291744 - RNA, 32 nt, Human
aagcucagcuuacuguaaccucugccuccugg

SEQ ID NO: 291745 - RNA, 32 nt, Human
aagcucaggaguucaagaccagccuggccaac

SEQ ID NO: 291746 - RNA, 32 nt, Human
aagcucaggaguucaaggccagccugggcaac

SEQ ID NO: 291747 - RNA, 32 nt, Human
aagcucaggaguuugagaccagccugggcaac

SEQ ID NO: 291748 - RNA, 32 nt, Human
aagcucaggcugcauuagaguaugaauuuagc

SEQ ID NO: 291749 - RNA, 32 nt, Human
aagcucaggggugggaucggggagcaggaagc

SEQ ID NO: 291750 - RNA, 32 nt, Human
aagcucagugaggacgggacucuacugccgag

SEQ ID NO: 291751 - RNA, 32 nt, Human
aagcucaguuaaggagccaucagcaacacuga

SEQ ID NO: 291752 - RNA, 32 nt, Human
aagcucauagcaaauugaggggcagagauuuu

SEQ ID NO: 291753 - RNA, 25 nt, Human
aagcucaucacuggucauucagaga

SEQ ID NO: 291754 - RNA, 32 nt, Human
aagcucauucuucuucuuccucccagcagcuc

SEQ ID NO: 291755 - RNA, 32 nt, Human
aagcuccaaagaucccagcccgcaaggcuguc

SEQ ID NO: 291756 - RNA, 32 nt, Human
aagcuccaagagagucaguguagcugaaacuu

SEQ ID NO: 291757 - RNA, 32 nt, Human
aagcuccacaaacggggucacgucauccaggu

SEQ ID NO: 291758 - RNA, 32 nt, Human
aagcuccacggaggccaggaauuugccuauuu

SEQ ID NO: 291759 - RNA, 32 nt, Human
aagcuccacguuuuauuuucuucaaggcauuc

SEQ ID NO: 291760 - RNA, 32 nt, Human
aagcuccagguuucaccacaaugcccaucccu

SEQ ID NO: 291761 - RNA, 28 nt, Human
aagcucccaaguguugcuggaucucugc

SEQ ID NO: 291762 - RNA, 32 nt, Human
aagcucccacuacaugcccagccuggggcccu

SEQ ID NO: 291763 - RNA, 32 nt, Human
aagcucccagaacuucguacccuuugcacaca

SEQ ID NO: 291764 - RNA, 32 nt, Human
aagcucccagguagcugggauuacgggcgccc

SEQ ID NO: 291765 - RNA, 32 nt, Human
aagcuccccaccccagccugguggcagaggaa

SEQ ID NO: 291766 - RNA, 32 nt, Human
aagcuccccgucucugcaucccuucccagggg

SEQ ID NO: 291767 - RNA, 32 nt, Human
aagcucccgcggcacucuccuagguggcccga

SEQ ID NO: 291768 - RNA, 32 nt, Human
aagcucccuccagguaucuuggugcuuauacc

SEQ ID NO: 291769 - RNA, 32 nt, Human
aagcucccugccuauucccccaccuccgaggg

SEQ ID NO: 291770 - RNA, 32 nt, Human
aagcuccggccucagccucccuucccugcucc

SEQ ID NO: 291771 - RNA, 32 nt, Human
aagcuccuaaacuuggccauucccaggaggcu

SEQ ID NO: 291772 - RNA, 32 nt, Human
aagcuccuaggugagagacguagcagcugaca

SEQ ID NO: 291773 - RNA, 32 nt, Human
aagcuccuccccauucuccaucuugggggcuc

SEQ ID NO: 291774 - RNA, 32 nt, Human
aagcuccucuccuuccuuuuccuuccuaggca

SEQ ID NO: 291775 - RNA, 32 nt, Human
aagcuccucugcuccaccuugaaccugucacc

SEQ ID NO: 291776 - RNA, 32 nt, Human
aagcuccugcagcuucuguggccaagccccag

SEQ ID NO: 291777 - RNA, 32 nt, Human
aagcuccugccucaccgucugccuugcuccuc

SEQ ID NO: 291778 - RNA, 32 nt, Human
aagcuccugccucuuugugugcgucacuguga

SEQ ID NO: 291779 - RNA, 32 nt, Human
aagcuccugcuguggaagugccuuuugagugc

SEQ ID NO: 291780 - RNA, 32 nt, Human
aagcuccugggcggcccugccggaacccugcu

SEQ ID NO: 291781 - RNA, 32 nt, Human
aagcuccugggggcuugaggggguggcacagu

SEQ ID NO: 291782 - RNA, 32 nt, Human
aagcuccuucuguuggaaguugaguaccugug

SEQ ID NO: 291783 - RNA, 32 nt, Human
aagcuccuuucuucucuuucugcuucaguugc

SEQ ID NO: 291784 - RNA, 32 nt, Human
aagcucgcacucuugucuucuggucacuccuc

SEQ ID NO: 291785 - RNA, 32 nt, Human
aagcucgcuccuuggucugcaguccuuuaaac

SEQ ID NO: 291786 - RNA, 32 nt, Human
aagcucuagcuuuacccagcucugccuggaga

SEQ ID NO: 291787 - RNA, 31 nt, Human
aagcucucaauaacccuugaaaaaugacugg

SEQ ID NO: 291788 - RNA, 32 nt, Human
aagcucuccacucccacagaaaggacagggca

SEQ ID NO: 291789 - RNA, 32 nt, Human
aagcucuccagccagacugaggucacagaugu

SEQ ID NO: 291790 - RNA, 32 nt, Human
aagcucucccacccccagccucggcggcagag

SEQ ID NO: 291791 - RNA, 32 nt, Human
aagcucucuccugcuucaagaucuugccucuu

SEQ ID NO: 291792 - RNA, 32 nt, Human
aagcucucugcagcugucucauuccuucccaa

SEQ ID NO: 291793 - RNA, 32 nt, Human
aagcucugauaaagcacacaaggugcucaaac

SEQ ID NO: 291794 - RNA, 32 nt, Human
aagcucugccuucaacaauuaggagcaaaaug

SEQ ID NO: 291795 - RNA, 32 nt, Human
aagcucugccuugccagucuccuaaaucacaa

SEQ ID NO: 291796 - RNA, 32 nt, Human
aagcucugcuccuucagggccagugacuugcu

SEQ ID NO: 291797 - RNA, 32 nt, Human
aagcucugcugcgaugccucugccucaucuca

SEQ ID NO: 291798 - RNA, 24 nt, Human
aagcucugggaugacaggcgugag

SEQ ID NO: 291799 - RNA, 32 nt, Human
aagcucugggccccuccucccugcugccacuu

SEQ ID NO: 291800 - RNA, 32 nt, Human
aagcucuggggucaggggaggggccgggggca

SEQ ID NO: 291801 - RNA, 32 nt, Human
aagcucuguccuacuuacagcacuuuggauca

SEQ ID NO: 291802 - RNA, 32 nt, Human
aagcucugucugaauccucgcagccacaccua

SEQ ID NO: 291803 - RNA, 32 nt, Human
aagcucugucuucucccucugcccuccaacag

SEQ ID NO: 291804 - RNA, 32 nt, Human
aagcucuguuguugacauuuugcagugauaca

SEQ ID NO: 291805 - RNA, 32 nt, Human
aagcucuucaccguguuuccagccugggacca

SEQ ID NO: 291806 - RNA, 32 nt, Human
aagcucuuccacccuccuucaccuaucuuaau

SEQ ID NO: 291807 - RNA, 32 nt, Human
aagcucuucuccucagcuuggggcagccauug

SEQ ID NO: 291808 - RNA, 32 nt, Human
aagcucuucuucugaaaccuguaauuucaaug

SEQ ID NO: 291809 - RNA, 32 nt, Human
aagcucuucuucuuccuucauuggccucuccg

SEQ ID NO: 291810 - RNA, 24 nt, Human
aagcucuugcccagggguuggagg

SEQ ID NO: 291811 - RNA, 32 nt, Human
aagcucuuggcugcaaagagagaggaucccgg

SEQ ID NO: 291812 - RNA, 32 nt, Human
aagcucuugggcauuauacaacaaauaaucua

SEQ ID NO: 291813 - RNA, 32 nt, Human
aagcucuuguccugcacugucuuuagguauca

SEQ ID NO: 291814 - RNA, 32 nt, Human
aagcucuuguuuugaaaaacaguggggugggg

SEQ ID NO: 291815 - RNA, 32 nt, Human
aagcugaaaaacacagcccaagaauuucauga

SEQ ID NO: 291816 - RNA, 32 nt, Human
aagcugaacggaugccacacugugcuggggcc

SEQ ID NO: 291817 - RNA, 32 nt, Human
aagcugaagaaaaagcgccagugaagaaaucu

SEQ ID NO: 291818 - RNA, 32 nt, Human
aagcugaagagagcguauuauuauucgcccau

SEQ ID NO: 291819 - RNA, 32 nt, Human
aagcugaaggcagaaagagaugcagagaaagu

SEQ ID NO: 291820 - RNA, 32 nt, Human
aagcugaaguuaaaguuguggaagagaguggg

SEQ ID NO: 291821 - RNA, 32 nt, Human
aagcugaaguugucugccuagaauuccacugu

SEQ ID NO: 291822 - RNA, 32 nt, Human
aagcugacacagauuauugaggcugcuauagu

SEQ ID NO: 291823 - RNA, 32 nt, Human
aagcugacagcaggccagggaagcagugaggc

SEQ ID NO: 291824 - RNA, 32 nt, Human
aagcugacauuugcugcuaucauuccaacacu

SEQ ID NO: 291825 - RNA, 32 nt, Human
aagcugaccaaaacaugguccccaccuuuugg

SEQ ID NO: 291826 - RNA, 32 nt, Human
aagcugaccaacacuacagagaucccacacua

SEQ ID NO: 291827 - RNA, 32 nt, Human
aagcugaccagccugcucuguacagugacaau

SEQ ID NO: 291828 - RNA, 32 nt, Human
aagcugaccuaagaagugggacccuggccggg

SEQ ID NO: 291829 - RNA, 32 nt, Human
aagcugaccuggauggaaguugaacagugauc

SEQ ID NO: 291830 - RNA, 32 nt, Human
aagcugacuguggcuggcugagaucgcaggug

SEQ ID NO: 291831 - RNA, 32 nt, Human
aagcugacuguucacacugauugcccagcaca

SEQ ID NO: 291832 - RNA, 32 nt, Human
aagcugagaagaagcugaggauccucacagga

SEQ ID NO: 291833 - RNA, 32 nt, Human
aagcugagaagaggaagaugaagaggaggaag

SEQ ID NO: 291834 - RNA, 32 nt, Human
aagcugagaagaggaugcagaaugacaaggaa

SEQ ID NO: 291835 - RNA, 32 nt, Human
aagcugagaagucagggugaggcuggagggga

SEQ ID NO: 291836 - RNA, 32 nt, Human
aagcugagacccccauccccagcugcucugag

SEQ ID NO: 291837 - RNA, 32 nt, Human
aagcugagacgugacugucuaggaguaacacu

SEQ ID NO: 291838 - RNA, 19 nt, Human
aagcugagacuccugggga

SEQ ID NO: 291839 - RNA, 32 nt, Human
aagcugagagaugccuacagcugagagugaag

SEQ ID NO: 291840 - RNA, 32 nt, Human
aagcugagaucgcugcacuccagccugggcga

SEQ ID NO: 291841 - RNA, 32 nt, Human
aagcugagcugcugugacagaggggaacaaga

SEQ ID NO: 291842 - RNA, 21 nt, Human
aagcugagcuggcuucggaga

SEQ ID NO: 291843 - RNA, 32 nt, Human
aagcugaggaagaaagaagccaauaguagauc

SEQ ID NO: 291844 - RNA, 20 nt, Human
aagcugaggaggcuuuggaa

SEQ ID NO: 291845 - RNA, 32 nt, Human
aagcugaggcccagagaagcgaagcgacugug

SEQ ID NO: 291846 - RNA, 32 nt, Human
aagcugaggccgagcuugcaugucugacauaa

SEQ ID NO: 291847 - RNA, 32 nt, Human
aagcugaggcucagagagguuaagcaacuuag

SEQ ID NO: 291848 - RNA, 15 nt, Human
aagcugaggugggag

SEQ ID NO: 291849 - RNA, 19 nt, Human
aagcugaguccugcaggaa

SEQ ID NO: 291850 - RNA, 32 nt, Human
aagcugauaaaaucugcaacacuccugcuguu

SEQ ID NO: 291851 - RNA, 32 nt, Human
aagcugauaaccguccuucaucaccgaagugu

SEQ ID NO: 291852 - RNA, 32 nt, Human
aagcugauaucacccaggcuggagugcagugg

SEQ ID NO: 291853 - RNA, 32 nt, Human
aagcugauccuccagccccagucaaaccuuca

SEQ ID NO: 291854 - RNA, 32 nt, Human
aagcugauccugcugcaccacaagcacccaga

SEQ ID NO: 291855 - RNA, 32 nt, Human
aagcugaucucaaacuccugaccucaagugau

SEQ ID NO: 291856 - RNA, 32 nt, Human
aagcugaucuugaacuccuggccucaguugag

SEQ ID NO: 291857 - RNA, 32 nt, Human
aagcugaugaauuuucuuuucuguccaaacaa

SEQ ID NO: 291858 - RNA, 32 nt, Human
aagcugaugagguuaggauacccaggcccuuu

SEQ ID NO: 291859 - RNA, 32 nt, Human
aagcugaugcccugaggcugggcacaguggaa

SEQ ID NO: 291860 - RNA, 32 nt, Human
aagcugauggagcucagaauuccacugucaag

SEQ ID NO: 291861 - RNA, 19 nt, Human
aagcugauggcaacuuggc

SEQ ID NO: 291862 - RNA, 32 nt, Human
aagcugaugggagugagagaacucagcaagcc

SEQ ID NO: 291863 - RNA, 32 nt, Human
aagcugaugggauucugucucaucucauaccu

SEQ ID NO: 291864 - RNA, 32 nt, Human
aagcugauguggaaggaggggaagcacuguga

SEQ ID NO: 291865 - RNA, 32 nt, Human
aagcugauuucgagaacuuucaaaaucucaca

SEQ ID NO: 291866 - RNA, 32 nt, Human
aagcugcaaaggacucagcuggggcggcucca

SEQ ID NO: 291867 - RNA, 32 nt, Human
aagcugcaaggcguccagagugagugugaccu

SEQ ID NO: 291868 - RNA, 32 nt, Human
aagcugcaagguuguuuccagcacuuugggaa

SEQ ID NO: 291869 - RNA, 32 nt, Human
aagcugcaauuuuguacagauaccaacuucug

SEQ ID NO: 291870 - RNA, 32 nt, Human
aagcugcacugugagcuggcugugggauacuc

SEQ ID NO: 291871 - RNA, 32 nt, Human
aagcugcagaugggcuaaauaaaagccaaauu

SEQ ID NO: 291872 - RNA, 32 nt, Human
aagcugcagccaugauggaaguuugagaguug

SEQ ID NO: 291873 - RNA, 32 nt, Human
aagcugcagccugcccuggcccuggcucuggc

SEQ ID NO: 291874 - RNA, 32 nt, Human
aagcugcagccugggguccugagcuucccucg

SEQ ID NO: 291875 - RNA, 32 nt, Human
aagcugcagcuggucuguuuccaggucagaaa

SEQ ID NO: 291876 - RNA, 32 nt, Human
aagcugcaggcacugcagccucgggagaaguu

SEQ ID NO: 291877 - RNA, 32 nt, Human
aagcugcaggcagaggcguugaggacaucugu

SEQ ID NO: 291878 - RNA, 32 nt, Human
aagcugcagucagccaagaucuugccacugua

SEQ ID NO: 291879 - RNA, 32 nt, Human
aagcugcagugagccgagaucaggccauugca

SEQ ID NO: 291880 - RNA, 32 nt, Human
aagcugcagugccaccacuugccauuccuagc

SEQ ID NO: 291881 - RNA, 32 nt, Human
aagcugcagugggagcagccugggacccgaca

SEQ ID NO: 291882 - RNA, 32 nt, Human
aagcugcaucagccgcacucuccuggacgcca

SEQ ID NO: 291883 - RNA, 32 nt, Human
aagcugcaucgugcuccuccagccugcacugg

SEQ ID NO: 291884 - RNA, 32 nt, Human
aagcugcaugcaguuggaagggaucuucagau

SEQ ID NO: 291885 - RNA, 32 nt, Human
aagcugcauggccucucuccagcucucucuga

SEQ ID NO: 291886 - RNA, 32 nt, Human
aagcugccaaacauguuuauuuagcagauacu

SEQ ID NO: 291887 - RNA, 32 nt, Human
aagcugccaagguggagagagggauuacagaa

SEQ ID NO: 291888 - RNA, 32 nt, Human
aagcugccaauggaugaaaagccucagaaagc

SEQ ID NO: 291889 - RNA, 32 nt, Human
aagcugccaccagcccaggacccuccagaggc

SEQ ID NO: 291890 - RNA, 32 nt, Human
aagcugccacccuucaaggacagggaagagac

SEQ ID NO: 291891 - RNA, 32 nt, Human
aagcugccagaagcccaggggcucaggacagg

SEQ ID NO: 291892 - RNA, 32 nt, Human
aagcugcccagaagugccuuggcuccagcccu

SEQ ID NO: 291893 - RNA, 21 nt, Human
aagcugccccacccacucucc

SEQ ID NO: 291894 - RNA, 22 nt, Human
aagcugccccugucccaggaga

SEQ ID NO: 291895 - RNA, 32 nt, Human
aagcugcccgggagggugggugcagacacagg

SEQ ID NO: 291896 - RNA, 20 nt, Human
aagcugcccucucccucucc

SEQ ID NO: 291897 - RNA, 32 nt, Human
aagcugcccugagacggugucccgccgaaaga

SEQ ID NO: 291898 - RNA, 32 nt, Human
aagcugcccuugcuguccugugcagugaaggg

SEQ ID NO: 291899 - RNA, 32 nt, Human
aagcugccgucaacccugccucagccucccuc

SEQ ID NO: 291900 - RNA, 32 nt, Human
aagcugccuaugcguccccagccugggcugac

SEQ ID NO: 291901 - RNA, 32 nt, Human
aagcugccucccaucacugccugcuggcugcu

SEQ ID NO: 291902 - RNA, 32 nt, Human
aagcugccuccccuggcugauguucucuggga

SEQ ID NO: 291903 - RNA, 32 nt, Human
aagcugccugagccaaggugauuucuaggagu

SEQ ID NO: 291904 - RNA, 32 nt, Human
aagcugcguccgggcuggagcacuggaacccg

SEQ ID NO: 291905 - RNA, 32 nt, Human
aagcugcguccuggcgauuccaggagacccag

SEQ ID NO: 291906 - RNA, 32 nt, Human
aagcugcgugagcaagcaagccaacauggacc

SEQ ID NO: 291907 - RNA, 22 nt, Human
aagcugcguggagacccaggag

SEQ ID NO: 291908 - RNA, 24 nt, Human
aagcugcguguggccccuuagagg

SEQ ID NO: 291909 - RNA, 32 nt, Human
aagcugcuacuuuaacagagcaccuggcgugg

SEQ ID NO: 291910 - RNA, 32 nt, Human
aagcugcuauaaagccaguagauguuaaacug

SEQ ID NO: 291911 - RNA, 32 nt, Human
aagcugcucagaaucccauaaacaucugucuu

SEQ ID NO: 291912 - RNA, 32 nt, Human
aagcugcuccaccucauccuugcugagugggg

SEQ ID NO: 291913 - RNA, 32 nt, Human
aagcugcucccagucucccagaaccaagaguu

SEQ ID NO: 291914 - RNA, 32 nt, Human
aagcugcucucucuucccagugcagauccacu

SEQ ID NO: 291915 - RNA, 32 nt, Human
aagcugcugaagguaagauuaucaaaauuaua

SEQ ID NO: 291916 - RNA, 32 nt, Human
aagcugcugacaucauccacugccuucugcug

SEQ ID NO: 291917 - RNA, 20 nt, Human
aagcugcugaguguccugca

SEQ ID NO: 291918 - RNA, 32 nt, Human
aagcugcugccuggaccacuaaggaagcccag

SEQ ID NO: 291919 - RNA, 32 nt, Human
aagcugcugccuggccccuugcuguaaagugu

SEQ ID NO: 291920 - RNA, 32 nt, Human
aagcugcugcugugucggacacuugcucccau

SEQ ID NO: 291921 - RNA, 32 nt, Human
aagcugcugcuuccucuguuucauuggauugu

SEQ ID NO: 291922 - RNA, 32 nt, Human
aagcugcuggagcccgcacugucccaguagcc

SEQ ID NO: 291923 - RNA, 32 nt, Human
aagcugcugggcucuguaucucccacaagcug

SEQ ID NO: 291924 - RNA, 32 nt, Human
aagcugcuucagacugcuucaugaggagguua

SEQ ID NO: 291925 - RNA, 32 nt, Human
aagcugcuuccucugugagccuccauguggga

SEQ ID NO: 291926 - RNA, 32 nt, Human
aagcugcuuccuuuucccuccugcuucccuuc

SEQ ID NO: 291927 - RNA, 32 nt, Human
aagcugcuugcagagaaggggcugccucagga

SEQ ID NO: 291928 - RNA, 32 nt, Human
aagcugcuuuggugaugcuuugcucaucucag

SEQ ID NO: 291929 - RNA, 32 nt, Human
aagcugcuuuguccuacauuucuuucaucugg

SEQ ID NO: 291930 - RNA, 32 nt, Human
aagcuggaacccagagauggagcccagcaugc

SEQ ID NO: 291931 - RNA, 32 nt, Human
aagcuggaacgugagccaggaggcccggaccg

SEQ ID NO: 291932 - RNA, 32 nt, Human
aagcuggaagcugagacacagguuagguggcg

SEQ ID NO: 291933 - RNA, 32 nt, Human
aagcuggaauaagaaguggucauuucagaagu

SEQ ID NO: 291934 - RNA, 32 nt, Human
aagcuggaauaagcaguggucauuucagaagu

SEQ ID NO: 291935 - RNA, 32 nt, Human
aagcuggacacuuggaggccacuggagggagg

SEQ ID NO: 291936 - RNA, 32 nt, Human
aagcuggacugcaguggcaugaucucggcuca

SEQ ID NO: 291937 - RNA, 32 nt, Human
aagcuggagaaaggaagaauugugccuugcau

SEQ ID NO: 291938 - RNA, 32 nt, Human
aagcuggagauuccagcucuaagacaugcuau

SEQ ID NO: 291939 - RNA, 32 nt, Human
aagcuggagcacucccagcagaagugcaucgu

SEQ ID NO: 291940 - RNA, 31 nt, Human
aagcuggaggaggcagaaaaagcugcagaug

SEQ ID NO: 291941 - RNA, 32 nt, Human
aagcuggaggcagagauuggagugauacauug

SEQ ID NO: 291942 - RNA, 32 nt, Human
aagcuggaggcugggugcaguggcucaugcca

SEQ ID NO: 291943 - RNA, 32 nt, Human
aagcuggagggggaaugcugggggagcugggg

SEQ ID NO: 291944 - RNA, 32 nt, Human
aagcuggagugugaggcaggaggcuggaaacc

SEQ ID NO: 291945 - RNA, 32 nt, Human
aagcuggcacuugugcuggugccuggagcugu

SEQ ID NO: 291946 - RNA, 18 nt, Human
aagcuggcagaggcccug

SEQ ID NO: 291947 - RNA, 32 nt, Human
aagcuggcagcccuggaagugcaguguugggg

SEQ ID NO: 291948 - RNA, 32 nt, Human
aagcuggcaggcuugaggcccaggaagagcca

SEQ ID NO: 291949 - RNA, 32 nt, Human
aagcuggcaguguguaaagcacuggcaaguuu

SEQ ID NO: 291950 - RNA, 26 nt, Human
aagcuggccccuuggccuccuagaga

SEQ ID NO: 291951 - RNA, 32 nt, Human
aagcuggcccuauaccuggccgagguggagaa

SEQ ID NO: 291952 - RNA, 32 nt, Human
aagcuggcggaucgcuugaggcccagagucua

SEQ ID NO: 291953 - RNA, 32 nt, Human
aagcuggcgggggagagcuggggacccaguau

SEQ ID NO: 291954 - RNA, 32 nt, Human
aagcuggcucaagcuggccccucagcucugga

SEQ ID NO: 291955 - RNA, 32 nt, Human
aagcuggcucagaagaaaaagggcuucucucu

SEQ ID NO: 291956 - RNA, 32 nt, Human
aagcuggcuguuaucucaacaucuucaucagc

SEQ ID NO: 291957 - RNA, 23 nt, Human
aagcugggaauggccaucugaga

SEQ ID NO: 291958 - RNA, 32 nt, Human
aagcugggagaaaggaggucgaggaggaggug

SEQ ID NO: 291959 - RNA, 32 nt, Human
aagcugggagagagguaugggacagauucuuu

SEQ ID NO: 291960 - RNA, 32 nt, Human
aagcugggagcgugggcucagcagggcugguc

SEQ ID NO: 291961 - RNA, 32 nt, Human
aagcugggaggcagaguuuucagugagccaag

SEQ ID NO: 291962 - RNA, 32 nt, Human
aagcugggaggcagauagccuugggcaaauuu

SEQ ID NO: 291963 - RNA, 26 nt, Human
aagcugggaggcggagguugcaguga

SEQ ID NO: 291964 - RNA, 32 nt, Human
aagcugggaggcggagguugcagugagccaag

SEQ ID NO: 291965 - RNA, 32 nt, Human
aagcugggaucaaggauagggaguuguaacag

SEQ ID NO: 291966 - RNA, 32 nt, Human
aagcugggcagaagcaggaggaucauuugagc

SEQ ID NO: 291967 - RNA, 32 nt, Human
aagcuggggaggagcuuuguuuugggggucag

SEQ ID NO: 291968 - RNA, 32 nt, Human
aagcuggggauccacuccgcccuuuuagauga

SEQ ID NO: 291969 - RNA, 20 nt, Human
aagcuggggccccucgggaa

SEQ ID NO: 291970 - RNA, 32 nt, Human
aagcugggguagggugauggcagugcuccggg

SEQ ID NO: 291971 - RNA, 32 nt, Human
aagcuggguacacagugggcccaggacuaagc

SEQ ID NO: 291972 - RNA, 32 nt, Human
aagcuggucucaaacuccugaccucagguaau

SEQ ID NO: 291973 - RNA, 32 nt, Human
aagcuggucucaaacuccugaccucaggugau

SEQ ID NO: 291974 - RNA, 32 nt, Human
aagcuggucucaaacuccuggccucaagcagu

SEQ ID NO: 291975 - RNA, 32 nt, Human
aagcuggucucaaacuccugggcucaagcgau

SEQ ID NO: 291976 - RNA, 32 nt, Human
aagcuggucucgaacuccugaccucaggcgau

SEQ ID NO: 291977 - RNA, 32 nt, Human
aagcuggucucgaacuccugaccuuaaaugau

SEQ ID NO: 291978 - RNA, 32 nt, Human
aagcuggucucgaauuccugaccucaggugau

SEQ ID NO: 291979 - RNA, 32 nt, Human
aagcuggucuggaacuccugggcucaagcaau

SEQ ID NO: 291980 - RNA, 32 nt, Human
aagcuggucuuaaacuccuggccucaagcaau

SEQ ID NO: 291981 - RNA, 32 nt, Human
aagcuggucuugaacuccugaccucaagugau

SEQ ID NO: 291982 - RNA, 32 nt, Human
aagcuggucuugaacuccugaccucaggugau

SEQ ID NO: 291983 - RNA, 32 nt, Human
aagcuggucuugaacuccugaccucaugugau

SEQ ID NO: 291984 - RNA, 32 nt, Human
aagcuggucuugaacuccugacuucaugaucu

SEQ ID NO: 291985 - RNA, 32 nt, Human
aagcuggucuugaacuccuggccuccuugaac

SEQ ID NO: 291986 - RNA, 32 nt, Human
aagcuggucuugaacucuugaccucaagugau

SEQ ID NO: 291987 - RNA, 32 nt, Human
aagcugguggagcagaguguucccugacuccu

SEQ ID NO: 291988 - RNA, 32 nt, Human
aagcugguggaggaggaagccaacaucuuggg

SEQ ID NO: 291989 - RNA, 32 nt, Human
aagcugguggccucugcaggccuaggugcagc

SEQ ID NO: 291990 - RNA, 32 nt, Human
aagcugguggcucucuuuuaauucucuuguaa

SEQ ID NO: 291991 - RNA, 32 nt, Human
aagcuggugguguaggacuuaaccucauugga

SEQ ID NO: 291992 - RNA, 32 nt, Human
aagcugguguccaacagacaccaccugucaaa

SEQ ID NO: 291993 - RNA, 32 nt, Human
aagcugguucuacugucuguuuuccuuaauua

SEQ ID NO: 291994 - RNA, 32 nt, Human
aagcugguugaagcccuggaccuguuugagag

SEQ ID NO: 291995 - RNA, 32 nt, Human
aagcugguuuccuccuccccaggguuuugcug

SEQ ID NO: 291996 - RNA, 32 nt, Human
aagcugguuucgaauuccugaccucaggugau

SEQ ID NO: 291997 - RNA, 32 nt, Human
aagcugguuugcuucauaccauugggaucugc

SEQ ID NO: 291998 - RNA, 32 nt, Human
aagcugguuugugaagcaccugccaugaaauc

SEQ ID NO: 291999 - RNA, 32 nt, Human
aagcuguaggguuucagagagguuggcagugg

SEQ ID NO: 292000 - RNA, 32 nt, Human
aagcuguauguaauggaugacacccaggagcc

SEQ ID NO: 292001 - RNA, 32 nt, Human
aagcugucaaagaagucauucuuuugaacacc

SEQ ID NO: 292002 - RNA, 32 nt, Human
aagcugucacuaucacacauaagcaccauucc

SEQ ID NO: 292003 - RNA, 31 nt, Human
aagcugucacucagaccugguuugagauaga

SEQ ID NO: 292004 - RNA, 23 nt, Human
aagcugucaggggcccucagaga

SEQ ID NO: 292005 - RNA, 32 nt, Human
aagcugucucccuucugacauuuccuaggaag

SEQ ID NO: 292006 - RNA, 32 nt, Human
aagcugugaacaggcugggcugcuggaggugg

SEQ ID NO: 292007 - RNA, 32 nt, Human
aagcugugacaaccaggagcccugucuguggg

SEQ ID NO: 292008 - RNA, 32 nt, Human
aagcugugacauaggacuugaagaccaaagac

SEQ ID NO: 292009 - RNA, 32 nt, Human
aagcugugacuaacucuuuuuaucucucaaua

SEQ ID NO: 292010 - RNA, 32 nt, Human
aagcugugagccaguuaauagccgaugcuggg

SEQ ID NO: 292011 - RNA, 32 nt, Human
aagcugugcaauuacugccugcagagauauuu

SEQ ID NO: 292012 - RNA, 18 nt, Human
aagcugugcagcugugua

SEQ ID NO: 292013 - RNA, 32 nt, Human
aagcugugcccaggaaggggaguaacugugca

SEQ ID NO: 292014 - RNA, 22 nt, Human
aagcugugccuagaaauuucau

SEQ ID NO: 292015 - RNA, 32 nt, Human
aagcugugcuguagccuguaauuacugacaug

SEQ ID NO: 292016 - RNA, 31 nt, Human
aagcuguggacccucucagccaacgauaugg

SEQ ID NO: 292017 - RNA, 32 nt, Human
aagcuguggacccucucagccaacgauaugga

SEQ ID NO: 292018 - RNA, 32 nt, Human
aagcuguggcaacugcucgugugcacacggga

SEQ ID NO: 292019 - RNA, 18 nt, Human
aagcuguggcccugggag

SEQ ID NO: 292020 - RNA, 32 nt, Human
aagcuguggccugauggagcagccccauucca

SEQ ID NO: 292021 - RNA, 32 nt, Human
aagcugugggaggagcuggaggcuucaccgug

SEQ ID NO: 292022 - RNA, 32 nt, Human
aagcugugggcaagaggucagcaggacccgcc

SEQ ID NO: 292023 - RNA, 32 nt, Human
aagcugugggcuguggggaaguggcugcaucg

SEQ ID NO: 292024 - RNA, 32 nt, Human
aagcuguggggagacagccucaugguccagcc

SEQ ID NO: 292025 - RNA, 32 nt, Human
aagcuguguuacugaacagccuggugauaaua

SEQ ID NO: 292026 - RNA, 32 nt, Human
aagcuguuacacgggucugccauuccaaacaa

SEQ ID NO: 292027 - RNA, 32 nt, Human
aagcuguuccccagcugcagggagacuggagu

SEQ ID NO: 292028 - RNA, 30 nt, Human
aagcuguucugcagaucagaaagaaggggu

SEQ ID NO: 292029 - RNA, 32 nt, Human
aagcuguucugucaacuguaauuguucaaaga

SEQ ID NO: 292030 - RNA, 25 nt, Human
aagcuguuggacaccugccuucuca

SEQ ID NO: 292031 - RNA, 32 nt, Human
aagcuguuucaggcagguggagaggaugaggu

SEQ ID NO: 292032 - RNA, 32 nt, Human
aagcuguuuugaagccaagugaagaguguggu

SEQ ID NO: 292033 - RNA, 32 nt, Human
aagcuguuuuucuagcauguugcccuuuuuca

SEQ ID NO: 292034 - RNA, 32 nt, Human
aagcuguuuuucuccauugucauagugccuuc

SEQ ID NO: 292035 - RNA, 32 nt, Human
aagcuuaaagcaguuguaagauuuucagucca

SEQ ID NO: 292036 - RNA, 32 nt, Human
aagcuuacaauccaggagcucaccccuucaag

SEQ ID NO: 292037 - RNA, 32 nt, Human
aagcuuacaauuagucuucacaguuaugggau

SEQ ID NO: 292038 - RNA, 32 nt, Human
aagcuuacucuccccucaccuuuucuuuucac

SEQ ID NO: 292039 - RNA, 32 nt, Human
aagcuuagccuaccacacuaccagucauuccc

SEQ ID NO: 292040 - RNA, 18 nt, Human
aagcuuagucuccggggc

SEQ ID NO: 292041 - RNA, 32 nt, Human
aagcuuagugcuuggguucagacaguuguggg

SEQ ID NO: 292042 - RNA, 32 nt, Human
aagcuuauaguuuucugaucuguguuagaagu

SEQ ID NO: 292043 - RNA, 32 nt, Human
aagcuuauguaagagcuuuuccuucuaaacuu

SEQ ID NO: 292044 - RNA, 32 nt, Human
aagcuuauugcauuccacacugaucucuuggc

SEQ ID NO: 292045 - RNA, 32 nt, Human
aagcuuauugcucaaucaccagccuuugcgag

SEQ ID NO: 292046 - RNA, 31 nt, Human
aagcuuauuuguaaauaccuauuugaaugcu

SEQ ID NO: 292047 - RNA, 32 nt, Human
aagcuucaacucaguaaccaucuguugugggu

SEQ ID NO: 292048 - RNA, 32 nt, Human
aagcuucaccgggcccuccaggcacagagggg

SEQ ID NO: 292049 - RNA, 32 nt, Human
aagcuucacucugccuggggcuuuggcuguaa

SEQ ID NO: 292050 - RNA, 32 nt, Human
aagcuucacuucaacuucacuacuucuguagu

SEQ ID NO: 292051 - RNA, 32 nt, Human
aagcuucagaaguuuggcaauaguuugcauag

SEQ ID NO: 292052 - RNA, 32 nt, Human
aagcuucagccaauccuccuuguuuuauaucc

SEQ ID NO: 292053 - RNA, 32 nt, Human
aagcuucagccuuuaaccuauaccuuuguagu

SEQ ID NO: 292054 - RNA, 32 nt, Human
aagcuucaggaggugauauugauguguauagu

SEQ ID NO: 292055 - RNA, 30 nt, Human
aagcuucaggccccucugcuccugucugug

SEQ ID NO: 292056 - RNA, 32 nt, Human
aagcuucagucuuucaaagagaaaugugugau

SEQ ID NO: 292057 - RNA, 32 nt, Human
aagcuucagugguacagaugaaccagaaugaa

SEQ ID NO: 292058 - RNA, 32 nt, Human
aagcuuccacccuuuuauaauaggaaggguug

SEQ ID NO: 292059 - RNA, 32 nt, Human
aagcuuccaucucccggcugggcacgguggcu

SEQ ID NO: 292060 - RNA, 32 nt, Human
aagcuucccuccugccagcaacaagaaggcuu

SEQ ID NO: 292061 - RNA, 32 nt, Human
aagcuuccgacgcgcgaggccucgggaggagc

SEQ ID NO: 292062 - RNA, 32 nt, Human
aagcuuccuccaccccucucuuuauaggccua

SEQ ID NO: 292063 - RNA, 32 nt, Human
aagcuuccuccuccucuccagcugguagucac

SEQ ID NO: 292064 - RNA, 32 nt, Human
aagcuucguaccacugcuaucucccuuuuaca

SEQ ID NO: 292065 - RNA, 32 nt, Human
aagcuucguauuuuucuugguuucacacucag

SEQ ID NO: 292066 - RNA, 32 nt, Human
aagcuucucaaacuguuagcugcugucugacu

SEQ ID NO: 292067 - RNA, 32 nt, Human
aagcuucucccagggucagagguggaguuaga

SEQ ID NO: 292068 - RNA, 32 nt, Human
aagcuucucuagugaggcauucugagcagugg

SEQ ID NO: 292069 - RNA, 32 nt, Human
aagcuucugaguucugcagccucaccucugag

SEQ ID NO: 292070 - RNA, 32 nt, Human
aagcuucugcuccuuccuucccaauuucuccu

SEQ ID NO: 292071 - RNA, 32 nt, Human
aagcuucuguaacauaggcagcugcacugcgc

SEQ ID NO: 292072 - RNA, 32 nt, Human
aagcuucuuuaaaagcugcuauugauaacucu

SEQ ID NO: 292073 - RNA, 32 nt, Human
aagcuucuuuuggauuagagggggauuuuuga

SEQ ID NO: 292074 - RNA, 32 nt, Human
aagcuugaacccaggagguggagguugcagug

SEQ ID NO: 292075 - RNA, 32 nt, Human
aagcuugaacuuaagagugauaacuuagggua

SEQ ID NO: 292076 - RNA, 32 nt, Human
aagcuugaauacugcauaugccaaauagcuuu

SEQ ID NO: 292077 - RNA, 32 nt, Human
aagcuugaggacugcuggugaccugggaagaa

SEQ ID NO: 292078 - RNA, 32 nt, Human
aagcuugauggugguugugaaagugauuuagc

SEQ ID NO: 292079 - RNA, 32 nt, Human
aagcuugccacuuuccagccuguuuccccaau

SEQ ID NO: 292080 - RNA, 32 nt, Human
aagcuugcucagaaaggcagaaaucugagggu

SEQ ID NO: 292081 - RNA, 32 nt, Human
aagcuugcugugcaugaucaugguuaagccac

SEQ ID NO: 292082 - RNA, 32 nt, Human
aagcuuggagaaaacucugcauucccaugagg

SEQ ID NO: 292083 - RNA, 32 nt, Human
aagcuuggaggaaagcauacuggagaauaagc

SEQ ID NO: 292084 - RNA, 32 nt, Human
aagcuugggcugaagcacccagccuggucaag

SEQ ID NO: 292085 - RNA, 32 nt, Human
aagcuugggguuucuuugguguuaccauccca

SEQ ID NO: 292086 - RNA, 32 nt, Human
aagcuugguccccacaggaggaggucacugau

SEQ ID NO: 292087 - RNA, 32 nt, Human
aagcuuguccagguugaucuugaacuccugac

SEQ ID NO: 292088 - RNA, 32 nt, Human
aagcuugucuugaacuccuggccuuaagugau

SEQ ID NO: 292089 - RNA, 32 nt, Human
aagcuugugaaguuccaaucuaaugacaccug

SEQ ID NO: 292090 - RNA, 32 nt, Human
aagcuugugggugcucccuuucugccagcagu

SEQ ID NO: 292091 - RNA, 32 nt, Human
aagcuuguugacugcaaguuggccuggucagg

SEQ ID NO: 292092 - RNA, 32 nt, Human
aagcuuguuuaaguuuacacagcuaguaagag

SEQ ID NO: 292093 - RNA, 32 nt, Human
aagcuuuaaagugcuagaaaucuugugcccca

SEQ ID NO: 292094 - RNA, 32 nt, Human
aagcuuuacaucuucauuuugacuguuccaua

SEQ ID NO: 292095 - RNA, 32 nt, Human
aagcuuuacguucauguaaacagcaugacgug

SEQ ID NO: 292096 - RNA, 32 nt, Human
aagcuuuacguucauguaaacagcaugaugug

SEQ ID NO: 292097 - RNA, 32 nt, Human
aagcuuuaggcaggcuuccuggaacuacuguu

SEQ ID NO: 292098 - RNA, 32 nt, Human
aagcuuucagaauaugucagugcugauguagc

SEQ ID NO: 292099 - RNA, 32 nt, Human
aagcuuucagggacagcuaucaccugaggcgc

SEQ ID NO: 292100 - RNA, 32 nt, Human
aagcuuucaguauuuguuauugugaaagaagu

SEQ ID NO: 292101 - RNA, 32 nt, Human
aagcuuucauuuuucccccagugaaugauuua

SEQ ID NO: 292102 - RNA, 32 nt, Human
aagcuuuccccaauccccaggucucuagauca

SEQ ID NO: 292103 - RNA, 32 nt, Human
aagcuuucccgcuguuucccugccugcaaaag

SEQ ID NO: 292104 - RNA, 32 nt, Human
aagcuuucccuucuugguucagagaugcugua

SEQ ID NO: 292105 - RNA, 32 nt, Human
aagcuuuccuggugaagacccuugaucuuguc

SEQ ID NO: 292106 - RNA, 19 nt, Human
aagcuuucugugacaguuc

SEQ ID NO: 292107 - RNA, 32 nt, Human
aagcuuugagcagcaggauuagguguugcuuu

SEQ ID NO: 292108 - RNA, 32 nt, Human
aagcuuugaggugggaggggccauggagacug

SEQ ID NO: 292109 - RNA, 32 nt, Human
aagcuuugccugcuuacuuucugccauugggu

SEQ ID NO: 292110 - RNA, 32 nt, Human
aagcuuuggaguuuuccugugauuaguguuuu

SEQ ID NO: 292111 - RNA, 32 nt, Human
aagcuuuggaucugaaagagugguuccagccc

SEQ ID NO: 292112 - RNA, 32 nt, Human
aagcuuugggaaagcaguguauguggaaaagu

SEQ ID NO: 292113 - RNA, 32 nt, Human
aagcuuuguucugauuccucauggcccagcca

SEQ ID NO: 292114 - RNA, 32 nt, Human
aagcuuuuaaccaauccucauaccuuacuaua

SEQ ID NO: 292115 - RNA, 32 nt, Human
aagcuuuuaaccaauucucaaaccuuacuaaa

SEQ ID NO: 292116 - RNA, 32 nt, Human
aagcuuuuccaaaaucacaugccuucaucuca

SEQ ID NO: 292117 - RNA, 25 nt, Human
aagcuuuucggagaaaaaagacacu

SEQ ID NO: 292118 - RNA, 32 nt, Human
aagcuuuucucaugcuugugauuuggugacuc

SEQ ID NO: 292119 - RNA, 32 nt, Human
aagcuuuucuguucacccuccugccaggaaaa

SEQ ID NO: 292120 - RNA, 32 nt, Human
aagcuuuugccaguugaugggggaagaaagga

SEQ ID NO: 292121 - RNA, 32 nt, Human
aagcuuuuggaggucuuaaccaggacagcaca

SEQ ID NO: 292122 - RNA, 32 nt, Human
aagcuuuugggcauccuuccucggccuuucuu

SEQ ID NO: 292123 - RNA, 32 nt, Human
aagcuuuuucugauuuuuagaggaacagaaag

SEQ ID NO: 292124 - RNA, 32 nt, Human
aagcuuuuucuuucuuuucuuucuuucuuuuu

SEQ ID NO: 292125 - RNA, 32 nt, Human
aaggaaaaacaaaggagucaauggagcagaaa

SEQ ID NO: 292126 - RNA, 32 nt, Human
aaggaaaaaugagacacagguuuggggaccaa

SEQ ID NO: 292127 - RNA, 32 nt, Human
aaggaaaaaugcugcuucuccucccagcgugu

SEQ ID NO: 292128 - RNA, 32 nt, Human
aaggaaaaauguguguacagagacaggaaguc

SEQ ID NO: 292129 - RNA, 32 nt, Human
aaggaaaacacagcuccccagacuggaggcug

SEQ ID NO: 292130 - RNA, 32 nt, Human
aaggaaaacagcccgugaucuucuaccaauaa

SEQ ID NO: 292131 - RNA, 32 nt, Human
aaggaaaacagccggugaucuucuaccaauaa

SEQ ID NO: 292132 - RNA, 32 nt, Human
aaggaaaacugugaacuuucugcuucauguau

SEQ ID NO: 292133 - RNA, 32 nt, Human
aaggaaaagaagcagagcccagaagcagggcc

SEQ ID NO: 292134 - RNA, 32 nt, Human
aaggaaaagaggcgacagcggagcagcgugcg

SEQ ID NO: 292135 - RNA, 32 nt, Human
aaggaaaaggaaaugaaaugugaagaaacuca

SEQ ID NO: 292136 - RNA, 32 nt, Human
aaggaaaaggaggaggugucuggggugaggga

SEQ ID NO: 292137 - RNA, 32 nt, Human
aaggaaaaggcuguggcugcagcugcugcagc

SEQ ID NO: 292138 - RNA, 32 nt, Human
aaggaaaagguuuaagaaagaaaacaaaacca

SEQ ID NO: 292139 - RNA, 32 nt, Human
aaggaaaagugacgaagagagaggaggagggg

SEQ ID NO: 292140 - RNA, 32 nt, Human
aaggaaaauacugauagaggaugauguagaua

SEQ ID NO: 292141 - RNA, 32 nt, Human
aaggaaaaugggauaagucugggacacuguuu

SEQ ID NO: 292142 - RNA, 32 nt, Human
aaggaaaauuccauuuucuugggugagcauga

SEQ ID NO: 292143 - RNA, 32 nt, Human
aaggaaacacaaagucucaagugacagcaacc

SEQ ID NO: 292144 - RNA, 24 nt, Human
aaggaaacacaucugucauugucu

SEQ ID NO: 292145 - RNA, 32 nt, Human
aaggaaacaggcugugugguuaauauugagug

SEQ ID NO: 292146 - RNA, 32 nt, Human
aaggaaaccaguugaggaggaauugacucagg

SEQ ID NO: 292147 - RNA, 32 nt, Human
aaggaaacccaccccgacuccccauucuccua

SEQ ID NO: 292148 - RNA, 32 nt, Human
aaggaaacccucucuucguggggcacucugcc

SEQ ID NO: 292149 - RNA, 32 nt, Human
aaggaaaccuacaggaggaagaauggcugcag

SEQ ID NO: 292150 - RNA, 21 nt, Human
aaggaaaccucucuacugagu

SEQ ID NO: 292151 - RNA, 32 nt, Human
aaggaaacgagcuuucuguucuuucuggacac

SEQ ID NO: 292152 - RNA, 32 nt, Human
aaggaaacuauauuucuuacauugauggaaau

SEQ ID NO: 292153 - RNA, 32 nt, Human
aaggaaacuccaggacagcaccaccuccccua

SEQ ID NO: 292154 - RNA, 20 nt, Human
aaggaaacugcccagagcca

SEQ ID NO: 292155 - RNA, 23 nt, Human
aaggaaacuuccucgugacacgu

SEQ ID NO: 292156 - RNA, 24 nt, Human
aaggaaacuuuuaaucucugcagu

SEQ ID NO: 292157 - RNA, 32 nt, Human
aaggaaagaagagaggaaagaaaggagggaag

SEQ ID NO: 292158 - RNA, 32 nt, Human
aaggaaagagcugagccaaggaaaaucagcug

SEQ ID NO: 292159 - RNA, 31 nt, Human
aaggaaagagguuuguccucacuggaauaga

SEQ ID NO: 292160 - RNA, 32 nt, Human
aaggaaagcaccugggcuguguucacacaggc

SEQ ID NO: 292161 - RNA, 32 nt, Human
aaggaaagcaggagagagacugaguggcacau

SEQ ID NO: 292162 - RNA, 32 nt, Human
aaggaaagccaaaagaacacacagagccaaaa

SEQ ID NO: 292163 - RNA, 32 nt, Human
aaggaaagcuauaggcuacccauucagcuccc

SEQ ID NO: 292164 - RNA, 32 nt, Human
aaggaaagcuucacaaaagaucaaaggaaggg

SEQ ID NO: 292165 - RNA, 31 nt, Human
aaggaaaggaaacugccuuccccaugcaggu

SEQ ID NO: 292166 - RNA, 32 nt, Human
aaggaaaggaaaggaaaggccuggcaugggca

SEQ ID NO: 292167 - RNA, 21 nt, Human
aaggaaaggaggcacagccca

SEQ ID NO: 292168 - RNA, 32 nt, Human
aaggaaaggccuuuuggagugugucuuucugu

SEQ ID NO: 292169 - RNA, 32 nt, Human
aaggaaagguaacuuauuucucuucugcacag

SEQ ID NO: 292170 - RNA, 21 nt, Human
aaggaaauccuccuccaggga

SEQ ID NO: 292171 - RNA, 32 nt, Human
aaggaaaugaagucccagcugccgagagcaac

SEQ ID NO: 292172 - RNA, 32 nt, Human
aaggaaaugaggaaagaaauuagggccuccuc

SEQ ID NO: 292173 - RNA, 32 nt, Human
aaggaaauguucucaaggucucaggcuauuug

SEQ ID NO: 292174 - RNA, 32 nt, Human
aaggaaauugggcugauuuguacuggacaccg

SEQ ID NO: 292175 - RNA, 32 nt, Human
aaggaacaaacucuggacacacugccuuuaag

SEQ ID NO: 292176 - RNA, 32 nt, Human
aaggaacaaagaagggaaaagguauuuuuguu

SEQ ID NO: 292177 - RNA, 32 nt, Human
aaggaacaacagcaacaagaccaguaugauau

SEQ ID NO: 292178 - RNA, 32 nt, Human
aaggaacaagcccccagaaaagaaagggaaga

SEQ ID NO: 292179 - RNA, 31 nt, Human
aaggaacaaggugaggaaaaagagacugacc

SEQ ID NO: 292180 - RNA, 32 nt, Human
aaggaacaccacugcuuuucagcauuguacug

SEQ ID NO: 292181 - RNA, 32 nt, Human
aaggaacagcuguuugcugaagcaucaggugc

SEQ ID NO: 292182 - RNA, 32 nt, Human
aaggaacagggagcagagagacccaacuggga

SEQ ID NO: 292183 - RNA, 32 nt, Human
aaggaacaucgauuuggcaccgucuggucacu

SEQ ID NO: 292184 - RNA, 32 nt, Human
aaggaacaugcccagccugagaggagucaaga

SEQ ID NO: 292185 - RNA, 18 nt, Human
aaggaacauuguuuaacu

SEQ ID NO: 292186 - RNA, 32 nt, Human
aaggaaccaagcugacacaggccucacugcaa

SEQ ID NO: 292187 - RNA, 28 nt, Human
aaggaaccaagugcauuuuuaucuguga

SEQ ID NO: 292188 - RNA, 24 nt, Human
aaggaaccauuacauuuuguuuua

SEQ ID NO: 292189 - RNA, 32 nt, Human
aaggaacccaagaaauuccucucuuucucucu

SEQ ID NO: 292190 - RNA, 32 nt, Human
aaggaaccuacugucuaguuugagauauaauu

SEQ ID NO: 292191 - RNA, 32 nt, Human
aaggaacgaaugaaugacccuuuugccaggau

SEQ ID NO: 292192 - RNA, 32 nt, Human
aaggaacguaucaagcucucucaguguuucag

SEQ ID NO: 292193 - RNA, 32 nt, Human
aaggaacuaaaauuucaggaaaccuguuuaau

SEQ ID NO: 292194 - RNA, 32 nt, Human
aaggaacucuagaaguuucaaguggccaguga

SEQ ID NO: 292195 - RNA, 32 nt, Human
aaggaacugcauucugccaaaaaccuaaugaa

SEQ ID NO: 292196 - RNA, 18 nt, Human
aaggaacuggcaugcaca

SEQ ID NO: 292197 - RNA, 32 nt, Human
aaggaacuguacaaguguaaugaguguggcag

SEQ ID NO: 292198 - RNA, 32 nt, Human
aaggaacuuaugggcauauuacuggagcaucu

SEQ ID NO: 292199 - RNA, 32 nt, Human
aaggaacuuguaucuucuguuaacuccacugg

SEQ ID NO: 292200 - RNA, 32 nt, Human
aaggaacuuuuacacaguuugccuucagagac

SEQ ID NO: 292201 - RNA, 32 nt, Human
aaggaagaaaauaggagaaaaauaagugacca

SEQ ID NO: 292202 - RNA, 32 nt, Human
aaggaagaaagaaaagaaauaagaagagaagc

SEQ ID NO: 292203 - RNA, 32 nt, Human
aaggaagaagaagacgaaggaggaggacacac

SEQ ID NO: 292204 - RNA, 32 nt, Human
aaggaagaagacucaagauggaaagggagccg

SEQ ID NO: 292205 - RNA, 22 nt, Human
aaggaagaagcucacaggggac

SEQ ID NO: 292206 - RNA, 32 nt, Human
aaggaagaaggacaccaguaggagcuggauga

SEQ ID NO: 292207 - RNA, 32 nt, Human
aaggaagacaaaguuuaacaccuucacucaag

SEQ ID NO: 292208 - RNA, 32 nt, Human
aaggaagacaggaggaaguagaaaggaggaag

SEQ ID NO: 292209 - RNA, 32 nt, Human
aaggaagacccuccauccucugguauuaacgc

SEQ ID NO: 292210 - RNA, 32 nt, Human
aaggaagaccuccauagauccuucuccagaga

SEQ ID NO: 292211 - RNA, 32 nt, Human
aaggaagagaaagcccaugugugcacauacac

SEQ ID NO: 292212 - RNA, 17 nt, Human
aaggaagagaaggggag

SEQ ID NO: 292213 - RNA, 32 nt, Human
aaggaagagagggaggcgggcaagcaggcggg

SEQ ID NO: 292214 - RNA, 32 nt, Human
aaggaagagauuuagauucacugugaugaaaa

SEQ ID NO: 292215 - RNA, 16 nt, Human
aaggaagagcucaggg

SEQ ID NO: 292216 - RNA, 32 nt, Human
aaggaagaggaagaggaggagaggccggggac

SEQ ID NO: 292217 - RNA, 32 nt, Human
aaggaagaggaaggaaggaaauauuuugagaa

SEQ ID NO: 292218 - RNA, 32 nt, Human
aaggaagaggaccaguuuuuccccagcaccac

SEQ ID NO: 292219 - RNA, 32 nt, Human
aaggaagaggaugucugagcuggagaaggcca

SEQ ID NO: 292220 - RNA, 32 nt, Human
aaggaagaggcuggggaugcagcuaggugcug

SEQ ID NO: 292221 - RNA, 32 nt, Human
aaggaagagggaccuccagcuuccacaaacac

SEQ ID NO: 292222 - RNA, 32 nt, Human
aaggaagaggggcugcagacagaggaagaaag

SEQ ID NO: 292223 - RNA, 32 nt, Human
aaggaagagucucuagguaacaggagaauucg

SEQ ID NO: 292224 - RNA, 32 nt, Human
aaggaagagugggaggaggaggggaagcggcg

SEQ ID NO: 292225 - RNA, 32 nt, Human
aaggaagauggagauuggaagugagcaaaugu

SEQ ID NO: 292226 - RNA, 32 nt, Human
aaggaagauugugaauaaucccaaagcuucuu

SEQ ID NO: 292227 - RNA, 32 nt, Human
aaggaagcaacaacccggguuuucaaggcagu

SEQ ID NO: 292228 - RNA, 32 nt, Human
aaggaagcacgcugccugguguuugaaagcau

SEQ ID NO: 292229 - RNA, 32 nt, Human
aaggaagcagaagaccugggcuuuugucgaag

SEQ ID NO: 292230 - RNA, 32 nt, Human
aaggaagcagaggcugguugccagccaugugu

SEQ ID NO: 292231 - RNA, 32 nt, Human
aaggaagcagcauccuggacccuugaggcccu

SEQ ID NO: 292232 - RNA, 32 nt, Human
aaggaagcagcugggacagguggagaaggaag

SEQ ID NO: 292233 - RNA, 32 nt, Human
aaggaagcagggccuaggagacacgugaaaca

SEQ ID NO: 292234 - RNA, 32 nt, Human
aaggaagccaccaggugugcaggcugggaaga

SEQ ID NO: 292235 - RNA, 32 nt, Human
aaggaagccauggcugugguucagagagggug

SEQ ID NO: 292236 - RNA, 22 nt, Human
aaggaagcccccacccucugcc

SEQ ID NO: 292237 - RNA, 21 nt, Human
aaggaagcccuacuucuggga

SEQ ID NO: 292238 - RNA, 32 nt, Human
aaggaagccuaguuuccagaagccugacacag

SEQ ID NO: 292239 - RNA, 18 nt, Human
aaggaagcgccagaagcc

SEQ ID NO: 292240 - RNA, 32 nt, Human
aaggaagcggcaucacuuguuuuucauguccu

SEQ ID NO: 292241 - RNA, 32 nt, Human
aaggaagcggguucugguccagaagagcugga

SEQ ID NO: 292242 - RNA, 32 nt, Human
aaggaagcuccugggggcuugaggggguggca

SEQ ID NO: 292243 - RNA, 32 nt, Human
aaguccaggaguucaagaccagccuggguaac

SEQ ID NO: 292244 - RNA, 32 nt, Human
aaguccaggaguucgagaccagccugggcaac

SEQ ID NO: 292245 - RNA, 32 nt, Human
aaguccaggccacacaaccccaaaccaagguc

SEQ ID NO: 292246 - RNA, 32 nt, Human
aaguccagggcuagugugggggcuccggcggg

SEQ ID NO: 292247 - RNA, 24 nt, Human
aaguccaucuaaagugaccaggag

SEQ ID NO: 292248 - RNA, 32 nt, Human
aaguccaugugagaggcaacaaaaggaccggu

SEQ ID NO: 292249 - RNA, 32 nt, Human
aaguccauugugaggagggacagagcauauag

SEQ ID NO: 292250 - RNA, 32 nt, Human
aagucccacacccagaccccgcgagaagagau

SEQ ID NO: 292251 - RNA, 31 nt, Human
aagucccacagcuagaaaguagcagggcugg

SEQ ID NO: 292252 - RNA, 32 nt, Human
aagucccacccagucugcccugugccuauaua

SEQ ID NO: 292253 - RNA, 32 nt, Human
aagucccagcuacucaggaggcugaggcaaga

SEQ ID NO: 292254 - RNA, 32 nt, Human
aagucccagcuguuugggaggcugaggcagga

SEQ ID NO: 292255 - RNA, 32 nt, Human
aagucccaggacgguggaaacuagcuaguaga

SEQ ID NO: 292256 - RNA, 32 nt, Human
aagucccaggcagaggccaaggaugaggccug

SEQ ID NO: 292257 - RNA, 32 nt, Human
aaguccccagcacccaaugcacaaucuucccu

SEQ ID NO: 292258 - RNA, 32 nt, Human
aaguccccuccccauugcuccuucaagccaaa

SEQ ID NO: 292259 - RNA, 32 nt, Human
aaguccccugacagcucagcauguugucacac

SEQ ID NO: 292260 - RNA, 32 nt, Human
aaguccccugcucugugacucguuguuccuuu

SEQ ID NO: 292261 - RNA, 32 nt, Human
aagucccgccacugcacuccagccugggcaac

SEQ ID NO: 292262 - RNA, 32 nt, Human
aagucccucgugcacaggcagcucuugugccg

SEQ ID NO: 292263 - RNA, 32 nt, Human
aagucccucuccuggugcuccaagcaguuuga

SEQ ID NO: 292264 - RNA, 32 nt, Human
aagucccugcagguggaggccaugccugucuu

SEQ ID NO: 292265 - RNA, 32 nt, Human
aagucccuguuuuguuuacugccuccuguuca

SEQ ID NO: 292266 - RNA, 32 nt, Human
aagucccuucaaaugcagcccagguuucaccu

SEQ ID NO: 292267 - RNA, 32 nt, Human
aagucccuuccuauucuccugccaugggugca

SEQ ID NO: 292268 - RNA, 32 nt, Human
aaguccgacaacaccguguccaaaaagggcuu

SEQ ID NO: 292269 - RNA, 32 nt, Human
aaguccgccgcucugacccccggcagcaaguc

SEQ ID NO: 292270 - RNA, 32 nt, Human
aaguccuaaaaauuaguuuauccagaguuuau

SEQ ID NO: 292271 - RNA, 32 nt, Human
aaguccuagcaacccuaggagucagggaguca

SEQ ID NO: 292272 - RNA, 24 nt, Human
aaguccuaggagcacacaaagcaa

SEQ ID NO: 292273 - RNA, 24 nt, Human
aaguccuaggauuauaggcaugag

SEQ ID NO: 292274 - RNA, 32 nt, Human
aaguccucaccaggaucuacauuuccucgucg

SEQ ID NO: 292275 - RNA, 32 nt, Human
aaguccucauaucuaggaaagacacagaaacu

SEQ ID NO: 292276 - RNA, 32 nt, Human
aaguccuccaauuccagcauauccagugaguu

SEQ ID NO: 292277 - RNA, 32 nt, Human
aaguccucccaccuugaagagacaggcucuga

SEQ ID NO: 292278 - RNA, 32 nt, Human
aaguccucgcugcccucucuucucaccugcua

SEQ ID NO: 292279 - RNA, 32 nt, Human
aaguccucggauuacaggcaugagccaccaca

SEQ ID NO: 292280 - RNA, 32 nt, Human
aaguccucuacccccucacuuuuauggcccuu

SEQ ID NO: 292281 - RNA, 32 nt, Human
aaguccucucacuccuccagccuggaauguga

SEQ ID NO: 292282 - RNA, 32 nt, Human
aaguccucucuagcugcagaagccugagcuuc

SEQ ID NO: 292283 - RNA, 32 nt, Human
aaguccugaccccagugcacagacauagaggc

SEQ ID NO: 292284 - RNA, 32 nt, Human
aaguccugagccaccaugcugaccccgauggu

SEQ ID NO: 292285 - RNA, 32 nt, Human
aaguccugcaaagaaaaacagagcugggcaag

SEQ ID NO: 292286 - RNA, 32 nt, Human
aaguccugcaacacagguaucacugcacauuu

SEQ ID NO: 292287 - RNA, 32 nt, Human
aaguccugcaagcagagguggugauuuguuaa

SEQ ID NO: 292288 - RNA, 32 nt, Human
aaguccugcacuggagccugugcaguggcgcc

SEQ ID NO: 292289 - RNA, 32 nt, Human
aaguccugccaagugguuucuaugagcaucuc

SEQ ID NO: 292290 - RNA, 32 nt, Human
aaguccuggacuuuuaaaugaccaugaaguua

SEQ ID NO: 292291 - RNA, 32 nt, Human
aaguccugggagagaagugggugcgguccgcu

SEQ ID NO: 292292 - RNA, 32 nt, Human
aaguccugggauuacaggcgugagccacugug

SEQ ID NO: 292293 - RNA, 23 nt, Human
aaguccugggauuacaggcugag

SEQ ID NO: 292294 - RNA, 32 nt, Human
aaguccugggauuacaggcugagccaccgcga

SEQ ID NO: 292295 - RNA, 24 nt, Human
aaguccugggauuacaggugugag

SEQ ID NO: 292296 - RNA, 32 nt, Human
aaguccugggauuacaggugugagccaccaca

SEQ ID NO: 292297 - RNA, 32 nt, Human
aaguccugugacucccagcuuaacugaaauac

SEQ ID NO: 292298 - RNA, 32 nt, Human
aaguccugugugugugcccgaugccuguguug

SEQ ID NO: 292299 - RNA, 32 nt, Human
aaguccuucaccucacugaaaacaucuggaag

SEQ ID NO: 292300 - RNA, 32 nt, Human
aaguccuucuggcugcgguuaaaagggcucac

SEQ ID NO: 292301 - RNA, 32 nt, Human
aaguccuuggcugcugaguggugacaguagcc

SEQ ID NO: 292302 - RNA, 32 nt, Human
aaguccuuggcugggcagucacacaacaggca

SEQ ID NO: 292303 - RNA, 32 nt, Human
aaguccuugggcccaguugggagcucauaucu

SEQ ID NO: 292304 - RNA, 32 nt, Human
aaguccuuugucacuucucuugccuuagugug

SEQ ID NO: 292305 - RNA, 32 nt, Human
aaguccuuuuacaaucagugugucuccugaac

SEQ ID NO: 292306 - RNA, 32 nt, Human
aaguccuuuuccaacugggugugcaugcuaaa

SEQ ID NO: 292307 - RNA, 32 nt, Human
aagucgaauuccagcucgccuuguugacucgc

SEQ ID NO: 292308 - RNA, 32 nt, Human
aagucgagcuuggaggccagccuggaucuguc

SEQ ID NO: 292309 - RNA, 32 nt, Human
aagucgaggguccagccucuucugccaggaag

SEQ ID NO: 292310 - RNA, 32 nt, Human
aagucgcauaucuccccucugaggcuggaucc

SEQ ID NO: 292311 - RNA, 32 nt, Human
aagucgccauuuggaaaggcgaauaacguggc

SEQ ID NO: 292312 - RNA, 32 nt, Human
aagucgccccuccaaaacacgcccccauccca

SEQ ID NO: 292313 - RNA, 32 nt, Human
aagucgcgaaagugggccagagguucugcgac

SEQ ID NO: 292314 - RNA, 32 nt, Human
aagucgcucucaugccuugcuguccccucccc

SEQ ID NO: 292315 - RNA, 32 nt, Human
aagucggaggcaggggcuagggguggaggcca

SEQ ID NO: 292316 - RNA, 32 nt, Human
aagucggcucaacgcaaccuccgccucccagg

SEQ ID NO: 292317 - RNA, 32 nt, Human
aagucgggaugacagcagggacuucuggccag

SEQ ID NO: 292318 - RNA, 32 nt, Human
aagucggggcugggcagugagaagagugugac

SEQ ID NO: 292319 - RNA, 32 nt, Human
aagucggugagagcaaaaaugggucuaguaaa

SEQ ID NO: 292320 - RNA, 32 nt, Human
aagucgugcuggcuaauuuuuaguuuguauuc

SEQ ID NO: 292321 - RNA, 32 nt, Human
aagucuaaacauuuagggcacuuuaaaggaga

SEQ ID NO: 292322 - RNA, 32 nt, Human
aagucuaacacaugaggauacagaauugauuc

SEQ ID NO: 292323 - RNA, 32 nt, Human
aagucuaacacauucuuuaugacugugagcau

SEQ ID NO: 292324 - RNA, 32 nt, Human
aagucuaaccaucauaaagacacugccugucu

SEQ ID NO: 292325 - RNA, 32 nt, Human
aagucuaccccaccaccuccucaggaaacugc

SEQ ID NO: 292326 - RNA, 32 nt, Human
aagucuagacuuugagccagguacaguaagaa

SEQ ID NO: 292327 - RNA, 32 nt, Human
aagucuaggaaaaagguuugcagauggaccuu

SEQ ID NO: 292328 - RNA, 32 nt, Human
aagucuauaagccuggagagaccaucagcagu

SEQ ID NO: 292329 - RNA, 32 nt, Human
aagucuauuggucagcuuaucucagaagauuu

SEQ ID NO: 292330 - RNA, 32 nt, Human
aagucucaaguucauggcuuucugaauuuuga

SEQ ID NO: 292331 - RNA, 32 nt, Human
aagucucaaucgcccuuuuucuuccaaauggu

SEQ ID NO: 292332 - RNA, 32 nt, Human
aagucucacugcacucaggcuggagugcagug

SEQ ID NO: 292333 - RNA, 32 nt, Human
aagucucacuguguugcccagccuggguguca

SEQ ID NO: 292334 - RNA, 32 nt, Human
aagucucaggguauaugaaaguagcuggcuuc

SEQ ID NO: 292335 - RNA, 32 nt, Human
aagucucaggguggcugggugagcgcucauca

SEQ ID NO: 292336 - RNA, 32 nt, Human
aagucucaugcaccuggauuaacucagaaaaa

SEQ ID NO: 292337 - RNA, 32 nt, Human
aagucucaugcccuccugcucucccaugaggg

SEQ ID NO: 292338 - RNA, 32 nt, Human
aagucucaugcugaaguauaguuuuugggaaa

SEQ ID NO: 292339 - RNA, 32 nt, Human
aagucucaugugaacccagcaggcuuggaacc

SEQ ID NO: 292340 - RNA, 32 nt, Human
aagucuccaaaucagacagcugccucagcccc

SEQ ID NO: 292341 - RNA, 32 nt, Human
aagucuccaaggcccuagucugggcaaggcca

SEQ ID NO: 292342 - RNA, 32 nt, Human
aagucuccagucuggggcaggcgggagugggc

SEQ ID NO: 292343 - RNA, 32 nt, Human
aagucucccacuucggcagccaugaagcccac

SEQ ID NO: 292344 - RNA, 32 nt, Human
aagucuccccuuugaagacuuugaggccacag

SEQ ID NO: 292345 - RNA, 32 nt, Human
aagucucccucuuguuacccaggcuggagugc

SEQ ID NO: 292346 - RNA, 32 nt, Human
aagucuccuaaccuuccugggucuguuuucuu

SEQ ID NO: 292347 - RNA, 32 nt, Human
aagucucuacagcuaggacccuccuguccuga

SEQ ID NO: 292348 - RNA, 32 nt, Human
aagucucuccacugaucugucuuccaguccuc

SEQ ID NO: 292349 - RNA, 32 nt, Human
aagucucucuuccuccuucucaccccuggccu

SEQ ID NO: 292350 - RNA, 32 nt, Human
aagucucugaccugguccccucaggcccagcu

SEQ ID NO: 292351 - RNA, 32 nt, Human
aagucucugagguuccaccaaaauauggaacu

SEQ ID NO: 292352 - RNA, 32 nt, Human
aagucucugauuugaaggauuaguauccuuuc

SEQ ID NO: 292353 - RNA, 32 nt, Human
aagucucuuaugaaacagagaagaguuguuga

SEQ ID NO: 292354 - RNA, 32 nt, Human
aagucucuucccagccuuccucacaggcuucu

SEQ ID NO: 292355 - RNA, 32 nt, Human
aagucugaaggguuggccuagagccaguccag

SEQ ID NO: 292356 - RNA, 32 nt, Human
aagucugaagugaggagugagguccagaagca

SEQ ID NO: 292357 - RNA, 32 nt, Human
aagucugaauuugugaaaauuuccuuggguga

SEQ ID NO: 292358 - RNA, 32 nt, Human
aagucugaccaacauggagaaacccugucucu

SEQ ID NO: 292359 - RNA, 32 nt, Human
aagucugacuccaacaucuguguuccuaaaua

SEQ ID NO: 292360 - RNA, 32 nt, Human
aagucugaguggaugcugguauucuccucuuu

SEQ ID NO: 292361 - RNA, 22 nt, Human
aagucugauagcgucucugcac

SEQ ID NO: 292362 - RNA, 32 nt, Human
aagucugauucucuuuaacugugugaccagcg

SEQ ID NO: 292363 - RNA, 32 nt, Human
aagucugcagugagcuaugauugcaccacugc

SEQ ID NO: 292364 - RNA, 32 nt, Human
aagucugcagugagcuaugguaacaccacugc

SEQ ID NO: 292365 - RNA, 32 nt, Human
aagucugcauuacauuccuugauaauguugug

SEQ ID NO: 292366 - RNA, 32 nt, Human
aagucugccuuucccucuacuuucaccucuuu

SEQ ID NO: 292367 - RNA, 32 nt, Human
aagucuggaaagucaucugccuuuaauaacug

SEQ ID NO: 292368 - RNA, 32 nt, Human
aagucuggagugagcaaacaagagcaagaaac

SEQ ID NO: 292369 - RNA, 32 nt, Human
aagucuggcaggaagaggcaggaagggagaga

SEQ ID NO: 292370 - RNA, 32 nt, Human
aagucugggagguugaggcugcagugagcugu

SEQ ID NO: 292371 - RNA, 32 nt, Human
aagucugggguuccuuuccuuuccugcuucca

SEQ ID NO: 292372 - RNA, 32 nt, Human
aagucugguaggucacacagaggaccaagccc

SEQ ID NO: 292373 - RNA, 32 nt, Human
aagucugucccgcuuccaccaacauccagaau

SEQ ID NO: 292374 - RNA, 32 nt, Human
aagucuguuuugaagaaggaaaaagaaauacu

SEQ ID NO: 292375 - RNA, 31 nt, Human
aagucuuaggacuucuuugcagacaacugac

SEQ ID NO: 292376 - RNA, 32 nt, Human
aagucuuaguaaaaugugaaccuuuaaauaua

SEQ ID NO: 292377 - RNA, 32 nt, Human
aagucuucauggauguucugcaugucaugcgg

SEQ ID NO: 292378 - RNA, 32 nt, Human
aagucuucauggauguucugcaugucaugggg

SEQ ID NO: 292379 - RNA, 32 nt, Human
aagucuuccagaggaugcuugauuccaguggu

SEQ ID NO: 292380 - RNA, 32 nt, Human
aagucuucccccaaggagcagaagaaagaaug

SEQ ID NO: 292381 - RNA, 21 nt, Human
aagucuuccuacccucugcac

SEQ ID NO: 292382 - RNA, 32 nt, Human
aagucuuccuccucuucgagaccauguuauug

SEQ ID NO: 292383 - RNA, 32 nt, Human
aagucuucugaacaaggcagaccauccaaacg

SEQ ID NO: 292384 - RNA, 32 nt, Human
aagucuugaccccgcugccucagccucccaaa

SEQ ID NO: 292385 - RNA, 21 nt, Human
aagucuugacucccuacuucc

SEQ ID NO: 292386 - RNA, 32 nt, Human
aagucuugacucugugcuuucugcuuagagug

SEQ ID NO: 292387 - RNA, 32 nt, Human
aagucuugaucaaaugacauuuugacauugga

SEQ ID NO: 292388 - RNA, 32 nt, Human
aagucuugaugaaacaagauagcuguuuccaa

SEQ ID NO: 292389 - RNA, 20 nt, Human
aagucuugcaauaggcugca

SEQ ID NO: 292390 - RNA, 32 nt, Human
aagucuugcagucugcaggacaccgaggaauc

SEQ ID NO: 292391 - RNA, 32 nt, Human
aagucuugccaugcccuuuggccaaaggcaac

SEQ ID NO: 292392 - RNA, 32 nt, Human
aagucuugcugauuuucagacagggaagucuc

SEQ ID NO: 292393 - RNA, 32 nt, Human
aagucuuggcugcuuuuguuacuauacauuuu

SEQ ID NO: 292394 - RNA, 32 nt, Human
aagucuugggcugggugcaguggcucaugccu

SEQ ID NO: 292395 - RNA, 19 nt, Human
aagucuugguuuuaucuua

SEQ ID NO: 292396 - RNA, 32 nt, Human
aagucuuguacuuucuaugccucccagggagc

SEQ ID NO: 292397 - RNA, 32 nt, Human
aagucuuguugugugcucuuccuuccaggccc

SEQ ID NO: 292398 - RNA, 32 nt, Human
aagucuuuaaggcguacaaaguagaaucagua

SEQ ID NO: 292399 - RNA, 32 nt, Human
aagucuuucaguuacuuuggagugcagaacca

SEQ ID NO: 292400 - RNA, 32 nt, Human
aagucuuucccaagccauucuuugucugagca

SEQ ID NO: 292401 - RNA, 23 nt, Human
aagucuuuccuaucuucauugca

SEQ ID NO: 292402 - RNA, 32 nt, Human
aagucuuucucaucccuugggaagugcaaauu

SEQ ID NO: 292403 - RNA, 32 nt, Human
aagucuuuggaaacucuuguuuacuuaugagc

SEQ ID NO: 292404 - RNA, 20 nt, Human
aagucuuuggcauucacuug

SEQ ID NO: 292405 - RNA, 32 nt, Human
aagucuuuugugaacaaggcauuuguagccau

SEQ ID NO: 292406 - RNA, 32 nt, Human
aagugaaaaagcugcaucaagacccauuuggc

SEQ ID NO: 292407 - RNA, 32 nt, Human
aagugaaaaaggagagagacccuugaccacug

SEQ ID NO: 292408 - RNA, 32 nt, Human
aagugaaaagagccuuaacugaugacauucca

SEQ ID NO: 292409 - RNA, 32 nt, Human
aagugaaaagggccgguuccugccuuaacuga

SEQ ID NO: 292410 - RNA, 19 nt, Human
aagugaaaaguguaucccu

SEQ ID NO: 292411 - RNA, 32 nt, Human
aagugaaaaucugagaaagaguuaauugcaau

SEQ ID NO: 292412 - RNA, 32 nt, Human
aagugaaacccgccaccggguuaccccacaag

SEQ ID NO: 292413 - RNA, 32 nt, Human
aagugaaaggaaaaugaggggagaauucucau

SEQ ID NO: 292414 - RNA, 32 nt, Human
aagugaaaucagcagagccucuggguggaugu

SEQ ID NO: 292415 - RNA, 17 nt, Human
aagugaaaugagguucc

SEQ ID NO: 292416 - RNA, 32 nt, Human
aagugaacaaaggucucugauuuuccuaggca

SEQ ID NO: 292417 - RNA, 32 nt, Human
aagugaacaaaggucucugguuuuccuagcca

SEQ ID NO: 292418 - RNA, 32 nt, Human
aagugaacaaaggucucugguuuuccuaggca

SEQ ID NO: 292419 - RNA, 32 nt, Human
aagugaacaaaggucucugguuuuccuaggua

SEQ ID NO: 292420 - RNA, 32 nt, Human
aagugaacaaaggucucugguuuuccuaugca

SEQ ID NO: 292421 - RNA, 32 nt, Human
aagugaacaaauuggucaugacaaggggaccc

SEQ ID NO: 292422 - RNA, 32 nt, Human
aagugaacagcauuuguuggaaggugauggcu

SEQ ID NO: 292423 - RNA, 32 nt, Human
aagugaacgagcuucaggccuuugugaagaug

SEQ ID NO: 292424 - RNA, 32 nt, Human
aagugaacgagggugaggacuggagagcacca

SEQ ID NO: 292425 - RNA, 32 nt, Human
aagugaacuguuuccuguauaaaguucucauc

SEQ ID NO: 292426 - RNA, 22 nt, Human
aagugaacuuaacugagaucca

SEQ ID NO: 292427 - RNA, 31 nt, Human
aagugaagaaagagagaaaacugagugcaaa

SEQ ID NO: 292428 - RNA, 32 nt, Human
aagugaagaggaccuugugguagcagggacca

SEQ ID NO: 292429 - RNA, 32 nt, Human
aagugaagaggaggagaaagagucaaccaagg

SEQ ID NO: 292430 - RNA, 32 nt, Human
aagugaagcagugucucacagggucauuacag

SEQ ID NO: 292431 - RNA, 32 nt, Human
aagugaagcaugaagggaaucauaggaaaaau

SEQ ID NO: 292432 - RNA, 32 nt, Human
aagugaagccagcagaggagugauagcugcuc

SEQ ID NO: 292433 - RNA, 32 nt, Human
aagugaaggagaaagcagcugccucaccgccc

SEQ ID NO: 292434 - RNA, 32 nt, Human
aagugaaggccagacagacaaggacaaggagc

SEQ ID NO: 292435 - RNA, 32 nt, Human
aagugaaggucugagggacgggcccuggggcu

SEQ ID NO: 292436 - RNA, 32 nt, Human
aagugaaguaaagcccaaguguucuuuagcuu

SEQ ID NO: 292437 - RNA, 32 nt, Human
aagugaaguuaggaaauccuugaagaaaauca

SEQ ID NO: 292438 - RNA, 32 nt, Human
aagugaauauuuucccuucucccuuuacccuu

SEQ ID NO: 292439 - RNA, 31 nt, Human
aagugaaucucauaaggaaaagacugcuaaa

SEQ ID NO: 292440 - RNA, 32 nt, Human
aagugaaugccuuuagggguagcucugaaaga

SEQ ID NO: 292441 - RNA, 22 nt, Human
aagugaauguaagucugugccu

SEQ ID NO: 292442 - RNA, 32 nt, Human
aagugaauuaaauuuggaccuuauguuuuacu

SEQ ID NO: 292443 - RNA, 20 nt, Human
aagugaauuucgauguucca

SEQ ID NO: 292444 - RNA, 32 nt, Human
aagugaauuuucugagggugaugaaaguguug

SEQ ID NO: 292445 - RNA, 32 nt, Human
aagugacaaggcagaauucuuuaaaucaguaa

SEQ ID NO: 292446 - RNA, 32 nt, Human
aagugacaagggcagagaugauccaggacaac

SEQ ID NO: 292447 - RNA, 32 nt, Human
aagugacacauuaaugauaaacucagaucuga

SEQ ID NO: 292448 - RNA, 32 nt, Human
aagugacacuauguaggaauccuuccaaggaa

SEQ ID NO: 292449 - RNA, 32 nt, Human
aagugacagcaaagaagguggugaagguuuca

SEQ ID NO: 292450 - RNA, 32 nt, Human
aagugacagcauauccugaugugugugauggu

SEQ ID NO: 292451 - RNA, 32 nt, Human
aagugacagccaggaagagaccugaagguugg

SEQ ID NO: 292452 - RNA, 32 nt, Human
aagugacagcuuuucuuuaucugcuuuucuga

SEQ ID NO: 292453 - RNA, 32 nt, Human
aagugacaggaaauggagcuggggagacaaaa

SEQ ID NO: 292454 - RNA, 32 nt, Human
aagugacauccugucacuucugcucucacacu

SEQ ID NO: 292455 - RNA, 32 nt, Human
aagugacauuaugccaguuucuguucucucac

SEQ ID NO: 292456 - RNA, 32 nt, Human
aagugaccagaagauuguacuuccuagagaug

SEQ ID NO: 292457 - RNA, 32 nt, Human
aagugacccagcccuggcuguaggacagccau

SEQ ID NO: 292458 - RNA, 32 nt, Human
aagugacccuccugcaucagcuucccaaguag

SEQ ID NO: 292459 - RNA, 32 nt, Human
aagugaccuucagggucaucaggcugucccag

SEQ ID NO: 292460 - RNA, 32 nt, Human
aagugaccuugggagagguaagaugguguuuc

SEQ ID NO: 292461 - RNA, 32 nt, Human
aagugacgcucagacaugacugagaugucuug

SEQ ID NO: 292462 - RNA, 32 nt, Human
aagugacucaacaaagagccaaaguggagaga

SEQ ID NO: 292463 - RNA, 32 nt, Human
aagugacucagcacccugccucagcuucagca

SEQ ID NO: 292464 - RNA, 32 nt, Human
aagugacucagccaggcagacaugagacaugg

SEQ ID NO: 292465 - RNA, 32 nt, Human
aagugacuccuggggcccugagcccacaacag

SEQ ID NO: 292466 - RNA, 32 nt, Human
aagugacuggugucucgugugacagauugcuu

SEQ ID NO: 292467 - RNA, 32 nt, Human
aagugacuucucagaggggaaaagccaagcuc

SEQ ID NO: 292468 - RNA, 32 nt, Human
aagugacuugcugagcaaacccugccgagaag

SEQ ID NO: 292469 - RNA, 32 nt, Human
aagugagaacacuguauuccuacaauguacac

SEQ ID NO: 292470 - RNA, 32 nt, Human
aagugagaaucagcuauugauaauggccagag

SEQ ID NO: 292471 - RNA, 32 nt, Human
aagugagacagagacuugacuugauccucuga

SEQ ID NO: 292472 - RNA, 32 nt, Human
aagugagacaguguuuuugaaaauauguauuu

SEQ ID NO: 292473 - RNA, 32 nt, Human
aagugagacauacaagauuacucuacaagagg

SEQ ID NO: 292474 - RNA, 32 nt, Human
aagugagaccgaguagggggaacgagugguga

SEQ ID NO: 292475 - RNA, 32 nt, Human
aagugagacuccacccuccccaccuggcucau

SEQ ID NO: 292476 - RNA, 20 nt, Human
aagugagagaagcuguuggg

SEQ ID NO: 292477 - RNA, 32 nt, Human
aagugagagagacaaugucacacuucaaggag

SEQ ID NO: 292478 - RNA, 32 nt, Human
aagugagaggagacauuaagauuuucauucuu

SEQ ID NO: 292479 - RNA, 32 nt, Human
aagugagaggggagggagggaaguccugggag

SEQ ID NO: 292480 - RNA, 32 nt, Human
aagugagauccaggagaaguaaggcccuggag

SEQ ID NO: 292481 - RNA, 32 nt, Human
aagugagauugaagagaaugaaaacaaauuug

SEQ ID NO: 292482 - RNA, 32 nt, Human
aagugagcaaaaguuggucagcuuggcuaugg

SEQ ID NO: 292483 - RNA, 32 nt, Human
aagugagcaggacuguucuucccacugcaauc

SEQ ID NO: 292484 - RNA, 32 nt, Human
aagugagcaguguuggagugaggaccuguaag

SEQ ID NO: 292485 - RNA, 32 nt, Human
aagugagccaucugcuggucaggaaguccucc

SEQ ID NO: 292486 - RNA, 32 nt, Human
aagugagcccaggaguucaaggcugcaaugag

SEQ ID NO: 292487 - RNA, 32 nt, Human
aagugagcccaggaguucagggccagcuuuga

SEQ ID NO: 292488 - RNA, 32 nt, Human
aagugagccccagcuggacucauggaugugca

SEQ ID NO: 292489 - RNA, 32 nt, Human
aagugagccggggugagguggggaggaggaca

SEQ ID NO: 292490 - RNA, 32 nt, Human
aagugagcgcaagagguugaggcuccagugag

SEQ ID NO: 292491 - RNA, 32 nt, Human
aagugagcuaaguugggguggggugaguccaa

SEQ ID NO: 292492 - RNA, 32 nt, Human
aagugagcucaccuaccugccaccgcccagga

SEQ ID NO: 292493 - RNA, 32 nt, Human
aagugagcuggcuucauccucagaccuuuauu

SEQ ID NO: 292494 - RNA, 30 nt, Human
aagugaggaagccagguccacggucuguuc

SEQ ID NO: 292495 - RNA, 32 nt, Human
aagugaggcccuuagcccuggaagucaauagg

SEQ ID NO: 292496 - RNA, 32 nt, Human
aagugaggccggagaggaguucaggaacccuu

SEQ ID NO: 292497 - RNA, 32 nt, Human
aagugaggcugcugccccaguuucauggaugc

SEQ ID NO: 292498 - RNA, 32 nt, Human
aagugagggaggagacaggcccaaggcggagg

SEQ ID NO: 292499 - RNA, 32 nt, Human
aagugagggcucacucagccacccugaguugc

SEQ ID NO: 292500 - RNA, 32 nt, Human
aagugaggggagaagguuccccagggacagag

SEQ ID NO: 292501 - RNA, 32 nt, Human
aagugagguuacugguguguuggauguuuaau

SEQ ID NO: 292502 - RNA, 32 nt, Human
aagugaguccuccccacucugggcuugugcac

SEQ ID NO: 292503 - RNA, 32 nt, Human
aagugagucuccucucagauccugggccuugu

SEQ ID NO: 292504 - RNA, 32 nt, Human
aagugagucucggcuggagugcaguggugcag

SEQ ID NO: 292505 - RNA, 32 nt, Human
aagugagugacagccucacagccucaggccca

SEQ ID NO: 292506 - RNA, 32 nt, Human
aagugagugaggaggaggaggaggagaaggag

SEQ ID NO: 292507 - RNA, 32 nt, Human
aagugagugccuacagaaauuucuuggauucu

SEQ ID NO: 292508 - RNA, 32 nt, Human
aagugagugucugcaccugaggcccucugugg

SEQ ID NO: 292509 - RNA, 32 nt, Human
aagugauaaccagggucacggauuccaaacau

SEQ ID NO: 292510 - RNA, 20 nt, Human
aagugauaugaacugugaua

SEQ ID NO: 292511 - RNA, 32 nt, Human
aagugauauuuaaaaauauacacacauguaug

SEQ ID NO: 292512 - RNA, 32 nt, Human
aagugaucaaaugccagugucauuuuguacuu

SEQ ID NO: 292513 - RNA, 32 nt, Human
aagugaucacaaaagaaaucuucugagccgga

SEQ ID NO: 292514 - RNA, 32 nt, Human
aagugaucagcacagcugcuuccaaauaggag

SEQ ID NO: 292515 - RNA, 32 nt, Human
aagugauccaccagccuccaccucccgacgug

SEQ ID NO: 292516 - RNA, 32 nt, Human
aagugauccacccaucuccaccucccaaagug

SEQ ID NO: 292517 - RNA, 32 nt, Human
aagugauccucccaccucagccuaccaaguag

SEQ ID NO: 292518 - RNA, 32 nt, Human
aagugauccucccacuucaccuuccugagcag

SEQ ID NO: 292519 - RNA, 32 nt, Human
aagugauccuccugccacagccucccaaguag

SEQ ID NO: 292520 - RNA, 32 nt, Human
aagugauccuccugccccagcauuccaaagug

SEQ ID NO: 292521 - RNA, 32 nt, Human
aagugauccuccugccucagcaucccaaacuc

SEQ ID NO: 292522 - RNA, 32 nt, Human
aagugauccuccugccucagcuucccaaguag

SEQ ID NO: 292523 - RNA, 32 nt, Human
aagugauccuccugccugggccugccaaagug

SEQ ID NO: 292524 - RNA, 32 nt, Human
aagugauccuccugccuuagcuuccaagaaug

SEQ ID NO: 292525 - RNA, 32 nt, Human
aagugauccuccugcuuggaccucccaaagcg

SEQ ID NO: 292526 - RNA, 32 nt, Human
aagugauccuuccacuucagccucccaaguag

SEQ ID NO: 292527 - RNA, 32 nt, Human
aagugaucucuaggccccagccccaaauccgc

SEQ ID NO: 292528 - RNA, 32 nt, Human
aagugaucuuggagaugggugggcaggugauu

SEQ ID NO: 292529 - RNA, 32 nt, Human
aagugaugaccuuacaccacaaccagcuucuc

SEQ ID NO: 292530 - RNA, 32 nt, Human
aagugaugacucuaaucagccuaucucagcgu

SEQ ID NO: 292531 - RNA, 24 nt, Human
aagugaugagauuauaggcgugag

SEQ ID NO: 292532 - RNA, 32 nt, Human
aagugaugagauuauaggcgugagccaccgcg

SEQ ID NO: 292533 - RNA, 32 nt, Human
aagugaugagugcgggaguccugaggagaugu

SEQ ID NO: 292534 - RNA, 32 nt, Human
aagugaugcuuccaggauuuguuuucagaaac

SEQ ID NO: 292535 - RNA, 32 nt, Human
aagugaugcuuccccuggggcaguuuuacaau

SEQ ID NO: 292536 - RNA, 32 nt, Human
aagugauggaaugacuucugcaacuguagucc

SEQ ID NO: 292537 - RNA, 23 nt, Human
aagugauggaauuacagguguga

SEQ ID NO: 292538 - RNA, 31 nt, Human
aagugauggacaauagcucagaccaacaguc

SEQ ID NO: 292539 - RNA, 32 nt, Human
aagugauggauuaggguucuccagagaaacag

SEQ ID NO: 292540 - RNA, 24 nt, Human
aagugaugggauuacagaugugag

SEQ ID NO: 292541 - RNA, 32 nt, Human
aagugaugggauuacagaugugagccaccgug

SEQ ID NO: 292542 - RNA, 24 nt, Human
aagugaugggauuacaggcaugag

SEQ ID NO: 292543 - RNA, 32 nt, Human
aagugaugggauuacaggcaugagccaccgug

SEQ ID NO: 292544 - RNA, 32 nt, Human
aagugaugggauuacaggcgugagccaccgcg

SEQ ID NO: 292545 - RNA, 24 nt, Human
aagugaugggauuauaggcgugag

SEQ ID NO: 292546 - RNA, 24 nt, Human
aagugaugggcuggguuuccaccu

SEQ ID NO: 292547 - RNA, 32 nt, Human
aagugauguggaauuaaugggugcaacagcug

SEQ ID NO: 292548 - RNA, 32 nt, Human
aagugauguggacauaggaggcaaugugugag

SEQ ID NO: 292549 - RNA, 32 nt, Human
aagugauuaaaguaugcacaaccaaaggcagg

SEQ ID NO: 292550 - RNA, 32 nt, Human
aagugauucuccugccucagccuaccaaguag

SEQ ID NO: 292551 - RNA, 32 nt, Human
aagugauucuucucccuggcaaggcucuuccu

SEQ ID NO: 292552 - RNA, 18 nt, Human
aagugauucuucuugccu

SEQ ID NO: 292553 - RNA, 32 nt, Human
aagugcaacauucacucgcuguuuucauucuu

SEQ ID NO: 292554 - RNA, 32 nt, Human
aagugcaagaauugguugcuggugcuacaugg

SEQ ID NO: 292555 - RNA, 24 nt, Human
aagugcaauauuguauauuuuuaa

SEQ ID NO: 292556 - RNA, 32 nt, Human
aagugcaauauuuuagccaaugccuugggaga

SEQ ID NO: 292557 - RNA, 32 nt, Human
aagugcaaugagcagagggugugugacagagg

SEQ ID NO: 292558 - RNA, 32 nt, Human
aagugcacaggcauuuucaugcugaggauaaa

SEQ ID NO: 292559 - RNA, 32 nt, Human
aagugcaccgaggcacgcucugccccguguuu

SEQ ID NO: 292560 - RNA, 32 nt, Human
aagugcaccuuuuaacacuccuuuguccuugg

SEQ ID NO: 292561 - RNA, 32 nt, Human
aagugcacuacccuggagagugguggccacuc

SEQ ID NO: 292562 - RNA, 32 nt, Human
aagugcacuaugaagauuguucaccuuugcug

SEQ ID NO: 292563 - RNA, 32 nt, Human
aagugcacugcccggccaagccccagccucag

SEQ ID NO: 292564 - RNA, 32 nt, Human
aagugcagaaauuggcugggcaugguggugcg

SEQ ID NO: 292565 - RNA, 32 nt, Human
aagugcagagugggagacagagccggggucac

SEQ ID NO: 292566 - RNA, 32 nt, Human
aagugcagccugaugcaauuagcugagcgcag

SEQ ID NO: 292567 - RNA, 19 nt, Human
aagugcagggauuacaggc

SEQ ID NO: 292568 - RNA, 24 nt, Human
aagugcagggauuacaggcaugag

SEQ ID NO: 292569 - RNA, 32 nt, Human
aagugcagggauuacaggcaugagccaccaug

SEQ ID NO: 292570 - RNA, 32 nt, Human
aagugcaguauuuuucuacaucaugucgagaa

SEQ ID NO: 292571 - RNA, 32 nt, Human
aagugcaguucugugaucugggucucuaaucu

SEQ ID NO: 292572 - RNA, 32 nt, Human
aagugcauccucaggccugggcuguagcaagc

SEQ ID NO: 292573 - RNA, 32 nt, Human
aagugcaugggguggagaacagggaaggagaa

SEQ ID NO: 292574 - RNA, 32 nt, Human
aagugcauuuauugucuuuccacauauuggag

SEQ ID NO: 292575 - RNA, 24 nt, Human
aagugccaaaauuauaggcgugag

SEQ ID NO: 292576 - RNA, 25 nt, Human
aagugccaaaggccacaggcaugag

SEQ ID NO: 292577 - RNA, 24 nt, Human
aagugccaggauuacaggcaugag

SEQ ID NO: 292578 - RNA, 32 nt, Human
aagugccaggauuacaggcgugagccaaugug

SEQ ID NO: 292579 - RNA, 32 nt, Human
aagugccagggcugcccuccacccucacccuc

SEQ ID NO: 292580 - RNA, 32 nt, Human
aagugccagggugguuuucaggagcucuggug

SEQ ID NO: 292581 - RNA, 32 nt, Human
aagugccaguaaucccagcuacucuuggaggc

SEQ ID NO: 292582 - RNA, 21 nt, Human
aagugccaguucacacaggua

SEQ ID NO: 292583 - RNA, 32 nt, Human
aagugccaguuucuuuaauaugugaccaagaa

SEQ ID NO: 292584 - RNA, 20 nt, Human
aagugccauuuccucuccag

SEQ ID NO: 292585 - RNA, 32 nt, Human
aagugccauuucuguuacgucucccucucccc

SEQ ID NO: 292586 - RNA, 32 nt, Human
aagugcccagcgcuggagugcagcgugccacg

SEQ ID NO: 292587 - RNA, 32 nt, Human
aagugccccaacuccccucaccaggagaggca

SEQ ID NO: 292588 - RNA, 32 nt, Human
aagugccccacagggaccccagccuggguggu

SEQ ID NO: 292589 - RNA, 32 nt, Human
aagugccccagcugagagaagcccccaggcca

SEQ ID NO: 292590 - RNA, 32 nt, Human
aagugccccugccuggguucugucccagcucc

SEQ ID NO: 292591 - RNA, 32 nt, Human
aagugcccuacucuuucuccucccuuugguga

SEQ ID NO: 292592 - RNA, 32 nt, Human
aagugcccuccagccucagagcuagccacaaa

SEQ ID NO: 292593 - RNA, 32 nt, Human
aagugcccuccccacaaugcaggagaggcaca

SEQ ID NO: 292594 - RNA, 32 nt, Human
aagugcccuccccucacagugucacuuccggc

SEQ ID NO: 292595 - RNA, 32 nt, Human
aagugcccugcucuccaggugccuagaguauc

SEQ ID NO: 292596 - RNA, 32 nt, Human
aagugcccuggaccaggucagggccuacagcu

SEQ ID NO: 292597 - RNA, 32 nt, Human
aagugcccuuacuaagggcacaugucuuaauc

SEQ ID NO: 292598 - RNA, 24 nt, Human
aagugccgagauuacaggugugag

SEQ ID NO: 292599 - RNA, 32 nt, Human
aagugccgagauuacaggugugagccaccgcg

SEQ ID NO: 292600 - RNA, 32 nt, Human
aagugccgagauugcagccucugcccggcggc

SEQ ID NO: 292601 - RNA, 27 nt, Human
aagugccgccgggauuacaggcgugag

SEQ ID NO: 292602 - RNA, 20 nt, Human
aagugccggauuacaggugu

SEQ ID NO: 292603 - RNA, 32 nt, Human
aagugccggccgcggaggguccuggccauuuu

SEQ ID NO: 292604 - RNA, 32 nt, Human
aagugccgggaccaaauggauucacugaugug

SEQ ID NO: 292605 - RNA, 32 nt, Human
aagugccgggauuacagacgugagccacugug

SEQ ID NO: 292606 - RNA, 19 nt, Human
aagugccgggauuacaggc

SEQ ID NO: 292607 - RNA, 24 nt, Human
aagugccgggauuacaggcaugag

SEQ ID NO: 292608 - RNA, 32 nt, Human
aagugccgggauuacaggcaugagccacugca

SEQ ID NO: 292609 - RNA, 24 nt, Human
aagugccgggauuacaggcgugag

SEQ ID NO: 292610 - RNA, 32 nt, Human
aagugccgggauuacaggcgugagccaccgcg

SEQ ID NO: 292611 - RNA, 32 nt, Human
aagugccgggauuacaggcgugagccaccuug

SEQ ID NO: 292612 - RNA, 32 nt, Human
aagugccgggauuacaggcgugagccacugcg

SEQ ID NO: 292613 - RNA, 32 nt, Human
aagugccggugaggacguggggaaccagagcc

SEQ ID NO: 292614 - RNA, 31 nt, Human
aagugccucagugugcccuguugaaacuuag

SEQ ID NO: 292615 - RNA, 32 nt, Human
aagugccucccucccuccuccucuuuacugaa

SEQ ID NO: 292616 - RNA, 32 nt, Human
aagugccuccuucuucccaggaucaggaccuc

SEQ ID NO: 292617 - RNA, 32 nt, Human
aagugccugaaaucccagguacucaggaggcu

SEQ ID NO: 292618 - RNA, 32 nt, Human
aagugccugagugucugcuuucaccucagucu

SEQ ID NO: 292619 - RNA, 32 nt, Human
aagugccugcagcccacgccucugagacaggc

SEQ ID NO: 292620 - RNA, 32 nt, Human
aagugccugcccccucccagcagccagcccug

SEQ ID NO: 292621 - RNA, 32 nt, Human
aagugccugccugugcucucucccucuccucc

SEQ ID NO: 292622 - RNA, 32 nt, Human
aagugccuggggaccugaagagcaccggggaa

SEQ ID NO: 292623 - RNA, 32 nt, Human
aagugccuguagucccagcuacucuggaggcu

SEQ ID NO: 292624 - RNA, 32 nt, Human
aagugccuuagcaaauucuguuuuucuaggcc

SEQ ID NO: 292625 - RNA, 32 nt, Human
aagugccuuagcccagguuccugggcuucugc

SEQ ID NO: 292626 - RNA, 32 nt, Human
aagugccuucaaggagcuuacguucuaguuag

SEQ ID NO: 292627 - RNA, 32 nt, Human
aagugccuuccgcuuccaucugcuccgcccag

SEQ ID NO: 292628 - RNA, 32 nt, Human
aagugccuuuggggacuuuuccccauugccuu

SEQ ID NO: 292629 - RNA, 32 nt, Human
aagugcgagugggggaguccccucuccaacac

SEQ ID NO: 292630 - RNA, 32 nt, Human
aagugcgcuuuccguccuuucaaaggacaacu

SEQ ID NO: 292631 - RNA, 22 nt, Human
aagugcgggauuacaagcguga

SEQ ID NO: 292632 - RNA, 32 nt, Human
aagugcggggauuacaggcuugagccacugca

SEQ ID NO: 292633 - RNA, 24 nt, Human
aagugcuaagauuacaggcgugag

SEQ ID NO: 292634 - RNA, 32 nt, Human
aagugcuaagauuacaggcgugagccaccgcg

SEQ ID NO: 292635 - RNA, 32 nt, Human
aagugcuaagauuacaggcgugagccacugag

SEQ ID NO: 292636 - RNA, 32 nt, Human
aagugcuaagauuacaggcgugagccacugcg

SEQ ID NO: 292637 - RNA, 32 nt, Human
aagugcuacccaccccucugcagcaacaucuc

SEQ ID NO: 292638 - RNA, 24 nt, Human
aagugcuaggauaacaggugugag

SEQ ID NO: 292639 - RNA, 24 nt, Human
aagugcuaggauuacagacaugag

SEQ ID NO: 292640 - RNA, 32 nt, Human
aagugcuaggauuacagacaugagccacuacg

SEQ ID NO: 292641 - RNA, 21 nt, Human
aagugcuaggauuacagacgu

SEQ ID NO: 292642 - RNA, 24 nt, Human
aagugcuaggauuacagaugggag

SEQ ID NO: 292643 - RNA, 32 nt, Human
aagugcuaggauuacagaugggagccaccacg

SEQ ID NO: 292644 - RNA, 23 nt, Human
aagugcuaggauuacagauguga

SEQ ID NO: 292645 - RNA, 32 nt, Human
aagugcuaggauuacagaugugaaccacugug

SEQ ID NO: 292646 - RNA, 32 nt, Human
aagugcuaggauuacagaugugagccaccacg

SEQ ID NO: 292647 - RNA, 22 nt, Human
aagugcuaggauuacagcguga

SEQ ID NO: 292648 - RNA, 32 nt, Human
aagugcuaggauuacaggagugagccacugcg

SEQ ID NO: 292649 - RNA, 19 nt, Human
aagugcuaggauuacaggc

SEQ ID NO: 292650 - RNA, 23 nt, Human
aagugcuaggauuacaggcauga

SEQ ID NO: 292651 - RNA, 24 nt, Human
aagugcuaggauuacaggcaugag

SEQ ID NO: 292652 - RNA, 32 nt, Human
aagugcuaggauuacaggcaugagccacagca

SEQ ID NO: 292653 - RNA, 32 nt, Human
aagugcuaggauuacaggcaugagccaccaca

SEQ ID NO: 292654 - RNA, 32 nt, Human
aagugcuaggauuacaggcaugagccaccacg

SEQ ID NO: 292655 - RNA, 32 nt, Human
aagugcuaggauuacaggcaugagccaccaug

SEQ ID NO: 292656 - RNA, 32 nt, Human
aagugcuaggauuacaggcaugggccacugca

SEQ ID NO: 292657 - RNA, 24 nt, Human
aagugcuaggauuacaggcccgug

SEQ ID NO: 292658 - RNA, 21 nt, Human
aagugcuaggauuacaggcgu

SEQ ID NO: 292659 - RNA, 22 nt, Human
aagugcuaggauuacaggcgug

SEQ ID NO: 292660 - RNA, 24 nt, Human
aagugcuaggauuacaggcgugag

SEQ ID NO: 292661 - RNA, 32 nt, Human
aagugcuaggauuacaggcgugagccaccaac

SEQ ID NO: 292662 - RNA, 32 nt, Human
aagugcuaggauuacaggcgugagccaccaca

SEQ ID NO: 292663 - RNA, 32 nt, Human
aagugcuaggauuacaggcgugagccaccacg

SEQ ID NO: 292664 - RNA, 32 nt, Human
aagugcuaggauuacaggcgugagccaccaug

SEQ ID NO: 292665 - RNA, 32 nt, Human
aagugcuaggauuacaggcgugagccaccgua

SEQ ID NO: 292666 - RNA, 32 nt, Human
aagugcuaggauuacaggcgugagccaccgug

SEQ ID NO: 292667 - RNA, 32 nt, Human
aagugcuaggauuacaggcgugagccacugca

SEQ ID NO: 292668 - RNA, 32 nt, Human
aagugcuaggauuacaggcgugagccacuuac

SEQ ID NO: 292669 - RNA, 32 nt, Human
aagugcuaggauuacaggcgugugccaccgcg

SEQ ID NO: 292670 - RNA, 32 nt, Human
aagugcuaggauuacaggcuggagcuacagag

SEQ ID NO: 292671 - RNA, 24 nt, Human
aagugcuaggauuacagguaugag

SEQ ID NO: 292672 - RNA, 32 nt, Human
aagugcuaggauuacagguaugagccaccaug

SEQ ID NO: 292673 - RNA, 32 nt, Human
aagugcuaggauuacagguaugagccauugcg

SEQ ID NO: 292674 - RNA, 21 nt, Human
aagugcuaggauuacaggugu

SEQ ID NO: 292675 - RNA, 32 nt, Human
aagugcuaggauuacagguguaagccacugug

SEQ ID NO: 292676 - RNA, 24 nt, Human
aagugcuaggauuacaggugugag

SEQ ID NO: 292677 - RNA, 32 nt, Human
aagugcuaggauuacaggugugagccaccaca

SEQ ID NO: 292678 - RNA, 32 nt, Human
aagugcuaggauuacaggugugagccaccacg

SEQ ID NO: 292679 - RNA, 32 nt, Human
aagugcuaggauuacaggugugagccacugug

SEQ ID NO: 292680 - RNA, 32 nt, Human
aagugcuaggauuacaggugugagccauugug

SEQ ID NO: 292681 - RNA, 32 nt, Human
aagugcuaggauuacagguuugagccaccgug

SEQ ID NO: 292682 - RNA, 24 nt, Human
aagugcuaggauuacgggugugag

SEQ ID NO: 292683 - RNA, 24 nt, Human
aagugcuaggauuauaggcaugag

SEQ ID NO: 292684 - RNA, 23 nt, Human
aagugcuaggauuauaggcguga

SEQ ID NO: 292685 - RNA, 24 nt, Human
aagugcuaggauuauaggcuugag

SEQ ID NO: 292686 - RNA, 24 nt, Human
aagugcuaggauuccaggcgugag

SEQ ID NO: 292687 - RNA, 24 nt, Human
aagugcuaggauuccaggugugag

SEQ ID NO: 292688 - RNA, 32 nt, Human
aagugcuaggcccauguuccacucaggcuuca

SEQ ID NO: 292689 - RNA, 32 nt, Human
aagugcuaggggacauggugcccacaugaaca

SEQ ID NO: 292690 - RNA, 24 nt, Human
aagugcuaggguuacagacaugag

SEQ ID NO: 292691 - RNA, 24 nt, Human
aagugcuaggguuacaggcaugag

SEQ ID NO: 292692 - RNA, 24 nt, Human
aagugcuagguuuacaggcaugag

SEQ ID NO: 292693 - RNA, 24 nt, Human
aagugcuaugauuacagacgugag

SEQ ID NO: 292694 - RNA, 32 nt, Human
aagugcuauuuauagggugcccagggagccgc

SEQ ID NO: 292695 - RNA, 32 nt, Human
aagugcucaacuuagacucugggcaaaauucu

SEQ ID NO: 292696 - RNA, 31 nt, Human
aagugcucaauaaauacugagugaaauccuc

SEQ ID NO: 292697 - RNA, 21 nt, Human
aagugcucagagggccaggag

SEQ ID NO: 292698 - RNA, 25 nt, Human
aagugcucaggauuacaggcgugag

SEQ ID NO: 292699 - RNA, 32 nt, Human
aagugcucagggaaaugaagacaggagaacug

SEQ ID NO: 292700 - RNA, 32 nt, Human
aagugcuccccaaaaggaaggagaaugggauu

SEQ ID NO: 292701 - RNA, 32 nt, Human
aagugcucccucuuugggguucccaaggcacc

SEQ ID NO: 292702 - RNA, 32 nt, Human
aagugcuccugcagcuaucauucauccaguua

SEQ ID NO: 292703 - RNA, 24 nt, Human
aagugcucggauuacagacaugag

SEQ ID NO: 292704 - RNA, 24 nt, Human
aagugcucggauuacaggugugag

SEQ ID NO: 292705 - RNA, 32 nt, Human
aagugcucggauuacaggugugagccacugug

SEQ ID NO: 292706 - RNA, 22 nt, Human
aagugcugaaaucugcagugag

SEQ ID NO: 292707 - RNA, 24 nt, Human
aagugcugaaauuacaggcaugag

SEQ ID NO: 292708 - RNA, 32 nt, Human
aagugcugaaccugagagcagccccaguacac

SEQ ID NO: 292709 - RNA, 32 nt, Human
aagugcugaacugugaggagagaggcggacug

SEQ ID NO: 292710 - RNA, 32 nt, Human
aagugcugaagaaaaagaaagugaagaagucg

SEQ ID NO: 292711 - RNA, 21 nt, Human
aagugcugaauuacaauguga

SEQ ID NO: 292712 - RNA, 24 nt, Human
aagugcugacauuacaggccugag

SEQ ID NO: 292713 - RNA, 24 nt, Human
aagugcugagaugacaggcaugag

SEQ ID NO: 292714 - RNA, 23 nt, Human
aagugcugagauuacaagcguga

SEQ ID NO: 292715 - RNA, 32 nt, Human
aagugcugagauuacaagcgugaaccaccaug

SEQ ID NO: 292716 - RNA, 32 nt, Human
aagugcugagauuacagaagugagccacugug

SEQ ID NO: 292717 - RNA, 24 nt, Human
aagugcugagauuacagacaugag

SEQ ID NO: 292718 - RNA, 32 nt, Human
aagugcugagauuacagacaugagccuccgcg

SEQ ID NO: 292719 - RNA, 24 nt, Human
aagugcugagauuacagacgugag

SEQ ID NO: 292720 - RNA, 32 nt, Human
aagugcugagauuacagacgugagccacugcg

SEQ ID NO: 292721 - RNA, 32 nt, Human
aagugcugagauuacagacgugagccacugug

SEQ ID NO: 292722 - RNA, 24 nt, Human
aagugcugagauuacagaugugag

SEQ ID NO: 292723 - RNA, 32 nt, Human
aagugcugagauuacagaugugagccacugcg

SEQ ID NO: 292724 - RNA, 24 nt, Human
aagugcugagauuacaggagugag

SEQ ID NO: 292725 - RNA, 19 nt, Human
aagugcugagauuacaggc

SEQ ID NO: 292726 - RNA, 32 nt, Human
aagugcugagauuacaggcauaagccaccgcg

SEQ ID NO: 292727 - RNA, 23 nt, Human
aagugcugagauuacaggcauga

SEQ ID NO: 292728 - RNA, 32 nt, Human
aagugcugagauuacaggcaugaaccacugug

SEQ ID NO: 292729 - RNA, 32 nt, Human
aagugcugagauuacaggcaugacccaccgcg

SEQ ID NO: 292730 - RNA, 24 nt, Human
aagugcugagauuacaggcaugag

SEQ ID NO: 292731 - RNA, 32 nt, Human
aagugcugagauuacaggcaugagccaccaca

SEQ ID NO: 292732 - RNA, 32 nt, Human
aagugcugagauuacaggcaugagccaccacg

SEQ ID NO: 292733 - RNA, 32 nt, Human
aagugcugagauuacaggcaugagccaccaug

SEQ ID NO: 292734 - RNA, 32 nt, Human
aagugcugagauuacaggcaugagccaccgca

SEQ ID NO: 292735 - RNA, 32 nt, Human
aagugcugagauuacaggcaugagccacugca

SEQ ID NO: 292736 - RNA, 32 nt, Human
aagugcugagauuacaggcaugagccauugca

SEQ ID NO: 292737 - RNA, 32 nt, Human
aagugcugagauuacaggcaugagcuaccacg

SEQ ID NO: 292738 - RNA, 32 nt, Human
aagugcugagauuacaggcaugagucacuacg

SEQ ID NO: 292739 - RNA, 24 nt, Human
aagugcugagauuacaggcauggg

SEQ ID NO: 292740 - RNA, 32 nt, Human
aagugcugagauuacaggcaugggccaccacg

SEQ ID NO: 292741 - RNA, 24 nt, Human
aagugcugagauuacaggccugag

SEQ ID NO: 292742 - RNA, 32 nt, Human
aagugcugagauuacaggccugagccaccgug

SEQ ID NO: 292743 - RNA, 24 nt, Human
aagugcugagauuacaggcgugag

SEQ ID NO: 292744 - RNA, 32 nt, Human
aagugcugagauuacaggcgugagccaccaca

SEQ ID NO: 292745 - RNA, 32 nt, Human
aagugcugagauuacaggcgugagccaccgug

SEQ ID NO: 292746 - RNA, 32 nt, Human
aagugcugagauuacaggcgugagccacugug

SEQ ID NO: 292747 - RNA, 32 nt, Human
aagugcugagauuacaggcgugagcuaucaca

SEQ ID NO: 292748 - RNA, 32 nt, Human
aagugcugagauuacaggcgugaggcacugcg

SEQ ID NO: 292749 - RNA, 32 nt, Human
aagugcugagauuacaggcguggccaccaucc

SEQ ID NO: 292750 - RNA, 32 nt, Human
aagugcugagauuacaggcuugaaccacugua

SEQ ID NO: 292751 - RNA, 32 nt, Human
aagugcugagauuacaggcuugagccaccacg

SEQ ID NO: 292752 - RNA, 32 nt, Human
aagugcugagauuacaggggugagccacugcg

SEQ ID NO: 292753 - RNA, 32 nt, Human
aagugcugagauuacaggggugagucaccgcg

SEQ ID NO: 292754 - RNA, 21 nt, Human
aagugcugagauuacaggugu

SEQ ID NO: 292755 - RNA, 32 nt, Human
aagugcugagauuacagguguaagccacugag

SEQ ID NO: 292756 - RNA, 24 nt, Human
aagugcugagauuacaggugugag

SEQ ID NO: 292757 - RNA, 32 nt, Human
aagugcugagauuacaggugugagccaccagg

SEQ ID NO: 292758 - RNA, 32 nt, Human
aagugcugagauuacaggugugagccaccaug

SEQ ID NO: 292759 - RNA, 32 nt, Human
aagugcugagauuacaggugugagccaccgca

SEQ ID NO: 292760 - RNA, 32 nt, Human
aagugcugagauuacaggugugagccaccgug

SEQ ID NO: 292761 - RNA, 32 nt, Human
aagugcugagauuacaggugugagccacugug

SEQ ID NO: 292762 - RNA, 32 nt, Human
aagugcugagauuacaggugugagcuaccaug

SEQ ID NO: 292763 - RNA, 32 nt, Human
aagugcugagauuacaggugugagcuaccgca

SEQ ID NO: 292764 - RNA, 32 nt, Human
aagugcugagauuacaguugcgagccacugug

SEQ ID NO: 292765 - RNA, 32 nt, Human
aagugcugagauuacgggcaugagccaccgca

SEQ ID NO: 292766 - RNA, 24 nt, Human
aagugcugagauuacuggcuugag

SEQ ID NO: 292767 - RNA, 32 nt, Human
aagugcugagauuacuggcuugagccacugca

SEQ ID NO: 292768 - RNA, 32 nt, Human
aagugcugagauuaggcguuagccaccgcgcc

SEQ ID NO: 292769 - RNA, 24 nt, Human
aagugcugagauuauaggcacgag

SEQ ID NO: 292770 - RNA, 32 nt, Human
aagugcugagauuauaggcacgagccacuaca

SEQ ID NO: 292771 - RNA, 24 nt, Human
aagugcugagauuauaggcaugag

SEQ ID NO: 292772 - RNA, 32 nt, Human
aagugcugagauuauaggcaugagccaccacg

SEQ ID NO: 292773 - RNA, 32 nt, Human
aagugcugagauuauaggcaugagccacugug

SEQ ID NO: 292774 - RNA, 24 nt, Human
aagugcugagauuauaggcgugag

SEQ ID NO: 292775 - RNA, 24 nt, Human
aagugcugagauuauagggaugag

SEQ ID NO: 292776 - RNA, 32 nt, Human
aagugcugagauuaugggcgugagccaccgug

SEQ ID NO: 292777 - RNA, 24 nt, Human
aagugcugagauugcagaugugag

SEQ ID NO: 292778 - RNA, 32 nt, Human
aagugcugagauugcagaugugagccaccgug

SEQ ID NO: 292779 - RNA, 32 nt, Human
aagugcugauuccacagcaugcagccugguag

SEQ ID NO: 292780 - RNA, 24 nt, Human
aagugcugcaguuacaggcgugag

SEQ ID NO: 292781 - RNA, 24 nt, Human
aagugcugccauuacaggcgugag

SEQ ID NO: 292782 - RNA, 24 nt, Human
aagugcugcgauuacagacaugag

SEQ ID NO: 292783 - RNA, 24 nt, Human
aagugcugcgauuacaggcaugag

SEQ ID NO: 292784 - RNA, 32 nt, Human
aagugcugcgauuacaggcaugagccaccgcg

SEQ ID NO: 292785 - RNA, 32 nt, Human
aagugcugcgauuacaggcaugagccaucgcg

SEQ ID NO: 292786 - RNA, 24 nt, Human
aagugcugcgauuacaggcgugag

SEQ ID NO: 292787 - RNA, 32 nt, Human
aagugcugcgauuacaggcgugagccaccgca

SEQ ID NO: 292788 - RNA, 32 nt, Human
aagugcugcuuuggcaaucugggcugaccugg

SEQ ID NO: 292789 - RNA, 24 nt, Human
aagugcuggaaccacaggccugag

SEQ ID NO: 292790 - RNA, 24 nt, Human
aagugcuggaauaacaggugugag

SEQ ID NO: 292791 - RNA, 24 nt, Human
aagugcuggaaucacaggggugag

SEQ ID NO: 292792 - RNA, 24 nt, Human
aagugcuggaauuacaggcaugag

SEQ ID NO: 292793 - RNA, 24 nt, Human
aagugcuggaauuacaggccugag

SEQ ID NO: 292794 - RNA, 20 nt, Human
aagugcuggaauuacaggcg

SEQ ID NO: 292795 - RNA, 21 nt, Human
aagugcuggaauuacaggcgu

SEQ ID NO: 292796 - RNA, 24 nt, Human
aagugcuggaauuacaggcgugag

SEQ ID NO: 292797 - RNA, 24 nt, Human
aagugcuggaauuacaggugugag

SEQ ID NO: 292798 - RNA, 24 nt, Human
aagugcuggaauuacagucauggg

SEQ ID NO: 292799 - RNA, 24 nt, Human
aagugcuggaauuacaugggugag

SEQ ID NO: 292800 - RNA, 24 nt, Human
aagugcuggaauuacuggcaugag

SEQ ID NO: 292801 - RNA, 24 nt, Human
aagugcuggaauuauaggcaugag

SEQ ID NO: 292802 - RNA, 21 nt, Human
aagugcuggaauuauaggcgu

SEQ ID NO: 292803 - RNA, 23 nt, Human
aagugcuggaauuauaggcguga

SEQ ID NO: 292804 - RNA, 24 nt, Human
aagugcuggaauugcagacgugag

SEQ ID NO: 292805 - RNA, 24 nt, Human
aagugcuggaauugcagacuugag

SEQ ID NO: 292806 - RNA, 24 nt, Human
aagugcuggaauugcaggcaugag

SEQ ID NO: 292807 - RNA, 18 nt, Human
aagugcuggauuacaggc

SEQ ID NO: 292808 - RNA, 23 nt, Human
aagugcuggauuacaggcgugag

SEQ ID NO: 292809 - RNA, 32 nt, Human
aagugcuggauuacaggcgugagccaccacac

SEQ ID NO: 292810 - RNA, 32 nt, Human
aagugcuggauuacaggcgugagccaccgugc

SEQ ID NO: 292811 - RNA, 32 nt, Human
aagugcuggauuacaggcgugagccacugagc

SEQ ID NO: 292812 - RNA, 32 nt, Human
aagugcuggauuacaggcugagcuaccacccu

SEQ ID NO: 292813 - RNA, 23 nt, Human
aagugcuggauuacagggaugag

SEQ ID NO: 292814 - RNA, 32 nt, Human
aagugcuggauuacagggaugagccaccauac

SEQ ID NO: 292815 - RNA, 23 nt, Human
aagugcuggauuacaggugugag

SEQ ID NO: 292816 - RNA, 32 nt, Human
aagugcuggauuacaggugugagccaccacga

SEQ ID NO: 292817 - RNA, 32 nt, Human
aagugcuggauuacaggugugagccacccugc

SEQ ID NO: 292818 - RNA, 24 nt, Human
aagugcuggcacuacaggcaugag

SEQ ID NO: 292819 - RNA, 24 nt, Human
aagugcuggcauuacaggcgugag

SEQ ID NO: 292820 - RNA, 24 nt, Human
aagugcuggcauuacaggugugag

SEQ ID NO: 292821 - RNA, 24 nt, Human
aagugcuggcauuucaggcgugag

SEQ ID NO: 292822 - RNA, 32 nt, Human
aagugcuggccuuaauuugggguggggugggg

SEQ ID NO: 292823 - RNA, 32 nt, Human
aagugcuggcucugcuguccuugccuuccauu

SEQ ID NO: 292824 - RNA, 24 nt, Human
aagugcugggaauacaggcaugag

SEQ ID NO: 292825 - RNA, 23 nt, Human
aagugcugggaauacagguguga

SEQ ID NO: 292826 - RNA, 25 nt, Human
aagugcugggaauuacaggcgugag

SEQ ID NO: 292827 - RNA, 24 nt, Human
aagugcugggacuacaggccugag

SEQ ID NO: 292828 - RNA, 24 nt, Human
aagugcugggacuauaagugugag

SEQ ID NO: 292829 - RNA, 24 nt, Human
aagugcugggaucacagacgugag

SEQ ID NO: 292830 - RNA, 23 nt, Human
aagugcugggaucacaggcauga

SEQ ID NO: 292831 - RNA, 24 nt, Human
aagugcugggaucacaggcaugag

SEQ ID NO: 292832 - RNA, 20 nt, Human
aagugcugggaucacaggcg

SEQ ID NO: 292833 - RNA, 24 nt, Human
aagugcugggaucacaggcgugag

SEQ ID NO: 292834 - RNA, 32 nt, Human
aagugcugggaucacaggcgugagccacugcg

SEQ ID NO: 292835 - RNA, 32 nt, Human
aagugcugggaucacaggcgugagcuaccaag

SEQ ID NO: 292836 - RNA, 32 nt, Human
aagugcugggaucacaggcgugagcuaucaca

SEQ ID NO: 292837 - RNA, 24 nt, Human
aagugcugggaucacaggugggag

SEQ ID NO: 292838 - RNA, 20 nt, Human
aagugcugggaucuggcgug

SEQ ID NO: 292839 - RNA, 23 nt, Human
aagugcugggaugacagcgugag

SEQ ID NO: 292840 - RNA, 32 nt, Human
aagugcugggaugacagcgugagccaccacac

SEQ ID NO: 292841 - RNA, 23 nt, Human
aagugcugggaugacaggcauga

SEQ ID NO: 292842 - RNA, 24 nt, Human
aagugcugggaugacaggcaugag

SEQ ID NO: 292843 - RNA, 22 nt, Human
aagugcugggaugacaggcgug

SEQ ID NO: 292844 - RNA, 24 nt, Human
aagugcugggaugacaggcgugag

SEQ ID NO: 292845 - RNA, 24 nt, Human
aagugcugggaugacaggugugag

SEQ ID NO: 292846 - RNA, 32 nt, Human
aagugcugggaugacaggugugagccaccgcc

SEQ ID NO: 292847 - RNA, 24 nt, Human
aagugcugggaugauaggcgugag

SEQ ID NO: 292848 - RNA, 24 nt, Human
aagugcugggaugccaggcgugag

SEQ ID NO: 292849 - RNA, 24 nt, Human
aagugcugggauuaaagcugugag

SEQ ID NO: 292850 - RNA, 24 nt, Human
aagugcugggauuaaaggcgugag

SEQ ID NO: 292851 - RNA, 24 nt, Human
aagugcugggauuaaaggugugag

SEQ ID NO: 292852 - RNA, 23 nt, Human
aagugcugggauuaacagguaug

SEQ ID NO: 292853 - RNA, 25 nt, Human
aagugcugggauuaacgggugugag

SEQ ID NO: 292854 - RNA, 23 nt, Human
aagugcugggauuaaggcgugag

SEQ ID NO: 292855 - RNA, 32 nt, Human
aagugcugggauuaaggcgugagccacugcgc

SEQ ID NO: 292856 - RNA, 24 nt, Human
aagugcugggauuaauggcgugag

SEQ ID NO: 292857 - RNA, 24 nt, Human
aagugcugggauuacaagaaugag

SEQ ID NO: 292858 - RNA, 24 nt, Human
aagugcugggauuacaagcaugag

SEQ ID NO: 292859 - RNA, 24 nt, Human
aagugcugggauuacaagcgugag

SEQ ID NO: 292860 - RNA, 24 nt, Human
aagugcugggauuacaagggugag

SEQ ID NO: 292861 - RNA, 24 nt, Human
aagugcugggauuacaagugugag

SEQ ID NO: 292862 - RNA, 24 nt, Human
aagugcugggauuacaaguuugag

SEQ ID NO: 292863 - RNA, 24 nt, Human
aagugcugggauuacagaagugag

SEQ ID NO: 292864 - RNA, 32 nt, Human
aagugcugggauuacagaagugagccacugua

SEQ ID NO: 292865 - RNA, 24 nt, Human
aagugcugggauuacagacacgag

SEQ ID NO: 292866 - RNA, 32 nt, Human
aagugcugggauuacagacacgagccaccuca

SEQ ID NO: 292867 - RNA, 23 nt, Human
aagugcugggauuacagacauga

SEQ ID NO: 292868 - RNA, 32 nt, Human
aagugcugggauuacagacaugaacugccagg

SEQ ID NO: 292869 - RNA, 24 nt, Human
aagugcugggauuacagacaugag

SEQ ID NO: 292870 - RNA, 32 nt, Human
aagugcugggauuacagacaugagcagccaug

SEQ ID NO: 292871 - RNA, 32 nt, Human
aagugcugggauuacagacaugagccaccacg

SEQ ID NO: 292872 - RNA, 32 nt, Human
aagugcugggauuacagacaugagccaccaug

SEQ ID NO: 292873 - RNA, 32 nt, Human
aagugcugggauuacagacaugagccacugug

SEQ ID NO: 292874 - RNA, 32 nt, Human
aagugcugggauuacagaccugagccaccaca

SEQ ID NO: 292875 - RNA, 23 nt, Human
aagugcugggauuacagacguga

SEQ ID NO: 292876 - RNA, 32 nt, Human
aagugcugggauuacagacgugaaccacuggg

SEQ ID NO: 292877 - RNA, 24 nt, Human
aagugcugggauuacagacgugag

SEQ ID NO: 292878 - RNA, 32 nt, Human
aagugcugggauuacagacgugagccaccacg

SEQ ID NO: 292879 - RNA, 32 nt, Human
aagugcugggauuacagacgugagccaccacu

SEQ ID NO: 292880 - RNA, 32 nt, Human
aagugcugggauuacagacgugagccaccgug

SEQ ID NO: 292881 - RNA, 32 nt, Human
aagugcugggauuacagacgugagcuaccaca

SEQ ID NO: 292882 - RNA, 32 nt, Human
aagugcugggauuacagacgugagcuaucaug

SEQ ID NO: 292883 - RNA, 32 nt, Human
aagugcugggauuacagacgugaggcaccaca

SEQ ID NO: 292884 - RNA, 32 nt, Human
aagugcugggauuacagacgugauccaccagg

SEQ ID NO: 292885 - RNA, 32 nt, Human
aagugcugggauuacagagugugagccaccac

SEQ ID NO: 292886 - RNA, 32 nt, Human
aagugcugggauuacagaugauagccaccuca

SEQ ID NO: 292887 - RNA, 21 nt, Human
aagugcugggauuacagaugu

SEQ ID NO: 292888 - RNA, 32 nt, Human
aagugcugggauuacagauguaagucacuacc

SEQ ID NO: 292889 - RNA, 24 nt, Human
aagugcugggauuacagaugugag

SEQ ID NO: 292890 - RNA, 32 nt, Human
aagugcugggauuacagaugugagccaacgca

SEQ ID NO: 292891 - RNA, 32 nt, Human
aagugcugggauuacagaugugagccaccaca

SEQ ID NO: 292892 - RNA, 32 nt, Human
aagugcugggauuacagaugugagccaccacg

SEQ ID NO: 292893 - RNA, 32 nt, Human
aagugcugggauuacagaugugagccaccaug

SEQ ID NO: 292894 - RNA, 32 nt, Human
aagugcugggauuacagaugugagccaccgca

SEQ ID NO: 292895 - RNA, 32 nt, Human
aagugcugggauuacagaugugagccacugca

SEQ ID NO: 292896 - RNA, 32 nt, Human
aagugcugggauuacagaugugagccauggug

SEQ ID NO: 292897 - RNA, 32 nt, Human
aagugcugggauuacagaugugagccauugug

SEQ ID NO: 292898 - RNA, 32 nt, Human
aagugcugggauuacagaugugagccgccgcg

SEQ ID NO: 292899 - RNA, 32 nt, Human
aagugcugggauuacagcaucccagccaucac

SEQ ID NO: 292900 - RNA, 24 nt, Human
aagugcugggauuacagcccugag

SEQ ID NO: 292901 - RNA, 24 nt, Human
aagugcugggauuacagccgugag

SEQ ID NO: 292902 - RNA, 32 nt, Human
aagugcugggauuacagccgugagccacugca

SEQ ID NO: 292903 - RNA, 24 nt, Human
aagugcugggauuacagcgaagag

SEQ ID NO: 292904 - RNA, 32 nt, Human
aagugcugggauuacagcgaagagccacagca

SEQ ID NO: 292905 - RNA, 23 nt, Human
aagugcugggauuacagcgugag

SEQ ID NO: 292906 - RNA, 32 nt, Human
aagugcugggauuacagcgugagccaccgcac

SEQ ID NO: 292907 - RNA, 32 nt, Human
aagugcugggauuacagcgugagcuaccuggc

SEQ ID NO: 292908 - RNA, 24 nt, Human
aagugcugggauuacagcugugag

SEQ ID NO: 292909 - RNA, 32 nt, Human
aagugcugggauuacagcugugagccaccgug

SEQ ID NO: 292910 - RNA, 32 nt, Human
aagugcugggauuacagcugugagccacugca

SEQ ID NO: 292911 - RNA, 32 nt, Human
aagugcugggauuacagcugugagccauggca

SEQ ID NO: 292912 - RNA, 18 nt, Human
aagugcugggauuacagg

SEQ ID NO: 292913 - RNA, 32 nt, Human
aagugcugggauuacaggaaugagccacugug

SEQ ID NO: 292914 - RNA, 22 nt, Human
aagugcugggauuacaggagug

SEQ ID NO: 292915 - RNA, 32 nt, Human
aagugcugggauuacaggagugaaccaccaag

SEQ ID NO: 292916 - RNA, 32 nt, Human
aagugcugggauuacaggagugaaccaccaug

SEQ ID NO: 292917 - RNA, 24 nt, Human
aagugcugggauuacaggagugag

SEQ ID NO: 292918 - RNA, 32 nt, Human
aagugcugggauuacaggagugagccaccgug

SEQ ID NO: 292919 - RNA, 32 nt, Human
aagugcugggauuacaggagugagccacugcg

SEQ ID NO: 292920 - RNA, 32 nt, Human
aagugcugggauuacaggagugagccgcugcg

SEQ ID NO: 292921 - RNA, 32 nt, Human
aagugcugggauuacaggagugugccacugcg

SEQ ID NO: 292922 - RNA, 32 nt, Human
aagugcugggauuacaggaugagccacugagc

SEQ ID NO: 292923 - RNA, 19 nt, Human
aagugcugggauuacaggc

SEQ ID NO: 292924 - RNA, 32 nt, Human
aagugcugggauuacaggcaagagccaccaua

SEQ ID NO: 292925 - RNA, 24 nt, Human
aagugcugggauuacaggcacgag

SEQ ID NO: 292926 - RNA, 32 nt, Human
aagugcugggauuacaggcacgagccaccgca

SEQ ID NO: 292927 - RNA, 24 nt, Human
aagugcugggauuacaggcaggag

SEQ ID NO: 292928 - RNA, 32 nt, Human
aagugcugggauuacaggcaggagccaccgcg

SEQ ID NO: 292929 - RNA, 21 nt, Human
aagugcugggauuacaggcau

SEQ ID NO: 292930 - RNA, 32 nt, Human
aagugcugggauuacaggcauaagccacagca

SEQ ID NO: 292931 - RNA, 32 nt, Human
aagugcugggauuacaggcauaagccacugcg

SEQ ID NO: 292932 - RNA, 32 nt, Human
aagugcugggauuacaggcauaagccacugua

SEQ ID NO: 292933 - RNA, 32 nt, Human
aagugcugggauuacaggcauaagccacugug

SEQ ID NO: 292934 - RNA, 32 nt, Human
aagugcugggauuacaggcaucagccaccaca

SEQ ID NO: 292935 - RNA, 32 nt, Human
aagugcugggauuacaggcaucagccaccaug

SEQ ID NO: 292936 - RNA, 32 nt, Human
aagugcugggauuacaggcaucagccaccgca

SEQ ID NO: 292937 - RNA, 32 nt, Human
aagugcugggauuacaggcaucagccacuaug

SEQ ID NO: 292938 - RNA, 32 nt, Human
aagugcugggauuacaggcaucugccaccgca

SEQ ID NO: 292939 - RNA, 23 nt, Human
aagugcugggauuacaggcauga

SEQ ID NO: 292940 - RNA, 32 nt, Human
aagugcugggauuacaggcaugaaccacagcg

SEQ ID NO: 292941 - RNA, 32 nt, Human
aagugcugggauuacaggcaugaaccaccacg

SEQ ID NO: 292942 - RNA, 32 nt, Human
aagugcugggauuacaggcaugaaccaccaug

SEQ ID NO: 292943 - RNA, 32 nt, Human
aagugcugggauuacaggcaugaaccaccgcu

SEQ ID NO: 292944 - RNA, 32 nt, Human
aagugcugggauuacaggcaugaaccaccgug

SEQ ID NO: 292945 - RNA, 32 nt, Human
aagugcugggauuacaggcaugaaccacugug

SEQ ID NO: 292946 - RNA, 32 nt, Human
aagugcugggauuacaggcaugaaccaucaua

SEQ ID NO: 292947 - RNA, 32 nt, Human
aagugcugggauuacaggcaugaaccauggug

SEQ ID NO: 292948 - RNA, 32 nt, Human
aagugcugggauuacaggcaugaaccgccaug

SEQ ID NO: 292949 - RNA, 32 nt, Human
aagugcugggauuacaggcaugaaucaccaca

SEQ ID NO: 292950 - RNA, 32 nt, Human
aagugcugggauuacaggcaugaccaaaugug

SEQ ID NO: 292951 - RNA, 32 nt, Human
aagugcugggauuacaggcaugacccaccgcu

SEQ ID NO: 292952 - RNA, 24 nt, Human
aagugcugggauuacaggcaugag

SEQ ID NO: 292953 - RNA, 32 nt, Human
aagugcugggauuacaggcaugagccacagug

SEQ ID NO: 292954 - RNA, 32 nt, Human
aagugcugggauuacaggcaugagccaccaaa

SEQ ID NO: 292955 - RNA, 32 nt, Human
aagugcugggauuacaggcaugagccaccaca

SEQ ID NO: 292956 - RNA, 32 nt, Human
aagugcugggauuacaggcaugagccaccacg

SEQ ID NO: 292957 - RNA, 32 nt, Human
aagugcugggauuacaggcaugagccaccacu

SEQ ID NO: 292958 - RNA, 32 nt, Human
aagugcugggauuacaggcaugagccaccagg

SEQ ID NO: 292959 - RNA, 32 nt, Human
aagugcugggauuacaggcaugagccaccauc

SEQ ID NO: 292960 - RNA, 32 nt, Human
aagugcugggauuacaggcaugagccaccaug

SEQ ID NO: 292961 - RNA, 32 nt, Human
aagugcugggauuacaggcaugagccaccccg

SEQ ID NO: 292962 - RNA, 30 nt, Human
aagugcugggauuacaggcaugagccaccg

SEQ ID NO: 292963 - RNA, 32 nt, Human
aagugcugggauuacaggcaugagccaccgag

SEQ ID NO: 292964 - RNA, 32 nt, Human
aagugcugggauuacaggcaugagccaccgca

SEQ ID NO: 292965 - RNA, 32 nt, Human
aagugcugggauuacaggcaugagccaccgcg

SEQ ID NO: 292966 - RNA, 32 nt, Human
aagugcugggauuacaggcaugagccaccgcu

SEQ ID NO: 292967 - RNA, 32 nt, Human
aagugcugggauuacaggcaugagccaccgug

SEQ ID NO: 292968 - RNA, 32 nt, Human
aagugcugggauuacaggcaugagccaccuca

SEQ ID NO: 292969 - RNA, 32 nt, Human
aagugcugggauuacaggcaugagccaccucg

SEQ ID NO: 292970 - RNA, 32 nt, Human
aagugcugggauuacaggcaugagccacggca

SEQ ID NO: 292971 - RNA, 32 nt, Human
aagugcugggauuacaggcaugagccacggcg

SEQ ID NO: 292972 - RNA, 32 nt, Human
aagugcugggauuacaggcaugagccacugca

SEQ ID NO: 292973 - RNA, 32 nt, Human
aagugcugggauuacaggcaugagccacugcg

SEQ ID NO: 292974 - RNA, 32 nt, Human
aagugcugggauuacaggcaugagccacuggg

SEQ ID NO: 292975 - RNA, 32 nt, Human
aagugcugggauuacaggcaugagccacugug

SEQ ID NO: 292976 - RNA, 32 nt, Human
aagugcugggauuacaggcaugagccaucaca

SEQ ID NO: 292977 - RNA, 32 nt, Human
aagugcugggauuacaggcaugagccaucgcc

SEQ ID NO: 292978 - RNA, 32 nt, Human
aagugcugggauuacaggcaugagccaucgcg

SEQ ID NO: 292979 - RNA, 32 nt, Human
aagugcugggauuacaggcaugagccauugcg

SEQ ID NO: 292980 - RNA, 32 nt, Human
aagugcugggauuacaggcaugagccauugug

SEQ ID NO: 292981 - RNA, 32 nt, Human
aagugcugggauuacaggcaugagcuaccacg

SEQ ID NO: 292982 - RNA, 32 nt, Human
aagugcugggauuacaggcaugagcuaccgug

SEQ ID NO: 292983 - RNA, 32 nt, Human
aagugcugggauuacaggcaugagcuacugca

SEQ ID NO: 292984 - RNA, 32 nt, Human
aagugcugggauuacaggcaugagcuacugug

SEQ ID NO: 292985 - RNA, 32 nt, Human
aagugcugggauuacaggcaugagucaccaua

SEQ ID NO: 292986 - RNA, 32 nt, Human
aagugcugggauuacaggcaugagucauugcu

SEQ ID NO: 292987 - RNA, 23 nt, Human
aagugcugggauuacaggcaugg

SEQ ID NO: 292988 - RNA, 32 nt, Human
aagugcugggauuacaggcauggccaccacgc

SEQ ID NO: 292989 - RNA, 24 nt, Human
aagugcugggauuacaggcauggg

SEQ ID NO: 292990 - RNA, 24 nt, Human
aagugcugggauuacaggcccgag

SEQ ID NO: 292991 - RNA, 32 nt, Human
aagugcugggauuacaggcccgagccgccgca

SEQ ID NO: 292992 - RNA, 24 nt, Human
aagugcugggauuacaggccugag

SEQ ID NO: 292993 - RNA, 32 nt, Human
aagugcugggauuacaggccugagccaccaua

SEQ ID NO: 292994 - RNA, 32 nt, Human
aagugcugggauuacaggccugagccaccaug

SEQ ID NO: 292995 - RNA, 32 nt, Human
aagugcugggauuacaggccugagccaccgcg

SEQ ID NO: 292996 - RNA, 32 nt, Human
aagugcugggauuacaggccugagccaccgua

SEQ ID NO: 292997 - RNA, 32 nt, Human
aagugcugggauuacaggccugagccaccgug

SEQ ID NO: 292998 - RNA, 23 nt, Human
aagugcugggauuacaggccugg

SEQ ID NO: 292999 - RNA, 20 nt, Human
aagugcugggauuacaggcg

SEQ ID NO: 293000 - RNA, 32 nt, Human
aagugcugggauuacaggcgcaagccacccag

SEQ ID NO: 293001 - RNA, 32 nt, Human
aagugcugggauuacaggcgcaagccacuaca

SEQ ID NO: 293002 - RNA, 24 nt, Human
aagugcugggauuacaggcgcgag

SEQ ID NO: 293003 - RNA, 32 nt, Human
aagugcugggauuacaggcgcgagccaccaug

SEQ ID NO: 293004 - RNA, 32 nt, Human
aagugcugggauuacaggcgcgagccaccgcg

SEQ ID NO: 293005 - RNA, 32 nt, Human
aagugcugggauuacaggcgcgagccacggcg

SEQ ID NO: 293006 - RNA, 32 nt, Human
aagugcugggauuacaggcggccaggccuauu

SEQ ID NO: 293007 - RNA, 24 nt, Human
aagugcugggauuacaggcgggag

SEQ ID NO: 293008 - RNA, 32 nt, Human
aagugcugggauuacaggcgggagccaccaug

SEQ ID NO: 293009 - RNA, 21 nt, Human
aagugcugggauuacaggcgu

SEQ ID NO: 293010 - RNA, 32 nt, Human
aagugcugggauuacaggcguaagccaccaca

SEQ ID NO: 293011 - RNA, 32 nt, Human
aagugcugggauuacaggcguaagccacugcg

SEQ ID NO: 293012 - RNA, 24 nt, Human
aagugcugggauuacaggcgucag

SEQ ID NO: 293013 - RNA, 32 nt, Human
aagugcugggauuacaggcgucagccaccaug

SEQ ID NO: 293014 - RNA, 32 nt, Human
aagugcugggauuacaggcgucagccaccgcg

SEQ ID NO: 293015 - RNA, 22 nt, Human
aagugcugggauuacaggcgug

SEQ ID NO: 293016 - RNA, 23 nt, Human
aagugcugggauuacaggcguga

SEQ ID NO: 293017 - RNA, 32 nt, Human
aagugcugggauuacaggcgugaaacacugug

SEQ ID NO: 293018 - RNA, 32 nt, Human
aagugcugggauuacaggcgugaaccaccaau

SEQ ID NO: 293019 - RNA, 32 nt, Human
aagugcugggauuacaggcgugaaccacugca

SEQ ID NO: 293020 - RNA, 32 nt, Human
aagugcugggauuacaggcgugaaccacugug

SEQ ID NO: 293021 - RNA, 24 nt, Human
aagugcugggauuacaggcgugag

SEQ ID NO: 293022 - RNA, 32 nt, Human
aagugcugggauuacaggcgugagacacugcg

SEQ ID NO: 293023 - RNA, 32 nt, Human
aagugcugggauuacaggcgugagacaucgcg

SEQ ID NO: 293024 - RNA, 28 nt, Human
aagugcugggauuacaggcgugagccac

SEQ ID NO: 293025 - RNA, 32 nt, Human
aagugcugggauuacaggcgugagccacaaug

SEQ ID NO: 293026 - RNA, 32 nt, Human
aagugcugggauuacaggcgugagccacagcg

SEQ ID NO: 293027 - RNA, 32 nt, Human
aagugcugggauuacaggcgugagccacagug

SEQ ID NO: 293028 - RNA, 32 nt, Human
aagugcugggauuacaggcgugagccaccaca

SEQ ID NO: 293029 - RNA, 32 nt, Human
aagugcugggauuacaggcgugagccaccacc

SEQ ID NO: 293030 - RNA, 32 nt, Human
aagugcugggauuacaggcgugagccaccacg

SEQ ID NO: 293031 - RNA, 32 nt, Human
aagugcugggauuacaggcgugagccaccagc

SEQ ID NO: 293032 - RNA, 32 nt, Human
aagugcugggauuacaggcgugagccaccagg

SEQ ID NO: 293033 - RNA, 32 nt, Human
aagugcugggauuacaggcgugagccaccaua

SEQ ID NO: 293034 - RNA, 32 nt, Human
aagugcugggauuacaggcgugagccaccaug

SEQ ID NO: 293035 - RNA, 32 nt, Human
aagugcugggauuacaggcgugagccaccauu

SEQ ID NO: 293036 - RNA, 32 nt, Human
aagugcugggauuacaggcgugagccacccug

SEQ ID NO: 293037 - RNA, 32 nt, Human
aagugcugggauuacaggcgugagccaccgca

SEQ ID NO: 293038 - RNA, 32 nt, Human
aagugcugggauuacaggcgugagccaccgcc

SEQ ID NO: 293039 - RNA, 32 nt, Human
aagugcugggauuacaggcgugagccaccgcg

SEQ ID NO: 293040 - RNA, 32 nt, Human
aagugcugggauuacaggcgugagccaccgcu

SEQ ID NO: 293041 - RNA, 32 nt, Human
aagugcugggauuacaggcgugagccaccgug

SEQ ID NO: 293042 - RNA, 32 nt, Human
aagugcugggauuacaggcgugagccaccuca

SEQ ID NO: 293043 - RNA, 32 nt, Human
aagugcugggauuacaggcgugagccaccuug

SEQ ID NO: 293044 - RNA, 32 nt, Human
aagugcugggauuacaggcgugagccacggcg

SEQ ID NO: 293045 - RNA, 32 nt, Human
aagugcugggauuacaggcgugagccacuaca

SEQ ID NO: 293046 - RNA, 32 nt, Human
aagugcugggauuacaggcgugagccacucca

SEQ ID NO: 293047 - RNA, 32 nt, Human
aagugcugggauuacaggcgugagccacugag

SEQ ID NO: 293048 - RNA, 32 nt, Human
aagugcugggauuacaggcgugagccacugca

SEQ ID NO: 293049 - RNA, 32 nt, Human
aagugcugggauuacaggcgugagccacugcc

SEQ ID NO: 293050 - RNA, 32 nt, Human
aagugcugggauuacaggcgugagccacugcg

SEQ ID NO: 293051 - RNA, 32 nt, Human
aagugcugggauuacaggcgugagccacugcu

SEQ ID NO: 293052 - RNA, 32 nt, Human
aagugcugggauuacaggcgugagccacuggc

SEQ ID NO: 293053 - RNA, 32 nt, Human
aagugcugggauuacaggcgugagccacuggg

SEQ ID NO: 293054 - RNA, 32 nt, Human
aagugcugggauuacaggcgugagccacugug

SEQ ID NO: 293055 - RNA, 32 nt, Human
aagugcugggauuacaggcgugagccagugug

SEQ ID NO: 293056 - RNA, 32 nt, Human
aagugcugggauuacaggcgugagccaucgcu

SEQ ID NO: 293057 - RNA, 32 nt, Human
aagugcugggauuacaggcgugagccauggcg

SEQ ID NO: 293058 - RNA, 32 nt, Human
aagugcugggauuacaggcgugagccgaucgg

SEQ ID NO: 293059 - RNA, 32 nt, Human
aagugcugggauuacaggcgugagccgccgug

SEQ ID NO: 293060 - RNA, 32 nt, Human
aagugcugggauuacaggcgugagccgcugca

SEQ ID NO: 293061 - RNA, 32 nt, Human
aagugcugggauuacaggcgugagcuaccaag

SEQ ID NO: 293062 - RNA, 32 nt, Human
aagugcugggauuacaggcgugagcuaccacc

SEQ ID NO: 293063 - RNA, 32 nt, Human
aagugcugggauuacaggcgugagcuaccacg

SEQ ID NO: 293064 - RNA, 32 nt, Human
aagugcugggauuacaggcgugagcuaccgca

SEQ ID NO: 293065 - RNA, 32 nt, Human
aagugcugggauuacaggcgugagcuaccgcg

SEQ ID NO: 293066 - RNA, 32 nt, Human
aagugcugggauuacaggcgugagcuagaucu

SEQ ID NO: 293067 - RNA, 32 nt, Human
aagugcugggauuacaggcgugagcugugccu

SEQ ID NO: 293068 - RNA, 32 nt, Human
aagugcugggauuacaggcgugaggcaccgcg

SEQ ID NO: 293069 - RNA, 32 nt, Human
aagugcugggauuacaggcgugaggcaucaca

SEQ ID NO: 293070 - RNA, 32 nt, Human
aagugcugggauuacaggcgugagucacagcc

SEQ ID NO: 293071 - RNA, 32 nt, Human
aagugcugggauuacaggcgugagucaccaca

SEQ ID NO: 293072 - RNA, 32 nt, Human
aagugcugggauuacaggcgugagucaccgcg

SEQ ID NO: 293073 - RNA, 32 nt, Human
aagugcugggauuacaggcgugagucaccgug

SEQ ID NO: 293074 - RNA, 32 nt, Human
aagugcugggauuacaggcgugagucacugca

SEQ ID NO: 293075 - RNA, 32 nt, Human
aagugcugggauuacaggcgugagucacugcg

SEQ ID NO: 293076 - RNA, 32 nt, Human
aagugcugggauuacaggcgugauccaccaca

SEQ ID NO: 293077 - RNA, 32 nt, Human
aagugcugggauuacaggcgugaugcccgggc

SEQ ID NO: 293078 - RNA, 23 nt, Human
aagugcugggauuacaggcgugg

SEQ ID NO: 293079 - RNA, 32 nt, Human
aagugcugggauuacaggcguggccaccgcac

SEQ ID NO: 293080 - RNA, 32 nt, Human
aagugcugggauuacaggcguggccaccgcgc

SEQ ID NO: 293081 - RNA, 24 nt, Human
aagugcugggauuacaggcguggg

SEQ ID NO: 293082 - RNA, 32 nt, Human
aagugcugggauuacaggcgugggccacugcg

SEQ ID NO: 293083 - RNA, 32 nt, Human
aagugcugggauuacaggcgugggccgccgca

SEQ ID NO: 293084 - RNA, 32 nt, Human
aagugcugggauuacaggcgugugagccacca

SEQ ID NO: 293085 - RNA, 32 nt, Human
aagugcugggauuacaggcgugugccaccacc

SEQ ID NO: 293086 - RNA, 24 nt, Human
aagugcugggauuacaggcguuag

SEQ ID NO: 293087 - RNA, 32 nt, Human
aagugcugggauuacaggcguuagccacugcg

SEQ ID NO: 293088 - RNA, 22 nt, Human
aagugcugggauuacaggcugu

SEQ ID NO: 293089 - RNA, 32 nt, Human
aagugcugggauuacaggcuuaagccaccacg

SEQ ID NO: 293090 - RNA, 32 nt, Human
aagugcugggauuacaggcuuacgccaccaca

SEQ ID NO: 293091 - RNA, 32 nt, Human
aagugcugggauuacaggcuucagccaccaca

SEQ ID NO: 293092 - RNA, 23 nt, Human
aagugcugggauuacaggcuuga

SEQ ID NO: 293093 - RNA, 32 nt, Human
aagugcugggauuacaggcuugacccacugcg

SEQ ID NO: 293094 - RNA, 24 nt, Human
aagugcugggauuacaggcuugag

SEQ ID NO: 293095 - RNA, 32 nt, Human
aagugcugggauuacaggcuugagccaccaca

SEQ ID NO: 293096 - RNA, 32 nt, Human
aagugcugggauuacaggcuugagccaccacg

SEQ ID NO: 293097 - RNA, 32 nt, Human
aagugcugggauuacaggcuugagccaccgca

SEQ ID NO: 293098 - RNA, 32 nt, Human
aagugcugggauuacaggcuugagccaccgcg

SEQ ID NO: 293099 - RNA, 32 nt, Human
aagugcugggauuacaggcuugagccaccggg

SEQ ID NO: 293100 - RNA, 32 nt, Human
aagugcugggauuacaggcuugagccaccgug

SEQ ID NO: 293101 - RNA, 32 nt, Human
aagugcugggauuacaggcuugagccacugcu

SEQ ID NO: 293102 - RNA, 32 nt, Human
aagugcugggauuacaggcuugagccacugug

SEQ ID NO: 293103 - RNA, 32 nt, Human
aagugcugggauuacaggcuugagcuaccgcg

SEQ ID NO: 293104 - RNA, 24 nt, Human
aagugcugggauuacaggcuuggg

SEQ ID NO: 293105 - RNA, 32 nt, Human
aagugcugggauuacaggcuugggccaccgcg

SEQ ID NO: 293106 - RNA, 32 nt, Human
aagugcugggauuacagggauaagccaccaca

SEQ ID NO: 293107 - RNA, 24 nt, Human
aagugcugggauuacagggaugag

SEQ ID NO: 293108 - RNA, 32 nt, Human
aagugcugggauuacagggaugagccaccaug

SEQ ID NO: 293109 - RNA, 32 nt, Human
aagugcugggauuacagggaugagccaccgcg

SEQ ID NO: 293110 - RNA, 22 nt, Human
aagugcugggauuacaggggag

SEQ ID NO: 293111 - RNA, 32 nt, Human
aagugcugggauuacaggggagccacugcacu

SEQ ID NO: 293112 - RNA, 24 nt, Human
aagugcugggauuacaggggugag

SEQ ID NO: 293113 - RNA, 32 nt, Human
aagugcugggauuacaggggugagccaccacg

SEQ ID NO: 293114 - RNA, 32 nt, Human
aagugcugggauuacaggggugagccgcugug

SEQ ID NO: 293115 - RNA, 19 nt, Human
aagugcugggauuacaggu

SEQ ID NO: 293116 - RNA, 32 nt, Human
aagugcugggauuacagguacgagucaccaug

SEQ ID NO: 293117 - RNA, 32 nt, Human
aagugcugggauuacagguaucagccaccgug

SEQ ID NO: 293118 - RNA, 24 nt, Human
aagugcugggauuacagguaugag

SEQ ID NO: 293119 - RNA, 32 nt, Human
aagugcugggauuacagguaugagccacaacg

SEQ ID NO: 293120 - RNA, 32 nt, Human
aagugcugggauuacagguaugagccaccacg

SEQ ID NO: 293121 - RNA, 32 nt, Human
aagugcugggauuacagguaugagccaccgca

SEQ ID NO: 293122 - RNA, 20 nt, Human
aagugcugggauuacaggug

SEQ ID NO: 293123 - RNA, 24 nt, Human
aagugcugggauuacaggugcgag

SEQ ID NO: 293124 - RNA, 32 nt, Human
aagugcugggauuacaggugcgagccaccgug

SEQ ID NO: 293125 - RNA, 24 nt, Human
aagugcugggauuacaggugggag

SEQ ID NO: 293126 - RNA, 32 nt, Human
aagugcugggauuacaggugggagccacaaca

SEQ ID NO: 293127 - RNA, 32 nt, Human
aagugcugggauuacaggugggagccaccgca

SEQ ID NO: 293128 - RNA, 32 nt, Human
aagugcugggauuacaggugggagccacuaca

SEQ ID NO: 293129 - RNA, 21 nt, Human
aagugcugggauuacaggugu

SEQ ID NO: 293130 - RNA, 32 nt, Human
aagugcugggauuacagguguaagccaccccg

SEQ ID NO: 293131 - RNA, 32 nt, Human
aagugcugggauuacagguguaagccaccgca

SEQ ID NO: 293132 - RNA, 32 nt, Human
aagugcugggauuacagguguaagccaccgug

SEQ ID NO: 293133 - RNA, 32 nt, Human
aagugcugggauuacagguguaagccacugcg

SEQ ID NO: 293134 - RNA, 32 nt, Human
aagugcugggauuacagguguaagccacugug

SEQ ID NO: 293135 - RNA, 32 nt, Human
aagugcugggauuacagguguaagucacugua

SEQ ID NO: 293136 - RNA, 24 nt, Human
aagugcugggauuacaggugucag

SEQ ID NO: 293137 - RNA, 32 nt, Human
aagugcugggauuacaggugucagccaccacg

SEQ ID NO: 293138 - RNA, 32 nt, Human
aagugcugggauuacaggugucagccaccgca

SEQ ID NO: 293139 - RNA, 32 nt, Human
aagugcugggauuacaggugucagccacuaca

SEQ ID NO: 293140 - RNA, 22 nt, Human
aagugcugggauuacaggugug

SEQ ID NO: 293141 - RNA, 23 nt, Human
aagugcugggauuacagguguga

SEQ ID NO: 293142 - RNA, 32 nt, Human
aagugcugggauuacaggugugaaccaccaca

SEQ ID NO: 293143 - RNA, 32 nt, Human
aagugcugggauuacaggugugaaccacugcg

SEQ ID NO: 293144 - RNA, 32 nt, Human
aagugcugggauuacaggugugacccacugcg

SEQ ID NO: 293145 - RNA, 24 nt, Human
aagugcugggauuacaggugugag

SEQ ID NO: 293146 - RNA, 32 nt, Human
aagugcugggauuacaggugugagcaaccauu

SEQ ID NO: 293147 - RNA, 32 nt, Human
aagugcugggauuacaggugugagcauccagc

SEQ ID NO: 293148 - RNA, 32 nt, Human
aagugcugggauuacaggugugagccacagca

SEQ ID NO: 293149 - RNA, 32 nt, Human
aagugcugggauuacaggugugagccacagcg

SEQ ID NO: 293150 - RNA, 32 nt, Human
aagugcugggauuacaggugugagccacagug

SEQ ID NO: 293151 - RNA, 32 nt, Human
aagugcugggauuacaggugugagccaccaca

SEQ ID NO: 293152 - RNA, 32 nt, Human
aagugcugggauuacaggugugagccaccacg

SEQ ID NO: 293153 - RNA, 32 nt, Human
aagugcugggauuacaggugugagccaccagg

SEQ ID NO: 293154 - RNA, 32 nt, Human
aagugcugggauuacaggugugagccaccaug

SEQ ID NO: 293155 - RNA, 32 nt, Human
aagugcugggauuacaggugugagccaccgca

SEQ ID NO: 293156 - RNA, 32 nt, Human
aagugcugggauuacaggugugagccaccgcg

SEQ ID NO: 293157 - RNA, 32 nt, Human
aagugcugggauuacaggugugagccaccgug

SEQ ID NO: 293158 - RNA, 32 nt, Human
aagugcugggauuacaggugugagccaccucg

SEQ ID NO: 293159 - RNA, 32 nt, Human
aagugcugggauuacaggugugagccacggca

SEQ ID NO: 293160 - RNA, 32 nt, Human
aagugcugggauuacaggugugagccacuaca

SEQ ID NO: 293161 - RNA, 32 nt, Human
aagugcugggauuacaggugugagccacuaua

SEQ ID NO: 293162 - RNA, 32 nt, Human
aagugcugggauuacaggugugagccacuaug

SEQ ID NO: 293163 - RNA, 32 nt, Human
aagugcugggauuacaggugugagccacugag

SEQ ID NO: 293164 - RNA, 32 nt, Human
aagugcugggauuacaggugugagccacugca

SEQ ID NO: 293165 - RNA, 32 nt, Human
aagugcugggauuacaggugugagccacugcc

SEQ ID NO: 293166 - RNA, 32 nt, Human
aagugcugggauuacaggugugagccacugcg

SEQ ID NO: 293167 - RNA, 32 nt, Human
aagugcugggauuacaggugugagccacuggg

SEQ ID NO: 293168 - RNA, 32 nt, Human
aagugcugggauuacaggugugagccacugug

SEQ ID NO: 293169 - RNA, 32 nt, Human
aagugcugggauuacaggugugagccacuuca

SEQ ID NO: 293170 - RNA, 32 nt, Human
aagugcugggauuacaggugugagccaucaca

SEQ ID NO: 293171 - RNA, 32 nt, Human
aagugcugggauuacaggugugagccaucacg

SEQ ID NO: 293172 - RNA, 32 nt, Human
aagugcugggauuacaggugugagccauggca

SEQ ID NO: 293173 - RNA, 32 nt, Human
aagugcugggauuacaggugugagccgccaug

SEQ ID NO: 293174 - RNA, 32 nt, Human
aagugcugggauuacaggugugagccgcugcg

SEQ ID NO: 293175 - RNA, 32 nt, Human
aagugcugggauuacaggugugagccgcuggg

SEQ ID NO: 293176 - RNA, 32 nt, Human
aagugcugggauuacaggugugagccuccaca

SEQ ID NO: 293177 - RNA, 32 nt, Human
aagugcugggauuacaggugugagccuccaug

SEQ ID NO: 293178 - RNA, 32 nt, Human
aagugcugggauuacaggugugagcuaccgca

SEQ ID NO: 293179 - RNA, 32 nt, Human
aagugcugggauuacaggugugagcuaccgcg

SEQ ID NO: 293180 - RNA, 32 nt, Human
aagugcugggauuacaggugugagcuacugug

SEQ ID NO: 293181 - RNA, 32 nt, Human
aagugcugggauuacaggugugagcugccacg

SEQ ID NO: 293182 - RNA, 32 nt, Human
aagugcugggauuacaggugugagcugccgca

SEQ ID NO: 293183 - RNA, 32 nt, Human
aagugcugggauuacaggugugaggcaccgug

SEQ ID NO: 293184 - RNA, 32 nt, Human
aagugcugggauuacaggugugaggcacggug

SEQ ID NO: 293185 - RNA, 32 nt, Human
aagugcugggauuacaggugugagucaccaca

SEQ ID NO: 293186 - RNA, 32 nt, Human
aagugcugggauuacaggugugagucaccccg

SEQ ID NO: 293187 - RNA, 32 nt, Human
aagugcugggauuacaggugugagucaccgcg

SEQ ID NO: 293188 - RNA, 32 nt, Human
aagugcugggauuacaggugugagucaccgug

SEQ ID NO: 293189 - RNA, 32 nt, Human
aagugcugggauuacaggugugagucacugca

SEQ ID NO: 293190 - RNA, 32 nt, Human
aagugcugggauuacaggugugccaccgcgcc

SEQ ID NO: 293191 - RNA, 32 nt, Human
aagugcugggauuacaggugugcgccaccaug

SEQ ID NO: 293192 - RNA, 32 nt, Human
aagugcugggauuacagguguggccaccgcgc

SEQ ID NO: 293193 - RNA, 24 nt, Human
aagugcugggauuacagguguggg

SEQ ID NO: 293194 - RNA, 32 nt, Human
aagugcugggauuacaggugugggagccacca

SEQ ID NO: 293195 - RNA, 32 nt, Human
aagugcugggauuacagguguuccugauccaa

SEQ ID NO: 293196 - RNA, 32 nt, Human
aagugcugggauuacagguuugagccacugca

SEQ ID NO: 293197 - RNA, 24 nt, Human
aagugcugggauuacagucaugag

SEQ ID NO: 293198 - RNA, 32 nt, Human
aagugcugggauuacagucaugagccaccacu

SEQ ID NO: 293199 - RNA, 32 nt, Human
aagugcugggauuacagucaugagccaccaug

SEQ ID NO: 293200 - RNA, 32 nt, Human
aagugcugggauuacagucaugagucaccaug

SEQ ID NO: 293201 - RNA, 24 nt, Human
aagugcugggauuacagucgugag

SEQ ID NO: 293202 - RNA, 32 nt, Human
aagugcugggauuacagucgugagccacugua

SEQ ID NO: 293203 - RNA, 32 nt, Human
aagugcugggauuacagucuccgguaugucau

SEQ ID NO: 293204 - RNA, 32 nt, Human
aagugcugggauuacaguugcgagccaccgcg

SEQ ID NO: 293205 - RNA, 24 nt, Human
aagugcugggauuacaguugugag

SEQ ID NO: 293206 - RNA, 32 nt, Human
aagugcugggauuacaguugugagucacugug

SEQ ID NO: 293207 - RNA, 24 nt, Human
aagugcugggauuacaugcgugag

SEQ ID NO: 293208 - RNA, 24 nt, Human
aagugcugggauuaccggcaugag

SEQ ID NO: 293209 - RNA, 24 nt, Human
aagugcugggauuaccggcuugag

SEQ ID NO: 293210 - RNA, 23 nt, Human
aagugcugggauuaccgguauga

SEQ ID NO: 293211 - RNA, 24 nt, Human
aagugcugggauuacgagcgugag

SEQ ID NO: 293212 - RNA, 24 nt, Human
aagugcugggauuacggacgugag

SEQ ID NO: 293213 - RNA, 24 nt, Human
aagugcugggauuacgggcaugag

SEQ ID NO: 293214 - RNA, 24 nt, Human
aagugcugggauuacgggcgugag

SEQ ID NO: 293215 - RNA, 22 nt, Human
aagugcugggauuacuagacgu

SEQ ID NO: 293216 - RNA, 32 nt, Human
aagugcugggauuacuggcaggaaccaccagg

SEQ ID NO: 293217 - RNA, 24 nt, Human
aagugcugggauuacuggcaugag

SEQ ID NO: 293218 - RNA, 24 nt, Human
aagugcugggauuacuggcgugag

SEQ ID NO: 293219 - RNA, 24 nt, Human
aagugcugggauuagaagcgugag

SEQ ID NO: 293220 - RNA, 24 nt, Human
aagugcugggauuagaggcaugag

SEQ ID NO: 293221 - RNA, 24 nt, Human
aagugcugggauuagaggcgugag

SEQ ID NO: 293222 - RNA, 24 nt, Human
aagugcugggauuagaggcuugag

SEQ ID NO: 293223 - RNA, 21 nt, Human
aagugcugggauuaggcauga

SEQ ID NO: 293224 - RNA, 22 nt, Human
aagugcugggauuaggugugag

SEQ ID NO: 293225 - RNA, 22 nt, Human
aagugcugggauuauacguaug

SEQ ID NO: 293226 - RNA, 24 nt, Human
aagugcugggauuauagacaugag

SEQ ID NO: 293227 - RNA, 24 nt, Human
aagugcugggauuauagaugugag

SEQ ID NO: 293228 - RNA, 24 nt, Human
aagugcugggauuauagcugugag

SEQ ID NO: 293229 - RNA, 19 nt, Human
aagugcugggauuauaggc

SEQ ID NO: 293230 - RNA, 21 nt, Human
aagugcugggauuauaggcau

SEQ ID NO: 293231 - RNA, 23 nt, Human
aagugcugggauuauaggcauga

SEQ ID NO: 293232 - RNA, 24 nt, Human
aagugcugggauuauaggcaugag

SEQ ID NO: 293233 - RNA, 24 nt, Human
aagugcugggauuauaggccugag

SEQ ID NO: 293234 - RNA, 21 nt, Human
aagugcugggauuauaggcgu

SEQ ID NO: 293235 - RNA, 22 nt, Human
aagugcugggauuauaggcgug

SEQ ID NO: 293236 - RNA, 24 nt, Human
aagugcugggauuauaggcgugag

SEQ ID NO: 293237 - RNA, 24 nt, Human
aagugcugggauuauaggugugag

SEQ ID NO: 293238 - RNA, 28 nt, Human
aagugcugggauuaugggcgggugugag

SEQ ID NO: 293239 - RNA, 24 nt, Human
aagugcugggauuaugggcgugag

SEQ ID NO: 293240 - RNA, 23 nt, Human
aagugcugggauucaggugugag

SEQ ID NO: 293241 - RNA, 32 nt, Human
aagugcugggauucaggugugagccacugugc

SEQ ID NO: 293242 - RNA, 24 nt, Human
aagugcugggauuccagaugcgag

SEQ ID NO: 293243 - RNA, 32 nt, Human
aagugcugggauuccagaugcgagccaccgca

SEQ ID NO: 293244 - RNA, 24 nt, Human
aagugcugggauuccaggugugag

SEQ ID NO: 293245 - RNA, 32 nt, Human
aagugcugggauuccaggugugagccgcugcg

SEQ ID NO: 293246 - RNA, 24 nt, Human
aagugcugggauucugggugugag

SEQ ID NO: 293247 - RNA, 23 nt, Human
aagugcugggauugcagcgugag

SEQ ID NO: 293248 - RNA, 19 nt, Human
aagugcugggauugcaggc

SEQ ID NO: 293249 - RNA, 24 nt, Human
aagugcugggauugcaggcaugag

SEQ ID NO: 293250 - RNA, 24 nt, Human
aagugcugggauugcaggcgugag

SEQ ID NO: 293251 - RNA, 24 nt, Human
aagugcugggauugcaggggugag

SEQ ID NO: 293252 - RNA, 24 nt, Human
aagugcugggauugcaggugcgag

SEQ ID NO: 293253 - RNA, 32 nt, Human
aagugcugggauugcaggugcgagccaccggg

SEQ ID NO: 293254 - RNA, 23 nt, Human
aagugcugggauugcagguguga

SEQ ID NO: 293255 - RNA, 24 nt, Human
aagugcugggauugcaggugugag

SEQ ID NO: 293256 - RNA, 24 nt, Human
aagugcugggauugugggcaugag

SEQ ID NO: 293257 - RNA, 32 nt, Human
aagugcugggcuguggucgugcccugacagca

SEQ ID NO: 293258 - RNA, 24 nt, Human
aagugcugggcuuacaggccugag

SEQ ID NO: 293259 - RNA, 25 nt, Human
aagugcugggggcuacaggugugag

SEQ ID NO: 293260 - RNA, 24 nt, Human
aagugcugggguuacaggugugag

SEQ ID NO: 293261 - RNA, 32 nt, Human
aagugcugggguuacaggugugagccacugca

SEQ ID NO: 293262 - RNA, 32 nt, Human
aagugcugggguuacaggugugagccacugcg

SEQ ID NO: 293263 - RNA, 24 nt, Human
aagugcugggguuacagucaugag

SEQ ID NO: 293264 - RNA, 24 nt, Human
aagugcuggguuaacaggcaugag

SEQ ID NO: 293265 - RNA, 32 nt, Human
aagugcuggguuacaagcgugagccaccgugc

SEQ ID NO: 293266 - RNA, 24 nt, Human
aagugcuggguuuacaggcaugag

SEQ ID NO: 293267 - RNA, 24 nt, Human
aagugcuggguuuaccagcgugag

SEQ ID NO: 293268 - RNA, 23 nt, Human
aagugcugguauuacagauauga

SEQ ID NO: 293269 - RNA, 24 nt, Human
aagugcugguauuacagaugugag

SEQ ID NO: 293270 - RNA, 24 nt, Human
aagugcugguauuacaggcgugag

SEQ ID NO: 293271 - RNA, 22 nt, Human
aagugcuggugccaggccugag

SEQ ID NO: 293272 - RNA, 24 nt, Human
aagugcuguaauuacaggcaugag

SEQ ID NO: 293273 - RNA, 32 nt, Human
aagugcugugauuacagaugugagccacugca

SEQ ID NO: 293274 - RNA, 32 nt, Human
aagugcugugauuacaggccucagccaccaug

SEQ ID NO: 293275 - RNA, 32 nt, Human
aagugcugugauuacagggugugagccacugc

SEQ ID NO: 293276 - RNA, 23 nt, Human
aagugcugugauuacagguguga

SEQ ID NO: 293277 - RNA, 32 nt, Human
aagugcugugauuacaggugugaaccaccaug

SEQ ID NO: 293278 - RNA, 24 nt, Human
aagugcugugauuacaggugugag

SEQ ID NO: 293279 - RNA, 32 nt, Human
aagugcugugauuacaggugugagccacugca

SEQ ID NO: 293280 - RNA, 24 nt, Human
aagugcugugcauacaggcaugag

SEQ ID NO: 293281 - RNA, 32 nt, Human
aagugcuucaaaaggaagaguuguaggaccuu

SEQ ID NO: 293282 - RNA, 32 nt, Human
aagugcuucccugaugagcuguccucucugca

SEQ ID NO: 293283 - RNA, 32 nt, Human
aagugcuucccuuaagcuucugaagguuggcu

SEQ ID NO: 293284 - RNA, 32 nt, Human
aagugcuucgagcucaucaugagaugccaacg

SEQ ID NO: 293285 - RNA, 32 nt, Human
aagugcuucuaagucagaacagguucuccaag

SEQ ID NO: 293286 - RNA, 32 nt, Human
aagugcuucucccaccucagccucccaaguag

SEQ ID NO: 293287 - RNA, 32 nt, Human
aagugcuucucccuucuccaugaugugacuuc

SEQ ID NO: 293288 - RNA, 24 nt, Human
aagugcuugaauuacaggcgugag

SEQ ID NO: 293289 - RNA, 32 nt, Human
aagugcuugaauuuccuuuucauggaaccacc

SEQ ID NO: 293290 - RNA, 32 nt, Human
aagugcuuggaugacaggugcgagccacugca

SEQ ID NO: 293291 - RNA, 24 nt, Human
aagugcuuggauuacaggcaugag

SEQ ID NO: 293292 - RNA, 32 nt, Human
aagugcuuggauuacaggcaugagccaccgca

SEQ ID NO: 293293 - RNA, 21 nt, Human
aagugcuuggauuacaggugu

SEQ ID NO: 293294 - RNA, 32 nt, Human
aagugcuuggauuacagguguaagccaccgca

SEQ ID NO: 293295 - RNA, 24 nt, Human
aagugcuuggauuacaggugugag

SEQ ID NO: 293296 - RNA, 32 nt, Human
aagugcuuggauuacaggugugagccacugug

SEQ ID NO: 293297 - RNA, 32 nt, Human
aagugcuugguugggguggugagaugaugauu

SEQ ID NO: 293298 - RNA, 32 nt, Human
aagugcuuuacaugaugaugugaaaagcuguu

SEQ ID NO: 293299 - RNA, 32 nt, Human
aaguggaaacaugcugaaaucuauuaaaccau

SEQ ID NO: 293300 - RNA, 32 nt, Human
aaguggaaacuauucuaucauaacuacccaag

SEQ ID NO: 293301 - RNA, 32 nt, Human
aaguggaacuccccucuccacugauggcuggg

SEQ ID NO: 293302 - RNA, 32 nt, Human
aaguggaagcaacuaauucuggugcucaggcu

SEQ ID NO: 293303 - RNA, 32 nt, Human
aaguggaagcuauucuaucauaacuacccaag

SEQ ID NO: 293304 - RNA, 22 nt, Human
aaguggaauagugugcuaguua

SEQ ID NO: 293305 - RNA, 32 nt, Human
aaguggaaugugguugaagaaagugggccagg

SEQ ID NO: 293306 - RNA, 32 nt, Human
aaguggaauugcaacauauuucucagaaagau

SEQ ID NO: 293307 - RNA, 32 nt, Human
aaguggacagaggacuaaaaugaccaggcucu

SEQ ID NO: 293308 - RNA, 32 nt, Human
aaguggaccugugucugugucuguccugagaa

SEQ ID NO: 293309 - RNA, 32 nt, Human
aaguggaccuuuucuuucuucuugucccacgg

SEQ ID NO: 293310 - RNA, 31 nt, Human
aaguggacgauagaagaaaaagagcuguuug

SEQ ID NO: 293311 - RNA, 32 nt, Human
aaguggacuguucucaggcuugaccugcccca

SEQ ID NO: 293312 - RNA, 32 nt, Human
aaguggacuuugcaggaugcaacccuggugag

SEQ ID NO: 293313 - RNA, 32 nt, Human
aaguggagaaccugaaaaggaaccuggaaaga

SEQ ID NO: 293314 - RNA, 32 nt, Human
aaguggagagugacaugcaguuggauggcggu

SEQ ID NO: 293315 - RNA, 32 nt, Human
aaguggagaucugaauuuggagaggacauggg

SEQ ID NO: 293316 - RNA, 32 nt, Human
aaguggagccaucaucacaggguacgaaggga

SEQ ID NO: 293317 - RNA, 32 nt, Human
aaguggagcuaggaugggaggcguagccaacu

SEQ ID NO: 293318 - RNA, 32 nt, Human
aaguggaggaggaggaggagaaggaggagggc

SEQ ID NO: 293319 - RNA, 32 nt, Human
aaguggaggcugucugcauccaccuccccagc

SEQ ID NO: 293320 - RNA, 32 nt, Human
aaguggaguuuucaugaguuauaguaaauccc

SEQ ID NO: 293321 - RNA, 32 nt, Human
aaguggauaauagcguucagcagcacucaccu

SEQ ID NO: 293322 - RNA, 32 nt, Human
aaguggaucuuucugcaguggauccuugagau

SEQ ID NO: 293323 - RNA, 32 nt, Human
aaguggaugaagcacacacaucagcagcucag

SEQ ID NO: 293324 - RNA, 32 nt, Human
aaguggauggaaaugcugggagaaugggagac

SEQ ID NO: 293325 - RNA, 32 nt, Human
aaguggauuagaagcccagggaagaaagaacc

SEQ ID NO: 293326 - RNA, 32 nt, Human
aaguggauucacaagagauagaaacaaucaua

SEQ ID NO: 293327 - RNA, 32 nt, Human
aaguggauucgaguggaaggcgccaagucucc

SEQ ID NO: 293328 - RNA, 32 nt, Human
aaguggauuugcaggccagggagaaaaugucc

SEQ ID NO: 293329 - RNA, 32 nt, Human
aaguggcaaaggacacagcuagcaacgggcug

SEQ ID NO: 293330 - RNA, 32 nt, Human
aaguggcacguccuggagcugcagaggcgaac

SEQ ID NO: 293331 - RNA, 32 nt, Human
aaguggcagagccaggacuggagcuuagcccu

SEQ ID NO: 293332 - RNA, 32 nt, Human
aaguggcagccaucaguugcucuugcugaccc

SEQ ID NO: 293333 - RNA, 32 nt, Human
aaguggcagccuggccccugcugccggaccug

SEQ ID NO: 293334 - RNA, 32 nt, Human
aaguggcaggagcugagaaugccaguacgaga

SEQ ID NO: 293335 - RNA, 32 nt, Human
aaguggcagggggcggcugcagcugcugccuc

SEQ ID NO: 293336 - RNA, 32 nt, Human
aaguggcaguggcagagaauccaaacucaaca

SEQ ID NO: 293337 - RNA, 32 nt, Human
aaguggcaucuucucucccaccgggucuacac

SEQ ID NO: 293338 - RNA, 32 nt, Human
aaguggcauguuuuuguagcuuuuggaacaug

SEQ ID NO: 293339 - RNA, 32 nt, Human
aaguggccaccugaaaugacaacccugcuauc

SEQ ID NO: 293340 - RNA, 32 nt, Human
aaguggccagaagacaagagugugagccuucu

SEQ ID NO: 293341 - RNA, 32 nt, Human
aaguggccagggguguccuuccuccugggcaa

SEQ ID NO: 293342 - RNA, 32 nt, Human
aaguggccccagccaucuccucuagaccaagg

SEQ ID NO: 293343 - RNA, 32 nt, Human
aaguggccccuguucccaucucccgggccaga

SEQ ID NO: 293344 - RNA, 32 nt, Human
aaguggccuaucuaaaauucacagcccuuuua

SEQ ID NO: 293345 - RNA, 32 nt, Human
aaguggccugcaggggccacucucuacuggua

SEQ ID NO: 293346 - RNA, 32 nt, Human
aaguggccuguuggguggaggguggaaggucc

SEQ ID NO: 293347 - RNA, 31 nt, Human
aaguggcgaugauaguaccuaccucacucug

SEQ ID NO: 293348 - RNA, 32 nt, Human
aaguggcucuccccauuaccuucucaagaccu

SEQ ID NO: 293349 - RNA, 32 nt, Human
aaguggcugaguaaacagcgucagguggccuc

SEQ ID NO: 293350 - RNA, 32 nt, Human
aaguggcugcauggccauccuccagggcccag

SEQ ID NO: 293351 - RNA, 32 nt, Human
aaguggcuggaaggaccacagcuuuggaacug

SEQ ID NO: 293352 - RNA, 32 nt, Human
aaguggcuggcucauuuaagaugaggcuucug

SEQ ID NO: 293353 - RNA, 32 nt, Human
aaguggcuggcucugcagagugauggacagca

SEQ ID NO: 293354 - RNA, 19 nt, Human
aaguggcugggacugcagg

SEQ ID NO: 293355 - RNA, 21 nt, Human
aaguggcugggauuacaggcg

SEQ ID NO: 293356 - RNA, 25 nt, Human
aaguggcugggauugcaggcaugag

SEQ ID NO: 293357 - RNA, 32 nt, Human
aaguggcuguaucaguucaucgucccacaagc

SEQ ID NO: 293358 - RNA, 32 nt, Human
aaguggcuuaagggaagagucagucuauguuc

SEQ ID NO: 293359 - RNA, 32 nt, Human
aaguggcuucagagaugcagcccucagugcuu

SEQ ID NO: 293360 - RNA, 32 nt, Human
aaguggcuucucugugaauugccuguaacaca

SEQ ID NO: 293361 - RNA, 32 nt, Human
aaguggcuuguugagccagguacuuccuuagu

SEQ ID NO: 293362 - RNA, 32 nt, Human
aagugggaagagugagccaggcaagaaagaaa

SEQ ID NO: 293363 - RNA, 32 nt, Human
aagugggaagguuuugggggagggggaaauac

SEQ ID NO: 293364 - RNA, 32 nt, Human
aagugggacacugguuuuaccuccaggaaaca

SEQ ID NO: 293365 - RNA, 32 nt, Human
aagugggacuacaggcacgugccaccauacuc

SEQ ID NO: 293366 - RNA, 32 nt, Human
aagugggagagauaggaggagggaaugacaga

SEQ ID NO: 293367 - RNA, 32 nt, Human
aagugggagaggacugagagugaggcaaguuc

SEQ ID NO: 293368 - RNA, 32 nt, Human
aagugggagcacuaagggguggguggggaagu

SEQ ID NO: 293369 - RNA, 32 nt, Human
aagugggagcuucucccuuccuuccaucuucc

SEQ ID NO: 293370 - RNA, 32 nt, Human
aagugggaggaucgcuugagccugggaguuca

SEQ ID NO: 293371 - RNA, 32 nt, Human
aagugggagggagggggugacaagcacagccc

SEQ ID NO: 293372 - RNA, 32 nt, Human
aagugggagggaugugaugcuggagaaggcua

SEQ ID NO: 293373 - RNA, 32 nt, Human
aagugggaguuauauaauuggagagaaacaga

SEQ ID NO: 293374 - RNA, 32 nt, Human
aagugggaugauuagauauacacaacaccaag

SEQ ID NO: 293375 - RNA, 32 nt, Human
aagugggauuacaggcaccugucaccacgccu

SEQ ID NO: 293376 - RNA, 32 nt, Human
aagugggcaggagucggcaugugcccaucaga

SEQ ID NO: 293377 - RNA, 32 nt, Human
aagugggccagccuugcaccagccaggccaga

SEQ ID NO: 293378 - RNA, 32 nt, Human
aagugggcggcggagccagggucccuggaaug

SEQ ID NO: 293379 - RNA, 32 nt, Human
aagugggcugagaggugaaggaagaggaugag

SEQ ID NO: 293380 - RNA, 32 nt, Human
aagugggcugccgccgccucucuugggaccug

SEQ ID NO: 293381 - RNA, 32 nt, Human
aagugggcuggacuucagcugccuuucuaccc

SEQ ID NO: 293382 - RNA, 32 nt, Human
aaguggggaacucggaaggcugggcaguggag

SEQ ID NO: 293383 - RNA, 32 nt, Human
aaguggggaagcugggcagagagcagaggggg

SEQ ID NO: 293384 - RNA, 32 nt, Human
aaguggggacuggcccugguaccuggcuccag

SEQ ID NO: 293385 - RNA, 31 nt, Human
aaguggggacuucucccuacuugauuaaaga

SEQ ID NO: 293386 - RNA, 32 nt, Human
aaguggggagagugagccaggugagaaagaaa

SEQ ID NO: 293387 - RNA, 32 nt, Human
aaguggggaugagggagcagagucuagggcag

SEQ ID NO: 293388 - RNA, 32 nt, Human
aaguggggcagcagcaguggagagaugggaca

SEQ ID NO: 293389 - RNA, 32 nt, Human
aaguggggccuggauugugggccuugaacaug

SEQ ID NO: 293390 - RNA, 32 nt, Human
aaguggggcugggaccuggugggugaaccuga

SEQ ID NO: 293391 - RNA, 32 nt, Human
aagugggggaaucuuccugugcuucaaagagg

SEQ ID NO: 293392 - RNA, 32 nt, Human
aagugggggugaggagccugcggugcucccca

SEQ ID NO: 293393 - RNA, 32 nt, Human
aagugggggugagggccaaggggcuauuacug

SEQ ID NO: 293394 - RNA, 32 nt, Human
aagugggguguggucucucagcuguucugccc

SEQ ID NO: 293395 - RNA, 32 nt, Human
aaguggguccuuauguacacaccacguucaca

SEQ ID NO: 293396 - RNA, 32 nt, Human
aagugggucugagaacagucccugcccccaag

SEQ ID NO: 293397 - RNA, 22 nt, Human
aagugggugaaucaccugaggu

SEQ ID NO: 293398 - RNA, 32 nt, Human
aaguggguguccggggagagccuggccugcca

SEQ ID NO: 293399 - RNA, 32 nt, Human
aaguggguguuggccaggcacaucccaucuca

SEQ ID NO: 293400 - RNA, 32 nt, Human
aaguggguuccccaggcuuagagcaaaacccc

SEQ ID NO: 293401 - RNA, 32 nt, Human
aaguggguuuacuugaacuugaaggaaagaaa

SEQ ID NO: 293402 - RNA, 32 nt, Human
aaguggguuuaugucaccuucucaccuucuua

SEQ ID NO: 293403 - RNA, 32 nt, Human
aaguggguuuucuggauucaguagaacucggg

SEQ ID NO: 293404 - RNA, 32 nt, Human
aagugguacaaagacaacgcugagggguagug

SEQ ID NO: 293405 - RNA, 32 nt, Human
aagugguagcuggugugauaggugggccaagu

SEQ ID NO: 293406 - RNA, 32 nt, Human
aagugguaggauuacaggcgugagccacugca

SEQ ID NO: 293407 - RNA, 32 nt, Human
aagugguagguggccagcccuaccuccaaguu

SEQ ID NO: 293408 - RNA, 32 nt, Human
aagugguauuagccuagaauaucuaggaccca

SEQ ID NO: 293409 - RNA, 32 nt, Human
aagugguccaggaguccaaguaagcagucugg

SEQ ID NO: 293410 - RNA, 32 nt, Human
aagugguccaguuuuauaaauggucuuuauuu

SEQ ID NO: 293411 - RNA, 32 nt, Human
aaguggucccuuagggcugaaggacuucagac

SEQ ID NO: 293412 - RNA, 32 nt, Human
aaguggucuguacugcuuucauccuugccacu

SEQ ID NO: 293413 - RNA, 32 nt, Human
aaguggugaaaaguacaucccaccucauguga

SEQ ID NO: 293414 - RNA, 32 nt, Human
aaguggugaucuguuacagucacuauucaacu

SEQ ID NO: 293415 - RNA, 24 nt, Human
aaguggugggaucacaggcgugag

SEQ ID NO: 293416 - RNA, 24 nt, Human
aaguggugggauuacaagcaugag

SEQ ID NO: 293417 - RNA, 32 nt, Human
aaguggugggauuacagacgugagccacugca

SEQ ID NO: 293418 - RNA, 24 nt, Human
aaguggugggauuacaggugugag

SEQ ID NO: 293419 - RNA, 32 nt, Human
aaguggugggauuacaggugugagccaccgcg

SEQ ID NO: 293420 - RNA, 32 nt, Human
aaguggugggcgauccacugagcaaagccgaa

SEQ ID NO: 293421 - RNA, 32 nt, Human
aaguggugucugccagauuuccccgcuguaaa

SEQ ID NO: 293422 - RNA, 32 nt, Human
aaguggugugguggaggaggauaaaaagggcc

SEQ ID NO: 293423 - RNA, 32 nt, Human
aagugguuacuaggcagcuugcagugauuucu

SEQ ID NO: 293424 - RNA, 32 nt, Human
aagugguucuuagauggugaucugggauuagg

SEQ ID NO: 293425 - RNA, 31 nt, Human
aagugguucuuagcaaagguuggaggugucu

SEQ ID NO: 293426 - RNA, 32 nt, Human
aagugguugaaggaagcaaauaauggaauugu

SEQ ID NO: 293427 - RNA, 32 nt, Human
aagugguugccuggacaccccacgggaggagu

SEQ ID NO: 293428 - RNA, 32 nt, Human
aagugguuuggaggggauugggggauaguggg

SEQ ID NO: 293429 - RNA, 32 nt, Human
aagugguuuuuccaaaucgcacaauggcaaag

SEQ ID NO: 293430 - RNA, 32 nt, Human
aaguguaacuguccuuccucugugccaggaaa

SEQ ID NO: 293431 - RNA, 32 nt, Human
aaguguacacacacagagccacaccgucccuc

SEQ ID NO: 293432 - RNA, 32 nt, Human
aaguguaccuucaccugcuccagugaugagag

SEQ ID NO: 293433 - RNA, 32 nt, Human
aaguguagaagagggagagagaagcaggagag

SEQ ID NO: 293434 - RNA, 32 nt, Human
aaguguagccccggagagguaacugaggacau

SEQ ID NO: 293435 - RNA, 32 nt, Human
aaguguaggauagaauuguuuuuagcauucua

SEQ ID NO: 293436 - RNA, 32 nt, Human
aaguguagggauuacaggcgugagccacugug

SEQ ID NO: 293437 - RNA, 32 nt, Human
aaguguaguccccaaaaacagguggaagaggg

SEQ ID NO: 293438 - RNA, 32 nt, Human
aaguguagucuacaaaccuccuauaccagaau

SEQ ID NO: 293439 - RNA, 32 nt, Human
aaguguauguaacuugcuuuaaauccauuaug

SEQ ID NO: 293440 - RNA, 32 nt, Human
aaguguaugugaccaucauuucccaggccauu

SEQ ID NO: 293441 - RNA, 32 nt, Human
aagugucaacucccagugaaagaaugaugaac

SEQ ID NO: 293442 - RNA, 32 nt, Human
aagugucacucuuccuccuuuucuacuuucag

SEQ ID NO: 293443 - RNA, 32 nt, Human
aagugucagcucauuguuuucgucucccacuu

SEQ ID NO: 293444 - RNA, 32 nt, Human
aagugucaggagauguuccuccccuccacaau

SEQ ID NO: 293445 - RNA, 32 nt, Human
aagugucaucuaugacaaaaccacagccaaca

SEQ ID NO: 293446 - RNA, 32 nt, Human
aagugucaucuucugcccucccugucccaaua

SEQ ID NO: 293447 - RNA, 32 nt, Human
aaguguccaccaggggugguuugggggcgcuc

SEQ ID NO: 293448 - RNA, 32 nt, Human
aaguguccagaagaaggccauggacagaacgg

SEQ ID NO: 293449 - RNA, 32 nt, Human
aaguguccccaucucacugccaaaaaugaaag

SEQ ID NO: 293450 - RNA, 32 nt, Human
aagugucccuuucccuuuugccuggauuucca

SEQ ID NO: 293451 - RNA, 32 nt, Human
aagugucccuuuccuauguaugcauuuccuuu

SEQ ID NO: 293452 - RNA, 32 nt, Human
aaguguccugcaggcuguaaugcaguuuaauc

SEQ ID NO: 293453 - RNA, 32 nt, Human
aagugucggucaaacugugacacugccacacc

SEQ ID NO: 293454 - RNA, 32 nt, Human
aagugucuagcacauacuacaucuaagaggcu

SEQ ID NO: 293455 - RNA, 32 nt, Human
aagugucuauaagcucaucacagccuagaguu

SEQ ID NO: 293456 - RNA, 31 nt, Human
aagugucucaauaaaaucuuaaaugaauaaa

SEQ ID NO: 293457 - RNA, 32 nt, Human
aagugucugagagugugacccucuccuguaaa

SEQ ID NO: 293458 - RNA, 32 nt, Human
aagugucugagccugugaauccagagcucagu

SEQ ID NO: 293459 - RNA, 32 nt, Human
aagugucugcagauggcacugccugggcacca

SEQ ID NO: 293460 - RNA, 20 nt, Human
aagugucugggauuacaggc

SEQ ID NO: 293461 - RNA, 22 nt, Human
aagugucugggauuacaggcau

SEQ ID NO: 293462 - RNA, 32 nt, Human
aagugucuggugucuugucacugccuugcaua

SEQ ID NO: 293463 - RNA, 32 nt, Human
aagugucuuaguucauucaggcugccauaaca

SEQ ID NO: 293464 - RNA, 32 nt, Human
aagugugaacccaggaggcggagcuugcagug

SEQ ID NO: 293465 - RNA, 32 nt, Human
aagugugaaggugaaugagguaagggagauca

SEQ ID NO: 293466 - RNA, 32 nt, Human
aagugugacaguuccagcggaucagagggaga

SEQ ID NO: 293467 - RNA, 32 nt, Human
aagugugacugagcagugugcagagagugugg

SEQ ID NO: 293468 - RNA, 31 nt, Human
aagugugagaccagcccagccaacauggucc

SEQ ID NO: 293469 - RNA, 32 nt, Human
aagugugagaggacgagagggagguggcuccc

SEQ ID NO: 293470 - RNA, 32 nt, Human
aagugugauaaauaaacuuacagacacugaau

SEQ ID NO: 293471 - RNA, 32 nt, Human
aagugugauaaauauuuuuaaauaaaaacuua

SEQ ID NO: 293472 - RNA, 32 nt, Human
aagugugccagccucuuugcuggucucccugc

SEQ ID NO: 293473 - RNA, 32 nt, Human
aagugugccuggcuaauuuuuauguuuuuagu

SEQ ID NO: 293474 - RNA, 32 nt, Human
aagugugccuggcugguuugcagauauuuguu

SEQ ID NO: 293475 - RNA, 32 nt, Human
aaguguggaccauggcgggaccccaaggacac

SEQ ID NO: 293476 - RNA, 32 nt, Human
aaguguggauccuuuggguggcagucagggga

SEQ ID NO: 293477 - RNA, 32 nt, Human
aaguguggccacuuccucuugccuguccugac

SEQ ID NO: 293478 - RNA, 32 nt, Human
aaguguggcccacagaccaagagccucaacau

SEQ ID NO: 293479 - RNA, 32 nt, Human
aaguguggcuguaggccuuuguuuuccaaugg

SEQ ID NO: 293480 - RNA, 32 nt, Human
aagugugggaaaugcugcuuuucaucaagucc

SEQ ID NO: 293481 - RNA, 32 nt, Human
aagugugggauuauagugugagccaccgcguc

SEQ ID NO: 293482 - RNA, 32 nt, Human
aagugugggcagaagcagugaagguucuucuc

SEQ ID NO: 293483 - RNA, 32 nt, Human
aaguguggggauggagaggauggugcauuucc

SEQ ID NO: 293484 - RNA, 24 nt, Human
aaguguggggauuacaggugcgag

SEQ ID NO: 293485 - RNA, 32 nt, Human
aaguguggggauuacaggugcgagcuacugcu

SEQ ID NO: 293486 - RNA, 32 nt, Human
aagugugggggaaagggugguuucuugcugga

SEQ ID NO: 293487 - RNA, 32 nt, Human
aagugugguagagugugccugaagucccagau

SEQ ID NO: 293488 - RNA, 32 nt, Human
aagugugguagauacagugaaauucuguacag

SEQ ID NO: 293489 - RNA, 32 nt, Human
aaguguggugcaagccgggggucuccacaucu

SEQ ID NO: 293490 - RNA, 32 nt, Human
aagugugguguuugguuugccuggagaugcca

SEQ ID NO: 293491 - RNA, 32 nt, Human
aagugugguuuuccuaacugucugacuuauaa

SEQ ID NO: 293492 - RNA, 32 nt, Human
aagugugucaacuccauuguuguccucaaugg

SEQ ID NO: 293493 - RNA, 23 nt, Human
aaguguguggaucucaaagggug

SEQ ID NO: 293494 - RNA, 32 nt, Human
aaguguguggcagaagaauuagucaaagaaau

SEQ ID NO: 293495 - RNA, 25 nt, Human
aaguguguggcugggcggauucagc

SEQ ID NO: 293496 - RNA, 20 nt, Human
aaguguguggucccaaguug

SEQ ID NO: 293497 - RNA, 32 nt, Human
aaguguuaaacgacugaaauauacaaacaguc

SEQ ID NO: 293498 - RNA, 32 nt, Human
aaguguuaaggagaacaaaaauucaguauuau

SEQ ID NO: 293499 - RNA, 32 nt, Human
aaguguuacuggugccuggaacugaggggagu

SEQ ID NO: 293500 - RNA, 24 nt, Human
aaguguuaggauuacaggcaugag

SEQ ID NO: 293501 - RNA, 24 nt, Human
aaguguuaggauuacaggcgugag

SEQ ID NO: 293502 - RNA, 32 nt, Human
aaguguuaggauuacaggcgugagccaccgcg

SEQ ID NO: 293503 - RNA, 24 nt, Human
aaguguuaggauuauaggcgugag

SEQ ID NO: 293504 - RNA, 32 nt, Human
aaguguuaguagcugggauuacaaaagcaugu

SEQ ID NO: 293505 - RNA, 32 nt, Human
aaguguuaguccuuccugauuggaagccuucu

SEQ ID NO: 293506 - RNA, 32 nt, Human
aaguguuaugaacaucugauugguauuuguca

SEQ ID NO: 293507 - RNA, 32 nt, Human
aaguguuauuccauccuguaauccuagcacuu

SEQ ID NO: 293508 - RNA, 32 nt, Human
aaguguucaagccuguuguguucccaaaucug

SEQ ID NO: 293509 - RNA, 24 nt, Human
aaguguucagauuacaggugugag

SEQ ID NO: 293510 - RNA, 32 nt, Human
aaguguuccaacaaaaugagcgagugaaccaa

SEQ ID NO: 293511 - RNA, 32 nt, Human
aaguguucccacuagaacugaccuaagccacu

SEQ ID NO: 293512 - RNA, 32 nt, Human
aaguguuccuuaguucccgugugaaagcagag

SEQ ID NO: 293513 - RNA, 24 nt, Human
aaguguucggauuacaaacgugag

SEQ ID NO: 293514 - RNA, 32 nt, Human
aaguguucuagcucgaguggaagaacucauug

SEQ ID NO: 293515 - RNA, 32 nt, Human
aaguguucuauuuuguaaaucauuccauuuga

SEQ ID NO: 293516 - RNA, 32 nt, Human
aaguguucucagagugauguuuuaauccaguc

SEQ ID NO: 293517 - RNA, 32 nt, Human
aaguguucucggggaugcauagauucaucauu

SEQ ID NO: 293518 - RNA, 32 nt, Human
aaguguucucugcuggcucuuuccugccacug

SEQ ID NO: 293519 - RNA, 32 nt, Human
aaguguucugcuguguuucaggaucaggggga

SEQ ID NO: 293520 - RNA, 24 nt, Human
aaguguugagacuacaggcaugag

SEQ ID NO: 293521 - RNA, 24 nt, Human
aaguguugagaucacaggcgugag

SEQ ID NO: 293522 - RNA, 32 nt, Human
aaguguugagaucacaggcgugagccacugca

SEQ ID NO: 293523 - RNA, 24 nt, Human
aaguguugagauuacaggcaugag

SEQ ID NO: 293524 - RNA, 32 nt, Human
aaguguugagauuacaggcaugagccacugug

SEQ ID NO: 293525 - RNA, 24 nt, Human
aaguguugagauuacaggcgugag

SEQ ID NO: 293526 - RNA, 32 nt, Human
aaguguugcuggaucucugccugccagggaag

SEQ ID NO: 293527 - RNA, 32 nt, Human
aaguguuggaaaaucaaaagaggcucacucaa

SEQ ID NO: 293528 - RNA, 24 nt, Human
aaguguuggaauuacaggcgugag

SEQ ID NO: 293529 - RNA, 24 nt, Human
aaguguuggaguuacaggcaugag

SEQ ID NO: 293530 - RNA, 32 nt, Human
aaguguuggauuacaggugugagccaccacac

SEQ ID NO: 293531 - RNA, 24 nt, Human
aaguguugggauaacaggcaugag

SEQ ID NO: 293532 - RNA, 32 nt, Human
aaguguugggaucacaggcgugagccaccaca

SEQ ID NO: 293533 - RNA, 32 nt, Human
aaguguugggaucacaggcgugagccaccgca

SEQ ID NO: 293534 - RNA, 32 nt, Human
aaguguugggauuacagacauuagccaucacg

SEQ ID NO: 293535 - RNA, 32 nt, Human
aaguguugggauuacagccgugagccaccacg

SEQ ID NO: 293536 - RNA, 19 nt, Human
aaguguugggauuacaggc

SEQ ID NO: 293537 - RNA, 32 nt, Human
aaguguugggauuacaggcaagagccaacacg

SEQ ID NO: 293538 - RNA, 32 nt, Human
aaguguugggauuacaggcaaugagccaccac

SEQ ID NO: 293539 - RNA, 24 nt, Human
aaguguugggauuacaggcacgag

SEQ ID NO: 293540 - RNA, 32 nt, Human
aaguguugggauuacaggcacgagccacugug

SEQ ID NO: 293541 - RNA, 32 nt, Human
aaguguugggauuacaggcauaagccauugug

SEQ ID NO: 293542 - RNA, 23 nt, Human
aaguguugggauuacaggcauga

SEQ ID NO: 293543 - RNA, 32 nt, Human
aaguguugggauuacaggcaugaaucaccaug

SEQ ID NO: 293544 - RNA, 24 nt, Human
aaguguugggauuacaggcaugag

SEQ ID NO: 293545 - RNA, 32 nt, Human
aaguguugggauuacaggcaugagacacugcc

SEQ ID NO: 293546 - RNA, 32 nt, Human
aaguguugggauuacaggcaugagccaccacu

SEQ ID NO: 293547 - RNA, 32 nt, Human
aaguguugggauuacaggcaugagccaccaug

SEQ ID NO: 293548 - RNA, 32 nt, Human
aaguguugggauuacaggcaugagccaccgca

SEQ ID NO: 293549 - RNA, 32 nt, Human
aaguguugggauuacaggcaugagccaccuga

SEQ ID NO: 293550 - RNA, 32 nt, Human
aaguguugggauuacaggcaugagccacugcg

SEQ ID NO: 293551 - RNA, 32 nt, Human
aaguguugggauuacaggcaugagccacugug

SEQ ID NO: 293552 - RNA, 32 nt, Human
aaguguugggauuacaggcaugagcuacuaca

SEQ ID NO: 293553 - RNA, 21 nt, Human
aaguguugggauuacaggcgu

SEQ ID NO: 293554 - RNA, 24 nt, Human
aaguguugggauuacaggcgugag

SEQ ID NO: 293555 - RNA, 32 nt, Human
aaguguugggauuacaggcgugagccaccgca

SEQ ID NO: 293556 - RNA, 32 nt, Human
aaguguugggauuacaggcgugagccaccgcg

SEQ ID NO: 293557 - RNA, 32 nt, Human
aaguguugggauuacaggcgugagccaccuca

SEQ ID NO: 293558 - RNA, 32 nt, Human
aaguguugggauuacaggcgugagccacugca

SEQ ID NO: 293559 - RNA, 32 nt, Human
aaguguugggauuacaggcgugagccacugcc

SEQ ID NO: 293560 - RNA, 32 nt, Human
aaguguugggauuacaggcgugagccacugcg

SEQ ID NO: 293561 - RNA, 32 nt, Human
aaguguugggauuacaggcgugagccacugug

SEQ ID NO: 293562 - RNA, 32 nt, Human
aaguguugggauuacaggcgugagccauggug

SEQ ID NO: 293563 - RNA, 32 nt, Human
aaguguugggauuacaggcgugagccauugcg

SEQ ID NO: 293564 - RNA, 32 nt, Human
aaguguugggauuacaggcgugagucaccgcg

SEQ ID NO: 293565 - RNA, 32 nt, Human
aaguguugggauuacaggcgugagucacugug

SEQ ID NO: 293566 - RNA, 24 nt, Human
aaguguugggauuacaggcuugag

SEQ ID NO: 293567 - RNA, 32 nt, Human
aaguguugggauuacaggcuugagccaccgca

SEQ ID NO: 293568 - RNA, 32 nt, Human
aaguguugggauuacaggcuugagccaccgug

SEQ ID NO: 293569 - RNA, 23 nt, Human
aaguguugggauuacagguguga

SEQ ID NO: 293570 - RNA, 32 nt, Human
aaguguugggauuacaggugugaaccacugug

SEQ ID NO: 293571 - RNA, 24 nt, Human
aaguguugggauuacaggugugag

SEQ ID NO: 293572 - RNA, 32 nt, Human
aaguguugggauuacaggugugagccacagca

SEQ ID NO: 293573 - RNA, 32 nt, Human
aaguguugggauuacaggugugagccaccacg

SEQ ID NO: 293574 - RNA, 32 nt, Human
aaguguugggauuacaggugugagccaccgug

SEQ ID NO: 293575 - RNA, 32 nt, Human
aaguguugggauuacaggugugagccacugug

SEQ ID NO: 293576 - RNA, 32 nt, Human
aaguguugggauuacaggugugugucacugug

SEQ ID NO: 293577 - RNA, 24 nt, Human
aaguguugggauuauaagcgugag

SEQ ID NO: 293578 - RNA, 24 nt, Human
aaguguugggauuauaggcaugag

SEQ ID NO: 293579 - RNA, 24 nt, Human
aaguguugggauuauaggcgugag

SEQ ID NO: 293580 - RNA, 24 nt, Human
aaguguugggauugcaggcaugag

SEQ ID NO: 293581 - RNA, 24 nt, Human
aaguguugggauugcaggcgugag

SEQ ID NO: 293582 - RNA, 32 nt, Human
aaguguugugauuacaggcgugagccaccaca

SEQ ID NO: 293583 - RNA, 32 nt, Human
aaguguuucauuuuguggccuacugcucgggg

SEQ ID NO: 293584 - RNA, 32 nt, Human
aaguguuuccggcuaauuuuuguauuuuuagu

SEQ ID NO: 293585 - RNA, 32 nt, Human
aaguguuugagaccagccugagcaacauauca

SEQ ID NO: 293586 - RNA, 32 nt, Human
aaguguuuguaaucccagcacuuugggaggcc

SEQ ID NO: 293587 - RNA, 32 nt, Human
aaguguuuucuuuccauuuccuguuggacagg

SEQ ID NO: 293588 - RNA, 32 nt, Human
aaguguuuugacuaacagagcuggaggucaag

SEQ ID NO: 293589 - RNA, 21 nt, Human
aaguguuuuuguuuuguuuug

SEQ ID NO: 293590 - RNA, 32 nt, Human
aaguuaaaagagagugggucucugugccucuc

SEQ ID NO: 293591 - RNA, 32 nt, Human
aaguuaaaagagagugggucucuguggcucuc

SEQ ID NO: 293592 - RNA, 32 nt, Human
aaguuaaacaccuuguagaaagccuacuuuca

SEQ ID NO: 293593 - RNA, 32 nt, Human
aaguuaaacuuuacugaauuucaguacauuag

SEQ ID NO: 293594 - RNA, 32 nt, Human
aaguuaaagagguuuugcuggccagguauggu

SEQ ID NO: 293595 - RNA, 32 nt, Human
aaguuaacaguggauaaaagacuuuucuguaa

SEQ ID NO: 293596 - RNA, 32 nt, Human
aaguuaaccaagucuguaucugcuccccacau

SEQ ID NO: 293597 - RNA, 32 nt, Human
aaguuaacucuagcccagcccagaucaacucc

SEQ ID NO: 293598 - RNA, 32 nt, Human
aaguuaacucuagcccugaccucuauugaucu

SEQ ID NO: 293599 - RNA, 32 nt, Human
aaguuaagacuugcuugucaguggucauggcu

SEQ ID NO: 293600 - RNA, 32 nt, Human
aaguuaaggaacuagggaaaagagauggaaau

SEQ ID NO: 293601 - RNA, 24 nt, Human
aaguuaaguaaugacacucagaga

SEQ ID NO: 293602 - RNA, 32 nt, Human
aaguuaaguaucucaauuuuucauauugagua

SEQ ID NO: 293603 - RNA, 32 nt, Human
aaguuaauccaucaauccuuaguagaauccag

SEQ ID NO: 293604 - RNA, 32 nt, Human
aaguuaauuaauucaguccaaaaugaaauuau

SEQ ID NO: 293605 - RNA, 32 nt, Human
aaguuaauucaggccuuccuuuugaccacugc

SEQ ID NO: 293606 - RNA, 32 nt, Human
aaguuaauugcuauguggaaagaaggucaaag

SEQ ID NO: 293607 - RNA, 22 nt, Human
aaguuaauuuuaaucucacagu

SEQ ID NO: 293608 - RNA, 31 nt, Human
aaguuacaaguguccaagccagaaccugaug

SEQ ID NO: 293609 - RNA, 31 nt, Human
aaguuacaccaacagaauaccaagcagaaug

SEQ ID NO: 293610 - RNA, 32 nt, Human
aaguuacaggcagagugggacugagaugguac

SEQ ID NO: 293611 - RNA, 32 nt, Human
aaguuacaguaccuuuguggcuucauuggaua

SEQ ID NO: 293612 - RNA, 32 nt, Human
aaguuaccucaccuaauuuuugcuucucagga

SEQ ID NO: 293613 - RNA, 32 nt, Human
aaguuaccucuaaacccuccagcauggccauc

SEQ ID NO: 293614 - RNA, 32 nt, Human
aaguuacgaggaaaauaaaaagacugauguca

SEQ ID NO: 293615 - RNA, 32 nt, Human
aaguuacuaucaaaugccagugagaaucuucu

SEQ ID NO: 293616 - RNA, 32 nt, Human
aaguuacuucaccucugagccuaaguuuccac

SEQ ID NO: 293617 - RNA, 32 nt, Human
aaguuacuuccuguucaauaaauuuaacuuuu

SEQ ID NO: 293618 - RNA, 32 nt, Human
aaguuagaaaacugaauagcaacacugaauac

SEQ ID NO: 293619 - RNA, 32 nt, Human
aaguuagaauccaagucauuguuuccaagaaa

SEQ ID NO: 293620 - RNA, 32 nt, Human
aaguuagagcacgucgccacagagcuugacau

SEQ ID NO: 293621 - RNA, 32 nt, Human
aaguuagagugagggaaaugagcuuggcuucu

SEQ ID NO: 293622 - RNA, 32 nt, Human
aaguuagaucccacagucaucaaguuucagau

SEQ ID NO: 293623 - RNA, 32 nt, Human
aaguuagcauccuuuucccuuucuuacaaguu

SEQ ID NO: 293624 - RNA, 32 nt, Human
aaguuagccucaucauuuugugcugcuccaac

SEQ ID NO: 293625 - RNA, 32 nt, Human
aaguuaggaccagccaauggagagacacauaa

SEQ ID NO: 293626 - RNA, 32 nt, Human
aaguuaggcaucaccaguguuugccucugugc

SEQ ID NO: 293627 - RNA, 32 nt, Human
aaguuaggcuaugccuacaaaggucuuaaaaa

SEQ ID NO: 293628 - RNA, 32 nt, Human
aaguuagggaaccauauuugagacuuucaaaa

SEQ ID NO: 293629 - RNA, 32 nt, Human
aaguuagggagagaucagaggucauacuguga

SEQ ID NO: 293630 - RNA, 32 nt, Human
aaguuaggggugaaaauguuccaucaucacac

SEQ ID NO: 293631 - RNA, 32 nt, Human
aaguuaggguagaaaacaaaaagggaguggau

SEQ ID NO: 293632 - RNA, 32 nt, Human
aaguuaguuagaucacucccagaagagaccag

SEQ ID NO: 293633 - RNA, 32 nt, Human
aaguuauaacauggcugaaaagaaagauuaaa

SEQ ID NO: 293634 - RNA, 32 nt, Human
aaguuauaacucaggaucugaggucucaagcu

SEQ ID NO: 293635 - RNA, 32 nt, Human
aaguuauauaaagagaaaauugaauuuaacaa

SEQ ID NO: 293636 - RNA, 32 nt, Human
aaguuauauuuggcucuuaucaccgcaaaagg

SEQ ID NO: 293637 - RNA, 32 nt, Human
aaguuaucauuuccucagucuuuucuuuugua

SEQ ID NO: 293638 - RNA, 32 nt, Human
aaguuauccaagucacugaaagccugagacuc

SEQ ID NO: 293639 - RNA, 32 nt, Human
aaguuauccuuacuccaucugugaaagaaguu

SEQ ID NO: 293640 - RNA, 32 nt, Human
aaguuaucuuuauaaucacuguaguuagaugu

SEQ ID NO: 293641 - RNA, 32 nt, Human
aaguuaugcagcuguucugguuccuccuggua

SEQ ID NO: 293642 - RNA, 32 nt, Human
aaguuauuaaaccaaacuccuguccaauuuga

SEQ ID NO: 293643 - RNA, 32 nt, Human
aaguuauugauuccaaagaacuccaccaggaa

SEQ ID NO: 293644 - RNA, 32 nt, Human
aaguuauuugagacagagucucgcucugucac

SEQ ID NO: 293645 - RNA, 32 nt, Human
aaguucaaauauacuuguuaauaaaaggauua

SEQ ID NO: 293646 - RNA, 32 nt, Human
aaguucaaccacugcacuccacuaagcaacug

SEQ ID NO: 293647 - RNA, 32 nt, Human
aaguucaaccccuaacaggucuucuaugccuu

SEQ ID NO: 293648 - RNA, 21 nt, Human
aaguucaaguucaaagcuguu

SEQ ID NO: 293649 - RNA, 32 nt, Human
aaguucaauaaaccagcuuagccacaaagaaa

SEQ ID NO: 293650 - RNA, 32 nt, Human
aaguucacaccacugccauuuccuccugggca

SEQ ID NO: 293651 - RNA, 32 nt, Human
aaguucacacugcaggcaggcuuuagagugcu

SEQ ID NO: 293652 - RNA, 32 nt, Human
aaguucacagggugccugggcugcauuugaau

SEQ ID NO: 293653 - RNA, 32 nt, Human
aaguucagaagagagcgcagcgacuacgaccg

SEQ ID NO: 293654 - RNA, 32 nt, Human
aaguucagauuuuucccuccaguugguuuaau

SEQ ID NO: 293655 - RNA, 32 nt, Human
aaguucagcccagcuauggcccaggagaagac

SEQ ID NO: 293656 - RNA, 32 nt, Human
aaguucagccucccggguggcugggauuguag

SEQ ID NO: 293657 - RNA, 24 nt, Human
aaguucagggauuacaggcaugag

SEQ ID NO: 293658 - RNA, 32 nt, Human
aaguucagggauuacaggcaugagccaccaug

SEQ ID NO: 293659 - RNA, 32 nt, Human
aaguucagggguauguaugcagguuuguuaua

SEQ ID NO: 293660 - RNA, 32 nt, Human
aaguucagguccaggaaauggaaacauugcuu

SEQ ID NO: 293661 - RNA, 32 nt, Human
aaguucauaaaaucaaauuuugcuuaagaaua

SEQ ID NO: 293662 - RNA, 32 nt, Human
aaguucauaaauucugggcacugcucagcuug

SEQ ID NO: 293663 - RNA, 32 nt, Human
aaguucauccuacucugaauguaagcacacgg

SEQ ID NO: 293664 - RNA, 32 nt, Human
aaguucaucuugcucugaauguaagcacacag

SEQ ID NO: 293665 - RNA, 31 nt, Human
aaguucaugucucauguuaucuggaccuuga

SEQ ID NO: 293666 - RNA, 32 nt, Human
aaguucauucuuguaccaacuaauccagugcu

SEQ ID NO: 293667 - RNA, 32 nt, Human
aaguuccaaaagcagaggcggccuuggcguca

SEQ ID NO: 293668 - RNA, 32 nt, Human
aaguuccacagcuguguccuaaaccagguuuc

SEQ ID NO: 293669 - RNA, 32 nt, Human
aaguuccacugcacuccagccuggguuacaga

SEQ ID NO: 293670 - RNA, 24 nt, Human
aaguuccaugauacuauaacugga

SEQ ID NO: 293671 - RNA, 28 nt, Human
aaguucccaagugauugcugguccaggg

SEQ ID NO: 293672 - RNA, 32 nt, Human
aaguuccccaccccagaggagcucuuaccugg

SEQ ID NO: 293673 - RNA, 32 nt, Human
aaguucccuaaccucucccaacacagccucca

SEQ ID NO: 293674 - RNA, 32 nt, Human
aaguucccuaaggcccucucccucucaaauaa

SEQ ID NO: 293675 - RNA, 32 nt, Human
aaguucccuccaacaggaacucucugaccugu

SEQ ID NO: 293676 - RNA, 32 nt, Human
aaguucccucccuccagccagaaguuaaacau

SEQ ID NO: 293677 - RNA, 32 nt, Human
aaguucccugcucugcagcucuggcccaggag

SEQ ID NO: 293678 - RNA, 32 nt, Human
aaguucccuuaagucuugcccuagcugugcuc

SEQ ID NO: 293679 - RNA, 32 nt, Human
aaguucccuucccuuuucauccuaucccagcc

SEQ ID NO: 293680 - RNA, 32 nt, Human
aaguuccucacacccuaucucuaugacuucuu

SEQ ID NO: 293681 - RNA, 32 nt, Human
aaguuccucacacccugcuaccacccuaacgu

SEQ ID NO: 293682 - RNA, 32 nt, Human
aaguuccuggagucccaucaggccagugggua

SEQ ID NO: 293683 - RNA, 32 nt, Human
aaguuccuggauucaauguucuugccuuggcu

SEQ ID NO: 293684 - RNA, 32 nt, Human
aaguuccuuaaaaugcucugcaaagaaauugg

SEQ ID NO: 293685 - RNA, 32 nt, Human
aaguuccuuuuuacuuaggugugaaagauggu

SEQ ID NO: 293686 - RNA, 32 nt, Human
aaguucgaaagagugaauauuuugccauguuc

SEQ ID NO: 293687 - RNA, 32 nt, Human
aaguucgaagaguaacauggaggcagaguggc

SEQ ID NO: 293688 - RNA, 32 nt, Human
aaguucgcuuuguagcggccccggcuagagag

SEQ ID NO: 293689 - RNA, 32 nt, Human
aaguucgugccaucggacuccagccuggguga

SEQ ID NO: 293690 - RNA, 32 nt, Human
aaguucuaaaaauugaaugcaaugagagauug

SEQ ID NO: 293691 - RNA, 24 nt, Human
aaguucuaggauuacaggugugag

SEQ ID NO: 293692 - RNA, 32 nt, Human
aaguucuaggauuacaggugugagccaccacg

SEQ ID NO: 293693 - RNA, 31 nt, Human
aaguucucaauaaaaauuguuaagaaaugcc

SEQ ID NO: 293694 - RNA, 32 nt, Human
aaguucucaauguucuuuuccaacacaucuau

SEQ ID NO: 293695 - RNA, 32 nt, Human
aaguucucacacaagcuuauucucaggaucuu

SEQ ID NO: 293696 - RNA, 32 nt, Human
aaguucuccaccaaggauguuccccaggcacu

SEQ ID NO: 293697 - RNA, 32 nt, Human
aaguucuccagggaauugcagcuuugauggca

SEQ ID NO: 293698 - RNA, 32 nt, Human
aaguucuccuuccgucuuuucucccauuuuac

SEQ ID NO: 293699 - RNA, 32 nt, Human
aaguucucggauuacaggcgugagccacugcg

SEQ ID NO: 293700 - RNA, 32 nt, Human
aaguucucucucuuugccuucugccauccaua

SEQ ID NO: 293701 - RNA, 32 nt, Human
aaguucucuuggugaagaccgcacuucaaugg

SEQ ID NO: 293702 - RNA, 32 nt, Human
aaguucugaaggccaugacaccugccuugccu

SEQ ID NO: 293703 - RNA, 32 nt, Human
aaguucugcagaccacacaggaacuugcuuca

SEQ ID NO: 293704 - RNA, 31 nt, Human
aaguucugccucucugugcccagcucaaguc

SEQ ID NO: 293705 - RNA, 31 nt, Human
aaguucugccucugccuggggucuuggccac

SEQ ID NO: 293706 - RNA, 32 nt, Human
aaguucugcuaaaucacaucugccucauagag

SEQ ID NO: 293707 - RNA, 32 nt, Human
aaguucugcuaugaggaugcagcuggccccag

SEQ ID NO: 293708 - RNA, 32 nt, Human
aaguucugcuuugacaaacugacaaagucuaa

SEQ ID NO: 293709 - RNA, 32 nt, Human
aaguucuggacgccaggccugaggcaguuccg

SEQ ID NO: 293710 - RNA, 32 nt, Human
aaguucuggcuguuacuugagcagaggccuuu

SEQ ID NO: 293711 - RNA, 22 nt, Human
aaguucugggaggagacauugu

SEQ ID NO: 293712 - RNA, 23 nt, Human
aaguucugggauuacaaguguga

SEQ ID NO: 293713 - RNA, 24 nt, Human
aaguucugggauuacaggagugag

SEQ ID NO: 293714 - RNA, 32 nt, Human
aaguucugggauuacaggagugagccaccgcg

SEQ ID NO: 293715 - RNA, 24 nt, Human
aaguucugggauuacaggcaugag

SEQ ID NO: 293716 - RNA, 32 nt, Human
aaguucugggauuacaggcaugagccaccaug

SEQ ID NO: 293717 - RNA, 32 nt, Human
aaguucugggauuacaggcaugagccaccgug

SEQ ID NO: 293718 - RNA, 32 nt, Human
aaguucugggauuacaggcaugagccacugug

SEQ ID NO: 293719 - RNA, 24 nt, Human
aaguucugggauuacaggcgugag

SEQ ID NO: 293720 - RNA, 32 nt, Human
aaguucugggauuacaggcgugagccacacac

SEQ ID NO: 293721 - RNA, 32 nt, Human
aaguucugggauuacaggcgugagccaccgcg

SEQ ID NO: 293722 - RNA, 32 nt, Human
aaguucugggauuacaggcgugagccauggug

SEQ ID NO: 293723 - RNA, 24 nt, Human
aaguucugggauuacaggcuugag

SEQ ID NO: 293724 - RNA, 32 nt, Human
aaguucugggauuacaggcuugagccacugcg

SEQ ID NO: 293725 - RNA, 24 nt, Human
aaguucugggauuacaggggugag

SEQ ID NO: 293726 - RNA, 32 nt, Human
aaguucugggauuacaggggugagccacugug

SEQ ID NO: 293727 - RNA, 32 nt, Human
aaguucugggauuacaggguguugagccacuc

SEQ ID NO: 293728 - RNA, 32 nt, Human
aaguucugggauuacagguaugagccacaaca

SEQ ID NO: 293729 - RNA, 24 nt, Human
aaguucugggauuacaggugugag

SEQ ID NO: 293730 - RNA, 32 nt, Human
aaguucugggauuacaggugugagccaccgcg

SEQ ID NO: 293731 - RNA, 32 nt, Human
aaguucugggauuacaggugugagccaccgug

SEQ ID NO: 293732 - RNA, 32 nt, Human
aaguucugggauuauaggugcgagccacugug

SEQ ID NO: 293733 - RNA, 32 nt, Human
aaguucugggccagcccauugcucugggcugu

SEQ ID NO: 293734 - RNA, 32 nt, Human
aaguucugggccugacagguagauuccagcug

SEQ ID NO: 293735 - RNA, 32 nt, Human
aaguucuggggucuccagcugcaguggguggc

SEQ ID NO: 293736 - RNA, 32 nt, Human
aaguucuggucaaagaugaauggcaguaagac

SEQ ID NO: 293737 - RNA, 32 nt, Human
aaguucugugaugugugaacugugaguuuacu

SEQ ID NO: 293738 - RNA, 32 nt, Human
aaguucuguguuagucaugcacacacauaccu

SEQ ID NO: 293739 - RNA, 32 nt, Human
aaguucuguuucuucaccugggugguaguuag

SEQ ID NO: 293740 - RNA, 32 nt, Human
aaguucuguuucuucuuugauaccuuuguucu

SEQ ID NO: 293741 - RNA, 32 nt, Human
aaguucuuaguaaacugcagccagggagacuc

SEQ ID NO: 293742 - RNA, 32 nt, Human
aaguucuucaucucugugugcaugcagcuuag

SEQ ID NO: 293743 - RNA, 32 nt, Human
aaguucuuccaaaggcuggagaagugaacaag

SEQ ID NO: 293744 - RNA, 32 nt, Human
aaguucuuccaagagacuuccauguccugguu

SEQ ID NO: 293745 - RNA, 31 nt, Human
aaguucuuccucucugaggcuuuccuggguc

SEQ ID NO: 293746 - RNA, 32 nt, Human
aaguucuuggagaagggaguccaacucuucaa

SEQ ID NO: 293747 - RNA, 32 nt, Human
aaguucuuuauuaaagauuuuugaggccgggc

SEQ ID NO: 293748 - RNA, 32 nt, Human
aaguucuuucugugcugaagggagaggaguaa

SEQ ID NO: 293749 - RNA, 32 nt, Human
aaguucuuuucuuccucacuuuguugacaguc

SEQ ID NO: 293750 - RNA, 32 nt, Human
aaguugaaggaggcagaagggagagugaugca

SEQ ID NO: 293751 - RNA, 19 nt, Human
aaguugaagggacagggca

SEQ ID NO: 293752 - RNA, 32 nt, Human
aaguugaaucaggaaugaagauaaaaguacac

SEQ ID NO: 293753 - RNA, 32 nt, Human
aaguugaaugauuuauuguuacuuauauuaau

SEQ ID NO: 293754 - RNA, 32 nt, Human
aaguugaauuuagugucaaucauccagaaaau

SEQ ID NO: 293755 - RNA, 32 nt, Human
aaguugaauuucugcagguguugcaaguaugu

SEQ ID NO: 293756 - RNA, 32 nt, Human
aaguugagaaauguaccggcuuccauccuguc

SEQ ID NO: 293757 - RNA, 32 nt, Human
aaguugagaacugcuuucucuaccuuuugcaa

SEQ ID NO: 293758 - RNA, 32 nt, Human
aaguugagaucagcuagaccugcuuucuuuuc

SEQ ID NO: 293759 - RNA, 32 nt, Human
aaguugaggagaauaguuucauaaaagagaaa

SEQ ID NO: 293760 - RNA, 32 nt, Human
aaguugaggcccagagagaggaaggggcuggu

SEQ ID NO: 293761 - RNA, 32 nt, Human
aaguugaggcccuaauaaaaggcuccaaggca

SEQ ID NO: 293762 - RNA, 32 nt, Human
aaguugaggggcuggagcaaaaucuugggaga

SEQ ID NO: 293763 - RNA, 32 nt, Human
aaguugaguuugagaggcgacacggcggcggc

SEQ ID NO: 293764 - RNA, 32 nt, Human
aaguugauauagaacagugcuugccacagagc

SEQ ID NO: 293765 - RNA, 32 nt, Human
aaguugaugaccagaaaucagugcaaacacau

SEQ ID NO: 293766 - RNA, 32 nt, Human
aaguugcaacugaccuugaacugaaucacucu

SEQ ID NO: 293767 - RNA, 32 nt, Human
aaguugcacagguucuugcagcuucuggaauc

SEQ ID NO: 293768 - RNA, 32 nt, Human
aaguugcaccauugcacuccacccugggcgac

SEQ ID NO: 293769 - RNA, 32 nt, Human
aaguugcacuuuucaagaugugagaagguacu

SEQ ID NO: 293770 - RNA, 32 nt, Human
aaguugcagugagccgagacagugccaccgua

SEQ ID NO: 293771 - RNA, 32 nt, Human
aaguugcagugagccgagaccaugccauugca

SEQ ID NO: 293772 - RNA, 32 nt, Human
aaguugcagugagccgagaucacaccacugca

SEQ ID NO: 293773 - RNA, 32 nt, Human
aaguugcagugagccgagaucacgccacugca

SEQ ID NO: 293774 - RNA, 32 nt, Human
aaguugcagugagccgagaucaugccacugca

SEQ ID NO: 293775 - RNA, 32 nt, Human
aaguugcagugagccgagaucgcaccacugca

SEQ ID NO: 293776 - RNA, 32 nt, Human
aaguugcagugagccgagaucgcgccacugca

SEQ ID NO: 293777 - RNA, 32 nt, Human
aaguugcagugagccgagaucgcgccauugua

SEQ ID NO: 293778 - RNA, 32 nt, Human
aaguugcagugagccgagaucgugccauugca

SEQ ID NO: 293779 - RNA, 32 nt, Human
aaguugcagugagccgagauugcaccacagca

SEQ ID NO: 293780 - RNA, 32 nt, Human
aaguugcagugagccgagauugcaccacugca

SEQ ID NO: 293781 - RNA, 32 nt, Human
aaguugcagugagccgagauugugccacugaa

SEQ ID NO: 293782 - RNA, 32 nt, Human
aaguugcagugagccgagauugugccacugca

SEQ ID NO: 293783 - RNA, 32 nt, Human
aaguugcagugagcugauaucaugccccugua

SEQ ID NO: 293784 - RNA, 32 nt, Human
aaguugccaagaugcuccuuguugacuuccag

SEQ ID NO: 293785 - RNA, 32 nt, Human
aaguugccauuuuaauuagaggggagguccac

SEQ ID NO: 293786 - RNA, 32 nt, Human
aaguugcccgucucccccuucuucccuccucc

SEQ ID NO: 293787 - RNA, 22 nt, Human
aaguugccuuacagagccagga

SEQ ID NO: 293788 - RNA, 32 nt, Human
aaguugcgcugagaguugagggcugccaguug

SEQ ID NO: 293789 - RNA, 32 nt, Human
aaguugcgguuagccgagaucacgccacugcc

SEQ ID NO: 293790 - RNA, 32 nt, Human
aaguugcuaagugcccgagcgcagcgcguuaa

SEQ ID NO: 293791 - RNA, 32 nt, Human
aaguugcugcugcuuccaccgccccuuaaagu

SEQ ID NO: 293792 - RNA, 32 nt, Human
aaguugcugcuuggcauaaugagccucagcuu

SEQ ID NO: 293793 - RNA, 32 nt, Human
aaguugcugcuugugaucucacacacagauuu

SEQ ID NO: 293794 - RNA, 25 nt, Human
aaguugcugggauuacaggugugag

SEQ ID NO: 293795 - RNA, 32 nt, Human
aaguugcuguaagcaccugggcugaggaggca

SEQ ID NO: 293796 - RNA, 32 nt, Human
aaguugcuguauauuucagucugguuauaccu

SEQ ID NO: 293797 - RNA, 32 nt, Human
aaguugcuuucugcuuucucuuguuugugcuu

SEQ ID NO: 293798 - RNA, 30 nt, Human
aaguugcuuugcauaucagaaaaacuccau

SEQ ID NO: 293799 - RNA, 32 nt, Human
aaguuggaaagaacaaaagaagaacaaaaacc

SEQ ID NO: 293800 - RNA, 32 nt, Human
aaguuggaacgggacaagcagagaaggcuaaa

SEQ ID NO: 293801 - RNA, 32 nt, Human
aaguuggaaguuaagggagacaaaguugaaaa

SEQ ID NO: 293802 - RNA, 32 nt, Human
aaguuggacagaaggagguguuggggugaggu

SEQ ID NO: 293803 - RNA, 32 nt, Human
aaguuggaccugcgugcuuccucugccucuga

SEQ ID NO: 293804 - RNA, 32 nt, Human
aaguuggagggaggggcagggccuugcagggg

SEQ ID NO: 293805 - RNA, 32 nt, Human
aaguuggaggggcaaggggcugccguguccug

SEQ ID NO: 293806 - RNA, 32 nt, Human
aaguuggagguaggggccuguggaaacaugaa

SEQ ID NO: 293807 - RNA, 32 nt, Human
aaguuggauugagcauauucacugugaaauua

SEQ ID NO: 293808 - RNA, 32 nt, Human
aaguuggcaaagcuggucuguccaccaaggcc

SEQ ID NO: 293809 - RNA, 32 nt, Human
aaguuggcuagaagaaaguaaaaagaacaaca

SEQ ID NO: 293810 - RNA, 32 nt, Human
aaguugggaagacgacuugucuuucauucaaa

SEQ ID NO: 293811 - RNA, 32 nt, Human
aaguugggaaggauuuuccuggcaacuguacc

SEQ ID NO: 293812 - RNA, 32 nt, Human
aaguugggaggagcgagcuggagccagagcgc

SEQ ID NO: 293813 - RNA, 25 nt, Human
aaguugggaggcccuccucucaccu

SEQ ID NO: 293814 - RNA, 32 nt, Human
aaguugggaggcccuccucucaccuugcucaa

SEQ ID NO: 293815 - RNA, 32 nt, Human
aaguugggcccugaccuuucuguugcugucuc

SEQ ID NO: 293816 - RNA, 32 nt, Human
aaguuggggagguggagaaccaaugacccagg

SEQ ID NO: 293817 - RNA, 32 nt, Human
aaguuggguagaaaugacauuuuccagagcug

SEQ ID NO: 293818 - RNA, 32 nt, Human
aaguugggugagaccaggcuggucugauccuc

SEQ ID NO: 293819 - RNA, 32 nt, Human
aaguugguaggaacagguaagaauaggggguu

SEQ ID NO: 293820 - RNA, 32 nt, Human
aaguuggucucaaacuccugaccucaagugau

SEQ ID NO: 293821 - RNA, 32 nt, Human
aaguuggucuggaacuccugaccucgugaucc

SEQ ID NO: 293822 - RNA, 32 nt, Human
aaguuggugccaaugcauuccagccuggauga

SEQ ID NO: 293823 - RNA, 32 nt, Human
aaguugguggcugauuuaaaguugugcaggaa

SEQ ID NO: 293824 - RNA, 32 nt, Human
aaguuggugggugagagaaugggacuuccucu

SEQ ID NO: 293825 - RNA, 32 nt, Human
aaguugguguagcagcaguugaucagacugaa

SEQ ID NO: 293826 - RNA, 32 nt, Human
aaguuggugugcuggagcuaccucaccucagc

SEQ ID NO: 293827 - RNA, 32 nt, Human
aaguugguguugcccaaaucgcaguuugacau

SEQ ID NO: 293828 - RNA, 32 nt, Human
aaguugguuucaaacuccuggccucaagcagu

SEQ ID NO: 293829 - RNA, 32 nt, Human
aaguuguaccuugcccucucuccagcucugcu

SEQ ID NO: 293830 - RNA, 32 nt, Human
aaguuguacugugaacuggaagaugguggaau

SEQ ID NO: 293831 - RNA, 32 nt, Human
aaguuguagugagccgagaucaugccacugca

SEQ ID NO: 293832 - RNA, 22 nt, Human
aaguuguaucuagacaacugua

SEQ ID NO: 293833 - RNA, 32 nt, Human
aaguuguauugaggcaguuauggagugcagag

SEQ ID NO: 293834 - RNA, 23 nt, Human
aaguuguauuuaaugguucugua

SEQ ID NO: 293835 - RNA, 20 nt, Human
aaguugucacugaacuuggc

SEQ ID NO: 293836 - RNA, 32 nt, Human
aaguugucaguuaucacuguagaugagcaacu

SEQ ID NO: 293837 - RNA, 21 nt, Human
aaguuguccaaaagccuucag

SEQ ID NO: 293838 - RNA, 32 nt, Human
aaguugucgauugcuguguaacaaauugcccg

SEQ ID NO: 293839 - RNA, 32 nt, Human
aaguugugaauguuugcaacgaauccagcuca

SEQ ID NO: 293840 - RNA, 32 nt, Human
aaguugugagccauaagaacagagccuggaac

SEQ ID NO: 293841 - RNA, 32 nt, Human
aaguugugcuuugggguauauuugaauccuag

SEQ ID NO: 293842 - RNA, 32 nt, Human
aaguuguggaaccaaagagaacugucucaaga

SEQ ID NO: 293843 - RNA, 32 nt, Human
aaguugugggggcuuuucaagaggggccaggc

SEQ ID NO: 293844 - RNA, 32 nt, Human
aaguuguggugagccgagaucgcgccacugca

SEQ ID NO: 293845 - RNA, 32 nt, Human
aaguuguguacaugaacauacacccacaucca

SEQ ID NO: 293846 - RNA, 32 nt, Human
aaguugugucccaggguggacuagugggguuu

SEQ ID NO: 293847 - RNA, 32 nt, Human
aaguuguucccuuuacauuuucuucuugauuu

SEQ ID NO: 293848 - RNA, 32 nt, Human
aaguuguucucccacuacuuuccuuucccucu

SEQ ID NO: 293849 - RNA, 32 nt, Human
aaguuguuucucucccugggccucaguuuccc

SEQ ID NO: 293850 - RNA, 32 nt, Human
aaguuguuuuacuauuucuggagagagccgug

SEQ ID NO: 293851 - RNA, 32 nt, Human
aaguuguuuuagucuccaggaggcugccagcc

SEQ ID NO: 293852 - RNA, 32 nt, Human
aaguuguuuuugaauuuuauuguuuuguuauu

SEQ ID NO: 293853 - RNA, 32 nt, Human
aaguuuaacagaguucugagaauaccaugaaa

SEQ ID NO: 293854 - RNA, 32 nt, Human
aaguuuaagaugacuugaccccaaaccuuugu

SEQ ID NO: 293855 - RNA, 32 nt, Human
aaguuuaaggagaugagaggauucaaggagcc

SEQ ID NO: 293856 - RNA, 32 nt, Human
aaguuuacacagaaaugcugcuggccaaauag

SEQ ID NO: 293857 - RNA, 32 nt, Human
aaguuuacacucccaccaacaguguacaagac

SEQ ID NO: 293858 - RNA, 32 nt, Human
aaguuuacagaaaaggaagugcaggaacauuu

SEQ ID NO: 293859 - RNA, 32 nt, Human
aaguuuacaguaugauaaggacaccaaaccaa

SEQ ID NO: 293860 - RNA, 32 nt, Human
aaguuuaccaugucuguaauguguacaugaag

SEQ ID NO: 293861 - RNA, 22 nt, Human
aaguuuagaaaaaacaaagcaa

SEQ ID NO: 293862 - RNA, 32 nt, Human
aaguuuagaaagagguuuuugaaaugccuaug

SEQ ID NO: 293863 - RNA, 32 nt, Human
aaguuuagagaaaaggaauggaaaguacccag

SEQ ID NO: 293864 - RNA, 32 nt, Human
aaguuuagaguguuggcuggcucacaggcugc

SEQ ID NO: 293865 - RNA, 21 nt, Human
aaguuuaggaucccaaagagg

SEQ ID NO: 293866 - RNA, 32 nt, Human
aaguuuagggaaagaagguugcuguggugagg

SEQ ID NO: 293867 - RNA, 32 nt, Human
aaguuuagggccuggacaguggccccgagucc

SEQ ID NO: 293868 - RNA, 32 nt, Human
aaguuuaguauagucugauuacauuccauuca

SEQ ID NO: 293869 - RNA, 32 nt, Human
aaguuuauauaauguuuucacccuucauaaca

SEQ ID NO: 293870 - RNA, 32 nt, Human
aaguuuaugagacucaugggaguggccauugc

SEQ ID NO: 293871 - RNA, 32 nt, Human
aaguuuaugccugcugcuucucugccucuuug

SEQ ID NO: 293872 - RNA, 32 nt, Human
aaguuuauguuugagcaacuuuuucauuuaau

SEQ ID NO: 293873 - RNA, 32 nt, Human
aaguuuauuucagguuccuucuugccugcucu

SEQ ID NO: 293874 - RNA, 32 nt, Human
aaguuucaagaagcauguagaggaauaaaugc

SEQ ID NO: 293875 - RNA, 32 nt, Human
aaguuucaauccagaguuggguuccagcuuuc

SEQ ID NO: 293876 - RNA, 32 nt, Human
aaguuucacugacuuagaaccaggcgagagac

SEQ ID NO: 293877 - RNA, 32 nt, Human
aaguuucacuggcugguggcugucccuucucc

SEQ ID NO: 293878 - RNA, 32 nt, Human
aaguuucagacaagcagagagcucuauuuuua

SEQ ID NO: 293879 - RNA, 24 nt, Human
aaguuucauaugaauguaacuuga

SEQ ID NO: 293880 - RNA, 24 nt, Human
aaguuucaugaaucuguaacuaga

SEQ ID NO: 293881 - RNA, 32 nt, Human
aaguuucaugaauugcugcaguaaacauugau

SEQ ID NO: 293882 - RNA, 32 nt, Human
aaguuucauggauuagagugacugaaaaacau

SEQ ID NO: 293883 - RNA, 23 nt, Human
aaguuucauuauuggcaacuaga

SEQ ID NO: 293884 - RNA, 32 nt, Human
aaguuuccacuuggcccugcggcugcggucuu

SEQ ID NO: 293885 - RNA, 32 nt, Human
aaguuucccagaagugccugguucuguguacu

SEQ ID NO: 293886 - RNA, 32 nt, Human
aaguuucccagagaaaaugagaugcugauguu

SEQ ID NO: 293887 - RNA, 32 nt, Human
aaguuuccccaugcaggcagcuucucuggauu

SEQ ID NO: 293888 - RNA, 32 nt, Human
aaguuucccuaaaauauuucagacauuuagga

SEQ ID NO: 293889 - RNA, 32 nt, Human
aaguuuccuaguuuuaaguguuucaccagcaa

SEQ ID NO: 293890 - RNA, 32 nt, Human
aaguuuccuauuagcggggaagguguggggcu

SEQ ID NO: 293891 - RNA, 32 nt, Human
aaguuuccugguuuuaaaauguuagcaacaaa

SEQ ID NO: 293892 - RNA, 32 nt, Human
aaguuuccuuuuccuuugguucuuuccugaug

SEQ ID NO: 293893 - RNA, 32 nt, Human
aaguuucgguucagaagacaguuuggaauucc

SEQ ID NO: 293894 - RNA, 32 nt, Human
aaguuucuauuucuucuuucucugguucuucu

SEQ ID NO: 293895 - RNA, 31 nt, Human
aaguuucucaauaaaguuguuuggaaaauau

SEQ ID NO: 293896 - RNA, 32 nt, Human
aaguuucuccaggacaagagaaaaagagaauc

SEQ ID NO: 293897 - RNA, 32 nt, Human
aaguuucucccugccucacagcauccuccgaa

SEQ ID NO: 293898 - RNA, 32 nt, Human
aaguuucuccuuuucacaccuuauuucauuga

SEQ ID NO: 293899 - RNA, 32 nt, Human
aaguuucucuuucaaauagauuucaggccucu

SEQ ID NO: 293900 - RNA, 32 nt, Human
aaguuucugcacucagccaggcggcaucaaug

SEQ ID NO: 293901 - RNA, 32 nt, Human
aaguuucugccuggcccugcaucugguuccag

SEQ ID NO: 293902 - RNA, 32 nt, Human
aaguuucuggauccuaggcucagcuccacaga

SEQ ID NO: 293903 - RNA, 32 nt, Human
aaguuucuucugucuguuuuguuuuucaauug

SEQ ID NO: 293904 - RNA, 32 nt, Human
aaguuucuuucugucucuuaagugauguguga

SEQ ID NO: 293905 - RNA, 32 nt, Human
aaguuugauuucagauguuggaaaugugugcu

SEQ ID NO: 293906 - RNA, 19 nt, Human
aaguuugcaaauacugggg

SEQ ID NO: 293907 - RNA, 32 nt, Human
aaguuugcaauacucucuaccucuucgcaucc

SEQ ID NO: 293908 - RNA, 32 nt, Human
aaguuugcacaaaaucgcacaacgaugacgca

SEQ ID NO: 293909 - RNA, 32 nt, Human
aaguuugccuucugaccucauuuccuucuuga

SEQ ID NO: 293910 - RNA, 32 nt, Human
aaguuuggagugcaguggcaugaucaucagug

SEQ ID NO: 293911 - RNA, 32 nt, Human
aaguuuggauaaccuuccuucuaaacauuugg

SEQ ID NO: 293912 - RNA, 32 nt, Human
aaguuuggccacuucccucucaaagacuaacc

SEQ ID NO: 293913 - RNA, 32 nt, Human
aaguuugggcuguccugaaagucuggacuuug

SEQ ID NO: 293914 - RNA, 32 nt, Human
aaguuuggggaaaggugccaucuugaaaauuc

SEQ ID NO: 293915 - RNA, 32 nt, Human
aaguuuggggacaggcuucacccaacacccag

SEQ ID NO: 293916 - RNA, 32 nt, Human
aaguuuguaggaaugagugcagaugcaacccc

SEQ ID NO: 293917 - RNA, 32 nt, Human
aaguuugucucugaagaagcacaaaagaaaau

SEQ ID NO: 293918 - RNA, 32 nt, Human
aaguuugugccucacacuccagccuggguaac

SEQ ID NO: 293919 - RNA, 32 nt, Human
aaguuuguggaggaggcagggaaggaaaaaua

SEQ ID NO: 293920 - RNA, 32 nt, Human
aaguuugugucaccaucacaggggucguaucu

SEQ ID NO: 293921 - RNA, 32 nt, Human
aaguuuguucugacagggcgcgguggcucacg

SEQ ID NO: 293922 - RNA, 32 nt, Human
aaguuuguuuuaugauggcuugagugcgcgag

SEQ ID NO: 293923 - RNA, 32 nt, Human
aaguuuguuuucucccacugccuccaggcccc

SEQ ID NO: 293924 - RNA, 32 nt, Human
aaguuuguuuuuaaaaguuuucuauuaauuau

SEQ ID NO: 293925 - RNA, 32 nt, Human
aaguuuuauucugccuuugaaaaugcuuccaa

SEQ ID NO: 293926 - RNA, 32 nt, Human
aaguuuuauuugugaugucauaacuccacaga

SEQ ID NO: 293927 - RNA, 32 nt, Human
aaguuuucacccaacuggaauuugauggaaag

SEQ ID NO: 293928 - RNA, 32 nt, Human
aaguuuucacugaaugagcauggcagugccac

SEQ ID NO: 293929 - RNA, 32 nt, Human
aaguuuucauccccaucugccuguuaaugucu

SEQ ID NO: 293930 - RNA, 32 nt, Human
aaguuuuccaaaccuccuuccccacccuaucu

SEQ ID NO: 293931 - RNA, 32 nt, Human
aaguuuucccaaggucacacagcagagcugga

SEQ ID NO: 293932 - RNA, 32 nt, Human
aaguuuucccugcuucugguuugcugaagauu

SEQ ID NO: 293933 - RNA, 32 nt, Human
aaguuuucgcugagguuaaugugaacacugcu

SEQ ID NO: 293934 - RNA, 32 nt, Human
aaguuuucuccuccuugcacuuugccagaaaa

SEQ ID NO: 293935 - RNA, 32 nt, Human
aaguuuucugaccucaauucuaaaguaauugu

SEQ ID NO: 293936 - RNA, 32 nt, Human
aaguuuucugauggaaucuucaucucacccca

SEQ ID NO: 293937 - RNA, 32 nt, Human
aaguuuugagcuucaagucagugaggaguaaa

SEQ ID NO: 293938 - RNA, 32 nt, Human
aaguuuugaguagaggugagacccccucccca

SEQ ID NO: 293939 - RNA, 32 nt, Human
aaguuuugcauuguagaauuguauuuagcuuu

SEQ ID NO: 293940 - RNA, 32 nt, Human
aaguuuugcuuugggucaauuugaauuaaaaa

SEQ ID NO: 293941 - RNA, 32 nt, Human
aaguuuuggagaagagagagggagauaaaagg

SEQ ID NO: 293942 - RNA, 32 nt, Human
aaguuuuggagagggaaguggagcagccagca

SEQ ID NO: 293943 - RNA, 29 nt, Human
aaguuuuggcugcugcaccaucccucugg

SEQ ID NO: 293944 - RNA, 24 nt, Human
aaguuuuggggaguaaaaacuguu

SEQ ID NO: 293945 - RNA, 31 nt, Human
aaguuuuggguggaaguguugagaaguauga

SEQ ID NO: 293946 - RNA, 31 nt, Human
aaguuuuguacuucuuuuguuaaauauguuc

SEQ ID NO: 293947 - RNA, 32 nt, Human
aaguuuugugcaaauuaacauagucucuuauu

SEQ ID NO: 293948 - RNA, 32 nt, Human
aaguuuuuaaaggaagaguggaaaguacugca

SEQ ID NO: 293949 - RNA, 32 nt, Human
aaguuuuuaaagucuucagacaauuccaaaug

SEQ ID NO: 293950 - RNA, 32 nt, Human
aaguuuuuagucaacuuuugggacuuggggug

SEQ ID NO: 293951 - RNA, 32 nt, Human
aaguuuuuauuaugaauuacuaauccaguauu

SEQ ID NO: 293952 - RNA, 32 nt, Human
aaguuuuuccucauggcuucaucucuaucuuu

SEQ ID NO: 293953 - RNA, 32 nt, Human
aaguuuuucuucuccucgggucuccaguguca

SEQ ID NO: 293954 - RNA, 32 nt, Human
aaguuuuugcagccuauaugacuugagauugg

SEQ ID NO: 293955 - RNA, 32 nt, Human
aauaaaaacaaacuguucggcuacuggacagg

SEQ ID NO: 293956 - RNA, 32 nt, Human
aauaaaaaggauuuuuaaaaaguaauuccuua

SEQ ID NO: 293957 - RNA, 22 nt, Human
aauaaaaaggcaugauuccuga

SEQ ID NO: 293958 - RNA, 27 nt, Human
aauaaaaauaugaccaauugguaucag

SEQ ID NO: 293959 - RNA, 32 nt, Human
aauaaaaaugcacguagcugaggccggaugcg

SEQ ID NO: 293960 - RNA, 32 nt, Human
aauaaaacaaaucauaccaaaaagccacauug

SEQ ID NO: 293961 - RNA, 24 nt, Human
aauaaaacauaugugucuaugguu

SEQ ID NO: 293962 - RNA, 23 nt, Human
aauaaaacaugugcaugcuugaa

SEQ ID NO: 293963 - RNA, 22 nt, Human
aauaaaacauuuucugaaauca

SEQ ID NO: 293964 - RNA, 24 nt, Human
aauaaaaccaacucuaaaaucaca

SEQ ID NO: 293965 - RNA, 22 nt, Human
aauaaaaccuuuauguuagcuc

SEQ ID NO: 293966 - RNA, 32 nt, Human
aauaaaacucacaauuugugcucacaagcuua

SEQ ID NO: 293967 - RNA, 32 nt, Human
aauaaaacuuaucugagucacuugaaacuugg

SEQ ID NO: 293968 - RNA, 32 nt, Human
aauaaaagauggggaaccaccaugcucgagau

SEQ ID NO: 293969 - RNA, 32 nt, Human
aauaaaagcuuaggauuaauuagaagaagcaa

SEQ ID NO: 293970 - RNA, 32 nt, Human
aauaaaagcuucccccugauauccaucccuuu

SEQ ID NO: 293971 - RNA, 32 nt, Human
aauaaaagguccaauuugcaaauaggcaaaag

SEQ ID NO: 293972 - RNA, 32 nt, Human
aauaaaaggugucuugguuugaugucauagaa

SEQ ID NO: 293973 - RNA, 24 nt, Human
aauaaaauaaauguuauucucuga

SEQ ID NO: 293974 - RNA, 32 nt, Human
aauaaaauacaaaaaguguguugauuuauagc

SEQ ID NO: 293975 - RNA, 32 nt, Human
aauaaaauaguauacuggacugugcaucaaag

SEQ ID NO: 293976 - RNA, 23 nt, Human
aauaaaauaguugcuaauccuga

SEQ ID NO: 293977 - RNA, 32 nt, Human
aauaaaaucaauuaaaugaaauauucuauaga

SEQ ID NO: 293978 - RNA, 32 nt, Human
aauaaaauccaagugaacagauaauuagaaga

SEQ ID NO: 293979 - RNA, 18 nt, Human
aauaaaaugacaauuccu

SEQ ID NO: 293980 - RNA, 24 nt, Human
aauaaaaugaccgcauauuccuga

SEQ ID NO: 293981 - RNA, 32 nt, Human
aauaaaaugagggcccguaacagaaccagugu

SEQ ID NO: 293982 - RNA, 32 nt, Human
aauaaaaugcagaugauugcgcggcuuugaaa

SEQ ID NO: 293983 - RNA, 32 nt, Human
aauaaaauggaauguuuucgucucuacauuca

SEQ ID NO: 293984 - RNA, 31 nt, Human
aauaaaauggaccucuauacacacaccuguc

SEQ ID NO: 293985 - RNA, 32 nt, Human
aauaaaauggaucugccagcaaagggauggaa

SEQ ID NO: 293986 - RNA, 32 nt, Human
aauaaaauguucuccaagagccuggcuuuuua

SEQ ID NO: 293987 - RNA, 32 nt, Human
aauaaaauucaaggccucuccauauuaaaaac

SEQ ID NO: 293988 - RNA, 32 nt, Human
aauaaaauucuuuagcaauagacuccugcaaa

SEQ ID NO: 293989 - RNA, 32 nt, Human
aauaaacaaacaaaaagaaacaacccuuaaga

SEQ ID NO: 293990 - RNA, 32 nt, Human
aauaaacaacccaacaugaaaaggugacaagc

SEQ ID NO: 293991 - RNA, 32 nt, Human
aauaaacacaacaaugaguuaggucuuuauca

SEQ ID NO: 293992 - RNA, 32 nt, Human
aauaaacacacaaauuuccuacagccuuaaaa

SEQ ID NO: 293993 - RNA, 19 nt, Human
aauaaacacagccuuuaua

SEQ ID NO: 293994 - RNA, 31 nt, Human
aauaaacacauacccgagacuggguaauuua

SEQ ID NO: 293995 - RNA, 32 nt, Human
aauaaacacauacuugagacuggguaauuuau

SEQ ID NO: 293996 - RNA, 32 nt, Human
aauaaacacauacuuuuaagguauuaucucag

SEQ ID NO: 293997 - RNA, 32 nt, Human
aauaaacacauuaaaggcugggcgcgguggcu

SEQ ID NO: 293998 - RNA, 20 nt, Human
aauaaacacauuguuuuaua

SEQ ID NO: 293999 - RNA, 32 nt, Human
aauaaacaggcaggagcuagucaggugcaugu

SEQ ID NO: 294000 - RNA, 32 nt, Human
aauaaacagguuacagaauuucggcuagcacu

SEQ ID NO: 294001 - RNA, 32 nt, Human
aauaaacaguauauucuuugguugugaauccu

SEQ ID NO: 294002 - RNA, 32 nt, Human
aauaaacaugaccacgaagaaugcuguucuga

SEQ ID NO: 294003 - RNA, 32 nt, Human
aauaaacauuucucaguaacuuugccuuuaug

SEQ ID NO: 294004 - RNA, 24 nt, Human
aauaaaccauuuuguauguuugga

SEQ ID NO: 294005 - RNA, 32 nt, Human
aauaaacccagcaaagaacuagcagagcuggu

SEQ ID NO: 294006 - RNA, 32 nt, Human
aauaaaccuaaccuuuuaacagggucuaacau

SEQ ID NO: 294007 - RNA, 21 nt, Human
aauaaaccuguccacaaugaa

SEQ ID NO: 294008 - RNA, 32 nt, Human
aauaaacggacguuugagcucacguggcggcc

SEQ ID NO: 294009 - RNA, 32 nt, Human
aauaaacuaaagauuagagcauguuccaguua

SEQ ID NO: 294010 - RNA, 32 nt, Human
aauaaacuagaaaaucuagaagaaauggauaa

SEQ ID NO: 294011 - RNA, 32 nt, Human
aauaaacucagcugcuagagugccgaugucag

SEQ ID NO: 294012 - RNA, 32 nt, Human
aauaaacucccaggccccgcccacgccccgcc

SEQ ID NO: 294013 - RNA, 32 nt, Human
aauaaacucuggacaaugaccagcacagagcc

SEQ ID NO: 294014 - RNA, 21 nt, Human
aauaaacugacaugcaugcuu

SEQ ID NO: 294015 - RNA, 32 nt, Human
aauaaacugcccucaguaaauccaugguuaau

SEQ ID NO: 294016 - RNA, 32 nt, Human
aauaaacuggccaaagaugaggcuaauuguaa

SEQ ID NO: 294017 - RNA, 32 nt, Human
aauaaacuguaacacuguaccuacuagguucc

SEQ ID NO: 294018 - RNA, 22 nt, Human
aauaaacuguccuugcuuugga

SEQ ID NO: 294019 - RNA, 20 nt, Human
aauaaacugugguauuucuu

SEQ ID NO: 294020 - RNA, 24 nt, Human
aauaaacuguuaggugcucuugaa

SEQ ID NO: 294021 - RNA, 20 nt, Human
aauaaacuguuugacuugaa

SEQ ID NO: 294022 - RNA, 22 nt, Human
aauaaacuguuuguaccuggaa

SEQ ID NO: 294023 - RNA, 21 nt, Human
aauaaacuguuuucuuuugga

SEQ ID NO: 294024 - RNA, 32 nt, Human
aauaaacuuaggacacagcagacggcccaucc

SEQ ID NO: 294025 - RNA, 32 nt, Human
aauaaacuuggcuucuuuauacaucuguaaaa

SEQ ID NO: 294026 - RNA, 32 nt, Human
aauaaagaagaaaaacaggaaagaagagggaa

SEQ ID NO: 294027 - RNA, 32 nt, Human
aauaaagaaugagaaaaagaagaaauuauaag

SEQ ID NO: 294028 - RNA, 32 nt, Human
aauaaagacaaaugcaacauuuuaaggcaaug

SEQ ID NO: 294029 - RNA, 32 nt, Human
aauaaagacaauucaaccagcucccaccaaaa

SEQ ID NO: 294030 - RNA, 32 nt, Human
aauaaagacauaucauuaugcauuguaaacug

SEQ ID NO: 294031 - RNA, 32 nt, Human
aauaaagagaaaagggaaccuuggagcuggga

SEQ ID NO: 294032 - RNA, 32 nt, Human
aauaaagagccagcccccuuccauuuagucuc

SEQ ID NO: 294033 - RNA, 24 nt, Human
aauaaagagcucacuuccccccag

SEQ ID NO: 294034 - RNA, 20 nt, Human
aauaaagaggguaaagggaa

SEQ ID NO: 294035 - RNA, 21 nt, Human
aauaaagaguaggcuauaagg

SEQ ID NO: 294036 - RNA, 29 nt, Human
aauaaagaguaugauugugguucaaggau

SEQ ID NO: 294037 - RNA, 32 nt, Human
aauaaagagugauaugcuuagagauagauaau

SEQ ID NO: 294038 - RNA, 32 nt, Human
aauaaagaguggguggccugcccagcccagca

SEQ ID NO: 294039 - RNA, 32 nt, Human
aauaaagaguguuccagguaugacagcuaccu

SEQ ID NO: 294040 - RNA, 20 nt, Human
aauaaagaugauugaaucca

SEQ ID NO: 294041 - RNA, 32 nt, Human
aauaaagauuccauggguugaacaagccacgu

SEQ ID NO: 294042 - RNA, 32 nt, Human
aauaaagcaaaucugcauaaaugguaaccagu

SEQ ID NO: 294043 - RNA, 32 nt, Human
aauaaagcauccaggauucagugaagaacuga

SEQ ID NO: 294044 - RNA, 32 nt, Human
aauaaagccacugggccaggaacucaccuuuc

SEQ ID NO: 294045 - RNA, 32 nt, Human
aauaaagcuguccauucaauuccaaauacugg

SEQ ID NO: 294046 - RNA, 21 nt, Human
aauaaagcuguucuucaucua

SEQ ID NO: 294047 - RNA, 32 nt, Human
aauaaaggagaaaaugcaggagagaguaggga

SEQ ID NO: 294048 - RNA, 32 nt, Human
aauaaaggagaaagaggaagauggaauccugg

SEQ ID NO: 294049 - RNA, 32 nt, Human
aauaaagggaaagggaagucguggagaggcag

SEQ ID NO: 294050 - RNA, 32 nt, Human
aauaaagggagaagagggaaaacagaaaaccu

SEQ ID NO: 294051 - RNA, 32 nt, Human
aauaaagggccuuuugcugguggagggcacuc

SEQ ID NO: 294052 - RNA, 32 nt, Human
aauaaaggggaaaugguccuagccuggccccu

SEQ ID NO: 294053 - RNA, 32 nt, Human
aauaaaggugugaggaggcuggggccaguuga

SEQ ID NO: 294054 - RNA, 32 nt, Human
aauaaagguguuucucuuccuccuucuccucc

SEQ ID NO: 294055 - RNA, 32 nt, Human
aauaaaguaagccauggacagaauguggucug

SEQ ID NO: 294056 - RNA, 32 nt, Human
aauaaaguaauuauggaaaauauuuuaaacuc

SEQ ID NO: 294057 - RNA, 31 nt, Human
aauaaaguacuuuucucaugccgggaccaaa

SEQ ID NO: 294058 - RNA, 32 nt, Human
aauaaaguauuuuugugaugaggaaaucccua

SEQ ID NO: 294059 - RNA, 23 nt, Human
aauaaaguccaaagucugaucug

SEQ ID NO: 294060 - RNA, 32 nt, Human
aauaaagugcaagcucucucccuaccugaaac

SEQ ID NO: 294061 - RNA, 22 nt, Human
aauaaagugggggcaaccccug

SEQ ID NO: 294062 - RNA, 32 nt, Human
aauaaaguguucuauuaaccugaucucuuugc

SEQ ID NO: 294063 - RNA, 24 nt, Human
aauaaaguucaaagcaaccaccug

SEQ ID NO: 294064 - RNA, 32 nt, Human
aauaaaguucuguuauauuuccuugcucgagu

SEQ ID NO: 294065 - RNA, 32 nt, Human
aauaaaguugaaguucaggucuugccauugcc

SEQ ID NO: 294066 - RNA, 32 nt, Human
aauaaaguuuaacuggaacacagcgguucaug

SEQ ID NO: 294067 - RNA, 32 nt, Human
aauaaaguuuauaggcugggcgagguggcuca

SEQ ID NO: 294068 - RNA, 32 nt, Human
aauaaauaaaauaaaauaaagcaccauuuugu

SEQ ID NO: 294069 - RNA, 32 nt, Human
aauaaauaaauaaaaugcgggccaggcacagu

SEQ ID NO: 294070 - RNA, 32 nt, Human
aauaaauacaaggauucguuuagcuaauucaa

SEQ ID NO: 294071 - RNA, 23 nt, Human
aauaaauacaauauugcauuccc

SEQ ID NO: 294072 - RNA, 25 nt, Human
aauaaauacaauauugcauucccau

SEQ ID NO: 294073 - RNA, 32 nt, Human
aauaaauacagaaugccauguucuccacuucu

SEQ ID NO: 294074 - RNA, 24 nt, Human
aauaaauacauuuuggugugacua

SEQ ID NO: 294075 - RNA, 32 nt, Human
aauaaauacuucuggucugauaccuaaggagc

SEQ ID NO: 294076 - RNA, 32 nt, Human
aauaaauaguacacuggcuguuuucugccagc

SEQ ID NO: 294077 - RNA, 32 nt, Human
aauaaauauugugguuuuaucuacguuauugg

SEQ ID NO: 294078 - RNA, 32 nt, Human
aauaaaucacuuaucaaaaugugaacuguuuu

SEQ ID NO: 294079 - RNA, 32 nt, Human
aauaaaucagaagaacucugauugccagaggc

SEQ ID NO: 294080 - RNA, 32 nt, Human
aauaaaucaguuauuugaaacauaaaaaugaa

SEQ ID NO: 294081 - RNA, 32 nt, Human
aauaaaucuauccugaaagcuauauaauauau

SEQ ID NO: 294082 - RNA, 32 nt, Human
aauaaaucucugcuuuuguugcuucauucuuu

SEQ ID NO: 294083 - RNA, 32 nt, Human
aauaaaucugggcuuagggaaggagagaccuu

SEQ ID NO: 294084 - RNA, 32 nt, Human
aauaaaugaugcaaguugucaauggaugagug

SEQ ID NO: 294085 - RNA, 32 nt, Human
aauaaaugcaacuuauguuuucuuguugguuc

SEQ ID NO: 294086 - RNA, 32 nt, Human
aauaaaugcccaauaaauauuuguugaccaua

SEQ ID NO: 294087 - RNA, 32 nt, Human
aauaaauggaaagacacuccauguucauggau

SEQ ID NO: 294088 - RNA, 32 nt, Human
aauaaauggaaagggaacauagaaauaacacu

SEQ ID NO: 294089 - RNA, 32 nt, Human
aauaaauggcucgugggcucuggcucccuggg

SEQ ID NO: 294090 - RNA, 32 nt, Human
aauaaaugggauuugcaugaacuccacucuga

SEQ ID NO: 294091 - RNA, 32 nt, Human
aauaaaugguauagcaaauguuuugacaugaa

SEQ ID NO: 294092 - RNA, 32 nt, Human
aauaaauggugugauggauggaacuaacugga

SEQ ID NO: 294093 - RNA, 32 nt, Human
aauaaaugguuuucuuggcuuccuccuuacuc

SEQ ID NO: 294094 - RNA, 32 nt, Human
aauaaauguaaugugcuuaaaucuuuuggccc

SEQ ID NO: 294095 - RNA, 32 nt, Human
aauaaaugucauccucuucuccaucuucauuu

SEQ ID NO: 294096 - RNA, 32 nt, Human
aauaaaugucucugauuacuuugcuaccuuua

SEQ ID NO: 294097 - RNA, 32 nt, Human
aauaaaugucugcagugaaaagcuggagcccu

SEQ ID NO: 294098 - RNA, 32 nt, Human
aauaaauguuauauaaggaaacucaccuauuu

SEQ ID NO: 294099 - RNA, 32 nt, Human
aauaaauuaaugauguuuauuggguuuaaaaa

SEQ ID NO: 294100 - RNA, 22 nt, Human
aauaaauuccuucuaaaccaca

SEQ ID NO: 294101 - RNA, 32 nt, Human
aauaaauucuuuccuuuucuuuauucuugcuc

SEQ ID NO: 294102 - RNA, 32 nt, Human
aauaaauugccucccuuccuccgcuccccuuu

SEQ ID NO: 294103 - RNA, 32 nt, Human
aauaaauugugcucuuugucauggcaaccagc

SEQ ID NO: 294104 - RNA, 32 nt, Human
aauaaauuguugucgaugauagucaccuuuag

SEQ ID NO: 294105 - RNA, 24 nt, Human
aauaaauuuucuuccaugcuugaa

SEQ ID NO: 294106 - RNA, 32 nt, Human
aauaacaaaaucagaccuuggucugguccacu

SEQ ID NO: 294107 - RNA, 32 nt, Human
aauaacaaaauguacagcaagccuauguaguu

SEQ ID NO: 294108 - RNA, 32 nt, Human
aauaacaaaggcaguccgcauucuucccuuuc

SEQ ID NO: 294109 - RNA, 31 nt, Human
aauaacaacaacaacaaaacagcagaggaau

SEQ ID NO: 294110 - RNA, 32 nt, Human
aauaacaacuugacacagcuuagagacuaaaa

SEQ ID NO: 294111 - RNA, 32 nt, Human
aauaacaagcugaccuuggcaccccgcuuccu

SEQ ID NO: 294112 - RNA, 32 nt, Human
aauaacaagcuuuucugaagugagaagcuguu

SEQ ID NO: 294113 - RNA, 32 nt, Human
aauaacaaugguccuuacacuaccacaacauu

SEQ ID NO: 294114 - RNA, 32 nt, Human
aauaacacucaaauugcagcagccugggguca

SEQ ID NO: 294115 - RNA, 32 nt, Human
aauaacagauacaaagauaacaaaagcuuuac

SEQ ID NO: 294116 - RNA, 32 nt, Human
aauaacagccugagguuccaauucuuuaucau

SEQ ID NO: 294117 - RNA, 21 nt, Human
aauaacagcuauaccugaggu

SEQ ID NO: 294118 - RNA, 24 nt, Human
aauaacaggcccaagccuguggua

SEQ ID NO: 294119 - RNA, 32 nt, Human
aauaacaggcugggugcaauggcucacaccug

SEQ ID NO: 294120 - RNA, 22 nt, Human
aauaacaguaauuaauugugua

SEQ ID NO: 294121 - RNA, 32 nt, Human
aauaacaucacacugagggagcuuguacagaa

SEQ ID NO: 294122 - RNA, 32 nt, Human
aauaacaucucuacuugucacuuugccagugg

SEQ ID NO: 294123 - RNA, 32 nt, Human
aauaacaugccggcaagguugcagagaaaagg

SEQ ID NO: 294124 - RNA, 32 nt, Human
aauaacauggcacuucagcagagauucauaga

SEQ ID NO: 294125 - RNA, 32 nt, Human
aauaacauguaacccagauuaagugucauucc

SEQ ID NO: 294126 - RNA, 32 nt, Human
aauaacauugaauauuauaaugaagauguuug

SEQ ID NO: 294127 - RNA, 32 nt, Human
aauaacauuuaccuucagccuccaucagaaug

SEQ ID NO: 294128 - RNA, 32 nt, Human
aauaaccaauccagaugccagcagccugucaa

SEQ ID NO: 294129 - RNA, 32 nt, Human
aauaaccaauuuggauaccaucaagacaccug

SEQ ID NO: 294130 - RNA, 32 nt, Human
aauaaccacugcacuccaaccugggcaacaug

SEQ ID NO: 294131 - RNA, 32 nt, Human
aauaaccaucuucucaacaugaccugcuuaac

SEQ ID NO: 294132 - RNA, 28 nt, Human
aauaacccaagugacuccuuucuaguga

SEQ ID NO: 294133 - RNA, 32 nt, Human
aauaacccaguucugcaccacugguuuuugua

SEQ ID NO: 294134 - RNA, 32 nt, Human
aauaacccaucauaauccaaacaaaugaugcc

SEQ ID NO: 294135 - RNA, 32 nt, Human
aauaaccccauucauuucgacagggaaacgcu

SEQ ID NO: 294136 - RNA, 32 nt, Human
aauaaccccuuucugcuguucucccaugaucc

SEQ ID NO: 294137 - RNA, 32 nt, Human
aauaacccuagaagaugcaugccuucgacacu

SEQ ID NO: 294138 - RNA, 32 nt, Human
aauaaccgacuugcccagcugcccgguggugc

SEQ ID NO: 294139 - RNA, 32 nt, Human
aauaaccggaggcaggcugggugcaguggcuc

SEQ ID NO: 294140 - RNA, 32 nt, Human
aauaaccuacugggaaagauggaggucuaaau

SEQ ID NO: 294141 - RNA, 32 nt, Human
aauaaccucugccucccccaccccuuaacuuu

SEQ ID NO: 294142 - RNA, 32 nt, Human
aauaaccugcaauaacuugaaaugcauacccu

SEQ ID NO: 294143 - RNA, 32 nt, Human
aauaaccugcgauggccaaggcuguuuaagcg

SEQ ID NO: 294144 - RNA, 32 nt, Human
aauaaccuuaggcauagccauaggugaggacu

SEQ ID NO: 294145 - RNA, 32 nt, Human
aauaacguuccccagcaccccaaauggauuuc

SEQ ID NO: 294146 - RNA, 32 nt, Human
aauaacuaccauauauaacguguuauugccau

SEQ ID NO: 294147 - RNA, 32 nt, Human
aauaacuacuucugaacuccugagaucuagug

SEQ ID NO: 294148 - RNA, 32 nt, Human
aauaacuauccagcacucaccaugaaaguuaa

SEQ ID NO: 294149 - RNA, 32 nt, Human
aauaacucacaaucuuccugugcccggcuauu

SEQ ID NO: 294150 - RNA, 32 nt, Human
aauaacucagaguucugcccuuccucacauuc

SEQ ID NO: 294151 - RNA, 32 nt, Human
aauaacucauuuuucuuagagaacuaaaguag

SEQ ID NO: 294152 - RNA, 32 nt, Human
aauaacuccauucaaauuuuacauuauaaagc

SEQ ID NO: 294153 - RNA, 32 nt, Human
aauaacuccuccaguaauagagcuaggccuga

SEQ ID NO: 294154 - RNA, 32 nt, Human
aauaacucuucaggcugccucuccucgaaaag

SEQ ID NO: 294155 - RNA, 32 nt, Human
aauaacugaaacccagggggacagcagagcuu

SEQ ID NO: 294156 - RNA, 32 nt, Human
aauaacugacccucccuuccuguccgcccucu

SEQ ID NO: 294157 - RNA, 32 nt, Human
aauaacugaguuauauucacuguggcucaaac

SEQ ID NO: 294158 - RNA, 32 nt, Human
aauaacugcaccugaauuuguuuaugugccuu

SEQ ID NO: 294159 - RNA, 32 nt, Human
aauaacugccuauccagauaugccacacuucu

SEQ ID NO: 294160 - RNA, 32 nt, Human
aauaacugccugcugcucagagaugaucuuua

SEQ ID NO: 294161 - RNA, 32 nt, Human
aauaacugggagaugaaacaggaagcucuaug

SEQ ID NO: 294162 - RNA, 32 nt, Human
aauaacugggcuguugaugcaggucaggugga

SEQ ID NO: 294163 - RNA, 32 nt, Human
aauaacuggugugguuucucucuccugacuca

SEQ ID NO: 294164 - RNA, 32 nt, Human
aauaacuguucugcucauggaagucuuaaaca

SEQ ID NO: 294165 - RNA, 32 nt, Human
aauaacuugucuaacaacucucuaauagggac

SEQ ID NO: 294166 - RNA, 32 nt, Human
aauaacuuuguugccauagaagaagaaccgca

SEQ ID NO: 294167 - RNA, 32 nt, Human
aauaagaaaagcuuucagaaccaggaaggacg

SEQ ID NO: 294168 - RNA, 32 nt, Human
aauaagaacccagcagcauggaacuucccacu

SEQ ID NO: 294169 - RNA, 32 nt, Human
aauaagaacguggccaccugcccagcuucaca

SEQ ID NO: 294170 - RNA, 32 nt, Human
aauaagaagguugaggcugaagagugaggacu

SEQ ID NO: 294171 - RNA, 32 nt, Human
aauaagaaucaucagagagcuguauccauguc

SEQ ID NO: 294172 - RNA, 32 nt, Human
aauaagacacagauugcugggcucauggucag

SEQ ID NO: 294173 - RNA, 32 nt, Human
aauaagacauugaaggaccaauuuagacuuag

SEQ ID NO: 294174 - RNA, 32 nt, Human
aauaagacccaauucuuaacagucuuuucuac

SEQ ID NO: 294175 - RNA, 32 nt, Human
aauaagagagaaaguggaggagagggacaaaa

SEQ ID NO: 294176 - RNA, 32 nt, Human
aauaagagcucaggaugagggaaaagaaaaag

SEQ ID NO: 294177 - RNA, 32 nt, Human
aauaagagggagagaauuaagagaggaagcaa

SEQ ID NO: 294178 - RNA, 31 nt, Human
aauaagaucaauaaauacuuguggaaugcaa

SEQ ID NO: 294179 - RNA, 32 nt, Human
aauaagaucagguacugugucagcauugauuu

SEQ ID NO: 294180 - RNA, 32 nt, Human
aauaagauggaaccaggaaaccuagcaauagu

SEQ ID NO: 294181 - RNA, 31 nt, Human
aauaagaugugcaaagggcuugcaggucugc

SEQ ID NO: 294182 - RNA, 32 nt, Human
aauaagauuuucugauuguccagaagacauuu

SEQ ID NO: 294183 - RNA, 32 nt, Human
aauaagcaaaacugauccaugguguuagaagc

SEQ ID NO: 294184 - RNA, 18 nt, Human
aauaagcaaaggauuuca

SEQ ID NO: 294185 - RNA, 32 nt, Human
aauaagcaacagacccguuuccgggugcaucu

SEQ ID NO: 294186 - RNA, 32 nt, Human
aauaagcaaccaggaguaaucugacucuaaaa

SEQ ID NO: 294187 - RNA, 31 nt, Human
aauaagcacaauaaauaucuuuuuggauaca

SEQ ID NO: 294188 - RNA, 32 nt, Human
aauaagcacugggagauuggaagcacugcuaa

SEQ ID NO: 294189 - RNA, 32 nt, Human
aauaagcagacagaaucaaccacuaaagguag

SEQ ID NO: 294190 - RNA, 32 nt, Human
aauaagcagcaccccgcaugcacuacccccau

SEQ ID NO: 294191 - RNA, 32 nt, Human
aauaagcauggacugcaaccaccuacaugaau

SEQ ID NO: 294192 - RNA, 32 nt, Human
aauaagcauuuaaagugcugaagaggauuuau

SEQ ID NO: 294193 - RNA, 32 nt, Human
aauaagccaaagaauaccaggccaagguguga

SEQ ID NO: 294194 - RNA, 32 nt, Human
aauaagccagugaccagauuucccccagaugu

SEQ ID NO: 294195 - RNA, 32 nt, Human
aauaagccuaucuuuuugugcuuacauacuua

SEQ ID NO: 294196 - RNA, 32 nt, Human
aauaagcuacuauccugaggcugaggguuuug

SEQ ID NO: 294197 - RNA, 32 nt, Human
aauaagcucagcuaauucaagacacuguaguc

SEQ ID NO: 294198 - RNA, 32 nt, Human
aauaagcucuucuucuuugugcuccacuucag

SEQ ID NO: 294199 - RNA, 32 nt, Human
aauaagcuugccaacauaauggacuugaacaa

SEQ ID NO: 294200 - RNA, 32 nt, Human
aauaaggagacaaggacacagacauguacaga

SEQ ID NO: 294201 - RNA, 32 nt, Human
aauaaggaugaaauaaucacucauucuaugaa

SEQ ID NO: 294202 - RNA, 32 nt, Human
aauaaggauucccauuccccgaguauucuggu

SEQ ID NO: 294203 - RNA, 32 nt, Human
aauaaggcauacaggaccugguaugccaaacu

SEQ ID NO: 294204 - RNA, 32 nt, Human
aauaagggaaaaaugggaacuggagagugugg

SEQ ID NO: 294205 - RNA, 32 nt, Human
aauaagggacuugcagcucaaguauaucugug

SEQ ID NO: 294206 - RNA, 32 nt, Human
aauaagggaggagagaggacuggagagugugg

SEQ ID NO: 294207 - RNA, 32 nt, Human
aauaagggaggagaggggacuggagagugugg

SEQ ID NO: 294208 - RNA, 32 nt, Human
aauaaggucauuuuucuccaucaggggcaaau

SEQ ID NO: 294209 - RNA, 32 nt, Human
aauaaguaaaacacuuggccucgaggccuuuu

SEQ ID NO: 294210 - RNA, 32 nt, Human
aauaaguagacuguuuuuaugugugaauuaua

SEQ ID NO: 294211 - RNA, 32 nt, Human
aauaaguauacaagaucacagaccuaaauuga

SEQ ID NO: 294212 - RNA, 32 nt, Human
aauaaguauucuugcaucuggccuuagaaaug

SEQ ID NO: 294213 - RNA, 32 nt, Human
aauaagucauaccuucuuaaaacagaaaauuu

SEQ ID NO: 294214 - RNA, 32 nt, Human
aauaagucuaaaggcagagccccagccucaga

SEQ ID NO: 294215 - RNA, 32 nt, Human
aauaagucucucauaaugagugcagugucaga

SEQ ID NO: 294216 - RNA, 32 nt, Human
aauaagucugccucugccucugccucacccug

SEQ ID NO: 294217 - RNA, 32 nt, Human
aauaagugaacaaguaaugaagauuucaccug

SEQ ID NO: 294218 - RNA, 32 nt, Human
aauaagugaaguugccagaaauggucaacuga

SEQ ID NO: 294219 - RNA, 32 nt, Human
aauaagugauacuuuggaaagaugcaugccag

SEQ ID NO: 294220 - RNA, 32 nt, Human
aauaagugcaguuugcugucucuugcauccag

SEQ ID NO: 294221 - RNA, 32 nt, Human
aauaagugcucaauaaauacugagugaaaucc

SEQ ID NO: 294222 - RNA, 32 nt, Human
aauaaguggacuuucugucugccuuguacuuc

SEQ ID NO: 294223 - RNA, 32 nt, Human
aauaaguguacauauguaaaauauuguuacua

SEQ ID NO: 294224 - RNA, 32 nt, Human
aauaaguguuggggucugucccuucccaagca

SEQ ID NO: 294225 - RNA, 32 nt, Human
aauaaguugauguuuucuaaggcccuuuuucc

SEQ ID NO: 294226 - RNA, 32 nt, Human
aauaaguuucaaggagacuaucaggauuauua

SEQ ID NO: 294227 - RNA, 32 nt, Human
aauaauaaagaauagcuuuaaugauaugcuug

SEQ ID NO: 294228 - RNA, 28 nt, Human
aauaauaaagugaaaauauuaacauuug

SEQ ID NO: 294229 - RNA, 32 nt, Human
aauaauaacaggcugggugcaauggcucacac

SEQ ID NO: 294230 - RNA, 32 nt, Human
aauaauaacauacccacacaauuaauauaagg

SEQ ID NO: 294231 - RNA, 32 nt, Human
aauaauaacuuccaugcugccugcuguguucc

SEQ ID NO: 294232 - RNA, 32 nt, Human
aauaauaagauagggcugggcgcgguggcuca

SEQ ID NO: 294233 - RNA, 32 nt, Human
aauaauaaugcugcugcuacuccaaggcacac

SEQ ID NO: 294234 - RNA, 32 nt, Human
aauaauaauggugugugccugcaguccuagcu

SEQ ID NO: 294235 - RNA, 32 nt, Human
aauaauacgaugaaaacuaacauccuuauuuu

SEQ ID NO: 294236 - RNA, 32 nt, Human
aauaauacgggugccacacacagugaucaccu

SEQ ID NO: 294237 - RNA, 32 nt, Human
aauaauacugcaagaaaacuauggcugaacuu

SEQ ID NO: 294238 - RNA, 32 nt, Human
aauaauacugcuauauguguagaaggaaaauu

SEQ ID NO: 294239 - RNA, 32 nt, Human
aauaauacuuccuucucagaaggaggcucccg

SEQ ID NO: 294240 - RNA, 32 nt, Human
aauaauaggacaggacacagagcuggaauauu

SEQ ID NO: 294241 - RNA, 32 nt, Human
aauaauaggagagaaagagagaaacuucagaa

SEQ ID NO: 294242 - RNA, 32 nt, Human
aauaauaggagcaaccugcucucgagagucca

SEQ ID NO: 294243 - RNA, 32 nt, Human
aauaauaggcuacucgggaggcugaggcugga

SEQ ID NO: 294244 - RNA, 32 nt, Human
aauaauagguaaaugcaacagaaacagaagga

SEQ ID NO: 294245 - RNA, 31 nt, Human
aauaauauaauaaaagccuguugaggguccu

SEQ ID NO: 294246 - RNA, 32 nt, Human
aauaauaucccccaguauuuuccauauuaaau

SEQ ID NO: 294247 - RNA, 32 nt, Human
aauaauauuaauguagcuuuuucccaaaugaa

SEQ ID NO: 294248 - RNA, 32 nt, Human
aauaauauucuuacuguccaaggcuuaagugg

SEQ ID NO: 294249 - RNA, 32 nt, Human
aauaauauuugcuuuuguugaaugacuacuaa

SEQ ID NO: 294250 - RNA, 32 nt, Human
aauaaucaaaacugauaacaaugaaacugcgg

SEQ ID NO: 294251 - RNA, 32 nt, Human
aauaaucaagagccuuaaaacaucauuccuuu

SEQ ID NO: 294252 - RNA, 32 nt, Human
aauaaucacaauauauucaucccuucaguucu

SEQ ID NO: 294253 - RNA, 32 nt, Human
aauaaucacuaaaggccaggugcaguggccca

SEQ ID NO: 294254 - RNA, 32 nt, Human
aauaaucaggaggcuggguuugugcuuggcuc

SEQ ID NO: 294255 - RNA, 32 nt, Human
aauaaucauaucucuuuugacauuuuggaaau

SEQ ID NO: 294256 - RNA, 32 nt, Human
aauaaucaucacaaugaucaaaucacugaacc

SEQ ID NO: 294257 - RNA, 32 nt, Human
aauaauccaagcuugcaccacauucagcauua

SEQ ID NO: 294258 - RNA, 32 nt, Human
aauaaucccagugccauuugucugugcaaaga

SEQ ID NO: 294259 - RNA, 32 nt, Human
aauaauccucaggauuuuacaggcuggguaua

SEQ ID NO: 294260 - RNA, 32 nt, Human
aauaauccugcagguuuuauuguuaugaauaa

SEQ ID NO: 294261 - RNA, 32 nt, Human
aauaaucgcuugaacccaggaggcagagguug

SEQ ID NO: 294262 - RNA, 32 nt, Human
aauaaucgucauaggaaagacgugccaguugu

SEQ ID NO: 294263 - RNA, 32 nt, Human
aauaaucgucuccuuugacauuuccuucuuug

SEQ ID NO: 294264 - RNA, 32 nt, Human
aauaaucuaaaucauuagggcagcaguuucuc

SEQ ID NO: 294265 - RNA, 32 nt, Human
aauaaucuacagccuuccuuccccggaugccu

SEQ ID NO: 294266 - RNA, 32 nt, Human
aauaaucuccaaaagugacuuuuuggcuguuc

SEQ ID NO: 294267 - RNA, 32 nt, Human
aauaaucucuccccaaauuuuccaauaauaau

SEQ ID NO: 294268 - RNA, 32 nt, Human
aauaaucugggacccaggcuugugcccuuuca

SEQ ID NO: 294269 - RNA, 32 nt, Human
aauaaucuguaguuuccaggacaguggcagag

SEQ ID NO: 294270 - RNA, 32 nt, Human
aauaaucuuacucuagauaccuaaaacauaag

SEQ ID NO: 294271 - RNA, 32 nt, Human
aauaaucuugcuguuuuuccucuuuaugacaa

SEQ ID NO: 294272 - RNA, 32 nt, Human
aauaaucuuuuguaacacuuauacacugcugg

SEQ ID NO: 294273 - RNA, 32 nt, Human
aauaaugaaugagauuaauuaagaaaugaaug

SEQ ID NO: 294274 - RNA, 32 nt, Human
aauaaugacaccccacugucuccuugcccuca

SEQ ID NO: 294275 - RNA, 32 nt, Human
aauaaugacuauuucaaaauugcuaaaagaug

SEQ ID NO: 294276 - RNA, 32 nt, Human
aauaaugaggccaguagcaccugcuggacagg

SEQ ID NO: 294277 - RNA, 32 nt, Human
aauaaugauuggccuucuguuuggaagaucag

SEQ ID NO: 294278 - RNA, 32 nt, Human
aauaaugcacagaaaaaugcagccuauaauuu

SEQ ID NO: 294279 - RNA, 32 nt, Human
aauaaugcagugguuucuaucaugcuaauuua

SEQ ID NO: 294280 - RNA, 32 nt, Human
aauaaugcauaucagaaucuuuauauggaaga

SEQ ID NO: 294281 - RNA, 32 nt, Human
aauaaugcuaucuuauccuuuuuagugcuauu

SEQ ID NO: 294282 - RNA, 32 nt, Human
aauaaugcuguuguguuagcucugaguagaaa

SEQ ID NO: 294283 - RNA, 32 nt, Human
aauaauggcaaaaacuggcugggcacaguggc

SEQ ID NO: 294284 - RNA, 32 nt, Human
aauaauggccaucaugacuauagaaugcaagg

SEQ ID NO: 294285 - RNA, 32 nt, Human
aauaaugggaugucaucaccauugcuagaaua

SEQ ID NO: 294286 - RNA, 32 nt, Human
aauaauggggucuuuuauaaauccaaaguacu

SEQ ID NO: 294287 - RNA, 32 nt, Human
aauaaugguagaaaaugucccagcuuugauga

SEQ ID NO: 294288 - RNA, 32 nt, Human
aauaauggucccauccaggcagucgggggcug

SEQ ID NO: 294289 - RNA, 32 nt, Human
aauaaugguggcaguggugggauaaacggaga

SEQ ID NO: 294290 - RNA, 32 nt, Human
aauaauguaauacuguagaaauauugcucuaa

SEQ ID NO: 294291 - RNA, 32 nt, Human
aauaauguaccuauuccuucagaaagaugaua

SEQ ID NO: 294292 - RNA, 32 nt, Human
aauaaugucacugaauuauacacuuuaaagug

SEQ ID NO: 294293 - RNA, 32 nt, Human
aauaaugucaucccagugcuucuggagaauag

SEQ ID NO: 294294 - RNA, 32 nt, Human
aauaaugucuccugccaguacuaaggcauggc

SEQ ID NO: 294295 - RNA, 32 nt, Human
aauaaugugagugccacgcucuuucugaagcu

SEQ ID NO: 294296 - RNA, 32 nt, Human
aauaaugugcacugaauaaauuguacagccgg

SEQ ID NO: 294297 - RNA, 32 nt, Human
aauaaugugggauccuuaucagcaugcccaca

SEQ ID NO: 294298 - RNA, 32 nt, Human
aauaaugugggcugccagccucucacaucuug

SEQ ID NO: 294299 - RNA, 32 nt, Human
aauaaugugugugaccuugcaguucuuccaca

SEQ ID NO: 294300 - RNA, 32 nt, Human
aauaauguuaaagaaaaguuaucagagaagca

SEQ ID NO: 294301 - RNA, 32 nt, Human
aauaauguucaugaccacaggcugccauagca

SEQ ID NO: 294302 - RNA, 32 nt, Human
aauaauguucucugcuacuuuuaaccugauuu

SEQ ID NO: 294303 - RNA, 32 nt, Human
aauaauuaaucaccggaauuagccagguagaa

SEQ ID NO: 294304 - RNA, 32 nt, Human
aauaauuaccauugaaaaagaaguuccuuuga

SEQ ID NO: 294305 - RNA, 32 nt, Human
aauaauucaaagccuuaaugcagaugcacuaa

SEQ ID NO: 294306 - RNA, 32 nt, Human
aauaauucaguuaaacacugcugcaauauuuc

SEQ ID NO: 294307 - RNA, 32 nt, Human
aauaauucaugcacugaauuucccuucccggc

SEQ ID NO: 294308 - RNA, 32 nt, Human
aauaauucaugccaaaaauaaaauuagcguaa

SEQ ID NO: 294309 - RNA, 32 nt, Human
aauaauucauucuugcuaagcuucauguugac

SEQ ID NO: 294310 - RNA, 32 nt, Human
aauaauuccucuuuauucuuuucauuucaacc

SEQ ID NO: 294311 - RNA, 32 nt, Human
aauaauugaaaacaccagaagguugagguuua

SEQ ID NO: 294312 - RNA, 32 nt, Human
aauaauuggaagcacaaugcauggcacugacu

SEQ ID NO: 294313 - RNA, 32 nt, Human
aauaauuguuagaaauucagaaugacaaguuu

SEQ ID NO: 294314 - RNA, 32 nt, Human
aauaauuguucuaugcuuuaauaaucuauugu

SEQ ID NO: 294315 - RNA, 32 nt, Human
aauaauuuaguggauggaauaucagaaguaua

SEQ ID NO: 294316 - RNA, 32 nt, Human
aauaauuuaucaggaaauacugccuguagagu

SEQ ID NO: 294317 - RNA, 32 nt, Human
aauaauuuaugccaggaaaccaggaagucauu

SEQ ID NO: 294318 - RNA, 32 nt, Human
aauaauuucacucaccccuccccugguuucug

SEQ ID NO: 294319 - RNA, 32 nt, Human
aauaauuuguccuauuuuucucugucacuucc

SEQ ID NO: 294320 - RNA, 32 nt, Human
aauaauuuuaugcuggacucuggaccauauac

SEQ ID NO: 294321 - RNA, 32 nt, Human
aauaauuuuaugucagcacuaaccucacuuua

SEQ ID NO: 294322 - RNA, 32 nt, Human
aauaauuuuccugcauuuucugcuuuauuuac

SEQ ID NO: 294323 - RNA, 32 nt, Human
aauaauuuucuacaaaaauuagccaggcaugg

SEQ ID NO: 294324 - RNA, 32 nt, Human
aauaauuuuuaagagauuaaagugccagaugg

SEQ ID NO: 294325 - RNA, 32 nt, Human
aauaauuuuucuuggauuuggggugaaauuuu

SEQ ID NO: 294326 - RNA, 32 nt, Human
aauacaaaaauuagcuggcaugguggugugca

SEQ ID NO: 294327 - RNA, 32 nt, Human
aauacaaaauuagcagggcaugguggcgcaug

SEQ ID NO: 294328 - RNA, 32 nt, Human
aauacaaaauuagccaggcauggugacgcaug

SEQ ID NO: 294329 - RNA, 32 nt, Human
aauacaaaauuagccaggcaugguggcacaug

SEQ ID NO: 294330 - RNA, 32 nt, Human
aauacaaaauuagccaggcaugguggcgcaug

SEQ ID NO: 294331 - RNA, 32 nt, Human
aauacaaaauuagccaggcaugguggugcaug

SEQ ID NO: 294332 - RNA, 32 nt, Human
aauacaaaauuagccgagcaugguggcucacg

SEQ ID NO: 294333 - RNA, 32 nt, Human
aauacaaaauuagccgggcaugggggcgcgca

SEQ ID NO: 294334 - RNA, 32 nt, Human
aauacaaaauuagccgggcaugguggcacaua

SEQ ID NO: 294335 - RNA, 32 nt, Human
aauacaaaauuagccgggcaugguggcacaug

SEQ ID NO: 294336 - RNA, 32 nt, Human
aauacaaaauuagccgggcaugguggugcaug

SEQ ID NO: 294337 - RNA, 32 nt, Human
aauacaaaauuagccggucaugguggugcaug

SEQ ID NO: 294338 - RNA, 32 nt, Human
aauacaaaauuagcugggcaugguggcacaug

SEQ ID NO: 294339 - RNA, 32 nt, Human
aauacaaaauuagcugggcaugguggcaugug

SEQ ID NO: 294340 - RNA, 32 nt, Human
aauacaaaauuagcugggcaugguggcgcaug

SEQ ID NO: 294341 - RNA, 32 nt, Human
aauacaaaauuagcugggcaugguggugcaug

SEQ ID NO: 294342 - RNA, 32 nt, Human
aauacaaaauuagcugggcgugguggcacaug

SEQ ID NO: 294343 - RNA, 32 nt, Human
aauacaaaauuagcugggcgugguggcacgug

SEQ ID NO: 294344 - RNA, 32 nt, Human
aauacaaaauuagcugggcgugguggcgcaug

SEQ ID NO: 294345 - RNA, 32 nt, Human
aauacaaaauuagcugggcgugguggcgcauu

SEQ ID NO: 294346 - RNA, 32 nt, Human
aauacaaaauuagcugggcgugguggcgggcg

SEQ ID NO: 294347 - RNA, 32 nt, Human
aauacaaaauuagcugggcgugguggugcgca

SEQ ID NO: 294348 - RNA, 32 nt, Human
aauacaaaauuagcugggcgugguggugugca

SEQ ID NO: 294349 - RNA, 32 nt, Human
aauacaaaauuagcugggcguggugguuugcg

SEQ ID NO: 294350 - RNA, 32 nt, Human
aauacaaaauuagcugggugggguggugcaug

SEQ ID NO: 294351 - RNA, 32 nt, Human
aauacaaaauuagcugggugugcuggugcaug

SEQ ID NO: 294352 - RNA, 32 nt, Human
aauacaaaauuagcugggugugguggcacaug

SEQ ID NO: 294353 - RNA, 32 nt, Human
aauacaaaauuagcugggugugguggcgcaug

SEQ ID NO: 294354 - RNA, 32 nt, Human
aauacaaaauuagcugggugugguggcgggug

SEQ ID NO: 294355 - RNA, 32 nt, Human
aauacaaaauuagcuggguuugguggcgcaug

SEQ ID NO: 294356 - RNA, 32 nt, Human
aauacaaaauuagucggguaugguggcacaug

SEQ ID NO: 294357 - RNA, 32 nt, Human
aauacaaacugcacuaugauuugcuuuaacua

SEQ ID NO: 294358 - RNA, 32 nt, Human
aauacaaagauaaggauggucacagugauuuc

SEQ ID NO: 294359 - RNA, 32 nt, Human
aauacaaagauggaaagccaguaaagaaguca

SEQ ID NO: 294360 - RNA, 32 nt, Human
aauacaaagcccauucuuccagagucuugugc

SEQ ID NO: 294361 - RNA, 32 nt, Human
aauacaaaguuagccaggcaugguggugcaug

SEQ ID NO: 294362 - RNA, 32 nt, Human
aauacaaaguugagccacgguccuuacuuaaa

SEQ ID NO: 294363 - RNA, 32 nt, Human
aauacaaauauuaucacauagcgucaacuuau

SEQ ID NO: 294364 - RNA, 32 nt, Human
aauacaaauauuaucacauagcgucaauuuau

SEQ ID NO: 294365 - RNA, 32 nt, Human
aauacaaaugcugggcugggcacaguggcuca

SEQ ID NO: 294366 - RNA, 32 nt, Human
aauacaacaaauuuuggacaagguuacuucau

SEQ ID NO: 294367 - RNA, 32 nt, Human
aauacaacaacaacaaaauuagcugggcauga

SEQ ID NO: 294368 - RNA, 32 nt, Human
aauacaacacaaagcaauuauucuuccuaucu

SEQ ID NO: 294369 - RNA, 32 nt, Human
aauacaacaccuugugcugaaaacuucagguu

SEQ ID NO: 294370 - RNA, 32 nt, Human
aauacaaccagcuccugcucagaacucucuuc

SEQ ID NO: 294371 - RNA, 32 nt, Human
aauacaacugcaguggggcugcuugugguuuc

SEQ ID NO: 294372 - RNA, 32 nt, Human
aauacaagauuaccugggcaugguggugcaug

SEQ ID NO: 294373 - RNA, 32 nt, Human
aauacaagccaaaacaggaauauuucuccaca

SEQ ID NO: 294374 - RNA, 32 nt, Human
aauacaagcucuccacacagguaugcuccucu

SEQ ID NO: 294375 - RNA, 32 nt, Human
aauacaaggaggaggaggguuagcaggcguuc

SEQ ID NO: 294376 - RNA, 32 nt, Human
aauacaagucauggguugccauggugauuauu

SEQ ID NO: 294377 - RNA, 32 nt, Human
aauacaaucugcuacuuuacuaauucauaaau

SEQ ID NO: 294378 - RNA, 32 nt, Human
aauacaaugcauagaguaaacaugcaacagau

SEQ ID NO: 294379 - RNA, 23 nt, Human
aauacaaugcccaugccuucugg

SEQ ID NO: 294380 - RNA, 32 nt, Human
aauacaauugcaaguauuaacagcagaguaga

SEQ ID NO: 294381 - RNA, 32 nt, Human
aauacacaaaacacacuaggggccgggcacag

SEQ ID NO: 294382 - RNA, 32 nt, Human
aauacacaaaacugggagugagagggguauuu

SEQ ID NO: 294383 - RNA, 32 nt, Human
aauacacaaaggccagggagccuuuggcuugg

SEQ ID NO: 294384 - RNA, 32 nt, Human
aauacacaauuaauuuacacacacauuuuacu

SEQ ID NO: 294385 - RNA, 32 nt, Human
aauacacacaauaucugagacacuuacacuuu

SEQ ID NO: 294386 - RNA, 24 nt, Human
aauacacacacauacguauacaca

SEQ ID NO: 294387 - RNA, 32 nt, Human
aauacacacaugcacacacauauacacacaug

SEQ ID NO: 294388 - RNA, 32 nt, Human
aauacacacccacucgcacaagcuuccaucca

SEQ ID NO: 294389 - RNA, 32 nt, Human
aauacacagaagagguuucuguuuuucugugg

SEQ ID NO: 294390 - RNA, 32 nt, Human
aauacacagaugcacacacacaagcacacaug

SEQ ID NO: 294391 - RNA, 32 nt, Human
aauacacaugaaagccagccucggcgggcaga

SEQ ID NO: 294392 - RNA, 32 nt, Human
aauacacaugcuauaaguucgccuuaagauuu

SEQ ID NO: 294393 - RNA, 32 nt, Human
aauacaccuugauuuuguaauuuagaagcaac

SEQ ID NO: 294394 - RNA, 32 nt, Human
aauacacggcugcgggaugacagggacgccug

SEQ ID NO: 294395 - RNA, 32 nt, Human
aauacacguguauaugaggauguauguguaua

SEQ ID NO: 294396 - RNA, 32 nt, Human
aauacacuaugaguuacuaaaauaucauggau

SEQ ID NO: 294397 - RNA, 32 nt, Human
aauacacucuucucucagugcaguguacauuu

SEQ ID NO: 294398 - RNA, 32 nt, Human
aauacacugaagauggagaauuuggagccugg

SEQ ID NO: 294399 - RNA, 32 nt, Human
aauacacugacacgcuacuguugguuaaauuu

SEQ ID NO: 294400 - RNA, 32 nt, Human
aauacacuguaccucuuccuugcugucucugg

SEQ ID NO: 294401 - RNA, 32 nt, Human
aauacacuucuucuuuaggcauugaagacugu

SEQ ID NO: 294402 - RNA, 32 nt, Human
aauacagaaacaacuggcaaaaaugaacuaag

SEQ ID NO: 294403 - RNA, 32 nt, Human
aauacagaauuagccaggcaugguggcacaug

SEQ ID NO: 294404 - RNA, 32 nt, Human
aauacagaauuagccaggcaugguggcguaug

SEQ ID NO: 294405 - RNA, 32 nt, Human
aauacagaauuagccgggcauggugcaugccu

SEQ ID NO: 294406 - RNA, 32 nt, Human
aauacagaauuagcugagugugguggcgcaug

SEQ ID NO: 294407 - RNA, 32 nt, Human
aauacagacaugcacauuccuguaugugcauu

SEQ ID NO: 294408 - RNA, 32 nt, Human
aauacagagauaaaagaggaguagaagguaaa

SEQ ID NO: 294409 - RNA, 32 nt, Human
aauacagagcuggacaaccucugccucggccc

SEQ ID NO: 294410 - RNA, 24 nt, Human
aauacagaguaggaaagguuugca

SEQ ID NO: 294411 - RNA, 32 nt, Human
aauacagagucuuccaggugggcauuucaacc

SEQ ID NO: 294412 - RNA, 32 nt, Human
aauacagauagaaacauagauaaauauaacua

SEQ ID NO: 294413 - RNA, 32 nt, Human
aauacagauguuuucccuuguggcagucuuca

SEQ ID NO: 294414 - RNA, 32 nt, Human
aauacagcccugaggagcaggcagcaggcuua

SEQ ID NO: 294415 - RNA, 32 nt, Human
aauacagcgacagaccuaucugaaaagucugu

SEQ ID NO: 294416 - RNA, 32 nt, Human
aauacagcucagagaauggcucuugguguggc

SEQ ID NO: 294417 - RNA, 32 nt, Human
aauacagcuucagucuggcucucuaauaggac

SEQ ID NO: 294418 - RNA, 32 nt, Human
aauacagcuuccuacauggucucccuccuucg

SEQ ID NO: 294419 - RNA, 32 nt, Human
aauacagcuucuucaucucccuaucucaugac

SEQ ID NO: 294420 - RNA, 32 nt, Human
aauacaggaacacacagggcuguguagcauga

SEQ ID NO: 294421 - RNA, 32 nt, Human
aauacagggaagcaccaacagaccauaucagu

SEQ ID NO: 294422 - RNA, 32 nt, Human
aauacagggauuacuggugugagccacugugu

SEQ ID NO: 294423 - RNA, 32 nt, Human
aauacaguauccaaacauuggagauuagugac

SEQ ID NO: 294424 - RNA, 32 nt, Human
aauacagucuacacaucuuucuuccaaagcau

SEQ ID NO: 294425 - RNA, 32 nt, Human
aauacagugccacccagauagccucacaaaac

SEQ ID NO: 294426 - RNA, 32 nt, Human
aauacagugccuggaacaauagaaagaccacc

SEQ ID NO: 294427 - RNA, 23 nt, Human
aauacaguuccuguucauccugu

SEQ ID NO: 294428 - RNA, 32 nt, Human
aauacaguugggaagggugagggugggguucu

SEQ ID NO: 294429 - RNA, 32 nt, Human
aauacaguuucuagcauuaaacaaauaaacaa

SEQ ID NO: 294430 - RNA, 32 nt, Human
aauacauaauucucuucaaagacuucagcagc

SEQ ID NO: 294431 - RNA, 32 nt, Human
aauacauauauacaaaaauuagcugggcauca

SEQ ID NO: 294432 - RNA, 32 nt, Human
aauacauauauagacacacauguacaguccgu

SEQ ID NO: 294433 - RNA, 32 nt, Human
aauacaucacgaggccagcugugugauuucug

SEQ ID NO: 294434 - RNA, 32 nt, Human
aauacaucagcaggacuggacagguuuuauau

SEQ ID NO: 294435 - RNA, 21 nt, Human
aauacaugaaacaaccaguga

SEQ ID NO: 294436 - RNA, 32 nt, Human
aauacaugaaguagugucugccauacauguua

SEQ ID NO: 294437 - RNA, 32 nt, Human
aauacaugagggaaccagaguucaaaguccua

SEQ ID NO: 294438 - RNA, 32 nt, Human
aauacaugcaugcacaugaaaacaugcacaac

SEQ ID NO: 294439 - RNA, 32 nt, Human
aauacaugccuguggucucagcuacucgggag

SEQ ID NO: 294440 - RNA, 32 nt, Human
aauacaugcucacaucuuacucaacaucagag

SEQ ID NO: 294441 - RNA, 32 nt, Human
aauacauggucugcugacuccuccucagcccc

SEQ ID NO: 294442 - RNA, 32 nt, Human
aauacauguucaugucuacaccacgcuggaac

SEQ ID NO: 294443 - RNA, 32 nt, Human
aauacauucugaaccacuuuuuccaccagcuu

SEQ ID NO: 294444 - RNA, 32 nt, Human
aauacauugaaggaguguaggggguggggguu

SEQ ID NO: 294445 - RNA, 32 nt, Human
aauacauugucacccuuccugcuuuagagagg

SEQ ID NO: 294446 - RNA, 32 nt, Human
aauacauugugccuuucucuagaugugauacg

SEQ ID NO: 294447 - RNA, 32 nt, Human
aauacauuuaaugccagccauuggaaacuagu

SEQ ID NO: 294448 - RNA, 32 nt, Human
aauacauuucauuuccuguuacccagauuguu

SEQ ID NO: 294449 - RNA, 32 nt, Human
aauacauuugauucagcuaguauuccauguca

SEQ ID NO: 294450 - RNA, 19 nt, Human
aauacauuuuugcuuacua

SEQ ID NO: 294451 - RNA, 32 nt, Human
aauaccaaagcccagauuaugagguuuuggag

SEQ ID NO: 294452 - RNA, 32 nt, Human
aauaccaauuucucugaguuucuugaaauguc

SEQ ID NO: 294453 - RNA, 32 nt, Human
aauaccagaguuagcuggguauagagguggcu

SEQ ID NO: 294454 - RNA, 32 nt, Human
aauaccagccugggcaacauagggagaccccc

SEQ ID NO: 294455 - RNA, 32 nt, Human
aauaccagccugggcaacauaguaagacccug

SEQ ID NO: 294456 - RNA, 32 nt, Human
aauaccagcuacucaggagcugaggcaggaga

SEQ ID NO: 294457 - RNA, 32 nt, Human
aauaccagcuacucaggaggcugaggcaggag

SEQ ID NO: 294458 - RNA, 32 nt, Human
aauaccagcuacucagguggcugaggcauaag

SEQ ID NO: 294459 - RNA, 32 nt, Human
aauaccagcuacuccggaggcugaggcaggag

SEQ ID NO: 294460 - RNA, 30 nt, Human
aauaccagcuugcaaugggucagcacuuua

SEQ ID NO: 294461 - RNA, 32 nt, Human
aauaccaggcaaagauuuucuucaacuauagu

SEQ ID NO: 294462 - RNA, 32 nt, Human
aauaccauacuaacugcuaaagcccuccaaga

SEQ ID NO: 294463 - RNA, 22 nt, Human
aauaccauagcugaggccacug

SEQ ID NO: 294464 - RNA, 23 nt, Human
aauaccauauuaccuugcuguug

SEQ ID NO: 294465 - RNA, 32 nt, Human
aauaccaucccauuggggguuggggcuucaac

SEQ ID NO: 294466 - RNA, 32 nt, Human
aauaccaucccccagacccgauccauucaguc

SEQ ID NO: 294467 - RNA, 24 nt, Human
aauaccaugcaaaacaggcagcug

SEQ ID NO: 294468 - RNA, 32 nt, Human
aauaccauuuuucauagaguugugccugguuu

SEQ ID NO: 294469 - RNA, 32 nt, Human
aauacccaacccaguggcaucagcagucacag

SEQ ID NO: 294470 - RNA, 32 nt, Human
aauacccaagcccucugguacccagggagcug

SEQ ID NO: 294471 - RNA, 32 nt, Human
aauacccacagcuaggacauucucucuguaau

SEQ ID NO: 294472 - RNA, 32 nt, Human
aauacccacccugccagcagcccuaggucuuc

SEQ ID NO: 294473 - RNA, 32 nt, Human
aauacccaccucagggcugauagucuuugaug

SEQ ID NO: 294474 - RNA, 32 nt, Human
aauacccacuugguugcagaggccaacuuuca

SEQ ID NO: 294475 - RNA, 32 nt, Human
aauacccagggccucaaacuugaagucacucc

SEQ ID NO: 294476 - RNA, 32 nt, Human
aauacccagucccuagaaaugugucaauaugu

SEQ ID NO: 294477 - RNA, 32 nt, Human
aauacccauccauuucuuuucagccaggggag

SEQ ID NO: 294478 - RNA, 32 nt, Human
aauacccaucucggaagaacaggugugaaugc

SEQ ID NO: 294479 - RNA, 32 nt, Human
aauaccccaaaauauggugcauggacaugcug

SEQ ID NO: 294480 - RNA, 32 nt, Human
aauaccccaaucacucagacuuacggcaacaa

SEQ ID NO: 294481 - RNA, 32 nt, Human
aauaccccacucacccagaccccacaucucca

SEQ ID NO: 294482 - RNA, 32 nt, Human
aauaccccgaagcacaggcaaccaaagcaaaa

SEQ ID NO: 294483 - RNA, 32 nt, Human
aauacccgccugaugucgugggccacaccucc

SEQ ID NO: 294484 - RNA, 32 nt, Human
aauacccuccuuggaguugcaaguauucuuuc

SEQ ID NO: 294485 - RNA, 32 nt, Human
aauacccucugccugaccaacauggugaaacc

SEQ ID NO: 294486 - RNA, 32 nt, Human
aauacccugcagcaaaaguguucacauuacug

SEQ ID NO: 294487 - RNA, 32 nt, Human
aauacccugcagccuugaccucaugggcucaa

SEQ ID NO: 294488 - RNA, 32 nt, Human
aauacccugggaacuggugaggucccaggcug

SEQ ID NO: 294489 - RNA, 32 nt, Human
aauacccuggguaugcaggacccacuauaccu

SEQ ID NO: 294490 - RNA, 32 nt, Human
aauacccugucugaccugggcucuucccgccu

SEQ ID NO: 294491 - RNA, 32 nt, Human
aauacccuguguuguggacucuuuaaaaucug

SEQ ID NO: 294492 - RNA, 32 nt, Human
aauacccuucaucccuuccuguggucccucuu

SEQ ID NO: 294493 - RNA, 32 nt, Human
aauaccggacaacgugggagauuggcuucggg

SEQ ID NO: 294494 - RNA, 32 nt, Human
aauaccgggccguguccuccccugauaggauu

SEQ ID NO: 294495 - RNA, 32 nt, Human
aauaccuacuucuuuuauuccuccuuuuggua

SEQ ID NO: 294496 - RNA, 32 nt, Human
aauaccuaggaauucauccaaccaaggggguc

SEQ ID NO: 294497 - RNA, 32 nt, Human
aauaccucauauuccccaucuuccucagccca

SEQ ID NO: 294498 - RNA, 32 nt, Human
aauaccucaucgccaugaggugaggcuaagau

SEQ ID NO: 294499 - RNA, 20 nt, Human
aauaccuccuaagaaggaca

SEQ ID NO: 294500 - RNA, 32 nt, Human
aauaccugaaaauuaagauguucaugcaagau

SEQ ID NO: 294501 - RNA, 32 nt, Human
aauaccugagcagccacaucaaaggaacuuug

SEQ ID NO: 294502 - RNA, 26 nt, Human
aauaccuggauaccaaacauacccca

SEQ ID NO: 294503 - RNA, 29 nt, Human
aauaccuggcugcugucuuaacucguagu

SEQ ID NO: 294504 - RNA, 32 nt, Human
aauaccugggaggcggagauugcagugagccg

SEQ ID NO: 294505 - RNA, 32 nt, Human
aauaccuucuauguauuagugucaacuuuuaa

SEQ ID NO: 294506 - RNA, 32 nt, Human
aauaccuugagaacugaauuuuuccaagguug

SEQ ID NO: 294507 - RNA, 32 nt, Human
aauaccuuguucucuagguccugggcuuucua

SEQ ID NO: 294508 - RNA, 32 nt, Human
aauaccuuucucaacauaaaaggacccacaca

SEQ ID NO: 294509 - RNA, 32 nt, Human
aauacgcacaauaucuuaacucuucauauuug

SEQ ID NO: 294510 - RNA, 32 nt, Human
aauacgcacuccagaugccuggaacaccauug

SEQ ID NO: 294511 - RNA, 32 nt, Human
aauacggccaagcagaaaauguuuuauauuuu

SEQ ID NO: 294512 - RNA, 25 nt, Human
aauacggucccucuucaccuucuga

SEQ ID NO: 294513 - RNA, 32 nt, Human
aauacggugagaaauuccaggagcacagaagu

SEQ ID NO: 294514 - RNA, 32 nt, Human
aauacgucgcaccagaggccacugugaugcca

SEQ ID NO: 294515 - RNA, 32 nt, Human
aauacguucuccucugaccugccuguaccacg

SEQ ID NO: 294516 - RNA, 32 nt, Human
aauacguuguuguuaacuauagucaccaugcu

SEQ ID NO: 294517 - RNA, 32 nt, Human
aauacuaaaauguaacuuuuuaaucaucuggu

SEQ ID NO: 294518 - RNA, 32 nt, Human
aauacuaaagaauucauggugagaagucuaca

SEQ ID NO: 294519 - RNA, 32 nt, Human
aauacuaagaacucacuucuguccucauccca

SEQ ID NO: 294520 - RNA, 32 nt, Human
aauacuacucaaauacuacuuuuuaaaagaga

SEQ ID NO: 294521 - RNA, 32 nt, Human
aauacuacugcugagcauuuuugaagacucuu

SEQ ID NO: 294522 - RNA, 32 nt, Human
aauacuacugucacguagcuguguacaaagag

SEQ ID NO: 294523 - RNA, 32 nt, Human
aauacuagauuugggagaagggcagaguuacu

SEQ ID NO: 294524 - RNA, 32 nt, Human
aauacuaggccucuugccuuccuuccagugag

SEQ ID NO: 294525 - RNA, 32 nt, Human
aauacuaucggggaaacggaaguggccgucgg

SEQ ID NO: 294526 - RNA, 32 nt, Human
aauacuaucuuagccaaacuugccuuugcuuc

SEQ ID NO: 294527 - RNA, 32 nt, Human
aauacuaucuuucucucuggccucuccauccu

SEQ ID NO: 294528 - RNA, 32 nt, Human
aauacuaugaaaugaaagaacuuguucacagg

SEQ ID NO: 294529 - RNA, 32 nt, Human
aauacuauguccacacagcugcagccuccuca

SEQ ID NO: 294530 - RNA, 32 nt, Human
aauacucacaaauuauuuaguauaccugaauc

SEQ ID NO: 294531 - RNA, 32 nt, Human
aauacucacagagacagaaacacugagauuuu

SEQ ID NO: 294532 - RNA, 32 nt, Human
aauacucacauucccacauacauucacuauuu

SEQ ID NO: 294533 - RNA, 32 nt, Human
aauacucaucuuacaggggaauuugugaccag

SEQ ID NO: 294534 - RNA, 32 nt, Human
aauacucauuucuacuuucugcccucaaauuu

SEQ ID NO: 294535 - RNA, 32 nt, Human
aauacucauuucuccuugucagucuccuuguc

SEQ ID NO: 294536 - RNA, 32 nt, Human
aauacuccagccuggugacagagugagacucu

SEQ ID NO: 294537 - RNA, 32 nt, Human
aauacuccagguggguguuagcacuguggugg

SEQ ID NO: 294538 - RNA, 32 nt, Human
aauacuccauuugggaacucacugccuuauaa

SEQ ID NO: 294539 - RNA, 32 nt, Human
aauacucccacagauaaaagacugcaggaucu

SEQ ID NO: 294540 - RNA, 32 nt, Human
aauacucccaccaugguugauuucaagccacc

SEQ ID NO: 294541 - RNA, 32 nt, Human
aauacucccauauaaucucugucuucauaaau

SEQ ID NO: 294542 - RNA, 32 nt, Human
aauacucccugagauguacucucaugucucau

SEQ ID NO: 294543 - RNA, 32 nt, Human
aauacucccuucuuccugcccccacaccccau

SEQ ID NO: 294544 - RNA, 32 nt, Human
aauacuccuccccucuucucuuuugcccccuc

SEQ ID NO: 294545 - RNA, 32 nt, Human
aauacucggcaggccaccugugggugggcuaa

SEQ ID NO: 294546 - RNA, 21 nt, Human
aauacucuacaccuuugggau

SEQ ID NO: 294547 - RNA, 32 nt, Human
aauacucucuccuccugaccuccugggacuuu

SEQ ID NO: 294548 - RNA, 32 nt, Human
aauacucugaaaugcacuagaccauauaacug

SEQ ID NO: 294549 - RNA, 32 nt, Human
aauacucugccucugcuucauguagcaaauga

SEQ ID NO: 294550 - RNA, 32 nt, Human
aauacucugugcaagugguuuugcagggcaua

SEQ ID NO: 294551 - RNA, 32 nt, Human
aauacucuucuccaaggacugacaaaaacaac

SEQ ID NO: 294552 - RNA, 32 nt, Human
aauacucuuuccaaaacccccuccuggguuuu

SEQ ID NO: 294553 - RNA, 32 nt, Human
aauacucuuuggcuuaaaauguucagcagaau

SEQ ID NO: 294554 - RNA, 22 nt, Human
aauacucuuuuugugcuucuga

SEQ ID NO: 294555 - RNA, 32 nt, Human
aauacugaaauuagcugggugcagugaugcgc

SEQ ID NO: 294556 - RNA, 32 nt, Human
aauacugacaauuccucgggaaccuggccucu

SEQ ID NO: 294557 - RNA, 32 nt, Human
aauacugacccuccuccucgaugccuucggag

SEQ ID NO: 294558 - RNA, 32 nt, Human
aauacugacugcucacccacagacacaaucuu

SEQ ID NO: 294559 - RNA, 32 nt, Human
aauacugagauuacaggugugagccaccacac

SEQ ID NO: 294560 - RNA, 32 nt, Human
aauacugaggggucuccaggaggagacuagau

SEQ ID NO: 294561 - RNA, 32 nt, Human
aauacugaguccuacuuccugauaauguguca

SEQ ID NO: 294562 - RNA, 32 nt, Human
aauacugauccagcagcugcuccaggagaggc

SEQ ID NO: 294563 - RNA, 32 nt, Human
aauacugcacacugcacauuugcucagaauug

SEQ ID NO: 294564 - RNA, 32 nt, Human
aauacugcauaaaaagugccuguagaugacau

SEQ ID NO: 294565 - RNA, 32 nt, Human
aauacugccauggguggaggccagcagggcag

SEQ ID NO: 294566 - RNA, 32 nt, Human
aauacuggaacaaccucuucuccaagauucuc

SEQ ID NO: 294567 - RNA, 32 nt, Human
aauacuggaagagaaacaauaaauagagacuu

SEQ ID NO: 294568 - RNA, 32 nt, Human
aauacuggaaucaccagcucaauaauaagagg

SEQ ID NO: 294569 - RNA, 32 nt, Human
aauacuggagaagagagagggugggcagagca

SEQ ID NO: 294570 - RNA, 32 nt, Human
aauacugggauuacaggggugagucaccacac

SEQ ID NO: 294571 - RNA, 32 nt, Human
aauacuggucucaggccaagcccaauacagcc

SEQ ID NO: 294572 - RNA, 32 nt, Human
aauacugguguuagcugagaacucuguaaguc

SEQ ID NO: 294573 - RNA, 32 nt, Human
aauacugucauacuugcuauuuccugguacag

SEQ ID NO: 294574 - RNA, 32 nt, Human
aauacugucauuguccuuggggcggggugguu

SEQ ID NO: 294575 - RNA, 32 nt, Human
aauacugucgucauggcuaagagaacaaaucu

SEQ ID NO: 294576 - RNA, 32 nt, Human
aauacugugaugggaaaaaggaagagugucca

SEQ ID NO: 294577 - RNA, 32 nt, Human
aauacuguggugcuugggccacugccugagag

SEQ ID NO: 294578 - RNA, 32 nt, Human
aauacuguguaccucauggaugcuuuggcaau

SEQ ID NO: 294579 - RNA, 22 nt, Human
aauacuguuuucaugccugcua

SEQ ID NO: 294580 - RNA, 32 nt, Human
aauacuguuuucuuucauucuucaccaaagaa

SEQ ID NO: 294581 - RNA, 32 nt, Human
aauacuuacaccauuacuacuguuuuaaaauu

SEQ ID NO: 294582 - RNA, 32 nt, Human
aauacuuacucauaacuucucuuccaaaaugu

SEQ ID NO: 294583 - RNA, 32 nt, Human
aauacuuagauauuuauuagauagcccugaau

SEQ ID NO: 294584 - RNA, 32 nt, Human
aauacuuagccaugcagaauaugugaccagac

SEQ ID NO: 294585 - RNA, 32 nt, Human
aauacuuauggucggaagucauuggggcaaga

SEQ ID NO: 294586 - RNA, 32 nt, Human
aauacuuauggucggaagucguuggggcaaga

SEQ ID NO: 294587 - RNA, 32 nt, Human
aauacuucagccaccagguuuuucugucucac

SEQ ID NO: 294588 - RNA, 32 nt, Human
aauacuucaugccaggacaguugcuauuagca

SEQ ID NO: 294589 - RNA, 32 nt, Human
aauacuucucugaccuccuuucuaccacuucc

SEQ ID NO: 294590 - RNA, 32 nt, Human
aauacuucuggaaaaggguuuucuugaggacu

SEQ ID NO: 294591 - RNA, 32 nt, Human
aauacuucuuucuccuugcuugccuccaccau

SEQ ID NO: 294592 - RNA, 32 nt, Human
aauacuugaacucuguucccccacccuccaug

SEQ ID NO: 294593 - RNA, 32 nt, Human
aauacuugccugaaagcugugaagaagaaaaa

SEQ ID NO: 294594 - RNA, 32 nt, Human
aauacuugcugcagcauuuaauauguuuaauu

SEQ ID NO: 294595 - RNA, 32 nt, Human
aauacuuggaguuuaacugccuucccuuugaa

SEQ ID NO: 294596 - RNA, 32 nt, Human
aauacuuggggugggaggggagaaagggaacc

SEQ ID NO: 294597 - RNA, 32 nt, Human
aauacuugguauccaccggguaagagugguua

SEQ ID NO: 294598 - RNA, 32 nt, Human
aauacuugguuuauuucuacuguacauuguuu

SEQ ID NO: 294599 - RNA, 32 nt, Human
aauacuuuaagaggaguggaaggaacacaaac

SEQ ID NO: 294600 - RNA, 32 nt, Human
aauacuuuaagaggggugaggggagagagaaa

SEQ ID NO: 294601 - RNA, 32 nt, Human
aauacuuuaauguuguuuauagccuaacaguu

SEQ ID NO: 294602 - RNA, 32 nt, Human
aauacuuucccaacaggaagucugaucuguug

SEQ ID NO: 294603 - RNA, 32 nt, Human
aauacuuucuaccuucuucacagagcagccuu

SEQ ID NO: 294604 - RNA, 32 nt, Human
aauacuuugcauccuucaauccagucaagcug

SEQ ID NO: 294605 - RNA, 32 nt, Human
aauacuuuggacugcaggacaggacaguauug

SEQ ID NO: 294606 - RNA, 32 nt, Human
aauacuuuguuuccagcccccuucccacacuc

SEQ ID NO: 294607 - RNA, 32 nt, Human
aauacuuuucuucuucuuacuaauucuuuuag

SEQ ID NO: 294608 - RNA, 22 nt, Human
aauacuuuucuuuguaugaaaa

SEQ ID NO: 294609 - RNA, 32 nt, Human
aauagaaaaaguaggcugggcgcgguggcuca

SEQ ID NO: 294610 - RNA, 32 nt, Human
aauagaaaaggagagaagaugucaguauguuu

SEQ ID NO: 294611 - RNA, 32 nt, Human
aauagaaaagggagaggaaaaagggaaggauu

SEQ ID NO: 294612 - RNA, 32 nt, Human
aauagaaaaguggggagccgcuggggagccac

SEQ ID NO: 294613 - RNA, 32 nt, Human
aauagaaacaugcacauggaaacccaugagcu

SEQ ID NO: 294614 - RNA, 32 nt, Human
aauagaaacuuccaaauguaaccauggaagcu

SEQ ID NO: 294615 - RNA, 32 nt, Human
aauagaaagagucaguuaaaauucagcauuca

SEQ ID NO: 294616 - RNA, 32 nt, Human
aauagaaagaguucuauggagacuuugcuguu

SEQ ID NO: 294617 - RNA, 32 nt, Human
aauagaaagauaaugcaagccacauauguaaa

SEQ ID NO: 294618 - RNA, 32 nt, Human
aauagaaaggagagagaauaugaaagagcaaa

SEQ ID NO: 294619 - RNA, 32 nt, Human
aauagaaauacuggugccugcagagcagcacu

SEQ ID NO: 294620 - RNA, 32 nt, Human
aauagaaauauguauuuuaagcacucacgcaa

SEQ ID NO: 294621 - RNA, 32 nt, Human
aauagaaauauguauuuuaagcacucaugcaa

SEQ ID NO: 294622 - RNA, 32 nt, Human
aauagaacauugauugcuguguccaacuccag

SEQ ID NO: 294623 - RNA, 32 nt, Human
aauagaacccaggagguggagacugcagugag

SEQ ID NO: 294624 - RNA, 32 nt, Human
aauagaaccccugguuuuagcugggcacauga

SEQ ID NO: 294625 - RNA, 32 nt, Human
aauagaaccucaccugcucaugaccagagagc

SEQ ID NO: 294626 - RNA, 32 nt, Human
aauagaacuaucuucaccacacucacuauuuc

SEQ ID NO: 294627 - RNA, 32 nt, Human
aauagaacuccaagccuuuucuccacuacuau

SEQ ID NO: 294628 - RNA, 32 nt, Human
aauagaagcgucgaaggagaucaagugaaccu

SEQ ID NO: 294629 - RNA, 32 nt, Human
aauagaagcucacaugucuccugcucuuacaa

SEQ ID NO: 294630 - RNA, 32 nt, Human
aauagaagcuggauuccaucagauuucaaaug

SEQ ID NO: 294631 - RNA, 32 nt, Human
aauagaaggguuguuucuguauuuuaacauuu

SEQ ID NO: 294632 - RNA, 32 nt, Human
aauagaagugagaugucuuccucuucacuugc

SEQ ID NO: 294633 - RNA, 32 nt, Human
aauagaaugugaucaagagggccaggcgagau

SEQ ID NO: 294634 - RNA, 32 nt, Human
aauagaauucaaaaaucucugcauccugaggu

SEQ ID NO: 294635 - RNA, 32 nt, Human
aauagaauucagcucaagcaguuguuuucagu

SEQ ID NO: 294636 - RNA, 32 nt, Human
aauagaauuguauagauuauuuuugcacaguu

SEQ ID NO: 294637 - RNA, 32 nt, Human
aauagaauuguuucuucugaauaaucuaacaa

SEQ ID NO: 294638 - RNA, 32 nt, Human
aauagacacggccuuuccucucugccucuggc

SEQ ID NO: 294639 - RNA, 32 nt, Human
aauagacacucaauaaauaauuguugaauuca

SEQ ID NO: 294640 - RNA, 32 nt, Human
aauagacacucaauaaauacuuguugaauuca

SEQ ID NO: 294641 - RNA, 32 nt, Human
aauagacagcacaacacaaacucucucaauac

SEQ ID NO: 294642 - RNA, 32 nt, Human
aauagacagcuagaacugggguucaccuaagc

SEQ ID NO: 294643 - RNA, 32 nt, Human
aauagacagugauauaaagaauaaaaaguaaa

SEQ ID NO: 294644 - RNA, 32 nt, Human
aauagacaucuaaaauuccacuccucauagag

SEQ ID NO: 294645 - RNA, 32 nt, Human
aauagaccugguacaugguacacacaccccca

SEQ ID NO: 294646 - RNA, 32 nt, Human
aauagacuaucuagaacuugagaagauuuuau

SEQ ID NO: 294647 - RNA, 32 nt, Human
aauagacuauuuggaucacauuucucauuccu

SEQ ID NO: 294648 - RNA, 32 nt, Human
aauagacugagucagaugggucugauauuaau

SEQ ID NO: 294649 - RNA, 32 nt, Human
aauagacuugcaguuauuacuaagcuccucuu

SEQ ID NO: 294650 - RNA, 32 nt, Human
aauagagaaagauuagauaaagagaaaauaag

SEQ ID NO: 294651 - RNA, 31 nt, Human
aauagagaacaauuuccuuucuccuuacaag

SEQ ID NO: 294652 - RNA, 32 nt, Human
aauagagaaugagacuaagaagggaacauuuc

SEQ ID NO: 294653 - RNA, 32 nt, Human
aauagagacagaaaguuacaacacaguuugua

SEQ ID NO: 294654 - RNA, 32 nt, Human
aauagagacuggguuucaccauguugaccggg

SEQ ID NO: 294655 - RNA, 32 nt, Human
aauagagagaaagguuuuccugccucagagug

SEQ ID NO: 294656 - RNA, 32 nt, Human
aauagagaggcaguaaaaagaucagcaaagag

SEQ ID NO: 294657 - RNA, 32 nt, Human
aauagagauguuggaguccagaacaaaguuag

SEQ ID NO: 294658 - RNA, 32 nt, Human
aauagagauuaaaaacaacaaauuggccucuu

SEQ ID NO: 294659 - RNA, 32 nt, Human
aauagagcaaacaccuuuaguuucaucagauc

SEQ ID NO: 294660 - RNA, 32 nt, Human
aauagagcaagaaaacaguauucugcaucugu

SEQ ID NO: 294661 - RNA, 32 nt, Human
aauagagcacagcagggagacuggggccugga

SEQ ID NO: 294662 - RNA, 32 nt, Human
aauagagccauguucauuuucuuuccaguuag

SEQ ID NO: 294663 - RNA, 32 nt, Human
aauagagcuguccugugggggagcugcucacu

SEQ ID NO: 294664 - RNA, 32 nt, Human
aauagaggaagaaacauuuauucaccaguuuc

SEQ ID NO: 294665 - RNA, 32 nt, Human
aauagaggagaguguaagggaguagggggugc

SEQ ID NO: 294666 - RNA, 32 nt, Human
aauagaggcccuguuggcaagaugaguuuugc

SEQ ID NO: 294667 - RNA, 32 nt, Human
aauagaggcucaauuaguauuuguugaauaaa

SEQ ID NO: 294668 - RNA, 32 nt, Human
aauagagggggugcuggagcgcgagaggcugg

SEQ ID NO: 294669 - RNA, 32 nt, Human
aauagagggucugagaacugucagccuuuugc

SEQ ID NO: 294670 - RNA, 32 nt, Human
aauagagguagaaaauggaaauuuucccagua

SEQ ID NO: 294671 - RNA, 32 nt, Human
aauagauagauacuccagccugggugacagag

SEQ ID NO: 294672 - RNA, 32 nt, Human
aauagaucaguccaccucuccugggucccguc

SEQ ID NO: 294673 - RNA, 32 nt, Human
aauagaucgaccaaagagaugcagguuguacu

SEQ ID NO: 294674 - RNA, 32 nt, Human
aauagaugauuuauuaagagccaucugugauu

SEQ ID NO: 294675 - RNA, 32 nt, Human
aauagaugccucucccccuccagcccuagccg

SEQ ID NO: 294676 - RNA, 32 nt, Human
aauagaugccucucccccuccaguccuagccc

SEQ ID NO: 294677 - RNA, 32 nt, Human
aauagaugguuagugggguaauucugcuucua

SEQ ID NO: 294678 - RNA, 32 nt, Human
aauagauuuaaaacaugagauugcccucuaca

SEQ ID NO: 294679 - RNA, 32 nt, Human
aauagcaaaguggcugggcaugguggcucaug

SEQ ID NO: 294680 - RNA, 32 nt, Human
aauagcaacaggaaaagaacugagggacgugc

SEQ ID NO: 294681 - RNA, 32 nt, Human
aauagcaauaucuaggaaauuugcauugagac

SEQ ID NO: 294682 - RNA, 32 nt, Human
aauagcacaggguguacauacaugacguacac

SEQ ID NO: 294683 - RNA, 23 nt, Human
aauagcacauauggaauuuugca

SEQ ID NO: 294684 - RNA, 32 nt, Human
aauagcacauccaccaaacuccugccugagaa

SEQ ID NO: 294685 - RNA, 32 nt, Human
aauagcacggauuuccuggaugagcuaccacg

SEQ ID NO: 294686 - RNA, 32 nt, Human
aauagcagaaugucacagaugaagaauauuaa

SEQ ID NO: 294687 - RNA, 32 nt, Human
aauagcagcuacucgggaggcugaggcaggag

SEQ ID NO: 294688 - RNA, 32 nt, Human
aauagcagcuacugagguggcugaggcacaag

SEQ ID NO: 294689 - RNA, 32 nt, Human
aauagcaggaguggccugugccucaacaacau

SEQ ID NO: 294690 - RNA, 32 nt, Human
aauagcaguaguuuuggaaauauugccccaag

SEQ ID NO: 294691 - RNA, 32 nt, Human
aauagcauaaggcuuccauuaugaaagaaaac

SEQ ID NO: 294692 - RNA, 32 nt, Human
aauagcauaaugacagugggagggguacaagg

SEQ ID NO: 294693 - RNA, 32 nt, Human
aauagcaugggcuuacagcacaagcacguguu

SEQ ID NO: 294694 - RNA, 32 nt, Human
aauagcauuauucaagacacagaaagaaagca

SEQ ID NO: 294695 - RNA, 32 nt, Human
aauagcauuugucuugagugaggaagugaagc

SEQ ID NO: 294696 - RNA, 32 nt, Human
aauagccacauucugcucuacucuccaacaua

SEQ ID NO: 294697 - RNA, 32 nt, Human
aauagccacauuuaacuccagccuuggguuug

SEQ ID NO: 294698 - RNA, 32 nt, Human
aauagccacugcacuccagccugggcaacaua

SEQ ID NO: 294699 - RNA, 32 nt, Human
aauagccacugcacuccagccugggcaauaua

SEQ ID NO: 294700 - RNA, 32 nt, Human
aauagccacugcacuccaucuugggcaacaca

SEQ ID NO: 294701 - RNA, 32 nt, Human
aauagccacugcacucuagucuggggaacaua

SEQ ID NO: 294702 - RNA, 32 nt, Human
aauagccacugcacuucagccugggcaacaua

SEQ ID NO: 294703 - RNA, 32 nt, Human
aauagccacugcacuugagccucuugggaaac

SEQ ID NO: 294704 - RNA, 32 nt, Human
aauagccacugcauaccaaccugggcaauaua

SEQ ID NO: 294705 - RNA, 32 nt, Human
aauagccacuuuccuuuuguugucauucuugu

SEQ ID NO: 294706 - RNA, 32 nt, Human
aauagccauccuggcagauguaaggugauauu

SEQ ID NO: 294707 - RNA, 32 nt, Human
aauagccccaggagugggcuuuagucuccaau

SEQ ID NO: 294708 - RNA, 32 nt, Human
aauagccccuccacuuggauuucaccaaaacg

SEQ ID NO: 294709 - RNA, 32 nt, Human
aauagccugcgcgcuccaggacugccuaccca

SEQ ID NO: 294710 - RNA, 32 nt, Human
aauagccuuauuuucaaaauauggaaagaaau

SEQ ID NO: 294711 - RNA, 32 nt, Human
aauagcgcccugcagggacggugcaggcuggu

SEQ ID NO: 294712 - RNA, 32 nt, Human
aauagcggaggcacacccagaguagaacagca

SEQ ID NO: 294713 - RNA, 32 nt, Human
aauagcuaaauggcaacaaacacauugugaau

SEQ ID NO: 294714 - RNA, 32 nt, Human
aauagcuacaaaccauacuaauuauuccauuu

SEQ ID NO: 294715 - RNA, 32 nt, Human
aauagcuacagagaacuugcaaaggaguagag

SEQ ID NO: 294716 - RNA, 32 nt, Human
aauagcuacagcugugucccuuccugcuuuuu

SEQ ID NO: 294717 - RNA, 32 nt, Human
aauagcuauugcacuccagccuuggcaacaua

SEQ ID NO: 294718 - RNA, 32 nt, Human
aauagcucaccccucauucuguccuccggacu

SEQ ID NO: 294719 - RNA, 32 nt, Human
aauagcucauacaauaauccauucaauagaau

SEQ ID NO: 294720 - RNA, 32 nt, Human
aauagcucccagugucauggguacccaguacg

SEQ ID NO: 294721 - RNA, 32 nt, Human
aauagcuccuuauuuugcaccuuauaaaaagu

SEQ ID NO: 294722 - RNA, 32 nt, Human
aauagcuccuuucugggauaucugauguguac

SEQ ID NO: 294723 - RNA, 32 nt, Human
aauagcucuaacuccaaaccucuguccacacc

SEQ ID NO: 294724 - RNA, 32 nt, Human
aauagcucuucuccuaagauggaaucuguggu

SEQ ID NO: 294725 - RNA, 32 nt, Human
aauagcugaagaaacauuuccucaaauguauu

SEQ ID NO: 294726 - RNA, 32 nt, Human
aauagcugagacuacaggcaccugccaccagg

SEQ ID NO: 294727 - RNA, 32 nt, Human
aauagcuggauuauuucauuugccaguuucua

SEQ ID NO: 294728 - RNA, 32 nt, Human
aauagcuggcuucuuuccacauagugguucug

SEQ ID NO: 294729 - RNA, 32 nt, Human
aauagcugggauuacagacaggcaccaccaca

SEQ ID NO: 294730 - RNA, 32 nt, Human
aauagcugggauuacaggcacccaccaccaua

SEQ ID NO: 294731 - RNA, 32 nt, Human
aauagcugggauuacaggcacccaccaucacg

SEQ ID NO: 294732 - RNA, 32 nt, Human
aauagcugggauuacaggcgcccaccaccacg

SEQ ID NO: 294733 - RNA, 32 nt, Human
aauagcugggauuacaggcgcccgccaccaca

SEQ ID NO: 294734 - RNA, 32 nt, Human
aauagcugggauuacaggcguacaccaccaug

SEQ ID NO: 294735 - RNA, 32 nt, Human
aauagcugggauuacaggugcacgccaccaug

SEQ ID NO: 294736 - RNA, 32 nt, Human
aauagcugggauuacaggugcaugccaccaca

SEQ ID NO: 294737 - RNA, 32 nt, Human
aauagcugggauuacaggugcccaccaccaug

SEQ ID NO: 294738 - RNA, 32 nt, Human
aauagcugggauuacaggugccugccagcaca

SEQ ID NO: 294739 - RNA, 32 nt, Human
aaugcuccugaaugaaagaaauuaucccuuug

SEQ ID NO: 294740 - RNA, 32 nt, Human
aaugcucucaucgguuggcuucauuuucaaga

SEQ ID NO: 294741 - RNA, 32 nt, Human
aaugcucucuguuggcucugcaguacaauaug

SEQ ID NO: 294742 - RNA, 32 nt, Human
aaugcugaaaaagcguuuguuuuugaaacaaa

SEQ ID NO: 294743 - RNA, 32 nt, Human
aaugcugaaagugccugucaguaaaccuuaug

SEQ ID NO: 294744 - RNA, 32 nt, Human
aaugcugaaaucuaggaaaugaaaguagcguc

SEQ ID NO: 294745 - RNA, 32 nt, Human
aaugcugacgaagaucuugagccacccuaccu

SEQ ID NO: 294746 - RNA, 32 nt, Human
aaugcugagauuacaggugugagccaccaugc

SEQ ID NO: 294747 - RNA, 32 nt, Human
aaugcugagauuacaggugugagccacugcac

SEQ ID NO: 294748 - RNA, 32 nt, Human
aaugcugaguccagauccaaagcugucuucug

SEQ ID NO: 294749 - RNA, 32 nt, Human
aaugcugaguccggucccagguauggagcaga

SEQ ID NO: 294750 - RNA, 32 nt, Human
aaugcugauuuaacuccuccaggguggggucu

SEQ ID NO: 294751 - RNA, 32 nt, Human
aaugcugauuuggugaccaacugucacucauu

SEQ ID NO: 294752 - RNA, 32 nt, Human
aaugcugcaaauaugcuuuccaagugcuuugc

SEQ ID NO: 294753 - RNA, 32 nt, Human
aaugcugcagaauguguuagcugcagauaggc

SEQ ID NO: 294754 - RNA, 32 nt, Human
aaugcugcagagcagucaggcuggacaccccu

SEQ ID NO: 294755 - RNA, 32 nt, Human
aaugcugcaguccugcagucaccuauacauua

SEQ ID NO: 294756 - RNA, 32 nt, Human
aaugcugcagugagcugugauuucacccuugc

SEQ ID NO: 294757 - RNA, 26 nt, Human
aaugcugccaggcacgucaacaggca

SEQ ID NO: 294758 - RNA, 32 nt, Human
aaugcugccaucccuucugcuaauccagcaaa

SEQ ID NO: 294759 - RNA, 32 nt, Human
aaugcugccugccugucugucucuccaucugu

SEQ ID NO: 294760 - RNA, 32 nt, Human
aaugcugcggggaggaaggcaagaggugccaa

SEQ ID NO: 294761 - RNA, 32 nt, Human
aaugcugcuacuugauuucuuucucaucccac

SEQ ID NO: 294762 - RNA, 32 nt, Human
aaugcugcucacccuucugucuugcagagugg

SEQ ID NO: 294763 - RNA, 20 nt, Human
aaugcugcugaagaggaggg

SEQ ID NO: 294764 - RNA, 32 nt, Human
aaugcugcugagagugaaagaaaggaggaaag

SEQ ID NO: 294765 - RNA, 32 nt, Human
aaugcugcugucacacagucucuucucugaaa

SEQ ID NO: 294766 - RNA, 32 nt, Human
aaugcuggaacacaccagacauagagggaggg

SEQ ID NO: 294767 - RNA, 32 nt, Human
aaugcuggaauuacaggcgugagccaccaugc

SEQ ID NO: 294768 - RNA, 32 nt, Human
aaugcuggagcaggcuguucagaccgacguug

SEQ ID NO: 294769 - RNA, 32 nt, Human
aaugcuggagccagauauucauucaaauccug

SEQ ID NO: 294770 - RNA, 32 nt, Human
aaugcuggcacuaagcaaaaguucgagccuca

SEQ ID NO: 294771 - RNA, 32 nt, Human
aaugcuggcauuacaggugugagccacggugc

SEQ ID NO: 294772 - RNA, 32 nt, Human
aaugcugggacuauaggugugagccacugcac

SEQ ID NO: 294773 - RNA, 32 nt, Human
aaugcugggauuacaagcaugcgucaccacag

SEQ ID NO: 294774 - RNA, 32 nt, Human
aaugcugggauuacaagcgugagccaccgccc

SEQ ID NO: 294775 - RNA, 32 nt, Human
aaugcugggauuacagaugugagccaccacac

SEQ ID NO: 294776 - RNA, 32 nt, Human
aaugcugggauuacaggagugagccaccaugc

SEQ ID NO: 294777 - RNA, 32 nt, Human
aaugcugggauuacaggcauaagccaccgugc

SEQ ID NO: 294778 - RNA, 32 nt, Human
aaugcugggauuacaggcaugagccaccacac

SEQ ID NO: 294779 - RNA, 32 nt, Human
aaugcugggauuacaggcaugagccaccgcgc

SEQ ID NO: 294780 - RNA, 32 nt, Human
aaugcugggauuacaggcaugagccaccgugc

SEQ ID NO: 294781 - RNA, 32 nt, Human
aaugcugggauuacaggcaugagccaccugcc

SEQ ID NO: 294782 - RNA, 32 nt, Human
aaugcugggauuacaggcaugagccacugcgc

SEQ ID NO: 294783 - RNA, 32 nt, Human
aaugcugggauuacaggcaugagccacuguac

SEQ ID NO: 294784 - RNA, 32 nt, Human
aaugcugggauuacaggccugagccacugcgc

SEQ ID NO: 294785 - RNA, 32 nt, Human
aaugcugggauuacaggcguaagccacuaucc

SEQ ID NO: 294786 - RNA, 32 nt, Human
aaugcugggauuacaggcguaagccacugcac

SEQ ID NO: 294787 - RNA, 32 nt, Human
aaugcugggauuacaggcgugagcaaccgcac

SEQ ID NO: 294788 - RNA, 32 nt, Human
aaugcugggauuacaggcgugagcaaccgcgc

SEQ ID NO: 294789 - RNA, 32 nt, Human
aaugcugggauuacaggcgugagccaccacgc

SEQ ID NO: 294790 - RNA, 32 nt, Human
aaugcugggauuacaggcgugagccaccaugu

SEQ ID NO: 294791 - RNA, 32 nt, Human
aaugcugggauuacaggcgugagccaccgagc

SEQ ID NO: 294792 - RNA, 32 nt, Human
aaugcugggauuacaggcgugagccaccgcgc

SEQ ID NO: 294793 - RNA, 32 nt, Human
aaugcugggauuacaggcgugagccacggcac

SEQ ID NO: 294794 - RNA, 32 nt, Human
aaugcugggauuacaggcgugagccacugcac

SEQ ID NO: 294795 - RNA, 32 nt, Human
aaugcugggauuacaggcgugagccacuggcg

SEQ ID NO: 294796 - RNA, 32 nt, Human
aaugcugggauuacaggcuugagccacugcuc

SEQ ID NO: 294797 - RNA, 32 nt, Human
aaugcugggauuacagggguaagccacugugc

SEQ ID NO: 294798 - RNA, 32 nt, Human
aaugcugggauuacaggggugagccaccgugc

SEQ ID NO: 294799 - RNA, 32 nt, Human
aaugcugggauuacagguaugagcacugcacc

SEQ ID NO: 294800 - RNA, 32 nt, Human
aaugcugggauuacaggugugagccacaguuu

SEQ ID NO: 294801 - RNA, 32 nt, Human
aaugcugggauuacaggugugagccaccgcgc

SEQ ID NO: 294802 - RNA, 32 nt, Human
aaugcugggauuacaggugugagccaccgugc

SEQ ID NO: 294803 - RNA, 32 nt, Human
aaugcugggauuacaggugugagccacugcgc

SEQ ID NO: 294804 - RNA, 32 nt, Human
aaugcugggauuacaggugugagccacugugc

SEQ ID NO: 294805 - RNA, 32 nt, Human
aaugcugggauuacaugcaugagccacgcgcc

SEQ ID NO: 294806 - RNA, 32 nt, Human
aaugcugggauuaccggugugagccaccgcgc

SEQ ID NO: 294807 - RNA, 32 nt, Human
aaugcugggauuagaggugugagccacugugc

SEQ ID NO: 294808 - RNA, 32 nt, Human
aaugcugggauuauaggcaugagccgcugcac

SEQ ID NO: 294809 - RNA, 32 nt, Human
aaugcugggauugcaggcgugagccacugcau

SEQ ID NO: 294810 - RNA, 32 nt, Human
aaugcugggcacaagagcuacagggaauuaug

SEQ ID NO: 294811 - RNA, 32 nt, Human
aaugcugggcagugccucggacugccucggac

SEQ ID NO: 294812 - RNA, 32 nt, Human
aaugcuggggaacggaaaaugagggaguucaa

SEQ ID NO: 294813 - RNA, 32 nt, Human
aaugcuggggacaggcaugcugccgccaguag

SEQ ID NO: 294814 - RNA, 32 nt, Human
aaugcuggggcagugauuggaaaaggaggcaa

SEQ ID NO: 294815 - RNA, 32 nt, Human
aaugcuggugcugcuuuuguacauacauauuu

SEQ ID NO: 294816 - RNA, 32 nt, Human
aaugcuggugggucuccguguuuaugagucac

SEQ ID NO: 294817 - RNA, 32 nt, Human
aaugcugucagcucuuucccuaccuucaaguc

SEQ ID NO: 294818 - RNA, 32 nt, Human
aaugcugucaucuggagauaccuaacuaacua

SEQ ID NO: 294819 - RNA, 32 nt, Human
aaugcugucuucaucagaaaacaguuggcaua

SEQ ID NO: 294820 - RNA, 32 nt, Human
aaugcugucuuucccaguagcuacucaccugc

SEQ ID NO: 294821 - RNA, 32 nt, Human
aaugcugugaugaccaauuuugugaauaaaau

SEQ ID NO: 294822 - RNA, 32 nt, Human
aaugcuguuuuuacugcuuccuaaggauagau

SEQ ID NO: 294823 - RNA, 32 nt, Human
aaugcuuaaaggccacagauaaugaaaguuua

SEQ ID NO: 294824 - RNA, 32 nt, Human
aaugcuuacucugagcuacacacugaguagua

SEQ ID NO: 294825 - RNA, 32 nt, Human
aaugcuuauugcugcaugauguaagcaaaagu

SEQ ID NO: 294826 - RNA, 32 nt, Human
aaugcuucagaaacaccucaauaaaagagaaa

SEQ ID NO: 294827 - RNA, 32 nt, Human
aaugcuucauucacaaccuccauuuucagcaa

SEQ ID NO: 294828 - RNA, 27 nt, Human
aaugcuucgaggcugaugaggcugcug

SEQ ID NO: 294829 - RNA, 32 nt, Human
aaugcuucuagaugccuucucucuccaucuac

SEQ ID NO: 294830 - RNA, 32 nt, Human
aaugcuucucuagcccaaacagcgacaugcua

SEQ ID NO: 294831 - RNA, 32 nt, Human
aaugcuucugacuucauagauuuccuucccau

SEQ ID NO: 294832 - RNA, 32 nt, Human
aaugcuugaccuacauuucuaaaauaaaaaua

SEQ ID NO: 294833 - RNA, 32 nt, Human
aaugcuugcuaccugaaugaaugaucagaagc

SEQ ID NO: 294834 - RNA, 32 nt, Human
aaugcuugcucaggcucagagggaccucaccc

SEQ ID NO: 294835 - RNA, 32 nt, Human
aaugcuugcuuuuucucuaccuuucuuccuug

SEQ ID NO: 294836 - RNA, 32 nt, Human
aaugcuuguccuggcccgaugcaguggcucau

SEQ ID NO: 294837 - RNA, 32 nt, Human
aaugcuuugagggggucugugccugaagcuca

SEQ ID NO: 294838 - RNA, 21 nt, Human
aaugcuuuuccaguucuuaga

SEQ ID NO: 294839 - RNA, 21 nt, Human
aaugcuuuugaauguucuuag

SEQ ID NO: 294840 - RNA, 32 nt, Human
aaugcuuuugacuuaacuaggagaaaaagaca

SEQ ID NO: 294841 - RNA, 32 nt, Human
aaugcuuuuggcuguuauuuugcaguuaauac

SEQ ID NO: 294842 - RNA, 32 nt, Human
aauggaaaaagcuuucuucugacugugacccu

SEQ ID NO: 294843 - RNA, 32 nt, Human
aauggaaaacaaagugcuucugccuggcuggc

SEQ ID NO: 294844 - RNA, 32 nt, Human
aauggaaacuaguucagccacuguggagagaa

SEQ ID NO: 294845 - RNA, 26 nt, Human
aauggaaagaggaaagaagaaaagaa

SEQ ID NO: 294846 - RNA, 32 nt, Human
aauggaaagcacugugcucugaaguggaucag

SEQ ID NO: 294847 - RNA, 32 nt, Human
aauggaaagggaacccagauaggaagcuacug

SEQ ID NO: 294848 - RNA, 32 nt, Human
aauggaaagguucucauuuuccuccuccaaug

SEQ ID NO: 294849 - RNA, 32 nt, Human
aauggaaauguagucuuaggccagucuuaggu

SEQ ID NO: 294850 - RNA, 32 nt, Human
aauggaaauguucuuggagcuacuuccucaaa

SEQ ID NO: 294851 - RNA, 32 nt, Human
aauggaacauuuaagacaagucuggaaaguca

SEQ ID NO: 294852 - RNA, 32 nt, Human
aauggaaccucuccauguguauauaguauuuc

SEQ ID NO: 294853 - RNA, 32 nt, Human
aauggaacggucaccuuccagccaguaaaggc

SEQ ID NO: 294854 - RNA, 32 nt, Human
aauggaagaaccacuggaauaaugcuccugcc

SEQ ID NO: 294855 - RNA, 32 nt, Human
aauggaagaagacggaaggaagaaagagaaag

SEQ ID NO: 294856 - RNA, 32 nt, Human
aauggaagaaggaggaagagcaugaaggaucu

SEQ ID NO: 294857 - RNA, 32 nt, Human
aauggaagacggugguuuuuccccuacagcuc

SEQ ID NO: 294858 - RNA, 32 nt, Human
aauggaagccuggguuggagauccugaggcag

SEQ ID NO: 294859 - RNA, 32 nt, Human
aauggaaggagaagacugggcuagggagaaug

SEQ ID NO: 294860 - RNA, 32 nt, Human
aauggaaguauaaugggaauauauuuuugagg

SEQ ID NO: 294861 - RNA, 32 nt, Human
aauggaagugaggauguaacucuacugaauaa

SEQ ID NO: 294862 - RNA, 32 nt, Human
aauggaaguuacagcauucuacucugauggug

SEQ ID NO: 294863 - RNA, 32 nt, Human
aauggaaguuuuaaauguguaaaguucagaag

SEQ ID NO: 294864 - RNA, 32 nt, Human
aauggaauccugcugggggcucaggaggccug

SEQ ID NO: 294865 - RNA, 32 nt, Human
aauggaaugaguuggacacaagauccaagcgc

SEQ ID NO: 294866 - RNA, 32 nt, Human
aauggaauggaggcugugagcaaugugaggau

SEQ ID NO: 294867 - RNA, 32 nt, Human
aauggaauguccuggcuccacccuccagcaug

SEQ ID NO: 294868 - RNA, 23 nt, Human
aauggaauuaacuucaaguuuac

SEQ ID NO: 294869 - RNA, 32 nt, Human
aauggaauugauuuucaguaacugaauuugug

SEQ ID NO: 294870 - RNA, 22 nt, Human
aauggacacuggagagaaaacu

SEQ ID NO: 294871 - RNA, 32 nt, Human
aauggacagacaccuucccccacccauacccc

SEQ ID NO: 294872 - RNA, 32 nt, Human
aauggacagcacaggacaaccagacauuugag

SEQ ID NO: 294873 - RNA, 32 nt, Human
aauggacaggccuggcauguacccacagagac

SEQ ID NO: 294874 - RNA, 32 nt, Human
aauggacagguaggaaggaaggaaaggaggaa

SEQ ID NO: 294875 - RNA, 32 nt, Human
aauggacauauguuucauauccaaggguauuc

SEQ ID NO: 294876 - RNA, 32 nt, Human
aauggaccaagaaaaacugcuuuaccauagga

SEQ ID NO: 294877 - RNA, 32 nt, Human
aauggaccaguucuguucuccaaagacugcag

SEQ ID NO: 294878 - RNA, 32 nt, Human
aauggacccuccugucacucugcugaacagaa

SEQ ID NO: 294879 - RNA, 32 nt, Human
aauggacccuggggcuuugcaaaugacuuagu

SEQ ID NO: 294880 - RNA, 32 nt, Human
aauggaccuccucuguggacugugccuuccca

SEQ ID NO: 294881 - RNA, 32 nt, Human
aauggaccugugagaggaagggaagguggcag

SEQ ID NO: 294882 - RNA, 32 nt, Human
aauggaccuuuuccuuucuuagcuugcuguag

SEQ ID NO: 294883 - RNA, 32 nt, Human
aauggacuaaagguccuguucuugccuuuucu

SEQ ID NO: 294884 - RNA, 22 nt, Human
aauggacucaucuuaauuucuu

SEQ ID NO: 294885 - RNA, 20 nt, Human
aauggacucaucuuaguucu

SEQ ID NO: 294886 - RNA, 32 nt, Human
aauggacucaugcacagaacacuaugcauuuu

SEQ ID NO: 294887 - RNA, 24 nt, Human
aauggacuuuacauucaguuucuu

SEQ ID NO: 294888 - RNA, 32 nt, Human
aauggacuuuuuaaaagacacaggacccuuaa

SEQ ID NO: 294889 - RNA, 32 nt, Human
aauggagaaauggcuuaccaugcauguccuuc

SEQ ID NO: 294890 - RNA, 32 nt, Human
aauggagaaggugaaaagaggagggaaaggcc

SEQ ID NO: 294891 - RNA, 32 nt, Human
aauggagacagagucccuggcuccucuacugu

SEQ ID NO: 294892 - RNA, 32 nt, Human
aauggagacuguaccuuccacauagauucaca

SEQ ID NO: 294893 - RNA, 32 nt, Human
aauggagagcaccacuuuccugcagcugauca

SEQ ID NO: 294894 - RNA, 32 nt, Human
aauggagagcucagaaucuggccccagagaag

SEQ ID NO: 294895 - RNA, 32 nt, Human
aauggagaggccaagacacauaaugaagacua

SEQ ID NO: 294896 - RNA, 32 nt, Human
aauggagagggcggcgaagaggacccgcaggc

SEQ ID NO: 294897 - RNA, 32 nt, Human
aauggagaggggcaagcagugaggcugccuug

SEQ ID NO: 294898 - RNA, 32 nt, Human
aauggagagguagggagccaggugcagcagga

SEQ ID NO: 294899 - RNA, 32 nt, Human
aauggagauagaucauuguucucuccaucucc

SEQ ID NO: 294900 - RNA, 32 nt, Human
aauggagauggaaaccaccacaccugcuuccc

SEQ ID NO: 294901 - RNA, 32 nt, Human
aauggagcaguuuaauacuagaucucagaagu

SEQ ID NO: 294902 - RNA, 32 nt, Human
aauggagcaugucucagggugaugugaacucu

SEQ ID NO: 294903 - RNA, 32 nt, Human
aauggagccgagaguaagcaagccuuuccaca

SEQ ID NO: 294904 - RNA, 32 nt, Human
aauggagccuuucaucuuccaagaccaaagaa

SEQ ID NO: 294905 - RNA, 32 nt, Human
aauggagcuacagagcauuaacaaauacucau

SEQ ID NO: 294906 - RNA, 32 nt, Human
aauggagcucaucuucuaucucuagggucugu

SEQ ID NO: 294907 - RNA, 32 nt, Human
aauggagcucuaauauaucuggcagcagacuu

SEQ ID NO: 294908 - RNA, 32 nt, Human
aauggagcucuuugucauuccaccuccucugg

SEQ ID NO: 294909 - RNA, 32 nt, Human
aauggaggaagaggaaguaggaagaaugcagg

SEQ ID NO: 294910 - RNA, 32 nt, Human
aauggaggacucaggcauggcuugaggacuca

SEQ ID NO: 294911 - RNA, 32 nt, Human
aauggaggagcugaggaugcuggaagaagaga

SEQ ID NO: 294912 - RNA, 32 nt, Human
aauggaggaugagagaccacguggaggagagc

SEQ ID NO: 294913 - RNA, 32 nt, Human
aauggaggauggggcagccaggagccagacuu

SEQ ID NO: 294914 - RNA, 32 nt, Human
aauggaggcagaggugugggaggcagaaggcu

SEQ ID NO: 294915 - RNA, 32 nt, Human
aauggaggcagcguuccuacuugucaucacac

SEQ ID NO: 294916 - RNA, 32 nt, Human
aauggaggccucucuucugucgugcccaaguc

SEQ ID NO: 294917 - RNA, 32 nt, Human
aauggaggccuucagagauuacaggaccagau

SEQ ID NO: 294918 - RNA, 32 nt, Human
aauggaggcugcaggacuggcuagaccagguc

SEQ ID NO: 294919 - RNA, 32 nt, Human
aauggagggaaaaaggagagaucuaccuuucc

SEQ ID NO: 294920 - RNA, 32 nt, Human
aauggaggggaaauguuuguugccuuaaauca

SEQ ID NO: 294921 - RNA, 32 nt, Human
aauggaggggaaucacuagagcacacaagguu

SEQ ID NO: 294922 - RNA, 32 nt, Human
aauggagggucuggguccaguuagggacaugg

SEQ ID NO: 294923 - RNA, 31 nt, Human
aauggaggguggaaggugugaucugugggac

SEQ ID NO: 294924 - RNA, 32 nt, Human
aauggagguccuggagguuacaugacuagccc

SEQ ID NO: 294925 - RNA, 32 nt, Human
aauggagguggggccaggcaugguggcucaca

SEQ ID NO: 294926 - RNA, 32 nt, Human
aauggagugauggagggagcacuggacugcga

SEQ ID NO: 294927 - RNA, 32 nt, Human
aauggagugcugggacuggcagaggaaauuaa

SEQ ID NO: 294928 - RNA, 32 nt, Human
aauggaguggggcugaggagauguuggaagcc

SEQ ID NO: 294929 - RNA, 32 nt, Human
aauggauaauuuaaaagcuugauagcugggac

SEQ ID NO: 294930 - RNA, 32 nt, Human
aauggauacaaagauaaagaaaauguugccuu

SEQ ID NO: 294931 - RNA, 32 nt, Human
aauggauacacaugaaauacuuaaacaauaua

SEQ ID NO: 294932 - RNA, 32 nt, Human
aauggauagcugggguuggcagauggcuagag

SEQ ID NO: 294933 - RNA, 32 nt, Human
aauggauaggaaaugccuuucucagguugaau

SEQ ID NO: 294934 - RNA, 32 nt, Human
aauggauagucagagagcagcggcugggcagu

SEQ ID NO: 294935 - RNA, 32 nt, Human
aauggauauugccaagggaacaaucagaacuc

SEQ ID NO: 294936 - RNA, 32 nt, Human
aauggauauuuggaaacuuacuccuaagcugu

SEQ ID NO: 294937 - RNA, 31 nt, Human
aauggaucaaugucuucccuguauccaagac

SEQ ID NO: 294938 - RNA, 32 nt, Human
aauggaucacuaaugaacuacagugcugguga

SEQ ID NO: 294939 - RNA, 32 nt, Human
aauggaugagaggcggggaccgugcagcuguc

SEQ ID NO: 294940 - RNA, 32 nt, Human
aauggaugauccagugcugcagagccagaagg

SEQ ID NO: 294941 - RNA, 32 nt, Human
aauggauggauggauggauggauguuggugaa

SEQ ID NO: 294942 - RNA, 32 nt, Human
aauggauguggggacucuuccuggguucuggc

SEQ ID NO: 294943 - RNA, 30 nt, Human
aauggauguucccaggagcugccuauggga

SEQ ID NO: 294944 - RNA, 32 nt, Human
aauggauucucccaggagccuccagaaggaac

SEQ ID NO: 294945 - RNA, 32 nt, Human
aauggauucugcgaugcugucuggacuuugcu

SEQ ID NO: 294946 - RNA, 32 nt, Human
aauggauugugguggucaucuccggcuaccga

SEQ ID NO: 294947 - RNA, 32 nt, Human
aauggauuuagggcugugcaggaugugccuug

SEQ ID NO: 294948 - RNA, 32 nt, Human
aauggauuuagggcugugcaggaugugcuuug

SEQ ID NO: 294949 - RNA, 32 nt, Human
aauggauuucaucagaaauguguauaauggau

SEQ ID NO: 294950 - RNA, 22 nt, Human
aauggauuucuuuggaugcuga

SEQ ID NO: 294951 - RNA, 32 nt, Human
aauggcaaaaacuggcugggcacaguggcuca

SEQ ID NO: 294952 - RNA, 32 nt, Human
aauggcaaaaggccaggcgagcacagagucuu

SEQ ID NO: 294953 - RNA, 32 nt, Human
aauggcaaacauagugggggcugcaguagcac

SEQ ID NO: 294954 - RNA, 32 nt, Human
aauggcaacacuuuggaauaagugacuguaau

SEQ ID NO: 294955 - RNA, 32 nt, Human
aauggcaacagcuuugccacuugacuuuccaa

SEQ ID NO: 294956 - RNA, 20 nt, Human
aauggcaaucgcccagauua

SEQ ID NO: 294957 - RNA, 32 nt, Human
aauggcacaaccuccaccuccuggguucaagc

SEQ ID NO: 294958 - RNA, 32 nt, Human
aauggcacacugggcaggcuugcccauuccug

SEQ ID NO: 294959 - RNA, 32 nt, Human
aauggcacagaacuuagcaacagcaugugaau

SEQ ID NO: 294960 - RNA, 32 nt, Human
aauggcacagcccaaagaaggaaaaggcaggg

SEQ ID NO: 294961 - RNA, 32 nt, Human
aauggcaccacuguacuccacuugggcgacac

SEQ ID NO: 294962 - RNA, 32 nt, Human
aauggcagaaaugucauucucuuccauauaug

SEQ ID NO: 294963 - RNA, 32 nt, Human
aauggcagagggaguuccuacacacacuuuuu

SEQ ID NO: 294964 - RNA, 26 nt, Human
aauggcagagguggaggagacacuga

SEQ ID NO: 294965 - RNA, 32 nt, Human
aauggcagcaggaggcagacagguuucugggc

SEQ ID NO: 294966 - RNA, 32 nt, Human
aauggcagcugcugugugaggaccagugucuu

SEQ ID NO: 294967 - RNA, 32 nt, Human
aauggcaggaauagcagaauaauuggugcuug

SEQ ID NO: 294968 - RNA, 32 nt, Human
aauggcaggcaaaaaccagucauuucauuuuu

SEQ ID NO: 294969 - RNA, 23 nt, Human
aauggcaggugucauaugacuga

SEQ ID NO: 294970 - RNA, 26 nt, Human
aauggcagugggugagccccuggugc

SEQ ID NO: 294971 - RNA, 32 nt, Human
aauggcaguuacuggcugggcgcaguggcuca

SEQ ID NO: 294972 - RNA, 32 nt, Human
aauggcaguucugagaagucacuggucuagau

SEQ ID NO: 294973 - RNA, 32 nt, Human
aauggcauccuggaacaccucuaccccaccau

SEQ ID NO: 294974 - RNA, 32 nt, Human
aauggcaucugucaucuuuagcgccaccuuau

SEQ ID NO: 294975 - RNA, 32 nt, Human
aauggcauggaaucacugccuccugugauuug

SEQ ID NO: 294976 - RNA, 32 nt, Human
aauggccaauggacaggaagggaacccguaug

SEQ ID NO: 294977 - RNA, 26 nt, Human
aauggccacugcucagcuuucucacu

SEQ ID NO: 294978 - RNA, 32 nt, Human
aauggccaggaucagauugugcccggccugua

SEQ ID NO: 294979 - RNA, 32 nt, Human
aauggccaguacugggugugaggccuggccug

SEQ ID NO: 294980 - RNA, 32 nt, Human
aauggccaguggcugcuacaccccauguaaaa

SEQ ID NO: 294981 - RNA, 24 nt, Human
aauggccaugcuaucacaacccca

SEQ ID NO: 294982 - RNA, 32 nt, Human
aauggcccugcuccuuccuccucuaggcccag

SEQ ID NO: 294983 - RNA, 32 nt, Human
aauggccguuuguugauuucuuccugcagguu

SEQ ID NO: 294984 - RNA, 32 nt, Human
aauggccuaaugcacccccaaacauggaaaua

SEQ ID NO: 294985 - RNA, 32 nt, Human
aauggccucauuuuucucuuuuuaauuucuuu

SEQ ID NO: 294986 - RNA, 26 nt, Human
aauggccucccacgaaguugauaaug

SEQ ID NO: 294987 - RNA, 32 nt, Human
aauggccugagaaauauuuuggaaaaguuaaa

SEQ ID NO: 294988 - RNA, 32 nt, Human
aauggccugggagccuguucugucuugcaucu

SEQ ID NO: 294989 - RNA, 32 nt, Human
aauggccugggcagaacaaauagggagcauuu

SEQ ID NO: 294990 - RNA, 32 nt, Human
aauggccuuccuguucagcuguuagagacuga

SEQ ID NO: 294991 - RNA, 32 nt, Human
aauggcgacacugcacugcaggcugggcuaca

SEQ ID NO: 294992 - RNA, 32 nt, Human
aauggcgagaucuccuggagugggggauauuc

SEQ ID NO: 294993 - RNA, 32 nt, Human
aauggcgaugguggaggugauagggacuucaa

SEQ ID NO: 294994 - RNA, 32 nt, Human
aauggcgccacugcacuccagccuggguaaca

SEQ ID NO: 294995 - RNA, 32 nt, Human
aauggcgcucucucaguacacuuauggcuaug

SEQ ID NO: 294996 - RNA, 32 nt, Human
aauggcggaaacagcagccaaucggcgaucag

SEQ ID NO: 294997 - RNA, 32 nt, Human
aauggcggcggggagagccacagaggagcagg

SEQ ID NO: 294998 - RNA, 32 nt, Human
aauggcgugccaccccauccuucuccaccaaa

SEQ ID NO: 294999 - RNA, 32 nt, Human
aauggcuaaaaauuaaauguaaagggcaagag

SEQ ID NO: 295000 - RNA, 32 nt, Human
aauggcuaaacaguaucaaguacugcagaauu

SEQ ID NO: 295001 - RNA, 32 nt, Human
aauggcuaagcucugggggugcuuuugaugug

SEQ ID NO: 295002 - RNA, 32 nt, Human
aauggcuaaugcacuguucccuccagcccgaa

SEQ ID NO: 295003 - RNA, 32 nt, Human
aauggcuaggaauauuggaagcagcauagugu

SEQ ID NO: 295004 - RNA, 32 nt, Human
aauggcucaaauaccauuaccucuauucauuu

SEQ ID NO: 295005 - RNA, 32 nt, Human
aauggcucacugcagccucaaccuccugagcu

SEQ ID NO: 295006 - RNA, 32 nt, Human
aauggcucacuggcaugucuuuuauguguuca

SEQ ID NO: 295007 - RNA, 32 nt, Human
aauggcugaacuagaagcuguguuagaacagc

SEQ ID NO: 295008 - RNA, 32 nt, Human
aauggcugacacccccauucccucucuucuuc

SEQ ID NO: 295009 - RNA, 32 nt, Human
aauggcugacuucugguucucccucaaguguu

SEQ ID NO: 295010 - RNA, 32 nt, Human
aauggcugcaccuuuuugcaugauaucuucaa

SEQ ID NO: 295011 - RNA, 32 nt, Human
aauggcugcuuagagucagccuggguggcacc

SEQ ID NO: 295012 - RNA, 32 nt, Human
aauggcugcuucagggcagcugucuuuuaugg

SEQ ID NO: 295013 - RNA, 32 nt, Human
aauggcuggacccugcaugcagggcugggggu

SEQ ID NO: 295014 - RNA, 32 nt, Human
aauggcugggcugccaggccagacacgcuagg

SEQ ID NO: 295015 - RNA, 32 nt, Human
aauggcuggguuugggcaguggagaggggacu

SEQ ID NO: 295016 - RNA, 32 nt, Human
aauggcugguauaguggcuacugcugagaagu

SEQ ID NO: 295017 - RNA, 32 nt, Human
aauggcugugugacacacguaaggaaaggaaa

SEQ ID NO: 295018 - RNA, 32 nt, Human
aauggcuuacaguuucugucuggucaucugga

SEQ ID NO: 295019 - RNA, 26 nt, Human
aauggcuuccaaacuccugcgcgcgg

SEQ ID NO: 295020 - RNA, 32 nt, Human
aauggcuucuuccguuuugcagucuccuaugg

SEQ ID NO: 295021 - RNA, 32 nt, Human
aauggcuugcaguuguuccuccacucuaaaug

SEQ ID NO: 295022 - RNA, 32 nt, Human
aauggcuugccaucuuuuaauuuucuauuuag

SEQ ID NO: 295023 - RNA, 32 nt, Human
aauggcuuggaccaggccagagcuguucuccc

SEQ ID NO: 295024 - RNA, 32 nt, Human
aauggcuugggauuuggugcaaacaaacauga

SEQ ID NO: 295025 - RNA, 32 nt, Human
aauggcuuggguucagucagcccaggggccag

SEQ ID NO: 295026 - RNA, 32 nt, Human
aauggcuugugcuccugcuccuguggguauag

SEQ ID NO: 295027 - RNA, 32 nt, Human
aauggcuuguugaaucucagcaguuccgccau

SEQ ID NO: 295028 - RNA, 32 nt, Human
aaugggaaaaggaucccugauuaagcugauga

SEQ ID NO: 295029 - RNA, 32 nt, Human
aaugggaaaaucuauuccaaagagacacacua

SEQ ID NO: 295030 - RNA, 32 nt, Human
aaugggaaagacagagguuacagaggagccgg

SEQ ID NO: 295031 - RNA, 32 nt, Human
aaugggaacagcuucuggcugaaugaagaccu

SEQ ID NO: 295032 - RNA, 32 nt, Human
aaugggaaccugguuugcccauuuugaaaacc

SEQ ID NO: 295033 - RNA, 32 nt, Human
aaugggaacuggagaggacccugagaggagac

SEQ ID NO: 295034 - RNA, 32 nt, Human
aaugggaacuggagaguguggggaaugggaag

SEQ ID NO: 295035 - RNA, 20 nt, Human
aaugggaagcaacagaucac

SEQ ID NO: 295036 - RNA, 32 nt, Human
aaugggaagccauuuugauuucuugaguaauc

SEQ ID NO: 295037 - RNA, 32 nt, Human
aaugggaaggaaccugagcugcuggaaccucu

SEQ ID NO: 295038 - RNA, 32 nt, Human
aaugggaagguucuguuuucugcuccaagacu

SEQ ID NO: 295039 - RNA, 21 nt, Human
aaugggacaaguguaaagcau

SEQ ID NO: 295040 - RNA, 32 nt, Human
aaugggacagccgccacugagccucauuacuu

SEQ ID NO: 295041 - RNA, 32 nt, Human
aaugggacauucguagagugggauagaggugg

SEQ ID NO: 295042 - RNA, 32 nt, Human
aaugggaccacaucuaccaggaggagaugcug

SEQ ID NO: 295043 - RNA, 32 nt, Human
aaugggacucaaggacuugaccuccaggagua

SEQ ID NO: 295044 - RNA, 32 nt, Human
aaugggacuccaacuaagggaaccugaaauca

SEQ ID NO: 295045 - RNA, 26 nt, Human
aaugggacuccaagccugccuccuag

SEQ ID NO: 295046 - RNA, 32 nt, Human
aaugggagagagaaggggagaaccaaucucaa

SEQ ID NO: 295047 - RNA, 32 nt, Human
aaugggagaggaggagaaucaaugggaugugg

SEQ ID NO: 295048 - RNA, 32 nt, Human
aaugggagcacucugucuucuuugcuagagaa

SEQ ID NO: 295049 - RNA, 32 nt, Human
aaugggagcauauuguaaaauaguucccaaau

SEQ ID NO: 295050 - RNA, 32 nt, Human
aaugggaggacucaggaaggaggaucgucuuu

SEQ ID NO: 295051 - RNA, 32 nt, Human
aaugggaggagacaaggagcugaaggaguagu

SEQ ID NO: 295052 - RNA, 32 nt, Human
aaugggaggagggaggaggagacagagaaggc

SEQ ID NO: 295053 - RNA, 32 nt, Human
aaugggagguggaggaggguugcagcucccac

SEQ ID NO: 295054 - RNA, 32 nt, Human
aaugggaguaaguguucuuaucuggaaaaaua

SEQ ID NO: 295055 - RNA, 32 nt, Human
aaugggagucccaggcuguacaguggugagug

SEQ ID NO: 295056 - RNA, 32 nt, Human
aaugggaugauauggagguucaaugagauggu

SEQ ID NO: 295057 - RNA, 32 nt, Human
aaugggcaauaaggaaggaggaguuuggagaa

SEQ ID NO: 295058 - RNA, 32 nt, Human
aaugggcagguucuugcucucccaggcuggag

SEQ ID NO: 295059 - RNA, 32 nt, Human
aaugggcaguagaagcaaaugcuguuguuaca

SEQ ID NO: 295060 - RNA, 32 nt, Human
aaugggcaguaggggaaauggaguugcuucaa

SEQ ID NO: 295061 - RNA, 32 nt, Human
aaugggcagugacccaggcuuagugcucccaa

SEQ ID NO: 295062 - RNA, 32 nt, Human
aaugggccagagaagcaggcucuuuccucauc

SEQ ID NO: 295063 - RNA, 32 nt, Human
aaugggcccagaggaggguaagacucugcugu

SEQ ID NO: 295064 - RNA, 32 nt, Human
aaugggcccgcacuugcccagaggcagagcuc

SEQ ID NO: 295065 - RNA, 32 nt, Human
aaugggcccucaagccacccaggcucccacca

SEQ ID NO: 295066 - RNA, 32 nt, Human
aaugggcccucagaggacagugcuuccaagua

SEQ ID NO: 295067 - RNA, 32 nt, Human
aaugggccuuucucugccugcccugcccuugg

SEQ ID NO: 295068 - RNA, 32 nt, Human
aaugggcgugaggugcugauguccuugccuug

SEQ ID NO: 295069 - RNA, 32 nt, Human
aaugggcuccagaagguggagauggagaacca

SEQ ID NO: 295070 - RNA, 32 nt, Human
aaugggcugacuacucaacaaaggacaagaua

SEQ ID NO: 295071 - RNA, 32 nt, Human
aaugggcugcuggcuccugcccugcuuccugu

SEQ ID NO: 295072 - RNA, 32 nt, Human
aauggggaaaaguuaaggagcaaaaugggggu

SEQ ID NO: 295073 - RNA, 32 nt, Human
aauggggaaagaaaucugcagcaaaggggucu

SEQ ID NO: 295074 - RNA, 32 nt, Human
aauggggacaucaccguccgccugggcuacag

SEQ ID NO: 295075 - RNA, 32 nt, Human
aauggggacuuugccaccggcuugccuggugg

SEQ ID NO: 295076 - RNA, 32 nt, Human
aauggggagaaaagcucagagagaugcauuuu

SEQ ID NO: 295077 - RNA, 32 nt, Human
aauggggagagaaaaugccugcuuucuuuccc

SEQ ID NO: 295078 - RNA, 32 nt, Human
aauggggagagggagggccgggaagccaggaa

SEQ ID NO: 295079 - RNA, 32 nt, Human
aauggggagaggguggggcagaugaguagaga

SEQ ID NO: 295080 - RNA, 20 nt, Human
aauggggagccucagcucac

SEQ ID NO: 295081 - RNA, 32 nt, Human
aauggggagcugaggaaggagcaaacggguuu

SEQ ID NO: 295082 - RNA, 32 nt, Human
aauggggagggagggagggaccaaagccguga

SEQ ID NO: 295083 - RNA, 32 nt, Human
aauggggaguagagagaaaacaggcgagaaca

SEQ ID NO: 295084 - RNA, 32 nt, Human
aauggggaucuagugacaaaauaaucugcccu

SEQ ID NO: 295085 - RNA, 27 nt, Human
aauggggaugcaaauaaaguuuguggg

SEQ ID NO: 295086 - RNA, 32 nt, Human
aauggggcaaggaaaaagaaagccuaugggaa

SEQ ID NO: 295087 - RNA, 32 nt, Human
aauggggcagacugaggcuugugaggaagauc

SEQ ID NO: 295088 - RNA, 32 nt, Human
aauggggcagaggccgggagggguggggguuc

SEQ ID NO: 295089 - RNA, 32 nt, Human
aauggggcagaggcuagugcugaccuacgggc

SEQ ID NO: 295090 - RNA, 32 nt, Human
aauggggccaucugucuucucuccuuggagag

SEQ ID NO: 295091 - RNA, 31 nt, Human
aauggggcccuucucuugacauuccuuuugu

SEQ ID NO: 295092 - RNA, 32 nt, Human
aaugggggaggaacuugcacucuccugcggga

SEQ ID NO: 295093 - RNA, 32 nt, Human
aaugggggcccagggggugucagcucggggcc

SEQ ID NO: 295094 - RNA, 32 nt, Human
aaugggggccgauccggggcccucucugcacc

SEQ ID NO: 295095 - RNA, 32 nt, Human
aaugggguaggaacuccauccucgcugccgcg

SEQ ID NO: 295096 - RNA, 32 nt, Human
aaugggguauggaaguuuuccuacacuugaga

SEQ ID NO: 295097 - RNA, 32 nt, Human
aaugggguauucagugacuaaggucugcuauu

SEQ ID NO: 295098 - RNA, 32 nt, Human
aauggggucaagaggacacagaagaguuguau

SEQ ID NO: 295099 - RNA, 32 nt, Human
aauggggugccugcuugggcugggucgaaggc

SEQ ID NO: 295100 - RNA, 32 nt, Human
aauggggugggcuucucauccauguugcuucu

SEQ ID NO: 295101 - RNA, 32 nt, Human
aauggguaaggaacaaucaaauucaauucggg

SEQ ID NO: 295102 - RNA, 32 nt, Human
aauggguacaaaccacacaaugcaggugacca

SEQ ID NO: 295103 - RNA, 32 nt, Human
aauggguacagggggagucaggcucaccgugg

SEQ ID NO: 295104 - RNA, 32 nt, Human
aaugggucucuagccucagucuugucaucugu

SEQ ID NO: 295105 - RNA, 32 nt, Human
aaugggugcaauggguagaaugggagguggua

SEQ ID NO: 295106 - RNA, 32 nt, Human
aauggguuuuucuuuucuacugcaucaucagg

SEQ ID NO: 295107 - RNA, 32 nt, Human
aaugguaaacuugagcaucuuuucacuuucca

SEQ ID NO: 295108 - RNA, 32 nt, Human
aaugguaaauacucauuaccucucucagccca

SEQ ID NO: 295109 - RNA, 32 nt, Human
aaugguaaucaagaacuggaacuucacagaca

SEQ ID NO: 295110 - RNA, 32 nt, Human
aaugguacauugaguaguguggggaagacacc

SEQ ID NO: 295111 - RNA, 32 nt, Human
aaugguagcagaaaauccuauugauuucaucu

SEQ ID NO: 295112 - RNA, 32 nt, Human
aauggucaaguuggauuuagaugauguucccu

SEQ ID NO: 295113 - RNA, 32 nt, Human
aauggucaaguuggauuuagaugauguucucu

SEQ ID NO: 295114 - RNA, 32 nt, Human
aauggucagaauuucgagaacugugugcugaa

SEQ ID NO: 295115 - RNA, 32 nt, Human
aauggucauaacagugccuguuucugcgaacu

SEQ ID NO: 295116 - RNA, 32 nt, Human
aauggucauuagcuccuuuuaagcuagaaacg

SEQ ID NO: 295117 - RNA, 32 nt, Human
aauggucccaagaauuacucuaauauaguugu

SEQ ID NO: 295118 - RNA, 32 nt, Human
aauggucccccuaaccaugcagagagagauuc

SEQ ID NO: 295119 - RNA, 32 nt, Human
aaugguccucucacugcagccucccaacaggc

SEQ ID NO: 295120 - RNA, 32 nt, Human
aauggucuccugucuccagccugcuugaucuu

SEQ ID NO: 295121 - RNA, 32 nt, Human
aauggugaaagcuuccuucuaaacugccccaa

SEQ ID NO: 295122 - RNA, 32 nt, Human
aauggugacuccuguuauguuuuagcaaagag

SEQ ID NO: 295123 - RNA, 20 nt, Human
aauggugagaggccaggaga

SEQ ID NO: 295124 - RNA, 32 nt, Human
aauggugccacugcacuccagucugggcaaca

SEQ ID NO: 295125 - RNA, 32 nt, Human
aauggugccacuggacuccagccugggagaca

SEQ ID NO: 295126 - RNA, 32 nt, Human
aauggugcccaggcuggagugcaguggcguga

SEQ ID NO: 295127 - RNA, 32 nt, Human
aauggugccuguaaagcucucagcauuggcuu

SEQ ID NO: 295128 - RNA, 32 nt, Human
aauggugcuauuuccccucucuccuccucaac

SEQ ID NO: 295129 - RNA, 32 nt, Human
aauggugcucuccuggcccugcucuggcccuu

SEQ ID NO: 295130 - RNA, 32 nt, Human
aauggugcucuggggcuggaggcuaguaagga

SEQ ID NO: 295131 - RNA, 32 nt, Human
aauggugcugagguugagaaaaccugacuuaa

SEQ ID NO: 295132 - RNA, 32 nt, Human
aauggugcuggguggagaauggagagagcaug

SEQ ID NO: 295133 - RNA, 32 nt, Human
aauggugcuuaucuugauugaacauucagaac

SEQ ID NO: 295134 - RNA, 32 nt, Human
aaugguggacaaguuagcugugguugauuccu

SEQ ID NO: 295135 - RNA, 32 nt, Human
aaugguggcuaaagaaaauagggacucugaag

SEQ ID NO: 295136 - RNA, 32 nt, Human
aaugguggcuagauuagugggagcaguucacc

SEQ ID NO: 295137 - RNA, 32 nt, Human
aaugguggcucacgccuguaaucucagcauuu

SEQ ID NO: 295138 - RNA, 32 nt, Human
aaugguggcucaugccuguaaucccagcaccu

SEQ ID NO: 295139 - RNA, 32 nt, Human
aaugguggcuucagcuccagccccuuuccaaa

SEQ ID NO: 295140 - RNA, 32 nt, Human
aauggugggagcugggggagaaugaagacugu

SEQ ID NO: 295141 - RNA, 32 nt, Human
aauggugggauuacaggugugugggccaccgu

SEQ ID NO: 295142 - RNA, 32 nt, Human
aauggugguaacuuccaagccgcugggugguu

SEQ ID NO: 295143 - RNA, 32 nt, Human
aauggugguggaaggguagagaggcgcggagu

SEQ ID NO: 295144 - RNA, 32 nt, Human
aaugguggugggaaguccugggaacacacaca

SEQ ID NO: 295145 - RNA, 32 nt, Human
aauggugguucacgccuguaaucccagcacuu

SEQ ID NO: 295146 - RNA, 32 nt, Human
aauggugucauccugaaaaacaaaacccagug

SEQ ID NO: 295147 - RNA, 32 nt, Human
aaugguguccaggcuggagugcaguggcguga

SEQ ID NO: 295148 - RNA, 32 nt, Human
aaugguguccccaauuucagggaauccaugga

SEQ ID NO: 295149 - RNA, 32 nt, Human
aauggugucugaccacuggcuccuggaaggga

SEQ ID NO: 295150 - RNA, 17 nt, Human
aauggugucugcagaug

SEQ ID NO: 295151 - RNA, 32 nt, Human
aauggugucugcugugcauggcauuuuauaug

SEQ ID NO: 295152 - RNA, 32 nt, Human
aauggugucuguccagccccucccucuguccc

SEQ ID NO: 295153 - RNA, 32 nt, Human
aauggugugaugcuccuuguagcaggauacca

SEQ ID NO: 295154 - RNA, 32 nt, Human
aauggugugcuccccucugugucuccauggcc

SEQ ID NO: 295155 - RNA, 32 nt, Human
aaugguguguacuuaacaagcaucuagguaaa

SEQ ID NO: 295156 - RNA, 32 nt, Human
aauggugugugcucccucucccucucuucccu

SEQ ID NO: 295157 - RNA, 32 nt, Human
aaugguguuucagaagcugaacuucugaccaa

SEQ ID NO: 295158 - RNA, 32 nt, Human
aaugguguuucauguaaggaucuuuaaaggga

SEQ ID NO: 295159 - RNA, 32 nt, Human
aaugguuaaggcagaauaaugacuaaaauaug

SEQ ID NO: 295160 - RNA, 32 nt, Human
aaugguuacuaggcuuaauaccugggugauua

SEQ ID NO: 295161 - RNA, 32 nt, Human
aaugguuaucacaagaaggcugugcugucccc

SEQ ID NO: 295162 - RNA, 32 nt, Human
aaugguuaugaacgcuuuugugcugcugauuu

SEQ ID NO: 295163 - RNA, 32 nt, Human
aaugguuauuuugccaguuacauuugauuucu

SEQ ID NO: 295164 - RNA, 32 nt, Human
aaugguucacaaggaaacuucugccucaggug

SEQ ID NO: 295165 - RNA, 32 nt, Human
aaugguucagcccucuacugcaggaccagucc

SEQ ID NO: 295166 - RNA, 32 nt, Human
aaugguucaguugggcaaaaggcuccagugaa

SEQ ID NO: 295167 - RNA, 32 nt, Human
aaugguucauguuacucuuucucucuccauca

SEQ ID NO: 295168 - RNA, 32 nt, Human
aaugguuccauggugaaacacaucccugaccc

SEQ ID NO: 295169 - RNA, 19 nt, Human
aaugguucgcugccuccug

SEQ ID NO: 295170 - RNA, 32 nt, Human
aaugguugaagggagagagaauucuuuaaaau

SEQ ID NO: 295171 - RNA, 32 nt, Human
aaugguugguguauuuugucaguaauuguaca

SEQ ID NO: 295172 - RNA, 32 nt, Human
aaugguugucuuaacuucuuaaccucauauug

SEQ ID NO: 295173 - RNA, 32 nt, Human
aaugguuuacaaaucugaagcugaaguucaau

SEQ ID NO: 295174 - RNA, 32 nt, Human
aaugguuuagauaucuuucuuccuucauaauu

SEQ ID NO: 295175 - RNA, 32 nt, Human
aaugguuucacguggcuuucaaagggaaggaa

SEQ ID NO: 295176 - RNA, 32 nt, Human
aaugguuuccccuaugcuguucuugugauagu

SEQ ID NO: 295177 - RNA, 32 nt, Human
aaugguuucccuugaaugcacagccauuuccg

SEQ ID NO: 295178 - RNA, 32 nt, Human
aaugguuugcaaggaagccacagcugguggua

SEQ ID NO: 295179 - RNA, 32 nt, Human
aaugguuugguuugcagagaacacagccugau

SEQ ID NO: 295180 - RNA, 32 nt, Human
aaugguuugucagcugucacuguuguuuucuu

SEQ ID NO: 295181 - RNA, 32 nt, Human
aaugguuuucuuagcauauccuccuggggccg

SEQ ID NO: 295182 - RNA, 32 nt, Human
aauguaaaaccagccaagcaaggccauaaagg

SEQ ID NO: 295183 - RNA, 32 nt, Human
aauguaaaagaccucaggcaccaccuucgcau

SEQ ID NO: 295184 - RNA, 32 nt, Human
aauguaaaauggggcagccacuuuggaaaaag

SEQ ID NO: 295185 - RNA, 32 nt, Human
aauguaaacagaacuggcacacacacauuaag

SEQ ID NO: 295186 - RNA, 32 nt, Human
aauguaaacagaguuacaaaaaccacuccaaa

SEQ ID NO: 295187 - RNA, 32 nt, Human
aauguaaacagaguuauaaaaaccacuucaaa

SEQ ID NO: 295188 - RNA, 32 nt, Human
aauguaaacuaaauccgcgucugugaauacgu

SEQ ID NO: 295189 - RNA, 32 nt, Human
aauguaaagucucaucacaguacauuugguaa

SEQ ID NO: 295190 - RNA, 32 nt, Human
aauguaaauuaauucagccauuguggaaagca

SEQ ID NO: 295191 - RNA, 32 nt, Human
aauguaaauuaguucagccauugugaaaagua

SEQ ID NO: 295192 - RNA, 32 nt, Human
aauguaacaccauuagacacucaccagauguu

SEQ ID NO: 295193 - RNA, 32 nt, Human
aauguaagagauaggaagaggccagguguagu

SEQ ID NO: 295194 - RNA, 32 nt, Human
aauguaagaucagcuggagaaagcccagugug

SEQ ID NO: 295195 - RNA, 32 nt, Human
aauguaaguuuugucuugcccugguuauuagc

SEQ ID NO: 295196 - RNA, 32 nt, Human
aauguaauccaagccaaaaguuaacaagaaua

SEQ ID NO: 295197 - RNA, 32 nt, Human
aauguaaugcaaccaaguuccucccagauuaa

SEQ ID NO: 295198 - RNA, 32 nt, Human
aauguaauguagcuuuuuccacaagccacuuc

SEQ ID NO: 295199 - RNA, 32 nt, Human
aauguaauuaaccuuucuuuacauuucuuaug

SEQ ID NO: 295200 - RNA, 32 nt, Human
aauguaauugaaaagucagcuuccauauuuug

SEQ ID NO: 295201 - RNA, 32 nt, Human
aauguaauuuucucagaauuuacacucacucg

SEQ ID NO: 295202 - RNA, 32 nt, Human
aauguacaaacuguugguggccugaauccauc

SEQ ID NO: 295203 - RNA, 32 nt, Human
aauguacaacugacacugccauuuuuccuuuu

SEQ ID NO: 295204 - RNA, 32 nt, Human
aauguacaagagcacuacugaagaaguccagc

SEQ ID NO: 295205 - RNA, 32 nt, Human
aauguacaagaugagacucacucuaguggaug

SEQ ID NO: 295206 - RNA, 32 nt, Human
aauguacaauguucugauaaauuugacuguua

SEQ ID NO: 295207 - RNA, 32 nt, Human
aauguacacacacccugaaagacagcgaggcc

SEQ ID NO: 295208 - RNA, 32 nt, Human
aauguacaccaaaauaaaacaugugaagcagu

SEQ ID NO: 295209 - RNA, 27 nt, Human
aauguacaguacugacaccaccacaaa

SEQ ID NO: 295210 - RNA, 32 nt, Human
aauguacaugacucucagugucuguggaaaca

SEQ ID NO: 295211 - RNA, 32 nt, Human
aauguaccaacuucucuuucucuggucagguu

SEQ ID NO: 295212 - RNA, 22 nt, Human
aauguaccccuuuaagguucag

SEQ ID NO: 295213 - RNA, 32 nt, Human
aauguacccugccucugcuuucuccugcaucc

SEQ ID NO: 295214 - RNA, 32 nt, Human
aauguaccuccaggcccugcaugccgucagua

SEQ ID NO: 295215 - RNA, 32 nt, Human
aauguacuccagccuaggugacagagugagac

SEQ ID NO: 295216 - RNA, 32 nt, Human
aauguacucuagaccacaggacuaauguaaau

SEQ ID NO: 295217 - RNA, 32 nt, Human
aauguacuggaaaauugcuuaauggauuuuua

SEQ ID NO: 295218 - RNA, 32 nt, Human
aauguacugguuaggucagugguacaacuguu

SEQ ID NO: 295219 - RNA, 32 nt, Human
aauguagaccaggaaagggggcugcaaaaaug

SEQ ID NO: 295220 - RNA, 32 nt, Human
aauguagagaaaaggugacaguuuaaggaaaa

SEQ ID NO: 295221 - RNA, 32 nt, Human
aauguagagaaguugggauuaaaagcagucuc

SEQ ID NO: 295222 - RNA, 32 nt, Human
aauguagagagacugauggggaaaguaugaug

SEQ ID NO: 295223 - RNA, 32 nt, Human
aauguagagaugccaccucccucucucugagg

SEQ ID NO: 295224 - RNA, 32 nt, Human
aauguagagucgucagacugaaaggccagguu

SEQ ID NO: 295225 - RNA, 32 nt, Human
aauguagauacugauucuuucuccauaaaugu

SEQ ID NO: 295226 - RNA, 32 nt, Human
aauguagaucaaggcgagcugccuacaaauua

SEQ ID NO: 295227 - RNA, 32 nt, Human
aauguagaucaguuaauaaacaugaguagcuu

SEQ ID NO: 295228 - RNA, 32 nt, Human
aauguagcaaagcauuccuaguuaaccagagc

SEQ ID NO: 295229 - RNA, 32 nt, Human
aauguagccagcccacauccauuccagagcug

SEQ ID NO: 295230 - RNA, 32 nt, Human
aauguagccaugggaccaaaccuagccccuua

SEQ ID NO: 295231 - RNA, 32 nt, Human
aauguagcccugcauccuccaguguuaccugg

SEQ ID NO: 295232 - RNA, 32 nt, Human
aauguagccucuguccuuguaagucaguugac

SEQ ID NO: 295233 - RNA, 32 nt, Human
aauguagcugacuccuuucuucucccacuugc

SEQ ID NO: 295234 - RNA, 32 nt, Human
aauguagcuucucaggggaggcaggaagaaag

SEQ ID NO: 295235 - RNA, 31 nt, Human
aauguagggaagccaugucagaugcagauac

SEQ ID NO: 295236 - RNA, 32 nt, Human
aauguaggggcagaagcuugacuccagacccu

SEQ ID NO: 295237 - RNA, 32 nt, Human
aauguaggggcagaggaagauggcaucaggac

SEQ ID NO: 295238 - RNA, 32 nt, Human
aauguagguggaggcaacacagccacuucuga

SEQ ID NO: 295239 - RNA, 32 nt, Human
aauguagucugccuugaaaagucuuucagcug

SEQ ID NO: 295240 - RNA, 32 nt, Human
aauguagugaccaaauuguggaagagauuucu

SEQ ID NO: 295241 - RNA, 32 nt, Human
aauguaguuagaauuagccacaggagaaugua

SEQ ID NO: 295242 - RNA, 21 nt, Human
aauguauacuggagagaaacc

SEQ ID NO: 295243 - RNA, 32 nt, Human
aauguauauacccacacacauacacacauaug

SEQ ID NO: 295244 - RNA, 32 nt, Human
aauguauaugguacagauguaaaguuuucuau

SEQ ID NO: 295245 - RNA, 32 nt, Human
aauguaucacagacugucacuuuguauuccuc

SEQ ID NO: 295246 - RNA, 32 nt, Human
aauguaucacuauugaauuucucuccacaagu

SEQ ID NO: 295247 - RNA, 32 nt, Human
aauguaucauucuuuauaaaaaucuacugaaa

SEQ ID NO: 295248 - RNA, 32 nt, Human
aauguauccauguggcuacuucuccagccccc

SEQ ID NO: 295249 - RNA, 32 nt, Human
aauguaucccuccccucaguuuuaaccugagc

SEQ ID NO: 295250 - RNA, 32 nt, Human
aauguaucugaagaagaggcucagggaguaaa

SEQ ID NO: 295251 - RNA, 32 nt, Human
aauguaucuuaaaaugguucuaaaaauugcau

SEQ ID NO: 295252 - RNA, 32 nt, Human
aauguaugagcagcuuaacugaaguagaacua

SEQ ID NO: 295253 - RNA, 21 nt, Human
aauguaugcaagagaccaaaa

SEQ ID NO: 295254 - RNA, 32 nt, Human
aauguaugcuuuguacaugacacuucaauaaa

SEQ ID NO: 295255 - RNA, 32 nt, Human
aauguauggcaggcugggcagaauguauacug

SEQ ID NO: 295256 - RNA, 32 nt, Human
aauguauguauguauaauggcuguacagguag

SEQ ID NO: 295257 - RNA, 32 nt, Human
aauguauguggggcuuaaaaccuagaugauga

SEQ ID NO: 295258 - RNA, 32 nt, Human
aauguauucacauuauucuuuaauaaucuguu

SEQ ID NO: 295259 - RNA, 32 nt, Human
aauguauucccaagguuugcugggcucuggga

SEQ ID NO: 295260 - RNA, 32 nt, Human
aauguauugaggaucugugaaaugcuaagugc

SEQ ID NO: 295261 - RNA, 32 nt, Human
aauguauuggcuuagccaaaucacuacagaag

SEQ ID NO: 295262 - RNA, 32 nt, Human
aauguauuuauuucucagacuuggggcgagug

SEQ ID NO: 295263 - RNA, 32 nt, Human
aauguauuuuucucaucuaccaaaggaugaaa

SEQ ID NO: 295264 - RNA, 22 nt, Human
aauguauuuuugugguguuacg

SEQ ID NO: 295265 - RNA, 32 nt, Human
aaugucaaaccagcuucccgacucccaggagc

SEQ ID NO: 295266 - RNA, 32 nt, Human
aaugucaaauugaugugcccuagaucaacaga

SEQ ID NO: 295267 - RNA, 32 nt, Human
aaugucaacaagggacaagacagggcaccuuc

SEQ ID NO: 295268 - RNA, 32 nt, Human
aaugucaagcucagaagaaagacuggaaguuu

SEQ ID NO: 295269 - RNA, 32 nt, Human
aaugucacaagaaaaauucaaaaccuuuagcu

SEQ ID NO: 295270 - RNA, 31 nt, Human
aaugucacaagcuagaaucaucagcaugguu

SEQ ID NO: 295271 - RNA, 32 nt, Human
aaugucacaaucccuucuauagcccccuacag

SEQ ID NO: 295272 - RNA, 32 nt, Human
aaugucacaggcaggucccaggguuugaguuc

SEQ ID NO: 295273 - RNA, 32 nt, Human
aaugucacaguaggaagugcacuggacuaggg

SEQ ID NO: 295274 - RNA, 32 nt, Human
aaugucacaguugccucaaaugagcaccauuu

SEQ ID NO: 295275 - RNA, 32 nt, Human
aaugucacccgagacugucacaggcuugccau

SEQ ID NO: 295276 - RNA, 32 nt, Human
aaugucaccucacauccucuuggccacauuuu

SEQ ID NO: 295277 - RNA, 32 nt, Human
aaugucacucgcccagucuucagucuccugac

SEQ ID NO: 295278 - RNA, 23 nt, Human
aaugucacugccgaagaccaaaa

SEQ ID NO: 295279 - RNA, 32 nt, Human
aaugucagaaguugauagguuguuaaauacau

SEQ ID NO: 295280 - RNA, 32 nt, Human
aaugucagaggauuuaauugugucuaauugcg

SEQ ID NO: 295281 - RNA, 32 nt, Human
aaugucagcuacuugggaggcugaggcaggag

SEQ ID NO: 295282 - RNA, 26 nt, Human
aaugucaggaauggaagccacuguga

SEQ ID NO: 295283 - RNA, 32 nt, Human
aaugucaggguauugcucuguugcccaggcua

SEQ ID NO: 295284 - RNA, 32 nt, Human
aaugucaucacauccuccguguccucaucugu

SEQ ID NO: 295285 - RNA, 32 nt, Human
aaugucauccgcgugagggaaggagggacggc

SEQ ID NO: 295286 - RNA, 32 nt, Human
aaugucaucuucucuggaagccgucccugacc

SEQ ID NO: 295287 - RNA, 32 nt, Human
aaugucauucacaacagaaaacccaaaauauu

SEQ ID NO: 295288 - RNA, 32 nt, Human
aaugucauugucuacuccuagaagaaccaaau

SEQ ID NO: 295289 - RNA, 32 nt, Human
aauguccaagcagaggaaucuaaguggcagac

SEQ ID NO: 295290 - RNA, 32 nt, Human
aauguccacaccucugcaucccugcaccagga

SEQ ID NO: 295291 - RNA, 32 nt, Human
aauguccagcuacagacccagaggauaagcca

SEQ ID NO: 295292 - RNA, 32 nt, Human
aauguccauaaauaaaauguuauuggaacaca

SEQ ID NO: 295293 - RNA, 32 nt, Human
aaugucccacagccacauuggaaauacagguu

SEQ ID NO: 295294 - RNA, 32 nt, Human
aaugucccagcccagugcugggacagggaagg

SEQ ID NO: 295295 - RNA, 32 nt, Human
aaugucccaggccauggcagagcucguuccau

SEQ ID NO: 295296 - RNA, 32 nt, Human
aauguccccaggagcagcaacccugagucaau

SEQ ID NO: 295297 - RNA, 32 nt, Human
aauguccccauggaucuggauccuggagaacu

SEQ ID NO: 295298 - RNA, 32 nt, Human
aaugucccccuucuugcuucucucuccuucuu

SEQ ID NO: 295299 - RNA, 32 nt, Human
aauguccccuucuucagugucagaccucaguc

SEQ ID NO: 295300 - RNA, 32 nt, Human
aaugucccucuugcauuccuggccccuaucuc

SEQ ID NO: 295301 - RNA, 32 nt, Human
aaugucccugccucuagguucauaaugaauua

SEQ ID NO: 295302 - RNA, 32 nt, Human
aauguccgccaucuacccuccgcuccugggcg

SEQ ID NO: 295303 - RNA, 32 nt, Human
aauguccggcugucauuucuccaccuaagagc

SEQ ID NO: 295304 - RNA, 32 nt, Human
aauguccuccauuucagagucagcuuaaaacc

SEQ ID NO: 295305 - RNA, 32 nt, Human
aauguccucuccaucauccucagugugagucc

SEQ ID NO: 295306 - RNA, 32 nt, Human
aauguccugaguaaaguagaaaagcaaccuuu

SEQ ID NO: 295307 - RNA, 32 nt, Human
aauguccugcuuccuuggggagcugcagccau

SEQ ID NO: 295308 - RNA, 32 nt, Human
aauguccuuauaaaagggacccccaggaccug

SEQ ID NO: 295309 - RNA, 32 nt, Human
aauguccuucauuuuacuaaaaggacaaccau

SEQ ID NO: 295310 - RNA, 32 nt, Human
aauguccuucuaguauucucuggacucaaguc

SEQ ID NO: 295311 - RNA, 32 nt, Human
aauguccuugaugcuccugaacugggugcuua

SEQ ID NO: 295312 - RNA, 32 nt, Human
aauguccuuucccacaagcauuuauauuuuaa

SEQ ID NO: 295313 - RNA, 32 nt, Human
aaugucgacuguagcacugagaacaagugcuc

SEQ ID NO: 295314 - RNA, 28 nt, Human
aaugucgugcuugcugguggccacguug

SEQ ID NO: 295315 - RNA, 32 nt, Human
aaugucguuggguggggaagcaaaauguagag

SEQ ID NO: 295316 - RNA, 32 nt, Human
aaugucguuguuguuguuuuucuggaaacugc

SEQ ID NO: 295317 - RNA, 32 nt, Human
aaugucuccauuguuaaauguccccuuaggag

SEQ ID NO: 295318 - RNA, 32 nt, Human
aaugucucccccagcugccacacacacauuuu

SEQ ID NO: 295319 - RNA, 32 nt, Human
aaugucucgugaaucuuggguuuccauucacc

SEQ ID NO: 295320 - RNA, 32 nt, Human
aaugucucuggcccagaaagccucucucuccc

SEQ ID NO: 295321 - RNA, 32 nt, Human
aaugucugaggaaauuucaacugugaaaacua

SEQ ID NO: 295322 - RNA, 32 nt, Human
aaugucugaucgaucaugcagauacaauguug

SEQ ID NO: 295323 - RNA, 22 nt, Human
aaugucugccaugcacuugcua

SEQ ID NO: 295324 - RNA, 32 nt, Human
aaugucugcccuuuuguuuacuucuugguccu

SEQ ID NO: 295325 - RNA, 32 nt, Human
aaugucuggagugguaacagcucucuucuuac

SEQ ID NO: 295326 - RNA, 32 nt, Human
aaugucuggccugcggagcugcaggggcaggc

SEQ ID NO: 295327 - RNA, 32 nt, Human
aaugucuggcugaguugcuggaagcaaagggg

SEQ ID NO: 295328 - RNA, 32 nt, Human
aaugucugggaaauugugcugagagauauuau

SEQ ID NO: 295329 - RNA, 32 nt, Human
aaugucugggaagcuggggacauugcuaugca

SEQ ID NO: 295330 - RNA, 32 nt, Human
aaugucugguagcucaccacacuucuggcuuc

SEQ ID NO: 295331 - RNA, 32 nt, Human
aaugucuguacugcaagagggcccugggccuc

SEQ ID NO: 295332 - RNA, 26 nt, Human
aaugucugugaggagagagcaaggca

SEQ ID NO: 295333 - RNA, 32 nt, Human
aaugucuucauguguaaaauggagauuaaaug

SEQ ID NO: 295334 - RNA, 32 nt, Human
aaugucuuccagguccaaacccuucaacuccu

SEQ ID NO: 295335 - RNA, 32 nt, Human
aaugucuucuaaggauggucuuccaggcuuuu

SEQ ID NO: 295336 - RNA, 32 nt, Human
aaugucuuucccucuugcuucuuuggcaaaug

SEQ ID NO: 295337 - RNA, 32 nt, Human
aaugucuuuccuuucacuugcuucugggguuu

SEQ ID NO: 295338 - RNA, 32 nt, Human
aaugugaaaagaagaaagcggcugguggaggc

SEQ ID NO: 295339 - RNA, 32 nt, Human
aaugugaaaagccugcacucuuccugugggcu

SEQ ID NO: 295340 - RNA, 32 nt, Human
aaugugaaaugagaaguauuuacauuggaggg

SEQ ID NO: 295341 - RNA, 32 nt, Human
aaugugaaauggggucuugaggugagagaacu

SEQ ID NO: 295342 - RNA, 32 nt, Human
aaugugaaauggugcagccacuguggaaaaca

SEQ ID NO: 295343 - RNA, 32 nt, Human
aaugugaacacaugagugaagcauacauccau

SEQ ID NO: 295344 - RNA, 32 nt, Human
aaugugaacuugccuaguaagcacuuugucuc

SEQ ID NO: 295345 - RNA, 32 nt, Human
aaugugaagcagaucaaggaaacuucuguuga

SEQ ID NO: 295346 - RNA, 32 nt, Human
aaugugaagcagcagcuccagccccgggauaa

SEQ ID NO: 295347 - RNA, 32 nt, Human
aaugugaagccccagccccacccucugcccuu

SEQ ID NO: 295348 - RNA, 32 nt, Human
aaugugaaggaaauggugucuggaagaaaguu

SEQ ID NO: 295349 - RNA, 31 nt, Human
aaugugaauaugcuuuuacauuugggcuuau

SEQ ID NO: 295350 - RNA, 32 nt, Human
aaugugaaugugcccaaugcuacugaaaaacg

SEQ ID NO: 295351 - RNA, 32 nt, Human
aaugugacaagcucuuuguuucaguuggagug

SEQ ID NO: 295352 - RNA, 32 nt, Human
aaugugacaagcuuugcuuuguuaucauuggu

SEQ ID NO: 295353 - RNA, 32 nt, Human
aaugugacagcuuucuguauucugagcucuua

SEQ ID NO: 295354 - RNA, 32 nt, Human
aaugugacaugaaauaauugugcugcuacauu

SEQ ID NO: 295355 - RNA, 32 nt, Human
aaugugaccacuguuuuguguugacaauauug

SEQ ID NO: 295356 - RNA, 32 nt, Human
aaugugacugagaccacuacaauggccaugcc

SEQ ID NO: 295357 - RNA, 32 nt, Human
aaugugacuuuggucuauguguguucuccccc

SEQ ID NO: 295358 - RNA, 32 nt, Human
aaugugagaacagcucauugugccccagugau

SEQ ID NO: 295359 - RNA, 32 nt, Human
aaugugagagucugcagacaauguggguucuc

SEQ ID NO: 295360 - RNA, 21 nt, Human
aaugugagcacuguuagcaga

SEQ ID NO: 295361 - RNA, 22 nt, Human
aaugugagccccaggcugcaga

SEQ ID NO: 295362 - RNA, 32 nt, Human
aaugugaggaagaaagaaaggcagggcauuca

SEQ ID NO: 295363 - RNA, 32 nt, Human
aaugugagucaugucacaaagccuuuaaaugg

SEQ ID NO: 295364 - RNA, 32 nt, Human
aaugugaguccugucuuuugucucaaaaacuu

SEQ ID NO: 295365 - RNA, 32 nt, Human
aaugugaugagugugguaaagacuucagucag

SEQ ID NO: 295366 - RNA, 32 nt, Human
aaugugauugcagcuuuuugccuucagccuuu

SEQ ID NO: 295367 - RNA, 32 nt, Human
aaugugcaauaugcuauucaucaccacgacaa

SEQ ID NO: 295368 - RNA, 32 nt, Human
aaugugcaccacugugguggcguggaaagaug

SEQ ID NO: 295369 - RNA, 32 nt, Human
aaugugcagagcuuacuguggggaccuaaggg

SEQ ID NO: 295370 - RNA, 32 nt, Human
aaugugcagguuuguuacauagguauacaugu

SEQ ID NO: 295371 - RNA, 32 nt, Human
aaugugcaugaugcauuuacuacagcauagaa

SEQ ID NO: 295372 - RNA, 32 nt, Human
aaugugcauggcccaugagaaaggcuuauaag

SEQ ID NO: 295373 - RNA, 32 nt, Human
aaugugcauggugcacagucugugcaugccca

SEQ ID NO: 295374 - RNA, 32 nt, Human
aaugugccacuggacucccagccugggugaca

SEQ ID NO: 295375 - RNA, 32 nt, Human
aaugugccaucagcuaaugccaggcuuacgua

SEQ ID NO: 295376 - RNA, 32 nt, Human
aaugugcgaguccauagcugaagaggagcgcc

SEQ ID NO: 295377 - RNA, 32 nt, Human
aaugugcggcccuccuggaggcagggggcccc

SEQ ID NO: 295378 - RNA, 32 nt, Human
aaugugcuaguagcaucuugcccagccauaaa

SEQ ID NO: 295379 - RNA, 32 nt, Human
aaugugcucaaauuacuaaugauuuaguguug

SEQ ID NO: 295380 - RNA, 32 nt, Human
aaugugcucuuuuggaaaauaguugguuagca

SEQ ID NO: 295381 - RNA, 32 nt, Human
aaugugcugaagacagagcuauucuggaugga

SEQ ID NO: 295382 - RNA, 32 nt, Human
aaugugcugggaaaggcaggacugggagccgg

SEQ ID NO: 295383 - RNA, 32 nt, Human
aaugugcugggaaccucuuggagccugucagg

SEQ ID NO: 295384 - RNA, 32 nt, Human
aaugugcuguuaaacacuugaaugaagagaau

SEQ ID NO: 295385 - RNA, 32 nt, Human
aaugugcuguuugguuucuucauugccauaaa

SEQ ID NO: 295386 - RNA, 20 nt, Human
aauguggaaaucaaauuuaa

SEQ ID NO: 295387 - RNA, 32 nt, Human
aauguggaaauggaggcaucaggcacauuacu

SEQ ID NO: 295388 - RNA, 31 nt, Human
aauguggaacaaauggagugaucuguuaucc

SEQ ID NO: 295389 - RNA, 32 nt, Human
aauguggaagcccaugagguugcccagggaag

SEQ ID NO: 295390 - RNA, 32 nt, Human
aauguggacucaggagccagacugccuggcug

SEQ ID NO: 295391 - RNA, 32 nt, Human
aauguggagaaaggaauucuguugauuccguu

SEQ ID NO: 295392 - RNA, 32 nt, Human
aauguggaggcaggugcaaucagccaaacucu

SEQ ID NO: 295393 - RNA, 32 nt, Human
aauguggcaaagccuuuauccaguccucaacu

SEQ ID NO: 295394 - RNA, 32 nt, Human
aauguggcaaagccuuuuaccaguccucaacu

SEQ ID NO: 295395 - RNA, 32 nt, Human
aauguggcaaagcuuuuaaacgaucuucaacc

SEQ ID NO: 295396 - RNA, 32 nt, Human
aauguggcaaagcuuuuaaccaaucuucaaca

SEQ ID NO: 295397 - RNA, 32 nt, Human
aauguggcaaagcuuuuaaccaaucuucaacc

SEQ ID NO: 295398 - RNA, 32 nt, Human
aauguggcaaagcuuuuaaccaauucucaaac

SEQ ID NO: 295399 - RNA, 32 nt, Human
aauguggcaaagcuuuuaaccaauuuucaaac

SEQ ID NO: 295400 - RNA, 32 nt, Human
aauguggcaaagcuuuuuaccgauucucauac

SEQ ID NO: 295401 - RNA, 32 nt, Human
aauguggcacuucacauuuuaaacuacagaug

SEQ ID NO: 295402 - RNA, 32 nt, Human
aauguggcaguuaacuguaguacugaauggaa

SEQ ID NO: 295403 - RNA, 32 nt, Human
aauguggccaaagagaugugaggguaagggga

SEQ ID NO: 295404 - RNA, 32 nt, Human
aauguggccaucgggcaucaagcacaaggcca

SEQ ID NO: 295405 - RNA, 32 nt, Human
aauguggccgggaagcagaguucaugugaggg

SEQ ID NO: 295406 - RNA, 32 nt, Human
aauguggccuuauuuggagacagggucuucac

SEQ ID NO: 295407 - RNA, 32 nt, Human
aauguggccuucugggugagauauggcuauua

SEQ ID NO: 295408 - RNA, 32 nt, Human
aauguggcguggagaaguggugcuccaagggu

SEQ ID NO: 295409 - RNA, 32 nt, Human
aauguggcucaauuaucggguucuagucauua

SEQ ID NO: 295410 - RNA, 32 nt, Human
aauguggcugaccugggcugcugguuccguug

SEQ ID NO: 295411 - RNA, 32 nt, Human
aauguggcugugccggccaccuccaggcuggc

SEQ ID NO: 295412 - RNA, 32 nt, Human
aaugugggaaagcccuuguuuccuucacuucc

SEQ ID NO: 295413 - RNA, 32 nt, Human
aaugugggaagcucuggguuucucccacuacu

SEQ ID NO: 295414 - RNA, 32 nt, Human
aaugugggaauuaagcaaaaucaagcaagccu

SEQ ID NO: 295415 - RNA, 32 nt, Human
aaugugggagagaaaaggguucuuggccaggc

SEQ ID NO: 295416 - RNA, 32 nt, Human
aaugugggaggcaggaugcagggaugggcucu

SEQ ID NO: 295417 - RNA, 32 nt, Human
aaugugggaggcggagguugcagugagucaga

SEQ ID NO: 295418 - RNA, 32 nt, Human
aaugugggcaguuugacuucagcacugaaaac

SEQ ID NO: 295419 - RNA, 32 nt, Human
aauguggggagaaaggaagcuuuccgaggccu

SEQ ID NO: 295420 - RNA, 32 nt, Human
aauguggggauucugaaacagaaaugaaacug

SEQ ID NO: 295421 - RNA, 32 nt, Human
aauguggggcuuuggauuuccacaccauccca

SEQ ID NO: 295422 - RNA, 32 nt, Human
aaugugggguggggaaaguaaaugcuaagacu

SEQ ID NO: 295423 - RNA, 32 nt, Human
aaugugggucuugccuccuuccagaaauaugu

SEQ ID NO: 295424 - RNA, 32 nt, Human
aauguggguuuggcagggaucaagcaggucag

SEQ ID NO: 295425 - RNA, 32 nt, Human
aauguggucugcuuuauaagauggccagaucu

SEQ ID NO: 295426 - RNA, 32 nt, Human
aauguggugagaugcacucuuuuguuguacca

SEQ ID NO: 295427 - RNA, 32 nt, Human
aaugugguuucacaccugacccagcaauuccu

SEQ ID NO: 295428 - RNA, 32 nt, Human
aaugugguuucuguuucucaggauaaauuggu

SEQ ID NO: 295429 - RNA, 32 nt, Human
aauguguaauaugccauuuucuuuggccaaau

SEQ ID NO: 295430 - RNA, 32 nt, Human
aauguguacacuccaguagaugagcacgucua

SEQ ID NO: 295431 - RNA, 32 nt, Human
aauguguacggugcacacacacagugcaucau

SEQ ID NO: 295432 - RNA, 32 nt, Human
aauguguacuggcucccaggccuccucagacu

SEQ ID NO: 295433 - RNA, 32 nt, Human
aauguguagggcagugcuuccuuggcacuggg

SEQ ID NO: 295434 - RNA, 32 nt, Human
aauguguaguacugcccaugugaacagucucu

SEQ ID NO: 295435 - RNA, 21 nt, Human
aauguguaguggagagaaccu

SEQ ID NO: 295436 - RNA, 32 nt, Human
aauguguaugaugcaacagagcugaagaaugg

SEQ ID NO: 295437 - RNA, 32 nt, Human
aauguguauugaaguaccuagauuuguuugau

SEQ ID NO: 295438 - RNA, 32 nt, Human
aauguguauuuuaauuauguguauuuaacucu

SEQ ID NO: 295439 - RNA, 32 nt, Human
aauguguauuuuuaguagagaaaggguuucac

SEQ ID NO: 295440 - RNA, 32 nt, Human
aaugugucaagaccauccagaaaugauaugag

SEQ ID NO: 295441 - RNA, 32 nt, Human
aaugugucagaauauccuuccuuuuuagguga

SEQ ID NO: 295442 - RNA, 32 nt, Human
aaugugucccccaacuucaucuggaaguuaaa

SEQ ID NO: 295443 - RNA, 32 nt, Human
aaugugucgugugguuugugaugcuaucuuuc

SEQ ID NO: 295444 - RNA, 32 nt, Human
aaugugucuaaggugcggcaucuugcuguugu

SEQ ID NO: 295445 - RNA, 32 nt, Human
aaugugucucugguacagaauaguugauauua

SEQ ID NO: 295446 - RNA, 32 nt, Human
aaugugucuuaugaaaauugccaaacaacugu

SEQ ID NO: 295447 - RNA, 19 nt, Human
aaugugugaaacccagggg

SEQ ID NO: 295448 - RNA, 32 nt, Human
aaugugugagagaagcggcugcgcagcccgga

SEQ ID NO: 295449 - RNA, 32 nt, Human
aaugugugcauaacaguaaugagaucuggaaa

SEQ ID NO: 295450 - RNA, 32 nt, Human
aaugugugcccauggcugggcgcaguggcuca

SEQ ID NO: 295451 - RNA, 32 nt, Human
aauguguggagauucuucuuuguuuuuagcuu

SEQ ID NO: 295452 - RNA, 32 nt, Human
aauguguggcaccuccaucaguuauacuuaga

SEQ ID NO: 295453 - RNA, 26 nt, Human
aauguguggcaucauuucacuucagc

SEQ ID NO: 295454 - RNA, 32 nt, Human
aaugugugggccggagccagauuuccucuguu

SEQ ID NO: 295455 - RNA, 32 nt, Human
aaugugugggucucauuuccaugcuagccaug

SEQ ID NO: 295456 - RNA, 29 nt, Human
aaugugugggugugugugaguggguauga

SEQ ID NO: 295457 - RNA, 32 nt, Human
aauguguggugcaaaguggggccagggcccag

SEQ ID NO: 295458 - RNA, 32 nt, Human
aauguguguuaagaaaaggugucgaggggagg

SEQ ID NO: 295459 - RNA, 28 nt, Human
aauguguuaagugcuguucauuuaaguu

SEQ ID NO: 295460 - RNA, 32 nt, Human
aauguguuauuaauuaaugauaaaauuggcgc

SEQ ID NO: 295461 - RNA, 32 nt, Human
aauguguugcugcugccaccccugccccaaag

SEQ ID NO: 295462 - RNA, 32 nt, Human
aauguguuguaaacaagauucuaaauuuaaaa

SEQ ID NO: 295463 - RNA, 32 nt, Human
aauguguuucuccccaugguccuauuucucuc

SEQ ID NO: 295464 - RNA, 32 nt, Human
aauguguuugaugccacugaccuguacaguua

SEQ ID NO: 295465 - RNA, 32 nt, Human
aauguguuuggcuucugucucuugaguagccc

SEQ ID NO: 295466 - RNA, 32 nt, Human
aauguuaacagaccuaaauaacugggaagaua

SEQ ID NO: 295467 - RNA, 32 nt, Human
aauguuaacagcuggagguccauacuaucucc

SEQ ID NO: 295468 - RNA, 32 nt, Human
aauguuaaccacccaccacagaugacuaaugc

SEQ ID NO: 295469 - RNA, 32 nt, Human
aauguuaacuaucaucauauggacucuaugua

SEQ ID NO: 295470 - RNA, 21 nt, Human
aauguuaagauuuuuucuucu

SEQ ID NO: 295471 - RNA, 31 nt, Human
aauguuaaggauggggaaaaagaaugccuuu

SEQ ID NO: 295472 - RNA, 32 nt, Human
aauguuaaguaaucauuucucauuccaaagac

SEQ ID NO: 295473 - RNA, 32 nt, Human
aauguuaauuaugcaguguuucccucuguguu

SEQ ID NO: 295474 - RNA, 32 nt, Human
aauguuacauuuguuugugggauuauuuaagg

SEQ ID NO: 295475 - RNA, 22 nt, Human
aauguuaccuuuucugauuuac

SEQ ID NO: 295476 - RNA, 22 nt, Human
aauguuacuagagaagaagccu

SEQ ID NO: 295477 - RNA, 32 nt, Human
aauguuacugguuucugcuuucuuuugacuac

SEQ ID NO: 295478 - RNA, 32 nt, Human
aauguuagagaaggaggaggaagcccauagac

SEQ ID NO: 295479 - RNA, 32 nt, Human
aauguuagcauguaugacaagacaaugagagu

SEQ ID NO: 295480 - RNA, 32 nt, Human
aauguuagcccaaacugcacuauuuugcagac

SEQ ID NO: 295481 - RNA, 32 nt, Human
aauguuagguuuccuaaaggguacagugccgu

SEQ ID NO: 295482 - RNA, 32 nt, Human
aauguuaugacuauguaaacuacuucucuugu

SEQ ID NO: 295483 - RNA, 23 nt, Human
aauguuaugcuuuggggcuccug

SEQ ID NO: 295484 - RNA, 32 nt, Human
aauguuauguagacauuauacaugguugguug

SEQ ID NO: 295485 - RNA, 24 nt, Human
aauguuauuaaguucaaugacuga

SEQ ID NO: 295486 - RNA, 32 nt, Human
aauguuauuaccuauaauccucauguuguaca

SEQ ID NO: 295487 - RNA, 32 nt, Human
aauguuauuucaccacacagugugguagggag

SEQ ID NO: 295488 - RNA, 32 nt, Human
aauguuauuucuguaaacuuugagcuuuguua

SEQ ID NO: 295489 - RNA, 32 nt, Human
aauguuauuugaagaaugccugugaagccagg

SEQ ID NO: 295490 - RNA, 32 nt, Human
aauguuauuugcucuguguguuuuuguguguu

SEQ ID NO: 295491 - RNA, 32 nt, Human
aauguuauuuggugguguauaauucuacuuuu

SEQ ID NO: 295492 - RNA, 32 nt, Human
aauguuauuuucucccauccuuggcccaagga

SEQ ID NO: 295493 - RNA, 32 nt, Human
aauguucaaagauucagacacaccuggguuug

SEQ ID NO: 295494 - RNA, 32 nt, Human
aauguucaaugccacgugcugcugacaccgac

SEQ ID NO: 295495 - RNA, 32 nt, Human
aauguucagacuccugaccuuugccaagugag

SEQ ID NO: 295496 - RNA, 32 nt, Human
aauguucagcaugccauuucugacuggcacau

SEQ ID NO: 295497 - RNA, 32 nt, Human
aauguucagcuugcacuuucuggcuuauguaa

SEQ ID NO: 295498 - RNA, 32 nt, Human
aauguucagugagaaguaaacagagcagaagu

SEQ ID NO: 295499 - RNA, 32 nt, Human
aauguucauaacuguuuuuauauucuugucug

SEQ ID NO: 295500 - RNA, 21 nt, Human
aauguucauagagaaggaggg

SEQ ID NO: 295501 - RNA, 32 nt, Human
aauguucauuccaaucagaugcagcuuucucc

SEQ ID NO: 295502 - RNA, 32 nt, Human
aauguucccugagcccacacuguggccagugg

SEQ ID NO: 295503 - RNA, 32 nt, Human
aauguuccuaaaccaggaagcugcguuagccg

SEQ ID NO: 295504 - RNA, 32 nt, Human
aauguuccuacucacacuucagcugggucaca

SEQ ID NO: 295505 - RNA, 32 nt, Human
aauguuccugcagccugagauuucagguagag

SEQ ID NO: 295506 - RNA, 32 nt, Human
aauguucuaaaaugucaaggcaguugcuugug

SEQ ID NO: 295507 - RNA, 32 nt, Human
aauguucuaccugccuuaauucuaucagccag

SEQ ID NO: 295508 - RNA, 32 nt, Human
aauguucuauguucaccugccccagccccacc

SEQ ID NO: 295509 - RNA, 32 nt, Human
aauguucucaaaggaaacagacuugaguuguu

SEQ ID NO: 295510 - RNA, 32 nt, Human
aauguucuccacccaccugugccuggcggacc

SEQ ID NO: 295511 - RNA, 23 nt, Human
aauguucucuaugagaaggaggg

SEQ ID NO: 295512 - RNA, 32 nt, Human
aauguucugcuaugauguuugaucucaucuua

SEQ ID NO: 295513 - RNA, 32 nt, Human
aauguucugggcaaguucuguguguggugggu

SEQ ID NO: 295514 - RNA, 21 nt, Human
aauguucuuuuuaaaguuauu

SEQ ID NO: 295515 - RNA, 19 nt, Human
aauguucuuuuuaugcaaa

SEQ ID NO: 295516 - RNA, 32 nt, Human
aauguugaaauccugacauccaaauucugggg

SEQ ID NO: 295517 - RNA, 32 nt, Human
aauguugaacaaaauaaauuggaguuggagua

SEQ ID NO: 295518 - RNA, 24 nt, Human
aauguugacaauuagauucuugga

SEQ ID NO: 295519 - RNA, 32 nt, Human
aauguugagaccaaaguaguauagaaguaugg

SEQ ID NO: 295520 - RNA, 32 nt, Human
aauguugagauugcaggcaugagccacugcgc

SEQ ID NO: 295521 - RNA, 32 nt, Human
aauguugauggcuauuuuguggugcuaacaug

SEQ ID NO: 295522 - RNA, 32 nt, Human
aauguugcagaaugguaucuauuggauaaaau

SEQ ID NO: 295523 - RNA, 28 nt, Human
aauguugcaggugcugccuccgagucug

SEQ ID NO: 295524 - RNA, 32 nt, Human
aauguugcaguuccuaaaagcauguuccaguu

SEQ ID NO: 295525 - RNA, 32 nt, Human
aauguugccagaaaaaguaucuccuccaacca

SEQ ID NO: 295526 - RNA, 32 nt, Human
aauguugcccaggcuggagugcaguggcguga

SEQ ID NO: 295527 - RNA, 32 nt, Human
aauguugcuucuuugaaggcaaugucuuuucu

SEQ ID NO: 295528 - RNA, 32 nt, Human
aauguuggaaacugccuauccuggugacucuu

SEQ ID NO: 295529 - RNA, 32 nt, Human
aauguugggaaaauagagaagagcaagagcaa

SEQ ID NO: 295530 - RNA, 32 nt, Human
aauguugggaccacgggugugagccaccgcgc

SEQ ID NO: 295531 - RNA, 32 nt, Human
aauguugggauauggaaugaagacuuaagagc

SEQ ID NO: 295532 - RNA, 32 nt, Human
aauguugggauuacaggcaugagccacugcac

SEQ ID NO: 295533 - RNA, 32 nt, Human
aauguugggauuacaggcgugagccaccgugc

SEQ ID NO: 295534 - RNA, 32 nt, Human
aauguugggcuucacauuuguuccuuguaaau

SEQ ID NO: 295535 - RNA, 32 nt, Human
aauguuggucauuccuuuaaggcaguuaagga

SEQ ID NO: 295536 - RNA, 19 nt, Human
aauguugucaagaccaaaa

SEQ ID NO: 295537 - RNA, 32 nt, Human
aauguuguggcuucugagcuuucuucagccca

SEQ ID NO: 295538 - RNA, 32 nt, Human
aauguuguguguguucugaccgcuccacccac

SEQ ID NO: 295539 - RNA, 32 nt, Human
aauguuguuuuuaaaggaauugacuuaccuga

SEQ ID NO: 295540 - RNA, 32 nt, Human
aauguuuaaagaagaaugauggguacaguuag

SEQ ID NO: 295541 - RNA, 32 nt, Human
aauguuuaaagcuuccucuagauucuuauucc

SEQ ID NO: 295542 - RNA, 32 nt, Human
aauguuuacagcccugucuuagggccgcggcu

SEQ ID NO: 295543 - RNA, 32 nt, Human
aauguuuagcacaagacacagcggagcucggg

SEQ ID NO: 295544 - RNA, 32 nt, Human
aauguuuagcagcaaccgaauauaccaggcaa

SEQ ID NO: 295545 - RNA, 32 nt, Human
aauguuuagcucccacuuguaagucagaacac

SEQ ID NO: 295546 - RNA, 32 nt, Human
aauguuuauacaaauacauacauguacaccau

SEQ ID NO: 295547 - RNA, 32 nt, Human
aauguuuauuagacacaucuccugggacauac

SEQ ID NO: 295548 - RNA, 32 nt, Human
aauguuuauuucugugcuuaaaaguuagacug

SEQ ID NO: 295549 - RNA, 23 nt, Human
aauguuucaaaaacauguccuua

SEQ ID NO: 295550 - RNA, 32 nt, Human
aauguuucaaagcugcucaaucaaaagaaacg

SEQ ID NO: 295551 - RNA, 32 nt, Human
aauguuucaaguugagaucaugcuugggaaaa

SEQ ID NO: 295552 - RNA, 25 nt, Human
aauguuucaccuuugugcauuugug

SEQ ID NO: 295553 - RNA, 32 nt, Human
aauguuucagcccccuagaguugucccuguga

SEQ ID NO: 295554 - RNA, 32 nt, Human
aauguuucaguaggaaucaugauaucuaaaaa

SEQ ID NO: 295555 - RNA, 32 nt, Human
aauguuucaguuauagagguaaaauuugcaca

SEQ ID NO: 295556 - RNA, 32 nt, Human
aauguuuccaacuguuggaccugcacugccuu

SEQ ID NO: 295557 - RNA, 32 nt, Human
aauguuuccaggguguugggaaggccugcguc

SEQ ID NO: 295558 - RNA, 32 nt, Human
aauguuucggacccaaaagaggugcugucagu

SEQ ID NO: 295559 - RNA, 23 nt, Human
aauguuucuagaauaagcccuua

SEQ ID NO: 295560 - RNA, 32 nt, Human
aauguuucuccucuccuucccauggccccugu

SEQ ID NO: 295561 - RNA, 21 nt, Human
aauguuucucuaacccuuuca

SEQ ID NO: 295562 - RNA, 32 nt, Human
aauguuucucucuacacauaaacugggcuguu

SEQ ID NO: 295563 - RNA, 32 nt, Human
aauguuugcaaucuacccaucugacaaauguc

SEQ ID NO: 295564 - RNA, 32 nt, Human
aauguuugcacaaauuuccuuaaaaaucaacu

SEQ ID NO: 295565 - RNA, 32 nt, Human
aauguuugcugagugagugaugaaucagcaau

SEQ ID NO: 295566 - RNA, 32 nt, Human
aauguuuggcuugaagaaggagcucaguaaac

SEQ ID NO: 295567 - RNA, 32 nt, Human
aauguuuguaaaucuuaaccuccugccuagga

SEQ ID NO: 295568 - RNA, 32 nt, Human
aauguuuguaaucucauaagcacuuuauaaac

SEQ ID NO: 295569 - RNA, 32 nt, Human
aauguuuguugaggaaaggagugaagaguugg

SEQ ID NO: 295570 - RNA, 32 nt, Human
aauguuuuacaugcaucagcucuuucaacauu

SEQ ID NO: 295571 - RNA, 32 nt, Human
aauguuuuagagaauucuuuggcaugaucuga

SEQ ID NO: 295572 - RNA, 32 nt, Human
aauguuuucaaaggaagguaucagcugugggc

SEQ ID NO: 295573 - RNA, 32 nt, Human
aauguuuucaagaaauguacacugugguaaau

SEQ ID NO: 295574 - RNA, 26 nt, Human
aauguuuuccaaacuagcacauuugc

SEQ ID NO: 295575 - RNA, 32 nt, Human
aauguuuuccugcuuugguuaccuuuccuuuc

SEQ ID NO: 295576 - RNA, 32 nt, Human
aauguuuugagacagggucucauucugaugcc

SEQ ID NO: 295577 - RNA, 26 nt, Human
aauguuuugccaccugagaccuauga

SEQ ID NO: 295578 - RNA, 32 nt, Human
aauuaaaaacaacaaggaaauauuuagaauuu

SEQ ID NO: 295579 - RNA, 32 nt, Human
aauuaaaaacaggacaggaagaaggucuaaaa

SEQ ID NO: 295580 - RNA, 32 nt, Human
aauuaaaaaggaaaaguagaaauaaguaaaac

SEQ ID NO: 295581 - RNA, 32 nt, Human
aauuaaaaauuagcuggacauggugucacaug

SEQ ID NO: 295582 - RNA, 32 nt, Human
aauuaaaaauuagcugggcaugguggcacaca

SEQ ID NO: 295583 - RNA, 32 nt, Human
aauuaaaacacuggcauggccuaggaagggcg

SEQ ID NO: 295584 - RNA, 32 nt, Human
aauuaaaagcaacacuggcucuugccucacuc

SEQ ID NO: 295585 - RNA, 32 nt, Human
aauuaaaaggauuuuuaaaaaguaauuacugc

SEQ ID NO: 295586 - RNA, 32 nt, Human
aauuaaaauuggccuggaagacaucuguacuu

SEQ ID NO: 295587 - RNA, 32 nt, Human
aauuaaaauuuucacaccaccugcuuuucuau

SEQ ID NO: 295588 - RNA, 32 nt, Human
aauuaaacagcaugcauugaacugaagauaac

SEQ ID NO: 295589 - RNA, 32 nt, Human
aauuaaacauggaggaugaauuaccuuccuau

SEQ ID NO: 295590 - RNA, 32 nt, Human
aauuaaaccaacaauauuauugauuauugcaa

SEQ ID NO: 295591 - RNA, 32 nt, Human
aauuaaaccauccuugucagcagaagccaaga

SEQ ID NO: 295592 - RNA, 32 nt, Human
aauuaaaccggaccaucucuccaacucaacuc

SEQ ID NO: 295593 - RNA, 32 nt, Human
aauuaaacugcacuuuuugcuguuuuugccua

SEQ ID NO: 295594 - RNA, 32 nt, Human
aauuaaacuguacauacugugcauauaaugaa

SEQ ID NO: 295595 - RNA, 32 nt, Human
aauuaaagaaaauguuuuucucaauuuaaaau

SEQ ID NO: 295596 - RNA, 32 nt, Human
aauuaaagaaggaggugggaaaagaggacuua

SEQ ID NO: 295597 - RNA, 32 nt, Human
aauuaaagagaaacugcuuagacagaaaccug

SEQ ID NO: 295598 - RNA, 32 nt, Human
aauuaaagauuagcugggcgugguugcacaug

SEQ ID NO: 295599 - RNA, 32 nt, Human
aauuaaagccauaaugguaaaagauggcauac

SEQ ID NO: 295600 - RNA, 32 nt, Human
aauuaaauacagauuccuagagacguuaugau

SEQ ID NO: 295601 - RNA, 17 nt, Human
aauuaaaugcaagcaca

SEQ ID NO: 295602 - RNA, 32 nt, Human
aauuaaaugcuuauuguauugagaaccaagau

SEQ ID NO: 295603 - RNA, 31 nt, Human
aauuaaauggcagcagcagaggaagggauag

SEQ ID NO: 295604 - RNA, 32 nt, Human
aauuaaaugugggugaggaagaauguguggag

SEQ ID NO: 295605 - RNA, 32 nt, Human
aauuaaauuuaggggauccugaugccacuuag

SEQ ID NO: 295606 - RNA, 32 nt, Human
aauuaacaaccuggauuucuguuuccagaccu

SEQ ID NO: 295607 - RNA, 32 nt, Human
aauuaacaagggacaaaccaaaucccaauugc

SEQ ID NO: 295608 - RNA, 32 nt, Human
aauuaacacaugcauggucaugacacccagaa

SEQ ID NO: 295609 - RNA, 32 nt, Human
aauuaacaugguaagccuuagcagcaaacauu

SEQ ID NO: 295610 - RNA, 32 nt, Human
aauuaacccaauucaacaaagacaaagaaaaa

SEQ ID NO: 295611 - RNA, 32 nt, Human
aauuaaccuccugccaugacucuggcucaucu

SEQ ID NO: 295612 - RNA, 32 nt, Human
aauuaacgggcuuucuauuuuuguauguuacu

SEQ ID NO: 295613 - RNA, 32 nt, Human
aauuaacguguugcuucugccccacgggcaaa

SEQ ID NO: 295614 - RNA, 32 nt, Human
aauuaacuauuuuaaagugagaaguucagugc

SEQ ID NO: 295615 - RNA, 32 nt, Human
aauuaacucaaccuauaucucccuugaaaaua

SEQ ID NO: 295616 - RNA, 32 nt, Human
aauuaacuccucucaacaaagcuaagaggugc

SEQ ID NO: 295617 - RNA, 32 nt, Human
aauuaacugacauuccuccuguauuuccuccc

SEQ ID NO: 295618 - RNA, 32 nt, Human
aauuaacugccucagcuucccuaguaauggau

SEQ ID NO: 295619 - RNA, 32 nt, Human
aauuaacuuucccaucuggccuuuaucuccaa

SEQ ID NO: 295620 - RNA, 32 nt, Human
aauuaagaauaaccuuagaagcacucagaaaa

SEQ ID NO: 295621 - RNA, 32 nt, Human
aauuaagaauuucuagaggucacugcagcaug

SEQ ID NO: 295622 - RNA, 32 nt, Human
aauuaagacaggggcucagggaaucucggaaa

SEQ ID NO: 295623 - RNA, 32 nt, Human
aauuaagagacagggucugucuuuguuaccca

SEQ ID NO: 295624 - RNA, 32 nt, Human
aauuaagaguucacccuucaucucaccaaauu

SEQ ID NO: 295625 - RNA, 32 nt, Human
aauuaagaucggguuccuuuucugccagcuug

SEQ ID NO: 295626 - RNA, 32 nt, Human
aauuaagaugugaaaauaaugcauaaagacag

SEQ ID NO: 295627 - RNA, 32 nt, Human
aauuaagcccaguaggugaccugcacaagacg

SEQ ID NO: 295628 - RNA, 32 nt, Human
aauuaagccuuaccuccauguaaagaacagca

SEQ ID NO: 295629 - RNA, 32 nt, Human
aauuaagcuaguuucaaaucucaaaggaauuc

SEQ ID NO: 295630 - RNA, 32 nt, Human
aauuaagcugagugcaagaugagggagggaag

SEQ ID NO: 295631 - RNA, 32 nt, Human
aauuaagcuguaauucugucucuuucauauuu

SEQ ID NO: 295632 - RNA, 32 nt, Human
aauuaagcuuguauucacaagacuucaugcca

SEQ ID NO: 295633 - RNA, 32 nt, Human
aauuaagcuuuaguaaaacaaagugaugaggu

SEQ ID NO: 295634 - RNA, 32 nt, Human
aauuaaggccaggaguucaaccagccuggaca

SEQ ID NO: 295635 - RNA, 32 nt, Human
aauuaaggugugagccacugugcccagccuau

SEQ ID NO: 295636 - RNA, 32 nt, Human
aauuaagguuugcccugccugcagccuccccc

SEQ ID NO: 295637 - RNA, 32 nt, Human
aauuaaguauuagaccagucuguagauauaau

SEQ ID NO: 295638 - RNA, 32 nt, Human
aauuaagugccaggcugggcacaauggcucgu

SEQ ID NO: 295639 - RNA, 32 nt, Human
aauuaaguuguuccuuuccccauccuuccuuc

SEQ ID NO: 295640 - RNA, 32 nt, Human
aauuaauagcacagcagaugugugcugcccau

SEQ ID NO: 295641 - RNA, 32 nt, Human
aauuaauaucugucuccgugggagaaaauagu

SEQ ID NO: 295642 - RNA, 32 nt, Human
aauuaauauuuuggcagaugauaggggaacuc

SEQ ID NO: 295643 - RNA, 31 nt, Human
aauuaaucaguaaauaccuugaaaugcuuag

SEQ ID NO: 295644 - RNA, 32 nt, Human
aauuaauggccaacauaaugggcuuuuagcug

SEQ ID NO: 295645 - RNA, 32 nt, Human
aauuaaugggauuguuaaaaauggcugaaaac

SEQ ID NO: 295646 - RNA, 32 nt, Human
aauuaauuaguuuuggaaauucuuuuaccauu

SEQ ID NO: 295647 - RNA, 32 nt, Human
aauuaauuauuucucaucacucccucaaucca

SEQ ID NO: 295648 - RNA, 32 nt, Human
aauuaauucaugaauaaaugcaccuuauaugu

SEQ ID NO: 295649 - RNA, 32 nt, Human
aauuaauucuuaaucauuaagagaccauaaua

SEQ ID NO: 295650 - RNA, 32 nt, Human
aauuaauugcuuguaaccucacuuuacuaaua

SEQ ID NO: 295651 - RNA, 32 nt, Human
aauuaauuggaguagggugaggagagagccac

SEQ ID NO: 295652 - RNA, 32 nt, Human
aauuaauuuacacacacauuuuacuuaguucu

SEQ ID NO: 295653 - RNA, 32 nt, Human
aauuaauuuugaaucacuaauauuuucacagu

SEQ ID NO: 295654 - RNA, 32 nt, Human
aauuaauuuuuauuccuuaagcauuuuaaaaa

SEQ ID NO: 295655 - RNA, 32 nt, Human
aauuacaaaaggaauuugaaacugcaggacuu

SEQ ID NO: 295656 - RNA, 32 nt, Human
aauuacaaagaaugcuuccuggguggaguguu

SEQ ID NO: 295657 - RNA, 32 nt, Human
aauuacaaccaccaaaauagcuacagucaaaa

SEQ ID NO: 295658 - RNA, 32 nt, Human
aauuacaaccaccaggaaauugacugcuuuuu

SEQ ID NO: 295659 - RNA, 32 nt, Human
aauuacacagggaugcaucuugugcacuacaa

SEQ ID NO: 295660 - RNA, 32 nt, Human
aauuacaccauggcuugaccucucucagcuua

SEQ ID NO: 295661 - RNA, 32 nt, Human
aauuacacccugccagaaaacuuucuuuccua

SEQ ID NO: 295662 - RNA, 32 nt, Human
aauuacacgugggagcuuuccaaagaaaugga

SEQ ID NO: 295663 - RNA, 32 nt, Human
aauuacacugaaucuaggaggggaguuggcag

SEQ ID NO: 295664 - RNA, 32 nt, Human
aauuacacuguacuuuccucuaggugaucugu

SEQ ID NO: 295665 - RNA, 32 nt, Human
aauuacauggugcugaccacaaaguuucugga

SEQ ID NO: 295666 - RNA, 32 nt, Human
aauuacaugugcccucuaaccugggcccgaag

SEQ ID NO: 295667 - RNA, 32 nt, Human
aauuacauuacaggcuggaauguaauuguggu

SEQ ID NO: 295668 - RNA, 32 nt, Human
aauuacauuuguugcagaaccuccacaaggcu

SEQ ID NO: 295669 - RNA, 32 nt, Human
aauuaccacaaacuggguggcuuuaaacaaca

SEQ ID NO: 295670 - RNA, 32 nt, Human
aauuaccacagcuucuuggcccaguucugccc

SEQ ID NO: 295671 - RNA, 32 nt, Human
aauuaccaccagcaggauuuccgacgaauguc

SEQ ID NO: 295672 - RNA, 32 nt, Human
aauuaccauuuucuucuuucucaggauuuggu

SEQ ID NO: 295673 - RNA, 32 nt, Human
aauuacccucauugucccucacucaggccaug

SEQ ID NO: 295674 - RNA, 32 nt, Human
aauuaccggccuuccaacuuuugucugccuca

SEQ ID NO: 295675 - RNA, 32 nt, Human
aauuaccucaaaccacaggguagucugcuaaa

SEQ ID NO: 295676 - RNA, 32 nt, Human
aauuaccugcagguggaauauuucauggacaa

SEQ ID NO: 295677 - RNA, 32 nt, Human
aauuaccugggcauagugguguaugccuguag

SEQ ID NO: 295678 - RNA, 32 nt, Human
aauuaccuucaaaaggaggcucgugcaggugc

SEQ ID NO: 295679 - RNA, 32 nt, Human
aauuacgccacugcacuccagccugggcaaca

SEQ ID NO: 295680 - RNA, 32 nt, Human
aauuacggcccgacuccugggcucaagcgauc

SEQ ID NO: 295681 - RNA, 32 nt, Human
aauuacggugauuggccaggugcaguggcuca

SEQ ID NO: 295682 - RNA, 32 nt, Human
aauuacuaaaauaggcugggcgcgguggcuca

SEQ ID NO: 295683 - RNA, 32 nt, Human
aauuacuagggaggagagaaagggacaaaagc

SEQ ID NO: 295684 - RNA, 32 nt, Human
aauuacuaucauuuuacagucaucucaacaau

SEQ ID NO: 295685 - RNA, 32 nt, Human
aauuacucaagaaacccaacacagucuuugga

SEQ ID NO: 295686 - RNA, 32 nt, Human
aauuacucaguuucucuuucucuaaagcuugu

SEQ ID NO: 295687 - RNA, 32 nt, Human
aauuacucuccaaguugagagaugucuuuggg

SEQ ID NO: 295688 - RNA, 32 nt, Human
aauuacugacaaacacgugauauggguugggg

SEQ ID NO: 295689 - RNA, 32 nt, Human
aauuacugcuauuuuaaaauuucuugaucauu

SEQ ID NO: 295690 - RNA, 32 nt, Human
aauuacugcuugacauguuggcauucauauua

SEQ ID NO: 295691 - RNA, 32 nt, Human
aauuacugcuuuccaucuacuggguaaaauga

SEQ ID NO: 295692 - RNA, 32 nt, Human
aauuacugcuuuguugauauucaaagugugaa

SEQ ID NO: 295693 - RNA, 32 nt, Human
aauuacugggauuacaggcaugaggcaucaca

SEQ ID NO: 295694 - RNA, 32 nt, Human
aauuacuguccuccuuucacugagcuuuauuc

SEQ ID NO: 295695 - RNA, 32 nt, Human
aauuacuuacuggggacauccuuuguaaugcu

SEQ ID NO: 295696 - RNA, 32 nt, Human
aauuacuugcuuaugacuauugccuguucuuu

SEQ ID NO: 295697 - RNA, 32 nt, Human
aauuacuuuaacugcuaaucacugugguugcc

SEQ ID NO: 295698 - RNA, 32 nt, Human
aauuacuuuugaagacaaucagaaggauuuua

SEQ ID NO: 295699 - RNA, 32 nt, Human
aauuagaacaaugcacaucugucuuccaagau

SEQ ID NO: 295700 - RNA, 32 nt, Human
aauuagaacagcucccuagaauugugaacuuu

SEQ ID NO: 295701 - RNA, 25 nt, Human
aauuagaauaaagucauuuucuucc

SEQ ID NO: 295702 - RNA, 32 nt, Human
aauuagaccagaagauccccgcuccugucucu

SEQ ID NO: 295703 - RNA, 32 nt, Human
aauuagagaaagguugggacagaaaguacuuu

SEQ ID NO: 295704 - RNA, 32 nt, Human
aauuagagagcaucugcaacaaaaagucauuu

SEQ ID NO: 295705 - RNA, 32 nt, Human
aauuagaggagcugggucagggagacaaaagu

SEQ ID NO: 295706 - RNA, 32 nt, Human
aauuagaguaauuaugagauggugggaaccag

SEQ ID NO: 295707 - RNA, 32 nt, Human
aauuagaucagcacaaagacuugauauugugg

SEQ ID NO: 295708 - RNA, 32 nt, Human
aauuagaugaggaaauuuuuaaaaaggaucaa

SEQ ID NO: 295709 - RNA, 32 nt, Human
aauuagauuucagaucuagcucugucagacug

SEQ ID NO: 295710 - RNA, 32 nt, Human
aauuagauuuugagugcaugaaucugugauaa

SEQ ID NO: 295711 - RNA, 32 nt, Human
aauuagcaaaacugaacuggguugaacugaac

SEQ ID NO: 295712 - RNA, 32 nt, Human
aauuagcacaaaccgacagagaucaucaaaca

SEQ ID NO: 295713 - RNA, 32 nt, Human
aauuagcagaauagccuacauuuguauuuauu

SEQ ID NO: 295714 - RNA, 32 nt, Human
aauuagcauagcaaucaucgaacuuggauuuc

SEQ ID NO: 295715 - RNA, 32 nt, Human
aauuagcaucaggaaagccugaaaugccuuaa

SEQ ID NO: 295716 - RNA, 32 nt, Human
aauuagccaggugcgguggaagugccuguagu

SEQ ID NO: 295717 - RNA, 32 nt, Human
aauuagccauuuuaaaggagggauguaccugu

SEQ ID NO: 295718 - RNA, 32 nt, Human
aauuagcccaaaacaguugccaaacuuugcca

SEQ ID NO: 295719 - RNA, 32 nt, Human
aauuagccugaccacagguggucacuguaggc

SEQ ID NO: 295720 - RNA, 32 nt, Human
aauuagccuuagugauucugugguugaguaau

SEQ ID NO: 295721 - RNA, 32 nt, Human
aauuagcuaacuuggauuuguggaagcuuuug

SEQ ID NO: 295722 - RNA, 32 nt, Human
aauuagcugcacaugguugcacaugccuauag

SEQ ID NO: 295723 - RNA, 32 nt, Human
aauuagcuggcgugcaccaccgcgcccagcua

SEQ ID NO: 295724 - RNA, 32 nt, Human
aauuagcugggcaugguagcacaugccugugg

SEQ ID NO: 295725 - RNA, 32 nt, Human
aauuagcugggguugguggcacaugccuguaa

SEQ ID NO: 295726 - RNA, 32 nt, Human
aauuagcuggguguguuggcacaugccuguag

SEQ ID NO: 295727 - RNA, 32 nt, Human
aauuagcuuuccacagggauuucuugaaaugc

SEQ ID NO: 295728 - RNA, 32 nt, Human
aauuaggaacugcuuccucauuuaacaaggua

SEQ ID NO: 295729 - RNA, 32 nt, Human
aauuaggaagugcagaagcacaugauggugaa

SEQ ID NO: 295730 - RNA, 32 nt, Human
aauuaggacuccaguaccacugccuucacccu

SEQ ID NO: 295731 - RNA, 24 nt, Human
aauuaggcagugguuucuuagaua

SEQ ID NO: 295732 - RNA, 32 nt, Human
aauuaggguuuuucaggcugggcacagugacu

SEQ ID NO: 295733 - RNA, 32 nt, Human
aauuagguaaacuugaauauucccaguaaaug

SEQ ID NO: 295734 - RNA, 32 nt, Human
aauuagguuuaaauucaguaggaugugauuuu

SEQ ID NO: 295735 - RNA, 32 nt, Human
aauuaguaguaaguggggucuuuguggguugg

SEQ ID NO: 295736 - RNA, 32 nt, Human
aauuaguauuguuagcaucuauuuggcuuauu

SEQ ID NO: 295737 - RNA, 31 nt, Human
aauuaguauuuucucugacaucucaugacau

SEQ ID NO: 295738 - RNA, 32 nt, Human
aauuagucauuugaucugacaacuaaagccag

SEQ ID NO: 295739 - RNA, 21 nt, Human
aauuaguccuugccucagaug

SEQ ID NO: 295740 - RNA, 32 nt, Human
aauuagugacaguguguguagagcaugugcca

SEQ ID NO: 295741 - RNA, 32 nt, Human
aauuaguggaaagaaaguuugauggagcuuuc

SEQ ID NO: 295742 - RNA, 32 nt, Human
aauuaguggacagacucccuggaacauguuug

SEQ ID NO: 295743 - RNA, 32 nt, Human
aauuaguggggagggggcagaccugggggccc

SEQ ID NO: 295744 - RNA, 32 nt, Human
aauuaguguuccccucauuuagcaaccuccau

SEQ ID NO: 295745 - RNA, 32 nt, Human
aauuaguuaacuggaagagauuaccaagagaa

SEQ ID NO: 295746 - RNA, 32 nt, Human
aauuaguucagccucagaccauggcacuuuga

SEQ ID NO: 295747 - RNA, 32 nt, Human
aauuaguucucaucucccugucgucgucauug

SEQ ID NO: 295748 - RNA, 32 nt, Human
aauuaguucuuccuccucaacucauaggagua

SEQ ID NO: 295749 - RNA, 32 nt, Human
aauuaguuggaaacucauauaaaaugagcuuu

SEQ ID NO: 295750 - RNA, 32 nt, Human
aauuaguuggugagccagaggcuugacagagc

SEQ ID NO: 295751 - RNA, 32 nt, Human
aauuaguuuucuuuucuugcuugcaauagaaa

SEQ ID NO: 295752 - RNA, 32 nt, Human
aauuaguuuuucuuccuuugauuuuauuggcc

SEQ ID NO: 295753 - RNA, 32 nt, Human
aauuauaaaauguuaaccggcagaaguauuuu

SEQ ID NO: 295754 - RNA, 32 nt, Human
aauuauaauguaucuguacagcacuuuuuaca

SEQ ID NO: 295755 - RNA, 32 nt, Human
aauuauacuacaaauggaaugagggcugagaa

SEQ ID NO: 295756 - RNA, 32 nt, Human
aauuauagaaaaucauguuguccguuuucaaa

SEQ ID NO: 295757 - RNA, 32 nt, Human
aauuauagcauaacauacagacuuuugcacau

SEQ ID NO: 295758 - RNA, 32 nt, Human
aauuauaggauagaauugucauuuuaugcagg

SEQ ID NO: 295759 - RNA, 32 nt, Human
aauuauauaguaguuuguuuauaagccgguac

SEQ ID NO: 295760 - RNA, 23 nt, Human
aauuauauaucacagaacccuga

SEQ ID NO: 295761 - RNA, 32 nt, Human
aauuauauggguggguuuuccuauguucuugu

SEQ ID NO: 295762 - RNA, 32 nt, Human
aauuauauuuucagaaguaaagcaaagaagcu

SEQ ID NO: 295763 - RNA, 31 nt, Human
aauuaucacaucaaggagucaggggaaagug

SEQ ID NO: 295764 - RNA, 32 nt, Human
aauuaucauauguacucccaaaauaugcacau

SEQ ID NO: 295765 - RNA, 32 nt, Human
aauuauccaacagauaaaugugcaagugcaaa

SEQ ID NO: 295766 - RNA, 32 nt, Human
aauuauccagccccaaaugccaauagggcuca

SEQ ID NO: 295767 - RNA, 32 nt, Human
aauuauccauuuuccauucaugcauucacuaa

SEQ ID NO: 295768 - RNA, 32 nt, Human
aauuaucccagcuggaagcauggagaugcagg

SEQ ID NO: 295769 - RNA, 32 nt, Human
aauuaucccugccuguguccaugucagacuuu

SEQ ID NO: 295770 - RNA, 32 nt, Human
aauuauccuagagugaggacuucugcagcuua

SEQ ID NO: 295771 - RNA, 32 nt, Human
aauuauccucuuaaccuucucuucccagugaa

SEQ ID NO: 295772 - RNA, 32 nt, Human
aauuaucggcacacccugcccacugccagggg

SEQ ID NO: 295773 - RNA, 32 nt, Human
aauuaucuacaauggaaucuucccucuguucu

SEQ ID NO: 295774 - RNA, 32 nt, Human
aauuaucucacuuguuuuguguucugucaucc

SEQ ID NO: 295775 - RNA, 32 nt, Human
aauuaucuccuccaaaggacuuuuuauuuaca

SEQ ID NO: 295776 - RNA, 32 nt, Human
aauuaucucucaucuuuugacuauuucaaguc

SEQ ID NO: 295777 - RNA, 32 nt, Human
aauuaucuggagagagaggaaaagucagcaga

SEQ ID NO: 295778 - RNA, 32 nt, Human
aauuaucugggcauggugaugugugccuguaa

SEQ ID NO: 295779 - RNA, 32 nt, Human
aauuaucuucagauuucucuguauuuauuaug

SEQ ID NO: 295780 - RNA, 32 nt, Human
aauuaucuucagcccaggcuuuugcuagaugg

SEQ ID NO: 295781 - RNA, 32 nt, Human
aauuaugaaagugaaaugcaaaugucuguuau

SEQ ID NO: 295782 - RNA, 32 nt, Human
aauuaugaacaucucugaguuucggucuccug

SEQ ID NO: 295783 - RNA, 32 nt, Human
aauuaugaacuaauguucuacagcagaaaauu

SEQ ID NO: 295784 - RNA, 32 nt, Human
aauuaugaccaagaaaggauacacuggccccu

SEQ ID NO: 295785 - RNA, 32 nt, Human
aauuaugauucugcuggagaacuuuucagcug

SEQ ID NO: 295786 - RNA, 32 nt, Human
aauuaugcacugacaugacccugggugacagg

SEQ ID NO: 295787 - RNA, 32 nt, Human
aauuaugcagucaagcaucagugacuuucuau

SEQ ID NO: 295788 - RNA, 32 nt, Human
aauuaugccacugcacuccagccugggcaaca

SEQ ID NO: 295789 - RNA, 32 nt, Human
aauuaugccaggaaggugggaccggguuaugg

SEQ ID NO: 295790 - RNA, 32 nt, Human
aauuauggacacacaaaaacacaugcacccaa

SEQ ID NO: 295791 - RNA, 32 nt, Human
aauuauggauggaggaagagggagaggaaaaa

SEQ ID NO: 295792 - RNA, 32 nt, Human
aauuauggcuuauuugaaaaguaaauaaugau

SEQ ID NO: 295793 - RNA, 32 nt, Human
aauuaugggaaaauaguguagccagcugccac

SEQ ID NO: 295794 - RNA, 32 nt, Human
aauuauguucagaaaguggucagaacuuaagc

SEQ ID NO: 295795 - RNA, 32 nt, Human
aauuauguucuuuagacacugcuaccugaaaa

SEQ ID NO: 295796 - RNA, 32 nt, Human
aauuauuaagcuguuagaaaugcauucaaauu

SEQ ID NO: 295797 - RNA, 32 nt, Human
aauuauuacaaaguuaugaaauaaaagaggau

SEQ ID NO: 295798 - RNA, 32 nt, Human
aauuauuagaagcagggaaguauuguuagucu

SEQ ID NO: 295799 - RNA, 32 nt, Human
aauuauuauauacuuccuuguaacaaagauug

SEQ ID NO: 295800 - RNA, 32 nt, Human
aauuauuauccagcagguaacagugauuacuc

SEQ ID NO: 295801 - RNA, 32 nt, Human
aauuauucauucucccuuuauugauucaucga

SEQ ID NO: 295802 - RNA, 32 nt, Human
aauuauuccuucaaguuuccuagcucugugcu

SEQ ID NO: 295803 - RNA, 32 nt, Human
aauuauucuccaaguugagagauguccuuggg

SEQ ID NO: 295804 - RNA, 32 nt, Human
aauuauucuggccuccgcugcauacaaaucag

SEQ ID NO: 295805 - RNA, 32 nt, Human
aauuauugcaccacugaacuccagccugggcc

SEQ ID NO: 295806 - RNA, 32 nt, Human
aauuauugccacuuaaaaacacaaagugauau

SEQ ID NO: 295807 - RNA, 32 nt, Human
aauuauuggaaagaggagacagaaugacaaga

SEQ ID NO: 295808 - RNA, 32 nt, Human
aauuauuggucuucuggguuuuugcuuuuuaa

SEQ ID NO: 295809 - RNA, 32 nt, Human
aauuauuguccaggaggggcagcacugggccu

SEQ ID NO: 295810 - RNA, 32 nt, Human
aauuauuuagcacauguuaaaauagcuuuauu

SEQ ID NO: 295811 - RNA, 32 nt, Human
aauuauuucccaaaaaguuuaguugauuuguu

SEQ ID NO: 295812 - RNA, 32 nt, Human
aauuauuucucagucuuucaaggcuugagacu

SEQ ID NO: 295813 - RNA, 32 nt, Human
aauuauuucuggguugauucaaagggaggacu

SEQ ID NO: 295814 - RNA, 32 nt, Human
aauuauuucuuuuggagggaaguggcuugccc

SEQ ID NO: 295815 - RNA, 23 nt, Human
aauuauuugaguuguuucucaga

SEQ ID NO: 295816 - RNA, 32 nt, Human
aauuauuugcuuaagaagaauggucuuaacca

SEQ ID NO: 295817 - RNA, 32 nt, Human
aauuauuuguguugacgcucucugcucucucc

SEQ ID NO: 295818 - RNA, 32 nt, Human
aauuauuuuauuaagagacacaaaaaguauuu

SEQ ID NO: 295819 - RNA, 32 nt, Human
aauuauuuucauucuuuauccaugagcaccag

SEQ ID NO: 295820 - RNA, 32 nt, Human
aauuauuuuuaaaaggaggaggggacauagaa

SEQ ID NO: 295821 - RNA, 32 nt, Human
aauucaaagauaaggcaacaaaaugguuuacu

SEQ ID NO: 295822 - RNA, 32 nt, Human
aauucaaagcaggguucugaggcaaauggcac

SEQ ID NO: 295823 - RNA, 32 nt, Human
aauucaacccuuguaagucacaaagccauuca

SEQ ID NO: 295824 - RNA, 32 nt, Human
aauucaagaacagcuuaucucuguaguuacac

SEQ ID NO: 295825 - RNA, 32 nt, Human
aauucaagaacuccagaaaucaggagacggag

SEQ ID NO: 295826 - RNA, 32 nt, Human
aauucaagaaguaggcugggcccgguggcuca

SEQ ID NO: 295827 - RNA, 32 nt, Human
aauucaagacugccuuuccuacuucuucagug

SEQ ID NO: 295828 - RNA, 32 nt, Human
aauucaagacuggucaguccaagagcagacaa

SEQ ID NO: 295829 - RNA, 32 nt, Human
aauucaaggagaaggaaugaggaguuagggaa

SEQ ID NO: 295830 - RNA, 32 nt, Human
aauucaaggggcccugaggacuggacugcuag

SEQ ID NO: 295831 - RNA, 24 nt, Human
aauucaagugauucuccugccuca

SEQ ID NO: 295832 - RNA, 25 nt, Human
aauucaagugcuuaaaaauacuucu

SEQ ID NO: 295833 - RNA, 32 nt, Human
aauucaaguucaacagacuucacuuuggucau

SEQ ID NO: 295834 - RNA, 32 nt, Human
aauucaaucagagcuccaguuugcauuuggau

SEQ ID NO: 295835 - RNA, 32 nt, Human
aauucaaucuuucauucugugugacagaagua

SEQ ID NO: 295836 - RNA, 32 nt, Human
aauucacaagcagggugcauuuuccucucauu

SEQ ID NO: 295837 - RNA, 32 nt, Human
aauucacacaugcucacuggugaacagugucu

SEQ ID NO: 295838 - RNA, 21 nt, Human
aauucacacuggagaaaagcc

SEQ ID NO: 295839 - RNA, 22 nt, Human
aauucacacuggagaaaagccu

SEQ ID NO: 295840 - RNA, 21 nt, Human
aauucacacuggagagaaacc

SEQ ID NO: 295841 - RNA, 22 nt, Human
aauucacacuggagagaaaccu

SEQ ID NO: 295842 - RNA, 22 nt, Human
aauucacacuggggagaaaccu

SEQ ID NO: 295843 - RNA, 32 nt, Human
aauucacacuuguucucuugacugccucucuc

SEQ ID NO: 295844 - RNA, 32 nt, Human
aauucacagaugguaaaugcgggguauuuuau

SEQ ID NO: 295845 - RNA, 32 nt, Human
aauucacaggaaagaauacaaagacagcacaa

SEQ ID NO: 295846 - RNA, 32 nt, Human
aauucacagguaaaucaucaucauaggagugu

SEQ ID NO: 295847 - RNA, 32 nt, Human
aauucacauaugaacuauuucuaggcuuugac

SEQ ID NO: 295848 - RNA, 32 nt, Human
aauucacauccugggugggacagagcaggaca

SEQ ID NO: 295849 - RNA, 32 nt, Human
aauucacauggaaauggggaagauggucuguu

SEQ ID NO: 295850 - RNA, 32 nt, Human
aauucaccggagacauccgggccccgcuucga

SEQ ID NO: 295851 - RNA, 32 nt, Human
aauucaccuagagugaguacuuuccuugugca

SEQ ID NO: 295852 - RNA, 32 nt, Human
aauucaccucaguuugcugugguugcuauugg

SEQ ID NO: 295853 - RNA, 22 nt, Human
aauucacguugaagcccuaauc

SEQ ID NO: 295854 - RNA, 21 nt, Human
aauucacuaacagacagacca

SEQ ID NO: 295855 - RNA, 32 nt, Human
aauucacuaagcugccuagccacacucuuuag

SEQ ID NO: 295856 - RNA, 32 nt, Human
aauucacuacagccuaaagccuugccuuugua

SEQ ID NO: 295857 - RNA, 32 nt, Human
aauucacucauugauucauuuguucacacaac

SEQ ID NO: 295858 - RNA, 32 nt, Human
aauucacucccacugccugggauugcacugga

SEQ ID NO: 295859 - RNA, 32 nt, Human
aauucacugcaaggagaccucuacugucaccg

SEQ ID NO: 295860 - RNA, 32 nt, Human
aauucacuguacuaucagguucacaaacuuca

SEQ ID NO: 295861 - RNA, 32 nt, Human
aauucacuuguucugucaguaauccauaagac

SEQ ID NO: 295862 - RNA, 32 nt, Human
aauucagaaacugagccagccucggcgggacc

SEQ ID NO: 295863 - RNA, 32 nt, Human
aauucagaaaguugguccagauauaugucaca

SEQ ID NO: 295864 - RNA, 23 nt, Human
aauucagaaauaguuaccaaugg

SEQ ID NO: 295865 - RNA, 24 nt, Human
aauucagaagcauuuuaccaguga

SEQ ID NO: 295866 - RNA, 32 nt, Human
aauucagaaucuauucucuucucuccaguccc

SEQ ID NO: 295867 - RNA, 32 nt, Human
aauucagaccucauuagaaaucaaagaauuca

SEQ ID NO: 295868 - RNA, 32 nt, Human
aauucagacuaugagcucaccuacaaccuaga

SEQ ID NO: 295869 - RNA, 32 nt, Human
aauucagaggucccuauuuccuuuguacauac

SEQ ID NO: 295870 - RNA, 22 nt, Human
aauucagagugauuaacaguga

SEQ ID NO: 295871 - RNA, 32 nt, Human
aauucagaugccacucgaugcacccuucuugg

SEQ ID NO: 295872 - RNA, 32 nt, Human
aauucagcagcccagacugagggucugggaug

SEQ ID NO: 295873 - RNA, 32 nt, Human
aauucagcaggaagcaguuaagcggucgucgg

SEQ ID NO: 295874 - RNA, 32 nt, Human
aauucagcaucuccccuuccacccucaccccc

SEQ ID NO: 295875 - RNA, 32 nt, Human
aauucagcccuuguaauucauaaggcaauuca

SEQ ID NO: 295876 - RNA, 32 nt, Human
aauucagcccuuguaauucauaaggcuauuca

SEQ ID NO: 295877 - RNA, 32 nt, Human
aauucagcuuugugaagucccugcucucugug

SEQ ID NO: 295878 - RNA, 26 nt, Human
aauucaggaggcggagguugcagcga

SEQ ID NO: 295879 - RNA, 32 nt, Human
aauucaggaggcggagguugcagugagccaag

SEQ ID NO: 295880 - RNA, 26 nt, Human
aauucaggagguggagguugcaguga

SEQ ID NO: 295881 - RNA, 32 nt, Human
aauucaggagguggagguugcagugagccgac

SEQ ID NO: 295882 - RNA, 31 nt, Human
aauucaggcaguguuaauaugccaagguagg

SEQ ID NO: 295883 - RNA, 32 nt, Human
aauucaggcuugcccaacucacauucuaugac

SEQ ID NO: 295884 - RNA, 32 nt, Human
aauucaggggguacaagugcagguuuguuaca

SEQ ID NO: 295885 - RNA, 24 nt, Human
aauucaggguccccuaccagauga

SEQ ID NO: 295886 - RNA, 32 nt, Human
aauucaggucuguuucagacugugucucuggu

SEQ ID NO: 295887 - RNA, 32 nt, Human
aauucaguaaguuuccucugaagcacccugaa

SEQ ID NO: 295888 - RNA, 32 nt, Human
aauucaguauuuuaugauaaucacuucguuuu

SEQ ID NO: 295889 - RNA, 32 nt, Human
aauucagucuuuucaaaacaaaucacaaaagc

SEQ ID NO: 295890 - RNA, 32 nt, Human
aauucaguggcagaaaauaaauaagaagauaa

SEQ ID NO: 295891 - RNA, 32 nt, Human
aauucaguguuggaagcuuuuucccaagguuu

SEQ ID NO: 295892 - RNA, 32 nt, Human
aauucaguucaugugugaaguucuugauauuc

SEQ ID NO: 295893 - RNA, 32 nt, Human
aauucaguucuuugcuggcucucagcuggagg

SEQ ID NO: 295894 - RNA, 22 nt, Human
aauucauacaggagagaaaccu

SEQ ID NO: 295895 - RNA, 22 nt, Human
aauucauaccggagagaaaccu

SEQ ID NO: 295896 - RNA, 32 nt, Human
aauucauacucuguugccuccucucucccugc

SEQ ID NO: 295897 - RNA, 21 nt, Human
aauucauacuggaaagaaacc

SEQ ID NO: 295898 - RNA, 22 nt, Human
aauucauacuggaaagaaaccu

SEQ ID NO: 295899 - RNA, 21 nt, Human
aauucauacuggagaaaaacc

SEQ ID NO: 295900 - RNA, 21 nt, Human
aauucauacuggagaaaagcc

SEQ ID NO: 295901 - RNA, 21 nt, Human
aauucauacuggagagaaacc

SEQ ID NO: 295902 - RNA, 22 nt, Human
aauucauacuggagagaaaccu

SEQ ID NO: 295903 - RNA, 21 nt, Human
aauucauacuggagagaaacu

SEQ ID NO: 295904 - RNA, 22 nt, Human
aauucauacuggagagaaagcc

SEQ ID NO: 295905 - RNA, 22 nt, Human
aauucauacuggagagaaagcu

SEQ ID NO: 295906 - RNA, 21 nt, Human
aauucauacuggagagaagcc

SEQ ID NO: 295907 - RNA, 22 nt, Human
aauucauacuggagcaaaaccu

SEQ ID NO: 295908 - RNA, 21 nt, Human
aauucauacuggcgagaaacc

SEQ ID NO: 295909 - RNA, 21 nt, Human
aauucauacuggggagaaacc

SEQ ID NO: 295910 - RNA, 21 nt, Human
aauucauacuggugagaaacc

SEQ ID NO: 295911 - RNA, 22 nt, Human
aauucauacuggugagaaaccu

SEQ ID NO: 295912 - RNA, 22 nt, Human
aauucauaguggagagaaaccu

SEQ ID NO: 295913 - RNA, 32 nt, Human
aauucauauguugaaacccuaaucuacuaugu

SEQ ID NO: 295914 - RNA, 32 nt, Human
aauucaucaaauaugagaucuccuucaaugua

SEQ ID NO: 295915 - RNA, 31 nt, Human
aauucaucacuuuucuggcuacagcaggaca

SEQ ID NO: 295916 - RNA, 32 nt, Human
aauucauccuccacggacccauucauacuaaa

SEQ ID NO: 295917 - RNA, 32 nt, Human
aauucaucuggaaccacaaaagagcuugaaua

SEQ ID NO: 295918 - RNA, 32 nt, Human
aauucaucuuuagauagcagauuaucccuuaa

SEQ ID NO: 295919 - RNA, 32 nt, Human
aauucaugaacugcuuuguggaaaaauuuaaa

SEQ ID NO: 295920 - RNA, 32 nt, Human
aauucaugccaaaaauaaaauuagcguaauau

SEQ ID NO: 295921 - RNA, 32 nt, Human
aauucaugccaacuugaaaacucuccaguuug

SEQ ID NO: 295922 - RNA, 21 nt, Human
aauucaugcuggagagaaacc

SEQ ID NO: 295923 - RNA, 21 nt, Human
aauucaugcuggagagaaacu

SEQ ID NO: 295924 - RNA, 22 nt, Human
aauucaugcuggagagaaacuu

SEQ ID NO: 295925 - RNA, 32 nt, Human
aauucauggaaacagagccacugucaagaagg

SEQ ID NO: 295926 - RNA, 25 nt, Human
aauucauggagccuuuacagaagca

SEQ ID NO: 295927 - RNA, 32 nt, Human
aauucauggcagggagguggggaccaaggccc

SEQ ID NO: 295928 - RNA, 32 nt, Human
aauucauuaacuuauucuguauaaaacugucu

SEQ ID NO: 295929 - RNA, 32 nt, Human
aauucauuaagccaagggaguaagaauggcca

SEQ ID NO: 295930 - RNA, 32 nt, Human
aauucauuacauggaggcucaaucuugaguuu

SEQ ID NO: 295931 - RNA, 21 nt, Human
aauucauucuggagagaaacc

SEQ ID NO: 295932 - RNA, 32 nt, Human
aauucauugggcauuuguuagcuuugaugaau

SEQ ID NO: 295933 - RNA, 32 nt, Human
aauucauuguuacuguucuguuuuucuauuaa

SEQ ID NO: 295934 - RNA, 32 nt, Human
aauucauuuucaccaccucugguguucagagg

SEQ ID NO: 295935 - RNA, 32 nt, Human
aauuccaaaggugagaguuggagugagauguc

SEQ ID NO: 295936 - RNA, 32 nt, Human
aauuccaaauggugugaacccagggggccuuu

SEQ ID NO: 295937 - RNA, 31 nt, Human
aauuccaacaacacaaccagcagagugacac

SEQ ID NO: 295938 - RNA, 32 nt, Human
aauuccaagguuuuugcuacaguuaguuucuc

SEQ ID NO: 295939 - RNA, 18 nt, Human
aauuccaaguaaucucug

SEQ ID NO: 295940 - RNA, 32 nt, Human
aauuccacacuugcuucaaugugcacaaacuu

SEQ ID NO: 295941 - RNA, 32 nt, Human
aauuccacagaagaggaaagcaguuaucuggc

SEQ ID NO: 295942 - RNA, 32 nt, Human
aauuccacagaguccugcccauucauaaaacu

SEQ ID NO: 295943 - RNA, 32 nt, Human
aauuccacagcuccuaccaagaccaugaggau

SEQ ID NO: 295944 - RNA, 32 nt, Human
aauuccaccaacauccagaccaaaaagaaaaa

SEQ ID NO: 295945 - RNA, 32 nt, Human
aauuccacuacauuucuuuuggcuccaacauu

SEQ ID NO: 295946 - RNA, 32 nt, Human
aauuccacugccugccaagcaacugaaagugc

SEQ ID NO: 295947 - RNA, 32 nt, Human
aauuccacuguacauguuauucaguguuuggu

SEQ ID NO: 295948 - RNA, 32 nt, Human
aauuccacuuggcugggguuucagaggugagc

SEQ ID NO: 295949 - RNA, 23 nt, Human
aauuccagaaguggaggcuccag

SEQ ID NO: 295950 - RNA, 32 nt, Human
aauuccagcacuuugggagacugaggcgagug

SEQ ID NO: 295951 - RNA, 32 nt, Human
aauuccagccuucuguggucgcugcggccugu

SEQ ID NO: 295952 - RNA, 32 nt, Human
aauuccagcuacucaggaggcugagacagggg

SEQ ID NO: 295953 - RNA, 32 nt, Human
aauuccagcuacucaggaggcugaggcaggag

SEQ ID NO: 295954 - RNA, 32 nt, Human
aauuccagcuacucaggaggcugaggcaggug

SEQ ID NO: 295955 - RNA, 32 nt, Human
aauuccagcuacucaggagucugaggcaggag

SEQ ID NO: 295956 - RNA, 32 nt, Human
aauuccagcuacucaggggguugaggcaggag

SEQ ID NO: 295957 - RNA, 32 nt, Human
aauuccagcuacucauaggauauugaggcagg

SEQ ID NO: 295958 - RNA, 32 nt, Human
aauuccagcuacucgggaggccgaggcaggag

SEQ ID NO: 295959 - RNA, 32 nt, Human
aauuccagcuacucgggaggcuaaggcagggg

SEQ ID NO: 295960 - RNA, 32 nt, Human
aauuccagcuacucgggaggcugaggcaggag

SEQ ID NO: 295961 - RNA, 32 nt, Human
aauuccagcuacucuggaagcugaggcaggag

SEQ ID NO: 295962 - RNA, 32 nt, Human
aauuccagcuacucuggcugcugaggcacaag

SEQ ID NO: 295963 - RNA, 32 nt, Human
aauuccagcuacuugagaggcugagauaggag

SEQ ID NO: 295964 - RNA, 32 nt, Human
aauuccagcuacuuggaggcugaggcgggaga

SEQ ID NO: 295965 - RNA, 32 nt, Human
aauuccagcuacuugggaggcugaggcaggag

SEQ ID NO: 295966 - RNA, 32 nt, Human
aauuccagcuacuugggaggcugaggcaugga

SEQ ID NO: 295967 - RNA, 32 nt, Human
aauuccagcuacuugggagguugaggcaggag

SEQ ID NO: 295968 - RNA, 32 nt, Human
aauuccagcugguuucuuugcugauucuaaaa

SEQ ID NO: 295969 - RNA, 32 nt, Human
aauuccagggcugccuugacuucuucccugca

SEQ ID NO: 295970 - RNA, 23 nt, Human
aauuccaguagcugcaaaaugag

SEQ ID NO: 295971 - RNA, 32 nt, Human
aauuccagucugaggugaauucuuagagagug

SEQ ID NO: 295972 - RNA, 32 nt, Human
aauuccaguguuuugggagacuaaggcaagaa

SEQ ID NO: 295973 - RNA, 32 nt, Human
aauuccauccacugcugagaaaucuccucaaa

SEQ ID NO: 295974 - RNA, 32 nt, Human
aauuccauccccagccgagcaggugcuuaaag

SEQ ID NO: 295975 - RNA, 32 nt, Human
aauuccaucuacucgggaggcugaggcaggag

SEQ ID NO: 295976 - RNA, 32 nt, Human
aauuccaugaaucagaaaauguuuccauagcc

SEQ ID NO: 295977 - RNA, 32 nt, Human
aauuccaugcuagaucacagacugcaugccua

SEQ ID NO: 295978 - RNA, 32 nt, Human
aauucccacagcaaauagaaauaauuuaucau

SEQ ID NO: 295979 - RNA, 32 nt, Human
aauucccaccacagacuggcuuguacguccuc

SEQ ID NO: 295980 - RNA, 24 nt, Human
aauucccacuuuggcauuuuccua

SEQ ID NO: 295981 - RNA, 32 nt, Human
aauucccagcugucugugucagccuguccccc

SEQ ID NO: 295982 - RNA, 32 nt, Human
aauucccaggcagggggagaguggcaugggga

SEQ ID NO: 295983 - RNA, 32 nt, Human
aauucccagggaggacugggaaccuuaucucu

SEQ ID NO: 295984 - RNA, 32 nt, Human
aauucccaguaggguggcugggcagaggcgcc

SEQ ID NO: 295985 - RNA, 32 nt, Human
aauucccaugccaaaggacaaacaggugugac

SEQ ID NO: 295986 - RNA, 28 nt, Human
aauuccccaagugugaagccucauucau

SEQ ID NO: 295987 - RNA, 32 nt, Human
aauucccccaagagccgcauaugaaucugccc

SEQ ID NO: 295988 - RNA, 32 nt, Human
aauucccccuucccccuccaacacauacaccg

SEQ ID NO: 295989 - RNA, 32 nt, Human
aauucccccuugcccaggcccuugggggaggg

SEQ ID NO: 295990 - RNA, 32 nt, Human
aauucccccuugugguaguuaccacaacacau

SEQ ID NO: 295991 - RNA, 32 nt, Human
aauuccccucccccucgucuuucucuuaccuc

SEQ ID NO: 295992 - RNA, 32 nt, Human
aauuccccugccucagcuuccugaguagcugg

SEQ ID NO: 295993 - RNA, 32 nt, Human
aauuccccuuccacuccagauccgcaccucag

SEQ ID NO: 295994 - RNA, 32 nt, Human
aauucccucaaaccacccaacuucauccagga

SEQ ID NO: 295995 - RNA, 32 nt, Human
aauucccucuccccagucuucuccaggugucc

SEQ ID NO: 295996 - RNA, 32 nt, Human
aauucccugcccacuuucuguuccuccaugcc

SEQ ID NO: 295997 - RNA, 32 nt, Human
aauucccugccugugccugcugggaccagacu

SEQ ID NO: 295998 - RNA, 32 nt, Human
aauucccugucuccccuuaaccagcacuggaa

SEQ ID NO: 295999 - RNA, 32 nt, Human
aauucccuguuuccuuguccagggccugagga

SEQ ID NO: 296000 - RNA, 32 nt, Human
aauuccgaaaugaccacccugcccccacugcc

SEQ ID NO: 296001 - RNA, 32 nt, Human
aauuccggacacaguuggaaaugcagaagggc

SEQ ID NO: 296002 - RNA, 32 nt, Human
aauuccggcauuaagaggcauuccgucuucau

SEQ ID NO: 296003 - RNA, 32 nt, Human
aauuccggugcaacgguucagaacagcaacca

SEQ ID NO: 296004 - RNA, 32 nt, Human
aauuccgguuauucucuuuuucaucuggggau

SEQ ID NO: 296005 - RNA, 32 nt, Human
aauuccgugggcggaggucugggaucuccugg

SEQ ID NO: 296006 - RNA, 32 nt, Human
aauuccuaaagaagagaaggacccuggaaugg

SEQ ID NO: 296007 - RNA, 32 nt, Human
aauuccuaggauagcagagagauggacaacag

SEQ ID NO: 296008 - RNA, 32 nt, Human
aauuccuauugcaaccucgugcacugcucgag

SEQ ID NO: 296009 - RNA, 32 nt, Human
aauuccucaguuacuccaaagauggaauaggg

SEQ ID NO: 296010 - RNA, 32 nt, Human
aauuccucauuucaucauuggucuuuauaugu

SEQ ID NO: 296011 - RNA, 32 nt, Human
aauuccucccagaggcacucuauaucugcuau

SEQ ID NO: 296012 - RNA, 32 nt, Human
aauuccucccuccugguaauccugcccgugug

SEQ ID NO: 296013 - RNA, 32 nt, Human
aauuccucuaagaacagagaauggucuuuccc

SEQ ID NO: 296014 - RNA, 32 nt, Human
aauuccucuaccagaacuaagcacuuuguuaa

SEQ ID NO: 296015 - RNA, 23 nt, Human
aauuccugaccucaggugaucca

SEQ ID NO: 296016 - RNA, 23 nt, Human
aauuccugaccuuaagugaucca

SEQ ID NO: 296017 - RNA, 31 nt, Human
aauuccugacuucucuauacagagucuucac

SEQ ID NO: 296018 - RNA, 32 nt, Human
aauuccugagggcagccagagcuccuuggucc

SEQ ID NO: 296019 - RNA, 32 nt, Human
aauuccugagugugcucugccauguuacacgg

SEQ ID NO: 296020 - RNA, 32 nt, Human
aauuccugaugcacagugguuauggguugaau

SEQ ID NO: 296021 - RNA, 32 nt, Human
aauuccugauuccaagaaugccaucugauaaa

SEQ ID NO: 296022 - RNA, 32 nt, Human
aauuccugcauccuuuucaaaacaucuuucca

SEQ ID NO: 296023 - RNA, 32 nt, Human
aauuccugccaucuugguucaugagaugagau

SEQ ID NO: 296024 - RNA, 32 nt, Human
aauuccugccuuccucccuuuucccaguccac

SEQ ID NO: 296025 - RNA, 32 nt, Human
aauuccuggaaagauuaaauagaucagaauga

SEQ ID NO: 296026 - RNA, 32 nt, Human
aauuccuggaugguaaaauacauauuagaucu

SEQ ID NO: 296027 - RNA, 33 nt, Human
aauuccuggccugucuagucuuuguagcuguga

SEQ ID NO: 296028 - RNA, 32 nt, Human
aauuccugggagggggauuauuuagugaaaua

SEQ ID NO: 296029 - RNA, 32 nt, Human
aauuccuggggucuucaucugaguuaaauucu

SEQ ID NO: 296030 - RNA, 32 nt, Human
aauuccugucauucaggacaacauggauggaa

SEQ ID NO: 296031 - RNA, 32 nt, Human
aauuccugucuccuggacucuccugggaaguu

SEQ ID NO: 296032 - RNA, 32 nt, Human
aauuccugugagaggauggggaagggauucgc

SEQ ID NO: 296033 - RNA, 19 nt, Human
aauuccuguuagccaggug

SEQ ID NO: 296034 - RNA, 32 nt, Human
aauuccuuccucucccuuguucccaaguaggu

SEQ ID NO: 296035 - RNA, 32 nt, Human
aauuccuuccuucucuucuguacagcagaagu

SEQ ID NO: 296036 - RNA, 32 nt, Human
aauuccuuuccaguucuuccccuggcugccuu

SEQ ID NO: 296037 - RNA, 32 nt, Human
aauucgaagcucacugugccucuuguuuccga

SEQ ID NO: 296038 - RNA, 32 nt, Human
aauucgaccaaaggauuuggaagaguuuuucu

SEQ ID NO: 296039 - RNA, 32 nt, Human
aauucgaccuuuccuuauuggguggguaccau

SEQ ID NO: 296040 - RNA, 32 nt, Human
aauucgagacaggcagaaucaguagcuggaga

SEQ ID NO: 296041 - RNA, 32 nt, Human
aauucgagaccagccuaggugacauagugaga

SEQ ID NO: 296042 - RNA, 32 nt, Human
aauucgaggaaaggaggcauggcagagggcua

SEQ ID NO: 296043 - RNA, 32 nt, Human
aauucgagguugcugagcuucucuccaaaguc

SEQ ID NO: 296044 - RNA, 32 nt, Human
aauucgcaucuucucuauccacaucaugacca

SEQ ID NO: 296045 - RNA, 32 nt, Human
aauucgcgaggcagagguugcagcgaacccag

SEQ ID NO: 296046 - RNA, 32 nt, Human
aauucggauguuuugcuggagucgcuagggag

SEQ ID NO: 296047 - RNA, 32 nt, Human
aauucgggagguggagguugcagugagccgaa

SEQ ID NO: 296048 - RNA, 32 nt, Human
aauucguacuggagagaaacccugugaguuug

SEQ ID NO: 296049 - RNA, 22 nt, Human
aauucguacuggagagaauccu

SEQ ID NO: 296050 - RNA, 32 nt, Human
aauucguggaaauguaauaauuauaggaacgu

SEQ ID NO: 296051 - RNA, 32 nt, Human
aauucguucucugccacagggacuugccucac

SEQ ID NO: 296052 - RNA, 32 nt, Human
aauucuaaaggaagcaaggaacccccuuuuca

SEQ ID NO: 296053 - RNA, 32 nt, Human
aauucuaacugaucuccugaaaauguugaucu

SEQ ID NO: 296054 - RNA, 32 nt, Human
aauucuaagccuuuuuguggcuaaguuuuguu

SEQ ID NO: 296055 - RNA, 32 nt, Human
aauucuaauguucaaaucacugcgugcuguau

SEQ ID NO: 296056 - RNA, 32 nt, Human
aauucuacagaagaaucugauggcuaaauggc

SEQ ID NO: 296057 - RNA, 32 nt, Human
aauucuacccucaggggccuguagauguugcu

SEQ ID NO: 296058 - RNA, 32 nt, Human
aauucuacugcacugccuggcucagcugcacg

SEQ ID NO: 296059 - RNA, 32 nt, Human
aauucuagaaguccaaaucacucauuguuugu

SEQ ID NO: 296060 - RNA, 32 nt, Human
aauucuagagacaaaagccaauuaaaguccau

SEQ ID NO: 296061 - RNA, 32 nt, Human
aauucuagauuguucucucagaauuccaaauu

SEQ ID NO: 296062 - RNA, 32 nt, Human
aauucuagcacuuugggagacugaagcgggug

SEQ ID NO: 296063 - RNA, 32 nt, Human
aauucuagccugggcaacagagcgagacccug

SEQ ID NO: 296064 - RNA, 32 nt, Human
aauucuauaaauucucuuucucccucucuucu

SEQ ID NO: 296065 - RNA, 32 nt, Human
aauucuaugcacccuacacugacagacucccu

SEQ ID NO: 296066 - RNA, 32 nt, Human
aauucuauggguuugcugcagcauaauccuug

SEQ ID NO: 296067 - RNA, 32 nt, Human
aauucuauguuaauuacaacugcuauauagac

SEQ ID NO: 296068 - RNA, 32 nt, Human
aauucucaaacaguuauggacucucaggagca

SEQ ID NO: 296069 - RNA, 32 nt, Human
aauucucaaaucacugccaggaguucuugcuc

SEQ ID NO: 296070 - RNA, 32 nt, Human
aauucucagucuggacagugagaccaccccgc

SEQ ID NO: 296071 - RNA, 32 nt, Human
aauucucaucuucucuccucuucucccuuuua

SEQ ID NO: 296072 - RNA, 32 nt, Human
aauucuccaacucucuggucaggaggaggagc

SEQ ID NO: 296073 - RNA, 32 nt, Human
aauucuccagccucagccuccccaguagcugg

SEQ ID NO: 296074 - RNA, 32 nt, Human
aauucucccaggaguccuggccacuuugaaug

SEQ ID NO: 296075 - RNA, 32 nt, Human
aauucuccccuagaccuuucagaaggagcgug

SEQ ID NO: 296076 - RNA, 32 nt, Human
aauucucccugccucagccuccugaguagcua

SEQ ID NO: 296077 - RNA, 32 nt, Human
aauucucccuuuguaaccucagugcuggggac

SEQ ID NO: 296078 - RNA, 32 nt, Human
aauucuccuaccucagcuucccgaguagcugg

SEQ ID NO: 296079 - RNA, 32 nt, Human
aauucuccugccucagccuccugguagcuggg

SEQ ID NO: 296080 - RNA, 32 nt, Human
aauucuccugccucagcuacucaagaggcuga

SEQ ID NO: 296081 - RNA, 32 nt, Human
aauucuccugccucagcuccucgaguagcugg

SEQ ID NO: 296082 - RNA, 32 nt, Human
aauucuccugccucagcuccugaguagcuggg

SEQ ID NO: 296083 - RNA, 32 nt, Human
aauucuccugccucagcucugaguagcuggga

SEQ ID NO: 296084 - RNA, 32 nt, Human
aauucuccugccucagcuucccgaguagcgug

SEQ ID NO: 296085 - RNA, 32 nt, Human
aauucuccugccucagcuucccgaguagcugg

SEQ ID NO: 296086 - RNA, 32 nt, Human
aauucuccugccucagcuuccugaguagcuag

SEQ ID NO: 296087 - RNA, 32 nt, Human
aauucuccugccucagcuuccugaguagcugg

SEQ ID NO: 296088 - RNA, 32 nt, Human
aauucucucaacaagauguaaacaggaaagaa

SEQ ID NO: 296089 - RNA, 32 nt, Human
aauucucugaucauuuaguucuaucuauuuag

SEQ ID NO: 296090 - RNA, 32 nt, Human
aauucucuucuaggauuuuugugaaagcuuaa

SEQ ID NO: 296091 - RNA, 32 nt, Human
aauucucuuuagcauaaagcugugcauuggaa

SEQ ID NO: 296092 - RNA, 32 nt, Human
aauucugaaagcuuccuccuuguaagaaaccc

SEQ ID NO: 296093 - RNA, 32 nt, Human
aauucugaaaugaagauggaggaggcaguggg

SEQ ID NO: 296094 - RNA, 32 nt, Human
aauucugaaccaggaauugucuccaacuccag

SEQ ID NO: 296095 - RNA, 32 nt, Human
aauucugaagaaaucuuggggagggaagggga

SEQ ID NO: 296096 - RNA, 32 nt, Human
aauucugaggaaccuuguguccaguuguuaca

SEQ ID NO: 296097 - RNA, 32 nt, Human
aauucugcacacacccaggaaguucugccuuu

SEQ ID NO: 296098 - RNA, 32 nt, Human
aauucugcacauucauggagugcaauaauacu

SEQ ID NO: 296099 - RNA, 32 nt, Human
aauucugcagguggagguugcuagucuaguuu

SEQ ID NO: 296100 - RNA, 32 nt, Human
aauucugcagucgggccagcugucgcaccuca

SEQ ID NO: 296101 - RNA, 32 nt, Human
aauucugcauggugacagucucccccaaacau

SEQ ID NO: 296102 - RNA, 32 nt, Human
aauucugccuuccucuaggggaagcuuuuaga

SEQ ID NO: 296103 - RNA, 32 nt, Human
aauucugcuugguguucuugcauugcauuuaa

SEQ ID NO: 296104 - RNA, 32 nt, Human
aauucugggagcgcaggcaaugcggaagcacg

SEQ ID NO: 296105 - RNA, 32 nt, Human
aauucugggagguuugggccuggcggcucucc

SEQ ID NO: 296106 - RNA, 32 nt, Human
aauucugggauuacaggcaugagccaccaugc

SEQ ID NO: 296107 - RNA, 32 nt, Human
aauucugggcuggcggccugguggcagugcug

SEQ ID NO: 296108 - RNA, 32 nt, Human
aauucuguccccaucaaggggucagcuggaga

SEQ ID NO: 296109 - RNA, 32 nt, Human
aauucugugagugcuggggccaguggggcugg

SEQ ID NO: 296110 - RNA, 32 nt, Human
aauucugugcugcuuugcaaauuguugaaacu

SEQ ID NO: 296111 - RNA, 32 nt, Human
aauucuguggguuacuccacagcuucagcuuu

SEQ ID NO: 296112 - RNA, 32 nt, Human
aauucuguggugcuugagaaacagacaguacu

SEQ ID NO: 296113 - RNA, 32 nt, Human
aauucuguguaugacagugcuauugaaaucac

SEQ ID NO: 296114 - RNA, 32 nt, Human
aauucugugugaaugugaacuugccuaguaag

SEQ ID NO: 296115 - RNA, 32 nt, Human
aauucuguugaaaucagugaaguggugauaag

SEQ ID NO: 296116 - RNA, 32 nt, Human
aauucuguuuuuaaaaauuagccuaagauaua

SEQ ID NO: 296117 - RNA, 32 nt, Human
aauucuuaaauauugaggccccauugugagua

SEQ ID NO: 296118 - RNA, 32 nt, Human
aauucuuacccuguucaaaugauaugauucua

SEQ ID NO: 296119 - RNA, 32 nt, Human
aauucuuagcuuauuuuauauuuccuugucuu

SEQ ID NO: 296120 - RNA, 32 nt, Human
aauucuuaggaauucuuuuaagcaaugcaggu

SEQ ID NO: 296121 - RNA, 32 nt, Human
aauucuuauucuuucauuuucuugcccgcacg

SEQ ID NO: 296122 - RNA, 32 nt, Human
aauucuuauuuaaccuuccucccuucaucuuc

SEQ ID NO: 296123 - RNA, 18 nt, Human
aauucuucaaucccuuca

SEQ ID NO: 296124 - RNA, 32 nt, Human
aauucuucccugggggucccaggauccccugc

SEQ ID NO: 296125 - RNA, 32 nt, Human
aauucuuccucccauuccccucuacuugcgag

SEQ ID NO: 296126 - RNA, 32 nt, Human
aauucuuccucuucguucuucaccuggguuuc

SEQ ID NO: 296127 - RNA, 19 nt, Human
aauucuucuaauuccuuca

SEQ ID NO: 296128 - RNA, 32 nt, Human
aauucuucuccuccuccuugcguagaaguuga

SEQ ID NO: 296129 - RNA, 32 nt, Human
aauucuugaacccaggagacggaaguugcagu

SEQ ID NO: 296130 - RNA, 32 nt, Human
aauucuugacuguaaaacauuuugaccagugu

SEQ ID NO: 296131 - RNA, 32 nt, Human
aauucuugcuuuuaauaacaaagguacaauau

SEQ ID NO: 296132 - RNA, 32 nt, Human
aauucuugucuuccaaucaucucccauauauu

SEQ ID NO: 296133 - RNA, 32 nt, Human
aauucuuuacagucuuuccuuuauauccagaa

SEQ ID NO: 296134 - RNA, 32 nt, Human
aauucuuuagggacugggauuggguuugacug

SEQ ID NO: 296135 - RNA, 32 nt, Human
aauucuuuugagaaaguaugaaguuuugcaga

SEQ ID NO: 296136 - RNA, 32 nt, Human
aauucuuuuuaaaucaccuuuuacuuuauuga

SEQ ID NO: 296137 - RNA, 32 nt, Human
aauugaaaaauggaccuuugaaaaugcuagau

SEQ ID NO: 296138 - RNA, 32 nt, Human
aauugaaaacaaccuggaaguccagugauggg

SEQ ID NO: 296139 - RNA, 32 nt, Human
aauugaaaaguauucugagacugcaaaauggg

SEQ ID NO: 296140 - RNA, 32 nt, Human
aauugaaaauaaauaauuaaaauaucagacau

SEQ ID NO: 296141 - RNA, 32 nt, Human
aauugaaagaagcaaggacaucagcugagaag

SEQ ID NO: 296142 - RNA, 32 nt, Human
aauugaaagagggagaggggagacuguagccu

SEQ ID NO: 296143 - RNA, 32 nt, Human
aauugaaagauggagucuaaaaauuauuagcu

SEQ ID NO: 296144 - RNA, 32 nt, Human
aauugaaagcaaguggauuacacaggagaacc

SEQ ID NO: 296145 - RNA, 32 nt, Human
aauugaaagcaggauaucgaagagauauuugc

SEQ ID NO: 296146 - RNA, 32 nt, Human
aauugaaagcagggacuugaacagauauuugu

SEQ ID NO: 296147 - RNA, 32 nt, Human
aauugaaagcagggucucaaagagauaucugu

SEQ ID NO: 296148 - RNA, 31 nt, Human
aauugaaagugugaaagaaaagacugauaaa

SEQ ID NO: 296149 - RNA, 32 nt, Human
aauugaaauaaauaugaaaauaucaaguucaa

SEQ ID NO: 296150 - RNA, 32 nt, Human
aauugaaauggaauuggcaaugugggaaauaa

SEQ ID NO: 296151 - RNA, 32 nt, Human
aauugaaauguucuuaauagcuaaguuuuaaa

SEQ ID NO: 296152 - RNA, 32 nt, Human
aauugaacaaacccucacugagcaccucugau

SEQ ID NO: 296153 - RNA, 32 nt, Human
aauugaacaggcugcuugcagagagauaagag

SEQ ID NO: 296154 - RNA, 32 nt, Human
aauugaacaucagaggaugggaagagggcucu

SEQ ID NO: 296155 - RNA, 32 nt, Human
aauugaacccaggagguggagguugcagugag

SEQ ID NO: 296156 - RNA, 32 nt, Human
aauugaaccuaggagguugaggcuauagugag

SEQ ID NO: 296157 - RNA, 32 nt, Human
aauugaaccuuagaacacagacugcaaauaau

SEQ ID NO: 296158 - RNA, 32 nt, Human
aauugaacgugagauuccgagaccggcuaccc

SEQ ID NO: 296159 - RNA, 32 nt, Human
aauugaacucacaaacugauguuauauacuca

SEQ ID NO: 296160 - RNA, 32 nt, Human
aauugaacuccaucaggcaaaauuuaaaauca

SEQ ID NO: 296161 - RNA, 32 nt, Human
aauugaagacuugauggaaauggugcaaaagc

SEQ ID NO: 296162 - RNA, 32 nt, Human
aauugaagagccaagaaaaagggagauucuua

SEQ ID NO: 296163 - RNA, 32 nt, Human
aauugaagaggaagucuaccugggcuucuggg

SEQ ID NO: 296164 - RNA, 32 nt, Human
aauugaagauauagcaccaauaguuuauuuau

SEQ ID NO: 296165 - RNA, 32 nt, Human
aauugaaggcacugugcacaccauuggacugc

SEQ ID NO: 296166 - RNA, 32 nt, Human
aauugaaguucugcagcaugucaggccaggau

SEQ ID NO: 296167 - RNA, 32 nt, Human
aauugaauaagcugcaugugugcauacuugcu

SEQ ID NO: 296168 - RNA, 32 nt, Human
aauugaauauuaauacaaagcauauuaaaaac

SEQ ID NO: 296169 - RNA, 32 nt, Human
aauugaaucugaauuuuggggauguuguauag

SEQ ID NO: 296170 - RNA, 32 nt, Human
aauugaauucauuaguaaaaugaguuaccaag

SEQ ID NO: 296171 - RNA, 32 nt, Human
aauugaauugaaagggaggagugaugguggaa

SEQ ID NO: 296172 - RNA, 32 nt, Human
aauugaauuuucugaauuuggguggagcagag

SEQ ID NO: 296173 - RNA, 32 nt, Human
aauugacacaauauagaccaacaguuucaucc

SEQ ID NO: 296174 - RNA, 32 nt, Human
aauugacagcuuucuaacucacaggcauagag

SEQ ID NO: 296175 - RNA, 32 nt, Human
aauugacauaagugcuuuuacaagcaccaaag

SEQ ID NO: 296176 - RNA, 32 nt, Human
aauugacauacucaggauaacagagaauggug

SEQ ID NO: 296177 - RNA, 32 nt, Human
aauugacauuagggucaauucagcauugacuu

SEQ ID NO: 296178 - RNA, 32 nt, Human
aauugaccagaacacaguugugggaauuuggu

SEQ ID NO: 296179 - RNA, 19 nt, Human
aauugaccauccaggcaca

SEQ ID NO: 296180 - RNA, 32 nt, Human
aauugacccauguaacaaaccugcacaugugg

SEQ ID NO: 296181 - RNA, 32 nt, Human
aauugacccugacgaagaagaaagugccaaga

SEQ ID NO: 296182 - RNA, 32 nt, Human
aauugaccuagaaaaugucucuuuuaaauuua

SEQ ID NO: 296183 - RNA, 32 nt, Human
aauugaccucuucugggaacuuccucagaugg

SEQ ID NO: 296184 - RNA, 32 nt, Human
aauugacuagagugcuguaaacuugcuguaac

SEQ ID NO: 296185 - RNA, 32 nt, Human
aauugacugacuggauuucuccauuucucaca

SEQ ID NO: 296186 - RNA, 32 nt, Human
aauugacugcaaccucugcuucccaggcucaa

SEQ ID NO: 296187 - RNA, 32 nt, Human
aauugacugccaggcugggugcaguggcucac

SEQ ID NO: 296188 - RNA, 32 nt, Human
aauugacuuacauaaacuacugccaauguuua

SEQ ID NO: 296189 - RNA, 32 nt, Human
aauugagaaaauaaagcugucuucuuauuaac

SEQ ID NO: 296190 - RNA, 32 nt, Human
aauugagagagaagaagggggagaggaacagc

SEQ ID NO: 296191 - RNA, 32 nt, Human
aauugagauuccaucagccaggaagaaggggu

SEQ ID NO: 296192 - RNA, 32 nt, Human
aauugagauugauguguuuucacuggauuuuu

SEQ ID NO: 296193 - RNA, 32 nt, Human
aauugagcagacaaguuuguuuuauuuuggag

SEQ ID NO: 296194 - RNA, 32 nt, Human
aauugagcaguuguaucuucugaccaccaaca

SEQ ID NO: 296195 - RNA, 32 nt, Human
aauugagcccacgaguucaaggcugcagugag

SEQ ID NO: 296196 - RNA, 32 nt, Human
aauugagcccaggaguucaaagcuguagugag

SEQ ID NO: 296197 - RNA, 32 nt, Human
aauugagcccaugaguucaaggcugcagugag

SEQ ID NO: 296198 - RNA, 32 nt, Human
aauugagcuccuggcccuucugaugcuuugaa

SEQ ID NO: 296199 - RNA, 32 nt, Human
aauugagcuucuaaugagaugcaccccuuuac

SEQ ID NO: 296200 - RNA, 32 nt, Human
aauugaggacuuuucugcuucauccagacagc

SEQ ID NO: 296201 - RNA, 32 nt, Human
aauugaggagaaagugagcuaaguuggggugg

SEQ ID NO: 296202 - RNA, 32 nt, Human
aauugaggagucuggaguuuuguauuuggacc

SEQ ID NO: 296203 - RNA, 32 nt, Human
aauugaggaucccggacacagagugcagagac

SEQ ID NO: 296204 - RNA, 32 nt, Human
aauugaggccuugaggaaugaagcuuugaagg

SEQ ID NO: 296205 - RNA, 32 nt, Human
aauugagggaagagaugggagccagggcacga

SEQ ID NO: 296206 - RNA, 32 nt, Human
aauugagggaagcggaagggaagaauaaggga

SEQ ID NO: 296207 - RNA, 32 nt, Human
aauugaggguaguggaaagcaggugugggaca

SEQ ID NO: 296208 - RNA, 32 nt, Human
aauugaggugugcagagcacuguacagacccc

SEQ ID NO: 296209 - RNA, 32 nt, Human
aauugaguaguacaguggaaacuguuaaaugc

SEQ ID NO: 296210 - RNA, 32 nt, Human
aauugagucugaccucaggaguguaguuaaac

SEQ ID NO: 296211 - RNA, 32 nt, Human
aauugaguuucuggcuccccuccugggguugu

SEQ ID NO: 296212 - RNA, 32 nt, Human
aauugaguuugagacuagccugggcaacaugg

SEQ ID NO: 296213 - RNA, 32 nt, Human
aauugauaaccaggacaaccagguagucaccc

SEQ ID NO: 296214 - RNA, 32 nt, Human
aauugauauacuuuaaaugucuccaguguggc

SEQ ID NO: 296215 - RNA, 32 nt, Human
aauugaugagugccaucagaaagcuguaucau

SEQ ID NO: 296216 - RNA, 32 nt, Human
aauugauguugcuggacugucauagaaauuac

SEQ ID NO: 296217 - RNA, 32 nt, Human
aauugauuacuuuugcacauugcacagaaccc

SEQ ID NO: 296218 - RNA, 32 nt, Human
aauugauucuggagccacacagcuccccaccc

SEQ ID NO: 296219 - RNA, 32 nt, Human
aauugauuggcuuaucacaaaaaucauuucau

SEQ ID NO: 296220 - RNA, 32 nt, Human
aauugauuuccagcugcaauaagccgugccuc

SEQ ID NO: 296221 - RNA, 32 nt, Human
aauugcacagaauucuagagacagcguuguuc

SEQ ID NO: 296222 - RNA, 32 nt, Human
aauugcaccacugcacuccagccugggaaaca

SEQ ID NO: 296223 - RNA, 32 nt, Human
aauugcaccacugcacuccagccugggagaca

SEQ ID NO: 296224 - RNA, 32 nt, Human
aauugcaccacugcacuccagccugggugaca

SEQ ID NO: 296225 - RNA, 32 nt, Human
aauugcaccacugcacuccauccugggcaaca

SEQ ID NO: 296226 - RNA, 32 nt, Human
aauugcaccacugcacugcagccugggaaaca

SEQ ID NO: 296227 - RNA, 32 nt, Human
aauugcaccauugcacuccagccugggcaaua

SEQ ID NO: 296228 - RNA, 32 nt, Human
aauugcacccuccagacacucagguugaaaau

SEQ ID NO: 296229 - RNA, 32 nt, Human
aauugcacuggugacagauaagguuuaacaga

SEQ ID NO: 296230 - RNA, 32 nt, Human
aauugcagaagcaggaaggugacucugaccuu

SEQ ID NO: 296231 - RNA, 32 nt, Human
aauugcagacuucaggucguggcagagaaaac

SEQ ID NO: 296232 - RNA, 32 nt, Human
aauugcagaggaaggcugaggcgggaggauug

SEQ ID NO: 296233 - RNA, 32 nt, Human
aauugcagaggggagggggaaaagagagagag

SEQ ID NO: 296234 - RNA, 32 nt, Human
aauugcagagucuguagguggagagguggaaa

SEQ ID NO: 296235 - RNA, 32 nt, Human
aauugcagaucuucccuuguaaaugugacugu

SEQ ID NO: 296236 - RNA, 32 nt, Human
aauugcagcauuuccccagcugggcuguccca

SEQ ID NO: 296237 - RNA, 32 nt, Human
aauugcauauugaagggagauauugccacacu

SEQ ID NO: 296238 - RNA, 32 nt, Human
aauugcaucacugcacuccaaccugggcaaca

SEQ ID NO: 296239 - RNA, 32 nt, Human
aauugcaucauugcacuccagccugggcaaca

SEQ ID NO: 296240 - RNA, 32 nt, Human
aauugcaugaagcagaggcuaagaugguuuuc

SEQ ID NO: 296241 - RNA, 32 nt, Human
aauugcauucgucugcaguagacacgaguucc

SEQ ID NO: 296242 - RNA, 32 nt, Human
aauugcauuucuggcagggaaggagaggaggg

SEQ ID NO: 296243 - RNA, 32 nt, Human
aauugccaaaaaccaccaggagcuggagaggc

SEQ ID NO: 296244 - RNA, 32 nt, Human
aauugccacagcuguauuuuggcuuucucccu

SEQ ID NO: 296245 - RNA, 32 nt, Human
aauugccacugcaccugagauaagggggaucc

SEQ ID NO: 296246 - RNA, 32 nt, Human
aauugccacugcacuccagccuaagcaaauag

SEQ ID NO: 296247 - RNA, 32 nt, Human
aauugccagcaaccucugcuuguccggaaaac

SEQ ID NO: 296248 - RNA, 32 nt, Human
aauugccaguacagaaugcagagagauaaaga

SEQ ID NO: 296249 - RNA, 32 nt, Human
aauugccauugcacagaugaggaaauugaaag

SEQ ID NO: 296250 - RNA, 32 nt, Human
aauugccccugccauuuccacccuccagucau

SEQ ID NO: 296251 - RNA, 32 nt, Human
aauugcccgauugcccgugcugggcagggucc

SEQ ID NO: 296252 - RNA, 32 nt, Human
aauugcccuccagguauccucagucuuucugc

SEQ ID NO: 296253 - RNA, 32 nt, Human
aauugcccugcaggcuggagugcagcggcaug

SEQ ID NO: 296254 - RNA, 28 nt, Human
aauugcccuuuccagggucccaacaagg

SEQ ID NO: 296255 - RNA, 32 nt, Human
aauugccgggauuacaggcaugagccacugug

SEQ ID NO: 296256 - RNA, 32 nt, Human
aauugccuccuccaucucucaccuuuuccugu

SEQ ID NO: 296257 - RNA, 32 nt, Human
aauugccucuacucugagucacuaucuucccu

SEQ ID NO: 296258 - RNA, 32 nt, Human
aauugccugcucccucugcaugcucuuucuug

SEQ ID NO: 296259 - RNA, 23 nt, Human
aauugccuggucaaaucugugag

SEQ ID NO: 296260 - RNA, 32 nt, Human
aauugccuugaaggagagggagagggauccug

SEQ ID NO: 296261 - RNA, 32 nt, Human
aauugccuuugucucauauaaugcuuuucaua

SEQ ID NO: 296262 - RNA, 32 nt, Human
aauugcgcauaacuuccaucucccuuacuggc

SEQ ID NO: 296263 - RNA, 32 nt, Human
aauugcgccacugcacuccagccugagcgaca

SEQ ID NO: 296264 - RNA, 32 nt, Human
aauugcgccgcuccuggagaccugauaacuua

SEQ ID NO: 296265 - RNA, 32 nt, Human
aauugcguaucaacaguggauuugcugguugu

SEQ ID NO: 296266 - RNA, 32 nt, Human
aauugcuaaaggauuucaugacuuaguuugaa

SEQ ID NO: 296267 - RNA, 32 nt, Human
aauugcuacagagagaauaaaauaccuaggaa

SEQ ID NO: 296268 - RNA, 32 nt, Human
aauugcucaaagcugucgccgcuagucuuaug

SEQ ID NO: 296269 - RNA, 32 nt, Human
aauugcucagagaagguaaaagacugaaucua

SEQ ID NO: 296270 - RNA, 32 nt, Human
aauugcucagcccaaagggcaucugacuucac

SEQ ID NO: 296271 - RNA, 32 nt, Human
aauugcucauguuggccaaacauggugcaccg

SEQ ID NO: 296272 - RNA, 32 nt, Human
aauugcuccagccacaggcgaggccuggccaa

SEQ ID NO: 296273 - RNA, 32 nt, Human
aauugcuccuuugauggagguuagggacuguc

SEQ ID NO: 296274 - RNA, 32 nt, Human
aauugcugaagcaaguguggacaacuucagca

SEQ ID NO: 296275 - RNA, 32 nt, Human
aauugcugacaaauuuuucuguguacauguag

SEQ ID NO: 296276 - RNA, 32 nt, Human
aauugcugacuugcagaaucaugagaaaaacg

SEQ ID NO: 296277 - RNA, 32 nt, Human
aauugcugcagcucuguggcccagcccacugc

SEQ ID NO: 296278 - RNA, 24 nt, Human
aauugcugcgucuuuccacuugcu

SEQ ID NO: 296279 - RNA, 32 nt, Human
aauugcugcuaccucaccauguugcugugccc

SEQ ID NO: 296280 - RNA, 32 nt, Human
aauugcugcuacucaacagguuuucugcagaa

SEQ ID NO: 296281 - RNA, 29 nt, Human
aauugcuggcugcuuuuacuuccugacca

SEQ ID NO: 296282 - RNA, 32 nt, Human
aauugcugggauuacaggcaugagccaccaca

SEQ ID NO: 296283 - RNA, 32 nt, Human
aauugcugggauuacaggcaugagccacugca

SEQ ID NO: 296284 - RNA, 32 nt, Human
aauugcugggauuacaggcgugagccaccaca

SEQ ID NO: 296285 - RNA, 32 nt, Human
aauugcugggauuacaggcgugagccauggcg

SEQ ID NO: 296286 - RNA, 32 nt, Human
aauugcugggauuacaggcgugagucaccgug

SEQ ID NO: 296287 - RNA, 32 nt, Human
aauugcugggauuacaggugugagccaccgca

SEQ ID NO: 296288 - RNA, 32 nt, Human
aauugcugggauuacaggugugagccaccgcg

SEQ ID NO: 296289 - RNA, 32 nt, Human
aauugcugggcaaacuuugaagaccucaacuu

SEQ ID NO: 296290 - RNA, 32 nt, Human
aauugcuguccugugguacagacauuaaagug

SEQ ID NO: 296291 - RNA, 32 nt, Human
aauugcugugccaggggucucuggaucacagc

SEQ ID NO: 296292 - RNA, 32 nt, Human
aauugcuuacccacugccugcccagacuuucu

SEQ ID NO: 296293 - RNA, 32 nt, Human
aauugcuuaggaggaggaaggggaaaguauac

SEQ ID NO: 296294 - RNA, 23 nt, Human
aauugcuuccggggaguugcgag

SEQ ID NO: 296295 - RNA, 32 nt, Human
aauugcuuccugcuccuuccucuggaagcuuc

SEQ ID NO: 296296 - RNA, 32 nt, Human
aauugcuucuaagaaaaguuucauaguggacu

SEQ ID NO: 296297 - RNA, 32 nt, Human
aauugcuugaacccgggagacggagguugcag

SEQ ID NO: 296298 - RNA, 32 nt, Human
aauugcuugaacccgggaggcagcaguugcag

SEQ ID NO: 296299 - RNA, 31 nt, Human
aauugcuugaacucaggaguuggagaccagc

SEQ ID NO: 296300 - RNA, 32 nt, Human
aauugcuugaacucgggaggcagagccaagau

SEQ ID NO: 296301 - RNA, 32 nt, Human
aauugcuugaacucgggaggcggagguugcag

SEQ ID NO: 296302 - RNA, 32 nt, Human
aauugcuugaacucgggagguggagguugcag

SEQ ID NO: 296303 - RNA, 32 nt, Human
aauugcuugagccaggaagguugagguugcag

SEQ ID NO: 296304 - RNA, 21 nt, Human
aauugcuugauaaacuacgag

SEQ ID NO: 296305 - RNA, 32 nt, Human
aauugcuugucugucuacuucagcuuuguuuu

SEQ ID NO: 296306 - RNA, 32 nt, Human
aauugcuuuaaccuuggaggcggagguugcau

SEQ ID NO: 296307 - RNA, 32 nt, Human
aauugcuuucccugggagugugcaguaucuca

SEQ ID NO: 296308 - RNA, 32 nt, Human
aauugcuuuguggcugggugcagugguucaca

SEQ ID NO: 296309 - RNA, 32 nt, Human
aauuggaaagcagagguugcagugagcugaga

SEQ ID NO: 296310 - RNA, 32 nt, Human
aauuggaacucauauacugcuaguuagaaugu

SEQ ID NO: 296311 - RNA, 32 nt, Human
aauuggaagaggaggcagaagaggagcagcgc

SEQ ID NO: 296312 - RNA, 32 nt, Human
aauuggaauagaauugguaaguugcaaagacu

SEQ ID NO: 296313 - RNA, 32 nt, Human
aauuggacaauuauuuuugcucugcucuguuu

SEQ ID NO: 296314 - RNA, 32 nt, Human
aauuggacagcauaugaagauuggacaucaca

SEQ ID NO: 296315 - RNA, 32 nt, Human
aauuggaccuggaagucauagugaauuugcag

SEQ ID NO: 296316 - RNA, 32 nt, Human
aauuggacuggcaggggaaagaaugguagaga

SEQ ID NO: 296317 - RNA, 32 nt, Human
aauuggacuguaaucauaucgcuacuggcauc

SEQ ID NO: 296318 - RNA, 32 nt, Human
aauuggagacaggcaaggagccauggauauua

SEQ ID NO: 296319 - RNA, 26 nt, Human
aauuggagacuagccugggcaacaua

SEQ ID NO: 296320 - RNA, 32 nt, Human
aauuggaggugaggcgcuccugccauuuucuc

SEQ ID NO: 296321 - RNA, 32 nt, Human
aauuggagucauacuguaaacaguuuuauaag

SEQ ID NO: 296322 - RNA, 32 nt, Human
aauuggaguuggaagguugcauaggguuuccu

SEQ ID NO: 296323 - RNA, 32 nt, Human
aauuggauagcacuauaaggugccucacggug

SEQ ID NO: 296324 - RNA, 32 nt, Human
aauuggaucgaguuuuucuucugcagaaauug

SEQ ID NO: 296325 - RNA, 32 nt, Human
aauuggauuuucuuucuuuugucauugggcac

SEQ ID NO: 296326 - RNA, 32 nt, Human
aauuggcagcagaaauccaaauuuguauggua

SEQ ID NO: 296327 - RNA, 32 nt, Human
aauuggcaggauaagaaaaauaggucagauaa

SEQ ID NO: 296328 - RNA, 32 nt, Human
aauuggccagaacaaagggacuacaggggcgg

SEQ ID NO: 296329 - RNA, 32 nt, Human
aauuggccaggcaauuccuuccuucagacaug

SEQ ID NO: 296330 - RNA, 32 nt, Human
aauuggccauauugaggaucacucugaauacu

SEQ ID NO: 296331 - RNA, 32 nt, Human
aauuggccaugcaugguggcacaugccuguaa

SEQ ID NO: 296332 - RNA, 32 nt, Human
aauuggccucuucuuucccagcuccugccucc

SEQ ID NO: 296333 - RNA, 32 nt, Human
aauuggcggggugggaagucccugagugcucc

SEQ ID NO: 296334 - RNA, 32 nt, Human
aauuggcggggugggaaguccugagugcuccg

SEQ ID NO: 296335 - RNA, 32 nt, Human
aauuggcuacagaacauaauaagauccuugcc

SEQ ID NO: 296336 - RNA, 32 nt, Human
aauuggcucccaagcuucccccaccucauaug

SEQ ID NO: 296337 - RNA, 32 nt, Human
aauuggcucuuccuggccucaggcuuugggac

SEQ ID NO: 296338 - RNA, 32 nt, Human
aauuggcugggaaaacaugggaacaagagaag

SEQ ID NO: 296339 - RNA, 32 nt, Human
aauuggcuuagagugugcaguccaacccuauc

SEQ ID NO: 296340 - RNA, 32 nt, Human
aauuggcuuaugcccaggucuaggcugagaag

SEQ ID NO: 296341 - RNA, 31 nt, Human
aauuggcuuauuucuguaugccaaagugauc

SEQ ID NO: 296342 - RNA, 32 nt, Human
aauuggcuucucaguccugaaggacuauuuga

SEQ ID NO: 296343 - RNA, 32 nt, Human
aauuggcuuggagcagggucucuccuccccgg

SEQ ID NO: 296344 - RNA, 32 nt, Human
aauugggaacagugucacugggaagugaaggc

SEQ ID NO: 296345 - RNA, 32 nt, Human
aauugggaggcugaagcaggagaauugcucaa

SEQ ID NO: 296346 - RNA, 32 nt, Human
aauugggagggcggagggaggcaguguccuuc

SEQ ID NO: 296347 - RNA, 32 nt, Human
aauugggcagggccgacccagggugaagaaac

SEQ ID NO: 296348 - RNA, 32 nt, Human
aauugggcaguagguaacuggcauuccucucu

SEQ ID NO: 296349 - RNA, 32 nt, Human
aauugggcccugcugguuuguugaugaauuga

SEQ ID NO: 296350 - RNA, 32 nt, Human
aauugggcucaagugauccuccugcuucagcc

SEQ ID NO: 296351 - RNA, 32 nt, Human
aauugggcugggaccucucuccccaacugccc

SEQ ID NO: 296352 - RNA, 32 nt, Human
aauuggggaggcggagguugcagugagcugag

SEQ ID NO: 296353 - RNA, 32 nt, Human
aauuggggccacccuuaagauaccaagaaaag

SEQ ID NO: 296354 - RNA, 32 nt, Human
aauugggggaugucagugcccgggaggacaga

SEQ ID NO: 296355 - RNA, 32 nt, Human
aauugggggugaggaagaugugcgggccaggg

SEQ ID NO: 296356 - RNA, 32 nt, Human
aauuggggugaugaccccauagaccuaacugu

SEQ ID NO: 296357 - RNA, 32 nt, Human
aauugggguuaccuauaauaguacaauuugua

SEQ ID NO: 296358 - RNA, 32 nt, Human
aauugggguuaccuauaucaguacaauuugua

SEQ ID NO: 296359 - RNA, 32 nt, Human
aauuggguggugggcaugcugggcaggcuugg

SEQ ID NO: 296360 - RNA, 32 nt, Human
aauuggguuauaucuggcuucucuccagaccu

SEQ ID NO: 296361 - RNA, 32 nt, Human
aauuggguuauauuugaaauugcugauacuga

SEQ ID NO: 296362 - RNA, 32 nt, Human
aauuggguucucaacaaguggugacucagaac

SEQ ID NO: 296363 - RNA, 32 nt, Human
aauuggguuucugaaugucugugaauuucaga

SEQ ID NO: 296364 - RNA, 32 nt, Human
aauugguaaacccuuaggaagaaauuagaaaa

SEQ ID NO: 296365 - RNA, 32 nt, Human
aauugguaauugcugaagcugugugauggaug

SEQ ID NO: 296366 - RNA, 32 nt, Human
aauugguaguaaaauauagucuucaaguauac

SEQ ID NO: 296367 - RNA, 32 nt, Human
aauugguauaaauucauaauuucuaaaccaug

SEQ ID NO: 296368 - RNA, 32 nt, Human
aauuggucaugugaugcaagccagcuuacuag

SEQ ID NO: 296369 - RNA, 32 nt, Human
aauugguccauggcuacacugcaacuuccguc

SEQ ID NO: 296370 - RNA, 32 nt, Human
aauugguccuccaaggagguugucucuuccuc

SEQ ID NO: 296371 - RNA, 32 nt, Human
aauugguccuggaagggaaagaaaccacagau

SEQ ID NO: 296372 - RNA, 32 nt, Human
aauuggugggugacagagauggguggaggggc

SEQ ID NO: 296373 - RNA, 24 nt, Human
aauugguugguuuugacuucagau

SEQ ID NO: 296374 - RNA, 32 nt, Human
aauuguaaacaguuauuagcuuuuccagaagc

SEQ ID NO: 296375 - RNA, 24 nt, Human
aauuguaagaaaauaaacuucugu

SEQ ID NO: 296376 - RNA, 32 nt, Human
aauuguaagcuccucacugguauacuaucauc

SEQ ID NO: 296377 - RNA, 32 nt, Human
aauuguaaguauauuuugugaagccuguauuc

SEQ ID NO: 296378 - RNA, 32 nt, Human
aauuguaaguggauuugcaggccagggagaaa

SEQ ID NO: 296379 - RNA, 32 nt, Human
aauuguaaucccaguaauccccauauguugag

SEQ ID NO: 296380 - RNA, 32 nt, Human
aauuguaauguucauauucaauaucuuacagu

SEQ ID NO: 296381 - RNA, 32 nt, Human
aauuguacacauauggagaaaauuagcaaugc

SEQ ID NO: 296382 - RNA, 32 nt, Human
aauuguacccaugccacacaauugacucacaa

SEQ ID NO: 296383 - RNA, 32 nt, Human
aauuguacuaacuguaccuaaauagcaaagcc

SEQ ID NO: 296384 - RNA, 32 nt, Human
aauuguagaacuaggcucaucagaaucgugac

SEQ ID NO: 296385 - RNA, 32 nt, Human
aauuguagaguucauaguaaauaaaagcauua

SEQ ID NO: 296386 - RNA, 32 nt, Human
aauuguaguagggaggcuggaggacuuucuuu

SEQ ID NO: 296387 - RNA, 25 nt, Human
aauuguagucaccuuugcacuugcu

SEQ ID NO: 296388 - RNA, 32 nt, Human
aauuguauuauaugugauuuacauuucacuuu

SEQ ID NO: 296389 - RNA, 32 nt, Human
aauuguauucauccuuucaugacuguggccug

SEQ ID NO: 296390 - RNA, 32 nt, Human
aauuguauugaauucuuuuuagaucaaaguaa

SEQ ID NO: 296391 - RNA, 32 nt, Human
aauugucaugagauucugaacacuaguauuga

SEQ ID NO: 296392 - RNA, 32 nt, Human
aauugucaugauguuuacacugucugaguuaa

SEQ ID NO: 296393 - RNA, 32 nt, Human
aauugucauuuuagauuuuugacauuuguauc

SEQ ID NO: 296394 - RNA, 32 nt, Human
aauuguccaugccaccaauuccacugcuacuu

SEQ ID NO: 296395 - RNA, 32 nt, Human
aauugucccuugccguccuccugaggguaucu

SEQ ID NO: 296396 - RNA, 32 nt, Human
aauuguccucaagggguguggacugcagaugg

SEQ ID NO: 296397 - RNA, 32 nt, Human
aauuguccucaagucagccucuccagggccaa

SEQ ID NO: 296398 - RNA, 32 nt, Human
aauuguccugaguucuacaguaugugaacaau

SEQ ID NO: 296399 - RNA, 32 nt, Human
aauugucuaguuagggggcagcuggagaaaau

SEQ ID NO: 296400 - RNA, 32 nt, Human
aauugucucaggcaggaagucagucuauaucu

SEQ ID NO: 296401 - RNA, 32 nt, Human
aauugugaacauauuuccuuuauaggggcagg

SEQ ID NO: 296402 - RNA, 32 nt, Human
aauugugaacuuuccaucagacugccucccug

SEQ ID NO: 296403 - RNA, 32 nt, Human
aauugugacuuguucuccccggcuggcagcgu

SEQ ID NO: 296404 - RNA, 23 nt, Human
aauugugagaaauaaauuucugu

SEQ ID NO: 296405 - RNA, 32 nt, Human
aauugugagccaagcuucucccagggucagag

SEQ ID NO: 296406 - RNA, 32 nt, Human
aauugugccacuaguacuccagccugggugac

SEQ ID NO: 296407 - RNA, 32 nt, Human
aauugugccacugcacuccagacugggugaca

SEQ ID NO: 296408 - RNA, 32 nt, Human
aauugugccacugcacugcagccugggcgaca

SEQ ID NO: 296409 - RNA, 32 nt, Human
aauugugccacugcacuuuucagccugggugc

SEQ ID NO: 296410 - RNA, 32 nt, Human
aauugugcccaugagaugcugcaugggcaugg

SEQ ID NO: 296411 - RNA, 32 nt, Human
aauugugcuacucuccccugggugguuugcag

SEQ ID NO: 296412 - RNA, 32 nt, Human
aauugugcuauugcacuccagccugggugaca

SEQ ID NO: 296413 - RNA, 32 nt, Human
aauuguggcaagucuuaacacacagauuccuc

SEQ ID NO: 296414 - RNA, 32 nt, Human
aauuguggcugcagguguuagguguuaguugg

SEQ ID NO: 296415 - RNA, 32 nt, Human
aauugugggaagacaaaaauaugccugugaaa

SEQ ID NO: 296416 - RNA, 32 nt, Human
aauugugggagaagagaggagaggagggcuca

SEQ ID NO: 296417 - RNA, 32 nt, Human
aauugugggugaggcugucuggcauaggguga

SEQ ID NO: 296418 - RNA, 32 nt, Human
aauuguguggagaacucagugccacaccucga

SEQ ID NO: 296419 - RNA, 32 nt, Human
aauuguguuagaaauuaugacuguaaagaaau

SEQ ID NO: 296420 - RNA, 32 nt, Human
aauuguguuuugcauaaaauugccaaaacaca

SEQ ID NO: 296421 - RNA, 32 nt, Human
aauuguuaagaguuaacagguaguuggauuug

SEQ ID NO: 296422 - RNA, 32 nt, Human
aauuguuaagaucccccaccuggcagaggacc

SEQ ID NO: 296423 - RNA, 31 nt, Human
aauuguuacaaaaauaccugucagaaacccu

SEQ ID NO: 296424 - RNA, 32 nt, Human
aauuguuacauauccuauuucaugccauucuu

SEQ ID NO: 296425 - RNA, 32 nt, Human
aauuguuacccccuuuacucagagauaacaua

SEQ ID NO: 296426 - RNA, 32 nt, Human
aauuguuccugccuccuccgccaccuccgccc

SEQ ID NO: 296427 - RNA, 32 nt, Human
aauuguuccugccuuuagcuuuucagaacuug

SEQ ID NO: 296428 - RNA, 32 nt, Human
aauuguugaacccgggaggcggagguugcagu

SEQ ID NO: 296429 - RNA, 32 nt, Human
aauuguugccuuucuugaaguguucucugccu

SEQ ID NO: 296430 - RNA, 32 nt, Human
aauuguugggauuacaggugugagacagugca

SEQ ID NO: 296431 - RNA, 32 nt, Human
aauuguuggggccccucuaccucucucagggc

SEQ ID NO: 296432 - RNA, 32 nt, Human
aauuguugugugugcacauaugcauauauuuu

SEQ ID NO: 296433 - RNA, 32 nt, Human
aauuguuuaagcugcaucaauggagcacauac

SEQ ID NO: 296434 - RNA, 32 nt, Human
aauuguuuauucaaccaucagguuccaggaaa

SEQ ID NO: 296435 - RNA, 32 nt, Human
aauuguuucuauaauggauuuucacauggaac

SEQ ID NO: 296436 - RNA, 32 nt, Human
aauuguuucugaguuauggguugaauuuauuu

SEQ ID NO: 296437 - RNA, 32 nt, Human
aauuguuuggucucugguuuucauccuuagag

SEQ ID NO: 296438 - RNA, 32 nt, Human
aauuguuuuccagacuuguguuagaguuauug

SEQ ID NO: 296439 - RNA, 32 nt, Human
aauuguuuuucuggacuuccaaaucucaagug

SEQ ID NO: 296440 - RNA, 32 nt, Human
aauuuaaaaagcuuucucuuuaaguugcuaca

SEQ ID NO: 296441 - RNA, 32 nt, Human
aauuuaaaaguacacuucacuucaacuugaau

SEQ ID NO: 296442 - RNA, 32 nt, Human
aauuuaaaaugcuagggaacaggcuuacaaca

SEQ ID NO: 296443 - RNA, 32 nt, Human
aauuuaaaauggcacagccacucuggaaagca

SEQ ID NO: 296444 - RNA, 32 nt, Human
aauuuaaaauuagcugggcaugguggugcaaa

SEQ ID NO: 296445 - RNA, 32 nt, Human
aauuuaaagauguggaccaaggccugugggua

SEQ ID NO: 296446 - RNA, 32 nt, Human
aauuuaaagcagacuucuaagacagaggaaau

SEQ ID NO: 296447 - RNA, 32 nt, Human
aauuuaaaggcuguguggacuuggggauggaa

SEQ ID NO: 296448 - RNA, 32 nt, Human
aauuuaaaguuuucagagauuguuaaaacugg

SEQ ID NO: 296449 - RNA, 32 nt, Human
aauuuaaauacugugcuuacugugaaauauau

SEQ ID NO: 296450 - RNA, 32 nt, Human
aauuuaacaaaccugcacaugugcucuugaau

SEQ ID NO: 296451 - RNA, 32 nt, Human
aauuuaacaccacuugauccuggguaguagcu

SEQ ID NO: 296452 - RNA, 32 nt, Human
aauuuaacacccuuuagaaccuuaaagaacca

SEQ ID NO: 296453 - RNA, 32 nt, Human
aauuuaacauacaaaugagggaccaggaguag

SEQ ID NO: 296454 - RNA, 32 nt, Human
aauuuaacauuagccuccaccaaaaagccguc

SEQ ID NO: 296455 - RNA, 32 nt, Human
aauuuaacccagcuaugggaugccagauaaca

SEQ ID NO: 296456 - RNA, 32 nt, Human
aauuuaagaaaaucuucaucuauuucauaucu

SEQ ID NO: 296457 - RNA, 32 nt, Human
aauuuaagaagauuccucugaaccaggaagaa

SEQ ID NO: 296458 - RNA, 32 nt, Human
aauuuaagccaagaacaggacaggcaauguga

SEQ ID NO: 296459 - RNA, 32 nt, Human
aauuuaagcugcaauauuugugacugaauagg

SEQ ID NO: 296460 - RNA, 32 nt, Human
aauuuaaguucagggccuaggaaggggagcau

SEQ ID NO: 296461 - RNA, 32 nt, Human
aauuuaauaaaugauccauauaaaaauagaga

SEQ ID NO: 296462 - RNA, 32 nt, Human
aauuuaauccguaagcccauggauccauaaug

SEQ ID NO: 296463 - RNA, 32 nt, Human
aauuuaaugaaggauguaaaauaggauucauu

SEQ ID NO: 296464 - RNA, 32 nt, Human
aauuuaaugauguguucaacuccaccagaaau

SEQ ID NO: 296465 - RNA, 32 nt, Human
aauuuaaugauuauuccuauucuuuauaauuu

SEQ ID NO: 296466 - RNA, 32 nt, Human
aauuuaauggagcauguacuuauuugcauuug

SEQ ID NO: 296467 - RNA, 32 nt, Human
aauuuaauguggauuuccuccuuccuuccaag

SEQ ID NO: 296468 - RNA, 32 nt, Human
aauuuaauugaauucaucuaaagaugucucug

SEQ ID NO: 296469 - RNA, 32 nt, Human
aauuuaauuguagaagucacugccuucugagu

SEQ ID NO: 296470 - RNA, 32 nt, Human
aauuuacaaauacagauugaauaggaccuacu

SEQ ID NO: 296471 - RNA, 32 nt, Human
aauuuacaacagcaaccacacugccugucauu

SEQ ID NO: 296472 - RNA, 32 nt, Human
aauuuacaagauaccaggaaacccaucuguug

SEQ ID NO: 296473 - RNA, 32 nt, Human
aauuuacaauagccacaaagaaaaugaaauac

SEQ ID NO: 296474 - RNA, 32 nt, Human
aauuuacagagaaaucacagacuuuugcuaca

SEQ ID NO: 296475 - RNA, 32 nt, Human
aauuuacagugauagaacaaaagaggauuagu

SEQ ID NO: 296476 - RNA, 32 nt, Human
aauuuacauauguucacgcaaaauaugcuuag

SEQ ID NO: 296477 - RNA, 32 nt, Human
aauuuaccagaacaguuuagccuggggguuaa

SEQ ID NO: 296478 - RNA, 32 nt, Human
aauuuaccuuacugcugacagcaaccauguuc

SEQ ID NO: 296479 - RNA, 32 nt, Human
aauuuacuaagcuuaacuacaugucacacauu

SEQ ID NO: 296480 - RNA, 32 nt, Human
aauuuacucccaggaauguugggauugagagu

SEQ ID NO: 296481 - RNA, 32 nt, Human
aauuuacugaguagcugcaacaugccagccuc

SEQ ID NO: 296482 - RNA, 32 nt, Human
aauuuacuguaacuucuuaaucuaagaaaauu

SEQ ID NO: 296483 - RNA, 32 nt, Human
aauuuacugugccaggaaaucuuccugaacuc

SEQ ID NO: 296484 - RNA, 32 nt, Human
aauuuacuuugcugcugacagccaccaugcuc

SEQ ID NO: 296485 - RNA, 32 nt, Human
aauuuagaaauggcaugcaucacacauuuauu

SEQ ID NO: 296486 - RNA, 32 nt, Human
aauuuagaacagcauuguccucugaguugguu

SEQ ID NO: 296487 - RNA, 32 nt, Human
aauuuagaagaccaaguagauaauggaaccaa

SEQ ID NO: 296488 - RNA, 32 nt, Human
aauuuagacaauacaucaccuguaguucaaau

SEQ ID NO: 296489 - RNA, 32 nt, Human
aauuuagagagcagaaacugaagaacuguaug

SEQ ID NO: 296490 - RNA, 32 nt, Human
aauuuagaguccauuuuguggcugacuauucu

SEQ ID NO: 296491 - RNA, 32 nt, Human
aauuuagcaaaauuauguaaacuugauccuga

SEQ ID NO: 296492 - RNA, 32 nt, Human
aauuuagcaaagaaauauguagaugaauauuu

SEQ ID NO: 296493 - RNA, 32 nt, Human
aauuuagcacagaacuagaugaguugcacuuu

SEQ ID NO: 296494 - RNA, 32 nt, Human
aauuuagccagcagugcccugcccugcccugc

SEQ ID NO: 296495 - RNA, 32 nt, Human
aauuuaggguagagauuccugccccucuuuug

SEQ ID NO: 296496 - RNA, 32 nt, Human
aauuuagguauucuauaguugcuuagaauuuu

SEQ ID NO: 296497 - RNA, 32 nt, Human
aauuuaggugagugaauauaugaaacacuuca

SEQ ID NO: 296498 - RNA, 32 nt, Human
aauuuaggugagugcuuugaggacaugaagcu

SEQ ID NO: 296499 - RNA, 32 nt, Human
aauuuaguaagcugcauucuauaagccaucag

SEQ ID NO: 296500 - RNA, 32 nt, Human
aauuuaguagagacaggagagaggaugaaacu

SEQ ID NO: 296501 - RNA, 32 nt, Human
aauuuagugaaacagcucuuuccauucuuaac

SEQ ID NO: 296502 - RNA, 32 nt, Human
aauuuaguuucucuacaugucauuucggucuc

SEQ ID NO: 296503 - RNA, 32 nt, Human
aauuuauaaagaaccugccuuccuuccuucau

SEQ ID NO: 296504 - RNA, 32 nt, Human
aauuuauaaauacuuuaucauccauuugcuuu

SEQ ID NO: 296505 - RNA, 31 nt, Human
aauuuauaagugucccauggggcagacacuc

SEQ ID NO: 296506 - RNA, 32 nt, Human
aauuuauaggaaccuuguccucugguauagua

SEQ ID NO: 296507 - RNA, 32 nt, Human
aauuuauagugaagcaaaucaucuuuaauaau

SEQ ID NO: 296508 - RNA, 32 nt, Human
aauuuauagugcuauuugguuucuccaugauu

SEQ ID NO: 296509 - RNA, 32 nt, Human
aauuuauauuggagaaaagcacuguaaaugua

SEQ ID NO: 296510 - RNA, 32 nt, Human
aauuuauauuggaugagaguggucaagaaaua

SEQ ID NO: 296511 - RNA, 32 nt, Human
aauuuaucaauacuuaugaaauuaggcugggc

SEQ ID NO: 296512 - RNA, 32 nt, Human
aauuuaucacauagauugggaaggcaagcuaa

SEQ ID NO: 296513 - RNA, 32 nt, Human
aauuuaucauacaacagaaaauggccaauuaa

SEQ ID NO: 296514 - RNA, 32 nt, Human
aauuuaucggcucacuucauucguacaguuuc

SEQ ID NO: 296515 - RNA, 32 nt, Human
aauuuaucuuucauuuuaaacuccugaaauuc

SEQ ID NO: 296516 - RNA, 32 nt, Human
aauuuaugaggcucuucacugcagagaacggc

SEQ ID NO: 296517 - RNA, 32 nt, Human
aauuuaugcucacaccuuacugcacagaaaag

SEQ ID NO: 296518 - RNA, 32 nt, Human
aauuuauggccguaucaaaugguagcugaaaa

SEQ ID NO: 296519 - RNA, 32 nt, Human
aauuuaugggcagaccgagaaaaugcugcugu

SEQ ID NO: 296520 - RNA, 32 nt, Human
aauuuauggucuucuguuuugaagcucauggg

SEQ ID NO: 296521 - RNA, 32 nt, Human
aauuuauguaguucuauguuuauagauguguu

SEQ ID NO: 296522 - RNA, 32 nt, Human
aauuuauguauuaguuuuugcauauguaguac

SEQ ID NO: 296523 - RNA, 32 nt, Human
aauuuauguccaucaaaaguggagauugcuuu

SEQ ID NO: 296524 - RNA, 32 nt, Human
aauuuaugugcacacucacacaugcacacaca

SEQ ID NO: 296525 - RNA, 32 nt, Human
aauuuaugugguuccugcuugaaaaccuuccc

SEQ ID NO: 296526 - RNA, 32 nt, Human
aauuuauguucugcaauauccugcagcucauc

SEQ ID NO: 296527 - RNA, 32 nt, Human
aauuuauguucuucugccuuggcuccagcugg

SEQ ID NO: 296528 - RNA, 32 nt, Human
aauuuauucagagcuaggaaugugguuuauaa

SEQ ID NO: 296529 - RNA, 32 nt, Human
aauuuauucaguuucauuaggacuauuuuuau

SEQ ID NO: 296530 - RNA, 32 nt, Human
aauuuauucucaauaauaaagacuucaugaug

SEQ ID NO: 296531 - RNA, 32 nt, Human
aauuuauucucucacaccauggaggcccaaag

SEQ ID NO: 296532 - RNA, 32 nt, Human
aauuuauugaggaaaaauaugugaaggaccuu

SEQ ID NO: 296533 - RNA, 32 nt, Human
aauuuauugcuauauugugauacgugaggggu

SEQ ID NO: 296534 - RNA, 32 nt, Human
aauuuauuuaaugaaaugucauggcucuguuc

SEQ ID NO: 296535 - RNA, 32 nt, Human
aauuuauuuguuguuuucuguggguugcgacc

SEQ ID NO: 296536 - RNA, 32 nt, Human
aauuuauuuucacugucacacgcauagaucca

SEQ ID NO: 296537 - RNA, 32 nt, Human
aauuuauuuuuagcagagaugggguuucacug

SEQ ID NO: 296538 - RNA, 32 nt, Human
aauuucaaacucaacaagauuucagaaaggua

SEQ ID NO: 296539 - RNA, 32 nt, Human
aauuucaaagagaacuuauacagaaugguuuu

SEQ ID NO: 296540 - RNA, 32 nt, Human
aauuucaaaucuaggcagccaccaccacaaau

SEQ ID NO: 296541 - RNA, 32 nt, Human
aauuucaaguaaaaugaauuuccuuccaagua

SEQ ID NO: 296542 - RNA, 32 nt, Human
aauuucaauagggcugagauguuuuggagcau

SEQ ID NO: 296543 - RNA, 32 nt, Human
aauuucaauuagcuucugcuucccuuuucuaa

SEQ ID NO: 296544 - RNA, 32 nt, Human
aauuucacacuggcauuaacaggucuagcaua

SEQ ID NO: 296545 - RNA, 24 nt, Human
aauuucacauguaguagcuucuga

SEQ ID NO: 296546 - RNA, 32 nt, Human
aauuucaccagaaacaacuugcuuccaauaua

SEQ ID NO: 296547 - RNA, 32 nt, Human
aauuucacccccaccccacccuccaggguuag

SEQ ID NO: 296548 - RNA, 21 nt, Human
aauuucaccuugaaaaagcac

SEQ ID NO: 296549 - RNA, 32 nt, Human
aauuucaccuuguaaggaggaagugaaugaaa

SEQ ID NO: 296550 - RNA, 32 nt, Human
aauuucacuacugaaguggauuucucugucca

SEQ ID NO: 296551 - RNA, 32 nt, Human
aauuucagaaauucauuauuuucucucacucu

SEQ ID NO: 296552 - RNA, 32 nt, Human
aauuucagacaggcaauaguggggaggucauu

SEQ ID NO: 296553 - RNA, 32 nt, Human
aauuucagacuguacaacacagaaccaaauga

SEQ ID NO: 296554 - RNA, 32 nt, Human
aauuucagagcacuuuuccuugcaugaguaau

SEQ ID NO: 296555 - RNA, 32 nt, Human
aauuucagaguuucuccagaccuccaaucugg

SEQ ID NO: 296556 - RNA, 32 nt, Human
aauuucagcauaucucuggcucagggagagug

SEQ ID NO: 296557 - RNA, 32 nt, Human
aauuucagccaagaaguuagaagagauguuua

SEQ ID NO: 296558 - RNA, 32 nt, Human
aauuucagcucacugaaccucugccucccagg

SEQ ID NO: 296559 - RNA, 32 nt, Human
aauuucagcucacugcaaucucugccacccag

SEQ ID NO: 296560 - RNA, 32 nt, Human
aauuucaggauuaacuaaagaagaggagaaaa

SEQ ID NO: 296561 - RNA, 32 nt, Human
aauuucaggcccuuccuuaggccagguacuuc

SEQ ID NO: 296562 - RNA, 32 nt, Human
aauuucagggagcauagcaucgggaggaugcu

SEQ ID NO: 296563 - RNA, 32 nt, Human
aauuucagggcucuuggcuguuggacacagaa

SEQ ID NO: 296564 - RNA, 32 nt, Human
aauuucaggggagucaaaaaccuugcaacuuc

SEQ ID NO: 296565 - RNA, 32 nt, Human
aauuucagggugcagcccaaucugccagacuu

SEQ ID NO: 296566 - RNA, 32 nt, Human
aauuucaggguuaggguuuaaagaaaggagaa

SEQ ID NO: 296567 - RNA, 32 nt, Human
aauuucagguggacacccaccaugcuaaauag

SEQ ID NO: 296568 - RNA, 32 nt, Human
aauuucaguacuaagguggugaugccauuuug

SEQ ID NO: 296569 - RNA, 32 nt, Human
aauuucagucggggagaugagaggaggcauga

SEQ ID NO: 296570 - RNA, 32 nt, Human
aauuucauacagaauuuguuacauuccaauua

SEQ ID NO: 296571 - RNA, 32 nt, Human
aauuucaucaaauucauucagugauuuuuauu

SEQ ID NO: 296572 - RNA, 21 nt, Human
aauuucauccuggcucacaga

SEQ ID NO: 296573 - RNA, 32 nt, Human
aauuucaucuuaaaauguugcugauuauauua

SEQ ID NO: 296574 - RNA, 32 nt, Human
aauuucaugcaaacacauuuagggugaauuca

SEQ ID NO: 296575 - RNA, 32 nt, Human
aauuucaugcuggcaugagaagauauccuuug

SEQ ID NO: 296576 - RNA, 32 nt, Human
aauuucauuggugaggauuuccuuugaauauu

SEQ ID NO: 296577 - RNA, 32 nt, Human
aauuucauuuguuuacaaaguagauuaugccu

SEQ ID NO: 296578 - RNA, 32 nt, Human
aauuuccaacuucucccuaucuucaacucugc

SEQ ID NO: 296579 - RNA, 32 nt, Human
aauuuccaccuacuuuccaaucuauguuccaa

SEQ ID NO: 296580 - RNA, 32 nt, Human
aauuuccagacagagaccagaaggaagguuua

SEQ ID NO: 296581 - RNA, 32 nt, Human
aauuuccaggagaccauggaagcaaugcacau

SEQ ID NO: 296582 - RNA, 32 nt, Human
aauuuccaguggagggcauccacaccuccauu

SEQ ID NO: 296583 - RNA, 32 nt, Human
aauuuccaguguccuaagagccucucaugaag

SEQ ID NO: 296584 - RNA, 32 nt, Human
aauuuccauagaucugcaguccugccucugcc

SEQ ID NO: 296585 - RNA, 32 nt, Human
aauuuccauauggugaaccauccuuacauucc

SEQ ID NO: 296586 - RNA, 32 nt, Human
aauuuccaugaagaaccaagucagggcagcau

SEQ ID NO: 296587 - RNA, 26 nt, Human
aauuuccauuuuguaaaagcuucuga

SEQ ID NO: 296588 - RNA, 32 nt, Human
aauuucccagcuauagaaaucucucuauuuuu

SEQ ID NO: 296589 - RNA, 32 nt, Human
aauuuccccugccaugugugcugauccugcug

SEQ ID NO: 296590 - RNA, 32 nt, Human
aauuucccggcaccuggaggccgcgcuuagaa

SEQ ID NO: 296591 - RNA, 32 nt, Human
aauuucccuccaccacccccucaaauccaguc

SEQ ID NO: 296592 - RNA, 32 nt, Human
aauuucccugcuccuuccuuuaagaccaucug

SEQ ID NO: 296593 - RNA, 32 nt, Human
aauuuccucaagccagaaggcuuuaucauuca

SEQ ID NO: 296594 - RNA, 32 nt, Human
aauuuccugacaacgaaagugaagaguaucac

SEQ ID NO: 296595 - RNA, 32 nt, Human
aauuuccugccaccccaacaguauuuuugugu

SEQ ID NO: 296596 - RNA, 32 nt, Human
aauuuccugggcaagaguguaugcauacaaag

SEQ ID NO: 296597 - RNA, 32 nt, Human
aauuuccugggugauggcagcagauucuucca

SEQ ID NO: 296598 - RNA, 32 nt, Human
aauuuccugguucugcucacguaucauguuug

SEQ ID NO: 296599 - RNA, 32 nt, Human
aauuuccuguacacuugcuaugugcuggggac

SEQ ID NO: 296600 - RNA, 32 nt, Human
aauuuccuuccauagacagcugccucaaaggg

SEQ ID NO: 296601 - RNA, 32 nt, Human
aauuuccuugggauagagguuguguuggggaa

SEQ ID NO: 296602 - RNA, 32 nt, Human
aauuuccuuucauucaauuccaccuccuuccu

SEQ ID NO: 296603 - RNA, 32 nt, Human
aauuucgauuuucaaacgcaacuccuacagga

SEQ ID NO: 296604 - RNA, 32 nt, Human
aauuucgcugaaggcugaggcaggaguggaga

SEQ ID NO: 296605 - RNA, 32 nt, Human
aauuucgggaggcugaggcaggagaacggcgu

SEQ ID NO: 296606 - RNA, 32 nt, Human
aauuucgguuuccucugagguugaaggaccca

SEQ ID NO: 296607 - RNA, 32 nt, Human
aauuucgguuuguaucuuccauauaauaacca

SEQ ID NO: 296608 - RNA, 32 nt, Human
aauuucuaccuuccuguuucucugaaucagcc

SEQ ID NO: 296609 - RNA, 32 nt, Human
aauuucuacuaaaauguccaaguagaauguuu

SEQ ID NO: 296610 - RNA, 24 nt, Human
aauuucuacugcacuuacauucaa

SEQ ID NO: 296611 - RNA, 32 nt, Human
aauuucuacuuucauagagucauagaauuuua

SEQ ID NO: 296612 - RNA, 32 nt, Human
aauuucuaguuuucacucaugguuaacacgca

SEQ ID NO: 296613 - RNA, 32 nt, Human
aauuucucaagguuauagguugggguucuuag

SEQ ID NO: 296614 - RNA, 32 nt, Human
aauuucucacacaccaguuuaucuuccagcuu

SEQ ID NO: 296615 - RNA, 32 nt, Human
aauuucucaccuauuuugugugugugacuuga

SEQ ID NO: 296616 - RNA, 32 nt, Human
aauuucucaggcauaaauaccuaauggccuug

SEQ ID NO: 296617 - RNA, 32 nt, Human
aauuucucauacuuagaaacaaaaagagcuuu

SEQ ID NO: 296618 - RNA, 32 nt, Human
aauuucucaucacagggauuuagacuuacuau

SEQ ID NO: 296619 - RNA, 32 nt, Human
aauuucucaucuucugccucccuuccuacucc

SEQ ID NO: 296620 - RNA, 32 nt, Human
aauuucuccccagaaaauggguuuuucuuuuc

SEQ ID NO: 296621 - RNA, 32 nt, Human
aauuucucccugcaagcgcucagucucauccc

SEQ ID NO: 296622 - RNA, 32 nt, Human
aauuucuccguaauuuccacugcuugaaggcu

SEQ ID NO: 296623 - RNA, 32 nt, Human
aauuucucucuagcccauuauaaccugcuauc

SEQ ID NO: 296624 - RNA, 32 nt, Human
aauuucucuuuacuucucuccaccuucuccau

SEQ ID NO: 296625 - RNA, 32 nt, Human
aauuucugaagugaaucauuuagauaaugaca

SEQ ID NO: 296626 - RNA, 32 nt, Human
aauuucugaggacgagcucacaucuggaagaa

SEQ ID NO: 296627 - RNA, 32 nt, Human
aauuucugagucuuucuuugcucugcuggaaa

SEQ ID NO: 296628 - RNA, 32 nt, Human
aauuucugaugcacagacacugugggagauaa

SEQ ID NO: 296629 - RNA, 32 nt, Human
aauuucugaugcuccagccacgaaaucuaugg

SEQ ID NO: 296630 - RNA, 32 nt, Human
aauuucugcacuuugggagacugaggugggug

SEQ ID NO: 296631 - RNA, 32 nt, Human
aauuucuggauugggaaauggaggcaaauucu

SEQ ID NO: 296632 - RNA, 32 nt, Human
aauuucugguccugucuguucuuauugauguc

SEQ ID NO: 296633 - RNA, 32 nt, Human
aauuucuguacaaauaucuaaauaagagaugu

SEQ ID NO: 296634 - RNA, 32 nt, Human
aauuucuguaucugcugaauuauuaaugccac

SEQ ID NO: 296635 - RNA, 32 nt, Human
aauuucugugauggcagagaaaaugcucaucu

SEQ ID NO: 296636 - RNA, 32 nt, Human
aauuucuguucuguuccuguagaacgcucucu

SEQ ID NO: 296637 - RNA, 32 nt, Human
aauuucuguuuacauguccuugcuacuuuuaa

SEQ ID NO: 296638 - RNA, 32 nt, Human
aauuucuuaaggcugaaggaaugaagagagug

SEQ ID NO: 296639 - RNA, 32 nt, Human
aauuucuuaaggcugaaggaauggagagagug

SEQ ID NO: 296640 - RNA, 32 nt, Human
aauuucuuauacugcugcccaccaaagcagcu

SEQ ID NO: 296641 - RNA, 32 nt, Human
aauuucuucacucaaucucugauucugucaau

SEQ ID NO: 296642 - RNA, 32 nt, Human
aauuucuuccuccaaauauccuaaaucaccuc

SEQ ID NO: 296643 - RNA, 32 nt, Human
aauuucuuccugauuggugccauugcauacuu

SEQ ID NO: 296644 - RNA, 32 nt, Human
aauuucuucuucuuuuccuuuuggcaaagcag

SEQ ID NO: 296645 - RNA, 32 nt, Human
aauuucuugcagaaucagcuacacuuaauuau

SEQ ID NO: 296646 - RNA, 32 nt, Human
aauuucuugccuguaacccuagcacuuuggga

SEQ ID NO: 296647 - RNA, 32 nt, Human
aauuucuuuuacuccacgaggcugcuuggaga

SEQ ID NO: 296648 - RNA, 32 nt, Human
aauuucuuuuagcuccccaucuggcugugaaa

SEQ ID NO: 296649 - RNA, 32 nt, Human
aauuugaaaauguaaguaauuauacuaagacc

SEQ ID NO: 296650 - RNA, 32 nt, Human
aauuugaaacauccuaugaauuugaaaguuuc

SEQ ID NO: 296651 - RNA, 32 nt, Human
aauuugaaaccugaaaugccucuuuagcaaag

SEQ ID NO: 296652 - RNA, 32 nt, Human
aauuugaaagaaaaaugcauccuaaccauucc

SEQ ID NO: 296653 - RNA, 32 nt, Human
aauuugaaagaagaaaaccagauggaacaacg

SEQ ID NO: 296654 - RNA, 32 nt, Human
aauuugaaagaagaaaaccagauggaacaaga

SEQ ID NO: 296655 - RNA, 32 nt, Human
aauuugaaagaauguuuucugcaggaaaacca

SEQ ID NO: 296656 - RNA, 32 nt, Human
aauuugaaagaugcuuguaaugugaguuuugg

SEQ ID NO: 296657 - RNA, 32 nt, Human
aauuugaaaggaugugaaucauggauggaagg

SEQ ID NO: 296658 - RNA, 32 nt, Human
aauuugaaauuagccaggcaugguggugcgag

SEQ ID NO: 296659 - RNA, 32 nt, Human
aauuugaacagcucaccacugugccuacauuu

SEQ ID NO: 296660 - RNA, 32 nt, Human
aauuugaauuggcagcuuucuuugcuaaaucu

SEQ ID NO: 296661 - RNA, 32 nt, Human
aauuugacccuuguaaaugacuuagucauuua

SEQ ID NO: 296662 - RNA, 32 nt, Human
aauuugagaccagcaugggaaacagagcaaga

SEQ ID NO: 296663 - RNA, 32 nt, Human
aauuugagaccagccuggccaacagacgggag

SEQ ID NO: 296664 - RNA, 32 nt, Human
aauuugagacuaccuuuauauucuccaacaca

SEQ ID NO: 296665 - RNA, 32 nt, Human
aauuugagccugcugauuuugaugacaacuca

SEQ ID NO: 296666 - RNA, 32 nt, Human
aauuugauaaacauuccuguugaugggaaaag

SEQ ID NO: 296667 - RNA, 32 nt, Human
aauuugaugggaaaauaguacacacauauaua

SEQ ID NO: 296668 - RNA, 32 nt, Human
aauuugauguaacugucugauuguacuagaga

SEQ ID NO: 296669 - RNA, 32 nt, Human
aauuugcacaucccaaguugcuaugugaauag

SEQ ID NO: 296670 - RNA, 32 nt, Human
aauuugcacaugcucaaugcuuacauugugcg

SEQ ID NO: 296671 - RNA, 32 nt, Human
aauuugcaggagaagccaggagucaucuguga

SEQ ID NO: 296672 - RNA, 32 nt, Human
aauuugcauccagcagcagcacuuagaccugc

SEQ ID NO: 296673 - RNA, 32 nt, Human
aauuugccauuuggacaguuaacauccaggug

SEQ ID NO: 296674 - RNA, 32 nt, Human
aauuugccauuuucaaaccuaugucucauacc

SEQ ID NO: 296675 - RNA, 32 nt, Human
aauuugcccugggaaaccccuucucugugacc

SEQ ID NO: 296676 - RNA, 32 nt, Human
aauuugcgccacugcauucuagccugagugac

SEQ ID NO: 296677 - RNA, 32 nt, Human
aauuugcuagaguucccugaccugcaaucccu

SEQ ID NO: 296678 - RNA, 32 nt, Human
aauuugcucaugugaaacuucugcuaacguug

SEQ ID NO: 296679 - RNA, 32 nt, Human
aauuugcuguucucaaccauucuuucaaggcu

SEQ ID NO: 296680 - RNA, 32 nt, Human
aauuugcuugaaugggaaaacucucucauuug

SEQ ID NO: 296681 - RNA, 32 nt, Human
aauuuggaagcaccccuggagcaaagaggcua

SEQ ID NO: 296682 - RNA, 32 nt, Human
aauuuggaagccucuuucugaaaucauuagcu

SEQ ID NO: 296683 - RNA, 32 nt, Human
aauuuggaauuugaagaagaagaagagggugg

SEQ ID NO: 296684 - RNA, 32 nt, Human
aauuuggacaaggcuuaauuuaggcauuuccc

SEQ ID NO: 296685 - RNA, 32 nt, Human
aauuuggacccagguugccugcucuuguugug

SEQ ID NO: 296686 - RNA, 32 nt, Human
aauuuggagaagugauugaacuuuucaagaca

SEQ ID NO: 296687 - RNA, 32 nt, Human
aauuuggagagggaaugcugagcagauagccc

SEQ ID NO: 296688 - RNA, 32 nt, Human
aauuuggaggcgagcggggagguggaggaagc

SEQ ID NO: 296689 - RNA, 32 nt, Human
aauuuggaggcugaggugggaggaucauuuga

SEQ ID NO: 296690 - RNA, 32 nt, Human
aauuuggaggcuggaguaaucagauuacugcu

SEQ ID NO: 296691 - RNA, 32 nt, Human
aauuuggaggcugggugcuguggcucacgccu

SEQ ID NO: 296692 - RNA, 32 nt, Human
aauuuggauacagacauagacacacacugagg

SEQ ID NO: 296693 - RNA, 32 nt, Human
aauuuggauuuggaaggcuuacauugugguug

SEQ ID NO: 296694 - RNA, 31 nt, Human
aauuuggcaauguuaaugcuuuuaagauuug

SEQ ID NO: 296695 - RNA, 32 nt, Human
aauuuggcacaaaaucaacuguauuaguccau

SEQ ID NO: 296696 - RNA, 32 nt, Human
aauuuggcacgaggcuuugcaguggaugcccu

SEQ ID NO: 296697 - RNA, 32 nt, Human
aauuuggccacuaacaucucccauggaauugu

SEQ ID NO: 296698 - RNA, 31 nt, Human
aauuuggcuacagccgcuaggaggggaucgg

SEQ ID NO: 296699 - RNA, 32 nt, Human
aauuuggcucacaucccucucauuccaucccu

SEQ ID NO: 296700 - RNA, 32 nt, Human
aauuuggcuucagaaugggaagagauagucaa

SEQ ID NO: 296701 - RNA, 32 nt, Human
aauuugggagaaaccugguugucugcaggaga

SEQ ID NO: 296702 - RNA, 32 nt, Human
aauuugggagccagcaagaguccugacagcag

SEQ ID NO: 296703 - RNA, 32 nt, Human
aauuugggaggcaaaggugggagaaucgcgug

SEQ ID NO: 296704 - RNA, 32 nt, Human
aauuugggaggcagaggugagagaaucgcuug

SEQ ID NO: 296705 - RNA, 32 nt, Human
aauuugggaggcugagacaggaggauugccug

SEQ ID NO: 296706 - RNA, 32 nt, Human
aauuugggauuggacuuugaagacggauuacu

SEQ ID NO: 296707 - RNA, 32 nt, Human
aauuuggggaacagaccuccacugugauucca

SEQ ID NO: 296708 - RNA, 32 nt, Human
aauuuggggguguacuguccugccugugcauc

SEQ ID NO: 296709 - RNA, 32 nt, Human
aauuugggguucuaaauauacaacuuguaaga

SEQ ID NO: 296710 - RNA, 32 nt, Human
aauuuggguaccauuuuaucacuguucaaagc

SEQ ID NO: 296711 - RNA, 32 nt, Human
aauuuggguuuuuaacuuuacagggucaguuc

SEQ ID NO: 296712 - RNA, 32 nt, Human
aauuuggucuaaggaauaaauagcuuuuacac

SEQ ID NO: 296713 - RNA, 32 nt, Human
aauuuggucucgggguagggggagacggggug

SEQ ID NO: 296714 - RNA, 32 nt, Human
aauuugguggguaggggaccagugaguuggga

SEQ ID NO: 296715 - RNA, 32 nt, Human
aauuugguucauguguggcaaaguucuuagcu

SEQ ID NO: 296716 - RNA, 32 nt, Human
aauuugguugugacaguggcguggggagaggg

SEQ ID NO: 296717 - RNA, 32 nt, Human
aauuuguaaacccauucagauaaauggcagua

SEQ ID NO: 296718 - RNA, 32 nt, Human
aauuuguacuacuucagccaaucugugaaugu

SEQ ID NO: 296719 - RNA, 32 nt, Human
aauuuguagagauugacuuccuaagcuacuua

SEQ ID NO: 296720 - RNA, 32 nt, Human
aauuuguaguaaaccaggccucccaggauggc

SEQ ID NO: 296721 - RNA, 32 nt, Human
aauuuguagugacugauaacagcaggaauugg

SEQ ID NO: 296722 - RNA, 32 nt, Human
aauuuguaucagaaaaacauuacaaauuuacu

SEQ ID NO: 296723 - RNA, 32 nt, Human
aauuuguauuccugaaaaugucauauauuuuc

SEQ ID NO: 296724 - RNA, 32 nt, Human
aauuuguauuucccugguuuccagucauauug

SEQ ID NO: 296725 - RNA, 32 nt, Human
aauuuguauuuuuaguagagacaggguuucac

SEQ ID NO: 296726 - RNA, 32 nt, Human
aauuuguccaauaacaggucaacuucagagac

SEQ ID NO: 296727 - RNA, 32 nt, Human
aauuugucuccauuuucaccaucaagcacaaa

SEQ ID NO: 296728 - RNA, 32 nt, Human
aauuugugaacagcagaauugaccgacagcuu

SEQ ID NO: 296729 - RNA, 32 nt, Human
aauuugugacaucuggcaagauuucccuuuau

SEQ ID NO: 296730 - RNA, 32 nt, Human
aauuugugaucugauccacauacaagcacagu

SEQ ID NO: 296731 - RNA, 32 nt, Human
aauuuguggcacuaugacagcuauuuuuauga

SEQ ID NO: 296732 - RNA, 32 nt, Human
aauuuguggcugcuccagcuacugggcauuuu

SEQ ID NO: 296733 - RNA, 32 nt, Human
aauuuguggcuggucugaagguagugaguuag

SEQ ID NO: 296734 - RNA, 32 nt, Human
aauuuguguaacuguugaaucuggaaauugau

SEQ ID NO: 296735 - RNA, 32 nt, Human
aauuuguguuugagaugggguggaaauuggaa

SEQ ID NO: 296736 - RNA, 32 nt, Human
aauuuguucucaggcugugcugugagggccgc

SEQ ID NO: 296737 - RNA, 32 nt, Human
aauuuguucugcacaggugacccggccuguac

SEQ ID NO: 296738 - RNA, 32 nt, Human
aauuuguucuuacacacaucucucugguucau

SEQ ID NO: 296739 - RNA, 32 nt, Human
aauuuguuuauccagaaggagugcuguuuccu

SEQ ID NO: 296740 - RNA, 32 nt, Human
aauuuguuugcuggaacagaagccgucuuuga

SEQ ID NO: 296741 - RNA, 32 nt, Human
aauuuguuuguguucaauaucagcuuugauaa

SEQ ID NO: 296742 - RNA, 32 nt, Human
aauuuguuuucucauaguuuaauuccaacaac

SEQ ID NO: 296743 - RNA, 32 nt, Human
aauuuuaaacucaaccaagcugugauaagugg

SEQ ID NO: 296744 - RNA, 31 nt, Human
aauuuuaaagugucagaaaaaggugacggca

SEQ ID NO: 296745 - RNA, 32 nt, Human
aauuuuaacauugcagaaaccugcucugggug

SEQ ID NO: 296746 - RNA, 32 nt, Human
aauuuuaaccaccaccuacuucccuuaaacac

SEQ ID NO: 296747 - RNA, 32 nt, Human
aauuuuaaggggaauggcuggcucacagaagc

SEQ ID NO: 296748 - RNA, 32 nt, Human
aauuuuaauguucuuaccgcaacgaaauaauu

SEQ ID NO: 296749 - RNA, 32 nt, Human
aauuuuaauuuucuucuuucucagaccucagu

SEQ ID NO: 296750 - RNA, 32 nt, Human
aauuuuacauuucaacccaucuggcuaaaguu

SEQ ID NO: 296751 - RNA, 32 nt, Human
aauuuuacccuuuagacuguagccuggauauu

SEQ ID NO: 296752 - RNA, 32 nt, Human
aauuuuaccuacugaggcucaagccuucacag

SEQ ID NO: 296753 - RNA, 32 nt, Human
aauuuuacuacaagacucuuguccucauuguu

SEQ ID NO: 296754 - RNA, 32 nt, Human
aauuuuacuaccauauguuauguaauaaaugu

SEQ ID NO: 296755 - RNA, 32 nt, Human
aauuuuacuugcugggagcgaggagaguaauc

SEQ ID NO: 296756 - RNA, 32 nt, Human
aauuuuagaagaggaaguacagaauucaguuu

SEQ ID NO: 296757 - RNA, 32 nt, Human
aauuuuagaagagguagagaaaauggaacauu

SEQ ID NO: 296758 - RNA, 32 nt, Human
aauuuuagccccacccugcucccaucugcccc

SEQ ID NO: 296759 - RNA, 32 nt, Human
aauuuuagcuccagcucaguugcccagacugg

SEQ ID NO: 296760 - RNA, 32 nt, Human
aauuuuaggaacugugagagggggacaaggug

SEQ ID NO: 296761 - RNA, 32 nt, Human
aauuuuaguagagaugggguuucuccauguug

SEQ ID NO: 296762 - RNA, 32 nt, Human
aauuuuagugaaaaccuaggaggcaagaaaua

SEQ ID NO: 296763 - RNA, 32 nt, Human
aauuuuaguugagugcagagggcuuuuauaac

SEQ ID NO: 296764 - RNA, 32 nt, Human
aauuuuauauguauauagauauauuuggcuua

SEQ ID NO: 296765 - RNA, 32 nt, Human
aauuuuauuaugcaaccaguuuauccaccaag

SEQ ID NO: 296766 - RNA, 32 nt, Human
aauuuuauucaggaccuaguaucugcagucca

SEQ ID NO: 296767 - RNA, 32 nt, Human
aauuuucaaaagaaagcuaaaugcugauugug

SEQ ID NO: 296768 - RNA, 32 nt, Human
aauuuucaagagccuaauucugcuaaucauaa

SEQ ID NO: 296769 - RNA, 32 nt, Human
aauuuucacaggcucaucugggagaaggauca

SEQ ID NO: 296770 - RNA, 32 nt, Human
aauuuucacauauugggcuuacccagagugga

SEQ ID NO: 296771 - RNA, 32 nt, Human
aauuuucaccugccagcccugccuccuccuuu

SEQ ID NO: 296772 - RNA, 32 nt, Human
aauuuucacucccccagcagugugugugaguu

SEQ ID NO: 296773 - RNA, 32 nt, Human
aauuuucagaucuuuucaggaguguaaggaaa

SEQ ID NO: 296774 - RNA, 32 nt, Human
aauuuucagcaccugcuuuucucagcuuggcc

SEQ ID NO: 296775 - RNA, 32 nt, Human
aauuuucauggccaugggacaaagaaccccgu

SEQ ID NO: 296776 - RNA, 32 nt, Human
aauuuuccaguuucaaguaccuauucaaaauu

SEQ ID NO: 296777 - RNA, 32 nt, Human
aauuuucccaaaacugauacccuuugaaaaag

SEQ ID NO: 296778 - RNA, 32 nt, Human
aauuuucccagaggaaugccuggaauggccgg

SEQ ID NO: 296779 - RNA, 32 nt, Human
aauuuuccccaagaggagggcucagugauucu

SEQ ID NO: 296780 - RNA, 32 nt, Human
aauuuucccucuaucuucuguguggguguuuc

SEQ ID NO: 296781 - RNA, 32 nt, Human
aauuuucccuggcuauuuucuacccacagcug

SEQ ID NO: 296782 - RNA, 32 nt, Human
aauuuucccuucgccugccaugggcuucaccc

SEQ ID NO: 296783 - RNA, 32 nt, Human
aauuuuccuagucuuuaguaacuguuaguguu

SEQ ID NO: 296784 - RNA, 32 nt, Human
aauuuuccucauuucaaaauaauuuaugacuc

SEQ ID NO: 296785 - RNA, 32 nt, Human
aauuuuccuccacuaccuccgcccccgccccc

SEQ ID NO: 296786 - RNA, 32 nt, Human
aauuuuccugcagcaaaagucugaggcuguug

SEQ ID NO: 296787 - RNA, 32 nt, Human
aauuuuccuguggccuuccuggccucuacuuc

SEQ ID NO: 296788 - RNA, 32 nt, Human
aauuuucgcaaccuacucaucugacaaagggc

SEQ ID NO: 296789 - RNA, 32 nt, Human
aauuuucuagcucuggaaaggccuuccugggu

SEQ ID NO: 296790 - RNA, 32 nt, Human
aauuuucuagucuuccucugcuuuucuccaau

SEQ ID NO: 296791 - RNA, 32 nt, Human
aauuuucuccacccagaccccaaaaauaaaug

SEQ ID NO: 296792 - RNA, 32 nt, Human
aauuuucucuccaugggccacaggggacaggg

SEQ ID NO: 296793 - RNA, 32 nt, Human
aauuuucugcagcauuaagcuggcgcuuaaua

SEQ ID NO: 296794 - RNA, 32 nt, Human
aauuuucuggaaaauauccaugugguaauggu

SEQ ID NO: 296795 - RNA, 32 nt, Human
aauuuucuggaaaaugcuucuuggcuggggcc

SEQ ID NO: 296796 - RNA, 32 nt, Human
aauuuucuguacaguuugugaggaccuuugca

SEQ ID NO: 296797 - RNA, 32 nt, Human
aauuuucugucuuguugaucugucuaauauug

SEQ ID NO: 296798 - RNA, 32 nt, Human
aauuuucuuacagaugucaaaagcagucuagu

SEQ ID NO: 296799 - RNA, 32 nt, Human
aauuuucuuagcauucuggaauucucaucuaa

SEQ ID NO: 296800 - RNA, 32 nt, Human
aauuuucuucacacuaucaacacugcagcauu

SEQ ID NO: 296801 - RNA, 32 nt, Human
aauuuucuuccagauacagggggauaccugcc

SEQ ID NO: 296802 - RNA, 32 nt, Human
aauuuucuucuagcaugugauaaugaguaaac

SEQ ID NO: 296803 - RNA, 32 nt, Human
aauuuucuugcagaaaaguuaagucuaauugc

SEQ ID NO: 296804 - RNA, 32 nt, Human
aauuuucuuucgauggcauuaccagaguauag

SEQ ID NO: 296805 - RNA, 24 nt, Human
aauuuucuuuuuaaaaauacuucu

SEQ ID NO: 296806 - RNA, 32 nt, Human
aauuuugagaacuugggaucacagacucuaau

SEQ ID NO: 296807 - RNA, 32 nt, Human
aauuuugagaagguaaaaguuucuuaauuaaa

SEQ ID NO: 296808 - RNA, 32 nt, Human
aauuuugagacaggcucucacucuguugccca

SEQ ID NO: 296809 - RNA, 32 nt, Human
aauuuugaggccucccuagccauggggacugu

SEQ ID NO: 296810 - RNA, 32 nt, Human
aauuuugaggggagggaaagaaacaauaccuu

SEQ ID NO: 296811 - RNA, 32 nt, Human
aauuuugagggugggagagaagaaaagggaaa

SEQ ID NO: 296812 - RNA, 32 nt, Human
aauuuugaucauauuaacuguacuucaguuuu

SEQ ID NO: 296813 - RNA, 32 nt, Human
aauuuugauuuauuuuuccucucccaaccaua

SEQ ID NO: 296814 - RNA, 32 nt, Human
aauuuugcaauguuaaagaugcacagaauaug

SEQ ID NO: 296815 - RNA, 32 nt, Human
aauuuugcccccuuuuaggccauguuccauua

SEQ ID NO: 296816 - RNA, 32 nt, Human
aauuuugccuauaauaaugagacaucuugggg

SEQ ID NO: 296817 - RNA, 32 nt, Human
aauuuugcuacuuggaauuuggagauagcauc

SEQ ID NO: 296818 - RNA, 32 nt, Human
aauuuugcugauaacuuuauaaaacucacuau

SEQ ID NO: 296819 - RNA, 32 nt, Human
aauuuugcuggacuucaaccuggguagaagac

SEQ ID NO: 296820 - RNA, 32 nt, Human
aauuuuggacaagguuacuucaucuucauuca

SEQ ID NO: 296821 - RNA, 32 nt, Human
aauuuuggagaguuugggagcauuugggggca

SEQ ID NO: 296822 - RNA, 32 nt, Human
aauuuuggaguaacguuuuccuugugacuaag

SEQ ID NO: 296823 - RNA, 32 nt, Human
aauuuuggagugaagggcccugaggucagcuc

SEQ ID NO: 296824 - RNA, 32 nt, Human
aauuuuggauggguauuuauuuggauaaaggu

SEQ ID NO: 296825 - RNA, 32 nt, Human
aauuuuggccaaaucuucucucccucuccuac

SEQ ID NO: 296826 - RNA, 32 nt, Human
aauuuuggccuucugcacuacucuuuugcucu

SEQ ID NO: 296827 - RNA, 32 nt, Human
aauuuugggaggccgaggcggguggaucgcuu

SEQ ID NO: 296828 - RNA, 32 nt, Human
aauuuugggaggccgaggugggcugaucaauu

SEQ ID NO: 296829 - RNA, 32 nt, Human
aauuuuggguuccuuccuuggagccauaguua

SEQ ID NO: 296830 - RNA, 32 nt, Human
aauuuuguaaauaaaugauuauacaaaacagu

SEQ ID NO: 296831 - RNA, 32 nt, Human
aauuuuguacuacauuuauuuuguuucauuug

SEQ ID NO: 296832 - RNA, 32 nt, Human
aauuuuguauauuuaagugucauagaaaauau

SEQ ID NO: 296833 - RNA, 32 nt, Human
aauuuuguauuuucacugucuucaaaauauuu

SEQ ID NO: 296834 - RNA, 32 nt, Human
aauuuugucagccaggcguggugacucaugcc

SEQ ID NO: 296835 - RNA, 32 nt, Human
aauuuuguccccacuguuuaaaaauguuaccu

SEQ ID NO: 296836 - RNA, 32 nt, Human
aauuuugucuaucaauggauguaauuaauccu

SEQ ID NO: 296837 - RNA, 32 nt, Human
aauuuugucuuccucacuuuucaccuuaguuu

SEQ ID NO: 296838 - RNA, 32 nt, Human
aauuuugugaaagaaggagcaagagaacauuc

SEQ ID NO: 296839 - RNA, 32 nt, Human
aauuuugugagcuccacacgggcaggguugca

SEQ ID NO: 296840 - RNA, 32 nt, Human
aauuuuguuccuuauuagcuuuauuuuacuuu

SEQ ID NO: 296841 - RNA, 32 nt, Human
aauuuuguuuuuaaaauauuguuuaucuuuau

SEQ ID NO: 296842 - RNA, 32 nt, Human
aauuuuguuuuuccuguuuucugagaauaaag

SEQ ID NO: 296843 - RNA, 32 nt, Human
aauuuuuaaaaauacaguuagguguuuauauu

SEQ ID NO: 296844 - RNA, 32 nt, Human
aauuuuuaaaaauuauuaucaggggagaaaaa

SEQ ID NO: 296845 - RNA, 32 nt, Human
aauuuuuaaaacaaaacaccuuaaaacuuucu

SEQ ID NO: 296846 - RNA, 32 nt, Human
aauuuuuaaagaaaugaacauacacauaguua

SEQ ID NO: 296847 - RNA, 32 nt, Human
aauuuuuaaagauaccagugggacagauuugg

SEQ ID NO: 296848 - RNA, 32 nt, Human
aauuuuuaaagauaccagugggacagguuugg

SEQ ID NO: 296849 - RNA, 32 nt, Human
aauuuuuaacuaaugucaaaacuacaguguca

SEQ ID NO: 296850 - RNA, 32 nt, Human
aauuuuuaacugccuuuuugucgagucaaacu

SEQ ID NO: 296851 - RNA, 32 nt, Human
aauuuuuaauccagcacauacuauugcaagcg

SEQ ID NO: 296852 - RNA, 32 nt, Human
aauuuuuaauucaguugagugcagcaucuuuc

SEQ ID NO: 296853 - RNA, 32 nt, Human
aauuuuuacaguaucucaaagacuucacuuga

SEQ ID NO: 296854 - RNA, 32 nt, Human
aauuuuuagaagccuucagaagaggcuaaaau

SEQ ID NO: 296855 - RNA, 32 nt, Human
aauuuuuaugcuucauacauugugcuagacuc

SEQ ID NO: 296856 - RNA, 32 nt, Human
aauuuuuauuuuuaguagagaugggguuucac

SEQ ID NO: 296857 - RNA, 32 nt, Human
aauuuuucaaaugauaaaacuguauaaauaca

SEQ ID NO: 296858 - RNA, 32 nt, Human
aauuuuucaaugccgucauuuucaguuagaug

SEQ ID NO: 296859 - RNA, 32 nt, Human
aauuuuucaccaugcaucggaaaaagguggau

SEQ ID NO: 296860 - RNA, 32 nt, Human
aauuuuucauuuccugugucaccccucccaca

SEQ ID NO: 296861 - RNA, 32 nt, Human
aauuuuuccagccucauccuggccugcccucu

SEQ ID NO: 296862 - RNA, 32 nt, Human
aauuuuucuaacucugucucuucucucuuucc

SEQ ID NO: 296863 - RNA, 32 nt, Human
aauuuuucuagcagaaauguugaaccucucag

SEQ ID NO: 296864 - RNA, 32 nt, Human
aauuuuucucagacuuauuuuaucugccucug

SEQ ID NO: 296865 - RNA, 32 nt, Human
aauuuuucucauuuuuaguagaaacgggguuu

SEQ ID NO: 296866 - RNA, 32 nt, Human
aauuuuucuccucccuccuccuacaagguuuu

SEQ ID NO: 296867 - RNA, 32 nt, Human
aauuuuucugauuguuuccuuuauagaguguc

SEQ ID NO: 296868 - RNA, 32 nt, Human
aauuuuucugcaggagcuccucaaagucucug

SEQ ID NO: 296869 - RNA, 32 nt, Human
aauuuuucugcugcuacuacaguuucacagaa

SEQ ID NO: 296870 - RNA, 32 nt, Human
aauuuuucuuaggugaggaggauuauuaacug

SEQ ID NO: 296871 - RNA, 32 nt, Human
aauuuuucuuucuccaccccaaaccugugcua

SEQ ID NO: 296872 - RNA, 32 nt, Human
aauuuuugcaaccuacucaucugacaaagggc

SEQ ID NO: 296873 - RNA, 32 nt, Human
aauuuuugcagccuacucaucugacaaagagc

SEQ ID NO: 296874 - RNA, 32 nt, Human
aauuuuugcccagucugccuguuguggggcuc

SEQ ID NO: 296875 - RNA, 32 nt, Human
aauuuuugcucaaaaccagaaaaagaauugua

SEQ ID NO: 296876 - RNA, 32 nt, Human
aauuuuuggauugacaguaacuugguuauaca

SEQ ID NO: 296877 - RNA, 32 nt, Human
aauuuuugguauagggucaucucuccaccuug

SEQ ID NO: 296878 - RNA, 32 nt, Human
aauuuuuguaaauuaucugaauaaaaguuaua

SEQ ID NO: 296879 - RNA, 32 nt, Human
aauuuuuguucaagggacuaaauugcuuaugu

SEQ ID NO: 296880 - RNA, 32 nt, Human
acaaaaacaaaccuguguuguuuuuguauaga

SEQ ID NO: 296881 - RNA, 32 nt, Human
acaaaaacaaaccuuuugguaaugugcacugu

SEQ ID NO: 296882 - RNA, 32 nt, Human
acaaaaacaaaugaaaacaaaaacaaaccauu

SEQ ID NO: 296883 - RNA, 32 nt, Human
acaaaaacaaauucuuuuaauucaacgggugc

SEQ ID NO: 296884 - RNA, 32 nt, Human
acaaaaacaacaaaagaagaacauucucucac

SEQ ID NO: 296885 - RNA, 32 nt, Human
acaaaaacaacugccauuuuuguauauaauag

SEQ ID NO: 296886 - RNA, 32 nt, Human
acaaaaacacaaaaacucugaggggaucuggu

SEQ ID NO: 296887 - RNA, 32 nt, Human
acaaaaacacaaauuagucgggugugguggca

SEQ ID NO: 296888 - RNA, 19 nt, Human
acaaaaacacacugcuuca

SEQ ID NO: 296889 - RNA, 32 nt, Human
acaaaaacaccuuccagcagugccugcuucug

SEQ ID NO: 296890 - RNA, 32 nt, Human
acaaaaacagcaguugcauugauuuugaaaac

SEQ ID NO: 296891 - RNA, 32 nt, Human
acaaaaaccaaccaaccaaccaaccaaccaac

SEQ ID NO: 296892 - RNA, 21 nt, Human
acaaaaaccagcagccaaaua

SEQ ID NO: 296893 - RNA, 32 nt, Human
acaaaaaccagcugcaaccacagagcucaguc

SEQ ID NO: 296894 - RNA, 32 nt, Human
acaaaaaccggccuugcccugcagggaugggg

SEQ ID NO: 296895 - RNA, 32 nt, Human
acaaaaaccuggugagggucaucaggagaugg

SEQ ID NO: 296896 - RNA, 32 nt, Human
acaaaaacuagccuggcaagguggugcacccc

SEQ ID NO: 296897 - RNA, 32 nt, Human
acaaaaacuaugaaacagaugcauauuuccuc

SEQ ID NO: 296898 - RNA, 32 nt, Human
acaaaaacucaaugaacuagacauaugagaaa

SEQ ID NO: 296899 - RNA, 32 nt, Human
acaaaaacuugaaaugagagacuuuaagaacc

SEQ ID NO: 296900 - RNA, 32 nt, Human
acaaaaagaaaauuagugcucuuaagaaaagc

SEQ ID NO: 296901 - RNA, 18 nt, Human
acaaaaagaaauuucuca

SEQ ID NO: 296902 - RNA, 32 nt, Human
acaaaaagaaucaggacuuguacugggaaaaa

SEQ ID NO: 296903 - RNA, 32 nt, Human
acaaaaagauuagccaggcaugguggcauaca

SEQ ID NO: 296904 - RNA, 32 nt, Human
acaaaaagauuagcugggcaugguggcgcaug

SEQ ID NO: 296905 - RNA, 32 nt, Human
acaaaaagauuagcugggugugguggugugug

SEQ ID NO: 296906 - RNA, 32 nt, Human
acaaaaagccauagaacuuggucauguuuucc

SEQ ID NO: 296907 - RNA, 32 nt, Human
acaaaaagcuaggcacauguugacaggugaau

SEQ ID NO: 296908 - RNA, 32 nt, Human
acaaaaagcugcaaccccagcccaucagaagg

SEQ ID NO: 296909 - RNA, 32 nt, Human
acaaaaagcugcuuucccaucccaggccgagc

SEQ ID NO: 296910 - RNA, 32 nt, Human
acaaaaagcuggaggaaggagcacaugaggua

SEQ ID NO: 296911 - RNA, 32 nt, Human
acaaaaaggaagaccagggaggcccuuaagaa

SEQ ID NO: 296912 - RNA, 32 nt, Human
acaaaaaguacaacaguguacacuaaaggaac

SEQ ID NO: 296913 - RNA, 32 nt, Human
acaaaaaguauucauauuuaauuucucuuaca

SEQ ID NO: 296914 - RNA, 32 nt, Human
acaaaaaguucugcaauugccugugccaaacu

SEQ ID NO: 296915 - RNA, 32 nt, Human
acaaaaauacaaaaauuagccagguuugguga

SEQ ID NO: 296916 - RNA, 32 nt, Human
acaaaaauacaaaaauuagcuggacguguagu

SEQ ID NO: 296917 - RNA, 32 nt, Human
acaaaaauacaaaaauuagcugggcguggagg

SEQ ID NO: 296918 - RNA, 32 nt, Human
acaaaaauacccacucagucuguguuagauug

SEQ ID NO: 296919 - RNA, 22 nt, Human
acaaaaauagccccuccugaag

SEQ ID NO: 296920 - RNA, 21 nt, Human
acaaaaaucaaaugccuauaa

SEQ ID NO: 296921 - RNA, 24 nt, Human
acaaaaaucaagcuuagugcuuua

SEQ ID NO: 296922 - RNA, 32 nt, Human
acaaaaaucagccaggcaugguggugagugcc

SEQ ID NO: 296923 - RNA, 32 nt, Human
acaaaaaucuagaaauggagagggaacuguuu

SEQ ID NO: 296924 - RNA, 32 nt, Human
acaaaaaugaggaaaacuaggggaccccacac

SEQ ID NO: 296925 - RNA, 32 nt, Human
acaaaaauggaggccucacuccacuacuccau

SEQ ID NO: 296926 - RNA, 32 nt, Human
acaaaaauguaaaauaaaauuagccagguaug

SEQ ID NO: 296927 - RNA, 32 nt, Human
acaaaaauguaaaucccaccauucauauaaag

SEQ ID NO: 296928 - RNA, 32 nt, Human
acaaaaauuagccaggugugguggcgcaagcc

SEQ ID NO: 296929 - RNA, 32 nt, Human
acaaaaauuagccaggugugguggcgcauacc

SEQ ID NO: 296930 - RNA, 32 nt, Human
acaaaaauuagccaggugugguggcgccuggu

SEQ ID NO: 296931 - RNA, 32 nt, Human
acaaaaauuagccaggugugguggcucacgcu

SEQ ID NO: 296932 - RNA, 32 nt, Human
acaaaaauuagccaggugugguggcucaugcc

SEQ ID NO: 296933 - RNA, 32 nt, Human
acaaaaauuagccgagugugguggcucaugcc

SEQ ID NO: 296934 - RNA, 32 nt, Human
acaaaaauuagccggguguggugacucacagc

SEQ ID NO: 296935 - RNA, 32 nt, Human
acaaaaauuagccgggugugguggcgcacgcc

SEQ ID NO: 296936 - RNA, 32 nt, Human
acaaaaauuagccgggugugguggcgcaugcc

SEQ ID NO: 296937 - RNA, 32 nt, Human
acaaaaauuagccuggcauauggcggguaccg

SEQ ID NO: 296938 - RNA, 32 nt, Human
acaaaaauuagccuggcgugguggugcacacc

SEQ ID NO: 296939 - RNA, 32 nt, Human
acaaaaauuagccuggcgugguggugcaugcc

SEQ ID NO: 296940 - RNA, 32 nt, Human
acaaaaauuagcuaggugugguggcgcacacc

SEQ ID NO: 296941 - RNA, 32 nt, Human
acaaaaauuagcuggguguggugggcaccugu

SEQ ID NO: 296942 - RNA, 32 nt, Human
acaaaaauuagucaggugugguggacgccugu

SEQ ID NO: 296943 - RNA, 32 nt, Human
acaaaaauuaguugcauuucuauacaccagua

SEQ ID NO: 296944 - RNA, 32 nt, Human
acaaaaauugacuccccauugcagugaacuuc

SEQ ID NO: 296945 - RNA, 27 nt, Human
acaaaaauugauauaauacauucauca

SEQ ID NO: 296946 - RNA, 32 nt, Human
acaaaaauugcgaagacucaucuuucccuaga

SEQ ID NO: 296947 - RNA, 32 nt, Human
acaaaacaaaaacccaccccuuuaaggaguug

SEQ ID NO: 296948 - RNA, 32 nt, Human
acaaaacaaacacacggaccaauaaacaaaga

SEQ ID NO: 296949 - RNA, 32 nt, Human
acaaaacaacagacacaguuguaaugacauua

SEQ ID NO: 296950 - RNA, 32 nt, Human
acaaaacaaucaaaaccuaccaaaaagggacu

SEQ ID NO: 296951 - RNA, 32 nt, Human
acaaaacaauuagcugggugugguggcacaca

SEQ ID NO: 296952 - RNA, 32 nt, Human
acaaaacacacuaggggccgggcacagugcuc

SEQ ID NO: 296953 - RNA, 32 nt, Human
acaaaacacagaaccauucagaugacuccauu

SEQ ID NO: 296954 - RNA, 32 nt, Human
acaaaacacagccaaggggauauuuacugcuc

SEQ ID NO: 296955 - RNA, 32 nt, Human
acaaaacacaggcaacccagacuaccuuguuu

SEQ ID NO: 296956 - RNA, 32 nt, Human
acaaaacaccauggcacacauauaccuaugua

SEQ ID NO: 296957 - RNA, 32 nt, Human
acaaaacacucuugggucucugaccccaggga

SEQ ID NO: 296958 - RNA, 32 nt, Human
acaaaacacuuagcugggcaugguggcgggug

SEQ ID NO: 296959 - RNA, 21 nt, Human
acaaaacaguucuuggucuug

SEQ ID NO: 296960 - RNA, 32 nt, Human
acaaaaccaagcucccuucccuuccucccccu

SEQ ID NO: 296961 - RNA, 32 nt, Human
acaaaaccacacaaaccaaaccgucaacagca

SEQ ID NO: 296962 - RNA, 32 nt, Human
acaaaaccacagugagauagcaccucaccccc

SEQ ID NO: 296963 - RNA, 32 nt, Human
acaaaaccacggucaguuuacucaacauacuu

SEQ ID NO: 296964 - RNA, 32 nt, Human
acaaaaccacuguccaacacugguaucugugu

SEQ ID NO: 296965 - RNA, 32 nt, Human
acaaaaccagcaucuguuacuggaacagagac

SEQ ID NO: 296966 - RNA, 32 nt, Human
acaaaaccagucccuggugccaaaaaggcugg

SEQ ID NO: 296967 - RNA, 32 nt, Human
acaaaacccacacuccaaaaacuaacaaagaa

SEQ ID NO: 296968 - RNA, 32 nt, Human
acaaaacccaggagguagcuggcagaguagcu

SEQ ID NO: 296969 - RNA, 32 nt, Human
acaaaacccaguguuugcacacacacaaaauc

SEQ ID NO: 296970 - RNA, 32 nt, Human
acaaaaccuccaccaucugacgggacccacag

SEQ ID NO: 296971 - RNA, 32 nt, Human
acaaaacuagcugggggugguggugcaugccu

SEQ ID NO: 296972 - RNA, 32 nt, Human
acaaaacucacucaaaaccagcagugcugcua

SEQ ID NO: 296973 - RNA, 32 nt, Human
acaaaacucauuuuuccuucuucauuuuguau

SEQ ID NO: 296974 - RNA, 32 nt, Human
acaaaacuccgcccccagccuaugagcauccu

SEQ ID NO: 296975 - RNA, 32 nt, Human
acaaaacucucaaaaauguauuucaagucagu

SEQ ID NO: 296976 - RNA, 32 nt, Human
acaaaacuggacucagcacacuccugggaauc

SEQ ID NO: 296977 - RNA, 32 nt, Human
acaaaacuguacuugugccugcuaaaucugug

SEQ ID NO: 296978 - RNA, 32 nt, Human
acaaaacuucuuuccauuguccugcccguuuc

SEQ ID NO: 296979 - RNA, 25 nt, Human
acaaaacuuuuaaacuuccuauagg

SEQ ID NO: 296980 - RNA, 19 nt, Human
acaaaagaaaaagccaaca

SEQ ID NO: 296981 - RNA, 32 nt, Human
acaaaagaaagcacauguaacuaccuucuuug

SEQ ID NO: 296982 - RNA, 32 nt, Human
acaaaagaccauuuaaauagugaauuauuaaa

SEQ ID NO: 296983 - RNA, 25 nt, Human
acaaaagacuguaggagagccaaac

SEQ ID NO: 296984 - RNA, 32 nt, Human
acaaaagagaauacacaaacuggacuucauca

SEQ ID NO: 296985 - RNA, 32 nt, Human
acaaaagaggacagcugugcugagggggcagg

SEQ ID NO: 296986 - RNA, 32 nt, Human
acaaaagaggccagccacccaccuccaacacc

SEQ ID NO: 296987 - RNA, 32 nt, Human
acaaaagagggcagccacccaccuccaacacc

SEQ ID NO: 296988 - RNA, 32 nt, Human
acaaaagcaauuucaguaucucugugcaaggc

SEQ ID NO: 296989 - RNA, 32 nt, Human
acaaaagcacaggcaugcacacacacagaacc

SEQ ID NO: 296990 - RNA, 22 nt, Human
acaaaagcaggaaugacuaaca

SEQ ID NO: 296991 - RNA, 22 nt, Human
acaaaagcaguucuuccuaagg

SEQ ID NO: 296992 - RNA, 20 nt, Human
acaaaagcauaagccaaaca

SEQ ID NO: 296993 - RNA, 32 nt, Human
acaaaagcaucuucccuagaaauuuuugugaa

SEQ ID NO: 296994 - RNA, 32 nt, Human
acaaaagcauuuccuaugcuagucucccagua

SEQ ID NO: 296995 - RNA, 22 nt, Human
acaaaagcauuuuccugagagg

SEQ ID NO: 296996 - RNA, 32 nt, Human
acaaaagccacuguuugcacguguuaaacuuc

SEQ ID NO: 296997 - RNA, 32 nt, Human
acaaaagccagaccugucacugaacauugaac

SEQ ID NO: 296998 - RNA, 32 nt, Human
acaaaagccagcauacuuucccugcacccauc

SEQ ID NO: 296999 - RNA, 32 nt, Human
acaaaagccaugagcugcuuuuaugcugaaaa

SEQ ID NO: 297000 - RNA, 32 nt, Human
acaaaagcccugcuugcuuuugcagcugggag

SEQ ID NO: 297001 - RNA, 24 nt, Human
acaaaagccugaacuuccugaagg

SEQ ID NO: 297002 - RNA, 32 nt, Human
acaaaagccuggcugaguugauguuuuacauu

SEQ ID NO: 297003 - RNA, 32 nt, Human
acaaaagcuacagcuccaggagcccagcgccg

SEQ ID NO: 297004 - RNA, 32 nt, Human
acaaaaggaaaauguuguugauucuugguuuu

SEQ ID NO: 297005 - RNA, 22 nt, Human
acaaaaggacaguucuguguug

SEQ ID NO: 297006 - RNA, 32 nt, Human
acaaaaggagugaaaagccaagaggacgaagu

SEQ ID NO: 297007 - RNA, 32 nt, Human
acaaaaggcacgccgugugcucugccugcuuc

SEQ ID NO: 297008 - RNA, 32 nt, Human
acaaaaggcuagaggcaugggccagguaaaaa

SEQ ID NO: 297009 - RNA, 32 nt, Human
acaaaagggaaacugugaucucaucugguugg

SEQ ID NO: 297010 - RNA, 32 nt, Human
acaaaaguaucagaacuuggaauggauggaug

SEQ ID NO: 297011 - RNA, 32 nt, Human
acaaaagucaucuggcaaaacauuuaccugua

SEQ ID NO: 297012 - RNA, 32 nt, Human
acaaaagugaaaguaguuguucacaaaagaau

SEQ ID NO: 297013 - RNA, 30 nt, Human
acaaaagugccagaagauguccagccaccg

SEQ ID NO: 297014 - RNA, 32 nt, Human
acaaaagugccuggcauccacuacugcugccu

SEQ ID NO: 297015 - RNA, 20 nt, Human
acaaaagugcuaauucacua

SEQ ID NO: 297016 - RNA, 32 nt, Human
acaaaaguuagccgggugugguggugcaugcc

SEQ ID NO: 297017 - RNA, 32 nt, Human
acaaaaguucugaagaugaugcggccucagag

SEQ ID NO: 297018 - RNA, 32 nt, Human
acaaaauaaaaugcaggaucuuuguaaagccu

SEQ ID NO: 297019 - RNA, 32 nt, Human
acaaaauaacuagcaaccaugaagugggugga

SEQ ID NO: 297020 - RNA, 32 nt, Human
acaaaauacacagaguguggaggcagggaggu

SEQ ID NO: 297021 - RNA, 19 nt, Human
acaaaauacagauaugcaa

SEQ ID NO: 297022 - RNA, 18 nt, Human
acaaaauacggcaagcag

SEQ ID NO: 297023 - RNA, 32 nt, Human
acaaaauacuaguuguuuuacacucucuuuuc

SEQ ID NO: 297024 - RNA, 32 nt, Human
acaaaauagaggagagaaagagagcaugagag

SEQ ID NO: 297025 - RNA, 32 nt, Human
acaaaauaggugaggggauagcgaaugcacuc

SEQ ID NO: 297026 - RNA, 20 nt, Human
acaaaauaguuuuucaggca

SEQ ID NO: 297027 - RNA, 21 nt, Human
acaaaauauccaagcccagcc

SEQ ID NO: 297028 - RNA, 32 nt, Human
acaaaauaugccaggaccucacagacaaagcc

SEQ ID NO: 297029 - RNA, 32 nt, Human
acaaaaucacagcacccacuaccauacagaca

SEQ ID NO: 297030 - RNA, 32 nt, Human
acaaaaucacucuuuccucucucccucuccuu

SEQ ID NO: 297031 - RNA, 26 nt, Human
acaaaaucagagcuaaggcuaccaaa

SEQ ID NO: 297032 - RNA, 32 nt, Human
acaaaaucaguggcucuuagaguuuagaaaac

SEQ ID NO: 297033 - RNA, 32 nt, Human
acaaaaucauauccaccucugccuggcagaag

SEQ ID NO: 297034 - RNA, 32 nt, Human
acaaaaucaucauuccuuguauuuauauuugu

SEQ ID NO: 297035 - RNA, 32 nt, Human
acaaaauccaacaacaauacugagaugaucua

SEQ ID NO: 297036 - RNA, 32 nt, Human
acaaaaucugacauauacauacauacagugga

SEQ ID NO: 297037 - RNA, 32 nt, Human
acaaaaucugucacauggcugcauaaucucag

SEQ ID NO: 297038 - RNA, 32 nt, Human
acaaaaucuguguacaaaaauuaguugcauuu

SEQ ID NO: 297039 - RNA, 22 nt, Human
acaaaaugaaaggaaaaagccu

SEQ ID NO: 297040 - RNA, 32 nt, Human
acaaaaugaaagugacuuucaagaaagaucag

SEQ ID NO: 297041 - RNA, 24 nt, Human
acaaaaugagggccucugcucuug

SEQ ID NO: 297042 - RNA, 32 nt, Human
acaaaaugccaaggguggacaggcgcuguggc

SEQ ID NO: 297043 - RNA, 32 nt, Human
acaaaaugcuuguccaggacucagccaugcac

SEQ ID NO: 297044 - RNA, 30 nt, Human
acaaaauggaaauuauuucaucaaaacuau

SEQ ID NO: 297045 - RNA, 32 nt, Human
acaaaauguacccaguauucuagguagugccc

SEQ ID NO: 297046 - RNA, 32 nt, Human
acaaaauguaguucccaugugccaaacaaaau

SEQ ID NO: 297047 - RNA, 32 nt, Human
acaaaaugugagccaggaaacccaguuuuuaa

SEQ ID NO: 297048 - RNA, 32 nt, Human
acaaaaugugcuguuuugguggggugggcaau

SEQ ID NO: 297049 - RNA, 32 nt, Human
acaaaaugugcuuuggggucagguguggagau

SEQ ID NO: 297050 - RNA, 32 nt, Human
acaaaauguucugcuagcuuguuuucuucaca

SEQ ID NO: 297051 - RNA, 32 nt, Human
acaaaauuagccaggcguaguggugcaugccu

SEQ ID NO: 297052 - RNA, 32 nt, Human
acaaaauuagccaggcgugguggugcaugccu

SEQ ID NO: 297053 - RNA, 32 nt, Human
acaaaauuagcugggugggguggugcaugccu

SEQ ID NO: 297054 - RNA, 32 nt, Human
acaaaauuagucgggcguaguggugcaugccu

SEQ ID NO: 297055 - RNA, 32 nt, Human
acaaaauuauuuuuauggucccuuuaacgagg

SEQ ID NO: 297056 - RNA, 32 nt, Human
acaaaauucccaucgauguugccaucagucau

SEQ ID NO: 297057 - RNA, 32 nt, Human
acaaaauucccuuuaugaacuuucgcuuuuua

SEQ ID NO: 297058 - RNA, 32 nt, Human
acaaaauugaacacaggacucuucugcucagc

SEQ ID NO: 297059 - RNA, 32 nt, Human
acaaaauugggaccuguucacauggcuaaacu

SEQ ID NO: 297060 - RNA, 32 nt, Human
acaaacaaaaaccaaccaaccaaccaaccaac

SEQ ID NO: 297061 - RNA, 32 nt, Human
acaaacaacauacaaaaguucucaucaugaua

SEQ ID NO: 297062 - RNA, 32 nt, Human
acaaacaacccccaaaucucagugacuuuaca

SEQ ID NO: 297063 - RNA, 32 nt, Human
acaaacaacugcuucaaacugugaauucugua

SEQ ID NO: 297064 - RNA, 32 nt, Human
acaaacaagaacaggccaugguuaaccaaagc

SEQ ID NO: 297065 - RNA, 22 nt, Human
acaaacaagagauggcaaagca

SEQ ID NO: 297066 - RNA, 32 nt, Human
acaaacaaggauagucuuggugaccuuuuaua

SEQ ID NO: 297067 - RNA, 32 nt, Human
acaaacaaggggauugagauuuacagagagag

SEQ ID NO: 297068 - RNA, 32 nt, Human
acaaacaauaugagugugcagaauguggagag

SEQ ID NO: 297069 - RNA, 32 nt, Human
acaaacaaugaccaaguauugcuuggcuuaac

SEQ ID NO: 297070 - RNA, 32 nt, Human
acaaacacagaaccacacagccagucccagga

SEQ ID NO: 297071 - RNA, 32 nt, Human
acaaacacaugcgcaggcuccugcaggcguga

SEQ ID NO: 297072 - RNA, 32 nt, Human
acaaacaccaaggaguggaggucagaguguca

SEQ ID NO: 297073 - RNA, 32 nt, Human
acaaacacucacugcaucgggacuuuuuaauu

SEQ ID NO: 297074 - RNA, 32 nt, Human
acaaacacugccuucugucaggcccugugcug

SEQ ID NO: 297075 - RNA, 24 nt, Human
acaaacacuguggggcacuugaua

SEQ ID NO: 297076 - RNA, 32 nt, Human
acaaacacugugguuguuugguuccauuauag

SEQ ID NO: 297077 - RNA, 32 nt, Human
acaaacacuuagccaccucugugcuccagggu

SEQ ID NO: 297078 - RNA, 32 nt, Human
acaaacagaaggacaggaagcgggagaaggca

SEQ ID NO: 297079 - RNA, 32 nt, Human
acaaacagcaauaacaaaaccaaaaagaugcc

SEQ ID NO: 297080 - RNA, 32 nt, Human
acaaacagccuucccuacucccugccagagca

SEQ ID NO: 297081 - RNA, 32 nt, Human
acaaacagcgacugagccccugguguauacug

SEQ ID NO: 297082 - RNA, 32 nt, Human
acaaacagcugcuuauaguggcaaaugcccac

SEQ ID NO: 297083 - RNA, 19 nt, Human
acaaacaggccugcugcua

SEQ ID NO: 297084 - RNA, 32 nt, Human
acaaacagguacaaaccagcugcguuacaggu

SEQ ID NO: 297085 - RNA, 32 nt, Human
acaaacagucucuuaguuacucauuuccaucu

SEQ ID NO: 297086 - RNA, 32 nt, Human
acaaacaguuuguuuuuaccucugccuccugg

SEQ ID NO: 297087 - RNA, 32 nt, Human
acaaacauaagggaacaaacagcaaccauaac

SEQ ID NO: 297088 - RNA, 32 nt, Human
acaaacauacacaccccuugacacccccuuac

SEQ ID NO: 297089 - RNA, 32 nt, Human
acaaacauagaucucaguuuuggaagggccuu

SEQ ID NO: 297090 - RNA, 21 nt, Human
acaaacauccaugagccccca

SEQ ID NO: 297091 - RNA, 32 nt, Human
acaaacauuucuucuaaucccugcuuucaguu

SEQ ID NO: 297092 - RNA, 32 nt, Human
acaaaccaaaaauacaccaaauguucugaaaa

SEQ ID NO: 297093 - RNA, 32 nt, Human
acaaaccaacacagcaucaucuaaaccaccaa

SEQ ID NO: 297094 - RNA, 32 nt, Human
acaaaccaacuccaccaaccucuggcucuuaa

SEQ ID NO: 297095 - RNA, 32 nt, Human
acaaaccaacuccaccaaccucuggcucuuac

SEQ ID NO: 297096 - RNA, 32 nt, Human
acaaaccacccaggcagugugauggaggcuau

SEQ ID NO: 297097 - RNA, 32 nt, Human
acaaaccaccccuccaccucuggaggucccac

SEQ ID NO: 297098 - RNA, 32 nt, Human
acaaaccagagccucugcgccuccacagggaa

SEQ ID NO: 297099 - RNA, 32 nt, Human
acaaaccaggaaugauuucauuucuccugaga

SEQ ID NO: 297100 - RNA, 32 nt, Human
acaaaccaggcaggugguguguguggacucac

SEQ ID NO: 297101 - RNA, 32 nt, Human
acaaaccaguguacucacuggucuccaucuuu

SEQ ID NO: 297102 - RNA, 32 nt, Human
acaaaccaucacacuaugauuuuauggagaug

SEQ ID NO: 297103 - RNA, 32 nt, Human
acaaaccaucucuccauuggaaaaggagcugu

SEQ ID NO: 297104 - RNA, 32 nt, Human
acaaaccaugcucuacuccacccccaaaguac

SEQ ID NO: 297105 - RNA, 32 nt, Human
acaaacccaggccugaugggaaaaaugauucc

SEQ ID NO: 297106 - RNA, 32 nt, Human
acaaacccgaggcagcauggagaggggccgug

SEQ ID NO: 297107 - RNA, 32 nt, Human
acaaacccuggcauguccuuccagaaaaacca

SEQ ID NO: 297108 - RNA, 32 nt, Human
acaaacccugggcugcucaggaugggcccaag

SEQ ID NO: 297109 - RNA, 32 nt, Human
acaaacccuggucucuccuuuuacagaugagg

SEQ ID NO: 297110 - RNA, 32 nt, Human
acaaaccucuaacccaggucuugacaccagcu

SEQ ID NO: 297111 - RNA, 24 nt, Human
acaaaccuggccaacauggugaaa

SEQ ID NO: 297112 - RNA, 32 nt, Human
acaaaccuguauggcauauuacuguacugauu

SEQ ID NO: 297113 - RNA, 32 nt, Human
acaaaccuuaauguguguaugugaacucacau

SEQ ID NO: 297114 - RNA, 32 nt, Human
acaaacgcauggaaccagaggaagaaaauggc

SEQ ID NO: 297115 - RNA, 32 nt, Human
acaaacgcugccacccuccacuucccaaccca

SEQ ID NO: 297116 - RNA, 20 nt, Human
acaaacgcuggagcagccca

SEQ ID NO: 297117 - RNA, 32 nt, Human
acaaacgugagccaucgcaccuagccucuuug

SEQ ID NO: 297118 - RNA, 32 nt, Human
acaaacguggcagagggcaagacgggcacuca

SEQ ID NO: 297119 - RNA, 32 nt, Human
acaaacuaaacccagaagagaggggugggcug

SEQ ID NO: 297120 - RNA, 32 nt, Human
acaaacucccaggugacauagauggcaucaau

SEQ ID NO: 297121 - RNA, 32 nt, Human
acaaacuccucaugauaacugcacacaaucug

SEQ ID NO: 297122 - RNA, 32 nt, Human
acaaacucucauguucccucuggacuucuguu

SEQ ID NO: 297123 - RNA, 32 nt, Human
acaaacugaaaauacaguagauaagcugucga

SEQ ID NO: 297124 - RNA, 32 nt, Human
acaaacugaaguaucugucucauccaaaaagu

SEQ ID NO: 297125 - RNA, 32 nt, Human
acaaacugacccauccugggccuuguucucca

SEQ ID NO: 297126 - RNA, 32 nt, Human
acaaacugcccuuaagagucauuuccuuguua

SEQ ID NO: 297127 - RNA, 32 nt, Human
acaaacugccuccuggagguuuuuagaaaugu

SEQ ID NO: 297128 - RNA, 32 nt, Human
acaaacuguccugguugcuggucagagggagg

SEQ ID NO: 297129 - RNA, 32 nt, Human
acaaacuguucccagcccuaggcugacaugag

SEQ ID NO: 297130 - RNA, 32 nt, Human
acaaacuguuuguuuuucuacuugcuccaucu

SEQ ID NO: 297131 - RNA, 32 nt, Human
acaaacuuaaugauuaaaagugauugagucuc

SEQ ID NO: 297132 - RNA, 31 nt, Human
acaaacuuccucucuggccucucaggaauca

SEQ ID NO: 297133 - RNA, 32 nt, Human
acaaacuucucaucuuuuugcuuuuauuccua

SEQ ID NO: 297134 - RNA, 32 nt, Human
acaaacuuggcugggcuuaguggugcaugccu

SEQ ID NO: 297135 - RNA, 32 nt, Human
acaaacuugugagcuuacugcagucagucaca

SEQ ID NO: 297136 - RNA, 32 nt, Human
acaaacuuuaccucauagccugugaagcaggu

SEQ ID NO: 297137 - RNA, 32 nt, Human
acaaacuuuaggguaaaaauugcgauuggaca

SEQ ID NO: 297138 - RNA, 21 nt, Human
acaaagaaaaagacuucugca

SEQ ID NO: 297139 - RNA, 23 nt, Human
acaaagaaaaaguuacccauagc

SEQ ID NO: 297140 - RNA, 32 nt, Human
acaaagaaagagaaaggggccgggcgcggugg

SEQ ID NO: 297141 - RNA, 32 nt, Human
acaaagaaauuagcugggcaugguggcaugca

SEQ ID NO: 297142 - RNA, 32 nt, Human
acaaagaaauuucccucccugccugcacaaua

SEQ ID NO: 297143 - RNA, 32 nt, Human
acaaagaacaugaacaaaaagcauuaaacugg

SEQ ID NO: 297144 - RNA, 25 nt, Human
acaaagaacuauuguuuugaccuug

SEQ ID NO: 297145 - RNA, 19 nt, Human
acaaagaacugaagcucuu

SEQ ID NO: 297146 - RNA, 24 nt, Human
acaaagaacugcuucuugcucuug

SEQ ID NO: 297147 - RNA, 32 nt, Human
acaaagaagggacuuggcaguuuaaaagccac

SEQ ID NO: 297148 - RNA, 32 nt, Human
acaaagacaacauuguuccuggaacgcccucu

SEQ ID NO: 297149 - RNA, 32 nt, Human
acaaagacaagcuucuguuauuaucauccugu

SEQ ID NO: 297150 - RNA, 32 nt, Human
acaaagacagugugacaaguucugagccccac

SEQ ID NO: 297151 - RNA, 32 nt, Human
acaaagacauugauucagccuguuuggcguuu

SEQ ID NO: 297152 - RNA, 32 nt, Human
acaaagaccgagcaaaagacgagugugccauu

SEQ ID NO: 297153 - RNA, 32 nt, Human
acaaagaccuguuuuugugacugccuugaguu

SEQ ID NO: 297154 - RNA, 32 nt, Human
acaaagacggcuucagcaccauccugcaccug

SEQ ID NO: 297155 - RNA, 32 nt, Human
acaaagacuaucuucccucccuucccugaauu

SEQ ID NO: 297156 - RNA, 32 nt, Human
acaaagacucccauaaggagguggugagagcg

SEQ ID NO: 297157 - RNA, 23 nt, Human
acaaagagacgaugaccacagca

SEQ ID NO: 297158 - RNA, 32 nt, Human
acaaagagaggaaggagaagugaggaagccag

SEQ ID NO: 297159 - RNA, 32 nt, Human
acaaagagauagagaaucucuuuuacuugaaa

SEQ ID NO: 297160 - RNA, 32 nt, Human
acaaagagccuccccgcgcucccgcucuccgc

SEQ ID NO: 297161 - RNA, 32 nt, Human
acaaagagcugcaaaccaggucuuuguuuugc

SEQ ID NO: 297162 - RNA, 32 nt, Human
acaaagaggaaauauuccaaagguacucagga

SEQ ID NO: 297163 - RNA, 32 nt, Human
acaaagaggagaagcacagaaagugggcucuc

SEQ ID NO: 297164 - RNA, 32 nt, Human
acaaagaggagguggcaaugguagauccaccc

SEQ ID NO: 297165 - RNA, 32 nt, Human
acaaagaggccugggauauuaggacuuugggg

SEQ ID NO: 297166 - RNA, 32 nt, Human
acaaagagugaaauauuguaaaugcuauuaua

SEQ ID NO: 297167 - RNA, 32 nt, Human
acaaagauaggaacccaggagcagcaguguuu

SEQ ID NO: 297168 - RNA, 31 nt, Human
acaaagaugauucucccuucuuauagacagg

SEQ ID NO: 297169 - RNA, 32 nt, Human
acaaagauggggagaaaccagagcagaaaagc

SEQ ID NO: 297170 - RNA, 32 nt, Human
acaaagauggugcuuauggggcagguucccua

SEQ ID NO: 297171 - RNA, 32 nt, Human
acaaagauuucuggaaguauuuugccaaccuu

SEQ ID NO: 297172 - RNA, 32 nt, Human
acaaagcaauugucugccucucccucugccuc

SEQ ID NO: 297173 - RNA, 32 nt, Human
acaaagcacacgauugcugggcacuguggcuc

SEQ ID NO: 297174 - RNA, 32 nt, Human
acaaagcacagaaacaguacauacacagcgua

SEQ ID NO: 297175 - RNA, 32 nt, Human
acaaagcagaguaauacuggaggcagaguagg

SEQ ID NO: 297176 - RNA, 32 nt, Human
acaaagcagcacuuaaggguggugcucuaaua

SEQ ID NO: 297177 - RNA, 32 nt, Human
acaaagcagggugggguaggugacauuugugu

SEQ ID NO: 297178 - RNA, 32 nt, Human
acaaagcagugcaguuggauuguaaggaaaaa

SEQ ID NO: 297179 - RNA, 32 nt, Human
acaaagcaguguaacugaaaauguuucuuuua

SEQ ID NO: 297180 - RNA, 32 nt, Human
acaaagcauaccagaucucaccagagaguccu

SEQ ID NO: 297181 - RNA, 32 nt, Human
acaaagcaugaagaugugaaaauaucaucuua

SEQ ID NO: 297182 - RNA, 32 nt, Human
acaaagcccccagagcugaauucauugaguau

SEQ ID NO: 297183 - RNA, 32 nt, Human
acaaagcccuggaggcucggccuugcuucucu

SEQ ID NO: 297184 - RNA, 32 nt, Human
acaaagcccuucaggcuggaguauaguggcau

SEQ ID NO: 297185 - RNA, 32 nt, Human
acaaagccucaagcaugcauaucuggucccuc

SEQ ID NO: 297186 - RNA, 32 nt, Human
acaaagccuuuaaccaacccucaaaccuuaau

SEQ ID NO: 297187 - RNA, 32 nt, Human
acaaagcggugacuggcuuugccuggcucugg

SEQ ID NO: 297188 - RNA, 22 nt, Human
acaaagcuaccacauguggaaa

SEQ ID NO: 297189 - RNA, 32 nt, Human
acaaagcuaguucugucuuuucagaaguccua

SEQ ID NO: 297190 - RNA, 32 nt, Human
acaaagcuaugcaugagcgaaauaucaaacuu

SEQ ID NO: 297191 - RNA, 32 nt, Human
acaaagcucccggcaacuuucucccucgcagc

SEQ ID NO: 297192 - RNA, 32 nt, Human
acaaagcugagcucaaaugucauucauauuca

SEQ ID NO: 297193 - RNA, 32 nt, Human
acaaagcugcuguggaucugucuuucaaacaa

SEQ ID NO: 297194 - RNA, 32 nt, Human
acacucgcuguguccccucuccuccccugugc

SEQ ID NO: 297195 - RNA, 32 nt, Human
acacucggagccuggcgauggcuuccagaaac

SEQ ID NO: 297196 - RNA, 32 nt, Human
acacucguuuccgaacugccucuccccaaaga

SEQ ID NO: 297197 - RNA, 32 nt, Human
acacucuacucuggcaaaggaaugaaguuauu

SEQ ID NO: 297198 - RNA, 32 nt, Human
acacucuagacccaaaggugugcuaaucacuu

SEQ ID NO: 297199 - RNA, 32 nt, Human
acacucuaguugcccaugucugauugggggcu

SEQ ID NO: 297200 - RNA, 32 nt, Human
acacucuauauacuaauuuucugcaagggaaa

SEQ ID NO: 297201 - RNA, 32 nt, Human
acacucuauauguaacuauaacuuucuagaua

SEQ ID NO: 297202 - RNA, 32 nt, Human
acacucuccaggcuggagugcaguggcacaau

SEQ ID NO: 297203 - RNA, 32 nt, Human
acacucucccggcuugcgcaggaggggccagc

SEQ ID NO: 297204 - RNA, 32 nt, Human
acacucucuucucugcugaguuugccuuguua

SEQ ID NO: 297205 - RNA, 32 nt, Human
acacucugagcaccuuguuuuagcgaacucua

SEQ ID NO: 297206 - RNA, 32 nt, Human
acacucugaggagcugguugugguguuuucca

SEQ ID NO: 297207 - RNA, 32 nt, Human
acacucugccaacauccucugauucuaggugu

SEQ ID NO: 297208 - RNA, 32 nt, Human
acacucuggagccccauugucagccccaggcc

SEQ ID NO: 297209 - RNA, 32 nt, Human
acacucugggaaugaggaacaagacuuuuucu

SEQ ID NO: 297210 - RNA, 32 nt, Human
acacucugggccggccuucugccugcauggac

SEQ ID NO: 297211 - RNA, 23 nt, Human
acacucuguccccaaguuggaca

SEQ ID NO: 297212 - RNA, 32 nt, Human
acacucugucugucuccccaagcugggcagcc

SEQ ID NO: 297213 - RNA, 32 nt, Human
acacucuuaaagugccuggguuuggaugauaa

SEQ ID NO: 297214 - RNA, 32 nt, Human
acacucuuacacucuucuguccuguuuaaugu

SEQ ID NO: 297215 - RNA, 32 nt, Human
acacucuucucacuugacauuuuagcuauaua

SEQ ID NO: 297216 - RNA, 32 nt, Human
acacucuuuccuccucuucacuuaaugcuggg

SEQ ID NO: 297217 - RNA, 32 nt, Human
acacugaaaccagugugauaaaaaccugccaa

SEQ ID NO: 297218 - RNA, 32 nt, Human
acacugaaagggcagagcaggccuaaggcucc

SEQ ID NO: 297219 - RNA, 32 nt, Human
acacugaaauauacacacagcaguagcaguag

SEQ ID NO: 297220 - RNA, 31 nt, Human
acacugaaccucucugagccucaguuccuua

SEQ ID NO: 297221 - RNA, 32 nt, Human
acacugaacgacugauuggugaugccacaaag

SEQ ID NO: 297222 - RNA, 32 nt, Human
acacugaacgccuuccuguaccgcacgggcca

SEQ ID NO: 297223 - RNA, 21 nt, Human
acacugaagaaaggcagaaug

SEQ ID NO: 297224 - RNA, 22 nt, Human
acacugaagacccucagcuguu

SEQ ID NO: 297225 - RNA, 32 nt, Human
acacugaaggaacaguuacccugcuuugccuc

SEQ ID NO: 297226 - RNA, 32 nt, Human
acacugaaggcugcaaagaacuucaccuuucc

SEQ ID NO: 297227 - RNA, 32 nt, Human
acacugacagcugugccuagccccggaugcca

SEQ ID NO: 297228 - RNA, 32 nt, Human
acacugacauaccccauguacacacacagauc

SEQ ID NO: 297229 - RNA, 32 nt, Human
acacugaccccuggccucucuggacaggagcu

SEQ ID NO: 297230 - RNA, 32 nt, Human
acacugacccucccccagggaggagagaggag

SEQ ID NO: 297231 - RNA, 32 nt, Human
acacugacccugacccacagcuugccuggcau

SEQ ID NO: 297232 - RNA, 32 nt, Human
acacugacuguugcuguaaaagugaauuugga

SEQ ID NO: 297233 - RNA, 32 nt, Human
acacugacuuuccuuaugauaauucuacagau

SEQ ID NO: 297234 - RNA, 32 nt, Human
acacugacuuucuccucccuccccugccaccu

SEQ ID NO: 297235 - RNA, 32 nt, Human
acacugagaauguaagaacuacaaacaaaauu

SEQ ID NO: 297236 - RNA, 32 nt, Human
acacugagaccagaaaagauggugcuaugcuu

SEQ ID NO: 297237 - RNA, 32 nt, Human
acacugagacuaagaauugaagcaaugcaguu

SEQ ID NO: 297238 - RNA, 32 nt, Human
acacugagagcugguggugccugcugucccag

SEQ ID NO: 297239 - RNA, 32 nt, Human
acacugagauggaaagcagagaugcauccauc

SEQ ID NO: 297240 - RNA, 32 nt, Human
acacugagauugccccagagcugcagugggca

SEQ ID NO: 297241 - RNA, 32 nt, Human
acacugagcaaguuuucaccuaucuggaaaaa

SEQ ID NO: 297242 - RNA, 19 nt, Human
acacugagccauacacccu

SEQ ID NO: 297243 - RNA, 32 nt, Human
acacugagccgggccagagggagaggagccga

SEQ ID NO: 297244 - RNA, 32 nt, Human
acacugagccuuucgcccuggaaguucuuggc

SEQ ID NO: 297245 - RNA, 32 nt, Human
acacugagcuuucuucuagggguggguaugaa

SEQ ID NO: 297246 - RNA, 32 nt, Human
acacugaggaaaaaugaagaagacugacaagc

SEQ ID NO: 297247 - RNA, 32 nt, Human
acacugaggcucagagagguuaagugacucag

SEQ ID NO: 297248 - RNA, 32 nt, Human
acacugaggguaggggacagggaggcucagga

SEQ ID NO: 297249 - RNA, 21 nt, Human
acacugagucggaggcgaagg

SEQ ID NO: 297250 - RNA, 32 nt, Human
acacugaucaaccacugaacugccuucuucca

SEQ ID NO: 297251 - RNA, 32 nt, Human
acacugaucugcuagugcuguaauauuguaaa

SEQ ID NO: 297252 - RNA, 32 nt, Human
acacugauuaaauaagaacuggagcaaguacu

SEQ ID NO: 297253 - RNA, 32 nt, Human
acacugauucuuucuucuucuuggcugaguca

SEQ ID NO: 297254 - RNA, 32 nt, Human
acacugcaacaacaggagugcaaacuucucua

SEQ ID NO: 297255 - RNA, 32 nt, Human
acacugcacuaggggagccccaggaaggcagc

SEQ ID NO: 297256 - RNA, 32 nt, Human
acacugcagccaaggacacagaggcucagaga

SEQ ID NO: 297257 - RNA, 32 nt, Human
acacugcaggcaggcuuuagagugcuuugaau

SEQ ID NO: 297258 - RNA, 32 nt, Human
acacugcagggcccaggagugggagcccaggc

SEQ ID NO: 297259 - RNA, 32 nt, Human
acacugcaguccagucuggaccacagagugag

SEQ ID NO: 297260 - RNA, 32 nt, Human
acacugcauaugguccccaucuggccucagag

SEQ ID NO: 297261 - RNA, 32 nt, Human
acacugcauaugguccccaucuggccugagag

SEQ ID NO: 297262 - RNA, 32 nt, Human
acacugcaugcacacacauacaccacagccac

SEQ ID NO: 297263 - RNA, 32 nt, Human
acacugcaugggaaaggcugagugucaugacu

SEQ ID NO: 297264 - RNA, 32 nt, Human
acacugccacuccagccugggugacagagcaa

SEQ ID NO: 297265 - RNA, 32 nt, Human
acacugccagcaaccucugcucucuggagagg

SEQ ID NO: 297266 - RNA, 32 nt, Human
acacugccagccccagggcuccagcccagccc

SEQ ID NO: 297267 - RNA, 32 nt, Human
acacugccagccccguguuagcaccugggccu

SEQ ID NO: 297268 - RNA, 32 nt, Human
acacugccaggggagccucacugugaagucua

SEQ ID NO: 297269 - RNA, 31 nt, Human
acacugcccaaggccaucacaggaggaauau

SEQ ID NO: 297270 - RNA, 22 nt, Human
acacugcccacucagcgaggaa

SEQ ID NO: 297271 - RNA, 20 nt, Human
acacugcccagcacaggggc

SEQ ID NO: 297272 - RNA, 32 nt, Human
acacugcccaggcuggagcauaguggcaagau

SEQ ID NO: 297273 - RNA, 19 nt, Human
acacugccccaccccagcc

SEQ ID NO: 297274 - RNA, 25 nt, Human
acacugcccccaacccucugccguu

SEQ ID NO: 297275 - RNA, 24 nt, Human
acacugcccccacccucagccguu

SEQ ID NO: 297276 - RNA, 23 nt, Human
acacugccccccaugccucagcc

SEQ ID NO: 297277 - RNA, 19 nt, Human
acacugccccccucccagc

SEQ ID NO: 297278 - RNA, 32 nt, Human
acacugccccugugguggagggcgggcugccu

SEQ ID NO: 297279 - RNA, 32 nt, Human
acacugcccugggguuuaccagcuggauuggc

SEQ ID NO: 297280 - RNA, 32 nt, Human
acacugccgccugcagaagguggagaguuaag

SEQ ID NO: 297281 - RNA, 32 nt, Human
acacugccuccacgagucuggagggcagcugg

SEQ ID NO: 297282 - RNA, 32 nt, Human
acacugccuccuuuuuauacagacacaaauau

SEQ ID NO: 297283 - RNA, 32 nt, Human
acacugccucuggagccagccugacaccaagg

SEQ ID NO: 297284 - RNA, 32 nt, Human
acacugccugauaugugagcaagagcaugaaa

SEQ ID NO: 297285 - RNA, 32 nt, Human
acacugccugcagcagucucuggguguguugu

SEQ ID NO: 297286 - RNA, 24 nt, Human
acacugccugccuuaagugaggaa

SEQ ID NO: 297287 - RNA, 32 nt, Human
acacugccugcucuuccauaucauggcccucc

SEQ ID NO: 297288 - RNA, 32 nt, Human
acacugccugggacaguguccugcauccacac

SEQ ID NO: 297289 - RNA, 32 nt, Human
acacugccuucaccaucuacaccagugacgcc

SEQ ID NO: 297290 - RNA, 32 nt, Human
acacugcgaacucucaggacuaccguuaccaa

SEQ ID NO: 297291 - RNA, 32 nt, Human
acacugcgaggacugccuugccacaggcccac

SEQ ID NO: 297292 - RNA, 32 nt, Human
acacugcucacugcagccucgaccucccaagg

SEQ ID NO: 297293 - RNA, 32 nt, Human
acacugcucauuuauccuauucucaugugcuu

SEQ ID NO: 297294 - RNA, 32 nt, Human
acacugcucugccucucugaaccucgguuucu

SEQ ID NO: 297295 - RNA, 21 nt, Human
acacugcugaaaucacacuac

SEQ ID NO: 297296 - RNA, 32 nt, Human
acacugcugaguguucagcuguguucagauaa

SEQ ID NO: 297297 - RNA, 32 nt, Human
acacugcugcacguagugccucaccagagcca

SEQ ID NO: 297298 - RNA, 32 nt, Human
acacugcugcacuccagccugugcaacagagc

SEQ ID NO: 297299 - RNA, 32 nt, Human
acacugcugcaucuugggucucagggacccag

SEQ ID NO: 297300 - RNA, 32 nt, Human
acacugcugccuggugcucccgccggcccaca

SEQ ID NO: 297301 - RNA, 32 nt, Human
acacugcuggacugcuccuggcucugucagca

SEQ ID NO: 297302 - RNA, 32 nt, Human
acacugcugggcaggcgggcaggcaggccugg

SEQ ID NO: 297303 - RNA, 32 nt, Human
acacugcugggcugggugaauggccuggucuc

SEQ ID NO: 297304 - RNA, 32 nt, Human
acacugcuguucuuuaaaugcguuccucaucc

SEQ ID NO: 297305 - RNA, 32 nt, Human
acacugcuuacacugcacucugacccuguagu

SEQ ID NO: 297306 - RNA, 24 nt, Human
acacugcuucccuuaugugaagaa

SEQ ID NO: 297307 - RNA, 32 nt, Human
acacuggaaaacaaauucccccaaaacacaug

SEQ ID NO: 297308 - RNA, 32 nt, Human
acacuggaaaauucacauuggagagaaacuuu

SEQ ID NO: 297309 - RNA, 32 nt, Human
acacuggaaggagcgcucucacuguggaagag

SEQ ID NO: 297310 - RNA, 32 nt, Human
acacuggaagugaaauuuuaaucaaacauaaa

SEQ ID NO: 297311 - RNA, 22 nt, Human
acacuggaaucccagugaggaa

SEQ ID NO: 297312 - RNA, 32 nt, Human
acacuggacagugcagguguagacggaguuca

SEQ ID NO: 297313 - RNA, 19 nt, Human
acacuggagaaaagccaua

SEQ ID NO: 297314 - RNA, 32 nt, Human
acacuggagagaaaccuaugaauguaaggaau

SEQ ID NO: 297315 - RNA, 24 nt, Human
acacuggagaggugauggggcagg

SEQ ID NO: 297316 - RNA, 32 nt, Human
acacuggagaucaugaugaacuuuuggcugaa

SEQ ID NO: 297317 - RNA, 23 nt, Human
acacuggagcccaggaguuugag

SEQ ID NO: 297318 - RNA, 21 nt, Human
acacuggagcccgcugcaggc

SEQ ID NO: 297319 - RNA, 32 nt, Human
acacuggaggcugagucaggagaaucacuuga

SEQ ID NO: 297320 - RNA, 20 nt, Human
acacuggagggcccccgagg

SEQ ID NO: 297321 - RNA, 32 nt, Human
acacuggaggugggggacgggaagggacuggg

SEQ ID NO: 297322 - RNA, 32 nt, Human
acacuggauccagaagcuauggaaccagcagu

SEQ ID NO: 297323 - RNA, 32 nt, Human
acacuggcacacacacauacacacauaugcac

SEQ ID NO: 297324 - RNA, 32 nt, Human
acacuggcaggugcuccucuccuuggcaauuc

SEQ ID NO: 297325 - RNA, 32 nt, Human
acacuggcccauuacauugaugacauuaugcu

SEQ ID NO: 297326 - RNA, 32 nt, Human
acacuggccccagggcccugcugccugggccu

SEQ ID NO: 297327 - RNA, 32 nt, Human
acacuggccgagucucugggucugucuacacu

SEQ ID NO: 297328 - RNA, 32 nt, Human
acacuggccuccagaagggcagcuccacaggg

SEQ ID NO: 297329 - RNA, 32 nt, Human
acacuggccuccauucugacaucugggcuggg

SEQ ID NO: 297330 - RNA, 32 nt, Human
acacuggcucauauuccugcagccuggaggcc

SEQ ID NO: 297331 - RNA, 32 nt, Human
acacuggcucgcagccucccccggcugcuggu

SEQ ID NO: 297332 - RNA, 20 nt, Human
acacuggcugcaagugguua

SEQ ID NO: 297333 - RNA, 32 nt, Human
acacugggaacuccagaaguuguggggagagu

SEQ ID NO: 297334 - RNA, 32 nt, Human
acacugggagcacuauuuccaugggcagcagg

SEQ ID NO: 297335 - RNA, 21 nt, Human
acacugggaggccgaggcagg

SEQ ID NO: 297336 - RNA, 32 nt, Human
acacugggaggcggggcaggacugggucugga

SEQ ID NO: 297337 - RNA, 32 nt, Human
acacugggaguuguucucccuacucuagaagu

SEQ ID NO: 297338 - RNA, 32 nt, Human
acacugggccugggccagggccccagagcucc

SEQ ID NO: 297339 - RNA, 32 nt, Human
acacuggggcugccuuucucugacucugucuu

SEQ ID NO: 297340 - RNA, 32 nt, Human
acacuggggcugggcauggugguucacaccug

SEQ ID NO: 297341 - RNA, 32 nt, Human
acacuggggguuuccuuggcagcuggggucau

SEQ ID NO: 297342 - RNA, 32 nt, Human
acacuggggugaagugggcaggagaauagaua

SEQ ID NO: 297343 - RNA, 20 nt, Human
acacuggucaaguaucugcu

SEQ ID NO: 297344 - RNA, 16 nt, Human
acacuggucacaggca

SEQ ID NO: 297345 - RNA, 32 nt, Human
acacuggucacuggcccugcacacugggcuau

SEQ ID NO: 297346 - RNA, 32 nt, Human
acacuggucucaaacuccugaccucaggcgau

SEQ ID NO: 297347 - RNA, 32 nt, Human
acacuggucucaaacuccugaccucaggugau

SEQ ID NO: 297348 - RNA, 32 nt, Human
acacuggugcgaucauagcucacugcagccuc

SEQ ID NO: 297349 - RNA, 32 nt, Human
acacugguuucuugcuuuguuuucccuggcua

SEQ ID NO: 297350 - RNA, 32 nt, Human
acacugguuuuccccaaagcuggcaguuuugu

SEQ ID NO: 297351 - RNA, 32 nt, Human
acacuguaaauccuggccuuaagcaaguuaua

SEQ ID NO: 297352 - RNA, 32 nt, Human
acacuguaaucaggauaacacaagcuuagugu

SEQ ID NO: 297353 - RNA, 32 nt, Human
acacuguacccugcucccagcaucacaaggca

SEQ ID NO: 297354 - RNA, 32 nt, Human
acacuguaccuggcuucucuucuuccuuuccu

SEQ ID NO: 297355 - RNA, 32 nt, Human
acacuguacuguacuaucuugcucugaguagu

SEQ ID NO: 297356 - RNA, 32 nt, Human
acacuguagccagaauggaauggucuuucugu

SEQ ID NO: 297357 - RNA, 32 nt, Human
acacuguaguuacugccuagccagcagcaguc

SEQ ID NO: 297358 - RNA, 32 nt, Human
acacuguauacauaugccaaaauaucauuuug

SEQ ID NO: 297359 - RNA, 32 nt, Human
acacugucacccaggcuggagugcaguguugc

SEQ ID NO: 297360 - RNA, 32 nt, Human
acacugucaggccaaccaugcacuccacaaag

SEQ ID NO: 297361 - RNA, 22 nt, Human
acacugucauugaagugaggaa

SEQ ID NO: 297362 - RNA, 32 nt, Human
acacuguccagggaaagagccaggaauggcag

SEQ ID NO: 297363 - RNA, 32 nt, Human
acacugucccauagccucauugggcucccaga

SEQ ID NO: 297364 - RNA, 32 nt, Human
acacuguccugccuuuuccucuagaauuuuau

SEQ ID NO: 297365 - RNA, 32 nt, Human
acacugucgccaggcuggagugcaguggugcg

SEQ ID NO: 297366 - RNA, 32 nt, Human
acacugucgcccaaucuggagugcacuggcgc

SEQ ID NO: 297367 - RNA, 32 nt, Human
acacugucggacuugcuuucugcuuuaugaug

SEQ ID NO: 297368 - RNA, 32 nt, Human
acacugucuuuuaguggugccuaaaauaaugg

SEQ ID NO: 297369 - RNA, 17 nt, Human
acacugugaaccacuua

SEQ ID NO: 297370 - RNA, 32 nt, Human
acacugugcagcccauccccucccagaaauag

SEQ ID NO: 297371 - RNA, 32 nt, Human
acacugugcagggccacacaaggggcugcacu

SEQ ID NO: 297372 - RNA, 18 nt, Human
acacugugcauaccuuga

SEQ ID NO: 297373 - RNA, 21 nt, Human
acacuguggcccaggcuggac

SEQ ID NO: 297374 - RNA, 32 nt, Human
acacuguggcccaggcuggacuccagcacagu

SEQ ID NO: 297375 - RNA, 32 nt, Human
acacuguggggaggaggaggaagaagaggagg

SEQ ID NO: 297376 - RNA, 32 nt, Human
acacugugguagggguuacaaauguuuauggg

SEQ ID NO: 297377 - RNA, 32 nt, Human
acacugugugaggcugugucucugccauccaa

SEQ ID NO: 297378 - RNA, 32 nt, Human
acacuguguuaucaaccauuaagaagaaagaa

SEQ ID NO: 297379 - RNA, 32 nt, Human
acacuguucacaaagguuuugucuccuuucca

SEQ ID NO: 297380 - RNA, 32 nt, Human
acacuguucagaagaugaacuaaacucagcag

SEQ ID NO: 297381 - RNA, 32 nt, Human
acacuguucaggcugaggcaggagaauugcuu

SEQ ID NO: 297382 - RNA, 32 nt, Human
acacuguugcccaggcuggagugcagugacgc

SEQ ID NO: 297383 - RNA, 32 nt, Human
acacuguugcccaggcuggagugcaguggcgu

SEQ ID NO: 297384 - RNA, 32 nt, Human
acacuguugguuggaauguaaagugguauaac

SEQ ID NO: 297385 - RNA, 32 nt, Human
acacuguugucuuuuaaaaugcuuccaaccca

SEQ ID NO: 297386 - RNA, 32 nt, Human
acacuguuugggaaaguguuccagcauagucc

SEQ ID NO: 297387 - RNA, 24 nt, Human
acacuguuuggucaaguuaaggaa

SEQ ID NO: 297388 - RNA, 32 nt, Human
acacuguuuguguagccaagaggacagaauua

SEQ ID NO: 297389 - RNA, 32 nt, Human
acacuuaaaccagcuuugcggggcugucgggg

SEQ ID NO: 297390 - RNA, 32 nt, Human
acacuuaaggaccaggacugggcacagccagc

SEQ ID NO: 297391 - RNA, 32 nt, Human
acacuuaauaacacgugaaacuauuuauguga

SEQ ID NO: 297392 - RNA, 21 nt, Human
acacuuaauuauauuuauggg

SEQ ID NO: 297393 - RNA, 32 nt, Human
acacuuacacauacuugaaacuuggaauaaaa

SEQ ID NO: 297394 - RNA, 22 nt, Human
acacuuaccccauggcugcaca

SEQ ID NO: 297395 - RNA, 32 nt, Human
acacuuaccugacagcggauccacaauauucu

SEQ ID NO: 297396 - RNA, 32 nt, Human
acacuuagaagagggaaaaugacaaguucagg

SEQ ID NO: 297397 - RNA, 32 nt, Human
acacuuagccuucugaagugcucaucucuugc

SEQ ID NO: 297398 - RNA, 32 nt, Human
acacuuagggacaggucacuaagcagaauagg

SEQ ID NO: 297399 - RNA, 32 nt, Human
acacuuagggguauggguugugcuccacuucc

SEQ ID NO: 297400 - RNA, 32 nt, Human
acacuuaguucagaaaccuuaaaggauuugaa

SEQ ID NO: 297401 - RNA, 18 nt, Human
acacuucaacuaaaaaua

SEQ ID NO: 297402 - RNA, 32 nt, Human
acacuucagaagcaaugggggcagagacaugu

SEQ ID NO: 297403 - RNA, 32 nt, Human
acacuucagauacgaccaucacggccacaugg

SEQ ID NO: 297404 - RNA, 32 nt, Human
acacuucaggaguccucagcuagugacauggu

SEQ ID NO: 297405 - RNA, 32 nt, Human
acacuucauacauacagagaacuuaucauuaa

SEQ ID NO: 297406 - RNA, 32 nt, Human
acacuuccaucuuucuuuugucuucauuucac

SEQ ID NO: 297407 - RNA, 32 nt, Human
acacuucccacacaugauccuucuucccuuca

SEQ ID NO: 297408 - RNA, 32 nt, Human
acacuucccacacgagcugcggcugccagccu

SEQ ID NO: 297409 - RNA, 32 nt, Human
acacuucccagagaggauucuagucugguaaa

SEQ ID NO: 297410 - RNA, 32 nt, Human
acacuuccccucccccaggagcccucaucugc

SEQ ID NO: 297411 - RNA, 32 nt, Human
acacuucccugccuugugucuuuugcuaaaua

SEQ ID NO: 297412 - RNA, 32 nt, Human
acacuucccuuucgcgacucaggcucuggugc

SEQ ID NO: 297413 - RNA, 32 nt, Human
acacuucguaucucuucucucuccucuguccu

SEQ ID NO: 297414 - RNA, 32 nt, Human
acacuucgugagccucccuguagccguggacc

SEQ ID NO: 297415 - RNA, 32 nt, Human
acacuucuacaaauaucaauuugcccaagacc

SEQ ID NO: 297416 - RNA, 32 nt, Human
acacuucucaacaguuuccuuuuuguuuuccu

SEQ ID NO: 297417 - RNA, 32 nt, Human
acacuucucacccccucacacaggcccagggg

SEQ ID NO: 297418 - RNA, 32 nt, Human
acacuucuccugccucagccucccagguagcc

SEQ ID NO: 297419 - RNA, 32 nt, Human
acacuucucugggcugcacagcagaaacguug

SEQ ID NO: 297420 - RNA, 32 nt, Human
acacuucucuuccucuugcccucccugccucu

SEQ ID NO: 297421 - RNA, 32 nt, Human
acacuucugagguacgguaucucucuccagcc

SEQ ID NO: 297422 - RNA, 32 nt, Human
acacuucugcagagacaaagcauuucacugca

SEQ ID NO: 297423 - RNA, 32 nt, Human
acacuucuguuucaugguuaagacagaaucag

SEQ ID NO: 297424 - RNA, 32 nt, Human
acacuucuucucuugacugccucucucuuacc

SEQ ID NO: 297425 - RNA, 32 nt, Human
acacuucuugaaacagccugggugacgguccu

SEQ ID NO: 297426 - RNA, 32 nt, Human
acacuugaaaauucuaugcaagagcaccaggc

SEQ ID NO: 297427 - RNA, 32 nt, Human
acacuugaaaucaucggucucaucucaaguca

SEQ ID NO: 297428 - RNA, 32 nt, Human
acacuugagaaagaauccucuaaaaaucccgg

SEQ ID NO: 297429 - RNA, 32 nt, Human
acacuugagccuggaaaagguugcagugagcu

SEQ ID NO: 297430 - RNA, 32 nt, Human
acacuugaggcuucugcuguguguucuuuugu

SEQ ID NO: 297431 - RNA, 32 nt, Human
acacuugcagagcugcuggaggugaggucagg

SEQ ID NO: 297432 - RNA, 32 nt, Human
acacuugcaugccaacuccuuccaaauucauu

SEQ ID NO: 297433 - RNA, 32 nt, Human
acacuugcccucaugugacacugggugacagu

SEQ ID NO: 297434 - RNA, 32 nt, Human
acacuugccucccauccugccugcagaaaacc

SEQ ID NO: 297435 - RNA, 32 nt, Human
acacuugcuaucucuugcugcugcuguuucau

SEQ ID NO: 297436 - RNA, 18 nt, Human
acacuugcuccagaaaua

SEQ ID NO: 297437 - RNA, 32 nt, Human
acacuugcuuaggggcucuccugggccccaca

SEQ ID NO: 297438 - RNA, 32 nt, Human
acacuugcuucaaugugcacaaacuuuguuuc

SEQ ID NO: 297439 - RNA, 32 nt, Human
acacuuggaugcauucuugcucucacagaauu

SEQ ID NO: 297440 - RNA, 32 nt, Human
acacuuggccguggcugaggggagagggcagc

SEQ ID NO: 297441 - RNA, 19 nt, Human
acacuuggcuggguuucua

SEQ ID NO: 297442 - RNA, 32 nt, Human
acacuuggcuguguguggaggcauuuugguug

SEQ ID NO: 297443 - RNA, 32 nt, Human
acacuuggggaaaagugaggccagucugcccg

SEQ ID NO: 297444 - RNA, 19 nt, Human
acacuuggggccaagaaua

SEQ ID NO: 297445 - RNA, 32 nt, Human
acacuugggguaaacacuauccaugcauuacu

SEQ ID NO: 297446 - RNA, 32 nt, Human
acacuugggguggccuaauaccuaggaagaug

SEQ ID NO: 297447 - RNA, 32 nt, Human
acacuugguagaagaaauugaaggguuacuca

SEQ ID NO: 297448 - RNA, 16 nt, Human
acacuugguccacuua

SEQ ID NO: 297449 - RNA, 32 nt, Human
acacuugguccauccauuuccaaaccuccacu

SEQ ID NO: 297450 - RNA, 32 nt, Human
acacuugguuccucagaaagccaagcccacug

SEQ ID NO: 297451 - RNA, 32 nt, Human
acacuugguuccucagaaagccaagcccgcug

SEQ ID NO: 297452 - RNA, 32 nt, Human
acacuuguaauuacauugcagcaaggaauggg

SEQ ID NO: 297453 - RNA, 32 nt, Human
acacuugucaggcagaaaagguagugaccggc

SEQ ID NO: 297454 - RNA, 32 nt, Human
acacuugugacugaaccaugcccaguuuaugc

SEQ ID NO: 297455 - RNA, 32 nt, Human
acacuugugcagcugcaaccaccauauccagg

SEQ ID NO: 297456 - RNA, 32 nt, Human
acacuuguguggaaugaaaacuugccaguuua

SEQ ID NO: 297457 - RNA, 32 nt, Human
acacuuguuacgaauccucccugcacugcauu

SEQ ID NO: 297458 - RNA, 32 nt, Human
acacuuguuccugcuugcuccuuuccccucuc

SEQ ID NO: 297459 - RNA, 32 nt, Human
acacuuguucucuugacugccucucucuuacc

SEQ ID NO: 297460 - RNA, 32 nt, Human
acacuuuacauacauuaucucauuuaauuccc

SEQ ID NO: 297461 - RNA, 32 nt, Human
acacuuuauauguguucacacauguaaguaca

SEQ ID NO: 297462 - RNA, 32 nt, Human
acacuuuauucugauuacagugcauugaauuu

SEQ ID NO: 297463 - RNA, 32 nt, Human
acacuuucaauggggaggcccacccaguggcc

SEQ ID NO: 297464 - RNA, 32 nt, Human
acacuuucacacuuaaacucuguggauaaauu

SEQ ID NO: 297465 - RNA, 32 nt, Human
acacuuucauaaggaucacagguuacguguuc

SEQ ID NO: 297466 - RNA, 32 nt, Human
acacuuuccaagcagagagcugaagugaaggc

SEQ ID NO: 297467 - RNA, 32 nt, Human
acacuuucccucccaccugccugcuccuggcg

SEQ ID NO: 297468 - RNA, 32 nt, Human
acacuuucccucucuggaccucaguuucccuc

SEQ ID NO: 297469 - RNA, 32 nt, Human
acacuuuccguuuucaugcagaauaaaucuaa

SEQ ID NO: 297470 - RNA, 20 nt, Human
acacuuuccugagaugcacu

SEQ ID NO: 297471 - RNA, 32 nt, Human
acacuuuccuuaaaauguugucaacagacaca

SEQ ID NO: 297472 - RNA, 32 nt, Human
acacuuucuaauucuacacuuccagguugaca

SEQ ID NO: 297473 - RNA, 32 nt, Human
acacuuucugacugcaacuucugucccuuguu

SEQ ID NO: 297474 - RNA, 32 nt, Human
acacuuugagacacaggaagcagcugaaggag

SEQ ID NO: 297475 - RNA, 32 nt, Human
acacuuugcccaagccuagucccguuucauca

SEQ ID NO: 297476 - RNA, 32 nt, Human
acacuuugcuuguauuuuaaaaggaggauaua

SEQ ID NO: 297477 - RNA, 32 nt, Human
acacuuugcuuugcacgauaacuuguaugcga

SEQ ID NO: 297478 - RNA, 32 nt, Human
acacuuugggagacugaagugggcagaucauu

SEQ ID NO: 297479 - RNA, 32 nt, Human
acacuuugggaggcugagauggguggauugcu

SEQ ID NO: 297480 - RNA, 32 nt, Human
acacuuugggagguggaggcagguggaucacg

SEQ ID NO: 297481 - RNA, 32 nt, Human
acacuuugggggauccaaaaagagcugcaauu

SEQ ID NO: 297482 - RNA, 32 nt, Human
acacuuugguagaccgaagugggcagaucacc

SEQ ID NO: 297483 - RNA, 32 nt, Human
acacuuuggucacaucugucucuagaugguca

SEQ ID NO: 297484 - RNA, 32 nt, Human
acacuuuuaugaccaccucuuucccagauuau

SEQ ID NO: 297485 - RNA, 32 nt, Human
acacuuuucaaaagaagacaucuguggccaac

SEQ ID NO: 297486 - RNA, 18 nt, Human
acacuuuucacaaaaaua

SEQ ID NO: 297487 - RNA, 32 nt, Human
acacuuuuccacccuccaccaccccaaccuca

SEQ ID NO: 297488 - RNA, 32 nt, Human
acacuuuugcccugcagccucaguuuugaauu

SEQ ID NO: 297489 - RNA, 32 nt, Human
acacuuuugccucucaaguugagacugccucu

SEQ ID NO: 297490 - RNA, 32 nt, Human
acacuuuugucaucccaagagcuguguuacac

SEQ ID NO: 297491 - RNA, 32 nt, Human
acacuuuuucaucaucuaaacugauucgcaua

SEQ ID NO: 297492 - RNA, 32 nt, Human
acacuuuuuccauguugaacaaaugccaacuu

SEQ ID NO: 297493 - RNA, 32 nt, Human
acacuuuuucccacccuuuuaaagcuacaagu

SEQ ID NO: 297494 - RNA, 32 nt, Human
acacuuuuucugcuuuucuuaauccuuuucca

SEQ ID NO: 297495 - RNA, 32 nt, Human
acacuuuuucuuuccgguuugccggaauaaac

SEQ ID NO: 297496 - RNA, 32 nt, Human
acacuuuuuguagacauggguaccaaaaauac

SEQ ID NO: 297497 - RNA, 20 nt, Human
acagaaaaaaugggagcaag

SEQ ID NO: 297498 - RNA, 32 nt, Human
acagaaaaaguaaacugucaaggaauucagag

SEQ ID NO: 297499 - RNA, 23 nt, Human
acagaaaaaugccuugagggcaa

SEQ ID NO: 297500 - RNA, 32 nt, Human
acagaaaaauuagccaggcauggugguagaug

SEQ ID NO: 297501 - RNA, 32 nt, Human
acagaaaaauuagcugggugugguggugggca

SEQ ID NO: 297502 - RNA, 20 nt, Human
acagaaaaauugagaggaag

SEQ ID NO: 297503 - RNA, 32 nt, Human
acagaaaacaucagggucuuggaacaccagag

SEQ ID NO: 297504 - RNA, 32 nt, Human
acagaaaaccaccagacucacacagcuuguau

SEQ ID NO: 297505 - RNA, 32 nt, Human
acagaaaacccgcaaucgagcaucaucgacuc

SEQ ID NO: 297506 - RNA, 32 nt, Human
acagaaaacugaucuguagauaacgagggaga

SEQ ID NO: 297507 - RNA, 19 nt, Human
acagaaaagaaaagaaaag

SEQ ID NO: 297508 - RNA, 17 nt, Human
acagaaaagaaaagcag

SEQ ID NO: 297509 - RNA, 19 nt, Human
acagaaaagaaagcaguaa

SEQ ID NO: 297510 - RNA, 32 nt, Human
acagaaaagaagauggagagaccaccuucacu

SEQ ID NO: 297511 - RNA, 22 nt, Human
acagaaaagacagaagaugcaa

SEQ ID NO: 297512 - RNA, 31 nt, Human
acagaaaagagacauuucagcugugauuaug

SEQ ID NO: 297513 - RNA, 32 nt, Human
acagaaaagaggaagaggagaauggauguugg

SEQ ID NO: 297514 - RNA, 16 nt, Human
acagaaaagagguaag

SEQ ID NO: 297515 - RNA, 18 nt, Human
acagaaaagauauagcaa

SEQ ID NO: 297516 - RNA, 32 nt, Human
acagaaaagaugaccccagcuccugacacaca

SEQ ID NO: 297517 - RNA, 19 nt, Human
acagaaaagcaaauagcaa

SEQ ID NO: 297518 - RNA, 18 nt, Human
acagaaaagcaagagcaa

SEQ ID NO: 297519 - RNA, 19 nt, Human
acagaaaagccugagauaa

SEQ ID NO: 297520 - RNA, 32 nt, Human
acagaaaagccugcuuguugguuuaguuggau

SEQ ID NO: 297521 - RNA, 19 nt, Human
acagaaaaggaaagaagca

SEQ ID NO: 297522 - RNA, 19 nt, Human
acagaaaaggaagaggaag

SEQ ID NO: 297523 - RNA, 19 nt, Human
acagaaaaguacuugcagg

SEQ ID NO: 297524 - RNA, 18 nt, Human
acagaaaaguagcgcagg

SEQ ID NO: 297525 - RNA, 20 nt, Human
acagaaaaguggaggccaag

SEQ ID NO: 297526 - RNA, 18 nt, Human
acagaaaaguuccccaag

SEQ ID NO: 297527 - RNA, 18 nt, Human
acagaaaaguucuccaag

SEQ ID NO: 297528 - RNA, 19 nt, Human
acagaaaaguugggaaaag

SEQ ID NO: 297529 - RNA, 19 nt, Human
acagaaaauaaaaaagcaa

SEQ ID NO: 297530 - RNA, 17 nt, Human
acagaaaauaaaaagca

SEQ ID NO: 297531 - RNA, 32 nt, Human
acagaaaaucauuguaagacaauuuauuaauu

SEQ ID NO: 297532 - RNA, 32 nt, Human
acagaaaaugaugcucucuccugccaaguccc

SEQ ID NO: 297533 - RNA, 19 nt, Human
acagaaaauguacagcaag

SEQ ID NO: 297534 - RNA, 19 nt, Human
acagaaaauuaaaaggcaa

SEQ ID NO: 297535 - RNA, 32 nt, Human
acagaaacaacuggcaaaaaugaacuaagauu

SEQ ID NO: 297536 - RNA, 32 nt, Human
acagaaacacaaaacuuugacuugacuugcga

SEQ ID NO: 297537 - RNA, 32 nt, Human
acagaaacacagagaaggcuagguaugagagg

SEQ ID NO: 297538 - RNA, 28 nt, Human
acagaaacacucccagggacucugggga

SEQ ID NO: 297539 - RNA, 32 nt, Human
acagaaacacuucagaagcaaugggggcagag

SEQ ID NO: 297540 - RNA, 18 nt, Human
acagaaacagagaguaag

SEQ ID NO: 297541 - RNA, 32 nt, Human
acagaaacagcaucuucgcuacaaccacugac

SEQ ID NO: 297542 - RNA, 32 nt, Human
acagaaacaguuuccccacugaugggaccaga

SEQ ID NO: 297543 - RNA, 32 nt, Human
acagaaacauagcugaggaacaaauagaccau

SEQ ID NO: 297544 - RNA, 32 nt, Human
acagaaaccaccugcguccacacccucacugc

SEQ ID NO: 297545 - RNA, 19 nt, Human
acagaaaccagaaaagcaa

SEQ ID NO: 297546 - RNA, 32 nt, Human
acagaaaccagccucagaguccggggcaggag

SEQ ID NO: 297547 - RNA, 32 nt, Human
acagaaaccagucauggcccugccuuugcccc

SEQ ID NO: 297548 - RNA, 22 nt, Human
acagaaaccaguccugcucucc

SEQ ID NO: 297549 - RNA, 28 nt, Human
acagaaaccccucuucuccccgcccucc

SEQ ID NO: 297550 - RNA, 20 nt, Human
acagaaacguguagagcaag

SEQ ID NO: 297551 - RNA, 32 nt, Human
acagaaacuggagugcuugaaggagcugcaga

SEQ ID NO: 297552 - RNA, 18 nt, Human
acagaaacuugagagaag

SEQ ID NO: 297553 - RNA, 31 nt, Human
acagaaacuugcccugugccuguguccccca

SEQ ID NO: 297554 - RNA, 32 nt, Human
acagaaagaagaaaggaaagaaaggaaccaga

SEQ ID NO: 297555 - RNA, 32 nt, Human
acagaaagacagggagaaagagaaacagaaaa

SEQ ID NO: 297556 - RNA, 32 nt, Human
acagaaagagacauuguucuuuuccugagucu

SEQ ID NO: 297557 - RNA, 18 nt, Human
acagaaagagcgagcgag

SEQ ID NO: 297558 - RNA, 20 nt, Human
acagaaagaggaggagcaag

SEQ ID NO: 297559 - RNA, 22 nt, Human
acagaaagaggaguggucuuug

SEQ ID NO: 297560 - RNA, 17 nt, Human
acagaaagagggacaag

SEQ ID NO: 297561 - RNA, 32 nt, Human
acagaaagagguggggguaaacaaugagcuca

SEQ ID NO: 297562 - RNA, 24 nt, Human
acagaaagauugguaagagccaag

SEQ ID NO: 297563 - RNA, 32 nt, Human
acagaaagauugguggacaggagcagcggccg

SEQ ID NO: 297564 - RNA, 32 nt, Human
acagaaagccugggugacauuugggagacaug

SEQ ID NO: 297565 - RNA, 32 nt, Human
acagaaagcgaagauggugagagccagcccgg

SEQ ID NO: 297566 - RNA, 32 nt, Human
acagaaaggaagcaggacagcagggccccucu

SEQ ID NO: 297567 - RNA, 22 nt, Human
acagaaaggagcagagagcaag

SEQ ID NO: 297568 - RNA, 18 nt, Human
acagaaaggaugagacaa

SEQ ID NO: 297569 - RNA, 32 nt, Human
acagaaagguucuguuggauucugagcggaac

SEQ ID NO: 297570 - RNA, 19 nt, Human
acagaaaguagggaggaag

SEQ ID NO: 297571 - RNA, 32 nt, Human
acagaaaguagggaggaaggggaccaagccag

SEQ ID NO: 297572 - RNA, 20 nt, Human
acagaaagugcugagccaag

SEQ ID NO: 297573 - RNA, 32 nt, Human
acagaaaguucaggagcccuggaaaggagaag

SEQ ID NO: 297574 - RNA, 32 nt, Human
acagaaaguuggauucagagucuggaaagaug

SEQ ID NO: 297575 - RNA, 17 nt, Human
acagaaauaaagagcaa

SEQ ID NO: 297576 - RNA, 32 nt, Human
acagaaauaccugaaauucaguaguacuucau

SEQ ID NO: 297577 - RNA, 20 nt, Human
acagaaauacgcagagcaag

SEQ ID NO: 297578 - RNA, 20 nt, Human
acagaaauagaagaaagcaa

SEQ ID NO: 297579 - RNA, 21 nt, Human
acagaaauagaagaaagcaag

SEQ ID NO: 297580 - RNA, 32 nt, Human
acagaaauaggagcagagaaaagggaaugaga

SEQ ID NO: 297581 - RNA, 32 nt, Human
acagaaauauuccuacugucuuuggaaacccu

SEQ ID NO: 297582 - RNA, 18 nt, Human
acagaaaucaagaguaag

SEQ ID NO: 297583 - RNA, 25 nt, Human
acagaaaucugaagaaaggcugaaa

SEQ ID NO: 297584 - RNA, 24 nt, Human
acagaaaugcugucugagagcaag

SEQ ID NO: 297585 - RNA, 32 nt, Human
acagaaauucauuaugcugcuaauuuaacgug

SEQ ID NO: 297586 - RNA, 32 nt, Human
acagaaauugaaaaugaccaaaaucaggaacc

SEQ ID NO: 297587 - RNA, 32 nt, Human
acagaaauuuagucucucgugguucuggaggg

SEQ ID NO: 297588 - RNA, 32 nt, Human
acagaaauuuguuuuaaaaucuuucaggagcu

SEQ ID NO: 297589 - RNA, 32 nt, Human
acagaacaaaggcaaauuaaaagcagcuuugu

SEQ ID NO: 297590 - RNA, 19 nt, Human
acagaacacaaaagagcag

SEQ ID NO: 297591 - RNA, 32 nt, Human
acagaacacagcugguuuccuggguaugccug

SEQ ID NO: 297592 - RNA, 32 nt, Human
acagaacacccacugccuagaggccaucuuaa

SEQ ID NO: 297593 - RNA, 32 nt, Human
acagaacacuccuauuuguaccucaacaaaug

SEQ ID NO: 297594 - RNA, 19 nt, Human
acagaacagcaagagcagg

SEQ ID NO: 297595 - RNA, 18 nt, Human
acagaacagcgagagcaa

SEQ ID NO: 297596 - RNA, 32 nt, Human
acagaacagcuuucugcucauugaacccagag

SEQ ID NO: 297597 - RNA, 17 nt, Human
acagaacagggaagcag

SEQ ID NO: 297598 - RNA, 32 nt, Human
acagaacagguucaaauaacuuuuccacugca

SEQ ID NO: 297599 - RNA, 24 nt, Human
acagaacauagacagaagaaacaa

SEQ ID NO: 297600 - RNA, 24 nt, Human
acagaacauagccacccuguuuca

SEQ ID NO: 297601 - RNA, 18 nt, Human
acagaacauaucuucaca

SEQ ID NO: 297602 - RNA, 24 nt, Human
acagaacauugguagguaacaaga

SEQ ID NO: 297603 - RNA, 20 nt, Human
acagaaccaaaauuggaagc

SEQ ID NO: 297604 - RNA, 18 nt, Human
acagaaccaaagaagcaa

SEQ ID NO: 297605 - RNA, 22 nt, Human
acagaaccagaacuagagccug

SEQ ID NO: 297606 - RNA, 32 nt, Human
acagaaccauguccaggacuucauccguggga

SEQ ID NO: 297607 - RNA, 20 nt, Human
acagaacccagagaaaacaa

SEQ ID NO: 297608 - RNA, 32 nt, Human
acagaaccccaagaacagcccaggaagucgcc

SEQ ID NO: 297609 - RNA, 32 nt, Human
acagaaccccuggaagucuggacaugagccug

SEQ ID NO: 297610 - RNA, 24 nt, Human
acagaaccugcuaaggccaucaaa

SEQ ID NO: 297611 - RNA, 32 nt, Human
acagaacgaggcaccaacagcaaggggcaagc

SEQ ID NO: 297612 - RNA, 32 nt, Human
acagaacuaagaugaucaucuccaguuuauag

SEQ ID NO: 297613 - RNA, 32 nt, Human
acagaacuagagcaaggaggugaugaaauacu

SEQ ID NO: 297614 - RNA, 32 nt, Human
acagaacuauauacacacauuguaccaauuuc

SEQ ID NO: 297615 - RNA, 19 nt, Human
acagaacucagagaaacaa

SEQ ID NO: 297616 - RNA, 18 nt, Human
acagaacucuagccaaag

SEQ ID NO: 297617 - RNA, 21 nt, Human
acagaacugaugcucaggcca

SEQ ID NO: 297618 - RNA, 32 nt, Human
acagaacugcuguuuacacaguucucaggagg

SEQ ID NO: 297619 - RNA, 32 nt, Human
acagaacuggaagagaaagaaggaaaagauga

SEQ ID NO: 297620 - RNA, 32 nt, Human
acagaacuuagagugugcugguuagucacaua

SEQ ID NO: 297621 - RNA, 32 nt, Human
acagaacuuccugagccuagagcugcuguguu

SEQ ID NO: 297622 - RNA, 32 nt, Human
acagaacuuggccuuuuguugugaauuaggua

SEQ ID NO: 297623 - RNA, 32 nt, Human
acagaacuuggcuaauggaauucacagaggug

SEQ ID NO: 297624 - RNA, 31 nt, Human
acagaagaaagaccuguguccuagagaguag

SEQ ID NO: 297625 - RNA, 32 nt, Human
acagaagaaauuauuucucugaucauuuaguu

SEQ ID NO: 297626 - RNA, 18 nt, Human
acagaagaacaagagcaa

SEQ ID NO: 297627 - RNA, 32 nt, Human
acagaagaagaaaaagaacuggggugcagaug

SEQ ID NO: 297628 - RNA, 18 nt, Human
acagaagaagagaggaag

SEQ ID NO: 297629 - RNA, 32 nt, Human
acagaagaauuugaaaaacacagcugcugaag

SEQ ID NO: 297630 - RNA, 32 nt, Human
acagaagacacaccuugggcauauccuacaga

SEQ ID NO: 297631 - RNA, 32 nt, Human
acagaagacagagcaugcucuuuuagucugau

SEQ ID NO: 297632 - RNA, 32 nt, Human
acagaagacagaggcagaagcagcuuuauuga

SEQ ID NO: 297633 - RNA, 18 nt, Human
acagaagacagcagcaag

SEQ ID NO: 297634 - RNA, 32 nt, Human
acagaagacagugucuuggacgcccagcggaa

SEQ ID NO: 297635 - RNA, 18 nt, Human
acagaagagagaagagca

SEQ ID NO: 297636 - RNA, 32 nt, Human
acagaagaggcugcugggccucuugucuucac

SEQ ID NO: 297637 - RNA, 32 nt, Human
acagaagauguagcaguuccugaacagggaaa

SEQ ID NO: 297638 - RNA, 32 nt, Human
acagaagcaauaugauuuccauacauccaacc

SEQ ID NO: 297639 - RNA, 32 nt, Human
acagaagcacaauggcccuucgcucuccccca

SEQ ID NO: 297640 - RNA, 32 nt, Human
acagaagcacacuguuuuugaacuugacaaca

SEQ ID NO: 297641 - RNA, 32 nt, Human
acagaagcagagcccauggagccagaccccac

SEQ ID NO: 297642 - RNA, 32 nt, Human
acagaagcagaggcaguucugaggcagcaggc

SEQ ID NO: 297643 - RNA, 32 nt, Human
acagaagcagcuggaagagaacucgaggggcu

SEQ ID NO: 297644 - RNA, 19 nt, Human
acagaagcaggaaaaccaa

SEQ ID NO: 297645 - RNA, 32 nt, Human
acagaagcauccaggcugcaggaguacagguc

SEQ ID NO: 297646 - RNA, 32 nt, Human
acagaagcaugaucacuugcuaucaacagugu

SEQ ID NO: 297647 - RNA, 32 nt, Human
acagaagcauggcaaggauguuucuggcagca

SEQ ID NO: 297648 - RNA, 20 nt, Human
acagaagccaacaaaagcaa

SEQ ID NO: 297649 - RNA, 32 nt, Human
acagaagccagccagccuagcagcccuaugcg

SEQ ID NO: 297650 - RNA, 21 nt, Human
acagaagcccaggacgucucc

SEQ ID NO: 297651 - RNA, 32 nt, Human
acagaagcuggggaggugagagugcagaaagg

SEQ ID NO: 297652 - RNA, 30 nt, Human
acagaaggaagccaagggagcagugcaaug

SEQ ID NO: 297653 - RNA, 32 nt, Human
acagaaggacugccugccucccucccugucug

SEQ ID NO: 297654 - RNA, 19 nt, Human
acagaaggagaagaggaag

SEQ ID NO: 297655 - RNA, 32 nt, Human
acagaaggaggauugaauuaaagggaaagugu

SEQ ID NO: 297656 - RNA, 32 nt, Human
acagaaggaggguggaggaagugaucagaggg

SEQ ID NO: 297657 - RNA, 18 nt, Human
acagaaggaguagaguaa

SEQ ID NO: 297658 - RNA, 32 nt, Human
acagaaggauucacaauuagaagaaaaguuga

SEQ ID NO: 297659 - RNA, 20 nt, Human
acagaaggcagaacugaagc

SEQ ID NO: 297660 - RNA, 32 nt, Human
acagaaggccuccagcuccuccgcucugcccu

SEQ ID NO: 297661 - RNA, 32 nt, Human
acagaagggacuggaaaguuauguucaaaggc

SEQ ID NO: 297662 - RNA, 21 nt, Human
acagaaggggagcgaggcaag

SEQ ID NO: 297663 - RNA, 19 nt, Human
acagaagggggaacgcaag

SEQ ID NO: 297664 - RNA, 32 nt, Human
acagaagggucuccuuggucauguggcauuuu

SEQ ID NO: 297665 - RNA, 32 nt, Human
acagaagggugcagaggcgcccaggggaguac

SEQ ID NO: 297666 - RNA, 18 nt, Human
acagaaggguuaaggcaa

SEQ ID NO: 297667 - RNA, 32 nt, Human
acagaaggugaguuuggggccugcagagccuc

SEQ ID NO: 297668 - RNA, 18 nt, Human
acagaaguacaaaagcaa

SEQ ID NO: 297669 - RNA, 32 nt, Human
acagaaguauugagagaaacaccaagacucua

SEQ ID NO: 297670 - RNA, 32 nt, Human
acagaaguauugauggugauuuggagggcuga

SEQ ID NO: 297671 - RNA, 32 nt, Human
acagaagucacgugauggagagaggauucaaa

SEQ ID NO: 297672 - RNA, 32 nt, Human
acagaagucauguuccagcuuagacugaugaa

SEQ ID NO: 297673 - RNA, 32 nt, Human
acagaagucccugaggcccccagaccuggcuc

SEQ ID NO: 297674 - RNA, 23 nt, Human
acagaagucuuaagucuguggca

SEQ ID NO: 297675 - RNA, 32 nt, Human
acagaagugacuucuggagaaagcucauggcu

SEQ ID NO: 297676 - RNA, 32 nt, Human
acagaagugcuagaagccagugcucgugaacu

SEQ ID NO: 297677 - RNA, 20 nt, Human
acagaagugggugagagcaa

SEQ ID NO: 297678 - RNA, 22 nt, Human
acagaaguuuaauacuuucuua

SEQ ID NO: 297679 - RNA, 19 nt, Human
acagaauaauggagaacaa

SEQ ID NO: 297680 - RNA, 17 nt, Human
acagaauacaguugcag

SEQ ID NO: 297681 - RNA, 32 nt, Human
acagaauacauacuuauucccauuuuuaagca

SEQ ID NO: 297682 - RNA, 16 nt, Human
acagaauaccaagcag

SEQ ID NO: 297683 - RNA, 20 nt, Human
acagaauacggaagagcagg

SEQ ID NO: 297684 - RNA, 16 nt, Human
acagaauacuaaagca

SEQ ID NO: 297685 - RNA, 20 nt, Human
acagaauacuguuaaaggaa

SEQ ID NO: 297686 - RNA, 32 nt, Human
acagaauagcuccacaccacagcuugagauuu

SEQ ID NO: 297687 - RNA, 32 nt, Human
acagaauaggagaggacacagagacacagaga

SEQ ID NO: 297688 - RNA, 20 nt, Human
acagaauaggaggaaaacaa

SEQ ID NO: 297689 - RNA, 24 nt, Human
acagaauaggauaaaauauuugua

SEQ ID NO: 297690 - RNA, 32 nt, Human
acagaauagggagaaggaggagaggggaggcu

SEQ ID NO: 297691 - RNA, 20 nt, Human
acagaauauacagaaagcaa

SEQ ID NO: 297692 - RNA, 22 nt, Human
acagaauauucuuugcguugua

SEQ ID NO: 297693 - RNA, 23 nt, Human
acagaauauuucaucugacagua

SEQ ID NO: 297694 - RNA, 32 nt, Human
acagaaucaccaggaugggacacaggucuugc

SEQ ID NO: 297695 - RNA, 32 nt, Human
acagaaucagaccaugacuaccuucaccugga

SEQ ID NO: 297696 - RNA, 32 nt, Human
acagaaucccaucuuuuccuucggcagauugc

SEQ ID NO: 297697 - RNA, 32 nt, Human
acagaaucgguccaggagggugcggcugugga

SEQ ID NO: 297698 - RNA, 32 nt, Human
acagaaucuaacuggugagcuucagaaccaau

SEQ ID NO: 297699 - RNA, 32 nt, Human
acagaaucucacuccagccugggcaacagaau

SEQ ID NO: 297700 - RNA, 32 nt, Human
acagaaucucucucauggcuuccuaagggaug

SEQ ID NO: 297701 - RNA, 32 nt, Human
acagaaucuucucugcugguucccaggcugcu

SEQ ID NO: 297702 - RNA, 32 nt, Human
acagaaugaaucgugaacauuaucucaauauu

SEQ ID NO: 297703 - RNA, 32 nt, Human
acagaaugcagcuuucaagguucguuucaagc

SEQ ID NO: 297704 - RNA, 20 nt, Human
acagaaugcaguaaaagcag

SEQ ID NO: 297705 - RNA, 20 nt, Human
acagaauggaaugaagcaac

SEQ ID NO: 297706 - RNA, 24 nt, Human
acagaaugggagaaaauuuuugca

SEQ ID NO: 297707 - RNA, 31 nt, Human
acagaaugguggagagaaaagagaaugcuga

SEQ ID NO: 297708 - RNA, 32 nt, Human
acagaaugucaacaucacacugugcauccucu

SEQ ID NO: 297709 - RNA, 17 nt, Human
acagaaugugaaaaagc

SEQ ID NO: 297710 - RNA, 32 nt, Human
acagaauguucugccuucccuuccaucucuuc

SEQ ID NO: 297711 - RNA, 17 nt, Human
acagaauuaaaaagcag

SEQ ID NO: 297712 - RNA, 32 nt, Human
acagaauuaucauuuucccuggcucccauuac

SEQ ID NO: 297713 - RNA, 32 nt, Human
acagaauuauuuuucucuguagaaacacagau

SEQ ID NO: 297714 - RNA, 32 nt, Human
acagaauucccaagcuuuuuccaguucuagau

SEQ ID NO: 297715 - RNA, 24 nt, Human
acagaauucucauccuuccacuga

SEQ ID NO: 297716 - RNA, 32 nt, Human
acagaauugcuuagaaaggagcagagaaggac

SEQ ID NO: 297717 - RNA, 32 nt, Human
acagaauuucaucacccaaugcagggggagcu

SEQ ID NO: 297718 - RNA, 32 nt, Human
acagaauuucccacagucuuugcccucaagga

SEQ ID NO: 297719 - RNA, 32 nt, Human
acagaauuuccuaaaaucagaagaauuggaag

SEQ ID NO: 297720 - RNA, 32 nt, Human
acagaauuuuaaggcguguguaugacacagua

SEQ ID NO: 297721 - RNA, 19 nt, Human
acagaauuuuuaaaagcaa

SEQ ID NO: 297722 - RNA, 32 nt, Human
acagacaaccuucugugccuucaucaagcugg

SEQ ID NO: 297723 - RNA, 32 nt, Human
acagacaagcagcuccacaggaggagugcaca

SEQ ID NO: 297724 - RNA, 32 nt, Human
acagacaaggaaaucaagacccagcuuggggg

SEQ ID NO: 297725 - RNA, 32 nt, Human
acagacaaggucuugcuauguugcccaggcug

SEQ ID NO: 297726 - RNA, 32 nt, Human
acagacaaguuacagacaggaggggaaagagg

SEQ ID NO: 297727 - RNA, 32 nt, Human
acagacacacaagcagacacacacauauauac

SEQ ID NO: 297728 - RNA, 32 nt, Human
acagacacagagauggagaagcagggacaugc

SEQ ID NO: 297729 - RNA, 32 nt, Human
acagacacaggaaaauccauuuuccccacucu

SEQ ID NO: 297730 - RNA, 32 nt, Human
acagacacaggguggggguggggaggggcggu

SEQ ID NO: 297731 - RNA, 32 nt, Human
acagacaccacuucuaguaaaucucuguaaau

SEQ ID NO: 297732 - RNA, 32 nt, Human
acagacaccaugucccaggacaguguuacuuc

SEQ ID NO: 297733 - RNA, 32 nt, Human
acagacacccgccaccacgcccggcuaauuuu

SEQ ID NO: 297734 - RNA, 32 nt, Human
acagacaccuucccauccccagcguuuguuca

SEQ ID NO: 297735 - RNA, 32 nt, Human
acagacacucagcccuccccacccuggcucuc

SEQ ID NO: 297736 - RNA, 32 nt, Human
acagacacugagccacgcagccccgccucugg

SEQ ID NO: 297737 - RNA, 32 nt, Human
acagacacugcacagaccuuagggaauggcag

SEQ ID NO: 297738 - RNA, 32 nt, Human
acagacacuguugcaaagguagggacuggagg

SEQ ID NO: 297739 - RNA, 32 nt, Human
acagacacuucacuuagccuagggggccuucc

SEQ ID NO: 297740 - RNA, 32 nt, Human
acagacacuuuucaaaagaagacaucuguggc

SEQ ID NO: 297741 - RNA, 32 nt, Human
acagacagaaaauccagaaucuuuucaaagcc

SEQ ID NO: 297742 - RNA, 32 nt, Human
acagacagaauuuccagccauuguucuuuucu

SEQ ID NO: 297743 - RNA, 32 nt, Human
acagacagacagacacgcacacacacccaucu

SEQ ID NO: 297744 - RNA, 32 nt, Human
acagacagacagacgcacacacacaacagaug

SEQ ID NO: 297745 - RNA, 32 nt, Human
acagacagacaggcagacagacgcacggacaa

SEQ ID NO: 297746 - RNA, 32 nt, Human
acagacagacucaccccauuguguacagacaa

SEQ ID NO: 297747 - RNA, 32 nt, Human
acagacagaggaugagcucuacccagggccug

SEQ ID NO: 297748 - RNA, 32 nt, Human
acagacagagucucacucugucacccaggcug

SEQ ID NO: 297749 - RNA, 32 nt, Human
acagacagagucuugcucugucacccaggcug

SEQ ID NO: 297750 - RNA, 32 nt, Human
acagacagcagucuagaagcagcagcugggcc

SEQ ID NO: 297751 - RNA, 32 nt, Human
acagacagccacugaggcccauggacaaucuc

SEQ ID NO: 297752 - RNA, 32 nt, Human
acagacaggagaaaagagauggugcccugggc

SEQ ID NO: 297753 - RNA, 32 nt, Human
acagacaggauggacuuccuccggcuauaccu

SEQ ID NO: 297754 - RNA, 32 nt, Human
acagacagggaggcgguggcagaggacacuug

SEQ ID NO: 297755 - RNA, 32 nt, Human
acagacaggggcgcugcugcagaugcuccagg

SEQ ID NO: 297756 - RNA, 18 nt, Human
acagacagggugaacaag

SEQ ID NO: 297757 - RNA, 32 nt, Human
acagacaggguuucaccauguuggccaggcug

SEQ ID NO: 297758 - RNA, 32 nt, Human
acagacagucaggcugaaaaggacaguucuuu

SEQ ID NO: 297759 - RNA, 32 nt, Human
acagacagucaggcugaaauggacaguucuuu

SEQ ID NO: 297760 - RNA, 32 nt, Human
acagacauaagguauuucaaaauaaaucucag

SEQ ID NO: 297761 - RNA, 32 nt, Human
acagacauauagacaaauagauacuugcauag

SEQ ID NO: 297762 - RNA, 32 nt, Human
acagacaucuuccuccucccucaucccuucca

SEQ ID NO: 297763 - RNA, 17 nt, Human
acagacaugaaaagcaa

SEQ ID NO: 297764 - RNA, 32 nt, Human
acagacaugagaccauaggggaccugucuggg

SEQ ID NO: 297765 - RNA, 18 nt, Human
acagacaugcaccaccac

SEQ ID NO: 297766 - RNA, 32 nt, Human
acagacaugccuuccguuuggagggccgcggc

SEQ ID NO: 297767 - RNA, 32 nt, Human
acagacauggcgcuucagcugucuucagaaua

SEQ ID NO: 297768 - RNA, 23 nt, Human
acagacauuagccaucacgccug

SEQ ID NO: 297769 - RNA, 32 nt, Human
acagacauugcccggaaacucagucuauuuau

SEQ ID NO: 297770 - RNA, 32 nt, Human
acagacauuugcuuccugguggcaaguaacug

SEQ ID NO: 297771 - RNA, 32 nt, Human
acagaccaagggagacagaggguggagggcca

SEQ ID NO: 297772 - RNA, 32 nt, Human
acagaccacaauauuaucauaccacucuucaa

SEQ ID NO: 297773 - RNA, 32 nt, Human
acagaccacugcauggugcuucgucaccaccg

SEQ ID NO: 297774 - RNA, 32 nt, Human
acagaccagcaaaauuuuuggcaauucuuuca

SEQ ID NO: 297775 - RNA, 32 nt, Human
acagaccagcaauacuucagagcccaguuucu

SEQ ID NO: 297776 - RNA, 32 nt, Human
acagaccagcuuuuaggggagccaaguuggga

SEQ ID NO: 297777 - RNA, 32 nt, Human
acagaccaggacauuccaugugccucauggca

SEQ ID NO: 297778 - RNA, 32 nt, Human
acagaccaugaccacagccaaggagccaagcg

SEQ ID NO: 297779 - RNA, 23 nt, Human
acagaccaugaggagacgcuggg

SEQ ID NO: 297780 - RNA, 32 nt, Human
acagaccauggacagaggcaggaaguaaggaa

SEQ ID NO: 297781 - RNA, 32 nt, Human
acagacccaagauggacuugcugugauggugc

SEQ ID NO: 297782 - RNA, 32 nt, Human
acagacccaccauaaaguuucugugaugcauu

SEQ ID NO: 297783 - RNA, 32 nt, Human
acagacccaggggcgggcagagagggaaggag

SEQ ID NO: 297784 - RNA, 32 nt, Human
acagacccaucuuuggaucuucauucauuaag

SEQ ID NO: 297785 - RNA, 32 nt, Human
acagaccccaaagccaggaaccucucagccga

SEQ ID NO: 297786 - RNA, 32 nt, Human
acagaccccaacagggaaaucaguaucugucu

SEQ ID NO: 297787 - RNA, 32 nt, Human
acagaccccacaccaggcucugacgccaagug

SEQ ID NO: 297788 - RNA, 21 nt, Human
acagaccccccacccaccucc

SEQ ID NO: 297789 - RNA, 25 nt, Human
acagaccccuagggauuuaaaggga

SEQ ID NO: 297790 - RNA, 32 nt, Human
acagaccccucugcccugacccucugcauugg

SEQ ID NO: 297791 - RNA, 32 nt, Human
acagacccggacucccuuucugccaccccagg

SEQ ID NO: 297792 - RNA, 26 nt, Human
acagacccucacccccacccuggggg

SEQ ID NO: 297793 - RNA, 19 nt, Human
acagacccucuggcugggg

SEQ ID NO: 297794 - RNA, 32 nt, Human
acagacccugcaguccgcucagggugggaugg

SEQ ID NO: 297795 - RNA, 32 nt, Human
acagacccugcaguccuacuacagucuggagu

SEQ ID NO: 297796 - RNA, 21 nt, Human
acagacccuguucacuggaga

SEQ ID NO: 297797 - RNA, 27 nt, Human
acagacccuucccaccacaugugggga

SEQ ID NO: 297798 - RNA, 21 nt, Human
acagacccuuggaggcagggg

SEQ ID NO: 297799 - RNA, 32 nt, Human
acagacccuuggaggcaggggcuguggaaaua

SEQ ID NO: 297800 - RNA, 32 nt, Human
acagaccgcuuuaaccucuuuauuucuguccc

SEQ ID NO: 297801 - RNA, 32 nt, Human
acagaccgggcuggagggugaccuuggcugug

SEQ ID NO: 297802 - RNA, 32 nt, Human
acagaccgugggccccucccagcccucagacc

SEQ ID NO: 297803 - RNA, 32 nt, Human
acagaccguuccccaucucucucccucuucuu

SEQ ID NO: 297804 - RNA, 32 nt, Human
acagaccuauggggccuggaagugcccgcuga

SEQ ID NO: 297805 - RNA, 32 nt, Human
acagaccucagugaugucagcacuguugcuca

SEQ ID NO: 297806 - RNA, 32 nt, Human
acagaccuccacugugauuccauacucucucu

SEQ ID NO: 297807 - RNA, 32 nt, Human
acagaccucccuggcccaccuagaggcuuucu

SEQ ID NO: 297808 - RNA, 32 nt, Human
acagaccucugaguuucugacuuaaccuugaa

SEQ ID NO: 297809 - RNA, 31 nt, Human
acagaccugauuucugggccuggauccaggg

SEQ ID NO: 297810 - RNA, 32 nt, Human
acagaccuggacacuagugggacccagcaaag

SEQ ID NO: 297811 - RNA, 32 nt, Human
acagaccuguguauaaacaacuuuuguauaua

SEQ ID NO: 297812 - RNA, 31 nt, Human
acagaccuguuucagcugcuacuucagccaa

SEQ ID NO: 297813 - RNA, 32 nt, Human
acagaccuuuaagaguaugcuuuauugaguaa

SEQ ID NO: 297814 - RNA, 32 nt, Human
acagacgaacacagcuaaggccucgcugccag

SEQ ID NO: 297815 - RNA, 32 nt, Human
acagacgcacacacacaacagaugcgcagcaa

SEQ ID NO: 297816 - RNA, 32 nt, Human
acagacgcauggcucuuccucccagagcagcc

SEQ ID NO: 297817 - RNA, 20 nt, Human
acagacgcccaccugcuccc

SEQ ID NO: 297818 - RNA, 32 nt, Human
acagacgccgaucuucaaucccuucuccccag

SEQ ID NO: 297819 - RNA, 32 nt, Human
acagacgccuguaaucccagcuacuugggagg

SEQ ID NO: 297820 - RNA, 32 nt, Human
acagacgcuggagcuccagccuccuggcggcc

SEQ ID NO: 297821 - RNA, 32 nt, Human
acagacggaguuuccccauguuggccgggcua

SEQ ID NO: 297822 - RNA, 32 nt, Human
acagacgggguuucaccauguuggccaggaug

SEQ ID NO: 297823 - RNA, 32 nt, Human
acagacgggguuucaccauguuggcugggcug

SEQ ID NO: 297824 - RNA, 32 nt, Human
acagacgggguuucaccauguuggucaggcug

SEQ ID NO: 297825 - RNA, 32 nt, Human
acagacgggguuucacuguguugcccaggcug

SEQ ID NO: 297826 - RNA, 32 nt, Human
acagacgggguuucuccguguuggucaggcug

SEQ ID NO: 297827 - RNA, 32 nt, Human
acagacggucagcacugugccuuuguaucagg

SEQ ID NO: 297828 - RNA, 32 nt, Human
acagacgguugcagagcuaggaagaaaaccca

SEQ ID NO: 297829 - RNA, 32 nt, Human
acagacgucaccuguucccucgccucugucuc

SEQ ID NO: 297830 - RNA, 19 nt, Human
acagacgugagccaccgcg

SEQ ID NO: 297831 - RNA, 32 nt, Human
acagacguucuuucuccuccaugcaguuacac

SEQ ID NO: 297832 - RNA, 32 nt, Human
acagacuagcacuccuggggccgccguguuau

SEQ ID NO: 297833 - RNA, 22 nt, Human
acagacuaucucuuuucuccua

SEQ ID NO: 297834 - RNA, 32 nt, Human
acagacucagagcgugaaaaugaauggaagug

SEQ ID NO: 297835 - RNA, 32 nt, Human
acagacucagccccaggacucgggccagccuc

SEQ ID NO: 297836 - RNA, 21 nt, Human
acagacucaggaagcuggggg

SEQ ID NO: 297837 - RNA, 32 nt, Human
acagacucaggccacuuuaggaaaacgaaauc

SEQ ID NO: 297838 - RNA, 32 nt, Human
acagacucagucuuauuacagcuuugaccaau

SEQ ID NO: 297839 - RNA, 32 nt, Human
acagacuccauucagacaucuuuauacuucca

SEQ ID NO: 297840 - RNA, 21 nt, Human
acagacucccgaguagcuggg

SEQ ID NO: 297841 - RNA, 32 nt, Human
acagacucccuccugugaaccaacacagacac

SEQ ID NO: 297842 - RNA, 32 nt, Human
acagacucccugcuucucaucuccuuaauaaa

SEQ ID NO: 297843 - RNA, 32 nt, Human
acagacuccugucuucacuccuaaaugcaguu

SEQ ID NO: 297844 - RNA, 32 nt, Human
acagacucucaccucuucuccugaggucugcu

SEQ ID NO: 297845 - RNA, 18 nt, Human
acagacucugcagaggcu

SEQ ID NO: 297846 - RNA, 32 nt, Human
acagacucugcaggaaguggcugacuugaugc

SEQ ID NO: 297847 - RNA, 32 nt, Human
acagacucugcuggcccuccuucccugccccu

SEQ ID NO: 297848 - RNA, 32 nt, Human
acagacucugcuuucuaaggucucacaaaguu

SEQ ID NO: 297849 - RNA, 32 nt, Human
acagacucugggaggcucggcggcuggagcag

SEQ ID NO: 297850 - RNA, 32 nt, Human
acagacugaagccacugaacucugccaggagu

SEQ ID NO: 297851 - RNA, 32 nt, Human
acagacugaccucacagcuggaggcuuuccag

SEQ ID NO: 297852 - RNA, 32 nt, Human
acagacugcccucugugaaggugacagugaug

SEQ ID NO: 297853 - RNA, 32 nt, Human
acagacugcuccugacagaaggaugucccagc

SEQ ID NO: 297854 - RNA, 32 nt, Human
acagacugcuuugcaugagucgaaccaugagu

SEQ ID NO: 297855 - RNA, 32 nt, Human
acagacugcuuuucgaagcuguguacccucau

SEQ ID NO: 297856 - RNA, 32 nt, Human
acagacugggaaugaauaaagcacuuacagaa

SEQ ID NO: 297857 - RNA, 32 nt, Human
acagacugggaauuuuuaaugugaacuggaua

SEQ ID NO: 297858 - RNA, 32 nt, Human
acagacugggagaaagaauuggaagccuucca

SEQ ID NO: 297859 - RNA, 32 nt, Human
acagacugggagcugggagccugggguggaca

SEQ ID NO: 297860 - RNA, 32 nt, Human
acagacuguagggggagccagagggcagcagg

SEQ ID NO: 297861 - RNA, 32 nt, Human
acagacugugaacaaaucauucacaaacagaa

SEQ ID NO: 297862 - RNA, 32 nt, Human
acagacugugagccuagcagggcagaucuugu

SEQ ID NO: 297863 - RNA, 32 nt, Human
acagacuguuggcuuuguguuuggaggauagg

SEQ ID NO: 297864 - RNA, 20 nt, Human
acagacuuagcgggaguaga

SEQ ID NO: 297865 - RNA, 32 nt, Human
acagacuuagggagccuuuaccagagacgccu

SEQ ID NO: 297866 - RNA, 32 nt, Human
acagacuuauuucucacugcggcccaguaaca

SEQ ID NO: 297867 - RNA, 32 nt, Human
acagacuucacugucugagauuucccacauuu

SEQ ID NO: 297868 - RNA, 21 nt, Human
acagacuucuaggccacuggg

SEQ ID NO: 297869 - RNA, 32 nt, Human
acagacuucuaggucuguaagcucuuuagggg

SEQ ID NO: 297870 - RNA, 32 nt, Human
acagacuuggccccuagcagugcagaacuaca

SEQ ID NO: 297871 - RNA, 32 nt, Human
acagacuugggaaacaacuucuccccaggggc

SEQ ID NO: 297872 - RNA, 32 nt, Human
acagacuuuacagccccgggggcacagucgua

SEQ ID NO: 297873 - RNA, 32 nt, Human
acagagaaaacacauacauuuaugcauuuuaa

SEQ ID NO: 297874 - RNA, 17 nt, Human
acagagaaaaggagcaa

SEQ ID NO: 297875 - RNA, 32 nt, Human
acagagaaaccagcuagagacagagggaggua

SEQ ID NO: 297876 - RNA, 32 nt, Human
acagagaaaccagcuagaggcagagggaggua

SEQ ID NO: 297877 - RNA, 32 nt, Human
acagagaaaccagcuuccuucagagagcagug

SEQ ID NO: 297878 - RNA, 19 nt, Human
acagagaaagaaaaggcaa

SEQ ID NO: 297879 - RNA, 32 nt, Human
acagagaaagaacagcgggcccaggagaccgg

SEQ ID NO: 297880 - RNA, 32 nt, Human
acagagaaagagagacagagaggcagagagag

SEQ ID NO: 297881 - RNA, 32 nt, Human
acagagaaagaguaucuuuggagccaggugcg

SEQ ID NO: 297882 - RNA, 32 nt, Human
acagagaaaggugagaggaggagaguggcauu

SEQ ID NO: 297883 - RNA, 32 nt, Human
acagagaaaugagaaagagucugugggugggc

SEQ ID NO: 297884 - RNA, 19 nt, Human
acagagaacaagaaagcaa

SEQ ID NO: 297885 - RNA, 32 nt, Human
acagagaacccugcuucaaagcagaaguagca

SEQ ID NO: 297886 - RNA, 32 nt, Human
acagagaacucauguguucagcucaagacucc

SEQ ID NO: 297887 - RNA, 32 nt, Human
acagagaagacugugauucuagcauauuauca

SEQ ID NO: 297888 - RNA, 32 nt, Human
acagagaagagaaaaaugcaggacacuggcuc

SEQ ID NO: 297889 - RNA, 32 nt, Human
acagagaagcgaagacagagacguggaaagac

SEQ ID NO: 297890 - RNA, 32 nt, Human
acagagaaggaagcagagacuggagggaugcc

SEQ ID NO: 297891 - RNA, 32 nt, Human
acagagaaggcagaggggaguguggaguggga

SEQ ID NO: 297892 - RNA, 32 nt, Human
acagagaaggcugcaggaguccuuuguugcuc

SEQ ID NO: 297893 - RNA, 19 nt, Human
acagagaagucacagggca

SEQ ID NO: 297894 - RNA, 32 nt, Human
acagagaaguugcugcuugugaucucacacac

SEQ ID NO: 297895 - RNA, 32 nt, Human
acagagaaucagcuggagcccagauuucaagu

SEQ ID NO: 297896 - RNA, 32 nt, Human
acagagaaucagcuggaucauuucagcugucc

SEQ ID NO: 297897 - RNA, 32 nt, Human
acagagaaugauuuuaagacuucacugaagua

SEQ ID NO: 297898 - RNA, 32 nt, Human
acagagacaaggcccgugaguccuggcccagc

SEQ ID NO: 297899 - RNA, 32 nt, Human
acagagacaauaagcaacaguucaaugaauca

SEQ ID NO: 297900 - RNA, 32 nt, Human
acagagacacagagaaggaagcagagacugga

SEQ ID NO: 297901 - RNA, 32 nt, Human
acagagacacauauaaguagugcucauccaug

SEQ ID NO: 297902 - RNA, 32 nt, Human
acagagacagaaagacagggagaaagagaaac

SEQ ID NO: 297903 - RNA, 32 nt, Human
acagagacagaagaaagagaucaagggcagau

SEQ ID NO: 297904 - RNA, 32 nt, Human
acagagacagagagacagggacacagagaggc

SEQ ID NO: 297905 - RNA, 18 nt, Human
acagagacagagagcaag

SEQ ID NO: 297906 - RNA, 32 nt, Human
acagagacaugagcaccagcaaguuugagguu

SEQ ID NO: 297907 - RNA, 18 nt, Human
acagagaccaagagcagg

SEQ ID NO: 297908 - RNA, 32 nt, Human
acagagaccauccuggccaacacggugaaacc

SEQ ID NO: 297909 - RNA, 32 nt, Human
acagagacccccagggcaguggguggguggcg

SEQ ID NO: 297910 - RNA, 32 nt, Human
acagagaccuccugccuccgccucaguaagac

SEQ ID NO: 297911 - RNA, 32 nt, Human
acagagacgcagacaugugcacuugaagaugc

SEQ ID NO: 297912 - RNA, 18 nt, Human
acagagacgcagagcaag

SEQ ID NO: 297913 - RNA, 32 nt, Human
acagagacgugggguucaucccagacuccucc

SEQ ID NO: 297914 - RNA, 32 nt, Human
acagagacugcagggguccacugugagaggug

SEQ ID NO: 297915 - RNA, 32 nt, Human
acagagacuguuguggaggugaguucggcugu

SEQ ID NO: 297916 - RNA, 32 nt, Human
acagagagaaaagaauugagacucaggaggcu

SEQ ID NO: 297917 - RNA, 32 nt, Human
acagagagaaagggaucugaugaccaaagcag

SEQ ID NO: 297918 - RNA, 32 nt, Human
acagagagaauggauuaccauuucagaaauuc

SEQ ID NO: 297919 - RNA, 32 nt, Human
acagagagacuggccaggccuccccgguggcc

SEQ ID NO: 297920 - RNA, 32 nt, Human
acagagagaggagagguaaggggugaggaugu

SEQ ID NO: 297921 - RNA, 32 nt, Human
acagagagaggcagauuucagggaagcccuga

SEQ ID NO: 297922 - RNA, 32 nt, Human
acagagagaggcugguaacaagcccaaaguca

SEQ ID NO: 297923 - RNA, 32 nt, Human
acagagagagguccuacagcugucauaaauua

SEQ ID NO: 297924 - RNA, 32 nt, Human
acagagagaguguuacgcaggagcaagccuuu

SEQ ID NO: 297925 - RNA, 32 nt, Human
acagagagcagccuggcccucaccagugcgca

SEQ ID NO: 297926 - RNA, 32 nt, Human
acagagaggaggaggagggagaaauggccacc

SEQ ID NO: 297927 - RNA, 32 nt, Human
acagagaggcagagagaaacagagacagagag

SEQ ID NO: 297928 - RNA, 32 nt, Human
acagagaggcccagagaggggaagagauucau

SEQ ID NO: 297929 - RNA, 32 nt, Human
acagagagggugagggguugagcccagaucua

SEQ ID NO: 297930 - RNA, 32 nt, Human
acagagagugugugugcccacugcugcccaac

SEQ ID NO: 297931 - RNA, 32 nt, Human
acagagaucccagaccaccacccaugauccca

SEQ ID NO: 297932 - RNA, 32 nt, Human
acagagaucccauccugaccuuggaggcuugg

SEQ ID NO: 297933 - RNA, 32 nt, Human
acagagaucuucauuaacaagaucuggacagu

SEQ ID NO: 297934 - RNA, 17 nt, Human
acagagaugaaaacaac

SEQ ID NO: 297935 - RNA, 32 nt, Human
acagagauggggucuugcuuuguugcccaggc

SEQ ID NO: 297936 - RNA, 32 nt, Human
acagagaugggguugaggaaggaggguuggcg

SEQ ID NO: 297937 - RNA, 31 nt, Human
acagagauggguggaggggcuggggaaaggc

SEQ ID NO: 297938 - RNA, 32 nt, Human
acagagaugugaugcaggaaaccaucagaaac

SEQ ID NO: 297939 - RNA, 32 nt, Human
acagagaugugugcucucacagcuuugcaggc

SEQ ID NO: 297940 - RNA, 17 nt, Human
acagagcaagagauaag

SEQ ID NO: 297941 - RNA, 23 nt, Human
acagagcaaggcauccccacugg

SEQ ID NO: 297942 - RNA, 32 nt, Human
acagagcaaguccucacucuucaaggaggccc

SEQ ID NO: 297943 - RNA, 32 nt, Human
acagagcaaucacugcacccagccaccucuau

SEQ ID NO: 297944 - RNA, 20 nt, Human
acagagcaaucugagacagg

SEQ ID NO: 297945 - RNA, 32 nt, Human
acagagcacuucagagagaauuuuaaagcggu

SEQ ID NO: 297946 - RNA, 32 nt, Human
acagagcagagccauggagaauaagcauugac

SEQ ID NO: 297947 - RNA, 32 nt, Human
acagagcagcagagaaaagcugaugggaguga

SEQ ID NO: 297948 - RNA, 32 nt, Human
acagagcagcuagaggcuccuccucugcuggc

SEQ ID NO: 297949 - RNA, 32 nt, Human
acagagcagcuagguuaaaaagauuuauccau

SEQ ID NO: 297950 - RNA, 32 nt, Human
acagagcagcuuuacaaguugucacauuucuu

SEQ ID NO: 297951 - RNA, 32 nt, Human
acagagcaggaggcugaggcuggugugaggga

SEQ ID NO: 297952 - RNA, 32 nt, Human
acagagcaggccacauguggccaucugcuccc

SEQ ID NO: 297953 - RNA, 32 nt, Human
acagagcagggccgaagggaggggacagaggg

SEQ ID NO: 297954 - RNA, 32 nt, Human
acagagcaggucugcaggccaccagcugcugg

SEQ ID NO: 297955 - RNA, 32 nt, Human
acagagcagugcagugggaggagacgccauga

SEQ ID NO: 297956 - RNA, 32 nt, Human
acagagcagugcccuggcuguguccuggacgg

SEQ ID NO: 297957 - RNA, 32 nt, Human
acagagcauccacugaacaacauacauuauuc

SEQ ID NO: 297958 - RNA, 32 nt, Human
acagagcaucugugcugaccaggccugggccc

SEQ ID NO: 297959 - RNA, 18 nt, Human
acagagcaugagagcaag

SEQ ID NO: 297960 - RNA, 32 nt, Human
acagagccaaacaugaaagggaaggugacggc

SEQ ID NO: 297961 - RNA, 32 nt, Human
acagagccacagagggcugugagcuugcccag

SEQ ID NO: 297962 - RNA, 32 nt, Human
acagagccacaucuugaaugugagauaguagg

SEQ ID NO: 297963 - RNA, 32 nt, Human
acagagccaccagcagcaaaacaaauauuccc

SEQ ID NO: 297964 - RNA, 32 nt, Human
acagagccacguuugaacccagaagaacacca

SEQ ID NO: 297965 - RNA, 32 nt, Human
acagagccagggcagaggccaugccacuuuau

SEQ ID NO: 297966 - RNA, 32 nt, Human
acagagccaugcugggaagacgccugagcuca

SEQ ID NO: 297967 - RNA, 32 nt, Human
acagagcccagugccacccacuuugaugugcg

SEQ ID NO: 297968 - RNA, 32 nt, Human
acagagcccccacccucucucccucaccccuc

SEQ ID NO: 297969 - RNA, 23 nt, Human
acagagcccccacccuucacuga

SEQ ID NO: 297970 - RNA, 32 nt, Human
acagagcccuacuuucgggaccagccugaggu

SEQ ID NO: 297971 - RNA, 32 nt, Human
acagagcccucagaaauaaugccacuugucua

SEQ ID NO: 297972 - RNA, 32 nt, Human
acagagccuccuuucaucucugcagcaggcug

SEQ ID NO: 297973 - RNA, 32 nt, Human
acagagccugcaggaaguggggcuaaaguggc

SEQ ID NO: 297974 - RNA, 32 nt, Human
acagagccuggcugagcacuaugacauccugu

SEQ ID NO: 297975 - RNA, 32 nt, Human
acagagcgagaaggugucaggagcagcccagu

SEQ ID NO: 297976 - RNA, 20 nt, Human
acagagcggacccaggcccu

SEQ ID NO: 297977 - RNA, 32 nt, Human
acagagcuaaacaccagugcacugccuguaac

SEQ ID NO: 297978 - RNA, 32 nt, Human
acagagcucaggacagcccacagggagguggu

SEQ ID NO: 297979 - RNA, 32 nt, Human
acagagcuccacagcaaguugugccaaagggc

SEQ ID NO: 297980 - RNA, 32 nt, Human
acagagcugcccccgaggguccuggcugaggg

SEQ ID NO: 297981 - RNA, 32 nt, Human
acagagcugcugacccugcugaagaugccuag

SEQ ID NO: 297982 - RNA, 32 nt, Human
acagagcugcuugaagauauaugaggcuaauu

SEQ ID NO: 297983 - RNA, 32 nt, Human
acagagcuguccaggauugcaguggauaggaa

SEQ ID NO: 297984 - RNA, 32 nt, Human
acagagcugucuuccuucugcaugucagcaca

SEQ ID NO: 297985 - RNA, 32 nt, Human
acagagcuuggaacugcugauagcccuuacug

SEQ ID NO: 297986 - RNA, 32 nt, Human
acagagcuuguuccuguucagugacugacccu

SEQ ID NO: 297987 - RNA, 32 nt, Human
acagagcuuuuauguuuaaagacuucaaugga

SEQ ID NO: 297988 - RNA, 32 nt, Human
acagaggaaagcccgugugagcacacagugca

SEQ ID NO: 297989 - RNA, 32 nt, Human
acagaggaagaaaaggggucacaggagaaaca

SEQ ID NO: 297990 - RNA, 32 nt, Human
acagaggaagccaaggccuggagcugcagguc

SEQ ID NO: 297991 - RNA, 32 nt, Human
acagaggaaggaugaggugggauguggagguc

SEQ ID NO: 297992 - RNA, 32 nt, Human
acagaggacaagggcguggaucugggccagaa

SEQ ID NO: 297993 - RNA, 32 nt, Human
acagaggacagcccgggcuguguccccacagu

SEQ ID NO: 297994 - RNA, 32 nt, Human
acagaggacaggaggaaagugaggacaggugg

SEQ ID NO: 297995 - RNA, 32 nt, Human
acagaggacccucagccagagcagaaagcucc

SEQ ID NO: 297996 - RNA, 32 nt, Human
acagaggacgaugucauagaacaagaacucug

SEQ ID NO: 297997 - RNA, 18 nt, Human
acagaggagagaagcaag

SEQ ID NO: 297998 - RNA, 32 nt, Human
acagaggagaggagggaggaagagcugggcga

SEQ ID NO: 297999 - RNA, 32 nt, Human
acagaggagauggagagaggccagucaacgcg

SEQ ID NO: 298000 - RNA, 32 nt, Human
acagaggaggcugaggcucagagaggcacagu

SEQ ID NO: 298001 - RNA, 32 nt, Human
acagaggagucucuucccaagagacugcuggc

SEQ ID NO: 298002 - RNA, 32 nt, Human
acagaggagugggagaggggacacaggcaugg

SEQ ID NO: 298003 - RNA, 17 nt, Human
acagaggaugaggcaag

SEQ ID NO: 298004 - RNA, 32 nt, Human
acagaggauguggccugguucaaaguaaagca

SEQ ID NO: 298005 - RNA, 32 nt, Human
acagaggauuugcucuggacagagauggaaga

SEQ ID NO: 298006 - RNA, 32 nt, Human
acagaggcaaaaaucugcuaacucagggggca

SEQ ID NO: 298007 - RNA, 31 nt, Human
acagaggcaaugugaccagucacagggacag

SEQ ID NO: 298008 - RNA, 32 nt, Human
acagaggcagagagacagggagacagacagag

SEQ ID NO: 298009 - RNA, 32 nt, Human
acagaggcagauggguuagaucacacauaaca

SEQ ID NO: 298010 - RNA, 32 nt, Human
acagaggcagcagcaguccuucggcuucaucu

SEQ ID NO: 298011 - RNA, 32 nt, Human
acagaggcagccaaggcucaggaaaaacuggg

SEQ ID NO: 298012 - RNA, 32 nt, Human
acagaggcaggcaauuccuggagcuucuugau

SEQ ID NO: 298013 - RNA, 32 nt, Human
acagaggcagguugcuaauuugcacauagacc

SEQ ID NO: 298014 - RNA, 19 nt, Human
acagaggcccagcucacgg

SEQ ID NO: 298015 - RNA, 18 nt, Human
acagaggcuaacuacgga

SEQ ID NO: 298016 - RNA, 32 nt, Human
acagaggcuacaucugcccuagggagguccuu

SEQ ID NO: 298017 - RNA, 32 nt, Human
acagaggcuagaaagcauccauuaauuaauga

SEQ ID NO: 298018 - RNA, 32 nt, Human
acagaggcugcugagggcagaggaugcaacac

SEQ ID NO: 298019 - RNA, 32 nt, Human
acagaggcugguggggcccccuccucaucaga

SEQ ID NO: 298020 - RNA, 32 nt, Human
acagagggaagaggaggguggggcccuggaug

SEQ ID NO: 298021 - RNA, 18 nt, Human
acagagggagacuaugga

SEQ ID NO: 298022 - RNA, 32 nt, Human
acagagggagagaacaaaggggaagaagagag

SEQ ID NO: 298023 - RNA, 32 nt, Human
acagagggagagaacaaggccucccagcacuc

SEQ ID NO: 298024 - RNA, 32 nt, Human
acagagggaggcaggugggaauugagggugag

SEQ ID NO: 298025 - RNA, 32 nt, Human
acagagggaggucauuguuacacacacauccc

SEQ ID NO: 298026 - RNA, 32 nt, Human
acagagggagguggacggcagggaucagggag

SEQ ID NO: 298027 - RNA, 32 nt, Human
acagagggagugagaauacaggaaaagaguug

SEQ ID NO: 298028 - RNA, 32 nt, Human
acagagggcaguguauggaggaauggucuucu

SEQ ID NO: 298029 - RNA, 32 nt, Human
acagaggggaaagaagugaugaaggaggaacc

SEQ ID NO: 298030 - RNA, 32 nt, Human
acagaggggaagagaggcagagagggaaagag

SEQ ID NO: 298031 - RNA, 32 nt, Human
acagaggggauuaaagaggggaggagagagug

SEQ ID NO: 298032 - RNA, 18 nt, Human
acagaggggcagagcaag

SEQ ID NO: 298033 - RNA, 32 nt, Human
acagaggggcugggguguuuaccuggagccug

SEQ ID NO: 298034 - RNA, 32 nt, Human
acagaggggguuucaccauguuugucaggcug

SEQ ID NO: 298035 - RNA, 32 nt, Human
acagagggguccacucuccugccugcugggac

SEQ ID NO: 298036 - RNA, 32 nt, Human
acagaggguacaacaguggcaucacagugaca

SEQ ID NO: 298037 - RNA, 19 nt, Human
acagagguaaagugucuuu

SEQ ID NO: 298038 - RNA, 32 nt, Human
acagagguagugagccaguguccugggccucu

SEQ ID NO: 298039 - RNA, 25 nt, Human
acagaggucugccccacccacuucc

SEQ ID NO: 298040 - RNA, 32 nt, Human
acagaggucuuugaguuggaugguugcaaaua

SEQ ID NO: 298041 - RNA, 32 nt, Human
acagagguggcacaugcuuggccacacaucua

SEQ ID NO: 298042 - RNA, 32 nt, Human
acagagguggcucugccugcagcugggccucu

SEQ ID NO: 298043 - RNA, 21 nt, Human
acagagguggcugcugugcug

SEQ ID NO: 298044 - RNA, 32 nt, Human
acagagguggggaaguuguccugaggaagcag

SEQ ID NO: 298045 - RNA, 32 nt, Human
acagagguggugccagaaugccuggacugcag

SEQ ID NO: 298046 - RNA, 32 nt, Human
acagaggugugagacagcacuuuccauuugcc

SEQ ID NO: 298047 - RNA, 32 nt, Human
acagagguuaucugucccagguuaucugggca

SEQ ID NO: 298048 - RNA, 32 nt, Human
acagagguucagcagacgucucaggaucuguc

SEQ ID NO: 298049 - RNA, 32 nt, Human
acagagguuguuggcuuccaucaggggugguc

SEQ ID NO: 298050 - RNA, 19 nt, Human
acagaguaaaauggacaag

SEQ ID NO: 298051 - RNA, 32 nt, Human
acagaguaaauacuucaucugauuguucauuu

SEQ ID NO: 298052 - RNA, 20 nt, Human
acagaguaaauguuguguug

SEQ ID NO: 298053 - RNA, 17 nt, Human
acagaguaagaaacaag

SEQ ID NO: 298054 - RNA, 19 nt, Human
acagaguaauuggggcaag

SEQ ID NO: 298055 - RNA, 32 nt, Human
acagaguagagcagacguauaagaacuggaaa

SEQ ID NO: 298056 - RNA, 17 nt, Human
acagaguaggagagaag

SEQ ID NO: 298057 - RNA, 32 nt, Human
acagaguaggagagaaguuagggcuggcacac

SEQ ID NO: 298058 - RNA, 32 nt, Human
acagaguagggaaucauggcuggagaauugga

SEQ ID NO: 298059 - RNA, 32 nt, Human
acagaguauccugucuaaaaggucccaaagau

SEQ ID NO: 298060 - RNA, 21 nt, Human
acagagucaacuucugcagca

SEQ ID NO: 298061 - RNA, 28 nt, Human
acagagucaauaaaugugcacuguaugg

SEQ ID NO: 298062 - RNA, 32 nt, Human
acagagucacaguccccagucaauucccagac

SEQ ID NO: 298063 - RNA, 32 nt, Human
acagagucacccaggcuggagugcagugguga

SEQ ID NO: 298064 - RNA, 32 nt, Human
acagagucagggacagaagggaagggacccac

SEQ ID NO: 298065 - RNA, 32 nt, Human
acagagucagggggugacaaagccagacuggg

SEQ ID NO: 298066 - RNA, 32 nt, Human
acagagucauuuccugcccuaaaacccccugu

SEQ ID NO: 298067 - RNA, 32 nt, Human
acagaguccccaagguuccuguuguugccucc

SEQ ID NO: 298068 - RNA, 32 nt, Human
acagagucccgucucaccauccugggcuucca

SEQ ID NO: 298069 - RNA, 32 nt, Human
acagagucgcacucugucauccaggcuggagu

SEQ ID NO: 298070 - RNA, 32 nt, Human
acagagucucacuauuauccagugcaguggug

SEQ ID NO: 298071 - RNA, 19 nt, Human
acagagucucacucuguca

SEQ ID NO: 298072 - RNA, 19 nt, Human
acagagucucacucuguug

SEQ ID NO: 298073 - RNA, 32 nt, Human
acagagucucagggcccagcaaggucagguua

SEQ ID NO: 298074 - RNA, 19 nt, Human
acagagucucauucuguca

SEQ ID NO: 298075 - RNA, 32 nt, Human
acagagucucgcuauguugcccaggcuggucu

SEQ ID NO: 298076 - RNA, 32 nt, Human
acagagucucgcuccauugcccaggcuggacu

SEQ ID NO: 298077 - RNA, 25 nt, Human
acagagucuggggugcgcuguguug

SEQ ID NO: 298078 - RNA, 32 nt, Human
acagagucuggguuuucaugucccuguuugcu

SEQ ID NO: 298079 - RNA, 32 nt, Human
acagagucuugcuccauugcccaggcuggauu

SEQ ID NO: 298080 - RNA, 18 nt, Human
acagagugaaagagcagg

SEQ ID NO: 298081 - RNA, 20 nt, Human
acagagugaccugagaccag

SEQ ID NO: 298082 - RNA, 32 nt, Human
acagagugagauccugucucuaaaaauaaaau

SEQ ID NO: 298083 - RNA, 32 nt, Human
acagagugcaggcaggcagccaaaugaguggg

SEQ ID NO: 298084 - RNA, 32 nt, Human
acagagugccuuaggaauucucugauuuugau

SEQ ID NO: 298085 - RNA, 32 nt, Human
acagagugcuggagcugggaauacugacccag

SEQ ID NO: 298086 - RNA, 15 nt, Human
acagaguggaagaca

SEQ ID NO: 298087 - RNA, 18 nt, Human
acagaguggaggacacaa

SEQ ID NO: 298088 - RNA, 32 nt, Human
acagagugucgucgcccaccucccuggguccu

SEQ ID NO: 298089 - RNA, 32 nt, Human
acagagugugagccaccacacccagccagcaa

SEQ ID NO: 298090 - RNA, 32 nt, Human
acagaguguggacaucagcccagggccgcgug

SEQ ID NO: 298091 - RNA, 32 nt, Human
acagaguucagcccuggccuggccgccagccg

SEQ ID NO: 298092 - RNA, 18 nt, Human
acagaguugcagagcaag

SEQ ID NO: 298093 - RNA, 32 nt, Human
acagaguuggcaguauauuauagugauaauuu

SEQ ID NO: 298094 - RNA, 19 nt, Human
acagaguugggaaaaacaa

SEQ ID NO: 298095 - RNA, 32 nt, Human
acagaguuguccauuaccaaagccuggaaguu

SEQ ID NO: 298096 - RNA, 19 nt, Human
acagaguuucaccauguug

SEQ ID NO: 298097 - RNA, 32 nt, Human
acagaguuuggauaguaaagaaaacaacaaua

SEQ ID NO: 298098 - RNA, 32 nt, Human
acagauaaaacaacugaggcucagggagauuc

SEQ ID NO: 298099 - RNA, 32 nt, Human
acagauaaccccuucgcuuccagcucuuaaaa

SEQ ID NO: 298100 - RNA, 32 nt, Human
acagauaagaaggcacuggggccaggcucaca

SEQ ID NO: 298101 - RNA, 32 nt, Human
acagauaaucccuggugugggaagaggagucc

SEQ ID NO: 298102 - RNA, 32 nt, Human
acagauaauguucucacuacccauaauaugua

SEQ ID NO: 298103 - RNA, 32 nt, Human
acagauacaagugguugaagcagaauguucag

SEQ ID NO: 298104 - RNA, 32 nt, Human
acagauacacauccaagcucacaaauaggagu

SEQ ID NO: 298105 - RNA, 32 nt, Human
acagauacugugagcuuacauugaaaacagau

SEQ ID NO: 298106 - RNA, 32 nt, Human
acagauacuuguucucauuccguauaugagca

SEQ ID NO: 298107 - RNA, 32 nt, Human
acagauagcaggaaggcagaaagaaaacauaa

SEQ ID NO: 298108 - RNA, 32 nt, Human
acagauaggaagggauuggcaucggcuggccu

SEQ ID NO: 298109 - RNA, 32 nt, Human
acagauaggagguggcccauaggagcaguccc

SEQ ID NO: 298110 - RNA, 32 nt, Human
acagauaggccugccacuggucauggguagcu

SEQ ID NO: 298111 - RNA, 32 nt, Human
acagauagggucuugcuauguugcccaggcug

SEQ ID NO: 298112 - RNA, 32 nt, Human
acagauaguccccauggaguagauuguccaaa

SEQ ID NO: 298113 - RNA, 24 nt, Human
acagauauuggaaaaaagacaaca

SEQ ID NO: 298114 - RNA, 32 nt, Human
acagauauuuacuugguaaagugcagugggga

SEQ ID NO: 298115 - RNA, 32 nt, Human
acagaucaagaaacugaagaccagagaagaga

SEQ ID NO: 298116 - RNA, 32 nt, Human
acagaucaaucucugcagaugacagggaggug

SEQ ID NO: 298117 - RNA, 32 nt, Human
acagaucaauguacacuuaccucuccagaagg

SEQ ID NO: 298118 - RNA, 32 nt, Human
acagaucacagcaacgacaaacgcucauggcg

SEQ ID NO: 298119 - RNA, 32 nt, Human
acagaucacugcagccuccaacuccugggcuc

SEQ ID NO: 298120 - RNA, 32 nt, Human
acagaucaggagaaccucagucugacgacauu

SEQ ID NO: 298121 - RNA, 32 nt, Human
acagaucaugccacugcacuccagccugggca

SEQ ID NO: 298122 - RNA, 32 nt, Human
acagauccagaagaugaaagaaggaagugagc

SEQ ID NO: 298123 - RNA, 32 nt, Human
acagaucccagaaugacaaggaagggaccuua

SEQ ID NO: 298124 - RNA, 32 nt, Human
acagauccuacaggacugucugucuccugccc

SEQ ID NO: 298125 - RNA, 32 nt, Human
acagaucuaaauauacuaucuugguucaauaa

SEQ ID NO: 298126 - RNA, 32 nt, Human
acagaucucucucaaugcauuagcaaaaauca

SEQ ID NO: 298127 - RNA, 32 nt, Human
acagaucugagaucacugacucccagagacac

SEQ ID NO: 298128 - RNA, 32 nt, Human
acagaucuugacaccaauacaggggcuggaua

SEQ ID NO: 298129 - RNA, 24 nt, Human
acagaucuugggggacauugggga

SEQ ID NO: 298130 - RNA, 32 nt, Human
acagaucuuuguccuaaccacaagguuccccu

SEQ ID NO: 298131 - RNA, 32 nt, Human
acagaugaagugccagagcaucagagauaggu

SEQ ID NO: 298132 - RNA, 32 nt, Human
acagaugacaggcccagaggcacacccagggc

SEQ ID NO: 298133 - RNA, 32 nt, Human
acagaugaccaaagccaccacauuuagaacuu

SEQ ID NO: 298134 - RNA, 32 nt, Human
acagaugacuccacagcccagaucccauucuu

SEQ ID NO: 298135 - RNA, 32 nt, Human
acagaugacugucaagugaaugagcuguugau

SEQ ID NO: 298136 - RNA, 32 nt, Human
acagaugagaagcagagugaccaugugacaua

SEQ ID NO: 298137 - RNA, 32 nt, Human
acagaugaggcaaacguggcacggagagcucc

SEQ ID NO: 298138 - RNA, 32 nt, Human
acagaugaggucuugcuguguugcccaggcug

SEQ ID NO: 298139 - RNA, 32 nt, Human
acagaugagucacaccuuugagcuuaaucuug

SEQ ID NO: 298140 - RNA, 32 nt, Human
acagaugaguccauuugaagccguccaagaac

SEQ ID NO: 298141 - RNA, 32 nt, Human
acagaugauaccuuaauauuaacuuacuuaca

SEQ ID NO: 298142 - RNA, 29 nt, Human
acagaugaugagacagaguuuagggugca

SEQ ID NO: 298143 - RNA, 32 nt, Human
acagaugauguggaaggagcucaaacagacga

SEQ ID NO: 298144 - RNA, 32 nt, Human
acagaugauucucaccuuuacuucucuccaga

SEQ ID NO: 298145 - RNA, 32 nt, Human
acagaugcaaauucuggcagcuggcuucuuug

SEQ ID NO: 298146 - RNA, 32 nt, Human
acagaugcacacacacaagcacacaugcacag

SEQ ID NO: 298147 - RNA, 22 nt, Human
acagaugcacugcugugcugcu

SEQ ID NO: 298148 - RNA, 32 nt, Human
acagaugcagaaauccucaaaauauuagcaaa

SEQ ID NO: 298149 - RNA, 32 nt, Human
acagaugcagaacaagucauauuugaagaaug

SEQ ID NO: 298150 - RNA, 32 nt, Human
acagaugccaaaagcuguacuuuccaucaggc

SEQ ID NO: 298151 - RNA, 32 nt, Human
acagaugccaggagagcugggcccaagacucc

SEQ ID NO: 298152 - RNA, 32 nt, Human
acagaugccaucauuucccuuuccccucugaa

SEQ ID NO: 298153 - RNA, 22 nt, Human
acagaugccuguggcauugcaa

SEQ ID NO: 298154 - RNA, 32 nt, Human
acagaugcuccagggaugauucaagccauucc

SEQ ID NO: 298155 - RNA, 32 nt, Human
acagaugcuggagcagguguaggaggaagcgc

SEQ ID NO: 298156 - RNA, 32 nt, Human
acagaugcugggacccagucucugcccagguc

SEQ ID NO: 298157 - RNA, 32 nt, Human
acagauggacacuuuggauacugugaaaagca

SEQ ID NO: 298158 - RNA, 17 nt, Human
acagauggagagacaag

SEQ ID NO: 298159 - RNA, 32 nt, Human
acagauggagcuuugggaacgcggagaacagu

SEQ ID NO: 298160 - RNA, 32 nt, Human
acagauggaggcaguggcuggugggccacucu

SEQ ID NO: 298161 - RNA, 32 nt, Human
acagauggagucuugcucugucacccaggcug

SEQ ID NO: 298162 - RNA, 32 nt, Human
acagauggauaaacugccucgucugaucuugu

SEQ ID NO: 298163 - RNA, 32 nt, Human
acagauggauaacugccaagaaccagauuuuu

SEQ ID NO: 298164 - RNA, 32 nt, Human
acagauggcaugaaugaaaaugugcucuguca

SEQ ID NO: 298165 - RNA, 29 nt, Human
acagauggcauugucccagucuguucccu

SEQ ID NO: 298166 - RNA, 24 nt, Human
acagauggccacuuccagagcuug

SEQ ID NO: 298167 - RNA, 32 nt, Human
acagauggccacuuugaccuggggcuggacgu

SEQ ID NO: 298168 - RNA, 19 nt, Human
acagauggccagccccuua

SEQ ID NO: 298169 - RNA, 19 nt, Human
acagauggccugagauaag

SEQ ID NO: 298170 - RNA, 32 nt, Human
acagauggccuggaucagugcaaugugcaaca

SEQ ID NO: 298171 - RNA, 29 nt, Human
acagaugggcauaggugcagugagugcag

SEQ ID NO: 298172 - RNA, 32 nt, Human
acagaugggccaccaggcaggagcugcugcug

SEQ ID NO: 298173 - RNA, 32 nt, Human
acagauggggaaacugaagcccagggagguac

SEQ ID NO: 298174 - RNA, 32 nt, Human
acagauggggucuugcuauguugcccaagcug

SEQ ID NO: 298175 - RNA, 32 nt, Human
acagaugggguuucaccauauugggcaggcug

SEQ ID NO: 298176 - RNA, 32 nt, Human
acagaugggguuucaccauguuggccaggcug

SEQ ID NO: 298177 - RNA, 32 nt, Human
acagaugggguuucaccauguuggucaggcua

SEQ ID NO: 298178 - RNA, 32 nt, Human
acagaugguauucugguuucuugcaggagguu

SEQ ID NO: 298179 - RNA, 32 nt, Human
acagauggucuagacagcccucugucacccug

SEQ ID NO: 298180 - RNA, 32 nt, Human
acagauguagaacuuuaauaauccagaugcaa

SEQ ID NO: 298181 - RNA, 32 nt, Human
acagauguccuggaugaugguccauaagaaua

SEQ ID NO: 298182 - RNA, 32 nt, Human
acagaugucuggcagugaggguggagggagac

SEQ ID NO: 298183 - RNA, 32 nt, Human
acagaugugagccaccgugccuagccaaggau

SEQ ID NO: 298184 - RNA, 32 nt, Human
acagaugugagccugugccuggcuggucuuuc

SEQ ID NO: 298185 - RNA, 24 nt, Human
acagaugugcaccaccacacuggc

SEQ ID NO: 298186 - RNA, 32 nt, Human
acagaugugcagugugcacggaucacagggaa

SEQ ID NO: 298187 - RNA, 32 nt, Human
acagaugugcugcuguucccaggccaccugca

SEQ ID NO: 298188 - RNA, 20 nt, Human
acagauguggcugagacagg

SEQ ID NO: 298189 - RNA, 32 nt, Human
acagaugugugggagugcagggcugcagaggg

SEQ ID NO: 298190 - RNA, 32 nt, Human
acagauguuccucuggccuucuugccuggggc

SEQ ID NO: 298191 - RNA, 22 nt, Human
acagauuaagggcuaagggcaa

SEQ ID NO: 298192 - RNA, 32 nt, Human
acagauuaaguuuccagaagcaguggauggga

SEQ ID NO: 298193 - RNA, 32 nt, Human
acagauuaauaucaucauaaaauaucauuuac

SEQ ID NO: 298194 - RNA, 32 nt, Human
acagauuauauggugaaccuacuuuuagagug

SEQ ID NO: 298195 - RNA, 17 nt, Human
acagauuauugguuaca

SEQ ID NO: 298196 - RNA, 32 nt, Human
acagauuauuuuuaucagagcuguaaagaaaa

SEQ ID NO: 298197 - RNA, 32 nt, Human
acagauucauggucugcugcagcuggggaugg

SEQ ID NO: 298198 - RNA, 32 nt, Human
acagauuccaggaccacugaaaccagcugagg

SEQ ID NO: 298199 - RNA, 21 nt, Human
acagauuccucacacugggga

SEQ ID NO: 298200 - RNA, 32 nt, Human
acagauucugaccuuagauucugugacaaacu

SEQ ID NO: 298201 - RNA, 32 nt, Human
acagauucugguggcucccugcuggcccucuu

SEQ ID NO: 298202 - RNA, 32 nt, Human
acagauugaagugagcuuuagugagcaaaagg

SEQ ID NO: 298203 - RNA, 32 nt, Human
acagauugaggucucuguggcuuuggugaccc

SEQ ID NO: 298204 - RNA, 30 nt, Human
acagauugcugcuccaugcauucuguccag

SEQ ID NO: 298205 - RNA, 32 nt, Human
acagauuggcagccacugcagagaugcagaau

SEQ ID NO: 298206 - RNA, 32 nt, Human
acagauuuccaucagcaggaugugggggcuca

SEQ ID NO: 298207 - RNA, 32 nt, Human
acagauuugagguuucuucucaucucauuuag

SEQ ID NO: 298208 - RNA, 32 nt, Human
acagauuugcuacacaucuuaggauaaauaug

SEQ ID NO: 298209 - RNA, 32 nt, Human
acagauuuugcaaagcggaggcugcgacgggu

SEQ ID NO: 298210 - RNA, 32 nt, Human
acagcaaaaagcuugcugagaaggcugugcug

SEQ ID NO: 298211 - RNA, 32 nt, Human
acagcaaaagaggcccuucuuccucacccaag

SEQ ID NO: 298212 - RNA, 32 nt, Human
acagcaaacugcagaggucacuccaggcugug

SEQ ID NO: 298213 - RNA, 32 nt, Human
acagcaaagccagaaaugcucucuccagggag

SEQ ID NO: 298214 - RNA, 32 nt, Human
acagcaaaugagaaaaguggacuggggaaugc

SEQ ID NO: 298215 - RNA, 32 nt, Human
acagcaaaugagauguaugcccaaagcgguag

SEQ ID NO: 298216 - RNA, 32 nt, Human
acagcaacaacaaaagcccagccgcugucuga

SEQ ID NO: 298217 - RNA, 32 nt, Human
acagcaacaacaaaaguauacucuaccauuaa

SEQ ID NO: 298218 - RNA, 32 nt, Human
acagcaacaacaaagacagacuuuccguagca

SEQ ID NO: 298219 - RNA, 32 nt, Human
acagcaacaaccgaggggccacugccugauga

SEQ ID NO: 298220 - RNA, 32 nt, Human
acagcaacagaaguaaauugaagauacuggcu

SEQ ID NO: 298221 - RNA, 32 nt, Human
acagcaacagaaguccaggacccacuagguug

SEQ ID NO: 298222 - RNA, 19 nt, Human
acagcaacagagagcagga

SEQ ID NO: 298223 - RNA, 32 nt, Human
acagcaaccagaaaacaucugcucacuuccuu

SEQ ID NO: 298224 - RNA, 32 nt, Human
acagcaaccccagguguccagagcacugcccc

SEQ ID NO: 298225 - RNA, 32 nt, Human
acagcaacuuccuguagugagcacuuuguaug

SEQ ID NO: 298226 - RNA, 32 nt, Human
acagcaagaacaguccauguuguauauaauac

SEQ ID NO: 298227 - RNA, 32 nt, Human
acagcaagaacgggacccugguguggcgcuug

SEQ ID NO: 298228 - RNA, 19 nt, Human
acagcaagagagagacaag

SEQ ID NO: 298229 - RNA, 32 nt, Human
acagcaagauggcaaaagcuugcugaguggua

SEQ ID NO: 298230 - RNA, 32 nt, Human
acagcaagcgaguuaucgucuucuguauuuug

SEQ ID NO: 298231 - RNA, 21 nt, Human
acagcaagcuuuugggaucgg

SEQ ID NO: 298232 - RNA, 32 nt, Human
acagcaaggaagaaccauggcccaggggucac

SEQ ID NO: 298233 - RNA, 32 nt, Human
acagcaaggcagcaaggagacggggaagagca

SEQ ID NO: 298234 - RNA, 32 nt, Human
acagcaaggcccugccacccaccuucaggcca

SEQ ID NO: 298235 - RNA, 32 nt, Human
acagcaaguccacccuaacuuguuacacagca

SEQ ID NO: 298236 - RNA, 32 nt, Human
acagcaagugaagaaagaggcgcagagcccug

SEQ ID NO: 298237 - RNA, 32 nt, Human
acagcaaucaaauuaaggacucaugaaggggg

SEQ ID NO: 298238 - RNA, 32 nt, Human
acagcaaucaaauuauggacacaugaaagggg

SEQ ID NO: 298239 - RNA, 32 nt, Human
acagcaaucaaauuauggacccaugaaagggg

SEQ ID NO: 298240 - RNA, 32 nt, Human
acagcaaucaaauuauggacccaugaaggggg

SEQ ID NO: 298241 - RNA, 32 nt, Human
acagcaaucuagucacucccuggucaucccuc

SEQ ID NO: 298242 - RNA, 32 nt, Human
acagcaaucuucacuccagucucugccucugu

SEQ ID NO: 298243 - RNA, 32 nt, Human
acagcacaaaggaaagcgagggcgggggagga

SEQ ID NO: 298244 - RNA, 32 nt, Human
acagcacacagcaagcaaccacaaaaccagag

SEQ ID NO: 298245 - RNA, 32 nt, Human
acagcacagagcgcugaacacacaccccacag

SEQ ID NO: 298246 - RNA, 32 nt, Human
acagcacagaugagguugagaccaugcaguca

SEQ ID NO: 298247 - RNA, 32 nt, Human
acagcacagcacagcagugcugacagcaucga

SEQ ID NO: 298248 - RNA, 32 nt, Human
acagcacaggccaucucagcuugguugccaac

SEQ ID NO: 298249 - RNA, 32 nt, Human
acagcacauacgugugcacacgcaugcacaca

SEQ ID NO: 298250 - RNA, 31 nt, Human
acagcacauacuucuuuucuuucauuuaaua

SEQ ID NO: 298251 - RNA, 32 nt, Human
acagcacaucacagacacaguuucuggaauac

SEQ ID NO: 298252 - RNA, 32 nt, Human
acagcacaugcacacaggugcacagaccacac

SEQ ID NO: 298253 - RNA, 32 nt, Human
acagcaccaagcucagccuuuccuccgaggcu

SEQ ID NO: 298254 - RNA, 32 nt, Human
acagcaccaaggcccuccuggagcucacugag

SEQ ID NO: 298255 - RNA, 21 nt, Human
acagcaccaccagcagcagca

SEQ ID NO: 298256 - RNA, 32 nt, Human
acagcaccacccccgcaccugcccucggccuu

SEQ ID NO: 298257 - RNA, 32 nt, Human
acagcaccacugcacagagcuuugggaggcug

SEQ ID NO: 298258 - RNA, 32 nt, Human
acagcaccacugcacuccagccaggaaugagg

SEQ ID NO: 298259 - RNA, 32 nt, Human
acagcaccacugcacuccagccugggugacag

SEQ ID NO: 298260 - RNA, 32 nt, Human
acagcacccacacacggcugcugguagagggu

SEQ ID NO: 298261 - RNA, 32 nt, Human
acagcaccucccaccaaccagccacucccggu

SEQ ID NO: 298262 - RNA, 32 nt, Human
acagcaccugaaguggcaaagauccauggucu

SEQ ID NO: 298263 - RNA, 32 nt, Human
acagcaccuggguccucgccacccuaagcccc

SEQ ID NO: 298264 - RNA, 32 nt, Human
acagcaccuugccugaacaugacuuuaaagaa

SEQ ID NO: 298265 - RNA, 32 nt, Human
acagcacggccuuggucuccaggcuggccccc

SEQ ID NO: 298266 - RNA, 29 nt, Human
acagcacgucuguguugaccuggacccac

SEQ ID NO: 298267 - RNA, 32 nt, Human
acagcacgugccauccuaagccugugugugug

SEQ ID NO: 298268 - RNA, 32 nt, Human
acagcacuauccucaucucuccccagauguga

SEQ ID NO: 298269 - RNA, 32 nt, Human
acagcacuccacugcuggugaaucccaucuaa

SEQ ID NO: 298270 - RNA, 32 nt, Human
acagcacuccagccugggcgacagagugagac

SEQ ID NO: 298271 - RNA, 32 nt, Human
acagcacuccccaccuuucuuucguucaucuc

SEQ ID NO: 298272 - RNA, 32 nt, Human
acagcacugcacugcagccugggugacaaagc

SEQ ID NO: 298273 - RNA, 32 nt, Human
acagcacugcacugcugccugggcgacagcga

SEQ ID NO: 298274 - RNA, 32 nt, Human
acagcacugccuggauggccgcuguccggcag

SEQ ID NO: 298275 - RNA, 32 nt, Human
acagcacuggcccaccucccacucacagcccc

SEQ ID NO: 298276 - RNA, 32 nt, Human
acagcacugggcugccaggauuccccuggccc

SEQ ID NO: 298277 - RNA, 32 nt, Human
acagcacuguccuaugaaccuuccugcacgcc

SEQ ID NO: 298278 - RNA, 32 nt, Human
acagcacuucaggcugggaaaggagccaggcu

SEQ ID NO: 298279 - RNA, 32 nt, Human
acagcacuugacuucaccaggugacccuuugg

SEQ ID NO: 298280 - RNA, 32 nt, Human
acagcagaaaacugcauucuuacuauuuaccc

SEQ ID NO: 298281 - RNA, 32 nt, Human
acagcagaaagucccugaagccugccaaguac

SEQ ID NO: 298282 - RNA, 32 nt, Human
acagcagaaauguuccugcacuagacaauuaa

SEQ ID NO: 298283 - RNA, 21 nt, Human
acagcagaaccuaccugcagc

SEQ ID NO: 298284 - RNA, 32 nt, Human
acagcagaauuggccucagugaagagcuuaaa

SEQ ID NO: 298285 - RNA, 32 nt, Human
acagcagacugaggcccccacccugaaaaagc

SEQ ID NO: 298286 - RNA, 32 nt, Human
acagcagagaacuggcuggaugaccugugacu

SEQ ID NO: 298287 - RNA, 31 nt, Human
acagcagagacacucaguuguguggggugcu

SEQ ID NO: 298288 - RNA, 32 nt, Human
acagcagagcagagaggcccagggaggggcca

SEQ ID NO: 298289 - RNA, 32 nt, Human
acagcagagcccacagguggcagaaucccacc

SEQ ID NO: 298290 - RNA, 22 nt, Human
acagcagagcccgcggugcagc

SEQ ID NO: 298291 - RNA, 32 nt, Human
acagcagagguggaggcaagcagugacuccug

SEQ ID NO: 298292 - RNA, 21 nt, Human
acagcagaguccagcugcagc

SEQ ID NO: 298293 - RNA, 17 nt, Human
acagcagauaagaucaa

SEQ ID NO: 298294 - RNA, 32 nt, Human
acagcagaugacagggugauugauggcaggca

SEQ ID NO: 298295 - RNA, 32 nt, Human
acagcagaugaguugaguggggcagagggaca

SEQ ID NO: 298296 - RNA, 32 nt, Human
acagcagauguaagcacagaaauaguuccagu

SEQ ID NO: 298297 - RNA, 32 nt, Human
acagcagauucuucacgcccagccucugccuc

SEQ ID NO: 298298 - RNA, 32 nt, Human
acagcagauugcuucccuguuggugauugcaa

SEQ ID NO: 298299 - RNA, 32 nt, Human
acagcagcaagaaaaucagcuugguaccacca

SEQ ID NO: 298300 - RNA, 32 nt, Human
acagcagcaagaaaauuuuccucgacaagaac

SEQ ID NO: 298301 - RNA, 32 nt, Human
acagcagcacauauuaucauacagacagaaaa

SEQ ID NO: 298302 - RNA, 32 nt, Human
acagcagcacauuggccaccagaagacaccca

SEQ ID NO: 298303 - RNA, 32 nt, Human
acagcagcagaagaauuauggcagcucuucac

SEQ ID NO: 298304 - RNA, 32 nt, Human
acagcagcagaggggcccuagagcccccacag

SEQ ID NO: 298305 - RNA, 32 nt, Human
acagcagcagaugucccucacacacaugcccu

SEQ ID NO: 298306 - RNA, 24 nt, Human
acagcagcagcagcagccacagca

SEQ ID NO: 298307 - RNA, 32 nt, Human
acagcagcagcagcugcugccuccacagugug

SEQ ID NO: 298308 - RNA, 32 nt, Human
acagcagcagggaagccauucucacugcaucc

SEQ ID NO: 298309 - RNA, 32 nt, Human
acagcagcaugagccucaggugcuuuggggau

SEQ ID NO: 298310 - RNA, 32 nt, Human
acagcagcaugcccuucucaccccuugcagug

SEQ ID NO: 298311 - RNA, 32 nt, Human
acagcagccccacggccccaugggaggcggcg

SEQ ID NO: 298312 - RNA, 32 nt, Human
acagcagcccugggggugggugcaaugaggau

SEQ ID NO: 298313 - RNA, 32 nt, Human
acagcagccgccgggcacgguuaugggggcgg

SEQ ID NO: 298314 - RNA, 32 nt, Human
acagcagccuucugagucugggucaggaagau

SEQ ID NO: 298315 - RNA, 32 nt, Human
acagcagcucuauugaauaacaugcaucugaa

SEQ ID NO: 298316 - RNA, 32 nt, Human
acagcagcugaggagguacuagcugguagaga

SEQ ID NO: 298317 - RNA, 32 nt, Human
acagcagcugcacacaaccucuugcugaaaua

SEQ ID NO: 298318 - RNA, 32 nt, Human
acagcagcugccugcccugcccuggcucaacg

SEQ ID NO: 298319 - RNA, 32 nt, Human
acagcagcugcuacuccaccugcagcugggcu

SEQ ID NO: 298320 - RNA, 32 nt, Human
acagcaggaaaagauucugcgcuuucagggag

SEQ ID NO: 298321 - RNA, 32 nt, Human
acagcaggaacuugagggaaagaugaauaaag

SEQ ID NO: 298322 - RNA, 32 nt, Human
acagcaggaagcaaagcagagguggagaagau

SEQ ID NO: 298323 - RNA, 32 nt, Human
acagcaggaagugccucugacagauuccaaga

SEQ ID NO: 298324 - RNA, 32 nt, Human
acagcaggacaggccaggggagggcaucugga

SEQ ID NO: 298325 - RNA, 21 nt, Human
acagcaggacccaaaugcagc

SEQ ID NO: 298326 - RNA, 32 nt, Human
acagcaggacuggccacacccacgccgcaccu

SEQ ID NO: 298327 - RNA, 32 nt, Human
acagcaggagcacgggcugcccgcgcggugcg

SEQ ID NO: 298328 - RNA, 32 nt, Human
acagcaggagcagggcgagagccagacggagu

SEQ ID NO: 298329 - RNA, 32 nt, Human
acagcaggaggucagcccagggccaggagaca

SEQ ID NO: 298330 - RNA, 32 nt, Human
acagcaggaguacuaaacuuguucuuucuugc

SEQ ID NO: 298331 - RNA, 32 nt, Human
acagcaggauuagcuucagcuugggcuggagc

SEQ ID NO: 298332 - RNA, 32 nt, Human
acagcaggccccuguccuucugucgggcgccg

SEQ ID NO: 298333 - RNA, 32 nt, Human
acagcaggccucugggguccagccugggagcc

SEQ ID NO: 298334 - RNA, 17 nt, Human
acagcaggcuccugguc

SEQ ID NO: 298335 - RNA, 32 nt, Human
acagcaggcuuagguucuaguuccgugucugc

SEQ ID NO: 298336 - RNA, 32 nt, Human
acagcagggaaacugagaccuggaaagggagg

SEQ ID NO: 298337 - RNA, 32 nt, Human
acagcagggaaagggaggagaaaucugauguc

SEQ ID NO: 298338 - RNA, 32 nt, Human
acagcagggaagggaaguuccaccugagcaaa

SEQ ID NO: 298339 - RNA, 32 nt, Human
acagcagggaggacagcagggcgggcaggggg

SEQ ID NO: 298340 - RNA, 32 nt, Human
acagcagggaggcugaggcugaaggaauacuu

SEQ ID NO: 298341 - RNA, 32 nt, Human
acagcagggccugagggcaggaacagaggacg

SEQ ID NO: 298342 - RNA, 32 nt, Human
acagcagguaacacccacccccaggcagcccc

SEQ ID NO: 298343 - RNA, 32 nt, Human
acagcagguccuuaacuucucuccaguggacu

SEQ ID NO: 298344 - RNA, 32 nt, Human
acagcaggugccagugacuacuucucccuggu

SEQ ID NO: 298345 - RNA, 22 nt, Human
acagcaggugcugccauacucu

SEQ ID NO: 298346 - RNA, 32 nt, Human
acagcagguucugcagcauccugccuugcugc

SEQ ID NO: 298347 - RNA, 32 nt, Human
acagcagguuuauccagaugaacugagaaggu

SEQ ID NO: 298348 - RNA, 32 nt, Human
acagcagucaugguuaggaaggcagugcccuu

SEQ ID NO: 298349 - RNA, 32 nt, Human
acagcaguccccaagcauguggacagaugcau

SEQ ID NO: 298350 - RNA, 32 nt, Human
acagcagucggagacaucuggcagagacaaau

SEQ ID NO: 298351 - RNA, 32 nt, Human
acagcagucuccccgggccuccuggccucucc

SEQ ID NO: 298352 - RNA, 32 nt, Human
acagcagucugauguccaccuggaaugcuuga

SEQ ID NO: 298353 - RNA, 32 nt, Human
acagcagucuucauauguaucaauagcaagca

SEQ ID NO: 298354 - RNA, 32 nt, Human
acagcagucuugcugaugcuccuggccgaaua

SEQ ID NO: 298355 - RNA, 32 nt, Human
acagcagugauaccccacucucuccauuauug

SEQ ID NO: 298356 - RNA, 32 nt, Human
acagcagugaugacacugucugucuguggcuc

SEQ ID NO: 298357 - RNA, 32 nt, Human
acagcagugcaccucagagucacauucaugaa

SEQ ID NO: 298358 - RNA, 32 nt, Human
acagcagugccaaggcugagaccugucccugg

SEQ ID NO: 298359 - RNA, 16 nt, Human
acagcagugcugguuu

SEQ ID NO: 298360 - RNA, 31 nt, Human
acagcagugcuucucccugugcugagguaca

SEQ ID NO: 298361 - RNA, 32 nt, Human
acagcaguggauucuuucucucagaaggucau

SEQ ID NO: 298362 - RNA, 32 nt, Human
acagcaguggugaggccaguuucaugucuugu

SEQ ID NO: 298363 - RNA, 32 nt, Human
acagcagugguguccaugggcucuggagacca

SEQ ID NO: 298364 - RNA, 32 nt, Human
acagcagugugaauagccuggccaccagccau

SEQ ID NO: 298365 - RNA, 32 nt, Human
acagcaguuacacugcggcgggcgucuguucu

SEQ ID NO: 298366 - RNA, 32 nt, Human
acagcauaagagacugcccugcuugguguuuu

SEQ ID NO: 298367 - RNA, 32 nt, Human
acagcauaagaugaugaguaagaaaagaaugc

SEQ ID NO: 298368 - RNA, 32 nt, Human
acagcauaaucaggaucagcaguccugaagcu

SEQ ID NO: 298369 - RNA, 20 nt, Human
acagcauaaugcgagacaag

SEQ ID NO: 298370 - RNA, 32 nt, Human
acagcauaauuaagagagauagccuucgaaaa

SEQ ID NO: 298371 - RNA, 32 nt, Human
acagcauacucccaucuauacggcuggcucuu

SEQ ID NO: 298372 - RNA, 21 nt, Human
acagcauagaagaaagagcaa

SEQ ID NO: 298373 - RNA, 20 nt, Human
acagcauagaauaaaagcaa

SEQ ID NO: 298374 - RNA, 32 nt, Human
acagcauauuuagagaaaagacuuggagcuua

SEQ ID NO: 298375 - RNA, 32 nt, Human
acagcaucagcaugggcuuagagcuggcauga

SEQ ID NO: 298376 - RNA, 32 nt, Human
acagcaucauaacucagcaggcuggauuuaau

SEQ ID NO: 298377 - RNA, 19 nt, Human
acagcauccagaaagaguc

SEQ ID NO: 298378 - RNA, 32 nt, Human
acagcauccuccucucaccugugggucagagc

SEQ ID NO: 298379 - RNA, 32 nt, Human
acagcaucucaccauccuccuguuaucccacc

SEQ ID NO: 298380 - RNA, 32 nt, Human
acagcaucucacuauguugccaaggcucaucu

SEQ ID NO: 298381 - RNA, 32 nt, Human
acagcaucugugccaugcaauggggcuuuggu

SEQ ID NO: 298382 - RNA, 32 nt, Human
acagcaucuuccugguuguauguggccuguuu

SEQ ID NO: 298383 - RNA, 32 nt, Human
acagcaugaaugugguucuguacagugaugua

SEQ ID NO: 298384 - RNA, 32 nt, Human
acagcaugagaugcucagucggcuuggggaag

SEQ ID NO: 298385 - RNA, 32 nt, Human
acagcaugaggcaaaaauguccagccaccccu

SEQ ID NO: 298386 - RNA, 32 nt, Human
acagcaugcagucuuccaucugcuuucucuuc

SEQ ID NO: 298387 - RNA, 32 nt, Human
acagcaugccaccacaguaacacacauuagag

SEQ ID NO: 298388 - RNA, 32 nt, Human
acagcaugccagcuccucaguguuacauuccu

SEQ ID NO: 298389 - RNA, 32 nt, Human
acagcaugcugccugaggguuuucagaauagg

SEQ ID NO: 298390 - RNA, 32 nt, Human
acagcauggaaagaaggaggcagaaguggaac

SEQ ID NO: 298391 - RNA, 32 nt, Human
acagcauggaagaugugugcucuggcucggau

SEQ ID NO: 298392 - RNA, 32 nt, Human
acagcauggcugugguuccacacuccucuguc

SEQ ID NO: 298393 - RNA, 18 nt, Human
acagcauggggcuguucu

SEQ ID NO: 298394 - RNA, 32 nt, Human
acagcaugggggaaacccauccauccaauuac

SEQ ID NO: 298395 - RNA, 32 nt, Human
acagcaugguggucacuguugcugcugguaga

SEQ ID NO: 298396 - RNA, 32 nt, Human
acagcaugucucgacuuccugaggaauaucug

SEQ ID NO: 298397 - RNA, 32 nt, Human
acagcauguggugaaaccaaaaucacugauuu

SEQ ID NO: 298398 - RNA, 32 nt, Human
acagcauuaucagaaacacacucugaaaacau

SEQ ID NO: 298399 - RNA, 32 nt, Human
acagcauucagcccugcagccugggaccuugc

SEQ ID NO: 298400 - RNA, 32 nt, Human
acagcauuccagccugggcgauggagugagac

SEQ ID NO: 298401 - RNA, 32 nt, Human
acagcauucccaggaacaaaggcugggggugg

SEQ ID NO: 298402 - RNA, 19 nt, Human
acagcauucugggcuuaaa

SEQ ID NO: 298403 - RNA, 32 nt, Human
acagcauugaucuccuggaggcugguucugcu

SEQ ID NO: 298404 - RNA, 32 nt, Human
acagcauuuugucaucuaaaguccagugacau

SEQ ID NO: 298405 - RNA, 32 nt, Human
acagccaaauugcagaagaaacuccuggaucc

SEQ ID NO: 298406 - RNA, 20 nt, Human
acagccaacagaaaaaucaa

SEQ ID NO: 298407 - RNA, 32 nt, Human
acagccaaccucaggcuuagaucaauguauag

SEQ ID NO: 298408 - RNA, 32 nt, Human
acagccaacuccugacacuuucacacucacag

SEQ ID NO: 298409 - RNA, 32 nt, Human
acagccaagaggagucagagaugaggugggaa

SEQ ID NO: 298410 - RNA, 32 nt, Human
acagccaagauaagauccacacacacauuauu

SEQ ID NO: 298411 - RNA, 32 nt, Human
acagccaagcaggugugggaggcugcccgcug

SEQ ID NO: 298412 - RNA, 32 nt, Human
acagccaagccgcugcggccggguccggcgcg

SEQ ID NO: 298413 - RNA, 32 nt, Human
acagccaagccuuuugaagacuaauuagaaaa

SEQ ID NO: 298414 - RNA, 32 nt, Human
acagccaaggaacuuugagaccugccauuaca

SEQ ID NO: 298415 - RNA, 32 nt, Human
acagccaaggauccagaaggccaaggucuugu

SEQ ID NO: 298416 - RNA, 32 nt, Human
acagccaaguacucguuuccacaccaagacuc

SEQ ID NO: 298417 - RNA, 32 nt, Human
acagccaaguucaaggaagcagccuggcuaaa

SEQ ID NO: 298418 - RNA, 32 nt, Human
acagccacaaagcaaaccacagggccagugac

SEQ ID NO: 298419 - RNA, 32 nt, Human
acagccacacacacagucacacagacgcguuc

SEQ ID NO: 298420 - RNA, 32 nt, Human
acagccacacacaucaauuuguuuuugguuaa

SEQ ID NO: 298421 - RNA, 21 nt, Human
acagccacagccccaggcaua

SEQ ID NO: 298422 - RNA, 32 nt, Human
acagccacagccgccgccaucacucgcucgcc

SEQ ID NO: 298423 - RNA, 32 nt, Human
acagccacaucucuuccauugccuggugcccu

SEQ ID NO: 298424 - RNA, 21 nt, Human
acagccaccaagccugacaga

SEQ ID NO: 298425 - RNA, 32 nt, Human
acagccaccaauaagaacaaaggcaucauuug

SEQ ID NO: 298426 - RNA, 18 nt, Human
acagccaccauucauuau

SEQ ID NO: 298427 - RNA, 32 nt, Human
acagccacccacccucucccaccucaugcucc

SEQ ID NO: 298428 - RNA, 17 nt, Human
acagccacccccaccac

SEQ ID NO: 298429 - RNA, 19 nt, Human
acagccacccuggaacgga

SEQ ID NO: 298430 - RNA, 17 nt, Human
acagccaccugccacca

SEQ ID NO: 298431 - RNA, 32 nt, Human
acagccacuccaacucuccaccuccagcuucu

SEQ ID NO: 298432 - RNA, 32 nt, Human
acagccacugagauccuccagccuggacaugc

SEQ ID NO: 298433 - RNA, 32 nt, Human
acagccacugggccugggcacacacauugaag

SEQ ID NO: 298434 - RNA, 19 nt, Human
acagccacuugcccacaga

SEQ ID NO: 298435 - RNA, 32 nt, Human
acagccagaacugccuuuggcccuacggaugg

SEQ ID NO: 298436 - RNA, 32 nt, Human
acagccagagaaacuccagacaaacaauguag

SEQ ID NO: 298437 - RNA, 32 nt, Human
acagccagagaggcagaggcaagagcagagcc

SEQ ID NO: 298438 - RNA, 32 nt, Human
acagccagaguugccucuccuccuccucuucc

SEQ ID NO: 298439 - RNA, 32 nt, Human
acagccagcaccagggcaggcagaugggggcg

SEQ ID NO: 298440 - RNA, 32 nt, Human
acagccaggaagcaucauccacgaaccagaaa

SEQ ID NO: 298441 - RNA, 32 nt, Human
acagccaggagcuuccugucaguaaccauguu

SEQ ID NO: 298442 - RNA, 32 nt, Human
acagccaggccccucuggaauuguccuuauua

SEQ ID NO: 298443 - RNA, 28 nt, Human
acagccaggccggcugccucaucucagc

SEQ ID NO: 298444 - RNA, 32 nt, Human
acagccaggcucuuacuccagccggggcugcc

SEQ ID NO: 298445 - RNA, 32 nt, Human
acagccaggcuggagucagugucugccccuga

SEQ ID NO: 298446 - RNA, 32 nt, Human
acagccaggcuucugucauacagguagauccc

SEQ ID NO: 298447 - RNA, 32 nt, Human
acagccagggugugucaccugacaggcucacc

SEQ ID NO: 298448 - RNA, 32 nt, Human
acagccaggugaggugggagguuggagagcca

SEQ ID NO: 298449 - RNA, 32 nt, Human
acagccaguaaccucuccugugccucuaccua

SEQ ID NO: 298450 - RNA, 32 nt, Human
acagccagucaccacccuccuggaccauacuc

SEQ ID NO: 298451 - RNA, 32 nt, Human
acagccagugaggccagaaauuggucuugugg

SEQ ID NO: 298452 - RNA, 17 nt, Human
acagccagugggacaag

SEQ ID NO: 298453 - RNA, 32 nt, Human
acagccauaugcaggacggcaguacucagcau

SEQ ID NO: 298454 - RNA, 20 nt, Human
acagccaucaacuucccuuc

SEQ ID NO: 298455 - RNA, 32 nt, Human
acagccaucacauucaccucuaccuccaccau

SEQ ID NO: 298456 - RNA, 32 nt, Human
acagccaucacugaggccugggcccgccucaa

SEQ ID NO: 298457 - RNA, 32 nt, Human
acagccaucaucucucacgguaccacaggccu

SEQ ID NO: 298458 - RNA, 32 nt, Human
acagccauccccuauagaaaggcacagcuuuu

SEQ ID NO: 298459 - RNA, 32 nt, Human
acagccauccgccaccaccgcugccgcagccu

SEQ ID NO: 298460 - RNA, 32 nt, Human
acagccauccuaggaagcagguaacagcccua

SEQ ID NO: 298461 - RNA, 31 nt, Human
acagccaugggcugggaccugacggugaaga

SEQ ID NO: 298462 - RNA, 31 nt, Human
acagccauguccucgucagccggcagcggcc

SEQ ID NO: 298463 - RNA, 22 nt, Human
acagccauucuguucugcccuc

SEQ ID NO: 298464 - RNA, 32 nt, Human
acagccauugcacuccagccugggcaacagag

SEQ ID NO: 298465 - RNA, 32 nt, Human
acagccauugcugaggccugggcucgccugga

SEQ ID NO: 298466 - RNA, 32 nt, Human
acagccauuugugauuugcuguucuguaggcg

SEQ ID NO: 298467 - RNA, 32 nt, Human
acagcccacaccugaagagcacgcccaagcug

SEQ ID NO: 298468 - RNA, 32 nt, Human
acagcccacaugcugcauaagaugggccuuau

SEQ ID NO: 298469 - RNA, 32 nt, Human
acagcccacccaggcggcggggucuugguggg

SEQ ID NO: 298470 - RNA, 32 nt, Human
acagcccacugaggcccuguccccagaagaug

SEQ ID NO: 298471 - RNA, 32 nt, Human
acagcccagaaagagaaagacggagaggcaga

SEQ ID NO: 298472 - RNA, 32 nt, Human
acagcccagagcagccugagugcagucaugug

SEQ ID NO: 298473 - RNA, 32 nt, Human
acagcccagagguggcuucuuccuucaggaac

SEQ ID NO: 298474 - RNA, 32 nt, Human
acagcccagcacagguauuucaggugugaaag

SEQ ID NO: 298475 - RNA, 32 nt, Human
acagcccagcacuccucugggcugcucucaaa

SEQ ID NO: 298476 - RNA, 32 nt, Human
acagcccagccuucccuuccucugagcagagc

SEQ ID NO: 298477 - RNA, 32 nt, Human
acagcccagcgccacaccaugggccugguagu

SEQ ID NO: 298478 - RNA, 32 nt, Human
acagcccagcucugagucucagucgcugauca

SEQ ID NO: 298479 - RNA, 32 nt, Human
acagcccagcuggguugcaauuccagaaugcu

SEQ ID NO: 298480 - RNA, 32 nt, Human
acagcccaggcaggacagagcagaucacacaa

SEQ ID NO: 298481 - RNA, 32 nt, Human
acagcccagggaaaccuccucacaguuuucau

SEQ ID NO: 298482 - RNA, 32 nt, Human
acagcccagggacuuaauguggccaucgggca

SEQ ID NO: 298483 - RNA, 32 nt, Human
acagcccagguucuucugcccaacacaaaagg

SEQ ID NO: 298484 - RNA, 32 nt, Human
acagcccaugccaaccccuccuggagccagcc

SEQ ID NO: 298485 - RNA, 32 nt, Human
acagcccauuucccaguagucugccuugcccu

SEQ ID NO: 298486 - RNA, 32 nt, Human
acagcccauuuugccaagaugucuagaguagc

SEQ ID NO: 298487 - RNA, 32 nt, Human
acagccccacucuccagccauuuggaaacaaa

SEQ ID NO: 298488 - RNA, 32 nt, Human
acagcccccaucccacugaggguggggcagcu

SEQ ID NO: 298489 - RNA, 32 nt, Human
acagcccccgugggcauggaccaccuuuauuu

SEQ ID NO: 298490 - RNA, 32 nt, Human
acagcccccucaggcagccaggucaucugagu

SEQ ID NO: 298491 - RNA, 32 nt, Human
acagcccccugccccaucuucuggcacaggcc

SEQ ID NO: 298492 - RNA, 32 nt, Human
acagcccccugccugauccccugcuggcuggg

SEQ ID NO: 298493 - RNA, 32 nt, Human
acagccccgaggauggucuugcucugggaauu

SEQ ID NO: 298494 - RNA, 16 nt, Human
acagccccgcagguca

SEQ ID NO: 298495 - RNA, 19 nt, Human
acagccccggacuguguug

SEQ ID NO: 298496 - RNA, 32 nt, Human
acagccccuccuggugcgcggcuggaggcugc

SEQ ID NO: 298497 - RNA, 32 nt, Human
acagccccugcaccuggcagccagcgagcuac

SEQ ID NO: 298498 - RNA, 32 nt, Human
acagccccugcucacuuucuguuggccacaac

SEQ ID NO: 298499 - RNA, 22 nt, Human
acagccccugcuucccugcacc

SEQ ID NO: 298500 - RNA, 32 nt, Human
acagccccugugucucugucucuuggggaccu

SEQ ID NO: 298501 - RNA, 32 nt, Human
acagcccgagacaggcagcccaggccggcugu

SEQ ID NO: 298502 - RNA, 32 nt, Human
acagcccgcacagcugcccagccugcggagac

SEQ ID NO: 298503 - RNA, 32 nt, Human
acagcccgccuucugccaaaagaagugauggc

SEQ ID NO: 298504 - RNA, 32 nt, Human
acagcccggagccugcagcccagccccaccca

SEQ ID NO: 298505 - RNA, 32 nt, Human
acagcccggcagagugguuccaccuccccaug

SEQ ID NO: 298506 - RNA, 32 nt, Human
acagcccggguguggagaggcggccauccuug

SEQ ID NO: 298507 - RNA, 32 nt, Human
acagcccguuguucgcagccucccucugaccc

SEQ ID NO: 298508 - RNA, 32 nt, Human
acagcccucacagcucuucagagcaagcacug

SEQ ID NO: 298509 - RNA, 32 nt, Human
acagcccucacugcucucuaucuccagguggc

SEQ ID NO: 298510 - RNA, 32 nt, Human
acagcccuccaggagauaucaaaggaggucag

SEQ ID NO: 298511 - RNA, 32 nt, Human
acagcccuccagguccuccagcucugucagau

SEQ ID NO: 298512 - RNA, 32 nt, Human
acagcccucucaucuccuggaaccauggccag

SEQ ID NO: 298513 - RNA, 32 nt, Human
acagcccucuucuggaacagucaccuuguuaa

SEQ ID NO: 298514 - RNA, 32 nt, Human
acagcccugccugcucugagggccacagccug

SEQ ID NO: 298515 - RNA, 32 nt, Human
acagcccugccuggccuccccucucauggccc

SEQ ID NO: 298516 - RNA, 32 nt, Human
acagcccugccugggccugucucucaagggca

SEQ ID NO: 298517 - RNA, 32 nt, Human
acagcccugcuccccaaggccugguggcuuug

SEQ ID NO: 298518 - RNA, 32 nt, Human
acagcccuggggagccagacaggcuuugguau

SEQ ID NO: 298519 - RNA, 32 nt, Human
acagcccugucccucccugccuccgccuugcc

SEQ ID NO: 298520 - RNA, 32 nt, Human
acagcccugugggagcagcuuggcugugagca

SEQ ID NO: 298521 - RNA, 32 nt, Human
acagcccuuucaucuaccuuguggggaaccug

SEQ ID NO: 298522 - RNA, 32 nt, Human
acagccgaagcacccggcaucuuggugggggc

SEQ ID NO: 298523 - RNA, 32 nt, Human
acagccgagacucauuuccaaggcacagcagc

SEQ ID NO: 298524 - RNA, 31 nt, Human
acagccgagagaccugaucucuggauucagu

SEQ ID NO: 298525 - RNA, 32 nt, Human
acagccgcaccgccuauuccagccuuuggaga

SEQ ID NO: 298526 - RNA, 21 nt, Human
acagccgcagcgugucacagg

SEQ ID NO: 298527 - RNA, 32 nt, Human
acagccgccacuggugcugagcugcuaggaag

SEQ ID NO: 298528 - RNA, 21 nt, Human
acagccgccgccgccgccgcc

SEQ ID NO: 298529 - RNA, 25 nt, Human
acagccgccgccuccaccaccacca

SEQ ID NO: 298530 - RNA, 22 nt, Human
acagccgccgcugccgccgccg

SEQ ID NO: 298531 - RNA, 32 nt, Human
acagccgccuuuggguuccaucuugcuaauaa

SEQ ID NO: 298532 - RNA, 32 nt, Human
acagccgcgcagugcccauggaggcgcugcug

SEQ ID NO: 298533 - RNA, 32 nt, Human
acagccgcgccgcggaucgucaacaucucggu

SEQ ID NO: 298534 - RNA, 32 nt, Human
acagccgcucccucgcucugcuggggccuccg

SEQ ID NO: 298535 - RNA, 32 nt, Human
acagccgcuccugguaucagagcugcuuucca

SEQ ID NO: 298536 - RNA, 32 nt, Human
acagccggagcaguuggccugugcuuggaggc

SEQ ID NO: 298537 - RNA, 32 nt, Human
acagccgggaaagacuggucaccugagaggag

SEQ ID NO: 298538 - RNA, 32 nt, Human
acagccgggaccccgguucacacugacucugg

SEQ ID NO: 298539 - RNA, 32 nt, Human
acagccggguaugggcuuccacacagcauggg

SEQ ID NO: 298540 - RNA, 32 nt, Human
acagccgguagagccucugcccucccgaaacu

SEQ ID NO: 298541 - RNA, 32 nt, Human
acagccgguagauggaagucauuuuuccaggg

SEQ ID NO: 298542 - RNA, 32 nt, Human
acagccggucaggcugcagggugcccaggggc

SEQ ID NO: 298543 - RNA, 32 nt, Human
acagccgugaugaugaaagagugaagaaccgc

SEQ ID NO: 298544 - RNA, 32 nt, Human
acagccgugggugucaaagguggcauuugagg

SEQ ID NO: 298545 - RNA, 21 nt, Human
acagccuaaacgccaccacca

SEQ ID NO: 298546 - RNA, 32 nt, Human
acagccuacugccggaacucucuggauggcca

SEQ ID NO: 298547 - RNA, 32 nt, Human
acagccuacuguuugucuccaguuuuuaaacu

SEQ ID NO: 298548 - RNA, 32 nt, Human
acagccuacuucauaaaaaccccacagugaca

SEQ ID NO: 298549 - RNA, 32 nt, Human
acagccuacuucggcagaugugggagaggaug

SEQ ID NO: 298550 - RNA, 23 nt, Human
acagccuagccaacauggugaaa

SEQ ID NO: 298551 - RNA, 23 nt, Human
acagccuagccaagauggugaaa

SEQ ID NO: 298552 - RNA, 23 nt, Human
acagccuaggcaacauggugaaa

SEQ ID NO: 298553 - RNA, 32 nt, Human
acagccuagggcugagcuggggaccugguacc

SEQ ID NO: 298554 - RNA, 32 nt, Human
acagccucacacacagcaggggccugagaagu

SEQ ID NO: 298555 - RNA, 22 nt, Human
acagccucaccuccuacagccu

SEQ ID NO: 298556 - RNA, 32 nt, Human
acagccucaccuucaccucuuggguauuucag

SEQ ID NO: 298557 - RNA, 28 nt, Human
acagccucagcuccguccccugccccac

SEQ ID NO: 298558 - RNA, 32 nt, Human
acagccucaggagaauaaaugacuugcuuuuc

SEQ ID NO: 298559 - RNA, 21 nt, Human
acagccucaggccuauaccac

SEQ ID NO: 298560 - RNA, 32 nt, Human
acagccucauuccuaacacagaaaguuauuua

SEQ ID NO: 298561 - RNA, 32 nt, Human
acagccucauuuccccagcuucccugauuucu

SEQ ID NO: 298562 - RNA, 32 nt, Human
acagccuccagccucucccuccagcacaaccu

SEQ ID NO: 298563 - RNA, 32 nt, Human
acagccuccagcggcugccacugugggcucug

SEQ ID NO: 298564 - RNA, 32 nt, Human
acagccucccaaacugcugggauuacaggcgu

SEQ ID NO: 298565 - RNA, 32 nt, Human
acagccucccaaaguucugggauuacaagugu

SEQ ID NO: 298566 - RNA, 32 nt, Human
acagccucccacccccaucucucccuccccug

SEQ ID NO: 298567 - RNA, 32 nt, Human
acagccucccggagucccagcagcaagacggc

SEQ ID NO: 298568 - RNA, 32 nt, Human
acagccucccuuccuucuuucucccuccgccu

SEQ ID NO: 298569 - RNA, 32 nt, Human
acagccuccuggcaacacuagaggccucaaga

SEQ ID NO: 298570 - RNA, 32 nt, Human
acagccuccuugccuuuggucuccuuaccagu

SEQ ID NO: 298571 - RNA, 32 nt, Human
acagccucgcucugucacccaggcuggaguac

SEQ ID NO: 298572 - RNA, 32 nt, Human
acagccucuaggccccagccccggaggugaau

SEQ ID NO: 298573 - RNA, 32 nt, Human
acagccucucaaagugcugggauuacagucuc

SEQ ID NO: 298574 - RNA, 32 nt, Human
acagccucucccacagguaccaugaaggucuc

SEQ ID NO: 298575 - RNA, 32 nt, Human
acagccucuccucuuuaccugaucaauguuaa

SEQ ID NO: 298576 - RNA, 32 nt, Human
acagccucucuuucuccuccacauacugcagc

SEQ ID NO: 298577 - RNA, 32 nt, Human
acagccucugcaggcccugcucuugccuccca

SEQ ID NO: 298578 - RNA, 32 nt, Human
acagccucugcaggcccugcucuugccucuua

SEQ ID NO: 298579 - RNA, 32 nt, Human
acagccucugcagggccugcucuugccuccca

SEQ ID NO: 298580 - RNA, 25 nt, Human
acagccucugccgagccugcaucac

SEQ ID NO: 298581 - RNA, 32 nt, Human
acagccucuguaucucugcaggccauacuggu

SEQ ID NO: 298582 - RNA, 32 nt, Human
acagccucugugagagaugccccacaccaaac

SEQ ID NO: 298583 - RNA, 32 nt, Human
acagccugacaguccccacaucagcccggacc

SEQ ID NO: 298584 - RNA, 32 nt, Human
acagccugacauacacauaucaucucaugaaa

SEQ ID NO: 298585 - RNA, 23 nt, Human
acagccugaccaacauggugaaa

SEQ ID NO: 298586 - RNA, 32 nt, Human
acagccugacuucccuuccccaggccaggguu

SEQ ID NO: 298587 - RNA, 32 nt, Human
acagccugagaucugucccuucaacgggcugg

SEQ ID NO: 298588 - RNA, 22 nt, Human
acagccugaggcagggcucugu

SEQ ID NO: 298589 - RNA, 32 nt, Human
acagccugcugaagcagggcgagggcuucucu

SEQ ID NO: 298590 - RNA, 16 nt, Human
acagccugcugggccc

SEQ ID NO: 298591 - RNA, 32 nt, Human
acagccugcuucuccccugggcugcugugggc

SEQ ID NO: 298592 - RNA, 23 nt, Human
acagccuggcaaagucccacuca

SEQ ID NO: 298593 - RNA, 23 nt, Human
acagccuggccaacaaggugaaa

SEQ ID NO: 298594 - RNA, 23 nt, Human
acagccuggccaacacagugaaa

SEQ ID NO: 298595 - RNA, 23 nt, Human
acagccuggccaacagggugaaa

SEQ ID NO: 298596 - RNA, 23 nt, Human
acagccuggccaacauaaugaaa

SEQ ID NO: 298597 - RNA, 23 nt, Human
acagccuggccaacauagugaaa

SEQ ID NO: 298598 - RNA, 23 nt, Human
acagccuggccaacaugaugaaa

SEQ ID NO: 298599 - RNA, 23 nt, Human
acagccuggccaacauggcgaaa

SEQ ID NO: 298600 - RNA, 23 nt, Human
acagccuggccaacauggugaaa

SEQ ID NO: 298601 - RNA, 32 nt, Human
acagccuggccaacauggugaaaccucaucuc

SEQ ID NO: 298602 - RNA, 32 nt, Human
acagccuggccaacgugaugaaaccccaucug

SEQ ID NO: 298603 - RNA, 23 nt, Human
acagccuggccaauauggugaaa

SEQ ID NO: 298604 - RNA, 23 nt, Human
acagccuggcccacauggugaaa

SEQ ID NO: 298605 - RNA, 23 nt, Human
acagccuggccgacauggugaaa

SEQ ID NO: 298606 - RNA, 32 nt, Human
acagccuggcugggaaaggggguguggaaaga

SEQ ID NO: 298607 - RNA, 32 nt, Human
acagccugggaaccugccuuaagcugggugau

SEQ ID NO: 298608 - RNA, 32 nt, Human
acagccugggaggcgcaggggcugggcagcug

SEQ ID NO: 298609 - RNA, 32 nt, Human
acagccugggcaacaagagcgaaacuccgucu

SEQ ID NO: 298610 - RNA, 23 nt, Human
acagccugggcaacauggcgaaa

SEQ ID NO: 298611 - RNA, 23 nt, Human
acagccugggcaacauggugaaa

SEQ ID NO: 298612 - RNA, 32 nt, Human
acagccugggcaacauggugaaaccugucucu

SEQ ID NO: 298613 - RNA, 32 nt, Human
acagccugggcaacgcaggaauggaauuuuaa

SEQ ID NO: 298614 - RNA, 32 nt, Human
acagccugggcuggggguggggugggagaggu

SEQ ID NO: 298615 - RNA, 32 nt, Human
acagccuggggaugcagagcacaugccggccc

SEQ ID NO: 298616 - RNA, 31 nt, Human
acagccuggguggaaggcagaccugaaucac

SEQ ID NO: 298617 - RNA, 23 nt, Human
acagccuggucaacauggcgaaa

SEQ ID NO: 298618 - RNA, 32 nt, Human
acagccugugaggaagugagccagcaguggcc

SEQ ID NO: 298619 - RNA, 32 nt, Human
acagccuguggcugggaagggagacagaggcg

SEQ ID NO: 298620 - RNA, 32 nt, Human
acagccuguuucugcugaguuucuuaucagcc

SEQ ID NO: 298621 - RNA, 32 nt, Human
acagccuucagccuugaacugcagcgucaccu

SEQ ID NO: 298622 - RNA, 32 nt, Human
acagccuucugccuccucgccucuccuggacu

SEQ ID NO: 298623 - RNA, 32 nt, Human
acagccuucuggcugggacugacuuggccaug

SEQ ID NO: 298624 - RNA, 32 nt, Human
acagccuucuucccaacccuucuugaacuguc

SEQ ID NO: 298625 - RNA, 20 nt, Human
acagccuugacccccgacag

SEQ ID NO: 298626 - RNA, 32 nt, Human
acagccuugauuuccucccaaaguaggugagc

SEQ ID NO: 298627 - RNA, 20 nt, Human
acagccuugcagaaaagcaa

SEQ ID NO: 298628 - RNA, 32 nt, Human
acagccuugcccacaaacccugccucugaggg

SEQ ID NO: 298629 - RNA, 32 nt, Human
acagccuugcccucagccucugagcuccaggg

SEQ ID NO: 298630 - RNA, 32 nt, Human
acagccuugcuacagcggaggcagcugggauu

SEQ ID NO: 298631 - RNA, 32 nt, Human
acagccuuguuucuccccuuugaaucagcaga

SEQ ID NO: 298632 - RNA, 32 nt, Human
acagcgaaugcaaagguccugaggcaggagcg

SEQ ID NO: 298633 - RNA, 32 nt, Human
acagcgagaggcagagaaagaagagacaggag

SEQ ID NO: 298634 - RNA, 26 nt, Human
acagcgagaugccccaccaccuccug

SEQ ID NO: 298635 - RNA, 22 nt, Human
acagcgagccagagucugggug

SEQ ID NO: 298636 - RNA, 32 nt, Human
acagcgagccuccagcuccuacccucugccug

SEQ ID NO: 298637 - RNA, 18 nt, Human
acagcgaggcaccacccg

SEQ ID NO: 298638 - RNA, 32 nt, Human
acagcgauaaauaccagcauucaaaccacagu

SEQ ID NO: 298639 - RNA, 32 nt, Human
acagcgaugaacguucuuuucccuccuggguu

SEQ ID NO: 298640 - RNA, 32 nt, Human
acagcgcagccucaucaaaaugcagcuggcaa

SEQ ID NO: 298641 - RNA, 32 nt, Human
acagcgcagcgcgggcggcagcgcggccccaa

SEQ ID NO: 298642 - RNA, 32 nt, Human
acagcgcaguugcauucuggccacuuugaccu

SEQ ID NO: 298643 - RNA, 32 nt, Human
acagcgccucugcugccccagccuucuacagc

SEQ ID NO: 298644 - RNA, 32 nt, Human
acagcgccugggaaucagcccuucucccuacu

SEQ ID NO: 298645 - RNA, 32 nt, Human
acagcgcgcagagacugcagccucccaaucgu

SEQ ID NO: 298646 - RNA, 32 nt, Human
acagcgcugauuuggaaaaaugacuagaaagc

SEQ ID NO: 298647 - RNA, 32 nt, Human
acagcgcugccugggcauuguuggugcucagg

SEQ ID NO: 298648 - RNA, 32 nt, Human
acagcggacucuccacgcccagcuacucucgc

SEQ ID NO: 298649 - RNA, 32 nt, Human
acagcggagagggggugauagcagcugaggug

SEQ ID NO: 298650 - RNA, 32 nt, Human
acagcggaggggccagucuccuggcgaagggg

SEQ ID NO: 298651 - RNA, 32 nt, Human
acagcggagguggcggcgcgggcaggucggag

SEQ ID NO: 298652 - RNA, 32 nt, Human
acagcggcagcuccagcccggcccggcagcga

SEQ ID NO: 298653 - RNA, 20 nt, Human
acagcggcgccgcugugcuc

SEQ ID NO: 298654 - RNA, 32 nt, Human
acagcggcuccccgcuaccaccacucuccugc

SEQ ID NO: 298655 - RNA, 32 nt, Human
acagcgggaggcucaaaccugcccucggacgc

SEQ ID NO: 298656 - RNA, 32 nt, Human
acagcgggaggggacgccagcgccugcagagg

SEQ ID NO: 298657 - RNA, 32 nt, Human
acagcggucagugggauucagccugagaaccu

SEQ ID NO: 298658 - RNA, 32 nt, Human
acagcguauguggggagguggaggggguccau

SEQ ID NO: 298659 - RNA, 32 nt, Human
acagcgugaaacacuggaauccuucauggacg

SEQ ID NO: 298660 - RNA, 32 nt, Human
acagcgugagccaccacaccuggccaagaaug

SEQ ID NO: 298661 - RNA, 32 nt, Human
acagcgugagccaccgcacccagccgcuugcu

SEQ ID NO: 298662 - RNA, 32 nt, Human
acagcuaaaaaugaguuaugauagcagcuuga

SEQ ID NO: 298663 - RNA, 32 nt, Human
acagcuaaaauugcagcauuuccccagcuggg

SEQ ID NO: 298664 - RNA, 18 nt, Human
acagcuaaagcagacaag

SEQ ID NO: 298665 - RNA, 32 nt, Human
acagcuaauucuuuugcuuucuguaaaugucu

SEQ ID NO: 298666 - RNA, 32 nt, Human
acagcuacagcuuucuugcucccuucagcccc

SEQ ID NO: 298667 - RNA, 32 nt, Human
acagcuagaaggcacugucagagaagagaaac

SEQ ID NO: 298668 - RNA, 32 nt, Human
acagcuaggaucugcauuuucagguuccgagc

SEQ ID NO: 298669 - RNA, 32 nt, Human
acagcuaggaugugcauucuccagccaucaag

SEQ ID NO: 298670 - RNA, 32 nt, Human
acagcuaggcucccccuccccucuuuaaacca

SEQ ID NO: 298671 - RNA, 32 nt, Human
acagcuagggcugaggaugggaacagggacag

SEQ ID NO: 298672 - RNA, 32 nt, Human
acagcuagggcugcucaguaacugccccaacc

SEQ ID NO: 298673 - RNA, 32 nt, Human
acagcuaggugguggaaucggugaggaggggg

SEQ ID NO: 298674 - RNA, 32 nt, Human
acagcuauccuagaauaaugacauauaugcua

SEQ ID NO: 298675 - RNA, 22 nt, Human
acagcuaugccaccacccuagc

SEQ ID NO: 298676 - RNA, 32 nt, Human
acagcuauguguaugaaauaggucacaacaga

SEQ ID NO: 298677 - RNA, 32 nt, Human
acagcuauugguauggugguagaaagagauga

SEQ ID NO: 298678 - RNA, 32 nt, Human
acagcucaaaacuuuuguuucauuucaugccu

SEQ ID NO: 298679 - RNA, 31 nt, Human
acagcucaaauguccaucaauagcagaaaga

SEQ ID NO: 298680 - RNA, 31 nt, Human
acagcucaagugucuaucaugaauggauaaa

SEQ ID NO: 298681 - RNA, 32 nt, Human
acagcucaaucuuugaacaagauuccaagcga

SEQ ID NO: 298682 - RNA, 32 nt, Human
acagcucacagcaggcuccaccucucaggcuc

SEQ ID NO: 298683 - RNA, 32 nt, Human
acagcucacugcaaccucaauccugggcucaa

SEQ ID NO: 298684 - RNA, 32 nt, Human
acagcucacugcaaccucuacucccaggcuca

SEQ ID NO: 298685 - RNA, 32 nt, Human
acagcucacugcaaccuuacuccuaggcucaa

SEQ ID NO: 298686 - RNA, 32 nt, Human
acagcucacugcagccucaaccucugaaggcc

SEQ ID NO: 298687 - RNA, 32 nt, Human
acagcucacugcagccucaaccuggguucaag

SEQ ID NO: 298688 - RNA, 32 nt, Human
acagcucacugcagccuccaccuccugggcuc

SEQ ID NO: 298689 - RNA, 32 nt, Human
acagcucacugcagccuccaucuccuaggcuc

SEQ ID NO: 298690 - RNA, 32 nt, Human
acagcucacugcagccucgaccucccgggcuc

SEQ ID NO: 298691 - RNA, 32 nt, Human
acagcucacugcagccucgacuucccaggcuc

SEQ ID NO: 298692 - RNA, 32 nt, Human
acagcucacugcagccuugaccucccgggcuc

SEQ ID NO: 298693 - RNA, 32 nt, Human
acagcucacugcagccuugauuucccgggcuc

SEQ ID NO: 298694 - RNA, 32 nt, Human
acagcucacugcagccuuguccucccaggcuc

SEQ ID NO: 298695 - RNA, 32 nt, Human
acagcucacugcagcuuugaucugaccgcuca

SEQ ID NO: 298696 - RNA, 32 nt, Human
acagcucacugcagguucagccuucugaguuc

SEQ ID NO: 298697 - RNA, 32 nt, Human
acagcucagaaggaauccaaaaagcagaaguc

SEQ ID NO: 298698 - RNA, 32 nt, Human
acagcucagagagagaaagaucugagggaaga

SEQ ID NO: 298699 - RNA, 32 nt, Human
acagcucagagcagggcagaacuggggacacu

SEQ ID NO: 298700 - RNA, 32 nt, Human
acagcucagagggaggagccagaccagcagug

SEQ ID NO: 298701 - RNA, 32 nt, Human
acagcucagcacagcuauugauauguuagagg

SEQ ID NO: 298702 - RNA, 32 nt, Human
acagcucagcagacauccacacacaguaaugg

SEQ ID NO: 298703 - RNA, 32 nt, Human
acagcucaggcagcgcaggugugaugggcaca

SEQ ID NO: 298704 - RNA, 32 nt, Human
acagcucauacuguucucaccugggaaacuug

SEQ ID NO: 298705 - RNA, 32 nt, Human
acagcucaugcccucggucucuugccucggca

SEQ ID NO: 298706 - RNA, 32 nt, Human
acagcuccagacauguccaacaacagccccga

SEQ ID NO: 298707 - RNA, 32 nt, Human
acagcuccagauggauccccaguacccccuuc

SEQ ID NO: 298708 - RNA, 32 nt, Human
acagcuccagcucgugccaucuucccaaugua

SEQ ID NO: 298709 - RNA, 32 nt, Human
acagcuccaggcucuugggcccuucccgaggg

SEQ ID NO: 298710 - RNA, 32 nt, Human
acagcuccaguaaacaaaaaggucagggcaga

SEQ ID NO: 298711 - RNA, 32 nt, Human
acagcucccuccacuccucucuuaucacuggg

SEQ ID NO: 298712 - RNA, 32 nt, Human
acagcucccuuccauccauuuuuaacucuuuc

SEQ ID NO: 298713 - RNA, 32 nt, Human
acagcuccucaugccauuuccuguccagauug

SEQ ID NO: 298714 - RNA, 32 nt, Human
acagcuccuggaccaggcccauacuagaguuc

SEQ ID NO: 298715 - RNA, 32 nt, Human
acagcuccuggggccuuccuggcucuggccca

SEQ ID NO: 298716 - RNA, 32 nt, Human
acagcuccugguguguagaauucccggagcgu

SEQ ID NO: 298717 - RNA, 32 nt, Human
acagcuccugucacccugucaggcagcccuuu

SEQ ID NO: 298718 - RNA, 32 nt, Human
acagcuccuuccucacguucucaggccuccac

SEQ ID NO: 298719 - RNA, 32 nt, Human
acagcucgauaagccuuuuugacuguguacau

SEQ ID NO: 298720 - RNA, 32 nt, Human
acagcucgcagucccugagccucugcaggcag

SEQ ID NO: 298721 - RNA, 32 nt, Human
acagcucggagcuuaaauuugccuuccugggu

SEQ ID NO: 298722 - RNA, 32 nt, Human
acagcucgugcccucggucucuugccucggca

SEQ ID NO: 298723 - RNA, 32 nt, Human
acagcucguguccuccgucucuugccucggcg

SEQ ID NO: 298724 - RNA, 32 nt, Human
acagcucuccagccugggcgacagagugagac

SEQ ID NO: 298725 - RNA, 32 nt, Human
acagcucuccaucacccagugaacaucucacc

SEQ ID NO: 298726 - RNA, 32 nt, Human
acagcucuccccucggguacgagggccagugu

SEQ ID NO: 298727 - RNA, 32 nt, Human
acagcucucccugguccugucauugcauggcu

SEQ ID NO: 298728 - RNA, 32 nt, Human
acagcucucccuuggauggcuuugcugguucc

SEQ ID NO: 298729 - RNA, 32 nt, Human
acagcucucgccuaaucugucauuuuaaugcc

SEQ ID NO: 298730 - RNA, 32 nt, Human
acagcucucuccacucccuugugauuucugag

SEQ ID NO: 298731 - RNA, 32 nt, Human
acagcucugagaggauaauccuggaggucaaa

SEQ ID NO: 298732 - RNA, 32 nt, Human
acagcucugccuggacuuggagagaugggagg

SEQ ID NO: 298733 - RNA, 32 nt, Human
acagcucuggaaggugcucacaggugcacugc

SEQ ID NO: 298734 - RNA, 32 nt, Human
acagcucuggaggcugcugcugccugggccau

SEQ ID NO: 298735 - RNA, 32 nt, Human
acagcucugggaacagaggacacugaggacua

SEQ ID NO: 298736 - RNA, 32 nt, Human
acagcucugggaacugggaaaagugcuucgga

SEQ ID NO: 298737 - RNA, 32 nt, Human
acagcucuucucccagauguaaauagaacaac

SEQ ID NO: 298738 - RNA, 32 nt, Human
acagcucuucucccagauguuaauagaacaac

SEQ ID NO: 298739 - RNA, 32 nt, Human
acagcucuucucccagauguuaauagaacaag

SEQ ID NO: 298740 - RNA, 32 nt, Human
acagcucuuuccccucagcucuucuccuggaa

SEQ ID NO: 298741 - RNA, 32 nt, Human
acagcucuuuccuuccccuccucucuccaggg

SEQ ID NO: 298742 - RNA, 32 nt, Human
acagcugaaaagagagggucagggggaggcug

SEQ ID NO: 298743 - RNA, 32 nt, Human
acagcugaaauaggcucugccuaccagcugac

SEQ ID NO: 298744 - RNA, 32 nt, Human
acagcugaacacucagcagugugugaguggca

SEQ ID NO: 298745 - RNA, 32 nt, Human
acagcugaacgucccacugaaaaccagcuaag

SEQ ID NO: 298746 - RNA, 32 nt, Human
acagcugaagaaaagcagcgauuggaagagcu

SEQ ID NO: 298747 - RNA, 32 nt, Human
acagcugaagaaauggaauaguguugaugucu

SEQ ID NO: 298748 - RNA, 32 nt, Human
acagcugacaaaucaucuccucuaucggagcc

SEQ ID NO: 298749 - RNA, 32 nt, Human
acagcugaccugccaacagcauuacagggaga

SEQ ID NO: 298750 - RNA, 32 nt, Human
acagcugagaugggguucaaccucagcuguau

SEQ ID NO: 298751 - RNA, 32 nt, Human
acagcugagcacauucuggcucagggagguua

SEQ ID NO: 298752 - RNA, 32 nt, Human
acagcugaggaaacgucucucccacuguuugu

SEQ ID NO: 298753 - RNA, 19 nt, Human
acagcugaggaacuggcaa

SEQ ID NO: 298754 - RNA, 32 nt, Human
acagcugagggagaggaagugagcgccacugc

SEQ ID NO: 298755 - RNA, 23 nt, Human
acagcugauuaaaggcagagaca

SEQ ID NO: 298756 - RNA, 32 nt, Human
acagcugcaaaagagaacaccaaucccaucca

SEQ ID NO: 298757 - RNA, 32 nt, Human
acagcugcaagccagggaugaagaaagacucu

SEQ ID NO: 298758 - RNA, 32 nt, Human
acagcugcagaguaggcagcugccuccaggau

SEQ ID NO: 298759 - RNA, 32 nt, Human
acagcugcaggaagaagucaggguggaaucca

SEQ ID NO: 298760 - RNA, 32 nt, Human
acagcugcagugagcugcggucaugccacugc

SEQ ID NO: 298761 - RNA, 23 nt, Human
acagcugcauuagaaaaagaggc

SEQ ID NO: 298762 - RNA, 32 nt, Human
acagcugccaggggagugccaccccacccgug

SEQ ID NO: 298763 - RNA, 32 nt, Human
acagcugccaguagcuggaaccacgggggugu

SEQ ID NO: 298764 - RNA, 32 nt, Human
acagcugccauccacuucucagucccagggcc

SEQ ID NO: 298765 - RNA, 32 nt, Human
acagcugcccacuccuccuggggaggcugccg

SEQ ID NO: 298766 - RNA, 32 nt, Human
acagcugccguuucuucugccugcuuauggga

SEQ ID NO: 298767 - RNA, 32 nt, Human
acagcugccugccaaauuuuuguauuuuuagu

SEQ ID NO: 298768 - RNA, 32 nt, Human
acagcugccugggaagucuucacucacuuccu

SEQ ID NO: 298769 - RNA, 32 nt, Human
acagcugccugggaucccucauccucauaccc

SEQ ID NO: 298770 - RNA, 32 nt, Human
acagcugcggagcaagcagggaguaauggaga

SEQ ID NO: 298771 - RNA, 23 nt, Human
acagcugcggauugcccaugcca

SEQ ID NO: 298772 - RNA, 32 nt, Human
acagcugcucuagccuuaguugccacuaggaa

SEQ ID NO: 298773 - RNA, 32 nt, Human
acagcugcucuuuugucccagcauagccccug

SEQ ID NO: 298774 - RNA, 32 nt, Human
acagcugcugucccugcccuguccuguccuug

SEQ ID NO: 298775 - RNA, 32 nt, Human
acagcuggaaaccaccagaagcuaagaaggag

SEQ ID NO: 298776 - RNA, 32 nt, Human
acagcuggaacccuggugucuccuccagcgug

SEQ ID NO: 298777 - RNA, 32 nt, Human
acagcuggaaccuggaguuccacacgccuguc

SEQ ID NO: 298778 - RNA, 32 nt, Human
acagcuggaagagaggccuggcccaugcuccu

SEQ ID NO: 298779 - RNA, 32 nt, Human
acagcuggaagagucugggccacacgauuuga

SEQ ID NO: 298780 - RNA, 32 nt, Human
acagcuggaaggcaagguucagcugggacugu

SEQ ID NO: 298781 - RNA, 32 nt, Human
acagcuggacagaaaaggggcagacacaccga

SEQ ID NO: 298782 - RNA, 32 nt, Human
acagcuggacggugucuaucaaaagugcaaau

SEQ ID NO: 298783 - RNA, 20 nt, Human
acagcuggagucaaacaacu

SEQ ID NO: 298784 - RNA, 32 nt, Human
acagcuggagugaccgcaguguacagagaugg

SEQ ID NO: 298785 - RNA, 32 nt, Human
acagcuggauccucuauguggcagccgcccuu

SEQ ID NO: 298786 - RNA, 32 nt, Human
acagcuggauccucuguguggcagccgcccuu

SEQ ID NO: 298787 - RNA, 32 nt, Human
acagcuggauccucuguguggcagcugcccuu

SEQ ID NO: 298788 - RNA, 32 nt, Human
acagcuggccaagauggugaaaccccgucucu

SEQ ID NO: 298789 - RNA, 32 nt, Human
acagcuggcuacacugcucaggcuucaggccc

SEQ ID NO: 298790 - RNA, 32 nt, Human
acagcuggcucuacuuccccauggcccugagc

SEQ ID NO: 298791 - RNA, 32 nt, Human
acagcuggcugaggccguccagccucaggaca

SEQ ID NO: 298792 - RNA, 32 nt, Human
acagcuggcugcagaugugcagugccaggacu

SEQ ID NO: 298793 - RNA, 32 nt, Human
acagcuggcuguuaccaggaugugacaucugu

SEQ ID NO: 298794 - RNA, 22 nt, Human
acagcugggaaucccugcugca

SEQ ID NO: 298795 - RNA, 22 nt, Human
acagcugggagggggccguguu

SEQ ID NO: 298796 - RNA, 32 nt, Human
acagcugggauuacaggcgugagccaccgcgc

SEQ ID NO: 298797 - RNA, 32 nt, Human
acagcugggcaaagccacaaggcuggccagca

SEQ ID NO: 298798 - RNA, 32 nt, Human
acagcugggcccagccagcuugagucacucuu

SEQ ID NO: 298799 - RNA, 32 nt, Human
acagcugggcccaggguauuugcucaguaaau

SEQ ID NO: 298800 - RNA, 32 nt, Human
acagcugggccugcugugaccacugggaggga

SEQ ID NO: 298801 - RNA, 32 nt, Human
acagcuggugcagccucacagcccaugugcuc

SEQ ID NO: 298802 - RNA, 32 nt, Human
acagcuguacuuuugauagcugugccaggaag

SEQ ID NO: 298803 - RNA, 32 nt, Human
acagcugucaaccucagaguaacuauuucuaa

SEQ ID NO: 298804 - RNA, 32 nt, Human
acagcugucacuuccaaauguuccuguagcau

SEQ ID NO: 298805 - RNA, 21 nt, Human
acagcugucaugaagaggaug

SEQ ID NO: 298806 - RNA, 32 nt, Human
acagcugugccucuggagucugcuuuuaauug

SEQ ID NO: 298807 - RNA, 32 nt, Human
acagcugugcuuaaaacccucauuucauauaa

SEQ ID NO: 298808 - RNA, 32 nt, Human
acagcugugggaagaaaacuugcuguuuuuag

SEQ ID NO: 298809 - RNA, 17 nt, Human
acagcuguugcauuaca

SEQ ID NO: 298810 - RNA, 32 nt, Human
acagcuguuggugguugcuggauccacuggag

SEQ ID NO: 298811 - RNA, 20 nt, Human
acagcuguugucaucacuga

SEQ ID NO: 298812 - RNA, 32 nt, Human
acagcuuauggggcccagaaaggcacugggcu

SEQ ID NO: 298813 - RNA, 32 nt, Human
acagcuucaaaugcagacaggucuucauguaa

SEQ ID NO: 298814 - RNA, 32 nt, Human
acagcuucagagccaugaaggugaaaggcagu

SEQ ID NO: 298815 - RNA, 32 nt, Human
acagcuucaugaaacuguccaccaagaucaag

SEQ ID NO: 298816 - RNA, 32 nt, Human
acagcuuccacuuaccuccaucagcuaacucu

SEQ ID NO: 298817 - RNA, 32 nt, Human
acagcuuccagcuucgcagcccuucccggagc

SEQ ID NO: 298818 - RNA, 32 nt, Human
acagcuucccaaguagcugggauuuacaggug

SEQ ID NO: 298819 - RNA, 32 nt, Human
acagcuucccaggagucuggggcucaaccucu

SEQ ID NO: 298820 - RNA, 32 nt, Human
acagcuucuaagguguccagugcauugggaug

SEQ ID NO: 298821 - RNA, 32 nt, Human
acagcuucuccaagugccuagugaaacgggga

SEQ ID NO: 298822 - RNA, 32 nt, Human
acagcuucucccuuucccaaccaauaaaguaa

SEQ ID NO: 298823 - RNA, 32 nt, Human
acagcuucuccucugccccgauggaugcuuua

SEQ ID NO: 298824 - RNA, 32 nt, Human
acagcuucuggggauuaggacauggacaucuu

SEQ ID NO: 298825 - RNA, 32 nt, Human
acagcuucuuccuccuccuuggagcugcucug

SEQ ID NO: 298826 - RNA, 32 nt, Human
acagcuugaaguauugauaccaggccacagcc

SEQ ID NO: 298827 - RNA, 32 nt, Human
acagcuuucaguguaucccugcaguccuucca

SEQ ID NO: 298828 - RNA, 32 nt, Human
acagcuuucugguuugugagcccauaaaugac

SEQ ID NO: 298829 - RNA, 32 nt, Human
acagcuuugaacuagagagguagauguauuaa

SEQ ID NO: 298830 - RNA, 32 nt, Human
acagcuuugcucuuugguccucaggccaccag

SEQ ID NO: 298831 - RNA, 32 nt, Human
acagcuuuucugagagaaagaaacaucugcaa

SEQ ID NO: 298832 - RNA, 32 nt, Human
acagcuuuuggaccagcugauccagauuuuuc

SEQ ID NO: 298833 - RNA, 32 nt, Human
acaggaaaagaauggcauugaagcagauuucc

SEQ ID NO: 298834 - RNA, 32 nt, Human
acaggaaacacaugaaaaaugccacgauugua

SEQ ID NO: 298835 - RNA, 32 nt, Human
acaggaaacauacaauuagcucauaaucaaau

SEQ ID NO: 298836 - RNA, 32 nt, Human
acaggaaacaugacuugcccgggaggggcauc

SEQ ID NO: 298837 - RNA, 32 nt, Human
acaggaaacgucacuuucacacacacagaugg

SEQ ID NO: 298838 - RNA, 32 nt, Human
acaggaaagaggagagaaagaaagaaagggca

SEQ ID NO: 298839 - RNA, 32 nt, Human
acaggaaagcuagaagagguugcugugucaac

SEQ ID NO: 298840 - RNA, 32 nt, Human
acaggaaagcugucugucuguacccugcucug

SEQ ID NO: 298841 - RNA, 32 nt, Human
acaggaaaggaaggagagaaagaaaagcugga

SEQ ID NO: 298842 - RNA, 32 nt, Human
acaggaaagggagccagaagauggguucaagu

SEQ ID NO: 298843 - RNA, 32 nt, Human
acaggaaagguagaggaugaggagguuggacg

SEQ ID NO: 298844 - RNA, 32 nt, Human
acaggaaaguggcaccugucugcuccagcucu

SEQ ID NO: 298845 - RNA, 24 nt, Human
acaggaacaauagaacacucugcc

SEQ ID NO: 298846 - RNA, 32 nt, Human
acaggaacaauagaacacucugccuguuauuu

SEQ ID NO: 298847 - RNA, 20 nt, Human
acaggaacagaaaaaggcaa

SEQ ID NO: 298848 - RNA, 32 nt, Human
acaggaacagcaggugacaggccuagcuauag

SEQ ID NO: 298849 - RNA, 32 nt, Human
acaggaacagcccaggaacccagggacuucag

SEQ ID NO: 298850 - RNA, 32 nt, Human
acaggaaccagagguaggaugggagggggaac

SEQ ID NO: 298851 - RNA, 32 nt, Human
acaggaacccagccagaguuugccucccugca

SEQ ID NO: 298852 - RNA, 32 nt, Human
acaggaacuggcagagcugagacugggacgca

SEQ ID NO: 298853 - RNA, 32 nt, Human
acaggaacuuccgcaccuccugaggcccugga

SEQ ID NO: 298854 - RNA, 28 nt, Human
acaggaagaaaacauguccaggccccug

SEQ ID NO: 298855 - RNA, 31 nt, Human
acaggaagaacaccucugaggagggauuccc

SEQ ID NO: 298856 - RNA, 32 nt, Human
acaggaagaaugcagaagccucaggagccgau

SEQ ID NO: 298857 - RNA, 32 nt, Human
acaggaagagagaagcugggagaaucgggaac

SEQ ID NO: 298858 - RNA, 23 nt, Human
acaggaagagauggggggccuca

SEQ ID NO: 298859 - RNA, 22 nt, Human
acaggaagaggacuggacgccc

SEQ ID NO: 298860 - RNA, 24 nt, Human
acaggaagaggagccaggcccuug

SEQ ID NO: 298861 - RNA, 19 nt, Human
acaggaagaggggcggccc

SEQ ID NO: 298862 - RNA, 21 nt, Human
acaggaagaugcaggccuuca

SEQ ID NO: 298863 - RNA, 32 nt, Human
acaggaagcacagcagguuuauccagaugaac

SEQ ID NO: 298864 - RNA, 32 nt, Human
acaggaagcagacaaagcaaauauggcaacuu

SEQ ID NO: 298865 - RNA, 32 nt, Human
acaggaagcagcucagcccagccugggagagg

SEQ ID NO: 298866 - RNA, 32 nt, Human
acaggaagccagguaaagaggggccagggaag

SEQ ID NO: 298867 - RNA, 32 nt, Human
acaggaagccuccuaggguucugagcagaaga

SEQ ID NO: 298868 - RNA, 19 nt, Human
acaggaaggagccaggccc

SEQ ID NO: 298869 - RNA, 18 nt, Human
acaggaagggaaaagcaa

SEQ ID NO: 298870 - RNA, 30 nt, Human
acaggaaggggccacagggcugagugcagg

SEQ ID NO: 298871 - RNA, 20 nt, Human
acaggaaguaggaacaugca

SEQ ID NO: 298872 - RNA, 32 nt, Human
acaggaagucacaguggugcccagggaugugu

SEQ ID NO: 298873 - RNA, 31 nt, Human
acaggaagugagacggauccagaucugugug

SEQ ID NO: 298874 - RNA, 32 nt, Human
acaggaaguguccagacaggagaggaagagau

SEQ ID NO: 298875 - RNA, 32 nt, Human
acaggaauaauaaaggcaucacugaccaggaa

SEQ ID NO: 298876 - RNA, 18 nt, Human
acaggaauccucugcaaa

SEQ ID NO: 298877 - RNA, 32 nt, Human
acaggaaugaagccuuagccaggaggccaggc

SEQ ID NO: 298878 - RNA, 32 nt, Human
acaggaauggagcucuuugucauuccaccucc

SEQ ID NO: 298879 - RNA, 32 nt, Human
acaggaauggaugauuuaaagcaucaauaaua

SEQ ID NO: 298880 - RNA, 32 nt, Human
acaggaauggggcgaggaaggagccaggcccg

SEQ ID NO: 298881 - RNA, 19 nt, Human
acaggaauuaaaaacaacu

SEQ ID NO: 298882 - RNA, 22 nt, Human
acaggaauuauuccuucuuguu

SEQ ID NO: 298883 - RNA, 32 nt, Human
acaggaauucaaccccagaaagacauaaacuu

SEQ ID NO: 298884 - RNA, 32 nt, Human
acaggacacacuguucccagggcacagacacc

SEQ ID NO: 298885 - RNA, 32 nt, Human
acaggacacagagcagcaggccccagaggcuu

SEQ ID NO: 298886 - RNA, 32 nt, Human
acaggacacagccuuggaucaggacagagacu

SEQ ID NO: 298887 - RNA, 32 nt, Human
acaggacacagcuggguucugaagcuucugag

SEQ ID NO: 298888 - RNA, 23 nt, Human
acaggacacaugggguacaaaga

SEQ ID NO: 298889 - RNA, 19 nt, Human
acaggacaccggccccuag

SEQ ID NO: 298890 - RNA, 32 nt, Human
acaggacacuucacaggacacuugagcacagu

SEQ ID NO: 298891 - RNA, 32 nt, Human
acaggacagaagcagacagcagguggaugaga

SEQ ID NO: 298892 - RNA, 32 nt, Human
acaggacagaagcagaguggguggugguuaug

SEQ ID NO: 298893 - RNA, 23 nt, Human
acaggacagaagcugggccaaga

SEQ ID NO: 298894 - RNA, 32 nt, Human
acaggacagaaggaauuggaagggggcggggc

SEQ ID NO: 298895 - RNA, 32 nt, Human
acaggacagccugucucuuguagcuuccuggg

SEQ ID NO: 298896 - RNA, 32 nt, Human
acaggacaggaugaugcuguccgagcaagccc

SEQ ID NO: 298897 - RNA, 17 nt, Human
acaggacaguaggcaga

SEQ ID NO: 298898 - RNA, 23 nt, Human
acaggacaugcccaaggcaaaga

SEQ ID NO: 298899 - RNA, 32 nt, Human
acaggacauggcacuggauggcuggcagagag

SEQ ID NO: 298900 - RNA, 21 nt, Human
acaggaccaccuccucugcca

SEQ ID NO: 298901 - RNA, 32 nt, Human
acaggaccagccacccucccacggccugggag

SEQ ID NO: 298902 - RNA, 32 nt, Human
acaggaccaggcgcuuggcaagacaucagaca

SEQ ID NO: 298903 - RNA, 32 nt, Human
acaggaccagggcagagccccgguacaaacag

SEQ ID NO: 298904 - RNA, 32 nt, Human
acaggacccaaaucaccucuuacugcaggaaa

SEQ ID NO: 298905 - RNA, 32 nt, Human
acaggacccacugcugaugauggcuccaccug

SEQ ID NO: 298906 - RNA, 32 nt, Human
acaggacccaggaagaccaggcuuguccugug

SEQ ID NO: 298907 - RNA, 32 nt, Human
acaggacccugccugcuggccacguaccuaga

SEQ ID NO: 298908 - RNA, 32 nt, Human
acaggaccucguacacgaucuccaacaauuuu

SEQ ID NO: 298909 - RNA, 22 nt, Human
acaggaccuggcugucaaccuc

SEQ ID NO: 298910 - RNA, 22 nt, Human
acaggacgcacagcccaggcca

SEQ ID NO: 298911 - RNA, 18 nt, Human
acaggacuaaaagagcaa

SEQ ID NO: 298912 - RNA, 32 nt, Human
acaggacucauucaacccaguaccauguggcu

SEQ ID NO: 298913 - RNA, 32 nt, Human
acaggacucgcugccuuucuuucccgucagaa

SEQ ID NO: 298914 - RNA, 32 nt, Human
acaggacugacccuucuucagagauaaugaca

SEQ ID NO: 298915 - RNA, 32 nt, Human
acaggacugcaaaaauccuucuccaccgcaca

SEQ ID NO: 298916 - RNA, 19 nt, Human
acaggacugggaggucuug

SEQ ID NO: 298917 - RNA, 32 nt, Human
acaggacuuggaccgcuucagccugggcuggg

SEQ ID NO: 298918 - RNA, 21 nt, Human
acaggagaaaaagaaaagcaa

SEQ ID NO: 298919 - RNA, 32 nt, Human
acaggagaaaagggagaaagcaaaaaguugaa

SEQ ID NO: 298920 - RNA, 32 nt, Human
acaggagaaagccaugugaugaagcaggcagg

SEQ ID NO: 298921 - RNA, 32 nt, Human
acaggagaaaggccuuauggugcagugaauau

SEQ ID NO: 298922 - RNA, 32 nt, Human
acaggagaaaguguauguaaacuaccugaaag

SEQ ID NO: 298923 - RNA, 32 nt, Human
acaggagaacccaucuagaccaaccuguuuug

SEQ ID NO: 298924 - RNA, 32 nt, Human
acaggagaaggugagauggagagaaagcaacc

SEQ ID NO: 298925 - RNA, 32 nt, Human
acaggagaaucacuugaacccaggagguggag

SEQ ID NO: 298926 - RNA, 32 nt, Human
acaggagaaucgcuugaacccaggaaguggag

SEQ ID NO: 298927 - RNA, 32 nt, Human
acaggagaaucgcuugagcuggagugcagugg

SEQ ID NO: 298928 - RNA, 32 nt, Human
acaggagaaugauggaaggaagggaggaagga

SEQ ID NO: 298929 - RNA, 32 nt, Human
acaggagacagcaguggcccagaggaagccca

SEQ ID NO: 298930 - RNA, 32 nt, Human
acaggagacaggucaguagucacaaacugauc

SEQ ID NO: 298931 - RNA, 32 nt, Human
acaggagaccugcucccuaucugcgcacccgg

SEQ ID NO: 298932 - RNA, 32 nt, Human
acaggagaccugcucccuaugugcacacccgg

SEQ ID NO: 298933 - RNA, 32 nt, Human
acaggagagaggcucagagagcugggaagcag

SEQ ID NO: 298934 - RNA, 32 nt, Human
acaggagagaucuaguuuucucaaggucaaag

SEQ ID NO: 298935 - RNA, 32 nt, Human
acaggagagcagugcagugacacagaugagaa

SEQ ID NO: 298936 - RNA, 32 nt, Human
acaggagagccagcaggguggaugcaaggggc

SEQ ID NO: 298937 - RNA, 32 nt, Human
acaggagaggcuucaggagcaggaugagaggc

SEQ ID NO: 298938 - RNA, 32 nt, Human
acaggagagggaggggugggggacagugggug

SEQ ID NO: 298939 - RNA, 32 nt, Human
acaggagauggggcaguuaaugcugaauggua

SEQ ID NO: 298940 - RNA, 19 nt, Human
acaggagauguaaacaacu

SEQ ID NO: 298941 - RNA, 18 nt, Human
acaggagauuuagagcaa

SEQ ID NO: 298942 - RNA, 32 nt, Human
acaggagcacagaccucugcuguagcuuuaau

SEQ ID NO: 298943 - RNA, 32 nt, Human
acaggagcacugaaccugcccucccaggugca

SEQ ID NO: 298944 - RNA, 32 nt, Human
acaggagcagcggcgaaacccaggucugucgg

SEQ ID NO: 298945 - RNA, 32 nt, Human
acaggagcagggccccugucccucucuucugg

SEQ ID NO: 298946 - RNA, 32 nt, Human
acaggagcaugccacaagacccagcuaauuuu

SEQ ID NO: 298947 - RNA, 32 nt, Human
acaggagccacugcacuccagccugggugaca

SEQ ID NO: 298948 - RNA, 32 nt, Human
acaggagccagccugcuucccacaacuacuag

SEQ ID NO: 298949 - RNA, 32 nt, Human
acaggagccgcagugaguccugccuggcucua

SEQ ID NO: 298950 - RNA, 32 nt, Human
acaggagccggugugugcacucugccuccuaa

SEQ ID NO: 298951 - RNA, 32 nt, Human
acaggagccucaccagcuuagauuuacaggag

SEQ ID NO: 298952 - RNA, 32 nt, Human
acaggagccucugcuucuaugaaaauugggaa

SEQ ID NO: 298953 - RNA, 32 nt, Human
acaggagccugagugaaggacaaggacagauc

SEQ ID NO: 298954 - RNA, 32 nt, Human
acaggagccuguaugcagcccagugcagccuu

SEQ ID NO: 298955 - RNA, 32 nt, Human
acaggagcgaggagacccgagagcagacgcgc

SEQ ID NO: 298956 - RNA, 32 nt, Human
acaggagcuacaccuugauccucuccuggcau

SEQ ID NO: 298957 - RNA, 32 nt, Human
acaggagcucacucucaccccuucugccugcc

SEQ ID NO: 298958 - RNA, 32 nt, Human
acaggagcuccagcaaaagcgcaggaagagag

SEQ ID NO: 298959 - RNA, 32 nt, Human
acaggagcuccuccaggagcaggcugggaucc

SEQ ID NO: 298960 - RNA, 32 nt, Human
acaggagcuccuggucaucauggugggcaagc

SEQ ID NO: 298961 - RNA, 24 nt, Human
acaggagcugcagugcuguacucu

SEQ ID NO: 298962 - RNA, 32 nt, Human
acaggagcuggagucaaagcuggugagcaauc

SEQ ID NO: 298963 - RNA, 32 nt, Human
acaggagcugucuggagcuccaccuuugcaaa

SEQ ID NO: 298964 - RNA, 32 nt, Human
acaggagcuguugcuuaagcuuuugccugaug

SEQ ID NO: 298965 - RNA, 32 nt, Human
acaggaggaaagagagaaagcaaaaaguuaga

SEQ ID NO: 298966 - RNA, 20 nt, Human
acaggaggaauguuugguug

SEQ ID NO: 298967 - RNA, 19 nt, Human
acaggaggagaggcugugu

SEQ ID NO: 298968 - RNA, 32 nt, Human
acaggaggagcacgggcagcugcuugcgcuac

SEQ ID NO: 298969 - RNA, 21 nt, Human
acaggaggagcagcugcuuug

SEQ ID NO: 298970 - RNA, 19 nt, Human
acaggaggagcaggugcug

SEQ ID NO: 298971 - RNA, 32 nt, Human
acaggaggaggaagagggucaggguggagagg

SEQ ID NO: 298972 - RNA, 19 nt, Human
acaggaggaggggagguug

SEQ ID NO: 298973 - RNA, 22 nt, Human
acaggaggagguagcuagcgug

SEQ ID NO: 298974 - RNA, 20 nt, Human
acaggaggauuccuuguguu

SEQ ID NO: 298975 - RNA, 32 nt, Human
acaggaggcaggaggggagcaagaauaagaaa

SEQ ID NO: 298976 - RNA, 32 nt, Human
acaggaggcccaggugggaagaucacuugagg

SEQ ID NO: 298977 - RNA, 32 nt, Human
acaggaggcgacugcaugagaccauggcugag

SEQ ID NO: 298978 - RNA, 32 nt, Human
acaggaggcugaggcacgagaaucacuugaac

SEQ ID NO: 298979 - RNA, 32 nt, Human
acaggaggcugaggcaggagaaucacuugaac

SEQ ID NO: 298980 - RNA, 32 nt, Human
acaggaggcugaggcaggagaauugcuugaac

SEQ ID NO: 298981 - RNA, 32 nt, Human
acaggagggaaaggcagaaugauaucacagca

SEQ ID NO: 298982 - RNA, 32 nt, Human
acaggagggacaucuucccaugccuucccuag

SEQ ID NO: 298983 - RNA, 32 nt, Human
acaggagggaggaggagaugaaagaggaggga

SEQ ID NO: 298984 - RNA, 32 nt, Human
acaggagggcaggaggaaaaucaagccuaaau

SEQ ID NO: 298985 - RNA, 32 nt, Human
acaggagggcugggcuccacuucauccagaug

SEQ ID NO: 298986 - RNA, 32 nt, Human
acaggaggggacggagaggagcugcaggaggg

SEQ ID NO: 298987 - RNA, 24 nt, Human
acaggaggggaggucaccggcaga

SEQ ID NO: 298988 - RNA, 32 nt, Human
acaggagggggcaccuucuccagaugaugucc

SEQ ID NO: 298989 - RNA, 32 nt, Human
acaggagguagaauaucagaguggggcuggau

SEQ ID NO: 298990 - RNA, 32 nt, Human
acaggagguccagauucaccacccucaaccuu

SEQ ID NO: 298991 - RNA, 32 nt, Human
acaggaggugugagccagcaaucagauggaga

SEQ ID NO: 298992 - RNA, 19 nt, Human
acaggagguucagcugugu

SEQ ID NO: 298993 - RNA, 32 nt, Human
acaggagucagaggcuggagugcaauggcgug

SEQ ID NO: 298994 - RNA, 32 nt, Human
acaggagucccuaacugugccacccuuggaau

SEQ ID NO: 298995 - RNA, 32 nt, Human
acaggagugaccgaaauguccaucuuaaggag

SEQ ID NO: 298996 - RNA, 25 nt, Human
acaggagugagccaccacaccuggc

SEQ ID NO: 298997 - RNA, 32 nt, Human
acaggagugccuccccuccagggccuggcaag

SEQ ID NO: 298998 - RNA, 32 nt, Human
acaggagugggagcagggagauaggagacaau

SEQ ID NO: 298999 - RNA, 32 nt, Human
acaggagugggugacagaggagacugcagagg

SEQ ID NO: 299000 - RNA, 32 nt, Human
acaggagugggugaggauggcagagggacaca

SEQ ID NO: 299001 - RNA, 18 nt, Human
acaggaguuaaaauaacu

SEQ ID NO: 299002 - RNA, 32 nt, Human
acaggaguuauaucagcacccucaguccuauc

SEQ ID NO: 299003 - RNA, 32 nt, Human
acaggauaaucgugguguaaaugaguguuucc

SEQ ID NO: 299004 - RNA, 32 nt, Human
acaggauacagugggaaucuugagacucuuug

SEQ ID NO: 299005 - RNA, 19 nt, Human
acaggauaccucccuucca

SEQ ID NO: 299006 - RNA, 32 nt, Human
acaggauagggguaggaggagaggaggcaggc

SEQ ID NO: 299007 - RNA, 32 nt, Human
acaggaucaguaagcucagacucuccaucucc

SEQ ID NO: 299008 - RNA, 32 nt, Human
acaggaucauuugagcccaggaauuugaggcu

SEQ ID NO: 299009 - RNA, 32 nt, Human
acaggauccuccggcucccugcauugccuggu

SEQ ID NO: 299010 - RNA, 32 nt, Human
acaggaucucacuauguugcccaggcuggucu

SEQ ID NO: 299011 - RNA, 32 nt, Human
acaggaucucaggcuggagugcaguggcacaa

SEQ ID NO: 299012 - RNA, 21 nt, Human
acaggaucuccuuugggcucu

SEQ ID NO: 299013 - RNA, 32 nt, Human
acaggaucugaacuuuguuuccagaaauucuu

SEQ ID NO: 299014 - RNA, 32 nt, Human
acaggaugacacccucccauaccccauagcug

SEQ ID NO: 299015 - RNA, 30 nt, Human
acaggaugagagugucaggugugcuucgcc

SEQ ID NO: 299016 - RNA, 32 nt, Human
acaggaugaggguggagggagagcuauuuaac

SEQ ID NO: 299017 - RNA, 32 nt, Human
acaggaugauggggucaggagggaccuggcuc

SEQ ID NO: 299018 - RNA, 32 nt, Human
acaggaugcaaccacaacacacggcuaugauc

SEQ ID NO: 299019 - RNA, 32 nt, Human
acaggaugccaggggccugaccagccucccca

SEQ ID NO: 299020 - RNA, 32 nt, Human
acaggaugccuaggggacggcgaugggccuca

SEQ ID NO: 299021 - RNA, 32 nt, Human
acaggaugccucucucacacuuguauucucga

SEQ ID NO: 299022 - RNA, 32 nt, Human
acaggaugcgggggccaagaugaugcugaggc

SEQ ID NO: 299023 - RNA, 20 nt, Human
acaggaugcuggaaaacagc

SEQ ID NO: 299024 - RNA, 32 nt, Human
acaggaugcuucuguuccuggaaacaugaaug

SEQ ID NO: 299025 - RNA, 32 nt, Human
acaggauggaggaggccagggaacaggcaggg

SEQ ID NO: 299026 - RNA, 21 nt, Human
acaggauggaguaaaacaacu

SEQ ID NO: 299027 - RNA, 20 nt, Human
acaggauggaguaagagaau

SEQ ID NO: 299028 - RNA, 32 nt, Human
acaggauggaguuucgcucugucgccaggcug

SEQ ID NO: 299029 - RNA, 20 nt, Human
acaggauggcugucaacaac

SEQ ID NO: 299030 - RNA, 32 nt, Human
acaggaugggaaauuaccaaagagagacauca

SEQ ID NO: 299031 - RNA, 32 nt, Human
acaggaugggccaccagccaccuccuccaacu

SEQ ID NO: 299032 - RNA, 32 nt, Human
acaggauggugaggcugggaggaggaagacug

SEQ ID NO: 299033 - RNA, 32 nt, Human
acaggauguaaagaaaagucacaguaggcacu

SEQ ID NO: 299034 - RNA, 32 nt, Human
acaggaugucccaagaguaacaaaagauggga

SEQ ID NO: 299035 - RNA, 21 nt, Human
acaggaugucuuaggauuguu

SEQ ID NO: 299036 - RNA, 32 nt, Human
acaggauucagacgcaaaagacuugcauaaga

SEQ ID NO: 299037 - RNA, 32 nt, Human
acaggauuccugcuccgccucuaccccacccu

SEQ ID NO: 299038 - RNA, 32 nt, Human
acaggauuggcaaacuccgcccuccacuuacu

SEQ ID NO: 299039 - RNA, 32 nt, Human
acaggauugugugaggauugagacugacacag

SEQ ID NO: 299040 - RNA, 19 nt, Human
acaggauuucgccauguug

SEQ ID NO: 299041 - RNA, 32 nt, Human
acaggauuugagaauaguuucaucucagcccc

SEQ ID NO: 299042 - RNA, 19 nt, Human
acaggauuugcuuguguug

SEQ ID NO: 299043 - RNA, 32 nt, Human
acaggauuuggucacugguucuucaucuuuug

SEQ ID NO: 299044 - RNA, 19 nt, Human
acaggauuuugcuguguug

SEQ ID NO: 299045 - RNA, 32 nt, Human
acaggauuuuugcugaaaaggcaggcagugug

SEQ ID NO: 299046 - RNA, 18 nt, Human
acaggcaaagaaacagca

SEQ ID NO: 299047 - RNA, 21 nt, Human
acaggcaaagcugggaucguu

SEQ ID NO: 299048 - RNA, 32 nt, Human
acaggcaacucaggaacagcucuccagcccca

SEQ ID NO: 299049 - RNA, 32 nt, Human
acaggcaagaaccugggcuguaacugccaccu

SEQ ID NO: 299050 - RNA, 32 nt, Human
acaggcaagaagaaagcuguggucaugauaug

SEQ ID NO: 299051 - RNA, 21 nt, Human
acaggcaagugcaccaccaug

SEQ ID NO: 299052 - RNA, 32 nt, Human
acaggcaaucaaggccugagcaaccaaaagga

SEQ ID NO: 299053 - RNA, 32 nt, Human
acaggcaaugccccugcccugugggccuuaua

SEQ ID NO: 299054 - RNA, 18 nt, Human
acaggcacaaaaaagcaa

SEQ ID NO: 299055 - RNA, 21 nt, Human
acaggcacacgcaccugcucu

SEQ ID NO: 299056 - RNA, 32 nt, Human
acaggcacagcagagcccccacccucgaggca

SEQ ID NO: 299057 - RNA, 32 nt, Human
acaggcacagcccgacugcagggagggaugca

SEQ ID NO: 299058 - RNA, 32 nt, Human
acaggcacagcucucacaaagcucuucaagca

SEQ ID NO: 299059 - RNA, 24 nt, Human
acaggcacagugcugcugugcucu

SEQ ID NO: 299060 - RNA, 32 nt, Human
acaggcacaugccaccaccaagcccagcuauu

SEQ ID NO: 299061 - RNA, 22 nt, Human
acaggcacaugccaccaugcuc

SEQ ID NO: 299062 - RNA, 32 nt, Human
acaggcacauguacaugcacaggugugcuaca

SEQ ID NO: 299063 - RNA, 32 nt, Human
acaggcaccacacucaaaugcucacaggagcu

SEQ ID NO: 299064 - RNA, 24 nt, Human
acaggcaccagccaccaugccugg

SEQ ID NO: 299065 - RNA, 32 nt, Human
acaggcacccaccaccuccauugucuuuuuac

SEQ ID NO: 299066 - RNA, 32 nt, Human
acaggcacccaccacuaugcccggcuaauuuu

SEQ ID NO: 299067 - RNA, 32 nt, Human
acaggcacccacugacuccagccucauggaac

SEQ ID NO: 299068 - RNA, 18 nt, Human
acaggcacccgccaccac

SEQ ID NO: 299069 - RNA, 25 nt, Human
acaggcacccgccaccacacccagc

SEQ ID NO: 299070 - RNA, 32 nt, Human
acaggcacccgccaccacacccggcuaauuuu

SEQ ID NO: 299071 - RNA, 32 nt, Human
acaggcacccgccaccaugcccggcuaauuuu

SEQ ID NO: 299072 - RNA, 32 nt, Human
acaggcacccgccaccaugcccggcuauuuuu

SEQ ID NO: 299073 - RNA, 32 nt, Human
acaggcacccgccaccgugcccggcuaguuuu

SEQ ID NO: 299074 - RNA, 32 nt, Human
acaggcacccuccacuaggcccggcuaauuuu

SEQ ID NO: 299075 - RNA, 32 nt, Human
acaggcaccuaugguuccagcuacucaggagg

SEQ ID NO: 299076 - RNA, 32 nt, Human
acaggcaccugccaacacgcccggcuaauuuu

SEQ ID NO: 299077 - RNA, 25 nt, Human
acaggcaccugccaccacacccggc

SEQ ID NO: 299078 - RNA, 32 nt, Human
acaggcaccugccaccacacccggcuacuuuu

SEQ ID NO: 299079 - RNA, 20 nt, Human
acaggcaccugccaccacca

SEQ ID NO: 299080 - RNA, 32 nt, Human
acaggcaccugccaccacgcccggcuaauuuu

SEQ ID NO: 299081 - RNA, 25 nt, Human
acaggcaccugccaccacgccuggc

SEQ ID NO: 299082 - RNA, 32 nt, Human
acaggcaccugccaccaugcccggcuaauuuu

SEQ ID NO: 299083 - RNA, 32 nt, Human
acaggcaccugccacuaugcccggcuaacuuu

SEQ ID NO: 299084 - RNA, 32 nt, Human
acaggcaccugccauuaugcccggcuaaguuu

SEQ ID NO: 299085 - RNA, 22 nt, Human
acaggcacgagccacugugccu

SEQ ID NO: 299086 - RNA, 32 nt, Human
acaggcacgcucuaccacaccuggcuaauuuu

SEQ ID NO: 299087 - RNA, 32 nt, Human
acaggcacggcugguggugugcagugaacagc

SEQ ID NO: 299088 - RNA, 23 nt, Human
acaggcacgugccaccacgcccu

SEQ ID NO: 299089 - RNA, 19 nt, Human
acaggcacgugccaccaug

SEQ ID NO: 299090 - RNA, 22 nt, Human
acaggcacgugccaccaugccu

SEQ ID NO: 299091 - RNA, 20 nt, Human
acaggcacgugccauugcuc

SEQ ID NO: 299092 - RNA, 21 nt, Human
acaggcacuaugcuauucucu

SEQ ID NO: 299093 - RNA, 23 nt, Human
acaggcacuauuuuggugugcuc

SEQ ID NO: 299094 - RNA, 32 nt, Human
acaggcacucgccaccaugcccggcugauuuu

SEQ ID NO: 299095 - RNA, 32 nt, Human
acaggcacucuacgaaguuucuaaugggcaga

SEQ ID NO: 299096 - RNA, 20 nt, Human
acaggcacugcugccaugcu

SEQ ID NO: 299097 - RNA, 32 nt, Human
acaggcagacacaugcuguuggccucaagcaa

SEQ ID NO: 299098 - RNA, 32 nt, Human
acaggcagagacagggcacagucucuaggucu

SEQ ID NO: 299099 - RNA, 32 nt, Human
acaggcagagcccagacccuggaggaaauccu

SEQ ID NO: 299100 - RNA, 32 nt, Human
acaggcagcacaggcgccccaccaccacccag

SEQ ID NO: 299101 - RNA, 32 nt, Human
acaggcagcaccagggcuccugacugaaaggg

SEQ ID NO: 299102 - RNA, 32 nt, Human
acaggcagcacugaggccgggacccugcuggc

SEQ ID NO: 299103 - RNA, 32 nt, Human
acaggcagcccccauucccaaguucucucuuu

SEQ ID NO: 299104 - RNA, 32 nt, Human
acaggcagccuggacauagagagggagaagaa

SEQ ID NO: 299105 - RNA, 32 nt, Human
acaggcaggaagcacagccuaccauggccucc

SEQ ID NO: 299106 - RNA, 32 nt, Human
acaggcaggaugccccucccaaccccucaguc

SEQ ID NO: 299107 - RNA, 17 nt, Human
acaggcaggcaccccac

SEQ ID NO: 299108 - RNA, 32 nt, Human
acaggcaggcagcaggaggggcgagcugggag

SEQ ID NO: 299109 - RNA, 32 nt, Human
acaggcagggagggcuaggcugugcaucccuc

SEQ ID NO: 299110 - RNA, 32 nt, Human
acaggcagggcccuggagagacgcucccugcu

SEQ ID NO: 299111 - RNA, 32 nt, Human
acaggcaguagaggaggaaugaggauggguug

SEQ ID NO: 299112 - RNA, 32 nt, Human
acaggcaguucugcgacaagcuuggcuugaaa

SEQ ID NO: 299113 - RNA, 32 nt, Human
acaggcaguucugugcaagcuuggcuugaaag

SEQ ID NO: 299114 - RNA, 32 nt, Human
acaggcauaaagcacuccccauuuuuccuacu

SEQ ID NO: 299115 - RNA, 22 nt, Human
acaggcauaagccacugugccu

SEQ ID NO: 299116 - RNA, 20 nt, Human
acaggcauaggccacugugc

SEQ ID NO: 299117 - RNA, 32 nt, Human
acaggcaucaagcucauucggcaaaauccagu

SEQ ID NO: 299118 - RNA, 24 nt, Human
acaggcaucagccaccacaccugg

SEQ ID NO: 299119 - RNA, 32 nt, Human
acaggcaucagccaccaugcccggaugaaaag

SEQ ID NO: 299120 - RNA, 32 nt, Human
acaggcauccgccaccaugcccggcuaguuuu

SEQ ID NO: 299121 - RNA, 19 nt, Human
acaggcauccgcugcgcuc

SEQ ID NO: 299122 - RNA, 32 nt, Human
acaggcauccuugccaagccuccaccacuagg

SEQ ID NO: 299123 - RNA, 32 nt, Human
acaggcaucgggaagcagaccgccuuggaacu

SEQ ID NO: 299124 - RNA, 32 nt, Human
acaggcaucucuucaggcuugcuugguacuug

SEQ ID NO: 299125 - RNA, 18 nt, Human
acaggcaugaaccaccac

SEQ ID NO: 299126 - RNA, 25 nt, Human
acaggcaugaaccaccacaccuggc

SEQ ID NO: 299127 - RNA, 22 nt, Human
acaggcaugaaccacugugccu

SEQ ID NO: 299128 - RNA, 32 nt, Human
acaggcaugaaucaccaugccuagccacuuag

SEQ ID NO: 299129 - RNA, 21 nt, Human
acaggcaugagcacugugcuu

SEQ ID NO: 299130 - RNA, 25 nt, Human
acaggcaugagccaccacgcccagc

SEQ ID NO: 299131 - RNA, 25 nt, Human
acaggcaugagccaccacgcccggc

SEQ ID NO: 299132 - RNA, 21 nt, Human
acaggcaugagccaccacggc

SEQ ID NO: 299133 - RNA, 32 nt, Human
acaggcaugagccaccaugccuagccagcaag

SEQ ID NO: 299134 - RNA, 21 nt, Human
acaggcaugagccaccguggc

SEQ ID NO: 299135 - RNA, 32 nt, Human
acaggcaugagccacugcacccaacuccucuu

SEQ ID NO: 299136 - RNA, 22 nt, Human
acaggcaugagccacugugccu

SEQ ID NO: 299137 - RNA, 32 nt, Human
acaggcaugagccacugugcucagccuucaug

SEQ ID NO: 299138 - RNA, 22 nt, Human
acaggcaugagccacugugcuu

SEQ ID NO: 299139 - RNA, 22 nt, Human
acaggcaugagccacugugucu

SEQ ID NO: 299140 - RNA, 32 nt, Human
acaggcaugagccgcuacacccggcucugucu

SEQ ID NO: 299141 - RNA, 22 nt, Human
acaggcaugagccgcuaugccu

SEQ ID NO: 299142 - RNA, 32 nt, Human
acaggcaugagucauugcucccagccauuaga

SEQ ID NO: 299143 - RNA, 32 nt, Human
acaggcaugcaagugagagcuuccugagcuuu

SEQ ID NO: 299144 - RNA, 25 nt, Human
acaggcaugcaccaccacgcccagc

SEQ ID NO: 299145 - RNA, 25 nt, Human
acaggcaugcaccaccacgccuggc

SEQ ID NO: 299146 - RNA, 19 nt, Human
acaggcaugcaccacuacg

SEQ ID NO: 299147 - RNA, 23 nt, Human
acaggcaugcaucacuaugcucu

SEQ ID NO: 299148 - RNA, 18 nt, Human
acaggcaugcgccaccac

SEQ ID NO: 299149 - RNA, 19 nt, Human
acaggcaugcgccaccaug

SEQ ID NO: 299150 - RNA, 22 nt, Human
acaggcaugcgccaccaugccc

SEQ ID NO: 299151 - RNA, 24 nt, Human
acaggcaugcgucaccacgccggc

SEQ ID NO: 299152 - RNA, 32 nt, Human
acaggcaugcuggcucaugccuguaaucccag

SEQ ID NO: 299153 - RNA, 22 nt, Human
acaggcauggccugcgugcccu

SEQ ID NO: 299154 - RNA, 22 nt, Human
acaggcaugugccgccaugccu

SEQ ID NO: 299155 - RNA, 32 nt, Human
acaggcauuggcguguaccugacuucagcugu

SEQ ID NO: 299156 - RNA, 32 nt, Human
acaggcauuggcguguaccugacuuccgcugu

SEQ ID NO: 299157 - RNA, 32 nt, Human
acaggcauuuccucuuugcuaauugcaccaau

SEQ ID NO: 299158 - RNA, 23 nt, Human
acaggccaacccagaggacagga

SEQ ID NO: 299159 - RNA, 22 nt, Human
acaggccaaccggaggacagga

SEQ ID NO: 299160 - RNA, 32 nt, Human
acaggccaaggcaggggaauugcuugaguuca

SEQ ID NO: 299161 - RNA, 24 nt, Human
acaggccaaugagucggccaguga

SEQ ID NO: 299162 - RNA, 24 nt, Human
acaggccacagaccccagagcuug

SEQ ID NO: 299163 - RNA, 32 nt, Human
acaggccacagaccccagagcuuggcuuuuga

SEQ ID NO: 299164 - RNA, 32 nt, Human
acaggccacugcaucucagauucaggggagaa

SEQ ID NO: 299165 - RNA, 32 nt, Human
acaggccagccugcuugggcgcucggucucca

SEQ ID NO: 299166 - RNA, 32 nt, Human
acaggccaggacgccauggcaggauggagagg

SEQ ID NO: 299167 - RNA, 31 nt, Human
acaggccaggcuucggugcuaccucagaggg

SEQ ID NO: 299168 - RNA, 21 nt, Human
acaggccagggaaagcaggga

SEQ ID NO: 299169 - RNA, 32 nt, Human
acaggccagggaggguacaggguagucccccu

SEQ ID NO: 299170 - RNA, 32 nt, Human
acaggccaggggagggcaucuggaccagggca

SEQ ID NO: 299171 - RNA, 32 nt, Human
acaggccaugaggagaacuaggagcaagugcu

SEQ ID NO: 299172 - RNA, 32 nt, Human
acaggccaugcucagauggagugcugucugga

SEQ ID NO: 299173 - RNA, 18 nt, Human
acaggcccacugcugugc

SEQ ID NO: 299174 - RNA, 32 nt, Human
acaggcccaggcccgaccucaggucauccgcc

SEQ ID NO: 299175 - RNA, 32 nt, Human
acaggcccaucccggcggggcaccggggacuc

SEQ ID NO: 299176 - RNA, 32 nt, Human
acaggcccaugggaagaaggggguuuuaaaaa

SEQ ID NO: 299177 - RNA, 32 nt, Human
acaggcccauggugaugcucaggccucugcuu

SEQ ID NO: 299178 - RNA, 22 nt, Human
acaggcccauucagggcugccu

SEQ ID NO: 299179 - RNA, 32 nt, Human
acaggccccaugcauccucccugccucacucc

SEQ ID NO: 299180 - RNA, 24 nt, Human
acaggcccccaggaccccugggga

SEQ ID NO: 299181 - RNA, 32 nt, Human
acaggccccuaguugggaagacuggaugagag

SEQ ID NO: 299182 - RNA, 32 nt, Human
acaggcccuagcagggcaggcgggaggugagc

SEQ ID NO: 299183 - RNA, 28 nt, Human
acaggcccucaguuagggacgcucgggg

SEQ ID NO: 299184 - RNA, 24 nt, Human
acaggcccucauggcaggcuuguu

SEQ ID NO: 299185 - RNA, 32 nt, Human
acaggcccuccaccucaccuccagcucagggg

SEQ ID NO: 299186 - RNA, 32 nt, Human
acaggcccugccugccacccuaggcagggaaa

SEQ ID NO: 299187 - RNA, 32 nt, Human
acaggcccuuagcugcuccaugcaugcucagc

SEQ ID NO: 299188 - RNA, 21 nt, Human
acaggcccuugggugugggga

SEQ ID NO: 299189 - RNA, 32 nt, Human
acaggccgcggaggaggaggagguggaguugc

SEQ ID NO: 299190 - RNA, 32 nt, Human
acaggccggagagagccguaggcaggaccccg

SEQ ID NO: 299191 - RNA, 23 nt, Human
acaggccggcccggggcgcuggg

SEQ ID NO: 299192 - RNA, 21 nt, Human
acaggccgggaagacaguuga

SEQ ID NO: 299193 - RNA, 28 nt, Human
acaggccggguccuggagagacuggggg

SEQ ID NO: 299194 - RNA, 32 nt, Human
acaggccuaggagacuaggagggaaucuggag

SEQ ID NO: 299195 - RNA, 32 nt, Human
acaggccuccacccaaccaccauccccuuggc

SEQ ID NO: 299196 - RNA, 32 nt, Human
acaggccuccaccccugcaccagagccugcuc

SEQ ID NO: 299197 - RNA, 22 nt, Human
acaggccucugccugcugggga

SEQ ID NO: 299198 - RNA, 32 nt, Human
acaggccugcgggagccagggugggcagccac

SEQ ID NO: 299199 - RNA, 32 nt, Human
acaggccugcucucuuuuucuccagggucaga

SEQ ID NO: 299200 - RNA, 32 nt, Human
acaggccuggaauucuaccacagggaauuugg

SEQ ID NO: 299201 - RNA, 32 nt, Human
acaggccuggagcacggaugaauaagagggaa

SEQ ID NO: 299202 - RNA, 32 nt, Human
acaggccuggggacagggagggaugggagucc

SEQ ID NO: 299203 - RNA, 32 nt, Human
acaggccuggguaguauauacacacauacgca

SEQ ID NO: 299204 - RNA, 32 nt, Human
acaggccuguagucccagcuacuugggaggcu

SEQ ID NO: 299205 - RNA, 32 nt, Human
acaggccugugaacaagccaggccagucuugg

SEQ ID NO: 299206 - RNA, 22 nt, Human
acaggccuuaggacaauggggg

SEQ ID NO: 299207 - RNA, 32 nt, Human
acaggccuuccuccucucaaaccuggcagaug

SEQ ID NO: 299208 - RNA, 19 nt, Human
acaggccuucgcugaggug

SEQ ID NO: 299209 - RNA, 18 nt, Human
acaggcgacugccaccac

SEQ ID NO: 299210 - RNA, 32 nt, Human
acaggcgcaccacgcccgucugacugaccucu

SEQ ID NO: 299211 - RNA, 24 nt, Human
acaggcgccagccaccaugccugg

SEQ ID NO: 299212 - RNA, 21 nt, Human
acaggcgcccaccaccacagc

SEQ ID NO: 299213 - RNA, 19 nt, Human
acaggcgcccaccaccaug

SEQ ID NO: 299214 - RNA, 22 nt, Human
acaggcgcccaccaccaugccc

SEQ ID NO: 299215 - RNA, 32 nt, Human
acaggcgcccaccaccaugcccagaugagagg

SEQ ID NO: 299216 - RNA, 17 nt, Human
acaggcgcccaccaccc

SEQ ID NO: 299217 - RNA, 19 nt, Human
acaggcgccccaccaccac

SEQ ID NO: 299218 - RNA, 20 nt, Human
acaggcgccccaccaccacc

SEQ ID NO: 299219 - RNA, 32 nt, Human
acaggcgcccgccaccacacccggcuaacuuu

SEQ ID NO: 299220 - RNA, 32 nt, Human
acaggcgcccgccaccacacccggcuaauuuu

SEQ ID NO: 299221 - RNA, 32 nt, Human
acaggcgcccgccaccacgcccggcuaauuuu

SEQ ID NO: 299222 - RNA, 32 nt, Human
acaggcgcccgccaccacgcccggcuauuuuu

SEQ ID NO: 299223 - RNA, 21 nt, Human
acaggcgcccgccaccacggc

SEQ ID NO: 299224 - RNA, 32 nt, Human
acaggcgcccgccaccaugcccggcuaauuuu

SEQ ID NO: 299225 - RNA, 32 nt, Human
acaggcgcccgccaccgcucccggcuaauuuu

SEQ ID NO: 299226 - RNA, 32 nt, Human
acaggcgcccgccaccucgcccggcuaauauu

SEQ ID NO: 299227 - RNA, 32 nt, Human
acaggcgcccgccacugcgcccggcuaauuuu

SEQ ID NO: 299228 - RNA, 32 nt, Human
acaggcgcccgccaucacacccggcuaauuuu

SEQ ID NO: 299229 - RNA, 32 nt, Human
acaggcgcccgccaucacgcccggcuaauguu

SEQ ID NO: 299230 - RNA, 32 nt, Human
acaggcgcccgccaucacgcccggcuaauuuu

SEQ ID NO: 299231 - RNA, 32 nt, Human
acaggcgcccgcuaccguacccggcuaauuuu

SEQ ID NO: 299232 - RNA, 23 nt, Human
acaggcgccgucugccacccucu

SEQ ID NO: 299233 - RNA, 32 nt, Human
acaggcgccugccacaacgcccggcuaauuuu

SEQ ID NO: 299234 - RNA, 32 nt, Human
acaggcgccugccaccacacccggcuaauuuu

SEQ ID NO: 299235 - RNA, 32 nt, Human
acaggcgccugccaccacgcccggcuaauuuu

SEQ ID NO: 299236 - RNA, 32 nt, Human
acaggcgccugccaccagccuggcuaauuuuu

SEQ ID NO: 299237 - RNA, 32 nt, Human
acaggcgccugccaccaugccuggcugauauu

SEQ ID NO: 299238 - RNA, 32 nt, Human
acaggcgccugccuccaugccuggcuaauuuu

SEQ ID NO: 299239 - RNA, 32 nt, Human
acaggcgccuuccucuguccuuccugcucuuu

SEQ ID NO: 299240 - RNA, 19 nt, Human
acaggcgcgcacacaccgc

SEQ ID NO: 299241 - RNA, 32 nt, Human
acaggcgcuggcugugagugguuuguacaugc

SEQ ID NO: 299242 - RNA, 32 nt, Human
acaggcgcuguggcucacgccuguaaucccag

SEQ ID NO: 299243 - RNA, 32 nt, Human
acaggcgcuguggcucacgccuguaauuccag

SEQ ID NO: 299244 - RNA, 17 nt, Human
acaggcgcuucaccgcg

SEQ ID NO: 299245 - RNA, 32 nt, Human
acaggcggaaaucugaaaaaugaagacguucc

SEQ ID NO: 299246 - RNA, 32 nt, Human
acaggcggcaggcugggguugguggggcuugu

SEQ ID NO: 299247 - RNA, 32 nt, Human
acaggcggcgcugaagugaaggaugcuggcgg

SEQ ID NO: 299248 - RNA, 32 nt, Human
acaggcgggaggaucacuugagccugggaggu

SEQ ID NO: 299249 - RNA, 32 nt, Human
acaggcggggucucacuauauuguccaggcua

SEQ ID NO: 299250 - RNA, 22 nt, Human
acaggcgucagccaccaugccc

SEQ ID NO: 299251 - RNA, 24 nt, Human
acaggcgucagccaccgcgccugg

SEQ ID NO: 299252 - RNA, 19 nt, Human
acaggcgucccccaccacg

SEQ ID NO: 299253 - RNA, 18 nt, Human
acaggcguccgcccccac

SEQ ID NO: 299254 - RNA, 32 nt, Human
acaggcgucuuccccgaacccuucccaaaccu

SEQ ID NO: 299255 - RNA, 32 nt, Human
acaggcgugaaccugcucugcuguguaucuuu

SEQ ID NO: 299256 - RNA, 18 nt, Human
acaggcgugaagagcaag

SEQ ID NO: 299257 - RNA, 18 nt, Human
acaggcgugagccaccac

SEQ ID NO: 299258 - RNA, 32 nt, Human
acaggcgugagccaccacacccggccguggaa

SEQ ID NO: 299259 - RNA, 25 nt, Human
acaggcgugagccaccacaccuggc

SEQ ID NO: 299260 - RNA, 25 nt, Human
acaggcgugagccaccacgcccggc

SEQ ID NO: 299261 - RNA, 19 nt, Human
acaggcgugagccacccug

SEQ ID NO: 299262 - RNA, 18 nt, Human
acaggcgugagccaccgc

SEQ ID NO: 299263 - RNA, 21 nt, Human
acaggcgugagccaccgcggc

SEQ ID NO: 299264 - RNA, 22 nt, Human
acaggcgugagccacugugccu

SEQ ID NO: 299265 - RNA, 32 nt, Human
acaggcgugagccacugugccuagccauuccc

SEQ ID NO: 299266 - RNA, 18 nt, Human
acaggcgugagcuaucac

SEQ ID NO: 299267 - RNA, 25 nt, Human
acaggcgugcaccaccacgcccggc

SEQ ID NO: 299268 - RNA, 19 nt, Human
acaggcgugcaccaccaug

SEQ ID NO: 299269 - RNA, 22 nt, Human
acaggcgugcaccaccaugccc

SEQ ID NO: 299270 - RNA, 19 nt, Human
acaggcgugcaccaucacg

SEQ ID NO: 299271 - RNA, 19 nt, Human
acaggcguggcuguacacg

SEQ ID NO: 299272 - RNA, 32 nt, Human
acaggcguggugguggguaccuguaaucccag

SEQ ID NO: 299273 - RNA, 18 nt, Human
acaggcgugugccaccac

SEQ ID NO: 299274 - RNA, 19 nt, Human
acaggcgugugccaccacg

SEQ ID NO: 299275 - RNA, 22 nt, Human
acaggcgugugccacugugccu

SEQ ID NO: 299276 - RNA, 17 nt, Human
acaggcgugugcccaug

SEQ ID NO: 299277 - RNA, 32 nt, Human
acaggcguguuagcaugugccuguaaucccag

SEQ ID NO: 299278 - RNA, 24 nt, Human
acaggcguuagccacugcgcccgg

SEQ ID NO: 299279 - RNA, 32 nt, Human
acaggcguucgagaccagccugggcaacauag

SEQ ID NO: 299280 - RNA, 32 nt, Human
acaggcguugcugaccagaaggugaguaaccc

SEQ ID NO: 299281 - RNA, 32 nt, Human
acaggcuaagaccacagacagagcagggcuuc

SEQ ID NO: 299282 - RNA, 32 nt, Human
acaggcuacaucuuugcuuuguuggcaguuuu

SEQ ID NO: 299283 - RNA, 32 nt, Human
acaggcuacguuuaaagagcauagagacaaug

SEQ ID NO: 299284 - RNA, 19 nt, Human
acaggcuagucacaaugca

SEQ ID NO: 299285 - RNA, 32 nt, Human
acaggcuaucaucagugcccacaaacacugcc

SEQ ID NO: 299286 - RNA, 32 nt, Human
acaggcucaagcaauucuccugccucagccuc

SEQ ID NO: 299287 - RNA, 32 nt, Human
acaggcucaccuuuguguuuccagcugcagag

SEQ ID NO: 299288 - RNA, 32 nt, Human
acaggcucagccauacucuuacuaucaugcag

SEQ ID NO: 299289 - RNA, 32 nt, Human
acaggcucaugccaccaugcccagcuaauuuu

SEQ ID NO: 299290 - RNA, 32 nt, Human
acaggcuccaugcccaagguggcagaugugga

SEQ ID NO: 299291 - RNA, 32 nt, Human
acaggcuccaugcccaaguuggcagauguggg

SEQ ID NO: 299292 - RNA, 28 nt, Human
acaggcuccccucauuagggcuugggga

SEQ ID NO: 299293 - RNA, 32 nt, Human
acaggcuccugaggaggauugagggugaaagu

SEQ ID NO: 299294 - RNA, 17 nt, Human
acaggcuccuggaaugu

SEQ ID NO: 299295 - RNA, 27 nt, Human
acaggcuccuggagggcugccuggggg

SEQ ID NO: 299296 - RNA, 32 nt, Human
acaggcucgguucugguccccugcuuuuugag

SEQ ID NO: 299297 - RNA, 32 nt, Human
acaggcucugcagauucuaggcugcccuagga

SEQ ID NO: 299298 - RNA, 32 nt, Human
acaggcucugcaggcuaucucccccucuggcu

SEQ ID NO: 299299 - RNA, 32 nt, Human
acaggcucuggcccauggcuuccuacuggcag

SEQ ID NO: 299300 - RNA, 23 nt, Human
acaggcucuucagauaauggggg

SEQ ID NO: 299301 - RNA, 32 nt, Human
acaggcucuuccuaugguauuauuuaaaauua

SEQ ID NO: 299302 - RNA, 32 nt, Human
acaggcucuugcuauguugcccaggcuggucu

SEQ ID NO: 299303 - RNA, 32 nt, Human
acaggcucuuggguggaagggagcagguuucc

SEQ ID NO: 299304 - RNA, 32 nt, Human
acaggcugaaaagcaugacguaccaaacaggc

SEQ ID NO: 299305 - RNA, 32 nt, Human
acaggcugagccuccugaaaacccaugaacgc

SEQ ID NO: 299306 - RNA, 32 nt, Human
acaggcugcacugaaauaaccugguaaacaac

SEQ ID NO: 299307 - RNA, 32 nt, Human
acaggcugcaggcuagagggggcaguuaugac

SEQ ID NO: 299308 - RNA, 32 nt, Human
acaggcugcucuggccaggagagaaacagcuc

SEQ ID NO: 299309 - RNA, 32 nt, Human
acaggcuggagcagcccaggagaugggccuaa

SEQ ID NO: 299310 - RNA, 32 nt, Human
acaggcuggagugcaguacaauuacggcucag

SEQ ID NO: 299311 - RNA, 32 nt, Human
acaggcuggagugcaguggcaaagucucgacu

SEQ ID NO: 299312 - RNA, 32 nt, Human
acaggcuggagugcaguggcacgaucuuggcu

SEQ ID NO: 299313 - RNA, 32 nt, Human
acaggcuggagugcaguggcuccgaucucugc

SEQ ID NO: 299314 - RNA, 32 nt, Human
acaggcuggagugcaguggugugaucuuggcu

SEQ ID NO: 299315 - RNA, 32 nt, Human
acaggcuggcgugcaguagugggaucuuggug

SEQ ID NO: 299316 - RNA, 29 nt, Human
acaggcuggcugcucagucauucugcagg

SEQ ID NO: 299317 - RNA, 32 nt, Human
acaggcuggcugcucagucauucugcagggcc

SEQ ID NO: 299318 - RNA, 32 nt, Human
acaggcugggaaauauuguguuggaagcacug

SEQ ID NO: 299319 - RNA, 32 nt, Human
acaggcugggauuacaggcgugagccacugca

SEQ ID NO: 299320 - RNA, 32 nt, Human
acaggcugggcagaggggagagagggcaggac

SEQ ID NO: 299321 - RNA, 32 nt, Human
acaggcugggccuggcagacagcacuggcagu

SEQ ID NO: 299322 - RNA, 32 nt, Human
acaggcugggcugcuggagguggggcgaggca

SEQ ID NO: 299323 - RNA, 32 nt, Human
acaggcuggggaggagaaaacaaacacaucaa

SEQ ID NO: 299324 - RNA, 32 nt, Human
acaggcuggguguucccagcagcccuggcuug

SEQ ID NO: 299325 - RNA, 32 nt, Human
acaggcuggucucgaacucccaccucagccuc

SEQ ID NO: 299326 - RNA, 32 nt, Human
acaggcugguggaggggcagacccccuacaag

SEQ ID NO: 299327 - RNA, 17 nt, Human
acaggcugugccacccg

SEQ ID NO: 299328 - RNA, 32 nt, Human
acaggcuguuggacgcagccuggguggcagag

SEQ ID NO: 299329 - RNA, 18 nt, Human
acaggcuucacagugauu

SEQ ID NO: 299330 - RNA, 22 nt, Human
acaggcuucaccuguucuuguu

SEQ ID NO: 299331 - RNA, 19 nt, Human
acaggcuucacuggagcug

SEQ ID NO: 299332 - RNA, 18 nt, Human
acaggcuucaugggcugu

SEQ ID NO: 299333 - RNA, 32 nt, Human
acaggcuuccuaccugcagcuucacuuugcuc

SEQ ID NO: 299334 - RNA, 20 nt, Human
acaggcuucucccagauugu

SEQ ID NO: 299335 - RNA, 22 nt, Human
acaggcuucucuaggcuggggg

SEQ ID NO: 299336 - RNA, 32 nt, Human
acaggcuucucuaggcugggggcagguguggg

SEQ ID NO: 299337 - RNA, 24 nt, Human
acaggcuucuugucacacuggggg

SEQ ID NO: 299338 - RNA, 32 nt, Human
acaggcuugagccacugcaccuagccucuauu

SEQ ID NO: 299339 - RNA, 32 nt, Human
acaggcuuggugguuucaaggaagcacaagaa

SEQ ID NO: 299340 - RNA, 21 nt, Human
acaggcuuguaaaugaggcaa

SEQ ID NO: 299341 - RNA, 21 nt, Human
acaggcuuguacacagauguu

SEQ ID NO: 299342 - RNA, 32 nt, Human
acaggcuuguaggagcacaggcuuccaguggc

SEQ ID NO: 299343 - RNA, 32 nt, Human
acaggcuugucugccugguuuuccuccuacac

SEQ ID NO: 299344 - RNA, 20 nt, Human
acaggcuuguuaccaccaug

SEQ ID NO: 299345 - RNA, 32 nt, Human
acaggcuuguuaccaccaugcucggcuuuugc

SEQ ID NO: 299346 - RNA, 32 nt, Human
acaggcuuuauuuucaccuuguguacaacaug

SEQ ID NO: 299347 - RNA, 32 nt, Human
acaggcuuucaauucucuaaucucacagaagu

SEQ ID NO: 299348 - RNA, 32 nt, Human
acaggcuuucccaggcagcuggcuaguucauu

SEQ ID NO: 299349 - RNA, 32 nt, Human
acagggaaagagagagaaagaacaagcuuucu

SEQ ID NO: 299350 - RNA, 32 nt, Human
acagggaaagcuaugacugcaggaucagucua

SEQ ID NO: 299351 - RNA, 32 nt, Human
acagggaacacugucagggcugaggagaacag

SEQ ID NO: 299352 - RNA, 32 nt, Human
acagggaacagcuucaggauacuuccaggaga

SEQ ID NO: 299353 - RNA, 32 nt, Human
acagggaacuugacuggggcagagggacaggg

SEQ ID NO: 299354 - RNA, 19 nt, Human
acagggaagacggccaugg

SEQ ID NO: 299355 - RNA, 32 nt, Human
acagggaagauggaucccauccuaauuuuuau

SEQ ID NO: 299356 - RNA, 32 nt, Human
acagggaagcagcugggagcuuggaaaccugg

SEQ ID NO: 299357 - RNA, 32 nt, Human
acagggaagcaggggaggcggaaaaauagagu

SEQ ID NO: 299358 - RNA, 32 nt, Human
acagggaagccaggucgagaucaagcccccuu

SEQ ID NO: 299359 - RNA, 31 nt, Human
acagggaaguccguccuaaugccaaguuucu

SEQ ID NO: 299360 - RNA, 32 nt, Human
acagggaaugaacaugaguuuuuguaacguga

SEQ ID NO: 299361 - RNA, 32 nt, Human
acagggacacugcucugccugccuggcccuca

SEQ ID NO: 299362 - RNA, 32 nt, Human
acagggacacugucugggggugcagugcaagc

SEQ ID NO: 299363 - RNA, 32 nt, Human
acagggaccaggaguuugagacuagcuuggcc

SEQ ID NO: 299364 - RNA, 32 nt, Human
acagggacccaggcaggguuggguguugugac

SEQ ID NO: 299365 - RNA, 32 nt, Human
acagggacccgccaccacgcccggcuaauuuu

SEQ ID NO: 299366 - RNA, 32 nt, Human
acagggacccuuguaaauugucauacgccaau

SEQ ID NO: 299367 - RNA, 32 nt, Human
acagggacgggcuuucuuuggaagaugaugaa

SEQ ID NO: 299368 - RNA, 32 nt, Human
acagggacuacaccaucucucaagccauagua

SEQ ID NO: 299369 - RNA, 32 nt, Human
acagggacucagaaauguggugggagggccuc

SEQ ID NO: 299370 - RNA, 32 nt, Human
acagggagacagacagagguugcagugagccg

SEQ ID NO: 299371 - RNA, 32 nt, Human
acagggagacagcaaccaucgccugccacgcc

SEQ ID NO: 299372 - RNA, 32 nt, Human
acagggagacccagugaggauaagcacagauu

SEQ ID NO: 299373 - RNA, 19 nt, Human
acagggagagaaaaagcaa

SEQ ID NO: 299374 - RNA, 32 nt, Human
acagggagaggggcaacaggaggcugggaaau

SEQ ID NO: 299375 - RNA, 32 nt, Human
acagggagcuauggugcacucuaguuuauacu

SEQ ID NO: 299376 - RNA, 32 nt, Human
acagggagcucagaccccaacccuggauccca

SEQ ID NO: 299377 - RNA, 32 nt, Human
acagggaggaaggacccagugcccucaggcgu

SEQ ID NO: 299378 - RNA, 32 nt, Human
acagggaggcagagguugcagugagccgagac

SEQ ID NO: 299379 - RNA, 32 nt, Human
acagggagggaagcccuuauccccagcagcca

SEQ ID NO: 299380 - RNA, 32 nt, Human
acagggagggagcaucccccuggcagagccgc

SEQ ID NO: 299381 - RNA, 32 nt, Human
acagggagggccugagaaaagaaugggagggg

SEQ ID NO: 299382 - RNA, 32 nt, Human
acagggagggucagagggaggccggcugcuuc

SEQ ID NO: 299383 - RNA, 32 nt, Human
acagggaguaagacauccauggaugucagcaa

SEQ ID NO: 299384 - RNA, 32 nt, Human
acagggagucccaggacccagggagagugugg

SEQ ID NO: 299385 - RNA, 32 nt, Human
acagggagugaguguuucauggggacagaguu

SEQ ID NO: 299386 - RNA, 25 nt, Human
acagggaguggguucuaggcaaaga

SEQ ID NO: 299387 - RNA, 31 nt, Human
acagggauaaauaaagacaaagacugaagac

SEQ ID NO: 299388 - RNA, 32 nt, Human
acagggauaaauaaaggcaaagacugaagaca

SEQ ID NO: 299389 - RNA, 32 nt, Human
acagggaugcaaucuuggcucacuacaaccuc

SEQ ID NO: 299390 - RNA, 32 nt, Human
acagggauggccugagggaaagggcccuggca

SEQ ID NO: 299391 - RNA, 32 nt, Human
acagggauucuccuccuucauccuguaaaggu

SEQ ID NO: 299392 - RNA, 32 nt, Human
acagggcacacagccggcugagccaggaccca

SEQ ID NO: 299393 - RNA, 32 nt, Human
acagggcacagaaacaugcaggaauacauuag

SEQ ID NO: 299394 - RNA, 32 nt, Human
acagggcacuguucacagacugccuuugcucc

SEQ ID NO: 299395 - RNA, 32 nt, Human
acagggcagagcagugccucuacgugucugcg

SEQ ID NO: 299396 - RNA, 32 nt, Human
acagggcagagggaccagggaggggaacagga

SEQ ID NO: 299397 - RNA, 32 nt, Human
acagggcagauuucuggucccacccaccucug

SEQ ID NO: 299398 - RNA, 32 nt, Human
acagggcagcaacccagagcccaugggcccuc

SEQ ID NO: 299399 - RNA, 32 nt, Human
acagggcagcccccacagagcacagcgucauc

SEQ ID NO: 299400 - RNA, 32 nt, Human
acagggcagcugggcgaggaagagauaccagu

SEQ ID NO: 299401 - RNA, 32 nt, Human
acagggcaggcagaggaggcaccuguaggggg

SEQ ID NO: 299402 - RNA, 32 nt, Human
acagggcagggugcagaggaaaacaugccgca

SEQ ID NO: 299403 - RNA, 32 nt, Human
acagggcaguguuguggggacugcaaaagaga

SEQ ID NO: 299404 - RNA, 32 nt, Human
acagggcauauaggauguggcuuuuguccagc

SEQ ID NO: 299405 - RNA, 32 nt, Human
acagggcaucuucuccagggccucauucaguc

SEQ ID NO: 299406 - RNA, 32 nt, Human
acagggcauggccagguggccacuccagaccc

SEQ ID NO: 299407 - RNA, 32 nt, Human
acagggcauugagcugaaaaugguggcuggaa

SEQ ID NO: 299408 - RNA, 20 nt, Human
acagggccaacuuccaggcc

SEQ ID NO: 299409 - RNA, 32 nt, Human
acagggccaagaagguugaugggccaucuuga

SEQ ID NO: 299410 - RNA, 32 nt, Human
acagggccacauuugcaugagacauggcuguc

SEQ ID NO: 299411 - RNA, 32 nt, Human
acagggccaccaggagugcguggaucucaguc

SEQ ID NO: 299412 - RNA, 32 nt, Human
acagggccagcaacguggagguuuaggggcuc

SEQ ID NO: 299413 - RNA, 32 nt, Human
acagggccaucuguucaucacacacacccccu

SEQ ID NO: 299414 - RNA, 28 nt, Human
acagggccaugugcugcccuguugccga

SEQ ID NO: 299415 - RNA, 21 nt, Human
acagggcccagcccacagcca

SEQ ID NO: 299416 - RNA, 32 nt, Human
acagggcccucugaggcucagcccugagcugg

SEQ ID NO: 299417 - RNA, 32 nt, Human
acagggcccugccaccaagcccagcuaauugu

SEQ ID NO: 299418 - RNA, 32 nt, Human
acagggccgacccuucccuugugggcuggcuu

SEQ ID NO: 299419 - RNA, 26 nt, Human
acagggccggccugcugcugugcccu

SEQ ID NO: 299420 - RNA, 32 nt, Human
acagggccuggcccauggcaggagcucaggaa

SEQ ID NO: 299421 - RNA, 32 nt, Human
acagggccuuaaaauuacuuggcuuuuuccaa

SEQ ID NO: 299422 - RNA, 32 nt, Human
acagggccuuucucuucauuacuucuugggua

SEQ ID NO: 299423 - RNA, 32 nt, Human
acagggcgagugagacagagggaaggcgggga

SEQ ID NO: 299424 - RNA, 32 nt, Human
acagggcucauuuuugcacuuaucucgaauuu

SEQ ID NO: 299425 - RNA, 32 nt, Human
acagggcuccaggacacccuccuucuggagcc

SEQ ID NO: 299426 - RNA, 24 nt, Human
acagggcugcacuggcccaagcca

SEQ ID NO: 299427 - RNA, 32 nt, Human
acagggcugccuggccucucccucgugcuccu

SEQ ID NO: 299428 - RNA, 32 nt, Human
acagggcugcggccccucugcccacacucagu

SEQ ID NO: 299429 - RNA, 32 nt, Human
acagggcuggagaagaggagugaggagccucc

SEQ ID NO: 299430 - RNA, 32 nt, Human
acagggcuggcacucccagaggggacacggca

SEQ ID NO: 299431 - RNA, 32 nt, Human
acagggcuuggacacuucacagcugcugggag

SEQ ID NO: 299432 - RNA, 32 nt, Human
acaggggaaaucucagagcacaauucagcagg

SEQ ID NO: 299433 - RNA, 32 nt, Human
acaggggaaaugagaggguccugcaggcagag

SEQ ID NO: 299434 - RNA, 32 nt, Human
acaggggaaugagcaaaucucaaagagcuggc

SEQ ID NO: 299435 - RNA, 21 nt, Human
acaggggacacucccaggcca

SEQ ID NO: 299436 - RNA, 32 nt, Human
acaggggaccaguggggaacacuacuguaguu

SEQ ID NO: 299437 - RNA, 32 nt, Human
acaggggagaagaaaauucagauggagcguuc

SEQ ID NO: 299438 - RNA, 32 nt, Human
acaggggagagcagcuuccagccugggucaga

SEQ ID NO: 299439 - RNA, 32 nt, Human
acaggggagauggagguugcagugagcugaga

SEQ ID NO: 299440 - RNA, 32 nt, Human
acaggggagauggaguaauuuugcuguggaaa

SEQ ID NO: 299441 - RNA, 32 nt, Human
acaggggagaugguggaaucuucccuguuuuu

SEQ ID NO: 299442 - RNA, 32 nt, Human
acaggggaggcugagacgcaaggaucacuuga

SEQ ID NO: 299443 - RNA, 32 nt, Human
acaggggaggcugaggcaggagaaucgcuuga

SEQ ID NO: 299444 - RNA, 32 nt, Human
acaggggaggguguucaaggaagaguggcucu

SEQ ID NO: 299445 - RNA, 32 nt, Human
acaggggauauuagcuguaguuuaauggauaa

SEQ ID NO: 299446 - RNA, 32 nt, Human
acaggggcacagcagagguuugggaagcgguc

SEQ ID NO: 299447 - RNA, 32 nt, Human
acaggggcagaggcuucuccggcaggcugauu

SEQ ID NO: 299448 - RNA, 32 nt, Human
acaggggccaacuagggccagguggaagggga

SEQ ID NO: 299449 - RNA, 32 nt, Human
acaggggccacuuuucgagaccgaguagagac

SEQ ID NO: 299450 - RNA, 19 nt, Human
acaggggcccaccaccgcg

SEQ ID NO: 299451 - RNA, 32 nt, Human
acaggggcccauggacucuucagucuggaggg

SEQ ID NO: 299452 - RNA, 32 nt, Human
acaggggcccgccaccacgcccggcuaacuuu

SEQ ID NO: 299453 - RNA, 32 nt, Human
acaggggcccugggcauuucugcugagaacca

SEQ ID NO: 299454 - RNA, 19 nt, Human
acaggggcuacagagccca

SEQ ID NO: 299455 - RNA, 32 nt, Human
acaggggcucugagcuccugaccugagucaug

SEQ ID NO: 299456 - RNA, 32 nt, Human
acaggggcugaguugcuggagcugggcugggg

SEQ ID NO: 299457 - RNA, 32 nt, Human
acagggggaaauggguaugagagacugaggcu

SEQ ID NO: 299458 - RNA, 32 nt, Human
acagggggaaguuauuaaagaggcugcaaagu

SEQ ID NO: 299459 - RNA, 32 nt, Human
acagggggagaaacagaagcccagagagggaa

SEQ ID NO: 299460 - RNA, 32 nt, Human
acaggggucaccaagcgcacucacaggguccc

SEQ ID NO: 299461 - RNA, 32 nt, Human
acaggggugaagcucagggacaagucugggcu

SEQ ID NO: 299462 - RNA, 32 nt, Human
acaggggugcugcagguggcagagugaauguc

SEQ ID NO: 299463 - RNA, 32 nt, Human
acagggguggggacccagaguuagcagugggg

SEQ ID NO: 299464 - RNA, 32 nt, Human
acaggggugggguuugggggaagcgagagagg

SEQ ID NO: 299465 - RNA, 32 nt, Human
acagggguuacaucaaccuccgauucugaaga

SEQ ID NO: 299466 - RNA, 32 nt, Human
acagggguucuuagucucagcacuaugacauu

SEQ ID NO: 299467 - RNA, 32 nt, Human
acagggguuggguggggguugcaggacuccac

SEQ ID NO: 299468 - RNA, 32 nt, Human
acaggguaaggaagagagagugggaggcagag

SEQ ID NO: 299469 - RNA, 20 nt, Human
acaggguacucuggggucga

SEQ ID NO: 299470 - RNA, 22 nt, Human
acaggguagcugcuguugcucu

SEQ ID NO: 299471 - RNA, 32 nt, Human
acaggguagggagaggaggggcagaggcugug

SEQ ID NO: 299472 - RNA, 32 nt, Human
acaggguagggagaggguauaacaggaagagc

SEQ ID NO: 299473 - RNA, 32 nt, Human
acaggguagggagaugacaguggugcaugaug

SEQ ID NO: 299474 - RNA, 32 nt, Human
acagggucaccaccuuucucucccuucuucuc

SEQ ID NO: 299475 - RNA, 32 nt, Human
acagggucacccaggaggguggaugccagguc

SEQ ID NO: 299476 - RNA, 32 nt, Human
acagggucaccuugggaaggcuugggagccag

SEQ ID NO: 299477 - RNA, 32 nt, Human
acagggucagcaguucaagaccagccuggcca

SEQ ID NO: 299478 - RNA, 27 nt, Human
acaggguccaccuggagacacuggggg

SEQ ID NO: 299479 - RNA, 32 nt, Human
acaggguccccugagcauugugcagaugcugc

SEQ ID NO: 299480 - RNA, 32 nt, Human
acagggucccuuuguugcccaggcuggucucc

SEQ ID NO: 299481 - RNA, 32 nt, Human
acaggguccuuugagaaacauggcccuugauc

SEQ ID NO: 299482 - RNA, 32 nt, Human
acagggucgggaguucgagaccagccuggcca

SEQ ID NO: 299483 - RNA, 32 nt, Human
acagggucuaauucucucacccaggugcaaau

SEQ ID NO: 299484 - RNA, 32 nt, Human
acagggucuacaacacgaugccauggcugacg

SEQ ID NO: 299485 - RNA, 32 nt, Human
acagggucucacuacauuacccagcuggucuc

SEQ ID NO: 299486 - RNA, 32 nt, Human
acagggucucacuauguugcccaggccggucu

SEQ ID NO: 299487 - RNA, 32 nt, Human
acagggucucacuauguugcccaggcugcucu

SEQ ID NO: 299488 - RNA, 32 nt, Human
acagggucucacuauguugcccaggcuggagu

SEQ ID NO: 299489 - RNA, 32 nt, Human
acagggucucacuauguugcccaggcuggucu

SEQ ID NO: 299490 - RNA, 19 nt, Human
acagggucucacucuguug

SEQ ID NO: 299491 - RNA, 32 nt, Human
acagggucucacugcauugcccuugcugaccu

SEQ ID NO: 299492 - RNA, 32 nt, Human
acagggucucacuguguugccuaggccggucu

SEQ ID NO: 299493 - RNA, 32 nt, Human
acagggucuccauauguugcccaggcuggucu

SEQ ID NO: 299494 - RNA, 32 nt, Human
acagggucucccuauguugcccaggcuggucu

SEQ ID NO: 299495 - RNA, 32 nt, Human
acagggucucgcuauguugcccaggcugggac

SEQ ID NO: 299496 - RNA, 32 nt, Human
acagggucucuacccuccucacaacacccucu

SEQ ID NO: 299497 - RNA, 32 nt, Human
acagggucugcacucuaacccuaggcaucaca

SEQ ID NO: 299498 - RNA, 32 nt, Human
acagggucuucccauguugcccaggcuggucu

SEQ ID NO: 299499 - RNA, 32 nt, Human
acagggucuugacuggagugcaguggugcgau

SEQ ID NO: 299500 - RNA, 32 nt, Human
acagggucuugcaagcagccuccugggcaguc

SEQ ID NO: 299501 - RNA, 32 nt, Human
acagggucuugccauguugcccugacuagucu

SEQ ID NO: 299502 - RNA, 32 nt, Human
acagggucuugcuauguugcccaggcuggucu

SEQ ID NO: 299503 - RNA, 32 nt, Human
acagggucuugguauguugcccagacuguucg

SEQ ID NO: 299504 - RNA, 32 nt, Human
acagggugagacagcagggcccaggggagugg

SEQ ID NO: 299505 - RNA, 32 nt, Human
acagggugcaggacuccacugaugagagaucc

SEQ ID NO: 299506 - RNA, 32 nt, Human
acagggugcccgccccacagugcuuuccccag

SEQ ID NO: 299507 - RNA, 32 nt, Human
acaggguggaacccggcagaggacaaugggag

SEQ ID NO: 299508 - RNA, 32 nt, Human
acaggguggccaacaguggcaucgggaccaaa

SEQ ID NO: 299509 - RNA, 32 nt, Human
acagggugggggcaaggaaauuagcugagauu

SEQ ID NO: 299510 - RNA, 32 nt, Human
acaggguguacaaucucugccuuccagguucu

SEQ ID NO: 299511 - RNA, 32 nt, Human
acagggugucauccuucuuuccuucaagaaac

SEQ ID NO: 299512 - RNA, 32 nt, Human
acagggugugagccacugcaccuggccgauaa

SEQ ID NO: 299513 - RNA, 19 nt, Human
acagggugugagugagaca

SEQ ID NO: 299514 - RNA, 31 nt, Human
acaggguguguggaaagcgcugugggggaag

SEQ ID NO: 299515 - RNA, 19 nt, Human
acaggguguuaccauguug

SEQ ID NO: 299516 - RNA, 32 nt, Human
acaggguucacaggguuucacagucugaugag

SEQ ID NO: 299517 - RNA, 32 nt, Human
acaggguucaggugccccaggugacccugucu

SEQ ID NO: 299518 - RNA, 32 nt, Human
acaggguucgccccaguccuccugccuggaga

SEQ ID NO: 299519 - RNA, 32 nt, Human
acaggguucugcaucuuagccugcugcuaccc

SEQ ID NO: 299520 - RNA, 32 nt, Human
acaggguugcccaggguggagugcaguggcag

SEQ ID NO: 299521 - RNA, 21 nt, Human
acaggguugggugcugugcug

SEQ ID NO: 299522 - RNA, 21 nt, Human
acaggguuguugcugcccagg

SEQ ID NO: 299523 - RNA, 19 nt, Human
acaggguuucaccauguua

SEQ ID NO: 299524 - RNA, 32 nt, Human
acaggguuuggacuagguguucccugguauuc

SEQ ID NO: 299525 - RNA, 32 nt, Human
acaggguuuucuucccugucuguguauuuuga

SEQ ID NO: 299526 - RNA, 32 nt, Human
acaggguuuugccauguugcccaggcuggucu

SEQ ID NO: 299527 - RNA, 32 nt, Human
acaggguuuuuccauguugcccaggcugguuu

SEQ ID NO: 299528 - RNA, 32 nt, Human
acagguaagugagacucagccucuacccucag

SEQ ID NO: 299529 - RNA, 32 nt, Human
acagguaauguugaugaacaagcgaggcuccc

SEQ ID NO: 299530 - RNA, 22 nt, Human
acagguacaugccacugugccu

SEQ ID NO: 299531 - RNA, 32 nt, Human
acagguaccacuucugaucacccuguacauac

SEQ ID NO: 299532 - RNA, 32 nt, Human
acagguaccuacugcuggccucuucaguggcc

SEQ ID NO: 299533 - RNA, 32 nt, Human
acagguaccugccaccaugcccggcuaauuuu

SEQ ID NO: 299534 - RNA, 19 nt, Human
acagguacuaaggauuguu

SEQ ID NO: 299535 - RNA, 32 nt, Human
acagguacuaaggauuguuuacuuccgaacuu

SEQ ID NO: 299536 - RNA, 32 nt, Human
acagguagagagaagggggcccaauggccagg

SEQ ID NO: 299537 - RNA, 23 nt, Human
acagguaugaagaagacuguucu

SEQ ID NO: 299538 - RNA, 18 nt, Human
acagguaugcaccaccau

SEQ ID NO: 299539 - RNA, 31 nt, Human
acagguaugcacugguaacaugcagaugauu

SEQ ID NO: 299540 - RNA, 32 nt, Human
acaggucaaaaugguccccaucagccuggagc

SEQ ID NO: 299541 - RNA, 32 nt, Human
acaggucacaucugaucccuuuggggugcggg

SEQ ID NO: 299542 - RNA, 32 nt, Human
acaggucaccucugcuuuccauagaagaaucu

SEQ ID NO: 299543 - RNA, 32 nt, Human
acaggucagcauggagggacccgacucugucu

SEQ ID NO: 299544 - RNA, 32 nt, Human
acaggucagggauggcaugcaagaccaccgcc

SEQ ID NO: 299545 - RNA, 32 nt, Human
acaggucauaagagcaccuaaggccagcauau

SEQ ID NO: 299546 - RNA, 32 nt, Human
acaggucauugcacucaagccugggcaauaag

SEQ ID NO: 299547 - RNA, 32 nt, Human
acagguccacacuguguaaacaugcaucugau

SEQ ID NO: 299548 - RNA, 32 nt, Human
acagguccagccugugguguccacaaugcccc

SEQ ID NO: 299549 - RNA, 32 nt, Human
acagguccagcuccucccucacggugaccucu

SEQ ID NO: 299550 - RNA, 32 nt, Human
acaggucccagagcaguggauaugucuggucc

SEQ ID NO: 299551 - RNA, 32 nt, Human
acaggucccagccuguagacaucuuuuacucc

SEQ ID NO: 299552 - RNA, 32 nt, Human
acaggucccuccccuucucugugcaguagcau

SEQ ID NO: 299553 - RNA, 32 nt, Human
acagguccgagaucggggguuggagugcgggu

SEQ ID NO: 299554 - RNA, 32 nt, Human
acagguccuagugcccaucagauacccgcggc

SEQ ID NO: 299555 - RNA, 32 nt, Human
acagguccucugucuguaugaucuugccaagg

SEQ ID NO: 299556 - RNA, 32 nt, Human
acagguccugggaaagaagugggaucuagggc

SEQ ID NO: 299557 - RNA, 32 nt, Human
acagguccugguuagaaacagagcaggugaaa

SEQ ID NO: 299558 - RNA, 32 nt, Human
acagguccugucauuucauucaucucaaauua

SEQ ID NO: 299559 - RNA, 32 nt, Human
acagguccuucuggugggaagggaggcgggag

SEQ ID NO: 299560 - RNA, 32 nt, Human
acaggucuauagaucuccaguuggaguacaga

SEQ ID NO: 299561 - RNA, 32 nt, Human
acaggucugauuguagccugcuacagccuuga

SEQ ID NO: 299562 - RNA, 32 nt, Human
acaggucuggaucuaauccaaggucuggacuc

SEQ ID NO: 299563 - RNA, 32 nt, Human
acaggucuggugacccugcaagggaggagcca

SEQ ID NO: 299564 - RNA, 32 nt, Human
acaggucuguggggcaagaggcugcaauauuc

SEQ ID NO: 299565 - RNA, 32 nt, Human
acaggugaacaggugaacacaaacaugaggga

SEQ ID NO: 299566 - RNA, 32 nt, Human
acaggugacacagagcaggggcuucagccaca

SEQ ID NO: 299567 - RNA, 32 nt, Human
acaggugagaagcaaacucccgcuggaagccu

SEQ ID NO: 299568 - RNA, 32 nt, Human
acaggugagagacagauugaaagacaacacac

SEQ ID NO: 299569 - RNA, 32 nt, Human
acaggugaggaaauggaggcucagagagguua

SEQ ID NO: 299570 - RNA, 32 nt, Human
acaggugaggucagaggagugaagugacuugc

SEQ ID NO: 299571 - RNA, 32 nt, Human
acaggugagguggcucaccccuguaaucccag

SEQ ID NO: 299572 - RNA, 32 nt, Human
acaggugauuucugcauuuccaucugaggcau

SEQ ID NO: 299573 - RNA, 32 nt, Human
acaggugcacacacacgaugccgaacaaggca

SEQ ID NO: 299574 - RNA, 25 nt, Human
acaggugcacaccaccacaccuggc

SEQ ID NO: 299575 - RNA, 18 nt, Human
acaggugcacgccaccac

SEQ ID NO: 299576 - RNA, 32 nt, Human
acaggugcagaaggugcaggugcaguggguac

SEQ ID NO: 299577 - RNA, 31 nt, Human
acaggugcagagagagaauaaacugugucua

SEQ ID NO: 299578 - RNA, 32 nt, Human
acaggugcagcaaaccaccauggcacauguuu

SEQ ID NO: 299579 - RNA, 32 nt, Human
acaggugcagccuugccuccugaaugaaaauu

SEQ ID NO: 299580 - RNA, 32 nt, Human
acaggugcaggacugccagggaucggagugcg

SEQ ID NO: 299581 - RNA, 32 nt, Human
acaggugcagguagacaacgcccauaaacaga

SEQ ID NO: 299582 - RNA, 23 nt, Human
acaggugccacaggcacugggga

SEQ ID NO: 299583 - RNA, 32 nt, Human
acaggugccagggcuccugccugcuccuccug

SEQ ID NO: 299584 - RNA, 32 nt, Human
acaggugccagugccuccagaauguggcagcu

SEQ ID NO: 299585 - RNA, 32 nt, Human
acaggugcccaccaccaugccuggcugguuuu

SEQ ID NO: 299586 - RNA, 18 nt, Human
acaggugcccgccaccac

SEQ ID NO: 299587 - RNA, 32 nt, Human
acaggugcccgccaccacacccggcuaauuuu

SEQ ID NO: 299588 - RNA, 20 nt, Human
acaggugcccgccaccacca

SEQ ID NO: 299589 - RNA, 32 nt, Human
acaggugcccgccaccacgcccggcuaauuuu

SEQ ID NO: 299590 - RNA, 32 nt, Human
acaggugcccgccaccaugcccggcuaauuuu

SEQ ID NO: 299591 - RNA, 32 nt, Human
acaggugcccgccaccaugcccggcugauuuc

SEQ ID NO: 299592 - RNA, 32 nt, Human
acaggugcccgccaccgugcccggcuaauuuu

SEQ ID NO: 299593 - RNA, 32 nt, Human
acaggugcccgcuacuaugcccggcuaauuuu

SEQ ID NO: 299594 - RNA, 19 nt, Human
acaggugccuaccaccaug

SEQ ID NO: 299595 - RNA, 32 nt, Human
acaggugccucacgccuguaaucccagcacuu

SEQ ID NO: 299596 - RNA, 32 nt, Human
acaggugccugccaccacacccggcuaauuuu

SEQ ID NO: 299597 - RNA, 32 nt, Human
acaggugccugccaccaugcccagcuaauuuu

SEQ ID NO: 299598 - RNA, 32 nt, Human
acaggugccugccaccaugcccggcuaauacu

SEQ ID NO: 299599 - RNA, 32 nt, Human
acaggugccuguaaucccagcuacucgguagg

SEQ ID NO: 299600 - RNA, 32 nt, Human
acaggugccuguaaucccagcuacuugggagg

SEQ ID NO: 299601 - RNA, 32 nt, Human
acaggugccuguagucccagcuacucgggagg

SEQ ID NO: 299602 - RNA, 32 nt, Human
acaggugcugucagcccagggugggagcagga

SEQ ID NO: 299603 - RNA, 32 nt, Human
acaggugcuguucagugccgaccugcgccaau

SEQ ID NO: 299604 - RNA, 32 nt, Human
acagguggagagaagaagcccuggcuggggga

SEQ ID NO: 299605 - RNA, 32 nt, Human
acagguggagggcugcuuccaccccaggugcu

SEQ ID NO: 299606 - RNA, 32 nt, Human
acagguggauaaccuagugcccaaggcagggc

SEQ ID NO: 299607 - RNA, 32 nt, Human
acagguggaucucuugagcccaggaguuugag

SEQ ID NO: 299608 - RNA, 32 nt, Human
acagguggaugggugaaagauccagagagugg

SEQ ID NO: 299609 - RNA, 32 nt, Human
acagguggcuccugggcuugggcugcagguuu

SEQ ID NO: 299610 - RNA, 32 nt, Human
acaggugggagccacaacacccggccaugaau

SEQ ID NO: 299611 - RNA, 32 nt, Human
acaggugggauuauaggcacaguggcccacug

SEQ ID NO: 299612 - RNA, 32 nt, Human
acaggugggcagcagcgagcuggcaggugaag

SEQ ID NO: 299613 - RNA, 32 nt, Human
acaggugggcauaggugcagugagugcaggug

SEQ ID NO: 299614 - RNA, 32 nt, Human
acagguggggugaccaggaugggaggaaaaua

SEQ ID NO: 299615 - RNA, 32 nt, Human
acagguggguccagcugcccaggucauggccu

SEQ ID NO: 299616 - RNA, 32 nt, Human
acaggugggugaggaucugagaaaugcuaaag

SEQ ID NO: 299617 - RNA, 32 nt, Human
acaggugggugugaggcccccucuggaguuuc

SEQ ID NO: 299618 - RNA, 18 nt, Human
acaggugugagccaccac

SEQ ID NO: 299619 - RNA, 25 nt, Human
acaggugugagccaccacacccggc

SEQ ID NO: 299620 - RNA, 32 nt, Human
acaggugugagccaccacgccagccugacgau

SEQ ID NO: 299621 - RNA, 24 nt, Human
acaggugugagccaccacgcuggc

SEQ ID NO: 299622 - RNA, 32 nt, Human
acaggugugagccacugugcucggccuaccuu

SEQ ID NO: 299623 - RNA, 19 nt, Human
acaggugugcaccaccacg

SEQ ID NO: 299624 - RNA, 19 nt, Human
acaggugugcaccaccaug

SEQ ID NO: 299625 - RNA, 22 nt, Human
acaggugugcaccaccaugccc

SEQ ID NO: 299626 - RNA, 23 nt, Human
acaggugugccaccacgccuggc

SEQ ID NO: 299627 - RNA, 32 nt, Human
acaggugugcugcgcgggaagccccaugcucc

SEQ ID NO: 299628 - RNA, 32 nt, Human
acagguguggagaacccagggguagaggccac

SEQ ID NO: 299629 - RNA, 32 nt, Human
acaggugugguuucaccauauugcccaggcug

SEQ ID NO: 299630 - RNA, 19 nt, Human
acagguguguaccaccacg

SEQ ID NO: 299631 - RNA, 18 nt, Human
acagguuaaaagcauuca

SEQ ID NO: 299632 - RNA, 32 nt, Human
acagguuaacaugcagcagcucugugaccuug

SEQ ID NO: 299633 - RNA, 18 nt, Human
acagguuacaucauugca

SEQ ID NO: 299634 - RNA, 18 nt, Human
acagguuacuggcaaugc

SEQ ID NO: 299635 - RNA, 19 nt, Human
acagguuacuugguuuaca

SEQ ID NO: 299636 - RNA, 17 nt, Human
acagguuagcuguuaca

SEQ ID NO: 299637 - RNA, 17 nt, Human
acagguuagggaucaca

SEQ ID NO: 299638 - RNA, 18 nt, Human
acagguuauggacauuca

SEQ ID NO: 299639 - RNA, 18 nt, Human
acagguuauggggucuca

SEQ ID NO: 299640 - RNA, 16 nt, Human
acagguuauucauaac

SEQ ID NO: 299641 - RNA, 19 nt, Human
acagguuauugacauuaca

SEQ ID NO: 299642 - RNA, 16 nt, Human
acagguuauuuuuacg

SEQ ID NO: 299643 - RNA, 32 nt, Human
acagguucacccagcgcccucuaccuccuagc

SEQ ID NO: 299644 - RNA, 32 nt, Human
acagguucaggcgauucccgugccucagccuc

SEQ ID NO: 299645 - RNA, 32 nt, Human
acagguucagggucuaggaaggggagacauuu

SEQ ID NO: 299646 - RNA, 32 nt, Human
acagguucauucugaccguggaaggugaacac

SEQ ID NO: 299647 - RNA, 32 nt, Human
acagguuccaucccaacacuccugucuguggg

SEQ ID NO: 299648 - RNA, 20 nt, Human
acagguucccaggccugggg

SEQ ID NO: 299649 - RNA, 32 nt, Human
acagguuccccauguacauacaugcacauacu

SEQ ID NO: 299650 - RNA, 32 nt, Human
acagguucucauuccuuuucccauuauacuuc

SEQ ID NO: 299651 - RNA, 32 nt, Human
acagguucucuuccuggcaucauaaggaguug

SEQ ID NO: 299652 - RNA, 17 nt, Human
acagguucugcguuaca

SEQ ID NO: 299653 - RNA, 21 nt, Human
acagguucugugcaucaccac

SEQ ID NO: 299654 - RNA, 32 nt, Human
acagguucuucuugaggaaacugaggcaaaga

SEQ ID NO: 299655 - RNA, 32 nt, Human
acagguugcauagcacuggaacuuuccuagag

SEQ ID NO: 299656 - RNA, 32 nt, Human
acagguuggggagagacagagaagugggcagg

SEQ ID NO: 299657 - RNA, 32 nt, Human
acagguuggggcucugcaggaugaggaagaca

SEQ ID NO: 299658 - RNA, 18 nt, Human
acagguuggguuauuaua

SEQ ID NO: 299659 - RNA, 17 nt, Human
acagguuggucauuuca

SEQ ID NO: 299660 - RNA, 17 nt, Human
acagguuguacacugca

SEQ ID NO: 299661 - RNA, 32 nt, Human
acagguugugcaagagguggaaauguucucca

SEQ ID NO: 299662 - RNA, 18 nt, Human
acagguuguuccauccca

SEQ ID NO: 299663 - RNA, 32 nt, Human
acagguuucccaagcuaacauuucaagguaaa

SEQ ID NO: 299664 - RNA, 32 nt, Human
acagguuuccucaagccccauuugucaacuaa

SEQ ID NO: 299665 - RNA, 19 nt, Human
acagguuucuagaguuguu

SEQ ID NO: 299666 - RNA, 32 nt, Human
acagguuucugggcagaagggggugagucccu

SEQ ID NO: 299667 - RNA, 22 nt, Human
acagguuugaggaugcugggga

SEQ ID NO: 299668 - RNA, 32 nt, Human
acagguuugcagcuacccucucugaccuuuuc

SEQ ID NO: 299669 - RNA, 32 nt, Human
acagguuugggcaguggugggggagggggcca

SEQ ID NO: 299670 - RNA, 17 nt, Human
acagguuuuagcauugu

SEQ ID NO: 299671 - RNA, 32 nt, Human
acaguaaaaauacuaauagauuagcugggugg

SEQ ID NO: 299672 - RNA, 32 nt, Human
acaguaaaacuuccuguccuuguugaaccaaa

SEQ ID NO: 299673 - RNA, 32 nt, Human
acaguaaacuggcauaugaauagugauuucua

SEQ ID NO: 299674 - RNA, 32 nt, Human
acaguaaacuugcaggggcgagagggagggac

SEQ ID NO: 299675 - RNA, 32 nt, Human
acaguaaagagaaaggaagacaaccuccagag

SEQ ID NO: 299676 - RNA, 32 nt, Human
acaguaaaucacacaacagguuucuacucucu

SEQ ID NO: 299677 - RNA, 21 nt, Human
acaguaaaucucuggguuucu

SEQ ID NO: 299678 - RNA, 32 nt, Human
acaguaacaaguguucacaaggauauggagaa

SEQ ID NO: 299679 - RNA, 32 nt, Human
acaguaacaaguguuggcauuaucaguugaac

SEQ ID NO: 299680 - RNA, 32 nt, Human
acaguaacaaugcucaucacucuuuuccaaca

SEQ ID NO: 299681 - RNA, 32 nt, Human
acaguaacagcagcagcaaacuuuuccucuca

SEQ ID NO: 299682 - RNA, 32 nt, Human
acaguaaccaagguaauguucaguuucagcau

SEQ ID NO: 299683 - RNA, 32 nt, Human
acaguaagagaaagccaaaaagcaaugcagag

SEQ ID NO: 299684 - RNA, 32 nt, Human
acaguaagcuuccccagcccugccugagcagc

SEQ ID NO: 299685 - RNA, 32 nt, Human
acaguaagggagcagagugguuaaggacuuuc

SEQ ID NO: 299686 - RNA, 32 nt, Human
acaguaaggggaggggagcggaggcggaggcg

SEQ ID NO: 299687 - RNA, 32 nt, Human
acaguaaucauggucuacuccucuuuccgugg

SEQ ID NO: 299688 - RNA, 32 nt, Human
acaguaauccucagaguggcccagguggguag

SEQ ID NO: 299689 - RNA, 32 nt, Human
acaguaauuccagccacaaucuuuagaucacc

SEQ ID NO: 299690 - RNA, 32 nt, Human
acaguacacaugcaccacaacaaaggcucauc

SEQ ID NO: 299691 - RNA, 32 nt, Human
acaguacagauagucguacugaucaugagaga

SEQ ID NO: 299692 - RNA, 32 nt, Human
acaguacagugggggaaauagaaaacauguga

SEQ ID NO: 299693 - RNA, 32 nt, Human
acaguacauuccauucaugcaguagauaugaa

SEQ ID NO: 299694 - RNA, 32 nt, Human
acaguacuaggaaaugggagcucacagcacug

SEQ ID NO: 299695 - RNA, 32 nt, Human
acaguacuccauuuugggguccaaacuguaau

SEQ ID NO: 299696 - RNA, 23 nt, Human
acaguacugaagacucugcagcc

SEQ ID NO: 299697 - RNA, 22 nt, Human
acaguagacaaaagcaguggca

SEQ ID NO: 299698 - RNA, 32 nt, Human
acaguagauaaaggaggauguccuggaagaag

SEQ ID NO: 299699 - RNA, 32 nt, Human
acaguagcagggaauugauccacuucuuaaug

SEQ ID NO: 299700 - RNA, 32 nt, Human
acaguagcaguggauucgggacccaccuguac

SEQ ID NO: 299701 - RNA, 32 nt, Human
acaguagcaguuuccugguccuguuccucauc

SEQ ID NO: 299702 - RNA, 32 nt, Human
acaguagccaaguucuggagcaaauaaaaggc

SEQ ID NO: 299703 - RNA, 32 nt, Human
acaguagccagagcuccucuuccuuuaccagg

SEQ ID NO: 299704 - RNA, 32 nt, Human
acaguagccauccuguuccuacucagaguccu

SEQ ID NO: 299705 - RNA, 31 nt, Human
acaguagccaugucuccuuucaaggucuucu

SEQ ID NO: 299706 - RNA, 32 nt, Human
acaguagcuggcacagaggggcuacuaaacaa

SEQ ID NO: 299707 - RNA, 32 nt, Human
acaguaggacgagguuucacccuguuggccag

SEQ ID NO: 299708 - RNA, 32 nt, Human
acaguaggagagaagaugccaaguuagaagug

SEQ ID NO: 299709 - RNA, 32 nt, Human
acaguaggauucagcagagaaugagucccaca

SEQ ID NO: 299710 - RNA, 32 nt, Human
acaguagggcugggcaguguuuaauccuucca

SEQ ID NO: 299711 - RNA, 32 nt, Human
acaguagguccaggcuggaugcugguaugaug

SEQ ID NO: 299712 - RNA, 32 nt, Human
acaguaguuccaucaaaauauguaauaauuca

SEQ ID NO: 299713 - RNA, 32 nt, Human
acaguauaaugccaaaugcagcaaaaucuucc

SEQ ID NO: 299714 - RNA, 32 nt, Human
acaguauagagucucauaaaagcugccuuuaa

SEQ ID NO: 299715 - RNA, 32 nt, Human
acaguaucagacacagccccagaagggggcau

SEQ ID NO: 299716 - RNA, 32 nt, Human
acaguaucccuucaaaacaaauaggaguucag

SEQ ID NO: 299717 - RNA, 32 nt, Human
acaguaucuuugucucugccagguggcucuuc

SEQ ID NO: 299718 - RNA, 32 nt, Human
acaguaugcaaaagcagcauucaggagccgaa

SEQ ID NO: 299719 - RNA, 31 nt, Human
acaguauggacaauuucaaaaaccaaaaccc

SEQ ID NO: 299720 - RNA, 32 nt, Human
acaguauuaguggaaaaguaccaugugauuua

SEQ ID NO: 299721 - RNA, 32 nt, Human
acaguauuccaaagguugaaguucugcuguuu

SEQ ID NO: 299722 - RNA, 32 nt, Human
acaguauuggaaaauuacuugaagcuggauuu

SEQ ID NO: 299723 - RNA, 32 nt, Human
acaguauuguaucuggcaaccucccggggcgc

SEQ ID NO: 299724 - RNA, 32 nt, Human
acaguauuuguacaaauacugccuaguguauu

SEQ ID NO: 299725 - RNA, 32 nt, Human
acaguauuuuccaugguucugccugcacuuac

SEQ ID NO: 299726 - RNA, 32 nt, Human
acaguauuuuuguguguuaauuaauuuugcaa

SEQ ID NO: 299727 - RNA, 32 nt, Human
acagucaaaggauggaucaaguacugguuuug

SEQ ID NO: 299728 - RNA, 32 nt, Human
acagucaaauguucauugauuucauguuauuu

SEQ ID NO: 299729 - RNA, 32 nt, Human
acagucaagucaacguucccaccccacuggcu

SEQ ID NO: 299730 - RNA, 23 nt, Human
acagucaauccugcucuguuugc

SEQ ID NO: 299731 - RNA, 32 nt, Human
acagucacagaagguuccugcagcagaugccu

SEQ ID NO: 299732 - RNA, 32 nt, Human
acagucaccacugggacaggccugggccccac

SEQ ID NO: 299733 - RNA, 32 nt, Human
accaccgagcaucucuucaccucuccuccucu

SEQ ID NO: 299734 - RNA, 32 nt, Human
accaccgaggcgggagacagagcgcggcgaag

SEQ ID NO: 299735 - RNA, 32 nt, Human
accaccgcacuccagccugggugacagagcga

SEQ ID NO: 299736 - RNA, 32 nt, Human
accaccgcagcagccccugaggccaggaggca

SEQ ID NO: 299737 - RNA, 25 nt, Human
accaccgcccccgccaccuccgccg

SEQ ID NO: 299738 - RNA, 23 nt, Human
accaccgccgccgccaccaccgu

SEQ ID NO: 299739 - RNA, 20 nt, Human
accaccgccgccgccgccgc

SEQ ID NO: 299740 - RNA, 32 nt, Human
accaccgcgugugcuccggcuccugggacagc

SEQ ID NO: 299741 - RNA, 24 nt, Human
accaccgcugccgucgccgccgcc

SEQ ID NO: 299742 - RNA, 32 nt, Human
accaccggcaccgccucccaaacagggcugcu

SEQ ID NO: 299743 - RNA, 22 nt, Human
accaccggcaugaccggcgcca

SEQ ID NO: 299744 - RNA, 32 nt, Human
accaccggcccgggccagucccugccaguccg

SEQ ID NO: 299745 - RNA, 32 nt, Human
accaccggggacaggcuugcggacgccggcug

SEQ ID NO: 299746 - RNA, 32 nt, Human
accaccgugggugagcuguaugaacucgaggu

SEQ ID NO: 299747 - RNA, 32 nt, Human
accaccguguggggacgcccccaggccggaac

SEQ ID NO: 299748 - RNA, 32 nt, Human
accaccuaagccccaggaggucgaggcugcag

SEQ ID NO: 299749 - RNA, 32 nt, Human
accaccuacgugcacacagcauccuuccacac

SEQ ID NO: 299750 - RNA, 32 nt, Human
accaccuagaaccugaaaggcuuggaacuugc

SEQ ID NO: 299751 - RNA, 32 nt, Human
accaccuagcacuuaaccugcuguuggccuuu

SEQ ID NO: 299752 - RNA, 32 nt, Human
accaccucacaaccacacacugcaugcacaca

SEQ ID NO: 299753 - RNA, 32 nt, Human
accaccucauuucccuccauuaucucccuaaa

SEQ ID NO: 299754 - RNA, 25 nt, Human
accaccuccaccgccgccgccgccg

SEQ ID NO: 299755 - RNA, 32 nt, Human
accaccuccaccugccuguccugggccaggac

SEQ ID NO: 299756 - RNA, 32 nt, Human
accaccuccaggaaaagugucuucucagaaac

SEQ ID NO: 299757 - RNA, 20 nt, Human
accaccuccuccagcugcaa

SEQ ID NO: 299758 - RNA, 22 nt, Human
accaccuccugcuucccaagga

SEQ ID NO: 299759 - RNA, 32 nt, Human
accaccucucaggugaagaaccgucaggaauu

SEQ ID NO: 299760 - RNA, 32 nt, Human
accaccucugguguucagagggggcuuuuaaa

SEQ ID NO: 299761 - RNA, 32 nt, Human
accaccucugugggacuguccacccaccucug

SEQ ID NO: 299762 - RNA, 21 nt, Human
accaccugccuuccagccccu

SEQ ID NO: 299763 - RNA, 32 nt, Human
accaccugcuucccagagugccaagccacaag

SEQ ID NO: 299764 - RNA, 29 nt, Human
accaccugcuugcauucauccccuccucc

SEQ ID NO: 299765 - RNA, 32 nt, Human
accaccugcuuuucugacacugucccuggaau

SEQ ID NO: 299766 - RNA, 32 nt, Human
accaccuggaaacccuccccaugucuuuucag

SEQ ID NO: 299767 - RNA, 32 nt, Human
accaccuggacgaagagcaggccagcccggac

SEQ ID NO: 299768 - RNA, 23 nt, Human
accaccuggccaacauggugaaa

SEQ ID NO: 299769 - RNA, 20 nt, Human
accaccugggccccugaggg

SEQ ID NO: 299770 - RNA, 32 nt, Human
accaccuggucuuugaaguuucuguccuacca

SEQ ID NO: 299771 - RNA, 32 nt, Human
accaccuguaaccccuuccuggcauuggccac

SEQ ID NO: 299772 - RNA, 32 nt, Human
accaccuguaguucagccaaguccaaggguuc

SEQ ID NO: 299773 - RNA, 18 nt, Human
accaccugucgcucccaa

SEQ ID NO: 299774 - RNA, 21 nt, Human
accaccuuaagagcuguaaca

SEQ ID NO: 299775 - RNA, 19 nt, Human
accaccuuagcauguauca

SEQ ID NO: 299776 - RNA, 32 nt, Human
accaccuucccuccucuccagcccucccagcc

SEQ ID NO: 299777 - RNA, 32 nt, Human
accaccuuccugugcaggccagccuggaccuc

SEQ ID NO: 299778 - RNA, 32 nt, Human
accaccuucucccuccccacccccuccaggcc

SEQ ID NO: 299779 - RNA, 15 nt, Human
accaccuugccacca

SEQ ID NO: 299780 - RNA, 32 nt, Human
accaccuugggcaacauaacgagaccccgucu

SEQ ID NO: 299781 - RNA, 32 nt, Human
accaccuugguugagcggcuucauggcagaca

SEQ ID NO: 299782 - RNA, 32 nt, Human
accaccuugguuucuaggcacugugguucuug

SEQ ID NO: 299783 - RNA, 20 nt, Human
accaccuuuggagugacucc

SEQ ID NO: 299784 - RNA, 32 nt, Human
accaccuuugugcugcucuaaccuucagaguu

SEQ ID NO: 299785 - RNA, 32 nt, Human
accacgaaaaacaaagcuuuuuaaacuuaugc

SEQ ID NO: 299786 - RNA, 21 nt, Human
accacgaacgccgccgccgcc

SEQ ID NO: 299787 - RNA, 32 nt, Human
accacgaagggagggaagggaagucagcucug

SEQ ID NO: 299788 - RNA, 32 nt, Human
accacgaauaagaauggaaaugacaauggcug

SEQ ID NO: 299789 - RNA, 32 nt, Human
accacgaggccccguccgguggaacacgccau

SEQ ID NO: 299790 - RNA, 32 nt, Human
accacgauacagucagcaagaggaagccagga

SEQ ID NO: 299791 - RNA, 32 nt, Human
accacgauacagucagcaagaggaagccggga

SEQ ID NO: 299792 - RNA, 32 nt, Human
accacgauggaggcaggagcugcuccuggcug

SEQ ID NO: 299793 - RNA, 32 nt, Human
accacgauugcgcgaccucccuuucccugggg

SEQ ID NO: 299794 - RNA, 32 nt, Human
accacgauuugugcccuugaaaaugcuguuug

SEQ ID NO: 299795 - RNA, 32 nt, Human
accacgccacugcacuccagcccgggugacag

SEQ ID NO: 299796 - RNA, 32 nt, Human
accacgccacugcacuccagccugggugacag

SEQ ID NO: 299797 - RNA, 32 nt, Human
accacgccacugcacuccagcgugggcaacag

SEQ ID NO: 299798 - RNA, 32 nt, Human
accacgccauugcacuccagccugggugacaa

SEQ ID NO: 299799 - RNA, 32 nt, Human
accacgccauugcacuccagcuugggcaauaa

SEQ ID NO: 299800 - RNA, 32 nt, Human
accacgcccaacuaauauuuuguauuuuuagu

SEQ ID NO: 299801 - RNA, 32 nt, Human
accacgcccagacuaauuuuuguauuuuuagu

SEQ ID NO: 299802 - RNA, 32 nt, Human
accacgcccagccuguggccagcacuuuagau

SEQ ID NO: 299803 - RNA, 32 nt, Human
accacgcccagccuucccuugcacuuuuaaug

SEQ ID NO: 299804 - RNA, 32 nt, Human
accacgcccagcuaauauuuuguauuuucagu

SEQ ID NO: 299805 - RNA, 32 nt, Human
accacgccuggcuaauucuuuguauuuuuagu

SEQ ID NO: 299806 - RNA, 20 nt, Human
accacgcgcccgccgccgcc

SEQ ID NO: 299807 - RNA, 32 nt, Human
accacgcucucauccugcaagucggcgcacac

SEQ ID NO: 299808 - RNA, 32 nt, Human
accacgcugggaaggaagaggacagcaagaca

SEQ ID NO: 299809 - RNA, 32 nt, Human
accacgcugggagcuggccugucguacaggcg

SEQ ID NO: 299810 - RNA, 32 nt, Human
accacggacauuggacucacuguggcuggacg

SEQ ID NO: 299811 - RNA, 32 nt, Human
accacggagccccagggccccugggcuugucg

SEQ ID NO: 299812 - RNA, 32 nt, Human
accacggaggccccaaacgaggagcgggacca

SEQ ID NO: 299813 - RNA, 32 nt, Human
accacggaggcuguguguauacguaugugaac

SEQ ID NO: 299814 - RNA, 32 nt, Human
accacggcacuccagccugggugacagaguga

SEQ ID NO: 299815 - RNA, 32 nt, Human
accacggcacuccagccugggugacagugaga

SEQ ID NO: 299816 - RNA, 32 nt, Human
accacggcacuucagccugggugacagaauga

SEQ ID NO: 299817 - RNA, 21 nt, Human
accacggcaggaaguccacca

SEQ ID NO: 299818 - RNA, 32 nt, Human
accacggcaggauccaaucacagccgaggggc

SEQ ID NO: 299819 - RNA, 32 nt, Human
accacggcucacugcagccucagcguccuggg

SEQ ID NO: 299820 - RNA, 32 nt, Human
accacgggccgcagaaucaccaugcccaccuu

SEQ ID NO: 299821 - RNA, 32 nt, Human
accacggggagcaaaccagcuuguucugggcu

SEQ ID NO: 299822 - RNA, 32 nt, Human
accacgggggcaggaccccucucugagucaca

SEQ ID NO: 299823 - RNA, 32 nt, Human
accacgggugcuuuguucuuccuucugcaccu

SEQ ID NO: 299824 - RNA, 32 nt, Human
accacgggugugagccaccgcgcccagcuagc

SEQ ID NO: 299825 - RNA, 32 nt, Human
accacgguguuuccccuuaucucuaccauggc

SEQ ID NO: 299826 - RNA, 32 nt, Human
accacguaacacagcugcaucuugagcaguga

SEQ ID NO: 299827 - RNA, 32 nt, Human
accacguccccacgaaugggaaagcacguuag

SEQ ID NO: 299828 - RNA, 32 nt, Human
accacgucugagcuugcuuuucccucuggaca

SEQ ID NO: 299829 - RNA, 32 nt, Human
accacgucugcuggucuccagccuuguaugga

SEQ ID NO: 299830 - RNA, 32 nt, Human
accacgugaacugucaucaccuggcaacccca

SEQ ID NO: 299831 - RNA, 19 nt, Human
accacgugaggggcacuug

SEQ ID NO: 299832 - RNA, 32 nt, Human
accacgugcacugugcugcugcuggcagagag

SEQ ID NO: 299833 - RNA, 32 nt, Human
accacgugcuccacuccagcucccugccagug

SEQ ID NO: 299834 - RNA, 32 nt, Human
accacguguuauauccuguugcuagucugagu

SEQ ID NO: 299835 - RNA, 32 nt, Human
accacguucuucuugcuuugcuuuuuccuaag

SEQ ID NO: 299836 - RNA, 32 nt, Human
accacguugcccaggcuggucuccagcuccug

SEQ ID NO: 299837 - RNA, 32 nt, Human
accacguuggccaggcuggucuuguacuccug

SEQ ID NO: 299838 - RNA, 32 nt, Human
accacuaacugacauuucuuccagaaacguuc

SEQ ID NO: 299839 - RNA, 32 nt, Human
accacuaaggcggguggaucaccugaggccag

SEQ ID NO: 299840 - RNA, 32 nt, Human
accacuacacuccagccugggugacagcaaga

SEQ ID NO: 299841 - RNA, 32 nt, Human
accacuaccauagggcaaagccagcaggugug

SEQ ID NO: 299842 - RNA, 23 nt, Human
accacuacugaugagggacaguu

SEQ ID NO: 299843 - RNA, 32 nt, Human
accacuagccucucgggagcauggcgucggcc

SEQ ID NO: 299844 - RNA, 32 nt, Human
accacuaggcaggcacugcucucugcagaggg

SEQ ID NO: 299845 - RNA, 32 nt, Human
accacuagggccugggcugacccugacucaga

SEQ ID NO: 299846 - RNA, 32 nt, Human
accacuagguggcgacagagugcagcugcauu

SEQ ID NO: 299847 - RNA, 32 nt, Human
accacuaucuccguuccaucugggcuuauaug

SEQ ID NO: 299848 - RNA, 32 nt, Human
accacuaugaauguaaugaauguggagaaagu

SEQ ID NO: 299849 - RNA, 32 nt, Human
accacuaugauuauaauguaacagacuggagu

SEQ ID NO: 299850 - RNA, 32 nt, Human
accacuauuccaugcuuuuaaguaguuuucuc

SEQ ID NO: 299851 - RNA, 25 nt, Human
accacuauugauacauuauuauaaa

SEQ ID NO: 299852 - RNA, 32 nt, Human
accacucaaccaguggcuguuucacaaggauu

SEQ ID NO: 299853 - RNA, 32 nt, Human
accacucaagcucuucgauaccaaaaucagga

SEQ ID NO: 299854 - RNA, 22 nt, Human
accacucaguggggccugugug

SEQ ID NO: 299855 - RNA, 32 nt, Human
accacuccagccugggcgagagcgagacuccu

SEQ ID NO: 299856 - RNA, 32 nt, Human
accacuccaugugcgucccuccagaagcugug

SEQ ID NO: 299857 - RNA, 32 nt, Human
accacucccacauaaaaugcucauaguuuggg

SEQ ID NO: 299858 - RNA, 32 nt, Human
accacuccccucccaagacccagccgccgccg

SEQ ID NO: 299859 - RNA, 32 nt, Human
accacuccccucccuauauacccccaccccac

SEQ ID NO: 299860 - RNA, 32 nt, Human
accacuccugacaauuccagcacucuacgacu

SEQ ID NO: 299861 - RNA, 32 nt, Human
accacuccugccugcccccacacccacuccac

SEQ ID NO: 299862 - RNA, 32 nt, Human
accacuccugggcuaaggaguaaccucccuca

SEQ ID NO: 299863 - RNA, 21 nt, Human
accacuccuuaugauccagug

SEQ ID NO: 299864 - RNA, 32 nt, Human
accacuccuugauccuucccuucuuaguggcu

SEQ ID NO: 299865 - RNA, 32 nt, Human
accacuccuuuuccaucucccagaagccugcu

SEQ ID NO: 299866 - RNA, 22 nt, Human
accacucgugccgccgccggcg

SEQ ID NO: 299867 - RNA, 22 nt, Human
accacucuaccaaauaauuuca

SEQ ID NO: 299868 - RNA, 32 nt, Human
accacucucauaccugcgugcccacguucaca

SEQ ID NO: 299869 - RNA, 32 nt, Human
accacucuccacccuuucugucugugugacuu

SEQ ID NO: 299870 - RNA, 32 nt, Human
accacucucuccuggguucaagugauucuccu

SEQ ID NO: 299871 - RNA, 32 nt, Human
accacucugaaccaaaacuucuuucuugguuc

SEQ ID NO: 299872 - RNA, 32 nt, Human
accacucugccuggccuccugcugaugaggac

SEQ ID NO: 299873 - RNA, 32 nt, Human
accacucugcucccugcuugccuccacucccu

SEQ ID NO: 299874 - RNA, 21 nt, Human
accacucuuggugacugucau

SEQ ID NO: 299875 - RNA, 32 nt, Human
accacucuuuuucuucuaagccuguguguuau

SEQ ID NO: 299876 - RNA, 32 nt, Human
accacugaacugccuucuuccauuguccugca

SEQ ID NO: 299877 - RNA, 32 nt, Human
accacugaagaaaaucuguggugaagggaaca

SEQ ID NO: 299878 - RNA, 32 nt, Human
accacugaaggaguuccuggaagcccugcggu

SEQ ID NO: 299879 - RNA, 32 nt, Human
accacugacuccuacucuccuacuucuccaga

SEQ ID NO: 299880 - RNA, 32 nt, Human
accacugagaaaccaugaaggccaugcagcga

SEQ ID NO: 299881 - RNA, 24 nt, Human
accacugagaagaccgcuccggca

SEQ ID NO: 299882 - RNA, 32 nt, Human
accacugagacaggggucucacuauguugccc

SEQ ID NO: 299883 - RNA, 19 nt, Human
accacugagaugcuggggg

SEQ ID NO: 299884 - RNA, 22 nt, Human
accacugcaacacccaccagca

SEQ ID NO: 299885 - RNA, 32 nt, Human
accacugcacacugcacuccauccugggcgac

SEQ ID NO: 299886 - RNA, 32 nt, Human
accacugcaccccagccugggugacagcgaga

SEQ ID NO: 299887 - RNA, 32 nt, Human
accacugcacgcacuccagccugggugacaga

SEQ ID NO: 299888 - RNA, 32 nt, Human
accacugcacuacagcuugggugacagcgcga

SEQ ID NO: 299889 - RNA, 32 nt, Human
accacugcacuccaaccugggugacagaguga

SEQ ID NO: 299890 - RNA, 32 nt, Human
accacugcacuccagcccaggugacagagcaa

SEQ ID NO: 299891 - RNA, 32 nt, Human
accacugcacuccagccggggugacagaguga

SEQ ID NO: 299892 - RNA, 32 nt, Human
accacugcacuccagccuaggugacagaguga

SEQ ID NO: 299893 - RNA, 32 nt, Human
accacugcacuccagccuaggugacagggcaa

SEQ ID NO: 299894 - RNA, 32 nt, Human
accacugcacuccagccuggggugauagaaca

SEQ ID NO: 299895 - RNA, 32 nt, Human
accacugcacuccagccugggugacagagacc

SEQ ID NO: 299896 - RNA, 32 nt, Human
accacugcacuccagccugggugacagagaga

SEQ ID NO: 299897 - RNA, 32 nt, Human
accacugcacuccagccugggugacagagcaa

SEQ ID NO: 299898 - RNA, 32 nt, Human
accacugcacuccagccugggugacagagcag

SEQ ID NO: 299899 - RNA, 32 nt, Human
accacugcacuccagccugggugacagagcca

SEQ ID NO: 299900 - RNA, 32 nt, Human
accacugcacuccagccugggugacagagcga

SEQ ID NO: 299901 - RNA, 32 nt, Human
accacugcacuccagccugggugacagaggga

SEQ ID NO: 299902 - RNA, 32 nt, Human
accacugcacuccagccugggugacagaguaa

SEQ ID NO: 299903 - RNA, 32 nt, Human
accacugcacuccagccugggugacagaguag

SEQ ID NO: 299904 - RNA, 32 nt, Human
accacugcacuccagccugggugacagaguga

SEQ ID NO: 299905 - RNA, 32 nt, Human
accacugcacuccagccugggugacagauuga

SEQ ID NO: 299906 - RNA, 32 nt, Human
accacugcacuccagccugggugacagcaaga

SEQ ID NO: 299907 - RNA, 32 nt, Human
accacugcacuccagccuuggugacagaguga

SEQ ID NO: 299908 - RNA, 32 nt, Human
accacugcacuccagcuugggugacagaguga

SEQ ID NO: 299909 - RNA, 32 nt, Human
accacugcacuccaggcugggugacagagcga

SEQ ID NO: 299910 - RNA, 32 nt, Human
accacugcacuccauccagccugggugacagg

SEQ ID NO: 299911 - RNA, 32 nt, Human
accacugcacuccauccugggugacagagcaa

SEQ ID NO: 299912 - RNA, 32 nt, Human
accacugcacucuacucugggugacagaauga

SEQ ID NO: 299913 - RNA, 32 nt, Human
accacugcacucuagccugggugacagagcaa

SEQ ID NO: 299914 - RNA, 32 nt, Human
accacugcacugcagccugggugacagaguga

SEQ ID NO: 299915 - RNA, 32 nt, Human
accacugcacuucagccugggugacagaggga

SEQ ID NO: 299916 - RNA, 32 nt, Human
accacugcacuucagccugggugacagaguga

SEQ ID NO: 299917 - RNA, 32 nt, Human
accacugcacuuuagucugggugacagagcaa

SEQ ID NO: 299918 - RNA, 32 nt, Human
accacugcagaacugaaccacuucggccguga

SEQ ID NO: 299919 - RNA, 32 nt, Human
accacugcagggugguuacuugcagcugugac

SEQ ID NO: 299920 - RNA, 32 nt, Human
accacugcauuccagccugggcaacagagcga

SEQ ID NO: 299921 - RNA, 32 nt, Human
accacugcauuccagccugggcacuagaguga

SEQ ID NO: 299922 - RNA, 32 nt, Human
accacugcauuccagccugggugacagagcaa

SEQ ID NO: 299923 - RNA, 32 nt, Human
accacugcauuccagccugggugacagagcca

SEQ ID NO: 299924 - RNA, 32 nt, Human
accacugcauuccagccugggugacagagcga

SEQ ID NO: 299925 - RNA, 32 nt, Human
accacugcauuccagccugggugacagaguga

SEQ ID NO: 299926 - RNA, 32 nt, Human
accacugcauucccgccugggcagcagagcga

SEQ ID NO: 299927 - RNA, 32 nt, Human
accacugcauucuggccugggugacagaguua

SEQ ID NO: 299928 - RNA, 32 nt, Human
accacugcauuuucacauguaccuucaggggg

SEQ ID NO: 299929 - RNA, 32 nt, Human
accacugccccuucauugauuuccugugucaa

SEQ ID NO: 299930 - RNA, 32 nt, Human
accacugcccuccagccuaggugacagaauga

SEQ ID NO: 299931 - RNA, 32 nt, Human
accacugcccuccagccugggugacagagcga

SEQ ID NO: 299932 - RNA, 32 nt, Human
accacugcccuccugguaccagcccucagugu

SEQ ID NO: 299933 - RNA, 32 nt, Human
accacugcccugagguuacugcacugaggcca

SEQ ID NO: 299934 - RNA, 32 nt, Human
accacugccuccaggguucaagcgauucucuu

SEQ ID NO: 299935 - RNA, 32 nt, Human
accacugccucccagguucaagagauucuccu

SEQ ID NO: 299936 - RNA, 32 nt, Human
accacugccucccagguucaagcgauucuccu

SEQ ID NO: 299937 - RNA, 32 nt, Human
accacugccucccucccucccccuggcaccgg

SEQ ID NO: 299938 - RNA, 32 nt, Human
accacugccuguuggaagaauaguugauucca

SEQ ID NO: 299939 - RNA, 32 nt, Human
accacugcucacugcuuuccacuugcuaggau

SEQ ID NO: 299940 - RNA, 32 nt, Human
accacugcuuccuggguucaagugauucucau

SEQ ID NO: 299941 - RNA, 20 nt, Human
accacugcuuguuccgagcu

SEQ ID NO: 299942 - RNA, 32 nt, Human
accacugcuuuagaccaaacaccaaaggaaga

SEQ ID NO: 299943 - RNA, 32 nt, Human
accacuggaaccuugaacccaccagcuggcug

SEQ ID NO: 299944 - RNA, 32 nt, Human
accacuggcacuccagccugggcaacagagug

SEQ ID NO: 299945 - RNA, 32 nt, Human
accacuggcccuaaaccuuuucccucuguggc

SEQ ID NO: 299946 - RNA, 32 nt, Human
accacuggccgcugcuggucuuccugcugccc

SEQ ID NO: 299947 - RNA, 32 nt, Human
accacuggcggccugggaccagcuggguguca

SEQ ID NO: 299948 - RNA, 32 nt, Human
accacuggcugcagcuucgggaugucccucuc

SEQ ID NO: 299949 - RNA, 32 nt, Human
accacuggcugccucaccuacuccccacacca

SEQ ID NO: 299950 - RNA, 32 nt, Human
accacugggaacucuggacuugaguguguuug

SEQ ID NO: 299951 - RNA, 18 nt, Human
accacugggagcuaccau

SEQ ID NO: 299952 - RNA, 32 nt, Human
accacugggcagccaccuccuuugcccuagac

SEQ ID NO: 299953 - RNA, 32 nt, Human
accacugggccuuccaacuuugcuggcaagcu

SEQ ID NO: 299954 - RNA, 32 nt, Human
accacuggguagugccauuuuggccggacaug

SEQ ID NO: 299955 - RNA, 32 nt, Human
accacugguauuccugagccucucccagcucc

SEQ ID NO: 299956 - RNA, 18 nt, Human
accacugguccccaggaa

SEQ ID NO: 299957 - RNA, 32 nt, Human
accacuguacuccagccugggugacagagcaa

SEQ ID NO: 299958 - RNA, 32 nt, Human
accacuguacuccagccugggugacagagcga

SEQ ID NO: 299959 - RNA, 32 nt, Human
accacuguacuccagccugggugacagggcaa

SEQ ID NO: 299960 - RNA, 32 nt, Human
accacuguaggcaaugggggagaguuaugcau

SEQ ID NO: 299961 - RNA, 32 nt, Human
accacuguauccuccagcuccuuccuuccuuc

SEQ ID NO: 299962 - RNA, 32 nt, Human
accacuguauuccagcccgggugacagagcaa

SEQ ID NO: 299963 - RNA, 32 nt, Human
accacuguauuccagccugggugacagaguga

SEQ ID NO: 299964 - RNA, 23 nt, Human
accacugucagcacucuccagca

SEQ ID NO: 299965 - RNA, 32 nt, Human
accacuguccauccugugaggcucccgucugg

SEQ ID NO: 299966 - RNA, 32 nt, Human
accacugucucaauaaggucucagugcugugu

SEQ ID NO: 299967 - RNA, 32 nt, Human
accacugucucccggguucaagcgauucuccc

SEQ ID NO: 299968 - RNA, 32 nt, Human
accacugugcaggagaacagacagaggaaaug

SEQ ID NO: 299969 - RNA, 32 nt, Human
accacugugccuggccuguuuguuuguuuguu

SEQ ID NO: 299970 - RNA, 32 nt, Human
accacuguggauuuugggguuaagucucauuu

SEQ ID NO: 299971 - RNA, 32 nt, Human
accacugugggaugacagccagaggaauaaga

SEQ ID NO: 299972 - RNA, 20 nt, Human
accacuguggucuguuguac

SEQ ID NO: 299973 - RNA, 32 nt, Human
accacugugugaggaagccaucagaucugugc

SEQ ID NO: 299974 - RNA, 16 nt, Human
accacuguucuguuca

SEQ ID NO: 299975 - RNA, 32 nt, Human
accacuuaaaggcauucuuaaaccacaaacaa

SEQ ID NO: 299976 - RNA, 32 nt, Human
accacuuaaaggcauucuuaagccacaaacaa

SEQ ID NO: 299977 - RNA, 32 nt, Human
accacuuaaugaagaagaaugaucagaaguuc

SEQ ID NO: 299978 - RNA, 32 nt, Human
accacuuaccucaaauuaagcauauguguuac

SEQ ID NO: 299979 - RNA, 32 nt, Human
accacuuauugcacuccagcccgggcgacaga

SEQ ID NO: 299980 - RNA, 32 nt, Human
accacuucaaagauuuuguugaaaguuuuagu

SEQ ID NO: 299981 - RNA, 32 nt, Human
accacuucauuccagccugggugacagagcaa

SEQ ID NO: 299982 - RNA, 32 nt, Human
accacuuccauucugagugcacuuuuauaggu

SEQ ID NO: 299983 - RNA, 32 nt, Human
accacuucccccgugugggguccagaguggug

SEQ ID NO: 299984 - RNA, 18 nt, Human
accacuugcccuaaggaa

SEQ ID NO: 299985 - RNA, 32 nt, Human
accacuugcucagugugccucucaccugccuc

SEQ ID NO: 299986 - RNA, 21 nt, Human
accacuuggagagacacagga

SEQ ID NO: 299987 - RNA, 32 nt, Human
accacuuggcuagacggaccagcuggaaagau

SEQ ID NO: 299988 - RNA, 32 nt, Human
accacuuggcuagaguucagagacaggaagug

SEQ ID NO: 299989 - RNA, 29 nt, Human
accacuuggcugcucauuccuucuggagg

SEQ ID NO: 299990 - RNA, 32 nt, Human
accacuuggcugucuggccucucaggugucag

SEQ ID NO: 299991 - RNA, 32 nt, Human
accacuuguaacuccagccugggcaacagagu

SEQ ID NO: 299992 - RNA, 32 nt, Human
accacuuucacaaucugcuagcaaagguuaug

SEQ ID NO: 299993 - RNA, 32 nt, Human
accacuuucauaccugccuacugaugcauaga

SEQ ID NO: 299994 - RNA, 32 nt, Human
accacuuucuucuucuuuuucuucucugggau

SEQ ID NO: 299995 - RNA, 32 nt, Human
accacuuucuuuccuucuuuugccuaauacag

SEQ ID NO: 299996 - RNA, 20 nt, Human
accacuuuugcaugcuguac

SEQ ID NO: 299997 - RNA, 32 nt, Human
accagaaaagaauucacuccagauagagcccc

SEQ ID NO: 299998 - RNA, 32 nt, Human
accagaaaccugccaagcccaggcuggggcca

SEQ ID NO: 299999 - RNA, 32 nt, Human
accagaaagaccaaaauuaaacuccuggaucu

SEQ ID NO: 300000 - RNA, 32 nt, Human
accagaaaggcuacuuccugcaccacaucauc

SEQ ID NO: 300001 - RNA, 17 nt, Human
accagaaauccaggugc

SEQ ID NO: 300002 - RNA, 32 nt, Human
accagaacaaacccagcuuuuguccacaaggu

SEQ ID NO: 300003 - RNA, 32 nt, Human
accagaaccagcagucuccugccuuguucccu

SEQ ID NO: 300004 - RNA, 21 nt, Human
accagaaccauuuggccuuaa

SEQ ID NO: 300005 - RNA, 32 nt, Human
accagaacccaucucaccacacugcuuuacag

SEQ ID NO: 300006 - RNA, 32 nt, Human
accagaaccucacaccucuccugggacuggaa

SEQ ID NO: 300007 - RNA, 32 nt, Human
accagaacuuguggcuugcugaagaugguaug

SEQ ID NO: 300008 - RNA, 32 nt, Human
accagaagaaaagacaacauuuuccggaaauc

SEQ ID NO: 300009 - RNA, 32 nt, Human
accagaagacacagcuagucugccauguaaaa

SEQ ID NO: 300010 - RNA, 32 nt, Human
accagaagagcaucacaucucacuuuguucgg

SEQ ID NO: 300011 - RNA, 32 nt, Human
accagaagccugacauguuuggaaguccuuuu

SEQ ID NO: 300012 - RNA, 32 nt, Human
accagaaggaugaucugcuccuuuguaacguu

SEQ ID NO: 300013 - RNA, 32 nt, Human
accagaagguggagguggcagugagccgagau

SEQ ID NO: 300014 - RNA, 32 nt, Human
accagaaguagugagagaaggaaggggauagg

SEQ ID NO: 300015 - RNA, 32 nt, Human
accagaaucugccauggcaacaggcuuuaaaa

SEQ ID NO: 300016 - RNA, 32 nt, Human
accagaaugaagaguauucgugcugcuuuuca

SEQ ID NO: 300017 - RNA, 32 nt, Human
accagaaugaucaacagagugagaccccuguc

SEQ ID NO: 300018 - RNA, 18 nt, Human
accagaauucacacggua

SEQ ID NO: 300019 - RNA, 32 nt, Human
accagaauugccuuagaagauaccagaaggug

SEQ ID NO: 300020 - RNA, 31 nt, Human
accagacaaguguccuaggagagugaacagg

SEQ ID NO: 300021 - RNA, 32 nt, Human
accagacacagcaacccaagggagcugcgcca

SEQ ID NO: 300022 - RNA, 32 nt, Human
accagacacagcuguuguucggggcuguggaa

SEQ ID NO: 300023 - RNA, 32 nt, Human
accagacacucuucuucucccaccucacucuc

SEQ ID NO: 300024 - RNA, 32 nt, Human
accagacagaugggggcugggcccacacaggc

SEQ ID NO: 300025 - RNA, 21 nt, Human
accagacaguaagguguuacu

SEQ ID NO: 300026 - RNA, 18 nt, Human
accagacaguuggccacu

SEQ ID NO: 300027 - RNA, 32 nt, Human
accagacaugaacaaaaguugaccucaugagc

SEQ ID NO: 300028 - RNA, 32 nt, Human
accagaccaagaaguauggaggccacagaggg

SEQ ID NO: 300029 - RNA, 32 nt, Human
accagaccaaggagaugaccuggagaacugca

SEQ ID NO: 300030 - RNA, 26 nt, Human
accagacccccugccagaagagccca

SEQ ID NO: 300031 - RNA, 32 nt, Human
accagacccucacggcccauauccaauucgaa

SEQ ID NO: 300032 - RNA, 32 nt, Human
accagacccugacccagauguuagggagacag

SEQ ID NO: 300033 - RNA, 32 nt, Human
accagaccuuguucauaacccugggccucuua

SEQ ID NO: 300034 - RNA, 32 nt, Human
accagacgcagcuggggaugagcccaaguucc

SEQ ID NO: 300035 - RNA, 32 nt, Human
accagacucaaaggaugucagccguagcccug

SEQ ID NO: 300036 - RNA, 32 nt, Human
accagacucagcccugagcagggaacagggcc

SEQ ID NO: 300037 - RNA, 32 nt, Human
accagacucuugcuuugagucuccgggaggau

SEQ ID NO: 300038 - RNA, 19 nt, Human
accagacugaccaacaugg

SEQ ID NO: 300039 - RNA, 24 nt, Human
accagacugaccaacauggagaaa

SEQ ID NO: 300040 - RNA, 32 nt, Human
accagacugagaugguaaguuaacugauaaaa

SEQ ID NO: 300041 - RNA, 32 nt, Human
accagacuggcaacauagugagacccugucuc

SEQ ID NO: 300042 - RNA, 24 nt, Human
accagacuggccaacacagcgaga

SEQ ID NO: 300043 - RNA, 24 nt, Human
accagacuggccaacauggagaaa

SEQ ID NO: 300044 - RNA, 32 nt, Human
accagacuggcgugggugagcuccacacccug

SEQ ID NO: 300045 - RNA, 32 nt, Human
accagacugggcaaauuauguguccaaaacuu

SEQ ID NO: 300046 - RNA, 32 nt, Human
accagacuugcuaauaaauaaccagagagaug

SEQ ID NO: 300047 - RNA, 32 nt, Human
accagacuugcugccaagggcuucugcaucca

SEQ ID NO: 300048 - RNA, 32 nt, Human
accagagaaagaugaagaggaggaguuagguc

SEQ ID NO: 300049 - RNA, 32 nt, Human
accagagaacccagccagagggguugugagua

SEQ ID NO: 300050 - RNA, 32 nt, Human
accagagaaguggaaggaagcaaaauggaggu

SEQ ID NO: 300051 - RNA, 23 nt, Human
accagagacagaacugguccauc

SEQ ID NO: 300052 - RNA, 32 nt, Human
accagagacgucuucugcagccaccugcuuuc

SEQ ID NO: 300053 - RNA, 32 nt, Human
accagagacucauguuuccaggggucagucug

SEQ ID NO: 300054 - RNA, 32 nt, Human
accagagagcccaaaggccugaagacaaaucu

SEQ ID NO: 300055 - RNA, 32 nt, Human
accagagagguggagguugcagugaaccgaga

SEQ ID NO: 300056 - RNA, 32 nt, Human
accagagaguggccugucuuuccuucaagcag

SEQ ID NO: 300057 - RNA, 32 nt, Human
accagagaugaaacuucgacuccaguucuggc

SEQ ID NO: 300058 - RNA, 32 nt, Human
accagagaugacugaaaccacucugaaauaau

SEQ ID NO: 300059 - RNA, 32 nt, Human
accagagauggcaucuguggauuucaagaccu

SEQ ID NO: 300060 - RNA, 32 nt, Human
accagagcacguuccuggcugcagaggccaca

SEQ ID NO: 300061 - RNA, 32 nt, Human
accagagcagaggcccagccagcccucugcag

SEQ ID NO: 300062 - RNA, 32 nt, Human
accagagccagauuaucuggucuuccaagacu

SEQ ID NO: 300063 - RNA, 32 nt, Human
accagagccuggagagagcucgguggggccaa

SEQ ID NO: 300064 - RNA, 32 nt, Human
accagagcgagaacccucaacugacaugaaau

SEQ ID NO: 300065 - RNA, 31 nt, Human
accagagcgguuuugccucagcugcucucaa

SEQ ID NO: 300066 - RNA, 32 nt, Human
accagagcucacugagccuccaccuggggucu

SEQ ID NO: 300067 - RNA, 32 nt, Human
accagagcugacuccauuucucaaucugccuu

SEQ ID NO: 300068 - RNA, 32 nt, Human
accagagcuguggagaggggacccuaagacuc

SEQ ID NO: 300069 - RNA, 32 nt, Human
accagagcuuugacaaaccuccugcuccuugg

SEQ ID NO: 300070 - RNA, 32 nt, Human
accagaggacuccugcccugccacacccugga

SEQ ID NO: 300071 - RNA, 32 nt, Human
accagaggagcgagacgagcaagaaccacacc

SEQ ID NO: 300072 - RNA, 32 nt, Human
accagaggaggaggaggacagagggagagaau

SEQ ID NO: 300073 - RNA, 32 nt, Human
accagaggaucagaguagcccacuccagacga

SEQ ID NO: 300074 - RNA, 32 nt, Human
accagaggccacuccagggugucaggacuaag

SEQ ID NO: 300075 - RNA, 32 nt, Human
accagaggcccaggcugcacacccauuucagc

SEQ ID NO: 300076 - RNA, 32 nt, Human
accagaggcccuccacugucacccuaaauaga

SEQ ID NO: 300077 - RNA, 32 nt, Human
accagaggccucuuuuccugaagaaauccaau

SEQ ID NO: 300078 - RNA, 32 nt, Human
accagaggcuucacacaagugaaaagcccuau

SEQ ID NO: 300079 - RNA, 32 nt, Human
accagagggaagcccaucucuccagcagaacu

SEQ ID NO: 300080 - RNA, 32 nt, Human
accagagggaggauuauccuugaccuuugaag

SEQ ID NO: 300081 - RNA, 25 nt, Human
accagagggcagcaagcuccuuuca

SEQ ID NO: 300082 - RNA, 32 nt, Human
accagaggggagcuuguucuucugcuguagug

SEQ ID NO: 300083 - RNA, 32 nt, Human
accagagguaggagaccuggauucaagugcca

SEQ ID NO: 300084 - RNA, 32 nt, Human
accagaggucaggaguuggagaccagccugcc

SEQ ID NO: 300085 - RNA, 32 nt, Human
accagagguggaggaagaacgguaggaaggcu

SEQ ID NO: 300086 - RNA, 32 nt, Human
accagaguacagaugagaacagcuuacaugaa

SEQ ID NO: 300087 - RNA, 32 nt, Human
accagaguaucuggauuacccaggaagguuga

SEQ ID NO: 300088 - RNA, 32 nt, Human
accagagucucagaacucauuaagaaacaguu

SEQ ID NO: 300089 - RNA, 32 nt, Human
accagagucucugaggaugaaguuuccuaccc

SEQ ID NO: 300090 - RNA, 32 nt, Human
accagagucugcaccucagacuuuaguaggaa

SEQ ID NO: 300091 - RNA, 32 nt, Human
accagagucuuggacacagacuucugaggugg

SEQ ID NO: 300092 - RNA, 32 nt, Human
accagagugaacagggcaggcagguaguaggc

SEQ ID NO: 300093 - RNA, 22 nt, Human
accagagugauguccucucuca

SEQ ID NO: 300094 - RNA, 32 nt, Human
accagagugcuagaagggaaugaaagggagag

SEQ ID NO: 300095 - RNA, 32 nt, Human
accagauaacauaccuuuccugcucuggugcu

SEQ ID NO: 300096 - RNA, 32 nt, Human
accagauacaguugucuuggaagccuguuauu

SEQ ID NO: 300097 - RNA, 32 nt, Human
accagauacaucugcuggagagcccagguggg

SEQ ID NO: 300098 - RNA, 32 nt, Human
accagaucaagcaauucuaucuauuuacacua

SEQ ID NO: 300099 - RNA, 32 nt, Human
accagaucaguuacauguauaucuugccucuc

SEQ ID NO: 300100 - RNA, 32 nt, Human
accagaucauuuccuaaaaucuccagucccaa

SEQ ID NO: 300101 - RNA, 32 nt, Human
accagaucccagaggcugaacaccucgaccuu

SEQ ID NO: 300102 - RNA, 23 nt, Human
accagauccucucagggaggaag

SEQ ID NO: 300103 - RNA, 32 nt, Human
accagauccuuaaauccugggcucugagcuag

SEQ ID NO: 300104 - RNA, 32 nt, Human
accagaucuccaagaacucacuaacacagaau

SEQ ID NO: 300105 - RNA, 22 nt, Human
accagaucucucuccaggaaag

SEQ ID NO: 300106 - RNA, 32 nt, Human
accagaucugggguaaagucaauguacacuuc

SEQ ID NO: 300107 - RNA, 32 nt, Human
accagaugaaaccucuccaggcaaguggcccc

SEQ ID NO: 300108 - RNA, 32 nt, Human
accagaugagcaggaagagauuccaaagagga

SEQ ID NO: 300109 - RNA, 32 nt, Human
accagaugcauccucagaggacgagucuacua

SEQ ID NO: 300110 - RNA, 32 nt, Human
accagauggaggcuuugauuugcucaaccuaa

SEQ ID NO: 300111 - RNA, 32 nt, Human
accagauggccagaagcugcccaucagcccug

SEQ ID NO: 300112 - RNA, 32 nt, Human
accagauggggaggggauguccaggcaggugc

SEQ ID NO: 300113 - RNA, 32 nt, Human
accagauggucugggaaaguucugugccucug

SEQ ID NO: 300114 - RNA, 25 nt, Human
accagaugucgcccuacucaccuga

SEQ ID NO: 300115 - RNA, 32 nt, Human
accagauguuggcugcuguacuuacucccuga

SEQ ID NO: 300116 - RNA, 32 nt, Human
accagauucagucuguggagguuugcauucac

SEQ ID NO: 300117 - RNA, 32 nt, Human
accagauucccaacucuucuggcuccugguua

SEQ ID NO: 300118 - RNA, 23 nt, Human
accagauugaaauccuagaaaua

SEQ ID NO: 300119 - RNA, 32 nt, Human
accagauugcucugccccaccuugccagggca

SEQ ID NO: 300120 - RNA, 23 nt, Human
accagauuguacccagauagcug

SEQ ID NO: 300121 - RNA, 32 nt, Human
accagauuuacuuguuucuguaauacaucacc

SEQ ID NO: 300122 - RNA, 32 nt, Human
accagcaagcaacccccagggcacgagaagag

SEQ ID NO: 300123 - RNA, 32 nt, Human
accagcaagucuugaagucucuucccaagcaa

SEQ ID NO: 300124 - RNA, 22 nt, Human
accagcaagugcuccagaguga

SEQ ID NO: 300125 - RNA, 24 nt, Human
accagcaaugucaucugugaggaa

SEQ ID NO: 300126 - RNA, 32 nt, Human
accagcacaauccugccucacuggccuuaccc

SEQ ID NO: 300127 - RNA, 32 nt, Human
accagcacaggaggggacggagaggagcugca

SEQ ID NO: 300128 - RNA, 32 nt, Human
accagcacaugggccgagacucuccccacggg

SEQ ID NO: 300129 - RNA, 32 nt, Human
accagcaccagccuggccaacacggugaaacc

SEQ ID NO: 300130 - RNA, 21 nt, Human
accagcacccagaccgaaccc

SEQ ID NO: 300131 - RNA, 32 nt, Human
accagcaccccacuccagccucgaggaagcuu

SEQ ID NO: 300132 - RNA, 21 nt, Human
accagcaccucccugacaccu

SEQ ID NO: 300133 - RNA, 32 nt, Human
accagcaccugaggccgggccgcaggccgacu

SEQ ID NO: 300134 - RNA, 32 nt, Human
accagcaccuggggcccugccagccugucgcc

SEQ ID NO: 300135 - RNA, 23 nt, Human
accagcacuccaucacugagagc

SEQ ID NO: 300136 - RNA, 19 nt, Human
accagcacugcucacugcg

SEQ ID NO: 300137 - RNA, 32 nt, Human
accagcagaaacauccucccacucucccaacc

SEQ ID NO: 300138 - RNA, 32 nt, Human
accagcagaacagcagcgcugaccaguaccug

SEQ ID NO: 300139 - RNA, 32 nt, Human
accagcagaaucagugccuagccugugcccag

SEQ ID NO: 300140 - RNA, 32 nt, Human
accagcagacccagaaguggugggugaaacac

SEQ ID NO: 300141 - RNA, 32 nt, Human
accagcagaggcagauccuggacuuggaccug

SEQ ID NO: 300142 - RNA, 32 nt, Human
accagcagcacaauucugucccugucccugcc

SEQ ID NO: 300143 - RNA, 32 nt, Human
accagcagcagaccagucacaaaaagagauga

SEQ ID NO: 300144 - RNA, 32 nt, Human
accagcagccaagaaggaaccacugugguauc

SEQ ID NO: 300145 - RNA, 32 nt, Human
accagcagcccauccaccccaguggcucacuu

SEQ ID NO: 300146 - RNA, 32 nt, Human
accagcagcccauggggccugaagggaaauga

SEQ ID NO: 300147 - RNA, 32 nt, Human
accagcagccucccccguugccccucuggauc

SEQ ID NO: 300148 - RNA, 20 nt, Human
accagcagcgcaucccggcg

SEQ ID NO: 300149 - RNA, 32 nt, Human
accagcagcuacuagggagaagucugcaagau

SEQ ID NO: 300150 - RNA, 32 nt, Human
accagcagcucggaauaguugcacugaaucua

SEQ ID NO: 300151 - RNA, 32 nt, Human
accagcaggaggaggaggagaagaaacuauuu

SEQ ID NO: 300152 - RNA, 32 nt, Human
accagcaggaugaaugcaagacugacagugau

SEQ ID NO: 300153 - RNA, 32 nt, Human
accagcaggcagaugaccagagagccugagcc

SEQ ID NO: 300154 - RNA, 32 nt, Human
accagcagggguugccgccagaccagagccag

SEQ ID NO: 300155 - RNA, 31 nt, Human
accagcaguggaagagaaaauacuguaagcu

SEQ ID NO: 300156 - RNA, 32 nt, Human
accagcaucccuccucuccccaaggugaagug

SEQ ID NO: 300157 - RNA, 32 nt, Human
accagcaucggccuggcccucacgguguccgc

SEQ ID NO: 300158 - RNA, 32 nt, Human
accagcaucuccacccuccgccccacuccagc

SEQ ID NO: 300159 - RNA, 32 nt, Human
accagcaucucccuccugagaugccggccucu

SEQ ID NO: 300160 - RNA, 32 nt, Human
accagcaucuguuugggaagauaaaagaaaaa

SEQ ID NO: 300161 - RNA, 32 nt, Human
accagcaugaacaccaagcuggggguggacag

SEQ ID NO: 300162 - RNA, 24 nt, Human
accagcaugaccaacauggagaaa

SEQ ID NO: 300163 - RNA, 24 nt, Human
accagcaugaccaacauggcgaaa

SEQ ID NO: 300164 - RNA, 24 nt, Human
accagcaugaccaacauggugaaa

SEQ ID NO: 300165 - RNA, 24 nt, Human
accagcauggccaacauagugaga

SEQ ID NO: 300166 - RNA, 24 nt, Human
accagcauggccaaccuggugaaa

SEQ ID NO: 300167 - RNA, 32 nt, Human
accagcaugguggaacccccaucucuacuaaa

SEQ ID NO: 300168 - RNA, 32 nt, Human
accagcauuaaaggguaauuacccacacggcu

SEQ ID NO: 300169 - RNA, 18 nt, Human
accagcauuaacauggua

SEQ ID NO: 300170 - RNA, 32 nt, Human
accagcauuacugcaccucuuguuagacucug

SEQ ID NO: 300171 - RNA, 19 nt, Human
accagcauucuugcugcug

SEQ ID NO: 300172 - RNA, 32 nt, Human
accagcauuugcaaauguccauagggagcagg

SEQ ID NO: 300173 - RNA, 32 nt, Human
accagccaagagccuucccuugaaguccccaa

SEQ ID NO: 300174 - RNA, 24 nt, Human
accagccaaggcaacauggugaaa

SEQ ID NO: 300175 - RNA, 32 nt, Human
accagccaauggcaaccaagaccaaagccagc

SEQ ID NO: 300176 - RNA, 32 nt, Human
accagccaccacaucaucccagagcugagcuc

SEQ ID NO: 300177 - RNA, 32 nt, Human
accagccaccccaucccuccccuacccaucug

SEQ ID NO: 300178 - RNA, 32 nt, Human
accagccacccgcaccuugccugcugccacua

SEQ ID NO: 300179 - RNA, 32 nt, Human
accagccaccucugcaaccugccaccuccugc

SEQ ID NO: 300180 - RNA, 32 nt, Human
accagccacuccugaugggguugcucacacug

SEQ ID NO: 300181 - RNA, 32 nt, Human
accagccacugcagcccuccagcucuggcccu

SEQ ID NO: 300182 - RNA, 21 nt, Human
accagccacugcaggcagcau

SEQ ID NO: 300183 - RNA, 32 nt, Human
accagccagaagcacggagcgcagggcaggac

SEQ ID NO: 300184 - RNA, 32 nt, Human
accagccagaagcaugcagugacauugcacaa

SEQ ID NO: 300185 - RNA, 24 nt, Human
accagccagaccaacaugaugaaa

SEQ ID NO: 300186 - RNA, 32 nt, Human
accagccagagcaacacagugagacccccauc

SEQ ID NO: 300187 - RNA, 32 nt, Human
accagccagccaugagcgccuuccugcagaac

SEQ ID NO: 300188 - RNA, 32 nt, Human
accagccagcugggugauugcucagcgugaag

SEQ ID NO: 300189 - RNA, 19 nt, Human
accagccaggacagggccu

SEQ ID NO: 300190 - RNA, 24 nt, Human
accagccaggccaacauggugaaa

SEQ ID NO: 300191 - RNA, 32 nt, Human
accagccagggaugugagcaugaguuuaggaa

SEQ ID NO: 300192 - RNA, 32 nt, Human
accagccagggcaacacagugagaccccuucu

SEQ ID NO: 300193 - RNA, 32 nt, Human
accagccagggcaacauaauaagacuuuucuc

SEQ ID NO: 300194 - RNA, 32 nt, Human
accagccagggcaacaugaugagacccugucu

SEQ ID NO: 300195 - RNA, 24 nt, Human
accagccagggcaacauggugaaa

SEQ ID NO: 300196 - RNA, 24 nt, Human
accagccagggcaacauggugaga

SEQ ID NO: 300197 - RNA, 32 nt, Human
accagccagggugccauccugcaggcccugag

SEQ ID NO: 300198 - RNA, 32 nt, Human
accagcccaagugccgucuuagccauucagug

SEQ ID NO: 300199 - RNA, 32 nt, Human
accagcccaccuuggcccuccggcaagcuaga

SEQ ID NO: 300200 - RNA, 19 nt, Human
accagcccagccaacaugg

SEQ ID NO: 300201 - RNA, 21 nt, Human
accagcccagccaacauggca

SEQ ID NO: 300202 - RNA, 24 nt, Human
accagcccagccaacauggcgaaa

SEQ ID NO: 300203 - RNA, 20 nt, Human
accagcccagccaacauggu

SEQ ID NO: 300204 - RNA, 21 nt, Human
accagcccagccaacauggug

SEQ ID NO: 300205 - RNA, 24 nt, Human
accagcccagccaacauggugaaa

SEQ ID NO: 300206 - RNA, 32 nt, Human
accagcccagccuggucaacauggcaaaaccc

SEQ ID NO: 300207 - RNA, 24 nt, Human
accagcccaggcaacauggugaaa

SEQ ID NO: 300208 - RNA, 32 nt, Human
accagcccaggcaauaguguugaggaggggag

SEQ ID NO: 300209 - RNA, 32 nt, Human
accagcccaggcccucaggaggaggagauacc

SEQ ID NO: 300210 - RNA, 32 nt, Human
accagcccagugcgcccugccgccgcgcuugg

SEQ ID NO: 300211 - RNA, 32 nt, Human
accagcccaguuucaaacuccugaccucaggu

SEQ ID NO: 300212 - RNA, 32 nt, Human
accagcccauaggugggaugucaagacccauc

SEQ ID NO: 300213 - RNA, 22 nt, Human
accagccccaauccaaaacugg

SEQ ID NO: 300214 - RNA, 32 nt, Human
accagccccacugucagcagcaccgagccggg

SEQ ID NO: 300215 - RNA, 32 nt, Human
accagccccacugucucuaaccacuccugggc

SEQ ID NO: 300216 - RNA, 32 nt, Human
accagccccaggcuccugugcugguugcacgc

SEQ ID NO: 300217 - RNA, 16 nt, Human
accagccccaguauca

SEQ ID NO: 300218 - RNA, 32 nt, Human
accagcccccggcagaggcugagguggcagug

SEQ ID NO: 300219 - RNA, 32 nt, Human
accagcccccuuucaccuccagugccacaaua

SEQ ID NO: 300220 - RNA, 32 nt, Human
accagccccucagauaccacuuggccacuccc

SEQ ID NO: 300221 - RNA, 32 nt, Human
accagccccuccacucuuuggccucuucgaca

SEQ ID NO: 300222 - RNA, 32 nt, Human
accagccccucuucugugccuugucugagguc

SEQ ID NO: 300223 - RNA, 32 nt, Human
accagccccugccaugcucucacccugcauau

SEQ ID NO: 300224 - RNA, 24 nt, Human
accagcccgcccaauauggugaaa

SEQ ID NO: 300225 - RNA, 32 nt, Human
accagcccgcgggccagcaccauggaggacgu

SEQ ID NO: 300226 - RNA, 32 nt, Human
accagcccggacaacauggcgaaaccucaucu

SEQ ID NO: 300227 - RNA, 21 nt, Human
accagcccggccaacauggug

SEQ ID NO: 300228 - RNA, 24 nt, Human
accagcccggccaacauggugaaa

SEQ ID NO: 300229 - RNA, 18 nt, Human
accagcccggcccauggu

SEQ ID NO: 300230 - RNA, 19 nt, Human
accagcccgggcaacaugg

SEQ ID NO: 300231 - RNA, 32 nt, Human
accagcccucagagaccugagcucuucuggcc

SEQ ID NO: 300232 - RNA, 22 nt, Human
accagcccucagcaugaggaaa

SEQ ID NO: 300233 - RNA, 32 nt, Human
accagcccuccagagcaggagacuggcaagag

SEQ ID NO: 300234 - RNA, 32 nt, Human
accagcccucccccaucuucuucuuccuccuc

SEQ ID NO: 300235 - RNA, 32 nt, Human
accagcccucgaucccagcccccggagaggac

SEQ ID NO: 300236 - RNA, 32 nt, Human
accagcccuggcaacauugugagacccaucuc

SEQ ID NO: 300237 - RNA, 32 nt, Human
accagcccuggugggcaugggguggggagcag

SEQ ID NO: 300238 - RNA, 32 nt, Human
accagcccuucuguggccucacucucugaaaa

SEQ ID NO: 300239 - RNA, 32 nt, Human
accagcccuugcccaugguggggaggacaucu

SEQ ID NO: 300240 - RNA, 32 nt, Human
accagcccuuguucuguucccuaccgguacca

SEQ ID NO: 300241 - RNA, 32 nt, Human
accagccggaaguuuucugucacuggacgcca

SEQ ID NO: 300242 - RNA, 21 nt, Human
accagccgggccaacauggug

SEQ ID NO: 300243 - RNA, 24 nt, Human
accagccgggccaacauggugaaa

SEQ ID NO: 300244 - RNA, 24 nt, Human
accagccgggccagcauggugaaa

SEQ ID NO: 300245 - RNA, 32 nt, Human
accagccguuuccugcgugcucugccguuggu

SEQ ID NO: 300246 - RNA, 24 nt, Human
accagccuaaacaacauagugaaa

SEQ ID NO: 300247 - RNA, 32 nt, Human
accagccuaaacaacauagugaaacccugucu

SEQ ID NO: 300248 - RNA, 19 nt, Human
accagccuaaccaacaugg

SEQ ID NO: 300249 - RNA, 24 nt, Human
accagccuaaccaacauggagaaa

SEQ ID NO: 300250 - RNA, 24 nt, Human
accagccuaaccaacauggcgaaa

SEQ ID NO: 300251 - RNA, 20 nt, Human
accagccuaaccaacguggu

SEQ ID NO: 300252 - RNA, 21 nt, Human
accagccuaaccaacguggua

SEQ ID NO: 300253 - RNA, 32 nt, Human
accagccuaagagaagcuaaagaagucuugaa

SEQ ID NO: 300254 - RNA, 24 nt, Human
accagccuacccaacauggugaaa

SEQ ID NO: 300255 - RNA, 32 nt, Human
accagccuagacaacauggugaaaccuugucu

SEQ ID NO: 300256 - RNA, 18 nt, Human
accagccuagccaacaug

SEQ ID NO: 300257 - RNA, 24 nt, Human
accagccuagccaacaugcugaaa

SEQ ID NO: 300258 - RNA, 19 nt, Human
accagccuagccaacaugg

SEQ ID NO: 300259 - RNA, 21 nt, Human
accagccuagccaacauggca

SEQ ID NO: 300260 - RNA, 21 nt, Human
accagccuagccaacauggug

SEQ ID NO: 300261 - RNA, 24 nt, Human
accagccuagccaacauggugaaa

SEQ ID NO: 300262 - RNA, 21 nt, Human
accagccuagccaacguggug

SEQ ID NO: 300263 - RNA, 24 nt, Human
accagccuagccaacguggugaaa

SEQ ID NO: 300264 - RNA, 21 nt, Human
accagccuagccaagauggug

SEQ ID NO: 300265 - RNA, 24 nt, Human
accagccuagccaagauggugaaa

SEQ ID NO: 300266 - RNA, 21 nt, Human
accagccuagccuacauggug

SEQ ID NO: 300267 - RNA, 24 nt, Human
accagccuagccuacauggugaaa

SEQ ID NO: 300268 - RNA, 20 nt, Human
accagccuagcuaacauggu

SEQ ID NO: 300269 - RNA, 21 nt, Human
accagccuagcuaacauggua

SEQ ID NO: 300270 - RNA, 32 nt, Human
accagccuagcuaacaugguaaaacucugucu

SEQ ID NO: 300271 - RNA, 21 nt, Human
accagccuaggcaacacagug

SEQ ID NO: 300272 - RNA, 24 nt, Human
accagccuaggcaacacagugaaa

SEQ ID NO: 300273 - RNA, 21 nt, Human
accagccuaggcaacauagca

SEQ ID NO: 300274 - RNA, 24 nt, Human
accagccuaggcaacauagugaga

SEQ ID NO: 300275 - RNA, 24 nt, Human
accagccuaggcaacauggagaaa

SEQ ID NO: 300276 - RNA, 24 nt, Human
accagccuaggcaacauggcgaaa

SEQ ID NO: 300277 - RNA, 24 nt, Human
accagccuaggcaacauggugaaa

SEQ ID NO: 300278 - RNA, 24 nt, Human
accagccuaggcagcauagugaga

SEQ ID NO: 300279 - RNA, 24 nt, Human
accagccuagguaacauagugaga

SEQ ID NO: 300280 - RNA, 32 nt, Human
accagccuagguaacauagugagacccccuau

SEQ ID NO: 300281 - RNA, 32 nt, Human
accagccuaggugacaaagugagaccccaucu

SEQ ID NO: 300282 - RNA, 32 nt, Human
accagccuaggugacagaaugagacccugucu

SEQ ID NO: 300283 - RNA, 24 nt, Human
accagccuaggugacauagugaga

SEQ ID NO: 300284 - RNA, 32 nt, Human
accagccuaggugacauagugagaccccaucu

SEQ ID NO: 300285 - RNA, 19 nt, Human
accagccuauccccaggua

SEQ ID NO: 300286 - RNA, 32 nt, Human
accagccucaaaccacaacgggggccagcugc

SEQ ID NO: 300287 - RNA, 32 nt, Human
accagccucaaauugugcaaccaugauguaua

SEQ ID NO: 300288 - RNA, 32 nt, Human
accagccucacagccacacgggggaagcagag

SEQ ID NO: 300289 - RNA, 32 nt, Human
accagccucacggagaaggcgcagucccuguc

SEQ ID NO: 300290 - RNA, 32 nt, Human
accagccucacuccccaucccaaccagagaug

SEQ ID NO: 300291 - RNA, 21 nt, Human
accagccucaucaacacagug

SEQ ID NO: 300292 - RNA, 24 nt, Human
accagccucaucaacacagugaaa

SEQ ID NO: 300293 - RNA, 24 nt, Human
accagccucaucaacauagugaga

SEQ ID NO: 300294 - RNA, 32 nt, Human
accagccucaucaacauagugagaccccaucu

SEQ ID NO: 300295 - RNA, 32 nt, Human
accagccuccagccuuuggcaggauggagcuu

SEQ ID NO: 300296 - RNA, 32 nt, Human
accagccucccugccaggugggccacagugac

SEQ ID NO: 300297 - RNA, 19 nt, Human
accagccuccggaacaggg

SEQ ID NO: 300298 - RNA, 32 nt, Human
accagccuccugaaagaaacaggugugucuuu

SEQ ID NO: 300299 - RNA, 24 nt, Human
accagccucgccaacauggcgaaa

SEQ ID NO: 300300 - RNA, 24 nt, Human
accagccucgccaacauggugaga

SEQ ID NO: 300301 - RNA, 32 nt, Human
accagccucgccaacauggugagacccugucu

SEQ ID NO: 300302 - RNA, 32 nt, Human
accagccucuugguuaggcagcugaggccuca

SEQ ID NO: 300303 - RNA, 24 nt, Human
accagccugaacaacauggugaaa

SEQ ID NO: 300304 - RNA, 24 nt, Human
accagccugacaaacauggagaaa

SEQ ID NO: 300305 - RNA, 19 nt, Human
accagccugaccaaaaugg

SEQ ID NO: 300306 - RNA, 24 nt, Human
accagccugaccaaaauggagaaa

SEQ ID NO: 300307 - RNA, 21 nt, Human
accagccugaccaaaauggug

SEQ ID NO: 300308 - RNA, 24 nt, Human
accagccugaccaaaauggugaaa

SEQ ID NO: 300309 - RNA, 20 nt, Human
accagccugaccaaacaugg

SEQ ID NO: 300310 - RNA, 24 nt, Human
accagccugaccaaacauggcgaa

SEQ ID NO: 300311 - RNA, 22 nt, Human
accagccugaccaacaacaugg

SEQ ID NO: 300312 - RNA, 27 nt, Human
accagccugaccaacaacauggagaaa

SEQ ID NO: 300313 - RNA, 18 nt, Human
accagccugaccaacacg

SEQ ID NO: 300314 - RNA, 24 nt, Human
accagccugaccaacacgaugaaa

SEQ ID NO: 300315 - RNA, 19 nt, Human
accagccugaccaacacgg

SEQ ID NO: 300316 - RNA, 24 nt, Human
accagccugaccaacacggagaaa

SEQ ID NO: 300317 - RNA, 21 nt, Human
accagccugaccaacacggug

SEQ ID NO: 300318 - RNA, 24 nt, Human
accagccugaccaacacggugaaa

SEQ ID NO: 300319 - RNA, 22 nt, Human
accagccugaccaacacugaga

SEQ ID NO: 300320 - RNA, 21 nt, Human
accagccugaccaacauagug

SEQ ID NO: 300321 - RNA, 24 nt, Human
accagccugaccaacauagugaaa

SEQ ID NO: 300322 - RNA, 21 nt, Human
accagccugaccaacaucgug

SEQ ID NO: 300323 - RNA, 24 nt, Human
accagccugaccaacaucgugaaa

SEQ ID NO: 300324 - RNA, 18 nt, Human
accagccugaccaacaug

SEQ ID NO: 300325 - RNA, 19 nt, Human
accagccugaccaacaugg

SEQ ID NO: 300326 - RNA, 24 nt, Human
accagccugaccaacauggagaaa

SEQ ID NO: 300327 - RNA, 24 nt, Human
accagccugaccaacauggagaag

SEQ ID NO: 300328 - RNA, 24 nt, Human
accagccugaccaacauggcgaaa

SEQ ID NO: 300329 - RNA, 22 nt, Human
accagccugaccaacaugggga

SEQ ID NO: 300330 - RNA, 21 nt, Human
accagccugaccaacauggua

SEQ ID NO: 300331 - RNA, 24 nt, Human
accagccugaccaacaugguagaa

SEQ ID NO: 300332 - RNA, 21 nt, Human
accagccugaccaacauggug

SEQ ID NO: 300333 - RNA, 24 nt, Human
accagccugaccaacauggugaaa

SEQ ID NO: 300334 - RNA, 23 nt, Human
accagccugaccaacauggugag

SEQ ID NO: 300335 - RNA, 24 nt, Human
accagccugaccaacauggugaga

SEQ ID NO: 300336 - RNA, 32 nt, Human
accagccugaccaacauggugagacccugucu

SEQ ID NO: 300337 - RNA, 19 nt, Human
accagccugaccaacgugg

SEQ ID NO: 300338 - RNA, 24 nt, Human
accagccugaccaacguggagaaa

SEQ ID NO: 300339 - RNA, 24 nt, Human
accagccugaccaacguggcgaaa

SEQ ID NO: 300340 - RNA, 21 nt, Human
accagccugaccaacguggug

SEQ ID NO: 300341 - RNA, 24 nt, Human
accagccugaccaacguggugaaa

SEQ ID NO: 300342 - RNA, 21 nt, Human
accagccugaccaagguggug

SEQ ID NO: 300343 - RNA, 24 nt, Human
accagccugaccaagguggugaaa

SEQ ID NO: 300344 - RNA, 21 nt, Human
accagccugaccaauauagug

SEQ ID NO: 300345 - RNA, 24 nt, Human
accagccugaccaauauagugaaa

SEQ ID NO: 300346 - RNA, 18 nt, Human
accagccugaccaauaug

SEQ ID NO: 300347 - RNA, 24 nt, Human
accagccugaccaauaugaugaaa

SEQ ID NO: 300348 - RNA, 19 nt, Human
accagccugaccaauaugg

SEQ ID NO: 300349 - RNA, 24 nt, Human
accagccugaccaauauggagaaa

SEQ ID NO: 300350 - RNA, 21 nt, Human
accagccugaccaauauggug

SEQ ID NO: 300351 - RNA, 24 nt, Human
accagccugaccaauauggugaaa

SEQ ID NO: 300352 - RNA, 19 nt, Human
accagccugaccaccaugg

SEQ ID NO: 300353 - RNA, 24 nt, Human
accagccugaccaccauggagaaa

SEQ ID NO: 300354 - RNA, 21 nt, Human
accagccugaccagcauggug

SEQ ID NO: 300355 - RNA, 24 nt, Human
accagccugaccagcaugguggaa

SEQ ID NO: 300356 - RNA, 19 nt, Human
accagccugaccagcgugg

SEQ ID NO: 300357 - RNA, 24 nt, Human
accagccugaccagcguggagaaa

SEQ ID NO: 300358 - RNA, 21 nt, Human
accagccugaccaucauggug

SEQ ID NO: 300359 - RNA, 24 nt, Human
accagccugaccaucauggugaaa

SEQ ID NO: 300360 - RNA, 19 nt, Human
accagccugacccacaugg

SEQ ID NO: 300361 - RNA, 24 nt, Human
accagccugacccacauggagaaa

SEQ ID NO: 300362 - RNA, 19 nt, Human
accagccugaccgacaugg

SEQ ID NO: 300363 - RNA, 24 nt, Human
accagccugaccgacauggagaaa

SEQ ID NO: 300364 - RNA, 24 nt, Human
accagccugacuaacaugcugaaa

SEQ ID NO: 300365 - RNA, 22 nt, Human
accagccugacugacauugaga

SEQ ID NO: 300366 - RNA, 24 nt, Human
accagccugagcaacauagcgaga

SEQ ID NO: 300367 - RNA, 24 nt, Human
accagccugagcaacauagugaga

SEQ ID NO: 300368 - RNA, 32 nt, Human
accagccugagcaacauagugagacccugucu

SEQ ID NO: 300369 - RNA, 24 nt, Human
accagccugagcaacaugaugaaa

SEQ ID NO: 300370 - RNA, 24 nt, Human
accagccugagcaacaugaugaga

SEQ ID NO: 300371 - RNA, 32 nt, Human
accagccugagcaacaugaugagaccccaucu

SEQ ID NO: 300372 - RNA, 24 nt, Human
accagccugagcaacauggcgaaa

SEQ ID NO: 300373 - RNA, 20 nt, Human
accagccugagcaacauggu

SEQ ID NO: 300374 - RNA, 21 nt, Human
accagccugagcaacauggua

SEQ ID NO: 300375 - RNA, 32 nt, Human
accagccugagcaaccuaaugagacccucccu

SEQ ID NO: 300376 - RNA, 32 nt, Human
accagccugaguaacaugaugagacccccauc

SEQ ID NO: 300377 - RNA, 19 nt, Human
accagccugagucgcggug

SEQ ID NO: 300378 - RNA, 24 nt, Human
accagccugaucaacauggugaaa

SEQ ID NO: 300379 - RNA, 24 nt, Human
accagccugaucaacguggugaaa

SEQ ID NO: 300380 - RNA, 32 nt, Human
accagccugcagcacaccccacagccaaguag

SEQ ID NO: 300381 - RNA, 23 nt, Human
accagccugccaacauggugaaa

SEQ ID NO: 300382 - RNA, 24 nt, Human
accagccugcccaacauagugaaa

SEQ ID NO: 300383 - RNA, 19 nt, Human
accagccugcccaacaugg

SEQ ID NO: 300384 - RNA, 24 nt, Human
accagccugcccaacauggugaaa

SEQ ID NO: 300385 - RNA, 32 nt, Human
accagccugccugacuucugcaaaccuacccu

SEQ ID NO: 300386 - RNA, 32 nt, Human
accagccugccuggucacugacugcuuacucu

SEQ ID NO: 300387 - RNA, 32 nt, Human
accagccugccuggucacugcugcuuacucua

SEQ ID NO: 300388 - RNA, 32 nt, Human
accagccuggacaacaaagcaagaccccaucu

SEQ ID NO: 300389 - RNA, 32 nt, Human
accagccuggacaacacagcagaccccgucuu

SEQ ID NO: 300390 - RNA, 21 nt, Human
accagccuggacaacacagug

SEQ ID NO: 300391 - RNA, 24 nt, Human
accagccuggacaacacagugaga

SEQ ID NO: 300392 - RNA, 32 nt, Human
accagccuggacaacacagugagaccucaucu

SEQ ID NO: 300393 - RNA, 32 nt, Human
accagccuggacaacagagcgagacucugugu

SEQ ID NO: 300394 - RNA, 24 nt, Human
accagccuggacaacauaaugaga

SEQ ID NO: 300395 - RNA, 32 nt, Human
accagccuggacaacauaaugagacccucguc

SEQ ID NO: 300396 - RNA, 32 nt, Human
accagccuggacaacauagcaagaccucaucu

SEQ ID NO: 300397 - RNA, 32 nt, Human
accagccuggacaacauaggaagauccaucuc

SEQ ID NO: 300398 - RNA, 32 nt, Human
accagccuggacaacauaggaagaucccaucu

SEQ ID NO: 300399 - RNA, 24 nt, Human
accagccuggacaacauagugaga

SEQ ID NO: 300400 - RNA, 32 nt, Human
accagccuggacaacauagugagacccccauc

SEQ ID NO: 300401 - RNA, 32 nt, Human
accagccuggacaacauagugagaccccgucu

SEQ ID NO: 300402 - RNA, 32 nt, Human
accagccuggacaacauagugagaccucgucu

SEQ ID NO: 300403 - RNA, 32 nt, Human
accagccuggacaacauagugagaccuugucu

SEQ ID NO: 300404 - RNA, 32 nt, Human
accagccuggacaacaucgugaaaccuugucu

SEQ ID NO: 300405 - RNA, 19 nt, Human
accagccuggacaacaugg

SEQ ID NO: 300406 - RNA, 32 nt, Human
accagccuggacaacauggcaaaacccugucu

SEQ ID NO: 300407 - RNA, 24 nt, Human
accagccuggacaacauggcaaga

SEQ ID NO: 300408 - RNA, 32 nt, Human
accagccuggacaacauggcaagacccauuuc

SEQ ID NO: 300409 - RNA, 23 nt, Human
accagccuggacaacaugggaaa

SEQ ID NO: 300410 - RNA, 32 nt, Human
accagccuggacaacaugggaaaacccugucu

SEQ ID NO: 300411 - RNA, 22 nt, Human
accagccuggacaacaugguga

SEQ ID NO: 300412 - RNA, 24 nt, Human
accagccuggacaacauggugaaa

SEQ ID NO: 300413 - RNA, 32 nt, Human
accagccuggacaacauggugaaaccccaucu

SEQ ID NO: 300414 - RNA, 32 nt, Human
accagccuggacaacauggugaaaccccgucu

SEQ ID NO: 300415 - RNA, 32 nt, Human
accagccuggacaacauggugaaaccccuucu

SEQ ID NO: 300416 - RNA, 32 nt, Human
accagccuggacaacauggugaaacccuaucu

SEQ ID NO: 300417 - RNA, 32 nt, Human
accagccuggacaacauggugaaacccuucuc

SEQ ID NO: 300418 - RNA, 32 nt, Human
accagccuggacaacauggugaacccgucucu

SEQ ID NO: 300419 - RNA, 24 nt, Human
accagccuggacaacauggugaga

SEQ ID NO: 300420 - RNA, 32 nt, Human
accagccuggacaacauggugagaccucgucu

SEQ ID NO: 300421 - RNA, 32 nt, Human
accagccuggacaacauugugaaaccuugucu

SEQ ID NO: 300422 - RNA, 24 nt, Human
accagccuggacaauauagugaaa

SEQ ID NO: 300423 - RNA, 32 nt, Human
accagccuggacaauauagugaaaccccgucu

SEQ ID NO: 300424 - RNA, 32 nt, Human
accagccuggacaaucuggcgaaaccccauuu

SEQ ID NO: 300425 - RNA, 32 nt, Human
accagccuggacagcuuagugagaucccgucu

SEQ ID NO: 300426 - RNA, 24 nt, Human
accagccuggacuacauggugaaa

SEQ ID NO: 300427 - RNA, 24 nt, Human
accagccuggaugacagagcgaaa

SEQ ID NO: 300428 - RNA, 24 nt, Human
accagccuggaugacauaaugaga

SEQ ID NO: 300429 - RNA, 32 nt, Human
accagccuggaugacauaaugagauucugucu

SEQ ID NO: 300430 - RNA, 19 nt, Human
accagccuggcaaacaugg

SEQ ID NO: 300431 - RNA, 24 nt, Human
accagccuggcaaacauggcgaaa

SEQ ID NO: 300432 - RNA, 23 nt, Human
accagccuggcaacauagugaga

SEQ ID NO: 300433 - RNA, 18 nt, Human
accagccuggcaacaugg

SEQ ID NO: 300434 - RNA, 23 nt, Human
accagccuggcaacauggcaaga

SEQ ID NO: 300435 - RNA, 21 nt, Human
accagccuggccaaaacagug

SEQ ID NO: 300436 - RNA, 24 nt, Human
accagccuggccaaaacagugaaa

SEQ ID NO: 300437 - RNA, 18 nt, Human
accagccuggccaaaaug

SEQ ID NO: 300438 - RNA, 24 nt, Human
accagccuggccaaaaugaugaaa

SEQ ID NO: 300439 - RNA, 21 nt, Human
accagccuggccaaaauggug

SEQ ID NO: 300440 - RNA, 24 nt, Human
accagccuggccaaaauggugaaa

SEQ ID NO: 300441 - RNA, 22 nt, Human
accagccuggccaaacauggug

SEQ ID NO: 300442 - RNA, 25 nt, Human
accagccuggccaaacauggugaaa

SEQ ID NO: 300443 - RNA, 20 nt, Human
accagccuggccaaauggug

SEQ ID NO: 300444 - RNA, 23 nt, Human
accagccuggccaaauggugaaa

SEQ ID NO: 300445 - RNA, 19 nt, Human
accagccuggccaacaagg

SEQ ID NO: 300446 - RNA, 24 nt, Human
accagccuggccaacaaggcgaaa

SEQ ID NO: 300447 - RNA, 21 nt, Human
accagccuggccaacaaggug

SEQ ID NO: 300448 - RNA, 24 nt, Human
accagccuggccaacaaggugaaa

SEQ ID NO: 300449 - RNA, 24 nt, Human
accagccuggccaacacaaugaaa

SEQ ID NO: 300450 - RNA, 20 nt, Human
accagccuggccaacacagu

SEQ ID NO: 300451 - RNA, 21 nt, Human
accagccuggccaacacagua

SEQ ID NO: 300452 - RNA, 21 nt, Human
accagccuggccaacacagug

SEQ ID NO: 300453 - RNA, 24 nt, Human
accagccuggccaacacagugaaa

SEQ ID NO: 300454 - RNA, 18 nt, Human
accagccuggccaacacg

SEQ ID NO: 300455 - RNA, 24 nt, Human
accagccuggccaacacgaugaaa

SEQ ID NO: 300456 - RNA, 19 nt, Human
accagccuggccaacacgg

SEQ ID NO: 300457 - RNA, 21 nt, Human
accagccuggccaacacggug

SEQ ID NO: 300458 - RNA, 24 nt, Human
accagccuggccaacacggugaaa

SEQ ID NO: 300459 - RNA, 24 nt, Human
accagccuggccaacacggugaga

SEQ ID NO: 300460 - RNA, 32 nt, Human
accagccuggccaacacggugagacccugucu

SEQ ID NO: 300461 - RNA, 21 nt, Human
accagccuggccaacacuggu

SEQ ID NO: 300462 - RNA, 21 nt, Human
accagccuggccaacagggug

SEQ ID NO: 300463 - RNA, 24 nt, Human
accagccuggccaacagggugaaa

SEQ ID NO: 300464 - RNA, 20 nt, Human
accagccuggccaacaggug

SEQ ID NO: 300465 - RNA, 23 nt, Human
accagccuggccaacaggugaaa

SEQ ID NO: 300466 - RNA, 24 nt, Human
accagccuggccaacauaaugaaa

SEQ ID NO: 300467 - RNA, 32 nt, Human
accagccuggccaacauaaugaaaccccaucu

SEQ ID NO: 300468 - RNA, 21 nt, Human
accagccuggccaacauagca

SEQ ID NO: 300469 - RNA, 24 nt, Human
accagccuggccaacauagcgaaa

SEQ ID NO: 300470 - RNA, 24 nt, Human
accagccuggccaacauagcgaga

SEQ ID NO: 300471 - RNA, 20 nt, Human
accagccuggccaacauagg

SEQ ID NO: 300472 - RNA, 24 nt, Human
accagccuggccaacauagggaaa

SEQ ID NO: 300473 - RNA, 21 nt, Human
accagccuggccaacauagug

SEQ ID NO: 300474 - RNA, 24 nt, Human
accagccuggccaacauagugaaa

SEQ ID NO: 300475 - RNA, 24 nt, Human
accagccuggccaacauauaguga

SEQ ID NO: 300476 - RNA, 18 nt, Human
accagccuggccaacaug

SEQ ID NO: 300477 - RNA, 24 nt, Human
accagccuggccaacaugacgaaa

SEQ ID NO: 300478 - RNA, 24 nt, Human
accagccuggccaacaugaugaaa

SEQ ID NO: 300479 - RNA, 24 nt, Human
accagccuggccaacaugaugaga

SEQ ID NO: 300480 - RNA, 32 nt, Human
accagccuggccaacaugaugagaccuccguc

SEQ ID NO: 300481 - RNA, 19 nt, Human
accagccuggccaacaugg

SEQ ID NO: 300482 - RNA, 24 nt, Human
accagccuggccaacauggagaaa

SEQ ID NO: 300483 - RNA, 24 nt, Human
accagccuggccaacauggcaaga

SEQ ID NO: 300484 - RNA, 23 nt, Human
accagccuggccaacauggcgaa

SEQ ID NO: 300485 - RNA, 24 nt, Human
accagccuggccaacauggcgaaa

SEQ ID NO: 300486 - RNA, 24 nt, Human
accagccuggccaacauggcgaga

SEQ ID NO: 300487 - RNA, 24 nt, Human
accagccuggccaacauggcggaa

SEQ ID NO: 300488 - RNA, 24 nt, Human
accagccuggccaacauggggaaa

SEQ ID NO: 300489 - RNA, 20 nt, Human
accagccuggccaacauggu

SEQ ID NO: 300490 - RNA, 21 nt, Human
accagccuggccaacauggua

SEQ ID NO: 300491 - RNA, 24 nt, Human
accagccuggccaacauggucaaa

SEQ ID NO: 300492 - RNA, 21 nt, Human
accagccuggccaacauggug

SEQ ID NO: 300493 - RNA, 22 nt, Human
accagccuggccaacaugguga

SEQ ID NO: 300494 - RNA, 23 nt, Human
accagccuggccaacauggugaa

SEQ ID NO: 300495 - RNA, 24 nt, Human
accagccuggccaacauggugaaa

SEQ ID NO: 300496 - RNA, 24 nt, Human
accagccuggccaacauggugaag

SEQ ID NO: 300497 - RNA, 23 nt, Human
accagccuggccaacauggugag

SEQ ID NO: 300498 - RNA, 24 nt, Human
accagccuggccaacauggugaga

SEQ ID NO: 300499 - RNA, 32 nt, Human
accagccuggccaacauggugagaccccaucu

SEQ ID NO: 300500 - RNA, 32 nt, Human
accagccuggccaacauggugagacccugucu

SEQ ID NO: 300501 - RNA, 24 nt, Human
accagccuggccaacaugguggaa

SEQ ID NO: 300502 - RNA, 24 nt, Human
accagccuggccaacaugguuaaa

SEQ ID NO: 300503 - RNA, 23 nt, Human
accagccuggccaacaugugaaa

SEQ ID NO: 300504 - RNA, 21 nt, Human
accagccuggccaacauugug

SEQ ID NO: 300505 - RNA, 24 nt, Human
accagccuggccaacauugugaaa

SEQ ID NO: 300506 - RNA, 25 nt, Human
accagccuggccaaccaacauggug

SEQ ID NO: 300507 - RNA, 28 nt, Human
accagccuggccaaccaacauggugaaa

SEQ ID NO: 300508 - RNA, 21 nt, Human
accagccuggccaaccuggug

SEQ ID NO: 300509 - RNA, 24 nt, Human
accagccuggccaaccuggugaaa

SEQ ID NO: 300510 - RNA, 19 nt, Human
accagccuggccaacgugg

SEQ ID NO: 300511 - RNA, 24 nt, Human
accagccuggccaacguggggaaa

SEQ ID NO: 300512 - RNA, 21 nt, Human
accagccuggccaacguggug

SEQ ID NO: 300513 - RNA, 24 nt, Human
accagccuggccaacguggugaaa

SEQ ID NO: 300514 - RNA, 32 nt, Human
accagccuggccaacguggugagacccugucu

SEQ ID NO: 300515 - RNA, 24 nt, Human
accagccuggccaacugccugaaa

SEQ ID NO: 300516 - RNA, 24 nt, Human
accagccuggccaacuugaugaaa

SEQ ID NO: 300517 - RNA, 19 nt, Human
accagccuggccaacuugg

SEQ ID NO: 300518 - RNA, 24 nt, Human
accagccuggccaacuuggagaaa

SEQ ID NO: 300519 - RNA, 21 nt, Human
accagccuggccaacuuggug

SEQ ID NO: 300520 - RNA, 24 nt, Human
accagccuggccaacuuggugaaa

SEQ ID NO: 300521 - RNA, 19 nt, Human
accagccuggccaagaugg

SEQ ID NO: 300522 - RNA, 24 nt, Human
accagccuggccaagauggcgaaa

SEQ ID NO: 300523 - RNA, 21 nt, Human
accagccuggccaagauggug

SEQ ID NO: 300524 - RNA, 24 nt, Human
accagccuggccaagauggugaaa

SEQ ID NO: 300525 - RNA, 24 nt, Human
accagccuggccaagaugguggaa

SEQ ID NO: 300526 - RNA, 19 nt, Human
accagccuggccaaggcgg

SEQ ID NO: 300527 - RNA, 21 nt, Human
accagccuggccaauaaggug

SEQ ID NO: 300528 - RNA, 24 nt, Human
accagccuggccaauaaggugaaa

SEQ ID NO: 300529 - RNA, 18 nt, Human
accagccuggccaauacg

SEQ ID NO: 300530 - RNA, 24 nt, Human
accagccuggccaauacgaugaaa

SEQ ID NO: 300531 - RNA, 19 nt, Human
accagccuggccaauacgg

SEQ ID NO: 300532 - RNA, 19 nt, Human
accagccuggccaauaugg

SEQ ID NO: 300533 - RNA, 20 nt, Human
accagccuggccaauauggu

SEQ ID NO: 300534 - RNA, 21 nt, Human
accagccuggccaauauggua

SEQ ID NO: 300535 - RNA, 21 nt, Human
accagccuggccaauauggug

SEQ ID NO: 300536 - RNA, 24 nt, Human
accagccuggccaauauggugaaa

SEQ ID NO: 300537 - RNA, 24 nt, Human
accagccuggccaauauggugaga

SEQ ID NO: 300538 - RNA, 32 nt, Human
accagccuggccaauauggugagaccccaucu

SEQ ID NO: 300539 - RNA, 21 nt, Human
accagccuggccaauguagug

SEQ ID NO: 300540 - RNA, 24 nt, Human
accagccuggccaauguagugaaa

SEQ ID NO: 300541 - RNA, 18 nt, Human
accagccuggccaaugug

SEQ ID NO: 300542 - RNA, 24 nt, Human
accagccuggccaaugugaugaaa

SEQ ID NO: 300543 - RNA, 21 nt, Human
accagccuggccaauguggug

SEQ ID NO: 300544 - RNA, 24 nt, Human
accagccuggccaauguggugaaa

SEQ ID NO: 300545 - RNA, 18 nt, Human
accagccuggccacaugg

SEQ ID NO: 300546 - RNA, 20 nt, Human
accagccuggccacauggug

SEQ ID NO: 300547 - RNA, 23 nt, Human
accagccuggccacauggugaaa

SEQ ID NO: 300548 - RNA, 21 nt, Human
accagccuggccaccauggug

SEQ ID NO: 300549 - RNA, 24 nt, Human
accagccuggccaccauggugaaa

SEQ ID NO: 300550 - RNA, 24 nt, Human
accagccuggccaccauggugaga

SEQ ID NO: 300551 - RNA, 32 nt, Human
accagccuggccaccauggugagaccccgucu

SEQ ID NO: 300552 - RNA, 24 nt, Human
accagccuggccaccuuagugaga

SEQ ID NO: 300553 - RNA, 18 nt, Human
accagccuggccagacgc

SEQ ID NO: 300554 - RNA, 21 nt, Human
accagccuggccagcauagug

SEQ ID NO: 300555 - RNA, 24 nt, Human
accagccuggccagcauagugaaa

SEQ ID NO: 300556 - RNA, 19 nt, Human
accagccuggccagcaugg

SEQ ID NO: 300557 - RNA, 24 nt, Human
accagccuggccagcauggcgaaa

SEQ ID NO: 300558 - RNA, 21 nt, Human
accagccuggccagcauggug

SEQ ID NO: 300559 - RNA, 24 nt, Human
accagccuggccagcauggugaaa

SEQ ID NO: 300560 - RNA, 32 nt, Human
accagccuggccagcauggugagaccccgucu

SEQ ID NO: 300561 - RNA, 21 nt, Human
accagccuggccaguauggug

SEQ ID NO: 300562 - RNA, 24 nt, Human
accagccuggccaguauggugaaa

SEQ ID NO: 300563 - RNA, 21 nt, Human
accagccuggccaucauggug

SEQ ID NO: 300564 - RNA, 24 nt, Human
accagccuggccaucauggugaaa

SEQ ID NO: 300565 - RNA, 24 nt, Human
accagccuggcccaaauggugaaa

SEQ ID NO: 300566 - RNA, 21 nt, Human
accagccuggcccacauggug

SEQ ID NO: 300567 - RNA, 24 nt, Human
accagccuggcccacauggugaaa

SEQ ID NO: 300568 - RNA, 20 nt, Human
accagccuggcccguauggu

SEQ ID NO: 300569 - RNA, 21 nt, Human
accagccuggcccguauggua

SEQ ID NO: 300570 - RNA, 19 nt, Human
accagccuggccgacaugg

SEQ ID NO: 300571 - RNA, 24 nt, Human
accagccuggccgacauggcgaaa

SEQ ID NO: 300572 - RNA, 21 nt, Human
accagccuggccgacauggug

SEQ ID NO: 300573 - RNA, 24 nt, Human
accagccuggccgacauggugaaa

SEQ ID NO: 300574 - RNA, 21 nt, Human
accagccuggccgggguggug

SEQ ID NO: 300575 - RNA, 24 nt, Human
accagccuggccgggguggugaaa

SEQ ID NO: 300576 - RNA, 24 nt, Human
accagccuggcgaacauagugaga

SEQ ID NO: 300577 - RNA, 21 nt, Human
accagccuggcuaacacagug

SEQ ID NO: 300578 - RNA, 24 nt, Human
accagccuggcuaacacagugaaa

SEQ ID NO: 300579 - RNA, 19 nt, Human
accagccuggcuaacaugg

SEQ ID NO: 300580 - RNA, 24 nt, Human
accagccuggcuaacauggugaaa

SEQ ID NO: 300581 - RNA, 24 nt, Human
accagccuggcuaauauggugaaa

SEQ ID NO: 300582 - RNA, 24 nt, Human
accagccuggcuagcauggcgaaa

SEQ ID NO: 300583 - RNA, 24 nt, Human
accagccuggcuuacauggugaaa

SEQ ID NO: 300584 - RNA, 24 nt, Human
accagccugggaaacauagcgaaa

SEQ ID NO: 300585 - RNA, 24 nt, Human
accagccugggaaacauagugaga

SEQ ID NO: 300586 - RNA, 19 nt, Human
accagccugggaaacaugg

SEQ ID NO: 300587 - RNA, 20 nt, Human
accagccugggaaacauggu

SEQ ID NO: 300588 - RNA, 21 nt, Human
accagccugggaaacauggua

SEQ ID NO: 300589 - RNA, 24 nt, Human
accagccugggaaauauagugaaa

SEQ ID NO: 300590 - RNA, 19 nt, Human
accagccugggaagcaugg

SEQ ID NO: 300591 - RNA, 21 nt, Human
accagccugggcaacaaagua

SEQ ID NO: 300592 - RNA, 32 nt, Human
accagccugggcaacaaagugagacccccauc

SEQ ID NO: 300593 - RNA, 22 nt, Human
accagccugggcaacaaugaga

SEQ ID NO: 300594 - RNA, 20 nt, Human
accagccugggcaacacagc

SEQ ID NO: 300595 - RNA, 32 nt, Human
accagccugggcaacacagcaagacucugucu

SEQ ID NO: 300596 - RNA, 24 nt, Human
accagccugggcaacacagcgaga

SEQ ID NO: 300597 - RNA, 20 nt, Human
accagccugggcaacacagg

SEQ ID NO: 300598 - RNA, 21 nt, Human
accagccugggcaacacagua

SEQ ID NO: 300599 - RNA, 21 nt, Human
accagccugggcaacacagug

SEQ ID NO: 300600 - RNA, 22 nt, Human
accagccugggcaacacaguga

SEQ ID NO: 300601 - RNA, 24 nt, Human
accagccugggcaacacagugaga

SEQ ID NO: 300602 - RNA, 21 nt, Human
accagccugggcaacacggug

SEQ ID NO: 300603 - RNA, 24 nt, Human
accagccugggcaacacggugaaa

SEQ ID NO: 300604 - RNA, 21 nt, Human
accagccugggcaacagggua

SEQ ID NO: 300605 - RNA, 18 nt, Human
accagccugggcaacaua

SEQ ID NO: 300606 - RNA, 32 nt, Human
accagccugggcaacauaagaaggcccccgga

SEQ ID NO: 300607 - RNA, 32 nt, Human
accagccugggcaacauaauaagaccucaugu

SEQ ID NO: 300608 - RNA, 24 nt, Human
accagccugggcaacauaaugaga

SEQ ID NO: 300609 - RNA, 32 nt, Human
accagccugggcaacauaaugagacccuguuu

SEQ ID NO: 300610 - RNA, 32 nt, Human
accagccugggcaacauaaugagaccucaugu

SEQ ID NO: 300611 - RNA, 20 nt, Human
accagccugggcaacauagc

SEQ ID NO: 300612 - RNA, 32 nt, Human
accagccugggcaacauagcaagacucugucu

SEQ ID NO: 300613 - RNA, 22 nt, Human
accagccugggcaacauagcga

SEQ ID NO: 300614 - RNA, 24 nt, Human
accagccugggcaacauagcgaga

SEQ ID NO: 300615 - RNA, 20 nt, Human
accagccugggcaacauagu

SEQ ID NO: 300616 - RNA, 21 nt, Human
accagccugggcaacauagua

SEQ ID NO: 300617 - RNA, 22 nt, Human
accagccugggcaacauaguga

SEQ ID NO: 300618 - RNA, 24 nt, Human
accagccugggcaacauagugaaa

SEQ ID NO: 300619 - RNA, 24 nt, Human
accagccugggcaacauagugaga

SEQ ID NO: 300620 - RNA, 32 nt, Human
accagccugggcaacauagugagacccaaucu

SEQ ID NO: 300621 - RNA, 32 nt, Human
accagccugggcaacauagugagaccccaucu

SEQ ID NO: 300622 - RNA, 32 nt, Human
accagccugggcaacauagugagacccccauc

SEQ ID NO: 300623 - RNA, 32 nt, Human
accagccugggcaacauagugagacccugccu

SEQ ID NO: 300624 - RNA, 32 nt, Human
accagccugggcaacauagugagacccuguau

SEQ ID NO: 300625 - RNA, 32 nt, Human
accagccugggcaacaugacaaaacugcaacu

SEQ ID NO: 300626 - RNA, 19 nt, Human
accagccugggcaacaugg

SEQ ID NO: 300627 - RNA, 24 nt, Human
accagccugggcaacauggagaaa

SEQ ID NO: 300628 - RNA, 24 nt, Human
accagccugggcaacauggcaaga

SEQ ID NO: 300629 - RNA, 24 nt, Human
accagccugggcaacauggcgaaa

SEQ ID NO: 300630 - RNA, 24 nt, Human
accagccugggcaacauggcgaga

SEQ ID NO: 300631 - RNA, 24 nt, Human
accagccugggcaacauggggaaa

SEQ ID NO: 300632 - RNA, 20 nt, Human
accagccugggcaacauggu

SEQ ID NO: 300633 - RNA, 21 nt, Human
accagccugggcaacauggua

SEQ ID NO: 300634 - RNA, 22 nt, Human
accagccugggcaacaugguga

SEQ ID NO: 300635 - RNA, 24 nt, Human
accagccugggcaacauggugaaa

SEQ ID NO: 300636 - RNA, 24 nt, Human
accagccugggcaacauggugaag

SEQ ID NO: 300637 - RNA, 24 nt, Human
accagccugggcaacauggugaga

SEQ ID NO: 300638 - RNA, 32 nt, Human
accagccugggcaacauggugagaccccaucu

SEQ ID NO: 300639 - RNA, 32 nt, Human
accagccugggcaacauggugagaccccgucu

SEQ ID NO: 300640 - RNA, 32 nt, Human
accagccugggcaaccuaaugagaguuccucc

SEQ ID NO: 300641 - RNA, 22 nt, Human
accagccugggcaacguggcga

SEQ ID NO: 300642 - RNA, 24 nt, Human
accagccugggcaacguggcgaaa

SEQ ID NO: 300643 - RNA, 24 nt, Human
accagccugggcaacguggugaaa

SEQ ID NO: 300644 - RNA, 32 nt, Human
accagccugggcaacgugguggugugcaccug

SEQ ID NO: 300645 - RNA, 24 nt, Human
accagccugggcaagauggugaaa

SEQ ID NO: 300646 - RNA, 32 nt, Human
accagccugggcaauagagugagacccugucu

SEQ ID NO: 300647 - RNA, 32 nt, Human
accagccugggcaauauagugagaccccaucu

SEQ ID NO: 300648 - RNA, 32 nt, Human
accagccugggcaauaucgugagaccccaucu

SEQ ID NO: 300649 - RNA, 22 nt, Human
accagccugggcaccaugguga

SEQ ID NO: 300650 - RNA, 24 nt, Human
accagccugggcaccauggugaaa

SEQ ID NO: 300651 - RNA, 24 nt, Human
accagccugggcaccauggugaga

SEQ ID NO: 300652 - RNA, 32 nt, Human
accagccugggcaccauggugagaccccaucu

SEQ ID NO: 300653 - RNA, 23 nt, Human
accagccugggcagcagcaagaa

SEQ ID NO: 300654 - RNA, 32 nt, Human
accagccugggcagcaucgugagacccccguu

SEQ ID NO: 300655 - RNA, 18 nt, Human
accagccugggcagcaug

SEQ ID NO: 300656 - RNA, 24 nt, Human
accagccugggcagcauggugaaa

SEQ ID NO: 300657 - RNA, 18 nt, Human
accagccugggccacacg

SEQ ID NO: 300658 - RNA, 21 nt, Human
accagccugggcgacacggug

SEQ ID NO: 300659 - RNA, 24 nt, Human
accagccugggcgacacggugaaa

SEQ ID NO: 300660 - RNA, 32 nt, Human
accagccugggcuacagagcaagaccucaucu

SEQ ID NO: 300661 - RNA, 24 nt, Human
accagccugggcuacauagugaga

SEQ ID NO: 300662 - RNA, 24 nt, Human
accagccuggggaacauaaugaga

SEQ ID NO: 300663 - RNA, 24 nt, Human
accagccuggggaacauagugaga

SEQ ID NO: 300664 - RNA, 32 nt, Human
accagccuggggaacauagugagacccuuucu

SEQ ID NO: 300665 - RNA, 32 nt, Human
accagccuggguaacaaagugagacccccauc

SEQ ID NO: 300666 - RNA, 18 nt, Human
accagccuggguaacacg

SEQ ID NO: 300667 - RNA, 32 nt, Human
accagccuggguaacauagcaagacucugucg

SEQ ID NO: 300668 - RNA, 24 nt, Human
accagccuggguaacauagugaga

SEQ ID NO: 300669 - RNA, 32 nt, Human
accagccuggguaacauagugagacccuaucu

SEQ ID NO: 300670 - RNA, 19 nt, Human
accagccuggguaacaugg

SEQ ID NO: 300671 - RNA, 24 nt, Human
accagccuggguaacauggugaaa

SEQ ID NO: 300672 - RNA, 32 nt, Human
accagccugggugacacagcaagaccccaucu

SEQ ID NO: 300673 - RNA, 32 nt, Human
accagccugggugacagagcaagacucuuauc

SEQ ID NO: 300674 - RNA, 28 nt, Human
accagccugggugacagagcgagacucc

SEQ ID NO: 300675 - RNA, 32 nt, Human
accagccugggugacagagggagacccugucu

SEQ ID NO: 300676 - RNA, 32 nt, Human
accagccugggugacagugugagacccagccu

SEQ ID NO: 300677 - RNA, 20 nt, Human
accagccugggugcccggug

SEQ ID NO: 300678 - RNA, 23 nt, Human
accagccugguaaaauagugaga

SEQ ID NO: 300679 - RNA, 23 nt, Human
accagccugguaacauggugaaa

SEQ ID NO: 300680 - RNA, 19 nt, Human
accagccuggucaacaugg

SEQ ID NO: 300681 - RNA, 24 nt, Human
accagccuggucaacauggcgaaa

SEQ ID NO: 300682 - RNA, 20 nt, Human
accagccuggucaacauggu

SEQ ID NO: 300683 - RNA, 21 nt, Human
accagccuggucaacauggua

SEQ ID NO: 300684 - RNA, 24 nt, Human
accagccuggucaacauggugaaa

SEQ ID NO: 300685 - RNA, 20 nt, Human
accagccuggucaacuuggu

SEQ ID NO: 300686 - RNA, 24 nt, Human
accagccuggucaagauggugaaa

SEQ ID NO: 300687 - RNA, 24 nt, Human
accagccuggucaauauggugaaa

SEQ ID NO: 300688 - RNA, 24 nt, Human
accagccuggugaacauggcgaaa

SEQ ID NO: 300689 - RNA, 24 nt, Human
accagccugguuaacauggugaaa

SEQ ID NO: 300690 - RNA, 23 nt, Human
accagccugguuucauaccgaaa

SEQ ID NO: 300691 - RNA, 24 nt, Human
accagccuguccaacauggugaaa

SEQ ID NO: 300692 - RNA, 32 nt, Human
accagccuguggaguucaggaggcgagacauc

SEQ ID NO: 300693 - RNA, 24 nt, Human
accagccuguucaacauggcgaaa

SEQ ID NO: 300694 - RNA, 32 nt, Human
accagccuguucugcuacuggugaauggcaag

SEQ ID NO: 300695 - RNA, 24 nt, Human
accagccuuaccaacauggagaaa

SEQ ID NO: 300696 - RNA, 24 nt, Human
accagccuucccaacauggugaaa

SEQ ID NO: 300697 - RNA, 24 nt, Human
accagccuugacaacauggugaaa

SEQ ID NO: 300698 - RNA, 32 nt, Human
accagccuugacaacauggugaaaccccaucu

SEQ ID NO: 300699 - RNA, 32 nt, Human
accagccuugcagccaggugcaguggcucaca

SEQ ID NO: 300700 - RNA, 21 nt, Human
accagccuugccaacacagug

SEQ ID NO: 300701 - RNA, 24 nt, Human
accagccuugccaacacagugaaa

SEQ ID NO: 300702 - RNA, 24 nt, Human
accagccuugccaacauagugaaa

SEQ ID NO: 300703 - RNA, 24 nt, Human
accagccuugccaacauggugaaa

SEQ ID NO: 300704 - RNA, 24 nt, Human
accagccuuggcaacauggugaaa

SEQ ID NO: 300705 - RNA, 25 nt, Human
accagccuuggccaacauggcgaaa

SEQ ID NO: 300706 - RNA, 32 nt, Human
accagccuugggcacagcuccacccaucaccc

SEQ ID NO: 300707 - RNA, 24 nt, Human
accagccuugggcuacuaccgagg

SEQ ID NO: 300708 - RNA, 32 nt, Human
accagcgacucugcccuguggcugcuuugcac

SEQ ID NO: 300709 - RNA, 32 nt, Human
accagcgccccagccccgaggcucagaagcgg

SEQ ID NO: 300710 - RNA, 32 nt, Human
accagcggccagagccucagugacugccaccc

SEQ ID NO: 300711 - RNA, 32 nt, Human
accagcggccccgccugugcccucucugcccg

SEQ ID NO: 300712 - RNA, 32 nt, Human
accagcggcccugcuugcuccguagcugggaa

SEQ ID NO: 300713 - RNA, 32 nt, Human
accagcggcuaugcagguggucugagcucggc

SEQ ID NO: 300714 - RNA, 32 nt, Human
accagcgggccucauccuacacccucaccacc

SEQ ID NO: 300715 - RNA, 32 nt, Human
accagcggggugcuugccauucugugauaaua

SEQ ID NO: 300716 - RNA, 32 nt, Human
accagcggucagaaucagucagccucugucau

SEQ ID NO: 300717 - RNA, 32 nt, Human
accagcguaccugagcagauguguagucucuc

SEQ ID NO: 300718 - RNA, 32 nt, Human
accagcgucgcagcagcaaggaggcuuguguc

SEQ ID NO: 300719 - RNA, 32 nt, Human
accagcgucgguggaggaagggguauaagcua

SEQ ID NO: 300720 - RNA, 24 nt, Human
accagcgugagggcauccccugga

SEQ ID NO: 300721 - RNA, 32 nt, Human
accagcgugagugagcugggccagcagcaggg

SEQ ID NO: 300722 - RNA, 32 nt, Human
accagcgugcaggaggacaagacgggcggcaa

SEQ ID NO: 300723 - RNA, 24 nt, Human
accagcguggccaacaugaugaaa

SEQ ID NO: 300724 - RNA, 24 nt, Human
accagcguggcuaacacggugaaa

SEQ ID NO: 300725 - RNA, 32 nt, Human
accagcguuacugcaccaugccaugccugagg

SEQ ID NO: 300726 - RNA, 32 nt, Human
accagcuacaaugaguaaucuaaugucugcag

SEQ ID NO: 300727 - RNA, 32 nt, Human
accagcuaccuaccaccucccaccuccacccc

SEQ ID NO: 300728 - RNA, 18 nt, Human
accagcuagccccuucca

SEQ ID NO: 300729 - RNA, 32 nt, Human
accagcucaaagauuccaugaguuucaucgag

SEQ ID NO: 300730 - RNA, 32 nt, Human
accagcucaaaugccaccuccaguaccagcuu

SEQ ID NO: 300731 - RNA, 32 nt, Human
accagcucacugcagccuugaccuccugggcu

SEQ ID NO: 300732 - RNA, 32 nt, Human
accagcucagccacagcagagccaaucacaga

SEQ ID NO: 300733 - RNA, 20 nt, Human
accagcucaggcuacugcca

SEQ ID NO: 300734 - RNA, 32 nt, Human
accagcucauguuuggaaaaggaaucuuccac

SEQ ID NO: 300735 - RNA, 16 nt, Human
accagcuccaggugcu

SEQ ID NO: 300736 - RNA, 23 nt, Human
accagcuccccagaggccugcca

SEQ ID NO: 300737 - RNA, 32 nt, Human
accagcuccggcuccauuguucccgcccgggc

SEQ ID NO: 300738 - RNA, 32 nt, Human
accagcuccuccagucaugcucuugucccuca

SEQ ID NO: 300739 - RNA, 32 nt, Human
accagcuccugccucacaauggccucgucugg

SEQ ID NO: 300740 - RNA, 32 nt, Human
accagcuccugcucagaacucucuucaggcag

SEQ ID NO: 300741 - RNA, 32 nt, Human
accagcuccuggucaggagacugagcugucau

SEQ ID NO: 300742 - RNA, 32 nt, Human
accagcucgaucucuaaucugcuucaguucau

SEQ ID NO: 300743 - RNA, 32 nt, Human
accagcucgcauggcugcugggcauggccauu

SEQ ID NO: 300744 - RNA, 32 nt, Human
accagcucgcccucccccuacccggggccgca

SEQ ID NO: 300745 - RNA, 32 nt, Human
accagcucggucaggggcugcuuggcgcggca

SEQ ID NO: 300746 - RNA, 32 nt, Human
accagcucucagagaaaugcuggguaucccug

SEQ ID NO: 300747 - RNA, 32 nt, Human
accagcucucuguucugcucugugcccaacug

SEQ ID NO: 300748 - RNA, 32 nt, Human
accagcucugcagccagccuauggcaauuaua

SEQ ID NO: 300749 - RNA, 32 nt, Human
accagcucugcuaagaugcuccuggccccucc

SEQ ID NO: 300750 - RNA, 32 nt, Human
accagcucugcugacacuuugaucucaagcuc

SEQ ID NO: 300751 - RNA, 20 nt, Human
accagcucuggcuucugcuc

SEQ ID NO: 300752 - RNA, 32 nt, Human
accagcucuggggaaagcuacugugaacuagg

SEQ ID NO: 300753 - RNA, 32 nt, Human
accagcucuuucucucaccccaccagcuacag

SEQ ID NO: 300754 - RNA, 20 nt, Human
accagcugaaaacagcagca

SEQ ID NO: 300755 - RNA, 32 nt, Human
accagcugaaggccugguggggccaagggagg

SEQ ID NO: 300756 - RNA, 23 nt, Human
accagcugaccuagaagcagcau

SEQ ID NO: 300757 - RNA, 32 nt, Human
accagcugaggcagaggcugcaagggguggag

SEQ ID NO: 300758 - RNA, 32 nt, Human
accagcugagggagcuuguacaacaccuuaug

SEQ ID NO: 300759 - RNA, 32 nt, Human
accagcugcacugguuucguggaaggaagcuc

SEQ ID NO: 300760 - RNA, 31 nt, Human
accagcugccucuuugcugcuuuguuuuccu

SEQ ID NO: 300761 - RNA, 32 nt, Human
accagcugccuguccaguuggccuauggaagg

SEQ ID NO: 300762 - RNA, 32 nt, Human
accagcugcgcgcggagcggugcaaugcagca

SEQ ID NO: 300763 - RNA, 32 nt, Human
accagcuggacgccaugcuggacuggcccucc

SEQ ID NO: 300764 - RNA, 23 nt, Human
accagcuggccaacaugguggaa

SEQ ID NO: 300765 - RNA, 32 nt, Human
accagcugggagaggugugggucagucauggg

SEQ ID NO: 300766 - RNA, 32 nt, Human
accagcugggaggacugguugugcugcuggag

SEQ ID NO: 300767 - RNA, 32 nt, Human
accagcugggauuacagguaugagccaccgca

SEQ ID NO: 300768 - RNA, 23 nt, Human
accagcugggcaacauggugaaa

SEQ ID NO: 300769 - RNA, 32 nt, Human
accagcugggcaacauggugaaaccccaucuc

SEQ ID NO: 300770 - RNA, 32 nt, Human
accagcugggcaacauggugaaacccugucuc

SEQ ID NO: 300771 - RNA, 22 nt, Human
accagcugggccccaccacggc

SEQ ID NO: 300772 - RNA, 19 nt, Human
accagcugggccccugcgc

SEQ ID NO: 300773 - RNA, 19 nt, Human
accagcugggcgcgcagca

SEQ ID NO: 300774 - RNA, 32 nt, Human
accagcuggggagcuagagggagcaggcccaa

SEQ ID NO: 300775 - RNA, 23 nt, Human
accagcuggguccagcuagcagc

SEQ ID NO: 300776 - RNA, 19 nt, Human
accagcugggucggucuca

SEQ ID NO: 300777 - RNA, 32 nt, Human
accagcuguaaucccagcuacuugggaggcug

SEQ ID NO: 300778 - RNA, 32 nt, Human
accagcugucucaguggaggaguguuugccua

SEQ ID NO: 300779 - RNA, 32 nt, Human
accagcugugcuucaguuucucucacuuugcc

SEQ ID NO: 300780 - RNA, 32 nt, Human
accagcuguguaguacagacagggcucaccga

SEQ ID NO: 300781 - RNA, 32 nt, Human
accagcugugugaccuugggcaagacauuucc

SEQ ID NO: 300782 - RNA, 32 nt, Human
accagcuuacugggugcccaugcugaugucua

SEQ ID NO: 300783 - RNA, 21 nt, Human
accagcuuagccaacauagua

SEQ ID NO: 300784 - RNA, 24 nt, Human
accagcuuaggcaacacggugaaa

SEQ ID NO: 300785 - RNA, 21 nt, Human
accagcuuaggcaacauagca

SEQ ID NO: 300786 - RNA, 32 nt, Human
accagcuucaaggagcggaaggcuggcuugag

SEQ ID NO: 300787 - RNA, 32 nt, Human
accagcuuccagggcggcuuggaguccggggg

SEQ ID NO: 300788 - RNA, 32 nt, Human
accagcuucccaaagggaucuacucaccauug

SEQ ID NO: 300789 - RNA, 32 nt, Human
accagcuucccugaugucugcagccauggcuu

SEQ ID NO: 300790 - RNA, 32 nt, Human
accagcuucucacuccaguuucaaguggcuau

SEQ ID NO: 300791 - RNA, 32 nt, Human
accagcuucuggaccuggagagaggaugaaag

SEQ ID NO: 300792 - RNA, 24 nt, Human
accagcuugaccaacauggagaaa

SEQ ID NO: 300793 - RNA, 24 nt, Human
accagcuugaccaacauggugaaa

SEQ ID NO: 300794 - RNA, 24 nt, Human
accagcuuggccaacauagugaaa

SEQ ID NO: 300795 - RNA, 24 nt, Human
accagcuuggccaacauggagaaa

SEQ ID NO: 300796 - RNA, 24 nt, Human
accagcuuggccaacauggcgaaa

SEQ ID NO: 300797 - RNA, 23 nt, Human
accagcuuggccaacaugggaaa

SEQ ID NO: 300798 - RNA, 24 nt, Human
accagcuuggccaacauggugaaa

SEQ ID NO: 300799 - RNA, 24 nt, Human
accagcuuggccaacauggugaag

SEQ ID NO: 300800 - RNA, 24 nt, Human
accagcuuggccaagauggugaaa

SEQ ID NO: 300801 - RNA, 32 nt, Human
accagcuuggccaaggugauaaaacccgucuc

SEQ ID NO: 300802 - RNA, 24 nt, Human
accagcuuggccaauauagugaaa

SEQ ID NO: 300803 - RNA, 32 nt, Human
accagcuugggcaacauaagaagaccgugucu

SEQ ID NO: 300804 - RNA, 32 nt, Human
accagcuugggcaacauagugagacccugucu

SEQ ID NO: 300805 - RNA, 32 nt, Human
accagcuugguggggaaaggguuugaugaaua

SEQ ID NO: 300806 - RNA, 24 nt, Human
accagcuugugcaacauggugaaa

SEQ ID NO: 300807 - RNA, 32 nt, Human
accagcuugugucucugggagggcgcugcuuu

SEQ ID NO: 300808 - RNA, 32 nt, Human
accagcuuugcagugacagcuugaguggguuc

SEQ ID NO: 300809 - RNA, 32 nt, Human
accagcuuuucaaugaaaaaugagcuauccug

SEQ ID NO: 300810 - RNA, 32 nt, Human
accagcuuuuggcugugaagaccugagcaggg

SEQ ID NO: 300811 - RNA, 32 nt, Human
accaggaaaauguugguuuucaauccauguua

SEQ ID NO: 300812 - RNA, 32 nt, Human
accaggaaacaggcacacggggacagaggcgc

SEQ ID NO: 300813 - RNA, 32 nt, Human
accaggaaacuacagauugagauuagggggug

SEQ ID NO: 300814 - RNA, 32 nt, Human
accaggaaagaggaccccugcauuuuaucuuc

SEQ ID NO: 300815 - RNA, 32 nt, Human
accaggaaaggaagaaaggcagcuucacuucc

SEQ ID NO: 300816 - RNA, 32 nt, Human
accaggaaaugagauaggaggacuggaugagg

SEQ ID NO: 300817 - RNA, 31 nt, Human
accaggaacaacacacaucugggacaggagg

SEQ ID NO: 300818 - RNA, 32 nt, Human
accaggaacauguaacuuggagagggacgaag

SEQ ID NO: 300819 - RNA, 32 nt, Human
accaggaaccaauuucagguucuauaaauuuc

SEQ ID NO: 300820 - RNA, 32 nt, Human
accaggaacccggcgacugaggugcuuccagg

SEQ ID NO: 300821 - RNA, 19 nt, Human
accaggaacgcaggugcug

SEQ ID NO: 300822 - RNA, 32 nt, Human
accaggaagcaacccagcagugucagagagga

SEQ ID NO: 300823 - RNA, 32 nt, Human
accaggaagcaauucaucaccauccaaggccu

SEQ ID NO: 300824 - RNA, 32 nt, Human
accaggaagcagcuugaacuggauggagacuu

SEQ ID NO: 300825 - RNA, 32 nt, Human
accaggaagcagggccucaccggaugccaaac

SEQ ID NO: 300826 - RNA, 19 nt, Human
accaggaaggaauggaaaa

SEQ ID NO: 300827 - RNA, 32 nt, Human
accaggaaggcagagauugcagugagcugaga

SEQ ID NO: 300828 - RNA, 32 nt, Human
accaggaaggcagagguugcacugagcugaga

SEQ ID NO: 300829 - RNA, 32 nt, Human
accaggaaucuuuccuuccagcaucccuuuac

SEQ ID NO: 300830 - RNA, 32 nt, Human
accaggaaugagaccugcuccuucacuugggc

SEQ ID NO: 300831 - RNA, 32 nt, Human
accaggaauucaagaccagccugggcaacaca

SEQ ID NO: 300832 - RNA, 32 nt, Human
accaggacaaauccguugagaaagcacugugu

SEQ ID NO: 300833 - RNA, 32 nt, Human
accaggacaagcugcccuuccugucuccaccu

SEQ ID NO: 300834 - RNA, 32 nt, Human
accaggacaauauacaaguaaugcuggacaca

SEQ ID NO: 300835 - RNA, 32 nt, Human
accaggacacaaaaauccucuucaaaacuacu

SEQ ID NO: 300836 - RNA, 21 nt, Human
accaggacacccacgccucac

SEQ ID NO: 300837 - RNA, 32 nt, Human
accaggacacuacccugagaucugcacaguca

SEQ ID NO: 300838 - RNA, 32 nt, Human
accaggacaguuggaggggguaggccgagguu

SEQ ID NO: 300839 - RNA, 21 nt, Human
accaggaccaaagagccuuaa

SEQ ID NO: 300840 - RNA, 32 nt, Human
accaggaccacugcauuuaccagccugauacu

SEQ ID NO: 300841 - RNA, 32 nt, Human
accaggacccagaggguggagcucuucuuacc

SEQ ID NO: 300842 - RNA, 32 nt, Human
accaggacccagggagaggcugugucccugcu

SEQ ID NO: 300843 - RNA, 32 nt, Human
accaggaccuguggugagaagguuggggaaag

SEQ ID NO: 300844 - RNA, 32 nt, Human
accaggacucaucucccuuccuucucaggggg

SEQ ID NO: 300845 - RNA, 32 nt, Human
accaggacuccugcuuggagcuggccuuagaa

SEQ ID NO: 300846 - RNA, 32 nt, Human
accaggacugcugcugggcacugagcugccgc

SEQ ID NO: 300847 - RNA, 19 nt, Human
accaggacugugccugaac

SEQ ID NO: 300848 - RNA, 32 nt, Human
accaggagacggagguugcagugagcugaaau

SEQ ID NO: 300849 - RNA, 20 nt, Human
accaggagagguccaggugc

SEQ ID NO: 300850 - RNA, 32 nt, Human
accaggagaggugggggagggaaagugggcca

SEQ ID NO: 300851 - RNA, 32 nt, Human
accaggagcagggagaggccuggaacgguucu

SEQ ID NO: 300852 - RNA, 32 nt, Human
accaggagcaggggcauggagcacagugaggg

SEQ ID NO: 300853 - RNA, 19 nt, Human
accaggagcccccaaggag

SEQ ID NO: 300854 - RNA, 21 nt, Human
accaggagcccccaaggaguu

SEQ ID NO: 300855 - RNA, 18 nt, Human
accaggagcccggugcua

SEQ ID NO: 300856 - RNA, 32 nt, Human
accaggagcccuuggggcuccucugccuaugg

SEQ ID NO: 300857 - RNA, 32 nt, Human
accaggagcucagcugcaggaggcaggauggu

SEQ ID NO: 300858 - RNA, 32 nt, Human
accaggagcugauggcagcuggggcuagggga

SEQ ID NO: 300859 - RNA, 32 nt, Human
accaggaggaacagccugcagcucacuccaug

SEQ ID NO: 300860 - RNA, 31 nt, Human
accaggaggaaccugacucagaugcugaggu

SEQ ID NO: 300861 - RNA, 20 nt, Human
accaggaggacuggaugcug

SEQ ID NO: 300862 - RNA, 32 nt, Human
accaggaggaggaggaggaggaggaggagagc

SEQ ID NO: 300863 - RNA, 32 nt, Human
accaggaggaggcgugcucaaguaucgguacg

SEQ ID NO: 300864 - RNA, 32 nt, Human
accaggaggccccuggagcccagaucugucau

SEQ ID NO: 300865 - RNA, 32 nt, Human
accaggagggacugcugugcucucccuucucg

SEQ ID NO: 300866 - RNA, 32 nt, Human
accaggaggggcccaggagcugggugacgagg

SEQ ID NO: 300867 - RNA, 22 nt, Human
accaggaggggcccccaccuga

SEQ ID NO: 300868 - RNA, 32 nt, Human
accaggagggggcaaugggcccagccuuucug

SEQ ID NO: 300869 - RNA, 32 nt, Human
accaggaggguuugguuagcucacaggacuuc

SEQ ID NO: 300870 - RNA, 32 nt, Human
accaggagguugaggcugcagugagccgugau

SEQ ID NO: 300871 - RNA, 32 nt, Human
accaggaguaccuggaccuguccaugccccug

SEQ ID NO: 300872 - RNA, 32 nt, Human
accaggagucuggagugcaauggcacgaucuc

SEQ ID NO: 300873 - RNA, 32 nt, Human
accaggaguguggcaagccucccuggaagcag

SEQ ID NO: 300874 - RNA, 32 nt, Human
accaggaguuugagaccagccuaggcaacaua

SEQ ID NO: 300875 - RNA, 32 nt, Human
accaggaguuugaggcuucagugagcucuaau

SEQ ID NO: 300876 - RNA, 32 nt, Human
accaggaucccaagccuccugcugccacaaug

SEQ ID NO: 300877 - RNA, 32 nt, Human
accaggaucuaguuucuuucucucuacucugg

SEQ ID NO: 300878 - RNA, 32 nt, Human
accaggaugacaccuccauuucucuccaggaa

SEQ ID NO: 300879 - RNA, 32 nt, Human
accaggaugagagaggagagaggaauccacag

SEQ ID NO: 300880 - RNA, 32 nt, Human
accaggaugaggaagagaagaaaugaggagcc

SEQ ID NO: 300881 - RNA, 31 nt, Human
accaggaugaggucagagagugcacuggggu

SEQ ID NO: 300882 - RNA, 32 nt, Human
accaggaugcucugggacaccuuguccacguc

SEQ ID NO: 300883 - RNA, 32 nt, Human
accaggauggcagagagccagggcagagagag

SEQ ID NO: 300884 - RNA, 32 nt, Human
accaggauuuuucaaagaauucuugcugguga

SEQ ID NO: 300885 - RNA, 32 nt, Human
accaggcaacacagcaggaggugagcagccag

SEQ ID NO: 300886 - RNA, 32 nt, Human
accaggcaacauaacaagacccccaucucuac

SEQ ID NO: 300887 - RNA, 32 nt, Human
accaggcaaccucccaucccacccccgacccu

SEQ ID NO: 300888 - RNA, 32 nt, Human
accaggcaauagacaggagagaggugagaacu

SEQ ID NO: 300889 - RNA, 32 nt, Human
accaggcaccaggcuccugggcucuggggguu

SEQ ID NO: 300890 - RNA, 32 nt, Human
accaggcaccgcuguugagcagccugguggua

SEQ ID NO: 300891 - RNA, 32 nt, Human
accaggcacuauauuucaucuuugaggcuuuu

SEQ ID NO: 300892 - RNA, 32 nt, Human
accaggcacuguccuaagccauuuacaagcuu

SEQ ID NO: 300893 - RNA, 22 nt, Human
accaggcagagcugggccuuaa

SEQ ID NO: 300894 - RNA, 32 nt, Human
accaggcagaggaaucuggagcugucauuuua

SEQ ID NO: 300895 - RNA, 32 nt, Human
accaggcagagugggagccuaggucaggcccc

SEQ ID NO: 300896 - RNA, 32 nt, Human
accaggcagccauggccacugccuuccucucu

SEQ ID NO: 300897 - RNA, 22 nt, Human
accaggcagguuccuuccccca

SEQ ID NO: 300898 - RNA, 32 nt, Human
accaggcaugggggagcuggaggcagggacua

SEQ ID NO: 300899 - RNA, 32 nt, Human
accaggccaaagauuccacugugguccugaga

SEQ ID NO: 300900 - RNA, 32 nt, Human
accaggccaaagcggagcggagcgggggugag

SEQ ID NO: 300901 - RNA, 32 nt, Human
accaggccaacuagaacacccaacaccaaacu

SEQ ID NO: 300902 - RNA, 21 nt, Human
accaggccaccacccaccuga

SEQ ID NO: 300903 - RNA, 32 nt, Human
accaggccaccuggccaggccuucuaccuggg

SEQ ID NO: 300904 - RNA, 17 nt, Human
accaggccagaagaggu

SEQ ID NO: 300905 - RNA, 32 nt, Human
accaggccagagcaaacagaaaaagaagguug

SEQ ID NO: 300906 - RNA, 32 nt, Human
accaggccaggcuuccccuccuaccuggacuc

SEQ ID NO: 300907 - RNA, 32 nt, Human
accaggccaucagaggagaacccggccguuaa

SEQ ID NO: 300908 - RNA, 32 nt, Human
accaggcccacccucgucucugccugggugag

SEQ ID NO: 300909 - RNA, 25 nt, Human
accaggcccagagccaggggacagg

SEQ ID NO: 300910 - RNA, 32 nt, Human
accaggcccagccaaccagcauuucuuaaggu

SEQ ID NO: 300911 - RNA, 32 nt, Human
accaggcccagcugcagccacccggccucagg

SEQ ID NO: 300912 - RNA, 32 nt, Human
accaggcccagugcccucaaaugccucccuca

SEQ ID NO: 300913 - RNA, 22 nt, Human
accaggccccacccacaaggua

SEQ ID NO: 300914 - RNA, 22 nt, Human
accaggccccauacucccucca

SEQ ID NO: 300915 - RNA, 32 nt, Human
accaggcccuagucucggucagggagucugcu

SEQ ID NO: 300916 - RNA, 32 nt, Human
accaggcccugccauuggccucuugucccuug

SEQ ID NO: 300917 - RNA, 32 nt, Human
accaggcccugccccaucuccucugccaucuu

SEQ ID NO: 300918 - RNA, 32 nt, Human
accaggcccugccuaggcccugccgcagaacc

SEQ ID NO: 300919 - RNA, 32 nt, Human
accaggcccuugucugugcccuguccacaccc

SEQ ID NO: 300920 - RNA, 21 nt, Human
accaggccucauuucaccuga

SEQ ID NO: 300921 - RNA, 32 nt, Human
accaggccucuuuguuggcuuccuuuccuccu

SEQ ID NO: 300922 - RNA, 32 nt, Human
accaggccugcagggacccuccgaggauguag

SEQ ID NO: 300923 - RNA, 32 nt, Human
accaggccuggaaaagaaccagaaggaggcug

SEQ ID NO: 300924 - RNA, 32 nt, Human
accaggccuucauccuccuccccagcucuucu

SEQ ID NO: 300925 - RNA, 23 nt, Human
accaggccuuccugcucgacuga

SEQ ID NO: 300926 - RNA, 21 nt, Human
accaggccuuuccuggaggaa

SEQ ID NO: 300927 - RNA, 32 nt, Human
accaggcgaagagagaaauuaaagauuugagg

SEQ ID NO: 300928 - RNA, 32 nt, Human
accaggcgagcuccucuuucucucagagcugc

SEQ ID NO: 300929 - RNA, 31 nt, Human
accaggcgugguggcgggcacuuguaauccc

SEQ ID NO: 300930 - RNA, 32 nt, Human
accaggcuacuucuccccuccucuugccuccc

SEQ ID NO: 300931 - RNA, 26 nt, Human
accaggcucagagcucuccucuauca

SEQ ID NO: 300932 - RNA, 32 nt, Human
accaggcucccaggggauggggcagguggcug

SEQ ID NO: 300933 - RNA, 23 nt, Human
accaggcuccccugcaucccugg

SEQ ID NO: 300934 - RNA, 23 nt, Human
accaggcucccugcuccuccuga

SEQ ID NO: 300935 - RNA, 32 nt, Human
accaggcucucccggcugggcacugcguggcc

SEQ ID NO: 300936 - RNA, 32 nt, Human
accaggcugcagagcuaugaugcuucgggagc

SEQ ID NO: 300937 - RNA, 32 nt, Human
accaggcugcagccuccacuucccucguaguu

SEQ ID NO: 300938 - RNA, 32 nt, Human
accaggcugccaucagcacccacucaccaccc

SEQ ID NO: 300939 - RNA, 32 nt, Human
accaggcugccuggcaguuacugagugcuuau

SEQ ID NO: 300940 - RNA, 32 nt, Human
accaggcuggaaagggaccaggaaguuugaaa

SEQ ID NO: 300941 - RNA, 24 nt, Human
accaggcuggacaacauggugaaa

SEQ ID NO: 300942 - RNA, 32 nt, Human
accaggcuggagugcacuggcgcaaucucggc

SEQ ID NO: 300943 - RNA, 19 nt, Human
accaggcuggagugcagug

SEQ ID NO: 300944 - RNA, 21 nt, Human
accaggcuggccaacacggug

SEQ ID NO: 300945 - RNA, 24 nt, Human
accaggcuggccaacacggugaaa

SEQ ID NO: 300946 - RNA, 20 nt, Human
accaggcuggccaacauggu

SEQ ID NO: 300947 - RNA, 21 nt, Human
accaggcuggccaacauggua

SEQ ID NO: 300948 - RNA, 24 nt, Human
accaggcuggccaacauggugaaa

SEQ ID NO: 300949 - RNA, 24 nt, Human
accaggcuggccagcauggugaaa

SEQ ID NO: 300950 - RNA, 32 nt, Human
accaggcuggccuagacccagggaugagaaug

SEQ ID NO: 300951 - RNA, 20 nt, Human
accaggcugggcaacauagc

SEQ ID NO: 300952 - RNA, 18 nt, Human
accaggcugggugcaaug

SEQ ID NO: 300953 - RNA, 24 nt, Human
accaggcuggucaacauggcgaaa

SEQ ID NO: 300954 - RNA, 32 nt, Human
accaggcuggucuugaacugaccucaggugau

SEQ ID NO: 300955 - RNA, 32 nt, Human
accaggcugguuucgaacuccugggcuuaagu

SEQ ID NO: 300956 - RNA, 32 nt, Human
accaggcuguggaguguggccccuccugcggg

SEQ ID NO: 300957 - RNA, 32 nt, Human
accaggcuugcaaaugaacuucagacggaccu

SEQ ID NO: 300958 - RNA, 24 nt, Human
accaggcuuuccugcuccaccuga

SEQ ID NO: 300959 - RNA, 20 nt, Human
accaggcuuuccuugacccc

SEQ ID NO: 300960 - RNA, 15 nt, Human
accagggaaaggugu

SEQ ID NO: 300961 - RNA, 32 nt, Human
accagggaaccagccaaauacugugcagccgc

SEQ ID NO: 300962 - RNA, 32 nt, Human
accagggaagcggagguugcagugagccgagu

SEQ ID NO: 300963 - RNA, 20 nt, Human
accagggaaggaggcagcua

SEQ ID NO: 300964 - RNA, 18 nt, Human
accagggaagucuggugc

SEQ ID NO: 300965 - RNA, 32 nt, Human
accagggacauccugaguuugguggcuacuuc

SEQ ID NO: 300966 - RNA, 32 nt, Human
accagggaccuuuagaucuucagucuaacgcu

SEQ ID NO: 300967 - RNA, 24 nt, Human
accagggacuugccccagggcagc

SEQ ID NO: 300968 - RNA, 32 nt, Human
accagggagaaagugauccuugcucccugcag

SEQ ID NO: 300969 - RNA, 32 nt, Human
accagggagaaugaccauagggcacuaaguaa

SEQ ID NO: 300970 - RNA, 19 nt, Human
accagggagagagugacua

SEQ ID NO: 300971 - RNA, 20 nt, Human
accagggagaggagguacug

SEQ ID NO: 300972 - RNA, 32 nt, Human
accagggagcaguugcccucaggccugugccc

SEQ ID NO: 300973 - RNA, 32 nt, Human
accagggagcuuggaaaacaauaaacaucugu

SEQ ID NO: 300974 - RNA, 32 nt, Human
accagggaggaggagcuugcagugagccgaga

SEQ ID NO: 300975 - RNA, 32 nt, Human
accagggaggcagagauugcagugagccgaga

SEQ ID NO: 300976 - RNA, 32 nt, Human
accagggaggcagaggcugcggugagccgaga

SEQ ID NO: 300977 - RNA, 32 nt, Human
accagggaggcagagguugcagugagcccaga

SEQ ID NO: 300978 - RNA, 32 nt, Human
accagggaggcagagguugcagugagccgaga

SEQ ID NO: 300979 - RNA, 32 nt, Human
accagggaggcagagguuguggugagccgaga

SEQ ID NO: 300980 - RNA, 32 nt, Human
accagggaggcagaguuugcagugaauggaga

SEQ ID NO: 300981 - RNA, 32 nt, Human
accagggaggcggagguugcagcaagccaaga

SEQ ID NO: 300982 - RNA, 32 nt, Human
accagggaggcggagguugcagugagccgagg

SEQ ID NO: 300983 - RNA, 32 nt, Human
accagggaggcggagguugcugcaaagcaugg

SEQ ID NO: 300984 - RNA, 32 nt, Human
accagggagggagcuuguggggcaggucugga

SEQ ID NO: 300985 - RNA, 32 nt, Human
accagggaggggagggaggacugcaugacgcg

SEQ ID NO: 300986 - RNA, 32 nt, Human
accagggagguagagguugcagugagcugaga

SEQ ID NO: 300987 - RNA, 32 nt, Human
accagggagguggagguugcagugagccaaga

SEQ ID NO: 300988 - RNA, 32 nt, Human
accagggagguggagguugcagugagccgaga

SEQ ID NO: 300989 - RNA, 32 nt, Human
accagggagguggagguugcagugagcugaga

SEQ ID NO: 300990 - RNA, 32 nt, Human
accagggagucagagguuucagugagccaaga

SEQ ID NO: 300991 - RNA, 32 nt, Human
accagggagucggagauugcagugagcugaga

SEQ ID NO: 300992 - RNA, 22 nt, Human
accagggagugccuccucuuca

SEQ ID NO: 300993 - RNA, 32 nt, Human
accagggauccagagacauagaggaaguaggg

SEQ ID NO: 300994 - RNA, 32 nt, Human
accagggaugcugagguugcacgagcugagau

SEQ ID NO: 300995 - RNA, 19 nt, Human
accagggauguagaagcua

SEQ ID NO: 300996 - RNA, 18 nt, Human
accagggauugagugcug

SEQ ID NO: 300997 - RNA, 32 nt, Human
accagggcaggcagaggucuuccugccuuuac

SEQ ID NO: 300998 - RNA, 32 nt, Human
accagggcaugcaacagggcugggacaggaag

SEQ ID NO: 300999 - RNA, 32 nt, Human
accagggccaaagugcugguguggagcagaug

SEQ ID NO: 301000 - RNA, 32 nt, Human
accagggccagagacgggaccaggaaggaacu

SEQ ID NO: 301001 - RNA, 32 nt, Human
accagggccugggaagagggucgcucuccggc

SEQ ID NO: 301002 - RNA, 32 nt, Human
accagggcucacugcagccuugaccucccagg

SEQ ID NO: 301003 - RNA, 32 nt, Human
accagggcugucuucagaugucagggucccug

SEQ ID NO: 301004 - RNA, 32 nt, Human
accaggggaaguugacaacuuguugguaguua

SEQ ID NO: 301005 - RNA, 18 nt, Human
accaggggacaaaugcug

SEQ ID NO: 301006 - RNA, 32 nt, Human
accagggggagcaaacccugccccugcccgcc

SEQ ID NO: 301007 - RNA, 32 nt, Human
accagggggagcugucugcggagccagcgccu

SEQ ID NO: 301008 - RNA, 32 nt, Human
accagggggcagaguugcacuuuuccaggcuu

SEQ ID NO: 301009 - RNA, 32 nt, Human
accaggggugacuaaggacagagcaggugaua

SEQ ID NO: 301010 - RNA, 22 nt, Human
accaggguaggacagggugcua

SEQ ID NO: 301011 - RNA, 32 nt, Human
accaggguaguccuggccagcauggugaaacc

SEQ ID NO: 301012 - RNA, 32 nt, Human
accaggguagugauaugugcagccggguaauu

SEQ ID NO: 301013 - RNA, 22 nt, Human
accagggucaucugcacuugau

SEQ ID NO: 301014 - RNA, 17 nt, Human
accagggucccaggugu

SEQ ID NO: 301015 - RNA, 32 nt, Human
accagggucuguccuucgugucccaagugugu

SEQ ID NO: 301016 - RNA, 24 nt, Human
accaggguugccgcugcccagagc

SEQ ID NO: 301017 - RNA, 19 nt, Human
accagguaaccaaucgcca

SEQ ID NO: 301018 - RNA, 32 nt, Human
accagguaaggauucaagacucaauguggaaa

SEQ ID NO: 301019 - RNA, 32 nt, Human
accagguaccgccuagccacacugcacugugg

SEQ ID NO: 301020 - RNA, 32 nt, Human
accagguaccucuguuggaaaugcagaaauca

SEQ ID NO: 301021 - RNA, 32 nt, Human
accagguagagccugugcagccugggcugcug

SEQ ID NO: 301022 - RNA, 32 nt, Human
accagguagccgccugccugcccugcucugcg

SEQ ID NO: 301023 - RNA, 32 nt, Human
accagguagggaggcuguugaagaaagccaag

SEQ ID NO: 301024 - RNA, 32 nt, Human
accaggucaagcaagaugccaugucaccccug

SEQ ID NO: 301025 - RNA, 32 nt, Human
accaggucacccagcuaugcugcaaagugggu

SEQ ID NO: 301026 - RNA, 32 nt, Human
accaggucacuggggagucugcuucauuuccu

SEQ ID NO: 301027 - RNA, 32 nt, Human
accaggucaggagaucaagaccauccuggcua

SEQ ID NO: 301028 - RNA, 32 nt, Human
accaggucaggagaucaagaccauccuugauc

SEQ ID NO: 301029 - RNA, 32 nt, Human
accaggucagggccuacagcuguguuguccag

SEQ ID NO: 301030 - RNA, 21 nt, Human
accaggucccaagggagcaag

SEQ ID NO: 301031 - RNA, 26 nt, Human
accagguccccacuggcaccucucuc

SEQ ID NO: 301032 - RNA, 32 nt, Human
accaggucccccuccugaccucugccccacuc

SEQ ID NO: 301033 - RNA, 32 nt, Human
accaggucccugcugcucacaccugggccucu

SEQ ID NO: 301034 - RNA, 32 nt, Human
accaggucguccaagcaaaaacaaaugggaaa

SEQ ID NO: 301035 - RNA, 32 nt, Human
accaggucucacuauguugcccaggccggucu

SEQ ID NO: 301036 - RNA, 32 nt, Human
accaggucucacuauguugcccaggcuagucu

SEQ ID NO: 301037 - RNA, 32 nt, Human
accaggucugccaguuucugugccugcagaga

SEQ ID NO: 301038 - RNA, 26 nt, Human
accaggucugugccaccuccucucuc

SEQ ID NO: 301039 - RNA, 32 nt, Human
accaggucuuagucacauguauuuucauaccc

SEQ ID NO: 301040 - RNA, 32 nt, Human
accaggucuuccggaaccaccugggccgcuac

SEQ ID NO: 301041 - RNA, 32 nt, Human
accaggucuucuugcugaccucgucuacaaag

SEQ ID NO: 301042 - RNA, 32 nt, Human
accaggucuuuccuggccugagaaauauucuc

SEQ ID NO: 301043 - RNA, 32 nt, Human
accaggugacuccgugcgugggccaagccugg

SEQ ID NO: 301044 - RNA, 32 nt, Human
accaggugagaaugaauaagcuaugcaaggua

SEQ ID NO: 301045 - RNA, 32 nt, Human
accaggugcaccacugccgucauuucagcuuc

SEQ ID NO: 301046 - RNA, 32 nt, Human
accaggugcugcugcuggaggagaggcuaggu

SEQ ID NO: 301047 - RNA, 20 nt, Human
accagguggagcaggugcug

SEQ ID NO: 301048 - RNA, 32 nt, Human
accagguggaggcggcggcggcagaggagugg

SEQ ID NO: 301049 - RNA, 32 nt, Human
accagguggauguggagcaggagagcuggauc

SEQ ID NO: 301050 - RNA, 32 nt, Human
accaggugggaaggaagacauacugggcuugg

SEQ ID NO: 301051 - RNA, 32 nt, Human
accaggugguucccucccuuugccggaggaac

SEQ ID NO: 301052 - RNA, 32 nt, Human
accaggugucccaguagagcacugacaugugu

SEQ ID NO: 301053 - RNA, 22 nt, Human
accagguuccauuagcucucca

SEQ ID NO: 301054 - RNA, 32 nt, Human
accagguuccuuuccaggaagggaggcaggag

SEQ ID NO: 301055 - RNA, 32 nt, Human
accagguucucuuuucacugggaccuugcaag

SEQ ID NO: 301056 - RNA, 24 nt, Human
accagguuggccaacauggugaga

SEQ ID NO: 301057 - RNA, 32 nt, Human
accagguuggccaacauggugagaccccaucu

SEQ ID NO: 301058 - RNA, 32 nt, Human
accagguuggucucgaacuccugggcucaagc

SEQ ID NO: 301059 - RNA, 32 nt, Human
accagguuuacaccacugcacuccagucugga

SEQ ID NO: 301060 - RNA, 32 nt, Human
accagguuucuucuccccauaccacguugugc

SEQ ID NO: 301061 - RNA, 32 nt, Human
accaguaacacuuguucuuuacacccuuucuc

SEQ ID NO: 301062 - RNA, 32 nt, Human
accaguaaccaccuuccuucaagccuucagcc

SEQ ID NO: 301063 - RNA, 32 nt, Human
accaguaagagagguuuuaucaauccccaccg

SEQ ID NO: 301064 - RNA, 32 nt, Human
accaguaauagaauugaaaagggagagugucu

SEQ ID NO: 301065 - RNA, 32 nt, Human
accaguacacuuuuagauuagacaguaucuuc

SEQ ID NO: 301066 - RNA, 19 nt, Human
accaguacaucuggcauac

SEQ ID NO: 301067 - RNA, 32 nt, Human
accaguacucugucaucgaagagaccagcucu

SEQ ID NO: 301068 - RNA, 32 nt, Human
accaguaggaacugucacagaauggccugcug

SEQ ID NO: 301069 - RNA, 32 nt, Human
accaguagguugaggacaggagagggaagggu

SEQ ID NO: 301070 - RNA, 32 nt, Human
accaguaguacgaugagccaaagcuuuacauu

SEQ ID NO: 301071 - RNA, 32 nt, Human
accaguaucaguuccuuccucccuucaagagu

SEQ ID NO: 301072 - RNA, 32 nt, Human
accaguauccuucaacuacuucaucaauguuu

SEQ ID NO: 301073 - RNA, 32 nt, Human
accagucagagggagcaguccggagaggcaag

SEQ ID NO: 301074 - RNA, 32 nt, Human
accagucauguggagcacuucagccuccagag

SEQ ID NO: 301075 - RNA, 32 nt, Human
accaguccaacacugaauguaucugcacugug

SEQ ID NO: 301076 - RNA, 23 nt, Human
accaguccagaacuugcaguggg

SEQ ID NO: 301077 - RNA, 19 nt, Human
accaguccagccaacacgg

SEQ ID NO: 301078 - RNA, 19 nt, Human
accagucccggcagagcca

SEQ ID NO: 301079 - RNA, 32 nt, Human
accagucccggcaguggccacaacagcacauc

SEQ ID NO: 301080 - RNA, 32 nt, Human
accagucccuguuaccagcuguguggccuugg

SEQ ID NO: 301081 - RNA, 32 nt, Human
accaguccucugcaguuacauggccacaucuu

SEQ ID NO: 301082 - RNA, 32 nt, Human
accaguccugcucuccuccguggacauuucau

SEQ ID NO: 301083 - RNA, 32 nt, Human
accaguccuggaccuaugaccacccagcuggg

SEQ ID NO: 301084 - RNA, 32 nt, Human
accagucgcuccccgccugggagcucagcuuu

SEQ ID NO: 301085 - RNA, 32 nt, Human
accagucgucuuuacugugcugcccagggacu

SEQ ID NO: 301086 - RNA, 32 nt, Human
accagucuaagcaacauaaugagacucagucu

SEQ ID NO: 301087 - RNA, 32 nt, Human
accagucuagggacaaaggagacugaacaucu

SEQ ID NO: 301088 - RNA, 32 nt, Human
accagucucccaggaggcugaggcugcuguau

SEQ ID NO: 301089 - RNA, 19 nt, Human
accagucugaccaacacgg

SEQ ID NO: 301090 - RNA, 21 nt, Human
accagucugaccaacacggag

SEQ ID NO: 301091 - RNA, 24 nt, Human
accagucugaccaacacggagaaa

SEQ ID NO: 301092 - RNA, 32 nt, Human
accagucugaguguggaagagacggcgcugga

SEQ ID NO: 301093 - RNA, 32 nt, Human
accagucugcaacccugcucuaugcugacccu

SEQ ID NO: 301094 - RNA, 32 nt, Human
accagucugcagaugcccuagcaugaaucuuc

SEQ ID NO: 301095 - RNA, 32 nt, Human
accagucugccucuugggucuuccucccaggc

SEQ ID NO: 301096 - RNA, 19 nt, Human
accagucugccugccacca

SEQ ID NO: 301097 - RNA, 32 nt, Human
accagucuggacaacauggggagaccccaucu

SEQ ID NO: 301098 - RNA, 21 nt, Human
accagucuggccaacauagca

SEQ ID NO: 301099 - RNA, 24 nt, Human
accagucuggccaacaucgugaaa

SEQ ID NO: 301100 - RNA, 24 nt, Human
accagucuggccaacauggcgaaa

SEQ ID NO: 301101 - RNA, 24 nt, Human
accagucuggccaacauggggaaa

SEQ ID NO: 301102 - RNA, 24 nt, Human
accagucuggccaacauggugaaa

SEQ ID NO: 301103 - RNA, 24 nt, Human
accagucuggccaaccuggugaaa

SEQ ID NO: 301104 - RNA, 24 nt, Human
accagucuggccaauauggugaaa

SEQ ID NO: 301105 - RNA, 24 nt, Human
accagucuggcccacauggugaaa

SEQ ID NO: 301106 - RNA, 32 nt, Human
accagucugggcaacauagcgagacuccaucu

SEQ ID NO: 301107 - RNA, 32 nt, Human
accagucugggcaacauagugagacccuuucc

SEQ ID NO: 301108 - RNA, 32 nt, Human
accagucugggcaacauggugagacccucguc

SEQ ID NO: 301109 - RNA, 32 nt, Human
accagucugggugacagagaaagacccugucu

SEQ ID NO: 301110 - RNA, 24 nt, Human
accagucuggucaacauggugaaa

SEQ ID NO: 301111 - RNA, 32 nt, Human
accagucuguccccaucucugaaauccuuccu

SEQ ID NO: 301112 - RNA, 32 nt, Human
accagucugucuguguuaggggagaggggagu

SEQ ID NO: 301113 - RNA, 32 nt, Human
accagucuuguccugagaaauguuucucuuag

SEQ ID NO: 301114 - RNA, 20 nt, Human
accagucuuucaguucucca

SEQ ID NO: 301115 - RNA, 32 nt, Human
accagugaaagagaagcacacaggcuccauga

SEQ ID NO: 301116 - RNA, 32 nt, Human
accagugaaggugagggaggugugacaguaga

SEQ ID NO: 301117 - RNA, 32 nt, Human
accagugaauuucucaaucuugccucacagug

SEQ ID NO: 301118 - RNA, 32 nt, Human
accagugacaggcuggucagagggcggggcug

SEQ ID NO: 301119 - RNA, 32 nt, Human
accagugaccuucaaucaacuccaucacuucu

SEQ ID NO: 301120 - RNA, 32 nt, Human
accagugacugaggccuggacccagaggugga

SEQ ID NO: 301121 - RNA, 31 nt, Human
accagugacuucucugggccugggucugggg

SEQ ID NO: 301122 - RNA, 32 nt, Human
accagugcacuccagccugggugacagagcaa

SEQ ID NO: 301123 - RNA, 32 nt, Human
accagugcacuccagccuuggugacaauggga

SEQ ID NO: 301124 - RNA, 32 nt, Human
accagugcagggcuguuaacaggguugcaggc

SEQ ID NO: 301125 - RNA, 32 nt, Human
accagugcauaccaccaugccugggugauuuu

SEQ ID NO: 301126 - RNA, 32 nt, Human
accagugcaugcucaggagaacaaaugagcaa

SEQ ID NO: 301127 - RNA, 32 nt, Human
accagugcauuccagccuggguacacagcgag

SEQ ID NO: 301128 - RNA, 32 nt, Human
accagugccaccuuauggcaaagagcucccgc

SEQ ID NO: 301129 - RNA, 32 nt, Human
accagugccagccuuggaguugccagucagug

SEQ ID NO: 301130 - RNA, 22 nt, Human
accagugccaggccagggagcc

SEQ ID NO: 301131 - RNA, 32 nt, Human
accagugccucgcuccauuggcaccaacgccc

SEQ ID NO: 301132 - RNA, 32 nt, Human
accagugcgugagccuuggaucccucaacgua

SEQ ID NO: 301133 - RNA, 32 nt, Human
accagugcuccugccaccucucuggcugcccc

SEQ ID NO: 301134 - RNA, 32 nt, Human
accagugcugggacaaagauggggaaggugug

SEQ ID NO: 301135 - RNA, 32 nt, Human
accagugcugugccagacacugaggcauucua

SEQ ID NO: 301136 - RNA, 32 nt, Human
accagugcugugggaaaaaugguaacauuuca

SEQ ID NO: 301137 - RNA, 32 nt, Human
accaguggaagaccccagcccccagggagagg

SEQ ID NO: 301138 - RNA, 32 nt, Human
accaguggaugcaggcuucagugaccaagacc

SEQ ID NO: 301139 - RNA, 31 nt, Human
accaguggcaaagaaacuccuuucauuuugu

SEQ ID NO: 301140 - RNA, 32 nt, Human
accaguggcaacugccugcacagcagagauaa

SEQ ID NO: 301141 - RNA, 23 nt, Human
accaguggcaggcacagguccag

SEQ ID NO: 301142 - RNA, 32 nt, Human
accaguggcaggcacagguccagggagacaga

SEQ ID NO: 301143 - RNA, 32 nt, Human
accaguggccuggccgaccugcucuggcccug

SEQ ID NO: 301144 - RNA, 32 nt, Human
accaguggcugcagaagggccacccuagccuu

SEQ ID NO: 301145 - RNA, 32 nt, Human
accaguggcugccacaccagucacaugaccug

SEQ ID NO: 301146 - RNA, 32 nt, Human
accaguggcuucaaacuuccugguuucaugau

SEQ ID NO: 301147 - RNA, 32 nt, Human
accagugggggaaagauggaucuugaagcuaa

SEQ ID NO: 301148 - RNA, 32 nt, Human
accagugggugagaaagacaccuggucaggaa

SEQ ID NO: 301149 - RNA, 32 nt, Human
accagugggugagaaggacaccuggucaagaa

SEQ ID NO: 301150 - RNA, 32 nt, Human
accaguggucucacauggugcuacgccugcau

SEQ ID NO: 301151 - RNA, 32 nt, Human
accaguggucuuucaggccccuucccugcucu

SEQ ID NO: 301152 - RNA, 32 nt, Human
accaguguccaugcccagagguucuggguucu

SEQ ID NO: 301153 - RNA, 32 nt, Human
accaguguccccaccaucagccaccacacacc

SEQ ID NO: 301154 - RNA, 32 nt, Human
accagugugcagggcgggccugggacaauggg

SEQ ID NO: 301155 - RNA, 32 nt, Human
accaguguggccgagguugcagugaguguaga

SEQ ID NO: 301156 - RNA, 24 nt, Human
accagugugggcaacauggugaaa

SEQ ID NO: 301157 - RNA, 32 nt, Human
accagugugguggcucacaccuguaaucccag

SEQ ID NO: 301158 - RNA, 21 nt, Human
accaguguguggagccugcca

SEQ ID NO: 301159 - RNA, 32 nt, Human
accagugugugggcagcacccaggcauuaaac

SEQ ID NO: 301160 - RNA, 32 nt, Human
accaguguucaaguugguuuggucuuuauuaa

SEQ ID NO: 301161 - RNA, 32 nt, Human
accaguguucauggugacagggcgacgggagg

SEQ ID NO: 301162 - RNA, 32 nt, Human
accaguguuggauauucugugauugauuuugg

SEQ ID NO: 301163 - RNA, 32 nt, Human
accaguguuggccaggcuggucucgaacuccu

SEQ ID NO: 301164 - RNA, 32 nt, Human
accaguucacuggguuauucuaugauuccaua

SEQ ID NO: 301165 - RNA, 32 nt, Human
accaguuccucugcaacccacucuggccucuc

SEQ ID NO: 301166 - RNA, 32 nt, Human
accaguucucucucacucuccguacagcugaa

SEQ ID NO: 301167 - RNA, 32 nt, Human
accaguugaacugcaggaagagaggacccauc

SEQ ID NO: 301168 - RNA, 31 nt, Human
accaguugaaucaucuguugaaauaaaugac

SEQ ID NO: 301169 - RNA, 32 nt, Human
accaguugugcuucagccuccuuucccuugca

SEQ ID NO: 301170 - RNA, 32 nt, Human
accaguuguuagaucuguagggacuuguacaa

SEQ ID NO: 301171 - RNA, 32 nt, Human
accaguuuaggggaguuaaggaauuauuuuuc

SEQ ID NO: 301172 - RNA, 32 nt, Human
accaguuucauuuuggccauuucuuuuucaaa

SEQ ID NO: 301173 - RNA, 18 nt, Human
accaguuuccagguggua

SEQ ID NO: 301174 - RNA, 32 nt, Human
accaguuuccucucacacuuauuuaccugcua

SEQ ID NO: 301175 - RNA, 32 nt, Human
accaguuucucaggcuggggagcacagagggg

SEQ ID NO: 301176 - RNA, 32 nt, Human
accaguuucugaauccaaccucccagacuuca

SEQ ID NO: 301177 - RNA, 32 nt, Human
accaguuugcaggaagaaaggaagagaaugga

SEQ ID NO: 301178 - RNA, 32 nt, Human
accaguuugccuccuucccugccuuaaaagca

SEQ ID NO: 301179 - RNA, 24 nt, Human
accaguuugggcaacauggcgaaa

SEQ ID NO: 301180 - RNA, 18 nt, Human
accaguuuugugguccua

SEQ ID NO: 301181 - RNA, 32 nt, Human
accauaaagauaaggagagcaauuaaugagcu

SEQ ID NO: 301182 - RNA, 32 nt, Human
accauaaauuuccaggaucagacuaacggcua

SEQ ID NO: 301183 - RNA, 32 nt, Human
accauaacacaaaaagcaugaacuuguauuaa

SEQ ID NO: 301184 - RNA, 32 nt, Human
accauaagcccagggaugugacagcugcagcg

SEQ ID NO: 301185 - RNA, 32 nt, Human
accauaauaaauacuccuuuucaagagaaaag

SEQ ID NO: 301186 - RNA, 32 nt, Human
accauaauaaaucugcuccuauaauugaggca

SEQ ID NO: 301187 - RNA, 32 nt, Human
accauaauccugcaagaaaauucuucagaauu

SEQ ID NO: 301188 - RNA, 32 nt, Human
accauaauccugucuuaauacugcaaacaaau

SEQ ID NO: 301189 - RNA, 32 nt, Human
accauaaugaugggcucugaaauuguccaagg

SEQ ID NO: 301190 - RNA, 32 nt, Human
accauaauggccaggcuggucuugaaccucaa

SEQ ID NO: 301191 - RNA, 32 nt, Human
accauaauguguuuguugcaagauccacaaga

SEQ ID NO: 301192 - RNA, 32 nt, Human
accauaauuuuuauaauuuucauuccaguccu

SEQ ID NO: 301193 - RNA, 32 nt, Human
accauacaaagccacaggaguggagcuguggc

SEQ ID NO: 301194 - RNA, 32 nt, Human
accauacacauaagggaagagaggaggaugug

SEQ ID NO: 301195 - RNA, 32 nt, Human
accauacaucacaacgucaguuuuccuaucug

SEQ ID NO: 301196 - RNA, 32 nt, Human
accauaccacugcauuccagccugggugacag

SEQ ID NO: 301197 - RNA, 32 nt, Human
accauaccagugcauuccagccuggguacaca

SEQ ID NO: 301198 - RNA, 32 nt, Human
accauaccccuacuccagcccaccccagacag

SEQ ID NO: 301199 - RNA, 32 nt, Human
accauaccuucaggauggagacaggaaagugu

SEQ ID NO: 301200 - RNA, 32 nt, Human
accauacgucagaccauugccucccaguuacc

SEQ ID NO: 301201 - RNA, 32 nt, Human
accauacucccuuucagggccagggcuccagc

SEQ ID NO: 301202 - RNA, 32 nt, Human
accauacuuacuggccuuggcuggcucuucag

SEQ ID NO: 301203 - RNA, 32 nt, Human
accauagaacccaucuuguugaauacaaguaa

SEQ ID NO: 301204 - RNA, 32 nt, Human
accauagaauacugauuggauagccauccuag

SEQ ID NO: 301205 - RNA, 20 nt, Human
accauagacccagccaggua

SEQ ID NO: 301206 - RNA, 32 nt, Human
accauagaggcagagauuggagugaaguggcu

SEQ ID NO: 301207 - RNA, 32 nt, Human
accauagcauaagugaucugugccuuaacgac

SEQ ID NO: 301208 - RNA, 32 nt, Human
accauagcucacugcagcaucaaauuccuagg

SEQ ID NO: 301209 - RNA, 32 nt, Human
accauagcucugauucccaccccacauaggaa

SEQ ID NO: 301210 - RNA, 32 nt, Human
accauaggcagcacaggcaucaagauguccaa

SEQ ID NO: 301211 - RNA, 32 nt, Human
accauaggcuguaaagcguuccaaauauccac

SEQ ID NO: 301212 - RNA, 32 nt, Human
accauagguauuuauugauuggaggaagggag

SEQ ID NO: 301213 - RNA, 32 nt, Human
accauaggugugagccagcacgucugguuaau

SEQ ID NO: 301214 - RNA, 32 nt, Human
accauaguuguacugcugcugcuucauugcca

SEQ ID NO: 301215 - RNA, 32 nt, Human
accauauaauccagcaauuucacuucuaggua

SEQ ID NO: 301216 - RNA, 32 nt, Human
accauauacauaagggaagagaggaggaugug

SEQ ID NO: 301217 - RNA, 25 nt, Human
accauaucagcugcugcucuuuaug

SEQ ID NO: 301218 - RNA, 32 nt, Human
accauaucuccaagcuuccuggcaaccagugg

SEQ ID NO: 301219 - RNA, 32 nt, Human
accauaugauccagcaaucccacugcuaggua

SEQ ID NO: 301220 - RNA, 32 nt, Human
accauauggccacuggggugguggcccaucuc

SEQ ID NO: 301221 - RNA, 19 nt, Human
accauauggccccagggaa

SEQ ID NO: 301222 - RNA, 32 nt, Human
accauauguggauccuuucauuucucagcucc

SEQ ID NO: 301223 - RNA, 32 nt, Human
accauauugggaaaguccugggggacgugugu

SEQ ID NO: 301224 - RNA, 32 nt, Human
accauauuuuuguccccaccacaagcuggguu

SEQ ID NO: 301225 - RNA, 32 nt, Human
accaucaaaaccaggaacccacacugaugccc

SEQ ID NO: 301226 - RNA, 32 nt, Human
accaucaaacucacaaauagguugaaauccuu

SEQ ID NO: 301227 - RNA, 32 nt, Human
accaucacacgugaagcaccaggcugggagau

SEQ ID NO: 301228 - RNA, 32 nt, Human
accaucacacucagcugaccuaagagccuaac

SEQ ID NO: 301229 - RNA, 32 nt, Human
accaucaccaacaacauuggcucaauagcaag

SEQ ID NO: 301230 - RNA, 16 nt, Human
accaucaccaccacca

SEQ ID NO: 301231 - RNA, 32 nt, Human
accaucacccaaucuguugauucuccauuggg

SEQ ID NO: 301232 - RNA, 32 nt, Human
accaucacugaacucaaggacuugugcugaag

SEQ ID NO: 301233 - RNA, 32 nt, Human
accaucacuguggugcccacugugccucaagu

SEQ ID NO: 301234 - RNA, 32 nt, Human
accaucagagcagaggaggaaagacucacuac

SEQ ID NO: 301235 - RNA, 32 nt, Human
accaucagcagacauuggcaucuucaaaauua

SEQ ID NO: 301236 - RNA, 32 nt, Human
accaucagccaccacacaccucugcugcccug

SEQ ID NO: 301237 - RNA, 32 nt, Human
accaucagcuucagaggaugucagccuuugau

SEQ ID NO: 301238 - RNA, 19 nt, Human
accaucaucacugccacca

SEQ ID NO: 301239 - RNA, 20 nt, Human
accaucaucuaaacuacuau

SEQ ID NO: 301240 - RNA, 32 nt, Human
accaucaucucaggaugucucuuucuggccgc

SEQ ID NO: 301241 - RNA, 32 nt, Human
accaucauggggaccaggauagaaggcuucuu

SEQ ID NO: 301242 - RNA, 32 nt, Human
accaucauuauauuccaaucuuccucaucucc

SEQ ID NO: 301243 - RNA, 32 nt, Human
accauccaaaaauguugagggcaugcuuugcu

SEQ ID NO: 301244 - RNA, 32 nt, Human
accauccaagaauguuguuagcuuuucaguuc

SEQ ID NO: 301245 - RNA, 32 nt, Human
accauccaagaggugguagguuggaguaagau

SEQ ID NO: 301246 - RNA, 32 nt, Human
accauccacuguccauauucagucccagcccc

SEQ ID NO: 301247 - RNA, 32 nt, Human
accauccagaaucaaagcagcaaccacauagu

SEQ ID NO: 301248 - RNA, 18 nt, Human
accauccagcccaaggag

SEQ ID NO: 301249 - RNA, 32 nt, Human
accauccagggcaacauaacaagacucugucu

SEQ ID NO: 301250 - RNA, 32 nt, Human
accauccagggguggagggggaaaaccaggca

SEQ ID NO: 301251 - RNA, 24 nt, Human
accauccaguucuuccuccaggcc

SEQ ID NO: 301252 - RNA, 32 nt, Human
accauccaugucuuccaggugacuccugaagg

SEQ ID NO: 301253 - RNA, 32 nt, Human
accaucccaaacuccucccaggcacagucugg

SEQ ID NO: 301254 - RNA, 32 nt, Human
accaucccacacaauuuugaggucuggacggc

SEQ ID NO: 301255 - RNA, 22 nt, Human
accaucccagacggcaucagcu

SEQ ID NO: 301256 - RNA, 32 nt, Human
accaucccagagaaaauaagggacuuuugcaa

SEQ ID NO: 301257 - RNA, 32 nt, Human
accaucccaguccuucugucagucuccgaugc

SEQ ID NO: 301258 - RNA, 32 nt, Human
accauccccagcugccugcuccugguaccucc

SEQ ID NO: 301259 - RNA, 32 nt, Human
accaucccccucacugucucugaggcaccugc

SEQ ID NO: 301260 - RNA, 24 nt, Human
accaucccggcuaacacggugaaa

SEQ ID NO: 301261 - RNA, 32 nt, Human
accaucccgugaggcccugccugagcagccag

SEQ ID NO: 301262 - RNA, 32 nt, Human
accaucccucauuucugcgggguccagcugga

SEQ ID NO: 301263 - RNA, 32 nt, Human
accaucccugcucaccuugcuaggccuggggc

SEQ ID NO: 301264 - RNA, 32 nt, Human
accauccuaaaggguuuuuaagcccuaacacu

SEQ ID NO: 301265 - RNA, 24 nt, Human
accauccuagccaacaucgugaaa

SEQ ID NO: 301266 - RNA, 32 nt, Human
accauccucauauagaauaaaauaucaaccua

SEQ ID NO: 301267 - RNA, 32 nt, Human
accauccucugacuuccugggccccuagaauu

SEQ ID NO: 301268 - RNA, 32 nt, Human
accauccucuugaaaaacccagacacagaguu

SEQ ID NO: 301269 - RNA, 32 nt, Human
accauccugaagaaguucaauggggaggacau

SEQ ID NO: 301270 - RNA, 24 nt, Human
accauccugaccaacauggugaaa

SEQ ID NO: 301271 - RNA, 19 nt, Human
accauccugagccagggaa

SEQ ID NO: 301272 - RNA, 15 nt, Human
accauccugccacca

SEQ ID NO: 301273 - RNA, 24 nt, Human
accauccugcccaacauggugaaa

SEQ ID NO: 301274 - RNA, 32 nt, Human
accauccugcgcuucuauccugugggccaggg

SEQ ID NO: 301275 - RNA, 32 nt, Human
accauccuggaugacagagcaagacuccauca

SEQ ID NO: 301276 - RNA, 24 nt, Human
accauccuggcaaacauggugaaa

SEQ ID NO: 301277 - RNA, 21 nt, Human
accauccuggccaacacagug

SEQ ID NO: 301278 - RNA, 24 nt, Human
accauccuggccaacacagugaaa

SEQ ID NO: 301279 - RNA, 21 nt, Human
accauccuggccaacacggug

SEQ ID NO: 301280 - RNA, 24 nt, Human
accauccuggccaacacggugaaa

SEQ ID NO: 301281 - RNA, 24 nt, Human
accauccuggccaacauagugaaa

SEQ ID NO: 301282 - RNA, 24 nt, Human
accauccuggccaacaugaugaaa

SEQ ID NO: 301283 - RNA, 19 nt, Human
accauccuggccaacaugg

SEQ ID NO: 301284 - RNA, 24 nt, Human
accauccuggccaacauggcgaaa

SEQ ID NO: 301285 - RNA, 24 nt, Human
accauccuggccaacauggggaaa

SEQ ID NO: 301286 - RNA, 24 nt, Human
accauccuggccaacauggugaaa

SEQ ID NO: 301287 - RNA, 24 nt, Human
accauccuggccaacguagugaaa

SEQ ID NO: 301288 - RNA, 24 nt, Human
accauccuggccaacguggugaaa

SEQ ID NO: 301289 - RNA, 24 nt, Human
accauccuggccaauauggugaaa

SEQ ID NO: 301290 - RNA, 24 nt, Human
accauccuggccagcauggugaaa

SEQ ID NO: 301291 - RNA, 32 nt, Human
accauccuggccucaccuccacccaacacugg

SEQ ID NO: 301292 - RNA, 24 nt, Human
accauccuggcgaacauggugaaa

SEQ ID NO: 301293 - RNA, 32 nt, Human
accauccuggcgaacauggugagacccaucuc

SEQ ID NO: 301294 - RNA, 24 nt, Human
accauccuggcuaacacagugaaa

SEQ ID NO: 301295 - RNA, 24 nt, Human
accauccuggcuaacacgaugaaa

SEQ ID NO: 301296 - RNA, 24 nt, Human
accauccuggcuaacacggcgaaa

SEQ ID NO: 301297 - RNA, 24 nt, Human
accauccuggcuaacacggugaaa

SEQ ID NO: 301298 - RNA, 32 nt, Human
accauccuggcuaacacggugagaccccaucu

SEQ ID NO: 301299 - RNA, 32 nt, Human
accauccuggcuaacacggugagaccccgucu

SEQ ID NO: 301300 - RNA, 24 nt, Human
accauccuggcuaacauagugaaa

SEQ ID NO: 301301 - RNA, 20 nt, Human
accauccuggcuaacauggu

SEQ ID NO: 301302 - RNA, 24 nt, Human
accauccuggcuaacauggugaaa

SEQ ID NO: 301303 - RNA, 32 nt, Human
accauccugggcaacauaaugaaacaccaucu

SEQ ID NO: 301304 - RNA, 32 nt, Human
accauccugggcaacauagugagacccugucu

SEQ ID NO: 301305 - RNA, 24 nt, Human
accauccugggcaacauggcgaaa

SEQ ID NO: 301306 - RNA, 24 nt, Human
accauccuggucaacauggugaaa

SEQ ID NO: 301307 - RNA, 32 nt, Human
accauccuuaauugcuccuucucaccuccucu

SEQ ID NO: 301308 - RNA, 32 nt, Human
accaucggaacagcagcgcccgcagcacccac

SEQ ID NO: 301309 - RNA, 32 nt, Human
accaucgggcuuaaccagcccagcacaccaac

SEQ ID NO: 301310 - RNA, 32 nt, Human
accaucggucccggagucccagugaugcucug

SEQ ID NO: 301311 - RNA, 32 nt, Human
accaucguaccacugcacuccagccuggauga

SEQ ID NO: 301312 - RNA, 32 nt, Human
accaucguagacugauguugcucuacaugauc

SEQ ID NO: 301313 - RNA, 24 nt, Human
accaucguggcuaacacggugaaa

SEQ ID NO: 301314 - RNA, 24 nt, Human
accaucguggcuaacauggugaaa

SEQ ID NO: 301315 - RNA, 32 nt, Human
accaucuaccuacagaagaugaccccagacag

SEQ ID NO: 301316 - RNA, 32 nt, Human
accaucuacuauugauuuuacagugcacugac

SEQ ID NO: 301317 - RNA, 32 nt, Human
accaucuacuccuggaaccaggaccugccacc

SEQ ID NO: 301318 - RNA, 23 nt, Human
accaucuaggaacaggggccagg

SEQ ID NO: 301319 - RNA, 32 nt, Human
accaucuaggaacaggggccaggcagagggcg

SEQ ID NO: 301320 - RNA, 32 nt, Human
accaucuauguaaugaauggggauuauacauu

SEQ ID NO: 301321 - RNA, 32 nt, Human
accaucucacugcaguagcacgcccuccuggg

SEQ ID NO: 301322 - RNA, 32 nt, Human
accaucucagugaggggcaggagcuggggcuc

SEQ ID NO: 301323 - RNA, 21 nt, Human
accaucucagugucaagagaa

SEQ ID NO: 301324 - RNA, 19 nt, Human
accaucuccaccugcccca

SEQ ID NO: 301325 - RNA, 32 nt, Human
accaucuccaggaguccaugagaggcuuucuu

SEQ ID NO: 301326 - RNA, 32 nt, Human
accaucucccacuguggcuaccaccuucccuu

SEQ ID NO: 301327 - RNA, 20 nt, Human
accaucuccucccuaaugag

SEQ ID NO: 301328 - RNA, 32 nt, Human
accaucuccugguuuccugaaggaggugggug

SEQ ID NO: 301329 - RNA, 32 nt, Human
accaucucgggauaugaggccucggaggcugg

SEQ ID NO: 301330 - RNA, 32 nt, Human
accaucucuccucugcuaaauuugcaugacug

SEQ ID NO: 301331 - RNA, 32 nt, Human
accaucucucuacucuuuaucuugcccucaca

SEQ ID NO: 301332 - RNA, 32 nt, Human
accaucucugcagaccccucuccuccuccuuc

SEQ ID NO: 301333 - RNA, 32 nt, Human
accaucucuuggacuccagccuguaugcacag

SEQ ID NO: 301334 - RNA, 32 nt, Human
accaucugcaguauuauaaaagucauuuagaa

SEQ ID NO: 301335 - RNA, 21 nt, Human
accaucugccugggaguccuc

SEQ ID NO: 301336 - RNA, 32 nt, Human
accaucugcugacuguucuuguggaucuugug

SEQ ID NO: 301337 - RNA, 32 nt, Human
accaucugcugccccucuuuccaucuuuccau

SEQ ID NO: 301338 - RNA, 21 nt, Human
accaucugcuucucccuuggc

SEQ ID NO: 301339 - RNA, 29 nt, Human
accaucuggcugcuuguccccuggagaaa

SEQ ID NO: 301340 - RNA, 28 nt, Human
accaucuuaagagaugccucauuuuaga

SEQ ID NO: 301341 - RNA, 22 nt, Human
accaucuuccacucuccuauua

SEQ ID NO: 301342 - RNA, 32 nt, Human
accaucuuggcaaucucugccucugcaacagg

SEQ ID NO: 301343 - RNA, 24 nt, Human
accaucuuggccaacauggugaaa

SEQ ID NO: 301344 - RNA, 24 nt, Human
accaucuuggcuaacacagugaaa

SEQ ID NO: 301345 - RNA, 24 nt, Human
accaucuuggcuaacacggugaaa

SEQ ID NO: 301346 - RNA, 24 nt, Human
accaucuuggcuaacauggugaaa

SEQ ID NO: 301347 - RNA, 24 nt, Human
accaucuugggcaacauggugaaa

SEQ ID NO: 301348 - RNA, 32 nt, Human
accaucuuggggaccuacaagggccuggacuc

SEQ ID NO: 301349 - RNA, 32 nt, Human
accaucuugugcaaaugguguggcccagggcc

SEQ ID NO: 301350 - RNA, 32 nt, Human
accaucuugugucuuuggaggugcugcuuaau

SEQ ID NO: 301351 - RNA, 32 nt, Human
accaucuuuccucuuuguuuauucaagacuau

SEQ ID NO: 301352 - RNA, 24 nt, Human
accaucuuugccaacauggugaaa

SEQ ID NO: 301353 - RNA, 32 nt, Human
accaugaaaccagccaacccucugcaugccag

SEQ ID NO: 301354 - RNA, 32 nt, Human
accaugaaauauccagaacauacuuauaugua

SEQ ID NO: 301355 - RNA, 32 nt, Human
accaugaacagaggaugaacaagugaaguugc

SEQ ID NO: 301356 - RNA, 32 nt, Human
accaugaagacugggcgccucagucccagccc

SEQ ID NO: 301357 - RNA, 32 nt, Human
accaugaagagaccuaguuaccugccaaggga

SEQ ID NO: 301358 - RNA, 32 nt, Human
accaugaagugacagaugcuggcagauguuag

SEQ ID NO: 301359 - RNA, 28 nt, Human
accaugaaguucuuagcaguccugguac

SEQ ID NO: 301360 - RNA, 32 nt, Human
accaugacaugaaggaggccaccgugugagca

SEQ ID NO: 301361 - RNA, 32 nt, Human
accaugaccucaccccuccuugguuucucccu

SEQ ID NO: 301362 - RNA, 32 nt, Human
accaugacugcagcacaaaauuaucgacucug

SEQ ID NO: 301363 - RNA, 28 nt, Human
accaugagagagaccuuggaggcccuca

SEQ ID NO: 301364 - RNA, 32 nt, Human
accaugagagcucccuugccuuaccuggagga

SEQ ID NO: 301365 - RNA, 32 nt, Human
accaugagcgcuccagugaacagaacaggaau

SEQ ID NO: 301366 - RNA, 32 nt, Human
accaugaggaggaggaggggaaagcgccagug

SEQ ID NO: 301367 - RNA, 28 nt, Human
accaugaggcucauccugccuguggguu

SEQ ID NO: 301368 - RNA, 28 nt, Human
accaugaggcuucucauucucaccuguc

SEQ ID NO: 301369 - RNA, 32 nt, Human
accaugaggcuucugcguguagucccugcccc

SEQ ID NO: 301370 - RNA, 28 nt, Human
accaugagggcccuggugcuucugcugu

SEQ ID NO: 301371 - RNA, 32 nt, Human
accaugagugagccaccagcucuccacguucc

SEQ ID NO: 301372 - RNA, 32 nt, Human
accaugaguggggcuggcaucuugccagccug

SEQ ID NO: 301373 - RNA, 32 nt, Human
accaugagugugccacuuucauuggacccuga

SEQ ID NO: 301374 - RNA, 28 nt, Human
accaugauccccugggugcuccuggccu

SEQ ID NO: 301375 - RNA, 32 nt, Human
accaugaucugcagcaagaaacgugccuucca

SEQ ID NO: 301376 - RNA, 32 nt, Human
accaugauggccagguugguuuugaacuccug

SEQ ID NO: 301377 - RNA, 32 nt, Human
accaugaugggcuaacacccaucucuacuaaa

SEQ ID NO: 301378 - RNA, 32 nt, Human
accaugauuccaaacaaaacuaacuuguuuaa

SEQ ID NO: 301379 - RNA, 32 nt, Human
accaugauugcacuccaaccugggcgacagag

SEQ ID NO: 301380 - RNA, 32 nt, Human
accaugauugugccacugcacuccagucugga

SEQ ID NO: 301381 - RNA, 21 nt, Human
accaugcaaaacccugaaaca

SEQ ID NO: 301382 - RNA, 32 nt, Human
accaugcaagcccucccaccucccagggcucc

SEQ ID NO: 301383 - RNA, 18 nt, Human
accaugcaagcuggcaac

SEQ ID NO: 301384 - RNA, 18 nt, Human
accaugcaauaauacaac

SEQ ID NO: 301385 - RNA, 20 nt, Human
accaugcaauauucugaaca

SEQ ID NO: 301386 - RNA, 32 nt, Human
accaugcagagcugugaucuagaggcucugag

SEQ ID NO: 301387 - RNA, 32 nt, Human
accaugcagccugaccugugaacucuccagua

SEQ ID NO: 301388 - RNA, 32 nt, Human
accaugcaggccccaggccccaugcucuuugu

SEQ ID NO: 301389 - RNA, 32 nt, Human
accaugcaguucugccuggguuggaguuggaa

SEQ ID NO: 301390 - RNA, 32 nt, Human
accaugccacacacuugcuguaaggcuagaag

SEQ ID NO: 301391 - RNA, 32 nt, Human
accaugccacugcacuccagccugggcaacaa

SEQ ID NO: 301392 - RNA, 32 nt, Human
accaugccacugcacuccagccugggcaacag

SEQ ID NO: 301393 - RNA, 28 nt, Human
accaugccacugcacuccagccugggug

SEQ ID NO: 301394 - RNA, 32 nt, Human
accaugccacugcacuccggccugggugacaa

SEQ ID NO: 301395 - RNA, 32 nt, Human
accaugccagauucugccucucuggaaagagg

SEQ ID NO: 301396 - RNA, 32 nt, Human
accaugccauugcacuccagccugggcgacag

SEQ ID NO: 301397 - RNA, 32 nt, Human
accaugccauuggacuccagccugggcaaaaa

SEQ ID NO: 301398 - RNA, 32 nt, Human
accaugcccagcccugcgucuacauuucuaaa

SEQ ID NO: 301399 - RNA, 32 nt, Human
accaugcccagcccuggagccaucacuacuca

SEQ ID NO: 301400 - RNA, 32 nt, Human
accaugcccagccuaauuuuuguauuuuuagu

SEQ ID NO: 301401 - RNA, 32 nt, Human
accaugcccagcuaauucuuuguauuuuuagu

SEQ ID NO: 301402 - RNA, 32 nt, Human
accaugcccagcuaauuuguuguauuuuuagu

SEQ ID NO: 301403 - RNA, 32 nt, Human
accaugcccaggagggaagaagccauccacag

SEQ ID NO: 301404 - RNA, 32 nt, Human
accaugccccggcuauuuuuguauuuuuagua

SEQ ID NO: 301405 - RNA, 22 nt, Human
accaugcccggcucucacuuca

SEQ ID NO: 301406 - RNA, 32 nt, Human
accaugccuagcuauucuuuuguauuuuuggu

SEQ ID NO: 301407 - RNA, 32 nt, Human
accaugccugggaauggagccaccacauccag

SEQ ID NO: 301408 - RNA, 22 nt, Human
accaugcgauugcccugcaaca

SEQ ID NO: 301409 - RNA, 32 nt, Human
accaugcuaauauguaaaguucaugccaucca

SEQ ID NO: 301410 - RNA, 32 nt, Human
accaugcuccauccucccucucuuccaccucc

SEQ ID NO: 301411 - RNA, 32 nt, Human
accaugcuccccucugcugcccagagccccag

SEQ ID NO: 301412 - RNA, 32 nt, Human
accaugcucuccugggacugugaggcuccuuu

SEQ ID NO: 301413 - RNA, 32 nt, Human
accaugcugagagugagcccugugcaugcaca

SEQ ID NO: 301414 - RNA, 32 nt, Human
accaugcugccuucucugggcucacgacuguu

SEQ ID NO: 301415 - RNA, 32 nt, Human
accaugcuggacugcuauaggcccagcuuccc

SEQ ID NO: 301416 - RNA, 24 nt, Human
accaugcuggcuaacauggugaaa

SEQ ID NO: 301417 - RNA, 32 nt, Human
accaugcuucucauucccuugacucaugucuu

SEQ ID NO: 301418 - RNA, 28 nt, Human
accaugcuucuccuggugacaagccuuc

SEQ ID NO: 301419 - RNA, 32 nt, Human
accauggaacuacccaaaggucuucaaggagu

SEQ ID NO: 301420 - RNA, 32 nt, Human
accauggacuccagagagagcagcuuauagua

SEQ ID NO: 301421 - RNA, 32 nt, Human
accauggagcggaaagaaagaaaacagcauuc

SEQ ID NO: 301422 - RNA, 32 nt, Human
accauggaggcugaagauaaauagaugauccc

SEQ ID NO: 301423 - RNA, 28 nt, Human
accauggaugacgcugcuguccucaagc

SEQ ID NO: 301424 - RNA, 32 nt, Human
accauggauucugccuuuggaccccucucuau

SEQ ID NO: 301425 - RNA, 32 nt, Human
accauggcaagagagaaagaaagagaaaguac

SEQ ID NO: 301426 - RNA, 19 nt, Human
accauggcacccugcacca

SEQ ID NO: 301427 - RNA, 32 nt, Human
accauggcagagaaaagcaggagaggagcaaa

SEQ ID NO: 301428 - RNA, 28 nt, Human
accauggccacccuuaacucagccucua

SEQ ID NO: 301429 - RNA, 32 nt, Human
accauggccaggacaugugcaaugccagcccc

SEQ ID NO: 301430 - RNA, 28 nt, Human
accauggcccaagcccugcccuggcucc

SEQ ID NO: 301431 - RNA, 32 nt, Human
accauggcccaggauggaggcagcacuggcgc

SEQ ID NO: 301432 - RNA, 28 nt, Human
accauggccugagggcccugcucgucuc

SEQ ID NO: 301433 - RNA, 28 nt, Human
accauggcggagaaguuugacugccacu

SEQ ID NO: 301434 - RNA, 32 nt, Human
accauggcuaggcuggucucaaacucuugacc

SEQ ID NO: 301435 - RNA, 32 nt, Human
accauggcuuuuccuuuccuuucuucuccauu

SEQ ID NO: 301436 - RNA, 32 nt, Human
accaugggaccagcucuggccagagggaacua

SEQ ID NO: 301437 - RNA, 32 nt, Human
accaugggaggaaaacuucuuccuggccuggg

SEQ ID NO: 301438 - RNA, 32 nt, Human
accaugggaggaccagcugcuguaagugaagg

SEQ ID NO: 301439 - RNA, 32 nt, Human
accauggggauacuguggcuucugcuguccua

SEQ ID NO: 301440 - RNA, 32 nt, Human
accaugggugcugugacacuaacagucauuga

SEQ ID NO: 301441 - RNA, 22 nt, Human
accaugguagaaaaugcaccaa

SEQ ID NO: 301442 - RNA, 32 nt, Human
accaugguaggcaaggaaucucagggcgaaau

SEQ ID NO: 301443 - RNA, 32 nt, Human
accaugguauacaacaaaaauacauuucuuug

SEQ ID NO: 301444 - RNA, 32 nt, Human
accaugguccacugaccaggccccagagcaac

SEQ ID NO: 301445 - RNA, 32 nt, Human
accauggucugagcucccugcccugagagguc

SEQ ID NO: 301446 - RNA, 28 nt, Human
accauggugaagaucgugacaguuaaga

SEQ ID NO: 301447 - RNA, 32 nt, Human
accauggugaaggcuucuuuccccacugcagg

SEQ ID NO: 301448 - RNA, 32 nt, Human
accauggugcucugcagccaccucucacuuca

SEQ ID NO: 301449 - RNA, 28 nt, Human
accauggugugcgugaacguccuggccg

SEQ ID NO: 301450 - RNA, 32 nt, Human
accaugguugacuuacaagugucacuacagcu

SEQ ID NO: 301451 - RNA, 32 nt, Human
accauguaaaaauuggcaguucagagguugca

SEQ ID NO: 301452 - RNA, 31 nt, Human
accauguaauaaaacccaaaggaacagccca

SEQ ID NO: 301453 - RNA, 32 nt, Human
accauguacauacauguucugaaacuuucuca

SEQ ID NO: 301454 - RNA, 32 nt, Human
accauguacaucugcauuguuccuauagauaa

SEQ ID NO: 301455 - RNA, 22 nt, Human
accaugucaaggcugcagugag

SEQ ID NO: 301456 - RNA, 32 nt, Human
accaugucaucuuuacaauguugucuuccaau

SEQ ID NO: 301457 - RNA, 32 nt, Human
accauguccaaucauuggcuggaagcagccca

SEQ ID NO: 301458 - RNA, 32 nt, Human
accaugucccuagcccggccuggguggcgggg

SEQ ID NO: 301459 - RNA, 32 nt, Human
accaugucucaaacuccugaccucaggcgauc

SEQ ID NO: 301460 - RNA, 32 nt, Human
accaugugaacccagcaauccagugagguuga

SEQ ID NO: 301461 - RNA, 19 nt, Human
accaugugaccccgcacca

SEQ ID NO: 301462 - RNA, 32 nt, Human
accaugugaggacacagugagaagacagccgu

SEQ ID NO: 301463 - RNA, 18 nt, Human
accaugugauccucaaca

SEQ ID NO: 301464 - RNA, 32 nt, Human
accaugugccuccuuguuucucaggccuucca

SEQ ID NO: 301465 - RNA, 28 nt, Human
accaugugccugaaggagagccugcggc

SEQ ID NO: 301466 - RNA, 32 nt, Human
accaugugccugauccagccucuccccugauu

SEQ ID NO: 301467 - RNA, 28 nt, Human
accaugugcugcacccuggccuggggac

SEQ ID NO: 301468 - RNA, 32 nt, Human
accauguggccaggcuggucuagaacucaacc

SEQ ID NO: 301469 - RNA, 28 nt, Human
accauguggcugccuugggcucuguugc

SEQ ID NO: 301470 - RNA, 28 nt, Human
accaugugggugaacccggaggaggugu

SEQ ID NO: 301471 - RNA, 32 nt, Human
accaugugugggcucagggacccccaggacca

SEQ ID NO: 301472 - RNA, 28 nt, Human
accauguuaaggaggauuuuacagagga

SEQ ID NO: 301473 - RNA, 32 nt, Human
accauguuccuaagcuuccaagaagguuuugg

SEQ ID NO: 301474 - RNA, 32 nt, Human
accauguuccuugccaggccuccccaaccccu

SEQ ID NO: 301475 - RNA, 32 nt, Human
accauguucuugcaggcugggggcaagggauu

SEQ ID NO: 301476 - RNA, 32 nt, Human
accauguugcccaggcuggugucaaacuccug

SEQ ID NO: 301477 - RNA, 32 nt, Human
accauguugcccagguuggucuugagauccug

SEQ ID NO: 301478 - RNA, 32 nt, Human
accauguuggccaggauggucuugaaccccug

SEQ ID NO: 301479 - RNA, 32 nt, Human
accauguuggucaggcugcucucgaacuccag

SEQ ID NO: 301480 - RNA, 28 nt, Human
accauguuugccaaaggcaaaggcuccu

SEQ ID NO: 301481 - RNA, 28 nt, Human
accauguuugccaaaggcaaaggcucgg

SEQ ID NO: 301482 - RNA, 28 nt, Human
accauguuuuccucaaccuccacacccu

SEQ ID NO: 301483 - RNA, 20 nt, Human
accauuaaaagaacucaggg

SEQ ID NO: 301484 - RNA, 32 nt, Human
accauuaaggcuuuaagaacauguggaauaag

SEQ ID NO: 301485 - RNA, 32 nt, Human
accauuaauguguagagggcaaacaaagcaua

SEQ ID NO: 301486 - RNA, 32 nt, Human
accauuagcagccugaggagcuggcuggcugg

SEQ ID NO: 301487 - RNA, 32 nt, Human
accauuaguaccuaggaggcagggaucagagg

SEQ ID NO: 301488 - RNA, 32 nt, Human
accauuauaacccuacagagguggugagcaug

SEQ ID NO: 301489 - RNA, 32 nt, Human
accauuauauucuaaguuuucuaggcucauuc

SEQ ID NO: 301490 - RNA, 23 nt, Human
accauuaucacaauaaucagacu

SEQ ID NO: 301491 - RNA, 32 nt, Human
accauuaucugcauauuauaaaagccaauuuc

SEQ ID NO: 301492 - RNA, 32 nt, Human
accauucaacaugcuggggcaggauggacaug

SEQ ID NO: 301493 - RNA, 32 nt, Human
accauucaaccugccggggcaggauggacaug

SEQ ID NO: 301494 - RNA, 32 nt, Human
accauucacagaaggcucuauuucaauggauu

SEQ ID NO: 301495 - RNA, 32 nt, Human
accauucacucauguaauccucauauuaaugc

SEQ ID NO: 301496 - RNA, 32 nt, Human
accauucagcucaccugccuaggccgcagcag

SEQ ID NO: 301497 - RNA, 32 nt, Human
accauucaggaaucugcccugcacuuugcaua

SEQ ID NO: 301498 - RNA, 32 nt, Human
accauucauuacuccuccuccagauaccaacu

SEQ ID NO: 301499 - RNA, 32 nt, Human
accauucccaggcugcagaugcagaaacugug

SEQ ID NO: 301500 - RNA, 32 nt, Human
accauuccuagcucccugucacaguuuaagau

SEQ ID NO: 301501 - RNA, 32 nt, Human
accauuccuauauaauuccuggacuggugaga

SEQ ID NO: 301502 - RNA, 32 nt, Human
accauucgugaggggagaguugcaguccucuu

SEQ ID NO: 301503 - RNA, 32 nt, Human
accauucuccugccucagccucccagguagcu

SEQ ID NO: 301504 - RNA, 22 nt, Human
accauucucugcaauaaacuca

SEQ ID NO: 301505 - RNA, 32 nt, Human
accauucugaucuagagacaaaggauacucaa

SEQ ID NO: 301506 - RNA, 32 nt, Human
accauucugcucccccuaaaccuuuuguuuga

SEQ ID NO: 301507 - RNA, 24 nt, Human
accauucuggccaacauagugaaa

SEQ ID NO: 301508 - RNA, 24 nt, Human
accauucuggccaacauggugaaa

SEQ ID NO: 301509 - RNA, 32 nt, Human
accauucugugacauucuuuacaccaucccac

SEQ ID NO: 301510 - RNA, 32 nt, Human
accauucuugggaggacacuuuugccaaugaa

SEQ ID NO: 301511 - RNA, 32 nt, Human
accauugcaacaaaauacauucuuuuugcucu

SEQ ID NO: 301512 - RNA, 32 nt, Human
accauugcaacaaccucucaccaucugaagag

SEQ ID NO: 301513 - RNA, 32 nt, Human
accauugcacaccaaccugggugacagagcaa

SEQ ID NO: 301514 - RNA, 32 nt, Human
accauugcacacuaaccugggugacagaauga

SEQ ID NO: 301515 - RNA, 32 nt, Human
accauugcaccuccagccugggcaacagagug

SEQ ID NO: 301516 - RNA, 32 nt, Human
accauugcacuccagccugggugacagagcga

SEQ ID NO: 301517 - RNA, 32 nt, Human
accauugcacuccagcuugggugacagagcga

SEQ ID NO: 301518 - RNA, 32 nt, Human
accauugcacucuugucugggugacagaguga

SEQ ID NO: 301519 - RNA, 32 nt, Human
accauugcaggauaaucucacugacauuugga

SEQ ID NO: 301520 - RNA, 32 nt, Human
accauugcauuccagccuaggcaacagaguga

SEQ ID NO: 301521 - RNA, 32 nt, Human
accauugcauuccagccugggcaacaagagcg

SEQ ID NO: 301522 - RNA, 32 nt, Human
accauugcauuccagccugggcaacaagaggg

SEQ ID NO: 301523 - RNA, 32 nt, Human
accauugcauuccagccugggcaacaagagug

SEQ ID NO: 301524 - RNA, 32 nt, Human
accauugcauuccagccugggcaacagagcaa

SEQ ID NO: 301525 - RNA, 32 nt, Human
accauugcauuccagccugggugacagagcga

SEQ ID NO: 301526 - RNA, 32 nt, Human
accauugcccuccagccugggugacagaguga

SEQ ID NO: 301527 - RNA, 32 nt, Human
accauugcccucucccccgccucuucugagcu

SEQ ID NO: 301528 - RNA, 32 nt, Human
accauugcucuuuuaacauacagugcuugaau

SEQ ID NO: 301529 - RNA, 32 nt, Human
accauugcugauauugaaacuauucuaagagu

SEQ ID NO: 301530 - RNA, 32 nt, Human
accauugcuguccagccugggugacagagcaa

SEQ ID NO: 301531 - RNA, 32 nt, Human
accauuggauuggccuuagaagagaaucaucc

SEQ ID NO: 301532 - RNA, 32 nt, Human
accauuggccugguugagggcgugaccaccaa

SEQ ID NO: 301533 - RNA, 32 nt, Human
accauugguggggcuggcacgaauccagaucu

SEQ ID NO: 301534 - RNA, 32 nt, Human
accauuguacuccagccugggugacagagcaa

SEQ ID NO: 301535 - RNA, 32 nt, Human
accauuguaggcaauggaggagaguuaugcau

SEQ ID NO: 301536 - RNA, 32 nt, Human
accauugucucuguucagccaagugugcaagu

SEQ ID NO: 301537 - RNA, 23 nt, Human
accauugugcuucugagacccua

SEQ ID NO: 301538 - RNA, 32 nt, Human
accauuguguagcugggacuacaggcguccac

SEQ ID NO: 301539 - RNA, 32 nt, Human
accauuuacaaccugcauaauguggacucuug

SEQ ID NO: 301540 - RNA, 32 nt, Human
accauuuauauuuggcuuaugacauuuaaccc

SEQ ID NO: 301541 - RNA, 32 nt, Human
accauuucaguuagcaugugccucacuuuaag

SEQ ID NO: 301542 - RNA, 32 nt, Human
accauuucauucuguuucuacuaaccuauacc

SEQ ID NO: 301543 - RNA, 32 nt, Human
accauuuccaaaaagggcuuugugcuuuucac

SEQ ID NO: 301544 - RNA, 32 nt, Human
accauuuccagccucagcggggcagucuccuu

SEQ ID NO: 301545 - RNA, 32 nt, Human
accauuucccauccccauuccccaccacauua

SEQ ID NO: 301546 - RNA, 32 nt, Human
accauuucccccagauccugauucucuggggg

SEQ ID NO: 301547 - RNA, 32 nt, Human
accauuuccuccacucuuuauggcccaucacu

SEQ ID NO: 301548 - RNA, 32 nt, Human
accauuuccuggguguccuggguguuugcagc

SEQ ID NO: 301549 - RNA, 32 nt, Human
accauuucuacuucauuuggaaaaagauucag

SEQ ID NO: 301550 - RNA, 32 nt, Human
accauuucucucuuacuaacaguuucaucugu

SEQ ID NO: 301551 - RNA, 32 nt, Human
accauuucuggcuuccuuucuuugguuuugga

SEQ ID NO: 301552 - RNA, 25 nt, Human
accauuucuuccaauguaggauuca

SEQ ID NO: 301553 - RNA, 32 nt, Human
accauuugaaguugauuucucaaugcuaacua

SEQ ID NO: 301554 - RNA, 32 nt, Human
accauuugcauucagaaagcagcauuugaagc

SEQ ID NO: 301555 - RNA, 19 nt, Human
accauuugccuaaggaggu

SEQ ID NO: 301556 - RNA, 32 nt, Human
accauuuggccaaacaaccggcuacaaugcuc

SEQ ID NO: 301557 - RNA, 32 nt, Human
accauuugggcuaguuucuguguaaguguaaa

SEQ ID NO: 301558 - RNA, 32 nt, Human
accauuuguguaacagccaucugugaccugga

SEQ ID NO: 301559 - RNA, 32 nt, Human
accauuuuacuccuaugaauuuaauacuaaag

SEQ ID NO: 301560 - RNA, 32 nt, Human
accauuuuccuuguacucuucucuccacccuu

SEQ ID NO: 301561 - RNA, 32 nt, Human
accauuuucucagcaccauuguggggaguccu

SEQ ID NO: 301562 - RNA, 32 nt, Human
accauuuucugguucuuguguuggcuguggca

SEQ ID NO: 301563 - RNA, 32 nt, Human
accauuuucuucuuucucaggauuuggugcau

SEQ ID NO: 301564 - RNA, 32 nt, Human
accauuuucuugcucucccuccuuccuugggc

SEQ ID NO: 301565 - RNA, 32 nt, Human
accauuuugcuagggugugcaaugcccacaca

SEQ ID NO: 301566 - RNA, 32 nt, Human
accauuuuuaacuguuagauuugagaugaaca

SEQ ID NO: 301567 - RNA, 32 nt, Human
accauuuuugcagcuuuaauccuuagccucuu

SEQ ID NO: 301568 - RNA, 32 nt, Human
acccaaaaaucucaucuuggguguuuucaggg

SEQ ID NO: 301569 - RNA, 32 nt, Human
acccaaaaccuacauggaauguaugucuggag

SEQ ID NO: 301570 - RNA, 32 nt, Human
acccaaaacugagucccuuugggcucagaaau

SEQ ID NO: 301571 - RNA, 32 nt, Human
acccaaaagcccaucaaugauacacuggauaa

SEQ ID NO: 301572 - RNA, 32 nt, Human
acccaaaaggcagacauugcagugagccaaga

SEQ ID NO: 301573 - RNA, 32 nt, Human
acccaaaaggcggagguugcagugagccaaga

SEQ ID NO: 301574 - RNA, 32 nt, Human
acccaaaccaauaaauggugaguuuugaacaa

SEQ ID NO: 301575 - RNA, 32 nt, Human
acccaaaccaugggacccagcgccaggaauaa

SEQ ID NO: 301576 - RNA, 32 nt, Human
acccaaacuucuaaaaauugcuugcagaugag

SEQ ID NO: 301577 - RNA, 32 nt, Human
acccaaagcucucuccccacccuaccugccca

SEQ ID NO: 301578 - RNA, 32 nt, Human
acccaaaggaagcuaaacaccaccucacacuu

SEQ ID NO: 301579 - RNA, 32 nt, Human
acccaaaggcuuuauguucucauuccaaaaug

SEQ ID NO: 301580 - RNA, 32 nt, Human
acccaaagggaacacagcagaagaggaggugg

SEQ ID NO: 301581 - RNA, 32 nt, Human
acccaaaguuuucccaaaugaagagaacucac

SEQ ID NO: 301582 - RNA, 32 nt, Human
acccaaauauuaugccuuucaggaugauggua

SEQ ID NO: 301583 - RNA, 32 nt, Human
acccaaauauuugaccuaagggauccuuuauu

SEQ ID NO: 301584 - RNA, 32 nt, Human
acccaaaugaaagaaacugggggccaggcacg

SEQ ID NO: 301585 - RNA, 23 nt, Human
acccaaauggucucacacaccag

SEQ ID NO: 301586 - RNA, 18 nt, Human
acccaaauuaccccuucc

SEQ ID NO: 301587 - RNA, 32 nt, Human
acccaaauucuaggcaccugagguguuucccu

SEQ ID NO: 301588 - RNA, 32 nt, Human
acccaaauugccgcccuggcugugcugcaaac

SEQ ID NO: 301589 - RNA, 32 nt, Human
acccaaauuuuaauauuccagaagaacaacuu

SEQ ID NO: 301590 - RNA, 17 nt, Human
acccaacacccccucaa

SEQ ID NO: 301591 - RNA, 32 nt, Human
acccaacaccuuccaugacacuuccuugcuuu

SEQ ID NO: 301592 - RNA, 20 nt, Human
acccaacagugccaauggcc

SEQ ID NO: 301593 - RNA, 32 nt, Human
acccaacauaauagcagauacagacuuuuaag

SEQ ID NO: 301594 - RNA, 32 nt, Human
acccaacauggugaaaccccaucucuucuaaa

SEQ ID NO: 301595 - RNA, 32 nt, Human
acccaaccacgguccucuccggcgcaggccga

SEQ ID NO: 301596 - RNA, 32 nt, Human
acccaaccagggcuccgaaagccagccggccg

SEQ ID NO: 301597 - RNA, 32 nt, Human
acccaacccaaaccaccacaggugcuccuccu

SEQ ID NO: 301598 - RNA, 32 nt, Human
acccaacccccaggaccucaggcugcugucau

SEQ ID NO: 301599 - RNA, 32 nt, Human
acccaacccugccucccugggcuaggcucugg

SEQ ID NO: 301600 - RNA, 32 nt, Human
acccaaccuccaggagcacucgcucaucuccc

SEQ ID NO: 301601 - RNA, 32 nt, Human
acccaacuauaccaucucucuacucuuuaucu

SEQ ID NO: 301602 - RNA, 32 nt, Human
acccaacuccaccccaccugucuucaucguga

SEQ ID NO: 301603 - RNA, 32 nt, Human
acccaacuccgagggcccacgcuggggaaagc

SEQ ID NO: 301604 - RNA, 32 nt, Human
acccaacuccucccucuccgccccauagucca

SEQ ID NO: 301605 - RNA, 32 nt, Human
acccaacuccugcucucaaauggaugcagugg

SEQ ID NO: 301606 - RNA, 32 nt, Human
acccaacuggaauuugauggaaagaagguuug

SEQ ID NO: 301607 - RNA, 32 nt, Human
acccaacugucaccaucuuugcaccaaacugu

SEQ ID NO: 301608 - RNA, 32 nt, Human
acccaacuuaaccaaugcucugccucagggug

SEQ ID NO: 301609 - RNA, 32 nt, Human
acccaagaaaggaggcaacauggcugccauaa

SEQ ID NO: 301610 - RNA, 32 nt, Human
acccaagaagcugaggcaagaggaucacuuga

SEQ ID NO: 301611 - RNA, 32 nt, Human
acccaagaaguggagguugcagugagccaaga

SEQ ID NO: 301612 - RNA, 32 nt, Human
acccaagaaugagcuuacaaaguggccuuucc

SEQ ID NO: 301613 - RNA, 24 nt, Human
acccaagacugugccuucuccaga

SEQ ID NO: 301614 - RNA, 32 nt, Human
acccaagaggcagaggaugcaaugagccaaga

SEQ ID NO: 301615 - RNA, 32 nt, Human
acccaagaggcagagguugaguaagcugagaa

SEQ ID NO: 301616 - RNA, 32 nt, Human
acccaagaggcagagguugcagugaacugaga

SEQ ID NO: 301617 - RNA, 32 nt, Human
acccaagaggcagaguuugcagugagcugaga

SEQ ID NO: 301618 - RNA, 32 nt, Human
acccaagaggcggagguugaguaagcugagaa

SEQ ID NO: 301619 - RNA, 32 nt, Human
acccaagaggcggagguugcagugagccaaga

SEQ ID NO: 301620 - RNA, 32 nt, Human
acccaagaggcggagguuguggugagccgaga

SEQ ID NO: 301621 - RNA, 32 nt, Human
acccaagagguccaaggcugcagugagccaug

SEQ ID NO: 301622 - RNA, 32 nt, Human
acccaagaggucgaggcugcagugagccaaga

SEQ ID NO: 301623 - RNA, 32 nt, Human
acccaagagguggaggcugaagugagccaaga

SEQ ID NO: 301624 - RNA, 32 nt, Human
acccaagagguggagguugcggugagccaaga

SEQ ID NO: 301625 - RNA, 32 nt, Human
acccaagaucagaacuccaaaaccacucccac

SEQ ID NO: 301626 - RNA, 32 nt, Human
acccaagauccagcaggggacaggacagagua

SEQ ID NO: 301627 - RNA, 32 nt, Human
acccaagauggaagagccagagggcucuggag

SEQ ID NO: 301628 - RNA, 32 nt, Human
acccaagccacuagcaagacuccacaauguca

SEQ ID NO: 301629 - RNA, 32 nt, Human
acccaagcccaggaagucaagaaugcacugag

SEQ ID NO: 301630 - RNA, 18 nt, Human
acccaagcccccaacgcc

SEQ ID NO: 301631 - RNA, 32 nt, Human
acccaagccugcugggucucccuucccaguau

SEQ ID NO: 301632 - RNA, 32 nt, Human
acccaagccuucuucucccagauacaacggug

SEQ ID NO: 301633 - RNA, 20 nt, Human
acccaagcgccccagcgccu

SEQ ID NO: 301634 - RNA, 32 nt, Human
acccaagcugccuccccucuccuuccugugug

SEQ ID NO: 301635 - RNA, 22 nt, Human
acccaagcuggagugcaguggc

SEQ ID NO: 301636 - RNA, 32 nt, Human
acccaaggauggcugcuaucaauucuuccuuu

SEQ ID NO: 301637 - RNA, 32 nt, Human
acccaaggcauaagguugggaaaacaccucau

SEQ ID NO: 301638 - RNA, 32 nt, Human
acccaaggcugccuccagccccagcaacccgg

SEQ ID NO: 301639 - RNA, 32 nt, Human
acccaagggaccccuccccagaccagaaccaa

SEQ ID NO: 301640 - RNA, 32 nt, Human
acccaagggcagagcauuuaagagugaaguca

SEQ ID NO: 301641 - RNA, 32 nt, Human
acccaagggccugucugccagccugccugacc

SEQ ID NO: 301642 - RNA, 32 nt, Human
acccaagggucaacaggagacucucugcugag

SEQ ID NO: 301643 - RNA, 32 nt, Human
acccaaggugcugagagaucuccagcugcaca

SEQ ID NO: 301644 - RNA, 32 nt, Human
acccaaguauuuaaaaaugacucucuuaagcc

SEQ ID NO: 301645 - RNA, 32 nt, Human
acccaagucaccgaccacagagacugacgaga

SEQ ID NO: 301646 - RNA, 32 nt, Human
acccaaguccaggaguugcuaacugcacucuu

SEQ ID NO: 301647 - RNA, 32 nt, Human
acccaagucggugccacuagcccaggcagagc

SEQ ID NO: 301648 - RNA, 23 nt, Human
acccaagugauccucccaccuca

SEQ ID NO: 301649 - RNA, 20 nt, Human
acccaaguggcagggaucca

SEQ ID NO: 301650 - RNA, 32 nt, Human
acccaauacuggccuguguuguuaacagcagg

SEQ ID NO: 301651 - RNA, 32 nt, Human
acccaauagcaauggcgagaucaaggggucca

SEQ ID NO: 301652 - RNA, 32 nt, Human
acccaaucagcaguuagagagcaaggaaacuc

SEQ ID NO: 301653 - RNA, 32 nt, Human
acccaaucucucuugguagcaaauugucaaau

SEQ ID NO: 301654 - RNA, 32 nt, Human
acccaaugcagcauuuuccuuacugacaaaga

SEQ ID NO: 301655 - RNA, 32 nt, Human
acccaaugcaggucugcagggucucugcugug

SEQ ID NO: 301656 - RNA, 32 nt, Human
acccaaugccuguaccccuauuuuaucuagga

SEQ ID NO: 301657 - RNA, 30 nt, Human
acccaaugcucugcucccagccuggacuag

SEQ ID NO: 301658 - RNA, 32 nt, Human
acccaaugugcaaagugaaaacacugggcucc

SEQ ID NO: 301659 - RNA, 32 nt, Human
acccaauuucugucugaaaucuaaauuggaug

SEQ ID NO: 301660 - RNA, 32 nt, Human
acccacaacaugaaagaaauggugcuacccag

SEQ ID NO: 301661 - RNA, 32 nt, Human
acccacaaccagccccaugcaugcugcugccu

SEQ ID NO: 301662 - RNA, 32 nt, Human
acccacaacuuaggcccuagcggcagaaagga

SEQ ID NO: 301663 - RNA, 32 nt, Human
acccacaagcuuuuguucucucaguacuuguu

SEQ ID NO: 301664 - RNA, 20 nt, Human
acccacacacacaggacccg

SEQ ID NO: 301665 - RNA, 20 nt, Human
acccacacagaucaggacac

SEQ ID NO: 301666 - RNA, 32 nt, Human
acccacacagucacagucacacacacauaugu

SEQ ID NO: 301667 - RNA, 21 nt, Human
acccacacauucccauucacc

SEQ ID NO: 301668 - RNA, 32 nt, Human
acccacaccagguuccugugcuguacaguggc

SEQ ID NO: 301669 - RNA, 32 nt, Human
acccacaccccaaagcuggaaggaucugguuc

SEQ ID NO: 301670 - RNA, 32 nt, Human
acccacaccuguaaucccagcacuuugggagg

SEQ ID NO: 301671 - RNA, 32 nt, Human
acccacaccuuguguuccucauggccuacccc

SEQ ID NO: 301672 - RNA, 32 nt, Human
acccacacuuccaugagaagaagcagaucccc

SEQ ID NO: 301673 - RNA, 32 nt, Human
acccacagaaggaggaaguggaagggacagga

SEQ ID NO: 301674 - RNA, 32 nt, Human
acccacagagagagagcugcaagagcauggaa

SEQ ID NO: 301675 - RNA, 32 nt, Human
acccacagagugugcaucagucaccaccccaa

SEQ ID NO: 301676 - RNA, 32 nt, Human
acccacagaguuuaggcuggugcugccaaaaa

SEQ ID NO: 301677 - RNA, 32 nt, Human
acccacagccaagaggagucagagaugaggug

SEQ ID NO: 301678 - RNA, 32 nt, Human
acccacagcccaggcagcggguguguggagau

SEQ ID NO: 301679 - RNA, 32 nt, Human
acccacaggcggagguugcggugggcuggggu

SEQ ID NO: 301680 - RNA, 32 nt, Human
acccacagggacaauuccaaaugaaggccuua

SEQ ID NO: 301681 - RNA, 32 nt, Human
acccacagggacaauuccaaaugagggccuua

SEQ ID NO: 301682 - RNA, 32 nt, Human
acccacagggcagaggucacagugagccaaga

SEQ ID NO: 301683 - RNA, 32 nt, Human
acccacagucaguuccugccuccugcagaugu

SEQ ID NO: 301684 - RNA, 32 nt, Human
acccacagugcugcacuccuccugccccugcc

SEQ ID NO: 301685 - RNA, 32 nt, Human
acccacagugguggucaucucuucugaucuuc

SEQ ID NO: 301686 - RNA, 32 nt, Human
acccacaguuccucuuacagagcacuucagag

SEQ ID NO: 301687 - RNA, 32 nt, Human
acccacaucaccuugggaaggagaccucuacu

SEQ ID NO: 301688 - RNA, 32 nt, Human
acccacaucuggagcaggguggggagucagag

SEQ ID NO: 301689 - RNA, 23 nt, Human
acccacaugaaccaauacagccc

SEQ ID NO: 301690 - RNA, 32 nt, Human
acccacaugggguuccugguuguuccugcauc

SEQ ID NO: 301691 - RNA, 32 nt, Human
acccacauuacagcggagaagacugaggucca

SEQ ID NO: 301692 - RNA, 32 nt, Human
acccaccaaggaagacaaagaaaaacaaugaa

SEQ ID NO: 301693 - RNA, 28 nt, Human
acccaccacagcgcagccucaucaaaau

SEQ ID NO: 301694 - RNA, 32 nt, Human
acccaccaccucagugcugaggucaaggcagc

SEQ ID NO: 301695 - RNA, 32 nt, Human
acccaccaccucuugcacucucgcuuuuggag

SEQ ID NO: 301696 - RNA, 32 nt, Human
acccaccacgcccugacugcaggugugauucg

SEQ ID NO: 301697 - RNA, 32 nt, Human
acccaccagaagagcacaaagcaaggccauug

SEQ ID NO: 301698 - RNA, 24 nt, Human
acccaccagacaccacacagcaga

SEQ ID NO: 301699 - RNA, 21 nt, Human
acccaccagcucagaaccugu

SEQ ID NO: 301700 - RNA, 32 nt, Human
acccaccagcuggcuguacccggagccguggc

SEQ ID NO: 301701 - RNA, 22 nt, Human
acccaccaggacagcagucuca

SEQ ID NO: 301702 - RNA, 32 nt, Human
acccaccaugacacccacagacuucacaagcc

SEQ ID NO: 301703 - RNA, 32 nt, Human
acccaccauggcgagccccacucugagccccg

SEQ ID NO: 301704 - RNA, 32 nt, Human
acccaccaugucugccccaucacgcggccgag

SEQ ID NO: 301705 - RNA, 32 nt, Human
acccacccaaguacugaggugugacgcggcac

SEQ ID NO: 301706 - RNA, 22 nt, Human
acccacccacacgcucgucuca

SEQ ID NO: 301707 - RNA, 32 nt, Human
acccacccacaucacaggauggagucugcaag

SEQ ID NO: 301708 - RNA, 32 nt, Human
acccacccaccacacuggacuuuucuagagau

SEQ ID NO: 301709 - RNA, 32 nt, Human
acccacccagaaccuccacccucugacaccau

SEQ ID NO: 301710 - RNA, 32 nt, Human
acccacccagcuagggcagaggggucaggaug

SEQ ID NO: 301711 - RNA, 32 nt, Human
acccacccaucuuugucccuggggccugcucc

SEQ ID NO: 301712 - RNA, 32 nt, Human
acccaccccaaaaugaccuuggccaccugucu

SEQ ID NO: 301713 - RNA, 21 nt, Human
acccaccccaccccccaaaau

SEQ ID NO: 301714 - RNA, 32 nt, Human
acccaccccacccuuugcuuucauuucaggug

SEQ ID NO: 301715 - RNA, 32 nt, Human
acccaccccaguuuagaacugcaggagcuccc

SEQ ID NO: 301716 - RNA, 32 nt, Human
acccaccccuuccagcugucucagccucaggg

SEQ ID NO: 301717 - RNA, 32 nt, Human
acccaccccuuggaggagagagaccccgcacc

SEQ ID NO: 301718 - RNA, 21 nt, Human
acccacccgcccgcccagggc

SEQ ID NO: 301719 - RNA, 22 nt, Human
acccacccgccucggccucuca

SEQ ID NO: 301720 - RNA, 32 nt, Human
acccacccgcugugcugaccaugggcccugag

SEQ ID NO: 301721 - RNA, 32 nt, Human
acccacccuccaggaccccagcaaguggauuc

SEQ ID NO: 301722 - RNA, 32 nt, Human
acccacccuccccuuaaacccucugccuuuga

SEQ ID NO: 301723 - RNA, 32 nt, Human
acccacccugcagcgcuccagcucuguugugu

SEQ ID NO: 301724 - RNA, 32 nt, Human
acccacccugcucaccccugaagcuucucugg

SEQ ID NO: 301725 - RNA, 32 nt, Human
acccacccugcuccuccccaauugcucccagc

SEQ ID NO: 301726 - RNA, 32 nt, Human
acccaccgcuaccaccaccaccaccgccacca

SEQ ID NO: 301727 - RNA, 32 nt, Human
acccaccggaagcagaagccugguggaugccu

SEQ ID NO: 301728 - RNA, 32 nt, Human
acccaccggcacacagaccccaaccacgacac

SEQ ID NO: 301729 - RNA, 32 nt, Human
acccaccggcacacagaccccaaccacgguac

SEQ ID NO: 301730 - RNA, 32 nt, Human
acccaccggccacugcagcccuggugagggcg

SEQ ID NO: 301731 - RNA, 25 nt, Human
acccaccggccccaccaggcuccgc

SEQ ID NO: 301732 - RNA, 32 nt, Human
acccaccguggaggaggaaggcaagagggggu

SEQ ID NO: 301733 - RNA, 20 nt, Human
acccaccuacaccccuggca

SEQ ID NO: 301734 - RNA, 19 nt, Human
acccaccuaccccccaaaa

SEQ ID NO: 301735 - RNA, 32 nt, Human
acccaccucaacaucaagccuggggcaggugg

SEQ ID NO: 301736 - RNA, 32 nt, Human
acccaccucaggaagugcugggauuacaggcg

SEQ ID NO: 301737 - RNA, 19 nt, Human
acccaccuccaagucucca

SEQ ID NO: 301738 - RNA, 32 nt, Human
acccaccuccacccccgccacggccacccucc

SEQ ID NO: 301739 - RNA, 32 nt, Human
acccaccuccacccccuucuuccagaaucugc

SEQ ID NO: 301740 - RNA, 18 nt, Human
acccaccuccagcuucca

SEQ ID NO: 301741 - RNA, 32 nt, Human
acccaccucccaggcugaugccuggaggcagc

SEQ ID NO: 301742 - RNA, 32 nt, Human
acccaccucccauccaugcacacaccaggaug

SEQ ID NO: 301743 - RNA, 32 nt, Human
acccaccucgaaccaacaacagaagcugacaa

SEQ ID NO: 301744 - RNA, 32 nt, Human
acccaccucuuucauaagcgugaccuggaugu

SEQ ID NO: 301745 - RNA, 20 nt, Human
acccaccugauggcuucuca

SEQ ID NO: 301746 - RNA, 19 nt, Human
acccaccugcaagguccca

SEQ ID NO: 301747 - RNA, 32 nt, Human
acccaccugcagcucaggaacauacacagcuc

SEQ ID NO: 301748 - RNA, 23 nt, Human
acccaccugccaucaggcuccca

SEQ ID NO: 301749 - RNA, 22 nt, Human
acccaccugccccuuucuuuca

SEQ ID NO: 301750 - RNA, 22 nt, Human
acccaccugccucggccuccca

SEQ ID NO: 301751 - RNA, 22 nt, Human
acccaccugcgucucauacuca

SEQ ID NO: 301752 - RNA, 23 nt, Human
acccaccugcuagucgccccuca

SEQ ID NO: 301753 - RNA, 32 nt, Human
acccaccugcugcaucuuaguucagucggcuc

SEQ ID NO: 301754 - RNA, 20 nt, Human
acccaccugcugcucaccuc

SEQ ID NO: 301755 - RNA, 32 nt, Human
acccaccugcugcuguaugaauagcuguguau

SEQ ID NO: 301756 - RNA, 32 nt, Human
acccaccuggacaacauagugaaacccugucu

SEQ ID NO: 301757 - RNA, 18 nt, Human
acccaccuggcuugcauc

SEQ ID NO: 301758 - RNA, 32 nt, Human
acccaccuggugcucccccaaccagagaucca

SEQ ID NO: 301759 - RNA, 18 nt, Human
acccaccuuccccuguga

SEQ ID NO: 301760 - RNA, 32 nt, Human
acccacgaaggccacagagauggccggggcuu

SEQ ID NO: 301761 - RNA, 32 nt, Human
acccacgauucugagcccugaguaugccugga

SEQ ID NO: 301762 - RNA, 32 nt, Human
acccacgccacagcgggcucucagcacccuuc

SEQ ID NO: 301763 - RNA, 25 nt, Human
acccacgccacggccaggagcccag

SEQ ID NO: 301764 - RNA, 32 nt, Human
acccacgccuccugaggacacagccaucagca

SEQ ID NO: 301765 - RNA, 32 nt, Human
acccacgccuggcugauguuuuuauuuuacuc

SEQ ID NO: 301766 - RNA, 32 nt, Human
acccacgccuguuuucagcuguggguggccau

SEQ ID NO: 301767 - RNA, 32 nt, Human
acccacggcuggagagaaauagggagaugcag

SEQ ID NO: 301768 - RNA, 32 nt, Human
acccacgggaagauguccguggagaggcagag

SEQ ID NO: 301769 - RNA, 32 nt, Human
acccacgucuucucgggagggguggguggcac

SEQ ID NO: 301770 - RNA, 18 nt, Human
acccacgugauuugcaua

SEQ ID NO: 301771 - RNA, 32 nt, Human
acccacuaaacaguaacuccccacucccccug

SEQ ID NO: 301772 - RNA, 32 nt, Human
acccacuaauuugcacaaaacuauucuggcug

SEQ ID NO: 301773 - RNA, 32 nt, Human
acccacuacauggcagaggcugaggcggugug

SEQ ID NO: 301774 - RNA, 31 nt, Human
acccacucaauaaaucuugaaacaugaaaaa

SEQ ID NO: 301775 - RNA, 32 nt, Human
acccacucacacccacccucaguggcuucuug

SEQ ID NO: 301776 - RNA, 32 nt, Human
acccacucauauaacauaccucaggucuauuu

SEQ ID NO: 301777 - RNA, 32 nt, Human
acccacucaucugucccugaccucuaaccuuu

SEQ ID NO: 301778 - RNA, 32 nt, Human
acccacuccaggaacccagagccacauuagaa

SEQ ID NO: 301779 - RNA, 32 nt, Human
acccacuccauguuacuucugcuucgcuuucc

SEQ ID NO: 301780 - RNA, 32 nt, Human
acccacuccauucaauguuacauauaaaauag

SEQ ID NO: 301781 - RNA, 32 nt, Human
acccacucccagcucccagccuggcaugagcu

SEQ ID NO: 301782 - RNA, 32 nt, Human
acccacucccucuuagccaauauugugccuau

SEQ ID NO: 301783 - RNA, 32 nt, Human
acccacuccugccucccacccgggugccgugu

SEQ ID NO: 301784 - RNA, 32 nt, Human
acccacucucuucucccccugacccccgcucc

SEQ ID NO: 301785 - RNA, 21 nt, Human
acccacugacucagggcucag

SEQ ID NO: 301786 - RNA, 32 nt, Human
acccacugagagaagaggagcaucagcuacag

SEQ ID NO: 301787 - RNA, 32 nt, Human
acccacuggaagcugcucagcccugcucacca

SEQ ID NO: 301788 - RNA, 22 nt, Human
acccacuggaaggagaggccag

SEQ ID NO: 301789 - RNA, 28 nt, Human
acccacuggcaguccccaaggggcgcag

SEQ ID NO: 301790 - RNA, 32 nt, Human
acccacuggccagccaggccauggcuucuccc

SEQ ID NO: 301791 - RNA, 20 nt, Human
acccacuggccauagguaca

SEQ ID NO: 301792 - RNA, 24 nt, Human
acccacuggcggccaggggcacag

SEQ ID NO: 301793 - RNA, 32 nt, Human
acccacugggagaagaugccuggggguccagg

SEQ ID NO: 301794 - RNA, 32 nt, Human
acccacuggucugcuuaaagcuucccucucag

SEQ ID NO: 301795 - RNA, 32 nt, Human
acccacuguaugcacacaacuguucuugcugg

SEQ ID NO: 301796 - RNA, 32 nt, Human
acccacuuagccaagauaucacucuuggacac

SEQ ID NO: 301797 - RNA, 32 nt, Human
acccacuucuggguucucaggcuggcugacag

SEQ ID NO: 301798 - RNA, 32 nt, Human
acccacuuggacucacccccucuuggggaggg

SEQ ID NO: 301799 - RNA, 32 nt, Human
acccacuuucagcuggacacaggcgcggccuc

SEQ ID NO: 301800 - RNA, 32 nt, Human
acccacuuucucucucaaacugucuuuucuca

SEQ ID NO: 301801 - RNA, 32 nt, Human
acccacuuuguggagcuuaucauuucauuucc

SEQ ID NO: 301802 - RNA, 22 nt, Human
acccacuuuucuaccucuccca

SEQ ID NO: 301803 - RNA, 32 nt, Human
acccacuuuucugccagcuccacaaccuuggg

SEQ ID NO: 301804 - RNA, 24 nt, Human
acccagaaaaucaguacuaacaaa

SEQ ID NO: 301805 - RNA, 32 nt, Human
acccagaaaggcaagggcauggggaagaauau

SEQ ID NO: 301806 - RNA, 32 nt, Human
acccagaaauuuagacagggaucucuuaccuu

SEQ ID NO: 301807 - RNA, 32 nt, Human
acccagaacacagggcuucuacuccaggguuu

SEQ ID NO: 301808 - RNA, 21 nt, Human
acccagaacccugacucuuga

SEQ ID NO: 301809 - RNA, 32 nt, Human
acccagaacugaacuagacuccccuaccuuag

SEQ ID NO: 301810 - RNA, 32 nt, Human
acccagaagcagcucugggcugccaggauggu

SEQ ID NO: 301811 - RNA, 32 nt, Human
acccagaagccaggacugacugugcaccagag

SEQ ID NO: 301812 - RNA, 32 nt, Human
acccagaagcggagguugcagugagcugagau

SEQ ID NO: 301813 - RNA, 32 nt, Human
acccagaaggcagacgccaguaguacuguccu

SEQ ID NO: 301814 - RNA, 32 nt, Human
acccagaaggcagagguugcagugagcugaga

SEQ ID NO: 301815 - RNA, 32 nt, Human
acccagaaggcagagguugcaugaugcaauca

SEQ ID NO: 301816 - RNA, 32 nt, Human
acccagaaggcagggguugcagugagccaaga

SEQ ID NO: 301817 - RNA, 32 nt, Human
acccagaaggcggaaguugcagugagccgaga

SEQ ID NO: 301818 - RNA, 32 nt, Human
acccagaaggcggaaguugcagugagcugaga

SEQ ID NO: 301819 - RNA, 32 nt, Human
acccagaaggugcagguugcagugagcugaga

SEQ ID NO: 301820 - RNA, 32 nt, Human
acccagaagguggagguagcagugagccgaga

SEQ ID NO: 301821 - RNA, 32 nt, Human
acccagaagguggagguugcagugagccgaga

SEQ ID NO: 301822 - RNA, 32 nt, Human
acccagaaugccacaaccacaggccgaaccac

SEQ ID NO: 301823 - RNA, 18 nt, Human
acccagacaauggcgaga

SEQ ID NO: 301824 - RNA, 32 nt, Human
acccagacacacaccccagcaccuggcacuua

SEQ ID NO: 301825 - RNA, 32 nt, Human
acccagacacaccagucuuguaucucuuaaaa

SEQ ID NO: 301826 - RNA, 32 nt, Human
acccagacagagagacaggcagacacagccua

SEQ ID NO: 301827 - RNA, 19 nt, Human
acccagacagaugguccca

SEQ ID NO: 301828 - RNA, 21 nt, Human
acccagaccagucccaacgcc

SEQ ID NO: 301829 - RNA, 32 nt, Human
acccagaccccacuccagagggagccuggcag

SEQ ID NO: 301830 - RNA, 22 nt, Human
acccagacgcaggacagagugg

SEQ ID NO: 301831 - RNA, 32 nt, Human
acccagacucacuggccacaccucagcagggg

SEQ ID NO: 301832 - RNA, 22 nt, Human
acccagacuggagugcaguggc

SEQ ID NO: 301833 - RNA, 23 nt, Human
acccagacuggagugcaguggcg

SEQ ID NO: 301834 - RNA, 24 nt, Human
acccagacuggagugcaguggugu

SEQ ID NO: 301835 - RNA, 22 nt, Human
acccagacuggagugcgauggc

SEQ ID NO: 301836 - RNA, 18 nt, Human
acccagagaaccugggca

SEQ ID NO: 301837 - RNA, 32 nt, Human
acccagagaaggagaagccagcaaaggagacg

SEQ ID NO: 301838 - RNA, 32 nt, Human
acccagagacagacagacuauggccauggcuc

SEQ ID NO: 301839 - RNA, 32 nt, Human
acccagagacuuguaucagcaggaagccauug

SEQ ID NO: 301840 - RNA, 32 nt, Human
acccagagaggcggcagcaggagagccacaga

SEQ ID NO: 301841 - RNA, 32 nt, Human
acccagagagugagcagcagcaagauuuauug

SEQ ID NO: 301842 - RNA, 32 nt, Human
acccagagccaagaaagcugagauauccugug

SEQ ID NO: 301843 - RNA, 32 nt, Human
acccagagcccaugggcccucccgggacaucu

SEQ ID NO: 301844 - RNA, 32 nt, Human
acccagagccuccaccaaacccucuccauguc

SEQ ID NO: 301845 - RNA, 32 nt, Human
acccagagcucucacccucucuucuagggcac

SEQ ID NO: 301846 - RNA, 32 nt, Human
acccagaggaaagcuguugaugcugaaauguu

SEQ ID NO: 301847 - RNA, 21 nt, Human
acccagaggaaguucuccaga

SEQ ID NO: 301848 - RNA, 19 nt, Human
acccagaggaugcagggaa

SEQ ID NO: 301849 - RNA, 32 nt, Human
acccagaggcggagguuguagugagccgaaau

SEQ ID NO: 301850 - RNA, 32 nt, Human
acccagagggagcagugaggcaggacagaugg

SEQ ID NO: 301851 - RNA, 32 nt, Human
acccagaggggaaggugguggaaaaugugcac

SEQ ID NO: 301852 - RNA, 32 nt, Human
acccagaggggccccuggcacacuccagucca

SEQ ID NO: 301853 - RNA, 32 nt, Human
acccagagggugcugcccaccaugcuccugag

SEQ ID NO: 301854 - RNA, 32 nt, Human
acccagaguagaacagcagccagcaagcugcc

SEQ ID NO: 301855 - RNA, 32 nt, Human
acccagagucccaggccccuggaguuguuuuc

SEQ ID NO: 301856 - RNA, 32 nt, Human
acccagagugucccugugggaggcaggcagaa

SEQ ID NO: 301857 - RNA, 32 nt, Human
acccagagugugguccuuggccgccuccugcu

SEQ ID NO: 301858 - RNA, 32 nt, Human
acccagaguuuauguagaaagcauugaauguu

SEQ ID NO: 301859 - RNA, 32 nt, Human
acccagauagcagagguugcagugagcugaga

SEQ ID NO: 301860 - RNA, 32 nt, Human
acccagauaugcuuuuggaaugugguccucac

SEQ ID NO: 301861 - RNA, 20 nt, Human
acccagaucccgagguccga

SEQ ID NO: 301862 - RNA, 32 nt, Human
acccagauccuggggucccucacuacagcucc

SEQ ID NO: 301863 - RNA, 32 nt, Human
acccagaucguccacaccacacccucuuucag

SEQ ID NO: 301864 - RNA, 32 nt, Human
acccagaugccccuuucuggauuauucugggg

SEQ ID NO: 301865 - RNA, 21 nt, Human
acccagauggcuccucugggc

SEQ ID NO: 301866 - RNA, 32 nt, Human
acccagaugguuuaaggacaccccagaguccc

SEQ ID NO: 301867 - RNA, 32 nt, Human
acccagauuagugcagcccggaggcuuagggu

SEQ ID NO: 301868 - RNA, 32 nt, Human
acccagcaaaaaugaagaggaaaacaaacagg

SEQ ID NO: 301869 - RNA, 32 nt, Human
acccagcaacaacaaaagaacuaguccucuua

SEQ ID NO: 301870 - RNA, 32 nt, Human
acccagcaagaguuucaggaaguggguugcua

SEQ ID NO: 301871 - RNA, 32 nt, Human
acccagcaagggacagaggccacaggccugga

SEQ ID NO: 301872 - RNA, 20 nt, Human
acccagcacacccacuucca

SEQ ID NO: 301873 - RNA, 32 nt, Human
acccagcacagcccgcuggccccucuccugca

SEQ ID NO: 301874 - RNA, 32 nt, Human
acccagcacccaagguucagugacacagggug

SEQ ID NO: 301875 - RNA, 32 nt, Human
acccagcaccccuccgguagguggguggccac

SEQ ID NO: 301876 - RNA, 32 nt, Human
acccagcaccucagugaagggggccugcuugc

SEQ ID NO: 301877 - RNA, 32 nt, Human
acccagcaccuugcagauuuucuuaaggaauu

SEQ ID NO: 301878 - RNA, 20 nt, Human
acccagcacuaccccaaacc

SEQ ID NO: 301879 - RNA, 32 nt, Human
acccagcacuuccucuugcccuccuggcuuua

SEQ ID NO: 301880 - RNA, 21 nt, Human
acccagcagacacugcccagg

SEQ ID NO: 301881 - RNA, 32 nt, Human
acccagcagagggaggcagaagggccuuccca

SEQ ID NO: 301882 - RNA, 32 nt, Human
acccagcagauggagguugcagugagccaaga

SEQ ID NO: 301883 - RNA, 18 nt, Human
acccagcagcaucaagcc

SEQ ID NO: 301884 - RNA, 19 nt, Human
acccagcagccaaacgccu

SEQ ID NO: 301885 - RNA, 22 nt, Human
acccagcagcgcccacagcgcc

SEQ ID NO: 301886 - RNA, 20 nt, Human
acccagcagcgcccgaggcc

SEQ ID NO: 301887 - RNA, 18 nt, Human
acccagcagcgcggcgcc

SEQ ID NO: 301888 - RNA, 19 nt, Human
acccagcagcgcuccaccu

SEQ ID NO: 301889 - RNA, 19 nt, Human
acccagcagcgcuccgccu

SEQ ID NO: 301890 - RNA, 23 nt, Human
acccagcaggaggacccaacgcu

SEQ ID NO: 301891 - RNA, 32 nt, Human
acccagcaggcagagguugcagugagccaaga

SEQ ID NO: 301892 - RNA, 21 nt, Human
acccagcaggcagaguggcgu

SEQ ID NO: 301893 - RNA, 32 nt, Human
acccagcaggcagaguggcguggccuccccau

SEQ ID NO: 301894 - RNA, 32 nt, Human
acccagcaggcggagguugcggugagucgaga

SEQ ID NO: 301895 - RNA, 32 nt, Human
acccagcagggaacagggagcggugugcagag

SEQ ID NO: 301896 - RNA, 32 nt, Human
acccagcagguggcccagggaggcagauacag

SEQ ID NO: 301897 - RNA, 24 nt, Human
acccagcaguccagugcaacgucu

SEQ ID NO: 301898 - RNA, 18 nt, Human
acccagcagugcccugcc

SEQ ID NO: 301899 - RNA, 31 nt, Human
acccagcaguuuccucugcucacucuuuucc

SEQ ID NO: 301900 - RNA, 32 nt, Human
acccagcaucugcagugcccagccgcacaggg

SEQ ID NO: 301901 - RNA, 32 nt, Human
acccagcaucuugccagaaguuggcucagaau

SEQ ID NO: 301902 - RNA, 32 nt, Human
acccagcauguccuaggaaugcagccccagga

SEQ ID NO: 301903 - RNA, 32 nt, Human
acccagccaaaccagguaaggccuacgugggg

SEQ ID NO: 301904 - RNA, 32 nt, Human
acccagccaacucgcagagggaagggaggggc

SEQ ID NO: 301905 - RNA, 32 nt, Human
acccagccaagugccuuuuccucagcacugag

SEQ ID NO: 301906 - RNA, 23 nt, Human
acccagccagaggccuggcucaa

SEQ ID NO: 301907 - RNA, 32 nt, Human
acccagccagcaaguauauagcacagaacacu

SEQ ID NO: 301908 - RNA, 19 nt, Human
acccagccaucggcugcgg

SEQ ID NO: 301909 - RNA, 20 nt, Human
acccagccaucugcccaggg

SEQ ID NO: 301910 - RNA, 18 nt, Human
acccagcccaccccuucc

SEQ ID NO: 301911 - RNA, 19 nt, Human
acccagcccacuucugcca

SEQ ID NO: 301912 - RNA, 19 nt, Human
acccagccccaggcauggc

SEQ ID NO: 301913 - RNA, 22 nt, Human
acccagcccccacauccugugc

SEQ ID NO: 301914 - RNA, 32 nt, Human
acccagcccccacauccugugccuccaucagc

SEQ ID NO: 301915 - RNA, 21 nt, Human
acccagcccccuccccuucca

SEQ ID NO: 301916 - RNA, 20 nt, Human
acccagccccuggcucuggg

SEQ ID NO: 301917 - RNA, 32 nt, Human
acccagcccgggagguggaugaaugugggaga

SEQ ID NO: 301918 - RNA, 32 nt, Human
acccagcccucauccucccuugcucacaaagu

SEQ ID NO: 301919 - RNA, 32 nt, Human
acccagcccuccugaagauagccagagagccc

SEQ ID NO: 301920 - RNA, 32 nt, Human
acccagcccucugaaccagcagucuuugccug

SEQ ID NO: 301921 - RNA, 32 nt, Human
acccagcccugccuccucagccagugucuuca

SEQ ID NO: 301922 - RNA, 21 nt, Human
acccagcccugcugucccgcg

SEQ ID NO: 301923 - RNA, 32 nt, Human
acccagccgcaaggucuuccagcugcugccca

SEQ ID NO: 301924 - RNA, 19 nt, Human
acccagccgcugcccggcg

SEQ ID NO: 301925 - RNA, 32 nt, Human
acccagccggagcgagcaacagguuggugaaa

SEQ ID NO: 301926 - RNA, 32 nt, Human
acccagccucacagacccucucaggccucuga

SEQ ID NO: 301927 - RNA, 32 nt, Human
acccagccucaguccuaacuccuggggcuggg

SEQ ID NO: 301928 - RNA, 23 nt, Human
acccagccucuagaacuaugaga

SEQ ID NO: 301929 - RNA, 32 nt, Human
acccagccucuuccucuuccuuuuggauacgc

SEQ ID NO: 301930 - RNA, 19 nt, Human
acccagccugcugccucag

SEQ ID NO: 301931 - RNA, 32 nt, Human
acccagccuggaccccgugcagagcuucuccc

SEQ ID NO: 301932 - RNA, 32 nt, Human
acccagccuggccacacacuguggugccaucu

SEQ ID NO: 301933 - RNA, 32 nt, Human
acccagccuggccagcagacacacacagggau

SEQ ID NO: 301934 - RNA, 32 nt, Human
acccagccugggauaggggcagaggaggcgag

SEQ ID NO: 301935 - RNA, 25 nt, Human
acccagccugggugacagagcgaga

SEQ ID NO: 301936 - RNA, 32 nt, Human
acccagccuguuucucuuuuuccacucuucuu

SEQ ID NO: 301937 - RNA, 32 nt, Human
acccagccuugcacuccaaggcugcgcaccgc

SEQ ID NO: 301938 - RNA, 17 nt, Human
acccagcgcccccucaa

SEQ ID NO: 301939 - RNA, 32 nt, Human
acccagcgcgccuucuccaggaauaggcgaga

SEQ ID NO: 301940 - RNA, 32 nt, Human
acccagcggcgccggggcgucugugauuggga

SEQ ID NO: 301941 - RNA, 32 nt, Human
acccagcgggaagagguugcagugagccaaga

SEQ ID NO: 301942 - RNA, 32 nt, Human
acccagcuacucgggagguugaggcaggagaa

SEQ ID NO: 301943 - RNA, 32 nt, Human
acccagcuacuuugcauuccagaaguuuccau

SEQ ID NO: 301944 - RNA, 32 nt, Human
acccagcuagauguggccaggccacacuccag

SEQ ID NO: 301945 - RNA, 19 nt, Human
acccagcucaaggagcuua

SEQ ID NO: 301946 - RNA, 32 nt, Human
acccagcucaaggagcuuaugcaggagcaggu

SEQ ID NO: 301947 - RNA, 20 nt, Human
acccagcucacaggagcuua

SEQ ID NO: 301948 - RNA, 32 nt, Human
acccagcucacuggucagccuacacaugucuc

SEQ ID NO: 301949 - RNA, 22 nt, Human
acccagcucaggccugccccag

SEQ ID NO: 301950 - RNA, 32 nt, Human
acccagcuccacccucucgucaagcucauccu

SEQ ID NO: 301951 - RNA, 32 nt, Human
acccagcucccaucugcugcccauggaugcuc

SEQ ID NO: 301952 - RNA, 23 nt, Human
acccagcucccuaccuccugugc

SEQ ID NO: 301953 - RNA, 24 nt, Human
acccagcucccugcacacccaggc

SEQ ID NO: 301954 - RNA, 19 nt, Human
acccagcuccucacauugg

SEQ ID NO: 301955 - RNA, 19 nt, Human
acccagcuccucugagcca

SEQ ID NO: 301956 - RNA, 23 nt, Human
acccagcuccugaagcaccaggc

SEQ ID NO: 301957 - RNA, 24 nt, Human
acccagcuccugccacccaauggc

SEQ ID NO: 301958 - RNA, 24 nt, Human
acccagcuccugccacccaguggc

SEQ ID NO: 301959 - RNA, 21 nt, Human
acccagcuccuuuugcugggc

SEQ ID NO: 301960 - RNA, 24 nt, Human
acccagcucgaggaucccaggugc

SEQ ID NO: 301961 - RNA, 32 nt, Human
acccagcucucauucucuucuagguuguucca

SEQ ID NO: 301962 - RNA, 24 nt, Human
acccagcucuccugcucugaacca

SEQ ID NO: 301963 - RNA, 32 nt, Human
acccagcucugagugguuggugggaccucugc

SEQ ID NO: 301964 - RNA, 21 nt, Human
acccagcucugugcccaaggc

SEQ ID NO: 301965 - RNA, 32 nt, Human
acccagcucuuccucaccuuccugucuaguuu

SEQ ID NO: 301966 - RNA, 32 nt, Human
acccagcugcagcaaggagguggggaaggagg

SEQ ID NO: 301967 - RNA, 32 nt, Human
acccagcugccacccaccuccuccaucacugg

SEQ ID NO: 301968 - RNA, 32 nt, Human
acccagcugccaccucuccauccugcugcccu

SEQ ID NO: 301969 - RNA, 23 nt, Human
acccagcuggcaaugugcccagg

SEQ ID NO: 301970 - RNA, 32 nt, Human
acccagcugggagggggaggaggaggagcuca

SEQ ID NO: 301971 - RNA, 32 nt, Human
acccagcuggguagcagccagcaaaggccauc

SEQ ID NO: 301972 - RNA, 32 nt, Human
acccagcuguagugagguugcagugauugagu

SEQ ID NO: 301973 - RNA, 32 nt, Human
acccagcuguggucccagagaucagggggugu

SEQ ID NO: 301974 - RNA, 32 nt, Human
acccagcuucacuaacagugggcugaaaacau

SEQ ID NO: 301975 - RNA, 32 nt, Human
acccagcuucacuaacagugggcugaaaccaa

SEQ ID NO: 301976 - RNA, 19 nt, Human
acccagcuuccagcccagg

SEQ ID NO: 301977 - RNA, 20 nt, Human
acccagcuucccuucuaacc

SEQ ID NO: 301978 - RNA, 32 nt, Human
acccaggaaagguguggcuggaagcacugaac

SEQ ID NO: 301979 - RNA, 32 nt, Human
acccaggaacugagaaggagguuuccaguuca

SEQ ID NO: 301980 - RNA, 32 nt, Human
acccaggaagaggagguugcagugagccgaga

SEQ ID NO: 301981 - RNA, 32 nt, Human
acccaggaagcagagguugcaguaagcugaga

SEQ ID NO: 301982 - RNA, 32 nt, Human
acccaggaagcagagguugcagugagcagaga

SEQ ID NO: 301983 - RNA, 32 nt, Human
acccaggaagcagagguugcagugagcugaga

SEQ ID NO: 301984 - RNA, 32 nt, Human
acccaggaagcggagguugcaaucagcugaga

SEQ ID NO: 301985 - RNA, 32 nt, Human
acccaggaagcggagguugcagugagccaaga

SEQ ID NO: 301986 - RNA, 32 nt, Human
acccaggaagcggagguugcagugagccgaga

SEQ ID NO: 301987 - RNA, 32 nt, Human
acccaggaagcgggguugcagugagccaaagg

SEQ ID NO: 301988 - RNA, 32 nt, Human
acccaggaaguagagguugcagugagccgaga

SEQ ID NO: 301989 - RNA, 32 nt, Human
acccaggaaguggagacugcagugagccgaua

SEQ ID NO: 301990 - RNA, 25 nt, Human
acccaggaaguggagguugcaguga

SEQ ID NO: 301991 - RNA, 32 nt, Human
acccaggaaguggagguugcagugagccgaga

SEQ ID NO: 301992 - RNA, 32 nt, Human
acccaggaaguggagguugcagugagcuaaga

SEQ ID NO: 301993 - RNA, 32 nt, Human
acccaggaaguggagguugcagugagcugaga

SEQ ID NO: 301994 - RNA, 32 nt, Human
acccaggaaguggagguugcagugagcugagg

SEQ ID NO: 301995 - RNA, 32 nt, Human
acccaggaaguggcaguugcagugagccgaga

SEQ ID NO: 301996 - RNA, 20 nt, Human
acccaggacaagcccuccag

SEQ ID NO: 301997 - RNA, 32 nt, Human
acccaggacacggagauugcagugagccaaga

SEQ ID NO: 301998 - RNA, 32 nt, Human
acccaggacagcccccagcccaacuaggaaag

SEQ ID NO: 301999 - RNA, 32 nt, Human
acccaggaccgggagcggcagagcagagggcg

SEQ ID NO: 302000 - RNA, 32 nt, Human
acccaggaccucuggaccucagguucccaaga

SEQ ID NO: 302001 - RNA, 32 nt, Human
acccaggacgcagagguugcggugagccaaga

SEQ ID NO: 302002 - RNA, 32 nt, Human
acccaggacggaggcugcaugcccgaggacca

SEQ ID NO: 302003 - RNA, 32 nt, Human
acccaggacuccuuucuuccauuuuaacacuu

SEQ ID NO: 302004 - RNA, 22 nt, Human
acccaggacugaacucuccagg

SEQ ID NO: 302005 - RNA, 32 nt, Human
acccaggacugccccgcggagcuggcuuggac

SEQ ID NO: 302006 - RNA, 32 nt, Human
acccaggacugcgugggaguuugugccuugug

SEQ ID NO: 302007 - RNA, 32 nt, Human
acccaggacuucccaaacccagaggcugccau

SEQ ID NO: 302008 - RNA, 32 nt, Human
acccaggacuuccucacccucuucuauacucu

SEQ ID NO: 302009 - RNA, 32 nt, Human
acccaggagacagagguugcagugagccaaga

SEQ ID NO: 302010 - RNA, 32 nt, Human
acccaggagacagagguuguagugagcugaga

SEQ ID NO: 302011 - RNA, 32 nt, Human
acccaggagacagggguugcagugagccaaga

SEQ ID NO: 302012 - RNA, 32 nt, Human
acccaggagacauggguugcagugagccgaga

SEQ ID NO: 302013 - RNA, 32 nt, Human
acccaggagaccagaagagugcaucaggggac

SEQ ID NO: 302014 - RNA, 32 nt, Human
acccaggagacggaaguugcagugagcugaga

SEQ ID NO: 302015 - RNA, 32 nt, Human
acccaggagacggagcuugcagugagccgaga

SEQ ID NO: 302016 - RNA, 32 nt, Human
acccaggagacggagguugcagugagccgaga

SEQ ID NO: 302017 - RNA, 32 nt, Human
acccaggagacggagguugcggugaguugaga

SEQ ID NO: 302018 - RNA, 32 nt, Human
acccaggagacggugguugcagugagccaaga

SEQ ID NO: 302019 - RNA, 32 nt, Human
acccaggagacggugguugcagugagcgaaga

SEQ ID NO: 302020 - RNA, 32 nt, Human
acccaggagaggaagaaagaaaggagagaggg

SEQ ID NO: 302021 - RNA, 32 nt, Human
acccaggagaggaagguugcaguaagcugaga

SEQ ID NO: 302022 - RNA, 32 nt, Human
acccaggagagggaugggacacagcacugggc

SEQ ID NO: 302023 - RNA, 32 nt, Human
acccaggagauagagguugcaaugagccaaga

SEQ ID NO: 302024 - RNA, 32 nt, Human
acccaggagauggaaguugcagugagcugaua

SEQ ID NO: 302025 - RNA, 25 nt, Human
acccaggagauggagguugcaguga

SEQ ID NO: 302026 - RNA, 32 nt, Human
acccaggagauggagguugcagugagccaaga

SEQ ID NO: 302027 - RNA, 32 nt, Human
acccaggagauggagguugcagugagcugaga

SEQ ID NO: 302028 - RNA, 32 nt, Human
acccaggagauggagguugcggugagcugaga

SEQ ID NO: 302029 - RNA, 32 nt, Human
acccaggagcauccaccuccuucucugucuca

SEQ ID NO: 302030 - RNA, 32 nt, Human
acccaggagcuagggaagagacccuagccucc

SEQ ID NO: 302031 - RNA, 32 nt, Human
acccaggaggaagagguugcagugagccaaga

SEQ ID NO: 302032 - RNA, 32 nt, Human
acccaggaggaggagcuugcagugagccgaga

SEQ ID NO: 302033 - RNA, 32 nt, Human
acccaggaggagguggagaucgcagugagcug

SEQ ID NO: 302034 - RNA, 32 nt, Human
acccaggaggcaaaggcugcagugagccaaga

SEQ ID NO: 302035 - RNA, 32 nt, Human
acccaggaggcaaagguugcagugagccacga

SEQ ID NO: 302036 - RNA, 32 nt, Human
acccaggaggcacagauugcagugagccaaga

SEQ ID NO: 302037 - RNA, 32 nt, Human
acccaggaggcacagcuugcagugagcgaaga

SEQ ID NO: 302038 - RNA, 32 nt, Human
acccaggaggcacagguugcagugagccagga

SEQ ID NO: 302039 - RNA, 32 nt, Human
acccaggaggcagaaguugcaagguugagcca

SEQ ID NO: 302040 - RNA, 32 nt, Human
acccaggaggcagaaguugcagugagcagaga

SEQ ID NO: 302041 - RNA, 32 nt, Human
acccaggaggcagaaguugcagugagccgaau

SEQ ID NO: 302042 - RNA, 32 nt, Human
acccaggaggcagaaguugcagugagcugaga

SEQ ID NO: 302043 - RNA, 32 nt, Human
acccaggaggcagacguugcagcgagccaaau

SEQ ID NO: 302044 - RNA, 32 nt, Human
acccaggaggcagagaucgcagugaguugaga

SEQ ID NO: 302045 - RNA, 32 nt, Human
acccaggaggcagagauugcagugagccaaga

SEQ ID NO: 302046 - RNA, 32 nt, Human
acccaggaggcagagauugcagugagcugaga

SEQ ID NO: 302047 - RNA, 32 nt, Human
acccaggaggcagagauugcggugagccaaga

SEQ ID NO: 302048 - RNA, 32 nt, Human
acccaggaggcagagauugcggugagccggga

SEQ ID NO: 302049 - RNA, 32 nt, Human
acccaggaggcagagcuugcagugagccaaga

SEQ ID NO: 302050 - RNA, 32 nt, Human
acccaggaggcagagcuugcagugagccgaga

SEQ ID NO: 302051 - RNA, 32 nt, Human
acccaggaggcagagcuugcagugagccuaga

SEQ ID NO: 302052 - RNA, 32 nt, Human
acccaggaggcagagcuugcagugagcugaga

SEQ ID NO: 302053 - RNA, 32 nt, Human
acccaggaggcagagcuuguagugagccuaga

SEQ ID NO: 302054 - RNA, 32 nt, Human
acccaggaggcagaggcuacagugagcugaga

SEQ ID NO: 302055 - RNA, 32 nt, Human
acccaggaggcagaggguugcagugagccgag

SEQ ID NO: 302056 - RNA, 32 nt, Human
acccaggaggcagaggucgcagugagucgaga

SEQ ID NO: 302057 - RNA, 32 nt, Human
acccaggaggcagagguuacagugagcagaga

SEQ ID NO: 302058 - RNA, 32 nt, Human
acccaggaggcagagguugcaaugagccaaga

SEQ ID NO: 302059 - RNA, 32 nt, Human
acccaggaggcagagguugcagcgagcugaga

SEQ ID NO: 302060 - RNA, 32 nt, Human
acccaggaggcagagguugcaguaagccaaga

SEQ ID NO: 302061 - RNA, 32 nt, Human
acccaggaggcagagguugcaguaagccuagg

SEQ ID NO: 302062 - RNA, 32 nt, Human
acccaggaggcagagguugcagucagccaaga

SEQ ID NO: 302063 - RNA, 25 nt, Human
acccaggaggcagagguugcaguga

SEQ ID NO: 302064 - RNA, 32 nt, Human
acccaggaggcagagguugcagugagccaaga

SEQ ID NO: 302065 - RNA, 32 nt, Human
acccaggaggcagagguugcagugagccaagg

SEQ ID NO: 302066 - RNA, 32 nt, Human
acccaggaggcagagguugcagugagccgaga

SEQ ID NO: 302067 - RNA, 32 nt, Human
acccaggaggcagagguugcagugagcuaaga

SEQ ID NO: 302068 - RNA, 32 nt, Human
acccaggaggcagagguugcagugagcugaga

SEQ ID NO: 302069 - RNA, 32 nt, Human
acccaggaggcagagguugcagugagcuguga

SEQ ID NO: 302070 - RNA, 32 nt, Human
acccaggaggcagagguugcagugagucaaga

SEQ ID NO: 302071 - RNA, 32 nt, Human
acccaggaggcagagguugcagugagugaaga

SEQ ID NO: 302072 - RNA, 32 nt, Human
acccaggaggcagagguugcagugcaccaaga

SEQ ID NO: 302073 - RNA, 32 nt, Human
acccaggaggcagagguugcagugcgcugaga

SEQ ID NO: 302074 - RNA, 32 nt, Human
acccaggaggcagagguugcagugggccaaga

SEQ ID NO: 302075 - RNA, 32 nt, Human
acccaggaggcagagguugcggugagccgaga

SEQ ID NO: 302076 - RNA, 32 nt, Human
acccaggaggcagagguugcggugagucgaga

SEQ ID NO: 302077 - RNA, 32 nt, Human
acccaggaggcagagguugcguugagccaaga

SEQ ID NO: 302078 - RNA, 32 nt, Human
acccaggaggcagagguuggggugagcugaga

SEQ ID NO: 302079 - RNA, 32 nt, Human
acccaggaggcagagguugguccacagcacuc

SEQ ID NO: 302080 - RNA, 32 nt, Human
acccaggaggcagagguuguagugagccaaga

SEQ ID NO: 302081 - RNA, 32 nt, Human
acccaggaggcagaguuugcagucagccaaga

SEQ ID NO: 302082 - RNA, 32 nt, Human
acccaggaggcagaguuugcagugagccaaga

SEQ ID NO: 302083 - RNA, 32 nt, Human
acccaggaggcagaguuugcagugagcugaga

SEQ ID NO: 302084 - RNA, 32 nt, Human
acccaggaggcagcuguugcagugagccaaga

SEQ ID NO: 302085 - RNA, 32 nt, Human
acccaggaggcagugauugcagugagcugaga

SEQ ID NO: 302086 - RNA, 32 nt, Human
acccaggaggcagugguugcaaugagccgaga

SEQ ID NO: 302087 - RNA, 32 nt, Human
acccaggaggccgagguugcagugagccaaga

SEQ ID NO: 302088 - RNA, 32 nt, Human
acccaggaggcggaaguugcagugagcugaga

SEQ ID NO: 302089 - RNA, 25 nt, Human
acccaggaggcggacguugcaguga

SEQ ID NO: 302090 - RNA, 32 nt, Human
acccaggaggcggagauugcagugagccgaga

SEQ ID NO: 302091 - RNA, 32 nt, Human
acccaggaggcggagauugcagugagcugaga

SEQ ID NO: 302092 - RNA, 32 nt, Human
acccaggaggcggagcuggcagugagcugaga

SEQ ID NO: 302093 - RNA, 25 nt, Human
acccaggaggcggagcuugcaguga

SEQ ID NO: 302094 - RNA, 32 nt, Human
acccaggaggcggagcuugcagugagcagaga

SEQ ID NO: 302095 - RNA, 32 nt, Human
acccaggaggcggagcuugcagugagccaaga

SEQ ID NO: 302096 - RNA, 32 nt, Human
acccaggaggcggagcuugcagugagccauga

SEQ ID NO: 302097 - RNA, 32 nt, Human
acccaggaggcggagcuugcagugagccgaga

SEQ ID NO: 302098 - RNA, 32 nt, Human
acccaggaggcggagcuugcagugagcugaga

SEQ ID NO: 302099 - RNA, 32 nt, Human
acccaggaggcggaggcagaggcugcagugac

SEQ ID NO: 302100 - RNA, 32 nt, Human
acccaggaggcggaggcugcagugagcccaga

SEQ ID NO: 302101 - RNA, 32 nt, Human
acccaggaggcggaggcugcagugagcugaga

SEQ ID NO: 302102 - RNA, 32 nt, Human
acccaggaggcggagguagcagugagccaaga

SEQ ID NO: 302103 - RNA, 32 nt, Human
acccaggaggcggagguuacagugagccaaga

SEQ ID NO: 302104 - RNA, 32 nt, Human
acccaggaggcggagguugcacugagccgaga

SEQ ID NO: 302105 - RNA, 32 nt, Human
acccaggaggcggagguugcagggagggagac

SEQ ID NO: 302106 - RNA, 32 nt, Human
acccaggaggcggagguugcaguaagccaagg

SEQ ID NO: 302107 - RNA, 25 nt, Human
acccaggaggcggagguugcaguga

SEQ ID NO: 302108 - RNA, 32 nt, Human
acccaggaggcggagguugcagugaaccgaga

SEQ ID NO: 302109 - RNA, 32 nt, Human
acccaggaggcggagguugcagugacccgaga

SEQ ID NO: 302110 - RNA, 32 nt, Human
acccaggaggcggagguugcagugagacgaga

SEQ ID NO: 302111 - RNA, 32 nt, Human
acccaggaggcggagguugcagugagcagaga

SEQ ID NO: 302112 - RNA, 32 nt, Human
acccaggaggcggagguugcagugagccaaga

SEQ ID NO: 302113 - RNA, 32 nt, Human
acccaggaggcggagguugcagugagccagga

SEQ ID NO: 302114 - RNA, 32 nt, Human
acccaggaggcggagguugcagugagccgaga

SEQ ID NO: 302115 - RNA, 32 nt, Human
acccaggaggcggagguugcagugagcucaga

SEQ ID NO: 302116 - RNA, 32 nt, Human
acccaggaggcggagguugcagugagcugaga

SEQ ID NO: 302117 - RNA, 32 nt, Human
acccaggaggcggagguugcagugagcugagu

SEQ ID NO: 302118 - RNA, 32 nt, Human
acccaggaggcggagguugcagugaguugaga

SEQ ID NO: 302119 - RNA, 32 nt, Human
acccaggaggcggagguugcagugauccaaga

SEQ ID NO: 302120 - RNA, 32 nt, Human
acccaggaggcggagguugccgugagccaaga

SEQ ID NO: 302121 - RNA, 25 nt, Human
acccaggaggcggagguugcgguga

SEQ ID NO: 302122 - RNA, 32 nt, Human
acccaggaggcggagguugcggugacccucca

SEQ ID NO: 302123 - RNA, 32 nt, Human
acccaggaggcggagguugcggugagccaaga

SEQ ID NO: 302124 - RNA, 32 nt, Human
acccaggaggcggagguugcggugagccgaga

SEQ ID NO: 302125 - RNA, 32 nt, Human
acccaggaggcggagguugcggugagcugaga

SEQ ID NO: 302126 - RNA, 32 nt, Human
acccaggaggcggagguugcggugaguugaga

SEQ ID NO: 302127 - RNA, 32 nt, Human
acccaggaggcggagguuguagugagccaaga

SEQ ID NO: 302128 - RNA, 32 nt, Human
acccaggaggcggagguuguagugagcugaga

SEQ ID NO: 302129 - RNA, 32 nt, Human
acccaggaggcggagguuguauaggcugagau

SEQ ID NO: 302130 - RNA, 32 nt, Human
acccaggaggcggagguuguggugagccaaga

SEQ ID NO: 302131 - RNA, 32 nt, Human
acccaggaggcggaguuugcagugagcugaga

SEQ ID NO: 302132 - RNA, 32 nt, Human
acccaggaggcggcgguugcagugagccaaga

SEQ ID NO: 302133 - RNA, 32 nt, Human
acccaggaggcggggguugcagugagucgaga

SEQ ID NO: 302134 - RNA, 32 nt, Human
acccaggaggcguagcuagcagugagccaaga

SEQ ID NO: 302135 - RNA, 32 nt, Human
acccaggaggcugaggcaagagaaucacuuga

SEQ ID NO: 302136 - RNA, 32 nt, Human
acccaggaggcugaggcaggagaaucgcugga

SEQ ID NO: 302137 - RNA, 32 nt, Human
acccaggaggcugaggcaggagaaucgcuuga

SEQ ID NO: 302138 - RNA, 32 nt, Human
acccaggaggcugaggcaugagaaucgcuugg

SEQ ID NO: 302139 - RNA, 32 nt, Human
acccaggaggcugagguaggaggaucacuuaa

SEQ ID NO: 302140 - RNA, 32 nt, Human
acccaggaggcugaggugggaggaucacuuaa

SEQ ID NO: 302141 - RNA, 32 nt, Human
acccaggaggcugagguugcagugagccagga

SEQ ID NO: 302142 - RNA, 32 nt, Human
acccaggaggcugagguugcagugagcccaga

SEQ ID NO: 302143 - RNA, 32 nt, Human
acccaggagggagcuuguggggcaggucugga

SEQ ID NO: 302144 - RNA, 32 nt, Human
acccaggagguagaagcugcagugagcaggga

SEQ ID NO: 302145 - RNA, 32 nt, Human
acccaggagguagaaguugcagugagccgaga

SEQ ID NO: 302146 - RNA, 32 nt, Human
acccaggagguagaggcugcagugagcaggga

SEQ ID NO: 302147 - RNA, 32 nt, Human
acccaggagguagaggcugcagugagccggga

SEQ ID NO: 302148 - RNA, 32 nt, Human
acccaggagguagaggcugcagugagcuggga

SEQ ID NO: 302149 - RNA, 32 nt, Human
acccaggagguagagguugcagugagccaaga

SEQ ID NO: 302150 - RNA, 32 nt, Human
acccaggagguagagguugcagugagccgaga

SEQ ID NO: 302151 - RNA, 32 nt, Human
acccaggaggugaagguugcagugaccggaga

SEQ ID NO: 302152 - RNA, 32 nt, Human
acccaggaggugcagguugcagugagccgaga

SEQ ID NO: 302153 - RNA, 32 nt, Human
acccaggagguggaaguugcuuugagccgaga

SEQ ID NO: 302154 - RNA, 32 nt, Human
acccaggagguggacauuacagugagcccaga

SEQ ID NO: 302155 - RNA, 32 nt, Human
acccaggagguggagacugcagugagccaaga

SEQ ID NO: 302156 - RNA, 32 nt, Human
acccaggagguggagauugcagugagcugaga

SEQ ID NO: 302157 - RNA, 32 nt, Human
acccaggagguggagcuugcaaugagccgaga

SEQ ID NO: 302158 - RNA, 32 nt, Human
acccaggagguggagcuugcagugagccgaga

SEQ ID NO: 302159 - RNA, 32 nt, Human
acccaggagguggaggaugcagugaacugaga

SEQ ID NO: 302160 - RNA, 32 nt, Human
acccaggagguggaggcugcagugagcugaga

SEQ ID NO: 302161 - RNA, 32 nt, Human
acccaggagguggaggcugcggugagccgaga

SEQ ID NO: 302162 - RNA, 32 nt, Human
acccaggagguggagguagcagugagccgaga

SEQ ID NO: 302163 - RNA, 32 nt, Human
acccaggagguggaggucgcagugagccgaga

SEQ ID NO: 302164 - RNA, 32 nt, Human
acccaggagguggagguuacagugagccaaga

SEQ ID NO: 302165 - RNA, 32 nt, Human
acccaggagguggagguuacagugagcugaga

SEQ ID NO: 302166 - RNA, 25 nt, Human
acccaggagguggagguuccaguga

SEQ ID NO: 302167 - RNA, 32 nt, Human
acccaggagguggagguuccagugagccaaaa

SEQ ID NO: 302168 - RNA, 32 nt, Human
acccaggagguggagguugaaaugagcugaga

SEQ ID NO: 302169 - RNA, 32 nt, Human
acccaggagguggagguugcaagugagcugag

SEQ ID NO: 302170 - RNA, 32 nt, Human
acccaggagguggagguugcagcaagcagaga

SEQ ID NO: 302171 - RNA, 23 nt, Human
acccaggagguggagguugcagu

SEQ ID NO: 302172 - RNA, 32 nt, Human
acccaggagguggagguugcaguaagccaaga

SEQ ID NO: 302173 - RNA, 32 nt, Human
acccaggagguggagguugcaguaagcugaga

SEQ ID NO: 302174 - RNA, 25 nt, Human
acccaggagguggagguugcaguga

SEQ ID NO: 302175 - RNA, 32 nt, Human
acccaggagguggagguugcagugaacugaga

SEQ ID NO: 302176 - RNA, 32 nt, Human
acccaggagguggagguugcagugagcagaga

SEQ ID NO: 302177 - RNA, 32 nt, Human
acccaggagguggagguugcagugagccaaga

SEQ ID NO: 302178 - RNA, 32 nt, Human
acccaggagguggagguugcagugagccaagg

SEQ ID NO: 302179 - RNA, 32 nt, Human
acccaggagguggagguugcagugagccagag

SEQ ID NO: 302180 - RNA, 32 nt, Human
acccaggagguggagguugcagugagccgaag

SEQ ID NO: 302181 - RNA, 32 nt, Human
acccaggagguggagguugcagugagccgaga

SEQ ID NO: 302182 - RNA, 32 nt, Human
acccaggagguggagguugcagugagccgagu

SEQ ID NO: 302183 - RNA, 32 nt, Human
acccaggagguggagguugcagugagcugaga

SEQ ID NO: 302184 - RNA, 32 nt, Human
acccaggagguggagguugcagugagcuggga

SEQ ID NO: 302185 - RNA, 32 nt, Human
acccaggagguggagguugcagugaggcaaga

SEQ ID NO: 302186 - RNA, 32 nt, Human
acccaggagguggagguugcagugagucaaga

SEQ ID NO: 302187 - RNA, 32 nt, Human
acccaggagguggagguugcagugagucgaga

SEQ ID NO: 302188 - RNA, 25 nt, Human
acccaggagguggagguugcagugg

SEQ ID NO: 302189 - RNA, 32 nt, Human
acccaggagguggagguugcagugggccgaga

SEQ ID NO: 302190 - RNA, 32 nt, Human
acccaggagguggagguugcaguuagcugaga

SEQ ID NO: 302191 - RNA, 25 nt, Human
acccaggagguggagguugcgguga

SEQ ID NO: 302192 - RNA, 32 nt, Human
acccaggagguggagguugcggugaacugaga

SEQ ID NO: 302193 - RNA, 32 nt, Human
acccaggagguggagguugcggugagcugagg

SEQ ID NO: 302194 - RNA, 32 nt, Human
acccaggagguggagguugcugugagccaaga

SEQ ID NO: 302195 - RNA, 32 nt, Human
acccaggagguggagguuguagugagacaaga

SEQ ID NO: 302196 - RNA, 32 nt, Human
acccaggagguggagguuguggugagccaaga

SEQ ID NO: 302197 - RNA, 32 nt, Human
acccaggagguggagguuguggugagccgaga

SEQ ID NO: 302198 - RNA, 32 nt, Human
acccaggagguggagguuguggugagcugaga

SEQ ID NO: 302199 - RNA, 25 nt, Human
acccaggagguggaguuugcaguga

SEQ ID NO: 302200 - RNA, 32 nt, Human
acccaggagguggaguuugcagugagcugaga

SEQ ID NO: 302201 - RNA, 32 nt, Human
acccaggaggugggcauugcagugagccgaga

SEQ ID NO: 302202 - RNA, 32 nt, Human
acccaggagguggggguugcaccgagcagaga

SEQ ID NO: 302203 - RNA, 32 nt, Human
acccaggagguggugguugcagugagccuaga

SEQ ID NO: 302204 - RNA, 32 nt, Human
acccaggagguugaggcugcagugagucauga

SEQ ID NO: 302205 - RNA, 32 nt, Human
acccaggagucaaaagcugcagugagcuacug

SEQ ID NO: 302206 - RNA, 32 nt, Human
acccaggagucagagguuucagugagccgaga

SEQ ID NO: 302207 - RNA, 32 nt, Human
acccaggaguccaggcccccagccccuccucc

SEQ ID NO: 302208 - RNA, 32 nt, Human
acccaggagucggagguugcagugaguugaga

SEQ ID NO: 302209 - RNA, 32 nt, Human
acccaggagucugucucacuguuuauccaaac

SEQ ID NO: 302210 - RNA, 32 nt, Human
acccaggaguucaagaccagccuggacaacau

SEQ ID NO: 302211 - RNA, 32 nt, Human
acccaggaguucaagucugcagugagcuauga

SEQ ID NO: 302212 - RNA, 32 nt, Human
acccaggaguuggagcuugcagugagccgaga

SEQ ID NO: 302213 - RNA, 32 nt, Human
acccaggaugcggagguugcagugagccgaga

SEQ ID NO: 302214 - RNA, 32 nt, Human
acccaggcaagagagaagcaaccaccacaagc

SEQ ID NO: 302215 - RNA, 31 nt, Human
acccaggcaauguccucaaacaagccugugc

SEQ ID NO: 302216 - RNA, 22 nt, Human
acccaggcaccagacagccaga

SEQ ID NO: 302217 - RNA, 32 nt, Human
acccaggcaccuucgcuuccagaugcugccag

SEQ ID NO: 302218 - RNA, 32 nt, Human
acccaggcagagugagcucucuggccucuugg

SEQ ID NO: 302219 - RNA, 32 nt, Human
acccaggcaggaagcccaggaggagugcgggc

SEQ ID NO: 302220 - RNA, 32 nt, Human
acccaggcaguggagguugcagugagccaaga

SEQ ID NO: 302221 - RNA, 32 nt, Human
acccaggcaucugcuuuacucuggaccauagg

SEQ ID NO: 302222 - RNA, 23 nt, Human
acccaggccacaagaguggacgu

SEQ ID NO: 302223 - RNA, 22 nt, Human
acccaggccagaguguaguggc

SEQ ID NO: 302224 - RNA, 21 nt, Human
acccaggccagcagguggggu

SEQ ID NO: 302225 - RNA, 20 nt, Human
acccaggccaggcauguggc

SEQ ID NO: 302226 - RNA, 32 nt, Human
acccaggccauguucccaaaggccagcggggg

SEQ ID NO: 302227 - RNA, 32 nt, Human
acccaggcccaccccagagacccuccaugaac

SEQ ID NO: 302228 - RNA, 32 nt, Human
acccaggcccuauccugaacaggagacuaaac

SEQ ID NO: 302229 - RNA, 22 nt, Human
acccaggccgagcaggaugagc

SEQ ID NO: 302230 - RNA, 23 nt, Human
acccaggccggacugcagcggcg

SEQ ID NO: 302231 - RNA, 22 nt, Human
acccaggccggagugcaguggc

SEQ ID NO: 302232 - RNA, 23 nt, Human
acccaggccggagugcaguggcg

SEQ ID NO: 302233 - RNA, 21 nt, Human
acccaggccugcgaggagcgu

SEQ ID NO: 302234 - RNA, 32 nt, Human
acccaggccuggagcugggaugcaauguaggc

SEQ ID NO: 302235 - RNA, 32 nt, Human
acccaggccugggaagagcucggccccgauca

SEQ ID NO: 302236 - RNA, 32 nt, Human
acccaggccuuccuuccucagcuccugcagcc

SEQ ID NO: 302237 - RNA, 22 nt, Human
acccaggccuuuggagaauggc

SEQ ID NO: 302238 - RNA, 32 nt, Human
acccaggcggcagagguugcagugagccaaga

SEQ ID NO: 302239 - RNA, 32 nt, Human
acccaggcggcagagguugcagugagucgaga

SEQ ID NO: 302240 - RNA, 32 nt, Human
acccaggcggccaagcuccagaccgugccaga

SEQ ID NO: 302241 - RNA, 32 nt, Human
acccaggcgggugggagccucagucugucggg

SEQ ID NO: 302242 - RNA, 23 nt, Human
acccaggcuagaaugcaguggug

SEQ ID NO: 302243 - RNA, 20 nt, Human
acccaggcuagaggguggug

SEQ ID NO: 302244 - RNA, 21 nt, Human
acccaggcuagagugcagugg

SEQ ID NO: 302245 - RNA, 22 nt, Human
acccaggcuagagugcaguggc

SEQ ID NO: 302246 - RNA, 23 nt, Human
acccaggcuagagugcaguggcg

SEQ ID NO: 302247 - RNA, 22 nt, Human
acccaggcuagaguguaguggc

SEQ ID NO: 302248 - RNA, 32 nt, Human
acccaggcucaagugauccuccuaucucagcc

SEQ ID NO: 302249 - RNA, 32 nt, Human
acccaggcucucaugagcagauugucccuuau

SEQ ID NO: 302250 - RNA, 32 nt, Human
acccaggcucuuccucuggguaaaggucugua

SEQ ID NO: 302251 - RNA, 24 nt, Human
acccaggcugaacugcaguggugu

SEQ ID NO: 302252 - RNA, 32 nt, Human
acccaggcugaagugcaguagugcaaucucag

SEQ ID NO: 302253 - RNA, 21 nt, Human
acccaggcugaagugcagugg

SEQ ID NO: 302254 - RNA, 21 nt, Human
acccaggcugagaagggacgu

SEQ ID NO: 302255 - RNA, 21 nt, Human
acccaggcugagugcaguggc

SEQ ID NO: 302256 - RNA, 23 nt, Human
acccaggcugcagugcaauggcg

SEQ ID NO: 302257 - RNA, 32 nt, Human
acccaggcugccaggcuggaguggaguggcau

SEQ ID NO: 302258 - RNA, 22 nt, Human
acccaggcuggaauacaguggc

SEQ ID NO: 302259 - RNA, 22 nt, Human
acccaggcuggaauccaguggc

SEQ ID NO: 302260 - RNA, 22 nt, Human
acccaggcuggaaugcaauggc

SEQ ID NO: 302261 - RNA, 22 nt, Human
acccaggcuggaaugcaguggc

SEQ ID NO: 302262 - RNA, 23 nt, Human
acccaggcuggaaugcaguggcg

SEQ ID NO: 302263 - RNA, 24 nt, Human
acccaggcuggaaugcaguggugu

SEQ ID NO: 302264 - RNA, 23 nt, Human
acccaggcuggaccccagcacgu

SEQ ID NO: 302265 - RNA, 23 nt, Human
acccaggcuggacugcaaugacg

SEQ ID NO: 302266 - RNA, 22 nt, Human
acccaggcuggacugcaguggc

SEQ ID NO: 302267 - RNA, 23 nt, Human
acccaggcuggagagacacugcg

SEQ ID NO: 302268 - RNA, 22 nt, Human
acccaggcuggagagcaguggc

SEQ ID NO: 302269 - RNA, 23 nt, Human
acccaggcuggagcacacuggug

SEQ ID NO: 302270 - RNA, 22 nt, Human
acccaggcuggagcgcaguggc

SEQ ID NO: 302271 - RNA, 32 nt, Human
acccaggcuggaggacaggaccagccacccuc

SEQ ID NO: 302272 - RNA, 24 nt, Human
acccaggcuggaggacagugaugu

SEQ ID NO: 302273 - RNA, 24 nt, Human
acccaggcuggaguacaauagcgu

SEQ ID NO: 302274 - RNA, 22 nt, Human
acccaggcuggaguacacuggc

SEQ ID NO: 302275 - RNA, 20 nt, Human
acccaggcuggaguacagug

SEQ ID NO: 302276 - RNA, 22 nt, Human
acccaggcuggaguacaguggc

SEQ ID NO: 302277 - RNA, 24 nt, Human
acccaggcuggaguacaguggcgu

SEQ ID NO: 302278 - RNA, 23 nt, Human
acccaggcuggaguacagugggu

SEQ ID NO: 302279 - RNA, 24 nt, Human
acccaggcuggaguacaguggugu

SEQ ID NO: 302280 - RNA, 20 nt, Human
acccaggcuggaguagagug

SEQ ID NO: 302281 - RNA, 20 nt, Human
acccaggcuggaguauagug

SEQ ID NO: 302282 - RNA, 24 nt, Human
acccaggcuggaguauaguggugu

SEQ ID NO: 302283 - RNA, 22 nt, Human
acccaggcuggaguccaguggc

SEQ ID NO: 302284 - RNA, 24 nt, Human
acccaggcuggaguccaguggcgu

SEQ ID NO: 302285 - RNA, 23 nt, Human
acccaggcuggaguccaguggug

SEQ ID NO: 302286 - RNA, 24 nt, Human
acccaggcuggaguccaguggugu

SEQ ID NO: 302287 - RNA, 24 nt, Human
acccaggcuggagucuagugucgu

SEQ ID NO: 302288 - RNA, 22 nt, Human
acccaggcuggagugagguggu

SEQ ID NO: 302289 - RNA, 21 nt, Human
acccaggcuggagugcaaggc

SEQ ID NO: 302290 - RNA, 23 nt, Human
acccaggcuggagugcaaugacg

SEQ ID NO: 302291 - RNA, 24 nt, Human
acccaggcuggagugcaauggagu

SEQ ID NO: 302292 - RNA, 22 nt, Human
acccaggcuggagugcaauggc

SEQ ID NO: 302293 - RNA, 23 nt, Human
acccaggcuggagugcaauggcg

SEQ ID NO: 302294 - RNA, 24 nt, Human
acccaggcuggagugcaauggcgu

SEQ ID NO: 302295 - RNA, 22 nt, Human
acccaggcuggagugcaauggu

SEQ ID NO: 302296 - RNA, 23 nt, Human
acccaggcuggagugcaauggug

SEQ ID NO: 302297 - RNA, 22 nt, Human
acccaggcuggagugcacuggc

SEQ ID NO: 302298 - RNA, 22 nt, Human
acccaggcuggagugcagcagu

SEQ ID NO: 302299 - RNA, 22 nt, Human
acccaggcuggagugcaguagc

SEQ ID NO: 302300 - RNA, 23 nt, Human
acccaggcuggagugcaguagcg

SEQ ID NO: 302301 - RNA, 23 nt, Human
acccaggcuggagugcaguagug

SEQ ID NO: 302302 - RNA, 32 nt, Human
acccaggcuggagugcaguagugcaaucaggg

SEQ ID NO: 302303 - RNA, 20 nt, Human
acccaggcuggagugcagug

SEQ ID NO: 302304 - RNA, 21 nt, Human
acccaggcuggagugcagugg

SEQ ID NO: 302305 - RNA, 22 nt, Human
acccaggcuggagugcaguggc

SEQ ID NO: 302306 - RNA, 23 nt, Human
acccaggcuggagugcaguggcg

SEQ ID NO: 302307 - RNA, 24 nt, Human
acccaggcuggagugcaguggcgu

SEQ ID NO: 302308 - RNA, 23 nt, Human
acccaggcuggagugcagugggu

SEQ ID NO: 302309 - RNA, 22 nt, Human
acccaggcuggagugcaguggu

SEQ ID NO: 302310 - RNA, 23 nt, Human
acccaggcuggagugcaguggug

SEQ ID NO: 302311 - RNA, 24 nt, Human
acccaggcuggagugcaguggugu

SEQ ID NO: 302312 - RNA, 24 nt, Human
acccaggcuggagugcagugucgu

SEQ ID NO: 302313 - RNA, 24 nt, Human
acccaggcuggagugccauagugu

SEQ ID NO: 302314 - RNA, 22 nt, Human
acccaggcuggagugccauggc

SEQ ID NO: 302315 - RNA, 22 nt, Human
acccaggcuggagugccguggc

SEQ ID NO: 302316 - RNA, 23 nt, Human
acccaggcuggagugcgauggcg

SEQ ID NO: 302317 - RNA, 22 nt, Human
acccaggcuggagugcgguggc

SEQ ID NO: 302318 - RNA, 23 nt, Human
acccaggcuggagugcgguggcg

SEQ ID NO: 302319 - RNA, 23 nt, Human
acccaggcuggagugcgguggug

SEQ ID NO: 302320 - RNA, 22 nt, Human
acccaggcuggagugcuauggc

SEQ ID NO: 302321 - RNA, 22 nt, Human
acccaggcuggagugcuguggc

SEQ ID NO: 302322 - RNA, 23 nt, Human
acccaggcuggagugcuguggug

SEQ ID NO: 302323 - RNA, 32 nt, Human
accuacuguaugacaccacauucuuccuaaca

SEQ ID NO: 302324 - RNA, 32 nt, Human
accuacugugugcuugcucuguuaguucuuug

SEQ ID NO: 302325 - RNA, 32 nt, Human
accuacuuaaagucuucauuuauauucuuuca

SEQ ID NO: 302326 - RNA, 32 nt, Human
accuacuucuuuucaugggaaggugagguguc

SEQ ID NO: 302327 - RNA, 32 nt, Human
accuacuugaaagccugugggcaacguucuuu

SEQ ID NO: 302328 - RNA, 32 nt, Human
accuacuuguucccaccuugggagaggacgau

SEQ ID NO: 302329 - RNA, 31 nt, Human
accuacuuugacuuuuugcauuuaaaacaga

SEQ ID NO: 302330 - RNA, 32 nt, Human
accuacuuugggaccuuugggggugaguuccc

SEQ ID NO: 302331 - RNA, 32 nt, Human
accuagaaagcgagcggcgccgcccgugggga

SEQ ID NO: 302332 - RNA, 32 nt, Human
accuagaacagguccugaagcauaugcgagag

SEQ ID NO: 302333 - RNA, 22 nt, Human
accuagaaccuccacccucuga

SEQ ID NO: 302334 - RNA, 32 nt, Human
accuagaagacgcuauccgauccaucaggccc

SEQ ID NO: 302335 - RNA, 32 nt, Human
accuagaagguggagguugcagugagcggaga

SEQ ID NO: 302336 - RNA, 32 nt, Human
accuagaaguaagaagaggagccucagaagaa

SEQ ID NO: 302337 - RNA, 22 nt, Human
accuagaauuuucaaucuggca

SEQ ID NO: 302338 - RNA, 32 nt, Human
accuagacacugggagugcugccaccacgugg

SEQ ID NO: 302339 - RNA, 32 nt, Human
accuagaccacccuccaugucagguacugagc

SEQ ID NO: 302340 - RNA, 32 nt, Human
accuagacuagacuggagugcaauggccugau

SEQ ID NO: 302341 - RNA, 32 nt, Human
accuagacuuagaacaaauccugcuuuugaaa

SEQ ID NO: 302342 - RNA, 32 nt, Human
accuagagacuucacccgggggugaaggggua

SEQ ID NO: 302343 - RNA, 32 nt, Human
accuagagaggaagugagggaggccacggaau

SEQ ID NO: 302344 - RNA, 22 nt, Human
accuagagccgggcacagcccu

SEQ ID NO: 302345 - RNA, 32 nt, Human
accuagagcucuacagcugcugccucgguacu

SEQ ID NO: 302346 - RNA, 32 nt, Human
accuagagcuguccuguccacuccaggccgga

SEQ ID NO: 302347 - RNA, 32 nt, Human
accuagaggaugagccacaaaauaccucuaug

SEQ ID NO: 302348 - RNA, 32 nt, Human
accuagagucauggccauggcaaccaaaggag

SEQ ID NO: 302349 - RNA, 32 nt, Human
accuagaguuccagcaggagugaacaggaaca

SEQ ID NO: 302350 - RNA, 32 nt, Human
accuagaucuggagcgggaguaggaacgggag

SEQ ID NO: 302351 - RNA, 20 nt, Human
accuagauguccccagcacc

SEQ ID NO: 302352 - RNA, 32 nt, Human
accuagcaaugaagguugggaagguuguuccc

SEQ ID NO: 302353 - RNA, 32 nt, Human
accuagcaccgccaaucccgccuggauggagu

SEQ ID NO: 302354 - RNA, 32 nt, Human
accuagccagcuguugcauuagcuaaagcagc

SEQ ID NO: 302355 - RNA, 32 nt, Human
accuagccccuucuuugggguggagagaauuu

SEQ ID NO: 302356 - RNA, 32 nt, Human
accuagccucagagacagagaaggagaggggg

SEQ ID NO: 302357 - RNA, 32 nt, Human
accuagccugugcagccuccugggaauccagu

SEQ ID NO: 302358 - RNA, 24 nt, Human
accuagccuugcagcugcagcaga

SEQ ID NO: 302359 - RNA, 20 nt, Human
accuagcgccgccgccgccg

SEQ ID NO: 302360 - RNA, 32 nt, Human
accuagcguucugugccaugcuagagcuugag

SEQ ID NO: 302361 - RNA, 32 nt, Human
accuagcucacugcucucucuccugcaaaguc

SEQ ID NO: 302362 - RNA, 19 nt, Human
accuagcucagcugaauca

SEQ ID NO: 302363 - RNA, 32 nt, Human
accuagcugcaccccagcgccugggcccgccc

SEQ ID NO: 302364 - RNA, 18 nt, Human
accuagcuucccucuacc

SEQ ID NO: 302365 - RNA, 32 nt, Human
accuaggagaaacaagacagaaaacaaaucuu

SEQ ID NO: 302366 - RNA, 32 nt, Human
accuaggaggcagaagcuaagugauuugcuca

SEQ ID NO: 302367 - RNA, 32 nt, Human
accuaggaggcagaaguugcagugagcagaga

SEQ ID NO: 302368 - RNA, 32 nt, Human
accuaggaggcagagguugcagugaaccgagg

SEQ ID NO: 302369 - RNA, 32 nt, Human
accuaggaggcagagguugcagugagccaagu

SEQ ID NO: 302370 - RNA, 32 nt, Human
accuaggaggcagaguuugcagugagcugaga

SEQ ID NO: 302371 - RNA, 25 nt, Human
accuaggaggcggagguugcaguga

SEQ ID NO: 302372 - RNA, 32 nt, Human
accuaggaggcggagguugcagugagccaaga

SEQ ID NO: 302373 - RNA, 32 nt, Human
accuaggaggcggagguugcagugagucaaga

SEQ ID NO: 302374 - RNA, 32 nt, Human
accuaggaggcugagauugcagugagccgaaa

SEQ ID NO: 302375 - RNA, 32 nt, Human
accuaggaggggaagguugcagugagccgaga

SEQ ID NO: 302376 - RNA, 21 nt, Human
accuaggagguccaccuggca

SEQ ID NO: 302377 - RNA, 32 nt, Human
accuaggaggucgaggcugcagugagccaaga

SEQ ID NO: 302378 - RNA, 32 nt, Human
accuaggagguggaggcugcagcgagcugaga

SEQ ID NO: 302379 - RNA, 32 nt, Human
accuaggagguggagguugcagugagccgaga

SEQ ID NO: 302380 - RNA, 32 nt, Human
accuaggagguggagguugcagugagcugaga

SEQ ID NO: 302381 - RNA, 32 nt, Human
accuaggagguggagguugcauucaacugaga

SEQ ID NO: 302382 - RNA, 32 nt, Human
accuaggagguggcgguugcugugagccaaga

SEQ ID NO: 302383 - RNA, 32 nt, Human
accuaggagguggucuuguggugguacauuug

SEQ ID NO: 302384 - RNA, 31 nt, Human
accuaggcaaagaguauauguaggagguggg

SEQ ID NO: 302385 - RNA, 32 nt, Human
accuaggcaaccugggcggggcucauagagcu

SEQ ID NO: 302386 - RNA, 32 nt, Human
accuaggcacgaucucagcucacugcaaccuc

SEQ ID NO: 302387 - RNA, 32 nt, Human
accuaggcaggccugucuccaguuguuucaga

SEQ ID NO: 302388 - RNA, 32 nt, Human
accuaggcuagccccaaacuccugggcucaag

SEQ ID NO: 302389 - RNA, 32 nt, Human
accuaggcucacugcaaccucagccuccuggg

SEQ ID NO: 302390 - RNA, 32 nt, Human
accuaggcuccgaacacugagauaaagcagca

SEQ ID NO: 302391 - RNA, 32 nt, Human
accuagggaagcaugaaccacagggucccuga

SEQ ID NO: 302392 - RNA, 32 nt, Human
accuagggagcugaggccuaggcgaggcgaga

SEQ ID NO: 302393 - RNA, 32 nt, Human
accuagggaggcagagguuguagugagccaag

SEQ ID NO: 302394 - RNA, 32 nt, Human
accuagggauucagcaacagguuuccacaggg

SEQ ID NO: 302395 - RNA, 32 nt, Human
accuaggggaaaugcaaaaaccugcaaaagau

SEQ ID NO: 302396 - RNA, 32 nt, Human
accuaggggugggagagcuggauaguccuggg

SEQ ID NO: 302397 - RNA, 32 nt, Human
accuagggugccucccagccugguggacccaa

SEQ ID NO: 302398 - RNA, 32 nt, Human
accuaggucaggacgaggcauggagaugcuac

SEQ ID NO: 302399 - RNA, 32 nt, Human
accuagguucaagugauucucaugccucagcc

SEQ ID NO: 302400 - RNA, 32 nt, Human
accuaguaaauacuuucccaucucucacccca

SEQ ID NO: 302401 - RNA, 32 nt, Human
accuaguacgugugaggugcugugaggauaga

SEQ ID NO: 302402 - RNA, 32 nt, Human
accuagucuuucuaugcuccaaaugaaugucu

SEQ ID NO: 302403 - RNA, 32 nt, Human
accuagugccccagccgaaccugcccuggcuc

SEQ ID NO: 302404 - RNA, 24 nt, Human
accuagugcggaacaagucuccca

SEQ ID NO: 302405 - RNA, 32 nt, Human
accuaguggagcugugagaagagguccuccag

SEQ ID NO: 302406 - RNA, 32 nt, Human
accuauaaaggcagguauuucgggcccuccuc

SEQ ID NO: 302407 - RNA, 32 nt, Human
accuauaagaaaaaggagagaagaguauauaa

SEQ ID NO: 302408 - RNA, 32 nt, Human
accuauaagaagccuuaauuugcacagugugu

SEQ ID NO: 302409 - RNA, 32 nt, Human
accuauacaccaacuacuguuaccaugacgac

SEQ ID NO: 302410 - RNA, 32 nt, Human
accuauacauacgugcacacacacauacauau

SEQ ID NO: 302411 - RNA, 32 nt, Human
accuauaccuucucaaaagaggacacugagcc

SEQ ID NO: 302412 - RNA, 32 nt, Human
accuauagccuuugugcuguucugccuugccu

SEQ ID NO: 302413 - RNA, 32 nt, Human
accuauaucucccuugaaaauacuuucaggcu

SEQ ID NO: 302414 - RNA, 32 nt, Human
accuauaugcgacacaaaaugagaccuuuccc

SEQ ID NO: 302415 - RNA, 32 nt, Human
accuauauuuccacauugugcauugugacaca

SEQ ID NO: 302416 - RNA, 19 nt, Human
accuaucaaaucaugguga

SEQ ID NO: 302417 - RNA, 22 nt, Human
accuaucaagaccucugggaua

SEQ ID NO: 302418 - RNA, 32 nt, Human
accuaucacccaggcuggaguggaguggcacg

SEQ ID NO: 302419 - RNA, 32 nt, Human
accuaucagaaccugcacugaccaacaaauaa

SEQ ID NO: 302420 - RNA, 32 nt, Human
accuaucaguuagcacaggauccuucccugga

SEQ ID NO: 302421 - RNA, 32 nt, Human
accuaucccuuucgauuuggcuuuaccuucau

SEQ ID NO: 302422 - RNA, 32 nt, Human
accuauccuaagcuuaugaugaugaguuaugu

SEQ ID NO: 302423 - RNA, 32 nt, Human
accuauccuguguccccacccccuuggcagcc

SEQ ID NO: 302424 - RNA, 22 nt, Human
accuaucguggugacugggaua

SEQ ID NO: 302425 - RNA, 32 nt, Human
accuaucucugccuucccaccugugcccacag

SEQ ID NO: 302426 - RNA, 32 nt, Human
accuaucugcagucccccagcacacaaggaag

SEQ ID NO: 302427 - RNA, 32 nt, Human
accuaucugcauggaccucuguggaccacagc

SEQ ID NO: 302428 - RNA, 32 nt, Human
accuaucuucugcagggcccugagaugggguc

SEQ ID NO: 302429 - RNA, 32 nt, Human
accuaucuuuaagaucucuaauuggaauuaua

SEQ ID NO: 302430 - RNA, 32 nt, Human
accuaugaaaagaagcggggaaaacaacaaca

SEQ ID NO: 302431 - RNA, 32 nt, Human
accuaugaauguaaagaguguggggaagcuuu

SEQ ID NO: 302432 - RNA, 32 nt, Human
accuaugacucggcucugccucccaguccgca

SEQ ID NO: 302433 - RNA, 32 nt, Human
accuaugagugagaacaggcgguguuugguuu

SEQ ID NO: 302434 - RNA, 24 nt, Human
accuaugcaauaacauuuaggaua

SEQ ID NO: 302435 - RNA, 32 nt, Human
accuaugccugcaauccagcacuuugggaagc

SEQ ID NO: 302436 - RNA, 32 nt, Human
accuaugcuucaccuucagcuccugggaguuc

SEQ ID NO: 302437 - RNA, 32 nt, Human
accuauggcuuucugcaacuugcuacucucuc

SEQ ID NO: 302438 - RNA, 32 nt, Human
accuauguaaccugcacguucugcacauguau

SEQ ID NO: 302439 - RNA, 32 nt, Human
accuauuaaaacaugaacaggccaggcauggu

SEQ ID NO: 302440 - RNA, 32 nt, Human
accuauuacacacccauuagaaugacuguaaa

SEQ ID NO: 302441 - RNA, 32 nt, Human
accuauuaccaaaaacugacugagcccucccu

SEQ ID NO: 302442 - RNA, 32 nt, Human
accuauuaugggaggcuggagugcaauggugc

SEQ ID NO: 302443 - RNA, 32 nt, Human
accuauuauugaugccuuaaauguauugauaa

SEQ ID NO: 302444 - RNA, 32 nt, Human
accuauucaugaguuauuauugaaaccucaaa

SEQ ID NO: 302445 - RNA, 32 nt, Human
accuauucucucucacaugaugacaaacucgu

SEQ ID NO: 302446 - RNA, 32 nt, Human
accuauucuuauuuaguuaacacaagugugau

SEQ ID NO: 302447 - RNA, 32 nt, Human
accuauucuucaaccaccucgguuacucugac

SEQ ID NO: 302448 - RNA, 32 nt, Human
accuauugccaucauucccuugucccugcucu

SEQ ID NO: 302449 - RNA, 32 nt, Human
accuauuggcuauugugaauggugcugcuaug

SEQ ID NO: 302450 - RNA, 32 nt, Human
accuauuuccucagauccccagcuuucuccuc

SEQ ID NO: 302451 - RNA, 32 nt, Human
accuauuugacuguucagaaaaguggggacca

SEQ ID NO: 302452 - RNA, 32 nt, Human
accuauuugcccaccagcuucuccucuggagc

SEQ ID NO: 302453 - RNA, 32 nt, Human
accucaaaaagcuuggcugcagaauuguuggu

SEQ ID NO: 302454 - RNA, 32 nt, Human
accucaaaacaguuaaucucccugguuuaaaa

SEQ ID NO: 302455 - RNA, 24 nt, Human
accucaaaacuuuaugaacuucac

SEQ ID NO: 302456 - RNA, 32 nt, Human
accucaaaccauuguuuuuauucuuacacgac

SEQ ID NO: 302457 - RNA, 24 nt, Human
accucaaacgaucugcccacccca

SEQ ID NO: 302458 - RNA, 32 nt, Human
accucaaagacgcuauccgauccaucaggccc

SEQ ID NO: 302459 - RNA, 32 nt, Human
accucaaaguugagaaggcuuuucuuugcaug

SEQ ID NO: 302460 - RNA, 32 nt, Human
accucaaaucuaaauccuccaaucccaacucc

SEQ ID NO: 302461 - RNA, 24 nt, Human
accucaaaugauccacccaccuca

SEQ ID NO: 302462 - RNA, 23 nt, Human
accucaaaugauccacccaccuu

SEQ ID NO: 302463 - RNA, 23 nt, Human
accucaaaugauccaccugccuc

SEQ ID NO: 302464 - RNA, 23 nt, Human
accucaaaugauccgcccaccuc

SEQ ID NO: 302465 - RNA, 32 nt, Human
accucaacagggguccagggugcagugaacuc

SEQ ID NO: 302466 - RNA, 32 nt, Human
accucaaccagucccugcugggcacaacuggg

SEQ ID NO: 302467 - RNA, 23 nt, Human
accucaaccaucagggugaaauc

SEQ ID NO: 302468 - RNA, 32 nt, Human
accucaacugccagugcccugcagccucgggc

SEQ ID NO: 302469 - RNA, 32 nt, Human
accucaacugggggagugaggggcuggccagg

SEQ ID NO: 302470 - RNA, 32 nt, Human
accucaagacugcucccuuccuccgcagcuag

SEQ ID NO: 302471 - RNA, 32 nt, Human
accucaagccccggagaacucagcggcgcuuu

SEQ ID NO: 302472 - RNA, 31 nt, Human
accucaagccuaaauaccuguuaggauugga

SEQ ID NO: 302473 - RNA, 26 nt, Human
accucaagccuggaccagccaccuca

SEQ ID NO: 302474 - RNA, 22 nt, Human
accucaagcgauccacccaccu

SEQ ID NO: 302475 - RNA, 23 nt, Human
accucaagcgauccacccaccuc

SEQ ID NO: 302476 - RNA, 32 nt, Human
accucaaggaacaguauucugugaaccaucug

SEQ ID NO: 302477 - RNA, 32 nt, Human
accucaaggaguacaaccuggucuggcgcccc

SEQ ID NO: 302478 - RNA, 23 nt, Human
accucaaguaauccaccugccuc

SEQ ID NO: 302479 - RNA, 24 nt, Human
accucaaguaauccaccugccuca

SEQ ID NO: 302480 - RNA, 23 nt, Human
accucaaguaauccaccuggccu

SEQ ID NO: 302481 - RNA, 32 nt, Human
accucaagugagccacaucugccucagccucc

SEQ ID NO: 302482 - RNA, 23 nt, Human
accucaagugauccacacauguc

SEQ ID NO: 302483 - RNA, 22 nt, Human
accucaagugauccaccacuuc

SEQ ID NO: 302484 - RNA, 23 nt, Human
accucaagugauccacccaccuc

SEQ ID NO: 302485 - RNA, 24 nt, Human
accucaagugauccacccaccuca

SEQ ID NO: 302486 - RNA, 23 nt, Human
accucaagugauccacccaccuu

SEQ ID NO: 302487 - RNA, 24 nt, Human
accucaagugauccacccacuuca

SEQ ID NO: 302488 - RNA, 22 nt, Human
accucaagugauccacccgccu

SEQ ID NO: 302489 - RNA, 23 nt, Human
accucaagugauccacccgccuc

SEQ ID NO: 302490 - RNA, 24 nt, Human
accucaagugauccacccgccuca

SEQ ID NO: 302491 - RNA, 21 nt, Human
accucaagugauccacccguc

SEQ ID NO: 302492 - RNA, 23 nt, Human
accucaagugauccaccuaccuc

SEQ ID NO: 302493 - RNA, 22 nt, Human
accucaagugauccaccugccu

SEQ ID NO: 302494 - RNA, 23 nt, Human
accucaagugauccaccugccuc

SEQ ID NO: 302495 - RNA, 23 nt, Human
accucaagugauccaccugcuuc

SEQ ID NO: 302496 - RNA, 22 nt, Human
accucaagugauccaccuuccu

SEQ ID NO: 302497 - RNA, 23 nt, Human
accucaagugauccacugccuca

SEQ ID NO: 302498 - RNA, 22 nt, Human
accucaagugauccacuggccu

SEQ ID NO: 302499 - RNA, 22 nt, Human
accucaagugaucccccaccuc

SEQ ID NO: 302500 - RNA, 24 nt, Human
accucaagugauccucccaccuca

SEQ ID NO: 302501 - RNA, 24 nt, Human
accucaagugaucggcccaccuca

SEQ ID NO: 302502 - RNA, 23 nt, Human
accucaagugaucuacccaccuc

SEQ ID NO: 302503 - RNA, 32 nt, Human
accucaagugaucuacccgccuuggccuccca

SEQ ID NO: 302504 - RNA, 24 nt, Human
accucaagugaucugcccaccuca

SEQ ID NO: 302505 - RNA, 24 nt, Human
accucaagugaucugcccaucuca

SEQ ID NO: 302506 - RNA, 24 nt, Human
accucaagugaucugcccgccuca

SEQ ID NO: 302507 - RNA, 24 nt, Human
accucaagugaucugcccuccuca

SEQ ID NO: 302508 - RNA, 23 nt, Human
accucaagugaucugucuaccuc

SEQ ID NO: 302509 - RNA, 21 nt, Human
accucaagugaucuuccggcc

SEQ ID NO: 302510 - RNA, 32 nt, Human
accucaaucuacaccagagcccagggaguccc

SEQ ID NO: 302511 - RNA, 15 nt, Human
accucacaacacaaa

SEQ ID NO: 302512 - RNA, 32 nt, Human
accucacaagcuuguaauaaaaauccaaagag

SEQ ID NO: 302513 - RNA, 22 nt, Human
accucacacaaucuguaugggc

SEQ ID NO: 302514 - RNA, 32 nt, Human
accucacacagcaaguuagagacccagcucca

SEQ ID NO: 302515 - RNA, 32 nt, Human
accucacacccaggaccucugaggugcaucua

SEQ ID NO: 302516 - RNA, 32 nt, Human
accucacaccuguaaucccagcacuuagguag

SEQ ID NO: 302517 - RNA, 32 nt, Human
accucacacuccuucaaggcacaauuuuaaug

SEQ ID NO: 302518 - RNA, 32 nt, Human
accucacagauggggaaacugaagcccaggga

SEQ ID NO: 302519 - RNA, 32 nt, Human
accucacagccagagucaaugccuucauggga

SEQ ID NO: 302520 - RNA, 32 nt, Human
accucaccagcagcugcugucucuccaaugca

SEQ ID NO: 302521 - RNA, 32 nt, Human
accucacccaggagucacuuccucucuacacc

SEQ ID NO: 302522 - RNA, 31 nt, Human
accucaccccuccuugguuucucccuccccg

SEQ ID NO: 302523 - RNA, 32 nt, Human
accucaccccuguaaucccagcacuuugggug

SEQ ID NO: 302524 - RNA, 18 nt, Human
accucacccgaggcugcc

SEQ ID NO: 302525 - RNA, 32 nt, Human
accucacccugcccugccgugcgcucaacagc

SEQ ID NO: 302526 - RNA, 32 nt, Human
accucaccgcccaguccagcugugcuccagaa

SEQ ID NO: 302527 - RNA, 32 nt, Human
accucaccggacugagcucacaggaggagccu

SEQ ID NO: 302528 - RNA, 32 nt, Human
accucaccgggccugugauauuugcucuccug

SEQ ID NO: 302529 - RNA, 32 nt, Human
accucaccuagcucacugcucucucuccugca

SEQ ID NO: 302530 - RNA, 30 nt, Human
accucaccugaucugucaccaguccuguca

SEQ ID NO: 302531 - RNA, 32 nt, Human
accucaccuguaucaaaagacuguucuuucau

SEQ ID NO: 302532 - RNA, 32 nt, Human
accucaccuuccagcccugccgccccugcugc

SEQ ID NO: 302533 - RNA, 32 nt, Human
accucaccuugcacagcucacagggagcaaga

SEQ ID NO: 302534 - RNA, 32 nt, Human
accucaccuuuucauauuugguaaacuguaug

SEQ ID NO: 302535 - RNA, 32 nt, Human
accucacgcaggcugaguccagagcuugugcu

SEQ ID NO: 302536 - RNA, 32 nt, Human
accucacguccucccgugcgucgggagcgucu

SEQ ID NO: 302537 - RNA, 32 nt, Human
accucacuccagccugggugacagcguaagac

SEQ ID NO: 302538 - RNA, 32 nt, Human
accucacucuagaucugagccuucauauccca

SEQ ID NO: 302539 - RNA, 32 nt, Human
accucacugaacacuacugaguucacaguuga

SEQ ID NO: 302540 - RNA, 32 nt, Human
accucacugcaaccuccaccuccuagguucaa

SEQ ID NO: 302541 - RNA, 32 nt, Human
accucacugcaaccuccgccuccuggguucaa

SEQ ID NO: 302542 - RNA, 32 nt, Human
accucacugcaaccucugccucccggguccaa

SEQ ID NO: 302543 - RNA, 32 nt, Human
accucacugcaagcucugccucccgggcucac

SEQ ID NO: 302544 - RNA, 32 nt, Human
accucacugcagcuggcaugcuuggcugugug

SEQ ID NO: 302545 - RNA, 32 nt, Human
accucacugcauuccagccugggcaacagaga

SEQ ID NO: 302546 - RNA, 32 nt, Human
accucacugcauugcacuggaccugggaugcc

SEQ ID NO: 302547 - RNA, 32 nt, Human
accucacugcggccucaaacuccugggcucaa

SEQ ID NO: 302548 - RNA, 32 nt, Human
accucacuggcaugcuagccuguggcaggccu

SEQ ID NO: 302549 - RNA, 32 nt, Human
accucacugucuccauccuccaccucugagau

SEQ ID NO: 302550 - RNA, 32 nt, Human
accucacuguuggacauacauuccaagcuuuu

SEQ ID NO: 302551 - RNA, 32 nt, Human
accucacuuaauucugguguaggguguaugug

SEQ ID NO: 302552 - RNA, 32 nt, Human
accucagaaugugaccuuguuuggaaacacag

SEQ ID NO: 302553 - RNA, 21 nt, Human
accucagaauuaaaacuuuaa

SEQ ID NO: 302554 - RNA, 21 nt, Human
accucagacacucucuggcua

SEQ ID NO: 302555 - RNA, 32 nt, Human
accucagaccccagagggaaugaacaggugcc

SEQ ID NO: 302556 - RNA, 32 nt, Human
accucagaccuccccagcccuggguuucuccg

SEQ ID NO: 302557 - RNA, 32 nt, Human
accucagacucugggucccuuugggccgaagc

SEQ ID NO: 302558 - RNA, 32 nt, Human
accucagagcacaggggcccagagccaggcca

SEQ ID NO: 302559 - RNA, 32 nt, Human
accucagagcaccccacugcucaggggcuccu

SEQ ID NO: 302560 - RNA, 23 nt, Human
accucagagccaggagccugggg

SEQ ID NO: 302561 - RNA, 32 nt, Human
accucagagccuucucuuuacucuccaaagug

SEQ ID NO: 302562 - RNA, 32 nt, Human
accucagaggcagagguugcaaugaagcggag

SEQ ID NO: 302563 - RNA, 32 nt, Human
accucagagggcccuugaaaacccaccgaggg

SEQ ID NO: 302564 - RNA, 19 nt, Human
accucagauaaaaugcaga

SEQ ID NO: 302565 - RNA, 23 nt, Human
accucagauaauccaccugcuuc

SEQ ID NO: 302566 - RNA, 32 nt, Human
accucagaugacaggugcgugccaccacaccc

SEQ ID NO: 302567 - RNA, 23 nt, Human
accucagaugacccaccugccuc

SEQ ID NO: 302568 - RNA, 23 nt, Human
accucagaugauccacccaccuu

SEQ ID NO: 302569 - RNA, 22 nt, Human
accucagaugauccaccugccu

SEQ ID NO: 302570 - RNA, 24 nt, Human
accucagaugaucugcccgccuca

SEQ ID NO: 302571 - RNA, 24 nt, Human
accucagaugauucacccgccuca

SEQ ID NO: 302572 - RNA, 23 nt, Human
accucagaugguccacccaccuc

SEQ ID NO: 302573 - RNA, 32 nt, Human
accucagauugcuuacucagcaaccaucaugg

SEQ ID NO: 302574 - RNA, 32 nt, Human
accucagcaagguuguuuccugaaaugaaagc

SEQ ID NO: 302575 - RNA, 32 nt, Human
accucagcaaguucuaggccccuucccagccu

SEQ ID NO: 302576 - RNA, 32 nt, Human
accucagcagcaguuggaucuuuugaagggag

SEQ ID NO: 302577 - RNA, 18 nt, Human
accucagccaacuguggc

SEQ ID NO: 302578 - RNA, 18 nt, Human
accucagccaggguccuc

SEQ ID NO: 302579 - RNA, 32 nt, Human
accucagcccccacccacaucucccagaguau

SEQ ID NO: 302580 - RNA, 32 nt, Human
accucagccucccaagggugugugugacuaca

SEQ ID NO: 302581 - RNA, 32 nt, Human
accucagccuccugggcucaagcaauucucau

SEQ ID NO: 302582 - RNA, 24 nt, Human
accucagccuggccagacacaggc

SEQ ID NO: 302583 - RNA, 32 nt, Human
accucagcgaugcuuccuagccccaggcuugc

SEQ ID NO: 302584 - RNA, 32 nt, Human
accucagcggcggagguugcagugagucgaga

SEQ ID NO: 302585 - RNA, 32 nt, Human
accucagcucacugaaaccucugccucccggg

SEQ ID NO: 302586 - RNA, 32 nt, Human
accucagcucacugcaaccucugccucccggg

SEQ ID NO: 302587 - RNA, 32 nt, Human
accucagcucacugcacccucugugucccgga

SEQ ID NO: 302588 - RNA, 32 nt, Human
accucagcucacugcagccuccaccuccuggg

SEQ ID NO: 302589 - RNA, 32 nt, Human
accucagcucacugcgaccuccaccuccuggg

SEQ ID NO: 302590 - RNA, 32 nt, Human
accucagcugacuucccugugaaugucuaaug

SEQ ID NO: 302591 - RNA, 32 nt, Human
accucaggaaaggagggugaccagguugucuu

SEQ ID NO: 302592 - RNA, 23 nt, Human
accucaggaagccucccacggcc

SEQ ID NO: 302593 - RNA, 32 nt, Human
accucaggacaggcauggaggccacaggggcc

SEQ ID NO: 302594 - RNA, 24 nt, Human
accucaggacugggcucucuggcc

SEQ ID NO: 302595 - RNA, 32 nt, Human
accucaggagaguuccagggaagaaccccacc

SEQ ID NO: 302596 - RNA, 32 nt, Human
accucaggaggcggagguugcagugagccgag

SEQ ID NO: 302597 - RNA, 32 nt, Human
accucaggagggcaggcugagguggggaagga

SEQ ID NO: 302598 - RNA, 21 nt, Human
accucaggauaaaccuugaaa

SEQ ID NO: 302599 - RNA, 32 nt, Human
accucaggaucuuguuaaaaugcagauucugg

SEQ ID NO: 302600 - RNA, 32 nt, Human
accucaggaugggagaugaggagaagcggaac

SEQ ID NO: 302601 - RNA, 24 nt, Human
accucaggcaaucugcccaccuca

SEQ ID NO: 302602 - RNA, 22 nt, Human
accucaggcagagcccuacuca

SEQ ID NO: 302603 - RNA, 32 nt, Human
accucaggcaggaagggcaggaaggagagccu

SEQ ID NO: 302604 - RNA, 25 nt, Human
accucaggcgauccacccccaccuc

SEQ ID NO: 302605 - RNA, 22 nt, Human
accucaggcgauccaccugucu

SEQ ID NO: 302606 - RNA, 24 nt, Human
accucaggcgauccgcccgccuca

SEQ ID NO: 302607 - RNA, 24 nt, Human
accucaggcgaucugcccaccuca

SEQ ID NO: 302608 - RNA, 32 nt, Human
accucaggcuacagcuggcuccgagacagggc

SEQ ID NO: 302609 - RNA, 32 nt, Human
accucaggcugggccuuugugcuggccuugca

SEQ ID NO: 302610 - RNA, 21 nt, Human
accucagggaaucuuccagcc

SEQ ID NO: 302611 - RNA, 23 nt, Human
accucagggacagcguccaggcu

SEQ ID NO: 302612 - RNA, 23 nt, Human
accucagggaccagagggcuagg

SEQ ID NO: 302613 - RNA, 32 nt, Human
accucaggggccagggcacugacaggacagga

SEQ ID NO: 302614 - RNA, 32 nt, Human
accucagggggcgggugcuggggucuucucca

SEQ ID NO: 302615 - RNA, 20 nt, Human
accucagggguccccacgcc

SEQ ID NO: 302616 - RNA, 32 nt, Human
accucaggguggagagacugaaugcuugugag

SEQ ID NO: 302617 - RNA, 32 nt, Human
accucagggugucgguuaagagacaggccucc

SEQ ID NO: 302618 - RNA, 22 nt, Human
accucagguaauccaccugccu

SEQ ID NO: 302619 - RNA, 24 nt, Human
accucagguaauccaccugcuuca

SEQ ID NO: 302620 - RNA, 24 nt, Human
accucagguaauccucccaccuca

SEQ ID NO: 302621 - RNA, 24 nt, Human
accucagguaauuuuucacucuca

SEQ ID NO: 302622 - RNA, 24 nt, Human
accucagguacugaugaaccccac

SEQ ID NO: 302623 - RNA, 32 nt, Human
accucaggugagccacccgccucggccuccca

SEQ ID NO: 302624 - RNA, 23 nt, Human
accucaggugauccaacugccuc

SEQ ID NO: 302625 - RNA, 23 nt, Human
accucaggugauccacaugacuc

SEQ ID NO: 302626 - RNA, 22 nt, Human
accucaggugauccaccaccuc

SEQ ID NO: 302627 - RNA, 23 nt, Human
accucaggugauccaccagccuc

SEQ ID NO: 302628 - RNA, 23 nt, Human
accucaggugauccacccaccuc

SEQ ID NO: 302629 - RNA, 24 nt, Human
accucaggugauccacccaccuca

SEQ ID NO: 302630 - RNA, 32 nt, Human
accucaggugauccacccaccugggccuccca

SEQ ID NO: 302631 - RNA, 23 nt, Human
accucaggugauccacccaccuu

SEQ ID NO: 302632 - RNA, 24 nt, Human
accucaggugauccacccacguca

SEQ ID NO: 302633 - RNA, 23 nt, Human
accucaggugauccacccacuuu

SEQ ID NO: 302634 - RNA, 20 nt, Human
accucaggugauccaccccc

SEQ ID NO: 302635 - RNA, 26 nt, Human
accucaggugauccaccccccgccuc

SEQ ID NO: 302636 - RNA, 22 nt, Human
accucaggugauccacccgccc

SEQ ID NO: 302637 - RNA, 22 nt, Human
accucaggugauccacccgccu

SEQ ID NO: 302638 - RNA, 23 nt, Human
accucaggugauccacccgccuc

SEQ ID NO: 302639 - RNA, 24 nt, Human
accucaggugauccacccgccuca

SEQ ID NO: 302640 - RNA, 24 nt, Human
accucaggugauccacccgccuua

SEQ ID NO: 302641 - RNA, 24 nt, Human
accucaggugauccacccgcuuca

SEQ ID NO: 302642 - RNA, 22 nt, Human
accucaggugauccacccuccu

SEQ ID NO: 302643 - RNA, 23 nt, Human
accucaggugauccacccuccuc

SEQ ID NO: 302644 - RNA, 24 nt, Human
accucaggugauccacccuccuca

SEQ ID NO: 302645 - RNA, 21 nt, Human
accucaggugauccaccgccu

SEQ ID NO: 302646 - RNA, 23 nt, Human
accucaggugauccaccuaccuc

SEQ ID NO: 302647 - RNA, 21 nt, Human
accucaggugauccaccugcc

SEQ ID NO: 302648 - RNA, 22 nt, Human
accucaggugauccaccugccu

SEQ ID NO: 302649 - RNA, 23 nt, Human
accucaggugauccaccugccuc

SEQ ID NO: 302650 - RNA, 24 nt, Human
accucaggugauccaccugccuca

SEQ ID NO: 302651 - RNA, 22 nt, Human
accucaggugauccaccugucu

SEQ ID NO: 302652 - RNA, 24 nt, Human
accucaggugauccaccuuggccu

SEQ ID NO: 302653 - RNA, 23 nt, Human
accucaggugauccacucgccuc

SEQ ID NO: 302654 - RNA, 22 nt, Human
accucaggugauccaucagccu

SEQ ID NO: 302655 - RNA, 23 nt, Human
accucaggugauccauccaccuc

SEQ ID NO: 302656 - RNA, 23 nt, Human
accucaggugauccaucugccuc

SEQ ID NO: 302657 - RNA, 24 nt, Human
accucaggugauccgcaugccuca

SEQ ID NO: 302658 - RNA, 22 nt, Human
accucaggugauccgcccaccu

SEQ ID NO: 302659 - RNA, 23 nt, Human
accucaggugauccgcccaccuc

SEQ ID NO: 302660 - RNA, 24 nt, Human
accucaggugauccgcccaccuca

SEQ ID NO: 302661 - RNA, 24 nt, Human
accucaggugauccgcccgccuca

SEQ ID NO: 302662 - RNA, 32 nt, Human
accucaggugauccgcccgccugggccuccca

SEQ ID NO: 302663 - RNA, 24 nt, Human
accucaggugauccgccuaccuca

SEQ ID NO: 302664 - RNA, 24 nt, Human
accucaggugauccguccaccuca

SEQ ID NO: 302665 - RNA, 23 nt, Human
accucaggugauccucccaccuc

SEQ ID NO: 302666 - RNA, 23 nt, Human
accucaggugaucuacccaccuc

SEQ ID NO: 302667 - RNA, 24 nt, Human
accucaggugaucuacccaccuca

SEQ ID NO: 302668 - RNA, 24 nt, Human
accucaggugaucuacccgccuca

SEQ ID NO: 302669 - RNA, 23 nt, Human
accucaggugaucugcccaccuc

SEQ ID NO: 302670 - RNA, 24 nt, Human
accucaggugaucugcccaccuca

SEQ ID NO: 302671 - RNA, 24 nt, Human
accucaggugaucugcccgccuca

SEQ ID NO: 302672 - RNA, 21 nt, Human
accucaggugaucugcccucc

SEQ ID NO: 302673 - RNA, 24 nt, Human
accucaggugaucugugugcccca

SEQ ID NO: 302674 - RNA, 24 nt, Human
accucaggugaugcacccaccuca

SEQ ID NO: 302675 - RNA, 24 nt, Human
accucaggugauucaccagccuca

SEQ ID NO: 302676 - RNA, 32 nt, Human
accucaguaaaccagaugaaacuccaaaugcu

SEQ ID NO: 302677 - RNA, 31 nt, Human
accucaguauuucagcaccuuaagcacugau

SEQ ID NO: 302678 - RNA, 32 nt, Human
accucagucuaugugagaggaagagaaugugu

SEQ ID NO: 302679 - RNA, 32 nt, Human
accucagugcugcuggacucaguuccaagauc

SEQ ID NO: 302680 - RNA, 31 nt, Human
accucaguggagaaauguaaagacugaauug

SEQ ID NO: 302681 - RNA, 32 nt, Human
accucaguguggcccuccuuccugauuuaguu

SEQ ID NO: 302682 - RNA, 32 nt, Human
accucaguugacugucaaagauaucagcugua

SEQ ID NO: 302683 - RNA, 24 nt, Human
accucaguugauccacccgccuca

SEQ ID NO: 302684 - RNA, 32 nt, Human
accucaguuguccccaucaucauggagaccca

SEQ ID NO: 302685 - RNA, 32 nt, Human
accucaguuucaagucaucuaaaccuguguca

SEQ ID NO: 302686 - RNA, 32 nt, Human
accucauacucuucuguuuuccauuccacaug

SEQ ID NO: 302687 - RNA, 32 nt, Human
accucauacugagguuuuugcacugaaauauc

SEQ ID NO: 302688 - RNA, 32 nt, Human
accucauagcaguaaaugacuugcuguuguuu

SEQ ID NO: 302689 - RNA, 23 nt, Human
accucauaggacuaugaauucac

SEQ ID NO: 302690 - RNA, 32 nt, Human
accucaucaagccagcacauccugccugcugu

SEQ ID NO: 302691 - RNA, 32 nt, Human
accucaucacagucuuccuuccucuucaagcg

SEQ ID NO: 302692 - RNA, 32 nt, Human
accucaucaccuuuugugcagacaggcagguu

SEQ ID NO: 302693 - RNA, 32 nt, Human
accucaucacuggagguaaaagcacaagcaau

SEQ ID NO: 302694 - RNA, 18 nt, Human
accucauccgaccaugua

SEQ ID NO: 302695 - RNA, 32 nt, Human
accucauccucccaggaucuaccaguugaugg

SEQ ID NO: 302696 - RNA, 32 nt, Human
accucauccuccuggaggguguggcuacccuc

SEQ ID NO: 302697 - RNA, 32 nt, Human
accucaucuagcaccuucucuaccucccaggg

SEQ ID NO: 302698 - RNA, 32 nt, Human
accucaucucauuccucuucuuacagagaccu

SEQ ID NO: 302699 - RNA, 32 nt, Human
accucaucuccucccucuucucuugcuuuccc

SEQ ID NO: 302700 - RNA, 32 nt, Human
accucaugaacaaaaguacuuuggcauccaga

SEQ ID NO: 302701 - RNA, 32 nt, Human
accucaugagccucuaagggaaaggaggaaca

SEQ ID NO: 302702 - RNA, 32 nt, Human
accucaugagugggauuaguguccuuauaaaa

SEQ ID NO: 302703 - RNA, 32 nt, Human
accucaugcaggugaagccacuguggaaacag

SEQ ID NO: 302704 - RNA, 32 nt, Human
accucaugccugaagacagcuugggcagguga

SEQ ID NO: 302705 - RNA, 32 nt, Human
accucaugcucuguucaaggccaucacaaagg

SEQ ID NO: 302706 - RNA, 32 nt, Human
accucaugcuucuuauuuggggagagggcugu

SEQ ID NO: 302707 - RNA, 32 nt, Human
accucauggaaagaaugaagagccagaaauag

SEQ ID NO: 302708 - RNA, 24 nt, Human
accucauguaauccacccaccuca

SEQ ID NO: 302709 - RNA, 32 nt, Human
accucaugucagugaagaugggauuaaaaaca

SEQ ID NO: 302710 - RNA, 22 nt, Human
accucauuccuccacccaccuc

SEQ ID NO: 302711 - RNA, 32 nt, Human
accucauucucuguccagaauguggacucccu

SEQ ID NO: 302712 - RNA, 32 nt, Human
accucauugcaaccuccgccucccggguucgc

SEQ ID NO: 302713 - RNA, 32 nt, Human
accucauugcagccucagacuccuggguucaa

SEQ ID NO: 302714 - RNA, 32 nt, Human
accucauuggaaacccagaggcugcagagagc

SEQ ID NO: 302715 - RNA, 32 nt, Human
accucauuucccuccauuaucucccuaaaggc

SEQ ID NO: 302716 - RNA, 32 nt, Human
accucauuugaaucgcccucccaugggaaucc

SEQ ID NO: 302717 - RNA, 32 nt, Human
accucauuuuucucccaggccuaggagcucaa

SEQ ID NO: 302718 - RNA, 32 nt, Human
accuccaaaguguugggauuacaggcaaugag

SEQ ID NO: 302719 - RNA, 32 nt, Human
accuccaacagcuuucccugccacugugggug

SEQ ID NO: 302720 - RNA, 32 nt, Human
accuccaacauggugaaaccccgucccuaaua

SEQ ID NO: 302721 - RNA, 32 nt, Human
accuccaacucccugguucaagcgauucuccu

SEQ ID NO: 302722 - RNA, 32 nt, Human
accuccaaugacucaggaauugccuguaaauu

SEQ ID NO: 302723 - RNA, 32 nt, Human
accuccacaucccagguucaagugauucuccu

SEQ ID NO: 302724 - RNA, 32 nt, Human
accuccacauccuggguucaagugauucuccu

SEQ ID NO: 302725 - RNA, 32 nt, Human
accuccaccaggaccaggauccugggccacag

SEQ ID NO: 302726 - RNA, 32 nt, Human
accuccacccagccccucccacauuucacuca

SEQ ID NO: 302727 - RNA, 32 nt, Human
accuccaccccccagguucaagcaguucuucc

SEQ ID NO: 302728 - RNA, 32 nt, Human
accuccacccgccggguucaagcgauucuccu

SEQ ID NO: 302729 - RNA, 32 nt, Human
accuccacccugcauuuuccucuuguccuggc

SEQ ID NO: 302730 - RNA, 32 nt, Human
accuccaccgccaccuccaccuccggcaccca

SEQ ID NO: 302731 - RNA, 32 nt, Human
accuccaccgguccaggucuuugcugcugucc

SEQ ID NO: 302732 - RNA, 32 nt, Human
accuccaccuacuaggcucaagcaauucucgu

SEQ ID NO: 302733 - RNA, 32 nt, Human
accuccaccucacagguucaagcgauucucgu

SEQ ID NO: 302734 - RNA, 32 nt, Human
accuccaccuccaccgccaccuccaccuccgg

SEQ ID NO: 302735 - RNA, 32 nt, Human
accuccaccuccaggguucagaguagcuggga

SEQ ID NO: 302736 - RNA, 32 nt, Human
accuccaccucccagguucaagcaauuauccu

SEQ ID NO: 302737 - RNA, 32 nt, Human
accuccaccucccagguucaagcaauucuccu

SEQ ID NO: 302738 - RNA, 32 nt, Human
accuccaccucccagguucaagcaauucucug

SEQ ID NO: 302739 - RNA, 32 nt, Human
accuccaccucccagguucaagcaauucucuu

SEQ ID NO: 302740 - RNA, 32 nt, Human
accuccaccucccagguucaagcaauucuucu

SEQ ID NO: 302741 - RNA, 32 nt, Human
accuccaccucccagguucaagcaguucuccu

SEQ ID NO: 302742 - RNA, 32 nt, Human
accuccaccucccagguucaagcaguucucug

SEQ ID NO: 302743 - RNA, 32 nt, Human
accuccaccucccagguucaagcgauuccccu

SEQ ID NO: 302744 - RNA, 32 nt, Human
accuccaccucccagguucaagcgauucuccu

SEQ ID NO: 302745 - RNA, 32 nt, Human
accuccaccucccagguucaagcgauucucgu

SEQ ID NO: 302746 - RNA, 32 nt, Human
accuccaccucccagguucaagggauucgucu

SEQ ID NO: 302747 - RNA, 32 nt, Human
accuccaccucccagguucaagggauucuccc

SEQ ID NO: 302748 - RNA, 32 nt, Human
accuccaccucccagguucaagugauucucau

SEQ ID NO: 302749 - RNA, 32 nt, Human
accuccaccucccagguucaagugauucuccu

SEQ ID NO: 302750 - RNA, 32 nt, Human
accuccaccucccagguucaagugauucuucu

SEQ ID NO: 302751 - RNA, 32 nt, Human
accuccaccucccagguucacaccauucuccu

SEQ ID NO: 302752 - RNA, 32 nt, Human
accuccaccucccggauucaagcaauucuucu

SEQ ID NO: 302753 - RNA, 32 nt, Human
accuccaccucccggguucaagcaauucuccu

SEQ ID NO: 302754 - RNA, 32 nt, Human
accuccaccucccggguucaagcaguucuccu

SEQ ID NO: 302755 - RNA, 32 nt, Human
accuccaccucccggguucaagcgauucuccu

SEQ ID NO: 302756 - RNA, 32 nt, Human
accuccaccucccggguucaagggauucugcc

SEQ ID NO: 302757 - RNA, 32 nt, Human
accuccaccucccggguucaagugauucaugu

SEQ ID NO: 302758 - RNA, 32 nt, Human
accuccaccucccggguucaagugauucucau

SEQ ID NO: 302759 - RNA, 32 nt, Human
accuccaccucccggguucaagugauucuccu

SEQ ID NO: 302760 - RNA, 32 nt, Human
accuccaccucccggguucaagugauucucug

SEQ ID NO: 302761 - RNA, 32 nt, Human
accuccaccucccugguucaagcgauucuccu

SEQ ID NO: 302762 - RNA, 32 nt, Human
accuccaccuccuagguucaagcaauucuccu

SEQ ID NO: 302763 - RNA, 32 nt, Human
accuccaccuccuagguucaagugauucuacu

SEQ ID NO: 302764 - RNA, 32 nt, Human
accuccaccuccuggguucaaacaauucuccu

SEQ ID NO: 302765 - RNA, 32 nt, Human
accuccaccuccuggguucaagacaauccucc

SEQ ID NO: 302766 - RNA, 32 nt, Human
accuccaccuccuggguucaagcaauucucca

SEQ ID NO: 302767 - RNA, 32 nt, Human
accuccaccuccuggguucaagcaauucuccu

SEQ ID NO: 302768 - RNA, 32 nt, Human
accuccaccuccuggguucaagcaauucuugu

SEQ ID NO: 302769 - RNA, 32 nt, Human
accuccaccuccuggguucaagcaguucuccc

SEQ ID NO: 302770 - RNA, 32 nt, Human
accuccaccuccuggguucaagcaguucucgu

SEQ ID NO: 302771 - RNA, 32 nt, Human
accuccaccuccuggguucaagcgauucuccu

SEQ ID NO: 302772 - RNA, 32 nt, Human
accuccaccuccuggguucaagcgauucucuu

SEQ ID NO: 302773 - RNA, 32 nt, Human
accuccaccuccuggguucaagcgauucugcu

SEQ ID NO: 302774 - RNA, 32 nt, Human
accuccaccuccuggguucaagcgauucuuau

SEQ ID NO: 302775 - RNA, 32 nt, Human
accuccaccuccuggguucaagcgauuuucuu

SEQ ID NO: 302776 - RNA, 32 nt, Human
accuccaccuccuggguucaagugauucuccu

SEQ ID NO: 302777 - RNA, 32 nt, Human
accuccaccuccuggguucaagugauucuugu

SEQ ID NO: 302778 - RNA, 32 nt, Human
accuccaccuccuggguucaagugauuuuccu

SEQ ID NO: 302779 - RNA, 32 nt, Human
accuccaccuccuggguucacgcaauucuccu

SEQ ID NO: 302780 - RNA, 32 nt, Human
accuccaccuccuggguucaggcgauucuccu

SEQ ID NO: 302781 - RNA, 32 nt, Human
accuccaccuccuggguuccagcgauucuccu

SEQ ID NO: 302782 - RNA, 32 nt, Human
accuccaccuccuggguugaagugauucucgu

SEQ ID NO: 302783 - RNA, 32 nt, Human
accuccaccuccuggguuuaagcaaugcuucu

SEQ ID NO: 302784 - RNA, 32 nt, Human
accuccaccuccuggguuuaagcgauucuccu

SEQ ID NO: 302785 - RNA, 32 nt, Human
accuccaccuccuggguuugaggaauuguccu

SEQ ID NO: 302786 - RNA, 32 nt, Human
accuccaccuccuuccccuucucccucaggca

SEQ ID NO: 302787 - RNA, 32 nt, Human
accuccaccucucagauucaagcaauucuccu

SEQ ID NO: 302788 - RNA, 32 nt, Human
accuccaccucucagguucaagcaauucucau

SEQ ID NO: 302789 - RNA, 32 nt, Human
accuccaccucucagguucaagcaauucuccu

SEQ ID NO: 302790 - RNA, 32 nt, Human
accuccaccucucggcuucaagcaauucuccu

SEQ ID NO: 302791 - RNA, 32 nt, Human
accuccaccucugggauucaagcaauucuccc

SEQ ID NO: 302792 - RNA, 32 nt, Human
accuccaccucuuauguucaagcaauucuccu

SEQ ID NO: 302793 - RNA, 32 nt, Human
accuccaccucuuggguucaagcgauucuccu

SEQ ID NO: 302794 - RNA, 16 nt, Human
accuccaccugcccca

SEQ ID NO: 302795 - RNA, 32 nt, Human
accuccaccuuccggguucaagugauucuccu

SEQ ID NO: 302796 - RNA, 32 nt, Human
accuccaccuuccugguucaagcgauucugcc

SEQ ID NO: 302797 - RNA, 32 nt, Human
accuccaccuuccugguucaagggauucuccu

SEQ ID NO: 302798 - RNA, 21 nt, Human
accuccacggaccucggaccu

SEQ ID NO: 302799 - RNA, 20 nt, Human
accuccacggccaccacgug

SEQ ID NO: 302800 - RNA, 32 nt, Human
accuccacuacugcuugacccugccgggauuc

SEQ ID NO: 302801 - RNA, 20 nt, Human
accuccacuccacuccccac

SEQ ID NO: 302802 - RNA, 32 nt, Human
accuccacucccuccgcugccaugaagcucau

SEQ ID NO: 302803 - RNA, 32 nt, Human
accuccacugcacaacucgggcggggguguga

SEQ ID NO: 302804 - RNA, 32 nt, Human
accuccacuucccagguucaagcgauccuccu

SEQ ID NO: 302805 - RNA, 32 nt, Human
accuccacuucccagguucaagcgauucucau

SEQ ID NO: 302806 - RNA, 32 nt, Human
accuccacuucccggguucaagcgauucuccu

SEQ ID NO: 302807 - RNA, 32 nt, Human
accuccacuucccggguucaagcgauucuucu

SEQ ID NO: 302808 - RNA, 32 nt, Human
accuccacuucccugguucaagcaauuccccu

SEQ ID NO: 302809 - RNA, 32 nt, Human
accuccacuuccuagguucaagcaauucuccu

SEQ ID NO: 302810 - RNA, 32 nt, Human
accuccacuuccuggguucaagcgauucuccu

SEQ ID NO: 302811 - RNA, 32 nt, Human
accuccacuucucagguucaagcaauucuccu

SEQ ID NO: 302812 - RNA, 32 nt, Human
accuccacuucuuggguucaagugauucuccu

SEQ ID NO: 302813 - RNA, 32 nt, Human
accuccacuuuccagguucaagcaauucuccu

SEQ ID NO: 302814 - RNA, 32 nt, Human
accuccagaagauucaaggagcuguagaggug

SEQ ID NO: 302815 - RNA, 32 nt, Human
accuccagagccuccaggggaccacacaguag

SEQ ID NO: 302816 - RNA, 32 nt, Human
accuccagcauuggcccagcaggcccagcacg

SEQ ID NO: 302817 - RNA, 32 nt, Human
accuccagccaccccaggucucagccucccug

SEQ ID NO: 302818 - RNA, 32 nt, Human
accuccagcccaucagaaacaugagugugagc

SEQ ID NO: 302819 - RNA, 32 nt, Human
accuccagcccugcaaaagcccuaccacaggu

SEQ ID NO: 302820 - RNA, 32 nt, Human
accuccagccggucacucacccucucuggacc

SEQ ID NO: 302821 - RNA, 32 nt, Human
accuccagccucccgggccuugagggaguaaa

SEQ ID NO: 302822 - RNA, 32 nt, Human
accuccagccuggaggagacagccacggggug

SEQ ID NO: 302823 - RNA, 32 nt, Human
accuccagccugggcaacagagugagacucug

SEQ ID NO: 302824 - RNA, 32 nt, Human
accuccagccugggggacagagcaagaccgug

SEQ ID NO: 302825 - RNA, 32 nt, Human
accuccagcuacagggcucucauccaagucaa

SEQ ID NO: 302826 - RNA, 32 nt, Human
accuccagcucccagguugaagcaauucuccu

SEQ ID NO: 302827 - RNA, 32 nt, Human
accuccagcuccuggguucaagcaauucucau

SEQ ID NO: 302828 - RNA, 32 nt, Human
accuccagcuccuggguucaggugauucuccu

SEQ ID NO: 302829 - RNA, 30 nt, Human
accuccagcuucuccaugaccuccugcaug

SEQ ID NO: 302830 - RNA, 32 nt, Human
accuccaggagcuguguaacagcaaccggaaa

SEQ ID NO: 302831 - RNA, 21 nt, Human
accuccaggaugagcacugca

SEQ ID NO: 302832 - RNA, 32 nt, Human
accuccaggguggagggcaccucugggcucca

SEQ ID NO: 302833 - RNA, 32 nt, Human
accuccaguggggccaacacagccaccaacuc

SEQ ID NO: 302834 - RNA, 22 nt, Human
accuccagugucaggguccagg

SEQ ID NO: 302835 - RNA, 32 nt, Human
accuccagugucaggguccaggagagccuggg

SEQ ID NO: 302836 - RNA, 32 nt, Human
accuccaucucccggguucaagcaauucuccu

SEQ ID NO: 302837 - RNA, 32 nt, Human
accuccaucucccuggcucaagcaauucuccu

SEQ ID NO: 302838 - RNA, 32 nt, Human
accuccaucuccugggucccagcgauucuccu

SEQ ID NO: 302839 - RNA, 32 nt, Human
accuccaucuucuuugcagccuggguggcuau

SEQ ID NO: 302840 - RNA, 20 nt, Human
accuccauggagccacuagg

SEQ ID NO: 302841 - RNA, 32 nt, Human
accuccauggugggagaucaggaguuaaggac

SEQ ID NO: 302842 - RNA, 24 nt, Human
accuccauguggccagggguuggg

SEQ ID NO: 302843 - RNA, 32 nt, Human
accucccaaauuugaguugcacccuucccugu

SEQ ID NO: 302844 - RNA, 32 nt, Human
accucccacagcuccaccccagacugggcgcc

SEQ ID NO: 302845 - RNA, 32 nt, Human
accucccacauauacuacguucaagaguucac

SEQ ID NO: 302846 - RNA, 20 nt, Human
accucccacccaccacagaa

SEQ ID NO: 302847 - RNA, 32 nt, Human
accucccacugaggcggcuccagccccagaca

SEQ ID NO: 302848 - RNA, 32 nt, Human
accucccacugcacugccgguuucccuggguu

SEQ ID NO: 302849 - RNA, 32 nt, Human
accucccacugcucccugucaggggcccaggc

SEQ ID NO: 302850 - RNA, 22 nt, Human
accucccacuggguuccuccca

SEQ ID NO: 302851 - RNA, 32 nt, Human
accucccagaggccccucccacccuucccuuc

SEQ ID NO: 302852 - RNA, 32 nt, Human
accucccagcucccagcccuuccuagugccca

SEQ ID NO: 302853 - RNA, 32 nt, Human
accucccaggaaaaggaugagaggagaaagcc

SEQ ID NO: 302854 - RNA, 32 nt, Human
accucccaggaaugcugccuuccuucagccca

SEQ ID NO: 302855 - RNA, 32 nt, Human
accucccagggcauuggugaauucauacagga

SEQ ID NO: 302856 - RNA, 32 nt, Human
accucccagggugggagcugggccgggcuggg

SEQ ID NO: 302857 - RNA, 26 nt, Human
accucccaggugauccucccaccuca

SEQ ID NO: 302858 - RNA, 32 nt, Human
accucccaggugauccucccaccucagcuucc

SEQ ID NO: 302859 - RNA, 32 nt, Human
accucccagguucaagggauucucccaccuca

SEQ ID NO: 302860 - RNA, 32 nt, Human
accucccaguuuggugggcaaguggggcugau

SEQ ID NO: 302861 - RNA, 24 nt, Human
accucccaucucuccuuccaggcc

SEQ ID NO: 302862 - RNA, 32 nt, Human
accucccauuucuuggacauauaccauuggac

SEQ ID NO: 302863 - RNA, 32 nt, Human
accuccccagccugcgccugcugcaugcccuc

SEQ ID NO: 302864 - RNA, 32 nt, Human
accuccccauuaacaaacacugccccuuaagu

SEQ ID NO: 302865 - RNA, 19 nt, Human
accucccccaacccugccc

SEQ ID NO: 302866 - RNA, 21 nt, Human
accucccccagggcuccuccc

SEQ ID NO: 302867 - RNA, 20 nt, Human
accuccccccgccuccuucc

SEQ ID NO: 302868 - RNA, 32 nt, Human
accucccccgacugccacucuggaccuaauag

SEQ ID NO: 302869 - RNA, 21 nt, Human
accucccccguggcuccuucc

SEQ ID NO: 302870 - RNA, 32 nt, Human
accucccccuccuggguucaagcgauucuccu

SEQ ID NO: 302871 - RNA, 18 nt, Human
accucccccucugugagg

SEQ ID NO: 302872 - RNA, 32 nt, Human
accucccccugcagggggccucaggccaagag

SEQ ID NO: 302873 - RNA, 32 nt, Human
accucccccugccucccagccuccgcagauga

SEQ ID NO: 302874 - RNA, 32 nt, Human
accuccccgagucuugggagccuggaccccga

SEQ ID NO: 302875 - RNA, 22 nt, Human
accuccccgcgccgccgccgcc

SEQ ID NO: 302876 - RNA, 32 nt, Human
accuccccgcucucccugucacgcucaugucc

SEQ ID NO: 302877 - RNA, 32 nt, Human
accuccccggaaggaauuuuguuucucucuag

SEQ ID NO: 302878 - RNA, 32 nt, Human
accuccccggggacccagcgaaggaggagccg

SEQ ID NO: 302879 - RNA, 32 nt, Human
accuccccuaaccccaaacauagaucacaccu

SEQ ID NO: 302880 - RNA, 23 nt, Human
accuccccuauccacccagccca

SEQ ID NO: 302881 - RNA, 32 nt, Human
accuccccuccccacagccuuccucacccuug

SEQ ID NO: 302882 - RNA, 32 nt, Human
accuccccucuugcacuuucucuccagucacc

SEQ ID NO: 302883 - RNA, 32 nt, Human
accuccccugccacagacucucccucuucugc

SEQ ID NO: 302884 - RNA, 32 nt, Human
accuccccugcucuccuucccagcauugagcc

SEQ ID NO: 302885 - RNA, 32 nt, Human
accuccccuggaggcacagagggcgggggccu

SEQ ID NO: 302886 - RNA, 32 nt, Human
accuccccuucccacuucacugccaucccaga

SEQ ID NO: 302887 - RNA, 32 nt, Human
accuccccuuucaagcccuccugccgccuugg

SEQ ID NO: 302888 - RNA, 32 nt, Human
accucccgcucccuucccccagcccuggagcc

SEQ ID NO: 302889 - RNA, 32 nt, Human
accucccggcagcagcggcagcugagacucac

SEQ ID NO: 302890 - RNA, 32 nt, Human
accucccggggcugcugacccucagcccgcac

SEQ ID NO: 302891 - RNA, 21 nt, Human
accucccguccgccgccgccg

SEQ ID NO: 302892 - RNA, 32 nt, Human
accucccuacucucccugccgaggcguccaua

SEQ ID NO: 302893 - RNA, 32 nt, Human
accucccuaggguuuugugugugugcacacua

SEQ ID NO: 302894 - RNA, 32 nt, Human
accucccuaugugaacuguagacucagauccc

SEQ ID NO: 302895 - RNA, 32 nt, Human
accucccucacagaacagggaagcagugacag

SEQ ID NO: 302896 - RNA, 32 nt, Human
accucccuccaggagaucccagggugcaaagu

SEQ ID NO: 302897 - RNA, 32 nt, Human
accucccucccucccuacuuuccuugcuuccu

SEQ ID NO: 302898 - RNA, 32 nt, Human
accucccucccucccucgcuucuucucucuuu

SEQ ID NO: 302899 - RNA, 32 nt, Human
accucccuccuggggccuuuuguuuuggaucc

SEQ ID NO: 302900 - RNA, 32 nt, Human
accucccuccuuggcacgaugagcaccugcag

SEQ ID NO: 302901 - RNA, 32 nt, Human
accucccuccuuggggcuguuugcaucccugc

SEQ ID NO: 302902 - RNA, 32 nt, Human
accucccucggccgugcggcacuggaccucgc

SEQ ID NO: 302903 - RNA, 32 nt, Human
accucccucucauccaugcauucuauucccag

SEQ ID NO: 302904 - RNA, 32 nt, Human
accucccugaaccaucccugaugucugucugg

SEQ ID NO: 302905 - RNA, 32 nt, Human
accucccugaaccuuaauuuaauccuagguag

SEQ ID NO: 302906 - RNA, 32 nt, Human
accucccugccaaauaacucagaagaggagug

SEQ ID NO: 302907 - RNA, 24 nt, Human
accucccugccaggccaagccagg

SEQ ID NO: 302908 - RNA, 32 nt, Human
accucccugcccuccuccucccugggccuuca

SEQ ID NO: 302909 - RNA, 32 nt, Human
accucccugcccuguccuccagcuuccccucg

SEQ ID NO: 302910 - RNA, 32 nt, Human
accucccugccucucacacucuguguauuuug

SEQ ID NO: 302911 - RNA, 32 nt, Human
accucccugccugaaccuccaggcccugcaga

SEQ ID NO: 302912 - RNA, 32 nt, Human
accucccugccugauucuccugccucagccug

SEQ ID NO: 302913 - RNA, 32 nt, Human
accucccugccugauucucuugccucagccug

SEQ ID NO: 302914 - RNA, 32 nt, Human
accucccugcucucuuuccuuuucaguuuuuc

SEQ ID NO: 302915 - RNA, 32 nt, Human
accucccugcucuucugcacuccuggacacaa

SEQ ID NO: 302916 - RNA, 32 nt, Human
accucccuggcccucuggcuggccccaggagc

SEQ ID NO: 302917 - RNA, 32 nt, Human
accucccuggggagucgggggauuggguugug

SEQ ID NO: 302918 - RNA, 32 nt, Human
accucccuuguuagcaucucccagagaaccug

SEQ ID NO: 302919 - RNA, 32 nt, Human
accucccuuuaucuccuccuuccccucuggca

SEQ ID NO: 302920 - RNA, 32 nt, Human
accucccuuuccaagccugccugggugggugu

SEQ ID NO: 302921 - RNA, 32 nt, Human
accuccgacucccagguucaagcaauucuccu

SEQ ID NO: 302922 - RNA, 32 nt, Human
accuccgacucccugguucaagcgauucuccu

SEQ ID NO: 302923 - RNA, 32 nt, Human
accuccgacuccuggguucaagcaauucuucu

SEQ ID NO: 302924 - RNA, 32 nt, Human
accuccgcaacgauuccucggacuaugugguu

SEQ ID NO: 302925 - RNA, 32 nt, Human
accuccgcauccacccccguccgccauccugc

SEQ ID NO: 302926 - RNA, 32 nt, Human
accuccgcaucccggguucaagagauucugcc

SEQ ID NO: 302927 - RNA, 32 nt, Human
accuccgcaucccggguucaagcgauucuccu

SEQ ID NO: 302928 - RNA, 32 nt, Human
accuccgccccccagguucaagcgauucugcc

SEQ ID NO: 302929 - RNA, 32 nt, Human
accuccgcccccuggguucaagcaauucuccu

SEQ ID NO: 302930 - RNA, 32 nt, Human
accuccgcccccuggguucaagcgauucuccu

SEQ ID NO: 302931 - RNA, 32 nt, Human
accuccgcccccuggguuuaagcgauucuccu

SEQ ID NO: 302932 - RNA, 32 nt, Human
accuccgccguccuccccaacccucguccucu

SEQ ID NO: 302933 - RNA, 32 nt, Human
accuccgccuacuggguucaagugauucucuu

SEQ ID NO: 302934 - RNA, 32 nt, Human
accuccgccucccaaguucaagcgauucuccu

SEQ ID NO: 302935 - RNA, 32 nt, Human
accuccgccucccaaguucaagcgauuguccu

SEQ ID NO: 302936 - RNA, 32 nt, Human
accuccgccucccagguucaagcaauucuccc

SEQ ID NO: 302937 - RNA, 32 nt, Human
accuccgccucccagguucaagcaauucuccu

SEQ ID NO: 302938 - RNA, 32 nt, Human
accuccgccucccagguucaagcaauucugcu

SEQ ID NO: 302939 - RNA, 32 nt, Human
accuccgccucccagguucaagcaguucuccu

SEQ ID NO: 302940 - RNA, 32 nt, Human
accuccgccucccagguucaagcgauucuccu

SEQ ID NO: 302941 - RNA, 32 nt, Human
accuccgccucccagguucaagcgauuuuccu

SEQ ID NO: 302942 - RNA, 32 nt, Human
accuccgccucccagguucaagcgguucuccu

SEQ ID NO: 302943 - RNA, 32 nt, Human
accuccgccucccagguucaaguaauuccucu

SEQ ID NO: 302944 - RNA, 32 nt, Human
accuccgccucccagguucaaguaauucuccu

SEQ ID NO: 302945 - RNA, 32 nt, Human
accuccgccucccagguucaaguaauucugcc

SEQ ID NO: 302946 - RNA, 32 nt, Human
accuccgccucccagguucacgccauucuccu

SEQ ID NO: 302947 - RNA, 32 nt, Human
accuccgccucccagguuccagcuauucuccu

SEQ ID NO: 302948 - RNA, 32 nt, Human
accuccgccucccauguucaagcgauucuccu

SEQ ID NO: 302949 - RNA, 32 nt, Human
accuccgccucccgaguucaagcgauucuccu

SEQ ID NO: 302950 - RNA, 32 nt, Human
accuccgccucccggauucaagcaauucuccc

SEQ ID NO: 302951 - RNA, 32 nt, Human
accuccgccucccggguucaagaaguuucccu

SEQ ID NO: 302952 - RNA, 32 nt, Human
accuccgccucccggguucaagagauucuccu

SEQ ID NO: 302953 - RNA, 32 nt, Human
accuccgccucccggguucaagcaauccuccc

SEQ ID NO: 302954 - RNA, 32 nt, Human
accuccgccucccggguucaagcaauucuccu

SEQ ID NO: 302955 - RNA, 32 nt, Human
accuccgccucccggguucaagcaguucuccu

SEQ ID NO: 302956 - RNA, 32 nt, Human
accuccgccucccggguucaagcgauucaucu

SEQ ID NO: 302957 - RNA, 32 nt, Human
accuccgccucccggguucaagcgauucucca

SEQ ID NO: 302958 - RNA, 32 nt, Human
accuccgccucccggguucaagcgauucuccu

SEQ ID NO: 302959 - RNA, 32 nt, Human
accuccgccucccggguucaaguaauucugcu

SEQ ID NO: 302960 - RNA, 32 nt, Human
accuccgccucccggguucaagugauuccccu

SEQ ID NO: 302961 - RNA, 32 nt, Human
accuccgccucccggguucaagugauucucca

SEQ ID NO: 302962 - RNA, 32 nt, Human
accuccgccucccggguucaagugauucuccu

SEQ ID NO: 302963 - RNA, 32 nt, Human
accuccgccucccggguucaagugauucucgu

SEQ ID NO: 302964 - RNA, 32 nt, Human
accuccgccucccggguucaagugauucucuu

SEQ ID NO: 302965 - RNA, 32 nt, Human
accuccgccucccggguucaagugauucuucu

SEQ ID NO: 302966 - RNA, 32 nt, Human
accuccgccucccugguucaagcaauucuccu

SEQ ID NO: 302967 - RNA, 32 nt, Human
accuccgccucccugguucaagcgauucuccu

SEQ ID NO: 302968 - RNA, 32 nt, Human
accuccgccuccgggguucaagcgauucuccu

SEQ ID NO: 302969 - RNA, 32 nt, Human
accuccgccuccuggguccaagugauucuccu

SEQ ID NO: 302970 - RNA, 32 nt, Human
accuccgccuccuggguuaaagugauucucuc

SEQ ID NO: 302971 - RNA, 32 nt, Human
accuccgccuccuggguucaaacaauucuccu

SEQ ID NO: 302972 - RNA, 32 nt, Human
accuccgccuccuggguucaaacaauucuguc

SEQ ID NO: 302973 - RNA, 32 nt, Human
accuccgccuccuggguucaaacgauucuccu

SEQ ID NO: 302974 - RNA, 32 nt, Human
accuccgccuccuggguucaagagauucuccu

SEQ ID NO: 302975 - RNA, 32 nt, Human
accuccgccuccuggguucaagcaagucuccu

SEQ ID NO: 302976 - RNA, 32 nt, Human
accuccgccuccuggguucaagcaauucucca

SEQ ID NO: 302977 - RNA, 32 nt, Human
accuccgccuccuggguucaagcaauucuccu

SEQ ID NO: 302978 - RNA, 32 nt, Human
accuccgccuccuggguucaagcaauucucug

SEQ ID NO: 302979 - RNA, 32 nt, Human
accuccgccuccuggguucaagcaauucugug

SEQ ID NO: 302980 - RNA, 32 nt, Human
accuccgccuccuggguucaagcaauucuucu

SEQ ID NO: 302981 - RNA, 32 nt, Human
accuccgccuccuggguucaagcaguucucuu

SEQ ID NO: 302982 - RNA, 32 nt, Human
accuccgccuccuggguucaagcgauccuccu

SEQ ID NO: 302983 - RNA, 32 nt, Human
accuccgccuccuggguucaagcgauucaccc

SEQ ID NO: 302984 - RNA, 32 nt, Human
accuccgccuccuggguucaagcgauucaccu

SEQ ID NO: 302985 - RNA, 32 nt, Human
accuccgccuccuggguucaagcgauuccucu

SEQ ID NO: 302986 - RNA, 32 nt, Human
accuccgccuccuggguucaagcgauuccugu

SEQ ID NO: 302987 - RNA, 32 nt, Human
accuccgccuccuggguucaagcgauucucca

SEQ ID NO: 302988 - RNA, 32 nt, Human
accuccgccuccuggguucaagcgauucuccu

SEQ ID NO: 302989 - RNA, 32 nt, Human
accuccgccuccuggguucaagcgauucucgu

SEQ ID NO: 302990 - RNA, 32 nt, Human
accuccgccuccuggguucaagcgauucucuu

SEQ ID NO: 302991 - RNA, 32 nt, Human
accuccgccuccuggguucaagcgauuguccu

SEQ ID NO: 302992 - RNA, 32 nt, Human
accuccgccuccuggguucaagggauucuccu

SEQ ID NO: 302993 - RNA, 32 nt, Human
accuccgccuccuggguucaaguaauucuccu

SEQ ID NO: 302994 - RNA, 32 nt, Human
accuccgccuccuggguucaagugauucuccu

SEQ ID NO: 302995 - RNA, 32 nt, Human
accuccgccuccuggguucaagugauucucgu

SEQ ID NO: 302996 - RNA, 32 nt, Human
accuccgccuccuggguucacaugauucuccu

SEQ ID NO: 302997 - RNA, 32 nt, Human
accuccgccuccuggguucaggagauucuccu

SEQ ID NO: 302998 - RNA, 32 nt, Human
accuccgccuccuggguucaggcaauuuuccu

SEQ ID NO: 302999 - RNA, 32 nt, Human
accuccgccuccuggguucaggcgauucuccu

SEQ ID NO: 303000 - RNA, 32 nt, Human
accuccgccuccuggguuccaacgauucuccu

SEQ ID NO: 303001 - RNA, 32 nt, Human
accuccgccuccuggguucgggcgauucuccu

SEQ ID NO: 303002 - RNA, 32 nt, Human
accuccgccuccuggguucgggugauucuccu

SEQ ID NO: 303003 - RNA, 32 nt, Human
accuccgccuccuggguugaagcgauucuugu

SEQ ID NO: 303004 - RNA, 32 nt, Human
accuccgccucucagguucaagcaauucuccu

SEQ ID NO: 303005 - RNA, 32 nt, Human
accuccgccucucggguucaagcgauucuccu

SEQ ID NO: 303006 - RNA, 32 nt, Human
accuccgccucugcacuccagccugggugaca

SEQ ID NO: 303007 - RNA, 32 nt, Human
accuccgccucuuggguucaaccgauucuccu

SEQ ID NO: 303008 - RNA, 32 nt, Human
accuccgccucuuggguucaagcaauucugcu

SEQ ID NO: 303009 - RNA, 32 nt, Human
accuccgccucuuggguucaagcgauucuucu

SEQ ID NO: 303010 - RNA, 32 nt, Human
accuccgccugcuggguucaagcgauucuccu

SEQ ID NO: 303011 - RNA, 32 nt, Human
accuccgccuuccagguucaagcgauucuccu

SEQ ID NO: 303012 - RNA, 32 nt, Human
accuccgccuuccugguucaagugauucuccu

SEQ ID NO: 303013 - RNA, 32 nt, Human
accuccgccuucuggguucaagcaauucuccu

SEQ ID NO: 303014 - RNA, 32 nt, Human
accuccgccuucuggguucaagcaguucucgu

SEQ ID NO: 303015 - RNA, 32 nt, Human
accuccgccuugcugguugagauggauucucg

SEQ ID NO: 303016 - RNA, 32 nt, Human
accuccgcucccuggguucaagcgauucuccu

SEQ ID NO: 303017 - RNA, 32 nt, Human
accuccgcugagggucauuaugugccaggcau

SEQ ID NO: 303018 - RNA, 32 nt, Human
accuccgcuuccuggguucaaacaauucuccu

SEQ ID NO: 303019 - RNA, 32 nt, Human
accuccggcgaauaaaggucggccugcgggua

SEQ ID NO: 303020 - RNA, 32 nt, Human
accuccggcucuugucaggcucuugucuggua

SEQ ID NO: 303021 - RNA, 32 nt, Human
accuccgucucccagguucaagcgauucuccc

SEQ ID NO: 303022 - RNA, 32 nt, Human
accuccgucucccagguucaagcgauucucuu

SEQ ID NO: 303023 - RNA, 32 nt, Human
accuccgucucccagguucaagcgauucuucu

SEQ ID NO: 303024 - RNA, 32 nt, Human
accuccgucuccuggguucaagcgauucuccu

SEQ ID NO: 303025 - RNA, 32 nt, Human
accuccgucuccuggguucaagugauucucca

SEQ ID NO: 303026 - RNA, 32 nt, Human
accuccgucuccuggguucaagugauucuucu

SEQ ID NO: 303027 - RNA, 32 nt, Human
accuccguguuuacuccagccuauggauccgu

SEQ ID NO: 303028 - RNA, 32 nt, Human
accuccguuuccuggguucgagugauucuccu

SEQ ID NO: 303029 - RNA, 32 nt, Human
accuccuaugccucauguccagccagguugag

SEQ ID NO: 303030 - RNA, 32 nt, Human
accuccuauugccaccaccgcugccaccacca

SEQ ID NO: 303031 - RNA, 18 nt, Human
accuccucaccccagccc

SEQ ID NO: 303032 - RNA, 32 nt, Human
accuccucaccccagcccuccaccucucgggg

SEQ ID NO: 303033 - RNA, 32 nt, Human
accuccucaccucugcuccuugcccucucacc

SEQ ID NO: 303034 - RNA, 32 nt, Human
accuccucacugacaccccugccugccuuugu

SEQ ID NO: 303035 - RNA, 32 nt, Human
accuccucauggcauccucccuguacccaggu

SEQ ID NO: 303036 - RNA, 32 nt, Human
accuccucauuuuagugaugaggaaucugaga

SEQ ID NO: 303037 - RNA, 20 nt, Human
accuccuccaauccuugaga

SEQ ID NO: 303038 - RNA, 32 nt, Human
accuccuccacucccccugccugcccccagca

SEQ ID NO: 303039 - RNA, 32 nt, Human
accuccuccaucuccggcuccugggcuuggga

SEQ ID NO: 303040 - RNA, 32 nt, Human
accuccuccaugaagcuuucucucauucuccc

SEQ ID NO: 303041 - RNA, 32 nt, Human
accuccucccacccucccccugcuccccacca

SEQ ID NO: 303042 - RNA, 32 nt, Human
accuccuccccaugggcaccaucucugccauu

SEQ ID NO: 303043 - RNA, 32 nt, Human
accuccucccucuucuccucuguggccuggga

SEQ ID NO: 303044 - RNA, 32 nt, Human
accuccuccguaucccccucuccugaagcccu

SEQ ID NO: 303045 - RNA, 32 nt, Human
accuccuccucccagagguacuucucagcccu

SEQ ID NO: 303046 - RNA, 32 nt, Human
accuccuccucccggguucaagcaauucuccc

SEQ ID NO: 303047 - RNA, 32 nt, Human
accuccuccuccuccuggcccugcugcugccc

SEQ ID NO: 303048 - RNA, 32 nt, Human
accuccuccuccuggauucaagcaauucucuu

SEQ ID NO: 303049 - RNA, 32 nt, Human
accuccuccuccuggguucaagcgauucuccu

SEQ ID NO: 303050 - RNA, 32 nt, Human
accuccuccucuuccucuccuuuaccccacuu

SEQ ID NO: 303051 - RNA, 32 nt, Human
accuccuccucuuggguucaagcgauucuccu

SEQ ID NO: 303052 - RNA, 32 nt, Human
accuccuccugcuccccauccccagcccacca

SEQ ID NO: 303053 - RNA, 32 nt, Human
accuccuccuguggagggugugcccugucugc

SEQ ID NO: 303054 - RNA, 32 nt, Human
accuccucgagugcccugggaccacugggcca

SEQ ID NO: 303055 - RNA, 18 nt, Human
accuccucgcccugggcu

SEQ ID NO: 303056 - RNA, 32 nt, Human
accuccucucaaguagaggggucuccagaucg

SEQ ID NO: 303057 - RNA, 32 nt, Human
accuccucucacuccccagccugggcccaucu

SEQ ID NO: 303058 - RNA, 32 nt, Human
accuccucucacugcuagaauauucaccaagg

SEQ ID NO: 303059 - RNA, 32 nt, Human
accuccucuccaagacaaaacaaacaaaacua

SEQ ID NO: 303060 - RNA, 32 nt, Human
accuccucuccccaaaauuuguagaaauaguu

SEQ ID NO: 303061 - RNA, 32 nt, Human
accuccucugcaggcccuucccucuccgccug

SEQ ID NO: 303062 - RNA, 32 nt, Human
accuccucugccagggccuacuucuccccagc

SEQ ID NO: 303063 - RNA, 32 nt, Human
accuccucugcccucuggaucuagugaagccu

SEQ ID NO: 303064 - RNA, 32 nt, Human
accuccucuguggacugugccuucccauccag

SEQ ID NO: 303065 - RNA, 32 nt, Human
accuccucuuccccacugccaucuucuaagag

SEQ ID NO: 303066 - RNA, 32 nt, Human
accuccucuuugccucccuccugccccuuucc

SEQ ID NO: 303067 - RNA, 32 nt, Human
accuccugacaccuccauauaccccagcuaua

SEQ ID NO: 303068 - RNA, 32 nt, Human
accuccugacccuucccucuuucaaggagaag

SEQ ID NO: 303069 - RNA, 32 nt, Human
accuccugagaggugugaggugcagggauacc

SEQ ID NO: 303070 - RNA, 21 nt, Human
accuccugauccacccaccuc

SEQ ID NO: 303071 - RNA, 22 nt, Human
accuccugauccacccaccuca

SEQ ID NO: 303072 - RNA, 32 nt, Human
accuccugauccacccuccucugccucccaaa

SEQ ID NO: 303073 - RNA, 22 nt, Human
accuccugauccgcccaccuca

SEQ ID NO: 303074 - RNA, 32 nt, Human
accuccugccaggccccaccuccaacacuggg

SEQ ID NO: 303075 - RNA, 19 nt, Human
accuccugccccgcgcggg

SEQ ID NO: 303076 - RNA, 20 nt, Human
accuccugcccuaggccugg

SEQ ID NO: 303077 - RNA, 22 nt, Human
accuccugcccucugggaagug

SEQ ID NO: 303078 - RNA, 20 nt, Human
accuccugcccugcuggggu

SEQ ID NO: 303079 - RNA, 32 nt, Human
accuccugcuccuggguucgagcgauucuccu

SEQ ID NO: 303080 - RNA, 32 nt, Human
accuccuggaacacuggcaucucugagccucc

SEQ ID NO: 303081 - RNA, 21 nt, Human
accuccuggaaggcagccagg

SEQ ID NO: 303082 - RNA, 32 nt, Human
accuccugggcaacauagugagaucccaucuc

SEQ ID NO: 303083 - RNA, 32 nt, Human
accuccugggcugggcagagugacagugcuag

SEQ ID NO: 303084 - RNA, 32 nt, Human
accuccuggggaauucugugggagacacuugg

SEQ ID NO: 303085 - RNA, 32 nt, Human
accuccuguaucaucagcuucacuuucuugca

SEQ ID NO: 303086 - RNA, 32 nt, Human
accuccugugacgcccucccagagccaaccuc

SEQ ID NO: 303087 - RNA, 22 nt, Human
accuccuucaccagggguuggg

SEQ ID NO: 303088 - RNA, 24 nt, Human
accuccuucagcagggcagcuccu

SEQ ID NO: 303089 - RNA, 21 nt, Human
accuccuucaucuucuccuuc

SEQ ID NO: 303090 - RNA, 32 nt, Human
accuccuuccacagccgcaucuucucaugaca

SEQ ID NO: 303091 - RNA, 32 nt, Human
accuccuuccacccucuuugguuuuguaaagg

SEQ ID NO: 303092 - RNA, 28 nt, Human
accuccuuccagguucuggcuccuucca

SEQ ID NO: 303093 - RNA, 32 nt, Human
accuccuucccaaacaccuccuucccaaacac

SEQ ID NO: 303094 - RNA, 32 nt, Human
accuccuucccaaacaccuccuucccaacacc

SEQ ID NO: 303095 - RNA, 32 nt, Human
accuccuucccaaacauccccuucccaaacac

SEQ ID NO: 303096 - RNA, 32 nt, Human
accuccuucccaaaccccucuuucccaaacac

SEQ ID NO: 303097 - RNA, 32 nt, Human
accuccuucccaaaccccuuucccaaacaucu

SEQ ID NO: 303098 - RNA, 32 nt, Human
accuccuucccaacaccuccuucccaaacccc

SEQ ID NO: 303099 - RNA, 32 nt, Human
accuccuucccaacaccuccuuccccaacacc

SEQ ID NO: 303100 - RNA, 32 nt, Human
accuccuucccaacaccuccuucccccuuccc

SEQ ID NO: 303101 - RNA, 32 nt, Human
accuccuucccagacaccuccuucccaacacc

SEQ ID NO: 303102 - RNA, 32 nt, Human
accuccuuccccaacaccuccuucccaaacac

SEQ ID NO: 303103 - RNA, 32 nt, Human
accuccuuccccaacaccuccuucccaacacc

SEQ ID NO: 303104 - RNA, 22 nt, Human
accuccuuccccagcuccccca

SEQ ID NO: 303105 - RNA, 32 nt, Human
accuccuucccucccuucuagaguucuuugga

SEQ ID NO: 303106 - RNA, 21 nt, Human
accuccuuccugggccugcgg

SEQ ID NO: 303107 - RNA, 32 nt, Human
accuccuucgccacuccaccagccuggaccuc

SEQ ID NO: 303108 - RNA, 32 nt, Human
accuccuucuccucccccucccccuccuccaa

SEQ ID NO: 303109 - RNA, 32 nt, Human
accuccuugaaaaaccucuuuauuaaucucac

SEQ ID NO: 303110 - RNA, 22 nt, Human
accuccuugguacuacccuucc

SEQ ID NO: 303111 - RNA, 32 nt, Human
accuccuuguuuacaucuucaggccaagauga

SEQ ID NO: 303112 - RNA, 32 nt, Human
accuccuuguuucagcugggccugcuguccag

SEQ ID NO: 303113 - RNA, 32 nt, Human
accuccuuucccuccaugcuuccgcggaggag

SEQ ID NO: 303114 - RNA, 32 nt, Human
accuccuuucccucucuccaucuuccaauccc

SEQ ID NO: 303115 - RNA, 32 nt, Human
accuccuuucuucucugcucccaaaccauguc

SEQ ID NO: 303116 - RNA, 32 nt, Human
accuccuuugaaucccagcccuacucgaaaua

SEQ ID NO: 303117 - RNA, 32 nt, Human
accuccuuugcccuagaccagcuccucuccaa

SEQ ID NO: 303118 - RNA, 32 nt, Human
accuccuuuggcccaacuccugcugagcagcu

SEQ ID NO: 303119 - RNA, 32 nt, Human
accuccuuuggcccaacuccugcugagcugcu

SEQ ID NO: 303120 - RNA, 32 nt, Human
accucgaagacgcuauccgauccaucagaccc

SEQ ID NO: 303121 - RNA, 32 nt, Human
accucgaccuccuggguucaagcgauucuccc

SEQ ID NO: 303122 - RNA, 32 nt, Human
accucgaccucuuggguucaagugauucuccu

SEQ ID NO: 303123 - RNA, 32 nt, Human
accucgacgcuacccaaaugcuuuccucauca

SEQ ID NO: 303124 - RNA, 32 nt, Human
accucgagagcaccccuugccggugaaggaug

SEQ ID NO: 303125 - RNA, 32 nt, Human
accucgagaugggugcugguccuguugauccc

SEQ ID NO: 303126 - RNA, 26 nt, Human
accucgagcagccgccgccgccgccg

SEQ ID NO: 303127 - RNA, 32 nt, Human
accucgagcuucucaaccacugcggccuaauc

SEQ ID NO: 303128 - RNA, 19 nt, Human
accucgaggcuccgccccc

SEQ ID NO: 303129 - RNA, 32 nt, Human
accucgaguccuuaugcacagaaaggcccuga

SEQ ID NO: 303130 - RNA, 32 nt, Human
accucgaguguggccuucuaagggucuuugcu

SEQ ID NO: 303131 - RNA, 32 nt, Human
accucgccagcggggcccucuguggcacuggg

SEQ ID NO: 303132 - RNA, 32 nt, Human
accucgccccuggacagagcaguccuuccaga

SEQ ID NO: 303133 - RNA, 32 nt, Human
accucgcccggcuaauauuuuguauuuuuagu

SEQ ID NO: 303134 - RNA, 32 nt, Human
accucgccgcaaagcgaaagaaacuggagcag

SEQ ID NO: 303135 - RNA, 32 nt, Human
accucgccgcucuucuugaaucaugcugggcu

SEQ ID NO: 303136 - RNA, 32 nt, Human
accucgcgcuaggccagcuccaggagggcaac

SEQ ID NO: 303137 - RNA, 32 nt, Human
accucgcugcagcccccaucgccucggggagu

SEQ ID NO: 303138 - RNA, 32 nt, Human
accucggaccacccagaguuuccucuuggucc

SEQ ID NO: 303139 - RNA, 32 nt, Human
accucggagacgggacccugcccagagcugag

SEQ ID NO: 303140 - RNA, 32 nt, Human
accucggaggcagggcgcgcaggcgggcggcg

SEQ ID NO: 303141 - RNA, 25 nt, Human
accucggaggcggagguugcaguga

SEQ ID NO: 303142 - RNA, 32 nt, Human
accucggaggcggagguugcagugagccaaga

SEQ ID NO: 303143 - RNA, 32 nt, Human
accucggaggcugaaguugcagugagccaaga

SEQ ID NO: 303144 - RNA, 32 nt, Human
accucggcauccacccaguccaucccaccauc

SEQ ID NO: 303145 - RNA, 32 nt, Human
accucggcccacgccgccugaguuagaaacgc

SEQ ID NO: 303146 - RNA, 32 nt, Human
accucggccccagugauggcugaucucacucc

SEQ ID NO: 303147 - RNA, 32 nt, Human
accucggcccccucagcuucccgggcuggcag

SEQ ID NO: 303148 - RNA, 32 nt, Human
accucggccucagagauggcucugaguaaauc

SEQ ID NO: 303149 - RNA, 32 nt, Human
accucggcucacugcaaccuccgccucccagg

SEQ ID NO: 303150 - RNA, 32 nt, Human
accucggcucacugcaaccucugucuccuggg

SEQ ID NO: 303151 - RNA, 32 nt, Human
accucggcucacugcaaccuuugccuccuagg

SEQ ID NO: 303152 - RNA, 32 nt, Human
accucggcucacugcagccuccuucuccuggg

SEQ ID NO: 303153 - RNA, 32 nt, Human
accucggcucacugcauccucugccuccuggg

SEQ ID NO: 303154 - RNA, 32 nt, Human
accucggcucacuguaaccuucaccuuccgug

SEQ ID NO: 303155 - RNA, 32 nt, Human
accucggcugcaguaaaguuacgugaggccug

SEQ ID NO: 303156 - RNA, 32 nt, Human
accucggcuguggucucucugcuuuaaauccu

SEQ ID NO: 303157 - RNA, 32 nt, Human
accucggcuuacugcaaccuccaccucccggg

SEQ ID NO: 303158 - RNA, 32 nt, Human
accucggcuuacugcaaccuccgccuucccag

SEQ ID NO: 303159 - RNA, 32 nt, Human
accucggcuuccacucucucuuccucacccua

SEQ ID NO: 303160 - RNA, 32 nt, Human
accucgggauguggcguuguuuggagaaaggg

SEQ ID NO: 303161 - RNA, 32 nt, Human
accucgggccacucgcugccccucucugggcc

SEQ ID NO: 303162 - RNA, 32 nt, Human
accucggggcugccugggccucuggcuuccag

SEQ ID NO: 303163 - RNA, 32 nt, Human
accucggggcugggacaccuccuggcccucac

SEQ ID NO: 303164 - RNA, 32 nt, Human
accucggggugggggugggcagugagugcagg

SEQ ID NO: 303165 - RNA, 24 nt, Human
accucgggugauccacccaccuca

SEQ ID NO: 303166 - RNA, 32 nt, Human
accucgguaaagggguggaguggcgcgcuggu

SEQ ID NO: 303167 - RNA, 32 nt, Human
accucggugcucaagagagaggccccagcugg

SEQ ID NO: 303168 - RNA, 32 nt, Human
accucguaggaacgcugagcugccucaacagg

SEQ ID NO: 303169 - RNA, 32 nt, Human
accucgucugaaauggcugccucccagugucu

SEQ ID NO: 303170 - RNA, 32 nt, Human
accucgucuucuguggagaaccaccugccauc

SEQ ID NO: 303171 - RNA, 32 nt, Human
accucgucuuucuccauauuguccugcucccc

SEQ ID NO: 303172 - RNA, 32 nt, Human
accucgucuuugcuuguccugcucagaugcug

SEQ ID NO: 303173 - RNA, 32 nt, Human
accucgugagccaccacgcccagccucuuuug

SEQ ID NO: 303174 - RNA, 22 nt, Human
accucgugauccacccaccuca

SEQ ID NO: 303175 - RNA, 21 nt, Human
accucgugauccgcccgccuc

SEQ ID NO: 303176 - RNA, 32 nt, Human
accucgugauccgcccgccucugccucccaaa

SEQ ID NO: 303177 - RNA, 32 nt, Human
accucgugauccgccugccucugccucccaaa

SEQ ID NO: 303178 - RNA, 32 nt, Human
accucgugauuugcccgccucugccuccccaa

SEQ ID NO: 303179 - RNA, 31 nt, Human
accucgugccucucugcgugccggguugguc

SEQ ID NO: 303180 - RNA, 32 nt, Human
accucguggcugcugcugcuccugcucucccu

SEQ ID NO: 303181 - RNA, 32 nt, Human
accucgugggcuguaggaaagcaaauguaggu

SEQ ID NO: 303182 - RNA, 32 nt, Human
accucguugccucucuucguccuuccuuacag

SEQ ID NO: 303183 - RNA, 22 nt, Human
accucguugugagccucugaac

SEQ ID NO: 303184 - RNA, 32 nt, Human
accucuaaaggcaugcuuagaggucaaggacc

SEQ ID NO: 303185 - RNA, 32 nt, Human
accucuaacagaaccgugguguccaugguugc

SEQ ID NO: 303186 - RNA, 32 nt, Human
accucuaacagaagcuuauacacauaugcaug

SEQ ID NO: 303187 - RNA, 32 nt, Human
accucuaagcucuggcaccugugaagcccuuu

SEQ ID NO: 303188 - RNA, 32 nt, Human
accucuaagcuguuccugcuucugcucuccuc

SEQ ID NO: 303189 - RNA, 32 nt, Human
accucuaccaacccucucucuccagcuagacu

SEQ ID NO: 303190 - RNA, 32 nt, Human
accucuaccccagcucuccaggacacagcgcu

SEQ ID NO: 303191 - RNA, 32 nt, Human
accucuaccgcgugggacagagcaagaucuuc

SEQ ID NO: 303192 - RNA, 32 nt, Human
accucuaccuccaggguucaagcaauucuccu

SEQ ID NO: 303193 - RNA, 32 nt, Human
accucuaccuccuggguucaagcaaaucuccu

SEQ ID NO: 303194 - RNA, 32 nt, Human
accucuaccuccuggguucaagcaauccuccu

SEQ ID NO: 303195 - RNA, 32 nt, Human
accucuaccuccuggguucaagcgauucuccu

SEQ ID NO: 303196 - RNA, 32 nt, Human
accucuaccuccuggguucaagggauucuccu

SEQ ID NO: 303197 - RNA, 32 nt, Human
accucuaccuccuggguucaagugauucucgu

SEQ ID NO: 303198 - RNA, 32 nt, Human
accucuaccuccuggguucaagugauucucuu

SEQ ID NO: 303199 - RNA, 17 nt, Human
accucuaccugccccca

SEQ ID NO: 303200 - RNA, 32 nt, Human
accucuagaucaaccugggaacagucacaagg

SEQ ID NO: 303201 - RNA, 32 nt, Human
accucuagccccagcuacucaggcuggggugg

SEQ ID NO: 303202 - RNA, 32 nt, Human
accucuagcugcaugaccuugggcaagcuaug

SEQ ID NO: 303203 - RNA, 32 nt, Human
accucuagucugggugacagagcaagacccug

SEQ ID NO: 303204 - RNA, 32 nt, Human
accucuagugcaagccgguacagcauuauacu

SEQ ID NO: 303205 - RNA, 32 nt, Human
accucuaucuggagaggugaaaacacaaaggc

SEQ ID NO: 303206 - RNA, 32 nt, Human
accucucaagccucaggagacaggaggauggc

SEQ ID NO: 303207 - RNA, 32 nt, Human
accucucaagccucuucagccuuucucagcag

SEQ ID NO: 303208 - RNA, 32 nt, Human
accucucaaggcccagcuucagccucaccuuc

SEQ ID NO: 303209 - RNA, 32 nt, Human
accucucacaauauuaaaugcacuucaauaau

SEQ ID NO: 303210 - RNA, 32 nt, Human
accucucacagcuacccagcacaugccacaau

SEQ ID NO: 303211 - RNA, 26 nt, Human
accucucacgcagccagugaguuagg

SEQ ID NO: 303212 - RNA, 32 nt, Human
accucucagagcaaugucaugcugggggucca

SEQ ID NO: 303213 - RNA, 32 nt, Human
accucucagagcaguccuugcaccagcucagg

SEQ ID NO: 303214 - RNA, 32 nt, Human
accucucaggcucaagcgauucucccaccuca

SEQ ID NO: 303215 - RNA, 32 nt, Human
accucucauacacuggccaggaggcugcagaa

SEQ ID NO: 303216 - RNA, 32 nt, Human
accucuccacccccaaaccuaaaacaggccag

SEQ ID NO: 303217 - RNA, 32 nt, Human
accucuccacugccuccuccaccccuguauuu

SEQ ID NO: 303218 - RNA, 32 nt, Human
accucuccagcaggugccugaccauggguuca

SEQ ID NO: 303219 - RNA, 32 nt, Human
accucucccagccagggcugagaggauucgag

SEQ ID NO: 303220 - RNA, 32 nt, Human
accucucccaggaagugguggggcaccggucu

SEQ ID NO: 303221 - RNA, 32 nt, Human
accucucccuccccucuccucuccuccccuug

SEQ ID NO: 303222 - RNA, 32 nt, Human
accucucccugcaaacaccacacacacauggc

SEQ ID NO: 303223 - RNA, 32 nt, Human
accucuccuaaagcacagggccccggcuaaga

SEQ ID NO: 303224 - RNA, 32 nt, Human
accucuccucaaggacugcuaagucaggaaau

SEQ ID NO: 303225 - RNA, 32 nt, Human
accucuccuccaggcccugccuugucccugcu

SEQ ID NO: 303226 - RNA, 32 nt, Human
accucuccuccccucuccucaguuuugccgac

SEQ ID NO: 303227 - RNA, 16 nt, Human
accucuccugcugcug

SEQ ID NO: 303228 - RNA, 32 nt, Human
accucuccugggacuggaacccuucagugggu

SEQ ID NO: 303229 - RNA, 32 nt, Human
accucuccuuuggagccaccuugucccuggcu

SEQ ID NO: 303230 - RNA, 32 nt, Human
accucucgaugguucucuccugggcucaggcg

SEQ ID NO: 303231 - RNA, 32 nt, Human
accucucgguuugccagccuuugcagccacuu

SEQ ID NO: 303232 - RNA, 32 nt, Human
accucucgugcucugucaccugcagcagaggu

SEQ ID NO: 303233 - RNA, 32 nt, Human
accucucuccuccccuccuuccucucuccucc

SEQ ID NO: 303234 - RNA, 32 nt, Human
accucucucucacagguacacacacaaccauc

SEQ ID NO: 303235 - RNA, 32 nt, Human
accucucucuucaacugccucucuccagagcu

SEQ ID NO: 303236 - RNA, 32 nt, Human
accucucugacugggacauccaucucugccua

SEQ ID NO: 303237 - RNA, 32 nt, Human
accucucugccuuugugccauagggaaaugga

SEQ ID NO: 303238 - RNA, 32 nt, Human
accucucugcuuuucaagcauuuccuugaguc

SEQ ID NO: 303239 - RNA, 32 nt, Human
accucucuggcucucccccagagacuaucaga

SEQ ID NO: 303240 - RNA, 32 nt, Human
accucucuguaucuuucccuugucacuuuauc

SEQ ID NO: 303241 - RNA, 32 nt, Human
accucucugucugacuucugcaucuccuucca

SEQ ID NO: 303242 - RNA, 32 nt, Human
accucucuucaguuggccacccugcacguugu

SEQ ID NO: 303243 - RNA, 20 nt, Human
accucucuucccugcugcug

SEQ ID NO: 303244 - RNA, 32 nt, Human
accucucuuccucugggacuuuugcaccggga

SEQ ID NO: 303245 - RNA, 23 nt, Human
accucucuuuguccccuuccaga

SEQ ID NO: 303246 - RNA, 32 nt, Human
accucugaaaaaugagaauggugagcgcacgg

SEQ ID NO: 303247 - RNA, 32 nt, Human
accucugaaagcagaacacuugcucaacaacc

SEQ ID NO: 303248 - RNA, 32 nt, Human
accucugaaauguucccugcucugaaaucugg

SEQ ID NO: 303249 - RNA, 32 nt, Human
accucugaacucugaccucaggaggcucuggg

SEQ ID NO: 303250 - RNA, 32 nt, Human
accucugaccacaccuuggcaagucuuuccca

SEQ ID NO: 303251 - RNA, 26 nt, Human
accucugaccucaggugauccaucca

SEQ ID NO: 303252 - RNA, 32 nt, Human
accucugacuccacacccuucagggcuccagc

SEQ ID NO: 303253 - RNA, 32 nt, Human
accucugagagacucagggugggcuuucucac

SEQ ID NO: 303254 - RNA, 19 nt, Human
accucugagccacccauca

SEQ ID NO: 303255 - RNA, 32 nt, Human
accucugaggggcaggagugcuuccuggugug

SEQ ID NO: 303256 - RNA, 32 nt, Human
accucugauguuuuccagcaccugcaaagucu

SEQ ID NO: 303257 - RNA, 32 nt, Human
accucugcaaccugccaccuccugcuggcagg

SEQ ID NO: 303258 - RNA, 32 nt, Human
accucugcagaggcugggggccuccacccagc

SEQ ID NO: 303259 - RNA, 32 nt, Human
accucugcagugaacugagauugcgccacugc

SEQ ID NO: 303260 - RNA, 32 nt, Human
accucugcauucuaguuacccuuugcuucccu

SEQ ID NO: 303261 - RNA, 32 nt, Human
accucugcauuugugaguguucccucuggcuu

SEQ ID NO: 303262 - RNA, 32 nt, Human
accucugccacccauguucaagcgauucuccu

SEQ ID NO: 303263 - RNA, 32 nt, Human
accucugccaccuggguucaagcgauucuccu

SEQ ID NO: 303264 - RNA, 32 nt, Human
accucugccacuacccagagcuuguccugccc

SEQ ID NO: 303265 - RNA, 22 nt, Human
accucugccagcaaccuugaga

SEQ ID NO: 303266 - RNA, 32 nt, Human
accucugccaucaggauuaaagugauucucgg

SEQ ID NO: 303267 - RNA, 32 nt, Human
accucugccauccuggagggcuagagauauag

SEQ ID NO: 303268 - RNA, 32 nt, Human
accucugcccccuggguucaagcgauucuccu

SEQ ID NO: 303269 - RNA, 32 nt, Human
accucugcccuccucaccuuccagucagggca

SEQ ID NO: 303270 - RNA, 32 nt, Human
accucugcccugcccuccagccugggacaaua

SEQ ID NO: 303271 - RNA, 32 nt, Human
accucugccucacggguucaagcaauucuccu

SEQ ID NO: 303272 - RNA, 32 nt, Human
accucugccuccagcaggcuugagcuugcccc

SEQ ID NO: 303273 - RNA, 32 nt, Human
accucugccucccagguucacgccauucuccu

SEQ ID NO: 303274 - RNA, 32 nt, Human
accucugccucccagguucaugccauucuccu

SEQ ID NO: 303275 - RNA, 32 nt, Human
accucugccucccggguucaagcaauuaacug

SEQ ID NO: 303276 - RNA, 32 nt, Human
accucugccucccggguucaagcaauucccug

SEQ ID NO: 303277 - RNA, 32 nt, Human
accucugccucccggguucaagcaauucuccu

SEQ ID NO: 303278 - RNA, 32 nt, Human
accucugccucccggguucaagcaauuuccug

SEQ ID NO: 303279 - RNA, 32 nt, Human
accucugccucccugguucaagcaauucucau

SEQ ID NO: 303280 - RNA, 32 nt, Human
accucugccucccugguucaagcgauucuucu

SEQ ID NO: 303281 - RNA, 32 nt, Human
accucugccuccugggcucaagcaauucuccc

SEQ ID NO: 303282 - RNA, 32 nt, Human
accucugccuccugggugcaagcaauuauccu

SEQ ID NO: 303283 - RNA, 32 nt, Human
accucugccuccuggguucaagaaauucuccu

SEQ ID NO: 303284 - RNA, 32 nt, Human
accucugccuccuggguucaagcaauucucau

SEQ ID NO: 303285 - RNA, 32 nt, Human
accucugccuccuggguucaagcaauucuccu

SEQ ID NO: 303286 - RNA, 32 nt, Human
accucugccuccuggguucaagcaauucucgu

SEQ ID NO: 303287 - RNA, 32 nt, Human
accucugccuccuggguucaagcaauuuuccu

SEQ ID NO: 303288 - RNA, 32 nt, Human
accucugccuccuggguucaagcaguucuccu

SEQ ID NO: 303289 - RNA, 32 nt, Human
accucugccuccuggguucaagcaguucucuu

SEQ ID NO: 303290 - RNA, 32 nt, Human
accucugccuccuggguucaagcgauuauccu

SEQ ID NO: 303291 - RNA, 32 nt, Human
accucugccuccuggguucaagcgauucucag

SEQ ID NO: 303292 - RNA, 32 nt, Human
accucugccuccuggguucaagcgauucuccu

SEQ ID NO: 303293 - RNA, 32 nt, Human
accucugccuccuggguucaagcgauucuugu

SEQ ID NO: 303294 - RNA, 32 nt, Human
accucugccuccuggguucaagcgauuuuccu

SEQ ID NO: 303295 - RNA, 32 nt, Human
accucugccuccuggguucaggcaauucuccc

SEQ ID NO: 303296 - RNA, 32 nt, Human
accucugccuccuggguuuaagcaauucuccu

SEQ ID NO: 303297 - RNA, 32 nt, Human
accucugccuccuggguuuaagcgauucuccu

SEQ ID NO: 303298 - RNA, 32 nt, Human
accucugccuccuugguucaagcaauucuccu

SEQ ID NO: 303299 - RNA, 32 nt, Human
accucugccucuuggguucaagcaauucucau

SEQ ID NO: 303300 - RNA, 32 nt, Human
accucugccucuuggguucaagcaauucuucu

SEQ ID NO: 303301 - RNA, 32 nt, Human
accucugccugccggguucaagcaguucuccu

SEQ ID NO: 303302 - RNA, 32 nt, Human
accucugccugggaaucuucuuuccuccccuc

SEQ ID NO: 303303 - RNA, 32 nt, Human
accucugccuuccagguucaagcaauuauccu

SEQ ID NO: 303304 - RNA, 32 nt, Human
accucugccuucuggguucaagcaauucucug

SEQ ID NO: 303305 - RNA, 32 nt, Human
accucugccuucuggguucaagcaauuguccu

SEQ ID NO: 303306 - RNA, 32 nt, Human
accucugccuucuggguucgagcaauucuccu

SEQ ID NO: 303307 - RNA, 18 nt, Human
accucugcuccagaaaua

SEQ ID NO: 303308 - RNA, 32 nt, Human
accucugcugcaaaggaaucucuugcugaguc

SEQ ID NO: 303309 - RNA, 32 nt, Human
accucugcuucccagguucaagcgauucuccu

SEQ ID NO: 303310 - RNA, 32 nt, Human
accucugcuucccgaguucaagcaauucuccu

SEQ ID NO: 303311 - RNA, 32 nt, Human
accucugcuucccggguucaagcaguuuccug

SEQ ID NO: 303312 - RNA, 32 nt, Human
accucugcuucccggguucaagugauucuccu

SEQ ID NO: 303313 - RNA, 32 nt, Human
accucugcuuccuagguucaagugauucuccu

SEQ ID NO: 303314 - RNA, 32 nt, Human
accucugcuuccuggguucaaacaauucucau

SEQ ID NO: 303315 - RNA, 32 nt, Human
accucugcuuccuggguucaagcgauucuccu

SEQ ID NO: 303316 - RNA, 32 nt, Human
accucugcuuccuggguucaggugauugucag

SEQ ID NO: 303317 - RNA, 32 nt, Human
accucuggagcaguugagguccaagcugggga

SEQ ID NO: 303318 - RNA, 32 nt, Human
accucuggcuaggugauccugauguuuccuac

SEQ ID NO: 303319 - RNA, 32 nt, Human
accucuggcuccuguccucuggcuccaccugc

SEQ ID NO: 303320 - RNA, 32 nt, Human
accucuggcugcagaucuuagaaggcugaaau

SEQ ID NO: 303321 - RNA, 32 nt, Human
accucuggcugcaggcauccagggauuauucc

SEQ ID NO: 303322 - RNA, 32 nt, Human
accucugggagggcaggagugggagcagauga

SEQ ID NO: 303323 - RNA, 32 nt, Human
accucugggagguagggaguucccuggcacug

SEQ ID NO: 303324 - RNA, 32 nt, Human
accucugggagugggaggggaacuggcuugaa

SEQ ID NO: 303325 - RNA, 32 nt, Human
accucugggcagagaaacaaagcucuauaugc

SEQ ID NO: 303326 - RNA, 32 nt, Human
accucugggcuugccauuccagccugguauaa

SEQ ID NO: 303327 - RNA, 32 nt, Human
accucuggggccacagcccugccccuccaguu

SEQ ID NO: 303328 - RNA, 32 nt, Human
accucuggggcccaaagcugucccuucucagu

SEQ ID NO: 303329 - RNA, 32 nt, Human
accucuggggucagaauaugcccagccugcgg

SEQ ID NO: 303330 - RNA, 32 nt, Human
accucugggucaacacagauuuacuggauucc

SEQ ID NO: 303331 - RNA, 18 nt, Human
accucugguauacuguua

SEQ ID NO: 303332 - RNA, 32 nt, Human
accucuguagccuaaaugaaauucuuaaaauc

SEQ ID NO: 303333 - RNA, 32 nt, Human
accucuguagcuccaaugagugacacauagua

SEQ ID NO: 303334 - RNA, 32 nt, Human
accucugucacccgagcuggagugcaguggug

SEQ ID NO: 303335 - RNA, 32 nt, Human
accucuguccugcagcagaaccccuccuuguc

SEQ ID NO: 303336 - RNA, 32 nt, Human
accucugucucccggguucaagcaauucuccc

SEQ ID NO: 303337 - RNA, 32 nt, Human
accucugucucccggguucaagcaauucuccu

SEQ ID NO: 303338 - RNA, 32 nt, Human
accucugucuccugggcucaagcaauucuucu

SEQ ID NO: 303339 - RNA, 32 nt, Human
accucugucuccuggguucaagcgauucuccu

SEQ ID NO: 303340 - RNA, 32 nt, Human
accucugucugcccgcugccucuugucuagcu

SEQ ID NO: 303341 - RNA, 32 nt, Human
accucugucuuccagguucaagcaauucugcc

SEQ ID NO: 303342 - RNA, 32 nt, Human
accucugugcagggcacagaaggcuggggugg

SEQ ID NO: 303343 - RNA, 32 nt, Human
accucugugcucccuccugccugcaugcaacc

SEQ ID NO: 303344 - RNA, 32 nt, Human
accucuguggcuaguuguccuaccucccuggc

SEQ ID NO: 303345 - RNA, 32 nt, Human
accucugugguauaggugaggggugugaggcc

SEQ ID NO: 303346 - RNA, 32 nt, Human
accucuguuaauacuuuuguacacucucacua

SEQ ID NO: 303347 - RNA, 32 nt, Human
accucuguuaucuuagcagcaagcaccugccu

SEQ ID NO: 303348 - RNA, 32 nt, Human
accucuguucucagacucuggaaaaggcuucu

SEQ ID NO: 303349 - RNA, 32 nt, Human
accucuguugccucguccaucccuggguugug

SEQ ID NO: 303350 - RNA, 32 nt, Human
accucuguuguccuccccuugggcggcugaga

SEQ ID NO: 303351 - RNA, 23 nt, Human
accucuuaagacauuagaaagua

SEQ ID NO: 303352 - RNA, 32 nt, Human
accucuuaggguguguuucuuugucuuuccug

SEQ ID NO: 303353 - RNA, 31 nt, Human
accucuuauuguggaaaccuguugagaucac

SEQ ID NO: 303354 - RNA, 32 nt, Human
accucuucaagaaaaauugaagcaguguugcc

SEQ ID NO: 303355 - RNA, 32 nt, Human
accucuucagcccguccgguggccuggaggcc

SEQ ID NO: 303356 - RNA, 32 nt, Human
accucuucauuacuggagaaaaaugaauuuug

SEQ ID NO: 303357 - RNA, 26 nt, Human
accucuuccaggagaacugauucugu

SEQ ID NO: 303358 - RNA, 32 nt, Human
accucuucccgagcgccauccccaccuucgcc

SEQ ID NO: 303359 - RNA, 32 nt, Human
accucuucccuaaugccaccucaguuuguuuc

SEQ ID NO: 303360 - RNA, 32 nt, Human
accucuuccucaccacuaggcuucuggggcug

SEQ ID NO: 303361 - RNA, 32 nt, Human
accucuuccucagagcccccacugaggggccg

SEQ ID NO: 303362 - RNA, 32 nt, Human
accucuuccuccaggguucaagugauucuccc

SEQ ID NO: 303363 - RNA, 32 nt, Human
accucuuccugaaaguccucccccacugacuc

SEQ ID NO: 303364 - RNA, 32 nt, Human
accucuucguccuccucuccugccucaccauc

SEQ ID NO: 303365 - RNA, 32 nt, Human
accucuucuccccacaaccccaaccccagagg

SEQ ID NO: 303366 - RNA, 32 nt, Human
accucuucugccgucucagccugggcgucgcu

SEQ ID NO: 303367 - RNA, 32 nt, Human
accucuugaauccauuuccaucccaucauccu

SEQ ID NO: 303368 - RNA, 32 nt, Human
accucuugacuuccuguuccccuaaaccugag

SEQ ID NO: 303369 - RNA, 32 nt, Human
accucuugagagaagagacuggcuccaggucu

SEQ ID NO: 303370 - RNA, 28 nt, Human
accucuugcccagcugccucuucugaaa

SEQ ID NO: 303371 - RNA, 32 nt, Human
accucuuggauuggcccuggcugcugccacac

SEQ ID NO: 303372 - RNA, 32 nt, Human
accucuuggucuuggucucuucagacacuuuc

SEQ ID NO: 303373 - RNA, 32 nt, Human
accucuuguacagaaguugcccccagguggug

SEQ ID NO: 303374 - RNA, 32 nt, Human
accucuuguauguaccuccaugauauuccucu

SEQ ID NO: 303375 - RNA, 32 nt, Human
accucuuguuacucccuguuauuuuucugccc

SEQ ID NO: 303376 - RNA, 32 nt, Human
accucuuuagaauaugcuuacacgagccacuc

SEQ ID NO: 303377 - RNA, 32 nt, Human
accucuuucuaaagccgcagacccuggugcaa

SEQ ID NO: 303378 - RNA, 19 nt, Human
accucuuugccuccugcug

SEQ ID NO: 303379 - RNA, 32 nt, Human
accucuuuucaucuuguuuucuuccaauaaug

SEQ ID NO: 303380 - RNA, 22 nt, Human
accucuuuuccacacgugggaa

SEQ ID NO: 303381 - RNA, 32 nt, Human
accucuuuucuuccccgcccccugcacauucg

SEQ ID NO: 303382 - RNA, 32 nt, Human
accugaaaaccugaaaaugccacuuucaugca

SEQ ID NO: 303383 - RNA, 32 nt, Human
accugaaaauucaacuuguucaagagaagguc

SEQ ID NO: 303384 - RNA, 32 nt, Human
accugaaacuguuuguucucucccacuagaau

SEQ ID NO: 303385 - RNA, 32 nt, Human
accugaaagagguaugcucucuuaggaauaca

SEQ ID NO: 303386 - RNA, 22 nt, Human
accugaacccaggaggcagagg

SEQ ID NO: 303387 - RNA, 32 nt, Human
accugaacccaggaggcagagguugcagugag

SEQ ID NO: 303388 - RNA, 32 nt, Human
accugaacccccaggcuggaguacaguggcag

SEQ ID NO: 303389 - RNA, 32 nt, Human
accugaaccgagacaaggagguaccacacuau

SEQ ID NO: 303390 - RNA, 32 nt, Human
accugaaccugaccaaugaaaugugacccgug

SEQ ID NO: 303391 - RNA, 32 nt, Human
accugaaccuggugcuguaugugugugaaacu

SEQ ID NO: 303392 - RNA, 32 nt, Human
accugaaccugugggggccuugcccauuugac

SEQ ID NO: 303393 - RNA, 32 nt, Human
accugaacgccgcuccagccuccacggggacc

SEQ ID NO: 303394 - RNA, 32 nt, Human
accugaacucucuggaccucagguuuccaucu

SEQ ID NO: 303395 - RNA, 18 nt, Human
accugaacugaacaccau

SEQ ID NO: 303396 - RNA, 32 nt, Human
accugaacuugcuauuuuaaacaaauaguucu

SEQ ID NO: 303397 - RNA, 32 nt, Human
accugaagaaggaggucgaccuucuucagcac

SEQ ID NO: 303398 - RNA, 32 nt, Human
accugaagacaugcucucacauauagagguac

SEQ ID NO: 303399 - RNA, 32 nt, Human
accugaagagggaggaaguggauuugggguuc

SEQ ID NO: 303400 - RNA, 32 nt, Human
accugaagcacaaguucccauggcugucggag

SEQ ID NO: 303401 - RNA, 32 nt, Human
accugaagccugggcugcgcagugugggaggg

SEQ ID NO: 303402 - RNA, 32 nt, Human
accugaagcugaccaacacuacagagauccca

SEQ ID NO: 303403 - RNA, 32 nt, Human
accugaagcugguuucauggcagccucaaaaa

SEQ ID NO: 303404 - RNA, 32 nt, Human
accugaagcugguuucauggcagccucaaaga

SEQ ID NO: 303405 - RNA, 32 nt, Human
accugaaggaugacauggcccugccugagccc

SEQ ID NO: 303406 - RNA, 32 nt, Human
accugaaggccauccucuuucugcuguguguc

SEQ ID NO: 303407 - RNA, 32 nt, Human
accugaaggcuucaaucauuuggaucaacaac

SEQ ID NO: 303408 - RNA, 32 nt, Human
accugaaggcuugcugggggugcaaugucacc

SEQ ID NO: 303409 - RNA, 32 nt, Human
accugaagucugcagucugccacacagaagac

SEQ ID NO: 303410 - RNA, 32 nt, Human
accugaagugagucuuuggguaggggaagggu

SEQ ID NO: 303411 - RNA, 32 nt, Human
accugaaguugcacagucucaggcugggggcc

SEQ ID NO: 303412 - RNA, 32 nt, Human
accugaauaguuuuaagaguccaguggagccu

SEQ ID NO: 303413 - RNA, 32 nt, Human
accugaaucccaccccucgaccaauccuccac

SEQ ID NO: 303414 - RNA, 32 nt, Human
accugaaucuacacuaguaaucucaagaaaga

SEQ ID NO: 303415 - RNA, 32 nt, Human
accugaaugccaggaaaaauuccugggccaag

SEQ ID NO: 303416 - RNA, 32 nt, Human
accugacaaagaggaggagcuggaggaagcau

SEQ ID NO: 303417 - RNA, 32 nt, Human
accugacacaagaggaauaagaauggagcagu

SEQ ID NO: 303418 - RNA, 32 nt, Human
accugacacccacuccuggggacacaaacacc

SEQ ID NO: 303419 - RNA, 21 nt, Human
accugacaccugcucucccca

SEQ ID NO: 303420 - RNA, 32 nt, Human
accugacaccugcucuccccagccuguuuucu

SEQ ID NO: 303421 - RNA, 32 nt, Human
accugacagagcccuggcuuugaccugcucag

SEQ ID NO: 303422 - RNA, 32 nt, Human
accugacagcaaacacagucacuguugguucc

SEQ ID NO: 303423 - RNA, 32 nt, Human
accugacaggcagcagaggguguggagaccuc

SEQ ID NO: 303424 - RNA, 22 nt, Human
accugacauggcagccucgagg

SEQ ID NO: 303425 - RNA, 32 nt, Human
accugaccaguaaacuguggacuaguagaaag

SEQ ID NO: 303426 - RNA, 32 nt, Human
accugacccaggugcaagagacaggggaagag

SEQ ID NO: 303427 - RNA, 32 nt, Human
accugacccagugcccugcgacacgcccacag

SEQ ID NO: 303428 - RNA, 32 nt, Human
accugacccccaucugccacagggcaggggug

SEQ ID NO: 303429 - RNA, 32 nt, Human
accugaccccuccacucugaaggaggaacagg

SEQ ID NO: 303430 - RNA, 32 nt, Human
accugacccuccugcccgcauacacaacccau

SEQ ID NO: 303431 - RNA, 32 nt, Human
accugacccuugugccucccucccucugccca

SEQ ID NO: 303432 - RNA, 32 nt, Human
accugacgagccuucagaaucuccagaaucuc

SEQ ID NO: 303433 - RNA, 32 nt, Human
accugacuaugcuuucucuccuaggagcuguc

SEQ ID NO: 303434 - RNA, 32 nt, Human
accugacuccccucaaaaccaagcacaucgcu

SEQ ID NO: 303435 - RNA, 32 nt, Human
accugacucccuguaaaggagugcugucuuaa

SEQ ID NO: 303436 - RNA, 32 nt, Human
accugacucugcuucucucauuugucuuccua

SEQ ID NO: 303437 - RNA, 32 nt, Human
accugacucuguccgcucacacagccucaccu

SEQ ID NO: 303438 - RNA, 32 nt, Human
accugacugcacuccagccuggguggcaaagc

SEQ ID NO: 303439 - RNA, 32 nt, Human
accugacugccucuguuaaauuugcacuguua

SEQ ID NO: 303440 - RNA, 32 nt, Human
accugacugccugguucagccucuucgcugac

SEQ ID NO: 303441 - RNA, 32 nt, Human
accugacuggggcagugaaggaagggauggca

SEQ ID NO: 303442 - RNA, 32 nt, Human
accugacugguuuuggagguucuguccacugc

SEQ ID NO: 303443 - RNA, 32 nt, Human
accugacuuggugggagcuccaggcagucacu

SEQ ID NO: 303444 - RNA, 32 nt, Human
accugagaacaguaucauucacuugaggauau

SEQ ID NO: 303445 - RNA, 32 nt, Human
accugagaacauccuguuugugaauucugagu

SEQ ID NO: 303446 - RNA, 32 nt, Human
accugagaaggaagguuucuuuaguacugcca

SEQ ID NO: 303447 - RNA, 32 nt, Human
accugagaaguggagguuguggugagcugaga

SEQ ID NO: 303448 - RNA, 32 nt, Human
accugagacagagagcaaguaagcugucccuu

SEQ ID NO: 303449 - RNA, 32 nt, Human
accugagacuacagaugugcaccaccacacug

SEQ ID NO: 303450 - RNA, 32 nt, Human
accugagagaaaacucaccagggcagaaaaga

SEQ ID NO: 303451 - RNA, 32 nt, Human
accugagagacggagguugcagggagccgaga

SEQ ID NO: 303452 - RNA, 32 nt, Human
accugagagagauguucuagcugagagggccu

SEQ ID NO: 303453 - RNA, 32 nt, Human
accugagaggcagagguuacagugagccaaga

SEQ ID NO: 303454 - RNA, 32 nt, Human
accugagaggcagagguuacagugagcugaga

SEQ ID NO: 303455 - RNA, 32 nt, Human
accugagaggcagagguugcagugagccaaga

SEQ ID NO: 303456 - RNA, 32 nt, Human
accugagaggcagagguugcagugagccgaga

SEQ ID NO: 303457 - RNA, 32 nt, Human
accugagaggcagagguugcagugagccgagg

SEQ ID NO: 303458 - RNA, 32 nt, Human
accugagaggcggagguugcagugagccaaaa

SEQ ID NO: 303459 - RNA, 32 nt, Human
accugagaggcggagguugcagugagccaaga

SEQ ID NO: 303460 - RNA, 32 nt, Human
accugagaggcggagguugcagugagccgaga

SEQ ID NO: 303461 - RNA, 32 nt, Human
accugagaggugagguugcagugagccgagau

SEQ ID NO: 303462 - RNA, 32 nt, Human
accugagagguggagguuacagugaguugaga

SEQ ID NO: 303463 - RNA, 32 nt, Human
accugagagguggagguugcagugagccgaga

SEQ ID NO: 303464 - RNA, 32 nt, Human
accugagagguggagguugcaguugagccaag

SEQ ID NO: 303465 - RNA, 32 nt, Human
accugagagguggagguuucagugagccgaga

SEQ ID NO: 303466 - RNA, 32 nt, Human
accugagauuacaggcacccaccaccaugccc

SEQ ID NO: 303467 - RNA, 32 nt, Human
accugagcaguucuacccucccaaggcaccag

SEQ ID NO: 303468 - RNA, 32 nt, Human
accugagccagugcuuucuggagcucacaccu

SEQ ID NO: 303469 - RNA, 32 nt, Human
accugagcccaagaggucaaggcuucagugag

SEQ ID NO: 303470 - RNA, 23 nt, Human
accugagcccaaggaggucaagg

SEQ ID NO: 303471 - RNA, 32 nt, Human
accugagcccaggaauagggaggcucaacgga

SEQ ID NO: 303472 - RNA, 32 nt, Human
accugagcccaggagcucaagauugcagugag

SEQ ID NO: 303473 - RNA, 32 nt, Human
accugagcccaggaggucaagacugcagugag

SEQ ID NO: 303474 - RNA, 22 nt, Human
accugagcccaggagguggagg

SEQ ID NO: 303475 - RNA, 32 nt, Human
accugagcccaggagguggaggcugcagugag

SEQ ID NO: 303476 - RNA, 32 nt, Human
accugagcccaggagguggagguugcacugag

SEQ ID NO: 303477 - RNA, 32 nt, Human
accugagcccaggaguuugagacuacaguagc

SEQ ID NO: 303478 - RNA, 32 nt, Human
accugagcccaggaguuuggaccagccugggc

SEQ ID NO: 303479 - RNA, 32 nt, Human
accugagcccagggaaguugaggcugcuguga

SEQ ID NO: 303480 - RNA, 32 nt, Human
accugagccccuaaggcagugucuccucagcu

SEQ ID NO: 303481 - RNA, 21 nt, Human
accugagccuaggccaaagcu

SEQ ID NO: 303482 - RNA, 32 nt, Human
accugagccucacugccaccuaggcaggguga

SEQ ID NO: 303483 - RNA, 32 nt, Human
accugagccugggaggucgaggcugcagcgag

SEQ ID NO: 303484 - RNA, 32 nt, Human
accugagccugguaggcugaggcugcagugag

SEQ ID NO: 303485 - RNA, 32 nt, Human
accugagcgagugggugugugugcaaagaugg

SEQ ID NO: 303486 - RNA, 32 nt, Human
accugagcuagaagcuggaggacuagaaccug

SEQ ID NO: 303487 - RNA, 32 nt, Human
accugagcucuggagguggaggcugccaugag

SEQ ID NO: 303488 - RNA, 32 nt, Human
accugagcugacuuuguucuuccuucacaacc

SEQ ID NO: 303489 - RNA, 32 nt, Human
accugagcugggggacacuggcuccugccauc

SEQ ID NO: 303490 - RNA, 32 nt, Human
accugagcuuuucugguucugcugacccucag

SEQ ID NO: 303491 - RNA, 30 nt, Human
accugaggaagccacaguccauggcacucc

SEQ ID NO: 303492 - RNA, 32 nt, Human
accugaggaaggcagaagugaauuuggagaac

SEQ ID NO: 303493 - RNA, 32 nt, Human
accugaggauuucuagccagaggucccagaug

SEQ ID NO: 303494 - RNA, 32 nt, Human
accugaggccaggaguucgagaccagccugcc

SEQ ID NO: 303495 - RNA, 32 nt, Human
accugaggcggagucugcguggagaggggcgg

SEQ ID NO: 303496 - RNA, 31 nt, Human
accugaggcggaucucccauccgggccgcgc

SEQ ID NO: 303497 - RNA, 32 nt, Human
accugaggcugaggcaggagaauugcuugaac

SEQ ID NO: 303498 - RNA, 32 nt, Human
accugaggcugcacaggccagggcucgggcau

SEQ ID NO: 303499 - RNA, 32 nt, Human
accugaggcuguacggcuacagccugggcaac

SEQ ID NO: 303500 - RNA, 32 nt, Human
accugaggcuucuccccucucaacuugcuguu

SEQ ID NO: 303501 - RNA, 32 nt, Human
accugagggacuggacaucccauguucagcaa

SEQ ID NO: 303502 - RNA, 32 nt, Human
accugagggcaagaagaaggggaaguucaaga

SEQ ID NO: 303503 - RNA, 32 nt, Human
accugaggucaggaguucgugacaagaacccu

SEQ ID NO: 303504 - RNA, 32 nt, Human
accugaggucaguucaagaccagccuggccaa

SEQ ID NO: 303505 - RNA, 32 nt, Human
accugaggucccugcuuugaaccagcuuguug

SEQ ID NO: 303506 - RNA, 32 nt, Human
accugagguggcccugaagaugccccgccuua

SEQ ID NO: 303507 - RNA, 32 nt, Human
accugaguagggaagaaaaaccuuguaaaggc

SEQ ID NO: 303508 - RNA, 32 nt, Human
accugagucacuuuauuggguucagucaacac

SEQ ID NO: 303509 - RNA, 32 nt, Human
accugaguccaggaggucgaggcugcagugag

SEQ ID NO: 303510 - RNA, 32 nt, Human
accugagucucagagcaggggaguggcuuccc

SEQ ID NO: 303511 - RNA, 32 nt, Human
accugagugaagacugucauugguaggucaug

SEQ ID NO: 303512 - RNA, 32 nt, Human
accugagugucaucugaggauugccaauuggc

SEQ ID NO: 303513 - RNA, 32 nt, Human
accugaguucagugagagagaaaaugauuuag

SEQ ID NO: 303514 - RNA, 32 nt, Human
accugaguucugcuuccuuggaugucauugcu

SEQ ID NO: 303515 - RNA, 32 nt, Human
accugauacuuuucucuugagaagcaaaccag

SEQ ID NO: 303516 - RNA, 32 nt, Human
accugauagacacauuccucucugccaccuuc

SEQ ID NO: 303517 - RNA, 32 nt, Human
accugauaggauugccugcuuagaugauaaaa

SEQ ID NO: 303518 - RNA, 32 nt, Human
accugaucacccugaagcaacacccacaagca

SEQ ID NO: 303519 - RNA, 32 nt, Human
accugaucugggucuugcacccugggugcagc

SEQ ID NO: 303520 - RNA, 32 nt, Human
accugaugaaagauacaccacagggugagagc

SEQ ID NO: 303521 - RNA, 32 nt, Human
accugaugacccuuucccuuuuuauuaaaccg

SEQ ID NO: 303522 - RNA, 30 nt, Human
accugaugauccagcacaacugcucccgcc

SEQ ID NO: 303523 - RNA, 32 nt, Human
accugaugcgcccuaaacacuccugggccaug

SEQ ID NO: 303524 - RNA, 22 nt, Human
accugaugcgguuccucuccac

SEQ ID NO: 303525 - RNA, 30 nt, Human
accugaugcuggagggcggcagccugagcu

SEQ ID NO: 303526 - RNA, 32 nt, Human
accugaugcuguuugcccaucuguguccuugu

SEQ ID NO: 303527 - RNA, 32 nt, Human
accugaugggguagcuggggugugggguuggg

SEQ ID NO: 303528 - RNA, 32 nt, Human
accugauguaccugaagcagauccuguauuug

SEQ ID NO: 303529 - RNA, 32 nt, Human
accugauguuauuuuccuucuuuuggagggca

SEQ ID NO: 303530 - RNA, 32 nt, Human
accugauucaccuccagcccagggaauggaau

SEQ ID NO: 303531 - RNA, 32 nt, Human
accugauucugaggugaugaaagcagagggau

SEQ ID NO: 303532 - RNA, 32 nt, Human
accugauuggccacuggauccugcugcuuugg

SEQ ID NO: 303533 - RNA, 32 nt, Human
accugauuucagaagagacugauccaaaaauu

SEQ ID NO: 303534 - RNA, 32 nt, Human
accugcaaaauuguaaugcaagcccugacugg

SEQ ID NO: 303535 - RNA, 32 nt, Human
accugcaaacgugaccuuauuuggaaauaggg

SEQ ID NO: 303536 - RNA, 32 nt, Human
accugcaacccagccaagacccagugccuugg

SEQ ID NO: 303537 - RNA, 32 nt, Human
accugcaacucagccaagacccagugccuugg

SEQ ID NO: 303538 - RNA, 32 nt, Human
accugcaacugcuggggagaaccacaagcaca

SEQ ID NO: 303539 - RNA, 32 nt, Human
accugcaaggacugcaggacugcucugugaug

SEQ ID NO: 303540 - RNA, 32 nt, Human
accugcaaguuuugaagucaacaguuugcaga

SEQ ID NO: 303541 - RNA, 32 nt, Human
accugcaaugaguaggccuggcuggucacuuu

SEQ ID NO: 303542 - RNA, 22 nt, Human
accugcacaaggugcuugggaa

SEQ ID NO: 303543 - RNA, 32 nt, Human
accugcacacaagacccccacccaaggaaugu

SEQ ID NO: 303544 - RNA, 32 nt, Human
accugcacacauagcccugccugggguuccug

SEQ ID NO: 303545 - RNA, 32 nt, Human
accugcacaugugggcugggcgcgguggcuca

SEQ ID NO: 303546 - RNA, 32 nt, Human
accugcacccagucacagcagcacagaugugc

SEQ ID NO: 303547 - RNA, 32 nt, Human
accugcaccccucccuucuccaucucgcuugc

SEQ ID NO: 303548 - RNA, 32 nt, Human
accugcacccgagcccuggggcucagccccac

SEQ ID NO: 303549 - RNA, 32 nt, Human
accugcaccggcugcgaggagcagggagcucc

SEQ ID NO: 303550 - RNA, 32 nt, Human
accugcaccucccggguucaagugauucucau

SEQ ID NO: 303551 - RNA, 32 nt, Human
accugcaccuccuggguucaagcaauucucca

SEQ ID NO: 303552 - RNA, 32 nt, Human
accugcacgguuuggagacaggcuucuuuguc

SEQ ID NO: 303553 - RNA, 32 nt, Human
accugcacgucucuucugucauguguucuauu

SEQ ID NO: 303554 - RNA, 32 nt, Human
accugcacuuccugcuggacucaggccuccag

SEQ ID NO: 303555 - RNA, 32 nt, Human
accugcacuucugccucacuuucuugcuggcu

SEQ ID NO: 303556 - RNA, 32 nt, Human
accugcagaacugcacuauaagaaaaguuaag

SEQ ID NO: 303557 - RNA, 32 nt, Human
accugcagaccacccucgcuucugugaagaga

SEQ ID NO: 303558 - RNA, 32 nt, Human
accugcagaccugcacuauaagaaaaguuaag

SEQ ID NO: 303559 - RNA, 32 nt, Human
accugcagagccuuugcccuaggcaacugcag

SEQ ID NO: 303560 - RNA, 18 nt, Human
accugcagaugcccccca

SEQ ID NO: 303561 - RNA, 24 nt, Human
accugcagccaccaugaacagcaa

SEQ ID NO: 303562 - RNA, 32 nt, Human
accugcagccccaacauccauucuuucagcuc

SEQ ID NO: 303563 - RNA, 32 nt, Human
accugcagcuuccgcaccuccugguccgcguu

SEQ ID NO: 303564 - RNA, 32 nt, Human
accugcaggaaggcaucauuguauacuguggu

SEQ ID NO: 303565 - RNA, 32 nt, Human
accugcaggaauaccagagcaagaaacugaug

SEQ ID NO: 303566 - RNA, 32 nt, Human
accugcaggacaguuuuccuggagccauuugg

SEQ ID NO: 303567 - RNA, 20 nt, Human
accugcaggacccucaccca

SEQ ID NO: 303568 - RNA, 32 nt, Human
accugcaggagucgcagcagcucugugggaug

SEQ ID NO: 303569 - RNA, 25 nt, Human
accugcaggaugugcagggcugccu

SEQ ID NO: 303570 - RNA, 32 nt, Human
accugcaggcagcugcuaagccaagagugggu

SEQ ID NO: 303571 - RNA, 32 nt, Human
accugcagggccucuuuagugcagagaaaaac

SEQ ID NO: 303572 - RNA, 32 nt, Human
accugcaguacagcuauccagagagacugggc

SEQ ID NO: 303573 - RNA, 32 nt, Human
accugcagucgccagggauucccuccagguga

SEQ ID NO: 303574 - RNA, 32 nt, Human
accugcagugcuccuucuucacaugccagucu

SEQ ID NO: 303575 - RNA, 32 nt, Human
accugcagugucucugagcuucuggcaaguau

SEQ ID NO: 303576 - RNA, 32 nt, Human
accugcauaagucccuucccuuccuuacuccu

SEQ ID NO: 303577 - RNA, 32 nt, Human
accugcauaggcagugcuuuggccaggaggau

SEQ ID NO: 303578 - RNA, 22 nt, Human
accugcaucauugucaccuuca

SEQ ID NO: 303579 - RNA, 32 nt, Human
accugcaucugcaggcgauggggcaggggcca

SEQ ID NO: 303580 - RNA, 32 nt, Human
accugcaucuuccuccugccacagauggaggc

SEQ ID NO: 303581 - RNA, 32 nt, Human
accugcaucuucucaucaaagccauccaggga

SEQ ID NO: 303582 - RNA, 19 nt, Human
accugcaugauguguuuug

SEQ ID NO: 303583 - RNA, 32 nt, Human
accugcaugcaggcaccagagcagggacugag

SEQ ID NO: 303584 - RNA, 32 nt, Human
accugcauggccaggcagagucagcagcugca

SEQ ID NO: 303585 - RNA, 32 nt, Human
accugcauugcucucccucgugcuccccaaau

SEQ ID NO: 303586 - RNA, 32 nt, Human
accugcauuuuauuugaauuacccgaauagca

SEQ ID NO: 303587 - RNA, 32 nt, Human
accugccaaaugcuauacugugucauggugau

SEQ ID NO: 303588 - RNA, 32 nt, Human
accugccaaucgcggagagaucaaagggucug

SEQ ID NO: 303589 - RNA, 32 nt, Human
accugccacaguugauggugagaagcuccuuu

SEQ ID NO: 303590 - RNA, 32 nt, Human
accugccacccacucugcgagccaaucucagu

SEQ ID NO: 303591 - RNA, 32 nt, Human
accugccacccagggucggggccccgcaccau

SEQ ID NO: 303592 - RNA, 32 nt, Human
accugccaccugcuucccuucucagccaccca

SEQ ID NO: 303593 - RNA, 32 nt, Human
accugccacucaaccaaagaguccucgagccg

SEQ ID NO: 303594 - RNA, 32 nt, Human
accugccacugccgucaccucucccuccucag

SEQ ID NO: 303595 - RNA, 32 nt, Human
accugccagagcaacagagugagaccccuguc

SEQ ID NO: 303596 - RNA, 32 nt, Human
accugccagauggcuuuuacugugucugaauu

SEQ ID NO: 303597 - RNA, 32 nt, Human
accugccagcacuucugcaagcugaaauuuac

SEQ ID NO: 303598 - RNA, 22 nt, Human
accugccaggccaagggucagg

SEQ ID NO: 303599 - RNA, 32 nt, Human
accugccaguggagcugagcacugccuagccu

SEQ ID NO: 303600 - RNA, 32 nt, Human
accugccagugucuugggcauuuccuuggcaa

SEQ ID NO: 303601 - RNA, 32 nt, Human
accugccaucgaggguuccuccccgcacccuc

SEQ ID NO: 303602 - RNA, 32 nt, Human
accugccaugaccaccacccauaccgcccgug

SEQ ID NO: 303603 - RNA, 32 nt, Human
accugccaugcugcucuuccuccucucugcac

SEQ ID NO: 303604 - RNA, 32 nt, Human
accugccaugugugcccugccuuccuggccag

SEQ ID NO: 303605 - RNA, 25 nt, Human
accugccauuucuccacucccuaca

SEQ ID NO: 303606 - RNA, 32 nt, Human
accugccauuuugccuugcaucguuucccucg

SEQ ID NO: 303607 - RNA, 32 nt, Human
accugcccaaagaaagaaaagacugaagggau

SEQ ID NO: 303608 - RNA, 32 nt, Human
accugcccaaccauauaucacccccuaccccu

SEQ ID NO: 303609 - RNA, 32 nt, Human
accugcccaccgucccuguccaugccccgccc

SEQ ID NO: 303610 - RNA, 32 nt, Human
accugcccaccuggcccagugcugccacugcc

SEQ ID NO: 303611 - RNA, 32 nt, Human
accugcccagaggagaggggcaguguucccac

SEQ ID NO: 303612 - RNA, 20 nt, Human
accugcccagccccaccuca

SEQ ID NO: 303613 - RNA, 32 nt, Human
accugcccagcuucacaccucccccgacuuca

SEQ ID NO: 303614 - RNA, 32 nt, Human
accugcccaggcccauucuccaaagaagcugu

SEQ ID NO: 303615 - RNA, 32 nt, Human
accugcccagugagccuccuugacaugcuuau

SEQ ID NO: 303616 - RNA, 32 nt, Human
accugccccagccuggcucuaccugcugugcu

SEQ ID NO: 303617 - RNA, 32 nt, Human
accugccccaggagcuggagacaagaccuugu

SEQ ID NO: 303618 - RNA, 32 nt, Human
accugccccagugcccagaccaaccaaggccc

SEQ ID NO: 303619 - RNA, 20 nt, Human
accugcccccagcccugccc

SEQ ID NO: 303620 - RNA, 32 nt, Human
accugcccccaucucucacucacugcaauugc

SEQ ID NO: 303621 - RNA, 21 nt, Human
accugccccccacucugcaca

SEQ ID NO: 303622 - RNA, 32 nt, Human
accugccccgcccagcugcaccugccagccug

SEQ ID NO: 303623 - RNA, 32 nt, Human
accugccccucaacucuccuccagagucagaa

SEQ ID NO: 303624 - RNA, 27 nt, Human
accugccccucccucuagaggcugccu

SEQ ID NO: 303625 - RNA, 32 nt, Human
accugccccucggcugcaugcccacagccgua

SEQ ID NO: 303626 - RNA, 32 nt, Human
accugccccugccucucagccuccccgggugc

SEQ ID NO: 303627 - RNA, 32 nt, Human
accugccccuuucugcccuccugcuccagccc

SEQ ID NO: 303628 - RNA, 32 nt, Human
accugcccgccacauccucugccugcuguccc

SEQ ID NO: 303629 - RNA, 32 nt, Human
accugcccgcuggucugaguggccuggcccau

SEQ ID NO: 303630 - RNA, 32 nt, Human
accugcccggagacagagggagcagcugaggc

SEQ ID NO: 303631 - RNA, 32 nt, Human
accugcccuccaccaccacccaaaguguggga

SEQ ID NO: 303632 - RNA, 32 nt, Human
accugcccuccagguguacuuuaggccugugg

SEQ ID NO: 303633 - RNA, 21 nt, Human
accugcccucccacucuucca

SEQ ID NO: 303634 - RNA, 32 nt, Human
accugcccuccccuuacucuuguuucuccucc

SEQ ID NO: 303635 - RNA, 32 nt, Human
accugcccugcacccuggggagaggaccaggg

SEQ ID NO: 303636 - RNA, 32 nt, Human
accugcccuuccccagcgcccccaccaccccg

SEQ ID NO: 303637 - RNA, 18 nt, Human
accugccgccgccucauu

SEQ ID NO: 303638 - RNA, 32 nt, Human
accugccgccugcuggggaagucuggagcccc

SEQ ID NO: 303639 - RNA, 32 nt, Human
accugccggcagaguuccccagccuggaggcu

SEQ ID NO: 303640 - RNA, 32 nt, Human
accugccggcuccucuucccacggccacccuc

SEQ ID NO: 303641 - RNA, 19 nt, Human
accugccguggacuugggg

SEQ ID NO: 303642 - RNA, 32 nt, Human
accugccuauaaucccagcuauuugggaggcu

SEQ ID NO: 303643 - RNA, 32 nt, Human
accugccucaccuaauccucacccuugcugcu

SEQ ID NO: 303644 - RNA, 32 nt, Human
accugccuccaccccgucugucauccucaucc

SEQ ID NO: 303645 - RNA, 32 nt, Human
accugccuccacccuuccaggugccacgggag

SEQ ID NO: 303646 - RNA, 32 nt, Human
accugccuccgccucuuccuccagcggcucca

SEQ ID NO: 303647 - RNA, 32 nt, Human
accugccuccgggcgccugggcuucaggauga

SEQ ID NO: 303648 - RNA, 32 nt, Human
accugccucgucucccuggggaggugguccca

SEQ ID NO: 303649 - RNA, 32 nt, Human
accugccucucccaccuccagucuuuccccug

SEQ ID NO: 303650 - RNA, 32 nt, Human
accugccucuggcuucucaggccucugcucuc

SEQ ID NO: 303651 - RNA, 20 nt, Human
accugccucuucccccucca

SEQ ID NO: 303652 - RNA, 32 nt, Human
accugccugcaaaggccauugugucgggcagu

SEQ ID NO: 303653 - RNA, 32 nt, Human
accugccugcauugcugaccacaggccuggcc

SEQ ID NO: 303654 - RNA, 32 nt, Human
accugccugccacccuccucucccacucaggc

SEQ ID NO: 303655 - RNA, 32 nt, Human
accugccugccugcaucacugcacugaauggc

SEQ ID NO: 303656 - RNA, 32 nt, Human
accugccugccuggauugcaccuuucugcccu

SEQ ID NO: 303657 - RNA, 32 nt, Human
accugccugccugguugggccuucagcugucu

SEQ ID NO: 303658 - RNA, 32 nt, Human
accugccugccugucucccuccucugucacca

SEQ ID NO: 303659 - RNA, 32 nt, Human
accugccugcggggagaauggagccaggggag

SEQ ID NO: 303660 - RNA, 32 nt, Human
accugccugcuugcuucucuggcugccugguc

SEQ ID NO: 303661 - RNA, 19 nt, Human
accugccuggccaacaugg

SEQ ID NO: 303662 - RNA, 24 nt, Human
accugccuggccaacauggugaaa

SEQ ID NO: 303663 - RNA, 32 nt, Human
accugccugggcaacauaaugaaacuuccuuu

SEQ ID NO: 303664 - RNA, 32 nt, Human
accugccugggcaacauagugagaccccaucu

SEQ ID NO: 303665 - RNA, 32 nt, Human
accugccugggcagcccucacacccaugcucc

SEQ ID NO: 303666 - RNA, 32 nt, Human
accugccugggucucccugucucuccagccag

SEQ ID NO: 303667 - RNA, 32 nt, Human
accugccugguacauagcuggcauucagaaaa

SEQ ID NO: 303668 - RNA, 32 nt, Human
accugccuguaaucccagcuacuugggaggcu

SEQ ID NO: 303669 - RNA, 32 nt, Human
accugccuguaaucucagcuacucaggaggcu

SEQ ID NO: 303670 - RNA, 32 nt, Human
accugccuguaugacagagugagacccugucu

SEQ ID NO: 303671 - RNA, 32 nt, Human
accugccugugaccuuugcccuguccuggagg

SEQ ID NO: 303672 - RNA, 32 nt, Human
accugccuuacagagcagcccagguacccagg

SEQ ID NO: 303673 - RNA, 32 nt, Human
accugccuuaugcaccuuacugccuagauuuu

SEQ ID NO: 303674 - RNA, 32 nt, Human
accugccuucauuucaaccaccugucuucaua

SEQ ID NO: 303675 - RNA, 19 nt, Human
accugccuuucugccagga

SEQ ID NO: 303676 - RNA, 32 nt, Human
accugccuuuucccaucuccccagcauaaccu

SEQ ID NO: 303677 - RNA, 32 nt, Human
accugcgaggcagagauugcagugagccaaga

SEQ ID NO: 303678 - RNA, 32 nt, Human
accugcgaugacgacgaggaggaacaaguggg

SEQ ID NO: 303679 - RNA, 32 nt, Human
accugcgaugcugaggggaggaagcugcggaa

SEQ ID NO: 303680 - RNA, 32 nt, Human
accugcgaugugagccucaccugagccagagc

SEQ ID NO: 303681 - RNA, 32 nt, Human
accugcgcagcaaggcuggcugugcuggaguc

SEQ ID NO: 303682 - RNA, 32 nt, Human
accugcgccgggccaucaugccgugccggacu

SEQ ID NO: 303683 - RNA, 32 nt, Human
accugcgccuccuggguucaagugauucuucu

SEQ ID NO: 303684 - RNA, 32 nt, Human
accugcggccccggagaaggcagcgagcgcag

SEQ ID NO: 303685 - RNA, 32 nt, Human
accugcggccuccccugccuuuucuccggugg

SEQ ID NO: 303686 - RNA, 32 nt, Human
accugcgggcaggcgccgggaggccgagccag

SEQ ID NO: 303687 - RNA, 32 nt, Human
accugcgggccugggaagcauugcucagggug

SEQ ID NO: 303688 - RNA, 32 nt, Human
accugcggucggagugggagggccagucugca

SEQ ID NO: 303689 - RNA, 32 nt, Human
accugcguccucugaccugagagcgaagggga

SEQ ID NO: 303690 - RNA, 32 nt, Human
accugcgucuaccuuccaucuguguccagcgg

SEQ ID NO: 303691 - RNA, 32 nt, Human
accugcguuuucauuuguuugacauuugucua

SEQ ID NO: 303692 - RNA, 32 nt, Human
accugcguuuuucugccacagcauccaaucgu

SEQ ID NO: 303693 - RNA, 32 nt, Human
accugcuaacuuggagcuucagagccauggca

SEQ ID NO: 303694 - RNA, 32 nt, Human
accugcuacuuaccaggcccaggcuggggugg

SEQ ID NO: 303695 - RNA, 32 nt, Human
accugcuaggggcugggcaaggccccggcucu

SEQ ID NO: 303696 - RNA, 32 nt, Human
accugcuaguggggaggccacacccacaagcg

SEQ ID NO: 303697 - RNA, 32 nt, Human
accugcucacacaccuuguucaacuuuucagc

SEQ ID NO: 303698 - RNA, 32 nt, Human
accugcucacccagcccugauguaauuaaaaa

SEQ ID NO: 303699 - RNA, 32 nt, Human
accugcucacuggcuggguauucuucguaaaa

SEQ ID NO: 303700 - RNA, 32 nt, Human
accugcucagaaucaugcaggucuccacugcu

SEQ ID NO: 303701 - RNA, 32 nt, Human
accugcucagagcagagccucuaccuccccug

SEQ ID NO: 303702 - RNA, 32 nt, Human
accugcucaucucugcccugaggucaccccgu

SEQ ID NO: 303703 - RNA, 32 nt, Human
accugcucauggccagucuggacugggaaagc

SEQ ID NO: 303704 - RNA, 32 nt, Human
accugcucauuuccauuagaaccuucaagcag

SEQ ID NO: 303705 - RNA, 17 nt, Human
accugcuccaccccuuc

SEQ ID NO: 303706 - RNA, 32 nt, Human
accugcuccaggggucaaggacuugccuugcc

SEQ ID NO: 303707 - RNA, 32 nt, Human
accugcucccaaauggcaaggauuuuugcuac

SEQ ID NO: 303708 - RNA, 32 nt, Human
accugcucccaaucaugcaggucuccacugcu

SEQ ID NO: 303709 - RNA, 32 nt, Human
accugcucccuagugggcucuccuccccagga

SEQ ID NO: 303710 - RNA, 18 nt, Human
accugcucccugcugcug

SEQ ID NO: 303711 - RNA, 32 nt, Human
accugcuccuccauuuccauuuauucucaaca

SEQ ID NO: 303712 - RNA, 32 nt, Human
accugcuccugacuucucagggcuggcaguca

SEQ ID NO: 303713 - RNA, 23 nt, Human
accugcucggaauuaaaggcuuc

SEQ ID NO: 303714 - RNA, 32 nt, Human
accugcucucaaggacucugccuuggaggggg

SEQ ID NO: 303715 - RNA, 32 nt, Human
accugcucucauaaccgugccugcuccuccug

SEQ ID NO: 303716 - RNA, 32 nt, Human
accugcucugcagcugcuauaaauagccuccc

SEQ ID NO: 303717 - RNA, 32 nt, Human
accugcucugugcugggaaccugcucugugcc

SEQ ID NO: 303718 - RNA, 32 nt, Human
accugcugaaccuugguguccauguccuggag

SEQ ID NO: 303719 - RNA, 22 nt, Human
accugcugacccuggccuuggc

SEQ ID NO: 303720 - RNA, 32 nt, Human
accugcugagagucccucccacucccacucac

SEQ ID NO: 303721 - RNA, 32 nt, Human
accugcugaguccucagguuguuuggccucuc

SEQ ID NO: 303722 - RNA, 32 nt, Human
accugcugaugguggagaaugagcgacugagg

SEQ ID NO: 303723 - RNA, 32 nt, Human
accugcugcacuguaagcccagggauguggca

SEQ ID NO: 303724 - RNA, 32 nt, Human
accugcugcauccugugcuccgcaggcugggc

SEQ ID NO: 303725 - RNA, 32 nt, Human
accugcugcucaccuucauccucuuuuucugg

SEQ ID NO: 303726 - RNA, 32 nt, Human
accugcugcuccagacaagcacaaagcaaucu

SEQ ID NO: 303727 - RNA, 32 nt, Human
accugcugcuccugaacaacaggccucaugcc

SEQ ID NO: 303728 - RNA, 32 nt, Human
accugcugcucugagccugugcaccuggggug

SEQ ID NO: 303729 - RNA, 32 nt, Human
accugcugcugcacucccugcagcuggucagc

SEQ ID NO: 303730 - RNA, 32 nt, Human
accugcugcuuccacgugagucagggaugguc

SEQ ID NO: 303731 - RNA, 32 nt, Human
accugcugcuucugugacccccacagcccaga

SEQ ID NO: 303732 - RNA, 32 nt, Human
accugcuggaaagaccugggcagaaauggaga

SEQ ID NO: 303733 - RNA, 32 nt, Human
accugcuggaagcugccagcugcccggcuggc

SEQ ID NO: 303734 - RNA, 23 nt, Human
accugcuggccaugcaagcugac

SEQ ID NO: 303735 - RNA, 32 nt, Human
accugcuggcgccccagcacagccuggccaag

SEQ ID NO: 303736 - RNA, 32 nt, Human
accugcugggaaaauuuaggguagagcacucu

SEQ ID NO: 303737 - RNA, 32 nt, Human
accugcugggcccugagcuggcauugccccug

SEQ ID NO: 303738 - RNA, 32 nt, Human
accugcugggcggacgugggccuagguggucc

SEQ ID NO: 303739 - RNA, 25 nt, Human
accugcuguaguuagauaugggcuu

SEQ ID NO: 303740 - RNA, 32 nt, Human
accugcuguauggaaacuacuuucacuuaugg

SEQ ID NO: 303741 - RNA, 32 nt, Human
accugcugucuuagggaagaaaugguucaaau

SEQ ID NO: 303742 - RNA, 32 nt, Human
accugcugugaccugggagcagcuuccccugg

SEQ ID NO: 303743 - RNA, 32 nt, Human
accugcuguggacuguuuucuuugccuaguga

SEQ ID NO: 303744 - RNA, 32 nt, Human
accugcuguggagccuuaagaggagaauaaau

SEQ ID NO: 303745 - RNA, 32 nt, Human
accugcuguggagggugcccagcagacguggu

SEQ ID NO: 303746 - RNA, 32 nt, Human
accugcuguuguugccaaccagucucccaaag

SEQ ID NO: 303747 - RNA, 32 nt, Human
accugcuucaaaagccugaauaaugggaaaau

SEQ ID NO: 303748 - RNA, 32 nt, Human
accugcuucagaagauagacauggacagcaag

SEQ ID NO: 303749 - RNA, 23 nt, Human
accugcuuccagcggagccgccu

SEQ ID NO: 303750 - RNA, 32 nt, Human
accugcuucuagcuucacuuuugggccagauu

SEQ ID NO: 303751 - RNA, 32 nt, Human
accugcuucuccuucuccuuuuucucugauuu

SEQ ID NO: 303752 - RNA, 22 nt, Human
accugcuucugagagggcugcc

SEQ ID NO: 303753 - RNA, 23 nt, Human
accugcuucugucacagcacuga

SEQ ID NO: 303754 - RNA, 32 nt, Human
accugcuugagcuuucugugcaugugcagguc

SEQ ID NO: 303755 - RNA, 32 nt, Human
accugcuuggcccuggcccagcucccugcccu

SEQ ID NO: 303756 - RNA, 32 nt, Human
accugcuuggugguuagaaggaggcuagaaga

SEQ ID NO: 303757 - RNA, 19 nt, Human
accugcuugugaggccgcc

SEQ ID NO: 303758 - RNA, 19 nt, Human
accugcuuucaccagacug

SEQ ID NO: 303759 - RNA, 21 nt, Human
accugcuuucauuuuagacug

SEQ ID NO: 303760 - RNA, 21 nt, Human
accugcuuucugaggcuucug

SEQ ID NO: 303761 - RNA, 23 nt, Human
accugcuuucugcaaacaacuga

SEQ ID NO: 303762 - RNA, 32 nt, Human
accuggaaacaucuggaacauccugggauaua

SEQ ID NO: 303763 - RNA, 32 nt, Human
accuggaaacuaagcucagaggcaagguaaua

SEQ ID NO: 303764 - RNA, 16 nt, Human
accuggaaacuaccau

SEQ ID NO: 303765 - RNA, 32 nt, Human
accuggaacgcggagguugcaaugagccgaga

SEQ ID NO: 303766 - RNA, 32 nt, Human
accuggaacugauucguguacagugacagaga

SEQ ID NO: 303767 - RNA, 22 nt, Human
accuggaacugugcaccuggca

SEQ ID NO: 303768 - RNA, 21 nt, Human
accuggaagacuacugaauca

SEQ ID NO: 303769 - RNA, 32 nt, Human
accuggaagacuuggcuuuacguacucccaau

SEQ ID NO: 303770 - RNA, 32 nt, Human
accuggaagcagcagcaggugccugaacucgu

SEQ ID NO: 303771 - RNA, 32 nt, Human
accuggaagcucuuucuauuacacucaggcug

SEQ ID NO: 303772 - RNA, 32 nt, Human
accuggaaggaagagguugcagugagccaaga

SEQ ID NO: 303773 - RNA, 32 nt, Human
accuggaaggaucggguaaagauacagagaag

SEQ ID NO: 303774 - RNA, 32 nt, Human
accuggaaggcagaaguugcagugagcugaga

SEQ ID NO: 303775 - RNA, 32 nt, Human
accuggaaggcagagauugcagugagcugaga

SEQ ID NO: 303776 - RNA, 32 nt, Human
accuggaaggcagggguugcagugaccugaga

SEQ ID NO: 303777 - RNA, 32 nt, Human
accuggaaggcggagcuugcagugagcugaga

SEQ ID NO: 303778 - RNA, 32 nt, Human
accuggaaggcggagguugcagugagcagaga

SEQ ID NO: 303779 - RNA, 32 nt, Human
accuggaaggcggagguugcagugagccaaga

SEQ ID NO: 303780 - RNA, 32 nt, Human
accuggaaggcggagguugcagugagccgaga

SEQ ID NO: 303781 - RNA, 32 nt, Human
accuggaaggucggacagggacagcagagaag

SEQ ID NO: 303782 - RNA, 32 nt, Human
accuggaaggugaaggugaaggugagacccug

SEQ ID NO: 303783 - RNA, 32 nt, Human
accuggaagguggagcuugcagugagcugaga

SEQ ID NO: 303784 - RNA, 32 nt, Human
accuggaauacagagguuucagugagcugaga

SEQ ID NO: 303785 - RNA, 32 nt, Human
accuggaccagcugcucagcugucugaagacc

SEQ ID NO: 303786 - RNA, 32 nt, Human
accuggaccaggaaccgagccugcucuaugcg

SEQ ID NO: 303787 - RNA, 32 nt, Human
accuggacccacauuugcuccaauccacauuc

SEQ ID NO: 303788 - RNA, 32 nt, Human
accuggaccuccugggcucaagcaauccucuc

SEQ ID NO: 303789 - RNA, 32 nt, Human
accuggacggggacggaacccaggugggggca

SEQ ID NO: 303790 - RNA, 32 nt, Human
accuggacucaagugauucuccugccucagcc

SEQ ID NO: 303791 - RNA, 32 nt, Human
accuggacuguggugggcuccgacugagccgc

SEQ ID NO: 303792 - RNA, 32 nt, Human
accuggagaacagcaagaucuaggcaccagcc

SEQ ID NO: 303793 - RNA, 32 nt, Human
accuggagaagaaaccaccagaccaugaggcc

SEQ ID NO: 303794 - RNA, 32 nt, Human
accuggagacagucccuccacugugaacaagc

SEQ ID NO: 303795 - RNA, 32 nt, Human
accuggagaggguuagaaagaaccaacagcug

SEQ ID NO: 303796 - RNA, 32 nt, Human
accuggagaugggggccagguugugcagacuu

SEQ ID NO: 303797 - RNA, 32 nt, Human
accuggagcaaugcacuguaccugccucacuc

SEQ ID NO: 303798 - RNA, 24 nt, Human
accuggagcccaucggggcugccu

SEQ ID NO: 303799 - RNA, 32 nt, Human
accuggagcccccgcagucucuccucaggggu

SEQ ID NO: 303800 - RNA, 32 nt, Human
accuggagcccgaggaggugcucaaguacagc

SEQ ID NO: 303801 - RNA, 32 nt, Human
accuggagcggucagagcaggauggccagaga

SEQ ID NO: 303802 - RNA, 23 nt, Human
accuggaggacacgcugcugcag

SEQ ID NO: 303803 - RNA, 32 nt, Human
accuggaggagagugcuggugaauggcaggug

SEQ ID NO: 303804 - RNA, 32 nt, Human
accuggaggagguggugcaggaggcugccggc

SEQ ID NO: 303805 - RNA, 32 nt, Human
accuggaggcagagauugcagugagccgagau

SEQ ID NO: 303806 - RNA, 32 nt, Human
accuggaggcagagguugcagugagucgaggu

SEQ ID NO: 303807 - RNA, 32 nt, Human
accuggagggucagguaacuugccaaacuaaa

SEQ ID NO: 303808 - RNA, 32 nt, Human
accuggaggucugaaaagaggagccagagaag

SEQ ID NO: 303809 - RNA, 32 nt, Human
accuggagguggagguugcagugagccgaggu

SEQ ID NO: 303810 - RNA, 32 nt, Human
accuggaggugggagggcaggagcgucgucuu

SEQ ID NO: 303811 - RNA, 32 nt, Human
accuggaguauuuccccuucugccuuuacagc

SEQ ID NO: 303812 - RNA, 32 nt, Human
accuggaguggggagagcagccuccacggcca

SEQ ID NO: 303813 - RNA, 24 nt, Human
accuggaguuucaaaacaugugaa

SEQ ID NO: 303814 - RNA, 32 nt, Human
accuggaugagaagaauaaaugacacggauac

SEQ ID NO: 303815 - RNA, 32 nt, Human
accuggaugaggaagaugaagaggugcuggaa

SEQ ID NO: 303816 - RNA, 32 nt, Human
accuggaugaucacuaauacuaauucauuuau

SEQ ID NO: 303817 - RNA, 32 nt, Human
accuggaugauucaggagaguguauaugaaug

SEQ ID NO: 303818 - RNA, 22 nt, Human
accuggaugcgcugggcacagg

SEQ ID NO: 303819 - RNA, 32 nt, Human
accuggauggcauggcgccugccaccaaacau

SEQ ID NO: 303820 - RNA, 32 nt, Human
accuggauucugaguuuuucagucuagcccag

SEQ ID NO: 303821 - RNA, 32 nt, Human
accuggauucugugccuaccugcuccaucuaa

SEQ ID NO: 303822 - RNA, 32 nt, Human
accuggcaaaccugccgcaugcugcacacauc

SEQ ID NO: 303823 - RNA, 32 nt, Human
accuggcaacaucacgauuuaagcuaagguug

SEQ ID NO: 303824 - RNA, 32 nt, Human
accuggcaagugguuaucaggauucagugacg

SEQ ID NO: 303825 - RNA, 32 nt, Human
accuggcaaguguagguugcagugagcugaga

SEQ ID NO: 303826 - RNA, 32 nt, Human
accuggcacauucauuuucucaguugaagaag

SEQ ID NO: 303827 - RNA, 32 nt, Human
accuggcacuccuccaagcuuggcacagugag

SEQ ID NO: 303828 - RNA, 32 nt, Human
accuggcagagacaaucgccacccuagaauuc

SEQ ID NO: 303829 - RNA, 32 nt, Human
accuggcagcuauagaauacacuaugugcauu

SEQ ID NO: 303830 - RNA, 32 nt, Human
accuggcaggaggcgggugugugaauagcaua

SEQ ID NO: 303831 - RNA, 32 nt, Human
accuggcaggcagagguugcagugagccaaga

SEQ ID NO: 303832 - RNA, 32 nt, Human
accuggcaggcagaguuugcagugaaccaaga

SEQ ID NO: 303833 - RNA, 32 nt, Human
accuggcaggcggagguugcagugagccgaga

SEQ ID NO: 303834 - RNA, 32 nt, Human
accuggcaggguggccagagaggcuuggacaa

SEQ ID NO: 303835 - RNA, 32 nt, Human
accuggcagguggagguuacagugagccaaga

SEQ ID NO: 303836 - RNA, 32 nt, Human
accuggcagguggagguugcagugaguggaga

SEQ ID NO: 303837 - RNA, 32 nt, Human
accuggcaguggagggaggcugugcugugugu

SEQ ID NO: 303838 - RNA, 32 nt, Human
accuggcaguuggcugcagggccaggucuagg

SEQ ID NO: 303839 - RNA, 32 nt, Human
accuggcaucuucugcccuguucaucuacgga

SEQ ID NO: 303840 - RNA, 19 nt, Human
accuggccaaccugagcca

SEQ ID NO: 303841 - RNA, 32 nt, Human
accuggccaaccugagccaccucuuccuccac

SEQ ID NO: 303842 - RNA, 19 nt, Human
accuggccacccugcagca

SEQ ID NO: 303843 - RNA, 32 nt, Human
accuggccagacucucccuccuguccuguaca

SEQ ID NO: 303844 - RNA, 32 nt, Human
accuggccagcuuccccaagaugugcuccagc

SEQ ID NO: 303845 - RNA, 32 nt, Human
accuggccaugaggacagagcugguaguagag

SEQ ID NO: 303846 - RNA, 19 nt, Human
accuggccaugcuguacca

SEQ ID NO: 303847 - RNA, 32 nt, Human
accuggccccagguggggguuguagugagagc

SEQ ID NO: 303848 - RNA, 32 nt, Human
accuggcccuuccagccccagccuuuggagcg

SEQ ID NO: 303849 - RNA, 32 nt, Human
accuggccgagcuugaggccacaugugaaggg

SEQ ID NO: 303850 - RNA, 21 nt, Human
accuggccgccagccccuuca

SEQ ID NO: 303851 - RNA, 32 nt, Human
accuggccuagugacagagccaggauucaaag

SEQ ID NO: 303852 - RNA, 32 nt, Human
accuggccucacugccagcccaccuccccuac

SEQ ID NO: 303853 - RNA, 32 nt, Human
accuggccuccaggagucgcuguguugggaga

SEQ ID NO: 303854 - RNA, 32 nt, Human
accuggccuccucucgccuggccgccagcccc

SEQ ID NO: 303855 - RNA, 32 nt, Human
accuggccucugcaccugaggguagaaaguca

SEQ ID NO: 303856 - RNA, 32 nt, Human
accuggccugagccuccugaaguugcugcugu

SEQ ID NO: 303857 - RNA, 32 nt, Human
accuggccugcucuucccauguuggccucugc

SEQ ID NO: 303858 - RNA, 32 nt, Human
accuggccugggaaaguacuugccucauguug

SEQ ID NO: 303859 - RNA, 32 nt, Human
accuggccugggaagcaccgucugcccgggcc

SEQ ID NO: 303860 - RNA, 32 nt, Human
accuggccugggagacccaucuggucccugcg

SEQ ID NO: 303861 - RNA, 32 nt, Human
accuggccugggauccuuuccccaaacgcacc

SEQ ID NO: 303862 - RNA, 32 nt, Human
accuggcgaccacccgcccugccuggugcauu

SEQ ID NO: 303863 - RNA, 20 nt, Human
accuggcgcccacuggacca

SEQ ID NO: 303864 - RNA, 32 nt, Human
accuggcuaaggauuuuucuagaaacuguccu

SEQ ID NO: 303865 - RNA, 32 nt, Human
accuggcuacagaccaggacguggcuuguguu

SEQ ID NO: 303866 - RNA, 19 nt, Human
accuggcuacccccuucca

SEQ ID NO: 303867 - RNA, 32 nt, Human
accuggcuacccuuucaguuuuaagccauaau

SEQ ID NO: 303868 - RNA, 32 nt, Human
accuggcuacuguucagcaaguuuacaaagug

SEQ ID NO: 303869 - RNA, 32 nt, Human
accuggcucaauccuccuccaccaccaggggc

SEQ ID NO: 303870 - RNA, 18 nt, Human
accuggcucccggcaacc

SEQ ID NO: 303871 - RNA, 32 nt, Human
accuggcucccggcaaccucaggugccuuccu

SEQ ID NO: 303872 - RNA, 32 nt, Human
accuggcuccgugcucaacccccagcccaccc

SEQ ID NO: 303873 - RNA, 20 nt, Human
accuggcuccugugaaacca

SEQ ID NO: 303874 - RNA, 32 nt, Human
accuggcucgggggauccagguugcagaugaa

SEQ ID NO: 303875 - RNA, 32 nt, Human
accuggcucggggugggagugcagaggcaacc

SEQ ID NO: 303876 - RNA, 32 nt, Human
accuggcucuggcccaggcuagagugcagugg

SEQ ID NO: 303877 - RNA, 21 nt, Human
accuggcucugggccaagcca

SEQ ID NO: 303878 - RNA, 21 nt, Human
accuggcucuguggcgagcca

SEQ ID NO: 303879 - RNA, 32 nt, Human
accuggcugagcugcccaggauucuggcugac

SEQ ID NO: 303880 - RNA, 32 nt, Human
accuggcugccuggagaugguugcugccauug

SEQ ID NO: 303881 - RNA, 32 nt, Human
accuggcugcugucuuaacucguagucugggc

SEQ ID NO: 303882 - RNA, 32 nt, Human
accuggcugggagcugggccaucgcgaugucg

SEQ ID NO: 303883 - RNA, 21 nt, Human
accuggcuguccccagcaccu

SEQ ID NO: 303884 - RNA, 29 nt, Human
accuggcugucuuuaucauccccacaaac

SEQ ID NO: 303885 - RNA, 32 nt, Human
accuggcuguguucccagcugagggagggcug

SEQ ID NO: 303886 - RNA, 18 nt, Human
accuggcuucccaggacc

SEQ ID NO: 303887 - RNA, 21 nt, Human
accuggcuucccugaauccca

SEQ ID NO: 303888 - RNA, 32 nt, Human
accuggcuuccgggagcuucauagaccgauug

SEQ ID NO: 303889 - RNA, 19 nt, Human
accuggcuuccguggacca

SEQ ID NO: 303890 - RNA, 32 nt, Human
accuggcuugccacccacagugcaccacaggc

SEQ ID NO: 303891 - RNA, 32 nt, Human
accuggcuuucaccuccacaguccuuaagagc

SEQ ID NO: 303892 - RNA, 32 nt, Human
accuggcuuugcuuagcuuguugaagaaagua

SEQ ID NO: 303893 - RNA, 32 nt, Human
accuggcuuuucccaucuccccagcauaacca

SEQ ID NO: 303894 - RNA, 32 nt, Human
accugggaacccggggaggggccuggaggaga

SEQ ID NO: 303895 - RNA, 32 nt, Human
accugggaaccuaauuccccagaagcuaaaaa

SEQ ID NO: 303896 - RNA, 32 nt, Human
accugggaagcagaggcuacagugagccaaga

SEQ ID NO: 303897 - RNA, 32 nt, Human
accugggaagcagagguugcagugagccgaga

SEQ ID NO: 303898 - RNA, 32 nt, Human
accugggaagcagaguuugcagugagccaaga

SEQ ID NO: 303899 - RNA, 32 nt, Human
accugggaagccgaaguagcagugagccgaga

SEQ ID NO: 303900 - RNA, 32 nt, Human
accugggaagcgcagguugcagugagcugaga

SEQ ID NO: 303901 - RNA, 32 nt, Human
accugggaagcggagcucgcagugagccgaga

SEQ ID NO: 303902 - RNA, 32 nt, Human
accugggaagucgaggcugcaagugagcugag

SEQ ID NO: 303903 - RNA, 32 nt, Human
accugggaagugcagguugcagugagccaaga

SEQ ID NO: 303904 - RNA, 32 nt, Human
accugggaaguggaagcugcagugagccgaga

SEQ ID NO: 303905 - RNA, 32 nt, Human
accugggaaguggaggcugcagugagcccaga

SEQ ID NO: 303906 - RNA, 32 nt, Human
accugggaaguggaggcugcagugagccgaga

SEQ ID NO: 303907 - RNA, 32 nt, Human
accugggaaucggagguugcagggccaagauc

SEQ ID NO: 303908 - RNA, 32 nt, Human
accugggacaagguguuagaugaauuugaaca

SEQ ID NO: 303909 - RNA, 32 nt, Human
accugggacggcagugaggaugagcaccucua

SEQ ID NO: 303910 - RNA, 32 nt, Human
accugggacuacaggcacgcaccaccaugccu

SEQ ID NO: 303911 - RNA, 32 nt, Human
accugggacuacaggcacucgccaccaugccc

SEQ ID NO: 303912 - RNA, 32 nt, Human
accugggacuacaggugcaugccauuaugcca

SEQ ID NO: 303913 - RNA, 32 nt, Human
accugggacuacaggugcgugccaccacaccc

SEQ ID NO: 303914 - RNA, 32 nt, Human
accugggacuacaggugugcaccaccacacca

SEQ ID NO: 303915 - RNA, 32 nt, Human
accugggacuauaugugcgcaccaccacgccu

SEQ ID NO: 303916 - RNA, 32 nt, Human
accugggacucaauaauacacuugggaauauu

SEQ ID NO: 303917 - RNA, 32 nt, Human
accugggacucugcccaugugcuuuugccugu

SEQ ID NO: 303918 - RNA, 32 nt, Human
accugggagacagaaguuugcagugauccgag

SEQ ID NO: 303919 - RNA, 32 nt, Human
accugggagacagagguugcaaugaaccgaga

SEQ ID NO: 303920 - RNA, 32 nt, Human
accugggagacagagguugcagugagccaaga

SEQ ID NO: 303921 - RNA, 32 nt, Human
accugggagacggagcuugcagugagcugaga

SEQ ID NO: 303922 - RNA, 32 nt, Human
accugggagacggagguugcagugagccaaga

SEQ ID NO: 303923 - RNA, 32 nt, Human
accugggagacggagguugcagugagccauga

SEQ ID NO: 303924 - RNA, 32 nt, Human
accugggagagggauagaggagggagagccag

SEQ ID NO: 303925 - RNA, 32 nt, Human
accugggagagggugagguucagcacaucaca

SEQ ID NO: 303926 - RNA, 32 nt, Human
accugggagauggagauugcagugagcagaga

SEQ ID NO: 303927 - RNA, 32 nt, Human
accugggagauggagguugcagagagccaaga

SEQ ID NO: 303928 - RNA, 32 nt, Human
accugggagauggagguugcagugagccgaga

SEQ ID NO: 303929 - RNA, 32 nt, Human
accugggagcaggagguugcagugagccgagg

SEQ ID NO: 303930 - RNA, 32 nt, Human
accugggagcccccuggcuugcacugaacccu

SEQ ID NO: 303931 - RNA, 32 nt, Human
accugggagccggaggcugcagugagccaaga

SEQ ID NO: 303932 - RNA, 32 nt, Human
accugggagccugagguugcagugagccaaga

SEQ ID NO: 303933 - RNA, 32 nt, Human
accugggaggagaagguugcagugagcugaga

SEQ ID NO: 303934 - RNA, 32 nt, Human
accugggaggaggagguugcagugagcugaga

SEQ ID NO: 303935 - RNA, 32 nt, Human
accugggaggcaaagguugcagugagcugaga

SEQ ID NO: 303936 - RNA, 32 nt, Human
accugggaggcagaaguugcagugaaacaagu

SEQ ID NO: 303937 - RNA, 32 nt, Human
accugggaggcagaaguugcagugagccgaga

SEQ ID NO: 303938 - RNA, 32 nt, Human
accugggaggcagaaguugcagugagcugaga

SEQ ID NO: 303939 - RNA, 32 nt, Human
accugggaggcagaaguuguggugagccgaga

SEQ ID NO: 303940 - RNA, 32 nt, Human
accugggaggcagagauugcagugagccaaga

SEQ ID NO: 303941 - RNA, 32 nt, Human
accugggaggcagagauugcagugagccgaga

SEQ ID NO: 303942 - RNA, 32 nt, Human
accugggaggcagagauugcagugagcugaga

SEQ ID NO: 303943 - RNA, 32 nt, Human
accugggaggcagagcuugcaguaagccgaga

SEQ ID NO: 303944 - RNA, 32 nt, Human
accugggaggcagagcuugcagugagccaaga

SEQ ID NO: 303945 - RNA, 32 nt, Human
accugggaggcagagcuugcagugagccgaga

SEQ ID NO: 303946 - RNA, 32 nt, Human
accugggaggcagagcuugcagugagccuaga

SEQ ID NO: 303947 - RNA, 32 nt, Human
accugggaggcagagcuugcagugagcugaga

SEQ ID NO: 303948 - RNA, 32 nt, Human
accugggaggcagagcuugcagugaguggaga

SEQ ID NO: 303949 - RNA, 32 nt, Human
accugggaggcagagcuugcagugauuggaga

SEQ ID NO: 303950 - RNA, 32 nt, Human
accugggaggcagagggugcaguaagcugaga

SEQ ID NO: 303951 - RNA, 32 nt, Human
accugggaggcagaggugagcugagaucgcgu

SEQ ID NO: 303952 - RNA, 32 nt, Human
accugggaggcagagguuacaaugagccgaga

SEQ ID NO: 303953 - RNA, 32 nt, Human
accugggaggcagagguuacagugagccgaga

SEQ ID NO: 303954 - RNA, 32 nt, Human
accugggaggcagagguugcaaugagccaaga

SEQ ID NO: 303955 - RNA, 32 nt, Human
accugggaggcagagguugcaaugagcugaga

SEQ ID NO: 303956 - RNA, 32 nt, Human
accugggaggcagagguugcagggaaccuaga

SEQ ID NO: 303957 - RNA, 32 nt, Human
accugggaggcagagguugcaguaagccaaga

SEQ ID NO: 303958 - RNA, 32 nt, Human
accugggaggcagagguugcaguaagcuaaga

SEQ ID NO: 303959 - RNA, 32 nt, Human
accugggaggcagagguugcaguaagcugaga

SEQ ID NO: 303960 - RNA, 32 nt, Human
accugggaggcagagguugcagugaacagaga

SEQ ID NO: 303961 - RNA, 32 nt, Human
accugggaggcagagguugcagugaaccaaga

SEQ ID NO: 303962 - RNA, 32 nt, Human
accugggaggcagagguugcagugaaccuaga

SEQ ID NO: 303963 - RNA, 32 nt, Human
accugggaggcagagguugcagugaacugaua

SEQ ID NO: 303964 - RNA, 32 nt, Human
accugggaggcagagguugcagugagccaaga

SEQ ID NO: 303965 - RNA, 32 nt, Human
accugggaggcagagguugcagugagccaaua

SEQ ID NO: 303966 - RNA, 32 nt, Human
accugggaggcagagguugcagugagccgaga

SEQ ID NO: 303967 - RNA, 32 nt, Human
accugggaggcagagguugcagugagccgaua

SEQ ID NO: 303968 - RNA, 32 nt, Human
accugggaggcagagguugcagugagcuaaga

SEQ ID NO: 303969 - RNA, 32 nt, Human
accugggaggcagagguugcagugagcucaga

SEQ ID NO: 303970 - RNA, 32 nt, Human
accugggaggcagagguugcagugagcugaga

SEQ ID NO: 303971 - RNA, 32 nt, Human
accugggaggcagagguugcagugaggugaca

SEQ ID NO: 303972 - RNA, 32 nt, Human
accugggaggcagagguugcagugauccaaga

SEQ ID NO: 303973 - RNA, 32 nt, Human
accugggaggcagagguugcagugauccgaga

SEQ ID NO: 303974 - RNA, 32 nt, Human
accugggaggcagagguugccgugagcugaga

SEQ ID NO: 303975 - RNA, 32 nt, Human
accugggaggcagagguugcgguaagccgaga

SEQ ID NO: 303976 - RNA, 32 nt, Human
accugggaggcagagguuguagcgagccaaga

SEQ ID NO: 303977 - RNA, 32 nt, Human
accugggaggcagagguuguagugagcugaga

SEQ ID NO: 303978 - RNA, 32 nt, Human
accugggaggcagagguuguggugagccaaca

SEQ ID NO: 303979 - RNA, 32 nt, Human
accugggaggcagagguuguggugagcuaaga

SEQ ID NO: 303980 - RNA, 32 nt, Human
accugggaggcagagguuguggugagcugaga

SEQ ID NO: 303981 - RNA, 32 nt, Human
accugggaggcagagguuucagugagccaaga

SEQ ID NO: 303982 - RNA, 32 nt, Human
accugggaggcagagguuucagugagcccaga

SEQ ID NO: 303983 - RNA, 32 nt, Human
accugggaggcagagucugcagugagccgaga

SEQ ID NO: 303984 - RNA, 32 nt, Human
accugggaggcagaguuuacagugagccgaga

SEQ ID NO: 303985 - RNA, 32 nt, Human
accugggaggcagaguuugcagugagccgaga

SEQ ID NO: 303986 - RNA, 32 nt, Human
accugggaggcagaguuugcagugagcggaga

SEQ ID NO: 303987 - RNA, 32 nt, Human
accugggaggcagauguugcagugagccgaga

SEQ ID NO: 303988 - RNA, 32 nt, Human
accugggaggcagauguuguggugagccgaga

SEQ ID NO: 303989 - RNA, 32 nt, Human
accugggaggcagcgguugcaguaagccaaga

SEQ ID NO: 303990 - RNA, 32 nt, Human
accugggaggcaggcaggcaugcaugugggcc

SEQ ID NO: 303991 - RNA, 32 nt, Human
accugggaggcagggguugcagugagcugaga

SEQ ID NO: 303992 - RNA, 32 nt, Human
accugggaggcaguuugcagugagcugagauc

SEQ ID NO: 303993 - RNA, 32 nt, Human
accugggaggccaagguugcagugagccgaga

SEQ ID NO: 303994 - RNA, 32 nt, Human
accugggaggcgaagauugcagugagcugaaa

SEQ ID NO: 303995 - RNA, 32 nt, Human
accugggaggcgaagguugcagugagccaaga

SEQ ID NO: 303996 - RNA, 32 nt, Human
accugggaggcgaagguugcagugagcugaga

SEQ ID NO: 303997 - RNA, 32 nt, Human
accugggaggcgcagguugcagggaggcggag

SEQ ID NO: 303998 - RNA, 32 nt, Human
accugggaggcggaaguugcagugagccaaga

SEQ ID NO: 303999 - RNA, 32 nt, Human
accugggaggcggaaguugcagugagccgaga

SEQ ID NO: 304000 - RNA, 32 nt, Human
accugggaggcggaaguugcagugagcugaga

SEQ ID NO: 304001 - RNA, 32 nt, Human
accugggaggcggagaguacagugagccaaga

SEQ ID NO: 304002 - RNA, 32 nt, Human
accugggaggcggagauugcagugaaccaaga

SEQ ID NO: 304003 - RNA, 32 nt, Human
accugggaggcggagauugcagugagccgaga

SEQ ID NO: 304004 - RNA, 32 nt, Human
accugggaggcggagcuugcagugagccaagg

SEQ ID NO: 304005 - RNA, 32 nt, Human
accugggaggcggagcuugcagugagcccaga

SEQ ID NO: 304006 - RNA, 32 nt, Human
accugggaggcggagcuugcagugagccgaga

SEQ ID NO: 304007 - RNA, 32 nt, Human
accugggaggcggagcuugcagugagcugaaa

SEQ ID NO: 304008 - RNA, 32 nt, Human
accugggaggcggagcuugcagugagcugaga

SEQ ID NO: 304009 - RNA, 32 nt, Human
accugggaggcggaggagguugcagugaacug

SEQ ID NO: 304010 - RNA, 32 nt, Human
accugggaggcggaggcugcagugagccgaga

SEQ ID NO: 304011 - RNA, 32 nt, Human
accugggaggcggaggcugcagugagcuggga

SEQ ID NO: 304012 - RNA, 32 nt, Human
accugggaggcggagguugcaaugagccgaga

SEQ ID NO: 304013 - RNA, 32 nt, Human
accugggaggcggagguugcagggagcugaga

SEQ ID NO: 304014 - RNA, 32 nt, Human
accugggaggcggagguugcaguaagcccaga

SEQ ID NO: 304015 - RNA, 32 nt, Human
accugggaggcggagguugcagucagccaaga

SEQ ID NO: 304016 - RNA, 25 nt, Human
accugggaggcggagguugcaguga

SEQ ID NO: 304017 - RNA, 32 nt, Human
accugggaggcggagguugcagugaaccaaga

SEQ ID NO: 304018 - RNA, 32 nt, Human
accugggaggcggagguugcagugagccaaaa

SEQ ID NO: 304019 - RNA, 32 nt, Human
accugggaggcggagguugcagugagccaaga

SEQ ID NO: 304020 - RNA, 32 nt, Human
accugggaggcggagguugcagugagccacug

SEQ ID NO: 304021 - RNA, 32 nt, Human
accugggaggcggagguugcagugagccgaga

SEQ ID NO: 304022 - RNA, 32 nt, Human
accugggaggcggagguugcagugagccgcga

SEQ ID NO: 304023 - RNA, 32 nt, Human
accugggaggcggagguugcagugagcgagau

SEQ ID NO: 304024 - RNA, 32 nt, Human
accugggaggcggagguugcagugagcggaga

SEQ ID NO: 304025 - RNA, 32 nt, Human
accugggaggcggagguugcagugagcuaaga

SEQ ID NO: 304026 - RNA, 32 nt, Human
accugggaggcggagguugcagugagcugaaa

SEQ ID NO: 304027 - RNA, 32 nt, Human
accugggaggcggagguugcagugagcugaga

SEQ ID NO: 304028 - RNA, 32 nt, Human
accugggaggcggagguugcagugagcuuaga

SEQ ID NO: 304029 - RNA, 32 nt, Human
accugggaggcggagguugcagugagucgaga

SEQ ID NO: 304030 - RNA, 32 nt, Human
accugggaggcggagguugcagugaguugaga

SEQ ID NO: 304031 - RNA, 32 nt, Human
accugggaggcggagguugcaguggccgagau

SEQ ID NO: 304032 - RNA, 32 nt, Human
accugggaggcggagguugccgugagccgaga

SEQ ID NO: 304033 - RNA, 32 nt, Human
accugggaggcggagguugcggucagcugaga

SEQ ID NO: 304034 - RNA, 32 nt, Human
accugggaggcggagguugcggugagcugaga

SEQ ID NO: 304035 - RNA, 32 nt, Human
accugggaggcggagguugcugugagcugaga

SEQ ID NO: 304036 - RNA, 32 nt, Human
accugggaggcggagguuguagugagccaaga

SEQ ID NO: 304037 - RNA, 32 nt, Human
accugggaggcggagguuguagugagccaagg

SEQ ID NO: 304038 - RNA, 32 nt, Human
accugggaggcggagguuguagugagccgaga

SEQ ID NO: 304039 - RNA, 32 nt, Human
accugggaggcggagguuguggugagccaaga

SEQ ID NO: 304040 - RNA, 32 nt, Human
accugggaggcggagguuguggugagccgaga

SEQ ID NO: 304041 - RNA, 32 nt, Human
accugggaggcugaaguugcagugagccgaga

SEQ ID NO: 304042 - RNA, 32 nt, Human
accugggaggcugagcuugcagugagcugaga

SEQ ID NO: 304043 - RNA, 32 nt, Human
accugggaggcugaggcaggagaaucacuuga

SEQ ID NO: 304044 - RNA, 32 nt, Human
accugggaggcugaggcaggagaaucauuugc

SEQ ID NO: 304045 - RNA, 32 nt, Human
accugggaggcugaggcaggagaaucgcuuga

SEQ ID NO: 304046 - RNA, 32 nt, Human
accugggaggcugaggcaggagaaucucuuga

SEQ ID NO: 304047 - RNA, 32 nt, Human
accugggaggcugaggcgggagaaucaccuga

SEQ ID NO: 304048 - RNA, 32 nt, Human
accugggaggcugagguaugaggauugcuuga

SEQ ID NO: 304049 - RNA, 32 nt, Human
accugggaggcugaggugggaggaucgcuuga

SEQ ID NO: 304050 - RNA, 32 nt, Human
accugggagggcggagguugcagugagccagg

SEQ ID NO: 304051 - RNA, 32 nt, Human
accugggagggggagguugccgugagcugagc

SEQ ID NO: 304052 - RNA, 32 nt, Human
accugggagguacagguugcagugagcccaga

SEQ ID NO: 304053 - RNA, 32 nt, Human
accugggagguagaaguugcagugagccaaaa

SEQ ID NO: 304054 - RNA, 32 nt, Human
accugggagguagagguugcacugagccgaga

SEQ ID NO: 304055 - RNA, 32 nt, Human
accugggagguagagguugcagugagccaaua

SEQ ID NO: 304056 - RNA, 32 nt, Human
accugggagguagagguugcagugagccgaga

SEQ ID NO: 304057 - RNA, 32 nt, Human
accugggaggucaaagcggcagugagcuaaaa

SEQ ID NO: 304058 - RNA, 32 nt, Human
accugggaggucaagauugcagugagcuauga

SEQ ID NO: 304059 - RNA, 32 nt, Human
accugggagguggaagcugcagugagccaaga

SEQ ID NO: 304060 - RNA, 32 nt, Human
accugggagguggaaguugcagugagccaaga

SEQ ID NO: 304061 - RNA, 32 nt, Human
accugggagguggaaguugcagugagccgaga

SEQ ID NO: 304062 - RNA, 32 nt, Human
accugggagguggaaguugcagugagcugaga

SEQ ID NO: 304063 - RNA, 32 nt, Human
accugggagguggagacugcagugagccgaga

SEQ ID NO: 304064 - RNA, 32 nt, Human
accugggagguggagauugcagugagcccaga

SEQ ID NO: 304065 - RNA, 32 nt, Human
accugggagguggagauugcagugagucaaga

SEQ ID NO: 304066 - RNA, 32 nt, Human
accugggagguggagcuugcagugaaccgaga

SEQ ID NO: 304067 - RNA, 32 nt, Human
accugggagguggagcuugcagugagccgaga

SEQ ID NO: 304068 - RNA, 32 nt, Human
accugggagguggagcuugcagugagcggaca

SEQ ID NO: 304069 - RNA, 32 nt, Human
accugggagguggagcuugcagugagcugaga

SEQ ID NO: 304070 - RNA, 32 nt, Human
  misc_feature (22)..(22): n is a, c, g, or u
accugggagguggagcuugcanugagccaagg

SEQ ID NO: 304071 - RNA, 32 nt, Human
accugggagguggaggcagugagcugagaucg

SEQ ID NO: 304072 - RNA, 32 nt, Human
accugggagguggaggcuacagugagcugaga

SEQ ID NO: 304073 - RNA, 32 nt, Human
accugggagguggaggcugcagugaaccgaga

SEQ ID NO: 304074 - RNA, 32 nt, Human
accugggagguggagggagacaggagagaaac

SEQ ID NO: 304075 - RNA, 32 nt, Human
accugggagguggaggggaggcugcagugagc

SEQ ID NO: 304076 - RNA, 32 nt, Human
accugggagguggagguuacagugagccgaga

SEQ ID NO: 304077 - RNA, 32 nt, Human
accugggagguggagguuauagugagccuaga

SEQ ID NO: 304078 - RNA, 32 nt, Human
accugggagguggagguugaggugagcucaga

SEQ ID NO: 304079 - RNA, 32 nt, Human
accugggagguggagguugcagcgagccaaga

SEQ ID NO: 304080 - RNA, 32 nt, Human
accugggagguggagguugcaguaagccaaga

SEQ ID NO: 304081 - RNA, 32 nt, Human
accugggagguggagguugcaguaagcugaga

SEQ ID NO: 304082 - RNA, 25 nt, Human
accugggagguggagguugcaguga

SEQ ID NO: 304083 - RNA, 32 nt, Human
accugggagguggagguugcagugacccgaga

SEQ ID NO: 304084 - RNA, 32 nt, Human
accugggagguggagguugcagugagcagaga

SEQ ID NO: 304085 - RNA, 32 nt, Human
accugggagguggagguugcagugagccaaga

SEQ ID NO: 304086 - RNA, 32 nt, Human
accugggagguggagguugcagugagccgaga

SEQ ID NO: 304087 - RNA, 32 nt, Human
accugggagguggagguugcagugagccgagc

SEQ ID NO: 304088 - RNA, 32 nt, Human
accugggagguggagguugcagugagcugaga

SEQ ID NO: 304089 - RNA, 32 nt, Human
accugggagguggagguugcagugagcugagc

SEQ ID NO: 304090 - RNA, 32 nt, Human
accugggagguggagguugcagugagcugagg

SEQ ID NO: 304091 - RNA, 32 nt, Human
accugggagguggagguugcagugagcuguga

SEQ ID NO: 304092 - RNA, 32 nt, Human
accugggagguggagguugcagugagucgaga

SEQ ID NO: 304093 - RNA, 32 nt, Human
accugggagguggagguugcagugaguugaga

SEQ ID NO: 304094 - RNA, 32 nt, Human
accugggagguggagguugcagugggccaaga

SEQ ID NO: 304095 - RNA, 32 nt, Human
accugggagguggagguugcagugggcuaaga

SEQ ID NO: 304096 - RNA, 32 nt, Human
accugggagguggagguugcagugggcugaga

SEQ ID NO: 304097 - RNA, 32 nt, Human
accugggagguggagguugcauugagccaaga

SEQ ID NO: 304098 - RNA, 32 nt, Human
accugggagguggagguugcauugagcugaga

SEQ ID NO: 304099 - RNA, 32 nt, Human
accugggagguggagguugcgagaucacacca

SEQ ID NO: 304100 - RNA, 25 nt, Human
accugggagguggagguugcgguga

SEQ ID NO: 304101 - RNA, 32 nt, Human
accugggagguggagguugcggugagccaaga

SEQ ID NO: 304102 - RNA, 32 nt, Human
accugggagguggagguugcggugagccgaga

SEQ ID NO: 304103 - RNA, 32 nt, Human
accugggagguggagguugcggugagcugaga

SEQ ID NO: 304104 - RNA, 32 nt, Human
accugggagguggagguugcugugagcugaca

SEQ ID NO: 304105 - RNA, 32 nt, Human
accugggagguggagguugcugugagcugaga

SEQ ID NO: 304106 - RNA, 32 nt, Human
accugggagguggagguuguggugagccaaua

SEQ ID NO: 304107 - RNA, 32 nt, Human
accugggagguggagguuguggugaggcgaga

SEQ ID NO: 304108 - RNA, 32 nt, Human
accugggagguggagguuucagugagccaaga

SEQ ID NO: 304109 - RNA, 32 nt, Human
accugggagguggaguugcagugagccgagau

SEQ ID NO: 304110 - RNA, 32 nt, Human
accugggagguggauguugcagugagcugaga

SEQ ID NO: 304111 - RNA, 32 nt, Human
accugggagguggggguuucagugagcugaga

SEQ ID NO: 304112 - RNA, 32 nt, Human
accugggagguggugguugcagugagcugaga

SEQ ID NO: 304113 - RNA, 32 nt, Human
accugggagguugaggcugcagugagcugugu

SEQ ID NO: 304114 - RNA, 32 nt, Human
accugggaguuagagguugcagugagcugaga

SEQ ID NO: 304115 - RNA, 32 nt, Human
accugggaguuggagguugcagugaaacgaga

SEQ ID NO: 304116 - RNA, 32 nt, Human
accugggaguuugaagcugcagugagccauga

SEQ ID NO: 304117 - RNA, 32 nt, Human
accugggaucuugagauacccaggaagggagg

SEQ ID NO: 304118 - RNA, 32 nt, Human
accugggaugacaggcgccugccaccacgccc

SEQ ID NO: 304119 - RNA, 32 nt, Human
accugggaugcugaggugggaggaucacucaa

SEQ ID NO: 304120 - RNA, 32 nt, Human
accugggaugguaggcacgcaccaccaugcca

SEQ ID NO: 304121 - RNA, 32 nt, Human
accugggauguggagguugcagugaacugagg

SEQ ID NO: 304122 - RNA, 32 nt, Human
accugggauguggagguugcagugagccaaga

SEQ ID NO: 304123 - RNA, 32 nt, Human
accugggauuacaggcaugcaccaccaugccc

SEQ ID NO: 304124 - RNA, 32 nt, Human
accugggauuacaggcaugugccaccacaccu

SEQ ID NO: 304125 - RNA, 32 nt, Human
accugggauuacaggcaugugccaccacgccc

SEQ ID NO: 304126 - RNA, 32 nt, Human
accugggauuacaggcauguuucaccauguug

SEQ ID NO: 304127 - RNA, 32 nt, Human
accugggauuacaggugcacaccaccacgcuu

SEQ ID NO: 304128 - RNA, 32 nt, Human
accugggcaaagacagagaagcucccagaagg

SEQ ID NO: 304129 - RNA, 32 nt, Human
accugggcaaaguggccagguggaugaaguua

SEQ ID NO: 304130 - RNA, 32 nt, Human
accugggcaaucugcaugugaugccaaccaag

SEQ ID NO: 304131 - RNA, 32 nt, Human
accugggcaauguggggagaccccaucucuac

SEQ ID NO: 304132 - RNA, 32 nt, Human
accugggcacacacguagacaagggcagcuau

SEQ ID NO: 304133 - RNA, 32 nt, Human
accugggcaccggccagcugcgagacgugacu

SEQ ID NO: 304134 - RNA, 32 nt, Human
accugggcagcuuggaccuggucauccucuac

SEQ ID NO: 304135 - RNA, 32 nt, Human
accugggcaggcgagaguaguacuggagggcc

SEQ ID NO: 304136 - RNA, 32 nt, Human
accugggccagccccuuguccucugccuucug

SEQ ID NO: 304137 - RNA, 32 nt, Human
accugggcccaagucucucaucagcccccaau

SEQ ID NO: 304138 - RNA, 32 nt, Human
accugggcccaggaguugcaagucucugcuuc

SEQ ID NO: 304139 - RNA, 32 nt, Human
accugggcccggagaagguggagggagacgag

SEQ ID NO: 304140 - RNA, 32 nt, Human
accugggcccuggccagggcucuaggggccgg

SEQ ID NO: 304141 - RNA, 32 nt, Human
accugggcccugucucccagccacuuucccuc

SEQ ID NO: 304142 - RNA, 18 nt, Human
accugggccgcccggcag

SEQ ID NO: 304143 - RNA, 32 nt, Human
accugggccucccagcccagcccagccugaga

SEQ ID NO: 304144 - RNA, 32 nt, Human
accugggccucccggguucaagcaauucuguc

SEQ ID NO: 304145 - RNA, 32 nt, Human
accugggccugcauuccauccgcucugcagcc

SEQ ID NO: 304146 - RNA, 32 nt, Human
accugggccuggcugcucagaugcugcuggaa

SEQ ID NO: 304147 - RNA, 32 nt, Human
accugggcggcagagguugcagugagucaaga

SEQ ID NO: 304148 - RNA, 32 nt, Human
accugggcuacauuccuaacucauauuaacag

SEQ ID NO: 304149 - RNA, 32 nt, Human
accugggcucaagcaauccucccgcuucagcc

SEQ ID NO: 304150 - RNA, 32 nt, Human
accugggcucaagugauccgccugccucuacc

SEQ ID NO: 304151 - RNA, 32 nt, Human
accugggcucaagugauccuucugccucagcc

SEQ ID NO: 304152 - RNA, 32 nt, Human
accugggcucaagugauucucccaccucagcc

SEQ ID NO: 304153 - RNA, 32 nt, Human
accugggcuccacguccagccugggaccuggc

SEQ ID NO: 304154 - RNA, 32 nt, Human
accugggcuccugccacacgugggaccaccag

SEQ ID NO: 304155 - RNA, 32 nt, Human
accugggcuggccucaguugaaggaucaugca

SEQ ID NO: 304156 - RNA, 32 nt, Human
accugggcuguggcugagacaauaaugaggcc

SEQ ID NO: 304157 - RNA, 32 nt, Human
accuggggaagagcagcagcagcagcggcggc

SEQ ID NO: 304158 - RNA, 32 nt, Human
accuggggaaguggggcuggaggcucugcccc

SEQ ID NO: 304159 - RNA, 32 nt, Human
accuggggagaaaguugagugucaggggacau

SEQ ID NO: 304160 - RNA, 32 nt, Human
accuggggaggcacagcagccaaguggggagg

SEQ ID NO: 304161 - RNA, 32 nt, Human
accuggggauucagcaacagguuuccacaggg

SEQ ID NO: 304162 - RNA, 32 nt, Human
accuggggauuuuaguaagugugucuuccuag

SEQ ID NO: 304163 - RNA, 32 nt, Human
accuggggauuuucacagugugcuccagaugg

SEQ ID NO: 304164 - RNA, 32 nt, Human
accuggggcaagccccuuccccucucugggcc

SEQ ID NO: 304165 - RNA, 32 nt, Human
accuggggccacucucccacccucucgaucug

SEQ ID NO: 304166 - RNA, 32 nt, Human
accuggggccugacgucagcaggauggggccg

SEQ ID NO: 304167 - RNA, 32 nt, Human
accuggggcgagaccgggugacuguggcagug

SEQ ID NO: 304168 - RNA, 32 nt, Human
accuggggcucaacaaagccugaaagaagaaa

SEQ ID NO: 304169 - RNA, 32 nt, Human
accuggggcucugaggccccuggggaggcugg

SEQ ID NO: 304170 - RNA, 32 nt, Human
accuggggcugccucacccucucuccagaccc

SEQ ID NO: 304171 - RNA, 32 nt, Human
accuggggcuugguuucccugcccugggcuca

SEQ ID NO: 304172 - RNA, 32 nt, Human
accugggguugggggacacagacgcgagagag

SEQ ID NO: 304173 - RNA, 32 nt, Human
accugggguuuccgacuugcagccaggaaaga

SEQ ID NO: 304174 - RNA, 18 nt, Human
accuggguccccacgcag

SEQ ID NO: 304175 - RNA, 32 nt, Human
accuggguccccugcaaccucccaucaaagga

SEQ ID NO: 304176 - RNA, 32 nt, Human
accuggguccgggaguuggggacagcagaacg

SEQ ID NO: 304177 - RNA, 32 nt, Human
accugggucuggggucucaggcgcaaacugga

SEQ ID NO: 304178 - RNA, 32 nt, Human
accugggugaaauauaccaaauucugcaucuc

SEQ ID NO: 304179 - RNA, 32 nt, Human
accugggugcagcuucauggggugguucuggc

SEQ ID NO: 304180 - RNA, 32 nt, Human
accugggugcucuggaaacacugcaaagacug

SEQ ID NO: 304181 - RNA, 32 nt, Human
accuggguggccagggccucccucucuguuac

SEQ ID NO: 304182 - RNA, 32 nt, Human
accuggguggucgaggcugcagugagccgaga

SEQ ID NO: 304183 - RNA, 32 nt, Human
accuggguucaagugauccucccaccucagcu

SEQ ID NO: 304184 - RNA, 32 nt, Human
accuggguucaagugauccucucaccucagcc

SEQ ID NO: 304185 - RNA, 32 nt, Human
accuggguucuggaccugaucugccacuucaa

SEQ ID NO: 304186 - RNA, 32 nt, Human
accugguaaggugcuucuuccucuuuuccagg

SEQ ID NO: 304187 - RNA, 32 nt, Human
accugguacccagugauccccaccccaggauc

SEQ ID NO: 304188 - RNA, 32 nt, Human
accugguacuacaggcgcgugccaccacaccu

SEQ ID NO: 304189 - RNA, 32 nt, Human
accugguagagaaagagaggucagaaauagca

SEQ ID NO: 304190 - RNA, 32 nt, Human
accugguaggcagagguugcagugagccgagu

SEQ ID NO: 304191 - RNA, 32 nt, Human
accugguaggcagagguuguagugagccgagg

SEQ ID NO: 304192 - RNA, 32 nt, Human
accugguagguggagguuucauugagccacga

SEQ ID NO: 304193 - RNA, 32 nt, Human
accugguauaugccaugcugggaggccacuga

SEQ ID NO: 304194 - RNA, 32 nt, Human
accugguauuaggagcucagaauggaaugcau

SEQ ID NO: 304195 - RNA, 22 nt, Human
accugguauuuccacucucaca

SEQ ID NO: 304196 - RNA, 32 nt, Human
accuggucacccaggcugcagaaacaaccgca

SEQ ID NO: 304197 - RNA, 32 nt, Human
accuggucagccagcguugcaaagagggauag

SEQ ID NO: 304198 - RNA, 19 nt, Human
accuggucaggugguccca

SEQ ID NO: 304199 - RNA, 32 nt, Human
accuggucccccgacucuccccaggcccccgg

SEQ ID NO: 304200 - RNA, 32 nt, Human
accuggucccucuggagguugcgguggcugaa

SEQ ID NO: 304201 - RNA, 32 nt, Human
accugguccucuugagguuauauuguggaugu

SEQ ID NO: 304202 - RNA, 32 nt, Human
accuggucucccagcccugcgggcagaauggg

SEQ ID NO: 304203 - RNA, 32 nt, Human
accuggucucucuagggccugcccugagcuca

SEQ ID NO: 304204 - RNA, 32 nt, Human
accuggucuggauccaguugagcagcacagca

SEQ ID NO: 304205 - RNA, 32 nt, Human
accuggucuugcggcuguggccaccgccggcc

SEQ ID NO: 304206 - RNA, 32 nt, Human
accuggugcccagguggaggugcagugggggu

SEQ ID NO: 304207 - RNA, 32 nt, Human
accuggugccuuuuuaaauaaauugcugaaau

SEQ ID NO: 304208 - RNA, 32 nt, Human
accugguggaggaugcugcggcaggugcuucg

SEQ ID NO: 304209 - RNA, 32 nt, Human
accuggugggcauagccagagcuguucgaacc

SEQ ID NO: 304210 - RNA, 32 nt, Human
accugguggggauguggagaaccuuugugucu

SEQ ID NO: 304211 - RNA, 23 nt, Human
accuggugggggaugcaugggaa

SEQ ID NO: 304212 - RNA, 32 nt, Human
accugguggugcuggccagggaggaugcugga

SEQ ID NO: 304213 - RNA, 32 nt, Human
accuggugucucccacugugagcccagcuguc

SEQ ID NO: 304214 - RNA, 29 nt, Human
accuggugucuguguauugccuguguuug

SEQ ID NO: 304215 - RNA, 32 nt, Human
accuggugugggaugggagaacuccgcugaga

SEQ ID NO: 304216 - RNA, 32 nt, Human
accuggugugugggacacccucuccuucaccg

SEQ ID NO: 304217 - RNA, 32 nt, Human
accugguuagggacugacucaaagacccugag

SEQ ID NO: 304218 - RNA, 32 nt, Human
accugguuaugaauucucaaaagagaaagcag

SEQ ID NO: 304219 - RNA, 32 nt, Human
accugguucaucccaacucucuuccagcccuu

SEQ ID NO: 304220 - RNA, 32 nt, Human
accugguuggccggggaagcuguaggggugga

SEQ ID NO: 304221 - RNA, 32 nt, Human
accugguuuagcacuggcauccugaacaguua

SEQ ID NO: 304222 - RNA, 32 nt, Human
accugguuuauacaacaucugccuucuccaaa

SEQ ID NO: 304223 - RNA, 32 nt, Human
accugguuuggucagugcaguugugcaaucug

SEQ ID NO: 304224 - RNA, 24 nt, Human
accugguuuucuccacuccacaca

SEQ ID NO: 304225 - RNA, 32 nt, Human
accuguaaaaggaaauaacaagagcacuuacu

SEQ ID NO: 304226 - RNA, 32 nt, Human
accuguaaacucuggccccuugcccaccugaa

SEQ ID NO: 304227 - RNA, 32 nt, Human
accuguaaggcggagguugcagugagccgagu

SEQ ID NO: 304228 - RNA, 22 nt, Human
accuguaagucccagcuacuca

SEQ ID NO: 304229 - RNA, 32 nt, Human
accuguaaucacugcacuccaaccuggcaaca

SEQ ID NO: 304230 - RNA, 21 nt, Human
accuguaaucccagcuaccca

SEQ ID NO: 304231 - RNA, 21 nt, Human
accuguaaucccagcuacuca

SEQ ID NO: 304232 - RNA, 32 nt, Human
accuguaauuccagcacuuugugaggcugagg

SEQ ID NO: 304233 - RNA, 32 nt, Human
accuguacaacgacucugccucuuagaugaua

SEQ ID NO: 304234 - RNA, 32 nt, Human
accuguacacacacagacacacaagcagacac

SEQ ID NO: 304235 - RNA, 32 nt, Human
accuguaccagcugcccagcugccucccuucu

SEQ ID NO: 304236 - RNA, 32 nt, Human
accuguaccccagcuguuccggaggcugaggc

SEQ ID NO: 304237 - RNA, 20 nt, Human
accuguacgccaacacggug

SEQ ID NO: 304238 - RNA, 32 nt, Human
accuguacucccagcacuucaggaagcugagg

SEQ ID NO: 304239 - RNA, 32 nt, Human
accuguacuguauucuuggucaucucaaaugg

SEQ ID NO: 304240 - RNA, 32 nt, Human
accuguacuuccccugccacccugcacaccuc

SEQ ID NO: 304241 - RNA, 32 nt, Human
accuguagggaaaugaguguucccuggaacaa

SEQ ID NO: 304242 - RNA, 32 nt, Human
accuguaguagucccagcuacaugggaagcug

SEQ ID NO: 304243 - RNA, 21 nt, Human
accuguaucuucuuccaagcc

SEQ ID NO: 304244 - RNA, 32 nt, Human
accuguauguaaucccaaauacucgggaggcu

SEQ ID NO: 304245 - RNA, 32 nt, Human
accuguauuuauuucaaagaugcuaauuugua

SEQ ID NO: 304246 - RNA, 32 nt, Human
accuguauuucaguaggaccuggguagggauu

SEQ ID NO: 304247 - RNA, 32 nt, Human
accugucaaacugugugaaaccugccaaucug

SEQ ID NO: 304248 - RNA, 32 nt, Human
accugucaacucugcgcgcucccagguucuug

SEQ ID NO: 304249 - RNA, 32 nt, Human
accugucaagaguucagaucaaaguugcgcug

SEQ ID NO: 304250 - RNA, 32 nt, Human
accugucacccuggcccuucucugcuuggaug

SEQ ID NO: 304251 - RNA, 32 nt, Human
accugucacugcaaaugcuuugucucugggca

SEQ ID NO: 304252 - RNA, 17 nt, Human
accugucaggguaugac

SEQ ID NO: 304253 - RNA, 32 nt, Human
accuguccaaggguaggcaaccaccuucaccu

SEQ ID NO: 304254 - RNA, 32 nt, Human
accuguccaggccaggaggcugguggaccuga

SEQ ID NO: 304255 - RNA, 32 nt, Human
accuguccccacccuccacucagcuguccugc

SEQ ID NO: 304256 - RNA, 32 nt, Human
accuguccccuccacugggcagugguggucag

SEQ ID NO: 304257 - RNA, 32 nt, Human
accuguccccucgaggcuucugaccuuugauc

SEQ ID NO: 304258 - RNA, 32 nt, Human
accugucccucuccuauguggcagcuggggag

SEQ ID NO: 304259 - RNA, 32 nt, Human
accugucccugagaaggacccugugccccaag

SEQ ID NO: 304260 - RNA, 32 nt, Human
accugucccugccugcucccagcccacucauc

SEQ ID NO: 304261 - RNA, 32 nt, Human
accuguccgagaagguugcaagaagaugccac

SEQ ID NO: 304262 - RNA, 32 nt, Human
accuguccuagcaggaucugcccacaccucgg

SEQ ID NO: 304263 - RNA, 32 nt, Human
accuguccugcuguuuauuaugugggguggcu

SEQ ID NO: 304264 - RNA, 32 nt, Human
accuguccugggaaaugcagacucucugucag

SEQ ID NO: 304265 - RNA, 32 nt, Human
accuguccuguuugagggaacagggucgaccc

SEQ ID NO: 304266 - RNA, 32 nt, Human
accuguccuucccucauggaagcuacugcuua

SEQ ID NO: 304267 - RNA, 32 nt, Human
accugucgcuaaggucuggaggcugcaggccu

SEQ ID NO: 304268 - RNA, 32 nt, Human
accugucggggagggggccaaggacacagcac

SEQ ID NO: 304269 - RNA, 19 nt, Human
accugucucacgacggucu

SEQ ID NO: 304270 - RNA, 32 nt, Human
accugucuccagaugguacagagucccuugau

SEQ ID NO: 304271 - RNA, 32 nt, Human
accugucucccuaguucucugccgccuuuucc

SEQ ID NO: 304272 - RNA, 32 nt, Human
accugucuccgaauccgucgugguguuucaag

SEQ ID NO: 304273 - RNA, 32 nt, Human
accugucuccuucuuccugccugcuugucugu

SEQ ID NO: 304274 - RNA, 32 nt, Human
accugucucugcacucuaguuucccugugugg

SEQ ID NO: 304275 - RNA, 32 nt, Human
accugucugccuggacuguccccuguccccgc

SEQ ID NO: 304276 - RNA, 19 nt, Human
accugucuggacaccacaa

SEQ ID NO: 304277 - RNA, 32 nt, Human
accugucugggaaacaccucaucucuacaaaa

SEQ ID NO: 304278 - RNA, 32 nt, Human
accugucuguaaccuguuuugugcucugaaag

SEQ ID NO: 304279 - RNA, 32 nt, Human
accugucuucaggcugccaggggaggaggaga

SEQ ID NO: 304280 - RNA, 32 nt, Human
accugucuuccccuccucccauccaggucucc

SEQ ID NO: 304281 - RNA, 20 nt, Human
accugucuuccucccuggca

SEQ ID NO: 304282 - RNA, 22 nt, Human
accugucuugauaagugcuuga

SEQ ID NO: 304283 - RNA, 32 nt, Human
accugugaccacagcaggcugacagauggaca

SEQ ID NO: 304284 - RNA, 32 nt, Human
accugugagcacuuugggaggcugaggugggc

SEQ ID NO: 304285 - RNA, 32 nt, Human
accugugagcagcugcuguuugucgugcuccc

SEQ ID NO: 304286 - RNA, 32 nt, Human
accugugagccccacucccggccccacucaca

SEQ ID NO: 304287 - RNA, 32 nt, Human
accugugagccccacucccggccccacucacu

SEQ ID NO: 304288 - RNA, 32 nt, Human
accugugagcugacaaaugcucuggcuccggu

SEQ ID NO: 304289 - RNA, 32 nt, Human
accugugaggaagagguugcagugagcugaga

SEQ ID NO: 304290 - RNA, 32 nt, Human
accugugaggcagagguugcagugagccaaga

SEQ ID NO: 304291 - RNA, 32 nt, Human
accugugaggcugcagugauugugauucucau

SEQ ID NO: 304292 - RNA, 32 nt, Human
accugugagguggagcuugcagugagccaaga

SEQ ID NO: 304293 - RNA, 32 nt, Human
accugugaucagcuccaccagacacagcaacc

SEQ ID NO: 304294 - RNA, 32 nt, Human
accugugcaaaugacccuggaguugguuucgc

SEQ ID NO: 304295 - RNA, 32 nt, Human
accugugcaacaacgccguccagaaguaccug

SEQ ID NO: 304296 - RNA, 24 nt, Human
accugugcaccccuggcccuccca

SEQ ID NO: 304297 - RNA, 32 nt, Human
accugugcaccugguugugagcauuuuaaagg

SEQ ID NO: 304298 - RNA, 32 nt, Human
accugugcauuuucuguuugcccccauucacu

SEQ ID NO: 304299 - RNA, 32 nt, Human
accugugccagagcugugguugaggaggagcc

SEQ ID NO: 304300 - RNA, 32 nt, Human
accugugcccaggccagcuucgagcuacaugc

SEQ ID NO: 304301 - RNA, 32 nt, Human
accugugccugcaggcagggaugcugcaggac

SEQ ID NO: 304302 - RNA, 32 nt, Human
accugugcugacuggggcuggggugagagagg

SEQ ID NO: 304303 - RNA, 32 nt, Human
accugugcugcacuccagcugacccaaguagg

SEQ ID NO: 304304 - RNA, 32 nt, Human
accugugcuuauuggauggagugagaaacuaa

SEQ ID NO: 304305 - RNA, 32 nt, Human
accugugcuugaggggccggaggcaggugcug

SEQ ID NO: 304306 - RNA, 17 nt, Human
accuguggaugguugac

SEQ ID NO: 304307 - RNA, 32 nt, Human
accuguggcccagggagcuacugucuuaaacg

SEQ ID NO: 304308 - RNA, 32 nt, Human
accuguggccgccgcccacagaccaugcuccu

SEQ ID NO: 304309 - RNA, 32 nt, Human
accuguggccugaucuguaaauaaaacuuaca

SEQ ID NO: 304310 - RNA, 32 nt, Human
accuguggcugcugcugacuagggcugcaugg

SEQ ID NO: 304311 - RNA, 32 nt, Human
accuguggcuuccucugugcucuaccuuuuua

SEQ ID NO: 304312 - RNA, 32 nt, Human
accuguggcuuccugcgaauggagggggagca

SEQ ID NO: 304313 - RNA, 32 nt, Human
accuguggggagacuuuuccagcugggccaag

SEQ ID NO: 304314 - RNA, 32 nt, Human
accuguggggugguauuuugcauugcaaggag

SEQ ID NO: 304315 - RNA, 32 nt, Human
accugugggugcggucuccccucuccaaaugc

SEQ ID NO: 304316 - RNA, 32 nt, Human
accuguggucccagcugccucagcuucccgag

SEQ ID NO: 304317 - RNA, 32 nt, Human
accuguggucggcauccccgcguugucacugc

SEQ ID NO: 304318 - RNA, 32 nt, Human
accuguguaaggagguaugugugggagaagau

SEQ ID NO: 304319 - RNA, 32 nt, Human
accuguguacgcacacacacauauacauacag

SEQ ID NO: 304320 - RNA, 32 nt, Human
accuguguauuuagaucagaccuguguaucac

SEQ ID NO: 304321 - RNA, 32 nt, Human
accuguguauuugccccugagcacuuuccuuu

SEQ ID NO: 304322 - RNA, 32 nt, Human
accugugucacuucugacaugagccuguaaac

SEQ ID NO: 304323 - RNA, 32 nt, Human
accuguguccaacauguugagaacucaaaaag

SEQ ID NO: 304324 - RNA, 32 nt, Human
accuguguccgggaguggcuccagugaaaccc

SEQ ID NO: 304325 - RNA, 32 nt, Human
accuguguccgugcuccagcagucuccucagc

SEQ ID NO: 304326 - RNA, 32 nt, Human
accuguguccucuacuuuucugaucucccaca

SEQ ID NO: 304327 - RNA, 32 nt, Human
accugugucucacaucagccuaggugaagccu

SEQ ID NO: 304328 - RNA, 32 nt, Human
accugugucuggacaagucugauguccugugu

SEQ ID NO: 304329 - RNA, 32 nt, Human
accugugugcaggauccgccuccauggagcua

SEQ ID NO: 304330 - RNA, 32 nt, Human
accugugugccagacauuugugcauuguugca

SEQ ID NO: 304331 - RNA, 32 nt, Human
accugugugccccagcaaucuagugcucaaga

SEQ ID NO: 304332 - RNA, 32 nt, Human
accuguguggggaggcccuccugcugccuugg

SEQ ID NO: 304333 - RNA, 32 nt, Human
accugugugugugcaaguuucuaucuuccaga

SEQ ID NO: 304334 - RNA, 32 nt, Human
accuguguguuuuccacagucccugcuucccg

SEQ ID NO: 304335 - RNA, 32 nt, Human
accuguguuaucuguaaaucccagacauugua

SEQ ID NO: 304336 - RNA, 32 nt, Human
accuguguuaucuguaaauuccagacacugua

SEQ ID NO: 304337 - RNA, 32 nt, Human
accuguguucugacucuucccaguguccugca

SEQ ID NO: 304338 - RNA, 32 nt, Human
accuguuaauggaaagcagucacagcuggagg

SEQ ID NO: 304339 - RNA, 32 nt, Human
accuguuacugaggcuggauggaggauggcau

SEQ ID NO: 304340 - RNA, 32 nt, Human
accuguuauggacccccaaauucugagaguuc

SEQ ID NO: 304341 - RNA, 32 nt, Human
accuguucagagccaggaaggagacugcacag

SEQ ID NO: 304342 - RNA, 32 nt, Human
accuguucccauuugagaagcuguggcugagc

SEQ ID NO: 304343 - RNA, 32 nt, Human
accuguuccuacaccuugcaucaugccagcuu

SEQ ID NO: 304344 - RNA, 32 nt, Human
accuguuccugcaagccagcugccuugucuga

SEQ ID NO: 304345 - RNA, 24 nt, Human
accuguucgcucuccgccccuccu

SEQ ID NO: 304346 - RNA, 32 nt, Human
accuguucucacugaaaagucuggcuaaugcu

SEQ ID NO: 304347 - RNA, 32 nt, Human
accuguucucagacugacccuuugcucaucac

SEQ ID NO: 304348 - RNA, 32 nt, Human
accuguucucccaaggaaugggguugaaauca

SEQ ID NO: 304349 - RNA, 32 nt, Human
accuguucucuagcugugaucuuaccacuuca

SEQ ID NO: 304350 - RNA, 32 nt, Human
accuguucucuuucccuucuugucuuuaaaaa

SEQ ID NO: 304351 - RNA, 32 nt, Human
accuguucuguaaaguccuuggcacugcugaa

SEQ ID NO: 304352 - RNA, 32 nt, Human
accuguucuugcaacagucuucuucccaggga

SEQ ID NO: 304353 - RNA, 32 nt, Human
accuguugagccaggagacagaagcugugagc

SEQ ID NO: 304354 - RNA, 22 nt, Human
accuguugagccagggaguagg

SEQ ID NO: 304355 - RNA, 18 nt, Human
accuguugcaugcuucaa

SEQ ID NO: 304356 - RNA, 19 nt, Human
accuguugcccacagggua

SEQ ID NO: 304357 - RNA, 19 nt, Human
accuguugcucugcaucaa

SEQ ID NO: 304358 - RNA, 32 nt, Human
accuguuggcuccacucuugucacucaugucc

SEQ ID NO: 304359 - RNA, 32 nt, Human
accuguugucugaaaauaaaguuaauuuguuu

SEQ ID NO: 304360 - RNA, 32 nt, Human
accuguuguucaaccucugucucuuuauguua

SEQ ID NO: 304361 - RNA, 32 nt, Human
accuguuuaccuggggaaagaugaggaugagg

SEQ ID NO: 304362 - RNA, 32 nt, Human
accuguuuacuuugugcuaacagugccggagc

SEQ ID NO: 304363 - RNA, 32 nt, Human
accuguuucacucaaugccaggcagugcagca

SEQ ID NO: 304364 - RNA, 32 nt, Human
accuguuuccagccuggccugagguggaaccc

SEQ ID NO: 304365 - RNA, 32 nt, Human
accuguuuccuugagacuuuccuagguggaaa

SEQ ID NO: 304366 - RNA, 32 nt, Human
accuguuucuaccuauaugcagucucuuuauu

SEQ ID NO: 304367 - RNA, 32 nt, Human
accuguuucugaagagacacagacacagaaua

SEQ ID NO: 304368 - RNA, 32 nt, Human
accuguuucuucuguuauuacagaacacagug

SEQ ID NO: 304369 - RNA, 32 nt, Human
accuguuugacuugaguagaugccauugcccu

SEQ ID NO: 304370 - RNA, 32 nt, Human
accuguuuguuucugagucugccugugugucc

SEQ ID NO: 304371 - RNA, 32 nt, Human
accuguuuuacugccuguacauuccacauuaa

SEQ ID NO: 304372 - RNA, 32 nt, Human
accuguuuucuucaagccugagguuuuauaua

SEQ ID NO: 304373 - RNA, 32 nt, Human
accuuaaaaacucccuggauuaggcaagagaa

SEQ ID NO: 304374 - RNA, 32 nt, Human
accuuaaaacuagcuuuauucacagagaaaga

SEQ ID NO: 304375 - RNA, 32 nt, Human
accuuaaacagccuggguugacuggccuggua

SEQ ID NO: 304376 - RNA, 32 nt, Human
accuuaaagcuuuugcucuauguucuuuacug

SEQ ID NO: 304377 - RNA, 32 nt, Human
accuuaaaugggagggaaguuggggugucugc

SEQ ID NO: 304378 - RNA, 32 nt, Human
accuuaaauugaaagccagugcugcuacuuuc

SEQ ID NO: 304379 - RNA, 32 nt, Human
accuuaacagcugaagcuaugccuuauuaugc

SEQ ID NO: 304380 - RNA, 32 nt, Human
accuuaaccucugaacucugaccucaggaggc

SEQ ID NO: 304381 - RNA, 32 nt, Human
accuuaacuucaaacauuucucuucagaaaag

SEQ ID NO: 304382 - RNA, 32 nt, Human
accuuaagagcuguaacacucaccgccagggu

SEQ ID NO: 304383 - RNA, 32 nt, Human
accuuaagccaucuugguggguucuggguggu

SEQ ID NO: 304384 - RNA, 32 nt, Human
accuuaagccugcuuagcuuggaauaagacuu

SEQ ID NO: 304385 - RNA, 32 nt, Human
accuuaauacgcucauaugguuggaguguuaa

SEQ ID NO: 304386 - RNA, 32 nt, Human
accuuaaucccagcuacuugggaggcagaggc

SEQ ID NO: 304387 - RNA, 32 nt, Human
accuuaauugagcaaguuugaaaccucgcuug

SEQ ID NO: 304388 - RNA, 31 nt, Human
accuuacaaguguaaugaaugcagcaggacc

SEQ ID NO: 304389 - RNA, 32 nt, Human
accuuacagaccauuauggcauuugcuagacu

SEQ ID NO: 304390 - RNA, 32 nt, Human
accuuacagccuuugggccccugggccccugc

SEQ ID NO: 304391 - RNA, 32 nt, Human
accuuacagcuugccucacacccacccacauc

SEQ ID NO: 304392 - RNA, 32 nt, Human
accuuacagggaauuuccuuuguacuuaauug

SEQ ID NO: 304393 - RNA, 32 nt, Human
accuuacaugcuacuugccucugacaacucuu

SEQ ID NO: 304394 - RNA, 32 nt, Human
accuuaccuuagaugcuaacagaaggguccug

SEQ ID NO: 304395 - RNA, 32 nt, Human
accuuacgagagagcuaugcuccuccucaaag

SEQ ID NO: 304396 - RNA, 32 nt, Human
accuuacuaccuccucccucguggcagggcuc

SEQ ID NO: 304397 - RNA, 32 nt, Human
accuuacuccagcagccuccaggugcuuucau

SEQ ID NO: 304398 - RNA, 32 nt, Human
accuuacugcaaccaccacuuccuggguucaa

SEQ ID NO: 304399 - RNA, 32 nt, Human
accuuacuucaccucuuagccuuguucuccuc

SEQ ID NO: 304400 - RNA, 32 nt, Human
accuuacuucauuucaaaugaaguuaauuaau

SEQ ID NO: 304401 - RNA, 32 nt, Human
accuuacuuccaccauuccucagcaaaucaag

SEQ ID NO: 304402 - RNA, 32 nt, Human
accuuagaauauuuggauaacaggcaugacug

SEQ ID NO: 304403 - RNA, 32 nt, Human
accuuagacagaauaauacaaagcuuuaacga

SEQ ID NO: 304404 - RNA, 32 nt, Human
accuuagaccaccagccccagcuguucucugu

SEQ ID NO: 304405 - RNA, 32 nt, Human
accuuagaguauguuucucagcccuaccuacc

SEQ ID NO: 304406 - RNA, 32 nt, Human
accuuagcaacuuggcccacauggacaucgac

SEQ ID NO: 304407 - RNA, 32 nt, Human
accuuagcacuaaggagauugaguaaggaccu

SEQ ID NO: 304408 - RNA, 32 nt, Human
accuuagcagagggcaaguucuuucaucgugg

SEQ ID NO: 304409 - RNA, 32 nt, Human
accuuagccacuuuggacacauguucucagga

SEQ ID NO: 304410 - RNA, 32 nt, Human
accuuagccucuccaguagcuggaacuacagg

SEQ ID NO: 304411 - RNA, 32 nt, Human
accuuagguaacauaccugcagcugcuuuucu

SEQ ID NO: 304412 - RNA, 32 nt, Human
accuuaggugaugcacugugcccagccauucc

SEQ ID NO: 304413 - RNA, 32 nt, Human
accuuagugaggccucuggccuagccagagag

SEQ ID NO: 304414 - RNA, 32 nt, Human
accuuaguuccagaagacccaaaggagaguac

SEQ ID NO: 304415 - RNA, 32 nt, Human
accuuauagguuaaugaaugucucuaagauau

SEQ ID NO: 304416 - RNA, 32 nt, Human
accuuauccugauccugaagacgagauuccag

SEQ ID NO: 304417 - RNA, 32 nt, Human
accuuaucuccuugugcucaggccagugucuu

SEQ ID NO: 304418 - RNA, 32 nt, Human
accuuaugaacaaauuaacaggcucuggaccu

SEQ ID NO: 304419 - RNA, 32 nt, Human
accuuaugcaugaacauuucccagacuuucau

SEQ ID NO: 304420 - RNA, 32 nt, Human
accuuauguagugaguucuuccaaaauauaau

SEQ ID NO: 304421 - RNA, 32 nt, Human
accuuaugugccagaggcuccugaccaccaua

SEQ ID NO: 304422 - RNA, 32 nt, Human
accuuauucccaggcuggagugcaaugucgug

SEQ ID NO: 304423 - RNA, 32 nt, Human
accuuauugcagucauggcuuucacaaauuac

SEQ ID NO: 304424 - RNA, 32 nt, Human
accuuauuuauucaaaaccuauaaggugguau

SEQ ID NO: 304425 - RNA, 32 nt, Human
accuucaaaccuugccuccgaggcugggccug

SEQ ID NO: 304426 - RNA, 32 nt, Human
accuucaacauccggcucaaugccuccaacgc

SEQ ID NO: 304427 - RNA, 32 nt, Human
accuucaacaucuggcucaaugccuccaacgc

SEQ ID NO: 304428 - RNA, 32 nt, Human
accuucaagggcaucaucagcgcacaaccagc

SEQ ID NO: 304429 - RNA, 32 nt, Human
accuucacagcccagaucugcuggguuuugag

SEQ ID NO: 304430 - RNA, 32 nt, Human
accuucaccauuaacuugcugugugaccuugg

SEQ ID NO: 304431 - RNA, 32 nt, Human
accuucaccccgagacagguccugacacaccc

SEQ ID NO: 304432 - RNA, 32 nt, Human
accuucacccgcuucagggggauuccagcuug

SEQ ID NO: 304433 - RNA, 32 nt, Human
accuucacccugucauggucucagggaacagc

SEQ ID NO: 304434 - RNA, 32 nt, Human
accuucaccgcccagguucaagcgauucucuu

SEQ ID NO: 304435 - RNA, 32 nt, Human
accuucaccucccagguucaagcgauucuccu

SEQ ID NO: 304436 - RNA, 32 nt, Human
accuucaccuccccgguucaagcaauucuccu

SEQ ID NO: 304437 - RNA, 32 nt, Human
accuucaccugugcugcacuccagcugaccca

SEQ ID NO: 304438 - RNA, 32 nt, Human
accuucacgucaugaagguucuggaagguuuu

SEQ ID NO: 304439 - RNA, 32 nt, Human
accuucacucugguauuccugcugucuguguu

SEQ ID NO: 304440 - RNA, 32 nt, Human
accuucacuggggaaaggcugggagccucugg

SEQ ID NO: 304441 - RNA, 32 nt, Human
accuucagaacagccaucugugcccagcucug

SEQ ID NO: 304442 - RNA, 32 nt, Human
accuucagaccaccaccgcauauucugagccu

SEQ ID NO: 304443 - RNA, 32 nt, Human
accuucagacucuauucuuuacccuuccauug

SEQ ID NO: 304444 - RNA, 32 nt, Human
accuucagcggcgcgagcccaagccuucucca

SEQ ID NO: 304445 - RNA, 32 nt, Human
accuucagcuacuuggagauucauggcgucgu

SEQ ID NO: 304446 - RNA, 21 nt, Human
accuucagcuuuggaagugac

SEQ ID NO: 304447 - RNA, 32 nt, Human
accuucaggagaacgagaaggcugccugauca

SEQ ID NO: 304448 - RNA, 32 nt, Human
accuucaggauggagacaggaaaguguggauc

SEQ ID NO: 304449 - RNA, 32 nt, Human
accuucagguucuagaagauugguugcacucc

SEQ ID NO: 304450 - RNA, 32 nt, Human
accuucagucuuggacauccuaccuccaacug

SEQ ID NO: 304451 - RNA, 32 nt, Human
accuucagugcugguggcccucaggcccacag

SEQ ID NO: 304452 - RNA, 32 nt, Human
accuucagugcuguguguuuccacagcgccaa

SEQ ID NO: 304453 - RNA, 32 nt, Human
accuucaguuagagaauacucuuaguagucau

SEQ ID NO: 304454 - RNA, 32 nt, Human
accuucauagcauacuccuucccccucaggug

SEQ ID NO: 304455 - RNA, 32 nt, Human
accuucauaugcacuuuguucuaucuguugcg

SEQ ID NO: 304456 - RNA, 32 nt, Human
accuucauccacccacucaccggcaaaccccu

SEQ ID NO: 304457 - RNA, 32 nt, Human
accuucaucccuggcccugcagaggccugcuu

SEQ ID NO: 304458 - RNA, 32 nt, Human
accuucauccugcugcucacgcuggccauccu

SEQ ID NO: 304459 - RNA, 32 nt, Human
accuucaucuccuccauguccugggccagccu

SEQ ID NO: 304460 - RNA, 32 nt, Human
accuucaucuuucugaccuccuccuauucugu

SEQ ID NO: 304461 - RNA, 32 nt, Human
accuucaugccugggguuucucucccaaaagc

SEQ ID NO: 304462 - RNA, 32 nt, Human
accuucauuccauagcccugaguuucugugug

SEQ ID NO: 304463 - RNA, 32 nt, Human
accuucauugauuccucccuacacuggacuaa

SEQ ID NO: 304464 - RNA, 32 nt, Human
accuuccaacuuccuguggccugaagaagcac

SEQ ID NO: 304465 - RNA, 19 nt, Human
accuuccacaccccugccc

SEQ ID NO: 304466 - RNA, 23 nt, Human
accuuccagagcccaaggucagg

SEQ ID NO: 304467 - RNA, 32 nt, Human
accuuccagcagugccugcuucuggaacagga

SEQ ID NO: 304468 - RNA, 32 nt, Human
accuuccagcccucaguccugcccucaagaga

SEQ ID NO: 304469 - RNA, 32 nt, Human
accuuccagcccugccgccccugcugcaucuu

SEQ ID NO: 304470 - RNA, 20 nt, Human
accuucccaacugcugcgug

SEQ ID NO: 304471 - RNA, 32 nt, Human
accuucccacuggccucaagugagccaagaaa

SEQ ID NO: 304472 - RNA, 32 nt, Human
accuucccagcucucccucuggcccugcuucu

SEQ ID NO: 304473 - RNA, 24 nt, Human
accuucccauccccugcugaacca

SEQ ID NO: 304474 - RNA, 32 nt, Human
accuuccccaaaguccugacgucgcuguuugc

SEQ ID NO: 304475 - RNA, 32 nt, Human
accuuccccacuggugaugaccuaggcaggaa

SEQ ID NO: 304476 - RNA, 32 nt, Human
accuuccccaggagagacucugccuuuagggu

SEQ ID NO: 304477 - RNA, 32 nt, Human
accuuccccaggcuggacgugguggcucacgc

SEQ ID NO: 304478 - RNA, 32 nt, Human
accuuccccaucucccugccagccccuaacua

SEQ ID NO: 304479 - RNA, 32 nt, Human
accuuccccuccauuccccacuucucucuccc

SEQ ID NO: 304480 - RNA, 32 nt, Human
accuucccuacuaaggcucugccacaagcgca

SEQ ID NO: 304481 - RNA, 32 nt, Human
accuucccuccccuauuguccugugacccugc

SEQ ID NO: 304482 - RNA, 32 nt, Human
accuucccuccccuucccacuccuuccggagu

SEQ ID NO: 304483 - RNA, 32 nt, Human
accuucccuccuggaaccacacuacuugaauc

SEQ ID NO: 304484 - RNA, 32 nt, Human
accuucccucucucuucuaccuccgucucgcu

SEQ ID NO: 304485 - RNA, 32 nt, Human
accuucccugaggacacucaauaaagguuccu

SEQ ID NO: 304486 - RNA, 32 nt, Human
accuucccugcaggccgcuguucaugucugga

SEQ ID NO: 304487 - RNA, 23 nt, Human
accuucccugccccucacagggg

SEQ ID NO: 304488 - RNA, 32 nt, Human
accuucccugcuggccugcacacagcugcuca

SEQ ID NO: 304489 - RNA, 32 nt, Human
accuucccuuccuugaucccuggaccagacuc

SEQ ID NO: 304490 - RNA, 21 nt, Human
accuuccggaaaagugcugga

SEQ ID NO: 304491 - RNA, 32 nt, Human
accuuccguaauuccaggcuuguggccccaaa

SEQ ID NO: 304492 - RNA, 32 nt, Human
accuuccuagugagcagcugcccagcuccugc

SEQ ID NO: 304493 - RNA, 32 nt, Human
accuuccucaagggacugugacccuuugggga

SEQ ID NO: 304494 - RNA, 32 nt, Human
accuuccucaggcucacuccaccuacaucccc

SEQ ID NO: 304495 - RNA, 32 nt, Human
accuuccucaugcaugugaugaucuuauugua

SEQ ID NO: 304496 - RNA, 32 nt, Human
accuuccuccacccuccacccugggcugcuac

SEQ ID NO: 304497 - RNA, 32 nt, Human
accuuccuccacuacgugcuaggcccuucgcu

SEQ ID NO: 304498 - RNA, 18 nt, Human
accuuccuccaucaugua

SEQ ID NO: 304499 - RNA, 32 nt, Human
accuuccucccacccaccccugccuugcuuuu

SEQ ID NO: 304500 - RNA, 32 nt, Human
accuuccucccacucuaaccaccgucacccug

SEQ ID NO: 304501 - RNA, 25 nt, Human
accuuccuccucccuuacugaacca

SEQ ID NO: 304502 - RNA, 23 nt, Human
accuuccucuagggacacugggg

SEQ ID NO: 304503 - RNA, 32 nt, Human
accuuccucucaguaacuacagagaggacguu

SEQ ID NO: 304504 - RNA, 32 nt, Human
accuuccucuggggcucuaggguugcuggagc

SEQ ID NO: 304505 - RNA, 32 nt, Human
accuuccucugguccagcaccaccuggauguu

SEQ ID NO: 304506 - RNA, 32 nt, Human
accuuccugaauagcugagacuacaggcgugu

SEQ ID NO: 304507 - RNA, 32 nt, Human
accuuccugaggcuucccuccugcugcuacca

SEQ ID NO: 304508 - RNA, 32 nt, Human
accuuccugcugggggcagggggugagggagg

SEQ ID NO: 304509 - RNA, 32 nt, Human
accuuccugcugucuuccccucccucaacccc

SEQ ID NO: 304510 - RNA, 32 nt, Human
accuuccuggaggagcugcuguuugagccagc

SEQ ID NO: 304511 - RNA, 32 nt, Human
accuuccuggcagggaaagugggugaacagag

SEQ ID NO: 304512 - RNA, 24 nt, Human
accuuccuggcuaacauggugaaa

SEQ ID NO: 304513 - RNA, 32 nt, Human
accuuccuggggaggccccaggagagugaauc

SEQ ID NO: 304514 - RNA, 32 nt, Human
accuuccuuaagaaaauacaaaauuaggaaca

SEQ ID NO: 304515 - RNA, 32 nt, Human
accuuccuucauguggagggacgcagccucau

SEQ ID NO: 304516 - RNA, 32 nt, Human
accuuccuuccaccauuuuauuccguccuguu

SEQ ID NO: 304517 - RNA, 32 nt, Human
accuuccuuccucuucccucuucuaggacaca

SEQ ID NO: 304518 - RNA, 32 nt, Human
accuuccuuccuucccccuccucccccuccuu

SEQ ID NO: 304519 - RNA, 32 nt, Human
accuuccuuuaaauuuguuauaacuccagcua

SEQ ID NO: 304520 - RNA, 32 nt, Human
accuuccuuugucuuacauuggcuuuuuaaau

SEQ ID NO: 304521 - RNA, 32 nt, Human
accuucgaagcaucaaugcacacaccugcugu

SEQ ID NO: 304522 - RNA, 32 nt, Human
accuucgaggcaggagcccucucauggugaac

SEQ ID NO: 304523 - RNA, 32 nt, Human
accuucgaguugcagcccaugaccucaccugg

SEQ ID NO: 304524 - RNA, 32 nt, Human
accuucgccaccuggguuccagcaauucuccu

SEQ ID NO: 304525 - RNA, 32 nt, Human
accuucgccucccagguucaagcaauucuccu

SEQ ID NO: 304526 - RNA, 32 nt, Human
accuucgcuagcagggagugggaggcuucuuu

SEQ ID NO: 304527 - RNA, 32 nt, Human
accuucgggcugugcccggggaaaggcaaggu

SEQ ID NO: 304528 - RNA, 32 nt, Human
accuucgucccuuugugcuuuguaaagcaaac

SEQ ID NO: 304529 - RNA, 32 nt, Human
accuucgugggaacaggaccguaagaugaugu

SEQ ID NO: 304530 - RNA, 32 nt, Human
accuucguugcaacuucucccauccgagucac

SEQ ID NO: 304531 - RNA, 32 nt, Human
accuucucaccagauuccccugaauccaaacu

SEQ ID NO: 304532 - RNA, 32 nt, Human
accuucucaccuuuugucaacggcaaaggcag

SEQ ID NO: 304533 - RNA, 32 nt, Human
accuucucagccagcagcuccagcucagagca

SEQ ID NO: 304534 - RNA, 32 nt, Human
accuucuccuaaggagcuugcccugcaguaag

SEQ ID NO: 304535 - RNA, 32 nt, Human
accuucucuagggaggagucaaauguagguca

SEQ ID NO: 304536 - RNA, 32 nt, Human
accuucucucacucauaauucuucaggccuuu

SEQ ID NO: 304537 - RNA, 32 nt, Human
accuucucucagggaugaccuaucaguuugag

SEQ ID NO: 304538 - RNA, 32 nt, Human
accuucucuccccuccucucugcuuuaauuuu

SEQ ID NO: 304539 - RNA, 32 nt, Human
accuucucuccuccugaaauagguccuuuaga

SEQ ID NO: 304540 - RNA, 32 nt, Human
accuucucuccucuugucauucagcucucucu

SEQ ID NO: 304541 - RNA, 32 nt, Human
accuucucucuccaccccuccuccauccaccc

SEQ ID NO: 304542 - RNA, 32 nt, Human
accuucucucugagagccgggcagaggcuccg

SEQ ID NO: 304543 - RNA, 32 nt, Human
accuucucugcugagagcugcagagaugaccu

SEQ ID NO: 304544 - RNA, 32 nt, Human
accuucucuucucuugucacuagggggacuag

SEQ ID NO: 304545 - RNA, 32 nt, Human
accuucugcaaaaguaaaaacucucuuaguaa

SEQ ID NO: 304546 - RNA, 32 nt, Human
accuucugcccuugcuucuggugacagcccag

SEQ ID NO: 304547 - RNA, 25 nt, Human
accuucugccgccgccaccacagcc

SEQ ID NO: 304548 - RNA, 32 nt, Human
accuucugccuggaauagcucaaguucuuaaa

SEQ ID NO: 304549 - RNA, 22 nt, Human
accuucugcucaauuuccuuuc

SEQ ID NO: 304550 - RNA, 18 nt, Human
accuucugcuucccugga

SEQ ID NO: 304551 - RNA, 32 nt, Human
accuucuggaagagaagacuggcagaauauuu

SEQ ID NO: 304552 - RNA, 32 nt, Human
accuucugguugcuucagaccugacaccgucc

SEQ ID NO: 304553 - RNA, 32 nt, Human
accuucuguaccaugccuucagaaaccuucuu

SEQ ID NO: 304554 - RNA, 32 nt, Human
accuucuguggacaagguauugugcuaccagc

SEQ ID NO: 304555 - RNA, 32 nt, Human
accuucugugguuccccuggguggagauuucc

SEQ ID NO: 304556 - RNA, 32 nt, Human
accuucuguuuccaugucacagcuccaccaua

SEQ ID NO: 304557 - RNA, 32 nt, Human
accuucuuaccucccagcuaccucucaugugg

SEQ ID NO: 304558 - RNA, 32 nt, Human
accuucuucaaguuccugacccucucugggcu

SEQ ID NO: 304559 - RNA, 32 nt, Human
accuucuuccuuucugcgccaggauuugggaa

SEQ ID NO: 304560 - RNA, 32 nt, Human
accuucuuggcucugugcauccuugaaaccag

SEQ ID NO: 304561 - RNA, 32 nt, Human
accuucuuggggacucgggggcuggucugaug

SEQ ID NO: 304562 - RNA, 32 nt, Human
accuucuugguugaaguuguguuaacaaugca

SEQ ID NO: 304563 - RNA, 32 nt, Human
accuucuuucccuccauugucugaguaugcuc

SEQ ID NO: 304564 - RNA, 32 nt, Human
accuugaaauaaaucacuucugaccuugaaau

SEQ ID NO: 304565 - RNA, 32 nt, Human
accuugaacaucucccgucacagcagguacug

SEQ ID NO: 304566 - RNA, 32 nt, Human
accuugaacugugcucaacagccuggcccuuu

SEQ ID NO: 304567 - RNA, 32 nt, Human
accuugaagcauggucagcagcagagagagca

SEQ ID NO: 304568 - RNA, 20 nt, Human
accuugaaggcaucgugugg

SEQ ID NO: 304569 - RNA, 32 nt, Human
accuugaagggccuugccccuggacacccugu

SEQ ID NO: 304570 - RNA, 32 nt, Human
accuugacaacaggcgcauccucccaggccac

SEQ ID NO: 304571 - RNA, 32 nt, Human
accuugacaguacguaguauacauugugguuu

SEQ ID NO: 304572 - RNA, 32 nt, Human
accuugacauugauuuugcuucccaucuuuga

SEQ ID NO: 304573 - RNA, 32 nt, Human
accuugaccaaaggggaagagagacacuuggg

SEQ ID NO: 304574 - RNA, 32 nt, Human
accuugaccaucguccuuccucucaagcuagc

SEQ ID NO: 304575 - RNA, 32 nt, Human
accuugacgcaaaaacucaaaccacaaauguu

SEQ ID NO: 304576 - RNA, 32 nt, Human
accuugacgucccagguucaagcgauucucuc

SEQ ID NO: 304577 - RNA, 32 nt, Human
accuugacgugagacuaaaacgugaccguagg

SEQ ID NO: 304578 - RNA, 32 nt, Human
accuugacuaguuucacaauuuugccucaagu

SEQ ID NO: 304579 - RNA, 32 nt, Human
accuugacuuauauuuuucaugacguuucaug

SEQ ID NO: 304580 - RNA, 32 nt, Human
accuugagagagaagcauugggggugcaagug

SEQ ID NO: 304581 - RNA, 32 nt, Human
accuugagauccacccuccacagccucccaaa

SEQ ID NO: 304582 - RNA, 32 nt, Human
accuugagaugauucugcuacuuuccagacuu

SEQ ID NO: 304583 - RNA, 23 nt, Human
accuugagcagacccucuggcua

SEQ ID NO: 304584 - RNA, 32 nt, Human
accuugagcccaagcagcacuuugggucaugg

SEQ ID NO: 304585 - RNA, 32 nt, Human
accuugagcccaaguccuuuuccguuggcuga

SEQ ID NO: 304586 - RNA, 32 nt, Human
accuugagccugcgacccccuaccucacaggg

SEQ ID NO: 304587 - RNA, 32 nt, Human
accuugagcugguuauuucuccucucugagcc

SEQ ID NO: 304588 - RNA, 32 nt, Human
accuugagcuugggaauugaacuggggucacc

SEQ ID NO: 304589 - RNA, 32 nt, Human
accuugaggcccaagacccaggacaaggaaca

SEQ ID NO: 304590 - RNA, 32 nt, Human
accuugaggggcugcgggucugagggaggaga

SEQ ID NO: 304591 - RNA, 32 nt, Human
accuugaguauuguuaaauggagagaaaggca

SEQ ID NO: 304592 - RNA, 19 nt, Human
accuugaucaacucacuuu

SEQ ID NO: 304593 - RNA, 32 nt, Human
accuugauucauucacccuugauucauuucuc

SEQ ID NO: 304594 - RNA, 18 nt, Human
accuugcacccugcacca

SEQ ID NO: 304595 - RNA, 32 nt, Human
accuugcagacacgagccacacgggccacacg

SEQ ID NO: 304596 - RNA, 32 nt, Human
accuugcagagcagcaagaggcucucuccaga

SEQ ID NO: 304597 - RNA, 32 nt, Human
accuugcagccugcucaggucuuugugcucug

SEQ ID NO: 304598 - RNA, 32 nt, Human
accuugcaggcacuaguccuuuacagaugaca

SEQ ID NO: 304599 - RNA, 32 nt, Human
accuugcaggugcaguuuccuuggggaccccu

SEQ ID NO: 304600 - RNA, 32 nt, Human
accuugcaguagcagaggcaaugacaugaguu

SEQ ID NO: 304601 - RNA, 32 nt, Human
accuugcauuucauuucaacacugcuucaagg

SEQ ID NO: 304602 - RNA, 32 nt, Human
accuugccagcaucuguuauuuauugacuuuc

SEQ ID NO: 304603 - RNA, 32 nt, Human
accuugccccucucugucauagcuaacaggaa

SEQ ID NO: 304604 - RNA, 32 nt, Human
accuugccgccacccccuacccuaccgagcgg

SEQ ID NO: 304605 - RNA, 32 nt, Human
accuugccggccacuccuccagcugccagggg

SEQ ID NO: 304606 - RNA, 32 nt, Human
accuugccucuuucuuccuuuuuaguauccuc

SEQ ID NO: 304607 - RNA, 32 nt, Human
accuugccuuuccuucuugugggcaucuggga

SEQ ID NO: 304608 - RNA, 24 nt, Human
accuugcuccccacugcccagggc

SEQ ID NO: 304609 - RNA, 32 nt, Human
accuugcucugccaucccuggcagcccccacc

SEQ ID NO: 304610 - RNA, 32 nt, Human
accuugcuguucgcugcugugucgucuucuaa

SEQ ID NO: 304611 - RNA, 32 nt, Human
accuugcuuuacacaaaacaccuguguauaaa

SEQ ID NO: 304612 - RNA, 32 nt, Human
accuuggaggaggagagguuggugacaugcau

SEQ ID NO: 304613 - RNA, 32 nt, Human
accuuggaggcagagguugcagugagcugaga

SEQ ID NO: 304614 - RNA, 32 nt, Human
accuuggaggcccugcacugccagcaucugga

SEQ ID NO: 304615 - RNA, 32 nt, Human
accuuggaggcggagguugcauugagcugaga

SEQ ID NO: 304616 - RNA, 32 nt, Human
accuuggaggugaacuucucaccugagggcug

SEQ ID NO: 304617 - RNA, 32 nt, Human
accuuggagguggagguuguggugagccauga

SEQ ID NO: 304618 - RNA, 32 nt, Human
accuuggauaccacucucucagccacagaaac

SEQ ID NO: 304619 - RNA, 32 nt, Human
accuuggauaucuauugaauguuaaacaucuc

SEQ ID NO: 304620 - RNA, 32 nt, Human
accuuggcagcccaggccgggguggagcaugg

SEQ ID NO: 304621 - RNA, 32 nt, Human
accuuggccacucuguuucuccaccccagcac

SEQ ID NO: 304622 - RNA, 32 nt, Human
accuuggccccaggaacccugggaguggccuu

SEQ ID NO: 304623 - RNA, 32 nt, Human
accuuggccccucccccgaccuugccaguguu

SEQ ID NO: 304624 - RNA, 32 nt, Human
accuuggccucccguguucaagcgauucuccu

SEQ ID NO: 304625 - RNA, 32 nt, Human
accuuggccuccuagguucaagcaauucuccu

SEQ ID NO: 304626 - RNA, 32 nt, Human
accuuggccuucuccccucuucugagcuaguu

SEQ ID NO: 304627 - RNA, 32 nt, Human
accuuggcucacugcaaccuccaccucccagg

SEQ ID NO: 304628 - RNA, 32 nt, Human
accuuggcucacugcaaccuccaggccagccu

SEQ ID NO: 304629 - RNA, 32 nt, Human
accuuggcucacugcaaccuccaucuccgggg

SEQ ID NO: 304630 - RNA, 32 nt, Human
accuuggcucacugcaaccuccgccucccggg

SEQ ID NO: 304631 - RNA, 32 nt, Human
accuuggcucacugcaaccucugccucccugg

SEQ ID NO: 304632 - RNA, 32 nt, Human
accuugggaacugcaggagcccguucugccuc

SEQ ID NO: 304633 - RNA, 32 nt, Human
accuugggaccagcaaacauuuugcccagcug

SEQ ID NO: 304634 - RNA, 32 nt, Human
accuugggaggaaggggcuacuccgcccacgu

SEQ ID NO: 304635 - RNA, 32 nt, Human
accuugggcaaguuccugucccucucugagcc

SEQ ID NO: 304636 - RNA, 32 nt, Human
accuugggcaggcagacugagaagggacugug

SEQ ID NO: 304637 - RNA, 32 nt, Human
accuugggcccucaggggcugcagaggaaccu

SEQ ID NO: 304638 - RNA, 32 nt, Human
accuugggcccuggaagaguccuccaccccau

SEQ ID NO: 304639 - RNA, 32 nt, Human
accuuggggaccuguugauuaauugguggccc

SEQ ID NO: 304640 - RNA, 32 nt, Human
accuugguaccaucaagcucagccuggaaguc

SEQ ID NO: 304641 - RNA, 32 nt, Human
accuugguagcuaugaugagagcuauuaucau

SEQ ID NO: 304642 - RNA, 32 nt, Human
accuuggugaugcggccaaggacgucugcucu

SEQ ID NO: 304643 - RNA, 32 nt, Human
accuuggugggacuucuaacagaucagccuga

SEQ ID NO: 304644 - RNA, 32 nt, Human
accuugguguggguuacugggugcaggaugaa

SEQ ID NO: 304645 - RNA, 32 nt, Human
accuugguuaccuguguugcugucuacugaca

SEQ ID NO: 304646 - RNA, 32 nt, Human
accuugguuucucaagguaucaucagggauug

SEQ ID NO: 304647 - RNA, 32 nt, Human
accuuguagacacuuagccaucaagaaucaag

SEQ ID NO: 304648 - RNA, 32 nt, Human
accuuguagccccucaccuucucuccccaaug

SEQ ID NO: 304649 - RNA, 32 nt, Human
accuuguagugagccgagaucgcgccacugug

SEQ ID NO: 304650 - RNA, 22 nt, Human
accuuguauauacccugcacca

SEQ ID NO: 304651 - RNA, 32 nt, Human
accuuguaucuucaucaucagcaacaacaaaa

SEQ ID NO: 304652 - RNA, 32 nt, Human
accuugucacccaggcuagagugcaguggcac

SEQ ID NO: 304653 - RNA, 32 nt, Human
accuugucacugccgucugugcacugauucac

SEQ ID NO: 304654 - RNA, 32 nt, Human
accuuguccaaccagcuacccaccucaacucc

SEQ ID NO: 304655 - RNA, 32 nt, Human
accuuguccuccauuuccuuuucucauccaaa

SEQ ID NO: 304656 - RNA, 32 nt, Human
accuuguccugccuuuuugcagauaggcuuuc

SEQ ID NO: 304657 - RNA, 18 nt, Human
accuugucucuaaaaaua

SEQ ID NO: 304658 - RNA, 32 nt, Human
accuugucugcucaucccuaacuccuguuccu

SEQ ID NO: 304659 - RNA, 32 nt, Human
accuugucuuuguccccacuggauagcuguua

SEQ ID NO: 304660 - RNA, 23 nt, Human
accuugugccgcagccugaccca

SEQ ID NO: 304661 - RNA, 32 nt, Human
accuugugccuucuguccuaccaguuuucuuu

SEQ ID NO: 304662 - RNA, 32 nt, Human
accuugugggaucaccuuuucccagcuggcua

SEQ ID NO: 304663 - RNA, 32 nt, Human
accuugugggcuggugcaggccccugagguuu

SEQ ID NO: 304664 - RNA, 32 nt, Human
accuuguggggaggggaaccuugaagggagcg

SEQ ID NO: 304665 - RNA, 32 nt, Human
accuuguuagccaccagugcaagcacaugggu

SEQ ID NO: 304666 - RNA, 32 nt, Human
accuuguucccaagaaguguuuggaaugugcu

SEQ ID NO: 304667 - RNA, 32 nt, Human
accuuguucccuuuuuaucuccuucacugcac

SEQ ID NO: 304668 - RNA, 32 nt, Human
accuuguucucuagguccugggcuuucuaaag

SEQ ID NO: 304669 - RNA, 17 nt, Human
accuuguuggagccugc

SEQ ID NO: 304670 - RNA, 32 nt, Human
accuuguuuggcuacauuaccucagugaacaa

SEQ ID NO: 304671 - RNA, 32 nt, Human
accuuuacauuuugcuuaauguaacaauauau

SEQ ID NO: 304672 - RNA, 32 nt, Human
accuuuacccuuuaaugguaagacuuguauuu

SEQ ID NO: 304673 - RNA, 32 nt, Human
accuuuaccuagaucagccaucagccugucaa

SEQ ID NO: 304674 - RNA, 32 nt, Human
accuuuacucuucgcccuuccuccuggcaugg

SEQ ID NO: 304675 - RNA, 32 nt, Human
accuuuacugauuuccagaggaaagcuagagg

SEQ ID NO: 304676 - RNA, 32 nt, Human
accuuuagaacaggagacuugagcuugaccua

SEQ ID NO: 304677 - RNA, 32 nt, Human
accuuuagcagcuuuuuauuguggacuaaugc

SEQ ID NO: 304678 - RNA, 32 nt, Human
accuuuagcugcagcggcuacgcugccacgug

SEQ ID NO: 304679 - RNA, 24 nt, Human
accuuuaucgccaaugcacagcuu

SEQ ID NO: 304680 - RNA, 32 nt, Human
accuuucaccagguuuuuggugccauuuaccc

SEQ ID NO: 304681 - RNA, 32 nt, Human
accuuucacucaugagcaaugugcccaagaac

SEQ ID NO: 304682 - RNA, 32 nt, Human
accuuucacugaggucaggagccccugagcag

SEQ ID NO: 304683 - RNA, 32 nt, Human
accuuucacugcaaugaccuuucaaugcaaua

SEQ ID NO: 304684 - RNA, 32 nt, Human
accuuucagacccucugugugggcugggcugg

SEQ ID NO: 304685 - RNA, 32 nt, Human
accuuucagccugugagccucugcacaaagca

SEQ ID NO: 304686 - RNA, 32 nt, Human
accuuucagcuggcagaguuagcauuggguag

SEQ ID NO: 304687 - RNA, 32 nt, Human
accuuucaugccacugcagccacuggaaauac

SEQ ID NO: 304688 - RNA, 32 nt, Human
accuuucauuuucaaguaauucacaguuacag

SEQ ID NO: 304689 - RNA, 32 nt, Human
accuuuccaagguggggauggaagcacagucg

SEQ ID NO: 304690 - RNA, 32 nt, Human
accuuuccagaagacuaaaggugauagcaaca

SEQ ID NO: 304691 - RNA, 21 nt, Human
accuuuccauuguugcaucuu

SEQ ID NO: 304692 - RNA, 32 nt, Human
accuuucccucgggguuaacaaacaucuucaa

SEQ ID NO: 304693 - RNA, 32 nt, Human
accuuucccuucugaaagucugguuccugccc

SEQ ID NO: 304694 - RNA, 32 nt, Human
accuuuccucaccucuaucucucucaaccaga

SEQ ID NO: 304695 - RNA, 32 nt, Human
accuuuccucuccuggcgggcccggcggcggg

SEQ ID NO: 304696 - RNA, 32 nt, Human
accuuuccugcacuccacggcggcagugacaa

SEQ ID NO: 304697 - RNA, 32 nt, Human
accuuucgcuccugcccucugcccggcccuac

SEQ ID NO: 304698 - RNA, 32 nt, Human
accuuucucaacauaaaaggacccacacagua

SEQ ID NO: 304699 - RNA, 32 nt, Human
accuuucucaguuaccagaaucuugcugcuaa

SEQ ID NO: 304700 - RNA, 32 nt, Human
accuuucucauggauuuuuguggugugggcca

SEQ ID NO: 304701 - RNA, 32 nt, Human
accuuucucaugggugcuguuagauuuuggca

SEQ ID NO: 304702 - RNA, 32 nt, Human
accuuucuccuagccgggugacccaggggauu

SEQ ID NO: 304703 - RNA, 32 nt, Human
accuuucucugccucucccacacucucccaga

SEQ ID NO: 304704 - RNA, 23 nt, Human
accuuucugaaucagacacaagc

SEQ ID NO: 304705 - RNA, 32 nt, Human
accuuucugagagaggcaccacugugaccuuc

SEQ ID NO: 304706 - RNA, 32 nt, Human
accuuucugccuggaagucuguuagccuuuca

SEQ ID NO: 304707 - RNA, 32 nt, Human
accuuucugucucucugggcuguggcugggca

SEQ ID NO: 304708 - RNA, 32 nt, Human
accuuucuucacugagauuccagugacaugag

SEQ ID NO: 304709 - RNA, 19 nt, Human
accuuucuuucaaccagua

SEQ ID NO: 304710 - RNA, 32 nt, Human
accuuugaaaacucuccugggguggaggagac

SEQ ID NO: 304711 - RNA, 32 nt, Human
accuuugaaguuaagggaaggacagguggaca

SEQ ID NO: 304712 - RNA, 24 nt, Human
accuuugagaagacaccauacuca

SEQ ID NO: 304713 - RNA, 32 nt, Human
accuuugagaguauccacaaagcaaugucuca

SEQ ID NO: 304714 - RNA, 32 nt, Human
accuuugaguucagucuacaccuaagcaggua

SEQ ID NO: 304715 - RNA, 32 nt, Human
accuuugauguuaaaggaauccuucauuuauu

SEQ ID NO: 304716 - RNA, 32 nt, Human
accuuugcacuugcugaaucugucuuuguuuc

SEQ ID NO: 304717 - RNA, 32 nt, Human
accuuugcccaaauccagcagaagagcaucuu

SEQ ID NO: 304718 - RNA, 32 nt, Human
accuuugccucccuaguucaagcgauuuuccu

SEQ ID NO: 304719 - RNA, 32 nt, Human
accuuugccuccuggguucaagcgauucuucu

SEQ ID NO: 304720 - RNA, 32 nt, Human
accuuugccugguacaguauggggguuguaaa

SEQ ID NO: 304721 - RNA, 32 nt, Human
accuuugcucacugccugagaccccuuccuua

SEQ ID NO: 304722 - RNA, 32 nt, Human
accuuugcugaguuccggggugcaauggggga

SEQ ID NO: 304723 - RNA, 32 nt, Human
accuuugcugucuccccuucagaaaaggcugg

SEQ ID NO: 304724 - RNA, 32 nt, Human
accuuuggaagacaugacaaagcugccuggac

SEQ ID NO: 304725 - RNA, 32 nt, Human
accuuuggacugccuuccuugggggucugaga

SEQ ID NO: 304726 - RNA, 32 nt, Human
accuuuggagaguuaauugucugugugaggug

SEQ ID NO: 304727 - RNA, 24 nt, Human
accuuuggauagaaaaguguuuga

SEQ ID NO: 304728 - RNA, 32 nt, Human
accuuuggcaaaauacucuugcccagauucug

SEQ ID NO: 304729 - RNA, 32 nt, Human
accuuuggccuuccucucuacauuuaagagua

SEQ ID NO: 304730 - RNA, 32 nt, Human
accuuugggcucuccagguccgagauccuagu

SEQ ID NO: 304731 - RNA, 32 nt, Human
accuuuggggcucguggugguggagagggcag

SEQ ID NO: 304732 - RNA, 32 nt, Human
accuuuguagcuccuccagccucugcagagac

SEQ ID NO: 304733 - RNA, 32 nt, Human
accuuugucaggcugggcgcgguggcucacuc

SEQ ID NO: 304734 - RNA, 32 nt, Human
accuuuguccccaccgcagacaggaccagggg

SEQ ID NO: 304735 - RNA, 32 nt, Human
accuuugucgcaccuuaaccagucaccacuug

SEQ ID NO: 304736 - RNA, 32 nt, Human
accuuugucucuuccucccuuugauuaauugc

SEQ ID NO: 304737 - RNA, 32 nt, Human
accuuugucuucuucaucuggcgccgguacug

SEQ ID NO: 304738 - RNA, 32 nt, Human
accuuugugagucagccaugcccgcaaagcgu

SEQ ID NO: 304739 - RNA, 32 nt, Human
accuuuguuggaugugggccuuagccuccagg

SEQ ID NO: 304740 - RNA, 32 nt, Human
accuuuguugggaggcgguuugggagaacaca

SEQ ID NO: 304741 - RNA, 32 nt, Human
accuuuguugucuuugaauucuuuaggcugca

SEQ ID NO: 304742 - RNA, 32 nt, Human
accuuuguuuguaucauagaucuuauuguaca

SEQ ID NO: 304743 - RNA, 32 nt, Human
accuuuuaaaggccacuggcaguaggauuuaa

SEQ ID NO: 304744 - RNA, 32 nt, Human
accuuuuaaguugacaacaugacucauauaua

SEQ ID NO: 304745 - RNA, 32 nt, Human
accuuuucauaccugguucaacaucagcgaau

SEQ ID NO: 304746 - RNA, 32 nt, Human
accuuuucauauuaaugacaaaauuagagucu

SEQ ID NO: 304747 - RNA, 32 nt, Human
accuuuucauucucucuuucuuuaucuuuguu

SEQ ID NO: 304748 - RNA, 32 nt, Human
accuuuucauucuuuucuuuauauucuagaca

SEQ ID NO: 304749 - RNA, 32 nt, Human
accuuuucauuuccugcucucuccccucuuuu

SEQ ID NO: 304750 - RNA, 21 nt, Human
accuuuuccaaagcuuccaga

SEQ ID NO: 304751 - RNA, 32 nt, Human
accuuuuccagaggaaccuguucuacggccag

SEQ ID NO: 304752 - RNA, 32 nt, Human
accuuuuccaguucuccaaagcgauguauuuu

SEQ ID NO: 304753 - RNA, 32 nt, Human
accuuuuccugucucugaccucaucugcuccc

SEQ ID NO: 304754 - RNA, 32 nt, Human
accuuuuccuuauuuuauugccaaucaggaca

SEQ ID NO: 304755 - RNA, 32 nt, Human
accuuuuccuucugguuuugagagacuuccuc

SEQ ID NO: 304756 - RNA, 32 nt, Human
accuuuucucacaaaaaggcaaauauugaagu

SEQ ID NO: 304757 - RNA, 32 nt, Human
accuuuucucccuggccuucugcuccaagcuc

SEQ ID NO: 304758 - RNA, 32 nt, Human
accuuuucuccgugaguuccucagccaggacu

SEQ ID NO: 304759 - RNA, 32 nt, Human
accuuuucuccuaaaacuucucuccuuucucu

SEQ ID NO: 304760 - RNA, 32 nt, Human
accuuuucuguggcuggcucuaccuuccuguc

SEQ ID NO: 304761 - RNA, 32 nt, Human
accuuuugaccauaacuguuuccccagagcag

SEQ ID NO: 304762 - RNA, 32 nt, Human
accuuuugaguggucuacuuguuuucucucuu

SEQ ID NO: 304763 - RNA, 32 nt, Human
accuuuugcaguccuugucaaacacacuccug

SEQ ID NO: 304764 - RNA, 32 nt, Human
accuuuugccuggguggcugccugagaaaggu

SEQ ID NO: 304765 - RNA, 32 nt, Human
accuuuugcuacugcuggaccaugauccgccu

SEQ ID NO: 304766 - RNA, 22 nt, Human
accuuuugcuguagauuuacca

SEQ ID NO: 304767 - RNA, 32 nt, Human
accuuuuggaaaugcccauugccgacuugaau

SEQ ID NO: 304768 - RNA, 32 nt, Human
accuuuuggucuucagccucccucagccccca

SEQ ID NO: 304769 - RNA, 32 nt, Human
accuuuuguucuagggacuagcacugcuauca

SEQ ID NO: 304770 - RNA, 32 nt, Human
accuuuuuaucuguucucuccaccuucaguuu

SEQ ID NO: 304771 - RNA, 32 nt, Human
accuuuuucuugcuauagccucccuccucugc

SEQ ID NO: 304772 - RNA, 32 nt, Human
accuuuuugguaucugugugacugcucugugc

SEQ ID NO: 304773 - RNA, 32 nt, Human
accuuuuuguuuuguagccugcuuuugcuuuc

SEQ ID NO: 304774 - RNA, 32 nt, Human
acgaaacugcaucaaaaugucaguuguaauuu

SEQ ID NO: 304775 - RNA, 32 nt, Human
acgaaacuuguggggcuacaggccaguggaac

SEQ ID NO: 304776 - RNA, 32 nt, Human
acgaaagaguucuguucagacuucugaagagc

SEQ ID NO: 304777 - RNA, 20 nt, Human
acgaaagauccaucccggaa

SEQ ID NO: 304778 - RNA, 32 nt, Human
acgaaagcaauguuggguuggggaagacagug

SEQ ID NO: 304779 - RNA, 32 nt, Human
acgaaaggcaggcgggcuguguacugggcccu

SEQ ID NO: 304780 - RNA, 32 nt, Human
acgaaaggcagggcugacugaauagccagggg

SEQ ID NO: 304781 - RNA, 32 nt, Human
acgaaaggcauagaaggagaagacaaaguguc

SEQ ID NO: 304782 - RNA, 32 nt, Human
acgaaagggagaccacaugugugcacagggaa

SEQ ID NO: 304783 - RNA, 32 nt, Human
acgaaauacuacagcccugcucccaggugugc

SEQ ID NO: 304784 - RNA, 32 nt, Human
acgaaaucaccuucaguuucugaggucacagc

SEQ ID NO: 304785 - RNA, 32 nt, Human
acgaaaucauuuuacucugacuccucaccguc

SEQ ID NO: 304786 - RNA, 32 nt, Human
acgaaaugcuagccagggugcaauggcucaug

SEQ ID NO: 304787 - RNA, 32 nt, Human
acgaacaaggacugggcuggguccagcuggug

SEQ ID NO: 304788 - RNA, 32 nt, Human
acgaacaauugggaaucuccugggacaacuug

SEQ ID NO: 304789 - RNA, 32 nt, Human
acgaacacacacccuucuccgcucccaggucu

SEQ ID NO: 304790 - RNA, 32 nt, Human
acgaacagccugacacauacgcacggggccgc

SEQ ID NO: 304791 - RNA, 31 nt, Human
acgaacaggccaauaaggagggagcagugcg

SEQ ID NO: 304792 - RNA, 32 nt, Human
acgaaccaggguggaagcgccaggagcagcug

SEQ ID NO: 304793 - RNA, 32 nt, Human
acgaacuuccugagcuuuucaggcucuaaugg

SEQ ID NO: 304794 - RNA, 32 nt, Human
acgaagacaccuggagcagggcaaacaccacu

SEQ ID NO: 304795 - RNA, 32 nt, Human
acgaagacagaagaaguaagaggcagggccgu

SEQ ID NO: 304796 - RNA, 32 nt, Human
acgaagacaugugaacuugguucaguccaaau

SEQ ID NO: 304797 - RNA, 32 nt, Human
acgaagaccagcuucugccacugccuuuccag

SEQ ID NO: 304798 - RNA, 32 nt, Human
acgaagacgagaugucacagagguccacucag

SEQ ID NO: 304799 - RNA, 21 nt, Human
acgaagagagccaucuuccag

SEQ ID NO: 304800 - RNA, 32 nt, Human
acgaagagcaggaagagguugcugagauuguu

SEQ ID NO: 304801 - RNA, 32 nt, Human
acgaagaggaggaggaugaggaggacacagaa

SEQ ID NO: 304802 - RNA, 21 nt, Human
acgaagaucaagccacggcug

SEQ ID NO: 304803 - RNA, 32 nt, Human
acgaagaugagguaggcauauaggggcuucug

SEQ ID NO: 304804 - RNA, 32 nt, Human
acgaagcaacagcagucagauccauuacaaag

SEQ ID NO: 304805 - RNA, 32 nt, Human
acgaagcaggacaggcagagcccaggguacug

SEQ ID NO: 304806 - RNA, 32 nt, Human
acgaagcccuccucagcuggccuguguuuggg

SEQ ID NO: 304807 - RNA, 32 nt, Human
acuagccugggcaacccagugagaccccguau

SEQ ID NO: 304808 - RNA, 32 nt, Human
acuagccugggcaauaugaugagacccugucu

SEQ ID NO: 304809 - RNA, 32 nt, Human
acuagccugggcgagacuucaucucuacaaaa

SEQ ID NO: 304810 - RNA, 24 nt, Human
acuagccuggucaacauggugaaa

SEQ ID NO: 304811 - RNA, 32 nt, Human
acuagccugugaucccagcacuuugggaggcc

SEQ ID NO: 304812 - RNA, 32 nt, Human
acuagccuucagauuacuuugcacuggaaccu

SEQ ID NO: 304813 - RNA, 32 nt, Human
acuagcgaggggcagagcacaccccagugcuu

SEQ ID NO: 304814 - RNA, 32 nt, Human
acuagcgucauccccagagggcuugguaaggg

SEQ ID NO: 304815 - RNA, 32 nt, Human
acuagcguguguuguccuucugccucagaucu

SEQ ID NO: 304816 - RNA, 32 nt, Human
acuagcuaaccaagaagagaggcagagaaggu

SEQ ID NO: 304817 - RNA, 32 nt, Human
acuagcuacauccucaggguaggaggaagaug

SEQ ID NO: 304818 - RNA, 32 nt, Human
acuagcuacugcacuccaaccugggcaacaua

SEQ ID NO: 304819 - RNA, 32 nt, Human
acuagcuaguuuaccuuaacugccuuuauuuu

SEQ ID NO: 304820 - RNA, 32 nt, Human
acuagcucgauggucugaaaacagagaugagc

SEQ ID NO: 304821 - RNA, 32 nt, Human
acuagcucuggcccugcaccuacucucacugg

SEQ ID NO: 304822 - RNA, 32 nt, Human
acuagcucuguugcuacuaagcagcuuuuacu

SEQ ID NO: 304823 - RNA, 32 nt, Human
acuagcugcucacaagccuguuccuucuucca

SEQ ID NO: 304824 - RNA, 32 nt, Human
acuagcuggaggacaccugaguacucuuaaag

SEQ ID NO: 304825 - RNA, 32 nt, Human
acuagcuggcacauuaucccuaccuuaguucu

SEQ ID NO: 304826 - RNA, 32 nt, Human
acuagcuggccuggcccuguugagucugcaca

SEQ ID NO: 304827 - RNA, 32 nt, Human
acuagcugggauuacagcugccugccaccgug

SEQ ID NO: 304828 - RNA, 32 nt, Human
acuagcugggauuacaggcacaagccaccaug

SEQ ID NO: 304829 - RNA, 32 nt, Human
acuagcugggauuacaggcgugcgccaccaug

SEQ ID NO: 304830 - RNA, 32 nt, Human
acuagcuggucaagggcaugacagugcuggag

SEQ ID NO: 304831 - RNA, 32 nt, Human
acuagcuguaagcggaacacccugccccaggg

SEQ ID NO: 304832 - RNA, 32 nt, Human
acuagcuguggucugaccuaguuaauuuacaa

SEQ ID NO: 304833 - RNA, 32 nt, Human
acuagcugugugaccuugggcaaguugcuuau

SEQ ID NO: 304834 - RNA, 32 nt, Human
acuagcugugugagcucuucugcccagguggg

SEQ ID NO: 304835 - RNA, 32 nt, Human
acuagcuucaaguugggauucccaccaccccu

SEQ ID NO: 304836 - RNA, 32 nt, Human
acuagcuuccaaaauguguucccuuuuugaau

SEQ ID NO: 304837 - RNA, 32 nt, Human
acuagcuugggugacagaggaagacugucuca

SEQ ID NO: 304838 - RNA, 32 nt, Human
acuagcuuugccugguuuugucuuuuaugcag

SEQ ID NO: 304839 - RNA, 32 nt, Human
acuagcuuuuuggccauuucaucuuccaguca

SEQ ID NO: 304840 - RNA, 32 nt, Human
acuaggaaaaauucacuuacguuauuuuaaaa

SEQ ID NO: 304841 - RNA, 32 nt, Human
acuaggaaacuugccauccucucagaauugcu

SEQ ID NO: 304842 - RNA, 32 nt, Human
acuaggaaaggaggaaagguaucagggauuuu

SEQ ID NO: 304843 - RNA, 32 nt, Human
acuaggacuagaggaauugucagcauuauugg

SEQ ID NO: 304844 - RNA, 32 nt, Human
acuaggacucagaaacgagaucgggaagacga

SEQ ID NO: 304845 - RNA, 28 nt, Human
acuaggagcagggcugccucuucucccu

SEQ ID NO: 304846 - RNA, 32 nt, Human
acuaggagccucagcaggauugcuaggaugug

SEQ ID NO: 304847 - RNA, 32 nt, Human
acuaggagcugucuuagaaaugacuucaaacu

SEQ ID NO: 304848 - RNA, 21 nt, Human
acuaggaggcagagguugcag

SEQ ID NO: 304849 - RNA, 32 nt, Human
acuaggaggcagagguugcagugagcaguuau

SEQ ID NO: 304850 - RNA, 32 nt, Human
acuaggaggcagagguugcagugagccgagau

SEQ ID NO: 304851 - RNA, 32 nt, Human
acuaggagggccuggcaaggaagugugcccuu

SEQ ID NO: 304852 - RNA, 32 nt, Human
acuaggaguaucucacuuuccacugagaaccc

SEQ ID NO: 304853 - RNA, 32 nt, Human
acuaggaguuuucucuggcuucaccuuuuuca

SEQ ID NO: 304854 - RNA, 32 nt, Human
acuaggauaauacaucuuccacacauuuggcc

SEQ ID NO: 304855 - RNA, 32 nt, Human
acuaggauauauaaaacagggacucuagcuag

SEQ ID NO: 304856 - RNA, 32 nt, Human
acuaggaugcagagaugaccucucgcugccuc

SEQ ID NO: 304857 - RNA, 32 nt, Human
acuaggaugcagauggaccacacuuugagaaa

SEQ ID NO: 304858 - RNA, 32 nt, Human
acuaggauuugaggaagucacagggaagcaga

SEQ ID NO: 304859 - RNA, 32 nt, Human
acuaggcaacagagccagacccugucucaaau

SEQ ID NO: 304860 - RNA, 32 nt, Human
acuaggcaagcagaagagugugagcucaucag

SEQ ID NO: 304861 - RNA, 32 nt, Human
acuaggcacuaacaucgcugacuugcaugauu

SEQ ID NO: 304862 - RNA, 32 nt, Human
acuaggcagccccagaucuggggaacagauga

SEQ ID NO: 304863 - RNA, 32 nt, Human
acuaggcauaggacaggaaguggggugguaag

SEQ ID NO: 304864 - RNA, 32 nt, Human
acuaggccagggauuagccacugugggagggu

SEQ ID NO: 304865 - RNA, 32 nt, Human
acuaggcccaggagucaagaaaagcuuuugug

SEQ ID NO: 304866 - RNA, 32 nt, Human
acuaggccccacucagccuggccuggacaccg

SEQ ID NO: 304867 - RNA, 32 nt, Human
acuaggccucuuuccagggccccacacucaca

SEQ ID NO: 304868 - RNA, 32 nt, Human
acuaggcucagagcaaccuccagccuucucca

SEQ ID NO: 304869 - RNA, 24 nt, Human
acuaggcugcauugcuuugaagag

SEQ ID NO: 304870 - RNA, 32 nt, Human
acuaggcuguaucccacacaaaacacgcacac

SEQ ID NO: 304871 - RNA, 32 nt, Human
acuaggcuuaauaccugggugaugacauaauc

SEQ ID NO: 304872 - RNA, 32 nt, Human
acuaggcuuaauaccugggugauuacauaauc

SEQ ID NO: 304873 - RNA, 32 nt, Human
acuaggcuucuccccucaggggcucuuucuga

SEQ ID NO: 304874 - RNA, 32 nt, Human
acuagggaccgccugggugaggugaggaccug

SEQ ID NO: 304875 - RNA, 32 nt, Human
acuagggaggagagaaagggacaaaagcaccc

SEQ ID NO: 304876 - RNA, 32 nt, Human
acuagggaggcugagccaggaggaucacuuga

SEQ ID NO: 304877 - RNA, 32 nt, Human
acuagggaggcugaggagggaggaucucuugu

SEQ ID NO: 304878 - RNA, 32 nt, Human
acuagggaggcugaggcaagaggcuugagacc

SEQ ID NO: 304879 - RNA, 32 nt, Human
acuagggaggcugaggcagaagaaucgcuuga

SEQ ID NO: 304880 - RNA, 32 nt, Human
acuagggaggcugaggcaggagaaucacuuga

SEQ ID NO: 304881 - RNA, 32 nt, Human
acuagggaggcugaggcaggagaaucgcuuga

SEQ ID NO: 304882 - RNA, 32 nt, Human
acuagggaggcugaggcaggagaaucucuuga

SEQ ID NO: 304883 - RNA, 32 nt, Human
acuagggaggcugaggugggaggaucacuuga

SEQ ID NO: 304884 - RNA, 32 nt, Human
acuagggaggcuuuugaacccaggaggcagag

SEQ ID NO: 304885 - RNA, 32 nt, Human
acuagggagggagggagagggagagagggaga

SEQ ID NO: 304886 - RNA, 32 nt, Human
acuagggagggagggagggaaggcagagaaaa

SEQ ID NO: 304887 - RNA, 32 nt, Human
acuagggcagggacaggauaagagggauuagg

SEQ ID NO: 304888 - RNA, 32 nt, Human
acuagggcaguaucuccucuagcuagugccca

SEQ ID NO: 304889 - RNA, 32 nt, Human
acuagggccauggcggagacagaccuggacac

SEQ ID NO: 304890 - RNA, 32 nt, Human
acuagggccugcaaauggagugggggaguccu

SEQ ID NO: 304891 - RNA, 32 nt, Human
acuaggggcauguagaguauaugaggaggcag

SEQ ID NO: 304892 - RNA, 32 nt, Human
acuagggguaccccaacucggagagaaggacc

SEQ ID NO: 304893 - RNA, 32 nt, Human
acuagggucgccggggaagcgguuugggagag

SEQ ID NO: 304894 - RNA, 32 nt, Human
acuagggucuggggacacagaaggagccggca

SEQ ID NO: 304895 - RNA, 32 nt, Human
acuaggguugacaugaaucccccugguucagg

SEQ ID NO: 304896 - RNA, 32 nt, Human
acuagguaagagaagcaccugauuggguagaa

SEQ ID NO: 304897 - RNA, 20 nt, Human
acuagguaagccaaggaguu

SEQ ID NO: 304898 - RNA, 32 nt, Human
acuagguacuuaauaaauauuugcuguugaug

SEQ ID NO: 304899 - RNA, 32 nt, Human
acuaggucaggaguucaagaccagccuggcca

SEQ ID NO: 304900 - RNA, 32 nt, Human
acuaggugccaggaaugcgccaccccauccuc

SEQ ID NO: 304901 - RNA, 32 nt, Human
acuaggugccgaccccucagaauauaacccuc

SEQ ID NO: 304902 - RNA, 32 nt, Human
acuaggugggcccuugaaggggagcccaacuc

SEQ ID NO: 304903 - RNA, 32 nt, Human
acuaggugugcaccacugcucuucuuauggag

SEQ ID NO: 304904 - RNA, 32 nt, Human
acuaggugugugugcacauguguagggugcag

SEQ ID NO: 304905 - RNA, 32 nt, Human
acuagguuuugagccacgggucagggugccac

SEQ ID NO: 304906 - RNA, 32 nt, Human
acuaguaacugagacuccuccagccuccuccc

SEQ ID NO: 304907 - RNA, 32 nt, Human
acuaguacauugaccagcgcugggugauacag

SEQ ID NO: 304908 - RNA, 32 nt, Human
acuaguagcucuggacugaggaauccucccug

SEQ ID NO: 304909 - RNA, 32 nt, Human
acuaguaggcagguuucucuuguugucuagac

SEQ ID NO: 304910 - RNA, 32 nt, Human
acuaguauuuugcuucaagccuucugaaaaua

SEQ ID NO: 304911 - RNA, 32 nt, Human
acuagucaaguaucuucuuuccuuuuccagua

SEQ ID NO: 304912 - RNA, 32 nt, Human
acuagucauaacuguuuauacaccacucucau

SEQ ID NO: 304913 - RNA, 32 nt, Human
acuaguccaggaaaggaacaugacagauuugu

SEQ ID NO: 304914 - RNA, 32 nt, Human
acuagucccucucuccccaaccucugccaggg

SEQ ID NO: 304915 - RNA, 32 nt, Human
acuagucuaccagugaccucagggcacuuugg

SEQ ID NO: 304916 - RNA, 32 nt, Human
acuagucuccccuuaucugugguuuugcuucc

SEQ ID NO: 304917 - RNA, 32 nt, Human
acuagucuuucaggagguuugcucuuagaacu

SEQ ID NO: 304918 - RNA, 32 nt, Human
acuagugaaagaugcaguguguagaccagaga

SEQ ID NO: 304919 - RNA, 32 nt, Human
acuagugacccagaaaggcaagggcaugggga

SEQ ID NO: 304920 - RNA, 32 nt, Human
acuagugagcaagguuggaaacagggccaggu

SEQ ID NO: 304921 - RNA, 32 nt, Human
acuagugccacugccguggcccagccgggcca

SEQ ID NO: 304922 - RNA, 32 nt, Human
acuagugggacccagcaaagacccacagcagc

SEQ ID NO: 304923 - RNA, 32 nt, Human
acuagugggcggggccugucagugagcggccc

SEQ ID NO: 304924 - RNA, 19 nt, Human
acuaguguauauucacuga

SEQ ID NO: 304925 - RNA, 32 nt, Human
acuagugugggaaggaaaauauugagcuaggc

SEQ ID NO: 304926 - RNA, 32 nt, Human
acuaguguuagcccaaggugggcagaaagccc

SEQ ID NO: 304927 - RNA, 32 nt, Human
acuaguguugggggcagagcggggcaggaaag

SEQ ID NO: 304928 - RNA, 18 nt, Human
acuaguguuuuuuagaua

SEQ ID NO: 304929 - RNA, 21 nt, Human
acuaguuauuccuugcuuuua

SEQ ID NO: 304930 - RNA, 32 nt, Human
acuaguucacacauaaaguccuuuuaaggaga

SEQ ID NO: 304931 - RNA, 32 nt, Human
acuaguugaagggaguucuggggccaggcuca

SEQ ID NO: 304932 - RNA, 31 nt, Human
acuauaaaacaaugcuacucuccuuaccaaa

SEQ ID NO: 304933 - RNA, 32 nt, Human
acuauaaaacauccuucucuuauucuccauac

SEQ ID NO: 304934 - RNA, 32 nt, Human
acuauaaaagacaagaggaagggcagguacua

SEQ ID NO: 304935 - RNA, 32 nt, Human
acuauaaacaugacaucuacaaaaagaggggu

SEQ ID NO: 304936 - RNA, 32 nt, Human
acuauaaaugugaaaacuacaaggaagguuuu

SEQ ID NO: 304937 - RNA, 19 nt, Human
acuauaacaccugccacca

SEQ ID NO: 304938 - RNA, 32 nt, Human
acuauaagaaggucugauaaacugaugaaaug

SEQ ID NO: 304939 - RNA, 31 nt, Human
acuauaagaugaguucgcucacuggauccuu

SEQ ID NO: 304940 - RNA, 32 nt, Human
acuauaagccagacugcucugauaggucugau

SEQ ID NO: 304941 - RNA, 32 nt, Human
acuauaagcccaaacuuuccucagcugcauaa

SEQ ID NO: 304942 - RNA, 24 nt, Human
acuauaagcuccaccucccagguu

SEQ ID NO: 304943 - RNA, 32 nt, Human
acuauaauaaccaccccauacacuuuacaguu

SEQ ID NO: 304944 - RNA, 32 nt, Human
acuauaaucccagcuacucgggaggcugagac

SEQ ID NO: 304945 - RNA, 32 nt, Human
acuauaaucccagcuacuugggaggcugaggc

SEQ ID NO: 304946 - RNA, 32 nt, Human
acuauaauuggaagugcugagcucuggggcag

SEQ ID NO: 304947 - RNA, 32 nt, Human
acuauacaguuacaucuuaauuccauccaaag

SEQ ID NO: 304948 - RNA, 32 nt, Human
acuauacauauguauguguauauguguauaca

SEQ ID NO: 304949 - RNA, 32 nt, Human
acuauaccagucccccuguuccuccuuccccu

SEQ ID NO: 304950 - RNA, 24 nt, Human
acuauaccuuggucagccaccuca

SEQ ID NO: 304951 - RNA, 26 nt, Human
acuauacgaauuuuaugguuuguaua

SEQ ID NO: 304952 - RNA, 32 nt, Human
acuauacuuuuuggaaauuaugaauuuguccu

SEQ ID NO: 304953 - RNA, 32 nt, Human
acuauagaguuuguggacagauuuauauuggg

SEQ ID NO: 304954 - RNA, 32 nt, Human
acuauagaugcgccaccauggccagcuaauuu

SEQ ID NO: 304955 - RNA, 32 nt, Human
acuauagcagggcugggcucugucuuccuggu

SEQ ID NO: 304956 - RNA, 32 nt, Human
acuauagcccacaacccaaagaagcaaaaauu

SEQ ID NO: 304957 - RNA, 32 nt, Human
acuauagccugaugucccacauugacccacug

SEQ ID NO: 304958 - RNA, 32 nt, Human
acuauagcgcugcagccgcccccagcccugug

SEQ ID NO: 304959 - RNA, 32 nt, Human
acuauagcuaaaauauguaaaccuuucuaggu

SEQ ID NO: 304960 - RNA, 32 nt, Human
acuauagcuucagggauaauauagcuuuaagg

SEQ ID NO: 304961 - RNA, 32 nt, Human
acuauagggggcagcccccugccuugugaccu

SEQ ID NO: 304962 - RNA, 32 nt, Human
acuauaggugugagccacugcaccuggccugg

SEQ ID NO: 304963 - RNA, 32 nt, Human
acuauaguucacaggacagagcagagccaugg

SEQ ID NO: 304964 - RNA, 32 nt, Human
acuauauacuauacacuguaucuccuguggcc

SEQ ID NO: 304965 - RNA, 32 nt, Human
acuauaucaugggcucugcagaacauaucaaa

SEQ ID NO: 304966 - RNA, 20 nt, Human
acuauaugcucuagagaccu

SEQ ID NO: 304967 - RNA, 32 nt, Human
acuauauguguccaaaauaucacugcauacaa

SEQ ID NO: 304968 - RNA, 32 nt, Human
acuauauguguguauauagugugugauguaua

SEQ ID NO: 304969 - RNA, 32 nt, Human
acuauauuagucaguuuucacacugcugauaa

SEQ ID NO: 304970 - RNA, 32 nt, Human
acuauauugcccaagcuacagugcaaugauua

SEQ ID NO: 304971 - RNA, 32 nt, Human
acuauauuguccaggcuagagugcaguggcua

SEQ ID NO: 304972 - RNA, 32 nt, Human
acuauauuuacagaagauguuugguugcuggg

SEQ ID NO: 304973 - RNA, 32 nt, Human
acuaucaaacaauaaaggaagaauggugcugu

SEQ ID NO: 304974 - RNA, 32 nt, Human
acuaucacccaggcuggagugcaguggcauaa

SEQ ID NO: 304975 - RNA, 32 nt, Human
acuaucaccugggcuggagugcgauggcauga

SEQ ID NO: 304976 - RNA, 32 nt, Human
acuaucacugcaaccuccgccuccuggguuca

SEQ ID NO: 304977 - RNA, 32 nt, Human
acuaucagauuugacuaaugaagaggaaaucu

SEQ ID NO: 304978 - RNA, 32 nt, Human
acuaucaucacaaggucccuggacuaaggcug

SEQ ID NO: 304979 - RNA, 32 nt, Human
acuauccacugcaguccucaguuguuggggua

SEQ ID NO: 304980 - RNA, 32 nt, Human
acuauccagguaaaacacuggcccaagauuug

SEQ ID NO: 304981 - RNA, 32 nt, Human
acuaucccaagagagcagaaaagggauguagu

SEQ ID NO: 304982 - RNA, 32 nt, Human
acuaucccauugcaaguuucucuccaaauaaa

SEQ ID NO: 304983 - RNA, 32 nt, Human
acuauccccaaagaaggagcuguuggggaccc

SEQ ID NO: 304984 - RNA, 32 nt, Human
acuauccugggcaaauguuuuacccuguccuc

SEQ ID NO: 304985 - RNA, 32 nt, Human
acuauccuguggcuguggcagauaugucaaua

SEQ ID NO: 304986 - RNA, 32 nt, Human
acuauccuugcagcccuuguggugagagcuuc

SEQ ID NO: 304987 - RNA, 32 nt, Human
acuaucguugcugguaagccugggcuugcugu

SEQ ID NO: 304988 - RNA, 32 nt, Human
acuaucuaucuaugcuuugcaaagacuaaggc

SEQ ID NO: 304989 - RNA, 32 nt, Human
acuaucucaaccuccauuguuacccacuaggu

SEQ ID NO: 304990 - RNA, 32 nt, Human
acuaucucagaaaaggagagcuuguugugaaa

SEQ ID NO: 304991 - RNA, 32 nt, Human
acuaucucagaaacaaaacaaaacaaaacaac

SEQ ID NO: 304992 - RNA, 32 nt, Human
acuaucuccaaagaaaaggcugacagauggua

SEQ ID NO: 304993 - RNA, 32 nt, Human
acuaucuccccuguuggaggugaguggccugu

SEQ ID NO: 304994 - RNA, 32 nt, Human
acuaucucugcacuccugggguuuuguuacau

SEQ ID NO: 304995 - RNA, 32 nt, Human
acuaucucuugggagcccccaaaagcugggaa

SEQ ID NO: 304996 - RNA, 32 nt, Human
acuaucugccuaaauaauuucuuucuaccucc

SEQ ID NO: 304997 - RNA, 32 nt, Human
acuaucugucaggggagguuguacaggugaau

SEQ ID NO: 304998 - RNA, 32 nt, Human
acuaucuuaaugauucuucaaaucuaaaacug

SEQ ID NO: 304999 - RNA, 20 nt, Human
acuaucuugauuuucacuga

SEQ ID NO: 305000 - RNA, 32 nt, Human
acuaucuuggaugauuucuuuuacagauuggu

SEQ ID NO: 305001 - RNA, 32 nt, Human
acuaucuugguuggcaucaucaggcccugagg

SEQ ID NO: 305002 - RNA, 32 nt, Human
acuaucuuuccaagccucacauuauacaucac

SEQ ID NO: 305003 - RNA, 32 nt, Human
acuaucuuucuccaagucaucaaaacaaagcu

SEQ ID NO: 305004 - RNA, 32 nt, Human
acuaugaagggcccuguuuucaaaaucuaaca

SEQ ID NO: 305005 - RNA, 32 nt, Human
acuaugaaucuacauaaaagccacuuguuuuu

SEQ ID NO: 305006 - RNA, 32 nt, Human
acuaugaaugcagugaccucagccagcaacag

SEQ ID NO: 305007 - RNA, 32 nt, Human
acuaugaugggcuucuguucucugcugagggc

SEQ ID NO: 305008 - RNA, 32 nt, Human
acuaugauugugccacugcacuccagccuggg

SEQ ID NO: 305009 - RNA, 32 nt, Human
acuaugauuuuagaaucauuuauuucucccuu

SEQ ID NO: 305010 - RNA, 32 nt, Human
acuaugcaagcuauaagacaauggaguauuau

SEQ ID NO: 305011 - RNA, 31 nt, Human
acuaugcaaggagguuagagaaauaaggaag

SEQ ID NO: 305012 - RNA, 32 nt, Human
acuaugcacacagcacucgcucuuaacuccuc

SEQ ID NO: 305013 - RNA, 32 nt, Human
acuaugcacacagcacucgcucuuagcuccuc

SEQ ID NO: 305014 - RNA, 32 nt, Human
acuaugcacaugcauuacacacaugcacacac

SEQ ID NO: 305015 - RNA, 32 nt, Human
acuaugcagaugggaacucugagccacacaga

SEQ ID NO: 305016 - RNA, 32 nt, Human
acuaugcauccuucacagccucagggaacuua

SEQ ID NO: 305017 - RNA, 32 nt, Human
acuaugccacugcacuccagccuaggugacaa

SEQ ID NO: 305018 - RNA, 32 nt, Human
acuaugccacugcacucccgccugggugacaa

SEQ ID NO: 305019 - RNA, 32 nt, Human
acuaugccacuguacuccagccuggguaacag

SEQ ID NO: 305020 - RNA, 32 nt, Human
acuaugccauaguguucuccaucucuagugaa

SEQ ID NO: 305021 - RNA, 32 nt, Human
acuaugcccggcuaacuuuuuguauuuuuagu

SEQ ID NO: 305022 - RNA, 32 nt, Human
acuaugccgcauucauuuaaagcuauuuuguu

SEQ ID NO: 305023 - RNA, 32 nt, Human
acuauggagaaacuuuguaugugcacacaaaa

SEQ ID NO: 305024 - RNA, 32 nt, Human
acuauggaggcugggcagugguucaugccuua

SEQ ID NO: 305025 - RNA, 32 nt, Human
acuauggaucagaauagccacauuuggaauac

SEQ ID NO: 305026 - RNA, 28 nt, Human
acuauggcagcagcacggcacagcacgc

SEQ ID NO: 305027 - RNA, 32 nt, Human
acuauggcaggaaaacagagaugguuuaguaa

SEQ ID NO: 305028 - RNA, 32 nt, Human
acuauggccugggagucccagguucuccugug

SEQ ID NO: 305029 - RNA, 32 nt, Human
acuauggcuauauacccugaccaauaaaugau

SEQ ID NO: 305030 - RNA, 32 nt, Human
acuauggcuccaugcugugugacagaucaacg

SEQ ID NO: 305031 - RNA, 32 nt, Human
acuauggcugcccucugggcucccagaaccca

SEQ ID NO: 305032 - RNA, 32 nt, Human
acuauggcuggaacauuggaaaaaggagagcc

SEQ ID NO: 305033 - RNA, 32 nt, Human
acuaugggacuggauacaaacacacacccggc

SEQ ID NO: 305034 - RNA, 32 nt, Human
acuaugggagugaaggaggaggagggaugcca

SEQ ID NO: 305035 - RNA, 22 nt, Human
acuaugggcaaagauacaugug

SEQ ID NO: 305036 - RNA, 32 nt, Human
acuauguaccagaaucaguuguuggagaaaaa

SEQ ID NO: 305037 - RNA, 32 nt, Human
acuauguaccugcagugggguugcagagaugg

SEQ ID NO: 305038 - RNA, 32 nt, Human
acuauguauauuaugcagaaacagucuguucc

SEQ ID NO: 305039 - RNA, 32 nt, Human
acuauguauuuuuaaagaguugguaaaucuua

SEQ ID NO: 305040 - RNA, 32 nt, Human
acuaugucacccuggcuggagugcaguagugc

SEQ ID NO: 305041 - RNA, 32 nt, Human
acuaugucaggaauggagguuugcuaacccag

SEQ ID NO: 305042 - RNA, 32 nt, Human
acuaugucauuuuucuuuaccuugaagaacau

SEQ ID NO: 305043 - RNA, 32 nt, Human
acuauguccccuccauugaauuuuuguaaaaa

SEQ ID NO: 305044 - RNA, 32 nt, Human
acuauguccuagugaagacaucaaccuccgcc

SEQ ID NO: 305045 - RNA, 28 nt, Human
acuaugucgcccaggguagucucaaacu

SEQ ID NO: 305046 - RNA, 32 nt, Human
acuaugucuaauucuuccuuacucccaaccca

SEQ ID NO: 305047 - RNA, 32 nt, Human
acuaugugaagggugauuggagaaggacaaga

SEQ ID NO: 305048 - RNA, 32 nt, Human
acuaugugaauggcacuuaccaccugcuggag

SEQ ID NO: 305049 - RNA, 32 nt, Human
acuaugugacgcaguccucucaggagucugag

SEQ ID NO: 305050 - RNA, 32 nt, Human
acuaugugagccacuccaguguucccagcccc

SEQ ID NO: 305051 - RNA, 32 nt, Human
acuauguggccuuccaaaauagguaguguuug

SEQ ID NO: 305052 - RNA, 32 nt, Human
acuauguguauguauauagaugugcauauaaa

SEQ ID NO: 305053 - RNA, 28 nt, Human
acuaugugucugcagacccagggaccac

SEQ ID NO: 305054 - RNA, 28 nt, Human
acuaugugugagaaggagcuggagcuug

SEQ ID NO: 305055 - RNA, 32 nt, Human
acuauguuacccaggcuggacuccaacuccug

SEQ ID NO: 305056 - RNA, 32 nt, Human
acuauguugccaaggcucaucuugagaagcag

SEQ ID NO: 305057 - RNA, 32 nt, Human
acuauguugcccaggcuggagugcaguggugc

SEQ ID NO: 305058 - RNA, 32 nt, Human
acuauguugcccaggcuggccucaagcaaucc

SEQ ID NO: 305059 - RNA, 32 nt, Human
acuauguugcccaggcuggucucaaguuccug

SEQ ID NO: 305060 - RNA, 32 nt, Human
acuauguuuuguaucauguuccuugaaacugu

SEQ ID NO: 305061 - RNA, 32 nt, Human
acuauuaacuaaaauaugaaacuuaaaaacaa

SEQ ID NO: 305062 - RNA, 32 nt, Human
acuauuacaaccuuccccuugaagaccuggaa

SEQ ID NO: 305063 - RNA, 32 nt, Human
acuauuacccuguguuguauuucccaaguguc

SEQ ID NO: 305064 - RNA, 32 nt, Human
acuauuacucacugcuacacacucgaccuaua

SEQ ID NO: 305065 - RNA, 30 nt, Human
acuauuagccucuccuuuugcuuuuuaagg

SEQ ID NO: 305066 - RNA, 32 nt, Human
acuauuaguggaaaauaccaaauggacaaaua

SEQ ID NO: 305067 - RNA, 32 nt, Human
acuauuaucaacacccuccaugugcagaaacc

SEQ ID NO: 305068 - RNA, 32 nt, Human
acuauuaucucagggcuuucugggcacugcac

SEQ ID NO: 305069 - RNA, 32 nt, Human
acuauuauuugcuuccuaauaggaccacauua

SEQ ID NO: 305070 - RNA, 32 nt, Human
acuauucacagcuucucauuuguguagcuuuc

SEQ ID NO: 305071 - RNA, 32 nt, Human
acuauucacggucacccacagcuuugaggaug

SEQ ID NO: 305072 - RNA, 32 nt, Human
acuauucagaggagccagaaguaaaguuuauu

SEQ ID NO: 305073 - RNA, 32 nt, Human
acuauuccaacaaagagauucuggaaguuuuu

SEQ ID NO: 305074 - RNA, 32 nt, Human
acuauucccagguuuauuucucucucauauga

SEQ ID NO: 305075 - RNA, 16 nt, Human
acuauuccugccacca

SEQ ID NO: 305076 - RNA, 32 nt, Human
acuauuccuucccuuccuaucuccuuucuagc

SEQ ID NO: 305077 - RNA, 32 nt, Human
acuauucucuggagaaaaauaaaauggaaauu

SEQ ID NO: 305078 - RNA, 32 nt, Human
acuauucugcccucccgucaccccuguuucug

SEQ ID NO: 305079 - RNA, 32 nt, Human
acuauucuuguuugccucuuuauuuuugccag

SEQ ID NO: 305080 - RNA, 32 nt, Human
acuauugaaggagggaaaauucucaagguucc

SEQ ID NO: 305081 - RNA, 32 nt, Human
acuauugagaaucuaaauggccauucggauuc

SEQ ID NO: 305082 - RNA, 32 nt, Human
acuauugauccuccugucuccaccucccgagu

SEQ ID NO: 305083 - RNA, 16 nt, Human
acuauugauucacugg

SEQ ID NO: 305084 - RNA, 22 nt, Human
acuauugcucuguuucauuuca

SEQ ID NO: 305085 - RNA, 32 nt, Human
acuauugcugcuuucucuucuacuucuugugc

SEQ ID NO: 305086 - RNA, 32 nt, Human
acuauuggaagugcuuucaacucagccacauc

SEQ ID NO: 305087 - RNA, 32 nt, Human
acuauuggugcgcuccagccgggcagguuuug

SEQ ID NO: 305088 - RNA, 32 nt, Human
acuauugucugcuauuguugccauuuuucaaa

SEQ ID NO: 305089 - RNA, 32 nt, Human
acuauuuauuuugccauguuuacauuuuguau

SEQ ID NO: 305090 - RNA, 32 nt, Human
acuauuucauucuauuucaaaugcuuauaaag

SEQ ID NO: 305091 - RNA, 32 nt, Human
acuauuucccauaaugcuucugagagccacua

SEQ ID NO: 305092 - RNA, 32 nt, Human
acuauuucugaacaaagagagcucaucaucag

SEQ ID NO: 305093 - RNA, 32 nt, Human
acuauuucugggguaaagauuuuacaauagca

SEQ ID NO: 305094 - RNA, 32 nt, Human
acuauuucugugcuguccacacucucuugccu

SEQ ID NO: 305095 - RNA, 32 nt, Human
acuauuugaaaauauugaggaggaggaacucc

SEQ ID NO: 305096 - RNA, 32 nt, Human
acuauuugccuuugcccacauuuuugcuccuu

SEQ ID NO: 305097 - RNA, 32 nt, Human
acuauuugcuuacagccacauaugcacccuuc

SEQ ID NO: 305098 - RNA, 32 nt, Human
acuauuuggcaaagauuuguuuuuaaaaaucu

SEQ ID NO: 305099 - RNA, 32 nt, Human
acuauuuguacacauacacacaugcacacccu

SEQ ID NO: 305100 - RNA, 32 nt, Human
acuauuuguacuugaagaaauaaauguuuuug

SEQ ID NO: 305101 - RNA, 32 nt, Human
acuauuuguuagaauaaaguaauuuugcgaaa

SEQ ID NO: 305102 - RNA, 32 nt, Human
acuauuuuccacugcaguguuuugacuucaca

SEQ ID NO: 305103 - RNA, 32 nt, Human
acuauuuuccuugagaaacauucucagcauca

SEQ ID NO: 305104 - RNA, 32 nt, Human
acuauuuucucccauuucugaguugucucuuc

SEQ ID NO: 305105 - RNA, 32 nt, Human
acuauuuucuucucucuuucucucuuuuuccu

SEQ ID NO: 305106 - RNA, 32 nt, Human
acuauuuugcccaggcuggagugcgauggugc

SEQ ID NO: 305107 - RNA, 32 nt, Human
acuauuuuugcaaauauaucauuuuuccuaau

SEQ ID NO: 305108 - RNA, 32 nt, Human
acucaaaaacacaugcauaaauugccaagugg

SEQ ID NO: 305109 - RNA, 32 nt, Human
acucaaaacauguaguuuggaaaugagaauuu

SEQ ID NO: 305110 - RNA, 32 nt, Human
acucaaaagugcugggauuacuggcgucagcc

SEQ ID NO: 305111 - RNA, 32 nt, Human
acucaaacauggcagcgccaccuucuccagga

SEQ ID NO: 305112 - RNA, 32 nt, Human
acucaaaccuagauggcacagacucaucgccu

SEQ ID NO: 305113 - RNA, 32 nt, Human
acucaaaccugucgagcaagggguuaagaguu

SEQ ID NO: 305114 - RNA, 32 nt, Human
acucaaacucugaucuaccaucauuguuuaau

SEQ ID NO: 305115 - RNA, 32 nt, Human
acucaaagaccaggaccucaugcgagccaaga

SEQ ID NO: 305116 - RNA, 32 nt, Human
acucaaaggcggagagcucagugggcaccacc

SEQ ID NO: 305117 - RNA, 32 nt, Human
acucaaaguaauguaaucucagcugggcgugg

SEQ ID NO: 305118 - RNA, 32 nt, Human
acucaaaugcuuucagcucaaaauauuuuuau

SEQ ID NO: 305119 - RNA, 32 nt, Human
acucaaauguguucguggggucuuccaaagcu

SEQ ID NO: 305120 - RNA, 16 nt, Human
acucaaauguguugaa

SEQ ID NO: 305121 - RNA, 32 nt, Human
acucaaauguucuuaaaaaugagaaccagugg

SEQ ID NO: 305122 - RNA, 21 nt, Human
acucaacaaagacaggacaca

SEQ ID NO: 305123 - RNA, 32 nt, Human
acucaacaacucagauuccuggaccugguguc

SEQ ID NO: 305124 - RNA, 32 nt, Human
acucaacaauauaaagaaaaauaaccaaauua

SEQ ID NO: 305125 - RNA, 32 nt, Human
acucaacacugagcagaucuguucuuugagcu

SEQ ID NO: 305126 - RNA, 32 nt, Human
acucaacagaaaauauauuccccaaacaccca

SEQ ID NO: 305127 - RNA, 32 nt, Human
acucaacagaaaauauauuccccaaagcugcu

SEQ ID NO: 305128 - RNA, 32 nt, Human
acucaacagaaaauauauuccccaaaugcccc

SEQ ID NO: 305129 - RNA, 32 nt, Human
acucaacagaaaauauauuccccaaaugcccg

SEQ ID NO: 305130 - RNA, 32 nt, Human
acucaacagguuugaggccccacagcaacaga

SEQ ID NO: 305131 - RNA, 32 nt, Human
acucaacauagaguagaguaacuaucuuuuua

SEQ ID NO: 305132 - RNA, 32 nt, Human
acucaaccacacacagcagcugccugcccugc

SEQ ID NO: 305133 - RNA, 32 nt, Human
acucaaccauaucccuucuggcaauuuccuuc

SEQ ID NO: 305134 - RNA, 32 nt, Human
acucaaccuacaccaugaauuugugucuaucu

SEQ ID NO: 305135 - RNA, 32 nt, Human
acucaacgccagggcgccgccuagagguuggu

SEQ ID NO: 305136 - RNA, 32 nt, Human
acucaacuacaaauaggcugggauucaaugug

SEQ ID NO: 305137 - RNA, 32 nt, Human
acucaacucacagaggagcagaaugggaagag

SEQ ID NO: 305138 - RNA, 32 nt, Human
acucaacuccaccccaucccaucccaccuuga

SEQ ID NO: 305139 - RNA, 32 nt, Human
acucaacugaguaagaaggggcuggugcccag

SEQ ID NO: 305140 - RNA, 32 nt, Human
acucaacugccaagggcaucacuggccaauuc

SEQ ID NO: 305141 - RNA, 32 nt, Human
acucaacuucuguucgacuuguggaucuucac

SEQ ID NO: 305142 - RNA, 32 nt, Human
acucaagacacaaaguccucagggggcgaggg

SEQ ID NO: 305143 - RNA, 32 nt, Human
acucaagacacugaagacuccaaaaaguagga

SEQ ID NO: 305144 - RNA, 18 nt, Human
acucaagagaacgggaug

SEQ ID NO: 305145 - RNA, 32 nt, Human
acucaagagacugaggcaggaggaucacguga

SEQ ID NO: 305146 - RNA, 32 nt, Human
acucaagaggcacaggcgggaggaucacuuga

SEQ ID NO: 305147 - RNA, 32 nt, Human
acucaagaggcugaggcaagagaaucacuuga

SEQ ID NO: 305148 - RNA, 32 nt, Human
acucaagaggcugaggcacgagaaucacuuga

SEQ ID NO: 305149 - RNA, 32 nt, Human
acucaagaggcugaggcagaaggaucccuuga

SEQ ID NO: 305150 - RNA, 32 nt, Human
acucaagaggcugaggcaggagaaucacuugc

SEQ ID NO: 305151 - RNA, 32 nt, Human
acucaagaggcugaggcaggagaaucacuugu

SEQ ID NO: 305152 - RNA, 32 nt, Human
acucaagaggcugagguaggagaaucacuuga

SEQ ID NO: 305153 - RNA, 32 nt, Human
acucaagaggcugaggugagaggagcaaguga

SEQ ID NO: 305154 - RNA, 32 nt, Human
acucaagauacuugccagucucuccagugugg

SEQ ID NO: 305155 - RNA, 32 nt, Human
acucaagaucugugcugccuccucaggagaga

SEQ ID NO: 305156 - RNA, 32 nt, Human
acucaagccagccuguaaacggugcuauuucu

SEQ ID NO: 305157 - RNA, 32 nt, Human
acucaagccucuggcuauuaacauacccuagu

SEQ ID NO: 305158 - RNA, 32 nt, Human
acucaagccugggcaacaccugggugacagag

SEQ ID NO: 305159 - RNA, 32 nt, Human
acucaagccuguaucccagcacuuugggaggc

SEQ ID NO: 305160 - RNA, 32 nt, Human
acucaagcgacugacccgucucagccucccaa

SEQ ID NO: 305161 - RNA, 32 nt, Human
acucaagcgauccaccugccucagcuucccaa

SEQ ID NO: 305162 - RNA, 23 nt, Human
acucaagcgauuuuccugccuca

SEQ ID NO: 305163 - RNA, 32 nt, Human
acucaagcuacagcagcagcacuucccaagcc

SEQ ID NO: 305164 - RNA, 32 nt, Human
acucaaggagggaaugcuuagauaggagcaug

SEQ ID NO: 305165 - RNA, 32 nt, Human
acucaaggcugaggcaggagaaucacuugaac

SEQ ID NO: 305166 - RNA, 32 nt, Human
acucaagggaaagauggaguagagggcaaaua

SEQ ID NO: 305167 - RNA, 32 nt, Human
acucaagggaagagcugcuggagccaggagaa

SEQ ID NO: 305168 - RNA, 32 nt, Human
acucaagguagaugacugacugggaaauuccg

SEQ ID NO: 305169 - RNA, 32 nt, Human
acucaaggucacgcagauagugaaugacagau

SEQ ID NO: 305170 - RNA, 32 nt, Human
acucaagguucauugggcucugcucuccuccc

SEQ ID NO: 305171 - RNA, 24 nt, Human
acucaaguaaaugcuucagucagg

SEQ ID NO: 305172 - RNA, 32 nt, Human
acucaagucaucaccaaugucugucaugcuga

SEQ ID NO: 305173 - RNA, 32 nt, Human
acucaagucuguauguacacuggggagaagca

SEQ ID NO: 305174 - RNA, 32 nt, Human
acucaagugauccuccugccucagcuucccaa

SEQ ID NO: 305175 - RNA, 32 nt, Human
acucaaguggggauugacagagccagauuggg

SEQ ID NO: 305176 - RNA, 32 nt, Human
acucaagugguagugacuccagcagacuuaau

SEQ ID NO: 305177 - RNA, 32 nt, Human
acucaaguuacugcugcugcuauugucuuucc

SEQ ID NO: 305178 - RNA, 32 nt, Human
acucaaguucccaagguauucuguccuccagg

SEQ ID NO: 305179 - RNA, 26 nt, Human
acucaauaaacaaugcauugaaugag

SEQ ID NO: 305180 - RNA, 32 nt, Human
acucaauaaaggaguguuuuuaaucaccucaa

SEQ ID NO: 305181 - RNA, 32 nt, Human
acucaauagagauucuucauuaucuucauggu

SEQ ID NO: 305182 - RNA, 32 nt, Human
acucaauagugagaauauagccucccacccca

SEQ ID NO: 305183 - RNA, 32 nt, Human
acucaauaugcagcuuccuguuucaguagggg

SEQ ID NO: 305184 - RNA, 32 nt, Human
acucaauccaaagugaaugaaaccaaguugga

SEQ ID NO: 305185 - RNA, 32 nt, Human
acucaaucucucccaccucauccucuggcaug

SEQ ID NO: 305186 - RNA, 32 nt, Human
acucaauggccuugggugaugaugcuguaccc

SEQ ID NO: 305187 - RNA, 32 nt, Human
acucaauguguaugacgccacucugaagagua

SEQ ID NO: 305188 - RNA, 32 nt, Human
acucaauucauuguuaacuuccuaaaacagaa

SEQ ID NO: 305189 - RNA, 32 nt, Human
acucaauugauccucccaucucagccucccaa

SEQ ID NO: 305190 - RNA, 20 nt, Human
acucacaaaggucuccuuca

SEQ ID NO: 305191 - RNA, 32 nt, Human
acucacaagacuguaucuccagcccaauggga

SEQ ID NO: 305192 - RNA, 32 nt, Human
acucacaaugacucuggcuggccccacgcagc

SEQ ID NO: 305193 - RNA, 31 nt, Human
acucacacaaguaacaccacagcagaccucg

SEQ ID NO: 305194 - RNA, 32 nt, Human
acucacacacaccacacagacacauacuguuu

SEQ ID NO: 305195 - RNA, 32 nt, Human
acucacacagagaccucucuggguuucuuugc

SEQ ID NO: 305196 - RNA, 32 nt, Human
acucacacagcagccuaggaaggaagggcaga

SEQ ID NO: 305197 - RNA, 21 nt, Human
acucacacaugccucagugcc

SEQ ID NO: 305198 - RNA, 32 nt, Human
acucacaccugcaaucccagcacuuugggagg

SEQ ID NO: 305199 - RNA, 19 nt, Human
acucacaccuguaauccca

SEQ ID NO: 305200 - RNA, 32 nt, Human
acucacaccuguaaucccagcacuuucggagg

SEQ ID NO: 305201 - RNA, 32 nt, Human
acucacaccuguaaucccagcacuuugggaac

SEQ ID NO: 305202 - RNA, 32 nt, Human
acucacaccuguaaucccagcacuuugggagg

SEQ ID NO: 305203 - RNA, 32 nt, Human
acucacaccuguaaucccagcacuuugggagu

SEQ ID NO: 305204 - RNA, 32 nt, Human
acucacaccuguaaucccagcacuuugggauu

SEQ ID NO: 305205 - RNA, 32 nt, Human
acucacaccuguaauccgaguacuuugcgggg

SEQ ID NO: 305206 - RNA, 32 nt, Human
acucacaccuguaaucucagcacguugggaag

SEQ ID NO: 305207 - RNA, 32 nt, Human
acucacaccuguaauuccagcacuucaggagg

SEQ ID NO: 305208 - RNA, 32 nt, Human
acucacaccuguaauuccagcacuuugggaga

SEQ ID NO: 305209 - RNA, 32 nt, Human
acucacaccuguacucccagcacuucaggaag

SEQ ID NO: 305210 - RNA, 32 nt, Human
acucacaccuguauccgaacacuuugggaggc

SEQ ID NO: 305211 - RNA, 32 nt, Human
acucacacugucugaaaggccacccaggaucc

SEQ ID NO: 305212 - RNA, 32 nt, Human
acucacacuuccagcgcccagguccaagucug

SEQ ID NO: 305213 - RNA, 32 nt, Human
acucacacuuguaaucccagcacuuugggagg

SEQ ID NO: 305214 - RNA, 32 nt, Human
acucacagaauauuugcccuccuucuacaaaa

SEQ ID NO: 305215 - RNA, 32 nt, Human
acucacagacuggccccuagucacuggggcug

SEQ ID NO: 305216 - RNA, 32 nt, Human
acucacagaggagcugcuuuagugcagcauug

SEQ ID NO: 305217 - RNA, 32 nt, Human
acucacagauacuagcuccuuagcagcucaca

SEQ ID NO: 305218 - RNA, 32 nt, Human
acucacagccaagagcaggugaccucagaggg

SEQ ID NO: 305219 - RNA, 21 nt, Human
acucacagcccgcugcuguac

SEQ ID NO: 305220 - RNA, 32 nt, Human
acucacagccucccuuccuucuuucucccucc

SEQ ID NO: 305221 - RNA, 32 nt, Human
acucacagcugcugcaccaccaccuuccgcag

SEQ ID NO: 305222 - RNA, 23 nt, Human
acucacagcuuaaagaauuucag

SEQ ID NO: 305223 - RNA, 24 nt, Human
acucacaggcaucggcucaggcca

SEQ ID NO: 305224 - RNA, 20 nt, Human
acucacaggcauuccuccca

SEQ ID NO: 305225 - RNA, 23 nt, Human
acucacagguacuuuuccagcca

SEQ ID NO: 305226 - RNA, 20 nt, Human
acucacaggugggcaaugcc

SEQ ID NO: 305227 - RNA, 23 nt, Human
acucacaggugguccccaggcca

SEQ ID NO: 305228 - RNA, 32 nt, Human
acucacagucuuguuuucccagccucuuuuac

SEQ ID NO: 305229 - RNA, 32 nt, Human
acucacaguggagaaagguaaugcaagauaug

SEQ ID NO: 305230 - RNA, 23 nt, Human
acucacaguuagccagcugacca

SEQ ID NO: 305231 - RNA, 32 nt, Human
acucacaguucaguuucuccuguucuugggga

SEQ ID NO: 305232 - RNA, 32 nt, Human
acucacaguucugcauggcuggggaggccuca

SEQ ID NO: 305233 - RNA, 32 nt, Human
acucacaucuguaauccaagcacuuugggagg

SEQ ID NO: 305234 - RNA, 32 nt, Human
acucacaucuguaaucccagcacuuugggaga

SEQ ID NO: 305235 - RNA, 32 nt, Human
acucacaucuuaagcauucuuccuggcaaaaa

SEQ ID NO: 305236 - RNA, 32 nt, Human
acucacaugugccugcaauaaaccuuuuggaa

SEQ ID NO: 305237 - RNA, 32 nt, Human
acucacauuuaugaugauguucagagauucau

SEQ ID NO: 305238 - RNA, 32 nt, Human
acucacauuuucucagugugcccuucucuuau

SEQ ID NO: 305239 - RNA, 32 nt, Human
acucacauuuuucacugcucugugccuguccg

SEQ ID NO: 305240 - RNA, 32 nt, Human
acucaccaaaucuuugcaccuaguagauauau

SEQ ID NO: 305241 - RNA, 32 nt, Human
acucaccaacaaauguacagcaauacaccauc

SEQ ID NO: 305242 - RNA, 32 nt, Human
acucaccaacuccaguagaaagaaggguguua

SEQ ID NO: 305243 - RNA, 32 nt, Human
acucaccacaaccuccgccuccuggguucaag

SEQ ID NO: 305244 - RNA, 32 nt, Human
acucaccacagcugccuccugagcugccugag

SEQ ID NO: 305245 - RNA, 32 nt, Human
acucaccagcaaaugcugaccugggaauuuga

SEQ ID NO: 305246 - RNA, 32 nt, Human
acucaccaggagguggcagcggugugggagga

SEQ ID NO: 305247 - RNA, 23 nt, Human
acucaccagggccacaggacaca

SEQ ID NO: 305248 - RNA, 20 nt, Human
acucaccaguguccccucca

SEQ ID NO: 305249 - RNA, 32 nt, Human
acucaccaguguccccuccacugucacauugu

SEQ ID NO: 305250 - RNA, 32 nt, Human
acucaccauucaaaccgucugccagcccgggg

SEQ ID NO: 305251 - RNA, 32 nt, Human
acucaccauugcacuccagccuggaugacaga

SEQ ID NO: 305252 - RNA, 32 nt, Human
acucacccauagucccagcuauucaggaggcu

SEQ ID NO: 305253 - RNA, 32 nt, Human
acucaccccugccccaccccgucugcaugcuc

SEQ ID NO: 305254 - RNA, 32 nt, Human
acucaccccuucuauaggcaggccaguucuaa

SEQ ID NO: 305255 - RNA, 32 nt, Human
acucacccgcuauuagaguauggaggaagggg

SEQ ID NO: 305256 - RNA, 32 nt, Human
acucacccuaugcccugguccgcauauggcac

SEQ ID NO: 305257 - RNA, 32 nt, Human
acucacccuuccaccauaugaggacguggcaa

SEQ ID NO: 305258 - RNA, 32 nt, Human
acucaccgugagccaucaaugugcucuggucu

SEQ ID NO: 305259 - RNA, 32 nt, Human
acucaccugaggaagggaaggaagggaauaau

SEQ ID NO: 305260 - RNA, 32 nt, Human
acucaccugccugggacggucaccuguugcag

SEQ ID NO: 305261 - RNA, 32 nt, Human
acucaccugggagcacggcgccuggcucuuac

SEQ ID NO: 305262 - RNA, 32 nt, Human
acucaccuggggccuccaucccagaagcgcag

SEQ ID NO: 305263 - RNA, 32 nt, Human
acucaccuucacuuuccaaaauagcugagggu

SEQ ID NO: 305264 - RNA, 32 nt, Human
acucacgcacacacaagcagagaaggcgcuga

SEQ ID NO: 305265 - RNA, 32 nt, Human
acucacgcagcuccagcccaucuugcugaccu

SEQ ID NO: 305266 - RNA, 32 nt, Human
acucacgccuauaaucccagcacuuugggagg

SEQ ID NO: 305267 - RNA, 32 nt, Human
acucacgccuguaaccccagcacuuugggagg

SEQ ID NO: 305268 - RNA, 19 nt, Human
acucacgccuguaauccca

SEQ ID NO: 305269 - RNA, 32 nt, Human
acucacgccuguaaucccaacauuuugggagg

SEQ ID NO: 305270 - RNA, 32 nt, Human
acucacgccuguaaucccagcacauugggagg

SEQ ID NO: 305271 - RNA, 32 nt, Human
acucacgccuguaaucccagcacuuaggaaga

SEQ ID NO: 305272 - RNA, 32 nt, Human
acucacgccuguaaucccagcacuuuaggagg

SEQ ID NO: 305273 - RNA, 32 nt, Human
acucacgccuguaaucccagcacuuugggagg

SEQ ID NO: 305274 - RNA, 32 nt, Human
acucacgccuguaaucccccagcaauuuggga

SEQ ID NO: 305275 - RNA, 32 nt, Human
acucacgccugucauccuagcacuuugggagg

SEQ ID NO: 305276 - RNA, 32 nt, Human
acucacgccuucacuccugggcccgggacggc

SEQ ID NO: 305277 - RNA, 32 nt, Human
acucacgcuggucaccccauuguuagaaagag

SEQ ID NO: 305278 - RNA, 32 nt, Human
acucacggaagggagguagcucagggaccucc

SEQ ID NO: 305279 - RNA, 32 nt, Human
acucacggcagcccuguggaguacgguguacu

SEQ ID NO: 305280 - RNA, 32 nt, Human
acucacgucugcuucgacagaacugccguaua

SEQ ID NO: 305281 - RNA, 32 nt, Human
acucacgucuguaaucccagcacuuugggagg

SEQ ID NO: 305282 - RNA, 32 nt, Human
acucacuaaagggcuucauuuuaguccagauu

SEQ ID NO: 305283 - RNA, 32 nt, Human
acucacuacuaaacucuaccaagaauggaaac

SEQ ID NO: 305284 - RNA, 32 nt, Human
acucacuaugcagccaaggcuggaagccacuc

SEQ ID NO: 305285 - RNA, 32 nt, Human
acucacuauugacagugcaccaccaccugcuu

SEQ ID NO: 305286 - RNA, 32 nt, Human
acucacucaaaaccagcagugcugcuaucaga

SEQ ID NO: 305287 - RNA, 32 nt, Human
acucacucaccuaauggcaagaaaguugcaug

SEQ ID NO: 305288 - RNA, 32 nt, Human
acucacucacucuccaccagccugggaaauga

SEQ ID NO: 305289 - RNA, 32 nt, Human
acucacucagccuggucagccugguggguacc

SEQ ID NO: 305290 - RNA, 19 nt, Human
acucacuccauggcugcag

SEQ ID NO: 305291 - RNA, 32 nt, Human
acucacuccauggcugcagcaaggagaggcgg

SEQ ID NO: 305292 - RNA, 32 nt, Human
acucacucccacacacacccccuggcucugcu

SEQ ID NO: 305293 - RNA, 32 nt, Human
acucacuccuuaagaaaauggaagagaaaaag

SEQ ID NO: 305294 - RNA, 17 nt, Human
acucacucgccaggguc

SEQ ID NO: 305295 - RNA, 32 nt, Human
acucacucggccucacuucauccuugcaaaga

SEQ ID NO: 305296 - RNA, 32 nt, Human
acucacucguacaugccuucuuccacaguggg

SEQ ID NO: 305297 - RNA, 32 nt, Human
acucacucucucucaccauuucccagcgcucc

SEQ ID NO: 305298 - RNA, 32 nt, Human
acucacucugauucuccugugccacaggaaaa

SEQ ID NO: 305299 - RNA, 32 nt, Human
acucacucuuucccucuuucuucaggaaugaa

SEQ ID NO: 305300 - RNA, 32 nt, Human
acucacugaagucccuucccucucccuucuag

SEQ ID NO: 305301 - RNA, 32 nt, Human
acucacugagccccaggcccaaggauaaugau

SEQ ID NO: 305302 - RNA, 32 nt, Human
acucacugagccugacaucugccuguaagcag

SEQ ID NO: 305303 - RNA, 32 nt, Human
acucacugauuccuacacauugccaagauuuc

SEQ ID NO: 305304 - RNA, 32 nt, Human
acucacugcaaccuccaccucccagguucaag

SEQ ID NO: 305305 - RNA, 32 nt, Human
acucacugcaaccuccaccucccagguucaga

SEQ ID NO: 305306 - RNA, 32 nt, Human
acucacugcaaccuccaccucccggguucaag

SEQ ID NO: 305307 - RNA, 32 nt, Human
acucacugcaaccuccaccuccuguguucaag

SEQ ID NO: 305308 - RNA, 32 nt, Human
acucacugcaaccuccgccuccuggguucaag

SEQ ID NO: 305309 - RNA, 32 nt, Human
acucacugcaacuuccaccuccuggagucaag

SEQ ID NO: 305310 - RNA, 32 nt, Human
acucacugcaacuuccgccuccuggggucaag

SEQ ID NO: 305311 - RNA, 32 nt, Human
acucacugcaacuucugccacccagguucaag

SEQ ID NO: 305312 - RNA, 32 nt, Human
acucacugcaagcuccgccuccuggguucaca

SEQ ID NO: 305313 - RNA, 32 nt, Human
acucacugcaaucuccaccucccacagguuca

SEQ ID NO: 305314 - RNA, 19 nt, Human
acucacugcagagcugcug

SEQ ID NO: 305315 - RNA, 32 nt, Human
acucacugcagccucaaacuccuggguucaag

SEQ ID NO: 305316 - RNA, 32 nt, Human
acucacugcagccucaaacuucuggccucaag

SEQ ID NO: 305317 - RNA, 32 nt, Human
acucacugcagccucaaccucccaggcucaug

SEQ ID NO: 305318 - RNA, 32 nt, Human
acucacugcagccucaaccuccuggggccaag

SEQ ID NO: 305319 - RNA, 32 nt, Human
acucacugcagccuccgccuccuggguucaag

SEQ ID NO: 305320 - RNA, 21 nt, Human
acucacugccagguacugugc

SEQ ID NO: 305321 - RNA, 32 nt, Human
acucacugcccugucugaaauguggcagccac

SEQ ID NO: 305322 - RNA, 32 nt, Human
acucacugccucccccaagggcccccucuaag

SEQ ID NO: 305323 - RNA, 32 nt, Human
acucacugcucuuugcuguugccugaggacca

SEQ ID NO: 305324 - RNA, 24 nt, Human
acucacuggcugcagcagaacaca

SEQ ID NO: 305325 - RNA, 32 nt, Human
acucacuggggaggaagcaaggaagcaaacag

SEQ ID NO: 305326 - RNA, 24 nt, Human
acucacugucauucacaaggcaca

SEQ ID NO: 305327 - RNA, 32 nt, Human
acucacuguggaggucauaaggaagcuacuuu

SEQ ID NO: 305328 - RNA, 32 nt, Human
acucacuucauccucagcagaacuccugccug

SEQ ID NO: 305329 - RNA, 32 nt, Human
acucacuugcaacuccaccucagcaguggucu

SEQ ID NO: 305330 - RNA, 32 nt, Human
acucacuuguuaguuugcagggaggguaaaac

SEQ ID NO: 305331 - RNA, 32 nt, Human
acucagaaaaggaggcggcuucgggcuuucgu

SEQ ID NO: 305332 - RNA, 22 nt, Human
acucagaaaaucaaagggcuag

SEQ ID NO: 305333 - RNA, 26 nt, Human
acucagaaaaugucuuuucuuuaaaa

SEQ ID NO: 305334 - RNA, 32 nt, Human
acucagaaacagacaguuucaagcuggccuau

SEQ ID NO: 305335 - RNA, 32 nt, Human
acucagaaaccaggcucgaggccuaucccagc

SEQ ID NO: 305336 - RNA, 32 nt, Human
acucagaaaccucaggguucaccagaaacauu

SEQ ID NO: 305337 - RNA, 32 nt, Human
acucagaaagccucaaugaaauggagcuggcu

SEQ ID NO: 305338 - RNA, 32 nt, Human
acucagaaaucaagauacacaagugggaauug

SEQ ID NO: 305339 - RNA, 32 nt, Human
acucagaacccccuccagucucucugucucuc

SEQ ID NO: 305340 - RNA, 32 nt, Human
acucagaacucuugugacauuagccagugggg

SEQ ID NO: 305341 - RNA, 32 nt, Human
acucagaagaaugggccuuucugccauaauuc

SEQ ID NO: 305342 - RNA, 32 nt, Human
acucagaagacugaggccggaggaucacuuga

SEQ ID NO: 305343 - RNA, 32 nt, Human
acucagaaggcggaggcugcagugagccgaga

SEQ ID NO: 305344 - RNA, 32 nt, Human
acucagaaggcggagguuccagugagccaucg

SEQ ID NO: 305345 - RNA, 32 nt, Human
acucagaagguggagguugcagugaggcgaga

SEQ ID NO: 305346 - RNA, 32 nt, Human
acucagaauuggaacuuuuuacauuugaguuu

SEQ ID NO: 305347 - RNA, 32 nt, Human
acucagacaccaccgaucacaggcuggcccag

SEQ ID NO: 305348 - RNA, 32 nt, Human
acucagacagggcugagugccuccacccugau

SEQ ID NO: 305349 - RNA, 32 nt, Human
acucagaccccagcccucagcuggcugcccau

SEQ ID NO: 305350 - RNA, 32 nt, Human
acucagacccuccuuaaagugaggagcgaggg

SEQ ID NO: 305351 - RNA, 32 nt, Human
acucagacuagaauggagguagaaagaacuga

SEQ ID NO: 305352 - RNA, 32 nt, Human
acucagacuauagccguuguuucccaaacuuc

SEQ ID NO: 305353 - RNA, 32 nt, Human
acucagacucacugcccugagccugcacagag

SEQ ID NO: 305354 - RNA, 32 nt, Human
acucagagaaaagagauugagauguaagucuc

SEQ ID NO: 305355 - RNA, 32 nt, Human
acucagagaagacauucuggaucauuucauau

SEQ ID NO: 305356 - RNA, 18 nt, Human
acucagagaagcuggccg

SEQ ID NO: 305357 - RNA, 20 nt, Human
acucagagaauaaccagaga

SEQ ID NO: 305358 - RNA, 31 nt, Human
acucagaggaaauuugcacagaugcugcuuu

SEQ ID NO: 305359 - RNA, 32 nt, Human
acucagaggaagaggcaggggcagcagccgac

SEQ ID NO: 305360 - RNA, 32 nt, Human
acucagaggagaaaacuaaauaguagagaaag

SEQ ID NO: 305361 - RNA, 32 nt, Human
acucagaggagaaggagggggaggagaagaga

SEQ ID NO: 305362 - RNA, 32 nt, Human
acucagaggagagagauaaggaaggaaaguag

SEQ ID NO: 305363 - RNA, 32 nt, Human
acucagaggcagacccagaaaggggcucagga

SEQ ID NO: 305364 - RNA, 32 nt, Human
acucagaggcggcccuuugccucugccugccg

SEQ ID NO: 305365 - RNA, 32 nt, Human
acucagagggaugacugcuggggguagacugg

SEQ ID NO: 305366 - RNA, 32 nt, Human
acucagagggcugaggugggaggaucacuuga

SEQ ID NO: 305367 - RNA, 32 nt, Human
acucagagugugcuuguccuucccuaaaaugu

SEQ ID NO: 305368 - RNA, 32 nt, Human
acucagaugaggacagagugguuuccaaugug

SEQ ID NO: 305369 - RNA, 32 nt, Human
acucagaugaucaagugagagccccagauucc

SEQ ID NO: 305370 - RNA, 32 nt, Human
acucagcaacgacccauaccucagacccgacg

SEQ ID NO: 305371 - RNA, 32 nt, Human
acucagcacagcccugggcacaucgcuucucu

SEQ ID NO: 305372 - RNA, 32 nt, Human
acucagcaccugugguucccauggcaguguca

SEQ ID NO: 305373 - RNA, 32 nt, Human
acucagcacucacucagggcucugggagccag

SEQ ID NO: 305374 - RNA, 32 nt, Human
acucagcagaaguaucagaaguagugguaugg

SEQ ID NO: 305375 - RNA, 32 nt, Human
acucagcagccagagccucagagccagcaggc

SEQ ID NO: 305376 - RNA, 32 nt, Human
acucagcagggcucugggaaugugccuuccuu

SEQ ID NO: 305377 - RNA, 32 nt, Human
acucagcagggugaggugagaggaucacuuga

SEQ ID NO: 305378 - RNA, 32 nt, Human
acucagcagucuuuacugcaggaaaagcugcg

SEQ ID NO: 305379 - RNA, 32 nt, Human
acucagcagugcaguuggcugagaagaggaaa

SEQ ID NO: 305380 - RNA, 32 nt, Human
acucagcaguuguugggcaaguuccuuugccc

SEQ ID NO: 305381 - RNA, 24 nt, Human
acucagcauagauuguauaaaaua

SEQ ID NO: 305382 - RNA, 32 nt, Human
acucagcaucggaagguggcggugaccgaggg

SEQ ID NO: 305383 - RNA, 32 nt, Human
acucagccaggaauucaagaccagccugggca

SEQ ID NO: 305384 - RNA, 32 nt, Human
acucagccaggcccuccuccuccugggcuugc

SEQ ID NO: 305385 - RNA, 32 nt, Human
acucagccaucccgguuaccgguggcaggaug

SEQ ID NO: 305386 - RNA, 32 nt, Human
acucagccauggaacugucauagaagaaaccu

SEQ ID NO: 305387 - RNA, 32 nt, Human
acucagcccauuucccccucuggugcugagaa

SEQ ID NO: 305388 - RNA, 17 nt, Human
acucagccccgcuccca

SEQ ID NO: 305389 - RNA, 32 nt, Human
acucagccccuaggaguauauuuccgcacuuc

SEQ ID NO: 305390 - RNA, 32 nt, Human
acucagcccgggaggcaggcuccaggccucag

SEQ ID NO: 305391 - RNA, 32 nt, Human
acucagcccuucccagcacuuguccagagccu

SEQ ID NO: 305392 - RNA, 32 nt, Human
acucagcccuuccccaugucagggagcuacuc

SEQ ID NO: 305393 - RNA, 32 nt, Human
acucagcccuucuccagcaccacugaagagac

SEQ ID NO: 305394 - RNA, 32 nt, Human
acucagccucccaggcugccagcaauucacuu

SEQ ID NO: 305395 - RNA, 32 nt, Human
acucagccuggcagaggaagaaggaaggcaga

SEQ ID NO: 305396 - RNA, 32 nt, Human
acucagccugggacuggcugggcgagacucuc

SEQ ID NO: 305397 - RNA, 32 nt, Human
acucagccuuuaaucuuacacacacgucucuu

SEQ ID NO: 305398 - RNA, 32 nt, Human
acucagccuuucuguucuaccuaggucucuaa

SEQ ID NO: 305399 - RNA, 32 nt, Human
acucagcgggcguggaggucgcggcggacgga

SEQ ID NO: 305400 - RNA, 32 nt, Human
acucagcgucucugaaccucaugcuccucccc

SEQ ID NO: 305401 - RNA, 21 nt, Human
acucagcuacaugugaccucc

SEQ ID NO: 305402 - RNA, 32 nt, Human
acucagcucaccucucccuccaccuccucucc

SEQ ID NO: 305403 - RNA, 32 nt, Human
acucagcucacugcaaccucugccuccuggau

SEQ ID NO: 305404 - RNA, 32 nt, Human
acucagcucugucugcucaaugccauugugca

SEQ ID NO: 305405 - RNA, 32 nt, Human
acucagcugcagaggccgcacagccaggagcu

SEQ ID NO: 305406 - RNA, 32 nt, Human
acucagcugccuacugggaggcuggggagaau

SEQ ID NO: 305407 - RNA, 32 nt, Human
acucagcuggacugcauugaaggcgaggcugc

SEQ ID NO: 305408 - RNA, 32 nt, Human
acucagcugggguggcagagggcgagaggcuc

SEQ ID NO: 305409 - RNA, 23 nt, Human
acucagcugugacccugcuccaa

SEQ ID NO: 305410 - RNA, 32 nt, Human
acucagcugugacccugcuccaacaccagccc

SEQ ID NO: 305411 - RNA, 32 nt, Human
acucagcuuaauucuccuucccagauaaggca

SEQ ID NO: 305412 - RNA, 32 nt, Human
acucagcuuccuacccacaccucugccagaag

SEQ ID NO: 305413 - RNA, 32 nt, Human
acucagcuugacuucugucaugaaucagugcu

SEQ ID NO: 305414 - RNA, 32 nt, Human
acucagcuuggguucugugcuccuccucucuu

SEQ ID NO: 305415 - RNA, 31 nt, Human
acucagcuuucccagcaccuacccaggcaga

SEQ ID NO: 305416 - RNA, 21 nt, Human
acucaggaaagccagccccca

SEQ ID NO: 305417 - RNA, 32 nt, Human
acucaggaagcugagacaagaggaucaauuga

SEQ ID NO: 305418 - RNA, 32 nt, Human
acucaggaagcugaggugagaggaucucuaga

SEQ ID NO: 305419 - RNA, 32 nt, Human
acucaggaaggugggagagagccaagcccugu

SEQ ID NO: 305420 - RNA, 32 nt, Human
acucaggaauagcuucccucuggacuguagag

SEQ ID NO: 305421 - RNA, 32 nt, Human
acucaggacagagagucugagaaucuucaaaa

SEQ ID NO: 305422 - RNA, 32 nt, Human
acucaggaccccgggcaccacacccaggcggu

SEQ ID NO: 305423 - RNA, 32 nt, Human
acucaggagacggagguuacagugagucgaga

SEQ ID NO: 305424 - RNA, 32 nt, Human
acucaggagaggggagaaaggaggugcaccug

SEQ ID NO: 305425 - RNA, 32 nt, Human
acucaggagauggagguuucagugagccaaga

SEQ ID NO: 305426 - RNA, 15 nt, Human
acucaggagcaaggu

SEQ ID NO: 305427 - RNA, 32 nt, Human
acucaggagcucugucacaaagcuguucaugg

SEQ ID NO: 305428 - RNA, 32 nt, Human
acucaggaggcagaaguugcgguuagccgaga

SEQ ID NO: 305429 - RNA, 32 nt, Human
acucaggaggcagaauucaguguguuaucauu

SEQ ID NO: 305430 - RNA, 32 nt, Human
acucaggaggcagaggcacaagaauggcuuga

SEQ ID NO: 305431 - RNA, 32 nt, Human
acucaggaggcagagguugcaaugagccaaga

SEQ ID NO: 305432 - RNA, 32 nt, Human
acucaggaggcagagguugcagugagccaaga

SEQ ID NO: 305433 - RNA, 32 nt, Human
acucaggaggccaaggugggaggaucacuuga

SEQ ID NO: 305434 - RNA, 32 nt, Human
acucaggaggcggagcuugcagugagccgaga

SEQ ID NO: 305435 - RNA, 32 nt, Human
acucaggaggcggagguugcggugagccgaga

SEQ ID NO: 305436 - RNA, 32 nt, Human
acucaggaggcggagguugcggugagcugaga

SEQ ID NO: 305437 - RNA, 32 nt, Human
acucaggaggcggaguuugcagugagcugagg

SEQ ID NO: 305438 - RNA, 32 nt, Human
acucaggaggcugaaacaggagaaucacuuga

SEQ ID NO: 305439 - RNA, 32 nt, Human
acucaggaggcugaagcaagagaaucacuuga

SEQ ID NO: 305440 - RNA, 32 nt, Human
acucaggaggcugaagcaagagaaucgcuuga

SEQ ID NO: 305441 - RNA, 32 nt, Human
acucaggaggcugaagcaccagaaucucuuga

SEQ ID NO: 305442 - RNA, 32 nt, Human
acucaggaggcugaagcagaagaaucacuuga

SEQ ID NO: 305443 - RNA, 32 nt, Human
acucaggaggcugaagcaggagaaucacuuga

SEQ ID NO: 305444 - RNA, 32 nt, Human
acucaggaggcugaagcaggagaaucgcugga

SEQ ID NO: 305445 - RNA, 32 nt, Human
acucaggaggcugaagcaggagaaucgcuuga

SEQ ID NO: 305446 - RNA, 32 nt, Human
acucaggaggcugaagcaggaggauagcuuga

SEQ ID NO: 305447 - RNA, 32 nt, Human
acucaggaggcugaagugggaggaucccuuga

SEQ ID NO: 305448 - RNA, 32 nt, Human
acucaggaggcugagacaagaaucacuugaac

SEQ ID NO: 305449 - RNA, 32 nt, Human
acucaggaggcugagacaggagaaucaccuga

SEQ ID NO: 305450 - RNA, 32 nt, Human
acucaggaggcugagacaggagaaucacuuga

SEQ ID NO: 305451 - RNA, 32 nt, Human
acucaggaggcugagaugagaggaucacuuga

SEQ ID NO: 305452 - RNA, 32 nt, Human
acucaggaggcugagaugggaguaucagaauc

SEQ ID NO: 305453 - RNA, 32 nt, Human
acucaggaggcugaggaagaucacuugaaccc

SEQ ID NO: 305454 - RNA, 32 nt, Human
acucaggaggcugaggaaggagaaucacuuga

SEQ ID NO: 305455 - RNA, 32 nt, Human
acucaggaggcugaggagggaggauuaucuga

SEQ ID NO: 305456 - RNA, 32 nt, Human
acucaggaggcugaggcaagagaaucacugga

SEQ ID NO: 305457 - RNA, 32 nt, Human
acucaggaggcugaggcaagagaaucacuuga

SEQ ID NO: 305458 - RNA, 32 nt, Human
acucaggaggcugaggcaagagaaucgcuuga

SEQ ID NO: 305459 - RNA, 32 nt, Human
acucaggaggcugaggcaagagaaucguuuga

SEQ ID NO: 305460 - RNA, 32 nt, Human
acucaggaggcugaggcaagagaauugcuuga

SEQ ID NO: 305461 - RNA, 32 nt, Human
acucaggaggcugaggcaagagaauugcuugg

SEQ ID NO: 305462 - RNA, 32 nt, Human
acucaggaggcugaggcacaagaaucacuuga

SEQ ID NO: 305463 - RNA, 32 nt, Human
acucaggaggcugaggcacaagaaucgcuuga

SEQ ID NO: 305464 - RNA, 32 nt, Human
acucaggaggcugaggcacgagaaucgcuuga

SEQ ID NO: 305465 - RNA, 32 nt, Human
acucaggaggcugaggcagaagaaucacuuga

SEQ ID NO: 305466 - RNA, 32 nt, Human
acucaggaggcugaggcagaagaaucgcuuga

SEQ ID NO: 305467 - RNA, 32 nt, Human
acucaggaggcugaggcagaaggaucucugga

SEQ ID NO: 305468 - RNA, 32 nt, Human
acucaggaggcugaggcaggaaaaucacuuga

SEQ ID NO: 305469 - RNA, 32 nt, Human
acucaggaggcugaggcaggaagaucgcuuaa

SEQ ID NO: 305470 - RNA, 32 nt, Human
acucaggaggcugaggcaggagaaaaguguga

SEQ ID NO: 305471 - RNA, 32 nt, Human
acucaggaggcugaggcaggagaagggcguga

SEQ ID NO: 305472 - RNA, 32 nt, Human
acucaggaggcugaggcaggagaaggguggga

SEQ ID NO: 305473 - RNA, 32 nt, Human
acucaggaggcugaggcaggagaaucaauuga

SEQ ID NO: 305474 - RNA, 32 nt, Human
acucaggaggcugaggcaggagaaucacucgg

SEQ ID NO: 305475 - RNA, 32 nt, Human
acucaggaggcugaggcaggagaaucacuuga

SEQ ID NO: 305476 - RNA, 32 nt, Human
acucaggaggcugaggcaggagaaucacuugu

SEQ ID NO: 305477 - RNA, 32 nt, Human
acucaggaggcugaggcaggagaaucacuuuc

SEQ ID NO: 305478 - RNA, 32 nt, Human
acucaggaggcugaggcaggagaaucagaggu

SEQ ID NO: 305479 - RNA, 32 nt, Human
acucaggaggcugaggcaggagaaucauuuca

SEQ ID NO: 305480 - RNA, 32 nt, Human
acucaggaggcugaggcaggagaaucccuuga

SEQ ID NO: 305481 - RNA, 32 nt, Human
acucaggaggcugaggcaggagaaucgccuga

SEQ ID NO: 305482 - RNA, 32 nt, Human
acucaggaggcugaggcaggagaaucgcguga

SEQ ID NO: 305483 - RNA, 32 nt, Human
acucaggaggcugaggcaggagaaucgcuaga

SEQ ID NO: 305484 - RNA, 32 nt, Human
acucaggaggcugaggcaggagaaucgcugga

SEQ ID NO: 305485 - RNA, 32 nt, Human
acucaggaggcugaggcaggagaaucgcuuaa

SEQ ID NO: 305486 - RNA, 32 nt, Human
acucaggaggcugaggcaggagaaucgcuuga

SEQ ID NO: 305487 - RNA, 32 nt, Human
acucaggaggcugaggcaggagaaucgcuugu

SEQ ID NO: 305488 - RNA, 32 nt, Human
acucaggaggcugaggcaggagaaucguuuga

SEQ ID NO: 305489 - RNA, 32 nt, Human
acucaggaggcugaggcaggagaaucucggga

SEQ ID NO: 305490 - RNA, 32 nt, Human
acucaggaggcugaggcaggagaaucucuuga

SEQ ID NO: 305491 - RNA, 32 nt, Human
acucaggaggcugaggcaggagaauuacuuga

SEQ ID NO: 305492 - RNA, 32 nt, Human
acucaggaggcugaggcaggagaauuacuuua

SEQ ID NO: 305493 - RNA, 32 nt, Human
acucaggaggcugaggcaggagagucacuuga

SEQ ID NO: 305494 - RNA, 32 nt, Human
acucaggaggcugaggcaggagagugguguga

SEQ ID NO: 305495 - RNA, 32 nt, Human
acucaggaggcugaggcaggagcauugcuuga

SEQ ID NO: 305496 - RNA, 32 nt, Human
acucaggaggcugaggcaggaggaccgcuuga

SEQ ID NO: 305497 - RNA, 32 nt, Human
acucaggaggcugaggcaggaggaucacagug

SEQ ID NO: 305498 - RNA, 32 nt, Human
acucaggaggcugaggcaggaggaucacuuga

SEQ ID NO: 305499 - RNA, 32 nt, Human
acucaggaggcugaggcaggaggaucccuuga

SEQ ID NO: 305500 - RNA, 32 nt, Human
acucaggaggcugaggcaggaggaucccuugg

SEQ ID NO: 305501 - RNA, 32 nt, Human
acucaggaggcugaggcaggaggaucgcuuga

SEQ ID NO: 305502 - RNA, 32 nt, Human
acucaggaggcugaggcaggaggauugccuga

SEQ ID NO: 305503 - RNA, 32 nt, Human
acucaggaggcugaggcaggaggauugcuuga

SEQ ID NO: 305504 - RNA, 32 nt, Human
acucaggaggcugaggcaggagggucucuuga

SEQ ID NO: 305505 - RNA, 32 nt, Human
acucaggaggcugaggcaggauaaucacuuga

SEQ ID NO: 305506 - RNA, 32 nt, Human
acucaggaggcugaggcagggaggauccauug

SEQ ID NO: 305507 - RNA, 32 nt, Human
acucaggaggcugaggcaggggaaucgcuuga

SEQ ID NO: 305508 - RNA, 32 nt, Human
acucaggaggcugaggcaggggaaucucuuga

SEQ ID NO: 305509 - RNA, 32 nt, Human
acucaggaggcugaggcaggugaaucacuuga

SEQ ID NO: 305510 - RNA, 32 nt, Human
acucaggaggcugaggcaguagaaucauuuga

SEQ ID NO: 305511 - RNA, 32 nt, Human
acucaggaggcugaggcaugagaaucacuuga

SEQ ID NO: 305512 - RNA, 32 nt, Human
acucaggaggcugaggcaugagaaucgcuuga

SEQ ID NO: 305513 - RNA, 32 nt, Human
acucaggaggcugaggcaugagaaucgcuugg

SEQ ID NO: 305514 - RNA, 32 nt, Human
acucaggaggcugaggccggagaaucgcuuga

SEQ ID NO: 305515 - RNA, 32 nt, Human
acucaggaggcugaggcgagagaaucgcuuga

SEQ ID NO: 305516 - RNA, 32 nt, Human
acucaggaggcugaggcgggagaaucacuuga

SEQ ID NO: 305517 - RNA, 32 nt, Human
acucaggaggcugaggcgggagaaucccuuga

SEQ ID NO: 305518 - RNA, 32 nt, Human
acucaggaggcugaggcgggaggaucgcuuga

SEQ ID NO: 305519 - RNA, 32 nt, Human
acucaggaggcugaggcggggaggauccauug

SEQ ID NO: 305520 - RNA, 32 nt, Human
acucaggaggcugaggcuagagaaucacuuga

SEQ ID NO: 305521 - RNA, 32 nt, Human
acucaggaggcugaggcuagaggauccuugag

SEQ ID NO: 305522 - RNA, 32 nt, Human
acucaggaggcugaggcuggagaaucauuuga

SEQ ID NO: 305523 - RNA, 32 nt, Human
acucaggaggcugaggcuggaggaucgcuuga

SEQ ID NO: 305524 - RNA, 32 nt, Human
acucaggaggcugaggcuggaggauugguuga

SEQ ID NO: 305525 - RNA, 32 nt, Human
acucaggaggcugaggcuugagcccaggaggu

SEQ ID NO: 305526 - RNA, 32 nt, Human
acucaggaggcugaggggaggaucacuggagc

SEQ ID NO: 305527 - RNA, 32 nt, Human
acucaggaggcugagguaggagaaucaccuga

SEQ ID NO: 305528 - RNA, 32 nt, Human
acucaggaggcugagguaggagaaucacuuga

SEQ ID NO: 305529 - RNA, 32 nt, Human
acucaggaggcugagguaggagaaucauugaa

SEQ ID NO: 305530 - RNA, 32 nt, Human
acucaggaggcugagguaggaggaucgcuuga

SEQ ID NO: 305531 - RNA, 32 nt, Human
acucaggaggcugagguaguaggauuguuuga

SEQ ID NO: 305532 - RNA, 32 nt, Human
acucaggaggcugaggugagagaucuuuugag

SEQ ID NO: 305533 - RNA, 32 nt, Human
acucaggaggcugaggugagaggauuccuuga

SEQ ID NO: 305534 - RNA, 32 nt, Human
acucaggaggcugagguggaaggaucacuuga

SEQ ID NO: 305535 - RNA, 32 nt, Human
acucaggaggcugagguggaaggauugcuuga

SEQ ID NO: 305536 - RNA, 32 nt, Human
acucaggaggcugaggugggaaaaucacuuga

SEQ ID NO: 305537 - RNA, 32 nt, Human
acucaggaggcugaggugggaagaucaucuaa

SEQ ID NO: 305538 - RNA, 32 nt, Human
acucaggaggcugaggugggaggaucaccuaa

SEQ ID NO: 305539 - RNA, 32 nt, Human
acucaggaggcugaggugggaggaucacugga

SEQ ID NO: 305540 - RNA, 32 nt, Human
acucaggaggcugaggugggaggaucacuugg

SEQ ID NO: 305541 - RNA, 32 nt, Human
acucaggaggcugaggugggaggaucauuuga

SEQ ID NO: 305542 - RNA, 32 nt, Human
acucaggaggcugaggugggaggaucccuuga

SEQ ID NO: 305543 - RNA, 32 nt, Human
acucaggaggcugaggugggaggaucgcuugu

SEQ ID NO: 305544 - RNA, 32 nt, Human
acucaggaggcugaggugggaggauugcuuga

SEQ ID NO: 305545 - RNA, 32 nt, Human
acucaggaggcugagucaggagaaucacuuga

SEQ ID NO: 305546 - RNA, 32 nt, Human
acucaggaggcugaugcaagaggaucgcuuga

SEQ ID NO: 305547 - RNA, 32 nt, Human
acucaggaggcugauguaugaggaucaccuga

SEQ ID NO: 305548 - RNA, 32 nt, Human
acucaggaggcuggggaaggaagaucacuuaa

SEQ ID NO: 305549 - RNA, 32 nt, Human
acucaggaggcuguggcgagaggaacacuuga

SEQ ID NO: 305550 - RNA, 32 nt, Human
acucaggaggucagaggacuggcuccugugac

SEQ ID NO: 305551 - RNA, 32 nt, Human
acucaggagguggagguugcagugagcugaga

SEQ ID NO: 305552 - RNA, 32 nt, Human
acucaggagguggagguugcggugagccaaga

SEQ ID NO: 305553 - RNA, 32 nt, Human
acucaggagguugaggugggaggaucacuuga

SEQ ID NO: 305554 - RNA, 32 nt, Human
acucaggagucugagcugggaggaucacucaa

SEQ ID NO: 305555 - RNA, 32 nt, Human
acucaggaguuugagagcagccagggcaacac

SEQ ID NO: 305556 - RNA, 32 nt, Human
acucaggaugacuaagaacagagcaggugaca

SEQ ID NO: 305557 - RNA, 32 nt, Human
acucaggaugcugaagcagaagaauggccuga

SEQ ID NO: 305558 - RNA, 32 nt, Human
acucaggaugcugaaguaggaggaucgcuuga

SEQ ID NO: 305559 - RNA, 32 nt, Human
acucaggaugcugaggugggagaaucaccuga

SEQ ID NO: 305560 - RNA, 20 nt, Human
acucaggauguguauaagau

SEQ ID NO: 305561 - RNA, 22 nt, Human
acucaggcacccgaggcugcug

SEQ ID NO: 305562 - RNA, 32 nt, Human
acucaggccacuggcacguugggccaggcaga

SEQ ID NO: 305563 - RNA, 32 nt, Human
acucaggccaguuucaugcaggagggaacuuu

SEQ ID NO: 305564 - RNA, 32 nt, Human
acucaggccuccagggauccaugggggaguga

SEQ ID NO: 305565 - RNA, 32 nt, Human
acucaggccuguaaucccagcacuuugggagg

SEQ ID NO: 305566 - RNA, 32 nt, Human
acucaggcuacugagguauuuuagagcaacaa

SEQ ID NO: 305567 - RNA, 32 nt, Human
acucaggcuagcccaucugagaagacuuuccu

SEQ ID NO: 305568 - RNA, 32 nt, Human
acucaggcucaagcaauccucccgccucagcc

SEQ ID NO: 305569 - RNA, 32 nt, Human
acucaggcucccagaacugaagaugguggcug

SEQ ID NO: 305570 - RNA, 32 nt, Human
acucaggcugaagaggcccccuugucuuaucu

SEQ ID NO: 305571 - RNA, 20 nt, Human
acucaggcuggagugcagug

SEQ ID NO: 305572 - RNA, 32 nt, Human
acucaggcuugugaaggccccgaguuuugggg

SEQ ID NO: 305573 - RNA, 31 nt, Human
acucagggacuucucuugccuggagggugca

SEQ ID NO: 305574 - RNA, 32 nt, Human
acucagggagagcacguggcauuggagaaggu

SEQ ID NO: 305575 - RNA, 32 nt, Human
acucagggagcagcagcaccuccagacuggaa

SEQ ID NO: 305576 - RNA, 32 nt, Human
acucagggccuggaggcuugcuugggacugga

SEQ ID NO: 305577 - RNA, 32 nt, Human
acucagggcucugggagccaggccuagcucuc

SEQ ID NO: 305578 - RNA, 32 nt, Human
acucagggcugaggcaggagaauugcuugaac

SEQ ID NO: 305579 - RNA, 32 nt, Human
acucagggcugcagccacagacagagaccgug

SEQ ID NO: 305580 - RNA, 32 nt, Human
acucagggcuggccccacaaagggucucgugg

SEQ ID NO: 305581 - RNA, 32 nt, Human
acucaggggaccccacuccccucacacacacc

SEQ ID NO: 305582 - RNA, 32 nt, Human
acucaggggguggagguugcagugaguugaga

SEQ ID NO: 305583 - RNA, 32 nt, Human
acucagggugauggcaggagagcuggcugaca

SEQ ID NO: 305584 - RNA, 32 nt, Human
acucaggguguucgggauaaagaagacucagg

SEQ ID NO: 305585 - RNA, 32 nt, Human
acucagguccccagacugcagugagcugaccu

SEQ ID NO: 305586 - RNA, 22 nt, Human
acucaggugcugaaggguaaua

SEQ ID NO: 305587 - RNA, 32 nt, Human
acucagguggcagagguugcagugagccgaga

SEQ ID NO: 305588 - RNA, 32 nt, Human
acucaggugugaggacaagaaugcaaauggcu

SEQ ID NO: 305589 - RNA, 32 nt, Human
acucagguuccauuccagaccugcugaauugg

SEQ ID NO: 305590 - RNA, 32 nt, Human
acucagguuuucuggaguuggagagaaagggu

SEQ ID NO: 305591 - RNA, 32 nt, Human
acucaguaccuccagcacacccuucucaugga

SEQ ID NO: 305592 - RNA, 32 nt, Human
acucaguaggugagaauaauuaguagguucag

SEQ ID NO: 305593 - RNA, 22 nt, Human
acucaguauagguagggagaua

SEQ ID NO: 305594 - RNA, 32 nt, Human
acucaguaucugguggguaaugguggcuaccc

SEQ ID NO: 305595 - RNA, 32 nt, Human
acucagucacacacaagacaaaagcaugcaau

SEQ ID NO: 305596 - RNA, 32 nt, Human
acucagucaccugguuucccaucucuaagccc

SEQ ID NO: 305597 - RNA, 32 nt, Human
acucagucacugacacugagccugaggacgag

SEQ ID NO: 305598 - RNA, 32 nt, Human
acucaguccacaccccauuggaaaugugggcc

SEQ ID NO: 305599 - RNA, 32 nt, Human
acucaguccccugaccaccacacagcagcugc

SEQ ID NO: 305600 - RNA, 32 nt, Human
acucagucgcccaggcuggagugcaguggcau

SEQ ID NO: 305601 - RNA, 32 nt, Human
acucagucucaggacuucuaagaaaggccugg

SEQ ID NO: 305602 - RNA, 32 nt, Human
acucagugagccagacuguacuguggagaaag

SEQ ID NO: 305603 - RNA, 20 nt, Human
acucagugagugagcaggug

SEQ ID NO: 305604 - RNA, 32 nt, Human
acucagugcauaugugaaagagaaugaugcau

SEQ ID NO: 305605 - RNA, 21 nt, Human
acucagugccccagaccccac

SEQ ID NO: 305606 - RNA, 32 nt, Human
acucagugccugcgucccucacccucaguccc

SEQ ID NO: 305607 - RNA, 32 nt, Human
acucagugcuuuaguuuuaacaacaguaaauu

SEQ ID NO: 305608 - RNA, 32 nt, Human
acucaguggaaccugugugagcuacauguucu

SEQ ID NO: 305609 - RNA, 32 nt, Human
acucaguggccugaacacacaccuucagccac

SEQ ID NO: 305610 - RNA, 32 nt, Human
acucagugggggacauuuuggugaagaugcaa

SEQ ID NO: 305611 - RNA, 32 nt, Human
acucaguggguacuguugugaccauggcugug

SEQ ID NO: 305612 - RNA, 31 nt, Human
acucaguggguggagaggaagcauaugugga

SEQ ID NO: 305613 - RNA, 32 nt, Human
acucagugucuugucucuuagaccagcuccug

SEQ ID NO: 305614 - RNA, 32 nt, Human
acucaguguuacgcaacaggucucugcagcac

SEQ ID NO: 305615 - RNA, 32 nt, Human
acucaguucucuucccugcaguguuuucauuu

SEQ ID NO: 305616 - RNA, 32 nt, Human
acucaguucuuauuugcaccuacuucagugga

SEQ ID NO: 305617 - RNA, 32 nt, Human
acucaguugcccaggcuggauugcgguggcgc

SEQ ID NO: 305618 - RNA, 32 nt, Human
acucaguuucuaggcaccucagaccaaucauc

SEQ ID NO: 305619 - RNA, 32 nt, Human
acucauaccauccacaucagaaucccuuguag

SEQ ID NO: 305620 - RNA, 32 nt, Human
acucauacucacugggcaccagccuugcccuc

SEQ ID NO: 305621 - RNA, 32 nt, Human
acucauacugacuuagagccucuggcugcugu

SEQ ID NO: 305622 - RNA, 32 nt, Human
acucauacugggaauucuaggcugccaaauca

SEQ ID NO: 305623 - RNA, 32 nt, Human
acucauagcaccuaaaaugggucuccaggguc

SEQ ID NO: 305624 - RNA, 32 nt, Human
acucauaggcucaaguaaucuuccugccucaa

SEQ ID NO: 305625 - RNA, 32 nt, Human
acucauaucuggagagaaaaccuaggaguuuc

SEQ ID NO: 305626 - RNA, 32 nt, Human
acucauaugggagagaaagucuagaauauaag

SEQ ID NO: 305627 - RNA, 32 nt, Human
acucaucaacaucagcuaaauauagcugauau

SEQ ID NO: 305628 - RNA, 21 nt, Human
acucaucaauucuucgucccc

SEQ ID NO: 305629 - RNA, 32 nt, Human
acucaucacaugugauagauugcaguggaaau

SEQ ID NO: 305630 - RNA, 32 nt, Human
acucaucacugcagccucagcagggcaggcca

SEQ ID NO: 305631 - RNA, 32 nt, Human
acucaucagauggggaaacaaggccagaagcc

SEQ ID NO: 305632 - RNA, 32 nt, Human
acucaucaggaaccaguccucagucuggucaa

SEQ ID NO: 305633 - RNA, 32 nt, Human
acucauccacaaaggccuuaacuggcucaggg

SEQ ID NO: 305634 - RNA, 32 nt, Human
acucauccaccugcccuccaccaggagugggc

SEQ ID NO: 305635 - RNA, 32 nt, Human
acucauccagccccuucuccaccccuuucaga

SEQ ID NO: 305636 - RNA, 32 nt, Human
acucaucccacucucucccagcauuuugucug

SEQ ID NO: 305637 - RNA, 32 nt, Human
acucauccccucaucuuccucuuaccucaccc

SEQ ID NO: 305638 - RNA, 20 nt, Human
acucauccucuaguccucug

SEQ ID NO: 305639 - RNA, 32 nt, Human
acucaucggucaccagcgaggcgcacgcugaa

SEQ ID NO: 305640 - RNA, 32 nt, Human
acucaucguaugggcucugcaaagggauauuc

SEQ ID NO: 305641 - RNA, 32 nt, Human
acucaucuaccccaaagauaaaguuguauuuu

SEQ ID NO: 305642 - RNA, 32 nt, Human
acucaucuccuccucccacauuucuggagcuu

SEQ ID NO: 305643 - RNA, 19 nt, Human
acucaucucuacagagaua

SEQ ID NO: 305644 - RNA, 32 nt, Human
acucaucugccuagggagggucacagaggcag

SEQ ID NO: 305645 - RNA, 32 nt, Human
acucaucugggguggggagcagcccuaggcag

SEQ ID NO: 305646 - RNA, 32 nt, Human
acucaucuguauccagaaauaauaugggugag

SEQ ID NO: 305647 - RNA, 32 nt, Human
acucaucuuucagaccuaaguccuccugucca

SEQ ID NO: 305648 - RNA, 32 nt, Human
acucaucuuuuaguuuacacuuccuggggaaa

SEQ ID NO: 305649 - RNA, 32 nt, Human
acucaugaaaagagcacagaaaaggauguuug

SEQ ID NO: 305650 - RNA, 22 nt, Human
acucaugaaaauguacaacgcg

SEQ ID NO: 305651 - RNA, 32 nt, Human
acucaugaaguggaucauguucccagucggcu

SEQ ID NO: 305652 - RNA, 29 nt, Human
acucaugaauaccacauuuucuccuaaau

SEQ ID NO: 305653 - RNA, 29 nt, Human
acucaugacaggcuauaccaugcugcgga

SEQ ID NO: 305654 - RNA, 32 nt, Human
acucaugaccucaagugauccgcccacuucgg

SEQ ID NO: 305655 - RNA, 32 nt, Human
acucaugacuguaauccuaguacuuuggaagg

SEQ ID NO: 305656 - RNA, 32 nt, Human
acucaugaggccuagagaaaaguaucaaaggu

SEQ ID NO: 305657 - RNA, 32 nt, Human
acucaugcaaagcauuuuaccguacaaauauc

SEQ ID NO: 305658 - RNA, 32 nt, Human
acucaugcaagacagaagucacugucuauccu

SEQ ID NO: 305659 - RNA, 32 nt, Human
acucaugcaaucuuccugccucaggcuucuga

SEQ ID NO: 305660 - RNA, 32 nt, Human
acucaugcacagagaaggaaaagggaacaucu

SEQ ID NO: 305661 - RNA, 32 nt, Human
acucaugcauuccuacugcuuggaguagcugu

SEQ ID NO: 305662 - RNA, 32 nt, Human
acucaugccagauuuugggauuacaaauagaa

SEQ ID NO: 305663 - RNA, 15 nt, Human
acucaugccauucca

SEQ ID NO: 305664 - RNA, 32 nt, Human
acucaugccuauaaucccagcacuuugggagg

SEQ ID NO: 305665 - RNA, 19 nt, Human
acucaugccugacaucuca

SEQ ID NO: 305666 - RNA, 32 nt, Human
acucaugccugacaucucagcacuucaggagu

SEQ ID NO: 305667 - RNA, 19 nt, Human
acucaugccuguaaaccca

SEQ ID NO: 305668 - RNA, 32 nt, Human
acucaugccuguaaacccagcauuuugugagg

SEQ ID NO: 305669 - RNA, 32 nt, Human
acucaugccuguaaccccagcgcuuugggaag

SEQ ID NO: 305670 - RNA, 32 nt, Human
acucaugccuguaaucccagcacguugggagg

SEQ ID NO: 305671 - RNA, 32 nt, Human
acucaugccuguaaucccagcacugugggaag

SEQ ID NO: 305672 - RNA, 32 nt, Human
acucaugccuguaaucccagcacuuugagagg

SEQ ID NO: 305673 - RNA, 32 nt, Human
acucaugccuguaaucccagcacuuugggagg

SEQ ID NO: 305674 - RNA, 32 nt, Human
acucaugccuguaaucccaguacucugggaag

SEQ ID NO: 305675 - RNA, 32 nt, Human
acucaugccuguaaucccugcacuuugggagg

SEQ ID NO: 305676 - RNA, 32 nt, Human
acucaugccuguaauccuagcacuuugggagg

SEQ ID NO: 305677 - RNA, 32 nt, Human
acucaugccuguaauccuaguacuuugggagg

SEQ ID NO: 305678 - RNA, 32 nt, Human
acucaugccuguaguaaucccagcacuuuugg

SEQ ID NO: 305679 - RNA, 32 nt, Human
acucaugccuugcgugguuuugacucgaguga

SEQ ID NO: 305680 - RNA, 32 nt, Human
acucaugcuuucacauacauacacucacugac

SEQ ID NO: 305681 - RNA, 32 nt, Human
acucauggagaaggguaggauauuuucaauaa

SEQ ID NO: 305682 - RNA, 32 nt, Human
acucauggcacauuuguuuaauauugcuuaua

SEQ ID NO: 305683 - RNA, 32 nt, Human
acucauggccaccaggaggccugcagauccag

SEQ ID NO: 305684 - RNA, 32 nt, Human
acucauggcucugauugcacagucccacuugc

SEQ ID NO: 305685 - RNA, 29 nt, Human
acucauggcuucuccuagcaaggcaguga

SEQ ID NO: 305686 - RNA, 32 nt, Human
acucaugggcuucaguuucaacaucuguaaaa

SEQ ID NO: 305687 - RNA, 32 nt, Human
acucaugucaaugucuccuccaccaucugccc

SEQ ID NO: 305688 - RNA, 32 nt, Human
acucaugucauucagaaaccugaaguguggcu

SEQ ID NO: 305689 - RNA, 32 nt, Human
acucauguccaauacugcuuugccuggugugg

SEQ ID NO: 305690 - RNA, 32 nt, Human
acucaugugagacuucccucuggaugaccaga

SEQ ID NO: 305691 - RNA, 32 nt, Human
acucauguguuuuggggaaaggaagaaguucu

SEQ ID NO: 305692 - RNA, 32 nt, Human
acucauguucauccugcaacagaagcauucuc

SEQ ID NO: 305693 - RNA, 32 nt, Human
acucauguucucuccaaccagggcuggcauca

SEQ ID NO: 305694 - RNA, 32 nt, Human
acucauguucugacccucugugcacuggaucc

SEQ ID NO: 305695 - RNA, 32 nt, Human
acucauguugcucaaugugaggaagcaccagg

SEQ ID NO: 305696 - RNA, 32 nt, Human
acucauuacuacuuuuagcauucuccaggcuu

SEQ ID NO: 305697 - RNA, 32 nt, Human
acucauuagcagauauguagugcagugauuua

SEQ ID NO: 305698 - RNA, 32 nt, Human
acucauuagcugugugacucugggugaguccc

SEQ ID NO: 305699 - RNA, 32 nt, Human
acucauucauagucucaguuacccagauaacc

SEQ ID NO: 305700 - RNA, 32 nt, Human
acucauucaugaggaaucugaugcuccuuugc

SEQ ID NO: 305701 - RNA, 32 nt, Human
acucauucauguugagagggugucaaauugag

SEQ ID NO: 305702 - RNA, 32 nt, Human
acucauucauucuugucccagaauucuguuga

SEQ ID NO: 305703 - RNA, 32 nt, Human
acucauuccguggaugauucuaccuccuuuuu

SEQ ID NO: 305704 - RNA, 32 nt, Human
acucauuccuaaugagccuccuucccauggau

SEQ ID NO: 305705 - RNA, 32 nt, Human
acucauucucagauuaaauugccacuuaaaga

SEQ ID NO: 305706 - RNA, 32 nt, Human
acucauucuccccagacgccaaggaugguggu

SEQ ID NO: 305707 - RNA, 32 nt, Human
acucauucugcagcaccgccucuuggggcagu

SEQ ID NO: 305708 - RNA, 32 nt, Human
acucauugcacaucuucucuucaguuuagaga

SEQ ID NO: 305709 - RNA, 32 nt, Human
acucauugcagccaagaugcacaaagcacagu

SEQ ID NO: 305710 - RNA, 32 nt, Human
acucauugcagccucgaacuccugggcuuaag

SEQ ID NO: 305711 - RNA, 32 nt, Human
acucauugccuguaaucccagcacuuugggag

SEQ ID NO: 305712 - RNA, 32 nt, Human
acucauuguccaccuggccucugaggccaggc

SEQ ID NO: 305713 - RNA, 32 nt, Human
acucauuguccccuuccucuaauuaaaaagau

SEQ ID NO: 305714 - RNA, 32 nt, Human
acucauuguucuccagucucugcagcaggaag

SEQ ID NO: 305715 - RNA, 32 nt, Human
acucauuuagagaauguccuggcgucgguuuu

SEQ ID NO: 305716 - RNA, 32 nt, Human
acucauuuagcagaaaguccagaagugcucga

SEQ ID NO: 305717 - RNA, 32 nt, Human
acucauuucaguaccagccuuugggaagucgu

SEQ ID NO: 305718 - RNA, 32 nt, Human
acucauuuccaaaauucacacaaacuuacaug

SEQ ID NO: 305719 - RNA, 32 nt, Human
acucauuucuggucuuggggccagucucaggg

SEQ ID NO: 305720 - RNA, 32 nt, Human
acucauuugacuuuugcacugacuguauuauc

SEQ ID NO: 305721 - RNA, 32 nt, Human
acuccaaaagugcuggguuuacaggcaugagc

SEQ ID NO: 305722 - RNA, 32 nt, Human
acuccaaacccauggcuccagaacggggaccc

SEQ ID NO: 305723 - RNA, 32 nt, Human
acuccaaacccccacuucccucauuuuuauuu

SEQ ID NO: 305724 - RNA, 32 nt, Human
acuccaaacuggaggcuaucagugaguguucu

SEQ ID NO: 305725 - RNA, 32 nt, Human
acuccaaagguggagguugcaguaagcugaaa

SEQ ID NO: 305726 - RNA, 32 nt, Human
acuccaaaguucucaaaaugagaaggcagaaa

SEQ ID NO: 305727 - RNA, 32 nt, Human
acuccaaauccccucuaguucucccuccccuc

SEQ ID NO: 305728 - RNA, 32 nt, Human
acuccaaccaaaagccaaaaaccaaagcaaga

SEQ ID NO: 305729 - RNA, 32 nt, Human
acuccaaccagcggccauuuuccuaguaccug

SEQ ID NO: 305730 - RNA, 32 nt, Human
acuccaacccugccccuuucugucccauccuu

SEQ ID NO: 305731 - RNA, 32 nt, Human
acuccaacccuugcuugucucaaggcaccuac

SEQ ID NO: 305732 - RNA, 32 nt, Human
acuccaaccugcacuccagccugggcaacaga

SEQ ID NO: 305733 - RNA, 21 nt, Human
acuccaaccugggcaacagaa

SEQ ID NO: 305734 - RNA, 32 nt, Human
acuccaacuuccaauaacugacaggugauuau

SEQ ID NO: 305735 - RNA, 32 nt, Human
acuccaagccugggcaacagagugagacacug

SEQ ID NO: 305736 - RNA, 32 nt, Human
acuccaagccuuccaccaaaacagugccccac

SEQ ID NO: 305737 - RNA, 25 nt, Human
acuccaagcugcacuuucuuggggu

SEQ ID NO: 305738 - RNA, 32 nt, Human
acuccaaggaggucccaggaagaggugucauc

SEQ ID NO: 305739 - RNA, 18 nt, Human
acuccaagucccucugca

SEQ ID NO: 305740 - RNA, 32 nt, Human
acuccaaguccugcccugccacccucggccuc

SEQ ID NO: 305741 - RNA, 32 nt, Human
acuccaaguucucucuuccugucccacacucu

SEQ ID NO: 305742 - RNA, 25 nt, Human
acuccaauaaucacauccaaugacu

SEQ ID NO: 305743 - RNA, 32 nt, Human
acuccaaugccuuucaggaaaggacucggcac

SEQ ID NO: 305744 - RNA, 32 nt, Human
acuccaauuccccuagcacuccagaaggccgg

SEQ ID NO: 305745 - RNA, 22 nt, Human
acuccacacaguguguaaaaua

SEQ ID NO: 305746 - RNA, 32 nt, Human
acuccacaccauucuucuagaucucugguguu

SEQ ID NO: 305747 - RNA, 32 nt, Human
acuccacacccaggggaguuaaagcacaugaa

SEQ ID NO: 305748 - RNA, 32 nt, Human
acuccacacuccuagcaacugugaaaccaagg

SEQ ID NO: 305749 - RNA, 32 nt, Human
acuccacacuuuccuuucugugcuccuuccaa

SEQ ID NO: 305750 - RNA, 32 nt, Human
acuccacagacacugacuguuuuuguccuaug

SEQ ID NO: 305751 - RNA, 32 nt, Human
acuccacagauggguggucucuugggaucaga

SEQ ID NO: 305752 - RNA, 32 nt, Human
acuccacagcaggaagugccacugccugagca

SEQ ID NO: 305753 - RNA, 32 nt, Human
acuccacagcccagaucccauucuuaagagca

SEQ ID NO: 305754 - RNA, 32 nt, Human
acuccacaggcgccuccugccaggucugcucc

SEQ ID NO: 305755 - RNA, 32 nt, Human
acuccacaucuucugccccaguguguccccac

SEQ ID NO: 305756 - RNA, 32 nt, Human
acuccaccaaccgaagcccccaaaaggagccc

SEQ ID NO: 305757 - RNA, 32 nt, Human
acuccaccaaccucacgaguuucuaacaccca

SEQ ID NO: 305758 - RNA, 19 nt, Human
acuccaccacugaguuaaa

SEQ ID NO: 305759 - RNA, 32 nt, Human
acuccaccagaggagagcacaggagagcuagg

SEQ ID NO: 305760 - RNA, 18 nt, Human
acuccaccagcacuggca

SEQ ID NO: 305761 - RNA, 32 nt, Human
acuccaccagccccaguguugcugggcuuccc

SEQ ID NO: 305762 - RNA, 32 nt, Human
acuccaccagccuggaccuccaccuccccugg

SEQ ID NO: 305763 - RNA, 32 nt, Human
acuccaccagcgaccuccacacucccgggacg

SEQ ID NO: 305764 - RNA, 23 nt, Human
acuccacccccuuccaggucccu

SEQ ID NO: 305765 - RNA, 19 nt, Human
acuccaccccuccacaccc

SEQ ID NO: 305766 - RNA, 21 nt, Human
acuccaccccugccaggcccc

SEQ ID NO: 305767 - RNA, 32 nt, Human
acuccacccugagggccccauccucugaaccc

SEQ ID NO: 305768 - RNA, 24 nt, Human
acuccacccuucuccagggacccu

SEQ ID NO: 305769 - RNA, 32 nt, Human
acuccaccugauggcaggugacccggauagaa

SEQ ID NO: 305770 - RNA, 16 nt, Human
acuccaccugccgcca

SEQ ID NO: 305771 - RNA, 32 nt, Human
acuccacguuccccagcacaucccagguggug

SEQ ID NO: 305772 - RNA, 22 nt, Human
acuccacuauacuccagggccc

SEQ ID NO: 305773 - RNA, 24 nt, Human
acuccacucaguguccagggaccc

SEQ ID NO: 305774 - RNA, 32 nt, Human
acuccacuccagccugggcaacagugugagac

SEQ ID NO: 305775 - RNA, 32 nt, Human
acuccacucucccagccccacuuuuucucuug

SEQ ID NO: 305776 - RNA, 32 nt, Human
acuccacugcacuccagccugggcaacagagc

SEQ ID NO: 305777 - RNA, 32 nt, Human
acuccacugcacuccagccugggcgacagaau

SEQ ID NO: 305778 - RNA, 32 nt, Human
acuccacugcacuccagccugggugacagacc

SEQ ID NO: 305779 - RNA, 32 nt, Human
acuccacugccucuauccauugaguacuguau

SEQ ID NO: 305780 - RNA, 32 nt, Human
acuccacuguaguuuacuuugccuguaccauu

SEQ ID NO: 305781 - RNA, 32 nt, Human
acuccacuguugaaacacugugccagugagaa

SEQ ID NO: 305782 - RNA, 32 nt, Human
acuccacuuacuugcucagucuucccacucuc

SEQ ID NO: 305783 - RNA, 20 nt, Human
acuccacuuggcuccagggg

SEQ ID NO: 305784 - RNA, 32 nt, Human
acuccacuugucucuuaacucagcuuucaaga

SEQ ID NO: 305785 - RNA, 32 nt, Human
acuccacuuucuuccuuuguacaguaacuuuc

SEQ ID NO: 305786 - RNA, 32 nt, Human
acuccagaaagccaugcagagccuugugccau

SEQ ID NO: 305787 - RNA, 21 nt, Human
acuccagaagcagcagcuaga

SEQ ID NO: 305788 - RNA, 32 nt, Human
acuccagaauccagagcaaaucagcccuucuc

SEQ ID NO: 305789 - RNA, 22 nt, Human
acuccagaccugcagccccaga

SEQ ID NO: 305790 - RNA, 32 nt, Human
acuccagacuccugcccuuuuauuuucuccag

SEQ ID NO: 305791 - RNA, 19 nt, Human
acuccagagacuucugcca

SEQ ID NO: 305792 - RNA, 32 nt, Human
acuccagagagggagauccccaguacuugacu

SEQ ID NO: 305793 - RNA, 32 nt, Human
acuccagagccaggugcacaccugccagguga

SEQ ID NO: 305794 - RNA, 22 nt, Human
acuccagagccugggcgacaga

SEQ ID NO: 305795 - RNA, 32 nt, Human
acuccagaggccugaggcuccagggcuggcuc

SEQ ID NO: 305796 - RNA, 32 nt, Human
acuccagaggcugaaaugggaggaucucuuga

SEQ ID NO: 305797 - RNA, 32 nt, Human
acuccagaggcugaggcaggagaaucacuuga

SEQ ID NO: 305798 - RNA, 32 nt, Human
acuccagaggcugaggcaggaggauugcuuga

SEQ ID NO: 305799 - RNA, 32 nt, Human
acuccagaggcugagguaggaggaucgccuga

SEQ ID NO: 305800 - RNA, 32 nt, Human
acuccagaggcugaggugggaagaucauuuga

SEQ ID NO: 305801 - RNA, 32 nt, Human
acuccagaggcugucgugggaggaucauguga

SEQ ID NO: 305802 - RNA, 32 nt, Human
acuccagagguagcagcauccuugggggaagg

SEQ ID NO: 305803 - RNA, 32 nt, Human
acuccagagguggagguugcaguaagcugaga

SEQ ID NO: 305804 - RNA, 32 nt, Human
acuccagagucaccugucucaucggcucccag

SEQ ID NO: 305805 - RNA, 30 nt, Human
acuccagagucuuaccugcuccuguguagg

SEQ ID NO: 305806 - RNA, 32 nt, Human
acuccagcaaaugacccaucguuuuccaccag

SEQ ID NO: 305807 - RNA, 32 nt, Human
acuccagcacuccagccugggugacagagcaa

SEQ ID NO: 305808 - RNA, 32 nt, Human
acuccagcagagcccugaaguguggacaagcu

SEQ ID NO: 305809 - RNA, 32 nt, Human
acuccagccaccucaccugauuggcuaucuug

SEQ ID NO: 305810 - RNA, 19 nt, Human
acuccagccaccuucucca

SEQ ID NO: 305811 - RNA, 32 nt, Human
acuccagccagcgccucacagguucaggugau

SEQ ID NO: 305812 - RNA, 32 nt, Human
acuccagccaggggagcagggaagaagaaggg

SEQ ID NO: 305813 - RNA, 32 nt, Human
acuccagcccagaccaccuaauacugcagggu

SEQ ID NO: 305814 - RNA, 32 nt, Human
acuccagccccaggcuguggcucugcagcccc

SEQ ID NO: 305815 - RNA, 22 nt, Human
acuccagcccugacuucugcuc

SEQ ID NO: 305816 - RNA, 32 nt, Human
acuccagccgcugggagcgcgaggccauguaa

SEQ ID NO: 305817 - RNA, 22 nt, Human
acuccagccuggacaacaagag

SEQ ID NO: 305818 - RNA, 32 nt, Human
acuccagccugggagacagagucuugcucugu

SEQ ID NO: 305819 - RNA, 32 nt, Human
acuccagccugggcaacaaagugagacucggu

SEQ ID NO: 305820 - RNA, 32 nt, Human
acuccagccugggcaacaaagugagacucugc

SEQ ID NO: 305821 - RNA, 22 nt, Human
acuccagccugggcaacaagag

SEQ ID NO: 305822 - RNA, 32 nt, Human
acuccagccugggcaacaagagagaagguccu

SEQ ID NO: 305823 - RNA, 32 nt, Human
acuccagccugggcaacaagagcgagacuguc

SEQ ID NO: 305824 - RNA, 32 nt, Human
acuccagccugggcaacaagagcgaggcuccg

SEQ ID NO: 305825 - RNA, 21 nt, Human
acuccagccugggcaacagaa

SEQ ID NO: 305826 - RNA, 32 nt, Human
acuccagccugggccagaaugagacuccgucu

SEQ ID NO: 305827 - RNA, 32 nt, Human
acuccagccugggcgacaagagcgagacucuc

SEQ ID NO: 305828 - RNA, 32 nt, Human
acuccagccugggcgacaagagcgagacucug

SEQ ID NO: 305829 - RNA, 32 nt, Human
acuccagccugggcgacagcaagacuccgucu

SEQ ID NO: 305830 - RNA, 32 nt, Human
acuccagccugggcgacagugagacccugucu

SEQ ID NO: 305831 - RNA, 32 nt, Human
acuccagccugggcgacugugagaccccgucu

SEQ ID NO: 305832 - RNA, 32 nt, Human
acuccagccugggggacaggagcgagacucca

SEQ ID NO: 305833 - RNA, 26 nt, Human
acuccagccugggugacagagcgaga

SEQ ID NO: 305834 - RNA, 26 nt, Human
acuccagccugggugacagagcgagg

SEQ ID NO: 305835 - RNA, 26 nt, Human
acuccagccugggugacagagugaga

SEQ ID NO: 305836 - RNA, 32 nt, Human
acuccagccugggugacagcaagacccugucu

SEQ ID NO: 305837 - RNA, 26 nt, Human
acuccagccugggugacagggugaga

SEQ ID NO: 305838 - RNA, 32 nt, Human
acuccagccugggugaggagagcgagacucuu

SEQ ID NO: 305839 - RNA, 26 nt, Human
acuccagccugggugauagagugaga

SEQ ID NO: 305840 - RNA, 32 nt, Human
acuccagccuggguggacagagcaagacuccg

SEQ ID NO: 305841 - RNA, 26 nt, Human
acuccagccuggguggcagagcgaga

SEQ ID NO: 305842 - RNA, 26 nt, Human
acuccagccuggguggcagagugaga

SEQ ID NO: 305843 - RNA, 32 nt, Human
acuccagccuuggcgacagagggagacucugu

SEQ ID NO: 305844 - RNA, 31 nt, Human
acuccagcucugcuccguaugccaagaggag

SEQ ID NO: 305845 - RNA, 32 nt, Human
acuccagcuggguuggaaaacaguauuuucca

SEQ ID NO: 305846 - RNA, 32 nt, Human
acuccagcuuccccacugccucugugugcccc

SEQ ID NO: 305847 - RNA, 26 nt, Human
acuccagcuugggugacagagcgaga

SEQ ID NO: 305848 - RNA, 26 nt, Human
acuccagcuugggugacagagugaga

SEQ ID NO: 305849 - RNA, 24 nt, Human
acuccaggaagacgcccccggcag

SEQ ID NO: 305850 - RNA, 32 nt, Human
acuccaggaauaagacaaaaggagaggaggag

SEQ ID NO: 305851 - RNA, 32 nt, Human
acuccaggaauggggaaaugugacaccaccau

SEQ ID NO: 305852 - RNA, 32 nt, Human
acuccaggacucacugcccuccagaaaacaga

SEQ ID NO: 305853 - RNA, 32 nt, Human
acuccaggagagaggaaggaagauguucccgc

SEQ ID NO: 305854 - RNA, 32 nt, Human
acuccaggagcuauggcaguguuaaugaacau

SEQ ID NO: 305855 - RNA, 32 nt, Human
acuccaggaggcgcaggcugcagugagcucug

SEQ ID NO: 305856 - RNA, 32 nt, Human
acuccaggaggcggaggaggcuaguggcagua

SEQ ID NO: 305857 - RNA, 32 nt, Human
acuccaggcaaaccugccccaucuugucgcuu

SEQ ID NO: 305858 - RNA, 32 nt, Human
acuccaggcacguaccaucaugcuagcuaauu

SEQ ID NO: 305859 - RNA, 32 nt, Human
acuccaggccugggugacagugcgagacccug

SEQ ID NO: 305860 - RNA, 32 nt, Human
acuccaggcuacagugugagcccagguguucu

SEQ ID NO: 305861 - RNA, 32 nt, Human
acuccaggcucaggcuggagccgugauggcac

SEQ ID NO: 305862 - RNA, 32 nt, Human
acuccaggcuccccaucucccugaagcuucca

SEQ ID NO: 305863 - RNA, 21 nt, Human
acuccagggcagaccuagacu

SEQ ID NO: 305864 - RNA, 18 nt, Human
acuccagggccaaugcac

SEQ ID NO: 305865 - RNA, 22 nt, Human
acuccagggcccuaccugcauu

SEQ ID NO: 305866 - RNA, 32 nt, Human
acuccagggucugagugggccaaccuugacua

SEQ ID NO: 305867 - RNA, 32 nt, Human
acuccagggucugggcucccagguggaccaug

SEQ ID NO: 305868 - RNA, 32 nt, Human
acuccaggguucagacagggcugcacaggcgg

SEQ ID NO: 305869 - RNA, 32 nt, Human
acuccaggugggagugagggagcccagccccc

SEQ ID NO: 305870 - RNA, 32 nt, Human
acuccagguuacugcaacccuaacucacucua

SEQ ID NO: 305871 - RNA, 32 nt, Human
acuccagguucugcaaaaguuugaaggucagc

SEQ ID NO: 305872 - RNA, 32 nt, Human
acuccaguaccacugccuucacccugacaagg

SEQ ID NO: 305873 - RNA, 32 nt, Human
acuccaguauuaaaaaucucucauguuguuuu

SEQ ID NO: 305874 - RNA, 26 nt, Human
acuccagucugggugacagagugaga

SEQ ID NO: 305875 - RNA, 32 nt, Human
acuccagugcagcugcccacccugccgccaug

SEQ ID NO: 305876 - RNA, 32 nt, Human
acuccaguguggcaucauguggcagcugcucc

SEQ ID NO: 305877 - RNA, 32 nt, Human
acuccaguucauucacucaguggcucauccac

SEQ ID NO: 305878 - RNA, 32 nt, Human
acuccaguucccaacaaguuccucaucuucau

SEQ ID NO: 305879 - RNA, 32 nt, Human
acuccaguucucuagcauggccugagguaugg

SEQ ID NO: 305880 - RNA, 32 nt, Human
acuccaguuugggaacuauaacacagcagaac

SEQ ID NO: 305881 - RNA, 32 nt, Human
acuccauagagaggaaugacaggcugggccua

SEQ ID NO: 305882 - RNA, 32 nt, Human
acuccauagcagccccugagccugcugggcug

SEQ ID NO: 305883 - RNA, 32 nt, Human
acuccaucacccaggcuggaguccaguggugu

SEQ ID NO: 305884 - RNA, 32 nt, Human
acuccaucacucaggcuggaguacagugcuga

SEQ ID NO: 305885 - RNA, 32 nt, Human
acuccaucagccaggcuggagugcaguggugc

SEQ ID NO: 305886 - RNA, 32 nt, Human
acuccauccaaagaagagggaaagcaccgaau

SEQ ID NO: 305887 - RNA, 32 nt, Human
acuccauccagccugggugacagggcgagacu

SEQ ID NO: 305888 - RNA, 32 nt, Human
acuccauccagccugggugacagggugagacu

SEQ ID NO: 305889 - RNA, 32 nt, Human
acuccauccaguccugaggagccuuaggaugc

SEQ ID NO: 305890 - RNA, 22 nt, Human
acuccauccuacccagggaccc

SEQ ID NO: 305891 - RNA, 32 nt, Human
acuccaucggcaggcccgagcccagggaccag

SEQ ID NO: 305892 - RNA, 32 nt, Human
acuccaucguccaggcuggagugcaguggcgc

SEQ ID NO: 305893 - RNA, 22 nt, Human
acuccaucuccuuucuuuaaag

SEQ ID NO: 305894 - RNA, 32 nt, Human
acuccaucucugaaaugucucuacuuauuguc

SEQ ID NO: 305895 - RNA, 18 nt, Human
acuccaucuguaauccca

SEQ ID NO: 305896 - RNA, 32 nt, Human
acuccaucugugaaagaaguuugcuaaagcaa

SEQ ID NO: 305897 - RNA, 32 nt, Human
acuccaugagcaccccaaggcugcaguuuguu

SEQ ID NO: 305898 - RNA, 32 nt, Human
acuccaugaggucacuguagaccuggaccauu

SEQ ID NO: 305899 - RNA, 32 nt, Human
acuccaugcagauggagagaugagcaugguga

SEQ ID NO: 305900 - RNA, 32 nt, Human
acuccaugcuucuuagccugguggcaguggug

SEQ ID NO: 305901 - RNA, 32 nt, Human
acuccauggagacagccgaccggcgacagccu

SEQ ID NO: 305902 - RNA, 31 nt, Human
acuccauggcaauaagauaccaaaguauaaa

SEQ ID NO: 305903 - RNA, 32 nt, Human
acuccauguagccaccauccagcuucaacauc

SEQ ID NO: 305904 - RNA, 32 nt, Human
acuccaugucuguaucagcuacccagaggacc

SEQ ID NO: 305905 - RNA, 32 nt, Human
acuccauugcaaauucagcugugaggagauuc

SEQ ID NO: 305906 - RNA, 32 nt, Human
acuccauugcccaggcuggaguacaauggugc

SEQ ID NO: 305907 - RNA, 32 nt, Human
acuccauuggagggaaaggaagagucuuagaa

SEQ ID NO: 305908 - RNA, 32 nt, Human
acuccauuuauaggcacaucuccuucauuucc

SEQ ID NO: 305909 - RNA, 32 nt, Human
acuccauuucauaaaggcacugaucugucacc

SEQ ID NO: 305910 - RNA, 32 nt, Human
acuccauuucaucauuguuucugcaugaauau

SEQ ID NO: 305911 - RNA, 32 nt, Human
acuccauuugggaacucacugccuuauaaagg

SEQ ID NO: 305912 - RNA, 32 nt, Human
acuccauuuugaaaaagaccuguacuuuaaac

SEQ ID NO: 305913 - RNA, 32 nt, Human
acuccauuuugaaaaagaccuguacuuuaaau

SEQ ID NO: 305914 - RNA, 19 nt, Human
acuccauuuugcucaggga

SEQ ID NO: 305915 - RNA, 32 nt, Human
acucccaaacuccagugcucucauccagaggc

SEQ ID NO: 305916 - RNA, 32 nt, Human
acucccaaagugcugaaauuacaggcaugagc

SEQ ID NO: 305917 - RNA, 32 nt, Human
acucccaaagugcugggauuacaggcgugagc

SEQ ID NO: 305918 - RNA, 32 nt, Human
acucccaaagugcugggauuacaggcgugagu

SEQ ID NO: 305919 - RNA, 32 nt, Human
acucccaaagugcugggauuacaggcuugacc

SEQ ID NO: 305920 - RNA, 32 nt, Human
acucccaaagugcugggauuacaggugugagc

SEQ ID NO: 305921 - RNA, 32 nt, Human
acucccaacaugguauccuguccuuucccuaa

SEQ ID NO: 305922 - RNA, 32 nt, Human
acucccaagaagagaagagauuggcaaauggg

SEQ ID NO: 305923 - RNA, 32 nt, Human
acucccaagagcuuacuguuuaaucaccagaa

SEQ ID NO: 305924 - RNA, 32 nt, Human
acucccaagccgccggcagcaggguagcaggg

SEQ ID NO: 305925 - RNA, 32 nt, Human
acucccaauugaugugaccacacucuucuuaa

SEQ ID NO: 305926 - RNA, 32 nt, Human
acucccacaagcucugccuucccucccugguc

SEQ ID NO: 305927 - RNA, 32 nt, Human
acucccacacaggcccacacacccucacugac

SEQ ID NO: 305928 - RNA, 32 nt, Human
acucccacacgcccacacagcaccucugccag

SEQ ID NO: 305929 - RNA, 23 nt, Human
acucccaccaacuacucuuaggg

SEQ ID NO: 305930 - RNA, 32 nt, Human
acucccaccauccugugaaccccacuccacuc

SEQ ID NO: 305931 - RNA, 32 nt, Human
acucccaccaucuucacccccaccucaggucc

SEQ ID NO: 305932 - RNA, 32 nt, Human
acucccaccuucaggcaggauuggguaguaca

SEQ ID NO: 305933 - RNA, 32 nt, Human
acucccacucacugacccugucccacaucuua

SEQ ID NO: 305934 - RNA, 32 nt, Human
acucccacugcacuccagcucggggaacagag

SEQ ID NO: 305935 - RNA, 32 nt, Human
acucccacugcugccucuccugggcauggcug

SEQ ID NO: 305936 - RNA, 32 nt, Human
acucccacugucaucagcuuucaccuuggauu

SEQ ID NO: 305937 - RNA, 32 nt, Human
acucccagaggcugaugcaccucccagacccg

SEQ ID NO: 305938 - RNA, 32 nt, Human
acucccagagggcagugaccuacucugcuccc

SEQ ID NO: 305939 - RNA, 32 nt, Human
acucccagaguuuccauuucaggaggucuggg

SEQ ID NO: 305940 - RNA, 32 nt, Human
acucccagcccagugcaccccaacuuuauagc

SEQ ID NO: 305941 - RNA, 32 nt, Human
acucccagcccuggcccugaccuuugugggcc

SEQ ID NO: 305942 - RNA, 32 nt, Human
acucccagccucaggugauccacccaccucag

SEQ ID NO: 305943 - RNA, 32 nt, Human
acucccagccuccuggccccuucuguacauga

SEQ ID NO: 305944 - RNA, 32 nt, Human
acucccagccugacaaggagggcugcgucucc

SEQ ID NO: 305945 - RNA, 32 nt, Human
acucccagccugggcaacggagugagacucug

SEQ ID NO: 305946 - RNA, 32 nt, Human
acucccagccugggugacagagcgagacucug

SEQ ID NO: 305947 - RNA, 32 nt, Human
acucccagccuuccccauaucuccugccucag

SEQ ID NO: 305948 - RNA, 32 nt, Human
acucccagcuacucaggaggcugaggcaggag

SEQ ID NO: 305949 - RNA, 32 nt, Human
acucccagcuacucgggaggcucaggcaggag

SEQ ID NO: 305950 - RNA, 32 nt, Human
acucccagcuacuugggaggcugagacaggag

SEQ ID NO: 305951 - RNA, 24 nt, Human
acucccagcuccuccugcagcuca

SEQ ID NO: 305952 - RNA, 26 nt, Human
acucccagcuucuucugaucauuuca

SEQ ID NO: 305953 - RNA, 21 nt, Human
acucccagcuuucccuuuuca

SEQ ID NO: 305954 - RNA, 22 nt, Human
acucccagcuuuguuuucauuu

SEQ ID NO: 305955 - RNA, 32 nt, Human
acucccaggagagggaagaugggagccagggc

SEQ ID NO: 305956 - RNA, 32 nt, Human
acucccaggaguuuccucugcagagccccgcg

SEQ ID NO: 305957 - RNA, 32 nt, Human
acucccagggacaagggaaggaagggacacac

SEQ ID NO: 305958 - RNA, 32 nt, Human
acucccaguagaccaggagcuccgggaggcag

SEQ ID NO: 305959 - RNA, 32 nt, Human
acucccaguccaaauguccuccagaagccucu

SEQ ID NO: 305960 - RNA, 32 nt, Human
acucccaguggcacagaugacgacuuugcagu

SEQ ID NO: 305961 - RNA, 25 nt, Human
acucccauaucauauaaaauuucag

SEQ ID NO: 305962 - RNA, 32 nt, Human
acucccauccacccuucuccaugcucaucccc

SEQ ID NO: 305963 - RNA, 19 nt, Human
acucccaucccacucucag

SEQ ID NO: 305964 - RNA, 32 nt, Human
acucccauccuuuccucucuccccguucaugc

SEQ ID NO: 305965 - RNA, 32 nt, Human
acucccaugcugcuguuggcuccaucucucca

SEQ ID NO: 305966 - RNA, 32 nt, Human
acucccauucuuugccaggagaucuuacccau

SEQ ID NO: 305967 - RNA, 32 nt, Human
acucccauuugcuuccugugaaguaguuacua

SEQ ID NO: 305968 - RNA, 32 nt, Human
acucccauuuugcugcaagacccccuuucaac

SEQ ID NO: 305969 - RNA, 32 nt, Human
acuccccaaagugccugccaaaccccagggcc

SEQ ID NO: 305970 - RNA, 32 nt, Human
acuccccacacagcucaugagaugugugaccc

SEQ ID NO: 305971 - RNA, 32 nt, Human
acuccccaccccagcauuucauucauaccaga

SEQ ID NO: 305972 - RNA, 32 nt, Human
acuccccaccucccaccaacauauacauuuug

SEQ ID NO: 305973 - RNA, 32 nt, Human
acuccccagagcagcuuggcccagggaggggg

SEQ ID NO: 305974 - RNA, 32 nt, Human
acuccccagcauggaggaagguggugauuuug

SEQ ID NO: 305975 - RNA, 22 nt, Human
acuccccagccaaaugcacggu

SEQ ID NO: 305976 - RNA, 32 nt, Human
acuccccagcccagagagacgcugcuuuuacc

SEQ ID NO: 305977 - RNA, 21 nt, Human
acuccccagcccagcaccccu

SEQ ID NO: 305978 - RNA, 21 nt, Human
acuccccagcccccucagagu

SEQ ID NO: 305979 - RNA, 22 nt, Human
acuccccagcccuuuccucagg

SEQ ID NO: 305980 - RNA, 32 nt, Human
acuccccagcguuuuuccucuggaaaugccca

SEQ ID NO: 305981 - RNA, 32 nt, Human
acuccccagcuggcugaaaacugguggagcug

SEQ ID NO: 305982 - RNA, 32 nt, Human
acuccccagcugggcuguuuucuaagccgauc

SEQ ID NO: 305983 - RNA, 32 nt, Human
acuccccaggaaaugacugccuuccuugggac

SEQ ID NO: 305984 - RNA, 21 nt, Human
acuccccaggagcucccaggg

SEQ ID NO: 305985 - RNA, 21 nt, Human
acuccccaggccucccacggu

SEQ ID NO: 305986 - RNA, 32 nt, Human
acuccccaggcuugugcucucucagcuugaga

SEQ ID NO: 305987 - RNA, 32 nt, Human
acuccccaguagcugggacuacaggcgcccgc

SEQ ID NO: 305988 - RNA, 23 nt, Human
acuccccaguuccgccuugaggu

SEQ ID NO: 305989 - RNA, 19 nt, Human
acuccccauaccccauucu

SEQ ID NO: 305990 - RNA, 22 nt, Human
acuccccaucuguucucagggu

SEQ ID NO: 305991 - RNA, 32 nt, Human
acucccccaagcugacucauccuaacuaacag

SEQ ID NO: 305992 - RNA, 32 nt, Human
acucccccaccuccucaccacacacaugcucu

SEQ ID NO: 305993 - RNA, 32 nt, Human
acucccccagaacuucccagucugccuucucc

SEQ ID NO: 305994 - RNA, 32 nt, Human
acucccccagccccagagaaacugccacauac

SEQ ID NO: 305995 - RNA, 32 nt, Human
acucccccagcccucaguuuucagucaaguuc

SEQ ID NO: 305996 - RNA, 32 nt, Human
acucccccaucuugcauguugugacaccuuca

SEQ ID NO: 305997 - RNA, 32 nt, Human
acucccccgaagaaggaccagugaagacguca

SEQ ID NO: 305998 - RNA, 32 nt, Human
acucccccgcaugagguaugggcuguucuaua

SEQ ID NO: 305999 - RNA, 19 nt, Human
acucccccgcccugcuggc

SEQ ID NO: 306000 - RNA, 32 nt, Human
acucccccggggaaagggagacccccacccuc

SEQ ID NO: 306001 - RNA, 32 nt, Human
acucccccuccaggccaucucauuggcugcuu

SEQ ID NO: 306002 - RNA, 32 nt, Human
acucccccugcaguucuucacauuucagaggg

SEQ ID NO: 306003 - RNA, 32 nt, Human
acucccccugccggcccucugccaucaaauug

SEQ ID NO: 306004 - RNA, 21 nt, Human
acuccccgaaccacucagggu

SEQ ID NO: 306005 - RNA, 21 nt, Human
acuccccgcaccacucagggu

SEQ ID NO: 306006 - RNA, 32 nt, Human
acuccccgccagggcccugcugucagugcgcc

SEQ ID NO: 306007 - RNA, 32 nt, Human
acuccccggacauggcccugccccuaugggac

SEQ ID NO: 306008 - RNA, 20 nt, Human
acuccccggccacccgcagg

SEQ ID NO: 306009 - RNA, 32 nt, Human
acuccccguucagaccagagugccccggcccc

SEQ ID NO: 306010 - RNA, 32 nt, Human
acuccccucacauuccacaggcccauggacuc

SEQ ID NO: 306011 - RNA, 32 nt, Human
acuccccuccacccuccucucucgcacccacc

SEQ ID NO: 306012 - RNA, 32 nt, Human
acuccccuccagccugggcgacagagugagac

SEQ ID NO: 306013 - RNA, 32 nt, Human
acuccccuccaggguacccacagaucugcauu

SEQ ID NO: 306014 - RNA, 32 nt, Human
acuccccucccgccuacccccaucccaaacug

SEQ ID NO: 306015 - RNA, 32 nt, Human
acuccccuccgcucccuucuuaggcacagcau

SEQ ID NO: 306016 - RNA, 32 nt, Human
acuccccuccugggauggggcuucugcucccg

SEQ ID NO: 306017 - RNA, 32 nt, Human
acuccccucuacuugcugcucugggccucccc

SEQ ID NO: 306018 - RNA, 32 nt, Human
acuccccucucaccuuuugcagucuccagugu

SEQ ID NO: 306019 - RNA, 32 nt, Human
acuccccucugccucugagggcuucaguauug

SEQ ID NO: 306020 - RNA, 32 nt, Human
acuccccugcuguguggccuuaggcaacggcu

SEQ ID NO: 306021 - RNA, 32 nt, Human
acuccccuggccccagcccucuccugccuggc

SEQ ID NO: 306022 - RNA, 32 nt, Human
acuccccugugcugcacugcuggggucagaca

SEQ ID NO: 306023 - RNA, 32 nt, Human
acuccccuucucccaucagcccaaacccagag

SEQ ID NO: 306024 - RNA, 32 nt, Human
acucccgaauagcugggauuacagacaggcac

SEQ ID NO: 306025 - RNA, 32 nt, Human
acucccgagggcuagggcuagagcagacccgg

SEQ ID NO: 306026 - RNA, 32 nt, Human
acucccgaguagcugggacuacaggcacacag

SEQ ID NO: 306027 - RNA, 32 nt, Human
acucccgaguagcugggauuacaggcacaugc

SEQ ID NO: 306028 - RNA, 21 nt, Human
acucccgaguggcuagacagg

SEQ ID NO: 306029 - RNA, 32 nt, Human
acucccgcaaaccugaaucucgagcuaccuau

SEQ ID NO: 306030 - RNA, 32 nt, Human
acucccgcagcccuccaguguggcugcaggcg

SEQ ID NO: 306031 - RNA, 32 nt, Human
acucccgccucccugccuccagcccuggcugc

SEQ ID NO: 306032 - RNA, 32 nt, Human
acucccgcucucuauuccccaguuucuugccc

SEQ ID NO: 306033 - RNA, 32 nt, Human
acucccgcuucccugcacugcugcuccauccu

SEQ ID NO: 306034 - RNA, 32 nt, Human
acucccggaaauuucuuuaucucuguuacauu

SEQ ID NO: 306035 - RNA, 32 nt, Human
acucccggaggaggagaacaaagaaacgaggc

SEQ ID NO: 306036 - RNA, 32 nt, Human
acucccggcacugaacacuacagggaauggac

SEQ ID NO: 306037 - RNA, 32 nt, Human
acucccggcaucuuuacagagcagagcaugau

SEQ ID NO: 306038 - RNA, 32 nt, Human
acucccggggccugcuaaucugaggccgaucc

SEQ ID NO: 306039 - RNA, 32 nt, Human
acucccggugccucucuagggcccuggugacc

SEQ ID NO: 306040 - RNA, 32 nt, Human
acucccguggggaagcagcgucacugugcccu

SEQ ID NO: 306041 - RNA, 32 nt, Human
acucccucauggcugccucucucuccaggccc

SEQ ID NO: 306042 - RNA, 32 nt, Human
acucccuccaacugggucuggugacagacaga

SEQ ID NO: 306043 - RNA, 32 nt, Human
acucccuccagccucagcuggcugaaccucgc

SEQ ID NO: 306044 - RNA, 32 nt, Human
acucccuccauguugcuacaaaggacauaaua

SEQ ID NO: 306045 - RNA, 32 nt, Human
acucccucccucccugcaauccuuccuucuua

SEQ ID NO: 306046 - RNA, 32 nt, Human
acucccuccuccuucuccuuuuuccuccucuu

SEQ ID NO: 306047 - RNA, 32 nt, Human
acucccuccuggcagcuguagggaaggaacca

SEQ ID NO: 306048 - RNA, 32 nt, Human
acucccuccuguuccuccuucuccauccccca

SEQ ID NO: 306049 - RNA, 32 nt, Human
acucccuccuugacauucagagcugcuaaguu

SEQ ID NO: 306050 - RNA, 21 nt, Human
acucccucgcccccagcugcg

SEQ ID NO: 306051 - RNA, 32 nt, Human
acucccucggagacgcagguugcaguggacau

SEQ ID NO: 306052 - RNA, 32 nt, Human
acucccucucagaagaaccugauguuuccuga

SEQ ID NO: 306053 - RNA, 32 nt, Human
acucccucuccacuucagugcaugucuuaguu

SEQ ID NO: 306054 - RNA, 32 nt, Human
acucccucucucugcacagaugaacaccauga

SEQ ID NO: 306055 - RNA, 32 nt, Human
acucccucuggagcuuggagaaucgcucuggu

SEQ ID NO: 306056 - RNA, 32 nt, Human
acucccucugggaaggugaccuggccagagcc

SEQ ID NO: 306057 - RNA, 32 nt, Human
acucccucuuuuucucgcuuguggacuccgau

SEQ ID NO: 306058 - RNA, 32 nt, Human
acucccugaaccuggccuuuggcuucagacuc

SEQ ID NO: 306059 - RNA, 32 nt, Human
acucccugaaggccacccagcuaaucagcagu

SEQ ID NO: 306060 - RNA, 32 nt, Human
acucccugacacucaggaaggcccaggcuggg

SEQ ID NO: 306061 - RNA, 32 nt, Human
acucccugagcacgggccgcuccgcuccccug

SEQ ID NO: 306062 - RNA, 32 nt, Human
acucccugaguuuguuaaaauaguagaaguug

SEQ ID NO: 306063 - RNA, 32 nt, Human
acucccugcaagccucagagcagccaagucau

SEQ ID NO: 306064 - RNA, 32 nt, Human
acucccugcuauaauccuagcacuuugggagg

SEQ ID NO: 306065 - RNA, 23 nt, Human
acucccugcugcuucgcaucccu

SEQ ID NO: 306066 - RNA, 32 nt, Human
acucccugcuuccaugcuuucuccuucagucc

SEQ ID NO: 306067 - RNA, 32 nt, Human
acucccugcuucccuggaagcuucaggaagcu

SEQ ID NO: 306068 - RNA, 32 nt, Human
acucccuggagcuaucuguggucuuagggaag

SEQ ID NO: 306069 - RNA, 32 nt, Human
acucccuggauuuuccuccucucuccaucccu

SEQ ID NO: 306070 - RNA, 32 nt, Human
acucccuggcaggaggggauaaucuugaagua

SEQ ID NO: 306071 - RNA, 32 nt, Human
acucccuggccccaaccugccaccucaccaaa

SEQ ID NO: 306072 - RNA, 21 nt, Human
acucccuggcugcuucacuca

SEQ ID NO: 306073 - RNA, 32 nt, Human
acucccuggcuuccaguccuaggcaaucacua

SEQ ID NO: 306074 - RNA, 32 nt, Human
acucccugggcuggcuggcagguauggcaccc

SEQ ID NO: 306075 - RNA, 32 nt, Human
acucccuggggacaagcggggagccagcagga

SEQ ID NO: 306076 - RNA, 32 nt, Human
acucccuggguuucccuuuucucuuagccaca

SEQ ID NO: 306077 - RNA, 32 nt, Human
acucccugucuuccggagcgugagugaagccc

SEQ ID NO: 306078 - RNA, 32 nt, Human
acucccugugugggugaagugggaagcugugc

SEQ ID NO: 306079 - RNA, 32 nt, Human
acucccuguuucuccuccuccuggcuggcgcu

SEQ ID NO: 306080 - RNA, 32 nt, Human
acucccuuccaaccccuucuucauagggacug

SEQ ID NO: 306081 - RNA, 21 nt, Human
acucccuucccaaguuccuuu

SEQ ID NO: 306082 - RNA, 32 nt, Human
acucccuuccucuccaucucucccucucucca

SEQ ID NO: 306083 - RNA, 32 nt, Human
acucccuucuuucauacagaagcugcuguggu

SEQ ID NO: 306084 - RNA, 32 nt, Human
acucccuugcuuuuugcuguguaguucccucu

SEQ ID NO: 306085 - RNA, 32 nt, Human
acucccuuguuccaucagaagcugcagugacu

SEQ ID NO: 306086 - RNA, 32 nt, Human
acuccgaaagucugaaucucccaaggagggca

SEQ ID NO: 306087 - RNA, 32 nt, Human
acuccgaauuagcgguguauuucuugaaguuu

SEQ ID NO: 306088 - RNA, 32 nt, Human
acuccgagaccccuugcugugugacuucugag

SEQ ID NO: 306089 - RNA, 32 nt, Human
acuccgagaggaagaaaggguugauaaucaau

SEQ ID NO: 306090 - RNA, 32 nt, Human
acuccgagccuggaaaauggccggcggaggcc

SEQ ID NO: 306091 - RNA, 32 nt, Human
acuccgagggcuccuccugccuggugaagacu

SEQ ID NO: 306092 - RNA, 32 nt, Human
acuccgauggcuccuccugccuggugaagacu

SEQ ID NO: 306093 - RNA, 32 nt, Human
acuccgcaagauggacagggagccagcaggca

SEQ ID NO: 306094 - RNA, 32 nt, Human
acuccgcacaucagugcugugaaggcaaccuc

SEQ ID NO: 306095 - RNA, 32 nt, Human
acuccgcagcuuucggccucggugagcgggug

SEQ ID NO: 306096 - RNA, 32 nt, Human
acuccgcauggaccccuauacacucacuucgg

SEQ ID NO: 306097 - RNA, 32 nt, Human
acuccgccaagugcuaaccaaagcucagcaac

SEQ ID NO: 306098 - RNA, 18 nt, Human
acuccgccccaugccuug

SEQ ID NO: 306099 - RNA, 32 nt, Human
acuccgcccgccuacauuggagaagaaccaag

SEQ ID NO: 306100 - RNA, 32 nt, Human
acuccgcggcacccucaaaccccagcccaggc

SEQ ID NO: 306101 - RNA, 32 nt, Human
acuccgcucacugaacuccuuccccacuucug

SEQ ID NO: 306102 - RNA, 32 nt, Human
acuccgcuuaggaaguggugggggcggcgugg

SEQ ID NO: 306103 - RNA, 32 nt, Human
acuccggacacugaugugagaggaucacuuga

SEQ ID NO: 306104 - RNA, 32 nt, Human
acuccggacgugugcggcgcagugagucgcag

SEQ ID NO: 306105 - RNA, 32 nt, Human
acuccggagacaggguuuggcugugucuaaac

SEQ ID NO: 306106 - RNA, 32 nt, Human
acuccggaggcugagccaggagaaucgcuuga

SEQ ID NO: 306107 - RNA, 32 nt, Human
acuccggaggcugaggcaggagaaucacuuga

SEQ ID NO: 306108 - RNA, 32 nt, Human
acuccggaggcugaggcaggagaaucgcuuga

SEQ ID NO: 306109 - RNA, 32 nt, Human
acuccggaggcugaggcaggagaaucucuuga

SEQ ID NO: 306110 - RNA, 32 nt, Human
acuccggaggcugcgguggaaggaucaccuga

SEQ ID NO: 306111 - RNA, 32 nt, Human
acuccggagguagagguuguggugagccgaga

SEQ ID NO: 306112 - RNA, 32 nt, Human
acuccggccagccccagccaaacacacaaaag

SEQ ID NO: 306113 - RNA, 32 nt, Human
acuccggcccaggagcucagcguucacgggca

SEQ ID NO: 306114 - RNA, 32 nt, Human
acuccggccugggugacagaaggaggcucugc

SEQ ID NO: 306115 - RNA, 26 nt, Human
acuccggccugggugacagagugaga

SEQ ID NO: 306116 - RNA, 32 nt, Human
acuccggccuguaaucagcucuccuggcuccc

SEQ ID NO: 306117 - RNA, 32 nt, Human
acuccgggagcacagcauccuccucucaccug

SEQ ID NO: 306118 - RNA, 32 nt, Human
acuccgggagccaagcuacuguaaggagcuga

SEQ ID NO: 306119 - RNA, 32 nt, Human
acuccgggaggcacagggcgcgcgaggugcag

SEQ ID NO: 306120 - RNA, 32 nt, Human
acuccguacggucaacuucaccagaggcaggu

SEQ ID NO: 306121 - RNA, 32 nt, Human
acuccguagcccaggcuggagugcaguggcac

SEQ ID NO: 306122 - RNA, 32 nt, Human
acuccguaggcuucuuaaucuuccaggcauua

SEQ ID NO: 306123 - RNA, 32 nt, Human
acuccgucaggcccggcucugccuccaagcug

SEQ ID NO: 306124 - RNA, 32 nt, Human
acuccgucauccaagcuggagugcaguggugc

SEQ ID NO: 306125 - RNA, 32 nt, Human
acuccguccagccugaucccuggccugagcaa

SEQ ID NO: 306126 - RNA, 32 nt, Human
acuccgucccuguccccgacugugccacgugg

SEQ ID NO: 306127 - RNA, 32 nt, Human
acuccgucucaaaaagaaaaaguuuggaucag

SEQ ID NO: 306128 - RNA, 32 nt, Human
acuccgucucagaaaaaggaaaagaaaaacaa

SEQ ID NO: 306129 - RNA, 32 nt, Human
acuccgugcuuugcacaaagcaggcucuccau

SEQ ID NO: 306130 - RNA, 32 nt, Human
acuccguugccaggcuggagugcuguggcgcu

SEQ ID NO: 306131 - RNA, 32 nt, Human
acuccguugcccaggcuggaguacaauggugc

SEQ ID NO: 306132 - RNA, 32 nt, Human
acuccguugccucaacguccaacccuucugca

SEQ ID NO: 306133 - RNA, 32 nt, Human
acuccuaaauaaaaaguaaacaugacaccucu

SEQ ID NO: 306134 - RNA, 32 nt, Human
acuccuaacccuaggagaggagcccaggccgg

SEQ ID NO: 306135 - RNA, 32 nt, Human
acuccuaaccugcuccagucagccugcuucca

SEQ ID NO: 306136 - RNA, 22 nt, Human
acuccuaaggucuccagccagg

SEQ ID NO: 306137 - RNA, 32 nt, Human
acuccuaaguagcugggauuacaggcaccugc

SEQ ID NO: 306138 - RNA, 23 nt, Human
acuccuacaacucaagcauuccu

SEQ ID NO: 306139 - RNA, 22 nt, Human
acuccuacccuuccagggaccc

SEQ ID NO: 306140 - RNA, 32 nt, Human
acuccuacugcaaucaguacuaugcgaucguc

SEQ ID NO: 306141 - RNA, 32 nt, Human
acuccuacuggaauuucugccugguucagccc

SEQ ID NO: 306142 - RNA, 32 nt, Human
acuccuagacucaagugauccuccugucuugg

SEQ ID NO: 306143 - RNA, 32 nt, Human
acuccuagagggagggagguaacugaauucac

SEQ ID NO: 306144 - RNA, 32 nt, Human
acuccuagcccugggcagcccugcugccugcc

SEQ ID NO: 306145 - RNA, 32 nt, Human
acuccuagcugcauaggagagucugagccggg

SEQ ID NO: 306146 - RNA, 22 nt, Human
acuccuagcugcuccagucuca

SEQ ID NO: 306147 - RNA, 32 nt, Human
acuccuagcuuggugucucagacauugaugua

SEQ ID NO: 306148 - RNA, 32 nt, Human
acuccuagcuuuugcuaaaauaugguuggcac

SEQ ID NO: 306149 - RNA, 32 nt, Human
acuccuaggcuuuucugccuagagcagaauua

SEQ ID NO: 306150 - RNA, 32 nt, Human
acuccuagggcugggcgcccgugggcccuccc

SEQ ID NO: 306151 - RNA, 32 nt, Human
acuccuagucuacagaccuguacaguauaacu

SEQ ID NO: 306152 - RNA, 32 nt, Human
acuccuagucuuaagcaaucuuccugcuuugg

SEQ ID NO: 306153 - RNA, 32 nt, Human
acuccuauccuugagggcucucagccacugcu

SEQ ID NO: 306154 - RNA, 32 nt, Human
acuccucaagcucucccuguaggcugcauuuu

SEQ ID NO: 306155 - RNA, 32 nt, Human
acuccucaagggcagagaacugucuuucauuu

SEQ ID NO: 306156 - RNA, 32 nt, Human
acuccucacacuuacuguaagacauuaguaac

SEQ ID NO: 306157 - RNA, 32 nt, Human
acuccucacccacuccaagagacugcagcccu

SEQ ID NO: 306158 - RNA, 32 nt, Human
acuccucacccauccaccaccugcagcuugag

SEQ ID NO: 306159 - RNA, 21 nt, Human
acuccucagaguuucaguggu

SEQ ID NO: 306160 - RNA, 22 nt, Human
acuccucagccacacggcacag

SEQ ID NO: 306161 - RNA, 24 nt, Human
acuccucagccagcacccuggggu

SEQ ID NO: 306162 - RNA, 32 nt, Human
acuccucagccgaugguggcucuggguuuccu

SEQ ID NO: 306163 - RNA, 32 nt, Human
acuccucagccuccuccgcccagagcggcccc

SEQ ID NO: 306164 - RNA, 32 nt, Human
acuccuccacuggagaacugauagcaguauuc

SEQ ID NO: 306165 - RNA, 21 nt, Human
acuccuccaggggucuucaga

SEQ ID NO: 306166 - RNA, 32 nt, Human
acuccuccccacugcugacaucccccacaagc

SEQ ID NO: 306167 - RNA, 32 nt, Human
acuccuccccuccccucacuucucccaccugc

SEQ ID NO: 306168 - RNA, 32 nt, Human
acuccucccggaccccuggacacacacagccc

SEQ ID NO: 306169 - RNA, 32 nt, Human
acuccucccguuuguaauauggagauuuauuu

SEQ ID NO: 306170 - RNA, 32 nt, Human
acuccucccucuggcccuccugcugagcaggc

SEQ ID NO: 306171 - RNA, 32 nt, Human
acuccucccuuuccuuccuaauuucccuucuu

SEQ ID NO: 306172 - RNA, 32 nt, Human
acuccucccuuuucccucuccugggcccuucc

SEQ ID NO: 306173 - RNA, 32 nt, Human
acuccuccgcuguguagcagaugaggaaaauc

SEQ ID NO: 306174 - RNA, 32 nt, Human
acuccuccuccacuccgccccgaggcagccug

SEQ ID NO: 306175 - RNA, 32 nt, Human
acuccuccuccaggaagccuucucagcuuccc

SEQ ID NO: 306176 - RNA, 32 nt, Human
acuccuccuccuccuccuccucuccugcugcu

SEQ ID NO: 306177 - RNA, 32 nt, Human
acuccuccuccuccucucccggcggcggcugc

SEQ ID NO: 306178 - RNA, 32 nt, Human
acuccuccuccuccucucuucuccucugguuu

SEQ ID NO: 306179 - RNA, 32 nt, Human
acuccuccugccccaaaccucgccagagaagc

SEQ ID NO: 306180 - RNA, 32 nt, Human
acuccuccuguggccaccaccaaaggaugagg

SEQ ID NO: 306181 - RNA, 32 nt, Human
acuccuccuugggcccugaggcugcuggaucc

SEQ ID NO: 306182 - RNA, 32 nt, Human
acuccuccuuucuccuccgaggugguuuuaaa

SEQ ID NO: 306183 - RNA, 22 nt, Human
acuccucggcaguuucaggugu

SEQ ID NO: 306184 - RNA, 32 nt, Human
acuccucucaccggccccuggaaaggguucca

SEQ ID NO: 306185 - RNA, 32 nt, Human
acuccucuccagacuccaccuccccagugggu

SEQ ID NO: 306186 - RNA, 32 nt, Human
acuccucucccauucagcaaucaaccagacua

SEQ ID NO: 306187 - RNA, 32 nt, Human
acuccucuccuccuccuccuccucuuccuccu

SEQ ID NO: 306188 - RNA, 32 nt, Human
acuccucuccugggcaauauuggcugcuugcu

SEQ ID NO: 306189 - RNA, 32 nt, Human
acuccucucucucuuucucugccucagauggu

SEQ ID NO: 306190 - RNA, 32 nt, Human
acuccucucugcagcacugccucccagcgcca

SEQ ID NO: 306191 - RNA, 21 nt, Human
acuccucugccaccuuggggu

SEQ ID NO: 306192 - RNA, 32 nt, Human
acuccucugcgucuauccuguguagcauacug

SEQ ID NO: 306193 - RNA, 32 nt, Human
acuccucuguacccucuccuucuguuuuuauu

SEQ ID NO: 306194 - RNA, 20 nt, Human
acuccucuuaccccccaaaa

SEQ ID NO: 306195 - RNA, 32 nt, Human
acuccucuuagggcaccgcagcagaacagucc

SEQ ID NO: 306196 - RNA, 32 nt, Human
acuccucuucugggcauuuaagcugguauguu

SEQ ID NO: 306197 - RNA, 32 nt, Human
acuccucuuugccuugcucacccuccacuugu

SEQ ID NO: 306198 - RNA, 32 nt, Human
acuccugaaaccucaaacaguaccaaaccuuu

SEQ ID NO: 306199 - RNA, 32 nt, Human
acuccugaaguggucagaagagugugugaccc

SEQ ID NO: 306200 - RNA, 32 nt, Human
acuccugaaguucuguucgaccaaacaucaga

SEQ ID NO: 306201 - RNA, 32 nt, Human
acuccugacagcuuuccugcacugcagcuucc

SEQ ID NO: 306202 - RNA, 32 nt, Human
acuccugaccucaagcaauuugcccaccucgu

SEQ ID NO: 306203 - RNA, 32 nt, Human
acuccugaccucaaggaucugucugcuuuggu

SEQ ID NO: 306204 - RNA, 32 nt, Human
acuccugaccucaaguaaucugcccagccuca

SEQ ID NO: 306205 - RNA, 32 nt, Human
acuccugaccucaagugacccgcccuugucgg

SEQ ID NO: 306206 - RNA, 22 nt, Human
acuccugaccucaagugaucca

SEQ ID NO: 306207 - RNA, 32 nt, Human
acuccugaccucaagugauccacccacuucag

SEQ ID NO: 306208 - RNA, 32 nt, Human
acuccugaccucaagugauccaccugcuucgg

SEQ ID NO: 306209 - RNA, 32 nt, Human
acuccugaccucaagugaucugcccacuucgg

SEQ ID NO: 306210 - RNA, 32 nt, Human
acuccugaccucaagugaucuuccggccucag

SEQ ID NO: 306211 - RNA, 22 nt, Human
acuccugaccucaggugaucca

SEQ ID NO: 306212 - RNA, 32 nt, Human
acuccugaccucaggugauccgcccgccucca

SEQ ID NO: 306213 - RNA, 32 nt, Human
acuccugaccucaggugauccgccugucucag

SEQ ID NO: 306214 - RNA, 32 nt, Human
acuccugaccucaggugaucuacccgccucca

SEQ ID NO: 306215 - RNA, 32 nt, Human
acuccugaccucaggugaucugcccaccccag

SEQ ID NO: 306216 - RNA, 32 nt, Human
acuccugaccucaggugaucugcccgucucgg

SEQ ID NO: 306217 - RNA, 32 nt, Human
acuccugaccucaggugaucugccugucuugg

SEQ ID NO: 306218 - RNA, 32 nt, Human
acuccugaccuuaaaugauuugccugccucgg

SEQ ID NO: 306219 - RNA, 32 nt, Human
acuccugaccuuuccugcauuaguaaaauuuc

SEQ ID NO: 306220 - RNA, 32 nt, Human
acuccugacgcugacauggcugugaagagcug

SEQ ID NO: 306221 - RNA, 32 nt, Human
acuccugagcacuagcaauccacccaccucug

SEQ ID NO: 306222 - RNA, 32 nt, Human
acuccugagccaaggucuugucuucaaccucc

SEQ ID NO: 306223 - RNA, 19 nt, Human
acuccugagcucaagugau

SEQ ID NO: 306224 - RNA, 32 nt, Human
acuccugagcucaagugaucuuccugccuugg

SEQ ID NO: 306225 - RNA, 32 nt, Human
acuccugaggaagcugaaugaagcacuauagg

SEQ ID NO: 306226 - RNA, 32 nt, Human
acuccugaggcugaggugggaggaucgccuga

SEQ ID NO: 306227 - RNA, 32 nt, Human
acuccugaguagcugggauuacaggcaugugc

SEQ ID NO: 306228 - RNA, 32 nt, Human
acuccugcaacuucaggagaccugugagcaca

SEQ ID NO: 306229 - RNA, 32 nt, Human
acuccugcagggcccacggcuccugagcaaca

SEQ ID NO: 306230 - RNA, 32 nt, Human
acuccugcauguccuugggggcgcagcccugu

SEQ ID NO: 306231 - RNA, 32 nt, Human
acuccugcauuccaaccagccugggugacaga

SEQ ID NO: 306232 - RNA, 32 nt, Human
acuccugccagggaacuggccugcugcgcccc

SEQ ID NO: 306233 - RNA, 32 nt, Human
acuccugccggaccugguggggagacacgaug

SEQ ID NO: 306234 - RNA, 32 nt, Human
acuccugccugggcaauagagccagaccuugc

SEQ ID NO: 306235 - RNA, 32 nt, Human
acuccugcucccuguggcacucagggagcauu

SEQ ID NO: 306236 - RNA, 32 nt, Human
acuccugcugcggcucauguuuggaagcuguc

SEQ ID NO: 306237 - RNA, 32 nt, Human
acuccugcuugauacagaacaaaaagagcuua

SEQ ID NO: 306238 - RNA, 32 nt, Human
acuccuggaaagucuguccuucgcugauucug

SEQ ID NO: 306239 - RNA, 32 nt, Human
acuccuggaagugguucagucagguggcaaaa

SEQ ID NO: 306240 - RNA, 25 nt, Human
acuccuggagacgcggaggcccggg

SEQ ID NO: 306241 - RNA, 32 nt, Human
acuccuggagccaagagggaagggcaggguag

SEQ ID NO: 306242 - RNA, 32 nt, Human
acuccuggcacacaccugucuguaaccuguuu

SEQ ID NO: 306243 - RNA, 32 nt, Human
acuccuggcacacaucaugggcuuuggaggca

SEQ ID NO: 306244 - RNA, 32 nt, Human
acuccuggccaacauggugaaaccccgucucu

SEQ ID NO: 306245 - RNA, 32 nt, Human
acuccuggccuaugccagcauucuuuaaaguu

SEQ ID NO: 306246 - RNA, 32 nt, Human
acuccuggccucaagcacuccacccaccucgg

SEQ ID NO: 306247 - RNA, 32 nt, Human
acuccuggccucaagugacccuccugucucag

SEQ ID NO: 306248 - RNA, 32 nt, Human
acuccuggccuccagucauuugccugccucgg

SEQ ID NO: 306249 - RNA, 32 nt, Human
acuccuggccucgagcagucuuccugccucgg

SEQ ID NO: 306250 - RNA, 32 nt, Human
acuccuggcucaaucgauccuccuggauaagc

SEQ ID NO: 306251 - RNA, 32 nt, Human
acuccuggcugucaguuucucaguggcaacua

SEQ ID NO: 306252 - RNA, 25 nt, Human
acuccuggcuucgggugauccgcuu

SEQ ID NO: 306253 - RNA, 32 nt, Human
acuccugggaccccacguccugcaccccggcu

SEQ ID NO: 306254 - RNA, 32 nt, Human
acuccugggagcggggguggucggggcgguuu

SEQ ID NO: 306255 - RNA, 25 nt, Human
acuccugggcucauauuuucagggu

SEQ ID NO: 306256 - RNA, 32 nt, Human
acuccugggcuccuccccaucccccgugucuc

SEQ ID NO: 306257 - RNA, 17 nt, Human
acuccuggggucaagca

SEQ ID NO: 306258 - RNA, 32 nt, Human
acuccugggucccugggaaagaggguacuagg

SEQ ID NO: 306259 - RNA, 32 nt, Human
acuccuggguucaagcagucuuccugccuugg

SEQ ID NO: 306260 - RNA, 32 nt, Human
acuccugucacugucuccauccccaaauaaag

SEQ ID NO: 306261 - RNA, 32 nt, Human
acuccugucccagcccugccuccagggcuccu

SEQ ID NO: 306262 - RNA, 32 nt, Human
acuccuguccgcggggaccuggacccgccugu

SEQ ID NO: 306263 - RNA, 32 nt, Human
acuccuguguccaguuuagaagugagagacuu

SEQ ID NO: 306264 - RNA, 32 nt, Human
acuccuguuacccaggcuggaggacagugaug

SEQ ID NO: 306265 - RNA, 32 nt, Human
acuccuguucccuacaaugggaaaugucacaa

SEQ ID NO: 306266 - RNA, 32 nt, Human
acuccuuaagcugugguuucagucucugcuag

SEQ ID NO: 306267 - RNA, 32 nt, Human
acuccuuaauguggaauuuuccagcaaaaugu

SEQ ID NO: 306268 - RNA, 21 nt, Human
acuccuuagccccgcauuccu

SEQ ID NO: 306269 - RNA, 32 nt, Human
acuccuuaggaaaaugaagaguauuuuuaagg

SEQ ID NO: 306270 - RNA, 32 nt, Human
acuccuuauaaauaugguaaaguacaguggua

SEQ ID NO: 306271 - RNA, 32 nt, Human
acuccuucaccuagggauguguuuguugcccu

SEQ ID NO: 306272 - RNA, 32 nt, Human
acuccuucccaacccuccccuccagggacgag

SEQ ID NO: 306273 - RNA, 32 nt, Human
acuccuuccugcucacugucaugggcuacgac

SEQ ID NO: 306274 - RNA, 32 nt, Human
acuccuuccuggaagccuuccuggauuucacg

SEQ ID NO: 306275 - RNA, 32 nt, Human
acuccuuccuuuccuuccuuucucuuccuucu

SEQ ID NO: 306276 - RNA, 32 nt, Human
acuccuucucaaggaaugcuuuccucuaacug

SEQ ID NO: 306277 - RNA, 32 nt, Human
acuccuucucuagcucgagacgcgucgacccg

SEQ ID NO: 306278 - RNA, 32 nt, Human
acuccuucucucugcaugcaccucagagccag

SEQ ID NO: 306279 - RNA, 32 nt, Human
acuccuucuuccuaucagcucuagaaccccag

SEQ ID NO: 306280 - RNA, 32 nt, Human
acuccuucuuucaacguggcccagggaggcca

SEQ ID NO: 306281 - RNA, 32 nt, Human
acuccuugaccaccauccuguauccaaccauc

SEQ ID NO: 306282 - RNA, 32 nt, Human
acuccuugcagagccuguggcuugcauuuccu

SEQ ID NO: 306283 - RNA, 32 nt, Human
acuccuugccuaggcuggaguuuacagagaca

SEQ ID NO: 306284 - RNA, 32 nt, Human
acuccuugcuccucucccuccugccucaacug

SEQ ID NO: 306285 - RNA, 32 nt, Human
acuccuugcugggcacauauacacagcccacu

SEQ ID NO: 306286 - RNA, 32 nt, Human
acuccuugcuugaccccaucucugguuccugc

SEQ ID NO: 306287 - RNA, 32 nt, Human
acuccuuggagagacgacuaggaggacagcuu

SEQ ID NO: 306288 - RNA, 32 nt, Human
acuccuuggccuagcccacccugcugccuucu

SEQ ID NO: 306289 - RNA, 31 nt, Human
acuccuuggcuucucccaccgcaagcaacgc

SEQ ID NO: 306290 - RNA, 16 nt, Human
acuccuuguaauucca

SEQ ID NO: 306291 - RNA, 32 nt, Human
acuccuuguucaccccagcggggaccacgccc

SEQ ID NO: 306292 - RNA, 32 nt, Human
acuccuuuagcugcauccuguguuucaaugua

SEQ ID NO: 306293 - RNA, 21 nt, Human
acuccuuugccccagggaccc

SEQ ID NO: 306294 - RNA, 32 nt, Human
acuccuuugccucccaaauaugucuguauguu

SEQ ID NO: 306295 - RNA, 32 nt, Human
acuccuuugcguguguuccaugggacucucuu

SEQ ID NO: 306296 - RNA, 32 nt, Human
acuccuuugguaucuggaucuuccuuuuaaac

SEQ ID NO: 306297 - RNA, 32 nt, Human
acucgaacacaaacccugcggucuccaggggg

SEQ ID NO: 306298 - RNA, 32 nt, Human
acucgaacccaagaaguggagguugcagugag

SEQ ID NO: 306299 - RNA, 32 nt, Human
acucgaacccaggaggcagagguugcagugag

SEQ ID NO: 306300 - RNA, 32 nt, Human
acucgaacccguccuuuucacaacagccgcgg

SEQ ID NO: 306301 - RNA, 32 nt, Human
acucgaagaaaauguucucuuuuuaaauauac

SEQ ID NO: 306302 - RNA, 32 nt, Human
acucgaagucauggccaccuccagggacaaag

SEQ ID NO: 306303 - RNA, 32 nt, Human
acucgacaauauggccagcuaaugaaauuaaa

SEQ ID NO: 306304 - RNA, 32 nt, Human
acucgacccagccacacaccaggcugugcuca

SEQ ID NO: 306305 - RNA, 24 nt, Human
acucgaccgccgcccccagccagg

SEQ ID NO: 306306 - RNA, 32 nt, Human
acucgacgagcgcgcacccaccgcgccggagc

SEQ ID NO: 306307 - RNA, 32 nt, Human
acucgacggugaggacuuacgggcgggauagg

SEQ ID NO: 306308 - RNA, 32 nt, Human
acucgagcaagccuggguguuccuuccuccuc

SEQ ID NO: 306309 - RNA, 32 nt, Human
acucgagccauggagcaggccaugggccuuga

SEQ ID NO: 306310 - RNA, 32 nt, Human
acucgagcucacugcccacacacagcaugccu

SEQ ID NO: 306311 - RNA, 32 nt, Human
acucgaggacaggcagauggcuuuggauuaga

SEQ ID NO: 306312 - RNA, 17 nt, Human
acucgaggagcaaggug

SEQ ID NO: 306313 - RNA, 32 nt, Human
acucgaggcuggagccaagauccugccugaua

SEQ ID NO: 306314 - RNA, 32 nt, Human
acucgagggccaggaagaaccgcucucagaua

SEQ ID NO: 306315 - RNA, 32 nt, Human
acucgaguccagcccccaggaagccugcuccc

SEQ ID NO: 306316 - RNA, 32 nt, Human
acucgaguccaugggacccccacgcucgugag

SEQ ID NO: 306317 - RNA, 32 nt, Human
acucgaguccuaggaagagagaggcaccagag

SEQ ID NO: 306318 - RNA, 32 nt, Human
acucgauacgggagccagccugggugacgcuc

SEQ ID NO: 306319 - RNA, 32 nt, Human
acucgaucacagcugcagcccaaguaaggggc

SEQ ID NO: 306320 - RNA, 32 nt, Human
acucgaugguacccaggugcccuucaggcucu

SEQ ID NO: 306321 - RNA, 32 nt, Human
acucgaugugacuucuccccugcccuuccucc

SEQ ID NO: 306322 - RNA, 32 nt, Human
acucgaugugugacuguuuggcacuugagaca

SEQ ID NO: 306323 - RNA, 32 nt, Human
acucgauuucgucucggucuuccccagagcug

SEQ ID NO: 306324 - RNA, 25 nt, Human
acucgauuuugauguuucuuuaaaa

SEQ ID NO: 306325 - RNA, 32 nt, Human
acucgcacaaguguccagagaucguagccaga

SEQ ID NO: 306326 - RNA, 32 nt, Human
acucgcacacagauucccacagaacuuggaua

SEQ ID NO: 306327 - RNA, 32 nt, Human
acucgcacagcccagggaguggggaggauaag

SEQ ID NO: 306328 - RNA, 32 nt, Human
acucgcaccuguaaucccagcacuuugggauu

SEQ ID NO: 306329 - RNA, 32 nt, Human
acucgcaccuguaaucccagcauuuugggagg

SEQ ID NO: 306330 - RNA, 32 nt, Human
acucgcagacucgcgcuggcuccagucucucc

SEQ ID NO: 306331 - RNA, 32 nt, Human
acucgcagcaaccuccgccuccuggguucaag

SEQ ID NO: 306332 - RNA, 32 nt, Human
acucgccaaggcagagcgcaaagugcuagcca

SEQ ID NO: 306333 - RNA, 32 nt, Human
acucgccaauuuaaaugacacagaacuuugua

SEQ ID NO: 306334 - RNA, 32 nt, Human
acucgccagccuccugagcuccaugcccauca

SEQ ID NO: 306335 - RNA, 32 nt, Human
acucgccaggcugcagccucaggcacuggcag

SEQ ID NO: 306336 - RNA, 32 nt, Human
acucgccauugauuggugcccacccagggcac

SEQ ID NO: 306337 - RNA, 32 nt, Human
acucgcccaccagggugaugccacuuuugccu

SEQ ID NO: 306338 - RNA, 32 nt, Human
acucgcccagaucucugcacuucucaguccca

SEQ ID NO: 306339 - RNA, 32 nt, Human
acucgcccccaucuacugacugugccagucuu

SEQ ID NO: 306340 - RNA, 32 nt, Human
acucgcccuccagcuucugcccugccugcugu

SEQ ID NO: 306341 - RNA, 32 nt, Human
acucgcccucccuccucgcucggugacucuuu

SEQ ID NO: 306342 - RNA, 32 nt, Human
acucgcccucggcuucucccugcccggccgcc

SEQ ID NO: 306343 - RNA, 32 nt, Human
acucgcccugccuccaucaccugggcccuugg

SEQ ID NO: 306344 - RNA, 32 nt, Human
acucgccgagcuccucccgggaaacccgguac

SEQ ID NO: 306345 - RNA, 32 nt, Human
acucgccgcucccugggucccuucccagugga

SEQ ID NO: 306346 - RNA, 32 nt, Human
acucgccuauagucccagcuacuugggaggcu

SEQ ID NO: 306347 - RNA, 32 nt, Human
acucgccuccccucggcacccccggccccgga

SEQ ID NO: 306348 - RNA, 32 nt, Human
acucgccugccucugugugcgugcaugugugu

SEQ ID NO: 306349 - RNA, 32 nt, Human
acucgccugccugcccgcccgcucacacgcuc

SEQ ID NO: 306350 - RNA, 32 nt, Human
acucgccugccugcucagagcccugcagggcu

SEQ ID NO: 306351 - RNA, 32 nt, Human
acucgccugggcaguggggaggagaguggccu

SEQ ID NO: 306352 - RNA, 32 nt, Human
acucgccuguaaucucacuacacaggaggcug

SEQ ID NO: 306353 - RNA, 17 nt, Human
acucgccuguaguccca

SEQ ID NO: 306354 - RNA, 32 nt, Human
acucgccuguagucccagcuacucaggaggcu

SEQ ID NO: 306355 - RNA, 32 nt, Human
acucgcgauacacacaucuacacgggcgacag

SEQ ID NO: 306356 - RNA, 18 nt, Human
acucgcggcugggcugcc

SEQ ID NO: 306357 - RNA, 32 nt, Human
acucgcgguggaggccggauuugcacgggcag

SEQ ID NO: 306358 - RNA, 23 nt, Human
acucgcguucccuccagccccug

SEQ ID NO: 306359 - RNA, 32 nt, Human
acucgcuacauggugugacccuccuagggaac

SEQ ID NO: 306360 - RNA, 32 nt, Human
acucgcuccucucucaccuccucucucccucu

SEQ ID NO: 306361 - RNA, 32 nt, Human
acucgcuccucuucuguguauuuaaguccugc

SEQ ID NO: 306362 - RNA, 32 nt, Human
acucgcucgccaugucggcugcagaggcgggg

SEQ ID NO: 306363 - RNA, 21 nt, Human
acucgcucuccuguccccuuc

SEQ ID NO: 306364 - RNA, 32 nt, Human
acucgcucucgcuuguccaucucccucccggg

SEQ ID NO: 306365 - RNA, 32 nt, Human
acucgcugccccucucugggccuguugcucca

SEQ ID NO: 306366 - RNA, 32 nt, Human
acucgcugggcugaggucgucucgggugagga

SEQ ID NO: 306367 - RNA, 32 nt, Human
acucgcuguaccaauauccauggaggaauaug

SEQ ID NO: 306368 - RNA, 32 nt, Human
acucgcugugcucuccccuccuuggggcguuu

SEQ ID NO: 306369 - RNA, 32 nt, Human
acucggaacagccaugcaagggcacagauggg

SEQ ID NO: 306370 - RNA, 32 nt, Human
acucggaaggcugaggcaggaggaucacuuga

SEQ ID NO: 306371 - RNA, 32 nt, Human
acucggacacuggccuugggaacaauguucga

SEQ ID NO: 306372 - RNA, 32 nt, Human
acucggacuggagccucuucucucccaccgcg

SEQ ID NO: 306373 - RNA, 32 nt, Human
acucggagagggcugcgagcauuucccucccg

SEQ ID NO: 306374 - RNA, 32 nt, Human
acucggaucacgcccuccugggcacaggucac

SEQ ID NO: 306375 - RNA, 32 nt, Human
acucggauggggaggaagaggaggaagaggaa

SEQ ID NO: 306376 - RNA, 32 nt, Human
acucggcaacuccgcggaagaccaggguccug

SEQ ID NO: 306377 - RNA, 32 nt, Human
acucggcagaaauggccucuccccaaagccuc

SEQ ID NO: 306378 - RNA, 32 nt, Human
acucggcagcuuugagcccuggcacagcuucg

SEQ ID NO: 306379 - RNA, 32 nt, Human
acucggcaggcugaggugggaggaucaccuaa

SEQ ID NO: 306380 - RNA, 32 nt, Human
acucggcccaggaggucagcagucuguucuug

SEQ ID NO: 306381 - RNA, 32 nt, Human
acucggccccgccucugcgccgggcagcuuaa

SEQ ID NO: 306382 - RNA, 24 nt, Human
acucggccgacgccgccgccgccg

SEQ ID NO: 306383 - RNA, 32 nt, Human
acucggccuggagcuuggggugcucugccaac

SEQ ID NO: 306384 - RNA, 32 nt, Human
acucggccuggccuuccucugccugcaaguga

SEQ ID NO: 306385 - RNA, 32 nt, Human
acucggccuugcgcccgcccucaggcccgcgc

SEQ ID NO: 306386 - RNA, 32 nt, Human
acucggcuacucaggacagggcuggaauuuaa

SEQ ID NO: 306387 - RNA, 32 nt, Human
acucggcucugccucccaguccgcacaccucu

SEQ ID NO: 306388 - RNA, 32 nt, Human
acucggcugggggagagcagaggcagcugggg

SEQ ID NO: 306389 - RNA, 32 nt, Human
acucggcuguucuggacucugaugugugugga

SEQ ID NO: 306390 - RNA, 32 nt, Human
acucgggaacaggaaucaggaaaccugaguuu

SEQ ID NO: 306391 - RNA, 32 nt, Human
acucgggaagcuaaggugggaggaucaccuga

SEQ ID NO: 306392 - RNA, 32 nt, Human
acucgggacgcugaggcgggaggaucacauga

SEQ ID NO: 306393 - RNA, 32 nt, Human
acucgggacuccuuuucuuucucuagcugcca

SEQ ID NO: 306394 - RNA, 32 nt, Human
acucgggacugcugugccuuucacacuugaau

SEQ ID NO: 306395 - RNA, 32 nt, Human
acucgggagacucaugcaggaggaucacuuga

SEQ ID NO: 306396 - RNA, 32 nt, Human
acucgggagacugaggcaggaggaucacuuaa

SEQ ID NO: 306397 - RNA, 32 nt, Human
acucgggaggaagagguugcagugagcugaga

SEQ ID NO: 306398 - RNA, 32 nt, Human
acucgggaggcagagguugcagugagcugaga

SEQ ID NO: 306399 - RNA, 32 nt, Human
acucgggaggcagagguugucaugagcugagc

SEQ ID NO: 306400 - RNA, 32 nt, Human
acucgggaggcagagguuucagggagccaaga

SEQ ID NO: 306401 - RNA, 32 nt, Human
acucgggaggcgaagguugcagugagccgaga

SEQ ID NO: 306402 - RNA, 32 nt, Human
acucgggaggcggagguugcagugagccgaga

SEQ ID NO: 306403 - RNA, 32 nt, Human
acucgggaggcggagucaggagacucucuuga

SEQ ID NO: 306404 - RNA, 32 nt, Human
acucgggaggcggauguugcagugagccaaua

SEQ ID NO: 306405 - RNA, 32 nt, Human
acucgggaggcugaaacaggagaaucacuuga

SEQ ID NO: 306406 - RNA, 32 nt, Human
acucgggaggcugaagcagaagaaucgcuuga

SEQ ID NO: 306407 - RNA, 32 nt, Human
acucgggaggcugaagcaggagaaucacuuga

SEQ ID NO: 306408 - RNA, 32 nt, Human
acucgggaggcugaagcaggagaaucgcuuga

SEQ ID NO: 306409 - RNA, 32 nt, Human
acucgggaggcugaagcaggagaauugcuuga

SEQ ID NO: 306410 - RNA, 32 nt, Human
acucgggaggcugaagcgggaggguccccuaa

SEQ ID NO: 306411 - RNA, 32 nt, Human
acucgggaggcugacgcaggagaaucacuuga

SEQ ID NO: 306412 - RNA, 32 nt, Human
acucgggaggcugagacaggagaaucacuuga

SEQ ID NO: 306413 - RNA, 32 nt, Human
acucgggaggcugagaugggaggaucgcuuga

SEQ ID NO: 306414 - RNA, 32 nt, Human
acucgggaggcugagcuucgaggauugauuga

SEQ ID NO: 306415 - RNA, 32 nt, Human
acucgggaggcugaggagggagaaucgguuga

SEQ ID NO: 306416 - RNA, 32 nt, Human
acucgggaggcugaggcaagagaaucacuuga

SEQ ID NO: 306417 - RNA, 32 nt, Human
acucgggaggcugaggcaagagaaucgcuuga

SEQ ID NO: 306418 - RNA, 32 nt, Human
acucgggaggcugaggcaagagaaucucuuga

SEQ ID NO: 306419 - RNA, 32 nt, Human
acucgggaggcugaggcaagagaauugccuga

SEQ ID NO: 306420 - RNA, 32 nt, Human
acucgggaggcugaggcaagagaauugcuuga

SEQ ID NO: 306421 - RNA, 32 nt, Human
acucgggaggcugaggcaagagaguuacuuga

SEQ ID NO: 306422 - RNA, 32 nt, Human
acucgggaggcugaggcacaagaaaagcuuga

SEQ ID NO: 306423 - RNA, 32 nt, Human
acucgggaggcugaggcacaagaaucacuuga

SEQ ID NO: 306424 - RNA, 32 nt, Human
acucgggaggcugaggcacaagaaucauuuga

SEQ ID NO: 306425 - RNA, 32 nt, Human
acucgggaggcugaggcacgagaaucacuuga

SEQ ID NO: 306426 - RNA, 32 nt, Human
acucgggaggcugaggcacgagaaucgcuuga

SEQ ID NO: 306427 - RNA, 32 nt, Human
acucgggaggcugaggcagaagaaucgcuuga

SEQ ID NO: 306428 - RNA, 32 nt, Human
acucgggaggcugaggcagaaggauugcuuga

SEQ ID NO: 306429 - RNA, 32 nt, Human
acucgggaggcugaggcagaaucgcuugaacc

SEQ ID NO: 306430 - RNA, 32 nt, Human
acucgggaggcugaggcagagaauugcuugaa

SEQ ID NO: 306431 - RNA, 32 nt, Human
acucgggaggcugaggcagcagaaucacuuga

SEQ ID NO: 306432 - RNA, 32 nt, Human
acucgggaggcugaggcaggaaaaucacuuga

SEQ ID NO: 306433 - RNA, 32 nt, Human
acucgggaggcugaggcaggacgauuacuuga

SEQ ID NO: 306434 - RNA, 32 nt, Human
acucgggaggcugaggcaggagaaaggcauga

SEQ ID NO: 306435 - RNA, 32 nt, Human
acucgggaggcugaggcaggagaaucaaucac

SEQ ID NO: 306436 - RNA, 32 nt, Human
acucgggaggcugaggcaggagaaucacauga

SEQ ID NO: 306437 - RNA, 32 nt, Human
acucgggaggcugaggcaggagaaucaccuga

SEQ ID NO: 306438 - RNA, 32 nt, Human
acucgggaggcugaggcaggagaaucacuaga

SEQ ID NO: 306439 - RNA, 32 nt, Human
acucgggaggcugaggcaggagaaucacuuaa

SEQ ID NO: 306440 - RNA, 32 nt, Human
acucgggaggcugaggcaggagaaucacuuca

SEQ ID NO: 306441 - RNA, 32 nt, Human
acucgggaggcugaggcaggagaaucacuuga

SEQ ID NO: 306442 - RNA, 32 nt, Human
acucgggaggcugaggcaggagaaucauuuca

SEQ ID NO: 306443 - RNA, 32 nt, Human
acucgggaggcugaggcaggagaaucccuuga

SEQ ID NO: 306444 - RNA, 32 nt, Human
acucgggaggcugaggcaggagaaucgccuga

SEQ ID NO: 306445 - RNA, 32 nt, Human
acucgggaggcugaggcaggagaaucgcugga

SEQ ID NO: 306446 - RNA, 32 nt, Human
acucgggaggcugaggcaggagaaucgcuuaa

SEQ ID NO: 306447 - RNA, 32 nt, Human
acucgggaggcugaggcaggagaaucgcuuga

SEQ ID NO: 306448 - RNA, 32 nt, Human
acucgggaggcugaggcaggagaaucgucuaa

SEQ ID NO: 306449 - RNA, 32 nt, Human
acucgggaggcugaggcaggagaaucguuuga

SEQ ID NO: 306450 - RNA, 32 nt, Human
acucgggaggcugaggcaggagaaucucuuga

SEQ ID NO: 306451 - RNA, 32 nt, Human
acucgggaggcugaggcaggagagaaucgcuu

SEQ ID NO: 306452 - RNA, 32 nt, Human
acucgggaggcugaggcaggagagugacguga

SEQ ID NO: 306453 - RNA, 32 nt, Human
acucgggaggcugaggcaggagaucgcuggaa

SEQ ID NO: 306454 - RNA, 32 nt, Human
acucgggaggcugaggcaggagcaucgcuuga

SEQ ID NO: 306455 - RNA, 32 nt, Human
acucgggaggcugaggcaggaggaucacuuga

SEQ ID NO: 306456 - RNA, 32 nt, Human
acucgggaggcugaggcaggaggaucgcuuga

SEQ ID NO: 306457 - RNA, 32 nt, Human
acucgggaggcugaggcaggaggaucgcuugg

SEQ ID NO: 306458 - RNA, 32 nt, Human
acucgggaggcugaggcaggaggauugcuuga

SEQ ID NO: 306459 - RNA, 32 nt, Human
acucgggaggcugaggcaggauaaucacuuga

SEQ ID NO: 306460 - RNA, 32 nt, Human
acucgggaggcugaggcaggauugccugagcc

SEQ ID NO: 306461 - RNA, 32 nt, Human
acucgggaggcugaggcagggagaaucgcuug

SEQ ID NO: 306462 - RNA, 32 nt, Human
acucgggaggcugaggcaggggaaucacuuga

SEQ ID NO: 306463 - RNA, 32 nt, Human
acucgggaggcugaggcagggggagcacuuga

SEQ ID NO: 306464 - RNA, 32 nt, Human
acucgggaggcugaggcauaagaaucacuuga

SEQ ID NO: 306465 - RNA, 32 nt, Human
acucgggaggcugaggcaugagaaucgcugca

SEQ ID NO: 306466 - RNA, 32 nt, Human
acucgggaggcugaggcaugagaauuacuuga

SEQ ID NO: 306467 - RNA, 32 nt, Human
acucgggaggcugaggccguaggaucccuuga

SEQ ID NO: 306468 - RNA, 32 nt, Human
acucgggaggcugaggcggaagaaucacuuga

SEQ ID NO: 306469 - RNA, 32 nt, Human
acucgggaggcugaggcgggagaaucacuuga

SEQ ID NO: 306470 - RNA, 32 nt, Human
acucgggaggcugaggcgggaggaucaguuga

SEQ ID NO: 306471 - RNA, 32 nt, Human
acucgggaggcugaggcuggagguucaaucgc

SEQ ID NO: 306472 - RNA, 32 nt, Human
acucgggaggcugagguagagaaucgcuugaa

SEQ ID NO: 306473 - RNA, 32 nt, Human
acucgggaggcugagguaggaggaucgcuuga

SEQ ID NO: 306474 - RNA, 32 nt, Human
acucgggaggcugaggugaaaggaucacuuga

SEQ ID NO: 306475 - RNA, 32 nt, Human
acucgggaggcugagguggaaagauggcccag

SEQ ID NO: 306476 - RNA, 32 nt, Human
acucgggaggcugaggugggagaaucacuuga

SEQ ID NO: 306477 - RNA, 32 nt, Human
acucgggaggcugaggugggaggaucacuuga

SEQ ID NO: 306478 - RNA, 32 nt, Human
acucgggaggcugaggugggaggaucccagga

SEQ ID NO: 306479 - RNA, 32 nt, Human
acucgggaggcugaggugggaggaucccguga

SEQ ID NO: 306480 - RNA, 32 nt, Human
acucgggaggcugaggugggaggaucgcugga

SEQ ID NO: 306481 - RNA, 32 nt, Human
acucgggaggcugaggugggaggaucgcuuga

SEQ ID NO: 306482 - RNA, 32 nt, Human
acucgggaggcugagucaggagaaucacuuga

SEQ ID NO: 306483 - RNA, 32 nt, Human
acucgggaggcuggggcaggagaaucacuuga

SEQ ID NO: 306484 - RNA, 32 nt, Human
acucgggagguagagguugcagugagccaagg

SEQ ID NO: 306485 - RNA, 32 nt, Human
acucgggaggugaaaguugcagugagccgaga

SEQ ID NO: 306486 - RNA, 32 nt, Human
acucgggagguggagauugcaguaagccgaga

SEQ ID NO: 306487 - RNA, 32 nt, Human
acucgggagguggagguggcagugagccgaga

SEQ ID NO: 306488 - RNA, 32 nt, Human
acucgggagguggagguugcagucagccaaga

SEQ ID NO: 306489 - RNA, 25 nt, Human
acucgggagguggagguugcaguga

SEQ ID NO: 306490 - RNA, 32 nt, Human
acucgggagguggagguugcagugagccaaga

SEQ ID NO: 306491 - RNA, 32 nt, Human
acucgggagguggagguugcagugagcugaga

SEQ ID NO: 306492 - RNA, 32 nt, Human
acucgggagguggagguugugaugugcugaga

SEQ ID NO: 306493 - RNA, 32 nt, Human
acucgggcacaggccggcugggccgggaucag

SEQ ID NO: 306494 - RNA, 18 nt, Human
acucgggccucacauggc

SEQ ID NO: 306495 - RNA, 32 nt, Human
acucgggcgcugagggccacucacacagcugc

SEQ ID NO: 306496 - RNA, 32 nt, Human
acucgggcugcaaggugagaagaggcagacag

SEQ ID NO: 306497 - RNA, 32 nt, Human
acucgggcuuguaacugucugagccccggauc

SEQ ID NO: 306498 - RNA, 32 nt, Human
acucggggaggcaggguagcagugcuuccaga

SEQ ID NO: 306499 - RNA, 32 nt, Human
acucggggcugcagggcaaguguuuaggaugg

SEQ ID NO: 306500 - RNA, 32 nt, Human
acucgggggcaucuugcuggcucuaaacucac

SEQ ID NO: 306501 - RNA, 32 nt, Human
acucggggguggagugagacugacugcaagcc

SEQ ID NO: 306502 - RNA, 32 nt, Human
acucggguaucugaggugggaggaucaguuga

SEQ ID NO: 306503 - RNA, 32 nt, Human
acucggguccccuggcacuugcauccugaguc

SEQ ID NO: 306504 - RNA, 32 nt, Human
acucgggugggggagguugcaaugagccgaga

SEQ ID NO: 306505 - RNA, 32 nt, Human
acucggucugagaggucggaggcugcgagugu

SEQ ID NO: 306506 - RNA, 32 nt, Human
acucggugcaggaggcugagugagcaggggag

SEQ ID NO: 306507 - RNA, 32 nt, Human
acucggugcuucccgggguggggaggaggcag

SEQ ID NO: 306508 - RNA, 32 nt, Human
acucgguguacauccuggaggacucuguugug

SEQ ID NO: 306509 - RNA, 32 nt, Human
acucgguguugucggguauguuaaauuugagc

SEQ ID NO: 306510 - RNA, 32 nt, Human
acucgguuucuccaaacugaagcagccucucc

SEQ ID NO: 306511 - RNA, 32 nt, Human
acucgucacacuuaucaccugggccacugcaa

SEQ ID NO: 306512 - RNA, 32 nt, Human
acucgucaccccagcuggagugcaguggugcg

SEQ ID NO: 306513 - RNA, 32 nt, Human
acucgucaggaaggcaggagacaggagacggg

SEQ ID NO: 306514 - RNA, 28 nt, Human
acucgucccccuccugccucaucuuccu

SEQ ID NO: 306515 - RNA, 32 nt, Human
acucguccccucuuccacaccuucccagcauc

SEQ ID NO: 306516 - RNA, 32 nt, Human
acucgucucugagauuuccauggaucuagaag

SEQ ID NO: 306517 - RNA, 32 nt, Human
acucgugaccuccagccugccccuugcugccg

SEQ ID NO: 306518 - RNA, 21 nt, Human
acucgugauccgcccaccuca

SEQ ID NO: 306519 - RNA, 32 nt, Human
acucgugcccuccugguacaugggguuuuaag

SEQ ID NO: 306520 - RNA, 32 nt, Human
acucguggcgcgggagcugggagccaggcucu

SEQ ID NO: 306521 - RNA, 30 nt, Human
acucgugggagccacagggcaggggcagcg

SEQ ID NO: 306522 - RNA, 32 nt, Human
acucgugggagccacagggcaggggcagcggg

SEQ ID NO: 306523 - RNA, 22 nt, Human
acucgugggagggagaggaccc

SEQ ID NO: 306524 - RNA, 32 nt, Human
acucguguugccccggcuggagugcaguggcg

SEQ ID NO: 306525 - RNA, 32 nt, Human
acucguucccaggucagaggucagcagauggg

SEQ ID NO: 306526 - RNA, 32 nt, Human
acucguuccccuccucuuccgagcugcuuugu

SEQ ID NO: 306527 - RNA, 32 nt, Human
acucguugcaggcgacgaugcagagggcugua

SEQ ID NO: 306528 - RNA, 32 nt, Human
acucguugcccaggcuggagugcaguggcgca

SEQ ID NO: 306529 - RNA, 32 nt, Human
acucguugcccaggcuggaguguagaggcgag

SEQ ID NO: 306530 - RNA, 32 nt, Human
acucuaaaauuguuuccuccauucugaggguu

SEQ ID NO: 306531 - RNA, 32 nt, Human
acucuaaauuguggcuggcuucccuuucuguc

SEQ ID NO: 306532 - RNA, 32 nt, Human
acucuaacagcagaaaggagagaugugugcag

SEQ ID NO: 306533 - RNA, 32 nt, Human
acucuaaccuguagcuucagaggccagucugg

SEQ ID NO: 306534 - RNA, 25 nt, Human
acucuaacucuuauucccaagcuua

SEQ ID NO: 306535 - RNA, 25 nt, Human
acucuaacucuuguuuccaagcuua

SEQ ID NO: 306536 - RNA, 32 nt, Human
acucuaagaaaaucaaccauuaaucucucauu

SEQ ID NO: 306537 - RNA, 32 nt, Human
acucuaagaucucaacccuugaucccaaaggc

SEQ ID NO: 306538 - RNA, 32 nt, Human
acucuaagcgaaggaggagcacugccucagcc

SEQ ID NO: 306539 - RNA, 32 nt, Human
acucuaagucaccaccaucuuuugccuugacu

SEQ ID NO: 306540 - RNA, 32 nt, Human
acucuaagucuagcagagaagaugaggcggua

SEQ ID NO: 306541 - RNA, 32 nt, Human
acucuaaugccuggacuggccauguucuaguc

SEQ ID NO: 306542 - RNA, 22 nt, Human
acucuaauguaccaaugaugaa

SEQ ID NO: 306543 - RNA, 32 nt, Human
acucuacaaaaauacaaaaauuagccagguuu

SEQ ID NO: 306544 - RNA, 32 nt, Human
acucuacaaaccugaaagaugcaacagugcuu

SEQ ID NO: 306545 - RNA, 32 nt, Human
acucuacaaaccugaaagaugugacaaugcuu

SEQ ID NO: 306546 - RNA, 32 nt, Human
acucuacaagugacgucuuuuuauuucaaaga

SEQ ID NO: 306547 - RNA, 22 nt, Human
acucuacagaaaauuagacagg

SEQ ID NO: 306548 - RNA, 32 nt, Human
acucuacagacucccacucaguacuguacagg

SEQ ID NO: 306549 - RNA, 32 nt, Human
acucuacagggacgugaugcuggagaacuaug

SEQ ID NO: 306550 - RNA, 32 nt, Human
acucuacauaugugugugugcgugcgugugug

SEQ ID NO: 306551 - RNA, 32 nt, Human
acucuaccaagaaacacaggaagguauuccag

SEQ ID NO: 306552 - RNA, 32 nt, Human
acucuaccaugguucugccuccuggccaagca

SEQ ID NO: 306553 - RNA, 32 nt, Human
acucuaccuacuugaaaccacaggguuguggg

SEQ ID NO: 306554 - RNA, 32 nt, Human
acucuaccuaggcuguuacuaucagccugaau

SEQ ID NO: 306555 - RNA, 32 nt, Human
acucuaccuggcucccugccagccuggccucc

SEQ ID NO: 306556 - RNA, 32 nt, Human
acucuacucaaagccuuuaaauagcucuccau

SEQ ID NO: 306557 - RNA, 21 nt, Human
acucuacuucccaguaacccu

SEQ ID NO: 306558 - RNA, 32 nt, Human
acucuagagcccaccagccucucagagccucc

SEQ ID NO: 306559 - RNA, 32 nt, Human
acucuagaggcugaggugggaggaucacuuga

SEQ ID NO: 306560 - RNA, 32 nt, Human
acucuagaugguacagaagauggauacugugg

SEQ ID NO: 306561 - RNA, 32 nt, Human
acucuagcccaggcuuugucaacuguagagga

SEQ ID NO: 306562 - RNA, 32 nt, Human
acucuagccuacaacaugcugagcuacagccc

SEQ ID NO: 306563 - RNA, 26 nt, Human
acucuagccugggugacagagcgaga

SEQ ID NO: 306564 - RNA, 26 nt, Human
acucuagccugggugacagagugaga

SEQ ID NO: 306565 - RNA, 32 nt, Human
acucuaggaugaucacuugugcuuagcuuagc

SEQ ID NO: 306566 - RNA, 32 nt, Human
acucuaggcuauuuggugauguuaacaaaaua

SEQ ID NO: 306567 - RNA, 32 nt, Human
acucuaggggcaggggcaggggcaggggcuag

SEQ ID NO: 306568 - RNA, 32 nt, Human
acucuagggucugcgaccucccgcuggacugc

SEQ ID NO: 306569 - RNA, 32 nt, Human
acucuagucuccugccuccucaguucugcaag

SEQ ID NO: 306570 - RNA, 32 nt, Human
acucuagugguuacuauccucugccuuccucu

SEQ ID NO: 306571 - RNA, 32 nt, Human
acucuauaaagaaacuuuugaaaaaguguaca

SEQ ID NO: 306572 - RNA, 32 nt, Human
acucuauaccuugcaggcucauuucagcagac

SEQ ID NO: 306573 - RNA, 32 nt, Human
acucuauagucucaaacuauuuuugcaaauau

SEQ ID NO: 306574 - RNA, 31 nt, Human
acucuaucaauaaacaccucuggcugaaaaa

SEQ ID NO: 306575 - RNA, 32 nt, Human
acucuaucacacaggcuggagggcaguggcag

SEQ ID NO: 306576 - RNA, 32 nt, Human
acucuaucacccaagcuggagugcaguggcac

SEQ ID NO: 306577 - RNA, 32 nt, Human
acucuaucacccaggcuggagugcaguguggc

SEQ ID NO: 306578 - RNA, 32 nt, Human
acucuaugaacucaucauuccagccugggcaa

SEQ ID NO: 306579 - RNA, 32 nt, Human
acucuaugaacuucaaaacaaaaacaaaacuu

SEQ ID NO: 306580 - RNA, 32 nt, Human
acucuaugagaaggaagauuacugaaaagcau

SEQ ID NO: 306581 - RNA, 32 nt, Human
acucuaugagcaaauaguaauuuuggaccuug

SEQ ID NO: 306582 - RNA, 32 nt, Human
acucuauuaaaucuagaauuagccgggcaugg

SEQ ID NO: 306583 - RNA, 32 nt, Human
acucuauucuugccaaaaaccucaaugaaugc

SEQ ID NO: 306584 - RNA, 32 nt, Human
acucuauugcccaggcuggagugcacuggcgu

SEQ ID NO: 306585 - RNA, 32 nt, Human
acucuauugcucaggcuggagugugguggcag

SEQ ID NO: 306586 - RNA, 32 nt, Human
acucuauuuaaccuuggacacacuaauaaggu

SEQ ID NO: 306587 - RNA, 32 nt, Human
acucuauuucucuccauacugaaacaugucuu

SEQ ID NO: 306588 - RNA, 32 nt, Human
acucuauuuugaaaaggaccuguacuuuaaac

SEQ ID NO: 306589 - RNA, 18 nt, Human
acucucaaaggcagcgca

SEQ ID NO: 306590 - RNA, 32 nt, Human
acucucaaaggcugcugcacacagaggagaau

SEQ ID NO: 306591 - RNA, 32 nt, Human
acucucaaugaggagcagcucuccccaugagc

SEQ ID NO: 306592 - RNA, 32 nt, Human
acucucacaagaaaaccaaaaguuucucuuca

SEQ ID NO: 306593 - RNA, 32 nt, Human
acucucacacccagcccaggcugcagucucca

SEQ ID NO: 306594 - RNA, 32 nt, Human
acucucacacccaggcuggagugcagucucaa

SEQ ID NO: 306595 - RNA, 32 nt, Human
acucucacaccuccuucccacccuucuccaga

SEQ ID NO: 306596 - RNA, 32 nt, Human
acucucacacggcaguaucugggaaacacaga

SEQ ID NO: 306597 - RNA, 32 nt, Human
acucucacccaggcuggagugcaguggcacaa

SEQ ID NO: 306598 - RNA, 32 nt, Human
acucucaccuccgaggccuccucugccuggaa

SEQ ID NO: 306599 - RNA, 32 nt, Human
acucucaccugacagaugauguaauucuucaa

SEQ ID NO: 306600 - RNA, 32 nt, Human
acucucaccuucugaccuccuggcaagagaaa

SEQ ID NO: 306601 - RNA, 32 nt, Human
acucucagagcauugagcauugagaggcagca

SEQ ID NO: 306602 - RNA, 32 nt, Human
acucucagccuccuggcaggguuaaagggaga

SEQ ID NO: 306603 - RNA, 32 nt, Human
acucucagccugguaaaugaacaggaaaaacu

SEQ ID NO: 306604 - RNA, 32 nt, Human
acucucagguacugagacuuugugggccucag

SEQ ID NO: 306605 - RNA, 18 nt, Human
acucucagugggcugcag

SEQ ID NO: 306606 - RNA, 32 nt, Human
acucucaucacccaggcuagagugcaguggca

SEQ ID NO: 306607 - RNA, 32 nt, Human
acucucaucucuugcagucagcaacagguauc

SEQ ID NO: 306608 - RNA, 32 nt, Human
acucucaugcuuccauggcagcuccuggcucc

SEQ ID NO: 306609 - RNA, 32 nt, Human
acucucauggaugagggcagagccaacuccua

SEQ ID NO: 306610 - RNA, 32 nt, Human
acucucauugcccaggcuggagugcagugagc

SEQ ID NO: 306611 - RNA, 32 nt, Human
acucuccaauuuucuaaaaugauauggagcuc

SEQ ID NO: 306612 - RNA, 32 nt, Human
acucuccacccuucccuucugccugcccagcu

SEQ ID NO: 306613 - RNA, 32 nt, Human
acucuccacccuuucugucugugugacuuggc

SEQ ID NO: 306614 - RNA, 32 nt, Human
acucuccacuggcuuuccucucucccuuucuc

SEQ ID NO: 306615 - RNA, 32 nt, Human
acucuccagaaagcucaucucagcuccugaaa

SEQ ID NO: 306616 - RNA, 32 nt, Human
acucuccagaucuaccauuaauagaaaauaaa

SEQ ID NO: 306617 - RNA, 32 nt, Human
acucuccagccuguuggcucauccuguggauu

SEQ ID NO: 306618 - RNA, 21 nt, Human
acucuccagcuuuccuggggu

SEQ ID NO: 306619 - RNA, 32 nt, Human
acucuccaguaugucacgcaucuuuaacuuuu

SEQ ID NO: 306620 - RNA, 32 nt, Human
acucuccaguugccacaggcccugccaccccc

SEQ ID NO: 306621 - RNA, 32 nt, Human
acucuccauaaauuuggugauucucugcuagg

SEQ ID NO: 306622 - RNA, 32 nt, Human
acucuccaucagaagcccugggguuccuggcc

SEQ ID NO: 306623 - RNA, 32 nt, Human
acucuccauccccuuucccuuccacuuugggu

SEQ ID NO: 306624 - RNA, 32 nt, Human
acucucccaagccugcuugaccuccaaguaga

SEQ ID NO: 306625 - RNA, 32 nt, Human
acucucccagcacccugugugcacugagcuuc

SEQ ID NO: 306626 - RNA, 32 nt, Human
acucucccaguggagcucugcaggccaggcca

SEQ ID NO: 306627 - RNA, 32 nt, Human
acucucccaucuucaccaacagccucugcaau

SEQ ID NO: 306628 - RNA, 32 nt, Human
acucuccccaggagacccagaccuagaacuac

SEQ ID NO: 306629 - RNA, 32 nt, Human
acucucccuccacccugccuccucgggcucca

SEQ ID NO: 306630 - RNA, 32 nt, Human
acucucccugcuuuagcuuaaauuuaaauuag

SEQ ID NO: 306631 - RNA, 32 nt, Human
acucucccuuuccagcucuccccaaaguccac

SEQ ID NO: 306632 - RNA, 32 nt, Human
acucucccuuuguccuccccauagagcugggg

SEQ ID NO: 306633 - RNA, 32 nt, Human
acucuccgagccgcauccugggcuugugggaa

SEQ ID NO: 306634 - RNA, 32 nt, Human
acucuccgaggaggaggaggaggagggaggag

SEQ ID NO: 306635 - RNA, 32 nt, Human
acucuccgcugggcucccagagcugcuggcgu

SEQ ID NO: 306636 - RNA, 32 nt, Human
acucuccgcuucccccagcacacacacauaca

SEQ ID NO: 306637 - RNA, 32 nt, Human
acucuccuccagguugcauuucaguuucuuuc

SEQ ID NO: 306638 - RNA, 32 nt, Human
acucuccuccuccccuccucuucccuuagccu

SEQ ID NO: 306639 - RNA, 32 nt, Human
acucuccuccuugagcccuugccccugcgucc

SEQ ID NO: 306640 - RNA, 32 nt, Human
acucuccucucucuuccccauuuccuuguagc

SEQ ID NO: 306641 - RNA, 20 nt, Human
acucuccucuuccagggccc

SEQ ID NO: 306642 - RNA, 32 nt, Human
acucuccucuucuagcauuucuuccaauuauu

SEQ ID NO: 306643 - RNA, 32 nt, Human
acucuccugccugcccagcugcgcggcggagc

SEQ ID NO: 306644 - RNA, 32 nt, Human
acucuccuguggcaccuggggcugccaucuau

SEQ ID NO: 306645 - RNA, 32 nt, Human
acucuccuuccagcuacucaggaggcugaggc

SEQ ID NO: 306646 - RNA, 32 nt, Human
acucuccuuugcaaaguguaguccccaaaaac

SEQ ID NO: 306647 - RNA, 32 nt, Human
acucuccuuugcucccuuuuuccaauuucuua

SEQ ID NO: 306648 - RNA, 32 nt, Human
acucuccuuuuucugggucccuucccacuucc

SEQ ID NO: 306649 - RNA, 32 nt, Human
acucucggcugcagacacaggagucacagaug

SEQ ID NO: 306650 - RNA, 32 nt, Human
acucucgggaagacuccucuacucacagcuga

SEQ ID NO: 306651 - RNA, 32 nt, Human
acucucgggaaucuucucugucagccuguaca

SEQ ID NO: 306652 - RNA, 32 nt, Human
acucucgguugcuuuugucuaauucuaauggc

SEQ ID NO: 306653 - RNA, 32 nt, Human
acucucgucgcccaggcuggaaugcaguggug

SEQ ID NO: 306654 - RNA, 32 nt, Human
acucucguguggagguuacagcagcaagagau

SEQ ID NO: 306655 - RNA, 32 nt, Human
acucucguugcccaggcuggagugcaauggcg

SEQ ID NO: 306656 - RNA, 32 nt, Human
acucucuaccucuucgcauccucucuugcucg

SEQ ID NO: 306657 - RNA, 32 nt, Human
acucucuacuccuaaaguuauuuacuauuugg

SEQ ID NO: 306658 - RNA, 32 nt, Human
acucucucagaccuucccaucucccuggcuuu

SEQ ID NO: 306659 - RNA, 32 nt, Human
acucucucagccacagaaaccacguuugaaua

SEQ ID NO: 306660 - RNA, 32 nt, Human
acucucuccagcacucaggaagcccggccgag

SEQ ID NO: 306661 - RNA, 28 nt, Human
acucucuccagugcugccagcgucgcac

SEQ ID NO: 306662 - RNA, 32 nt, Human
acucucuccccuucauuggcugcccaggccac

SEQ ID NO: 306663 - RNA, 32 nt, Human
acucucuccugcccaggcuucugggugcuuuc

SEQ ID NO: 306664 - RNA, 32 nt, Human
acucucucgcccaggcuggagugcaacgguac

SEQ ID NO: 306665 - RNA, 32 nt, Human
acucucucgcccaggcuggagugcaguggcgu

SEQ ID NO: 306666 - RNA, 32 nt, Human
acucucucgcccaggcuggagugcaguggugu

SEQ ID NO: 306667 - RNA, 32 nt, Human
acucucucggauccgugcuucucuccauugua

SEQ ID NO: 306668 - RNA, 32 nt, Human
acucucucuauuucuuuuuguuuuucugaugc

SEQ ID NO: 306669 - RNA, 32 nt, Human
acucucucuccccuccucccacucucuucccc

SEQ ID NO: 306670 - RNA, 32 nt, Human
acucucucucugucuccucucugcaccuuuuu

SEQ ID NO: 306671 - RNA, 32 nt, Human
acucucucucuugcuccugcuuuugcuguuga

SEQ ID NO: 306672 - RNA, 32 nt, Human
acucucucuguggggcuuucacccccaucgcu

SEQ ID NO: 306673 - RNA, 32 nt, Human
acucucucuuccuaugugguguccgcaacauu

SEQ ID NO: 306674 - RNA, 32 nt, Human
acucucucuuccuucuccuuuucuuuccuucc

SEQ ID NO: 306675 - RNA, 32 nt, Human
acucucucuuuucuugcuguucucugaaugcu

SEQ ID NO: 306676 - RNA, 25 nt, Human
acucucuggaaagccugggagcuga

SEQ ID NO: 306677 - RNA, 22 nt, Human
acucucuggaauaagggcccga

SEQ ID NO: 306678 - RNA, 32 nt, Human
acucucuggagguggagacugccgugauucac

SEQ ID NO: 306679 - RNA, 32 nt, Human
acucucuggcugccuugccugccuggggcacu

SEQ ID NO: 306680 - RNA, 32 nt, Human
acucucugggacugaaaaagacaaagguaacu

SEQ ID NO: 306681 - RNA, 32 nt, Human
acucucuggggaagucaggggagaagcugaag

SEQ ID NO: 306682 - RNA, 32 nt, Human
acucucuuccauucccagccucccagagaaca

SEQ ID NO: 306683 - RNA, 32 nt, Human
acucucuuccuuguucugaaucauuucuucuu

SEQ ID NO: 306684 - RNA, 32 nt, Human
acucucuucuagggcuucccaccaucagcccc

SEQ ID NO: 306685 - RNA, 32 nt, Human
acucucuucucccuccagaccuuccucugacc

SEQ ID NO: 306686 - RNA, 32 nt, Human
acucucuucucuuccccaaggccucauuggcu

SEQ ID NO: 306687 - RNA, 32 nt, Human
acucucuucuuacuuaaaccagucccagacac

SEQ ID NO: 306688 - RNA, 32 nt, Human
acucucuugcccaggcuggagugcagugguau

SEQ ID NO: 306689 - RNA, 32 nt, Human
acucucuugcccagguaagcuggggcagagcc

SEQ ID NO: 306690 - RNA, 23 nt, Human
acucucuugcccucucucagggu

SEQ ID NO: 306691 - RNA, 32 nt, Human
acucucuuggcucaauccuccugcuuuaaccu

SEQ ID NO: 306692 - RNA, 32 nt, Human
acucucuuucuaaugcuucccaccuuaccuuu

SEQ ID NO: 306693 - RNA, 22 nt, Human
acucugaaaaggcucucagggu

SEQ ID NO: 306694 - RNA, 32 nt, Human
acucugaaagaacgagccagcagcagcuggug

SEQ ID NO: 306695 - RNA, 32 nt, Human
acucugaaagauggacagagagacaggagaug

SEQ ID NO: 306696 - RNA, 32 nt, Human
acucugaaaugagauugccugagcugagaucu

SEQ ID NO: 306697 - RNA, 21 nt, Human
acucugaaccagccgcaggug

SEQ ID NO: 306698 - RNA, 32 nt, Human
acucugaacccccuggcucuccagccuguccc

SEQ ID NO: 306699 - RNA, 32 nt, Human
acucugaacuccugcacucuccagaagugacu

SEQ ID NO: 306700 - RNA, 32 nt, Human
acucugaagccacagcccgagcuguauguugg

SEQ ID NO: 306701 - RNA, 32 nt, Human
acucugaccacagccuguggcugggaagggag

SEQ ID NO: 306702 - RNA, 32 nt, Human
acucugacccagccagaguccagguuuccaca

SEQ ID NO: 306703 - RNA, 32 nt, Human
acucugacccaguaccccacagagaccacugg

SEQ ID NO: 306704 - RNA, 32 nt, Human
acucugaccugugaucauguuucaggaaggaa

SEQ ID NO: 306705 - RNA, 32 nt, Human
acucugagaaagagcacauugugggggcccac

SEQ ID NO: 306706 - RNA, 32 nt, Human
acucugagaaauuugaaaacaucuggagaaaa

SEQ ID NO: 306707 - RNA, 18 nt, Human
acucugagaagcaguaug

SEQ ID NO: 306708 - RNA, 32 nt, Human
acucugagacagauuaucuucuguaaaguuuu

SEQ ID NO: 306709 - RNA, 32 nt, Human
acucugagaccagcccacccccaaacagcuag

SEQ ID NO: 306710 - RNA, 32 nt, Human
acucugagauccgagaggagcuuggaaagcug

SEQ ID NO: 306711 - RNA, 32 nt, Human
acucugagauguggagacugauggccaggcaa

SEQ ID NO: 306712 - RNA, 21 nt, Human
acucugagcuggaacaguagg

SEQ ID NO: 306713 - RNA, 32 nt, Human
acucugaggaagaagcaggacuugguacgguu

SEQ ID NO: 306714 - RNA, 32 nt, Human
acucugagguuuugcagcacuugcugugcccg

SEQ ID NO: 306715 - RNA, 32 nt, Human
acucugaguaacugguugcugugucauaacuu

SEQ ID NO: 306716 - RNA, 32 nt, Human
acucugagugggccaccaucacccaccacacc

SEQ ID NO: 306717 - RNA, 32 nt, Human
acucugaguuugagcuauuaaaguacuucuua

SEQ ID NO: 306718 - RNA, 32 nt, Human
acucugauaccuccaacugucuugccccucag

SEQ ID NO: 306719 - RNA, 32 nt, Human
acucugaugaacacuuuggagucugcuuuagu

SEQ ID NO: 306720 - RNA, 32 nt, Human
acucugaugacaccccuccccgaggccuccca

SEQ ID NO: 306721 - RNA, 32 nt, Human
acucugauucaccucuuccucugguuccuuuc

SEQ ID NO: 306722 - RNA, 32 nt, Human
acucugcaaauguaagaaagaaccacuuggcc

SEQ ID NO: 306723 - RNA, 32 nt, Human
acucugcaccacugccauacgagcuucccacc

SEQ ID NO: 306724 - RNA, 32 nt, Human
acucugcaccuccccacucucuucccauucaa

SEQ ID NO: 306725 - RNA, 32 nt, Human
acucugcaccugccagagacgaacggugaucu

SEQ ID NO: 306726 - RNA, 32 nt, Human
acucugcaccugcugucuuagggaagaaaugg

SEQ ID NO: 306727 - RNA, 32 nt, Human
acucugcaccuuccuccaccaggagccuggga

SEQ ID NO: 306728 - RNA, 32 nt, Human
acucugcacugcaccaugggaggcuccuggga

SEQ ID NO: 306729 - RNA, 32 nt, Human
acucugcacuucucucuccuuuacgagacgaa

SEQ ID NO: 306730 - RNA, 32 nt, Human
acucugcagccucuguguguguuuacagggca

SEQ ID NO: 306731 - RNA, 32 nt, Human
acucugcagccuguguuuucuguuucccccuu

SEQ ID NO: 306732 - RNA, 32 nt, Human
acucugcaggagcuggagaggcugcgggagcu

SEQ ID NO: 306733 - RNA, 32 nt, Human
acucugcaugagcuuccggagggucauggaga

SEQ ID NO: 306734 - RNA, 32 nt, Human
acucugcauuaggagccuccauuuuucuccag

SEQ ID NO: 306735 - RNA, 32 nt, Human
acucugccaaaaccaagauauccacuuaccug

SEQ ID NO: 306736 - RNA, 32 nt, Human
acucugccacagcaucccugcccagccaugug

SEQ ID NO: 306737 - RNA, 32 nt, Human
acucugccacccaagcuggagugcaguggcac

SEQ ID NO: 306738 - RNA, 32 nt, Human
acucugccacccagacugaagugcaguggugc

SEQ ID NO: 306739 - RNA, 24 nt, Human
acucugccacccaggcugcaguga

SEQ ID NO: 306740 - RNA, 32 nt, Human
acucugcccacucauuuuaccacuggggcgaa

SEQ ID NO: 306741 - RNA, 32 nt, Human
acucugccccaccccagccucuuccaggagag

SEQ ID NO: 306742 - RNA, 32 nt, Human
acucugcccgagccuucuaggcucagauccca

SEQ ID NO: 306743 - RNA, 19 nt, Human
acucugcccggccugugca

SEQ ID NO: 306744 - RNA, 19 nt, Human
acucugcccucaccugcca

SEQ ID NO: 306745 - RNA, 32 nt, Human
acucugcccuccugucaguaguggcaggaucu

SEQ ID NO: 306746 - RNA, 20 nt, Human
acucugcccuguccuggcca

SEQ ID NO: 306747 - RNA, 32 nt, Human
acucugccgcccaaacuggagugcaguggcac

SEQ ID NO: 306748 - RNA, 32 nt, Human
acucugccgcccaggcuggacugcagugacac

SEQ ID NO: 306749 - RNA, 20 nt, Human
acucugccgccgccgccgcc

SEQ ID NO: 306750 - RNA, 32 nt, Human
acucugccuccugucuuugucguuggacuuuu

SEQ ID NO: 306751 - RNA, 32 nt, Human
acucugccugcuuacacccugcccucaugcua

SEQ ID NO: 306752 - RNA, 32 nt, Human
acucugccugggcuggagucuagggcuggggc

SEQ ID NO: 306753 - RNA, 32 nt, Human
acucugccuguccccucuccuacucuacagca

SEQ ID NO: 306754 - RNA, 32 nt, Human
acucugccuuugucacagagcagggugcuauu

SEQ ID NO: 306755 - RNA, 32 nt, Human
acucugcgaccaguacagacccuguccuggcu

SEQ ID NO: 306756 - RNA, 32 nt, Human
acucugcgagguguuuacacuggagguggggg

SEQ ID NO: 306757 - RNA, 32 nt, Human
acucugcgccccaggauggaggcuccagccca

SEQ ID NO: 306758 - RNA, 32 nt, Human
acucugcucacugcaaccuccgccucccaggu

SEQ ID NO: 306759 - RNA, 32 nt, Human
acucugcucaucguuauucucuugcccugggc

SEQ ID NO: 306760 - RNA, 32 nt, Human
acucugcuccacguggggccaggcgugugacu

SEQ ID NO: 306761 - RNA, 32 nt, Human
acucugcucccaggaagcugugcggagcugug

SEQ ID NO: 306762 - RNA, 32 nt, Human
acucugcucccaucucagccaugaggccucag

SEQ ID NO: 306763 - RNA, 32 nt, Human
acucugcucccaucuuugccuccaccaugggc

SEQ ID NO: 306764 - RNA, 32 nt, Human
acucugcuccccaggcuugagugagugugugc

SEQ ID NO: 306765 - RNA, 32 nt, Human
acucugcucugcagccuccuguacucauuacu

SEQ ID NO: 306766 - RNA, 22 nt, Human
acucugcugcaccagcugcaga

SEQ ID NO: 306767 - RNA, 32 nt, Human
acucugcugcccaggcuggaguacaguggcac

SEQ ID NO: 306768 - RNA, 32 nt, Human
acucugcugcccgggcuagagugcaguggugg

SEQ ID NO: 306769 - RNA, 32 nt, Human
acucugcugccuaggcugagugcaguggugug

SEQ ID NO: 306770 - RNA, 32 nt, Human
acucugcugcggcggcugggcccggugguggu

SEQ ID NO: 306771 - RNA, 32 nt, Human
acucugcugcucaggcuggagugcaguggugc

SEQ ID NO: 306772 - RNA, 32 nt, Human
acucugcugugccgucucuucauaaagcuuca

SEQ ID NO: 306773 - RNA, 32 nt, Human
acucugcuguuuuucagucauuuccuacugug

SEQ ID NO: 306774 - RNA, 32 nt, Human
acucugcuuccuggcccagcgcucgugaccaa

SEQ ID NO: 306775 - RNA, 32 nt, Human
acucugcuuugccuccccgucccggucccugg

SEQ ID NO: 306776 - RNA, 32 nt, Human
acucugcuuugugcacuuuauggaggaggaag

SEQ ID NO: 306777 - RNA, 32 nt, Human
acucuggaaaauucacuauguuuccacacacc

SEQ ID NO: 306778 - RNA, 32 nt, Human
acucuggaagcacugcucucugucagugauac

SEQ ID NO: 306779 - RNA, 32 nt, Human
acucuggaagcugaagcagcaagaucacuuga

SEQ ID NO: 306780 - RNA, 32 nt, Human
acucuggaagcugaggugagaggaucacuuga

SEQ ID NO: 306781 - RNA, 32 nt, Human
acucuggacucgaacucccagccuccagaacu

SEQ ID NO: 306782 - RNA, 31 nt, Human
acucuggagagcaccguaucacuggagggca

SEQ ID NO: 306783 - RNA, 32 nt, Human
acucuggagagccacaggcacccccagcugga

SEQ ID NO: 306784 - RNA, 32 nt, Human
acucuggagcaacccacacucccgauaaguca

SEQ ID NO: 306785 - RNA, 32 nt, Human
acucuggagcaggccagcucugcuggacagug

SEQ ID NO: 306786 - RNA, 32 nt, Human
acucuggagcuaucagagucugugaugagcac

SEQ ID NO: 306787 - RNA, 32 nt, Human
acucuggagcuguccaggugcugccuggugau

SEQ ID NO: 306788 - RNA, 32 nt, Human
acucuggaggcuaaggugggaggaucacuuga

SEQ ID NO: 306789 - RNA, 32 nt, Human
acucuggaggcugaaaugggaggaucacuuga

SEQ ID NO: 306790 - RNA, 32 nt, Human
acucuggaggcugaaguuggaggauggcuuga

SEQ ID NO: 306791 - RNA, 32 nt, Human
acucuggaggcugagauaggaggaucacuuga

SEQ ID NO: 306792 - RNA, 32 nt, Human
acucuggaggcugaggcacagcaucacuugaa

SEQ ID NO: 306793 - RNA, 32 nt, Human
acucuggaggcugaggcagaagaaucacuuga

SEQ ID NO: 306794 - RNA, 32 nt, Human
acucuggaggcugaggcaggaagaucacugga

SEQ ID NO: 306795 - RNA, 32 nt, Human
acucuggaggcugaggcaggagaaucaauuga

SEQ ID NO: 306796 - RNA, 32 nt, Human
acucuggaggcugaggcaggagaaucacuuga

SEQ ID NO: 306797 - RNA, 32 nt, Human
acucuggaggcugaggcaggagaaucgcuuga

SEQ ID NO: 306798 - RNA, 32 nt, Human
acucuggaggcugaggcaggagaaucucuuga

SEQ ID NO: 306799 - RNA, 32 nt, Human
acucuggaggcugaggcaggaggaucacuuga

SEQ ID NO: 306800 - RNA, 32 nt, Human
acucuggaggcugaggcaggaggaugguguga

SEQ ID NO: 306801 - RNA, 32 nt, Human
acucuggaggcugaggcggaacgaucgcuuga

SEQ ID NO: 306802 - RNA, 32 nt, Human
acucuggaggcugaggcgggagaaucgcuuga

SEQ ID NO: 306803 - RNA, 32 nt, Human
acucuggaggcugaggugaggggaaucaccug

SEQ ID NO: 306804 - RNA, 32 nt, Human
acucuggaggcugaggugggaagaccaccuaa

SEQ ID NO: 306805 - RNA, 32 nt, Human
acucuggaggcugaggugggaggauugcuuaa

SEQ ID NO: 306806 - RNA, 32 nt, Human
acucuggaggcugggcuggagaaucacuugaa

SEQ ID NO: 306807 - RNA, 24 nt, Human
acucuggagggacagagacaggug

SEQ ID NO: 306808 - RNA, 32 nt, Human
acucuggagguggagccuugcccggcgagacg

SEQ ID NO: 306809 - RNA, 32 nt, Human
acucuggcaccacucuccaggcugccaugggg

SEQ ID NO: 306810 - RNA, 24 nt, Human
acucuggcagccacacuucucagg

SEQ ID NO: 306811 - RNA, 32 nt, Human
acucuggcaguggccuaugauccugaagacag

SEQ ID NO: 306812 - RNA, 32 nt, Human
acucuggccaaaaauggcucucuaggugggcu

SEQ ID NO: 306813 - RNA, 32 nt, Human
acucuggccacagccucuggggugggagguuu

SEQ ID NO: 306814 - RNA, 32 nt, Human
acucuggccacccagcaggccaugggcaugcu

SEQ ID NO: 306815 - RNA, 32 nt, Human
acucuggccugggcaacaagagcgagacuuug

SEQ ID NO: 306816 - RNA, 18 nt, Human
acucuggcuccaaaaaua

SEQ ID NO: 306817 - RNA, 32 nt, Human
acucuggcugccucuuugccuuccuaggggca

SEQ ID NO: 306818 - RNA, 32 nt, Human
acucuggcuuccgucaagagcugucuuggaag

SEQ ID NO: 306819 - RNA, 32 nt, Human
acucuggcuucucugugccccuguaaauaguu

SEQ ID NO: 306820 - RNA, 22 nt, Human
acucugggaaauggacaaggug

SEQ ID NO: 306821 - RNA, 26 nt, Human
acucugggaaccuauaaaggcaggua

SEQ ID NO: 306822 - RNA, 32 nt, Human
acucugggacugccuccuccugcugucccugu

SEQ ID NO: 306823 - RNA, 32 nt, Human
acucugggagaccgaggaagggggauugauug

SEQ ID NO: 306824 - RNA, 32 nt, Human
acucugggagccgagugcagagccagggccca

SEQ ID NO: 306825 - RNA, 32 nt, Human
acucugggaggaagacugccucuccaucgcug

SEQ ID NO: 306826 - RNA, 23 nt, Human
acucugggaggcugagacaggua

SEQ ID NO: 306827 - RNA, 32 nt, Human
acucugggaggggcagccagaggggcugagag

SEQ ID NO: 306828 - RNA, 32 nt, Human
acucugggagguggaggaaauguuauuugaag

SEQ ID NO: 306829 - RNA, 32 nt, Human
acucugggcccaaggaccugguguacaccauu

SEQ ID NO: 306830 - RNA, 32 nt, Human
acucugggccuccucaaacucagugccugggu

SEQ ID NO: 306831 - RNA, 32 nt, Human
acucugggccuucagaugucacccuaauccac

SEQ ID NO: 306832 - RNA, 32 nt, Human
acucugggccuugcugacaccugggccuugcc

SEQ ID NO: 306833 - RNA, 24 nt, Human
acucugggcugggugggccaggug

SEQ ID NO: 306834 - RNA, 32 nt, Human
acucuggggacacucugccagcaaagaggacu

SEQ ID NO: 306835 - RNA, 32 nt, Human
acucuggggugaggccagccuucuaggugauu

SEQ ID NO: 306836 - RNA, 32 nt, Human
acucugguagugaaccgaugguggaaccaguu

SEQ ID NO: 306837 - RNA, 32 nt, Human
acucugguaucuagaauucaguggcagaaaau

SEQ ID NO: 306838 - RNA, 32 nt, Human
acucuggucuagauuuaagaggacggacccua

SEQ ID NO: 306839 - RNA, 32 nt, Human
acucuggucucaaacuccugggcucaaccaau

SEQ ID NO: 306840 - RNA, 32 nt, Human
acucuggugaccugggcugcccucucagaaac

SEQ ID NO: 306841 - RNA, 32 nt, Human
acucuggugauggugacugucucucacuaauu

SEQ ID NO: 306842 - RNA, 32 nt, Human
acucugguguguggauggauggguggauggag

SEQ ID NO: 306843 - RNA, 32 nt, Human
acucuggugugugguuugacucugcuuuucuu

SEQ ID NO: 306844 - RNA, 32 nt, Human
acucugguugcccaggcuggagugcaguggug

SEQ ID NO: 306845 - RNA, 32 nt, Human
acucuguaacccaggcuggagugcaguggccu

SEQ ID NO: 306846 - RNA, 32 nt, Human
acucuguacagcccgguccucucccacaucug

SEQ ID NO: 306847 - RNA, 32 nt, Human
acucuguagauuuccaccuguucccauccucc

SEQ ID NO: 306848 - RNA, 32 nt, Human
acucuguagcccagucuggagugcagugguac

SEQ ID NO: 306849 - RNA, 32 nt, Human
acucuguagcccagucuggagugcaguggugu

SEQ ID NO: 306850 - RNA, 32 nt, Human
acucuguaggagaggaaaaguaagcaucucug

SEQ ID NO: 306851 - RNA, 32 nt, Human
acucuguaucuagcucaagguuuguaaacaca

SEQ ID NO: 306852 - RNA, 32 nt, Human
acucuguauuauauacaaguguaauacaugca

SEQ ID NO: 306853 - RNA, 32 nt, Human
acucuguauuuucucaaccucuccuuauuucc

SEQ ID NO: 306854 - RNA, 32 nt, Human
acucugucaaccaggcuggagugcacuggcgc

SEQ ID NO: 306855 - RNA, 32 nt, Human
acucugucacacaggcuggagugcaguacaau

SEQ ID NO: 306856 - RNA, 32 nt, Human
acucugucacacaggcuggagugcaguggcac

SEQ ID NO: 306857 - RNA, 32 nt, Human
acucugucaccagacuggagugcaguggcgcc

SEQ ID NO: 306858 - RNA, 32 nt, Human
acucugucaccaggcuagagugcaguggcacg

SEQ ID NO: 306859 - RNA, 32 nt, Human
acucugucaccaggcuggagugcagugccgca

SEQ ID NO: 306860 - RNA, 32 nt, Human
acucugucaccaggcuggagugcaguggcgca

SEQ ID NO: 306861 - RNA, 32 nt, Human
acucugucacccaagauggagugcaauggcac

SEQ ID NO: 306862 - RNA, 32 nt, Human
acucugucacccaagcuauggugcaguggcac

SEQ ID NO: 306863 - RNA, 32 nt, Human
acucugucacccaagcuggagugcacuggcau

SEQ ID NO: 306864 - RNA, 32 nt, Human
acucugucacccaagcuggagugcaguggugc

SEQ ID NO: 306865 - RNA, 32 nt, Human
acucugucacccaaggcggagugcagugacga

SEQ ID NO: 306866 - RNA, 32 nt, Human
acucugucacccacgcuggagugcugugaugc

SEQ ID NO: 306867 - RNA, 32 nt, Human
acucugucacccagacuggagugcagugccac

SEQ ID NO: 306868 - RNA, 32 nt, Human
acucugucacccagacuggagugcaguggcac

SEQ ID NO: 306869 - RNA, 32 nt, Human
acucugucacccagacuggagugcaguggcgc

SEQ ID NO: 306870 - RNA, 32 nt, Human
acucugucacccaggauggagagcacuggcac

SEQ ID NO: 306871 - RNA, 32 nt, Human
acucugucacccaggccaaguucaauggugca

SEQ ID NO: 306872 - RNA, 32 nt, Human
acucugucacccaggcgggaguggugcaaugg

SEQ ID NO: 306873 - RNA, 32 nt, Human
acucugucacccaggcgggaguuagguggcau

SEQ ID NO: 306874 - RNA, 32 nt, Human
acucugucacccaggcuagagugcaauggcac

SEQ ID NO: 306875 - RNA, 32 nt, Human
acucugucacccaggcuagagugcaguggcgc

SEQ ID NO: 306876 - RNA, 32 nt, Human
acucugucacccaggcugaagugcagugguac

SEQ ID NO: 306877 - RNA, 21 nt, Human
acucugucacccaggcugcag

SEQ ID NO: 306878 - RNA, 32 nt, Human
acucugucacccaggcugcagugcaauggcgc

SEQ ID NO: 306879 - RNA, 32 nt, Human
acucugucacccaggcugcaguguaguggugc

SEQ ID NO: 306880 - RNA, 32 nt, Human
acucugucacccaggcuggaauccaguggcac

SEQ ID NO: 306881 - RNA, 32 nt, Human
acucugucacccaggcuggaaugacgaaguga

SEQ ID NO: 306882 - RNA, 32 nt, Human
acucugucacccaggcuggaaugcaguggugu

SEQ ID NO: 306883 - RNA, 32 nt, Human
acucugucacccaggcuggacugcaaugacgc

SEQ ID NO: 306884 - RNA, 32 nt, Human
acucugucacccaggcuggagagcaauugcac

SEQ ID NO: 306885 - RNA, 32 nt, Human
acucugucacccaggcuggaguacaauggcgu

SEQ ID NO: 306886 - RNA, 32 nt, Human
acucugucacccaggcuggaguacagugacac

SEQ ID NO: 306887 - RNA, 32 nt, Human
acucugucacccaggcuggaguacaguggcac

SEQ ID NO: 306888 - RNA, 32 nt, Human
acucugucacccaggcuggaguacaguggcau

SEQ ID NO: 306889 - RNA, 32 nt, Human
acucugucacccaggcuggagugcaaugcugc

SEQ ID NO: 306890 - RNA, 32 nt, Human
acucugucacccaggcuggagugcaauggcaa

SEQ ID NO: 306891 - RNA, 32 nt, Human
acucugucacccaggcuggagugcaauggcau

SEQ ID NO: 306892 - RNA, 32 nt, Human
acucugucacccaggcuggagugcaauggcgc

SEQ ID NO: 306893 - RNA, 32 nt, Human
acucugucacccaggcuggagugcaauggcgu

SEQ ID NO: 306894 - RNA, 32 nt, Human
acucugucacccaggcuggagugcaauggugc

SEQ ID NO: 306895 - RNA, 32 nt, Human
acucugucacccaggcuggagugcagcaguug

SEQ ID NO: 306896 - RNA, 32 nt, Human
acucugucacccaggcuggagugcaguagcac

SEQ ID NO: 306897 - RNA, 32 nt, Human
acucugucacccaggcuggagugcaguagcgc

SEQ ID NO: 306898 - RNA, 32 nt, Human
acucugucacccaggcuggagugcaguggcac

SEQ ID NO: 306899 - RNA, 32 nt, Human
acucugucacccaggcuggagugcaguggcau

SEQ ID NO: 306900 - RNA, 32 nt, Human
acucugucacccaggcuggagugcaguggcga

SEQ ID NO: 306901 - RNA, 32 nt, Human
acucugucacccaggcuggagugcaguggcgc

SEQ ID NO: 306902 - RNA, 32 nt, Human
acucugucacccaggcuggagugcaguggcgu

SEQ ID NO: 306903 - RNA, 32 nt, Human
acucugucacccaggcuggagugcaguggcuu

SEQ ID NO: 306904 - RNA, 32 nt, Human
acucugucacccaggcuggagugcagugguac

SEQ ID NO: 306905 - RNA, 32 nt, Human
acucugucacccaggcuggagugcagugguau

SEQ ID NO: 306906 - RNA, 32 nt, Human
acucugucacccaggcuggagugcaguggugc

SEQ ID NO: 306907 - RNA, 32 nt, Human
acucugucacccaggcuggagugcaguggugu

SEQ ID NO: 306908 - RNA, 32 nt, Human
acucugucacccaggcuggagugcagugucac

SEQ ID NO: 306909 - RNA, 32 nt, Human
acucugucacccaggcuggagugcgguggcgc

SEQ ID NO: 306910 - RNA, 32 nt, Human
acucugucacccaggcuggagugcgguggugc

SEQ ID NO: 306911 - RNA, 32 nt, Human
acucugucacccaggcuggaguguaguggcau

SEQ ID NO: 306912 - RNA, 32 nt, Human
acucugucacccaggcuggaguguaguggugc

SEQ ID NO: 306913 - RNA, 32 nt, Human
acucugucacccaggcuggaguguaguggugu

SEQ ID NO: 306914 - RNA, 32 nt, Human
acucugucacccaggcugggaauugcaguggc

SEQ ID NO: 306915 - RNA, 32 nt, Human
acucugucacccaggcugggaugcaguggcuu

SEQ ID NO: 306916 - RNA, 32 nt, Human
acucugucacccaggcuguagugcaguggcau

SEQ ID NO: 306917 - RNA, 32 nt, Human
acucugucacccagguucgaguucaguggugc

SEQ ID NO: 306918 - RNA, 32 nt, Human
acucugucacccagguuggagugcagcagggg

SEQ ID NO: 306919 - RNA, 32 nt, Human
acucugucacccaugcuggugugcaguggcgu

SEQ ID NO: 306920 - RNA, 32 nt, Human
acucugucacccauucuggaguacaauggcau

SEQ ID NO: 306921 - RNA, 32 nt, Human
acucugucaccccggcuggagugcaguggugu

SEQ ID NO: 306922 - RNA, 32 nt, Human
acucugucacccuggcuggagugcgguggcga

SEQ ID NO: 306923 - RNA, 32 nt, Human
acucugucaccgaggcuagaguacaguggcac

SEQ ID NO: 306924 - RNA, 32 nt, Human
acucugucaccgagguuggagugcagugguau

SEQ ID NO: 306925 - RNA, 32 nt, Human
acucugucaccuaggcuacagugcaguggugu

SEQ ID NO: 306926 - RNA, 32 nt, Human
acucugucaccuaggcuagagggcagugaugc

SEQ ID NO: 306927 - RNA, 32 nt, Human
acucugucaccuaggcuagagugcaguggugu

SEQ ID NO: 306928 - RNA, 32 nt, Human
acucugucaccuaggcuggagugcaguggcac

SEQ ID NO: 306929 - RNA, 32 nt, Human
acucugucaccuaggcuggagugcaguggugc

SEQ ID NO: 306930 - RNA, 32 nt, Human
acucugucaccuaggcuggaguugcagugguu

SEQ ID NO: 306931 - RNA, 32 nt, Human
acucugucaccuaggcuggauugcaauggugc

SEQ ID NO: 306932 - RNA, 32 nt, Human
acucugucacucaggcuggagugcaaugacgu

SEQ ID NO: 306933 - RNA, 32 nt, Human
acucugucacucaggcuggagugcaguggcgc

SEQ ID NO: 306934 - RNA, 32 nt, Human
acucugucacucaggcuggagugcagugguau

SEQ ID NO: 306935 - RNA, 32 nt, Human
acucugucacucaggcuggagugcggugguau

SEQ ID NO: 306936 - RNA, 32 nt, Human
acucugucacucugucuggaguauaguagugu

SEQ ID NO: 306937 - RNA, 32 nt, Human
acucugucagccaggcuggagugcaauggcau

SEQ ID NO: 306938 - RNA, 32 nt, Human
acucugucauccaggcuggagugcaguggcaa

SEQ ID NO: 306939 - RNA, 32 nt, Human
acucugucauccaggcuggagugcaguggcac

SEQ ID NO: 306940 - RNA, 32 nt, Human
acucugucauccaggcuggagugcaguggugu

SEQ ID NO: 306941 - RNA, 32 nt, Human
acucugucauuuccuuucuagccccugcaucu

SEQ ID NO: 306942 - RNA, 32 nt, Human
acucuguccaacagauaucacugugaauugaa

SEQ ID NO: 306943 - RNA, 32 nt, Human
acucugucccccaggcuggagugcaguggcgc

SEQ ID NO: 306944 - RNA, 32 nt, Human
acucuguccgcccaggcugggugcagucacgg

SEQ ID NO: 306945 - RNA, 32 nt, Human
acucuguccuuacugcugaacauccugcuugu

SEQ ID NO: 306946 - RNA, 32 nt, Human
acucugucgccaggcuggaaugcaguagggca

SEQ ID NO: 306947 - RNA, 32 nt, Human
acucugucgccaggcuggagugcaguggcgug

SEQ ID NO: 306948 - RNA, 32 nt, Human
acucugucgccaggcuggagugcaguggugug

SEQ ID NO: 306949 - RNA, 32 nt, Human
acucugucgcccaagcuggagugcaguggcac

SEQ ID NO: 306950 - RNA, 32 nt, Human
acucugucgcccagacuggaaugugguggcau

SEQ ID NO: 306951 - RNA, 32 nt, Human
acucugucgcccagacuggagugcaguagcgc

SEQ ID NO: 306952 - RNA, 32 nt, Human
acucugucgcccaggcuagagugcaguggcac

SEQ ID NO: 306953 - RNA, 32 nt, Human
acucugucgcccaggcuagagugcaguggcgc

SEQ ID NO: 306954 - RNA, 32 nt, Human
acucugucgcccaggcuggaaugcaguggcau

SEQ ID NO: 306955 - RNA, 32 nt, Human
acucugucgcccaggcuggaaugcaguggcgu

SEQ ID NO: 306956 - RNA, 32 nt, Human
acucugucgcccaggcuggacuacaauggcac

SEQ ID NO: 306957 - RNA, 32 nt, Human
acucugucgcccaggcuggacugcaguggugc

SEQ ID NO: 306958 - RNA, 32 nt, Human
acucugucgcccaggcuggagggcaguggcgu

SEQ ID NO: 306959 - RNA, 32 nt, Human
acucugucgcccaggcuggaguacaauggugc

SEQ ID NO: 306960 - RNA, 32 nt, Human
acucugucgcccaggcuggagugcaauacugc

SEQ ID NO: 306961 - RNA, 32 nt, Human
acucugucgcccaggcuggagugcaguagcgc

SEQ ID NO: 306962 - RNA, 28 nt, Human
acucugucgcccaggcuggagugcagug

SEQ ID NO: 306963 - RNA, 32 nt, Human
acucugucgcccaggcuggagugcagugaugc

SEQ ID NO: 306964 - RNA, 32 nt, Human
acucugucgcccaggcuggagugcaguggcau

SEQ ID NO: 306965 - RNA, 32 nt, Human
acucugucgcccaggcuggagugcaguggcgc

SEQ ID NO: 306966 - RNA, 32 nt, Human
acucugucgcccaggcuggagugcaguggcgu

SEQ ID NO: 306967 - RNA, 32 nt, Human
acucugucgcccaggcuggagugcagugguac

SEQ ID NO: 306968 - RNA, 32 nt, Human
acucugucgcccaggcuggagugcaguggugc

SEQ ID NO: 306969 - RNA, 32 nt, Human
acucugucgcccaggcuggagugcaguggugu

SEQ ID NO: 306970 - RNA, 32 nt, Human
acucugucgcccaggcuggagugcagugucaa

SEQ ID NO: 306971 - RNA, 32 nt, Human
acucugucgcccaggcuggaguguaguggcau

SEQ ID NO: 306972 - RNA, 32 nt, Human
acucugucgcccaggcuggggugcaguggcgc

SEQ ID NO: 306973 - RNA, 32 nt, Human
acucugucgcccaggguggagugcgguggcac

SEQ ID NO: 306974 - RNA, 32 nt, Human
acucugucgcccagucuguaaugcagugcugu

SEQ ID NO: 306975 - RNA, 32 nt, Human
acucugucgcccgggcuggagugcugugagcu

SEQ ID NO: 306976 - RNA, 32 nt, Human
acucugucgccugggcuggaguacaguggugc

SEQ ID NO: 306977 - RNA, 32 nt, Human
acucugucgcgccagcuggagugcagugccau

SEQ ID NO: 306978 - RNA, 32 nt, Human
acucugucgcucaggcuggagugcagugaugc

SEQ ID NO: 306979 - RNA, 32 nt, Human
acucugucggcaccugggaguucaguuggaca

SEQ ID NO: 306980 - RNA, 32 nt, Human
acucugucggccaggcuggaaugcaauggugc

SEQ ID NO: 306981 - RNA, 32 nt, Human
acucugucguccaggcuggagugcaguggcgc

SEQ ID NO: 306982 - RNA, 32 nt, Human
acucugucguccagguuagagugcaauggcuu

SEQ ID NO: 306983 - RNA, 32 nt, Human
acucugucucaaacaaaacaaaacaaaacaaa

SEQ ID NO: 306984 - RNA, 32 nt, Human
acucugucucccagacuggagugaguggugug

SEQ ID NO: 306985 - RNA, 32 nt, Human
acucugucucccaggcuagagugcaguggugc

SEQ ID NO: 306986 - RNA, 32 nt, Human
acucugucucccaggcugcaacauccaccucc

SEQ ID NO: 306987 - RNA, 32 nt, Human
acucugucucccaggcugcuggagugcagugg

SEQ ID NO: 306988 - RNA, 32 nt, Human
acucugucucccaggcuggacugcaguggugc

SEQ ID NO: 306989 - RNA, 32 nt, Human
acucugucucccaggcuggagugcaauggugc

SEQ ID NO: 306990 - RNA, 32 nt, Human
acucugucucccaggcuggagugcaguggagu

SEQ ID NO: 306991 - RNA, 32 nt, Human
acucugucucccaggcuggagugcaguggcac

SEQ ID NO: 306992 - RNA, 32 nt, Human
acucugucucccaggcuggagugcaguggugc

SEQ ID NO: 306993 - RNA, 32 nt, Human
acucugucucccaggcuggagugugauggcgu

SEQ ID NO: 306994 - RNA, 32 nt, Human
acucugucucccaggcuggaguugcaguggug

SEQ ID NO: 306995 - RNA, 32 nt, Human
acucugucuccucugcuggagccaccaguucc

SEQ ID NO: 306996 - RNA, 32 nt, Human
acucugucugggaaggugggaggugcagccag

SEQ ID NO: 306997 - RNA, 32 nt, Human
acucugucuucacagcaggagugcugucucca

SEQ ID NO: 306998 - RNA, 32 nt, Human
acucugugccuggcuucucuugccugccuugg

SEQ ID NO: 306999 - RNA, 32 nt, Human
acucugugcucccuucccucuccuggggcggg

SEQ ID NO: 307000 - RNA, 31 nt, Human
acucugugcucucugaguccugugucgugcu

SEQ ID NO: 307001 - RNA, 32 nt, Human
acucugugcugcugccuucugcagagaggcac

SEQ ID NO: 307002 - RNA, 32 nt, Human
acucuguggcccaggcuggagugcaguggcac

SEQ ID NO: 307003 - RNA, 32 nt, Human
acucuguggcccaggcuggagugcaguggcau

SEQ ID NO: 307004 - RNA, 32 nt, Human
acucuguggcccaggcuggagugcaguggcgc

SEQ ID NO: 307005 - RNA, 32 nt, Human
acucuguggcccaggcuggagugcaguggugc

SEQ ID NO: 307006 - RNA, 32 nt, Human
acucuguggggccacacguuugccaaauuuuc

SEQ ID NO: 307007 - RNA, 32 nt, Human
acucugugucccaggcuggagugcaguggcac

SEQ ID NO: 307008 - RNA, 21 nt, Human
acucugugucuaucccagugg

SEQ ID NO: 307009 - RNA, 32 nt, Human
acucugugucucaggcuggaguacaguggugc

SEQ ID NO: 307010 - RNA, 19 nt, Human
acucugugugagcagggug

SEQ ID NO: 307011 - RNA, 32 nt, Human
acucuguuaccaacuuugcugugugaccuuaa

SEQ ID NO: 307012 - RNA, 32 nt, Human
acucuguuacccaggccggagugcaguggcgc

SEQ ID NO: 307013 - RNA, 32 nt, Human
acucuguuacccaggcuagagugcaguggcgc

SEQ ID NO: 307014 - RNA, 32 nt, Human
acucuguuacccaggcuagaguguaguggcau

SEQ ID NO: 307015 - RNA, 32 nt, Human
acucuguuacccaggcuggaaugcaguggcgc

SEQ ID NO: 307016 - RNA, 32 nt, Human
acucuguuacccaggcuggagugcaauggagu

SEQ ID NO: 307017 - RNA, 32 nt, Human
acucuguuacccaggcuggagugcaguggugc

SEQ ID NO: 307018 - RNA, 32 nt, Human
acucuguuccccaggccggagugcagugguac

SEQ ID NO: 307019 - RNA, 31 nt, Human
acucuguuccucucugcuuuguucuucccug

SEQ ID NO: 307020 - RNA, 32 nt, Human
acucuguugaccaggcuggagugaaguggugu

SEQ ID NO: 307021 - RNA, 32 nt, Human
acucuguugaccaggcuggagugcagugguga

SEQ ID NO: 307022 - RNA, 32 nt, Human
acucuguugccaaggcuggaaugcaguggcga

SEQ ID NO: 307023 - RNA, 32 nt, Human
acucuguugccaggcuggaaugcaguggcguc

SEQ ID NO: 307024 - RNA, 32 nt, Human
acucuguugccaggcuggagugcaguggcgca

SEQ ID NO: 307025 - RNA, 32 nt, Human
acucuguugccaggcuggagugcaguggcgcg

SEQ ID NO: 307026 - RNA, 32 nt, Human
acucuguugcccaagcuggagaacaguggcac

SEQ ID NO: 307027 - RNA, 32 nt, Human
acucuguugcccaagcuggaguacaguagugc

SEQ ID NO: 307028 - RNA, 32 nt, Human
acucuguugcccaagcuggggugcaguggcac

SEQ ID NO: 307029 - RNA, 32 nt, Human
acucuguugcccaagguagagugcaguggcgu

SEQ ID NO: 307030 - RNA, 32 nt, Human
acucuguugcccagacuggagugcaguggcac

SEQ ID NO: 307031 - RNA, 32 nt, Human
acucuguugcccagacuggagugcaguggugu

SEQ ID NO: 307032 - RNA, 32 nt, Human
acucuguugcccagccuggagugcaguggcau

SEQ ID NO: 307033 - RNA, 32 nt, Human
acucuguugcccagccuggagugcaguguguc

SEQ ID NO: 307034 - RNA, 32 nt, Human
acucuguugcccagcuggagugcaguggcgug

SEQ ID NO: 307035 - RNA, 32 nt, Human
acucuguugcccaggauggaaugcaguggcac

SEQ ID NO: 307036 - RNA, 32 nt, Human
acucuguugcccaggauggagugcagugguga

SEQ ID NO: 307037 - RNA, 32 nt, Human
acucuguugcccaggcuagagugcaauggcac

SEQ ID NO: 307038 - RNA, 32 nt, Human
acucuguugcccaggcuagagugcacuaauac

SEQ ID NO: 307039 - RNA, 32 nt, Human
acucuguugcccaggcugaagugcaguggugu

SEQ ID NO: 307040 - RNA, 32 nt, Human
acucuguugcccaggcugagguacaguggcgu

SEQ ID NO: 307041 - RNA, 21 nt, Human
acucuguugcccaggcugcag

SEQ ID NO: 307042 - RNA, 32 nt, Human
acucuguugcccaggcugcagugcaguggugu

SEQ ID NO: 307043 - RNA, 32 nt, Human
acucuguugcccaggcuggaaugcagugauac

SEQ ID NO: 307044 - RNA, 32 nt, Human
acucuguugcccaggcuggaaugcagugguac

SEQ ID NO: 307045 - RNA, 32 nt, Human
acucuguugcccaggcuggacuacaguggcac

SEQ ID NO: 307046 - RNA, 32 nt, Human
acucuguugcccaggcuggaguaaagggcagu

SEQ ID NO: 307047 - RNA, 32 nt, Human
acucuguugcccaggcuggaguacaguggcac

SEQ ID NO: 307048 - RNA, 32 nt, Human
acucuguugcccaggcuggaguacaguggcgu

SEQ ID NO: 307049 - RNA, 32 nt, Human
acucuguugcccaggcuggagugcaauggcac

SEQ ID NO: 307050 - RNA, 32 nt, Human
acucuguugcccaggcuggagugcaggggcac

SEQ ID NO: 307051 - RNA, 32 nt, Human
acucuguugcccaggcuggagugcaggggcgu

SEQ ID NO: 307052 - RNA, 32 nt, Human
acucuguugcccaggcuggagugcagugaugu

SEQ ID NO: 307053 - RNA, 29 nt, Human
acucuguugcccaggcuggagugcagugg

SEQ ID NO: 307054 - RNA, 32 nt, Human
acucuguugcccaggcuggagugcaguggcac

SEQ ID NO: 307055 - RNA, 32 nt, Human
acucuguugcccaggcuggagugcaguggcau

SEQ ID NO: 307056 - RNA, 32 nt, Human
acucuguugcccaggcuggagugcaguggcgc

SEQ ID NO: 307057 - RNA, 32 nt, Human
acucuguugcccaggcuggagugcaguggcgu

SEQ ID NO: 307058 - RNA, 32 nt, Human
acucuguugcccaggcuggagugcaguggugc

SEQ ID NO: 307059 - RNA, 32 nt, Human
acucuguugcccaggcuggagugcaguggugg

SEQ ID NO: 307060 - RNA, 32 nt, Human
acucuguugcccaggcuggagugcagugucac

SEQ ID NO: 307061 - RNA, 32 nt, Human
acucuguugcccaggcuggagugccucuucau

SEQ ID NO: 307062 - RNA, 32 nt, Human
acucuguugcccaggcuggagugcgauggcau

SEQ ID NO: 307063 - RNA, 32 nt, Human
acucuguugcccaggcuggaguguaguggugu

SEQ ID NO: 307064 - RNA, 32 nt, Human
acucuguugcccaggcuggaguucagcggugc

SEQ ID NO: 307065 - RNA, 32 nt, Human
acucuguugcccaggguggagugcaguggcau

SEQ ID NO: 307066 - RNA, 32 nt, Human
acucuguugcccagguuggaguacagcaaugc

SEQ ID NO: 307067 - RNA, 32 nt, Human
acucuguugcccagguuggaguacagcagugc

SEQ ID NO: 307068 - RNA, 32 nt, Human
acucuguugcccagucuggagugcaguggcgc

SEQ ID NO: 307069 - RNA, 32 nt, Human
acucuguugcccagucuggaguucaguggcgc

SEQ ID NO: 307070 - RNA, 32 nt, Human
acucuguugcccaugcuggagggcagugguau

SEQ ID NO: 307071 - RNA, 32 nt, Human
acucuguugccccaggcuggagugcaguggug

SEQ ID NO: 307072 - RNA, 32 nt, Human
acucuguugcccgggcuggagugcagcggcgu

SEQ ID NO: 307073 - RNA, 32 nt, Human
acucuguugcccuggcuggagugcaguagagu

SEQ ID NO: 307074 - RNA, 32 nt, Human
acucuguugccuagacuggagugcaauggcgu

SEQ ID NO: 307075 - RNA, 32 nt, Human
acucuguugccuaggcuagagggcaguggcac

SEQ ID NO: 307076 - RNA, 32 nt, Human
acucuguugccuaggcuggaggacaguggcac

SEQ ID NO: 307077 - RNA, 32 nt, Human
acucuguugccuaggcuggaguacaguggcaa

SEQ ID NO: 307078 - RNA, 32 nt, Human
acucuguugccuaggcuggagugaaaguggcg

SEQ ID NO: 307079 - RNA, 32 nt, Human
acucuguugcuaggcuggagugcaguggcaca

SEQ ID NO: 307080 - RNA, 32 nt, Human
acucuguugcuaggcuggagugcaguggugcg

SEQ ID NO: 307081 - RNA, 32 nt, Human
acucuguugcucaagcuggaguggaguggcac

SEQ ID NO: 307082 - RNA, 32 nt, Human
acucuguugcucaggcuggagugcaguggcac

SEQ ID NO: 307083 - RNA, 32 nt, Human
acucuguuggcagaaggcaggcgaggauaagc

SEQ ID NO: 307084 - RNA, 32 nt, Human
acucuguuguccaggcuggagugcagcgauau

SEQ ID NO: 307085 - RNA, 32 nt, Human
acucuguuucccaggcuggagugcacaaacau

SEQ ID NO: 307086 - RNA, 32 nt, Human
acucuguuucuuuccucgaaggccaccuggac

SEQ ID NO: 307087 - RNA, 32 nt, Human
acucuguuuuucucagaauaccucuuaccuuu

SEQ ID NO: 307088 - RNA, 32 nt, Human
acucuuaacucuauaaacaaccaccuuucaca

SEQ ID NO: 307089 - RNA, 32 nt, Human
acucuuaaggcuguuagguuugaauaacuuga

SEQ ID NO: 307090 - RNA, 32 nt, Human
acucuuaagucacaccuaccacugagcagcug

SEQ ID NO: 307091 - RNA, 32 nt, Human
acucuuacagaagcucuuguggcccuaggaug

SEQ ID NO: 307092 - RNA, 32 nt, Human
acucuuacccuuuugagaauugcucugaauuu

SEQ ID NO: 307093 - RNA, 32 nt, Human
acucuuaccugacaacaccacagccucaggcc

SEQ ID NO: 307094 - RNA, 32 nt, Human
acucuuaccugggcuucucugugugcauuugc

SEQ ID NO: 307095 - RNA, 32 nt, Human
acucuuacuacaaauucuuaguucuguguuug

SEQ ID NO: 307096 - RNA, 32 nt, Human
acucuuacucuuugcuaaucuauuggccuauc

SEQ ID NO: 307097 - RNA, 32 nt, Human
acucuuacugcccacagaaccuccagguuccu

SEQ ID NO: 307098 - RNA, 32 nt, Human
acucuuacuguagaacuauccauuucuuccuu

SEQ ID NO: 307099 - RNA, 32 nt, Human
acucuuagaagagagaaaauaagguuucauaa

SEQ ID NO: 307100 - RNA, 32 nt, Human
acucuuagcuaaaucccuccccgugacugcaa

SEQ ID NO: 307101 - RNA, 32 nt, Human
acucuuaucagccugggcaacacagugagacu

SEQ ID NO: 307102 - RNA, 32 nt, Human
acucuuaucgcccaggcuggggugcaauggcg

SEQ ID NO: 307103 - RNA, 32 nt, Human
acucuuaucuuuccccacuucauuccacccag

SEQ ID NO: 307104 - RNA, 32 nt, Human
acucuuaugcccacgcuggagugcagugagcc

SEQ ID NO: 307105 - RNA, 32 nt, Human
acucuuaugguugggacauucuuuuccugcuu

SEQ ID NO: 307106 - RNA, 32 nt, Human
acucuuauugcccaggcuagagugcaauggug

SEQ ID NO: 307107 - RNA, 32 nt, Human
acucuuauugcccaggcuggagugcaauggug

SEQ ID NO: 307108 - RNA, 32 nt, Human
acucuucaaaaacuguuuuggguagcugccac

SEQ ID NO: 307109 - RNA, 32 nt, Human
acucuucaaugccagcuacugccaccuaaaaa

SEQ ID NO: 307110 - RNA, 20 nt, Human
acucuucacucaggcugcag

SEQ ID NO: 307111 - RNA, 32 nt, Human
acucuucacucaggcugcagugcaguggcgca

SEQ ID NO: 307112 - RNA, 32 nt, Human
acucuucacugacagugguggcuguagucggc

SEQ ID NO: 307113 - RNA, 32 nt, Human
acucuucaugauaaaucuugcugcugcucacu

SEQ ID NO: 307114 - RNA, 32 nt, Human
acucuuccaauuaaacauucucagccaagaag

SEQ ID NO: 307115 - RNA, 32 nt, Human
acucuuccacggugugcugcuuucccuccgag

SEQ ID NO: 307116 - RNA, 32 nt, Human
acucuuccagaagagagacuagacacgcagcu

SEQ ID NO: 307117 - RNA, 32 nt, Human
acucuuccagccagaaagauggugguuuucua

SEQ ID NO: 307118 - RNA, 32 nt, Human
acucuuccagccuccauguccagaccuaguca

SEQ ID NO: 307119 - RNA, 32 nt, Human
acucuuccauuccuccuccucuaggggugcag

SEQ ID NO: 307120 - RNA, 32 nt, Human
acucuucccaucuugccuccccucgggaccuc

SEQ ID NO: 307121 - RNA, 32 nt, Human
acucuucccuuccccucucucauuccccauac

SEQ ID NO: 307122 - RNA, 32 nt, Human
acucuucccuuuucuucucucaguguugucug

SEQ ID NO: 307123 - RNA, 32 nt, Human
acucuuccgcccaggcugcagugcaguggcau

SEQ ID NO: 307124 - RNA, 19 nt, Human
acucuuccugcaacuacca

SEQ ID NO: 307125 - RNA, 32 nt, Human
acucuuccugcaggaaaggcugggcuggaccu

SEQ ID NO: 307126 - RNA, 32 nt, Human
acucuuccugguguguuuuuacauguucacuu

SEQ ID NO: 307127 - RNA, 32 nt, Human
acucuuccuuagcucugucucugaguuacugg

SEQ ID NO: 307128 - RNA, 32 nt, Human
acucuuccuucacacuggacaguuuaggacaa

SEQ ID NO: 307129 - RNA, 32 nt, Human
acucuucgccucgguaauaccugucugaugcc

SEQ ID NO: 307130 - RNA, 32 nt, Human
acucuucucacccaggcuggaaugcaguggca

SEQ ID NO: 307131 - RNA, 32 nt, Human
acucuucucucuccaucucuccuuccuccccc

SEQ ID NO: 307132 - RNA, 32 nt, Human
acucuucugcacucugagcuggccagccccuc

SEQ ID NO: 307133 - RNA, 32 nt, Human
acucuucugccuccuagaccuguucuuuccau

SEQ ID NO: 307134 - RNA, 32 nt, Human
acucuucuggacuguacaggcuugcugccauc

SEQ ID NO: 307135 - RNA, 32 nt, Human
acucuucugguccccacagacucagagagaac

SEQ ID NO: 307136 - RNA, 32 nt, Human
acucuucugugagcugcagcuguggggcagag

SEQ ID NO: 307137 - RNA, 32 nt, Human
acucuucuuccaguguggcacagggaagcuaa

SEQ ID NO: 307138 - RNA, 32 nt, Human
acucuucuucugucuguacaucguugucgucg

SEQ ID NO: 307139 - RNA, 32 nt, Human
acucuucuugaagcucucccugggcuucucuc

SEQ ID NO: 307140 - RNA, 32 nt, Human
acucuucuuuccaauagacugcuaucugaaua

SEQ ID NO: 307141 - RNA, 32 nt, Human
acucuucuuuccucuccauucuccccucagau

SEQ ID NO: 307142 - RNA, 32 nt, Human
acucuugaaaggccaacagcaaguguuugugg

SEQ ID NO: 307143 - RNA, 32 nt, Human
acucuugaaccuaggagguggagguugcagug

SEQ ID NO: 307144 - RNA, 32 nt, Human
acucuugaccucaagugauccaccugucucag

SEQ ID NO: 307145 - RNA, 32 nt, Human
acucuugagcccuccuggaauggagcuguaua

SEQ ID NO: 307146 - RNA, 32 nt, Human
acucuugagcuguggcuuacuugcugucuuca

SEQ ID NO: 307147 - RNA, 32 nt, Human
acucuugauaggacacagaacgagugaaugag

SEQ ID NO: 307148 - RNA, 32 nt, Human
acucuugauucugcuaauuauuaccaacaaaa

SEQ ID NO: 307149 - RNA, 24 nt, Human
acucuugcaaaaaguuuauuugaa

SEQ ID NO: 307150 - RNA, 31 nt, Human
acucuugcacuuucuuaagcaggauauuccu

SEQ ID NO: 307151 - RNA, 32 nt, Human
acucuugcccaggcuggagugcaguggugcga

SEQ ID NO: 307152 - RNA, 32 nt, Human
acucuugcuacugcucacucuuuggguucaca

SEQ ID NO: 307153 - RNA, 32 nt, Human
acucuugcuauguugcucacacuagucuugaa

SEQ ID NO: 307154 - RNA, 32 nt, Human
acucuugcucauucucuccugcccucuaaaag

SEQ ID NO: 307155 - RNA, 32 nt, Human
acucuugcucucccccucccucccuuacucua

SEQ ID NO: 307156 - RNA, 32 nt, Human
acucuugcugcccaggcuggagugcaauggug

SEQ ID NO: 307157 - RNA, 32 nt, Human
acucuugcugcccaggcuggagugcaguggcu

SEQ ID NO: 307158 - RNA, 32 nt, Human
acucuugcuuuauuccagaaugcuguacaucu

SEQ ID NO: 307159 - RNA, 32 nt, Human
acucuuggacucucggcaaccacaacauaaua

SEQ ID NO: 307160 - RNA, 32 nt, Human
acucuuggagcagguguucccccuggggacuc

SEQ ID NO: 307161 - RNA, 32 nt, Human
acucuuggccacguguuuccaguggcuggacc

SEQ ID NO: 307162 - RNA, 32 nt, Human
acucuuggccucccugaacauaggaaacccac

SEQ ID NO: 307163 - RNA, 32 nt, Human
acucuuggccugaucccaaccauagcccucuc

SEQ ID NO: 307164 - RNA, 32 nt, Human
acucuugggcaggugcagugaggugccugcuu

SEQ ID NO: 307165 - RNA, 21 nt, Human
acucuugggccuucucagggu

SEQ ID NO: 307166 - RNA, 32 nt, Human
acucuugggcuucagucugcccaucugcugaa

SEQ ID NO: 307167 - RNA, 32 nt, Human
acucuuggucucccacaggaaaaggccucccc

SEQ ID NO: 307168 - RNA, 32 nt, Human
acucuuggugaggcacgagcuaccagccaauu

SEQ ID NO: 307169 - RNA, 32 nt, Human
acucuuguaccccaggcuggagugcaauggcg

SEQ ID NO: 307170 - RNA, 32 nt, Human
acucuugucaaccagauuggagugcaguggug

SEQ ID NO: 307171 - RNA, 32 nt, Human
acucuugucacccaggcuggaguacaguggca

SEQ ID NO: 307172 - RNA, 32 nt, Human
acucuugucacccaggcuggagugcaauggca

SEQ ID NO: 307173 - RNA, 32 nt, Human
acucuugucacccaggcuggagugcaguagug

SEQ ID NO: 307174 - RNA, 32 nt, Human
acucuugucacccaggcuggagugcaguggca

SEQ ID NO: 307175 - RNA, 32 nt, Human
acucuugucacccaggcuggagugcaguggcg

SEQ ID NO: 307176 - RNA, 32 nt, Human
acucuugucacccaggcuggaguguaguggug

SEQ ID NO: 307177 - RNA, 32 nt, Human
acucuugucaccgaggcuggagugcaaugaca

SEQ ID NO: 307178 - RNA, 32 nt, Human
acucuugucaccuagacuggagugcaauggcg

SEQ ID NO: 307179 - RNA, 32 nt, Human
acucuugucaccuaggcaagagugcaauggca

SEQ ID NO: 307180 - RNA, 32 nt, Human
acucuugucaccugggcugcaguuggaggccu

SEQ ID NO: 307181 - RNA, 32 nt, Human
acucuugucacucaggcuggagugcaguggug

SEQ ID NO: 307182 - RNA, 32 nt, Human
acucuuguccaggcuggaggagugcagucgua

SEQ ID NO: 307183 - RNA, 32 nt, Human
acucuugucgcccaacuagaguguaguggcac

SEQ ID NO: 307184 - RNA, 32 nt, Human
acucuugucucccagacuggagugcaauggca

SEQ ID NO: 307185 - RNA, 32 nt, Human
acucuugugcccaggcuggagugcaauagcuc

SEQ ID NO: 307186 - RNA, 32 nt, Human
acucuuguguccaggcuggagugcaguggcac

SEQ ID NO: 307187 - RNA, 32 nt, Human
acucuuguguuuaggggauggugggaacauau

SEQ ID NO: 307188 - RNA, 32 nt, Human
acucuuguuauccaggcuggggugcaauggug

SEQ ID NO: 307189 - RNA, 32 nt, Human
acucuuguucagcacggggccugaggucagag

SEQ ID NO: 307190 - RNA, 32 nt, Human
acucuuguucuugucugaucucuugucaaauu

SEQ ID NO: 307191 - RNA, 32 nt, Human
acucuuguugcccaagcuggagugcaauggcg

SEQ ID NO: 307192 - RNA, 32 nt, Human
acucuuguugcccaagcuggagugcaguggug

SEQ ID NO: 307193 - RNA, 32 nt, Human
acucuuguugcccacgcuggagugcaauggug

SEQ ID NO: 307194 - RNA, 32 nt, Human
acucuuguugcccaggccagagugcaauggcg

SEQ ID NO: 307195 - RNA, 32 nt, Human
acucuuguugcccaggcggagugcaguggaac

SEQ ID NO: 307196 - RNA, 32 nt, Human
acucuuguugcccaggcuagagggcaauggug

SEQ ID NO: 307197 - RNA, 32 nt, Human
acucuuguugcccaggcuagagugcaauggca

SEQ ID NO: 307198 - RNA, 32 nt, Human
acucuuguugcccaggcuggaaugcaguggca

SEQ ID NO: 307199 - RNA, 23 nt, Human
acucuuguugcccaggcuggagg

SEQ ID NO: 307200 - RNA, 32 nt, Human
acucuuguugcccaggcuggaguacaauggca

SEQ ID NO: 307201 - RNA, 32 nt, Human
acucuuguugcccaggcuggaguacaauggcg

SEQ ID NO: 307202 - RNA, 32 nt, Human
acucuuguugcccaggcuggagugaaauggug

SEQ ID NO: 307203 - RNA, 32 nt, Human
acucuuguugcccaggcuggagugaaguggcg

SEQ ID NO: 307204 - RNA, 32 nt, Human
acucuuguugcccaggcuggagugcaacggca

SEQ ID NO: 307205 - RNA, 32 nt, Human
acucuuguugcccaggcuggagugcaauagca

SEQ ID NO: 307206 - RNA, 32 nt, Human
acucuuguugcccaggcuggagugcaaugcgc

SEQ ID NO: 307207 - RNA, 32 nt, Human
acucuuguugcccaggcuggagugcaauggca

SEQ ID NO: 307208 - RNA, 32 nt, Human
acucuuguugcccaggcuggagugcaauggcg

SEQ ID NO: 307209 - RNA, 32 nt, Human
acucuuguugcccaggcuggagugcaguagca

SEQ ID NO: 307210 - RNA, 32 nt, Human
acucuuguugcccaggcuggagugcaguggug

SEQ ID NO: 307211 - RNA, 32 nt, Human
acucuuguugcccaggcuggagugcgguggua

SEQ ID NO: 307212 - RNA, 32 nt, Human
acucuuguugcccaggcuggagugcguuggcg

SEQ ID NO: 307213 - RNA, 32 nt, Human
acucuuguugccuagcuggagugcaauggcgc

SEQ ID NO: 307214 - RNA, 32 nt, Human
acucuuguugccuaggcuggagugcaauggug

SEQ ID NO: 307215 - RNA, 32 nt, Human
acucuuguuguccagucuggagugcaauggca

SEQ ID NO: 307216 - RNA, 26 nt, Human
acucuuuagcauucauacuuuggggu

SEQ ID NO: 307217 - RNA, 32 nt, Human
acucuuuaucauuacugcuguaaacccugcua

SEQ ID NO: 307218 - RNA, 28 nt, Human
acucuuuauccaagacauuucucagggu

SEQ ID NO: 307219 - RNA, 32 nt, Human
acucuuuaucccaugaggagcuucuggaaacu

SEQ ID NO: 307220 - RNA, 32 nt, Human
acucuuuaucuucucaucuuacuggccugguc

SEQ ID NO: 307221 - RNA, 32 nt, Human
acucuuuaucuuugcuguggugcagugucuag

SEQ ID NO: 307222 - RNA, 32 nt, Human
acucuuucacagugcccaugguauucaugcca

SEQ ID NO: 307223 - RNA, 32 nt, Human
acucuuucacccagacuggagggcagcggcga

SEQ ID NO: 307224 - RNA, 32 nt, Human
acucuuucacccaggcuggagugcaguggcac

SEQ ID NO: 307225 - RNA, 32 nt, Human
acucuuucacucaggcuggaauguaguggaga

SEQ ID NO: 307226 - RNA, 32 nt, Human
acucuuucauucuucucacauccaucuacuuu

SEQ ID NO: 307227 - RNA, 32 nt, Human
acucuuuccaaaacccccuccuggguuuuacu

SEQ ID NO: 307228 - RNA, 32 nt, Human
acucuuucccaucuccccuggggagccugagg

SEQ ID NO: 307229 - RNA, 32 nt, Human
acucuuuccuacccugacauccagaaacaaug

SEQ ID NO: 307230 - RNA, 17 nt, Human
acucuuuccugccacca

SEQ ID NO: 307231 - RNA, 32 nt, Human
acucuuuccuuuccucucuccuguuuuccuuc

SEQ ID NO: 307232 - RNA, 32 nt, Human
acucuuucgcccaggcuggagugcagugguau

SEQ ID NO: 307233 - RNA, 32 nt, Human
acucuuucgcccaggcuggagugcauuggcau

SEQ ID NO: 307234 - RNA, 32 nt, Human
acucuuucucagaaaacaagaagaagaagaca

SEQ ID NO: 307235 - RNA, 21 nt, Human
acucuuugacauuagauuuca

SEQ ID NO: 307236 - RNA, 32 nt, Human
acucuuugaucauggcucucucugccagaauu

SEQ ID NO: 307237 - RNA, 32 nt, Human
acucuuuggaacaacagcuaucuagauagcug

SEQ ID NO: 307238 - RNA, 32 nt, Human
acucuuuggccaaacaccuccaccacugcccc

SEQ ID NO: 307239 - RNA, 32 nt, Human
acucuuuguauaaugucagagacucauguuua

SEQ ID NO: 307240 - RNA, 32 nt, Human
acucuuugugguuccugucaugagaaggugug

SEQ ID NO: 307241 - RNA, 32 nt, Human
acucuuuuaucagaucacaaacuccuagaguc

SEQ ID NO: 307242 - RNA, 32 nt, Human
acucuuuucaucccucuccugggucugcgccc

SEQ ID NO: 307243 - RNA, 18 nt, Human
acucuuuucccucaggga

SEQ ID NO: 307244 - RNA, 32 nt, Human
acucuuuucuacugcuuggcucugcccaagga

SEQ ID NO: 307245 - RNA, 21 nt, Human
acucuuuucucccagggaccc

SEQ ID NO: 307246 - RNA, 32 nt, Human
acucuuuucuguagaauuugacggaacacagc

SEQ ID NO: 307247 - RNA, 32 nt, Human
acucuuuugaaggaugaaggugguggauucuc

SEQ ID NO: 307248 - RNA, 32 nt, Human
acucuuuugcccaggcuggagcgaagugacga

SEQ ID NO: 307249 - RNA, 32 nt, Human
acucuuuuuacccaggcuggagugcaaugaug

SEQ ID NO: 307250 - RNA, 32 nt, Human
acucuuuuuccugcccagggcccauucuugcu

SEQ ID NO: 307251 - RNA, 32 nt, Human
acugaaaaagccccaggcugaaaggacuggac

SEQ ID NO: 307252 - RNA, 32 nt, Human
acugaaaaccuacuugagguuucuggucugaa

SEQ ID NO: 307253 - RNA, 32 nt, Human
acugaaaagccaaagaaauucacucuggcuag

SEQ ID NO: 307254 - RNA, 32 nt, Human
acugaaaaggagcaacaaggagagggucugcu

SEQ ID NO: 307255 - RNA, 32 nt, Human
acugaaaagucaucaaucauacagucagugaa

SEQ ID NO: 307256 - RNA, 32 nt, Human
acugaaaagugaguuugcagaaaccuugggga

SEQ ID NO: 307257 - RNA, 32 nt, Human
acugaaaauaaggugggcuucacuggagaaau

SEQ ID NO: 307258 - RNA, 32 nt, Human
acugaaaauacaaaauaauuagccggguguug

SEQ ID NO: 307259 - RNA, 32 nt, Human
acugaaaauacagaaaaguuagccaggcgugg

SEQ ID NO: 307260 - RNA, 32 nt, Human
acugaaacacagcaacaccaguucucaaggac

SEQ ID NO: 307261 - RNA, 32 nt, Human
acugaaacagcugcuuauuuugccguuaaaaa

SEQ ID NO: 307262 - RNA, 32 nt, Human
acugaaacauggcuguguuugcagccugcucu

SEQ ID NO: 307263 - RNA, 32 nt, Human
acugaaaccacugacaaguaugcugaauagaa

SEQ ID NO: 307264 - RNA, 32 nt, Human
acugaaaccagcugaggcauccugaaagccua

SEQ ID NO: 307265 - RNA, 32 nt, Human
acugaaacccaagaggcagagguugaguaagc

SEQ ID NO: 307266 - RNA, 32 nt, Human
acugaaaccccgugguucccaaugagccagcg

SEQ ID NO: 307267 - RNA, 32 nt, Human
acugaaacccugacccagaaaaguggcuugcu

SEQ ID NO: 307268 - RNA, 32 nt, Human
acugaaaccuacucugagucucacaucucuaa

SEQ ID NO: 307269 - RNA, 32 nt, Human
acugaaacuacugguguuuuucugccuugaga

SEQ ID NO: 307270 - RNA, 32 nt, Human
acugaaagaaaaucaugaacuuaucauucuaa

SEQ ID NO: 307271 - RNA, 32 nt, Human
acugaaagaagauauuucaagaugaccaucug

SEQ ID NO: 307272 - RNA, 24 nt, Human
acugaaagcuccgccucccggguu

SEQ ID NO: 307273 - RNA, 32 nt, Human
acugaaaggaaaggagaaacagauaaguccau

SEQ ID NO: 307274 - RNA, 32 nt, Human
acugaaaggaagagggagcagagcaagaaaaa

SEQ ID NO: 307275 - RNA, 31 nt, Human
acugaaaggagacagccucagagcuaugccu

SEQ ID NO: 307276 - RNA, 32 nt, Human
acuuaggaggcugaggggcaaggauugcuuga

SEQ ID NO: 307277 - RNA, 32 nt, Human
acuuaggaggcugaggugggagaaucacuugg

SEQ ID NO: 307278 - RNA, 32 nt, Human
acuuaggaggcugaggugggagaauuaccuga

SEQ ID NO: 307279 - RNA, 32 nt, Human
acuuaggaggcugaggugggaggauugcuuga

SEQ ID NO: 307280 - RNA, 32 nt, Human
acuuaggaggggcaauggagccgcuuagugcc

SEQ ID NO: 307281 - RNA, 32 nt, Human
acuuaggaguagcuaggacuacaggccacggc

SEQ ID NO: 307282 - RNA, 32 nt, Human
acuuaggcaaaaaggcaacacucaagcaaaau

SEQ ID NO: 307283 - RNA, 32 nt, Human
acuuaggcuucugcccuuugagacucacauga

SEQ ID NO: 307284 - RNA, 32 nt, Human
acuuagggaaguggaagagaaagggaauuuug

SEQ ID NO: 307285 - RNA, 32 nt, Human
acuuagggaagugggaaucuuauuugcggaac

SEQ ID NO: 307286 - RNA, 32 nt, Human
acuuagggaggcagaguggaggaagugagagg

SEQ ID NO: 307287 - RNA, 21 nt, Human
acuuagggaguauguaaaaua

SEQ ID NO: 307288 - RNA, 32 nt, Human
acuuagggcagaggaaugcaaaguccugccca

SEQ ID NO: 307289 - RNA, 32 nt, Human
acuuagggcgugagccaccgcgcccagcuucu

SEQ ID NO: 307290 - RNA, 31 nt, Human
acuuaggggucaaaccugugguguguggaag

SEQ ID NO: 307291 - RNA, 32 nt, Human
acuuaggugaagcagcaucugggugugagagu

SEQ ID NO: 307292 - RNA, 32 nt, Human
acuuaggugccuggcuggcccagggcuugcuc

SEQ ID NO: 307293 - RNA, 32 nt, Human
acuuaguaaagcauuagaagagcccagaggcu

SEQ ID NO: 307294 - RNA, 32 nt, Human
acuuaguaaauuugaagugcagcucuguuagc

SEQ ID NO: 307295 - RNA, 32 nt, Human
acuuaguaauucccaucaggaaaugcugaccu

SEQ ID NO: 307296 - RNA, 32 nt, Human
acuuaguagcugugugaaaauuaauauuucug

SEQ ID NO: 307297 - RNA, 31 nt, Human
acuuagucaauaaaaccuugaaauaaagaug

SEQ ID NO: 307298 - RNA, 32 nt, Human
acuuaguccucaagcucccaaccugcuguccc

SEQ ID NO: 307299 - RNA, 32 nt, Human
acuuagucuaacucccccauuuuacagauuuc

SEQ ID NO: 307300 - RNA, 32 nt, Human
acuuagugcaagacuacaggaguuaacagaug

SEQ ID NO: 307301 - RNA, 32 nt, Human
acuuagugcaucagauguaacagaacaaauua

SEQ ID NO: 307302 - RNA, 32 nt, Human
acuuagugcuuccagguaguuauaguacucca

SEQ ID NO: 307303 - RNA, 32 nt, Human
acuuaguggguugacaaaauuuuaaaauauca

SEQ ID NO: 307304 - RNA, 32 nt, Human
acuuagugguaacuaugguugcagagaaagag

SEQ ID NO: 307305 - RNA, 32 nt, Human
acuuaguguuaauaaggaucuacugaggcuag

SEQ ID NO: 307306 - RNA, 32 nt, Human
acuuaguuauucacugugaccuaaauuuaguc

SEQ ID NO: 307307 - RNA, 32 nt, Human
acuuaguuuugcauaguucuagugcagcugaa

SEQ ID NO: 307308 - RNA, 32 nt, Human
acuuauaaggagcuuagaaaaugcagguuaca

SEQ ID NO: 307309 - RNA, 32 nt, Human
acuuauagaaaaggagaaaauaauuaaacagu

SEQ ID NO: 307310 - RNA, 32 nt, Human
acuuauagacaguaucccuuguccucaagauu

SEQ ID NO: 307311 - RNA, 32 nt, Human
acuuauagacucaacuauguaucuguaguuuu

SEQ ID NO: 307312 - RNA, 32 nt, Human
acuuauagcuuauguugcaccugcucucaggu

SEQ ID NO: 307313 - RNA, 32 nt, Human
acuuaucaccacccuccucuuuucugccugga

SEQ ID NO: 307314 - RNA, 32 nt, Human
acuuaucacugcaccucuugccaaagugcggu

SEQ ID NO: 307315 - RNA, 32 nt, Human
acuuaucagaugcucauugcuuucuaagaucu

SEQ ID NO: 307316 - RNA, 32 nt, Human
acuuaucauagaacaaauauguaucauuaugg

SEQ ID NO: 307317 - RNA, 32 nt, Human
acuuaucauggaguugauaacaagaagaauaa

SEQ ID NO: 307318 - RNA, 32 nt, Human
acuuaucauguggugaaggccgccucaggggu

SEQ ID NO: 307319 - RNA, 32 nt, Human
acuuauccccuuguccccaugugucauuggag

SEQ ID NO: 307320 - RNA, 32 nt, Human
acuuaucccugguuaagaaugcuguuucaaug

SEQ ID NO: 307321 - RNA, 32 nt, Human
acuuaucccuuuuucucuuaagaaagcaggua

SEQ ID NO: 307322 - RNA, 32 nt, Human
acuuaucuagaaggggagaaacucccuccacu

SEQ ID NO: 307323 - RNA, 32 nt, Human
acuuaucuccuugcugggcagcuccccuuggc

SEQ ID NO: 307324 - RNA, 32 nt, Human
acuuaucugaagguuacaaauuagacuuuuaa

SEQ ID NO: 307325 - RNA, 32 nt, Human
acuuaucuggugcauucuccccaccccacccc

SEQ ID NO: 307326 - RNA, 29 nt, Human
acuuaugaaauucaaguuacaugugaauu

SEQ ID NO: 307327 - RNA, 32 nt, Human
acuuaugccucacuccccuccucccgcuccaa

SEQ ID NO: 307328 - RNA, 29 nt, Human
acuuauggauuuugacaagaaaggaggga

SEQ ID NO: 307329 - RNA, 32 nt, Human
acuuauggggaaauaguuaauuguuaaagaaa

SEQ ID NO: 307330 - RNA, 32 nt, Human
acuuauguauuuaugaauccaugaccaaauua

SEQ ID NO: 307331 - RNA, 32 nt, Human
acuuaugugagugaccccauccauccaugacc

SEQ ID NO: 307332 - RNA, 32 nt, Human
acuuaugugcugcuagucucuacucgaaguuc

SEQ ID NO: 307333 - RNA, 32 nt, Human
acuuauguggagacacauacuuaaguguguuc

SEQ ID NO: 307334 - RNA, 32 nt, Human
acuuauuauccacagugcaacagugguuaccc

SEQ ID NO: 307335 - RNA, 32 nt, Human
acuuauuauguauuagguucuuugccagaugu

SEQ ID NO: 307336 - RNA, 32 nt, Human
acuuauucugaguuaaauauuaauacuuuaaa

SEQ ID NO: 307337 - RNA, 32 nt, Human
acuuauucuugcugagaaugcauaaccagaau

SEQ ID NO: 307338 - RNA, 32 nt, Human
acuuauugaaugaaugcuuugccuaaaguuug

SEQ ID NO: 307339 - RNA, 32 nt, Human
acuuauugauccuuucuccucaccuucagaau

SEQ ID NO: 307340 - RNA, 32 nt, Human
acuuauugcacuccagcccgggcgacagagcg

SEQ ID NO: 307341 - RNA, 32 nt, Human
acuuauugcauacugccucagagccauguguc

SEQ ID NO: 307342 - RNA, 32 nt, Human
acuuauuucagaggcuuauuguuuucucugua

SEQ ID NO: 307343 - RNA, 32 nt, Human
acuuauuucucauucucuuuccuuccugaaca

SEQ ID NO: 307344 - RNA, 32 nt, Human
acuuauuucucuaucaauccaguuuucaaaac

SEQ ID NO: 307345 - RNA, 32 nt, Human
acuuauuugcauccaagaguuugcauugagac

SEQ ID NO: 307346 - RNA, 32 nt, Human
acuuauuuuacaaccuaguaauaauguggaua

SEQ ID NO: 307347 - RNA, 32 nt, Human
acuuauuuuccuuacugguagacugucguuuu

SEQ ID NO: 307348 - RNA, 16 nt, Human
acuuauuuugcucccu

SEQ ID NO: 307349 - RNA, 16 nt, Human
acuucaaaacacagua

SEQ ID NO: 307350 - RNA, 21 nt, Human
acuucaaaagccaaaaagagg

SEQ ID NO: 307351 - RNA, 22 nt, Human
acuucaaacacugaucacggga

SEQ ID NO: 307352 - RNA, 24 nt, Human
acuucaaacuccgccucccggguu

SEQ ID NO: 307353 - RNA, 32 nt, Human
acuucaaagacggauggguugagcuggcagcc

SEQ ID NO: 307354 - RNA, 31 nt, Human
acuucaaagagaccaugguuccguuggaggc

SEQ ID NO: 307355 - RNA, 32 nt, Human
acuucaaagaggaaccaggaggacaagaggag

SEQ ID NO: 307356 - RNA, 32 nt, Human
acuucaaagcuggguuagagaugaggcaccuu

SEQ ID NO: 307357 - RNA, 32 nt, Human
acuucaaagugaagccagcaaagugauaauac

SEQ ID NO: 307358 - RNA, 32 nt, Human
acuucaaagugccugggcucagccugguuucu

SEQ ID NO: 307359 - RNA, 32 nt, Human
acuucaacaguuuuuacacaaggaaucucaaa

SEQ ID NO: 307360 - RNA, 32 nt, Human
acuucaaccauccugcaggucaaaacccacug

SEQ ID NO: 307361 - RNA, 32 nt, Human
acuucaaccaugagcuucaccgucugucucuu

SEQ ID NO: 307362 - RNA, 32 nt, Human
acuucaacccaggaggcagaggcuacagugag

SEQ ID NO: 307363 - RNA, 32 nt, Human
acuucaaccugggagguugaggcugcagugag

SEQ ID NO: 307364 - RNA, 32 nt, Human
acuucaacggaaacaaauacacucaagggaag

SEQ ID NO: 307365 - RNA, 32 nt, Human
acuucaacuaaagacuauaaacaacaaaaauc

SEQ ID NO: 307366 - RNA, 32 nt, Human
acuucaagaccauccuggacuguggccacccg

SEQ ID NO: 307367 - RNA, 32 nt, Human
acuucaagagagaaagagagagugggcagaca

SEQ ID NO: 307368 - RNA, 32 nt, Human
acuucaagagccuguggucaggaaaucagguc

SEQ ID NO: 307369 - RNA, 32 nt, Human
acuucaagccgguaacugcacacaacaggccu

SEQ ID NO: 307370 - RNA, 32 nt, Human
acuucaagcuguuauuucuucccugcuuugca

SEQ ID NO: 307371 - RNA, 32 nt, Human
acuucaaggccugggccccucugggcuucagu

SEQ ID NO: 307372 - RNA, 32 nt, Human
acuucaagggcagccuuuggggguugggguuu

SEQ ID NO: 307373 - RNA, 24 nt, Human
acuucaagugauccacccgccuca

SEQ ID NO: 307374 - RNA, 32 nt, Human
acuucaaugauuuuauuuccagcaucaaacua

SEQ ID NO: 307375 - RNA, 32 nt, Human
acuucaauggaaauuauuacaagcagauuaau

SEQ ID NO: 307376 - RNA, 19 nt, Human
acuucaauguuuucacuga

SEQ ID NO: 307377 - RNA, 32 nt, Human
acuucaauuaaagacuauaaacaacaaaaauc

SEQ ID NO: 307378 - RNA, 32 nt, Human
acuucaauuugccugacauuuauuaaaugcau

SEQ ID NO: 307379 - RNA, 32 nt, Human
acuucaauuuucuuuagcuuuuaccaacccaa

SEQ ID NO: 307380 - RNA, 32 nt, Human
acuucacaauuaccuuuucuagugcaguuaua

SEQ ID NO: 307381 - RNA, 32 nt, Human
acuucacacagucccuggcauuuagucaucug

SEQ ID NO: 307382 - RNA, 32 nt, Human
acuucacacgugauucuucaagccacacccac

SEQ ID NO: 307383 - RNA, 32 nt, Human
acuucacagacauggucuagaaucuguacccu

SEQ ID NO: 307384 - RNA, 32 nt, Human
acuucacagcaggccagcugcagugacuuguc

SEQ ID NO: 307385 - RNA, 32 nt, Human
acuucacagcaugucagggaaaaucacuguca

SEQ ID NO: 307386 - RNA, 32 nt, Human
acuucacaggcacuccacugcuuggcaggaau

SEQ ID NO: 307387 - RNA, 32 nt, Human
acuucacaggcagcagcuagcgaggcggucuc

SEQ ID NO: 307388 - RNA, 32 nt, Human
acuucacaguucagaagaaauaacuuaagcag

SEQ ID NO: 307389 - RNA, 32 nt, Human
acuucaccagcuguuauuuuugcuuuuacuuu

SEQ ID NO: 307390 - RNA, 32 nt, Human
acuucacccaggaggagugggccuuguugaau

SEQ ID NO: 307391 - RNA, 32 nt, Human
acuucacccaggaggagugggcuuugcugggu

SEQ ID NO: 307392 - RNA, 32 nt, Human
acuucacccaggaggaguggggucaacuagac

SEQ ID NO: 307393 - RNA, 32 nt, Human
acuucacccaggcggaaugggauggccugucc

SEQ ID NO: 307394 - RNA, 32 nt, Human
acuucacccuggcggaguccaaggccuccagc

SEQ ID NO: 307395 - RNA, 32 nt, Human
acuucaccuaucauuggucuuuccuagcuaua

SEQ ID NO: 307396 - RNA, 32 nt, Human
acuucaccuccaggaacugucauggaugucca

SEQ ID NO: 307397 - RNA, 32 nt, Human
acuucaccucugagccuccgaugcucugugaa

SEQ ID NO: 307398 - RNA, 32 nt, Human
acuucaccugcucuccaacagcuggaacgguc

SEQ ID NO: 307399 - RNA, 32 nt, Human
acuucacuaaucaucacauaaauucaaaugca

SEQ ID NO: 307400 - RNA, 32 nt, Human
acuucacuaugauaugaggcagucucugagcu

SEQ ID NO: 307401 - RNA, 32 nt, Human
acuucacuccagccugggcaacagagugagac

SEQ ID NO: 307402 - RNA, 32 nt, Human
acuucacuccagccugggugacggagugagac

SEQ ID NO: 307403 - RNA, 32 nt, Human
acuucacucugccuuuucauccaggccaguga

SEQ ID NO: 307404 - RNA, 32 nt, Human
acuucacugagguuugugaggacuggagaucg

SEQ ID NO: 307405 - RNA, 32 nt, Human
acuucacugcacuccagucugggugacagagc

SEQ ID NO: 307406 - RNA, 32 nt, Human
acuucacugggucuuuuuccagccuucaguuc

SEQ ID NO: 307407 - RNA, 32 nt, Human
acuucacuuauuucagggucuccaauugagaa

SEQ ID NO: 307408 - RNA, 32 nt, Human
acuucacuugauaguuuuuaagcaauuagaau

SEQ ID NO: 307409 - RNA, 32 nt, Human
acuucagacagaaaccaauaccagcuuccuuu

SEQ ID NO: 307410 - RNA, 19 nt, Human
acuucagaccgccuugcag

SEQ ID NO: 307411 - RNA, 32 nt, Human
acuucagacgcugaaacugcugccuuucagga

SEQ ID NO: 307412 - RNA, 32 nt, Human
acuucagacuuccuguccugcugguaucaugg

SEQ ID NO: 307413 - RNA, 32 nt, Human
acuucagagacaggguuucaccauguuggcca

SEQ ID NO: 307414 - RNA, 32 nt, Human
acuucagagauggcagcagcaaguuuagcauc

SEQ ID NO: 307415 - RNA, 32 nt, Human
acuucagagccagcaguguggcucaggugcca

SEQ ID NO: 307416 - RNA, 32 nt, Human
acuucagagcccccgccuuugccugcacuccu

SEQ ID NO: 307417 - RNA, 20 nt, Human
acuucagagccccuccgcca

SEQ ID NO: 307418 - RNA, 32 nt, Human
acuucagagcuuugcuaaacuaaccuaauuug

SEQ ID NO: 307419 - RNA, 32 nt, Human
acuucagaggcaggagccuuugggcugagcaa

SEQ ID NO: 307420 - RNA, 32 nt, Human
acuucagaggcugagguggaaggaucacuuga

SEQ ID NO: 307421 - RNA, 32 nt, Human
acuucagauccugucugucagucucuguuagg

SEQ ID NO: 307422 - RNA, 32 nt, Human
acuucagaugaucuacccaccuuggcauccua

SEQ ID NO: 307423 - RNA, 32 nt, Human
acuucagaugcuuucaggagugacacaagaac

SEQ ID NO: 307424 - RNA, 32 nt, Human
acuucagauggaccuaguacccacugagauuu

SEQ ID NO: 307425 - RNA, 32 nt, Human
acuucagaugggcucaguaccugucccagcca

SEQ ID NO: 307426 - RNA, 21 nt, Human
acuucagcaaaugcaagcuga

SEQ ID NO: 307427 - RNA, 22 nt, Human
acuucagcaccugccccggcag

SEQ ID NO: 307428 - RNA, 32 nt, Human
acuucagcagcacugccacugccuuuggccac

SEQ ID NO: 307429 - RNA, 32 nt, Human
acuucagcagccucucaggugccugaaacugu

SEQ ID NO: 307430 - RNA, 21 nt, Human
acuucagcauauuuguucuaa

SEQ ID NO: 307431 - RNA, 32 nt, Human
acuucagccaucgggaggaccagcacggcggg

SEQ ID NO: 307432 - RNA, 32 nt, Human
acuucagcccaggaggucaggucaaggcugca

SEQ ID NO: 307433 - RNA, 32 nt, Human
acuucagcccaggagguggagguugcagugag

SEQ ID NO: 307434 - RNA, 32 nt, Human
acuucagcccaggaguuccagacugccuggcu

SEQ ID NO: 307435 - RNA, 32 nt, Human
acuucagcccaggaguuuaaggcugcagugag

SEQ ID NO: 307436 - RNA, 32 nt, Human
acuucagccccagggaccugggcagcacuguc

SEQ ID NO: 307437 - RNA, 32 nt, Human
acuucagcccgggcaacaagagcgagacuccg

SEQ ID NO: 307438 - RNA, 32 nt, Human
acuucagccuaggacguugaggcugcagugag

SEQ ID NO: 307439 - RNA, 32 nt, Human
acuucagccuccagaacugugagaaauacaua

SEQ ID NO: 307440 - RNA, 32 nt, Human
acuucagccucugagcugucauggacccacuc

SEQ ID NO: 307441 - RNA, 26 nt, Human
acuucagccugggugacagagugaga

SEQ ID NO: 307442 - RNA, 32 nt, Human
acuucagccuuccuuccagucugggcugagug

SEQ ID NO: 307443 - RNA, 32 nt, Human
acuucagcuacggcccaugaugcaucagaaau

SEQ ID NO: 307444 - RNA, 32 nt, Human
acuucagcucauccaaaagcagccagcagacc

SEQ ID NO: 307445 - RNA, 32 nt, Human
acuucagcucauccaguccaucagggacuucc

SEQ ID NO: 307446 - RNA, 32 nt, Human
acuucagcuccaggcugcaguaauguguuggu

SEQ ID NO: 307447 - RNA, 32 nt, Human
acuucagcuccucaaguagaugggacuacagg

SEQ ID NO: 307448 - RNA, 32 nt, Human
acuucagcuucugcuguuaccaaugccucagc

SEQ ID NO: 307449 - RNA, 32 nt, Human
acuucagcuuuggaaaacucagucucuuucau

SEQ ID NO: 307450 - RNA, 32 nt, Human
acuucaggaacagcagauuaaaacagugccuu

SEQ ID NO: 307451 - RNA, 32 nt, Human
acuucaggaagccaccagaggagcagcuuccu

SEQ ID NO: 307452 - RNA, 32 nt, Human
acuucaggaagccuaauauccaaaaaguuagu

SEQ ID NO: 307453 - RNA, 32 nt, Human
acuucaggaauugccccaggaggacaccagau

SEQ ID NO: 307454 - RNA, 21 nt, Human
acuucaggacugccccuuuca

SEQ ID NO: 307455 - RNA, 24 nt, Human
acuucaggagcucuuucccggcag

SEQ ID NO: 307456 - RNA, 32 nt, Human
acuucaggagcugagaggagcaggauggaacu

SEQ ID NO: 307457 - RNA, 19 nt, Human
acuucaggagcuucccagc

SEQ ID NO: 307458 - RNA, 32 nt, Human
acuucaggcaagccacuuuaccucucuggaac

SEQ ID NO: 307459 - RNA, 32 nt, Human
acuucaggcauaugcugugcccuugcaguggc

SEQ ID NO: 307460 - RNA, 32 nt, Human
acuucaggccugccuuuccagcgagaauucuu

SEQ ID NO: 307461 - RNA, 32 nt, Human
acuucaggcggagucccaggagagcagcgcgg

SEQ ID NO: 307462 - RNA, 32 nt, Human
acuucaggcucuggacuggagcucucuggcau

SEQ ID NO: 307463 - RNA, 32 nt, Human
acuucaggcugaaauuccaaacaggccaacaa

SEQ ID NO: 307464 - RNA, 32 nt, Human
acuucagggaaggcuugcucaccucgcucggu

SEQ ID NO: 307465 - RNA, 32 nt, Human
acuucagggucugggucugagcccgugggcaa

SEQ ID NO: 307466 - RNA, 32 nt, Human
acuucagguggcugggugacuaaagggcuugu

SEQ ID NO: 307467 - RNA, 32 nt, Human
acuucaguccugcugcaguugugcagcagagg

SEQ ID NO: 307468 - RNA, 32 nt, Human
acuucaguuagcauggugggggagaaccagua

SEQ ID NO: 307469 - RNA, 25 nt, Human
acuucaguugaaaauuagguucuaa

SEQ ID NO: 307470 - RNA, 32 nt, Human
acuucaguuuccaugaaauaaacaaugacuau

SEQ ID NO: 307471 - RNA, 32 nt, Human
acuucauacccaagagaagcucagggagaucc

SEQ ID NO: 307472 - RNA, 32 nt, Human
acuucauagagggagaggcagacaguugaagg

SEQ ID NO: 307473 - RNA, 32 nt, Human
acuucauagauuuccuucccaucccagcugaa

SEQ ID NO: 307474 - RNA, 32 nt, Human
acuucaucagaacauucauacgggagagaagc

SEQ ID NO: 307475 - RNA, 32 nt, Human
acuucaucagagaguagcuaaagagaauaagu

SEQ ID NO: 307476 - RNA, 32 nt, Human
acuucaucaguguggcuucuaugagcccagau

SEQ ID NO: 307477 - RNA, 32 nt, Human
acuucaucauccaccaccuccuggagggagua

SEQ ID NO: 307478 - RNA, 32 nt, Human
acuucaucauccaccaccuccuggagggggua

SEQ ID NO: 307479 - RNA, 32 nt, Human
acuucauccagccacuuuaaugauugaaaaua

SEQ ID NO: 307480 - RNA, 18 nt, Human
acuucauccggcgacuag

SEQ ID NO: 307481 - RNA, 32 nt, Human
acuucauccugucauuccagccuggggucugc

SEQ ID NO: 307482 - RNA, 32 nt, Human
acuucaucuugcacuguuccccaaacuuugga

SEQ ID NO: 307483 - RNA, 32 nt, Human
acuucaucuuucucccugacucacuugguuuc

SEQ ID NO: 307484 - RNA, 32 nt, Human
acuucaugagcagcuggggucuggaaggcucc

SEQ ID NO: 307485 - RNA, 32 nt, Human
acuucauggacuggcaucaguaugaaugacau

SEQ ID NO: 307486 - RNA, 32 nt, Human
acuucauggcagcacagauauaccucauuuua

SEQ ID NO: 307487 - RNA, 32 nt, Human
acuucauguaguucaggcacagaaagaauagc

SEQ ID NO: 307488 - RNA, 24 nt, Human
acuucaugucaguuuauguucuaa

SEQ ID NO: 307489 - RNA, 32 nt, Human
acuucauuacccaggcuggagugcaaggcacg

SEQ ID NO: 307490 - RNA, 32 nt, Human
acuucauucauagauccucccuuauuuaacau

SEQ ID NO: 307491 - RNA, 32 nt, Human
acuucauuccagcaggaggcacuuaggggaga

SEQ ID NO: 307492 - RNA, 32 nt, Human
acuucauugaaggauggagauuuggaagacau

SEQ ID NO: 307493 - RNA, 22 nt, Human
acuucauuuccugccccuuuca

SEQ ID NO: 307494 - RNA, 32 nt, Human
acuucauuucuagcaauuauuuaccaaguacc

SEQ ID NO: 307495 - RNA, 32 nt, Human
acuucauuuggaaaaagauucagucuuuuauc

SEQ ID NO: 307496 - RNA, 32 nt, Human
acuucauuuuucuccucucucuuucauuguuu

SEQ ID NO: 307497 - RNA, 32 nt, Human
acuuccaaagugcugggauuacaggugugagc

SEQ ID NO: 307498 - RNA, 32 nt, Human
acuuccaaguagcugggauuacagacaugcca

SEQ ID NO: 307499 - RNA, 32 nt, Human
acuuccaaguuuccaagacuucucauggaggu

SEQ ID NO: 307500 - RNA, 32 nt, Human
acuuccaaucagaagucucacugguggggcug

SEQ ID NO: 307501 - RNA, 32 nt, Human
acuuccacaaggcccacuggaaaaaugagaga

SEQ ID NO: 307502 - RNA, 32 nt, Human
acuuccacaagucucaagccucagugcuaaag

SEQ ID NO: 307503 - RNA, 32 nt, Human
acuuccacacuauuuauuuggggaugggcugg

SEQ ID NO: 307504 - RNA, 32 nt, Human
acuuccacacuuguggaaggguaguguuguuu

SEQ ID NO: 307505 - RNA, 32 nt, Human
acuuccaccaacaaugggaugagacuugacau

SEQ ID NO: 307506 - RNA, 32 nt, Human
acuuccaccaucaaguuaugagugugauuguu

SEQ ID NO: 307507 - RNA, 22 nt, Human
acuuccaccgaugaggcaggua

SEQ ID NO: 307508 - RNA, 32 nt, Human
acuuccaccucccagguucaagcgauucuuau

SEQ ID NO: 307509 - RNA, 32 nt, Human
acuuccaccucccagguucaagugauucuccu

SEQ ID NO: 307510 - RNA, 32 nt, Human
acuuccaccucccggguucaagcgauccugcc

SEQ ID NO: 307511 - RNA, 32 nt, Human
acuuccaccuccuggguucaagcaauucuccu

SEQ ID NO: 307512 - RNA, 32 nt, Human
acuuccaccuccuggguugaagcaauucuucu

SEQ ID NO: 307513 - RNA, 32 nt, Human
acuuccaccuuccaccaugggaugacgcagua

SEQ ID NO: 307514 - RNA, 32 nt, Human
acuuccacguaagaagugccuuuugccuccca

SEQ ID NO: 307515 - RNA, 32 nt, Human
acuuccacuccccucuacucucucuaggacug

SEQ ID NO: 307516 - RNA, 32 nt, Human
acuuccacuucccagguucaagugauucuccu

SEQ ID NO: 307517 - RNA, 32 nt, Human
acuuccacuucccggguucaagcgauucuccu

SEQ ID NO: 307518 - RNA, 32 nt, Human
acuuccagaaaugacuuuagacugccuuucac

SEQ ID NO: 307519 - RNA, 32 nt, Human
acuuccagacagacugcuuuuccccagucggu

SEQ ID NO: 307520 - RNA, 32 nt, Human
acuuccagaggaggaauuaaugagcgaccuga

SEQ ID NO: 307521 - RNA, 32 nt, Human
acuuccagauuuauacagucuuccuguggaag

SEQ ID NO: 307522 - RNA, 32 nt, Human
acuuccagcaggcaugcaguccuggcccagcu

SEQ ID NO: 307523 - RNA, 32 nt, Human
acuuccagccagucugcugccugcucccucuu

SEQ ID NO: 307524 - RNA, 32 nt, Human
acuuccagcccaaagaacuuauuuuuauuucg

SEQ ID NO: 307525 - RNA, 32 nt, Human
acuuccagccccggaggcgccggacagagccg

SEQ ID NO: 307526 - RNA, 32 nt, Human
acuuccagcccugucugcugucuacguggugg

SEQ ID NO: 307527 - RNA, 32 nt, Human
acuuccagccuccagccuacuuagugaccagc

SEQ ID NO: 307528 - RNA, 32 nt, Human
acuuccagccucuucuccuuguggcucucuug

SEQ ID NO: 307529 - RNA, 32 nt, Human
acuuccagccugggugacacagugagacccug

SEQ ID NO: 307530 - RNA, 32 nt, Human
acuuccagccugggugacagagugagacccug

SEQ ID NO: 307531 - RNA, 32 nt, Human
acuuccagcuccuggguucgaacgauucuccu

SEQ ID NO: 307532 - RNA, 30 nt, Human
acuuccagcuugcacaaggaaauacuggga

SEQ ID NO: 307533 - RNA, 32 nt, Human
acuuccaggaccaccgcaacagagccauggag

SEQ ID NO: 307534 - RNA, 32 nt, Human
acuuccaggagacagagccaccagcagcaaaa

SEQ ID NO: 307535 - RNA, 32 nt, Human
acuuccaguagggguggccgggcagaggcgcc

SEQ ID NO: 307536 - RNA, 32 nt, Human
acuuccaucaaaagacaccauagcaucacauc

SEQ ID NO: 307537 - RNA, 32 nt, Human
acuuccaucuucugcaggguuagugauacaga

SEQ ID NO: 307538 - RNA, 32 nt, Human
acuuccaucuuggucugaaguccugagcucag

SEQ ID NO: 307539 - RNA, 32 nt, Human
acuuccaugccuuaaaccuaccucccacacuc

SEQ ID NO: 307540 - RNA, 32 nt, Human
acuuccauucaagccaaugucaaguuuucauu

SEQ ID NO: 307541 - RNA, 32 nt, Human
acuucccaagcccuggugaccagaccaaggca

SEQ ID NO: 307542 - RNA, 32 nt, Human
acuucccacaaaccucaacaugugccagucac

SEQ ID NO: 307543 - RNA, 32 nt, Human
acuucccagaucaagaaauggacagcauuauc

SEQ ID NO: 307544 - RNA, 32 nt, Human
acuucccagcagagcggguugcuggagccaag

SEQ ID NO: 307545 - RNA, 21 nt, Human
acuucccagcaguucaguggu

SEQ ID NO: 307546 - RNA, 32 nt, Human
acuucccagcaguucagugguggaauggcagc

SEQ ID NO: 307547 - RNA, 32 nt, Human
acuucccagccccucuggggcagcaucugggu

SEQ ID NO: 307548 - RNA, 21 nt, Human
acuucccagcccuggccucca

SEQ ID NO: 307549 - RNA, 32 nt, Human
acuucccaguuuccuuucaguaaucuuucuga

SEQ ID NO: 307550 - RNA, 32 nt, Human
acuucccauauuucuuuucuuugcccuccuga

SEQ ID NO: 307551 - RNA, 32 nt, Human
acuuccccaaccagggcagaaaugagguggga

SEQ ID NO: 307552 - RNA, 32 nt, Human
acuuccccagauagaaacacugggacaguggu

SEQ ID NO: 307553 - RNA, 32 nt, Human
acuuccccaggaaccccguaccagccuguuga

SEQ ID NO: 307554 - RNA, 32 nt, Human
acuuccccaucuucuccucuauucuggucucc

SEQ ID NO: 307555 - RNA, 32 nt, Human
acuucccccacccuccucucuuggauaugguu

SEQ ID NO: 307556 - RNA, 17 nt, Human
acuuccccccugcuugc

SEQ ID NO: 307557 - RNA, 32 nt, Human
acuucccccuccugcaggggauccggguccau

SEQ ID NO: 307558 - RNA, 32 nt, Human
acuuccccucccaccagcugagaauguaugga

SEQ ID NO: 307559 - RNA, 32 nt, Human
acuuccccuccccaucuucccacuuaauuucu

SEQ ID NO: 307560 - RNA, 32 nt, Human
acuuccccuccccuuuccucuccagcauuagg

SEQ ID NO: 307561 - RNA, 32 nt, Human
acuuccccuccugggucaccucugauggcugc

SEQ ID NO: 307562 - RNA, 32 nt, Human
acuuccccuuccccaauuacuauucccuuuga

SEQ ID NO: 307563 - RNA, 32 nt, Human
acuuccccuuggggcucccugugucagggcac

SEQ ID NO: 307564 - RNA, 32 nt, Human
acuuccccuuguauuugaagucuuccagcaag

SEQ ID NO: 307565 - RNA, 32 nt, Human
acuucccgagaggcucccuucuggccucuccu

SEQ ID NO: 307566 - RNA, 32 nt, Human
acuucccgaguugucugccucuccucaaaugc

SEQ ID NO: 307567 - RNA, 32 nt, Human
acuucccgcuguuccucgccacgcucuggguc

SEQ ID NO: 307568 - RNA, 22 nt, Human
acuucccggccgcgacgcaggg

SEQ ID NO: 307569 - RNA, 32 nt, Human
acuucccuaaauccuacucuggcuucagaaag

SEQ ID NO: 307570 - RNA, 32 nt, Human
acuucccuauccacccacugucaucuccauua

SEQ ID NO: 307571 - RNA, 32 nt, Human
acuucccuccacccccacaccccagccguguc

SEQ ID NO: 307572 - RNA, 32 nt, Human
acuucccuccacuccuauguguaucccaggac

SEQ ID NO: 307573 - RNA, 32 nt, Human
acuucccucccggcuuuuccucccgacuuauc

SEQ ID NO: 307574 - RNA, 32 nt, Human
acuucccucucaaagacuaacccagaagggaa

SEQ ID NO: 307575 - RNA, 32 nt, Human
acuucccucuccugcgcuuccuccuggagucc

SEQ ID NO: 307576 - RNA, 32 nt, Human
acuucccugaggccucuggacccaucugucuu

SEQ ID NO: 307577 - RNA, 32 nt, Human
acuucccugcaacccauccaccccugguuucu

SEQ ID NO: 307578 - RNA, 32 nt, Human
acuucccugcagcugcaggccuggugagacaa

SEQ ID NO: 307579 - RNA, 32 nt, Human
acuucccugccugccaucccucugucucucuc

SEQ ID NO: 307580 - RNA, 32 nt, Human
acuucccuuccauacauuauuugaggcugggc

SEQ ID NO: 307581 - RNA, 32 nt, Human
acuucccuugaacugccuugucuuugucaugg

SEQ ID NO: 307582 - RNA, 32 nt, Human
acuucccuuuucucccacccucuuuuccaagc

SEQ ID NO: 307583 - RNA, 32 nt, Human
acuuccgaacuccagccaccacuuuccugugc

SEQ ID NO: 307584 - RNA, 32 nt, Human
acuuccgacucccagguucaagcgauucuccu

SEQ ID NO: 307585 - RNA, 32 nt, Human
acuuccgagagaaaaggggcagcuggaggcag

SEQ ID NO: 307586 - RNA, 32 nt, Human
acuuccgaguagcugggacuacaggcaugagu

SEQ ID NO: 307587 - RNA, 32 nt, Human
acuuccgaguggcugggauuacaggcgcccgc

SEQ ID NO: 307588 - RNA, 32 nt, Human
acuuccgcaucccagguucaagcgauucuccc

SEQ ID NO: 307589 - RNA, 32 nt, Human
acuuccgccucccggguucaagcgauucuccu

SEQ ID NO: 307590 - RNA, 32 nt, Human
acuuccgccucccgguuucaagcaguucucca

SEQ ID NO: 307591 - RNA, 32 nt, Human
acuuccgccuccuggguucaagcaauucuccu

SEQ ID NO: 307592 - RNA, 32 nt, Human
acuuccgccuccuguguucaagcgauucuccu

SEQ ID NO: 307593 - RNA, 32 nt, Human
acuuccgcuucccagguucaagcaauuuuccu

SEQ ID NO: 307594 - RNA, 32 nt, Human
acuuccggacacacaugcacacacaggugcag

SEQ ID NO: 307595 - RNA, 32 nt, Human
acuuccggcuuauggucuccaggcccuucucc

SEQ ID NO: 307596 - RNA, 32 nt, Human
acuuccgggcccugcguggcaguugaaagagu

SEQ ID NO: 307597 - RNA, 32 nt, Human
acuuccggggccgccacuuucacuuucucuuc

SEQ ID NO: 307598 - RNA, 32 nt, Human
acuuccggguaauccagcacccugaggcuuca

SEQ ID NO: 307599 - RNA, 32 nt, Human
acuuccggguuggccuucuccauguuggucuc

SEQ ID NO: 307600 - RNA, 32 nt, Human
acuuccgugguuuugcugucauuucucuugau

SEQ ID NO: 307601 - RNA, 32 nt, Human
acuuccuaagcacugcccugccccauggggug

SEQ ID NO: 307602 - RNA, 32 nt, Human
acuuccuacagagccaaaaugccauuuagcaa

SEQ ID NO: 307603 - RNA, 32 nt, Human
acuuccuaccucccccuccaucucuagauaag

SEQ ID NO: 307604 - RNA, 32 nt, Human
acuuccuagcuaauacccacacugaguccucu

SEQ ID NO: 307605 - RNA, 32 nt, Human
acuuccuaugugugcauugggguggggcuugg

SEQ ID NO: 307606 - RNA, 32 nt, Human
acuuccucaaagcccaaagccaagggaaggau

SEQ ID NO: 307607 - RNA, 21 nt, Human
acuuccucacuauccucuuca

SEQ ID NO: 307608 - RNA, 32 nt, Human
acuuccucagcccgagggcugcccuuccaaac

SEQ ID NO: 307609 - RNA, 32 nt, Human
acuuccuccagccucaggcagccacggcaaug

SEQ ID NO: 307610 - RNA, 32 nt, Human
acuuccuccccucgcccaucagugccagcccc

SEQ ID NO: 307611 - RNA, 32 nt, Human
acuuccucccugggguaucuccaccucuccaa

SEQ ID NO: 307612 - RNA, 32 nt, Human
acuuccucccuguccuccgugccuccugccuc

SEQ ID NO: 307613 - RNA, 32 nt, Human
acuuccuccuacucucauuggccucuuggugc

SEQ ID NO: 307614 - RNA, 32 nt, Human
acuuccuccuccuccuccucaugaccggggug

SEQ ID NO: 307615 - RNA, 32 nt, Human
acuuccucgucuuccagggaaggaaggaugug

SEQ ID NO: 307616 - RNA, 32 nt, Human
acuuccucuaacuccaguggauuguuggccau

SEQ ID NO: 307617 - RNA, 32 nt, Human
acuuccucucaauguuuucuucauauaucugg

SEQ ID NO: 307618 - RNA, 32 nt, Human
acuuccucuccaggaauccgcggagggagcgc

SEQ ID NO: 307619 - RNA, 32 nt, Human
acuuccucugcauuuccagccugaacagaugu

SEQ ID NO: 307620 - RNA, 32 nt, Human
acuuccucugccugccccuccuccuccuucca

SEQ ID NO: 307621 - RNA, 32 nt, Human
acuuccucugcuggucuggccuggugacucuc

SEQ ID NO: 307622 - RNA, 20 nt, Human
acuuccucugucaagguguu

SEQ ID NO: 307623 - RNA, 32 nt, Human
acuuccucuguggcugcucugccuccucccac

SEQ ID NO: 307624 - RNA, 32 nt, Human
acuuccucuuucucucccuccucccuguuuua

SEQ ID NO: 307625 - RNA, 32 nt, Human
acuuccugaccuugugcagauccugccaguaa

SEQ ID NO: 307626 - RNA, 19 nt, Human
acuuccugagaaggacaga

SEQ ID NO: 307627 - RNA, 32 nt, Human
acuuccugagccagacccagggcuaccugcgg

SEQ ID NO: 307628 - RNA, 32 nt, Human
acuuccugagucugugucacaguguguccuca

SEQ ID NO: 307629 - RNA, 32 nt, Human
acuuccugauaaugugucagaaaccuuaaaca

SEQ ID NO: 307630 - RNA, 32 nt, Human
acuuccugcgccugccuucuccuugaaaccuu

SEQ ID NO: 307631 - RNA, 32 nt, Human
acuuccugcugcacuccugucuugccaugcac

SEQ ID NO: 307632 - RNA, 32 nt, Human
acuuccuggaacugccuuucuuccacuaacag

SEQ ID NO: 307633 - RNA, 32 nt, Human
acuuccuggagcugucuuugcuggaggccgag

SEQ ID NO: 307634 - RNA, 32 nt, Human
acuuccuggcugcuucaccuuugcauagcugg

SEQ ID NO: 307635 - RNA, 24 nt, Human
acuuccugggaggucagagacaaa

SEQ ID NO: 307636 - RNA, 21 nt, Human
acuuccugggaguguuaacaa

SEQ ID NO: 307637 - RNA, 32 nt, Human
acuuccugguaucucuguaucuguaaaaugag

SEQ ID NO: 307638 - RNA, 32 nt, Human
acuuccuggucaccaaggcagugcaugcaugu

SEQ ID NO: 307639 - RNA, 32 nt, Human
acuuccuggugcaagauugcagccaggaggcu

SEQ ID NO: 307640 - RNA, 32 nt, Human
acuuccuggugggauccgagugaggcgacggg

SEQ ID NO: 307641 - RNA, 32 nt, Human
acuuccuguacgucaacucaucuggcuccaag

SEQ ID NO: 307642 - RNA, 20 nt, Human
acuuccugucccuuucaggg

SEQ ID NO: 307643 - RNA, 32 nt, Human
acuuccuguggguucacagcuguggggaccca

SEQ ID NO: 307644 - RNA, 32 nt, Human
acuuccugugugacccuggacaaguacuaccu

SEQ ID NO: 307645 - RNA, 32 nt, Human
acuuccugugugaccuugagccaguugaugaa

SEQ ID NO: 307646 - RNA, 32 nt, Human
acuuccuuagugccauucagcucugggccaga

SEQ ID NO: 307647 - RNA, 32 nt, Human
acuuccuucagggauucucccuaaauuuuagc

SEQ ID NO: 307648 - RNA, 32 nt, Human
acuuccuucccaacaccuccuucccaaacccc

SEQ ID NO: 307649 - RNA, 32 nt, Human
acuuccuucccaucaguucuguguugaguugc

SEQ ID NO: 307650 - RNA, 32 nt, Human
acuuccuucccuccucccaaaaugccuccacu

SEQ ID NO: 307651 - RNA, 32 nt, Human
acuuccuucguggaggaaguggacucgaaucc

SEQ ID NO: 307652 - RNA, 32 nt, Human
acuuccuucucaucuuuuucuccauguuuuau

SEQ ID NO: 307653 - RNA, 32 nt, Human
acuuccuugcccacuguuucuuccuuucugug

SEQ ID NO: 307654 - RNA, 32 nt, Human
acuuccuuggggucuuucucuagggucucuuc

SEQ ID NO: 307655 - RNA, 32 nt, Human
acuuccuuuauuucuuuauuccuuccuuuucc

SEQ ID NO: 307656 - RNA, 32 nt, Human
acuuccuuugcccuuuuucccuuuucuccaug

SEQ ID NO: 307657 - RNA, 32 nt, Human
acuuccuuuucuaccaccacacuacugccccc

SEQ ID NO: 307658 - RNA, 32 nt, Human
acuuccuuuuuaaaaugcuuuccucuucuugu

SEQ ID NO: 307659 - RNA, 32 nt, Human
acuuccuuuuuccgcaguugugauggguuuug

SEQ ID NO: 307660 - RNA, 32 nt, Human
acuucgaaugugcacauugaccccugacaccu

SEQ ID NO: 307661 - RNA, 32 nt, Human
acuucgagggccuccgaccugcacggcccuac

SEQ ID NO: 307662 - RNA, 32 nt, Human
acuucgaggggcuuuaccaggaauggugacug

SEQ ID NO: 307663 - RNA, 32 nt, Human
acuucgcacacacccauguaaccacugcacuu

SEQ ID NO: 307664 - RNA, 32 nt, Human
acuucgccacucucucuucuccuuccuaaccc

SEQ ID NO: 307665 - RNA, 32 nt, Human
acuucgccuccccucacuggucuccccuguga

SEQ ID NO: 307666 - RNA, 32 nt, Human
acuucgccuuuccuucuccggcugccaagcag

SEQ ID NO: 307667 - RNA, 32 nt, Human
acuucgccuuucucucggccuuagcgccauuu

SEQ ID NO: 307668 - RNA, 32 nt, Human
acuucggacucuuccagguucacugaggggcc

SEQ ID NO: 307669 - RNA, 32 nt, Human
acuucggacucuuccagguucacugggggccc

SEQ ID NO: 307670 - RNA, 32 nt, Human
acuucggauccuucuaacccuaccacccaacu

SEQ ID NO: 307671 - RNA, 32 nt, Human
acuucggauucagugggugaagacagaacucu

SEQ ID NO: 307672 - RNA, 32 nt, Human
acuucggcaggcguguguuacaguggagucag

SEQ ID NO: 307673 - RNA, 32 nt, Human
acuucggcguugggugaaagaaaauggcccga

SEQ ID NO: 307674 - RNA, 32 nt, Human
acuucggcuccucuaaccugugccacagguga

SEQ ID NO: 307675 - RNA, 23 nt, Human
acuucggcuucucggccggucgg

SEQ ID NO: 307676 - RNA, 32 nt, Human
acuucggggacugaggugggaggaucacuuga

SEQ ID NO: 307677 - RNA, 32 nt, Human
acuucggggcugggaagucguccuuacuccug

SEQ ID NO: 307678 - RNA, 24 nt, Human
acuucggggucuccaccccaggcc

SEQ ID NO: 307679 - RNA, 32 nt, Human
acuucgguuuggacuguggucgugcugaggca

SEQ ID NO: 307680 - RNA, 32 nt, Human
acuucgugucugcugagagcaaccagaccuuc

SEQ ID NO: 307681 - RNA, 32 nt, Human
acuucguuaggcagagagaggaagggauuccu

SEQ ID NO: 307682 - RNA, 32 nt, Human
acuucuaaaaggcauuagccaggcaauggaga

SEQ ID NO: 307683 - RNA, 32 nt, Human
acuucuaagaccugcacaggaggcagaagccc

SEQ ID NO: 307684 - RNA, 32 nt, Human
acuucuaagagugcugcuacagcagcguaguc

SEQ ID NO: 307685 - RNA, 32 nt, Human
acuucuaagaguuuuccuguaaguaauuaaga

SEQ ID NO: 307686 - RNA, 32 nt, Human
acuucuaagcucuucuucuuccuucauuggcc

SEQ ID NO: 307687 - RNA, 32 nt, Human
acuucuaaggacgccauucagagcagagcauu

SEQ ID NO: 307688 - RNA, 19 nt, Human
acuucuacaagaagaaauc

SEQ ID NO: 307689 - RNA, 32 nt, Human
acuucuacaagaaguacaacucagggagagcu

SEQ ID NO: 307690 - RNA, 32 nt, Human
acuucuacagaagcagguugcagugagccgag

SEQ ID NO: 307691 - RNA, 32 nt, Human
acuucuacagcuugaugccuccugcuuuuaua

SEQ ID NO: 307692 - RNA, 32 nt, Human
acuucuacauauaguggaaaucugccaauacu

SEQ ID NO: 307693 - RNA, 32 nt, Human
acuucuaccaccuagguucaagcgauucuugu

SEQ ID NO: 307694 - RNA, 32 nt, Human
acuucuacuacaagugagaugguaguguuuga

SEQ ID NO: 307695 - RNA, 32 nt, Human
acuucuacuucugcccuugccaacggagagcg

SEQ ID NO: 307696 - RNA, 32 nt, Human
acuucuagauagaaugaaugaaaacaacacaa

SEQ ID NO: 307697 - RNA, 32 nt, Human
acuucuagaugccaaguaaaucacagcaagug

SEQ ID NO: 307698 - RNA, 23 nt, Human
acuucuagccuggguuacagagu

SEQ ID NO: 307699 - RNA, 32 nt, Human
acuucuagcuuggaauagcuuguacacauaua

SEQ ID NO: 307700 - RNA, 32 nt, Human
acuucuaggaggaugcugugccucccaagcuc

SEQ ID NO: 307701 - RNA, 32 nt, Human
acuucuaggagggccaguguuccuaguguggg

SEQ ID NO: 307702 - RNA, 32 nt, Human
acuucuaggaguagugaaagaaaacccugaaa

SEQ ID NO: 307703 - RNA, 32 nt, Human
acuucuauagcccucugugucgguccccagug

SEQ ID NO: 307704 - RNA, 32 nt, Human
acuucucaaacuuggaaaugcaugcgaaucac

SEQ ID NO: 307705 - RNA, 32 nt, Human
acuucucaacaaucuagcaccaugucggacac

SEQ ID NO: 307706 - RNA, 32 nt, Human
acuucucaauaugcuuauuuugcuuugcauaa

SEQ ID NO: 307707 - RNA, 32 nt, Human
acuucucacaugcugcuuaagggagcacaaau

SEQ ID NO: 307708 - RNA, 23 nt, Human
acuucucacuuccuaaguucccu

SEQ ID NO: 307709 - RNA, 32 nt, Human
acuucucagacacuucccccacccucauagaa

SEQ ID NO: 307710 - RNA, 32 nt, Human
acuucucagcgccucuggagcgagucccguug

SEQ ID NO: 307711 - RNA, 32 nt, Human
acuucucagggacuacacuugguaguuuucca

SEQ ID NO: 307712 - RNA, 32 nt, Human
acuucucagguuuuuauuuaauucuuuuaaaa

SEQ ID NO: 307713 - RNA, 32 nt, Human
acuucucaguaggaaggggugaggcagcuguc

SEQ ID NO: 307714 - RNA, 32 nt, Human
acuucuccaacaaguaccugugaacaguacag

SEQ ID NO: 307715 - RNA, 21 nt, Human
acuucuccacugucccguuca

SEQ ID NO: 307716 - RNA, 32 nt, Human
acuucuccagcaacacuccaucagcuuuuuaa

SEQ ID NO: 307717 - RNA, 32 nt, Human
acuucuccaguggauugaggcagugcucccuc

SEQ ID NO: 307718 - RNA, 32 nt, Human
acuucuccauaauuauuguuguaauauuauua

SEQ ID NO: 307719 - RNA, 19 nt, Human
acuucuccauaguccugcu

SEQ ID NO: 307720 - RNA, 32 nt, Human
acuucucccacuguccucucccacccaagcuc

SEQ ID NO: 307721 - RNA, 32 nt, Human
acuucuccccacucacacuccccaccaaauaa

SEQ ID NO: 307722 - RNA, 32 nt, Human
acuucucccccaaaaccagagccaccugccag

SEQ ID NO: 307723 - RNA, 32 nt, Human
acuucucccgcggcccagaauccacuugaccc

SEQ ID NO: 307724 - RNA, 32 nt, Human
acuucuccucacgugugcccugguuuuauggg

SEQ ID NO: 307725 - RNA, 32 nt, Human
acuucuccuccuccuuucuccagccagcccug

SEQ ID NO: 307726 - RNA, 22 nt, Human
acuucucuauggaauccuuaga

SEQ ID NO: 307727 - RNA, 32 nt, Human
acuucucucauuuugccacauuuacuuuagua

SEQ ID NO: 307728 - RNA, 32 nt, Human
acuucucucucccaucaccuugcccucauugu

SEQ ID NO: 307729 - RNA, 32 nt, Human
acuucucucucccugcucuugcccagggagca

SEQ ID NO: 307730 - RNA, 32 nt, Human
acuucucucucccuucuucucucucugacaca

SEQ ID NO: 307731 - RNA, 32 nt, Human
acuucucugcaagccugacuccugaaacugug

SEQ ID NO: 307732 - RNA, 32 nt, Human
acuucucugcaagccugacuccugagacugug

SEQ ID NO: 307733 - RNA, 32 nt, Human
acuucucugccugguuuuguguguucuguuau

SEQ ID NO: 307734 - RNA, 21 nt, Human
acuucucugcugacucucaga

SEQ ID NO: 307735 - RNA, 32 nt, Human
acuucucugcugucagucuuuguuucucccag

SEQ ID NO: 307736 - RNA, 32 nt, Human
acuucucugcuuccuccacguccuaacgauuc

SEQ ID NO: 307737 - RNA, 32 nt, Human
acuucucuggaccacaguccucugccagaccc

SEQ ID NO: 307738 - RNA, 32 nt, Human
acuucucugggguuugccuuguggaaccaagu

SEQ ID NO: 307739 - RNA, 32 nt, Human
acuucucuguaaucucagcuucucaggaggcu

SEQ ID NO: 307740 - RNA, 18 nt, Human
acuucucuguaauuuccu

SEQ ID NO: 307741 - RNA, 32 nt, Human
acuucucugucuguccaaagguuuuugagagu

SEQ ID NO: 307742 - RNA, 32 nt, Human
acuucucuucauaaagucauugugcuuccucu

SEQ ID NO: 307743 - RNA, 32 nt, Human
acuucucuugaacaaggaacucacucagagac

SEQ ID NO: 307744 - RNA, 32 nt, Human
acuucucuuucaaagauggacuggggaaagac

SEQ ID NO: 307745 - RNA, 32 nt, Human
acuucugaacaucaguauguucgaggguacua

SEQ ID NO: 307746 - RNA, 32 nt, Human
acuucugaacugccuucgucuucaguuauaug

SEQ ID NO: 307747 - RNA, 32 nt, Human
acuucugaacuuuggcccugagcuccauucuu

SEQ ID NO: 307748 - RNA, 32 nt, Human
acuucugaaggaagauggaaugaccaaacugg

SEQ ID NO: 307749 - RNA, 32 nt, Human
acuucugaagugaauguggauacagcgccacu

SEQ ID NO: 307750 - RNA, 32 nt, Human
acuucugacuccaaguccagaguucuuuacua

SEQ ID NO: 307751 - RNA, 32 nt, Human
acuucugacucugccagcaucuuugaccucug

SEQ ID NO: 307752 - RNA, 32 nt, Human
acuucugagguacgguaucucucuccagccac

SEQ ID NO: 307753 - RNA, 32 nt, Human
acuucugagguauuuucaugaucccaccaugg

SEQ ID NO: 307754 - RNA, 21 nt, Human
acuucugauggagaagcagug

SEQ ID NO: 307755 - RNA, 32 nt, Human
acuucugcacaggcuccuuccugcuuuguagg

SEQ ID NO: 307756 - RNA, 32 nt, Human
acuucugcagaguuugccccagaauucagagu

SEQ ID NO: 307757 - RNA, 31 nt, Human
acuucugcauuuaaggaggucugggagaagg

SEQ ID NO: 307758 - RNA, 32 nt, Human
acuucugcauuuuccuucucucaaguuaaauu

SEQ ID NO: 307759 - RNA, 32 nt, Human
acuucugccacccagguucaagcaauucuccu

SEQ ID NO: 307760 - RNA, 32 nt, Human
acuucugccauauucuguuggccagugugaca

SEQ ID NO: 307761 - RNA, 32 nt, Human
acuucugcccuuucccuuccuccuccucuucu

SEQ ID NO: 307762 - RNA, 32 nt, Human
acuucugccuccuggguucaagcgauuccccu

SEQ ID NO: 307763 - RNA, 32 nt, Human
acuucugccuccuggguucaagcgauucuccu

SEQ ID NO: 307764 - RNA, 32 nt, Human
acuucugccuuccagguucaagcgauucuccu

SEQ ID NO: 307765 - RNA, 32 nt, Human
acuucugcucacaacugcccagucccagccag

SEQ ID NO: 307766 - RNA, 32 nt, Human
acuucugcucaucaaauugcugugauagugaa

SEQ ID NO: 307767 - RNA, 32 nt, Human
acuucugcucccaguaacccaucguuagggca

SEQ ID NO: 307768 - RNA, 32 nt, Human
acuucugcugcugcuaugccucuuggaugcac

SEQ ID NO: 307769 - RNA, 32 nt, Human
acuucugcuuguguuggagugcagagggugca

SEQ ID NO: 307770 - RNA, 32 nt, Human
acuucugcuuucuaaccccaguuccuuaaaua

SEQ ID NO: 307771 - RNA, 32 nt, Human
acuucugcuuugcacuauguucacuuuggggu

SEQ ID NO: 307772 - RNA, 32 nt, Human
acuucuggaagggagaguggauuuggcugggc

SEQ ID NO: 307773 - RNA, 19 nt, Human
acuucuggaggugcugggg

SEQ ID NO: 307774 - RNA, 32 nt, Human
acuucuggccacacugacucagucccaguaac

SEQ ID NO: 307775 - RNA, 32 nt, Human
acuucuggccucaagugauccaccuaccuagu

SEQ ID NO: 307776 - RNA, 32 nt, Human
acuucuggccuuuccuagcuagagaaggaguu

SEQ ID NO: 307777 - RNA, 32 nt, Human
acuucugggacccccuuuccuccacagagccc

SEQ ID NO: 307778 - RNA, 32 nt, Human
acuucugggcuucaguuuucucaucuguaaaa

SEQ ID NO: 307779 - RNA, 32 nt, Human
acuucuggggaaggaaaacaggcuccuggccu

SEQ ID NO: 307780 - RNA, 32 nt, Human
acuucugggggugaggugggaggaucacguga

SEQ ID NO: 307781 - RNA, 32 nt, Human
acuucuggucccagcauuuccuccuuuggccu

SEQ ID NO: 307782 - RNA, 32 nt, Human
acuucuggucucaagcaaucugcccgccucgg

SEQ ID NO: 307783 - RNA, 32 nt, Human
acuucuggugcuggaacauuguucuuuuucug

SEQ ID NO: 307784 - RNA, 32 nt, Human
acuucugguucuguagaaagagcuaggggagg

SEQ ID NO: 307785 - RNA, 32 nt, Human
acuucugguuggggcucucuuuacuuacugcu

SEQ ID NO: 307786 - RNA, 32 nt, Human
acuucuguauuagcugggcagccuuggguucu

SEQ ID NO: 307787 - RNA, 19 nt, Human
acuucugugacuucauuga

SEQ ID NO: 307788 - RNA, 32 nt, Human
acuucugugaguuuagaccugccccucccacc

SEQ ID NO: 307789 - RNA, 32 nt, Human
acuucugugcugcugcuucuccuccaucuugc

SEQ ID NO: 307790 - RNA, 32 nt, Human
acuucugugcugcuugcagucauagcuuuccu

SEQ ID NO: 307791 - RNA, 32 nt, Human
acuucuguucagauuagccugaucuaguauug

SEQ ID NO: 307792 - RNA, 32 nt, Human
acuucuguugcccuugugcuccagucauugca

SEQ ID NO: 307793 - RNA, 32 nt, Human
acuucuuagaggcauucaguuagcaaagaggu

SEQ ID NO: 307794 - RNA, 32 nt, Human
acuucuuaucaccuggauucagagagucuggg

SEQ ID NO: 307795 - RNA, 32 nt, Human
acuucuuaucaucugcauauuuauguccuuuu

SEQ ID NO: 307796 - RNA, 32 nt, Human
acuucuuauucaaagcaucaauaauuaaaaga

SEQ ID NO: 307797 - RNA, 32 nt, Human
acuucuucaccgugucuguucuugucacaccu

SEQ ID NO: 307798 - RNA, 32 nt, Human
acuucuucauggggaauuguagacccuaagua

SEQ ID NO: 307799 - RNA, 32 nt, Human
acuucuuccagcccugcugggccacaguucua

SEQ ID NO: 307800 - RNA, 32 nt, Human
acuucuucccagagagaggaagcucugcucag

SEQ ID NO: 307801 - RNA, 32 nt, Human
acuucuucccuaccugcaucaugugcauguag

SEQ ID NO: 307802 - RNA, 32 nt, Human
acuucuucccugcaugcucccucccagugacu

SEQ ID NO: 307803 - RNA, 32 nt, Human
acuucuucccuuaaguuaaaguguuagagaag

SEQ ID NO: 307804 - RNA, 32 nt, Human
acuucuuccuccuccuccuucccugacucaca

SEQ ID NO: 307805 - RNA, 20 nt, Human
acuucuuccugcgcuguggc

SEQ ID NO: 307806 - RNA, 32 nt, Human
acuucuuccuucauugcagccccucuucuuuu

SEQ ID NO: 307807 - RNA, 32 nt, Human
acuucuuccuucucucuuucucuuuacucaug

SEQ ID NO: 307808 - RNA, 32 nt, Human
acuucuuccuuuccuaccccuuuucucuuuua

SEQ ID NO: 307809 - RNA, 32 nt, Human
acuucuucuaacucccauugacauugcuucuu

SEQ ID NO: 307810 - RNA, 32 nt, Human
acuucuucuucaaugcgcuccugcugcugcuc

SEQ ID NO: 307811 - RNA, 32 nt, Human
acuucuugcccaggcuggaguacaauggugcg

SEQ ID NO: 307812 - RNA, 32 nt, Human
acuucuugcugaaugguacucagaugugcauu

SEQ ID NO: 307813 - RNA, 32 nt, Human
acuucuuggaggaggugguggcugggcugcag

SEQ ID NO: 307814 - RNA, 32 nt, Human
acuucuuguuaggauucagggaaggaacaguu

SEQ ID NO: 307815 - RNA, 32 nt, Human
acuucuuuacuacacugcacuggauugcuaua

SEQ ID NO: 307816 - RNA, 22 nt, Human
acuucuuuaucuuuuccuuucu

SEQ ID NO: 307817 - RNA, 32 nt, Human
acuucuuuccaugggcguguucuaagcagccu

SEQ ID NO: 307818 - RNA, 18 nt, Human
acuucuuuccugcugcug

SEQ ID NO: 307819 - RNA, 32 nt, Human
acuucuuuccuggcccccuccuuggucaggcu

SEQ ID NO: 307820 - RNA, 32 nt, Human
acuucuuugccuuuuaaaguguugccuuuauc

SEQ ID NO: 307821 - RNA, 32 nt, Human
acuucuuugggcagaugcuaggucaguuguuu

SEQ ID NO: 307822 - RNA, 32 nt, Human
acuucuuuguaagaacaccaaccaaccaaggu

SEQ ID NO: 307823 - RNA, 32 nt, Human
acuucuuuguaauccaguugcuguuaagaaug

SEQ ID NO: 307824 - RNA, 32 nt, Human
acuucuuuuauugccagaaaugcaaggaacug

SEQ ID NO: 307825 - RNA, 18 nt, Human
acuucuuuuccaaaaaua

SEQ ID NO: 307826 - RNA, 32 nt, Human
acuugaaaaauacuuuuccuuaccuuuacccc

SEQ ID NO: 307827 - RNA, 32 nt, Human
acuugaaacgggaggcggagguugcagugagc

SEQ ID NO: 307828 - RNA, 32 nt, Human
acuugaaaucaucggucucaucucaagucacu

SEQ ID NO: 307829 - RNA, 32 nt, Human
acuugaacauuagagggaaagacugaaagaga

SEQ ID NO: 307830 - RNA, 32 nt, Human
acuugaacauuuccuuucuaucaaucccaggu

SEQ ID NO: 307831 - RNA, 32 nt, Human
acuugaaccaaggagguggagguugcagugag

SEQ ID NO: 307832 - RNA, 32 nt, Human
acuugaacccaagaggcagaguuugcagugag

SEQ ID NO: 307833 - RNA, 32 nt, Human
acuugaacccagaagacagguugcagugagcc

SEQ ID NO: 307834 - RNA, 32 nt, Human
acuugaacccaggaagcgggguugcagugagc

SEQ ID NO: 307835 - RNA, 32 nt, Human
acuugaacccaggagacggagguugcggugag

SEQ ID NO: 307836 - RNA, 32 nt, Human
acuugaacccaggagacggugguugcagugag

SEQ ID NO: 307837 - RNA, 32 nt, Human
acuugaacccaggagaggaagguugcaguaag

SEQ ID NO: 307838 - RNA, 32 nt, Human
acuugaacccaggaggcagagguugcagucag

SEQ ID NO: 307839 - RNA, 32 nt, Human
acuugaacccaggaggcagagguugcagugag

SEQ ID NO: 307840 - RNA, 32 nt, Human
acuugaacccaggaggcagagguugcaguggg

SEQ ID NO: 307841 - RNA, 32 nt, Human
acuugaacccaggaggcagagguugcggugag

SEQ ID NO: 307842 - RNA, 32 nt, Human
acuugaacccaggaggcagcuguugcagugag

SEQ ID NO: 307843 - RNA, 32 nt, Human
acuugaacccaggaggcagugguugcaaugag

SEQ ID NO: 307844 - RNA, 32 nt, Human
acuugaacccaggaggcggaaguugcagugag

SEQ ID NO: 307845 - RNA, 32 nt, Human
acuugaacccaggaggcggagguugcagugaa

SEQ ID NO: 307846 - RNA, 32 nt, Human
acuugaacccaggaggcggagguugcagugag

SEQ ID NO: 307847 - RNA, 32 nt, Human
acuugaacccaggaggcggagguugcggugag

SEQ ID NO: 307848 - RNA, 32 nt, Human
acuugaacccaggagguagaggcugcagugag

SEQ ID NO: 307849 - RNA, 32 nt, Human
acuugaacccaggagguagagguugcagugag

SEQ ID NO: 307850 - RNA, 32 nt, Human
acuugaacccaggagguggagauugcagugag

SEQ ID NO: 307851 - RNA, 32 nt, Human
acuugaacccaggagguggaggcugcggugag

SEQ ID NO: 307852 - RNA, 32 nt, Human
acuugaacccaggagguggagguuacagugag

SEQ ID NO: 307853 - RNA, 32 nt, Human
acuugaacccaggagguggagguugcagcaag

SEQ ID NO: 307854 - RNA, 32 nt, Human
acuugaacccaggagguggagguugcagugag

SEQ ID NO: 307855 - RNA, 32 nt, Human
acuugaacccaggagguggagguuguagugag

SEQ ID NO: 307856 - RNA, 32 nt, Human
acuugaacccaggagguggagguuguggugag

SEQ ID NO: 307857 - RNA, 32 nt, Human
acuugaacccaggagguggugguugcagugag

SEQ ID NO: 307858 - RNA, 32 nt, Human
acuugaacccaggagguguugcagugaaccaa

SEQ ID NO: 307859 - RNA, 32 nt, Human
acuugaacccaggagguugaggcugcagugag

SEQ ID NO: 307860 - RNA, 32 nt, Human
acuugaacccaggaguucaaaucugcagugcg

SEQ ID NO: 307861 - RNA, 32 nt, Human
acuugaacccggaagcgaagguugcagugagc

SEQ ID NO: 307862 - RNA, 32 nt, Human
acuugaacccggaggcggagguugcgguaagc

SEQ ID NO: 307863 - RNA, 32 nt, Human
acuugaacccgggaggcggaggcugcagugag

SEQ ID NO: 307864 - RNA, 32 nt, Human
acuugaacccgggagguggaggcugcagugag

SEQ ID NO: 307865 - RNA, 32 nt, Human
acuugaaccgggaagugggaggacguagagca

SEQ ID NO: 307866 - RNA, 32 nt, Human
acuugaaccggggaguuggagguugcagugag

SEQ ID NO: 307867 - RNA, 32 nt, Human
acuugaaccuaggaggucgaggcugcagugag

SEQ ID NO: 307868 - RNA, 32 nt, Human
acuugaaccuggagacagagguugcagugagc

SEQ ID NO: 307869 - RNA, 32 nt, Human
acuugaaccuggaggcagagguugcagugagu

SEQ ID NO: 307870 - RNA, 32 nt, Human
acuugaaccugggaggcggaggcugcagugag

SEQ ID NO: 307871 - RNA, 32 nt, Human
acuugaacuaggaggcagagguugcagugagc

SEQ ID NO: 307872 - RNA, 32 nt, Human
acuugaacucaggagguggagguugcagugag

SEQ ID NO: 307873 - RNA, 32 nt, Human
acuugaacucuguucccccacccuccaugcuc

SEQ ID NO: 307874 - RNA, 32 nt, Human
acuugaacuucugaugcuuuuauugcccaguu

SEQ ID NO: 307875 - RNA, 32 nt, Human
acuugaagcagaggacacucagacaagcugca

SEQ ID NO: 307876 - RNA, 32 nt, Human
acuugaagcuaggaguuugagguuugaagaug

SEQ ID NO: 307877 - RNA, 32 nt, Human
acuugaaggcaccuccagcauuggcccagcag

SEQ ID NO: 307878 - RNA, 32 nt, Human
acuugaaggcagcacagaggugagggauuaaa

SEQ ID NO: 307879 - RNA, 32 nt, Human
acuugaaggcaguuugaaagacuuguuuuaca

SEQ ID NO: 307880 - RNA, 32 nt, Human
acuugaaguccaggcagaauucuaaugcaaua

SEQ ID NO: 307881 - RNA, 32 nt, Human
acuugaauauucuaaauaaaacugacauuuac

SEQ ID NO: 307882 - RNA, 32 nt, Human
acuugaaucaugcgaaaggggagcuguuggaa

SEQ ID NO: 307883 - RNA, 32 nt, Human
acuugaaucugagagauggaggcugcagugag

SEQ ID NO: 307884 - RNA, 32 nt, Human
acuugaauguacaaagauacuugaugcacuua

SEQ ID NO: 307885 - RNA, 32 nt, Human
acuugaauuacaccacccuagugugaaaucgg

SEQ ID NO: 307886 - RNA, 32 nt, Human
acuugaauucaggagguggagguugcagugag

SEQ ID NO: 307887 - RNA, 32 nt, Human
acuugacacagcacccgacucccaguuucuca

SEQ ID NO: 307888 - RNA, 32 nt, Human
acuugacacauacucuagcaauucauuggaac

SEQ ID NO: 307889 - RNA, 32 nt, Human
acuugacaccaccaccuuccuccaggggaaag

SEQ ID NO: 307890 - RNA, 32 nt, Human
acuugacagguuguguugaugcucuuaguuga

SEQ ID NO: 307891 - RNA, 32 nt, Human
acuugacaugaaaugucagcugugcuggggca

SEQ ID NO: 307892 - RNA, 32 nt, Human
acuugacauuuugauucuccagccugggcaac

SEQ ID NO: 307893 - RNA, 32 nt, Human
acuugaccacugccacaccagcccugggguca

SEQ ID NO: 307894 - RNA, 32 nt, Human
acuugaccauuuucucucuccuuuugcuuaga

SEQ ID NO: 307895 - RNA, 32 nt, Human
acuugacccaggagguggaggucgcagugagc

SEQ ID NO: 307896 - RNA, 32 nt, Human
acuugacccaggaguucaagaccagccuggcc

SEQ ID NO: 307897 - RNA, 20 nt, Human
acuugaccccaggcugaaca

SEQ ID NO: 307898 - RNA, 32 nt, Human
acuugacgucauguggacagugcacgugccuu

SEQ ID NO: 307899 - RNA, 32 nt, Human
acuugacucccacucuugccacuccuagcucc

SEQ ID NO: 307900 - RNA, 32 nt, Human
acuugacucugccucccuggccagccuugcaa

SEQ ID NO: 307901 - RNA, 32 nt, Human
acuugacuguguuugugaaaacugagcauuaa

SEQ ID NO: 307902 - RNA, 32 nt, Human
acuugacuuccucgggcucuucaggagacuga

SEQ ID NO: 307903 - RNA, 32 nt, Human
acuugacuuuggugaaugugcauuacuuccuu

SEQ ID NO: 307904 - RNA, 22 nt, Human
acuugagaaaauaaacuuaugu

SEQ ID NO: 307905 - RNA, 32 nt, Human
acuugagaaauguuucuguuugaagaaaauag

SEQ ID NO: 307906 - RNA, 32 nt, Human
acuugagaaauuccuuuguucuguuauacaaa

SEQ ID NO: 307907 - RNA, 32 nt, Human
acuugagaagucaggauaagaccccuuggaua

SEQ ID NO: 307908 - RNA, 32 nt, Human
acuugagaccaggaaguugaggcugcaaugag

SEQ ID NO: 307909 - RNA, 32 nt, Human
acuugagaggcugaagcagaagaaucucuuga

SEQ ID NO: 307910 - RNA, 32 nt, Human
acuugagaggcugagacacgagaaucacuuga

SEQ ID NO: 307911 - RNA, 32 nt, Human
acuugagaggcugagauaggagaaucacugga

SEQ ID NO: 307912 - RNA, 32 nt, Human
acuugagaggcugagccaggaggaucgcuuga

SEQ ID NO: 307913 - RNA, 32 nt, Human
acuugagaggcugaggcaggaggaucccuuga

SEQ ID NO: 307914 - RNA, 32 nt, Human
acuugagaggcugaggcaggaggauugcuuga

SEQ ID NO: 307915 - RNA, 32 nt, Human
acuugagaggcugaggccggaggauugcuuaa

SEQ ID NO: 307916 - RNA, 32 nt, Human
acuugagaggcugaggcuggaggaucacuuga

SEQ ID NO: 307917 - RNA, 32 nt, Human
acuugagaggcugaggugggaggauugcuuga

SEQ ID NO: 307918 - RNA, 32 nt, Human
acuugagcaaacuuggaccugggaugaggaug

SEQ ID NO: 307919 - RNA, 32 nt, Human
acuugagcacaggaguuggaggauacagugag

SEQ ID NO: 307920 - RNA, 32 nt, Human
acuugagcacaggaguuugaggcugcagugac

SEQ ID NO: 307921 - RNA, 32 nt, Human
acuugagcaguggagagacgucuuuccuaaaa

SEQ ID NO: 307922 - RNA, 32 nt, Human
acuugagccaccaccagucagaggugcaaguu

SEQ ID NO: 307923 - RNA, 32 nt, Human
acuugagccagcugugggauguugcugcagga

SEQ ID NO: 307924 - RNA, 32 nt, Human
acuugagccaggaggaggagguugcagugagc

SEQ ID NO: 307925 - RNA, 32 nt, Human
acuugagcccagaagcucaaggcugcagugag

SEQ ID NO: 307926 - RNA, 32 nt, Human
acuugagcccagaaggucgaggcugcagggag

SEQ ID NO: 307927 - RNA, 32 nt, Human
acuugagcccagaaguucaaggcugcaaugag

SEQ ID NO: 307928 - RNA, 32 nt, Human
acuugagcccaggaagcggagguuacagugag

SEQ ID NO: 307929 - RNA, 32 nt, Human
acuugagcccaggaagucaaggcugcagugag

SEQ ID NO: 307930 - RNA, 32 nt, Human
acuugagcccaggaaguggagguugcagugag

SEQ ID NO: 307931 - RNA, 32 nt, Human
acuugagcccaggaaguugaggcugcagugag

SEQ ID NO: 307932 - RNA, 32 nt, Human
acuugagcccaggaauucaagacuagccugca

SEQ ID NO: 307933 - RNA, 32 nt, Human
acuugagcccaggaauuggaggcugcagugag

SEQ ID NO: 307934 - RNA, 32 nt, Human
acuugagcccaggagauuaagacuguaguaua

SEQ ID NO: 307935 - RNA, 32 nt, Human
acuugagcccaggagauugaggcugcagugag

SEQ ID NO: 307936 - RNA, 32 nt, Human
acuugagcccaggaggaggaggcugcagugag

SEQ ID NO: 307937 - RNA, 32 nt, Human
acuugagcccaggaggccaagguugcaguggg

SEQ ID NO: 307938 - RNA, 32 nt, Human
acuugagcccaggaggcggaggcugcagugag

SEQ ID NO: 307939 - RNA, 32 nt, Human
acuugagcccaggaggucaaggcugcagugag

SEQ ID NO: 307940 - RNA, 32 nt, Human
acuugagcccaggaggucgaggcugcagugag

SEQ ID NO: 307941 - RNA, 32 nt, Human
acuugagcccaggaggucgaggcugcagugug

SEQ ID NO: 307942 - RNA, 32 nt, Human
acuugagcccaggaggucgagguugcagugag

SEQ ID NO: 307943 - RNA, 32 nt, Human
acuugagcccaggaggucuaggcugcagugag

SEQ ID NO: 307944 - RNA, 32 nt, Human
acuugagcccaggagguggaggcugcaaugag

SEQ ID NO: 307945 - RNA, 32 nt, Human
acuugagcccaggagguggagguugcagugag

SEQ ID NO: 307946 - RNA, 32 nt, Human
acuugagcccaggagguggagguuucagcgag

SEQ ID NO: 307947 - RNA, 32 nt, Human
acuugagcccaggagguugaggcugcagugag

SEQ ID NO: 307948 - RNA, 32 nt, Human
acuugagcccaggagucugaggcuucagugag

SEQ ID NO: 307949 - RNA, 32 nt, Human
acuugagcccaggaguuaagaggcugcaguga

SEQ ID NO: 307950 - RNA, 32 nt, Human
acuugagcccaggaguucaaggccagccuggg

SEQ ID NO: 307951 - RNA, 32 nt, Human
acuugagcccaggaguucaaggcuucagugag

SEQ ID NO: 307952 - RNA, 32 nt, Human
acuugagcccaggaguucaggacuagccuggg

SEQ ID NO: 307953 - RNA, 32 nt, Human
acuugagcccaggaguucgagguuacagugaa

SEQ ID NO: 307954 - RNA, 32 nt, Human
acuugagcccaggaguucugggcuguagugca

SEQ ID NO: 307955 - RNA, 32 nt, Human
acuugagcccaggaguuggagaccugccuggg

SEQ ID NO: 307956 - RNA, 32 nt, Human
acuugagcccaggaguuggaggccacagugag

SEQ ID NO: 307957 - RNA, 32 nt, Human
acuugagcccaggaguuggaggccagccuggg

SEQ ID NO: 307958 - RNA, 32 nt, Human
acuugagcccaggaguuggaggccgcagugag

SEQ ID NO: 307959 - RNA, 32 nt, Human
acuugagcccaggaguuugaggccagccuggg

SEQ ID NO: 307960 - RNA, 32 nt, Human
acuugagcccaggaguuugaggcugcagugaa

SEQ ID NO: 307961 - RNA, 32 nt, Human
acuugagcccaggaguuugaggcugcagugag

SEQ ID NO: 307962 - RNA, 32 nt, Human
acuugagcccaggaguuugaggcugcggugag

SEQ ID NO: 307963 - RNA, 32 nt, Human
acuugagcccaggaguuugagguugcagugag

SEQ ID NO: 307964 - RNA, 32 nt, Human
acuugagcccaggcguucgagacuggcauggg

SEQ ID NO: 307965 - RNA, 32 nt, Human
acuugagcccagggaggcagagguugcuguaa

SEQ ID NO: 307966 - RNA, 32 nt, Human
acuugagcccagggguucacagcugcagugag

SEQ ID NO: 307967 - RNA, 32 nt, Human
acuugagccccagaggucaaggcugcagugag

SEQ ID NO: 307968 - RNA, 32 nt, Human
acuugagccccagggguggaggcugcaaugaa

SEQ ID NO: 307969 - RNA, 32 nt, Human
acuugagcccgggagguugaggcugcaguggg

SEQ ID NO: 307970 - RNA, 32 nt, Human
acuugagcccuggagaucgaggcugcaguaag

SEQ ID NO: 307971 - RNA, 32 nt, Human
acuugagccggcugccccgcccacggugcccg

SEQ ID NO: 307972 - RNA, 32 nt, Human
acuugagccuaagagaucaaggcugcagugag

SEQ ID NO: 307973 - RNA, 32 nt, Human
acuugagccuauuaguuggaggcugcaguaag

SEQ ID NO: 307974 - RNA, 32 nt, Human
acuugagccuccauuucuggcuucuagucugg

SEQ ID NO: 307975 - RNA, 32 nt, Human
acuugagccuggaaaagguugcagugagcugg

SEQ ID NO: 307976 - RNA, 32 nt, Human
acuugagccugggaggucaaggcugcaguaag

SEQ ID NO: 307977 - RNA, 32 nt, Human
acuugagccugggaggucaaggcugcagugag

SEQ ID NO: 307978 - RNA, 32 nt, Human
acuugagccugggagguugugguugcagugag

SEQ ID NO: 307979 - RNA, 32 nt, Human
acuugagccugggaugucaaggcugcagugag

SEQ ID NO: 307980 - RNA, 32 nt, Human
acuugagccugggggacugaggcugcagugag

SEQ ID NO: 307981 - RNA, 32 nt, Human
acuugagcggcacagagauuugggggagugaa

SEQ ID NO: 307982 - RNA, 32 nt, Human
acuugagcuacacuaaaccacaugacaguguu

SEQ ID NO: 307983 - RNA, 32 nt, Human
acuugagcuugucaguccacugaguuuccuuc

SEQ ID NO: 307984 - RNA, 21 nt, Human
acuugagcuuuugugauucaa

SEQ ID NO: 307985 - RNA, 32 nt, Human
acuugaggacaguucauauagcaucuggacag

SEQ ID NO: 307986 - RNA, 32 nt, Human
acuugaggagcagagguggcagcagaggauuc

SEQ ID NO: 307987 - RNA, 32 nt, Human
acuugaggccaggaguuuaaggcuagccuggg

SEQ ID NO: 307988 - RNA, 32 nt, Human
acuugaggccaggaguuugaggcugcagugag

SEQ ID NO: 307989 - RNA, 32 nt, Human
acuugaggccuagccuuggaggcugcagugca

SEQ ID NO: 307990 - RNA, 32 nt, Human
acuugaggcuuuuacgcagccucuagucucug

SEQ ID NO: 307991 - RNA, 32 nt, Human
acuugagggaaagaugaauaaaggaauugugc

SEQ ID NO: 307992 - RNA, 32 nt, Human
acuugaggggaaaugguguccugcuggaggga

SEQ ID NO: 307993 - RNA, 32 nt, Human
acuugaggguggcagagaaaaauguguuaaaa

SEQ ID NO: 307994 - RNA, 32 nt, Human
acuugaggucaggaguucaauguggacaacac

SEQ ID NO: 307995 - RNA, 32 nt, Human
acuugaggucaggaguuugagaccagugugca

SEQ ID NO: 307996 - RNA, 32 nt, Human
acuugagguuagaguucugcaagugagaagac

SEQ ID NO: 307997 - RNA, 32 nt, Human
acuugagucaaauccuggauacugccaaagga

SEQ ID NO: 307998 - RNA, 32 nt, Human
acuugaguccaggaggcggaggcugcagugag

SEQ ID NO: 307999 - RNA, 32 nt, Human
acuugaguccaggaguccgagaccagccuggg

SEQ ID NO: 308000 - RNA, 32 nt, Human
acuugagucugaggccccaggcccuaggauuc

SEQ ID NO: 308001 - RNA, 32 nt, Human
acuugagucugauuucagucaucuucagggac

SEQ ID NO: 308002 - RNA, 32 nt, Human
acuugagugaagaugagaauagauccuaugug

SEQ ID NO: 308003 - RNA, 30 nt, Human
acuugaguggucucugagcuccugucauua

SEQ ID NO: 308004 - RNA, 32 nt, Human
acuugaguguaugcaggauuucauuaucugcc

SEQ ID NO: 308005 - RNA, 32 nt, Human
acuugauaaaggacagcucugauggggaccac

SEQ ID NO: 308006 - RNA, 32 nt, Human
acuugauacaauagaagcugacuuuuaaggca

SEQ ID NO: 308007 - RNA, 32 nt, Human
acuugaucacccaggcuagagugcaguggcgu

SEQ ID NO: 308008 - RNA, 32 nt, Human
acuugaucagggacuaacaccaucgccuccca

SEQ ID NO: 308009 - RNA, 32 nt, Human
acuugaucaguucgcuguucugucuuuuggau

SEQ ID NO: 308010 - RNA, 32 nt, Human
acuugaucccaggaggcggagguugcagugag

SEQ ID NO: 308011 - RNA, 31 nt, Human
acuugaucccucucuggccugggucacauuu

SEQ ID NO: 308012 - RNA, 32 nt, Human
acuugaucuggagagcucuggggagccauaga

SEQ ID NO: 308013 - RNA, 32 nt, Human
acuugaucuuacaguauguauguauguaugua

SEQ ID NO: 308014 - RNA, 32 nt, Human
acuugaucuugcuauguuguccaggcugcucu

SEQ ID NO: 308015 - RNA, 32 nt, Human
acuugaugaauaaucuagaugaucagaaaugu

SEQ ID NO: 308016 - RNA, 32 nt, Human
acuugaugacaccucccggaaugcucucgggg

SEQ ID NO: 308017 - RNA, 32 nt, Human
acuugaugacagacacuucuaaaugaagugca

SEQ ID NO: 308018 - RNA, 32 nt, Human
acuugauuaggucaggcccacccaggauaacc

SEQ ID NO: 308019 - RNA, 32 nt, Human
acuugauuccauucucuccaucccuuccaucc

SEQ ID NO: 308020 - RNA, 32 nt, Human
acuugauuccuguuagaaacaggagugguaga

SEQ ID NO: 308021 - RNA, 32 nt, Human
acuugauuggaaaauguuaggauggaccaagg

SEQ ID NO: 308022 - RNA, 32 nt, Human
acuugauuguagauggagucucggucuuucac

SEQ ID NO: 308023 - RNA, 32 nt, Human
acuugauugugccauuuagagggaacucuugg

SEQ ID NO: 308024 - RNA, 32 nt, Human
acuugauuuacacuuccuagucuacauuacau

SEQ ID NO: 308025 - RNA, 23 nt, Human
acuugauuuauuuuccuuuaaaa

SEQ ID NO: 308026 - RNA, 32 nt, Human
acuugauuuuaacugauuccucuccugacccu

SEQ ID NO: 308027 - RNA, 32 nt, Human
acuugcaacaaaaacaaaaauugacagguggg

SEQ ID NO: 308028 - RNA, 32 nt, Human
acuugcaagguggagguuacagugagcugaaa

SEQ ID NO: 308029 - RNA, 23 nt, Human
acuugcaaugaaaaugccccuca

SEQ ID NO: 308030 - RNA, 22 nt, Human
acuugcaauuuuuauucuuaaa

SEQ ID NO: 308031 - RNA, 32 nt, Human
acuugcacaaaggaagucuguucuugguauug

SEQ ID NO: 308032 - RNA, 32 nt, Human
acuugcacaauguugagaaugaguaccacucu

SEQ ID NO: 308033 - RNA, 32 nt, Human
acuugcacacacaagugaguuaacauuucaaa

SEQ ID NO: 308034 - RNA, 20 nt, Human
acuugcacccaacccucuca

SEQ ID NO: 308035 - RNA, 32 nt, Human
acuugcaccuauaaucccagcacuuugggagg

SEQ ID NO: 308036 - RNA, 32 nt, Human
acuugcaccucuccaccuuuggcacuagaacu

SEQ ID NO: 308037 - RNA, 21 nt, Human
acuugcacuguucacccuuca

SEQ ID NO: 308038 - RNA, 32 nt, Human
acuugcagaggacuugcuauuugccaggugcu

SEQ ID NO: 308039 - RNA, 21 nt, Human
acuugcagaggagcccagugg

SEQ ID NO: 308040 - RNA, 32 nt, Human
acuugcagauuuaggcaaaaagagugguagaa

SEQ ID NO: 308041 - RNA, 23 nt, Human
acuugcagcaggugaggaaggaa

SEQ ID NO: 308042 - RNA, 24 nt, Human
acuugcagccaacucucaaggcaa

SEQ ID NO: 308043 - RNA, 32 nt, Human
acuugcagccugaagcggagagcacaggggga

SEQ ID NO: 308044 - RNA, 32 nt, Human
acuugcagcgagacggcagcacagaccccugg

SEQ ID NO: 308045 - RNA, 32 nt, Human
acuugcagcuagaauugagggaagagagagac

SEQ ID NO: 308046 - RNA, 32 nt, Human
acuugcaggcugugggaggcaagugcccuuaa

SEQ ID NO: 308047 - RNA, 22 nt, Human
acuugcagggcauuugugcaga

SEQ ID NO: 308048 - RNA, 32 nt, Human
acuugcagggccugggaugagcagucuucaag

SEQ ID NO: 308049 - RNA, 32 nt, Human
acuugcaguucugccaucaccuccacuguacc

SEQ ID NO: 308050 - RNA, 32 nt, Human
acuugcauacacaccaacacacauaugcacac

SEQ ID NO: 308051 - RNA, 22 nt, Human
acuugcaugucuaaccccuuca

SEQ ID NO: 308052 - RNA, 32 nt, Human
acuugcauuggaagcuucagcaaccagcauuc

SEQ ID NO: 308053 - RNA, 32 nt, Human
acuugcauuucuaacaaguucccaggugaugc

SEQ ID NO: 308054 - RNA, 32 nt, Human
acuugccaccucagugcccgagcauccucugg

SEQ ID NO: 308055 - RNA, 32 nt, Human
acuugccagacagcuccugaagaggcuuucau

SEQ ID NO: 308056 - RNA, 32 nt, Human
acuugccaggguggaggaggagcauuguccag

SEQ ID NO: 308057 - RNA, 32 nt, Human
acuugccaugagcucugugaaugagaugguuc

SEQ ID NO: 308058 - RNA, 32 nt, Human
acuugccaugugagagucguguuccugacagg

SEQ ID NO: 308059 - RNA, 20 nt, Human
acuugccauugcccccucca

SEQ ID NO: 308060 - RNA, 32 nt, Human
acuugcccaauacugagaagcaacuugcauua

SEQ ID NO: 308061 - RNA, 32 nt, Human
acuugcccacaucuucucaucuugauagaaag

SEQ ID NO: 308062 - RNA, 32 nt, Human
acuugcccaccagaccaagggcagugccccaa

SEQ ID NO: 308063 - RNA, 32 nt, Human
acuugcccaggccaaagaagagaacgugggcu

SEQ ID NO: 308064 - RNA, 32 nt, Human
acuugcccagggcagagguuuuugaagugagc

SEQ ID NO: 308065 - RNA, 32 nt, Human
acuugccccucagaauaguacugucaagggaa

SEQ ID NO: 308066 - RNA, 32 nt, Human
acuugccccuggcugcugucgaucucuccacg

SEQ ID NO: 308067 - RNA, 32 nt, Human
acuugcccuccaguggaccuuugcaggcccgg

SEQ ID NO: 308068 - RNA, 32 nt, Human
acuugcccugcucuccagugauucuguagcuc

SEQ ID NO: 308069 - RNA, 32 nt, Human
acuugccgcggacugccugggcuuagccagcg

SEQ ID NO: 308070 - RNA, 32 nt, Human
acuugccucacacccaggagcugccccugcug

SEQ ID NO: 308071 - RNA, 32 nt, Human
acuugccucauagcuggugaaggauucuucug

SEQ ID NO: 308072 - RNA, 32 nt, Human
acuugccuccgccauggucacucggcagcccu

SEQ ID NO: 308073 - RNA, 32 nt, Human
acuugccucgaagaccaaauaauugcuagucu

SEQ ID NO: 308074 - RNA, 32 nt, Human
acuugccucgggcuaaucccucccucuuccuc

SEQ ID NO: 308075 - RNA, 32 nt, Human
acuugccucuucugugagcacuguggcuuuug

SEQ ID NO: 308076 - RNA, 32 nt, Human
acuugccugaggagcuggaggaaggggaagcc

SEQ ID NO: 308077 - RNA, 32 nt, Human
acuugccugccucugcuugcugcugucccugc

SEQ ID NO: 308078 - RNA, 32 nt, Human
acuugccuguagucucagcuacuuaggaggcu

SEQ ID NO: 308079 - RNA, 31 nt, Human
acuugccuuacuugcaucccugugucuguau

SEQ ID NO: 308080 - RNA, 32 nt, Human
acuugccuucuuggagccucacugucuucauc

SEQ ID NO: 308081 - RNA, 32 nt, Human
acuugccuugacuugcaacuugccuugaacau

SEQ ID NO: 308082 - RNA, 32 nt, Human
acuugccuugccugauaaccagccagcaggcu

SEQ ID NO: 308083 - RNA, 32 nt, Human
acuugcgaaggcaugagacuuggaacccuggc

SEQ ID NO: 308084 - RNA, 32 nt, Human
acuugcgacccuccucucaggcugcuucugac

SEQ ID NO: 308085 - RNA, 32 nt, Human
acuugcgcagccgccugcagcgcggcccguga

SEQ ID NO: 308086 - RNA, 32 nt, Human
acuugcgccucccggguucaagcgauucucca

SEQ ID NO: 308087 - RNA, 32 nt, Human
acuugcgcugucacucagccuggacgcgcuuc

SEQ ID NO: 308088 - RNA, 32 nt, Human
acuugcggggcagaggagggcgugggcguguc

SEQ ID NO: 308089 - RNA, 32 nt, Human
acuugcgguuaauuaugcaaaugauaguuugu

SEQ ID NO: 308090 - RNA, 32 nt, Human
acuugcgucaucucguuuccacaguugacguu

SEQ ID NO: 308091 - RNA, 32 nt, Human
acuugcuacccgcuuccuggagcaaacaguug

SEQ ID NO: 308092 - RNA, 19 nt, Human
acuugcuagcgucccuuca

SEQ ID NO: 308093 - RNA, 32 nt, Human
acuugcucagggacuggccccuggcucuucug

SEQ ID NO: 308094 - RNA, 32 nt, Human
acuugcuccagaaauagcuucaaaaccaucca

SEQ ID NO: 308095 - RNA, 32 nt, Human
acuugcucgagaaccaaagugcauuuggguga

SEQ ID NO: 308096 - RNA, 32 nt, Human
acuugcucuccugguagcggcugcugacugug

SEQ ID NO: 308097 - RNA, 31 nt, Human
acuugcucucuaagagagguugggaccaggc

SEQ ID NO: 308098 - RNA, 32 nt, Human
acuugcucugcagccacucaguagucuucugu

SEQ ID NO: 308099 - RNA, 32 nt, Human
acuugcucuguugcccaggcggaacuugaacu

SEQ ID NO: 308100 - RNA, 32 nt, Human
acuugcugagucugacagccucugggcccggc

SEQ ID NO: 308101 - RNA, 32 nt, Human
acuugcugcaguugcaacuaugcacuuguaua

SEQ ID NO: 308102 - RNA, 32 nt, Human
acuugcugcgugacccuccaaguagaccugug

SEQ ID NO: 308103 - RNA, 32 nt, Human
acuugcugcugucauauaaucauuccauacuu

SEQ ID NO: 308104 - RNA, 32 nt, Human
acuugcugcuucugcacuucauauccauauuu

SEQ ID NO: 308105 - RNA, 32 nt, Human
acuugcugggauuacaggugugagccaccaug

SEQ ID NO: 308106 - RNA, 32 nt, Human
acuugcuggggguggagggugggacacaugag

SEQ ID NO: 308107 - RNA, 32 nt, Human
acuugcuguacuuuuucuuuucuuuuaggggu

SEQ ID NO: 308108 - RNA, 32 nt, Human
acuugcugucuucugcaaaccugccccuucug

SEQ ID NO: 308109 - RNA, 32 nt, Human
acuugcugugugacccugggcaagucacuuaa

SEQ ID NO: 308110 - RNA, 32 nt, Human
acuugcugugugaccucaggccagugugccga

SEQ ID NO: 308111 - RNA, 32 nt, Human
acuugcugugugaccuuaagcaaguuacuuaa

SEQ ID NO: 308112 - RNA, 32 nt, Human
acuugcugugugaccuuaggaagucucugccc

SEQ ID NO: 308113 - RNA, 32 nt, Human
acuugcugugugaccuugggcaaguuccuuuc

SEQ ID NO: 308114 - RNA, 32 nt, Human
acuugcugugugaccuugggcauguggcuuuc

SEQ ID NO: 308115 - RNA, 32 nt, Human
acuugcuguuuccagccgcugaaucugcugag

SEQ ID NO: 308116 - RNA, 32 nt, Human
acuugcuucauuucuuuuucauuugacuuaca

SEQ ID NO: 308117 - RNA, 32 nt, Human
acuugcuuccugcaugguagggagagacacaa

SEQ ID NO: 308118 - RNA, 32 nt, Human
acuugcuucucccaccucugagauuaggacag

SEQ ID NO: 308119 - RNA, 32 nt, Human
acuugcuucugccucauccugccuuagugugc

SEQ ID NO: 308120 - RNA, 32 nt, Human
acuugcuuguauagccuuuugacccuucuuga

SEQ ID NO: 308121 - RNA, 32 nt, Human
acuugcuuugaauucauguuagcaauaaauga

SEQ ID NO: 308122 - RNA, 32 nt, Human
acuugcuuuucccauucucacuuuuagaauua

SEQ ID NO: 308123 - RNA, 32 nt, Human
acuuggaaaagaacaccagcugcggugguagc

SEQ ID NO: 308124 - RNA, 32 nt, Human
acuuggaaacugccuuuuccauucacuuacag

SEQ ID NO: 308125 - RNA, 32 nt, Human
acuuggaagaggaggaggaggaggagaaggag

SEQ ID NO: 308126 - RNA, 32 nt, Human
acuuggaagaugcauuuaaauuacucagcuga

SEQ ID NO: 308127 - RNA, 32 nt, Human
acuuggaaggcugaggugagaggaucacucga

SEQ ID NO: 308128 - RNA, 32 nt, Human
acuuggacagaccugggcuaggaggcacauuc

SEQ ID NO: 308129 - RNA, 32 nt, Human
acuuggacagcccaggccauggcaggaagaau

SEQ ID NO: 308130 - RNA, 32 nt, Human
acuuggaccaggguggcugugaagggaagucu

SEQ ID NO: 308131 - RNA, 20 nt, Human
acuuggacuaaaugcacuaa

SEQ ID NO: 308132 - RNA, 32 nt, Human
acuuggagaagggagcgcgccuggccgccgcu

SEQ ID NO: 308133 - RNA, 32 nt, Human
acuuggagcugcauuuaugagcacuguagaca

SEQ ID NO: 308134 - RNA, 32 nt, Human
acuuggaggcccuggcucaggagcucauagau

SEQ ID NO: 308135 - RNA, 32 nt, Human
acuuggagggcagaggugggaggauggcuuga

SEQ ID NO: 308136 - RNA, 32 nt, Human
acuuggagggcccaggugucucuccaccagcc

SEQ ID NO: 308137 - RNA, 32 nt, Human
acuuggagggggacuuggaaggugagaaagau

SEQ ID NO: 308138 - RNA, 32 nt, Human
acuuggagggucugggggcagcuguccugaac

SEQ ID NO: 308139 - RNA, 32 nt, Human
acuuggaggguuucaagacuucagaggaggaa

SEQ ID NO: 308140 - RNA, 32 nt, Human
acuuggaggugaacagccucuuuugccgguau

SEQ ID NO: 308141 - RNA, 32 nt, Human
acuuggagucagcugauugacaggagggcauc

SEQ ID NO: 308142 - RNA, 32 nt, Human
acuuggagugugaagggcuugagcauacgggg

SEQ ID NO: 308143 - RNA, 32 nt, Human
acuuggaucccaaagcaaggagaucauuugga

SEQ ID NO: 308144 - RNA, 32 nt, Human
acuuggauccugggguagggaggcaggguuag

SEQ ID NO: 308145 - RNA, 32 nt, Human
acuuggaugaaacggugcaggccaggcgggcc

SEQ ID NO: 308146 - RNA, 32 nt, Human
acuuggaugcagcucuugggaccguguucugc

SEQ ID NO: 308147 - RNA, 23 nt, Human
acuuggaugcauucuugcucuca

SEQ ID NO: 308148 - RNA, 32 nt, Human
acuuggaugccauuaaaagcauucccuuuuaa

SEQ ID NO: 308149 - RNA, 32 nt, Human
acuuggauggggaccugaaaaagagaauguug

SEQ ID NO: 308150 - RNA, 32 nt, Human
acuuggcaacagagcaagacccugucccuaaa

SEQ ID NO: 308151 - RNA, 32 nt, Human
acuuggcaaccauauugucaccuguaccuguc

SEQ ID NO: 308152 - RNA, 32 nt, Human
acuuggcagcauuuucagaaacaggaaguuug

SEQ ID NO: 308153 - RNA, 32 nt, Human
acuuggcagccuugaaguuggggucagccucg

SEQ ID NO: 308154 - RNA, 32 nt, Human
acuuggccagccugcaugccuggucaucagga

SEQ ID NO: 308155 - RNA, 32 nt, Human
acuuggccauucccaggaggcuuggagacccc

SEQ ID NO: 308156 - RNA, 32 nt, Human
acuuggccucaagugaaccagcacuucaugag

SEQ ID NO: 308157 - RNA, 19 nt, Human
acuuggccucaccccaccc

SEQ ID NO: 308158 - RNA, 32 nt, Human
acuuggccucacugcuaaugacuccucacacc

SEQ ID NO: 308159 - RNA, 32 nt, Human
acuuggccucacugcuaaugauuccucgcacc

SEQ ID NO: 308160 - RNA, 32 nt, Human
acuuggccuccaccuucucuucacucucaaau

SEQ ID NO: 308161 - RNA, 32 nt, Human
acuuggccucgaggccuuuuauuuuagaaaug

SEQ ID NO: 308162 - RNA, 32 nt, Human
acuuggccucuaauuuauauugcuuugcacuu

SEQ ID NO: 308163 - RNA, 22 nt, Human
acuuggccucuugguuggccag

SEQ ID NO: 308164 - RNA, 32 nt, Human
acuuggccugcuugcccugcccucucaccucu

SEQ ID NO: 308165 - RNA, 32 nt, Human
acuuggccuguucacuuggaaggcuaacucca

SEQ ID NO: 308166 - RNA, 32 nt, Human
acuuggcggugaggagggcagcuggagaucuu

SEQ ID NO: 308167 - RNA, 32 nt, Human
acuuggcuaauucuucuccuccuucacaucag

SEQ ID NO: 308168 - RNA, 32 nt, Human
acuuggcucacugcaaccucugcccccugggu

SEQ ID NO: 308169 - RNA, 32 nt, Human
acuuggcucacugcagccucaacuucuugucc

SEQ ID NO: 308170 - RNA, 32 nt, Human
acuuggcucagugcaaccuccccaccccgggc

SEQ ID NO: 308171 - RNA, 32 nt, Human
acuuggcuccccucuccuccuuagccagaaac

SEQ ID NO: 308172 - RNA, 32 nt, Human
acuuggcugcaaccccagagcccccagggugu

SEQ ID NO: 308173 - RNA, 32 nt, Human
acuuggcugcagcuguccugaacagcccagga

SEQ ID NO: 308174 - RNA, 32 nt, Human
acuuggcuggguuugcagucagauacacagau

SEQ ID NO: 308175 - RNA, 32 nt, Human
acuuggcugucugaccagagaaugcaccucuu

SEQ ID NO: 308176 - RNA, 32 nt, Human
acuuggcugugaucauugugauggagcaagaa

SEQ ID NO: 308177 - RNA, 32 nt, Human
acuuggcuguuaaugucugcccucugaauuca

SEQ ID NO: 308178 - RNA, 32 nt, Human
acuuggcuucccccaggggcaggcuggacuuu

SEQ ID NO: 308179 - RNA, 32 nt, Human
acuugggaaacugaaaguguucccauauagcu

SEQ ID NO: 308180 - RNA, 32 nt, Human
acuugggaacagcagguaauacugaagaaaaa

SEQ ID NO: 308181 - RNA, 32 nt, Human
acuugggaacagcuacacagggagcuagaacc

SEQ ID NO: 308182 - RNA, 32 nt, Human
acuugggaagcacauagauacaucuuacaagu

SEQ ID NO: 308183 - RNA, 32 nt, Human
acuugggaagcagaggcuggaggaucauuuca

SEQ ID NO: 308184 - RNA, 32 nt, Human
acuugggaagcugaagcaggagaaucacuuaa

SEQ ID NO: 308185 - RNA, 32 nt, Human
acuugggaagcugaagugggaggaucaccuga

SEQ ID NO: 308186 - RNA, 32 nt, Human
acuugggaaggugagggauucaggggagguca

SEQ ID NO: 308187 - RNA, 32 nt, Human
acuugggacaucuagcuccugaagaguagaaa

SEQ ID NO: 308188 - RNA, 32 nt, Human
acuugggacuccuggcucggccccaacaggga

SEQ ID NO: 308189 - RNA, 32 nt, Human
acuugggagagggagaccaugacagaagccag

SEQ ID NO: 308190 - RNA, 32 nt, Human
acuugggaggauggcaguaggagccagggcug

SEQ ID NO: 308191 - RNA, 32 nt, Human
acuugggaggcagagggcagcuacugcagguu

SEQ ID NO: 308192 - RNA, 32 nt, Human
acuugggaggcagagguuguggugagccgaga

SEQ ID NO: 308193 - RNA, 32 nt, Human
acuugggaggcagagguuucagugagccgagu

SEQ ID NO: 308194 - RNA, 32 nt, Human
acuugggaggccaaggagggaggaucacuuga

SEQ ID NO: 308195 - RNA, 32 nt, Human
acuugggaggccguggcaggaggaucacgagc

SEQ ID NO: 308196 - RNA, 32 nt, Human
acuugggaggcggagguugcagugagcuaaga

SEQ ID NO: 308197 - RNA, 32 nt, Human
acuugggaggcgguuguugcagugagcuguga

SEQ ID NO: 308198 - RNA, 32 nt, Human
acuugggaggcucaggugggaggaucacuuga

SEQ ID NO: 308199 - RNA, 32 nt, Human
acuugggaggcugaagcaggagaaucacuuua

SEQ ID NO: 308200 - RNA, 32 nt, Human
acuugggaggcugaagcaggagaaucccuuga

SEQ ID NO: 308201 - RNA, 32 nt, Human
acuugggaggcugaagcaggagaaucgcuuga

SEQ ID NO: 308202 - RNA, 32 nt, Human
acuugggaggcugaagcaggagaaucguuuga

SEQ ID NO: 308203 - RNA, 32 nt, Human
acuugggaggcugaagcaggagaauugccuga

SEQ ID NO: 308204 - RNA, 32 nt, Human
acuugggaggcugaagcaggagaauugcucga

SEQ ID NO: 308205 - RNA, 32 nt, Human
acuugggaggcugaagcaggagagucacuuga

SEQ ID NO: 308206 - RNA, 32 nt, Human
acuugggaggcugaagcaggaggauagcuaga

SEQ ID NO: 308207 - RNA, 32 nt, Human
acuugggaggcugaagcaggaggauugaggaa

SEQ ID NO: 308208 - RNA, 32 nt, Human
acuugggaggcugaagcaugagaaucacuuga

SEQ ID NO: 308209 - RNA, 32 nt, Human
acuugggaggcugaagcgggaggaucgcuuga

SEQ ID NO: 308210 - RNA, 32 nt, Human
acuugggaggcugaagugggaagaucacuuga

SEQ ID NO: 308211 - RNA, 32 nt, Human
acuugggaggcugaagugggaggaucauuugu

SEQ ID NO: 308212 - RNA, 32 nt, Human
acuugggaggcugaagugggaggaucgcuuga

SEQ ID NO: 308213 - RNA, 32 nt, Human
acuugggaggcugaagugggaggauggccuga

SEQ ID NO: 308214 - RNA, 32 nt, Human
acuugggaggcugaagugggaggauuacuuga

SEQ ID NO: 308215 - RNA, 32 nt, Human
acuugggaggcugacguggguggcucacuuga

SEQ ID NO: 308216 - RNA, 32 nt, Human
acuugggaggcugagacaggagaaucacuuga

SEQ ID NO: 308217 - RNA, 32 nt, Human
acuugggaggcugagauaggaucacuugggcc

SEQ ID NO: 308218 - RNA, 32 nt, Human
acuugggaggcugagaugggagaaucacuuga

SEQ ID NO: 308219 - RNA, 32 nt, Human
acuugggaggcugagaugggaggaccauuuga

SEQ ID NO: 308220 - RNA, 32 nt, Human
acuugggaggcugagaugggaggagcacuuga

SEQ ID NO: 308221 - RNA, 32 nt, Human
acuugggaggcugagaugggaggaucaucuga

SEQ ID NO: 308222 - RNA, 32 nt, Human
acuugggaggcugagaugugagaaucacuuga

SEQ ID NO: 308223 - RNA, 32 nt, Human
acuugggaggcugagccaggagaaucacuuga

SEQ ID NO: 308224 - RNA, 32 nt, Human
acuugggaggcugagccaggagaaucgcuuga

SEQ ID NO: 308225 - RNA, 32 nt, Human
acuugggaggcugagcccuggaggucgaggcu

SEQ ID NO: 308226 - RNA, 32 nt, Human
acuugggaggcugaggagggauaaucaguuga

SEQ ID NO: 308227 - RNA, 32 nt, Human
acuugggaggcugaggcaagagaaucgcuuga

SEQ ID NO: 308228 - RNA, 32 nt, Human
acuugggaggcugaggcaagagaauugcuuga

SEQ ID NO: 308229 - RNA, 32 nt, Human
acuugggaggcugaggcaagagaauugcuugg

SEQ ID NO: 308230 - RNA, 32 nt, Human
acuugggaggcugaggcaagaggauccuugag

SEQ ID NO: 308231 - RNA, 32 nt, Human
acuugggaggcugaggcaagugaaucacuuga

SEQ ID NO: 308232 - RNA, 32 nt, Human
acuugggaggcugaggcacaagaaucaauaga

SEQ ID NO: 308233 - RNA, 32 nt, Human
acuugggaggcugaggcacaagaaucacuuga

SEQ ID NO: 308234 - RNA, 32 nt, Human
acuugggaggcugaggcacaagaaucgcuuga

SEQ ID NO: 308235 - RNA, 32 nt, Human
acuugggaggcugaggcacgagaaucgcuuga

SEQ ID NO: 308236 - RNA, 32 nt, Human
acuugggaggcugaggcacgagaauuacuuga

SEQ ID NO: 308237 - RNA, 32 nt, Human
acuugggaggcugaggcagaagaaucgcuuaa

SEQ ID NO: 308238 - RNA, 32 nt, Human
acuugggaggcugaggcagaagaaucgcuuga

SEQ ID NO: 308239 - RNA, 32 nt, Human
acuugggaggcugaggcagagaauugcuugaa

SEQ ID NO: 308240 - RNA, 32 nt, Human
acuugggaggcugaggcaggacagucacuuga

SEQ ID NO: 308241 - RNA, 26 nt, Human
acuugggaggcugaggcaggagaauc

SEQ ID NO: 308242 - RNA, 32 nt, Human
acuugggaggcugaggcaggagaaucaccuga

SEQ ID NO: 308243 - RNA, 32 nt, Human
acuugggaggcugaggcaggagaaucacucga

SEQ ID NO: 308244 - RNA, 32 nt, Human
acuugggaggcugaggcaggagaaucacuuga

SEQ ID NO: 308245 - RNA, 32 nt, Human
acuugggaggcugaggcaggagaaucauuuaa

SEQ ID NO: 308246 - RNA, 32 nt, Human
acuugggaggcugaggcaggagaaucauuuga

SEQ ID NO: 308247 - RNA, 32 nt, Human
acuugggaggcugaggcaggagaaucccuuga

SEQ ID NO: 308248 - RNA, 32 nt, Human
acuugggaggcugaggcaggagaaucgccuga

SEQ ID NO: 308249 - RNA, 32 nt, Human
acuugggaggcugaggcaggagaaucgcugga

SEQ ID NO: 308250 - RNA, 32 nt, Human
acuugggaggcugaggcaggagaaucgcuuaa

SEQ ID NO: 308251 - RNA, 32 nt, Human
acuugggaggcugaggcaggagaaucgcuuga

SEQ ID NO: 308252 - RNA, 32 nt, Human
acuugggaggcugaggcaggagaaucucuuga

SEQ ID NO: 308253 - RNA, 32 nt, Human
acuugggaggcugaggcaggagaauuacuuga

SEQ ID NO: 308254 - RNA, 27 nt, Human
acuugggaggcugaggcaggagagucg

SEQ ID NO: 308255 - RNA, 32 nt, Human
acuugggaggcugaggcaggaggaucacuuaa

SEQ ID NO: 308256 - RNA, 32 nt, Human
acuugggaggcugaggcaggaggaucacuuca

SEQ ID NO: 308257 - RNA, 32 nt, Human
acuugggaggcugaggcaggaggaucccuuga

SEQ ID NO: 308258 - RNA, 32 nt, Human
acuugggaggcugaggcaggaggaucgccuga

SEQ ID NO: 308259 - RNA, 32 nt, Human
acuugggaggcugaggcaggaggaucgcuuaa

SEQ ID NO: 308260 - RNA, 32 nt, Human
acuugggaggcugaggcaggaggaucgcuuga

SEQ ID NO: 308261 - RNA, 32 nt, Human
acuugggaggcugaggcaggaggauugccuga

SEQ ID NO: 308262 - RNA, 32 nt, Human
acuugggaggcugaggcaggaggauugcuuga

SEQ ID NO: 308263 - RNA, 32 nt, Human
acuugggaggcugaggcaggaggguugcuuga

SEQ ID NO: 308264 - RNA, 32 nt, Human
acuugggaggcugaggcaggggaaucacuuga

SEQ ID NO: 308265 - RNA, 32 nt, Human
acuugggaggcugaggcaugagaaucaauuga

SEQ ID NO: 308266 - RNA, 32 nt, Human
acuugggaggcugaggcaugagaaucacuuaa

SEQ ID NO: 308267 - RNA, 32 nt, Human
acuugggaggcugaggcauggagaaucgcuug

SEQ ID NO: 308268 - RNA, 32 nt, Human
acuugggaggcugaggcgagagaaucacuuga

SEQ ID NO: 308269 - RNA, 32 nt, Human
acuugggaggcugaggcggcaggaucacuagg

SEQ ID NO: 308270 - RNA, 32 nt, Human
acuugggaggcugaggcuggagaaucgcuuga

SEQ ID NO: 308271 - RNA, 32 nt, Human
acuugggaggcugagggcaggagaauggcaug

SEQ ID NO: 308272 - RNA, 32 nt, Human
acuugggaggcugagggcaggagaauugcuug

SEQ ID NO: 308273 - RNA, 32 nt, Human
acuugggaggcugagguaggagaauuacuuga

SEQ ID NO: 308274 - RNA, 32 nt, Human
acuugggaggcugagguaggaggaucaccuga

SEQ ID NO: 308275 - RNA, 32 nt, Human
acuugggaggcugaggucagaggauggcuuga

SEQ ID NO: 308276 - RNA, 32 nt, Human
acuugggaggcugagguggaaggaucauuuga

SEQ ID NO: 308277 - RNA, 32 nt, Human
acuugggaggcugagguggauggaucaccuga

SEQ ID NO: 308278 - RNA, 32 nt, Human
acuugggaggcugaggugggagaaucaccuga

SEQ ID NO: 308279 - RNA, 32 nt, Human
acuugggaggcugaggugggagaucacuugag

SEQ ID NO: 308280 - RNA, 32 nt, Human
acuugggaggcugaggugggaggaucacuuga

SEQ ID NO: 308281 - RNA, 32 nt, Human
acuugggaggcugaggugggaggauccucuga

SEQ ID NO: 308282 - RNA, 32 nt, Human
acuugggaggcugaggugggaggaucgccuga

SEQ ID NO: 308283 - RNA, 32 nt, Human
acuugggaggcugaggugggaggaucgcuuga

SEQ ID NO: 308284 - RNA, 32 nt, Human
acuugggaggcugaggugggaggaucgguuga

SEQ ID NO: 308285 - RNA, 32 nt, Human
acuugggaggcugaggugggaggaucuuuuga

SEQ ID NO: 308286 - RNA, 32 nt, Human
acuugggaggcugaggugggaggauuaaugga

SEQ ID NO: 308287 - RNA, 32 nt, Human
acuugggaggcugaggugggaggauugccuga

SEQ ID NO: 308288 - RNA, 32 nt, Human
acuugggaggcugaggugggaggauugcuuga

SEQ ID NO: 308289 - RNA, 32 nt, Human
acuugggaggcugaggugggaggauuguuuga

SEQ ID NO: 308290 - RNA, 32 nt, Human
acuugggaggcugaggugggagguucacccaa

SEQ ID NO: 308291 - RNA, 32 nt, Human
acuugggaggcugaggugggcggauuacuuga

SEQ ID NO: 308292 - RNA, 32 nt, Human
acuugggaggcugaggugggggaaucacuuga

SEQ ID NO: 308293 - RNA, 32 nt, Human
acuugggaggcugaggugugaggaucauuuag

SEQ ID NO: 308294 - RNA, 32 nt, Human
acuugggaggcugcagcuguggcuguggcuga

SEQ ID NO: 308295 - RNA, 32 nt, Human
acuugggaggcugggcagaagaaucacuugag

SEQ ID NO: 308296 - RNA, 32 nt, Human
acuugggaggcuggggaaggagaaucacuuga

SEQ ID NO: 308297 - RNA, 32 nt, Human
acuugggaggcuggggugggaggaucgcuuga

SEQ ID NO: 308298 - RNA, 32 nt, Human
acuugggagggagagguugcagugagcccaga

SEQ ID NO: 308299 - RNA, 32 nt, Human
acuugggaggggcggagguagcaguaaagcca

SEQ ID NO: 308300 - RNA, 32 nt, Human
acuugggagggguagguugcagugagcugaga

SEQ ID NO: 308301 - RNA, 32 nt, Human
acuugggagguggagcuuacagugagccgaga

SEQ ID NO: 308302 - RNA, 32 nt, Human
acuugggagguggagguugcagugagccagga

SEQ ID NO: 308303 - RNA, 32 nt, Human
acuugggagguggagguugcagugggccgaga

SEQ ID NO: 308304 - RNA, 32 nt, Human
acuugggcaggcaaagggggcaccaagggcac

SEQ ID NO: 308305 - RNA, 32 nt, Human
acuugggccaaucacugaguuuguggugaucg

SEQ ID NO: 308306 - RNA, 32 nt, Human
acuugggcccaggaggucaagccugcagcgag

SEQ ID NO: 308307 - RNA, 32 nt, Human
acuugggcccaggaguuugaggcugcagugag

SEQ ID NO: 308308 - RNA, 32 nt, Human
acuugggcccccuguucuuucuuucccauuaa

SEQ ID NO: 308309 - RNA, 32 nt, Human
acuugggccgaucugggcugggcuuggacgug

SEQ ID NO: 308310 - RNA, 32 nt, Human
acuugggcggcgagcuggacuguuucuacucc

SEQ ID NO: 308311 - RNA, 32 nt, Human
acuugggcucaagugauccuccuaccugagcc

SEQ ID NO: 308312 - RNA, 32 nt, Human
acuugggcucacaacuucucuucacuuuuucc

SEQ ID NO: 308313 - RNA, 32 nt, Human
acuuggggagccaaagcacaagaucuaaggaa

SEQ ID NO: 308314 - RNA, 32 nt, Human
acuuggggaggaagaauggggagugacugcua

SEQ ID NO: 308315 - RNA, 32 nt, Human
acuuggggaggcaagagacugggagccacuuc

SEQ ID NO: 308316 - RNA, 32 nt, Human
acuuggggaggugaguucuggaaggcaggggc

SEQ ID NO: 308317 - RNA, 32 nt, Human
acuuggggccccacccuuuucucuccuguuuu

SEQ ID NO: 308318 - RNA, 32 nt, Human
acuuggggcccccagcagguugcccaccaagc

SEQ ID NO: 308319 - RNA, 32 nt, Human
acuugggggacugaggcgggaggaucacuuga

SEQ ID NO: 308320 - RNA, 32 nt, Human
acuuggggugcauagcucggagaugcaguccc

SEQ ID NO: 308321 - RNA, 32 nt, Human
acuuggggugggaggggagaaagggaaccuuu

SEQ ID NO: 308322 - RNA, 32 nt, Human
acuugggguucugguggcuucaucucauaaag

SEQ ID NO: 308323 - RNA, 32 nt, Human
acuugggucaaucucucacuuuauuuuguaga

SEQ ID NO: 308324 - RNA, 32 nt, Human
acuuggguccaggagguggaggcugcagugag

SEQ ID NO: 308325 - RNA, 32 nt, Human
acuugggugagcagacacagugaggcuguuag

SEQ ID NO: 308326 - RNA, 32 nt, Human
acuugggugggcagacuuaggaacgcucuacu

SEQ ID NO: 308327 - RNA, 32 nt, Human
acuuggguugguuugucuuugcuuccuacacc

SEQ ID NO: 308328 - RNA, 32 nt, Human
acuuggguuuuggggugguggaaagcgggaaa

SEQ ID NO: 308329 - RNA, 32 nt, Human
acuugguaacaucccuagacuccacucaugaa

SEQ ID NO: 308330 - RNA, 32 nt, Human
acuugguacaguuucaggagcgugaaggacuu

SEQ ID NO: 308331 - RNA, 32 nt, Human
acuugguacuucuuucgcugaaugaccauacu

SEQ ID NO: 308332 - RNA, 32 nt, Human
acuugguaguuagccacauugagaagugguua

SEQ ID NO: 308333 - RNA, 32 nt, Human
acuugguauccaauaaauauuuguuggaugaa

SEQ ID NO: 308334 - RNA, 32 nt, Human
acuugguauucuacuucuuucucccaucucaa

SEQ ID NO: 308335 - RNA, 32 nt, Human
acuuggucacugggcugcugauggucagcucu

SEQ ID NO: 308336 - RNA, 32 nt, Human
acuugguccuugugcucuucagccaggacacc

SEQ ID NO: 308337 - RNA, 32 nt, Human
acuuggucucaagugauucuacugccucagcc

SEQ ID NO: 308338 - RNA, 32 nt, Human
acuuggugcccugcaucccagccacucccaac

SEQ ID NO: 308339 - RNA, 32 nt, Human
acuugguggccaauaccugccuuccaaagaga

SEQ ID NO: 308340 - RNA, 31 nt, Human
acuugguggguggggugggugguuuuuguuu

SEQ ID NO: 308341 - RNA, 32 nt, Human
acuuggugucugcuguccccgccaggcaagcc

SEQ ID NO: 308342 - RNA, 32 nt, Human
acuuggugugggggaggagcacaaaacuccag

SEQ ID NO: 308343 - RNA, 32 nt, Human
acuugguuaacaguguacauuuugauaaccua

SEQ ID NO: 308344 - RNA, 32 nt, Human
acuugguuagaauugugcuacugugaacgcug

SEQ ID NO: 308345 - RNA, 32 nt, Human
acuugguuccaguuccugccuaucuggaguuu

SEQ ID NO: 308346 - RNA, 32 nt, Human
acuugguuugccuggugccacaaugcuuauua

SEQ ID NO: 308347 - RNA, 32 nt, Human
acuuguaaacuauggugcucaguuuugccucu

SEQ ID NO: 308348 - RNA, 32 nt, Human
acuuguaacagauucccugaaacacugcuuuu

SEQ ID NO: 308349 - RNA, 32 nt, Human
acuuguacaacaaaugcuucuuccaggaucua

SEQ ID NO: 308350 - RNA, 32 nt, Human
acuuguacaacauuaucaauguauuuaauacc

SEQ ID NO: 308351 - RNA, 32 nt, Human
acuuguacaaugcugucacugugugacaucca

SEQ ID NO: 308352 - RNA, 32 nt, Human
acuuguacacauauaucaaaaccucauucugc

SEQ ID NO: 308353 - RNA, 32 nt, Human
acuuguacccaggagguggagguugcggugaa

SEQ ID NO: 308354 - RNA, 32 nt, Human
acuuguacuaccuuguccuaugaagcucugag

SEQ ID NO: 308355 - RNA, 32 nt, Human
acuuguacuucccaccacuggaaauguuagca

SEQ ID NO: 308356 - RNA, 32 nt, Human
acuuguagcauugccuguacuacaguauuuuu

SEQ ID NO: 308357 - RNA, 32 nt, Human
acuuguagccgucugaaaagauuguuauaagc

SEQ ID NO: 308358 - RNA, 32 nt, Human
acuuguagcuuaauucagcauugggugaggua

SEQ ID NO: 308359 - RNA, 32 nt, Human
acuuguaggaaagccucuuugcauuuagacgu

SEQ ID NO: 308360 - RNA, 32 nt, Human
acuuguaggcgaucagggcugaagacgcugau

SEQ ID NO: 308361 - RNA, 32 nt, Human
acuuguauaucccacugggagcacuuuguagg

SEQ ID NO: 308362 - RNA, 32 nt, Human
acuuguauaugacaguauuuagggaaggugaa

SEQ ID NO: 308363 - RNA, 32 nt, Human
acuuguauaugcccuauaccucuugggcauac

SEQ ID NO: 308364 - RNA, 22 nt, Human
acuuguauauuacaggaaacaa

SEQ ID NO: 308365 - RNA, 32 nt, Human
acuuguauccucuccccucuucauacacuccu

SEQ ID NO: 308366 - RNA, 32 nt, Human
acuuguauuaucuguaaauuccagacauugua

SEQ ID NO: 308367 - RNA, 32 nt, Human
acuuguauucccuuaacucuaacccuguggaa

SEQ ID NO: 308368 - RNA, 32 nt, Human
acuuguauuuccauugggauguuuucauuuca

SEQ ID NO: 308369 - RNA, 32 nt, Human
acuugucaauguuuuuauucuuuuacaagacc

SEQ ID NO: 308370 - RNA, 32 nt, Human
acuugucacacuugcagucuccugccucacuc

SEQ ID NO: 308371 - RNA, 32 nt, Human
acuugucacaugcuugaucaguuacagcaaua

SEQ ID NO: 308372 - RNA, 32 nt, Human
acuugucacccaggcuggagugcaauggugug

SEQ ID NO: 308373 - RNA, 32 nt, Human
acuugucacccaggcuggagugcaguggcuca

SEQ ID NO: 308374 - RNA, 32 nt, Human
acuugucagacuguuggaauuggaucauagac

SEQ ID NO: 308375 - RNA, 32 nt, Human
acuugucaggcagaaaagguagugaccggccc

SEQ ID NO: 308376 - RNA, 32 nt, Human
acuugucaucacacagcugaagacauuguuuc

SEQ ID NO: 308377 - RNA, 32 nt, Human
acuuguccacaccagugacuccugccugagac

SEQ ID NO: 308378 - RNA, 32 nt, Human
acuuguccccggcuggagcccagcgccccgcc

SEQ ID NO: 308379 - RNA, 20 nt, Human
acuugucccgcuccccuuca

SEQ ID NO: 308380 - RNA, 32 nt, Human
acuuguccucuuggagguuacauucuugcugg

SEQ ID NO: 308381 - RNA, 32 nt, Human
acuuguccuucccaccucuugccuccacaccc

SEQ ID NO: 308382 - RNA, 31 nt, Human
acuugucucaauaaacccuuuggaguaaaaa

SEQ ID NO: 308383 - RNA, 32 nt, Human
acuugucucauuccaccucuucucagagcaac

SEQ ID NO: 308384 - RNA, 23 nt, Human
acuugucucucucauuuccuuca

SEQ ID NO: 308385 - RNA, 32 nt, Human
acuugucugccucuuugaccaccugugaacuc

SEQ ID NO: 308386 - RNA, 32 nt, Human
acuugucugggaaccugggcaggaggcacaga

SEQ ID NO: 308387 - RNA, 32 nt, Human
acuugucugggaacugggugcaggaggagaac

SEQ ID NO: 308388 - RNA, 32 nt, Human
acuugucuucuggaaguucgggugaggacgau

SEQ ID NO: 308389 - RNA, 32 nt, Human
acuugucuuucccugcaguaaggcugguuucc

SEQ ID NO: 308390 - RNA, 32 nt, Human
acuugugaaaauguauaaaagaugcaucuguu

SEQ ID NO: 308391 - RNA, 32 nt, Human
acuugugaggcugaggugggaggaucgcuuga

SEQ ID NO: 308392 - RNA, 32 nt, Human
acuugugaggcugaggugggaggaucguuuga

SEQ ID NO: 308393 - RNA, 32 nt, Human
acuugugauaauuggccucugugucauugugu

SEQ ID NO: 308394 - RNA, 32 nt, Human
acuugugcaaagggauccagaagagacacuuu

SEQ ID NO: 308395 - RNA, 32 nt, Human
acuugugcacaugugugcacagacacaaaaca

SEQ ID NO: 308396 - RNA, 32 nt, Human
acuugugcagcugcaaccaccauauccagggc

SEQ ID NO: 308397 - RNA, 32 nt, Human
acuugugccuccuggguucaagcgauucugcu

SEQ ID NO: 308398 - RNA, 19 nt, Human
acuugugccuguaauucca

SEQ ID NO: 308399 - RNA, 32 nt, Human
acuugugccuguaauuccagcugcucuggaag

SEQ ID NO: 308400 - RNA, 31 nt, Human
acuugugccuuacuguauccugugucauguc

SEQ ID NO: 308401 - RNA, 32 nt, Human
acuuguggaauucagucuacuggauuuaaggg

SEQ ID NO: 308402 - RNA, 32 nt, Human
acuuguggacaucacuggaguuuaccuauugu

SEQ ID NO: 308403 - RNA, 32 nt, Human
acuuguggcagcuucccugaacacucaucccc

SEQ ID NO: 308404 - RNA, 32 nt, Human
acuuguggccuugugcaaucucugccucucug

SEQ ID NO: 308405 - RNA, 32 nt, Human
acuuguggggauagaagggcucacagggcagg

SEQ ID NO: 308406 - RNA, 32 nt, Human
acuuguggggcuaaggcaggaggaucacuuga

SEQ ID NO: 308407 - RNA, 32 nt, Human
acuugugggggcauucccuagcacacaguaua

SEQ ID NO: 308408 - RNA, 32 nt, Human
acuugugggguggagguugcagugagcugaga

SEQ ID NO: 308409 - RNA, 32 nt, Human
acuugugguaccgauuauaucaucucagucuu

SEQ ID NO: 308410 - RNA, 32 nt, Human
acuuguggucaaagcaagaaugaggcugaaca

SEQ ID NO: 308411 - RNA, 32 nt, Human
acuuguguagcagcacagggcccacacuuaga

SEQ ID NO: 308412 - RNA, 32 nt, Human
acuugugugcaccugauuuggccaauaggauc

SEQ ID NO: 308413 - RNA, 32 nt, Human
acuugugugggaugggugcaggucugcauaua

SEQ ID NO: 308414 - RNA, 32 nt, Human
acuugugugugcugauguguuuccauuuguau

SEQ ID NO: 308415 - RNA, 32 nt, Human
acuuguguuuugcuacuugcaaaggaaauguu

SEQ ID NO: 308416 - RNA, 32 nt, Human
acuuguuaaagugcugcaaaaauugcauuuuc

SEQ ID NO: 308417 - RNA, 32 nt, Human
acuuguuacuccaagcaacuugcccaauuuua

SEQ ID NO: 308418 - RNA, 32 nt, Human
acuuguuagaaauacaaauuuuagggccuggc

SEQ ID NO: 308419 - RNA, 32 nt, Human
acuuguuccccgcagugcacaccuagaaugcu

SEQ ID NO: 308420 - RNA, 32 nt, Human
acuuguucucacauaggggcauccucuguccc

SEQ ID NO: 308421 - RNA, 32 nt, Human
acuuguucuuggggcucuaccagauggcugaa

SEQ ID NO: 308422 - RNA, 21 nt, Human
acuuguugaaacaggaagcaa

SEQ ID NO: 308423 - RNA, 32 nt, Human
acuuguugcaacuuuucacuucucuugugucc

SEQ ID NO: 308424 - RNA, 32 nt, Human
acuuguugcccaggcuggagugcaaugguaca

SEQ ID NO: 308425 - RNA, 32 nt, Human
acuuguuggcauuagacaaaucaagcugguga

SEQ ID NO: 308426 - RNA, 32 nt, Human
acuuguugggaggaggaggaaagggaaggcug

SEQ ID NO: 308427 - RNA, 32 nt, Human
acuuguugugguucccggguggcaggugcaca

SEQ ID NO: 308428 - RNA, 32 nt, Human
acuuguuucccuuauccauuuccuuuuucauu

SEQ ID NO: 308429 - RNA, 32 nt, Human
acuuguuucuccugcaccccagccugucacgc

SEQ ID NO: 308430 - RNA, 32 nt, Human
acuuguuugaagacuuguggauauucagagga

SEQ ID NO: 308431 - RNA, 31 nt, Human
acuuguuuggaacaaauacucacuuaaaacu

SEQ ID NO: 308432 - RNA, 32 nt, Human
acuuguuuuauuagauuuuaccaaugaauuuu

SEQ ID NO: 308433 - RNA, 32 nt, Human
acuuguuuuccuguguucuuguuuucagaaaa

SEQ ID NO: 308434 - RNA, 32 nt, Human
acuuguuuuucccaucucuuccuuuccaauuu

SEQ ID NO: 308435 - RNA, 32 nt, Human
acuuuaaaacacacacauacacacacaaaaca

SEQ ID NO: 308436 - RNA, 32 nt, Human
acuuuaaaacaguagagcuagcaaugacaccu

SEQ ID NO: 308437 - RNA, 32 nt, Human
acuuuaaaaccucaaaguugagaaggcuuuuc

SEQ ID NO: 308438 - RNA, 24 nt, Human
acuuuaaaacugcagcuuucuuuu

SEQ ID NO: 308439 - RNA, 32 nt, Human
acuuuaaaaugaaccagcucugaaaaguacuu

SEQ ID NO: 308440 - RNA, 20 nt, Human
acuuuaaaaugacuucuuuu

SEQ ID NO: 308441 - RNA, 32 nt, Human
acuuuaaacaauugcuugcugagauguuguua

SEQ ID NO: 308442 - RNA, 32 nt, Human
acuuuaaacagccugacuguguccuuggcucu

SEQ ID NO: 308443 - RNA, 32 nt, Human
acuuuaaacauuuaaauuauacaaucaucaac

SEQ ID NO: 308444 - RNA, 32 nt, Human
acuuuaaagcagcuuaaucuuuaaggaacaua

SEQ ID NO: 308445 - RNA, 32 nt, Human
acuuuaaaggaaaggauuuggagaauugaacu

SEQ ID NO: 308446 - RNA, 32 nt, Human
acuuuaaaggcuauuuacaaagcuguuuuaaa

SEQ ID NO: 308447 - RNA, 32 nt, Human
acuuuaaaucaaauugaaaauaaauuuuaucc

SEQ ID NO: 308448 - RNA, 32 nt, Human
acuuuaaaugucugcccugccagcagccccgg

SEQ ID NO: 308449 - RNA, 32 nt, Human
acuuuaacacaaauuuguuucaguugggccau

SEQ ID NO: 308450 - RNA, 32 nt, Human
acuuuaacaccacgcucuccuccaccgaccag

SEQ ID NO: 308451 - RNA, 32 nt, Human
acuuuaacaggugagaagacuaugccauggac

SEQ ID NO: 308452 - RNA, 32 nt, Human
acuuuaaccaguuaacuuggugcaaaacuuuu

SEQ ID NO: 308453 - RNA, 32 nt, Human
acuuuaacuguaaaguaaaugcuccaagugug

SEQ ID NO: 308454 - RNA, 32 nt, Human
acuuuaacuguacaauaauguugucacuuacu

SEQ ID NO: 308455 - RNA, 32 nt, Human
acuuuaagagcaggaguaauuaaguauuacug

SEQ ID NO: 308456 - RNA, 32 nt, Human
acuuuaagcuuuaucagaauuaaaugugagau

SEQ ID NO: 308457 - RNA, 32 nt, Human
acuuuaauacuaaaagcacuuuccauuauaua

SEQ ID NO: 308458 - RNA, 32 nt, Human
acuuuaaucaugguuucaugagcauuaaaaag

SEQ ID NO: 308459 - RNA, 32 nt, Human
acuuuaauuuugcuccaacaagggcuuuaugu

SEQ ID NO: 308460 - RNA, 32 nt, Human
acuuuacaaaccugaaagaugugacaaugauu

SEQ ID NO: 308461 - RNA, 32 nt, Human
acuuuacaaaccugaaugaugugacaauaauu

SEQ ID NO: 308462 - RNA, 32 nt, Human
acuuuacaagggcugaaggggucuucuacaug

SEQ ID NO: 308463 - RNA, 32 nt, Human
acuuuacaccucaguauugauuugucccagaa

SEQ ID NO: 308464 - RNA, 32 nt, Human
acuuuacagaagagggacugaggcucugagga

SEQ ID NO: 308465 - RNA, 32 nt, Human
acuuuacagauggggaaacugaggcuugagag

SEQ ID NO: 308466 - RNA, 32 nt, Human
acuuuacagccucuuuucaucuguaaaaugag

SEQ ID NO: 308467 - RNA, 32 nt, Human
acuuuacauaugugagauagaaacaaugguuc

SEQ ID NO: 308468 - RNA, 32 nt, Human
acuuuacauguauuuuguuauuagaaauuuuc

SEQ ID NO: 308469 - RNA, 32 nt, Human
acuuuaccauucuauuucccaagggaaccauc

SEQ ID NO: 308470 - RNA, 31 nt, Human
acuuuacccacggacagcaccaaagcucgcc

SEQ ID NO: 308471 - RNA, 32 nt, Human
acuuuacccagacgccacaggucaucaucugg

SEQ ID NO: 308472 - RNA, 32 nt, Human
acuuuaccuucucuuguacauagucagacuau

SEQ ID NO: 308473 - RNA, 32 nt, Human
acuuuacgccuaagguccucagucucuccagu

SEQ ID NO: 308474 - RNA, 32 nt, Human
acuuuacucauagcacauuucuuguguuaacc

SEQ ID NO: 308475 - RNA, 32 nt, Human
acuuuacugcagcuagucauccauccgucagg

SEQ ID NO: 308476 - RNA, 32 nt, Human
acuuuacuuuguuuuaaaacugaucaguuuug

SEQ ID NO: 308477 - RNA, 32 nt, Human
acuuuagaauuuggacuuaccuaacaagagua

SEQ ID NO: 308478 - RNA, 32 nt, Human
acuuuagacccuauguguagcaggucacaacu

SEQ ID NO: 308479 - RNA, 32 nt, Human
acuuuagaggagggaaagggguggcucuggca

SEQ ID NO: 308480 - RNA, 32 nt, Human
acuuuagaggcuugaucaugaaucacugcacc

SEQ ID NO: 308481 - RNA, 32 nt, Human
acuuuagauauuuuugcugaccugcaaagagc

SEQ ID NO: 308482 - RNA, 32 nt, Human
acuuuagcaacaguuaucacacuuuguaauuu

SEQ ID NO: 308483 - RNA, 32 nt, Human
acuuuagcaguucuuccaucugacucagguuu

SEQ ID NO: 308484 - RNA, 26 nt, Human
acuuuagccugggugacagagcgaga

SEQ ID NO: 308485 - RNA, 32 nt, Human
acuuuagccuuuacauaauuacucuaaguuac

SEQ ID NO: 308486 - RNA, 32 nt, Human
acuuuagcugaagaggagggggaugugcugug

SEQ ID NO: 308487 - RNA, 31 nt, Human
acuuuaggagagcugcccacagcagaaugac

SEQ ID NO: 308488 - RNA, 32 nt, Human
acuuuaggcagacaccagcuguuugcaaacaa

SEQ ID NO: 308489 - RNA, 32 nt, Human
acuuuaggcucccuccagauuccgcguuccuu

SEQ ID NO: 308490 - RNA, 32 nt, Human
acuuuagggccccuuagcagggugagcuguua

SEQ ID NO: 308491 - RNA, 32 nt, Human
acuuuagguauuaagaggcuauuggguuuuac

SEQ ID NO: 308492 - RNA, 32 nt, Human
acuuuaguaucauagugcuacagggaacaugc

SEQ ID NO: 308493 - RNA, 32 nt, Human
acuuuagucacuccugagaauccacaggagug

SEQ ID NO: 308494 - RNA, 19 nt, Human
acuuuaguccuguaucugu

SEQ ID NO: 308495 - RNA, 32 nt, Human
acuuuaguguauuuaaagagcauuucaguuaa

SEQ ID NO: 308496 - RNA, 32 nt, Human
acuuuaguucuuuagugacucuuaguagaggg

SEQ ID NO: 308497 - RNA, 32 nt, Human
acuuuauagcacuccgacauuuucugagcaag

SEQ ID NO: 308498 - RNA, 32 nt, Human
acuuuauaggagaauaagcaagagcuuaggua

SEQ ID NO: 308499 - RNA, 32 nt, Human
acuuuauaguuugggagacagaaucaggucuu

SEQ ID NO: 308500 - RNA, 32 nt, Human
acuuuaucacccaaaucacuggcauugacauu

SEQ ID NO: 308501 - RNA, 32 nt, Human
acuuuaucacccagacuggcgugcaguggcac

SEQ ID NO: 308502 - RNA, 32 nt, Human
acuuuauccugagucccuuaaucuuauggggc

SEQ ID NO: 308503 - RNA, 30 nt, Human
acuuuaugccugaacauagacucucucauc

SEQ ID NO: 308504 - RNA, 32 nt, Human
acuuuaugcugcagcauccaaggugaaagguc

SEQ ID NO: 308505 - RNA, 32 nt, Human
acuuuauggaggaggaagcuagaggaaaaaug

SEQ ID NO: 308506 - RNA, 32 nt, Human
acuuuaugggagaaaauuuagcaaagaagauc

SEQ ID NO: 308507 - RNA, 18 nt, Human
acuuuaugugagcaaggu

SEQ ID NO: 308508 - RNA, 32 nt, Human
acuuuauuaacagguuacugugaagauuuugc

SEQ ID NO: 308509 - RNA, 32 nt, Human
acuuuauuacucuuuugaacugaaagcacacu

SEQ ID NO: 308510 - RNA, 32 nt, Human
acuuuauuagucuguuuucacacugcuaauaa

SEQ ID NO: 308511 - RNA, 31 nt, Human
acuuuauuauacauuuugcauuuaaaaggcu

SEQ ID NO: 308512 - RNA, 32 nt, Human
acuuuauuccuaaaacgugucuuauuuuuaug

SEQ ID NO: 308513 - RNA, 32 nt, Human
acuuuauucucaaucacaagaagcuggggcuu

SEQ ID NO: 308514 - RNA, 32 nt, Human
acuuuauugcuaucgcccuccuuucccuuauu

SEQ ID NO: 308515 - RNA, 32 nt, Human
acuuuauuguuuugauguaauggaacuuaagg

SEQ ID NO: 308516 - RNA, 32 nt, Human
acuuuauuuauuggggguagggggauggagga

SEQ ID NO: 308517 - RNA, 32 nt, Human
acuuuauuucuugguguggaaaugacuuauuc

SEQ ID NO: 308518 - RNA, 32 nt, Human
acuuuauuucuuucucuugacugauugcucug

SEQ ID NO: 308519 - RNA, 32 nt, Human
acuuucaaaacaauuugcauuuagaguguuuc

SEQ ID NO: 308520 - RNA, 21 nt, Human
acuuucaaagucuccuacacu

SEQ ID NO: 308521 - RNA, 32 nt, Human
acuuucacaauggugcaucaggauaucuggca

SEQ ID NO: 308522 - RNA, 32 nt, Human
acuuucacaguccuguccucuggaucacagac

SEQ ID NO: 308523 - RNA, 32 nt, Human
acuuucaccacugucugagugaugaugcuguu

SEQ ID NO: 308524 - RNA, 32 nt, Human
acuuucaccuuaaaaucuuucuaagcaaagug

SEQ ID NO: 308525 - RNA, 32 nt, Human
acuuucacuauauuuugcuuugacagaaggaa

SEQ ID NO: 308526 - RNA, 32 nt, Human
acuuucacuuccuguucuguggcagacaagac

SEQ ID NO: 308527 - RNA, 32 nt, Human
acuuucagaacgaccugaagcugagggugcgc

SEQ ID NO: 308528 - RNA, 32 nt, Human
acuuucagagccucuggucacccuguccugga

SEQ ID NO: 308529 - RNA, 32 nt, Human
acuuucagaguuugaagguaacugagagcaga

SEQ ID NO: 308530 - RNA, 32 nt, Human
acuuucagccugcacuugaguauuccuuaugu

SEQ ID NO: 308531 - RNA, 32 nt, Human
acuuucaggaccuuccuuccucuugcaguugu

SEQ ID NO: 308532 - RNA, 32 nt, Human
acuuucaggagaaagccaaacuccucuguuug

SEQ ID NO: 308533 - RNA, 32 nt, Human
acuuucaggaggcccccagugaagagccccac

SEQ ID NO: 308534 - RNA, 32 nt, Human
acuuucaggauacuagagguugguuguggagu

SEQ ID NO: 308535 - RNA, 32 nt, Human
acuuucagggcacacuccagccugacuuuggc

SEQ ID NO: 308536 - RNA, 32 nt, Human
acuuucagggcucaccaggcacuggcagggag

SEQ ID NO: 308537 - RNA, 32 nt, Human
acuuucauacccugaccucugaccucaccuac

SEQ ID NO: 308538 - RNA, 32 nt, Human
acuuucauggaaguguugcugaggucagccug

SEQ ID NO: 308539 - RNA, 32 nt, Human
acuuucauguguugucuuaacuuuuuaaauuu

SEQ ID NO: 308540 - RNA, 32 nt, Human
acuuucauucaggcuggagugcaguggcauga

SEQ ID NO: 308541 - RNA, 32 nt, Human
acuuuccaaugccacagacaacucacauuguu

SEQ ID NO: 308542 - RNA, 31 nt, Human
acuuuccacagaaguacuuguaggagcucuc

SEQ ID NO: 308543 - RNA, 32 nt, Human
acuuuccacagcccaggagagcuucugaaagg

SEQ ID NO: 308544 - RNA, 32 nt, Human
acuuuccaccacugucagccuggaaagagauc

SEQ ID NO: 308545 - RNA, 32 nt, Human
acuuuccacgugguaccuagauuugcaaauuc

SEQ ID NO: 308546 - RNA, 32 nt, Human
acuuuccagagauuuuaccagagguuuaagau

SEQ ID NO: 308547 - RNA, 32 nt, Human
acuuuccagcucccccucaucaugccuccucc

SEQ ID NO: 308548 - RNA, 32 nt, Human
acuuuccaggaggcuggauggcuuccaggguc

SEQ ID NO: 308549 - RNA, 32 nt, Human
acuuuccagggcaaaaagggcccaggguuaua

SEQ ID NO: 308550 - RNA, 32 nt, Human
acuuuccaguuuaaaagauuuagagaaacugu

SEQ ID NO: 308551 - RNA, 32 nt, Human
acuuuccauaccacagugcaggaaaagcugau

SEQ ID NO: 308552 - RNA, 32 nt, Human
acuuuccauccccacaccauugccugcuccuc

SEQ ID NO: 308553 - RNA, 32 nt, Human
acuuucccaacauccucugcuccuagccuccc

SEQ ID NO: 308554 - RNA, 32 nt, Human
acuuucccaagccagggugugcggagcuuccc

SEQ ID NO: 308555 - RNA, 32 nt, Human
acuuucccacacuuggugcccuggagcaccuu

SEQ ID NO: 308556 - RNA, 32 nt, Human
acuuucccagggaagccugauuucacuuugcc

SEQ ID NO: 308557 - RNA, 32 nt, Human
acuuuccccaggcuccaguggccuggauguca

SEQ ID NO: 308558 - RNA, 32 nt, Human
acuuucccccacccuucccacccucuagacaa

SEQ ID NO: 308559 - RNA, 32 nt, Human
acuuucccccucaguccuggcaaugggguuug

SEQ ID NO: 308560 - RNA, 32 nt, Human
acuuuccccugccugcuccuccaugcugugag

SEQ ID NO: 308561 - RNA, 32 nt, Human
acuuucccugguuaagaaaugaccucaucugu

SEQ ID NO: 308562 - RNA, 32 nt, Human
acuuuccgugagccugugggccaggccucuuu

SEQ ID NO: 308563 - RNA, 32 nt, Human
acuuuccuauuuuucucccaguagucagcucc

SEQ ID NO: 308564 - RNA, 32 nt, Human
acuuuccucacaaaugaguaaaagccaauuua

SEQ ID NO: 308565 - RNA, 32 nt, Human
acuuuccucagccaaaaccaaugcagcacaca

SEQ ID NO: 308566 - RNA, 32 nt, Human
acuuuccuccaggggcuuccucacuggggaau

SEQ ID NO: 308567 - RNA, 32 nt, Human
acuuuccuccuuguccucugauucugagcaaa

SEQ ID NO: 308568 - RNA, 32 nt, Human
acuuuccucuccugcuuucugccugugacuag

SEQ ID NO: 308569 - RNA, 32 nt, Human
acuuuccucuuaggaaccuggccugggccagg

SEQ ID NO: 308570 - RNA, 32 nt, Human
acuuuccucuucagauccuggucugcaccucu

SEQ ID NO: 308571 - RNA, 32 nt, Human
acuuuccugagcagggauaugucuccucuccu

SEQ ID NO: 308572 - RNA, 32 nt, Human
acuuuccugaguagcugacauuacggguacac

SEQ ID NO: 308573 - RNA, 32 nt, Human
acuuuccugcagcugaucacacagcaaacaua

SEQ ID NO: 308574 - RNA, 32 nt, Human
acuuuccugcccaaccugccuccccaacggcc

SEQ ID NO: 308575 - RNA, 32 nt, Human
acuuuccuguacuccagccucugcuggcuccc

SEQ ID NO: 308576 - RNA, 32 nt, Human
acuuuccuguguauauuuaguacucugauguu

SEQ ID NO: 308577 - RNA, 32 nt, Human
acuuuccuucuuccucuccaucacuucuuccc

SEQ ID NO: 308578 - RNA, 32 nt, Human
acuuuccuuucugugcuccuuccaaguuaaau

SEQ ID NO: 308579 - RNA, 32 nt, Human
acuuuccuuugucauuauuagucuucaaaagc

SEQ ID NO: 308580 - RNA, 25 nt, Human
acuuucgaaauuucauuuuccuuca

SEQ ID NO: 308581 - RNA, 32 nt, Human
acuuucgcacacacaaacacgcuaggacgcuc

SEQ ID NO: 308582 - RNA, 32 nt, Human
acuuucgccauguuguccaggcuggucucgaa

SEQ ID NO: 308583 - RNA, 32 nt, Human
acuuucuacaacagcugaccucugcugagcgc

SEQ ID NO: 308584 - RNA, 32 nt, Human
acuuucuacuauaguuuacagaacaaauuauu

SEQ ID NO: 308585 - RNA, 32 nt, Human
acuuucuacuuucauaccuuuuuaaucaguaa

SEQ ID NO: 308586 - RNA, 32 nt, Human
acuuucuagccagaggagagaggacccccuga

SEQ ID NO: 308587 - RNA, 32 nt, Human
acuuucuagcugaacacucagcuucauccacu

SEQ ID NO: 308588 - RNA, 32 nt, Human
acuuucuaguugcccucuaccugacuccugac

SEQ ID NO: 308589 - RNA, 32 nt, Human
acuuucuauacccagagcuggcgcaggggagg

SEQ ID NO: 308590 - RNA, 32 nt, Human
acuuucuaucucauucuguaacuuucaagccu

SEQ ID NO: 308591 - RNA, 32 nt, Human
acuuucucagggaauuggacagaggaaaggaa

SEQ ID NO: 308592 - RNA, 32 nt, Human
acuuucucauguccagggucagauuacaagag

SEQ ID NO: 308593 - RNA, 32 nt, Human
acuuucuccccaccccuccccgacccccacgg

SEQ ID NO: 308594 - RNA, 32 nt, Human
acuuucucccuccaccuggagcaugggcuaac

SEQ ID NO: 308595 - RNA, 32 nt, Human
acuuucuccuccaaccuccaucagucccaggg

SEQ ID NO: 308596 - RNA, 32 nt, Human
acuuucuccucuccccucucccaagcacaucu

SEQ ID NO: 308597 - RNA, 32 nt, Human
acuuucucucacaggcugcuagaacagcccag

SEQ ID NO: 308598 - RNA, 32 nt, Human
acuuucucuccucuuguagcaagccucagacu

SEQ ID NO: 308599 - RNA, 32 nt, Human
acuuucugacaggcacauaagccccagguuua

SEQ ID NO: 308600 - RNA, 32 nt, Human
acuuucugaggaagacaauauuaagaacagcc

SEQ ID NO: 308601 - RNA, 32 nt, Human
acuuucugccuggaguguaugacugcacauga

SEQ ID NO: 308602 - RNA, 32 nt, Human
acuuucugcgcuucgaccacuaccucaacccc

SEQ ID NO: 308603 - RNA, 32 nt, Human
acuuucugcuggaagcugucaggcugggacag

SEQ ID NO: 308604 - RNA, 32 nt, Human
acuuucugcuuugccuccuuccauggccauuc

SEQ ID NO: 308605 - RNA, 22 nt, Human
acuuucugcuuuucuuucuuuc

SEQ ID NO: 308606 - RNA, 32 nt, Human
acuuucuggagcuguuuuauagaagaugaugg

SEQ ID NO: 308607 - RNA, 32 nt, Human
acuuucugugugaacuaaagugauucaauguc

SEQ ID NO: 308608 - RNA, 22 nt, Human
acuuucuguucugaaagcuaag

SEQ ID NO: 308609 - RNA, 32 nt, Human
acuuucuguuuguauuggcagagguagugagg

SEQ ID NO: 308610 - RNA, 31 nt, Human
acuuucuuaauauuuuuacaugcagaguauu

SEQ ID NO: 308611 - RNA, 32 nt, Human
acuuucuuagggaggguaaaagacugaagauu

SEQ ID NO: 308612 - RNA, 32 nt, Human
acuuucuucagaaaugggagagcugcugcaua

SEQ ID NO: 308613 - RNA, 32 nt, Human
acuuucuucucccuuggcuuauaucucuucac

SEQ ID NO: 308614 - RNA, 32 nt, Human
acuuucuucuucuuuuucuucucugggauccc

SEQ ID NO: 308615 - RNA, 32 nt, Human
acuuucuugguauaacaguccuaaagauuaca

SEQ ID NO: 308616 - RNA, 32 nt, Human
acuuucuuuaagucucacauugcuaacaugac

SEQ ID NO: 308617 - RNA, 32 nt, Human
acuuucuuuuucuuccucuuccuucuccuucu

SEQ ID NO: 308618 - RNA, 32 nt, Human
acuuugaaauaacauggagaacauacauggau

SEQ ID NO: 308619 - RNA, 32 nt, Human
acuuugaauagaaugggaggcagguuugcccu

SEQ ID NO: 308620 - RNA, 32 nt, Human
acuuugaauuugaguuugaggcuuagaagcug

SEQ ID NO: 308621 - RNA, 32 nt, Human
acuuugacacccaggcuggagugcaguggugc

SEQ ID NO: 308622 - RNA, 32 nt, Human
acuuugacagugauaaggcaccaccuggccuu

SEQ ID NO: 308623 - RNA, 32 nt, Human
acuuugacagugccuuucucucccagagggag

SEQ ID NO: 308624 - RNA, 32 nt, Human
acuuugacauccaagaacucaccaagauguuu

SEQ ID NO: 308625 - RNA, 32 nt, Human
acuuugaccaucaccuucccagccucuguaac

SEQ ID NO: 308626 - RNA, 32 nt, Human
acuuugacccacccuuucugagccugcagccu

SEQ ID NO: 308627 - RNA, 32 nt, Human
acuuugacccccaggcuggagugcaguggcac

SEQ ID NO: 308628 - RNA, 32 nt, Human
acuuugaccuggcugcaucuuuccucagcucu

SEQ ID NO: 308629 - RNA, 32 nt, Human
acuuugagacaggccugggcccauggaaccgc

SEQ ID NO: 308630 - RNA, 24 nt, Human
acuuugagaccacuaaggcgggug

SEQ ID NO: 308631 - RNA, 32 nt, Human
acuuugagacccagaaauaaauucuuuccuuu

SEQ ID NO: 308632 - RNA, 23 nt, Human
acuuugagaggcaaagacaggua

SEQ ID NO: 308633 - RNA, 27 nt, Human
acuuugagaggccaaggcaggcaggug

SEQ ID NO: 308634 - RNA, 32 nt, Human
acuuugagaggccgaagggggaggaucgcuug

SEQ ID NO: 308635 - RNA, 23 nt, Human
acuuugagaggccgaggcgggug

SEQ ID NO: 308636 - RNA, 32 nt, Human
acuuugagaggcugaggcagggcagauugcau

SEQ ID NO: 308637 - RNA, 32 nt, Human
acuuugagaggcuugcccauggcuggcaugaa

SEQ ID NO: 308638 - RNA, 32 nt, Human
acuuugagcagacgugccuggccacacuguau

SEQ ID NO: 308639 - RNA, 23 nt, Human
acuuugagccaugcuaggaggua

SEQ ID NO: 308640 - RNA, 32 nt, Human
acuuugagcgucuuuccaugugcuugcugcug

SEQ ID NO: 308641 - RNA, 32 nt, Human
acuuugagcuccaaagaauuauuccuagcagg

SEQ ID NO: 308642 - RNA, 32 nt, Human
acuuugagcuucauuuucuucuugucaggauc

SEQ ID NO: 308643 - RNA, 32 nt, Human
acuuugagcuuuguuaauaaacuauuaugcag

SEQ ID NO: 308644 - RNA, 32 nt, Human
acuuugagguuagucugaaucuugaacuuuaa

SEQ ID NO: 308645 - RNA, 21 nt, Human
acuuugaguaguuuguucuaa

SEQ ID NO: 308646 - RNA, 32 nt, Human
acuuugaguucagagcaugagacuuuuaguuc

SEQ ID NO: 308647 - RNA, 31 nt, Human
acuuugauaauaaauaccgguuccugaaaaa

SEQ ID NO: 308648 - RNA, 32 nt, Human
acuuugauacuaacuccagucuuacuauuauu

SEQ ID NO: 308649 - RNA, 23 nt, Human
acuuugauaggcugaggcaggug

SEQ ID NO: 308650 - RNA, 32 nt, Human
acuuugauaucugaucaaauguauagacuugg

SEQ ID NO: 308651 - RNA, 32 nt, Human
acuuugaucaccauuucucuccaggcuuucug

SEQ ID NO: 308652 - RNA, 32 nt, Human
acuuugauggaacuuccauucuguggggaaga

SEQ ID NO: 308653 - RNA, 32 nt, Human
acuuugaugggggcagugagggagacagcccc

SEQ ID NO: 308654 - RNA, 32 nt, Human
acuuugauguuagcuacuuugagaaccacugg

SEQ ID NO: 308655 - RNA, 32 nt, Human
acuuugauucucagggacuguauuauuccuau

SEQ ID NO: 308656 - RNA, 32 nt, Human
acuuugauuuauaaagagaagacugagggcgg

SEQ ID NO: 308657 - RNA, 20 nt, Human
acuuugcaaauauguucuaa

SEQ ID NO: 308658 - RNA, 32 nt, Human
acuuugcaaccagguacguuacaaccaggagu

SEQ ID NO: 308659 - RNA, 32 nt, Human
acuuugcaaccagguaguugcaaccaggaguc

SEQ ID NO: 308660 - RNA, 32 nt, Human
acuuugcaccuccuauccccaggguccgccga

SEQ ID NO: 308661 - RNA, 32 nt, Human
acuuugcacuccucaaauguccuuguuuaaaa

SEQ ID NO: 308662 - RNA, 32 nt, Human
acuuugcacucuuccucuucuccuuuuuccgc

SEQ ID NO: 308663 - RNA, 32 nt, Human
acuuugcagcacagcugagagaggcugucugu

SEQ ID NO: 308664 - RNA, 32 nt, Human
acuuugcagcugguugagaacagguuggagga

SEQ ID NO: 308665 - RNA, 32 nt, Human
acuuugcaggcaguccuuccagaugguucagc

SEQ ID NO: 308666 - RNA, 32 nt, Human
acuuugcaguaugaaaauggcuagagauuggg

SEQ ID NO: 308667 - RNA, 32 nt, Human
acuuugcaucacagucacaugcccauucacac

SEQ ID NO: 308668 - RNA, 32 nt, Human
acuuugccacccaggugaggugcuguguucau

SEQ ID NO: 308669 - RNA, 32 nt, Human
acuuugccaccuguaggccacaccccauccag

SEQ ID NO: 308670 - RNA, 32 nt, Human
acuuugccaccuguuugaugugcaguggaaac

SEQ ID NO: 308671 - RNA, 32 nt, Human
acuuugccaugaacuccugggcuuugggggaa

SEQ ID NO: 308672 - RNA, 32 nt, Human
acuuugccauugccauggacaaguuuggcuuc

SEQ ID NO: 308673 - RNA, 32 nt, Human
acuuugcccugcccucugccuccagggcucca

SEQ ID NO: 308674 - RNA, 32 nt, Human
acuuugccucaagcaaccucuagcucccacaa

SEQ ID NO: 308675 - RNA, 32 nt, Human
acuuugccucguacaauuaauagugauauuuu

SEQ ID NO: 308676 - RNA, 32 nt, Human
acuuugccucuuccuguuucuccugaggaugc

SEQ ID NO: 308677 - RNA, 32 nt, Human
acuuugccugcagcuucugcuuuccugaaauu

SEQ ID NO: 308678 - RNA, 32 nt, Human
acuuugccugcugcacaggagcucccaacacu

SEQ ID NO: 308679 - RNA, 32 nt, Human
acuuugcgcccacuccuagcggcaccggcuua

SEQ ID NO: 308680 - RNA, 32 nt, Human
acuuugcuaaagcagaaccucccagcucuuug

SEQ ID NO: 308681 - RNA, 32 nt, Human
acuuugcuaacugugcuccucacuuccucuuc

SEQ ID NO: 308682 - RNA, 32 nt, Human
acuuugcuaggagauacucuucugccuccuag

SEQ ID NO: 308683 - RNA, 32 nt, Human
acuuugcucccaggcuggaaugcaguggcuau

SEQ ID NO: 308684 - RNA, 32 nt, Human
acuuugcugauuuccccucuucccuucaacau

SEQ ID NO: 308685 - RNA, 32 nt, Human
acuuugcugccccaccaucuugcugacaacuu

SEQ ID NO: 308686 - RNA, 32 nt, Human
acuuugcugcuccugucuguugcccagagagg

SEQ ID NO: 308687 - RNA, 32 nt, Human
acuuugcugcuucuuucuggguuguggccgau

SEQ ID NO: 308688 - RNA, 32 nt, Human
acuuugcuuaauacuuagguagcccuuauguc

SEQ ID NO: 308689 - RNA, 32 nt, Human
acuuugcuucccaggcuggagugcaguggugc

SEQ ID NO: 308690 - RNA, 32 nt, Human
acuuuggaaacugccauuucauucacacaagg

SEQ ID NO: 308691 - RNA, 32 nt, Human
acuuuggaagcagacaaagaucacuauaagag

SEQ ID NO: 308692 - RNA, 23 nt, Human
acuuuggaaggccgaggcaggug

SEQ ID NO: 308693 - RNA, 32 nt, Human
acuuuggacacaaaccaaaacacacaccaaau

SEQ ID NO: 308694 - RNA, 32 nt, Human
acuuuggaccugccuuugucgugguuccugcc

SEQ ID NO: 308695 - RNA, 32 nt, Human
acuuuggaccugcugcccuuggcuccaauaga

SEQ ID NO: 308696 - RNA, 32 nt, Human
acuuuggaggaaucuuuugaaugugauggauc

SEQ ID NO: 308697 - RNA, 32 nt, Human
acuuuggaggagagaggcuagagagcaaagac

SEQ ID NO: 308698 - RNA, 32 nt, Human
acuuuggaggcugaagcggaaggaucccuugg

SEQ ID NO: 308699 - RNA, 32 nt, Human
acuuuggaggcugaggcaggaggauggcuuga

SEQ ID NO: 308700 - RNA, 32 nt, Human
acuuuggagggcucugacaccaugcucacaga

SEQ ID NO: 308701 - RNA, 32 nt, Human
acuuuggagguggggcucugcagcugugagau

SEQ ID NO: 308702 - RNA, 32 nt, Human
acuuuggagugaaguuuaaggaaacagucacc

SEQ ID NO: 308703 - RNA, 32 nt, Human
acuuuggauaaguacuuagaaauggaauuucc

SEQ ID NO: 308704 - RNA, 32 nt, Human
acuuuggaugcucccaucuccaccuccaguga

SEQ ID NO: 308705 - RNA, 32 nt, Human
acuuuggaugggucacuuguccucaguuuuuc

SEQ ID NO: 308706 - RNA, 32 nt, Human
acuuuggcaaugccuuggccuccuggaagcau

SEQ ID NO: 308707 - RNA, 32 nt, Human
acuuuggcagaauauuaugaacaggaagaaau

SEQ ID NO: 308708 - RNA, 32 nt, Human
acuuuggcagccaguugggcaguggcucacaa

SEQ ID NO: 308709 - RNA, 32 nt, Human
acuuuggcauaugccagccuguuccugccaca

SEQ ID NO: 308710 - RNA, 31 nt, Human
acuuuggcaucuacauuacauuuaaagccaa

SEQ ID NO: 308711 - RNA, 32 nt, Human
acuuuggccaagguggaaaaagcuuaccauga

SEQ ID NO: 308712 - RNA, 32 nt, Human
acuuuggcugugagccaggccuaggaugguuc

SEQ ID NO: 308713 - RNA, 32 nt, Human
acuuugggaagcagagguggcaggaucauucc

SEQ ID NO: 308714 - RNA, 32 nt, Human
acuuugggaagcugaggcaggaagauugagcc

SEQ ID NO: 308715 - RNA, 32 nt, Human
acuuugggaagcugaggcagguaagucacuug

SEQ ID NO: 308716 - RNA, 23 nt, Human
acuuugggagaccgagacaggug

SEQ ID NO: 308717 - RNA, 23 nt, Human
acuuugggagaccgaggcaggug

SEQ ID NO: 308718 - RNA, 32 nt, Human
acuuugggagacugaggugggagcaucacuug

SEQ ID NO: 308719 - RNA, 32 nt, Human
acuuugggagccaagguggguggaucacuuga

SEQ ID NO: 308720 - RNA, 32 nt, Human
acuuugggaggcagaggagggaggaucacuug

SEQ ID NO: 308721 - RNA, 32 nt, Human
acuuugggaggcagaggccgguggguugcuuu

SEQ ID NO: 308722 - RNA, 32 nt, Human
acuuugggaggcagaggcgggaggauugcuug

SEQ ID NO: 308723 - RNA, 32 nt, Human
acuuugggaggcagaggugggaggacugcuug

SEQ ID NO: 308724 - RNA, 32 nt, Human
acuuugggaggcagaggugggaggauugcuug

SEQ ID NO: 308725 - RNA, 32 nt, Human
acuuugggaggcagugggagaaucgcuugagc

SEQ ID NO: 308726 - RNA, 32 nt, Human
acuuugggaggccaagccagauggaucaugaa

SEQ ID NO: 308727 - RNA, 32 nt, Human
acuuugggaggccaaggcaggagaagcgcuug

SEQ ID NO: 308728 - RNA, 32 nt, Human
acuuugggaggccgaagcaggaggauugcuug

SEQ ID NO: 308729 - RNA, 23 nt, Human
acuuugggaggccgagacaggug

SEQ ID NO: 308730 - RNA, 32 nt, Human
acuuugggaggccgaggcaggagaaucgcuug

SEQ ID NO: 308731 - RNA, 32 nt, Human
acuuugggaggccgaggcaggagcaucgcuug

SEQ ID NO: 308732 - RNA, 23 nt, Human
acuuugggaggccgaggcaggua

SEQ ID NO: 308733 - RNA, 23 nt, Human
acuuugggaggccgaggcaggug

SEQ ID NO: 308734 - RNA, 32 nt, Human
acuuugggaggcuaggugggcagaucacgagg

SEQ ID NO: 308735 - RNA, 32 nt, Human
acuuugggaggcugaagcaggaggacugcuug

SEQ ID NO: 308736 - RNA, 32 nt, Human
acuuugggaggcugaagcaggaggauugcuug

SEQ ID NO: 308737 - RNA, 32 nt, Human
acuuugggaggcugagacaggagcaucugcuu

SEQ ID NO: 308738 - RNA, 23 nt, Human
acuuugggaggcugagacaggug

SEQ ID NO: 308739 - RNA, 32 nt, Human
acuuugggaggcugaggaaggggcaucacuug

SEQ ID NO: 308740 - RNA, 32 nt, Human
acuuugggaggcugaggcaggaagcacacugg

SEQ ID NO: 308741 - RNA, 32 nt, Human
acuuugggaggcugaggcaggaggaggauaac

SEQ ID NO: 308742 - RNA, 32 nt, Human
acuuugggaggcuuugggaggcugagguggga

SEQ ID NO: 308743 - RNA, 32 nt, Human
acuuugggagguaggaggaucacuugagccca

SEQ ID NO: 308744 - RNA, 23 nt, Human
acuuugggagguccaggcaggug

SEQ ID NO: 308745 - RNA, 32 nt, Human
acuuugggagguggaggcagguggaucacgau

SEQ ID NO: 308746 - RNA, 23 nt, Human
acuuugggagguggaggcgggug

SEQ ID NO: 308747 - RNA, 32 nt, Human
acuuugggagguggaggcggguggaucacaag

SEQ ID NO: 308748 - RNA, 23 nt, Human
acuuugggaguccgaggcaggug

SEQ ID NO: 308749 - RNA, 22 nt, Human
acuuugggcaagucucuguacu

SEQ ID NO: 308750 - RNA, 32 nt, Human
acuuugggcaggucacccucccugucuguaaa

SEQ ID NO: 308751 - RNA, 32 nt, Human
acuuugggcauaaaauccuucucuaaauaaau

SEQ ID NO: 308752 - RNA, 32 nt, Human
acuuugggcuuuucucaugacugugugggucg

SEQ ID NO: 308753 - RNA, 32 nt, Human
acuuuggggaaagaaaaggaagcugcaggaau

SEQ ID NO: 308754 - RNA, 32 nt, Human
acuuuggggagccaaggcaggagaaucgcuuu

SEQ ID NO: 308755 - RNA, 32 nt, Human
acuuuggggaggacaaagugggcggaucaccu

SEQ ID NO: 308756 - RNA, 32 nt, Human
acuuuggguagaagaauggugaaauuaucgau

SEQ ID NO: 308757 - RNA, 32 nt, Human
acuuugggugugugugcaugcacaugugugug

SEQ ID NO: 308758 - RNA, 32 nt, Human
acuuuggguuuuagcauuaacuuuaugcaaag

SEQ ID NO: 308759 - RNA, 21 nt, Human
acuuugguaguuguguaucug

SEQ ID NO: 308760 - RNA, 32 nt, Human
acuuuggucauuggauauuucugauccuuauu

SEQ ID NO: 308761 - RNA, 32 nt, Human
acuuugguccuaccaccucuuguuucaucuuu

SEQ ID NO: 308762 - RNA, 32 nt, Human
acuuugguguaaaauuccaccaguuuccagcc

SEQ ID NO: 308763 - RNA, 32 nt, Human
acuuugguguuucacuucaugcucugaauacu

SEQ ID NO: 308764 - RNA, 32 nt, Human
acuuugguuaagaagagaagacagccagaggc

SEQ ID NO: 308765 - RNA, 32 nt, Human
acuuugguuccauagaacaaguuuucaacuug

SEQ ID NO: 308766 - RNA, 21 nt, Human
acuuugguuuuugauaccugu

SEQ ID NO: 308767 - RNA, 32 nt, Human
acuuuguaacccaggcuggaaugcaauggcau

SEQ ID NO: 308768 - RNA, 32 nt, Human
acuuuguaacuuuuguuacugugaauucaaac

SEQ ID NO: 308769 - RNA, 32 nt, Human
acuuuguacccaucaugugcucuguuuugaca

SEQ ID NO: 308770 - RNA, 22 nt, Human
acuuuguacucccaccaccccc

SEQ ID NO: 308771 - RNA, 32 nt, Human
acuuuguagagauugacuuccuaagcuacuua

SEQ ID NO: 308772 - RNA, 23 nt, Human
acuuuguagauguuuacaucuuu

SEQ ID NO: 308773 - RNA, 32 nt, Human
acuuuguagccuuuagcacccuucccacugua

SEQ ID NO: 308774 - RNA, 32 nt, Human
acuuuguaggacuggacacagacagcagacau

SEQ ID NO: 308775 - RNA, 32 nt, Human
acuuuguagggugggggauuacugagagucag

SEQ ID NO: 308776 - RNA, 32 nt, Human
acuuugucacccaggcuagagugcaguggcau

SEQ ID NO: 308777 - RNA, 32 nt, Human
acuuugucacccaggcuagagugcaguggugc

SEQ ID NO: 308778 - RNA, 32 nt, Human
acuuugucacccaggcuggaaugcaguggcac

SEQ ID NO: 308779 - RNA, 32 nt, Human
acuuugucacccaggcuggaguauaguggcac

SEQ ID NO: 308780 - RNA, 32 nt, Human
acuuugucacccaggcuggagugcaauggcgu

SEQ ID NO: 308781 - RNA, 32 nt, Human
acuuugucacccaggcuggagugcaguggcac

SEQ ID NO: 308782 - RNA, 32 nt, Human
acuuuguccccacaugggguggggagcagagu

SEQ ID NO: 308783 - RNA, 32 nt, Human
acuuugucccccaggcuggagugcagugguac

SEQ ID NO: 308784 - RNA, 32 nt, Human
acuuugucccuggccuccaaaggcuuagggcg

SEQ ID NO: 308785 - RNA, 32 nt, Human
acuuuguccggagcugaggaagugguuucugu

SEQ ID NO: 308786 - RNA, 32 nt, Human
acuuuguccuccucguccccuaccucaacaaa

SEQ ID NO: 308787 - RNA, 32 nt, Human
acuuugucgaagaucaguuggcuguuaaguau

SEQ ID NO: 308788 - RNA, 32 nt, Human
acuuugucgcccaggccggagugcaguggugc

SEQ ID NO: 308789 - RNA, 32 nt, Human
acuuugucgcccaggcuggaguacaguggugc

SEQ ID NO: 308790 - RNA, 32 nt, Human
acuuugucgcccaggcuggagugcaguggcac

SEQ ID NO: 308791 - RNA, 32 nt, Human
acuuugucgcccaggcuggagugcaguggugu

SEQ ID NO: 308792 - RNA, 32 nt, Human
acuuugucgcccgggcaggagugcaguggcuc

SEQ ID NO: 308793 - RNA, 32 nt, Human
acuuugucuccucuguugcuucuguuucugac

SEQ ID NO: 308794 - RNA, 32 nt, Human
acuuugucuugcaggcaacagggagccuccaa

SEQ ID NO: 308795 - RNA, 32 nt, Human
acuuugucuugcauuguccuguauuuaucaca

SEQ ID NO: 308796 - RNA, 32 nt, Human
acuuugucuuucuaagguaagaagccuucacc

SEQ ID NO: 308797 - RNA, 32 nt, Human
acuuugugcccuagacuggagugcaauggcgc

SEQ ID NO: 308798 - RNA, 32 nt, Human
acuuugugccuaucuuuucacugacaauaaag

SEQ ID NO: 308799 - RNA, 32 nt, Human
acuuuguggagcaguguuuugaccuuugauac

SEQ ID NO: 308800 - RNA, 32 nt, Human
acuuuguggggcugagggagaaucacuugggc

SEQ ID NO: 308801 - RNA, 32 nt, Human
acuuugugugcucuuaaccuucugagugcugc

SEQ ID NO: 308802 - RNA, 32 nt, Human
acuuugugugguaagagguuugaguaguccua

SEQ ID NO: 308803 - RNA, 32 nt, Human
acuuugugugugugcguguguguauacauaca

SEQ ID NO: 308804 - RNA, 22 nt, Human
acuuuguguucauuucauuuca

SEQ ID NO: 308805 - RNA, 32 nt, Human
acuuuguuacccaggcuggagugcaguggcac

SEQ ID NO: 308806 - RNA, 19 nt, Human
acuuuguucauuucacuga

SEQ ID NO: 308807 - RNA, 32 nt, Human
acuuuguugcccagaggaugugcaguugucau

SEQ ID NO: 308808 - RNA, 32 nt, Human
acuuuguugcccaggcuggagcgcaguggggu

SEQ ID NO: 308809 - RNA, 32 nt, Human
acuuuguugcccaggcuggagugcaguggucu

SEQ ID NO: 308810 - RNA, 32 nt, Human
acuuuguugcccaggcuggagugcgguggcgu

SEQ ID NO: 308811 - RNA, 32 nt, Human
acuuuguugcuaucauccuccuuucucuuauu

SEQ ID NO: 308812 - RNA, 32 nt, Human
acuuuguuuagacacagauauuuggaauuagc

SEQ ID NO: 308813 - RNA, 32 nt, Human
acuuuguuucaaauccccaacccugguggcgg

SEQ ID NO: 308814 - RNA, 32 nt, Human
acuuuguuuucuaugaaaaugauauggaaacu

SEQ ID NO: 308815 - RNA, 32 nt, Human
acuuuguuuuucucccugugccauuuacccuu

SEQ ID NO: 308816 - RNA, 32 nt, Human
acuuuuaacaucuggcauucggaauggaaaug

SEQ ID NO: 308817 - RNA, 32 nt, Human
acuuuuaagggauuuuuauuaguuuaaaggua

SEQ ID NO: 308818 - RNA, 32 nt, Human
acuuuuaauuugcucuuagguucuaucucugu

SEQ ID NO: 308819 - RNA, 32 nt, Human
acuuuuacaagaaaaucucugucucuucaaca

SEQ ID NO: 308820 - RNA, 32 nt, Human
acuuuuacaccuaucuuuaaaaggaauuuaaa

SEQ ID NO: 308821 - RNA, 32 nt, Human
acuuuuaccgcccaggcuggagugcagugcca

SEQ ID NO: 308822 - RNA, 32 nt, Human
acuuuuacuuuuacacaagaugagcacgcgug

SEQ ID NO: 308823 - RNA, 32 nt, Human
acuuuuagaagagucuaaggauccucagucau

SEQ ID NO: 308824 - RNA, 32 nt, Human
acuuuuaggucauccaaccucuuuccucucug

SEQ ID NO: 308825 - RNA, 32 nt, Human
acuuuuaguagagacacaguuuugccauguug

SEQ ID NO: 308826 - RNA, 32 nt, Human
acuuuuaguucauacuguaucuucucaggaca

SEQ ID NO: 308827 - RNA, 32 nt, Human
acuuuuauauccaggaugauuacagugaugac

SEQ ID NO: 308828 - RNA, 32 nt, Human
acuuuuauaugcuuuuucucagaucugguuuc

SEQ ID NO: 308829 - RNA, 32 nt, Human
acuuuuaugcagucacggagugagugaacaug

SEQ ID NO: 308830 - RNA, 32 nt, Human
acuuuuauuucaaacccucugccuccuuccuu

SEQ ID NO: 308831 - RNA, 32 nt, Human
acuuuucaaaaugccagcaaguuuuuguuugu

SEQ ID NO: 308832 - RNA, 32 nt, Human
acuuuucaaaauuuacaaaucaggauuauaua

SEQ ID NO: 308833 - RNA, 23 nt, Human
acuuuucaaauaaaauacuugaa

SEQ ID NO: 308834 - RNA, 24 nt, Human
acuuuucaaaucuaguaauuugaa

SEQ ID NO: 308835 - RNA, 32 nt, Human
acuuuucaacuucauaaugguuaauuuuguuu

SEQ ID NO: 308836 - RNA, 32 nt, Human
acuuuucaagccuuccuuccauuguuuuucuu

SEQ ID NO: 308837 - RNA, 32 nt, Human
acuuuucaaucaggaauaaaauuccuuaaagc

SEQ ID NO: 308838 - RNA, 32 nt, Human
acuuuucacaccucccucccacacccagccua

SEQ ID NO: 308839 - RNA, 32 nt, Human
acuuuucacugaaaugguucuaaaaauauagg

SEQ ID NO: 308840 - RNA, 32 nt, Human
acuuuucagccaauaauuuauagccuuucccu

SEQ ID NO: 308841 - RNA, 32 nt, Human
acuuuucaggagaaaccugagcaugauuuugg

SEQ ID NO: 308842 - RNA, 32 nt, Human
acuuuucauccagcgccagcacggugugagag

SEQ ID NO: 308843 - RNA, 32 nt, Human
acuuuuccacagaaagauaagguaaacaagau

SEQ ID NO: 308844 - RNA, 32 nt, Human
acuuuuccaccaccugcguccaaaaagaaugu

SEQ ID NO: 308845 - RNA, 23 nt, Human
acuuuuccaccaguguauuugaa

SEQ ID NO: 308846 - RNA, 32 nt, Human
acuuuuccagccucauggguauggcacucuua

SEQ ID NO: 308847 - RNA, 32 nt, Human
acuuuuccaggccacaauuguaaaagcuguaa

SEQ ID NO: 308848 - RNA, 32 nt, Human
acuuuuccagggaggaagaggcagcaggagcu

SEQ ID NO: 308849 - RNA, 32 nt, Human
acuuuuccaguaaaugaagcaagcacugaaua

SEQ ID NO: 308850 - RNA, 32 nt, Human
acuuuucccuauuuccccuccuaucccucugc

SEQ ID NO: 308851 - RNA, 23 nt, Human
acuuuucccuucucaguuccucu

SEQ ID NO: 308852 - RNA, 32 nt, Human
acuuuuccuaguuuucaguauuacuuucaugu

SEQ ID NO: 308853 - RNA, 32 nt, Human
acuuuuccucauucuguggggccauaaaccua

SEQ ID NO: 308854 - RNA, 32 nt, Human
acuuuuccuccaccuuccucugugcccgagcu

SEQ ID NO: 308855 - RNA, 32 nt, Human
acuuuuccuguuguuguacacacacaacagaa

SEQ ID NO: 308856 - RNA, 32 nt, Human
acuuuucgagagaagggaauagggaagacagc

SEQ ID NO: 308857 - RNA, 32 nt, Human
acuuuucggaggccgaggagggcagaucacuu

SEQ ID NO: 308858 - RNA, 32 nt, Human
acuuuucuaaucauuguacauuucucagagug

SEQ ID NO: 308859 - RNA, 20 nt, Human
acuuuucuaccuugagccaa

SEQ ID NO: 308860 - RNA, 32 nt, Human
acuuuucuccccucucuuucuaagagaccuga

SEQ ID NO: 308861 - RNA, 32 nt, Human
acuuuucucccuuuucccuccuguggcuugca

SEQ ID NO: 308862 - RNA, 32 nt, Human
acuuuucuccuuggcuucuguuggcacucacc

SEQ ID NO: 308863 - RNA, 32 nt, Human
acuuuucugaaaaaucuccauuguugaggaga

SEQ ID NO: 308864 - RNA, 32 nt, Human
acuuuucuguaacgccugcuugucccugccca

SEQ ID NO: 308865 - RNA, 23 nt, Human
acuuuucuguaaguuucuauacu

SEQ ID NO: 308866 - RNA, 32 nt, Human
acuuuucuugacuugccuguuuuggccauuag

SEQ ID NO: 308867 - RNA, 32 nt, Human
acuuuugaaaaauaagcuauucuauucaguuu

SEQ ID NO: 308868 - RNA, 32 nt, Human
acuuuugaagcacaaauuuauuggcauuuaau

SEQ ID NO: 308869 - RNA, 32 nt, Human
acuuuugacauuugggaugaaaagccauaugu

SEQ ID NO: 308870 - RNA, 32 nt, Human
acuuuugacccaccccuuccuggaucacuccu

SEQ ID NO: 308871 - RNA, 32 nt, Human
acuuuugagauuuauucaguccagccaagaga

SEQ ID NO: 308872 - RNA, 32 nt, Human
acuuuugaggcugaggcgggcggauuaccuga

SEQ ID NO: 308873 - RNA, 32 nt, Human
acuuuugauuguacaauuguacauuuguauac

SEQ ID NO: 308874 - RNA, 32 nt, Human
acuuuugauuugguucuugccaauuguuuuau

SEQ ID NO: 308875 - RNA, 32 nt, Human
acuuuugauuuucuugaguuuagaugaaguug

SEQ ID NO: 308876 - RNA, 32 nt, Human
acuuuugcacaggcaccagcuaccucagggac

SEQ ID NO: 308877 - RNA, 32 nt, Human
acuuuugcagauggaggaauuucuugauuaau

SEQ ID NO: 308878 - RNA, 32 nt, Human
acuuuugcagccaguucccaccaauaugcccc

SEQ ID NO: 308879 - RNA, 32 nt, Human
acuuuugccaugagccucucugagcuuguuug

SEQ ID NO: 308880 - RNA, 32 nt, Human
acuuuugccaugaguacacaucagauaucuuu

SEQ ID NO: 308881 - RNA, 32 nt, Human
acuuuugcccagaaaaauggcgaauacaugaa

SEQ ID NO: 308882 - RNA, 32 nt, Human
acuuuugcccaggcuggagugcaguggcguga

SEQ ID NO: 308883 - RNA, 32 nt, Human
acuuuuggaagaaaacagccaaaguuggccua

SEQ ID NO: 308884 - RNA, 32 nt, Human
acuuuuggaaggcaugggguugccaguaccac

SEQ ID NO: 308885 - RNA, 32 nt, Human
acuuuuggcaaaaauagcaaaacuucaaagac

SEQ ID NO: 308886 - RNA, 32 nt, Human
acuuuugggaccccacacacuccaggugggau

SEQ ID NO: 308887 - RNA, 32 nt, Human
acuuuugggaggcagagaugggaggauacuug

SEQ ID NO: 308888 - RNA, 32 nt, Human
acuuuugggaggcugaggcggguggaucacuu

SEQ ID NO: 308889 - RNA, 32 nt, Human
acuuuugggugagguccaaagaggagagcugu

SEQ ID NO: 308890 - RNA, 23 nt, Human
acuuuuguccaaucagcuucaga

SEQ ID NO: 308891 - RNA, 32 nt, Human
acuuuugugaacccccaaaaucugagacaggu

SEQ ID NO: 308892 - RNA, 32 nt, Human
acuuuugugggccuccagcuucucucagaguc

SEQ ID NO: 308893 - RNA, 32 nt, Human
acuuuuguuccuuccugcugggcugccucgug

SEQ ID NO: 308894 - RNA, 32 nt, Human
acuuuuguugauguuuauuucagaaucuugug

SEQ ID NO: 308895 - RNA, 32 nt, Human
acuuuuguugcccaggcuggagugcaacggcg

SEQ ID NO: 308896 - RNA, 32 nt, Human
acuuuuguugcccaggcuggagugcaaugaug

SEQ ID NO: 308897 - RNA, 32 nt, Human
acuuuuguugcccaggcuggagugcaauggug

SEQ ID NO: 308898 - RNA, 32 nt, Human
acuuuuguugcccaggcuggaguguaguggcg

SEQ ID NO: 308899 - RNA, 32 nt, Human
acuuuuguugcccaggcuggaguucaguggcg

SEQ ID NO: 308900 - RNA, 32 nt, Human
acuuuuguugcgcaggcuggagugcaauggug

SEQ ID NO: 308901 - RNA, 32 nt, Human
acuuuuguuguuguuguuguucuggguaacuc

SEQ ID NO: 308902 - RNA, 32 nt, Human
acuuuuguuuuccucaugagucaacuugaagg

SEQ ID NO: 308903 - RNA, 32 nt, Human
acuuuuuaaagcuagcugugucgaguuaaaga

SEQ ID NO: 308904 - RNA, 32 nt, Human
acuuuuuaaggcagauuuuuauuuccuuugaa

SEQ ID NO: 308905 - RNA, 32 nt, Human
acuuuuuacuuucugcuaucucccaucucccg

SEQ ID NO: 308906 - RNA, 32 nt, Human
acuuuuuagaaaacagaaaugcccuugauggu

SEQ ID NO: 308907 - RNA, 32 nt, Human
acuuuuuagaaaacuaaucuccuuuaucaucc

SEQ ID NO: 308908 - RNA, 32 nt, Human
acuuuuuagagagauggggucuugccauauuu

SEQ ID NO: 308909 - RNA, 32 nt, Human
acuuuuuagagugcacugagugcacuuuacau

SEQ ID NO: 308910 - RNA, 32 nt, Human
acuuuuuagccugucuuuuguuauuucugccu

SEQ ID NO: 308911 - RNA, 32 nt, Human
acuuuuuaucauuaggaaacaaaaagaauuua

SEQ ID NO: 308912 - RNA, 32 nt, Human
acuuuuuauggugcugauuaauggugaucaag

SEQ ID NO: 308913 - RNA, 32 nt, Human
acuuuuuaugucaucguaaaagcuggaaaaau

SEQ ID NO: 308914 - RNA, 32 nt, Human
acuuuuuauuuuuauggggguggguggugcuu

SEQ ID NO: 308915 - RNA, 32 nt, Human
acuuuuucaagucacacaauacacucuuuaug

SEQ ID NO: 308916 - RNA, 32 nt, Human
acuuuuucacuacuuacaucuucucacauuuc

SEQ ID NO: 308917 - RNA, 32 nt, Human
acuuuuucagcccuuuacuuucuggcugaagc

SEQ ID NO: 308918 - RNA, 32 nt, Human
acuuuuucauucuuuuauaccgcugcauagua

SEQ ID NO: 308919 - RNA, 32 nt, Human
acuuuuucauuucaauucuauuacuucuaauu

SEQ ID NO: 308920 - RNA, 32 nt, Human
acuuuuuccaugggauacaguuuaggacacgg

SEQ ID NO: 308921 - RNA, 32 nt, Human
acuuuuuccuaaaugucccaacacuuacauac

SEQ ID NO: 308922 - RNA, 32 nt, Human
acuuuuuccugccucagcucuguacacaugau

SEQ ID NO: 308923 - RNA, 32 nt, Human
acuuuuuccuuccucccugucuaggcauuggg

SEQ ID NO: 308924 - RNA, 32 nt, Human
acuuuuucuacaugcaguucccagggaaacug

SEQ ID NO: 308925 - RNA, 19 nt, Human
acuuuuucuucuuugcaaa

SEQ ID NO: 308926 - RNA, 32 nt, Human
acuuuuucuugaaaggggaugacagcauggga

SEQ ID NO: 308927 - RNA, 17 nt, Human
acuuuuucuuucucaca

SEQ ID NO: 308928 - RNA, 31 nt, Human
acuuuuugaccaauuucagccaacauuagug

SEQ ID NO: 308929 - RNA, 32 nt, Human
acuuuuugagagguugggcuggcagaucauga

SEQ ID NO: 308930 - RNA, 32 nt, Human
acuuuuugcaccauguacccauggcuuacacu

SEQ ID NO: 308931 - RNA, 32 nt, Human
acuuuuuggcuggagcggagaugaggggccac

SEQ ID NO: 308932 - RNA, 32 nt, Human
acuuuuuggggugggaaaggugaaugccagug

SEQ ID NO: 308933 - RNA, 25 nt, Human
acuuuuuuauuucuguauuuuucca

SEQ ID NO: 308934 - RNA, 19 nt, Human
agaaaaaagaaugucagaa

SEQ ID NO: 308935 - RNA, 19 nt, Human
agaaaaaaggauugacaga

SEQ ID NO: 308936 - RNA, 24 nt, Human
agaaaaaaucagacacuucaggga

SEQ ID NO: 308937 - RNA, 22 nt, Human
agaaaaaauuuggaaggaaguu

SEQ ID NO: 308938 - RNA, 32 nt, Human
agaaaaacacaaacaaaaacagacucccacug

SEQ ID NO: 308939 - RNA, 32 nt, Human
agaaaaacacaagauaaacagccccaggaacc

SEQ ID NO: 308940 - RNA, 32 nt, Human
agaaaaacacagauuuggccuucgcacauuuu

SEQ ID NO: 308941 - RNA, 32 nt, Human
agaaaaacacauuucuuauaccaaaauuugug

SEQ ID NO: 308942 - RNA, 32 nt, Human
agaaaaacacuuguaaguugcuaaacgaguca

SEQ ID NO: 308943 - RNA, 32 nt, Human
agaaaaacagguaagaauaaagcaauguugcc

SEQ ID NO: 308944 - RNA, 32 nt, Human
agaaaaaccaaaacaguagcauaugcaggcaa

SEQ ID NO: 308945 - RNA, 32 nt, Human
agaaaaacccuacaaauguaaagaauguggaa

SEQ ID NO: 308946 - RNA, 32 nt, Human
agaaaaacccuacaaaugugaagaauguggca

SEQ ID NO: 308947 - RNA, 32 nt, Human
agaaaaacccuacaaaugugaagaauguguca

SEQ ID NO: 308948 - RNA, 21 nt, Human
agaaaaaccucucucauucca

SEQ ID NO: 308949 - RNA, 32 nt, Human
agaaaaaccuuacaaaugugaagaaugugaca

SEQ ID NO: 308950 - RNA, 32 nt, Human
agaaaaacgaauguucaucugcuuuaaucagu

SEQ ID NO: 308951 - RNA, 32 nt, Human
agaaaaacggaucacagccacuauggaugaca

SEQ ID NO: 308952 - RNA, 32 nt, Human
agaaaaacucagaacauugagcuggcuuuacc

SEQ ID NO: 308953 - RNA, 32 nt, Human
agaaaaacucagacuuggcauuuucacaauaa

SEQ ID NO: 308954 - RNA, 32 nt, Human
agaaaaacuguaauccugggguugguauggag

SEQ ID NO: 308955 - RNA, 32 nt, Human
agaaaaacuguaauccugggguugguauguag

SEQ ID NO: 308956 - RNA, 32 nt, Human
agaaaaacuguuggauuucaucucugcagggc

SEQ ID NO: 308957 - RNA, 32 nt, Human
agaaaaacuguuuacuucuucacuuucgaagu

SEQ ID NO: 308958 - RNA, 32 nt, Human
agaaaaacuuucagauucaucucucauuuuau

SEQ ID NO: 308959 - RNA, 32 nt, Human
agaaaaacuuuuccucccucuucaucaacaua

SEQ ID NO: 308960 - RNA, 32 nt, Human
agaaaaacuuuucuucccagcuuuucaaugug

SEQ ID NO: 308961 - RNA, 32 nt, Human
agaaaaagaaaaucugucuuucuaauaucccc

SEQ ID NO: 308962 - RNA, 19 nt, Human
agaaaaagaaggugacagg

SEQ ID NO: 308963 - RNA, 25 nt, Human
agaaaaagacaguuugagagagaag

SEQ ID NO: 308964 - RNA, 32 nt, Human
agaaaaagacugcagaaaggagagguggggcu

SEQ ID NO: 308965 - RNA, 32 nt, Human
agaaaaagacugcagagguagugaguucuuug

SEQ ID NO: 308966 - RNA, 32 nt, Human
agaaaaagagccccuccucugggguaaugagc

SEQ ID NO: 308967 - RNA, 32 nt, Human
agaaaaagagcuuccuaaauugcacauuuuug

SEQ ID NO: 308968 - RNA, 32 nt, Human
agaaaaagaggaagaagaagaaggaggaaaau

SEQ ID NO: 308969 - RNA, 32 nt, Human
agaaaaagaggaagaagaagaaggaggaggag

SEQ ID NO: 308970 - RNA, 32 nt, Human
agaaaaagagguuuacuuggacuuacaguucc

SEQ ID NO: 308971 - RNA, 32 nt, Human
agaaaaagaucuuucauuuugcaccugcagcc

SEQ ID NO: 308972 - RNA, 22 nt, Human
agaaaaagauucugaaggaacu

SEQ ID NO: 308973 - RNA, 31 nt, Human
agaaaaagcaagggcagcggcauucacacag

SEQ ID NO: 308974 - RNA, 32 nt, Human
agaaaaagcuguaagaaugaagcaaugaauca

SEQ ID NO: 308975 - RNA, 32 nt, Human
agaaaaagcuuuguuuuuauaacugguaaaaa

SEQ ID NO: 308976 - RNA, 32 nt, Human
agaaaaaggagagaugaaaaaggaggaugagg

SEQ ID NO: 308977 - RNA, 24 nt, Human
agaaaaaggagggagagagaggag

SEQ ID NO: 308978 - RNA, 32 nt, Human
agaaaaagggagauucuuaagagaugggaaau

SEQ ID NO: 308979 - RNA, 32 nt, Human
agaaaaaggggaggguuaaggaaucauuucag

SEQ ID NO: 308980 - RNA, 32 nt, Human
agaaaaagugacagaagcaguccaguaagauu

SEQ ID NO: 308981 - RNA, 32 nt, Human
agaaaaagugauuugucauugcuuuauagacu

SEQ ID NO: 308982 - RNA, 20 nt, Human
agaaaaaguuaugucaugaa

SEQ ID NO: 308983 - RNA, 32 nt, Human
agaaaaauaaaaaggacuacuuaaacauuugu

SEQ ID NO: 308984 - RNA, 32 nt, Human
agaaaaauaagaaggcugucccaagggcauuu

SEQ ID NO: 308985 - RNA, 32 nt, Human
agaaaaauagcuccaccucacuucucuccuac

SEQ ID NO: 308986 - RNA, 32 nt, Human
agaaaaauauauuucauuuucuaggcacaacu

SEQ ID NO: 308987 - RNA, 32 nt, Human
agaaaaauauccauuuuauuaccauuuucuau

SEQ ID NO: 308988 - RNA, 32 nt, Human
agaaaaaucaaaacaucauguagggugaccua

SEQ ID NO: 308989 - RNA, 32 nt, Human
agaaaaaucaaauugaauuagugauacaauaa

SEQ ID NO: 308990 - RNA, 32 nt, Human
agaaaaaucgaaagugcacagcacuuaaaggg

SEQ ID NO: 308991 - RNA, 32 nt, Human
agaaaaaucugaaauuuccaucuggggauuaa

SEQ ID NO: 308992 - RNA, 32 nt, Human
agaaaaaucuguccuuuuugguaccaaaccug

SEQ ID NO: 308993 - RNA, 32 nt, Human
agaaaaaucuuggggcuuccaauugacccauc

SEQ ID NO: 308994 - RNA, 32 nt, Human
agaaaaaugagcugggugugguggcgggcccc

SEQ ID NO: 308995 - RNA, 32 nt, Human
agaaaaaugugcagcuugacucugcugaggaa

SEQ ID NO: 308996 - RNA, 32 nt, Human
agaaaaaugugucuucagcuggcagcauuuau

SEQ ID NO: 308997 - RNA, 32 nt, Human
agaaaaauuaugcaggagauggcuaggauuag

SEQ ID NO: 308998 - RNA, 24 nt, Human
agaaaaauuugaagucugaucaga

SEQ ID NO: 308999 - RNA, 32 nt, Human
agaaaacaaaaacaaacagagcgagaagggcc

SEQ ID NO: 309000 - RNA, 28 nt, Human
agaaaacaaacaaaaacaaaacaaaaca

SEQ ID NO: 309001 - RNA, 23 nt, Human
agaaaacaaacaaacaaacaaaa

SEQ ID NO: 309002 - RNA, 22 nt, Human
agaaaacaaacaaacaacaaca

SEQ ID NO: 309003 - RNA, 32 nt, Human
agaaaacaaggcagaaugaucauucccagaaa

SEQ ID NO: 309004 - RNA, 32 nt, Human
agaaaacaaguauagucagguauucucuccau

SEQ ID NO: 309005 - RNA, 32 nt, Human
agaaaacacaagugccuucuccacggugcaau

SEQ ID NO: 309006 - RNA, 32 nt, Human
agaaaacacagcaacagaagaccuauaccccg

SEQ ID NO: 309007 - RNA, 32 nt, Human
agaaaacagaaagagacauuguucuuuuccug

SEQ ID NO: 309008 - RNA, 32 nt, Human
agaaaacagaaagcaacaggagaaagaugaca

SEQ ID NO: 309009 - RNA, 32 nt, Human
agaaaacagaaaggauccccuuucuccaguuu

SEQ ID NO: 309010 - RNA, 32 nt, Human
agaaaacagaaaucugcaucucagccugagac

SEQ ID NO: 309011 - RNA, 32 nt, Human
agaaaacagauggcuggagaugacauuuaucc

SEQ ID NO: 309012 - RNA, 32 nt, Human
agaaaacagcagagccaagugaagaucaccua

SEQ ID NO: 309013 - RNA, 32 nt, Human
agaaaacagcauggccaguaaacugagcaagg

SEQ ID NO: 309014 - RNA, 32 nt, Human
agaaaacagccagcaggaggagcuucaucugu

SEQ ID NO: 309015 - RNA, 32 nt, Human
agaaaacagcucccuauuugaucuuaaaauaa

SEQ ID NO: 309016 - RNA, 32 nt, Human
agaaaacagcuucacuccucaggaaguaccau

SEQ ID NO: 309017 - RNA, 32 nt, Human
agaaaacagcuuucgaaagugcccucaaagaa

SEQ ID NO: 309018 - RNA, 32 nt, Human
agaaaacaggaccaggaacagcagaaaccucc

SEQ ID NO: 309019 - RNA, 32 nt, Human
agaaaacagggugcagcgucccccagguuggc

SEQ ID NO: 309020 - RNA, 32 nt, Human
agaaaacaucaauauaucaccuaccaucauuu

SEQ ID NO: 309021 - RNA, 32 nt, Human
agaaaacaucggauuuacauuuuaagguaaac

SEQ ID NO: 309022 - RNA, 32 nt, Human
agaaaacauuuaaaaugacuuuuaguuaugua

SEQ ID NO: 309023 - RNA, 32 nt, Human
agaaaacauuuaacauaaugguugugaaaugu

SEQ ID NO: 309024 - RNA, 32 nt, Human
agaaaacauuucuuccuccuuuccuucuggag

SEQ ID NO: 309025 - RNA, 21 nt, Human
agaaaaccaaaaaccaaaaca

SEQ ID NO: 309026 - RNA, 32 nt, Human
agaaaaccaaguguccggauggcaggggccag

SEQ ID NO: 309027 - RNA, 32 nt, Human
agaaaaccacugcaacagacucauugaagaaa

SEQ ID NO: 309028 - RNA, 32 nt, Human
agaaaaccaggaugaggccggagggaggaaaa

SEQ ID NO: 309029 - RNA, 17 nt, Human
agaaaaccagucaagga

SEQ ID NO: 309030 - RNA, 32 nt, Human
agaaaaccaguuccaaccacagcuuuaccacc

SEQ ID NO: 309031 - RNA, 32 nt, Human
agaaaaccauauggggacuauagugcaaccua

SEQ ID NO: 309032 - RNA, 24 nt, Human
agaaaacccaaaauauuaugcaaa

SEQ ID NO: 309033 - RNA, 32 nt, Human
agaaaacccacugccuagaggccaucuuaaag

SEQ ID NO: 309034 - RNA, 32 nt, Human
agaaaacccacugucugugcuagcacaaugau

SEQ ID NO: 309035 - RNA, 32 nt, Human
agaaaacccagacugcauucaguguccucagu

SEQ ID NO: 309036 - RNA, 32 nt, Human
agaaaacccagaggaaagcuguugaugcugaa

SEQ ID NO: 309037 - RNA, 22 nt, Human
agaaaacccaggaggacgcaga

SEQ ID NO: 309038 - RNA, 18 nt, Human
agaaaacccgaguugggg

SEQ ID NO: 309039 - RNA, 32 nt, Human
agaaaacccuucaaaaguucagucuagucugg

SEQ ID NO: 309040 - RNA, 18 nt, Human
agaaaaccgaaacaaaac

SEQ ID NO: 309041 - RNA, 17 nt, Human
agaaaaccgagcugggg

SEQ ID NO: 309042 - RNA, 32 nt, Human
agaaaaccgcacccucaccucccuucaccugc

SEQ ID NO: 309043 - RNA, 20 nt, Human
agaaaaccugaugcugggga

SEQ ID NO: 309044 - RNA, 32 nt, Human
agaaaacuaagcucaguaacaagaaggcauaa

SEQ ID NO: 309045 - RNA, 17 nt, Human
agaaaacuacaugggga

SEQ ID NO: 309046 - RNA, 18 nt, Human
agaaaacucaacugugga

SEQ ID NO: 309047 - RNA, 18 nt, Human
agaaaacucagaaaggga

SEQ ID NO: 309048 - RNA, 32 nt, Human
agaaaacucagccucccuacagggugagcacc

SEQ ID NO: 309049 - RNA, 17 nt, Human
agaaaacucagcucagg

SEQ ID NO: 309050 - RNA, 17 nt, Human
agaaaacucaguggaga

SEQ ID NO: 309051 - RNA, 19 nt, Human
agaaaacucauacuggaga

SEQ ID NO: 309052 - RNA, 32 nt, Human
agaaaacuccacugacugucgggcuuuaaaaa

SEQ ID NO: 309053 - RNA, 17 nt, Human
agaaaacuccacugggg

SEQ ID NO: 309054 - RNA, 32 nt, Human
agaaaacucccagaaguggaguuuuccuuauu

SEQ ID NO: 309055 - RNA, 17 nt, Human
agaaaacucccaggggg

SEQ ID NO: 309056 - RNA, 32 nt, Human
agaaaacucccugagucucucuucacaaauga

SEQ ID NO: 309057 - RNA, 19 nt, Human
agaaaacucccuugggaga

SEQ ID NO: 309058 - RNA, 32 nt, Human
agaaaacuccuccaaaagcagcucucacuauc

SEQ ID NO: 309059 - RNA, 21 nt, Human
agaaaacuccuuaugagggga

SEQ ID NO: 309060 - RNA, 17 nt, Human
agaaaacucuucguggg

SEQ ID NO: 309061 - RNA, 17 nt, Human
agaaaacugaagggggg

SEQ ID NO: 309062 - RNA, 18 nt, Human
agaaaacugaggccaggg

SEQ ID NO: 309063 - RNA, 32 nt, Human
agaaaacugagugcaaaggaagaaaaauauau

SEQ ID NO: 309064 - RNA, 32 nt, Human
agaaaacugauuagaagaauacuugauguuua

SEQ ID NO: 309065 - RNA, 31 nt, Human
agaaaacugcacaauaaaaccaaagccucug

SEQ ID NO: 309066 - RNA, 18 nt, Human
agaaaacugcaguccggg

SEQ ID NO: 309067 - RNA, 16 nt, Human
agaaaacugcugagga

SEQ ID NO: 309068 - RNA, 21 nt, Human
agaaaacugcugcagauggaa

SEQ ID NO: 309069 - RNA, 18 nt, Human
agaaaacuggccacagga

SEQ ID NO: 309070 - RNA, 17 nt, Human
agaaaacuggucaagga

SEQ ID NO: 309071 - RNA, 32 nt, Human
agaaaacugucagcucugcuuucuaaggaacc

SEQ ID NO: 309072 - RNA, 18 nt, Human
agaaaacugucugggaga

SEQ ID NO: 309073 - RNA, 18 nt, Human
agaaaacuuagccaugga

SEQ ID NO: 309074 - RNA, 32 nt, Human
agaaaacuucaagacaucaccaucagcaggcu

SEQ ID NO: 309075 - RNA, 18 nt, Human
agaaaacuucagcacagg

SEQ ID NO: 309076 - RNA, 19 nt, Human
agaaaacuucaguuuucgg

SEQ ID NO: 309077 - RNA, 32 nt, Human
agaaaacuuggcuugugugauggugcagucau

SEQ ID NO: 309078 - RNA, 32 nt, Human
agaaaagaaaagaaaagaaagaaaggaauuag

SEQ ID NO: 309079 - RNA, 32 nt, Human
agaaaagaaagaaagaaagaaagaaagaaaac

SEQ ID NO: 309080 - RNA, 32 nt, Human
agaaaagaaagaaagaaagaaagagaaaaaga

SEQ ID NO: 309081 - RNA, 22 nt, Human
agaaaagaaaugcaaguucaca

SEQ ID NO: 309082 - RNA, 32 nt, Human
agaaaagaacaaggaaaaauggauguuucgcu

SEQ ID NO: 309083 - RNA, 32 nt, Human
agaaaagaagccugggcggagagcagagcccg

SEQ ID NO: 309084 - RNA, 23 nt, Human
agaaaagaaggaaaaaggucaca

SEQ ID NO: 309085 - RNA, 32 nt, Human
agaaaagaauguacauuuagacauuuggguuc

SEQ ID NO: 309086 - RNA, 27 nt, Human
agaaaagaauuccucccuggauggaag

SEQ ID NO: 309087 - RNA, 23 nt, Human
agaaaagacacugaaugagguga

SEQ ID NO: 309088 - RNA, 32 nt, Human
agaaaagacagaggcagaaaggaagauggcuu

SEQ ID NO: 309089 - RNA, 32 nt, Human
agaaaagacauaagcaaagacuaugaggaaua

SEQ ID NO: 309090 - RNA, 22 nt, Human
agaaaagacuagaaaauauaca

SEQ ID NO: 309091 - RNA, 32 nt, Human
agaaaagagaagaggaagggaggccauaucua

SEQ ID NO: 309092 - RNA, 23 nt, Human
agaaaagagacgcaaagugucca

SEQ ID NO: 309093 - RNA, 24 nt, Human
agaaaagagaugugaaagugcaca

SEQ ID NO: 309094 - RNA, 32 nt, Human
agaaaagagcagcaacagcagaggcuggacuc

SEQ ID NO: 309095 - RNA, 32 nt, Human
agaaaagagcgacacagacaaugacuggccaa

SEQ ID NO: 309096 - RNA, 32 nt, Human
agaaaagaggaaaccaaaugaagaggaugugu

SEQ ID NO: 309097 - RNA, 32 nt, Human
agaaaagaggaggaggaggaggaagaaagaaa

SEQ ID NO: 309098 - RNA, 32 nt, Human
agaaaagagggagggguggcagaggaucugca

SEQ ID NO: 309099 - RNA, 23 nt, Human
agaaaagaugugcagauaucaca

SEQ ID NO: 309100 - RNA, 32 nt, Human
agaaaagauuugcacaaagaaaaugcuaauaa

SEQ ID NO: 309101 - RNA, 18 nt, Human
agaaaagcaaaaaugcua

SEQ ID NO: 309102 - RNA, 32 nt, Human
agaaaagcaaaacuacacagucuugacugugu

SEQ ID NO: 309103 - RNA, 32 nt, Human
agaaaagcacagaugcuguuucggcugcugac

SEQ ID NO: 309104 - RNA, 32 nt, Human
agaaaagcagacucccugugguggcgaccagu

SEQ ID NO: 309105 - RNA, 32 nt, Human
agaaaagcagaguugagauacaauucuauaga

SEQ ID NO: 309106 - RNA, 32 nt, Human
agaaaagcagcccagagucagucauugaagcc

SEQ ID NO: 309107 - RNA, 32 nt, Human
agaaaagcagggcuggggagaaugagauggac

SEQ ID NO: 309108 - RNA, 32 nt, Human
agaaaagcauuugccuacagaaauaaaccauu

SEQ ID NO: 309109 - RNA, 32 nt, Human
agaaaagcauuuuaaaaguuugaggaaucuuu

SEQ ID NO: 309110 - RNA, 32 nt, Human
agaaaagcauuuuuauuuguuuauuuccucau

SEQ ID NO: 309111 - RNA, 32 nt, Human
agaaaagccauacaaaugagaagaauguggca

SEQ ID NO: 309112 - RNA, 32 nt, Human
agaaaagccaucauuuucuccuggauuaaucu

SEQ ID NO: 309113 - RNA, 32 nt, Human
agaaaagcccagaagaaaucccauuuuggguc

SEQ ID NO: 309114 - RNA, 32 nt, Human
agaaaagccccaugcuuucauuuuucacuugg

SEQ ID NO: 309115 - RNA, 32 nt, Human
agaaaagccuccaggaaaucuugagagccugu

SEQ ID NO: 309116 - RNA, 32 nt, Human
agaaaagccugaucccugucaguggaaaaggg

SEQ ID NO: 309117 - RNA, 32 nt, Human
agaaaagcggucuugcuuuguugcccagacug

SEQ ID NO: 309118 - RNA, 32 nt, Human
agaaaagcuaacaacuaggaagaaaaggccaa

SEQ ID NO: 309119 - RNA, 32 nt, Human
agaaaagcuaccaagucuugagugcuuuguag

SEQ ID NO: 309120 - RNA, 32 nt, Human
agaaaagcugaaaauucuaaacaucagagcgc

SEQ ID NO: 309121 - RNA, 32 nt, Human
agaaaagcugggucagcaucuggccaccgagc

SEQ ID NO: 309122 - RNA, 32 nt, Human
agaaaagcuguggaaaagagucuuagagauuu

SEQ ID NO: 309123 - RNA, 32 nt, Human
agaaaagcuuccucuuagaucuggccacucag

SEQ ID NO: 309124 - RNA, 32 nt, Human
agaaaagcuucugauggacaugggcuucugug

SEQ ID NO: 309125 - RNA, 32 nt, Human
agaaaaggaaagucugagcaguuuugauuaga

SEQ ID NO: 309126 - RNA, 32 nt, Human
agaaaaggaagaggaaggaaggaaauauuuug

SEQ ID NO: 309127 - RNA, 32 nt, Human
agaaaaggaagaggaggaaaaacaagugugug

SEQ ID NO: 309128 - RNA, 32 nt, Human
agaaaaggaagcaagaaagaaagggaaauuaa

SEQ ID NO: 309129 - RNA, 23 nt, Human
agaaaaggaauaggaucaagaga

SEQ ID NO: 309130 - RNA, 32 nt, Human
agaaaaggaccaaaauaaaagaaaaaugaauu

SEQ ID NO: 309131 - RNA, 32 nt, Human
agaaaaggacuggacggaggaggaccgggccc

SEQ ID NO: 309132 - RNA, 32 nt, Human
agaaaaggagaaaaggaccuuugaaagaugug

SEQ ID NO: 309133 - RNA, 32 nt, Human
agaaaaggagaaaagggagaugagggaucuca

SEQ ID NO: 309134 - RNA, 32 nt, Human
agaaaaggagaaggaaagaagacugggggcag

SEQ ID NO: 309135 - RNA, 32 nt, Human
agaaaaggagagaagaugucaguauguuuagu

SEQ ID NO: 309136 - RNA, 32 nt, Human
agaaaaggagcgcaaggcagaggcucugaagc

SEQ ID NO: 309137 - RNA, 32 nt, Human
agaaaaggaggaaggaaggaaaaggugauucg

SEQ ID NO: 309138 - RNA, 24 nt, Human
agaaaaggaguuaggagaaagaag

SEQ ID NO: 309139 - RNA, 32 nt, Human
agaaaaggcaaccugccuccagccugaaauac

SEQ ID NO: 309140 - RNA, 32 nt, Human
agaaaaggcugcagacagucacagggaagugc

SEQ ID NO: 309141 - RNA, 22 nt, Human
agaaaaggcuucaaaggaacuu

SEQ ID NO: 309142 - RNA, 32 nt, Human
agaaaagggagcuagggaaggagcaguggacu

SEQ ID NO: 309143 - RNA, 32 nt, Human
agaaaagggaggaaacggcagagccagagaga

SEQ ID NO: 309144 - RNA, 32 nt, Human
agaaaagggauuauuauaucaaaagccugaag

SEQ ID NO: 309145 - RNA, 32 nt, Human
agaaaagggccagggcccugagggccuagcau

SEQ ID NO: 309146 - RNA, 32 nt, Human
agaaaaggggcagacuccucacauuccagcac

SEQ ID NO: 309147 - RNA, 32 nt, Human
agaaaagguagaaagagaagacccagagugaa

SEQ ID NO: 309148 - RNA, 24 nt, Human
agaaaaggugacgcgagaaggaag

SEQ ID NO: 309149 - RNA, 32 nt, Human
agaaaaguaauggaagacaggaagaaaagaag

SEQ ID NO: 309150 - RNA, 21 nt, Human
agaaaaguaucccggaagcuc

SEQ ID NO: 309151 - RNA, 32 nt, Human
agaaaagucauggaagacaggaagaaaggaag

SEQ ID NO: 309152 - RNA, 32 nt, Human
agaaaaguccugguacuccacacugcugcggu

SEQ ID NO: 309153 - RNA, 21 nt, Human
agaaaagugaagaaggaacuu

SEQ ID NO: 309154 - RNA, 21 nt, Human
agaaaagugauucagugauuu

SEQ ID NO: 309155 - RNA, 32 nt, Human
agaaaagugggcagugguggcacgggagcagg

SEQ ID NO: 309156 - RNA, 32 nt, Human
agaaaagugucugcuccuagccaagaucuccu

SEQ ID NO: 309157 - RNA, 32 nt, Human
agaaaaguuacccgagggaaaauaaauacagu

SEQ ID NO: 309158 - RNA, 32 nt, Human
agaaaaguucuaauuuucauuagcaauuaaua

SEQ ID NO: 309159 - RNA, 32 nt, Human
agaaaaguucucugcagccugguuugacagcg

SEQ ID NO: 309160 - RNA, 32 nt, Human
agaaaaguugaugauagauugccuucacccuc

SEQ ID NO: 309161 - RNA, 32 nt, Human
agaaaaguugcugauugcaaugguuaugggaa

SEQ ID NO: 309162 - RNA, 32 nt, Human
agaaaauaacagcaaccuauuuacauacauaa

SEQ ID NO: 309163 - RNA, 32 nt, Human
agaaaauaacauccgaucaguugcauuucccu

SEQ ID NO: 309164 - RNA, 32 nt, Human
agaaaauaaccagguauucuuagagcuauaga

SEQ ID NO: 309165 - RNA, 32 nt, Human
agaaaauaaucaagacuugcucugcagccacu

SEQ ID NO: 309166 - RNA, 31 nt, Human
agaaaauacagcuagccaagcucgaagaauc

SEQ ID NO: 309167 - RNA, 32 nt, Human
agaaaauacaucacagauagaagauuaucugc

SEQ ID NO: 309168 - RNA, 32 nt, Human
agaaaauacaugaacagaaacugcccaggugg

SEQ ID NO: 309169 - RNA, 32 nt, Human
agaaaauacuagccuagaaauauagagcauua

SEQ ID NO: 309170 - RNA, 32 nt, Human
agaaaauagaccuccuuccuccuucagccucc

SEQ ID NO: 309171 - RNA, 32 nt, Human
agaaaauagauaugaaaaugcaagcccacaga

SEQ ID NO: 309172 - RNA, 23 nt, Human
agaaaauagaucaauccagggac

SEQ ID NO: 309173 - RNA, 32 nt, Human
agaaaauagauccuccaugcaggaucuaggag

SEQ ID NO: 309174 - RNA, 32 nt, Human
agaaaauaggagaaaaauaagugaccaggagc

SEQ ID NO: 309175 - RNA, 32 nt, Human
agaaaauaggagcaggauuuccccuggggaaa

SEQ ID NO: 309176 - RNA, 32 nt, Human
agaaaauaggcugggugcaguggcucacgccu

SEQ ID NO: 309177 - RNA, 32 nt, Human
agaaaauaggguccaggagaggaaucugcaga

SEQ ID NO: 309178 - RNA, 32 nt, Human
agaaaauaguguccucaauauuuuaaaacaau

SEQ ID NO: 309179 - RNA, 32 nt, Human
agaaaauauauguauucaguagugcaggcauu

SEQ ID NO: 309180 - RNA, 32 nt, Human
agaaaauaucuugcaagcuccaccuucacuuu

SEQ ID NO: 309181 - RNA, 32 nt, Human
agaaaauauuauuugaccuacaguauguccaa

SEQ ID NO: 309182 - RNA, 32 nt, Human
agaaaaucaacgagaaagacccuggcaagaac

SEQ ID NO: 309183 - RNA, 32 nt, Human
agaaaaucaagaaaguaaguauguaaagauga

SEQ ID NO: 309184 - RNA, 32 nt, Human
agaaaaucaagauucaguccagcagaugcaga

SEQ ID NO: 309185 - RNA, 32 nt, Human
agaaaaucaaugagaaagacccugacaacaag

SEQ ID NO: 309186 - RNA, 32 nt, Human
agaaaaucaggcuggccaacggggugaaaccc

SEQ ID NO: 309187 - RNA, 32 nt, Human
agaaaaucagggcaggagagaauauaauugug

SEQ ID NO: 309188 - RNA, 32 nt, Human
agaaaaucaguguugggguugcaggagaccua

SEQ ID NO: 309189 - RNA, 17 nt, Human
agaaaauccacugggga

SEQ ID NO: 309190 - RNA, 32 nt, Human
agaaaauccauagccuucagaucuugguguuu

SEQ ID NO: 309191 - RNA, 32 nt, Human
agaaaauccgaccucauuaaacaucagagaau

SEQ ID NO: 309192 - RNA, 32 nt, Human
agaaaauccuaccagcuggccugcugcucugc

SEQ ID NO: 309193 - RNA, 32 nt, Human
agaaaauccuauugauuucaucucacccauuu

SEQ ID NO: 309194 - RNA, 22 nt, Human
agaaaaucuaccaagaacagag

SEQ ID NO: 309195 - RNA, 32 nt, Human
agaaaaucuacuccccuguccccagccauauc

SEQ ID NO: 309196 - RNA, 32 nt, Human
agaaaaucugcucuccuuucugaucuaaaaac

SEQ ID NO: 309197 - RNA, 32 nt, Human
agaaaaucuguggagccuaucagaccccaagu

SEQ ID NO: 309198 - RNA, 32 nt, Human
agaaaaucuugucuuagaagggccagauaaca

SEQ ID NO: 309199 - RNA, 20 nt, Human
agaaaaugaaaaacaaaaca

SEQ ID NO: 309200 - RNA, 30 nt, Human
agaaaaugaacacauugcaggggccagugu

SEQ ID NO: 309201 - RNA, 30 nt, Human
agaaaaugaagaaaaaugagguuuacgaga

SEQ ID NO: 309202 - RNA, 32 nt, Human
agaaaaugaagcugcugccucaaucgacccag

SEQ ID NO: 309203 - RNA, 32 nt, Human
agaaaaugagcuugagaaaguggucauugagg

SEQ ID NO: 309204 - RNA, 32 nt, Human
agaaaaugaucacaccaacucugccuacacac

SEQ ID NO: 309205 - RNA, 32 nt, Human
agaaaaugcaagucaggccuggcagcuagagc

SEQ ID NO: 309206 - RNA, 32 nt, Human
agaaaaugccaccagauggcggguuaggauug

SEQ ID NO: 309207 - RNA, 32 nt, Human
agaaaaugcuucaagaggaaaauuacuguucc

SEQ ID NO: 309208 - RNA, 32 nt, Human
agaaaauggaauuuuuauuuuuguacuuuaua

SEQ ID NO: 309209 - RNA, 31 nt, Human
agaaaaugggacgugucccagcuccaggggu

SEQ ID NO: 309210 - RNA, 32 nt, Human
agaaaauggugaagccauagaaaaguuacccg

SEQ ID NO: 309211 - RNA, 32 nt, Human
agaaaaugucuacauuaagcaccaggacugca

SEQ ID NO: 309212 - RNA, 32 nt, Human
agaaaauguuuaccucauguaucccagccgag

SEQ ID NO: 309213 - RNA, 32 nt, Human
agaaaauuaaauucagcuucaggccuuuaaac

SEQ ID NO: 309214 - RNA, 32 nt, Human
agaaaauuacuaagaggaagggucaggggcaa

SEQ ID NO: 309215 - RNA, 32 nt, Human
agaaaauuacugccaaucuaggguucuguauc

SEQ ID NO: 309216 - RNA, 18 nt, Human
agaaaauucggcgggaga

SEQ ID NO: 309217 - RNA, 32 nt, Human
agaaaauucuaacgaugauucccaccgaugag

SEQ ID NO: 309218 - RNA, 32 nt, Human
agaaaauucuguucugauuauaucaaggcaaa

SEQ ID NO: 309219 - RNA, 32 nt, Human
agaaaauugaagcuguguaaaugaguauggaa

SEQ ID NO: 309220 - RNA, 32 nt, Human
agaaaauugcaaccuccaccagaccacaagga

SEQ ID NO: 309221 - RNA, 16 nt, Human
agaaaauugccagggg

SEQ ID NO: 309222 - RNA, 32 nt, Human
agaaaauuggagaaugaaaccugcuccaacag

SEQ ID NO: 309223 - RNA, 32 nt, Human
agaaaauugggaaaacaaaaagagcauaaaga

SEQ ID NO: 309224 - RNA, 32 nt, Human
agaaaauuucaguucucaggguguuacaauua

SEQ ID NO: 309225 - RNA, 18 nt, Human
agaaaauuucaugaugcu

SEQ ID NO: 309226 - RNA, 32 nt, Human
agaaaauuugagcccccaggggugggguggac

SEQ ID NO: 309227 - RNA, 32 nt, Human
agaaacaaacuccagacgcaccaccuuaagag

SEQ ID NO: 309228 - RNA, 32 nt, Human
agaaacaaaguaacucuauacacuucaagacu

SEQ ID NO: 309229 - RNA, 21 nt, Human
agaaacaacaaaggcaggaga

SEQ ID NO: 309230 - RNA, 24 nt, Human
agaaacaacaacaaaaaagccuaa

SEQ ID NO: 309231 - RNA, 21 nt, Human
agaaacaacagaugcuggcga

SEQ ID NO: 309232 - RNA, 32 nt, Human
agaaacaaccaccaaacauugugcuuaaggac

SEQ ID NO: 309233 - RNA, 32 nt, Human
agaaacaagagguggaacaugugaaugaaucg

SEQ ID NO: 309234 - RNA, 32 nt, Human
agaaacaagguuucaccauguuggucaggcug

SEQ ID NO: 309235 - RNA, 32 nt, Human
agaaacaaugggcagaaagcugugggacgaaa

SEQ ID NO: 309236 - RNA, 32 nt, Human
agaaacacagccggugcgcgcagggcggcagg

SEQ ID NO: 309237 - RNA, 32 nt, Human
agaaacacaggcaaucuaccuucugaccgaug

SEQ ID NO: 309238 - RNA, 32 nt, Human
agaaacacaggguccaaccacucuccagcagg

SEQ ID NO: 309239 - RNA, 32 nt, Human
agaaacaccaaagaaagcuguggaaaggaccu

SEQ ID NO: 309240 - RNA, 25 nt, Human
agaaacacccgggcuccaucugcca

SEQ ID NO: 309241 - RNA, 32 nt, Human
agaaacaccuagccaaggccaguguuucugca

SEQ ID NO: 309242 - RNA, 32 nt, Human
agaaacaccuagggggacagacagggaaagcu

SEQ ID NO: 309243 - RNA, 32 nt, Human
agaaacacugaacugaucauuuggugacugga

SEQ ID NO: 309244 - RNA, 32 nt, Human
agaaacacuggcagagauucaaagaagccacu

SEQ ID NO: 309245 - RNA, 32 nt, Human
agaaacacuuacugagggcauauuguuugccc

SEQ ID NO: 309246 - RNA, 32 nt, Human
agaaacacuugaaccugggagguggagguugc

SEQ ID NO: 309247 - RNA, 32 nt, Human
agaaacacuuuacaaccugcucucucucugaa

SEQ ID NO: 309248 - RNA, 32 nt, Human
agaaacagacagcaaccaagccacgagcauuu

SEQ ID NO: 309249 - RNA, 32 nt, Human
agaaacagacuugcacauguguggaccuugaa

SEQ ID NO: 309250 - RNA, 32 nt, Human
agaaacagagagagacagagacagagagagac

SEQ ID NO: 309251 - RNA, 32 nt, Human
agaaacagaggaccccagcucaucagggcauu

SEQ ID NO: 309252 - RNA, 32 nt, Human
agaaacagagucucauucugucacccaggcug

SEQ ID NO: 309253 - RNA, 32 nt, Human
agaaacagaguuucaccauguugcuuaggcug

SEQ ID NO: 309254 - RNA, 32 nt, Human
agaaacaggaccuugcccugucacucaggaua

SEQ ID NO: 309255 - RNA, 32 nt, Human
agaaacaggaccuugcccugucacucaggaug

SEQ ID NO: 309256 - RNA, 18 nt, Human
agaaacaggaggaggcag

SEQ ID NO: 309257 - RNA, 32 nt, Human
agaaacaggaucucacuauauugcccaagcug

SEQ ID NO: 309258 - RNA, 32 nt, Human
agaaacaggauuucgccauguuggccaggcug

SEQ ID NO: 309259 - RNA, 21 nt, Human
agaaacaggcagacaacugga

SEQ ID NO: 309260 - RNA, 32 nt, Human
agaaacaggcagcagaggaacccaaaggcagu

SEQ ID NO: 309261 - RNA, 32 nt, Human
agaaacaggcuuucaccauguuggccaggcug

SEQ ID NO: 309262 - RNA, 32 nt, Human
agaaacagggagcauggugcggggagagaagc

SEQ ID NO: 309263 - RNA, 32 nt, Human
agaaacagggucucaccauguuguccagccug

SEQ ID NO: 309264 - RNA, 32 nt, Human
agaaacagggucuugcuauguugcccaggcug

SEQ ID NO: 309265 - RNA, 32 nt, Human
agaaacaggguuucaccaugcuggccaugcug

SEQ ID NO: 309266 - RNA, 32 nt, Human
agaaacaggguuucaccauguuagccaggcug

SEQ ID NO: 309267 - RNA, 32 nt, Human
agaaacaggguuucaccauguuggccaggcug

SEQ ID NO: 309268 - RNA, 32 nt, Human
agaaacaggguuucacuguguuggcccagcug

SEQ ID NO: 309269 - RNA, 20 nt, Human
agaaacaguggcuccuggga

SEQ ID NO: 309270 - RNA, 32 nt, Human
agaaacauacuucuuugcugggcaugguggcu

SEQ ID NO: 309271 - RNA, 32 nt, Human
agaaacauccucucaaaaaucagaugggacau

SEQ ID NO: 309272 - RNA, 32 nt, Human
agaaacaucuggcaaccccacauggcugagau

SEQ ID NO: 309273 - RNA, 32 nt, Human
agaaacaucuuccauccuccccucuccccaaa

SEQ ID NO: 309274 - RNA, 32 nt, Human
agaaacaugcacauacccagaaaccuauuuuc

SEQ ID NO: 309275 - RNA, 22 nt, Human
agaaacaugccaauccugagaa

SEQ ID NO: 309276 - RNA, 32 nt, Human
agaaacauggcuuuuaagaaacacggugauau

SEQ ID NO: 309277 - RNA, 21 nt, Human
agaaacauuaagucucuggga

SEQ ID NO: 309278 - RNA, 23 nt, Human
agaaacauugacaaagggcacaa

SEQ ID NO: 309279 - RNA, 32 nt, Human
agaaaccaaacagaccccaguccagcccugaa

SEQ ID NO: 309280 - RNA, 32 nt, Human
agaaaccaaccacaggcacccaagcacuacca

SEQ ID NO: 309281 - RNA, 32 nt, Human
agaaaccaagccccaugagcagcaguggaaga

SEQ ID NO: 309282 - RNA, 31 nt, Human
agaaaccaaguguccgggauucagaccucuc

SEQ ID NO: 309283 - RNA, 21 nt, Human
agaaaccacagauuagagaaa

SEQ ID NO: 309284 - RNA, 32 nt, Human
agaaaccacaggcugaaggcgacugcaggguc

SEQ ID NO: 309285 - RNA, 22 nt, Human
agaaaccacaguuccccggaaa

SEQ ID NO: 309286 - RNA, 32 nt, Human
agaaaccacaguuggaggaggacggcagagac

SEQ ID NO: 309287 - RNA, 32 nt, Human
agaaaccacccaaauguccuucaaggggcgaa

SEQ ID NO: 309288 - RNA, 32 nt, Human
agaaaccaccgcucccccuccuaggaggcccc

SEQ ID NO: 309289 - RNA, 32 nt, Human
agaaaccacugcauucugaccugcuguacaga

SEQ ID NO: 309290 - RNA, 32 nt, Human
agaaaccagaaaugaacucuauucaagaauaa

SEQ ID NO: 309291 - RNA, 32 nt, Human
agaaaccagagcacuggcagcugagugaccuu

SEQ ID NO: 309292 - RNA, 32 nt, Human
agaaaccaggagacaggggaacuaucuuccuu

SEQ ID NO: 309293 - RNA, 32 nt, Human
agaaaccaggucucacuauguugcccaggccg

SEQ ID NO: 309294 - RNA, 32 nt, Human
agaaaccauaaauaucgugucauauuuucccc

SEQ ID NO: 309295 - RNA, 32 nt, Human
agaaaccaucagcaggcugugagcaucgccag

SEQ ID NO: 309296 - RNA, 32 nt, Human
agaaacccaacaauugggagauugagcuggga

SEQ ID NO: 309297 - RNA, 32 nt, Human
agaaacccagaagaggaagaggaaagcaaagg

SEQ ID NO: 309298 - RNA, 32 nt, Human
agaaacccagaagaggagagcaaaggagucag

SEQ ID NO: 309299 - RNA, 32 nt, Human
agaaaccccaaaccaggaaaccccaccuaccc

SEQ ID NO: 309300 - RNA, 32 nt, Human
agaaaccccagccuaaugaaacccuagguguu

SEQ ID NO: 309301 - RNA, 32 nt, Human
agaaaccccaggaggaagaaaccucagacaga

SEQ ID NO: 309302 - RNA, 32 nt, Human
agaaacccccaggaggagagagaugcugcucc

SEQ ID NO: 309303 - RNA, 20 nt, Human
agaaacccgcccagccgggg

SEQ ID NO: 309304 - RNA, 32 nt, Human
agaaacccuaaaucacuccucucuccacuuga

SEQ ID NO: 309305 - RNA, 32 nt, Human
agaaacccuacacccucccccuccagggaaug

SEQ ID NO: 309306 - RNA, 32 nt, Human
agaaacccuauaaauguacagaaugugggaaa

SEQ ID NO: 309307 - RNA, 32 nt, Human
agaaacccugcuccuucccuucacugaccaau

SEQ ID NO: 309308 - RNA, 20 nt, Human
agaaaccgagaccacuucac

SEQ ID NO: 309309 - RNA, 32 nt, Human
agaaaccgcucuucaaccaucuguagaacacu

SEQ ID NO: 309310 - RNA, 32 nt, Human
agaaaccgggcuugguuguugcagugggaaga

SEQ ID NO: 309311 - RNA, 32 nt, Human
agaaaccguaugaauguacagaaugugggaaa

SEQ ID NO: 309312 - RNA, 32 nt, Human
agaaaccucaacuguuccccagcuacugaggg

SEQ ID NO: 309313 - RNA, 32 nt, Human
agaaaccucacaccuagccagugcccugcucu

SEQ ID NO: 309314 - RNA, 32 nt, Human
agaaaccuccacccuccccaggucccacauug

SEQ ID NO: 309315 - RNA, 18 nt, Human
agaaaccuccguccuccu

SEQ ID NO: 309316 - RNA, 32 nt, Human
agaaaccuccuugucccucuccagucaccucc

SEQ ID NO: 309317 - RNA, 18 nt, Human
agaaaccucgcccagcgg

SEQ ID NO: 309318 - RNA, 32 nt, Human
agaaaccugcaaaggccguguucacacacuca

SEQ ID NO: 309319 - RNA, 32 nt, Human
agaaaccuggggacuuaguuagguagauuaau

SEQ ID NO: 309320 - RNA, 32 nt, Human
agaaaccuucagaaggaaacagaaggaugaga

SEQ ID NO: 309321 - RNA, 32 nt, Human
agaaaccuucauauguauccccaaaccuaaaa

SEQ ID NO: 309322 - RNA, 32 nt, Human
agaaaccuuuaucuuuuucauaccuuucuauu

SEQ ID NO: 309323 - RNA, 32 nt, Human
agaaacgaauagacuggacacuguguggucac

SEQ ID NO: 309324 - RNA, 32 nt, Human
agaaacgagguuucaccacguuggccaggcug

SEQ ID NO: 309325 - RNA, 32 nt, Human
agaaacgcaaaaaguuucuacggacuuuaaau

SEQ ID NO: 309326 - RNA, 32 nt, Human
agaaacgcaaucuucugagcacaauauggaau

SEQ ID NO: 309327 - RNA, 32 nt, Human
agaaacgcaguuuccauggcccaacucacagu

SEQ ID NO: 309328 - RNA, 32 nt, Human
agaaacgcgccuggcccugagcugucaccacc

SEQ ID NO: 309329 - RNA, 32 nt, Human
agaaacgcgguuucaccauguuggccaggcug

SEQ ID NO: 309330 - RNA, 21 nt, Human
agaaacggagucagccggaga

SEQ ID NO: 309331 - RNA, 32 nt, Human
agaaacggaguccuccuguguugcccaggcug

SEQ ID NO: 309332 - RNA, 32 nt, Human
agaaacgggacuucaccauguugcccaggcug

SEQ ID NO: 309333 - RNA, 32 nt, Human
agaaacgggauuucaccacguuggccaggcug

SEQ ID NO: 309334 - RNA, 22 nt, Human
agaaacgggcucgcacucggcc

SEQ ID NO: 309335 - RNA, 32 nt, Human
agaaacgggguuucaccauauuggucaggcug

SEQ ID NO: 309336 - RNA, 32 nt, Human
agaaacgggguuucaccauguugcucaggcug

SEQ ID NO: 309337 - RNA, 32 nt, Human
agaaacgggguuucaccauguuggccaggaug

SEQ ID NO: 309338 - RNA, 32 nt, Human
agaaacgggguuucaccauguuggccaggcug

SEQ ID NO: 309339 - RNA, 32 nt, Human
agaaacgggguuucaccauguuggccgggcug

SEQ ID NO: 309340 - RNA, 32 nt, Human
agaaacgggguuuugccauguuggccagacug

SEQ ID NO: 309341 - RNA, 32 nt, Human
agaaacggucaacauucuaaagagauacaguc

SEQ ID NO: 309342 - RNA, 32 nt, Human
agaaacguucacugcacaaccuguucccugca

SEQ ID NO: 309343 - RNA, 32 nt, Human
agaaacguugacugggaccacuggagacacug

SEQ ID NO: 309344 - RNA, 32 nt, Human
agaaacuaaacagcaaaagcaaagagaaagcu

SEQ ID NO: 309345 - RNA, 32 nt, Human
agaaacuaaggugucagcagagcuguguucuc

SEQ ID NO: 309346 - RNA, 32 nt, Human
agaaacuaccaucagacugaacaggcaaccua

SEQ ID NO: 309347 - RNA, 18 nt, Human
agaaacuaccuaccucac

SEQ ID NO: 309348 - RNA, 32 nt, Human
agaaacuagacauuccauugaacuagaagaga

SEQ ID NO: 309349 - RNA, 32 nt, Human
agaaacuaggacugcagugggcucggauaggc

SEQ ID NO: 309350 - RNA, 32 nt, Human
agaaacuaguaucucuggccuccuggggccca

SEQ ID NO: 309351 - RNA, 32 nt, Human
agaaacuaucuucucccaacauuuacuaacau

SEQ ID NO: 309352 - RNA, 32 nt, Human
agaaacuauuucuguuccagucacauugccau

SEQ ID NO: 309353 - RNA, 32 nt, Human
agaaacucaaagcuuucagaaauuaauaguua

SEQ ID NO: 309354 - RNA, 32 nt, Human
agaaacucaggcccugccuuucugcuacacaa

SEQ ID NO: 309355 - RNA, 32 nt, Human
agaaacucagugugugauguugggcagugugc

SEQ ID NO: 309356 - RNA, 19 nt, Human
agaaacuccaacauuucac

SEQ ID NO: 309357 - RNA, 32 nt, Human
agaaacuccaaccccugcccuuccucuucccc

SEQ ID NO: 309358 - RNA, 32 nt, Human
agaaacucccagagaauaauguauccccaucu

SEQ ID NO: 309359 - RNA, 20 nt, Human
agaaacuccucuuucuucau

SEQ ID NO: 309360 - RNA, 32 nt, Human
agaaacucgcccugcacucaggcauggacuac

SEQ ID NO: 309361 - RNA, 32 nt, Human
agaaacucuaggggugaggaccuagcagucug

SEQ ID NO: 309362 - RNA, 32 nt, Human
agaaacucuguaauaccuggaaccucagauaa

SEQ ID NO: 309363 - RNA, 32 nt, Human
agaaacugaaauuuuaaaacuuaauucagguc

SEQ ID NO: 309364 - RNA, 32 nt, Human
agaaacugaauacauugcucccuuucccuagg

SEQ ID NO: 309365 - RNA, 31 nt, Human
agaaacugacuucuuuagacaaaguuuuaac

SEQ ID NO: 309366 - RNA, 32 nt, Human
agaaacugcagagggcugggcacggugguuua

SEQ ID NO: 309367 - RNA, 32 nt, Human
agaaacugccaguagagggcagccugggcauc

SEQ ID NO: 309368 - RNA, 32 nt, Human
agaaacugcccagguggaacagcacguaaccu

SEQ ID NO: 309369 - RNA, 32 nt, Human
agaaacugccucaugguagccucccaggggag

SEQ ID NO: 309370 - RNA, 32 nt, Human
agaaacugcggcaggccgggugcagugucuca

SEQ ID NO: 309371 - RNA, 32 nt, Human
agaaacuggagacaacuuugcaggcacccugg

SEQ ID NO: 309372 - RNA, 32 nt, Human
agaaacuggagugcuugaaggagcugcagaca

SEQ ID NO: 309373 - RNA, 32 nt, Human
agaaacuggauccugguaggggguggcauuuu

SEQ ID NO: 309374 - RNA, 32 nt, Human
agaaacugggcucaucacaccaaggcaaagca

SEQ ID NO: 309375 - RNA, 32 nt, Human
agaaacugggucucacuauguugcccagguug

SEQ ID NO: 309376 - RNA, 32 nt, Human
agaaacugguagguuucaucaggugguuaaag

SEQ ID NO: 309377 - RNA, 32 nt, Human
agaaacuguauucaugucauauaguccauaaa

SEQ ID NO: 309378 - RNA, 32 nt, Human
agaaacuguccagggccucacagggaggcauu

SEQ ID NO: 309379 - RNA, 32 nt, Human
agaaacugucugcugcucaagacccacaggac

SEQ ID NO: 309380 - RNA, 32 nt, Human
agaaacugugggcugcgguggcucuggagcug

SEQ ID NO: 309381 - RNA, 32 nt, Human
agaaacuguuugauuauagaaaagaccccaga

SEQ ID NO: 309382 - RNA, 32 nt, Human
agaaacuuauuucucauaucaacuuagucaau

SEQ ID NO: 309383 - RNA, 32 nt, Human
agaaacuucuauguucugugcaugccauuaga

SEQ ID NO: 309384 - RNA, 32 nt, Human
agaaacuugacaaaauaggaacaggagauauu

SEQ ID NO: 309385 - RNA, 32 nt, Human
agaaacuugcagaugauaugugcugccuuugc

SEQ ID NO: 309386 - RNA, 32 nt, Human
agaaacuuuccaaggagucuuggguguguagc

SEQ ID NO: 309387 - RNA, 32 nt, Human
agaaagaaaagaaagaaagaaagaaagaaaga

SEQ ID NO: 309388 - RNA, 27 nt, Human
agaaagaaaagaaagaaagagagagag

SEQ ID NO: 309389 - RNA, 32 nt, Human
agaaagaaaagaaggaaggaagagagguagac

SEQ ID NO: 309390 - RNA, 32 nt, Human
agaaagaaagaaaagaaaagaaaaucccuuuu

SEQ ID NO: 309391 - RNA, 32 nt, Human
agaaagaaagaaaagaaagaaagaaagaaaga

SEQ ID NO: 309392 - RNA, 31 nt, Human
agaaagaaagaaaagaaagaaagagagagag

SEQ ID NO: 309393 - RNA, 32 nt, Human
agaaagaaagaaagaaagaaagaaaagaaaga

SEQ ID NO: 309394 - RNA, 18 nt, Human
agaaagaaagaaaucaga

SEQ ID NO: 309395 - RNA, 32 nt, Human
agaaagaaagaaggaaggaaggaaaaacuugu

SEQ ID NO: 309396 - RNA, 32 nt, Human
agaaagaaagaauuugccuaaauagaacagaa

SEQ ID NO: 309397 - RNA, 32 nt, Human
agaaagaaaggcuggggauauuuggguuggcu

SEQ ID NO: 309398 - RNA, 32 nt, Human
agaaagaaaggucagcuuuggcccagaugugg

SEQ ID NO: 309399 - RNA, 18 nt, Human
agaaagaaauucuaagga

SEQ ID NO: 309400 - RNA, 32 nt, Human
agaaagaacggaagaagagaucaggaagagaa

SEQ ID NO: 309401 - RNA, 32 nt, Human
agaaagaacucaaguacaacccaaugagguug

SEQ ID NO: 309402 - RNA, 32 nt, Human
agaaagaagagaggacacaucucccaccauua

SEQ ID NO: 309403 - RNA, 32 nt, Human
agaaagaagccagaagccaggggguggggaag

SEQ ID NO: 309404 - RNA, 32 nt, Human
agaaagaaggaaggaaggaaaaacuuguuacu

SEQ ID NO: 309405 - RNA, 32 nt, Human
agaaagaaggcguggagaagagggagggagcg

SEQ ID NO: 309406 - RNA, 32 nt, Human
agaaagaaggucucgcuacauugcccaggcug

SEQ ID NO: 309407 - RNA, 32 nt, Human
agaaagaauacaaaaaguguacauuccuuuuu

SEQ ID NO: 309408 - RNA, 32 nt, Human
agaaagaaucuugguggauuugugucucaaau

SEQ ID NO: 309409 - RNA, 32 nt, Human
agaaagacacaauguggagaaaucuuaggacu

SEQ ID NO: 309410 - RNA, 32 nt, Human
agaaagacauugggccucccacacucaggcug

SEQ ID NO: 309411 - RNA, 32 nt, Human
agaaagaccuagaagguuguagaugggaaauc

SEQ ID NO: 309412 - RNA, 32 nt, Human
agaaagaccuuucuccuugagcucuuugacuc

SEQ ID NO: 309413 - RNA, 32 nt, Human
agaaagacggagaagaggagagagaagccagg

SEQ ID NO: 309414 - RNA, 18 nt, Human
agaaagacggccaagggc

SEQ ID NO: 309415 - RNA, 32 nt, Human
agaaagacugaagugacagauuaagaguucuu

SEQ ID NO: 309416 - RNA, 32 nt, Human
agaaagacuucucaaggaggugccucagucag

SEQ ID NO: 309417 - RNA, 18 nt, Human
agaaagagaaaaacaagg

SEQ ID NO: 309418 - RNA, 32 nt, Human
agaaagagaaaaagagaaagaaacagaaagaa

SEQ ID NO: 309419 - RNA, 32 nt, Human
agaaagagaaaaggucccagcugagagaaaaa

SEQ ID NO: 309420 - RNA, 32 nt, Human
agaaagagaacuccagaggguuugacaauccc

SEQ ID NO: 309421 - RNA, 32 nt, Human
agaaagagaacugcuccuucaucguaaauuua

SEQ ID NO: 309422 - RNA, 32 nt, Human
agaaagagaagcugaacaggagaaagacaaac

SEQ ID NO: 309423 - RNA, 32 nt, Human
agaaagagaaugagagaaagagaaugagagag

SEQ ID NO: 309424 - RNA, 32 nt, Human
agaaagagagagaaggagagagacaguagcca

SEQ ID NO: 309425 - RNA, 32 nt, Human
agaaagagagagugugugggucuauguaaaug

SEQ ID NO: 309426 - RNA, 32 nt, Human
agaaagagagugaggcuauggaguggcagcag

SEQ ID NO: 309427 - RNA, 20 nt, Human
agaaagagaucucauaggac

SEQ ID NO: 309428 - RNA, 32 nt, Human
agaaagagauggaggaggaggacuggcccaga

SEQ ID NO: 309429 - RNA, 32 nt, Human
agaaagagaugggagguugggggaggugagca

SEQ ID NO: 309430 - RNA, 32 nt, Human
agaaagaggaagaggagccgcugaguggcaau

SEQ ID NO: 309431 - RNA, 22 nt, Human
agaaagaggaagauuccaggac

SEQ ID NO: 309432 - RNA, 32 nt, Human
agaaagaggagaaaggaagggaagcauuacug

SEQ ID NO: 309433 - RNA, 19 nt, Human
agaaagaggagacaaggac

SEQ ID NO: 309434 - RNA, 32 nt, Human
agaaagaggaggagaauuaagaagaggaugau

SEQ ID NO: 309435 - RNA, 32 nt, Human
agaaagaggaggagaguugaaaagagaggaga

SEQ ID NO: 309436 - RNA, 23 nt, Human
agaaagaggaguggucuuuguca

SEQ ID NO: 309437 - RNA, 32 nt, Human
agaaagaggcauugucaucccuauguguauaa

SEQ ID NO: 309438 - RNA, 32 nt, Human
agaaagaggcgaccuuccuugggaucugugcg

SEQ ID NO: 309439 - RNA, 32 nt, Human
agaaagaggcggggcugugugcgucuccuucg

SEQ ID NO: 309440 - RNA, 21 nt, Human
agaaagaggggacagguguca

SEQ ID NO: 309441 - RNA, 19 nt, Human
agaaagagggggaggaaga

SEQ ID NO: 309442 - RNA, 20 nt, Human
agaaagaggucagccaggac

SEQ ID NO: 309443 - RNA, 32 nt, Human
agaaagagguuaggaguagauauugauuacua

SEQ ID NO: 309444 - RNA, 19 nt, Human
agaaagagguuuaauggac

SEQ ID NO: 309445 - RNA, 32 nt, Human
agaaagagucucaaauggacaacuguccugug

SEQ ID NO: 309446 - RNA, 31 nt, Human
agaaagagugagagaggaauugccucuggac

SEQ ID NO: 309447 - RNA, 32 nt, Human
agaaagagugugagcugaugacacagugguuu

SEQ ID NO: 309448 - RNA, 32 nt, Human
agaaagagugugcguucaagaggcagaugagg

SEQ ID NO: 309449 - RNA, 32 nt, Human
agaaagaguguucuaggaagagucuagucccc

SEQ ID NO: 309450 - RNA, 32 nt, Human
agaaagaguguuggaguuaucucucuacuaau

SEQ ID NO: 309451 - RNA, 16 nt, Human
agaaagaguuguucca

SEQ ID NO: 309452 - RNA, 20 nt, Human
agaaagauaagaggaagcua

SEQ ID NO: 309453 - RNA, 32 nt, Human
agaaagauagcuugaguccaggaguuugagac

SEQ ID NO: 309454 - RNA, 32 nt, Human
agaaagaucaaaguuacaaaugaguggccgug

SEQ ID NO: 309455 - RNA, 32 nt, Human
agaaagauccauugccaaacagugccaugggg

SEQ ID NO: 309456 - RNA, 32 nt, Human
agaaagaucugcaagugcgcagagagaagacu

SEQ ID NO: 309457 - RNA, 32 nt, Human
agaaagauggacuggaaggugccugagccuga

SEQ ID NO: 309458 - RNA, 32 nt, Human
agaaagauggcuucccuucuggaacaccagca

SEQ ID NO: 309459 - RNA, 32 nt, Human
agaaagauuuauugugcauuauuugaacccug

SEQ ID NO: 309460 - RNA, 32 nt, Human
agaaagcaaaggugcacuccagacucuggggg

SEQ ID NO: 309461 - RNA, 32 nt, Human
agaaagcaagacaucaaggagggaccugugcc

SEQ ID NO: 309462 - RNA, 32 nt, Human
agaaagcaagaggcacgugaauguugagccgu

SEQ ID NO: 309463 - RNA, 32 nt, Human
agaaagcaaguacaguguggauuucaaauggu

SEQ ID NO: 309464 - RNA, 32 nt, Human
agaaagcaaguauagucagguauucucuccau

SEQ ID NO: 309465 - RNA, 32 nt, Human
agaaagcaauaguucaagucccuaccugugcc

SEQ ID NO: 309466 - RNA, 32 nt, Human
agaaagcaauccagaugugguuuacucugcca

SEQ ID NO: 309467 - RNA, 32 nt, Human
agaaagcacauaaacccaaagggcaaacaauu

SEQ ID NO: 309468 - RNA, 32 nt, Human
agaaagcacccagacgccacaggcucugucgc

SEQ ID NO: 309469 - RNA, 32 nt, Human
agaaagcacucaacugguuugacauugcuaag

SEQ ID NO: 309470 - RNA, 32 nt, Human
agaaagcagaguggcaucacaucuucaugccu

SEQ ID NO: 309471 - RNA, 32 nt, Human
agaaagcagcaguggaccugccccaaggccac

SEQ ID NO: 309472 - RNA, 32 nt, Human
agaaagcauagaggggaaagauggccggagga

SEQ ID NO: 309473 - RNA, 32 nt, Human
agaaagcaucgcuggagggcagccugguggag

SEQ ID NO: 309474 - RNA, 32 nt, Human
agaaagcauugcuggagggcagccugguggag

SEQ ID NO: 309475 - RNA, 32 nt, Human
agaaagcauuuugcaucagccuggagugaacc

SEQ ID NO: 309476 - RNA, 19 nt, Human
agaaagccaaaucaaggac

SEQ ID NO: 309477 - RNA, 32 nt, Human
agaaagccaacauuuuauguuauaauaugcug

SEQ ID NO: 309478 - RNA, 23 nt, Human
agaaagccacagccagccugcca

SEQ ID NO: 309479 - RNA, 32 nt, Human
agaaagccacauaccacaucuucucacuuaua

SEQ ID NO: 309480 - RNA, 32 nt, Human
agaaagccaccaaggccaggcuuuguuaaaag

SEQ ID NO: 309481 - RNA, 32 nt, Human
agaaagccagauucccagggaagccauggagc

SEQ ID NO: 309482 - RNA, 32 nt, Human
agaaagccagcaccugguugauguguauucau

SEQ ID NO: 309483 - RNA, 17 nt, Human
agaaagccccaggcaca

SEQ ID NO: 309484 - RNA, 32 nt, Human
agaaagcccuaaaauacuauuggagagaaaaa

SEQ ID NO: 309485 - RNA, 17 nt, Human
agaaagcccucuaggaa

SEQ ID NO: 309486 - RNA, 32 nt, Human
agaaagccucauucuuuucugugacccuuucg

SEQ ID NO: 309487 - RNA, 32 nt, Human
agaaagccucucucucccucccucucucauga

SEQ ID NO: 309488 - RNA, 18 nt, Human
agaaagccugaaaagcua

SEQ ID NO: 309489 - RNA, 21 nt, Human
agaaagccugagaaccagcua

SEQ ID NO: 309490 - RNA, 32 nt, Human
agaaagccugccaggaaauaaauucaaauaca

SEQ ID NO: 309491 - RNA, 21 nt, Human
agaaagccugggaggggccug

SEQ ID NO: 309492 - RNA, 32 nt, Human
agaaagccugggcuggcaagagcugccgccgg

SEQ ID NO: 309493 - RNA, 32 nt, Human
agaaagccuuauugagccccuuguugacacuu

SEQ ID NO: 309494 - RNA, 32 nt, Human
agaaagccuuucuccaucaucccagccccacg

SEQ ID NO: 309495 - RNA, 22 nt, Human
agaaagcgaggagcggccucca

SEQ ID NO: 309496 - RNA, 32 nt, Human
agaaagcgccauugcacuccagucugggugac

SEQ ID NO: 309497 - RNA, 32 nt, Human
agaaagcggcggcggaggauggaggaaggagg

SEQ ID NO: 309498 - RNA, 32 nt, Human
agaaagcggugacuucaccucauggagcccgg

SEQ ID NO: 309499 - RNA, 32 nt, Human
agaaagcgucccuggagaacagccuggaggaa

SEQ ID NO: 309500 - RNA, 32 nt, Human
agaaagcuaauacccuccuuggaguugcaagu

SEQ ID NO: 309501 - RNA, 32 nt, Human
agaaagcuacaugaauuaauuguacucuaugg

SEQ ID NO: 309502 - RNA, 32 nt, Human
agaaagcucugacucucaggaaguuaucugga

SEQ ID NO: 309503 - RNA, 32 nt, Human
agaaagcugaaaggaaucugcagucuccugcu

SEQ ID NO: 309504 - RNA, 32 nt, Human
agaaagcugaggaggcuuuggaagagaaggug

SEQ ID NO: 309505 - RNA, 32 nt, Human
agaaagcugcuugucgagggcauggggaauca

SEQ ID NO: 309506 - RNA, 32 nt, Human
agaaagcugggaaaggggauggguagaacaag

SEQ ID NO: 309507 - RNA, 32 nt, Human
agaaagcugugaaacucacucauuuccugcau

SEQ ID NO: 309508 - RNA, 22 nt, Human
agaaagcuguggaccugcucgg

SEQ ID NO: 309509 - RNA, 32 nt, Human
agaaagcuuacagauaaauggguuucaagcac

SEQ ID NO: 309510 - RNA, 32 nt, Human
agaaagcuucuaggaaguagauguuccauauc

SEQ ID NO: 309511 - RNA, 32 nt, Human
agaaagcuuguggaaagucucucuccuuccuc

SEQ ID NO: 309512 - RNA, 32 nt, Human
agaaagcuuuaggacaaagcaugggaaaugua

SEQ ID NO: 309513 - RNA, 32 nt, Human
agaaagcuuucaaagaggucacuguggccugu

SEQ ID NO: 309514 - RNA, 32 nt, Human
agaaagcuuuuauagaaagcccagugacaugg

SEQ ID NO: 309515 - RNA, 32 nt, Human
agaaaggaaaaauguuggaaacugacucuugu

SEQ ID NO: 309516 - RNA, 32 nt, Human
agaaaggaaaacagcucucucucuagugagag

SEQ ID NO: 309517 - RNA, 32 nt, Human
agaaaggaaaagaauuagaugcaucagaauac

SEQ ID NO: 309518 - RNA, 32 nt, Human
agaaaggaaacgcagggagacugugugccugg

SEQ ID NO: 309519 - RNA, 32 nt, Human
agaaaggaaagaaagaaagacuguaauaaguu

SEQ ID NO: 309520 - RNA, 32 nt, Human
agaaaggaaagaaggaaggaaggaaggaagga

SEQ ID NO: 309521 - RNA, 32 nt, Human
agaaaggaaaugagaugacaguauuuaaucgc

SEQ ID NO: 309522 - RNA, 32 nt, Human
agaaaggaagaaaagaaggagggagagaggga

SEQ ID NO: 309523 - RNA, 19 nt, Human
agaaaggaagagaauggaa

SEQ ID NO: 309524 - RNA, 32 nt, Human
agaaaggaagcacaauuggcagguuaucacuu

SEQ ID NO: 309525 - RNA, 32 nt, Human
agaaaggaagccuaguuuccagaagccugaca

SEQ ID NO: 309526 - RNA, 32 nt, Human
agaaaggaaggaagaaagggugggagggagga

SEQ ID NO: 309527 - RNA, 32 nt, Human
agaaaggaaggaaggaaagaaggaagggagga

SEQ ID NO: 309528 - RNA, 32 nt, Human
agaaaggaagggaagcauuacuggguuacuau

SEQ ID NO: 309529 - RNA, 32 nt, Human
agaaaggacaaguuccaggggaggugauuuuu

SEQ ID NO: 309530 - RNA, 32 nt, Human
agaaaggacacaugggcuugggagaggggaga

SEQ ID NO: 309531 - RNA, 32 nt, Human
agaaaggacagcucagaaaaucaaagaggcca

SEQ ID NO: 309532 - RNA, 32 nt, Human
agaaaggacaggcuuuuuaugaguaacacaca

SEQ ID NO: 309533 - RNA, 32 nt, Human
agaaaggacccuggacccagaggcagauacug

SEQ ID NO: 309534 - RNA, 32 nt, Human
agaaaggacuccuccuuuuuccaugcccuaaa

SEQ ID NO: 309535 - RNA, 32 nt, Human
agaaaggagagggcgggguagggaugcagcug

SEQ ID NO: 309536 - RNA, 32 nt, Human
agaaaggagaggggcacagaacgguuugccuc

SEQ ID NO: 309537 - RNA, 31 nt, Human
agaaaggagcacuucuacacaccuccucacu

SEQ ID NO: 309538 - RNA, 32 nt, Human
agaaaggagcccaggaaacgggucauuucuuu

SEQ ID NO: 309539 - RNA, 32 nt, Human
agaaaggagcuggagaagagaggcagaaaaau

SEQ ID NO: 309540 - RNA, 32 nt, Human
agaaaggaggcggaacucggugaucugacugg

SEQ ID NO: 309541 - RNA, 32 nt, Human
agaaaggaggggcaguggcuuccccggcagca

SEQ ID NO: 309542 - RNA, 32 nt, Human
agaaaggagucugcacaugcagcugcacccuc

SEQ ID NO: 309543 - RNA, 32 nt, Human
agaaaggaguuucuuuagcugacagaaucucu

SEQ ID NO: 309544 - RNA, 32 nt, Human
agaaaggauacugucgguucacuguugagcag

SEQ ID NO: 309545 - RNA, 32 nt, Human
agaaaggauguuuugucccauuuccuuggagg

SEQ ID NO: 309546 - RNA, 32 nt, Human
agaaaggcaaagcauuugucugaaagcgaaag

SEQ ID NO: 309547 - RNA, 32 nt, Human
agaaaggcaaaggagacaccuguuccuuccca

SEQ ID NO: 309548 - RNA, 32 nt, Human
agaaaggcaaaguuugcuuugcuuggguaugu

SEQ ID NO: 309549 - RNA, 21 nt, Human
agaaaggcaaggaggaggaga

SEQ ID NO: 309550 - RNA, 32 nt, Human
agaaaggcaaggcaacugggaauugcuggaga

SEQ ID NO: 309551 - RNA, 32 nt, Human
agaaaggcaccugcaaggacugcucugugaug

SEQ ID NO: 309552 - RNA, 32 nt, Human
agaaaggcagauggggucuccggggcugggca

SEQ ID NO: 309553 - RNA, 32 nt, Human
agaaaggcagcaugccagccuccggugaugag

SEQ ID NO: 309554 - RNA, 32 nt, Human
agaaaggcagcaugguacauggggaggaagac

SEQ ID NO: 309555 - RNA, 24 nt, Human
agaaaggcaucaguaccaaacgga

SEQ ID NO: 309556 - RNA, 24 nt, Human
agaaaggcaucuuucgccagugga

SEQ ID NO: 309557 - RNA, 32 nt, Human
agaaaggcccaaguccaugagcacagaggguc

SEQ ID NO: 309558 - RNA, 32 nt, Human
agaaaggccggcagcccugggguggcggcggg

SEQ ID NO: 309559 - RNA, 32 nt, Human
agaaaggcuauuucuucgcugugugaucagug

SEQ ID NO: 309560 - RNA, 16 nt, Human
agaaaggcucauucca

SEQ ID NO: 309561 - RNA, 32 nt, Human
agaaaggcuggcucagaucuugaccaagaaac

SEQ ID NO: 309562 - RNA, 32 nt, Human
agaaaggcuggugccuggucucuccucauuuc

SEQ ID NO: 309563 - RNA, 32 nt, Human
agaaaggcuguaaucagcagacuggaaacuga

SEQ ID NO: 309564 - RNA, 32 nt, Human
agaaaggcuguaaucagcagacuggaagcuga

SEQ ID NO: 309565 - RNA, 32 nt, Human
agaaagggaagagaaacaaggguguucauuca

SEQ ID NO: 309566 - RNA, 32 nt, Human
agaaagggaaggagguagagggaagaaacaga

SEQ ID NO: 309567 - RNA, 19 nt, Human
agaaagggaccccucucca

SEQ ID NO: 309568 - RNA, 32 nt, Human
agaaagggagagagggagggagagagagugaa

SEQ ID NO: 309569 - RNA, 32 nt, Human
agaaagggagagagggagggagaggaucguga

SEQ ID NO: 309570 - RNA, 32 nt, Human
agaaagggagagagggagggggagggcgggcg

SEQ ID NO: 309571 - RNA, 32 nt, Human
agaaagggagagauguugcgggaagucaggga

SEQ ID NO: 309572 - RNA, 32 nt, Human
agaaagggagaggggacaggagggaagggugg

SEQ ID NO: 309573 - RNA, 25 nt, Human
agaaagggagggcagagaggacaga

SEQ ID NO: 309574 - RNA, 32 nt, Human
agaaagggaggguggagggugaggccaaauca

SEQ ID NO: 309575 - RNA, 32 nt, Human
agaaagggagucaggcacacugggaaucgugg

SEQ ID NO: 309576 - RNA, 32 nt, Human
agaaagggagucaggcgcauugggaaucgugg

SEQ ID NO: 309577 - RNA, 32 nt, Human
agaaagggcaaggggugaggauaggacagagg

SEQ ID NO: 309578 - RNA, 32 nt, Human
agaaagggcaugcaaggccuucucugggugac

SEQ ID NO: 309579 - RNA, 32 nt, Human
agaaagggcguggagguucagcacauucugag

SEQ ID NO: 309580 - RNA, 32 nt, Human
agaaagggcuccauuaugagcauggguucagg

SEQ ID NO: 309581 - RNA, 32 nt, Human
agaaagggcuggagcagaagggccaagagggc

SEQ ID NO: 309582 - RNA, 32 nt, Human
agaaagggcuuucugccagccugggcaacaua

SEQ ID NO: 309583 - RNA, 32 nt, Human
agaaaggggaaaggaagaaagaaggagagcag

SEQ ID NO: 309584 - RNA, 32 nt, Human
agaaaggggcaggcugaggcugggggaggggc

SEQ ID NO: 309585 - RNA, 32 nt, Human
agaaaggggcuggguaccucuucugguugcug

SEQ ID NO: 309586 - RNA, 32 nt, Human
agaaaggggcuuugggcucugccccucuggcu

SEQ ID NO: 309587 - RNA, 32 nt, Human
agaaagggguggugggcccugcccuuuguaga

SEQ ID NO: 309588 - RNA, 32 nt, Human
agaaagggugggcguggguggggaaggcagag

SEQ ID NO: 309589 - RNA, 32 nt, Human
agaaaggguguagauggagaggcgguggccuc

SEQ ID NO: 309590 - RNA, 32 nt, Human
agaaagguauaaucauguaauuucucauauua

SEQ ID NO: 309591 - RNA, 32 nt, Human
agaaaggugagccccagaagggccaaugucac

SEQ ID NO: 309592 - RNA, 32 nt, Human
agaaaggugauagcauuaaauguucaucuaga

SEQ ID NO: 309593 - RNA, 32 nt, Human
agaaaggugauuguacuugccaaaucuaaaug

SEQ ID NO: 309594 - RNA, 32 nt, Human
agaaaggugcgugugagacaggagaauugucu

SEQ ID NO: 309595 - RNA, 32 nt, Human
agaaagguggaaaagguggcuggugugagaau

SEQ ID NO: 309596 - RNA, 32 nt, Human
agaaagguggugcugaaaggacagaugcuagu

SEQ ID NO: 309597 - RNA, 32 nt, Human
agaaagguuaggaagaaagaggagacaaggac

SEQ ID NO: 309598 - RNA, 32 nt, Human
agaaagguuauuccggauggggacugaugcug

SEQ ID NO: 309599 - RNA, 32 nt, Human
agaaaguacaaagauaaaccuggacuucuccu

SEQ ID NO: 309600 - RNA, 31 nt, Human
agaaaguacaugucucccauugggaggauuu

SEQ ID NO: 309601 - RNA, 32 nt, Human
agaaaguacuauaugccugcuugauagcaugu

SEQ ID NO: 309602 - RNA, 16 nt, Human
agaaaguagcagggga

SEQ ID NO: 309603 - RNA, 32 nt, Human
agaaaguagcccaagaucuaggguuccuaaau

SEQ ID NO: 309604 - RNA, 32 nt, Human
agaaaguagcccucaaauaaacuguuauugca

SEQ ID NO: 309605 - RNA, 32 nt, Human
agaaaguagggaggaaggggaccaagccagag

SEQ ID NO: 309606 - RNA, 32 nt, Human
agaaaguagucugagcagugggagauuuuagu

SEQ ID NO: 309607 - RNA, 32 nt, Human
agaaaguauauguacaccaaaacauguugaac

SEQ ID NO: 309608 - RNA, 32 nt, Human
agaaagucacggacaaguucacugagagcguc

SEQ ID NO: 309609 - RNA, 32 nt, Human
agaaaguccaguaacagagaagaaaugucuca

SEQ ID NO: 309610 - RNA, 32 nt, Human
agaaagucccaccaccugcacauguguagccc

SEQ ID NO: 309611 - RNA, 32 nt, Human
agaaaguccugggcuaggagagugagucccug

SEQ ID NO: 309612 - RNA, 32 nt, Human
agaaaguccuucacuacauggccaggugcagu

SEQ ID NO: 309613 - RNA, 32 nt, Human
agaaagucggggcuucucgccccggaucccca

SEQ ID NO: 309614 - RNA, 32 nt, Human
agaaagucuccaccacuuucaaaaaucccgua

SEQ ID NO: 309615 - RNA, 17 nt, Human
agaaagucuccuggagg

SEQ ID NO: 309616 - RNA, 32 nt, Human
agaaagucugugagccuccacccugccagaaa

SEQ ID NO: 309617 - RNA, 32 nt, Human
agaaagugaaaacuuccagacaacugcagcag

SEQ ID NO: 309618 - RNA, 32 nt, Human
agaaagugacucuguucucuuagcaaccgucu

SEQ ID NO: 309619 - RNA, 32 nt, Human
agaaagugagaggagguuccagcugggcuucc

SEQ ID NO: 309620 - RNA, 24 nt, Human
agaaagugagguggugaccuccca

SEQ ID NO: 309621 - RNA, 31 nt, Human
agaaagugauauugaagaaaagacugaagug

SEQ ID NO: 309622 - RNA, 32 nt, Human
agaaagugauauugaagaaaagacugaaguga

SEQ ID NO: 309623 - RNA, 22 nt, Human
agaaagugauccgccugccugc

SEQ ID NO: 309624 - RNA, 32 nt, Human
agaaagugaucuaccacugaaaucauucuagg

SEQ ID NO: 309625 - RNA, 32 nt, Human
agaaagugcaagacaugccaauuugagacaca

SEQ ID NO: 309626 - RNA, 32 nt, Human
agaaagugccuaaacaucccuacugucucucu

SEQ ID NO: 309627 - RNA, 23 nt, Human
agaaagugcuggcucacuuucua

SEQ ID NO: 309628 - RNA, 32 nt, Human
agaaaguggaggggcgggcagagccagaucca

SEQ ID NO: 309629 - RNA, 32 nt, Human
agaaagugggcccugccugggcucagauuuag

SEQ ID NO: 309630 - RNA, 22 nt, Human
agaaaguggggggcucucagcc

SEQ ID NO: 309631 - RNA, 31 nt, Human
agaaaguguagauaguuaaaagacugcagcu

SEQ ID NO: 309632 - RNA, 32 nt, Human
agaaaguguauccgcuacaauaaaguucuggu

SEQ ID NO: 309633 - RNA, 32 nt, Human
agaaaguguaugauauaaaggacuuccagaca

SEQ ID NO: 309634 - RNA, 32 nt, Human
agaaaguguccaggugggggcuggcagucccu

SEQ ID NO: 309635 - RNA, 32 nt, Human
agaaaguuagaugaaucagugcccaagacaua

SEQ ID NO: 309636 - RNA, 19 nt, Human
agaaaguucagacccagga

SEQ ID NO: 309637 - RNA, 32 nt, Human
agaaaguucauguuugguaaauucuguuacua

SEQ ID NO: 309638 - RNA, 32 nt, Human
agaaaguugcauucucucaggggccuagauug

SEQ ID NO: 309639 - RNA, 32 nt, Human
agaaaguuuucagucgcaaaucacacauggaa

SEQ ID NO: 309640 - RNA, 32 nt, Human
agaaaguuuugguuagugcauaccguggaagg

SEQ ID NO: 309641 - RNA, 32 nt, Human
agaaauaaacucguaacccuguccuucaaaaa

SEQ ID NO: 309642 - RNA, 32 nt, Human
agaaauaaagagucuguuuuugcucaaaccau

SEQ ID NO: 309643 - RNA, 32 nt, Human
agaaauaaaggauggacaacaaucugggagac

SEQ ID NO: 309644 - RNA, 32 nt, Human
agaaauaaaguagggaaagaaggagagaggaa

SEQ ID NO: 309645 - RNA, 20 nt, Human
agaaauaaaguuugcuuaga

SEQ ID NO: 309646 - RNA, 23 nt, Human
agaaauaaaguuuguacuuggag

SEQ ID NO: 309647 - RNA, 18 nt, Human
agaaauaacagcugggga

SEQ ID NO: 309648 - RNA, 32 nt, Human
agaaauaacccagauauccuucaacaggugau

SEQ ID NO: 309649 - RNA, 32 nt, Human
agaaauaagagugcuggaucgcaugguaauuc

SEQ ID NO: 309650 - RNA, 32 nt, Human
agaaauaagagugcuggaucgcgugguaauuc

SEQ ID NO: 309651 - RNA, 19 nt, Human
agaaauaagaucacuuaga

SEQ ID NO: 309652 - RNA, 32 nt, Human
agaaauaagcuaauuggaucaguggcuuaaau

SEQ ID NO: 309653 - RNA, 32 nt, Human
agaaauaaguugacccaggaguacagucucaa

SEQ ID NO: 309654 - RNA, 32 nt, Human
agaaauaauagaaaugucucaaggcaguuaau

SEQ ID NO: 309655 - RNA, 32 nt, Human
agaaauaaucccaagucacaccaccuucuauu

SEQ ID NO: 309656 - RNA, 32 nt, Human
agaaauaauccuucugaagcaaagcaccacga

SEQ ID NO: 309657 - RNA, 32 nt, Human
agaaauaaugguagaaaaugucccagcuuuga

SEQ ID NO: 309658 - RNA, 32 nt, Human
agaaauaaugugcccuacagacccugggaccu

SEQ ID NO: 309659 - RNA, 32 nt, Human
agaaauacaaaaauuggcugggcgcgguggug

SEQ ID NO: 309660 - RNA, 32 nt, Human
agaaauacaguacaagccacuucauuuuggag

SEQ ID NO: 309661 - RNA, 32 nt, Human
agaaauacaguuacaguggaaggacuuuaaga

SEQ ID NO: 309662 - RNA, 32 nt, Human
agaaauaccacagcucagccacugugaugcag

SEQ ID NO: 309663 - RNA, 32 nt, Human
agaaauacccacagcauagugaccucagaccc

SEQ ID NO: 309664 - RNA, 32 nt, Human
agaaauaccuaauguagaugacagguugaugg

SEQ ID NO: 309665 - RNA, 19 nt, Human
agaaauacuguuucuggga

SEQ ID NO: 309666 - RNA, 32 nt, Human
agaaauagaaauuaagcuacuauauaaaacaa

SEQ ID NO: 309667 - RNA, 32 nt, Human
agaaauagagacugagagugagcaaccagcug

SEQ ID NO: 309668 - RNA, 32 nt, Human
agaaauagcaguccauuuucucuugcaagccc

SEQ ID NO: 309669 - RNA, 32 nt, Human
agaaauaggagcaaacccccaagaggcuuaau

SEQ ID NO: 309670 - RNA, 32 nt, Human
agaaauaggaggagacguccagcucuguccuc

SEQ ID NO: 309671 - RNA, 32 nt, Human
agaaauaggaggagguuuugaagaauaaagcc

SEQ ID NO: 309672 - RNA, 32 nt, Human
agaaauaggaucucacuauguugcccaggcug

SEQ ID NO: 309673 - RNA, 32 nt, Human
agaaauauagaccauaauggucauacugaggu

SEQ ID NO: 309674 - RNA, 32 nt, Human
agaaauauuccacuggggaugagggaaaaccc

SEQ ID NO: 309675 - RNA, 32 nt, Human
agaaauauuuuauaaacccuguucacagcaga

SEQ ID NO: 309676 - RNA, 32 nt, Human
agaaaucacaagaacaaauacacuuuauuaau

SEQ ID NO: 309677 - RNA, 32 nt, Human
agaaaucacaccacugcacucuagccugggca

SEQ ID NO: 309678 - RNA, 32 nt, Human
agaaaucacagcuguuuauuuucuguaaauca

SEQ ID NO: 309679 - RNA, 32 nt, Human
agaaaucacauuuuuggccaggcacaguggcu

SEQ ID NO: 309680 - RNA, 18 nt, Human
agaaaucacccgucuucu

SEQ ID NO: 309681 - RNA, 32 nt, Human
agaaaucaccuacaccagagagcuauuuuggu

SEQ ID NO: 309682 - RNA, 32 nt, Human
agaaaucaccugcuuuagggcugguaaaugca

SEQ ID NO: 309683 - RNA, 32 nt, Human
agaaaucagcaaccagccucuguuucaucugg

SEQ ID NO: 309684 - RNA, 32 nt, Human
agaaaucagcucauggcuuaggauggaauuag

SEQ ID NO: 309685 - RNA, 32 nt, Human
agaaaucaggaaaucugaaaacuucgauggaa

SEQ ID NO: 309686 - RNA, 32 nt, Human
agaaaucaguaguuuugcaauguuaauuauuu

SEQ ID NO: 309687 - RNA, 23 nt, Human
agaaaucagucuccgccaguggg

SEQ ID NO: 309688 - RNA, 32 nt, Human
agaaaucauauauguauggauauauuuuaaua

SEQ ID NO: 309689 - RNA, 32 nt, Human
agaaaucaucuagcaguaaacucucucggucu

SEQ ID NO: 309690 - RNA, 32 nt, Human
agaaaucauuagcucaugcgaauauaagagaa

SEQ ID NO: 309691 - RNA, 32 nt, Human
agaaauccaagaaaugaaaccaggaagguuuu

SEQ ID NO: 309692 - RNA, 32 nt, Human
agaaauccaucuuuucccaggucuccuucacu

SEQ ID NO: 309693 - RNA, 32 nt, Human
agaaauccgguuaaaaucagagucggagggag

SEQ ID NO: 309694 - RNA, 32 nt, Human
agaaauccuggccucugcucaugcgcaggcca

SEQ ID NO: 309695 - RNA, 32 nt, Human
agaaaucgagccugucccuugugcacuuggga

SEQ ID NO: 309696 - RNA, 32 nt, Human
agaaaucuacagaucuguuuuguacuuuuuau

SEQ ID NO: 309697 - RNA, 32 nt, Human
agaaaucuacuuuaaugucucuuucgaaagca

SEQ ID NO: 309698 - RNA, 21 nt, Human
agaaaucucagcgacagcaca

SEQ ID NO: 309699 - RNA, 23 nt, Human
agaaaucucagcuccacaaccca

SEQ ID NO: 309700 - RNA, 32 nt, Human
agaaaucuccagcugcucugaugauagccuaa

SEQ ID NO: 309701 - RNA, 32 nt, Human
agaaaucuccucaagccagagccugugcugug

SEQ ID NO: 309702 - RNA, 32 nt, Human
agaaaucugcauuucaacaaaaucccaaguuc

SEQ ID NO: 309703 - RNA, 32 nt, Human
agaaaucuggcuucuggccaggaagcuuuggu

SEQ ID NO: 309704 - RNA, 32 nt, Human
agaaaucuuguggccuuucaggagacuuucuu

SEQ ID NO: 309705 - RNA, 32 nt, Human
agaaaugaaaaauguuguguaugcuugaaaac

SEQ ID NO: 309706 - RNA, 32 nt, Human
agaaaugaaauacaaaugcuauagaaaaauuu

SEQ ID NO: 309707 - RNA, 32 nt, Human
agaaaugaagaaaagagaggaagaaagaaaga

SEQ ID NO: 309708 - RNA, 32 nt, Human
agaaaugaaguuacaggaggggcacaccgucc

SEQ ID NO: 309709 - RNA, 32 nt, Human
agaaaugaauacuuuaaaaagugauauauguu

SEQ ID NO: 309710 - RNA, 32 nt, Human
agaaaugacauacaagaucuccacgaauauca

SEQ ID NO: 309711 - RNA, 32 nt, Human
agaaaugacucugggagaggauuucccuuaug

SEQ ID NO: 309712 - RNA, 32 nt, Human
agaaaugagaucuggccccagcucagcucugc

SEQ ID NO: 309713 - RNA, 32 nt, Human
agaaaugaggaaaggugaagcuggagaggugg

SEQ ID NO: 309714 - RNA, 29 nt, Human
agaaaugaggcagaagcggaaaggagauc

SEQ ID NO: 309715 - RNA, 32 nt, Human
agaaaugagggugggagcaggaucaccacugg

SEQ ID NO: 309716 - RNA, 32 nt, Human
agaaaugaggucucgccauguugcucagacug

SEQ ID NO: 309717 - RNA, 18 nt, Human
agaaaugauacccaggag

SEQ ID NO: 309718 - RNA, 23 nt, Human
agaaaugauauaugcugcuuuua

SEQ ID NO: 309719 - RNA, 32 nt, Human
agaaaugaugcuucugcucaggaauggcccac

SEQ ID NO: 309720 - RNA, 32 nt, Human
agaaaugauucucucacaggcuugggaaaucc

SEQ ID NO: 309721 - RNA, 32 nt, Human
agaaaugcaaggggcugcaugaccuaccagga

SEQ ID NO: 309722 - RNA, 32 nt, Human
agaaaugcacacaacagaaccauaggcaacac

SEQ ID NO: 309723 - RNA, 32 nt, Human
agaaaugccagaccuguaucccagaaaauaaa

SEQ ID NO: 309724 - RNA, 32 nt, Human
agaaaugccagugaaagaugaagagagaugag

SEQ ID NO: 309725 - RNA, 32 nt, Human
agaaaugcccccaucagaaaugcucuuuuaga

SEQ ID NO: 309726 - RNA, 32 nt, Human
agaaaugcuggcauagagcagcacuaaaugac

SEQ ID NO: 309727 - RNA, 32 nt, Human
agaaaugcuugcuuuauagcugcuccacccuc

SEQ ID NO: 309728 - RNA, 32 nt, Human
agaaaugcuuuagaaucugaacuuuuuaagac

SEQ ID NO: 309729 - RNA, 32 nt, Human
agaaaugcuuuuaggauucagguagaaaaagu

SEQ ID NO: 309730 - RNA, 32 nt, Human
agaaauggagaaaagaagagaggacucucaag

SEQ ID NO: 309731 - RNA, 32 nt, Human
agaaauggagagaggcuuggaggcugggggug

SEQ ID NO: 309732 - RNA, 32 nt, Human
agaaauggaggugggagcuuagggaaugcaga

SEQ ID NO: 309733 - RNA, 32 nt, Human
agaaauggcaugggauaagagcagagcucaca

SEQ ID NO: 309734 - RNA, 31 nt, Human
agaaauggccucucuccucugucagagugga

SEQ ID NO: 309735 - RNA, 32 nt, Human
agaaauggcuguauguccaggagaccugcccu

SEQ ID NO: 309736 - RNA, 32 nt, Human
agaaaugggaaagaagagggagggagagagaa

SEQ ID NO: 309737 - RNA, 32 nt, Human
agaaaugggaccccaaguacccaaucuucccu

SEQ ID NO: 309738 - RNA, 32 nt, Human
agaaaugggagacuguuucucuggccucagaa

SEQ ID NO: 309739 - RNA, 32 nt, Human
agaaaugggagggcuccucuucacagcgaggg

SEQ ID NO: 309740 - RNA, 29 nt, Human
agaaaugggaggugaaaaugcagagauaa

SEQ ID NO: 309741 - RNA, 32 nt, Human
agaaaugggccagagaaaaagaugggacacuc

SEQ ID NO: 309742 - RNA, 32 nt, Human
agaaaugggcugggagugcuucuguccugcug

SEQ ID NO: 309743 - RNA, 32 nt, Human
agaaauggggauucaccauguuggucaggcua

SEQ ID NO: 309744 - RNA, 32 nt, Human
agaaauggggucuuguuauguugcccaggcug

SEQ ID NO: 309745 - RNA, 32 nt, Human
agaaaugggguuucaccauguuagccaggaug

SEQ ID NO: 309746 - RNA, 32 nt, Human
agaaaugggguuucaccauguuagccaggcug

SEQ ID NO: 309747 - RNA, 32 nt, Human
agaaaugggguuucaccauguuggccaggcug

SEQ ID NO: 309748 - RNA, 32 nt, Human
agaaaugggguuucaccauguuguccaggcug

SEQ ID NO: 309749 - RNA, 32 nt, Human
agaaaugggguuucacuguguuagccaggaug

SEQ ID NO: 309750 - RNA, 32 nt, Human
agaaaugggguuucgccacguuggccaggcug

SEQ ID NO: 309751 - RNA, 32 nt, Human
agaaaugggguuucgccauguugcucaggcug

SEQ ID NO: 309752 - RNA, 32 nt, Human
agaaaugggguuucgucauguuggccaggcug

SEQ ID NO: 309753 - RNA, 32 nt, Human
agaaaugggguuuuaccauguuguccaggcug

SEQ ID NO: 309754 - RNA, 25 nt, Human
agacaggguuucacuaugcugguca

SEQ ID NO: 309755 - RNA, 19 nt, Human
agacaggguuucacuaugu

SEQ ID NO: 309756 - RNA, 21 nt, Human
agacaggguuucacuauguug

SEQ ID NO: 309757 - RNA, 25 nt, Human
agacaggguuucacuauguuggcca

SEQ ID NO: 309758 - RNA, 20 nt, Human
agacaggguuucacuguguu

SEQ ID NO: 309759 - RNA, 21 nt, Human
agacaggguuucacuguguug

SEQ ID NO: 309760 - RNA, 21 nt, Human
agacaggguuucaucauguug

SEQ ID NO: 309761 - RNA, 22 nt, Human
agacaggguuucaucauguugg

SEQ ID NO: 309762 - RNA, 25 nt, Human
agacaggguuucaucauguuggcca

SEQ ID NO: 309763 - RNA, 21 nt, Human
agacaggguuucccuauguug

SEQ ID NO: 309764 - RNA, 21 nt, Human
agacaggguuucgcaauguug

SEQ ID NO: 309765 - RNA, 21 nt, Human
agacaggguuucgccacauug

SEQ ID NO: 309766 - RNA, 21 nt, Human
agacaggguuucgccauauug

SEQ ID NO: 309767 - RNA, 25 nt, Human
agacaggguuucgccauauuggcca

SEQ ID NO: 309768 - RNA, 21 nt, Human
agacaggguuucgccauguug

SEQ ID NO: 309769 - RNA, 25 nt, Human
agacaggguuucgccauguuggcca

SEQ ID NO: 309770 - RNA, 21 nt, Human
agacaggguuucuccaugcug

SEQ ID NO: 309771 - RNA, 21 nt, Human
agacaggguuucuccauguug

SEQ ID NO: 309772 - RNA, 25 nt, Human
agacaggguuucuccauguugguca

SEQ ID NO: 309773 - RNA, 21 nt, Human
agacaggguuuuaccauguug

SEQ ID NO: 309774 - RNA, 25 nt, Human
agacaggguuuuaccauguuggcca

SEQ ID NO: 309775 - RNA, 25 nt, Human
agacaggguuuuaccauguugguca

SEQ ID NO: 309776 - RNA, 21 nt, Human
agacaggguuuugccacguug

SEQ ID NO: 309777 - RNA, 20 nt, Human
agacaggguuuugccauguu

SEQ ID NO: 309778 - RNA, 21 nt, Human
agacaggguuuugccauguug

SEQ ID NO: 309779 - RNA, 21 nt, Human
agacaggguuuugccguguug

SEQ ID NO: 309780 - RNA, 21 nt, Human
agacaggguuuugcuauguua

SEQ ID NO: 309781 - RNA, 22 nt, Human
agacaggugucucacuguguug

SEQ ID NO: 309782 - RNA, 32 nt, Human
agacagguguuaaugcaucuaugggccaggug

SEQ ID NO: 309783 - RNA, 32 nt, Human
agacagguugucuuuuggaaaugcagguuuaa

SEQ ID NO: 309784 - RNA, 24 nt, Human
agacagguuucaccacauugguca

SEQ ID NO: 309785 - RNA, 20 nt, Human
agacagguuucaccauauug

SEQ ID NO: 309786 - RNA, 24 nt, Human
agacagguuucaccauauuggcca

SEQ ID NO: 309787 - RNA, 20 nt, Human
agacagguuucaccauguug

SEQ ID NO: 309788 - RNA, 24 nt, Human
agacagguuucaccauguuggcca

SEQ ID NO: 309789 - RNA, 20 nt, Human
agacagguuuucaccauguu

SEQ ID NO: 309790 - RNA, 21 nt, Human
agacagguuuucaccauguug

SEQ ID NO: 309791 - RNA, 25 nt, Human
agacagguuuucaccauguugccca

SEQ ID NO: 309792 - RNA, 25 nt, Human
agacagguuuucaccauguuggcca

SEQ ID NO: 309793 - RNA, 25 nt, Human
agacagguuuuugccauguuggcca

SEQ ID NO: 309794 - RNA, 32 nt, Human
agacaguagaggcaugaacacacauggaugca

SEQ ID NO: 309795 - RNA, 32 nt, Human
agacaguauuugcagugccgaugauauagagu

SEQ ID NO: 309796 - RNA, 32 nt, Human
agacagucacacacaggcaguggagcuccccu

SEQ ID NO: 309797 - RNA, 32 nt, Human
agacaguccagccugaggucacugccugggau

SEQ ID NO: 309798 - RNA, 32 nt, Human
agacagucccccaggcugagucaaaagugguu

SEQ ID NO: 309799 - RNA, 32 nt, Human
agacagucccuauccucaaaggaugcuacagu

SEQ ID NO: 309800 - RNA, 32 nt, Human
agacaguccuagccuauagaacuccuaccucc

SEQ ID NO: 309801 - RNA, 32 nt, Human
agacagucuccucuguugccaggcuggaaugc

SEQ ID NO: 309802 - RNA, 32 nt, Human
agacagucucugaggaagccacagaaguucac

SEQ ID NO: 309803 - RNA, 32 nt, Human
agacagucuugcuccagcccaggcuggagugc

SEQ ID NO: 309804 - RNA, 32 nt, Human
agacagugagaggagagcauuaagccaagcuc

SEQ ID NO: 309805 - RNA, 32 nt, Human
agacagugaucauuaggaugaagaggaagaga

SEQ ID NO: 309806 - RNA, 32 nt, Human
agacagugccauugcacuccagccugcacaac

SEQ ID NO: 309807 - RNA, 32 nt, Human
agacagugcuggcugagucuccgccuugcugg

SEQ ID NO: 309808 - RNA, 31 nt, Human
agacaguggacaaucccaguggcccagacaa

SEQ ID NO: 309809 - RNA, 32 nt, Human
agacaguggagaauuuacggaaugacaugaau

SEQ ID NO: 309810 - RNA, 32 nt, Human
agacaguggcaaacgccagcagggcugcugug

SEQ ID NO: 309811 - RNA, 32 nt, Human
agacaguggggcaaccucaggagaagcagacc

SEQ ID NO: 309812 - RNA, 32 nt, Human
agacagugucaggccaggcaugguggcucaca

SEQ ID NO: 309813 - RNA, 32 nt, Human
agacaguguccuuccuuucccagcagcagugc

SEQ ID NO: 309814 - RNA, 32 nt, Human
agacagugugggcugagagcagagggagcccu

SEQ ID NO: 309815 - RNA, 32 nt, Human
agacaguguuagggaucuuggaagcacagcca

SEQ ID NO: 309816 - RNA, 21 nt, Human
agacaguguuucaccauguug

SEQ ID NO: 309817 - RNA, 21 nt, Human
agacaguguuucgccauguug

SEQ ID NO: 309818 - RNA, 25 nt, Human
agacaguguuucgccauguuggcca

SEQ ID NO: 309819 - RNA, 32 nt, Human
agacaguuagagacucugucacccuagcuaua

SEQ ID NO: 309820 - RNA, 32 nt, Human
agacaguucuccuguggcaguggcgauguggc

SEQ ID NO: 309821 - RNA, 32 nt, Human
agacauaaaguuucuggucaaaaggguuauag

SEQ ID NO: 309822 - RNA, 32 nt, Human
agacauaaauguucacuuuaaagcaauugcau

SEQ ID NO: 309823 - RNA, 32 nt, Human
agacauaacuggacauggcagacacugcuuug

SEQ ID NO: 309824 - RNA, 32 nt, Human
agacauaauauuucuccaccuggcagaaaagu

SEQ ID NO: 309825 - RNA, 23 nt, Human
agacauacacacaugugcacaca

SEQ ID NO: 309826 - RNA, 32 nt, Human
agacauacaugggucuuagaaaccacuuuccu

SEQ ID NO: 309827 - RNA, 32 nt, Human
agacauacauuucucauaccuuccccacaucu

SEQ ID NO: 309828 - RNA, 32 nt, Human
agacauacuucugaaaguucugcucuaucuca

SEQ ID NO: 309829 - RNA, 32 nt, Human
agacauagaggaaguagggggugguaugagau

SEQ ID NO: 309830 - RNA, 32 nt, Human
agacauagcccaaacccuggcuuauucuuggg

SEQ ID NO: 309831 - RNA, 21 nt, Human
agacauagucucacucuguca

SEQ ID NO: 309832 - RNA, 32 nt, Human
agacauauaggacacugucuuccuucaagagg

SEQ ID NO: 309833 - RNA, 32 nt, Human
agacauauccuaaaaagaggcagcugcccggu

SEQ ID NO: 309834 - RNA, 32 nt, Human
agacauaucucucauuuuucauuuuguugcua

SEQ ID NO: 309835 - RNA, 32 nt, Human
agacaucaagaaauggagaaagacugaaaguu

SEQ ID NO: 309836 - RNA, 20 nt, Human
agacaucaaggaucaaggau

SEQ ID NO: 309837 - RNA, 32 nt, Human
agacaucaaucagguucucuucucuuucuuag

SEQ ID NO: 309838 - RNA, 32 nt, Human
agacaucacagauuaccugaaaccccuuccag

SEQ ID NO: 309839 - RNA, 32 nt, Human
agacaucacgucacccaccagccugggcccgg

SEQ ID NO: 309840 - RNA, 19 nt, Human
agacaucacucaucuuccu

SEQ ID NO: 309841 - RNA, 32 nt, Human
agacaucacugccaacuuagccccagagugac

SEQ ID NO: 309842 - RNA, 32 nt, Human
agacaucagcacuuaccucugagaaggaaaau

SEQ ID NO: 309843 - RNA, 32 nt, Human
agacaucaucccuuguauaccaucguagacuu

SEQ ID NO: 309844 - RNA, 32 nt, Human
agacaucauccuaccaggccuugcagcgggug

SEQ ID NO: 309845 - RNA, 32 nt, Human
agacaucauuauacuccuacuuggcacugcaa

SEQ ID NO: 309846 - RNA, 32 nt, Human
agacaucauuucagaagguggggcagcugcuu

SEQ ID NO: 309847 - RNA, 31 nt, Human
agacauccaauaaauauuuuuggaaggaaaa

SEQ ID NO: 309848 - RNA, 32 nt, Human
agacauccaccagaaucaacucagccucaggc

SEQ ID NO: 309849 - RNA, 32 nt, Human
agacauccaggaagaugcagccagcagacaaa

SEQ ID NO: 309850 - RNA, 32 nt, Human
agacauccaguuuuaacaacaaaagaguuauu

SEQ ID NO: 309851 - RNA, 32 nt, Human
agacaucccacacccccacccagcacacacac

SEQ ID NO: 309852 - RNA, 32 nt, Human
agacaucccugagacuguucucccugacacug

SEQ ID NO: 309853 - RNA, 32 nt, Human
agacauccucaccaucuccauccgcucucacg

SEQ ID NO: 309854 - RNA, 32 nt, Human
agacauccucagcuccaggccucccuucuucu

SEQ ID NO: 309855 - RNA, 32 nt, Human
agacauccugguucuacaguccuggcugauuc

SEQ ID NO: 309856 - RNA, 22 nt, Human
agacaucuccuauagcuugcua

SEQ ID NO: 309857 - RNA, 32 nt, Human
agacaucugacuaauggcucugugccacacuc

SEQ ID NO: 309858 - RNA, 32 nt, Human
agacaucugcaguguugaggccagucacuguu

SEQ ID NO: 309859 - RNA, 32 nt, Human
agacaucugcuccaucagaccucuuccauuuu

SEQ ID NO: 309860 - RNA, 32 nt, Human
agacaucuggaacuuccguccuguaccugacu

SEQ ID NO: 309861 - RNA, 32 nt, Human
agacaucuuccaagcauauaaacaauugcuuu

SEQ ID NO: 309862 - RNA, 32 nt, Human
agacaucuucucccucccuugccucagauuua

SEQ ID NO: 309863 - RNA, 32 nt, Human
agacaucuucucccucccuugccucagggaag

SEQ ID NO: 309864 - RNA, 32 nt, Human
agacaucuugaagugucagauuacaggaguac

SEQ ID NO: 309865 - RNA, 32 nt, Human
agacaucuuuccucacugccagccugccauug

SEQ ID NO: 309866 - RNA, 20 nt, Human
agacaucuuuccugcauugc

SEQ ID NO: 309867 - RNA, 32 nt, Human
agacaucuuugugacccaggagcaccacuggu

SEQ ID NO: 309868 - RNA, 32 nt, Human
agacaucuuuucucccugccccaccugaaggc

SEQ ID NO: 309869 - RNA, 32 nt, Human
agacaugaaaccuuacacgcucuugggauauu

SEQ ID NO: 309870 - RNA, 32 nt, Human
agacaugaaauccuauauggcauucugucuca

SEQ ID NO: 309871 - RNA, 22 nt, Human
agacaugaagagacaauggaug

SEQ ID NO: 309872 - RNA, 32 nt, Human
agacaugaauuuuaaauaauguauuuacuuuu

SEQ ID NO: 309873 - RNA, 32 nt, Human
agacaugacuuauucucuguucauacagcaag

SEQ ID NO: 309874 - RNA, 29 nt, Human
agacaugagacaccuccuagagcccuuug

SEQ ID NO: 309875 - RNA, 32 nt, Human
agacaugagaugguagccaaacccccaguaau

SEQ ID NO: 309876 - RNA, 32 nt, Human
agacaugagccaccucgcccagccuuuucaua

SEQ ID NO: 309877 - RNA, 32 nt, Human
agacaugaggaaagacccucuuauuugugauu

SEQ ID NO: 309878 - RNA, 32 nt, Human
agacaugagguuuugccauguuguccgggcug

SEQ ID NO: 309879 - RNA, 32 nt, Human
agacaugcaaaaagauuauagcaccagcaaua

SEQ ID NO: 309880 - RNA, 32 nt, Human
agacaugcacacagcauaauucaaugucuauu

SEQ ID NO: 309881 - RNA, 32 nt, Human
agacaugcacacuaauacacauacacaccaaa

SEQ ID NO: 309882 - RNA, 29 nt, Human
agacaugccaccacugcucuuugaggugu

SEQ ID NO: 309883 - RNA, 32 nt, Human
agacaugcccaagaggaaggaaguacugacca

SEQ ID NO: 309884 - RNA, 32 nt, Human
agacaugcuauuguagccucaagacagaugca

SEQ ID NO: 309885 - RNA, 32 nt, Human
agacaugcucuuccucucguuucaugcaggcu

SEQ ID NO: 309886 - RNA, 29 nt, Human
agacaugcugaauuccacgggcgaacugg

SEQ ID NO: 309887 - RNA, 32 nt, Human
agacaugcugcacgucuguacccuucucagau

SEQ ID NO: 309888 - RNA, 31 nt, Human
agacaugcuggugucuacacagcagaagaag

SEQ ID NO: 309889 - RNA, 32 nt, Human
agacaugcuucugcuuuucugcugucuuuguu

SEQ ID NO: 309890 - RNA, 32 nt, Human
agacauggaagaggaagaacaaaguccccucu

SEQ ID NO: 309891 - RNA, 29 nt, Human
agacauggaccagggcuacggaggcuacg

SEQ ID NO: 309892 - RNA, 32 nt, Human
agacauggagccccucccuuggucagacucug

SEQ ID NO: 309893 - RNA, 32 nt, Human
agacauggcacguguucugaaaccacuggugu

SEQ ID NO: 309894 - RNA, 32 nt, Human
agacauggcuuaugauugaaagcacaauuuuc

SEQ ID NO: 309895 - RNA, 32 nt, Human
agacauggcuuccuuauugcuggaagaggagg

SEQ ID NO: 309896 - RNA, 32 nt, Human
agacaugggaaaauugguuuauaccaagaaag

SEQ ID NO: 309897 - RNA, 32 nt, Human
agacaugggagauagaauagagaauccagaaa

SEQ ID NO: 309898 - RNA, 32 nt, Human
agacauggggaguuggagcugaaggaggaaug

SEQ ID NO: 309899 - RNA, 32 nt, Human
agacaugggguuucaccacauuggccaggcug

SEQ ID NO: 309900 - RNA, 23 nt, Human
agacaugggguuucaccauguug

SEQ ID NO: 309901 - RNA, 32 nt, Human
agacaugggguuucaccauguugcccaggcug

SEQ ID NO: 309902 - RNA, 32 nt, Human
agacauggguucuguuuguucuuauggacuuc

SEQ ID NO: 309903 - RNA, 21 nt, Human
agacauggucucacuauguug

SEQ ID NO: 309904 - RNA, 32 nt, Human
agacauguauaugucuugggaucccagagauu

SEQ ID NO: 309905 - RNA, 32 nt, Human
agacaugugcuaaggacuugauuuccccauug

SEQ ID NO: 309906 - RNA, 32 nt, Human
agacauguuagguauauaaggaguguagauaa

SEQ ID NO: 309907 - RNA, 32 nt, Human
agacauguucacgggcaucuaucagaugcccc

SEQ ID NO: 309908 - RNA, 22 nt, Human
agacauguucauuccaagcaca

SEQ ID NO: 309909 - RNA, 32 nt, Human
agacauguucgaggacuagcugagggagagag

SEQ ID NO: 309910 - RNA, 32 nt, Human
agacauguuguugccgggcaugguagcucaca

SEQ ID NO: 309911 - RNA, 32 nt, Human
agacauguuuaaguaagguaggcucauguugc

SEQ ID NO: 309912 - RNA, 32 nt, Human
agacauuaacagcaacauaaggaucuccaucu

SEQ ID NO: 309913 - RNA, 32 nt, Human
agacauuauuucauuggacuguucccaggccc

SEQ ID NO: 309914 - RNA, 32 nt, Human
agacauuccaauacugcuuaauuauagcacuu

SEQ ID NO: 309915 - RNA, 32 nt, Human
agacauuccuccugcgcagggccaagugccca

SEQ ID NO: 309916 - RNA, 32 nt, Human
agacauuccucuugggcuuuuuguaacugaaa

SEQ ID NO: 309917 - RNA, 32 nt, Human
agacauuccuuaaccaucagagcagaggagga

SEQ ID NO: 309918 - RNA, 32 nt, Human
agacauuccuuccuguuucugccaugggaagu

SEQ ID NO: 309919 - RNA, 32 nt, Human
agacauucguaggcugagaaaugauuccugcu

SEQ ID NO: 309920 - RNA, 32 nt, Human
agacauugaccccucccuccaugugguaaacc

SEQ ID NO: 309921 - RNA, 32 nt, Human
agacauugccaaggaauuuuacuggaagacuc

SEQ ID NO: 309922 - RNA, 32 nt, Human
agacauugcccucagaagggcagggaggaggu

SEQ ID NO: 309923 - RNA, 32 nt, Human
agacauugccggugaccuggccccagacuaac

SEQ ID NO: 309924 - RNA, 32 nt, Human
agacauugcgagcuuuguggagcuccaggaag

SEQ ID NO: 309925 - RNA, 32 nt, Human
agacauugcugccagccagcucugccuuccca

SEQ ID NO: 309926 - RNA, 32 nt, Human
agacauugcuguuccugcccaucccagugcca

SEQ ID NO: 309927 - RNA, 22 nt, Human
agacauuggucucacuguguug

SEQ ID NO: 309928 - RNA, 32 nt, Human
agacauugugccaggcaguuguguacugucuc

SEQ ID NO: 309929 - RNA, 32 nt, Human
agacauugugguccacaaagcuuacauuuauu

SEQ ID NO: 309930 - RNA, 32 nt, Human
agacauuuauggaaggaaaacaucccauauaa

SEQ ID NO: 309931 - RNA, 23 nt, Human
agacauuucuuaaugauuccacu

SEQ ID NO: 309932 - RNA, 32 nt, Human
agacauuugcagggaagggagaugucugauuc

SEQ ID NO: 309933 - RNA, 32 nt, Human
agacauuuggacacauggaguuugugcugaag

SEQ ID NO: 309934 - RNA, 32 nt, Human
agacauuuuaaugcagauccucuccuuuacag

SEQ ID NO: 309935 - RNA, 32 nt, Human
agacauuuucaucuccccaaaaggagacccca

SEQ ID NO: 309936 - RNA, 32 nt, Human
agacauuuugccucugauaagcacuuuuuaaa

SEQ ID NO: 309937 - RNA, 24 nt, Human
agaccaaaagcuucuauccagagg

SEQ ID NO: 309938 - RNA, 23 nt, Human
agaccaaaaucccaacucagaga

SEQ ID NO: 309939 - RNA, 32 nt, Human
agaccaaaccaugccaaccacgcuggcaacug

SEQ ID NO: 309940 - RNA, 19 nt, Human
agaccaaacuagaccacca

SEQ ID NO: 309941 - RNA, 32 nt, Human
agaccaaagaugaccucgugucagacuguggg

SEQ ID NO: 309942 - RNA, 32 nt, Human
agaccaaaggcaggccuggcugggugcagugg

SEQ ID NO: 309943 - RNA, 32 nt, Human
agaccaaaggccaacucugcuacuacugccac

SEQ ID NO: 309944 - RNA, 23 nt, Human
agaccaaaguugacccucgggua

SEQ ID NO: 309945 - RNA, 32 nt, Human
agaccaacaccugucugugccucaaugccacc

SEQ ID NO: 309946 - RNA, 32 nt, Human
agaccaaccagccuggccaauucaaaggcaag

SEQ ID NO: 309947 - RNA, 32 nt, Human
agaccaaccaucauuaauguuaauagaggaaa

SEQ ID NO: 309948 - RNA, 32 nt, Human
agaccaaccuauauccaaacuuuuauaaaaua

SEQ ID NO: 309949 - RNA, 24 nt, Human
agaccaaccucuguggccugggca

SEQ ID NO: 309950 - RNA, 32 nt, Human
agaccaaccugaccaacauggagaaacccguc

SEQ ID NO: 309951 - RNA, 32 nt, Human
agaccaaccugaccaacauggagaaacccugu

SEQ ID NO: 309952 - RNA, 32 nt, Human
agaccaaccugacuaacauggugaaaccccau

SEQ ID NO: 309953 - RNA, 22 nt, Human
agaccaaccuggacaacauagc

SEQ ID NO: 309954 - RNA, 24 nt, Human
agaccaaccugggcaacaccguga

SEQ ID NO: 309955 - RNA, 22 nt, Human
agaccaaccugggcaacauagc

SEQ ID NO: 309956 - RNA, 24 nt, Human
agaccaaccugggcaacauaguga

SEQ ID NO: 309957 - RNA, 22 nt, Human
agaccaaccugggcaauauagu

SEQ ID NO: 309958 - RNA, 32 nt, Human
agaccaaccuggugaaaccccgucucuacaaa

SEQ ID NO: 309959 - RNA, 23 nt, Human
agaccaaccuugggcaacauagc

SEQ ID NO: 309960 - RNA, 32 nt, Human
agaccaacgagccaccacagccaccaguccca

SEQ ID NO: 309961 - RNA, 32 nt, Human
agaccaacugaccuucuccuaggcagcuccuu

SEQ ID NO: 309962 - RNA, 32 nt, Human
agaccaacugaugcagaaacaggaggugugag

SEQ ID NO: 309963 - RNA, 32 nt, Human
agaccaagaagucugggcuggguccagucccc

SEQ ID NO: 309964 - RNA, 20 nt, Human
agaccaagaccacucugggu

SEQ ID NO: 309965 - RNA, 32 nt, Human
agaccaagaccacucuggguucuuauucuaac

SEQ ID NO: 309966 - RNA, 32 nt, Human
agaccaagacuuuuguucuguuuuucuacaac

SEQ ID NO: 309967 - RNA, 32 nt, Human
agaccaagagguguggaaggaaaagugggguu

SEQ ID NO: 309968 - RNA, 32 nt, Human
agaccaagaguaucuuugaggguuaguacaga

SEQ ID NO: 309969 - RNA, 32 nt, Human
agaccaagauggaggcuguggagcagcauuuc

SEQ ID NO: 309970 - RNA, 24 nt, Human
agaccaagcagcugacccgugagg

SEQ ID NO: 309971 - RNA, 24 nt, Human
agaccaagcccccuccuccuggaa

SEQ ID NO: 309972 - RNA, 32 nt, Human
agaccaaggaggcagcaaccugccuuuccccc

SEQ ID NO: 309973 - RNA, 32 nt, Human
agaccaaggcagggccagaggggacggugccc

SEQ ID NO: 309974 - RNA, 24 nt, Human
agaccaaggggcagccccuggagg

SEQ ID NO: 309975 - RNA, 32 nt, Human
agaccaaggguuggugcagccuccucgccgcg

SEQ ID NO: 309976 - RNA, 21 nt, Human
agaccaaggucuccagaagcu

SEQ ID NO: 309977 - RNA, 32 nt, Human
agaccaaguauggggaaaaccaggcaccagcc

SEQ ID NO: 309978 - RNA, 32 nt, Human
agaccaaguccuccacagagggcgagccaggg

SEQ ID NO: 309979 - RNA, 21 nt, Human
agaccaagucuccaucugaga

SEQ ID NO: 309980 - RNA, 32 nt, Human
agaccaagucuccugugccucucaccuguccc

SEQ ID NO: 309981 - RNA, 22 nt, Human
agaccaaguugccaucugggga

SEQ ID NO: 309982 - RNA, 32 nt, Human
agaccaauauggugaaaccccaucucuacuaa

SEQ ID NO: 309983 - RNA, 21 nt, Human
agaccaaucucaccccagagg

SEQ ID NO: 309984 - RNA, 32 nt, Human
agaccaauggaacagaacagggcccucagaaa

SEQ ID NO: 309985 - RNA, 32 nt, Human
agaccaaugggaggcacucuuggccgaccuac

SEQ ID NO: 309986 - RNA, 32 nt, Human
agaccaaugucuggccugcggagcugcagggg

SEQ ID NO: 309987 - RNA, 32 nt, Human
agaccacacagcccugaccgggccuuggagga

SEQ ID NO: 309988 - RNA, 32 nt, Human
agaccacaccacugcacuccauccugggcaac

SEQ ID NO: 309989 - RNA, 32 nt, Human
agaccacaccacugcacuccugccugggcaau

SEQ ID NO: 309990 - RNA, 32 nt, Human
agaccacaccauugcacuccagccugggcaac

SEQ ID NO: 309991 - RNA, 32 nt, Human
agaccacacugaggaaguugugaguugauaau

SEQ ID NO: 309992 - RNA, 32 nt, Human
agaccacagaaaagagaaagaaaaggaaaggc

SEQ ID NO: 309993 - RNA, 32 nt, Human
agaccacagagcccuggguuguggaagaggug

SEQ ID NO: 309994 - RNA, 32 nt, Human
agaccacagcacucuaugucuacuucuauuau

SEQ ID NO: 309995 - RNA, 32 nt, Human
agaccacagcauguccaucagcucagcagagc

SEQ ID NO: 309996 - RNA, 32 nt, Human
agaccacaggcaggccguguacugcaccacug

SEQ ID NO: 309997 - RNA, 32 nt, Human
agaccacaggcagggcagaggcacgucugggu

SEQ ID NO: 309998 - RNA, 32 nt, Human
agaccacaggugcgcaccaccauacccagcua

SEQ ID NO: 309999 - RNA, 32 nt, Human
agaccaccaagccuugauugguguugccaguu

SEQ ID NO: 310000 - RNA, 32 nt, Human
agaccaccaccaccuucuccccauagcgacuc

SEQ ID NO: 310001 - RNA, 32 nt, Human
agaccaccacccaugaucccaggcuggaggaa

SEQ ID NO: 310002 - RNA, 21 nt, Human
agaccaccagccacccagugg

SEQ ID NO: 310003 - RNA, 32 nt, Human
agaccaccauguccaaggucugacagcucccc

SEQ ID NO: 310004 - RNA, 32 nt, Human
agaccacccagcccugaccugggaccccaggc

SEQ ID NO: 310005 - RNA, 32 nt, Human
agaccaccccgccugcccucauggccccucug

SEQ ID NO: 310006 - RNA, 32 nt, Human
agaccacccuccugcugggaaaacugccaggg

SEQ ID NO: 310007 - RNA, 32 nt, Human
agaccacccugaccaacauagagaaaccccgu

SEQ ID NO: 310008 - RNA, 32 nt, Human
agaccacccugacuaacauggagagacccugu

SEQ ID NO: 310009 - RNA, 24 nt, Human
agaccacccugggcaacauagcga

SEQ ID NO: 310010 - RNA, 18 nt, Human
agaccaccggccucggcc

SEQ ID NO: 310011 - RNA, 32 nt, Human
agaccaccggcugagggagaaggugaagcagc

SEQ ID NO: 310012 - RNA, 32 nt, Human
agaccaccguguggggacgcccccaggccgga

SEQ ID NO: 310013 - RNA, 23 nt, Human
agaccaccuuggcaacacaguga

SEQ ID NO: 310014 - RNA, 32 nt, Human
agaccaccuuucuccccugagaggagcuucug

SEQ ID NO: 310015 - RNA, 32 nt, Human
agaccacgccacugcacuccagcccgggugac

SEQ ID NO: 310016 - RNA, 32 nt, Human
agaccacgccauugcacuccagccugggugac

SEQ ID NO: 310017 - RNA, 32 nt, Human
agaccacgccauugcacuccagcuugggcaau

SEQ ID NO: 310018 - RNA, 32 nt, Human
agaccacgccguggagaggaccagccucaggu

SEQ ID NO: 310019 - RNA, 32 nt, Human
agaccacgcucccuccugagcgcagguccucu

SEQ ID NO: 310020 - RNA, 32 nt, Human
agaccacggacaucuaugacaaaaagaacaug

SEQ ID NO: 310021 - RNA, 32 nt, Human
agaccacguuuagccaguucuaaagcaaagaa

SEQ ID NO: 310022 - RNA, 32 nt, Human
agaccacucaaaacaugcuuacacuaacacuu

SEQ ID NO: 310023 - RNA, 20 nt, Human
agaccacucauccucuggaa

SEQ ID NO: 310024 - RNA, 32 nt, Human
agaccacuccacugcacccaguguggccguac

SEQ ID NO: 310025 - RNA, 32 nt, Human
agaccacugcacuccagccugggcaacagagc

SEQ ID NO: 310026 - RNA, 21 nt, Human
agaccacugccagcccuccag

SEQ ID NO: 310027 - RNA, 32 nt, Human
agaccacugccauaugauuuacauuuccucac

SEQ ID NO: 310028 - RNA, 32 nt, Human
agaccacugcccuccagccugggcaauagagc

SEQ ID NO: 310029 - RNA, 32 nt, Human
agaccacuguggccauggcaggaguagacaag

SEQ ID NO: 310030 - RNA, 22 nt, Human
agaccacuguuucuggaguauc

SEQ ID NO: 310031 - RNA, 32 nt, Human
agaccagacuccugucucuguuuggaaagaaa

SEQ ID NO: 310032 - RNA, 32 nt, Human
agaccagacucgcuucccauggugggaaacag

SEQ ID NO: 310033 - RNA, 32 nt, Human
agaccagacucugacucuccucuuggggcugc

SEQ ID NO: 310034 - RNA, 32 nt, Human
agaccagacugaccaacauggagaaaccccau

SEQ ID NO: 310035 - RNA, 24 nt, Human
agaccagacuggccaacacagcga

SEQ ID NO: 310036 - RNA, 18 nt, Human
agaccagaggaacagaga

SEQ ID NO: 310037 - RNA, 32 nt, Human
agaccagaguugagacaaaaagaaauaagauu

SEQ ID NO: 310038 - RNA, 32 nt, Human
agaccagaucaguuacauguauaucuugccuc

SEQ ID NO: 310039 - RNA, 32 nt, Human
agaccagauggguugccccaggauccggcugc

SEQ ID NO: 310040 - RNA, 32 nt, Human
agaccagauguuggcugcuguacuuacucccu

SEQ ID NO: 310041 - RNA, 32 nt, Human
agaccagcaaacagcacaaggcguggcccacc

SEQ ID NO: 310042 - RNA, 32 nt, Human
agaccagcaagggggcagaccccgcacucgcc

SEQ ID NO: 310043 - RNA, 32 nt, Human
agaccagcaccagugucugccucugagaaugu

SEQ ID NO: 310044 - RNA, 32 nt, Human
agaccagcagccuggccaauauggugaaacuu

SEQ ID NO: 310045 - RNA, 32 nt, Human
agaccagcaucuccucuccuuaucaggaacau

SEQ ID NO: 310046 - RNA, 32 nt, Human
agaccagcaugaccaacauggagaaaccccgu

SEQ ID NO: 310047 - RNA, 32 nt, Human
agaccagcaugaccaacauggcgaaaccccau

SEQ ID NO: 310048 - RNA, 32 nt, Human
agaccagcaugaccaacauggugaaacccugu

SEQ ID NO: 310049 - RNA, 32 nt, Human
agaccagcauuugcacaauaucaccaggcuuc

SEQ ID NO: 310050 - RNA, 22 nt, Human
agaccagccaaggcaacauggu

SEQ ID NO: 310051 - RNA, 24 nt, Human
agaccagccagagcaacacaguga

SEQ ID NO: 310052 - RNA, 32 nt, Human
agaccagccagauuuucaagcuucauucuguu

SEQ ID NO: 310053 - RNA, 22 nt, Human
agaccagcccagccaacauggc

SEQ ID NO: 310054 - RNA, 32 nt, Human
agaccagcccagccaacauggucccaggugug

SEQ ID NO: 310055 - RNA, 22 nt, Human
agaccagcccaggcaacaaagu

SEQ ID NO: 310056 - RNA, 24 nt, Human
agaccagcccaggcaacaugguga

SEQ ID NO: 310057 - RNA, 22 nt, Human
agaccagcccgggcaacauggc

SEQ ID NO: 310058 - RNA, 21 nt, Human
agaccagcccgggcaagcagu

SEQ ID NO: 310059 - RNA, 32 nt, Human
agaccagcccgggcaauucagugagauguuca

SEQ ID NO: 310060 - RNA, 23 nt, Human
agaccagcccgggccuauggcga

SEQ ID NO: 310061 - RNA, 22 nt, Human
agaccagcccgggcgacacagc

SEQ ID NO: 310062 - RNA, 32 nt, Human
agaccagcccugccgccgccuccuggaagggg

SEQ ID NO: 310063 - RNA, 22 nt, Human
agaccagccggggcaacauagc

SEQ ID NO: 310064 - RNA, 24 nt, Human
agaccagccuaaacaacauaguga

SEQ ID NO: 310065 - RNA, 19 nt, Human
agaccagccuagcagggca

SEQ ID NO: 310066 - RNA, 24 nt, Human
agaccagccuaggcaacacaggga

SEQ ID NO: 310067 - RNA, 24 nt, Human
agaccagccuaggcaacacaguga

SEQ ID NO: 310068 - RNA, 22 nt, Human
agaccagccuaggcaacauagc

SEQ ID NO: 310069 - RNA, 24 nt, Human
agaccagccuaggcaacauaggga

SEQ ID NO: 310070 - RNA, 24 nt, Human
agaccagccuaggcaacauaguga

SEQ ID NO: 310071 - RNA, 24 nt, Human
agaccagccuaggcaacauggaga

SEQ ID NO: 310072 - RNA, 22 nt, Human
agaccagccuaggcaacauggc

SEQ ID NO: 310073 - RNA, 24 nt, Human
agaccagccuaggcaacauggcga

SEQ ID NO: 310074 - RNA, 24 nt, Human
agaccagccuaggcaacaugguga

SEQ ID NO: 310075 - RNA, 22 nt, Human
agaccagccuaggcaacauugc

SEQ ID NO: 310076 - RNA, 22 nt, Human
agaccagccuaggcaagauggc

SEQ ID NO: 310077 - RNA, 22 nt, Human
agaccagccuaggcaauguagu

SEQ ID NO: 310078 - RNA, 24 nt, Human
agaccagccuaggcagcauaguga

SEQ ID NO: 310079 - RNA, 23 nt, Human
agaccagccuaggcaugauaaga

SEQ ID NO: 310080 - RNA, 24 nt, Human
agaccagccucaucaacacaguga

SEQ ID NO: 310081 - RNA, 32 nt, Human
agaccagccuccuggccaacauggugaaacuc

SEQ ID NO: 310082 - RNA, 20 nt, Human
agaccagccucgcacagcga

SEQ ID NO: 310083 - RNA, 24 nt, Human
agaccagccugaacaacaugguga

SEQ ID NO: 310084 - RNA, 32 nt, Human
agaccagccugacauggugaaaccccaucucu

SEQ ID NO: 310085 - RNA, 32 nt, Human
agaccagccugaccaaacauggcgaaacccca

SEQ ID NO: 310086 - RNA, 32 nt, Human
agaccagccugaccaacacggagaaaccccgu

SEQ ID NO: 310087 - RNA, 32 nt, Human
agaccagccugaccaacacggagaaacccuau

SEQ ID NO: 310088 - RNA, 32 nt, Human
agaccagccugaccaacacggugaaaccccgu

SEQ ID NO: 310089 - RNA, 32 nt, Human
agaccagccugaccaacacugagaaaccccau

SEQ ID NO: 310090 - RNA, 32 nt, Human
agaccagccugaccaacauagagaaaccucgu

SEQ ID NO: 310091 - RNA, 32 nt, Human
agaccagccugaccaacauagugaaacccccg

SEQ ID NO: 310092 - RNA, 32 nt, Human
agaccagccugaccaacaucgugaaaugccgu

SEQ ID NO: 310093 - RNA, 32 nt, Human
agaccagccugaccaacaugaagaaaccccau

SEQ ID NO: 310094 - RNA, 21 nt, Human
agaccagccugaccaacaugg

SEQ ID NO: 310095 - RNA, 32 nt, Human
agaccagccugaccaacauggagaaacccaau

SEQ ID NO: 310096 - RNA, 32 nt, Human
agaccagccugaccaacauggagaaacccagu

SEQ ID NO: 310097 - RNA, 32 nt, Human
agaccagccugaccaacauggagaaaccccaa

SEQ ID NO: 310098 - RNA, 32 nt, Human
agaccagccugaccaacauggagaaaccccau

SEQ ID NO: 310099 - RNA, 32 nt, Human
agaccagccugaccaacauggagaaaccccca

SEQ ID NO: 310100 - RNA, 32 nt, Human
agaccagccugaccaacauggagaaaccccgu

SEQ ID NO: 310101 - RNA, 32 nt, Human
agaccagccugaccaacauggagaaaccccug

SEQ ID NO: 310102 - RNA, 32 nt, Human
agaccagccugaccaacauggagaaacccuau

SEQ ID NO: 310103 - RNA, 32 nt, Human
agaccagccugaccaacauggagaaacccugc

SEQ ID NO: 310104 - RNA, 32 nt, Human
agaccagccugaccaacauggagaaacccugu

SEQ ID NO: 310105 - RNA, 32 nt, Human
agaccagccugaccaacauggagaaaccucgu

SEQ ID NO: 310106 - RNA, 32 nt, Human
agaccagccugaccaacauggagaaacgccau

SEQ ID NO: 310107 - RNA, 32 nt, Human
agaccagccugaccaacauggagaaacuccgu

SEQ ID NO: 310108 - RNA, 32 nt, Human
agaccagccugaccaacauggagaaaugccau

SEQ ID NO: 310109 - RNA, 32 nt, Human
agaccagccugaccaacauggagaagccccgu

SEQ ID NO: 310110 - RNA, 32 nt, Human
agaccagccugaccaacauggcgaaaccccau

SEQ ID NO: 310111 - RNA, 32 nt, Human
agaccagccugaccaacauggcgaaaccccgu

SEQ ID NO: 310112 - RNA, 32 nt, Human
agaccagccugaccaacauggugaaacacugu

SEQ ID NO: 310113 - RNA, 32 nt, Human
agaccagccugaccaacauggugaaaccccau

SEQ ID NO: 310114 - RNA, 32 nt, Human
agaccagccugaccaacauggugaaaccccgu

SEQ ID NO: 310115 - RNA, 32 nt, Human
agaccagccugaccaacauggugaaaccccuu

SEQ ID NO: 310116 - RNA, 32 nt, Human
agaccagccugaccaacauggugaaacccuac

SEQ ID NO: 310117 - RNA, 32 nt, Human
agaccagccugaccaacauggugaaacccugu

SEQ ID NO: 310118 - RNA, 32 nt, Human
agaccagccugaccaacauggugaaaccucaa

SEQ ID NO: 310119 - RNA, 32 nt, Human
agaccagccugaccaacauggugaaaccucau

SEQ ID NO: 310120 - RNA, 32 nt, Human
agaccagccugaccaacauggugaaaccucgu

SEQ ID NO: 310121 - RNA, 32 nt, Human
agaccagccugaccaacauggugaaacuccau

SEQ ID NO: 310122 - RNA, 32 nt, Human
agaccagccugaccaacauggugaaauccagu

SEQ ID NO: 310123 - RNA, 32 nt, Human
agaccagccugaccaacauggugaaaucccgu

SEQ ID NO: 310124 - RNA, 32 nt, Human
agaccagccugaccaacauggugaaauccugu

SEQ ID NO: 310125 - RNA, 32 nt, Human
agaccagccugaccaacauggugaaaugaaac

SEQ ID NO: 310126 - RNA, 32 nt, Human
agaccagccugaccaacauggugagacccugu

SEQ ID NO: 310127 - RNA, 32 nt, Human
agaccagccugaccaacaugucgaaaucccgu

SEQ ID NO: 310128 - RNA, 32 nt, Human
agaccagccugaccaacguggagaaacacuau

SEQ ID NO: 310129 - RNA, 32 nt, Human
agaccagccugaccaacguggagaaaccccau

SEQ ID NO: 310130 - RNA, 32 nt, Human
agaccagccugaccaacguggagaaaccccgu

SEQ ID NO: 310131 - RNA, 32 nt, Human
agaccagccugaccaacguggagaaacuccgu

SEQ ID NO: 310132 - RNA, 32 nt, Human
agaccagccugaccaacguggcgaaaccucgu

SEQ ID NO: 310133 - RNA, 32 nt, Human
agaccagccugaccaacguggugaaaccccau

SEQ ID NO: 310134 - RNA, 32 nt, Human
agaccagccugaccaacguggugaaaccccgu

SEQ ID NO: 310135 - RNA, 32 nt, Human
agaccagccugaccaacguggugaaacccugu

SEQ ID NO: 310136 - RNA, 32 nt, Human
agaccagccugaccaacguggugaaacuccgu

SEQ ID NO: 310137 - RNA, 32 nt, Human
agaccagccugaccaauauagugaaacacugu

SEQ ID NO: 310138 - RNA, 32 nt, Human
agaccagccugaccaauauggagaaaucucgc

SEQ ID NO: 310139 - RNA, 32 nt, Human
agaccagccugaccaauauggugaaaccccau

SEQ ID NO: 310140 - RNA, 22 nt, Human
agaccagccugagcaacaaagc

SEQ ID NO: 310141 - RNA, 24 nt, Human
agaccagccugagcaacacuguga

SEQ ID NO: 310142 - RNA, 20 nt, Human
agaccagccugagcaacaua

SEQ ID NO: 310143 - RNA, 22 nt, Human
agaccagccugagcaacauagc

SEQ ID NO: 310144 - RNA, 24 nt, Human
agaccagccugagcaacauagcga

SEQ ID NO: 310145 - RNA, 24 nt, Human
agaccagccugagcaacauaguga

SEQ ID NO: 310146 - RNA, 24 nt, Human
agaccagccugagcaacaugauga

SEQ ID NO: 310147 - RNA, 24 nt, Human
agaccagccugagcaacauggcga

SEQ ID NO: 310148 - RNA, 22 nt, Human
agaccagccugagcagcguagc

SEQ ID NO: 310149 - RNA, 24 nt, Human
agaccagccuggacaacacaguga

SEQ ID NO: 310150 - RNA, 24 nt, Human
agaccagccuggacaacauaauga

SEQ ID NO: 310151 - RNA, 22 nt, Human
agaccagccuggacaacauagc

SEQ ID NO: 310152 - RNA, 23 nt, Human
agaccagccuggacaacauagga

SEQ ID NO: 310153 - RNA, 24 nt, Human
agaccagccuggacaacauaguga

SEQ ID NO: 310154 - RNA, 22 nt, Human
agaccagccuggacaacauggc

SEQ ID NO: 310155 - RNA, 23 nt, Human
agaccagccuggacaacauggga

SEQ ID NO: 310156 - RNA, 24 nt, Human
agaccagccuggacaacaugguga

SEQ ID NO: 310157 - RNA, 22 nt, Human
agaccagccuggacaauauagu

SEQ ID NO: 310158 - RNA, 24 nt, Human
agaccagccuggacagcuuaguga

SEQ ID NO: 310159 - RNA, 21 nt, Human
agaccagccuggcaacacagc

SEQ ID NO: 310160 - RNA, 24 nt, Human
agaccagccuggccaacacaauga

SEQ ID NO: 310161 - RNA, 22 nt, Human
agaccagccuggccaacacagu

SEQ ID NO: 310162 - RNA, 24 nt, Human
agaccagccuggccaacacaguga

SEQ ID NO: 310163 - RNA, 22 nt, Human
agaccagccuggccaacacggc

SEQ ID NO: 310164 - RNA, 22 nt, Human
agaccagccuggccaacauagc

SEQ ID NO: 310165 - RNA, 24 nt, Human
agaccagccuggccaacauagcga

SEQ ID NO: 310166 - RNA, 22 nt, Human
agaccagccuggccaacauagu

SEQ ID NO: 310167 - RNA, 22 nt, Human
agaccagccuggccaacauggc

SEQ ID NO: 310168 - RNA, 22 nt, Human
agaccagccuggccaacauggu

SEQ ID NO: 310169 - RNA, 32 nt, Human
agaccagccuggccaaccaacauggugaaacc

SEQ ID NO: 310170 - RNA, 24 nt, Human
agaccagccuggccaacuuggaga

SEQ ID NO: 310171 - RNA, 24 nt, Human
agaccagccuggcuaacacaguga

SEQ ID NO: 310172 - RNA, 22 nt, Human
agaccagccugggaaaaauagc

SEQ ID NO: 310173 - RNA, 24 nt, Human
agaccagccugggaaacauagcga

SEQ ID NO: 310174 - RNA, 32 nt, Human
agaccagccugggaaacaucugccucuacaaa

SEQ ID NO: 310175 - RNA, 22 nt, Human
agaccagccugggcaaaacagu

SEQ ID NO: 310176 - RNA, 22 nt, Human
agaccagccugggcaaaauagc

SEQ ID NO: 310177 - RNA, 18 nt, Human
agaccagccugggcaaca

SEQ ID NO: 310178 - RNA, 22 nt, Human
agaccagccugggcaacaaagu

SEQ ID NO: 310179 - RNA, 24 nt, Human
agaccagccugggcaacaaaguga

SEQ ID NO: 310180 - RNA, 32 nt, Human
agaccagccugggcaacaaagugagaccccca

SEQ ID NO: 310181 - RNA, 32 nt, Human
agaccagccugggcaacaaagugagacuccau

SEQ ID NO: 310182 - RNA, 24 nt, Human
agaccagccugggcaacaaugaga

SEQ ID NO: 310183 - RNA, 22 nt, Human
agaccagccugggcaacacagc

SEQ ID NO: 310184 - RNA, 24 nt, Human
agaccagccugggcaacacagcga

SEQ ID NO: 310185 - RNA, 23 nt, Human
agaccagccugggcaacacagga

SEQ ID NO: 310186 - RNA, 24 nt, Human
agaccagccugggcaacacaggga

SEQ ID NO: 310187 - RNA, 22 nt, Human
agaccagccugggcaacacagu

SEQ ID NO: 310188 - RNA, 24 nt, Human
agaccagccugggcaacacaguga

SEQ ID NO: 310189 - RNA, 32 nt, Human
agaccagccugggcaacacagugagaacccuc

SEQ ID NO: 310190 - RNA, 24 nt, Human
agaccagccugggcaacacgguga

SEQ ID NO: 310191 - RNA, 21 nt, Human
agaccagccugggcaacagag

SEQ ID NO: 310192 - RNA, 24 nt, Human
agaccagccugggcaacagaguga

SEQ ID NO: 310193 - RNA, 20 nt, Human
agaccagccugggcaacagc

SEQ ID NO: 310194 - RNA, 21 nt, Human
agaccagccugggcaacaggc

SEQ ID NO: 310195 - RNA, 22 nt, Human
agaccagccugggcaacagggu

SEQ ID NO: 310196 - RNA, 20 nt, Human
agaccagccugggcaacaua

SEQ ID NO: 310197 - RNA, 24 nt, Human
agaccagccugggcaacauaauga

SEQ ID NO: 310198 - RNA, 24 nt, Human
agaccagccugggcaacauacaga

SEQ ID NO: 310199 - RNA, 24 nt, Human
agaccagccugggcaacauagaga

SEQ ID NO: 310200 - RNA, 22 nt, Human
agaccagccugggcaacauagc

SEQ ID NO: 310201 - RNA, 24 nt, Human
agaccagccugggcaacauagcga

SEQ ID NO: 310202 - RNA, 23 nt, Human
agaccagccugggcaacauagga

SEQ ID NO: 310203 - RNA, 24 nt, Human
agaccagccugggcaacauaggga

SEQ ID NO: 310204 - RNA, 22 nt, Human
agaccagccugggcaacauagu

SEQ ID NO: 310205 - RNA, 24 nt, Human
agaccagccugggcaacauaguga

SEQ ID NO: 310206 - RNA, 23 nt, Human
agaccagccugggcaacauaugg

SEQ ID NO: 310207 - RNA, 23 nt, Human
agaccagccugggcaacaugaug

SEQ ID NO: 310208 - RNA, 21 nt, Human
agaccagccugggcaacaugg

SEQ ID NO: 310209 - RNA, 24 nt, Human
agaccagccugggcaacauggaga

SEQ ID NO: 310210 - RNA, 22 nt, Human
agaccagccugggcaacauggc

SEQ ID NO: 310211 - RNA, 24 nt, Human
agaccagccugggcaacauggcga

SEQ ID NO: 310212 - RNA, 24 nt, Human
agaccagccugggcaacaugggga

SEQ ID NO: 310213 - RNA, 22 nt, Human
agaccagccugggcaacauggu

SEQ ID NO: 310214 - RNA, 24 nt, Human
agaccagccugggcaacaugguga

SEQ ID NO: 310215 - RNA, 24 nt, Human
agaccagccugggcaacauuggga

SEQ ID NO: 310216 - RNA, 24 nt, Human
agaccagccugggcaaccuaauga

SEQ ID NO: 310217 - RNA, 24 nt, Human
agaccagccugggcaacgcaguga

SEQ ID NO: 310218 - RNA, 22 nt, Human
agaccagccugggcaacguagc

SEQ ID NO: 310219 - RNA, 24 nt, Human
agaccagccugggcaacguauuga

SEQ ID NO: 310220 - RNA, 24 nt, Human
agaccagccugggcaacgugguga

SEQ ID NO: 310221 - RNA, 24 nt, Human
agaccagccugggcaacuuaguga

SEQ ID NO: 310222 - RNA, 22 nt, Human
agaccagccugggcaagauggc

SEQ ID NO: 310223 - RNA, 22 nt, Human
agaccagccugggcaagauggu

SEQ ID NO: 310224 - RNA, 22 nt, Human
agaccagccugggcaauacagc

SEQ ID NO: 310225 - RNA, 24 nt, Human
agaccagccugggcaauacagcga

SEQ ID NO: 310226 - RNA, 24 nt, Human
agaccagccugggcaauacaguga

SEQ ID NO: 310227 - RNA, 22 nt, Human
agaccagccugggcaauauagc

SEQ ID NO: 310228 - RNA, 24 nt, Human
agaccagccugggcaauauaggga

SEQ ID NO: 310229 - RNA, 22 nt, Human
agaccagccugggcaauauagu

SEQ ID NO: 310230 - RNA, 22 nt, Human
agaccagccugggcaauguagc

SEQ ID NO: 310231 - RNA, 22 nt, Human
agaccagccugggcaauguagu

SEQ ID NO: 310232 - RNA, 24 nt, Human
agaccagccugggcaccaugguga

SEQ ID NO: 310233 - RNA, 19 nt, Human
agaccagccugggcagcau

SEQ ID NO: 310234 - RNA, 22 nt, Human
agaccagccugggcagcauagc

SEQ ID NO: 310235 - RNA, 24 nt, Human
agaccagccugggcagcaugguga

SEQ ID NO: 310236 - RNA, 22 nt, Human
agaccagccugggcagccuggc

SEQ ID NO: 310237 - RNA, 23 nt, Human
agaccagccugggcagccuggca

SEQ ID NO: 310238 - RNA, 21 nt, Human
agaccagccugggcgacacgg

SEQ ID NO: 310239 - RNA, 22 nt, Human
agaccagccugggcuacagagc

SEQ ID NO: 310240 - RNA, 24 nt, Human
agaccagccugggcuacauaguga

SEQ ID NO: 310241 - RNA, 25 nt, Human
agaccagccuggggcaacauagcga

SEQ ID NO: 310242 - RNA, 24 nt, Human
agaccagccuggguaacacaggga

SEQ ID NO: 310243 - RNA, 22 nt, Human
agaccagccugggugacacagc

SEQ ID NO: 310244 - RNA, 22 nt, Human
agaccagccuggucaacauagc

SEQ ID NO: 310245 - RNA, 22 nt, Human
agaccagccuggucaacauggu

SEQ ID NO: 310246 - RNA, 20 nt, Human
agaccagccuguggaacaua

SEQ ID NO: 310247 - RNA, 22 nt, Human
agaccagccuguucaacauggc

SEQ ID NO: 310248 - RNA, 32 nt, Human
agaccagccuugcagccaggugcaguggcuca

SEQ ID NO: 310249 - RNA, 24 nt, Human
agaccagccuugccaacacaguga

SEQ ID NO: 310250 - RNA, 32 nt, Human
agaccagcgagccaccacagccaccaguccca

SEQ ID NO: 310251 - RNA, 32 nt, Human
agaccagcggagugggagggagacgcaguaga

SEQ ID NO: 310252 - RNA, 32 nt, Human
agaccagcgugaccaacguggagaaacccccg

SEQ ID NO: 310253 - RNA, 24 nt, Human
agaccagcuaaggcaacacaguga

SEQ ID NO: 310254 - RNA, 21 nt, Human
agaccagcucucgcuauguug

SEQ ID NO: 310255 - RNA, 32 nt, Human
agaccagcugaggcagaggcugcaaggggugg

SEQ ID NO: 310256 - RNA, 32 nt, Human
agaccagcugccgcccugcccgaugcuucccc

SEQ ID NO: 310257 - RNA, 32 nt, Human
agaccagcuggaucuugcucagucucugucag

SEQ ID NO: 310258 - RNA, 32 nt, Human
agaccagcuguagcucauuccagccuguaccu

SEQ ID NO: 310259 - RNA, 22 nt, Human
agaccagcuuaggcaacauagc

SEQ ID NO: 310260 - RNA, 32 nt, Human
agaccagcuugaccaacauggagaaaccucgu

SEQ ID NO: 310261 - RNA, 32 nt, Human
agaccagcuugaccaacauggugaaaccccau

SEQ ID NO: 310262 - RNA, 22 nt, Human
agaccagcuugggcaacauagc

SEQ ID NO: 310263 - RNA, 25 nt, Human
agaccagcuuugggcaacacaguga

SEQ ID NO: 310264 - RNA, 32 nt, Human
agaccaggaaccugagccagagcugggguuga

SEQ ID NO: 310265 - RNA, 32 nt, Human
agaccaggacuuuuuaucuagagaccagcaug

SEQ ID NO: 310266 - RNA, 32 nt, Human
agaccaggagagaauuugggcccuuacugacc

SEQ ID NO: 310267 - RNA, 32 nt, Human
agaccaggagccaagagaccugcccaggcucc

SEQ ID NO: 310268 - RNA, 32 nt, Human
agaccaggagguugaggcugcagugagccgug

SEQ ID NO: 310269 - RNA, 32 nt, Human
agaccaggaguuugagaucagcccugggcaac

SEQ ID NO: 310270 - RNA, 21 nt, Human
agaccaggaugucaccagaga

SEQ ID NO: 310271 - RNA, 32 nt, Human
agaccaggcaacauacacacugcagaaggugg

SEQ ID NO: 310272 - RNA, 32 nt, Human
agaccaggcagccauggccacugccuuccucu

SEQ ID NO: 310273 - RNA, 19 nt, Human
agaccaggcccuugaucac

SEQ ID NO: 310274 - RNA, 23 nt, Human
agaccaggcgguggagcugggga

SEQ ID NO: 310275 - RNA, 32 nt, Human
agaccaggcucuucugacuggcaauggcucug

SEQ ID NO: 310276 - RNA, 32 nt, Human
agaccaggcugacuggaagauggaaagccaca

SEQ ID NO: 310277 - RNA, 21 nt, Human
agaccaggcuucgccauguug

SEQ ID NO: 310278 - RNA, 25 nt, Human
agaccaggcuucgccauguuggcca

SEQ ID NO: 310279 - RNA, 32 nt, Human
agaccagggaaugggccgagcagcugacaaag

SEQ ID NO: 310280 - RNA, 32 nt, Human
agaccagggcuggggguugggcuguaggcagg

SEQ ID NO: 310281 - RNA, 32 nt, Human
agaccagggcugggguuuaaguuccuggcaga

SEQ ID NO: 310282 - RNA, 32 nt, Human
agaccagggcuugucuccuccuggacuugggc

SEQ ID NO: 310283 - RNA, 22 nt, Human
agaccagggguuuucccagaga

SEQ ID NO: 310284 - RNA, 23 nt, Human
agaccaggguaucuccucuggaa

SEQ ID NO: 310285 - RNA, 32 nt, Human
agaccagggucccugucugggagcucagacuu

SEQ ID NO: 310286 - RNA, 32 nt, Human
agaccagggucugauggcuucuagggaugcuc

SEQ ID NO: 310287 - RNA, 32 nt, Human
agaccagguccucagccagcagagccacguuc

SEQ ID NO: 310288 - RNA, 32 nt, Human
agaccagguguggacgggacagugaguggcug

SEQ ID NO: 310289 - RNA, 32 nt, Human
agaccagguuggagaccagccuaggcaacaug

SEQ ID NO: 310290 - RNA, 32 nt, Human
agaccagguuuuccuggucucagaccuaugau

SEQ ID NO: 310291 - RNA, 32 nt, Human
agaccaguaaaaacaaaagcccauagaccuua

SEQ ID NO: 310292 - RNA, 32 nt, Human
agaccaguaaacuuaucuuuggugagaaauga

SEQ ID NO: 310293 - RNA, 32 nt, Human
agaccagucacucccucugccuucaggcuucu

SEQ ID NO: 310294 - RNA, 32 nt, Human
agaccagucucccaggaggcugaggcugcugu

SEQ ID NO: 310295 - RNA, 32 nt, Human
agaccagucugaccaacacggagaaaccccau

SEQ ID NO: 310296 - RNA, 32 nt, Human
agaccagucugaccaacauggagaaaccccau

SEQ ID NO: 310297 - RNA, 32 nt, Human
agaccagucugaccaacauggagaaacccugu

SEQ ID NO: 310298 - RNA, 22 nt, Human
agaccagucugggcaacacagc

SEQ ID NO: 310299 - RNA, 24 nt, Human
agaccagucugggcaacauagcga

SEQ ID NO: 310300 - RNA, 32 nt, Human
agaccagugguagugcccagacuucuccuaga

SEQ ID NO: 310301 - RNA, 32 nt, Human
agaccagugucuggaucccagcaucuucucca

SEQ ID NO: 310302 - RNA, 32 nt, Human
agaccaguucgaggaauccuuggucuccacca

SEQ ID NO: 310303 - RNA, 32 nt, Human
agaccaguucuccaagccccugccuuggucag

SEQ ID NO: 310304 - RNA, 32 nt, Human
agaccaguuuuugcggccucccccuuuccucu

SEQ ID NO: 310305 - RNA, 32 nt, Human
agaccauaauaaauacuccuuuucaagagaaa

SEQ ID NO: 310306 - RNA, 32 nt, Human
agaccauaccacugcauuccagccugggugac

SEQ ID NO: 310307 - RNA, 32 nt, Human
agaccauagagugcuuuggugggaguauuuug

SEQ ID NO: 310308 - RNA, 32 nt, Human
agaccauagugaccaacauagugaaaccccau

SEQ ID NO: 310309 - RNA, 32 nt, Human
agaccauccaagccaaggacgaggucaucauc

SEQ ID NO: 310310 - RNA, 22 nt, Human
agaccauccaccucgggguugc

SEQ ID NO: 310311 - RNA, 32 nt, Human
agaccauccacugucuuugacaccuagaaggu

SEQ ID NO: 310312 - RNA, 24 nt, Human
agaccauccagcucaucacccggg

SEQ ID NO: 310313 - RNA, 32 nt, Human
agaccauccauccgauccuccccuuccccugu

SEQ ID NO: 310314 - RNA, 32 nt, Human
agaccaucccuccagacugccacccucaaagc

SEQ ID NO: 310315 - RNA, 32 nt, Human
agaccaucuccccaggcuaugccaucaccaua

SEQ ID NO: 310316 - RNA, 32 nt, Human
agaccaucucuuccuuucuuuccccuucuuuu

SEQ ID NO: 310317 - RNA, 32 nt, Human
agaccaugaaguucaaccccuccagggaagcu

SEQ ID NO: 310318 - RNA, 27 nt, Human
agaccaugacugugguuucaguggcgu

SEQ ID NO: 310319 - RNA, 18 nt, Human
agaccaugccacugcacu

SEQ ID NO: 310320 - RNA, 32 nt, Human
agaccaugccacugcacuccagccugggcaac

SEQ ID NO: 310321 - RNA, 32 nt, Human
agaccaugccacugcacuccggccugggugac

SEQ ID NO: 310322 - RNA, 32 nt, Human
agaccaugccauugcacuccagccugggcgac

SEQ ID NO: 310323 - RNA, 32 nt, Human
agaccaugccauuggacuccagccugggcaaa

SEQ ID NO: 310324 - RNA, 32 nt, Human
agaccaugggcaaccaaccauugcacuggcua

SEQ ID NO: 310325 - RNA, 32 nt, Human
agaccaugggcuguaggggagaguguggcagg

SEQ ID NO: 310326 - RNA, 30 nt, Human
agaccauggggcaucuggacaaggaagguc

SEQ ID NO: 310327 - RNA, 32 nt, Human
agaccauguagaaaacuuuuacaucugccuug

SEQ ID NO: 310328 - RNA, 30 nt, Human
agaccauguccgggggcagcagcugcagcc

SEQ ID NO: 310329 - RNA, 32 nt, Human
agaccaugugucccaucucaagccacagagca

SEQ ID NO: 310330 - RNA, 32 nt, Human
agaccauuccagagaaagugauagaaucuucc

SEQ ID NO: 310331 - RNA, 32 nt, Human
agaccauuccaggcagggagagcugcugagcu

SEQ ID NO: 310332 - RNA, 32 nt, Human
agaccauucuguucagugucugggugaagcuu

SEQ ID NO: 310333 - RNA, 32 nt, Human
agaccauuggcaggcccuuugcaccaggagga

SEQ ID NO: 310334 - RNA, 23 nt, Human
agaccauugucuccugugccaga

SEQ ID NO: 310335 - RNA, 32 nt, Human
agacccaaaagaaugaaagguggcagugaaga

SEQ ID NO: 310336 - RNA, 32 nt, Human
agacccaaauccccacagaaccagcuucgagu

SEQ ID NO: 310337 - RNA, 32 nt, Human
agacccaacaacugucacccucuucuguaccu

SEQ ID NO: 310338 - RNA, 32 nt, Human
agacccaacuggagcguggggcgggcaggcag

SEQ ID NO: 310339 - RNA, 32 nt, Human
agacccaagccaaggaaagcccaugaucacca

SEQ ID NO: 310340 - RNA, 32 nt, Human
agacccaagggaggguggagaggggcugaggg

SEQ ID NO: 310341 - RNA, 25 nt, Human
agacccaaguagacuggacacaaag

SEQ ID NO: 310342 - RNA, 32 nt, Human
agacccacagagcaggagggaggcagaaagug

SEQ ID NO: 310343 - RNA, 32 nt, Human
agacccacagcccugaaacgagaagugcccuu

SEQ ID NO: 310344 - RNA, 32 nt, Human
agacccaccauccuggacuggcgaggaagauc

SEQ ID NO: 310345 - RNA, 32 nt, Human
agacccacccuacgaaguuggaaugagaccau

SEQ ID NO: 310346 - RNA, 32 nt, Human
agacccacuccugccucccacccgggugccgu

SEQ ID NO: 310347 - RNA, 18 nt, Human
agacccacucuuugccca

SEQ ID NO: 310348 - RNA, 32 nt, Human
agacccacuugcacccuccgggcauccucucc

SEQ ID NO: 310349 - RNA, 32 nt, Human
agacccacuugcacccuccgggcguucucucc

SEQ ID NO: 310350 - RNA, 23 nt, Human
agacccacuugggccuucaugcc

SEQ ID NO: 310351 - RNA, 32 nt, Human
agacccagaaacccaaagagguugagaaacag

SEQ ID NO: 310352 - RNA, 28 nt, Human
agacccagaaguucugccucacucccag

SEQ ID NO: 310353 - RNA, 32 nt, Human
agacccagacuuuaguccccucccaggaaagg

SEQ ID NO: 310354 - RNA, 32 nt, Human
agacccagagagcuagggcuggagggacaggg

SEQ ID NO: 310355 - RNA, 21 nt, Human
agacccagagucacccagggg

SEQ ID NO: 310356 - RNA, 22 nt, Human
agacccagaguugcagccaaga

SEQ ID NO: 310357 - RNA, 32 nt, Human
agacccagauagagacucagaggcagacccag

SEQ ID NO: 310358 - RNA, 32 nt, Human
agacccagccaagagcugaggguaagggcagg

SEQ ID NO: 310359 - RNA, 32 nt, Human
agacccagccagcagagauggagagugacucu

SEQ ID NO: 310360 - RNA, 32 nt, Human
agacccagccgcuggcucccagccuggcugaa

SEQ ID NO: 310361 - RNA, 32 nt, Human
agacccagccugaugcccgcaggagagagcaa

SEQ ID NO: 310362 - RNA, 22 nt, Human
agacccagccuuggcaccuccc

SEQ ID NO: 310363 - RNA, 32 nt, Human
agacccagcggggcacaugaggguucggaucc

SEQ ID NO: 310364 - RNA, 32 nt, Human
agacccagcugcagaccaugccagacccacug

SEQ ID NO: 310365 - RNA, 32 nt, Human
agacccagcugguucuggaguucuaggacauu

SEQ ID NO: 310366 - RNA, 32 nt, Human
agacccaggaaagggaguugcugagggcaggu

SEQ ID NO: 310367 - RNA, 32 nt, Human
agacccaggaagagaaacuccuuucaccugca

SEQ ID NO: 310368 - RNA, 32 nt, Human
agacccaggagaaagcacccucccuuaggaau

SEQ ID NO: 310369 - RNA, 32 nt, Human
agacccaggagcuggagauaauuugcagacau

SEQ ID NO: 310370 - RNA, 32 nt, Human
agacccaggaugaagggaugcagugaggucaa

SEQ ID NO: 310371 - RNA, 28 nt, Human
agacccaggccugcugccugcaucugca

SEQ ID NO: 310372 - RNA, 20 nt, Human
agacccagggaacccaggag

SEQ ID NO: 310373 - RNA, 32 nt, Human
agacccagggaccuggaguguguuuggacugc

SEQ ID NO: 310374 - RNA, 32 nt, Human
agacccagggagaacccacugcuuuucccagg

SEQ ID NO: 310375 - RNA, 32 nt, Human
agacccagggcuacgagccagguaaccagccg

SEQ ID NO: 310376 - RNA, 32 nt, Human
agacccagggggaggaaggguggaggggcccc

SEQ ID NO: 310377 - RNA, 32 nt, Human
agacccaggugcugugucacuggguggugccc

SEQ ID NO: 310378 - RNA, 32 nt, Human
agacccagucacauuggaugugaucuguauaa

SEQ ID NO: 310379 - RNA, 32 nt, Human
agacccagugagcccuucacuccugagaaaaa

SEQ ID NO: 310380 - RNA, 32 nt, Human
agacccauccagccaagcugguggacaaccuc

SEQ ID NO: 310381 - RNA, 32 nt, Human
agacccauccuaguggaggaaaaauccuacca

SEQ ID NO: 310382 - RNA, 31 nt, Human
agacccauggcuggaccugccacccagagcc

SEQ ID NO: 310383 - RNA, 32 nt, Human
agacccauggcuggaccugccacccagagccc

SEQ ID NO: 310384 - RNA, 24 nt, Human
agaccccaacgcucgcuggggcag

SEQ ID NO: 310385 - RNA, 32 nt, Human
agaccccaccaccaccaccaccaccaacacca

SEQ ID NO: 310386 - RNA, 32 nt, Human
agaccccaccauugcacuccaguccgggaaac

SEQ ID NO: 310387 - RNA, 32 nt, Human
agaccccacccagguggaugcaggaggacgag

SEQ ID NO: 310388 - RNA, 21 nt, Human
agaccccacccuaagcccaua

SEQ ID NO: 310389 - RNA, 32 nt, Human
agaccccacccuggguguaugugagugugcaa

SEQ ID NO: 310390 - RNA, 32 nt, Human
agaccccagcagagaugccagaaugggggagg

SEQ ID NO: 310391 - RNA, 32 nt, Human
agaccccagcagaggaggacaguggcucugag

SEQ ID NO: 310392 - RNA, 32 nt, Human
agaccccagcugucugcgcgucugacucuugu

SEQ ID NO: 310393 - RNA, 32 nt, Human
agaccccaggaccagcccuggggcucagggca

SEQ ID NO: 310394 - RNA, 32 nt, Human
agaccccaggaggccaaagggcugcagucacc

SEQ ID NO: 310395 - RNA, 23 nt, Human
agaccccagggucucucuccuca

SEQ ID NO: 310396 - RNA, 31 nt, Human
agaccccaugagcucucagccagcucuuuua

SEQ ID NO: 310397 - RNA, 32 nt, Human
agacccccagauaaccauaacagggaagcagg

SEQ ID NO: 310398 - RNA, 32 nt, Human
agacccccagcagguagcauuccccagcccug

SEQ ID NO: 310399 - RNA, 19 nt, Human
agacccccagccugaggca

SEQ ID NO: 310400 - RNA, 32 nt, Human
agacccccaucucuacaaaaauaaagaaaauu

SEQ ID NO: 310401 - RNA, 32 nt, Human
agacccccggcauccuaguccugggccguggg

SEQ ID NO: 310402 - RNA, 23 nt, Human
agacccccggcggcgucucuccg

SEQ ID NO: 310403 - RNA, 32 nt, Human
agacccccuccacccucugggacuaugcacag

SEQ ID NO: 310404 - RNA, 32 nt, Human
agacccccuccccuccugugucccuuguaaau

SEQ ID NO: 310405 - RNA, 32 nt, Human
agacccccugcagcucaagcaugucugcagga

SEQ ID NO: 310406 - RNA, 32 nt, Human
agacccccuuccccagccucucuaguuuuagu

SEQ ID NO: 310407 - RNA, 32 nt, Human
agaccccgagacacccucccuccacucgggag

SEQ ID NO: 310408 - RNA, 32 nt, Human
agaccccgccacugcacgcccugccggaccuc

SEQ ID NO: 310409 - RNA, 32 nt, Human
agaccccgcccggcgaggaggagggagggccg

SEQ ID NO: 310410 - RNA, 32 nt, Human
agaccccgcugcacucacagggaggaggaggc

SEQ ID NO: 310411 - RNA, 32 nt, Human
agaccccggaggcguggaggagaggagacugu

SEQ ID NO: 310412 - RNA, 18 nt, Human
agaccccgggaucugcug

SEQ ID NO: 310413 - RNA, 19 nt, Human
agaccccgucucuacaaaa

SEQ ID NO: 310414 - RNA, 32 nt, Human
agaccccuacuucgccuuuccuucuccggcug

SEQ ID NO: 310415 - RNA, 32 nt, Human
agaccccuauccacccccaguccccagggccc

SEQ ID NO: 310416 - RNA, 32 nt, Human
agaccccuauugccucuucuucaugcucauuu

SEQ ID NO: 310417 - RNA, 32 nt, Human
agaccccucacugcgguaucugcccaguggca

SEQ ID NO: 310418 - RNA, 32 nt, Human
agaccccucagcaagggugcaaagggggaaga

SEQ ID NO: 310419 - RNA, 32 nt, Human
agaccccuccucuagaaguggggaaggccaga

SEQ ID NO: 310420 - RNA, 32 nt, Human
agaccccucggucccauguccaugggggcacc

SEQ ID NO: 310421 - RNA, 32 nt, Human
agaccccugaccacccuccgaaccucggcugg

SEQ ID NO: 310422 - RNA, 23 nt, Human
agaccccugcacccuagggucag

SEQ ID NO: 310423 - RNA, 32 nt, Human
agaccccugcaggcucccuccacccaccuuga

SEQ ID NO: 310424 - RNA, 32 nt, Human
agaccccugccugcccacccuccacccacugc

SEQ ID NO: 310425 - RNA, 32 nt, Human
agaccccuggugcugggucccugcugcuuucu

SEQ ID NO: 310426 - RNA, 32 nt, Human
agaccccuguaaucccagcuacucaagaggcu

SEQ ID NO: 310427 - RNA, 20 nt, Human
agaccccugucucuacaaaa

SEQ ID NO: 310428 - RNA, 32 nt, Human
agaccccugugaggccccgggaaagguacagc

SEQ ID NO: 310429 - RNA, 32 nt, Human
agaccccuuccagggguuuacagucuauuuga

SEQ ID NO: 310430 - RNA, 32 nt, Human
agaccccuuugaccuugagcagucuccaucug

SEQ ID NO: 310431 - RNA, 32 nt, Human
agacccgcagugccaugcgcaggugcuugcgc

SEQ ID NO: 310432 - RNA, 32 nt, Human
agacccgccacaucagcaccauccgagagcuu

SEQ ID NO: 310433 - RNA, 32 nt, Human
agacccggaguuuccucuuucacuggauggag

SEQ ID NO: 310434 - RNA, 32 nt, Human
agacccggcaggcagucagacugaaugggagc

SEQ ID NO: 310435 - RNA, 32 nt, Human
agacccggccaugcaggagccgcugcugggag

SEQ ID NO: 310436 - RNA, 32 nt, Human
agacccggcucccagcccucgaacucgguaac

SEQ ID NO: 310437 - RNA, 32 nt, Human
agacccgggaccccguccccgcacaccugcca

SEQ ID NO: 310438 - RNA, 32 nt, Human
agacccgggaggcagagguugcagugagccga

SEQ ID NO: 310439 - RNA, 32 nt, Human
agacccgggccacacccaggaggccagagccu

SEQ ID NO: 310440 - RNA, 32 nt, Human
agacccgggcccugagcucccagcuggaggaa

SEQ ID NO: 310441 - RNA, 32 nt, Human
agacccgggggcaggugcugcagugagggguc

SEQ ID NO: 310442 - RNA, 32 nt, Human
agacccggguagggacagggacagagagacgc

SEQ ID NO: 310443 - RNA, 32 nt, Human
agacccguacucuccacacccuagagcuuuuc

SEQ ID NO: 310444 - RNA, 32 nt, Human
agacccgugagccuggccaaggugcugaagac

SEQ ID NO: 310445 - RNA, 32 nt, Human
agacccgugccuguauauuccacgcuuugcgc

SEQ ID NO: 310446 - RNA, 32 nt, Human
agacccuaacucuaccuuucugcuuuaaagca

SEQ ID NO: 310447 - RNA, 32 nt, Human
agacccuaagagaaucuagggagagggcauag

SEQ ID NO: 310448 - RNA, 32 nt, Human
agacccuagguuucccugucuaugccucccga

SEQ ID NO: 310449 - RNA, 32 nt, Human
agacccuaucuauaaggugccaccccaucauc

SEQ ID NO: 310450 - RNA, 32 nt, Human
agacccuauuaaagaaaccacaggguuugauu

SEQ ID NO: 310451 - RNA, 31 nt, Human
agacccucagugaagacucuguugaagacuu

SEQ ID NO: 310452 - RNA, 32 nt, Human
agacccuccuccucccccagagggguggguuc

SEQ ID NO: 310453 - RNA, 32 nt, Human
agacccuccugccaggugacagccgccaagau

SEQ ID NO: 310454 - RNA, 32 nt, Human
agacccuccuggagcuguccaaaggaaagccc

SEQ ID NO: 310455 - RNA, 32 nt, Human
agacccucgccugaacacgcccuacacucugg

SEQ ID NO: 310456 - RNA, 32 nt, Human
agacccucguggccuuccccagccucuucuag

SEQ ID NO: 310457 - RNA, 32 nt, Human
agacccucucacaaccucggaucucaguccuu

SEQ ID NO: 310458 - RNA, 32 nt, Human
agacccucuggccucucaccccacuucagugc

SEQ ID NO: 310459 - RNA, 22 nt, Human
agacccugacagcugcagcugc

SEQ ID NO: 310460 - RNA, 32 nt, Human
agacccugacagcugcagcugccuugccuugc

SEQ ID NO: 310461 - RNA, 21 nt, Human
agacccugagcagaauacugg

SEQ ID NO: 310462 - RNA, 32 nt, Human
agacccugagccccaacugucagaaggagccu

SEQ ID NO: 310463 - RNA, 32 nt, Human
agacccugaguccuugggccagcucuuggcua

SEQ ID NO: 310464 - RNA, 32 nt, Human
agacccugcacuuucaaccaggccaguccggc

SEQ ID NO: 310465 - RNA, 32 nt, Human
agacccugcaggccaugaagagccacucagaa

SEQ ID NO: 310466 - RNA, 18 nt, Human
agacccugcccccugcca

SEQ ID NO: 310467 - RNA, 32 nt, Human
agacccugcccugcagagucaagacuugaggc

SEQ ID NO: 310468 - RNA, 32 nt, Human
agacccuggaauagccugucccuuuucucugg

SEQ ID NO: 310469 - RNA, 21 nt, Human
agacccuggcuggaagccaga

SEQ ID NO: 310470 - RNA, 32 nt, Human
agacccugggcccucaccgcaggcagcaguuu

SEQ ID NO: 310471 - RNA, 32 nt, Human
agacccuggggugggaucagggaccaccccuc

SEQ ID NO: 310472 - RNA, 19 nt, Human
agacccugucucuacaaaa

SEQ ID NO: 310473 - RNA, 32 nt, Human
agacccugugccaccagaauauggccagggcc

SEQ ID NO: 310474 - RNA, 32 nt, Human
agacccuguucaaccucucaggaacagggauu

SEQ ID NO: 310475 - RNA, 32 nt, Human
agacccuuauucaccaccuuugacccaguaac

SEQ ID NO: 310476 - RNA, 32 nt, Human
agacccuuauuggauauaggauuugcaaaugu

SEQ ID NO: 310477 - RNA, 32 nt, Human
agacccuuccaaggaagaggccagaacggaca

SEQ ID NO: 310478 - RNA, 32 nt, Human
agacccuuccauccucccuguucucaguucac

SEQ ID NO: 310479 - RNA, 32 nt, Human
agacccuucccaauuccaucaccacugccaac

SEQ ID NO: 310480 - RNA, 24 nt, Human
agacccuuccccuccaccccccag

SEQ ID NO: 310481 - RNA, 32 nt, Human
agacccuucugggcucugcccgcugggggccu

SEQ ID NO: 310482 - RNA, 32 nt, Human
agacccuugacagccccagccuaggcagaugg

SEQ ID NO: 310483 - RNA, 32 nt, Human
agacccuugggcuccggugucuucccaaagcu

SEQ ID NO: 310484 - RNA, 32 nt, Human
agacccuuucagaaccaaacacaugccaagag

SEQ ID NO: 310485 - RNA, 32 nt, Human
agacccuuucagacuguccauggggccaaaaa

SEQ ID NO: 310486 - RNA, 32 nt, Human
agaccgaaaggcuggacucuuguuucuccuug

SEQ ID NO: 310487 - RNA, 32 nt, Human
agaccgaccagccagggcaacacagugagacc

SEQ ID NO: 310488 - RNA, 32 nt, Human
agaccgacggccgcuggagugcacuggcauga

SEQ ID NO: 310489 - RNA, 32 nt, Human
agaccgacguuauuuuccugguggcuguguuc

SEQ ID NO: 310490 - RNA, 32 nt, Human
agaccgacuuccacagcuguccaggucaaaag

SEQ ID NO: 310491 - RNA, 18 nt, Human
agaccgagaccauccugg

SEQ ID NO: 310492 - RNA, 32 nt, Human
agaccgagagacacagugaugaccucagccua

SEQ ID NO: 310493 - RNA, 32 nt, Human
agaccgagccacuguacuccagccuaggugac

SEQ ID NO: 310494 - RNA, 32 nt, Human
agaccgaggcacagcccagcugggcuaggccg

SEQ ID NO: 310495 - RNA, 32 nt, Human
agaccgaggcacagcccagcuggggcuaggcc

SEQ ID NO: 310496 - RNA, 32 nt, Human
agaccgaggccaugaagcagauucucggggug

SEQ ID NO: 310497 - RNA, 32 nt, Human
agaccgagggcaggggagggaggcgggggugg

SEQ ID NO: 310498 - RNA, 32 nt, Human
agaccgagggccuggcggccgaaggaaccgcc

SEQ ID NO: 310499 - RNA, 32 nt, Human
agaccgauuuccacuccaucuguuucuucucc

SEQ ID NO: 310500 - RNA, 32 nt, Human
agaccgcaccacugcacuccagccugggcgac

SEQ ID NO: 310501 - RNA, 32 nt, Human
agaccgcagagagccaugauagcaccauugca

SEQ ID NO: 310502 - RNA, 32 nt, Human
agaccgcagcagcuggagaggaaggggugagg

SEQ ID NO: 310503 - RNA, 32 nt, Human
agaccgcagccugugugugucuuucccuucga

SEQ ID NO: 310504 - RNA, 32 nt, Human
agaccgccuccaccucccccgcccgccuggcc

SEQ ID NO: 310505 - RNA, 32 nt, Human
agaccgcgccaagaagaagugcgcuggagccc

SEQ ID NO: 310506 - RNA, 32 nt, Human
agaccgcgccacugcacuccagccugggcaac

SEQ ID NO: 310507 - RNA, 32 nt, Human
agaccgcuccuccucacccucuaccucccugu

SEQ ID NO: 310508 - RNA, 16 nt, Human
agaccgcucuggacug

SEQ ID NO: 310509 - RNA, 32 nt, Human
agaccggagaaaaggccagaggugugaaguua

SEQ ID NO: 310510 - RNA, 32 nt, Human
agaccggagggaggaggaggaggaagaagagc

SEQ ID NO: 310511 - RNA, 32 nt, Human
agaccggcaccaaccccuuccucuggccccgc

SEQ ID NO: 310512 - RNA, 32 nt, Human
agaccggcacuuaaagccuggcugucacccag

SEQ ID NO: 310513 - RNA, 32 nt, Human
agaccggcccagacagccaggcuguggcuggu

SEQ ID NO: 310514 - RNA, 32 nt, Human
agaccggccgcauggacccagggacaguggcc

SEQ ID NO: 310515 - RNA, 32 nt, Human
agaccggcugccgccugcuccccggaaaaggg

SEQ ID NO: 310516 - RNA, 21 nt, Human
agaccgggcacccgccagaga

SEQ ID NO: 310517 - RNA, 32 nt, Human
agaccgggcgggcgcaggaugggcgggaacug

SEQ ID NO: 310518 - RNA, 21 nt, Human
agaccgggcuucaccauguug

SEQ ID NO: 310519 - RNA, 25 nt, Human
agaccgggcuucaccauguuggcca

SEQ ID NO: 310520 - RNA, 32 nt, Human
agaccggggcgugggaagagccuggccuaggc

SEQ ID NO: 310521 - RNA, 21 nt, Human
agaccgggguuuaccauguug

SEQ ID NO: 310522 - RNA, 32 nt, Human
agaccgggugcggccucugccugcagccucgu

SEQ ID NO: 310523 - RNA, 21 nt, Human
agaccggguuccgccauguug

SEQ ID NO: 310524 - RNA, 25 nt, Human
agaccggguuccgccauguugguca

SEQ ID NO: 310525 - RNA, 21 nt, Human
agaccgguuuucaccacguug

SEQ ID NO: 310526 - RNA, 25 nt, Human
agaccgguuuucaccacguuggcca

SEQ ID NO: 310527 - RNA, 32 nt, Human
agaccguaaggguuuuuaguuugaucuacucu

SEQ ID NO: 310528 - RNA, 32 nt, Human
agaccguacugagugucagauggagaggaugc

SEQ ID NO: 310529 - RNA, 32 nt, Human
agaccgugaccagugcugcugcagaggagguc

SEQ ID NO: 310530 - RNA, 32 nt, Human
agaccgugccacugcacuccagccuggcaaca

SEQ ID NO: 310531 - RNA, 32 nt, Human
agaccgugccacugcacuccagccugggcaac

SEQ ID NO: 310532 - RNA, 32 nt, Human
agaccgugccacuguacuccagccugggcagc

SEQ ID NO: 310533 - RNA, 32 nt, Human
agaccguggucaccaccuucuucaccuuugca

SEQ ID NO: 310534 - RNA, 32 nt, Human
agaccguguucccaggagcacugacugcaguu

SEQ ID NO: 310535 - RNA, 32 nt, Human
agaccuaagucacacaucauaaugcagcuccu

SEQ ID NO: 310536 - RNA, 32 nt, Human
agaccuacacuuggagcccagguccagcguuc

SEQ ID NO: 310537 - RNA, 32 nt, Human
agaccuacaggacguccucccuuguccugucu

SEQ ID NO: 310538 - RNA, 32 nt, Human
agaccuaccagccugcaccaggguccacagug

SEQ ID NO: 310539 - RNA, 32 nt, Human
agaccuagaacccuuuccccagcacuugguuu

SEQ ID NO: 310540 - RNA, 32 nt, Human
agaccuagaguguccacagcaggccugugcug

SEQ ID NO: 310541 - RNA, 32 nt, Human
agaccuagcccaggcuuggaggccagcuggag

SEQ ID NO: 310542 - RNA, 32 nt, Human
agaccuaggagguggucuuguggugguacauu

SEQ ID NO: 310543 - RNA, 21 nt, Human
agaccuagucucacucuguug

SEQ ID NO: 310544 - RNA, 32 nt, Human
agaccuagugcugagggauggacaggcgaggu

SEQ ID NO: 310545 - RNA, 32 nt, Human
agaccuagugggagagaaagaacaucgcagca

SEQ ID NO: 310546 - RNA, 32 nt, Human
agaccuauccagucuucaaggugcuccagaaa

SEQ ID NO: 310547 - RNA, 32 nt, Human
agaccucaaaacacaggaacucagagugauga

SEQ ID NO: 310548 - RNA, 32 nt, Human
agaccucaaagaauucggagaggagagugaga

SEQ ID NO: 310549 - RNA, 32 nt, Human
agaccucaacacugcugaccaugaucagcgca

SEQ ID NO: 310550 - RNA, 32 nt, Human
agaccucaagagaggguuccuggaccucccac

SEQ ID NO: 310551 - RNA, 32 nt, Human
agaccucacauacacacacauagacgccuuuc

SEQ ID NO: 310552 - RNA, 32 nt, Human
agaccucaccgggccugugauauuugcucucc

SEQ ID NO: 310553 - RNA, 32 nt, Human
agaccucagcagggcugcucagugccugccuc

SEQ ID NO: 310554 - RNA, 32 nt, Human
agaccucagccaaggucgcagagcagaggaga

SEQ ID NO: 310555 - RNA, 32 nt, Human
agaccucagccagcggccuacgcccaggccuu

SEQ ID NO: 310556 - RNA, 32 nt, Human
agaccucagccaugaggaguugcuguuuguuu

SEQ ID NO: 310557 - RNA, 32 nt, Human
agaccucagcuucucccucugaacuucaaguc

SEQ ID NO: 310558 - RNA, 32 nt, Human
agaccucagggcacaaagaugggugaaggcug

SEQ ID NO: 310559 - RNA, 32 nt, Human
agaccucaguacaaaagguauugaaacauuuu

SEQ ID NO: 310560 - RNA, 32 nt, Human
agaccucaucaggaugaacccaggacgcuucu

SEQ ID NO: 310561 - RNA, 32 nt, Human
agaccucaugccaccugcuguagccacugggc

SEQ ID NO: 310562 - RNA, 32 nt, Human
agaccucauggacucugggggcagcacuuugu

SEQ ID NO: 310563 - RNA, 32 nt, Human
agaccuccacugccauuguccuguggccgcca

SEQ ID NO: 310564 - RNA, 32 nt, Human
agaccuccagaagagcagcggagggcggguga

SEQ ID NO: 310565 - RNA, 32 nt, Human
agaccuccaguuucagcccugcccucagccuc

SEQ ID NO: 310566 - RNA, 17 nt, Human
agaccuccccgucuucc

SEQ ID NO: 310567 - RNA, 32 nt, Human
agaccucccucugaacaccacagccagguccu

SEQ ID NO: 310568 - RNA, 32 nt, Human
agaccucccugccuuucccugagcccaggccu

SEQ ID NO: 310569 - RNA, 24 nt, Human
agaccucccuggcccaccuagagg

SEQ ID NO: 310570 - RNA, 32 nt, Human
agaccuccgccucugcacuccagccuggguga

SEQ ID NO: 310571 - RNA, 32 nt, Human
agaccuccuccacucuccauccccuuucccuu

SEQ ID NO: 310572 - RNA, 22 nt, Human
agaccuccuggguccucucagg

SEQ ID NO: 310573 - RNA, 32 nt, Human
agaccucgcugguaaaggucaaauggggucau

SEQ ID NO: 310574 - RNA, 32 nt, Human
agaccucuacucaugcuaucaucaccaaaggg

SEQ ID NO: 310575 - RNA, 32 nt, Human
agaccucucauuuuccuaucucacagugccuc

SEQ ID NO: 310576 - RNA, 32 nt, Human
agaccucuccagaucugcgauugaccugguug

SEQ ID NO: 310577 - RNA, 32 nt, Human
agaccucuccugcuggucccuggaccucuugc

SEQ ID NO: 310578 - RNA, 20 nt, Human
agaccucucgcuucucucgg

SEQ ID NO: 310579 - RNA, 32 nt, Human
agaccucucuauaaugguaaauguaagacauc

SEQ ID NO: 310580 - RNA, 32 nt, Human
agaccucucuucuggauuugucccauggggac

SEQ ID NO: 310581 - RNA, 32 nt, Human
agaccucugaagacuucucagauggauccuag

SEQ ID NO: 310582 - RNA, 22 nt, Human
agaccucuggaguuuccucuug

SEQ ID NO: 310583 - RNA, 32 nt, Human
agaccucuggaucucugcucaacccaagcuuc

SEQ ID NO: 310584 - RNA, 32 nt, Human
agaccucugucucucucgggccuuggcuccuu

SEQ ID NO: 310585 - RNA, 32 nt, Human
agaccucuucauucccccuccuguggugaggg

SEQ ID NO: 310586 - RNA, 31 nt, Human
agaccucuucccucugggccuguucucuugg

SEQ ID NO: 310587 - RNA, 32 nt, Human
agaccucuuggcccaaccugcucaccccaccg

SEQ ID NO: 310588 - RNA, 32 nt, Human
agaccugaaggaugggaagccaggaaguggga

SEQ ID NO: 310589 - RNA, 32 nt, Human
agaccugacaacuaaaugccaugugggacccu

SEQ ID NO: 310590 - RNA, 32 nt, Human
agaccugacauuagaacuagaccugggcuaga

SEQ ID NO: 310591 - RNA, 32 nt, Human
agaccugagcgggagucagggaccugcugcuc

SEQ ID NO: 310592 - RNA, 32 nt, Human
agaccugaguucuucucucaguuccaagcagg

SEQ ID NO: 310593 - RNA, 32 nt, Human
agaccugauuuucaaaaucugcccucagauga

SEQ ID NO: 310594 - RNA, 32 nt, Human
agaccugcagaaccagcguguguggggugcag

SEQ ID NO: 310595 - RNA, 32 nt, Human
agaccugcagccaccagugcuucacuagcgug

SEQ ID NO: 310596 - RNA, 32 nt, Human
agaccugcaggugggaguaccagguugaaacc

SEQ ID NO: 310597 - RNA, 32 nt, Human
agaccugcaguggcagacugcagagcugagcc

SEQ ID NO: 310598 - RNA, 32 nt, Human
agaccugccccggggccagguggagaaaguga

SEQ ID NO: 310599 - RNA, 32 nt, Human
agaccugccccuccucucugcccuaaugcgca

SEQ ID NO: 310600 - RNA, 17 nt, Human
agaccugcccucaagag

SEQ ID NO: 310601 - RNA, 23 nt, Human
agaccugcccucagggauugcag

SEQ ID NO: 310602 - RNA, 32 nt, Human
agaccugccucaccucacccuccuccaggaag

SEQ ID NO: 310603 - RNA, 32 nt, Human
agaccugccugaccaacaugcugaaacccagu

SEQ ID NO: 310604 - RNA, 18 nt, Human
agaccugccugccuuccu

SEQ ID NO: 310605 - RNA, 32 nt, Human
agaccugccugggaaaacagcuucugagccau

SEQ ID NO: 310606 - RNA, 32 nt, Human
agaccugcgggggacagcaggaggacagccgg

SEQ ID NO: 310607 - RNA, 22 nt, Human
agaccugcguggccguccaggg

SEQ ID NO: 310608 - RNA, 32 nt, Human
agaccugcguugugugucuguguguugaguga

SEQ ID NO: 310609 - RNA, 32 nt, Human
agaccugcuuccacuuucaaucucucucauug

SEQ ID NO: 310610 - RNA, 32 nt, Human
agaccuggaaaccaacaggugaccucagggag

SEQ ID NO: 310611 - RNA, 32 nt, Human
agaccuggaagcuguucagcucucacaugaau

SEQ ID NO: 310612 - RNA, 32 nt, Human
agaccuggaauucaaaagaaauggagcuauuc

SEQ ID NO: 310613 - RNA, 32 nt, Human
agaccuggacacuagggucaggcggggugcgu

SEQ ID NO: 310614 - RNA, 32 nt, Human
agaccuggacucacagccuggcugugaugcuu

SEQ ID NO: 310615 - RNA, 32 nt, Human
agaccuggaugccccagagcaaggucuucauu

SEQ ID NO: 310616 - RNA, 32 nt, Human
agaccuggccaacauggugaaacccugucucu

SEQ ID NO: 310617 - RNA, 32 nt, Human
agaccuggcugacugccagaagcagaucuuac

SEQ ID NO: 310618 - RNA, 32 nt, Human
agaccuggcuuccucccugacacucacucugg

SEQ ID NO: 310619 - RNA, 32 nt, Human
agaccugggacaccucagccagcuugcccacc

SEQ ID NO: 310620 - RNA, 32 nt, Human
agaccugggaggaccucagggcccagaauguc

SEQ ID NO: 310621 - RNA, 32 nt, Human
agaccugggcccaaucugugaaccugauuugg

SEQ ID NO: 310622 - RNA, 32 nt, Human
agaccugggcuccacguccagccugggaccug

SEQ ID NO: 310623 - RNA, 32 nt, Human
agaccugggcuggggccuuccuccagggaagg

SEQ ID NO: 310624 - RNA, 32 nt, Human
agaccuggugcuggcgcugggaucccgccucu

SEQ ID NO: 310625 - RNA, 23 nt, Human
agaccugguuggccgugguccag

SEQ ID NO: 310626 - RNA, 32 nt, Human
agaccuguauaugugaccuuuguccucacaua

SEQ ID NO: 310627 - RNA, 32 nt, Human
agaccuguccuucugugccucacaguaaaaug

SEQ ID NO: 310628 - RNA, 32 nt, Human
agaccugugauuugccaagucccuggacccug

SEQ ID NO: 310629 - RNA, 32 nt, Human
agaccugugcaggaucacuggacacaggcucu

SEQ ID NO: 310630 - RNA, 32 nt, Human
agaccugugugugggaccugcuccaggcugau

SEQ ID NO: 310631 - RNA, 32 nt, Human
agaccuguucucucuagccauugauuuaccag

SEQ ID NO: 310632 - RNA, 32 nt, Human
agaccuguucugaccucaugagugucaaacgu

SEQ ID NO: 310633 - RNA, 32 nt, Human
agaccuuaaacuugaggcaacccaucugaggu

SEQ ID NO: 310634 - RNA, 32 nt, Human
agaccuuacagaucaucuaguucuccagccuu

SEQ ID NO: 310635 - RNA, 32 nt, Human
agaccuuccccaccaccuccuuagccuggugu

SEQ ID NO: 310636 - RNA, 32 nt, Human
agaccuuccucacccgcucccaccucacaccc

SEQ ID NO: 310637 - RNA, 32 nt, Human
agaccuuccugaauucagaucaucucagaagu

SEQ ID NO: 310638 - RNA, 32 nt, Human
agaccuucuccaggaagccuccugggacuucc

SEQ ID NO: 310639 - RNA, 32 nt, Human
agaccuucucuuccuuuccuuuccuuuccucu

SEQ ID NO: 310640 - RNA, 32 nt, Human
agaccuugacaggaaagagggaggggccaagg

SEQ ID NO: 310641 - RNA, 32 nt, Human
agaccuugagagccaugacagguccaucagca

SEQ ID NO: 310642 - RNA, 32 nt, Human
agaccuugaggugaucagcauaagaggccaga

SEQ ID NO: 310643 - RNA, 32 nt, Human
agaccuugccagacugccugcuuucauggaua

SEQ ID NO: 310644 - RNA, 32 nt, Human
agaccuugccugggcuugugggcugcuggucg

SEQ ID NO: 310645 - RNA, 32 nt, Human
agaccuugggaagggguuaggaagggagaggc

SEQ ID NO: 310646 - RNA, 32 nt, Human
agaccuuggucuuagaauuuuucuuuuauggu

SEQ ID NO: 310647 - RNA, 23 nt, Human
agaccuuguccagaaaaccaaag

SEQ ID NO: 310648 - RNA, 19 nt, Human
agaccuugucucuacaaaa

SEQ ID NO: 310649 - RNA, 32 nt, Human
agaccuuuauggugauccacuuccacuuaaua

SEQ ID NO: 310650 - RNA, 32 nt, Human
agaccuuucuguguuaaugccuccugguacug

SEQ ID NO: 310651 - RNA, 32 nt, Human
agacgaaacacccucccagucuaugggguagu

SEQ ID NO: 310652 - RNA, 32 nt, Human
agacgaaauuuggccagacacaggguuccuug

SEQ ID NO: 310653 - RNA, 18 nt, Human
agacgaaccagucgggga

SEQ ID NO: 310654 - RNA, 32 nt, Human
agacgaagaagacgauuaaccauuugguccua

SEQ ID NO: 310655 - RNA, 32 nt, Human
agacgaagacaugcucaccggacaaggguucc

SEQ ID NO: 310656 - RNA, 32 nt, Human
agacgaaggagagagagcugaggguggaggca

SEQ ID NO: 310657 - RNA, 32 nt, Human
agacgaagggagagagaaagcaguuuccaagg

SEQ ID NO: 310658 - RNA, 32 nt, Human
agacgacaccacugcacuccagccugggugac

SEQ ID NO: 310659 - RNA, 32 nt, Human
agacgaccaaacuugccguggaagagacaguu

SEQ ID NO: 310660 - RNA, 32 nt, Human
agacgaccagauaagagguugggaugagcaug

SEQ ID NO: 310661 - RNA, 18 nt, Human
agacgaccugccaugucc

SEQ ID NO: 310662 - RNA, 32 nt, Human
agacgacuucagcagacucaccucuggagggu

SEQ ID NO: 310663 - RNA, 32 nt, Human
agacgagacacccuaacucuugcucacucccu

SEQ ID NO: 310664 - RNA, 32 nt, Human
agacgagacuguacaccagcaaaaagauccca

SEQ ID NO: 310665 - RNA, 32 nt, Human
agacgagaggagagaaagagguagaauauuuu

SEQ ID NO: 310666 - RNA, 22 nt, Human
agacgagaggcagccaccccag

SEQ ID NO: 310667 - RNA, 32 nt, Human
agacgagagggugggaggucccggaguaacuu

SEQ ID NO: 310668 - RNA, 32 nt, Human
agacgagcagaggcgccaggugacccuguuuc

SEQ ID NO: 310669 - RNA, 21 nt, Human
agacgagcucagaaaaccaga

SEQ ID NO: 310670 - RNA, 32 nt, Human
agacgaggaggcagcgggugcagccagguguc

SEQ ID NO: 310671 - RNA, 32 nt, Human
agacgaggcaaaaauauuuaacccccaaauau

SEQ ID NO: 310672 - RNA, 32 nt, Human
agacgaggcaggcacagcugccagagaccauc

SEQ ID NO: 310673 - RNA, 32 nt, Human
agacgaggcagggagaggcgggacuucgcggg

SEQ ID NO: 310674 - RNA, 32 nt, Human
agacgaggccuuugcuuuacagcacuguaugu

SEQ ID NO: 310675 - RNA, 21 nt, Human
agacgaggcuucaccauguug

SEQ ID NO: 310676 - RNA, 25 nt, Human
agacgaggcuucaccauguuggcca

SEQ ID NO: 310677 - RNA, 21 nt, Human
agacgaggucccaccauguug

SEQ ID NO: 310678 - RNA, 21 nt, Human
agacgaggucucacuauguug

SEQ ID NO: 310679 - RNA, 32 nt, Human
agacgagguucugcggagagagaggcuccaag

SEQ ID NO: 310680 - RNA, 25 nt, Human
agacgagguuucaacauguuggcca

SEQ ID NO: 310681 - RNA, 21 nt, Human
agacgagguuucaccaucuug

SEQ ID NO: 310682 - RNA, 25 nt, Human
agacgagguuucaccaucuuggcca

SEQ ID NO: 310683 - RNA, 21 nt, Human
agacgagguuucaccauguug

SEQ ID NO: 310684 - RNA, 25 nt, Human
agacgagguuucaccauguuggcca

SEQ ID NO: 310685 - RNA, 20 nt, Human
agacgagguuucaccguguu

SEQ ID NO: 310686 - RNA, 21 nt, Human
agacgagguuucacuguguug

SEQ ID NO: 310687 - RNA, 21 nt, Human
agacgagguuucgccauguug

SEQ ID NO: 310688 - RNA, 21 nt, Human
agacgagguuuugccauguug

SEQ ID NO: 310689 - RNA, 32 nt, Human
agacgagucauaccugauucaccugcacugcu

SEQ ID NO: 310690 - RNA, 32 nt, Human
agacgauccaggagagcagcaaccuaaacgaa

SEQ ID NO: 310691 - RNA, 32 nt, Human
agacgaucugguucagacucuaccucaucacu

SEQ ID NO: 310692 - RNA, 32 nt, Human
agacgauggcaaaccagcauucagccucaucu

SEQ ID NO: 310693 - RNA, 32 nt, Human
agacgaugggcagaggagugacagccgcagac

SEQ ID NO: 310694 - RNA, 32 nt, Human
agacgauguucccagggguuuucgccaugaac

SEQ ID NO: 310695 - RNA, 32 nt, Human
agacgcaaagagaacugcugcgcgggaggcca

SEQ ID NO: 310696 - RNA, 32 nt, Human
agacgcaaggccacguacaaaaacuugaaaua

SEQ ID NO: 310697 - RNA, 32 nt, Human
agacgcacacacacaacagaugcgcagcaacu

SEQ ID NO: 310698 - RNA, 32 nt, Human
agacgcagcacagaaggcucucacugaugaaa

SEQ ID NO: 310699 - RNA, 32 nt, Human
agacgcagcacugggagaggaggacaucguca

SEQ ID NO: 310700 - RNA, 32 nt, Human
agacgcagcagccuguguccuccagggccucu

SEQ ID NO: 310701 - RNA, 32 nt, Human
agacgcagcaguguccaggagcggcagagacu

SEQ ID NO: 310702 - RNA, 32 nt, Human
agacgcagccgcgcucccaccacccacaccca

SEQ ID NO: 310703 - RNA, 32 nt, Human
agacgcagcucugauuucugguguuccugggc

SEQ ID NO: 310704 - RNA, 32 nt, Human
agacgcaggccccggaacccaggcugggucgg

SEQ ID NO: 310705 - RNA, 32 nt, Human
agacgcaggcggcagaggugcuggaccacauc

SEQ ID NO: 310706 - RNA, 32 nt, Human
agacgcagggaaagguggccgugggaacguga

SEQ ID NO: 310707 - RNA, 32 nt, Human
agacgcagggcgacgccacacgccgggguggc

SEQ ID NO: 310708 - RNA, 32 nt, Human
agacgcagugccuggcaguccagaggcagugg

SEQ ID NO: 310709 - RNA, 21 nt, Human
agacgcaguuucaccguguug

SEQ ID NO: 310710 - RNA, 32 nt, Human
agacgccacuggcggcccuaagccacucccgc

SEQ ID NO: 310711 - RNA, 32 nt, Human
agacgccagccgcgccacgcacugccugcguc

SEQ ID NO: 310712 - RNA, 32 nt, Human
agacgccagcuuggcccugcagccagcacagg

SEQ ID NO: 310713 - RNA, 32 nt, Human
agacgccaggcucggaucugugcucagagccg

SEQ ID NO: 310714 - RNA, 32 nt, Human
agacgccagugucaccuuuagcccaaccagug

SEQ ID NO: 310715 - RNA, 32 nt, Human
agacgccauugcaccccagccugggcaaugag

SEQ ID NO: 310716 - RNA, 32 nt, Human
agacgcccacuggccccagaucucauccugcc

SEQ ID NO: 310717 - RNA, 32 nt, Human
agacgcccagaagaagcagcugaaggagcagc

SEQ ID NO: 310718 - RNA, 32 nt, Human
agacgccccucagagcucagugccucugaggc

SEQ ID NO: 310719 - RNA, 19 nt, Human
agacgccgggauccaggag

SEQ ID NO: 310720 - RNA, 32 nt, Human
agacgccuggagaguuguggacuggggcaacc

SEQ ID NO: 310721 - RNA, 32 nt, Human
agacgccuguaaucccagcuacuugggaggcu

SEQ ID NO: 310722 - RNA, 32 nt, Human
agacgccuguaggagcugcgccggagccuuca

SEQ ID NO: 310723 - RNA, 32 nt, Human
agacgcgaugcgguguuccaucaggaaaugcu

SEQ ID NO: 310724 - RNA, 19 nt, Human
agacgcgccagacgcgcca

SEQ ID NO: 310725 - RNA, 18 nt, Human
agacgcgccgccgcugcc

SEQ ID NO: 310726 - RNA, 32 nt, Human
agacgcggcuggagcaggagaucgccaccuac

SEQ ID NO: 310727 - RNA, 32 nt, Human
agacgcuccaagaggcuccucagugugggcga

SEQ ID NO: 310728 - RNA, 32 nt, Human
agacgcuccgcuagugcagacaggagcgcgca

SEQ ID NO: 310729 - RNA, 32 nt, Human
agacgcugaacugccugggauguuuucgggaa

SEQ ID NO: 310730 - RNA, 32 nt, Human
agacgcugaggaggaggaggaggcggaggagg

SEQ ID NO: 310731 - RNA, 32 nt, Human
agacgcugccgcugccgcugcaccacggcguu

SEQ ID NO: 310732 - RNA, 32 nt, Human
agacgcugggcugugcggugcggagggugaug

SEQ ID NO: 310733 - RNA, 32 nt, Human
agacgcuggugaggagagccggguccagguuc

SEQ ID NO: 310734 - RNA, 32 nt, Human
agacgcugucggcauugccagccuggcaauuu

SEQ ID NO: 310735 - RNA, 32 nt, Human
agacgcuugaagcaaagcugccaucccagaag

SEQ ID NO: 310736 - RNA, 32 nt, Human
agacgcuuggggcaaugcugcggggaggaagg

SEQ ID NO: 310737 - RNA, 32 nt, Human
agacggaaaugaggaacuuguugggaacugga

SEQ ID NO: 310738 - RNA, 32 nt, Human
agacggaagaggagacacagacacaaagcagg

SEQ ID NO: 310739 - RNA, 25 nt, Human
agacggaauuucaccaugguggcca

SEQ ID NO: 310740 - RNA, 32 nt, Human
agacggagaagggagagagugggaguuuccca

SEQ ID NO: 310741 - RNA, 32 nt, Human
agacggagcuuccugagggcagggaggcagau

SEQ ID NO: 310742 - RNA, 32 nt, Human
agacggaggaagcauaaaccagguccugaucc

SEQ ID NO: 310743 - RNA, 32 nt, Human
agacggaggagaacugagcagagcagagcauc

SEQ ID NO: 310744 - RNA, 32 nt, Human
agacggagggaugacaguuucaaggaggauuu

SEQ ID NO: 310745 - RNA, 32 nt, Human
agacggagggcagaggugguggaaggggccag

SEQ ID NO: 310746 - RNA, 19 nt, Human
agacggagucacucuguca

SEQ ID NO: 310747 - RNA, 19 nt, Human
agacggagucucacucugu

SEQ ID NO: 310748 - RNA, 21 nt, Human
agacggagucucccuauguug

SEQ ID NO: 310749 - RNA, 21 nt, Human
agacggaguuucaccauauug

SEQ ID NO: 310750 - RNA, 20 nt, Human
agacggaguuucaccauguu

SEQ ID NO: 310751 - RNA, 21 nt, Human
agacggaguuucaccauguug

SEQ ID NO: 310752 - RNA, 25 nt, Human
agacggaguuucaccauguuggcca

SEQ ID NO: 310753 - RNA, 25 nt, Human
agacggaguuucaccauguugguca

SEQ ID NO: 310754 - RNA, 25 nt, Human
agacggaguuucaccauguugguua

SEQ ID NO: 310755 - RNA, 20 nt, Human
agacggaguuucaccguguu

SEQ ID NO: 310756 - RNA, 20 nt, Human
agacggaguuucaucguguu

SEQ ID NO: 310757 - RNA, 19 nt, Human
agacggaguuucgcuguug

SEQ ID NO: 310758 - RNA, 21 nt, Human
agacggaguuucgucauguug

SEQ ID NO: 310759 - RNA, 21 nt, Human
agacggaguuuugccauguug

SEQ ID NO: 310760 - RNA, 32 nt, Human
agacggaguuuugcucuuuguugcccaggcug

SEQ ID NO: 310761 - RNA, 19 nt, Human
agacggauauaaaggaaga

SEQ ID NO: 310762 - RNA, 32 nt, Human
agacggaucccaccucccuuucuuagcagaau

SEQ ID NO: 310763 - RNA, 23 nt, Human
agacggauccucacacaaagagg

SEQ ID NO: 310764 - RNA, 32 nt, Human
agacggaucucucuccgaccugccacagaucc

SEQ ID NO: 310765 - RNA, 32 nt, Human
agacggauggugccuuugaagcaaagaggaag

SEQ ID NO: 310766 - RNA, 19 nt, Human
agacggauucucuauguug

SEQ ID NO: 310767 - RNA, 32 nt, Human
agacggcacccaggcugugaucuguccugggc

SEQ ID NO: 310768 - RNA, 32 nt, Human
agacggcagauguggcuggaggucagggcucu

SEQ ID NO: 310769 - RNA, 32 nt, Human
agacggcagccugaccuuugagcuggcuuguc

SEQ ID NO: 310770 - RNA, 21 nt, Human
agacggcauuucaccauauug

SEQ ID NO: 310771 - RNA, 25 nt, Human
agacggcauuucaccauauugguca

SEQ ID NO: 310772 - RNA, 21 nt, Human
agacggcauuucaccauguug

SEQ ID NO: 310773 - RNA, 25 nt, Human
agacggcauuucaccauguuggcca

SEQ ID NO: 310774 - RNA, 32 nt, Human
agacggccaccugcaggaccccacacucacug

SEQ ID NO: 310775 - RNA, 22 nt, Human
agacggcccuugggcucagggg

SEQ ID NO: 310776 - RNA, 32 nt, Human
agacggcguccucaaggcaucuggagggcuuu

SEQ ID NO: 310777 - RNA, 22 nt, Human
agacggcguccugcgcucccca

SEQ ID NO: 310778 - RNA, 21 nt, Human
agacggcguuucaccauguug

SEQ ID NO: 310779 - RNA, 25 nt, Human
agacggcguuucaccauguuggcca

SEQ ID NO: 310780 - RNA, 21 nt, Human
agacggcguuucaccauuuug

SEQ ID NO: 310781 - RNA, 21 nt, Human
agacggcguuucaccguguug

SEQ ID NO: 310782 - RNA, 25 nt, Human
agacggcguuucaccguguuggcca

SEQ ID NO: 310783 - RNA, 32 nt, Human
agacgggagcccuuugcugugugcucugucca

SEQ ID NO: 310784 - RNA, 32 nt, Human
agacgggagcgagugggcucuccaccagcaca

SEQ ID NO: 310785 - RNA, 20 nt, Human
agacgggaggggaggcauug

SEQ ID NO: 310786 - RNA, 32 nt, Human
agacgggaggggaggcauugacauaggucaua

SEQ ID NO: 310787 - RNA, 32 nt, Human
agacgggauccuucaugagaaaagccagccag

SEQ ID NO: 310788 - RNA, 21 nt, Human
agacgggauucuaccauguug

SEQ ID NO: 310789 - RNA, 21 nt, Human
agacgggauuucaccauguug

SEQ ID NO: 310790 - RNA, 25 nt, Human
agacgggauuucaccauguuggcca

SEQ ID NO: 310791 - RNA, 25 nt, Human
agacgggauuucaccauguugguca

SEQ ID NO: 310792 - RNA, 20 nt, Human
agacgggauuucaccguguu

SEQ ID NO: 310793 - RNA, 20 nt, Human
agacgggauuucacuguguu

SEQ ID NO: 310794 - RNA, 21 nt, Human
agacgggauuucacuguguug

SEQ ID NO: 310795 - RNA, 21 nt, Human
agacgggauuuuaucauguug

SEQ ID NO: 310796 - RNA, 32 nt, Human
agacgggcgcuagauuuggggcucagaaggcc

SEQ ID NO: 310797 - RNA, 32 nt, Human
agacgggcggaugcaguguugugcacaagcca

SEQ ID NO: 310798 - RNA, 31 nt, Human
agacgggcguucucccccaugccaggcgaau

SEQ ID NO: 310799 - RNA, 32 nt, Human
agacgggcugcaagagggagccggcccgacgc

SEQ ID NO: 310800 - RNA, 32 nt, Human
agacgggcuggcuuggccucuggaucauaauc

SEQ ID NO: 310801 - RNA, 32 nt, Human
agacggggacaguaagguuuggaggaaggggg

SEQ ID NO: 310802 - RNA, 32 nt, Human
agacggggagaaacaucuggaaggaugcucga

SEQ ID NO: 310803 - RNA, 32 nt, Human
agacggggagggaggagagaaagggaaauuca

SEQ ID NO: 310804 - RNA, 17 nt, Human
agacggggcaaaugugg

SEQ ID NO: 310805 - RNA, 21 nt, Human
agacggggccucacuauguug

SEQ ID NO: 310806 - RNA, 21 nt, Human
agacggggcuucaccaucuug

SEQ ID NO: 310807 - RNA, 25 nt, Human
agacggggcuucaccaucuuggcca

SEQ ID NO: 310808 - RNA, 21 nt, Human
agacggggcuucacuauguug

SEQ ID NO: 310809 - RNA, 25 nt, Human
agacggggcuucacuauguuggcca

SEQ ID NO: 310810 - RNA, 21 nt, Human
agacggggcuucuccauguug

SEQ ID NO: 310811 - RNA, 25 nt, Human
agacggggcuucuccauguugguca

SEQ ID NO: 310812 - RNA, 23 nt, Human
agacgggggauuucaccauguug

SEQ ID NO: 310813 - RNA, 32 nt, Human
agacgggggauuucaccauguuggccaggcug

SEQ ID NO: 310814 - RNA, 32 nt, Human
agacgggggcugcggcccuggcucggcagcuc

SEQ ID NO: 310815 - RNA, 21 nt, Human
agacggggguuucaccauguu

SEQ ID NO: 310816 - RNA, 22 nt, Human
agacggggguuucaccauguug

SEQ ID NO: 310817 - RNA, 22 nt, Human
agacggggguuucacuauguug

SEQ ID NO: 310818 - RNA, 23 nt, Human
agacggggguuuucaccauguug

SEQ ID NO: 310819 - RNA, 32 nt, Human
agacggggguuuucaccauguuggccaggcug

SEQ ID NO: 310820 - RNA, 21 nt, Human
agacgggguaucacuauauug

SEQ ID NO: 310821 - RNA, 19 nt, Human
agacggggucucacucugu

SEQ ID NO: 310822 - RNA, 20 nt, Human
agacggggucucacucuguu

SEQ ID NO: 310823 - RNA, 21 nt, Human
agacggggucucgccauguug

SEQ ID NO: 310824 - RNA, 25 nt, Human
agacggggucucgccauguuggcca

SEQ ID NO: 310825 - RNA, 21 nt, Human
agacggggucuggcuguguug

SEQ ID NO: 310826 - RNA, 21 nt, Human
agacggggucuugcuauguug

SEQ ID NO: 310827 - RNA, 20 nt, Human
agacgggguucaccauguug

SEQ ID NO: 310828 - RNA, 24 nt, Human
agacgggguucaccauguuggcca

SEQ ID NO: 310829 - RNA, 22 nt, Human
agacgggguugacacaaugcug

SEQ ID NO: 310830 - RNA, 21 nt, Human
agacgggguuuaaccauguug

SEQ ID NO: 310831 - RNA, 25 nt, Human
agacgggguuuaaccauguuggcca

SEQ ID NO: 310832 - RNA, 21 nt, Human
agacgggguuucaacguguug

SEQ ID NO: 310833 - RNA, 20 nt, Human
agacgggguuucacaguguu

SEQ ID NO: 310834 - RNA, 25 nt, Human
agacgggguuucaccacauucguca

SEQ ID NO: 310835 - RNA, 21 nt, Human
agacgggguuucaccacauug

SEQ ID NO: 310836 - RNA, 25 nt, Human
agacgggguuucaccacauuggcca

SEQ ID NO: 310837 - RNA, 25 nt, Human
agacgggguuucaccacauugguca

SEQ ID NO: 310838 - RNA, 21 nt, Human
agacgggguuucaccacguug

SEQ ID NO: 310839 - RNA, 25 nt, Human
agacgggguuucaccacguuggcca

SEQ ID NO: 310840 - RNA, 25 nt, Human
agacgggguuucaccacguuggccg

SEQ ID NO: 310841 - RNA, 20 nt, Human
agacgggguuucaccagguu

SEQ ID NO: 310842 - RNA, 21 nt, Human
agacgggguuucaccaguguu

SEQ ID NO: 310843 - RNA, 21 nt, Human
agacgggguuucaccauauug

SEQ ID NO: 310844 - RNA, 25 nt, Human
agacgggguuucaccauauuggcca

SEQ ID NO: 310845 - RNA, 21 nt, Human
agacgggguuucaccaucuug

SEQ ID NO: 310846 - RNA, 25 nt, Human
agacgggguuucaccaucuuggcca

SEQ ID NO: 310847 - RNA, 18 nt, Human
agacgggguuucaccaug

SEQ ID NO: 310848 - RNA, 21 nt, Human
agacgggguuucaccaugcug

SEQ ID NO: 310849 - RNA, 25 nt, Human
agacgggguuucaccaugcuggcca

SEQ ID NO: 310850 - RNA, 19 nt, Human
agacgggguuucaccaugu

SEQ ID NO: 310851 - RNA, 25 nt, Human
agacgggguuucaccaugugggcca

SEQ ID NO: 310852 - RNA, 20 nt, Human
agacgggguuucaccauguu

SEQ ID NO: 310853 - RNA, 21 nt, Human
agacgggguuucaccauguug

SEQ ID NO: 310854 - RNA, 25 nt, Human
agacgggguuucaccauguugccca

SEQ ID NO: 310855 - RNA, 25 nt, Human
agacgggguuucaccauguugcuca

SEQ ID NO: 310856 - RNA, 22 nt, Human
agacgggguuucaccauguugg

SEQ ID NO: 310857 - RNA, 25 nt, Human
agacgggguuucaccauguuggcca

SEQ ID NO: 310858 - RNA, 25 nt, Human
agacgggguuucaccauguuggccg

SEQ ID NO: 310859 - RNA, 24 nt, Human
agacgggguuucaccauguugguc

SEQ ID NO: 310860 - RNA, 25 nt, Human
agacgggguuucaccauguugguca

SEQ ID NO: 310861 - RNA, 25 nt, Human
agacgggguuucaccauguugucca

SEQ ID NO: 310862 - RNA, 21 nt, Human
agacgggguuucaccauuuug

SEQ ID NO: 310863 - RNA, 25 nt, Human
agacgggguuucaccauuuuggcca

SEQ ID NO: 310864 - RNA, 20 nt, Human
agacgggguuucaccguguu

SEQ ID NO: 310865 - RNA, 25 nt, Human
agacgggguuucaccguguuaguca

SEQ ID NO: 310866 - RNA, 21 nt, Human
agacgggguuucaccguguug

SEQ ID NO: 310867 - RNA, 25 nt, Human
agacgggguuucaccguguuggcca

SEQ ID NO: 310868 - RNA, 21 nt, Human
agacgggguuucaccuuguug

SEQ ID NO: 310869 - RNA, 25 nt, Human
agacgggguuucaccuuguuggcca

SEQ ID NO: 310870 - RNA, 21 nt, Human
agacgggguuucacuauauug

SEQ ID NO: 310871 - RNA, 25 nt, Human
agacgggguuucacuauauuggcca

SEQ ID NO: 310872 - RNA, 21 nt, Human
agacgggguuucacuauguug

SEQ ID NO: 310873 - RNA, 25 nt, Human
agacgggguuucacuauguuggcca

SEQ ID NO: 310874 - RNA, 21 nt, Human
agacgggguuucacucuguca

SEQ ID NO: 310875 - RNA, 18 nt, Human
agacgggguuucacugug

SEQ ID NO: 310876 - RNA, 20 nt, Human
agacgggguuucacuguguu

SEQ ID NO: 310877 - RNA, 21 nt, Human
agacgggguuucacuguguug

SEQ ID NO: 310878 - RNA, 20 nt, Human
agacgggguuucacuuuguu

SEQ ID NO: 310879 - RNA, 21 nt, Human
agacgggguuucagcauauug

SEQ ID NO: 310880 - RNA, 21 nt, Human
agacgggguuucagcauguug

SEQ ID NO: 310881 - RNA, 21 nt, Human
agacgggguuucaucauguug

SEQ ID NO: 310882 - RNA, 22 nt, Human
agacgggguuucaucauguugg

SEQ ID NO: 310883 - RNA, 25 nt, Human
agacgggguuucaucauguuggcca

SEQ ID NO: 310884 - RNA, 20 nt, Human
agacgggguuucaucguguu

SEQ ID NO: 310885 - RNA, 21 nt, Human
agacgggguuucauuauguug

SEQ ID NO: 310886 - RNA, 20 nt, Human
agacgggguuucauuguguu

SEQ ID NO: 310887 - RNA, 21 nt, Human
agacgggguuuccccauguug

SEQ ID NO: 310888 - RNA, 25 nt, Human
agacgggguuuccccauguugguca

SEQ ID NO: 310889 - RNA, 20 nt, Human
agacgggguuuccccguguu

SEQ ID NO: 310890 - RNA, 21 nt, Human
agacgggguuucgccaaguug

SEQ ID NO: 310891 - RNA, 21 nt, Human
agacgggguuucgccauauug

SEQ ID NO: 310892 - RNA, 21 nt, Human
agacgggguuucgccauguug

SEQ ID NO: 310893 - RNA, 20 nt, Human
agacgggguuucgccauuug

SEQ ID NO: 310894 - RNA, 21 nt, Human
agacgggguuucgccguguug

SEQ ID NO: 310895 - RNA, 21 nt, Human
agacgggguuucgccuuguug

SEQ ID NO: 310896 - RNA, 21 nt, Human
agacgggguuucgcuauuuug

SEQ ID NO: 310897 - RNA, 21 nt, Human
agacgggguuucgcucuuguu

SEQ ID NO: 310898 - RNA, 21 nt, Human
agacgggguuucgcuguguug

SEQ ID NO: 310899 - RNA, 21 nt, Human
agacgggguuucggcauguug

SEQ ID NO: 310900 - RNA, 19 nt, Human
agacgggguuucuccaugu

SEQ ID NO: 310901 - RNA, 20 nt, Human
agacgggguuucuccauguu

SEQ ID NO: 310902 - RNA, 21 nt, Human
agacgggguuucuccauguug

SEQ ID NO: 310903 - RNA, 25 nt, Human
agacgggguuucuccauguugguca

SEQ ID NO: 310904 - RNA, 21 nt, Human
agacgggguuucuccguguug

SEQ ID NO: 310905 - RNA, 21 nt, Human
agacgggguuucuccuuguug

SEQ ID NO: 310906 - RNA, 19 nt, Human
agacgggguuucuuggcag

SEQ ID NO: 310907 - RNA, 20 nt, Human
agacgggguuugaccguguu

SEQ ID NO: 310908 - RNA, 20 nt, Human
agacgggguuugccaugcug

SEQ ID NO: 310909 - RNA, 19 nt, Human
agacgggguuugcuguguu

SEQ ID NO: 310910 - RNA, 20 nt, Human
agacgggguuuuaccauguu

SEQ ID NO: 310911 - RNA, 21 nt, Human
agacgggguuuuaccauguug

SEQ ID NO: 310912 - RNA, 25 nt, Human
agacgggguuuuaccauguuggcca

SEQ ID NO: 310913 - RNA, 20 nt, Human
agacgggguuuuaccguguu

SEQ ID NO: 310914 - RNA, 20 nt, Human
agacgggguuuugccauguu

SEQ ID NO: 310915 - RNA, 21 nt, Human
agacgggguuuugccauguug

SEQ ID NO: 310916 - RNA, 21 nt, Human
agacgggguuuugucauguug

SEQ ID NO: 310917 - RNA, 20 nt, Human
agacgggucucacuauguug

SEQ ID NO: 310918 - RNA, 24 nt, Human
agacgggucucacuauguugccca

SEQ ID NO: 310919 - RNA, 32 nt, Human
agacgggugaccuucagacaauacugugccua

SEQ ID NO: 310920 - RNA, 32 nt, Human
agacggguggcauggggagcagcuaaacaaug

SEQ ID NO: 310921 - RNA, 19 nt, Human
agacggguucaccauguug

SEQ ID NO: 310922 - RNA, 23 nt, Human
agacggguucaccauguugccca

SEQ ID NO: 310923 - RNA, 20 nt, Human
agacggguuucaccacguug

SEQ ID NO: 310924 - RNA, 24 nt, Human
agacggguuucaccacguuggcca

SEQ ID NO: 310925 - RNA, 20 nt, Human
agacggguuucaccauauug

SEQ ID NO: 310926 - RNA, 20 nt, Human
agacggguuucaccauguug

SEQ ID NO: 310927 - RNA, 21 nt, Human
agacggguuucaccauguugg

SEQ ID NO: 310928 - RNA, 24 nt, Human
agacggguuucaccauguuggcca

SEQ ID NO: 310929 - RNA, 24 nt, Human
agacggguuucaccauguugguca

SEQ ID NO: 310930 - RNA, 24 nt, Human
agacggguuucaucaugguggcca

SEQ ID NO: 310931 - RNA, 32 nt, Human
agacggguuucaucaugguggccaggaugguc

SEQ ID NO: 310932 - RNA, 19 nt, Human
agacggguuucaucauguu

SEQ ID NO: 310933 - RNA, 21 nt, Human
agacggguuuucaccauguug

SEQ ID NO: 310934 - RNA, 32 nt, Human
agacgguaucuccuccuccugccucuucuauu

SEQ ID NO: 310935 - RNA, 32 nt, Human
agacggucucaaucuaaaagcacuucaagggg

SEQ ID NO: 310936 - RNA, 32 nt, Human
agacggugccauugcucuccagccugggcgac

SEQ ID NO: 310937 - RNA, 22 nt, Human
agacggugguuucaccauguug

SEQ ID NO: 310938 - RNA, 32 nt, Human
agacggugucacugcacuccagccugggugac

SEQ ID NO: 310939 - RNA, 21 nt, Human
agacgguguuucaccauauug

SEQ ID NO: 310940 - RNA, 25 nt, Human
agacgguguuucaccauauuggcca

SEQ ID NO: 310941 - RNA, 20 nt, Human
agacgguguuucaccauguu

SEQ ID NO: 310942 - RNA, 25 nt, Human
agacgguguuucaccauguuaguca

SEQ ID NO: 310943 - RNA, 21 nt, Human
agacgguguuucaccauguug

SEQ ID NO: 310944 - RNA, 25 nt, Human
agacgguguuucaccauguuggcca

SEQ ID NO: 310945 - RNA, 25 nt, Human
agacgguguuucaccauguugguca

SEQ ID NO: 310946 - RNA, 32 nt, Human
agacgguucuucauugugucaggaugaccuuu

SEQ ID NO: 310947 - RNA, 32 nt, Human
agacgguuguuagaggggcagcucuaggcugg

SEQ ID NO: 310948 - RNA, 23 nt, Human
agacgguuucaccaugucggcca

SEQ ID NO: 310949 - RNA, 32 nt, Human
agacguagccaucuugcuccaugaagggugaa

SEQ ID NO: 310950 - RNA, 32 nt, Human
agacguaggaagacaagccacaguuguauggu

SEQ ID NO: 310951 - RNA, 32 nt, Human
agacguaucagggucacacacaccugauuuaa

SEQ ID NO: 310952 - RNA, 32 nt, Human
agacguaugcuaguuuggaaugagcuacuagg

SEQ ID NO: 310953 - RNA, 32 nt, Human
agacgucacagucuggaagugaaauguccaca

SEQ ID NO: 310954 - RNA, 32 nt, Human
agacgucaucuucuucuaaagggccgugacuc

SEQ ID NO: 310955 - RNA, 32 nt, Human
agacguccuccaggaaccccucaacgaagcug

SEQ ID NO: 310956 - RNA, 32 nt, Human
agacguccuccccuuuugaccccguuccuuca

SEQ ID NO: 310957 - RNA, 32 nt, Human
agacgucgccuccccuucauccaccucucucu

SEQ ID NO: 310958 - RNA, 32 nt, Human
agacgucuacguugaauuauucagagaauuaa

SEQ ID NO: 310959 - RNA, 32 nt, Human
agacgucuccccacucauccagccccagaucu

SEQ ID NO: 310960 - RNA, 32 nt, Human
agacgucuguaaucccagcuauucaggaggcu

SEQ ID NO: 310961 - RNA, 20 nt, Human
agacgugagccaccaugccc

SEQ ID NO: 310962 - RNA, 22 nt, Human
agacgugagccaccgcgcccgg

SEQ ID NO: 310963 - RNA, 22 nt, Human
agacgugagccaccgugcccgg

SEQ ID NO: 310964 - RNA, 22 nt, Human
agacgugagccaccgugccugg

SEQ ID NO: 310965 - RNA, 23 nt, Human
agacgugagccacugcguccggu

SEQ ID NO: 310966 - RNA, 32 nt, Human
agacgugaguccuaaccuggccacaguugggg

SEQ ID NO: 310967 - RNA, 32 nt, Human
agacgugcaggugggaguaccagguugaaacc

SEQ ID NO: 310968 - RNA, 32 nt, Human
agacgugcuuguucccccuccgccgugagaag

SEQ ID NO: 310969 - RNA, 32 nt, Human
agacguggccuugaagcccacaggguugaugg

SEQ ID NO: 310970 - RNA, 32 nt, Human
agacguggcuggagcaggagaucgccaccuac

SEQ ID NO: 310971 - RNA, 32 nt, Human
agacgugggaggaucgcuugagccugggagau

SEQ ID NO: 310972 - RNA, 23 nt, Human
agacgugggguuucaccauguug

SEQ ID NO: 310973 - RNA, 32 nt, Human
agacgugggguuucaccauguuggccagacug

SEQ ID NO: 310974 - RNA, 32 nt, Human
agacguggugugagagggacggcucacagggc

SEQ ID NO: 310975 - RNA, 32 nt, Human
agacguguagacacaaacauauacgccuagac

SEQ ID NO: 310976 - RNA, 32 nt, Human
agacguguccugcagcccucucuucuucagag

SEQ ID NO: 310977 - RNA, 32 nt, Human
agacguguuggaugcuccuguucuccgaauuc

SEQ ID NO: 310978 - RNA, 32 nt, Human
agacguuaaagaagggugaagaguaggcagaa

SEQ ID NO: 310979 - RNA, 32 nt, Human
agacguuaaagaccagccugggcaacacagca

SEQ ID NO: 310980 - RNA, 32 nt, Human
agacguucagaaguccacugaacuucugauuc

SEQ ID NO: 310981 - RNA, 32 nt, Human
agacguucccuuggugggccgcgggaccaccc

SEQ ID NO: 310982 - RNA, 32 nt, Human
agacguucuaguggagaaaauguggaaaacaa

SEQ ID NO: 310983 - RNA, 22 nt, Human
agacguugucuauccacagguu

SEQ ID NO: 310984 - RNA, 32 nt, Human
agacguuucugccucccucuuucuuccuccgc

SEQ ID NO: 310985 - RNA, 32 nt, Human
agacguuugagaccagccuggccaacauggug

SEQ ID NO: 310986 - RNA, 32 nt, Human
agacuaacacaaaauuaagaaucuuccauaau

SEQ ID NO: 310987 - RNA, 32 nt, Human
agacuaacagugugccaaacaccagcuaaacc

SEQ ID NO: 310988 - RNA, 32 nt, Human
agacuaacuuuacaacuucuauaacuuuugga

SEQ ID NO: 310989 - RNA, 32 nt, Human
agacuaagacuagguaauuacacagaggcuug

SEQ ID NO: 310990 - RNA, 32 nt, Human
agacuaagcccugucuugcugugugaugcuca

SEQ ID NO: 310991 - RNA, 32 nt, Human
agacuaagggggcagcccugccccugccuacg

SEQ ID NO: 310992 - RNA, 32 nt, Human
agacuaaugaacaaagaaaccugcucuaguuu

SEQ ID NO: 310993 - RNA, 32 nt, Human
agacuaauuauuuuauccccaucccaggguau

SEQ ID NO: 310994 - RNA, 32 nt, Human
agacuacaagcuggacagucacccaggcccaa

SEQ ID NO: 310995 - RNA, 32 nt, Human
agacuacaagugugugccaccaugccucacua

SEQ ID NO: 310996 - RNA, 32 nt, Human
agacuacagauaagcaauccaggauuucaaga

SEQ ID NO: 310997 - RNA, 32 nt, Human
agacuacagauggauaauuggacuuaagccau

SEQ ID NO: 310998 - RNA, 32 nt, Human
agacuacagaugugcaccaccacacuggcuca

SEQ ID NO: 310999 - RNA, 32 nt, Human
agacuacagauuacuuaauaacagggacuaua

SEQ ID NO: 311000 - RNA, 32 nt, Human
agacuacagcgaagaggggauccacuucccgu

SEQ ID NO: 311001 - RNA, 32 nt, Human
agacuacaggcacacaccaccacgcccagcuc

SEQ ID NO: 311002 - RNA, 32 nt, Human
agacuacaggcacacaccaccacgccuggcua

SEQ ID NO: 311003 - RNA, 32 nt, Human
agacuacaggcacgcaccaccaugccugccca

SEQ ID NO: 311004 - RNA, 32 nt, Human
agacuacaggcaugcaccaccacgcccagcua

SEQ ID NO: 311005 - RNA, 32 nt, Human
agacuacaggcgcuugccacuaugcccaacua

SEQ ID NO: 311006 - RNA, 32 nt, Human
agacuacaggcgugcaccaccaugcccguuag

SEQ ID NO: 311007 - RNA, 32 nt, Human
agacuacagggguaugccaccaugcccagcug

SEQ ID NO: 311008 - RNA, 32 nt, Human
agacuacaggguagagaaucagaggcuuguag

SEQ ID NO: 311009 - RNA, 32 nt, Human
agacuacagguaaaugguaucccugagaaaga

SEQ ID NO: 311010 - RNA, 32 nt, Human
agacuacaggugcacaccaccacaccuggcua

SEQ ID NO: 311011 - RNA, 32 nt, Human
agacuacaggugcgcaccaccaugcccagcua

SEQ ID NO: 311012 - RNA, 32 nt, Human
agacuacaggugugagccaccaugcccggccu

SEQ ID NO: 311013 - RNA, 31 nt, Human
agacuacauacuuuuuguuuaaaacaaaauu

SEQ ID NO: 311014 - RNA, 32 nt, Human
agacuaccaaaaccuggugcaucuucaacucg

SEQ ID NO: 311015 - RNA, 32 nt, Human
agacuaccucauucucacuggcucggagacuc

SEQ ID NO: 311016 - RNA, 32 nt, Human
agacuaccugggagguggagggagacaggaga

SEQ ID NO: 311017 - RNA, 32 nt, Human
agacuacgccacugcacuccagccuggaggcc

SEQ ID NO: 311018 - RNA, 32 nt, Human
agacuacuccaaagguggcuaugcuggaucau

SEQ ID NO: 311019 - RNA, 32 nt, Human
agacuacuggacuguaguagaggcauuuggaa

SEQ ID NO: 311020 - RNA, 32 nt, Human
agacuacuucagcagccacagggacgagcucc

SEQ ID NO: 311021 - RNA, 32 nt, Human
agacuacuuggugccaugggguaggggugagg

SEQ ID NO: 311022 - RNA, 32 nt, Human
agacuagagacacgcuuuacacguuuuaacaa

SEQ ID NO: 311023 - RNA, 32 nt, Human
agacuagagggagugggguugcaguggcugcc

SEQ ID NO: 311024 - RNA, 32 nt, Human
agacuagagucuugcagcaacacagaauguaa

SEQ ID NO: 311025 - RNA, 24 nt, Human
agacuagccuaggcaacacaguga

SEQ ID NO: 311026 - RNA, 32 nt, Human
agacuagccugaccaacauggagaaacccugu

SEQ ID NO: 311027 - RNA, 32 nt, Human
agacuagccugaccaacauggugaaacuaugu

SEQ ID NO: 311028 - RNA, 32 nt, Human
agacuagccugaccaacauggugaaacucugu

SEQ ID NO: 311029 - RNA, 24 nt, Human
agacuagccugggcaacauagcga

SEQ ID NO: 311030 - RNA, 32 nt, Human
agacuagcgggaagcucugccucuuuccccag

SEQ ID NO: 311031 - RNA, 20 nt, Human
agacuaggaacaaguugaua

SEQ ID NO: 311032 - RNA, 27 nt, Human
agacuaggaagaguggguacccagaga

SEQ ID NO: 311033 - RNA, 32 nt, Human
agacuaggaaguagcccucguucuccagggca

SEQ ID NO: 311034 - RNA, 32 nt, Human
agacuaggacugagagaaagaagaggagagag

SEQ ID NO: 311035 - RNA, 32 nt, Human
agacuaggccucuccccuuuaccccuccagag

SEQ ID NO: 311036 - RNA, 22 nt, Human
agacuaggcugggcaacaaagc

SEQ ID NO: 311037 - RNA, 32 nt, Human
agacuagucucaaacuccugaccucaagugau

SEQ ID NO: 311038 - RNA, 32 nt, Human
agacuagucucgaacucuugagcucaagcaau

SEQ ID NO: 311039 - RNA, 32 nt, Human
agacuagucuugaacucccgaccucaggugau

SEQ ID NO: 311040 - RNA, 32 nt, Human
agacuagucuugaacuccugaccucaggugau

SEQ ID NO: 311041 - RNA, 32 nt, Human
agacuagugcacagugcuaucuccaucuacug

SEQ ID NO: 311042 - RNA, 32 nt, Human
agacuaguggaaauccccaaauggagccaaga

SEQ ID NO: 311043 - RNA, 32 nt, Human
agacuaguuauuucccucuguaaagaagcugu

SEQ ID NO: 311044 - RNA, 32 nt, Human
agacuauaaacuauaaccacuagcucgacaca

SEQ ID NO: 311045 - RNA, 32 nt, Human
agacuauacugugucaauaucuguaaaaagag

SEQ ID NO: 311046 - RNA, 32 nt, Human
agacuauagguguggaggugaaauuacagguu

SEQ ID NO: 311047 - RNA, 32 nt, Human
agacuaucacaaagcauauauguaauauuaaa

SEQ ID NO: 311048 - RNA, 24 nt, Human
agacuauccaccuuugggucgcuu

SEQ ID NO: 311049 - RNA, 32 nt, Human
agacuauccuggagaagccucguuuugaugcc

SEQ ID NO: 311050 - RNA, 21 nt, Human
agacuaucuuuggagccgcuu

SEQ ID NO: 311051 - RNA, 32 nt, Human
agacuaugagguccacugucucugauuuaaaa

SEQ ID NO: 311052 - RNA, 32 nt, Human
agacuaugccacugcacuccagccuaggugac

SEQ ID NO: 311053 - RNA, 32 nt, Human
agacuaugccacugcacucccgccugggugac

SEQ ID NO: 311054 - RNA, 32 nt, Human
agacuauggaggcugggcagugguucaugccu

SEQ ID NO: 311055 - RNA, 32 nt, Human
agacuauguacagagacugaccucacagacug

SEQ ID NO: 311056 - RNA, 32 nt, Human
agacuaugucaucuuguucuccugccuggguu

SEQ ID NO: 311057 - RNA, 32 nt, Human
agacuauuucacacucuccaugcuuaugucaa

SEQ ID NO: 311058 - RNA, 32 nt, Human
agacuauuugcugugggcucuccuccagccug

SEQ ID NO: 311059 - RNA, 23 nt, Human
agacuauuuuuacuaaggugcuu

SEQ ID NO: 311060 - RNA, 32 nt, Human
agacucaaagcaggggccaggccaggccagug

SEQ ID NO: 311061 - RNA, 32 nt, Human
agacucaacaugagacauuccuuucugcuuuc

SEQ ID NO: 311062 - RNA, 32 nt, Human
agacucaacugccaccaguccccagcugcaga

SEQ ID NO: 311063 - RNA, 32 nt, Human
agacucaagagaauuuaugugaaaugcuuucu

SEQ ID NO: 311064 - RNA, 32 nt, Human
agacucaagcccugaccuuugcagccucccug

SEQ ID NO: 311065 - RNA, 32 nt, Human
agacucacagcaacucuccauuauagcuuuca

SEQ ID NO: 311066 - RNA, 32 nt, Human
agacucacagcagugagcaguccugggggccc

SEQ ID NO: 311067 - RNA, 32 nt, Human
agacucacagccccguccgcagagaagcaaag

SEQ ID NO: 311068 - RNA, 32 nt, Human
agacucacccacccucucccucucccuucagc

SEQ ID NO: 311069 - RNA, 32 nt, Human
agacucaccgcgggcccaugcccgguuuggca

SEQ ID NO: 311070 - RNA, 32 nt, Human
agacucacugcaaccuccaccuccuguguuca

SEQ ID NO: 311071 - RNA, 32 nt, Human
agacucacugcaaguuccugcccaggaggcug

SEQ ID NO: 311072 - RNA, 32 nt, Human
agacucacuuccucaucucccuguccucugag

SEQ ID NO: 311073 - RNA, 32 nt, Human
agacucagaaaugcugcagugaaaauaauucc

SEQ ID NO: 311074 - RNA, 32 nt, Human
agacucagagcaagucaccccuuuguacugaa

SEQ ID NO: 311075 - RNA, 32 nt, Human
agacucagaggacccaccugggccaaggacuc

SEQ ID NO: 311076 - RNA, 32 nt, Human
agacucagagggaaggcucucuggucuaccug

SEQ ID NO: 311077 - RNA, 32 nt, Human
agacucagagggcuggauuuugguucccuugu

SEQ ID NO: 311078 - RNA, 32 nt, Human
agacucagagugccuucuccaucccagugucc

SEQ ID NO: 311079 - RNA, 32 nt, Human
agacucagcaccaagcaggggucaggcccugg

SEQ ID NO: 311080 - RNA, 32 nt, Human
agacucagcccagacccuggcucacagggaag

SEQ ID NO: 311081 - RNA, 32 nt, Human
agacucagcuccuggugaagcucccagccauc

SEQ ID NO: 311082 - RNA, 32 nt, Human
agacucaggagaauggcaaaacccaauccaag

SEQ ID NO: 311083 - RNA, 32 nt, Human
agacucaggcccagaguccucaggacauauca

SEQ ID NO: 311084 - RNA, 22 nt, Human
agacucaggggucacccagagg

SEQ ID NO: 311085 - RNA, 32 nt, Human
agacucaggugccuccgcccuccugagagcag

SEQ ID NO: 311086 - RNA, 32 nt, Human
agacucagguuggcugaauaagaaggaugaca

SEQ ID NO: 311087 - RNA, 32 nt, Human
agacucagucccagccucuccccucuacaacu

SEQ ID NO: 311088 - RNA, 32 nt, Human
agacucagucugcgucaucagagaccaggcuc

SEQ ID NO: 311089 - RNA, 32 nt, Human
agacucagugcacuguccuccucccagcgacc

SEQ ID NO: 311090 - RNA, 32 nt, Human
agacucaguucugccagguauaagccgugugg

SEQ ID NO: 311091 - RNA, 23 nt, Human
agacucauaaggcuaaaagguca

SEQ ID NO: 311092 - RNA, 32 nt, Human
agacucauccuguggucauuuccccagugcca

SEQ ID NO: 311093 - RNA, 32 nt, Human
agacucauggaacugaagggaccuuagcaauc

SEQ ID NO: 311094 - RNA, 32 nt, Human
agacucaugggcaagaucuuucaggcuuccua

SEQ ID NO: 311095 - RNA, 32 nt, Human
agacucaugugagacuucccucuggaugacca

SEQ ID NO: 311096 - RNA, 32 nt, Human
agacucauuucuccccucccauuuucuccuca

SEQ ID NO: 311097 - RNA, 32 nt, Human
agacuccagagacuggagcagcugugggccac

SEQ ID NO: 311098 - RNA, 32 nt, Human
agacuccagcagaguuggggcuggaacuuggc

SEQ ID NO: 311099 - RNA, 32 nt, Human
agacuccagccaccccucuugggcucucuacu

SEQ ID NO: 311100 - RNA, 32 nt, Human
agacuccagcgguggugcucuaccugcacgcu

SEQ ID NO: 311101 - RNA, 32 nt, Human
agacuccagcuucauagacuccucuguaucac

SEQ ID NO: 311102 - RNA, 32 nt, Human
agacuccaggaccccgccaccauguucccgga

SEQ ID NO: 311103 - RNA, 32 nt, Human
agacuccaggagggaggcugcuguguggggaa

SEQ ID NO: 311104 - RNA, 32 nt, Human
agacuccaucacuuucagcuggaguuacaaac

SEQ ID NO: 311105 - RNA, 32 nt, Human
agacuccaugccuucucucucccugcaaagaa

SEQ ID NO: 311106 - RNA, 32 nt, Human
agacuccauggcccaauucgguuucuucggug

SEQ ID NO: 311107 - RNA, 32 nt, Human
agacucccaaagugcugggauuacagguguga

SEQ ID NO: 311108 - RNA, 32 nt, Human
agacucccaaagugcugggauuauagggauga

SEQ ID NO: 311109 - RNA, 32 nt, Human
agacucccaaauagcuaugauuacaggcaccc

SEQ ID NO: 311110 - RNA, 32 nt, Human
agacucccaaggugcugagauuacaggccuga

SEQ ID NO: 311111 - RNA, 32 nt, Human
agacucccagaacuugugucacagggcugcag

SEQ ID NO: 311112 - RNA, 32 nt, Human
agacuccccaguagcugggacuacaggcgccc

SEQ ID NO: 311113 - RNA, 32 nt, Human
agacucccgaauagcugggauuacagacaggc

SEQ ID NO: 311114 - RNA, 32 nt, Human
agacucccgaguagcugggacuacaggcacac

SEQ ID NO: 311115 - RNA, 32 nt, Human
agacucccgaguagcugggauuacaggcacau

SEQ ID NO: 311116 - RNA, 32 nt, Human
agacucccgaugucacaggcagucuguguggu

SEQ ID NO: 311117 - RNA, 20 nt, Human
agacucccuccagcccccca

SEQ ID NO: 311118 - RNA, 32 nt, Human
agacucccuccuccuccaaaucugggcugggu

SEQ ID NO: 311119 - RNA, 32 nt, Human
agacucccugcaccaggcccuaggaggccucu

SEQ ID NO: 311120 - RNA, 32 nt, Human
agacucccugggaccuagaggcuggcaaaugu

SEQ ID NO: 311121 - RNA, 32 nt, Human
agacuccgcuuuggcaccucugcuccggcugg

SEQ ID NO: 311122 - RNA, 32 nt, Human
agacuccgggcuugagcccaggccucccgcac

SEQ ID NO: 311123 - RNA, 32 nt, Human
agacuccggguuguccuguucuuucugggcuu

SEQ ID NO: 311124 - RNA, 32 nt, Human
agacuccgucuccaaaaacaaacaaacaaaaa

SEQ ID NO: 311125 - RNA, 32 nt, Human
agacuccuaaaaggaggguuucuuuccugaag

SEQ ID NO: 311126 - RNA, 32 nt, Human
agacuccuaaguagcugggauuacaggcaccu

SEQ ID NO: 311127 - RNA, 32 nt, Human
agacuccuaccaggccuugucacugcagagcc

SEQ ID NO: 311128 - RNA, 32 nt, Human
agacuccuagacucacuuguucucacugucug

SEQ ID NO: 311129 - RNA, 32 nt, Human
agacuccuauuuuccuuucuguuuucaggccu

SEQ ID NO: 311130 - RNA, 19 nt, Human
agacuccucccgccugccu

SEQ ID NO: 311131 - RNA, 32 nt, Human
agacuccuccuccaaaggcccccuacgccaau

SEQ ID NO: 311132 - RNA, 32 nt, Human
agacuccucuaggcucuccaucuuucccuuga

SEQ ID NO: 311133 - RNA, 32 nt, Human
agacuccucuagguugauauccugggccagag

SEQ ID NO: 311134 - RNA, 32 nt, Human
agacuccucugcguggagagggugggugcagg

SEQ ID NO: 311135 - RNA, 32 nt, Human
agacuccucuggagaagggugagaagguggag

SEQ ID NO: 311136 - RNA, 32 nt, Human
agacuccugagaucgccucccucccagcaugc

SEQ ID NO: 311137 - RNA, 32 nt, Human
agacuccugaguagcugggauuacaggcaugu

SEQ ID NO: 311138 - RNA, 32 nt, Human
agacuccugaguaucugggaccacaggugugc

SEQ ID NO: 311139 - RNA, 32 nt, Human
agacuccugcagcagucgaccaagcccaagga

SEQ ID NO: 311140 - RNA, 32 nt, Human
agacuccugccugcccucugccgaugcugccu

SEQ ID NO: 311141 - RNA, 32 nt, Human
agacuccugcguagcugggaccacagggguau

SEQ ID NO: 311142 - RNA, 19 nt, Human
agacuccuggguucaagca

SEQ ID NO: 311143 - RNA, 20 nt, Human
agacuccugucucuacaaaa

SEQ ID NO: 311144 - RNA, 32 nt, Human
agacuccuugaggaacacaggaaaaggucuuc

SEQ ID NO: 311145 - RNA, 32 nt, Human
agacucgaguuguuagggcugaggaaccaauc

SEQ ID NO: 311146 - RNA, 32 nt, Human
agacucgccuccgagaggaggaagggacagac

SEQ ID NO: 311147 - RNA, 32 nt, Human
agacucgcgcuggcuccagucucuccacgauu

SEQ ID NO: 311148 - RNA, 22 nt, Human
agacucgcggacaacacagcga

SEQ ID NO: 311149 - RNA, 32 nt, Human
agacucgcuggcagagacugggcagaugugag

SEQ ID NO: 311150 - RNA, 32 nt, Human
agacucgcuugaaccugggagguggagguugc

SEQ ID NO: 311151 - RNA, 32 nt, Human
agacucggauuaucaaugcagagaaaucugaa

SEQ ID NO: 311152 - RNA, 32 nt, Human
agacucgggucauccuuccucccauaacuucu

SEQ ID NO: 311153 - RNA, 21 nt, Human
agacucgguuucaccauguug

SEQ ID NO: 311154 - RNA, 25 nt, Human
agacucgguuucaccauguugguca

SEQ ID NO: 311155 - RNA, 32 nt, Human
agacucuacugggaugccccucuggcuggugg

SEQ ID NO: 311156 - RNA, 32 nt, Human
agacucucacugaaagcugcuauuuucauccu

SEQ ID NO: 311157 - RNA, 32 nt, Human
agacucucacugugucacccaggcuggagugc

SEQ ID NO: 311158 - RNA, 32 nt, Human
agacucucagaagaaccuggaguaauugugcc

SEQ ID NO: 311159 - RNA, 32 nt, Human
agacucucagcaucugcugcccugaucacaga

SEQ ID NO: 311160 - RNA, 32 nt, Human
agacucuccagccugggaacuauaacuccucu

SEQ ID NO: 311161 - RNA, 32 nt, Human
agacucucgcaucuucccaaccccuuaagccc

SEQ ID NO: 311162 - RNA, 32 nt, Human
agacucucgcugucccugugcugcugguauuu

SEQ ID NO: 311163 - RNA, 32 nt, Human
agacucugagauguggagacugauggccaggc

SEQ ID NO: 311164 - RNA, 32 nt, Human
agacucugagauucacaaucagcagcucuaaa

SEQ ID NO: 311165 - RNA, 32 nt, Human
agacucugagguuuugcagcacuugcugugcc

SEQ ID NO: 311166 - RNA, 32 nt, Human
agacucugagucugauuacgaaaaguacucua

SEQ ID NO: 311167 - RNA, 32 nt, Human
agacucugauucuccucuucagccucucaucu

SEQ ID NO: 311168 - RNA, 32 nt, Human
agacucugcccuuuuccaggcaccgcccacac

SEQ ID NO: 311169 - RNA, 32 nt, Human
agacucugcuguuuacagcuuugaggccuugg

SEQ ID NO: 311170 - RNA, 32 nt, Human
agacucugcuugaccgaugaccaauaauuauu

SEQ ID NO: 311171 - RNA, 32 nt, Human
agacucugcuuucaaagggcuucugugauuag

SEQ ID NO: 311172 - RNA, 32 nt, Human
agacucuguaaccaccucucugucuuuuuccu

SEQ ID NO: 311173 - RNA, 32 nt, Human
agacucugucuccaaaaacaaaaacaaaaacu

SEQ ID NO: 311174 - RNA, 19 nt, Human
agacucugucucuacaaaa

SEQ ID NO: 311175 - RNA, 32 nt, Human
agacucuuaaugauccagcaaguuugggaaau

SEQ ID NO: 311176 - RNA, 32 nt, Human
agacucuucucaaacuguccuuaugugagugc

SEQ ID NO: 311177 - RNA, 32 nt, Human
agacucuuggucgcagaacuuggcuuuccgcu

SEQ ID NO: 311178 - RNA, 32 nt, Human
agacucuugguugaccguugugguccuuagaa

SEQ ID NO: 311179 - RNA, 32 nt, Human
agacucuugugcugguugcaggccaaguggac

SEQ ID NO: 311180 - RNA, 32 nt, Human
agacucuuuaacacccuuaggaccucaggcca

SEQ ID NO: 311181 - RNA, 32 nt, Human
agacucuuucuucacuacguguucacaggcug

SEQ ID NO: 311182 - RNA, 32 nt, Human
agacugaaaaacuguugguucauccagaagug

SEQ ID NO: 311183 - RNA, 32 nt, Human
agacugaaaacuaaagccugcagagaccucug

SEQ ID NO: 311184 - RNA, 32 nt, Human
agacugaaaaggagguccguucagcuccgccu

SEQ ID NO: 311185 - RNA, 32 nt, Human
agacugaaaaggggguuugaggagaagaugcu

SEQ ID NO: 311186 - RNA, 32 nt, Human
agacugaaagaguagaagauaaggagaaaagu

SEQ ID NO: 311187 - RNA, 32 nt, Human
agacugaaccauuggaaacauuuaacucagac

SEQ ID NO: 311188 - RNA, 32 nt, Human
agacugaaccucuguugccagagaugcugaag

SEQ ID NO: 311189 - RNA, 32 nt, Human
agacugaacuacacaccaaggaucuuguucaa

SEQ ID NO: 311190 - RNA, 32 nt, Human
agacugaacugcuuccucuuuccuucagcuau

SEQ ID NO: 311191 - RNA, 32 nt, Human
agacugaagaggcuggagugcaguggcgcaau

SEQ ID NO: 311192 - RNA, 32 nt, Human
agacugaagccauggcgauucuuuuugcuguu

SEQ ID NO: 311193 - RNA, 32 nt, Human
agacugaagcuacagucucaucuucacuuucu

SEQ ID NO: 311194 - RNA, 32 nt, Human
agacugaaugaauuugaaaggguggggccaaa

SEQ ID NO: 311195 - RNA, 22 nt, Human
agacugaauggugacccaggga

SEQ ID NO: 311196 - RNA, 32 nt, Human
agacugacagacuucaaggaugcagcugcuac

SEQ ID NO: 311197 - RNA, 32 nt, Human
agacugacagccagggcaggggaggagggagg

SEQ ID NO: 311198 - RNA, 32 nt, Human
agacugaccagaguugaaaucuggcuucuccg

SEQ ID NO: 311199 - RNA, 32 nt, Human
agacugaccagugcccugauucauuuacauau

SEQ ID NO: 311200 - RNA, 32 nt, Human
agacugacccacugcauuccagccuggcgaca

SEQ ID NO: 311201 - RNA, 32 nt, Human
agacugacccuugaggcacacuugcacuggag

SEQ ID NO: 311202 - RNA, 32 nt, Human
agacugaccuugaauucagccuggguguucag

SEQ ID NO: 311203 - RNA, 32 nt, Human
agacugacugcucugcaaaccccagccgagga

SEQ ID NO: 311204 - RNA, 32 nt, Human
agacugagaagagagccagccacgccaugcug

SEQ ID NO: 311205 - RNA, 18 nt, Human
agacugagaccauccugg

SEQ ID NO: 311206 - RNA, 32 nt, Human
agacugagaggaagaaggcagugcuggaggug

SEQ ID NO: 311207 - RNA, 32 nt, Human
agacugagagggaggugccggagccagggaca

SEQ ID NO: 311208 - RNA, 21 nt, Human
agacugagcaggcgccggaga

SEQ ID NO: 311209 - RNA, 32 nt, Human
agacugagccacugcacuccagccugggcaau

SEQ ID NO: 311210 - RNA, 32 nt, Human
agacugagcccccugucuccuccaucauuugg

SEQ ID NO: 311211 - RNA, 32 nt, Human
agacugagcgaugacaccacacuuuguuugga

SEQ ID NO: 311212 - RNA, 32 nt, Human
agacugagcugggacccccacagccauccgcu

SEQ ID NO: 311213 - RNA, 32 nt, Human
agacugaggaagagugaucaggaaagcauagg

SEQ ID NO: 311214 - RNA, 32 nt, Human
agacugaggaauccucuuucugccucccauuu

SEQ ID NO: 311215 - RNA, 32 nt, Human
agacugaggagaaugauagagagugaagcaga

SEQ ID NO: 311216 - RNA, 32 nt, Human
agacugaggaggggucaccugaggucaggaug

SEQ ID NO: 311217 - RNA, 32 nt, Human
agacugaggcaggagaaugauuugaaccuagg

SEQ ID NO: 311218 - RNA, 18 nt, Human
agacugaggcaggccagg

SEQ ID NO: 311219 - RNA, 32 nt, Human
agacugaggcugguauuuugcauugcaaugga

SEQ ID NO: 311220 - RNA, 32 nt, Human
agacugagggagcaacaauguggaaagggaag

SEQ ID NO: 311221 - RNA, 32 nt, Human
agacugaggggaaagagaggagagaaagaaaa

SEQ ID NO: 311222 - RNA, 32 nt, Human
agacugaggugaccuucaggaagcacugcaga

SEQ ID NO: 311223 - RNA, 32 nt, Human
agacugagucucccuucucaguuucauuaggu

SEQ ID NO: 311224 - RNA, 32 nt, Human
agacugagucucucccuguugcccaaguugga

SEQ ID NO: 311225 - RNA, 32 nt, Human
agacugaguggcaggccuccuccugagggcag

SEQ ID NO: 311226 - RNA, 32 nt, Human
agacugagugugaaggagagaggacacagggg

SEQ ID NO: 311227 - RNA, 32 nt, Human
agacugaucuugaacuccugacaucaggugau

SEQ ID NO: 311228 - RNA, 32 nt, Human
agacugaucuugaacuccugacgucaggugau

SEQ ID NO: 311229 - RNA, 32 nt, Human
agacugaucuugagcuucugagcuccagcgau

SEQ ID NO: 311230 - RNA, 32 nt, Human
agacugauggaaguuagagagguggaggaggc

SEQ ID NO: 311231 - RNA, 32 nt, Human
agacugauucuuccaccuacuuuuaugaaccu

SEQ ID NO: 311232 - RNA, 32 nt, Human
agacugauugcaccugggacccaggcccuuuc

SEQ ID NO: 311233 - RNA, 32 nt, Human
agacugauuucggccuccugaccucgggaccc

SEQ ID NO: 311234 - RNA, 32 nt, Human
agacugcaacacugcucaucaccccgcggcgu

SEQ ID NO: 311235 - RNA, 24 nt, Human
agacugcaauagaaaacucccaaa

SEQ ID NO: 311236 - RNA, 32 nt, Human
agacugcacaaacuaccgcgggcuccuccgcc

SEQ ID NO: 311237 - RNA, 32 nt, Human
agacugcaccacugcacuccagccugggcaac

SEQ ID NO: 311238 - RNA, 32 nt, Human
agacugcaccacugcacuucagccugggugac

SEQ ID NO: 311239 - RNA, 32 nt, Human
agacugcaccauugcauuccagccugggcaac

SEQ ID NO: 311240 - RNA, 18 nt, Human
agacugcagaaacagaga

SEQ ID NO: 311241 - RNA, 32 nt, Human
agacugcagaccagugcuucacuguguggagu

SEQ ID NO: 311242 - RNA, 19 nt, Human
agacugcagagagcaggga

SEQ ID NO: 311243 - RNA, 21 nt, Human
agacugcagagauuuacagag

SEQ ID NO: 311244 - RNA, 20 nt, Human
agacugcagagggcuagaga

SEQ ID NO: 311245 - RNA, 32 nt, Human
agacugcagcagagugaggagugagggcagcu

SEQ ID NO: 311246 - RNA, 21 nt, Human
agacugcaggguccccaagga

SEQ ID NO: 311247 - RNA, 32 nt, Human
agacugcaguaagccaagaucaugccacugca

SEQ ID NO: 311248 - RNA, 32 nt, Human
agacugcagugagccgagaucacaccacugca

SEQ ID NO: 311249 - RNA, 32 nt, Human
agacugcagugagccgagaucgcaccacugca

SEQ ID NO: 311250 - RNA, 32 nt, Human
agacugcagugagccgagauugugccacugca

SEQ ID NO: 311251 - RNA, 32 nt, Human
agacugcaguucccuccccacccucuacccag

SEQ ID NO: 311252 - RNA, 31 nt, Human
agacugcaguuucuucacagaucucaggaag

SEQ ID NO: 311253 - RNA, 32 nt, Human
agacugcauacagaucucuuuauuucuauuau

SEQ ID NO: 311254 - RNA, 32 nt, Human
agacugcaugcuggagagaaacuugaagaacg

SEQ ID NO: 311255 - RNA, 32 nt, Human
agacugccagccaccacccccucccagacucu

SEQ ID NO: 311256 - RNA, 22 nt, Human
agacugccaggcccucccaggg

SEQ ID NO: 311257 - RNA, 32 nt, Human
agacugcccacucugaacaucuuccuauauug

SEQ ID NO: 311258 - RNA, 32 nt, Human
agacugccguguccuccgagcacuuuguuuuc

SEQ ID NO: 311259 - RNA, 32 nt, Human
agacugcgccaccacaaaacagccuuagccuc

SEQ ID NO: 311260 - RNA, 32 nt, Human
agacugcgccaccgcgcuccagccugggugac

SEQ ID NO: 311261 - RNA, 32 nt, Human
agacugcgccacggcacuccagccugggcgac

SEQ ID NO: 311262 - RNA, 32 nt, Human
agacugcgccacugcacuccagccugggcaac

SEQ ID NO: 311263 - RNA, 32 nt, Human
agacugcgccauugcacuccagcccgggcaac

SEQ ID NO: 311264 - RNA, 19 nt, Human
agacugcgcccugggaagg

SEQ ID NO: 311265 - RNA, 32 nt, Human
agacugcggcuuguugaggugcaauacccuga

SEQ ID NO: 311266 - RNA, 32 nt, Human
agacugcgggaggcaggggaugcauggguguc

SEQ ID NO: 311267 - RNA, 31 nt, Human
agacugcgugagagaaaacagcugugauuua

SEQ ID NO: 311268 - RNA, 32 nt, Human
agacugcucagggcuauccucucagagugaca

SEQ ID NO: 311269 - RNA, 32 nt, Human
agacugcucauccccucuuccuuucuuguccu

SEQ ID NO: 311270 - RNA, 32 nt, Human
agacugcugcacgggugagcucggugagaagg

SEQ ID NO: 311271 - RNA, 32 nt, Human
agacugcugucucucugcuacagcuucuuggc

SEQ ID NO: 311272 - RNA, 32 nt, Human
agacugcuucgccccuagccucagcuuuucag

SEQ ID NO: 311273 - RNA, 32 nt, Human
agacuggaaugcagcaguacugccuucaggcc

SEQ ID NO: 311274 - RNA, 22 nt, Human
agacuggaauguuugugauauc

SEQ ID NO: 311275 - RNA, 22 nt, Human
agacuggacaaagggggucaca

SEQ ID NO: 311276 - RNA, 21 nt, Human
agacuggaccucaggcugcug

SEQ ID NO: 311277 - RNA, 32 nt, Human
agacuggacucgaccgaacugaaggaagggac

SEQ ID NO: 311278 - RNA, 32 nt, Human
agacuggagaggguggggaggggcccagcggc

SEQ ID NO: 311279 - RNA, 32 nt, Human
agacuggagauaagcauuggaggcucuuuuaa

SEQ ID NO: 311280 - RNA, 32 nt, Human
agacuggagauguagaggcugaagugagcugu

SEQ ID NO: 311281 - RNA, 32 nt, Human
agacuggagcaaaauucagcuugaaugaacag

SEQ ID NO: 311282 - RNA, 32 nt, Human
agacuggagccaagugcgcugagcucucacau

SEQ ID NO: 311283 - RNA, 32 nt, Human
agacuggaggcugaaggagaacuucaauauca

SEQ ID NO: 311284 - RNA, 22 nt, Human
agacuggaggggaugacaguca

SEQ ID NO: 311285 - RNA, 32 nt, Human
agacuggcaaggaggcucaggugcuuccaucu

SEQ ID NO: 311286 - RNA, 32 nt, Human
agacuggcaugggggacauuccugacgucaag

SEQ ID NO: 311287 - RNA, 20 nt, Human
agacuggcaugguggcaugc

SEQ ID NO: 311288 - RNA, 32 nt, Human
agacuggccaacagaaugaaacccugucucua

SEQ ID NO: 311289 - RNA, 31 nt, Human
agacuggcccacguccccaugccugggugcu

SEQ ID NO: 311290 - RNA, 32 nt, Human
agacuggcccugccacugacccuccugucccu

SEQ ID NO: 311291 - RNA, 32 nt, Human
agacuggcccugccuaaccucuaccaucaaug

SEQ ID NO: 311292 - RNA, 32 nt, Human
agacuggcccuuccagagacagugccaaccag

SEQ ID NO: 311293 - RNA, 32 nt, Human
agacuggccuuugacacauggacucugccuag

SEQ ID NO: 311294 - RNA, 32 nt, Human
agacuggcgauacuacaaaggucuccagggcc

SEQ ID NO: 311295 - RNA, 32 nt, Human
agacuggcuacuguauguaauguauuuaugua

SEQ ID NO: 311296 - RNA, 32 nt, Human
agacuggcucuggccucagguggggcgcagga

SEQ ID NO: 311297 - RNA, 32 nt, Human
agacuggcuugggcuccaggagggaggcuggg

SEQ ID NO: 311298 - RNA, 20 nt, Human
agacugggacagcccaggaa

SEQ ID NO: 311299 - RNA, 32 nt, Human
agacugggagccacuugaggcuaucauuucag

SEQ ID NO: 311300 - RNA, 32 nt, Human
agacugggagccugaucccaagaggcugcuga

SEQ ID NO: 311301 - RNA, 26 nt, Human
agacugggaggcagagguugcaguga

SEQ ID NO: 311302 - RNA, 32 nt, Human
agacugggaggcagagguugcagugaaccgag

SEQ ID NO: 311303 - RNA, 32 nt, Human
agacugggauucaccacucagaaugggggucc

SEQ ID NO: 311304 - RNA, 32 nt, Human
agacugggcauggugacucaugccuguuaucc

SEQ ID NO: 311305 - RNA, 32 nt, Human
agacugggccacugcacuccagccuggaugac

SEQ ID NO: 311306 - RNA, 32 nt, Human
agacugggcccaugaacacagagagggccuaa

SEQ ID NO: 311307 - RNA, 32 nt, Human
agacugggcuagggagaaugcagagagguuuc

SEQ ID NO: 311308 - RNA, 32 nt, Human
agacugggcugcaggccccaggaagacuuucc

SEQ ID NO: 311309 - RNA, 32 nt, Human
agacugggcuguaguuagcuuuucaucccuaa

SEQ ID NO: 311310 - RNA, 32 nt, Human
agacugggcuuccaauggggaggaggaaagau

SEQ ID NO: 311311 - RNA, 32 nt, Human
agacuggggaaauggacgccuggagaacggaa

SEQ ID NO: 311312 - RNA, 32 nt, Human
agacuggggagcuucacacaacagaaacugcc

SEQ ID NO: 311313 - RNA, 32 nt, Human
agacuggggccagccacacuacucucuaggcc

SEQ ID NO: 311314 - RNA, 32 nt, Human
agacuggggcugucaacgcugccccuuguccu

SEQ ID NO: 311315 - RNA, 20 nt, Human
agacugggggacuccgggaa

SEQ ID NO: 311316 - RNA, 22 nt, Human
agacugggguuucuccauguug

SEQ ID NO: 311317 - RNA, 21 nt, Human
agacuggguagaaaccccagg

SEQ ID NO: 311318 - RNA, 32 nt, Human
agacugggugacagagugagacuccaucucaa

SEQ ID NO: 311319 - RNA, 32 nt, Human
agacuggguuccaaucucaccccaccacauac

SEQ ID NO: 311320 - RNA, 21 nt, Human
agacuggguuucaccacguug

SEQ ID NO: 311321 - RNA, 25 nt, Human
agacuggguuucaccacguuggcca

SEQ ID NO: 311322 - RNA, 19 nt, Human
agacuggguuucaccaugu

SEQ ID NO: 311323 - RNA, 21 nt, Human
agacuggguuucaccauguug

SEQ ID NO: 311324 - RNA, 25 nt, Human
agacuggguuucaccauguugguca

SEQ ID NO: 311325 - RNA, 20 nt, Human
agacuggguuucaccguguu

SEQ ID NO: 311326 - RNA, 32 nt, Human
agacugguagcggggagggggcuuccagguca

SEQ ID NO: 311327 - RNA, 23 nt, Human
agacuggucucaaacuccuaacc

SEQ ID NO: 311328 - RNA, 23 nt, Human
agacuggucucaaacuccugacc

SEQ ID NO: 311329 - RNA, 32 nt, Human
agacuggucucaaacuccugaccucagaugau

SEQ ID NO: 311330 - RNA, 32 nt, Human
agacuggucucaaacuccugaccucaggcgau

SEQ ID NO: 311331 - RNA, 23 nt, Human
agacuggucucaaacuccuggcc

SEQ ID NO: 311332 - RNA, 32 nt, Human
agacuggucucaaacuccuggccucaagcaau

SEQ ID NO: 311333 - RNA, 32 nt, Human
agacuggucucaaacuccuggccucgagucau

SEQ ID NO: 311334 - RNA, 32 nt, Human
agacuggucucaaacuccugggcucaagcgau

SEQ ID NO: 311335 - RNA, 32 nt, Human
agacuggucucaaacuucugaccucaagugau

SEQ ID NO: 311336 - RNA, 32 nt, Human
agacuggucuccaacuccugaccucagauggu

SEQ ID NO: 311337 - RNA, 32 nt, Human
agacuggucucgaacuccugaccucaagugau

SEQ ID NO: 311338 - RNA, 32 nt, Human
agacuggucucgaacuccugaccucaggugau

SEQ ID NO: 311339 - RNA, 32 nt, Human
agacuggucucgaacuccugaccuugugaucc

SEQ ID NO: 311340 - RNA, 32 nt, Human
agacuggucucgaacuccuggccucaagcacu

SEQ ID NO: 311341 - RNA, 32 nt, Human
agacuggucucgaacuccuggccucaagccac

SEQ ID NO: 311342 - RNA, 32 nt, Human
agacuggucucgaacuccuggccucaagugau

SEQ ID NO: 311343 - RNA, 32 nt, Human
agacuggucucgaacuccuggcuacaagugau

SEQ ID NO: 311344 - RNA, 32 nt, Human
agacuggucucgaacuccugggcucaaacagu

SEQ ID NO: 311345 - RNA, 32 nt, Human
agacuggucucgaacucuuggccucaggugau

SEQ ID NO: 311346 - RNA, 32 nt, Human
agacuggucuucauccugccucaugacuccca

SEQ ID NO: 311347 - RNA, 32 nt, Human
agacuggucuucuacacuaagacaccaugaag

SEQ ID NO: 311348 - RNA, 32 nt, Human
agacuggucuugaacucccgaccucagguaau

SEQ ID NO: 311349 - RNA, 32 nt, Human
agacuggucuugaacuccuagguugaagggau

SEQ ID NO: 311350 - RNA, 32 nt, Human
agacuggucuugaacuccugaccucaagcaau

SEQ ID NO: 311351 - RNA, 32 nt, Human
agacuggucuugaacuccugaccucgugauac

SEQ ID NO: 311352 - RNA, 32 nt, Human
agacuggucuugaacuccugagcuuaagcaau

SEQ ID NO: 311353 - RNA, 32 nt, Human
agacuggucuugaacuccuggacucaagggau

SEQ ID NO: 311354 - RNA, 32 nt, Human
agacuggucuugaacuccugggcucaagcgau

SEQ ID NO: 311355 - RNA, 32 nt, Human
agacuggucuugaacuccugggcucaagugau

SEQ ID NO: 311356 - RNA, 32 nt, Human
agacuggucuugaacucuugaccucaggugau

SEQ ID NO: 311357 - RNA, 32 nt, Human
agacuggucuuggacuccugaccucgugaucc

SEQ ID NO: 311358 - RNA, 32 nt, Human
agacuggugaauugggggaaauagaaggaacu

SEQ ID NO: 311359 - RNA, 32 nt, Human
agacugguggacaucugacugugggaugugcu

SEQ ID NO: 311360 - RNA, 32 nt, Human
agacuggugggaucauaggagccuucugaaug

SEQ ID NO: 311361 - RNA, 24 nt, Human
agacugguuaaugacaacgaugca

SEQ ID NO: 311362 - RNA, 24 nt, Human
agacugguuaaugauaacaaugca

SEQ ID NO: 311363 - RNA, 24 nt, Human
agacugguuaaugauaauaaugca

SEQ ID NO: 311364 - RNA, 20 nt, Human
agacugguuagugaugcagu

SEQ ID NO: 311365 - RNA, 26 nt, Human
agacugguugcuuucuaugacaguca

SEQ ID NO: 311366 - RNA, 23 nt, Human
agacugguuggaagcugacugca

SEQ ID NO: 311367 - RNA, 20 nt, Human
agacugguuucuccauguug

SEQ ID NO: 311368 - RNA, 24 nt, Human
agacugguuucuccauguugguca

SEQ ID NO: 311369 - RNA, 32 nt, Human
agacugguuuugaacuccuggccucaggugau

SEQ ID NO: 311370 - RNA, 32 nt, Human
agacuguacacccaagaaagcaaaauggaaua

SEQ ID NO: 311371 - RNA, 32 nt, Human
agacuguaugugugugccuugcacacacaccc

SEQ ID NO: 311372 - RNA, 32 nt, Human
agacugucacugcacauggaccucugggaaga

SEQ ID NO: 311373 - RNA, 32 nt, Human
agacugucagcuuucagucucuuuugauggac

SEQ ID NO: 311374 - RNA, 32 nt, Human
agacugucauucuuaguuugcugccagggcuu

SEQ ID NO: 311375 - RNA, 32 nt, Human
agacuguccagccauaaaauguuaccaccuua

SEQ ID NO: 311376 - RNA, 32 nt, Human
agacuguccaggacuguucccaggaagaagca

SEQ ID NO: 311377 - RNA, 32 nt, Human
agacuguccaguucuccuccacaucucccauc

SEQ ID NO: 311378 - RNA, 32 nt, Human
agacuguccgaaggagggagaggaugggugcc

SEQ ID NO: 311379 - RNA, 19 nt, Human
agacugucucacuauguug

SEQ ID NO: 311380 - RNA, 32 nt, Human
agacugucucacuauguugcccaagcuggucu

SEQ ID NO: 311381 - RNA, 25 nt, Human
agacugucucacuuuguagucacuu

SEQ ID NO: 311382 - RNA, 18 nt, Human
agacugucuguauuauua

SEQ ID NO: 311383 - RNA, 32 nt, Human
agacugugaugacugccagcacagggcaucuc

SEQ ID NO: 311384 - RNA, 32 nt, Human
agacugugauuuuugaacuuccuugccuuucu

SEQ ID NO: 311385 - RNA, 32 nt, Human
agacugugccacugcacuccagccugggcaac

SEQ ID NO: 311386 - RNA, 32 nt, Human
agacugugccacugcacuccagccugggugac

SEQ ID NO: 311387 - RNA, 32 nt, Human
agacugugccacugcaguccagccugggugac

SEQ ID NO: 311388 - RNA, 32 nt, Human
agacugugccauugcacuccagucggguuaac

SEQ ID NO: 311389 - RNA, 32 nt, Human
agacugugcuacugcacuccagccugggcaac

SEQ ID NO: 311390 - RNA, 32 nt, Human
agacuguggaaaugccaaaccaagcaaauuag

SEQ ID NO: 311391 - RNA, 32 nt, Human
agacuguggagcaacuggaacucucauucccu

SEQ ID NO: 311392 - RNA, 32 nt, Human
agacuguggcccagaccccagagcagagaaac

SEQ ID NO: 311393 - RNA, 32 nt, Human
agacuguggugaaacuccuuccaaggcugagg

SEQ ID NO: 311394 - RNA, 32 nt, Human
agacugugucauugcacuccagccugggcgac

SEQ ID NO: 311395 - RNA, 25 nt, Human
agacugugugggggccacccagggg

SEQ ID NO: 311396 - RNA, 32 nt, Human
agacuguuagucaucugugcuuucuuuaccaa

SEQ ID NO: 311397 - RNA, 31 nt, Human
agacuguucaggugauaaaagacugugaaag

SEQ ID NO: 311398 - RNA, 32 nt, Human
agacuguuccagcaugagguucuuagaaugac

SEQ ID NO: 311399 - RNA, 23 nt, Human
agacuguuuauuguaguaaugca

SEQ ID NO: 311400 - RNA, 21 nt, Human
agacuguuucuuggggucagc

SEQ ID NO: 311401 - RNA, 32 nt, Human
agacuguuuucagcucuuuuuauauuguacau

SEQ ID NO: 311402 - RNA, 32 nt, Human
agacuguuuugcaucacucuuugcuauugaag

SEQ ID NO: 311403 - RNA, 32 nt, Human
agacuuaaagaauagucuggugaaguuacucg

SEQ ID NO: 311404 - RNA, 32 nt, Human
agacuuaaagccucugcaccuggaacuguuua

SEQ ID NO: 311405 - RNA, 32 nt, Human
agacuuaaauaaauggagagauacacuguauu

SEQ ID NO: 311406 - RNA, 32 nt, Human
agacuuaacuggagagauaagggugagaacag

SEQ ID NO: 311407 - RNA, 32 nt, Human
agacuuaauucaauucagacaagaccaaaguu

SEQ ID NO: 311408 - RNA, 32 nt, Human
agacuuacaugguccucaggcauggacaggcu

SEQ ID NO: 311409 - RNA, 32 nt, Human
agacuuagcugggcuccagcagccuggcuccg

SEQ ID NO: 311410 - RNA, 32 nt, Human
agacuuaggaguuuuguuuagagcaguuaaca

SEQ ID NO: 311411 - RNA, 32 nt, Human
agacuuaguucuugcccuacuguaucugccuu

SEQ ID NO: 311412 - RNA, 32 nt, Human
agacuuauuuuggcggauuuccaagggauuua

SEQ ID NO: 311413 - RNA, 32 nt, Human
agacuucaauuuccaaagagaagaacuagcag

SEQ ID NO: 311414 - RNA, 32 nt, Human
agacuucaccacaggguggccaacaguggcau

SEQ ID NO: 311415 - RNA, 32 nt, Human
agacuucaccccacuuccucugggcccuggcu

SEQ ID NO: 311416 - RNA, 32 nt, Human
agacuucagaggaggaaggaacuguagauggg

SEQ ID NO: 311417 - RNA, 32 nt, Human
agacuucaggaucaaguuuaggggacaaguuu

SEQ ID NO: 311418 - RNA, 32 nt, Human
agacuucaggcagcaggaggcugugugucccu

SEQ ID NO: 311419 - RNA, 32 nt, Human
agacuucaucacaggcugcuuuuuaucaaaaa

SEQ ID NO: 311420 - RNA, 24 nt, Human
agacuucaucucaaaaggaaaaga

SEQ ID NO: 311421 - RNA, 32 nt, Human
agacuuccaaguagcugggauuacagacaugc

SEQ ID NO: 311422 - RNA, 32 nt, Human
agacuuccagccuccagaacugugggacauaa

SEQ ID NO: 311423 - RNA, 32 nt, Human
agacuuccaggacuuccagacagaguaccagg

SEQ ID NO: 311424 - RNA, 32 nt, Human
agacuuccaggccagcguggaggggcgagggg

SEQ ID NO: 311425 - RNA, 32 nt, Human
agacuuccagucuucagaauggugagaaauaa

SEQ ID NO: 311426 - RNA, 32 nt, Human
agacuucccaggcgcucaggccuggaucuugc

SEQ ID NO: 311427 - RNA, 32 nt, Human
agacuucccuauuucgcuuucuccucggcuca

SEQ ID NO: 311428 - RNA, 32 nt, Human
agacuuccgaguggcugggauuacaggcgccc

SEQ ID NO: 311429 - RNA, 32 nt, Human
agacuuccuccuuaguucugcagccgccaucu

SEQ ID NO: 311430 - RNA, 32 nt, Human
agacuuccugcaggagucagcguucaaucuug

SEQ ID NO: 311431 - RNA, 32 nt, Human
agacuuccuuugcuucucuuuuccuuguaucu

SEQ ID NO: 311432 - RNA, 32 nt, Human
agacuucuaaagagacuauuugaaguccaguu

SEQ ID NO: 311433 - RNA, 32 nt, Human
agacuucuagccaggcugggcugccagugcca

SEQ ID NO: 311434 - RNA, 32 nt, Human
agacuucuagguaaugcaagcaucuaagagag

SEQ ID NO: 311435 - RNA, 32 nt, Human
agacuucuccacccucuugcauaccuccaggg

SEQ ID NO: 311436 - RNA, 32 nt, Human
agacuucucccaggauccucucuuugggagcg

SEQ ID NO: 311437 - RNA, 32 nt, Human
agacuucuccugggaugacaauuugcugagag

SEQ ID NO: 311438 - RNA, 32 nt, Human
agacuucucucucccaucaccuugcccucauu

SEQ ID NO: 311439 - RNA, 32 nt, Human
agacuucucucuucugucacuguaagaucuuu

SEQ ID NO: 311440 - RNA, 32 nt, Human
agacuucugaagaacaaaucagccuggucacc

SEQ ID NO: 311441 - RNA, 32 nt, Human
agacuucugaugggcgaagcccaaagaugcca

SEQ ID NO: 311442 - RNA, 32 nt, Human
agacuucugcuacugugguuucccagggaggg

SEQ ID NO: 311443 - RNA, 32 nt, Human
agacuucuuagaaagauaauuucauucauuuc

SEQ ID NO: 311444 - RNA, 32 nt, Human
agacuucuuagaagggcuucagaaggaacuga

SEQ ID NO: 311445 - RNA, 32 nt, Human
agacuugaacagauaaauaaacuuaacgaucu

SEQ ID NO: 311446 - RNA, 32 nt, Human
agacuugagcuggccuuccuaucauggaugug

SEQ ID NO: 311447 - RNA, 32 nt, Human
agacuugagggaaguaacacagcaaucggaca

SEQ ID NO: 311448 - RNA, 32 nt, Human
agacuugagucugaggccccaggcccuaggau

SEQ ID NO: 311449 - RNA, 32 nt, Human
agacuugauaacgcccguggugccccaucccu

SEQ ID NO: 311450 - RNA, 32 nt, Human
agacuugauaagaggccaggagagugggaacu

SEQ ID NO: 311451 - RNA, 32 nt, Human
agacuugaugcuauguugauuaauauuuaaau

SEQ ID NO: 311452 - RNA, 32 nt, Human
agacuugcagaccuggcacucgcccuagagga

SEQ ID NO: 311453 - RNA, 32 nt, Human
agacuugcagcaucagagucuccugagucgag

SEQ ID NO: 311454 - RNA, 20 nt, Human
agacuugcaggaagaugaug

SEQ ID NO: 311455 - RNA, 32 nt, Human
agacuugcagugaacuguuuuugugccaagaa

SEQ ID NO: 311456 - RNA, 32 nt, Human
agacuugccauucgaucuaauggcagucccug

SEQ ID NO: 311457 - RNA, 32 nt, Human
agacuuggaagaggaggaggaggaggagaagg

SEQ ID NO: 311458 - RNA, 32 nt, Human
agacuuggagccagacagaggaagaggggacg

SEQ ID NO: 311459 - RNA, 32 nt, Human
agacuuggcaugaacugaacaggcuuucauuu

SEQ ID NO: 311460 - RNA, 32 nt, Human
agacuugggaaaauguuucuggagaggcuuuc

SEQ ID NO: 311461 - RNA, 32 nt, Human
agacuugggaacgagcccugacguucucagcc

SEQ ID NO: 311462 - RNA, 32 nt, Human
agacuuggggaccagaggugacaguggaugac

SEQ ID NO: 311463 - RNA, 32 nt, Human
agacuugggggaaggggagauuauugcaaauu

SEQ ID NO: 311464 - RNA, 32 nt, Human
agacuuggugaccaaagaaggguguauucauu

SEQ ID NO: 311465 - RNA, 32 nt, Human
agacuuggugccugagcgcagcuccagggaag

SEQ ID NO: 311466 - RNA, 32 nt, Human
agacuuggugggcggggugggguggggaggga

SEQ ID NO: 311467 - RNA, 32 nt, Human
agacuugguguuuggugcuucagauacauuuu

SEQ ID NO: 311468 - RNA, 32 nt, Human
agacuuguaggcagcaacucacccucaagagg

SEQ ID NO: 311469 - RNA, 31 nt, Human
agacuugugcucaaggaaucggcuggggacu

SEQ ID NO: 311470 - RNA, 32 nt, Human
agacuugugcugcgugcggcuccggagcucug

SEQ ID NO: 311471 - RNA, 32 nt, Human
agacuugugggauggguaguaguuggagaucc

SEQ ID NO: 311472 - RNA, 32 nt, Human
agacuuguucacccuucauguccucaacucug

SEQ ID NO: 311473 - RNA, 32 nt, Human
agacuuuaccauuauuucagugcuaggcauua

SEQ ID NO: 311474 - RNA, 32 nt, Human
agacuuuacuaaaaauacaaaaauuagucagg

SEQ ID NO: 311475 - RNA, 32 nt, Human
agacuuuaucaggaugaacccaggacugcuuc

SEQ ID NO: 311476 - RNA, 32 nt, Human
agacuuucauuauuucucaucuggauuaccag

SEQ ID NO: 311477 - RNA, 32 nt, Human
agacuuucuaauucauuacuucauuccagaca

SEQ ID NO: 311478 - RNA, 32 nt, Human
agacuuucuccuggccccugccugcuggagau

SEQ ID NO: 311479 - RNA, 31 nt, Human
agacuuucuucugugucacaugcagauucuc

SEQ ID NO: 311480 - RNA, 32 nt, Human
agacuuugaagcaggaauguugcauuugacgc

SEQ ID NO: 311481 - RNA, 32 nt, Human
agacuuugcagaaccuuuaauuggauguguua

SEQ ID NO: 311482 - RNA, 32 nt, Human
agacuuugcccaggguccugugccuggauggg

SEQ ID NO: 311483 - RNA, 23 nt, Human
agacuuugggaagccaccuucaa

SEQ ID NO: 311484 - RNA, 32 nt, Human
agacuuugucaggaugggagaggccgcaggug

SEQ ID NO: 311485 - RNA, 32 nt, Human
agacuuuguugaguucuuucugggacuuggag

SEQ ID NO: 311486 - RNA, 22 nt, Human
agacuuuuacuucucuuacacu

SEQ ID NO: 311487 - RNA, 22 nt, Human
agacuuuucauuucuuuuuauu

SEQ ID NO: 311488 - RNA, 23 nt, Human
agacuuuuccauuuuucuucacu

SEQ ID NO: 311489 - RNA, 32 nt, Human
agacuuuucccaagccuacuuuugccauugac

SEQ ID NO: 311490 - RNA, 23 nt, Human
agacuuuucuuguucucuucucu

SEQ ID NO: 311491 - RNA, 32 nt, Human
agacuuuugaagcacaaauuuauuggcauuua

SEQ ID NO: 311492 - RNA, 32 nt, Human
agacuuuugacaccucucaaguucagagcucu

SEQ ID NO: 311493 - RNA, 21 nt, Human
agacuuuuuaaucucuucauu

SEQ ID NO: 311494 - RNA, 23 nt, Human
agacuuuuuauuguuucuuaacu

SEQ ID NO: 311495 - RNA, 24 nt, Human
agacuuuuucacuucuuuguugcu

SEQ ID NO: 311496 - RNA, 24 nt, Human
agacuuuuucuauuucuuuucacu

SEQ ID NO: 311497 - RNA, 21 nt, Human
agacuuuuucugagccuucau

SEQ ID NO: 311498 - RNA, 32 nt, Human
agacuuuuugccugggcuaaaucugauccuca

SEQ ID NO: 311499 - RNA, 32 nt, Human
agacuuuuuguauucagcuccaguuagucaga

SEQ ID NO: 311500 - RNA, 22 nt, Human
agagaaaaagaaaaauagaaga

SEQ ID NO: 311501 - RNA, 19 nt, Human
agagaaaaagaaaaaucag

SEQ ID NO: 311502 - RNA, 20 nt, Human
agagaaaaagaaagaauuag

SEQ ID NO: 311503 - RNA, 23 nt, Human
agagaaaaagaaagauacauaga

SEQ ID NO: 311504 - RNA, 23 nt, Human
agagaaaaagaagagggcucagg

SEQ ID NO: 311505 - RNA, 24 nt, Human
agagaaaaagaaggauugaucaga

SEQ ID NO: 311506 - RNA, 32 nt, Human
agagaaaaccugcuguaaagccaugguagugu

SEQ ID NO: 311507 - RNA, 32 nt, Human
agagaaaacuauucacaagauaaauuccaagu

SEQ ID NO: 311508 - RNA, 31 nt, Human
agagaaaagagaccauguuuauuuggguagg

SEQ ID NO: 311509 - RNA, 18 nt, Human
agagaaaagagagacaag

SEQ ID NO: 311510 - RNA, 32 nt, Human
agagaaaagagcgacaaggaaaaguuaggacu

SEQ ID NO: 311511 - RNA, 32 nt, Human
agagaaaagcaggccuuugcagauaugaugga

SEQ ID NO: 311512 - RNA, 32 nt, Human
agagaaaagcagggcuggggagaaugagaugg

SEQ ID NO: 311513 - RNA, 32 nt, Human
agagaaaagcaguauagacuccaccuuccagg

SEQ ID NO: 311514 - RNA, 32 nt, Human
agagaaaagcuccuaaagugaccuuccgggug

SEQ ID NO: 311515 - RNA, 26 nt, Human
agagaaaaggccggaaagagggagag

SEQ ID NO: 311516 - RNA, 32 nt, Human
agagaaaagggaaggagcaggaggaggaacag

SEQ ID NO: 311517 - RNA, 32 nt, Human
agagaaaaguuugaggcauuaaaagaagaaaa

SEQ ID NO: 311518 - RNA, 32 nt, Human
agagaaaauacagcuucucccacccacaacgu

SEQ ID NO: 311519 - RNA, 32 nt, Human
agagaaaaucaugcucugguaugacagacuau

SEQ ID NO: 311520 - RNA, 32 nt, Human
agagaaaaugagaaaggacagagccagcggcu

SEQ ID NO: 311521 - RNA, 32 nt, Human
agagaaaaugagugaauauucuucucacuuuu

SEQ ID NO: 311522 - RNA, 32 nt, Human
agagaaacagagacagaaagaaagagacagac

SEQ ID NO: 311523 - RNA, 32 nt, Human
agagaaacagagacucagggagagggagacaa

SEQ ID NO: 311524 - RNA, 32 nt, Human
agagaaacagcuccucgccucuucccaacaac

SEQ ID NO: 311525 - RNA, 32 nt, Human
agagaaacauaaaaaggaugggguaacaguua

SEQ ID NO: 311526 - RNA, 32 nt, Human
agagaaaccagaaggaggacuuauauuggcua

SEQ ID NO: 311527 - RNA, 32 nt, Human
agagaaaccauacaaaugugaagaaugugaca

SEQ ID NO: 311528 - RNA, 32 nt, Human
agagaaaccauacaaaugugaagaauguggaa

SEQ ID NO: 311529 - RNA, 32 nt, Human
agagaaaccaugcaauuuaacacuucaguuaa

SEQ ID NO: 311530 - RNA, 32 nt, Human
agagaaacccuacaaaugcgaagaaugugaua

SEQ ID NO: 311531 - RNA, 32 nt, Human
agagaaacccuacaaaugugaaaaaugcggcc

SEQ ID NO: 311532 - RNA, 32 nt, Human
agagaaacccuacaaaugugaaaaauguggca

SEQ ID NO: 311533 - RNA, 32 nt, Human
agagaaacccuacaaaugugaagaaugugaca

SEQ ID NO: 311534 - RNA, 32 nt, Human
agagaaacccuacaaaugugaagaauguggca

SEQ ID NO: 311535 - RNA, 32 nt, Human
agagaaacccuacaaaugugaagaauguggua

SEQ ID NO: 311536 - RNA, 32 nt, Human
agagaaaccguacaaaugugaagaaugugaga

SEQ ID NO: 311537 - RNA, 32 nt, Human
agagaaaccuuacaaaugugaagaaugugaca

SEQ ID NO: 311538 - RNA, 32 nt, Human
agagaaaccuuacaaaugugaagaaugugaua

SEQ ID NO: 311539 - RNA, 32 nt, Human
agagaaaccuuacaaaugugaagaaugugaug

SEQ ID NO: 311540 - RNA, 32 nt, Human
agagaaaccuuacaaaugugaagaauguggca

SEQ ID NO: 311541 - RNA, 32 nt, Human
agagaaacggggagagaaagaaacgauucuaa

SEQ ID NO: 311542 - RNA, 32 nt, Human
agagaaacuacaaaugugaagaauguguuaaa

SEQ ID NO: 311543 - RNA, 32 nt, Human
agagaaacuacccauuccagaaccuccucucu

SEQ ID NO: 311544 - RNA, 32 nt, Human
agagaaacucacacaaccaucugccuggaaga

SEQ ID NO: 311545 - RNA, 32 nt, Human
agagaaacuuggccugcugugcagugggccuu

SEQ ID NO: 311546 - RNA, 32 nt, Human
agagaaagaaagaaagaaagaaagggaaagau

SEQ ID NO: 311547 - RNA, 18 nt, Human
agagaaagaauugaucag

SEQ ID NO: 311548 - RNA, 32 nt, Human
agagaaagagaaagagaaagacaaucaagcag

SEQ ID NO: 311549 - RNA, 32 nt, Human
agagaaagagaaggaaggaaggagaaagagaa

SEQ ID NO: 311550 - RNA, 32 nt, Human
agagaaagagaaggauccccaaggaagaaaaa

SEQ ID NO: 311551 - RNA, 24 nt, Human
agagaaagagacgggagagaggag

SEQ ID NO: 311552 - RNA, 32 nt, Human
agagaaagaggaaaagggaagggggaaacccc

SEQ ID NO: 311553 - RNA, 32 nt, Human
agagaaagaggaagagugggugggcuggaaga

SEQ ID NO: 311554 - RNA, 32 nt, Human
agagaaagaggaggagaauuaagaagaggaug

SEQ ID NO: 311555 - RNA, 32 nt, Human
agagaaagcaagaaacuauaaugcacacucac

SEQ ID NO: 311556 - RNA, 32 nt, Human
agagaaagcaucccccagcucugacagggaga

SEQ ID NO: 311557 - RNA, 32 nt, Human
agagaaaggaaaaggcugcuccagguggggga

SEQ ID NO: 311558 - RNA, 32 nt, Human
agagaaaggaguuggggugagggccagagcug

SEQ ID NO: 311559 - RNA, 32 nt, Human
agagaaaggccuggaaggugauuucccgugug

SEQ ID NO: 311560 - RNA, 32 nt, Human
agagaaaggcuucuuauauccuuuucaauaga

SEQ ID NO: 311561 - RNA, 32 nt, Human
agagaaagggagggcagagggagaaugggaag

SEQ ID NO: 311562 - RNA, 32 nt, Human
agagaaaggggagcucuccagcaaagaagaaa

SEQ ID NO: 311563 - RNA, 32 nt, Human
agagaaagggucucacuauguugcccaggcug

SEQ ID NO: 311564 - RNA, 32 nt, Human
agagaaaggguuucaccauguugguuaggcug

SEQ ID NO: 311565 - RNA, 32 nt, Human
agagaaagguagaaauaaaaacuccuuaacuu

SEQ ID NO: 311566 - RNA, 21 nt, Human
agagaaaggugagaggaggag

SEQ ID NO: 311567 - RNA, 22 nt, Human
agagaaagugaaacugaucaga

SEQ ID NO: 311568 - RNA, 32 nt, Human
agagaaagugaggucuucucaggcucuuaaga

SEQ ID NO: 311569 - RNA, 32 nt, Human
agagaaaucagagcuucuaccccaccacccuc

SEQ ID NO: 311570 - RNA, 32 nt, Human
agagaaauccaggaaauucaccagaggcaaug

SEQ ID NO: 311571 - RNA, 21 nt, Human
agagaaaucuggaaccuucuu

SEQ ID NO: 311572 - RNA, 19 nt, Human
agagaaaugcaggaagcuc

SEQ ID NO: 311573 - RNA, 25 nt, Human
agagaaaugcauucccaccgaggcc

SEQ ID NO: 311574 - RNA, 32 nt, Human
agagaaauuacaaagcccgagcucuuucuuau

SEQ ID NO: 311575 - RNA, 32 nt, Human
agagaaauuacagauccgcagccccgggaugg

SEQ ID NO: 311576 - RNA, 32 nt, Human
agagaaauuauauuccuuacuucaugucaguu

SEQ ID NO: 311577 - RNA, 32 nt, Human
agagaaauuguacugcucuugccaauaaugug

SEQ ID NO: 311578 - RNA, 32 nt, Human
agagaacacaggcuuuugccacugugugaggu

SEQ ID NO: 311579 - RNA, 32 nt, Human
agagaacaccuagggaaggcagccuggcccug

SEQ ID NO: 311580 - RNA, 32 nt, Human
agagaacacuaagaggugaacauguaugagug

SEQ ID NO: 311581 - RNA, 32 nt, Human
agagaacagaaacaagagccccuaagucccag

SEQ ID NO: 311582 - RNA, 32 nt, Human
agagaacagcacucaagcuucuggccgcaugg

SEQ ID NO: 311583 - RNA, 32 nt, Human
agagaacagcaggucugugcagugucugaggg

SEQ ID NO: 311584 - RNA, 32 nt, Human
agagaacagcagugaaggcagcuggagacccu

SEQ ID NO: 311585 - RNA, 32 nt, Human
agagaacaggcaaccucauacacuaaugauau

SEQ ID NO: 311586 - RNA, 32 nt, Human
agagaacagggacuuugucugccuuguuuucu

SEQ ID NO: 311587 - RNA, 32 nt, Human
agagaacaguauacaguauccuuuguaagaua

SEQ ID NO: 311588 - RNA, 32 nt, Human
agagaacauauggcacaugaguuaagauugug

SEQ ID NO: 311589 - RNA, 32 nt, Human
agagaacauccuugcuuugagucaggcugugg

SEQ ID NO: 311590 - RNA, 32 nt, Human
agagaacaucuuccuucucuaccaucacuccu

SEQ ID NO: 311591 - RNA, 32 nt, Human
agagaacaucuucucagaaucaggucuaauua

SEQ ID NO: 311592 - RNA, 32 nt, Human
agagaaccagcccugcucacgccaugcccgcc

SEQ ID NO: 311593 - RNA, 32 nt, Human
agagaaccauuuauguacaccuccagugucua

SEQ ID NO: 311594 - RNA, 32 nt, Human
agagaacccacaaggcuuuucccacugcuuac

SEQ ID NO: 311595 - RNA, 32 nt, Human
agagaacccacgcacaugcacaccacaacaca

SEQ ID NO: 311596 - RNA, 32 nt, Human
agagaacccagaaauaaacccauauaaauaug

SEQ ID NO: 311597 - RNA, 32 nt, Human
agagaacccagaaauaaaggcauauaccuaca

SEQ ID NO: 311598 - RNA, 32 nt, Human
agagaacccucagcuucucucugccucuggag

SEQ ID NO: 311599 - RNA, 32 nt, Human
agagaaccgccaugaagagagaagggggugcc

SEQ ID NO: 311600 - RNA, 32 nt, Human
agagaaccgucuuuaccucagcuccuagggcc

SEQ ID NO: 311601 - RNA, 32 nt, Human
agagaaccuggagcuuccugaagaagcaaagc

SEQ ID NO: 311602 - RNA, 32 nt, Human
agagaaccuguucagauacaggccaguuucuu

SEQ ID NO: 311603 - RNA, 32 nt, Human
agagaacgguugcaaaacuggaaaagacaauu

SEQ ID NO: 311604 - RNA, 32 nt, Human
agagaacuccaaaauucuccugccucaacauc

SEQ ID NO: 311605 - RNA, 32 nt, Human
agagaacucccagagaagaaggagaucagaca

SEQ ID NO: 311606 - RNA, 22 nt, Human
agagaacucccccaccuguggu

SEQ ID NO: 311607 - RNA, 32 nt, Human
agagaacucucuuccuucuuuccaccgacagg

SEQ ID NO: 311608 - RNA, 32 nt, Human
agagaacucugccuugcccucgucccucgucc

SEQ ID NO: 311609 - RNA, 32 nt, Human
agagaagaaaaagaaaaagaagaagaaaggca

SEQ ID NO: 311610 - RNA, 32 nt, Human
agagaagaaaagaaaaaugaagaaaaguaauu

SEQ ID NO: 311611 - RNA, 32 nt, Human
agagaagaaagccaaggaggcagcaggggcca

SEQ ID NO: 311612 - RNA, 32 nt, Human
agagaagacagaaacgacaugagcacagcagg

SEQ ID NO: 311613 - RNA, 32 nt, Human
agagaagacaguggcaaaaugaagaaauuuuu

SEQ ID NO: 311614 - RNA, 32 nt, Human
agagaagacccgauaagugucacuggauguga

SEQ ID NO: 311615 - RNA, 32 nt, Human
agagaagacuguucugaacaccaguaccaacc

SEQ ID NO: 311616 - RNA, 32 nt, Human
agagaagagaccugggaaauuaaguuucuugc

SEQ ID NO: 311617 - RNA, 32 nt, Human
agagaagagagggagugaaggguggcaccaag

SEQ ID NO: 311618 - RNA, 32 nt, Human
agagaagagauucagacaggauuagguggcuu

SEQ ID NO: 311619 - RNA, 32 nt, Human
agagaagagcaguugggaagacaggcagcugg

SEQ ID NO: 311620 - RNA, 32 nt, Human
agagaagagccugcuggaccuggaccuugcug

SEQ ID NO: 311621 - RNA, 32 nt, Human
agagaagaggagaggacacagagacacacaga

SEQ ID NO: 311622 - RNA, 32 nt, Human
agagaagaggaugagugugaagggugguggcg

SEQ ID NO: 311623 - RNA, 32 nt, Human
agagaagagguuucaccauguuggccaggcug

SEQ ID NO: 311624 - RNA, 22 nt, Human
agagaagagucacaggaagcuc

SEQ ID NO: 311625 - RNA, 32 nt, Human
agagaagagucuguccucugaaccacuuuugc

SEQ ID NO: 311626 - RNA, 32 nt, Human
agagaagauacucggaggauuguuggaaugua

SEQ ID NO: 311627 - RNA, 32 nt, Human
agagaagaucacugaagaaacuucugcuuuaa

SEQ ID NO: 311628 - RNA, 32 nt, Human
agagaagcaacacacacgugcacagacauguu

SEQ ID NO: 311629 - RNA, 32 nt, Human
agagaagcacagaaccuggcauucacuggacu

SEQ ID NO: 311630 - RNA, 32 nt, Human
agagaagcagaacagcccagagccccaggugc

SEQ ID NO: 311631 - RNA, 32 nt, Human
agagaagcagaggagucacacuccacucaccu

SEQ ID NO: 311632 - RNA, 32 nt, Human
agagaagcaguuaguaacagcaggaugggugu

SEQ ID NO: 311633 - RNA, 32 nt, Human
agagaagcaguuuugcaccagccuuauuccug

SEQ ID NO: 311634 - RNA, 32 nt, Human
agagaagccaccuucaggccugggaaggaaga

SEQ ID NO: 311635 - RNA, 32 nt, Human
agagaagccagccacagaccccugggagcuuc

SEQ ID NO: 311636 - RNA, 32 nt, Human
agagaagccagccaggcugcacuugcagaaca

SEQ ID NO: 311637 - RNA, 32 nt, Human
agagaagccauggagaacagacuugaaaaguu

SEQ ID NO: 311638 - RNA, 32 nt, Human
agagaagcccagcucugggaacugaaucagga

SEQ ID NO: 311639 - RNA, 32 nt, Human
agagaagcccaggauggucggcugccugggga

SEQ ID NO: 311640 - RNA, 32 nt, Human
agagaagcccagggugggauguuagagggcau

SEQ ID NO: 311641 - RNA, 32 nt, Human
agagaagcccaggucaccugccaagaccaaga

SEQ ID NO: 311642 - RNA, 32 nt, Human
agagaagccccaagaaggagguuggggccagc

SEQ ID NO: 311643 - RNA, 32 nt, Human
agagaagccccagcuacaaccgguacucaagg

SEQ ID NO: 311644 - RNA, 32 nt, Human
agagaagcccuacaaaugugaaaaauguggca

SEQ ID NO: 311645 - RNA, 32 nt, Human
agagaagcccuacaaaugugaagaauguggca

SEQ ID NO: 311646 - RNA, 32 nt, Human
agagaagcccugggaaggagggguggggaacg

SEQ ID NO: 311647 - RNA, 32 nt, Human
agagaagccgggauggaaacuccaaacaccac

SEQ ID NO: 311648 - RNA, 32 nt, Human
agagaagccuuacaaaugugaagaaugugaaa

SEQ ID NO: 311649 - RNA, 32 nt, Human
agagaagccuuccuacacucagccucugucca

SEQ ID NO: 311650 - RNA, 32 nt, Human
agagaagcuaaagaagucuugaaaggagaaaa

SEQ ID NO: 311651 - RNA, 16 nt, Human
agagaagcuccagcuc

SEQ ID NO: 311652 - RNA, 32 nt, Human
agagaagcucugaggcacgucaugcaggucaa

SEQ ID NO: 311653 - RNA, 19 nt, Human
agagaagcugccccuuagc

SEQ ID NO: 311654 - RNA, 32 nt, Human
agagaagcugucagcagccuacccaggccccg

SEQ ID NO: 311655 - RNA, 32 nt, Human
agagaaggaaacaaaaugagggguggcaggga

SEQ ID NO: 311656 - RNA, 32 nt, Human
agagaaggaaacgaggaggaggaugucucacc

SEQ ID NO: 311657 - RNA, 32 nt, Human
agagaaggaagaggaaagcaaaggagucaggg

SEQ ID NO: 311658 - RNA, 32 nt, Human
agagaaggaaggggauaggcagcuuugacagg

SEQ ID NO: 311659 - RNA, 32 nt, Human
agagaaggaauagaguucuccagagccccaag

SEQ ID NO: 311660 - RNA, 32 nt, Human
agagaaggacagucagaggaguggccaccugu

SEQ ID NO: 311661 - RNA, 32 nt, Human
agagaaggaccaagcaaagccaugauauuucc

SEQ ID NO: 311662 - RNA, 32 nt, Human
agagaaggagaaaacugccuugguuggaaccu

SEQ ID NO: 311663 - RNA, 32 nt, Human
agagaaggaggaaccuuuuccuucugcagccc

SEQ ID NO: 311664 - RNA, 32 nt, Human
agagaaggaggcacuuuggccaggauggggag

SEQ ID NO: 311665 - RNA, 32 nt, Human
agagaaggaggcccguguugagcucagggaga

SEQ ID NO: 311666 - RNA, 32 nt, Human
agagaaggagguggaggcagccaagaaucuca

SEQ ID NO: 311667 - RNA, 32 nt, Human
agagaaggauguuuuggaugcauucuagaaca

SEQ ID NO: 311668 - RNA, 32 nt, Human
agagaaggccaaauuuccagcccagggaaguc

SEQ ID NO: 311669 - RNA, 32 nt, Human
agagaaggccaagcaaccuccacuucuucagc

SEQ ID NO: 311670 - RNA, 32 nt, Human
agagaaggcgacagaugccuccuggguuugga

SEQ ID NO: 311671 - RNA, 32 nt, Human
agagaaggcucugccagccccucgccugcagc

SEQ ID NO: 311672 - RNA, 31 nt, Human
agagaagggaaacugucuaggauucagcuga

SEQ ID NO: 311673 - RNA, 32 nt, Human
agagaagggaaaggcugcaugggggagcccca

SEQ ID NO: 311674 - RNA, 32 nt, Human
agagaagggauuucaccauguuggccgggcug

SEQ ID NO: 311675 - RNA, 32 nt, Human
agagaagggccaaggccgggugcagugguuca

SEQ ID NO: 311676 - RNA, 32 nt, Human
agagaagggcucagggcaccagcaaccaagcc

SEQ ID NO: 311677 - RNA, 32 nt, Human
agagaaggggucuugcucugucacccagucug

SEQ ID NO: 311678 - RNA, 32 nt, Human
agagaagggguuucaccacauuggccgggcug

SEQ ID NO: 311679 - RNA, 32 nt, Human
agagaagggugcgagaaacaucagggugcaga

SEQ ID NO: 311680 - RNA, 23 nt, Human
agagaagguugccauggcugcug

SEQ ID NO: 311681 - RNA, 32 nt, Human
agagaaguaaucuuguaaaaauguuuuguaaa

SEQ ID NO: 311682 - RNA, 32 nt, Human
agagaaguagagagagggccacacaacagaug

SEQ ID NO: 311683 - RNA, 32 nt, Human
agagaaguauaugauccaccaugcuaaugaca

SEQ ID NO: 311684 - RNA, 19 nt, Human
agagaagucaaaggaacuu

SEQ ID NO: 311685 - RNA, 19 nt, Human
agagaagucaagcagacuc

SEQ ID NO: 311686 - RNA, 19 nt, Human
agagaagucacccaaguuc

SEQ ID NO: 311687 - RNA, 32 nt, Human
agagaagucagagagacuagaugcuuucacua

SEQ ID NO: 311688 - RNA, 21 nt, Human
agagaagucagcuacuggcuc

SEQ ID NO: 311689 - RNA, 32 nt, Human
agagaagucccuggaguaacccaugugcgcag

SEQ ID NO: 311690 - RNA, 19 nt, Human
agagaagucgcuugagcuc

SEQ ID NO: 311691 - RNA, 20 nt, Human
agagaagucucgaaaggcuc

SEQ ID NO: 311692 - RNA, 32 nt, Human
agagaagucuucuaugaggaggugaugccaaa

SEQ ID NO: 311693 - RNA, 32 nt, Human
agagaagugaacauccagccccaaucauggua

SEQ ID NO: 311694 - RNA, 31 nt, Human
agagaagugauucucccuugacucuggcucc

SEQ ID NO: 311695 - RNA, 32 nt, Human
agagaagugcagcugcugcgacugugccagga

SEQ ID NO: 311696 - RNA, 20 nt, Human
agagaagugccagggaagcu

SEQ ID NO: 311697 - RNA, 32 nt, Human
agagaaguggccagagaggcccaggggacagc

SEQ ID NO: 311698 - RNA, 32 nt, Human
agagaagugggcaaccuggaauugggugccag

SEQ ID NO: 311699 - RNA, 22 nt, Human
agagaaguuuacaagaacgcuc

SEQ ID NO: 311700 - RNA, 32 nt, Human
agagaaguuugcugaggaaugccuucaagcac

SEQ ID NO: 311701 - RNA, 32 nt, Human
agagaauaaauuguuaaaaucugaugcauuuu

SEQ ID NO: 311702 - RNA, 32 nt, Human
agagaauagauaauuuguguguuugcaaugug

SEQ ID NO: 311703 - RNA, 32 nt, Human
agagaauauauuuuucccaucuguauuguucu

SEQ ID NO: 311704 - RNA, 32 nt, Human
agagaaucacagcagcagacugcucuggguca

SEQ ID NO: 311705 - RNA, 32 nt, Human
agagaaucacccuuccuggucuacagauggaa

SEQ ID NO: 311706 - RNA, 32 nt, Human
agagaaucacuugaggccaggaguucgagacc

SEQ ID NO: 311707 - RNA, 32 nt, Human
agagaaucaguaucccuggcccagggaggauu

SEQ ID NO: 311708 - RNA, 32 nt, Human
agagaauccagaaauucucauguaugugugcg

SEQ ID NO: 311709 - RNA, 32 nt, Human
agagaauccugccucuguagaccaacauccag

SEQ ID NO: 311710 - RNA, 32 nt, Human
agagaaucgcuugagccugggacauugaggcu

SEQ ID NO: 311711 - RNA, 32 nt, Human
agagaaucgcuugaggccaggaguuugaggcc

SEQ ID NO: 311712 - RNA, 32 nt, Human
agagaaucugugagagaaaguauuucaggaag

SEQ ID NO: 311713 - RNA, 32 nt, Human
agagaaugagcaccccucauccaucucagcau

SEQ ID NO: 311714 - RNA, 32 nt, Human
agagaaugaugacuguagaacauuugagcaag

SEQ ID NO: 311715 - RNA, 32 nt, Human
agagaaugcaauuuuaaaugcccacugguuuu

SEQ ID NO: 311716 - RNA, 32 nt, Human
agagaaugcuucccauagaaagcccgacaugg

SEQ ID NO: 311717 - RNA, 32 nt, Human
agagaauggaaaagccagggagguggaagauc

SEQ ID NO: 311718 - RNA, 32 nt, Human
agagaauggaaagugaaaagaacacaacagau

SEQ ID NO: 311719 - RNA, 32 nt, Human
agagaauggacucuggaaucugacgucugggu

SEQ ID NO: 311720 - RNA, 24 nt, Human
agagaaugggguccccugcacuga

SEQ ID NO: 311721 - RNA, 23 nt, Human
agagaauuaggacuuuuuucuua

SEQ ID NO: 311722 - RNA, 32 nt, Human
agagaauuccuugagucuaaggcacaggccca

SEQ ID NO: 311723 - RNA, 23 nt, Human
agagaauugccuccuggagccag

SEQ ID NO: 311724 - RNA, 32 nt, Human
agagaauuuauuuuguuucuugcccacacaga

SEQ ID NO: 311725 - RNA, 32 nt, Human
agagacaaaaggaaaucacugaggcuuucuga

SEQ ID NO: 311726 - RNA, 32 nt, Human
agagacaaaggaugccauuuuacauuuaggau

SEQ ID NO: 311727 - RNA, 32 nt, Human
agagacaaaggccauugcauugaaggaggugg

SEQ ID NO: 311728 - RNA, 32 nt, Human
agagacaacaggcugccugacucuccagagcc

SEQ ID NO: 311729 - RNA, 31 nt, Human
agagacaagaaaccuguuucaacuugaagac

SEQ ID NO: 311730 - RNA, 22 nt, Human
agagacaagaggagaaggagag

SEQ ID NO: 311731 - RNA, 32 nt, Human
agagacaagggcuccccauguugcccaggcug

SEQ ID NO: 311732 - RNA, 32 nt, Human
agagacaaggguucaccauguugcccaggcua

SEQ ID NO: 311733 - RNA, 32 nt, Human
agagacaagguccuuggcugggcaugguggcu

SEQ ID NO: 311734 - RNA, 32 nt, Human
agagacaaggucucacuauguugcccaggcug

SEQ ID NO: 311735 - RNA, 32 nt, Human
agagacaaggucuugcuauguugcccaggcua

SEQ ID NO: 311736 - RNA, 32 nt, Human
agagacaaggucuugcuauguugcccaggcug

SEQ ID NO: 311737 - RNA, 32 nt, Human
agagacaaggucuugcuauguuguccagacug

SEQ ID NO: 311738 - RNA, 32 nt, Human
agagacaagguuucaccauauuggccaggcug

SEQ ID NO: 311739 - RNA, 32 nt, Human
agagacaagguuucaccauguugaccaggcug

SEQ ID NO: 311740 - RNA, 32 nt, Human
agagacaagguuucaccauguuggucaggcug

SEQ ID NO: 311741 - RNA, 32 nt, Human
agagacaagguuucaccauguuguccaggcug

SEQ ID NO: 311742 - RNA, 32 nt, Human
agagacaagguuucaccggguuggccaggcug

SEQ ID NO: 311743 - RNA, 32 nt, Human
agagacaagguuucacuauguugcccaggcug

SEQ ID NO: 311744 - RNA, 32 nt, Human
agagacaagguuucacuauguuguccaggcug

SEQ ID NO: 311745 - RNA, 32 nt, Human
agagacaagguuucgccauguugccuaggcug

SEQ ID NO: 311746 - RNA, 32 nt, Human
agagacaagguuucgccauguuggccaggcug

SEQ ID NO: 311747 - RNA, 32 nt, Human
agagacaagguuuugccauguugcccagucag

SEQ ID NO: 311748 - RNA, 32 nt, Human
agagacaagguuuugcuguguugcccaagcug

SEQ ID NO: 311749 - RNA, 32 nt, Human
agagacaaugcucaguauucauucauacacag

SEQ ID NO: 311750 - RNA, 32 nt, Human
agagacaauuuggagucaagauuuuccauuug

SEQ ID NO: 311751 - RNA, 32 nt, Human
agagacacaaaugaagaagaacaaagagccug

SEQ ID NO: 311752 - RNA, 32 nt, Human
agagacacaacaaccuaccuuccagccuuaac

SEQ ID NO: 311753 - RNA, 32 nt, Human
agagacacaagugaaagacagagugaugcugu

SEQ ID NO: 311754 - RNA, 32 nt, Human
agagacacagaagugcuagaagccacuccuca

SEQ ID NO: 311755 - RNA, 32 nt, Human
agagacaccccucccuugccccuuuccugggc

SEQ ID NO: 311756 - RNA, 32 nt, Human
agagacaccgagacgcagagacacucaggagg

SEQ ID NO: 311757 - RNA, 32 nt, Human
agagacacgaggagcaaagcaagugaaggcac

SEQ ID NO: 311758 - RNA, 23 nt, Human
agagacacguaagaaggacuaua

SEQ ID NO: 311759 - RNA, 32 nt, Human
agagacacugauuuuuaaauaucaaaauuucc

SEQ ID NO: 311760 - RNA, 32 nt, Human
agagacacugccugcuucaccaggucuguucg

SEQ ID NO: 311761 - RNA, 32 nt, Human
agagacacuuuauuggaagugcaaucauaguu

SEQ ID NO: 311762 - RNA, 32 nt, Human
agagacagaagccacaggggaagcaaagcaaa

SEQ ID NO: 311763 - RNA, 32 nt, Human
agagacagagaaggagagggggagaucuugag

SEQ ID NO: 311764 - RNA, 32 nt, Human
agagacagagccaggacaggagugggggccag

SEQ ID NO: 311765 - RNA, 32 nt, Human
agagacagaggcaccccggacagagacgugaa

SEQ ID NO: 311766 - RNA, 32 nt, Human
agagacagagucucacucugucacccaggcug

SEQ ID NO: 311767 - RNA, 32 nt, Human
agagacagaguuucaccagguuggucaggcug

SEQ ID NO: 311768 - RNA, 32 nt, Human
agagacagaguuucaccauguuggccaggaug

SEQ ID NO: 311769 - RNA, 32 nt, Human
agagacagaguuucaccauguuggccaggcug

SEQ ID NO: 311770 - RNA, 32 nt, Human
agagacagaguuucgccauguuggccaggcug

SEQ ID NO: 311771 - RNA, 32 nt, Human
agagacagaguuucgucauguugcccaggcug

SEQ ID NO: 311772 - RNA, 32 nt, Human
agagacagauugaaagacaacacacacuauuu

SEQ ID NO: 311773 - RNA, 32 nt, Human
agagacagcagcugagugagacccuaagggag

SEQ ID NO: 311774 - RNA, 32 nt, Human
agagacagcauggggaaggagguccccuuccc

SEQ ID NO: 311775 - RNA, 32 nt, Human
agagacagcccacccuuguguccacugugacc

SEQ ID NO: 311776 - RNA, 32 nt, Human
agagacagcccccacaucccaccccaucaggu

SEQ ID NO: 311777 - RNA, 32 nt, Human
agagacagcccgacccagagaaacccagcaac

SEQ ID NO: 311778 - RNA, 18 nt, Human
agagacagccucugagga

SEQ ID NO: 311779 - RNA, 32 nt, Human
agagacagccuggguaugggcaagaaaugacu

SEQ ID NO: 311780 - RNA, 31 nt, Human
agagacagcuuccagcaccuucuucaguguu

SEQ ID NO: 311781 - RNA, 32 nt, Human
agagacaggacgugucucucuccacgucuucc

SEQ ID NO: 311782 - RNA, 32 nt, Human
agagacaggacuucaucuucaccaucuaccac

SEQ ID NO: 311783 - RNA, 32 nt, Human
agagacaggagagagagggagggagcgagagg

SEQ ID NO: 311784 - RNA, 32 nt, Human
agagacaggaucucacuauguugcccaggcug

SEQ ID NO: 311785 - RNA, 26 nt, Human
agagacaggaucuuaggccacaggga

SEQ ID NO: 311786 - RNA, 32 nt, Human
agagacaggauuucaccauguuggccaggcca

SEQ ID NO: 311787 - RNA, 32 nt, Human
agagacaggauuucaccauguuggccaggcug

SEQ ID NO: 311788 - RNA, 32 nt, Human
agagacaggauuucaucguguugcccaggcug

SEQ ID NO: 311789 - RNA, 32 nt, Human
agagacaggauuuuaccauguuggccaugcug

SEQ ID NO: 311790 - RNA, 32 nt, Human
agagacaggcagagaaggagagaggcagagag

SEQ ID NO: 311791 - RNA, 32 nt, Human
agagacaggcaggucgcuugagcucaggaguu

SEQ ID NO: 311792 - RNA, 32 nt, Human
agagacaggcucuugcuauguugcccaggcug

SEQ ID NO: 311793 - RNA, 32 nt, Human
agagacagggauucgccauguuggccaggcug

SEQ ID NO: 311794 - RNA, 32 nt, Human
agagacagggcuucaccauguuggcuaggagg

SEQ ID NO: 311795 - RNA, 32 nt, Human
agagacaggggaggggcgccgggagccgggcg

SEQ ID NO: 311796 - RNA, 32 nt, Human
agagacagggucgcacuauguugcccgggcug

SEQ ID NO: 311797 - RNA, 32 nt, Human
agagacagggucucaccaugucacccaggcuc

SEQ ID NO: 311798 - RNA, 32 nt, Human
agagacagggucucaccauguugcccagguug

SEQ ID NO: 311799 - RNA, 32 nt, Human
agagacagggucucaccauguuggccaggcug

SEQ ID NO: 311800 - RNA, 32 nt, Human
agagacagggucucacuauauugcucaggcug

SEQ ID NO: 311801 - RNA, 32 nt, Human
agagacagggucucacuauguugcccaggcug

SEQ ID NO: 311802 - RNA, 32 nt, Human
agagacagggucucacucugucacccaggcug

SEQ ID NO: 311803 - RNA, 32 nt, Human
agagacagggucucacucuguugcccagacug

SEQ ID NO: 311804 - RNA, 32 nt, Human
agagacagggucucacucuguugcccaggcug

SEQ ID NO: 311805 - RNA, 32 nt, Human
agagacagggucucacuguguugcccaggcug

SEQ ID NO: 311806 - RNA, 32 nt, Human
agagacagggucucacuuuguugcccacgcug

SEQ ID NO: 311807 - RNA, 32 nt, Human
agagacagggucucacuuuguugcccaugcug

SEQ ID NO: 311808 - RNA, 32 nt, Human
agagacagggucucgcaguguugcccaggcug

SEQ ID NO: 311809 - RNA, 32 nt, Human
agagacagggucucgccauguugcccaggcug

SEQ ID NO: 311810 - RNA, 32 nt, Human
agagacagggucucgcucugucacccaggcug

SEQ ID NO: 311811 - RNA, 32 nt, Human
agagacagggucuucccauguugcccaggcug

SEQ ID NO: 311812 - RNA, 32 nt, Human
agagacagggucuugcuauguugcccaggcug

SEQ ID NO: 311813 - RNA, 32 nt, Human
agagacagggucuugcuauguuggucaggcua

SEQ ID NO: 311814 - RNA, 32 nt, Human
agagacagggucuugcucugucacccagacug

SEQ ID NO: 311815 - RNA, 32 nt, Human
agagacagggucuugcucugucacccaggcug

SEQ ID NO: 311816 - RNA, 32 nt, Human
agagacagggucuugcucugucgcccgggcug

SEQ ID NO: 311817 - RNA, 32 nt, Human
agagacagggucuugcucugucgcucaggcug

SEQ ID NO: 311818 - RNA, 32 nt, Human
agagacagggucuugcucuguugcccaggcug

SEQ ID NO: 311819 - RNA, 32 nt, Human
agagacagggucuugcucuguuguccaggcug

SEQ ID NO: 311820 - RNA, 32 nt, Human
agagacagggucuugcuguguuacccaggcug

SEQ ID NO: 311821 - RNA, 32 nt, Human
agagacagggucuugcuucuguggcccaggcu

SEQ ID NO: 311822 - RNA, 32 nt, Human
agagacagggucuugguauguugcccagacug

SEQ ID NO: 311823 - RNA, 32 nt, Human
agagacagggugugggcaucuccaugccccua

SEQ ID NO: 311824 - RNA, 32 nt, Human
agagacaggguuucacaauguugaccaggcug

SEQ ID NO: 311825 - RNA, 32 nt, Human
agagacaggguuucaccacauuggccaggcug

SEQ ID NO: 311826 - RNA, 32 nt, Human
agagacaggguuucaccacguuggccaggaug

SEQ ID NO: 311827 - RNA, 32 nt, Human
agagacaggguuucaccauauuggccaggcug

SEQ ID NO: 311828 - RNA, 32 nt, Human
agagacaggguuucaccauauuggucaggcug

SEQ ID NO: 311829 - RNA, 32 nt, Human
agagacaggguuucaccauguuaccaccgcgc

SEQ ID NO: 311830 - RNA, 32 nt, Human
agagacaggguuucaccauguuagccacggug

SEQ ID NO: 311831 - RNA, 32 nt, Human
agagacaggguuucaccauguuagccaggaug

SEQ ID NO: 311832 - RNA, 32 nt, Human
agagacaggguuucaccauguuagccaggcug

SEQ ID NO: 311833 - RNA, 32 nt, Human
agagacaggguuucaccauguuagccgggaug

SEQ ID NO: 311834 - RNA, 32 nt, Human
agagacaggguuucaccauguugaccuggcug

SEQ ID NO: 311835 - RNA, 32 nt, Human
agagacaggguuucaccauguugcccaggcug

SEQ ID NO: 311836 - RNA, 32 nt, Human
agagacaggguuucaccauguugcccagucug

SEQ ID NO: 311837 - RNA, 32 nt, Human
agagacaggguuucaccauguugccuaggcug

SEQ ID NO: 311838 - RNA, 32 nt, Human
agagacaggguuucaccauguuggacaggcug

SEQ ID NO: 311839 - RNA, 32 nt, Human
agagacaggguuucaccauguuggccacacug

SEQ ID NO: 311840 - RNA, 32 nt, Human
agagacaggguuucaccauguuggccagccug

SEQ ID NO: 311841 - RNA, 32 nt, Human
agagacaggguuucaccauguuggccagcgug

SEQ ID NO: 311842 - RNA, 32 nt, Human
agagacaggguuucaccauguuggccaggaug

SEQ ID NO: 311843 - RNA, 32 nt, Human
agagacaggguuucaccauguuggccaggcag

SEQ ID NO: 311844 - RNA, 32 nt, Human
agagacaggguuucaccauguuggccaggcug

SEQ ID NO: 311845 - RNA, 32 nt, Human
agagacaggguuucaccauguuggccaguaug

SEQ ID NO: 311846 - RNA, 32 nt, Human
agagacaggguuucaccauguuggccagugug

SEQ ID NO: 311847 - RNA, 32 nt, Human
agagacaggguuucaccauguuggccgggaug

SEQ ID NO: 311848 - RNA, 32 nt, Human
agagacaggguuucaccauguuggccgggcug

SEQ ID NO: 311849 - RNA, 32 nt, Human
agagacaggguuucaccauguuggucaggcgg

SEQ ID NO: 311850 - RNA, 32 nt, Human
agagacaggguuucaccauguuggucaggcua

SEQ ID NO: 311851 - RNA, 32 nt, Human
agagacaggguuucaccauguuggucaggcuc

SEQ ID NO: 311852 - RNA, 32 nt, Human
agagacaggguuucaccauguuggucaggcug

SEQ ID NO: 311853 - RNA, 32 nt, Human
agagacaggguuucaccauguuggucauguug

SEQ ID NO: 311854 - RNA, 32 nt, Human
agagacaggguuucaccauguuggucgggcug

SEQ ID NO: 311855 - RNA, 32 nt, Human
agagacaggguuucaccauguugguuaggcug

SEQ ID NO: 311856 - RNA, 32 nt, Human
agagacaggguuucaccauguuguccaggcug

SEQ ID NO: 311857 - RNA, 32 nt, Human
agagacaggguuucaccauguuugccaggaua

SEQ ID NO: 311858 - RNA, 32 nt, Human
agagacaggguuucaccauuuuggccaggaug

SEQ ID NO: 311859 - RNA, 32 nt, Human
agagacaggguuucaccauuuuggccaggcua

SEQ ID NO: 311860 - RNA, 32 nt, Human
agagacaggguuucaccauuuuggccaggcug

SEQ ID NO: 311861 - RNA, 32 nt, Human
agagacaggguuucaccguguuaaccaggaug

SEQ ID NO: 311862 - RNA, 32 nt, Human
agagacaggguuucaccguguuggccaggaug

SEQ ID NO: 311863 - RNA, 32 nt, Human
agagacaggguuucaccguguuggccaggcug

SEQ ID NO: 311864 - RNA, 32 nt, Human
agagacaggguuucaccguguuggucaggcug

SEQ ID NO: 311865 - RNA, 32 nt, Human
agagacaggguuucacuaugcuggucaggcug

SEQ ID NO: 311866 - RNA, 32 nt, Human
agagacaggguuucacuauguugcccaggcug

SEQ ID NO: 311867 - RNA, 32 nt, Human
agagacaggguuucacuauguuggccaggcug

SEQ ID NO: 311868 - RNA, 32 nt, Human
agagacaggguuucacuguguugcccaggcug

SEQ ID NO: 311869 - RNA, 32 nt, Human
agagacaggguuucaucauguuggccaggaug

SEQ ID NO: 311870 - RNA, 32 nt, Human
agagacaggguuucaucauguuggccaggcua

SEQ ID NO: 311871 - RNA, 32 nt, Human
agagacaggguuucaucauguuggccaggcug

SEQ ID NO: 311872 - RNA, 32 nt, Human
agagacaggguuucaucauuguuggccaggcu

SEQ ID NO: 311873 - RNA, 32 nt, Human
agagacaggguuucauuauguuggccagacug

SEQ ID NO: 311874 - RNA, 32 nt, Human
agagacaggguuucgccauguugacgagacug

SEQ ID NO: 311875 - RNA, 32 nt, Human
agagacaggguuucgccauguugcacagguug

SEQ ID NO: 311876 - RNA, 32 nt, Human
agagacaggguuucgccauguugcccaggcug

SEQ ID NO: 311877 - RNA, 32 nt, Human
agagacaggguuucgccauguugcccagggug

SEQ ID NO: 311878 - RNA, 32 nt, Human
agagacaggguuucgccauguuggccagccug

SEQ ID NO: 311879 - RNA, 32 nt, Human
agagacaggguuucgccauguuggccaggcug

SEQ ID NO: 311880 - RNA, 32 nt, Human
agagacaggguuucgccauguuggcuaugcug

SEQ ID NO: 311881 - RNA, 32 nt, Human
agagacaggguuucuccauguugcccaaguug

SEQ ID NO: 311882 - RNA, 32 nt, Human
agagacaggguuucuccauguuggucaggcua

SEQ ID NO: 311883 - RNA, 32 nt, Human
agagacaggguuucuccauguuggucaggcug

SEQ ID NO: 311884 - RNA, 32 nt, Human
agagacaggguuucuccauguuggucagucug

SEQ ID NO: 311885 - RNA, 32 nt, Human
agagacaggguuucuccauguuggucgggcug

SEQ ID NO: 311886 - RNA, 32 nt, Human
agagacaggguuucuccauguugguuaggcug

SEQ ID NO: 311887 - RNA, 32 nt, Human
agagacaggguuuuaccauguuggccaggcug

SEQ ID NO: 311888 - RNA, 32 nt, Human
agagacaggguuuuaccauguuggucaggcug

SEQ ID NO: 311889 - RNA, 32 nt, Human
agagacaggguuuuaccauguuggucagguug

SEQ ID NO: 311890 - RNA, 32 nt, Human
agagacaggguuuugccauguugcccaggcug

SEQ ID NO: 311891 - RNA, 32 nt, Human
agagacaggguuuugccauguugcucaguccc

SEQ ID NO: 311892 - RNA, 32 nt, Human
agagacaggguuuugccauguuggccaggcug

SEQ ID NO: 311893 - RNA, 32 nt, Human
agagacaggguuuugccauguuguccaggcua

SEQ ID NO: 311894 - RNA, 32 nt, Human
agagacagguuagagggaaagaggcuugggaa

SEQ ID NO: 311895 - RNA, 32 nt, Human
agagacagguuuucaccauguuggccaggcug

SEQ ID NO: 311896 - RNA, 32 nt, Human
agagacaguaaaugguggcauuuuuagugaag

SEQ ID NO: 311897 - RNA, 32 nt, Human
agagacagugucuuucauuugaugagucuggg

SEQ ID NO: 311898 - RNA, 32 nt, Human
agagacaguguuuagccauguugcccaggcug

SEQ ID NO: 311899 - RNA, 32 nt, Human
agagacaguguuucaccauguugaccaggcug

SEQ ID NO: 311900 - RNA, 32 nt, Human
agagacaguguuucaccauguuggccaggcug

SEQ ID NO: 311901 - RNA, 32 nt, Human
agagacaguguuucgccauguuggccaggcug

SEQ ID NO: 311902 - RNA, 32 nt, Human
agagacaguucugggagugugaccuguaagcc

SEQ ID NO: 311903 - RNA, 32 nt, Human
agagacauagucuugcucuguuacccaugcug

SEQ ID NO: 311904 - RNA, 32 nt, Human
agagacaucccuugacuuuuguggccuggggg

SEQ ID NO: 311905 - RNA, 32 nt, Human
agagacaucucaucugcuguauuuuacuuagu

SEQ ID NO: 311906 - RNA, 32 nt, Human
agagacaucugacuucauuucccuucauuaac

SEQ ID NO: 311907 - RNA, 32 nt, Human
agagacaugauccugaaccagaaaaaguaaaa

SEQ ID NO: 311908 - RNA, 32 nt, Human
agagacaugcaaauuaaaacuacaaugagaca

SEQ ID NO: 311909 - RNA, 32 nt, Human
agagacaugcaggugagcccuuuugucaggcu

SEQ ID NO: 311910 - RNA, 32 nt, Human
agagacauggcgauaauucaugcugaagagga

SEQ ID NO: 311911 - RNA, 32 nt, Human
agagacaugggaucacggaagacugaagcaga

SEQ ID NO: 311912 - RNA, 32 nt, Human
agagacaugguuacuguguaauaaaagaaaaa

SEQ ID NO: 311913 - RNA, 32 nt, Human
agagacaugguuuugccauguuggccaggcug

SEQ ID NO: 311914 - RNA, 32 nt, Human
agagacaugucauauucaacagggcacaugac

SEQ ID NO: 311915 - RNA, 32 nt, Human
agagacauguccugggugacaugggaugugac

SEQ ID NO: 311916 - RNA, 32 nt, Human
agagacauucuccuugcagcuaccuccaugug

SEQ ID NO: 311917 - RNA, 32 nt, Human
agagacauucugcacacacacucacacacaca

SEQ ID NO: 311918 - RNA, 32 nt, Human
agagacauuucuggauccaggccaggugaaga

SEQ ID NO: 311919 - RNA, 22 nt, Human
agagaccaacagaacacaggga

SEQ ID NO: 311920 - RNA, 32 nt, Human
agagaccacaccacugcacuccugccugggca

SEQ ID NO: 311921 - RNA, 32 nt, Human
agagaccacagcucuuguucccgcugauccug

SEQ ID NO: 311922 - RNA, 32 nt, Human
agagaccacguuucgccauguuguccagacug

SEQ ID NO: 311923 - RNA, 32 nt, Human
agagaccacugcacuccagccugggcaacaga

SEQ ID NO: 311924 - RNA, 32 nt, Human
agagaccagagagucccugccacuaguuuuca

SEQ ID NO: 311925 - RNA, 32 nt, Human
agagaccagccuggccagcauagugaaacccc

SEQ ID NO: 311926 - RNA, 32 nt, Human
agagaccaggcaacauacacacugcagaaggu

SEQ ID NO: 311927 - RNA, 18 nt, Human
agagaccaggccccaccg

SEQ ID NO: 311928 - RNA, 32 nt, Human
agagaccaggccugcuggguguguacauaguu

SEQ ID NO: 311929 - RNA, 32 nt, Human
agagaccagguuucaccauguuggccaggcug

SEQ ID NO: 311930 - RNA, 32 nt, Human
agagaccaucuaucaccuuuuccccaaagaag

SEQ ID NO: 311931 - RNA, 32 nt, Human
agagaccauggacuguggacucuuuaggucuc

SEQ ID NO: 311932 - RNA, 23 nt, Human
agagacccaaggcuccagaugga

SEQ ID NO: 311933 - RNA, 32 nt, Human
agagacccagaacuuccacagaaggaggaaaa

SEQ ID NO: 311934 - RNA, 32 nt, Human
agagacccagagagcuccaucaccccuucugc

SEQ ID NO: 311935 - RNA, 32 nt, Human
agagacccagcagauguaacucucauuguagc

SEQ ID NO: 311936 - RNA, 19 nt, Human
agagacccaugucaucuua

SEQ ID NO: 311937 - RNA, 32 nt, Human
agagaccccaggcagccugagcucuuggaugu

SEQ ID NO: 311938 - RNA, 32 nt, Human
agagacccggguagggacagggacagagagac

SEQ ID NO: 311939 - RNA, 32 nt, Human
agagacccgugccagugcagguccuugguaug

SEQ ID NO: 311940 - RNA, 32 nt, Human
agagacccguggauugcugugcccugcccucc

SEQ ID NO: 311941 - RNA, 32 nt, Human
agagacccuuuaaaccauugucagcaugcaca

SEQ ID NO: 311942 - RNA, 32 nt, Human
agagaccgagccacuguacuccagccuaggug

SEQ ID NO: 311943 - RNA, 32 nt, Human
agagaccgaguuucgccauguuggccaggcug

SEQ ID NO: 311944 - RNA, 32 nt, Human
agagaccgcgacgccccauccugggccgggcc

SEQ ID NO: 311945 - RNA, 32 nt, Human
agagaccgggcuucaccauguuggccaggcug

SEQ ID NO: 311946 - RNA, 32 nt, Human
agagaccgggucuugccaugcugcccaggcca

SEQ ID NO: 311947 - RNA, 32 nt, Human
agagaccggguuucaccauguuggccaggcug

SEQ ID NO: 311948 - RNA, 32 nt, Human
agagaccggguuuugccauguuggccaggcug

SEQ ID NO: 311949 - RNA, 32 nt, Human
agagaccgguuuucaccacguuggccaggaug

SEQ ID NO: 311950 - RNA, 32 nt, Human
agagaccguaagagaagagagacaaagagaua

SEQ ID NO: 311951 - RNA, 19 nt, Human
agagaccgugggccaggaa

SEQ ID NO: 311952 - RNA, 32 nt, Human
agagaccuaauguaacaaaacgauaauauuuc

SEQ ID NO: 311953 - RNA, 32 nt, Human
agagaccuagacacaguggacaauggcauccu

SEQ ID NO: 311954 - RNA, 32 nt, Human
agagaccuagucugccuucuuucacaagauaa

SEQ ID NO: 311955 - RNA, 32 nt, Human
agagaccucacagcauuguagggcgggguggu

SEQ ID NO: 311956 - RNA, 32 nt, Human
agagaccuccaggugguccuucuggggagaag

SEQ ID NO: 311957 - RNA, 32 nt, Human
agagaccugcagccccuguuucguggcagaca

SEQ ID NO: 311958 - RNA, 32 nt, Human
agagaccugcagcuuugguuuauaaguguuug

SEQ ID NO: 311959 - RNA, 32 nt, Human
agagaccugcuguuauucgcuuuuguucucca

SEQ ID NO: 311960 - RNA, 32 nt, Human
agagaccugggcucaucuugaaugauucucau

SEQ ID NO: 311961 - RNA, 32 nt, Human
agagaccugugcaagggcgccuuguaggagcc

SEQ ID NO: 311962 - RNA, 32 nt, Human
agagaccuuaguccggugugguggcucacacc

SEQ ID NO: 311963 - RNA, 32 nt, Human
agagaccuuauccugauccugaagacgagauu

SEQ ID NO: 311964 - RNA, 32 nt, Human
agagaccuucaguaggcucagaacagcugcgc

SEQ ID NO: 311965 - RNA, 32 nt, Human
agagaccuuccaccgggggcaggauuugugau

SEQ ID NO: 311966 - RNA, 32 nt, Human
agagacgaaguuucaccauguuggccaggcug

SEQ ID NO: 311967 - RNA, 32 nt, Human
agagacgagcccaggaggcugacuggcucaaa

SEQ ID NO: 311968 - RNA, 32 nt, Human
agagacgagccccugacacccagauucauugc

SEQ ID NO: 311969 - RNA, 32 nt, Human
agagacgaggcuucaccauguuggccaggcug

SEQ ID NO: 311970 - RNA, 32 nt, Human
agagacgaggucccaccauguugcccaggcug

SEQ ID NO: 311971 - RNA, 32 nt, Human
agagacgaggucucacuauguugcccaggcug

SEQ ID NO: 311972 - RNA, 32 nt, Human
agagacgaggucuugcuauguugcccaggcug

SEQ ID NO: 311973 - RNA, 32 nt, Human
agagacgaggucuugcucuguugcccaggcug

SEQ ID NO: 311974 - RNA, 32 nt, Human
agagacgaggucuugugauauugcccaggcug

SEQ ID NO: 311975 - RNA, 32 nt, Human
agagacgagguuucaccaucuuggccaggcug

SEQ ID NO: 311976 - RNA, 32 nt, Human
agagacgagguuucaccaugcuggccaagcug

SEQ ID NO: 311977 - RNA, 32 nt, Human
agagacgagguuucaccauguugaccaggcug

SEQ ID NO: 311978 - RNA, 32 nt, Human
agagacgagguuucaccauguugcccaggcug

SEQ ID NO: 311979 - RNA, 32 nt, Human
agagacgagguuucaccauguuggccaggcua

SEQ ID NO: 311980 - RNA, 32 nt, Human
agagacgagguuucaccauguuggccaggcug

SEQ ID NO: 311981 - RNA, 32 nt, Human
agagacgagguuucacuguguuggccaggaug

SEQ ID NO: 311982 - RNA, 32 nt, Human
agagacgagguuucaguuuguugcccaagcug

SEQ ID NO: 311983 - RNA, 32 nt, Human
agagacgagguuucgccauguugcccaggcug

SEQ ID NO: 311984 - RNA, 32 nt, Human
agagacgagguuuugccauguuggccaggcug

SEQ ID NO: 311985 - RNA, 32 nt, Human
agagacgagucaguaagcauucauucauuagu

SEQ ID NO: 311986 - RNA, 32 nt, Human
agagacgagugggagagcgagugcagcgaggg

SEQ ID NO: 311987 - RNA, 32 nt, Human
agagacgcaaucuccccucccucccauccccc

SEQ ID NO: 311988 - RNA, 32 nt, Human
agagacgcagagagacagagacguggagagac

SEQ ID NO: 311989 - RNA, 32 nt, Human
agagacgccguucuuccugucucagcuuggcc

SEQ ID NO: 311990 - RNA, 32 nt, Human
agagacgcugggauuaguggguggggaugcgg

SEQ ID NO: 311991 - RNA, 21 nt, Human
agagacggacuccuguucacc

SEQ ID NO: 311992 - RNA, 32 nt, Human
agagacggagaaagaaauggccaguuggcaag

SEQ ID NO: 311993 - RNA, 32 nt, Human
agagacggagaaagggaagaggcugggauggu

SEQ ID NO: 311994 - RNA, 32 nt, Human
agagacggagcaaguugccugaggucacagag

SEQ ID NO: 311995 - RNA, 32 nt, Human
agagacggagcccggcccugcgccuccgcacc

SEQ ID NO: 311996 - RNA, 32 nt, Human
agagacggaggugggaggauugcccgagucca

SEQ ID NO: 311997 - RNA, 32 nt, Human
agagacggagucccgcucugucacgcaggcug

SEQ ID NO: 311998 - RNA, 32 nt, Human
agagacggagucucccuauguugccuaggcug

SEQ ID NO: 311999 - RNA, 32 nt, Human
agagacggaguugcaccauguuggccaggcug

SEQ ID NO: 312000 - RNA, 32 nt, Human
agagacggaguuucaccauguuagccaggcug

SEQ ID NO: 312001 - RNA, 32 nt, Human
agagacggaguuucaccauguugaccaggcug

SEQ ID NO: 312002 - RNA, 32 nt, Human
agagacggaguuucaccauguuggccacgcug

SEQ ID NO: 312003 - RNA, 32 nt, Human
agagacggaguuucaccauguuggccaggcug

SEQ ID NO: 312004 - RNA, 32 nt, Human
agagacggaguuucaccauguugguuaggcug

SEQ ID NO: 312005 - RNA, 32 nt, Human
agagacggaguuucuccauguuggccagacug

SEQ ID NO: 312006 - RNA, 32 nt, Human
agagacggaguuuugccauguuggccaagcug

SEQ ID NO: 312007 - RNA, 32 nt, Human
agagacggcauuucaccauguuggccaggcug

SEQ ID NO: 312008 - RNA, 32 nt, Human
agagacggcguuucaccauguuggccaggcug

SEQ ID NO: 312009 - RNA, 32 nt, Human
agagacggcguuucaccauuuuggccggccuc

SEQ ID NO: 312010 - RNA, 32 nt, Human
agagacggcguuucaccguguuggccaggcuc

SEQ ID NO: 312011 - RNA, 32 nt, Human
agagacggcuggccaccaugcacggcuccugc

SEQ ID NO: 312012 - RNA, 19 nt, Human
agagacgggaagagggggg

SEQ ID NO: 312013 - RNA, 32 nt, Human
agagacgggaccaggaaggaacugaggaccaa

SEQ ID NO: 312014 - RNA, 32 nt, Human
agagacgggagagagaagaagaguggguuuga

SEQ ID NO: 312015 - RNA, 32 nt, Human
agagacgggauucuaccauguugcccaggcug

SEQ ID NO: 312016 - RNA, 32 nt, Human
agagacgggauuucaccauguuggccaggaug

SEQ ID NO: 312017 - RNA, 32 nt, Human
agagacgggauuucaccauguuggccaggcua

SEQ ID NO: 312018 - RNA, 32 nt, Human
agagacgggauuucaccauguuggucaggcug

SEQ ID NO: 312019 - RNA, 32 nt, Human
agagacgggauuucaucauguugcccaggcug

SEQ ID NO: 312020 - RNA, 32 nt, Human
agagacgggauuucuccauguugaucaggcug

SEQ ID NO: 312021 - RNA, 32 nt, Human
agagacgggcugggcuggcacucacccacgac

SEQ ID NO: 312022 - RNA, 32 nt, Human
agagacgggcuuucaccauguuagccaggaug

SEQ ID NO: 312023 - RNA, 32 nt, Human
agagacggggauucaccauguuggccaggcug

SEQ ID NO: 312024 - RNA, 32 nt, Human
agagacggggcuucaccaucuuggccaggcug

SEQ ID NO: 312025 - RNA, 32 nt, Human
agagacggggcuucuccauguuggucaggcug

SEQ ID NO: 312026 - RNA, 32 nt, Human
agagacggggcuuugccauguuggccaggcug

SEQ ID NO: 312027 - RNA, 32 nt, Human
agagacggggguuugccauguugcccagacug

SEQ ID NO: 312028 - RNA, 32 nt, Human
agagacgggguaucacuauauuggucaggcug

SEQ ID NO: 312029 - RNA, 32 nt, Human
agagacggggucucgcaacauugcccagacuu

SEQ ID NO: 312030 - RNA, 32 nt, Human
agagacggggucuugcuauguuguccaggcug

SEQ ID NO: 312031 - RNA, 32 nt, Human
agagacgggguuuaaccauguuggccaggaug

SEQ ID NO: 312032 - RNA, 32 nt, Human
agagacgggguuucaacauauuggccaggcug

SEQ ID NO: 312033 - RNA, 32 nt, Human
agagacgggguuucaacauguugaccaggaug

SEQ ID NO: 312034 - RNA, 32 nt, Human
agagacgggguuucaccacauugcucaggcug

SEQ ID NO: 312035 - RNA, 32 nt, Human
agagacgggguuucaccacauuggccaggcug

SEQ ID NO: 312036 - RNA, 32 nt, Human
agagacgggguuucaccacauuggucaggcug

SEQ ID NO: 312037 - RNA, 32 nt, Human
agagacgggguuucaccacguuggccaggaug

SEQ ID NO: 312038 - RNA, 32 nt, Human
agagacgggguuucaccacguuggccaggcug

SEQ ID NO: 312039 - RNA, 32 nt, Human
agagacgggguuucaccacguuggccgggcag

SEQ ID NO: 312040 - RNA, 32 nt, Human
agagacgggguuucaccagguuagccaggaug

SEQ ID NO: 312041 - RNA, 32 nt, Human
agagacgggguuucaccaguguuggccaggcu

SEQ ID NO: 312042 - RNA, 32 nt, Human
agagacgggguuucaccauacuggccaggcug

SEQ ID NO: 312043 - RNA, 32 nt, Human
agagacgggguuucaccauacuggccagguug

SEQ ID NO: 312044 - RNA, 32 nt, Human
agagacgggguuucaccauauuggccaagcug

SEQ ID NO: 312045 - RNA, 32 nt, Human
agagacgggguuucaccauauuggccaggcug

SEQ ID NO: 312046 - RNA, 32 nt, Human
agagacgggguuucaccaucuuggccaggcug

SEQ ID NO: 312047 - RNA, 32 nt, Human
agagacgggguuucaccaucuuggccagguug

SEQ ID NO: 312048 - RNA, 32 nt, Human
agagacgggguuucaccaugcaagcccagcug

SEQ ID NO: 312049 - RNA, 32 nt, Human
agagacgggguuucaccaugcuggccaggcug

SEQ ID NO: 312050 - RNA, 32 nt, Human
agagacgggguuucaccaugucggccaggcug

SEQ ID NO: 312051 - RNA, 32 nt, Human
agagacgggguuucaccauguuaccaggaugg

SEQ ID NO: 312052 - RNA, 32 nt, Human
agagacgggguuucaccauguuaccuagggug

SEQ ID NO: 312053 - RNA, 32 nt, Human
agagacgggguuucaccauguuagacaggaug

SEQ ID NO: 312054 - RNA, 32 nt, Human
agagacgggguuucaccauguuagccaagaug

SEQ ID NO: 312055 - RNA, 32 nt, Human
agagacgggguuucaccauguuagccaggaug

SEQ ID NO: 312056 - RNA, 32 nt, Human
agagacgggguuucaccauguuagccaggcua

SEQ ID NO: 312057 - RNA, 32 nt, Human
agagacgggguuucaccauguuagccaggcug

SEQ ID NO: 312058 - RNA, 32 nt, Human
agagacgggguuucaccauguuagcuaggaug

SEQ ID NO: 312059 - RNA, 32 nt, Human
agagacgggguuucaccauguuaggauagucu

SEQ ID NO: 312060 - RNA, 32 nt, Human
agagacgggguuucaccauguucgccaggaua

SEQ ID NO: 312061 - RNA, 32 nt, Human
agagacgggguuucaccauguugaccaggaug

SEQ ID NO: 312062 - RNA, 32 nt, Human
agagacgggguuucaccauguugaccaggcug

SEQ ID NO: 312063 - RNA, 32 nt, Human
agagacgggguuucaccauguugcccaggaug

SEQ ID NO: 312064 - RNA, 32 nt, Human
agagacgggguuucaccauguugcccaggcug

SEQ ID NO: 312065 - RNA, 32 nt, Human
agagacgggguuucaccauguugcccagguug

SEQ ID NO: 312066 - RNA, 32 nt, Human
agagacgggguuucaccauguugcucaggcug

SEQ ID NO: 312067 - RNA, 32 nt, Human
agagacgggguuucaccauguuggccaagaug

SEQ ID NO: 312068 - RNA, 32 nt, Human
agagacgggguuucaccauguuggccagacug

SEQ ID NO: 312069 - RNA, 32 nt, Human
agagacgggguuucaccauguuggccaggaug

SEQ ID NO: 312070 - RNA, 32 nt, Human
agagacgggguuucaccauguuggccaggcua

SEQ ID NO: 312071 - RNA, 32 nt, Human
agagacgggguuucaccauguuggccaggcug

SEQ ID NO: 312072 - RNA, 32 nt, Human
agagacgggguuucaccauguuggccgggaug

SEQ ID NO: 312073 - RNA, 32 nt, Human
agagacgggguuucaccauguuggcuaggaug

SEQ ID NO: 312074 - RNA, 32 nt, Human
agagacgggguuucaccauguuggcuaggcug

SEQ ID NO: 312075 - RNA, 32 nt, Human
agagacgggguuucaccauguugggcaggcua

SEQ ID NO: 312076 - RNA, 32 nt, Human
agagacgggguuucaccauguuggucaggaug

SEQ ID NO: 312077 - RNA, 32 nt, Human
agagacgggguuucaccauguuggucaggcug

SEQ ID NO: 312078 - RNA, 32 nt, Human
agagacgggguuucaccauguuggucagguug

SEQ ID NO: 312079 - RNA, 32 nt, Human
agagacgggguuucaccauguugucaggcugg

SEQ ID NO: 312080 - RNA, 32 nt, Human
agagacgggguuucaccauguuguccaggcua

SEQ ID NO: 312081 - RNA, 32 nt, Human
agagacgggguuucaccauuuugaccaggaug

SEQ ID NO: 312082 - RNA, 32 nt, Human
agagacgggguuucaccauuuuggccaggaug

SEQ ID NO: 312083 - RNA, 32 nt, Human
agagacgggguuucaccguauuaccaggaugu

SEQ ID NO: 312084 - RNA, 32 nt, Human
agagacgggguuucaccguauuagccaggaug

SEQ ID NO: 312085 - RNA, 32 nt, Human
agagacgggguuucaccguguuaaccaggaug

SEQ ID NO: 312086 - RNA, 32 nt, Human
agagacgggguuucaccguguuagccaagaug

SEQ ID NO: 312087 - RNA, 32 nt, Human
agagacgggguuucaccguguuagccaggaag

SEQ ID NO: 312088 - RNA, 32 nt, Human
agagacgggguuucaccguguuagccaggaua

SEQ ID NO: 312089 - RNA, 32 nt, Human
agagacgggguuucaccguguuagccaggaug

SEQ ID NO: 312090 - RNA, 32 nt, Human
agagacgggguuucaccguguuagccagggug

SEQ ID NO: 312091 - RNA, 32 nt, Human
agagacgggguuucaccguguuagccgggaug

SEQ ID NO: 312092 - RNA, 32 nt, Human
agagacgggguuucaccguguuagucaggaug

SEQ ID NO: 312093 - RNA, 32 nt, Human
agagacgggguuucaccguguugaccaggaug

SEQ ID NO: 312094 - RNA, 32 nt, Human
agagacgggguuucaccguguugcccaggcug

SEQ ID NO: 312095 - RNA, 32 nt, Human
agagacgggguuucaccguguuggccaggaug

SEQ ID NO: 312096 - RNA, 32 nt, Human
agagacgggguuucaccguguuggccaggcug

SEQ ID NO: 312097 - RNA, 32 nt, Human
agagacgggguuucaccguguuggccgggcug

SEQ ID NO: 312098 - RNA, 32 nt, Human
agagacgggguuucaccguguuggcuaggcug

SEQ ID NO: 312099 - RNA, 32 nt, Human
agagacgggguuucaccguguuguccaggaug

SEQ ID NO: 312100 - RNA, 32 nt, Human
agagacgggguuucaccucgauggccagguug

SEQ ID NO: 312101 - RNA, 32 nt, Human
agagacgggguuucaccuguuagccaggaugg

SEQ ID NO: 312102 - RNA, 32 nt, Human
agagacgggguuucaccuuguuagccaggaug

SEQ ID NO: 312103 - RNA, 32 nt, Human
agagacgggguuucaccuuguuggccaggaug

SEQ ID NO: 312104 - RNA, 32 nt, Human
agagacgggguuucacuauauuggccaggcug

SEQ ID NO: 312105 - RNA, 32 nt, Human
agagacgggguuucacuaugcuggccaggcuc

SEQ ID NO: 312106 - RNA, 32 nt, Human
agagacgggguuucacuauguuggccaggaua

SEQ ID NO: 312107 - RNA, 32 nt, Human
agagacgggguuucacuauguuggccaggcug

SEQ ID NO: 312108 - RNA, 32 nt, Human
agagacgggguuucacucugucacccaggcug

SEQ ID NO: 312109 - RNA, 32 nt, Human
agagacgggguuucacuguggucucaaucucc

SEQ ID NO: 312110 - RNA, 32 nt, Human
agagacgggguuucacuguguuagccaggaaa

SEQ ID NO: 312111 - RNA, 32 nt, Human
agagacgggguuucacuguguuagccaggacg

SEQ ID NO: 312112 - RNA, 32 nt, Human
agagacgggguuucacuguguuagccaggaug

SEQ ID NO: 312113 - RNA, 32 nt, Human
agagacgggguuucacuguguugcccaggcug

SEQ ID NO: 312114 - RNA, 32 nt, Human
agagacgggguuucacuguguuggccaggcug

SEQ ID NO: 312115 - RNA, 32 nt, Human
agagacgggguuucacuuuguuagccaggaug

SEQ ID NO: 312116 - RNA, 32 nt, Human
agagacgggguuucagcauauugaccaggcug

SEQ ID NO: 312117 - RNA, 32 nt, Human
agagacgggguuucagcauguuggcuaggccg

SEQ ID NO: 312118 - RNA, 32 nt, Human
agagacgggguuucaucauauuggucaggcug

SEQ ID NO: 312119 - RNA, 32 nt, Human
agagacgggguuucaucauguuggccaggaug

SEQ ID NO: 312120 - RNA, 32 nt, Human
agagacgggguuucaucauguuggccaggcua

SEQ ID NO: 312121 - RNA, 32 nt, Human
agagacgggguuucaucauguuggccaggcug

SEQ ID NO: 312122 - RNA, 32 nt, Human
agagacgggguuucaucguguuaaccaggaug

SEQ ID NO: 312123 - RNA, 32 nt, Human
agagacgggguuucaucguguuagccaggaug

SEQ ID NO: 312124 - RNA, 32 nt, Human
agagacgggguuuccccacguugaccaggcug

SEQ ID NO: 312125 - RNA, 32 nt, Human
agagacgggguuuccccauguuggucaggcug

SEQ ID NO: 312126 - RNA, 32 nt, Human
agagacgggguuuccccauguugguuaggcuc

SEQ ID NO: 312127 - RNA, 32 nt, Human
agagacgggguuuccccguguuagccaggaug

SEQ ID NO: 312128 - RNA, 32 nt, Human
agagacgggguuucgccaaguugaccagccca

SEQ ID NO: 312129 - RNA, 32 nt, Human
agagacgggguuucgccauguuacccagacug

SEQ ID NO: 312130 - RNA, 32 nt, Human
agagacgggguuucgccauguugcccaggcug

SEQ ID NO: 312131 - RNA, 32 nt, Human
agagacgggguuucgccauguugcccagguug

SEQ ID NO: 312132 - RNA, 32 nt, Human
agagacgggguuucgccauguuggccaggcua

SEQ ID NO: 312133 - RNA, 32 nt, Human
agagacgggguuucgccauguuggcuagccug

SEQ ID NO: 312134 - RNA, 32 nt, Human
agagacgggguuucgccauguuggucaggcug

SEQ ID NO: 312135 - RNA, 32 nt, Human
agagacgggguuucgccauguuguccgggcug

SEQ ID NO: 312136 - RNA, 32 nt, Human
agagacgggguuucgccauuuggccaggcugg

SEQ ID NO: 312137 - RNA, 32 nt, Human
agagacgggguuucgccauuuuggccaggcug

SEQ ID NO: 312138 - RNA, 32 nt, Human
agagacgggguuucgccguguuggccaggaug

SEQ ID NO: 312139 - RNA, 32 nt, Human
agagacgggguuucgcuauuuuggccgggcug

SEQ ID NO: 312140 - RNA, 32 nt, Human
agagacgggguuucgcuguucccaggcugguc

SEQ ID NO: 312141 - RNA, 32 nt, Human
agagacgggguuucggcauguuggccaggcca

SEQ ID NO: 312142 - RNA, 32 nt, Human
agagacgggguuucguccuguuacccaggcug

SEQ ID NO: 312143 - RNA, 32 nt, Human
agagacgggguuucuccacauuggucaggcug

SEQ ID NO: 312144 - RNA, 32 nt, Human
agagacgggguuucuccauguuagucaggcug

SEQ ID NO: 312145 - RNA, 32 nt, Human
agagacgggguuucuccauguuggucagacug

SEQ ID NO: 312146 - RNA, 32 nt, Human
agagacgggguuucuccauguuggucaggcug

SEQ ID NO: 312147 - RNA, 32 nt, Human
agagacgggguuucuccauguuggucuggcug

SEQ ID NO: 312148 - RNA, 32 nt, Human
agagacgggguuucuccauguugguuaggcug

SEQ ID NO: 312149 - RNA, 32 nt, Human
agagacgggguuucuccguguuggucaggcug

SEQ ID NO: 312150 - RNA, 32 nt, Human
agagacgggguuucuccuuguuggucaggcug

SEQ ID NO: 312151 - RNA, 32 nt, Human
agagacgggguuugaccauguuggucagggug

SEQ ID NO: 312152 - RNA, 32 nt, Human
agagacgggguuuuaccauguuggccagguug

SEQ ID NO: 312153 - RNA, 32 nt, Human
agagacgggguuuuacuauguugcccaggcag

SEQ ID NO: 312154 - RNA, 32 nt, Human
agagacgggguuuugccauguugcccaggcug

SEQ ID NO: 312155 - RNA, 32 nt, Human
agagacgggguuuugccauguugcccgggcug

SEQ ID NO: 312156 - RNA, 32 nt, Human
agagacgggguuuugccauguuggccaggccg

SEQ ID NO: 312157 - RNA, 32 nt, Human
agagacgggguuuugccauguuggccaggcug

SEQ ID NO: 312158 - RNA, 32 nt, Human
agagacgggguuuugccauguuggccaugcug

SEQ ID NO: 312159 - RNA, 32 nt, Human
agagacgggguuuugucucauugcccaggcug

SEQ ID NO: 312160 - RNA, 18 nt, Human
agagacgggucuuuggga

SEQ ID NO: 312161 - RNA, 32 nt, Human
agagacggguuuucaccauguugccccgguug

SEQ ID NO: 312162 - RNA, 32 nt, Human
agagacggguuuucgccauguugccucagcua

SEQ ID NO: 312163 - RNA, 32 nt, Human
agagacggucccggaagaaugggacucuguuc

SEQ ID NO: 312164 - RNA, 32 nt, Human
agagacggucuuuauugggucugcaccuccau

SEQ ID NO: 312165 - RNA, 32 nt, Human
agagacggugucuuguucugucacucaggcug

SEQ ID NO: 312166 - RNA, 32 nt, Human
agagacgguguuucaccauauuggccaggcug

SEQ ID NO: 312167 - RNA, 32 nt, Human
agagacgguguuucaccauguuggucaggcug

SEQ ID NO: 312168 - RNA, 32 nt, Human
agagacgguguuuugccauguuggccaggcug

SEQ ID NO: 312169 - RNA, 32 nt, Human
agagacguaaauuuaaggugugccugugucag

SEQ ID NO: 312170 - RNA, 32 nt, Human
agagacgugcugcuuagaaugugaacugagca

SEQ ID NO: 312171 - RNA, 32 nt, Human
agagacguggaaagacagggagagagacacgg

SEQ ID NO: 312172 - RNA, 32 nt, Human
agagacguggcgccccacccagucucauccgg

SEQ ID NO: 312173 - RNA, 32 nt, Human
agagacgugggagacagugaaaggcugucagg

SEQ ID NO: 312174 - RNA, 32 nt, Human
agagacgugguuucaccauguuggccagacug

SEQ ID NO: 312175 - RNA, 32 nt, Human
agagacuacaaacuccccaaaaccacuuaccc

SEQ ID NO: 312176 - RNA, 18 nt, Human
agagacuacagaagaaug

SEQ ID NO: 312177 - RNA, 32 nt, Human
agagacuacagauggauaauuggacuuaagcc

SEQ ID NO: 312178 - RNA, 32 nt, Human
agagacuacuacaaaauuggaaaaagauuggc

SEQ ID NO: 312179 - RNA, 32 nt, Human
agagacuagguuucaccauguuguccaggcuu

SEQ ID NO: 312180 - RNA, 32 nt, Human
agagacuaguacuacaaaaagggaccacauuu

SEQ ID NO: 312181 - RNA, 23 nt, Human
agagacuauaaagauuucacaaa

SEQ ID NO: 312182 - RNA, 32 nt, Human
agagacuaucagcggcagaucucuccagggaa

SEQ ID NO: 312183 - RNA, 32 nt, Human
agagacuaugcuguucacucugaugaccccag

SEQ ID NO: 312184 - RNA, 32 nt, Human
agagacucagcgcuccuccugugugacuggca

SEQ ID NO: 312185 - RNA, 32 nt, Human
agagacucaggcaggaggaucacuugagcuua

SEQ ID NO: 312186 - RNA, 21 nt, Human
agagacuccagaggccaggga

SEQ ID NO: 312187 - RNA, 32 nt, Human
agagacuccaucucaaaacaaaaacaaacaaa

SEQ ID NO: 312188 - RNA, 32 nt, Human
agagacucccaugccccacugcaggccugggc

SEQ ID NO: 312189 - RNA, 23 nt, Human
agagacucggcgcccggagccag

SEQ ID NO: 312190 - RNA, 32 nt, Human
agagacucgguuucaccauguuggucaggcug

SEQ ID NO: 312191 - RNA, 32 nt, Human
agagacucuauuuucucccaaagacacuauuu

SEQ ID NO: 312192 - RNA, 32 nt, Human
agagacucucuuccugugugcaugcagcagaa

SEQ ID NO: 312193 - RNA, 32 nt, Human
agagacucugaguuuaugaucugugccauaaa

SEQ ID NO: 312194 - RNA, 32 nt, Human
agagacucuguuucccuucagggaguuuuaaa

SEQ ID NO: 312195 - RNA, 32 nt, Human
agagacugacagccucugccccaggccugagu

SEQ ID NO: 312196 - RNA, 32 nt, Human
agagacugaggcaggagaaucgcuugaaccca

SEQ ID NO: 312197 - RNA, 23 nt, Human
agagacugaucauccaggccuca

SEQ ID NO: 312198 - RNA, 32 nt, Human
agagacugauggaaguuagagagguggaggag

SEQ ID NO: 312199 - RNA, 32 nt, Human
agagacugcagcuguugaauccuuucugcuaa

SEQ ID NO: 312200 - RNA, 32 nt, Human
agagacugcccagcuaugacuggcuucuucaa

SEQ ID NO: 312201 - RNA, 32 nt, Human
agagacugcugccagcuaccagccuggcuggc

SEQ ID NO: 312202 - RNA, 32 nt, Human
agagacuggaaacugccuucaaggccacggcu

SEQ ID NO: 312203 - RNA, 32 nt, Human
agagacuggaagagacagagaucagagggaga

SEQ ID NO: 312204 - RNA, 32 nt, Human
agagacuggcagcaccuccuggaacacaagcc

SEQ ID NO: 312205 - RNA, 19 nt, Human
agagacuggcagccaggga

SEQ ID NO: 312206 - RNA, 32 nt, Human
agagacuggcucugccuucuucaacauguucc

SEQ ID NO: 312207 - RNA, 32 nt, Human
agagacugggagaguggggaggggccagggac

SEQ ID NO: 312208 - RNA, 32 nt, Human
agagacugggcugaagggagcuagaggcaaaa

SEQ ID NO: 312209 - RNA, 32 nt, Human
agagacugggucgccuuggauucccucugccu

SEQ ID NO: 312210 - RNA, 32 nt, Human
agagacugggucucacucuguugcccaagcug

SEQ ID NO: 312211 - RNA, 32 nt, Human
agagacugggucucgcuguguugcccaggcug

SEQ ID NO: 312212 - RNA, 32 nt, Human
agagacugggucuugcugcauugcccgggcua

SEQ ID NO: 312213 - RNA, 32 nt, Human
agagacugggucuugcuuuguuacccaugcug

SEQ ID NO: 312214 - RNA, 32 nt, Human
agagacuggguuucaccacguuggccaggcug

SEQ ID NO: 312215 - RNA, 32 nt, Human
agagacuggguuucaccauguagaccaggcug

SEQ ID NO: 312216 - RNA, 32 nt, Human
agagacuggguuucaccauguugaccgggaug

SEQ ID NO: 312217 - RNA, 32 nt, Human
agagacuggguuucaccauguuggccaggcuc

SEQ ID NO: 312218 - RNA, 32 nt, Human
agagacuggguuuugccauguugaccaagcug

SEQ ID NO: 312219 - RNA, 32 nt, Human
agagacugguagcgugaaggauuuuggcauuc

SEQ ID NO: 312220 - RNA, 32 nt, Human
agagacuguagauugcuucuguaguacuccuu

SEQ ID NO: 312221 - RNA, 32 nt, Human
agagacuguagcucagggcgugcaaugugagg

SEQ ID NO: 312222 - RNA, 32 nt, Human
agagacugucauggaagaggguggagccgccg

SEQ ID NO: 312223 - RNA, 32 nt, Human
agagacugucauggagggggaggaggaggcgg

SEQ ID NO: 312224 - RNA, 21 nt, Human
agagacugucccugaaaccua

SEQ ID NO: 312225 - RNA, 32 nt, Human
agagacugugccagucccagccgcccuaccgc

SEQ ID NO: 312226 - RNA, 32 nt, Human
agagacuguguguguauguuaggugcucaaua

SEQ ID NO: 312227 - RNA, 32 nt, Human
agagacuguucuguucuguuccuuguguaacu

SEQ ID NO: 312228 - RNA, 32 nt, Human
agagacuguuuccugcuucccaccccaccccg

SEQ ID NO: 312229 - RNA, 32 nt, Human
agagacuuaaagagauuagagagguggagaaa

SEQ ID NO: 312230 - RNA, 32 nt, Human
agagacuuagacccagcacuccuuggauuagc

SEQ ID NO: 312231 - RNA, 32 nt, Human
agagacuucccuaauaaauuaccagggcccug

SEQ ID NO: 312232 - RNA, 32 nt, Human
agagacuuccucuucguuaagucggccuuccc

SEQ ID NO: 312233 - RNA, 32 nt, Human
agagacuucuaggaggaugcugugccucccaa

SEQ ID NO: 312234 - RNA, 32 nt, Human
agagacuucugccuccccuccuacccucuggc

SEQ ID NO: 312235 - RNA, 32 nt, Human
agagacuugaagccugaaagccuggccaaguu

SEQ ID NO: 312236 - RNA, 32 nt, Human
agagacuugaauguaaggacaugggaaaaucu

SEQ ID NO: 312237 - RNA, 32 nt, Human
agagacuugacacuccagucuuagacagggga

SEQ ID NO: 312238 - RNA, 32 nt, Human
agagacuuggaagaggaggaggaggaggagaa

SEQ ID NO: 312239 - RNA, 32 nt, Human
agagacuuguugaaugacuuugcccaaaaugc

SEQ ID NO: 312240 - RNA, 21 nt, Human
agagacuuguuugcucaaaug

SEQ ID NO: 312241 - RNA, 32 nt, Human
agagacuuuacgaauguacagaaugugggaag

SEQ ID NO: 312242 - RNA, 32 nt, Human
agagacuuuugcacaguuucugcuuggagucu

SEQ ID NO: 312243 - RNA, 32 nt, Human
agagagaaaaagaaaugcuguguuuaaucuuc

SEQ ID NO: 312244 - RNA, 16 nt, Human
agagagaaaaauucaa

SEQ ID NO: 312245 - RNA, 32 nt, Human
agagagaaaagaagaauggggaagagaagggc

SEQ ID NO: 312246 - RNA, 32 nt, Human
agagagaaaaugaaagaacaccucuggguccu

SEQ ID NO: 312247 - RNA, 21 nt, Human
agagagaaaaugacugcuggu

SEQ ID NO: 312248 - RNA, 32 nt, Human
agagagaaacagagacagagaggcagagagag

SEQ ID NO: 312249 - RNA, 32 nt, Human
agagagaaagaaagggagagaaguuugagccc

SEQ ID NO: 312250 - RNA, 32 nt, Human
agagagaaagaaugagaaagaaaaggaaugca

SEQ ID NO: 312251 - RNA, 32 nt, Human
agagagaaagagagguggggagaggggagaga

SEQ ID NO: 312252 - RNA, 21 nt, Human
agagagaaagcacggcugagg

SEQ ID NO: 312253 - RNA, 32 nt, Human
agagagaaagcagaaagagaaguaguugugag

SEQ ID NO: 312254 - RNA, 32 nt, Human
agagagaaaggagaagaaugacuauuuaaaga

SEQ ID NO: 312255 - RNA, 32 nt, Human
agagagaaaggaugcaguucccuccuggcaua

SEQ ID NO: 312256 - RNA, 32 nt, Human
agagagaaaggcugccuacaagcaucacaguc

SEQ ID NO: 312257 - RNA, 32 nt, Human
agagagaacaguuaaaucagaguagagaguuu

SEQ ID NO: 312258 - RNA, 32 nt, Human
agagagaacaucauucugccucuuguuuaaca

SEQ ID NO: 312259 - RNA, 32 nt, Human
agagagaaccaccacugccugacugcccgcuc

SEQ ID NO: 312260 - RNA, 32 nt, Human
agagagaaccaggaggguaacagaagaggagg

SEQ ID NO: 312261 - RNA, 32 nt, Human
agagagaacgagccuggauacagcagauguag

SEQ ID NO: 312262 - RNA, 32 nt, Human
agagagaagaggaggagaagggaggggguggc

SEQ ID NO: 312263 - RNA, 32 nt, Human
agagagaaggagaaaugagaaaagaggaaacc

SEQ ID NO: 312264 - RNA, 32 nt, Human
agagagaaggagaaggaggggagccuguccgu

SEQ ID NO: 312265 - RNA, 23 nt, Human
agagagaaggagucaccugcagu

SEQ ID NO: 312266 - RNA, 32 nt, Human
agagagaaggcuccuccucccuucccuggguu

SEQ ID NO: 312267 - RNA, 20 nt, Human
agagagaaguaccacugugg

SEQ ID NO: 312268 - RNA, 32 nt, Human
agagagaaguagaagcuagaaagcacaugaau

SEQ ID NO: 312269 - RNA, 32 nt, Human
agagagaauaaccuccaucuccugggucccag

SEQ ID NO: 312270 - RNA, 32 nt, Human
agagagacagaaugacagagagagaaaaugau

SEQ ID NO: 312271 - RNA, 32 nt, Human
agagagacagagagacagagagaggggaagag

SEQ ID NO: 312272 - RNA, 32 nt, Human
agagagacagaggggaagagaggcagagaggg

SEQ ID NO: 312273 - RNA, 32 nt, Human
agagagacaggagagagagggagggagcgaga

SEQ ID NO: 312274 - RNA, 32 nt, Human
agagagacaggucaccuugcaggccugcuugc

SEQ ID NO: 312275 - RNA, 23 nt, Human
agagagaccccaucucugcaaaa

SEQ ID NO: 312276 - RNA, 24 nt, Human
agagagacccugucucaaaacaaa

SEQ ID NO: 312277 - RNA, 32 nt, Human
agagagacccuuguggguccaugcuaacaaag

SEQ ID NO: 312278 - RNA, 24 nt, Human
agagagaccucugucucuacaaaa

SEQ ID NO: 312279 - RNA, 32 nt, Human
agagagacggcccuucucucuccucacucacc

SEQ ID NO: 312280 - RNA, 32 nt, Human
agagagacucugggcucuuggcucagaugugu

SEQ ID NO: 312281 - RNA, 32 nt, Human
agagagacugcggcgggagggccaggccgugg

SEQ ID NO: 312282 - RNA, 32 nt, Human
agagagagaaaagagguggauggagggaaggg

SEQ ID NO: 312283 - RNA, 32 nt, Human
agagagagaaacaaacuuuucaaggcuuauau

SEQ ID NO: 312284 - RNA, 32 nt, Human
agagagagaaugagacagagacuuaaggaaga

SEQ ID NO: 312285 - RNA, 32 nt, Human
agagagagacagagacagagaaauaagcauua

SEQ ID NO: 312286 - RNA, 32 nt, Human
agagagagacagagacagagagagacugaggg

SEQ ID NO: 312287 - RNA, 32 nt, Human
agagagagaccagccaacagcuugauagacca

SEQ ID NO: 312288 - RNA, 32 nt, Human
agagagagacuauccuggagaagccucguuuu

SEQ ID NO: 312289 - RNA, 32 nt, Human
agagagagagcauguauacccguauguuauca

SEQ ID NO: 312290 - RNA, 32 nt, Human
agagagagagccagaggagggaagagagcgcc

SEQ ID NO: 312291 - RNA, 32 nt, Human
agagagagaguuucaagaaguguaauuguggc

SEQ ID NO: 312292 - RNA, 32 nt, Human
agagagagaugagagaccaaaguuucuagggc

SEQ ID NO: 312293 - RNA, 32 nt, Human
agagagagcucugggccuucuuccugccaguc

SEQ ID NO: 312294 - RNA, 32 nt, Human
agagagaggaaagggaaggaagaaaggaagga

SEQ ID NO: 312295 - RNA, 32 nt, Human
agagagaggacgaacagauaaaagagggugaa

SEQ ID NO: 312296 - RNA, 32 nt, Human
agagagaggagaaagagagagaaggagagaga

SEQ ID NO: 312297 - RNA, 32 nt, Human
agagugggcugcaucugggauucccaccaagg

SEQ ID NO: 312298 - RNA, 32 nt, Human
agaguggggaaagauggggacugagggaaagg

SEQ ID NO: 312299 - RNA, 32 nt, Human
agaguggggaagguucccaugaccagcugggc

SEQ ID NO: 312300 - RNA, 21 nt, Human
agaguggguuucacuauguug

SEQ ID NO: 312301 - RNA, 32 nt, Human
agaguggucugugucuugucuuagacauaucu

SEQ ID NO: 312302 - RNA, 32 nt, Human
agaguggugggagaacagcugcagugaagcac

SEQ ID NO: 312303 - RNA, 32 nt, Human
agagugguuuugaacuccuggccucaagugau

SEQ ID NO: 312304 - RNA, 32 nt, Human
agaguguacuuacacaaaccuagaugguauau

SEQ ID NO: 312305 - RNA, 32 nt, Human
agaguguaggcaggccaggugcaguggcucau

SEQ ID NO: 312306 - RNA, 24 nt, Human
agaguguagucaagggccugggca

SEQ ID NO: 312307 - RNA, 32 nt, Human
agagugucacccaaccugcaggcagugucaug

SEQ ID NO: 312308 - RNA, 32 nt, Human
agagugucacugaauuuugucucugaauucag

SEQ ID NO: 312309 - RNA, 32 nt, Human
agaguguccugcuaccuuugucucacaugauu

SEQ ID NO: 312310 - RNA, 32 nt, Human
agaguguccuucagcuucucucugacugaagg

SEQ ID NO: 312311 - RNA, 29 nt, Human
agagugucggugugugugcaugugugggg

SEQ ID NO: 312312 - RNA, 32 nt, Human
agagugucucagggugcagaggucagacuaag

SEQ ID NO: 312313 - RNA, 32 nt, Human
agagugucugagcugugaggccagugcuccag

SEQ ID NO: 312314 - RNA, 32 nt, Human
agagugucuucccaucagucccugcacuggga

SEQ ID NO: 312315 - RNA, 32 nt, Human
agagugucuugcuauguugcccaggcuggucu

SEQ ID NO: 312316 - RNA, 32 nt, Human
agagugugaauaaguccuggagacaggaccac

SEQ ID NO: 312317 - RNA, 32 nt, Human
agagugugagccaccacacccagccagcaaua

SEQ ID NO: 312318 - RNA, 32 nt, Human
agagugugagccagaagagaugcugaagacac

SEQ ID NO: 312319 - RNA, 21 nt, Human
agagugugagccgcucuccuc

SEQ ID NO: 312320 - RNA, 32 nt, Human
agagugugagccuucucuuaugccuggacagg

SEQ ID NO: 312321 - RNA, 32 nt, Human
agagugugcaguccaacccuauccaauaggga

SEQ ID NO: 312322 - RNA, 32 nt, Human
agagugugcccuuugacuugcaucgucuaccu

SEQ ID NO: 312323 - RNA, 19 nt, Human
agagugugcucgggagugg

SEQ ID NO: 312324 - RNA, 32 nt, Human
agaguguggcugccccuccuugcuccagcagc

SEQ ID NO: 312325 - RNA, 32 nt, Human
agagugugguauagggaaaaggcuccaggcag

SEQ ID NO: 312326 - RNA, 32 nt, Human
agaguguggucuccccaccaacuccaguuuug

SEQ ID NO: 312327 - RNA, 32 nt, Human
agagugugguggcuucucagaguuuccaagca

SEQ ID NO: 312328 - RNA, 32 nt, Human
agaguguguuuuugcacugucuguaccuaaag

SEQ ID NO: 312329 - RNA, 32 nt, Human
agaguguuaagaucuagaucccuucccacugg

SEQ ID NO: 312330 - RNA, 32 nt, Human
agaguguuaccaccagcacccagaccgaaccc

SEQ ID NO: 312331 - RNA, 32 nt, Human
agaguguuccaggaggagguuugagcugagcu

SEQ ID NO: 312332 - RNA, 29 nt, Human
agaguguugcugugugugcuugugauuug

SEQ ID NO: 312333 - RNA, 32 nt, Human
agaguguuggcuuuggauucaggagggaugga

SEQ ID NO: 312334 - RNA, 32 nt, Human
agaguguuuguuuucagccugcuuuuaaagug

SEQ ID NO: 312335 - RNA, 32 nt, Human
agaguuaaaagucauugcucuggagaauuagg

SEQ ID NO: 312336 - RNA, 32 nt, Human
agaguuaagugaaauaauaggcagcauucaaa

SEQ ID NO: 312337 - RNA, 23 nt, Human
agaguuaccauaaugacuucaga

SEQ ID NO: 312338 - RNA, 32 nt, Human
agaguuacucacuuaaaucaaaggacaccaga

SEQ ID NO: 312339 - RNA, 32 nt, Human
agaguuagaccucauccuccccuagcuuagcu

SEQ ID NO: 312340 - RNA, 32 nt, Human
agaguuagguggaucaauugagcccaggaguu

SEQ ID NO: 312341 - RNA, 32 nt, Human
agaguuauagaccgcuaacaccugucacuggc

SEQ ID NO: 312342 - RNA, 32 nt, Human
agaguuaucugugacauuccaucaggcaccua

SEQ ID NO: 312343 - RNA, 32 nt, Human
agaguucaaaugugacuccaccucuuaaaagc

SEQ ID NO: 312344 - RNA, 32 nt, Human
agaguucaagaguucaagaccagccugggcaa

SEQ ID NO: 312345 - RNA, 32 nt, Human
agaguucaagugaaggaaggaggagguuccug

SEQ ID NO: 312346 - RNA, 32 nt, Human
agaguucaaguuuauguuacugccagggucag

SEQ ID NO: 312347 - RNA, 24 nt, Human
agaguucaauagcuguuucuauga

SEQ ID NO: 312348 - RNA, 32 nt, Human
agaguucacagcccuggucuuggcugaggucc

SEQ ID NO: 312349 - RNA, 32 nt, Human
agaguucacaucccuggcuugaucuacaggua

SEQ ID NO: 312350 - RNA, 17 nt, Human
agaguucacuccaggaa

SEQ ID NO: 312351 - RNA, 32 nt, Human
agaguucacugacuccccagccccaggugggc

SEQ ID NO: 312352 - RNA, 32 nt, Human
agaguucagagaggauccccagguccccaggg

SEQ ID NO: 312353 - RNA, 22 nt, Human
agaguucagcagucacuucaga

SEQ ID NO: 312354 - RNA, 32 nt, Human
agaguucagccgcggcggcagcagcagcagac

SEQ ID NO: 312355 - RNA, 32 nt, Human
agaguucaucuucuugaccuuuggccacugcc

SEQ ID NO: 312356 - RNA, 32 nt, Human
agaguucaugaaaacugcaaugcugggaaaag

SEQ ID NO: 312357 - RNA, 32 nt, Human
agaguucaugggcaaaugucacacuuuucuug

SEQ ID NO: 312358 - RNA, 32 nt, Human
agaguucccccuguccccuccaccuucccuca

SEQ ID NO: 312359 - RNA, 32 nt, Human
agaguuccuaaucaagugaagaggaagcuggc

SEQ ID NO: 312360 - RNA, 32 nt, Human
agaguuccuggaggaaagggacuggggacacu

SEQ ID NO: 312361 - RNA, 32 nt, Human
agaguucgagaacuaagcaaauuagcugagac

SEQ ID NO: 312362 - RNA, 32 nt, Human
agaguucuaaggucaccucuggcugcaggcau

SEQ ID NO: 312363 - RNA, 32 nt, Human
agaguucuagaaggagguucucagggguucag

SEQ ID NO: 312364 - RNA, 32 nt, Human
agaguucuagagcuggggguucuugggccaug

SEQ ID NO: 312365 - RNA, 22 nt, Human
agaguucuagauacucaucuua

SEQ ID NO: 312366 - RNA, 32 nt, Human
agaguucuagggaaauggagguuucuaacuug

SEQ ID NO: 312367 - RNA, 32 nt, Human
agaguucuccaccacucuugcauucugggugc

SEQ ID NO: 312368 - RNA, 32 nt, Human
agaguucuccccugcugcuugagaugccagag

SEQ ID NO: 312369 - RNA, 32 nt, Human
agaguucugaacuccucugucauuucauuagg

SEQ ID NO: 312370 - RNA, 32 nt, Human
agaguucugagaaguuuugaaauagcuuggga

SEQ ID NO: 312371 - RNA, 32 nt, Human
agaguucugagcucuguacuuccucuuggccc

SEQ ID NO: 312372 - RNA, 32 nt, Human
agaguucugcuggucagcccugcuccagggga

SEQ ID NO: 312373 - RNA, 32 nt, Human
agaguucuucauuccuugcugcucacauucug

SEQ ID NO: 312374 - RNA, 32 nt, Human
agaguucuuuccugaccucuagcuccauacuu

SEQ ID NO: 312375 - RNA, 32 nt, Human
agaguugaaagagaggccuuaggauucuccuc

SEQ ID NO: 312376 - RNA, 32 nt, Human
agaguugaaagccacagaguugaaagccacag

SEQ ID NO: 312377 - RNA, 20 nt, Human
agaguugaagacagcuuccc

SEQ ID NO: 312378 - RNA, 32 nt, Human
agaguugaagucaaaggaccuuucugacauaa

SEQ ID NO: 312379 - RNA, 32 nt, Human
agaguugacaacaucucacucacguguaucaa

SEQ ID NO: 312380 - RNA, 32 nt, Human
agaguugacauaaaaauugauggccaggcaug

SEQ ID NO: 312381 - RNA, 32 nt, Human
agaguugaccuccagccccaacauccuuccug

SEQ ID NO: 312382 - RNA, 32 nt, Human
agaguugaggcaggcagcaaagacugggaaag

SEQ ID NO: 312383 - RNA, 32 nt, Human
agaguugaugauuacagucuagaguuacuuga

SEQ ID NO: 312384 - RNA, 32 nt, Human
agaguugauugaggcccuagaucaggaccauu

SEQ ID NO: 312385 - RNA, 32 nt, Human
agaguugccggggucugcugggggagaauuuc

SEQ ID NO: 312386 - RNA, 22 nt, Human
agaguugcgggagacccaggag

SEQ ID NO: 312387 - RNA, 32 nt, Human
agaguuggaaacuuccuguguugcccacgcug

SEQ ID NO: 312388 - RNA, 32 nt, Human
agaguuggaagaggagacugggaggcagcaag

SEQ ID NO: 312389 - RNA, 32 nt, Human
agaguuggaaguuggcucccaagggcugacau

SEQ ID NO: 312390 - RNA, 32 nt, Human
agaguuggagagaagggggacguuucuggaac

SEQ ID NO: 312391 - RNA, 32 nt, Human
agaguuggagccaggguucacagccaggcuga

SEQ ID NO: 312392 - RNA, 32 nt, Human
agaguuggagcucuccagcaacaugccugagc

SEQ ID NO: 312393 - RNA, 32 nt, Human
agaguuggaguacuuaguucucuucuugucca

SEQ ID NO: 312394 - RNA, 32 nt, Human
agaguuggccucagaaugaccugcucuggcuc

SEQ ID NO: 312395 - RNA, 32 nt, Human
agaguugggaggaucaccugaugucagggguu

SEQ ID NO: 312396 - RNA, 23 nt, Human
agaguugggaucucacuauguug

SEQ ID NO: 312397 - RNA, 32 nt, Human
agaguugggcacuggcaaaugucuccucccuc

SEQ ID NO: 312398 - RNA, 23 nt, Human
agaguuggggaccccuguuggcc

SEQ ID NO: 312399 - RNA, 32 nt, Human
agaguuggggucucacuguguugcccagacug

SEQ ID NO: 312400 - RNA, 32 nt, Human
agaguugggguugagggcaaacauagaaccca

SEQ ID NO: 312401 - RNA, 32 nt, Human
agaguuggucucuccccuucuacugccuccaa

SEQ ID NO: 312402 - RNA, 32 nt, Human
agaguuguacagccaugaccacuagcuaauuc

SEQ ID NO: 312403 - RNA, 32 nt, Human
agaguugucuccgucuuuccaagaacagaaca

SEQ ID NO: 312404 - RNA, 32 nt, Human
agaguugucuuguccccucuugacccaucucc

SEQ ID NO: 312405 - RNA, 32 nt, Human
agaguugugguuuuccaucugauccuuccacu

SEQ ID NO: 312406 - RNA, 32 nt, Human
agaguuguugacucauaguacaguaaagggug

SEQ ID NO: 312407 - RNA, 32 nt, Human
agaguuguuggagacaguuucagaugauuauu

SEQ ID NO: 312408 - RNA, 32 nt, Human
agaguuguuggggaaggagggagcugaggagg

SEQ ID NO: 312409 - RNA, 32 nt, Human
agaguuguuucucuccacucugccucaucucu

SEQ ID NO: 312410 - RNA, 32 nt, Human
agaguuuaacaugccaagagaugugaaaugug

SEQ ID NO: 312411 - RNA, 32 nt, Human
agaguuuaauaggcaagaaggaagggagaaga

SEQ ID NO: 312412 - RNA, 32 nt, Human
agaguuuauauccccuguaucuauguuaaaua

SEQ ID NO: 312413 - RNA, 32 nt, Human
agaguuuaucuuuucuauaaguuuacagccuu

SEQ ID NO: 312414 - RNA, 32 nt, Human
agaguuuauuuuuacagaaaagagggugggag

SEQ ID NO: 312415 - RNA, 32 nt, Human
agaguuuauuuuuguacaaggggugagggugg

SEQ ID NO: 312416 - RNA, 19 nt, Human
agaguuucacagacucuua

SEQ ID NO: 312417 - RNA, 32 nt, Human
agaguuucaccagguuggucaggcuggucuca

SEQ ID NO: 312418 - RNA, 21 nt, Human
agaguuucaccauguugcuua

SEQ ID NO: 312419 - RNA, 32 nt, Human
agaguuucaguuaccauuguaugcaagagcca

SEQ ID NO: 312420 - RNA, 22 nt, Human
agaguuucauccaacauucuug

SEQ ID NO: 312421 - RNA, 32 nt, Human
agaguuuccauuguucagcucugugcuuucuu

SEQ ID NO: 312422 - RNA, 32 nt, Human
agaguuucccuucacaagcccucucucucccu

SEQ ID NO: 312423 - RNA, 24 nt, Human
agaguuuccucagaacccacagug

SEQ ID NO: 312424 - RNA, 22 nt, Human
agaguuucuauucaucauuuua

SEQ ID NO: 312425 - RNA, 32 nt, Human
agaguuucucacuuuuaagauucuccaaaucc

SEQ ID NO: 312426 - RNA, 32 nt, Human
agaguuucuccauauuggucaggcugguuucg

SEQ ID NO: 312427 - RNA, 23 nt, Human
agaguuucucuaagcccacaaug

SEQ ID NO: 312428 - RNA, 32 nt, Human
agaguuucucucuguugcccaggcuggagugc

SEQ ID NO: 312429 - RNA, 32 nt, Human
agaguuucucuggagcuuauagcuagaagggg

SEQ ID NO: 312430 - RNA, 32 nt, Human
agaguuucuugcagccuugaaaauuuuauucc

SEQ ID NO: 312431 - RNA, 32 nt, Human
agaguuugaaaauuugacaagcacacuguccu

SEQ ID NO: 312432 - RNA, 32 nt, Human
agaguuugaaggaggugagggaugugaauugc

SEQ ID NO: 312433 - RNA, 32 nt, Human
agaguuugaauccucaguaacucucauugacu

SEQ ID NO: 312434 - RNA, 32 nt, Human
agaguuugcugugcuuauaacacuucuuuuuc

SEQ ID NO: 312435 - RNA, 24 nt, Human
agaguuuggaggggcucacugcca

SEQ ID NO: 312436 - RNA, 20 nt, Human
agaguuuggggagaauugag

SEQ ID NO: 312437 - RNA, 32 nt, Human
agaguuuguauauccuacuccugggccuuaca

SEQ ID NO: 312438 - RNA, 32 nt, Human
agaguuuguccuauuuggggcuuuucuauuua

SEQ ID NO: 312439 - RNA, 24 nt, Human
agaguuuuagaaggcuggauggaa

SEQ ID NO: 312440 - RNA, 32 nt, Human
agaguuuuauuaugcuaauaaaugucaggauu

SEQ ID NO: 312441 - RNA, 32 nt, Human
agaguuuucaaaaugugaaucuuuggaagccu

SEQ ID NO: 312442 - RNA, 32 nt, Human
agaguuuuccuccaaagccacaccucagcugg

SEQ ID NO: 312443 - RNA, 32 nt, Human
agaguuuugggggcaugugccugcugcgcugg

SEQ ID NO: 312444 - RNA, 32 nt, Human
agaguuuuggucacucccaaaauauuuagaua

SEQ ID NO: 312445 - RNA, 32 nt, Human
agaguuuuuggugauugcuacucugaaagcug

SEQ ID NO: 312446 - RNA, 32 nt, Human
agaguuuuugucugagcacaguagccuggccc

SEQ ID NO: 312447 - RNA, 32 nt, Human
agauaaaaacuacuuggugaaaugacuucuug

SEQ ID NO: 312448 - RNA, 21 nt, Human
agauaaaaaugagcuuuucua

SEQ ID NO: 312449 - RNA, 32 nt, Human
agauaaaacuucuauuuaaagacuuuaacuag

SEQ ID NO: 312450 - RNA, 32 nt, Human
agauaaaagaggaguagaagguaaaagaaaau

SEQ ID NO: 312451 - RNA, 32 nt, Human
agauaaaagaucaccaacucagagccagauaa

SEQ ID NO: 312452 - RNA, 32 nt, Human
agauaaaagcacagaaaggacaacccuugaaa

SEQ ID NO: 312453 - RNA, 32 nt, Human
agauaaaagcagugcuuugugaaaugcagugu

SEQ ID NO: 312454 - RNA, 21 nt, Human
agauaaaauaaauauagggua

SEQ ID NO: 312455 - RNA, 32 nt, Human
agauaaacaaaggggaaggaagagaggacaac

SEQ ID NO: 312456 - RNA, 32 nt, Human
agauaaacauaaaaggaggagacauacaaugg

SEQ ID NO: 312457 - RNA, 32 nt, Human
agauaaaccagccucagcuggcgcagcggggc

SEQ ID NO: 312458 - RNA, 32 nt, Human
agauaaaccagcuuuuuauguaaagaguaagg

SEQ ID NO: 312459 - RNA, 32 nt, Human
agauaaaccaggaagggaguuggcaggaagcc

SEQ ID NO: 312460 - RNA, 32 nt, Human
agauaaacccuacaaauguaaagaaugcggga

SEQ ID NO: 312461 - RNA, 32 nt, Human
agauaaacgcgcuuagguuagaagacuauaau

SEQ ID NO: 312462 - RNA, 32 nt, Human
agauaaagagcagagggcacuugcagggccug

SEQ ID NO: 312463 - RNA, 32 nt, Human
agauaaagauggcagaagaaaagggaaagcaa

SEQ ID NO: 312464 - RNA, 32 nt, Human
agauaaagauuugguuucacccuggugguggu

SEQ ID NO: 312465 - RNA, 32 nt, Human
agauaaagcaacagccaauacacacauuacca

SEQ ID NO: 312466 - RNA, 32 nt, Human
agauaaagccaaggugaaggaugaaucacaga

SEQ ID NO: 312467 - RNA, 32 nt, Human
agauaaagcugaggagccugugccagugcugg

SEQ ID NO: 312468 - RNA, 32 nt, Human
agauaaaggcaagucuugucacccucaggcac

SEQ ID NO: 312469 - RNA, 32 nt, Human
agauaaaggggaugagaaagaacagagcucca

SEQ ID NO: 312470 - RNA, 32 nt, Human
agauaaagucuugggcugggugcaguggcuca

SEQ ID NO: 312471 - RNA, 32 nt, Human
agauaaauaugaugccaggucagggcugaaga

SEQ ID NO: 312472 - RNA, 32 nt, Human
agauaaaucaccagucacagacuaugcacccg

SEQ ID NO: 312473 - RNA, 32 nt, Human
agauaaaucucucucugugucucccucuuuaa

SEQ ID NO: 312474 - RNA, 32 nt, Human
agauaaaugaaauaacuggacacacacucaca

SEQ ID NO: 312475 - RNA, 32 nt, Human
agauaacacuacugcauuccagccugggugac

SEQ ID NO: 312476 - RNA, 32 nt, Human
agauaacacuccuucaggaaaaagugaugaug

SEQ ID NO: 312477 - RNA, 32 nt, Human
agauaacacuguaauccaccuccagguuucca

SEQ ID NO: 312478 - RNA, 32 nt, Human
agauaacagagaauuaggggaaagcaugauuu

SEQ ID NO: 312479 - RNA, 32 nt, Human
agauaacagaguagagugaaccagagaaagag

SEQ ID NO: 312480 - RNA, 32 nt, Human
agauaacauaugcaugccacaauaaacugcau

SEQ ID NO: 312481 - RNA, 32 nt, Human
agauaaccagaggggccugggaagggagaaga

SEQ ID NO: 312482 - RNA, 32 nt, Human
agauaacccagaaacaaauacauacaucuaca

SEQ ID NO: 312483 - RNA, 32 nt, Human
agauaacccccuccucuggacuuaaaucaccu

SEQ ID NO: 312484 - RNA, 32 nt, Human
agauaacgccacugcacuccaguguaggcaac

SEQ ID NO: 312485 - RNA, 32 nt, Human
agauaacugcauaaaugaauaaauucagaauu

SEQ ID NO: 312486 - RNA, 32 nt, Human
agauaacugccucuuguacuuggauguguagu

SEQ ID NO: 312487 - RNA, 32 nt, Human
agauaacuuauccccuuguccccaugugucau

SEQ ID NO: 312488 - RNA, 32 nt, Human
agauaacuucacagucauccagucccaacacc

SEQ ID NO: 312489 - RNA, 32 nt, Human
agauaacuuuagccaaggaguucuagccugca

SEQ ID NO: 312490 - RNA, 32 nt, Human
agauaagaaacaguuucuuagagcagauagaa

SEQ ID NO: 312491 - RNA, 32 nt, Human
agauaagaaugagagcaaaaguugaugaaaca

SEQ ID NO: 312492 - RNA, 21 nt, Human
agauaagaccuuuacagagua

SEQ ID NO: 312493 - RNA, 32 nt, Human
agauaagagaugguuaagcuguucuucacccu

SEQ ID NO: 312494 - RNA, 32 nt, Human
agauaagagcacgcaucagcaucgcagccacu

SEQ ID NO: 312495 - RNA, 32 nt, Human
agauaagagguggaggaggugacagggagcua

SEQ ID NO: 312496 - RNA, 32 nt, Human
agauaagcaauaugucuucuauagcaggccua

SEQ ID NO: 312497 - RNA, 32 nt, Human
agauaagcaggaaaauuccaucaaagaaaucc

SEQ ID NO: 312498 - RNA, 32 nt, Human
agauaagccuguaaacucaucaucuguguuuu

SEQ ID NO: 312499 - RNA, 32 nt, Human
agauaagcggccuguccugccuccugggagaa

SEQ ID NO: 312500 - RNA, 32 nt, Human
agauaagcugaguguucccaccaggaagucac

SEQ ID NO: 312501 - RNA, 32 nt, Human
agauaagcuguacaaauugaaucuauguggaa

SEQ ID NO: 312502 - RNA, 32 nt, Human
agauaaggacuggcaaccagagccucagcauc

SEQ ID NO: 312503 - RNA, 32 nt, Human
agauaaggaggcacgucaggcaaugacacacc

SEQ ID NO: 312504 - RNA, 32 nt, Human
agauaaggaggccaggugugguggcucaugcc

SEQ ID NO: 312505 - RNA, 32 nt, Human
agauaagggcagcugcugcccuuggggcaccu

SEQ ID NO: 312506 - RNA, 32 nt, Human
agauaaggggaaacauaucacauaucauugaa

SEQ ID NO: 312507 - RNA, 32 nt, Human
agauaagggugaguucuacuguggcagaaaag

SEQ ID NO: 312508 - RNA, 32 nt, Human
agauaagucuguucuuuaaauuucugaaaugg

SEQ ID NO: 312509 - RNA, 32 nt, Human
agauaagucuguuuuuccuucuggaaccauaa

SEQ ID NO: 312510 - RNA, 32 nt, Human
agauaagucuuucauggcugcuguugcuuaaa

SEQ ID NO: 312511 - RNA, 32 nt, Human
agauaagugggugggaggcacggggaagguuu

SEQ ID NO: 312512 - RNA, 32 nt, Human
agauaauaaagaaaucagaaaugguaccuuuu

SEQ ID NO: 312513 - RNA, 22 nt, Human
agauaauagaacauugcuugua

SEQ ID NO: 312514 - RNA, 32 nt, Human
agauaauagagauaaaagaagaggagggcuuc

SEQ ID NO: 312515 - RNA, 32 nt, Human
agauaauagaggaggguaugaaaggagggaaa

SEQ ID NO: 312516 - RNA, 32 nt, Human
agauaaucaagaaacaaugucgagugaugaua

SEQ ID NO: 312517 - RNA, 32 nt, Human
agauaaucaaguuaguuaaaaguuuccuaguu

SEQ ID NO: 312518 - RNA, 32 nt, Human
agauaaucaucaaggacucacagucugccaga

SEQ ID NO: 312519 - RNA, 32 nt, Human
agauaaucaugguauuuucaucagcuugguac

SEQ ID NO: 312520 - RNA, 32 nt, Human
agauaaucauuagcccacauaccaguaacuua

SEQ ID NO: 312521 - RNA, 32 nt, Human
agauaaucccacugcauuccagccugggcaac

SEQ ID NO: 312522 - RNA, 32 nt, Human
agauaauccccaccccucucccccaaaugcag

SEQ ID NO: 312523 - RNA, 32 nt, Human
agauaaucccuaaaagcacccacauuuguuuc

SEQ ID NO: 312524 - RNA, 32 nt, Human
agauaaucuggauguuucugcaaaggaaaaua

SEQ ID NO: 312525 - RNA, 32 nt, Human
agauaaugaguccuauuuuucucucacauaau

SEQ ID NO: 312526 - RNA, 32 nt, Human
agauaaugccacugcacuccagccugccugga

SEQ ID NO: 312527 - RNA, 32 nt, Human
agauaaugucccaccucuccccacacgccgaa

SEQ ID NO: 312528 - RNA, 32 nt, Human
agauaaugugggugcuagaugcaguggcuuac

SEQ ID NO: 312529 - RNA, 32 nt, Human
agauaauguucuuccagaucugaaaaggaaaa

SEQ ID NO: 312530 - RNA, 32 nt, Human
agauaauuaaggagaaaacagauaaugaaggc

SEQ ID NO: 312531 - RNA, 32 nt, Human
agauaauucaucaugccugcuguggcuucagu

SEQ ID NO: 312532 - RNA, 32 nt, Human
agauaauucuucuccccugacuggaccucugg

SEQ ID NO: 312533 - RNA, 32 nt, Human
agauaauuuguauuuuugcacacugagauaua

SEQ ID NO: 312534 - RNA, 32 nt, Human
agauacaaauggccaacaaaacaugaaacacc

SEQ ID NO: 312535 - RNA, 32 nt, Human
agauacaacuuccagcaacuucccacucagcu

SEQ ID NO: 312536 - RNA, 32 nt, Human
agauacaagaacuuaauggacacuacaauaag

SEQ ID NO: 312537 - RNA, 32 nt, Human
agauacacaaacacaaauagagauuucauagc

SEQ ID NO: 312538 - RNA, 19 nt, Human
agauacacauccaagcuca

SEQ ID NO: 312539 - RNA, 32 nt, Human
agauacacauggugccuucagcggcuucuucc

SEQ ID NO: 312540 - RNA, 32 nt, Human
agauacacugcucuccccacccagaccugccu

SEQ ID NO: 312541 - RNA, 18 nt, Human
agauacagaaccuaggag

SEQ ID NO: 312542 - RNA, 32 nt, Human
agauacagauuggcauagaagaauguaaagaa

SEQ ID NO: 312543 - RNA, 32 nt, Human
agauacagcugagcaaugcacacauuuucagc

SEQ ID NO: 312544 - RNA, 32 nt, Human
agauacaggaagggagaggugucugcuaccuu

SEQ ID NO: 312545 - RNA, 32 nt, Human
agauacaggguuucaccacguugcucaggcug

SEQ ID NO: 312546 - RNA, 32 nt, Human
agauacagucauaggggguugcagugagguuu

SEQ ID NO: 312547 - RNA, 32 nt, Human
agauacaguucagaaccaaaggaauagagaag

SEQ ID NO: 312548 - RNA, 32 nt, Human
agauacaguuuauguacuugauggaagaaaau

SEQ ID NO: 312549 - RNA, 32 nt, Human
agauacauauauacaagauaaaggaauaggau

SEQ ID NO: 312550 - RNA, 32 nt, Human
agauacaucacugucuguuaaaggaaaccaag

SEQ ID NO: 312551 - RNA, 32 nt, Human
agauacaugugaauaaggcaaaagccagaaaa

SEQ ID NO: 312552 - RNA, 32 nt, Human
agauacauuaaaauacucacugaagagaagcc

SEQ ID NO: 312553 - RNA, 21 nt, Human
agauaccaaaggaaaacaaga

SEQ ID NO: 312554 - RNA, 32 nt, Human
agauaccacaaacccugcugaacacagugucu

SEQ ID NO: 312555 - RNA, 20 nt, Human
agauaccacauguggcaagc

SEQ ID NO: 312556 - RNA, 32 nt, Human
agauaccacuuggccacucccgcugaggccac

SEQ ID NO: 312557 - RNA, 32 nt, Human
agauaccagaggccaagccacagagaggauaa

SEQ ID NO: 312558 - RNA, 32 nt, Human
agauaccagaugcaccagaacaggcuucgagu

SEQ ID NO: 312559 - RNA, 32 nt, Human
agauaccagcagagagggaguaggagagaaga

SEQ ID NO: 312560 - RNA, 32 nt, Human
agauaccagccccuguauggcacuggcauugu

SEQ ID NO: 312561 - RNA, 32 nt, Human
agauacccucuccuugcugaaguuuuucuuga

SEQ ID NO: 312562 - RNA, 32 nt, Human
agauaccuacucauuuucuaagugacuggcca

SEQ ID NO: 312563 - RNA, 32 nt, Human
agauaccuccuugugccuccacugaugcagga

SEQ ID NO: 312564 - RNA, 32 nt, Human
agauaccugcacacgcauguuuauacagcaca

SEQ ID NO: 312565 - RNA, 32 nt, Human
agauaccuggcauuuugggaagugaccaaaga

SEQ ID NO: 312566 - RNA, 32 nt, Human
agauaccuuagaguaugugaccgcgcuccaga

SEQ ID NO: 312567 - RNA, 32 nt, Human
agauaccuucuuugggcagcacaauguucaaa

SEQ ID NO: 312568 - RNA, 32 nt, Human
agauacgcagccauuccauauucaucuccaac

SEQ ID NO: 312569 - RNA, 32 nt, Human
agauacggggucuugcucugucucccaggcug

SEQ ID NO: 312570 - RNA, 32 nt, Human
agauacgggguuucaccaugcuggccagacug

SEQ ID NO: 312571 - RNA, 23 nt, Human
agauacgggguuucaccauguug

SEQ ID NO: 312572 - RNA, 27 nt, Human
agauacgggguuucaccauguuggcca

SEQ ID NO: 312573 - RNA, 32 nt, Human
agauacuaccuacacggagcaggauggcugcu

SEQ ID NO: 312574 - RNA, 32 nt, Human
agauacuaccugcaauuuuauacauguauuuu

SEQ ID NO: 312575 - RNA, 32 nt, Human
agauacuauaagaagaugaacaugacaauuuu

SEQ ID NO: 312576 - RNA, 32 nt, Human
agauacucaccaggaccaggaaggggacucug

SEQ ID NO: 312577 - RNA, 32 nt, Human
agauacucaccaggaugaggaagaggacuuug

SEQ ID NO: 312578 - RNA, 32 nt, Human
agauacuccagccugggugacagagcgagacu

SEQ ID NO: 312579 - RNA, 32 nt, Human
agauacucuaggggcaggggcaggggcagggg

SEQ ID NO: 312580 - RNA, 32 nt, Human
agauacugacaugcagaagaaauaagugcauu

SEQ ID NO: 312581 - RNA, 32 nt, Human
agauacugagaccaaggauucagcauuagaac

SEQ ID NO: 312582 - RNA, 32 nt, Human
agauacugagaccuguguguacaguaggacca

SEQ ID NO: 312583 - RNA, 31 nt, Human
agauacuggaaggagccucagauugcucaca

SEQ ID NO: 312584 - RNA, 32 nt, Human
agauacuggauagccagcauccucucauuccc

SEQ ID NO: 312585 - RNA, 32 nt, Human
agauacuguuggacccagaagagaagggcacu

SEQ ID NO: 312586 - RNA, 32 nt, Human
agauacuuauaagaaaugacuuaaacaaaucc

SEQ ID NO: 312587 - RNA, 32 nt, Human
agauacuugggaggcugagauaggaucacuug

SEQ ID NO: 312588 - RNA, 21 nt, Human
agauacuuguuguguguguug

SEQ ID NO: 312589 - RNA, 32 nt, Human
agauagaagauccaagaaaacaauggaggggg

SEQ ID NO: 312590 - RNA, 32 nt, Human
agauagaaggaaauacgugauuuggugaaggc

SEQ ID NO: 312591 - RNA, 32 nt, Human
agauagaagucaugggaugcagcaguucuuca

SEQ ID NO: 312592 - RNA, 21 nt, Human
agauagaaucucacuauguug

SEQ ID NO: 312593 - RNA, 32 nt, Human
agauagacauaucugggucacacacaccugau

SEQ ID NO: 312594 - RNA, 32 nt, Human
agauagacucggcuugaaucucagcugccugc

SEQ ID NO: 312595 - RNA, 19 nt, Human
agauagagccucgcucugu

SEQ ID NO: 312596 - RNA, 32 nt, Human
agauagaggaggaggagggggaggaagaggag

SEQ ID NO: 312597 - RNA, 32 nt, Human
agauagaggggcugcugacaccagugcuggag

SEQ ID NO: 312598 - RNA, 21 nt, Human
agauagaguuucaucauguug

SEQ ID NO: 312599 - RNA, 25 nt, Human
agauagaguuucaucauguuggcca

SEQ ID NO: 312600 - RNA, 32 nt, Human
agauagauaccacaaguaacacaaagcaucau

SEQ ID NO: 312601 - RNA, 32 nt, Human
agauagauggagaaguguuuucagauuccugg

SEQ ID NO: 312602 - RNA, 32 nt, Human
agauagauucgagagaaagcacguggccaugu

SEQ ID NO: 312603 - RNA, 32 nt, Human
agauagcaccacugcacuccagccugggagac

SEQ ID NO: 312604 - RNA, 32 nt, Human
agauagcaccacugcacuccaggcugggugac

SEQ ID NO: 312605 - RNA, 32 nt, Human
agauagcaccacugcacuuuagccugggcgac

SEQ ID NO: 312606 - RNA, 32 nt, Human
agauagcaccacugcaugcaagccugggcaau

SEQ ID NO: 312607 - RNA, 32 nt, Human
agauagcaccauugcacuccagccugggcgac

SEQ ID NO: 312608 - RNA, 32 nt, Human
agauagcaccuacccaacccaggaugaaugag

SEQ ID NO: 312609 - RNA, 32 nt, Human
agauagcagacaccuuccccgauuugugucuc

SEQ ID NO: 312610 - RNA, 32 nt, Human
agauagcaggcagggaagcaauguaguguggu

SEQ ID NO: 312611 - RNA, 32 nt, Human
agauagcauagaggagauuaagggugaggcca

SEQ ID NO: 312612 - RNA, 32 nt, Human
agauagcauucaacaaaagcugccucaacuuu

SEQ ID NO: 312613 - RNA, 32 nt, Human
agauagcccaggacucugcguggacgcgcccc

SEQ ID NO: 312614 - RNA, 32 nt, Human
agauagcccaggagcaacagccuaaucccgug

SEQ ID NO: 312615 - RNA, 32 nt, Human
agauagccccacugcacuccagccugggugac

SEQ ID NO: 312616 - RNA, 32 nt, Human
agauagcgccacugcacugcacgccagccuag

SEQ ID NO: 312617 - RNA, 32 nt, Human
agauagcgccacugcaguccggccugggugaa

SEQ ID NO: 312618 - RNA, 32 nt, Human
agauagcgccauugcacuccagccugagcgac

SEQ ID NO: 312619 - RNA, 32 nt, Human
agauagcgccauugcacuccagccugggcaac

SEQ ID NO: 312620 - RNA, 32 nt, Human
agauagcgccauugcacuccagccugggcgac

SEQ ID NO: 312621 - RNA, 32 nt, Human
agauagcggcacugcacuccagccugggugac

SEQ ID NO: 312622 - RNA, 32 nt, Human
agauagcggcauugcacuccagccugggcaac

SEQ ID NO: 312623 - RNA, 32 nt, Human
agauagcuauguuacacugcaagaacagaguu

SEQ ID NO: 312624 - RNA, 32 nt, Human
agauagcuccuuucuggaccucaguccuucac

SEQ ID NO: 312625 - RNA, 32 nt, Human
agauaggaacccaggagcagcaguguuuccug

SEQ ID NO: 312626 - RNA, 32 nt, Human
agauaggaagacuccuuccucucccaguacuu

SEQ ID NO: 312627 - RNA, 32 nt, Human
agauaggacuucuuccuguuuaauccacugga

SEQ ID NO: 312628 - RNA, 32 nt, Human
agauaggagaugaaaaguugggaggaugucuu

SEQ ID NO: 312629 - RNA, 32 nt, Human
agauaggagguggcccauaggagcagucccgc

SEQ ID NO: 312630 - RNA, 32 nt, Human
agauaggaucuaggagugauuuuauuguuuug

SEQ ID NO: 312631 - RNA, 32 nt, Human
agauaggcaccacuguauccuccagcuccuuc

SEQ ID NO: 312632 - RNA, 32 nt, Human
agauaggcagagaacaucuccagaaaugugug

SEQ ID NO: 312633 - RNA, 32 nt, Human
agauaggcaggcagcgcugcuccaucagccgg

SEQ ID NO: 312634 - RNA, 32 nt, Human
agauaggcuaucuccccaccucccacccuacu

SEQ ID NO: 312635 - RNA, 32 nt, Human
agauagggaaacugaggcuuugggaggacuca

SEQ ID NO: 312636 - RNA, 32 nt, Human
agauagggaccagaguuuaacauagcgaucua

SEQ ID NO: 312637 - RNA, 32 nt, Human
agauagggagaagggaaaaggggccucacuuu

SEQ ID NO: 312638 - RNA, 32 nt, Human
agauagggcagcuucuuucugcccucaggagc

SEQ ID NO: 312639 - RNA, 32 nt, Human
agauagggccuuucucauacuacccuggaaua

SEQ ID NO: 312640 - RNA, 32 nt, Human
agauaggggcagauaggagcugcaggggugcc

SEQ ID NO: 312641 - RNA, 32 nt, Human
agauaggggcccugggccuccgcccuggccuu

SEQ ID NO: 312642 - RNA, 21 nt, Human
agauagggguuucaccguguu

SEQ ID NO: 312643 - RNA, 18 nt, Human
agauaggguagccauguu

SEQ ID NO: 312644 - RNA, 21 nt, Human
agauagggucucacuauguug

SEQ ID NO: 312645 - RNA, 21 nt, Human
agauagggucuugcuguguug

SEQ ID NO: 312646 - RNA, 21 nt, Human
agauagggucuuucuauguug

SEQ ID NO: 312647 - RNA, 21 nt, Human
agauaggguuucacaauguug

SEQ ID NO: 312648 - RNA, 25 nt, Human
agauaggguuucacaauguuggcca

SEQ ID NO: 312649 - RNA, 21 nt, Human
agauaggguuucaccauguug

SEQ ID NO: 312650 - RNA, 25 nt, Human
agauaggguuucaccauguuggcca

SEQ ID NO: 312651 - RNA, 21 nt, Human
agauaggguuucaccguguug

SEQ ID NO: 312652 - RNA, 25 nt, Human
agauaggguuucaccguguuggcca

SEQ ID NO: 312653 - RNA, 21 nt, Human
agauaggguuucauuacauug

SEQ ID NO: 312654 - RNA, 20 nt, Human
agauaggguuuuaccauguu

SEQ ID NO: 312655 - RNA, 32 nt, Human
agauagguaacugaggcacacagagcauuuug

SEQ ID NO: 312656 - RNA, 32 nt, Human
agauagguacaggaguccacaggaggccaggu

SEQ ID NO: 312657 - RNA, 32 nt, Human
agauaggucucaaacuccugacuucaggugau

SEQ ID NO: 312658 - RNA, 31 nt, Human
agauagguuucucagcaccgcccucagcucu

SEQ ID NO: 312659 - RNA, 32 nt, Human
agauaguacauacuugccauuucuauacuagg

SEQ ID NO: 312660 - RNA, 32 nt, Human
agauaguaccacugcacuccagccugggcgac

SEQ ID NO: 312661 - RNA, 32 nt, Human
agauagucaagcauuuagaagugcagugaacu

SEQ ID NO: 312662 - RNA, 31 nt, Human
agauagucaauaaaacaucuugaaaauccca

SEQ ID NO: 312663 - RNA, 32 nt, Human
agauagucugaauuguugggcagcagaaaacc

SEQ ID NO: 312664 - RNA, 32 nt, Human
agauagugaaaacaggcuauugcucuucccau

SEQ ID NO: 312665 - RNA, 32 nt, Human
agauagugccacagcucuccagccugggcgac

SEQ ID NO: 312666 - RNA, 32 nt, Human
agauagugccacugcacuacagcccgggcgac

SEQ ID NO: 312667 - RNA, 32 nt, Human
agauagugccacugcacuccagccugggcaac

SEQ ID NO: 312668 - RNA, 32 nt, Human
agauagugccacugcacuccagccugggugac

SEQ ID NO: 312669 - RNA, 32 nt, Human
agauagugccacugcacuucagccugggugac

SEQ ID NO: 312670 - RNA, 32 nt, Human
agauagugccacugcacuucagcuugggcaac

SEQ ID NO: 312671 - RNA, 32 nt, Human
agauagugccacugcauuccggccugggcgac

SEQ ID NO: 312672 - RNA, 32 nt, Human
agauagugccacugugcuccagccuggaugac

SEQ ID NO: 312673 - RNA, 32 nt, Human
agauagugccaucgcacuccagccuggacaac

SEQ ID NO: 312674 - RNA, 32 nt, Human
agauagugccauugcacuccggccugggcaac

SEQ ID NO: 312675 - RNA, 32 nt, Human
agauagugccauuguacuccagcuugggcaac

SEQ ID NO: 312676 - RNA, 32 nt, Human
agauagugccucugcacuccagccugcgugac

SEQ ID NO: 312677 - RNA, 32 nt, Human
agauaguggcucugcuguuuucuuaggcugcu

SEQ ID NO: 312678 - RNA, 32 nt, Human
agauagugggagggggccaggcugcaggagaa

SEQ ID NO: 312679 - RNA, 32 nt, Human
agauagugucagcuuauuugaagauuaauuuu

SEQ ID NO: 312680 - RNA, 32 nt, Human
agauagugugggcauucagucaggcugguggg

SEQ ID NO: 312681 - RNA, 32 nt, Human
agauagugugugacugugggaagauggaggag

SEQ ID NO: 312682 - RNA, 32 nt, Human
agauaguuaaauccuaagauagagauuaaguc

SEQ ID NO: 312683 - RNA, 32 nt, Human
agauaguucccauucuacuuggagauuuggcu

SEQ ID NO: 312684 - RNA, 19 nt, Human
agauaguuucacaauuugg

SEQ ID NO: 312685 - RNA, 32 nt, Human
agauaguuugacugaacccccaccuugaccuu

SEQ ID NO: 312686 - RNA, 32 nt, Human
agauaguuuggcugcuccugugcugucaccug

SEQ ID NO: 312687 - RNA, 32 nt, Human
agauauaaagagaguucuuucauuucccugcu

SEQ ID NO: 312688 - RNA, 32 nt, Human
agauauaauuuccaauauaccauucaacuaca

SEQ ID NO: 312689 - RNA, 32 nt, Human
agauauacaaauauacagauauacaaauaagu

SEQ ID NO: 312690 - RNA, 32 nt, Human
agauauacagauauacaaauauacagauauac

SEQ ID NO: 312691 - RNA, 32 nt, Human
agauauacuagguaguguaugaaugugcauaa

SEQ ID NO: 312692 - RNA, 32 nt, Human
agauauagcuggagcuacauccugcuuccuuu

SEQ ID NO: 312693 - RNA, 32 nt, Human
agauauaugcauaccuggauuuccuuggcuuc

SEQ ID NO: 312694 - RNA, 32 nt, Human
agauaucauaauaucacacccacacaucaggc

SEQ ID NO: 312695 - RNA, 32 nt, Human
agauaucauccaggcccaaggccccucucccu

SEQ ID NO: 312696 - RNA, 32 nt, Human
agauaucaucugagagguaguuaauuuggcac

SEQ ID NO: 312697 - RNA, 32 nt, Human
agauaucaucuguaccucagcacuguugugac

SEQ ID NO: 312698 - RNA, 32 nt, Human
agauaucgccacugcacuccagccugggugac

SEQ ID NO: 312699 - RNA, 32 nt, Human
agauaucuauuuguauaaucucuggcuguaau

SEQ ID NO: 312700 - RNA, 22 nt, Human
agauaucucagccugggcacuc

SEQ ID NO: 312701 - RNA, 32 nt, Human
agauaucugaaaauguggaagcaacauuggaa

SEQ ID NO: 312702 - RNA, 32 nt, Human
agauaucugcugucugaagaucuuucagagcu

SEQ ID NO: 312703 - RNA, 32 nt, Human
agauaucuggggaccaaacuguagggacagag

SEQ ID NO: 312704 - RNA, 32 nt, Human
agauaugagcaaccccagcuuuccagacaguc

SEQ ID NO: 312705 - RNA, 32 nt, Human
agauaugcacacacacggaugcacacacagau

SEQ ID NO: 312706 - RNA, 32 nt, Human
agauaugcacacacagguauuuuguugcuaaa

SEQ ID NO: 312707 - RNA, 32 nt, Human
agauaugcacacuuccauuaccagucuccaac

SEQ ID NO: 312708 - RNA, 32 nt, Human
agauauggaaggcagaagugaagaaagcauua

SEQ ID NO: 312709 - RNA, 32 nt, Human
agauauggagaaacuagaacucuccuacauug

SEQ ID NO: 312710 - RNA, 23 nt, Human
agauauggagcuggaaaacaaga

SEQ ID NO: 312711 - RNA, 32 nt, Human
agauauggaguuucaccacguuggccaagaca

SEQ ID NO: 312712 - RNA, 32 nt, Human
agauauggcuuaaaggcuuucaagaugaggac

SEQ ID NO: 312713 - RNA, 32 nt, Human
agauaugggguuucaccguguuagccaggaug

SEQ ID NO: 312714 - RNA, 27 nt, Human
agauaugggguuucgccauguuggcca

SEQ ID NO: 312715 - RNA, 32 nt, Human
agauaugggguuucgccauguuggccaggcug

SEQ ID NO: 312716 - RNA, 32 nt, Human
agauaugucauccucagaaugugagcuguuug

SEQ ID NO: 312717 - RNA, 32 nt, Human
agauauguguccagcaaggaguuuacagucaa

SEQ ID NO: 312718 - RNA, 32 nt, Human
agauauguuuuuaaaagcuuaucuaacaaauu

SEQ ID NO: 312719 - RNA, 32 nt, Human
agauauuaugaauaauaucacaggguguacac

SEQ ID NO: 312720 - RNA, 32 nt, Human
agauauuaugaauaguaucacaggguguacac

SEQ ID NO: 312721 - RNA, 32 nt, Human
agauauucaggagccucacacuguucagacgu

SEQ ID NO: 312722 - RNA, 32 nt, Human
agauauucauucuuuuggucaccuagggaucu

SEQ ID NO: 312723 - RNA, 32 nt, Human
agauauuccaccuguaauagcacuuuggaacu

SEQ ID NO: 312724 - RNA, 32 nt, Human
agauauuccaggagugugggugcggccuuaaa

SEQ ID NO: 312725 - RNA, 32 nt, Human
agauauucucccaagagaccucuugauacaaa

SEQ ID NO: 312726 - RNA, 32 nt, Human
agauauugaacaauaaaggagaaugguaccga

SEQ ID NO: 312727 - RNA, 32 nt, Human
agauauugaacugucauuuuugcacauuugaa

SEQ ID NO: 312728 - RNA, 32 nt, Human
agauauugccauacugaaccucauucuaaacu

SEQ ID NO: 312729 - RNA, 32 nt, Human
agauauuuaucuuucaguuuauuugaaagagg

SEQ ID NO: 312730 - RNA, 32 nt, Human
agauauuuguacugaagucugauacagaauua

SEQ ID NO: 312731 - RNA, 32 nt, Human
agauauuuguauuuauuuccagaccaauaaau

SEQ ID NO: 312732 - RNA, 32 nt, Human
agauauuuguuucaguagaugagcacacaaau

SEQ ID NO: 312733 - RNA, 32 nt, Human
agauauuuugcaccuggaugaacaccagggua

SEQ ID NO: 312734 - RNA, 32 nt, Human
agaucaaaaagcuuguuaagacuccuagcugg

SEQ ID NO: 312735 - RNA, 32 nt, Human
agaucaaaaccagccuggccaacauggugaaa

SEQ ID NO: 312736 - RNA, 23 nt, Human
agaucaaacacucaagguuccau

SEQ ID NO: 312737 - RNA, 32 nt, Human
agaucaaaccaccacaggccuaugucugaccu

SEQ ID NO: 312738 - RNA, 31 nt, Human
agaucaaagagaccucucucggggucuggau

SEQ ID NO: 312739 - RNA, 31 nt, Human
agaucaaagagaccucucuuggggucuggau

SEQ ID NO: 312740 - RNA, 32 nt, Human
agaucaaaguggacacugacagcagggagaag

SEQ ID NO: 312741 - RNA, 32 nt, Human
agaucaacaguuacugugacugagucggccca

SEQ ID NO: 312742 - RNA, 32 nt, Human
agaucaagacauguuaaccuuuuauaaauuua

SEQ ID NO: 312743 - RNA, 23 nt, Human
agaucaagagaaccacccggagg

SEQ ID NO: 312744 - RNA, 32 nt, Human
agaucaagagcagaugcaagaaaguuuaugug

SEQ ID NO: 312745 - RNA, 32 nt, Human
agaucaagaucauggcugucucugagcacaag

SEQ ID NO: 312746 - RNA, 32 nt, Human
agaucaagccauugcacuccagccugggcaac

SEQ ID NO: 312747 - RNA, 32 nt, Human
agaucaagccauuguacuccagccuggacaac

SEQ ID NO: 312748 - RNA, 32 nt, Human
agaucaaggaagagagugaggcauuuucugaa

SEQ ID NO: 312749 - RNA, 32 nt, Human
agaucaaggagaagauaguggaacaaaauguu

SEQ ID NO: 312750 - RNA, 32 nt, Human
agaucaagggcaugaaauuggggaagaguguu

SEQ ID NO: 312751 - RNA, 32 nt, Human
agaucaauaagaaauguucaggagagaggaaa

SEQ ID NO: 312752 - RNA, 32 nt, Human
agaucacaaagccaaccaugcccagccccucc

SEQ ID NO: 312753 - RNA, 32 nt, Human
agaucacaaagccaaccaugcccagcccuucc

SEQ ID NO: 312754 - RNA, 32 nt, Human
agaucacaacauugcacuucagccuggugaca

SEQ ID NO: 312755 - RNA, 32 nt, Human
agaucacacaauugcaguccagccugggcagc

SEQ ID NO: 312756 - RNA, 32 nt, Human
agaucacacagccagucagggcagagccggga

SEQ ID NO: 312757 - RNA, 31 nt, Human
agaucacacagcuaggaaaugugaagccugg

SEQ ID NO: 312758 - RNA, 32 nt, Human
agaucacaccaccacuccagccugggcgagag

SEQ ID NO: 312759 - RNA, 32 nt, Human
agaucacaccaccgcacuccacccugggaagc

SEQ ID NO: 312760 - RNA, 32 nt, Human
agaucacaccacuacacuccagccuaggcaac

SEQ ID NO: 312761 - RNA, 32 nt, Human
agaucacaccacuacacuccagccugggcgac

SEQ ID NO: 312762 - RNA, 32 nt, Human
agaucacaccacuacacuccagccugggcgag

SEQ ID NO: 312763 - RNA, 32 nt, Human
agaucacaccacuccacuccagucuggacaac

SEQ ID NO: 312764 - RNA, 32 nt, Human
agaucacaccacugaccucuagccugguggca

SEQ ID NO: 312765 - RNA, 32 nt, Human
agaucacaccacugcaauccagccugggcgac

SEQ ID NO: 312766 - RNA, 32 nt, Human
agaucacaccacugcacuacagccucggcaau

SEQ ID NO: 312767 - RNA, 32 nt, Human
agaucacaccacugcacucagccugggugaca

SEQ ID NO: 312768 - RNA, 32 nt, Human
agaucacaccacugcacuccaaccuggacaac

SEQ ID NO: 312769 - RNA, 32 nt, Human
agaucacaccacugcacuccaaccugggaaac

SEQ ID NO: 312770 - RNA, 32 nt, Human
agaucacaccacugcacuccagccagggcaac

SEQ ID NO: 312771 - RNA, 32 nt, Human
agaucacaccacugcacuccagcccaggugac

SEQ ID NO: 312772 - RNA, 32 nt, Human
agaucacaccacugcacuccagccuaggcaac

SEQ ID NO: 312773 - RNA, 32 nt, Human
agaucacaccacugcacuccagccuggcaaca

SEQ ID NO: 312774 - RNA, 32 nt, Human
agaucacaccacugcacuccagccuggcgaca

SEQ ID NO: 312775 - RNA, 32 nt, Human
agaucacaccacugcacuccagccugggagag

SEQ ID NO: 312776 - RNA, 32 nt, Human
agaucacaccacugcacuccagccugggcaac

SEQ ID NO: 312777 - RNA, 32 nt, Human
agaucacaccacugcacuccagccugggcaau

SEQ ID NO: 312778 - RNA, 32 nt, Human
agaucacaccacugcacuccagccugggcgac

SEQ ID NO: 312779 - RNA, 32 nt, Human
agaucacaccacugcacuccagccugggcggc

SEQ ID NO: 312780 - RNA, 32 nt, Human
agaucacaccacugcacuccagccugggggac

SEQ ID NO: 312781 - RNA, 32 nt, Human
agaucacaccacugcacuccagccugggguga

SEQ ID NO: 312782 - RNA, 32 nt, Human
agaucacaccacugcacuccagccuggguaaa

SEQ ID NO: 312783 - RNA, 32 nt, Human
agaucacaccacugcacuccagccugggugac

SEQ ID NO: 312784 - RNA, 32 nt, Human
agaucacaccacugcacuccagccugggugau

SEQ ID NO: 312785 - RNA, 32 nt, Human
agaucacaccacugcacuccagccuggguggc

SEQ ID NO: 312786 - RNA, 32 nt, Human
agaucacaccacugcacuccagccuggucaac

SEQ ID NO: 312787 - RNA, 32 nt, Human
agaucacaccacugcacuccagccuggugaca

SEQ ID NO: 312788 - RNA, 32 nt, Human
agaucacaccacugcacuccagccugugcgac

SEQ ID NO: 312789 - RNA, 32 nt, Human
agaucacaccacugcacuccagccuuggcgac

SEQ ID NO: 312790 - RNA, 32 nt, Human
agaucacaccacugcacuccagccuuggugac

SEQ ID NO: 312791 - RNA, 32 nt, Human
agaucacaccacugcacuccagucugggcacc

SEQ ID NO: 312792 - RNA, 32 nt, Human
agaucacaccacugcacuccagugugagcaac

SEQ ID NO: 312793 - RNA, 32 nt, Human
agaucacaccacugcacuccauccagccuggg

SEQ ID NO: 312794 - RNA, 32 nt, Human
agaucacaccacugcacuccggccugggcgac

SEQ ID NO: 312795 - RNA, 32 nt, Human
agaucacaccacugcacucuagccugggugac

SEQ ID NO: 312796 - RNA, 32 nt, Human
agaucacaccacugcacuucauccuaggcaac

SEQ ID NO: 312797 - RNA, 32 nt, Human
agaucacaccacugcauuccagccugggcacu

SEQ ID NO: 312798 - RNA, 32 nt, Human
agaucacaccacugcauuccagccugggugac

SEQ ID NO: 312799 - RNA, 32 nt, Human
agaucacaccacugcauucccgccugggcagc

SEQ ID NO: 312800 - RNA, 32 nt, Human
agaucacaccacugcgcucuagccuggacaac

SEQ ID NO: 312801 - RNA, 32 nt, Human
agaucacaccacugcgcucuagccugggcaac

SEQ ID NO: 312802 - RNA, 32 nt, Human
agaucacaccacuggcacuccagccugggcaa

SEQ ID NO: 312803 - RNA, 32 nt, Human
agaucacaccacuguaccacagccugagcaac

SEQ ID NO: 312804 - RNA, 32 nt, Human
agaucacaccacuguacuccagcccggcacuc

SEQ ID NO: 312805 - RNA, 32 nt, Human
agaucacaccacuguacuccagccugagugac

SEQ ID NO: 312806 - RNA, 32 nt, Human
agaucacaccacuguacuccagccuggaugac

SEQ ID NO: 312807 - RNA, 32 nt, Human
agaucacaccacuguacuccagccugggugac

SEQ ID NO: 312808 - RNA, 32 nt, Human
agaucacaccacuguauuccagccugggugac

SEQ ID NO: 312809 - RNA, 32 nt, Human
agaucacaccacugugcucuagccuggacaac

SEQ ID NO: 312810 - RNA, 32 nt, Human
agaucacaccagugcacuccagccugggcgac

SEQ ID NO: 312811 - RNA, 32 nt, Human
agaucacaccaucgcacuccagccuaggcaac

SEQ ID NO: 312812 - RNA, 32 nt, Human
agaucacaccauugcacuccaaccugggcaac

SEQ ID NO: 312813 - RNA, 32 nt, Human
agaucacaccauugcacuccagccuagauaac

SEQ ID NO: 312814 - RNA, 32 nt, Human
agaucacaccauugcacuccagccuaggcaac

SEQ ID NO: 312815 - RNA, 32 nt, Human
agaucacaccauugcacuccagccuaggcaug

SEQ ID NO: 312816 - RNA, 32 nt, Human
agaucacaccauugcacuccagccugagcaac

SEQ ID NO: 312817 - RNA, 32 nt, Human
agaucacaccauugcacuccagccugggaaac

SEQ ID NO: 312818 - RNA, 32 nt, Human
agaucacaccauugcacuccagccugggcaaa

SEQ ID NO: 312819 - RNA, 32 nt, Human
agaucacaccauugcacuccagccugggcaac

SEQ ID NO: 312820 - RNA, 32 nt, Human
agaucacaccauugcacuccagccugggcgac

SEQ ID NO: 312821 - RNA, 32 nt, Human
agaucacaccauugcacugcagccugggugaa

SEQ ID NO: 312822 - RNA, 32 nt, Human
agaucacaccauugcccuccagccugggugac

SEQ ID NO: 312823 - RNA, 32 nt, Human
agaucacaccauugcgcuucagccugggcaac

SEQ ID NO: 312824 - RNA, 32 nt, Human
agaucacaccgcugcacucaagccugggugac

SEQ ID NO: 312825 - RNA, 32 nt, Human
agaucacacgccacugcacuccagccugggug

SEQ ID NO: 312826 - RNA, 32 nt, Human
agaucacacuacugcacuccagccugggcaac

SEQ ID NO: 312827 - RNA, 32 nt, Human
agaucacacuacugcacuccagccugggcgac

SEQ ID NO: 312828 - RNA, 32 nt, Human
agaucacacuacugcacuccugcaugggcgac

SEQ ID NO: 312829 - RNA, 32 nt, Human
agaucacacuacugcauuccagccugagcaac

SEQ ID NO: 312830 - RNA, 32 nt, Human
agaucacacuauugcacuccagccugggcgac

SEQ ID NO: 312831 - RNA, 32 nt, Human
agaucacagcacugcacugcugccugggcgac

SEQ ID NO: 312832 - RNA, 32 nt, Human
agaucacagccaccaaaauccccaaaagccuc

SEQ ID NO: 312833 - RNA, 32 nt, Human
agaucacaggagcacuggaggaggagugggcu

SEQ ID NO: 312834 - RNA, 32 nt, Human
agaucacaucacaggacucuuugcagacacuc

SEQ ID NO: 312835 - RNA, 32 nt, Human
agaucacaucacugcacuccagccuggguaac

SEQ ID NO: 312836 - RNA, 32 nt, Human
agaucacaucacugcacuccauccugggugac

SEQ ID NO: 312837 - RNA, 32 nt, Human
agaucacccaacaccuuugaggcuuaaacacc

SEQ ID NO: 312838 - RNA, 32 nt, Human
agaucaccccacugcauuccagccugggugac

SEQ ID NO: 312839 - RNA, 32 nt, Human
agaucaccccacuguccuccagccugggcaac

SEQ ID NO: 312840 - RNA, 32 nt, Human
agaucaccccauugcacuccagccuggacaac

SEQ ID NO: 312841 - RNA, 32 nt, Human
agaucaccccauuucacuccagccugggcgac

SEQ ID NO: 312842 - RNA, 18 nt, Human
agaucaccugaggucagg

SEQ ID NO: 312843 - RNA, 18 nt, Human
agaucaccugaggucggg

SEQ ID NO: 312844 - RNA, 32 nt, Human
agaucaccuggagucccucgucuguggucuug

SEQ ID NO: 312845 - RNA, 32 nt, Human
agaucaccuuugaucaaaaugguuggugaacc

SEQ ID NO: 312846 - RNA, 32 nt, Human
agaucacgacacugcacuccagccugggcaac

SEQ ID NO: 312847 - RNA, 32 nt, Human
agaucacgccacagcacuccagccugggcgac

SEQ ID NO: 312848 - RNA, 32 nt, Human
agaucacgccacuacacuccagccugggcgac

SEQ ID NO: 312849 - RNA, 32 nt, Human
agaucacgccacugaacuccagccugggagac

SEQ ID NO: 312850 - RNA, 32 nt, Human
agaucacgccacugcaacuccagcuuggguga

SEQ ID NO: 312851 - RNA, 32 nt, Human
agaucacgccacugcacuacagccuggacgac

SEQ ID NO: 312852 - RNA, 32 nt, Human
agaucacgccacugcacuauagccuaggugac

SEQ ID NO: 312853 - RNA, 32 nt, Human
agaucacgccacugcacucaagccugggcgac

SEQ ID NO: 312854 - RNA, 32 nt, Human
agaucacgccacugcacuccaaccugggugac

SEQ ID NO: 312855 - RNA, 32 nt, Human
agaucacgccacugcacuccaacuugggcaac

SEQ ID NO: 312856 - RNA, 32 nt, Human
agaucacgccacugcacuccaccugggcaaca

SEQ ID NO: 312857 - RNA, 32 nt, Human
agaucacgccacugcacuccagcacccugggc

SEQ ID NO: 312858 - RNA, 32 nt, Human
agaucacgccacugcacuccagcccgggcgac

SEQ ID NO: 312859 - RNA, 32 nt, Human
agaucacgccacugcacuccagcccgggcggc

SEQ ID NO: 312860 - RNA, 32 nt, Human
agaucacgccacugcacuccagcccggggaca

SEQ ID NO: 312861 - RNA, 32 nt, Human
agaucacgccacugcacuccagccuaggcgac

SEQ ID NO: 312862 - RNA, 32 nt, Human
agaucacgccacugcacuccagccucggugac

SEQ ID NO: 312863 - RNA, 32 nt, Human
agaucacgccacugcacuccagccugagugac

SEQ ID NO: 312864 - RNA, 32 nt, Human
agaucacgccacugcacuccagccugcggaca

SEQ ID NO: 312865 - RNA, 32 nt, Human
agaucacgccacugcacuccagccuggacaac

SEQ ID NO: 312866 - RNA, 32 nt, Human
agaucacgccacugcacuccagccuggaugac

SEQ ID NO: 312867 - RNA, 32 nt, Human
agaucacgccacugcacuccagccuggcgaca

SEQ ID NO: 312868 - RNA, 32 nt, Human
agaucacgccacugcacuccagccugggagac

SEQ ID NO: 312869 - RNA, 32 nt, Human
agaucacgccacugcacuccagccugggcaac

SEQ ID NO: 312870 - RNA, 32 nt, Human
agaucacgccacugcacuccagccugggccac

SEQ ID NO: 312871 - RNA, 32 nt, Human
agaucacgccacugcacuccagccugggcgac

SEQ ID NO: 312872 - RNA, 32 nt, Human
agaucacgccacugcacuccagccugggcgau

SEQ ID NO: 312873 - RNA, 32 nt, Human
agaucacgccacugcacuccagccuggguaac

SEQ ID NO: 312874 - RNA, 32 nt, Human
agaucacgccacugcacuccagccugggugac

SEQ ID NO: 312875 - RNA, 32 nt, Human
agaucacgccacugcacuccagccuggucaac

SEQ ID NO: 312876 - RNA, 32 nt, Human
agaucacgccacugcacuccagccuggugaca

SEQ ID NO: 312877 - RNA, 32 nt, Human
agaucacgccacugcacuccagccuguugaca

SEQ ID NO: 312878 - RNA, 32 nt, Human
agaucacgccacugcacuccagcuggagugac

SEQ ID NO: 312879 - RNA, 32 nt, Human
agaucacgccacugcacuccagucugggugac

SEQ ID NO: 312880 - RNA, 32 nt, Human
agaucacgccacugcacuccauccagccuggg

SEQ ID NO: 312881 - RNA, 32 nt, Human
agaucacgccacugcacucuagccuaggcgac

SEQ ID NO: 312882 - RNA, 32 nt, Human
agaucacgccacugcacucuagccugggauac

SEQ ID NO: 312883 - RNA, 32 nt, Human
agaucacgccacugcacucuagccugggcaac

SEQ ID NO: 312884 - RNA, 32 nt, Human
agaucacgccacugcacucuagccugggcaau

SEQ ID NO: 312885 - RNA, 32 nt, Human
agaucacgccacugcacuugagccugggcgac

SEQ ID NO: 312886 - RNA, 32 nt, Human
agaucacgccacugcauuacagccuggugcag

SEQ ID NO: 312887 - RNA, 32 nt, Human
agaucacgccacugcauuccagacugggcgac

SEQ ID NO: 312888 - RNA, 32 nt, Human
agaucacgccacugcauuccagccugggcgac

SEQ ID NO: 312889 - RNA, 32 nt, Human
agaucacgccacugcauuccagccuggugaca

SEQ ID NO: 312890 - RNA, 32 nt, Human
agaucacgccacugcauuccagccugugcgac

SEQ ID NO: 312891 - RNA, 32 nt, Human
agaucacgccacugcccuccagccuggggaga

SEQ ID NO: 312892 - RNA, 32 nt, Human
agaucacgccacugcgcuccagccugggcgaa

SEQ ID NO: 312893 - RNA, 32 nt, Human
agaucacgccacuguacuccagccuggaugac

SEQ ID NO: 312894 - RNA, 32 nt, Human
agaucacgccacuguacuccagccugggagac

SEQ ID NO: 312895 - RNA, 32 nt, Human
agaucacgccacugugcuccagccugggcaac

SEQ ID NO: 312896 - RNA, 32 nt, Human
agaucacgccagugcacuccagccugagagac

SEQ ID NO: 312897 - RNA, 32 nt, Human
agaucacgccauuacacuccagccuggcugac

SEQ ID NO: 312898 - RNA, 32 nt, Human
agaucacgccauuacacuccagccugggcaac

SEQ ID NO: 312899 - RNA, 32 nt, Human
agaucacgccauugcacuacagccugggugac

SEQ ID NO: 312900 - RNA, 32 nt, Human
agaucacgccauugcacuccaaccugggugac

SEQ ID NO: 312901 - RNA, 32 nt, Human
agaucacgccauugcacuccagccuaggcaac

SEQ ID NO: 312902 - RNA, 32 nt, Human
agaucacgccauugcacuccagccuaggcgac

SEQ ID NO: 312903 - RNA, 32 nt, Human
agaucacgccauugcacuccagccugggcaac

SEQ ID NO: 312904 - RNA, 32 nt, Human
agaucacgccauugcacuccagccugggcaau

SEQ ID NO: 312905 - RNA, 32 nt, Human
agaucacgccauugcacuccagccugggcgac

SEQ ID NO: 312906 - RNA, 32 nt, Human
agaucacgccauugcacuccagccugggggac

SEQ ID NO: 312907 - RNA, 32 nt, Human
agaucacgccauugcacuccagccugggugac

SEQ ID NO: 312908 - RNA, 32 nt, Human
agaucacgccauugcacuccagccugugcgac

SEQ ID NO: 312909 - RNA, 32 nt, Human
agaucacgccauugcacuccagucugagcaac

SEQ ID NO: 312910 - RNA, 32 nt, Human
agaucacgccauugcacuccagucugguugac

SEQ ID NO: 312911 - RNA, 32 nt, Human
agaucacgccauuguacuccagccuggcaaca

SEQ ID NO: 312912 - RNA, 32 nt, Human
agaucacgccauuguacuccagccugggcaac

SEQ ID NO: 312913 - RNA, 32 nt, Human
agaucacgccauuguacuccagccugggcgac

SEQ ID NO: 312914 - RNA, 32 nt, Human
agaucacgccgcugcacuccagccugagcaca

SEQ ID NO: 312915 - RNA, 32 nt, Human
agaucacgccguugcacuccagccugggcaac

SEQ ID NO: 312916 - RNA, 32 nt, Human
agaucacgccucugcacuccagccugggcaac

SEQ ID NO: 312917 - RNA, 32 nt, Human
agaucacgcuacugcgcuccagccugagugau

SEQ ID NO: 312918 - RNA, 32 nt, Human
agaucacggcacugcgcugcagccugggcaac

SEQ ID NO: 312919 - RNA, 32 nt, Human
agaucacgucacugcacuccagcuugggcaac

SEQ ID NO: 312920 - RNA, 32 nt, Human
agaucacgucacugcacuccggccugggugac

SEQ ID NO: 312921 - RNA, 32 nt, Human
agaucacgucacuguacuccagccugggugac

SEQ ID NO: 312922 - RNA, 32 nt, Human
agaucacgucauugcacuccagccuggucaac

SEQ ID NO: 312923 - RNA, 32 nt, Human
agaucacgucauugcucuccagccugggcaac

SEQ ID NO: 312924 - RNA, 32 nt, Human
agaucacuccacugcacuccagccugggcaac

SEQ ID NO: 312925 - RNA, 32 nt, Human
agaucacuccacugcacuccagccugggcgac

SEQ ID NO: 312926 - RNA, 32 nt, Human
agaucacucggguccccaccuuagaagggucc

SEQ ID NO: 312927 - RNA, 23 nt, Human
agaucacugcaaccuccaccucc

SEQ ID NO: 312928 - RNA, 32 nt, Human
agaucacugcaaccuccaccucccagguucaa

SEQ ID NO: 312929 - RNA, 32 nt, Human
agaucacugcaaccuccgccuccuggguucaa

SEQ ID NO: 312930 - RNA, 32 nt, Human
agaucacugcaaccucugccucccggguucaa

SEQ ID NO: 312931 - RNA, 32 nt, Human
agaucacugcaaccucugccuccuggguucaa

SEQ ID NO: 312932 - RNA, 32 nt, Human
agaucacugcagccucaaacuccugggcucaa

SEQ ID NO: 312933 - RNA, 32 nt, Human
agaucacugcagccuccaacuccugggcucaa

SEQ ID NO: 312934 - RNA, 32 nt, Human
agaucacugccugggaggcuuggcuuaguacu

SEQ ID NO: 312935 - RNA, 32 nt, Human
agaucacugccuugggcuucauggaaaacagg

SEQ ID NO: 312936 - RNA, 19 nt, Human
agaucacuucagccuggga

SEQ ID NO: 312937 - RNA, 32 nt, Human
agaucacuugagcucaggaguaugagacuagc

SEQ ID NO: 312938 - RNA, 32 nt, Human
agaucacuugagcucaggaguucgagaccacc

SEQ ID NO: 312939 - RNA, 18 nt, Human
agaucacuugaggucagg

SEQ ID NO: 312940 - RNA, 32 nt, Human
agaucacuugaguucaagaccagccuggccaa

SEQ ID NO: 312941 - RNA, 32 nt, Human
agaucagaaagaaagagacuuagggaagugga

SEQ ID NO: 312942 - RNA, 21 nt, Human
agaucagaaagaggccucccu

SEQ ID NO: 312943 - RNA, 32 nt, Human
agaucagaagacuacaaaaaugaagcugcucu

SEQ ID NO: 312944 - RNA, 32 nt, Human
agaucagacagugaucacucugaaagauugaa

SEQ ID NO: 312945 - RNA, 32 nt, Human
agaucagaccacugcccuccagccugggcaau

SEQ ID NO: 312946 - RNA, 32 nt, Human
agaucagagaggcagagguggcacaggacagu

SEQ ID NO: 312947 - RNA, 32 nt, Human
agaucagagaugcuguucaucagucccaacaa

SEQ ID NO: 312948 - RNA, 32 nt, Human
agaucagagcaucugacugcccugccuuggag

SEQ ID NO: 312949 - RNA, 32 nt, Human
agaucagagggaggaaggagaccccgggcccc

SEQ ID NO: 312950 - RNA, 32 nt, Human
agaucagcaccucucugcccagaucugcacau

SEQ ID NO: 312951 - RNA, 22 nt, Human
agaucagcagaacacccagagg

SEQ ID NO: 312952 - RNA, 32 nt, Human
agaucagcaggaagccuugcugccugggacau

SEQ ID NO: 312953 - RNA, 32 nt, Human
agaucagcauuuuuagccaucucaaccgcacc

SEQ ID NO: 312954 - RNA, 32 nt, Human
agaucagccuccugucucaucuggaagaccac

SEQ ID NO: 312955 - RNA, 32 nt, Human
agaucagccugaccaacauggagaaaccccau

SEQ ID NO: 312956 - RNA, 32 nt, Human
agaucagccugaccaacauggagaaaccccgu

SEQ ID NO: 312957 - RNA, 32 nt, Human
agaucagccugaccaacauggagaaacccuac

SEQ ID NO: 312958 - RNA, 32 nt, Human
agaucagccugaccaacauggugaaaccccau

SEQ ID NO: 312959 - RNA, 22 nt, Human
agaucagccugaccaauauggu

SEQ ID NO: 312960 - RNA, 22 nt, Human
agaucagccugagcaacauagc

SEQ ID NO: 312961 - RNA, 32 nt, Human
agaucagcgacugccacaucauugaaguggag

SEQ ID NO: 312962 - RNA, 32 nt, Human
agaucagcgcauuuucuacgccugugucauug

SEQ ID NO: 312963 - RNA, 32 nt, Human
agaucagcugaugccggaggguuugaagccgc

SEQ ID NO: 312964 - RNA, 32 nt, Human
agaucagcuggguccagaguuuaaugggcaac

SEQ ID NO: 312965 - RNA, 32 nt, Human
agaucagcuuagguagaacaguucucggugag

SEQ ID NO: 312966 - RNA, 32 nt, Human
agaucaggaauagauuuguucaguucaguauu

SEQ ID NO: 312967 - RNA, 32 nt, Human
agaucaggagagaagguuuggauaucagcugu

SEQ ID NO: 312968 - RNA, 32 nt, Human
agaucaggauguuccgcuucaugagggacgug

SEQ ID NO: 312969 - RNA, 32 nt, Human
agaucaggcaacagugauucuauagaaaggga

SEQ ID NO: 312970 - RNA, 32 nt, Human
agaucaggcacuucagccugggcgacagagcg

SEQ ID NO: 312971 - RNA, 32 nt, Human
agaucaggccacugcacuccagccugaacaac

SEQ ID NO: 312972 - RNA, 32 nt, Human
agaucaggccacugcacuccagccugggcaac

SEQ ID NO: 312973 - RNA, 32 nt, Human
agaucaggccauugcacuccagccugggcaau

SEQ ID NO: 312974 - RNA, 32 nt, Human
agaucaggccauugcacuucagccugggugac

SEQ ID NO: 312975 - RNA, 32 nt, Human
agaucaggcccucggcagagacacaggaagcg

SEQ ID NO: 312976 - RNA, 32 nt, Human
agaucaggcuguuccuuugcugccagguacac

SEQ ID NO: 312977 - RNA, 32 nt, Human
agaucagggacaaccugggaacugaauaacuu

SEQ ID NO: 312978 - RNA, 21 nt, Human
agaucagggcagaauagcaga

SEQ ID NO: 312979 - RNA, 24 nt, Human
agaucagggcccugccacccaggg

SEQ ID NO: 312980 - RNA, 32 nt, Human
agaucaggggcaggcaccggaguugaggcugu

SEQ ID NO: 312981 - RNA, 32 nt, Human
agaucagguauucugcacauucauuccaaggu

SEQ ID NO: 312982 - RNA, 32 nt, Human
agaucaggugucuggagguugcugagcagcgc

SEQ ID NO: 312983 - RNA, 32 nt, Human
agaucagucaaauuggaaaaagugccaagacu

SEQ ID NO: 312984 - RNA, 32 nt, Human
agaucaguccccaaaucacugaauugucccag

SEQ ID NO: 312985 - RNA, 32 nt, Human
agaucagucuucaugugaccugcaguauuuuu

SEQ ID NO: 312986 - RNA, 23 nt, Human
agaucagugccucuggguuguua

SEQ ID NO: 312987 - RNA, 32 nt, Human
agaucaguggagccuucuuucugccaucuugu

SEQ ID NO: 312988 - RNA, 32 nt, Human
agaucaguggagugccuggcaugcugaaccca

SEQ ID NO: 312989 - RNA, 32 nt, Human
agaucaguguaccauuugccucccgggcucaa

SEQ ID NO: 312990 - RNA, 32 nt, Human
agaucauaagguaccugaggccagggaucuug

SEQ ID NO: 312991 - RNA, 32 nt, Human
agaucauaauuuuaugaacagaaagaacucag

SEQ ID NO: 312992 - RNA, 32 nt, Human
agaucauaccacggcacuccagccugggugac

SEQ ID NO: 312993 - RNA, 32 nt, Human
agaucauaccacugcacuccagccuggcgaca

SEQ ID NO: 312994 - RNA, 32 nt, Human
agaucauaccacugcacugcagccugagugac

SEQ ID NO: 312995 - RNA, 32 nt, Human
agaucauaccacuucauuccagccugggugac

SEQ ID NO: 312996 - RNA, 32 nt, Human
agaucauaccauugcacuccagccuaggcaac

SEQ ID NO: 312997 - RNA, 32 nt, Human
agaucauaccauugcacuccagccugggcaac

SEQ ID NO: 312998 - RNA, 32 nt, Human
agaucauacgacucaucggacacuaauuuaua

SEQ ID NO: 312999 - RNA, 32 nt, Human
agaucauacuacugcacuccagccugggcgac

SEQ ID NO: 313000 - RNA, 32 nt, Human
agaucauauagcuaaugaauuaggcaggggag

SEQ ID NO: 313001 - RNA, 32 nt, Human
agaucauaucacugcacuccagccuggcugac

SEQ ID NO: 313002 - RNA, 32 nt, Human
agaucauauuagcuuguugcugaggaugucac

SEQ ID NO: 313003 - RNA, 32 nt, Human
agaucaucaaugcuaacaccucacaaugugug

SEQ ID NO: 313004 - RNA, 21 nt, Human
agaucaucaugggacccugga

SEQ ID NO: 313005 - RNA, 21 nt, Human
agaucauccaagaccauggca

SEQ ID NO: 313006 - RNA, 18 nt, Human
agaucaucugaggucagg

SEQ ID NO: 313007 - RNA, 32 nt, Human
agaucaugacacugcacuccagccugggcaac

SEQ ID NO: 313008 - RNA, 32 nt, Human
agaucaugagcccuuuuucuccaguaguacag

SEQ ID NO: 313009 - RNA, 32 nt, Human
agaucaugcagagcgaagccaccaagacuuua

SEQ ID NO: 313010 - RNA, 32 nt, Human
agaucaugccacaucacuccagccugggcaac

SEQ ID NO: 313011 - RNA, 32 nt, Human
agaucaugccaccgcacuccagccugggcaac

SEQ ID NO: 313012 - RNA, 32 nt, Human
agaucaugccaccgcacuucagccugggugac

SEQ ID NO: 313013 - RNA, 32 nt, Human
agaucaugccacuacacuccagccuggcgaca

SEQ ID NO: 313014 - RNA, 32 nt, Human
agaucaugccacuccacuccagucugggcgac

SEQ ID NO: 313015 - RNA, 32 nt, Human
agaucaugccacugaacuccagccugggcaac

SEQ ID NO: 313016 - RNA, 32 nt, Human
agaucaugccacugaacuccagccugggugac

SEQ ID NO: 313017 - RNA, 32 nt, Human
agaucaugccacugcaaucuagccugggugac

SEQ ID NO: 313018 - RNA, 32 nt, Human
agaucaugccacugcacccaucuugggcaaca

SEQ ID NO: 313019 - RNA, 32 nt, Human
agaucaugccacugcaccccagcaccuggcua

SEQ ID NO: 313020 - RNA, 32 nt, Human
agaucaugccacugcaccccagccugggcaac

SEQ ID NO: 313021 - RNA, 32 nt, Human
agaucaugccacugcacccuagcuuggguggc

SEQ ID NO: 313022 - RNA, 32 nt, Human
agaucaugccacugcacuagagccugggcaac

SEQ ID NO: 313023 - RNA, 32 nt, Human
agaucaugccacugcacuccaaccugggcgac

SEQ ID NO: 313024 - RNA, 32 nt, Human
agaucaugccacugcacuccaaccugggugac

SEQ ID NO: 313025 - RNA, 32 nt, Human
agaucaugccacugcacuccagcccaggugac

SEQ ID NO: 313026 - RNA, 32 nt, Human
agaucaugccacugcacuccagccuaugugac

SEQ ID NO: 313027 - RNA, 32 nt, Human
agaucaugccacugcacuccagccugagugac

SEQ ID NO: 313028 - RNA, 32 nt, Human
agaucaugccacugcacuccagccuggacaac

SEQ ID NO: 313029 - RNA, 32 nt, Human
agaucaugccacugcacuccagccuggaugac

SEQ ID NO: 313030 - RNA, 32 nt, Human
agaucaugccacugcacuccagccugggcaac

SEQ ID NO: 313031 - RNA, 32 nt, Human
agaucaugccacugcacuccagccugggcaau

SEQ ID NO: 313032 - RNA, 32 nt, Human
agaucaugccacugcacuccagccugggcagc

SEQ ID NO: 313033 - RNA, 32 nt, Human
agaucaugccacugcacuccagccugggcaug

SEQ ID NO: 313034 - RNA, 32 nt, Human
agaucaugccacugcacuccagccugggccag

SEQ ID NO: 313035 - RNA, 32 nt, Human
agaucaugccacugcacuccagccugggcgac

SEQ ID NO: 313036 - RNA, 32 nt, Human
agaucaugccacugcacuccagccugggcgau

SEQ ID NO: 313037 - RNA, 32 nt, Human
agaucaugccacugcacuccagccugggcggc

SEQ ID NO: 313038 - RNA, 32 nt, Human
agaucaugccacugcacuccagccugggugac

SEQ ID NO: 313039 - RNA, 32 nt, Human
agaucaugccacugcacuccauccugggcaac

SEQ ID NO: 313040 - RNA, 32 nt, Human
agaucaugccacugcacuccggccuaggugac

SEQ ID NO: 313041 - RNA, 32 nt, Human
agaucaugccacugcacuccugccugggugac

SEQ ID NO: 313042 - RNA, 32 nt, Human
agaucaugccacugcacugcacuccagccugg

SEQ ID NO: 313043 - RNA, 32 nt, Human
agaucaugccacugcacugcagcccgggcgac

SEQ ID NO: 313044 - RNA, 32 nt, Human
agaucaugccacugcacuuuagccugggugac

SEQ ID NO: 313045 - RNA, 32 nt, Human
agaucaugccacugcaugccagccugggcaac

SEQ ID NO: 313046 - RNA, 32 nt, Human
agaucaugccacugcauucuagccugggcaac

SEQ ID NO: 313047 - RNA, 32 nt, Human
agaucaugccacuggacuccagccugggugaa

SEQ ID NO: 313048 - RNA, 32 nt, Human
agaucaugccacuguacuccagccuaggugac

SEQ ID NO: 313049 - RNA, 32 nt, Human
agaucaugccagugcacuccagccugggcaac

SEQ ID NO: 313050 - RNA, 32 nt, Human
agaucaugccauggcacuccauccugggugac

SEQ ID NO: 313051 - RNA, 32 nt, Human
agaucaugccauuacacuccagccugggcgac

SEQ ID NO: 313052 - RNA, 32 nt, Human
agaucaugccauuacuccagccugggugacau

SEQ ID NO: 313053 - RNA, 32 nt, Human
agaucaugccauuauacuccagccugggugac

SEQ ID NO: 313054 - RNA, 32 nt, Human
agaucaugccauugcacagcagccugggugac

SEQ ID NO: 313055 - RNA, 32 nt, Human
agaucaugccauugcacuccaaccugggugac

SEQ ID NO: 313056 - RNA, 32 nt, Human
agaucaugccauugcacuccagcccagguaac

SEQ ID NO: 313057 - RNA, 32 nt, Human
agaucaugccauugcacuccagcccggguuac

SEQ ID NO: 313058 - RNA, 32 nt, Human
agaucaugccauugcacuccagccuaggcaac

SEQ ID NO: 313059 - RNA, 32 nt, Human
agaucaugccauugcacuccagccugagugac

SEQ ID NO: 313060 - RNA, 32 nt, Human
agaucaugccauugcacuccagccuggacaac

SEQ ID NO: 313061 - RNA, 32 nt, Human
agaucaugccauugcacuccagccugggcaac

SEQ ID NO: 313062 - RNA, 32 nt, Human
agaucaugccauugcacuccagccugggcgac

SEQ ID NO: 313063 - RNA, 32 nt, Human
agaucaugccauugcacuccagccugggugac

SEQ ID NO: 313064 - RNA, 32 nt, Human
agaucaugccauugcacuccagccugggugau

SEQ ID NO: 313065 - RNA, 32 nt, Human
agaucaugccauugcacuccagcuugggugac

SEQ ID NO: 313066 - RNA, 32 nt, Human
agaucaugccauugcacuccagucugggcgac

SEQ ID NO: 313067 - RNA, 32 nt, Human
agaucaugccauugcacuccgacucugggcaa

SEQ ID NO: 313068 - RNA, 32 nt, Human
agaucaugccauugcauuccagccuaggcaac

SEQ ID NO: 313069 - RNA, 32 nt, Human
agaucaugccauugcauuccagccuuggcgac

SEQ ID NO: 313070 - RNA, 32 nt, Human
agaucaugccccugcauuccagccuaggcgac

SEQ ID NO: 313071 - RNA, 30 nt, Human
agaucaugccgcugcauuccagccugggug

SEQ ID NO: 313072 - RNA, 32 nt, Human
agaucaugccguuguacuccagcuugggcaac

SEQ ID NO: 313073 - RNA, 32 nt, Human
agaucaugccuacugcacuccagccugggcaa

SEQ ID NO: 313074 - RNA, 32 nt, Human
agaucaugccuguaaucccaguacuuugggag

SEQ ID NO: 313075 - RNA, 32 nt, Human
agaucaugcuacugcacuccagccugggcgac

SEQ ID NO: 313076 - RNA, 32 nt, Human
agaucaugcuacugcacuccagccugggugac

SEQ ID NO: 313077 - RNA, 32 nt, Human
agaucaugcuacugcacuccagcuuagguggc

SEQ ID NO: 313078 - RNA, 32 nt, Human
agaucaugcuacugcacucuagccugagcgac

SEQ ID NO: 313079 - RNA, 32 nt, Human
agaucaugcuacugcaugccagccugggugac

SEQ ID NO: 313080 - RNA, 32 nt, Human
agaucaugcuagugcgcuccagccugggcaac

SEQ ID NO: 313081 - RNA, 30 nt, Human
agaucauggaagggaagugguugcugugua

SEQ ID NO: 313082 - RNA, 32 nt, Human
agaucaugggacugcacuccagccugggugac

SEQ ID NO: 313083 - RNA, 32 nt, Human
agaucauggugacaguggaugggaaaaaguga

SEQ ID NO: 313084 - RNA, 32 nt, Human
agaucaugucacugcacuccagccugggugac

SEQ ID NO: 313085 - RNA, 32 nt, Human
agaucaugucacugcacucuagcuugggagac

SEQ ID NO: 313086 - RNA, 32 nt, Human
agaucaugucacuguacuccagccugggcaac

SEQ ID NO: 313087 - RNA, 32 nt, Human
agaucaugugacccuauacucuugccuuggug

SEQ ID NO: 313088 - RNA, 32 nt, Human
agaucauguucucaccaauggucugccacuuc

SEQ ID NO: 313089 - RNA, 32 nt, Human
agaucauuaacacaucauuauaaugcuaaaau

SEQ ID NO: 313090 - RNA, 32 nt, Human
agaucauucacucauacaucuggccguugaug

SEQ ID NO: 313091 - RNA, 32 nt, Human
agaucauuccauuacacuccagccugggcacc

SEQ ID NO: 313092 - RNA, 32 nt, Human
agaucauugcacuccagccugggcaauaagag

SEQ ID NO: 313093 - RNA, 32 nt, Human
agaucauuucaccucacuccagccugggugac

SEQ ID NO: 313094 - RNA, 32 nt, Human
agaucauuucuacugcuuuucuuucugcuuca

SEQ ID NO: 313095 - RNA, 32 nt, Human
agaucauuucuuuccaguuuuuggggaaaugg

SEQ ID NO: 313096 - RNA, 32 nt, Human
agauccaaccagccuuggauaggaaauauuug

SEQ ID NO: 313097 - RNA, 32 nt, Human
agauccaagcauccugagcaacucuugauuau

SEQ ID NO: 313098 - RNA, 32 nt, Human
agauccacaguuacaagugacacgcaugcaca

SEQ ID NO: 313099 - RNA, 32 nt, Human
agauccacaucacccacgacccugccacuguu

SEQ ID NO: 313100 - RNA, 32 nt, Human
agauccacuacagcuacaacgaggagaaagau

SEQ ID NO: 313101 - RNA, 24 nt, Human
agauccacuagaucgucgucucca

SEQ ID NO: 313102 - RNA, 32 nt, Human
agauccacuugaggcccgacuucagaguggac

SEQ ID NO: 313103 - RNA, 32 nt, Human
agauccagaagcagggaaagaaaacggcggau

SEQ ID NO: 313104 - RNA, 32 nt, Human
agauccagaaugcaugugucucuucccacgca

SEQ ID NO: 313105 - RNA, 32 nt, Human
agauccagacaucagggcugggcacagcgguu

SEQ ID NO: 313106 - RNA, 32 nt, Human
agauccagaguguuacuggcuuacaaauugga

SEQ ID NO: 313107 - RNA, 32 nt, Human
agauccagcaggaguucuggucuuacacgaaa

SEQ ID NO: 313108 - RNA, 32 nt, Human
agauccagccacagcacuccagccugggugac

SEQ ID NO: 313109 - RNA, 32 nt, Human
agauccagccugggcgacagagccagacucuu

SEQ ID NO: 313110 - RNA, 32 nt, Human
agauccagcuacucgggaggcugaggcagggg

SEQ ID NO: 313111 - RNA, 32 nt, Human
agauccaggagggauggaauguucuuuaaaau

SEQ ID NO: 313112 - RNA, 32 nt, Human
agauccaggaguugaagaccagccugggcaac

SEQ ID NO: 313113 - RNA, 32 nt, Human
agauccaggcuucucccggaccuggacuaggg

SEQ ID NO: 313114 - RNA, 32 nt, Human
agauccagggccugggaaagaggggcugaggc

SEQ ID NO: 313115 - RNA, 32 nt, Human
agauccagguggagcuugaccugaaguaccag

SEQ ID NO: 313116 - RNA, 32 nt, Human
agauccaguuuggaaaugagagaggacuagca

SEQ ID NO: 313117 - RNA, 32 nt, Human
agauccauccacuccaccccaggcuggcucca

SEQ ID NO: 313118 - RNA, 31 nt, Human
agauccaugcugcugcugacucggagcccca

SEQ ID NO: 313119 - RNA, 32 nt, Human
agaucccaacucccaugaccucuggcuucagu

SEQ ID NO: 313120 - RNA, 32 nt, Human
agaucccaccacugcacuccagccugggcgac

SEQ ID NO: 313121 - RNA, 32 nt, Human
agaucccaccauugcacuccagccugggcaac

SEQ ID NO: 313122 - RNA, 32 nt, Human
agaucccagcacuucggaaggccgagguggga

SEQ ID NO: 313123 - RNA, 32 nt, Human
agaucccaggagagaagagcucaggagauggg

SEQ ID NO: 313124 - RNA, 32 nt, Human
agaucccagggucaggagagaccccucuguau

SEQ ID NO: 313125 - RNA, 32 nt, Human
agaucccagucugaguuauacccuggagcagc

SEQ ID NO: 313126 - RNA, 32 nt, Human
agaucccaguuuccuuuugcccuucacuauuu

SEQ ID NO: 313127 - RNA, 32 nt, Human
agaucccaugccaggugguagcugugaguacc

SEQ ID NO: 313128 - RNA, 32 nt, Human
agaucccauggcugaugccuggaacacaaugu

SEQ ID NO: 313129 - RNA, 32 nt, Human
agauccccaacaagaccgagacccuggacgag

SEQ ID NO: 313130 - RNA, 32 nt, Human
agauccccaacugcuccagccucugccgcugc

SEQ ID NO: 313131 - RNA, 32 nt, Human
agauccccagaacagggagagacugcauacaa

SEQ ID NO: 313132 - RNA, 32 nt, Human
agauccccagacuucauagaauacucagggaa

SEQ ID NO: 313133 - RNA, 32 nt, Human
agauccccagagucagggagggcagagggugg

SEQ ID NO: 313134 - RNA, 21 nt, Human
agauccccagcuaagacgcca

SEQ ID NO: 313135 - RNA, 23 nt, Human
agauccccaggcugcucucucca

SEQ ID NO: 313136 - RNA, 32 nt, Human
agauccccaggggacugggugcaguggcucau

SEQ ID NO: 313137 - RNA, 21 nt, Human
agaucccccaauucucuggaa

SEQ ID NO: 313138 - RNA, 32 nt, Human
agaucccccaucucuggcagugcagugugccu

SEQ ID NO: 313139 - RNA, 32 nt, Human
agaucccccgaccgcacuccagccugggcgac

SEQ ID NO: 313140 - RNA, 32 nt, Human
agaucccccucccauuuaacuguccucacagg

SEQ ID NO: 313141 - RNA, 32 nt, Human
agauccccgccuguggcacaccccagagccag

SEQ ID NO: 313142 - RNA, 32 nt, Human
agauccccggggcuggggcccagcacaacugc

SEQ ID NO: 313143 - RNA, 32 nt, Human
agauccccucaggacugcaacaggcuugugca

SEQ ID NO: 313144 - RNA, 18 nt, Human
agauccccuccccugccc

SEQ ID NO: 313145 - RNA, 32 nt, Human
agauccccugcuccuguuguguucuguuguaa

SEQ ID NO: 313146 - RNA, 32 nt, Human
agauccccugcugaacagauauacagaguucu

SEQ ID NO: 313147 - RNA, 32 nt, Human
agauccccuggaaacccaccucucuggaaggc

SEQ ID NO: 313148 - RNA, 32 nt, Human
agauccccuucccacccucuccguuggccuca

SEQ ID NO: 313149 - RNA, 32 nt, Human
agaucccgccacucacuccagccuggauaaaa

SEQ ID NO: 313150 - RNA, 32 nt, Human
agaucccgccacugcacgccagccugggcgac

SEQ ID NO: 313151 - RNA, 32 nt, Human
agaucccgccacugcacuccagacugggcgac

SEQ ID NO: 313152 - RNA, 32 nt, Human
agaucccgccacugcacuccagcccaggugac

SEQ ID NO: 313153 - RNA, 32 nt, Human
agaucccgccacugcacuccagccugggcgac

SEQ ID NO: 313154 - RNA, 32 nt, Human
agaucccuaucaucuugggaaacaguagccca

SEQ ID NO: 313155 - RNA, 32 nt, Human
agaucccucacaugugccguucacaacagguu

SEQ ID NO: 313156 - RNA, 32 nt, Human
agaucccuccagggccucauugucaguccugu

SEQ ID NO: 313157 - RNA, 22 nt, Human
agaucccugccagguuuuggaa

SEQ ID NO: 313158 - RNA, 32 nt, Human
agaucccugccugggacccuuuccuggggcuc

SEQ ID NO: 313159 - RNA, 23 nt, Human
agaucccugccuuacaauuggaa

SEQ ID NO: 313160 - RNA, 32 nt, Human
agaucccuggacccaguaagaauaagaaggaa

SEQ ID NO: 313161 - RNA, 32 nt, Human
agaucccuugcucccucucugccugcaaucac

SEQ ID NO: 313162 - RNA, 32 nt, Human
agauccgagccgggcuggcugcagagaaaccg

SEQ ID NO: 313163 - RNA, 32 nt, Human
agauccgcaaagugcuuuguuccuggaaauca

SEQ ID NO: 313164 - RNA, 32 nt, Human
agauccgcaauguggagcagcagccacugcac

SEQ ID NO: 313165 - RNA, 32 nt, Human
agauccgccacugcacuccagccugggugaca

SEQ ID NO: 313166 - RNA, 32 nt, Human
agauccgcuuuggcagcgacccugccaccuac

SEQ ID NO: 313167 - RNA, 22 nt, Human
agauccggccgccagcacuucc

SEQ ID NO: 313168 - RNA, 32 nt, Human
agauccggcgcgcgucuuccaccacaaugccu

SEQ ID NO: 313169 - RNA, 32 nt, Human
agauccgggagcugcagucccagaucuccaac

SEQ ID NO: 313170 - RNA, 22 nt, Human
agauccgggccccaggcugcug

SEQ ID NO: 313171 - RNA, 32 nt, Human
agauccuaccuguucagacacagccauccuuc

SEQ ID NO: 313172 - RNA, 32 nt, Human
agauccuaucauuccuugucuggauuauuuca

SEQ ID NO: 313173 - RNA, 32 nt, Human
agauccucaaauagcaaguuucaaauuuuacu

SEQ ID NO: 313174 - RNA, 18 nt, Human
agauccuccagccuccag

SEQ ID NO: 313175 - RNA, 32 nt, Human
agauccuccaguuccuccuuuucaucccuuau

SEQ ID NO: 313176 - RNA, 32 nt, Human
agauccuccugccucagccuccuaaguaccug

SEQ ID NO: 313177 - RNA, 32 nt, Human
agauccuccugccucagccuccugagcagcug

SEQ ID NO: 313178 - RNA, 32 nt, Human
agauccuccuuccaggccccaggcuggaugcu

SEQ ID NO: 313179 - RNA, 32 nt, Human
agauccucugccagggcagugcagaagggaaa

SEQ ID NO: 313180 - RNA, 32 nt, Human
agauccucuucuacccugcucugcaccugugc

SEQ ID NO: 313181 - RNA, 32 nt, Human
agauccugaaaccucugucauggaaaaguacc

SEQ ID NO: 313182 - RNA, 32 nt, Human
agauccugauugugcuuuauacauuccucccc

SEQ ID NO: 313183 - RNA, 32 nt, Human
agauccugcacaagguggaguguacuggcuac

SEQ ID NO: 313184 - RNA, 32 nt, Human
agauccugcauuucuaacaagcucccagguaa

SEQ ID NO: 313185 - RNA, 32 nt, Human
agauccugccacugcacuccagccugggcaac

SEQ ID NO: 313186 - RNA, 32 nt, Human
agauccugccacugcacuccagccugugccac

SEQ ID NO: 313187 - RNA, 32 nt, Human
agauccugcccagcaauggccuuucccuucua

SEQ ID NO: 313188 - RNA, 32 nt, Human
agauccugccucccacagucacccugcuccca

SEQ ID NO: 313189 - RNA, 32 nt, Human
agauccuggaaccagggcugaggcucgcaucc

SEQ ID NO: 313190 - RNA, 32 nt, Human
agauccuggccugugguagugguagcaguuuu

SEQ ID NO: 313191 - RNA, 32 nt, Human
agauccuguccucaggaccagaagcacgucuc

SEQ ID NO: 313192 - RNA, 19 nt, Human
agauccugucucuacaaaa

SEQ ID NO: 313193 - RNA, 18 nt, Human
agauccugugcaggcugc

SEQ ID NO: 313194 - RNA, 32 nt, Human
agauccugugggcugaagagaggucaggcuuu

SEQ ID NO: 313195 - RNA, 32 nt, Human
agauccuguguguuucucuguacccagcugac

SEQ ID NO: 313196 - RNA, 32 nt, Human
agauccuuccuucucuccuccuucuucauucu

SEQ ID NO: 313197 - RNA, 32 nt, Human
agauccuucuccagauccccaggguuucuuug

SEQ ID NO: 313198 - RNA, 32 nt, Human
agauccuugaggaaucuuugucuuccacaaug

SEQ ID NO: 313199 - RNA, 32 nt, Human
agauccuugccaucugucagugucugccugcg

SEQ ID NO: 313200 - RNA, 32 nt, Human
agauccuugggaagacaguagaucagacagga

SEQ ID NO: 313201 - RNA, 32 nt, Human
agauccuugucauuuacaauuuacagaucaug

SEQ ID NO: 313202 - RNA, 32 nt, Human
agaucgaaccauuguacuccagccugggugac

SEQ ID NO: 313203 - RNA, 32 nt, Human
agaucgaagaugagaaaaaggaugaagaaaaa

SEQ ID NO: 313204 - RNA, 32 nt, Human
agaucgacaucaugccacccugggcaaaagag

SEQ ID NO: 313205 - RNA, 32 nt, Human
agaucgaccccaaugcccagugugugaagcau

SEQ ID NO: 313206 - RNA, 32 nt, Human
agaucgagccacugcacuccagccugggcagc

SEQ ID NO: 313207 - RNA, 32 nt, Human
agaucgagccacugcacuccagccugggcgac

SEQ ID NO: 313208 - RNA, 32 nt, Human
agaucgagccacugcacuccagccugggugac

SEQ ID NO: 313209 - RNA, 32 nt, Human
agaucgagccacugcacuccagccugggugau

SEQ ID NO: 313210 - RNA, 32 nt, Human
agaucgagccacugcacuccugggcaacagag

SEQ ID NO: 313211 - RNA, 32 nt, Human
agaucgagccacugcauuccagccugggcgaa

SEQ ID NO: 313212 - RNA, 32 nt, Human
agaucgagccauugcacuccagccuggacagc

SEQ ID NO: 313213 - RNA, 32 nt, Human
agaucgagccauugcacuccagccugggcaac

SEQ ID NO: 313214 - RNA, 32 nt, Human
agaucgauugagcccaggaguucgagaccagc

SEQ ID NO: 313215 - RNA, 32 nt, Human
agaucgcaacacuacacuccagccugggcgac

SEQ ID NO: 313216 - RNA, 32 nt, Human
agaucgcaacacugcacuccagccugggcgac

SEQ ID NO: 313217 - RNA, 32 nt, Human
agaucgcaacacugcacuccagccugggugac

SEQ ID NO: 313218 - RNA, 32 nt, Human
agaucgcaacacugcccuccagccugggcaac

SEQ ID NO: 313219 - RNA, 32 nt, Human
agaucgcaacauugcacuccaggcugggcagc

SEQ ID NO: 313220 - RNA, 31 nt, Human
agaucgcacagcuaguaaauggcagaaguag

SEQ ID NO: 313221 - RNA, 32 nt, Human
agaucgcaccacagcacuccagcccaggcggc

SEQ ID NO: 313222 - RNA, 32 nt, Human
agaucgcaccaccacacuccagccugggugac

SEQ ID NO: 313223 - RNA, 32 nt, Human
agaucgcaccacggcacuccagccuggcgaca

SEQ ID NO: 313224 - RNA, 32 nt, Human
agaucgcaccacugaacuccagccugggcgac

SEQ ID NO: 313225 - RNA, 32 nt, Human
agaucgcaccacugcaccccagccugggcaac

SEQ ID NO: 313226 - RNA, 32 nt, Human
agaucgcaccacugcaccccagcgugggcaac

SEQ ID NO: 313227 - RNA, 32 nt, Human
agaucgcaccacugcacgcacuccagccuggg

SEQ ID NO: 313228 - RNA, 32 nt, Human
agaucgcaccacugcacuacagccugggcgac

SEQ ID NO: 313229 - RNA, 32 nt, Human
agaucgcaccacugcacucaagccugggcgac

SEQ ID NO: 313230 - RNA, 32 nt, Human
agaucgcaccacugcacuccaaccugggcaac

SEQ ID NO: 313231 - RNA, 32 nt, Human
agaucgcaccacugcacuccaaccugggugac

SEQ ID NO: 313232 - RNA, 32 nt, Human
agaucgcaccacugcacuccaaucugggcaag

SEQ ID NO: 313233 - RNA, 32 nt, Human
agaucgcaccacugcacuccagcaugagugac

SEQ ID NO: 313234 - RNA, 32 nt, Human
agaucgcaccacugcacuccagccuggaagac

SEQ ID NO: 313235 - RNA, 32 nt, Human
agaucgcaccacugcacuccagccuggacaac

SEQ ID NO: 313236 - RNA, 32 nt, Human
agaucgcaccacugcacuccagccugggagac

SEQ ID NO: 313237 - RNA, 32 nt, Human
agaucgcaccacugcacuccagccugggagau

SEQ ID NO: 313238 - RNA, 32 nt, Human
agaucgcaccacugcacuccagccugggcaac

SEQ ID NO: 313239 - RNA, 32 nt, Human
agaucgcaccacugcacuccagccugggcgaa

SEQ ID NO: 313240 - RNA, 32 nt, Human
agaucgcaccacugcacuccagccugggcgac

SEQ ID NO: 313241 - RNA, 32 nt, Human
agaucgcaccacugcacuccagccugggcggc

SEQ ID NO: 313242 - RNA, 32 nt, Human
agaucgcaccacugcacuccagccugggugac

SEQ ID NO: 313243 - RNA, 32 nt, Human
agaucgcaccacugcacuccagccugggugau

SEQ ID NO: 313244 - RNA, 32 nt, Human
agaucgcaccacugcacuccagccuggucgac

SEQ ID NO: 313245 - RNA, 32 nt, Human
agaucgcaccacugcacuccagccuggugaca

SEQ ID NO: 313246 - RNA, 32 nt, Human
agaucgcaccacugcacuccagccugguuaca

SEQ ID NO: 313247 - RNA, 32 nt, Human
agaucgcaccacugcacuccagcuuggaggaa

SEQ ID NO: 313248 - RNA, 32 nt, Human
agaucgcaccacugcacuccagucuggcaaca

SEQ ID NO: 313249 - RNA, 32 nt, Human
agaucgcaccacugcacucccgcuuggcaaua

SEQ ID NO: 313250 - RNA, 32 nt, Human
agaucgcaccacugcacucuagccugggugaa

SEQ ID NO: 313251 - RNA, 32 nt, Human
agaucgcaccacugcacucuagccuuggcaac

SEQ ID NO: 313252 - RNA, 32 nt, Human
agaucgcaccacugcacucuagcuugggcaac

SEQ ID NO: 313253 - RNA, 32 nt, Human
agaucgcaccacugcacugcagccuggcaaca

SEQ ID NO: 313254 - RNA, 32 nt, Human
agaucgcaccacugcacuucagccugggugac

SEQ ID NO: 313255 - RNA, 32 nt, Human
agaucgcaccacugcauuccagccuaagcaau

SEQ ID NO: 313256 - RNA, 32 nt, Human
agaucgcaccacugcauuccagccugggcaac

SEQ ID NO: 313257 - RNA, 32 nt, Human
agaucgcaccacugcauuccagccugggugac

SEQ ID NO: 313258 - RNA, 32 nt, Human
agaucgcaccacugcauugcagccuggugaca

SEQ ID NO: 313259 - RNA, 32 nt, Human
agaucgcaccacugcccuccagccuaggugac

SEQ ID NO: 313260 - RNA, 32 nt, Human
agaucgcaccacugcucuccagccuggcgaca

SEQ ID NO: 313261 - RNA, 32 nt, Human
agaucgcaccacuguacuccagccugggcaac

SEQ ID NO: 313262 - RNA, 32 nt, Human
agaucgcaccacuguacuccagccugggcgac

SEQ ID NO: 313263 - RNA, 32 nt, Human
agaucgcaccacuguacuccagccugggugac

SEQ ID NO: 313264 - RNA, 32 nt, Human
agaucgcaccacuugcacugcagccugagaga

SEQ ID NO: 313265 - RNA, 32 nt, Human
agaucgcaccagugcacuccagccuuggugac

SEQ ID NO: 313266 - RNA, 32 nt, Human
agaucgcaccauuacacuccagccugggcaac

SEQ ID NO: 313267 - RNA, 32 nt, Human
agaucgcaccauugcacuccagcccgggcaac

SEQ ID NO: 313268 - RNA, 32 nt, Human
agaucgcaccauugcacuccagccuaggcaaa

SEQ ID NO: 313269 - RNA, 32 nt, Human
agaucgcaccauugcacuccagccuggaugau

SEQ ID NO: 313270 - RNA, 32 nt, Human
agaucgcaccauugcacuccagccuggcgacc

SEQ ID NO: 313271 - RNA, 32 nt, Human
agaucgcaccauugcacuccagccugggcaac

SEQ ID NO: 313272 - RNA, 32 nt, Human
agaucgcaccauugcacuccagccugugcaac

SEQ ID NO: 313273 - RNA, 32 nt, Human
agaucgcaccauugcacuccagcugggagaca

SEQ ID NO: 313274 - RNA, 32 nt, Human
agaucgcaccauugcacuccugccugggcaac

SEQ ID NO: 313275 - RNA, 32 nt, Human
agaucgcaccauugcacuucagccugggcaac

SEQ ID NO: 313276 - RNA, 32 nt, Human
agaucgcaccauugcauuccagccugggcaac

SEQ ID NO: 313277 - RNA, 32 nt, Human
agaucgcaccauugcccuccagccugggcaac

SEQ ID NO: 313278 - RNA, 32 nt, Human
agaucgcaccauuguacuccagccugggcaac

SEQ ID NO: 313279 - RNA, 32 nt, Human
agaucgcaccccugcacuccagccugggcaac

SEQ ID NO: 313280 - RNA, 32 nt, Human
agaucgcacccuuacacuucagccugggcgac

SEQ ID NO: 313281 - RNA, 32 nt, Human
agaucgcaccgcugcacuccagccugggcaac

SEQ ID NO: 313282 - RNA, 32 nt, Human
agaucgcaccgcugcacuccagccugggcaag

SEQ ID NO: 313283 - RNA, 32 nt, Human
agaucgcaccgcugcacuccagccugggugac

SEQ ID NO: 313284 - RNA, 32 nt, Human
agaucgcaccgcugcccuccagccugggcaac

SEQ ID NO: 313285 - RNA, 32 nt, Human
agaucgcacuacugcacuccagccugggugac

SEQ ID NO: 313286 - RNA, 32 nt, Human
agaucgcacugcuguacccagccugggccaca

SEQ ID NO: 313287 - RNA, 32 nt, Human
agaucgcagcacuguacuccagccugggcgau

SEQ ID NO: 313288 - RNA, 32 nt, Human
agaucgcagugaauuuuccuuggggaacaucg

SEQ ID NO: 313289 - RNA, 32 nt, Human
agaucgcaguggacugugugauugaccugaca

SEQ ID NO: 313290 - RNA, 32 nt, Human
agaucgcaucacugcaguccagccuggaugac

SEQ ID NO: 313291 - RNA, 32 nt, Human
agaucgcaugcuacugcacuccagccugggag

SEQ ID NO: 313292 - RNA, 32 nt, Human
agaucgcauuacugcacuccagccuggguaac

SEQ ID NO: 313293 - RNA, 32 nt, Human
agaucgccacugcacuccagccugggaaauag

SEQ ID NO: 313294 - RNA, 32 nt, Human
agaucgccagaacuuaggacacaugggaugga

SEQ ID NO: 313295 - RNA, 32 nt, Human
agaucgcccacugcacuccagguugggcuaca

SEQ ID NO: 313296 - RNA, 32 nt, Human
agaucgccccacuacacuccagccuggucaac

SEQ ID NO: 313297 - RNA, 32 nt, Human
agaucgccccacugcacuccagccuggcaaua

SEQ ID NO: 313298 - RNA, 32 nt, Human
agaucgccccacugcacuccagccugggcgac

SEQ ID NO: 313299 - RNA, 32 nt, Human
agaucgccccacugcacuccagccuggugacu

SEQ ID NO: 313300 - RNA, 32 nt, Human
agaucgccccauuguacuccagccuggggaac

SEQ ID NO: 313301 - RNA, 32 nt, Human
agaucgcccugcugcacuccagccugggcaac

SEQ ID NO: 313302 - RNA, 32 nt, Human
agaucgcccugcugcacuccagccugggugac

SEQ ID NO: 313303 - RNA, 20 nt, Human
agaucgccugagcccaggag

SEQ ID NO: 313304 - RNA, 32 nt, Human
agaucgccuggagcuucugucuaccuuuaaug

SEQ ID NO: 313305 - RNA, 32 nt, Human
agaucgcgacacugcacuccagccugggcaac

SEQ ID NO: 313306 - RNA, 32 nt, Human
agaucgcgacacugcgcuccagccugggcaac

SEQ ID NO: 313307 - RNA, 32 nt, Human
agaucgcgcaauugcgcuccagccugggcgac

SEQ ID NO: 313308 - RNA, 32 nt, Human
agaucgcgcacaccuaugacauuuacaacgca

SEQ ID NO: 313309 - RNA, 32 nt, Human
agaucgcgcagcugcacuccagccugggcaac

SEQ ID NO: 313310 - RNA, 32 nt, Human
agaucgcgccaaugcacuccagccugggcgac

SEQ ID NO: 313311 - RNA, 32 nt, Human
agaucgcgccaccacacuccagccugagcgac

SEQ ID NO: 313312 - RNA, 32 nt, Human
agaucgcgccacccacuccagcccgggugaca

SEQ ID NO: 313313 - RNA, 32 nt, Human
agaucgcgccaccgcacuccagccucgccgac

SEQ ID NO: 313314 - RNA, 32 nt, Human
agaucgcgccaccgcauuccagccugggcgac

SEQ ID NO: 313315 - RNA, 32 nt, Human
agaucgcgccaccgcccuccagccugggcgac

SEQ ID NO: 313316 - RNA, 32 nt, Human
agaucgcgccacggcacuccagccugggagac

SEQ ID NO: 313317 - RNA, 32 nt, Human
agaucgcgccacuacuccagccugggugacaa

SEQ ID NO: 313318 - RNA, 32 nt, Human
agaucgcgccacuauacuccagccugggcaac

SEQ ID NO: 313319 - RNA, 32 nt, Human
agaucgcgccacugcaacccagccugggugac

SEQ ID NO: 313320 - RNA, 32 nt, Human
agaucgcgccacugcacagccagggcgacggu

SEQ ID NO: 313321 - RNA, 32 nt, Human
agaucgcgccacugcacucaagccugggcaac

SEQ ID NO: 313322 - RNA, 32 nt, Human
agaucgcgccacugcacuccaaccugggugac

SEQ ID NO: 313323 - RNA, 32 nt, Human
agaucgcgccacugcacuccacccuggguaac

SEQ ID NO: 313324 - RNA, 32 nt, Human
agaucgcgccacugcacuccagcagucugggc

SEQ ID NO: 313325 - RNA, 32 nt, Human
agaucgcgccacugcacuccagccuagacgac

SEQ ID NO: 313326 - RNA, 32 nt, Human
agaucgcgccacugcacuccagccuaggggac

SEQ ID NO: 313327 - RNA, 32 nt, Human
agaucgcgccacugcacuccagccuaggugac

SEQ ID NO: 313328 - RNA, 32 nt, Human
agaucgcgccacugcacuccagccucagcaau

SEQ ID NO: 313329 - RNA, 32 nt, Human
agaucgcgccacugcacuccagccucggcaac

SEQ ID NO: 313330 - RNA, 32 nt, Human
agaucgcgccacugcacuccagccucggugac

SEQ ID NO: 313331 - RNA, 32 nt, Human
agaucgcgccacugcacuccagccuggacgac

SEQ ID NO: 313332 - RNA, 32 nt, Human
agaucgcgccacugcacuccagccuggcaaca

SEQ ID NO: 313333 - RNA, 32 nt, Human
agaucgcgccacugcacuccagccuggcgaca

SEQ ID NO: 313334 - RNA, 32 nt, Human
agaucgcgccacugcacuccagccugggcaac

SEQ ID NO: 313335 - RNA, 32 nt, Human
agaucgcgccacugcacuccagccugggcgac

SEQ ID NO: 313336 - RNA, 32 nt, Human
agaucgcgccacugcacuccagccugggcgag

SEQ ID NO: 313337 - RNA, 32 nt, Human
agaucgcgccacugcacuccagccugggcgau

SEQ ID NO: 313338 - RNA, 32 nt, Human
agaucgcgccacugcacuccagccuggguaac

SEQ ID NO: 313339 - RNA, 32 nt, Human
agaucgcgccacugcacuccagccugggugac

SEQ ID NO: 313340 - RNA, 32 nt, Human
agaucgcgccacugcacuccagccugggugau

SEQ ID NO: 313341 - RNA, 32 nt, Human
agaucgcgccacugcacuccagccuggugaca

SEQ ID NO: 313342 - RNA, 32 nt, Human
agaucgcgccacugcacuccagcuugggcaac

SEQ ID NO: 313343 - RNA, 32 nt, Human
agaucgcgccacugcacuccaggccuggguga

SEQ ID NO: 313344 - RNA, 32 nt, Human
agaucgcgccacugcacuccaggcugggcgac

SEQ ID NO: 313345 - RNA, 32 nt, Human
agaucgcgccacugcacuccagucugggcaac

SEQ ID NO: 313346 - RNA, 32 nt, Human
agaucgcgccacugcacuccaguuugggcaac

SEQ ID NO: 313347 - RNA, 32 nt, Human
agaucgcgccacugcacuccggccugaugaca

SEQ ID NO: 313348 - RNA, 32 nt, Human
agaucgcgccacugcacuccugccugggacac

SEQ ID NO: 313349 - RNA, 32 nt, Human
agaucgcgccacugcacucuagccggagugac

SEQ ID NO: 313350 - RNA, 32 nt, Human
agaucgcgccacugcacucuagccugagugac

SEQ ID NO: 313351 - RNA, 32 nt, Human
agaucgcgccacugcacucuagccugggccau

SEQ ID NO: 313352 - RNA, 32 nt, Human
agaucgcgccacugcacucuagccugggugac

SEQ ID NO: 313353 - RNA, 32 nt, Human
agaucgcgccacugcaguccagccugggcaac

SEQ ID NO: 313354 - RNA, 32 nt, Human
agaucgcgccacugcccuccagccugggcgac

SEQ ID NO: 313355 - RNA, 32 nt, Human
agaucgcgccacugcgcuucagccugggagac

SEQ ID NO: 313356 - RNA, 32 nt, Human
agaucgcgccacugcucuccagccuggguggc

SEQ ID NO: 313357 - RNA, 32 nt, Human
agaucgcgccacuggacuccagccuggacaac

SEQ ID NO: 313358 - RNA, 32 nt, Human
agaucgcgccacugggcuccagccugggcgac

SEQ ID NO: 313359 - RNA, 32 nt, Human
agaucgcgccacuguacuccagccuggacaac

SEQ ID NO: 313360 - RNA, 32 nt, Human
agaucgcgccacuguacuccagccugggcaac

SEQ ID NO: 313361 - RNA, 32 nt, Human
agaucgcgccacugugcuccagccugggcaac

SEQ ID NO: 313362 - RNA, 32 nt, Human
agaucgcgccaguacacuccagccuggguaac

SEQ ID NO: 313363 - RNA, 32 nt, Human
agaucgcgccagugcacuccagccugggcaag

SEQ ID NO: 313364 - RNA, 32 nt, Human
agaucgcgccauagcacuccagccuuagccug

SEQ ID NO: 313365 - RNA, 32 nt, Human
agaucgcgccaucacacuccagccuaggcgac

SEQ ID NO: 313366 - RNA, 32 nt, Human
agaucgcgccaucgcacuccagccugggcaac

SEQ ID NO: 313367 - RNA, 32 nt, Human
agaucgcgccaucgcacuccagccugggugac

SEQ ID NO: 313368 - RNA, 32 nt, Human
agaucgcgccauuacacuucagccugggcaac

SEQ ID NO: 313369 - RNA, 32 nt, Human
agaucgcgccauucuacuccagccugggccac

SEQ ID NO: 313370 - RNA, 32 nt, Human
agaucgcgccauugcacuccaaccuaggugac

SEQ ID NO: 313371 - RNA, 32 nt, Human
agaucgcgccauugcacuccaaccuggacgac

SEQ ID NO: 313372 - RNA, 32 nt, Human
agaucgcgccauugcacuccagccuggacaac

SEQ ID NO: 313373 - RNA, 32 nt, Human
agaucgcgccauugcacuccagccuggccuau

SEQ ID NO: 313374 - RNA, 32 nt, Human
agaucgcgccauugcacuccagccugggcaac

SEQ ID NO: 313375 - RNA, 32 nt, Human
agaucgcgccauugcacuccagccugggcgac

SEQ ID NO: 313376 - RNA, 32 nt, Human
agaucgcgccauugcacuccagccugggcggc

SEQ ID NO: 313377 - RNA, 32 nt, Human
agaucgcgccauugcacuccagccugggggac

SEQ ID NO: 313378 - RNA, 32 nt, Human
agaucgcgccauugcacuccagccuggguaac

SEQ ID NO: 313379 - RNA, 32 nt, Human
agaucgcgccauugcacuccagccugggugac

SEQ ID NO: 313380 - RNA, 32 nt, Human
agaucgcgccauugcacuccauccuggacaac

SEQ ID NO: 313381 - RNA, 32 nt, Human
agaucgcgccauugcacucccgccugggcgac

SEQ ID NO: 313382 - RNA, 32 nt, Human
agaucgcgccauugcacuccggccuggggaca

SEQ ID NO: 313383 - RNA, 32 nt, Human
agaucgcgccauuguacuccagccugggcgau

SEQ ID NO: 313384 - RNA, 32 nt, Human
agaucgcgccccugcacuccagccugggugac

SEQ ID NO: 313385 - RNA, 32 nt, Human
agaucgcgccgcugcacuccagccugggccac

SEQ ID NO: 313386 - RNA, 32 nt, Human
agaucgcgccgcugcacuccagccugggcgac

SEQ ID NO: 313387 - RNA, 32 nt, Human
agaucgcgccgcugcacuccagccugggcggc

SEQ ID NO: 313388 - RNA, 32 nt, Human
agaucgcgccgcugcacuccagccugggugac

SEQ ID NO: 313389 - RNA, 32 nt, Human
agaucgcgccgcugcauuccagccugggugac

SEQ ID NO: 313390 - RNA, 32 nt, Human
agaucgcgccguugcacuccagccugggcaac

SEQ ID NO: 313391 - RNA, 32 nt, Human
agaucgcgccuuugcacuccagccuggaagac

SEQ ID NO: 313392 - RNA, 32 nt, Human
agaucgcgcuacugcacuccagccugggcgac

SEQ ID NO: 313393 - RNA, 32 nt, Human
agaucgcgcuacugcacuccagccugggugac

SEQ ID NO: 313394 - RNA, 32 nt, Human
agaucgcgcuacugcauuccagccugggcgcc

SEQ ID NO: 313395 - RNA, 32 nt, Human
agaucgcgcuauugcacuccagccugggugac

SEQ ID NO: 313396 - RNA, 32 nt, Human
agaucgcgcugcugcacuccagccugggugac

SEQ ID NO: 313397 - RNA, 32 nt, Human
agaucgcggcauugcacuucagccugggcgau

SEQ ID NO: 313398 - RNA, 32 nt, Human
agaucgcggcgcugcacucuagccugggugac

SEQ ID NO: 313399 - RNA, 32 nt, Human
agaucgcgucacugcacuccagccuggacaac

SEQ ID NO: 313400 - RNA, 32 nt, Human
agaucgcgucacugcacuccagccugggagac

SEQ ID NO: 313401 - RNA, 32 nt, Human
agaucgcgucacugcacuccagccugggcgac

SEQ ID NO: 313402 - RNA, 32 nt, Human
agaucgcgucacugcacuccagcgugggcgac

SEQ ID NO: 313403 - RNA, 32 nt, Human
agaucgcgucaguacacuccagccugggcaac

SEQ ID NO: 313404 - RNA, 32 nt, Human
agaucgcgucauugcacuccagccugggcaac

SEQ ID NO: 313405 - RNA, 32 nt, Human
agaucgcgucgcuggacuccagcccgggcgac

SEQ ID NO: 313406 - RNA, 32 nt, Human
agaucgcuccacugcacuccagcccaggugac

SEQ ID NO: 313407 - RNA, 32 nt, Human
agaucgcuccacugcacuccagccugggugac

SEQ ID NO: 313408 - RNA, 32 nt, Human
agaucgcuccauugcacuccagccugggugac

SEQ ID NO: 313409 - RNA, 32 nt, Human
agaucgcucccacugcacuccagccugggcga

SEQ ID NO: 313410 - RNA, 32 nt, Human
agaucgcugcacuccagccugggcgacaagag

SEQ ID NO: 313411 - RNA, 32 nt, Human
agaucgggccacggcacuccagccugggugac

SEQ ID NO: 313412 - RNA, 32 nt, Human
agaucgggccacugcacuccagcuugggugac

SEQ ID NO: 313413 - RNA, 32 nt, Human
agaucgggccgcugcacuccagccugggggac

SEQ ID NO: 313414 - RNA, 21 nt, Human
agaucgggcuugggcccagag

SEQ ID NO: 313415 - RNA, 32 nt, Human
agaucgggugucagaggacgaccaaucuuagg

SEQ ID NO: 313416 - RNA, 32 nt, Human
agaucggucaggcgcaacaccccucauuauag

SEQ ID NO: 313417 - RNA, 32 nt, Human
agaucgguccuaaauuggaaugggaugucuuc

SEQ ID NO: 313418 - RNA, 32 nt, Human
agaucguaccacugcacuccagccugggcgac

SEQ ID NO: 313419 - RNA, 32 nt, Human
agaucguaccacugcacuccagccugggugac

SEQ ID NO: 313420 - RNA, 32 nt, Human
agaucguaccacugcacuccagucugggcgac

SEQ ID NO: 313421 - RNA, 32 nt, Human
agaucguaccacugcacucuggccugggcaac

SEQ ID NO: 313422 - RNA, 32 nt, Human
agaucguaccauugcacuccagccugggcaac

SEQ ID NO: 313423 - RNA, 32 nt, Human
agaucguaccgcugcacuccagccugggugau

SEQ ID NO: 313424 - RNA, 32 nt, Human
agaucguaccuauugcacuccauccuggauga

SEQ ID NO: 313425 - RNA, 32 nt, Human
agaucguagcacugcaguccagccugggcgac

SEQ ID NO: 313426 - RNA, 32 nt, Human
agaucguccacaccacacccucuuucagggac

SEQ ID NO: 313427 - RNA, 32 nt, Human
agaucgucccacugcacuccagcccgggcaac

SEQ ID NO: 313428 - RNA, 32 nt, Human
agaucgucccacugcacuccagccugggcaac

SEQ ID NO: 313429 - RNA, 32 nt, Human
agaucgugacacugcacuccagccugggcgac

SEQ ID NO: 313430 - RNA, 32 nt, Human
agaucgugacacugcacuucagccuggcugac

SEQ ID NO: 313431 - RNA, 32 nt, Human
agaucgugcaacugcacuccaaccugggcaac

SEQ ID NO: 313432 - RNA, 32 nt, Human
agaucgugcaacugcacuccagccugggcaaa

SEQ ID NO: 313433 - RNA, 32 nt, Human
agaucgugccaaugcacuccauccugggcaaa

SEQ ID NO: 313434 - RNA, 32 nt, Human
agaucgugccaccuacacuccagccuggguga

SEQ ID NO: 313435 - RNA, 32 nt, Human
agaucgugccacuacacuccagccugggcaaa

SEQ ID NO: 313436 - RNA, 32 nt, Human
agaucgugccacuacacuccagccugggggac

SEQ ID NO: 313437 - RNA, 32 nt, Human
agaucgugccacugcacaccauccuggaugac

SEQ ID NO: 313438 - RNA, 32 nt, Human
agaucgugccacugcaccacuccagccugggc

SEQ ID NO: 313439 - RNA, 32 nt, Human
agaucgugccacugcaccccagccugggcaac

SEQ ID NO: 313440 - RNA, 32 nt, Human
agaucgugccacugcaccguagccugggugau

SEQ ID NO: 313441 - RNA, 32 nt, Human
agaucgugccacugcacgccagccugggcaac

SEQ ID NO: 313442 - RNA, 32 nt, Human
agaucgugccacugcacucaagccugggugac

SEQ ID NO: 313443 - RNA, 32 nt, Human
agaucgugccacugcacucaagccuggugaca

SEQ ID NO: 313444 - RNA, 32 nt, Human
agaucgugccacugcacuccagacugggggag

SEQ ID NO: 313445 - RNA, 32 nt, Human
agaucgugccacugcacuccagacuuggugac

SEQ ID NO: 313446 - RNA, 32 nt, Human
agaucgugccacugcacuccagagccugggcg

SEQ ID NO: 313447 - RNA, 32 nt, Human
agaucgugccacugcacuccagcccaggcaac

SEQ ID NO: 313448 - RNA, 32 nt, Human
agaucgugccacugcacuccagccugaagaca

SEQ ID NO: 313449 - RNA, 32 nt, Human
agaucgugccacugcacuccagccugagcaac

SEQ ID NO: 313450 - RNA, 32 nt, Human
agaucgugccacugcacuccagccugcgggac

SEQ ID NO: 313451 - RNA, 32 nt, Human
agaucgugccacugcacuccagccuggacaac

SEQ ID NO: 313452 - RNA, 32 nt, Human
agaucgugccacugcacuccagccuggauuac

SEQ ID NO: 313453 - RNA, 32 nt, Human
agaucgugccacugcacuccagccuggcgaca

SEQ ID NO: 313454 - RNA, 32 nt, Human
agaucgugccacugcacuccagccugggagac

SEQ ID NO: 313455 - RNA, 32 nt, Human
agaucgugccacugcacuccagccugggcaac

SEQ ID NO: 313456 - RNA, 32 nt, Human
agaucgugccacugcacuccagccugggcacc

SEQ ID NO: 313457 - RNA, 32 nt, Human
agaucgugccacugcacuccagccugggccac

SEQ ID NO: 313458 - RNA, 32 nt, Human
agaucgugccacugcacuccagccugggcgac

SEQ ID NO: 313459 - RNA, 32 nt, Human
agaucgugccacugcacuccagccugggcuac

SEQ ID NO: 313460 - RNA, 32 nt, Human
agaucgugccacugcacuccagccuggggaac

SEQ ID NO: 313461 - RNA, 32 nt, Human
agaucgugccacugcacuccagccugggugac

SEQ ID NO: 313462 - RNA, 32 nt, Human
agaucgugccacugcacuccagccugggugau

SEQ ID NO: 313463 - RNA, 32 nt, Human
agaucgugccacugcacuccagccugggugga

SEQ ID NO: 313464 - RNA, 32 nt, Human
agaucgugccacugcacuccagccuggucaac

SEQ ID NO: 313465 - RNA, 32 nt, Human
agaucgugccacugcacuccagccuggugaca

SEQ ID NO: 313466 - RNA, 32 nt, Human
agaucgugccacugcacuccagccuggugaga

SEQ ID NO: 313467 - RNA, 32 nt, Human
agaucgugccacugcacuccagccugguugac

SEQ ID NO: 313468 - RNA, 32 nt, Human
agaucgugccacugcacuccagccuugagaca

SEQ ID NO: 313469 - RNA, 32 nt, Human
agaucgugccacugcacuccagccuuggugac

SEQ ID NO: 313470 - RNA, 32 nt, Human
agaucgugccacugcacuccagcuugggcaac

SEQ ID NO: 313471 - RNA, 32 nt, Human
agaucgugccacugcacuccaggcugggcgac

SEQ ID NO: 313472 - RNA, 32 nt, Human
agaucgugccacugcacuccaggcugggugac

SEQ ID NO: 313473 - RNA, 32 nt, Human
agaucgugccacugcacuccagucugggcaac

SEQ ID NO: 313474 - RNA, 32 nt, Human
agaucgugccacugcacuccagucugggugac

SEQ ID NO: 313475 - RNA, 32 nt, Human
agaucgugccacugcacuccauccuggacgac

SEQ ID NO: 313476 - RNA, 32 nt, Human
agaucgugccacugcacucccagccugggcaa

SEQ ID NO: 313477 - RNA, 32 nt, Human
agaucgugccacugcacuccggccugggugau

SEQ ID NO: 313478 - RNA, 32 nt, Human
agaucgugccacugcacucuagccugggcgac

SEQ ID NO: 313479 - RNA, 32 nt, Human
agaucgugccacugcacucuagccugggugac

SEQ ID NO: 313480 - RNA, 32 nt, Human
agaucgugccacugcacucuauccuggguaac

SEQ ID NO: 313481 - RNA, 32 nt, Human
agaucgugccacugcacuucagccugggugac

SEQ ID NO: 313482 - RNA, 32 nt, Human
agaucgugccacugcauuccagccugagcgac

SEQ ID NO: 313483 - RNA, 32 nt, Human
agaucgugccacugcauuccagccugggcgac

SEQ ID NO: 313484 - RNA, 32 nt, Human
agaucgugccacugcauuccagccugguugac

SEQ ID NO: 313485 - RNA, 32 nt, Human
agaucgugccacugcgcuccagccugggugac

SEQ ID NO: 313486 - RNA, 32 nt, Human
agaucgugccacugcgcuccagccuggguggc

SEQ ID NO: 313487 - RNA, 32 nt, Human
agaucgugccacugcucuccagccugggugac

SEQ ID NO: 313488 - RNA, 32 nt, Human
agaucgugccacuguacuucagccugagcaac

SEQ ID NO: 313489 - RNA, 32 nt, Human
agaucgugccacuucacuccagccugggcaaa

SEQ ID NO: 313490 - RNA, 32 nt, Human
agaucgugccagugcacuccagccugggugac

SEQ ID NO: 313491 - RNA, 32 nt, Human
agaucgugccauuacacuccagccugggcgaa

SEQ ID NO: 313492 - RNA, 32 nt, Human
agaucgugccauuccacuccagccugggcaac

SEQ ID NO: 313493 - RNA, 32 nt, Human
agaucgugccauugcacuacagccugggcaac

SEQ ID NO: 313494 - RNA, 32 nt, Human
agaucgugccauugcacuccagcccaggcgac

SEQ ID NO: 313495 - RNA, 32 nt, Human
agaucgugccauugcacuccagcccggaugac

SEQ ID NO: 313496 - RNA, 32 nt, Human
agaucgugccauugcacuccagccuaggcaac

SEQ ID NO: 313497 - RNA, 32 nt, Human
agaucgugccauugcacuccagccuaggcaag

SEQ ID NO: 313498 - RNA, 32 nt, Human
agaucgugccauugcacuccagccuaggcaau

SEQ ID NO: 313499 - RNA, 32 nt, Human
agaucgugccauugcacuccagccuggaugac

SEQ ID NO: 313500 - RNA, 32 nt, Human
agaucgugccauugcacuccagccuggccaca

SEQ ID NO: 313501 - RNA, 32 nt, Human
agaucgugccauugcacuccagccuggcgaca

SEQ ID NO: 313502 - RNA, 32 nt, Human
agaucgugccauugcacuccagccugggcaac

SEQ ID NO: 313503 - RNA, 32 nt, Human
agaucgugccauugcacuccagccugggcaau

SEQ ID NO: 313504 - RNA, 32 nt, Human
agaucgugccauugcacuccagccugggcgac

SEQ ID NO: 313505 - RNA, 32 nt, Human
agaucgugccauugcacuccagccugggugac

SEQ ID NO: 313506 - RNA, 32 nt, Human
agaucgugccauugcacuccagucugggagac

SEQ ID NO: 313507 - RNA, 32 nt, Human
agaucgugccauugcacuccagucuggguaag

SEQ ID NO: 313508 - RNA, 32 nt, Human
agaucgugccauugcacuccggccugggcaac

SEQ ID NO: 313509 - RNA, 32 nt, Human
agaucgugccauugcauuccagccugggagac

SEQ ID NO: 313510 - RNA, 32 nt, Human
agaucgugccauugcgcuccagccuaggugac

SEQ ID NO: 313511 - RNA, 32 nt, Human
agaucgugccauugcgcuccagccugggcaac

SEQ ID NO: 313512 - RNA, 32 nt, Human
agaucgugccauuguauuccagccucggcaac

SEQ ID NO: 313513 - RNA, 32 nt, Human
agaucgugccauugugcuccagccugggcaac

SEQ ID NO: 313514 - RNA, 32 nt, Human
agaucgugccguugcacuccagccugggcaac

SEQ ID NO: 313515 - RNA, 32 nt, Human
agaucgugccguugcacuccagccugggcgac

SEQ ID NO: 313516 - RNA, 32 nt, Human
agaucgugccucugcacuccaaccugggugau

SEQ ID NO: 313517 - RNA, 32 nt, Human
agaucgugccuuugcacuccagcguggaagac

SEQ ID NO: 313518 - RNA, 32 nt, Human
agaucgugcuacugcacuccagccccagcugg

SEQ ID NO: 313519 - RNA, 32 nt, Human
agaucgugcuacugcacuccagccugggggac

SEQ ID NO: 313520 - RNA, 32 nt, Human
agaucgugcuacugcacuccagucugggugac

SEQ ID NO: 313521 - RNA, 32 nt, Human
agaucgugcuacugcaguccagccugggcuac

SEQ ID NO: 313522 - RNA, 32 nt, Human
agaucgugcuauugcacuccagccugggcgac

SEQ ID NO: 313523 - RNA, 32 nt, Human
agaucgugcugcugcacuccagccugggcaau

SEQ ID NO: 313524 - RNA, 32 nt, Human
agaucguggagacagagcgcauguacguacag

SEQ ID NO: 313525 - RNA, 32 nt, Human
agaucguggagagagccagggcccagaagaac

SEQ ID NO: 313526 - RNA, 32 nt, Human
agaucguggccacugcaauccagccugggcga

SEQ ID NO: 313527 - RNA, 31 nt, Human
agaucguggggacagagaugggugauggaac

SEQ ID NO: 313528 - RNA, 32 nt, Human
agaucgugggucuguguguccgugaagugagu

SEQ ID NO: 313529 - RNA, 32 nt, Human
agaucgugucacuacacuccaggcugggugac

SEQ ID NO: 313530 - RNA, 32 nt, Human
agaucgugucacugcacuccagccuggcgaca

SEQ ID NO: 313531 - RNA, 32 nt, Human
agaucgugucacugcacuccagccugggcgac

SEQ ID NO: 313532 - RNA, 32 nt, Human
agaucgugucacugcacuccagccugggugac

SEQ ID NO: 313533 - RNA, 32 nt, Human
agaucgugucacugcacuccagccuggugaca

SEQ ID NO: 313534 - RNA, 32 nt, Human
agaucuaaccauuuucauacucuuaacugauu

SEQ ID NO: 313535 - RNA, 32 nt, Human
agaucuaagaauggacagucugccuccucaag

SEQ ID NO: 313536 - RNA, 32 nt, Human
agaucuaagccauaguuucuaguggggacagu

SEQ ID NO: 313537 - RNA, 32 nt, Human
agaucuaagggcaccguagcucuggaaucugg

SEQ ID NO: 313538 - RNA, 32 nt, Human
agaucuacaaugaugccagcugugacauuucu

SEQ ID NO: 313539 - RNA, 21 nt, Human
agaucuacagccacccagagg

SEQ ID NO: 313540 - RNA, 32 nt, Human
agaucuaccaaacugaaggggucuccagauua

SEQ ID NO: 313541 - RNA, 20 nt, Human
agaucuagagacuccaggag

SEQ ID NO: 313542 - RNA, 32 nt, Human
agaucuagcaauuggaaaguuaguaagccuaa

SEQ ID NO: 313543 - RNA, 32 nt, Human
agaucuagccugcccugccugccugcccuggg

SEQ ID NO: 313544 - RNA, 32 nt, Human
agaucuaggcaccagccccacccacuggcugu

SEQ ID NO: 313545 - RNA, 32 nt, Human
agaucuaugauggaaaauuaaaggaacuggga

SEQ ID NO: 313546 - RNA, 32 nt, Human
agaucuauggcauaaauaggcacacaaaaagg

SEQ ID NO: 313547 - RNA, 32 nt, Human
agaucucaccacugaacuccagccugggcgac

SEQ ID NO: 313548 - RNA, 32 nt, Human
agaucucaccacugcacuccagccugggcagc

SEQ ID NO: 313549 - RNA, 32 nt, Human
agaucucaccauuacacuccagccugggcgac

SEQ ID NO: 313550 - RNA, 32 nt, Human
agaucucaccauugcacuccagccugggcgac

SEQ ID NO: 313551 - RNA, 32 nt, Human
agaucucagacuccugggcucaagcgauccuc

SEQ ID NO: 313552 - RNA, 32 nt, Human
agaucucauaaauauaacaguauuaaggccau

SEQ ID NO: 313553 - RNA, 32 nt, Human
agaucucauuucagaagaacggcaugaacagu

SEQ ID NO: 313554 - RNA, 32 nt, Human
agaucuccaacaugucuguggugcuguccaug

SEQ ID NO: 313555 - RNA, 32 nt, Human
agaucuccaagaacucacuaacacagaauagc

SEQ ID NO: 313556 - RNA, 28 nt, Human
agaucuccaauugcugccuccauugaug

SEQ ID NO: 313557 - RNA, 21 nt, Human
agaucuccagaacuuuuucau

SEQ ID NO: 313558 - RNA, 21 nt, Human
agaucuccagcuccacacaug

SEQ ID NO: 313559 - RNA, 32 nt, Human
agaucucccuucucaucuccccacgccccguc

SEQ ID NO: 313560 - RNA, 32 nt, Human
agaucuccucaccucuugcccuucaccuccug

SEQ ID NO: 313561 - RNA, 32 nt, Human
agaucuccuccuccuucaugcagccaggauug

SEQ ID NO: 313562 - RNA, 32 nt, Human
agaucuccugugcaccugacuuuggagacgau

SEQ ID NO: 313563 - RNA, 32 nt, Human
agaucuccuugccugaccccuggaccuggaaa

SEQ ID NO: 313564 - RNA, 32 nt, Human
agaucucgccacugcacuccaggcugggcgac

SEQ ID NO: 313565 - RNA, 32 nt, Human
agaucucgccacugcgcuccagccugggcaac

SEQ ID NO: 313566 - RNA, 32 nt, Human
agaucucgccacugugcuccagccugggcaac

SEQ ID NO: 313567 - RNA, 32 nt, Human
agaucucgccauugcacuccauucugggcaac

SEQ ID NO: 313568 - RNA, 32 nt, Human
agaucucgugauccgcccgccugggccuacua

SEQ ID NO: 313569 - RNA, 32 nt, Human
agaucucuaaucuccauuucucucucauauau

SEQ ID NO: 313570 - RNA, 32 nt, Human
agaucucucacugucucaguuguaauuuugcg

SEQ ID NO: 313571 - RNA, 23 nt, Human
agaucucucagcaaauccccugg

SEQ ID NO: 313572 - RNA, 21 nt, Human
agaucucugcauccaucauca

SEQ ID NO: 313573 - RNA, 32 nt, Human
agaucucuugaacucuggguucucccagcccc

SEQ ID NO: 313574 - RNA, 32 nt, Human
agaucucuuuauuggggaugggagaaauaggg

SEQ ID NO: 313575 - RNA, 32 nt, Human
agaucucuuuuuaucauauaugacauuaaggc

SEQ ID NO: 313576 - RNA, 32 nt, Human
agaucugaagagcacaguaggaagggaggcgg

SEQ ID NO: 313577 - RNA, 32 nt, Human
agaucugaagccgagcaacuugcccaaguccu

SEQ ID NO: 313578 - RNA, 32 nt, Human
agaucugaaggacauuugggagagggaugccc

SEQ ID NO: 313579 - RNA, 32 nt, Human
agaucugaagugaaauugugcaaagucaccug

SEQ ID NO: 313580 - RNA, 32 nt, Human
agaucugacaguugcccuaggguuaaagucuc

SEQ ID NO: 313581 - RNA, 32 nt, Human
agaucugacuggcugcaucucccuuuccucug

SEQ ID NO: 313582 - RNA, 32 nt, Human
agaucugcaccaagcacucacacacaugcaau

SEQ ID NO: 313583 - RNA, 32 nt, Human
agaucugcagagcccugagcagggacucuuuc

SEQ ID NO: 313584 - RNA, 32 nt, Human
agaucugcauuccgacugccuaugaacgggug

SEQ ID NO: 313585 - RNA, 32 nt, Human
agaucugccacugcacuccagccuggcgacag

SEQ ID NO: 313586 - RNA, 32 nt, Human
agaucugccccaguaauuuaccaaagguagca

SEQ ID NO: 313587 - RNA, 32 nt, Human
agaucugcccucccaggggucuccaauuuucu

SEQ ID NO: 313588 - RNA, 32 nt, Human
agaucugccugggagcagacauugaccuuuga

SEQ ID NO: 313589 - RNA, 32 nt, Human
agaucugcgguuuccccucuacccugccuccu

SEQ ID NO: 313590 - RNA, 32 nt, Human
agaucugcuauaacuaacuaacucagcuucua

SEQ ID NO: 313591 - RNA, 32 nt, Human
agaucugcucacugccaggcuccucuccccuu

SEQ ID NO: 313592 - RNA, 32 nt, Human
agaucugcugcuuucaaucacacccacugccu

SEQ ID NO: 313593 - RNA, 32 nt, Human
agaucugcuucuucaucuugacauguaaugaa

SEQ ID NO: 313594 - RNA, 32 nt, Human
agaucuggagacuuaaaaagaaaacaaaaaca

SEQ ID NO: 313595 - RNA, 32 nt, Human
agaucuggagcugcugcucccugcugcggaga

SEQ ID NO: 313596 - RNA, 32 nt, Human
agaucuggaggcagcagugcuggauggaauug

SEQ ID NO: 313597 - RNA, 32 nt, Human
agaucuggagugaaaaggcagcagaugcaaca

SEQ ID NO: 313598 - RNA, 32 nt, Human
agaucuggaucuggcccugcugcuucucagac

SEQ ID NO: 313599 - RNA, 32 nt, Human
agaucuggauuuacauaugcucuguuagcugc

SEQ ID NO: 313600 - RNA, 32 nt, Human
agaucuggccauugcacuccagcgugggcaac

SEQ ID NO: 313601 - RNA, 32 nt, Human
agaucuggcuggagcccagaaaaagaagcaug

SEQ ID NO: 313602 - RNA, 32 nt, Human
agaucuggcuguagacgcucuuuauuuauguc

SEQ ID NO: 313603 - RNA, 32 nt, Human
agaucugggaggccaggcuggcaugauuccug

SEQ ID NO: 313604 - RNA, 32 nt, Human
agaucuggguggggacacagcccaaccauauc

SEQ ID NO: 313605 - RNA, 32 nt, Human
agaucugguuccagaaccgcaggaugaaaaug

SEQ ID NO: 313606 - RNA, 22 nt, Human
agaucugguugacucaucauca

SEQ ID NO: 313607 - RNA, 32 nt, Human
agaucuguaaguacaaaggauauucuguuucu

SEQ ID NO: 313608 - RNA, 32 nt, Human
agaucuguccucaguguuggcaggagccgucc

SEQ ID NO: 313609 - RNA, 32 nt, Human
agaucugugcacgucccuuuacaccccaccau

SEQ ID NO: 313610 - RNA, 32 nt, Human
agaucuguuggguuaaagaggaaugagccuuu

SEQ ID NO: 313611 - RNA, 32 nt, Human
agaucuuaaagccaaaauuagaaaaauaacuc

SEQ ID NO: 313612 - RNA, 32 nt, Human
agaucuuacucccuuuggcauuuuacaccuua

SEQ ID NO: 313613 - RNA, 32 nt, Human
agaucuuauaccacucuguauuggacaaaggc

SEQ ID NO: 313614 - RNA, 32 nt, Human
agaucuucaaagugaugcugcucugcaggugg

SEQ ID NO: 313615 - RNA, 32 nt, Human
agaucuuccagccauauguggagucgcuggug

SEQ ID NO: 313616 - RNA, 32 nt, Human
agaucuuccaucagggccggaguaaaucccua

SEQ ID NO: 313617 - RNA, 32 nt, Human
agaucuucccacugcacuccagccuggccaau

SEQ ID NO: 313618 - RNA, 21 nt, Human
agaucuucgugaagacccuga

SEQ ID NO: 313619 - RNA, 32 nt, Human
agaucuucugaaaugaaacaaauaaucacauu

SEQ ID NO: 313620 - RNA, 32 nt, Human
agaucuucugcuacuccagccacaggagguau

SEQ ID NO: 313621 - RNA, 32 nt, Human
agaucuugagacugaaggaaacccaaagccgu

SEQ ID NO: 313622 - RNA, 32 nt, Human
agaucuugauuucuuggucauuucucaaccug

SEQ ID NO: 313623 - RNA, 32 nt, Human
agaucuugccacugcacaccagccugggcaac

SEQ ID NO: 313624 - RNA, 32 nt, Human
agaucuugccacugcacuccagccugggcaac

SEQ ID NO: 313625 - RNA, 32 nt, Human
agaucuugccacugcucuccagccugagcgac

SEQ ID NO: 313626 - RNA, 32 nt, Human
agaucuugccacuguacuccagccugaagagc

SEQ ID NO: 313627 - RNA, 32 nt, Human
agaucuuggagauaauuucuuaccucacauag

SEQ ID NO: 313628 - RNA, 32 nt, Human
agaucuuggcaaucugcccaaggggagacaca

SEQ ID NO: 313629 - RNA, 32 nt, Human
agaucuugguuuuuccaaacuggaccauccug

SEQ ID NO: 313630 - RNA, 32 nt, Human
agaucuuuaaagaagcgagagaggaggcccca

SEQ ID NO: 313631 - RNA, 32 nt, Human
agaucuuuaccuauggcuguucuggguuuuug

SEQ ID NO: 313632 - RNA, 32 nt, Human
agaugaaaaaggcaagauacaugugaauaagg

SEQ ID NO: 313633 - RNA, 32 nt, Human
agaugaaaagaaggaaggaaggaagaaugugc

SEQ ID NO: 313634 - RNA, 32 nt, Human
agaugaaaccaaagacugcaagaaauacucca

SEQ ID NO: 313635 - RNA, 32 nt, Human
agaugaaaccgaagacuacaagaaauacucca

SEQ ID NO: 313636 - RNA, 32 nt, Human
agaugaaacucccagaggugucagagguggcu

SEQ ID NO: 313637 - RNA, 32 nt, Human
agaugaaaggaguggagugugguuuggcagaa

SEQ ID NO: 313638 - RNA, 32 nt, Human
agaugaaagugcagcaaagcaaugaaaaauga

SEQ ID NO: 313639 - RNA, 32 nt, Human
agaugaaaucagcuauuacaccugcuguacac

SEQ ID NO: 313640 - RNA, 32 nt, Human
agaugaaaugcuucccuccacuguuuauguac

SEQ ID NO: 313641 - RNA, 32 nt, Human
agaugaaauugacucugcaaccacacagguga

SEQ ID NO: 313642 - RNA, 32 nt, Human
agaugaaccaaggaucgggauagcaguauaaa

SEQ ID NO: 313643 - RNA, 32 nt, Human
agaugaaccuugaggauguugugccaagugca

SEQ ID NO: 313644 - RNA, 32 nt, Human
agaugaacuauuugccgcccugucuuuuccug

SEQ ID NO: 313645 - RNA, 32 nt, Human
agaugaacuucuauucaccguuucuggaauuc

SEQ ID NO: 313646 - RNA, 32 nt, Human
agaugaagaaaaugaguucucaaggagggaau

SEQ ID NO: 313647 - RNA, 32 nt, Human
agaugaagaacugaggcacagauuaaaggacu

SEQ ID NO: 313648 - RNA, 32 nt, Human
agaugaagaagagggguggggcaacaaguggu

SEQ ID NO: 313649 - RNA, 32 nt, Human
agaugaagacaauguuguaaucccagcaaguu

SEQ ID NO: 313650 - RNA, 32 nt, Human
agaugaagagagggccagaguaguguucugaa

SEQ ID NO: 313651 - RNA, 32 nt, Human
agaugaagagccaagaugcuggugaagcaggu

SEQ ID NO: 313652 - RNA, 32 nt, Human
agaugaagcauccgugccuaggaaaaggggac

SEQ ID NO: 313653 - RNA, 32 nt, Human
agaugaagccaagaguaucagagauguaccua

SEQ ID NO: 313654 - RNA, 32 nt, Human
agaugaagcucucuuugcucuuccugcuuuca

SEQ ID NO: 313655 - RNA, 32 nt, Human
agaugaaggagaaaauggagagcuccagcagc

SEQ ID NO: 313656 - RNA, 32 nt, Human
agaugaagucucacugcacucaggcuggagug

SEQ ID NO: 313657 - RNA, 21 nt, Human
agaugaagucucacuguguug

SEQ ID NO: 313658 - RNA, 31 nt, Human
agaugaagugagauacaaagcuggguuugau

SEQ ID NO: 313659 - RNA, 32 nt, Human
agaugaauggaauaaaagugagagccaaaaau

SEQ ID NO: 313660 - RNA, 32 nt, Human
agaugaauguguugagggaaugaauaaguauu

SEQ ID NO: 313661 - RNA, 32 nt, Human
agaugaauucuguacccaaagcagaaucccca

SEQ ID NO: 313662 - RNA, 32 nt, Human
agaugaauugggaguaucucuccaguuauucc

SEQ ID NO: 313663 - RNA, 32 nt, Human
agaugaauuguuuuguuucacaaucauuuuaa

SEQ ID NO: 313664 - RNA, 32 nt, Human
agaugacaaaaacaccagauugaaggaugguc

SEQ ID NO: 313665 - RNA, 32 nt, Human
agaugacaaagaggaguggaagaagacagaga

SEQ ID NO: 313666 - RNA, 27 nt, Human
agaugacaacagcagccaggccaaccu

SEQ ID NO: 313667 - RNA, 32 nt, Human
agaugacacaacugcacuccagcuugggcaac

SEQ ID NO: 313668 - RNA, 32 nt, Human
agaugacacaccuacugcuucuuuucuaggau

SEQ ID NO: 313669 - RNA, 32 nt, Human
agaugacacaguuagcuggggucuagaagauu

SEQ ID NO: 313670 - RNA, 22 nt, Human
agaugacacgcgccagagcugg

SEQ ID NO: 313671 - RNA, 32 nt, Human
agaugacacggucacuagcucugccucagaaa

SEQ ID NO: 313672 - RNA, 32 nt, Human
agaugacagcauauuaaaguggugacccugcg

SEQ ID NO: 313673 - RNA, 32 nt, Human
agaugacagccauguggagaugucaaguuaga

SEQ ID NO: 313674 - RNA, 32 nt, Human
agaugacagccccaggucugggguacagagac

SEQ ID NO: 313675 - RNA, 32 nt, Human
agaugacagcugcagggaugguugugagccgc

SEQ ID NO: 313676 - RNA, 32 nt, Human
agaugacaggcgcacaucaccacgcccagcug

SEQ ID NO: 313677 - RNA, 32 nt, Human
agaugacagugcaaaggauuugggagagagaa

SEQ ID NO: 313678 - RNA, 32 nt, Human
agaugacauaaauaaguuuaaauaucaauuug

SEQ ID NO: 313679 - RNA, 32 nt, Human
agaugacaucuguaggucucaggcuacaggaa

SEQ ID NO: 313680 - RNA, 32 nt, Human
agaugacauuuaccuagcauauaaacccuggu

SEQ ID NO: 313681 - RNA, 32 nt, Human
agaugacauuugaggacugauggccaaagagc

SEQ ID NO: 313682 - RNA, 32 nt, Human
agaugaccaaagaccaccuccgccaggcccag

SEQ ID NO: 313683 - RNA, 32 nt, Human
agaugaccaccaggcaggcucgggcgacaggg

SEQ ID NO: 313684 - RNA, 32 nt, Human
agaugaccagauuugaucucagccugaugacc

SEQ ID NO: 313685 - RNA, 32 nt, Human
agaugaccaggauaaaacugagaaggauuuac

SEQ ID NO: 313686 - RNA, 32 nt, Human
agaugaccccuucagaucaucugugccuaccu

SEQ ID NO: 313687 - RNA, 27 nt, Human
agaugacccgagagagaaugaugggag

SEQ ID NO: 313688 - RNA, 32 nt, Human
agaugaccuauuugucaguggugcaaaauuaa

SEQ ID NO: 313689 - RNA, 32 nt, Human
agaugaccucucgcugccucacaagcagugac

SEQ ID NO: 313690 - RNA, 32 nt, Human
agaugaccuugaccaccacaauaccaggcccu

SEQ ID NO: 313691 - RNA, 24 nt, Human
agaugaccuugugacacucaugca

SEQ ID NO: 313692 - RNA, 32 nt, Human
agaugacgccauugcacuccagccugggugag

SEQ ID NO: 313693 - RNA, 32 nt, Human
agaugacguaugugccuugaacugaauauuug

SEQ ID NO: 313694 - RNA, 32 nt, Human
agaugacuaaagaucugaaggacucuagcagg

SEQ ID NO: 313695 - RNA, 32 nt, Human
agaugacuagccaggguagggagggaccuccu

SEQ ID NO: 313696 - RNA, 32 nt, Human
agaugacuccauugaaaacaaacaggcaaaaa

SEQ ID NO: 313697 - RNA, 19 nt, Human
agaugacugaaccuugcag

SEQ ID NO: 313698 - RNA, 32 nt, Human
agaugacugaggacaucgccuuugccaaggcc

SEQ ID NO: 313699 - RNA, 32 nt, Human
agaugacuggcugguugcugggggcagguguc

SEQ ID NO: 313700 - RNA, 32 nt, Human
agaugacuucucaucucuccccacaccaugau

SEQ ID NO: 313701 - RNA, 32 nt, Human
agaugacuuuggugaaaccccgucucuacuaa

SEQ ID NO: 313702 - RNA, 25 nt, Human
agaugacuuuuauaucccauuuugg

SEQ ID NO: 313703 - RNA, 32 nt, Human
agaugagaaaacccaacagauccaucccuuga

SEQ ID NO: 313704 - RNA, 32 nt, Human
agaugagaauuagcaucaggaaagccugaaau

SEQ ID NO: 313705 - RNA, 32 nt, Human
agaugagaccaaagaaucuggcaaacaucaca

SEQ ID NO: 313706 - RNA, 32 nt, Human
agaugagaccucugacguccaagccuuguucc

SEQ ID NO: 313707 - RNA, 32 nt, Human
agaugagacuugcuuagccucccagccuacau

SEQ ID NO: 313708 - RNA, 32 nt, Human
agaugagaggaggcaugaagcugcagugccac

SEQ ID NO: 313709 - RNA, 32 nt, Human
agaugagaggcagaggcagacaggcgcuggac

SEQ ID NO: 313710 - RNA, 32 nt, Human
agaugagagggaacccaggaauugugagguua

SEQ ID NO: 313711 - RNA, 32 nt, Human
agaugagaggggaaugaauacuucagaugcuu

SEQ ID NO: 313712 - RNA, 32 nt, Human
agaugagaguccauuuacuucagccuuugauu

SEQ ID NO: 313713 - RNA, 32 nt, Human
agaugagauccuugccuucaccaagcuuaugu

SEQ ID NO: 313714 - RNA, 21 nt, Human
agaugagaucucgcuauguug

SEQ ID NO: 313715 - RNA, 21 nt, Human
agaugagauuucaccauguug

SEQ ID NO: 313716 - RNA, 25 nt, Human
agaugagauuucaccauguuggcca

SEQ ID NO: 313717 - RNA, 32 nt, Human
agaugagcacagagccaggccucuuagaggau

SEQ ID NO: 313718 - RNA, 32 nt, Human
agaugagcagaaggaagagagcagggaaggag

SEQ ID NO: 313719 - RNA, 32 nt, Human
agaugagcagauccacaggaaaacuugaaugc

SEQ ID NO: 313720 - RNA, 32 nt, Human
agaugagcagugagcugguuuccacccucugg

SEQ ID NO: 313721 - RNA, 32 nt, Human
agaugagccaagcagaacauuccauccaggac

SEQ ID NO: 313722 - RNA, 32 nt, Human
agaugagccacuuguaagagucuccgugacag

SEQ ID NO: 313723 - RNA, 32 nt, Human
agaugagccccaggaccccuggggagccaagc

SEQ ID NO: 313724 - RNA, 32 nt, Human
agaugagccugcccgcccgccugcugccugga

SEQ ID NO: 313725 - RNA, 32 nt, Human
agaugagcugccgagccucugccuccacucuc

SEQ ID NO: 313726 - RNA, 32 nt, Human
agaugagcugggaaccuggaaguggguugcau

SEQ ID NO: 313727 - RNA, 32 nt, Human
agaugagcuuccuaaagcugacccugggucug

SEQ ID NO: 313728 - RNA, 32 nt, Human
agaugagcuugagggacugagguggggugugg

SEQ ID NO: 313729 - RNA, 27 nt, Human
agaugagcuuugauccaaaccuucucc

SEQ ID NO: 313730 - RNA, 32 nt, Human
agaugaggaaaaguuuggaggagcagcugacu

SEQ ID NO: 313731 - RNA, 32 nt, Human
agaugaggaaacagcaacccagagaggagaac

SEQ ID NO: 313732 - RNA, 32 nt, Human
agaugaggaaacugagccuugcggaaguaguu

SEQ ID NO: 313733 - RNA, 32 nt, Human
agaugaggaaacugaggcacagaagggcugag

SEQ ID NO: 313734 - RNA, 32 nt, Human
agaugaggaaacugaggcccagagaagcggaa

SEQ ID NO: 313735 - RNA, 32 nt, Human
agaugaggaaacugaggccuagagaagcucaa

SEQ ID NO: 313736 - RNA, 32 nt, Human
agaugaggaaacugaggcuugggaaggguaga

SEQ ID NO: 313737 - RNA, 32 nt, Human
agaugaggacaggaagagaguguuagaaaggg

SEQ ID NO: 313738 - RNA, 32 nt, Human
agaugaggagaggcagcagggauuucccugcc

SEQ ID NO: 313739 - RNA, 32 nt, Human
agaugaggaggccuccagaaauggcagaauuc

SEQ ID NO: 313740 - RNA, 32 nt, Human
agaugaggagggagagaaggaggccgccagac

SEQ ID NO: 313741 - RNA, 32 nt, Human
agaugaggagugccacuguguugcccaggcug

SEQ ID NO: 313742 - RNA, 20 nt, Human
agaugaggaguugcuucuua

SEQ ID NO: 313743 - RNA, 32 nt, Human
agaugaggaugggcacaugguggagagucgug

SEQ ID NO: 313744 - RNA, 32 nt, Human
agaugaggcaggacuagcaggagcgccucaga

SEQ ID NO: 313745 - RNA, 32 nt, Human
agaugaggccugagcccugccuaugcucaaag

SEQ ID NO: 313746 - RNA, 32 nt, Human
agaugaggcuucugcugcuucuccuaguggcg

SEQ ID NO: 313747 - RNA, 32 nt, Human
agaugaggggcaggcagucaggcagaaauggg

SEQ ID NO: 313748 - RNA, 32 nt, Human
agaugaggguuauuuucugaaaugcagauggg

SEQ ID NO: 313749 - RNA, 21 nt, Human
agaugaggguucacuauguug

SEQ ID NO: 313750 - RNA, 25 nt, Human
agaugaggguucacuauguuggcca

SEQ ID NO: 313751 - RNA, 32 nt, Human
agaugaggucccugguuuuucauggcaacuug

SEQ ID NO: 313752 - RNA, 21 nt, Human
agaugaggucucacuauguug

SEQ ID NO: 313753 - RNA, 21 nt, Human
agaugaggucucacuguguug

SEQ ID NO: 313754 - RNA, 20 nt, Human
agaugaggucuugccauguu

SEQ ID NO: 313755 - RNA, 21 nt, Human
agaugaggucuugcuauguug

SEQ ID NO: 313756 - RNA, 21 nt, Human
agaugaggucuugcuguguug

SEQ ID NO: 313757 - RNA, 32 nt, Human
agaugaggugcuuggcuuucuucccaggaccc

SEQ ID NO: 313758 - RNA, 32 nt, Human
agaugagguugcuagagaauguuagaggaucc

SEQ ID NO: 313759 - RNA, 18 nt, Human
agaugagguuucaccaug

SEQ ID NO: 313760 - RNA, 25 nt, Human
agaugagguuucaccaugauggcca

SEQ ID NO: 313761 - RNA, 21 nt, Human
agaugagguuucaccauguug

SEQ ID NO: 313762 - RNA, 25 nt, Human
agaugagguuucaccauguuggcca

SEQ ID NO: 313763 - RNA, 21 nt, Human
agaugagguuucaccauuuug

SEQ ID NO: 313764 - RNA, 25 nt, Human
agaugagguuucaccauuuuggcca

SEQ ID NO: 313765 - RNA, 21 nt, Human
agaugagguuucaccguguug

SEQ ID NO: 313766 - RNA, 25 nt, Human
agaugagguuucaccguguuggcca

SEQ ID NO: 313767 - RNA, 21 nt, Human
agaugagguuucaccuuguug

SEQ ID NO: 313768 - RNA, 25 nt, Human
agaugagguuucaccuuguuggcca

SEQ ID NO: 313769 - RNA, 25 nt, Human
agaugagguuucaccuuguugguca

SEQ ID NO: 313770 - RNA, 21 nt, Human
agaugagguuucacucuguug

SEQ ID NO: 313771 - RNA, 20 nt, Human
agaugagguuucgccauguu

SEQ ID NO: 313772 - RNA, 21 nt, Human
agaugagguuucuccauguug

SEQ ID NO: 313773 - RNA, 25 nt, Human
agaugagguuucuccauguugguca

SEQ ID NO: 313774 - RNA, 21 nt, Human
agaugagguuuugccauuuug

SEQ ID NO: 313775 - RNA, 21 nt, Human
agaugaguaaaauaccaagua

SEQ ID NO: 313776 - RNA, 22 nt, Human
agaugaguaaaggcauccagca

SEQ ID NO: 313777 - RNA, 24 nt, Human
agaugaguaagggaaccccaggca

SEQ ID NO: 313778 - RNA, 32 nt, Human
agaugaguccauuugccucuucugccuucacu

SEQ ID NO: 313779 - RNA, 20 nt, Human
agaugagucucacuauguug

SEQ ID NO: 313780 - RNA, 24 nt, Human
agaugagucucacuauguugccca

SEQ ID NO: 313781 - RNA, 19 nt, Human
agaugagucuuggaugcau

SEQ ID NO: 313782 - RNA, 32 nt, Human
agaugaguggauagguccccaaaagugucacc

SEQ ID NO: 313783 - RNA, 20 nt, Human
agaugagugucacuauguug

SEQ ID NO: 313784 - RNA, 32 nt, Human
agaugagugugcugaagguggggagggcagca

SEQ ID NO: 313785 - RNA, 20 nt, Human
agaugaguuucaccauguug

SEQ ID NO: 313786 - RNA, 24 nt, Human
agaugaguuucaccauguugguca

SEQ ID NO: 313787 - RNA, 32 nt, Human
agaugaguuugagagagaaaaaguguaauuga

SEQ ID NO: 313788 - RNA, 32 nt, Human
agaugauaaacaucacauggcauuuuaaguga

SEQ ID NO: 313789 - RNA, 32 nt, Human
agaugauaacaguguuauaaugcagcuuccuu

SEQ ID NO: 313790 - RNA, 32 nt, Human
agaugauaccaugaagagaaguuuacaggccc

SEQ ID NO: 313791 - RNA, 32 nt, Human
agaugauaggugaauucccugccccuccccca

SEQ ID NO: 313792 - RNA, 32 nt, Human
agaugauauaaaauauuguugcucugacaaaa

SEQ ID NO: 313793 - RNA, 32 nt, Human
agaugauauucagaagaugaacccaccuaagu

SEQ ID NO: 313794 - RNA, 32 nt, Human
agaugaucaagaaggugaaaagaagagaaaag

SEQ ID NO: 313795 - RNA, 32 nt, Human
agaugaucacacccacuuugcuucacuuucau

SEQ ID NO: 313796 - RNA, 32 nt, Human
agaugaucacacucagagcccagugagaggca

SEQ ID NO: 313797 - RNA, 32 nt, Human
agaugauccagagacauguggcagcaggcaug

SEQ ID NO: 313798 - RNA, 32 nt, Human
agaugaugacacuggaguuuucagagagcauu

SEQ ID NO: 313799 - RNA, 32 nt, Human
agaugaugcaggaacaggaagagaagaugugg

SEQ ID NO: 313800 - RNA, 32 nt, Human
agaugaugccacugcacuccagccugggcuac

SEQ ID NO: 313801 - RNA, 32 nt, Human
agaugaugccauugcacuccagccugggcaac

SEQ ID NO: 313802 - RNA, 32 nt, Human
agaugaugccuucuguugaauucuguuauuaa

SEQ ID NO: 313803 - RNA, 32 nt, Human
agaugaugcuuuuacuaugcaggagagaguuu

SEQ ID NO: 313804 - RNA, 32 nt, Human
agaugauggauagaauuaaaaagggaguucau

SEQ ID NO: 313805 - RNA, 32 nt, Human
agaugaugguuccauugcucuuggcuucaugg

SEQ ID NO: 313806 - RNA, 32 nt, Human
agaugaugugauuuauucaaggucacauagag

SEQ ID NO: 313807 - RNA, 32 nt, Human
agaugaugugcaaagaaauccuugcuuuauga

SEQ ID NO: 313808 - RNA, 32 nt, Human
agaugauguugaaccugcuccuuggaccucug

SEQ ID NO: 313809 - RNA, 32 nt, Human
agaugauguuugacauuuucagcacuuccugu

SEQ ID NO: 313810 - RNA, 32 nt, Human
agaugauuacugaccuacuauacuccucaagg

SEQ ID NO: 313811 - RNA, 32 nt, Human
agaugauucagggcauacucuucaaggucacg

SEQ ID NO: 313812 - RNA, 32 nt, Human
agaugauuccaguggccagccauuugaaucag

SEQ ID NO: 313813 - RNA, 32 nt, Human
agaugauucuuuuguuuuucuucuacuucaug

SEQ ID NO: 313814 - RNA, 32 nt, Human
agaugauuuaugguaucugauggaagaaauuu

SEQ ID NO: 313815 - RNA, 32 nt, Human
agaugauuuccaagccucucuggcacuuugag

SEQ ID NO: 313816 - RNA, 32 nt, Human
agaugauuucuggaacauucagucuagaaaga

SEQ ID NO: 313817 - RNA, 32 nt, Human
agaugauuuuaaaaucuguuguauuuaggucc

SEQ ID NO: 313818 - RNA, 20 nt, Human
agaugcaaaaguucacuguu

SEQ ID NO: 313819 - RNA, 21 nt, Human
agaugcaacauguggccuguu

SEQ ID NO: 313820 - RNA, 32 nt, Human
agaugcaagcuacucauucacacagaacuuuu

SEQ ID NO: 313821 - RNA, 32 nt, Human
agaugcaaggcugccagcaucuuugcucucca

SEQ ID NO: 313822 - RNA, 32 nt, Human
agaugcaaucuagcaaaagucagucaggguga

SEQ ID NO: 313823 - RNA, 27 nt, Human
agaugcacaaggaagcagagaugcuaa

SEQ ID NO: 313824 - RNA, 31 nt, Human
agaugcacaaugucuccuucaggugaucaca

SEQ ID NO: 313825 - RNA, 32 nt, Human
agaugcacacacacaagcacacaugcacagag

SEQ ID NO: 313826 - RNA, 25 nt, Human
agaugcacacacagaugcacacaca

SEQ ID NO: 313827 - RNA, 32 nt, Human
agaugcacagccacacuuccaucucacccuaa

SEQ ID NO: 313828 - RNA, 18 nt, Human
agaugcacaucgcuauua

SEQ ID NO: 313829 - RNA, 32 nt, Human
agaugcaccacugcaccccagccugggcgacg

SEQ ID NO: 313830 - RNA, 32 nt, Human
agaugcaccagagacacaaggcuugaagcucu

SEQ ID NO: 313831 - RNA, 32 nt, Human
agaugcacgaggauaugaucuccauacagaac

SEQ ID NO: 313832 - RNA, 32 nt, Human
agaugcacuaccauugcuguucuacuuuuugg

SEQ ID NO: 313833 - RNA, 32 nt, Human
agaugcacugcaccccagccugggcgacagag

SEQ ID NO: 313834 - RNA, 32 nt, Human
agaugcagaagaacccagaaaggagcaggucu

SEQ ID NO: 313835 - RNA, 32 nt, Human
agaugcagagagagcacaagccucccuccuca

SEQ ID NO: 313836 - RNA, 32 nt, Human
agaugcagagggcuggauggacuggcccaugg

SEQ ID NO: 313837 - RNA, 32 nt, Human
agaugcagaucccggcccuggagcuuuaaaau

SEQ ID NO: 313838 - RNA, 16 nt, Human
agaugcagccuugcag

SEQ ID NO: 313839 - RNA, 32 nt, Human
agaugcagcucuuccuggacaggccagguggu

SEQ ID NO: 313840 - RNA, 32 nt, Human
agaugcagcugaagguuccauggauguauuug

SEQ ID NO: 313841 - RNA, 32 nt, Human
agaugcaggaaggaguaaagagcacuggaaag

SEQ ID NO: 313842 - RNA, 27 nt, Human
agaugcaggaggcagauaucaguggcu

SEQ ID NO: 313843 - RNA, 27 nt, Human
agaugcaggccugcauggugccggggc

SEQ ID NO: 313844 - RNA, 32 nt, Human
agaugcagggagcacucgccugugcugugagg

SEQ ID NO: 313845 - RNA, 32 nt, Human
agaugcaggggugggaagcggccaggcagaaa

SEQ ID NO: 313846 - RNA, 32 nt, Human
agaugcaguaaugauguuuaccagagauuauu

SEQ ID NO: 313847 - RNA, 32 nt, Human
agaugcaguauauacuuuucucauuuuuaaac

SEQ ID NO: 313848 - RNA, 32 nt, Human
agaugcagugguuccucccucuccugaauccu

SEQ ID NO: 313849 - RNA, 19 nt, Human
agaugcauaacagcuauua

SEQ ID NO: 313850 - RNA, 32 nt, Human
agaugcaucugggagagguggggaagauggca

SEQ ID NO: 313851 - RNA, 32 nt, Human
agaugcaugaaugaaggguacuuuuugcuuuu

SEQ ID NO: 313852 - RNA, 22 nt, Human
agaugcaugcguguccaggcug

SEQ ID NO: 313853 - RNA, 32 nt, Human
agaugcaugucugccaaaaugcaacauacggg

SEQ ID NO: 313854 - RNA, 32 nt, Human
agaugcauguugcagugagcugagauugcacc

SEQ ID NO: 313855 - RNA, 32 nt, Human
agaugcauucuuggugcucaaaccagaucgaa

SEQ ID NO: 313856 - RNA, 32 nt, Human
agaugcauuucagggccugggaaaagaagaug

SEQ ID NO: 313857 - RNA, 32 nt, Human
agaugccaacagcaacagguuugccacucguc

SEQ ID NO: 313858 - RNA, 32 nt, Human
agaugccacagcaauagagagguuuccuaaau

SEQ ID NO: 313859 - RNA, 32 nt, Human
agaugccacugcggccuggcugcuggggacga

SEQ ID NO: 313860 - RNA, 18 nt, Human
agaugccagaugcauugg

SEQ ID NO: 313861 - RNA, 32 nt, Human
agaugccagcacucccaccauucguggcaacc

SEQ ID NO: 313862 - RNA, 32 nt, Human
agaugccagcccagcuaccacaggggaucccu

SEQ ID NO: 313863 - RNA, 32 nt, Human
agaugccaggagcccugcugcccacaugcaag

SEQ ID NO: 313864 - RNA, 32 nt, Human
agaugccauacagaccuccugugcuuaaguua

SEQ ID NO: 313865 - RNA, 32 nt, Human
agaugccauacaguguucaauaauagaagguc

SEQ ID NO: 313866 - RNA, 32 nt, Human
agaugccauccacccccaucuaggugagggcu

SEQ ID NO: 313867 - RNA, 32 nt, Human
agaugccaucugcagaagugcugguagcauaa

SEQ ID NO: 313868 - RNA, 32 nt, Human
agaugccauguacucucuccuccagggaggca

SEQ ID NO: 313869 - RNA, 32 nt, Human
agaugccauugcacuccagccugggcaacaga

SEQ ID NO: 313870 - RNA, 32 nt, Human
agaugccauuguacuuguaggcauuuuauuuu

SEQ ID NO: 313871 - RNA, 27 nt, Human
agaugcccaacaacagcacugcucugu

SEQ ID NO: 313872 - RNA, 32 nt, Human
agaugcccaggaggaggagcccuagggaagaa

SEQ ID NO: 313873 - RNA, 32 nt, Human
agaugcccaucuggagugagugcaggaccagg

SEQ ID NO: 313874 - RNA, 32 nt, Human
agaugccccaggagaccuggcaccaugaggau

SEQ ID NO: 313875 - RNA, 32 nt, Human
agaugccccugagaccacccagaaaucaagcg

SEQ ID NO: 313876 - RNA, 18 nt, Human
agaugccccuucuaggaa

SEQ ID NO: 313877 - RNA, 32 nt, Human
agaugcccgcugaggguauucuccccucaacc

SEQ ID NO: 313878 - RNA, 32 nt, Human
agaugcccggcaauguucccucccaggcccuc

SEQ ID NO: 313879 - RNA, 32 nt, Human
agaugcccggcagguccugcugguagagggag

SEQ ID NO: 313880 - RNA, 32 nt, Human
agaugcccuguuaacuuauucuccccaguuca

SEQ ID NO: 313881 - RNA, 24 nt, Human
agaugcccuucagacaucucuuca

SEQ ID NO: 313882 - RNA, 32 nt, Human
agaugccgaagcacacgccuucaagaguccca

SEQ ID NO: 313883 - RNA, 32 nt, Human
agaugccggguggcagggagccgguggcgguc

SEQ ID NO: 313884 - RNA, 27 nt, Human
agaugccucgaauuaugaucaaggggg

SEQ ID NO: 313885 - RNA, 22 nt, Human
agaugccucgcagagcaccagg

SEQ ID NO: 313886 - RNA, 26 nt, Human
agaugccucguggugaaaggaucuca

SEQ ID NO: 313887 - RNA, 32 nt, Human
agaugccugcccaccucugucuccugccucug

SEQ ID NO: 313888 - RNA, 32 nt, Human
agaugccugcucccacuuugccuucugccaug

SEQ ID NO: 313889 - RNA, 32 nt, Human
agaugccuggacagcacagccacccaucuccc

SEQ ID NO: 313890 - RNA, 32 nt, Human
agaugccugggucugcagccaugguuugggug

SEQ ID NO: 313891 - RNA, 32 nt, Human
agaugccuguaauuccagcuacucaggaggcu

SEQ ID NO: 313892 - RNA, 32 nt, Human
agaugccuguagucccagcuacuugugaggcu

SEQ ID NO: 313893 - RNA, 32 nt, Human
agaugccuguggaacauuccagccaggcugca

SEQ ID NO: 313894 - RNA, 32 nt, Human
agaugccuucaagggcugcacugugcugacca

SEQ ID NO: 313895 - RNA, 32 nt, Human
agaugccuuccaggcugcagucagugcagaug

SEQ ID NO: 313896 - RNA, 32 nt, Human
agaugccuucccagacuacccuugucucacuu

SEQ ID NO: 313897 - RNA, 32 nt, Human
agaugccuugacccagaccagagacccaagcc

SEQ ID NO: 313898 - RNA, 23 nt, Human
agaugccuugguuccucuucacu

SEQ ID NO: 313899 - RNA, 32 nt, Human
agaugcgaaagccauggaguugagcugcagcg

SEQ ID NO: 313900 - RNA, 32 nt, Human
agaugcgaacauaguacacugcagccuccaac

SEQ ID NO: 313901 - RNA, 32 nt, Human
agaugcgccacugcacuccagccugggcgaca

SEQ ID NO: 313902 - RNA, 32 nt, Human
agaugcggauggaaacagaugcaccaaagcaa

SEQ ID NO: 313903 - RNA, 32 nt, Human
agaugcggcucccgccggcucugggucuggag

SEQ ID NO: 313904 - RNA, 32 nt, Human
agaugcgggcauugggcccugggaagcguggg

SEQ ID NO: 313905 - RNA, 32 nt, Human
agaugcgggcccuggcccuggaccugggcagc

SEQ ID NO: 313906 - RNA, 32 nt, Human
agaugcggguuaucuugaaagaaacaaacuga

SEQ ID NO: 313907 - RNA, 32 nt, Human
agaugcguguguggcuucugggcucuccuggu

SEQ ID NO: 313908 - RNA, 32 nt, Human
agaugcguuugucccaggcucgggggcucagu

SEQ ID NO: 313909 - RNA, 32 nt, Human
agaugcuaagucugagcuccagaagagacugu

SEQ ID NO: 313910 - RNA, 20 nt, Human
agaugcuaauuucagugacu

SEQ ID NO: 313911 - RNA, 32 nt, Human
agaugcuacucagaugcuggcuucagcuaagu

SEQ ID NO: 313912 - RNA, 32 nt, Human
agaugcuagaacugcaugugcugugcauauuc

SEQ ID NO: 313913 - RNA, 32 nt, Human
agaugcuagaacuuauugggcaugugguauac

SEQ ID NO: 313914 - RNA, 32 nt, Human
agaugcuagcacugcaugugcugugcauauuc

SEQ ID NO: 313915 - RNA, 32 nt, Human
agaugcuagcgcugcacuccauuuugcaaugg

SEQ ID NO: 313916 - RNA, 32 nt, Human
agaugcuagugccaugcuuccucugcagccug

SEQ ID NO: 313917 - RNA, 32 nt, Human
agaugcuaguugccauuuuaacaaagcaggua

SEQ ID NO: 313918 - RNA, 32 nt, Human
agaugcuauaggguuuucucucacuguugcca

SEQ ID NO: 313919 - RNA, 32 nt, Human
agaugcuaucuuggugcacacacacaacauug

SEQ ID NO: 313920 - RNA, 27 nt, Human
agaugcucaauaaacacuuguugaaug

SEQ ID NO: 313921 - RNA, 22 nt, Human
agaugcucaccacaucucccca

SEQ ID NO: 313922 - RNA, 32 nt, Human
agaugcucagaacauguucuugggggaaaacg

SEQ ID NO: 313923 - RNA, 32 nt, Human
agaugcucagcuuuauaggugugaccuacaca

SEQ ID NO: 313924 - RNA, 32 nt, Human
agaugcucagcuuuuccauaugauuaggugag

SEQ ID NO: 313925 - RNA, 32 nt, Human
agaugcucauaaggagugcacaaccgccgggc

SEQ ID NO: 313926 - RNA, 32 nt, Human
agaugcuccaggccaaugagaagaauuagaca

SEQ ID NO: 313927 - RNA, 32 nt, Human
agaugcuccaucugaucaaagugacacuucug

SEQ ID NO: 313928 - RNA, 32 nt, Human
agaugcuccaucugcuucucccccuuucucuu

SEQ ID NO: 313929 - RNA, 27 nt, Human
agaugcucccucuccccucaugcuccc

SEQ ID NO: 313930 - RNA, 32 nt, Human
agaugcuccuguccucuccuuucaaagacuga

SEQ ID NO: 313931 - RNA, 32 nt, Human
agaugcuccuguucuggugauaccaaaccugc

SEQ ID NO: 313932 - RNA, 32 nt, Human
agaugcucucucuccacggccucagagccacu

SEQ ID NO: 313933 - RNA, 32 nt, Human
agaugcucugagcaggggagacagggaucccg

SEQ ID NO: 313934 - RNA, 32 nt, Human
agaugcucuggcuucucucuugaaugcucacu

SEQ ID NO: 313935 - RNA, 32 nt, Human
agaugcucuggugguagagguggacuuaguag

SEQ ID NO: 313936 - RNA, 32 nt, Human
agaugcugaaggcagagcagcugagggagggg

SEQ ID NO: 313937 - RNA, 32 nt, Human
agaugcugaggaagagauuccgggaggaaacu

SEQ ID NO: 313938 - RNA, 32 nt, Human
agaugcugauacacagcacacagggaaaggaa

SEQ ID NO: 313939 - RNA, 32 nt, Human
agaugcugcacuuggcugggcacaguggcaca

SEQ ID NO: 313940 - RNA, 32 nt, Human
agaugcugcagccgugggcaaugacuuugcug

SEQ ID NO: 313941 - RNA, 32 nt, Human
agaugcugcaggaacugagaggauagaagacc

SEQ ID NO: 313942 - RNA, 32 nt, Human
agaugcugccacauagggguaauuccuaacca

SEQ ID NO: 313943 - RNA, 32 nt, Human
agaugcugcucccgccugauuggggccucacc

SEQ ID NO: 313944 - RNA, 32 nt, Human
agaugcugcucuggcccugggagcugaauucc

SEQ ID NO: 313945 - RNA, 32 nt, Human
agaugcugcugcucccuggccucagaggaaag

SEQ ID NO: 313946 - RNA, 32 nt, Human
agaugcuggaaggagagaaggaagcgggaagu

SEQ ID NO: 313947 - RNA, 32 nt, Human
agaugcuggaugcuaacuugauacuaaccauc

SEQ ID NO: 313948 - RNA, 32 nt, Human
agaugcuggcccagggccagagcccagcucca

SEQ ID NO: 313949 - RNA, 32 nt, Human
agaugcugggacugaggguggagcagcaaacu

SEQ ID NO: 313950 - RNA, 32 nt, Human
agaugcugggggcugcggccacggucagaggg

SEQ ID NO: 313951 - RNA, 32 nt, Human
agaugcuggugaagcaggugcagugaggaucc

SEQ ID NO: 313952 - RNA, 32 nt, Human
agaugcuguggacucugggaccugcagcucug

SEQ ID NO: 313953 - RNA, 32 nt, Human
agaugcuguguccaccacccagcuucaccccu

SEQ ID NO: 313954 - RNA, 32 nt, Human
agaugcugugucccccgugaugcagcuggaac

SEQ ID NO: 313955 - RNA, 32 nt, Human
agaugcuguuaaucuguaucccuauccccaac

SEQ ID NO: 313956 - RNA, 18 nt, Human
agaugcuguuuaagugac

SEQ ID NO: 313957 - RNA, 32 nt, Human
agaugcuguuucuacaaagcugugugaugggu

SEQ ID NO: 313958 - RNA, 32 nt, Human
agaugcuguuucuauaaagcugugugaugggu

SEQ ID NO: 313959 - RNA, 32 nt, Human
agaugcuguuucuauaaagcugugugauggua

SEQ ID NO: 313960 - RNA, 22 nt, Human
agaugcuuaucuaaccucccca

SEQ ID NO: 313961 - RNA, 23 nt, Human
agaugcuucaacaacaauuuuua

SEQ ID NO: 313962 - RNA, 32 nt, Human
agaugcuucauuuugacccuuggcugcagugg

SEQ ID NO: 313963 - RNA, 32 nt, Human
agaugcuuccaaggagcuacuuaguuuuaggg

SEQ ID NO: 313964 - RNA, 32 nt, Human
agaugcuucccaagaacuuucaagccaacaaa

SEQ ID NO: 313965 - RNA, 32 nt, Human
agaugcuucccaaggaggagucuguuuuguug

SEQ ID NO: 313966 - RNA, 32 nt, Human
agaugcuugugugguggcuucuuguccuucuc

SEQ ID NO: 313967 - RNA, 32 nt, Human
agaugcuuucagcugagaacagauuugacuca

SEQ ID NO: 313968 - RNA, 32 nt, Human
agaugcuuucaucgucucuccuucccucaagu

SEQ ID NO: 313969 - RNA, 32 nt, Human
agaugcuuucauuauggccuccagaggaaacc

SEQ ID NO: 313970 - RNA, 32 nt, Human
agaugcuuuccaacaugacaccugaacaucuu

SEQ ID NO: 313971 - RNA, 27 nt, Human
agaugcuuuugagccagaaugccuuca

SEQ ID NO: 313972 - RNA, 32 nt, Human
agaugcuuuuguacggguucccaugaaucuuc

SEQ ID NO: 313973 - RNA, 32 nt, Human
agaugcuuuuugagcugucuuacuuugauauc

SEQ ID NO: 313974 - RNA, 32 nt, Human
agauggaaacuacaagaguggcugguuugggg

SEQ ID NO: 313975 - RNA, 32 nt, Human
agauggaaaguagaugaaacuacuuugaaaau

SEQ ID NO: 313976 - RNA, 32 nt, Human
agauggaaagugaaccaaaaaggcuagaaacc

SEQ ID NO: 313977 - RNA, 32 nt, Human
agauggaaaugagggcaacugcugcuugaugg

SEQ ID NO: 313978 - RNA, 32 nt, Human
agauggaacacauggugaaugcauacagcaaa

SEQ ID NO: 313979 - RNA, 32 nt, Human
agauggaaccuggccucaguuuaggaacaggg

SEQ ID NO: 313980 - RNA, 32 nt, Human
agauggaaccuucucuucuuccuucuccucuu

SEQ ID NO: 313981 - RNA, 32 nt, Human
agauggaacuccaggaaauccaacucaaagaa

SEQ ID NO: 313982 - RNA, 32 nt, Human
agauggaagaggagacacagacacaaagcagg

SEQ ID NO: 313983 - RNA, 32 nt, Human
agauggaagagggagcucuggagugcuaacuu

SEQ ID NO: 313984 - RNA, 32 nt, Human
agauggaagagggaggaacaugagagcugaag

SEQ ID NO: 313985 - RNA, 32 nt, Human
agauggaagcaaaggaauccugccugccuuca

SEQ ID NO: 313986 - RNA, 32 nt, Human
agauggaaggagaucaaacacagaaucauaau

SEQ ID NO: 313987 - RNA, 32 nt, Human
agauggaaggcagaggauacugcgaccacccc

SEQ ID NO: 313988 - RNA, 32 nt, Human
agauggaaggcaggugaggaugucaggaugag

SEQ ID NO: 313989 - RNA, 32 nt, Human
agauggaagggaggcauuugcugacagaggac

SEQ ID NO: 313990 - RNA, 32 nt, Human
agauggaagucgcauuguagauucaagaaauu

SEQ ID NO: 313991 - RNA, 32 nt, Human
agauggaauuccaggaaagaacuucagguguc

SEQ ID NO: 313992 - RNA, 20 nt, Human
agauggaauuucaccauguu

SEQ ID NO: 313993 - RNA, 21 nt, Human
agauggaauuucaccguguug

SEQ ID NO: 313994 - RNA, 32 nt, Human
agauggacacugugccuggagugaaccugagc

SEQ ID NO: 313995 - RNA, 32 nt, Human
agauggacagggccacgacagggcucugagag

SEQ ID NO: 313996 - RNA, 32 nt, Human
agauggaccacgggaugagacucuccacugcc

SEQ ID NO: 313997 - RNA, 32 nt, Human
agauggaccggcucuugcucccagcuccuauu

SEQ ID NO: 313998 - RNA, 23 nt, Human
agauggaccucugugguugguca

SEQ ID NO: 313999 - RNA, 32 nt, Human
agauggaccugcaggaaagugagcaaacaucg

SEQ ID NO: 314000 - RNA, 32 nt, Human
agauggacgaggucugcagacggagggcagag

SEQ ID NO: 314001 - RNA, 27 nt, Human
agauggacucgguggagaagggggccg

SEQ ID NO: 314002 - RNA, 32 nt, Human
agauggacucugccaccuccucccagcuggac

SEQ ID NO: 314003 - RNA, 32 nt, Human
agauggacugcuugaguccaggaauuugagac

SEQ ID NO: 314004 - RNA, 32 nt, Human
agauggacuguggccgggcaaguggaucacag

SEQ ID NO: 314005 - RNA, 32 nt, Human
agauggagaauaggaagggcauuccaggcaga

SEQ ID NO: 314006 - RNA, 32 nt, Human
agauggagaccccuuucuacaggaugaccccu

SEQ ID NO: 314007 - RNA, 32 nt, Human
agauggagacugaggcccacgcuugggucccc

SEQ ID NO: 314008 - RNA, 32 nt, Human
agauggagagagaccuaaaaaccugagaggaa

SEQ ID NO: 314009 - RNA, 32 nt, Human
agauggagaggaggggagagagaaagagaggu

SEQ ID NO: 314010 - RNA, 32 nt, Human
agauggagaggauugaccagaggaauaacuua

SEQ ID NO: 314011 - RNA, 32 nt, Human
agauggagaggugguggccgagaguggaaaua

SEQ ID NO: 314012 - RNA, 32 nt, Human
agauggagagugacucuguuggcagaaggcag

SEQ ID NO: 314013 - RNA, 32 nt, Human
agauggagccacugcacuccagcccaggugac

SEQ ID NO: 314014 - RNA, 32 nt, Human
agauggagccacugcacuccagccugggcgac

SEQ ID NO: 314015 - RNA, 32 nt, Human
agauggagccacugcacuccagccugggggaa

SEQ ID NO: 314016 - RNA, 27 nt, Human
agauggagccaucucaguguguggagg

SEQ ID NO: 314017 - RNA, 32 nt, Human
agauggagccugggcaacaagagcgaaacucc

SEQ ID NO: 314018 - RNA, 32 nt, Human
agauggagcugguacccagcaggucuccucuc

SEQ ID NO: 314019 - RNA, 24 nt, Human
agauggagcuuccuacucauguug

SEQ ID NO: 314020 - RNA, 32 nt, Human
agauggaggcagcagacgugcagugccauaag

SEQ ID NO: 314021 - RNA, 32 nt, Human
agauggaggcaguggcuggagugaaugaacgg

SEQ ID NO: 314022 - RNA, 32 nt, Human
agauggagggccugguggaugcccuccucccu

SEQ ID NO: 314023 - RNA, 32 nt, Human
agauggagggcgucuuuccuucuguuaagcug

SEQ ID NO: 314024 - RNA, 21 nt, Human
agauggaguaucgcuauguug

SEQ ID NO: 314025 - RNA, 21 nt, Human
agauggagucucacuauguug

SEQ ID NO: 314026 - RNA, 19 nt, Human
agauggagucucgcucugu

SEQ ID NO: 314027 - RNA, 32 nt, Human
agauggagucucuugcucugucauccagguug

SEQ ID NO: 314028 - RNA, 32 nt, Human
agauggagucuggcuuugucccccaggcugga

SEQ ID NO: 314029 - RNA, 19 nt, Human
agauggagucuuacucugu

SEQ ID NO: 314030 - RNA, 19 nt, Human
agauggagucuugcucugu

SEQ ID NO: 314031 - RNA, 21 nt, Human
agauggaguugcuccauguug

SEQ ID NO: 314032 - RNA, 32 nt, Human
agauggaguugguauucagaugccaugccugu

SEQ ID NO: 314033 - RNA, 21 nt, Human
agauggaguuucaccauauug

SEQ ID NO: 314034 - RNA, 25 nt, Human
agauggaguuucaccauauugccca

SEQ ID NO: 314035 - RNA, 18 nt, Human
agauggaguuucaccaug

SEQ ID NO: 314036 - RNA, 25 nt, Human
agauggaguuucaccauggugguca

SEQ ID NO: 314037 - RNA, 20 nt, Human
agauggaguuucaccauguu

SEQ ID NO: 314038 - RNA, 21 nt, Human
agauggaguuucaccauguug

SEQ ID NO: 314039 - RNA, 25 nt, Human
agauggaguuucaccauguuggcca

SEQ ID NO: 314040 - RNA, 25 nt, Human
agauggaguuucaccauguugguca

SEQ ID NO: 314041 - RNA, 21 nt, Human
agauggaguuucacccuuguu

SEQ ID NO: 314042 - RNA, 20 nt, Human
agauggaguuucacucuguu

SEQ ID NO: 314043 - RNA, 21 nt, Human
agauggaguuucacucuguug

SEQ ID NO: 314044 - RNA, 21 nt, Human
agauggaguuucacucuuguu

SEQ ID NO: 314045 - RNA, 21 nt, Human
agauggaguuucacuguguca

SEQ ID NO: 314046 - RNA, 32 nt, Human
agauggaguuucacugugucagccaggauggu

SEQ ID NO: 314047 - RNA, 21 nt, Human
agauggaguuucgcucuguug

SEQ ID NO: 314048 - RNA, 21 nt, Human
agauggaguuucgcucuuguu

SEQ ID NO: 314049 - RNA, 19 nt, Human
agauggaguuucgcuguug

SEQ ID NO: 314050 - RNA, 22 nt, Human
agauggaguuucgcuuuuguug

SEQ ID NO: 314051 - RNA, 18 nt, Human
agauggaguuugcuguug

SEQ ID NO: 314052 - RNA, 27 nt, Human
agauggaguuuucgcucuuguugccca

SEQ ID NO: 314053 - RNA, 19 nt, Human
agauggaguuuugccaugu

SEQ ID NO: 314054 - RNA, 32 nt, Human
agauggaguuuugcucucguugccaaggcugg

SEQ ID NO: 314055 - RNA, 32 nt, Human
agauggaucacgaggucagggguucaagacca

SEQ ID NO: 314056 - RNA, 32 nt, Human
agauggaugcuacagagagagagggggacuuc

SEQ ID NO: 314057 - RNA, 32 nt, Human
agauggauugccaaucuucugccaucaauuuu

SEQ ID NO: 314058 - RNA, 32 nt, Human
agauggcaaaaucaucuuacauuuuucagacu

SEQ ID NO: 314059 - RNA, 32 nt, Human
agauggcaaagagcagcuuggccaggugagga

SEQ ID NO: 314060 - RNA, 32 nt, Human
agauggcaacacccuccagucuguagcagagc

SEQ ID NO: 314061 - RNA, 32 nt, Human
agauggcaagacugaggccuggagaaguggaa

SEQ ID NO: 314062 - RNA, 32 nt, Human
agauggcaaugccaccauuguugaugugacuc

SEQ ID NO: 314063 - RNA, 32 nt, Human
agauggcacauccuugcugcuggggacuuggc

SEQ ID NO: 314064 - RNA, 32 nt, Human
agauggcaccacuacacuccagcccgggcgac

SEQ ID NO: 314065 - RNA, 32 nt, Human
agauggcaccacuacauuucagccugggcgaa

SEQ ID NO: 314066 - RNA, 32 nt, Human
agauggcaccacugcacuccagccuaggugac

SEQ ID NO: 314067 - RNA, 27 nt, Human
agauggcaccacugcacuccagccugg

SEQ ID NO: 314068 - RNA, 32 nt, Human
agauggcaccacugcacuccagccuggacgac

SEQ ID NO: 314069 - RNA, 32 nt, Human
agauggcaccacugcacuccagccugggagac

SEQ ID NO: 314070 - RNA, 32 nt, Human
agauggcaccacugcacuccagccugggcaac

SEQ ID NO: 314071 - RNA, 32 nt, Human
agauggcaccacugcacuccagccugggugac

SEQ ID NO: 314072 - RNA, 32 nt, Human
agauggcaccacugcacuccagccugggugag

SEQ ID NO: 314073 - RNA, 32 nt, Human
agauggcaccacugcacuccagcuugggugac

SEQ ID NO: 314074 - RNA, 32 nt, Human
agauggcaccacugcacuccauccugggugac

SEQ ID NO: 314075 - RNA, 32 nt, Human
agauggcaccacugcacuccggccuaggcaac

SEQ ID NO: 314076 - RNA, 32 nt, Human
agauggcaccacugcauuccagccugggugac

SEQ ID NO: 314077 - RNA, 32 nt, Human
agauggcaccacuggacuccagccugggcgac

SEQ ID NO: 314078 - RNA, 32 nt, Human
agauggcaccacuuauugcacuccagcccggg

SEQ ID NO: 314079 - RNA, 32 nt, Human
agauggcaccauuacacuccagccugggcaac

SEQ ID NO: 314080 - RNA, 32 nt, Human
agauggcaccauugcacuccagccugggugac

SEQ ID NO: 314081 - RNA, 26 nt, Human
agauggcaccuuucaccacuugguca

SEQ ID NO: 314082 - RNA, 32 nt, Human
agauggcacuguccuaaagugcugucagggug

SEQ ID NO: 314083 - RNA, 32 nt, Human
agauggcagacaggagagaugggccccaggau

SEQ ID NO: 314084 - RNA, 27 nt, Human
agauggcagcagcgugucggagcguga

SEQ ID NO: 314085 - RNA, 32 nt, Human
agauggcagccccucccccgcaugcaugcacc

SEQ ID NO: 314086 - RNA, 27 nt, Human
agauggcagcgguaaaggcaucaacau

SEQ ID NO: 314087 - RNA, 32 nt, Human
agauggcaggagguggggugugcuugugugga

SEQ ID NO: 314088 - RNA, 32 nt, Human
agauggcagggacagcgcgccaugaccgagag

SEQ ID NO: 314089 - RNA, 32 nt, Human
agauggcaggugugugggacagacuggaggau

SEQ ID NO: 314090 - RNA, 32 nt, Human
agauggcaguggugaaggcaucaacaucaaaa

SEQ ID NO: 314091 - RNA, 32 nt, Human
agauggcaguguaucuaccucacaaagcagug

SEQ ID NO: 314092 - RNA, 32 nt, Human
agauggcaucccucaucaggguugccagaugg

SEQ ID NO: 314093 - RNA, 21 nt, Human
agauggcaucucacuauguug

SEQ ID NO: 314094 - RNA, 32 nt, Human
agauggcauuaugugguuaagagcauggggcg

SEQ ID NO: 314095 - RNA, 21 nt, Human
agauggcauuucaccauguug

SEQ ID NO: 314096 - RNA, 32 nt, Human
agauggccaaaagcauucaagccugggggaag

SEQ ID NO: 314097 - RNA, 32 nt, Human
agauggccacacccccagccacagauggccuc

SEQ ID NO: 314098 - RNA, 27 nt, Human
agauggccacggucauccccagccccc

SEQ ID NO: 314099 - RNA, 32 nt, Human
agauggccaguucuuucuaccucagagugagu

SEQ ID NO: 314100 - RNA, 32 nt, Human
agauggcccagcccgugggguggcagcuggcu

SEQ ID NO: 314101 - RNA, 32 nt, Human
agauggcccaggcuggggaagucgcucucaug

SEQ ID NO: 314102 - RNA, 32 nt, Human
agauggcccccucuuucccuuuccccacucug

SEQ ID NO: 314103 - RNA, 32 nt, Human
agauggcccuggggguccccuguucucugaau

SEQ ID NO: 314104 - RNA, 32 nt, Human
agauggccucauuccuccuguucucccaguuu

SEQ ID NO: 314105 - RNA, 27 nt, Human
agauggccugguuugcccucuaccucc

SEQ ID NO: 314106 - RNA, 32 nt, Human
agauggccuguaaucccagcacuuugggaggc

SEQ ID NO: 314107 - RNA, 32 nt, Human
agauggcgccacuacacuccagccugggcaac

SEQ ID NO: 314108 - RNA, 32 nt, Human
agauggcgccacuacacuccagccugggcgac

SEQ ID NO: 314109 - RNA, 32 nt, Human
agauggcgccacugcacuccagcccgggcgac

SEQ ID NO: 314110 - RNA, 32 nt, Human
agauggcgccacugcacuccagccuaggcaac

SEQ ID NO: 314111 - RNA, 32 nt, Human
agauggcgccacugcacuccagccugagugac

SEQ ID NO: 314112 - RNA, 32 nt, Human
agauggcgccacugcacuccagccugggcgac

SEQ ID NO: 314113 - RNA, 32 nt, Human
agauggcgccacugcacuccagccugggcguc

SEQ ID NO: 314114 - RNA, 32 nt, Human
agauggcgccacugcacuccagccugggugac

SEQ ID NO: 314115 - RNA, 32 nt, Human
agauggcgccacugcacuccagccugggugag

SEQ ID NO: 314116 - RNA, 32 nt, Human
agauggcgccacugcacuccagucugggcgau

SEQ ID NO: 314117 - RNA, 32 nt, Human
agauggcgccacugcacucccgucugggggag

SEQ ID NO: 314118 - RNA, 32 nt, Human
agauggcgccacugcauuccagccugggcaac

SEQ ID NO: 314119 - RNA, 32 nt, Human
agauggcgccacugcgcuccagccugggcaac

SEQ ID NO: 314120 - RNA, 32 nt, Human
agauggcgccaucacacuccagccugcucuuc

SEQ ID NO: 314121 - RNA, 32 nt, Human
agauggcgccauugcacuccagccugggcaaa

SEQ ID NO: 314122 - RNA, 32 nt, Human
agauggcgccauugcacuccagccugggugac

SEQ ID NO: 314123 - RNA, 32 nt, Human
agauggcgccauuucacuccagccugggcgac

SEQ ID NO: 314124 - RNA, 32 nt, Human
agauggcgccuccaccgggaugagcuagccag

SEQ ID NO: 314125 - RNA, 32 nt, Human
agauggcgcgacugcacuccagccugggcgag

SEQ ID NO: 314126 - RNA, 32 nt, Human
agauggcgcuauugcacuccagucuggguaac

SEQ ID NO: 314127 - RNA, 32 nt, Human
agauggcgcugcugcacucaagcuuggaugac

SEQ ID NO: 314128 - RNA, 27 nt, Human
agauggcggaagguggaggcugccgug

SEQ ID NO: 314129 - RNA, 32 nt, Human
agauggcggagcaagacagaagaaaggaaaag

SEQ ID NO: 314130 - RNA, 27 nt, Human
agauggcggccccuguaguggcgccgc

SEQ ID NO: 314131 - RNA, 32 nt, Human
agauggcggcgccugaggggucuugggggcuc

SEQ ID NO: 314132 - RNA, 27 nt, Human
agauggcggcggcagacacagcagcag

SEQ ID NO: 314133 - RNA, 32 nt, Human
agauggcgggagaagaggcgagugaagaugca

SEQ ID NO: 314134 - RNA, 32 nt, Human
agauggcgguagcugagggguugaccgagaga

SEQ ID NO: 314135 - RNA, 21 nt, Human
agauggcguuucaccauguug

SEQ ID NO: 314136 - RNA, 25 nt, Human
agauggcguuucaccauguuggcca

SEQ ID NO: 314137 - RNA, 32 nt, Human
agauggcuaagaguccaucaggcagaugaaau

SEQ ID NO: 314138 - RNA, 24 nt, Human
agauggcucacaccugugauccca

SEQ ID NO: 314139 - RNA, 32 nt, Human
agauggcucccaagguuccuaggcauugcagg

SEQ ID NO: 314140 - RNA, 32 nt, Human
agauggcuccuugggaugaagaggguagagug

SEQ ID NO: 314141 - RNA, 32 nt, Human
agauggcucugccaccagccagcucugugauc

SEQ ID NO: 314142 - RNA, 32 nt, Human
agauggcugagugaggguuauggggagccuga

SEQ ID NO: 314143 - RNA, 32 nt, Human
agauggcugcagcccucgaccuccugggcuca

SEQ ID NO: 314144 - RNA, 27 nt, Human
agauggcugccucugccuuugcuggug

SEQ ID NO: 314145 - RNA, 32 nt, Human
agauggcuggcuacucuuguuuucccucauga

SEQ ID NO: 314146 - RNA, 32 nt, Human
agauggcugggaagagaggaggaguggcagaa

SEQ ID NO: 314147 - RNA, 27 nt, Human
agauggcuggggacacagaagugugga

SEQ ID NO: 314148 - RNA, 32 nt, Human
agauggcuucaguucaugagacgggaucugag

SEQ ID NO: 314149 - RNA, 32 nt, Human
agauggcuugagcccaggagguugaggcugca

SEQ ID NO: 314150 - RNA, 32 nt, Human
agauggcuuugaaaaaggugauccaagcaggc

SEQ ID NO: 314151 - RNA, 32 nt, Human
agaugggaaaaauaauagcccauccguguacu

SEQ ID NO: 314152 - RNA, 32 nt, Human
agaugggaaaacugaggccuggagguaggaag

SEQ ID NO: 314153 - RNA, 32 nt, Human
agaugggaaagagguacaaaauaaucugcugc

SEQ ID NO: 314154 - RNA, 32 nt, Human
agaugggaaauggccaaaagaauaaaccauuu

SEQ ID NO: 314155 - RNA, 24 nt, Human
agaugggaaguggcuguggucuca

SEQ ID NO: 314156 - RNA, 32 nt, Human
agaugggaaugaggugggagguggaagaaggg

SEQ ID NO: 314157 - RNA, 32 nt, Human
agaugggacuacaggaguaugccaccaugccc

SEQ ID NO: 314158 - RNA, 32 nt, Human
agaugggacuacaggcacaggccauuaugccu

SEQ ID NO: 314159 - RNA, 32 nt, Human
agaugggacuacaggcaccugccaacacgccc

SEQ ID NO: 314160 - RNA, 32 nt, Human
agaugggacucaagcaggaugggugcuauauc

SEQ ID NO: 314161 - RNA, 32 nt, Human
agaugggacuccuccuuuauuccagcauggag

SEQ ID NO: 314162 - RNA, 32 nt, Human
agaugggagacaggagagaugagccccaggac

SEQ ID NO: 314163 - RNA, 32 nt, Human
agaugggagagggaagggggaggugugaaacg

SEQ ID NO: 314164 - RNA, 32 nt, Human
agaugggagcaguccuggguccuggucuuagc

SEQ ID NO: 314165 - RNA, 24 nt, Human
agaugggaggacgaagagguccca

SEQ ID NO: 314166 - RNA, 23 nt, Human
agaugggaggauacuugaaucca

SEQ ID NO: 314167 - RNA, 24 nt, Human
agaugggaggaucacuugaaccca

SEQ ID NO: 314168 - RNA, 24 nt, Human
agaugggaggaucgcuugagacca

SEQ ID NO: 314169 - RNA, 24 nt, Human
agaugggaggaucgcuugagccca

SEQ ID NO: 314170 - RNA, 24 nt, Human
agaugggaggauggcuugagccca

SEQ ID NO: 314171 - RNA, 24 nt, Human
agaugggaggauugccugagccca

SEQ ID NO: 314172 - RNA, 24 nt, Human
agaugggaggauugcuugagccca

SEQ ID NO: 314173 - RNA, 23 nt, Human
agaugggaggauugcuugagucc

SEQ ID NO: 314174 - RNA, 22 nt, Human
agaugggaguuucaccauguug

SEQ ID NO: 314175 - RNA, 26 nt, Human
agaugggaguuucaccauguuggcca

SEQ ID NO: 314176 - RNA, 19 nt, Human
agaugggaucacuauguug

SEQ ID NO: 314177 - RNA, 21 nt, Human
agaugggaucucaccauguug

SEQ ID NO: 314178 - RNA, 25 nt, Human
agaugggaucucaccauguugccca

SEQ ID NO: 314179 - RNA, 21 nt, Human
agaugggaucucacuagguug

SEQ ID NO: 314180 - RNA, 21 nt, Human
agaugggaucucacuauguug

SEQ ID NO: 314181 - RNA, 21 nt, Human
agaugggaucucauuuuguug

SEQ ID NO: 314182 - RNA, 21 nt, Human
agaugggaucuuucuauguug

SEQ ID NO: 314183 - RNA, 32 nt, Human
agaugggauuacaggcgccugccaccacgccc

SEQ ID NO: 314184 - RNA, 32 nt, Human
agaugggauucugcuguagagucucuagagaa

SEQ ID NO: 314185 - RNA, 21 nt, Human
agaugggauuucaccauguug

SEQ ID NO: 314186 - RNA, 25 nt, Human
agaugggauuucaccauguuggcca

SEQ ID NO: 314187 - RNA, 21 nt, Human
agaugggauuucacuguguug

SEQ ID NO: 314188 - RNA, 21 nt, Human
agaugggauuucaucauguug

SEQ ID NO: 314189 - RNA, 25 nt, Human
agaugggauuucaucauguuggcca

SEQ ID NO: 314190 - RNA, 21 nt, Human
agaugggauuucgccauguug

SEQ ID NO: 314191 - RNA, 25 nt, Human
agaugggauuucgccauguuggcca

SEQ ID NO: 314192 - RNA, 21 nt, Human
agaugggauuuuaccacauug

SEQ ID NO: 314193 - RNA, 25 nt, Human
agaugggauuuuaccacauugguca

SEQ ID NO: 314194 - RNA, 21 nt, Human
agaugggauuuugccauguug

SEQ ID NO: 314195 - RNA, 32 nt, Human
agaugggcaaaaagauuuucaugcuaaucuuc

SEQ ID NO: 314196 - RNA, 32 nt, Human
agaugggcaaacugaggcccagaggggcaggg

SEQ ID NO: 314197 - RNA, 32 nt, Human
agaugggcacuuuucuuccccuucccugccua

SEQ ID NO: 314198 - RNA, 26 nt, Human
agaugggcagaucacuugaggucagg

SEQ ID NO: 314199 - RNA, 32 nt, Human
agaugggcagggcagagacccucaaaugcucg

SEQ ID NO: 314200 - RNA, 32 nt, Human
agaugggcaguuaccuucucuccgucucucuc

SEQ ID NO: 314201 - RNA, 32 nt, Human
agaugggcauguagacuagugcuuucucaacc

SEQ ID NO: 314202 - RNA, 30 nt, Human
agaugggccucaauaaaaugguugaguugc

SEQ ID NO: 314203 - RNA, 26 nt, Human
agaugggcggaucaccugaggucagg

SEQ ID NO: 314204 - RNA, 24 nt, Human
agaugggcggaucacgaggucagg

SEQ ID NO: 314205 - RNA, 24 nt, Human
agaugggcggaucaugaagucagg

SEQ ID NO: 314206 - RNA, 26 nt, Human
agaugggcggaucuuuugaggucagg

SEQ ID NO: 314207 - RNA, 26 nt, Human
agaugggcggauugcuugaggucagg

SEQ ID NO: 314208 - RNA, 32 nt, Human
agaugggcucaagcaucuacacaccucagccu

SEQ ID NO: 314209 - RNA, 32 nt, Human
agauggggaaacugaggccuugagaaggaaaa

SEQ ID NO: 314210 - RNA, 32 nt, Human
agauggggaaacugaggcucaaggaaggcaug

SEQ ID NO: 314211 - RNA, 32 nt, Human
agauggggaaacugaggcuuaggaagagaaug

SEQ ID NO: 314212 - RNA, 27 nt, Human
agauggggacggaggccacagagcagg

SEQ ID NO: 314213 - RNA, 22 nt, Human
agauggggacuucaccguguug

SEQ ID NO: 314214 - RNA, 26 nt, Human
agauggggacuucaccguguuggcca

SEQ ID NO: 314215 - RNA, 32 nt, Human
agauggggagagaaacggggagagaaagaaac

SEQ ID NO: 314216 - RNA, 32 nt, Human
agauggggaggaagccccaucucugcuguucc

SEQ ID NO: 314217 - RNA, 19 nt, Human
agauggggagggaguccca

SEQ ID NO: 314218 - RNA, 22 nt, Human
agauggggaucucacuguguug

SEQ ID NO: 314219 - RNA, 32 nt, Human
agauggggauuccacccaggucugucugcagc

SEQ ID NO: 314220 - RNA, 32 nt, Human
agauggggcacugacccaggaggagaaagcag

SEQ ID NO: 314221 - RNA, 21 nt, Human
agauggggccucacuacauug

SEQ ID NO: 314222 - RNA, 20 nt, Human
agauggggccucuuuauguu

SEQ ID NO: 314223 - RNA, 21 nt, Human
agauggggcggucacaugucc

SEQ ID NO: 314224 - RNA, 19 nt, Human
agauggggcuacuguuguu

SEQ ID NO: 314225 - RNA, 19 nt, Human
agauggggcugucuaguug

SEQ ID NO: 314226 - RNA, 21 nt, Human
agauggggcuucaccauguug

SEQ ID NO: 314227 - RNA, 25 nt, Human
agauggggcuucaccauguuggcca

SEQ ID NO: 314228 - RNA, 18 nt, Human
agauggggcuucccacgu

SEQ ID NO: 314229 - RNA, 21 nt, Human
agauggggcuucgccaugcug

SEQ ID NO: 314230 - RNA, 32 nt, Human
agaugggggaaaggaagauaaucuggaaaguu

SEQ ID NO: 314231 - RNA, 32 nt, Human
agaugggggaauguguuauuguaugggaggag

SEQ ID NO: 314232 - RNA, 32 nt, Human
agaugggggagggguuuaacuuuuacauuauu

SEQ ID NO: 314233 - RNA, 31 nt, Human
agaugggggcagagagaaggucugaguccgg

SEQ ID NO: 314234 - RNA, 21 nt, Human
agaugggggcucccuauguug

SEQ ID NO: 314235 - RNA, 25 nt, Human
agaugggggguuuguggaguguuua

SEQ ID NO: 314236 - RNA, 22 nt, Human
agaugggggucucacuaugcug

SEQ ID NO: 314237 - RNA, 22 nt, Human
agaugggggucucacuauguug

SEQ ID NO: 314238 - RNA, 22 nt, Human
agauggggguuucaccauauug

SEQ ID NO: 314239 - RNA, 26 nt, Human
agauggggguuucaccauauuggcca

SEQ ID NO: 314240 - RNA, 22 nt, Human
agauggggguuucaccauguug

SEQ ID NO: 314241 - RNA, 26 nt, Human
agauggggguuucaccauguuggcca

SEQ ID NO: 314242 - RNA, 19 nt, Human
agaugggguacacaugucc

SEQ ID NO: 314243 - RNA, 19 nt, Human
agauggggucacaaugcug

SEQ ID NO: 314244 - RNA, 21 nt, Human
agauggggucucacaguguug

SEQ ID NO: 314245 - RNA, 20 nt, Human
agauggggucucaccauguu

SEQ ID NO: 314246 - RNA, 21 nt, Human
agauggggucucacccuguca

SEQ ID NO: 314247 - RNA, 21 nt, Human
agauggggucucacccuguug

SEQ ID NO: 314248 - RNA, 21 nt, Human
agauggggucucacuauguug

SEQ ID NO: 314249 - RNA, 20 nt, Human
agauggggucucacuguguu

SEQ ID NO: 314250 - RNA, 21 nt, Human
agauggggucucccuauguug

SEQ ID NO: 314251 - RNA, 21 nt, Human
agauggggucucgcacugucc

SEQ ID NO: 314252 - RNA, 21 nt, Human
agauggggucucgccguguug

SEQ ID NO: 314253 - RNA, 21 nt, Human
agauggggucucgcuauguug

SEQ ID NO: 314254 - RNA, 21 nt, Human
agauggggucucgcucuguca

SEQ ID NO: 314255 - RNA, 21 nt, Human
agauggggucucuccauguug

SEQ ID NO: 314256 - RNA, 25 nt, Human
agauggggucucuccauguugguca

SEQ ID NO: 314257 - RNA, 21 nt, Human
agauggggucuuacuauguug

SEQ ID NO: 314258 - RNA, 21 nt, Human
agauggggucuuccucuguug

SEQ ID NO: 314259 - RNA, 21 nt, Human
agauggggucuugcuauauug

SEQ ID NO: 314260 - RNA, 19 nt, Human
agauggggucuugcuaugu

SEQ ID NO: 314261 - RNA, 21 nt, Human
agauggggucuugcuauguug

SEQ ID NO: 314262 - RNA, 20 nt, Human
agauggggucuugcuguguu

SEQ ID NO: 314263 - RNA, 21 nt, Human
agauggggucuugcuguguug

SEQ ID NO: 314264 - RNA, 21 nt, Human
agauggggucuugcuuuguug

SEQ ID NO: 314265 - RNA, 21 nt, Human
agauggggucuuguuauauug

SEQ ID NO: 314266 - RNA, 32 nt, Human
agauggggugcaggucagcucacucaguuguu

SEQ ID NO: 314267 - RNA, 21 nt, Human
agauggggugucaccauguug

SEQ ID NO: 314268 - RNA, 25 nt, Human
agauggggugucaccauguuggcca

SEQ ID NO: 314269 - RNA, 20 nt, Human
agaugggguucaccauguug

SEQ ID NO: 314270 - RNA, 24 nt, Human
agaugggguucaccauguuggcca

SEQ ID NO: 314271 - RNA, 22 nt, Human
agaugggguucccacuauguug

SEQ ID NO: 314272 - RNA, 26 nt, Human
agaugggguucccacuauguugauca

SEQ ID NO: 314273 - RNA, 20 nt, Human
agaugggguucucaucaguu

SEQ ID NO: 314274 - RNA, 20 nt, Human
agaugggguuuaccauguug

SEQ ID NO: 314275 - RNA, 24 nt, Human
agaugggguuuaccauguuggcca

SEQ ID NO: 314276 - RNA, 21 nt, Human
agaugggguuuauccauguug

SEQ ID NO: 314277 - RNA, 25 nt, Human
agaugggguuuauccauguugguca

SEQ ID NO: 314278 - RNA, 21 nt, Human
agaugggguuucacaauguug

SEQ ID NO: 314279 - RNA, 25 nt, Human
agaugggguuucacaauguuggcca

SEQ ID NO: 314280 - RNA, 21 nt, Human
agaugggguuucaccaaguug

SEQ ID NO: 314281 - RNA, 21 nt, Human
agaugggguuucaccacauug

SEQ ID NO: 314282 - RNA, 25 nt, Human
agaugggguuucaccacauuggcca

SEQ ID NO: 314283 - RNA, 20 nt, Human
agaugggguuucaccacguu

SEQ ID NO: 314284 - RNA, 21 nt, Human
agaugggguuucaccacguug

SEQ ID NO: 314285 - RNA, 32 nt, Human
agaugggguuucaccacguugcccaggcuggu

SEQ ID NO: 314286 - RNA, 25 nt, Human
agaugggguuucaccacguuggcca

SEQ ID NO: 314287 - RNA, 22 nt, Human
agaugggguuucaccauacugg

SEQ ID NO: 314288 - RNA, 21 nt, Human
agaugggguuucaccauauug

SEQ ID NO: 314289 - RNA, 22 nt, Human
agaugggguuucaccauauugg

SEQ ID NO: 314290 - RNA, 25 nt, Human
agaugggguuucaccauauuggcca

SEQ ID NO: 314291 - RNA, 25 nt, Human
agaugggguuucaccauauugguca

SEQ ID NO: 314292 - RNA, 21 nt, Human
agaugggguuucaccaucuug

SEQ ID NO: 314293 - RNA, 25 nt, Human
agaugggguuucaccaucuuggcca

SEQ ID NO: 314294 - RNA, 21 nt, Human
agaugggguuucaccaugcug

SEQ ID NO: 314295 - RNA, 25 nt, Human
agaugggguuucaccaugcuggcca

SEQ ID NO: 314296 - RNA, 19 nt, Human
agaugggguuucaccaugu

SEQ ID NO: 314297 - RNA, 25 nt, Human
agaugggguuucaccauguaggcca

SEQ ID NO: 314298 - RNA, 20 nt, Human
agaugggguuucaccauguu

SEQ ID NO: 314299 - RNA, 25 nt, Human
agaugggguuucaccauguuaguca

SEQ ID NO: 314300 - RNA, 21 nt, Human
agaugggguuucaccauguug

SEQ ID NO: 314301 - RNA, 25 nt, Human
agaugggguuucaccauguugauca

SEQ ID NO: 314302 - RNA, 22 nt, Human
agaugggguuucaccauguugg

SEQ ID NO: 314303 - RNA, 25 nt, Human
agaugggguuucaccauguuggcca

SEQ ID NO: 314304 - RNA, 25 nt, Human
agaugggguuucaccauguugguca

SEQ ID NO: 314305 - RNA, 25 nt, Human
agaugggguuucaccauguugucca

SEQ ID NO: 314306 - RNA, 21 nt, Human
agaugggguuucaccauuuug

SEQ ID NO: 314307 - RNA, 25 nt, Human
agaugggguuucaccauuuuggcca

SEQ ID NO: 314308 - RNA, 25 nt, Human
agaugggguuucacccuauugguca

SEQ ID NO: 314309 - RNA, 20 nt, Human
agaugggguuucacccuguu

SEQ ID NO: 314310 - RNA, 20 nt, Human
agaugggguuucaccguguu

SEQ ID NO: 314311 - RNA, 25 nt, Human
agaugggguuucaccguguuaguca

SEQ ID NO: 314312 - RNA, 21 nt, Human
agaugggguuucaccguguug

SEQ ID NO: 314313 - RNA, 25 nt, Human
agaugggguuucaccguguuggcca

SEQ ID NO: 314314 - RNA, 21 nt, Human
agaugggguuucaccuuguug

SEQ ID NO: 314315 - RNA, 25 nt, Human
agaugggguuucaccuuguuggcca

SEQ ID NO: 314316 - RNA, 25 nt, Human
agaugggguuucaccuuguugguca

SEQ ID NO: 314317 - RNA, 21 nt, Human
agaugggguuucacgauguug

SEQ ID NO: 314318 - RNA, 25 nt, Human
agaugggguuucacgauguuggcca

SEQ ID NO: 314319 - RNA, 21 nt, Human
agaugggguuucacuauguug

SEQ ID NO: 314320 - RNA, 25 nt, Human
agaugggguuucacuauguuggcca

SEQ ID NO: 314321 - RNA, 25 nt, Human
agaugggguuucacuauguugguca

SEQ ID NO: 314322 - RNA, 19 nt, Human
agaugggguuucacugugu

SEQ ID NO: 314323 - RNA, 20 nt, Human
agaugggguuucacuguguu

SEQ ID NO: 314324 - RNA, 21 nt, Human
agaugggguuucacuguguug

SEQ ID NO: 314325 - RNA, 21 nt, Human
agaugggguuucagcauauug

SEQ ID NO: 314326 - RNA, 25 nt, Human
agaugggguuucagcauauuggcca

SEQ ID NO: 314327 - RNA, 21 nt, Human
agaugggguuucaucacguug

SEQ ID NO: 314328 - RNA, 21 nt, Human
agaugggguuucaucauauug

SEQ ID NO: 314329 - RNA, 25 nt, Human
agaugggguuucaucauauugguca

SEQ ID NO: 314330 - RNA, 20 nt, Human
agaugggguuucaucauguu

SEQ ID NO: 314331 - RNA, 21 nt, Human
agaugggguuucaucauguug

SEQ ID NO: 314332 - RNA, 25 nt, Human
agaugggguuucaucauguuggcca

SEQ ID NO: 314333 - RNA, 21 nt, Human
agaugggguuuccccauguug

SEQ ID NO: 314334 - RNA, 25 nt, Human
agaugggguuuccccauguuggcca

SEQ ID NO: 314335 - RNA, 21 nt, Human
agaugggguuucgccagguug

SEQ ID NO: 314336 - RNA, 21 nt, Human
agaugggguuucgccauauug

SEQ ID NO: 314337 - RNA, 25 nt, Human
agaugggguuucgccauauugauca

SEQ ID NO: 314338 - RNA, 20 nt, Human
agaugggguuucgccauguu

SEQ ID NO: 314339 - RNA, 21 nt, Human
agaugggguuucgccauguug

SEQ ID NO: 314340 - RNA, 25 nt, Human
agaugggguuucgccauguuggcca

SEQ ID NO: 314341 - RNA, 20 nt, Human
agaugggguuucgcgaguug

SEQ ID NO: 314342 - RNA, 21 nt, Human
agaugggguuucgcuauguug

SEQ ID NO: 314343 - RNA, 21 nt, Human
agaugggguuucgucauguug

SEQ ID NO: 314344 - RNA, 20 nt, Human
agaugggguuucucauauug

SEQ ID NO: 314345 - RNA, 18 nt, Human
agaugggguuucuccaug

SEQ ID NO: 314346 - RNA, 32 nt, Human
agaugggguuucuccauguauugcccaggcug

SEQ ID NO: 314347 - RNA, 21 nt, Human
agaugggguuucuccauguug

SEQ ID NO: 314348 - RNA, 25 nt, Human
agaugggguuucuccauguugauca

SEQ ID NO: 314349 - RNA, 25 nt, Human
agaugggguuucuccauguuggcca

SEQ ID NO: 314350 - RNA, 25 nt, Human
agaugggguuucuccauguugguca

SEQ ID NO: 314351 - RNA, 21 nt, Human
agaugggguuucucgauguug

SEQ ID NO: 314352 - RNA, 21 nt, Human
agaugggguuugaccauguug

SEQ ID NO: 314353 - RNA, 25 nt, Human
agaugggguuugaccauguuggcca

SEQ ID NO: 314354 - RNA, 20 nt, Human
agaugggguuugaccguguu

SEQ ID NO: 314355 - RNA, 18 nt, Human
agaugggguuugccaugu

SEQ ID NO: 314356 - RNA, 21 nt, Human
agaugggguuuuaccauauug

SEQ ID NO: 314357 - RNA, 19 nt, Human
agaugggguuuuaccaugu

SEQ ID NO: 314358 - RNA, 21 nt, Human
agaugggguuuuaccauguug

SEQ ID NO: 314359 - RNA, 25 nt, Human
agaugggguuuuaccauguuggcca

SEQ ID NO: 314360 - RNA, 25 nt, Human
agaugggguuuuaccauguugguca

SEQ ID NO: 314361 - RNA, 21 nt, Human
agaugggguuuuacccuguug

SEQ ID NO: 314362 - RNA, 20 nt, Human
agaugggguuuugccauguu

SEQ ID NO: 314363 - RNA, 21 nt, Human
agaugggguuuugccauguug

SEQ ID NO: 314364 - RNA, 21 nt, Human
agaugggguuuugccuuguug

SEQ ID NO: 314365 - RNA, 21 nt, Human
agaugggguuuugcuauguug

SEQ ID NO: 314366 - RNA, 21 nt, Human
agaugggguuuugucauguug

SEQ ID NO: 314367 - RNA, 21 nt, Human
agaugggguuuuuccacguug

SEQ ID NO: 314368 - RNA, 32 nt, Human
agauggguaaacugaggcacagggagccgggc

SEQ ID NO: 314369 - RNA, 32 nt, Human
agaugggugaagagguccagaaugauaugcaa

SEQ ID NO: 314370 - RNA, 24 nt, Human
agaugggugaaucaugaggucagg

SEQ ID NO: 314371 - RNA, 32 nt, Human
agaugggugaguaaacagacguauguggcagc

SEQ ID NO: 314372 - RNA, 32 nt, Human
agaugggugaugucugcauuuccaucugaggc

SEQ ID NO: 314373 - RNA, 26 nt, Human
agauggguggaucaccugaggucagg

SEQ ID NO: 314374 - RNA, 26 nt, Human
agauggguggaucacuugaggucagg

SEQ ID NO: 314375 - RNA, 23 nt, Human
agauggguggaucaugaggucag

SEQ ID NO: 314376 - RNA, 24 nt, Human
agauggguggaucaugaggucagg

SEQ ID NO: 314377 - RNA, 26 nt, Human
agauggguggauuaccugaggucagg

SEQ ID NO: 314378 - RNA, 24 nt, Human
agauggguggauugcuugagccca

SEQ ID NO: 314379 - RNA, 32 nt, Human
agauggguuacugggagaaucucuucaguggc

SEQ ID NO: 314380 - RNA, 32 nt, Human
agauggguucaucaauaacucaccagcaaaua

SEQ ID NO: 314381 - RNA, 23 nt, Human
agauggguucaucagucugguca

SEQ ID NO: 314382 - RNA, 21 nt, Human
agauggguucucacuauauug

SEQ ID NO: 314383 - RNA, 20 nt, Human
agauggguuucaccauguug

SEQ ID NO: 314384 - RNA, 24 nt, Human
agauggguuucaccauguuggcca

SEQ ID NO: 314385 - RNA, 21 nt, Human
agauggguuuucaccauauug

SEQ ID NO: 314386 - RNA, 25 nt, Human
agauggguuuucaccauauugguca

SEQ ID NO: 314387 - RNA, 21 nt, Human
agauggguuuucaccauguug

SEQ ID NO: 314388 - RNA, 25 nt, Human
agauggguuuucaccauguuggcca

SEQ ID NO: 314389 - RNA, 24 nt, Human
agauggguuuugccauguugucca

SEQ ID NO: 314390 - RNA, 32 nt, Human
agaugguaagguaggauaagucuggaaagagu

SEQ ID NO: 314391 - RNA, 27 nt, Human
agaugguaauaaaucuuugccucccac

SEQ ID NO: 314392 - RNA, 32 nt, Human
agaugguaccacugcacuccagccugggugac

SEQ ID NO: 314393 - RNA, 32 nt, Human
agaugguaccucugcacugcagccugggcaac

SEQ ID NO: 314394 - RNA, 32 nt, Human
agaugguaggaaauggagacggagaaauggca

SEQ ID NO: 314395 - RNA, 32 nt, Human
agauggucagagaagaugcgggccaggagacu

SEQ ID NO: 314396 - RNA, 32 nt, Human
agaugguccaugagagaggcagaaggaugggg

SEQ ID NO: 314397 - RNA, 32 nt, Human
agaugguccuaggucaggauuaguggucauuc

SEQ ID NO: 314398 - RNA, 32 nt, Human
agaugguccuccugccucagcuuccaaaggca

SEQ ID NO: 314399 - RNA, 32 nt, Human
agauggucgcaauaaugucugcccagaaccuu

SEQ ID NO: 314400 - RNA, 32 nt, Human
agauggucguuugaagccaggagaucaacuug

SEQ ID NO: 314401 - RNA, 32 nt, Human
agauggucuucaucggcguccagaccugggug

SEQ ID NO: 314402 - RNA, 32 nt, Human
agauggugaaaaggaaggguaauuaaaaugga

SEQ ID NO: 314403 - RNA, 32 nt, Human
agauggugagaaggcguggcugagggacucag

SEQ ID NO: 314404 - RNA, 32 nt, Human
agauggugaggaagaagaggagaggggagagg

SEQ ID NO: 314405 - RNA, 32 nt, Human
agauggugaggugacaauggaggcagagauug

SEQ ID NO: 314406 - RNA, 32 nt, Human
agauggugccacugcaccaucuggacaacaga

SEQ ID NO: 314407 - RNA, 32 nt, Human
agauggugccacugcacuccagccuaggugac

SEQ ID NO: 314408 - RNA, 32 nt, Human
agauggugccacugcacuccagccuggcgaca

SEQ ID NO: 314409 - RNA, 32 nt, Human
agauggugccacugcacuccagccugggcaac

SEQ ID NO: 314410 - RNA, 32 nt, Human
agauggugccacugcacuccagccugggcgaa

SEQ ID NO: 314411 - RNA, 32 nt, Human
agauggugccacugcacuccagccugggggac

SEQ ID NO: 314412 - RNA, 32 nt, Human
agauggugccacugcacuccagccugggugac

SEQ ID NO: 314413 - RNA, 32 nt, Human
agauggugccacugcacuccagcuuaggugac

SEQ ID NO: 314414 - RNA, 32 nt, Human
agauggugccacugcacucuaaccugggcgac

SEQ ID NO: 314415 - RNA, 32 nt, Human
agauggugccacugcacuucagccugggcaac

SEQ ID NO: 314416 - RNA, 32 nt, Human
agauggugccacugcauuccagccugggcaac

SEQ ID NO: 314417 - RNA, 32 nt, Human
agauggugccacugcauuucugccuggcaaca

SEQ ID NO: 314418 - RNA, 32 nt, Human
agauggugccacuguacuccagccugggugau

SEQ ID NO: 314419 - RNA, 32 nt, Human
agauggugccauugcccuccagccugggcaag

SEQ ID NO: 314420 - RNA, 32 nt, Human
agauggugccguugcacuccagccgggcaaca

SEQ ID NO: 314421 - RNA, 32 nt, Human
agauggugcuggagccagggagcugcuguccc

SEQ ID NO: 314422 - RNA, 32 nt, Human
agaugguggggcugccucuggugagggucuuc

SEQ ID NO: 314423 - RNA, 21 nt, Human
agauggugucucacucuguug

SEQ ID NO: 314424 - RNA, 32 nt, Human
agauggugugauugcacuccagcccaggggac

SEQ ID NO: 314425 - RNA, 25 nt, Human
agaugguguggucuacgaggucagg

SEQ ID NO: 314426 - RNA, 32 nt, Human
agaugguguuacugagaaggaaacuaaggacu

SEQ ID NO: 314427 - RNA, 21 nt, Human
agaugguguuucaccauguug

SEQ ID NO: 314428 - RNA, 25 nt, Human
agaugguguuucaccauguuggcca

SEQ ID NO: 314429 - RNA, 25 nt, Human
agaugguguuuccccacguugguca

SEQ ID NO: 314430 - RNA, 32 nt, Human
agaugguuccaucaucuccuuccauaucucac

SEQ ID NO: 314431 - RNA, 17 nt, Human
agaugguuccugaacug

SEQ ID NO: 314432 - RNA, 32 nt, Human
agaugguucguguucauacugcagcuuaaaac

SEQ ID NO: 314433 - RNA, 32 nt, Human
agaugguugagccucagacugcaggguguguu

SEQ ID NO: 314434 - RNA, 32 nt, Human
agaugguuggaucauuccaaacauugucucag

SEQ ID NO: 314435 - RNA, 32 nt, Human
agaugguuguuggagaaagugcuuaagccacu

SEQ ID NO: 314436 - RNA, 23 nt, Human
agaugguuucaccauguuggcca

SEQ ID NO: 314437 - RNA, 32 nt, Human
agaugguuugaguccucggugccuggguagca

SEQ ID NO: 314438 - RNA, 32 nt, Human
agaugguuuuauuaguacccuggucauuuugu

SEQ ID NO: 314439 - RNA, 32 nt, Human
agauguaaaacacucacauacaaguucauacu

SEQ ID NO: 314440 - RNA, 32 nt, Human
agauguaacuuagguguugguauaacuaaauc

SEQ ID NO: 314441 - RNA, 32 nt, Human
agauguaauucuguauccagacauggcaaaug

SEQ ID NO: 314442 - RNA, 32 nt, Human
agauguacauacaagucauccauuaaacaaag

SEQ ID NO: 314443 - RNA, 32 nt, Human
agauguaccacagcuuaacuggaagaggaagc

SEQ ID NO: 314444 - RNA, 32 nt, Human
agauguacucucugaaguuuggucuugauuug

SEQ ID NO: 314445 - RNA, 32 nt, Human
agauguagcaaaaacuucacaacaauucagca

SEQ ID NO: 314446 - RNA, 32 nt, Human
agauguagcaauaaaccaaaugugcuaaaacc

SEQ ID NO: 314447 - RNA, 32 nt, Human
agauguagcacaguaagaaaacucccuuagug

SEQ ID NO: 314448 - RNA, 32 nt, Human
agauguagccucuguuccuccuggacauagga

SEQ ID NO: 314449 - RNA, 32 nt, Human
agauguaguggauuuggcagcuaauucacucu

SEQ ID NO: 314450 - RNA, 32 nt, Human
agauguaguuaguuucucuguuuaugaaauua

SEQ ID NO: 314451 - RNA, 32 nt, Human
agauguaucuucaaccucuguuauucugguga

SEQ ID NO: 314452 - RNA, 32 nt, Human
agauguauggaggugacagagagaagaggcca

SEQ ID NO: 314453 - RNA, 32 nt, Human
agaugucaacacuguggagauugugcuaugaa

SEQ ID NO: 314454 - RNA, 32 nt, Human
agaugucaagagcaucacuguuguuauuuaaa

SEQ ID NO: 314455 - RNA, 32 nt, Human
agaugucacagauuccugcagagccauggucc

SEQ ID NO: 314456 - RNA, 32 nt, Human
agaugucaccacugcccuccagccugggugac

SEQ ID NO: 314457 - RNA, 32 nt, Human
agaugucacuuucucccccucugccuuuuagu

SEQ ID NO: 314458 - RNA, 32 nt, Human
agaugucagacuggcuggcugcagugacgugc

SEQ ID NO: 314459 - RNA, 32 nt, Human
agaugucaucccuuguauaccaucguagacuu

SEQ ID NO: 314460 - RNA, 32 nt, Human
agaugucauggccuacauuucugccaucacuc

SEQ ID NO: 314461 - RNA, 32 nt, Human
agauguccaauacuguaauuaauuuauuaaag

SEQ ID NO: 314462 - RNA, 32 nt, Human
agauguccaucaagggaggaagggugggucau

SEQ ID NO: 314463 - RNA, 32 nt, Human
agaugucccgggcaugagcugaccucagagga

SEQ ID NO: 314464 - RNA, 32 nt, Human
agaugucccucuccuccucaaccuucucuccc

SEQ ID NO: 314465 - RNA, 32 nt, Human
agauguccuuucucccuggucaguugguucca

SEQ ID NO: 314466 - RNA, 32 nt, Human
agauguccuuuguccaaugugaagauuuauuc

SEQ ID NO: 314467 - RNA, 32 nt, Human
agaugucgccauugaacggacaguguuuucau

SEQ ID NO: 314468 - RNA, 32 nt, Human
agaugucuauucuuguuggagacaugggauga

SEQ ID NO: 314469 - RNA, 32 nt, Human
agaugucucaaucugaauuuauuuggcuacac

SEQ ID NO: 314470 - RNA, 32 nt, Human
agaugucuccaacagguuugcagugucuguua

SEQ ID NO: 314471 - RNA, 32 nt, Human
agaugucugaaggucccugaggccugaccauc

SEQ ID NO: 314472 - RNA, 32 nt, Human
agaugucugcacuccuggcugcagcuggacaa

SEQ ID NO: 314473 - RNA, 23 nt, Human
agaugucugcuccuccucuugaa

SEQ ID NO: 314474 - RNA, 32 nt, Human
agaugucuucucacgcaaccccaaacucccug

SEQ ID NO: 314475 - RNA, 32 nt, Human
agaugucuuuuccuucuccaucaucuuagagc

SEQ ID NO: 314476 - RNA, 32 nt, Human
agaugugaacuccaauuaagggacuggagaga

SEQ ID NO: 314477 - RNA, 32 nt, Human
agaugugaagaaaacaacacacacuccaacac

SEQ ID NO: 314478 - RNA, 32 nt, Human
agaugugacagaaccaggacacuacugcuuaa

SEQ ID NO: 314479 - RNA, 32 nt, Human
agaugugaccaggacaaacgugcaauaaugcc

SEQ ID NO: 314480 - RNA, 32 nt, Human
agaugugaccauugaccauauucaucaauaua

SEQ ID NO: 314481 - RNA, 32 nt, Human
agaugugaccuugaacaccaguccauuucaca

SEQ ID NO: 314482 - RNA, 32 nt, Human
agaugugagagggagcaagcaagguuagcaac

SEQ ID NO: 314483 - RNA, 32 nt, Human
agaugugagagugaggaagugggauggggccu

SEQ ID NO: 314484 - RNA, 32 nt, Human
agaugugagcagucagagacugacagccaugc

SEQ ID NO: 314485 - RNA, 32 nt, Human
agaugugagcaucuucaaaguacgaauauugc

SEQ ID NO: 314486 - RNA, 32 nt, Human
agaugugagccaacgcacccggcuacaccuuc

SEQ ID NO: 314487 - RNA, 32 nt, Human
agaugugagccagcacaccgggccaagugaag

SEQ ID NO: 314488 - RNA, 24 nt, Human
agaugugaggcuguucuuggcaca

SEQ ID NO: 314489 - RNA, 32 nt, Human
agaugugagggcagaauauacacaacagaugc

SEQ ID NO: 314490 - RNA, 32 nt, Human
agaugugaguuaaaaagacuugccaaauuaua

SEQ ID NO: 314491 - RNA, 32 nt, Human
agaugugauaugaggcaacacaagcacagaca

SEQ ID NO: 314492 - RNA, 32 nt, Human
agaugugauguuggaaaacuucaggaaccuca

SEQ ID NO: 314493 - RNA, 32 nt, Human
agaugugauuucuuccauccagaaagacagaa

SEQ ID NO: 314494 - RNA, 32 nt, Human
agaugugcagcccucuggucagcugguccagg

SEQ ID NO: 314495 - RNA, 32 nt, Human
agaugugcaggaggacggugaggcucacuaca

SEQ ID NO: 314496 - RNA, 32 nt, Human
agaugugccagugccccugccugccgugccag

SEQ ID NO: 314497 - RNA, 22 nt, Human
agaugugcgaaagaaggcccaa

SEQ ID NO: 314498 - RNA, 32 nt, Human
agaugugcuagacaauggaaggaugcaggcca

SEQ ID NO: 314499 - RNA, 32 nt, Human
agauguggagaaacuggauuucucauagauug

SEQ ID NO: 314500 - RNA, 32 nt, Human
agauguggaggaggggaagggaagaccaggcc

SEQ ID NO: 314501 - RNA, 32 nt, Human
agaugugggcaggaccuuuuggaaggauguuu

SEQ ID NO: 314502 - RNA, 18 nt, Human
agaugugggccaccaugu

SEQ ID NO: 314503 - RNA, 32 nt, Human
agaugugggcucuguuuggggaagaugcaagg

SEQ ID NO: 314504 - RNA, 32 nt, Human
agaugugggucagaggcagagauggaaguugg

SEQ ID NO: 314505 - RNA, 32 nt, Human
agaugugggugcaggcaugcacacacacgaug

SEQ ID NO: 314506 - RNA, 32 nt, Human
agaugugguauucagccagggugaagggaaag

SEQ ID NO: 314507 - RNA, 32 nt, Human
agauguggucaccaagaucuaaguuacuuguu

SEQ ID NO: 314508 - RNA, 20 nt, Human
agauguggucucacuauguu

SEQ ID NO: 314509 - RNA, 21 nt, Human
agaugugguuucuccauguug

SEQ ID NO: 314510 - RNA, 25 nt, Human
agaugugguuucuccauguuggcca

SEQ ID NO: 314511 - RNA, 32 nt, Human
agauguguagagagagaaaggaagggaaggaa

SEQ ID NO: 314512 - RNA, 32 nt, Human
agauguguagguccucacagaggccaacuuau

SEQ ID NO: 314513 - RNA, 32 nt, Human
agaugugugcccaccccaccacugccuggaac

SEQ ID NO: 314514 - RNA, 32 nt, Human
agaugugugugugcacacacacagaaaccacg

SEQ ID NO: 314515 - RNA, 31 nt, Human
agauguguguucucugggcuuuauguaucug

SEQ ID NO: 314516 - RNA, 32 nt, Human
agauguguuucugcauuucuggaagucuaugc

SEQ ID NO: 314517 - RNA, 32 nt, Human
agauguuacaucugguagauguaacauucuac

SEQ ID NO: 314518 - RNA, 31 nt, Human
agauguucaauaaauauuuguugaaugagua

SEQ ID NO: 314519 - RNA, 32 nt, Human
agauguucacgggagauggaucagccccucuu

SEQ ID NO: 314520 - RNA, 32 nt, Human
agauguucacucagacugggggaugcaaugug

SEQ ID NO: 314521 - RNA, 32 nt, Human
agauguucagggacccugccuacaccucauuu

SEQ ID NO: 314522 - RNA, 27 nt, Human
agauguucgagccugugagcugcaccu

SEQ ID NO: 314523 - RNA, 32 nt, Human
agauguucuccucuguguucuuccccaggucc

SEQ ID NO: 314524 - RNA, 32 nt, Human
agauguucucuaauccucccucuccuuaccac

SEQ ID NO: 314525 - RNA, 32 nt, Human
agauguugaaaaucauuuucccuucuuaaaca

SEQ ID NO: 314526 - RNA, 23 nt, Human
agauguugacccagaguccucug

SEQ ID NO: 314527 - RNA, 32 nt, Human
agauguugcaccauugucagccaaauuugcug

SEQ ID NO: 314528 - RNA, 22 nt, Human
agauguugcuaacagcaacaca

SEQ ID NO: 314529 - RNA, 32 nt, Human
agauguugcuggacagaacucacagcucugug

SEQ ID NO: 314530 - RNA, 32 nt, Human
agauguuggagccacaccagccuggauuucaa

SEQ ID NO: 314531 - RNA, 29 nt, Human
agauguuggcugcuguacuuacucccuga

SEQ ID NO: 314532 - RNA, 32 nt, Human
agauguugggaaaggcuucuugaaauuacacg

SEQ ID NO: 314533 - RNA, 32 nt, Human
agauguugggagagagcuggggcagagcgggg

SEQ ID NO: 314534 - RNA, 32 nt, Human
agauguuguuauacuguauuauggcugauuuu

SEQ ID NO: 314535 - RNA, 32 nt, Human
agauguuuauuauauguugccauaaaauucaa

SEQ ID NO: 314536 - RNA, 18 nt, Human
agauguuucacuacguug

SEQ ID NO: 314537 - RNA, 32 nt, Human
agauguuucauuuuggccuggccaguggcuga

SEQ ID NO: 314538 - RNA, 32 nt, Human
agauguuuuugcccuuucugcuucacugcaug

SEQ ID NO: 314539 - RNA, 32 nt, Human
agauuaaaacucaauaaggagcucaguggcag

SEQ ID NO: 314540 - RNA, 32 nt, Human
agauuaaacauggugcaauggcaccucugucc

SEQ ID NO: 314541 - RNA, 32 nt, Human
agauuaaacucugauuuugagcacuuugugcu

SEQ ID NO: 314542 - RNA, 32 nt, Human
agauuaaagccucuguuuugcaccuguaaaaa

SEQ ID NO: 314543 - RNA, 32 nt, Human
agauuaaauggugaagggccauuucugauucu

SEQ ID NO: 314544 - RNA, 32 nt, Human
agauuaaauguucuuuuccaaauggggaguuu

SEQ ID NO: 314545 - RNA, 32 nt, Human
agauuaacaggccagaguggcaauggcgucuu

SEQ ID NO: 314546 - RNA, 32 nt, Human
agauuaacaguagaaacgagaacucacgucuc

SEQ ID NO: 314547 - RNA, 32 nt, Human
agauuaacucacaaauucaccucagaaggccu

SEQ ID NO: 314548 - RNA, 32 nt, Human
agauuaagagcagaaauugaaguuuuaacaga

SEQ ID NO: 314549 - RNA, 32 nt, Human
agauuaagccaccgcacuccagccugggcgac

SEQ ID NO: 314550 - RNA, 21 nt, Human
agauuaagcuguccccaggga

SEQ ID NO: 314551 - RNA, 32 nt, Human
agauuaagcuguugaaccuauauuugccauua

SEQ ID NO: 314552 - RNA, 32 nt, Human
agauuaaggaggaaggaauacaccugguccaa

SEQ ID NO: 314553 - RNA, 32 nt, Human
agauuaaggccccucagagaucaacagaccaa

SEQ ID NO: 314554 - RNA, 32 nt, Human
agauuaaucuccucuuuuuauagaugaguccu

SEQ ID NO: 314555 - RNA, 32 nt, Human
agauuacaaaccuguacaaccuguuacuguac

SEQ ID NO: 314556 - RNA, 32 nt, Human
agauuacaagcgugaaccaccaugccaggagg

SEQ ID NO: 314557 - RNA, 32 nt, Human
agauuacaccauugcauuccagccuaggcaac

SEQ ID NO: 314558 - RNA, 32 nt, Human
agauuacaccccuggacuccagcuugggugac

SEQ ID NO: 314559 - RNA, 32 nt, Human
agauuacaggcacacaccaccacgcccagcua

SEQ ID NO: 314560 - RNA, 32 nt, Human
agauuacaggcacccaccaccaugcccagcua

SEQ ID NO: 314561 - RNA, 32 nt, Human
agauuacaggcacccaccaccaugcccagcug

SEQ ID NO: 314562 - RNA, 32 nt, Human
agauuacaggcaugcaccaccacgcccggcua

SEQ ID NO: 314563 - RNA, 32 nt, Human
agauuacaggcaugcaccaccaugcccggcua

SEQ ID NO: 314564 - RNA, 32 nt, Human
agauuacaggccucugccaccaugcucagcua

SEQ ID NO: 314565 - RNA, 32 nt, Human
agauuacaggcgcacaccaccacgcccaacug

SEQ ID NO: 314566 - RNA, 32 nt, Human
agauuacaggcgcacaccaccacgcccggcua

SEQ ID NO: 314567 - RNA, 32 nt, Human
agauuacaggcgcccgccaccacgcccagaga

SEQ ID NO: 314568 - RNA, 32 nt, Human
agauuacaggcgcccgccaccacgcccagcau

SEQ ID NO: 314569 - RNA, 32 nt, Human
agauuacaggcgcccgccaccaugcccagcua

SEQ ID NO: 314570 - RNA, 32 nt, Human
agauuacaggcgcccgccaccaugcccggcua

SEQ ID NO: 314571 - RNA, 32 nt, Human
agauuacaggcgugagccaccaugccuggcca

SEQ ID NO: 314572 - RNA, 32 nt, Human
agauuacagguacgcaccaccaugcccagcuu

SEQ ID NO: 314573 - RNA, 32 nt, Human
agauuacaggugcacaccaccacaucuggcua

SEQ ID NO: 314574 - RNA, 32 nt, Human
agauuacaggugcccgccaccaugcccggcua

SEQ ID NO: 314575 - RNA, 32 nt, Human
agauuacaggugugagccaccaugcccagccu

SEQ ID NO: 314576 - RNA, 32 nt, Human
agauuacaggugugagugcccaugccuggcag

SEQ ID NO: 314577 - RNA, 32 nt, Human
agauuacaggugugcaccaccacgcccggcua

SEQ ID NO: 314578 - RNA, 32 nt, Human
agauuacaugaucuuauaucuagaaaaaugua

SEQ ID NO: 314579 - RNA, 32 nt, Human
agauuaccccucucaacaggccagcugcuggu

SEQ ID NO: 314580 - RNA, 32 nt, Human
agauuaccuuacuauuucuuuuguuccaaguu

SEQ ID NO: 314581 - RNA, 32 nt, Human
agauuacgccacugcaccccaaccugggcgac

SEQ ID NO: 314582 - RNA, 32 nt, Human
agauuacgccacugcacuaaugucuggugaca

SEQ ID NO: 314583 - RNA, 32 nt, Human
agauuacgccacugcacuccagccugggcaac

SEQ ID NO: 314584 - RNA, 32 nt, Human
agauuacgccacugcacuccagccugggugac

SEQ ID NO: 314585 - RNA, 32 nt, Human
agauuacgucacugcauuccagccugggugac

SEQ ID NO: 314586 - RNA, 32 nt, Human
agauuacuuccugcugcacuccugucuugcca

SEQ ID NO: 314587 - RNA, 32 nt, Human
agauuagaaaaauuucaacuguaggugccuuu

SEQ ID NO: 314588 - RNA, 32 nt, Human
agauuagacugucaugucucagugucuaucug

SEQ ID NO: 314589 - RNA, 32 nt, Human
agauuagauccagagaagacucuagauuugcu

SEQ ID NO: 314590 - RNA, 32 nt, Human
agauuagcacagacacguuuugauguugaaug

SEQ ID NO: 314591 - RNA, 32 nt, Human
agauuagcagggugacuuucacccugcaacag

SEQ ID NO: 314592 - RNA, 32 nt, Human
agauuagcucaccuuucuccuaggcaauuaua

SEQ ID NO: 314593 - RNA, 32 nt, Human
agauuagcuucauguccauuauagcauugagg

SEQ ID NO: 314594 - RNA, 32 nt, Human
agauuagcuugucucagggugggaagugggag

SEQ ID NO: 314595 - RNA, 32 nt, Human
agauuaggacacagcagagacuuucuaaaugc

SEQ ID NO: 314596 - RNA, 32 nt, Human
agauuaggaugugggccccacuuuagaggcac

SEQ ID NO: 314597 - RNA, 24 nt, Human
agauuaggcaugaauacacagaga

SEQ ID NO: 314598 - RNA, 32 nt, Human
agauuaggccauugcacuccagccucagcaac

SEQ ID NO: 314599 - RNA, 21 nt, Human
agauuagggagugguuugaga

SEQ ID NO: 314600 - RNA, 25 nt, Human
agauuaggguauaggcaucuagaga

SEQ ID NO: 314601 - RNA, 32 nt, Human
agauuaggguggcuguccaucccuggauagcu

SEQ ID NO: 314602 - RNA, 26 nt, Human
agauuaggguuggugguggcagugca

SEQ ID NO: 314603 - RNA, 32 nt, Human
agauuagguagacuuugcuuaguauugacaac

SEQ ID NO: 314604 - RNA, 32 nt, Human
agauuaguaggaggagaagugaauguaaauuu

SEQ ID NO: 314605 - RNA, 32 nt, Human
agauuauaacauccuguauuucaguuucugag

SEQ ID NO: 314606 - RNA, 32 nt, Human
agauuauaggcgugcaccaccacaccuggcua

SEQ ID NO: 314607 - RNA, 32 nt, Human
agauuauauggugaaccuacuuuuagagugua

SEQ ID NO: 314608 - RNA, 32 nt, Human
agauuaucaaagcuaauuugacuaguuugaac

SEQ ID NO: 314609 - RNA, 32 nt, Human
agauuaucucagaaaguaaaucugagagguaa

SEQ ID NO: 314610 - RNA, 32 nt, Human
agauuaugaacaaauagcacuuagguuaccug

SEQ ID NO: 314611 - RNA, 32 nt, Human
agauuaugaauagccucagcucuagaaugcuu

SEQ ID NO: 314612 - RNA, 32 nt, Human
agauuaugagacugacgugcugcccacugcac

SEQ ID NO: 314613 - RNA, 32 nt, Human
agauuaugccacugcacuccagccugggugac

SEQ ID NO: 314614 - RNA, 32 nt, Human
agauuaugccacugcacuccagccuggugaca

SEQ ID NO: 314615 - RNA, 32 nt, Human
agauuaugccacugcacuucagccugggugac

SEQ ID NO: 314616 - RNA, 32 nt, Human
agauuaugccacuguacuccagccugggugac

SEQ ID NO: 314617 - RNA, 32 nt, Human
agauuaugccacuguacuccagcgugggugac

SEQ ID NO: 314618 - RNA, 32 nt, Human
agauuaugccauugcacuccagccugggugac

SEQ ID NO: 314619 - RNA, 32 nt, Human
agauuauggggaaacugcucagcuucaauaaa

SEQ ID NO: 314620 - RNA, 32 nt, Human
agauuaugucacuccagccugggcaacagagu

SEQ ID NO: 314621 - RNA, 32 nt, Human
agauuaugucacugcacuccauccugggugac

SEQ ID NO: 314622 - RNA, 32 nt, Human
agauuaugugguuggccaauaaagauagauga

SEQ ID NO: 314623 - RNA, 32 nt, Human
agauuauugcaucacccauauauugagccuaa

SEQ ID NO: 314624 - RNA, 32 nt, Human
agauuauuuccaaggcuuaaagccugaagcug

SEQ ID NO: 314625 - RNA, 32 nt, Human
agauuauuugacuucccaggaauuuucugucu

SEQ ID NO: 314626 - RNA, 32 nt, Human
agauuauuugagcucaggaguuugagaccauc

SEQ ID NO: 314627 - RNA, 32 nt, Human
agauuauuuugaggcagacagagagcuguuau

SEQ ID NO: 314628 - RNA, 32 nt, Human
agauucaaagacgaccuuccaugugaugcaca

SEQ ID NO: 314629 - RNA, 32 nt, Human
agauucaaagcaagagauuacacagaacaaau

SEQ ID NO: 314630 - RNA, 32 nt, Human
agauucaacaucuuccuaaucuuucuagugca

SEQ ID NO: 314631 - RNA, 32 nt, Human
agauucaaccaccacccagggagugcuugcag

SEQ ID NO: 314632 - RNA, 32 nt, Human
agauucacaagcugcccugcaguggccuuggc

SEQ ID NO: 314633 - RNA, 32 nt, Human
agauucacacuugccagccuccacaaucgcag

SEQ ID NO: 314634 - RNA, 32 nt, Human
agauucacaugcuggcuccugaagggugcuca

SEQ ID NO: 314635 - RNA, 32 nt, Human
agauucacuugaaccugggagguggagguugc

SEQ ID NO: 314636 - RNA, 32 nt, Human
agauucagagcuggccagaguuucagugauag

SEQ ID NO: 314637 - RNA, 32 nt, Human
agauucagccacugcaagcccugggccucugg

SEQ ID NO: 314638 - RNA, 32 nt, Human
agauucagccauccaauugguuuuaggucuug

SEQ ID NO: 314639 - RNA, 18 nt, Human
agauucagggcagacaga

SEQ ID NO: 314640 - RNA, 32 nt, Human
agauucagggguauaugugcagguuuguuaca

SEQ ID NO: 314641 - RNA, 32 nt, Human
agauucaucaauuccaaaugugcaaaauacau

SEQ ID NO: 314642 - RNA, 32 nt, Human
agauucaucauaccuugaccuguaccucuucu

SEQ ID NO: 314643 - RNA, 32 nt, Human
agauuccaaaaauacaaacacuaguuguucca

SEQ ID NO: 314644 - RNA, 32 nt, Human
agauuccaaccagccuuucuucccugguuccc

SEQ ID NO: 314645 - RNA, 32 nt, Human
agauuccaauuuaaaagcagaaaagcaaaaac

SEQ ID NO: 314646 - RNA, 32 nt, Human
agauuccacaaagccucucuccccucccucgu

SEQ ID NO: 314647 - RNA, 32 nt, Human
agauuccacagaaucccgccaaauaugaagaa

SEQ ID NO: 314648 - RNA, 32 nt, Human
agauuccacagaggcugagagcaguggcucau

SEQ ID NO: 314649 - RNA, 32 nt, Human
agauuccacauaaaaauuuucugagguugucc

SEQ ID NO: 314650 - RNA, 22 nt, Human
agauuccagaagccucuccucc

SEQ ID NO: 314651 - RNA, 32 nt, Human
agauuccagcacugagccgugagccggucaug

SEQ ID NO: 314652 - RNA, 32 nt, Human
agauuccagcagaguugguucuuucugagguc

SEQ ID NO: 314653 - RNA, 32 nt, Human
agauuccagcuccuucagguguuuguuccagc

SEQ ID NO: 314654 - RNA, 32 nt, Human
agauuccagcugggcuagaggcugagaaccuu

SEQ ID NO: 314655 - RNA, 32 nt, Human
agauuccagcugggcuagaggcugagcaccuu

SEQ ID NO: 314656 - RNA, 32 nt, Human
agauuccagcugguaugagccuucugcagagc

SEQ ID NO: 314657 - RNA, 32 nt, Human
agauuccaggaggagcagagaaagcacagaug

SEQ ID NO: 314658 - RNA, 32 nt, Human
agauuccagguagaggauguauagacuggcua

SEQ ID NO: 314659 - RNA, 32 nt, Human
agauuccauacagcuccaaggaaggagccaag

SEQ ID NO: 314660 - RNA, 32 nt, Human
agauuccauaucuuugcuacuguaaacagagc

SEQ ID NO: 314661 - RNA, 32 nt, Human
agauuccaugccuucagccucuggugagacgu

SEQ ID NO: 314662 - RNA, 32 nt, Human
agauuccaugggugagucaccaugcuuggcca

SEQ ID NO: 314663 - RNA, 32 nt, Human
agauuccauuuaggaacugagguggaguccca

SEQ ID NO: 314664 - RNA, 32 nt, Human
agauucccacagcagacaagguugagaaucca

SEQ ID NO: 314665 - RNA, 32 nt, Human
agauucccaggcccuccagaauuuccacagca

SEQ ID NO: 314666 - RNA, 32 nt, Human
agauucccccuucuccucuccccuacuggagg

SEQ ID NO: 314667 - RNA, 32 nt, Human
agauuccccugccucagccucccaaguagcug

SEQ ID NO: 314668 - RNA, 32 nt, Human
agauucccgaguagcugggauuacagaugugc

SEQ ID NO: 314669 - RNA, 32 nt, Human
agauucccuacacauacauacauauguaugca

SEQ ID NO: 314670 - RNA, 32 nt, Human
agauucccuaucuccuuuuagaccugggacgg

SEQ ID NO: 314671 - RNA, 32 nt, Human
agauucccuccaccugauuuucaagcugucac

SEQ ID NO: 314672 - RNA, 32 nt, Human
agauuccgaaauagcauuuucuuuaccaguau

SEQ ID NO: 314673 - RNA, 32 nt, Human
agauuccgcgagccgacaccaugcgauccaag

SEQ ID NO: 314674 - RNA, 32 nt, Human
agauuccguccuuuaccagcugcagaaucuug

SEQ ID NO: 314675 - RNA, 32 nt, Human
agauuccuccgcuccucugagugcacgugugu

SEQ ID NO: 314676 - RNA, 32 nt, Human
agauuccucuggugguggucuccaggcugaca

SEQ ID NO: 314677 - RNA, 32 nt, Human
agauuccugaguagcugggaccacagauuacu

SEQ ID NO: 314678 - RNA, 32 nt, Human
agauuccugcaaccucaagagacuucccaggc

SEQ ID NO: 314679 - RNA, 32 nt, Human
agauuccugccugacaaggucucccucaggua

SEQ ID NO: 314680 - RNA, 32 nt, Human
agauuccugcgguccagccuccaacuuugguu

SEQ ID NO: 314681 - RNA, 32 nt, Human
agauuccugggcuggcaaguggggcaacgugu

SEQ ID NO: 314682 - RNA, 32 nt, Human
agauuccugucugacuaaagggaccucaaaaa

SEQ ID NO: 314683 - RNA, 31 nt, Human
agauucggagcggugcccaugccagggaucu

SEQ ID NO: 314684 - RNA, 32 nt, Human
agauucguaugcacgcccugcccagcugguca

SEQ ID NO: 314685 - RNA, 32 nt, Human
agauucuaaaacaugcugcagcaagaggaccc

SEQ ID NO: 314686 - RNA, 32 nt, Human
agauucuaacauccuuguuuuagaauucuaag

SEQ ID NO: 314687 - RNA, 32 nt, Human
agauucuaagcuccuuuuaaggcaguaauugc

SEQ ID NO: 314688 - RNA, 32 nt, Human
agauucuacacauacuuauccccaccaagacc

SEQ ID NO: 314689 - RNA, 32 nt, Human
agauucuacagcccuggccacaguacuuuggu

SEQ ID NO: 314690 - RNA, 32 nt, Human
agauucuaggcagaggcuggaaugcaaugaug

SEQ ID NO: 314691 - RNA, 28 nt, Human
agauucuauaaauaaagcuauauucugu

SEQ ID NO: 314692 - RNA, 32 nt, Human
agauucuaucaaaaucuugcaaaggaaaacaa

SEQ ID NO: 314693 - RNA, 32 nt, Human
agauucuauggacugaaaaagccccaggcuga

SEQ ID NO: 314694 - RNA, 32 nt, Human
agauucucaaaccacacgugcuuuguuaaagc

SEQ ID NO: 314695 - RNA, 32 nt, Human
agauucucaaauauccuugauuuuggauguuc

SEQ ID NO: 314696 - RNA, 32 nt, Human
agauucucacaguccccagugagccccaucca

SEQ ID NO: 314697 - RNA, 32 nt, Human
agauucucaccagauaaacagaagagcuucgu

SEQ ID NO: 314698 - RNA, 32 nt, Human
agauucucacucaguugcccaggcuggauugc

SEQ ID NO: 314699 - RNA, 32 nt, Human
agauucucagugugccuaacuuauuggagcac

SEQ ID NO: 314700 - RNA, 32 nt, Human
agauucucauaaggagcaaacaaccaagaucc

SEQ ID NO: 314701 - RNA, 32 nt, Human
agauucucauaaggagugcacaaucuagaucc

SEQ ID NO: 314702 - RNA, 32 nt, Human
agauucucauaaggagugugcaaucuagaucc

SEQ ID NO: 314703 - RNA, 32 nt, Human
agauucucauaaggaguucacagccuagaucc

SEQ ID NO: 314704 - RNA, 32 nt, Human
agauucuccugccucagccucacaaguagcug

SEQ ID NO: 314705 - RNA, 32 nt, Human
agauucuccugccucagccuccccaguagcug

SEQ ID NO: 314706 - RNA, 32 nt, Human
agauucuccugccucagccucccgaguagcug

SEQ ID NO: 314707 - RNA, 32 nt, Human
agauucuccugccucagccuccgaaguagcug

SEQ ID NO: 314708 - RNA, 32 nt, Human
agauucuccugccucagccuccugaguagcug

SEQ ID NO: 314709 - RNA, 32 nt, Human
agauucuccugccucagucucccgaguagcua

SEQ ID NO: 314710 - RNA, 32 nt, Human
agauucuccugccucggccugccggguagcug

SEQ ID NO: 314711 - RNA, 32 nt, Human
agauucugaacuggacagucagaaccacaggu

SEQ ID NO: 314712 - RNA, 32 nt, Human
agauucugaaggaacucacucccaacuauauc

SEQ ID NO: 314713 - RNA, 32 nt, Human
agauucugaaguauuuacugucaauucauagg

SEQ ID NO: 314714 - RNA, 32 nt, Human
agauucugagugugcaaggauaacccccguca

SEQ ID NO: 314715 - RNA, 32 nt, Human
agauucugcaccugcuagcacagcuguccacg

SEQ ID NO: 314716 - RNA, 32 nt, Human
agauucugcaccuggccauucccuguccuguc

SEQ ID NO: 314717 - RNA, 32 nt, Human
agauucugccaaggaucagaacucaugugaaa

SEQ ID NO: 314718 - RNA, 32 nt, Human
agauucugccaucucugugaucccaagauguc

SEQ ID NO: 314719 - RNA, 32 nt, Human
agauucuggaaaugcaucaauaaccuaagaaa

SEQ ID NO: 314720 - RNA, 31 nt, Human
agauucuggauggaaagacugaaucuuugac

SEQ ID NO: 314721 - RNA, 32 nt, Human
agauucugguacacgguguucaucucaauaga

SEQ ID NO: 314722 - RNA, 32 nt, Human
agauucuguacauuuauuugggagaaaauuuu

SEQ ID NO: 314723 - RNA, 32 nt, Human
agauucuuaaaaugucuaggcuaaguaugcac

SEQ ID NO: 314724 - RNA, 32 nt, Human
agauucuuaagagagguugcaaugugaaugau

SEQ ID NO: 314725 - RNA, 32 nt, Human
agauucuuaauauuucuccaucauggccuuuu

SEQ ID NO: 314726 - RNA, 32 nt, Human
agauucuuacacacacuaaaguuuggacaaag

SEQ ID NO: 314727 - RNA, 32 nt, Human
agauucuucacgcccagccucugccucacagu

SEQ ID NO: 314728 - RNA, 32 nt, Human
agauucuucacgcccagcuucuaccucacugu

SEQ ID NO: 314729 - RNA, 32 nt, Human
agauucuucucccacccccaacuuuauuugca

SEQ ID NO: 314730 - RNA, 32 nt, Human
agauucuuuaccaggcugugagccaguguuag

SEQ ID NO: 314731 - RNA, 32 nt, Human
agauucuuugccugguguaauugugacucaug

SEQ ID NO: 314732 - RNA, 32 nt, Human
agauugaaaauuguguucaguauaccuauaaa

SEQ ID NO: 314733 - RNA, 32 nt, Human
agauugaaagucucuaaugagcucuuuccccc

SEQ ID NO: 314734 - RNA, 32 nt, Human
agauugaacaaguaguggucugagggagacac

SEQ ID NO: 314735 - RNA, 32 nt, Human
agauugaacacauggaaugcaaugcaaugaga

SEQ ID NO: 314736 - RNA, 32 nt, Human
agauugaagaagaaacugagcaguugaaaaau

SEQ ID NO: 314737 - RNA, 32 nt, Human
agauugaauugcuuucccugggagugugcagu

SEQ ID NO: 314738 - RNA, 32 nt, Human
agauugacuaaaaagucuaccauacuucaagg

SEQ ID NO: 314739 - RNA, 32 nt, Human
agauugagaccauccuggauaacauggugaaa

SEQ ID NO: 314740 - RNA, 32 nt, Human
agauugagagcggcagagaagcucugagagcc

SEQ ID NO: 314741 - RNA, 32 nt, Human
agauugagagggcuaagaaaguagcccucaaa

SEQ ID NO: 314742 - RNA, 32 nt, Human
agauugagcaacuguacuccagcuuggcgaca

SEQ ID NO: 314743 - RNA, 32 nt, Human
agauugagccacugcacuccagccugggugac

SEQ ID NO: 314744 - RNA, 32 nt, Human
agauugagccauugcucuccagccugggugac

SEQ ID NO: 314745 - RNA, 32 nt, Human
agauugagcccucuccuacucucccccaacuc

SEQ ID NO: 314746 - RNA, 32 nt, Human
agauugagguagagaauaagagcaaaucauuc

SEQ ID NO: 314747 - RNA, 32 nt, Human
agauugagguuagaggaucaguaggacauuuu

SEQ ID NO: 314748 - RNA, 32 nt, Human
agauugauuaggacucuguucuuagagacucu

SEQ ID NO: 314749 - RNA, 32 nt, Human
agauugcaaacugccacaucucagccuguaag

SEQ ID NO: 314750 - RNA, 32 nt, Human
agauugcaacacugccacuccagccuggguga

SEQ ID NO: 314751 - RNA, 32 nt, Human
agauugcaaccuugacaggccacugccucuua

SEQ ID NO: 314752 - RNA, 32 nt, Human
agauugcacaauugcacuccagccuggcgaca

SEQ ID NO: 314753 - RNA, 32 nt, Human
agauugcacacugcacuccagccugggugacu

SEQ ID NO: 314754 - RNA, 32 nt, Human
agauugcaccacagcacuccaaccugggugac

SEQ ID NO: 314755 - RNA, 32 nt, Human
agauugcaccaccacacuccagccugggugac

SEQ ID NO: 314756 - RNA, 32 nt, Human
agauugcaccaccgcacuccagccugggugac

SEQ ID NO: 314757 - RNA, 32 nt, Human
agauugcaccacggcacuccagccugggugac

SEQ ID NO: 314758 - RNA, 32 nt, Human
agauugcaccacuacacuccagccuggaugac

SEQ ID NO: 314759 - RNA, 32 nt, Human
agauugcaccacuacacuccagccugggcaac

SEQ ID NO: 314760 - RNA, 32 nt, Human
agauugcaccacuacacuccagccugggugac

SEQ ID NO: 314761 - RNA, 32 nt, Human
agauugcaccacugcacgccagccugggugaa

SEQ ID NO: 314762 - RNA, 32 nt, Human
agauugcaccacugcacuacagcuugggugac

SEQ ID NO: 314763 - RNA, 32 nt, Human
agauugcaccacugcacuccaaccugggugac

SEQ ID NO: 314764 - RNA, 32 nt, Human
agauugcaccacugcacuccacagagugagac

SEQ ID NO: 314765 - RNA, 32 nt, Human
agauugcaccacugcacuccagcccaggcaac

SEQ ID NO: 314766 - RNA, 32 nt, Human
agauugcaccacugcacuccagccuaggcgac

SEQ ID NO: 314767 - RNA, 32 nt, Human
agauugcaccacugcacuccagccugagugag

SEQ ID NO: 314768 - RNA, 32 nt, Human
agauugcaccacugcacuccagccuggcgaca

SEQ ID NO: 314769 - RNA, 32 nt, Human
agauugcaccacugcacuccagccugggcaac

SEQ ID NO: 314770 - RNA, 32 nt, Human
agauugcaccacugcacuccagccugggcgac

SEQ ID NO: 314771 - RNA, 32 nt, Human
agauugcaccacugcacuccagccugggcggc

SEQ ID NO: 314772 - RNA, 32 nt, Human
agauugcaccacugcacuccagccuggggaca

SEQ ID NO: 314773 - RNA, 32 nt, Human
agauugcaccacugcacuccagccuggguaac

SEQ ID NO: 314774 - RNA, 32 nt, Human
agauugcaccacugcacuccagccugggugac

SEQ ID NO: 314775 - RNA, 32 nt, Human
agauugcaccacugcacuccagccuggguggc

SEQ ID NO: 314776 - RNA, 32 nt, Human
agauugcaccacugcacuccagccuggugaca

SEQ ID NO: 314777 - RNA, 32 nt, Human
agauugcaccacugcacuccagucugggcaac

SEQ ID NO: 314778 - RNA, 32 nt, Human
agauugcaccacugcacuccagucugggugag

SEQ ID NO: 314779 - RNA, 32 nt, Human
agauugcaccacugcacucccuuccaggugaa

SEQ ID NO: 314780 - RNA, 32 nt, Human
agauugcaccacugcacucuagccuggguaac

SEQ ID NO: 314781 - RNA, 32 nt, Human
agauugcaccacugcacuucagccuggugaca

SEQ ID NO: 314782 - RNA, 32 nt, Human
agauugcaccacugcaguucagccuggaugau

SEQ ID NO: 314783 - RNA, 32 nt, Human
agauugcaccacugcauuccaaccugggcggc

SEQ ID NO: 314784 - RNA, 32 nt, Human
agauugcaccacugcauuccagcauggccaca

SEQ ID NO: 314785 - RNA, 32 nt, Human
agauugcaccacugcauuccagccuggaugac

SEQ ID NO: 314786 - RNA, 32 nt, Human
agauugcaccacugcauuccagccuggcgaca

SEQ ID NO: 314787 - RNA, 32 nt, Human
agauugcaccacugcucuccagccuggggaac

SEQ ID NO: 314788 - RNA, 32 nt, Human
agauugcaccacugcucucuagccugggcaaa

SEQ ID NO: 314789 - RNA, 32 nt, Human
agauugcaccacuguacuccaaccugggcgac

SEQ ID NO: 314790 - RNA, 32 nt, Human
agauugcaccacuguacuccagccugggcaac

SEQ ID NO: 314791 - RNA, 32 nt, Human
agauugcaccacuguacuccagccugggugac

SEQ ID NO: 314792 - RNA, 32 nt, Human
agauugcaccacuuacuccagccugggcaaca

SEQ ID NO: 314793 - RNA, 32 nt, Human
agauugcaccacuucacuccagccugggugac

SEQ ID NO: 314794 - RNA, 32 nt, Human
agauugcaccagugcacuccagcugggcgaca

SEQ ID NO: 314795 - RNA, 32 nt, Human
agauugcaccauugaacuccagccugggcaac

SEQ ID NO: 314796 - RNA, 32 nt, Human
agauugcaccauugcacuccagccugcgcaac

SEQ ID NO: 314797 - RNA, 32 nt, Human
agauugcaccauugcacuccagccuggcgaca

SEQ ID NO: 314798 - RNA, 32 nt, Human
agauugcaccauugcacuccagccugggcaac

SEQ ID NO: 314799 - RNA, 32 nt, Human
agauugcaccauugcacuccagccugggcgac

SEQ ID NO: 314800 - RNA, 32 nt, Human
agauugcaccauugcacuccagccugggugac

SEQ ID NO: 314801 - RNA, 32 nt, Human
agauugcaccauugcacuccagccugugcaac

SEQ ID NO: 314802 - RNA, 32 nt, Human
agcauccccugaauacauggccaucuggagga

SEQ ID NO: 314803 - RNA, 32 nt, Human
agcaucccgaguagcugggacuacaggugcac

SEQ ID NO: 314804 - RNA, 32 nt, Human
agcaucccucaaguccugcuguggaccacaca

SEQ ID NO: 314805 - RNA, 32 nt, Human
agcaucccuggccucugcccacuagacaucag

SEQ ID NO: 314806 - RNA, 32 nt, Human
agcauccgagcuggcgaggaaacaguacaggg

SEQ ID NO: 314807 - RNA, 23 nt, Human
agcauccggguuuuaguauuuaa

SEQ ID NO: 314808 - RNA, 32 nt, Human
agcauccuaacaaaccguuagaacagccccgu

SEQ ID NO: 314809 - RNA, 32 nt, Human
agcauccuaauuaguugggauuacaggcgccc

SEQ ID NO: 314810 - RNA, 32 nt, Human
agcauccuaucccucaaacccaaaaagaaaga

SEQ ID NO: 314811 - RNA, 22 nt, Human
agcauccucccacccgcccucc

SEQ ID NO: 314812 - RNA, 32 nt, Human
agcauccucccugguggcccugggcaggugca

SEQ ID NO: 314813 - RNA, 32 nt, Human
agcauccucuggcaggugcucccaccagguca

SEQ ID NO: 314814 - RNA, 32 nt, Human
agcauccugaggcacagcucccaggggacaga

SEQ ID NO: 314815 - RNA, 32 nt, Human
agcauccugcagcugggacagaggccagcucc

SEQ ID NO: 314816 - RNA, 32 nt, Human
agcauccugccccagccagcuuccaucccuga

SEQ ID NO: 314817 - RNA, 32 nt, Human
agcauccugccugccgccgccugacucugcug

SEQ ID NO: 314818 - RNA, 32 nt, Human
agcauccuguuaaucagaaucaugggggagaa

SEQ ID NO: 314819 - RNA, 32 nt, Human
agcaucgcaguaagccuggcaggccuguaacu

SEQ ID NO: 314820 - RNA, 32 nt, Human
agcaucgcuccacugucucuccugccucccuc

SEQ ID NO: 314821 - RNA, 32 nt, Human
agcaucgcucuccugcuaacagucuugcaggu

SEQ ID NO: 314822 - RNA, 32 nt, Human
agcaucgcuggagggcagccugguggagaugg

SEQ ID NO: 314823 - RNA, 32 nt, Human
agcaucgcuugaaccugggagguggagguugc

SEQ ID NO: 314824 - RNA, 32 nt, Human
agcaucguggccccucaccucucccucucccc

SEQ ID NO: 314825 - RNA, 32 nt, Human
agcaucguggggcgaagcagagccauugugca

SEQ ID NO: 314826 - RNA, 32 nt, Human
agcaucuaaccccuccuuucuuaggcuagaca

SEQ ID NO: 314827 - RNA, 32 nt, Human
agcaucuacccguucacuccagucccacccca

SEQ ID NO: 314828 - RNA, 32 nt, Human
agcaucuacugaggcagaccugcaacagaagu

SEQ ID NO: 314829 - RNA, 17 nt, Human
agcaucuaggcuggcca

SEQ ID NO: 314830 - RNA, 32 nt, Human
agcaucuauucauguggcaggccccuguccua

SEQ ID NO: 314831 - RNA, 32 nt, Human
agcaucuauuuuugggcucugaaauggaauua

SEQ ID NO: 314832 - RNA, 32 nt, Human
agcaucucagacaccaaccacuaugcugucag

SEQ ID NO: 314833 - RNA, 32 nt, Human
agcaucuccaacaucucuccccaccucaugau

SEQ ID NO: 314834 - RNA, 19 nt, Human
agcaucucccacccaccca

SEQ ID NO: 314835 - RNA, 18 nt, Human
agcaucucccuccaggaa

SEQ ID NO: 314836 - RNA, 32 nt, Human
agcaucuccuggggcccccauggcuggggcag

SEQ ID NO: 314837 - RNA, 32 nt, Human
agcaucuccuuuuccuucuccucuuccucuuc

SEQ ID NO: 314838 - RNA, 32 nt, Human
agcaucucgaguagcugggauuacaggcaugc

SEQ ID NO: 314839 - RNA, 32 nt, Human
agcaucucucaugugccagcugcucgggauac

SEQ ID NO: 314840 - RNA, 32 nt, Human
agcaucucuccccucagcccugucuccucuuc

SEQ ID NO: 314841 - RNA, 32 nt, Human
agcaucucugaaaggggguaccaggaagcacc

SEQ ID NO: 314842 - RNA, 32 nt, Human
agcaucucugacccagucuucggacucauucu

SEQ ID NO: 314843 - RNA, 32 nt, Human
agcaucucugagcucaggacccugggcagggu

SEQ ID NO: 314844 - RNA, 32 nt, Human
agcaucucuggagagaaagaggagagccucac

SEQ ID NO: 314845 - RNA, 32 nt, Human
agcaucucuguggagcugccauccacuguaua

SEQ ID NO: 314846 - RNA, 32 nt, Human
agcaucucuucuucccugucagccugacucuu

SEQ ID NO: 314847 - RNA, 32 nt, Human
agcaucugaugccuuuuucuuugcuggggguc

SEQ ID NO: 314848 - RNA, 32 nt, Human
agcaucugcagacccaggcuccaggccucccg

SEQ ID NO: 314849 - RNA, 32 nt, Human
agcaucugccaagaagggugcugaaggcucca

SEQ ID NO: 314850 - RNA, 32 nt, Human
agcaucugcccgcaggccccagcccuucccug

SEQ ID NO: 314851 - RNA, 32 nt, Human
agcaucuggaaaaggaaccugguauuucugca

SEQ ID NO: 314852 - RNA, 32 nt, Human
agcaucuggaagugaggguaggagcuggguug

SEQ ID NO: 314853 - RNA, 32 nt, Human
agcaucuggaguagcugggacuacaggucagu

SEQ ID NO: 314854 - RNA, 32 nt, Human
agcaucuggauccccuuccuuuacagucaucc

SEQ ID NO: 314855 - RNA, 32 nt, Human
agcaucugggaaauuugccauggaauuaauga

SEQ ID NO: 314856 - RNA, 32 nt, Human
agcaucugggccuuggccuggagcacaaagac

SEQ ID NO: 314857 - RNA, 32 nt, Human
agcaucugggcugccagccacagggaagggcc

SEQ ID NO: 314858 - RNA, 32 nt, Human
agcaucuguaguguccaucagcaggugaaugg

SEQ ID NO: 314859 - RNA, 23 nt, Human
agcaucuucaucaagaucauuga

SEQ ID NO: 314860 - RNA, 22 nt, Human
agcaucuuccucccuccuuuaa

SEQ ID NO: 314861 - RNA, 32 nt, Human
agcaucuucgcuacaaccacugacaccagcug

SEQ ID NO: 314862 - RNA, 32 nt, Human
agcaucuugggcugauauugcuagcaagccug

SEQ ID NO: 314863 - RNA, 32 nt, Human
agcaucuugguggucgaugguagauuuuauug

SEQ ID NO: 314864 - RNA, 32 nt, Human
agcaucuuguucaaagauaagaaaguuacagu

SEQ ID NO: 314865 - RNA, 32 nt, Human
agcaugaaaacugagaugcugaaggugagagg

SEQ ID NO: 314866 - RNA, 32 nt, Human
agcaugaaaauggugcccaugccugacgcucc

SEQ ID NO: 314867 - RNA, 32 nt, Human
agcaugaaauguuuuuauuuuauuuugcuuau

SEQ ID NO: 314868 - RNA, 21 nt, Human
agcaugaagauuuaaugccua

SEQ ID NO: 314869 - RNA, 32 nt, Human
agcaugaaggaaaugaagcuggagaggaaggu

SEQ ID NO: 314870 - RNA, 32 nt, Human
agcaugaagugauuaaccugcuugaauuauuu

SEQ ID NO: 314871 - RNA, 32 nt, Human
agcaugaauugaaaggauuucuucugaaagcu

SEQ ID NO: 314872 - RNA, 21 nt, Human
agcaugaauuuuaauaucuag

SEQ ID NO: 314873 - RNA, 28 nt, Human
agcaugacacagcacuuuugggcacaag

SEQ ID NO: 314874 - RNA, 32 nt, Human
agcaugacaucaggaagccuguacuguccuga

SEQ ID NO: 314875 - RNA, 32 nt, Human
agcaugaccagcuguccaggggcugccuccug

SEQ ID NO: 314876 - RNA, 32 nt, Human
agcaugaccaugggcuccuuccaggccugguu

SEQ ID NO: 314877 - RNA, 32 nt, Human
agcaugaccucugggugucucuccaacucacc

SEQ ID NO: 314878 - RNA, 32 nt, Human
agcaugagaacuagcaccucugaaaaguaaaa

SEQ ID NO: 314879 - RNA, 28 nt, Human
agcaugagaagcauuuccagcacuccag

SEQ ID NO: 314880 - RNA, 23 nt, Human
agcaugagacugggcggcugucc

SEQ ID NO: 314881 - RNA, 32 nt, Human
agcaugagccaccacaccuggccuaugugugu

SEQ ID NO: 314882 - RNA, 32 nt, Human
agcaugagccaccacaccuggccuguuauucc

SEQ ID NO: 314883 - RNA, 28 nt, Human
agcaugagccggagggagggaagucugg

SEQ ID NO: 314884 - RNA, 32 nt, Human
agcaugaggaaauucaggguccccuaccagau

SEQ ID NO: 314885 - RNA, 32 nt, Human
agcaugaggcuggaugcagugguggugaggcc

SEQ ID NO: 314886 - RNA, 32 nt, Human
agcaugagguggaccuguuugcugggaacccc

SEQ ID NO: 314887 - RNA, 32 nt, Human
agcaugaguccuucaaggaagacagagugagc

SEQ ID NO: 314888 - RNA, 27 nt, Human
agcaugagugacagagacucugucucc

SEQ ID NO: 314889 - RNA, 32 nt, Human
agcaugaguugugaauggcagggaucauucug

SEQ ID NO: 314890 - RNA, 32 nt, Human
agcaugaucgacagagugaguuugucaaaagu

SEQ ID NO: 314891 - RNA, 32 nt, Human
agcaugaugauggauggauggacuggagcuag

SEQ ID NO: 314892 - RNA, 32 nt, Human
agcaugaugcagcgugaggacagcugagcagg

SEQ ID NO: 314893 - RNA, 32 nt, Human
agcaugaugccucugaggccagccuggccucc

SEQ ID NO: 314894 - RNA, 32 nt, Human
agcaugaugggaacccaagcugagggauacag

SEQ ID NO: 314895 - RNA, 32 nt, Human
agcaugcaaagucauuguuacaacagggaucu

SEQ ID NO: 314896 - RNA, 32 nt, Human
agcaugcaacuccaaagaaucugugaugccac

SEQ ID NO: 314897 - RNA, 32 nt, Human
agcaugcacccacugacaagagaccuccagcu

SEQ ID NO: 314898 - RNA, 32 nt, Human
agcaugcagacugugaagaugcaggccgcgau

SEQ ID NO: 314899 - RNA, 32 nt, Human
agcaugcagccagcugcucugcagccccaaau

SEQ ID NO: 314900 - RNA, 32 nt, Human
agcaugcaggguaaacgcaaagcacugaaguu

SEQ ID NO: 314901 - RNA, 32 nt, Human
agcaugccaccacaguaacacacauuagagaa

SEQ ID NO: 314902 - RNA, 32 nt, Human
agcaugccacuauacuccagccugggcaacaa

SEQ ID NO: 314903 - RNA, 32 nt, Human
agcaugccacuguacuccagccugagcuacag

SEQ ID NO: 314904 - RNA, 32 nt, Human
agcaugccacuuccagcaggcaugcaguccug

SEQ ID NO: 314905 - RNA, 32 nt, Human
agcaugccccacccacccuccugggcccaggc

SEQ ID NO: 314906 - RNA, 32 nt, Human
agcaugcccccgugaccugccugcugugguau

SEQ ID NO: 314907 - RNA, 20 nt, Human
agcaugcccuuugcuugcca

SEQ ID NO: 314908 - RNA, 32 nt, Human
agcaugccgcugcacuccagccugggagacug

SEQ ID NO: 314909 - RNA, 32 nt, Human
agcaugccugcccuuugcaagcagguuugggu

SEQ ID NO: 314910 - RNA, 32 nt, Human
agcaugccuuggagagagcagacacugugggg

SEQ ID NO: 314911 - RNA, 32 nt, Human
agcaugccuuucucucuuucucuuaauaagcc

SEQ ID NO: 314912 - RNA, 32 nt, Human
agcaugcgugagccauaccauccuccauccug

SEQ ID NO: 314913 - RNA, 32 nt, Human
agcaugcuacagccuuggacuccugggcucaa

SEQ ID NO: 314914 - RNA, 32 nt, Human
agcaugcucaaggacuccuaggcugguggcac

SEQ ID NO: 314915 - RNA, 32 nt, Human
agcaugcucaauaaauguaagcucuuuuguuc

SEQ ID NO: 314916 - RNA, 32 nt, Human
agcaugcuccacccccuugccacgugaugccc

SEQ ID NO: 314917 - RNA, 32 nt, Human
agcaugcugggaaccugagaaggaagguuucu

SEQ ID NO: 314918 - RNA, 32 nt, Human
agcaugcugguaaaaccacuacccucagagag

SEQ ID NO: 314919 - RNA, 19 nt, Human
agcaugcugugcucugccc

SEQ ID NO: 314920 - RNA, 32 nt, Human
agcaugcuuagcaauguucuaaucacuaugga

SEQ ID NO: 314921 - RNA, 32 nt, Human
agcauggaacagcaucuccccugggcuugcuc

SEQ ID NO: 314922 - RNA, 21 nt, Human
agcauggaagcccuaagcuua

SEQ ID NO: 314923 - RNA, 32 nt, Human
agcauggaagugagaggugaagccagcugguc

SEQ ID NO: 314924 - RNA, 32 nt, Human
agcauggaauacaguucagcagggccaaagag

SEQ ID NO: 314925 - RNA, 24 nt, Human
agcauggaauuaacauuaaacuua

SEQ ID NO: 314926 - RNA, 24 nt, Human
agcauggaauuagcauuaaacuua

SEQ ID NO: 314927 - RNA, 32 nt, Human
agcauggagagggaugcuugacagcaugcuaa

SEQ ID NO: 314928 - RNA, 28 nt, Human
agcauggagccggcggcggggagcagca

SEQ ID NO: 314929 - RNA, 32 nt, Human
agcauggagccggcggcggggagcagcaugga

SEQ ID NO: 314930 - RNA, 28 nt, Human
agcauggagcugcuguccacgccccaca

SEQ ID NO: 314931 - RNA, 32 nt, Human
agcauggaggcagauguggggcugagcugggg

SEQ ID NO: 314932 - RNA, 20 nt, Human
agcauggcaaacgugggcgg

SEQ ID NO: 314933 - RNA, 32 nt, Human
agcauggcaaagcccuuucucucccaagcccc

SEQ ID NO: 314934 - RNA, 24 nt, Human
agcauggcagucguggcccgggga

SEQ ID NO: 314935 - RNA, 32 nt, Human
agcauggcaguggaaggguuugucuugugccc

SEQ ID NO: 314936 - RNA, 28 nt, Human
agcauggccagcaagcucaucaucuccc

SEQ ID NO: 314937 - RNA, 32 nt, Human
agcauggccagcgguuuaguuuacagaucucc

SEQ ID NO: 314938 - RNA, 32 nt, Human
agcauggccucaccauaccuuuacuucagacu

SEQ ID NO: 314939 - RNA, 16 nt, Human
agcauggccuggacug

SEQ ID NO: 314940 - RNA, 32 nt, Human
agcauggccugggagcuuggaagggaggggug

SEQ ID NO: 314941 - RNA, 32 nt, Human
agcauggcuggcaggggcagcugcuguggcaa

SEQ ID NO: 314942 - RNA, 32 nt, Human
agcaugggacuggccugccuccuccgcccagc

SEQ ID NO: 314943 - RNA, 32 nt, Human
agcaugggagccaagaguaugaggagcuggug

SEQ ID NO: 314944 - RNA, 32 nt, Human
agcaugggaggcagagguugcagugagccaag

SEQ ID NO: 314945 - RNA, 32 nt, Human
agcaugggauguguccaguauugaaaaggcug

SEQ ID NO: 314946 - RNA, 32 nt, Human
agcaugggcagaggagacaggaacaagcguag

SEQ ID NO: 314947 - RNA, 32 nt, Human
agcaugggccucaccuccucugugauuucuuu

SEQ ID NO: 314948 - RNA, 21 nt, Human
agcaugggcgccugaggcugc

SEQ ID NO: 314949 - RNA, 32 nt, Human
agcaugggcucaaauggcacccuggcuggcug

SEQ ID NO: 314950 - RNA, 32 nt, Human
agcaugggcucagcucauccucccucuggccc

SEQ ID NO: 314951 - RNA, 32 nt, Human
agcaugggcugcagucaggacugcugcagacu

SEQ ID NO: 314952 - RNA, 21 nt, Human
agcaugggcuuguaguccuag

SEQ ID NO: 314953 - RNA, 32 nt, Human
agcauggggaagggaggaaggaagggauggga

SEQ ID NO: 314954 - RNA, 32 nt, Human
agcauggggcaguggcuggauuucugcccaag

SEQ ID NO: 314955 - RNA, 32 nt, Human
agcauggggcccagcugcagcugugcuuguuc

SEQ ID NO: 314956 - RNA, 32 nt, Human
agcaugggguucccagcagccugggggaagug

SEQ ID NO: 314957 - RNA, 32 nt, Human
agcaugggucagagugggagguugucaacaga

SEQ ID NO: 314958 - RNA, 32 nt, Human
agcaugggucuggggaagaggagcagcuuugc

SEQ ID NO: 314959 - RNA, 32 nt, Human
agcaugguaagcaacaggacauaucccagccu

SEQ ID NO: 314960 - RNA, 32 nt, Human
agcaugguacuuucacucagcuuaacaugcag

SEQ ID NO: 314961 - RNA, 28 nt, Human
agcaugguccagcugaggaagcugcucc

SEQ ID NO: 314962 - RNA, 32 nt, Human
agcauggucugggaacauuccuucuuuauugu

SEQ ID NO: 314963 - RNA, 32 nt, Human
agcauggugcuaacaucugaucagcuuguagg

SEQ ID NO: 314964 - RNA, 32 nt, Human
agcauggugcugcugcuucugcugcuucucca

SEQ ID NO: 314965 - RNA, 32 nt, Human
agcauggugcuggcauuugcucagcuucuagg

SEQ ID NO: 314966 - RNA, 32 nt, Human
agcaugguuauuucagaaaaucuggaaaacau

SEQ ID NO: 314967 - RNA, 31 nt, Human
agcauguaggagugagaaaaagucauugagc

SEQ ID NO: 314968 - RNA, 32 nt, Human
agcauguaggagugagaaaaagucauugagca

SEQ ID NO: 314969 - RNA, 32 nt, Human
agcauguaggcaggcucucagauguagguggc

SEQ ID NO: 314970 - RNA, 21 nt, Human
agcaugucacuuuuccauuaa

SEQ ID NO: 314971 - RNA, 19 nt, Human
agcaugucaggaaugcugg

SEQ ID NO: 314972 - RNA, 32 nt, Human
agcauguccaggcacuguacuaaccuacagag

SEQ ID NO: 314973 - RNA, 22 nt, Human
agcaugucucucaugccaagaa

SEQ ID NO: 314974 - RNA, 32 nt, Human
agcaugucugggccaggcagaggugcuccuca

SEQ ID NO: 314975 - RNA, 23 nt, Human
agcaugucuucaaaugccugagg

SEQ ID NO: 314976 - RNA, 32 nt, Human
agcaugucuuccuuuaccucccccuaaggaga

SEQ ID NO: 314977 - RNA, 32 nt, Human
agcaugucuuggaaccugucuugaguggggac

SEQ ID NO: 314978 - RNA, 32 nt, Human
agcaugugauuacuucacuccuggacugugac

SEQ ID NO: 314979 - RNA, 32 nt, Human
agcaugugcaccaaagccagccccaggcaggg

SEQ ID NO: 314980 - RNA, 32 nt, Human
agcaugugccuguaaucccagcuucuugggaa

SEQ ID NO: 314981 - RNA, 32 nt, Human
agcaugugccuguaauuccagcuacucgggag

SEQ ID NO: 314982 - RNA, 29 nt, Human
agcaugugccugugugugaaucugggagu

SEQ ID NO: 314983 - RNA, 32 nt, Human
agcauguggcugggugccuaucaccuucuucc

SEQ ID NO: 314984 - RNA, 32 nt, Human
agcaugugggaggcugaggauggagcugggaa

SEQ ID NO: 314985 - RNA, 32 nt, Human
agcaugugggauggacccaaggagaacgucag

SEQ ID NO: 314986 - RNA, 32 nt, Human
agcaugugguacagaggcaagagcagagccug

SEQ ID NO: 314987 - RNA, 32 nt, Human
agcauguggucuucagccuccugucucuguuc

SEQ ID NO: 314988 - RNA, 32 nt, Human
agcauguguaagucaaaauauguaugugaagg

SEQ ID NO: 314989 - RNA, 32 nt, Human
agcaugugugggcggggauggcucggccacug

SEQ ID NO: 314990 - RNA, 32 nt, Human
agcaugugugugugcauguaccggggaaugaa

SEQ ID NO: 314991 - RNA, 32 nt, Human
agcauguguuuaaccuuagugaagauuugugg

SEQ ID NO: 314992 - RNA, 32 nt, Human
agcauguuccagcucuugauguuuuuaaacuu

SEQ ID NO: 314993 - RNA, 19 nt, Human
agcauguuuaacccaggug

SEQ ID NO: 314994 - RNA, 32 nt, Human
agcauguuugauuuaagaaaagccuccaggaa

SEQ ID NO: 314995 - RNA, 32 nt, Human
agcauguuuuaaaucaguguaguccaggauca

SEQ ID NO: 314996 - RNA, 32 nt, Human
agcauuaaaaagcaaagggaaaaaggaugugu

SEQ ID NO: 314997 - RNA, 26 nt, Human
agcauuaauacuuacaguauuuucuu

SEQ ID NO: 314998 - RNA, 22 nt, Human
agcauuaauguaugacaugcug

SEQ ID NO: 314999 - RNA, 24 nt, Human
agcauuaaugugggagguacgcua

SEQ ID NO: 315000 - RNA, 32 nt, Human
agcauuaauucaaaugaggaguagucaguccu

SEQ ID NO: 315001 - RNA, 32 nt, Human
agcauuacacuucucccaguggagcccaugac

SEQ ID NO: 315002 - RNA, 32 nt, Human
agcauuacauugucuugagcaccagaaaauaa

SEQ ID NO: 315003 - RNA, 32 nt, Human
agcauuacccuccucucuccccagaugugacu

SEQ ID NO: 315004 - RNA, 32 nt, Human
agcauuacuaaauauaagaaaauucaugcugg

SEQ ID NO: 315005 - RNA, 32 nt, Human
agcauuacuguacaugcaaugaaaaauacuau

SEQ ID NO: 315006 - RNA, 32 nt, Human
agcauuagaaagcugaaggcccaaugaaauaa

SEQ ID NO: 315007 - RNA, 32 nt, Human
agcauuagaacugcauuguucauucaggagcc

SEQ ID NO: 315008 - RNA, 32 nt, Human
agcauuagcagauguccacugcguugucccau

SEQ ID NO: 315009 - RNA, 25 nt, Human
agcauuagcugccacugccaugcug

SEQ ID NO: 315010 - RNA, 32 nt, Human
agcauuagugccaugauaucuacuggauuuua

SEQ ID NO: 315011 - RNA, 32 nt, Human
agcauuaguugcucaaacuuuguucgacauca

SEQ ID NO: 315012 - RNA, 32 nt, Human
agcauuaucucagcaaaaggcuagagauaacc

SEQ ID NO: 315013 - RNA, 32 nt, Human
agcauuaucuuagacauuaaauuugaaguaac

SEQ ID NO: 315014 - RNA, 32 nt, Human
agcauuauggucuucaucccuccaucaaccuu

SEQ ID NO: 315015 - RNA, 26 nt, Human
agcauuaugguuuucagaacacuuca

SEQ ID NO: 315016 - RNA, 24 nt, Human
agcauuauuacauguuauuguucu

SEQ ID NO: 315017 - RNA, 21 nt, Human
agcauuauuucaauuuuucuu

SEQ ID NO: 315018 - RNA, 21 nt, Human
agcauucaagaugugaccugg

SEQ ID NO: 315019 - RNA, 31 nt, Human
agcauucaaggcacuuuacaugcagggcucu

SEQ ID NO: 315020 - RNA, 32 nt, Human
agcauucaccuugccaucugucuugucauugu

SEQ ID NO: 315021 - RNA, 32 nt, Human
agcauucagaucuuucuagucaccuuagaacu

SEQ ID NO: 315022 - RNA, 32 nt, Human
agcauucagcaacccuuuaaagaaaaagaauu

SEQ ID NO: 315023 - RNA, 32 nt, Human
agcauucagggcuguguggcccaaccuuccag

SEQ ID NO: 315024 - RNA, 32 nt, Human
agcauucaguccaauuccacagacacagugag

SEQ ID NO: 315025 - RNA, 32 nt, Human
agcauucauacaccucaccugccuuggcaagc

SEQ ID NO: 315026 - RNA, 21 nt, Human
agcauucaucagcagccucaa

SEQ ID NO: 315027 - RNA, 32 nt, Human
agcauucaucccuuuccauauaacaggaggga

SEQ ID NO: 315028 - RNA, 22 nt, Human
agcauucaugccugcugcccug

SEQ ID NO: 315029 - RNA, 32 nt, Human
agcauuccaaagugcugggauuacagguguga

SEQ ID NO: 315030 - RNA, 32 nt, Human
agcauuccagaacaggagggaagagaaagaga

SEQ ID NO: 315031 - RNA, 32 nt, Human
agcauuccagaacucuaaauccuguagaggua

SEQ ID NO: 315032 - RNA, 32 nt, Human
agcauuccagcagccacccagaccaugcuccg

SEQ ID NO: 315033 - RNA, 32 nt, Human
agcauuccagccugggcgauggagugagaccu

SEQ ID NO: 315034 - RNA, 32 nt, Human
agcauuccagcuguuucacccuucagcaacau

SEQ ID NO: 315035 - RNA, 32 nt, Human
agcauuccaggagagaaagggaccgcuuggag

SEQ ID NO: 315036 - RNA, 32 nt, Human
agcauuccagguucugggcuucuccccauguc

SEQ ID NO: 315037 - RNA, 32 nt, Human
agcauucccaaagcucuuaauucuccauaaaa

SEQ ID NO: 315038 - RNA, 32 nt, Human
agcauuccccugggcucccuggcagcuguugg

SEQ ID NO: 315039 - RNA, 32 nt, Human
agcauuccuuucuccaggguauggggcaagga

SEQ ID NO: 315040 - RNA, 32 nt, Human
agcauucgagaaacuccucucuacuuuagcac

SEQ ID NO: 315041 - RNA, 32 nt, Human
agcauucuaagcugccugaccuugggcauuug

SEQ ID NO: 315042 - RNA, 32 nt, Human
agcauucucaaaggcuuuagcccuggacccag

SEQ ID NO: 315043 - RNA, 32 nt, Human
agcauucucaacuauaucaaguuacuguucag

SEQ ID NO: 315044 - RNA, 32 nt, Human
agcauucucauuccuauauuagaugaaaugua

SEQ ID NO: 315045 - RNA, 32 nt, Human
agcauucuccacccuuaacccugugcucaggc

SEQ ID NO: 315046 - RNA, 32 nt, Human
agcauucucccugagaugaugucuucaguaau

SEQ ID NO: 315047 - RNA, 32 nt, Human
agcauucuccuggagaaaacugaaacagaagg

SEQ ID NO: 315048 - RNA, 32 nt, Human
agcauucugccugucucagccucccaaaaagc

SEQ ID NO: 315049 - RNA, 32 nt, Human
agcauucuguacuaauacagcucuuccauagg

SEQ ID NO: 315050 - RNA, 32 nt, Human
agcauucuugcugcugcugccugccugcccac

SEQ ID NO: 315051 - RNA, 32 nt, Human
agcauugaaaggacagcuuggggauggaauuu

SEQ ID NO: 315052 - RNA, 32 nt, Human
agcauugacacauagcuucaucugaggugaga

SEQ ID NO: 315053 - RNA, 32 nt, Human
agcauugagccugaggaccaaaaugaaaccuu

SEQ ID NO: 315054 - RNA, 32 nt, Human
agcauugaggggaacaagaugagucuaauccg

SEQ ID NO: 315055 - RNA, 32 nt, Human
agcauugaggugacugaaugccuccacuuauu

SEQ ID NO: 315056 - RNA, 32 nt, Human
agcauugaucacuuaauccuguuucucauguc

SEQ ID NO: 315057 - RNA, 32 nt, Human
agcauugauuucuuaauuuugauaccuguacu

SEQ ID NO: 315058 - RNA, 32 nt, Human
agcauugcacuccagccugggugacagaacga

SEQ ID NO: 315059 - RNA, 32 nt, Human
agcauugcagaacaugagugcugaugagggca

SEQ ID NO: 315060 - RNA, 32 nt, Human
agcauugccaucacuggcccuccuaggcucac

SEQ ID NO: 315061 - RNA, 32 nt, Human
agcauugccgcuccacaucuuugcucaauguu

SEQ ID NO: 315062 - RNA, 32 nt, Human
agcauugccuggacugaccacaccaaccaggc

SEQ ID NO: 315063 - RNA, 32 nt, Human
agcauugcuacugcucagcuucuucuuucauu

SEQ ID NO: 315064 - RNA, 32 nt, Human
agcauugcucuuccuacuguacauauugggga

SEQ ID NO: 315065 - RNA, 32 nt, Human
agcauugcugcccuccaaccuccugggauuca

SEQ ID NO: 315066 - RNA, 32 nt, Human
agcauuggaauagaaguaauugguuuaaagaa

SEQ ID NO: 315067 - RNA, 32 nt, Human
agcauuggcaaaaagcugaggaugacaagcuu

SEQ ID NO: 315068 - RNA, 32 nt, Human
agcauuggcagucagagauuuuauagggaaga

SEQ ID NO: 315069 - RNA, 32 nt, Human
agcauuggcuugcuucaguuguuucucuuccc

SEQ ID NO: 315070 - RNA, 24 nt, Human
agcauugggaccgugaccugcagg

SEQ ID NO: 315071 - RNA, 32 nt, Human
agcauugggagauguggaccagagauccacuc

SEQ ID NO: 315072 - RNA, 32 nt, Human
agcauugggauuacaggcaucagccaccacac

SEQ ID NO: 315073 - RNA, 22 nt, Human
agcauuggggagcaggaggcug

SEQ ID NO: 315074 - RNA, 32 nt, Human
agcauugggguucggcccugcccguagcacag

SEQ ID NO: 315075 - RNA, 32 nt, Human
agcauugguagugcuuuccuuaucaguaacug

SEQ ID NO: 315076 - RNA, 32 nt, Human
agcauuguaggauguuuagcagcauccguggc

SEQ ID NO: 315077 - RNA, 32 nt, Human
agcauuguggagcaaauuuaggguuccuguga

SEQ ID NO: 315078 - RNA, 32 nt, Human
agcauuguguacaugcagaagugcacaguacc

SEQ ID NO: 315079 - RNA, 32 nt, Human
agcauugugucaccugugaguuuuuggaauug

SEQ ID NO: 315080 - RNA, 32 nt, Human
agcauuguguucuuggcaugugaucugggaaa

SEQ ID NO: 315081 - RNA, 32 nt, Human
agcauuguuucugcuucugaaaucuguauagu

SEQ ID NO: 315082 - RNA, 32 nt, Human
agcauuuagagaguguguugucuuccagaguc

SEQ ID NO: 315083 - RNA, 32 nt, Human
agcauuuagaucaggaggcaaaguaauuucuu

SEQ ID NO: 315084 - RNA, 32 nt, Human
agcauuuauuucccaaaucuguuaacauggca

SEQ ID NO: 315085 - RNA, 32 nt, Human
agcauuucaagaaacaaccauaugguguugua

SEQ ID NO: 315086 - RNA, 21 nt, Human
agcauuucauuugcacaucuu

SEQ ID NO: 315087 - RNA, 32 nt, Human
agcauuucccacccuccaucuaccccuuccag

SEQ ID NO: 315088 - RNA, 32 nt, Human
agcauuucccuuuuccccuccuuugccuuuca

SEQ ID NO: 315089 - RNA, 23 nt, Human
agcauuucuacuccuuccaagaa

SEQ ID NO: 315090 - RNA, 32 nt, Human
agcauuucugaacaaaugaaacucuucuccau

SEQ ID NO: 315091 - RNA, 32 nt, Human
agcauuucugcaaagcucacacuuguuucacc

SEQ ID NO: 315092 - RNA, 32 nt, Human
agcauuucuguuaggauauuuagauggagguu

SEQ ID NO: 315093 - RNA, 32 nt, Human
agcauuucuuuagcccacaaguccagacccag

SEQ ID NO: 315094 - RNA, 32 nt, Human
agcauuugacaugcauuuuaacuuuuugguuc

SEQ ID NO: 315095 - RNA, 32 nt, Human
agcauuugcagagccuagcacagcauuaggcc

SEQ ID NO: 315096 - RNA, 32 nt, Human
agcauuugcagcguucggggcagggccacucg

SEQ ID NO: 315097 - RNA, 32 nt, Human
agcauuuggaaguaacaggaccucuuucuagc

SEQ ID NO: 315098 - RNA, 32 nt, Human
agcauuuggaauuggaauuuccuaggaauauc

SEQ ID NO: 315099 - RNA, 32 nt, Human
agcauuuggcucugcugcccccaaggggacag

SEQ ID NO: 315100 - RNA, 29 nt, Human
agcauuuggcugcuuuuuccuucacguuc

SEQ ID NO: 315101 - RNA, 32 nt, Human
agcauuuggcugcuuuuuccuucacguucacu

SEQ ID NO: 315102 - RNA, 23 nt, Human
agcauuuguaauaaugcuaaaaa

SEQ ID NO: 315103 - RNA, 23 nt, Human
agcauuugucucccaccucauca

SEQ ID NO: 315104 - RNA, 32 nt, Human
agcauuuuaaaccauuuguuuuuaaaauuaau

SEQ ID NO: 315105 - RNA, 32 nt, Human
agcauuuuaaagaggcgguugcaggacucuga

SEQ ID NO: 315106 - RNA, 32 nt, Human
agcauuuuaguuugaaccaggcauuguguuag

SEQ ID NO: 315107 - RNA, 32 nt, Human
agcauuuuccuugagcuaaauaccuaauaacc

SEQ ID NO: 315108 - RNA, 32 nt, Human
agcauuuucuuccucaccuuuggaaaguaaaa

SEQ ID NO: 315109 - RNA, 32 nt, Human
agcauuuugcucaugcugcagucccuggucug

SEQ ID NO: 315110 - RNA, 32 nt, Human
agccaaaaacagagacagggaagaacucauug

SEQ ID NO: 315111 - RNA, 32 nt, Human
agccaaaaucaaauagcuugggagacuggaca

SEQ ID NO: 315112 - RNA, 32 nt, Human
agccaaaaucucaagaaauucccagcagguua

SEQ ID NO: 315113 - RNA, 32 nt, Human
agccaaacacauaacaauaaaaaccaaacucu

SEQ ID NO: 315114 - RNA, 32 nt, Human
agccaaaccucaccaacuccuaguucuagaaa

SEQ ID NO: 315115 - RNA, 32 nt, Human
agccaaaccucagggcccggugcaguguccag

SEQ ID NO: 315116 - RNA, 22 nt, Human
agccaaacggaguggaguucug

SEQ ID NO: 315117 - RNA, 18 nt, Human
agccaaacuagaccacca

SEQ ID NO: 315118 - RNA, 20 nt, Human
agccaaacucugccagccac

SEQ ID NO: 315119 - RNA, 32 nt, Human
agccaaagaagagauuuguauugcugagcuca

SEQ ID NO: 315120 - RNA, 32 nt, Human
agccaaagaggaagguuagguuggcuugucga

SEQ ID NO: 315121 - RNA, 32 nt, Human
agccaaagaggaggaggcaggagaagcaggca

SEQ ID NO: 315122 - RNA, 32 nt, Human
agccaaagcacaagacaaacacaaagucuugc

SEQ ID NO: 315123 - RNA, 32 nt, Human
agccaaagcccaccuucuccucagccugagcu

SEQ ID NO: 315124 - RNA, 32 nt, Human
agccaaagcccuguuugagaaggugaagaagu

SEQ ID NO: 315125 - RNA, 32 nt, Human
agccaaagccuucugugccaguccugugcuag

SEQ ID NO: 315126 - RNA, 22 nt, Human
agccaaagcggcggccccaggg

SEQ ID NO: 315127 - RNA, 32 nt, Human
agccaaaggagagugcauggaggacaauccug

SEQ ID NO: 315128 - RNA, 32 nt, Human
agccaaaggccgugccugguggggcggacgga

SEQ ID NO: 315129 - RNA, 32 nt, Human
agccaaaggccuggggcuuccuuggcucuucu

SEQ ID NO: 315130 - RNA, 32 nt, Human
agccaaaggcgcugucccagacuguccccagc

SEQ ID NO: 315131 - RNA, 32 nt, Human
agccaaagguagagacagggaggacagggcca

SEQ ID NO: 315132 - RNA, 32 nt, Human
agccaaaguaaacacauuuccaggaauagaag

SEQ ID NO: 315133 - RNA, 22 nt, Human
agccaaaguuaaauguaucaca

SEQ ID NO: 315134 - RNA, 32 nt, Human
agccaaaguuaugcaagggacuguguguugcc

SEQ ID NO: 315135 - RNA, 32 nt, Human
agccaaaguugaguacucuggacaccagaaua

SEQ ID NO: 315136 - RNA, 32 nt, Human
agccaaauuuucugucggucuaagaagacaua

SEQ ID NO: 315137 - RNA, 32 nt, Human
agccaacacaguuagaucagagaaagcaauug

SEQ ID NO: 315138 - RNA, 32 nt, Human
agccaacaccaaaacccagcaugugaaguuac

SEQ ID NO: 315139 - RNA, 32 nt, Human
agccaacaguguugucaggaaucugagguccu

SEQ ID NO: 315140 - RNA, 32 nt, Human
agccaacaucgugaaaccccaucucuacuaaa

SEQ ID NO: 315141 - RNA, 32 nt, Human
agccaacaucucccgcaggacccccuaaucuu

SEQ ID NO: 315142 - RNA, 32 nt, Human
agccaacaugcugaaacuccaucucuacuaaa

SEQ ID NO: 315143 - RNA, 32 nt, Human
agccaacauggcaaaaccccaucucuacuaaa

SEQ ID NO: 315144 - RNA, 32 nt, Human
agccaacauggugaaaacccaucuguacuaaa

SEQ ID NO: 315145 - RNA, 32 nt, Human
agccaacauggugaaaacccugucucuacuaa

SEQ ID NO: 315146 - RNA, 32 nt, Human
agccaacauggugaaaccccaucuguacuaaa

SEQ ID NO: 315147 - RNA, 32 nt, Human
agccaacauggugaaacccccgucucgacuaa

SEQ ID NO: 315148 - RNA, 32 nt, Human
agccaacauggugaaaccccgucucuauuaaa

SEQ ID NO: 315149 - RNA, 32 nt, Human
agccaacauggugaaaccccgucucuucuaaa

SEQ ID NO: 315150 - RNA, 32 nt, Human
agccaacauggugaaaccucgccucuacuaaa

SEQ ID NO: 315151 - RNA, 28 nt, Human
agccaacauggugaaaucccaucucuac

SEQ ID NO: 315152 - RNA, 32 nt, Human
agccaacauggugaacuaccaucucuacuaaa

SEQ ID NO: 315153 - RNA, 32 nt, Human
agccaacaugguguaaacacugucucuacuaa

SEQ ID NO: 315154 - RNA, 22 nt, Human
agccaacauuuucauuuccacc

SEQ ID NO: 315155 - RNA, 24 nt, Human
agccaaccaaagugcugggauuac

SEQ ID NO: 315156 - RNA, 24 nt, Human
agccaaccacauuuuccuuuggga

SEQ ID NO: 315157 - RNA, 22 nt, Human
agccaaccacuuucaccuggga

SEQ ID NO: 315158 - RNA, 32 nt, Human
agccaaccauggucuucagacccuacguuaau

SEQ ID NO: 315159 - RNA, 32 nt, Human
agccaacccugcccucuuccuccccugucccc

SEQ ID NO: 315160 - RNA, 32 nt, Human
agccaacccugcugcucucugccuccuuuaaa

SEQ ID NO: 315161 - RNA, 32 nt, Human
agccaaccucuccugccacccccacaccaaga

SEQ ID NO: 315162 - RNA, 32 nt, Human
agccaacgucaucugcucuucaguuccucacu

SEQ ID NO: 315163 - RNA, 26 nt, Human
agccaacguggugaaaccucaucucu

SEQ ID NO: 315164 - RNA, 32 nt, Human
agccaacuccaaccaacuucugacccccaacu

SEQ ID NO: 315165 - RNA, 32 nt, Human
agccaacuccaaugcguagugcucauuuugga

SEQ ID NO: 315166 - RNA, 32 nt, Human
agccaacucugggaauacaggggugaaagggg

SEQ ID NO: 315167 - RNA, 32 nt, Human
agccaacugcaacuuaguggcucuguuuguau

SEQ ID NO: 315168 - RNA, 20 nt, Human
agccaacugccagugcuaga

SEQ ID NO: 315169 - RNA, 32 nt, Human
agccaacugcucacucgcucaccucccuccuu

SEQ ID NO: 315170 - RNA, 22 nt, Human
agccaacugcuuuuugugcggu

SEQ ID NO: 315171 - RNA, 32 nt, Human
agccaacuucaugucugagugcacgagcagca

SEQ ID NO: 315172 - RNA, 32 nt, Human
agccaacuugcaaauagaaaacucagugaugc

SEQ ID NO: 315173 - RNA, 18 nt, Human
agccaagaaacacugccu

SEQ ID NO: 315174 - RNA, 23 nt, Human
agccaagaaagcccaccucuccu

SEQ ID NO: 315175 - RNA, 32 nt, Human
agccaagaaggaacuuucccacacuacugaau

SEQ ID NO: 315176 - RNA, 19 nt, Human
agccaagaaguuggucuua

SEQ ID NO: 315177 - RNA, 32 nt, Human
agccaagaauugccacugcaccugagauaagg

SEQ ID NO: 315178 - RNA, 32 nt, Human
agccaagacaaggugcaggcagugaguccugc

SEQ ID NO: 315179 - RNA, 32 nt, Human
agccaagacaguggcagcaaaggaagacuugg

SEQ ID NO: 315180 - RNA, 32 nt, Human
agccaagacauuugaccuuugacauuugaccu

SEQ ID NO: 315181 - RNA, 32 nt, Human
agccaagaccugaggguggaaguguccucuua

SEQ ID NO: 315182 - RNA, 32 nt, Human
agccaagacgccauugcaccccagccugggca

SEQ ID NO: 315183 - RNA, 23 nt, Human
agccaagacuaugccacugcacu

SEQ ID NO: 315184 - RNA, 32 nt, Human
agccaagagaccagagagucccugccacuagu

SEQ ID NO: 315185 - RNA, 32 nt, Human
agccaagagacuagcagagaagguacguuagc

SEQ ID NO: 315186 - RNA, 32 nt, Human
agccaagagccuucccuugaaguccccaagca

SEQ ID NO: 315187 - RNA, 32 nt, Human
agccaagauaagauccacacacacauuauuaa

SEQ ID NO: 315188 - RNA, 32 nt, Human
agccaagaucacaccacugaccucuagccugg

SEQ ID NO: 315189 - RNA, 23 nt, Human
agccaagaucacaccacugcacu

SEQ ID NO: 315190 - RNA, 23 nt, Human
agccaagaucacaccacuggcac

SEQ ID NO: 315191 - RNA, 32 nt, Human
agccaagaucacaccacuggcacuccagccug

SEQ ID NO: 315192 - RNA, 32 nt, Human
agccaagaucacgccacugaacuccagccugg

SEQ ID NO: 315193 - RNA, 23 nt, Human
agccaagaucacgccauuguacu

SEQ ID NO: 315194 - RNA, 32 nt, Human
agccaagaucauaccacggcacuccagccugg

SEQ ID NO: 315195 - RNA, 32 nt, Human
agccaagaucauaccacugcacugcagccuga

SEQ ID NO: 315196 - RNA, 32 nt, Human
agccaagaucauaccauugcacuccagccugg

SEQ ID NO: 315197 - RNA, 32 nt, Human
agccaagaucauacuacugcacuccagccugg

SEQ ID NO: 315198 - RNA, 32 nt, Human
agccaagaucgcaccacugaacuccagccugg

SEQ ID NO: 315199 - RNA, 23 nt, Human
agccaagaucgcgccacugcacu

SEQ ID NO: 315200 - RNA, 23 nt, Human
agccaagaucgcgccauugcacu

SEQ ID NO: 315201 - RNA, 32 nt, Human
agccaagaucguaccacugcacuccagccugg

SEQ ID NO: 315202 - RNA, 32 nt, Human
agccaagaucguaccacugcacuccagucugg

SEQ ID NO: 315203 - RNA, 32 nt, Human
agccaagaucguaccacugcacucuggccugg

SEQ ID NO: 315204 - RNA, 23 nt, Human
agccaagaucgugccauugcacu

SEQ ID NO: 315205 - RNA, 23 nt, Human
agccaagaucgugccccugcacu

SEQ ID NO: 315206 - RNA, 23 nt, Human
agccaagaucgugccucugcacu

SEQ ID NO: 315207 - RNA, 23 nt, Human
agccaagaucugccagcccugcc

SEQ ID NO: 315208 - RNA, 32 nt, Human
agccaagaugaaacuccccuuacuucuggcuc

SEQ ID NO: 315209 - RNA, 32 nt, Human
agccaagaugauguaggaccccaaaggugggu

SEQ ID NO: 315210 - RNA, 32 nt, Human
agccaagauggugaaaccccaucucuacuaaa

SEQ ID NO: 315211 - RNA, 32 nt, Human
agccaagauggugaaaccccgucucuaguaaa

SEQ ID NO: 315212 - RNA, 32 nt, Human
agccaagauugcaccaccacacuccagccugg

SEQ ID NO: 315213 - RNA, 32 nt, Human
agccaagauugcaccauugaacuccagccugg

SEQ ID NO: 315214 - RNA, 23 nt, Human
agccaagauugcgccacugcacu

SEQ ID NO: 315215 - RNA, 23 nt, Human
agccaagauuguaccacugcacu

SEQ ID NO: 315216 - RNA, 32 nt, Human
agccaagauuguaccacugcacuccaaccugg

SEQ ID NO: 315217 - RNA, 32 nt, Human
agccaagauuguaccacugcacuccagccugg

SEQ ID NO: 315218 - RNA, 32 nt, Human
agccaagauuguaccacugcacuccaguuugg

SEQ ID NO: 315219 - RNA, 32 nt, Human
agccaagauuguaccacuguacuccagccugg

SEQ ID NO: 315220 - RNA, 32 nt, Human
agccaagauugugccaccacacuccagccugg

SEQ ID NO: 315221 - RNA, 32 nt, Human
agccaagauugugccacugaacucuagccugg

SEQ ID NO: 315222 - RNA, 22 nt, Human
agccaagauuucaccaccgccu

SEQ ID NO: 315223 - RNA, 32 nt, Human
agccaagauuuucuugccuccugggcucccuc

SEQ ID NO: 315224 - RNA, 32 nt, Human
agccaagcaaagccaagaaagccaguccaagg

SEQ ID NO: 315225 - RNA, 32 nt, Human
agccaagcaacccccuaaacauucauaucuag

SEQ ID NO: 315226 - RNA, 32 nt, Human
agccaagcacugccacgguccuccaggaccug

SEQ ID NO: 315227 - RNA, 32 nt, Human
agccaagcagaugucaguaccaugcuuguaca

SEQ ID NO: 315228 - RNA, 32 nt, Human
agccaagcagcccuucaaguucuuuuauuucu

SEQ ID NO: 315229 - RNA, 32 nt, Human
agccaagcaguuccauuuacagcucuguuuuu

SEQ ID NO: 315230 - RNA, 32 nt, Human
agccaagcaguuucuuucaaagaagccagcag

SEQ ID NO: 315231 - RNA, 32 nt, Human
agccaagcaucgcauccccugugauuugcacg

SEQ ID NO: 315232 - RNA, 19 nt, Human
agccaagcaucuggccuga

SEQ ID NO: 315233 - RNA, 17 nt, Human
agccaagccagccccac

SEQ ID NO: 315234 - RNA, 32 nt, Human
agccaagcccacaucccuccuugggcagggca

SEQ ID NO: 315235 - RNA, 32 nt, Human
agccaagcccaggcaucaggaggcuguuauga

SEQ ID NO: 315236 - RNA, 19 nt, Human
agccaagccugcauguaca

SEQ ID NO: 315237 - RNA, 32 nt, Human
agccaagcgcggacgguagccacccaguucau

SEQ ID NO: 315238 - RNA, 32 nt, Human
agccaagcgcgugccauuucacuccagccugg

SEQ ID NO: 315239 - RNA, 18 nt, Human
agccaagcuaauguggua

SEQ ID NO: 315240 - RNA, 32 nt, Human
agccaagcuacaaauuaaauccucagccugga

SEQ ID NO: 315241 - RNA, 32 nt, Human
agccaagcucaaggauggaagugcaguuaggg

SEQ ID NO: 315242 - RNA, 32 nt, Human
agccaagcuggccgagguugcaguccaugagc

SEQ ID NO: 315243 - RNA, 32 nt, Human
agccaagcuguugcaagacagaguggcuacaa

SEQ ID NO: 315244 - RNA, 32 nt, Human
agccaagcuuucuccccacccucugugggcca

SEQ ID NO: 315245 - RNA, 32 nt, Human
agccaaggaaaaagauacaagagcagaauagu

SEQ ID NO: 315246 - RNA, 19 nt, Human
agccaaggaaaagcuacac

SEQ ID NO: 315247 - RNA, 32 nt, Human
agccaaggaaaaggagucuggaagggagauga

SEQ ID NO: 315248 - RNA, 32 nt, Human
agccaaggaaaauauuguggauuuaauauuug

SEQ ID NO: 315249 - RNA, 32 nt, Human
agccaaggaaacacugauuuugcugcugaaga

SEQ ID NO: 315250 - RNA, 19 nt, Human
agccaaggagccccaggga

SEQ ID NO: 315251 - RNA, 32 nt, Human
agccaaggaggugaggagcagagcaggcaauu

SEQ ID NO: 315252 - RNA, 32 nt, Human
agccaaggagugcaccacugcacuccagccug

SEQ ID NO: 315253 - RNA, 23 nt, Human
agccaaggcaggcguguguggua

SEQ ID NO: 315254 - RNA, 32 nt, Human
agccaaggcccaccaaggaguuuuccacccgu

SEQ ID NO: 315255 - RNA, 32 nt, Human
agccaaggccuggagggcuggagccagaagca

SEQ ID NO: 315256 - RNA, 18 nt, Human
agccaaggccuguguggu

SEQ ID NO: 315257 - RNA, 32 nt, Human
agccaaggcgggugcuggaagccagacggaac

SEQ ID NO: 315258 - RNA, 32 nt, Human
agccaaggcuaguggcuggguuacugauggau

SEQ ID NO: 315259 - RNA, 32 nt, Human
agccaaggcugaaccuccucagaagagcaacu

SEQ ID NO: 315260 - RNA, 32 nt, Human
agccaagggaaagugggcugcugagagcauag

SEQ ID NO: 315261 - RNA, 32 nt, Human
agccaagggacagugccauccuuggggacagg

SEQ ID NO: 315262 - RNA, 32 nt, Human
agccaagggcagcaggggcugcuccuggugag

SEQ ID NO: 315263 - RNA, 32 nt, Human
agccaaggguggaggcuucaggucuccagcuu

SEQ ID NO: 315264 - RNA, 32 nt, Human
agccaagguagccaaguacgagagggacacac

SEQ ID NO: 315265 - RNA, 32 nt, Human
agccaaggucauaccagugcacuccaggcggg

SEQ ID NO: 315266 - RNA, 23 nt, Human
agccaaggucaugccacugcacu

SEQ ID NO: 315267 - RNA, 32 nt, Human
agccaaggucauggugcucagccaaggaacac

SEQ ID NO: 315268 - RNA, 32 nt, Human
agccaagguggccuguccaguccuggugcugu

SEQ ID NO: 315269 - RNA, 32 nt, Human
agccaaguacuacagcccugggggugucacac

SEQ ID NO: 315270 - RNA, 26 nt, Human
agccaagucccuuccauuccuuucca

SEQ ID NO: 315271 - RNA, 32 nt, Human
agccaagugugguagagugugccugaaguccc

SEQ ID NO: 315272 - RNA, 32 nt, Human
agccaaguucaaggaagcagccuggcuaaagc

SEQ ID NO: 315273 - RNA, 22 nt, Human
agccaaguuucucccugccuca

SEQ ID NO: 315274 - RNA, 32 nt, Human
agccaauaacaugacaggagcugggacugguu

SEQ ID NO: 315275 - RNA, 32 nt, Human
agccaauauacccaguuuuuacucaguuugau

SEQ ID NO: 315276 - RNA, 32 nt, Human
agccaauauggugaaaccccgucucuacuaaa

SEQ ID NO: 315277 - RNA, 32 nt, Human
agccaaucacgucgccgcgguccugguucuaa

SEQ ID NO: 315278 - RNA, 32 nt, Human
agccaaucaguagccagcaucugccuccccuu

SEQ ID NO: 315279 - RNA, 32 nt, Human
agccaaucccccagagacuucgagaucagcca

SEQ ID NO: 315280 - RNA, 20 nt, Human
agccaauccuuugugcagug

SEQ ID NO: 315281 - RNA, 32 nt, Human
agccaaucuccaagccuccaaacggaacguca

SEQ ID NO: 315282 - RNA, 32 nt, Human
agccaaugacaacucacucuccccuacuccac

SEQ ID NO: 315283 - RNA, 32 nt, Human
agccaaugacaccuuccaucuuuccagcuaug

SEQ ID NO: 315284 - RNA, 32 nt, Human
agccaaugacaggugaaacccagacacucucc

SEQ ID NO: 315285 - RNA, 32 nt, Human
agccaaugaggguaaauguacuauguugcuaa

SEQ ID NO: 315286 - RNA, 32 nt, Human
agccaaugaguuggaggcugcagugagcuaua

SEQ ID NO: 315287 - RNA, 21 nt, Human
agccaaugccuuuguguggua

SEQ ID NO: 315288 - RNA, 32 nt, Human
agccaaugcuaagcauucacacacaaccagaa

SEQ ID NO: 315289 - RNA, 32 nt, Human
agccaauggaaaaucuggguucaaccagcccc

SEQ ID NO: 315290 - RNA, 32 nt, Human
agccaauggagacugucucaagagggcacugg

SEQ ID NO: 315291 - RNA, 32 nt, Human
agccaauggagggagagggagcgucagaagcc

SEQ ID NO: 315292 - RNA, 32 nt, Human
agccaaugguauagacugccucuggggaagca

SEQ ID NO: 315293 - RNA, 16 nt, Human
agccaaugucaugugg

SEQ ID NO: 315294 - RNA, 17 nt, Human
agccaaugugcgugugg

SEQ ID NO: 315295 - RNA, 32 nt, Human
agccaauguguggcucagugccuggacaaaug

SEQ ID NO: 315296 - RNA, 32 nt, Human
agccaauguuaggaauguuuaaaggcagcugc

SEQ ID NO: 315297 - RNA, 32 nt, Human
agccaauuuagugaaaccccaucucuacuaaa

SEQ ID NO: 315298 - RNA, 32 nt, Human
agccaauuucacccucuccucccccugccaac

SEQ ID NO: 315299 - RNA, 32 nt, Human
agccacaaacuccauccagauccggaacguca

SEQ ID NO: 315300 - RNA, 32 nt, Human
agccacaaagugaaagggagugaggcggcgug

SEQ ID NO: 315301 - RNA, 18 nt, Human
agccacaacacccagcca

SEQ ID NO: 315302 - RNA, 32 nt, Human
agccacaagcgcaaucaugcuuuucaaugacc

SEQ ID NO: 315303 - RNA, 32 nt, Human
agccacaaucagaaaaaggacaaggacaugag

SEQ ID NO: 315304 - RNA, 18 nt, Human
agccacacacccagggcc

SEQ ID NO: 315305 - RNA, 32 nt, Human
agccacacacugugcauacacgcacaccccac

SEQ ID NO: 315306 - RNA, 32 nt, Human
agccacacagcccagaaggccagaaaaggcag

SEQ ID NO: 315307 - RNA, 32 nt, Human
agccacacagcccgggccacugucaggaugag

SEQ ID NO: 315308 - RNA, 32 nt, Human
agccacacagccgccuucuggcccaacacucu

SEQ ID NO: 315309 - RNA, 18 nt, Human
agccacacagcgagguca

SEQ ID NO: 315310 - RNA, 23 nt, Human
agccacacaggaguccugggcac

SEQ ID NO: 315311 - RNA, 32 nt, Human
agccacacagucagagggggauguaagagcca

SEQ ID NO: 315312 - RNA, 32 nt, Human
agccacacaugggcaucuaugggagaguguca

SEQ ID NO: 315313 - RNA, 32 nt, Human
agccacacauucccugaccacagggaagcacc

SEQ ID NO: 315314 - RNA, 32 nt, Human
agccacaccacaccugcacuucugccucacuu

SEQ ID NO: 315315 - RNA, 32 nt, Human
agccacaccaccugugacuccagcucugacuu

SEQ ID NO: 315316 - RNA, 32 nt, Human
agccacaccaugacacaaucuugaagaggaag

SEQ ID NO: 315317 - RNA, 32 nt, Human
agccacaccgucccucugggccugcuggcucc

SEQ ID NO: 315318 - RNA, 32 nt, Human
agccacaccuccacuugccucuuauugucuua

SEQ ID NO: 315319 - RNA, 32 nt, Human
agccacacgaagaccaaagugaagagcaagga

SEQ ID NO: 315320 - RNA, 19 nt, Human
agccacacgcuucauggcc

SEQ ID NO: 315321 - RNA, 32 nt, Human
agccacacucaucagcuguggugaggcggcug

SEQ ID NO: 315322 - RNA, 23 nt, Human
agccacacucauucauccuuucc

SEQ ID NO: 315323 - RNA, 32 nt, Human
agccacacugcacuguggccccuugggaagag

SEQ ID NO: 315324 - RNA, 32 nt, Human
agccacacuguggcuagauuauacuucuuugg

SEQ ID NO: 315325 - RNA, 22 nt, Human
agccacagaaacgggcucgcuc

SEQ ID NO: 315326 - RNA, 32 nt, Human
agccacagaagauacacuuccgcaagauaucu

SEQ ID NO: 315327 - RNA, 32 nt, Human
agccacagaaggcugcggagugaggcggcagc

SEQ ID NO: 315328 - RNA, 32 nt, Human
agccacagacagacacugucuccucucagaga

SEQ ID NO: 315329 - RNA, 32 nt, Human
agccacagacuugccaguuccuucccucuuuc

SEQ ID NO: 315330 - RNA, 32 nt, Human
agccacagagggcugugagcuugcccagcccc

SEQ ID NO: 315331 - RNA, 32 nt, Human
agccacagaguacaccuuuccuucccugcaua

SEQ ID NO: 315332 - RNA, 32 nt, Human
agccacagaguugaaagccacagaguuaagug

SEQ ID NO: 315333 - RNA, 32 nt, Human
agccacagaguugaaagccacagaguugaaag

SEQ ID NO: 315334 - RNA, 32 nt, Human
agccacagcacaaucaucucaguggcgaagca

SEQ ID NO: 315335 - RNA, 32 nt, Human
agccacagcacuccagccugggugacagagca

SEQ ID NO: 315336 - RNA, 32 nt, Human
agccacagccagcagauagaggaaaagacaca

SEQ ID NO: 315337 - RNA, 32 nt, Human
agccacagccagccugccauaggauccaacug

SEQ ID NO: 315338 - RNA, 32 nt, Human
agccacagccccagcagccacccuccacccag

SEQ ID NO: 315339 - RNA, 19 nt, Human
agccacagccuccagggac

SEQ ID NO: 315340 - RNA, 32 nt, Human
agccacagcucagcuaaggcaauccaguccag

SEQ ID NO: 315341 - RNA, 32 nt, Human
agccacagcucccugcugguuccgcccuggau

SEQ ID NO: 315342 - RNA, 20 nt, Human
agccacagcugucucuggga

SEQ ID NO: 315343 - RNA, 32 nt, Human
agccacaggaacaggccccguccaccgccucc

SEQ ID NO: 315344 - RNA, 32 nt, Human
agccacaggaagagaaggaagaccagcgcaug

SEQ ID NO: 315345 - RNA, 32 nt, Human
agccacaggaagcaaaagucagccuuuucuuc

SEQ ID NO: 315346 - RNA, 32 nt, Human
agccacaggaagggaaguagacauuguaugcu

SEQ ID NO: 315347 - RNA, 32 nt, Human
agccacagggacgagcuccagagcagaaaggc

SEQ ID NO: 315348 - RNA, 32 nt, Human
agccacagggaggcauggagugccauggaagg

SEQ ID NO: 315349 - RNA, 32 nt, Human
agccacaggggcccugcggggagcacauccuc

SEQ ID NO: 315350 - RNA, 32 nt, Human
agccacaggguuucaccguguuggccaggaug

SEQ ID NO: 315351 - RNA, 32 nt, Human
agccacagguuggccaagcacccucgagugcc

SEQ ID NO: 315352 - RNA, 32 nt, Human
agccacagugcagaggagaggugggcuaucug

SEQ ID NO: 315353 - RNA, 32 nt, Human
agccacagugccuggcccauucuugaguuuug

SEQ ID NO: 315354 - RNA, 32 nt, Human
agccacauccagggguccucauuucuccggcu

SEQ ID NO: 315355 - RNA, 32 nt, Human
agccacauccuccaguccaucuggacuagcaa

SEQ ID NO: 315356 - RNA, 21 nt, Human
agccacaucgcugccuuguuc

SEQ ID NO: 315357 - RNA, 32 nt, Human
agccacaucugcaaagcagggaugguccagau

SEQ ID NO: 315358 - RNA, 22 nt, Human
agccacaugcuuggcuguguca

SEQ ID NO: 315359 - RNA, 32 nt, Human
agccacauucugaagccguccucugcccaccu

SEQ ID NO: 315360 - RNA, 32 nt, Human
agccacauugcucucuccuaagccccaacccc

SEQ ID NO: 315361 - RNA, 32 nt, Human
agccacauuuaacuccagccuuggguuugacc

SEQ ID NO: 315362 - RNA, 32 nt, Human
agccacauuuuccuccuuuguguuaggggaca

SEQ ID NO: 315363 - RNA, 32 nt, Human
agccaccaaaauagcugggauuacaggcgccc

SEQ ID NO: 315364 - RNA, 32 nt, Human
agccaccaagagaggaaggagaagggucccgu

SEQ ID NO: 315365 - RNA, 32 nt, Human
agccaccaagaguucuccaccacucuugcauu

SEQ ID NO: 315366 - RNA, 32 nt, Human
agccaccaagcuauguggcugcugcugccacc

SEQ ID NO: 315367 - RNA, 31 nt, Human
agccaccaagugucuccacaucggagcuugc

SEQ ID NO: 315368 - RNA, 32 nt, Human
agccaccaaguucccagaugucaguuuugcaa

SEQ ID NO: 315369 - RNA, 32 nt, Human
agccaccaaguugcccauugaugggugagccu

SEQ ID NO: 315370 - RNA, 21 nt, Human
agccaccacaccuggccacuc

SEQ ID NO: 315371 - RNA, 32 nt, Human
agccaccaccaucugcgacuccugccugccgc

SEQ ID NO: 315372 - RNA, 20 nt, Human
agccaccacccucucuggga

SEQ ID NO: 315373 - RNA, 32 nt, Human
agccaccacgcccaacugggaccaggguuuuc

SEQ ID NO: 315374 - RNA, 20 nt, Human
agccaccacgcccggccuaa

SEQ ID NO: 315375 - RNA, 32 nt, Human
agccaccacgccuggccaauuauguaauuuuu

SEQ ID NO: 315376 - RNA, 32 nt, Human
agccaccagagcugcagcaggagcagcagaag

SEQ ID NO: 315377 - RNA, 32 nt, Human
agccaccagaguagcugagacuacagggguau

SEQ ID NO: 315378 - RNA, 32 nt, Human
agccaccagccaaugaucuuuucaaugcugcg

SEQ ID NO: 315379 - RNA, 32 nt, Human
agccaccagcggcugcucauggggcugauggu

SEQ ID NO: 315380 - RNA, 32 nt, Human
agccaccagcuauuuccuggugacacaagcuc

SEQ ID NO: 315381 - RNA, 32 nt, Human
agccaccagcuggccugguuggcucuggauuu

SEQ ID NO: 315382 - RNA, 26 nt, Human
agccaccaggcccugccugguuuuca

SEQ ID NO: 315383 - RNA, 31 nt, Human
agccaccagggaccuguuucaggcugugggc

SEQ ID NO: 315384 - RNA, 32 nt, Human
agccaccagggaccuguuucaggcugugggca

SEQ ID NO: 315385 - RNA, 16 nt, Human
agccaccagggccuaa

SEQ ID NO: 315386 - RNA, 32 nt, Human
agccaccaucguaccacugcacuccagccugg

SEQ ID NO: 315387 - RNA, 21 nt, Human
agccaccaucuuaccucacag

SEQ ID NO: 315388 - RNA, 32 nt, Human
agccaccaugcaguucugccuggguuggaguu

SEQ ID NO: 315389 - RNA, 19 nt, Human
agccaccaugcccagccug

SEQ ID NO: 315390 - RNA, 32 nt, Human
agccaccaugucugguccucugacccuuuuag

SEQ ID NO: 315391 - RNA, 32 nt, Human
agccaccauucaaagccaggcagucuggcccc

SEQ ID NO: 315392 - RNA, 20 nt, Human
agccaccauucugcuugcca

SEQ ID NO: 315393 - RNA, 25 nt, Human
agccaccauugccaccuacugcagc

SEQ ID NO: 315394 - RNA, 32 nt, Human
agccaccauuuuguccaagccugggcaugggu

SEQ ID NO: 315395 - RNA, 32 nt, Human
agccacccaaaaugcugggauuacaggcauga

SEQ ID NO: 315396 - RNA, 32 nt, Human
agccacccaaagugcuggaauuacauggguga

SEQ ID NO: 315397 - RNA, 32 nt, Human
agccacccaaaguguugggauuacaggcauga

SEQ ID NO: 315398 - RNA, 32 nt, Human
agccacccaaaguguugggauuacagguguga

SEQ ID NO: 315399 - RNA, 32 nt, Human
agccacccaacgucaccuccagcccggucuca

SEQ ID NO: 315400 - RNA, 32 nt, Human
agccacccaagaagcugggaccacagggauca

SEQ ID NO: 315401 - RNA, 32 nt, Human
agccacccaaguagcuggaauuacaggcaccu

SEQ ID NO: 315402 - RNA, 32 nt, Human
agccacccaaguagcugggaccacaggugcau

SEQ ID NO: 315403 - RNA, 32 nt, Human
agccacccaaguagcugggacuacaggugccc

SEQ ID NO: 315404 - RNA, 20 nt, Human
agccacccagcagggcccgu

SEQ ID NO: 315405 - RNA, 21 nt, Human
agccacccagccucagcacuc

SEQ ID NO: 315406 - RNA, 32 nt, Human
agccacccaggcagggagcaaguggccugguc

SEQ ID NO: 315407 - RNA, 32 nt, Human
agccacccaggcagggcaggggccaagguaag

SEQ ID NO: 315408 - RNA, 32 nt, Human
agccacccaggcucccaccacucucauaccug

SEQ ID NO: 315409 - RNA, 32 nt, Human
agccacccaucaggcaugcucucccccaccuc

SEQ ID NO: 315410 - RNA, 21 nt, Human
agccaccccagcgccaggcgc

SEQ ID NO: 315411 - RNA, 24 nt, Human
agccacccccaccccaacacacuc

SEQ ID NO: 315412 - RNA, 21 nt, Human
agccacccccagccccaccac

SEQ ID NO: 315413 - RNA, 24 nt, Human
agccaccccccugcccccacucca

SEQ ID NO: 315414 - RNA, 32 nt, Human
agccaccccguccgcagccaggaaaagcacaa

SEQ ID NO: 315415 - RNA, 23 nt, Human
agccaccccuaccccagucacuc

SEQ ID NO: 315416 - RNA, 32 nt, Human
agccaccccucuguaaccuccauaauccauca

SEQ ID NO: 315417 - RNA, 22 nt, Human
agccaccccugcccaggcccuc

SEQ ID NO: 315418 - RNA, 32 nt, Human
agccaccccugcccaggcccucacagacauug

SEQ ID NO: 315419 - RNA, 32 nt, Human
agccacccgaguagcugagauuacaggccucu

SEQ ID NO: 315420 - RNA, 21 nt, Human
agccacccgcaccuucacaga

SEQ ID NO: 315421 - RNA, 32 nt, Human
agccacccgccugcuuucaucucccucaaaua

SEQ ID NO: 315422 - RNA, 32 nt, Human
agccacccuaccucccuguccacuacagccuc

SEQ ID NO: 315423 - RNA, 32 nt, Human
agccacccucaccaggugccuuccauuagagu

SEQ ID NO: 315424 - RNA, 20 nt, Human
agccacccucagcccuucac

SEQ ID NO: 315425 - RNA, 23 nt, Human
agccacccucagcccuucacagg

SEQ ID NO: 315426 - RNA, 32 nt, Human
agccacccucaggccugggaagaggccugggc

SEQ ID NO: 315427 - RNA, 21 nt, Human
agccacccucccugcagcuac

SEQ ID NO: 315428 - RNA, 32 nt, Human
agccacccucggagaguccacaacagcagcca

SEQ ID NO: 315429 - RNA, 21 nt, Human
agccacccugccagcugcagc

SEQ ID NO: 315430 - RNA, 32 nt, Human
agccacccugccucucaggggucuguguuggg

SEQ ID NO: 315431 - RNA, 23 nt, Human
agccacccugcuuuagaucacuc

SEQ ID NO: 315432 - RNA, 24 nt, Human
agccacccuggcucccucuccucc

SEQ ID NO: 315433 - RNA, 24 nt, Human
agccacccugugggccgggcaauc

SEQ ID NO: 315434 - RNA, 32 nt, Human
agccaccgacaggacauggccucagcugggug

SEQ ID NO: 315435 - RNA, 32 nt, Human
agccaccgagacugaaccaaacccaggaagcg

SEQ ID NO: 315436 - RNA, 32 nt, Human
agccaccgaggagcagagagguugagaacaac

SEQ ID NO: 315437 - RNA, 32 nt, Human
agccaccgcacuccagccugggcgacagagca

SEQ ID NO: 315438 - RNA, 22 nt, Human
agccaccgccucuugcucacca

SEQ ID NO: 315439 - RNA, 32 nt, Human
agccaccgccugugccugccccucucuggccc

SEQ ID NO: 315440 - RNA, 32 nt, Human
agccaccgcgccuggccgaugguacuauuuag

SEQ ID NO: 315441 - RNA, 32 nt, Human
agccaccgcggggccucagugggggucucugg

SEQ ID NO: 315442 - RNA, 32 nt, Human
agccaccgcucacugcaagcacugccucccuc

SEQ ID NO: 315443 - RNA, 32 nt, Human
agccaccggccucagcccuggagcugaaagug

SEQ ID NO: 315444 - RNA, 20 nt, Human
agccaccgggaccccaggag

SEQ ID NO: 315445 - RNA, 32 nt, Human
agccaccgggcacggccuugccaggcugacgu

SEQ ID NO: 315446 - RNA, 32 nt, Human
agccaccgugaagccucuuauggcuacuauua

SEQ ID NO: 315447 - RNA, 21 nt, Human
agccaccgugcccaggcccuc

SEQ ID NO: 315448 - RNA, 32 nt, Human
agccaccgugccugccccagaaugguuuuuaa

SEQ ID NO: 315449 - RNA, 32 nt, Human
agccaccgugccuggccgaggcuccuucuuuu

SEQ ID NO: 315450 - RNA, 32 nt, Human
agccaccguguuucacaccugccgugcucugg

SEQ ID NO: 315451 - RNA, 32 nt, Human
agccaccuccacuugcuuccuccuccuucccu

SEQ ID NO: 315452 - RNA, 32 nt, Human
agccaccuccagggcagucccagggacugaau

SEQ ID NO: 315453 - RNA, 32 nt, Human
agccaccucccucccaaacuugcccauugccc

SEQ ID NO: 315454 - RNA, 21 nt, Human
agccaccuccuuccucuggga

SEQ ID NO: 315455 - RNA, 32 nt, Human
agccaccuccuuggcaccggccucuauuuguc

SEQ ID NO: 315456 - RNA, 32 nt, Human
agccaccucgccuggccagaugcuagcauuuu

SEQ ID NO: 315457 - RNA, 24 nt, Human
agccaccucgggaccccagcacuc

SEQ ID NO: 315458 - RNA, 21 nt, Human
agccaccucugcaacugcagc

SEQ ID NO: 315459 - RNA, 32 nt, Human
agccaccugacuagcugggauugcagccugca

SEQ ID NO: 315460 - RNA, 32 nt, Human
agccaccugagcagcugggauugcaggugcau

SEQ ID NO: 315461 - RNA, 32 nt, Human
agccaccugagccaccaccgagccauggcagg

SEQ ID NO: 315462 - RNA, 32 nt, Human
agccaccugaguagcagggauuacaggugugu

SEQ ID NO: 315463 - RNA, 32 nt, Human
agccaccugaguagcugggaguacaggcaugu

SEQ ID NO: 315464 - RNA, 32 nt, Human
agccaccugaguagcugggauuacacgcacau

SEQ ID NO: 315465 - RNA, 24 nt, Human
agccaccugaucuccccgggccuc

SEQ ID NO: 315466 - RNA, 32 nt, Human
agccaccugcacuuuucccucacccaccacac

SEQ ID NO: 315467 - RNA, 32 nt, Human
agccaccugcacuuuucccucacccaccacgc

SEQ ID NO: 315468 - RNA, 32 nt, Human
agccaccugccucuggcuucaugugagcuguc

SEQ ID NO: 315469 - RNA, 24 nt, Human
agccaccugccugacacccaggga

SEQ ID NO: 315470 - RNA, 32 nt, Human
agccaccugcuaccucugccuucuggguucaa

SEQ ID NO: 315471 - RNA, 32 nt, Human
agccaccugcuuccuccaccccaccuuccauu

SEQ ID NO: 315472 - RNA, 19 nt, Human
agccaccuggacugaggcg

SEQ ID NO: 315473 - RNA, 32 nt, Human
agccaccugggagcccgaagcuuagccuguag

SEQ ID NO: 315474 - RNA, 32 nt, Human
agccaccuggggauucagcaacagguuuccac

SEQ ID NO: 315475 - RNA, 32 nt, Human
agccaccuggggauucagcaacagguuuucac

SEQ ID NO: 315476 - RNA, 32 nt, Human
agccaccugggggagcuggaagugaucucauc

SEQ ID NO: 315477 - RNA, 21 nt, Human
agccaccuuagcacgaacaua

SEQ ID NO: 315478 - RNA, 32 nt, Human
agccaccuuagcaggagcagauuuuucccaga

SEQ ID NO: 315479 - RNA, 22 nt, Human
agccaccuuccucacagggacu

SEQ ID NO: 315480 - RNA, 32 nt, Human
agccaccuuggcaagugccugugcagggcccg

SEQ ID NO: 315481 - RNA, 32 nt, Human
agccaccuuguccguucagccaugaagacaga

SEQ ID NO: 315482 - RNA, 32 nt, Human
agccacgacagcagccagacccugucccggcc

SEQ ID NO: 315483 - RNA, 32 nt, Human
agccacgaccuccaccuauucaaucuuugcug

SEQ ID NO: 315484 - RNA, 32 nt, Human
agccacgaggggcagacagaggcgccagugcc

SEQ ID NO: 315485 - RNA, 32 nt, Human
agccacgcacccuacucuugcugguaaaauca

SEQ ID NO: 315486 - RNA, 22 nt, Human
agccacgcagcggcugagcuca

SEQ ID NO: 315487 - RNA, 32 nt, Human
agccacgcaggaucucacagcugcagucuaau

SEQ ID NO: 315488 - RNA, 25 nt, Human
agccacgcaugguggcacacaccug

SEQ ID NO: 315489 - RNA, 32 nt, Human
agccacgcgugagacuucucuaagcaaccacc

SEQ ID NO: 315490 - RNA, 32 nt, Human
agccacggagccugggcgaggagccagcgcug

SEQ ID NO: 315491 - RNA, 32 nt, Human
agccacggcucaugccgccgucgccagcggcg

SEQ ID NO: 315492 - RNA, 32 nt, Human
agccacggcucucauugcucgggguugguugg

SEQ ID NO: 315493 - RNA, 18 nt, Human
agccacgggaaccaggag

SEQ ID NO: 315494 - RNA, 32 nt, Human
agccacgggcugggucauaaggacacuucucc

SEQ ID NO: 315495 - RNA, 32 nt, Human
agccacguaaggagcuggggagaggggagucu

SEQ ID NO: 315496 - RNA, 22 nt, Human
agccacgucagcuuuucuggga

SEQ ID NO: 315497 - RNA, 32 nt, Human
agccacgugagcugaucguggcugcaccuggg

SEQ ID NO: 315498 - RNA, 32 nt, Human
agccacguguggcugcuggcugugggagagaa

SEQ ID NO: 315499 - RNA, 32 nt, Human
agccacuaaccagcugggcucugucagcaaag

SEQ ID NO: 315500 - RNA, 32 nt, Human
agccacuagaggcugaggugggaggaucacug

SEQ ID NO: 315501 - RNA, 32 nt, Human
agccacuaucacugcuccccugggcaacugca

SEQ ID NO: 315502 - RNA, 20 nt, Human
agccacuaucccuggccuaa

SEQ ID NO: 315503 - RNA, 32 nt, Human
agccacucagaagaaaaagguuggaguaauac

SEQ ID NO: 315504 - RNA, 32 nt, Human
agccacucagccccagggugcgucaucccuca

SEQ ID NO: 315505 - RNA, 32 nt, Human
agccacuccaacucuccaccuccagcuucuag

SEQ ID NO: 315506 - RNA, 32 nt, Human
agccacuccagccccagcccagccuggggugc

SEQ ID NO: 315507 - RNA, 32 nt, Human
agccacuccagcuuguccugugcugccucccu

SEQ ID NO: 315508 - RNA, 32 nt, Human
agccacucccaguucuggagagugaggaugac

SEQ ID NO: 315509 - RNA, 32 nt, Human
agccacucccauuuuaugagcuacucacauga

SEQ ID NO: 315510 - RNA, 32 nt, Human
agccacucccugucccugucucccugcccauu

SEQ ID NO: 315511 - RNA, 32 nt, Human
agccacuccugggccuuuuaugugccgaguua

SEQ ID NO: 315512 - RNA, 32 nt, Human
agccacucucuugcuuguccccaaaucaccua

SEQ ID NO: 315513 - RNA, 32 nt, Human
agccacucucuuggcucccugugucauuccuu

SEQ ID NO: 315514 - RNA, 32 nt, Human
agccacucuucugagaaggcuuugccuccucg

SEQ ID NO: 315515 - RNA, 32 nt, Human
agccacucuuggaaaaagcacaaccuaacaaa

SEQ ID NO: 315516 - RNA, 32 nt, Human
agccacugaaguauuccccuuuauguacagga

SEQ ID NO: 315517 - RNA, 31 nt, Human
agccacugacuucucucuuuuacguaagaca

SEQ ID NO: 315518 - RNA, 32 nt, Human
agccacugagagagggaaacucugauuuuauu

SEQ ID NO: 315519 - RNA, 32 nt, Human
agccacugagauccuccagccuggacaugcug

SEQ ID NO: 315520 - RNA, 32 nt, Human
agccacugagcccagcccuaguucaguaucuu

SEQ ID NO: 315521 - RNA, 20 nt, Human
agccacugagcccggccuaa

SEQ ID NO: 315522 - RNA, 32 nt, Human
agccacugagccuggcccugaagcguuuuucu

SEQ ID NO: 315523 - RNA, 32 nt, Human
agccacugagccuugugacuugagcagauguc

SEQ ID NO: 315524 - RNA, 23 nt, Human
agccacugcaagcccugggccuc

SEQ ID NO: 315525 - RNA, 32 nt, Human
agccacugcaccucgccagauguccaaugucu

SEQ ID NO: 315526 - RNA, 32 nt, Human
agccacugcaccugaccugcugaauuguuuau

SEQ ID NO: 315527 - RNA, 32 nt, Human
agccacugcaccuggcagugaugucauuccuu

SEQ ID NO: 315528 - RNA, 32 nt, Human
agccacugcaccuggccagcucuagucuuauu

SEQ ID NO: 315529 - RNA, 32 nt, Human
agccacugcaccuggccgguuauucucucuuu

SEQ ID NO: 315530 - RNA, 32 nt, Human
agccacugcaccuggccucaugucucuggauu

SEQ ID NO: 315531 - RNA, 32 nt, Human
agccacugcaccuggccugacauucuuuauga

SEQ ID NO: 315532 - RNA, 32 nt, Human
agccacugcaccuggcggaaucuaguccauuu

SEQ ID NO: 315533 - RNA, 32 nt, Human
agccacugcaccuggcggggucuugcuuauuu

SEQ ID NO: 315534 - RNA, 32 nt, Human
agccacugcacuccaaucugggugacagaaua

SEQ ID NO: 315535 - RNA, 32 nt, Human
agccacugcacuccagcccaggugacagagug

SEQ ID NO: 315536 - RNA, 19 nt, Human
agccacugcacuccagccu

SEQ ID NO: 315537 - RNA, 32 nt, Human
agccacugcacuccagccugaugacagagcaa

SEQ ID NO: 315538 - RNA, 32 nt, Human
agccacugcacuccagccugggcaacagauga

SEQ ID NO: 315539 - RNA, 32 nt, Human
agccacugcacuccagccugggcaacguggug

SEQ ID NO: 315540 - RNA, 32 nt, Human
agccacugcacuccagccugggcaauagagca

SEQ ID NO: 315541 - RNA, 32 nt, Human
agccacugcacuccagccugggcaauauagca

SEQ ID NO: 315542 - RNA, 32 nt, Human
agccacugcacuccagccugggcagcugaaca

SEQ ID NO: 315543 - RNA, 32 nt, Human
agccacugcacuccagccugggcgacagagca

SEQ ID NO: 315544 - RNA, 32 nt, Human
agccacugcacuccagccugggggaaagagcg

SEQ ID NO: 315545 - RNA, 32 nt, Human
agccacugcacuccagccugggugacagagcg

SEQ ID NO: 315546 - RNA, 32 nt, Human
agccacugcacuccagccugggugacagagug

SEQ ID NO: 315547 - RNA, 32 nt, Human
agccacugcacuccagccugggugacagcgcg

SEQ ID NO: 315548 - RNA, 32 nt, Human
agccacugcacuccagccugggugacugagcg

SEQ ID NO: 315549 - RNA, 32 nt, Human
agccacugcacuccagccugggugaugaagac

SEQ ID NO: 315550 - RNA, 32 nt, Human
agccacugcacuccaucuugggcaacacagug

SEQ ID NO: 315551 - RNA, 32 nt, Human
agccacugcacucuagucuggggaacauauga

SEQ ID NO: 315552 - RNA, 32 nt, Human
agccacugcauuccagccugggcgaaagagaa

SEQ ID NO: 315553 - RNA, 32 nt, Human
agccacugccaagcuuccugugcccucacccc

SEQ ID NO: 315554 - RNA, 32 nt, Human
agccacugccacuccaguccugccaccacccu

SEQ ID NO: 315555 - RNA, 32 nt, Human
agccacugcccaaagccaucuuccugccuacu

SEQ ID NO: 315556 - RNA, 32 nt, Human
agccacugcccagccgcacuccaggcaagggc

SEQ ID NO: 315557 - RNA, 32 nt, Human
agccacugcccaggacuaagggucuucaagga

SEQ ID NO: 315558 - RNA, 18 nt, Human
agccacugcgcccggcca

SEQ ID NO: 315559 - RNA, 32 nt, Human
agccacugcgcccggcccaaaucuuuuauuuu

SEQ ID NO: 315560 - RNA, 18 nt, Human
agccacugcgccuggcca

SEQ ID NO: 315561 - RNA, 32 nt, Human
agccacugcgccuggccaucagguaaccuuua

SEQ ID NO: 315562 - RNA, 32 nt, Human
agccacugcggaguccaggcugcuagaggugc

SEQ ID NO: 315563 - RNA, 32 nt, Human
agccacugcuguggcccugcccagggcuuggu

SEQ ID NO: 315564 - RNA, 32 nt, Human
agccacuggagggagaaauggaaaacaugaaa

SEQ ID NO: 315565 - RNA, 29 nt, Human
agccacuggcugcuaacaagucaccaaaa

SEQ ID NO: 315566 - RNA, 32 nt, Human
agccacugggagaagcaggccagagccuucca

SEQ ID NO: 315567 - RNA, 32 nt, Human
agccacugggcucagcccuggagcugagagca

SEQ ID NO: 315568 - RNA, 32 nt, Human
agccacugggcugugggggaaggggucaaggc

SEQ ID NO: 315569 - RNA, 32 nt, Human
agccacuguacuccagccuaggugacaaagca

SEQ ID NO: 315570 - RNA, 32 nt, Human
agccacuguccccaccaugaugaugacacagc

SEQ ID NO: 315571 - RNA, 32 nt, Human
agccacugugccagacucacuuuccaaauuuu

SEQ ID NO: 315572 - RNA, 32 nt, Human
agccacugugccaggcccaaaccuagcuucug

SEQ ID NO: 315573 - RNA, 32 nt, Human
agccacugugcccagccgaucugaugcuuuua

SEQ ID NO: 315574 - RNA, 32 nt, Human
agccacugugcccagccuucuuuauggcuauc

SEQ ID NO: 315575 - RNA, 32 nt, Human
agccacugugccuggcagcagcacuuuugauc

SEQ ID NO: 315576 - RNA, 18 nt, Human
agccacugugccuggcca

SEQ ID NO: 315577 - RNA, 18 nt, Human
agccacugugccuggccu

SEQ ID NO: 315578 - RNA, 32 nt, Human
agccacugugcuccagccugggcaacaccauc

SEQ ID NO: 315579 - RNA, 32 nt, Human
agccacugugcugaauucugcaauguuuuccu

SEQ ID NO: 315580 - RNA, 32 nt, Human
agccacugugggcuccaagaagcacaggcauu

SEQ ID NO: 315581 - RNA, 32 nt, Human
agccacugugucuggcccuauuuccuuuaaaa

SEQ ID NO: 315582 - RNA, 20 nt, Human
agccacugugucuggccuag

SEQ ID NO: 315583 - RNA, 32 nt, Human
agccacuuaaccucucuggaccuuguuuguaa

SEQ ID NO: 315584 - RNA, 32 nt, Human
agccacuuaucugugaauaaaaccauaaaucu

SEQ ID NO: 315585 - RNA, 32 nt, Human
agccacuucccagcgaguuggaaaugugccuu

SEQ ID NO: 315586 - RNA, 32 nt, Human
agccacuugccaggguggaggaggagcauugu

SEQ ID NO: 315587 - RNA, 32 nt, Human
agccacuuguguccuggagcccccaguucaaa

SEQ ID NO: 315588 - RNA, 32 nt, Human
agccacuugugucuagggaguuagugaggacu

SEQ ID NO: 315589 - RNA, 32 nt, Human
agccacuuguuucaucccaccugggcauuagg

SEQ ID NO: 315590 - RNA, 32 nt, Human
agccacuuuccuauauaccacaccucccuguc

SEQ ID NO: 315591 - RNA, 19 nt, Human
agccacuuucuguguggua

SEQ ID NO: 315592 - RNA, 32 nt, Human
agccacuuugauccaaccuggagcucacaaaa

SEQ ID NO: 315593 - RNA, 22 nt, Human
agccacuuugccuucucuggac

SEQ ID NO: 315594 - RNA, 23 nt, Human
agccagaaaaggagccagagcag

SEQ ID NO: 315595 - RNA, 25 nt, Human
agccagaaaaggaggaggcacgggu

SEQ ID NO: 315596 - RNA, 18 nt, Human
agccagaaaauuagcuua

SEQ ID NO: 315597 - RNA, 21 nt, Human
agccagaaacaagcccugugg

SEQ ID NO: 315598 - RNA, 32 nt, Human
agccagaaacagcagggagcugcccuggugag

SEQ ID NO: 315599 - RNA, 32 nt, Human
agccagaaagcucuggagcaucagggagacuc

SEQ ID NO: 315600 - RNA, 24 nt, Human
agccagaaaugccuuaaacugcaa

SEQ ID NO: 315601 - RNA, 32 nt, Human
agccagaacaugucuuucaaccugcaaucauc

SEQ ID NO: 315602 - RNA, 32 nt, Human
agccagaacucacaaccagauccagaggcaac

SEQ ID NO: 315603 - RNA, 32 nt, Human
agccagaagaacacugauauuugcauuuaaug

SEQ ID NO: 315604 - RNA, 32 nt, Human
agccagaagagagguuuucuuuugcauaguuu

SEQ ID NO: 315605 - RNA, 32 nt, Human
agccagaagcaucuccucugagagcccuugcc

SEQ ID NO: 315606 - RNA, 32 nt, Human
agccagaagccagaggauacccagggacagua

SEQ ID NO: 315607 - RNA, 32 nt, Human
agccagaagcugcaccuggccgagaacgccga

SEQ ID NO: 315608 - RNA, 21 nt, Human
agccagaaggacacacaccug

SEQ ID NO: 315609 - RNA, 32 nt, Human
agccagaaggagauguggcaaugugauuccuu

SEQ ID NO: 315610 - RNA, 32 nt, Human
agccagaaggggacccaggugugcauagcucu

SEQ ID NO: 315611 - RNA, 32 nt, Human
agccagaaggggcacgccugcccagccucgca

SEQ ID NO: 315612 - RNA, 20 nt, Human
agccagaagggguguccugc

SEQ ID NO: 315613 - RNA, 32 nt, Human
agccagaagucgcggaugaguguguggcaggu

SEQ ID NO: 315614 - RNA, 32 nt, Human
agccagaauguccguuugaaacuccuagcuca

SEQ ID NO: 315615 - RNA, 32 nt, Human
agccagaauguucaacuaauaagagaaggcug

SEQ ID NO: 315616 - RNA, 32 nt, Human
agccagaauguucaggaugcugaacagcaguu

SEQ ID NO: 315617 - RNA, 32 nt, Human
agccagacaaagaugcaucuugaucucccuug

SEQ ID NO: 315618 - RNA, 32 nt, Human
agccagacacaaaaggccacauacuguaugaa

SEQ ID NO: 315619 - RNA, 32 nt, Human
agccagacacugcacccugacuggggauccug

SEQ ID NO: 315620 - RNA, 32 nt, Human
agccagacaggauucagaauaaggagagaaug

SEQ ID NO: 315621 - RNA, 32 nt, Human
agccagacauccugauggggaggcagagccag

SEQ ID NO: 315622 - RNA, 32 nt, Human
agccagaccaagccuuucuguguguagcgcac

SEQ ID NO: 315623 - RNA, 32 nt, Human
agccagaccagaagauucuaucccccgcagcg

SEQ ID NO: 315624 - RNA, 32 nt, Human
agccagacccccggggacccagccucucacag

SEQ ID NO: 315625 - RNA, 32 nt, Human
agccagacccuccagccccagucaagccuucg

SEQ ID NO: 315626 - RNA, 24 nt, Human
agccagacccuccuugggcagaca

SEQ ID NO: 315627 - RNA, 32 nt, Human
agccagacccucuucagggaagggaccaauua

SEQ ID NO: 315628 - RNA, 32 nt, Human
agccagaccuauuccuccugggccccucaucu

SEQ ID NO: 315629 - RNA, 32 nt, Human
agccagacucuuggcggagcagugccacuucu

SEQ ID NO: 315630 - RNA, 32 nt, Human
agccagacuggcaucauguccacagcaucgcu

SEQ ID NO: 315631 - RNA, 32 nt, Human
agccagacuuggugguucccacuugcaauccc

SEQ ID NO: 315632 - RNA, 32 nt, Human
agccagacuuuguggcuguccccagccugcac

SEQ ID NO: 315633 - RNA, 23 nt, Human
agccagagaaaggcagauggggu

SEQ ID NO: 315634 - RNA, 32 nt, Human
agccagagaacugcuaagucuccugcaauguu

SEQ ID NO: 315635 - RNA, 22 nt, Human
agccagagaagaaagauggggu

SEQ ID NO: 315636 - RNA, 32 nt, Human
agccagagacauuuccugaagacauggggaac

SEQ ID NO: 315637 - RNA, 22 nt, Human
agccagagagcaccgccaggga

SEQ ID NO: 315638 - RNA, 32 nt, Human
agccagagagguagaggcugcagugagcuaug

SEQ ID NO: 315639 - RNA, 32 nt, Human
agccagagaguauaggauucuucuuuauauca

SEQ ID NO: 315640 - RNA, 32 nt, Human
agccagagaucugcuuaaaaagcugcugaaaa

SEQ ID NO: 315641 - RNA, 17 nt, Human
agccagagcacaggaag

SEQ ID NO: 315642 - RNA, 22 nt, Human
agccagagcagaaggcgaggga

SEQ ID NO: 315643 - RNA, 21 nt, Human
agccagagcagugcccagggg

SEQ ID NO: 315644 - RNA, 19 nt, Human
agccagagccagccuuccu

SEQ ID NO: 315645 - RNA, 32 nt, Human
agccagagcccaaugugucuuauuccccgugg

SEQ ID NO: 315646 - RNA, 32 nt, Human
agccagagcccaccggacacacccucacuucg

SEQ ID NO: 315647 - RNA, 32 nt, Human
agccagagcccagagcauagacaggaguguag

SEQ ID NO: 315648 - RNA, 23 nt, Human
agccagagcccucacagugaagu

SEQ ID NO: 315649 - RNA, 22 nt, Human
agccagaggaaaagaagaggag

SEQ ID NO: 315650 - RNA, 24 nt, Human
agccagaggaaggacuucauggag

SEQ ID NO: 315651 - RNA, 23 nt, Human
agccagaggaaggcaggcaggag

SEQ ID NO: 315652 - RNA, 32 nt, Human
agccagaggaaggcaggcaggagcucugucuc

SEQ ID NO: 315653 - RNA, 32 nt, Human
agccagaggaccuugagaauggggaagagagc

SEQ ID NO: 315654 - RNA, 22 nt, Human
agccagaggaggagggcaaagg

SEQ ID NO: 315655 - RNA, 21 nt, Human
agccagaggaggcaauacagu

SEQ ID NO: 315656 - RNA, 20 nt, Human
agccagaggaggcauuugga

SEQ ID NO: 315657 - RNA, 22 nt, Human
agccagaggaggccggugaagu

SEQ ID NO: 315658 - RNA, 32 nt, Human
agccagaggauagaauucuauacccccaaccc

SEQ ID NO: 315659 - RNA, 32 nt, Human
agccagaggcagcuccagccugggggacaggu

SEQ ID NO: 315660 - RNA, 32 nt, Human
agccagaggccccagcaccuugagguuaagca

SEQ ID NO: 315661 - RNA, 32 nt, Human
agccagaggccuggggaccuccuugccuuccc

SEQ ID NO: 315662 - RNA, 32 nt, Human
agccagaggcguagggcccaggagagccccca

SEQ ID NO: 315663 - RNA, 32 nt, Human
agccagaggcuucauuuuaucaucuguggaaa

SEQ ID NO: 315664 - RNA, 32 nt, Human
agccagagggaacaguaacagcccaggggccu

SEQ ID NO: 315665 - RNA, 21 nt, Human
agccagagggagagaccccag

SEQ ID NO: 315666 - RNA, 18 nt, Human
agccagaguaagccuucc

SEQ ID NO: 315667 - RNA, 32 nt, Human
agccagaguagcugccgccaccagaguccgga

SEQ ID NO: 315668 - RNA, 21 nt, Human
agccagagucaagggcugcag

SEQ ID NO: 315669 - RNA, 21 nt, Human
agccagagugagaccagcaga

SEQ ID NO: 315670 - RNA, 32 nt, Human
agccagaguggaggaaugagcucugagacaca

SEQ ID NO: 315671 - RNA, 32 nt, Human
agccagaguucacuccuuccuccuggcucucu

SEQ ID NO: 315672 - RNA, 32 nt, Human
agccagaguucagaugaggagcccucaggcaa

SEQ ID NO: 315673 - RNA, 21 nt, Human
agccagaguuguuucucucca

SEQ ID NO: 315674 - RNA, 32 nt, Human
agccagaucagccuuaagucaccucccaucca

SEQ ID NO: 315675 - RNA, 21 nt, Human
agccagaucaucugggacuga

SEQ ID NO: 315676 - RNA, 21 nt, Human
agccagauccuagccacuugg

SEQ ID NO: 315677 - RNA, 32 nt, Human
agccagaugccuggcccugugcuggggcagac

SEQ ID NO: 315678 - RNA, 32 nt, Human
agccagaugugguugcacacaucucuaguccc

SEQ ID NO: 315679 - RNA, 22 nt, Human
agccagauucauuccuucuuca

SEQ ID NO: 315680 - RNA, 32 nt, Human
agccagauuggguggaguccaagcuuugggca

SEQ ID NO: 315681 - RNA, 32 nt, Human
agccagauuuugcucuaguggcccucuuccug

SEQ ID NO: 315682 - RNA, 32 nt, Human
agccagcaaaggccauagaaacaacaauuuau

SEQ ID NO: 315683 - RNA, 32 nt, Human
agccagcaacaccaaccaaaugcuacucucuu

SEQ ID NO: 315684 - RNA, 32 nt, Human
agccagcaagagcaaggcaugggagaggggag

SEQ ID NO: 315685 - RNA, 32 nt, Human
agccagcaagaggcgccugcgcgauguccggg

SEQ ID NO: 315686 - RNA, 24 nt, Human
agccagcaagugcuuccaggaacu

SEQ ID NO: 315687 - RNA, 32 nt, Human
agccagcacaguuaaaagaagagaaaauggaa

SEQ ID NO: 315688 - RNA, 18 nt, Human
agccagcacauccugccu

SEQ ID NO: 315689 - RNA, 32 nt, Human
agccagcacauccugccugcuguugcagccug

SEQ ID NO: 315690 - RNA, 17 nt, Human
agccagcaccacacacc

SEQ ID NO: 315691 - RNA, 24 nt, Human
agccagcaccaugggcaggcccug

SEQ ID NO: 315692 - RNA, 32 nt, Human
agccagcaccaugggcaggcccugccauggac

SEQ ID NO: 315693 - RNA, 32 nt, Human
agccagcacccagcuuaaccccugccauccca

SEQ ID NO: 315694 - RNA, 28 nt, Human
agccagcacccugggcucucagggacug

SEQ ID NO: 315695 - RNA, 32 nt, Human
agccagcaccucuuuucccagcuguaaaaugg

SEQ ID NO: 315696 - RNA, 21 nt, Human
agccagcagagccggggacug

SEQ ID NO: 315697 - RNA, 21 nt, Human
agccagcagcccagggcacug

SEQ ID NO: 315698 - RNA, 21 nt, Human
agccagcagcuguuuccugug

SEQ ID NO: 315699 - RNA, 32 nt, Human
agccagcaggaggaugagccagcucugcaguu

SEQ ID NO: 315700 - RNA, 32 nt, Human
agccagcagguccagaaacaauaucaaaagug

SEQ ID NO: 315701 - RNA, 32 nt, Human
agccagcaguugagccuaagguccuucuaccu

SEQ ID NO: 315702 - RNA, 31 nt, Human
agccagcaguuucaguuauacucaaccaugc

SEQ ID NO: 315703 - RNA, 32 nt, Human
agccagcauccagaauuuccucccucucugau

SEQ ID NO: 315704 - RNA, 21 nt, Human
agccagcaucgcaccgaaccu

SEQ ID NO: 315705 - RNA, 23 nt, Human
agccagcaucgcggguaggccug

SEQ ID NO: 315706 - RNA, 32 nt, Human
agccagcaugccuggcugugugcaguggccag

SEQ ID NO: 315707 - RNA, 32 nt, Human
agccagccaagugccaaggucagcuuggcugg

SEQ ID NO: 315708 - RNA, 19 nt, Human
agccagccaccccucuuca

SEQ ID NO: 315709 - RNA, 32 nt, Human
agccagccacugcaucugcugcacaguugaac

SEQ ID NO: 315710 - RNA, 32 nt, Human
agccagccagaagaaaaagcgauagcaagaga

SEQ ID NO: 315711 - RNA, 32 nt, Human
agccagccagaccaugaacccaccagaaggaa

SEQ ID NO: 315712 - RNA, 24 nt, Human
agccagccagagaggacaguggag

SEQ ID NO: 315713 - RNA, 20 nt, Human
agccagccagcagcuccgug

SEQ ID NO: 315714 - RNA, 24 nt, Human
agccagccagccacauuucccugu

SEQ ID NO: 315715 - RNA, 32 nt, Human
agccagccagcccccuggcagcagguucuccu

SEQ ID NO: 315716 - RNA, 19 nt, Human
agccagccaggcccuggug

SEQ ID NO: 315717 - RNA, 32 nt, Human
agccagccagggcccugcccagcuucaauuua

SEQ ID NO: 315718 - RNA, 32 nt, Human
agccagccaucuuuggcaaaggucccugagcu

SEQ ID NO: 315719 - RNA, 32 nt, Human
agccagccaugcuuccuccugccugugugacg

SEQ ID NO: 315720 - RNA, 32 nt, Human
agccagcccacccugggcugggcccaggugcg

SEQ ID NO: 315721 - RNA, 32 nt, Human
agccagcccagcugccuaaagcgacaugagac

SEQ ID NO: 315722 - RNA, 32 nt, Human
agccagccccaaccuccagggcugucacaacc

SEQ ID NO: 315723 - RNA, 15 nt, Human
agccagccccuccca

SEQ ID NO: 315724 - RNA, 32 nt, Human
agccagccccugugggaagcaggcuggguuua

SEQ ID NO: 315725 - RNA, 32 nt, Human
agccagcccggugcgccccuccaccuccugcu

SEQ ID NO: 315726 - RNA, 32 nt, Human
agccagcccuaucuucuugucucaagaccaag

SEQ ID NO: 315727 - RNA, 32 nt, Human
agccagcccuggaggcuggauggcuccccuga

SEQ ID NO: 315728 - RNA, 32 nt, Human
agccagcccuggcuggagagcgggacguggca

SEQ ID NO: 315729 - RNA, 32 nt, Human
agccagccuaucucuagcccaugguuuuggag

SEQ ID NO: 315730 - RNA, 32 nt, Human
agccagccucaaggagacaucugguuuaggcc

SEQ ID NO: 315731 - RNA, 32 nt, Human
agccagccuccacuccagagcaaaccccugac

SEQ ID NO: 315732 - RNA, 32 nt, Human
agccagccucuucccccugggcuucgggcgaa

SEQ ID NO: 315733 - RNA, 32 nt, Human
agccagccugaagaaaugucaagcagagcccc

SEQ ID NO: 315734 - RNA, 32 nt, Human
agccagccugggggcugggaggauccuggaga

SEQ ID NO: 315735 - RNA, 32 nt, Human
agccagcgaggagcggcggcagaggaaaggcc

SEQ ID NO: 315736 - RNA, 32 nt, Human
agccagcggauugccagcucccagcucucccc

SEQ ID NO: 315737 - RNA, 32 nt, Human
agccagcucacagagaagaaaauaacuugcag

SEQ ID NO: 315738 - RNA, 32 nt, Human
agccagcucccagcagcuucuccggaagcugc

SEQ ID NO: 315739 - RNA, 32 nt, Human
agccagcuccccacucaggacgcuuccucauu

SEQ ID NO: 315740 - RNA, 32 nt, Human
agccagcucucaggacuguggcuggaggcugg

SEQ ID NO: 315741 - RNA, 32 nt, Human
agccagcucugccuucccaucaucuccuuuca

SEQ ID NO: 315742 - RNA, 32 nt, Human
agccagcugcagcucuaucucaccugccacgg

SEQ ID NO: 315743 - RNA, 32 nt, Human
agccagcugccuggccucccuccuguguuucc

SEQ ID NO: 315744 - RNA, 32 nt, Human
agccagcugggacagcgaccgagcccagagag

SEQ ID NO: 315745 - RNA, 17 nt, Human
agccagcugggaggaga

SEQ ID NO: 315746 - RNA, 32 nt, Human
agccagcuguggguaguugaaucuuuuucccg

SEQ ID NO: 315747 - RNA, 32 nt, Human
agccagcugugugugcugggcccacugaucag

SEQ ID NO: 315748 - RNA, 32 nt, Human
agccagcuugcagagagagcaagaacagagcc

SEQ ID NO: 315749 - RNA, 32 nt, Human
agccagcuuuaaaucacagcuuuuaccuauuu

SEQ ID NO: 315750 - RNA, 32 nt, Human
agccaggaaaagcacaaagaagaaacugcaac

SEQ ID NO: 315751 - RNA, 24 nt, Human
agccaggaaacagagugaccaagg

SEQ ID NO: 315752 - RNA, 22 nt, Human
agccaggaacgggucacccugc

SEQ ID NO: 315753 - RNA, 32 nt, Human
agccaggaaggaagaagagggagggccagugc

SEQ ID NO: 315754 - RNA, 32 nt, Human
agccaggaagguugagguugcagugagcuaug

SEQ ID NO: 315755 - RNA, 32 nt, Human
agccaggacacagaggggcagagcaagucagc

SEQ ID NO: 315756 - RNA, 32 nt, Human
agccaggacacagucuagaagcuuugagguuu

SEQ ID NO: 315757 - RNA, 25 nt, Human
agccaggaccagccagaccagcaga

SEQ ID NO: 315758 - RNA, 32 nt, Human
agccaggaccaggccccgcggaggcuugcugg

SEQ ID NO: 315759 - RNA, 22 nt, Human
agccaggacccagaaacucaga

SEQ ID NO: 315760 - RNA, 32 nt, Human
agccaggacuacaggugcaugccaccacgccc

SEQ ID NO: 315761 - RNA, 32 nt, Human
agccaggacuccucauuucaucucacagacac

SEQ ID NO: 315762 - RNA, 21 nt, Human
agccaggagaaagcagcccug

SEQ ID NO: 315763 - RNA, 20 nt, Human
agccaggagacaggccuggg

SEQ ID NO: 315764 - RNA, 32 nt, Human
agccaggagacccugggagcuguggcugucuu

SEQ ID NO: 315765 - RNA, 24 nt, Human
agccaggagaccugcagcccugcg

SEQ ID NO: 315766 - RNA, 31 nt, Human
agccaggagagaccuuuucugccuggagaga

SEQ ID NO: 315767 - RNA, 32 nt, Human
agccaggagagggacggcugauggacucagca

SEQ ID NO: 315768 - RNA, 32 nt, Human
agccaggagaugggcaagauuuugccucuuca

SEQ ID NO: 315769 - RNA, 19 nt, Human
agccaggagccaagagcag

SEQ ID NO: 315770 - RNA, 32 nt, Human
agccaggagcccagggagucacucugggcccu

SEQ ID NO: 315771 - RNA, 31 nt, Human
agccaggagcccucuuuuccugugucaaagc

SEQ ID NO: 315772 - RNA, 21 nt, Human
agccaggagcgcugccccagg

SEQ ID NO: 315773 - RNA, 23 nt, Human
agccaggagcgcugccccaggga

SEQ ID NO: 315774 - RNA, 21 nt, Human
agccaggaggagcccaacaga

SEQ ID NO: 315775 - RNA, 32 nt, Human
agccaggaggaggagguugcagugagccgaga

SEQ ID NO: 315776 - RNA, 24 nt, Human
agccaggaggcaaacccaaggccc

SEQ ID NO: 315777 - RNA, 20 nt, Human
agccaggaggcagagguugc

SEQ ID NO: 315778 - RNA, 32 nt, Human
agccaggaggcagagguugcagugagccaagc

SEQ ID NO: 315779 - RNA, 32 nt, Human
agccaggaggcagagguugcaguuagcccaga

SEQ ID NO: 315780 - RNA, 22 nt, Human
agccaggaggcaggagcagcgg

SEQ ID NO: 315781 - RNA, 20 nt, Human
agccaggaggcaggcgcgcg

SEQ ID NO: 315782 - RNA, 21 nt, Human
agccaggaggcaggguguccu

SEQ ID NO: 315783 - RNA, 24 nt, Human
agccaggaggcaguggggcugugg

SEQ ID NO: 315784 - RNA, 32 nt, Human
agccaggaggcaguggggcugugggcucagag

SEQ ID NO: 315785 - RNA, 32 nt, Human
agccaggaggccaagacagcggccaggagaag

SEQ ID NO: 315786 - RNA, 32 nt, Human
agccaggaggcggagguugcagugagccgaga

SEQ ID NO: 315787 - RNA, 22 nt, Human
agccaggagggagcuggcccug

SEQ ID NO: 315788 - RNA, 20 nt, Human
agccaggagggaggccccgc

SEQ ID NO: 315789 - RNA, 32 nt, Human
agccaggagggcccugaccucccacugcccag

SEQ ID NO: 315790 - RNA, 32 nt, Human
agccaggaggggcaguggggcugggccugggu

SEQ ID NO: 315791 - RNA, 32 nt, Human
agccaggaggucuagaacuggagcuuagucca

SEQ ID NO: 315792 - RNA, 25 nt, Human
agccaggagguugagguugcaguga

SEQ ID NO: 315793 - RNA, 32 nt, Human
agccaggagguugagguugcagugagcugaga

SEQ ID NO: 315794 - RNA, 32 nt, Human
agccaggaguauagguaugugccaccacacuc

SEQ ID NO: 315795 - RNA, 32 nt, Human
agccaggaucuguacccaugcaggugccccua

SEQ ID NO: 315796 - RNA, 21 nt, Human
agccaggaugcugauaucuaa

SEQ ID NO: 315797 - RNA, 32 nt, Human
agccaggauuaaaggugccugccaccacacau

SEQ ID NO: 315798 - RNA, 32 nt, Human
agccaggauuacaggcacccuccacuaggccc

SEQ ID NO: 315799 - RNA, 32 nt, Human
agccaggauugauggcagcugagggaaauucu

SEQ ID NO: 315800 - RNA, 32 nt, Human
agccaggauugcgccaccacacuccagccugg

SEQ ID NO: 315801 - RNA, 32 nt, Human
agccaggauuucuaagggucaggaggccuuca

SEQ ID NO: 315802 - RNA, 25 nt, Human
agccaggauuugaaagcaggcagcc

SEQ ID NO: 315803 - RNA, 32 nt, Human
agccaggcaaaaacauuacaagaaaggaaaac

SEQ ID NO: 315804 - RNA, 32 nt, Human
agccaggcaaaucgcuugaggcucaggaguuc

SEQ ID NO: 315805 - RNA, 32 nt, Human
agccaggcaaugguguggcccugcacuggccc

SEQ ID NO: 315806 - RNA, 32 nt, Human
agccaggcacaucuggccuugggaaacucauc

SEQ ID NO: 315807 - RNA, 32 nt, Human
agccaggcacugcccugcugugcuacuccugc

SEQ ID NO: 315808 - RNA, 32 nt, Human
agccaggcagaaacaacuccagagccacaccu

SEQ ID NO: 315809 - RNA, 32 nt, Human
agccaggcagagccaggggugagaggcagcag

SEQ ID NO: 315810 - RNA, 23 nt, Human
agccaggcagagcccacagagca

SEQ ID NO: 315811 - RNA, 32 nt, Human
agccaggcagcacaucacagcgggaggagcug

SEQ ID NO: 315812 - RNA, 32 nt, Human
agccaggcagcagaagcaggcacuuccaaacc

SEQ ID NO: 315813 - RNA, 17 nt, Human
agccaggcagcagagca

SEQ ID NO: 315814 - RNA, 22 nt, Human
agccaggcagggcgaugucugc

SEQ ID NO: 315815 - RNA, 22 nt, Human
agccaggcagucccuccugccu

SEQ ID NO: 315816 - RNA, 32 nt, Human
agccaggcagugagacuggcucgggcgggccg

SEQ ID NO: 315817 - RNA, 32 nt, Human
agccaggcaguuggggcacuuucugagugcug

SEQ ID NO: 315818 - RNA, 32 nt, Human
agccaggcauaacauauccacugugugcauag

SEQ ID NO: 315819 - RNA, 25 nt, Human
agccaggcauaauggcacacaccug

SEQ ID NO: 315820 - RNA, 25 nt, Human
agccaggcaugauggcacacaccug

SEQ ID NO: 315821 - RNA, 25 nt, Human
agccaggcaugguggcacacaccug

SEQ ID NO: 315822 - RNA, 25 nt, Human
agccaggcaugguggcgcacaccua

SEQ ID NO: 315823 - RNA, 32 nt, Human
agccaggcaugguggugggugccuggaguccc

SEQ ID NO: 315824 - RNA, 32 nt, Human
agccaggcauuuucaaugcucacaacaacucu

SEQ ID NO: 315825 - RNA, 21 nt, Human
agccaggccaacauggugaaa

SEQ ID NO: 315826 - RNA, 32 nt, Human
agccaggccaacuagaccacacuuauuggucu

SEQ ID NO: 315827 - RNA, 23 nt, Human
agccaggcccaagacacagcaga

SEQ ID NO: 315828 - RNA, 22 nt, Human
agccaggcccaccccagagcca

SEQ ID NO: 315829 - RNA, 32 nt, Human
agccaggcccagacauguccguccuuguaagu

SEQ ID NO: 315830 - RNA, 23 nt, Human
agccaggcccccaggucuucuca

SEQ ID NO: 315831 - RNA, 32 nt, Human
agccaggcccccaggucuucucauuguaugca

SEQ ID NO: 315832 - RNA, 23 nt, Human
agccaggccccccaggaggcagc

SEQ ID NO: 315833 - RNA, 18 nt, Human
agccaggcccccgcuuca

SEQ ID NO: 315834 - RNA, 20 nt, Human
agccaggccccgaggcgcca

SEQ ID NO: 315835 - RNA, 24 nt, Human
agccaggccccggggagggagcca

SEQ ID NO: 315836 - RNA, 32 nt, Human
agccaggcccucaggcgagcagggugggcaag

SEQ ID NO: 315837 - RNA, 22 nt, Human
agccaggcccugaggaacagcc

SEQ ID NO: 315838 - RNA, 22 nt, Human
agccaggcccugaguccccagc

SEQ ID NO: 315839 - RNA, 20 nt, Human
agccaggcccuuauccuguu

SEQ ID NO: 315840 - RNA, 23 nt, Human
agccaggccgagagcagacacca

SEQ ID NO: 315841 - RNA, 32 nt, Human
agccaggccgccugcccccacccagaaccuuc

SEQ ID NO: 315842 - RNA, 22 nt, Human
agccaggccggcccagaagcca

SEQ ID NO: 315843 - RNA, 32 nt, Human
agccaggccucccugcucugugguguuggaca

SEQ ID NO: 315844 - RNA, 24 nt, Human
agccaggccugcgccggcauccuc

SEQ ID NO: 315845 - RNA, 32 nt, Human
agccaggccugcgccggcauccuccgagauaa

SEQ ID NO: 315846 - RNA, 32 nt, Human
agccaggccugcggccacuccugcugcugcca

SEQ ID NO: 315847 - RNA, 32 nt, Human
agccaggccugggggcagccucuccccagccu

SEQ ID NO: 315848 - RNA, 32 nt, Human
agccaggccuuggguuuccccagcacagccuc

SEQ ID NO: 315849 - RNA, 17 nt, Human
agccaggcgaggccacu

SEQ ID NO: 315850 - RNA, 20 nt, Human
agccaggcuagccugaggug

SEQ ID NO: 315851 - RNA, 28 nt, Human
agccaggcucaggcugccucuucguuuu

SEQ ID NO: 315852 - RNA, 24 nt, Human
agccaggcucguggcacacaccua

SEQ ID NO: 315853 - RNA, 32 nt, Human
agccaggcugggccaucuucuccuggacaccu

SEQ ID NO: 315854 - RNA, 32 nt, Human
agccaggcuguugccaagcaacuggcaggagc

SEQ ID NO: 315855 - RNA, 32 nt, Human
agccagggaaccaggcuccagaccaugaacau

SEQ ID NO: 315856 - RNA, 32 nt, Human
agccagggaagccgaaggggaagaggcggcgg

SEQ ID NO: 315857 - RNA, 32 nt, Human
agccagggaaggugggagccacauggacccac

SEQ ID NO: 315858 - RNA, 32 nt, Human
agccagggagagaggggcaaggagcucagagg

SEQ ID NO: 315859 - RNA, 32 nt, Human
agccagggagagccgcacaacauacaauuaua

SEQ ID NO: 315860 - RNA, 32 nt, Human
agccagggagagggugugagggcagaucuggg

SEQ ID NO: 315861 - RNA, 32 nt, Human
agccagggagggagacaggagggcaggaggaa

SEQ ID NO: 315862 - RNA, 24 nt, Human
agccagggaggucaaggcugcagu

SEQ ID NO: 315863 - RNA, 32 nt, Human
agccagggaggucaaggcugcagugagccgug

SEQ ID NO: 315864 - RNA, 32 nt, Human
agccagggagguggaggcuacagugagccaug

SEQ ID NO: 315865 - RNA, 26 nt, Human
agccagggagguggagguugcaguga

SEQ ID NO: 315866 - RNA, 19 nt, Human
agccagggcaacacagcga

SEQ ID NO: 315867 - RNA, 32 nt, Human
agccagggcaggcagaagcuagggccuggggg

SEQ ID NO: 315868 - RNA, 32 nt, Human
agccagggcagggccauucuccaccuuacuga

SEQ ID NO: 315869 - RNA, 22 nt, Human
agccagggccagcccagaggca

SEQ ID NO: 315870 - RNA, 26 nt, Human
agccagggccccucggagcccggccg

SEQ ID NO: 315871 - RNA, 18 nt, Human
agccagggccgggugucu

SEQ ID NO: 315872 - RNA, 30 nt, Human
agccagggccucuccaagccgcugcuguga

SEQ ID NO: 315873 - RNA, 32 nt, Human
agccagggcggcuuccugaaggaugugggaug

SEQ ID NO: 315874 - RNA, 20 nt, Human
agccagggcgggcgcggccu

SEQ ID NO: 315875 - RNA, 19 nt, Human
agccagggcuccagggccu

SEQ ID NO: 315876 - RNA, 19 nt, Human
agccagggcuggugcuuaa

SEQ ID NO: 315877 - RNA, 32 nt, Human
agccagggcuguagcagagaggcuaguccauc

SEQ ID NO: 315878 - RNA, 32 nt, Human
agccaggggagcagggaagaagaaggggcucc

SEQ ID NO: 315879 - RNA, 32 nt, Human
agccaggggcaagcaugaccagagccagggac

SEQ ID NO: 315880 - RNA, 32 nt, Human
agccaggggcagggugggauggggaagaccag

SEQ ID NO: 315881 - RNA, 32 nt, Human
agccaggggccagacacagugcaggcacaguc

SEQ ID NO: 315882 - RNA, 32 nt, Human
agccagggggagcugggaugcagugggagagg

SEQ ID NO: 315883 - RNA, 19 nt, Human
agccagggggcccucuuca

SEQ ID NO: 315884 - RNA, 32 nt, Human
agccagggggccugugcagccucccuguguag

SEQ ID NO: 315885 - RNA, 32 nt, Human
agccaggggucugagggcaccuggcuguguuc

SEQ ID NO: 315886 - RNA, 32 nt, Human
agccaggggugagaggcagcagugauggcuac

SEQ ID NO: 315887 - RNA, 32 nt, Human
agccaggguggggcauucccucuagauucagg

SEQ ID NO: 315888 - RNA, 21 nt, Human
agccagguacugcucccuuca

SEQ ID NO: 315889 - RNA, 20 nt, Human
agccagguccauaccccuuc

SEQ ID NO: 315890 - RNA, 21 nt, Human
agccaggucccaggccguuca

SEQ ID NO: 315891 - RNA, 21 nt, Human
agccagguccuccuccuccuc

SEQ ID NO: 315892 - RNA, 32 nt, Human
agccagguccuccuccuccuccuucuccucuu

SEQ ID NO: 315893 - RNA, 18 nt, Human
agccagguccugacccuc

SEQ ID NO: 315894 - RNA, 21 nt, Human
agccaggucuccaccucugca

SEQ ID NO: 315895 - RNA, 19 nt, Human
agccaggucucuccucuca

SEQ ID NO: 315896 - RNA, 20 nt, Human
agccaggucugcccucccca

SEQ ID NO: 315897 - RNA, 20 nt, Human
agccaggucuucucucuuca

SEQ ID NO: 315898 - RNA, 23 nt, Human
agccaggugaagcgaaccugcug

SEQ ID NO: 315899 - RNA, 32 nt, Human
agccaggugaggaccauuuucacugggaccca

SEQ ID NO: 315900 - RNA, 32 nt, Human
agccaggugaggaggagccaggaaggcaguug

SEQ ID NO: 315901 - RNA, 32 nt, Human
agccaggugaugacugcucugaagauggagag

SEQ ID NO: 315902 - RNA, 32 nt, Human
agccaggugcagccuggacaacaugaugagau

SEQ ID NO: 315903 - RNA, 32 nt, Human
agccaggugccacccucgccucacagccccgg

SEQ ID NO: 315904 - RNA, 32 nt, Human
agccaggugcgggauauaaucuuguggcgcgc

SEQ ID NO: 315905 - RNA, 32 nt, Human
agccaggugcgggauauaaucuuguggugcgc

SEQ ID NO: 315906 - RNA, 32 nt, Human
agccaggugggaccagugugucugucaugaaa

SEQ ID NO: 315907 - RNA, 32 nt, Human
agccagguggguggagggagggagaucaugag

SEQ ID NO: 315908 - RNA, 32 nt, Human
agccaggugguggcacacgccuguaaucccag

SEQ ID NO: 315909 - RNA, 25 nt, Human
agccagguguagcgacacacaccug

SEQ ID NO: 315910 - RNA, 19 nt, Human
agccagguguccucuugca

SEQ ID NO: 315911 - RNA, 24 nt, Human
agccaggugucugcagagcagcca

SEQ ID NO: 315912 - RNA, 23 nt, Human
agccaggugugguggcacacacc

SEQ ID NO: 315913 - RNA, 25 nt, Human
agccaggugugguggcacacaccua

SEQ ID NO: 315914 - RNA, 32 nt, Human
agccaggugugugugauugggccccgcgaccu

SEQ ID NO: 315915 - RNA, 32 nt, Human
agccagguuauucucuggagguugguggauga

SEQ ID NO: 315916 - RNA, 32 nt, Human
agccagguucugacucuuggcacagcauggag

SEQ ID NO: 315917 - RNA, 32 nt, Human
agccaguacagcugugagcagaggcugguuau

SEQ ID NO: 315918 - RNA, 18 nt, Human
agccaguaccugcaucuu

SEQ ID NO: 315919 - RNA, 19 nt, Human
agccaguacgacagagcag

SEQ ID NO: 315920 - RNA, 32 nt, Human
agccaguacucagagaggaggaccuucucaac

SEQ ID NO: 315921 - RNA, 32 nt, Human
agccaguacuccugcucugcuaacccugcgug

SEQ ID NO: 315922 - RNA, 32 nt, Human
agccagucacacccucccgugggaaccagggc

SEQ ID NO: 315923 - RNA, 32 nt, Human
agccagucaccuguaagaguccuguccucugc

SEQ ID NO: 315924 - RNA, 32 nt, Human
agccagucauuaaacaaaggcuuggagcaaac

SEQ ID NO: 315925 - RNA, 32 nt, Human
agccaguccaggaguggaccggccagaugagg

SEQ ID NO: 315926 - RNA, 32 nt, Human
agccaguccaucugcccagcagucccugggca

SEQ ID NO: 315927 - RNA, 32 nt, Human
agccaguccauguguugucucuaacugauuua

SEQ ID NO: 315928 - RNA, 32 nt, Human
agccaguccccauuggcugacagugccaccug

SEQ ID NO: 315929 - RNA, 19 nt, Human
agccagucccugcuccaca

SEQ ID NO: 315930 - RNA, 20 nt, Human
agccaguccucccagggacu

SEQ ID NO: 315931 - RNA, 32 nt, Human
agccaguccuggugacuggccucugccuucca

SEQ ID NO: 315932 - RNA, 32 nt, Human
agccagucucaccaguugauucugccuuaauc

SEQ ID NO: 315933 - RNA, 20 nt, Human
agccagucuccgcgccucca

SEQ ID NO: 315934 - RNA, 32 nt, Human
agccagucuccuggucuagcccagguugccag

SEQ ID NO: 315935 - RNA, 32 nt, Human
agccagucuucuggagccucugggcagaaccc

SEQ ID NO: 315936 - RNA, 32 nt, Human
agccagugaacugucaccuucucuucaucaca

SEQ ID NO: 315937 - RNA, 32 nt, Human
agccagugacaguugaccuggcuauugguucu

SEQ ID NO: 315938 - RNA, 32 nt, Human
agccagugagccaagcgccacagccagcaaag

SEQ ID NO: 315939 - RNA, 32 nt, Human
agccagugagcugggcuucaguuuuucccagg

SEQ ID NO: 315940 - RNA, 32 nt, Human
agccagugagucuauugcaugguguuuugaga

SEQ ID NO: 315941 - RNA, 21 nt, Human
agccagugaucagcagcucuu

SEQ ID NO: 315942 - RNA, 32 nt, Human
agccagugcacgccagccugggcgacagacuc

SEQ ID NO: 315943 - RNA, 22 nt, Human
agccagugccaaaacccagcca

SEQ ID NO: 315944 - RNA, 18 nt, Human
agccagugcgguggugug

SEQ ID NO: 315945 - RNA, 32 nt, Human
agccagugcuccaagcccggaauugucuucau

SEQ ID NO: 315946 - RNA, 20 nt, Human
agccagugcuccgugcggug

SEQ ID NO: 315947 - RNA, 32 nt, Human
agccagugcucuggaaauugagcuccaagcac

SEQ ID NO: 315948 - RNA, 32 nt, Human
agccaguggaaauguuccauaagggagaguuc

SEQ ID NO: 315949 - RNA, 32 nt, Human
agccaguggcaucugcgcggcuugccuggcuc

SEQ ID NO: 315950 - RNA, 25 nt, Human
agccaguggcuuccugaacgugccu

SEQ ID NO: 315951 - RNA, 32 nt, Human
agccagugggaacugccagaggaagaucuggc

SEQ ID NO: 315952 - RNA, 32 nt, Human
agccagugguacaggggccugggcagggcggu

SEQ ID NO: 315953 - RNA, 32 nt, Human
agccagugugccaccaggcugggcagggacaa

SEQ ID NO: 315954 - RNA, 32 nt, Human
agccaguguguuggauuccggaagaaaugaua

SEQ ID NO: 315955 - RNA, 32 nt, Human
agccaguguugcuggcuggagaggcagcaaca

SEQ ID NO: 315956 - RNA, 20 nt, Human
agccaguguuuuuuguggua

SEQ ID NO: 315957 - RNA, 32 nt, Human
agccaguuauuaggaagagcaagcucaccaca

SEQ ID NO: 315958 - RNA, 32 nt, Human
agccaguuccacccucagcuucucucagaagg

SEQ ID NO: 315959 - RNA, 32 nt, Human
agccaguuccuaaaacuaaaacuccauucuag

SEQ ID NO: 315960 - RNA, 32 nt, Human
agccaguucuccaaucagccuaucaccccuug

SEQ ID NO: 315961 - RNA, 32 nt, Human
agccaguucucugcuucauauucaugugaccc

SEQ ID NO: 315962 - RNA, 32 nt, Human
agccaguuucaucaaacaguucaacagagagc

SEQ ID NO: 315963 - RNA, 32 nt, Human
agccaguuucugccaccccacucuccaggcca

SEQ ID NO: 315964 - RNA, 32 nt, Human
agccauaauuccaccaucauacagaucaggca

SEQ ID NO: 315965 - RNA, 32 nt, Human
agccauacaaauuauuucagucuuccauuagu

SEQ ID NO: 315966 - RNA, 32 nt, Human
agccauacauaaaaggaccuugggacauaaga

SEQ ID NO: 315967 - RNA, 32 nt, Human
agccauagaguaagguuaacaaaaagaauaaa

SEQ ID NO: 315968 - RNA, 31 nt, Human
agccauagcuacuucuuuaagcuccuccagu

SEQ ID NO: 315969 - RNA, 32 nt, Human
agccauaggaaaacaugugagcaacaaccccc

SEQ ID NO: 315970 - RNA, 32 nt, Human
agccauauauucaaauauguaauuuuccucau

SEQ ID NO: 315971 - RNA, 32 nt, Human
agccauauuucugucuccacuugcucucuggg

SEQ ID NO: 315972 - RNA, 32 nt, Human
agccaucaacuucccuucauccuugccguguc

SEQ ID NO: 315973 - RNA, 32 nt, Human
agccaucaaggacauguuuguggugugaugca

SEQ ID NO: 315974 - RNA, 32 nt, Human
agccaucacucacugccaccugggccaucaac

SEQ ID NO: 315975 - RNA, 32 nt, Human
agccaucacugcuggcagccugggcaaaccgg

SEQ ID NO: 315976 - RNA, 32 nt, Human
agccaucaggaguguuucuugaaugccccagg

SEQ ID NO: 315977 - RNA, 32 nt, Human
agccaucaucucucacgguaccacaggccugg

SEQ ID NO: 315978 - RNA, 32 nt, Human
agccaucaugcaugcuuuugaaaacuuagaga

SEQ ID NO: 315979 - RNA, 32 nt, Human
agccaucauuguaggaaaggcuuugcaggaga

SEQ ID NO: 315980 - RNA, 32 nt, Human
agccauccaaauagcugggaccacaggugugc

SEQ ID NO: 315981 - RNA, 32 nt, Human
agccauccaccaccagcuccuccucuaggcuc

SEQ ID NO: 315982 - RNA, 32 nt, Human
agccauccagccucccugacccuccacacgga

SEQ ID NO: 315983 - RNA, 32 nt, Human
agccauccauuuucuccuucauugacuggcug

SEQ ID NO: 315984 - RNA, 21 nt, Human
agccaucccaacguccucccc

SEQ ID NO: 315985 - RNA, 32 nt, Human
agccaucccagagauuugaguucugaugccac

SEQ ID NO: 315986 - RNA, 22 nt, Human
agccauccccccgcucugcccc

SEQ ID NO: 315987 - RNA, 32 nt, Human
agccaucccggggcuccagccaggagcccugc

SEQ ID NO: 315988 - RNA, 32 nt, Human
agccauccuccacggcaagcucagaccacccg

SEQ ID NO: 315989 - RNA, 32 nt, Human
agccauccucgucugcucuccucucucuucca

SEQ ID NO: 315990 - RNA, 18 nt, Human
agccauccucucaccuca

SEQ ID NO: 315991 - RNA, 20 nt, Human
agccauccugccucgccucc

SEQ ID NO: 315992 - RNA, 32 nt, Human
agccaucgcgccacugcacucuagccugggug

SEQ ID NO: 315993 - RNA, 32 nt, Human
agccaucgguggcccaggcuccacgugcuuac

SEQ ID NO: 315994 - RNA, 32 nt, Human
agccaucuauguauaugucuuaccucaucucc

SEQ ID NO: 315995 - RNA, 32 nt, Human
agccaucuccaucuugaaggaacucaaagacu

SEQ ID NO: 315996 - RNA, 32 nt, Human
agccaucucgguccuugcuggaagguggagac

SEQ ID NO: 315997 - RNA, 32 nt, Human
agccaucucuuccucugaucuggggucuguuu

SEQ ID NO: 315998 - RNA, 32 nt, Human
agccaucugcagcaggccccucccagcaacag

SEQ ID NO: 315999 - RNA, 24 nt, Human
agccaucugcccgccucauccucc

SEQ ID NO: 316000 - RNA, 32 nt, Human
agccaucugccuccucucaacucucgcugccc

SEQ ID NO: 316001 - RNA, 32 nt, Human
agccaucugcucucccgggaguccagugacuc

SEQ ID NO: 316002 - RNA, 32 nt, Human
agccaucugucaggaaauguaacuuugguuuu

SEQ ID NO: 316003 - RNA, 32 nt, Human
agccaucuguggggcaggcacacacaccuccc

SEQ ID NO: 316004 - RNA, 32 nt, Human
agccaucuucacuggaggguggggagcuccgu

SEQ ID NO: 316005 - RNA, 32 nt, Human
agccaucuuccaggacccagaggggcugccug

SEQ ID NO: 316006 - RNA, 32 nt, Human
agccaucuuuacgcauguccaucggugaaaga

SEQ ID NO: 316007 - RNA, 32 nt, Human
agccaucuuuuuccuuugcguuuuucuugacu

SEQ ID NO: 316008 - RNA, 32 nt, Human
agccaugaaacccacagacuuggugccugagc

SEQ ID NO: 316009 - RNA, 24 nt, Human
agccaugaaaguagcacgaucaua

SEQ ID NO: 316010 - RNA, 32 nt, Human
agccaugacgucaauagcagcccagggcacuu

SEQ ID NO: 316011 - RNA, 29 nt, Human
agccaugacuauacuccccaaaaagaagc

SEQ ID NO: 316012 - RNA, 32 nt, Human
agccaugacucugugaagaugaauguugucuc

SEQ ID NO: 316013 - RNA, 22 nt, Human
agccaugacuucauuucucgcc

SEQ ID NO: 316014 - RNA, 32 nt, Human
agccaugagcagggaaagaacucucccaaccc

SEQ ID NO: 316015 - RNA, 32 nt, Human
agccaugagccaagagcccucuucacgcugcu

SEQ ID NO: 316016 - RNA, 29 nt, Human
agccaugagggaaggacaggagauggggc

SEQ ID NO: 316017 - RNA, 32 nt, Human
agccaugagugggaagugggaaaaugaguuug

SEQ ID NO: 316018 - RNA, 32 nt, Human
agccaugaguugucccggccagcuucauacuu

SEQ ID NO: 316019 - RNA, 32 nt, Human
agccaugauaguucaacauacagagauuucca

SEQ ID NO: 316020 - RNA, 32 nt, Human
agccaugaucauaccacugcacuccagccugg

SEQ ID NO: 316021 - RNA, 32 nt, Human
agccaugauccuaccacugcacuucagccuag

SEQ ID NO: 316022 - RNA, 32 nt, Human
agccaugauucugccucuguuuuauaccugca

SEQ ID NO: 316023 - RNA, 32 nt, Human
agccaugauugagccaccacacuccaaccuag

SEQ ID NO: 316024 - RNA, 32 nt, Human
agccaugcagacaccaaggugaagagcuacug

SEQ ID NO: 316025 - RNA, 32 nt, Human
agccaugcagagccuugugccaugaaggacuu

SEQ ID NO: 316026 - RNA, 32 nt, Human
agccaugcagggacccaggacuguaaccuggg

SEQ ID NO: 316027 - RNA, 32 nt, Human
agccaugcauuccguuccaaggcauccgugag

SEQ ID NO: 316028 - RNA, 32 nt, Human
agccaugccaaugcacuccagucugggcaaca

SEQ ID NO: 316029 - RNA, 32 nt, Human
agccaugccacaucuguauauagaugggguuu

SEQ ID NO: 316030 - RNA, 32 nt, Human
agccaugcccucugacugcccucugccccuuu

SEQ ID NO: 316031 - RNA, 32 nt, Human
agccaugccugcagugcugcaggccucgcuuu

SEQ ID NO: 316032 - RNA, 32 nt, Human
agccaugccugccucugaccaguccacuuuuc

SEQ ID NO: 316033 - RNA, 32 nt, Human
agccaugccuucaaccuggcaggagguguagc

SEQ ID NO: 316034 - RNA, 32 nt, Human
agccaugccuucucgcuggauguggccucggc

SEQ ID NO: 316035 - RNA, 32 nt, Human
agccaugcgaguagcugggacuacagacaugc

SEQ ID NO: 316036 - RNA, 32 nt, Human
agccaugcguggacucagugggccacacagac

SEQ ID NO: 316037 - RNA, 32 nt, Human
agccaugcugggaugcugcuggcggggagcac

SEQ ID NO: 316038 - RNA, 29 nt, Human
agccauggacacaccccugcccagaccuc

SEQ ID NO: 316039 - RNA, 32 nt, Human
agccauggacaguaaaguugugugggaaaaga

SEQ ID NO: 316040 - RNA, 32 nt, Human
agccauggagcgcggcccuggggccccggggc

SEQ ID NO: 316041 - RNA, 32 nt, Human
agccauggagugagacccaggagccggacacu

SEQ ID NO: 316042 - RNA, 32 nt, Human
agccauggcagauuuccagccuggugaugcug

SEQ ID NO: 316043 - RNA, 18 nt, Human
agccauggcccagagcag

SEQ ID NO: 316044 - RNA, 32 nt, Human
agccauggcccgccgccgagagcccaggcccc

SEQ ID NO: 316045 - RNA, 29 nt, Human
agccauggcccugucccugccucugggcc

SEQ ID NO: 316046 - RNA, 32 nt, Human
agccauggccuuccucuccugcgugagaccag

SEQ ID NO: 316047 - RNA, 32 nt, Human
agccauggcgacacuaaaggaggaggagccgg

SEQ ID NO: 316048 - RNA, 29 nt, Human
agccauggcugaaggggaaaucaccaccu

SEQ ID NO: 316049 - RNA, 32 nt, Human
agccauggcugcagcaggaauggaugucccac

SEQ ID NO: 316050 - RNA, 32 nt, Human
agccauggcuuuagggaggggugcaggcucau

SEQ ID NO: 316051 - RNA, 32 nt, Human
agccaugggaggccaagaagcugcuguggcug

SEQ ID NO: 316052 - RNA, 32 nt, Human
agccaugggcugggagaucauagcccuuccua

SEQ ID NO: 316053 - RNA, 32 nt, Human
agccauggggcaguugaccugggucuugaaag

SEQ ID NO: 316054 - RNA, 32 nt, Human
agccauggggccggagccgcagugagcaccau

SEQ ID NO: 316055 - RNA, 32 nt, Human
agccaugggggagcucacccaccccacaauuc

SEQ ID NO: 316056 - RNA, 32 nt, Human
agccauggggucugcuguggggucugcccugg

SEQ ID NO: 316057 - RNA, 29 nt, Human
agccauggucggcagaagagcacugaucg

SEQ ID NO: 316058 - RNA, 32 nt, Human
agccaugguguccccucugccuccccuccccc

SEQ ID NO: 316059 - RNA, 32 nt, Human
agccaugguguuucaccauguuggccaggcug

SEQ ID NO: 316060 - RNA, 32 nt, Human
agccauguaaaaccugcagugccugaaaccug

SEQ ID NO: 316061 - RNA, 32 nt, Human
agccauguaccacauaacaacaucuugguaaa

SEQ ID NO: 316062 - RNA, 29 nt, Human
agccaugucaucugagccucccccaccac

SEQ ID NO: 316063 - RNA, 32 nt, Human
agccaugucccaagcaucucacaaaggaauaa

SEQ ID NO: 316064 - RNA, 29 nt, Human
agccaugucugugucuaaucacuacaggc

SEQ ID NO: 316065 - RNA, 19 nt, Human
agccaugugacugcgcaga

SEQ ID NO: 316066 - RNA, 32 nt, Human
agccauguggaacugcuggagugcaguggcau

SEQ ID NO: 316067 - RNA, 32 nt, Human
agccauguuccccaguucaguguugcauguau

SEQ ID NO: 316068 - RNA, 32 nt, Human
agccauguuuuuaagcagaaccagcgaaaccc

SEQ ID NO: 316069 - RNA, 32 nt, Human
agccauuaaaacugacaacucugaaugcaagc

SEQ ID NO: 316070 - RNA, 32 nt, Human
agccauuaaaugucacaugaagccuugauaga

SEQ ID NO: 316071 - RNA, 32 nt, Human
agccauuacagcuguggaggaugcaugaaaca

SEQ ID NO: 316072 - RNA, 32 nt, Human
agccauuacaucuucuuucuucuucucuccuu

SEQ ID NO: 316073 - RNA, 32 nt, Human
agccauuaccuuuuaugcuucaucucaacauu

SEQ ID NO: 316074 - RNA, 32 nt, Human
agccauuagaaaaugugaaacuguucuuauga

SEQ ID NO: 316075 - RNA, 32 nt, Human
agccauucaagugccuuacacagcuuugaaga

SEQ ID NO: 316076 - RNA, 32 nt, Human
agccauucagaaaagacuuccuuuguguucag

SEQ ID NO: 316077 - RNA, 32 nt, Human
agccauucagaagagaaaaauggaauaucaga

SEQ ID NO: 316078 - RNA, 32 nt, Human
agccauuccccuguugcucuccuuaucuuggu

SEQ ID NO: 316079 - RNA, 23 nt, Human
agccauuccugaaucuccccuuc

SEQ ID NO: 316080 - RNA, 32 nt, Human
agccauucuaacagcagcaccuugucggaccg

SEQ ID NO: 316081 - RNA, 32 nt, Human
agccauugaaaacaaagacauucuucccacuu

SEQ ID NO: 316082 - RNA, 16 nt, Human
agccauugaacugguc

SEQ ID NO: 316083 - RNA, 32 nt, Human
agccauugagcaucuccucuucuugaaggcca

SEQ ID NO: 316084 - RNA, 32 nt, Human
agccauugcacuccagccuggacagcaggagc

SEQ ID NO: 316085 - RNA, 32 nt, Human
agccauugcacuccagccugggcaacaagagc

SEQ ID NO: 316086 - RNA, 32 nt, Human
agccauugcacuccagccugggcaacaagagu

SEQ ID NO: 316087 - RNA, 32 nt, Human
agccauugcauuuaaguucccuaggagggggu

SEQ ID NO: 316088 - RNA, 32 nt, Human
agccauugccauucccuguccuggcccccuuc

SEQ ID NO: 316089 - RNA, 32 nt, Human
agccauugcuccccucucccugccacccuucc

SEQ ID NO: 316090 - RNA, 32 nt, Human
agccauugcucuccagccugggugacacagca

SEQ ID NO: 316091 - RNA, 32 nt, Human
agccauugcugcacucugggggcuuggcaugg

SEQ ID NO: 316092 - RNA, 32 nt, Human
agccauuguaucaguugaaguaauacuuguuu

SEQ ID NO: 316093 - RNA, 32 nt, Human
agccauugucaugcucagccugugccaccauu

SEQ ID NO: 316094 - RNA, 32 nt, Human
agccauugucucugugucuccgucagccgugc

SEQ ID NO: 316095 - RNA, 24 nt, Human
agccauuguuggagcaggcaggca

SEQ ID NO: 316096 - RNA, 21 nt, Human
agccauuucacauuucacccc

SEQ ID NO: 316097 - RNA, 32 nt, Human
agccauuucguccucuccaguuuggggcggaa

SEQ ID NO: 316098 - RNA, 32 nt, Human
agccauuucuacugcuuacucaugucccuauu

SEQ ID NO: 316099 - RNA, 32 nt, Human
agccauuugacagggaggggccagcagugagc

SEQ ID NO: 316100 - RNA, 32 nt, Human
agcccaaaagccccagauccccuuaaagcaga

SEQ ID NO: 316101 - RNA, 24 nt, Human
agcccaaaaguuugaggcugcagu

SEQ ID NO: 316102 - RNA, 29 nt, Human
agcccaaaauaaaagaaauccugagaagg

SEQ ID NO: 316103 - RNA, 32 nt, Human
agcccaaagucgucuucucugccuucaaguca

SEQ ID NO: 316104 - RNA, 32 nt, Human
agcccaaauagcaaguugcauuucucacugga

SEQ ID NO: 316105 - RNA, 32 nt, Human
agcccaacacaacccaaaggcucuuuucagag

SEQ ID NO: 316106 - RNA, 32 nt, Human
agcccaacagccgagaaggggagggagggcag

SEQ ID NO: 316107 - RNA, 21 nt, Human
agcccaacccucucauugccu

SEQ ID NO: 316108 - RNA, 32 nt, Human
agcccaacccuuccagcacccagccggcccuc

SEQ ID NO: 316109 - RNA, 25 nt, Human
agcccaaccuucuccagggcugcag

SEQ ID NO: 316110 - RNA, 21 nt, Human
agcccaacugggaccaacaca

SEQ ID NO: 316111 - RNA, 24 nt, Human
agcccaagagguagagguugcagu

SEQ ID NO: 316112 - RNA, 32 nt, Human
agcccaagagguagagguugcagugagccaag

SEQ ID NO: 316113 - RNA, 24 nt, Human
agcccaagaggucaaggcuucagu

SEQ ID NO: 316114 - RNA, 23 nt, Human
agcccaagagguccaggcugcag

SEQ ID NO: 316115 - RNA, 24 nt, Human
agcccaagagguggagguuacagu

SEQ ID NO: 316116 - RNA, 32 nt, Human
agcccaagagguggagguuacagugagcagag

SEQ ID NO: 316117 - RNA, 24 nt, Human
agcccaagagguugaggcugcagu

SEQ ID NO: 316118 - RNA, 32 nt, Human
agcccaagagguugaggcugcagugagccaug

SEQ ID NO: 316119 - RNA, 24 nt, Human
agcccaagaguccaaggcugcagu

SEQ ID NO: 316120 - RNA, 32 nt, Human
agcccaagcccaggcauugcagugcacagagc

SEQ ID NO: 316121 - RNA, 32 nt, Human
agcccaagcccgccaccucuggccugaggaac

SEQ ID NO: 316122 - RNA, 20 nt, Human
agcccaagcuaacugagcug

SEQ ID NO: 316123 - RNA, 32 nt, Human
agcccaagcuacaccuggcugcagggcugggu

SEQ ID NO: 316124 - RNA, 32 nt, Human
agcccaaggagagcggcaggaggggugggacc

SEQ ID NO: 316125 - RNA, 25 nt, Human
agcccaaggaggucaaggcuguagu

SEQ ID NO: 316126 - RNA, 32 nt, Human
agcccaaggaguuuagggcugcagugaaccug

SEQ ID NO: 316127 - RNA, 32 nt, Human
agcccaaggccagugggaacuuguauaaauca

SEQ ID NO: 316128 - RNA, 32 nt, Human
agcccaaggcccccucggccuccugggcaacu

SEQ ID NO: 316129 - RNA, 18 nt, Human
agcccaaggcgccaggau

SEQ ID NO: 316130 - RNA, 32 nt, Human
agcccaaggcuacuuggaccucaggaccugga

SEQ ID NO: 316131 - RNA, 30 nt, Human
agcccaaggcucuccaugccuuucuaccua

SEQ ID NO: 316132 - RNA, 32 nt, Human
agcccaagggcuguuucugccacuugcucucc

SEQ ID NO: 316133 - RNA, 17 nt, Human
agcccaagugaaaucaa

SEQ ID NO: 316134 - RNA, 19 nt, Human
agcccaagugggugaauca

SEQ ID NO: 316135 - RNA, 32 nt, Human
agcccaaguugaucagcuuaccggaagaaaug

SEQ ID NO: 316136 - RNA, 32 nt, Human
agcccaauaagcuuuugucuaaguugucaucu

SEQ ID NO: 316137 - RNA, 32 nt, Human
agcccaaucacaaauagaaacuaggaaccuau

SEQ ID NO: 316138 - RNA, 32 nt, Human
agcccaaucacuacaaccacuaaccacaacau

SEQ ID NO: 316139 - RNA, 16 nt, Human
agcccaaucgcaucag

SEQ ID NO: 316140 - RNA, 21 nt, Human
agcccaauucaaagcugcagu

SEQ ID NO: 316141 - RNA, 22 nt, Human
agcccaauuggugacgcugcag

SEQ ID NO: 316142 - RNA, 32 nt, Human
agcccacaaggacuccagccugcuggcuggug

SEQ ID NO: 316143 - RNA, 32 nt, Human
agcccacaaggcuggggcuggagaaugagaga

SEQ ID NO: 316144 - RNA, 32 nt, Human
agcccacacagcccaggcagcauccgggccag

SEQ ID NO: 316145 - RNA, 32 nt, Human
agcccacacagcccgagccccuuggggagcag

SEQ ID NO: 316146 - RNA, 32 nt, Human
agcccacaccacugcccugcuccaucucccac

SEQ ID NO: 316147 - RNA, 32 nt, Human
agcccacacccaccccagacggccaccacacu

SEQ ID NO: 316148 - RNA, 32 nt, Human
agcccacaccuuccuugcugauuuguauuuuu

SEQ ID NO: 316149 - RNA, 32 nt, Human
agcccacacucugccaccuccuggcccugucc

SEQ ID NO: 316150 - RNA, 32 nt, Human
agcccacagcaacccacaggccgagcggccug

SEQ ID NO: 316151 - RNA, 32 nt, Human
agcccacagcagaacccagacguacugaggcc

SEQ ID NO: 316152 - RNA, 32 nt, Human
agcccacagcuucucccagccugaaaccaaca

SEQ ID NO: 316153 - RNA, 32 nt, Human
agcccacaggauucagcagcauggacagucac

SEQ ID NO: 316154 - RNA, 20 nt, Human
agcccacaggccuguucccu

SEQ ID NO: 316155 - RNA, 32 nt, Human
agcccacaggguggagcacuguggacugaaug

SEQ ID NO: 316156 - RNA, 32 nt, Human
agcccacaucccuccuugggcagggcagcagc

SEQ ID NO: 316157 - RNA, 32 nt, Human
agcccacaugaccaugccucagacugucaccc

SEQ ID NO: 316158 - RNA, 28 nt, Human
agcccaccaagaggugccucauuagaac

SEQ ID NO: 316159 - RNA, 22 nt, Human
agcccaccacgcccaccccucc

SEQ ID NO: 316160 - RNA, 32 nt, Human
agcccaccagcaguugcugggccaccccgcug

SEQ ID NO: 316161 - RNA, 32 nt, Human
agcccaccagccccagcacugaccuccaagcc

SEQ ID NO: 316162 - RNA, 32 nt, Human
agcccaccagccuggcauccauguugacaucu

SEQ ID NO: 316163 - RNA, 32 nt, Human
agcccaccaugcuaaaaggaccccaaauggug

SEQ ID NO: 316164 - RNA, 32 nt, Human
agcccaccaugggauggggaggggguggaggc

SEQ ID NO: 316165 - RNA, 32 nt, Human
agcccaccauuucuccucaccugggccuucuc

SEQ ID NO: 316166 - RNA, 32 nt, Human
agcccacccccaaacagacacagcguagcccg

SEQ ID NO: 316167 - RNA, 22 nt, Human
agcccacccccagcuacauggg

SEQ ID NO: 316168 - RNA, 21 nt, Human
agcccacccccgcacccacua

SEQ ID NO: 316169 - RNA, 24 nt, Human
agcccaccccgcccccacugcagc

SEQ ID NO: 316170 - RNA, 19 nt, Human
agcccacccuccccgcacc

SEQ ID NO: 316171 - RNA, 32 nt, Human
agcccacccuccugcaaccucucacccgaaca

SEQ ID NO: 316172 - RNA, 32 nt, Human
agcccacccuccugcucaugagggcagacagg

SEQ ID NO: 316173 - RNA, 23 nt, Human
agcccacccuggauccugaggcg

SEQ ID NO: 316174 - RNA, 32 nt, Human
agcccacccuuuccucuccccacugccuccuc

SEQ ID NO: 316175 - RNA, 32 nt, Human
agcccaccuccccugcucuccuucccagcauu

SEQ ID NO: 316176 - RNA, 32 nt, Human
agcccaccugcaggaagagauuuggcuggguu

SEQ ID NO: 316177 - RNA, 32 nt, Human
agcccaccugcccuccccuuuuucgggacucu

SEQ ID NO: 316178 - RNA, 32 nt, Human
agcccaccuggguaccugacccccaggggaug

SEQ ID NO: 316179 - RNA, 32 nt, Human
agcccaccuguggcggagcgugccauccugcc

SEQ ID NO: 316180 - RNA, 32 nt, Human
agcccaccuucucuuuucacauaggagggaac

SEQ ID NO: 316181 - RNA, 20 nt, Human
agcccaccuugucucuugga

SEQ ID NO: 316182 - RNA, 32 nt, Human
agcccacgaggauggucacaugccaugugcag

SEQ ID NO: 316183 - RNA, 24 nt, Human
agcccacgaguucaaggcugcagu

SEQ ID NO: 316184 - RNA, 32 nt, Human
agcccacgaguucaaggcugcagugagucgug

SEQ ID NO: 316185 - RNA, 20 nt, Human
agcccacgcccacccccucc

SEQ ID NO: 316186 - RNA, 32 nt, Human
agcccacgccucuaaucccagcacuuugggag

SEQ ID NO: 316187 - RNA, 32 nt, Human
agcccacgucuguaaucccugcacuuugggag

SEQ ID NO: 316188 - RNA, 25 nt, Human
agcccacuaccucauaagcugcagu

SEQ ID NO: 316189 - RNA, 32 nt, Human
agcccacuaggcccccucccaaccccaguacc

SEQ ID NO: 316190 - RNA, 21 nt, Human
agcccacuauaggcccaggcg

SEQ ID NO: 316191 - RNA, 32 nt, Human
agcccacucauccuuuccccagcccucuucag

SEQ ID NO: 316192 - RNA, 32 nt, Human
agcccacuccaaugcaccaaucacagcucaug

SEQ ID NO: 316193 - RNA, 32 nt, Human
agcccacuccacccugccagcagcuuccagcc

SEQ ID NO: 316194 - RNA, 32 nt, Human
agcccacuccagccaggggagcagggaagaag

SEQ ID NO: 316195 - RNA, 23 nt, Human
agcccacucugcaaggcugcggu

SEQ ID NO: 316196 - RNA, 32 nt, Human
agcccacugcagccuccaacuccugggcucaa

SEQ ID NO: 316197 - RNA, 23 nt, Human
agcccacugcagccuccaccucc

SEQ ID NO: 316198 - RNA, 32 nt, Human
agcccacugcagccuccaccucccaggcucaa

SEQ ID NO: 316199 - RNA, 32 nt, Human
agcccacugcagcugccacaucccugagccua

SEQ ID NO: 316200 - RNA, 32 nt, Human
agcccacugcagcugccacaucccuggacaca

SEQ ID NO: 316201 - RNA, 32 nt, Human
agcccacugccuccugccugggguggccuggc

SEQ ID NO: 316202 - RNA, 32 nt, Human
agcccacugccuggaaagcccuucggagagcu

SEQ ID NO: 316203 - RNA, 32 nt, Human
agcccacugcggcugcucaagacccuggagcu

SEQ ID NO: 316204 - RNA, 32 nt, Human
agcccacugcucauuguauaagccccgaggcc

SEQ ID NO: 316205 - RNA, 32 nt, Human
agcccacugcuccccacugccccgcccuuucg

SEQ ID NO: 316206 - RNA, 32 nt, Human
agcccacugcugucagugcuuccaguuguaau

SEQ ID NO: 316207 - RNA, 32 nt, Human
agcccacuggggcucucaccuccacauguggg

SEQ ID NO: 316208 - RNA, 32 nt, Human
agcccacugggucuucagggugcacuggaagc

SEQ ID NO: 316209 - RNA, 32 nt, Human
agcccacugugucuccuuccccuaccugcaac

SEQ ID NO: 316210 - RNA, 32 nt, Human
agcccacuucgccugcucacagcccaucuggg

SEQ ID NO: 316211 - RNA, 32 nt, Human
agcccacuuuccccaucucaucacagauccag

SEQ ID NO: 316212 - RNA, 32 nt, Human
agcccacuuuccccaucucaucaccagugauu

SEQ ID NO: 316213 - RNA, 20 nt, Human
agcccagaaaguggcugcag

SEQ ID NO: 316214 - RNA, 32 nt, Human
agcccagaagaacacuuuucugccauuuaaaa

SEQ ID NO: 316215 - RNA, 32 nt, Human
agcccagaagagcaagauaaacuugaaaauaa

SEQ ID NO: 316216 - RNA, 24 nt, Human
agcccagaagcucaaggcugcagu

SEQ ID NO: 316217 - RNA, 24 nt, Human
agcccagaagcuugaagcugcagu

SEQ ID NO: 316218 - RNA, 32 nt, Human
agcccagaaggcagagguuguagugagcugag

SEQ ID NO: 316219 - RNA, 32 nt, Human
agcccagaaggccgcagugaggugagaucgcg

SEQ ID NO: 316220 - RNA, 23 nt, Human
agcccagaaggucgaggcugcag

SEQ ID NO: 316221 - RNA, 24 nt, Human
agcccagaaggucgaggcugcagu

SEQ ID NO: 316222 - RNA, 32 nt, Human
agcccagaaggucgaggcugcagugagcugag

SEQ ID NO: 316223 - RNA, 24 nt, Human
agcccagaagguugagacugcagu

SEQ ID NO: 316224 - RNA, 22 nt, Human
agcccagaaguucaaggcugca

SEQ ID NO: 316225 - RNA, 32 nt, Human
agcccagaaguucgagguugcagugagccaug

SEQ ID NO: 316226 - RNA, 23 nt, Human
agcccagaaguuugagccugggc

SEQ ID NO: 316227 - RNA, 22 nt, Human
agcccagaaguuugaggcugca

SEQ ID NO: 316228 - RNA, 22 nt, Human
agcccagaauucccaaaggcau

SEQ ID NO: 316229 - RNA, 32 nt, Human
agcccagacaccucacucuguuccgucuaagc

SEQ ID NO: 316230 - RNA, 32 nt, Human
agcccagacacucacagcccccugccagacca

SEQ ID NO: 316231 - RNA, 32 nt, Human
agcccagacagcugcaagucaccauggacgcu

SEQ ID NO: 316232 - RNA, 32 nt, Human
agcccagacaguuccagccacuaggaggccgu

SEQ ID NO: 316233 - RNA, 32 nt, Human
agcccagaccacaccugccacggucuuccagg

SEQ ID NO: 316234 - RNA, 32 nt, Human
agcccagaccacaugcaguuuucaugcgucau

SEQ ID NO: 316235 - RNA, 32 nt, Human
agcccagacucugcccuguugugcuggcagaa

SEQ ID NO: 316236 - RNA, 20 nt, Human
agcccagacugcccuggggc

SEQ ID NO: 316237 - RNA, 32 nt, Human
agcccagacuuugacaaacccaccucaacauc

SEQ ID NO: 316238 - RNA, 32 nt, Human
agcccagagagcuuagucaaagacgauaucac

SEQ ID NO: 316239 - RNA, 32 nt, Human
agcccagagaugcugcugcugccccugcugcu

SEQ ID NO: 316240 - RNA, 32 nt, Human
agcccagagcccaagauggagccccagcuggg

SEQ ID NO: 316241 - RNA, 32 nt, Human
agcccagagccugucuggaagggcugucugug

SEQ ID NO: 316242 - RNA, 20 nt, Human
agcccagagcugcugaggug

SEQ ID NO: 316243 - RNA, 32 nt, Human
agcccagaggcagccucagcuccagggcuaag

SEQ ID NO: 316244 - RNA, 32 nt, Human
agcccagaggcggagguugcagugagccgaga

SEQ ID NO: 316245 - RNA, 32 nt, Human
agcccagagggugggagccuaaggaagcgugg

SEQ ID NO: 316246 - RNA, 32 nt, Human
agcccagagguagaggcugcagugagccauga

SEQ ID NO: 316247 - RNA, 32 nt, Human
agcccagauggaccuggugccccugcgagguc

SEQ ID NO: 316248 - RNA, 24 nt, Human
agcccagauguuggagccacacca

SEQ ID NO: 316249 - RNA, 23 nt, Human
agcccagauugugccacugcacu

SEQ ID NO: 316250 - RNA, 32 nt, Human
agcccagcaaaugaucagccuugcaaauaauc

SEQ ID NO: 316251 - RNA, 24 nt, Human
agcccagcaacgggguccugaggc

SEQ ID NO: 316252 - RNA, 31 nt, Human
agcccagcaaugucugugcucaaggagcaaa

SEQ ID NO: 316253 - RNA, 25 nt, Human
agcccagcacaucacagccccauca

SEQ ID NO: 316254 - RNA, 32 nt, Human
agcccagcagaggccacuccacacccagcuuc

SEQ ID NO: 316255 - RNA, 32 nt, Human
agcccagcagagggcucuaugcacggguuuca

SEQ ID NO: 316256 - RNA, 32 nt, Human
agcccagcagaugccagcaccaugcuuccuau

SEQ ID NO: 316257 - RNA, 32 nt, Human
agcccagcagcuggcugggaucccauggggga

SEQ ID NO: 316258 - RNA, 32 nt, Human
agcccagcaggcagagguugcagugagcugag

SEQ ID NO: 316259 - RNA, 32 nt, Human
agcccagcaguuggaggcugcagugagcuaug

SEQ ID NO: 316260 - RNA, 32 nt, Human
agcccagccacuuucugaguguuguccugggg

SEQ ID NO: 316261 - RNA, 32 nt, Human
agcccagccagcaggagggacugaggcccucu

SEQ ID NO: 316262 - RNA, 31 nt, Human
agcccagccagcaucugacaugcugaauuca

SEQ ID NO: 316263 - RNA, 32 nt, Human
agcccagccagcccagccagcccagccagccc

SEQ ID NO: 316264 - RNA, 32 nt, Human
agcccagccagcccagccagcccggaggucau

SEQ ID NO: 316265 - RNA, 32 nt, Human
agcccagccagccccagacuccagugcaccag

SEQ ID NO: 316266 - RNA, 32 nt, Human
agcccagccagccucuacccaucccucccucc

SEQ ID NO: 316267 - RNA, 32 nt, Human
agcccagcccaggaguuugaggcugcaaugag

SEQ ID NO: 316268 - RNA, 32 nt, Human
agcccagccccaggaugugucgcaccagcagc

SEQ ID NO: 316269 - RNA, 32 nt, Human
agcccagccccucaggugcccccacacacagc

SEQ ID NO: 316270 - RNA, 32 nt, Human
agcccagccccuggcccugccucccgcgcccc

SEQ ID NO: 316271 - RNA, 32 nt, Human
agcccagcccuggaagguggaaaaagaaaagu

SEQ ID NO: 316272 - RNA, 24 nt, Human
agcccagcccugugcccccgcuga

SEQ ID NO: 316273 - RNA, 32 nt, Human
agcccagccuaggaaagaggcagcagucucag

SEQ ID NO: 316274 - RNA, 24 nt, Human
agcccagccuaggcaacauagcga

SEQ ID NO: 316275 - RNA, 17 nt, Human
agcccagccuccccccu

SEQ ID NO: 316276 - RNA, 32 nt, Human
agcccagccugaccaauauggugaaaccccgu

SEQ ID NO: 316277 - RNA, 17 nt, Human
agcccagccugcccccu

SEQ ID NO: 316278 - RNA, 32 nt, Human
agcccagccugccucaucccaccccaaugcuu

SEQ ID NO: 316279 - RNA, 32 nt, Human
agcccagccugggaacacagaugccccgcggg

SEQ ID NO: 316280 - RNA, 17 nt, Human
agcccagcguggccccu

SEQ ID NO: 316281 - RNA, 32 nt, Human
agcccagcucaagcuucaucuuccucaaaaug

SEQ ID NO: 316282 - RNA, 32 nt, Human
agcccagcuccugguggccccagugggacuga

SEQ ID NO: 316283 - RNA, 18 nt, Human
agcccagcucugucaccu

SEQ ID NO: 316284 - RNA, 21 nt, Human
agcccagcucuugcugugcca

SEQ ID NO: 316285 - RNA, 32 nt, Human
agcccagcugagucagaaagguugugaccuga

SEQ ID NO: 316286 - RNA, 32 nt, Human
agcccagcuggagggcccgaggcugcagggug

SEQ ID NO: 316287 - RNA, 32 nt, Human
agcccaggaaaagaugucuggaguuaaggaag

SEQ ID NO: 316288 - RNA, 21 nt, Human
agcccaggaaaggccugaagg

SEQ ID NO: 316289 - RNA, 24 nt, Human
agcccaggaaauugaggcugcagu

SEQ ID NO: 316290 - RNA, 32 nt, Human
agcccaggaaauugaggcugcagugagccaug

SEQ ID NO: 316291 - RNA, 24 nt, Human
agcccaggaaauuggggcugcagu

SEQ ID NO: 316292 - RNA, 16 nt, Human
agcccaggaacccccc

SEQ ID NO: 316293 - RNA, 18 nt, Human
agcccaggaacugaggcg

SEQ ID NO: 316294 - RNA, 24 nt, Human
agcccaggaagcagagguugcagu

SEQ ID NO: 316295 - RNA, 32 nt, Human
agcccaggaagcagagguugcagugagccucg

SEQ ID NO: 316296 - RNA, 21 nt, Human
agcccaggaagccacuccagu

SEQ ID NO: 316297 - RNA, 32 nt, Human
agcccaggaagccucaguuggccaaagugcua

SEQ ID NO: 316298 - RNA, 24 nt, Human
agcccaggaagcggaggcugcagu

SEQ ID NO: 316299 - RNA, 32 nt, Human
agcccaggaagcggagguuacagugagcugau

SEQ ID NO: 316300 - RNA, 22 nt, Human
agcccaggaagcggagguugca

SEQ ID NO: 316301 - RNA, 32 nt, Human
agcccaggaagcggagguugcaaugagccgag

SEQ ID NO: 316302 - RNA, 32 nt, Human
agcccaggaagguuagauguguuugcaaauaa

SEQ ID NO: 316303 - RNA, 24 nt, Human
agcccaggaagucaaggcugcagu

SEQ ID NO: 316304 - RNA, 32 nt, Human
agcccaggaagucaaggcugcagugagcugug

SEQ ID NO: 316305 - RNA, 24 nt, Human
agcccaggaaguggaggcugcagu

SEQ ID NO: 316306 - RNA, 32 nt, Human
agcccaggaaguggaggcugcagugaccuaug

SEQ ID NO: 316307 - RNA, 24 nt, Human
agcccaggaaguggagguugcagu

SEQ ID NO: 316308 - RNA, 26 nt, Human
agcccaggaaguggagguugcaguga

SEQ ID NO: 316309 - RNA, 32 nt, Human
agcccaggaaguggagguugcagugagcagag

SEQ ID NO: 316310 - RNA, 24 nt, Human
agcccaggaaguugaggcugcagu

SEQ ID NO: 316311 - RNA, 32 nt, Human
agcccaggaaguugaggcugcagugagcugug

SEQ ID NO: 316312 - RNA, 24 nt, Human
agcccaggaauucaaggcugcagu

SEQ ID NO: 316313 - RNA, 24 nt, Human
agcccaggaauuggaggcugcagu

SEQ ID NO: 316314 - RNA, 32 nt, Human
agcccaggaauuggaggcugcagugagcuaug

SEQ ID NO: 316315 - RNA, 23 nt, Human
agcccaggaauuugaggcugcag

SEQ ID NO: 316316 - RNA, 32 nt, Human
agcccaggaauuugaggcugcagugagcuauu

SEQ ID NO: 316317 - RNA, 32 nt, Human
agcccaggacacugccuuugcugccuucuguc

SEQ ID NO: 316318 - RNA, 24 nt, Human
agcccaggacaucgaggcugcggu

SEQ ID NO: 316319 - RNA, 17 nt, Human
agcccaggacccaggag

SEQ ID NO: 316320 - RNA, 20 nt, Human
agcccaggacugcccgggcg

SEQ ID NO: 316321 - RNA, 22 nt, Human
agcccaggacuucgaggcugca

SEQ ID NO: 316322 - RNA, 32 nt, Human
agcccaggagacagagguugcagugagccaag

SEQ ID NO: 316323 - RNA, 32 nt, Human
agcccaggagaugcaggcuugcagugagccau

SEQ ID NO: 316324 - RNA, 24 nt, Human
agcccaggagauggagguugcagu

SEQ ID NO: 316325 - RNA, 26 nt, Human
agcccaggagauggagguugcaguga

SEQ ID NO: 316326 - RNA, 24 nt, Human
agcccaggagauuaagacuguagu

SEQ ID NO: 316327 - RNA, 24 nt, Human
agcccaggagauugaggcugcagu

SEQ ID NO: 316328 - RNA, 32 nt, Human
agcccaggagauugaggcugcagugagcauga

SEQ ID NO: 316329 - RNA, 32 nt, Human
agcccaggagauugaggcugcagugagccaug

SEQ ID NO: 316330 - RNA, 32 nt, Human
agcccaggagccaccagaucucccaacaccau

SEQ ID NO: 316331 - RNA, 32 nt, Human
agcccaggagccagggggugacugggguggcu

SEQ ID NO: 316332 - RNA, 17 nt, Human
agcccaggagccccccu

SEQ ID NO: 316333 - RNA, 32 nt, Human
agcccaggagccucucugaaggaccagucugg

SEQ ID NO: 316334 - RNA, 19 nt, Human
agcccaggagccugagggg

SEQ ID NO: 316335 - RNA, 32 nt, Human
agcccaggagcgguggcucacacuuguaaucc

SEQ ID NO: 316336 - RNA, 24 nt, Human
agcccaggagcucaagauugcagu

SEQ ID NO: 316337 - RNA, 32 nt, Human
agcccaggagcucaagauugcagugagcuaug

SEQ ID NO: 316338 - RNA, 17 nt, Human
agcccaggagcuccccu

SEQ ID NO: 316339 - RNA, 32 nt, Human
agcccaggagcuggaggcugcagugaacuaug

SEQ ID NO: 316340 - RNA, 24 nt, Human
agcccaggaggaggaggcugcagu

SEQ ID NO: 316341 - RNA, 32 nt, Human
agcccaggaggaggaggcugcagugagcuaag

SEQ ID NO: 316342 - RNA, 24 nt, Human
agcccaggaggcacaggcugcagu

SEQ ID NO: 316343 - RNA, 32 nt, Human
agcccaggaggcacaggcugcagugagcagag

SEQ ID NO: 316344 - RNA, 32 nt, Human
agcccaggaggcagaauuugcagugagcugag

SEQ ID NO: 316345 - RNA, 24 nt, Human
agcccaggaggcagaggcugcagu

SEQ ID NO: 316346 - RNA, 32 nt, Human
agcccaggaggcagaggcugcagugagccaug

SEQ ID NO: 316347 - RNA, 32 nt, Human
agcccaggaggcagaggcugcagugagccgag

SEQ ID NO: 316348 - RNA, 24 nt, Human
agcccaggaggcagagguugcagu

SEQ ID NO: 316349 - RNA, 32 nt, Human
agcccaggaggcagagguugcaguaagccgag

SEQ ID NO: 316350 - RNA, 32 nt, Human
agcccaggaggcagagguugcagugagccaag

SEQ ID NO: 316351 - RNA, 32 nt, Human
agcccaggaggccaagguugcagugggcccag

SEQ ID NO: 316352 - RNA, 24 nt, Human
agcccaggaggccaagucugcagu

SEQ ID NO: 316353 - RNA, 32 nt, Human
agcccaggaggccaagucugcagugagcuaug

SEQ ID NO: 316354 - RNA, 24 nt, Human
agcccaggaggcggagauugcagu

SEQ ID NO: 316355 - RNA, 26 nt, Human
agcccaggaggcggagauugcaguga

SEQ ID NO: 316356 - RNA, 32 nt, Human
agcccaggaggcggagauugcagugagccgag

SEQ ID NO: 316357 - RNA, 32 nt, Human
agcccaggaggcggagcuugcagugagucgag

SEQ ID NO: 316358 - RNA, 24 nt, Human
agcccaggaggcggaggcugcagu

SEQ ID NO: 316359 - RNA, 32 nt, Human
agcccaggaggcggaggcugcagugagcugag

SEQ ID NO: 316360 - RNA, 24 nt, Human
agcccaggaggcggagguugcagu

SEQ ID NO: 316361 - RNA, 32 nt, Human
agcccaggaggcggagguugcagugagcugag

SEQ ID NO: 316362 - RNA, 26 nt, Human
agcccaggaggcggagguugcgguga

SEQ ID NO: 316363 - RNA, 18 nt, Human
agcccaggaggcugaggc

SEQ ID NO: 316364 - RNA, 22 nt, Human
agcccaggaggcugaggcugca

SEQ ID NO: 316365 - RNA, 32 nt, Human
agcccaggaggucaagacugcagugagcuaug

SEQ ID NO: 316366 - RNA, 32 nt, Human
agcccaggaggucaaggcuacagugagccgug

SEQ ID NO: 316367 - RNA, 24 nt, Human
agcccaggaggucaaggcugaagu

SEQ ID NO: 316368 - RNA, 24 nt, Human
agcccaggaggucaaggcugcagu

SEQ ID NO: 316369 - RNA, 32 nt, Human
agcccaggaggucaaggcugcagugagccgug

SEQ ID NO: 316370 - RNA, 32 nt, Human
agcccaggaggucaaggcugcagugagcugca

SEQ ID NO: 316371 - RNA, 32 nt, Human
agcccaggaggucaaggcugcagugagcugug

SEQ ID NO: 316372 - RNA, 32 nt, Human
agcccaggaggucaaggcugcagugagcuuug

SEQ ID NO: 316373 - RNA, 24 nt, Human
agcccaggaggucaaggguacagu

SEQ ID NO: 316374 - RNA, 32 nt, Human
agcccaggaggucaaggguacagugagccgag

SEQ ID NO: 316375 - RNA, 24 nt, Human
agcccaggaggucagggcugcagu

SEQ ID NO: 316376 - RNA, 32 nt, Human
agcccaggaggucagggcugcagugagccgag

SEQ ID NO: 316377 - RNA, 32 nt, Human
agcccaggaggucgaagcugcagugagguaug

SEQ ID NO: 316378 - RNA, 24 nt, Human
agcccaggaggucgaggcugcagu

SEQ ID NO: 316379 - RNA, 32 nt, Human
agcccaggaggucgaggcugcagugagccaug

SEQ ID NO: 316380 - RNA, 32 nt, Human
agcccaggaggucgaggcugcagugagcccug

SEQ ID NO: 316381 - RNA, 32 nt, Human
agcccaggaggucgaggcugcagugagcuaug

SEQ ID NO: 316382 - RNA, 32 nt, Human
agcccaggaggucgaggcugcagugagcugug

SEQ ID NO: 316383 - RNA, 32 nt, Human
agcccaggaggucgagguugcagugagcagua

SEQ ID NO: 316384 - RNA, 24 nt, Human
agcccaggaggucuaggcugcagu

SEQ ID NO: 316385 - RNA, 32 nt, Human
agcccaggaggucuaggcugcagugagcuuau

SEQ ID NO: 316386 - RNA, 23 nt, Human
agcccaggagguggaaacugcag

SEQ ID NO: 316387 - RNA, 32 nt, Human
agcccaggagguggaaacugcagagagucaug

SEQ ID NO: 316388 - RNA, 22 nt, Human
agcccaggagguggaggcugca

SEQ ID NO: 316389 - RNA, 32 nt, Human
agcccaggagguggaggcugcaaugagcugag

SEQ ID NO: 316390 - RNA, 24 nt, Human
agcccaggagguggaggcugcagu

SEQ ID NO: 316391 - RNA, 26 nt, Human
agcccaggagguggaggcugcaguga

SEQ ID NO: 316392 - RNA, 32 nt, Human
agcccaggagguggaggcugcagugagccaug

SEQ ID NO: 316393 - RNA, 32 nt, Human
agcccaggagguggagguugcaaugagccgag

SEQ ID NO: 316394 - RNA, 26 nt, Human
agcccaggagguggagguugcacuga

SEQ ID NO: 316395 - RNA, 32 nt, Human
agcccaggagguggagguugcacugagcggag

SEQ ID NO: 316396 - RNA, 24 nt, Human
agcccaggagguggagguugcagu

SEQ ID NO: 316397 - RNA, 26 nt, Human
agcccaggagguggagguugcaguga

SEQ ID NO: 316398 - RNA, 32 nt, Human
agcccaggagguggagguugcagugagcagag

SEQ ID NO: 316399 - RNA, 32 nt, Human
agcccaggagguggagguugcagugagccaag

SEQ ID NO: 316400 - RNA, 32 nt, Human
agcccaggagguggagguugcagugagccaug

SEQ ID NO: 316401 - RNA, 32 nt, Human
agcccaggagguggagguugcagugagccgag

SEQ ID NO: 316402 - RNA, 32 nt, Human
agcccaggagguggagguugcagugagcggag

SEQ ID NO: 316403 - RNA, 32 nt, Human
agcccaggagguggagguugcagugagcugag

SEQ ID NO: 316404 - RNA, 32 nt, Human
agcccaggagguggagguuucagcgagcugag

SEQ ID NO: 316405 - RNA, 32 nt, Human
agcccaggagguugagaaugcagugagcuugu

SEQ ID NO: 316406 - RNA, 24 nt, Human
agcccaggagguugaggcugcagu

SEQ ID NO: 316407 - RNA, 32 nt, Human
agcccaggagguugaggcugcagugaacuaag

SEQ ID NO: 316408 - RNA, 32 nt, Human
agcccaggagguugaggcugcagugagcagag

SEQ ID NO: 316409 - RNA, 32 nt, Human
agcccaggagguugaggcugcagugagccaug

SEQ ID NO: 316410 - RNA, 32 nt, Human
agcccaggagguugaggcugcagugagcuaug

SEQ ID NO: 316411 - RNA, 32 nt, Human
agcccaggagguugaggcugcagugagguaug

SEQ ID NO: 316412 - RNA, 32 nt, Human
agcccaggagguugaggcugcagugaggugug

SEQ ID NO: 316413 - RNA, 32 nt, Human
agcccaggagguugaggcugcagugaguucua

SEQ ID NO: 316414 - RNA, 32 nt, Human
agcccaggagguuguggauacagugaguuaug

SEQ ID NO: 316415 - RNA, 23 nt, Human
agcccaggagguuguggcugcag

SEQ ID NO: 316416 - RNA, 32 nt, Human
agcccaggagguuguggcugcagugagcugug

SEQ ID NO: 316417 - RNA, 22 nt, Human
agcccaggaguccagccugggc

SEQ ID NO: 316418 - RNA, 18 nt, Human
agcccaggagucugaggc

SEQ ID NO: 316419 - RNA, 32 nt, Human
agcccaggagucuugagaccagccugggcaac

SEQ ID NO: 316420 - RNA, 25 nt, Human
agcccaggaguuaagaggcugcagu

SEQ ID NO: 316421 - RNA, 32 nt, Human
agcccaggaguuaagaggcugcagugaccgau

SEQ ID NO: 316422 - RNA, 22 nt, Human
agcccaggaguucaaagcugca

SEQ ID NO: 316423 - RNA, 24 nt, Human
agcccaggaguucaaagcugcagu

SEQ ID NO: 316424 - RNA, 32 nt, Human
agcccaggaguucaaagcugcagugagucaug

SEQ ID NO: 316425 - RNA, 24 nt, Human
agcccaggaguucaaagcuguagu

SEQ ID NO: 316426 - RNA, 32 nt, Human
agcccaggaguucaagaccacccugggcaaca

SEQ ID NO: 316427 - RNA, 22 nt, Human
agcccaggaguucaaggcugca

SEQ ID NO: 316428 - RNA, 24 nt, Human
agcccaggaguucaaggcugcagu

SEQ ID NO: 316429 - RNA, 32 nt, Human
agcccaggaguucaaggcugcgguggucguga

SEQ ID NO: 316430 - RNA, 24 nt, Human
agcccaggaguucaaggcuucagu

SEQ ID NO: 316431 - RNA, 31 nt, Human
agcccaggaguucaauaccugucugggaaac

SEQ ID NO: 316432 - RNA, 24 nt, Human
agcccaggaguucagggcugcagu

SEQ ID NO: 316433 - RNA, 32 nt, Human
agcccaggaguucagggcugcagugagccuug

SEQ ID NO: 316434 - RNA, 32 nt, Human
agcccaggaguucagggcugcagugagguacg

SEQ ID NO: 316435 - RNA, 23 nt, Human
agcccaggaguucgaagcugcag

SEQ ID NO: 316436 - RNA, 32 nt, Human
agcccaggaguucgagaccacccugggcaaca

SEQ ID NO: 316437 - RNA, 23 nt, Human
agcccaggaguucgaggcugcag

SEQ ID NO: 316438 - RNA, 24 nt, Human
agcccaggaguucgaggcugcagu

SEQ ID NO: 316439 - RNA, 32 nt, Human
agcccaggaguucgaggcugcagugagcuaug

SEQ ID NO: 316440 - RNA, 24 nt, Human
agcccaggaguucgagguuacagu

SEQ ID NO: 316441 - RNA, 32 nt, Human
agcccaggaguucgagguuacagugaacuaug

SEQ ID NO: 316442 - RNA, 32 nt, Human
agcccaggaguucgggguuacagugagcugug

SEQ ID NO: 316443 - RNA, 24 nt, Human
agcccaggaguuggaggccgcagu

SEQ ID NO: 316444 - RNA, 32 nt, Human
agcccaggaguuggaggccgcagugagcugug

SEQ ID NO: 316445 - RNA, 24 nt, Human
agcccaggaguuggaggcuacagu

SEQ ID NO: 316446 - RNA, 24 nt, Human
agcccaggaguuuaaggcugcagu

SEQ ID NO: 316447 - RNA, 32 nt, Human
agcccaggaguuuaaggcugcagugagcuaug

SEQ ID NO: 316448 - RNA, 32 nt, Human
agcccaggaguuuaaggcugcagugagcuugg

SEQ ID NO: 316449 - RNA, 24 nt, Human
agcccaggaguuugaagcugcagu

SEQ ID NO: 316450 - RNA, 32 nt, Human
agcccaggaguuugaagcugcagugagcuaug

SEQ ID NO: 316451 - RNA, 24 nt, Human
agcccaggaguuugagacuacagu

SEQ ID NO: 316452 - RNA, 24 nt, Human
agcccaggaguuugagacuguagu

SEQ ID NO: 316453 - RNA, 32 nt, Human
agcccaggaguuugagaucagccuggucaaca

SEQ ID NO: 316454 - RNA, 32 nt, Human
agcccaggaguuugaggaugcagugagcuaug

SEQ ID NO: 316455 - RNA, 24 nt, Human
agcccaggaguuugaggcuacagu

SEQ ID NO: 316456 - RNA, 32 nt, Human
agcccaggaguuugaggcuacagugagcugug

SEQ ID NO: 316457 - RNA, 24 nt, Human
agcccaggaguuugaggcuccagu

SEQ ID NO: 316458 - RNA, 22 nt, Human
agcccaggaguuugaggcugca

SEQ ID NO: 316459 - RNA, 23 nt, Human
agcccaggaguuugaggcugcag

SEQ ID NO: 316460 - RNA, 24 nt, Human
agcccaggaguuugaggcugcagu

SEQ ID NO: 316461 - RNA, 32 nt, Human
agcccaggaguuugaggcugcagugagccaug

SEQ ID NO: 316462 - RNA, 32 nt, Human
agcccaggaguuugaggcugcagugagcuaug

SEQ ID NO: 316463 - RNA, 32 nt, Human
agcccaggaguuugaggcugcagugagcuauu

SEQ ID NO: 316464 - RNA, 32 nt, Human
agcccaggaguuugaggcugcagugagcugug

SEQ ID NO: 316465 - RNA, 32 nt, Human
agcccaggaguuugaggcugcagugaguuaug

SEQ ID NO: 316466 - RNA, 24 nt, Human
agcccaggaguuugaggcugcggu

SEQ ID NO: 316467 - RNA, 24 nt, Human
agcccaggaguuugagguugcagu

SEQ ID NO: 316468 - RNA, 32 nt, Human
agcccaggaguuugagguugcagugagcugau

SEQ ID NO: 316469 - RNA, 32 nt, Human
agcccaggaguuugagguugcagugagcugug

SEQ ID NO: 316470 - RNA, 17 nt, Human
agcccaggaucuguccc

SEQ ID NO: 316471 - RNA, 32 nt, Human
agcccaggaugcagagguugaagugagccaag

SEQ ID NO: 316472 - RNA, 32 nt, Human
agcccaggauggagguggcggucgcggcggcg

SEQ ID NO: 316473 - RNA, 32 nt, Human
agcccaggauuucaaguccagccugggcuaca

SEQ ID NO: 316474 - RNA, 32 nt, Human
agcccaggcaaggagagcaggagccagcguga

SEQ ID NO: 316475 - RNA, 21 nt, Human
agcccaggcacugcugagggg

SEQ ID NO: 316476 - RNA, 20 nt, Human
agcccaggcagccugaaggc

SEQ ID NO: 316477 - RNA, 21 nt, Human
agcccaggcaugagcucuggc

SEQ ID NO: 316478 - RNA, 18 nt, Human
agcccaggcaugguggug

SEQ ID NO: 316479 - RNA, 21 nt, Human
agcccaggccaaagagaaggc

SEQ ID NO: 316480 - RNA, 22 nt, Human
agcccaggcccagcauaaaggc

SEQ ID NO: 316481 - RNA, 32 nt, Human
agcccaggcccaggugcaggugcccaggucau

SEQ ID NO: 316482 - RNA, 21 nt, Human
agcccaggcccccucccuccc

SEQ ID NO: 316483 - RNA, 20 nt, Human
agcccaggccccgggcugca

SEQ ID NO: 316484 - RNA, 17 nt, Human
agcccaggccucccucu

SEQ ID NO: 316485 - RNA, 30 nt, Human
agcccaggccuccuugagcuccuguagccu

SEQ ID NO: 316486 - RNA, 21 nt, Human
agcccaggccuggugucugca

SEQ ID NO: 316487 - RNA, 16 nt, Human
agcccaggccuucccc

SEQ ID NO: 316488 - RNA, 18 nt, Human
agcccaggcgcccagcca

SEQ ID NO: 316489 - RNA, 18 nt, Human
agcccaggcggguccccu

SEQ ID NO: 316490 - RNA, 18 nt, Human
agcccaggcgguugaggc

SEQ ID NO: 316491 - RNA, 32 nt, Human
agcccaggcgguugaggcugcagugagccaug

SEQ ID NO: 316492 - RNA, 19 nt, Human
agcccaggcguccgcggcg

SEQ ID NO: 316493 - RNA, 22 nt, Human
agcccaggcugcccgacugcag

SEQ ID NO: 316494 - RNA, 32 nt, Human
agcccaggcugcugccaacagcgcccagccca

SEQ ID NO: 316495 - RNA, 32 nt, Human
agcccaggcuggagcaggaggcauuucaacuc

SEQ ID NO: 316496 - RNA, 17 nt, Human
agcccaggcuucugagg

SEQ ID NO: 316497 - RNA, 32 nt, Human
agcccaggcuuucaggcgaccucugcccuccc

SEQ ID NO: 316498 - RNA, 32 nt, Human
agcccagggaaaggcccagugacaggugugga

SEQ ID NO: 316499 - RNA, 32 nt, Human
agcccagggaaaggcccaguggcagguguggg

SEQ ID NO: 316500 - RNA, 32 nt, Human
agcccagggaagggaagggaccggucguggaa

SEQ ID NO: 316501 - RNA, 23 nt, Human
agcccagggacauccaagagcac

SEQ ID NO: 316502 - RNA, 17 nt, Human
agcccagggaccccccu

SEQ ID NO: 316503 - RNA, 32 nt, Human
agcccagggagccccgggaccccugguccagg

SEQ ID NO: 316504 - RNA, 32 nt, Human
agcccagggaggcagagguugcuguaaguuga

SEQ ID NO: 316505 - RNA, 32 nt, Human
agcccagggaggucaaggcugcagugagcaau

SEQ ID NO: 316506 - RNA, 21 nt, Human
agcccagggagucccagaggc

SEQ ID NO: 316507 - RNA, 32 nt, Human
agcccagggaugcaaagguugcagugaguuga

SEQ ID NO: 316508 - RNA, 22 nt, Human
agcccagggaugcccccaggcg

SEQ ID NO: 316509 - RNA, 19 nt, Human
agcccagggaugcugaggc

SEQ ID NO: 316510 - RNA, 24 nt, Human
agcccagggaugugacagcugcag

SEQ ID NO: 316511 - RNA, 24 nt, Human
agcccagggauguggcagcugcag

SEQ ID NO: 316512 - RNA, 32 nt, Human
agcccagggcaagaggaugcggguguccugag

SEQ ID NO: 316513 - RNA, 17 nt, Human
agcccagggcagccccu

SEQ ID NO: 316514 - RNA, 21 nt, Human
agcccagggcagccccugggc

SEQ ID NO: 316515 - RNA, 21 nt, Human
agcccagggcaugaagcccaa

SEQ ID NO: 316516 - RNA, 20 nt, Human
agcccagggccgcugagccg

SEQ ID NO: 316517 - RNA, 24 nt, Human
agcccagggcgcacggccugaggc

SEQ ID NO: 316518 - RNA, 19 nt, Human
agcccagggcucucugggc

SEQ ID NO: 316519 - RNA, 31 nt, Human
agcccagggcucucugggcagcugaugucug

SEQ ID NO: 316520 - RNA, 21 nt, Human
agcccagggcuggccugaagc

SEQ ID NO: 316521 - RNA, 32 nt, Human
agcccagggcugggggcugcuugucugcuauc

SEQ ID NO: 316522 - RNA, 32 nt, Human
agcccagggcuucagucuuccuuuauuuauaa

SEQ ID NO: 316523 - RNA, 21 nt, Human
agcccaggggccagccuaggc

SEQ ID NO: 316524 - RNA, 32 nt, Human
agcccaggggcugagcguuccuaggcgguuuc

SEQ ID NO: 316525 - RNA, 22 nt, Human
agcccagggggcaaggacacag

SEQ ID NO: 316526 - RNA, 22 nt, Human
agcccagggguaaaggcugaag

SEQ ID NO: 316527 - RNA, 24 nt, Human
agcccagggguucacagcugcagu

SEQ ID NO: 316528 - RNA, 32 nt, Human
agcccagggguuugaggcugcagugagccaca

SEQ ID NO: 316529 - RNA, 32 nt, Human
agcccagggguuugcggcugcagugagcugug

SEQ ID NO: 316530 - RNA, 22 nt, Human
agcccaggguaaaggcagcagu

SEQ ID NO: 316531 - RNA, 32 nt, Human
agcccaggguggcagagcuguggugcaggguu

SEQ ID NO: 316532 - RNA, 23 nt, Human
agcccagguaaguccuacugcag

SEQ ID NO: 316533 - RNA, 18 nt, Human
agcccagguacaugaggc

SEQ ID NO: 316534 - RNA, 23 nt, Human
agcccagguacccaggcccgggc

SEQ ID NO: 316535 - RNA, 32 nt, Human
agcccagguaggggcaggauggagggcugagc

SEQ ID NO: 316536 - RNA, 21 nt, Human
agcccagguauuaucaugcag

SEQ ID NO: 316537 - RNA, 23 nt, Human
agcccagguccagcccugcgcag

SEQ ID NO: 316538 - RNA, 22 nt, Human
agcccagguccaggcccgccag

SEQ ID NO: 316539 - RNA, 22 nt, Human
agcccaggucccccacugucag

SEQ ID NO: 316540 - RNA, 20 nt, Human
agcccaggucccugccuccu

SEQ ID NO: 316541 - RNA, 28 nt, Human
agcccagguccugcugccucucuuucac

SEQ ID NO: 316542 - RNA, 18 nt, Human
agcccagguccuggcugc

SEQ ID NO: 316543 - RNA, 21 nt, Human
agcccaggucuccagcuggag

SEQ ID NO: 316544 - RNA, 18 nt, Human
agcccaggucuccugggc

SEQ ID NO: 316545 - RNA, 32 nt, Human
agcccaggucugcacucgccuggaucaccuuc

SEQ ID NO: 316546 - RNA, 19 nt, Human
agcccaggucugcaugcug

SEQ ID NO: 316547 - RNA, 27 nt, Human
agcccaggucuggugcaacugcugcag

SEQ ID NO: 316548 - RNA, 21 nt, Human
agcccaggugaacaagcucag

SEQ ID NO: 316549 - RNA, 32 nt, Human
agcccaggugcacugcucacacccccaccugc

SEQ ID NO: 316550 - RNA, 22 nt, Human
agcccaggugccagccugaggc

SEQ ID NO: 316551 - RNA, 19 nt, Human
agcccaggugcccggaagc

SEQ ID NO: 316552 - RNA, 19 nt, Human
agcccaggugcgccagagc

SEQ ID NO: 316553 - RNA, 19 nt, Human
agcccagguggcacacgcc

SEQ ID NO: 316554 - RNA, 18 nt, Human
agcccagguggggcaggc

SEQ ID NO: 316555 - RNA, 22 nt, Human
agcccagguuccucuguaagcg

SEQ ID NO: 316556 - RNA, 32 nt, Human
agcccaguaggaggggcaggaggccgacacac

SEQ ID NO: 316557 - RNA, 24 nt, Human
agcccaguaggucgaggcugcagu

SEQ ID NO: 316558 - RNA, 32 nt, Human
agcccaguaggucgaggcugcagugagcugug

SEQ ID NO: 316559 - RNA, 32 nt, Human
agcccagucuggagugcagugguacaauaaug

SEQ ID NO: 316560 - RNA, 32 nt, Human
agcccagugaaacugaucguugacuucuggac

SEQ ID NO: 316561 - RNA, 32 nt, Human
agcccagugaagccucugagggauugaggggc

SEQ ID NO: 316562 - RNA, 32 nt, Human
agcccagugacacuuagccccugggacaauga

SEQ ID NO: 316563 - RNA, 32 nt, Human
agcccagugcagcucacugacaggguugacau

SEQ ID NO: 316564 - RNA, 32 nt, Human
agcccagugccagaaaccagcacuccaugaag

SEQ ID NO: 316565 - RNA, 32 nt, Human
agcccagugccagaggacagacagguucaaaa

SEQ ID NO: 316566 - RNA, 17 nt, Human
agcccagugccuccccu

SEQ ID NO: 316567 - RNA, 32 nt, Human
agcccagugccuccccuccaccccuaaagaau

SEQ ID NO: 316568 - RNA, 32 nt, Human
agcccagugcugucccggaacccccugcagcu

SEQ ID NO: 316569 - RNA, 22 nt, Human
agcccaguggcccucugagcug

SEQ ID NO: 316570 - RNA, 32 nt, Human
agcccagugggacuucagagauguggggucca

SEQ ID NO: 316571 - RNA, 32 nt, Human
agcccagugggugggaggaaggaugagggccc

SEQ ID NO: 316572 - RNA, 32 nt, Human
agcccaguuagcaaggugccgggucacccugc

SEQ ID NO: 316573 - RNA, 21 nt, Human
agcccaguucaaggcugcagu

SEQ ID NO: 316574 - RNA, 32 nt, Human
agcccaguucucucuuauuuucagcuuuacag

SEQ ID NO: 316575 - RNA, 20 nt, Human
agcccaguugcuguaucuga

SEQ ID NO: 316576 - RNA, 32 nt, Human
agcccaguuguccucgcccacaggguccugca

SEQ ID NO: 316577 - RNA, 32 nt, Human
agcccaguuucaaacuccugaccucaggugau

SEQ ID NO: 316578 - RNA, 32 nt, Human
agcccauaaccucccuguuccuagucacacau

SEQ ID NO: 316579 - RNA, 32 nt, Human
agcccauaagcacgugggcugaucuuguugga

SEQ ID NO: 316580 - RNA, 24 nt, Human
agcccauaaucccagcacuuuggg

SEQ ID NO: 316581 - RNA, 32 nt, Human
agcccauacccaggcuggcuccuggggcgacg

SEQ ID NO: 316582 - RNA, 32 nt, Human
agcccauaccucaccccugccuggugaggaug

SEQ ID NO: 316583 - RNA, 32 nt, Human
agcccaucaauaaaacuauugcaccuguccug

SEQ ID NO: 316584 - RNA, 32 nt, Human
agcccauccaccaauccucaccucucaccucu

SEQ ID NO: 316585 - RNA, 32 nt, Human
agcccauccagaggaacccgggaaugcccagg

SEQ ID NO: 316586 - RNA, 32 nt, Human
agcccauccagagguucccacaguucauacuc

SEQ ID NO: 316587 - RNA, 19 nt, Human
agcccaucccagcuacuug

SEQ ID NO: 316588 - RNA, 32 nt, Human
agcccaucccuggauuuccaccaggaguuacu

SEQ ID NO: 316589 - RNA, 19 nt, Human
agcccauccgcuugucccc

SEQ ID NO: 316590 - RNA, 22 nt, Human
agcccauccucugcagaaacag

SEQ ID NO: 316591 - RNA, 16 nt, Human
agcccauccugucccc

SEQ ID NO: 316592 - RNA, 32 nt, Human
agcccauccuuuccuuccguccuucugaaacc

SEQ ID NO: 316593 - RNA, 32 nt, Human
agcccaucuauuuccacacccagugagcauug

SEQ ID NO: 316594 - RNA, 32 nt, Human
agcccaucucacugcauucccuggcugcccga

SEQ ID NO: 316595 - RNA, 32 nt, Human
agcccaucucuagcacaccuugaccccaggaa

SEQ ID NO: 316596 - RNA, 32 nt, Human
agcccaucucucucagcugaauacuaagcuca

SEQ ID NO: 316597 - RNA, 21 nt, Human
agcccaucugccucaacuccu

SEQ ID NO: 316598 - RNA, 32 nt, Human
agcccaucuggcugcugaucugcuaucaccug

SEQ ID NO: 316599 - RNA, 32 nt, Human
agcccaucuucagaggagggccaaguguccau

SEQ ID NO: 316600 - RNA, 23 nt, Human
agcccaugaagucaggcugcagu

SEQ ID NO: 316601 - RNA, 32 nt, Human
agcccaugaagucaggcugcagugagcuguga

SEQ ID NO: 316602 - RNA, 32 nt, Human
agcccaugaggcccagguuacagugagccaag

SEQ ID NO: 316603 - RNA, 32 nt, Human
agcccaugagggugcgcagagcagggcuggca

SEQ ID NO: 316604 - RNA, 32 nt, Human
agcccaugagguggaggcuacaguggcuguga

SEQ ID NO: 316605 - RNA, 32 nt, Human
agcccaugaguucaaggcugcagugagucgug

SEQ ID NO: 316606 - RNA, 32 nt, Human
agcccaugccaaccccuccuggagccagccga

SEQ ID NO: 316607 - RNA, 32 nt, Human
agcccaugccauuaccuccugcuuccuuauca

SEQ ID NO: 316608 - RNA, 32 nt, Human
agcccaugcccagcuaauuuuguauuuuuagu

SEQ ID NO: 316609 - RNA, 32 nt, Human
agcccaugcgagcccuucuccugcugcucugg

SEQ ID NO: 316610 - RNA, 32 nt, Human
agcccaugcucaguacauauccuaaugaggaa

SEQ ID NO: 316611 - RNA, 32 nt, Human
agcccaugcuggccucaaacuccugggcucua

SEQ ID NO: 316612 - RNA, 31 nt, Human
agcccauggacaagcucaguccaggaccugu

SEQ ID NO: 316613 - RNA, 32 nt, Human
agcccauggagugcucucccacuggcaacauc

SEQ ID NO: 316614 - RNA, 32 nt, Human
agcccaugggaaugcccugaaacuacuguauc

SEQ ID NO: 316615 - RNA, 32 nt, Human
agcccauggggccugaagggaaaugggcagcu

SEQ ID NO: 316616 - RNA, 32 nt, Human
agcccaugucaugccaagagucagugccaucu

SEQ ID NO: 316617 - RNA, 32 nt, Human
agcccauuaguggcauagcugagggaguggau

SEQ ID NO: 316618 - RNA, 32 nt, Human
agcccauucaugcuuagaguccugccguggcu

SEQ ID NO: 316619 - RNA, 22 nt, Human
agcccauugccacugcuugcca

SEQ ID NO: 316620 - RNA, 21 nt, Human
agcccauuguggccuaagagg

SEQ ID NO: 316621 - RNA, 32 nt, Human
agcccauuucccccaaauuaaacguaaauguu

SEQ ID NO: 316622 - RNA, 32 nt, Human
agcccauuucucuccauuuccuccucauuagc

SEQ ID NO: 316623 - RNA, 23 nt, Human
agcccauuucuguuaaccucuua

SEQ ID NO: 316624 - RNA, 32 nt, Human
agccccaaaauacuucugauuuuucacgccuc

SEQ ID NO: 316625 - RNA, 32 nt, Human
agccccaaacauccuucuugaugcuuuggggg

SEQ ID NO: 316626 - RNA, 32 nt, Human
agccccaaagaucccacgggagaggggagagg

SEQ ID NO: 316627 - RNA, 32 nt, Human
agccccaaagccccagauccccuuaaagcaga

SEQ ID NO: 316628 - RNA, 23 nt, Human
agccccaaaggacuagccccaca

SEQ ID NO: 316629 - RNA, 32 nt, Human
agccccaaaugugacuuuauuuggaaauggga

SEQ ID NO: 316630 - RNA, 32 nt, Human
agccccaacacagaggugagaccaggaauaag

SEQ ID NO: 316631 - RNA, 22 nt, Human
agccccaaccuucagggcucag

SEQ ID NO: 316632 - RNA, 32 nt, Human
agccccaagcaggacgaaaaagaggcauacac

SEQ ID NO: 316633 - RNA, 18 nt, Human
agccccaagcagguggug

SEQ ID NO: 316634 - RNA, 32 nt, Human
agccccaagcccgagccgcgcccagcccgagc

SEQ ID NO: 316635 - RNA, 21 nt, Human
agccccaaggccaccccacca

SEQ ID NO: 316636 - RNA, 22 nt, Human
agccccaaggcccgaccccucc

SEQ ID NO: 316637 - RNA, 32 nt, Human
agccccaagggcccugggggcagccacccucc

SEQ ID NO: 316638 - RNA, 20 nt, Human
agccccaagguugaucccac

SEQ ID NO: 316639 - RNA, 32 nt, Human
agccccaagugugguccugaacuggggccggg

SEQ ID NO: 316640 - RNA, 32 nt, Human
agccccaaguguugcccagccuccgcauccac

SEQ ID NO: 316641 - RNA, 23 nt, Human
agccccaauucugcuuucccaca

SEQ ID NO: 316642 - RNA, 32 nt, Human
agccccacaaguagcugagacuacaggcacac

SEQ ID NO: 316643 - RNA, 32 nt, Human
agccccacagcaccuggagcugcccacugucu

SEQ ID NO: 316644 - RNA, 32 nt, Human
agccccacagccgcgugcucgggacuauggga

SEQ ID NO: 316645 - RNA, 32 nt, Human
agccccacaggcacgaucuguuccuccuggga

SEQ ID NO: 316646 - RNA, 32 nt, Human
agccccacaucccgcggccccagcacaaggug

SEQ ID NO: 316647 - RNA, 32 nt, Human
agccccacccaagaggagggcagcgugugccu

SEQ ID NO: 316648 - RNA, 32 nt, Human
agccccacccaccccugcccuuucagaccccu

SEQ ID NO: 316649 - RNA, 21 nt, Human
agccccacccaggccaggcau

SEQ ID NO: 316650 - RNA, 27 nt, Human
agccccacccaggcccccaucugggau

SEQ ID NO: 316651 - RNA, 32 nt, Human
agccccaccccacauggagcucagggggaagc

SEQ ID NO: 316652 - RNA, 32 nt, Human
agccccacccccagguuuuugcccauccuccc

SEQ ID NO: 316653 - RNA, 32 nt, Human
agccccaccccgagcgcacacugugauggagg

SEQ ID NO: 316654 - RNA, 32 nt, Human
agccccaccuccuaacaccauggauucaaagu

SEQ ID NO: 316655 - RNA, 32 nt, Human
agccccaccugcccccagccucugugacagug

SEQ ID NO: 316656 - RNA, 32 nt, Human
agccccaccugcccuucuucagguacugcuug

SEQ ID NO: 316657 - RNA, 32 nt, Human
agccccacgcagccccuguucugcugagugcg

SEQ ID NO: 316658 - RNA, 21 nt, Human
agccccacgccgccccaggga

SEQ ID NO: 316659 - RNA, 32 nt, Human
agccccacgugcacuccccggccugcauccgg

SEQ ID NO: 316660 - RNA, 32 nt, Human
agccccacguggugcugcucagccuucucugc

SEQ ID NO: 316661 - RNA, 32 nt, Human
agccccacuacauacagagaaacuaucaaccu

SEQ ID NO: 316662 - RNA, 32 nt, Human
agccccacucacacagcagccuaggaaggaag

SEQ ID NO: 316663 - RNA, 32 nt, Human
agccccacucccaguacauuucagugggagac

SEQ ID NO: 316664 - RNA, 20 nt, Human
agccccacucccgccccucc

SEQ ID NO: 316665 - RNA, 32 nt, Human
agccccacuccucugcugaccugcugaccugu

SEQ ID NO: 316666 - RNA, 32 nt, Human
agccccacugcacuccagccugggugacagag

SEQ ID NO: 316667 - RNA, 32 nt, Human
agccccacugcugaugacgaacuaucucuaac

SEQ ID NO: 316668 - RNA, 32 nt, Human
agccccacugcuuccaaacucugccugugucc

SEQ ID NO: 316669 - RNA, 32 nt, Human
agccccacuggcuguuugggaccauggagcgg

SEQ ID NO: 316670 - RNA, 32 nt, Human
agccccacugucucuaaccacuccugggcuaa

SEQ ID NO: 316671 - RNA, 32 nt, Human
agccccacuguuaaacugagguuggggguuuc

SEQ ID NO: 316672 - RNA, 32 nt, Human
agccccagaaaaggaaccuacucuccaugcac

SEQ ID NO: 316673 - RNA, 32 nt, Human
agccccagacagggagugagugaggcaagugg

SEQ ID NO: 316674 - RNA, 32 nt, Human
agccccagacagggcaugaggggcagagaauu

SEQ ID NO: 316675 - RNA, 32 nt, Human
agccccagagccuggcaacagccuggccugca

SEQ ID NO: 316676 - RNA, 32 nt, Human
agccccagaggcagagguuguggugagccgag

SEQ ID NO: 316677 - RNA, 24 nt, Human
agccccagaggucaaggcugcagu

SEQ ID NO: 316678 - RNA, 32 nt, Human
agccccagaggucaaggcugcagugagcugug

SEQ ID NO: 316679 - RNA, 32 nt, Human
agccccagaguauauugaauagaaauucugca

SEQ ID NO: 316680 - RNA, 32 nt, Human
agccccagagucagagcuggccacaggcuggc

SEQ ID NO: 316681 - RNA, 32 nt, Human
agccccagagugacaguggcccagcuggacug

SEQ ID NO: 316682 - RNA, 32 nt, Human
agccccagaguucuuccacaacaggaacaggc

SEQ ID NO: 316683 - RNA, 32 nt, Human
agccccagcagaagaauggagaggaggaggag

SEQ ID NO: 316684 - RNA, 32 nt, Human
agccccagcaggaagggugggccagccaggcc

SEQ ID NO: 316685 - RNA, 32 nt, Human
agccccagcccagaucuacuucaagagcaucu

SEQ ID NO: 316686 - RNA, 32 nt, Human
agccccagcccaucacccucccuggcuuuuag

SEQ ID NO: 316687 - RNA, 19 nt, Human
agccccagccccuuccagg

SEQ ID NO: 316688 - RNA, 32 nt, Human
agccccagccgccagccccgccuucucuuccu

SEQ ID NO: 316689 - RNA, 32 nt, Human
agccccagccucccaccacgcucacugccugg

SEQ ID NO: 316690 - RNA, 32 nt, Human
agccccagcuacuagggaggcugaggagggag

SEQ ID NO: 316691 - RNA, 32 nt, Human
agccccagcuacucaagaggcugaggcaggag

SEQ ID NO: 316692 - RNA, 32 nt, Human
agccccagcuacucaggaagcuagagcacgag

SEQ ID NO: 316693 - RNA, 32 nt, Human
agccccagcuacucaggcuggggugggaggau

SEQ ID NO: 316694 - RNA, 32 nt, Human
agccccagcuacucgggaggcugagaugggag

SEQ ID NO: 316695 - RNA, 32 nt, Human
agccccagcuacucgggaggcugaggcaggag

SEQ ID NO: 316696 - RNA, 32 nt, Human
agccccagcuacucgggaggcugagguggaaa

SEQ ID NO: 316697 - RNA, 32 nt, Human
agccccagcuacuugggaggcugaagcaggag

SEQ ID NO: 316698 - RNA, 32 nt, Human
agccccagcuacuugggaggcugaggcgggag

SEQ ID NO: 316699 - RNA, 32 nt, Human
agccccagcuacuugggaggcugaggugggag

SEQ ID NO: 316700 - RNA, 32 nt, Human
agccccagcuauucaggagacugaggcaggag

SEQ ID NO: 316701 - RNA, 32 nt, Human
agccccagcuccucuucuugccccgcauaucc

SEQ ID NO: 316702 - RNA, 32 nt, Human
agccccagcucugcauaccugcaccugcaccc

SEQ ID NO: 316703 - RNA, 24 nt, Human
agccccagcucuuccacuuguuaa

SEQ ID NO: 316704 - RNA, 32 nt, Human
agccccagcuguucucugucagcacacccacc

SEQ ID NO: 316705 - RNA, 32 nt, Human
agccccaggaagcccaacacaguggccaaaac

SEQ ID NO: 316706 - RNA, 32 nt, Human
agccccaggaagggcaaggcaagaugguggac

SEQ ID NO: 316707 - RNA, 32 nt, Human
agccccaggaagguuugcacagcugugcccca

SEQ ID NO: 316708 - RNA, 19 nt, Human
agccccaggaccuggggcg

SEQ ID NO: 316709 - RNA, 32 nt, Human
agccccaggaggucgaggcugcagugagccau

SEQ ID NO: 316710 - RNA, 32 nt, Human
agccccaggcagcccugucacagugagaagua

SEQ ID NO: 316711 - RNA, 23 nt, Human
agccccaggcauggcuaaccccu

SEQ ID NO: 316712 - RNA, 21 nt, Human
agccccaggcccaccucuccu

SEQ ID NO: 316713 - RNA, 32 nt, Human
agccccaggccuggccucgccugccuuucugc

SEQ ID NO: 316714 - RNA, 32 nt, Human
agccccaggccugguugcugggucugcccaca

SEQ ID NO: 316715 - RNA, 32 nt, Human
agccccaggcuccgucacccccucucugcuug

SEQ ID NO: 316716 - RNA, 32 nt, Human
agccccaggcugucuuagccccuggaguucag

SEQ ID NO: 316717 - RNA, 32 nt, Human
agccccagggaagcaggcuaggaugugagaga

SEQ ID NO: 316718 - RNA, 32 nt, Human
agccccagggaccugggcagcacuguccagca

SEQ ID NO: 316719 - RNA, 32 nt, Human
agccccagggccugggacagccugccgcugcc

SEQ ID NO: 316720 - RNA, 32 nt, Human
agccccaggggcuggcuuucaccagcugcagg

SEQ ID NO: 316721 - RNA, 32 nt, Human
agccccagggguggaggcugcaaugaacugug

SEQ ID NO: 316722 - RNA, 21 nt, Human
agccccagggugcccccaggc

SEQ ID NO: 316723 - RNA, 20 nt, Human
agccccagguacuugggcug

SEQ ID NO: 316724 - RNA, 32 nt, Human
agccccaggucggcggguguucccaggaagag

SEQ ID NO: 316725 - RNA, 32 nt, Human
agccccaguacacucuucucuggaccagaucu

SEQ ID NO: 316726 - RNA, 25 nt, Human
agccccaguccugccccccacccca

SEQ ID NO: 316727 - RNA, 32 nt, Human
agccccaguuuucuccuccucacuaggcugug

SEQ ID NO: 316728 - RNA, 32 nt, Human
agccccauaaguuuggagguucagaggcugga

SEQ ID NO: 316729 - RNA, 32 nt, Human
agccccaucacacuggcucuggcuucaagggc

SEQ ID NO: 316730 - RNA, 32 nt, Human
agccccauccacccugccuucaguuccuccca

SEQ ID NO: 316731 - RNA, 32 nt, Human
agccccaucccaaacccuucagugccaaaaac

SEQ ID NO: 316732 - RNA, 32 nt, Human
agccccaucccacucccuguuucgggccucgu

SEQ ID NO: 316733 - RNA, 32 nt, Human
agccccauccccaaugaagagcuugaguuuga

SEQ ID NO: 316734 - RNA, 32 nt, Human
agccccauccugaugaccucacagacaaggcc

SEQ ID NO: 316735 - RNA, 22 nt, Human
agccccaugccacgcccuggga

SEQ ID NO: 316736 - RNA, 22 nt, Human
agccccaugccgugccuagaga

SEQ ID NO: 316737 - RNA, 32 nt, Human
agccccauggaaauccccaaagagcucuggau

SEQ ID NO: 316738 - RNA, 17 nt, Human
agccccauggccccguc

SEQ ID NO: 316739 - RNA, 32 nt, Human
agccccauguacaaagcucaccaagccccugc

SEQ ID NO: 316740 - RNA, 32 nt, Human
agccccauguguccuggaagcugagggucccc

SEQ ID NO: 316741 - RNA, 32 nt, Human
agccccauugacacaaacccucaaagcagacg

SEQ ID NO: 316742 - RNA, 32 nt, Human
agccccauugcccaccuccacuucccauuggc

SEQ ID NO: 316743 - RNA, 32 nt, Human
agccccauuucucaggugcaguacagcacguc

SEQ ID NO: 316744 - RNA, 32 nt, Human
agcccccaacacaggcaaguccaccccauaau

SEQ ID NO: 316745 - RNA, 21 nt, Human
agcccccaaggaaggaggcug

SEQ ID NO: 316746 - RNA, 32 nt, Human
agcccccaaggcagaggcugagaaucagaaga

SEQ ID NO: 316747 - RNA, 32 nt, Human
agcccccaagugaaacugagguucaggagacc

SEQ ID NO: 316748 - RNA, 32 nt, Human
agcccccaaugcccaccaccugggccccgguc

SEQ ID NO: 316749 - RNA, 32 nt, Human
agcccccaaugcccggccaggcuaagccgcag

SEQ ID NO: 316750 - RNA, 32 nt, Human
agcccccacagcccuccagguccuccagcucu

SEQ ID NO: 316751 - RNA, 32 nt, Human
agcccccacaggcucugcuccacagaaacuua

SEQ ID NO: 316752 - RNA, 32 nt, Human
agcccccaccugcuggugacggggccagagag

SEQ ID NO: 316753 - RNA, 32 nt, Human
agcccccacucugccaagggcacuugcccgcc

SEQ ID NO: 316754 - RNA, 32 nt, Human
agcccccacugaggccgccgcugccgggccuc

SEQ ID NO: 316755 - RNA, 32 nt, Human
agcccccacugaggggccguagcccuaucuag

SEQ ID NO: 316756 - RNA, 18 nt, Human
agcccccacugugcccag

SEQ ID NO: 316757 - RNA, 32 nt, Human
agcccccagaagcagagcuuuguuuuggaggu

SEQ ID NO: 316758 - RNA, 32 nt, Human
agcccccagaguagcugggauuacaggcaugu

SEQ ID NO: 316759 - RNA, 32 nt, Human
agcccccagaucuugggugcaucugugggcag

SEQ ID NO: 316760 - RNA, 32 nt, Human
agcccccagcagaggcaggcugggacggacca

SEQ ID NO: 316761 - RNA, 24 nt, Human
agcccccagcagcugccccaggga

SEQ ID NO: 316762 - RNA, 32 nt, Human
agcccccagccaggagagaugacgcccccucc

SEQ ID NO: 316763 - RNA, 32 nt, Human
agcccccagccuccucccucagccugggcuac

SEQ ID NO: 316764 - RNA, 32 nt, Human
agcccccagccucuccccuccuccuccuuguc

SEQ ID NO: 316765 - RNA, 32 nt, Human
agcccccagcuggcuugauuuggcuggucuug

SEQ ID NO: 316766 - RNA, 32 nt, Human
agcccccaggagagggggucaguguuuccugg

SEQ ID NO: 316767 - RNA, 22 nt, Human
agcccccaggagccgcccacca

SEQ ID NO: 316768 - RNA, 32 nt, Human
agcccccaggcacccacccagcugggguguuu

SEQ ID NO: 316769 - RNA, 32 nt, Human
agcccccaggcagagucgcugguccucaggug

SEQ ID NO: 316770 - RNA, 32 nt, Human
agcccccaggcagugccuuaccuguggugccc

SEQ ID NO: 316771 - RNA, 23 nt, Human
agcccccaggcgcagugggcucu

SEQ ID NO: 316772 - RNA, 32 nt, Human
agcccccaggcugugagcuccuugggggcagg

SEQ ID NO: 316773 - RNA, 32 nt, Human
agcccccagguaacugggacuacaggcaugca

SEQ ID NO: 316774 - RNA, 32 nt, Human
agcccccagguggaagagaucaugcagcuggu

SEQ ID NO: 316775 - RNA, 32 nt, Human
agcccccagucacguuccucaggcuuacuuga

SEQ ID NO: 316776 - RNA, 24 nt, Human
agcccccaucacugcccccacccc

SEQ ID NO: 316777 - RNA, 32 nt, Human
agcccccaucccagucccgggaggcugccgcg

SEQ ID NO: 316778 - RNA, 32 nt, Human
agcccccaucccuguguuccccaagaauucag

SEQ ID NO: 316779 - RNA, 16 nt, Human
agcccccauggccuaa

SEQ ID NO: 316780 - RNA, 18 nt, Human
agcccccauguccgcaga

SEQ ID NO: 316781 - RNA, 32 nt, Human
agcccccauuauagccaugcgugcgguuuaua

SEQ ID NO: 316782 - RNA, 22 nt, Human
agcccccauucacuagaagcac

SEQ ID NO: 316783 - RNA, 32 nt, Human
agcccccauuuccuccuucauccuguggaguc

SEQ ID NO: 316784 - RNA, 25 nt, Human
agccccccaccccccagccccuccu

SEQ ID NO: 316785 - RNA, 25 nt, Human
agccccccaggcccccuaccccucu

SEQ ID NO: 316786 - RNA, 19 nt, Human
agcccccgcagcucugccc

SEQ ID NO: 316787 - RNA, 21 nt, Human
agcccccgccuccugagacug

SEQ ID NO: 316788 - RNA, 17 nt, Human
agcccccgcuccugccc

SEQ ID NO: 316789 - RNA, 24 nt, Human
agcccccgcuccugccccacccca

SEQ ID NO: 316790 - RNA, 32 nt, Human
agcccccgcugcucugugcccuguccggccag

SEQ ID NO: 316791 - RNA, 32 nt, Human
agcccccggaguagcugggaccacaggcacac

SEQ ID NO: 316792 - RNA, 26 nt, Human
agcccccgggagcuggaggguggcug

SEQ ID NO: 316793 - RNA, 32 nt, Human
agcccccguccacccuugugggucucugcucc

SEQ ID NO: 316794 - RNA, 32 nt, Human
agcccccgugcccgccacgccugcugccgccc

SEQ ID NO: 316795 - RNA, 21 nt, Human
agcccccguggcucuggacug

SEQ ID NO: 316796 - RNA, 32 nt, Human
agcccccguuccccaggguccugugggcugag

SEQ ID NO: 316797 - RNA, 19 nt, Human
agcccccuacccaauggca

SEQ ID NO: 316798 - RNA, 18 nt, Human
agcccccuaccccacaga

SEQ ID NO: 316799 - RNA, 22 nt, Human
agcccccuccacucccucccca

SEQ ID NO: 316800 - RNA, 32 nt, Human
agcccccuccacucccuccccauuccucccac

SEQ ID NO: 316801 - RNA, 32 nt, Human
agcccccuccacuggcgacacaacugcaccuu

SEQ ID NO: 316802 - RNA, 21 nt, Human
agcccccuccagagcccugcc

SEQ ID NO: 316803 - RNA, 21 nt, Human
agcccccucgggccucggggg

SEQ ID NO: 316804 - RNA, 32 nt, Human
agcccccucuccugaagcagugucgccguccc

SEQ ID NO: 316805 - RNA, 32 nt, Human
agcccccugacuuccaaaaucagugccuuugg

SEQ ID NO: 316806 - RNA, 32 nt, Human
agcccccugaguaccucagaugacaggugcgu

SEQ ID NO: 316807 - RNA, 32 nt, Human
agcccccugaguagcugggauuacaggugcac

SEQ ID NO: 316808 - RNA, 32 nt, Human
agcccccugaguagcugggauuacaggugccu

SEQ ID NO: 316809 - RNA, 32 nt, Human
agcccccugcagcugauggagcugugucacca

SEQ ID NO: 316810 - RNA, 32 nt, Human
agcccccugcccugcccugccccguguccacc

SEQ ID NO: 316811 - RNA, 32 nt, Human
agcccccugccugauccccugcuggcuggggg

SEQ ID NO: 316812 - RNA, 32 nt, Human
agcccccugcucaugcugaucaucuuccucuu

SEQ ID NO: 316813 - RNA, 32 nt, Human
agcccccugcugccauaggacuuggggccuau

SEQ ID NO: 316814 - RNA, 32 nt, Human
agcccccugcuuccuggccuaggcgaggguuc

SEQ ID NO: 316815 - RNA, 32 nt, Human
agcccccuggacucgcaggcgagcccaggacu

SEQ ID NO: 316816 - RNA, 32 nt, Human
agcccccugucuccuccaucauuugguuuccu

SEQ ID NO: 316817 - RNA, 32 nt, Human
agcccccuguggagagggugacugugggagag

SEQ ID NO: 316818 - RNA, 32 nt, Human
agcccccuuucuucccuuuucuguuuuacuuc

SEQ ID NO: 316819 - RNA, 32 nt, Human
agccccgaagaaugcggggaggugcggaggag

SEQ ID NO: 316820 - RNA, 32 nt, Human
agccccgaggaggaggaggaggaggaggaaga

SEQ ID NO: 316821 - RNA, 32 nt, Human
agccccgagggaacccagaagguggacgccac

SEQ ID NO: 316822 - RNA, 26 nt, Human
agccccgagggcacgcggcccgggca

SEQ ID NO: 316823 - RNA, 32 nt, Human
agccccgaggggaccccgcgccguaggaggga

SEQ ID NO: 316824 - RNA, 32 nt, Human
agccccgaugauucguaacaccaccuuucgcc

SEQ ID NO: 316825 - RNA, 32 nt, Human
agccccgauuccagcacccaccaccgccugac

SEQ ID NO: 316826 - RNA, 32 nt, Human
agccccgcaaaguacucggauuacagguguga

SEQ ID NO: 316827 - RNA, 19 nt, Human
agccccgcagccccggccg

SEQ ID NO: 316828 - RNA, 22 nt, Human
agccccgcagcccggcccgggc

SEQ ID NO: 316829 - RNA, 32 nt, Human
agccccgcagccgccgcgcggagaacagcgac

SEQ ID NO: 316830 - RNA, 32 nt, Human
agccccgcauuccuauuguaccaaaaugucug

SEQ ID NO: 316831 - RNA, 19 nt, Human
agccccgccagccccgcca

SEQ ID NO: 316832 - RNA, 32 nt, Human
agccccgccccgggccccagagguccccugca

SEQ ID NO: 316833 - RNA, 32 nt, Human
agccccgccccuggcccugcugccauguugcu

SEQ ID NO: 316834 - RNA, 32 nt, Human
agccccgcccuccaccagcgacugacagcgca

SEQ ID NO: 316835 - RNA, 32 nt, Human
agccccgcccuuccucucccagugggcccucg

SEQ ID NO: 316836 - RNA, 32 nt, Human
agccccgccgugucuguggcccucucuuaaug

SEQ ID NO: 316837 - RNA, 32 nt, Human
agccccgccugacauggaacagaacggagcca

SEQ ID NO: 316838 - RNA, 32 nt, Human
agccccgccugcugcuucuccaccuccccucc

SEQ ID NO: 316839 - RNA, 32 nt, Human
agccccgcgaaaacaucugccucccaggaggg

SEQ ID NO: 316840 - RNA, 20 nt, Human
agccccgcgcggaccagaca

SEQ ID NO: 316841 - RNA, 20 nt, Human
agccccgcggcggccugggc

SEQ ID NO: 316842 - RNA, 21 nt, Human
agccccgcggcggccugggca

SEQ ID NO: 316843 - RNA, 32 nt, Human
agccccgcuacuuacauggaucaucgaguuuc

SEQ ID NO: 316844 - RNA, 32 nt, Human
agccccgcugcugccgccuuguggcgcgcccg

SEQ ID NO: 316845 - RNA, 32 nt, Human
agccccggaaugcuuccaguugcuugcaaggg

SEQ ID NO: 316846 - RNA, 32 nt, Human
agccccggacagcuccaggauccgugcagugg

SEQ ID NO: 316847 - RNA, 32 nt, Human
agccccggaggacgugaugugagacccgcuug

SEQ ID NO: 316848 - RNA, 20 nt, Human
agccccggaggcccaggacg

SEQ ID NO: 316849 - RNA, 32 nt, Human
agccccggaggucgaggcuacagugacccaag

SEQ ID NO: 316850 - RNA, 32 nt, Human
agccccggcagcgaccccuuccccagcccgac

SEQ ID NO: 316851 - RNA, 18 nt, Human
agccccggccccuagccc

SEQ ID NO: 316852 - RNA, 25 nt, Human
agccccggcccuggcccccacccca

SEQ ID NO: 316853 - RNA, 22 nt, Human
agccccggccgccggcccggca

SEQ ID NO: 316854 - RNA, 32 nt, Human
agccccggccgcgcccagcccggcgaggacag

SEQ ID NO: 316855 - RNA, 21 nt, Human
agccccggcgccagcccgggc

SEQ ID NO: 316856 - RNA, 17 nt, Human
agccccggcuccugccu

SEQ ID NO: 316857 - RNA, 21 nt, Human
agccccggcuccugccuguca

SEQ ID NO: 316858 - RNA, 32 nt, Human
agccccggcugcacucuagccgccgcgcccgg

SEQ ID NO: 316859 - RNA, 32 nt, Human
agccccggcugcacucuagccgccugggugug

SEQ ID NO: 316860 - RNA, 32 nt, Human
agccccggcuuccuccacauggaggucccagg

SEQ ID NO: 316861 - RNA, 32 nt, Human
agccccgggcccugcaucccuugcugacugca

SEQ ID NO: 316862 - RNA, 32 nt, Human
agccccgggccucccacaggagcggagacgcg

SEQ ID NO: 316863 - RNA, 32 nt, Human
agccccgggccugagaagugggcggcggggug

SEQ ID NO: 316864 - RNA, 32 nt, Human
agccccggggaccccauggggugcuguaauca

SEQ ID NO: 316865 - RNA, 19 nt, Human
agccccggggccugagccg

SEQ ID NO: 316866 - RNA, 32 nt, Human
agccccggggcugaggccgccccauggcaaag

SEQ ID NO: 316867 - RNA, 32 nt, Human
agccccgggggcugagguugcugugagccgag

SEQ ID NO: 316868 - RNA, 32 nt, Human
agccccggugggagguggucacagaagcuuug

SEQ ID NO: 316869 - RNA, 24 nt, Human
agccccguagcacugcccacccca

SEQ ID NO: 316870 - RNA, 32 nt, Human
agccccgucccaaacacagaugggaccaugaa

SEQ ID NO: 316871 - RNA, 32 nt, Human
agccccguccuugagcagauugaccucaucuu

SEQ ID NO: 316872 - RNA, 32 nt, Human
agccccgucuccaggaaaaggagagggguuaa

SEQ ID NO: 316873 - RNA, 32 nt, Human
agccccgucuccgccucccaaaguguuaggau

SEQ ID NO: 316874 - RNA, 32 nt, Human
agccccgucugaccccagcccagacagcaagg

SEQ ID NO: 316875 - RNA, 32 nt, Human
agccccgugcgagggcccugcuuguagcugga

SEQ ID NO: 316876 - RNA, 32 nt, Human
agccccgugcggugggucccagccugagggug

SEQ ID NO: 316877 - RNA, 32 nt, Human
agccccgugggugggggcagggcaugaguucc

SEQ ID NO: 316878 - RNA, 32 nt, Human
agccccguucuguggggcacugggugauacuc

SEQ ID NO: 316879 - RNA, 32 nt, Human
agccccuaaauuccucccuuucucagucuacc

SEQ ID NO: 316880 - RNA, 25 nt, Human
agccccuaaguaggcccuccccucc

SEQ ID NO: 316881 - RNA, 32 nt, Human
agccccuacagugaguccccaugccaugggca

SEQ ID NO: 316882 - RNA, 24 nt, Human
agccccuacccacccacacccccu

SEQ ID NO: 316883 - RNA, 20 nt, Human
agccccuaccuaccccugcc

SEQ ID NO: 316884 - RNA, 32 nt, Human
agccccuaccuccaaauaccaccacacugggg

SEQ ID NO: 316885 - RNA, 32 nt, Human
agccccuagaagcuagaaaaggcagggacccg

SEQ ID NO: 316886 - RNA, 32 nt, Human
agccccuagccccuagccccuggcagacauag

SEQ ID NO: 316887 - RNA, 32 nt, Human
agccccucaaguagcugggacuacaagcgcac

SEQ ID NO: 316888 - RNA, 32 nt, Human
agccccucaaguagcugggacuacaggugcau

SEQ ID NO: 316889 - RNA, 32 nt, Human
agccccucacaguccagccuucuaggugauca

SEQ ID NO: 316890 - RNA, 32 nt, Human
agccccucacauuuccaaucuugagguuacaa

SEQ ID NO: 316891 - RNA, 32 nt, Human
agccccucagaacugggaaggccagguaacuc

SEQ ID NO: 316892 - RNA, 32 nt, Human
agccccucagaagauguucccugcugauaaca

SEQ ID NO: 316893 - RNA, 32 nt, Human
agccccucagacuguuuuaucucugaacuggu

SEQ ID NO: 316894 - RNA, 32 nt, Human
agccccucagccuguagaaacagcccucggcg

SEQ ID NO: 316895 - RNA, 32 nt, Human
agccccucaguggcggcuugcucucuucucuc

SEQ ID NO: 316896 - RNA, 32 nt, Human
agccccucaguuagcaguggugaggccggagu

SEQ ID NO: 316897 - RNA, 23 nt, Human
agccccucaugccccacccgcca

SEQ ID NO: 316898 - RNA, 32 nt, Human
agccccuccaccgcaccguccugggccggugc

SEQ ID NO: 316899 - RNA, 32 nt, Human
agccccuccauggcccagaaggaagaggcugc

SEQ ID NO: 316900 - RNA, 22 nt, Human
agccccuccaugggaccccucu

SEQ ID NO: 316901 - RNA, 22 nt, Human
agccccucccaaagaaccuucu

SEQ ID NO: 316902 - RNA, 23 nt, Human
agccccucccagccacaccugcc

SEQ ID NO: 316903 - RNA, 21 nt, Human
agccccucccagcccuugccc

SEQ ID NO: 316904 - RNA, 23 nt, Human
agccccucccagccucucccgcu

SEQ ID NO: 316905 - RNA, 24 nt, Human
agccccucccagccugccccuucu

SEQ ID NO: 316906 - RNA, 23 nt, Human
agccccucccagucagcccuccc

SEQ ID NO: 316907 - RNA, 25 nt, Human
agccccucccauuuccaaccccucc

SEQ ID NO: 316908 - RNA, 23 nt, Human
agccccuccccaagcuccccucc

SEQ ID NO: 316909 - RNA, 32 nt, Human
agccccuccccaccaucccuccacaugcugca

SEQ ID NO: 316910 - RNA, 23 nt, Human
agccccuccccagcccccucucc

SEQ ID NO: 316911 - RNA, 22 nt, Human
agccccuccccagggccccacc

SEQ ID NO: 316912 - RNA, 22 nt, Human
agccccucccccaugucccacc

SEQ ID NO: 316913 - RNA, 21 nt, Human
agccccuccccgccccucucc

SEQ ID NO: 316914 - RNA, 22 nt, Human
agccccucccgcacucugcuga

SEQ ID NO: 316915 - RNA, 32 nt, Human
agccccucccgggaccucucccccuccacccc

SEQ ID NO: 316916 - RNA, 32 nt, Human
agccccucccuaaucccuggcccucccagcug

SEQ ID NO: 316917 - RNA, 18 nt, Human
agccccucccuguccccu

SEQ ID NO: 316918 - RNA, 20 nt, Human
agccccucccuguccccucc

SEQ ID NO: 316919 - RNA, 24 nt, Human
agccccuccuccacucuccucucc

SEQ ID NO: 316920 - RNA, 32 nt, Human
agccccuccucccaguauucccauccccgcau

SEQ ID NO: 316921 - RNA, 32 nt, Human
agccccuccucccucagacccagcgguccaau

SEQ ID NO: 316922 - RNA, 32 nt, Human
agccccuccucccucagacccaggagccccag

SEQ ID NO: 316923 - RNA, 32 nt, Human
agccccuccucccucagacccaggaguccaga

SEQ ID NO: 316924 - RNA, 32 nt, Human
agccccuccucccucagacccaggaguccagc

SEQ ID NO: 316925 - RNA, 32 nt, Human
agccccuccucccucagacccaggaguccagg

SEQ ID NO: 316926 - RNA, 32 nt, Human
agccccuccucccucagacccagggguccagg

SEQ ID NO: 316927 - RNA, 24 nt, Human
agccccuccucugccaccuccccu

SEQ ID NO: 316928 - RNA, 20 nt, Human
agccccuccugcagcccucc

SEQ ID NO: 316929 - RNA, 24 nt, Human
agccccuccugguauuccccuccu

SEQ ID NO: 316930 - RNA, 32 nt, Human
agccccuccugucucuugccccugguuuugug

SEQ ID NO: 316931 - RNA, 24 nt, Human
agccccuccuucgcuccuuccaca

SEQ ID NO: 316932 - RNA, 23 nt, Human
agccccuccuuggcacccccucu

SEQ ID NO: 316933 - RNA, 19 nt, Human
agccccucggcucggccga

SEQ ID NO: 316934 - RNA, 23 nt, Human
agccccucgggagcaccccaccu

SEQ ID NO: 316935 - RNA, 32 nt, Human
agccccucuacccucccuggagauuggagggu

SEQ ID NO: 316936 - RNA, 32 nt, Human
agccccucuccaggugggcauaaggaguaaca

SEQ ID NO: 316937 - RNA, 18 nt, Human
agccccucuccccugccc

SEQ ID NO: 316938 - RNA, 32 nt, Human
agccccucuccucccggauggucauguuuuug

SEQ ID NO: 316939 - RNA, 32 nt, Human
agccccucuccucuucaggcuacaggguuguc

SEQ ID NO: 316940 - RNA, 32 nt, Human
agccccucucuacuucugugccuuuguaaaac

SEQ ID NO: 316941 - RNA, 32 nt, Human
agccccucugcagagacacaauaaaagccagc

SEQ ID NO: 316942 - RNA, 32 nt, Human
agccccucugcagaucuccucuggccacugca

SEQ ID NO: 316943 - RNA, 32 nt, Human
agccccucugcagcucacccuuggcuuguuuu

SEQ ID NO: 316944 - RNA, 19 nt, Human
agccccucuuccuccucca

SEQ ID NO: 316945 - RNA, 21 nt, Human
agccccucuucuguccccucc

SEQ ID NO: 316946 - RNA, 32 nt, Human
agccccucuucuucagcucauccugcagaaac

SEQ ID NO: 316947 - RNA, 23 nt, Human
agccccucuugccccccacccca

SEQ ID NO: 316948 - RNA, 32 nt, Human
agccccucuuucucccaugcugcacuuacucc

SEQ ID NO: 316949 - RNA, 32 nt, Human
agccccugaacaguaaaguuuugcuccagcca

SEQ ID NO: 316950 - RNA, 32 nt, Human
agccccugaagacaagcagcacugcaguggca

SEQ ID NO: 316951 - RNA, 32 nt, Human
agccccugaagaccagucccacccaccuuucu

SEQ ID NO: 316952 - RNA, 32 nt, Human
agccccugaauguaggcuugcagugcuuucug

SEQ ID NO: 316953 - RNA, 32 nt, Human
agccccugaccagccuccucccaugacuggug

SEQ ID NO: 316954 - RNA, 32 nt, Human
agccccugaccccuggguucugaggcugccag

SEQ ID NO: 316955 - RNA, 32 nt, Human
agccccugaccuuccucuauccccugcccauc

SEQ ID NO: 316956 - RNA, 32 nt, Human
agccccugagcagcaauuugaggcggcugcug

SEQ ID NO: 316957 - RNA, 21 nt, Human
agccccugagggagucugcug

SEQ ID NO: 316958 - RNA, 32 nt, Human
agccccugagucugacucaucucugcacaacc

SEQ ID NO: 316959 - RNA, 32 nt, Human
agccccugcaccuggcagccagcgagcuacug

SEQ ID NO: 316960 - RNA, 20 nt, Human
agccccugcagcacugggca

SEQ ID NO: 316961 - RNA, 32 nt, Human
agccccugcauggauuccuuguggcuuuucug

SEQ ID NO: 316962 - RNA, 32 nt, Human
agccccugccaagcaggggcaggggugggccg

SEQ ID NO: 316963 - RNA, 32 nt, Human
agccccugccaaggagacccuggaggggcucu

SEQ ID NO: 316964 - RNA, 32 nt, Human
agccccugccaucgcaggaagggaugaugucc

SEQ ID NO: 316965 - RNA, 32 nt, Human
agccccugcccaccuucagcaggaugaggccc

SEQ ID NO: 316966 - RNA, 19 nt, Human
agccccugcccacugcacu

SEQ ID NO: 316967 - RNA, 32 nt, Human
agccccugcccagcacaaaaccccaggacccu

SEQ ID NO: 316968 - RNA, 32 nt, Human
agccccugcccaggccacugugagggugggug

SEQ ID NO: 316969 - RNA, 31 nt, Human
agccccugccucuggggcucugugguguagg

SEQ ID NO: 316970 - RNA, 32 nt, Human
agccccugcgcagggcccuccugcucugaggg

SEQ ID NO: 316971 - RNA, 32 nt, Human
agccccugcgugucugugacuguccacuuccc

SEQ ID NO: 316972 - RNA, 32 nt, Human
agccccugcucggcauaaugaccuuauuaagu

SEQ ID NO: 316973 - RNA, 32 nt, Human
agccccugcucuaggaaacaguuuaagaaauc

SEQ ID NO: 316974 - RNA, 32 nt, Human
agccccugcuggcugagcuccagccugugccc

SEQ ID NO: 316975 - RNA, 32 nt, Human
agccccugcugugggaggagguuggagggcua

SEQ ID NO: 316976 - RNA, 25 nt, Human
agccccugcuuccccacccccuccu

SEQ ID NO: 316977 - RNA, 32 nt, Human
agccccuggccacucuaagcugggcagacgga

SEQ ID NO: 316978 - RNA, 32 nt, Human
agccccugggaaaggaaucuuuagaaaugcag

SEQ ID NO: 316979 - RNA, 32 nt, Human
agccccugggcccuggcaggcgaugcaggugg

SEQ ID NO: 316980 - RNA, 24 nt, Human
agccccugggcugcccucacccca

SEQ ID NO: 316981 - RNA, 32 nt, Human
agccccugggcuguaggccagggcagccacag

SEQ ID NO: 316982 - RNA, 32 nt, Human
agccccuggggaaaagcagccucccuucuccu

SEQ ID NO: 316983 - RNA, 32 nt, Human
agccccugguuggugccuccaaaggaaggugg

SEQ ID NO: 316984 - RNA, 32 nt, Human
agccccuguaaucccagcuacuugggaggcug

SEQ ID NO: 316985 - RNA, 32 nt, Human
agccccuguaccaccccugcuguugccugggc

SEQ ID NO: 316986 - RNA, 32 nt, Human
agccccuguccaggcccugcucaccugcaaag

SEQ ID NO: 316987 - RNA, 22 nt, Human
agccccuguccccacccuuccu

SEQ ID NO: 316988 - RNA, 24 nt, Human
agccccuguggaugcccccgccga

SEQ ID NO: 316989 - RNA, 32 nt, Human
agccccuguuuugcacagccgaguacuggcga

SEQ ID NO: 316990 - RNA, 32 nt, Human
agccccuuacuaugaucucaggagcuugcaag

SEQ ID NO: 316991 - RNA, 32 nt, Human
agccccuuauacaaaacuuggagcucagacca

SEQ ID NO: 316992 - RNA, 32 nt, Human
agccccuucacuucugggcuccuggcccuuug

SEQ ID NO: 316993 - RNA, 32 nt, Human
agccccuucagccucugccucuguguacaccc

SEQ ID NO: 316994 - RNA, 32 nt, Human
agccccuucccugaggcugucuccugggaaug

SEQ ID NO: 316995 - RNA, 32 nt, Human
agccccuucccuucccuucccuucccuuccuu

SEQ ID NO: 316996 - RNA, 22 nt, Human
agccccuuccugccccacccca

SEQ ID NO: 316997 - RNA, 18 nt, Human
agccccuuccuucugccc

SEQ ID NO: 316998 - RNA, 32 nt, Human
agccccuucucuucucagaaaggucuguuuuu

SEQ ID NO: 316999 - RNA, 24 nt, Human
agccccuucugcccaccccauccu

SEQ ID NO: 317000 - RNA, 32 nt, Human
agccccuucuguacagcaccucuuguccaggu

SEQ ID NO: 317001 - RNA, 32 nt, Human
agccccuucuguccagcaccagcuggaggcac

SEQ ID NO: 317002 - RNA, 32 nt, Human
agccccuucuuucuugccccagucuccaguuc

SEQ ID NO: 317003 - RNA, 32 nt, Human
agccccuugcucuccccugcccugcugccgcc

SEQ ID NO: 317004 - RNA, 32 nt, Human
agccccuuggaggcugugagguugcagcaaag

SEQ ID NO: 317005 - RNA, 32 nt, Human
agccccuuggcaucacgcaccucccucugggc

SEQ ID NO: 317006 - RNA, 19 nt, Human
agccccuugucagccgcag

SEQ ID NO: 317007 - RNA, 31 nt, Human
agccccuuguuucucccuccuuccaggguuu

SEQ ID NO: 317008 - RNA, 32 nt, Human
agccccuuucauccugggaccugccgaccacg

SEQ ID NO: 317009 - RNA, 32 nt, Human
agccccuuucugcugcugcaucccuccagugu

SEQ ID NO: 317010 - RNA, 32 nt, Human
agcccgaacugauucuggagcucuguguucug

SEQ ID NO: 317011 - RNA, 19 nt, Human
agcccgaagagcaggaggc

SEQ ID NO: 317012 - RNA, 20 nt, Human
agcccgacacggccugagcg

SEQ ID NO: 317013 - RNA, 21 nt, Human
agcccgaccaagcuguccccu

SEQ ID NO: 317014 - RNA, 32 nt, Human
agcccgacuggaggaacagcagcucugggagg

SEQ ID NO: 317015 - RNA, 19 nt, Human
agcccgacuucuaccgggg

SEQ ID NO: 317016 - RNA, 32 nt, Human
agcccgagaaacacaggagagcgagcgcaagc

SEQ ID NO: 317017 - RNA, 32 nt, Human
agcccgagagacagagguugcagugagccgag

SEQ ID NO: 317018 - RNA, 32 nt, Human
agcccgagagcuguggaucugcguccccuggc

SEQ ID NO: 317019 - RNA, 32 nt, Human
agcccgagagguggaggcuggagugaacagag

SEQ ID NO: 317020 - RNA, 32 nt, Human
agcccgagagguggagguugcagugagccgag

SEQ ID NO: 317021 - RNA, 32 nt, Human
agcccgagaguuuccaggauggcuucugcauc

SEQ ID NO: 317022 - RNA, 32 nt, Human
agcccgagcccaaaccccgccaccaucauagg

SEQ ID NO: 317023 - RNA, 32 nt, Human
agcccgagcccagcccuuccuggcuuuagagc

SEQ ID NO: 317024 - RNA, 32 nt, Human
agcccgaggaguagaggcagcagcagcuggac

SEQ ID NO: 317025 - RNA, 32 nt, Human
agcccgagucuccagcccaaaccugccuuccu

SEQ ID NO: 317026 - RNA, 32 nt, Human
agcccgcaaguuugagaccacccugggcaaca

SEQ ID NO: 317027 - RNA, 32 nt, Human
agcccgcacucccgcccugccuguucgcugcc

SEQ ID NO: 317028 - RNA, 32 nt, Human
agcccgcagcagaguccugggcaaagaccaag

SEQ ID NO: 317029 - RNA, 32 nt, Human
agcccgcagcccgcagaggacgcccagagcgg

SEQ ID NO: 317030 - RNA, 32 nt, Human
agcccgcaguguuugcaagugaaauguagaca

SEQ ID NO: 317031 - RNA, 32 nt, Human
agcccgcaucaagcaagcccuccugggccacc

SEQ ID NO: 317032 - RNA, 32 nt, Human
agcccgcccgccucucucugcccgugucaguc

SEQ ID NO: 317033 - RNA, 32 nt, Human
agcccgccggagccaccguuccugcugcugcc

SEQ ID NO: 317034 - RNA, 32 nt, Human
agcccgccugccuggcugcccaaccagcucca

SEQ ID NO: 317035 - RNA, 32 nt, Human
agcccgccuuccuguccaucugaccccuucug

SEQ ID NO: 317036 - RNA, 32 nt, Human
agcccgccuuugggaaccccuugcugugaacu

SEQ ID NO: 317037 - RNA, 32 nt, Human
agcccgcgagccuggccagcgaggguagccgc

SEQ ID NO: 317038 - RNA, 18 nt, Human
agcccgcgccccgggcca

SEQ ID NO: 317039 - RNA, 32 nt, Human
agcccgcgcccgccccgaugcccagcuccgcg

SEQ ID NO: 317040 - RNA, 32 nt, Human
agcccgcggcccucccccuccucggcguaauu

SEQ ID NO: 317041 - RNA, 32 nt, Human
agcccgcggguccucucauacauggcuucugu

SEQ ID NO: 317042 - RNA, 21 nt, Human
agcccgcgguggccugaggcg

SEQ ID NO: 317043 - RNA, 32 nt, Human
agcccgcguucccaggugcccgucuggccgcu

SEQ ID NO: 317044 - RNA, 32 nt, Human
agcccgcuacccacucugaggcuccuaggagg

SEQ ID NO: 317045 - RNA, 32 nt, Human
agcccgcuaggcgcgccguccccagccccgcc

SEQ ID NO: 317046 - RNA, 32 nt, Human
agcccgcucccaggagcuaaugguagagcguc

SEQ ID NO: 317047 - RNA, 32 nt, Human
agcccgcuccugacccuuaucuucccagagac

SEQ ID NO: 317048 - RNA, 16 nt, Human
agcccgcucugagcug

SEQ ID NO: 317049 - RNA, 32 nt, Human
agcccgcugaguagcuggcacuuuaaggcagg

SEQ ID NO: 317050 - RNA, 32 nt, Human
agcccgcugcagcugccacaucccagggcuua

SEQ ID NO: 317051 - RNA, 32 nt, Human
agcccgcugcagcugccacaucccuggacaca

SEQ ID NO: 317052 - RNA, 32 nt, Human
agcccgcugcagcugccacaucccugggcuua

SEQ ID NO: 317053 - RNA, 32 nt, Human
agcccgcugcagcugucacaucccuggacaca

SEQ ID NO: 317054 - RNA, 32 nt, Human
agcccgcugcagcugucacaucccugggcuua

SEQ ID NO: 317055 - RNA, 32 nt, Human
agcccgcugcagcuuccacaucccuggacaca

SEQ ID NO: 317056 - RNA, 32 nt, Human
agcccgcugcuguccuggaggccuuggggagg

SEQ ID NO: 317057 - RNA, 32 nt, Human
agcccgcugcuuuuucuauccucccagucacc

SEQ ID NO: 317058 - RNA, 32 nt, Human
agcccggaacccagccaucagagcagggggcc

SEQ ID NO: 317059 - RNA, 32 nt, Human
agcccggaagcagcacaugagcacugagcuga

SEQ ID NO: 317060 - RNA, 32 nt, Human
agcccggaaggcagagguugcagugagcugag

SEQ ID NO: 317061 - RNA, 32 nt, Human
agcccggaaggcggagguugcagugagcugag

SEQ ID NO: 317062 - RNA, 32 nt, Human
agcccggacucggcacucacagcugcugugca

SEQ ID NO: 317063 - RNA, 32 nt, Human
agcccggagagggcgggccacuggcgcucgag

SEQ ID NO: 317064 - RNA, 32 nt, Human
agcccggaggaggaggaggaggaggaggagga

SEQ ID NO: 317065 - RNA, 23 nt, Human
agcccggcaaaugcgcacgaccu

SEQ ID NO: 317066 - RNA, 32 nt, Human
agcccggcagaggcagagacacacgcggagag

SEQ ID NO: 317067 - RNA, 19 nt, Human
agcccggcagcccggggcg

SEQ ID NO: 317068 - RNA, 19 nt, Human
agcccggcagccugaauug

SEQ ID NO: 317069 - RNA, 22 nt, Human
agcccggccaaacccaggggca

SEQ ID NO: 317070 - RNA, 32 nt, Human
agcccggccagccugagcuugcugcccuccag

SEQ ID NO: 317071 - RNA, 32 nt, Human
agcccggcccacccucuccagaugccaguccc

SEQ ID NO: 317072 - RNA, 32 nt, Human
agcccggcccagaaagcuuuggagucugguua

SEQ ID NO: 317073 - RNA, 20 nt, Human
agcccggccccaggggugcc

SEQ ID NO: 317074 - RNA, 23 nt, Human
agcccggccccgccgacccgccu

SEQ ID NO: 317075 - RNA, 20 nt, Human
agcccggcccggaccccauc

SEQ ID NO: 317076 - RNA, 18 nt, Human
agcccggccuccauggcc

SEQ ID NO: 317077 - RNA, 32 nt, Human
agcccggccugcaggccguggugaggaggggc

SEQ ID NO: 317078 - RNA, 32 nt, Human
agcccggccugucuuuugccccgggcucaaug

SEQ ID NO: 317079 - RNA, 32 nt, Human
agcccggccuuucaugaugcaggagagcaggg

SEQ ID NO: 317080 - RNA, 32 nt, Human
agcccggcgcauuccccucucucccucccucu

SEQ ID NO: 317081 - RNA, 32 nt, Human
agcccggcgcucaccuccgccaccuccucagg

SEQ ID NO: 317082 - RNA, 32 nt, Human
agcccggcgcucaugcugagccccaggcacgc

SEQ ID NO: 317083 - RNA, 32 nt, Human
agcccggcggcucugggaagcucacuccucca

SEQ ID NO: 317084 - RNA, 32 nt, Human
agcccggcucccacggccucugaggcucggcg

SEQ ID NO: 317085 - RNA, 32 nt, Human
agcccggcuccuggucaccuaggaagccucag

SEQ ID NO: 317086 - RNA, 32 nt, Human
  misc_feature (32)..(32): n is a, c, g, or u
agcccgggaagcagagguugcagugaacugan

SEQ ID NO: 317087 - RNA, 32 nt, Human
agcccgggaaguggagguugcacugagcugag

SEQ ID NO: 317088 - RNA, 32 nt, Human
agcccgggacacccccucaacguccgcaggcg

SEQ ID NO: 317089 - RNA, 32 nt, Human
agcccgggacaggcacacaggcccaggugugu

SEQ ID NO: 317090 - RNA, 32 nt, Human
agcccgggacccacagcagcccuagccagucc

SEQ ID NO: 317091 - RNA, 18 nt, Human
agcccgggaccugccccu

SEQ ID NO: 317092 - RNA, 32 nt, Human
agcccgggagcuuggcagcaucacacacagaa

SEQ ID NO: 317093 - RNA, 32 nt, Human
agcccgggaggcagaaccugcagugagccaaa

SEQ ID NO: 317094 - RNA, 32 nt, Human
agcccgggaggcagaggcugcagugaaccaag

SEQ ID NO: 317095 - RNA, 32 nt, Human
agcccgggaggcagaggcugcaguggcugaga

SEQ ID NO: 317096 - RNA, 32 nt, Human
agcccgggaggcagagguugcagugagccaug

SEQ ID NO: 317097 - RNA, 32 nt, Human
agcccgggaggcagagguugcagugagccgug

SEQ ID NO: 317098 - RNA, 32 nt, Human
agcccgggaggcggagauugcggugagccaag

SEQ ID NO: 317099 - RNA, 32 nt, Human
agcccgggaggcggagcuuacagugagcugag

SEQ ID NO: 317100 - RNA, 32 nt, Human
agcccgggaggcggagcuugcagugagcugag

SEQ ID NO: 317101 - RNA, 32 nt, Human
agcccgggaggcggagcuugcggugggccggg

SEQ ID NO: 317102 - RNA, 26 nt, Human
agcccgggaggcggagguugcaguga

SEQ ID NO: 317103 - RNA, 32 nt, Human
agcccgggaggcggagguugcagugagcugag

SEQ ID NO: 317104 - RNA, 32 nt, Human
agcccgggaggcggagguugccgagccgagau

SEQ ID NO: 317105 - RNA, 32 nt, Human
agcccgggaggucaagguugcagugagucaug

SEQ ID NO: 317106 - RNA, 26 nt, Human
agcccgggagguggagguugcaguga

SEQ ID NO: 317107 - RNA, 32 nt, Human
agcccgggagguggagguugcagugagccaag

SEQ ID NO: 317108 - RNA, 32 nt, Human
agcccgggagguggagguugcagugagcccag

SEQ ID NO: 317109 - RNA, 32 nt, Human
agcccgggcaacaacagcgaaacuccaucuca

SEQ ID NO: 317110 - RNA, 32 nt, Human
agcccgggcaacaagagcgaaaccccaucucg

SEQ ID NO: 317111 - RNA, 21 nt, Human
agcccgggcaacauggugaaa

SEQ ID NO: 317112 - RNA, 17 nt, Human
agcccgggcacccgccc

SEQ ID NO: 317113 - RNA, 32 nt, Human
agcccgggcaggaggggaaggaaggcggccgc

SEQ ID NO: 317114 - RNA, 23 nt, Human
agcccgggccgcacagcccgggc

SEQ ID NO: 317115 - RNA, 32 nt, Human
agcccgggcgcggcgcccaccaugcgcggcug

SEQ ID NO: 317116 - RNA, 32 nt, Human
agcccgggcuauccuucccugaaggagcggcc

SEQ ID NO: 317117 - RNA, 32 nt, Human
agcccggggaaaggauaugaacauaaggcaaa

SEQ ID NO: 317118 - RNA, 21 nt, Human
agcccggggagcacgucgccu

SEQ ID NO: 317119 - RNA, 21 nt, Human
agcccggggagcagaacgcug

SEQ ID NO: 317120 - RNA, 32 nt, Human
agcccggggcagccccugccucuggggcucug

SEQ ID NO: 317121 - RNA, 32 nt, Human
agcccggggcgcuggcccugccuaggccuuuu

SEQ ID NO: 317122 - RNA, 18 nt, Human
agcccgggggcccagggc

SEQ ID NO: 317123 - RNA, 32 nt, Human
agcccgggucaucuguaccucugccuccuuuc

SEQ ID NO: 317124 - RNA, 21 nt, Human
agcccggguggcccgagggcg

SEQ ID NO: 317125 - RNA, 32 nt, Human
agcccggugcagccucuaacuccugggcucaa

SEQ ID NO: 317126 - RNA, 32 nt, Human
agcccggugguuuggaaccaguggcuuuggga

SEQ ID NO: 317127 - RNA, 32 nt, Human
agcccggugugugcaguggccucagggauccg

SEQ ID NO: 317128 - RNA, 18 nt, Human
agcccgguucucugaacu

SEQ ID NO: 317129 - RNA, 24 nt, Human
agcccguagucccagcuacucagg

SEQ ID NO: 317130 - RNA, 32 nt, Human
agcccgucagccagggcacaggccuggcucac

SEQ ID NO: 317131 - RNA, 16 nt, Human
agcccgucccuguccc

SEQ ID NO: 317132 - RNA, 32 nt, Human
agcccgucucccagggcagacacggaggcauc

SEQ ID NO: 317133 - RNA, 24 nt, Human
agcccgugaagucgaggcugcagu

SEQ ID NO: 317134 - RNA, 32 nt, Human
agcccgugaagucgaggcugcagugagcccag

SEQ ID NO: 317135 - RNA, 32 nt, Human
agcccguggaggaggaaaagagcaucucagag

SEQ ID NO: 317136 - RNA, 32 nt, Human
agcccguggggcaguccuuugaggccugguaa

SEQ ID NO: 317137 - RNA, 20 nt, Human
agcccgugggggcugaacug

SEQ ID NO: 317138 - RNA, 21 nt, Human
agcccguggugcccugaggcg

SEQ ID NO: 317139 - RNA, 18 nt, Human
agcccguucgcuggacug

SEQ ID NO: 317140 - RNA, 32 nt, Human
agcccguucgcuuggcacugaggucccuggcg

SEQ ID NO: 317141 - RNA, 32 nt, Human
agcccguuggccuacuggaguguguaaggaac

SEQ ID NO: 317142 - RNA, 32 nt, Human
agcccguuuccuagacaagugcaccugggguu

SEQ ID NO: 317143 - RNA, 32 nt, Human
agcccuaaaaugcucaaauccugccagccaaa

SEQ ID NO: 317144 - RNA, 32 nt, Human
agcccuaaaguccccugcucccuggacuucuc

SEQ ID NO: 317145 - RNA, 32 nt, Human
agcccuaaccgucucuccccagcccuauccgg

SEQ ID NO: 317146 - RNA, 32 nt, Human
agcccuaagggagcaguuacagguccucuuug

SEQ ID NO: 317147 - RNA, 21 nt, Human
agcccuaaugaugacuggaaa

SEQ ID NO: 317148 - RNA, 32 nt, Human
agcccuacaucaucugcuacccugaaggaucu

SEQ ID NO: 317149 - RNA, 32 nt, Human
agcccuaccccagacauuggaaauaggugacc

SEQ ID NO: 317150 - RNA, 32 nt, Human
agcccuacccgccuggcccacuaugguccaga

SEQ ID NO: 317151 - RNA, 32 nt, Human
agcccuaccuccaaguugcacuguuuacuuau

SEQ ID NO: 317152 - RNA, 32 nt, Human
agcccuaccuggcagucuaccugcacucggag

SEQ ID NO: 317153 - RNA, 32 nt, Human
agcccuacuccacccugucccugcacucccuu

SEQ ID NO: 317154 - RNA, 24 nt, Human
agcccuacugcccaccccacccca

SEQ ID NO: 317155 - RNA, 32 nt, Human
agcccuagacuuccaucauuccggagaccaac

SEQ ID NO: 317156 - RNA, 32 nt, Human
agcccuagaggucgaggcugcagugagcuaug

SEQ ID NO: 317157 - RNA, 32 nt, Human
agcccuagagguugaggcugcagugagcuaug

SEQ ID NO: 317158 - RNA, 24 nt, Human
agcccuagccuggagcaggggcug

SEQ ID NO: 317159 - RNA, 24 nt, Human
agcccuagcgugacuacccagaga

SEQ ID NO: 317160 - RNA, 32 nt, Human
agcccuagcuacucuggaggcugaggcaggag

SEQ ID NO: 317161 - RNA, 32 nt, Human
agcccuagcuugggagcggacccacacgaacu

SEQ ID NO: 317162 - RNA, 32 nt, Human
agcccuaggagucugcgagagccuccuugguu

SEQ ID NO: 317163 - RNA, 32 nt, Human
agcccuaggcugucccugcagccagggugucc

SEQ ID NO: 317164 - RNA, 32 nt, Human
agcccuagguagcuaaagguugcaugaaggcc

SEQ ID NO: 317165 - RNA, 32 nt, Human
agcccuauaaagauugaucuguccgucuuucc

SEQ ID NO: 317166 - RNA, 24 nt, Human
agcccuauacaguuucauagcuuu

SEQ ID NO: 317167 - RNA, 32 nt, Human
agcccucaaaacacaaaggaacaaagacaguc

SEQ ID NO: 317168 - RNA, 21 nt, Human
agcccucaacaggcccaggga

SEQ ID NO: 317169 - RNA, 32 nt, Human
agcccucaauccagagagcucucccacagccc

SEQ ID NO: 317170 - RNA, 32 nt, Human
agcccucacaacuggauagaccuuucucaagg

SEQ ID NO: 317171 - RNA, 32 nt, Human
agcccucaccucccuguuccaggcugagaacu

SEQ ID NO: 317172 - RNA, 32 nt, Human
agcccucagaacccuuggcuugcccacgugga

SEQ ID NO: 317173 - RNA, 32 nt, Human
agcccucagaacuuuaguaacagcacaacaaa

SEQ ID NO: 317174 - RNA, 32 nt, Human
agcccucagacccugggguccuggagcugccu

SEQ ID NO: 317175 - RNA, 32 nt, Human
agcccucagagcuguuucuaggcaucucucag

SEQ ID NO: 317176 - RNA, 32 nt, Human
agcccucagccaagcacuuagaacugaguaaa

SEQ ID NO: 317177 - RNA, 32 nt, Human
agcccucagccccuccuuccucucuaucuuaa

SEQ ID NO: 317178 - RNA, 32 nt, Human
agcccucagccccucuuuccucccucuccuaa

SEQ ID NO: 317179 - RNA, 19 nt, Human
agcccucagcuaucuuccc

SEQ ID NO: 317180 - RNA, 32 nt, Human
agcccucagguccccagcuccuugagggauga

SEQ ID NO: 317181 - RNA, 32 nt, Human
agcccucaguguccaagacccaggcagcccgg

SEQ ID NO: 317182 - RNA, 32 nt, Human
agcccucauccucaugggaaccacacugcagu

SEQ ID NO: 317183 - RNA, 32 nt, Human
agcccucauccuggcauucaagggcauggacg

SEQ ID NO: 317184 - RNA, 32 nt, Human
agcccucaucuucucuuucucuccucaguuua

SEQ ID NO: 317185 - RNA, 32 nt, Human
agcccuccaacucucaaggaaaggacaggccc

SEQ ID NO: 317186 - RNA, 21 nt, Human
agcccuccaauccccauccca

SEQ ID NO: 317187 - RNA, 22 nt, Human
agcccuccagagcaggagacug

SEQ ID NO: 317188 - RNA, 32 nt, Human
agcccuccagagccagcccuccuggguaccgg

SEQ ID NO: 317189 - RNA, 32 nt, Human
agcccuccagucccuacuucaggcugagccau

SEQ ID NO: 317190 - RNA, 32 nt, Human
agcccuccagugucuccugcagccuggagccu

SEQ ID NO: 317191 - RNA, 32 nt, Human
agcccucccaacacagcacacuagucagccca

SEQ ID NO: 317192 - RNA, 19 nt, Human
agcccucccagccuacucc

SEQ ID NO: 317193 - RNA, 32 nt, Human
agcccucccagcggccacuccugggucagcgc

SEQ ID NO: 317194 - RNA, 32 nt, Human
agcccuccccaagccuucagggcugcucggag

SEQ ID NO: 317195 - RNA, 18 nt, Human
agcccuccccaccccaca

SEQ ID NO: 317196 - RNA, 32 nt, Human
agcccuccccacccuggcucuccuugcauuuc

SEQ ID NO: 317197 - RNA, 19 nt, Human
agcccucccuccccacccc

SEQ ID NO: 317198 - RNA, 25 nt, Human
agcccucccugccgcugccugcuga

SEQ ID NO: 317199 - RNA, 32 nt, Human
agcccucccugccucggcagcgcggcgcagug

SEQ ID NO: 317200 - RNA, 32 nt, Human
agcccucccuggcagcccauguucuccucuuu

SEQ ID NO: 317201 - RNA, 32 nt, Human
agcccucccuggcugcuuccucucgcucaucc

SEQ ID NO: 317202 - RNA, 32 nt, Human
agcccucccugguccccauaggcacaguuggg

SEQ ID NO: 317203 - RNA, 18 nt, Human
agcccuccguuccugcca

SEQ ID NO: 317204 - RNA, 32 nt, Human
agcccuccucaaggaccccugugagauaaguc

SEQ ID NO: 317205 - RNA, 32 nt, Human
agcccuccucaccgcucuuccuuuaguuccuu

SEQ ID NO: 317206 - RNA, 22 nt, Human
agcccuccugagcacccgcuga

SEQ ID NO: 317207 - RNA, 32 nt, Human
agcccuccugggagcucaguggcugggaugcu

SEQ ID NO: 317208 - RNA, 32 nt, Human
agcccuccuugccucccuccagccacuggacc

SEQ ID NO: 317209 - RNA, 32 nt, Human
agcccucgaaacuugacauggggccagaaggg

SEQ ID NO: 317210 - RNA, 23 nt, Human
agcccucgaccuccugggcucaa

SEQ ID NO: 317211 - RNA, 25 nt, Human
agcccucgcaccgcuccccacccca

SEQ ID NO: 317212 - RNA, 24 nt, Human
agcccucgcccggcccccacccca

SEQ ID NO: 317213 - RNA, 21 nt, Human
agcccucgcccggcccggaca

SEQ ID NO: 317214 - RNA, 32 nt, Human
agcccucgccggauucaacuuuugccaacggu

SEQ ID NO: 317215 - RNA, 27 nt, Human
agcccucggccgcccgagcaggggcug

SEQ ID NO: 317216 - RNA, 22 nt, Human
agcccucgggcccagcaggcug

SEQ ID NO: 317217 - RNA, 32 nt, Human
agcccucgggggaauggacccccagaacacgu

SEQ ID NO: 317218 - RNA, 32 nt, Human
agcccucuacagccugacuuucucuccagcgg

SEQ ID NO: 317219 - RNA, 32 nt, Human
agcccucucaaccccauuguccugcaccugca

SEQ ID NO: 317220 - RNA, 32 nt, Human
agcccucucacaggcauggccaccuccaguuc

SEQ ID NO: 317221 - RNA, 32 nt, Human
agcccucucaucuccuggaaccauggccagca

SEQ ID NO: 317222 - RNA, 22 nt, Human
agcccucucucucugcuugcca

SEQ ID NO: 317223 - RNA, 32 nt, Human
agcccucucugcacucccuaguccagaccugg

SEQ ID NO: 317224 - RNA, 32 nt, Human
agcccucucuuccucgcuuuccuuccuaccua

SEQ ID NO: 317225 - RNA, 26 nt, Human
agcccucugcccacugggcccaggga

SEQ ID NO: 317226 - RNA, 32 nt, Human
agcccucugggccuguguugcuguuauuccua

SEQ ID NO: 317227 - RNA, 32 nt, Human
agcccucugucugacaucauguccuucaacug

SEQ ID NO: 317228 - RNA, 32 nt, Human
agcccucuguuucucuuuccaucccauggagu

SEQ ID NO: 317229 - RNA, 32 nt, Human
agcccucuuccaucauguccccaaaccugcaa

SEQ ID NO: 317230 - RNA, 20 nt, Human
agcccucuucccaccugggu

SEQ ID NO: 317231 - RNA, 32 nt, Human
agcccucuuccucacguggcugaggccaccgc

SEQ ID NO: 317232 - RNA, 32 nt, Human
agcccucuuuucuucacaccucaucaaacaga

SEQ ID NO: 317233 - RNA, 32 nt, Human
agcccucuuuuucgcaccucaucaaacagaac

SEQ ID NO: 317234 - RNA, 32 nt, Human
agcccugaaaguacacugggacgguuugcgau

SEQ ID NO: 317235 - RNA, 32 nt, Human
agcccugaacucgggcccugagcuccucacug

SEQ ID NO: 317236 - RNA, 32 nt, Human
agcccugaacuuacuccaguuggccucuccag

SEQ ID NO: 317237 - RNA, 32 nt, Human
agcccugaagaaaggaguuaagagaggaagga

SEQ ID NO: 317238 - RNA, 32 nt, Human
agcccugaagauugaggcuacagugagccuug

SEQ ID NO: 317239 - RNA, 32 nt, Human
agcccugaagcccacauuucugggggugucgu

SEQ ID NO: 317240 - RNA, 32 nt, Human
agcccugaccaaggcccuaaccuaagacugag

SEQ ID NO: 317241 - RNA, 32 nt, Human
agcccugaccaccaccagaaguggaagagugg

SEQ ID NO: 317242 - RNA, 23 nt, Human
agcccugaccauagacccagcca

SEQ ID NO: 317243 - RNA, 32 nt, Human
agcccugaccuggaaugucuccaccucggauu

SEQ ID NO: 317244 - RNA, 22 nt, Human
agcccugagacacaggcccuca

SEQ ID NO: 317245 - RNA, 32 nt, Human
agcccugagauggugacaggcuggccugcagu

SEQ ID NO: 317246 - RNA, 32 nt, Human
agcccugagauguuacaguugaagagcuuggu

SEQ ID NO: 317247 - RNA, 32 nt, Human
agcccugagcugcaacagaagacugaauggag

SEQ ID NO: 317248 - RNA, 32 nt, Human
agcccugauauugaaguauaggacccggccag

SEQ ID NO: 317249 - RNA, 32 nt, Human
agcccugaugcugcugucagagaaggacacug

SEQ ID NO: 317250 - RNA, 32 nt, Human
agcccugaugcuguaaggauucacaucagaga

SEQ ID NO: 317251 - RNA, 22 nt, Human
agcccugauuuacccccaggga

SEQ ID NO: 317252 - RNA, 32 nt, Human
agcccugcaccaugcugcuggggaagacagug

SEQ ID NO: 317253 - RNA, 32 nt, Human
agcccugcacgcccuggcuggcacuguugccg

SEQ ID NO: 317254 - RNA, 32 nt, Human
agcccugcacuguuuucccuccaccacagcca

SEQ ID NO: 317255 - RNA, 32 nt, Human
agcccugcagcccucagaaucagggccaggga

SEQ ID NO: 317256 - RNA, 32 nt, Human
agcccugcagcgccuggauuggaggugugaca

SEQ ID NO: 317257 - RNA, 32 nt, Human
agcccugcagcuucagcaccugccccacccag

SEQ ID NO: 317258 - RNA, 24 nt, Human
agcccugcauaaaguguccagaga

SEQ ID NO: 317259 - RNA, 18 nt, Human
agcccugcauccuccaca

SEQ ID NO: 317260 - RNA, 21 nt, Human
agcccugccacagcccaaggg

SEQ ID NO: 317261 - RNA, 32 nt, Human
agcccugccagaccucccuggucaugacagag

SEQ ID NO: 317262 - RNA, 32 nt, Human
agcccugccaggcagccccuggcuccagguuc

SEQ ID NO: 317263 - RNA, 32 nt, Human
agcccugccaguuuccagagaaggcgcuugag

SEQ ID NO: 317264 - RNA, 32 nt, Human
agcccugccauggacgggcaggcuccaggcuc

SEQ ID NO: 317265 - RNA, 21 nt, Human
agcccugcccaacagccaggg

SEQ ID NO: 317266 - RNA, 28 nt, Human
agcccugcccacagcaggugcccaguga

SEQ ID NO: 317267 - RNA, 32 nt, Human
agcccugcccgaggcuaguaggcugcaacccu

SEQ ID NO: 317268 - RNA, 32 nt, Human
agcccugcccugugguuaggggaggugggugu

SEQ ID NO: 317269 - RNA, 32 nt, Human
agcccugccgagguggaagcuuggaguggcuc

SEQ ID NO: 317270 - RNA, 32 nt, Human
agcccugccgcagcugugccgugguguccagc

SEQ ID NO: 317271 - RNA, 32 nt, Human
agcccugccucccaagaggcugcuguggaugg

SEQ ID NO: 317272 - RNA, 32 nt, Human
agcccugccuccuggguucaagcaauucugua

SEQ ID NO: 317273 - RNA, 32 nt, Human
agcccugccucuguacagccucgaguggacag

SEQ ID NO: 317274 - RNA, 32 nt, Human
agcccugccucuuccccugauuugacccugga

SEQ ID NO: 317275 - RNA, 32 nt, Human
agcccugccucuugaugcagccuggauccagc

SEQ ID NO: 317276 - RNA, 32 nt, Human
agcccugccucuuucauuuccagaccuuggag

SEQ ID NO: 317277 - RNA, 19 nt, Human
agcccugccugcccugccc

SEQ ID NO: 317278 - RNA, 32 nt, Human
agcccugccugcccugccccuccagggggcca

SEQ ID NO: 317279 - RNA, 32 nt, Human
agcccugccuugcugcagccccagcccagaug

SEQ ID NO: 317280 - RNA, 32 nt, Human
agcccugccuuuccuguuauccuuuugaauua

SEQ ID NO: 317281 - RNA, 32 nt, Human
agcccugcgucccugccaguccaggcuuucuu

SEQ ID NO: 317282 - RNA, 32 nt, Human
agcccugcuagauuuuguaugaugcugaauua

SEQ ID NO: 317283 - RNA, 24 nt, Human
agcccugcucacugugcccaggga

SEQ ID NO: 317284 - RNA, 32 nt, Human
agcccugcuccagcagcacuugcccauuccuu

SEQ ID NO: 317285 - RNA, 32 nt, Human
agcccugcuccuccugccuccugggguccagu

SEQ ID NO: 317286 - RNA, 32 nt, Human
agcccugcuccugauggccauggaaggaacau

SEQ ID NO: 317287 - RNA, 32 nt, Human
agcccugcugcaaagccuuuccagaaaaauaa

SEQ ID NO: 317288 - RNA, 25 nt, Human
agcccugcuggauugaugcccaggg

SEQ ID NO: 317289 - RNA, 32 nt, Human
agcccugcuguggccuccuugugguggucccu

SEQ ID NO: 317290 - RNA, 32 nt, Human
agcccuggacaccuaggcaugggugagcuacu

SEQ ID NO: 317291 - RNA, 32 nt, Human
agcccuggagaagggacuggauuccaugaacg

SEQ ID NO: 317292 - RNA, 32 nt, Human
agcccuggagcagcaacuggcugcagaucaca

SEQ ID NO: 317293 - RNA, 32 nt, Human
agcccuggagcuugccagagcagagcgagaaa

SEQ ID NO: 317294 - RNA, 20 nt, Human
agcccuggaggccugagccg

SEQ ID NO: 317295 - RNA, 32 nt, Human
agcccuggaggggagagcgcggacucuagcca

SEQ ID NO: 317296 - RNA, 24 nt, Human
agcccuggaggucaaggcugcagu

SEQ ID NO: 317297 - RNA, 32 nt, Human
agcccuggaggucaaggcugcagugagccaug

SEQ ID NO: 317298 - RNA, 32 nt, Human
agcccuggaggucgaggcuacagugagcuaug

SEQ ID NO: 317299 - RNA, 32 nt, Human
agcccuggagguugaggcugcagugagcuggg

SEQ ID NO: 317300 - RNA, 32 nt, Human
agcccuggagguuucugcagacgaugcggcug

SEQ ID NO: 317301 - RNA, 24 nt, Human
agcccuggaguucaaggcugcagu

SEQ ID NO: 317302 - RNA, 32 nt, Human
agcccuggaguucaaggcugcagugagcugug

SEQ ID NO: 317303 - RNA, 26 nt, Human
agcccuggaguuggagguugcaguga

SEQ ID NO: 317304 - RNA, 32 nt, Human
agcccuggaguuggagguugcagugagcagag

SEQ ID NO: 317305 - RNA, 32 nt, Human
agcccuggaguuugaguccagccugggugaca

SEQ ID NO: 317306 - RNA, 22 nt, Human
agcccuggauuuccugcugcca

SEQ ID NO: 317307 - RNA, 32 nt, Human
agcccuggcagacugaggagccucccaggagc

SEQ ID NO: 317308 - RNA, 19 nt, Human
agcccuggcagcaggaggc

SEQ ID NO: 317309 - RNA, 32 nt, Human
agcccuggccaucuuggacuucuggagcuacc

SEQ ID NO: 317310 - RNA, 32 nt, Human
agcccuggcccagguggugagcgguuugcagu

SEQ ID NO: 317311 - RNA, 18 nt, Human
agcccuggccuccugccc

SEQ ID NO: 317312 - RNA, 32 nt, Human
agcccuggcggcagagguugcagugagccaag

SEQ ID NO: 317313 - RNA, 32 nt, Human
agcccuggcuacaccugcuucagugcaacugg

SEQ ID NO: 317314 - RNA, 32 nt, Human
agcccuggcuccaagggcugccuccugacagc

SEQ ID NO: 317315 - RNA, 32 nt, Human
agcccuggcucccauucaaccuccuuagccag

SEQ ID NO: 317316 - RNA, 32 nt, Human
agcccuggcuccugccuguucucagccccggc

SEQ ID NO: 317317 - RNA, 32 nt, Human
agcccuggcucucacgcugggguuuuggacac

SEQ ID NO: 317318 - RNA, 32 nt, Human
agcccuggcugaagcaagcagucaguacuugc

SEQ ID NO: 317319 - RNA, 32 nt, Human
agcccuggcugcuccaaaaccaaaaagcuggg

SEQ ID NO: 317320 - RNA, 24 nt, Human
agcccugggacccugccagucuca

SEQ ID NO: 317321 - RNA, 25 nt, Human
agcccugggaggagggcagaaggcu

SEQ ID NO: 317322 - RNA, 25 nt, Human
agcccugggaggucaaggcugcagu

SEQ ID NO: 317323 - RNA, 32 nt, Human
agcccugggaggucaaggcugcagugagcugc

SEQ ID NO: 317324 - RNA, 32 nt, Human
agcccugggcaggcaguaggggaggcgccacc

SEQ ID NO: 317325 - RNA, 32 nt, Human
agcccugggccaaggaacacccccuaguccug

SEQ ID NO: 317326 - RNA, 32 nt, Human
agcccugggccuguugacccaccagcuuagga

SEQ ID NO: 317327 - RNA, 32 nt, Human
agcccugggccuugccuucagggaguugacag

SEQ ID NO: 317328 - RNA, 32 nt, Human
agcccuggggcucugaaucugcacuugggagc

SEQ ID NO: 317329 - RNA, 32 nt, Human
agcccugggguggaggcccauugaggauggcc

SEQ ID NO: 317330 - RNA, 32 nt, Human
agcccugggucacccccacucugccucauuuc

SEQ ID NO: 317331 - RNA, 32 nt, Human
agcccuggguggcaccagcaaguguuuggcaa

SEQ ID NO: 317332 - RNA, 32 nt, Human
agcccugguaucuccccaucccuacucccagc

SEQ ID NO: 317333 - RNA, 32 nt, Human
agcccuggucccaccuccuuggcucuacccca

SEQ ID NO: 317334 - RNA, 32 nt, Human
agcccuggugcagggacuccagugaguagggc

SEQ ID NO: 317335 - RNA, 32 nt, Human
agcccuggugggcagagagguagggauggggc

SEQ ID NO: 317336 - RNA, 32 nt, Human
agcccugguuccugcucuuccaugaucagugu

SEQ ID NO: 317337 - RNA, 32 nt, Human
agcccugguuguuaaaaguagggacucugccu

SEQ ID NO: 317338 - RNA, 32 nt, Human
agcccuguauucuuccccuugacccuguguca

SEQ ID NO: 317339 - RNA, 32 nt, Human
agcccugucaccaccugguccuucaugaagag

SEQ ID NO: 317340 - RNA, 21 nt, Human
agcccugucaccuccucuuca

SEQ ID NO: 317341 - RNA, 32 nt, Human
agcccugucaccugugcacaucuugcuggugg

SEQ ID NO: 317342 - RNA, 32 nt, Human
agcccugucccaucccccuccccggguuccuu

SEQ ID NO: 317343 - RNA, 32 nt, Human
agcccuguccccacucacguggcuucucagcg

SEQ ID NO: 317344 - RNA, 32 nt, Human
agcccugucccucccugccuccgccuugccca

SEQ ID NO: 317345 - RNA, 32 nt, Human
agcccugucuccuccccaccucccaaaggucu

SEQ ID NO: 317346 - RNA, 32 nt, Human
agcccugugccuccuagcccaggauuugucuc

SEQ ID NO: 317347 - RNA, 32 nt, Human
agcccugugcuaggcagagcucaggagaccag

SEQ ID NO: 317348 - RNA, 32 nt, Human
agcccuguggcugccuugggccugcccucagc

SEQ ID NO: 317349 - RNA, 32 nt, Human
agcccugugggagggggacaagaauguauagg

SEQ ID NO: 317350 - RNA, 32 nt, Human
agcccuguggucaugguucugaugacaucauc

SEQ ID NO: 317351 - RNA, 32 nt, Human
agcccugugguccugcccuccuggggcucaca

SEQ ID NO: 317352 - RNA, 32 nt, Human
agcccuguucuuccucucccacugaauucuaa

SEQ ID NO: 317353 - RNA, 32 nt, Human
agcccuguuguucugucauggccagugggcag

SEQ ID NO: 317354 - RNA, 18 nt, Human
agcccuguuuuguuggua

SEQ ID NO: 317355 - RNA, 32 nt, Human
agcccuuacaagagguggagcaugcagaugag

SEQ ID NO: 317356 - RNA, 32 nt, Human
agcccuuacuccugguucagugccacgcaggg

SEQ ID NO: 317357 - RNA, 32 nt, Human
agcccuucagaauacugucauuguccuugggg

SEQ ID NO: 317358 - RNA, 32 nt, Human
agcccuucagccaccggucucgaccucuccuc

SEQ ID NO: 317359 - RNA, 32 nt, Human
agcccuucaucccacuuuggagaaugguuuug

SEQ ID NO: 317360 - RNA, 23 nt, Human
agcccuucccacuggcucccuga

SEQ ID NO: 317361 - RNA, 32 nt, Human
agcccuucccagcuccagccccggcuggcccg

SEQ ID NO: 317362 - RNA, 32 nt, Human
agcccuuccccgagacugcugaugucuguaac

SEQ ID NO: 317363 - RNA, 32 nt, Human
agcccuucccuaauuacaccuauccccuacac

SEQ ID NO: 317364 - RNA, 22 nt, Human
agcccuucccuggccccgccgg

SEQ ID NO: 317365 - RNA, 19 nt, Human
agcccuucccuuccccucu

SEQ ID NO: 317366 - RNA, 32 nt, Human
agcgaggaugcagagugacuggaacuucccgu

SEQ ID NO: 317367 - RNA, 32 nt, Human
agcgaggcaugaagcaaagagcugagugaguc

SEQ ID NO: 317368 - RNA, 32 nt, Human
agcgaggcccaaaggggaagccuagcggagcu

SEQ ID NO: 317369 - RNA, 24 nt, Human
agcgaggcccccaggccgccagga

SEQ ID NO: 317370 - RNA, 22 nt, Human
agcgaggcccccagguucaagg

SEQ ID NO: 317371 - RNA, 32 nt, Human
agcgaggcccccagguucaagguguuggcggg

SEQ ID NO: 317372 - RNA, 32 nt, Human
agcgaggcccuccccucugcaccagcucauug

SEQ ID NO: 317373 - RNA, 21 nt, Human
agcgaggccuaagcccccgga

SEQ ID NO: 317374 - RNA, 23 nt, Human
agcgaggccuuccucacucagga

SEQ ID NO: 317375 - RNA, 32 nt, Human
agcgaggcgcgacacugcuggggagaggaggg

SEQ ID NO: 317376 - RNA, 18 nt, Human
agcgaggcggacgggcgg

SEQ ID NO: 317377 - RNA, 32 nt, Human
agcgaggcgggggcgggugaggagggggugac

SEQ ID NO: 317378 - RNA, 32 nt, Human
agcgagggaagguugaggaggagccagagccg

SEQ ID NO: 317379 - RNA, 32 nt, Human
agcgagggaagguugaggaggagccagagccu

SEQ ID NO: 317380 - RNA, 32 nt, Human
agcgagggacgcauggcccugaggcggccgca

SEQ ID NO: 317381 - RNA, 32 nt, Human
agcgagggagaagggaaaggcugucccgggac

SEQ ID NO: 317382 - RNA, 32 nt, Human
agcgagggagagagcgagcgggcgagccggag

SEQ ID NO: 317383 - RNA, 32 nt, Human
agcgagggagagaggaccggucccagcuuuug

SEQ ID NO: 317384 - RNA, 32 nt, Human
agcgagggaggaaguuuccuccgaucaguaga

SEQ ID NO: 317385 - RNA, 32 nt, Human
agcgagggcaaggagagagcagugaggccgga

SEQ ID NO: 317386 - RNA, 32 nt, Human
agcgagggccacuacacuccagccugggugac

SEQ ID NO: 317387 - RNA, 31 nt, Human
agcgagggcuacagaacaggcauucaggagu

SEQ ID NO: 317388 - RNA, 32 nt, Human
agcgaggggcagcagccgaguuaaaguggggg

SEQ ID NO: 317389 - RNA, 32 nt, Human
agcgaggggcgcaagggugggugcauccugcg

SEQ ID NO: 317390 - RNA, 32 nt, Human
agcgaggguccaauccugcccugcgcuagucc

SEQ ID NO: 317391 - RNA, 29 nt, Human
agcgaggguuuuguggugccuggagccug

SEQ ID NO: 317392 - RNA, 32 nt, Human
agcgaggucagcgaguuugagggaggaccgcg

SEQ ID NO: 317393 - RNA, 32 nt, Human
agcgaggugaagcuuugggugcucuggaaggg

SEQ ID NO: 317394 - RNA, 32 nt, Human
agcgaguccagcagaaagcugcagugacccug

SEQ ID NO: 317395 - RNA, 32 nt, Human
agcgagugcccagggugaaucaauggaaaccc

SEQ ID NO: 317396 - RNA, 23 nt, Human
agcgaguggaucaccugagguca

SEQ ID NO: 317397 - RNA, 32 nt, Human
agcgagugugugagcuauggagcgaagagccu

SEQ ID NO: 317398 - RNA, 32 nt, Human
agcgaguuccaggacgaucccgugcugcaggu

SEQ ID NO: 317399 - RNA, 32 nt, Human
agcgauagggucucaccauguugcccaggcug

SEQ ID NO: 317400 - RNA, 32 nt, Human
agcgaucacaucuggugaccaggcugcuucau

SEQ ID NO: 317401 - RNA, 32 nt, Human
agcgaucagacuccggaguuuggcccgggagc

SEQ ID NO: 317402 - RNA, 32 nt, Human
agcgaucagggauaggggcagguuguauggca

SEQ ID NO: 317403 - RNA, 32 nt, Human
agcgaucaugugccuaagccuccugaguagcu

SEQ ID NO: 317404 - RNA, 32 nt, Human
agcgauccacccaucuuggccucccagagugc

SEQ ID NO: 317405 - RNA, 32 nt, Human
agcgauccacccgcccaugccucccagagugc

SEQ ID NO: 317406 - RNA, 32 nt, Human
agcgauccucccacuucagccuuucaaguggc

SEQ ID NO: 317407 - RNA, 32 nt, Human
agcgauccucccaucucagccucccagagugc

SEQ ID NO: 317408 - RNA, 32 nt, Human
agcgauccuccugccuuagccucccagaguac

SEQ ID NO: 317409 - RNA, 32 nt, Human
agcgaucgaugacaccaccagaguuacucacu

SEQ ID NO: 317410 - RNA, 32 nt, Human
agcgaucugccugcuucagccucccagagugc

SEQ ID NO: 317411 - RNA, 32 nt, Human
agcgaugaagaaugucucuagaagagaaugaa

SEQ ID NO: 317412 - RNA, 32 nt, Human
agcgaugacauuugcucucacagcagaugaca

SEQ ID NO: 317413 - RNA, 32 nt, Human
agcgaugacuccagucugggugucccagcgag

SEQ ID NO: 317414 - RNA, 32 nt, Human
agcgaugcaguugggagaggaagcuagaaggg

SEQ ID NO: 317415 - RNA, 29 nt, Human
agcgaugccaagccagcgacccaccaugg

SEQ ID NO: 317416 - RNA, 32 nt, Human
agcgaugcuaucuccucaacucucccucuucu

SEQ ID NO: 317417 - RNA, 32 nt, Human
agcgauggacaaaggcaggcugcccggcuggc

SEQ ID NO: 317418 - RNA, 19 nt, Human
agcgauggauaauaccuaa

SEQ ID NO: 317419 - RNA, 29 nt, Human
agcgauggcggcugggccgaguggguguc

SEQ ID NO: 317420 - RNA, 32 nt, Human
agcgaugugcauuuuguaagcacuuuggagcc

SEQ ID NO: 317421 - RNA, 29 nt, Human
agcgauguugugcgcccauuucucagauc

SEQ ID NO: 317422 - RNA, 32 nt, Human
agcgauguuucaugggcucaagggauccugcc

SEQ ID NO: 317423 - RNA, 32 nt, Human
agcgauucucaugccucagccucccagguagc

SEQ ID NO: 317424 - RNA, 32 nt, Human
agcgauucucaugccucagccucccaguagcu

SEQ ID NO: 317425 - RNA, 32 nt, Human
agcgauucuccucccucagccuccugaguagc

SEQ ID NO: 317426 - RNA, 32 nt, Human
agcgauucuccugccucagccucccagguugc

SEQ ID NO: 317427 - RNA, 32 nt, Human
agcgauucuccuguaucggccucccagguagc

SEQ ID NO: 317428 - RNA, 32 nt, Human
agcgauucucuugccucagccucccagguagc

SEQ ID NO: 317429 - RNA, 32 nt, Human
agcgauucuucugccucagucucccaaguagc

SEQ ID NO: 317430 - RNA, 32 nt, Human
agcgauucuucugcuucagucucccaaguagc

SEQ ID NO: 317431 - RNA, 32 nt, Human
agcgauuucuagaccugggcaucuccauugcu

SEQ ID NO: 317432 - RNA, 32 nt, Human
agcgauuucuggcugcugucaccuccuugcuc

SEQ ID NO: 317433 - RNA, 32 nt, Human
agcgauuugacagcucaccagccuggagcuuu

SEQ ID NO: 317434 - RNA, 32 nt, Human
agcgcaaagaagagcucugacucuccaggggu

SEQ ID NO: 317435 - RNA, 32 nt, Human
agcgcaaaguagaaacugaaaguacacugcug

SEQ ID NO: 317436 - RNA, 22 nt, Human
agcgcaaccaagccuaaaggca

SEQ ID NO: 317437 - RNA, 32 nt, Human
agcgcaagaaccuguucgcagagaugcgcgag

SEQ ID NO: 317438 - RNA, 31 nt, Human
agcgcaaggacaaucucaaccugcacaagaa

SEQ ID NO: 317439 - RNA, 32 nt, Human
agcgcaaugcuacugcccuuccagaaacugug

SEQ ID NO: 317440 - RNA, 32 nt, Human
agcgcacaccuguaauuccagcuacucgggag

SEQ ID NO: 317441 - RNA, 32 nt, Human
agcgcaccauugcacuccagccuugggcgaca

SEQ ID NO: 317442 - RNA, 32 nt, Human
agcgcacgccuguaaucccagcuacucaggag

SEQ ID NO: 317443 - RNA, 32 nt, Human
agcgcacugcaaccuggaccuccugggcucaa

SEQ ID NO: 317444 - RNA, 32 nt, Human
agcgcacugcagccuugaacuccugggcucaa

SEQ ID NO: 317445 - RNA, 32 nt, Human
agcgcagaagucagauggaccgauuggaucga

SEQ ID NO: 317446 - RNA, 19 nt, Human
agcgcagacuggagccuaa

SEQ ID NO: 317447 - RNA, 21 nt, Human
agcgcagaguguaaaauuuaa

SEQ ID NO: 317448 - RNA, 32 nt, Human
agcgcagcaguagcuucagccugucuugggcu

SEQ ID NO: 317449 - RNA, 32 nt, Human
agcgcagccaacaugucggauaccaagguaaa

SEQ ID NO: 317450 - RNA, 32 nt, Human
agcgcagccguucagcacuaccccugccuaua

SEQ ID NO: 317451 - RNA, 32 nt, Human
agcgcaggagaaaaggagggggaagagagucc

SEQ ID NO: 317452 - RNA, 32 nt, Human
agcgcaggcugccacccaccugggcgaccucc

SEQ ID NO: 317453 - RNA, 21 nt, Human
agcgcagggcgcaccccgcuc

SEQ ID NO: 317454 - RNA, 32 nt, Human
agcgcagggcucaggagccagcagggcagagu

SEQ ID NO: 317455 - RNA, 32 nt, Human
agcgcagggggaacccagggagcgcgaugggc

SEQ ID NO: 317456 - RNA, 21 nt, Human
agcgcaggucaggcuaaggcc

SEQ ID NO: 317457 - RNA, 23 nt, Human
agcgcaguccaagaccuugcagg

SEQ ID NO: 317458 - RNA, 20 nt, Human
agcgcagugacagugccuaa

SEQ ID NO: 317459 - RNA, 32 nt, Human
agcgcagugggaacugggaagagcuagcccgg

SEQ ID NO: 317460 - RNA, 32 nt, Human
agcgcaguggucaggcaggagaggcagucgga

SEQ ID NO: 317461 - RNA, 32 nt, Human
agcgcaguucccagcugucucccugcuccucu

SEQ ID NO: 317462 - RNA, 32 nt, Human
agcgcauagauacagcagagcucacagugagu

SEQ ID NO: 317463 - RNA, 32 nt, Human
agcgcaucaaagaggagggggaguggccucac

SEQ ID NO: 317464 - RNA, 32 nt, Human
agcgcaucacacuggccgaggcccugcugcac

SEQ ID NO: 317465 - RNA, 32 nt, Human
agcgcauccuuuuugaucuccugggcggagug

SEQ ID NO: 317466 - RNA, 30 nt, Human
agcgcauggagccagaggaggaggaugaac

SEQ ID NO: 317467 - RNA, 32 nt, Human
agcgcauggcuguaauccuggcuacucaggag

SEQ ID NO: 317468 - RNA, 32 nt, Human
agcgcaugugugugcaccagugcacaagugua

SEQ ID NO: 317469 - RNA, 32 nt, Human
agcgccaagccuugcccaucugggcugcucgc

SEQ ID NO: 317470 - RNA, 32 nt, Human
agcgccaaggcagcaacugggaugggagagug

SEQ ID NO: 317471 - RNA, 32 nt, Human
agcgccacaaggaguacuuggugaggaagagu

SEQ ID NO: 317472 - RNA, 32 nt, Human
agcgccacccccuagccuucuucaaggccucc

SEQ ID NO: 317473 - RNA, 32 nt, Human
agcgccacccgcuucgcuugcaucagcugcgc

SEQ ID NO: 317474 - RNA, 16 nt, Human
agcgccacggcggcgg

SEQ ID NO: 317475 - RNA, 32 nt, Human
agcgccacugcacugcacgccagccuaggcga

SEQ ID NO: 317476 - RNA, 32 nt, Human
agcgccacugcaguccggccugggugaaagag

SEQ ID NO: 317477 - RNA, 20 nt, Human
agcgccagacgcggagcugg

SEQ ID NO: 317478 - RNA, 32 nt, Human
agcgccagagccgaagaaggagacugaaagug

SEQ ID NO: 317479 - RNA, 19 nt, Human
agcgccagagggaggccgg

SEQ ID NO: 317480 - RNA, 21 nt, Human
agcgccagcagcagcagagcg

SEQ ID NO: 317481 - RNA, 32 nt, Human
agcgccagcagcccugcacuccacgcuggcca

SEQ ID NO: 317482 - RNA, 17 nt, Human
agcgccagcagccgggc

SEQ ID NO: 317483 - RNA, 15 nt, Human
agcgccagcagcgcg

SEQ ID NO: 317484 - RNA, 21 nt, Human
agcgccagcagggacaguggc

SEQ ID NO: 317485 - RNA, 18 nt, Human
agcgccagcaguuccggc

SEQ ID NO: 317486 - RNA, 16 nt, Human
agcgccagccaggggc

SEQ ID NO: 317487 - RNA, 18 nt, Human
agcgccagcccauuggcg

SEQ ID NO: 317488 - RNA, 20 nt, Human
agcgccagcccucgggccgg

SEQ ID NO: 317489 - RNA, 32 nt, Human
agcgccagccugggccguggaggugggggcgg

SEQ ID NO: 317490 - RNA, 19 nt, Human
agcgccagcggccgggacg

SEQ ID NO: 317491 - RNA, 17 nt, Human
agcgccagcgucaccgg

SEQ ID NO: 317492 - RNA, 19 nt, Human
agcgccagcguccgagcgg

SEQ ID NO: 317493 - RNA, 20 nt, Human
agcgccagcuccagcaggcg

SEQ ID NO: 317494 - RNA, 19 nt, Human
agcgccagcucugggcugg

SEQ ID NO: 317495 - RNA, 18 nt, Human
agcgccagcugcgugagg

SEQ ID NO: 317496 - RNA, 17 nt, Human
agcgccaggcagcgcgg

SEQ ID NO: 317497 - RNA, 20 nt, Human
agcgccaggcccccgggggg

SEQ ID NO: 317498 - RNA, 17 nt, Human
agcgccaggcccggcgg

SEQ ID NO: 317499 - RNA, 18 nt, Human
agcgccaggccggggugg

SEQ ID NO: 317500 - RNA, 19 nt, Human
agcgccaggccuggggagg

SEQ ID NO: 317501 - RNA, 16 nt, Human
agcgccaggcgcgggc

SEQ ID NO: 317502 - RNA, 17 nt, Human
agcgccaggcgcggggg

SEQ ID NO: 317503 - RNA, 18 nt, Human
agcgccaggcggcggcgg

SEQ ID NO: 317504 - RNA, 20 nt, Human
agcgccaggcguggggccgg

SEQ ID NO: 317505 - RNA, 16 nt, Human
agcgccagggcaagug

SEQ ID NO: 317506 - RNA, 16 nt, Human
agcgccagggcacgcg

SEQ ID NO: 317507 - RNA, 18 nt, Human
agcgccagggucgcgggc

SEQ ID NO: 317508 - RNA, 16 nt, Human
agcgccagugcgggug

SEQ ID NO: 317509 - RNA, 18 nt, Human
agcgccaguuugaggagg

SEQ ID NO: 317510 - RNA, 32 nt, Human
agcgccaucucccgccuccaccauggagccca

SEQ ID NO: 317511 - RNA, 32 nt, Human
agcgccauugcacuccagccugagcgacagag

SEQ ID NO: 317512 - RNA, 32 nt, Human
agcgccauugcacuccagccugggcaacaaga

SEQ ID NO: 317513 - RNA, 32 nt, Human
agcgccauugcacuccagccugggcgacugaa

SEQ ID NO: 317514 - RNA, 32 nt, Human
agcgccauugcacuccagucugggugacagag

SEQ ID NO: 317515 - RNA, 17 nt, Human
agcgccauuggcugggc

SEQ ID NO: 317516 - RNA, 32 nt, Human
agcgcccaagaagaaaauggccauaaguggag

SEQ ID NO: 317517 - RNA, 32 nt, Human
agcgcccagacuaucugaauaaaaugacggga

SEQ ID NO: 317518 - RNA, 32 nt, Human
agcgcccagagccccagucugaggcuuggcgc

SEQ ID NO: 317519 - RNA, 32 nt, Human
agcgcccagcacaucugcccacccugcacagg

SEQ ID NO: 317520 - RNA, 32 nt, Human
agcgcccccaccacagccccaucacaaaggaa

SEQ ID NO: 317521 - RNA, 32 nt, Human
agcgcccccugagaaauguucacucuucaaug

SEQ ID NO: 317522 - RNA, 32 nt, Human
agcgcccccugcccccgaagcuggcuggaaag

SEQ ID NO: 317523 - RNA, 32 nt, Human
agcgccccgccuggccacugcgucuggcauuc

SEQ ID NO: 317524 - RNA, 32 nt, Human
agcgccccucacugcccgugggcacagugagg

SEQ ID NO: 317525 - RNA, 32 nt, Human
agcgccccucagccucugccacugugaaccgg

SEQ ID NO: 317526 - RNA, 32 nt, Human
agcgccccuccccacccagcgcccucacagag

SEQ ID NO: 317527 - RNA, 32 nt, Human
agcgcccggccgucaccccacccgaugaccug

SEQ ID NO: 317528 - RNA, 32 nt, Human
agcgcccggcugggacagucucuccauacccc

SEQ ID NO: 317529 - RNA, 32 nt, Human
agcgcccgggcggaugcagcgagcccacggag

SEQ ID NO: 317530 - RNA, 32 nt, Human
agcgcccuacuuccugugccugccccugccug

SEQ ID NO: 317531 - RNA, 32 nt, Human
agcgcccucccuguccaguuccuugaaggccc

SEQ ID NO: 317532 - RNA, 32 nt, Human
agcgcccugccuggcucggccggcgaagcucu

SEQ ID NO: 317533 - RNA, 32 nt, Human
agcgcccuggacugcugagggugggccaacag

SEQ ID NO: 317534 - RNA, 32 nt, Human
agcgcccugggaccccaaguaugaagccaaag

SEQ ID NO: 317535 - RNA, 17 nt, Human
agcgccgacaggagcgg

SEQ ID NO: 317536 - RNA, 32 nt, Human
agcgccgacccacgcccugccugcucuuccag

SEQ ID NO: 317537 - RNA, 32 nt, Human
agcgccgagcccagauacgcaagaacaucacg

SEQ ID NO: 317538 - RNA, 32 nt, Human
agcgccgaggagagugggaaauucagcccagc

SEQ ID NO: 317539 - RNA, 32 nt, Human
agcgccgaggaggaagagguugauggcggcgg

SEQ ID NO: 317540 - RNA, 22 nt, Human
agcgccgcagccaccgcagcca

SEQ ID NO: 317541 - RNA, 22 nt, Human
agcgccgcccccgccagccagc

SEQ ID NO: 317542 - RNA, 24 nt, Human
agcgccgcccccugcuccacagcg

SEQ ID NO: 317543 - RNA, 22 nt, Human
agcgccgcccuccugcucgcca

SEQ ID NO: 317544 - RNA, 32 nt, Human
agcgccgccgaggcccggggccccagacccug

SEQ ID NO: 317545 - RNA, 23 nt, Human
agcgccgccugguggcagccggc

SEQ ID NO: 317546 - RNA, 32 nt, Human
agcgccgccuucuagucgcagcuccugugcug

SEQ ID NO: 317547 - RNA, 22 nt, Human
agcgccgcgcgagcaggagcgg

SEQ ID NO: 317548 - RNA, 32 nt, Human
agcgccgcuccccucccugcccuccgcccggg

SEQ ID NO: 317549 - RNA, 32 nt, Human
agcgccgcugaauucuaggcagaaagaaaaga

SEQ ID NO: 317550 - RNA, 32 nt, Human
agcgccggaccacccucuguccgccccgagga

SEQ ID NO: 317551 - RNA, 32 nt, Human
agcgccggagcgcgucccugcccuuagcgggg

SEQ ID NO: 317552 - RNA, 32 nt, Human
agcgccggcgcuccgggcccuaggugaccccu

SEQ ID NO: 317553 - RNA, 32 nt, Human
agcgccggcuccaagcccagccagucccucua

SEQ ID NO: 317554 - RNA, 19 nt, Human
agcgccgggaaggcugcug

SEQ ID NO: 317555 - RNA, 32 nt, Human
agcgccgggaagggguuugcagcugcuccguc

SEQ ID NO: 317556 - RNA, 17 nt, Human
agcgccgggcgagggcg

SEQ ID NO: 317557 - RNA, 32 nt, Human
agcgccggggcgugggcugagcacagcgcuuc

SEQ ID NO: 317558 - RNA, 19 nt, Human
agcgccgguugacgugcgg

SEQ ID NO: 317559 - RNA, 21 nt, Human
agcgccuagcagccccaagca

SEQ ID NO: 317560 - RNA, 18 nt, Human
agcgccuauuguuuguaa

SEQ ID NO: 317561 - RNA, 32 nt, Human
agcgccuccaagguuugucuugaagcauagcu

SEQ ID NO: 317562 - RNA, 32 nt, Human
agcgccucccagccugccgcccggcuaugaug

SEQ ID NO: 317563 - RNA, 32 nt, Human
agcgccucccaguucuggaggagccagguucc

SEQ ID NO: 317564 - RNA, 32 nt, Human
agcgccuccgucucucuccauuguguuccgac

SEQ ID NO: 317565 - RNA, 32 nt, Human
agcgccuccuccagguccuccuggguccccuc

SEQ ID NO: 317566 - RNA, 32 nt, Human
agcgccucgccugccccugccuuggccaaugc

SEQ ID NO: 317567 - RNA, 17 nt, Human
agcgccucuaugagaug

SEQ ID NO: 317568 - RNA, 32 nt, Human
agcgccucuccuccaugguccugucugucagc

SEQ ID NO: 317569 - RNA, 19 nt, Human
agcgccucugccacugccu

SEQ ID NO: 317570 - RNA, 32 nt, Human
agcgccucugcucucucccgguauccgcauuu

SEQ ID NO: 317571 - RNA, 32 nt, Human
agcgccucugucgcugggacccuucagaacuc

SEQ ID NO: 317572 - RNA, 32 nt, Human
agcgccugaggcaggagaaucgcuugaacccc

SEQ ID NO: 317573 - RNA, 32 nt, Human
agcgccugcagucccagcuacuugggaggcua

SEQ ID NO: 317574 - RNA, 32 nt, Human
agcgccugccucggccccuccucugcccccgc

SEQ ID NO: 317575 - RNA, 32 nt, Human
agcgccugcgucgcuucaucucccaggagcug

SEQ ID NO: 317576 - RNA, 32 nt, Human
agcgccugggaggcucgguaggaggagucuuc

SEQ ID NO: 317577 - RNA, 32 nt, Human
agcgccugggggagggggacuggagaggcgag

SEQ ID NO: 317578 - RNA, 19 nt, Human
agcgccugguauggugcgg

SEQ ID NO: 317579 - RNA, 32 nt, Human
agcgccuguagucccagcuacucgagagccug

SEQ ID NO: 317580 - RNA, 32 nt, Human
agcgccuguagucccagcuacucgggaggcug

SEQ ID NO: 317581 - RNA, 32 nt, Human
agcgccuguagucccagcuacucuggaggcug

SEQ ID NO: 317582 - RNA, 32 nt, Human
agcgccuguucaacuuuguccucucucagaga

SEQ ID NO: 317583 - RNA, 32 nt, Human
agcgccuucccaacaaugugccccucaccccu

SEQ ID NO: 317584 - RNA, 32 nt, Human
agcgccuugaaggagcacagcuggggugccug

SEQ ID NO: 317585 - RNA, 32 nt, Human
agcgccuuuccugucugugguuuaagucuuug

SEQ ID NO: 317586 - RNA, 32 nt, Human
agcgcgaccaugucccaucacuggggguacgg

SEQ ID NO: 317587 - RNA, 32 nt, Human
agcgcgagccgcggccggcgccgcugcagagc

SEQ ID NO: 317588 - RNA, 32 nt, Human
agcgcgagugccagagcccagccggcgcggag

SEQ ID NO: 317589 - RNA, 32 nt, Human
agcgcgcauccucccuuccuccuuucggagaa

SEQ ID NO: 317590 - RNA, 32 nt, Human
agcgcgccauccccaaggcagcuccugcugug

SEQ ID NO: 317591 - RNA, 22 nt, Human
agcgcgccccagcagggcccgc

SEQ ID NO: 317592 - RNA, 20 nt, Human
agcgcgcccccgccccggac

SEQ ID NO: 317593 - RNA, 32 nt, Human
agcgcgcccugcccuggcgcagccagagccgc

SEQ ID NO: 317594 - RNA, 19 nt, Human
agcgcgccggcgugagcgg

SEQ ID NO: 317595 - RNA, 23 nt, Human
agcgcgccuggaagccccgggca

SEQ ID NO: 317596 - RNA, 16 nt, Human
agcgcgccuggccuga

SEQ ID NO: 317597 - RNA, 20 nt, Human
agcgcgcgacacugcccgga

SEQ ID NO: 317598 - RNA, 32 nt, Human
agcgcgcggagaagaacggggagccagcauca

SEQ ID NO: 317599 - RNA, 32 nt, Human
agcgcgcggccuuggagccgucucuugggccc

SEQ ID NO: 317600 - RNA, 21 nt, Human
agcgcgcgggcuggcaggcug

SEQ ID NO: 317601 - RNA, 19 nt, Human
agcgcgcggggcccggcca

SEQ ID NO: 317602 - RNA, 32 nt, Human
agcgcgcgucccuucgugccuaggcgagagcc

SEQ ID NO: 317603 - RNA, 21 nt, Human
agcgcgcgugcaccuccagac

SEQ ID NO: 317604 - RNA, 22 nt, Human
agcgcgcgugcagccccggaca

SEQ ID NO: 317605 - RNA, 19 nt, Human
agcgcgcgugcagccgccg

SEQ ID NO: 317606 - RNA, 19 nt, Human
agcgcgcgugcgcacgaca

SEQ ID NO: 317607 - RNA, 32 nt, Human
agcgcgcucccggggagguguugcagccaugg

SEQ ID NO: 317608 - RNA, 32 nt, Human
agcgcgcucugcccggcuuccucagucuccuc

SEQ ID NO: 317609 - RNA, 32 nt, Human
agcgcgcucugccugccgccugccugccugcc

SEQ ID NO: 317610 - RNA, 32 nt, Human
agcgcgcugagcagacagagcgggagaacgcg

SEQ ID NO: 317611 - RNA, 21 nt, Human
agcgcgcugcugcggcugcug

SEQ ID NO: 317612 - RNA, 32 nt, Human
agcgcgcugugcaaagcgcucucggggucuuu

SEQ ID NO: 317613 - RNA, 22 nt, Human
agcgcggacggcugggcugcug

SEQ ID NO: 317614 - RNA, 32 nt, Human
agcgcggagacagcaagagaucuuguccagac

SEQ ID NO: 317615 - RNA, 32 nt, Human
agcgcggagaggaggcuggaagaggaagaugc

SEQ ID NO: 317616 - RNA, 32 nt, Human
agcgcggagagggcagcggacugagcggagcc

SEQ ID NO: 317617 - RNA, 32 nt, Human
agcgcggaggggaagggagcccccagcccugc

SEQ ID NO: 317618 - RNA, 32 nt, Human
agcgcggcaggguuaucaccagaucugggcuu

SEQ ID NO: 317619 - RNA, 32 nt, Human
agcgcggccaccggcgggagugcagcggccac

SEQ ID NO: 317620 - RNA, 32 nt, Human
agcgcggccugggaugcuuuuucccuccggca

SEQ ID NO: 317621 - RNA, 18 nt, Human
agcgcggcgggggcugcu

SEQ ID NO: 317622 - RNA, 32 nt, Human
agcgcggcugacacacacguucaagcccagga

SEQ ID NO: 317623 - RNA, 32 nt, Human
agcgcgggacaggcagaugcagugagugaggg

SEQ ID NO: 317624 - RNA, 24 nt, Human
agcgcgggaccagcagcaagggcc

SEQ ID NO: 317625 - RNA, 32 nt, Human
agcgcgggagagagugagagagagugagagca

SEQ ID NO: 317626 - RNA, 32 nt, Human
agcgcgggagcagcagcagaggcggaggcucc

SEQ ID NO: 317627 - RNA, 32 nt, Human
agcgcgggaggcggcggcggcgcggagcccag

SEQ ID NO: 317628 - RNA, 32 nt, Human
agcgcgggauuuccuuucucucucacucucuu

SEQ ID NO: 317629 - RNA, 21 nt, Human
agcgcgggcugcagcaugggc

SEQ ID NO: 317630 - RNA, 20 nt, Human
agcgcggggagacaugccug

SEQ ID NO: 317631 - RNA, 18 nt, Human
agcgcggggagcggcagc

SEQ ID NO: 317632 - RNA, 20 nt, Human
agcgcggggagcggggccgc

SEQ ID NO: 317633 - RNA, 32 nt, Human
agcgcggggaggcucugggcucagggaagcug

SEQ ID NO: 317634 - RNA, 32 nt, Human
agcgcgggggagaagagugcgcaggucagagg

SEQ ID NO: 317635 - RNA, 19 nt, Human
agcgcgggggcggcuccug

SEQ ID NO: 317636 - RNA, 22 nt, Human
agcgcggggggcaaauaagacc

SEQ ID NO: 317637 - RNA, 20 nt, Human
agcgcggggggccgcggcug

SEQ ID NO: 317638 - RNA, 32 nt, Human
agcgcgguuucagcauuuaauuuuaagggagc

SEQ ID NO: 317639 - RNA, 32 nt, Human
agcgcguagccggagcgccuggggaaggcgga

SEQ ID NO: 317640 - RNA, 32 nt, Human
agcgcgucccccaucaguggggcaccagcgcu

SEQ ID NO: 317641 - RNA, 32 nt, Human
agcgcgucccgcagccggcuggucccugucgc

SEQ ID NO: 317642 - RNA, 32 nt, Human
agcgcguccuggccaagccgaguagugucuuc

SEQ ID NO: 317643 - RNA, 32 nt, Human
agcgcgucuuucuccugucuccuccccaagau

SEQ ID NO: 317644 - RNA, 32 nt, Human
agcgcgugccauuucacuccagccuggacaac

SEQ ID NO: 317645 - RNA, 32 nt, Human
agcgcuacuggagaagaggagcaacaccugug

SEQ ID NO: 317646 - RNA, 32 nt, Human
agcgcuaggauuacaagcaugagccacggcag

SEQ ID NO: 317647 - RNA, 32 nt, Human
agcgcuaggauuacaggugugagccacugcgc

SEQ ID NO: 317648 - RNA, 32 nt, Human
agcgcuauggcagagggcagcggggaaguggu

SEQ ID NO: 317649 - RNA, 32 nt, Human
agcgcucaggccagggccggcgggggcacugc

SEQ ID NO: 317650 - RNA, 23 nt, Human
agcgcucaggcugggugcagugg

SEQ ID NO: 317651 - RNA, 32 nt, Human
agcgcuccagccuggucgacagagugagacuc

SEQ ID NO: 317652 - RNA, 32 nt, Human
agcgcucccccugccuugccccuggggccucc

SEQ ID NO: 317653 - RNA, 32 nt, Human
agcgcuccucacggaucccucucucucgggcc

SEQ ID NO: 317654 - RNA, 32 nt, Human
agcgcuccugguagcugggacuacaggcacag

SEQ ID NO: 317655 - RNA, 22 nt, Human
agcgcucgccacgcucagugcc

SEQ ID NO: 317656 - RNA, 32 nt, Human
agcgcucgcuucuccguuguguguuuugcaug

SEQ ID NO: 317657 - RNA, 32 nt, Human
agcgcucggagcagugcagguuucguuauccu

SEQ ID NO: 317658 - RNA, 32 nt, Human
agcgcucucuggccuccgccuccgccagggag

SEQ ID NO: 317659 - RNA, 32 nt, Human
agcgcugaaacugaacaucuccuggguucuuc

SEQ ID NO: 317660 - RNA, 32 nt, Human
agcgcugagauuacaggugugagccaccgugc

SEQ ID NO: 317661 - RNA, 32 nt, Human
agcgcugagcagagcagguggaagaggaacuu

SEQ ID NO: 317662 - RNA, 32 nt, Human
agcgcugagccaugcucgcgaacugugggucu

SEQ ID NO: 317663 - RNA, 32 nt, Human
agcgcugcaagggccagcgcccaaccugucgc

SEQ ID NO: 317664 - RNA, 32 nt, Human
agcgcugcagcagggagguggggugggcggua

SEQ ID NO: 317665 - RNA, 32 nt, Human
agcgcugcagccccagccugagcagcagccgu

SEQ ID NO: 317666 - RNA, 32 nt, Human
agcgcugcauuuucuccccucucccucccucc

SEQ ID NO: 317667 - RNA, 18 nt, Human
agcgcugccccaaggcgg

SEQ ID NO: 317668 - RNA, 23 nt, Human
agcgcugccccugcccccacccu

SEQ ID NO: 317669 - RNA, 22 nt, Human
agcgcuggccccagcauggagg

SEQ ID NO: 317670 - RNA, 16 nt, Human
agcgcuggcugaacug

SEQ ID NO: 317671 - RNA, 32 nt, Human
agcgcugggaaucagucacugugcuauccuug

SEQ ID NO: 317672 - RNA, 32 nt, Human
agcgcugggauuacaggcaggagccacugagc

SEQ ID NO: 317673 - RNA, 32 nt, Human
agcgcugggauuacaggcaugagccaccaugc

SEQ ID NO: 317674 - RNA, 32 nt, Human
agcgcugggauuacaggcaugagccaccgugc

SEQ ID NO: 317675 - RNA, 32 nt, Human
agcgcugggauuacaggcgugagccaccacac

SEQ ID NO: 317676 - RNA, 32 nt, Human
agcgcugggauuacaggcgugagccaccgcgc

SEQ ID NO: 317677 - RNA, 32 nt, Human
agcgcugggauuacaggcgugagccaccucgc

SEQ ID NO: 317678 - RNA, 32 nt, Human
agcgcugggauuacaggugugagccacugagc

SEQ ID NO: 317679 - RNA, 32 nt, Human
agcgcugggauuacaggugugagccacugugc

SEQ ID NO: 317680 - RNA, 32 nt, Human
agcgcugggauuauaggcgugagccaccgccc

SEQ ID NO: 317681 - RNA, 32 nt, Human
agcgcugggauuauaggucugugccgccuccc

SEQ ID NO: 317682 - RNA, 23 nt, Human
agcgcugggcuggugugcagugg

SEQ ID NO: 317683 - RNA, 32 nt, Human
agcgcugggcuggugugcaguggugcgaccac

SEQ ID NO: 317684 - RNA, 32 nt, Human
agcgcugggguuuugcagacgugaccuagggc

SEQ ID NO: 317685 - RNA, 32 nt, Human
agcgcuggucccaccuccuuccuuccaaacug

SEQ ID NO: 317686 - RNA, 32 nt, Human
agcgcuggugaagccaacauagagacugucaa

SEQ ID NO: 317687 - RNA, 32 nt, Human
agcgcugguguggacgggaagcucccggcccg

SEQ ID NO: 317688 - RNA, 32 nt, Human
agcgcugucugugggucccuugccccggagcu

SEQ ID NO: 317689 - RNA, 32 nt, Human
agcgcugugugugugcucuuauuuccacuggc

SEQ ID NO: 317690 - RNA, 32 nt, Human
agcgcuuacccacucuuuccgggaggccaguu

SEQ ID NO: 317691 - RNA, 32 nt, Human
agcgcuucagcaaccgcucccaccuccuccag

SEQ ID NO: 317692 - RNA, 32 nt, Human
agcgcuucagggaggucagaauggagccgaac

SEQ ID NO: 317693 - RNA, 17 nt, Human
agcgcuucagugggcgg

SEQ ID NO: 317694 - RNA, 19 nt, Human
agcgcuuccaggcccacca

SEQ ID NO: 317695 - RNA, 32 nt, Human
agcgcuuccgagcugugcccagucccgggaau

SEQ ID NO: 317696 - RNA, 32 nt, Human
agcgcuuccuaccugguggucuucagcaaugc

SEQ ID NO: 317697 - RNA, 32 nt, Human
agcgcuuccuucaguuccucacccaucagcca

SEQ ID NO: 317698 - RNA, 32 nt, Human
agcgcuucggccuguccuccgcacuggagacu

SEQ ID NO: 317699 - RNA, 19 nt, Human
agcgcuucguagccccgga

SEQ ID NO: 317700 - RNA, 32 nt, Human
agcgcuucuacuggcccuccugcugccaccac

SEQ ID NO: 317701 - RNA, 32 nt, Human
agcgcuugaggcuugaagagggagacaagcua

SEQ ID NO: 317702 - RNA, 32 nt, Human
agcgcuugccucucccuggcccagggcugacu

SEQ ID NO: 317703 - RNA, 32 nt, Human
agcgcuuguccacccucccuuagcucugacuc

SEQ ID NO: 317704 - RNA, 32 nt, Human
agcgcuuucagcuggaccacucaggccuggac

SEQ ID NO: 317705 - RNA, 32 nt, Human
agcgcuuugcacaugcacccuccugaguuugg

SEQ ID NO: 317706 - RNA, 32 nt, Human
agcgcuuuugccugugugauuuccucuggguu

SEQ ID NO: 317707 - RNA, 32 nt, Human
agcggaaaaugauccagucacagauaucauuu

SEQ ID NO: 317708 - RNA, 32 nt, Human
agcggaaaccgcgggagccgagcccagcuagg

SEQ ID NO: 317709 - RNA, 31 nt, Human
agcggaaagcggucucccauguauaagaaaa

SEQ ID NO: 317710 - RNA, 32 nt, Human
agcggaacaagaaaauagauuuccaguggguu

SEQ ID NO: 317711 - RNA, 32 nt, Human
agcggaacgaacagcugucugccuuguuguga

SEQ ID NO: 317712 - RNA, 32 nt, Human
agcggaagaaaagagagaguucaaguggaugg

SEQ ID NO: 317713 - RNA, 32 nt, Human
agcggaaggccgcuuccuuucucagcugaacc

SEQ ID NO: 317714 - RNA, 32 nt, Human
agcggaaggugaggcaccugaggcagagaaag

SEQ ID NO: 317715 - RNA, 32 nt, Human
agcggaauggguacugucuaggaggacugggc

SEQ ID NO: 317716 - RNA, 32 nt, Human
agcggacaccuccucaggcuuaaaucucaggc

SEQ ID NO: 317717 - RNA, 32 nt, Human
agcggacaggcuggugggcgagcgagaggcgg

SEQ ID NO: 317718 - RNA, 32 nt, Human
agcggacccacuccccucacauuccacaggcc

SEQ ID NO: 317719 - RNA, 32 nt, Human
agcggaccuaaaggaaggaccccacacacacc

SEQ ID NO: 317720 - RNA, 23 nt, Human
agcggaccucacagcagccccag

SEQ ID NO: 317721 - RNA, 32 nt, Human
agcggacggaggagcagagggagaaagcgagg

SEQ ID NO: 317722 - RNA, 21 nt, Human
agcggacggcggcggaggaga

SEQ ID NO: 317723 - RNA, 32 nt, Human
agcggacucccagccccucauuagauuguuuu

SEQ ID NO: 317724 - RNA, 32 nt, Human
agcggacucuuucucucucacucucucucuuu

SEQ ID NO: 317725 - RNA, 32 nt, Human
agcggacugcagccgcgagcuccuggaggcgg

SEQ ID NO: 317726 - RNA, 32 nt, Human
agcggacuuauuuaccaagcauuggaggaaua

SEQ ID NO: 317727 - RNA, 22 nt, Human
agcggagagcugaccccagaga

SEQ ID NO: 317728 - RNA, 32 nt, Human
agcggagagggcuagcccugagcccggcgcuc

SEQ ID NO: 317729 - RNA, 19 nt, Human
agcggagcagggcgccgag

SEQ ID NO: 317730 - RNA, 32 nt, Human
agcggagccagcugagcccgagcccagcccgc

SEQ ID NO: 317731 - RNA, 32 nt, Human
agcggagcccaggagagcagagagcgagccug

SEQ ID NO: 317732 - RNA, 32 nt, Human
agcggagccggggagagcgaggaccccgcaca

SEQ ID NO: 317733 - RNA, 18 nt, Human
agcggagcgccugggcgg

SEQ ID NO: 317734 - RNA, 32 nt, Human
agcggaggaggacgcccaggaggaggcggcgg

SEQ ID NO: 317735 - RNA, 32 nt, Human
agcggaggaggaggaggaggcgaggaggagag

SEQ ID NO: 317736 - RNA, 32 nt, Human
agcggaggccgcacuccagcacugcgcaggga

SEQ ID NO: 317737 - RNA, 32 nt, Human
agcggaggcugcagcccgggccgcgauggggg

SEQ ID NO: 317738 - RNA, 32 nt, Human
agcggagggaggggccgcgccgcggagcgugc

SEQ ID NO: 317739 - RNA, 32 nt, Human
agcggagggcgaggaggagcagaggagcacac

SEQ ID NO: 317740 - RNA, 32 nt, Human
agcggagggcgggaagaaggaggaggccucua

SEQ ID NO: 317741 - RNA, 32 nt, Human
agcggagucacccucccgccguuacccgcggc

SEQ ID NO: 317742 - RNA, 32 nt, Human
agcggaguugcagaauccaaggacccauuuug

SEQ ID NO: 317743 - RNA, 32 nt, Human
agcggaguugggagccugauggaggacaagua

SEQ ID NO: 317744 - RNA, 32 nt, Human
agcggaguuuacucgggagagggcggagaaau

SEQ ID NO: 317745 - RNA, 32 nt, Human
agcggauagagcaggagagcaccaccggagcc

SEQ ID NO: 317746 - RNA, 32 nt, Human
agcggauagggaggucggguagaggcucccgg

SEQ ID NO: 317747 - RNA, 32 nt, Human
agcggaucccagcagguuaggccggaggaaca

SEQ ID NO: 317748 - RNA, 32 nt, Human
agcggaucccggggcugggauugcgcgcccgc

SEQ ID NO: 317749 - RNA, 32 nt, Human
agcggaugaacagcagguucuccuaggcuuug

SEQ ID NO: 317750 - RNA, 32 nt, Human
agcggaugugugugugcgugugcgcgcguggc

SEQ ID NO: 317751 - RNA, 32 nt, Human
agcggauguguuuugggggaaacagagagaaa

SEQ ID NO: 317752 - RNA, 32 nt, Human
agcggcaaccucuagccaggagcccaguggcc

SEQ ID NO: 317753 - RNA, 32 nt, Human
agcggcaccauggcuuuccucuggcuccucuc

SEQ ID NO: 317754 - RNA, 32 nt, Human
agcggcacugcacuccagccugggugacaaag

SEQ ID NO: 317755 - RNA, 32 nt, Human
agcggcagcagcggcgccgccucccagaguuc

SEQ ID NO: 317756 - RNA, 32 nt, Human
agcggcagccaucuugguuuuaggaaaugggg

SEQ ID NO: 317757 - RNA, 32 nt, Human
agcggcaggaauagcaggcaacgugauuucaa

SEQ ID NO: 317758 - RNA, 32 nt, Human
agcggcaggagaguccggccgcgacaggacga

SEQ ID NO: 317759 - RNA, 32 nt, Human
agcggcaguacgagcugcagcccuaccggccg

SEQ ID NO: 317760 - RNA, 32 nt, Human
agcggcauccaggcuucucucaccuccauuag

SEQ ID NO: 317761 - RNA, 32 nt, Human
agcggcauugcacuccagccugggcaacaaga

SEQ ID NO: 317762 - RNA, 32 nt, Human
agcggccacaacugucuagggcucagacacca

SEQ ID NO: 317763 - RNA, 31 nt, Human
agcggccacagcuagaaaacagucugcagug

SEQ ID NO: 317764 - RNA, 32 nt, Human
agcggccccaaaauucccaccuugauuuccau

SEQ ID NO: 317765 - RNA, 32 nt, Human
agcggccccagugcccuugaccaggaacaucu

SEQ ID NO: 317766 - RNA, 32 nt, Human
agcggccccgagaguccggggagggagguuua

SEQ ID NO: 317767 - RNA, 32 nt, Human
agcggcccggugaggcggggaggcggcggccg

SEQ ID NO: 317768 - RNA, 32 nt, Human
agcggcccuccagccggcgucgcucaggcugc

SEQ ID NO: 317769 - RNA, 32 nt, Human
agcggcccugcagggggccagccugggggaac

SEQ ID NO: 317770 - RNA, 18 nt, Human
agcggcccugcgcuguca

SEQ ID NO: 317771 - RNA, 32 nt, Human
agcggccggaccagcuggaggagacgcgcccg

SEQ ID NO: 317772 - RNA, 32 nt, Human
agcggccuacagcucccugcaggcugguggcc

SEQ ID NO: 317773 - RNA, 19 nt, Human
agcggccucagccccggca

SEQ ID NO: 317774 - RNA, 22 nt, Human
agcggccucagcgcuuccgcug

SEQ ID NO: 317775 - RNA, 31 nt, Human
agcggccuccagugugggccugguccagaca

SEQ ID NO: 317776 - RNA, 32 nt, Human
agcggccuccugaaggaggggaagggacgugg

SEQ ID NO: 317777 - RNA, 32 nt, Human
agcggccucugcaggaucugcagcuguggaag

SEQ ID NO: 317778 - RNA, 24 nt, Human
agcggccugaucuggguuccgcug

SEQ ID NO: 317779 - RNA, 32 nt, Human
agcggccugccugccucccugcgcacccgcag

SEQ ID NO: 317780 - RNA, 21 nt, Human
agcggcgacccagcacggcgg

SEQ ID NO: 317781 - RNA, 32 nt, Human
agcggcgaccggagcgguaggagcagcaauuu

SEQ ID NO: 317782 - RNA, 24 nt, Human
agcggcgcuggcgcggcccaggca

SEQ ID NO: 317783 - RNA, 32 nt, Human
agcggcggaggagcgaggcggggcgaggcagg

SEQ ID NO: 317784 - RNA, 18 nt, Human
agcggcggcacauggcgg

SEQ ID NO: 317785 - RNA, 20 nt, Human
agcggcggcagcagcaggcg

SEQ ID NO: 317786 - RNA, 20 nt, Human
agcggcggccagcagggcgg

SEQ ID NO: 317787 - RNA, 32 nt, Human
agcggcggcgaaggaggggaagaagagccgcg

SEQ ID NO: 317788 - RNA, 32 nt, Human
agcggcggcgggcgcuggaggcuuucaaaggu

SEQ ID NO: 317789 - RNA, 32 nt, Human
agcggcggcucaugccuguaaucccaggacuu

SEQ ID NO: 317790 - RNA, 32 nt, Human
agcggcggcugcggaaagcggagggaguccga

SEQ ID NO: 317791 - RNA, 32 nt, Human
agcggcggcuuuagcgucagugacuaggcagc

SEQ ID NO: 317792 - RNA, 32 nt, Human
agcggcgggagcggugcgggagagggguugga

SEQ ID NO: 317793 - RNA, 32 nt, Human
agcggcgggccgcagagguucaagcgauucuc

SEQ ID NO: 317794 - RNA, 32 nt, Human
agcggcgggcugaagggcuccucaagcguggc

SEQ ID NO: 317795 - RNA, 32 nt, Human
agcggcgggcugaagggcuccucaagugccgc

SEQ ID NO: 317796 - RNA, 32 nt, Human
agcggcggggucgcgggacaggagaagcggag

SEQ ID NO: 317797 - RNA, 32 nt, Human
agcggcggugggaggagugggggaccuggagg

SEQ ID NO: 317798 - RNA, 32 nt, Human
agcggcggugugagcgcggugggugcggaggg

SEQ ID NO: 317799 - RNA, 32 nt, Human
agcggcgugcguaaugucggcacuuugcuggg

SEQ ID NO: 317800 - RNA, 32 nt, Human
agcggcguugggguuuggcugcaguggcagug

SEQ ID NO: 317801 - RNA, 32 nt, Human
agcggcucagcagucccugggggaagccauug

SEQ ID NO: 317802 - RNA, 32 nt, Human
agcggcuccagaggaggcaggcgagugagcga

SEQ ID NO: 317803 - RNA, 32 nt, Human
agcggcuccaggccuccucugggcccagggcc

SEQ ID NO: 317804 - RNA, 32 nt, Human
agcggcucccgcaggacagggugcucggcguc

SEQ ID NO: 317805 - RNA, 32 nt, Human
agcggcuccuccccaucucacccccagcacac

SEQ ID NO: 317806 - RNA, 22 nt, Human
agcggcucucaacacacaccua

SEQ ID NO: 317807 - RNA, 32 nt, Human
agcggcucucacaccagcaucuugcuggauag

SEQ ID NO: 317808 - RNA, 32 nt, Human
agcggcucuguuuccuccuuccuuccuuggcc

SEQ ID NO: 317809 - RNA, 32 nt, Human
agcggcugaggcaggagaauugcuugaaccug

SEQ ID NO: 317810 - RNA, 32 nt, Human
agcggcugcagcguugguagcaucagcaucag

SEQ ID NO: 317811 - RNA, 32 nt, Human
agcggcugccgaucacgguccacccaccccag

SEQ ID NO: 317812 - RNA, 32 nt, Human
agcggcuggccagaggaugagacuccccaaac

SEQ ID NO: 317813 - RNA, 23 nt, Human
agcggcuggcggugccugggcca

SEQ ID NO: 317814 - RNA, 32 nt, Human
agcggcugggcccaggcuguggcaugauggcc

SEQ ID NO: 317815 - RNA, 32 nt, Human
agcggcuggucagggccaguucugcucccugg

SEQ ID NO: 317816 - RNA, 20 nt, Human
agcggcuguacacgggccgg

SEQ ID NO: 317817 - RNA, 32 nt, Human
agcggcuguaccugcugcggcaguggcgguca

SEQ ID NO: 317818 - RNA, 32 nt, Human
agcggcuguuccaggcuaacagcugugggagg

SEQ ID NO: 317819 - RNA, 32 nt, Human
agcggcuuccgcucgugguggaaggugaaggg

SEQ ID NO: 317820 - RNA, 32 nt, Human
agcggcuuuccaggacggugcgaugugcugcg

SEQ ID NO: 317821 - RNA, 32 nt, Human
agcgggaacacggggugucugcgcauguuucc

SEQ ID NO: 317822 - RNA, 32 nt, Human
agcgggaauggguggaggccgggggaauaaaa

SEQ ID NO: 317823 - RNA, 21 nt, Human
agcgggacaggaugucacaga

SEQ ID NO: 317824 - RNA, 32 nt, Human
agcgggacagggccacggagacaaacuaagga

SEQ ID NO: 317825 - RNA, 32 nt, Human
agcgggaccagagagacaggcugcuggguucc

SEQ ID NO: 317826 - RNA, 32 nt, Human
agcgggaccagguggaggcggcggcggcagag

SEQ ID NO: 317827 - RNA, 32 nt, Human
agcgggaccauuauuacuggugcaaaaugagu

SEQ ID NO: 317828 - RNA, 32 nt, Human
agcgggacccagucaaaccccauucaggucau

SEQ ID NO: 317829 - RNA, 22 nt, Human
agcgggaccccagcgcgggcgg

SEQ ID NO: 317830 - RNA, 32 nt, Human
agcgggaccggccucagcuccaacacagccuc

SEQ ID NO: 317831 - RNA, 32 nt, Human
agcgggaccgguaggggccggagcagcggcgg

SEQ ID NO: 317832 - RNA, 23 nt, Human
agcgggaccuagagggccuggaa

SEQ ID NO: 317833 - RNA, 32 nt, Human
agcgggacuucugcucaaauccuguccagggg

SEQ ID NO: 317834 - RNA, 32 nt, Human
agcgggagccggcggcgcaccaccaugaccca

SEQ ID NO: 317835 - RNA, 32 nt, Human
agcgggagcgcaagaugcgggagcagcagaag

SEQ ID NO: 317836 - RNA, 32 nt, Human
agcgggaggaggcacaucacauagcaagagug

SEQ ID NO: 317837 - RNA, 32 nt, Human
agcgggaggcagcagaggggaaguggucagcg

SEQ ID NO: 317838 - RNA, 32 nt, Human
agcgggaggccguccgggcagcgcggccggcg

SEQ ID NO: 317839 - RNA, 32 nt, Human
agcgggagucaggaccgccuguccucagaccc

SEQ ID NO: 317840 - RNA, 32 nt, Human
agcgggagucgaagcccagcccagggcagccc

SEQ ID NO: 317841 - RNA, 32 nt, Human
agcgggagugauguggaggucgcccugggagc

SEQ ID NO: 317842 - RNA, 17 nt, Human
agcgggaucaagaauuu

SEQ ID NO: 317843 - RNA, 32 nt, Human
agcgggaucacgggugcccaccagggaagggg

SEQ ID NO: 317844 - RNA, 32 nt, Human
agcgggauggagguggaugcagcaguaguccc

SEQ ID NO: 317845 - RNA, 32 nt, Human
agcgggcaaggauugcacguccugccugacca

SEQ ID NO: 317846 - RNA, 32 nt, Human
agcgggcaaugcuagcccuguucuccaauccc

SEQ ID NO: 317847 - RNA, 31 nt, Human
agcgggcacagcuagugcaaaggcccugaga

SEQ ID NO: 317848 - RNA, 32 nt, Human
agcgggcaccaggcuugggggcugaggcccag

SEQ ID NO: 317849 - RNA, 17 nt, Human
agcgggcagcagcaggc

SEQ ID NO: 317850 - RNA, 32 nt, Human
agcgggcagccucagugaaacucuuagguuaa

SEQ ID NO: 317851 - RNA, 32 nt, Human
agcgggcagugcagaaugggccagcagggcug

SEQ ID NO: 317852 - RNA, 32 nt, Human
agcgggcccagagggaccaugaccuugggcuc

SEQ ID NO: 317853 - RNA, 32 nt, Human
agcgggcccaggagccaggcucagguccagcu

SEQ ID NO: 317854 - RNA, 32 nt, Human
agcgggcccuggagcuugcagucggagggccu

SEQ ID NO: 317855 - RNA, 19 nt, Human
agcgggccggaggcggccg

SEQ ID NO: 317856 - RNA, 22 nt, Human
agcgggccggcagcaugugcgg

SEQ ID NO: 317857 - RNA, 32 nt, Human
agcgggccgugcugccccggcugccucgcucu

SEQ ID NO: 317858 - RNA, 32 nt, Human
agcgggccuagggaggaggagcgagaaucagc

SEQ ID NO: 317859 - RNA, 32 nt, Human
agcgggccugagagacaaggacauguggaucc

SEQ ID NO: 317860 - RNA, 32 nt, Human
agcgggccugccgccucuacggaccagucccu

SEQ ID NO: 317861 - RNA, 20 nt, Human
agcgggcgagagaacgcgag

SEQ ID NO: 317862 - RNA, 32 nt, Human
agcgggcgagccggagcgaggaagggaaagcg

SEQ ID NO: 317863 - RNA, 32 nt, Human
agcgggcggagcuggcccugccucugccuggc

SEQ ID NO: 317864 - RNA, 22 nt, Human
agcgggcggaucaccugagguc

SEQ ID NO: 317865 - RNA, 25 nt, Human
agcgggcggcaggagccggcgcgag

SEQ ID NO: 317866 - RNA, 32 nt, Human
agcgggcggcgccgcuggccggaguggcuucg

SEQ ID NO: 317867 - RNA, 32 nt, Human
agcgggcggguguggaagauauuccaucuggg

SEQ ID NO: 317868 - RNA, 32 nt, Human
agcgggcugagauuguuguccucugucaccag

SEQ ID NO: 317869 - RNA, 32 nt, Human
agcgggcuuguagguguccggcuuugcuggcc

SEQ ID NO: 317870 - RNA, 32 nt, Human
agcggggaaauguugagcucaaauggguaaau

SEQ ID NO: 317871 - RNA, 32 nt, Human
agcggggaagaggagagcagcuucaggccgug

SEQ ID NO: 317872 - RNA, 32 nt, Human
agcggggaauggcugagccagggguucgccgc

SEQ ID NO: 317873 - RNA, 32 nt, Human
agcggggacaguggggacagcagggacagcgg

SEQ ID NO: 317874 - RNA, 32 nt, Human
agcggggacccaccaacagaggccaguuucaa

SEQ ID NO: 317875 - RNA, 32 nt, Human
agcggggacucggcgacccugcccucccgacc

SEQ ID NO: 317876 - RNA, 32 nt, Human
agcggggagaggggucagggaggcuaaugguu

SEQ ID NO: 317877 - RNA, 32 nt, Human
agcggggagcccagccgccagagcaggcaccc

SEQ ID NO: 317878 - RNA, 32 nt, Human
agcggggagcccaggcggagcccagucgacuc

SEQ ID NO: 317879 - RNA, 32 nt, Human
agcggggagccuggggcugagauucugggcac

SEQ ID NO: 317880 - RNA, 32 nt, Human
agcggggagcugcuccccaggccacagcagac

SEQ ID NO: 317881 - RNA, 32 nt, Human
agcggggaggaggagaaggaugcagccgccga

SEQ ID NO: 317882 - RNA, 32 nt, Human
agcggggaggcggggcgcagggauccggaaac

SEQ ID NO: 317883 - RNA, 32 nt, Human
agcggggaggggcagaggaguuccccggaacc

SEQ ID NO: 317884 - RNA, 32 nt, Human
agcggggagguggaggaagcugugcggugcag

SEQ ID NO: 317885 - RNA, 32 nt, Human
agcggggaucacaggcaugagccgccacaccc

SEQ ID NO: 317886 - RNA, 32 nt, Human
agcggggauuacaggcacgcgcugccacgccc

SEQ ID NO: 317887 - RNA, 32 nt, Human
agcggggauuacaggcgcacaccaccacaucc

SEQ ID NO: 317888 - RNA, 32 nt, Human
agcggggauuacuggugcgugccaccacaccc

SEQ ID NO: 317889 - RNA, 32 nt, Human
agcggggcaagccgcggagggggugggggagg

SEQ ID NO: 317890 - RNA, 32 nt, Human
agcggggcaggacaaucaucucaguccugcau

SEQ ID NO: 317891 - RNA, 32 nt, Human
agcggggcaggcagggcuguggcagacaggcc

SEQ ID NO: 317892 - RNA, 32 nt, Human
agcggggccaugccauggcagauaaagcucag

SEQ ID NO: 317893 - RNA, 32 nt, Human
agcggggccgggaguggagcagccgccgcggc

SEQ ID NO: 317894 - RNA, 32 nt, Human
agcggggccucggggagcaggugcaggacagg

SEQ ID NO: 317895 - RNA, 32 nt, Human
agcggggcgaacugaggcgagugaaguggacu

SEQ ID NO: 317896 - RNA, 32 nt, Human
agcggggcugagcuuguccugccuucguauug

SEQ ID NO: 317897 - RNA, 32 nt, Human
agcgggggaggaagagaagggagguagcuggc

SEQ ID NO: 317898 - RNA, 32 nt, Human
agcgggggagugaacaagugugcagauguaag

SEQ ID NO: 317899 - RNA, 32 nt, Human
agcgggggcagaggccaagugggcaccggaua

SEQ ID NO: 317900 - RNA, 31 nt, Human
agcggggucgccucugggccucugucugagc

SEQ ID NO: 317901 - RNA, 32 nt, Human
agcggggucugugggagcuagcuuugucagug

SEQ ID NO: 317902 - RNA, 32 nt, Human
agcggggugcaggacuggcuagaggugggugu

SEQ ID NO: 317903 - RNA, 32 nt, Human
agcggggugggauaaacggagcuggacgacuc

SEQ ID NO: 317904 - RNA, 32 nt, Human
agcggggugguggcucaugccuguaaucccag

SEQ ID NO: 317905 - RNA, 32 nt, Human
agcgggguuagaugcagggaguuauguuguga

SEQ ID NO: 317906 - RNA, 32 nt, Human
agcgggguugcgcgggagacuauggcguccuc

SEQ ID NO: 317907 - RNA, 32 nt, Human
agcgggguugggggugguagggauagggcaug

SEQ ID NO: 317908 - RNA, 32 nt, Human
agcgggguuugugguuggcugagguggaggaa

SEQ ID NO: 317909 - RNA, 32 nt, Human
agcggguaacccugccuuguucugucauccag

SEQ ID NO: 317910 - RNA, 23 nt, Human
agcggguagaucacuugagguca

SEQ ID NO: 317911 - RNA, 32 nt, Human
agcgggucucggguugcggguugcagguugca

SEQ ID NO: 317912 - RNA, 32 nt, Human
agcgggugaagcaccugauugccuaaaccacu

SEQ ID NO: 317913 - RNA, 32 nt, Human
agcgggugccuguaaucccaguuacucaggag

SEQ ID NO: 317914 - RNA, 23 nt, Human
agcggguggaucacccgagguca

SEQ ID NO: 317915 - RNA, 23 nt, Human
agcggguggaucaccugagguca

SEQ ID NO: 317916 - RNA, 32 nt, Human
agcggguggcucuuccccaccuugccagcagg

SEQ ID NO: 317917 - RNA, 31 nt, Human
agcgggugggugggugugaagggaugagaau

SEQ ID NO: 317918 - RNA, 32 nt, Human
agcgggugugggugaccaugcccagaaggcca

SEQ ID NO: 317919 - RNA, 32 nt, Human
agcggguuuggcucauuugaaaaugagggucc

SEQ ID NO: 317920 - RNA, 32 nt, Human
agcgguaagaacagugaacacagugguuggga

SEQ ID NO: 317921 - RNA, 20 nt, Human
agcgguagcagcccgggcgg

SEQ ID NO: 317922 - RNA, 32 nt, Human
agcgguccaucucagcgucucccuucaggaac

SEQ ID NO: 317923 - RNA, 32 nt, Human
agcggucccagagccacccugugguccugaua

SEQ ID NO: 317924 - RNA, 32 nt, Human
agcggugaaucggggcccucaccaugaguucc

SEQ ID NO: 317925 - RNA, 32 nt, Human
agcggugacacaccugcaggugucaggcaugg

SEQ ID NO: 317926 - RNA, 32 nt, Human
agcggugagggguggagggaugucgcggagag

SEQ ID NO: 317927 - RNA, 32 nt, Human
agcggugauuugaggggcaaggugcuuagaga

SEQ ID NO: 317928 - RNA, 32 nt, Human
agcggugccaagcagaggggcggcagagacgg

SEQ ID NO: 317929 - RNA, 32 nt, Human
agcggugccacccaaucaugcccagcuucugu

SEQ ID NO: 317930 - RNA, 32 nt, Human
agcgguggaucacgccuguaaucccagcgcuu

SEQ ID NO: 317931 - RNA, 32 nt, Human
agcgguggcaggggcugcaggagcaagugacc

SEQ ID NO: 317932 - RNA, 32 nt, Human
agcgguggcccaccucuuccucccacuacagc

SEQ ID NO: 317933 - RNA, 32 nt, Human
agcgguggcgacaugagcagcggggcggcguc

SEQ ID NO: 317934 - RNA, 32 nt, Human
agcgguggcgaggagaggcgggcggauuuggg

SEQ ID NO: 317935 - RNA, 32 nt, Human
agcgguggcucacaccuguaaucccaacacuu

SEQ ID NO: 317936 - RNA, 32 nt, Human
agcgguggcucacaccuguaaucccagcacuu

SEQ ID NO: 317937 - RNA, 32 nt, Human
agcgguggcucacacuuguaaucccagcacuu

SEQ ID NO: 317938 - RNA, 32 nt, Human
agcgguggcucacgccuguaauccuagcaccu

SEQ ID NO: 317939 - RNA, 32 nt, Human
agcgguggcucaugccuguaaucccagcacuu

SEQ ID NO: 317940 - RNA, 32 nt, Human
agcgguggcucaugccuguaaucccagcccuu

SEQ ID NO: 317941 - RNA, 32 nt, Human
agcggugggcggcaugucuguggccggugggg

SEQ ID NO: 317942 - RNA, 32 nt, Human
agcggugggcugaagggcuccucaagugcccc

SEQ ID NO: 317943 - RNA, 32 nt, Human
agcgguggggaggcggggaggagcagcuggga

SEQ ID NO: 317944 - RNA, 32 nt, Human
agcgguggggcagaggcugcggagccccagga

SEQ ID NO: 317945 - RNA, 32 nt, Human
agcgguggucagacauggaaaugguggggaga

SEQ ID NO: 317946 - RNA, 32 nt, Human
agcgguggucagacguggaaaugguggggaga

SEQ ID NO: 317947 - RNA, 32 nt, Human
agcggugguccccaggacagccagcagguccc

SEQ ID NO: 317948 - RNA, 32 nt, Human
agcgguggugguuccgcgaugguaggcggcgg

SEQ ID NO: 317949 - RNA, 32 nt, Human
agcggugguucaugccuauaaucccaacacuu

SEQ ID NO: 317950 - RNA, 32 nt, Human
agcggugugcagccaccauguucagcuggcug

SEQ ID NO: 317951 - RNA, 32 nt, Human
agcgguucagcccuggcuggggcugcaggggc

SEQ ID NO: 317952 - RNA, 32 nt, Human
agcgguuccagugcccucaaagcaaucugucu

SEQ ID NO: 317953 - RNA, 32 nt, Human
agcgguucuggcugccagccugggcagccugg

SEQ ID NO: 317954 - RNA, 32 nt, Human
agcgguugggccugagccccagggacaaaaga

SEQ ID NO: 317955 - RNA, 32 nt, Human
agcgguuugggcuuggacugaaugacgccacc

SEQ ID NO: 317956 - RNA, 32 nt, Human
agcgguuuguguagaaauuggagagaacuaug

SEQ ID NO: 317957 - RNA, 32 nt, Human
agcguaaguaugcacagaugaagauggaacua

SEQ ID NO: 317958 - RNA, 32 nt, Human
agcguacacuugguuucuuucuuaucugccag

SEQ ID NO: 317959 - RNA, 32 nt, Human
agcguacauagggaagggaggaagggaaaaca

SEQ ID NO: 317960 - RNA, 32 nt, Human
agcguagcagagaagcagagaagcugucagca

SEQ ID NO: 317961 - RNA, 32 nt, Human
agcguagccauucgagagcagccugggcaacg

SEQ ID NO: 317962 - RNA, 32 nt, Human
agcguaggagaaaggccacuggaaaccagagu

SEQ ID NO: 317963 - RNA, 32 nt, Human
agcguaggccuuuuccugucugccuuucuucu

SEQ ID NO: 317964 - RNA, 32 nt, Human
agcguagguuaggagguuuccgggaggcugcu

SEQ ID NO: 317965 - RNA, 19 nt, Human
agcgucaccguggccgugg

SEQ ID NO: 317966 - RNA, 32 nt, Human
agcgucagacuccauuauguacugacugugug

SEQ ID NO: 317967 - RNA, 32 nt, Human
agcgucagcuaggccaauaggaacagaccggg

SEQ ID NO: 317968 - RNA, 32 nt, Human
agcgucaggcugggacacgccaacgcuguucc

SEQ ID NO: 317969 - RNA, 32 nt, Human
agcgucaggcugggggcagucugguacggaac

SEQ ID NO: 317970 - RNA, 32 nt, Human
agcgucaggguccgagagguuaggggucggca

SEQ ID NO: 317971 - RNA, 32 nt, Human
agcgucagguccaccccggaaucccagggacu

SEQ ID NO: 317972 - RNA, 32 nt, Human
agcgucaguagagacagagaacaaggggugaa

SEQ ID NO: 317973 - RNA, 32 nt, Human
agcgucauuuugacaugucauuuccuaucucc

SEQ ID NO: 317974 - RNA, 32 nt, Human
agcguccagcacuccggcgagucuguggagcc

SEQ ID NO: 317975 - RNA, 32 nt, Human
agcguccaguggagaagaaggaagcgaggccc

SEQ ID NO: 317976 - RNA, 32 nt, Human
agcguccauccaucuguccggcuggcggucca

SEQ ID NO: 317977 - RNA, 32 nt, Human
agcguccauggagcaaaaggaaugccaggauc

SEQ ID NO: 317978 - RNA, 32 nt, Human
agcgucccaaagugcugggauuauaggcguga

SEQ ID NO: 317979 - RNA, 32 nt, Human
agcgucccaaguagcuggaauuacagccaugc

SEQ ID NO: 317980 - RNA, 32 nt, Human
agcgucccagagugcugggauuacaguuguga

SEQ ID NO: 317981 - RNA, 20 nt, Human
agcguccccucccuccuccc

SEQ ID NO: 317982 - RNA, 32 nt, Human
agcguccccugcggaagccuggccugcugggg

SEQ ID NO: 317983 - RNA, 32 nt, Human
agcgucccgaagugcugggauuacagguguga

SEQ ID NO: 317984 - RNA, 32 nt, Human
agcgucccgaggagcugggauuacaggcaccc

SEQ ID NO: 317985 - RNA, 32 nt, Human
agcgucccgaguaacugggauuacaggcaccc

SEQ ID NO: 317986 - RNA, 32 nt, Human
agcgucccgaguaguuggcacuacaggugccc

SEQ ID NO: 317987 - RNA, 32 nt, Human
agcgucccgcguagcuggcauacaggugcaag

SEQ ID NO: 317988 - RNA, 32 nt, Human
agcgucccgugcuaaagaaacagagccucacu

SEQ ID NO: 317989 - RNA, 22 nt, Human
agcguccgggcagcguaggcgg

SEQ ID NO: 317990 - RNA, 32 nt, Human
agcguccugaguagcugggaccacaggugccc

SEQ ID NO: 317991 - RNA, 32 nt, Human
agcguccugaguagcugggacuacaggcgcgc

SEQ ID NO: 317992 - RNA, 32 nt, Human
agcguccugaguagcuggggauuacaggcgcc

SEQ ID NO: 317993 - RNA, 32 nt, Human
agcguccugcaaccccagcccucaccaggauu

SEQ ID NO: 317994 - RNA, 32 nt, Human
agcgucgacuccugccggaauuuccagccugc

SEQ ID NO: 317995 - RNA, 18 nt, Human
agcgucggacauggaugg

SEQ ID NO: 317996 - RNA, 17 nt, Human
agcgucgggcacagggc

SEQ ID NO: 317997 - RNA, 32 nt, Human
agcgucgggccuggcccgagcugucucugugg

SEQ ID NO: 317998 - RNA, 32 nt, Human
agcgucggucucggagccccuuguggcagcag

SEQ ID NO: 317999 - RNA, 20 nt, Human
agcgucgugccagcaugggc

SEQ ID NO: 318000 - RNA, 32 nt, Human
agcgucuacaggcccaaccucugccucauggg

SEQ ID NO: 318001 - RNA, 32 nt, Human
agcgucuccaucuaaaauuccuagggcaagcu

SEQ ID NO: 318002 - RNA, 32 nt, Human
agcgucuccaucuaaucccaggggaacacagg

SEQ ID NO: 318003 - RNA, 32 nt, Human
agcgucuccugccuccuacccaacugagugcc

SEQ ID NO: 318004 - RNA, 32 nt, Human
agcgucucucugcugugccuccuccuggcggc

SEQ ID NO: 318005 - RNA, 32 nt, Human
agcgucucugccuggcagaggcugcaaucucu

SEQ ID NO: 318006 - RNA, 32 nt, Human
agcgucugcucucucggccucugccuccgcuu

SEQ ID NO: 318007 - RNA, 32 nt, Human
agcgucuggcagauacuccuuuugccacugcu

SEQ ID NO: 318008 - RNA, 32 nt, Human
agcgucugggugagaaaaacaggcugugaucc

SEQ ID NO: 318009 - RNA, 32 nt, Human
agcgucuguaucucuggagcagccaggcgcuc

SEQ ID NO: 318010 - RNA, 32 nt, Human
agcgucuuucaaguaagccucgcugaagaggg

SEQ ID NO: 318011 - RNA, 32 nt, Human
agcgugaaagaagcuugugauccugcccccac

SEQ ID NO: 318012 - RNA, 32 nt, Human
agcgugaaccugggaggcagagcuugcaguga

SEQ ID NO: 318013 - RNA, 32 nt, Human
agcgugaccgcugaagcacagcaccacaggaa

SEQ ID NO: 318014 - RNA, 32 nt, Human
agcgugacugcgugcauuuucucuccuuuccc

SEQ ID NO: 318015 - RNA, 32 nt, Human
agcgugagccacugcacccagccuguaaaaua

SEQ ID NO: 318016 - RNA, 30 nt, Human
agcgugagccucucugacugcuucuucccc

SEQ ID NO: 318017 - RNA, 32 nt, Human
agcgugaggaaagacucuccacccucacuccc

SEQ ID NO: 318018 - RNA, 32 nt, Human
agcgugcagcccccgucccaguacgacauacc

SEQ ID NO: 318019 - RNA, 32 nt, Human
agcgugcagggauagagagggagccagacgga

SEQ ID NO: 318020 - RNA, 32 nt, Human
agcgugccaagugaccuggugccugugggaag

SEQ ID NO: 318021 - RNA, 32 nt, Human
agcgugcccagcugcccuguuggcagaggccu

SEQ ID NO: 318022 - RNA, 32 nt, Human
agcgugccccuuagagcuccugugcugcuggg

SEQ ID NO: 318023 - RNA, 32 nt, Human
agcgugcccuguacucuucacucacauaagcc

SEQ ID NO: 318024 - RNA, 32 nt, Human
agcgugcccuuccucaccuccuggagcacccu

SEQ ID NO: 318025 - RNA, 24 nt, Human
agcgugcgcagugaacgugcgcuc

SEQ ID NO: 318026 - RNA, 32 nt, Human
agcgugcggagagaugucaccaucccggacua

SEQ ID NO: 318027 - RNA, 32 nt, Human
agcgugcguccguucgcacaggcagcgggagg

SEQ ID NO: 318028 - RNA, 20 nt, Human
agcguggacaccuucagggg

SEQ ID NO: 318029 - RNA, 32 nt, Human
agcguggagacggaugggaauucugcagccac

SEQ ID NO: 318030 - RNA, 32 nt, Human
agcguggaggcugcaccaggagaggacaggga

SEQ ID NO: 318031 - RNA, 32 nt, Human
agcguggaggggcgaggggauggggccaggga

SEQ ID NO: 318032 - RNA, 21 nt, Human
agcguggccaacaugaggaaa

SEQ ID NO: 318033 - RNA, 21 nt, Human
agcguggccaacaugaugaaa

SEQ ID NO: 318034 - RNA, 32 nt, Human
agcguggccagccugccaaacugaccagggga

SEQ ID NO: 318035 - RNA, 24 nt, Human
agcguggcccuccagcccagcuca

SEQ ID NO: 318036 - RNA, 17 nt, Human
agcguggcgaugggcgg

SEQ ID NO: 318037 - RNA, 32 nt, Human
agcguggcgcccgucgggagguugcagaguuc

SEQ ID NO: 318038 - RNA, 21 nt, Human
agcguggcuaacacggugaaa

SEQ ID NO: 318039 - RNA, 31 nt, Human
agcguggcuuggacggggccugugucagagu

SEQ ID NO: 318040 - RNA, 32 nt, Human
agcguggcuuuugaggaagaugugacaacuac

SEQ ID NO: 318041 - RNA, 32 nt, Human
agcgugggaaggcagcuggcagggacaggagc

SEQ ID NO: 318042 - RNA, 32 nt, Human
agcgugggacggcuccagcucaggacugucug

SEQ ID NO: 318043 - RNA, 32 nt, Human
agcgugggaggaggggauggaaaugagguugg

SEQ ID NO: 318044 - RNA, 22 nt, Human
agcgugggcaucuucaggcaca

SEQ ID NO: 318045 - RNA, 32 nt, Human
agcgugggcucugccaaugugggcugccccuc

SEQ ID NO: 318046 - RNA, 32 nt, Human
agcguggggaggggguaagggagccagccaac

SEQ ID NO: 318047 - RNA, 31 nt, Human
agcguggggccgcuggaaugggugaauuuaa

SEQ ID NO: 318048 - RNA, 32 nt, Human
agcguggggcuuggguaaaaauggcugaauau

SEQ ID NO: 318049 - RNA, 32 nt, Human
agcgugggguggggacacugacagcccuaucu

SEQ ID NO: 318050 - RNA, 32 nt, Human
agcgugggugaggcauacguacucacacgccg

SEQ ID NO: 318051 - RNA, 32 nt, Human
agcguggucuugaacgccugaccucagaugau

SEQ ID NO: 318052 - RNA, 32 nt, Human
agcguggugaagccucaucucugcugagaaug

SEQ ID NO: 318053 - RNA, 32 nt, Human
agcgugguggcagccagcucucuggccaccau

SEQ ID NO: 318054 - RNA, 32 nt, Human
agcgugguggguggguggugugaguggcaucu

SEQ ID NO: 318055 - RNA, 32 nt, Human
agcguggugguacaccuguagucucagcuacu

SEQ ID NO: 318056 - RNA, 32 nt, Human
agcguguacugaaugccagucuggccggcaca

SEQ ID NO: 318057 - RNA, 32 nt, Human
agcgugucaaccuuuaccacugaggcuggaaa

SEQ ID NO: 318058 - RNA, 32 nt, Human
agcgugucuccaucccccucucuaggggcucu

SEQ ID NO: 318059 - RNA, 32 nt, Human
agcgugucuggcaggggcagcugcugugggca

SEQ ID NO: 318060 - RNA, 32 nt, Human
agcgugucuggguuugggggcgggagacaggc

SEQ ID NO: 318061 - RNA, 32 nt, Human
agcgugugaggguuggcacuaggcccacggcu

SEQ ID NO: 318062 - RNA, 29 nt, Human
agcgugugucugugugugcgugcgcggcc

SEQ ID NO: 318063 - RNA, 32 nt, Human
agcgugugugcgugcgucuacuuuguacuggg

SEQ ID NO: 318064 - RNA, 20 nt, Human
agcguguucugccaggucca

SEQ ID NO: 318065 - RNA, 32 nt, Human
agcguuaaguggaggaaagcuuggggaagccc

SEQ ID NO: 318066 - RNA, 32 nt, Human
agcguuaggagaagaagagaggcagggaagac

SEQ ID NO: 318067 - RNA, 32 nt, Human
agcguuagucccucacccccaaagaggugcgg

SEQ ID NO: 318068 - RNA, 32 nt, Human
agcguucagcacacuccugggcauggcggaag

SEQ ID NO: 318069 - RNA, 32 nt, Human
agcguucccacagggaaagugaaaguugcaag

SEQ ID NO: 318070 - RNA, 32 nt, Human
agcguucccagauuccuucuccuuagccaagc

SEQ ID NO: 318071 - RNA, 32 nt, Human
agcguuccccaggcugcucaggagaacguuug

SEQ ID NO: 318072 - RNA, 32 nt, Human
agcguucccugcuggacaaggucugcgcccac

SEQ ID NO: 318073 - RNA, 32 nt, Human
agcguuccuggccucugcagccaacacaguag

SEQ ID NO: 318074 - RNA, 32 nt, Human
agcguucugaguagcugggauuagaggcgugu

SEQ ID NO: 318075 - RNA, 32 nt, Human
agcguucuguucugcggaaggucuuccacucu

SEQ ID NO: 318076 - RNA, 32 nt, Human
agcguugagauuacaagcgugagccaccauuc

SEQ ID NO: 318077 - RNA, 32 nt, Human
agcguugcaacauagcccccuccaucauccuu

SEQ ID NO: 318078 - RNA, 32 nt, Human
agcguugcagcucucccagcagcccuggacag

SEQ ID NO: 318079 - RNA, 32 nt, Human
agcguugcagcucucccagcagcccuggacgg

SEQ ID NO: 318080 - RNA, 32 nt, Human
agcguuggaggcagaauucaaaaccaggcuga

SEQ ID NO: 318081 - RNA, 32 nt, Human
agcguugggauuacaggcaugagccaccucaa

SEQ ID NO: 318082 - RNA, 32 nt, Human
agcguugggauuauaggcaugagccaugugcc

SEQ ID NO: 318083 - RNA, 32 nt, Human
agcguuggugcugccuggguaucagaaagcaa

SEQ ID NO: 318084 - RNA, 32 nt, Human
agcguugugacaccuucuuuagggcucugugg

SEQ ID NO: 318085 - RNA, 32 nt, Human
agcguuuacaucauugcacuauuugauccagg

SEQ ID NO: 318086 - RNA, 32 nt, Human
agcguuuccugcacacuuuaccucucaugugc

SEQ ID NO: 318087 - RNA, 22 nt, Human
agcguuugcaccuguucacuca

SEQ ID NO: 318088 - RNA, 32 nt, Human
  misc_feature (4)..(4): n is a, c, g, or u
agcngcgcacagaaugggccgaugcugcuucu

SEQ ID NO: 318089 - RNA, 31 nt, Human
agcuaaaagagaccugucucauggucugccc

SEQ ID NO: 318090 - RNA, 32 nt, Human
agcuaaaauauccucuggacaaagaagaaggg

SEQ ID NO: 318091 - RNA, 32 nt, Human
agcuaaaaucaagucaccacacuccagccugg

SEQ ID NO: 318092 - RNA, 32 nt, Human
agcuaaacacagaagaauguauaaauauguau

SEQ ID NO: 318093 - RNA, 32 nt, Human
agcuaaacaugcugccaaccagcuuguccaac

SEQ ID NO: 318094 - RNA, 32 nt, Human
agcuaaacucagcggagccagcgcggcgcgau

SEQ ID NO: 318095 - RNA, 32 nt, Human
agcuaaagaaagauggauacuaugaugcugaa

SEQ ID NO: 318096 - RNA, 32 nt, Human
agcuaaagaggcggagcaggaggcagaggagc

SEQ ID NO: 318097 - RNA, 32 nt, Human
agcuaaagaugguggugaugaacagccugagg

SEQ ID NO: 318098 - RNA, 32 nt, Human
agcuaaaggagaaagaaaaauaccuccuuuua

SEQ ID NO: 318099 - RNA, 32 nt, Human
agcuaaaggaggcugagguugcagugagcuga

SEQ ID NO: 318100 - RNA, 32 nt, Human
agcuaaaggccggcgcacgcugggcgguggug

SEQ ID NO: 318101 - RNA, 32 nt, Human
agcuaaagggagaagagaugggggcuugaaca

SEQ ID NO: 318102 - RNA, 32 nt, Human
agcuaaauacagagguagaagaagugggaaaa

SEQ ID NO: 318103 - RNA, 22 nt, Human
agcuaaaucuguuucuuuggga

SEQ ID NO: 318104 - RNA, 31 nt, Human
agcuaaauguugaaauggcuucccuuucuuu

SEQ ID NO: 318105 - RNA, 21 nt, Human
agcuaaauucaaagcugaaag

SEQ ID NO: 318106 - RNA, 32 nt, Human
agcuaaauugccuuuuaaauuccuucaagcuu

SEQ ID NO: 318107 - RNA, 32 nt, Human
agcuaacaagggcugagccccagguacagguu

SEQ ID NO: 318108 - RNA, 32 nt, Human
agcuaacaaggugacccacacacucaccauga

SEQ ID NO: 318109 - RNA, 32 nt, Human
agcuaacaaguguuguaacaauaauccauugu

SEQ ID NO: 318110 - RNA, 32 nt, Human
agcuaacaccacggcacuucagccugggugac

SEQ ID NO: 318111 - RNA, 32 nt, Human
agcuaacacgccucucugagccugucagcaga

SEQ ID NO: 318112 - RNA, 21 nt, Human
agcuaacagcucaaucucuua

SEQ ID NO: 318113 - RNA, 32 nt, Human
agcuaacauggcaaaaccccauugcuacuaaa

SEQ ID NO: 318114 - RNA, 32 nt, Human
agcuaacauucccuggacagggcacagcaagg

SEQ ID NO: 318115 - RNA, 32 nt, Human
agcuaaccaaguagcugggacuacaggugcau

SEQ ID NO: 318116 - RNA, 32 nt, Human
agcuaaccccucuacuccacuuucaaaacuac

SEQ ID NO: 318117 - RNA, 32 nt, Human
agcuaacccggaggaaaggcaguccuggacag

SEQ ID NO: 318118 - RNA, 32 nt, Human
agcuaacccguggcuaggcgaguggggcgggg

SEQ ID NO: 318119 - RNA, 32 nt, Human
agcuaacccuagauauggcagcucuuuaaugu

SEQ ID NO: 318120 - RNA, 21 nt, Human
agcuaaccuccacagaugcug

SEQ ID NO: 318121 - RNA, 32 nt, Human
agcuaaccuuugggauacaucacagaggauac

SEQ ID NO: 318122 - RNA, 32 nt, Human
agcuaacgcuaacuucccaggugacaguagca

SEQ ID NO: 318123 - RNA, 32 nt, Human
agcuaacgcugguaauaaagguaggaaaacaa

SEQ ID NO: 318124 - RNA, 32 nt, Human
agcuaacucgcggccuuauuucugccuuuaau

SEQ ID NO: 318125 - RNA, 21 nt, Human
agcuaacugcagcagcuggac

SEQ ID NO: 318126 - RNA, 32 nt, Human
agcuaacuuccuccuuucauccuuuccaauuu

SEQ ID NO: 318127 - RNA, 32 nt, Human
agcuaacuuucuucuugucuagcuauuaacau

SEQ ID NO: 318128 - RNA, 32 nt, Human
agcuaagaccacaggugugugccaccacaccu

SEQ ID NO: 318129 - RNA, 32 nt, Human
agcuaagacuacagacaugugccaccaugccu

SEQ ID NO: 318130 - RNA, 32 nt, Human
agcuaagacuacaggugcacaccaccacaccu

SEQ ID NO: 318131 - RNA, 32 nt, Human
agcuaagagauggcuccagacaccccaggucc

SEQ ID NO: 318132 - RNA, 32 nt, Human
agcuaagagucacuaaacuuucuugaaaaggu

SEQ ID NO: 318133 - RNA, 32 nt, Human
agcuaagauagagucccugccccacugccacc

SEQ ID NO: 318134 - RNA, 32 nt, Human
agcuaagauucagacccagggcucaggcucug

SEQ ID NO: 318135 - RNA, 32 nt, Human
agcuaagcagcugcugggacucagggacuggu

SEQ ID NO: 318136 - RNA, 32 nt, Human
agcuaagcauccuucuaaccaguucccaaagu

SEQ ID NO: 318137 - RNA, 32 nt, Human
agcuaagccaucauaucuccugugaccugcac

SEQ ID NO: 318138 - RNA, 32 nt, Human
agcuaagccccuggucacucugcagucucuau

SEQ ID NO: 318139 - RNA, 32 nt, Human
agcuaagcuacaccuggauuccugacccacag

SEQ ID NO: 318140 - RNA, 32 nt, Human
agcuaagcuacugcuguucuucuuuaucauuu

SEQ ID NO: 318141 - RNA, 32 nt, Human
agcuaagcuuccacuuauaagugagaacaugc

SEQ ID NO: 318142 - RNA, 32 nt, Human
agcuaaggaaaccaggugugggcggcugggcc

SEQ ID NO: 318143 - RNA, 32 nt, Human
agcuaaggacaggauggcaggagcgcccaugg

SEQ ID NO: 318144 - RNA, 32 nt, Human
agcuaagggaagagaguagaccgggacagagg

SEQ ID NO: 318145 - RNA, 32 nt, Human
agcuaagggaggaggaggccaggagggaggca

SEQ ID NO: 318146 - RNA, 32 nt, Human
agcuaaggucauuccuccuggguuuuaguggc

SEQ ID NO: 318147 - RNA, 32 nt, Human
agcuaaguaaccugaccauggcccaacagcaa

SEQ ID NO: 318148 - RNA, 32 nt, Human
agcuaaguauccagccucucccaaaccucuuu

SEQ ID NO: 318149 - RNA, 32 nt, Human
agcuaagucucgcucaccacugcaagcuaaga

SEQ ID NO: 318150 - RNA, 32 nt, Human
agcuaauagagugguaugacauggcacuaaaa

SEQ ID NO: 318151 - RNA, 32 nt, Human
agcuaauauuagcugcuauugcaugcuccuag

SEQ ID NO: 318152 - RNA, 32 nt, Human
agcuaaucaggaagcugagacaggaggaucgc

SEQ ID NO: 318153 - RNA, 28 nt, Human
agcuaaucaucuucaaagaagcugaaag

SEQ ID NO: 318154 - RNA, 19 nt, Human
agcuaauccccuucuguua

SEQ ID NO: 318155 - RNA, 32 nt, Human
agcuaaucuucuuccccucccuuuccucuccc

SEQ ID NO: 318156 - RNA, 32 nt, Human
agcuaaugcuccagaaacuuugccaaccuguu

SEQ ID NO: 318157 - RNA, 23 nt, Human
agcuaauggauuguuaauucuga

SEQ ID NO: 318158 - RNA, 32 nt, Human
agcuaauuaagguuugcccugccugcagccuc

SEQ ID NO: 318159 - RNA, 23 nt, Human
agcuaauuccaaagcccagcaga

SEQ ID NO: 318160 - RNA, 32 nt, Human
agcuaauugcuccccuuucagccucuguugca

SEQ ID NO: 318161 - RNA, 32 nt, Human
agcuacaacgaggagaaagaugaggaccacug

SEQ ID NO: 318162 - RNA, 32 nt, Human
agcuacaacuggagaggaagugggcagagccc

SEQ ID NO: 318163 - RNA, 32 nt, Human
agcuacaagcacgcacugaagcacuuuacuga

SEQ ID NO: 318164 - RNA, 32 nt, Human
agcuacaagguagggaguucugagggaagccg

SEQ ID NO: 318165 - RNA, 32 nt, Human
agcuacaagucuaucuucuuucuugacccauu

SEQ ID NO: 318166 - RNA, 32 nt, Human
agcuacacagaagagaugggagaagaggcuaa

SEQ ID NO: 318167 - RNA, 32 nt, Human
agcuacacagcaucuguuacgguuaaugagag

SEQ ID NO: 318168 - RNA, 32 nt, Human
agcuacacuacugcuaaacuauuuuuagcaua

SEQ ID NO: 318169 - RNA, 32 nt, Human
agcuacagaucguccuacucaccagcugggug

SEQ ID NO: 318170 - RNA, 32 nt, Human
agcuacagccgcggaacaaccacgccugggcc

SEQ ID NO: 318171 - RNA, 32 nt, Human
agcuacagcuccugcccaucugucccaacaca

SEQ ID NO: 318172 - RNA, 32 nt, Human
agcuacaguagggccuccucaccccguacccc

SEQ ID NO: 318173 - RNA, 32 nt, Human
agcuacagucggcugcaggugcagugacuuuu

SEQ ID NO: 318174 - RNA, 32 nt, Human
agcuacagucucuucaccuggagcuuagacac

SEQ ID NO: 318175 - RNA, 32 nt, Human
agcuacauacaaaucacauauaguuuaaucuu

SEQ ID NO: 318176 - RNA, 32 nt, Human
agcuacaucaagaacucagcugugcugugccu

SEQ ID NO: 318177 - RNA, 21 nt, Human
agcuacauccuacugcuuuga

SEQ ID NO: 318178 - RNA, 32 nt, Human
agcuacauggaaaaggagaaucccaccuccuu

SEQ ID NO: 318179 - RNA, 32 nt, Human
agcuacauuagcaacaggaaauucagcacauc

SEQ ID NO: 318180 - RNA, 32 nt, Human
agcuaccaaaacugaacugugaagggaaagcu

SEQ ID NO: 318181 - RNA, 32 nt, Human
agcuaccacaugcaaacauacaagcagucuca

SEQ ID NO: 318182 - RNA, 32 nt, Human
agcuaccacuuuugcucgccugugccaacaag

SEQ ID NO: 318183 - RNA, 32 nt, Human
agcuaccagacugcacuauaagaaaaguccuc

SEQ ID NO: 318184 - RNA, 32 nt, Human
agcuaccagauggguccagcugccgcaggcuc

SEQ ID NO: 318185 - RNA, 32 nt, Human
agcuaccagccaauugcucuucaucacagcua

SEQ ID NO: 318186 - RNA, 32 nt, Human
agcuaccaggaucucacugggucucagggccc

SEQ ID NO: 318187 - RNA, 32 nt, Human
agcuaccauucccaauggggcagucaacucug

SEQ ID NO: 318188 - RNA, 25 nt, Human
agcuaccauugacuuucuucacaga

SEQ ID NO: 318189 - RNA, 32 nt, Human
agcuacccaaguagcuggaacuacaggcgugu

SEQ ID NO: 318190 - RNA, 20 nt, Human
agcuacccagaacugaacua

SEQ ID NO: 318191 - RNA, 32 nt, Human
agcuaccccucagcuccgguagucgccagucc

SEQ ID NO: 318192 - RNA, 32 nt, Human
agcuaccccugacuuagagccugguggaggug

SEQ ID NO: 318193 - RNA, 32 nt, Human
agcuacccuaggcuggauugcacucgccuucu

SEQ ID NO: 318194 - RNA, 32 nt, Human
agcuacccuccccgucuccagccugggcuccc

SEQ ID NO: 318195 - RNA, 32 nt, Human
agcuacccugaaggcugaggcaggagcauugc

SEQ ID NO: 318196 - RNA, 32 nt, Human
agcuaccucaaacuuccagucagguaguugca

SEQ ID NO: 318197 - RNA, 32 nt, Human
agcuaccucaccucagcuugagagagccaguu

SEQ ID NO: 318198 - RNA, 32 nt, Human
agcuaccuccggguaaaggcaagagcaagacc

SEQ ID NO: 318199 - RNA, 32 nt, Human
agcuaccugaggaggaggcagggcagaagggc

SEQ ID NO: 318200 - RNA, 32 nt, Human
agcuaccugccccugcucacuaagcugggcag

SEQ ID NO: 318201 - RNA, 32 nt, Human
agcuaccuggagccacaggucacuuuccaaaa

SEQ ID NO: 318202 - RNA, 32 nt, Human
agcuaccuggucucaucccucugccucugaga

SEQ ID NO: 318203 - RNA, 32 nt, Human
agcuaccuguggugauguugccaccuguuaaa

SEQ ID NO: 318204 - RNA, 32 nt, Human
agcuacgacugcaagcaccugccaccauaaag

SEQ ID NO: 318205 - RNA, 32 nt, Human
agcuacgagccgcggcggcagcggggcggcgg

SEQ ID NO: 318206 - RNA, 23 nt, Human
agcuacgaucacaccacugcacu

SEQ ID NO: 318207 - RNA, 32 nt, Human
agcuacgauguucuuccagggcacugggggcu

SEQ ID NO: 318208 - RNA, 32 nt, Human
agcuacgccugccuccccugugcaguccuggg

SEQ ID NO: 318209 - RNA, 32 nt, Human
agcuacgcucacugcaggcuccgccuccuggg

SEQ ID NO: 318210 - RNA, 32 nt, Human
agcuacggagagaagcagccagcaugguguuc

SEQ ID NO: 318211 - RNA, 32 nt, Human
agcuacgggcagcagaguucauucugacagga

SEQ ID NO: 318212 - RNA, 32 nt, Human
agcuacgugggaggcagaggcaggagaaucau

SEQ ID NO: 318213 - RNA, 32 nt, Human
agcuacuagggaggaugaggcagaagaaucac

SEQ ID NO: 318214 - RNA, 32 nt, Human
agcuacuagggaggaugaggcaggagaauugc

SEQ ID NO: 318215 - RNA, 32 nt, Human
agcuacuagggaggcaggaggaucacuugagc

SEQ ID NO: 318216 - RNA, 32 nt, Human
agcuacuagggaggcggaggaagaagaaucgc

SEQ ID NO: 318217 - RNA, 32 nt, Human
agcuacuagggaggcugagccaggaggaucac

SEQ ID NO: 318218 - RNA, 32 nt, Human
agcuacuagggaggcugaggcaagaggcuuga

SEQ ID NO: 318219 - RNA, 32 nt, Human
agcuacuagggaggcugaggcagaagaaucgc

SEQ ID NO: 318220 - RNA, 32 nt, Human
agcuacuagggaggcugaggcaggagaaucac

SEQ ID NO: 318221 - RNA, 32 nt, Human
agcuacuagggaggcugaggcaggagaaucgc

SEQ ID NO: 318222 - RNA, 32 nt, Human
agcuacuagggaggcugaggcaggagaaucuc

SEQ ID NO: 318223 - RNA, 32 nt, Human
agcuacuagggaggcugaggcaggagaauggc

SEQ ID NO: 318224 - RNA, 32 nt, Human
agcuacuagggaggcugaggcaggagaauggu

SEQ ID NO: 318225 - RNA, 32 nt, Human
agcuacuagggaggcugaggcaggagaauugc

SEQ ID NO: 318226 - RNA, 32 nt, Human
agcuacuagggaggcugcggcaggagaauugc

SEQ ID NO: 318227 - RNA, 32 nt, Human
agcuacucaacuuuuaagccccugccaugguu

SEQ ID NO: 318228 - RNA, 32 nt, Human
agcuacucaccucugcuguuguagcuagagag

SEQ ID NO: 318229 - RNA, 32 nt, Human
agcuacucagcaggcugagaugggaggauggc

SEQ ID NO: 318230 - RNA, 32 nt, Human
agcuacucaggagguugaggcagcagaauugc

SEQ ID NO: 318231 - RNA, 32 nt, Human
agcuacucagggacuucucuugccuggagggu

SEQ ID NO: 318232 - RNA, 32 nt, Human
agcuacucagggagguugaggcagcaggauug

SEQ ID NO: 318233 - RNA, 32 nt, Human
agcuacucagggcugaggcaggagaauugcuu

SEQ ID NO: 318234 - RNA, 32 nt, Human
agcuacuccagaaaauaggguuauguguguca

SEQ ID NO: 318235 - RNA, 32 nt, Human
agcuacuccgggaggcugaggcaggagaguca

SEQ ID NO: 318236 - RNA, 32 nt, Human
agcuacucgggaggcugaggcagagaauugcu

SEQ ID NO: 318237 - RNA, 32 nt, Human
agcuacucgggaggcugaugcagaagaauggc

SEQ ID NO: 318238 - RNA, 32 nt, Human
agcuacucucuugccagcauuuucacauuuug

SEQ ID NO: 318239 - RNA, 32 nt, Human
agcuacugagagcucuggaaagaaggauguca

SEQ ID NO: 318240 - RNA, 32 nt, Human
agcuacugcacuccaaccugggcaacauagug

SEQ ID NO: 318241 - RNA, 32 nt, Human
agcuacugcccagggcccgcaguguuggcugc

SEQ ID NO: 318242 - RNA, 32 nt, Human
agcuacugucucuuuuaaaaaccacguacaaa

SEQ ID NO: 318243 - RNA, 32 nt, Human
agcuacuucccaggaccccacagaacagccaa

SEQ ID NO: 318244 - RNA, 32 nt, Human
agcuacuucuguuccugcuuucccucucacgu

SEQ ID NO: 318245 - RNA, 32 nt, Human
agcuacuucuuuccuuaauguuuuuccuucua

SEQ ID NO: 318246 - RNA, 32 nt, Human
agcuacuugaagagaaggugacaggaaacuuc

SEQ ID NO: 318247 - RNA, 32 nt, Human
agcuacuugaaggcugauuaugugccauuuua

SEQ ID NO: 318248 - RNA, 32 nt, Human
agcuacuugagaggcagaggcaggagaaucgc

SEQ ID NO: 318249 - RNA, 32 nt, Human
agcuacuugagaggcugagauaggagaaucac

SEQ ID NO: 318250 - RNA, 32 nt, Human
agcuacuugcagcaucuccugaggacuugcuu

SEQ ID NO: 318251 - RNA, 32 nt, Human
agcuacuugggaagcugagacaggagaauugc

SEQ ID NO: 318252 - RNA, 32 nt, Human
agcuacuugggaggcagaggcaggagaaucau

SEQ ID NO: 318253 - RNA, 32 nt, Human
agcuacuugggaggcagaggcaggagaaucgc

SEQ ID NO: 318254 - RNA, 32 nt, Human
agcuacuugggaggcagaggcaggagaaucgu

SEQ ID NO: 318255 - RNA, 32 nt, Human
agcuacuugggaggcagaggcaggagaauggc

SEQ ID NO: 318256 - RNA, 32 nt, Human
agcuacuugggaggcugagaugggagaaucac

SEQ ID NO: 318257 - RNA, 32 nt, Human
agcuacuugggaggcugagaugggaggaccau

SEQ ID NO: 318258 - RNA, 32 nt, Human
agcuacuugggaggcugagaugggaggagcac

SEQ ID NO: 318259 - RNA, 32 nt, Human
agcuacuugggaggcugagaugggaggaucau

SEQ ID NO: 318260 - RNA, 32 nt, Human
agcuacuugggaggcugaggcagagaauugcu

SEQ ID NO: 318261 - RNA, 32 nt, Human
agcuacuugggaggcugaggcagagcugcuug

SEQ ID NO: 318262 - RNA, 32 nt, Human
agcuacuugggaggcugaggcagcauugcuug

SEQ ID NO: 318263 - RNA, 19 nt, Human
agcuacuugguaguuacaa

SEQ ID NO: 318264 - RNA, 32 nt, Human
agcuacuuguguucucuucauuugucuguaaa

SEQ ID NO: 318265 - RNA, 32 nt, Human
agcuacuuucuuucuuauuuuucguccuacua

SEQ ID NO: 318266 - RNA, 32 nt, Human
agcuagaaccacauguacacaccaccacgguc

SEQ ID NO: 318267 - RNA, 32 nt, Human
agcuagaaccgcaggugcaugucaccaugucc

SEQ ID NO: 318268 - RNA, 32 nt, Human
agcuagaagagaggauuuugaaaguucucaac

SEQ ID NO: 318269 - RNA, 22 nt, Human
agcuagaaggcccugcagcuac

SEQ ID NO: 318270 - RNA, 32 nt, Human
agcuagaagggcccuuuacagagcucuguacu

SEQ ID NO: 318271 - RNA, 32 nt, Human
agcuagaauaagaggugcaggauuucacaaaa

SEQ ID NO: 318272 - RNA, 32 nt, Human
agcuagacacagauugcugaugggcgcauuua

SEQ ID NO: 318273 - RNA, 24 nt, Human
agcuagaccagccugggcaacaua

SEQ ID NO: 318274 - RNA, 32 nt, Human
agcuagaccaggcuuccccacaugguggucuc

SEQ ID NO: 318275 - RNA, 32 nt, Human
agcuagaccuauaggcgccugccaccaugccc

SEQ ID NO: 318276 - RNA, 32 nt, Human
agcuagaccucacccucuuggguagaugcauc

SEQ ID NO: 318277 - RNA, 17 nt, Human
agcuagaccucccaggg

SEQ ID NO: 318278 - RNA, 32 nt, Human
agcuagaccugacauuagaacuagaccugggc

SEQ ID NO: 318279 - RNA, 32 nt, Human
agcuagacuuacuccggcagcugggaaaggag

SEQ ID NO: 318280 - RNA, 32 nt, Human
agcuagagaaacaauauuacugccuuugcucu

SEQ ID NO: 318281 - RNA, 32 nt, Human
agcuagagcccucagucacaggcaaaggcugg

SEQ ID NO: 318282 - RNA, 32 nt, Human
agcuagaggacaggcaagccagcucuggggga

SEQ ID NO: 318283 - RNA, 32 nt, Human
agcuagagguacuguuauuaauguaucagcaa

SEQ ID NO: 318284 - RNA, 32 nt, Human
agcuagagguggcagagagggggugaccagca

SEQ ID NO: 318285 - RNA, 32 nt, Human
agcuagagucauauuaucauacuuaucauaau

SEQ ID NO: 318286 - RNA, 32 nt, Human
agcuagaguccgggauccccagccuacugccu

SEQ ID NO: 318287 - RNA, 32 nt, Human
agcuagauaugggacccuggcaagugaccaaa

SEQ ID NO: 318288 - RNA, 32 nt, Human
agcuagaugaaaaggcaaugcaggcaguagaa

SEQ ID NO: 318289 - RNA, 32 nt, Human
agcuagauguaacuccuaccacccucacuaga

SEQ ID NO: 318290 - RNA, 32 nt, Human
agcuagcacacagcacuugggccagcaaaucc

SEQ ID NO: 318291 - RNA, 32 nt, Human
agcuagcacauggcuguuucuauauucugaug

SEQ ID NO: 318292 - RNA, 20 nt, Human
agcuagcagcccaccccucc

SEQ ID NO: 318293 - RNA, 32 nt, Human
agcuagcagcgucugcagccgcgcccggccag

SEQ ID NO: 318294 - RNA, 32 nt, Human
agcuagcagcuggccuccauggccccacagcc

SEQ ID NO: 318295 - RNA, 32 nt, Human
agcuagcagcuggcuguguuugcagugcaaau

SEQ ID NO: 318296 - RNA, 32 nt, Human
agcuagcauacugaugccacugugcugcaucu

SEQ ID NO: 318297 - RNA, 32 nt, Human
agcuagccaggcaaagggggcaauggcggcuu

SEQ ID NO: 318298 - RNA, 32 nt, Human
agcuagcccagcugccuugggcuggggccugc

SEQ ID NO: 318299 - RNA, 32 nt, Human
agcuagccgggcaugaggagaucgugucucca

SEQ ID NO: 318300 - RNA, 32 nt, Human
agcuagcgccgucgucgucucccuucagucgc

SEQ ID NO: 318301 - RNA, 31 nt, Human
agcuagcgccucucuggguguccgugccagu

SEQ ID NO: 318302 - RNA, 32 nt, Human
agcuagcuaucauuauugucacaucuaaugcu

SEQ ID NO: 318303 - RNA, 32 nt, Human
agcuagcuaugucccuagcugcaggaagcccc

SEQ ID NO: 318304 - RNA, 32 nt, Human
agcuagcuguguccccaggccugggcccaggg

SEQ ID NO: 318305 - RNA, 32 nt, Human
agcuagcuuucacuuucagaguggccaauuca

SEQ ID NO: 318306 - RNA, 31 nt, Human
agcuaggaaagcuucuuuauaucuugcauua

SEQ ID NO: 318307 - RNA, 32 nt, Human
agcuaggaacucaaggagucagccuagacccc

SEQ ID NO: 318308 - RNA, 32 nt, Human
agcuaggacaacaggugcgugcuaccaugcau

SEQ ID NO: 318309 - RNA, 32 nt, Human
agcuaggaccacaggugcgugucaccaugcuu

SEQ ID NO: 318310 - RNA, 32 nt, Human
agcuaggaccaugggugccugccaccacacgu

SEQ ID NO: 318311 - RNA, 32 nt, Human
agcuaggacuacaagcaugugccaccauggcc

SEQ ID NO: 318312 - RNA, 32 nt, Human
agcuaggacuacaagugugugccaccacaccc

SEQ ID NO: 318313 - RNA, 32 nt, Human
agcuaggacuacaggcacaugccaccaccaag

SEQ ID NO: 318314 - RNA, 32 nt, Human
agcuaggacuacaggcacgugccaccacgccc

SEQ ID NO: 318315 - RNA, 32 nt, Human
agcuaggacuacaggcacucaccaccaugccc

SEQ ID NO: 318316 - RNA, 32 nt, Human
agcuaggacuacaggcagugugccaccacauc

SEQ ID NO: 318317 - RNA, 32 nt, Human
agcuaggacuacaggcaugcacuaccacgccc

SEQ ID NO: 318318 - RNA, 32 nt, Human
agcuaggacuacaggcaugugccaccaccccc

SEQ ID NO: 318319 - RNA, 32 nt, Human
agcuaggacuacaggcauguggcaccaugccc

SEQ ID NO: 318320 - RNA, 32 nt, Human
agcuaggacuacaggcgcccaccaccacacca

SEQ ID NO: 318321 - RNA, 32 nt, Human
agcuaggacuacaggugcaugccaacacgccc

SEQ ID NO: 318322 - RNA, 32 nt, Human
agcuaggacuacaggugcccgccaccacaccc

SEQ ID NO: 318323 - RNA, 32 nt, Human
agcuaggacuacaggugugcaccaccacgccc

SEQ ID NO: 318324 - RNA, 32 nt, Human
agcuaggacuacaggugugcaccaccaugccc

SEQ ID NO: 318325 - RNA, 32 nt, Human
agcuaggacuaccggcgugcaccaccaugcca

SEQ ID NO: 318326 - RNA, 32 nt, Human
agcuaggacuauaggcaugcaccaccacgccc

SEQ ID NO: 318327 - RNA, 32 nt, Human
agcuaggacugcaggugugcaccaccaugccc

SEQ ID NO: 318328 - RNA, 21 nt, Human
agcuaggacuucgcuaacaga

SEQ ID NO: 318329 - RNA, 32 nt, Human
agcuaggagacaccaaacccucaggaagauuu

SEQ ID NO: 318330 - RNA, 32 nt, Human
agcuaggagaggggagaagccgggggcugcag

SEQ ID NO: 318331 - RNA, 32 nt, Human
agcuaggagaugucaaaagcccauaugaggag

SEQ ID NO: 318332 - RNA, 32 nt, Human
agcuaggagccaagacccaucucuucacuauu

SEQ ID NO: 318333 - RNA, 32 nt, Human
agcuaggaggcugaggcaggagaaucacugga

SEQ ID NO: 318334 - RNA, 32 nt, Human
agcuaggaguggagaaucagggccaaguuugc

SEQ ID NO: 318335 - RNA, 32 nt, Human
agcuaggaucauaccaacaugcuccagccuga

SEQ ID NO: 318336 - RNA, 32 nt, Human
agcuaggauuaaaggugcgugccaccaugccc

SEQ ID NO: 318337 - RNA, 32 nt, Human
agcuaggauuacagaagcaugccaccacgccu

SEQ ID NO: 318338 - RNA, 32 nt, Human
agcuaggauuacagauacgugccaccauaccc

SEQ ID NO: 318339 - RNA, 32 nt, Human
agcuaggauuacaggcacaugccaccaugccc

SEQ ID NO: 318340 - RNA, 32 nt, Human
agcuaggauuacaggcacgcaccacuacugcc

SEQ ID NO: 318341 - RNA, 32 nt, Human
agcuaggauuacaggcaugcaccaccacgcug

SEQ ID NO: 318342 - RNA, 32 nt, Human
agcuaggauuacaggcaugugccaccacgccc

SEQ ID NO: 318343 - RNA, 32 nt, Human
agcuaggauuacaggcaugugccaccauguaa

SEQ ID NO: 318344 - RNA, 32 nt, Human
agcuaggauuacagguacgcaccaccacgccc

SEQ ID NO: 318345 - RNA, 32 nt, Human
agcuaggauuacaggugccugccaccacaccc

SEQ ID NO: 318346 - RNA, 32 nt, Human
agcuaggauuacaggugugugccaccacgccu

SEQ ID NO: 318347 - RNA, 32 nt, Human
agcuaggauuacaggugugugccaccaugccc

SEQ ID NO: 318348 - RNA, 32 nt, Human
agcuaggauuaucucauuuaauccuuauacca

SEQ ID NO: 318349 - RNA, 32 nt, Human
agcuaggccgucucccuggucagcuuccuuga

SEQ ID NO: 318350 - RNA, 32 nt, Human
agcuaggccugguggcagaggccuguaauccc

SEQ ID NO: 318351 - RNA, 32 nt, Human
agcuaggcgugguggcugggaccuguaauccc

SEQ ID NO: 318352 - RNA, 32 nt, Human
agcuaggcugaaugccucccagggaugagaaa

SEQ ID NO: 318353 - RNA, 32 nt, Human
agcuagggaagguaugggggaggaaagagaau

SEQ ID NO: 318354 - RNA, 32 nt, Human
agcuagggaccucacuuucuucaucuguagac

SEQ ID NO: 318355 - RNA, 32 nt, Human
agcuagggagaaaggagacucccccgcggagc

SEQ ID NO: 318356 - RNA, 32 nt, Human
agcuagggagaguguccugggugucagccaga

SEQ ID NO: 318357 - RNA, 32 nt, Human
agcuagggaggcaaagcaggcugcagucaguc

SEQ ID NO: 318358 - RNA, 32 nt, Human
agcuagggagggcagaguccccaucacguggc

SEQ ID NO: 318359 - RNA, 32 nt, Human
agcuagggccaggccagccuggggaagaacaa

SEQ ID NO: 318360 - RNA, 21 nt, Human
agcuagggcgaagccagcaga

SEQ ID NO: 318361 - RNA, 25 nt, Human
agcuagggcggggcccgcgggcuga

SEQ ID NO: 318362 - RNA, 20 nt, Human
agcuagggcguagcugugau

SEQ ID NO: 318363 - RNA, 32 nt, Human
agcuagggcuuggucucccaggacagagaguu

SEQ ID NO: 318364 - RNA, 32 nt, Human
agcuaggguggggucuggucacacacaggugu

SEQ ID NO: 318365 - RNA, 32 nt, Human
agcuagguacagaggaauguuugcuaccuuua

SEQ ID NO: 318366 - RNA, 32 nt, Human
agcuaggucuuuggggaaguccuggcugacug

SEQ ID NO: 318367 - RNA, 32 nt, Human
agcuaggugccagcggggaaaguuucccugcu

SEQ ID NO: 318368 - RNA, 32 nt, Human
agcuagguggacagacccuugcagugaugucc

SEQ ID NO: 318369 - RNA, 32 nt, Human
agcuaguacuauaggugugcaccaccacgccc

SEQ ID NO: 318370 - RNA, 32 nt, Human
agcuagucauuccugucauauucccaguagaa

SEQ ID NO: 318371 - RNA, 32 nt, Human
agcuagucuucccucuguucuuccugccucca

SEQ ID NO: 318372 - RNA, 32 nt, Human
agcuagugagaggaggaggaggugggcagagg

SEQ ID NO: 318373 - RNA, 32 nt, Human
agcuaguggagaaggagcaaugcugaggggug

SEQ ID NO: 318374 - RNA, 32 nt, Human
agcuaguuucaaacuccugggcucaagcgaug

SEQ ID NO: 318375 - RNA, 21 nt, Human
agcuaguuucaugcucagaug

SEQ ID NO: 318376 - RNA, 32 nt, Human
agcuaguuugggagguggcggcagaauaaggg

SEQ ID NO: 318377 - RNA, 32 nt, Human
agcuaguuuggggcuggggagcucaggcaaaa

SEQ ID NO: 318378 - RNA, 32 nt, Human
agcuauacgacuucacaucaucagaggacgcc

SEQ ID NO: 318379 - RNA, 19 nt, Human
agcuauagcauccaccaga

SEQ ID NO: 318380 - RNA, 23 nt, Human
agcuauagcuggccauuuagagg

SEQ ID NO: 318381 - RNA, 32 nt, Human
agcuauaggugcuaccuaccucuuggggacau

SEQ ID NO: 318382 - RNA, 32 nt, Human
agcuauagucguucucccuugugggcccgggg

SEQ ID NO: 318383 - RNA, 32 nt, Human
agcuauauagcagcgggggagaggguaaacug

SEQ ID NO: 318384 - RNA, 32 nt, Human
agcuauaugcacagggccuggugcgagcaggu

SEQ ID NO: 318385 - RNA, 32 nt, Human
agcuaucacaggugaauugcagugagcgcuau

SEQ ID NO: 318386 - RNA, 32 nt, Human
agcuaucaggccaagaccccagcuucauuaug

SEQ ID NO: 318387 - RNA, 19 nt, Human
agcuaucauaccaagcaca

SEQ ID NO: 318388 - RNA, 32 nt, Human
agcuaucauagaauuaaccaagcuauuaaaau

SEQ ID NO: 318389 - RNA, 32 nt, Human
agcuaucauccaguuacccaagaugucccauu

SEQ ID NO: 318390 - RNA, 32 nt, Human
agcuauccaccaccaucacagucagacucugc

SEQ ID NO: 318391 - RNA, 32 nt, Human
agcuaucccagaggucgaggcugcagugagcu

SEQ ID NO: 318392 - RNA, 32 nt, Human
agcuaucuaagggggaggguccccgcaccuac

SEQ ID NO: 318393 - RNA, 32 nt, Human
agcuaucuguaaccaagauggaugcaaagagg

SEQ ID NO: 318394 - RNA, 32 nt, Human
agcuaucugucugccuuggguucccaaaguac

SEQ ID NO: 318395 - RNA, 32 nt, Human
agcuaucuuguuggaugugagguggaaucuau

SEQ ID NO: 318396 - RNA, 32 nt, Human
agcuaugacuacagguaugugccaccacgucu

SEQ ID NO: 318397 - RNA, 32 nt, Human
agcuaugaucacaccaccacacuccagccuga

SEQ ID NO: 318398 - RNA, 23 nt, Human
agcuaugaucaugccacugcacu

SEQ ID NO: 318399 - RNA, 32 nt, Human
agcuaugauuacaggcacccgccaccacgccc

SEQ ID NO: 318400 - RNA, 32 nt, Human
agcuaugauuguaccacugcacuccagccugg

SEQ ID NO: 318401 - RNA, 32 nt, Human
agcuaugccacuuaccagcugugggaccuugg

SEQ ID NO: 318402 - RNA, 32 nt, Human
agcuaugccuauacuauuaugcaaaguaacug

SEQ ID NO: 318403 - RNA, 32 nt, Human
agcuaugccucaucuucuaacgagccaagcca

SEQ ID NO: 318404 - RNA, 19 nt, Human
agcuauggaggucgagggg

SEQ ID NO: 318405 - RNA, 32 nt, Human
agcuaugggagcaaggagagggagcucucacc

SEQ ID NO: 318406 - RNA, 22 nt, Human
agcuaugggcuccagcuagcau

SEQ ID NO: 318407 - RNA, 32 nt, Human
agcuauggucauaccaccgcacuccagccuga

SEQ ID NO: 318408 - RNA, 32 nt, Human
agcuaugguugacugcucugguguuuuuauau

SEQ ID NO: 318409 - RNA, 29 nt, Human
agcuauguccuacccugugaccagucagc

SEQ ID NO: 318410 - RNA, 32 nt, Human
agcuaugugcagcugcacaacacaguccuucc

SEQ ID NO: 318411 - RNA, 32 nt, Human
agcuauguuuuuaaaguguacauuuuauaaag

SEQ ID NO: 318412 - RNA, 32 nt, Human
agcuauuagggaggcugaggcaggagaaucgc

SEQ ID NO: 318413 - RNA, 32 nt, Human
agcuauucaaagccuuaauugggcaucacuca

SEQ ID NO: 318414 - RNA, 32 nt, Human
agcuauuccacccucugccugccugccugccu

SEQ ID NO: 318415 - RNA, 32 nt, Human
agcuauuccagcugcuacugcuuuggcucugg

SEQ ID NO: 318416 - RNA, 32 nt, Human
agcuauuccucccaccaccaguagccuugggc

SEQ ID NO: 318417 - RNA, 32 nt, Human
agcuauucucacucugagaacucuccaauaac

SEQ ID NO: 318418 - RNA, 32 nt, Human
agcuauucucacugaugcacugauggcccuga

SEQ ID NO: 318419 - RNA, 32 nt, Human
agcuauucuguugacuauccaucaggauaaua

SEQ ID NO: 318420 - RNA, 32 nt, Human
agcuauugaaaaucauuugugcuuuucagcuu

SEQ ID NO: 318421 - RNA, 32 nt, Human
agcuauugcaccacugcucuccaagcugggca

SEQ ID NO: 318422 - RNA, 32 nt, Human
agcuauugcuuuucuaauuuccuuccauaucc

SEQ ID NO: 318423 - RNA, 32 nt, Human
agcuauuggaaaugagucugauaguacauugg

SEQ ID NO: 318424 - RNA, 31 nt, Human
agcuauuggguggaccaagcgggugaggcgc

SEQ ID NO: 318425 - RNA, 32 nt, Human
agcuauuuacauagccuucuaaguaaaggcaa

SEQ ID NO: 318426 - RNA, 32 nt, Human
agcuauuuacauagccuucuaaguaaaggcag

SEQ ID NO: 318427 - RNA, 32 nt, Human
agcuauuugagacacaaaccucacgaguggaa

SEQ ID NO: 318428 - RNA, 32 nt, Human
agcuauuugucugucaaaaugucugcaaaauu

SEQ ID NO: 318429 - RNA, 32 nt, Human
agcucaaaauagaaauuagguuaaaaugccau

SEQ ID NO: 318430 - RNA, 32 nt, Human
agcucaaacccuguaaguuacagucacaauuu

SEQ ID NO: 318431 - RNA, 32 nt, Human
agcucaaaccuauaaucccagcacuuugggag

SEQ ID NO: 318432 - RNA, 32 nt, Human
agcucaaagcuggagugcaauggcgcaaucuc

SEQ ID NO: 318433 - RNA, 32 nt, Human
agcucaaagggcuuagugaauauugucuuaac

SEQ ID NO: 318434 - RNA, 32 nt, Human
agcucaaagugcucauccugaaugacaaccuu

SEQ ID NO: 318435 - RNA, 32 nt, Human
agcucaaauguauuuuccuaauugcccacuug

SEQ ID NO: 318436 - RNA, 32 nt, Human
agcucaacuauuaaacacuacucucaucaccc

SEQ ID NO: 318437 - RNA, 32 nt, Human
agcucaacugcacuugccucgcagaggcagcc

SEQ ID NO: 318438 - RNA, 32 nt, Human
agcucaagaggccgagguugcagugagccgug

SEQ ID NO: 318439 - RNA, 32 nt, Human
agcucaagagguugaggcugcagugagcccug

SEQ ID NO: 318440 - RNA, 32 nt, Human
agcucaagcaguucucccaccugggccuccca

SEQ ID NO: 318441 - RNA, 32 nt, Human
agcucaagccaaacgcuucuguccucuuuccu

SEQ ID NO: 318442 - RNA, 20 nt, Human
agcucaagcccuaagagaca

SEQ ID NO: 318443 - RNA, 32 nt, Human
agcucaagccuguaaucccagcacuuugggag

SEQ ID NO: 318444 - RNA, 20 nt, Human
agcucaaggaagcucaggga

SEQ ID NO: 318445 - RNA, 32 nt, Human
agcucaaggacgaauuauucagacaagccagu

SEQ ID NO: 318446 - RNA, 32 nt, Human
agcucaagugaggagggggaggcuggguuuuu

SEQ ID NO: 318447 - RNA, 32 nt, Human
agcucaagugaucuuccugccuuggcacccaa

SEQ ID NO: 318448 - RNA, 32 nt, Human
agcucaauaaauccccuggcccucucuccacu

SEQ ID NO: 318449 - RNA, 32 nt, Human
agcucaaucuaugccagcucucuggcaucugg

SEQ ID NO: 318450 - RNA, 32 nt, Human
agcucaaugaauauagaagggaaaaguaugag

SEQ ID NO: 318451 - RNA, 32 nt, Human
agcucacaacuccggaaggaauggggacuuag

SEQ ID NO: 318452 - RNA, 32 nt, Human
agcucacacagcaggaacugagccagaaacgc

SEQ ID NO: 318453 - RNA, 32 nt, Human
agcucacacccuguaaucccagcacuuuggga

SEQ ID NO: 318454 - RNA, 32 nt, Human
agcucacaccuauaaucccagcacuuugggag

SEQ ID NO: 318455 - RNA, 32 nt, Human
agcucacaccuguaaacccagcacuuugggag

SEQ ID NO: 318456 - RNA, 32 nt, Human
agcucacaccuguaaucccagaacuuugggag

SEQ ID NO: 318457 - RNA, 32 nt, Human
agcucacaccuguaaucccagcacuuuaggag

SEQ ID NO: 318458 - RNA, 32 nt, Human
agcucacaccuguaaucccagcacuuugggag

SEQ ID NO: 318459 - RNA, 32 nt, Human
agcucacaccuguaauucccagcgcuuuggga

SEQ ID NO: 318460 - RNA, 32 nt, Human
agcucacaccuguccuucccucauggaagcua

SEQ ID NO: 318461 - RNA, 32 nt, Human
agcucacacuucauggagcacugacagcagug

SEQ ID NO: 318462 - RNA, 32 nt, Human
agcucacacuuguaaucccgacacuuugggag

SEQ ID NO: 318463 - RNA, 32 nt, Human
agcucacagcaaccuccgccucccagguucaa

SEQ ID NO: 318464 - RNA, 32 nt, Human
agcucacagcaaccuccgccucccggguucaa

SEQ ID NO: 318465 - RNA, 32 nt, Human
agcucacagcaaccucugccuccuggguucaa

SEQ ID NO: 318466 - RNA, 32 nt, Human
agcucacagcacugaggcgcugggggagggcc

SEQ ID NO: 318467 - RNA, 32 nt, Human
agcucacagcagcaggagcuucagagaggaag

SEQ ID NO: 318468 - RNA, 32 nt, Human
agcucacagcuauuguggugggaaagggaggg

SEQ ID NO: 318469 - RNA, 32 nt, Human
agcucaccaaaaacuauuucuucagccccuuc

SEQ ID NO: 318470 - RNA, 32 nt, Human
agcucaccaagguccccucucaguccccuucc

SEQ ID NO: 318471 - RNA, 32 nt, Human
agcucaccaaucagacugcccuugucuaucca

SEQ ID NO: 318472 - RNA, 32 nt, Human
agcucaccacaaccuccaccuccuggguuuaa

SEQ ID NO: 318473 - RNA, 32 nt, Human
agcucaccacaaccuccgccucccagguucaa

SEQ ID NO: 318474 - RNA, 23 nt, Human
agcucaccacaaccuugaacucc

SEQ ID NO: 318475 - RNA, 32 nt, Human
agcucaccacagccuccaacuccugggcucaa

SEQ ID NO: 318476 - RNA, 32 nt, Human
agcucaccacccagaaugaugcagucagccuc

SEQ ID NO: 318477 - RNA, 32 nt, Human
agcucaccagcaaacgccacugcagacgaagg

SEQ ID NO: 318478 - RNA, 32 nt, Human
agcucacccaagccugcuccagucccaggggc

SEQ ID NO: 318479 - RNA, 32 nt, Human
agcucacccgggaagagaggagagaagcccau

SEQ ID NO: 318480 - RNA, 32 nt, Human
agcucacccuuguaaucccagcacuuugggag

SEQ ID NO: 318481 - RNA, 23 nt, Human
agcucaccgcaaccuccaccucc

SEQ ID NO: 318482 - RNA, 32 nt, Human
agcucaccgcaaccuccaccuccaggguugac

SEQ ID NO: 318483 - RNA, 32 nt, Human
agcucaccgcaaccuccaccucccggguucaa

SEQ ID NO: 318484 - RNA, 24 nt, Human
agcucaccgcaaccuccaccuccu

SEQ ID NO: 318485 - RNA, 32 nt, Human
agcucaccgcaaccuccaccuccuggguucaa

SEQ ID NO: 318486 - RNA, 32 nt, Human
agcucaccgcaaccuccacucgcagguucaag

SEQ ID NO: 318487 - RNA, 23 nt, Human
agcucaccgcaaccuccgccucc

SEQ ID NO: 318488 - RNA, 32 nt, Human
agcucaccgcaaccuccgccucccggguucaa

SEQ ID NO: 318489 - RNA, 32 nt, Human
agcucaccgcaaccucugccucccagauucaa

SEQ ID NO: 318490 - RNA, 32 nt, Human
agcucaccgcaacgucuaccucccagguucaa

SEQ ID NO: 318491 - RNA, 32 nt, Human
agcucaccgcaaucuccgccucccagauucaa

SEQ ID NO: 318492 - RNA, 32 nt, Human
agcucaccgcauccuccaccucccagguucaa

SEQ ID NO: 318493 - RNA, 22 nt, Human
agcucaccgugcccagccuccu

SEQ ID NO: 318494 - RNA, 32 nt, Human
agcucaccucaaccuccgccucccggguucaa

SEQ ID NO: 318495 - RNA, 32 nt, Human
agcucaccuccaggacccagagucugcccuuc

SEQ ID NO: 318496 - RNA, 32 nt, Human
agcucaccugggaacugaauccaccuaaccau

SEQ ID NO: 318497 - RNA, 32 nt, Human
agcucacgccuauaaucccaacacuuugggaa

SEQ ID NO: 318498 - RNA, 32 nt, Human
agcucacgccuauaaucccagcauuuugggag

SEQ ID NO: 318499 - RNA, 32 nt, Human
agcucacgccugaaaucucagcacuuugguag

SEQ ID NO: 318500 - RNA, 32 nt, Human
agcucacgccuguaaucccaacacuuugggag

SEQ ID NO: 318501 - RNA, 32 nt, Human
agcucacgccuguaaucccagcacuuugggag

SEQ ID NO: 318502 - RNA, 32 nt, Human
agcucacgccuguaaucccaucacuuugggag

SEQ ID NO: 318503 - RNA, 32 nt, Human
agcucacgccuguaauuccagcacuuugggag

SEQ ID NO: 318504 - RNA, 32 nt, Human
agcucacgccuguauucccagcaguuugggag

SEQ ID NO: 318505 - RNA, 32 nt, Human
agcucacgccugugauuccagcacuuugggag

SEQ ID NO: 318506 - RNA, 32 nt, Human
agcucacgccuguuaaguccagcacuuuggga

SEQ ID NO: 318507 - RNA, 32 nt, Human
agcucacggcaaccuccgccucccggguucaa

SEQ ID NO: 318508 - RNA, 23 nt, Human
agcucacggcagccucaaccucc

SEQ ID NO: 318509 - RNA, 18 nt, Human
agcucacggccuccggga

SEQ ID NO: 318510 - RNA, 32 nt, Human
agcucacggcuaccucugccucccggguucaa

SEQ ID NO: 318511 - RNA, 32 nt, Human
agcucacggucuucucagguucaucuguggaa

SEQ ID NO: 318512 - RNA, 32 nt, Human
agcucacuacaaccuccacuuuccagguucaa

SEQ ID NO: 318513 - RNA, 23 nt, Human
agcucacuacaaccuccgccucc

SEQ ID NO: 318514 - RNA, 32 nt, Human
agcucacuacaaccuccgccucccauguucaa

SEQ ID NO: 318515 - RNA, 32 nt, Human
agcucacuacaaccuccugcuccuggguucga

SEQ ID NO: 318516 - RNA, 32 nt, Human
agcucacuacaaccucugccacugggauucaa

SEQ ID NO: 318517 - RNA, 23 nt, Human
agcucacuacaaccucugccucc

SEQ ID NO: 318518 - RNA, 32 nt, Human
agcucacuacaaccucugccucccagguucaa

SEQ ID NO: 318519 - RNA, 32 nt, Human
agcucacuacaaccucugccuccggguucaag

SEQ ID NO: 318520 - RNA, 32 nt, Human
agcucacuacaaccucugccuucugguuucaa

SEQ ID NO: 318521 - RNA, 23 nt, Human
agcucacuacaacuucugccucc

SEQ ID NO: 318522 - RNA, 32 nt, Human
agcucacuacaacuucugccucccaggcucaa

SEQ ID NO: 318523 - RNA, 32 nt, Human
agcucacuacaagcuccccuucccagguucaa

SEQ ID NO: 318524 - RNA, 32 nt, Human
agcucacuacagccuugaacuccugggcucaa

SEQ ID NO: 318525 - RNA, 32 nt, Human
agcucacuauaaccuugaacuccugggcucaa

SEQ ID NO: 318526 - RNA, 23 nt, Human
agcucacuauaagcuccaccucc

SEQ ID NO: 318527 - RNA, 32 nt, Human
agcucacuauaagcuccaccucccagguucau

SEQ ID NO: 318528 - RNA, 32 nt, Human
agcucacucaguuuagauauggagauuuugcu

SEQ ID NO: 318529 - RNA, 32 nt, Human
agcucacuccagccuccaacuccugggcucaa

SEQ ID NO: 318530 - RNA, 32 nt, Human
agcucacuccagccuccacuucccagguucaa

SEQ ID NO: 318531 - RNA, 32 nt, Human
agcucacucccagaaccgcagcugauguuuau

SEQ ID NO: 318532 - RNA, 32 nt, Human
agcucacucuaaccugcaccucccggguucaa

SEQ ID NO: 318533 - RNA, 32 nt, Human
agcucacucucugaagcacacaucauuggcuu

SEQ ID NO: 318534 - RNA, 32 nt, Human
agcucacucucuucagcuuccggcccucaaca

SEQ ID NO: 318535 - RNA, 32 nt, Human
agcucacucugcaaccuccacuucccagguuc

SEQ ID NO: 318536 - RNA, 32 nt, Human
agcucacugaaaccucugccucccggguucaa

SEQ ID NO: 318537 - RNA, 23 nt, Human
agcucacugaagucucgaccucc

SEQ ID NO: 318538 - RNA, 32 nt, Human
agcucacugaagucucgaccucccaggcucaa

SEQ ID NO: 318539 - RNA, 32 nt, Human
agcucacugcaaacuccaccucccagguucaa

SEQ ID NO: 318540 - RNA, 32 nt, Human
agcucacugcaacaccgccucccggguucaag

SEQ ID NO: 318541 - RNA, 32 nt, Human
agcucacugcaacauccaccuccuggguucaa

SEQ ID NO: 318542 - RNA, 23 nt, Human
agcucacugcaacauccgccucu

SEQ ID NO: 318543 - RNA, 32 nt, Human
agcucacugcaacauccgccucugggguucaa

SEQ ID NO: 318544 - RNA, 23 nt, Human
agcucacugcaaccaacaccuuc

SEQ ID NO: 318545 - RNA, 23 nt, Human
agcucacugcaaccacugccucc

SEQ ID NO: 318546 - RNA, 32 nt, Human
agcucacugcaaccacugccucccaggcucaa

SEQ ID NO: 318547 - RNA, 23 nt, Human
agcucacugcaacccccgccucc

SEQ ID NO: 318548 - RNA, 32 nt, Human
agcucacugcaacccccgccucccggguucag

SEQ ID NO: 318549 - RNA, 32 nt, Human
agcucacugcaacccccgccuccuggguucaa

SEQ ID NO: 318550 - RNA, 23 nt, Human
agcucacugcaaccccuccuccu

SEQ ID NO: 318551 - RNA, 32 nt, Human
agcucacugcaaccuacgccuucuggguucac

SEQ ID NO: 318552 - RNA, 24 nt, Human
agcucacugcaaccucaaacuccu

SEQ ID NO: 318553 - RNA, 32 nt, Human
agcucacugcaaccucaaacuccugggcucaa

SEQ ID NO: 318554 - RNA, 22 nt, Human
agcucacugcaaccucaauccu

SEQ ID NO: 318555 - RNA, 32 nt, Human
agcucacugcaaccucaauccugggcucaagu

SEQ ID NO: 318556 - RNA, 32 nt, Human
agcucacugcaaccuccaacugcugggcuuaa

SEQ ID NO: 318557 - RNA, 23 nt, Human
agcucacugcaaccuccaccccc

SEQ ID NO: 318558 - RNA, 22 nt, Human
agcucacugcaaccuccaccuc

SEQ ID NO: 318559 - RNA, 23 nt, Human
agcucacugcaaccuccaccucc

SEQ ID NO: 318560 - RNA, 32 nt, Human
agcucacugcaaccuccaccucccagacucaa

SEQ ID NO: 318561 - RNA, 32 nt, Human
agcucacugcaaccuccaccucccaggaucaa

SEQ ID NO: 318562 - RNA, 32 nt, Human
agcucacugcaaccuccaccucccaggcucaa

SEQ ID NO: 318563 - RNA, 32 nt, Human
agcucacugcaaccuccaccucccaggugcaa

SEQ ID NO: 318564 - RNA, 32 nt, Human
agcucacugcaaccuccaccucccagguucaa

SEQ ID NO: 318565 - RNA, 32 nt, Human
agcucacugcaaccuccaccucccgggucaag

SEQ ID NO: 318566 - RNA, 32 nt, Human
agcucacugcaaccuccaccucccggguucaa

SEQ ID NO: 318567 - RNA, 32 nt, Human
agcucacugcaaccuccaccucccggguucac

SEQ ID NO: 318568 - RNA, 32 nt, Human
agcucacugcaaccuccaccucccggguucag

SEQ ID NO: 318569 - RNA, 32 nt, Human
agcucacugcaaccuccaccucccggguucau

SEQ ID NO: 318570 - RNA, 32 nt, Human
agcucacugcaaccuccaccucccggguuuca

SEQ ID NO: 318571 - RNA, 32 nt, Human
agcucacugcaaccuccaccucccugguucaa

SEQ ID NO: 318572 - RNA, 32 nt, Human
agcucacugcaaccuccaccuccggguucaag

SEQ ID NO: 318573 - RNA, 24 nt, Human
agcucacugcaaccuccaccuccu

SEQ ID NO: 318574 - RNA, 32 nt, Human
agcucacugcaaccuccaccuccuggauucga

SEQ ID NO: 318575 - RNA, 32 nt, Human
agcucacugcaaccuccaccuccuggguucaa

SEQ ID NO: 318576 - RNA, 32 nt, Human
agcucacugcaaccuccaccuccuggguugaa

SEQ ID NO: 318577 - RNA, 32 nt, Human
agcucacugcaaccuccaccucgcagguucaa

SEQ ID NO: 318578 - RNA, 23 nt, Human
agcucacugcaaccuccaccucu

SEQ ID NO: 318579 - RNA, 32 nt, Human
agcucacugcaaccuccaccucucagguucaa

SEQ ID NO: 318580 - RNA, 32 nt, Human
agcucacugcaaccuccaccucuuauguucaa

SEQ ID NO: 318581 - RNA, 22 nt, Human
agcucacugcaaccuccaccuu

SEQ ID NO: 318582 - RNA, 23 nt, Human
agcucacugcaaccuccaucucc

SEQ ID NO: 318583 - RNA, 32 nt, Human
agcucacugcaaccuccaucuccagguuucaa

SEQ ID NO: 318584 - RNA, 32 nt, Human
agcucacugcaaccuccaucucccggauucca

SEQ ID NO: 318585 - RNA, 24 nt, Human
agcucacugcaaccuccaucuccu

SEQ ID NO: 318586 - RNA, 32 nt, Human
agcucacugcaaccuccaucuccuggauucaa

SEQ ID NO: 318587 - RNA, 32 nt, Human
agcucacugcaaccucccccuccuggguucaa

SEQ ID NO: 318588 - RNA, 23 nt, Human
agcucacugcaaccuccgcagcc

SEQ ID NO: 318589 - RNA, 23 nt, Human
agcucacugcaaccuccgcaucc

SEQ ID NO: 318590 - RNA, 32 nt, Human
agcucacugcaaccuccgcaucccggguucaa

SEQ ID NO: 318591 - RNA, 24 nt, Human
agcucacugcaaccuccgcccccu

SEQ ID NO: 318592 - RNA, 32 nt, Human
agcucacugcaaccuccgcccccuggguucaa

SEQ ID NO: 318593 - RNA, 23 nt, Human
agcucacugcaaccuccgccucc

SEQ ID NO: 318594 - RNA, 32 nt, Human
agcucacugcaaccuccgccucccaaguucaa

SEQ ID NO: 318595 - RNA, 32 nt, Human
agcucacugcaaccuccgccucccagguucaa

SEQ ID NO: 318596 - RNA, 32 nt, Human
agcucacugcaaccuccgccucccggguucaa

SEQ ID NO: 318597 - RNA, 24 nt, Human
agcucacugcaaccuccgccuccu

SEQ ID NO: 318598 - RNA, 32 nt, Human
agcucacugcaaccuccgccuccugagguuca

SEQ ID NO: 318599 - RNA, 32 nt, Human
agcucacugcaaccuccgccuccugggaucaa

SEQ ID NO: 318600 - RNA, 32 nt, Human
agcucacugcaaccuccgccuccuggguucaa

SEQ ID NO: 318601 - RNA, 32 nt, Human
agcucacugcaaccuccgccuccuggguucac

SEQ ID NO: 318602 - RNA, 24 nt, Human
agcucacugcaaccuccgccucuu

SEQ ID NO: 318603 - RNA, 32 nt, Human
agcucacugcaaccuccgccucuuggguucaa

SEQ ID NO: 318604 - RNA, 24 nt, Human
agcucacugcaaccuccgccugcu

SEQ ID NO: 318605 - RNA, 32 nt, Human
agcucacugcaaccuccgccugcuggguucaa

SEQ ID NO: 318606 - RNA, 32 nt, Human
agcucacugcaaccuccgccuucuggguucag

SEQ ID NO: 318607 - RNA, 24 nt, Human
agcucacugcaaccuccgcuuccu

SEQ ID NO: 318608 - RNA, 32 nt, Human
agcucacugcaaccuccgguucccgggcucaa

SEQ ID NO: 318609 - RNA, 23 nt, Human
agcucacugcaaccuccgucucc

SEQ ID NO: 318610 - RNA, 32 nt, Human
agcucacugcaaccuccgucuccaggguucaa

SEQ ID NO: 318611 - RNA, 24 nt, Human
agcucacugcaaccuccgucuccu

SEQ ID NO: 318612 - RNA, 23 nt, Human
agcucacugcaaccuccgucucu

SEQ ID NO: 318613 - RNA, 32 nt, Human
agcucacugcaaccuccguuuccuggguucga

SEQ ID NO: 318614 - RNA, 23 nt, Human
agcucacugcaaccuccuccucc

SEQ ID NO: 318615 - RNA, 32 nt, Human
agcucacugcaaccuccuccucccggguucaa

SEQ ID NO: 318616 - RNA, 24 nt, Human
agcucacugcaaccuccuccuucu

SEQ ID NO: 318617 - RNA, 32 nt, Human
agcucacugcaaccuccuccuucuggguucaa

SEQ ID NO: 318618 - RNA, 24 nt, Human
agcucacugcaaccucgaccucuu

SEQ ID NO: 318619 - RNA, 32 nt, Human
agcucacugcaaccucgaccucuuggguucaa

SEQ ID NO: 318620 - RNA, 23 nt, Human
agcucacugcaaccucggccucc

SEQ ID NO: 318621 - RNA, 24 nt, Human
agcucacugcaaccucuaccuccu

SEQ ID NO: 318622 - RNA, 32 nt, Human
agcucacugcaaccucuaccuccuggguucaa

SEQ ID NO: 318623 - RNA, 32 nt, Human
agcucacugcaaccucuacucccaggcucaag

SEQ ID NO: 318624 - RNA, 23 nt, Human
agcucacugcaaccucucucucc

SEQ ID NO: 318625 - RNA, 32 nt, Human
agcucacugcaaccucucucucccggguucaa

SEQ ID NO: 318626 - RNA, 32 nt, Human
agcucacugcaaccucugacucccagacucaa

SEQ ID NO: 318627 - RNA, 24 nt, Human
agcucacugcaaccucugacuccu

SEQ ID NO: 318628 - RNA, 23 nt, Human
agcucacugcaaccucugccucc

SEQ ID NO: 318629 - RNA, 32 nt, Human
agcucacugcaaccucugccuccagaguucaa

SEQ ID NO: 318630 - RNA, 32 nt, Human
agcucacugcaaccucugccucccaaguucaa

SEQ ID NO: 318631 - RNA, 32 nt, Human
agcucacugcaaccucugccucccagguucaa

SEQ ID NO: 318632 - RNA, 32 nt, Human
agcucacugcaaccucugccucccaguucaag

SEQ ID NO: 318633 - RNA, 32 nt, Human
agcucacugcaaccucugccucccggauucaa

SEQ ID NO: 318634 - RNA, 32 nt, Human
agcucacugcaaccucugccucccggauuuaa

SEQ ID NO: 318635 - RNA, 32 nt, Human
agcucacugcaaccucugccucccggguucaa

SEQ ID NO: 318636 - RNA, 32 nt, Human
agcucacugcaaccucugccucccgguuuuuc

SEQ ID NO: 318637 - RNA, 32 nt, Human
agcucacugcaaccucugccucccugguucaa

SEQ ID NO: 318638 - RNA, 24 nt, Human
agcucacugcaaccucugccuccu

SEQ ID NO: 318639 - RNA, 32 nt, Human
agcucacugcaaccucugccuccugaguucaa

SEQ ID NO: 318640 - RNA, 32 nt, Human
agcucacugcaaccucugccuccuggauucaa

SEQ ID NO: 318641 - RNA, 32 nt, Human
agcucacugcaaccucugccuccugggcucaa

SEQ ID NO: 318642 - RNA, 32 nt, Human
agcucacugcaaccucugccuccuggguucaa

SEQ ID NO: 318643 - RNA, 32 nt, Human
agcucacugcaaccucugccuccuggguucuc

SEQ ID NO: 318644 - RNA, 32 nt, Human
agcucacugcaaccucugccuccuggguuuaa

SEQ ID NO: 318645 - RNA, 32 nt, Human
agcucacugcaaccucugccuccugguucaag

SEQ ID NO: 318646 - RNA, 24 nt, Human
agcucacugcaaccucugccuucu

SEQ ID NO: 318647 - RNA, 32 nt, Human
agcucacugcaaccucugccuucuggauucaa

SEQ ID NO: 318648 - RNA, 23 nt, Human
agcucacugcaaccucugcuucc

SEQ ID NO: 318649 - RNA, 32 nt, Human
agcucacugcaaccucugcuucccggguucac

SEQ ID NO: 318650 - RNA, 24 nt, Human
agcucacugcaaccucugcuuccu

SEQ ID NO: 318651 - RNA, 32 nt, Human
agcucacugcaaccucugcuuccuggguucaa

SEQ ID NO: 318652 - RNA, 32 nt, Human
agcucacugcaaccucugucucccggguucaa

SEQ ID NO: 318653 - RNA, 24 nt, Human
agcucacugcaaccucugucuccu

SEQ ID NO: 318654 - RNA, 32 nt, Human
agcucacugcaaccucugucuccuggguucaa

SEQ ID NO: 318655 - RNA, 32 nt, Human
agcucacugcaaccucugucuccuggguucag

SEQ ID NO: 318656 - RNA, 32 nt, Human
agcucacugcaaccucugugcagguucaagug

SEQ ID NO: 318657 - RNA, 23 nt, Human
agcucacugcaaccugugccucc

SEQ ID NO: 318658 - RNA, 32 nt, Human
agcucacugcaaccugugccucccggcuucaa

SEQ ID NO: 318659 - RNA, 32 nt, Human
agcucacugcaaccuuacuccuaggcucaagu

SEQ ID NO: 318660 - RNA, 32 nt, Human
agcucacugcaaccuucaccucccagguucaa

SEQ ID NO: 318661 - RNA, 24 nt, Human
agcucacugcaaccuucgccaccu

SEQ ID NO: 318662 - RNA, 32 nt, Human
agcucacugcaaccuucgccaccuggguucca

SEQ ID NO: 318663 - RNA, 32 nt, Human
agcucacugcaaccuucgccucccagcuucaa

SEQ ID NO: 318664 - RNA, 23 nt, Human
agcucacugcaaccuuggccucc

SEQ ID NO: 318665 - RNA, 32 nt, Human
agcucacugcaaccuuggccucccguguucaa

SEQ ID NO: 318666 - RNA, 23 nt, Human
agcucacugcaaccuuugucucc

SEQ ID NO: 318667 - RNA, 32 nt, Human
agcucacugcaaccuuugucucccgggcucaa

SEQ ID NO: 318668 - RNA, 32 nt, Human
agcucacugcaacguccaccuccuggguucaa

SEQ ID NO: 318669 - RNA, 24 nt, Human
agcucacugcaacguccaccucuu

SEQ ID NO: 318670 - RNA, 32 nt, Human
agcucacugcaacguccaccucuugaguucaa

SEQ ID NO: 318671 - RNA, 23 nt, Human
agcucacugcaacgucugccucc

SEQ ID NO: 318672 - RNA, 32 nt, Human
agcucacugcaacgucugccucccggguucaa

SEQ ID NO: 318673 - RNA, 23 nt, Human
agcucacugcaacuuccaccucc

SEQ ID NO: 318674 - RNA, 32 nt, Human
agcucacugcaacuuccaccucccagguucaa

SEQ ID NO: 318675 - RNA, 23 nt, Human
agcucacugcaacuuccgcaucc

SEQ ID NO: 318676 - RNA, 32 nt, Human
agcucacugcaacuuccgcaucccagguucaa

SEQ ID NO: 318677 - RNA, 32 nt, Human
agcucacugcaacuuccgccccgccagguucg

SEQ ID NO: 318678 - RNA, 32 nt, Human
agcucacugcaacuucugccucccagguucaa

SEQ ID NO: 318679 - RNA, 24 nt, Human
agcucacugcaacuucugccuccu

SEQ ID NO: 318680 - RNA, 32 nt, Human
agcucacugcaacuucugccuccuggguucaa

SEQ ID NO: 318681 - RNA, 32 nt, Human
agcucacugcaacuucugccuccugguaucaa

SEQ ID NO: 318682 - RNA, 23 nt, Human
agcucacugcaagcuccaacucc

SEQ ID NO: 318683 - RNA, 32 nt, Human
agcucacugcaagcuccaacucccggguucac

SEQ ID NO: 318684 - RNA, 23 nt, Human
agcucacugcaagcuccaccucc

SEQ ID NO: 318685 - RNA, 32 nt, Human
agcucacugcaagcuccaccucccggguucac

SEQ ID NO: 318686 - RNA, 32 nt, Human
agcucacugcaagcuccaccucccggguucau

SEQ ID NO: 318687 - RNA, 32 nt, Human
agcucacugcaagcuccaccucccggguuuau

SEQ ID NO: 318688 - RNA, 24 nt, Human
agcucacugcaagcuccaccuccu

SEQ ID NO: 318689 - RNA, 32 nt, Human
agcucacugcaagcuccaccuuccggguucac

SEQ ID NO: 318690 - RNA, 21 nt, Human
agcucacugcaagcuccgccu

SEQ ID NO: 318691 - RNA, 32 nt, Human
agcucacugcaagcuccgccucccagguucac

SEQ ID NO: 318692 - RNA, 32 nt, Human
agcucacugcaagcuccgccucccagguucau

SEQ ID NO: 318693 - RNA, 32 nt, Human
agcucacugcaagcuccgccucccggguacaa

SEQ ID NO: 318694 - RNA, 32 nt, Human
agcucacugcaagcuccgccuccucccggguu

SEQ ID NO: 318695 - RNA, 32 nt, Human
agcucacugcaagcuccgccuccuggguucac

SEQ ID NO: 318696 - RNA, 32 nt, Human
agcucacugcaagcucuaccucuugguucacg

SEQ ID NO: 318697 - RNA, 32 nt, Human
agcucacugcaagcucugccucccggguucau

SEQ ID NO: 318698 - RNA, 32 nt, Human
agcucacugcaagcucugccucucagguucaa

SEQ ID NO: 318699 - RNA, 24 nt, Human
agcucacugcaaucuccaccuccu

SEQ ID NO: 318700 - RNA, 32 nt, Human
agcucacugcaaucuccaccuccuggguucaa

SEQ ID NO: 318701 - RNA, 21 nt, Human
agcucacugcaaucuccgccu

SEQ ID NO: 318702 - RNA, 32 nt, Human
agcucacugcaaucuccgccucccggguucaa

SEQ ID NO: 318703 - RNA, 32 nt, Human
agcucacugcaaucucugccacccagauucaa

SEQ ID NO: 318704 - RNA, 32 nt, Human
agcucacugcaaucucugccuccuggguucag

SEQ ID NO: 318705 - RNA, 32 nt, Human
agcucacugcaaucuucaccuccuaggcucaa

SEQ ID NO: 318706 - RNA, 24 nt, Human
agcucacugcacccucaaccuccu

SEQ ID NO: 318707 - RNA, 32 nt, Human
agcucacugcacccucaaccuccuggguucaa

SEQ ID NO: 318708 - RNA, 32 nt, Human
agcucacugcacccuccgccucucggguucaa

SEQ ID NO: 318709 - RNA, 32 nt, Human
agcucacugcacccucugugucccggauucaa

SEQ ID NO: 318710 - RNA, 32 nt, Human
agcucacugcagacuccaacuccuggccucaa

SEQ ID NO: 318711 - RNA, 32 nt, Human
agcucacugcagccacugccucccagguucaa

SEQ ID NO: 318712 - RNA, 32 nt, Human
agcucacugcagcccccgccucccagguucga

SEQ ID NO: 318713 - RNA, 32 nt, Human
agcucacugcagcccugaacuccugggcucaa

SEQ ID NO: 318714 - RNA, 24 nt, Human
agcucacugcagccucaaacuccu

SEQ ID NO: 318715 - RNA, 32 nt, Human
agcucacugcagccucaaacuccuggauucaa

SEQ ID NO: 318716 - RNA, 32 nt, Human
agcucacugcagccucaaacuccugggcucaa

SEQ ID NO: 318717 - RNA, 32 nt, Human
agcucacugcagccucaaacuccugggcucag

SEQ ID NO: 318718 - RNA, 24 nt, Human
agcucacugcagccucaaccuccu

SEQ ID NO: 318719 - RNA, 24 nt, Human
agcucacugcagccucaacuuccu

SEQ ID NO: 318720 - RNA, 32 nt, Human
agcucacugcagccucauacuccugggcucaa

SEQ ID NO: 318721 - RNA, 32 nt, Human
agcucacugcagccuccaacuccuggguucaa

SEQ ID NO: 318722 - RNA, 23 nt, Human
agcucacugcagccuccaccucc

SEQ ID NO: 318723 - RNA, 32 nt, Human
agcucacugcagccuccaccucccaggcucaa

SEQ ID NO: 318724 - RNA, 32 nt, Human
agcucacugcagccuccaccucccagguucaa

SEQ ID NO: 318725 - RNA, 24 nt, Human
agcucacugcagccuccaccuccu

SEQ ID NO: 318726 - RNA, 32 nt, Human
agcucacugcagccuccaccuccugggcucau

SEQ ID NO: 318727 - RNA, 32 nt, Human
agcucacugcagccuccaccuccuggguucaa

SEQ ID NO: 318728 - RNA, 32 nt, Human
agcucacugcagccuccacuuccuggguucac

SEQ ID NO: 318729 - RNA, 32 nt, Human
agcucacugcagccuccaucuccuaggcucaa

SEQ ID NO: 318730 - RNA, 32 nt, Human
agcucacugcagccuccgucucccagguucaa

SEQ ID NO: 318731 - RNA, 32 nt, Human
agcucacugcagccucgaacuccugggcucaa

SEQ ID NO: 318732 - RNA, 32 nt, Human
agcucacugcagccucgaacucuugggcuuca

SEQ ID NO: 318733 - RNA, 23 nt, Human
agcucacugcagccucgaccucc

SEQ ID NO: 318734 - RNA, 32 nt, Human
agcucacugcagccucgaccucccgggcucaa

SEQ ID NO: 318735 - RNA, 24 nt, Human
agcucacugcagccucgaccuccu

SEQ ID NO: 318736 - RNA, 32 nt, Human
agcucacugcagccucgaccuccugcgcucag

SEQ ID NO: 318737 - RNA, 32 nt, Human
agcucacugcagccucgaccuccuggacucag

SEQ ID NO: 318738 - RNA, 32 nt, Human
agcucacugcagccucgaccuccugggcucaa

SEQ ID NO: 318739 - RNA, 32 nt, Human
agcucacugcagccucgacuucccaggcucaa

SEQ ID NO: 318740 - RNA, 32 nt, Human
agcucacugcagccucugccacccagauucaa

SEQ ID NO: 318741 - RNA, 32 nt, Human
agcucacugcagccucugccucccggguucaa

SEQ ID NO: 318742 - RNA, 32 nt, Human
agcucacugcagccucugccuccugaguucaa

SEQ ID NO: 318743 - RNA, 32 nt, Human
agcucacugcagccucugucucccgggcucaa

SEQ ID NO: 318744 - RNA, 32 nt, Human
agcucacugcagccuggaacuccugggaucaa

SEQ ID NO: 318745 - RNA, 32 nt, Human
agcucacugcagccuggaacuccugggcucag

SEQ ID NO: 318746 - RNA, 32 nt, Human
agcucacugcagccuggaccuccuggccucaa

SEQ ID NO: 318747 - RNA, 32 nt, Human
agcucacugcagccuugaacuccuggacucaa

SEQ ID NO: 318748 - RNA, 32 nt, Human
agcucacugcagccuugaacuccugggaucaa

SEQ ID NO: 318749 - RNA, 32 nt, Human
agcucacugcagccuugaccucccgggcucaa

SEQ ID NO: 318750 - RNA, 32 nt, Human
agcucacugcagccuugaccuccugggcugaa

SEQ ID NO: 318751 - RNA, 32 nt, Human
agcucacugcagccuugaccuccuggguucaa

SEQ ID NO: 318752 - RNA, 32 nt, Human
agcucacugcagccuugaccuccuggguuccg

SEQ ID NO: 318753 - RNA, 32 nt, Human
agcucacugcagccuugagcuccugggcuacc

SEQ ID NO: 318754 - RNA, 32 nt, Human
agcucacugcagccuugagcuccugggcucaa

SEQ ID NO: 318755 - RNA, 32 nt, Human
agcucacugcagccuuguccucccaggcucaa

SEQ ID NO: 318756 - RNA, 32 nt, Human
agcucacugcagcuucaaacucuugggcucaa

SEQ ID NO: 318757 - RNA, 23 nt, Human
agcucacugcagcuucaacaccc

SEQ ID NO: 318758 - RNA, 32 nt, Human
agcucacugcagcuucaaucuccuggcucaag

SEQ ID NO: 318759 - RNA, 32 nt, Human
agcucacugcagcuuugaccucccagacccaa

SEQ ID NO: 318760 - RNA, 32 nt, Human
agcucacugcagcuuugaccuugccgggcuca

SEQ ID NO: 318761 - RNA, 32 nt, Human
agcucacugcaggcucugccuccuggguucca

SEQ ID NO: 318762 - RNA, 32 nt, Human
agcucacugcagucuccaccuccugagcucaa

SEQ ID NO: 318763 - RNA, 32 nt, Human
agcucacugcagucucgaacuccuggacucaa

SEQ ID NO: 318764 - RNA, 32 nt, Human
agcucacugcagucucugccucccggguucga

SEQ ID NO: 318765 - RNA, 24 nt, Human
agcucacugcagucuucagccucc

SEQ ID NO: 318766 - RNA, 32 nt, Human
agcucacugcagucuucagccuccccaguagc

SEQ ID NO: 318767 - RNA, 32 nt, Human
agcucacugcagucuugaacuccugggcucaa

SEQ ID NO: 318768 - RNA, 32 nt, Human
agcucacugcauccucugccucccggguucaa

SEQ ID NO: 318769 - RNA, 32 nt, Human
agcucacugcauccuugaccucccagacucaa

SEQ ID NO: 318770 - RNA, 32 nt, Human
agcucacugccaccucugccucccagguucac

SEQ ID NO: 318771 - RNA, 32 nt, Human
agcucacugccaccuuugccuccuggguucaa

SEQ ID NO: 318772 - RNA, 32 nt, Human
agcucacugccagcugcggccugggcaccgcg

SEQ ID NO: 318773 - RNA, 32 nt, Human
agcucacugccuccugggcucagcucaaaccc

SEQ ID NO: 318774 - RNA, 23 nt, Human
agcucacugcgaccuccaccucc

SEQ ID NO: 318775 - RNA, 32 nt, Human
agcucacugcgaccuccaccucccauguucaa

SEQ ID NO: 318776 - RNA, 24 nt, Human
agcucacugcgaccuccaccuccu

SEQ ID NO: 318777 - RNA, 32 nt, Human
agcucacugcgaccuccaccuccuggguucaa

SEQ ID NO: 318778 - RNA, 32 nt, Human
agcucacugcgaccugcaccuccuggguucaa

SEQ ID NO: 318779 - RNA, 32 nt, Human
agcucacugcggccuugaacuccugggcuuaa

SEQ ID NO: 318780 - RNA, 32 nt, Human
agcucacugcugccucaaccucccaggcucaa

SEQ ID NO: 318781 - RNA, 32 nt, Human
agcucacuggagccucugccuuccagguucaa

SEQ ID NO: 318782 - RNA, 32 nt, Human
agcucacuggcaacaucugccucccggguuca

SEQ ID NO: 318783 - RNA, 32 nt, Human
agcucacugguccauuucucaguggcuucucc

SEQ ID NO: 318784 - RNA, 32 nt, Human
agcucacuguaaccucaaaauccugggcucaa

SEQ ID NO: 318785 - RNA, 24 nt, Human
agcucacuguaaccucaaacuccu

SEQ ID NO: 318786 - RNA, 32 nt, Human
agcucacuguaaccucaaacuccuggacucaa

SEQ ID NO: 318787 - RNA, 32 nt, Human
agcucacuguaaccucaaacuccuggacucau

SEQ ID NO: 318788 - RNA, 32 nt, Human
agcucacuguaaccucaaacucuggggcucaa

SEQ ID NO: 318789 - RNA, 23 nt, Human
agcucacuguaaccuccaccucc

SEQ ID NO: 318790 - RNA, 32 nt, Human
agcucacuguaaccuccaccucccggauucaa

SEQ ID NO: 318791 - RNA, 32 nt, Human
agcucacuguaaccucugccucccugcuucaa

SEQ ID NO: 318792 - RNA, 32 nt, Human
agcucacuguaacuucgaccaccugggcucaa

SEQ ID NO: 318793 - RNA, 32 nt, Human
agcucacuguacccuugaacuccugggcucaa

SEQ ID NO: 318794 - RNA, 32 nt, Human
agcucacuguacuccagcccggguucaagcaa

SEQ ID NO: 318795 - RNA, 32 nt, Human
agcucacuguagccucuaacucccaggcucaa

SEQ ID NO: 318796 - RNA, 32 nt, Human
agcucacuguagccucuaucuccugggcucaa

SEQ ID NO: 318797 - RNA, 32 nt, Human
agcucacuguagccuugaucuccugggcucaa

SEQ ID NO: 318798 - RNA, 32 nt, Human
agcucacuguagucuccaccacucccuuuugu

SEQ ID NO: 318799 - RNA, 32 nt, Human
agcucacugugaccuccgccuccuggguucaa

SEQ ID NO: 318800 - RNA, 32 nt, Human
agcucacuucaagcucacccugcuccuaccua

SEQ ID NO: 318801 - RNA, 32 nt, Human
agcucacuucacccucuccccaugccauccca

SEQ ID NO: 318802 - RNA, 32 nt, Human
agcucacuucacugcacuccagucugggugac

SEQ ID NO: 318803 - RNA, 32 nt, Human
agcucacuugcagacacccugccggaagcaga

SEQ ID NO: 318804 - RNA, 32 nt, Human
agcucacuugcagcugccacugcagacaagua

SEQ ID NO: 318805 - RNA, 32 nt, Human
agcucagaaagccauucuuggggcaaacacac

SEQ ID NO: 318806 - RNA, 32 nt, Human
agcucagaaauucuaccuuugggagucaccac

SEQ ID NO: 318807 - RNA, 32 nt, Human
agcucagaaauucuaucuucgggagucaccac

SEQ ID NO: 318808 - RNA, 32 nt, Human
agcucagaagcagcagaacugacauugggacc

SEQ ID NO: 318809 - RNA, 32 nt, Human
agcucagaagcugaggagucacagagagaccu

SEQ ID NO: 318810 - RNA, 32 nt, Human
agcucagaccagcuggaucuugcucagucucu

SEQ ID NO: 318811 - RNA, 32 nt, Human
agcucagacuauaagcacacaccaccacaccc

SEQ ID NO: 318812 - RNA, 32 nt, Human
agcucagagagagaaagaucugagggaagaug

SEQ ID NO: 318813 - RNA, 32 nt, Human
agcucagagaugacccugagucuugauucgag

SEQ ID NO: 318814 - RNA, 32 nt, Human
agcucagagcaguggcugauggggacacugag

SEQ ID NO: 318815 - RNA, 32 nt, Human
agcucagagccauacaaaaguaggcuggauuc

SEQ ID NO: 318816 - RNA, 32 nt, Human
agcucagaggaaagaagaaaagggccaggagu

SEQ ID NO: 318817 - RNA, 32 nt, Human
agcucagaggagaccugcaguggguagcuccu

SEQ ID NO: 318818 - RNA, 32 nt, Human
agcucagauaugagucaaggcuugucugacuc

SEQ ID NO: 318819 - RNA, 32 nt, Human
agcucagauguccuaaugaacaugcaccuaca

SEQ ID NO: 318820 - RNA, 32 nt, Human
agcucagauuacaggcaugugccaccacgccc

SEQ ID NO: 318821 - RNA, 32 nt, Human
agcucagauuccugaauuaacaauucacacug

SEQ ID NO: 318822 - RNA, 32 nt, Human
agcucagcaaagccucuguagccagacugccu

SEQ ID NO: 318823 - RNA, 32 nt, Human
agcucagcaagugcacaagccuuacuuugguu

SEQ ID NO: 318824 - RNA, 32 nt, Human
agcucagcagaggcucacguggcccaggcugg

SEQ ID NO: 318825 - RNA, 32 nt, Human
agcucagcagaggcugugguacaacauggucc

SEQ ID NO: 318826 - RNA, 21 nt, Human
agcucagcagcauccagagcc

SEQ ID NO: 318827 - RNA, 32 nt, Human
agcucagcaguguuuaaugauccucuuccaca

SEQ ID NO: 318828 - RNA, 32 nt, Human
agcucagccacggccauccagacccuugggcu

SEQ ID NO: 318829 - RNA, 32 nt, Human
agcucagccccagggguucuuucacacacaag

SEQ ID NO: 318830 - RNA, 32 nt, Human
agcucagccccuccccuccaacucucauccca

SEQ ID NO: 318831 - RNA, 32 nt, Human
agcucagccggcguugcuggucagggucuccc

SEQ ID NO: 318832 - RNA, 32 nt, Human
agcucagccucaaucaugucuuaacaaaauga

SEQ ID NO: 318833 - RNA, 32 nt, Human
agcucagccucucuccucacucugccucuuug

SEQ ID NO: 318834 - RNA, 32 nt, Human
agcucagccuugacccugacccuugcucuccc

SEQ ID NO: 318835 - RNA, 32 nt, Human
agcucagcgccggcuccaagcccagccagucc

SEQ ID NO: 318836 - RNA, 32 nt, Human
agcucagcgcuugacauuuccuaagugugcca

SEQ ID NO: 318837 - RNA, 32 nt, Human
agcucagcguucacgggcaucuugccauucag

SEQ ID NO: 318838 - RNA, 32 nt, Human
agcucagcuagcucugccccaggacggcccug

SEQ ID NO: 318839 - RNA, 32 nt, Human
agcucagcucacugcaaccuccaccucccagg

SEQ ID NO: 318840 - RNA, 32 nt, Human
agcucagcuccuggagggacagugagaauuua

SEQ ID NO: 318841 - RNA, 18 nt, Human
agcucagcugaccugcga

SEQ ID NO: 318842 - RNA, 32 nt, Human
agcucagcugcaggaggcaggauggucuggag

SEQ ID NO: 318843 - RNA, 32 nt, Human
agcucagcuguggagccagcagcuccgacuca

SEQ ID NO: 318844 - RNA, 32 nt, Human
agcucagcuuacuguaaccucugccuccugga

SEQ ID NO: 318845 - RNA, 32 nt, Human
agcucaggaacaucacugguguauuuguuuuu

SEQ ID NO: 318846 - RNA, 32 nt, Human
agcucaggaagcaugucuaaggcucagaaguu

SEQ ID NO: 318847 - RNA, 32 nt, Human
agcucaggagaaggggagagacaggucgccca

SEQ ID NO: 318848 - RNA, 32 nt, Human
agcucaggaggcagagguugcagugagccaaa

SEQ ID NO: 318849 - RNA, 32 nt, Human
agcucaggaggcagagguugcagugagcugag

SEQ ID NO: 318850 - RNA, 32 nt, Human
agcucaggagguugggucugcagugagcuauc

SEQ ID NO: 318851 - RNA, 32 nt, Human
agcucaggaguucgagaccacccugggcaaca

SEQ ID NO: 318852 - RNA, 32 nt, Human
agcucaggaguuucagaccagccugggcaaca

SEQ ID NO: 318853 - RNA, 32 nt, Human
agcucaggauagcugcuggccacuccuguccu

SEQ ID NO: 318854 - RNA, 32 nt, Human
agcucaggccacugcaggucccaccuggccuu

SEQ ID NO: 318855 - RNA, 32 nt, Human
agcucaggccuguaaucucagcacuuugggag

SEQ ID NO: 318856 - RNA, 32 nt, Human
agcucaggcggcgccgcuccagcccggggccc

SEQ ID NO: 318857 - RNA, 32 nt, Human
agcucagggaaagacaaucagugcaagaggaa

SEQ ID NO: 318858 - RNA, 32 nt, Human
agcucagggaggcugagugucccaggccuguu

SEQ ID NO: 318859 - RNA, 32 nt, Human
agcucagggcccaucccuucucugcagcucug

SEQ ID NO: 318860 - RNA, 32 nt, Human
agcucagggcccugucugcucuguggacucaa

SEQ ID NO: 318861 - RNA, 32 nt, Human
agcucagggcccugugcccgcuugccuguucc

SEQ ID NO: 318862 - RNA, 32 nt, Human
agcucagggcuggggacuuguccuucucuucc

SEQ ID NO: 318863 - RNA, 32 nt, Human
agcucagggcuuccucugcccaugcagucccc

SEQ ID NO: 318864 - RNA, 32 nt, Human
agcucaggggaacgcccgagacccccaccucu

SEQ ID NO: 318865 - RNA, 32 nt, Human
agcucagggggccaaggcugcagugagucaug

SEQ ID NO: 318866 - RNA, 32 nt, Human
agcucagggguggagggcgaugggucgggaag

SEQ ID NO: 318867 - RNA, 32 nt, Human
agcucaggguggagcagcugcagccaugggac

SEQ ID NO: 318868 - RNA, 32 nt, Human
agcucaggugcuggucccguccccugcagggc

SEQ ID NO: 318869 - RNA, 32 nt, Human
agcucagguggcuggggagaacuaaaacaccu

SEQ ID NO: 318870 - RNA, 32 nt, Human
agcucagguugugcaucugauggaaaccacug

SEQ ID NO: 318871 - RNA, 32 nt, Human
agcucaguauagaacuacauuaucugcaaacu

SEQ ID NO: 318872 - RNA, 32 nt, Human
agcucagucaggugaggguggggaugacccau

SEQ ID NO: 318873 - RNA, 32 nt, Human
agcucagucguuucuaugaugaugccaucgug

SEQ ID NO: 318874 - RNA, 32 nt, Human
agcucagugaccugggugggcaguggccaagc

SEQ ID NO: 318875 - RNA, 32 nt, Human
agcucagugcaaccuccgccacccggguucag

SEQ ID NO: 318876 - RNA, 32 nt, Human
agcucagugcaaccuccgcccccugggaucaa

SEQ ID NO: 318877 - RNA, 32 nt, Human
agcucagugcaaccuccgccucccgaguucaa

SEQ ID NO: 318878 - RNA, 32 nt, Human
agcucagugcagccucaaacuccugggcucaa

SEQ ID NO: 318879 - RNA, 32 nt, Human
agcucagugcagccuccaacuccugggcucaa

SEQ ID NO: 318880 - RNA, 32 nt, Human
agcucaguggcaggagaaucaaaccuaagcuu

SEQ ID NO: 318881 - RNA, 32 nt, Human
agcucagugggcaguggcaggaacugagugcc

SEQ ID NO: 318882 - RNA, 32 nt, Human
agcucagugucacagaccuuuguggaagcaac

SEQ ID NO: 318883 - RNA, 32 nt, Human
agcucaguguccucaccuauaauaugggguau

SEQ ID NO: 318884 - RNA, 32 nt, Human
agcucaguucacaguuuggauauuucuuccca

SEQ ID NO: 318885 - RNA, 32 nt, Human
agcucaguucccauugcuugugcucagggcug

SEQ ID NO: 318886 - RNA, 32 nt, Human
agcucaguucuccagaucuggcuaggagcagu

SEQ ID NO: 318887 - RNA, 32 nt, Human
agcucaguuggcugcaggagcagcuagcacag

SEQ ID NO: 318888 - RNA, 32 nt, Human
agcucauaccuguaaucccaggacuuugggag

SEQ ID NO: 318889 - RNA, 32 nt, Human
agcucauacuguucucaccugggaaacuuggg

SEQ ID NO: 318890 - RNA, 32 nt, Human
agcucauacuuguaacccagcacuuugggaag

SEQ ID NO: 318891 - RNA, 32 nt, Human
agcucauagccucuuggcugccuuaggagcuu

SEQ ID NO: 318892 - RNA, 32 nt, Human
agcucauaugaacaugccaaacuccagaggug

SEQ ID NO: 318893 - RNA, 32 nt, Human
agcucaucacagcgaaccaggucucucaaaag

SEQ ID NO: 318894 - RNA, 32 nt, Human
agcucaucacccauuaagguuuguuguugaau

SEQ ID NO: 318895 - RNA, 32 nt, Human
agcucaucagacacuggaaugcagugauucuu

SEQ ID NO: 318896 - RNA, 32 nt, Human
agcucauccucaacguccugugccucuggaag

SEQ ID NO: 318897 - RNA, 32 nt, Human
agcucauccucccgggaacgucuccaccagcu

SEQ ID NO: 318898 - RNA, 32 nt, Human
agcucaucuccucccuggauucuggauuagga

SEQ ID NO: 318899 - RNA, 32 nt, Human
agcucaugacuguaaucccagcacuuugggag

SEQ ID NO: 318900 - RNA, 32 nt, Human
agcucaugagacaaauacugauuuaauauuuu

SEQ ID NO: 318901 - RNA, 32 nt, Human
agcucaugagggugguuccuaauccaguguga

SEQ ID NO: 318902 - RNA, 32 nt, Human
agcucaugccgguaaucucagcacuuugggag

SEQ ID NO: 318903 - RNA, 32 nt, Human
agcucaugccuauaaucccaggacuuugggaa

SEQ ID NO: 318904 - RNA, 32 nt, Human
agcucaugccuguaacccuggcacuuaagggg

SEQ ID NO: 318905 - RNA, 32 nt, Human
agcucaugccuguaaucccaauacuuugggag

SEQ ID NO: 318906 - RNA, 32 nt, Human
agcucaugccuguaaucccagcacuuugggag

SEQ ID NO: 318907 - RNA, 32 nt, Human
agcucaugccuguaauccuagcacuuuggaag

SEQ ID NO: 318908 - RNA, 32 nt, Human
agcucaugccuguaaucuccagcacuuuggga

SEQ ID NO: 318909 - RNA, 32 nt, Human
agcucaugccuguagucccagcuacuccagag

SEQ ID NO: 318910 - RNA, 32 nt, Human
agcucaugcgacugcacuccagccugggugac

SEQ ID NO: 318911 - RNA, 32 nt, Human
agcucaugcuuacaaccuguguggaaguauau

SEQ ID NO: 318912 - RNA, 32 nt, Human
agcucauggcaccuuaguccucagccugauga

SEQ ID NO: 318913 - RNA, 32 nt, Human
agcucauggcccugucauguuugggaaaugac

SEQ ID NO: 318914 - RNA, 32 nt, Human
agcucaugggcaacaucacuggggcccagaga

SEQ ID NO: 318915 - RNA, 32 nt, Human
agcucaugggggccuguguucuggguguucag

SEQ ID NO: 318916 - RNA, 30 nt, Human
agcucaugucuguaaucccagcacuuuggg

SEQ ID NO: 318917 - RNA, 32 nt, Human
agcucauuauaggacacggaacucccugggua

SEQ ID NO: 318918 - RNA, 32 nt, Human
agcucauuaugaaaaacaucccaaacuuuaaa

SEQ ID NO: 318919 - RNA, 32 nt, Human
agcucauuccagccuguaccuuggaugagggg

SEQ ID NO: 318920 - RNA, 32 nt, Human
agcucauuccccgagcacuccagccuggcagu

SEQ ID NO: 318921 - RNA, 32 nt, Human
agcucauucccuuuuggcuuuuuccuuguuug

SEQ ID NO: 318922 - RNA, 32 nt, Human
agcucauuccucacgucggccauuccaggccc

SEQ ID NO: 318923 - RNA, 32 nt, Human
agcucauuccucugaccugccaggaagcagag

SEQ ID NO: 318924 - RNA, 32 nt, Human
agcucauucuccuuguguuacuaaguuuuuau

SEQ ID NO: 318925 - RNA, 32 nt, Human
agcucauucuugugacuuacagugccaacauu

SEQ ID NO: 318926 - RNA, 32 nt, Human
agcucauugaagccucgcacuccugggcucaa

SEQ ID NO: 318927 - RNA, 32 nt, Human
agcucauugcaaccucugccuaacggguucaa

SEQ ID NO: 318928 - RNA, 32 nt, Human
agcucauugcaaccucugucucccagguucaa

SEQ ID NO: 318929 - RNA, 32 nt, Human
agcucauugcaacuuccaccuccuggguugaa

SEQ ID NO: 318930 - RNA, 32 nt, Human
agcucauugcagccucaaacuccugggcucaa

SEQ ID NO: 318931 - RNA, 23 nt, Human
agcucauugcagccucaaccucc

SEQ ID NO: 318932 - RNA, 32 nt, Human
agcucauugcagccucaaccucccaggcucaa

SEQ ID NO: 318933 - RNA, 32 nt, Human
agcucauugcagccuccacuuccugggcucaa

SEQ ID NO: 318934 - RNA, 32 nt, Human
agcucauugcagccuccgccaccuggguucaa

SEQ ID NO: 318935 - RNA, 32 nt, Human
agcucauugcagccuucaauuccugggcucag

SEQ ID NO: 318936 - RNA, 32 nt, Human
agcucauugcagcuuugaccuccugggcuuag

SEQ ID NO: 318937 - RNA, 32 nt, Human
agcucauuguaaccuccaucuccugugcucaa

SEQ ID NO: 318938 - RNA, 32 nt, Human
agcucauuuccucaaauucuguccucagugga

SEQ ID NO: 318939 - RNA, 32 nt, Human
agcucauuucugcuugaccuuuccuuguugcc

SEQ ID NO: 318940 - RNA, 32 nt, Human
agcucauuugccuggccggcaaguuuugcaaa

SEQ ID NO: 318941 - RNA, 20 nt, Human
agcuccaaaaauauacuuca

SEQ ID NO: 318942 - RNA, 32 nt, Human
agcuccaaaagccacugaugacaagggcccca

SEQ ID NO: 318943 - RNA, 32 nt, Human
agcuccaaaccuggaaccuccugaucaguuug

SEQ ID NO: 318944 - RNA, 32 nt, Human
agcuccaaccaccacagccagaacgcaccugg

SEQ ID NO: 318945 - RNA, 32 nt, Human
agcuccaacccccaacuucccccagacuuuag

SEQ ID NO: 318946 - RNA, 19 nt, Human
agcuccaaccuggaggcug

SEQ ID NO: 318947 - RNA, 24 nt, Human
agcuccaacugaggaccucuccaa

SEQ ID NO: 318948 - RNA, 31 nt, Human
agcuccaagagagucaguguagcugaaacuu

SEQ ID NO: 318949 - RNA, 24 nt, Human
agcuccaagauauaagcccuccaa

SEQ ID NO: 318950 - RNA, 32 nt, Human
agcuccaagcccuucaggaguuccaagggaac

SEQ ID NO: 318951 - RNA, 32 nt, Human
agcuccaagggugcuaccaggggaagauggga

SEQ ID NO: 318952 - RNA, 32 nt, Human
agcuccaaguauuccuccucaaggcaccagug

SEQ ID NO: 318953 - RNA, 32 nt, Human
agcuccaaugagguaaccagcaucccccucca

SEQ ID NO: 318954 - RNA, 32 nt, Human
agcuccacaaccaccuccagccugggagauag

SEQ ID NO: 318955 - RNA, 32 nt, Human
agcuccacaccugucaggauucuguuacuucu

SEQ ID NO: 318956 - RNA, 32 nt, Human
agcuccacacuaucucuuagcugaguuuuugc

SEQ ID NO: 318957 - RNA, 32 nt, Human
agcuccacagccuuucccuauaccucacccua

SEQ ID NO: 318958 - RNA, 32 nt, Human
agcuccacaggccugcacucggagucuggggc

SEQ ID NO: 318959 - RNA, 32 nt, Human
agcuccaccacugagcacccgugugacucuuu

SEQ ID NO: 318960 - RNA, 32 nt, Human
agcuccaccucccagguucacaccauucuccc

SEQ ID NO: 318961 - RNA, 32 nt, Human
agcuccaccucccagguucacaccauucucuu

SEQ ID NO: 318962 - RNA, 32 nt, Human
agcuccaccucccagguucacgccauucuccu

SEQ ID NO: 318963 - RNA, 32 nt, Human
agcuccaccucccagguucaugccauucuccu

SEQ ID NO: 318964 - RNA, 32 nt, Human
agcuccaccuccuggguucaagcgauucucuu

SEQ ID NO: 318965 - RNA, 32 nt, Human
agcuccaccugacauugcaggauccaugggga

SEQ ID NO: 318966 - RNA, 32 nt, Human
agcuccaccugcccucuccugcugcuuccucu

SEQ ID NO: 318967 - RNA, 32 nt, Human
agcuccaccugcugccccagugcuggauccac

SEQ ID NO: 318968 - RNA, 32 nt, Human
agcuccacucaucugcggcaucugucaucauc

SEQ ID NO: 318969 - RNA, 32 nt, Human
agcuccacuccuuggcuggaggcagugcugag

SEQ ID NO: 318970 - RNA, 18 nt, Human
agcuccacucuccugccc

SEQ ID NO: 318971 - RNA, 32 nt, Human
agcuccacugucacccuccaccucuucacccc

SEQ ID NO: 318972 - RNA, 32 nt, Human
agcuccacuguggccacgagaccucagaaggc

SEQ ID NO: 318973 - RNA, 21 nt, Human
agcuccagagaaaagauucaa

SEQ ID NO: 318974 - RNA, 32 nt, Human
agcuccagaguaugaugaccccagccccaucc

SEQ ID NO: 318975 - RNA, 32 nt, Human
agcuccagaguccuugguuucugucugagaac

SEQ ID NO: 318976 - RNA, 18 nt, Human
agcuccagcagcuggacg

SEQ ID NO: 318977 - RNA, 32 nt, Human
agcuccagcccagccuucuacuuugugucccu

SEQ ID NO: 318978 - RNA, 32 nt, Human
agcuccagcccgcugaaaacagacuggaccca

SEQ ID NO: 318979 - RNA, 28 nt, Human
agcuccagccucccgguggccucugcag

SEQ ID NO: 318980 - RNA, 32 nt, Human
agcuccagcuacucaggaggcugaggcgggag

SEQ ID NO: 318981 - RNA, 21 nt, Human
agcuccagcuccagcccgggc

SEQ ID NO: 318982 - RNA, 32 nt, Human
agcuccaggacugagagccccaggaagcuugg

SEQ ID NO: 318983 - RNA, 32 nt, Human
agcuccaggauguggaggaaggaagaugagaa

SEQ ID NO: 318984 - RNA, 21 nt, Human
agcuccaggccucccuuccag

SEQ ID NO: 318985 - RNA, 32 nt, Human
agcuccaggccucccuuccagucagaacaguu

SEQ ID NO: 318986 - RNA, 32 nt, Human
agcuccaggcuggagccagugaagggugcacc

SEQ ID NO: 318987 - RNA, 32 nt, Human
agcuccagggagcagagugucggggauggagg

SEQ ID NO: 318988 - RNA, 32 nt, Human
agcuccaggggauuccaccaccucggacgccu

SEQ ID NO: 318989 - RNA, 32 nt, Human
agcuccaggugcucaguguggugaccugcuca

SEQ ID NO: 318990 - RNA, 32 nt, Human
agcuccagucucccucauuugagcaauacucu

SEQ ID NO: 318991 - RNA, 32 nt, Human
agcuccaguuaaggauucggauucaagacuau

SEQ ID NO: 318992 - RNA, 32 nt, Human
agcuccaucaagaggaauugugucuaagagga

SEQ ID NO: 318993 - RNA, 32 nt, Human
agcuccaucauuuaccaacugugugaccuuac

SEQ ID NO: 318994 - RNA, 24 nt, Human
agcuccaucccacaacggccucaa

SEQ ID NO: 318995 - RNA, 32 nt, Human
agcuccaucccccacaguccaucuccauucgg

SEQ ID NO: 318996 - RNA, 32 nt, Human
agcuccaucucccagguucacgccauucuccc

SEQ ID NO: 318997 - RNA, 32 nt, Human
agcuccaugcaaccucugccuccuggguucaa

SEQ ID NO: 318998 - RNA, 32 nt, Human
agcuccaugccagagcaggagccccggucaau

SEQ ID NO: 318999 - RNA, 32 nt, Human
agcuccaugcuccagggcuuugcuccagaaca

SEQ ID NO: 319000 - RNA, 32 nt, Human
agcuccauggcuuagcggaggaggcggcagug

SEQ ID NO: 319001 - RNA, 32 nt, Human
agcuccauggugagcacucacagucuaaggcu

SEQ ID NO: 319002 - RNA, 32 nt, Human
agcuccauguuccuccuccucucuccccacuu

SEQ ID NO: 319003 - RNA, 23 nt, Human
agcuccauuccgcucccacccca

SEQ ID NO: 319004 - RNA, 32 nt, Human
agcuccauucuggccuccuccaccaccugccu

SEQ ID NO: 319005 - RNA, 32 nt, Human
agcucccaaaggacuggguucagagagcuucu

SEQ ID NO: 319006 - RNA, 32 nt, Human
agcucccaacccagccugauguuagcccagaa

SEQ ID NO: 319007 - RNA, 32 nt, Human
agcucccaccacugcacuccagccugggcgac

SEQ ID NO: 319008 - RNA, 32 nt, Human
agcucccaccauuuucuuuugaugugguuuua

SEQ ID NO: 319009 - RNA, 32 nt, Human
agcucccacccugcccuggccuggguggagga

SEQ ID NO: 319010 - RNA, 32 nt, Human
agcucccaccuacagacccagggagagaucug

SEQ ID NO: 319011 - RNA, 32 nt, Human
agcucccacgauccugaaauucuguuaacgaa

SEQ ID NO: 319012 - RNA, 32 nt, Human
agcucccacugcagaagggccucuugagugcg

SEQ ID NO: 319013 - RNA, 32 nt, Human
agcucccacugcaguaccaccauacggggccc

SEQ ID NO: 319014 - RNA, 32 nt, Human
agcucccagaaaccaccuuccuucauguggag

SEQ ID NO: 319015 - RNA, 19 nt, Human
agcucccagccuuccaugg

SEQ ID NO: 319016 - RNA, 19 nt, Human
agcucccagccuuuucagg

SEQ ID NO: 319017 - RNA, 32 nt, Human
agcucccaggacgcagggagacccugggagag

SEQ ID NO: 319018 - RNA, 32 nt, Human
agcucccaggaugaacugguugcaguggcugc

SEQ ID NO: 319019 - RNA, 23 nt, Human
agcucccaggccaacgcccaaag

SEQ ID NO: 319020 - RNA, 32 nt, Human
agcucccaggggacagagguguagcuccaauc

SEQ ID NO: 319021 - RNA, 21 nt, Human
agcucccagguauuuucuaca

SEQ ID NO: 319022 - RNA, 32 nt, Human
agcucccaguccagagagaagccagacaauua

SEQ ID NO: 319023 - RNA, 32 nt, Human
agcucccaucccuccuuccucuccuucuccaa

SEQ ID NO: 319024 - RNA, 32 nt, Human
agcucccaucccucgggaugcccaggagaggc

SEQ ID NO: 319025 - RNA, 32 nt, Human
agcucccaugagcaugcauaguucaccagacc

SEQ ID NO: 319026 - RNA, 32 nt, Human
agcuccccaagccugugcgccucguccucagc

SEQ ID NO: 319027 - RNA, 32 nt, Human
agcuccccaagcucccugccuauucccccacc

SEQ ID NO: 319028 - RNA, 32 nt, Human
agcuccccaaguagcugggacuagaggcaugc

SEQ ID NO: 319029 - RNA, 28 nt, Human
agcuccccaagugauucuacguucccca

SEQ ID NO: 319030 - RNA, 32 nt, Human
agcuccccacacagcgcugggccagagaggca

SEQ ID NO: 319031 - RNA, 32 nt, Human
agcuccccacacugcaccaugagcucaguugg

SEQ ID NO: 319032 - RNA, 20 nt, Human
agcuccccacauccccugca

SEQ ID NO: 319033 - RNA, 29 nt, Human
agcuccccacgucgucgccgccgccgccg

SEQ ID NO: 319034 - RNA, 32 nt, Human
agcuccccagaacacugcucgacauggaaacc

SEQ ID NO: 319035 - RNA, 21 nt, Human
agcuccccagacuggaggcug

SEQ ID NO: 319036 - RNA, 32 nt, Human
agcuccccagaggcggugguccccgugcuugu

SEQ ID NO: 319037 - RNA, 32 nt, Human
agcuccccaggaaaucccaugacaaacuggcc

SEQ ID NO: 319038 - RNA, 32 nt, Human
agcuccccaggaguucagugcagguguuucua

SEQ ID NO: 319039 - RNA, 32 nt, Human
agcuccccaguguucagccuccuucacucccu

SEQ ID NO: 319040 - RNA, 32 nt, Human
agcuccccaucuucccuagaggcugccugcgc

SEQ ID NO: 319041 - RNA, 32 nt, Human
agcuccccauuuccuuucucaccuccuccucc

SEQ ID NO: 319042 - RNA, 32 nt, Human
agcucccccagccuccugcagaguugccugca

SEQ ID NO: 319043 - RNA, 32 nt, Human
agcucccccgcggccuggaguggugcgccccg

SEQ ID NO: 319044 - RNA, 32 nt, Human
agcucccccucccuccccuugccugugccagg

SEQ ID NO: 319045 - RNA, 32 nt, Human
agcucccccuuccucucggucucccucucggc

SEQ ID NO: 319046 - RNA, 32 nt, Human
agcuccccgccuggccuggcccuccccaggcg

SEQ ID NO: 319047 - RNA, 25 nt, Human
agcuccccuccccacccuccucuuc

SEQ ID NO: 319048 - RNA, 32 nt, Human
agcuccccuccccaguccacagagccaucucc

SEQ ID NO: 319049 - RNA, 32 nt, Human
agcuccccuccucuccccuccacugucuucuu

SEQ ID NO: 319050 - RNA, 32 nt, Human
agcuccccugcacccaccagggagcuugagca

SEQ ID NO: 319051 - RNA, 32 nt, Human
agcuccccugccacccagccucugaggccggc

SEQ ID NO: 319052 - RNA, 32 nt, Human
agcuccccugucggccagcuaagagagcuggg

SEQ ID NO: 319053 - RNA, 32 nt, Human
agcuccccuguggucuucaggaaagguuuuga

SEQ ID NO: 319054 - RNA, 32 nt, Human
agcuccccuucccagguucaagcaauucuccu

SEQ ID NO: 319055 - RNA, 32 nt, Human
agcucccgagcacagccgcacuccuguugacc

SEQ ID NO: 319056 - RNA, 22 nt, Human
agcucccgccagccgcucccca

SEQ ID NO: 319057 - RNA, 19 nt, Human
agcucccgcccccugcgcc

SEQ ID NO: 319058 - RNA, 22 nt, Human
agcucccgccccucgcccccca

SEQ ID NO: 319059 - RNA, 19 nt, Human
agcucccgcccugccugcc

SEQ ID NO: 319060 - RNA, 19 nt, Human
agcucccgccugcauguca

SEQ ID NO: 319061 - RNA, 20 nt, Human
agcucccgccugggucgcca

SEQ ID NO: 319062 - RNA, 18 nt, Human
agcucccggccgggcuga

SEQ ID NO: 319063 - RNA, 32 nt, Human
agcucccgggccugccaugagcucuccgccgc

SEQ ID NO: 319064 - RNA, 32 nt, Human
agcucccgucuguguccccuuccaaaucucau

SEQ ID NO: 319065 - RNA, 28 nt, Human
agcucccgugcaucugccucaucucucc

SEQ ID NO: 319066 - RNA, 32 nt, Human
agcucccuaguggcuuccuccgucugcaaugu

SEQ ID NO: 319067 - RNA, 32 nt, Human
agcucccucugaguugcgcugggcuuggcugc

SEQ ID NO: 319068 - RNA, 32 nt, Human
agcucccucuguccucugucagccuggccuga

SEQ ID NO: 319069 - RNA, 32 nt, Human
agcucccugagaagcugggaccacaggccugg

SEQ ID NO: 319070 - RNA, 32 nt, Human
agcucccugauuacaccugccaccuuggaauc

SEQ ID NO: 319071 - RNA, 32 nt, Human
agcucccugauucaaagaaauauuucucaugu

SEQ ID NO: 319072 - RNA, 24 nt, Human
agcucccugcaaccuccaccuccu

SEQ ID NO: 319073 - RNA, 32 nt, Human
agcucccugcaaccuccaccuccuggguucaa

SEQ ID NO: 319074 - RNA, 32 nt, Human
agcucccugcaaccuccgccucccggguucau

SEQ ID NO: 319075 - RNA, 32 nt, Human
agcucccugcaaccuccgccuccuggguucaa

SEQ ID NO: 319076 - RNA, 32 nt, Human
agcucccugcaagccccucagguugggccuug

SEQ ID NO: 319077 - RNA, 32 nt, Human
agcucccugcaaggaggguuuuccugcggugg

SEQ ID NO: 319078 - RNA, 18 nt, Human
agcucccugcgggcacag

SEQ ID NO: 319079 - RNA, 32 nt, Human
agcucccugcuuggcucugucucuccacaccc

SEQ ID NO: 319080 - RNA, 22 nt, Human
agcucccuggaagcccagaggc

SEQ ID NO: 319081 - RNA, 32 nt, Human
agcucccuggcaggcaggcugugggcuggugg

SEQ ID NO: 319082 - RNA, 32 nt, Human
agcucccuggcuccaggcagugcuugcucccc

SEQ ID NO: 319083 - RNA, 19 nt, Human
agcucccuggcuucuggcu

SEQ ID NO: 319084 - RNA, 23 nt, Human
agcucccuguaaccucaaacucc

SEQ ID NO: 319085 - RNA, 32 nt, Human
agcucccuguaaccucaaacucccaggcucaa

SEQ ID NO: 319086 - RNA, 20 nt, Human
agcucccuguggccuggaga

SEQ ID NO: 319087 - RNA, 32 nt, Human
agcucccuguucuuggaucugccauggaggga

SEQ ID NO: 319088 - RNA, 32 nt, Human
agcucccuuccgaggcugcagggccaggcgcg

SEQ ID NO: 319089 - RNA, 32 nt, Human
agcucccuugucauucugacuccugggcuuac

SEQ ID NO: 319090 - RNA, 32 nt, Human
agcucccuuuaaccuccagcuccuggguucaa

SEQ ID NO: 319091 - RNA, 32 nt, Human
agcucccuuuguggggaacuugcccucuucug

SEQ ID NO: 319092 - RNA, 32 nt, Human
agcuccgaaagggagagcagagauggcagcug

SEQ ID NO: 319093 - RNA, 31 nt, Human
agcuccgaacaaugguucucauuuggcuaag

SEQ ID NO: 319094 - RNA, 32 nt, Human
agcuccgagacaccugaagagcccuccagccc

SEQ ID NO: 319095 - RNA, 32 nt, Human
agcuccgagggcaggugcacauagccaaccaa

SEQ ID NO: 319096 - RNA, 32 nt, Human
agcuccgauuacaggcacccaccaccacgucc

SEQ ID NO: 319097 - RNA, 32 nt, Human
agcuccgccaucuggguucaagcgauucuccu

SEQ ID NO: 319098 - RNA, 22 nt, Human
agcuccgcccgagaccccggca

SEQ ID NO: 319099 - RNA, 22 nt, Human
agcuccgccgggcguccuggca

SEQ ID NO: 319100 - RNA, 32 nt, Human
agcuccgccucccagauucacgccauucuccu

SEQ ID NO: 319101 - RNA, 32 nt, Human
agcuccgccucccagguucacaccauucuccu

SEQ ID NO: 319102 - RNA, 32 nt, Human
agcuccgccucccagguucacgccauucuccc

SEQ ID NO: 319103 - RNA, 32 nt, Human
agcuccgccucccagguucacgccauucuccu

SEQ ID NO: 319104 - RNA, 32 nt, Human
agcuccgccucccagguucaugccauucuccu

SEQ ID NO: 319105 - RNA, 32 nt, Human
agcuccgccucccagguucccgccauucuccu

SEQ ID NO: 319106 - RNA, 32 nt, Human
agcuccgccucccgaguucaagcaauucuccu

SEQ ID NO: 319107 - RNA, 32 nt, Human
agcuccgccuccuggguucaagcgauucuccu

SEQ ID NO: 319108 - RNA, 32 nt, Human
agcuccgccuccuggguucacgucauuuuccu

SEQ ID NO: 319109 - RNA, 32 nt, Human
agcuccgccuccuggguucacgugauucucau

SEQ ID NO: 319110 - RNA, 22 nt, Human
agcuccgcgagcugcccgagca

SEQ ID NO: 319111 - RNA, 32 nt, Human
agcuccgcguagcaccugcccaaccaaacuca

SEQ ID NO: 319112 - RNA, 23 nt, Human
agcuccgcugccggcccuggaca

SEQ ID NO: 319113 - RNA, 24 nt, Human
agcuccgcugcggaaaacccgagc

SEQ ID NO: 319114 - RNA, 32 nt, Human
agcuccggaaggcagguggguaauggaugaug

SEQ ID NO: 319115 - RNA, 32 nt, Human
agcuccggcagggaggaugauacagucagaca

SEQ ID NO: 319116 - RNA, 17 nt, Human
agcuccggccgcugccc

SEQ ID NO: 319117 - RNA, 32 nt, Human
agcuccggcugaagcaagaaguccuccagcug

SEQ ID NO: 319118 - RNA, 32 nt, Human
agcuccgggaggcugcaguggcggcagcugag

SEQ ID NO: 319119 - RNA, 32 nt, Human
agcuccgggccugcucgcuaggcccgggaggc

SEQ ID NO: 319120 - RNA, 32 nt, Human
agcuccgucagcccugacucggcccggagcug

SEQ ID NO: 319121 - RNA, 32 nt, Human
agcuccgucggucuuucucuucucuuuuaaga

SEQ ID NO: 319122 - RNA, 32 nt, Human
agcuccgugacccaggcuggaaugcaauggcu

SEQ ID NO: 319123 - RNA, 32 nt, Human
agcuccgugcgcgggcugcagaugucugaccu

SEQ ID NO: 319124 - RNA, 32 nt, Human
agcuccguggguggcaggacugaacuugaaca

SEQ ID NO: 319125 - RNA, 32 nt, Human
agcuccuaaaaaugguagaauacacaugaaaa

SEQ ID NO: 319126 - RNA, 32 nt, Human
agcuccuaagaccugaaaacucuucucaagaa

SEQ ID NO: 319127 - RNA, 32 nt, Human
agcuccuacagcuaccuggccugagaagccaa

SEQ ID NO: 319128 - RNA, 32 nt, Human
agcuccuacccacuccccuugaggacugcugc

SEQ ID NO: 319129 - RNA, 32 nt, Human
agcuccuacucugucuaaagagggccacagug

SEQ ID NO: 319130 - RNA, 32 nt, Human
agcuccuaggccuggacugagcucucaggggg

SEQ ID NO: 319131 - RNA, 32 nt, Human
agcuccuaggucucagagaacucccccaccug

SEQ ID NO: 319132 - RNA, 32 nt, Human
agcuccuagguuucccugucuacgccucccga

SEQ ID NO: 319133 - RNA, 32 nt, Human
agcuccuaucucagaaaacaaaaacaacaaaa

SEQ ID NO: 319134 - RNA, 32 nt, Human
agcuccuauuacugcuggguuuuggaggcugc

SEQ ID NO: 319135 - RNA, 32 nt, Human
agcuccucacacuuauggcuauuucugacgua

SEQ ID NO: 319136 - RNA, 32 nt, Human
agcuccucacugcuacagccuagaaggugaga

SEQ ID NO: 319137 - RNA, 32 nt, Human
agcuccucagccccaaagagcagagagagggg

SEQ ID NO: 319138 - RNA, 22 nt, Human
agcuccucagugcuucuuacca

SEQ ID NO: 319139 - RNA, 32 nt, Human
agcuccucaguuacccaggcugcaggccccgg

SEQ ID NO: 319140 - RNA, 32 nt, Human
agcuccucaugcuugaggcuguggugaugcac

SEQ ID NO: 319141 - RNA, 32 nt, Human
agcuccucauuuccucccccaucagccccugg

SEQ ID NO: 319142 - RNA, 32 nt, Human
agcuccuccaaagccuguucaagcucuaagcg

SEQ ID NO: 319143 - RNA, 18 nt, Human
agcuccucccacccaaau

SEQ ID NO: 319144 - RNA, 32 nt, Human
agcuccucccuuucuuucuuuuuccaccugag

SEQ ID NO: 319145 - RNA, 32 nt, Human
agcuccucgaguagcugggaccacacagacag

SEQ ID NO: 319146 - RNA, 32 nt, Human
agcuccucgaugucagcuuuuugugcuggacu

SEQ ID NO: 319147 - RNA, 32 nt, Human
agcuccucgggaggcaggagaaucgcuugaac

SEQ ID NO: 319148 - RNA, 32 nt, Human
agcuccucuaaccccuguucugaugggggagg

SEQ ID NO: 319149 - RNA, 32 nt, Human
agcuccucucgcacccagaggagcuccuuucc

SEQ ID NO: 319150 - RNA, 32 nt, Human
agcuccucugcagcuuccuccucagccucccu

SEQ ID NO: 319151 - RNA, 32 nt, Human
agcuccucugcaugugggugcaauggcgucuu

SEQ ID NO: 319152 - RNA, 32 nt, Human
agcuccucugccauauaaacaaaaagaggaaa

SEQ ID NO: 319153 - RNA, 32 nt, Human
agcuccucugggcucuggccucaggcccacua

SEQ ID NO: 319154 - RNA, 32 nt, Human
agcuccugacauaccugguaaaaguucucaag

SEQ ID NO: 319155 - RNA, 23 nt, Human
agcuccugaccucagaugaucua

SEQ ID NO: 319156 - RNA, 19 nt, Human
agcuccugaccucggguga

SEQ ID NO: 319157 - RNA, 23 nt, Human
agcuccugaccucgggugaucca

SEQ ID NO: 319158 - RNA, 23 nt, Human
agcuccugagagccucugccaca

SEQ ID NO: 319159 - RNA, 31 nt, Human
agcuccugaguagcugggccugugcacuggg

SEQ ID NO: 319160 - RNA, 32 nt, Human
agcuccugcaccucauccuccacccaccagag

SEQ ID NO: 319161 - RNA, 23 nt, Human
agcuccugcagccgccgccgcug

SEQ ID NO: 319162 - RNA, 21 nt, Human
agcuccugccuccaagugcug

SEQ ID NO: 319163 - RNA, 32 nt, Human
agcuccugccucccagccuucucuccaggccc

SEQ ID NO: 319164 - RNA, 18 nt, Human
agcuccugccuccugccc

SEQ ID NO: 319165 - RNA, 32 nt, Human
agcuccugccuccugguggccucugaagaccc

SEQ ID NO: 319166 - RNA, 31 nt, Human
agcuccugccucuaauggccugguuaggcuc

SEQ ID NO: 319167 - RNA, 32 nt, Human
agcuccugccuggauucccagcacuuugggag

SEQ ID NO: 319168 - RNA, 24 nt, Human
agcuccugccuguacccucccaua

SEQ ID NO: 319169 - RNA, 32 nt, Human
agcuccugccuucucuaugcagccugcccucc

SEQ ID NO: 319170 - RNA, 32 nt, Human
agcuccugccuugccagccugcucuccauugc

SEQ ID NO: 319171 - RNA, 32 nt, Human
agcuccugcugacuccccuuauggaucucagu

SEQ ID NO: 319172 - RNA, 32 nt, Human
agcuccugcugggcuccagccagaguagucac

SEQ ID NO: 319173 - RNA, 23 nt, Human
agcuccuggaccggcccuuccca

SEQ ID NO: 319174 - RNA, 32 nt, Human
agcuccuggacucaccugaggcucccuggggg

SEQ ID NO: 319175 - RNA, 29 nt, Human
agcuccuggcagcuuucauccccagcagc

SEQ ID NO: 319176 - RNA, 32 nt, Human
agcuccuggcaugggggugcucugucuucgcc

SEQ ID NO: 319177 - RNA, 32 nt, Human
agcuccuggccagcugauucaggucauccggg

SEQ ID NO: 319178 - RNA, 32 nt, Human
agcuccuggccaggcugcugccaaggucaagc

SEQ ID NO: 319179 - RNA, 19 nt, Human
agcuccuggcccccgagga

SEQ ID NO: 319180 - RNA, 32 nt, Human
agcuccugggaaugagauuaaaggaggcaggg

SEQ ID NO: 319181 - RNA, 22 nt, Human
agcuccugggccggcccucaca

SEQ ID NO: 319182 - RNA, 21 nt, Human
agcuccugggcgaaucccaca

SEQ ID NO: 319183 - RNA, 32 nt, Human
agcuccuggguuucagcaauucuccugccuca

SEQ ID NO: 319184 - RNA, 32 nt, Human
agcuccuggucaggaagccaaucugaaaacag

SEQ ID NO: 319185 - RNA, 32 nt, Human
agcuccuggucugguggguagagccagagcug

SEQ ID NO: 319186 - RNA, 32 nt, Human
agcuccuguauccuucucauccuugucucucc

SEQ ID NO: 319187 - RNA, 21 nt, Human
agcuccuguccaugccugcca

SEQ ID NO: 319188 - RNA, 32 nt, Human
agcuccuguggaauguuugguugcucugaagu

SEQ ID NO: 319189 - RNA, 32 nt, Human
agcuccuguuuggaaauggggagcuggccuag

SEQ ID NO: 319190 - RNA, 32 nt, Human
agcuccuuccaccagaaggcacugccugcagg

SEQ ID NO: 319191 - RNA, 32 nt, Human
agcuccuucccaggaccccucagcuccccggc

SEQ ID NO: 319192 - RNA, 32 nt, Human
agcuccuucccccucgcaaugcacugaaaggc

SEQ ID NO: 319193 - RNA, 32 nt, Human
agcuccuucccuuccugugaguucuccaguua

SEQ ID NO: 319194 - RNA, 32 nt, Human
agcuccuuccuccuccuccuccuccucuggua

SEQ ID NO: 319195 - RNA, 32 nt, Human
agcuccuuccuugcuccacuuuccccagagua

SEQ ID NO: 319196 - RNA, 32 nt, Human
agcuccuucugggaccagagggugggacggcc

SEQ ID NO: 319197 - RNA, 32 nt, Human
agcuccuugaaggcagggagaaaagacagacu

SEQ ID NO: 319198 - RNA, 19 nt, Human
agcuccuugaccucugagg

SEQ ID NO: 319199 - RNA, 22 nt, Human
agcuccuugcugcucuucaaca

SEQ ID NO: 319200 - RNA, 32 nt, Human
agcuccuuuacuugcugcuccaacugcagugc

SEQ ID NO: 319201 - RNA, 32 nt, Human
agcuccuuucaugcuccauuuuuaaccacuug

SEQ ID NO: 319202 - RNA, 32 nt, Human
agcuccuuucucuuggcugagugacagguggc

SEQ ID NO: 319203 - RNA, 32 nt, Human
agcuccuuucuucucccacaucugcccacuga

SEQ ID NO: 319204 - RNA, 32 nt, Human
agcuccuuucuuuuccucuggucuuuguggga

SEQ ID NO: 319205 - RNA, 32 nt, Human
agcuccuuuggugugugggugcucugaccuca

SEQ ID NO: 319206 - RNA, 32 nt, Human
agcucgaaggagauggaucuguuucucaggac

SEQ ID NO: 319207 - RNA, 32 nt, Human
agcucgaaggggccauaugacacuccucccgg

SEQ ID NO: 319208 - RNA, 19 nt, Human
agcucgagaguaugugcug

SEQ ID NO: 319209 - RNA, 32 nt, Human
agcucgagccugugaccaccugugcuguggag

SEQ ID NO: 319210 - RNA, 32 nt, Human
agcucgaggcugucuucaccagcugggcuggg

SEQ ID NO: 319211 - RNA, 32 nt, Human
agcucgaugucaggcaucagaugcugaagacu

SEQ ID NO: 319212 - RNA, 32 nt, Human
agcucgcacucuuugucuucuggucacuccuc

SEQ ID NO: 319213 - RNA, 32 nt, Human
agcucgcagugagccgagaucacgccacugca

SEQ ID NO: 319214 - RNA, 32 nt, Human
agcucgccagagagucuauguaugggauugaa

SEQ ID NO: 319215 - RNA, 32 nt, Human
agcucgccccugagccugaggagaccugggua

SEQ ID NO: 319216 - RNA, 32 nt, Human
agcucgccgcaaccuccgccucccagguucaa

SEQ ID NO: 319217 - RNA, 32 nt, Human
agcucgcgccauugcacuccagccuuggaaca

SEQ ID NO: 319218 - RNA, 32 nt, Human
agcucgcuacaaccucuaccucccagccaccu

SEQ ID NO: 319219 - RNA, 32 nt, Human
agcucgcuccuguaaucccagcacuuugggag

SEQ ID NO: 319220 - RNA, 32 nt, Human
agcucgcucuuuccuuccuuccuaagcuaucc

SEQ ID NO: 319221 - RNA, 23 nt, Human
agcucgcugcaacccccaccucc

SEQ ID NO: 319222 - RNA, 32 nt, Human
agcucgcugcaacccccaccucccagguucaa

SEQ ID NO: 319223 - RNA, 32 nt, Human
agcucgcugcaaccuccaccuccugggcucac

SEQ ID NO: 319224 - RNA, 32 nt, Human
agcucgcugcaaccuccaccuccuggguucaa

SEQ ID NO: 319225 - RNA, 32 nt, Human
agcucgcugcaaccuccaccuuccggguucaa

SEQ ID NO: 319226 - RNA, 32 nt, Human
agcucgcugcaagcuccgccucccaaguucac

SEQ ID NO: 319227 - RNA, 32 nt, Human
agcucgcugcagccuccaccucccggacucca

SEQ ID NO: 319228 - RNA, 32 nt, Human
agcucgcugccuggugcuugucuuggcgagau

SEQ ID NO: 319229 - RNA, 16 nt, Human
agcucgcuucuaacug

SEQ ID NO: 319230 - RNA, 32 nt, Human
agcucgcuucuaacuggacugcacguugguga

SEQ ID NO: 319231 - RNA, 32 nt, Human
agcucggaagauggaggcugcagugagccaug

SEQ ID NO: 319232 - RNA, 32 nt, Human
agcucggacuacaggcacgagccaccaugccc

SEQ ID NO: 319233 - RNA, 32 nt, Human
agcucggagcagagaaggccagagcagagagg

SEQ ID NO: 319234 - RNA, 32 nt, Human
agcucggagcagucccagaagggagggcuguc

SEQ ID NO: 319235 - RNA, 32 nt, Human
agcucggccacggguggcgaggcugcggugag

SEQ ID NO: 319236 - RNA, 32 nt, Human
agcucggccuccuggguucaaaugauucuccu

SEQ ID NO: 319237 - RNA, 32 nt, Human
agcucggcgaccaugcccuccaugcagugcaa

SEQ ID NO: 319238 - RNA, 32 nt, Human
agcucggcggaggcacgccccucgccuccccg

SEQ ID NO: 319239 - RNA, 32 nt, Human
agcucggcucacugcaaccucugccacacggg

SEQ ID NO: 319240 - RNA, 32 nt, Human
agcucgggaggcacagcucacagacacaggaa

SEQ ID NO: 319241 - RNA, 32 nt, Human
agcucggggaugggugccauuugagcccagcu

SEQ ID NO: 319242 - RNA, 32 nt, Human
agcucggggccuugccucuugcagcuacucug

SEQ ID NO: 319243 - RNA, 32 nt, Human
agcucgggugguggagaugacaaggacacugu

SEQ ID NO: 319244 - RNA, 32 nt, Human
agcucggucaccaaggaaugcccaacaucccu

SEQ ID NO: 319245 - RNA, 32 nt, Human
agcucggugacuuuucuuucugccaccauuua

SEQ ID NO: 319246 - RNA, 32 nt, Human
agcucgucggucuccgaggauggagauagcuc

SEQ ID NO: 319247 - RNA, 32 nt, Human
agcucgucucaaacuccuggccucaagugauc

SEQ ID NO: 319248 - RNA, 32 nt, Human
agcucgugccuguaauaccaacauuuugggag

SEQ ID NO: 319249 - RNA, 20 nt, Human
agcucgugccuucucugggg

SEQ ID NO: 319250 - RNA, 32 nt, Human
agcucgugcuuccguuugugcacucuggcugc

SEQ ID NO: 319251 - RNA, 32 nt, Human
agcucguggaaagacgcgcgagagggggccgg

SEQ ID NO: 319252 - RNA, 32 nt, Human
agcucguggagguggugguugaaaggugagaa

SEQ ID NO: 319253 - RNA, 32 nt, Human
agcucguuauacugcauucucuuuaucacaua

SEQ ID NO: 319254 - RNA, 32 nt, Human
agcucguuguuuugaucuauguaggggccguu

SEQ ID NO: 319255 - RNA, 32 nt, Human
agcucguuuuaacugaagugugagaaggaggu

SEQ ID NO: 319256 - RNA, 32 nt, Human
agcucuaacugauucagggccccugaagugac

SEQ ID NO: 319257 - RNA, 32 nt, Human
agcucuaagucucaacugcucuuuuauacugu

SEQ ID NO: 319258 - RNA, 32 nt, Human
agcucuaauggcagcauaaaucaaagaauuuc

SEQ ID NO: 319259 - RNA, 32 nt, Human
agcucuacggccgccucuacuccgagagcuca

SEQ ID NO: 319260 - RNA, 32 nt, Human
agcucuagaaacacuucugaugcaugaaaaau

SEQ ID NO: 319261 - RNA, 32 nt, Human
agcucuagaagcagcuggacuugaacccacaa

SEQ ID NO: 319262 - RNA, 32 nt, Human
agcucuagaggcacccugcaucaugcccacca

SEQ ID NO: 319263 - RNA, 32 nt, Human
agcucuagagugagggguggguggaaccuggg

SEQ ID NO: 319264 - RNA, 32 nt, Human
agcucuagccaccgucccuugaucucucauac

SEQ ID NO: 319265 - RNA, 32 nt, Human
agcucuagcugcaggcugccuggguggccuuc

SEQ ID NO: 319266 - RNA, 32 nt, Human
agcucuagcugcauauuugauguaaaugacaa

SEQ ID NO: 319267 - RNA, 31 nt, Human
agcucuaggaaacuaauacagcugcuaaaau

SEQ ID NO: 319268 - RNA, 23 nt, Human
agcucuauaugcacagcccagca

SEQ ID NO: 319269 - RNA, 32 nt, Human
agcucuaucacccaggcugaagugcaguggua

SEQ ID NO: 319270 - RNA, 32 nt, Human
agcucucaaaucccucuccaacugccuaaggc

SEQ ID NO: 319271 - RNA, 32 nt, Human
agcucucacacaugacuggagagaagugagaa

SEQ ID NO: 319272 - RNA, 32 nt, Human
agcucucacauuuuguuaaauucauguauuua

SEQ ID NO: 319273 - RNA, 32 nt, Human
agcucucacccagagcgucagugaguuggugc

SEQ ID NO: 319274 - RNA, 21 nt, Human
agcucucacccuaacacuaua

SEQ ID NO: 319275 - RNA, 32 nt, Human
agcucucagcuuccacugcuccccuuguuccc

SEQ ID NO: 319276 - RNA, 32 nt, Human
agcucucaguccauugcgacaguugccaugau

SEQ ID NO: 319277 - RNA, 32 nt, Human
agcucucagucccacagcucucaggccccucu

SEQ ID NO: 319278 - RNA, 32 nt, Human
agcucucaucacuccuucacuuggucugucug

SEQ ID NO: 319279 - RNA, 32 nt, Human
agcucucauccagaccacgugcaaccaaugau

SEQ ID NO: 319280 - RNA, 32 nt, Human
agcucucaugagggguaguggaggagacaggc

SEQ ID NO: 319281 - RNA, 32 nt, Human
agcucucaugccaagaccugcgccuaacggca

SEQ ID NO: 319282 - RNA, 32 nt, Human
agcucuccagaagggaugcaagcucuccagaa

SEQ ID NO: 319283 - RNA, 32 nt, Human
agcucuccagaauaugcuuguuggagauccuu

SEQ ID NO: 319284 - RNA, 32 nt, Human
agcucuccagccugggcgacagagugagacuc

SEQ ID NO: 319285 - RNA, 32 nt, Human
agcucuccaucuuuagcccuuuccccugugug

SEQ ID NO: 319286 - RNA, 21 nt, Human
agcucuccauuugccaugauu

SEQ ID NO: 319287 - RNA, 32 nt, Human
agcucucccaauguuucuccucuccuucccau

SEQ ID NO: 319288 - RNA, 32 nt, Human
agcucucccagaugugugcccaccccaccacu

SEQ ID NO: 319289 - RNA, 32 nt, Human
agcucuccccaccuucccaguguggaaguaga

SEQ ID NO: 319290 - RNA, 32 nt, Human
agcucuccccagccccguggguggugacuuug

SEQ ID NO: 319291 - RNA, 26 nt, Human
agcucucccgcugggggcacugcggg

SEQ ID NO: 319292 - RNA, 32 nt, Human
agcucucccuagccugccucucuagguuuuuc

SEQ ID NO: 319293 - RNA, 32 nt, Human
agcucucccucuggcccugcuucuucggggaa

SEQ ID NO: 319294 - RNA, 32 nt, Human
agcucucccugcuguuguaugugugcauucac

SEQ ID NO: 319295 - RNA, 32 nt, Human
agcucucccuggcagagaaagacacuuccccc

SEQ ID NO: 319296 - RNA, 32 nt, Human
agcucuccucagagagccaggucuaaugccca

SEQ ID NO: 319297 - RNA, 32 nt, Human
agcucuccuuuccuugcugaggugcucucgga

SEQ ID NO: 319298 - RNA, 32 nt, Human
agcucuccuuucucaucuccuguuucagaugc

SEQ ID NO: 319299 - RNA, 32 nt, Human
agcucucgacuuagagguaauaugaacagaug

SEQ ID NO: 319300 - RNA, 32 nt, Human
agcucucgccuguaaucccagcacuuugggag

SEQ ID NO: 319301 - RNA, 32 nt, Human
agcucucgucugacaagugcuuuugcuuucuu

SEQ ID NO: 319302 - RNA, 32 nt, Human
agcucucuacaucacgguaaucaugccuaugc

SEQ ID NO: 319303 - RNA, 24 nt, Human
agcucucucagacccuugaagaug

SEQ ID NO: 319304 - RNA, 32 nt, Human
agcucucucaucuccuggaaccauggccagca

SEQ ID NO: 319305 - RNA, 32 nt, Human
agcucucucuuauuccaguacuauaucacuuu

SEQ ID NO: 319306 - RNA, 32 nt, Human
agcucucugaaacuuauugauggaaaccugug

SEQ ID NO: 319307 - RNA, 32 nt, Human
agcucucugaaggcugaugaccaccuguuucu

SEQ ID NO: 319308 - RNA, 32 nt, Human
agcucucugagcgggagguggaagaaaggaug

SEQ ID NO: 319309 - RNA, 32 nt, Human
agcucucugcaaccuccaccuccuggguucaa

SEQ ID NO: 319310 - RNA, 32 nt, Human
agcucucugcaaccucugccucccagguucaa

SEQ ID NO: 319311 - RNA, 32 nt, Human
agcucucugcaagugagagaauucuuugggaa

SEQ ID NO: 319312 - RNA, 32 nt, Human
agcucucugccuccaugucaccaccuuugaag

SEQ ID NO: 319313 - RNA, 32 nt, Human
agcucucugccuccuccucccuuucucccuug

SEQ ID NO: 319314 - RNA, 32 nt, Human
agcucucugcuguccaguaggcugcuucucug

SEQ ID NO: 319315 - RNA, 32 nt, Human
agcucucuggaaaauccugaguguaggggaga

SEQ ID NO: 319316 - RNA, 32 nt, Human
agcucucuguucugcucugugcccaacugcga

SEQ ID NO: 319317 - RNA, 18 nt, Human
agcucucuuggccuuaca

SEQ ID NO: 319318 - RNA, 32 nt, Human
agcucugaaccaaagaaaucauuugauucaag

SEQ ID NO: 319319 - RNA, 31 nt, Human
agcucugaacuucuccuucauccagggaugg

SEQ ID NO: 319320 - RNA, 32 nt, Human
agcucugaagagagaaaagcggcgguguccug

SEQ ID NO: 319321 - RNA, 32 nt, Human
agcucugacauuguuuuugucuuguaggauuu

SEQ ID NO: 319322 - RNA, 32 nt, Human
agcucugaccccuauggugguggaggccaaua

SEQ ID NO: 319323 - RNA, 32 nt, Human
agcucugacuccaggcccuguccccugagcuc

SEQ ID NO: 319324 - RNA, 32 nt, Human
agcucugagacacagcacccagccuucucgca

SEQ ID NO: 319325 - RNA, 32 nt, Human
agcucugaggccacugcucucccuucaacccu

SEQ ID NO: 319326 - RNA, 32 nt, Human
agcucugaguagcugggauuauaggcaugcac

SEQ ID NO: 319327 - RNA, 32 nt, Human
agcucugaugguaccacugcacuccagccugg

SEQ ID NO: 319328 - RNA, 32 nt, Human
agcucugcacacacagcauuuucaaagcuugu

SEQ ID NO: 319329 - RNA, 32 nt, Human
agcucugcagagccaugggccagguggggcug

SEQ ID NO: 319330 - RNA, 32 nt, Human
agcucugcagugucccauccacccucacaccg

SEQ ID NO: 319331 - RNA, 22 nt, Human
agcucugcaugcagccccagca

SEQ ID NO: 319332 - RNA, 32 nt, Human
agcucugccacugggccggcugagguggcugc

SEQ ID NO: 319333 - RNA, 32 nt, Human
agcucugccaucaucagcaccaggagagccga

SEQ ID NO: 319334 - RNA, 32 nt, Human
agcucugccaucuuggagccagcagcuccaga

SEQ ID NO: 319335 - RNA, 32 nt, Human
agcucugccccaggggcugagcugccaccaga

SEQ ID NO: 319336 - RNA, 18 nt, Human
agcucugccccuccgccc

SEQ ID NO: 319337 - RNA, 18 nt, Human
agcucugccccucugccc

SEQ ID NO: 319338 - RNA, 32 nt, Human
agcucugcccugcaaguucacacuagagaaag

SEQ ID NO: 319339 - RNA, 23 nt, Human
agcucugccgcgcccccacccca

SEQ ID NO: 319340 - RNA, 32 nt, Human
agcucugccucccagguucacaccauucuccu

SEQ ID NO: 319341 - RNA, 32 nt, Human
agcucugccucccagguucacgccauucuccu

SEQ ID NO: 319342 - RNA, 32 nt, Human
agcucugccuccuggguucaagcgauuccccu

SEQ ID NO: 319343 - RNA, 32 nt, Human
agcucugccuccuggguucaagcgauucucuu

SEQ ID NO: 319344 - RNA, 32 nt, Human
agcucugcgaggccgggcgccgccauggaacu

SEQ ID NO: 319345 - RNA, 32 nt, Human
agcucugcgucgguccuggugcccuggaugcc

SEQ ID NO: 319346 - RNA, 32 nt, Human
agcucugcucagaacaaagagaagucuuuugc

SEQ ID NO: 319347 - RNA, 21 nt, Human
agcucugcugcccccacccca

SEQ ID NO: 319348 - RNA, 32 nt, Human
agcucugcugcgaugccucugccucaucucac

SEQ ID NO: 319349 - RNA, 32 nt, Human
agcucugcuguucacugguuguaugaucuugg

SEQ ID NO: 319350 - RNA, 32 nt, Human
agcucugcuucucucuuccucaucucccaaua

SEQ ID NO: 319351 - RNA, 32 nt, Human
agcucuggacagguggggcacugaggcagccc

SEQ ID NO: 319352 - RNA, 32 nt, Human
agcucuggacugccucugcaaggucagaaggg

SEQ ID NO: 319353 - RNA, 31 nt, Human
agcucuggacuucucacuucuagggcagagg

SEQ ID NO: 319354 - RNA, 32 nt, Human
agcucuggagguggaggcugccaugagccaug

SEQ ID NO: 319355 - RNA, 32 nt, Human
agcucuggaguuucugcuggaaguguuuaaug

SEQ ID NO: 319356 - RNA, 32 nt, Human
agcucuggaugcuggguaacccagagguaaug

SEQ ID NO: 319357 - RNA, 32 nt, Human
agcucuggccaaagcgcguaccaccuuucauc

SEQ ID NO: 319358 - RNA, 32 nt, Human
agcucuggccccggugcugccugcaugccaag

SEQ ID NO: 319359 - RNA, 32 nt, Human
agcucuggccccuaugaugguggaggccaaua

SEQ ID NO: 319360 - RNA, 32 nt, Human
agcucuggccgcugccuuccagggcucccgag

SEQ ID NO: 319361 - RNA, 21 nt, Human
agcucuggcucauggaucuca

SEQ ID NO: 319362 - RNA, 32 nt, Human
agcucuggcugaacccugugcugguguccuga

SEQ ID NO: 319363 - RNA, 32 nt, Human
agcucuggcuuccagaaaaccccagcauccuu

SEQ ID NO: 319364 - RNA, 32 nt, Human
agcucuggcuuuagauuucuucaucauaagga

SEQ ID NO: 319365 - RNA, 32 nt, Human
agcucuggcuuugccuuggcuuugccagggcu

SEQ ID NO: 319366 - RNA, 19 nt, Human
agcucugggaaaguaggau

SEQ ID NO: 319367 - RNA, 19 nt, Human
agcucugggaaauggagga

SEQ ID NO: 319368 - RNA, 20 nt, Human
agcucugggaggcaggcgca

SEQ ID NO: 319369 - RNA, 32 nt, Human
agcucugggagguggaagcauggggugggauc

SEQ ID NO: 319370 - RNA, 32 nt, Human
agcucugggaugacaggcgugagccacagcac

SEQ ID NO: 319371 - RNA, 32 nt, Human
agcucugggcccucuuugcucacuuuucugac

SEQ ID NO: 319372 - RNA, 32 nt, Human
agcucugggcugaccgccaaggcuccggcccg

SEQ ID NO: 319373 - RNA, 18 nt, Human
agcucugggcuucagaga

SEQ ID NO: 319374 - RNA, 32 nt, Human
agcucugggcuuccucuucgcccggguggcgu

SEQ ID NO: 319375 - RNA, 32 nt, Human
agcucuggggcuugcaccuccacaaaguaagg

SEQ ID NO: 319376 - RNA, 32 nt, Human
agcucugggggaggaggaggaugggaccuccu

SEQ ID NO: 319377 - RNA, 22 nt, Human
agcucugggugugccagaggac

SEQ ID NO: 319378 - RNA, 21 nt, Human
agcucuggucccucagccgca

SEQ ID NO: 319379 - RNA, 21 nt, Human
agcucuggucugucaaucuca

SEQ ID NO: 319380 - RNA, 22 nt, Human
agcucuggucugugcagacuca

SEQ ID NO: 319381 - RNA, 32 nt, Human
agcucuggugcagcuuaagccucuccacggug

SEQ ID NO: 319382 - RNA, 32 nt, Human
agcucuggugcugguggacagugccccuccca

SEQ ID NO: 319383 - RNA, 32 nt, Human
agcucugguguucaaagaguccuggucaauuc

SEQ ID NO: 319384 - RNA, 22 nt, Human
agcucugguuugaaaguagcca

SEQ ID NO: 319385 - RNA, 32 nt, Human
agcucuguaacugucacacugcaccugagcug

SEQ ID NO: 319386 - RNA, 18 nt, Human
agcucuguaccccugccc

SEQ ID NO: 319387 - RNA, 19 nt, Human
agcucuguauuuuuuggca

SEQ ID NO: 319388 - RNA, 32 nt, Human
agcucugucaccaggcuggagugcaguggugc

SEQ ID NO: 319389 - RNA, 32 nt, Human
agcucugucacccaggcuggagugcaguggug

SEQ ID NO: 319390 - RNA, 32 nt, Human
agcucugucacccaggcuggagugccauagug

SEQ ID NO: 319391 - RNA, 32 nt, Human
agcucugucagugacaaacacuccuuuggccu

SEQ ID NO: 319392 - RNA, 32 nt, Human
agcucuguccccugggcuggagugcaauggug

SEQ ID NO: 319393 - RNA, 32 nt, Human
agcucugucguccaggcuggagugcagugacu

SEQ ID NO: 319394 - RNA, 21 nt, Human
agcucugucugccuuguucuu

SEQ ID NO: 319395 - RNA, 32 nt, Human
agcucugucugcucaaugccauugugcagaga

SEQ ID NO: 319396 - RNA, 32 nt, Human
agcucugugaugucagagcaucuacugggacu

SEQ ID NO: 319397 - RNA, 32 nt, Human
agcucugugcaauugaaaucauuuuucuucau

SEQ ID NO: 319398 - RNA, 32 nt, Human
agcucugugccccucacccugcucccucucgc

SEQ ID NO: 319399 - RNA, 32 nt, Human
agcucuguggcccaggcuggcgugcagugggc

SEQ ID NO: 319400 - RNA, 32 nt, Human
agcucuguggccucuuuuggggugggggcggg

SEQ ID NO: 319401 - RNA, 32 nt, Human
agcucugugggugggagugagacaaaacacag

SEQ ID NO: 319402 - RNA, 32 nt, Human
agcucuguuaccacuuguuagaaggcagguca

SEQ ID NO: 319403 - RNA, 23 nt, Human
agcucuguucccuccugcuuugg

SEQ ID NO: 319404 - RNA, 32 nt, Human
agcucuguuccuuggcuuguccuuccuucccg

SEQ ID NO: 319405 - RNA, 32 nt, Human
agcucuguucucgcuccugagcagcugcuagg

SEQ ID NO: 319406 - RNA, 32 nt, Human
agcucuguucucuccagcaccucccaacccac

SEQ ID NO: 319407 - RNA, 32 nt, Human
agcucuguucucuucggaagaccucguuuucu

SEQ ID NO: 319408 - RNA, 32 nt, Human
agcucuguugcccaggcuggagugcaguggug

SEQ ID NO: 319409 - RNA, 32 nt, Human
agcucuguuucccccucuccccaaagccuuca

SEQ ID NO: 319410 - RNA, 22 nt, Human
agcucuuacagcaagcccauca

SEQ ID NO: 319411 - RNA, 32 nt, Human
agcucuuacgaaaaacccagguuagaccgcau

SEQ ID NO: 319412 - RNA, 32 nt, Human
agcucuuaggacacauucccagaagagcggaa

SEQ ID NO: 319413 - RNA, 32 nt, Human
agcucuuagggaggcagaggcaggaggauagc

SEQ ID NO: 319414 - RNA, 32 nt, Human
agcucuucaaagaaaaccuuugaaagauuuau

SEQ ID NO: 319415 - RNA, 32 nt, Human
agcucuucacaguccuggacuccugccaccag

SEQ ID NO: 319416 - RNA, 32 nt, Human
agcucuucaccguguuuccagccugggaccaa

SEQ ID NO: 319417 - RNA, 32 nt, Human
agcucuucacuccagcaugcacaugcccucuu

SEQ ID NO: 319418 - RNA, 32 nt, Human
agcucuucagcacaaagacacagacuugggga

SEQ ID NO: 319419 - RNA, 32 nt, Human
agcucuucaggaacccacaucucuccagagcu

SEQ ID NO: 319420 - RNA, 32 nt, Human
agcucuucaggaauccacaucucuccagagcu

SEQ ID NO: 319421 - RNA, 32 nt, Human
agcucuucaggccaagucagagcugcuguugc

SEQ ID NO: 319422 - RNA, 32 nt, Human
agcucuucaucagccugcugucuacucagacg

SEQ ID NO: 319423 - RNA, 32 nt, Human
agcucuucauguuucaggagagaguugaaccu

SEQ ID NO: 319424 - RNA, 32 nt, Human
agcucuucauuuauaaagcuauuugaaggggu

SEQ ID NO: 319425 - RNA, 32 nt, Human
agcucuucauuucuugaacuaccuuccuuuuc

SEQ ID NO: 319426 - RNA, 32 nt, Human
agcucuucccacccucacugcgggccucugcu

SEQ ID NO: 319427 - RNA, 21 nt, Human
agcucuuccuacccuccuccc

SEQ ID NO: 319428 - RNA, 32 nt, Human
agcucuuccugcuucucuccccaucaccaugc

SEQ ID NO: 319429 - RNA, 32 nt, Human
agcucuucuacuccacugcugucuaucuugcc

SEQ ID NO: 319430 - RNA, 32 nt, Human
agcucuucucaccuccucuuagcccaacucaa

SEQ ID NO: 319431 - RNA, 32 nt, Human
agcucuucuccucucuucaucccaucucuacc

SEQ ID NO: 319432 - RNA, 32 nt, Human
agcucuucuuuugacagggcaggccuuguucu

SEQ ID NO: 319433 - RNA, 32 nt, Human
agcucuugauauucuucuguucccacccacuu

SEQ ID NO: 319434 - RNA, 32 nt, Human
agcucuugcccagagcugugcagugcaguggc

SEQ ID NO: 319435 - RNA, 32 nt, Human
agcucuugccuuuucuuccucccgcaagucuc

SEQ ID NO: 319436 - RNA, 32 nt, Human
agcucuuggcaggagugggcucugagcaguug

SEQ ID NO: 319437 - RNA, 32 nt, Human
agcucuuggggucccuggcgaggcagacgcug

SEQ ID NO: 319438 - RNA, 32 nt, Human
agcucuugucuguaaguggccucugcaggagc

SEQ ID NO: 319439 - RNA, 22 nt, Human
agcucuuuagcaauaucagcua

SEQ ID NO: 319440 - RNA, 32 nt, Human
agcucuuuccauacagucuucacucaaguguu

SEQ ID NO: 319441 - RNA, 32 nt, Human
agcucuuucccuccucccauuuccuuuaguag

SEQ ID NO: 319442 - RNA, 32 nt, Human
agcucuuucuaaggaaucugagcuguucacug

SEQ ID NO: 319443 - RNA, 32 nt, Human
agcucuuugcccagcuccuggggugggagugg

SEQ ID NO: 319444 - RNA, 32 nt, Human
agcucuuugccgucggagcgcuuguuugcugc

SEQ ID NO: 319445 - RNA, 32 nt, Human
agcucuuugcucauucuagggccaguggagga

SEQ ID NO: 319446 - RNA, 21 nt, Human
agcucuuuggaggguuggaga

SEQ ID NO: 319447 - RNA, 23 nt, Human
agcucuuugguuguuuuuggaua

SEQ ID NO: 319448 - RNA, 32 nt, Human
agcucuuugucauuccaccuccucuggucagg

SEQ ID NO: 319449 - RNA, 32 nt, Human
agcucuuuguguacugguguccaggcucugcc

SEQ ID NO: 319450 - RNA, 32 nt, Human
agcucuuuucauccaacucaguuuacaggcgu

SEQ ID NO: 319451 - RNA, 32 nt, Human
agcucuuuuggcucaacuccugcccagcuccc

SEQ ID NO: 319452 - RNA, 32 nt, Human
agcucuuuuugaaagaacuaguuucuuuuuaa

SEQ ID NO: 319453 - RNA, 32 nt, Human
agcugaaaaaggaaggcugcuucuuguguggc

SEQ ID NO: 319454 - RNA, 32 nt, Human
agcugaaaacaggcacccagcgcagacucaag

SEQ ID NO: 319455 - RNA, 32 nt, Human
agcugaaaagcuucaagagaucuaggaaaaga

SEQ ID NO: 319456 - RNA, 32 nt, Human
agcugaaaaucugaaucagaaagcuuucucaa

SEQ ID NO: 319457 - RNA, 32 nt, Human
agcugaaacuauguauccucugacccccaucu

SEQ ID NO: 319458 - RNA, 32 nt, Human
agcugaaagagaaaguagaaggaugugcauug

SEQ ID NO: 319459 - RNA, 32 nt, Human
agcugaaagagacucuggggcacuaauucaga

SEQ ID NO: 319460 - RNA, 32 nt, Human
agcugaaagccaaaggaauugaguagacaacu

SEQ ID NO: 319461 - RNA, 27 nt, Human
agcugaaagucccacuggcuggccuca

SEQ ID NO: 319462 - RNA, 32 nt, Human
agcugaaaguugggacucuggagagcggagga

SEQ ID NO: 319463 - RNA, 32 nt, Human
agcugaacagcuucgguuucuacaccaauggc

SEQ ID NO: 319464 - RNA, 32 nt, Human
agcugaacaugcccacuggcccccaggccaca

SEQ ID NO: 319465 - RNA, 32 nt, Human
agcugaacauuugcuucaggaugccauuaaga

SEQ ID NO: 319466 - RNA, 32 nt, Human
agcugaacccagguuaggggcagaucagaagg

SEQ ID NO: 319467 - RNA, 32 nt, Human
agcugaaccugccucuucaccuccaggcacua

SEQ ID NO: 319468 - RNA, 32 nt, Human
agcugaagagucaagcacagagagaucaagaa

SEQ ID NO: 319469 - RNA, 32 nt, Human
agcugaagcccgaggcaggguuggugugaugc

SEQ ID NO: 319470 - RNA, 32 nt, Human
agcugaagcggggagacucacucuccaucuca

SEQ ID NO: 319471 - RNA, 32 nt, Human
agcugaaggaagaggaucaccuuccaagacaa

SEQ ID NO: 319472 - RNA, 32 nt, Human
agcugaaggaaguaugcuuuggugagucaauu

SEQ ID NO: 319473 - RNA, 32 nt, Human
agcugaaggaccucuggaaggacugugccaac

SEQ ID NO: 319474 - RNA, 32 nt, Human
agcugaaggcaaagggagagcugguggauugc

SEQ ID NO: 319475 - RNA, 23 nt, Human
agcugaaggcacagucugcccca

SEQ ID NO: 319476 - RNA, 32 nt, Human
agcugaaggcuggagaguaacuugcauaguag

SEQ ID NO: 319477 - RNA, 32 nt, Human
agcugaaggucaggccaggacagugagaccug

SEQ ID NO: 319478 - RNA, 32 nt, Human
agcugaaguccuggugacagaguuugugagaa

SEQ ID NO: 319479 - RNA, 30 nt, Human
agcugaagucucuccauuuuucucaaagac

SEQ ID NO: 319480 - RNA, 32 nt, Human
agcugaagugcuaggucaaaauaagcagugcc

SEQ ID NO: 319481 - RNA, 32 nt, Human
agcugaaguugccugaaugauccuccuguugc

SEQ ID NO: 319482 - RNA, 32 nt, Human
agcugaaguuucagagagguuaagcaauuugc

SEQ ID NO: 319483 - RNA, 31 nt, Human
agcugaauacugcguguucucacuuauaagu

SEQ ID NO: 319484 - RNA, 32 nt, Human
agcugaaugagucugcuuucacugugacuggg

SEQ ID NO: 319485 - RNA, 31 nt, Human
agcugaaugagugccaggaagcugcgaaauc

SEQ ID NO: 319486 - RNA, 32 nt, Human
agcugaaugccuccuguggggaaagggguugg

SEQ ID NO: 319487 - RNA, 19 nt, Human
agcugaaugcucuuuggga

SEQ ID NO: 319488 - RNA, 22 nt, Human
agcugacaaugccacucuggga

SEQ ID NO: 319489 - RNA, 32 nt, Human
agcugacacauuuugaucacuauaaucaguau

SEQ ID NO: 319490 - RNA, 32 nt, Human
agcugacaccagccccucagaggaccagugcg

SEQ ID NO: 319491 - RNA, 16 nt, Human
agcugacacugauaga

SEQ ID NO: 319492 - RNA, 32 nt, Human
agcugacagaagcagcguuccugaaguggccg

SEQ ID NO: 319493 - RNA, 32 nt, Human
agcugacagacagcacugccugugcuggguuu

SEQ ID NO: 319494 - RNA, 32 nt, Human
agcugacagccugucucuauggcgcuuccuug

SEQ ID NO: 319495 - RNA, 21 nt, Human
agcugacaguaaaucucuggg

SEQ ID NO: 319496 - RNA, 32 nt, Human
agcugacauggagcugaccacagcucuuggag

SEQ ID NO: 319497 - RNA, 32 nt, Human
agcugacauucugcagccuggacggccauggc

SEQ ID NO: 319498 - RNA, 22 nt, Human
agcugaccaagacaccugagga

SEQ ID NO: 319499 - RNA, 20 nt, Human
agcugaccacagcucuugga

SEQ ID NO: 319500 - RNA, 21 nt, Human
agcugaccagaaucucuugga

SEQ ID NO: 319501 - RNA, 32 nt, Human
agcugaccagccugcucuguacagugacaaug

SEQ ID NO: 319502 - RNA, 32 nt, Human
agcugaccauccuguuuuccaucccagagccu

SEQ ID NO: 319503 - RNA, 32 nt, Human
agcugaccaucuuuaccugguccuggaacuga

SEQ ID NO: 319504 - RNA, 22 nt, Human
agcugaccauggaucccugggg

SEQ ID NO: 319505 - RNA, 21 nt, Human
agcugaccauucauucugaga

SEQ ID NO: 319506 - RNA, 32 nt, Human
agcugacccaacaagagcucucugccuccggu

SEQ ID NO: 319507 - RNA, 19 nt, Human
agcugacccacucccuggg

SEQ ID NO: 319508 - RNA, 19 nt, Human
agcugaccccacucugaga

SEQ ID NO: 319509 - RNA, 32 nt, Human
agcugaccccuucaccucucccccucccuuuu

SEQ ID NO: 319510 - RNA, 32 nt, Human
agcugacccucaacauuuccaggaugaucccc

SEQ ID NO: 319511 - RNA, 19 nt, Human
agcugaccgacaucuggga

SEQ ID NO: 319512 - RNA, 19 nt, Human
agcugaccgacuuccagga

SEQ ID NO: 319513 - RNA, 17 nt, Human
agcugaccgagcucugg

SEQ ID NO: 319514 - RNA, 32 nt, Human
agcugaccgcaugggugugagccagcuugaga

SEQ ID NO: 319515 - RNA, 21 nt, Human
agcugaccggaugcucugaga

SEQ ID NO: 319516 - RNA, 32 nt, Human
agcugaccuagaagcagcaucuucccauuucc

SEQ ID NO: 319517 - RNA, 20 nt, Human
agcugaccugacuucugugg

SEQ ID NO: 319518 - RNA, 32 nt, Human
agcugaccuuuagcucccuccugcccuugcua

SEQ ID NO: 319519 - RNA, 32 nt, Human
agcugacgacuggcccugcuucugcuggggcu

SEQ ID NO: 319520 - RNA, 32 nt, Human
agcugacgcgacuaucauucucucacaagaac

SEQ ID NO: 319521 - RNA, 32 nt, Human
agcugacgucugggugacagugaaacggggua

SEQ ID NO: 319522 - RNA, 18 nt, Human
agcugacuagaucucugg

SEQ ID NO: 319523 - RNA, 32 nt, Human
agcugacucacagagcugcagagccaggcugg

SEQ ID NO: 319524 - RNA, 22 nt, Human
agcugacucagucccucugagc

SEQ ID NO: 319525 - RNA, 32 nt, Human
agcugacuccaggagagccccaguacugccag

SEQ ID NO: 319526 - RNA, 32 nt, Human
agcugacucccagcacaucaaagaaugcaauu

SEQ ID NO: 319527 - RNA, 32 nt, Human
agcugacucccagcacauccaagaaugcgauu

SEQ ID NO: 319528 - RNA, 22 nt, Human
agcugacucgguacucucugaa

SEQ ID NO: 319529 - RNA, 24 nt, Human
agcugacucuagaggggaaggcag

SEQ ID NO: 319530 - RNA, 32 nt, Human
agcugacucucauguucucucgucucacauuu

SEQ ID NO: 319531 - RNA, 19 nt, Human
agcugacucuccucugggg

SEQ ID NO: 319532 - RNA, 32 nt, Human
agcugacucugucacacugugccuagaacucc

SEQ ID NO: 319533 - RNA, 22 nt, Human
agcugacugaacucuaccgaac

SEQ ID NO: 319534 - RNA, 32 nt, Human
agcugacugaguacaccggugaggcugggguc

SEQ ID NO: 319535 - RNA, 32 nt, Human
agcugacugcaccaccccaacccuugcacaac

SEQ ID NO: 319536 - RNA, 32 nt, Human
agcugacugcagccuugaccuccagggcucaa

SEQ ID NO: 319537 - RNA, 32 nt, Human
agcugacugccuggcuuguuucagaugcagcc

SEQ ID NO: 319538 - RNA, 32 nt, Human
agcugacugcugguccggcuucugaccggccu

SEQ ID NO: 319539 - RNA, 26 nt, Human
agcugacugcuguucacccuuugaac

SEQ ID NO: 319540 - RNA, 32 nt, Human
agcugacuguaaaaaugggaagaggcaacgga

SEQ ID NO: 319541 - RNA, 32 nt, Human
agcugacuguguacucagguauuuuauugguc

SEQ ID NO: 319542 - RNA, 32 nt, Human
agcugacuguucacacugauugcccagcacau

SEQ ID NO: 319543 - RNA, 21 nt, Human
agcugacuguuggcucucuga

SEQ ID NO: 319544 - RNA, 32 nt, Human
agcugacuucuugccuuggacccaguuuuuaa

SEQ ID NO: 319545 - RNA, 32 nt, Human
agcugacuuggaggcccuggcucaggagcuca

SEQ ID NO: 319546 - RNA, 32 nt, Human
agcugacuuucacugugagucauuccaucauu

SEQ ID NO: 319547 - RNA, 32 nt, Human
agcugagaagucagggugaggcuggaggggac

SEQ ID NO: 319548 - RNA, 32 nt, Human
agcugagaaguggucuggagaggcagaagcug

SEQ ID NO: 319549 - RNA, 32 nt, Human
agcugagaccacaggcgugugccaccacgccu

SEQ ID NO: 319550 - RNA, 32 nt, Human
agcugagaccacaggugcgugccaccacaccc

SEQ ID NO: 319551 - RNA, 32 nt, Human
agcugagacccccauccccagcugcucugagu

SEQ ID NO: 319552 - RNA, 32 nt, Human
agcugagacuacaagcacccaccaccacaccc

SEQ ID NO: 319553 - RNA, 32 nt, Human
agcugagacuacaagugugugccaccaugccu

SEQ ID NO: 319554 - RNA, 32 nt, Human
agcugagacuacaggcacacaccaccacgccc

SEQ ID NO: 319555 - RNA, 32 nt, Human
agcugagacuacaggcacacaccaccacgccu

SEQ ID NO: 319556 - RNA, 32 nt, Human
agcugagacuacaggcacaugccacuacaccc

SEQ ID NO: 319557 - RNA, 32 nt, Human
agcugagacuacaggcaccugccaccaggccc

SEQ ID NO: 319558 - RNA, 32 nt, Human
agcugagacuacaggcaccugccaccauaccc

SEQ ID NO: 319559 - RNA, 32 nt, Human
agcugagacuacaggcacgcaccaccaugccu

SEQ ID NO: 319560 - RNA, 32 nt, Human
agcugagacuacaggcaugcaccaccacgccc

SEQ ID NO: 319561 - RNA, 32 nt, Human
agcugagacuacaggccugugccaccacaccc

SEQ ID NO: 319562 - RNA, 32 nt, Human
agcugagacuacaggcgugcaccaccaugccc

SEQ ID NO: 319563 - RNA, 32 nt, Human
agcugagacuacaggcgugugccaccacaccc

SEQ ID NO: 319564 - RNA, 32 nt, Human
agcugagacuacagggguaugccaccaugccc

SEQ ID NO: 319565 - RNA, 32 nt, Human
agcugagacuacaggugagugccaccacacuc

SEQ ID NO: 319566 - RNA, 32 nt, Human
agcugagacuacaggugcaugccaccaugccu

SEQ ID NO: 319567 - RNA, 32 nt, Human
agcugagacuacaggugcgcaccaccaugccc

SEQ ID NO: 319568 - RNA, 32 nt, Human
agcugagacuccagguauaugccaccaugacc

SEQ ID NO: 319569 - RNA, 32 nt, Human
agcugagacugcacuagggucuggggacacag

SEQ ID NO: 319570 - RNA, 32 nt, Human
agcugagacuucaggugcauuccaccacacau

SEQ ID NO: 319571 - RNA, 31 nt, Human
agcugagagaacaauguuucacuuaauagga

SEQ ID NO: 319572 - RNA, 32 nt, Human
agcugagagaagaggaaaagaggaguggccag

SEQ ID NO: 319573 - RNA, 32 nt, Human
agcugagagcaggagcaggaaaaggaggcuca

SEQ ID NO: 319574 - RNA, 32 nt, Human
agcugagaucacacuacuguacuacuguacuc

SEQ ID NO: 319575 - RNA, 32 nt, Human
agcugagaucagaagagaccagcuggagacca

SEQ ID NO: 319576 - RNA, 32 nt, Human
agcugagaucagaagggaccagcuggagguag

SEQ ID NO: 319577 - RNA, 32 nt, Human
agcugagaucaggcacuucagccugggcgaca

SEQ ID NO: 319578 - RNA, 32 nt, Human
agcugagaucaugccacugaacuccagccugg

SEQ ID NO: 319579 - RNA, 32 nt, Human
agcugagauccggccaacagagcgagacucug

SEQ ID NO: 319580 - RNA, 32 nt, Human
agcugagaucgcaccaccacacuccagccugg

SEQ ID NO: 319581 - RNA, 32 nt, Human
agcugagaucgcaucauugcacugcagucuga

SEQ ID NO: 319582 - RNA, 32 nt, Human
agcugagaucgcugcacuccagccugggcgac

SEQ ID NO: 319583 - RNA, 32 nt, Human
agcugagaugguaccacugcacuccagccugg

SEQ ID NO: 319584 - RNA, 32 nt, Human
agcugagauggugccauugaacuccagucugg

SEQ ID NO: 319585 - RNA, 32 nt, Human
agcugagauuacaggcacacaccaccacgccc

SEQ ID NO: 319586 - RNA, 32 nt, Human
agcugagauuacaggcacaugccaccacaccu

SEQ ID NO: 319587 - RNA, 32 nt, Human
agcugagauuacaggcauccgccaccacgccu

SEQ ID NO: 319588 - RNA, 32 nt, Human
agcugagauuacaggcaugcaccaccacgccc

SEQ ID NO: 319589 - RNA, 32 nt, Human
agcugagauuacaggcaugcaccaccaugccc

SEQ ID NO: 319590 - RNA, 32 nt, Human
agcugagauuacaggcaugcgccaccacaccc

SEQ ID NO: 319591 - RNA, 32 nt, Human
agcugagauuacaggcaugugccaccacacuc

SEQ ID NO: 319592 - RNA, 32 nt, Human
agcugagauuacaggccucugccaccaugcuc

SEQ ID NO: 319593 - RNA, 32 nt, Human
agcugagauuacaggcgcacaccaccacgccc

SEQ ID NO: 319594 - RNA, 32 nt, Human
agcugagauuacagguacgcaccaccaugccc

SEQ ID NO: 319595 - RNA, 32 nt, Human
agcugagauuacaggugcacaccaccacaucu

SEQ ID NO: 319596 - RNA, 32 nt, Human
agcugagauuacaggugcaugccaccacugcc

SEQ ID NO: 319597 - RNA, 32 nt, Human
agcugagauuacaggugcccgccaccaugccc

SEQ ID NO: 319598 - RNA, 32 nt, Human
agcugagauuacaggugcgcgccaccacacuu

SEQ ID NO: 319599 - RNA, 32 nt, Human
agcugagauuacaggugugcaccaccacgccc

SEQ ID NO: 319600 - RNA, 32 nt, Human
agcugagauuacaggugugugccaccacacgg

SEQ ID NO: 319601 - RNA, 23 nt, Human
agcugagauuacgccacugcacu

SEQ ID NO: 319602 - RNA, 32 nt, Human
agcugagauuauaggcgugcaccaccacaccu

SEQ ID NO: 319603 - RNA, 32 nt, Human
agcugagauugcacuccagccugggcgacagg

SEQ ID NO: 319604 - RNA, 32 nt, Human
agcugagauugcaggcacaugccaccacgccc

SEQ ID NO: 319605 - RNA, 32 nt, Human
agcugagauugcgucacugaacuccggccugg

SEQ ID NO: 319606 - RNA, 32 nt, Human
agcugagauuuaugguaacuuauuuaauuaau

SEQ ID NO: 319607 - RNA, 32 nt, Human
agcugagcacuuccacaagggcauaccccugg

SEQ ID NO: 319608 - RNA, 32 nt, Human
agcugagcagaguggcaccaggcugaguuaag

SEQ ID NO: 319609 - RNA, 32 nt, Human
agcugagcagaugccagcaucaugcuugcugu

SEQ ID NO: 319610 - RNA, 32 nt, Human
agcugagcagccaucccaagcccagcccaccu

SEQ ID NO: 319611 - RNA, 32 nt, Human
agcugagccacagcuuaacuccuacagaguga

SEQ ID NO: 319612 - RNA, 32 nt, Human
agcugagccaugcacacaggugcagacacccc

SEQ ID NO: 319613 - RNA, 32 nt, Human
agcugagcccagggcugggggcugcuugucug

SEQ ID NO: 319614 - RNA, 32 nt, Human
agcugagcccucugcugacuugcccccagcuc

SEQ ID NO: 319615 - RNA, 32 nt, Human
agcugagccuccaggagcugccagaggacagg

SEQ ID NO: 319616 - RNA, 32 nt, Human
agcugagccuccuuaccucccuucagccaagc

SEQ ID NO: 319617 - RNA, 32 nt, Human
agcugagcgcaaagcuaacauccugccagcua

SEQ ID NO: 319618 - RNA, 32 nt, Human
agcugagcgugaggcccugaccuggagccugc

SEQ ID NO: 319619 - RNA, 32 nt, Human
agcugagcucuucaccugcauccuggcugccg

SEQ ID NO: 319620 - RNA, 32 nt, Human
agcugaggacacaccccacaccccagcccacc

SEQ ID NO: 319621 - RNA, 32 nt, Human
agcugaggacgaacagcaucuuagccaagacc

SEQ ID NO: 319622 - RNA, 32 nt, Human
agcugaggaggaggcaggagagagggaaaaag

SEQ ID NO: 319623 - RNA, 32 nt, Human
agcugaggagucacagagagaccucccuacug

SEQ ID NO: 319624 - RNA, 32 nt, Human
agcugaggagugccuucaggccagugcugagc

SEQ ID NO: 319625 - RNA, 32 nt, Human
agcugaggauuuagacuuagagcuguguaacu

SEQ ID NO: 319626 - RNA, 32 nt, Human
agcugaggcagcagugugaggccagggcagag

SEQ ID NO: 319627 - RNA, 32 nt, Human
agcugaggcaggcggcaggcgcggugcacagg

SEQ ID NO: 319628 - RNA, 32 nt, Human
agcugaggcccggcuauacccaggagggagca

SEQ ID NO: 319629 - RNA, 32 nt, Human
agcugaggcccucucagggaggagacauccaa

SEQ ID NO: 319630 - RNA, 32 nt, Human
agcugaggccucccuugaguaggcccugcuuu

SEQ ID NO: 319631 - RNA, 32 nt, Human
agcugaggcgaaguggacuccaggcagggaau

SEQ ID NO: 319632 - RNA, 32 nt, Human
agcugaggcugaggccccgggagaggcggccc

SEQ ID NO: 319633 - RNA, 32 nt, Human
agcugagggcaagcucagagcccagggugagu

SEQ ID NO: 319634 - RNA, 32 nt, Human
agcugagggcagggugccugaccugugugccg

SEQ ID NO: 319635 - RNA, 32 nt, Human
agcugagggucugaggacgcagggagggugga

SEQ ID NO: 319636 - RNA, 32 nt, Human
agcugagggugucauguguggaaaaaucuguu

SEQ ID NO: 319637 - RNA, 19 nt, Human
agcugaggugcccaggaga

SEQ ID NO: 319638 - RNA, 32 nt, Human
agcugagguggaggcaggcugcggcagacggc

SEQ ID NO: 319639 - RNA, 32 nt, Human
agcugagguggcagugguuccaccaacaugga

SEQ ID NO: 319640 - RNA, 32 nt, Human
agcugagguggguggaucaugaggucaggaga

SEQ ID NO: 319641 - RNA, 23 nt, Human
agcugagucagaauuaaaggagg

SEQ ID NO: 319642 - RNA, 32 nt, Human
agcugaguccagugggagcugacgccaugacc

SEQ ID NO: 319643 - RNA, 32 nt, Human
agcugagucugcagguggagaggugcagggac

SEQ ID NO: 319644 - RNA, 32 nt, Human
agcugagugaagaugaggaagaagguguuaaa

SEQ ID NO: 319645 - RNA, 32 nt, Human
agcugagugcccuguccucagauggggaggga

SEQ ID NO: 319646 - RNA, 32 nt, Human
agcugagugccuggggguccagaagcuucgag

SEQ ID NO: 319647 - RNA, 32 nt, Human
agcugagugugggaacaguccagcccuggcau

SEQ ID NO: 319648 - RNA, 32 nt, Human
agcugaguucaagaccagccugggcaacgugg

SEQ ID NO: 319649 - RNA, 32 nt, Human
agcugaguugacugagggccauuuaaagauuc

SEQ ID NO: 319650 - RNA, 32 nt, Human
agcugaguuugaagaaaaaguuaaaaggaagg

SEQ ID NO: 319651 - RNA, 32 nt, Human
agcugauacuacaggcacccaccaccacgccc

SEQ ID NO: 319652 - RNA, 32 nt, Human
agcugaucauacaguugaccaguucagggugc

SEQ ID NO: 319653 - RNA, 32 nt, Human
agcugauccacaaacaagaggagcaccagacc

SEQ ID NO: 319654 - RNA, 19 nt, Human
agcugauccuucucugagg

SEQ ID NO: 319655 - RNA, 32 nt, Human
agcugaucucugaggaggaggcacugcacagg

SEQ ID NO: 319656 - RNA, 22 nt, Human
agcugaugacaauggcugaaag

SEQ ID NO: 319657 - RNA, 24 nt, Human
agcugaugcaacuaacaaguacug

SEQ ID NO: 319658 - RNA, 32 nt, Human
agcugaugcagccggugcuccacccauggaag

SEQ ID NO: 319659 - RNA, 32 nt, Human
agcugaugccaaacaucuuuacagaggaacug

SEQ ID NO: 319660 - RNA, 32 nt, Human
agcugauggcagggguuugaugaauccaaaug

SEQ ID NO: 319661 - RNA, 32 nt, Human
agcugauggcuucccagagaugccucacaguc

SEQ ID NO: 319662 - RNA, 32 nt, Human
agcugaugggccaugaggcaacaggcaagugg

SEQ ID NO: 319663 - RNA, 32 nt, Human
agcugaugguauuaggaaguggggcuugggga

SEQ ID NO: 319664 - RNA, 32 nt, Human
agcugaugguguccagaggccccugguccuua

SEQ ID NO: 319665 - RNA, 30 nt, Human
agcugaugguuauuuguaacaacacauuuc

SEQ ID NO: 319666 - RNA, 32 nt, Human
agcugaugugcccaccaccgugucaugagaga

SEQ ID NO: 319667 - RNA, 32 nt, Human
agcugauguucuuuggguauuacuugaguagu

SEQ ID NO: 319668 - RNA, 32 nt, Human
agcugauucaaucaaguggaagaaaagguauc

SEQ ID NO: 319669 - RNA, 32 nt, Human
agcugauucagagguaaacacagaucaagaua

SEQ ID NO: 319670 - RNA, 32 nt, Human
agcugauuggagaauguggaaugcagagugau

SEQ ID NO: 319671 - RNA, 32 nt, Human
agcugauuugggcuccuaagcucacgggagug

SEQ ID NO: 319672 - RNA, 32 nt, Human
agcugauuuggucaccuuccucugccuuuguu

SEQ ID NO: 319673 - RNA, 32 nt, Human
agcugcaaaacacacacaugcguauagacaua

SEQ ID NO: 319674 - RNA, 32 nt, Human
agcugcaacaacaggcacacaccaccaugcuc

SEQ ID NO: 319675 - RNA, 32 nt, Human
agcugcaaccacaggugcacaccaccacgccc

SEQ ID NO: 319676 - RNA, 32 nt, Human
agcugcaaggcaaacuccauuccucauauuaa

SEQ ID NO: 319677 - RNA, 32 nt, Human
agcugcaagguuguuuccagcacuuugggaac

SEQ ID NO: 319678 - RNA, 32 nt, Human
agcugcaauuacaggagccugccaccaugccc

SEQ ID NO: 319679 - RNA, 32 nt, Human
agcugcacacuccuaacccuucucccagggug

SEQ ID NO: 319680 - RNA, 32 nt, Human
agcugcacagaagcucugccgccucuugggac

SEQ ID NO: 319681 - RNA, 32 nt, Human
agcugcacagggcuaggggcagcagcugggcc

SEQ ID NO: 319682 - RNA, 32 nt, Human
agcugcaccacuaacaaauuggugccuguaga

SEQ ID NO: 319683 - RNA, 32 nt, Human
agcugcacccucccuccgauccuuccucccac

SEQ ID NO: 319684 - RNA, 32 nt, Human
agcugcacgcuggagucagcuggaguugccca

SEQ ID NO: 319685 - RNA, 32 nt, Human
agcugcacugaagacgagccugggguggagag

SEQ ID NO: 319686 - RNA, 32 nt, Human
agcugcacugcacaccuguggggagacuuuuc

SEQ ID NO: 319687 - RNA, 32 nt, Human
agcugcacugcaggguccugaguaaauguguu

SEQ ID NO: 319688 - RNA, 32 nt, Human
agcugcacugcauuccagccugggugacagag

SEQ ID NO: 319689 - RNA, 32 nt, Human
agcugcagaaaaggagggaggacuggcugggg

SEQ ID NO: 319690 - RNA, 32 nt, Human
agcugcagacauagacaagcaagcuggaagcu

SEQ ID NO: 319691 - RNA, 18 nt, Human
agcugcagaccccugccu

SEQ ID NO: 319692 - RNA, 32 nt, Human
agcugcagacuggacaacaacuuccgcagcgg

SEQ ID NO: 319693 - RNA, 32 nt, Human
agcugcagagccacaggccgucucagacauuu

SEQ ID NO: 319694 - RNA, 21 nt, Human
agcugcagagggccugggcca

SEQ ID NO: 319695 - RNA, 32 nt, Human
agcugcagauucugaccccacagcugccuuag

SEQ ID NO: 319696 - RNA, 24 nt, Human
agcugcagcacagccuucccuaac

SEQ ID NO: 319697 - RNA, 18 nt, Human
agcugcagcagugccuga

SEQ ID NO: 319698 - RNA, 24 nt, Human
agcugcagccaaggccgcuacgag

SEQ ID NO: 319699 - RNA, 32 nt, Human
agcugcagccacccuucucaucuggaucgggc

SEQ ID NO: 319700 - RNA, 32 nt, Human
agcugcagccagcauccuuaucugccacugac

SEQ ID NO: 319701 - RNA, 22 nt, Human
agcugcagccccuccccuugcc

SEQ ID NO: 319702 - RNA, 32 nt, Human
agcugcagcccggggagccaggugcagaaacg

SEQ ID NO: 319703 - RNA, 32 nt, Human
agcugcagccugacaggaugcagugggggcgu

SEQ ID NO: 319704 - RNA, 32 nt, Human
agcugcagccuggacaguagagcgagacccca

SEQ ID NO: 319705 - RNA, 32 nt, Human
agcugcagccuucaucagaacucuuccuccuc

SEQ ID NO: 319706 - RNA, 32 nt, Human
agcugcagcgggcuuggcuuugugaggaaccg

SEQ ID NO: 319707 - RNA, 32 nt, Human
agcugcagcugcagcaguggcaguggugaggc

SEQ ID NO: 319708 - RNA, 32 nt, Human
agcugcagcugucccaucauccccagcaaauc

SEQ ID NO: 319709 - RNA, 32 nt, Human
agcugcaggagagccugcuagagcagaagcgg

SEQ ID NO: 319710 - RNA, 32 nt, Human
agcugcaggagaggcugcuagagcagaagcgg

SEQ ID NO: 319711 - RNA, 32 nt, Human
agcugcaggagggccaggagggcagaugcucc

SEQ ID NO: 319712 - RNA, 32 nt, Human
agcugcaggauacaccagcccagaucaagaag

SEQ ID NO: 319713 - RNA, 32 nt, Human
agcugcaggccuggugagacaauuggguguuu

SEQ ID NO: 319714 - RNA, 19 nt, Human
agcugcagggaccucugcc

SEQ ID NO: 319715 - RNA, 32 nt, Human
agcugcagggagggccagggagguugggggug

SEQ ID NO: 319716 - RNA, 32 nt, Human
agcugcagggccaggugcauggccccucugca

SEQ ID NO: 319717 - RNA, 32 nt, Human
agcugcaggggcggggcuccugugcugcugcg

SEQ ID NO: 319718 - RNA, 32 nt, Human
agcugcaggggucggggauugcagcgggccuc

SEQ ID NO: 319719 - RNA, 32 nt, Human
agcugcaguaggcauugcuggggaagaaacaa

SEQ ID NO: 319720 - RNA, 32 nt, Human
agcugcagucugggagucuuuggaguaagaau

SEQ ID NO: 319721 - RNA, 19 nt, Human
agcugcagugcacuauaga

SEQ ID NO: 319722 - RNA, 32 nt, Human
agcugcagugcccugugguugcaccugugaau

SEQ ID NO: 319723 - RNA, 23 nt, Human
agcugcaguggcuuccucugggg

SEQ ID NO: 319724 - RNA, 32 nt, Human
agcugcaguggcuucuccuuucccaggcuucc

SEQ ID NO: 319725 - RNA, 32 nt, Human
agcugcagugucuaaguguuccucacugacag

SEQ ID NO: 319726 - RNA, 32 nt, Human
agcugcaucgugcuccuccagccugcacuggg

SEQ ID NO: 319727 - RNA, 32 nt, Human
agcugcaucuccagguuuugagucuagaaaug

SEQ ID NO: 319728 - RNA, 32 nt, Human
agcugcauggacgccuggcuccaggcuccagg

SEQ ID NO: 319729 - RNA, 32 nt, Human
agcugcauggaucucaaaugggccaagggccc

SEQ ID NO: 319730 - RNA, 32 nt, Human
agcugcauguucaagaaguggccggagaguuc

SEQ ID NO: 319731 - RNA, 32 nt, Human
agcugcauucgagacugguggagggugggcug

SEQ ID NO: 319732 - RNA, 32 nt, Human
agcugccaaacaggaacuaguaaacauauguu

SEQ ID NO: 319733 - RNA, 32 nt, Human
agcugccaacucagcuucuucuaccuccuaga

SEQ ID NO: 319734 - RNA, 22 nt, Human
agcugccacacccuuucuggga

SEQ ID NO: 319735 - RNA, 32 nt, Human
agcugccaccccugcaaccucuugcugauccu

SEQ ID NO: 319736 - RNA, 32 nt, Human
agcugccaccugcugggcggacgugggccuag

SEQ ID NO: 319737 - RNA, 32 nt, Human
agcugccaccuugcugccauccgcccgaccca

SEQ ID NO: 319738 - RNA, 24 nt, Human
agcugccacucuuggagcacauug

SEQ ID NO: 319739 - RNA, 32 nt, Human
agcugccacugcagagccccgccauggaagac

SEQ ID NO: 319740 - RNA, 15 nt, Human
agcugccacugggca

SEQ ID NO: 319741 - RNA, 18 nt, Human
agcugccacuguguggua

SEQ ID NO: 319742 - RNA, 32 nt, Human
agcugccacuucacacugaccugggcauacgc

SEQ ID NO: 319743 - RNA, 32 nt, Human
agcugccagaggacaggagcggggaaggcuca

SEQ ID NO: 319744 - RNA, 32 nt, Human
agcugccagcugcaggacugaggucccaucuc

SEQ ID NO: 319745 - RNA, 32 nt, Human
agcugccaggcccuucccugugccccacccug

SEQ ID NO: 319746 - RNA, 32 nt, Human
agcugccagggugagggcagcccucagggucg

SEQ ID NO: 319747 - RNA, 32 nt, Human
agcugccagucaagggcagugggaucucgaug

SEQ ID NO: 319748 - RNA, 32 nt, Human
agcugccagugggggaggaggcugcgguucau

SEQ ID NO: 319749 - RNA, 32 nt, Human
agcugccaucagagauggugucugcaggcagu

SEQ ID NO: 319750 - RNA, 20 nt, Human
agcugccaucugcucuggga

SEQ ID NO: 319751 - RNA, 32 nt, Human
agcugccaugaauaugccagagcugcuggcua

SEQ ID NO: 319752 - RNA, 32 nt, Human
agcugccauggugguuaggaaugugauacaug

SEQ ID NO: 319753 - RNA, 32 nt, Human
agcugccaugucuggggcaucuuccucagaac

SEQ ID NO: 319754 - RNA, 23 nt, Human
agcugcccaaggugccggccugc

SEQ ID NO: 319755 - RNA, 32 nt, Human
agcugcccacagaaaggcgacagggaacccca

SEQ ID NO: 319756 - RNA, 32 nt, Human
agcugcccagccuguucacaugcuggggacca

SEQ ID NO: 319757 - RNA, 17 nt, Human
agcugcccagcgugggc

SEQ ID NO: 319758 - RNA, 21 nt, Human
agcugcccagcugcagagcag

SEQ ID NO: 319759 - RNA, 32 nt, Human
agcugcccaggaaagguggaaagugguagaag

SEQ ID NO: 319760 - RNA, 24 nt, Human
agcugcccauccacucccacccca

SEQ ID NO: 319761 - RNA, 32 nt, Human
agcugcccaucgggggcccuagcucagcccca

SEQ ID NO: 319762 - RNA, 32 nt, Human
agcugcccaucuucugcuagcugauccugaga

SEQ ID NO: 319763 - RNA, 32 nt, Human
agcugcccaucuugucccuccuggagaccuaa

SEQ ID NO: 319764 - RNA, 32 nt, Human
agcugcccaugccaccuccuccuucucugccc

SEQ ID NO: 319765 - RNA, 32 nt, Human
agcugccccagagugaggguguagaugucugu

SEQ ID NO: 319766 - RNA, 32 nt, Human
agcugccccaggcuuuagugcagcugccaacc

SEQ ID NO: 319767 - RNA, 32 nt, Human
agcugccccaggcuuuagugcagcugccaacg

SEQ ID NO: 319768 - RNA, 32 nt, Human
agcugcccccaaacccuaucccuucuccuuuu

SEQ ID NO: 319769 - RNA, 32 nt, Human
agcugcccccggcugcagcccaggccauggac

SEQ ID NO: 319770 - RNA, 32 nt, Human
agcugccccgucugccauucaccaggaaaaau

SEQ ID NO: 319771 - RNA, 32 nt, Human
agcugccccuagugugagggcugccucauaag

SEQ ID NO: 319772 - RNA, 19 nt, Human
agcugccccuccccgagga

SEQ ID NO: 319773 - RNA, 32 nt, Human
agcugccccucuccaccaggguacccugucuu

SEQ ID NO: 319774 - RNA, 32 nt, Human
agcugccccucucuggccuggccggcaggcgu

SEQ ID NO: 319775 - RNA, 32 nt, Human
agcugccccugcccugugccgugcugcgcuca

SEQ ID NO: 319776 - RNA, 21 nt, Human
agcugcccgagaucacuggag

SEQ ID NO: 319777 - RNA, 20 nt, Human
agcugcccgccgguauugag

SEQ ID NO: 319778 - RNA, 18 nt, Human
agcugcccggcgggcugg

SEQ ID NO: 319779 - RNA, 32 nt, Human
agcugcccuccccuacuucucccuugcuccca

SEQ ID NO: 319780 - RNA, 32 nt, Human
agcugcccuccccuccggacuggugcccuccu

SEQ ID NO: 319781 - RNA, 32 nt, Human
agcugcccuccccuuucagccuucucaacuca

SEQ ID NO: 319782 - RNA, 32 nt, Human
agcugcccucuugagucuuucuguccauccca

SEQ ID NO: 319783 - RNA, 21 nt, Human
agcugcccugacacauuggag

SEQ ID NO: 319784 - RNA, 32 nt, Human
agcugcccugcuccacccuggccgauccauca

SEQ ID NO: 319785 - RNA, 32 nt, Human
agcugcccugugacucuuaggaagaugccgua

SEQ ID NO: 319786 - RNA, 32 nt, Human
agcugcccuuccugucuccaccucucaguccc

SEQ ID NO: 319787 - RNA, 32 nt, Human
agcugcccuuucuccccuccacucauguuccc

SEQ ID NO: 319788 - RNA, 32 nt, Human
agcugcccuuucuccuuccuggcccuguguac

SEQ ID NO: 319789 - RNA, 32 nt, Human
agcugccgacugugcaugacugcucugaacgu

SEQ ID NO: 319790 - RNA, 32 nt, Human
agcugccgcagcccugguuuuuggcgcaucuu

SEQ ID NO: 319791 - RNA, 32 nt, Human
agcugccggccccuaggacagagcagggaccu

SEQ ID NO: 319792 - RNA, 32 nt, Human
agcugccgggaggcgggagggagugcccugaa

SEQ ID NO: 319793 - RNA, 32 nt, Human
agcugccucaaaccuuugggauuuucagaaug

SEQ ID NO: 319794 - RNA, 32 nt, Human
agcugccuccccugcccuuucucagcugccuc

SEQ ID NO: 319795 - RNA, 32 nt, Human
agcugccuccgcgugaucaaagccacacucug

SEQ ID NO: 319796 - RNA, 32 nt, Human
agcugccucugugcccuggccucuuucccugu

SEQ ID NO: 319797 - RNA, 32 nt, Human
agcugccugaacuuuuaaaacucccagacacg

SEQ ID NO: 319798 - RNA, 22 nt, Human
agcugccugaugggcacuagag

SEQ ID NO: 319799 - RNA, 31 nt, Human
agcugccugccccugagcccugugucgggau

SEQ ID NO: 319800 - RNA, 23 nt, Human
agcugccugccgggccugaggag

SEQ ID NO: 319801 - RNA, 32 nt, Human
agcugccugccugcugcugcugcugcuuccug

SEQ ID NO: 319802 - RNA, 32 nt, Human
agcugccugccuguuugcuguguugaacucuu

SEQ ID NO: 319803 - RNA, 32 nt, Human
agcugccugccuugcuuccucuugcuuacuca

SEQ ID NO: 319804 - RNA, 32 nt, Human
agcugccugcucccggcccacccucuaggagg

SEQ ID NO: 319805 - RNA, 32 nt, Human
agcugccugcucuccagccucuggaggaacuc

SEQ ID NO: 319806 - RNA, 32 nt, Human
agcugccugcuucucgccugccugugucugcu

SEQ ID NO: 319807 - RNA, 32 nt, Human
agcugccuggacccguucaugggggagggggc

SEQ ID NO: 319808 - RNA, 32 nt, Human
agcugccuggcauucaggcccagaugccugca

SEQ ID NO: 319809 - RNA, 32 nt, Human
agcugccuggggcagggcucuaccuccccugc

SEQ ID NO: 319810 - RNA, 32 nt, Human
agcugccuggggcccaaguugcagugagcagg

SEQ ID NO: 319811 - RNA, 32 nt, Human
agcugccugguauccaggaggggaaugcuggu

SEQ ID NO: 319812 - RNA, 32 nt, Human
agcugccugucucuuagaugcacuuucuuuuu

SEQ ID NO: 319813 - RNA, 32 nt, Human
agcugccugugcacuggcccugcggggcccag

SEQ ID NO: 319814 - RNA, 32 nt, Human
agcugccugugugggacugagaugcaggauuu

SEQ ID NO: 319815 - RNA, 16 nt, Human
agcugccuguuuucuu

SEQ ID NO: 319816 - RNA, 32 nt, Human
agcugccuucaaggacuguuucagugugaguc

SEQ ID NO: 319817 - RNA, 25 nt, Human
agcugccuuccacaagaccagcaga

SEQ ID NO: 319818 - RNA, 20 nt, Human
agcugccuuuucugccauca

SEQ ID NO: 319819 - RNA, 32 nt, Human
agcugcgacuacaggcgcgcaccaccacgccc

SEQ ID NO: 319820 - RNA, 18 nt, Human
agcugcgacuacaggugc

SEQ ID NO: 319821 - RNA, 32 nt, Human
agcugcgacuacaggugcaugccaacacgccu

SEQ ID NO: 319822 - RNA, 32 nt, Human
agcugcgacuacaggugcccaccaccacaccu

SEQ ID NO: 319823 - RNA, 24 nt, Human
agcugcgacuugcgauuugaaugc

SEQ ID NO: 319824 - RNA, 32 nt, Human
agcugcgagagaagaaaugucuguugcuuuaa

SEQ ID NO: 319825 - RNA, 32 nt, Human
agcugcgaggucaucucugcucuggcuuuucu

SEQ ID NO: 319826 - RNA, 32 nt, Human
agcugcgaucucugugguaggcccagaagugu

SEQ ID NO: 319827 - RNA, 32 nt, Human
agcugcgcaaagugcggaguguggagcuggac

SEQ ID NO: 319828 - RNA, 32 nt, Human
agcugcgcaacagccuggguucuugagcagag

SEQ ID NO: 319829 - RNA, 32 nt, Human
agcugcgcaccugugucccccaccuccacccu

SEQ ID NO: 319830 - RNA, 32 nt, Human
agcugcgcaggcugguggagaccaugcgcuuc

SEQ ID NO: 319831 - RNA, 22 nt, Human
agcugcgcccagggcgcacgag

SEQ ID NO: 319832 - RNA, 32 nt, Human
agcugcgcccucccugaccucccaggcugcgg

SEQ ID NO: 319833 - RNA, 32 nt, Human
agcugcgccuauuccucccucgccaaacgcgu

SEQ ID NO: 319834 - RNA, 19 nt, Human
agcugcgccugggucccgg

SEQ ID NO: 319835 - RNA, 32 nt, Human
agcugcgcggucuuacuccccuucccugccua

SEQ ID NO: 319836 - RNA, 23 nt, Human
agcugcgcguccugccucuggga

SEQ ID NO: 319837 - RNA, 19 nt, Human
agcugcgcuuuuugaacug

SEQ ID NO: 319838 - RNA, 32 nt, Human
agcugcggagagcugccagcugcaccgggcgu

SEQ ID NO: 319839 - RNA, 32 nt, Human
agcugcggagcuggucgacauaaucucuguau

SEQ ID NO: 319840 - RNA, 32 nt, Human
agcugcggccgagggaagggugcaugugcgcg

SEQ ID NO: 319841 - RNA, 32 nt, Human
agcugcgggaggccgaguggguggccgcgcuc

SEQ ID NO: 319842 - RNA, 32 nt, Human
agcugcggggcccuggcaugaaaggcaugagc

SEQ ID NO: 319843 - RNA, 32 nt, Human
agcugcgggucggggagagggaccgggggucc

SEQ ID NO: 319844 - RNA, 32 nt, Human
agcugcgucagacaacgacccaccucaucccc

SEQ ID NO: 319845 - RNA, 32 nt, Human
agcugcgugacugucugucucugccaugucuc

SEQ ID NO: 319846 - RNA, 32 nt, Human
agcugcgugccacaucgcuacgcccaggaggu

SEQ ID NO: 319847 - RNA, 32 nt, Human
agcugcgugcugcugcacucaccggcuucuuc

SEQ ID NO: 319848 - RNA, 21 nt, Human
agcugcguggagacccaggag

SEQ ID NO: 319849 - RNA, 32 nt, Human
agcugcuaaagugggaagaaggagaacuugaa

SEQ ID NO: 319850 - RNA, 32 nt, Human
agcugcuaaccugcuuaguuacacucccaccu

SEQ ID NO: 319851 - RNA, 32 nt, Human
agcugcuacccccucccuucccaugggagugg

SEQ ID NO: 319852 - RNA, 32 nt, Human
agcugcuagguugugccccugccccuccugaa

SEQ ID NO: 319853 - RNA, 32 nt, Human
agcugcuaucaacccucucucccuucaucucu

SEQ ID NO: 319854 - RNA, 31 nt, Human
agcugcucaauaaaggcuguguguguggaau

SEQ ID NO: 319855 - RNA, 31 nt, Human
agcugcucaauaaauguuuguugaacgaaug

SEQ ID NO: 319856 - RNA, 32 nt, Human
agcugcucacuauuaucugcaguauugauaag

SEQ ID NO: 319857 - RNA, 32 nt, Human
agcugcucacugcucacacgcugccuccucag

SEQ ID NO: 319858 - RNA, 32 nt, Human
agcugcucagaaugccgcaugacaacugaagg

SEQ ID NO: 319859 - RNA, 23 nt, Human
agcugcucagcaacuccaccugc

SEQ ID NO: 319860 - RNA, 32 nt, Human
agcugcucagcaggcaggcagcagccucccgc

SEQ ID NO: 319861 - RNA, 32 nt, Human
agcugcucaguuauugcagcaagaacagaaga

SEQ ID NO: 319862 - RNA, 32 nt, Human
agcugcucauuacaguucuuuccucuuucugc

SEQ ID NO: 319863 - RNA, 32 nt, Human
agcugcucccccuccaccugaguugggguggg

SEQ ID NO: 319864 - RNA, 22 nt, Human
agcugcucccgccaccaccugc

SEQ ID NO: 319865 - RNA, 24 nt, Human
agcugcucccgcuaccgauccugc

SEQ ID NO: 319866 - RNA, 32 nt, Human
agcugcuccuugggcagaguuggcaauguuuu

SEQ ID NO: 319867 - RNA, 32 nt, Human
agcugcucgggaggcagaggcaggagaauggc

SEQ ID NO: 319868 - RNA, 32 nt, Human
agcugcucucuagccuacuucauugacagcac

SEQ ID NO: 319869 - RNA, 32 nt, Human
agcugcucugcucugugcugggcuuguggggu

SEQ ID NO: 319870 - RNA, 32 nt, Human
agcugcucugguggaguugggaagggauagga

SEQ ID NO: 319871 - RNA, 18 nt, Human
agcugcucuucugaauug

SEQ ID NO: 319872 - RNA, 32 nt, Human
agcugcucuuucugguccuccccaccacccca

SEQ ID NO: 319873 - RNA, 32 nt, Human
agcugcucuuucugguucuccccaccacccca

SEQ ID NO: 319874 - RNA, 32 nt, Human
agcugcugaacuugaacccagagccuucaggu

SEQ ID NO: 319875 - RNA, 32 nt, Human
aggaauggaagaggcagcaggagcuacaaugc

SEQ ID NO: 319876 - RNA, 32 nt, Human
aggaauggaaguggacccuaguuaggugcugg

SEQ ID NO: 319877 - RNA, 19 nt, Human
aggaauggacaagaagcca

SEQ ID NO: 319878 - RNA, 32 nt, Human
aggaauggaccaugcagaucacugucagugga

SEQ ID NO: 319879 - RNA, 21 nt, Human
aggaauggacgagcccuggga

SEQ ID NO: 319880 - RNA, 21 nt, Human
aggaauggcagaaaagucuga

SEQ ID NO: 319881 - RNA, 32 nt, Human
aggaauggcagcuguauccaaccacaaacaac

SEQ ID NO: 319882 - RNA, 32 nt, Human
aggaauggccacagguuuacacugccuuccca

SEQ ID NO: 319883 - RNA, 32 nt, Human
aggaauggcccaacaguggccccuucagggug

SEQ ID NO: 319884 - RNA, 29 nt, Human
aggaauggccgcagagguggcccugagug

SEQ ID NO: 319885 - RNA, 32 nt, Human
aggaauggccugaugguaguagugccuuuugc

SEQ ID NO: 319886 - RNA, 32 nt, Human
aggaauggcugaggauggcugggcagggggac

SEQ ID NO: 319887 - RNA, 32 nt, Human
aggaaugggaggagcaggcuugaggcuugggc

SEQ ID NO: 319888 - RNA, 32 nt, Human
aggaauggggcagacgcgauucaggugaacag

SEQ ID NO: 319889 - RNA, 32 nt, Human
aggaauggggcagagcugggcauucaggaccu

SEQ ID NO: 319890 - RNA, 32 nt, Human
aggaaugggguacuaugggucaucucaguggg

SEQ ID NO: 319891 - RNA, 32 nt, Human
aggaaugguaccuucugaaacugccuuuccag

SEQ ID NO: 319892 - RNA, 19 nt, Human
aggaaugguauguggggga

SEQ ID NO: 319893 - RNA, 32 nt, Human
aggaaugguucuuucugggccuccugggacag

SEQ ID NO: 319894 - RNA, 32 nt, Human
aggaauguaaauuaccuuaaacuucgaugauc

SEQ ID NO: 319895 - RNA, 19 nt, Human
aggaauguagaacuugaca

SEQ ID NO: 319896 - RNA, 32 nt, Human
aggaauguagacugaauggugacccagggaga

SEQ ID NO: 319897 - RNA, 20 nt, Human
aggaauguagcaacuugaca

SEQ ID NO: 319898 - RNA, 32 nt, Human
aggaauguaugccugggaaagacagcaggaga

SEQ ID NO: 319899 - RNA, 21 nt, Human
aggaaugucagggacuaguga

SEQ ID NO: 319900 - RNA, 32 nt, Human
aggaaugucugacaggcuuaagcuuucguccc

SEQ ID NO: 319901 - RNA, 19 nt, Human
aggaaugucuggaguggua

SEQ ID NO: 319902 - RNA, 32 nt, Human
aggaaugugaggaagaaagaaaggcagggcau

SEQ ID NO: 319903 - RNA, 32 nt, Human
aggaaugugguguucuggcuucacaaaugaaa

SEQ ID NO: 319904 - RNA, 32 nt, Human
aggaaugugucacuacuggucaagcaauacuc

SEQ ID NO: 319905 - RNA, 32 nt, Human
aggaauguguccaagacacaugcugagguuuu

SEQ ID NO: 319906 - RNA, 23 nt, Human
aggaauuaaaaguguuucuggaa

SEQ ID NO: 319907 - RNA, 32 nt, Human
aggaauuaaaauaucuguagaagccauggcuu

SEQ ID NO: 319908 - RNA, 32 nt, Human
aggaauuaaggagacuuccuguaauauuucuu

SEQ ID NO: 319909 - RNA, 32 nt, Human
aggaauucaaaaccagccuggccaacaugcaa

SEQ ID NO: 319910 - RNA, 32 nt, Human
aggaauucaacaccagccuggccaacauagug

SEQ ID NO: 319911 - RNA, 32 nt, Human
aggaauucaagaccagccuagguaacauagug

SEQ ID NO: 319912 - RNA, 32 nt, Human
aggaauucaagaccagccugaguaacaugaug

SEQ ID NO: 319913 - RNA, 32 nt, Human
aggaauucaagaccagccuggccaacauggca

SEQ ID NO: 319914 - RNA, 32 nt, Human
aggaauucaagaccagccuggccaacauggcg

SEQ ID NO: 319915 - RNA, 32 nt, Human
aggaauucaagaccagccuggccaacauggug

SEQ ID NO: 319916 - RNA, 32 nt, Human
aggaauucaagaccagccuggccaacauguga

SEQ ID NO: 319917 - RNA, 32 nt, Human
aggaauucaagaccagccugggcaacacagca

SEQ ID NO: 319918 - RNA, 32 nt, Human
aggaauucaagaccagccugggcaacacagug

SEQ ID NO: 319919 - RNA, 32 nt, Human
aggaauucaagaccagccugggcaacauggug

SEQ ID NO: 319920 - RNA, 32 nt, Human
aggaauucaagaccagccugggcaacucagga

SEQ ID NO: 319921 - RNA, 32 nt, Human
aggaauucaaggccagccugggcaacauagac

SEQ ID NO: 319922 - RNA, 32 nt, Human
aggaauucacccaggcagccuggagucagcca

SEQ ID NO: 319923 - RNA, 32 nt, Human
aggaauucagcccgaugggaguccgaguucau

SEQ ID NO: 319924 - RNA, 32 nt, Human
aggaauucccgguucucagaauuguuaucacu

SEQ ID NO: 319925 - RNA, 32 nt, Human
aggaauuccgcugcggcccaaggcuugccguu

SEQ ID NO: 319926 - RNA, 32 nt, Human
aggaauucgagaccagccugaccaacauggag

SEQ ID NO: 319927 - RNA, 32 nt, Human
aggaauucgagaccagccuggcaacauggcaa

SEQ ID NO: 319928 - RNA, 32 nt, Human
aggaauucgagaccagccuggccaacauggca

SEQ ID NO: 319929 - RNA, 32 nt, Human
aggaauucgagaccagccuggccaacauggcg

SEQ ID NO: 319930 - RNA, 32 nt, Human
aggaauucgagaccagccuggccaacaugguc

SEQ ID NO: 319931 - RNA, 32 nt, Human
aggaauucgagaccagccuggccaacauggug

SEQ ID NO: 319932 - RNA, 32 nt, Human
aggaauucgagaccagccuggccagcauggug

SEQ ID NO: 319933 - RNA, 32 nt, Human
aggaauucgagaccagccugggcaacauagug

SEQ ID NO: 319934 - RNA, 32 nt, Human
aggaauucgagaccagccugggcagcauagca

SEQ ID NO: 319935 - RNA, 32 nt, Human
aggaauucgagaccagccugggccacaugaca

SEQ ID NO: 319936 - RNA, 32 nt, Human
aggaauucgagaccagccugggcuacauagug

SEQ ID NO: 319937 - RNA, 32 nt, Human
aggaauucuaaccuggcuuccagggagaggug

SEQ ID NO: 319938 - RNA, 32 nt, Human
aggaauucuagaccagccugggcaacauagug

SEQ ID NO: 319939 - RNA, 32 nt, Human
aggaauucucaugugggauuccccuugccagg

SEQ ID NO: 319940 - RNA, 32 nt, Human
aggaauucucuucuuccgaaucaugcugcucg

SEQ ID NO: 319941 - RNA, 32 nt, Human
aggaauucugaagccauugucuccuugaguac

SEQ ID NO: 319942 - RNA, 32 nt, Human
aggaauucuggaacugcuugaaaacuaggacg

SEQ ID NO: 319943 - RNA, 32 nt, Human
aggaauucugggaacuaaguuuuucuucuccu

SEQ ID NO: 319944 - RNA, 32 nt, Human
aggaauucuuugcuuuggcuucugucuguucc

SEQ ID NO: 319945 - RNA, 32 nt, Human
aggaauugcaauugacucagaaugacacauuu

SEQ ID NO: 319946 - RNA, 32 nt, Human
aggaauugccaaggacccagagcccagcccug

SEQ ID NO: 319947 - RNA, 32 nt, Human
aggaauugcccagcagacguugggugagucug

SEQ ID NO: 319948 - RNA, 32 nt, Human
aggaauugcuugaacccaagaggcagaggaug

SEQ ID NO: 319949 - RNA, 32 nt, Human
aggaauugugaaacauuggcuguuguguguug

SEQ ID NO: 319950 - RNA, 32 nt, Human
aggaauugugcuaguuaaaaaucaggaauagg

SEQ ID NO: 319951 - RNA, 32 nt, Human
aggaauuuauucacaucuuuauugauccuaaa

SEQ ID NO: 319952 - RNA, 32 nt, Human
aggaauuucacauuauugaacuccucaaaaag

SEQ ID NO: 319953 - RNA, 32 nt, Human
aggaauuucaggcagagagugaagugaucaga

SEQ ID NO: 319954 - RNA, 32 nt, Human
aggaauuucccaggaccugaaggggccaugau

SEQ ID NO: 319955 - RNA, 32 nt, Human
aggaauuucucuuccuucuucuccugccucua

SEQ ID NO: 319956 - RNA, 32 nt, Human
aggaauuucuggcacgguguagagaugauuua

SEQ ID NO: 319957 - RNA, 32 nt, Human
aggaauuugagaccagccuggacaacacagug

SEQ ID NO: 319958 - RNA, 32 nt, Human
aggaauuugagaccagccuggacaacauggga

SEQ ID NO: 319959 - RNA, 32 nt, Human
aggaauuugagaccagccuggccaauauggug

SEQ ID NO: 319960 - RNA, 32 nt, Human
aggaauuugagaccagccugggcaacauagug

SEQ ID NO: 319961 - RNA, 32 nt, Human
aggaauuugagaccagccugggcaacauggcg

SEQ ID NO: 319962 - RNA, 19 nt, Human
aggaauuuucucuccuccu

SEQ ID NO: 319963 - RNA, 21 nt, Human
aggaauuuuuuccuccucaug

SEQ ID NO: 319964 - RNA, 32 nt, Human
aggacaaaacuuagaagguauuggauaccauu

SEQ ID NO: 319965 - RNA, 32 nt, Human
aggacaaacagcugccuuugguguuuuaaugu

SEQ ID NO: 319966 - RNA, 32 nt, Human
aggacaaagacaaacaccaaucgcagggaauc

SEQ ID NO: 319967 - RNA, 32 nt, Human
aggacaaagcaaguuggaagcugcagguguca

SEQ ID NO: 319968 - RNA, 32 nt, Human
aggacaaagguugugucuugcuuuugucucuc

SEQ ID NO: 319969 - RNA, 32 nt, Human
aggacaacauggcaagaaggagccuuuggauu

SEQ ID NO: 319970 - RNA, 29 nt, Human
aggacaagacgcaggaggcagaaugccgc

SEQ ID NO: 319971 - RNA, 32 nt, Human
aggacaagagcacucccaggccccagagucua

SEQ ID NO: 319972 - RNA, 32 nt, Human
aggacaagcccacugucuuaagccacuuugac

SEQ ID NO: 319973 - RNA, 32 nt, Human
aggacaagcccaggcagggcugcauggagagg

SEQ ID NO: 319974 - RNA, 32 nt, Human
aggacaagcccugccucuucucccucuauugg

SEQ ID NO: 319975 - RNA, 32 nt, Human
aggacaagccugggcaacauaggaagacccug

SEQ ID NO: 319976 - RNA, 32 nt, Human
aggacaaggaagagaagagagagaggaggaau

SEQ ID NO: 319977 - RNA, 32 nt, Human
aggacaaggaagcagagggaaaugggaggucu

SEQ ID NO: 319978 - RNA, 32 nt, Human
aggacaaggagaggagacaagugacgacagcc

SEQ ID NO: 319979 - RNA, 32 nt, Human
aggacaaggaugagggcuuuccacuugagucu

SEQ ID NO: 319980 - RNA, 32 nt, Human
aggacaagggccugggauuugguucguuugcu

SEQ ID NO: 319981 - RNA, 32 nt, Human
aggacaagguccugccuuuggcuccacauugc

SEQ ID NO: 319982 - RNA, 32 nt, Human
aggacaagucagggaccacuugcugaagcacg

SEQ ID NO: 319983 - RNA, 21 nt, Human
aggacaagugagcugguguca

SEQ ID NO: 319984 - RNA, 32 nt, Human
aggacaauaaauucugucaugaacaguucuau

SEQ ID NO: 319985 - RNA, 32 nt, Human
aggacaauccagccucugcccuggaacugcug

SEQ ID NO: 319986 - RNA, 32 nt, Human
aggacacaaaggcauaagagugauauaaugga

SEQ ID NO: 319987 - RNA, 32 nt, Human
aggacacaaguugggcuugcuuagguguuuug

SEQ ID NO: 319988 - RNA, 32 nt, Human
aggacacaaucagaaaugcugaugccacugug

SEQ ID NO: 319989 - RNA, 32 nt, Human
aggacacacagcaaguuaguggcugcaccaga

SEQ ID NO: 319990 - RNA, 32 nt, Human
aggacacacagcaaguuauggcugcaccagaa

SEQ ID NO: 319991 - RNA, 21 nt, Human
aggacacagacccaaaagcca

SEQ ID NO: 319992 - RNA, 32 nt, Human
aggacacagagagguggcuggggcagccugcg

SEQ ID NO: 319993 - RNA, 32 nt, Human
aggacacagaucagaagaaagaaagacaacuu

SEQ ID NO: 319994 - RNA, 32 nt, Human
aggacacagcagaccuguuucucagggauaug

SEQ ID NO: 319995 - RNA, 32 nt, Human
aggacacagcgugggcggccugggcagaaggg

SEQ ID NO: 319996 - RNA, 32 nt, Human
aggacacaggcagagauacgagggaaccgucg

SEQ ID NO: 319997 - RNA, 32 nt, Human
aggacacaggggaugacugagagacagagaga

SEQ ID NO: 319998 - RNA, 32 nt, Human
aggacacaguggugagcaagacuuucaguuau

SEQ ID NO: 319999 - RNA, 31 nt, Human
aggacacauuuucagcaccucaccuucuuuu

SEQ ID NO: 320000 - RNA, 23 nt, Human
aggacaccacaccguccagggcg

SEQ ID NO: 320001 - RNA, 32 nt, Human
aggacaccacagauucaucucagacagugauc

SEQ ID NO: 320002 - RNA, 32 nt, Human
aggacaccaggaggccagggaaagcaucucug

SEQ ID NO: 320003 - RNA, 32 nt, Human
aggacaccauagcggagaacuccugacgccca

SEQ ID NO: 320004 - RNA, 32 nt, Human
aggacacccaagaggaaccaccagccuauccc

SEQ ID NO: 320005 - RNA, 32 nt, Human
aggacaccuaugucaacaggccaaacagccau

SEQ ID NO: 320006 - RNA, 23 nt, Human
aggacaccuggccgccuccagga

SEQ ID NO: 320007 - RNA, 32 nt, Human
aggacaccuuucucugccgccugcugcaucag

SEQ ID NO: 320008 - RNA, 32 nt, Human
aggacacgaguuggccaugaugacauaccaug

SEQ ID NO: 320009 - RNA, 32 nt, Human
aggacacgccccagagcuguggcagauugcag

SEQ ID NO: 320010 - RNA, 32 nt, Human
aggacacgcuggucugagaugagggggagccc

SEQ ID NO: 320011 - RNA, 32 nt, Human
aggacacgugaacacccagacacccacucagg

SEQ ID NO: 320012 - RNA, 32 nt, Human
aggacacuaugggagacuuuuucagaagccuu

SEQ ID NO: 320013 - RNA, 32 nt, Human
aggacacucaguguccaguugcagcuggacuu

SEQ ID NO: 320014 - RNA, 17 nt, Human
aggacacucccaucaga

SEQ ID NO: 320015 - RNA, 32 nt, Human
aggacacuccuuucuaauugcaucaccuucuc

SEQ ID NO: 320016 - RNA, 32 nt, Human
aggacacugacagccuuugauggaggaaccca

SEQ ID NO: 320017 - RNA, 32 nt, Human
aggacacugccuggaacgccuggagcgccucc

SEQ ID NO: 320018 - RNA, 25 nt, Human
aggacacuggcccuuacccagggcg

SEQ ID NO: 320019 - RNA, 32 nt, Human
aggacacuguggccaugccacggagggggcag

SEQ ID NO: 320020 - RNA, 32 nt, Human
aggacagaaagccaccagccaauggagaacaa

SEQ ID NO: 320021 - RNA, 23 nt, Human
aggacagaaaggagacccaggag

SEQ ID NO: 320022 - RNA, 32 nt, Human
aggacagaaccacggugcccagagccaggaag

SEQ ID NO: 320023 - RNA, 18 nt, Human
aggacagaacccaaggag

SEQ ID NO: 320024 - RNA, 32 nt, Human
aggacagaaccgagaagaguuuaggggcaggu

SEQ ID NO: 320025 - RNA, 32 nt, Human
aggacagaacuuugcccucccuucuuccuguc

SEQ ID NO: 320026 - RNA, 32 nt, Human
aggacagaaggugggaccuggcugggauccaa

SEQ ID NO: 320027 - RNA, 32 nt, Human
aggacagaaugaaaaucccuaccuucagagac

SEQ ID NO: 320028 - RNA, 32 nt, Human
aggacagacacagugccucaccuguaauccaa

SEQ ID NO: 320029 - RNA, 32 nt, Human
aggacagacagacagacagacaggggguugua

SEQ ID NO: 320030 - RNA, 32 nt, Human
aggacagacugauucugaguccugggugccgu

SEQ ID NO: 320031 - RNA, 32 nt, Human
aggacagagacacagcaagaugcccagggagu

SEQ ID NO: 320032 - RNA, 32 nt, Human
aggacagagaugaccacaucccugcuggaugc

SEQ ID NO: 320033 - RNA, 32 nt, Human
aggacagagcccaggcgaccuagggcacuauc

SEQ ID NO: 320034 - RNA, 32 nt, Human
aggacagagcucagugccugacugccuagggu

SEQ ID NO: 320035 - RNA, 22 nt, Human
aggacagaucugccgggcugcu

SEQ ID NO: 320036 - RNA, 32 nt, Human
aggacagaugcuggagucagcaugggagcugu

SEQ ID NO: 320037 - RNA, 32 nt, Human
aggacagcaaggcugaggagaauggcucccac

SEQ ID NO: 320038 - RNA, 32 nt, Human
aggacagcaccguccugaucgaugugagcccc

SEQ ID NO: 320039 - RNA, 32 nt, Human
aggacagcagguggaguaggcacagauggaaa

SEQ ID NO: 320040 - RNA, 32 nt, Human
aggacagcaucggagaucacacugcuucacag

SEQ ID NO: 320041 - RNA, 32 nt, Human
aggacagcauggaaagaaggaggcagaagugg

SEQ ID NO: 320042 - RNA, 32 nt, Human
aggacagcauuccugugaccucugccuaccau

SEQ ID NO: 320043 - RNA, 32 nt, Human
aggacagccauggagagaacugagacccacuu

SEQ ID NO: 320044 - RNA, 20 nt, Human
aggacagcccugaggcccag

SEQ ID NO: 320045 - RNA, 32 nt, Human
aggacagccgccagccuccugucugcagaaag

SEQ ID NO: 320046 - RNA, 32 nt, Human
aggacagccugccucugccacagcaaggcugu

SEQ ID NO: 320047 - RNA, 23 nt, Human
aggacagccuucaacugucacca

SEQ ID NO: 320048 - RNA, 32 nt, Human
aggacagcgagaagaaaggaagagaaaugcaa

SEQ ID NO: 320049 - RNA, 32 nt, Human
aggacagcgauucugaccuggaguggacugca

SEQ ID NO: 320050 - RNA, 20 nt, Human
aggacagcuacucucuggcu

SEQ ID NO: 320051 - RNA, 32 nt, Human
aggacagcucagcugcuggcagccugccuggc

SEQ ID NO: 320052 - RNA, 32 nt, Human
aggacagcugcagagguggcaguguguggaca

SEQ ID NO: 320053 - RNA, 32 nt, Human
aggacagcugccaagacagagcugguagaauu

SEQ ID NO: 320054 - RNA, 32 nt, Human
aggacagcugugguuugucacucugaaaccug

SEQ ID NO: 320055 - RNA, 32 nt, Human
aggacagcuuccuauggggaagacagaggcuu

SEQ ID NO: 320056 - RNA, 32 nt, Human
aggacagcuugccucccaggccccuuguggac

SEQ ID NO: 320057 - RNA, 32 nt, Human
aggacaggaacacaaccaaaucaguugcacaa

SEQ ID NO: 320058 - RNA, 32 nt, Human
aggacaggaagugaggagagugagucaaugua

SEQ ID NO: 320059 - RNA, 32 nt, Human
aggacaggacagaucacuugaggucaggaguu

SEQ ID NO: 320060 - RNA, 32 nt, Human
aggacaggacccuggggcuacacuccugcauu

SEQ ID NO: 320061 - RNA, 32 nt, Human
aggacaggacuggcccacuuaguccucaagcu

SEQ ID NO: 320062 - RNA, 32 nt, Human
aggacaggagucuccccaggagauguaucaga

SEQ ID NO: 320063 - RNA, 32 nt, Human
aggacaggaugcgagagcagguuggcggcugg

SEQ ID NO: 320064 - RNA, 32 nt, Human
aggacaggcauccuauccccagccucuuccug

SEQ ID NO: 320065 - RNA, 32 nt, Human
aggacaggccagagaggaggccagcaggccca

SEQ ID NO: 320066 - RNA, 32 nt, Human
aggacaggccugggccuggugcccgaggcccc

SEQ ID NO: 320067 - RNA, 32 nt, Human
aggacaggcggagacgccgggagccaguggcg

SEQ ID NO: 320068 - RNA, 32 nt, Human
aggacaggcugagcuccugggaccagaacccc

SEQ ID NO: 320069 - RNA, 32 nt, Human
aggacaggcuggcugcucagucauucugcagg

SEQ ID NO: 320070 - RNA, 32 nt, Human
aggacagggaggaggaaaaggaggaagaggag

SEQ ID NO: 320071 - RNA, 32 nt, Human
aggacagggauuuuuguucuuguuguucucgu

SEQ ID NO: 320072 - RNA, 32 nt, Human
aggacagggcuaggcaggagaccugcugcucc

SEQ ID NO: 320073 - RNA, 32 nt, Human
aggacagggcucagacgcugaggucccuccga

SEQ ID NO: 320074 - RNA, 32 nt, Human
aggacagggcugagcguggaagggggaggagu

SEQ ID NO: 320075 - RNA, 18 nt, Human
aggacagggcuggcuccu

SEQ ID NO: 320076 - RNA, 32 nt, Human
aggacagggcuguggcuggagaaccugcugcu

SEQ ID NO: 320077 - RNA, 32 nt, Human
aggacagguagguaaagaacagaggaaauaga

SEQ ID NO: 320078 - RNA, 19 nt, Human
aggacagguggccugggca

SEQ ID NO: 320079 - RNA, 32 nt, Human
aggacaggugugagcugccgcacccagccugu

SEQ ID NO: 320080 - RNA, 32 nt, Human
aggacaguaacugccagcugaggaaggagcac

SEQ ID NO: 320081 - RNA, 32 nt, Human
aggacagucacugcaaucucuuuaccaccucc

SEQ ID NO: 320082 - RNA, 22 nt, Human
aggacagugauuagacacgaag

SEQ ID NO: 320083 - RNA, 32 nt, Human
aggacaguggaaaggcaggcagagggagaggc

SEQ ID NO: 320084 - RNA, 31 nt, Human
aggacaguggagagagaaaggcuuccccacc

SEQ ID NO: 320085 - RNA, 32 nt, Human
aggacaguggaugcugcugggccucugccuug

SEQ ID NO: 320086 - RNA, 32 nt, Human
aggacagugggauccuugcaugggggugaugg

SEQ ID NO: 320087 - RNA, 20 nt, Human
aggacaguggggguugggga

SEQ ID NO: 320088 - RNA, 31 nt, Human
aggacaguucuuuuggagguuggaggggcca

SEQ ID NO: 320089 - RNA, 32 nt, Human
aggacauaauuuuaugaaaaaggaggcaucug

SEQ ID NO: 320090 - RNA, 32 nt, Human
aggacauagccaggccaggugcagugacucac

SEQ ID NO: 320091 - RNA, 32 nt, Human
aggacauauagugaugaacauguaaaguuuuu

SEQ ID NO: 320092 - RNA, 21 nt, Human
aggacauauauuuggcugcug

SEQ ID NO: 320093 - RNA, 32 nt, Human
aggacaucauagccacugagaucugggggcug

SEQ ID NO: 320094 - RNA, 32 nt, Human
aggacauccucuccauguucucagcuauccgu

SEQ ID NO: 320095 - RNA, 32 nt, Human
aggacaucgacaccaucuccccaacgcugggc

SEQ ID NO: 320096 - RNA, 19 nt, Human
aggacaucgccaggcucug

SEQ ID NO: 320097 - RNA, 21 nt, Human
aggacaucucugcuuccgcca

SEQ ID NO: 320098 - RNA, 32 nt, Human
aggacaucugcauauaacacacagccgaaguc

SEQ ID NO: 320099 - RNA, 32 nt, Human
aggacaucugguuggauggcucugaugugggg

SEQ ID NO: 320100 - RNA, 32 nt, Human
aggacaucugucucucuggagugucugucugu

SEQ ID NO: 320101 - RNA, 22 nt, Human
aggacaugaagccauuauuaua

SEQ ID NO: 320102 - RNA, 32 nt, Human
aggacaugagaugugggaggggcugggggugg

SEQ ID NO: 320103 - RNA, 32 nt, Human
aggacaugcuccauuuauuuuccauggaagac

SEQ ID NO: 320104 - RNA, 32 nt, Human
aggacaugcuccugcauacuccuggguguccc

SEQ ID NO: 320105 - RNA, 17 nt, Human
aggacaugcugccugaa

SEQ ID NO: 320106 - RNA, 32 nt, Human
aggacaugcuguggaugaagauaaagauggug

SEQ ID NO: 320107 - RNA, 32 nt, Human
aggacauggaagaucuguuucaaggagauuua

SEQ ID NO: 320108 - RNA, 32 nt, Human
aggacauggacaccaaaccaccugccagugac

SEQ ID NO: 320109 - RNA, 30 nt, Human
aggacauggagaaagagcgagagacucugc

SEQ ID NO: 320110 - RNA, 32 nt, Human
aggacauggccguggagggaggcaucaugggc

SEQ ID NO: 320111 - RNA, 32 nt, Human
aggacauggccuuccccgcgaguccauggcca

SEQ ID NO: 320112 - RNA, 30 nt, Human
aggacauggcggaggcaggaaaagugcccu

SEQ ID NO: 320113 - RNA, 32 nt, Human
aggacauguaguccaagguugcauggugaguu

SEQ ID NO: 320114 - RNA, 32 nt, Human
aggacauguccagcauggacagagccagaguu

SEQ ID NO: 320115 - RNA, 18 nt, Human
aggacauucaaaugugaa

SEQ ID NO: 320116 - RNA, 22 nt, Human
aggacauucaucacccagggaa

SEQ ID NO: 320117 - RNA, 32 nt, Human
aggacauugacaaugugcacacugcagguuga

SEQ ID NO: 320118 - RNA, 32 nt, Human
aggacauugagagggaaaaggccucaucgaca

SEQ ID NO: 320119 - RNA, 18 nt, Human
aggacauuggcugggaga

SEQ ID NO: 320120 - RNA, 32 nt, Human
aggacauuggugagaguccaacagacacaauu

SEQ ID NO: 320121 - RNA, 32 nt, Human
aggacauuuuccaggaucucagugugaguauc

SEQ ID NO: 320122 - RNA, 32 nt, Human
aggacauuuucucuuuaaaagaaaguuagguu

SEQ ID NO: 320123 - RNA, 32 nt, Human
aggaccaaacagcaacuuccugccacacacuu

SEQ ID NO: 320124 - RNA, 32 nt, Human
aggaccaaagugcuggauuacaggcgugagcc

SEQ ID NO: 320125 - RNA, 32 nt, Human
aggaccaacauggugaaaccccaucucuacua

SEQ ID NO: 320126 - RNA, 18 nt, Human
aggaccaacuggcuucug

SEQ ID NO: 320127 - RNA, 32 nt, Human
aggaccaaugcagggcugguucuuuuaccccu

SEQ ID NO: 320128 - RNA, 19 nt, Human
aggaccaauuccucauccu

SEQ ID NO: 320129 - RNA, 32 nt, Human
aggaccacacugaugcagcuguccugaaggac

SEQ ID NO: 320130 - RNA, 32 nt, Human
aggaccaccgcuacaccucuugccaggcugca

SEQ ID NO: 320131 - RNA, 32 nt, Human
aggaccacgggaggagguguaggagagaagcg

SEQ ID NO: 320132 - RNA, 32 nt, Human
aggaccacucacugagcaaaucucagccccga

SEQ ID NO: 320133 - RNA, 32 nt, Human
aggaccagaauaaauaauccugccugucauaa

SEQ ID NO: 320134 - RNA, 32 nt, Human
aggaccagaauccucagaaaucugucuucagu

SEQ ID NO: 320135 - RNA, 32 nt, Human
aggaccagacacauccacagccaggcucaugg

SEQ ID NO: 320136 - RNA, 32 nt, Human
aggaccagaguccgucccaggucugucugaca

SEQ ID NO: 320137 - RNA, 18 nt, Human
aggaccagaucccaggag

SEQ ID NO: 320138 - RNA, 32 nt, Human
aggaccagcaucaucuggaggcuggagcaggg

SEQ ID NO: 320139 - RNA, 32 nt, Human
aggaccagcccuggcccugccccgccaucugc

SEQ ID NO: 320140 - RNA, 22 nt, Human
aggaccagccuccgccaccccc

SEQ ID NO: 320141 - RNA, 32 nt, Human
aggaccagccuggacaacauggugagaccucg

SEQ ID NO: 320142 - RNA, 32 nt, Human
aggaccagccugggcaacauagcgagaccccc

SEQ ID NO: 320143 - RNA, 32 nt, Human
aggaccagcuuuggggccuccaccugccaucc

SEQ ID NO: 320144 - RNA, 32 nt, Human
aggaccagcuuuggggccuccaccugccgucc

SEQ ID NO: 320145 - RNA, 32 nt, Human
aggaccaggaaaugguacauggagcuuugagg

SEQ ID NO: 320146 - RNA, 19 nt, Human
aggaccaggacucccuccu

SEQ ID NO: 320147 - RNA, 18 nt, Human
aggaccaggccuucuccu

SEQ ID NO: 320148 - RNA, 32 nt, Human
aggaccagggccuucuggaggaguggcacuac

SEQ ID NO: 320149 - RNA, 32 nt, Human
aggaccagucugggcagcagggccagacacug

SEQ ID NO: 320150 - RNA, 32 nt, Human
aggaccaguuccagagaggaugucaccagucu

SEQ ID NO: 320151 - RNA, 32 nt, Human
aggaccaguuuuuacccaaauauauggguagc

SEQ ID NO: 320152 - RNA, 22 nt, Human
aggaccauauccaccacccucu

SEQ ID NO: 320153 - RNA, 24 nt, Human
aggaccaucuccugguuuccugaa

SEQ ID NO: 320154 - RNA, 32 nt, Human
aggaccaucucucauggcaccuggaggcuugu

SEQ ID NO: 320155 - RNA, 31 nt, Human
aggaccauggcugaggccaucaccuaugcag

SEQ ID NO: 320156 - RNA, 18 nt, Human
aggacccaccgaaccccg

SEQ ID NO: 320157 - RNA, 32 nt, Human
aggacccacugcaccacccuccgcuggcucgg

SEQ ID NO: 320158 - RNA, 32 nt, Human
aggacccacugccgcggggcugggcgagagca

SEQ ID NO: 320159 - RNA, 32 nt, Human
aggacccacugugagcacuccacccacugugg

SEQ ID NO: 320160 - RNA, 32 nt, Human
aggacccagaagcacaagacacaguaauccug

SEQ ID NO: 320161 - RNA, 32 nt, Human
aggacccagagcaggccuguccaugccauucc

SEQ ID NO: 320162 - RNA, 32 nt, Human
aggacccagagggaggcaggcacagccagccu

SEQ ID NO: 320163 - RNA, 21 nt, Human
aggacccagcuggccccaggg

SEQ ID NO: 320164 - RNA, 32 nt, Human
aggacccaggauuugaacccagcuucagugug

SEQ ID NO: 320165 - RNA, 32 nt, Human
aggacccaggccucccaccccacuacggaccg

SEQ ID NO: 320166 - RNA, 32 nt, Human
aggacccaggcucugccaacauuguggacauc

SEQ ID NO: 320167 - RNA, 20 nt, Human
aggacccaggggaaccgcga

SEQ ID NO: 320168 - RNA, 23 nt, Human
aggacccaggucugcugcccagg

SEQ ID NO: 320169 - RNA, 32 nt, Human
aggacccagguggcaccagcaguaguggaauc

SEQ ID NO: 320170 - RNA, 32 nt, Human
aggacccagugagggaaaugggaacauaccag

SEQ ID NO: 320171 - RNA, 32 nt, Human
aggacccaucaaugauggugacuuuagcagaa

SEQ ID NO: 320172 - RNA, 32 nt, Human
aggaccccaccacugcacuccagccuggauga

SEQ ID NO: 320173 - RNA, 32 nt, Human
aggaccccagccugccuacauuugcagacaga

SEQ ID NO: 320174 - RNA, 21 nt, Human
aggaccccaggcccaccuccu

SEQ ID NO: 320175 - RNA, 18 nt, Human
aggacccccaggaccccg

SEQ ID NO: 320176 - RNA, 32 nt, Human
aggacccccaggcuuggccugugauugcgcaa

SEQ ID NO: 320177 - RNA, 32 nt, Human
aggacccccaugcuguggugacuuuaaugaau

SEQ ID NO: 320178 - RNA, 21 nt, Human
aggaccccccaugucacggca

SEQ ID NO: 320179 - RNA, 18 nt, Human
aggacccccucuccucuu

SEQ ID NO: 320180 - RNA, 32 nt, Human
aggacccccugccuagcuugacggcugcucag

SEQ ID NO: 320181 - RNA, 23 nt, Human
aggaccccgggacagaaccccgg

SEQ ID NO: 320182 - RNA, 32 nt, Human
aggaccccuccaggccccucucuccuggaagu

SEQ ID NO: 320183 - RNA, 32 nt, Human
aggaccccuuccugccauacccaccaaggucc

SEQ ID NO: 320184 - RNA, 32 nt, Human
aggacccgaaaucacagacauuagcaaugaug

SEQ ID NO: 320185 - RNA, 32 nt, Human
aggacccgcuggccccugggcccagccugggc

SEQ ID NO: 320186 - RNA, 32 nt, Human
aggacccgggcagggcuggagcugggcuggga

SEQ ID NO: 320187 - RNA, 32 nt, Human
aggacccggggaggggucccgagaggcucccc

SEQ ID NO: 320188 - RNA, 32 nt, Human
aggacccucagcaccuucugcuggagagaggu

SEQ ID NO: 320189 - RNA, 32 nt, Human
aggacccuccacccucucucucugucucagau

SEQ ID NO: 320190 - RNA, 21 nt, Human
aggacccucccaccauccccu

SEQ ID NO: 320191 - RNA, 23 nt, Human
aggacccuccccugcuccaugug

SEQ ID NO: 320192 - RNA, 23 nt, Human
aggacccucccugcccacccccu

SEQ ID NO: 320193 - RNA, 32 nt, Human
aggacccuccgagccagucuuuuucuggagga

SEQ ID NO: 320194 - RNA, 32 nt, Human
aggacccucucuuccuucuuucaaccuuccgg

SEQ ID NO: 320195 - RNA, 32 nt, Human
aggacccugcagccuuccgcaguguuuguguc

SEQ ID NO: 320196 - RNA, 32 nt, Human
aggacccugcagcugugcugccgccaccucug

SEQ ID NO: 320197 - RNA, 25 nt, Human
aggacccuggacucugcucaccccc

SEQ ID NO: 320198 - RNA, 32 nt, Human
aggacccuggcagaaucagagacaaaucugag

SEQ ID NO: 320199 - RNA, 32 nt, Human
aggacccugggcaggguguggggcauccggua

SEQ ID NO: 320200 - RNA, 32 nt, Human
aggacccugugcaagguuauuugcaggcaggg

SEQ ID NO: 320201 - RNA, 32 nt, Human
aggacccuuuccaggcccacccccucugugau

SEQ ID NO: 320202 - RNA, 32 nt, Human
aggaccgacgcgacgcaugccucccggccacc

SEQ ID NO: 320203 - RNA, 32 nt, Human
aggaccgagauacauggccacccaugacccgg

SEQ ID NO: 320204 - RNA, 32 nt, Human
aggaccgaggccacauacuccccauucucucg

SEQ ID NO: 320205 - RNA, 27 nt, Human
aggaccggcgugacagccuccagaaug

SEQ ID NO: 320206 - RNA, 32 nt, Human
aggaccggggcugaggccacacagauaggagc

SEQ ID NO: 320207 - RNA, 21 nt, Human
aggaccgggggucucccuccu

SEQ ID NO: 320208 - RNA, 32 nt, Human
aggaccguagcucuccuggccuggagagugug

SEQ ID NO: 320209 - RNA, 19 nt, Human
aggaccgucccacccugcu

SEQ ID NO: 320210 - RNA, 32 nt, Human
aggaccgucggugggcgauggcugcaacggug

SEQ ID NO: 320211 - RNA, 22 nt, Human
aggaccgugaugacaaccccga

SEQ ID NO: 320212 - RNA, 32 nt, Human
aggaccuaaauaaacugugagccaccuuuucu

SEQ ID NO: 320213 - RNA, 32 nt, Human
aggaccuaggcagggaugaggaagcacacaaa

SEQ ID NO: 320214 - RNA, 32 nt, Human
aggaccuaggguggggaagggagggucucuug

SEQ ID NO: 320215 - RNA, 32 nt, Human
aggaccucacccaggauggacugauggaccug

SEQ ID NO: 320216 - RNA, 32 nt, Human
aggaccucacuuggcccugcaagccgcuuuuc

SEQ ID NO: 320217 - RNA, 20 nt, Human
aggaccucagaacccaggag

SEQ ID NO: 320218 - RNA, 32 nt, Human
aggaccucagaccuccccagcccuggguuucu

SEQ ID NO: 320219 - RNA, 32 nt, Human
aggaccucaggcugcugucauauaucacccgu

SEQ ID NO: 320220 - RNA, 32 nt, Human
aggaccucauuucuuauagccucuccugugau

SEQ ID NO: 320221 - RNA, 32 nt, Human
aggaccuccaaccugcuggugaucagggugcu

SEQ ID NO: 320222 - RNA, 32 nt, Human
aggaccucccagaguuaugagcccugauuuug

SEQ ID NO: 320223 - RNA, 19 nt, Human
aggaccucccagauaagac

SEQ ID NO: 320224 - RNA, 32 nt, Human
aggaccuccucuucccccuuccaaauaauaaa

SEQ ID NO: 320225 - RNA, 32 nt, Human
aggaccucuaggcuguggcuggccuugugcag

SEQ ID NO: 320226 - RNA, 32 nt, Human
aggaccucuggcccuacuaggcuguagacuca

SEQ ID NO: 320227 - RNA, 32 nt, Human
aggaccucuucuagcuccuuuuuaucgcauuu

SEQ ID NO: 320228 - RNA, 32 nt, Human
aggaccugacagaagucagggaagagucccug

SEQ ID NO: 320229 - RNA, 32 nt, Human
aggaccugacccagaaauugagguccccgcug

SEQ ID NO: 320230 - RNA, 32 nt, Human
aggaccugacucuguguggacgcaaagauagg

SEQ ID NO: 320231 - RNA, 32 nt, Human
aggaccugagccaggaaugcaggauggcggcg

SEQ ID NO: 320232 - RNA, 32 nt, Human
aggaccugcaacuucagugcuucugggauaac

SEQ ID NO: 320233 - RNA, 32 nt, Human
aggaccugccagcugcuucaugaacaaguccc

SEQ ID NO: 320234 - RNA, 32 nt, Human
aggaccugcccagguaugccuuccagugaugc

SEQ ID NO: 320235 - RNA, 32 nt, Human
aggaccuggaaacugcuguuugcccugguauu

SEQ ID NO: 320236 - RNA, 32 nt, Human
aggaccuggaggggugcucuguggaaacugcu

SEQ ID NO: 320237 - RNA, 19 nt, Human
aggaccuggcaacccagga

SEQ ID NO: 320238 - RNA, 32 nt, Human
aggaccugguggcugagccaggagaugcacac

SEQ ID NO: 320239 - RNA, 32 nt, Human
aggaccuguaagaacugaaaacucuuccacuu

SEQ ID NO: 320240 - RNA, 21 nt, Human
aggaccugucaggcccagggg

SEQ ID NO: 320241 - RNA, 32 nt, Human
aggaccuguccacuucugugacaaaucaacgg

SEQ ID NO: 320242 - RNA, 32 nt, Human
aggaccuucccaagucucccuuucccugucug

SEQ ID NO: 320243 - RNA, 32 nt, Human
aggaccuuuggaaaucagcaauguggugaugg

SEQ ID NO: 320244 - RNA, 32 nt, Human
aggacgaagacugagacugacacuucugcucc

SEQ ID NO: 320245 - RNA, 32 nt, Human
aggacgaagaggaggaggaugaggaggacaca

SEQ ID NO: 320246 - RNA, 32 nt, Human
aggacgaagcucaacagaaaaccuacagcaca

SEQ ID NO: 320247 - RNA, 32 nt, Human
aggacgacgagcaggagcugcucugcgccagg

SEQ ID NO: 320248 - RNA, 32 nt, Human
aggacgacuucugcuuuuguuguuguuguugu

SEQ ID NO: 320249 - RNA, 32 nt, Human
aggacgagaggacgaccuucucugauagagga

SEQ ID NO: 320250 - RNA, 32 nt, Human
aggacgaggaggcagcaggagcagugacggug

SEQ ID NO: 320251 - RNA, 32 nt, Human
aggacgaggagugagggguccagagggugggg

SEQ ID NO: 320252 - RNA, 32 nt, Human
aggacgaggagugggaugacugagggacgugg

SEQ ID NO: 320253 - RNA, 32 nt, Human
aggacgaggaugagggagaagaauaagcagcu

SEQ ID NO: 320254 - RNA, 32 nt, Human
aggacgaggugcuguuggcaauugcagcugcg

SEQ ID NO: 320255 - RNA, 32 nt, Human
aggacgaugaugaagagacugccccucccauu

SEQ ID NO: 320256 - RNA, 22 nt, Human
aggacgauggggcaugaccuca

SEQ ID NO: 320257 - RNA, 32 nt, Human
aggacgauguaauccuugccaucguaagcaag

SEQ ID NO: 320258 - RNA, 21 nt, Human
aggacgauguggagagcaaga

SEQ ID NO: 320259 - RNA, 32 nt, Human
aggacgcacaugcagacccgcacgcacgcacg

SEQ ID NO: 320260 - RNA, 32 nt, Human
aggacgcaggagguggagccggccgggugcuc

SEQ ID NO: 320261 - RNA, 32 nt, Human
aggacgcauguggagcgcauggggagggaagg

SEQ ID NO: 320262 - RNA, 32 nt, Human
aggacgccagcagcagcagcaagcucuucagu

SEQ ID NO: 320263 - RNA, 20 nt, Human
aggacgccgacccugccugg

SEQ ID NO: 320264 - RNA, 32 nt, Human
aggacgccgcccccggccgggucuccacuucu

SEQ ID NO: 320265 - RNA, 20 nt, Human
aggacgccgggguuccagga

SEQ ID NO: 320266 - RNA, 32 nt, Human
aggacgcgcacagcccgaggaggcagagccaa

SEQ ID NO: 320267 - RNA, 32 nt, Human
aggacgcgccuuguuaaccaaauguuuacgag

SEQ ID NO: 320268 - RNA, 32 nt, Human
aggacgcggccaccccaggccuuuccagagca

SEQ ID NO: 320269 - RNA, 21 nt, Human
aggacgcgggaggcgcacuug

SEQ ID NO: 320270 - RNA, 32 nt, Human
aggacgcgucugggcuccccuaggcaaagguc

SEQ ID NO: 320271 - RNA, 21 nt, Human
aggacgcuacagcuccaggcg

SEQ ID NO: 320272 - RNA, 32 nt, Human
aggacgcucccagggccccagaggggcgaauu

SEQ ID NO: 320273 - RNA, 22 nt, Human
aggacgcuccgaaacacugugu

SEQ ID NO: 320274 - RNA, 32 nt, Human
aggacgcugagcucgguucaugcagcaggcug

SEQ ID NO: 320275 - RNA, 32 nt, Human
aggacgcugcagcucucuccagcccuguuggc

SEQ ID NO: 320276 - RNA, 32 nt, Human
aggacgcugcagcugaaacguuccggcuccgg

SEQ ID NO: 320277 - RNA, 32 nt, Human
aggacgcugggagccugucaguuuaugaucug

SEQ ID NO: 320278 - RNA, 32 nt, Human
aggacgcugugaucuccaccuugaagccaggc

SEQ ID NO: 320279 - RNA, 32 nt, Human
aggacgcugugguguggaggcagcagccuggg

SEQ ID NO: 320280 - RNA, 32 nt, Human
aggacgcuuccucauuucucuucaccaaaacc

SEQ ID NO: 320281 - RNA, 32 nt, Human
aggacggaaggaaggaaggaaggaaggaagga

SEQ ID NO: 320282 - RNA, 32 nt, Human
aggacggagagcucucccuugguucggaguca

SEQ ID NO: 320283 - RNA, 32 nt, Human
aggacggaggcugcaugcccgaggaccaggcc

SEQ ID NO: 320284 - RNA, 21 nt, Human
aggacggccggccggccgguc

SEQ ID NO: 320285 - RNA, 32 nt, Human
aggacggccuguguccucacuacgccugaggc

SEQ ID NO: 320286 - RNA, 32 nt, Human
aggacgggaggcagagccggcucagagcaggu

SEQ ID NO: 320287 - RNA, 20 nt, Human
aggacgggcacacccaggga

SEQ ID NO: 320288 - RNA, 32 nt, Human
aggacggggaggacgcgccgcggccgggcagg

SEQ ID NO: 320289 - RNA, 32 nt, Human
aggacggggcaggcagcaccugguaggcacag

SEQ ID NO: 320290 - RNA, 32 nt, Human
aggacggucccuggucggguccuggcugaagc

SEQ ID NO: 320291 - RNA, 18 nt, Human
aggacgguggcugggagg

SEQ ID NO: 320292 - RNA, 32 nt, Human
aggacguagaguuauugaaaaugcagaugguu

SEQ ID NO: 320293 - RNA, 32 nt, Human
aggacguccgggacauccaggaccgcaguauu

SEQ ID NO: 320294 - RNA, 32 nt, Human
aggacgugagagaagggagaugggagagagau

SEQ ID NO: 320295 - RNA, 32 nt, Human
aggacgugagcgcagagcagagccuggagaag

SEQ ID NO: 320296 - RNA, 32 nt, Human
aggacgugcagagggugcaggagcuggccgag

SEQ ID NO: 320297 - RNA, 32 nt, Human
aggacgugccuuguuaaccaaauguuuacaag

SEQ ID NO: 320298 - RNA, 32 nt, Human
aggacgugccuuguuaaccaaauguuugcaag

SEQ ID NO: 320299 - RNA, 32 nt, Human
aggacgugggacuucucagacgucaggagagu

SEQ ID NO: 320300 - RNA, 32 nt, Human
aggacguuaugacuuuucuccuuugcaagacu

SEQ ID NO: 320301 - RNA, 31 nt, Human
aggacguuccucaaggaggugaaggucaugc

SEQ ID NO: 320302 - RNA, 31 nt, Human
aggacuaacagcugacugaccaaagcagccc

SEQ ID NO: 320303 - RNA, 32 nt, Human
aggacuacaaggcacaccaccaugccuggcua

SEQ ID NO: 320304 - RNA, 32 nt, Human
aggacuacagaacauccaugauagcagucuuc

SEQ ID NO: 320305 - RNA, 23 nt, Human
aggacuagccccacucccccaug

SEQ ID NO: 320306 - RNA, 32 nt, Human
aggacuagccugggcaacauagcaagauccca

SEQ ID NO: 320307 - RNA, 32 nt, Human
aggacuaggaaagagcaguggcaggggccaga

SEQ ID NO: 320308 - RNA, 32 nt, Human
aggacuaguauggggugggaggccccacccuu

SEQ ID NO: 320309 - RNA, 32 nt, Human
aggacuauaacuuauucaaaggccaaugauac

SEQ ID NO: 320310 - RNA, 32 nt, Human
aggacuaucacacccagcccauguggcuaaaa

SEQ ID NO: 320311 - RNA, 32 nt, Human
aggacuaucuuugaacauaaguuaauuaacua

SEQ ID NO: 320312 - RNA, 32 nt, Human
aggacuauguagaaguagaaagaaaagaaaaa

SEQ ID NO: 320313 - RNA, 32 nt, Human
aggacucaaguccuggaauguccuccacuggu

SEQ ID NO: 320314 - RNA, 32 nt, Human
aggacucacacacggugagaaacccuauaaau

SEQ ID NO: 320315 - RNA, 32 nt, Human
aggacucacagucugccagacacugcuaggua

SEQ ID NO: 320316 - RNA, 32 nt, Human
aggacucacccaguuggaauucugggugggcu

SEQ ID NO: 320317 - RNA, 32 nt, Human
aggacucacuguauggugcccucuccaaaggg

SEQ ID NO: 320318 - RNA, 32 nt, Human
aggacucagagaccccagcagaggaggacagu

SEQ ID NO: 320319 - RNA, 32 nt, Human
aggacucagcacaccggcauccccaccugcug

SEQ ID NO: 320320 - RNA, 23 nt, Human
aggacucagcaguggccuggaca

SEQ ID NO: 320321 - RNA, 32 nt, Human
aggacucagccugaaggagcugcuccugaggc

SEQ ID NO: 320322 - RNA, 32 nt, Human
aggacucagccuggccucugccuggccuguuu

SEQ ID NO: 320323 - RNA, 32 nt, Human
aggacucaggaaaauaaaaagcauuuucuauu

SEQ ID NO: 320324 - RNA, 32 nt, Human
aggacucaggcagagggacucagggaugggga

SEQ ID NO: 320325 - RNA, 32 nt, Human
aggacucaguaccuccagcacacccuucucau

SEQ ID NO: 320326 - RNA, 32 nt, Human
aggacucagucaccuccagcuucuccaugacc

SEQ ID NO: 320327 - RNA, 32 nt, Human
aggacucaucacaucuauucggauauucuguu

SEQ ID NO: 320328 - RNA, 32 nt, Human
aggacucauccagcaaaguugccugggauuca

SEQ ID NO: 320329 - RNA, 32 nt, Human
aggacucauccagguucccagcgaggcacuga

SEQ ID NO: 320330 - RNA, 32 nt, Human
aggacucauucaacccaguaccauguggcuug

SEQ ID NO: 320331 - RNA, 19 nt, Human
aggacucauucuuuccucc

SEQ ID NO: 320332 - RNA, 32 nt, Human
aggacucauuguuccacccccaaccaauuuga

SEQ ID NO: 320333 - RNA, 32 nt, Human
aggacucauuucuugccuugaauaaccauuuu

SEQ ID NO: 320334 - RNA, 32 nt, Human
aggacuccagagagucaggucaaccccgagga

SEQ ID NO: 320335 - RNA, 32 nt, Human
aggacucccaaaaccagagacaccaggagccu

SEQ ID NO: 320336 - RNA, 25 nt, Human
aggacucccaccucugccccaaggg

SEQ ID NO: 320337 - RNA, 32 nt, Human
aggacuccccagccaaggggucccccaaaggc

SEQ ID NO: 320338 - RNA, 32 nt, Human
aggacucccggagccugugcagccuugguggc

SEQ ID NO: 320339 - RNA, 32 nt, Human
aggacuccuccugggccuggugcuucgagguc

SEQ ID NO: 320340 - RNA, 32 nt, Human
aggacuccucgcugcugaccaggcucuaugaa

SEQ ID NO: 320341 - RNA, 32 nt, Human
aggacuccugcacugacuccugaggacuuuug

SEQ ID NO: 320342 - RNA, 32 nt, Human
aggacucggcguauccgccaccagggacauua

SEQ ID NO: 320343 - RNA, 19 nt, Human
aggacucuacccuccuccc

SEQ ID NO: 320344 - RNA, 32 nt, Human
aggacucuaucucauccuccccucgacaagcc

SEQ ID NO: 320345 - RNA, 32 nt, Human
aggacucuccauugcuaccaaacuccuccugc

SEQ ID NO: 320346 - RNA, 32 nt, Human
aggacucucccaguggagcucugcaggccagg

SEQ ID NO: 320347 - RNA, 32 nt, Human
aggacucuccccugccucuggggagggggcca

SEQ ID NO: 320348 - RNA, 32 nt, Human
aggacucucucccaccacauacagcacagcac

SEQ ID NO: 320349 - RNA, 32 nt, Human
aggacucugaccccagcauucucaggcaccag

SEQ ID NO: 320350 - RNA, 32 nt, Human
aggacucugcauuuccaacaagcucccagaug

SEQ ID NO: 320351 - RNA, 32 nt, Human
aggacucugcauuucuuacagauucccaggug

SEQ ID NO: 320352 - RNA, 21 nt, Human
aggacucugccacucuaggca

SEQ ID NO: 320353 - RNA, 32 nt, Human
aggacucugcucccuggggcugcuucuagcuc

SEQ ID NO: 320354 - RNA, 32 nt, Human
aggacucuguccugugucaccucucuccaggu

SEQ ID NO: 320355 - RNA, 32 nt, Human
aggacucuuaaaggaguauguuucuuggcuuu

SEQ ID NO: 320356 - RNA, 19 nt, Human
aggacucuucaguguuuau

SEQ ID NO: 320357 - RNA, 32 nt, Human
aggacucuugccguagauuaagccagucaguu

SEQ ID NO: 320358 - RNA, 32 nt, Human
aggacucuugugaaaagagaggauauguucac

SEQ ID NO: 320359 - RNA, 22 nt, Human
aggacucuuugcugucccgcaa

SEQ ID NO: 320360 - RNA, 32 nt, Human
aggacucuuuuggugugacuucccucuguauu

SEQ ID NO: 320361 - RNA, 32 nt, Human
aggacugaaaccagaaucgcugaaagcccuug

SEQ ID NO: 320362 - RNA, 32 nt, Human
aggacugaaaccuccacugcaggcugguuuua

SEQ ID NO: 320363 - RNA, 32 nt, Human
aggacugaaagagaccucagaggucucuaucc

SEQ ID NO: 320364 - RNA, 32 nt, Human
aggacugaagacaguugugggauaucugucau

SEQ ID NO: 320365 - RNA, 32 nt, Human
aggacugaagcagccuuuguuaaagggaagca

SEQ ID NO: 320366 - RNA, 32 nt, Human
aggacugaaguccaaaugcaucucacggggcu

SEQ ID NO: 320367 - RNA, 32 nt, Human
aggacugaaucgccacuacagccugggugcaa

SEQ ID NO: 320368 - RNA, 32 nt, Human
aggacugacaggcagagaauaggaauaugcag

SEQ ID NO: 320369 - RNA, 32 nt, Human
aggacugagaagcagauaacaagagugacgcu

SEQ ID NO: 320370 - RNA, 18 nt, Human
aggacugagacccaggag

SEQ ID NO: 320371 - RNA, 32 nt, Human
aggacugagcacacaggugaacuccagaaaga

SEQ ID NO: 320372 - RNA, 32 nt, Human
aggacugagcagcuaggcgcgagcgaaaacaa

SEQ ID NO: 320373 - RNA, 32 nt, Human
aggacugagcccaggagagcggggacagucau

SEQ ID NO: 320374 - RNA, 32 nt, Human
aggacugaucacuguccuugccucuaggaggg

SEQ ID NO: 320375 - RNA, 32 nt, Human
aggacugaugguuuuuauuauuacuaacccuc

SEQ ID NO: 320376 - RNA, 32 nt, Human
aggacugcauugcucaggcauuuucuaaacuc

SEQ ID NO: 320377 - RNA, 32 nt, Human
aggacugcccucuccccugcuccuggcacucu

SEQ ID NO: 320378 - RNA, 32 nt, Human
aggacugccugggcagggucugccccucccac

SEQ ID NO: 320379 - RNA, 32 nt, Human
aggacugcgggaaggcgcgggagccaggggcc

SEQ ID NO: 320380 - RNA, 32 nt, Human
aggacugcuccccuugcacagccuacccuucc

SEQ ID NO: 320381 - RNA, 32 nt, Human
aggacugcuguguguggguguguuccucagac

SEQ ID NO: 320382 - RNA, 32 nt, Human
aggacugcuugggcccaggaauucaggaccag

SEQ ID NO: 320383 - RNA, 32 nt, Human
aggacuggaaccuuggggagccuugggugagg

SEQ ID NO: 320384 - RNA, 32 nt, Human
aggacuggaaggaaaaagagacagguuagagg

SEQ ID NO: 320385 - RNA, 32 nt, Human
aggacuggaaggcaaggacuaaggugaaagcu

SEQ ID NO: 320386 - RNA, 20 nt, Human
aggacuggagagagguggaa

SEQ ID NO: 320387 - RNA, 32 nt, Human
aggacuggagccaagauacuggugggggagau

SEQ ID NO: 320388 - RNA, 32 nt, Human
aggacuggaugcuggggaggagccggggccac

SEQ ID NO: 320389 - RNA, 32 nt, Human
aggacuggauuuuccagauccuugugguccug

SEQ ID NO: 320390 - RNA, 32 nt, Human
aggacuggcaucgggggugcacuggcaagggc

SEQ ID NO: 320391 - RNA, 32 nt, Human
aggacuggcucuccauuuccugccucuccuuu

SEQ ID NO: 320392 - RNA, 31 nt, Human
aggacugggaaacuguguugaagcuccugac

SEQ ID NO: 320393 - RNA, 32 nt, Human
aggacugggaagggaggcaggaggcuucucug

SEQ ID NO: 320394 - RNA, 18 nt, Human
aggacugggagccaggag

SEQ ID NO: 320395 - RNA, 32 nt, Human
aggacugggagguggcggcagcgggcgaggac

SEQ ID NO: 320396 - RNA, 26 nt, Human
aggacugggaguccagagaccugggc

SEQ ID NO: 320397 - RNA, 32 nt, Human
aggacugggcugggcacuguggcucacgccug

SEQ ID NO: 320398 - RNA, 32 nt, Human
aggacugggucagagagcagggaguggcuggg

SEQ ID NO: 320399 - RNA, 24 nt, Human
aggacugguacccacaaagcaaca

SEQ ID NO: 320400 - RNA, 32 nt, Human
aggacugguucugccacacacugaauuccagc

SEQ ID NO: 320401 - RNA, 32 nt, Human
aggacugguuuggaaacagaccccuauuucag

SEQ ID NO: 320402 - RNA, 32 nt, Human
aggacuguccgcgggguugagggaaggggccg

SEQ ID NO: 320403 - RNA, 32 nt, Human
aggacugugacacugcacuccagccugggcaa

SEQ ID NO: 320404 - RNA, 32 nt, Human
aggacuguggaguccgacaaagcuacuugaag

SEQ ID NO: 320405 - RNA, 32 nt, Human
aggacuguggccauggugugugcaguggcccc

SEQ ID NO: 320406 - RNA, 32 nt, Human
aggacuguggcccuugugggggccaaggcaca

SEQ ID NO: 320407 - RNA, 32 nt, Human
aggacugugugaaccaacaaggggccaguuuu

SEQ ID NO: 320408 - RNA, 32 nt, Human
aggacuguguuuacuaaaguguguaaauguuu

SEQ ID NO: 320409 - RNA, 32 nt, Human
aggacuguuaucuaugagcaugcauggcuaua

SEQ ID NO: 320410 - RNA, 32 nt, Human
aggacuguuccuugguguuugagggaaacuuu

SEQ ID NO: 320411 - RNA, 24 nt, Human
aggacuguucuggggccagcuucc

SEQ ID NO: 320412 - RNA, 32 nt, Human
aggacuguuuucaugcugccugugccucggcu

SEQ ID NO: 320413 - RNA, 32 nt, Human
aggacuuaccacuaggaaccaccaagaccaau

SEQ ID NO: 320414 - RNA, 32 nt, Human
aggacuuacugaggcugcaggggagugagacc

SEQ ID NO: 320415 - RNA, 32 nt, Human
aggacuuagaugcccagaugaagagggaaagc

SEQ ID NO: 320416 - RNA, 32 nt, Human
aggacuuagggaggcagaguggaggaagugag

SEQ ID NO: 320417 - RNA, 32 nt, Human
aggacuucaagaccagccuaggcaacauggug

SEQ ID NO: 320418 - RNA, 32 nt, Human
aggacuucaagaccagccuggccaacauggug

SEQ ID NO: 320419 - RNA, 32 nt, Human
aggacuucagaaugccgugggcuccagcgaag

SEQ ID NO: 320420 - RNA, 32 nt, Human
aggacuuccagaccagccuggucaacauggug

SEQ ID NO: 320421 - RNA, 32 nt, Human
aggacuuccagccucccauccucugguggucu

SEQ ID NO: 320422 - RNA, 20 nt, Human
aggacuuccaggaggacccc

SEQ ID NO: 320423 - RNA, 21 nt, Human
aggacuuccaguauuuauuga

SEQ ID NO: 320424 - RNA, 32 nt, Human
aggacuuccugccaaucucuucugugaggcau

SEQ ID NO: 320425 - RNA, 32 nt, Human
aggacuucggguccccucaccccgggcggaug

SEQ ID NO: 320426 - RNA, 32 nt, Human
aggacuucuagguaggagguagacccuuuagc

SEQ ID NO: 320427 - RNA, 32 nt, Human
aggacuucuccuuuuucucucccuccagagcu

SEQ ID NO: 320428 - RNA, 32 nt, Human
aggacuucucugucuggagacagccccagacc

SEQ ID NO: 320429 - RNA, 32 nt, Human
aggacuucugcagcuuaucuucuggugucccu

SEQ ID NO: 320430 - RNA, 32 nt, Human
aggacuucugugacuccugggccacagagguc

SEQ ID NO: 320431 - RNA, 32 nt, Human
aggacuugaauagaccuuuuacagagaagaua

SEQ ID NO: 320432 - RNA, 32 nt, Human
aggacuugacuuuuguuuagucuuucuaagaa

SEQ ID NO: 320433 - RNA, 32 nt, Human
aggacuugaggcaugcugggccuggugcagug

SEQ ID NO: 320434 - RNA, 32 nt, Human
aggacuugaguguugcuguuuauucacauuug

SEQ ID NO: 320435 - RNA, 32 nt, Human
aggacuugcuggggaccagaauccaaacggcc

SEQ ID NO: 320436 - RNA, 32 nt, Human
aggacuuggaacacagucagugguagguaauc

SEQ ID NO: 320437 - RNA, 32 nt, Human
aggacuuggaagcagaguucagcagugaacuc

SEQ ID NO: 320438 - RNA, 32 nt, Human
aggacuuggaaguggggacaucaggguagcug

SEQ ID NO: 320439 - RNA, 32 nt, Human
aggacuuggaauuggggacaucaggguagcug

SEQ ID NO: 320440 - RNA, 32 nt, Human
aggacuuggaccgcuucagccugggcugggag

SEQ ID NO: 320441 - RNA, 32 nt, Human
aggacuugggagaaggauggggucuuaggaag

SEQ ID NO: 320442 - RNA, 22 nt, Human
aggacuuggggccuaucugcca

SEQ ID NO: 320443 - RNA, 32 nt, Human
aggacuuguccuugauccuuccagaaaccacc

SEQ ID NO: 320444 - RNA, 32 nt, Human
aggacuugucucugugcugaaagcaaauagca

SEQ ID NO: 320445 - RNA, 19 nt, Human
aggacuugugccauucuca

SEQ ID NO: 320446 - RNA, 22 nt, Human
aggacuuguuagucuccagaac

SEQ ID NO: 320447 - RNA, 32 nt, Human
aggacuuucagagaaagagcacuguggguggc

SEQ ID NO: 320448 - RNA, 32 nt, Human
aggacuuuccacuccuggcugagagaggaaga

SEQ ID NO: 320449 - RNA, 32 nt, Human
aggacuuucucccaggggaagcccccagcccu

SEQ ID NO: 320450 - RNA, 32 nt, Human
aggacuuugagaccagccuggccaacauggua

SEQ ID NO: 320451 - RNA, 32 nt, Human
aggacuuugcugcugcuauugcacuucaccag

SEQ ID NO: 320452 - RNA, 32 nt, Human
aggacuuuuagauuuagugaagaugguagggu

SEQ ID NO: 320453 - RNA, 32 nt, Human
aggagaaaaaccaaugacauuccacuggcaag

SEQ ID NO: 320454 - RNA, 17 nt, Human
aggagaaaaaguguagg
